United States Patent Application Publication US 2015/0232836 A1 - sequence listing, part 24

SEQ ID NO: 879724 - DNA, 15 bp, Homo sapiens
atctgctttgcctcc

SEQ ID NO: 879725 - DNA, 15 bp, Homo sapiens
catctgctttgcctc

SEQ ID NO: 879726 - DNA, 15 bp, Homo sapiens
gcatctgctttgcct

SEQ ID NO: 879727 - DNA, 15 bp, Homo sapiens
agcatctgctttgcc

SEQ ID NO: 879728 - DNA, 15 bp, Homo sapiens
aagcatctgctttgc

SEQ ID NO: 879729 - DNA, 15 bp, Homo sapiens
gaagcatctgctttg

SEQ ID NO: 879730 - DNA, 15 bp, Homo sapiens
ggaagcatctgcttt

SEQ ID NO: 879731 - DNA, 15 bp, Homo sapiens
tggaagcatctgctt

SEQ ID NO: 879732 - DNA, 15 bp, Homo sapiens
atggaagcatctgct

SEQ ID NO: 879733 - DNA, 15 bp, Homo sapiens
gatggaagcatctgc

SEQ ID NO: 879734 - DNA, 15 bp, Homo sapiens
agatggaagcatctg

SEQ ID NO: 879735 - DNA, 15 bp, Homo sapiens
aagatggaagcatct

SEQ ID NO: 879736 - DNA, 15 bp, Homo sapiens
taagatggaagcatc

SEQ ID NO: 879737 - DNA, 15 bp, Homo sapiens
gtaagatggaagcat

SEQ ID NO: 879738 - DNA, 15 bp, Homo sapiens
tgtaagatggaagca

SEQ ID NO: 879739 - DNA, 15 bp, Homo sapiens
ctgtaagatggaagc

SEQ ID NO: 879740 - DNA, 15 bp, Homo sapiens
tctgtaagatggaag

SEQ ID NO: 879741 - DNA, 15 bp, Homo sapiens
ttctgtaagatggaa

SEQ ID NO: 879742 - DNA, 15 bp, Homo sapiens
gttctgtaagatgga

SEQ ID NO: 879743 - DNA, 15 bp, Homo sapiens
agttctgtaagatgg

SEQ ID NO: 879744 - DNA, 15 bp, Homo sapiens
tagttctgtaagatg

SEQ ID NO: 879745 - DNA, 15 bp, Homo sapiens
ctagttctgtaagat

SEQ ID NO: 879746 - DNA, 15 bp, Homo sapiens
actagttctgtaaga

SEQ ID NO: 879747 - DNA, 15 bp, Homo sapiens
cactagttctgtaag

SEQ ID NO: 879748 - DNA, 15 bp, Homo sapiens
tcactagttctgtaa

SEQ ID NO: 879749 - DNA, 15 bp, Homo sapiens
ctcactagttctgta

SEQ ID NO: 879750 - DNA, 15 bp, Homo sapiens
cctcactagttctgt

SEQ ID NO: 879751 - DNA, 15 bp, Homo sapiens
gcctcactagttctg

SEQ ID NO: 879752 - DNA, 15 bp, Homo sapiens
ggcctcactagttct

SEQ ID NO: 879753 - DNA, 15 bp, Homo sapiens
gggcctcactagttc

SEQ ID NO: 879754 - DNA, 15 bp, Homo sapiens
cgggcctcactagtt

SEQ ID NO: 879755 - DNA, 15 bp, Homo sapiens
tcgggcctcactagt

SEQ ID NO: 879756 - DNA, 15 bp, Homo sapiens
ctcgggcctcactag

SEQ ID NO: 879757 - DNA, 15 bp, Homo sapiens
cctcgggcctcacta

SEQ ID NO: 879758 - DNA, 15 bp, Homo sapiens
tcctcgggcctcact

SEQ ID NO: 879759 - DNA, 15 bp, Homo sapiens
ctcctcgggcctcac

SEQ ID NO: 879760 - DNA, 15 bp, Homo sapiens
gctcctcgggcctca

SEQ ID NO: 879761 - DNA, 15 bp, Homo sapiens
ggctcctcgggcctc

SEQ ID NO: 879762 - DNA, 15 bp, Homo sapiens
aggctcctcgggcct

SEQ ID NO: 879763 - DNA, 15 bp, Homo sapiens
caggctcctcgggcc

SEQ ID NO: 879764 - DNA, 15 bp, Homo sapiens
tcaggctcctcgggc

SEQ ID NO: 879765 - DNA, 15 bp, Homo sapiens
atcaggctcctcggg

SEQ ID NO: 879766 - DNA, 15 bp, Homo sapiens
catcaggctcctcgg

SEQ ID NO: 879767 - DNA, 15 bp, Homo sapiens
tcatcaggctcctcg

SEQ ID NO: 879768 - DNA, 15 bp, Homo sapiens
gtcatcaggctcctc

SEQ ID NO: 879769 - DNA, 15 bp, Homo sapiens
agtcatcaggctcct

SEQ ID NO: 879770 - DNA, 15 bp, Homo sapiens
aagtcatcaggctcc

SEQ ID NO: 879771 - DNA, 15 bp, Homo sapiens
aaagtcatcaggctc

SEQ ID NO: 879772 - DNA, 15 bp, Homo sapiens
aaaagtcatcaggct

SEQ ID NO: 879773 - DNA, 15 bp, Homo sapiens
gaaaagtcatcaggc

SEQ ID NO: 879774 - DNA, 15 bp, Homo sapiens
agaaaagtcatcagg

SEQ ID NO: 879775 - DNA, 15 bp, Homo sapiens
tagaaaagtcatcag

SEQ ID NO: 879776 - DNA, 15 bp, Homo sapiens
ttagaaaagtcatca

SEQ ID NO: 879777 - DNA, 15 bp, Homo sapiens
cttagaaaagtcatc

SEQ ID NO: 879778 - DNA, 15 bp, Homo sapiens
ccttagaaaagtcat

SEQ ID NO: 879779 - DNA, 15 bp, Homo sapiens
gccttagaaaagtca

SEQ ID NO: 879780 - DNA, 15 bp, Homo sapiens
ggccttagaaaagtc

SEQ ID NO: 879781 - DNA, 15 bp, Homo sapiens
gggccttagaaaagt

SEQ ID NO: 879782 - DNA, 15 bp, Homo sapiens
cgggccttagaaaag

SEQ ID NO: 879783 - DNA, 15 bp, Homo sapiens
ccgggccttagaaaa

SEQ ID NO: 879784 - DNA, 15 bp, Homo sapiens
accgggccttagaaa

SEQ ID NO: 879785 - DNA, 15 bp, Homo sapiens
caccgggccttagaa

SEQ ID NO: 879786 - DNA, 15 bp, Homo sapiens
gcaccgggccttaga

SEQ ID NO: 879787 - DNA, 15 bp, Homo sapiens
agcaccgggccttag

SEQ ID NO: 879788 - DNA, 15 bp, Homo sapiens
tagcaccgggcctta

SEQ ID NO: 879789 - DNA, 15 bp, Homo sapiens
ttagcaccgggcctt

SEQ ID NO: 879790 - DNA, 15 bp, Homo sapiens
tttagcaccgggcct

SEQ ID NO: 879791 - DNA, 15 bp, Homo sapiens
gtttagcaccgggcc

SEQ ID NO: 879792 - DNA, 15 bp, Homo sapiens
agtttagcaccgggc

SEQ ID NO: 879793 - DNA, 15 bp, Homo sapiens
cagtttagcaccggg

SEQ ID NO: 879794 - DNA, 15 bp, Homo sapiens
acagtttagcaccgg

SEQ ID NO: 879795 - DNA, 15 bp, Homo sapiens
cacagtttagcaccg

SEQ ID NO: 879796 - DNA, 15 bp, Homo sapiens
tcacagtttagcacc

SEQ ID NO: 879797 - DNA, 15 bp, Homo sapiens
ctcacagtttagcac

SEQ ID NO: 879798 - DNA, 15 bp, Homo sapiens
actcacagtttagca

SEQ ID NO: 879799 - DNA, 15 bp, Homo sapiens
gactcacagtttagc

SEQ ID NO: 879800 - DNA, 15 bp, Homo sapiens
ggactcacagtttag

SEQ ID NO: 879801 - DNA, 15 bp, Homo sapiens
aggactcacagttta

SEQ ID NO: 879802 - DNA, 15 bp, Homo sapiens
caggactcacagttt

SEQ ID NO: 879803 - DNA, 15 bp, Homo sapiens
tcaggactcacagtt

SEQ ID NO: 879804 - DNA, 15 bp, Homo sapiens
ctcaggactcacagt

SEQ ID NO: 879805 - DNA, 15 bp, Homo sapiens
tctcaggactcacag

SEQ ID NO: 879806 - DNA, 15 bp, Homo sapiens
ctctcaggactcaca

SEQ ID NO: 879807 - DNA, 15 bp, Homo sapiens
gctctcaggactcac

SEQ ID NO: 879808 - DNA, 15 bp, Homo sapiens
agctctcaggactca

SEQ ID NO: 879809 - DNA, 15 bp, Homo sapiens
gagctctcaggactc

SEQ ID NO: 879810 - DNA, 15 bp, Homo sapiens
tgagctctcaggact

SEQ ID NO: 879811 - DNA, 15 bp, Homo sapiens
atgagctctcaggac

SEQ ID NO: 879812 - DNA, 15 bp, Homo sapiens
catgagctctcagga

SEQ ID NO: 879813 - DNA, 15 bp, Homo sapiens
ccatgagctctcagg

SEQ ID NO: 879814 - DNA, 15 bp, Homo sapiens
accatgagctctcag

SEQ ID NO: 879815 - DNA, 15 bp, Homo sapiens
caccatgagctctca

SEQ ID NO: 879816 - DNA, 15 bp, Homo sapiens
gcaccatgagctctc

SEQ ID NO: 879817 - DNA, 15 bp, Homo sapiens
ggcaccatgagctct

SEQ ID NO: 879818 - DNA, 15 bp, Homo sapiens
aggcaccatgagctc

SEQ ID NO: 879819 - DNA, 15 bp, Homo sapiens
caggcaccatgagct

SEQ ID NO: 879820 - DNA, 15 bp, Homo sapiens
tcaggcaccatgagc

SEQ ID NO: 879821 - DNA, 15 bp, Homo sapiens
ttcaggcaccatgag

SEQ ID NO: 879822 - DNA, 15 bp, Homo sapiens
cttcaggcaccatga

SEQ ID NO: 879823 - DNA, 15 bp, Homo sapiens
tcttcaggcaccatg

SEQ ID NO: 879824 - DNA, 15 bp, Homo sapiens
gtcttcaggcaccat

SEQ ID NO: 879825 - DNA, 15 bp, Homo sapiens
tgtcttcaggcacca

SEQ ID NO: 879826 - DNA, 15 bp, Homo sapiens
ttgtcttcaggcacc

SEQ ID NO: 879827 - DNA, 15 bp, Homo sapiens
tttgtcttcaggcac

SEQ ID NO: 879828 - DNA, 15 bp, Homo sapiens
ctttgtcttcaggca

SEQ ID NO: 879829 - DNA, 15 bp, Homo sapiens
cctttgtcttcaggc

SEQ ID NO: 879830 - DNA, 15 bp, Homo sapiens
gcctttgtcttcagg

SEQ ID NO: 879831 - DNA, 15 bp, Homo sapiens
ggcctttgtcttcag

SEQ ID NO: 879832 - DNA, 15 bp, Homo sapiens
aggcctttgtcttca

SEQ ID NO: 879833 - DNA, 15 bp, Homo sapiens
taggcctttgtcttc

SEQ ID NO: 879834 - DNA, 15 bp, Homo sapiens
ctaggcctttgtctt

SEQ ID NO: 879835 - DNA, 15 bp, Homo sapiens
gctaggcctttgtct

SEQ ID NO: 879836 - DNA, 15 bp, Homo sapiens
agctaggcctttgtc

SEQ ID NO: 879837 - DNA, 15 bp, Homo sapiens
tagctaggcctttgt

SEQ ID NO: 879838 - DNA, 15 bp, Homo sapiens
ctagctaggcctttg

SEQ ID NO: 879839 - DNA, 15 bp, Homo sapiens
actagctaggccttt

SEQ ID NO: 879840 - DNA, 15 bp, Homo sapiens
cactagctaggcctt

SEQ ID NO: 879841 - DNA, 15 bp, Homo sapiens
ccactagctaggcct

SEQ ID NO: 879842 - DNA, 15 bp, Homo sapiens
gccactagctaggcc

SEQ ID NO: 879843 - DNA, 15 bp, Homo sapiens
tgccactagctaggc

SEQ ID NO: 879844 - DNA, 15 bp, Homo sapiens
ctgccactagctagg

SEQ ID NO: 879845 - DNA, 15 bp, Homo sapiens
tctgccactagctag

SEQ ID NO: 879846 - DNA, 15 bp, Homo sapiens
ttctgccactagcta

SEQ ID NO: 879847 - DNA, 15 bp, Homo sapiens
tttctgccactagct

SEQ ID NO: 879848 - DNA, 15 bp, Homo sapiens
atttctgccactagc

SEQ ID NO: 879849 - DNA, 15 bp, Homo sapiens
gatttctgccactag

SEQ ID NO: 879850 - DNA, 15 bp, Homo sapiens
ggatttctgccacta

SEQ ID NO: 879851 - DNA, 15 bp, Homo sapiens
tggatttctgccact

SEQ ID NO: 879852 - DNA, 15 bp, Homo sapiens
ctggatttctgccac

SEQ ID NO: 879853 - DNA, 15 bp, Homo sapiens
cctggatttctgcca

SEQ ID NO: 879854 - DNA, 15 bp, Homo sapiens
gcctggatttctgcc

SEQ ID NO: 879855 - DNA, 15 bp, Homo sapiens
agcctggatttctgc

SEQ ID NO: 879856 - DNA, 15 bp, Homo sapiens
gagcctggatttctg

SEQ ID NO: 879857 - DNA, 15 bp, Homo sapiens
agagcctggatttct

SEQ ID NO: 879858 - DNA, 15 bp, Homo sapiens
aagagcctggatttc

SEQ ID NO: 879859 - DNA, 15 bp, Homo sapiens
aaagagcctggattt

SEQ ID NO: 879860 - DNA, 15 bp, Homo sapiens
aaaagagcctggatt

SEQ ID NO: 879861 - DNA, 15 bp, Homo sapiens
taaaagagcctggat

SEQ ID NO: 879862 - DNA, 15 bp, Homo sapiens
gtaaaagagcctgga

SEQ ID NO: 879863 - DNA, 15 bp, Homo sapiens
tgtaaaagagcctgg

SEQ ID NO: 879864 - DNA, 15 bp, Homo sapiens
ctgtaaaagagcctg

SEQ ID NO: 879865 - DNA, 15 bp, Homo sapiens
tctgtaaaagagcct

SEQ ID NO: 879866 - DNA, 15 bp, Homo sapiens
ctctgtaaaagagcc

SEQ ID NO: 879867 - DNA, 15 bp, Homo sapiens
cctctgtaaaagagc

SEQ ID NO: 879868 - DNA, 15 bp, Homo sapiens
gcctctgtaaaagag

SEQ ID NO: 879869 - DNA, 15 bp, Homo sapiens
ggcctctgtaaaaga

SEQ ID NO: 879870 - DNA, 15 bp, Homo sapiens
tggcctctgtaaaag

SEQ ID NO: 879871 - DNA, 15 bp, Homo sapiens
ttggcctctgtaaaa

SEQ ID NO: 879872 - DNA, 15 bp, Homo sapiens
tttggcctctgtaaa

SEQ ID NO: 879873 - DNA, 15 bp, Homo sapiens
ctttggcctctgtaa

SEQ ID NO: 879874 - DNA, 15 bp, Homo sapiens
cctttggcctctgta

SEQ ID NO: 879875 - DNA, 15 bp, Homo sapiens
gcctttggcctctgt

SEQ ID NO: 879876 - DNA, 15 bp, Homo sapiens
tgcctttggcctctg

SEQ ID NO: 879877 - DNA, 15 bp, Homo sapiens
ttgcctttggcctct

SEQ ID NO: 879878 - DNA, 15 bp, Homo sapiens
cttgcctttggcctc

SEQ ID NO: 879879 - DNA, 15 bp, Homo sapiens
gcttgcctttggcct

SEQ ID NO: 879880 - DNA, 15 bp, Homo sapiens
agcttgcctttggcc

SEQ ID NO: 879881 - DNA, 15 bp, Homo sapiens
tagcttgcctttggc

SEQ ID NO: 879882 - DNA, 15 bp, Homo sapiens
atagcttgcctttgg

SEQ ID NO: 879883 - DNA, 15 bp, Homo sapiens
aatagcttgcctttg

SEQ ID NO: 879884 - DNA, 15 bp, Homo sapiens
aaatagcttgccttt

SEQ ID NO: 879885 - DNA, 15 bp, Homo sapiens
gaaatagcttgcctt

SEQ ID NO: 879886 - DNA, 15 bp, Homo sapiens
tgaaatagcttgcct

SEQ ID NO: 879887 - DNA, 15 bp, Homo sapiens
ctgaaatagcttgcc

SEQ ID NO: 879888 - DNA, 15 bp, Homo sapiens
cctgaaatagcttgc

SEQ ID NO: 879889 - DNA, 15 bp, Homo sapiens
ccctgaaatagcttg

SEQ ID NO: 879890 - DNA, 15 bp, Homo sapiens
cccctgaaatagctt

SEQ ID NO: 879891 - DNA, 15 bp, Homo sapiens
gcccctgaaatagct

SEQ ID NO: 879892 - DNA, 15 bp, Homo sapiens
tgcccctgaaatagc

SEQ ID NO: 879893 - DNA, 15 bp, Homo sapiens
ttgcccctgaaatag

SEQ ID NO: 879894 - DNA, 15 bp, Homo sapiens
cttgcccctgaaata

SEQ ID NO: 879895 - DNA, 15 bp, Homo sapiens
gcttgcccctgaaat

SEQ ID NO: 879896 - DNA, 15 bp, Homo sapiens
agcttgcccctgaaa

SEQ ID NO: 879897 - DNA, 15 bp, Homo sapiens
cagcttgcccctgaa

SEQ ID NO: 879898 - DNA, 15 bp, Homo sapiens
ccagcttgcccctga

SEQ ID NO: 879899 - DNA, 15 bp, Homo sapiens
gccagcttgcccctg

SEQ ID NO: 879900 - DNA, 15 bp, Homo sapiens
ggccagcttgcccct

SEQ ID NO: 879901 - DNA, 15 bp, Homo sapiens
aggccagcttgcccc

SEQ ID NO: 879902 - DNA, 15 bp, Homo sapiens
aaggccagcttgccc

SEQ ID NO: 879903 - DNA, 15 bp, Homo sapiens
aaaggccagcttgcc

SEQ ID NO: 879904 - DNA, 15 bp, Homo sapiens
aaaaggccagcttgc

SEQ ID NO: 879905 - DNA, 15 bp, Homo sapiens
caaaaggccagcttg

SEQ ID NO: 879906 - DNA, 15 bp, Homo sapiens
tcaaaaggccagctt

SEQ ID NO: 879907 - DNA, 15 bp, Homo sapiens
ttcaaaaggccagct

SEQ ID NO: 879908 - DNA, 15 bp, Homo sapiens
tttcaaaaggccagc

SEQ ID NO: 879909 - DNA, 15 bp, Homo sapiens
atttcaaaaggccag

SEQ ID NO: 879910 - DNA, 15 bp, Homo sapiens
tatttcaaaaggcca

SEQ ID NO: 879911 - DNA, 15 bp, Homo sapiens
atatttcaaaaggcc

SEQ ID NO: 879912 - DNA, 15 bp, Homo sapiens
catatttcaaaaggc

SEQ ID NO: 879913 - DNA, 15 bp, Homo sapiens
tcatatttcaaaagg

SEQ ID NO: 879914 - DNA, 15 bp, Homo sapiens
ttcatatttcaaaag

SEQ ID NO: 879915 - DNA, 15 bp, Homo sapiens
attcatatttcaaaa

SEQ ID NO: 879916 - DNA, 15 bp, Homo sapiens
cattcatatttcaaa

SEQ ID NO: 879917 - DNA, 15 bp, Homo sapiens
tcattcatatttcaa

SEQ ID NO: 879918 - DNA, 15 bp, Homo sapiens
atcattcatatttca

SEQ ID NO: 879919 - DNA, 15 bp, Homo sapiens
aatcattcatatttc

SEQ ID NO: 879920 - DNA, 15 bp, Homo sapiens
caatcattcatattt

SEQ ID NO: 879921 - DNA, 15 bp, Homo sapiens
tcaatcattcatatt

SEQ ID NO: 879922 - DNA, 15 bp, Homo sapiens
atcaatcattcatat

SEQ ID NO: 879923 - DNA, 15 bp, Homo sapiens
catcaatcattcata

SEQ ID NO: 879924 - DNA, 15 bp, Homo sapiens
gcatcaatcattcat

SEQ ID NO: 879925 - DNA, 15 bp, Homo sapiens
agcatcaatcattca

SEQ ID NO: 879926 - DNA, 15 bp, Homo sapiens
aagcatcaatcattc

SEQ ID NO: 879927 - DNA, 15 bp, Homo sapiens
gaagcatcaatcatt

SEQ ID NO: 879928 - DNA, 15 bp, Homo sapiens
agaagcatcaatcat

SEQ ID NO: 879929 - DNA, 15 bp, Homo sapiens
aagaagcatcaatca

SEQ ID NO: 879930 - DNA, 15 bp, Homo sapiens
gaagaagcatcaatc

SEQ ID NO: 879931 - DNA, 15 bp, Homo sapiens
agaagaagcatcaat

SEQ ID NO: 879932 - DNA, 15 bp, Homo sapiens
tagaagaagcatcaa

SEQ ID NO: 879933 - DNA, 15 bp, Homo sapiens
ttagaagaagcatca

SEQ ID NO: 879934 - DNA, 15 bp, Homo sapiens
attagaagaagcatc

SEQ ID NO: 879935 - DNA, 15 bp, Homo sapiens
aattagaagaagcat

SEQ ID NO: 879936 - DNA, 15 bp, Homo sapiens
gaattagaagaagca

SEQ ID NO: 879937 - DNA, 15 bp, Homo sapiens
tgaattagaagaagc

SEQ ID NO: 879938 - DNA, 15 bp, Homo sapiens
ttgaattagaagaag

SEQ ID NO: 879939 - DNA, 15 bp, Homo sapiens
tttgaattagaagaa

SEQ ID NO: 879940 - DNA, 15 bp, Homo sapiens
atttgaattagaaga

SEQ ID NO: 879941 - DNA, 15 bp, Homo sapiens
aatttgaattagaag

SEQ ID NO: 879942 - DNA, 15 bp, Homo sapiens
caatttgaattagaa

SEQ ID NO: 879943 - DNA, 15 bp, Homo sapiens
acaatttgaattaga

SEQ ID NO: 879944 - DNA, 15 bp, Homo sapiens
tacaatttgaattag

SEQ ID NO: 879945 - DNA, 15 bp, Homo sapiens
ttacaatttgaatta

SEQ ID NO: 879946 - DNA, 15 bp, Homo sapiens
tttacaatttgaatt

SEQ ID NO: 879947 - DNA, 15 bp, Homo sapiens
ttttacaatttgaat

SEQ ID NO: 879948 - DNA, 15 bp, Homo sapiens
gttttacaatttgaa

SEQ ID NO: 879949 - DNA, 15 bp, Homo sapiens
ggttttacaatttga

SEQ ID NO: 879950 - DNA, 15 bp, Homo sapiens
tggttttacaatttg

SEQ ID NO: 879951 - DNA, 15 bp, Homo sapiens
ttggttttacaattt

SEQ ID NO: 879952 - DNA, 15 bp, Homo sapiens
attggttttacaatt

SEQ ID NO: 879953 - DNA, 15 bp, Homo sapiens
aattggttttacaat

SEQ ID NO: 879954 - DNA, 15 bp, Homo sapiens
taattggttttacaa

SEQ ID NO: 879955 - DNA, 15 bp, Homo sapiens
ataattggttttaca

SEQ ID NO: 879956 - DNA, 15 bp, Homo sapiens
tataattggttttac

SEQ ID NO: 879957 - DNA, 15 bp, Homo sapiens
ctataattggtttta

SEQ ID NO: 879958 - DNA, 15 bp, Homo sapiens
actataattggtttt

SEQ ID NO: 879959 - DNA, 15 bp, Homo sapiens
cactataattggttt

SEQ ID NO: 879960 - DNA, 15 bp, Homo sapiens
ccactataattggtt

SEQ ID NO: 879961 - DNA, 15 bp, Homo sapiens
cccactataattggt

SEQ ID NO: 879962 - DNA, 15 bp, Homo sapiens
gcccactataattgg

SEQ ID NO: 879963 - DNA, 15 bp, Homo sapiens
agcccactataattg

SEQ ID NO: 879964 - DNA, 15 bp, Homo sapiens
aagcccactataatt

SEQ ID NO: 879965 - DNA, 15 bp, Homo sapiens
caagcccactataat

SEQ ID NO: 879966 - DNA, 15 bp, Homo sapiens
tcaagcccactataa

SEQ ID NO: 879967 - DNA, 15 bp, Homo sapiens
ttcaagcccactata

SEQ ID NO: 879968 - DNA, 15 bp, Homo sapiens
tttcaagcccactat

SEQ ID NO: 879969 - DNA, 15 bp, Homo sapiens
ttttcaagcccacta

SEQ ID NO: 879970 - DNA, 15 bp, Homo sapiens
gttttcaagcccact

SEQ ID NO: 879971 - DNA, 15 bp, Homo sapiens
tgttttcaagcccac

SEQ ID NO: 879972 - DNA, 15 bp, Homo sapiens
gtgttttcaagccca

SEQ ID NO: 879973 - DNA, 15 bp, Homo sapiens
tgtgttttcaagccc

SEQ ID NO: 879974 - DNA, 15 bp, Homo sapiens
ctgtgttttcaagcc

SEQ ID NO: 879975 - DNA, 15 bp, Homo sapiens
tctgtgttttcaagc

SEQ ID NO: 879976 - DNA, 15 bp, Homo sapiens
ctctgtgttttcaag

SEQ ID NO: 879977 - DNA, 15 bp, Homo sapiens
cctctgtgttttcaa

SEQ ID NO: 879978 - DNA, 15 bp, Homo sapiens
ccctctgtgttttca

SEQ ID NO: 879979 - DNA, 15 bp, Homo sapiens
cccctctgtgttttc

SEQ ID NO: 879980 - DNA, 15 bp, Homo sapiens
gcccctctgtgtttt

SEQ ID NO: 879981 - DNA, 15 bp, Homo sapiens
tgcccctctgtgttt

SEQ ID NO: 879982 - DNA, 15 bp, Homo sapiens
atgcccctctgtgtt

SEQ ID NO: 879983 - DNA, 15 bp, Homo sapiens
catgcccctctgtgt

SEQ ID NO: 879984 - DNA, 15 bp, Homo sapiens
tcatgcccctctgtg

SEQ ID NO: 879985 - DNA, 15 bp, Homo sapiens
ctcatgcccctctgt

SEQ ID NO: 879986 - DNA, 15 bp, Homo sapiens
cctcatgcccctctg

SEQ ID NO: 879987 - DNA, 15 bp, Homo sapiens
tcctcatgcccctct

SEQ ID NO: 879988 - DNA, 15 bp, Homo sapiens
ctcctcatgcccctc

SEQ ID NO: 879989 - DNA, 15 bp, Homo sapiens
cctcctcatgcccct

SEQ ID NO: 879990 - DNA, 15 bp, Homo sapiens
tcctcctcatgcccc

SEQ ID NO: 879991 - DNA, 15 bp, Homo sapiens
ttcctcctcatgccc

SEQ ID NO: 879992 - DNA, 15 bp, Homo sapiens
cttcctcctcatgcc

SEQ ID NO: 879993 - DNA, 15 bp, Homo sapiens
tcttcctcctcatgc

SEQ ID NO: 879994 - DNA, 15 bp, Homo sapiens
atcttcctcctcatg

SEQ ID NO: 879995 - DNA, 15 bp, Homo sapiens
catcttcctcctcat

SEQ ID NO: 879996 - DNA, 15 bp, Homo sapiens
tcatcttcctcctca

SEQ ID NO: 879997 - DNA, 15 bp, Homo sapiens
ttcatcttcctcctc

SEQ ID NO: 879998 - DNA, 15 bp, Homo sapiens
tttcatcttcctcct

SEQ ID NO: 879999 - DNA, 15 bp, Homo sapiens
ttttcatcttcctcc

SEQ ID NO: 880000 - DNA, 15 bp, Homo sapiens
cttttcatcttcctc

SEQ ID NO: 880001 - DNA, 15 bp, Homo sapiens
gcttttcatcttcct

SEQ ID NO: 880002 - DNA, 15 bp, Homo sapiens
tgcttttcatcttcc

SEQ ID NO: 880003 - DNA, 15 bp, Homo sapiens
ttgcttttcatcttc

SEQ ID NO: 880004 - DNA, 15 bp, Homo sapiens
gttgcttttcatctt

SEQ ID NO: 880005 - DNA, 15 bp, Homo sapiens
ggttgcttttcatct

SEQ ID NO: 880006 - DNA, 15 bp, Homo sapiens
tggttgcttttcatc

SEQ ID NO: 880007 - DNA, 15 bp, Homo sapiens
atggttgcttttcat

SEQ ID NO: 880008 - DNA, 15 bp, Homo sapiens
tatggttgcttttca

SEQ ID NO: 880009 - DNA, 15 bp, Homo sapiens
ttatggttgcttttc

SEQ ID NO: 880010 - DNA, 15 bp, Homo sapiens
attatggttgctttt

SEQ ID NO: 880011 - DNA, 15 bp, Homo sapiens
aattatggttgcttt

SEQ ID NO: 880012 - DNA, 15 bp, Homo sapiens
aaattatggttgctt

SEQ ID NO: 880013 - DNA, 15 bp, Homo sapiens
gaaattatggttgct

SEQ ID NO: 880014 - DNA, 15 bp, Homo sapiens
tgaaattatggttgc

SEQ ID NO: 880015 - DNA, 15 bp, Homo sapiens
ctgaaattatggttg

SEQ ID NO: 880016 - DNA, 15 bp, Homo sapiens
actgaaattatggtt

SEQ ID NO: 880017 - DNA, 15 bp, Homo sapiens
aactgaaattatggt

SEQ ID NO: 880018 - DNA, 15 bp, Homo sapiens
taactgaaattatgg

SEQ ID NO: 880019 - DNA, 15 bp, Homo sapiens
ataactgaaattatg

SEQ ID NO: 880020 - DNA, 15 bp, Homo sapiens
aataactgaaattat

SEQ ID NO: 880021 - DNA, 15 bp, Homo sapiens
aaataactgaaatta

SEQ ID NO: 880022 - DNA, 15 bp, Homo sapiens
gaaataactgaaatt

SEQ ID NO: 880023 - DNA, 15 bp, Homo sapiens
agaaataactgaaat

SEQ ID NO: 880024 - DNA, 15 bp, Homo sapiens
tagaaataactgaaa

SEQ ID NO: 880025 - DNA, 15 bp, Homo sapiens
atagaaataactgaa

SEQ ID NO: 880026 - DNA, 15 bp, Homo sapiens
aatagaaataactga

SEQ ID NO: 880027 - DNA, 15 bp, Homo sapiens
aaatagaaataactg

SEQ ID NO: 880028 - DNA, 15 bp, Homo sapiens
aaaatagaaataact

SEQ ID NO: 880029 - DNA, 15 bp, Homo sapiens
aaaaatagaaataac

SEQ ID NO: 880030 - DNA, 15 bp, Homo sapiens
gaaaaatagaaataa

SEQ ID NO: 880031 - DNA, 15 bp, Homo sapiens
agaaaaatagaaata

SEQ ID NO: 880032 - DNA, 15 bp, Homo sapiens
gagaaaaatagaaat

SEQ ID NO: 880033 - DNA, 15 bp, Homo sapiens
agagaaaaatagaaa

SEQ ID NO: 880034 - DNA, 15 bp, Homo sapiens
gagagaaaaatagaa

SEQ ID NO: 880035 - DNA, 15 bp, Homo sapiens
agagagaaaaataga

SEQ ID NO: 880036 - DNA, 15 bp, Homo sapiens
cagagagaaaaatag

SEQ ID NO: 880037 - DNA, 15 bp, Homo sapiens
ccagagagaaaaata

SEQ ID NO: 880038 - DNA, 15 bp, Homo sapiens
tccagagagaaaaat

SEQ ID NO: 880039 - DNA, 15 bp, Homo sapiens
gtccagagagaaaaa

SEQ ID NO: 880040 - DNA, 15 bp, Homo sapiens
tgtccagagagaaaa

SEQ ID NO: 880041 - DNA, 15 bp, Homo sapiens
ctgtccagagagaaa

SEQ ID NO: 880042 - DNA, 15 bp, Homo sapiens
actgtccagagagaa

SEQ ID NO: 880043 - DNA, 15 bp, Homo sapiens
aactgtccagagaga

SEQ ID NO: 880044 - DNA, 15 bp, Homo sapiens
gaactgtccagagag

SEQ ID NO: 880045 - DNA, 15 bp, Homo sapiens
agaactgtccagaga

SEQ ID NO: 880046 - DNA, 15 bp, Homo sapiens
cagaactgtccagag

SEQ ID NO: 880047 - DNA, 15 bp, Homo sapiens
gcagaactgtccaga

SEQ ID NO: 880048 - DNA, 15 bp, Homo sapiens
tgcagaactgtccag

SEQ ID NO: 880049 - DNA, 15 bp, Homo sapiens
atgcagaactgtcca

SEQ ID NO: 880050 - DNA, 15 bp, Homo sapiens
aatgcagaactgtcc

SEQ ID NO: 880051 - DNA, 15 bp, Homo sapiens
aaatgcagaactgtc

SEQ ID NO: 880052 - DNA, 15 bp, Homo sapiens
aaaatgcagaactgt

SEQ ID NO: 880053 - DNA, 15 bp, Homo sapiens
aaaaatgcagaactg

SEQ ID NO: 880054 - DNA, 15 bp, Homo sapiens
gaaaaatgcagaact

SEQ ID NO: 880055 - DNA, 15 bp, Homo sapiens
tgaaaaatgcagaac

SEQ ID NO: 880056 - DNA, 15 bp, Homo sapiens
ttgaaaaatgcagaa

SEQ ID NO: 880057 - DNA, 15 bp, Homo sapiens
tttgaaaaatgcaga

SEQ ID NO: 880058 - DNA, 15 bp, Homo sapiens
atttgaaaaatgcag

SEQ ID NO: 880059 - DNA, 15 bp, Homo sapiens
tatttgaaaaatgca

SEQ ID NO: 880060 - DNA, 15 bp, Homo sapiens
ttatttgaaaaatgc

SEQ ID NO: 880061 - DNA, 15 bp, Homo sapiens
attatttgaaaaatg

SEQ ID NO: 880062 - DNA, 15 bp, Homo sapiens
cattatttgaaaaat

SEQ ID NO: 880063 - DNA, 15 bp, Homo sapiens
tcattatttgaaaaa

SEQ ID NO: 880064 - DNA, 15 bp, Homo sapiens
ctcattatttgaaaa

SEQ ID NO: 880065 - DNA, 15 bp, Homo sapiens
tctcattatttgaaa

SEQ ID NO: 880066 - DNA, 15 bp, Homo sapiens
ttctcattatttgaa

SEQ ID NO: 880067 - DNA, 15 bp, Homo sapiens
tttctcattatttga

SEQ ID NO: 880068 - DNA, 15 bp, Homo sapiens
ctttctcattatttg

SEQ ID NO: 880069 - DNA, 15 bp, Homo sapiens
gctttctcattattt

SEQ ID NO: 880070 - DNA, 15 bp, Homo sapiens
tgctttctcattatt

SEQ ID NO: 880071 - DNA, 15 bp, Homo sapiens
atgctttctcattat

SEQ ID NO: 880072 - DNA, 15 bp, Homo sapiens
tatgctttctcatta

SEQ ID NO: 880073 - DNA, 15 bp, Homo sapiens
atatgctttctcatt

SEQ ID NO: 880074 - DNA, 15 bp, Homo sapiens
tatatgctttctcat

SEQ ID NO: 880075 - DNA, 15 bp, Homo sapiens
atatatgctttctca

SEQ ID NO: 880076 - DNA, 15 bp, Homo sapiens
gatatatgctttctc

SEQ ID NO: 880077 - DNA, 15 bp, Homo sapiens
tgatatatgctttct

SEQ ID NO: 880078 - DNA, 15 bp, Homo sapiens
ttgatatatgctttc

SEQ ID NO: 880079 - DNA, 15 bp, Homo sapiens
gttgatatatgcttt

SEQ ID NO: 880080 - DNA, 15 bp, Homo sapiens
tgttgatatatgctt

SEQ ID NO: 880081 - DNA, 15 bp, Homo sapiens
ctgttgatatatgct

SEQ ID NO: 880082 - DNA, 15 bp, Homo sapiens
tctgttgatatatgc

SEQ ID NO: 880083 - DNA, 15 bp, Homo sapiens
ttctgttgatatatg

SEQ ID NO: 880084 - DNA, 15 bp, Homo sapiens
tttctgttgatatat

SEQ ID NO: 880085 - DNA, 15 bp, Homo sapiens
gtttctgttgatata

SEQ ID NO: 880086 - DNA, 15 bp, Homo sapiens
tgtttctgttgatat

SEQ ID NO: 880087 - DNA, 15 bp, Homo sapiens
ttgtttctgttgata

SEQ ID NO: 880088 - DNA, 15 bp, Homo sapiens
tttgtttctgttgat

SEQ ID NO: 880089 - DNA, 15 bp, Homo sapiens
ctttgtttctgttga

SEQ ID NO: 880090 - DNA, 15 bp, Homo sapiens
cctttgtttctgttg

SEQ ID NO: 880091 - DNA, 15 bp, Homo sapiens
acctttgtttctgtt

SEQ ID NO: 880092 - DNA, 15 bp, Homo sapiens
cacctttgtttctgt

SEQ ID NO: 880093 - DNA, 15 bp, Homo sapiens
tcacctttgtttctg

SEQ ID NO: 880094 - DNA, 15 bp, Homo sapiens
ttcacctttgtttct

SEQ ID NO: 880095 - DNA, 15 bp, Homo sapiens
attcacctttgtttc

SEQ ID NO: 880096 - DNA, 15 bp, Homo sapiens
aattcacctttgttt

SEQ ID NO: 880097 - DNA, 15 bp, Homo sapiens
aaattcacctttgtt

SEQ ID NO: 880098 - DNA, 15 bp, Homo sapiens
gaaattcacctttgt

SEQ ID NO: 880099 - DNA, 15 bp, Homo sapiens
ggaaattcacctttg

SEQ ID NO: 880100 - DNA, 15 bp, Homo sapiens
aggaaattcaccttt

SEQ ID NO: 880101 - DNA, 15 bp, Homo sapiens
gaggaaattcacctt

SEQ ID NO: 880102 - DNA, 15 bp, Homo sapiens
ggaggaaattcacct

SEQ ID NO: 880103 - DNA, 15 bp, Homo sapiens
tggaggaaattcacc

SEQ ID NO: 880104 - DNA, 15 bp, Homo sapiens
ttggaggaaattcac

SEQ ID NO: 880105 - DNA, 15 bp, Homo sapiens
attggaggaaattca

SEQ ID NO: 880106 - DNA, 15 bp, Homo sapiens
gattggaggaaattc

SEQ ID NO: 880107 - DNA, 15 bp, Homo sapiens
agattggaggaaatt

SEQ ID NO: 880108 - DNA, 15 bp, Homo sapiens
gagattggaggaaat

SEQ ID NO: 880109 - DNA, 15 bp, Homo sapiens
ggagattggaggaaa

SEQ ID NO: 880110 - DNA, 15 bp, Homo sapiens
gggagattggaggaa

SEQ ID NO: 880111 - DNA, 15 bp, Homo sapiens
tgggagattggagga

SEQ ID NO: 880112 - DNA, 15 bp, Homo sapiens
ctgggagattggagg

SEQ ID NO: 880113 - DNA, 15 bp, Homo sapiens
tctgggagattggag

SEQ ID NO: 880114 - DNA, 15 bp, Homo sapiens
gtctgggagattgga

SEQ ID NO: 880115 - DNA, 15 bp, Homo sapiens
agtctgggagattgg

SEQ ID NO: 880116 - DNA, 15 bp, Homo sapiens
aagtctgggagattg

SEQ ID NO: 880117 - DNA, 15 bp, Homo sapiens
gaagtctgggagatt

SEQ ID NO: 880118 - DNA, 15 bp, Homo sapiens
ggaagtctgggagat

SEQ ID NO: 880119 - DNA, 15 bp, Homo sapiens
tggaagtctgggaga

SEQ ID NO: 880120 - DNA, 15 bp, Homo sapiens
ttggaagtctgggag

SEQ ID NO: 880121 - DNA, 15 bp, Homo sapiens
tttggaagtctggga

SEQ ID NO: 880122 - DNA, 15 bp, Homo sapiens
gtttggaagtctggg

SEQ ID NO: 880123 - DNA, 15 bp, Homo sapiens
tgtttggaagtctgg

SEQ ID NO: 880124 - DNA, 15 bp, Homo sapiens
ctgtttggaagtctg

SEQ ID NO: 880125 - DNA, 15 bp, Homo sapiens
tctgtttggaagtct

SEQ ID NO: 880126 - DNA, 15 bp, Homo sapiens
ttctgtttggaagtc

SEQ ID NO: 880127 - DNA, 15 bp, Homo sapiens
tttctgtttggaagt

SEQ ID NO: 880128 - DNA, 15 bp, Homo sapiens
ttttctgtttggaag

SEQ ID NO: 880129 - DNA, 15 bp, Homo sapiens
tttttctgtttggaa

SEQ ID NO: 880130 - DNA, 15 bp, Homo sapiens
ttttttctgtttgga

SEQ ID NO: 880131 - DNA, 15 bp, Homo sapiens
tttttttctgtttgg

SEQ ID NO: 880132 - DNA, 15 bp, Homo sapiens
ttttttttctgtttg

SEQ ID NO: 880133 - DNA, 15 bp, Homo sapiens
tttttttttctgttt

SEQ ID NO: 880134 - DNA, 15 bp, Homo sapiens
ttttttttttctgtt

SEQ ID NO: 880135 - DNA, 15 bp, Homo sapiens
tttttttttttctgt

SEQ ID NO: 880136 - DNA, 15 bp, Homo sapiens
atttttttttttctg

SEQ ID NO: 880137 - DNA, 15 bp, Homo sapiens
gatttttttttttct

SEQ ID NO: 880138 - DNA, 15 bp, Homo sapiens
tgatttttttttttc

SEQ ID NO: 880139 - DNA, 15 bp, Homo sapiens
gtgattttttttttt

SEQ ID NO: 880140 - DNA, 15 bp, Homo sapiens
ggtgatttttttttt

SEQ ID NO: 880141 - DNA, 15 bp, Homo sapiens
aggtgattttttttt

SEQ ID NO: 880142 - DNA, 15 bp, Homo sapiens
taggtgatttttttt

SEQ ID NO: 880143 - DNA, 15 bp, Homo sapiens
ataggtgattttttt

SEQ ID NO: 880144 - DNA, 15 bp, Homo sapiens
aataggtgatttttt

SEQ ID NO: 880145 - DNA, 15 bp, Homo sapiens
taataggtgattttt

SEQ ID NO: 880146 - DNA, 15 bp, Homo sapiens
ataataggtgatttt

SEQ ID NO: 880147 - DNA, 15 bp, Homo sapiens
gataataggtgattt

SEQ ID NO: 880148 - DNA, 15 bp, Homo sapiens
tgataataggtgatt

SEQ ID NO: 880149 - DNA, 15 bp, Homo sapiens
gtgataataggtgat

SEQ ID NO: 880150 - DNA, 15 bp, Homo sapiens
tgtgataataggtga

SEQ ID NO: 880151 - DNA, 15 bp, Homo sapiens
gtgtgataataggtg

SEQ ID NO: 880152 - DNA, 15 bp, Homo sapiens
agtgtgataataggt

SEQ ID NO: 880153 - DNA, 15 bp, Homo sapiens
tagtgtgataatagg

SEQ ID NO: 880154 - DNA, 15 bp, Homo sapiens
atagtgtgataatag

SEQ ID NO: 880155 - DNA, 15 bp, Homo sapiens
aatagtgtgataata

SEQ ID NO: 880156 - DNA, 15 bp, Homo sapiens
gaatagtgtgataat

SEQ ID NO: 880157 - DNA, 15 bp, Homo sapiens
agaatagtgtgataa

SEQ ID NO: 880158 - DNA, 15 bp, Homo sapiens
tagaatagtgtgata

SEQ ID NO: 880159 - DNA, 15 bp, Homo sapiens
ttagaatagtgtgat

SEQ ID NO: 880160 - DNA, 15 bp, Homo sapiens
tttagaatagtgtga

SEQ ID NO: 880161 - DNA, 15 bp, Homo sapiens
ttttagaatagtgtg

SEQ ID NO: 880162 - DNA, 15 bp, Homo sapiens
attttagaatagtgt

SEQ ID NO: 880163 - DNA, 15 bp, Homo sapiens
tattttagaatagtg

SEQ ID NO: 880164 - DNA, 15 bp, Homo sapiens
ttattttagaatagt

SEQ ID NO: 880165 - DNA, 15 bp, Homo sapiens
attattttagaatag

SEQ ID NO: 880166 - DNA, 15 bp, Homo sapiens
gattattttagaata

SEQ ID NO: 880167 - DNA, 15 bp, Homo sapiens
tgattattttagaat

SEQ ID NO: 880168 - DNA, 15 bp, Homo sapiens
ttgattattttagaa

SEQ ID NO: 880169 - DNA, 15 bp, Homo sapiens
attgattattttaga

SEQ ID NO: 880170 - DNA, 15 bp, Homo sapiens
tattgattattttag

SEQ ID NO: 880171 - DNA, 15 bp, Homo sapiens
ttattgattatttta

SEQ ID NO: 880172 - DNA, 15 bp, Homo sapiens
tttattgattatttt

SEQ ID NO: 880173 - DNA, 15 bp, Homo sapiens
atttattgattattt

SEQ ID NO: 880174 - DNA, 15 bp, Homo sapiens
gatttattgattatt

SEQ ID NO: 880175 - DNA, 15 bp, Homo sapiens
tgatttattgattat

SEQ ID NO: 880176 - DNA, 15 bp, Homo sapiens
ttgatttattgatta

SEQ ID NO: 880177 - DNA, 15 bp, Homo sapiens
attgatttattgatt

SEQ ID NO: 880178 - DNA, 15 bp, Homo sapiens
tattgatttattgat

SEQ ID NO: 880179 - DNA, 15 bp, Homo sapiens
atattgatttattga

SEQ ID NO: 880180 - DNA, 15 bp, Homo sapiens
aatattgatttattg

SEQ ID NO: 880181 - DNA, 15 bp, Homo sapiens
taatattgatttatt

SEQ ID NO: 880182 - DNA, 15 bp, Homo sapiens
ttaatattgatttat

SEQ ID NO: 880183 - DNA, 15 bp, Homo sapiens
attaatattgattta

SEQ ID NO: 880184 - DNA, 15 bp, Homo sapiens
tattaatattgattt

SEQ ID NO: 880185 - DNA, 15 bp, Homo sapiens
atattaatattgatt

SEQ ID NO: 880186 - DNA, 15 bp, Homo sapiens
aatattaatattgat

SEQ ID NO: 880187 - DNA, 15 bp, Homo sapiens
aaatattaatattga

SEQ ID NO: 880188 - DNA, 15 bp, Homo sapiens
caaatattaatattg

SEQ ID NO: 880189 - DNA, 15 bp, Homo sapiens
ccaaatattaatatt

SEQ ID NO: 880190 - DNA, 15 bp, Homo sapiens
cccaaatattaatat

SEQ ID NO: 880191 - DNA, 15 bp, Homo sapiens
acccaaatattaata

SEQ ID NO: 880192 - DNA, 15 bp, Homo sapiens
cacccaaatattaat

SEQ ID NO: 880193 - DNA, 15 bp, Homo sapiens
acacccaaatattaa

SEQ ID NO: 880194 - DNA, 15 bp, Homo sapiens
cacacccaaatatta

SEQ ID NO: 880195 - DNA, 15 bp, Homo sapiens
gcacacccaaatatt

SEQ ID NO: 880196 - DNA, 15 bp, Homo sapiens
ggcacacccaaatat

SEQ ID NO: 880197 - DNA, 15 bp, Homo sapiens
aggcacacccaaata

SEQ ID NO: 880198 - DNA, 15 bp, Homo sapiens
gaggcacacccaaat

SEQ ID NO: 880199 - DNA, 15 bp, Homo sapiens
ggaggcacacccaaa

SEQ ID NO: 880200 - DNA, 15 bp, Homo sapiens
tggaggcacacccaa

SEQ ID NO: 880201 - DNA, 15 bp, Homo sapiens
atggaggcacaccca

SEQ ID NO: 880202 - DNA, 15 bp, Homo sapiens
gatggaggcacaccc

SEQ ID NO: 880203 - DNA, 15 bp, Homo sapiens
ggatggaggcacacc

SEQ ID NO: 880204 - DNA, 15 bp, Homo sapiens
aggatggaggcacac

SEQ ID NO: 880205 - DNA, 15 bp, Homo sapiens
aaggatggaggcaca

SEQ ID NO: 880206 - DNA, 15 bp, Homo sapiens
gaaggatggaggcac

SEQ ID NO: 880207 - DNA, 15 bp, Homo sapiens
ggaaggatggaggca

SEQ ID NO: 880208 - DNA, 15 bp, Homo sapiens
aggaaggatggaggc

SEQ ID NO: 880209 - DNA, 15 bp, Homo sapiens
gaggaaggatggagg

SEQ ID NO: 880210 - DNA, 15 bp, Homo sapiens
ggaggaaggatggag

SEQ ID NO: 880211 - DNA, 15 bp, Homo sapiens
aggaggaaggatgga

SEQ ID NO: 880212 - DNA, 15 bp, Homo sapiens
aaggaggaaggatgg

SEQ ID NO: 880213 - DNA, 15 bp, Homo sapiens
aaaggaggaaggatg

SEQ ID NO: 880214 - DNA, 15 bp, Homo sapiens
gaaaggaggaaggat

SEQ ID NO: 880215 - DNA, 15 bp, Homo sapiens
agaaaggaggaagga

SEQ ID NO: 880216 - DNA, 15 bp, Homo sapiens
gagaaaggaggaagg

SEQ ID NO: 880217 - DNA, 15 bp, Homo sapiens
cgagaaaggaggaag

SEQ ID NO: 880218 - DNA, 15 bp, Homo sapiens
gcgagaaaggaggaa

SEQ ID NO: 880219 - DNA, 15 bp, Homo sapiens
agcgagaaaggagga

SEQ ID NO: 880220 - DNA, 15 bp, Homo sapiens
gagcgagaaaggagg

SEQ ID NO: 880221 - DNA, 15 bp, Homo sapiens
agagcgagaaaggag

SEQ ID NO: 880222 - DNA, 15 bp, Homo sapiens
cagagcgagaaagga

SEQ ID NO: 880223 - DNA, 15 bp, Homo sapiens
acagagcgagaaagg

SEQ ID NO: 880224 - DNA, 15 bp, Homo sapiens
gacagagcgagaaag

SEQ ID NO: 880225 - DNA, 15 bp, Homo sapiens
agacagagcgagaaa

SEQ ID NO: 880226 - DNA, 15 bp, Homo sapiens
tagacagagcgagaa

SEQ ID NO: 880227 - DNA, 15 bp, Homo sapiens
atagacagagcgaga

SEQ ID NO: 880228 - DNA, 15 bp, Homo sapiens
tatagacagagcgag

SEQ ID NO: 880229 - DNA, 15 bp, Homo sapiens
atatagacagagcga

SEQ ID NO: 880230 - DNA, 15 bp, Homo sapiens
tatatagacagagcg

SEQ ID NO: 880231 - DNA, 15 bp, Homo sapiens
atatatagacagagc

SEQ ID NO: 880232 - DNA, 15 bp, Homo sapiens
tatatatagacagag

SEQ ID NO: 880233 - DNA, 15 bp, Homo sapiens
atatatatagacaga

SEQ ID NO: 880234 - DNA, 15 bp, Homo sapiens
tatatatatagacag

SEQ ID NO: 880235 - DNA, 15 bp, Homo sapiens
atatatatatagaca

SEQ ID NO: 880236 - DNA, 15 bp, Homo sapiens
catatatatatagac

SEQ ID NO: 880237 - DNA, 15 bp, Homo sapiens
acatatatatataga

SEQ ID NO: 880238 - DNA, 15 bp, Homo sapiens
tacatatatatatag

SEQ ID NO: 880239 - DNA, 15 bp, Homo sapiens
atacatatatatata

SEQ ID NO: 880240 - DNA, 15 bp, Homo sapiens
tatacatatatatat

SEQ ID NO: 880241 - DNA, 15 bp, Homo sapiens
atatacatatatata

SEQ ID NO: 880242 - DNA, 15 bp, Homo sapiens
tatatacatatatat

SEQ ID NO: 880243 - DNA, 15 bp, Homo sapiens
atatatacatatata

SEQ ID NO: 880244 - DNA, 15 bp, Homo sapiens
tatatatacatatat

SEQ ID NO: 880245 - DNA, 15 bp, Homo sapiens
atatatatacatata

SEQ ID NO: 880246 - DNA, 15 bp, Homo sapiens
tatatatatacatat

SEQ ID NO: 880247 - DNA, 15 bp, Homo sapiens
atatatatatacata

SEQ ID NO: 880248 - DNA, 15 bp, Homo sapiens
tatatatatatacat

SEQ ID NO: 880249 - DNA, 15 bp, Homo sapiens
atatatatatataca

SEQ ID NO: 880250 - DNA, 15 bp, Homo sapiens
catatatatatatac

SEQ ID NO: 880251 - DNA, 15 bp, Homo sapiens
ccatatatatatata

SEQ ID NO: 880252 - DNA, 15 bp, Homo sapiens
accatatatatatat

SEQ ID NO: 880253 - DNA, 15 bp, Homo sapiens
caccatatatatata

SEQ ID NO: 880254 - DNA, 15 bp, Homo sapiens
acaccatatatatat

SEQ ID NO: 880255 - DNA, 15 bp, Homo sapiens
tacaccatatatata

SEQ ID NO: 880256 - DNA, 15 bp, Homo sapiens
atacaccatatatat

SEQ ID NO: 880257 - DNA, 15 bp, Homo sapiens
tatacaccatatata

SEQ ID NO: 880258 - DNA, 15 bp, Homo sapiens
atatacaccatatat

SEQ ID NO: 880259 - DNA, 15 bp, Homo sapiens
tatatacaccatata

SEQ ID NO: 880260 - DNA, 15 bp, Homo sapiens
atatatacaccatat

SEQ ID NO: 880261 - DNA, 15 bp, Homo sapiens
tatatatacaccata

SEQ ID NO: 880262 - DNA, 15 bp, Homo sapiens
atatatatacaccat

SEQ ID NO: 880263 - DNA, 15 bp, Homo sapiens
catatatatacacca

SEQ ID NO: 880264 - DNA, 15 bp, Homo sapiens
gcatatatatacacc

SEQ ID NO: 880265 - DNA, 15 bp, Homo sapiens
gtgcatatatataca

SEQ ID NO: 880266 - DNA, 15 bp, Homo sapiens
tgtgcatatatatac

SEQ ID NO: 880267 - DNA, 15 bp, Homo sapiens
gtgtgcatatatata

SEQ ID NO: 880268 - DNA, 15 bp, Homo sapiens
tgtgtgcatatatat

SEQ ID NO: 880269 - DNA, 15 bp, Homo sapiens
ttgtgtgcatatata

SEQ ID NO: 880270 - DNA, 15 bp, Homo sapiens
tttgtgtgcatatat

SEQ ID NO: 880271 - DNA, 15 bp, Homo sapiens
atttgtgtgcatata

SEQ ID NO: 880272 - DNA, 15 bp, Homo sapiens
tatttgtgtgcatat

SEQ ID NO: 880273 - DNA, 15 bp, Homo sapiens
atatttgtgtgcata

SEQ ID NO: 880274 - DNA, 15 bp, Homo sapiens
catatttgtgtgcat

SEQ ID NO: 880275 - DNA, 15 bp, Homo sapiens
acatatttgtgtgca

SEQ ID NO: 880276 - DNA, 15 bp, Homo sapiens
cacatatttgtgtgc

SEQ ID NO: 880277 - DNA, 15 bp, Homo sapiens
acacatatttgtgtg

SEQ ID NO: 880278 - DNA, 15 bp, Homo sapiens
cacacatatttgtgt

SEQ ID NO: 880279 - DNA, 15 bp, Homo sapiens
acacacatatttgtg

SEQ ID NO: 880280 - DNA, 15 bp, Homo sapiens
cacacacatatttgt

SEQ ID NO: 880281 - DNA, 15 bp, Homo sapiens
acacacacatatttg

SEQ ID NO: 880282 - DNA, 15 bp, Homo sapiens
cacacacacatattt

SEQ ID NO: 880283 - DNA, 15 bp, Homo sapiens
acacacacacatatt

SEQ ID NO: 880284 - DNA, 15 bp, Homo sapiens
cacacacacacatat

SEQ ID NO: 880285 - DNA, 15 bp, Homo sapiens
acacacacacacata

SEQ ID NO: 880286 - DNA, 15 bp, Homo sapiens
aacacacacacacat

SEQ ID NO: 880287 - DNA, 15 bp, Homo sapiens
caaacacacacacac

SEQ ID NO: 880288 - DNA, 15 bp, Homo sapiens
acaaacacacacaca

SEQ ID NO: 880289 - DNA, 15 bp, Homo sapiens
cacaaacacacacac

SEQ ID NO: 880290 - DNA, 15 bp, Homo sapiens
acacaaacacacaca

SEQ ID NO: 880291 - DNA, 15 bp, Homo sapiens
cacacaaacacacac

SEQ ID NO: 880292 - DNA, 15 bp, Homo sapiens
tacacacaaacacac

SEQ ID NO: 880293 - DNA, 15 bp, Homo sapiens
atacacacaaacaca

SEQ ID NO: 880294 - DNA, 15 bp, Homo sapiens
aatacacacaaacac

SEQ ID NO: 880295 - DNA, 15 bp, Homo sapiens
taatacacacaaaca

SEQ ID NO: 880296 - DNA, 15 bp, Homo sapiens
ttaatacacacaaac

SEQ ID NO: 880297 - DNA, 15 bp, Homo sapiens
gttaatacacacaaa

SEQ ID NO: 880298 - DNA, 15 bp, Homo sapiens
agttaatacacacaa

SEQ ID NO: 880299 - DNA, 15 bp, Homo sapiens
cagttaatacacaca

SEQ ID NO: 880300 - DNA, 15 bp, Homo sapiens
acagttaatacacac

SEQ ID NO: 880301 - DNA, 15 bp, Homo sapiens
gacagttaatacaca

SEQ ID NO: 880302 - DNA, 15 bp, Homo sapiens
tgacagttaatacac

SEQ ID NO: 880303 - DNA, 15 bp, Homo sapiens
gtgacagttaataca

SEQ ID NO: 880304 - DNA, 15 bp, Homo sapiens
tgtgacagttaatac

SEQ ID NO: 880305 - DNA, 15 bp, Homo sapiens
ttgtgacagttaata

SEQ ID NO: 880306 - DNA, 15 bp, Homo sapiens
gttgtgacagttaat

SEQ ID NO: 880307 - DNA, 15 bp, Homo sapiens
agttgtgacagttaa

SEQ ID NO: 880308 - DNA, 15 bp, Homo sapiens
aagttgtgacagtta

SEQ ID NO: 880309 - DNA, 15 bp, Homo sapiens
taagttgtgacagtt

SEQ ID NO: 880310 - DNA, 15 bp, Homo sapiens
gtaagttgtgacagt

SEQ ID NO: 880311 - DNA, 15 bp, Homo sapiens
agtaagttgtgacag

SEQ ID NO: 880312 - DNA, 15 bp, Homo sapiens
tagtaagttgtgaca

SEQ ID NO: 880313 - DNA, 15 bp, Homo sapiens
ttagtaagttgtgac

SEQ ID NO: 880314 - DNA, 15 bp, Homo sapiens
gttagtaagttgtga

SEQ ID NO: 880315 - DNA, 15 bp, Homo sapiens
ggttagtaagttgtg

SEQ ID NO: 880316 - DNA, 15 bp, Homo sapiens
tggttagtaagttgt

SEQ ID NO: 880317 - DNA, 15 bp, Homo sapiens
ctggttagtaagttg

SEQ ID NO: 880318 - DNA, 15 bp, Homo sapiens
gctggttagtaagtt

SEQ ID NO: 880319 - DNA, 15 bp, Homo sapiens
tgctggttagtaagt

SEQ ID NO: 880320 - DNA, 15 bp, Homo sapiens
gtgctggttagtaag

SEQ ID NO: 880321 - DNA, 15 bp, Homo sapiens
ggtgctggttagtaa

SEQ ID NO: 880322 - DNA, 15 bp, Homo sapiens
gggtgctggttagta

SEQ ID NO: 880323 - DNA, 15 bp, Homo sapiens
tgggtgctggttagt

SEQ ID NO: 880324 - DNA, 15 bp, Homo sapiens
ttgggtgctggttag

SEQ ID NO: 880325 - DNA, 15 bp, Homo sapiens
attgggtgctggtta

SEQ ID NO: 880326 - DNA, 15 bp, Homo sapiens
aattgggtgctggtt

SEQ ID NO: 880327 - DNA, 15 bp, Homo sapiens
caattgggtgctggt

SEQ ID NO: 880328 - DNA, 15 bp, Homo sapiens
gcaattgggtgctgg

SEQ ID NO: 880329 - DNA, 15 bp, Homo sapiens
tgcaattgggtgctg

SEQ ID NO: 880330 - DNA, 15 bp, Homo sapiens
ttgcaattgggtgct

SEQ ID NO: 880331 - DNA, 15 bp, Homo sapiens
tttgcaattgggtgc

SEQ ID NO: 880332 - DNA, 15 bp, Homo sapiens
gtttgcaattgggtg

SEQ ID NO: 880333 - DNA, 15 bp, Homo sapiens
cgtttgcaattgggt

SEQ ID NO: 880334 - DNA, 15 bp, Homo sapiens
acgtttgcaattggg

SEQ ID NO: 880335 - DNA, 15 bp, Homo sapiens
cacgtttgcaattgg

SEQ ID NO: 880336 - DNA, 15 bp, Homo sapiens
acacgtttgcaattg

SEQ ID NO: 880337 - DNA, 15 bp, Homo sapiens
tacacgtttgcaatt

SEQ ID NO: 880338 - DNA, 15 bp, Homo sapiens
ctacacgtttgcaat

SEQ ID NO: 880339 - DNA, 15 bp, Homo sapiens
cctacacgtttgcaa

SEQ ID NO: 880340 - DNA, 15 bp, Homo sapiens
tcctacacgtttgca

SEQ ID NO: 880341 - DNA, 15 bp, Homo sapiens
ttcctacacgtttgc

SEQ ID NO: 880342 - DNA, 15 bp, Homo sapiens
cttcctacacgtttg

SEQ ID NO: 880343 - DNA, 15 bp, Homo sapiens
acttcctacacgttt

SEQ ID NO: 880344 - DNA, 15 bp, Homo sapiens
aacttcctacacgtt

SEQ ID NO: 880345 - DNA, 15 bp, Homo sapiens
aaacttcctacacgt

SEQ ID NO: 880346 - DNA, 15 bp, Homo sapiens
caaacttcctacacg

SEQ ID NO: 880347 - DNA, 15 bp, Homo sapiens
tcaaacttcctacac

SEQ ID NO: 880348 - DNA, 15 bp, Homo sapiens
ctcaaacttcctaca

SEQ ID NO: 880349 - DNA, 15 bp, Homo sapiens
actcaaacttcctac

SEQ ID NO: 880350 - DNA, 15 bp, Homo sapiens
gactcaaacttccta

SEQ ID NO: 880351 - DNA, 15 bp, Homo sapiens
agactcaaacttcct

SEQ ID NO: 880352 - DNA, 15 bp, Homo sapiens
gagactcaaacttcc

SEQ ID NO: 880353 - DNA, 15 bp, Homo sapiens
tgagactcaaacttc

SEQ ID NO: 880354 - DNA, 15 bp, Homo sapiens
gtgagactcaaactt

SEQ ID NO: 880355 - DNA, 15 bp, Homo sapiens
ggtgagactcaaact

SEQ ID NO: 880356 - DNA, 15 bp, Homo sapiens
aggtgagactcaaac

SEQ ID NO: 880357 - DNA, 15 bp, Homo sapiens
taggtgagactcaaa

SEQ ID NO: 880358 - DNA, 15 bp, Homo sapiens
ataggtgagactcaa

SEQ ID NO: 880359 - DNA, 15 bp, Homo sapiens
cataggtgagactca

SEQ ID NO: 880360 - DNA, 15 bp, Homo sapiens
acataggtgagactc

SEQ ID NO: 880361 - DNA, 15 bp, Homo sapiens
tacataggtgagact

SEQ ID NO: 880362 - DNA, 15 bp, Homo sapiens
atacataggtgagac

SEQ ID NO: 880363 - DNA, 15 bp, Homo sapiens
aatacataggtgaga

SEQ ID NO: 880364 - DNA, 15 bp, Homo sapiens
aaatacataggtgag

SEQ ID NO: 880365 - DNA, 15 bp, Homo sapiens
aaaatacataggtga

SEQ ID NO: 880366 - DNA, 15 bp, Homo sapiens
gaaaatacataggtg

SEQ ID NO: 880367 - DNA, 15 bp, Homo sapiens
tgaaaatacataggt

SEQ ID NO: 880368 - DNA, 15 bp, Homo sapiens
gtgaaaatacatagg

SEQ ID NO: 880369 - DNA, 15 bp, Homo sapiens
cgtgaaaatacatag

SEQ ID NO: 880370 - DNA, 15 bp, Homo sapiens
acgtgaaaatacata

SEQ ID NO: 880371 - DNA, 15 bp, Homo sapiens
cacgtgaaaatacat

SEQ ID NO: 880372 - DNA, 15 bp, Homo sapiens
tcacgtgaaaataca

SEQ ID NO: 880373 - DNA, 15 bp, Homo sapiens
ttcacgtgaaaatac

SEQ ID NO: 880374 - DNA, 15 bp, Homo sapiens
gttcacgtgaaaata

SEQ ID NO: 880375 - DNA, 15 bp, Homo sapiens
agttcacgtgaaaat

SEQ ID NO: 880376 - DNA, 15 bp, Homo sapiens
aagttcacgtgaaaa

SEQ ID NO: 880377 - DNA, 15 bp, Homo sapiens
gaagttcacgtgaaa

SEQ ID NO: 880378 - DNA, 15 bp, Homo sapiens
ggaagttcacgtgaa

SEQ ID NO: 880379 - DNA, 15 bp, Homo sapiens
tggaagttcacgtga

SEQ ID NO: 880380 - DNA, 15 bp, Homo sapiens
ttggaagttcacgtg

SEQ ID NO: 880381 - DNA, 15 bp, Homo sapiens
attggaagttcacgt

SEQ ID NO: 880382 - DNA, 15 bp, Homo sapiens
cattggaagttcacg

SEQ ID NO: 880383 - DNA, 15 bp, Homo sapiens
ccattggaagttcac

SEQ ID NO: 880384 - DNA, 15 bp, Homo sapiens
gccattggaagttca

SEQ ID NO: 880385 - DNA, 15 bp, Homo sapiens
agccattggaagttc

SEQ ID NO: 880386 - DNA, 15 bp, Homo sapiens
cagccattggaagtt

SEQ ID NO: 880387 - DNA, 15 bp, Homo sapiens
gcagccattggaagt

SEQ ID NO: 880388 - DNA, 15 bp, Homo sapiens
ggcagccattggaag

SEQ ID NO: 880389 - DNA, 15 bp, Homo sapiens
aggcagccattggaa

SEQ ID NO: 880390 - DNA, 15 bp, Homo sapiens
aaggcagccattgga

SEQ ID NO: 880391 - DNA, 15 bp, Homo sapiens
caaggcagccattgg

SEQ ID NO: 880392 - DNA, 15 bp, Homo sapiens
tcaaggcagccattg

SEQ ID NO: 880393 - DNA, 15 bp, Homo sapiens
ttcaaggcagccatt

SEQ ID NO: 880394 - DNA, 15 bp, Homo sapiens
attcaaggcagccat

SEQ ID NO: 880395 - DNA, 15 bp, Homo sapiens
tattcaaggcagcca

SEQ ID NO: 880396 - DNA, 15 bp, Homo sapiens
atattcaaggcagcc

SEQ ID NO: 880397 - DNA, 15 bp, Homo sapiens
aatattcaaggcagc

SEQ ID NO: 880398 - DNA, 15 bp, Homo sapiens
taatattcaaggcag

SEQ ID NO: 880399 - DNA, 15 bp, Homo sapiens
ctaatattcaaggca

SEQ ID NO: 880400 - DNA, 15 bp, Homo sapiens
actaatattcaaggc

SEQ ID NO: 880401 - DNA, 15 bp, Homo sapiens
aactaatattcaagg

SEQ ID NO: 880402 - DNA, 15 bp, Homo sapiens
caactaatattcaag

SEQ ID NO: 880403 - DNA, 15 bp, Homo sapiens
acaactaatattcaa

SEQ ID NO: 880404 - DNA, 15 bp, Homo sapiens
cacaactaatattca

SEQ ID NO: 880405 - DNA, 15 bp, Homo sapiens
tcacaactaatattc

SEQ ID NO: 880406 - DNA, 15 bp, Homo sapiens
ttcacaactaatatt

SEQ ID NO: 880407 - DNA, 15 bp, Homo sapiens
tttcacaactaatat

SEQ ID NO: 880408 - DNA, 15 bp, Homo sapiens
atttcacaactaata

SEQ ID NO: 880409 - DNA, 15 bp, Homo sapiens
aatttcacaactaat

SEQ ID NO: 880410 - DNA, 15 bp, Homo sapiens
taatttcacaactaa

SEQ ID NO: 880411 - DNA, 15 bp, Homo sapiens
ttaatttcacaacta

SEQ ID NO: 880412 - DNA, 15 bp, Homo sapiens
tttaatttcacaact

SEQ ID NO: 880413 - DNA, 15 bp, Homo sapiens
gtttaatttcacaac

SEQ ID NO: 880414 - DNA, 15 bp, Homo sapiens
agtttaatttcacaa

SEQ ID NO: 880415 - DNA, 15 bp, Homo sapiens
tagtttaatttcaca

SEQ ID NO: 880416 - DNA, 15 bp, Homo sapiens
ttagtttaatttcac

SEQ ID NO: 880417 - DNA, 15 bp, Homo sapiens
cttagtttaatttca

SEQ ID NO: 880418 - DNA, 15 bp, Homo sapiens
acttagtttaatttc

SEQ ID NO: 880419 - DNA, 15 bp, Homo sapiens
aacttagtttaattt

SEQ ID NO: 880420 - DNA, 15 bp, Homo sapiens
taacttagtttaatt

SEQ ID NO: 880421 - DNA, 15 bp, Homo sapiens
ataacttagtttaat

SEQ ID NO: 880422 - DNA, 15 bp, Homo sapiens
tataacttagtttaa

SEQ ID NO: 880423 - DNA, 15 bp, Homo sapiens
atataacttagttta

SEQ ID NO: 880424 - DNA, 15 bp, Homo sapiens
aatataacttagttt

SEQ ID NO: 880425 - DNA, 15 bp, Homo sapiens
aaatataacttagtt

SEQ ID NO: 880426 - DNA, 15 bp, Homo sapiens
taaatataacttagt

SEQ ID NO: 880427 - DNA, 15 bp, Homo sapiens
ttaaatataacttag

SEQ ID NO: 880428 - DNA, 15 bp, Homo sapiens
tttaaatataactta

SEQ ID NO: 880429 - DNA, 15 bp, Homo sapiens
gtttaaatataactt

SEQ ID NO: 880430 - DNA, 15 bp, Homo sapiens
agtttaaatataact

SEQ ID NO: 880431 - DNA, 15 bp, Homo sapiens
cagtttaaatataac

SEQ ID NO: 880432 - DNA, 15 bp, Homo sapiens
tcagtttaaatataa

SEQ ID NO: 880433 - DNA, 15 bp, Homo sapiens
ctcagtttaaatata

SEQ ID NO: 880434 - DNA, 15 bp, Homo sapiens
cctcagtttaaatat

SEQ ID NO: 880435 - DNA, 15 bp, Homo sapiens
tcctcagtttaaata

SEQ ID NO: 880436 - DNA, 15 bp, Homo sapiens
atcctcagtttaaat

SEQ ID NO: 880437 - DNA, 15 bp, Homo sapiens
tatcctcagtttaaa

SEQ ID NO: 880438 - DNA, 15 bp, Homo sapiens
ctatcctcagtttaa

SEQ ID NO: 880439 - DNA, 15 bp, Homo sapiens
cctatcctcagttta

SEQ ID NO: 880440 - DNA, 15 bp, Homo sapiens
tcctatcctcagttt

SEQ ID NO: 880441 - DNA, 15 bp, Homo sapiens
ttcctatcctcagtt

SEQ ID NO: 880442 - DNA, 15 bp, Homo sapiens
attcctatcctcagt

SEQ ID NO: 880443 - DNA, 15 bp, Homo sapiens
aattcctatcctcag

SEQ ID NO: 880444 - DNA, 15 bp, Homo sapiens
taattcctatcctca

SEQ ID NO: 880445 - DNA, 15 bp, Homo sapiens
ttaattcctatcctc

SEQ ID NO: 880446 - DNA, 15 bp, Homo sapiens
tttaattcctatcct

SEQ ID NO: 880447 - DNA, 15 bp, Homo sapiens
atttaattcctatcc

SEQ ID NO: 880448 - DNA, 15 bp, Homo sapiens
aatttaattcctatc

SEQ ID NO: 880449 - DNA, 15 bp, Homo sapiens
aaatttaattcctat

SEQ ID NO: 880450 - DNA, 15 bp, Homo sapiens
taaatttaattccta

SEQ ID NO: 880451 - DNA, 15 bp, Homo sapiens
ttaaatttaattcct

SEQ ID NO: 880452 - DNA, 15 bp, Homo sapiens
tttaaatttaattcc

SEQ ID NO: 880453 - DNA, 15 bp, Homo sapiens
ctttaaatttaattc

SEQ ID NO: 880454 - DNA, 15 bp, Homo sapiens
gctttaaatttaatt

SEQ ID NO: 880455 - DNA, 15 bp, Homo sapiens
agctttaaatttaat

SEQ ID NO: 880456 - DNA, 15 bp, Homo sapiens
gagctttaaatttaa

SEQ ID NO: 880457 - DNA, 15 bp, Homo sapiens
ggagctttaaattta

SEQ ID NO: 880458 - DNA, 15 bp, Homo sapiens
aggagctttaaattt

SEQ ID NO: 880459 - DNA, 15 bp, Homo sapiens
taggagctttaaatt

SEQ ID NO: 880460 - DNA, 15 bp, Homo sapiens
ctaggagctttaaat

SEQ ID NO: 880461 - DNA, 15 bp, Homo sapiens
actaggagctttaaa

SEQ ID NO: 880462 - DNA, 15 bp, Homo sapiens
cactaggagctttaa

SEQ ID NO: 880463 - DNA, 15 bp, Homo sapiens
acactaggagcttta

SEQ ID NO: 880464 - DNA, 15 bp, Homo sapiens
tacactaggagcttt

SEQ ID NO: 880465 - DNA, 15 bp, Homo sapiens
atacactaggagctt

SEQ ID NO: 880466 - DNA, 15 bp, Homo sapiens
tatacactaggagct

SEQ ID NO: 880467 - DNA, 15 bp, Homo sapiens
atatacactaggagc

SEQ ID NO: 880468 - DNA, 15 bp, Homo sapiens
aatatacactaggag

SEQ ID NO: 880469 - DNA, 15 bp, Homo sapiens
taatatacactagga

SEQ ID NO: 880470 - DNA, 15 bp, Homo sapiens
gtaatatacactagg

SEQ ID NO: 880471 - DNA, 15 bp, Homo sapiens
agtaatatacactag

SEQ ID NO: 880472 - DNA, 15 bp, Homo sapiens
aagtaatatacacta

SEQ ID NO: 880473 - DNA, 15 bp, Homo sapiens
taagtaatatacact

SEQ ID NO: 880474 - DNA, 15 bp, Homo sapiens
ttaagtaatatacac

SEQ ID NO: 880475 - DNA, 15 bp, Homo sapiens
tttaagtaatataca

SEQ ID NO: 880476 - DNA, 15 bp, Homo sapiens
atttaagtaatatac

SEQ ID NO: 880477 - DNA, 15 bp, Homo sapiens
tatttaagtaatata

SEQ ID NO: 880478 - DNA, 15 bp, Homo sapiens
gtatttaagtaatat

SEQ ID NO: 880479 - DNA, 15 bp, Homo sapiens
agtatttaagtaata

SEQ ID NO: 880480 - DNA, 15 bp, Homo sapiens
gagtatttaagtaat

SEQ ID NO: 880481 - DNA, 15 bp, Homo sapiens
agagtatttaagtaa

SEQ ID NO: 880482 - DNA, 15 bp, Homo sapiens
gagagtatttaagta

SEQ ID NO: 880483 - DNA, 15 bp, Homo sapiens
agagagtatttaagt

SEQ ID NO: 880484 - DNA, 15 bp, Homo sapiens
gagagagtatttaag

SEQ ID NO: 880485 - DNA, 15 bp, Homo sapiens
agagagagtatttaa

SEQ ID NO: 880486 - DNA, 15 bp, Homo sapiens
gagagagagtattta

SEQ ID NO: 880487 - DNA, 15 bp, Homo sapiens
ggagagagagtattt

SEQ ID NO: 880488 - DNA, 15 bp, Homo sapiens
gggagagagagtatt

SEQ ID NO: 880489 - DNA, 15 bp, Homo sapiens
ggggagagagagtat

SEQ ID NO: 880490 - DNA, 15 bp, Homo sapiens
cggggagagagagta

SEQ ID NO: 880491 - DNA, 15 bp, Homo sapiens
tcggggagagagagt

SEQ ID NO: 880492 - DNA, 15 bp, Homo sapiens
ttcggggagagagag

SEQ ID NO: 880493 - DNA, 15 bp, Homo sapiens
tttcggggagagaga

SEQ ID NO: 880494 - DNA, 15 bp, Homo sapiens
ttttcggggagagag

SEQ ID NO: 880495 - DNA, 15 bp, Homo sapiens
cttttcggggagaga

SEQ ID NO: 880496 - DNA, 15 bp, Homo sapiens
acttttcggggagag

SEQ ID NO: 880497 - DNA, 15 bp, Homo sapiens
tacttttcggggaga

SEQ ID NO: 880498 - DNA, 15 bp, Homo sapiens
ttacttttcggggag

SEQ ID NO: 880499 - DNA, 15 bp, Homo sapiens
tttacttttcgggga

SEQ ID NO: 880500 - DNA, 15 bp, Homo sapiens
ctttacttttcgggg

SEQ ID NO: 880501 - DNA, 15 bp, Homo sapiens
cctttacttttcggg

SEQ ID NO: 880502 - DNA, 15 bp, Homo sapiens
acctttacttttcgg

SEQ ID NO: 880503 - DNA, 15 bp, Homo sapiens
tacctttacttttcg

SEQ ID NO: 880504 - DNA, 15 bp, Homo sapiens
ttacctttacttttc

SEQ ID NO: 880505 - DNA, 15 bp, Homo sapiens
tttacctttactttt

SEQ ID NO: 880506 - DNA, 15 bp, Homo sapiens
atttacctttacttt

SEQ ID NO: 880507 - DNA, 15 bp, Homo sapiens
catttacctttactt

SEQ ID NO: 880508 - DNA, 15 bp, Homo sapiens
acatttacctttact

SEQ ID NO: 880509 - DNA, 15 bp, Homo sapiens
cacatttacctttac

SEQ ID NO: 880510 - DNA, 15 bp, Homo sapiens
ccacatttaccttta

SEQ ID NO: 880511 - DNA, 15 bp, Homo sapiens
cccacatttaccttt

SEQ ID NO: 880512 - DNA, 15 bp, Homo sapiens
ccccacatttacctt

SEQ ID NO: 880513 - DNA, 15 bp, Homo sapiens
tccccacatttacct

SEQ ID NO: 880514 - DNA, 15 bp, Homo sapiens
gtccccacatttacc

SEQ ID NO: 880515 - DNA, 15 bp, Homo sapiens
agtccccacatttac

SEQ ID NO: 880516 - DNA, 15 bp, Homo sapiens
aagtccccacattta

SEQ ID NO: 880517 - DNA, 15 bp, Homo sapiens
aaagtccccacattt

SEQ ID NO: 880518 - DNA, 15 bp, Homo sapiens
aaaagtccccacatt

SEQ ID NO: 880519 - DNA, 15 bp, Homo sapiens
caaaagtccccacat

SEQ ID NO: 880520 - DNA, 15 bp, Homo sapiens
tcaaaagtccccaca

SEQ ID NO: 880521 - DNA, 15 bp, Homo sapiens
gtcaaaagtccccac

SEQ ID NO: 880522 - DNA, 15 bp, Homo sapiens
ggtcaaaagtcccca

SEQ ID NO: 880523 - DNA, 15 bp, Homo sapiens
gggtcaaaagtcccc

SEQ ID NO: 880524 - DNA, 15 bp, Homo sapiens
ggggtcaaaagtccc

SEQ ID NO: 880525 - DNA, 15 bp, Homo sapiens
gggggtcaaaagtcc

SEQ ID NO: 880526 - DNA, 15 bp, Homo sapiens
tgggggtcaaaagtc

SEQ ID NO: 880527 - DNA, 15 bp, Homo sapiens
atgggggtcaaaagt

SEQ ID NO: 880528 - DNA, 15 bp, Homo sapiens
aatgggggtcaaaag

SEQ ID NO: 880529 - DNA, 15 bp, Homo sapiens
gaatgggggtcaaaa

SEQ ID NO: 880530 - DNA, 15 bp, Homo sapiens
ggaatgggggtcaaa

SEQ ID NO: 880531 - DNA, 15 bp, Homo sapiens
tggaatgggggtcaa

SEQ ID NO: 880532 - DNA, 15 bp, Homo sapiens
atggaatgggggtca

SEQ ID NO: 880533 - DNA, 15 bp, Homo sapiens
gatggaatgggggtc

SEQ ID NO: 880534 - DNA, 15 bp, Homo sapiens
ggatggaatgggggt

SEQ ID NO: 880535 - DNA, 15 bp, Homo sapiens
aggatggaatggggg

SEQ ID NO: 880536 - DNA, 15 bp, Homo sapiens
taggatggaatgggg

SEQ ID NO: 880537 - DNA, 15 bp, Homo sapiens
ataggatggaatggg

SEQ ID NO: 880538 - DNA, 15 bp, Homo sapiens
tataggatggaatgg

SEQ ID NO: 880539 - DNA, 15 bp, Homo sapiens
atataggatggaatg

SEQ ID NO: 880540 - DNA, 15 bp, Homo sapiens
tatataggatggaat

SEQ ID NO: 880541 - DNA, 15 bp, Homo sapiens
gtatataggatggaa

SEQ ID NO: 880542 - DNA, 15 bp, Homo sapiens
ggtatataggatgga

SEQ ID NO: 880543 - DNA, 15 bp, Homo sapiens
tggtatataggatgg

SEQ ID NO: 880544 - DNA, 15 bp, Homo sapiens
atggtatataggatg

SEQ ID NO: 880545 - DNA, 15 bp, Homo sapiens
catggtatataggat

SEQ ID NO: 880546 - DNA, 15 bp, Homo sapiens
acatggtatatagga

SEQ ID NO: 880547 - DNA, 15 bp, Homo sapiens
tacatggtatatagg

SEQ ID NO: 880548 - DNA, 15 bp, Homo sapiens
ctacatggtatatag

SEQ ID NO: 880549 - DNA, 15 bp, Homo sapiens
gctacatggtatata

SEQ ID NO: 880550 - DNA, 15 bp, Homo sapiens
ggctacatggtatat

SEQ ID NO: 880551 - DNA, 15 bp, Homo sapiens
aggctacatggtata

SEQ ID NO: 880552 - DNA, 15 bp, Homo sapiens
taggctacatggtat

SEQ ID NO: 880553 - DNA, 15 bp, Homo sapiens
gtaggctacatggta

SEQ ID NO: 880554 - DNA, 15 bp, Homo sapiens
agtaggctacatggt

SEQ ID NO: 880555 - DNA, 15 bp, Homo sapiens
gagtaggctacatgg

SEQ ID NO: 880556 - DNA, 15 bp, Homo sapiens
ggagtaggctacatg

SEQ ID NO: 880557 - DNA, 15 bp, Homo sapiens
gggagtaggctacat

SEQ ID NO: 880558 - DNA, 15 bp, Homo sapiens
tgggagtaggctaca

SEQ ID NO: 880559 - DNA, 15 bp, Homo sapiens
ctgggagtaggctac

SEQ ID NO: 880560 - DNA, 15 bp, Homo sapiens
cctgggagtaggcta

SEQ ID NO: 880561 - DNA, 15 bp, Homo sapiens
tcctgggagtaggct

SEQ ID NO: 880562 - DNA, 15 bp, Homo sapiens
ctcctgggagtaggc

SEQ ID NO: 880563 - DNA, 15 bp, Homo sapiens
gctcctgggagtagg

SEQ ID NO: 880564 - DNA, 15 bp, Homo sapiens
ggctcctgggagtag

SEQ ID NO: 880565 - DNA, 15 bp, Homo sapiens
gggctcctgggagta

SEQ ID NO: 880566 - DNA, 15 bp, Homo sapiens
agggctcctgggagt

SEQ ID NO: 880567 - DNA, 15 bp, Homo sapiens
cagggctcctgggag

SEQ ID NO: 880568 - DNA, 15 bp, Homo sapiens
ccagggctcctggga

SEQ ID NO: 880569 - DNA, 15 bp, Homo sapiens
cccagggctcctggg

SEQ ID NO: 880570 - DNA, 15 bp, Homo sapiens
ccccagggctcctgg

SEQ ID NO: 880571 - DNA, 15 bp, Homo sapiens
gccccagggctcctg

SEQ ID NO: 880572 - DNA, 15 bp, Homo sapiens
cgccccagggctcct

SEQ ID NO: 880573 - DNA, 15 bp, Homo sapiens
gcgccccagggctcc

SEQ ID NO: 880574 - DNA, 15 bp, Homo sapiens
ggcgccccagggctc

SEQ ID NO: 880575 - DNA, 15 bp, Homo sapiens
tggcgccccagggct

SEQ ID NO: 880576 - DNA, 15 bp, Homo sapiens
ttggcgccccagggc

SEQ ID NO: 880577 - DNA, 15 bp, Homo sapiens
cttggcgccccaggg

SEQ ID NO: 880578 - DNA, 15 bp, Homo sapiens
ccttggcgccccagg

SEQ ID NO: 880579 - DNA, 15 bp, Homo sapiens
accttggcgccccag

SEQ ID NO: 880580 - DNA, 15 bp, Homo sapiens
aaccttggcgcccca

SEQ ID NO: 880581 - DNA, 15 bp, Homo sapiens
caaccttggcgcccc

SEQ ID NO: 880582 - DNA, 15 bp, Homo sapiens
gcaaccttggcgccc

SEQ ID NO: 880583 - DNA, 15 bp, Homo sapiens
agcaaccttggcgcc

SEQ ID NO: 880584 - DNA, 15 bp, Homo sapiens
gagcaaccttggcgc

SEQ ID NO: 880585 - DNA, 15 bp, Homo sapiens
ggagcaaccttggcg

SEQ ID NO: 880586 - DNA, 15 bp, Homo sapiens
tggagcaaccttggc

SEQ ID NO: 880587 - DNA, 15 bp, Homo sapiens
ctggagcaaccttgg

SEQ ID NO: 880588 - DNA, 15 bp, Homo sapiens
cctggagcaaccttg

SEQ ID NO: 880589 - DNA, 15 bp, Homo sapiens
acctggagcaacctt

SEQ ID NO: 880590 - DNA, 15 bp, Homo sapiens
cacctggagcaacct

SEQ ID NO: 880591 - DNA, 15 bp, Homo sapiens
ccacctggagcaacc

SEQ ID NO: 880592 - DNA, 15 bp, Homo sapiens
cccacctggagcaac

SEQ ID NO: 880593 - DNA, 15 bp, Homo sapiens
tcccacctggagcaa

SEQ ID NO: 880594 - DNA, 15 bp, Homo sapiens
atcccacctggagca

SEQ ID NO: 880595 - DNA, 15 bp, Homo sapiens
aatcccacctggagc

SEQ ID NO: 880596 - DNA, 15 bp, Homo sapiens
gaatcccacctggag

SEQ ID NO: 880597 - DNA, 15 bp, Homo sapiens
agaatcccacctgga

SEQ ID NO: 880598 - DNA, 15 bp, Homo sapiens
cagaatcccacctgg

SEQ ID NO: 880599 - DNA, 15 bp, Homo sapiens
gcagaatcccacctg

SEQ ID NO: 880600 - DNA, 15 bp, Homo sapiens
agcagaatcccacct

SEQ ID NO: 880601 - DNA, 15 bp, Homo sapiens
gagcagaatcccacc

SEQ ID NO: 880602 - DNA, 15 bp, Homo sapiens
agagcagaatcccac

SEQ ID NO: 880603 - DNA, 15 bp, Homo sapiens
cagagcagaatccca

SEQ ID NO: 880604 - DNA, 15 bp, Homo sapiens
acagagcagaatccc

SEQ ID NO: 880605 - DNA, 15 bp, Homo sapiens
cacagagcagaatcc

SEQ ID NO: 880606 - DNA, 15 bp, Homo sapiens
acacagagcagaatc

SEQ ID NO: 880607 - DNA, 15 bp, Homo sapiens
tacacagagcagaat

SEQ ID NO: 880608 - DNA, 15 bp, Homo sapiens
gtacacagagcagaa

SEQ ID NO: 880609 - DNA, 15 bp, Homo sapiens
ggtacacagagcaga

SEQ ID NO: 880610 - DNA, 15 bp, Homo sapiens
gggtacacagagcag

SEQ ID NO: 880611 - DNA, 15 bp, Homo sapiens
cgggtacacagagca

SEQ ID NO: 880612 - DNA, 15 bp, Homo sapiens
acgggtacacagagc

SEQ ID NO: 880613 - DNA, 15 bp, Homo sapiens
aacgggtacacagag

SEQ ID NO: 880614 - DNA, 15 bp, Homo sapiens
gaacgggtacacaga

SEQ ID NO: 880615 - DNA, 15 bp, Homo sapiens
tgaacgggtacacag

SEQ ID NO: 880616 - DNA, 15 bp, Homo sapiens
ttgaacgggtacaca

SEQ ID NO: 880617 - DNA, 15 bp, Homo sapiens
gttgaacgggtacac

SEQ ID NO: 880618 - DNA, 15 bp, Homo sapiens
tgttgaacgggtaca

SEQ ID NO: 880619 - DNA, 15 bp, Homo sapiens
ctgttgaacgggtac

SEQ ID NO: 880620 - DNA, 15 bp, Homo sapiens
tctgttgaacgggta

SEQ ID NO: 880621 - DNA, 15 bp, Homo sapiens
atctgttgaacgggt

SEQ ID NO: 880622 - DNA, 15 bp, Homo sapiens
gatctgttgaacggg

SEQ ID NO: 880623 - DNA, 15 bp, Homo sapiens
agatctgttgaacgg

SEQ ID NO: 880624 - DNA, 15 bp, Homo sapiens
gagatctgttgaacg

SEQ ID NO: 880625 - DNA, 15 bp, Homo sapiens
agagatctgttgaac

SEQ ID NO: 880626 - DNA, 15 bp, Homo sapiens
cagagatctgttgaa

SEQ ID NO: 880627 - DNA, 15 bp, Homo sapiens
acagagatctgttga

SEQ ID NO: 880628 - DNA, 15 bp, Homo sapiens
gacagagatctgttg

SEQ ID NO: 880629 - DNA, 15 bp, Homo sapiens
agacagagatctgtt

SEQ ID NO: 880630 - DNA, 15 bp, Homo sapiens
cagacagagatctgt

SEQ ID NO: 880631 - DNA, 15 bp, Homo sapiens
ccagacagagatctg

SEQ ID NO: 880632 - DNA, 15 bp, Homo sapiens
cccagacagagatct

SEQ ID NO: 880633 - DNA, 15 bp, Homo sapiens
ccccagacagagatc

SEQ ID NO: 880634 - DNA, 15 bp, Homo sapiens
gccccagacagagat

SEQ ID NO: 880635 - DNA, 15 bp, Homo sapiens
ggccccagacagaga

SEQ ID NO: 880636 - DNA, 15 bp, Homo sapiens
aggccccagacagag

SEQ ID NO: 880637 - DNA, 15 bp, Homo sapiens
gaggccccagacaga

SEQ ID NO: 880638 - DNA, 15 bp, Homo sapiens
agaggccccagacag

SEQ ID NO: 880639 - DNA, 15 bp, Homo sapiens
aagaggccccagaca

SEQ ID NO: 880640 - DNA, 15 bp, Homo sapiens
taagaggccccagac

SEQ ID NO: 880641 - DNA, 15 bp, Homo sapiens
ctaagaggccccaga

SEQ ID NO: 880642 - DNA, 15 bp, Homo sapiens
gctaagaggccccag

SEQ ID NO: 880643 - DNA, 15 bp, Homo sapiens
ggctaagaggcccca

SEQ ID NO: 880644 - DNA, 15 bp, Homo sapiens
tggctaagaggcccc

SEQ ID NO: 880645 - DNA, 15 bp, Homo sapiens
atggctaagaggccc

SEQ ID NO: 880646 - DNA, 15 bp, Homo sapiens
gatggctaagaggcc

SEQ ID NO: 880647 - DNA, 15 bp, Homo sapiens
tgatggctaagaggc

SEQ ID NO: 880648 - DNA, 15 bp, Homo sapiens
ttgatggctaagagg

SEQ ID NO: 880649 - DNA, 15 bp, Homo sapiens
gttgatggctaagag

SEQ ID NO: 880650 - DNA, 15 bp, Homo sapiens
agttgatggctaaga

SEQ ID NO: 880651 - DNA, 15 bp, Homo sapiens
gagttgatggctaag

SEQ ID NO: 880652 - DNA, 15 bp, Homo sapiens
agagttgatggctaa

SEQ ID NO: 880653 - DNA, 15 bp, Homo sapiens
cagagttgatggcta

SEQ ID NO: 880654 - DNA, 15 bp, Homo sapiens
acagagttgatggct

SEQ ID NO: 880655 - DNA, 15 bp, Homo sapiens
gacagagttgatggc

SEQ ID NO: 880656 - DNA, 15 bp, Homo sapiens
tgacagagttgatgg

SEQ ID NO: 880657 - DNA, 15 bp, Homo sapiens
ctgacagagttgatg

SEQ ID NO: 880658 - DNA, 15 bp, Homo sapiens
gctgacagagttgat

SEQ ID NO: 880659 - DNA, 15 bp, Homo sapiens
tgctgacagagttga

SEQ ID NO: 880660 - DNA, 15 bp, Homo sapiens
ttgctgacagagttg

SEQ ID NO: 880661 - DNA, 15 bp, Homo sapiens
tttgctgacagagtt

SEQ ID NO: 880662 - DNA, 15 bp, Homo sapiens
ctttgctgacagagt

SEQ ID NO: 880663 - DNA, 15 bp, Homo sapiens
gctttgctgacagag

SEQ ID NO: 880664 - DNA, 15 bp, Homo sapiens
tgctttgctgacaga

SEQ ID NO: 880665 - DNA, 15 bp, Homo sapiens
atgctttgctgacag

SEQ ID NO: 880666 - DNA, 15 bp, Homo sapiens
gatgctttgctgaca

SEQ ID NO: 880667 - DNA, 15 bp, Homo sapiens
agatgctttgctgac

SEQ ID NO: 880668 - DNA, 15 bp, Homo sapiens
gagatgctttgctga

SEQ ID NO: 880669 - DNA, 15 bp, Homo sapiens
ggagatgctttgctg

SEQ ID NO: 880670 - DNA, 15 bp, Homo sapiens
tggagatgctttgct

SEQ ID NO: 880671 - DNA, 15 bp, Homo sapiens
ttggagatgctttgc

SEQ ID NO: 880672 - DNA, 15 bp, Homo sapiens
tttggagatgctttg

SEQ ID NO: 880673 - DNA, 15 bp, Homo sapiens
ctttggagatgcttt

SEQ ID NO: 880674 - DNA, 15 bp, Homo sapiens
tctttggagatgctt

SEQ ID NO: 880675 - DNA, 15 bp, Homo sapiens
atctttggagatgct

SEQ ID NO: 880676 - DNA, 15 bp, Homo sapiens
tatctttggagatgc

SEQ ID NO: 880677 - DNA, 15 bp, Homo sapiens
gtatctttggagatg

SEQ ID NO: 880678 - DNA, 15 bp, Homo sapiens
agtatctttggagat

SEQ ID NO: 880679 - DNA, 15 bp, Homo sapiens
cagtatctttggaga

SEQ ID NO: 880680 - DNA, 15 bp, Homo sapiens
ccagtatctttggag

SEQ ID NO: 880681 - DNA, 15 bp, Homo sapiens
accagtatctttgga

SEQ ID NO: 880682 - DNA, 15 bp, Homo sapiens
aaccagtatctttgg

SEQ ID NO: 880683 - DNA, 15 bp, Homo sapiens
gaaccagtatctttg

SEQ ID NO: 880684 - DNA, 15 bp, Homo sapiens
agaaccagtatcttt

SEQ ID NO: 880685 - DNA, 15 bp, Homo sapiens
gagaaccagtatctt

SEQ ID NO: 880686 - DNA, 15 bp, Homo sapiens
tgagaaccagtatct

SEQ ID NO: 880687 - DNA, 15 bp, Homo sapiens
ctgagaaccagtatc

SEQ ID NO: 880688 - DNA, 15 bp, Homo sapiens
tctgagaaccagtat

SEQ ID NO: 880689 - DNA, 15 bp, Homo sapiens
ttctgagaaccagta

SEQ ID NO: 880690 - DNA, 15 bp, Homo sapiens
tttctgagaaccagt

SEQ ID NO: 880691 - DNA, 15 bp, Homo sapiens
ttttctgagaaccag

SEQ ID NO: 880692 - DNA, 15 bp, Homo sapiens
cttttctgagaacca

SEQ ID NO: 880693 - DNA, 15 bp, Homo sapiens
gcttttctgagaacc

SEQ ID NO: 880694 - DNA, 15 bp, Homo sapiens
agcttttctgagaac

SEQ ID NO: 880695 - DNA, 15 bp, Homo sapiens
cagcttttctgagaa

SEQ ID NO: 880696 - DNA, 15 bp, Homo sapiens
acagcttttctgaga

SEQ ID NO: 880697 - DNA, 15 bp, Homo sapiens
gacagcttttctgag

SEQ ID NO: 880698 - DNA, 15 bp, Homo sapiens
agacagcttttctga

SEQ ID NO: 880699 - DNA, 15 bp, Homo sapiens
cagacagcttttctg

SEQ ID NO: 880700 - DNA, 15 bp, Homo sapiens
acagacagcttttct

SEQ ID NO: 880701 - DNA, 15 bp, Homo sapiens
aacagacagcttttc

SEQ ID NO: 880702 - DNA, 15 bp, Homo sapiens
gaacagacagctttt

SEQ ID NO: 880703 - DNA, 15 bp, Homo sapiens
tgaacagacagcttt

SEQ ID NO: 880704 - DNA, 15 bp, Homo sapiens
gtgaacagacagctt

SEQ ID NO: 880705 - DNA, 15 bp, Homo sapiens
ggtgaacagacagct

SEQ ID NO: 880706 - DNA, 15 bp, Homo sapiens
aggtgaacagacagc

SEQ ID NO: 880707 - DNA, 15 bp, Homo sapiens
gaggtgaacagacag

SEQ ID NO: 880708 - DNA, 15 bp, Homo sapiens
agaggtgaacagaca

SEQ ID NO: 880709 - DNA, 15 bp, Homo sapiens
cagaggtgaacagac

SEQ ID NO: 880710 - DNA, 15 bp, Homo sapiens
tcagaggtgaacaga

SEQ ID NO: 880711 - DNA, 15 bp, Homo sapiens
gtcagaggtgaacag

SEQ ID NO: 880712 - DNA, 15 bp, Homo sapiens
ggtcagaggtgaaca

SEQ ID NO: 880713 - DNA, 15 bp, Homo sapiens
gggtcagaggtgaac

SEQ ID NO: 880714 - DNA, 15 bp, Homo sapiens
tgggtcagaggtgaa

SEQ ID NO: 880715 - DNA, 15 bp, Homo sapiens
atgggtcagaggtga

SEQ ID NO: 880716 - DNA, 15 bp, Homo sapiens
gatgggtcagaggtg

SEQ ID NO: 880717 - DNA, 15 bp, Homo sapiens
ggatgggtcagaggt

SEQ ID NO: 880718 - DNA, 15 bp, Homo sapiens
tggatgggtcagagg

SEQ ID NO: 880719 - DNA, 15 bp, Homo sapiens
ttggatgggtcagag

SEQ ID NO: 880720 - DNA, 15 bp, Homo sapiens
cttggatgggtcaga

SEQ ID NO: 880721 - DNA, 15 bp, Homo sapiens
ccttggatgggtcag

SEQ ID NO: 880722 - DNA, 15 bp, Homo sapiens
cccttggatgggtca

SEQ ID NO: 880723 - DNA, 15 bp, Homo sapiens
ccccttggatgggtc

SEQ ID NO: 880724 - DNA, 15 bp, Homo sapiens
accccttggatgggt

SEQ ID NO: 880725 - DNA, 15 bp, Homo sapiens
gaccccttggatggg

SEQ ID NO: 880726 - DNA, 15 bp, Homo sapiens
agaccccttggatgg

SEQ ID NO: 880727 - DNA, 15 bp, Homo sapiens
cagaccccttggatg

SEQ ID NO: 880728 - DNA, 15 bp, Homo sapiens
gcagaccccttggat

SEQ ID NO: 880729 - DNA, 15 bp, Homo sapiens
ggcagaccccttgga

SEQ ID NO: 880730 - DNA, 15 bp, Homo sapiens
gggcagaccccttgg

SEQ ID NO: 880731 - DNA, 15 bp, Homo sapiens
tgggcagaccccttg

SEQ ID NO: 880732 - DNA, 15 bp, Homo sapiens
ctgggcagacccctt

SEQ ID NO: 880733 - DNA, 15 bp, Homo sapiens
gctgggcagacccct

SEQ ID NO: 880734 - DNA, 15 bp, Homo sapiens
tgctgggcagacccc

SEQ ID NO: 880735 - DNA, 15 bp, Homo sapiens
ctgctgggcagaccc

SEQ ID NO: 880736 - DNA, 15 bp, Homo sapiens
cctgctgggcagacc

SEQ ID NO: 880737 - DNA, 15 bp, Homo sapiens
ccctgctgggcagac

SEQ ID NO: 880738 - DNA, 15 bp, Homo sapiens
gccctgctgggcaga

SEQ ID NO: 880739 - DNA, 15 bp, Homo sapiens
cgccctgctgggcag

SEQ ID NO: 880740 - DNA, 15 bp, Homo sapiens
acgccctgctgggca

SEQ ID NO: 880741 - DNA, 15 bp, Homo sapiens
aacgccctgctgggc

SEQ ID NO: 880742 - DNA, 15 bp, Homo sapiens
taacgccctgctggg

SEQ ID NO: 880743 - DNA, 15 bp, Homo sapiens
ataacgccctgctgg

SEQ ID NO: 880744 - DNA, 15 bp, Homo sapiens
aataacgccctgctg

SEQ ID NO: 880745 - DNA, 15 bp, Homo sapiens
gaataacgccctgct

SEQ ID NO: 880746 - DNA, 15 bp, Homo sapiens
agaataacgccctgc

SEQ ID NO: 880747 - DNA, 15 bp, Homo sapiens
gagaataacgccctg

SEQ ID NO: 880748 - DNA, 15 bp, Homo sapiens
ggagaataacgccct

SEQ ID NO: 880749 - DNA, 15 bp, Homo sapiens
aggagaataacgccc

SEQ ID NO: 880750 - DNA, 15 bp, Homo sapiens
gaggagaataacgcc

SEQ ID NO: 880751 - DNA, 15 bp, Homo sapiens
agaggagaataacgc

SEQ ID NO: 880752 - DNA, 15 bp, Homo sapiens
aagaggagaataacg

SEQ ID NO: 880753 - DNA, 15 bp, Homo sapiens
taagaggagaataac

SEQ ID NO: 880754 - DNA, 15 bp, Homo sapiens
gtaagaggagaataa

SEQ ID NO: 880755 - DNA, 15 bp, Homo sapiens
ggtaagaggagaata

SEQ ID NO: 880756 - DNA, 15 bp, Homo sapiens
tggtaagaggagaat

SEQ ID NO: 880757 - DNA, 15 bp, Homo sapiens
ttggtaagaggagaa

SEQ ID NO: 880758 - DNA, 15 bp, Homo sapiens
tttggtaagaggaga

SEQ ID NO: 880759 - DNA, 15 bp, Homo sapiens
gtttggtaagaggag

SEQ ID NO: 880760 - DNA, 15 bp, Homo sapiens
agtttggtaagagga

SEQ ID NO: 880761 - DNA, 15 bp, Homo sapiens
gagtttggtaagagg

SEQ ID NO: 880762 - DNA, 15 bp, Homo sapiens
ggagtttggtaagag

SEQ ID NO: 880763 - DNA, 15 bp, Homo sapiens
aggagtttggtaaga

SEQ ID NO: 880764 - DNA, 15 bp, Homo sapiens
caggagtttggtaag

SEQ ID NO: 880765 - DNA, 15 bp, Homo sapiens
acaggagtttggtaa

SEQ ID NO: 880766 - DNA, 15 bp, Homo sapiens
gacaggagtttggta

SEQ ID NO: 880767 - DNA, 15 bp, Homo sapiens
agacaggagtttggt

SEQ ID NO: 880768 - DNA, 15 bp, Homo sapiens
aagacaggagtttgg

SEQ ID NO: 880769 - DNA, 15 bp, Homo sapiens
gaagacaggagtttg

SEQ ID NO: 880770 - DNA, 15 bp, Homo sapiens
ggaagacaggagttt

SEQ ID NO: 880771 - DNA, 15 bp, Homo sapiens
aggaagacaggagtt

SEQ ID NO: 880772 - DNA, 15 bp, Homo sapiens
caggaagacaggagt

SEQ ID NO: 880773 - DNA, 15 bp, Homo sapiens
gcaggaagacaggag

SEQ ID NO: 880774 - DNA, 15 bp, Homo sapiens
ggcaggaagacagga

SEQ ID NO: 880775 - DNA, 15 bp, Homo sapiens
gggcaggaagacagg

SEQ ID NO: 880776 - DNA, 15 bp, Homo sapiens
ggggcaggaagacag

SEQ ID NO: 880777 - DNA, 15 bp, Homo sapiens
tggggcaggaagaca

SEQ ID NO: 880778 - DNA, 15 bp, Homo sapiens
ttggggcaggaagac

SEQ ID NO: 880779 - DNA, 15 bp, Homo sapiens
tttggggcaggaaga

SEQ ID NO: 880780 - DNA, 15 bp, Homo sapiens
gtttggggcaggaag

SEQ ID NO: 880781 - DNA, 15 bp, Homo sapiens
ggtttggggcaggaa

SEQ ID NO: 880782 - DNA, 15 bp, Homo sapiens
cggtttggggcagga

SEQ ID NO: 880783 - DNA, 15 bp, Homo sapiens
ccggtttggggcagg

SEQ ID NO: 880784 - DNA, 15 bp, Homo sapiens
gccggtttggggcag

SEQ ID NO: 880785 - DNA, 15 bp, Homo sapiens
tgccggtttggggca

SEQ ID NO: 880786 - DNA, 15 bp, Homo sapiens
atgccggtttggggc

SEQ ID NO: 880787 - DNA, 15 bp, Homo sapiens
aatgccggtttgggg

SEQ ID NO: 880788 - DNA, 15 bp, Homo sapiens
gaatgccggtttggg

SEQ ID NO: 880789 - DNA, 15 bp, Homo sapiens
agaatgccggtttgg

SEQ ID NO: 880790 - DNA, 15 bp, Homo sapiens
aagaatgccggtttg

SEQ ID NO: 880791 - DNA, 15 bp, Homo sapiens
gaagaatgccggttt

SEQ ID NO: 880792 - DNA, 15 bp, Homo sapiens
ggaagaatgccggtt

SEQ ID NO: 880793 - DNA, 15 bp, Homo sapiens
gggaagaatgccggt

SEQ ID NO: 880794 - DNA, 15 bp, Homo sapiens
tgggaagaatgccgg

SEQ ID NO: 880795 - DNA, 15 bp, Homo sapiens
atgggaagaatgccg

SEQ ID NO: 880796 - DNA, 15 bp, Homo sapiens
aatgggaagaatgcc

SEQ ID NO: 880797 - DNA, 15 bp, Homo sapiens
gaatgggaagaatgc

SEQ ID NO: 880798 - DNA, 15 bp, Homo sapiens
cgaatgggaagaatg

SEQ ID NO: 880799 - DNA, 15 bp, Homo sapiens
acgaatgggaagaat

SEQ ID NO: 880800 - DNA, 15 bp, Homo sapiens
aacgaatgggaagaa

SEQ ID NO: 880801 - DNA, 15 bp, Homo sapiens
aaacgaatgggaaga

SEQ ID NO: 880802 - DNA, 15 bp, Homo sapiens
gaaacgaatgggaag

SEQ ID NO: 880803 - DNA, 15 bp, Homo sapiens
tgaaacgaatgggaa

SEQ ID NO: 880804 - DNA, 15 bp, Homo sapiens
gtgaaacgaatggga

SEQ ID NO: 880805 - DNA, 15 bp, Homo sapiens
agtgaaacgaatggg

SEQ ID NO: 880806 - DNA, 15 bp, Homo sapiens
gagtgaaacgaatgg

SEQ ID NO: 880807 - DNA, 15 bp, Homo sapiens
ggagtgaaacgaatg

SEQ ID NO: 880808 - DNA, 15 bp, Homo sapiens
gggagtgaaacgaat

SEQ ID NO: 880809 - DNA, 15 bp, Homo sapiens
agggagtgaaacgaa

SEQ ID NO: 880810 - DNA, 15 bp, Homo sapiens
aagggagtgaaacga

SEQ ID NO: 880811 - DNA, 15 bp, Homo sapiens
aaagggagtgaaacg

SEQ ID NO: 880812 - DNA, 15 bp, Homo sapiens
aaaagggagtgaaac

SEQ ID NO: 880813 - DNA, 15 bp, Homo sapiens
gaaaagggagtgaaa

SEQ ID NO: 880814 - DNA, 15 bp, Homo sapiens
tgaaaagggagtgaa

SEQ ID NO: 880815 - DNA, 15 bp, Homo sapiens
atgaaaagggagtga

SEQ ID NO: 880816 - DNA, 15 bp, Homo sapiens
aatgaaaagggagtg

SEQ ID NO: 880817 - DNA, 15 bp, Homo sapiens
aaatgaaaagggagt

SEQ ID NO: 880818 - DNA, 15 bp, Homo sapiens
caaatgaaaagggag

SEQ ID NO: 880819 - DNA, 15 bp, Homo sapiens
ccaaatgaaaaggga

SEQ ID NO: 880820 - DNA, 15 bp, Homo sapiens
cccaaatgaaaaggg

SEQ ID NO: 880821 - DNA, 15 bp, Homo sapiens
tcccaaatgaaaagg

SEQ ID NO: 880822 - DNA, 15 bp, Homo sapiens
gtcccaaatgaaaag

SEQ ID NO: 880823 - DNA, 15 bp, Homo sapiens
tgtcccaaatgaaaa

SEQ ID NO: 880824 - DNA, 15 bp, Homo sapiens
ctgtcccaaatgaaa

SEQ ID NO: 880825 - DNA, 15 bp, Homo sapiens
actgtcccaaatgaa

SEQ ID NO: 880826 - DNA, 15 bp, Homo sapiens
cactgtcccaaatga

SEQ ID NO: 880827 - DNA, 15 bp, Homo sapiens
ccactgtcccaaatg

SEQ ID NO: 880828 - DNA, 15 bp, Homo sapiens
tccactgtcccaaat

SEQ ID NO: 880829 - DNA, 15 bp, Homo sapiens
ttccactgtcccaaa

SEQ ID NO: 880830 - DNA, 15 bp, Homo sapiens
cttccactgtcccaa

SEQ ID NO: 880831 - DNA, 15 bp, Homo sapiens
tcttccactgtccca

SEQ ID NO: 880832 - DNA, 15 bp, Homo sapiens
gtcttccactgtccc

SEQ ID NO: 880833 - DNA, 15 bp, Homo sapiens
agtcttccactgtcc

SEQ ID NO: 880834 - DNA, 15 bp, Homo sapiens
gagtcttccactgtc

SEQ ID NO: 880835 - DNA, 15 bp, Homo sapiens
ggagtcttccactgt

SEQ ID NO: 880836 - DNA, 15 bp, Homo sapiens
tggagtcttccactg

SEQ ID NO: 880837 - DNA, 15 bp, Homo sapiens
ttggagtcttccact

SEQ ID NO: 880838 - DNA, 15 bp, Homo sapiens
attggagtcttccac

SEQ ID NO: 880839 - DNA, 15 bp, Homo sapiens
cattggagtcttcca

SEQ ID NO: 880840 - DNA, 15 bp, Homo sapiens
gcattggagtcttcc

SEQ ID NO: 880841 - DNA, 15 bp, Homo sapiens
tgcattggagtcttc

SEQ ID NO: 880842 - DNA, 15 bp, Homo sapiens
ttgcattggagtctt

SEQ ID NO: 880843 - DNA, 15 bp, Homo sapiens
tttgcattggagtct

SEQ ID NO: 880844 - DNA, 15 bp, Homo sapiens
ctttgcattggagtc

SEQ ID NO: 880845 - DNA, 15 bp, Homo sapiens
tctttgcattggagt

SEQ ID NO: 880846 - DNA, 15 bp, Homo sapiens
ctctttgcattggag

SEQ ID NO: 880847 - DNA, 15 bp, Homo sapiens
tctctttgcattgga

SEQ ID NO: 880848 - DNA, 15 bp, Homo sapiens
atctctttgcattgg

SEQ ID NO: 880849 - DNA, 15 bp, Homo sapiens
catctctttgcattg

SEQ ID NO: 880850 - DNA, 15 bp, Homo sapiens
ccatctctttgcatt

SEQ ID NO: 880851 - DNA, 15 bp, Homo sapiens
tccatctctttgcat

SEQ ID NO: 880852 - DNA, 15 bp, Homo sapiens
gtccatctctttgca

SEQ ID NO: 880853 - DNA, 15 bp, Homo sapiens
tgtccatctctttgc

SEQ ID NO: 880854 - DNA, 15 bp, Homo sapiens
atgtccatctctttg

SEQ ID NO: 880855 - DNA, 15 bp, Homo sapiens
aatgtccatctcttt

SEQ ID NO: 880856 - DNA, 15 bp, Homo sapiens
aaatgtccatctctt

SEQ ID NO: 880857 - DNA, 15 bp, Homo sapiens
aaaatgtccatctct

SEQ ID NO: 880858 - DNA, 15 bp, Homo sapiens
aaaaatgtccatctc

SEQ ID NO: 880859 - DNA, 15 bp, Homo sapiens
gaaaaatgtccatct

SEQ ID NO: 880860 - DNA, 15 bp, Homo sapiens
agaaaaatgtccatc

SEQ ID NO: 880861 - DNA, 15 bp, Homo sapiens
gagaaaaatgtccat

SEQ ID NO: 880862 - DNA, 15 bp, Homo sapiens
ggagaaaaatgtcca

SEQ ID NO: 880863 - DNA, 15 bp, Homo sapiens
gggagaaaaatgtcc

SEQ ID NO: 880864 - DNA, 15 bp, Homo sapiens
agggagaaaaatgtc

SEQ ID NO: 880865 - DNA, 15 bp, Homo sapiens
cagggagaaaaatgt

SEQ ID NO: 880866 - DNA, 15 bp, Homo sapiens
acagggagaaaaatg

SEQ ID NO: 880867 - DNA, 15 bp, Homo sapiens
tacagggagaaaaat

SEQ ID NO: 880868 - DNA, 15 bp, Homo sapiens
atacagggagaaaaa

SEQ ID NO: 880869 - DNA, 15 bp, Homo sapiens
gatacagggagaaaa

SEQ ID NO: 880870 - DNA, 15 bp, Homo sapiens
ggatacagggagaaa

SEQ ID NO: 880871 - DNA, 15 bp, Homo sapiens
aggatacagggagaa

SEQ ID NO: 880872 - DNA, 15 bp, Homo sapiens
gaggatacagggaga

SEQ ID NO: 880873 - DNA, 15 bp, Homo sapiens
tgaggatacagggag

SEQ ID NO: 880874 - DNA, 15 bp, Homo sapiens
ttgaggatacaggga

SEQ ID NO: 880875 - DNA, 15 bp, Homo sapiens
cttgaggatacaggg

SEQ ID NO: 880876 - DNA, 15 bp, Homo sapiens
acttgaggatacagg

SEQ ID NO: 880877 - DNA, 15 bp, Homo sapiens
gacttgaggatacag

SEQ ID NO: 880878 - DNA, 15 bp, Homo sapiens
ggacttgaggataca

SEQ ID NO: 880879 - DNA, 15 bp, Homo sapiens
gggacttgaggatac

SEQ ID NO: 880880 - DNA, 15 bp, Homo sapiens
ggggacttgaggata

SEQ ID NO: 880881 - DNA, 15 bp, Homo sapiens
aggggacttgaggat

SEQ ID NO: 880882 - DNA, 15 bp, Homo sapiens
gaggggacttgagga

SEQ ID NO: 880883 - DNA, 15 bp, Homo sapiens
ggaggggacttgagg

SEQ ID NO: 880884 - DNA, 15 bp, Homo sapiens
tggaggggacttgag

SEQ ID NO: 880885 - DNA, 15 bp, Homo sapiens
ttggaggggacttga

SEQ ID NO: 880886 - DNA, 15 bp, Homo sapiens
tttggaggggacttg

SEQ ID NO: 880887 - DNA, 15 bp, Homo sapiens
ctttggaggggactt

SEQ ID NO: 880888 - DNA, 15 bp, Homo sapiens
gctttggaggggact

SEQ ID NO: 880889 - DNA, 15 bp, Homo sapiens
tgctttggaggggac

SEQ ID NO: 880890 - DNA, 15 bp, Homo sapiens
ctgctttggagggga

SEQ ID NO: 880891 - DNA, 15 bp, Homo sapiens
gctgctttggagggg

SEQ ID NO: 880892 - DNA, 15 bp, Homo sapiens
agctgctttggaggg

SEQ ID NO: 880893 - DNA, 15 bp, Homo sapiens
cagctgctttggagg

SEQ ID NO: 880894 - DNA, 15 bp, Homo sapiens
ccagctgctttggag

SEQ ID NO: 880895 - DNA, 15 bp, Homo sapiens
gccagctgctttgga

SEQ ID NO: 880896 - DNA, 15 bp, Homo sapiens
tgccagctgctttgg

SEQ ID NO: 880897 - DNA, 15 bp, Homo sapiens
gtgccagctgctttg

SEQ ID NO: 880898 - DNA, 15 bp, Homo sapiens
agtgccagctgcttt

SEQ ID NO: 880899 - DNA, 15 bp, Homo sapiens
cagtgccagctgctt

SEQ ID NO: 880900 - DNA, 15 bp, Homo sapiens
ccagtgccagctgct

SEQ ID NO: 880901 - DNA, 15 bp, Homo sapiens
gccagtgccagctgc

SEQ ID NO: 880902 - DNA, 15 bp, Homo sapiens
agccagtgccagctg

SEQ ID NO: 880903 - DNA, 15 bp, Homo sapiens
aagccagtgccagct

SEQ ID NO: 880904 - DNA, 15 bp, Homo sapiens
aaagccagtgccagc

SEQ ID NO: 880905 - DNA, 15 bp, Homo sapiens
taaagccagtgccag

SEQ ID NO: 880906 - DNA, 15 bp, Homo sapiens
ttaaagccagtgcca

SEQ ID NO: 880907 - DNA, 15 bp, Homo sapiens
tttaaagccagtgcc

SEQ ID NO: 880908 - DNA, 15 bp, Homo sapiens
ttttaaagccagtgc

SEQ ID NO: 880909 - DNA, 15 bp, Homo sapiens
gttttaaagccagtg

SEQ ID NO: 880910 - DNA, 15 bp, Homo sapiens
agttttaaagccagt

SEQ ID NO: 880911 - DNA, 15 bp, Homo sapiens
gagttttaaagccag

SEQ ID NO: 880912 - DNA, 15 bp, Homo sapiens
agagttttaaagcca

SEQ ID NO: 880913 - DNA, 15 bp, Homo sapiens
gagagttttaaagcc

SEQ ID NO: 880914 - DNA, 15 bp, Homo sapiens
agagagttttaaagc

SEQ ID NO: 880915 - DNA, 15 bp, Homo sapiens
cagagagttttaaag

SEQ ID NO: 880916 - DNA, 15 bp, Homo sapiens
ccagagagttttaaa

SEQ ID NO: 880917 - DNA, 15 bp, Homo sapiens
tccagagagttttaa

SEQ ID NO: 880918 - DNA, 15 bp, Homo sapiens
ttccagagagtttta

SEQ ID NO: 880919 - DNA, 15 bp, Homo sapiens
attccagagagtttt

SEQ ID NO: 880920 - DNA, 15 bp, Homo sapiens
cattccagagagttt

SEQ ID NO: 880921 - DNA, 15 bp, Homo sapiens
gcattccagagagtt

SEQ ID NO: 880922 - DNA, 15 bp, Homo sapiens
tgcattccagagagt

SEQ ID NO: 880923 - DNA, 15 bp, Homo sapiens
atgcattccagagag

SEQ ID NO: 880924 - DNA, 15 bp, Homo sapiens
aatgcattccagaga

SEQ ID NO: 880925 - DNA, 15 bp, Homo sapiens
caatgcattccagag

SEQ ID NO: 880926 - DNA, 15 bp, Homo sapiens
ccaatgcattccaga

SEQ ID NO: 880927 - DNA, 15 bp, Homo sapiens
accaatgcattccag

SEQ ID NO: 880928 - DNA, 15 bp, Homo sapiens
aaccaatgcattcca

SEQ ID NO: 880929 - DNA, 15 bp, Homo sapiens
aaaccaatgcattcc

SEQ ID NO: 880930 - DNA, 15 bp, Homo sapiens
aaaaccaatgcattc

SEQ ID NO: 880931 - DNA, 15 bp, Homo sapiens
aaaaaccaatgcatt

SEQ ID NO: 880932 - DNA, 15 bp, Homo sapiens
taaaaaccaatgcat

SEQ ID NO: 880933 - DNA, 15 bp, Homo sapiens
ttaaaaaccaatgca

SEQ ID NO: 880934 - DNA, 15 bp, Homo sapiens
tttaaaaaccaatgc

SEQ ID NO: 880935 - DNA, 15 bp, Homo sapiens
ttttaaaaaccaatg

SEQ ID NO: 880936 - DNA, 15 bp, Homo sapiens
cttttaaaaaccaat

SEQ ID NO: 880937 - DNA, 15 bp, Homo sapiens
gcttttaaaaaccaa

SEQ ID NO: 880938 - DNA, 15 bp, Homo sapiens
ggcttttaaaaacca

SEQ ID NO: 880939 - DNA, 15 bp, Homo sapiens
tggcttttaaaaacc

SEQ ID NO: 880940 - DNA, 15 bp, Homo sapiens
gtggcttttaaaaac

SEQ ID NO: 880941 - DNA, 15 bp, Homo sapiens
tgtggcttttaaaaa

SEQ ID NO: 880942 - DNA, 15 bp, Homo sapiens
atgtggcttttaaaa

SEQ ID NO: 880943 - DNA, 15 bp, Homo sapiens
gatgtggcttttaaa

SEQ ID NO: 880944 - DNA, 15 bp, Homo sapiens
agatgtggcttttaa

SEQ ID NO: 880945 - DNA, 15 bp, Homo sapiens
aagatgtggctttta

SEQ ID NO: 880946 - DNA, 15 bp, Homo sapiens
aaagatgtggctttt

SEQ ID NO: 880947 - DNA, 15 bp, Homo sapiens
caaagatgtggcttt

SEQ ID NO: 880948 - DNA, 15 bp, Homo sapiens
tcaaagatgtggctt

SEQ ID NO: 880949 - DNA, 15 bp, Homo sapiens
gtcaaagatgtggct

SEQ ID NO: 880950 - DNA, 15 bp, Homo sapiens
agtcaaagatgtggc

SEQ ID NO: 880951 - DNA, 15 bp, Homo sapiens
gagtcaaagatgtgg

SEQ ID NO: 880952 - DNA, 15 bp, Homo sapiens
ggagtcaaagatgtg

SEQ ID NO: 880953 - DNA, 15 bp, Homo sapiens
gggagtcaaagatgt

SEQ ID NO: 880954 - DNA, 15 bp, Homo sapiens
agggagtcaaagatg

SEQ ID NO: 880955 - DNA, 15 bp, Homo sapiens
cagggagtcaaagat

SEQ ID NO: 880956 - DNA, 15 bp, Homo sapiens
gcagggagtcaaaga

SEQ ID NO: 880957 - DNA, 15 bp, Homo sapiens
ggcagggagtcaaag

SEQ ID NO: 880958 - DNA, 15 bp, Homo sapiens
gggcagggagtcaaa

SEQ ID NO: 880959 - DNA, 15 bp, Homo sapiens
agggcagggagtcaa

SEQ ID NO: 880960 - DNA, 15 bp, Homo sapiens
gagggcagggagtca

SEQ ID NO: 880961 - DNA, 15 bp, Homo sapiens
agagggcagggagtc

SEQ ID NO: 880962 - DNA, 15 bp, Homo sapiens
gagagggcagggagt

SEQ ID NO: 880963 - DNA, 15 bp, Homo sapiens
tgagagggcagggag

SEQ ID NO: 880964 - DNA, 15 bp, Homo sapiens
ttgagagggcaggga

SEQ ID NO: 880965 - DNA, 15 bp, Homo sapiens
attgagagggcaggg

SEQ ID NO: 880966 - DNA, 15 bp, Homo sapiens
cattgagagggcagg

SEQ ID NO: 880967 - DNA, 15 bp, Homo sapiens
acattgagagggcag

SEQ ID NO: 880968 - DNA, 15 bp, Homo sapiens
aacattgagagggca

SEQ ID NO: 880969 - DNA, 15 bp, Homo sapiens
taacattgagagggc

SEQ ID NO: 880970 - DNA, 15 bp, Homo sapiens
ataacattgagaggg

SEQ ID NO: 880971 - DNA, 15 bp, Homo sapiens
cataacattgagagg

SEQ ID NO: 880972 - DNA, 15 bp, Homo sapiens
tcataacattgagag

SEQ ID NO: 880973 - DNA, 15 bp, Homo sapiens
ttcataacattgaga

SEQ ID NO: 880974 - DNA, 15 bp, Homo sapiens
attcataacattgag

SEQ ID NO: 880975 - DNA, 15 bp, Homo sapiens
aattcataacattga

SEQ ID NO: 880976 - DNA, 15 bp, Homo sapiens
aaattcataacattg

SEQ ID NO: 880977 - DNA, 15 bp, Homo sapiens
aaaattcataacatt

SEQ ID NO: 880978 - DNA, 15 bp, Homo sapiens
taaaattcataacat

SEQ ID NO: 880979 - DNA, 15 bp, Homo sapiens
ataaaattcataaca

SEQ ID NO: 880980 - DNA, 15 bp, Homo sapiens
aataaaattcataac

SEQ ID NO: 880981 - DNA, 15 bp, Homo sapiens
caataaaattcataa

SEQ ID NO: 880982 - DNA, 15 bp, Homo sapiens
acaataaaattcata

SEQ ID NO: 880983 - DNA, 15 bp, Homo sapiens
tacaataaaattcat

SEQ ID NO: 880984 - DNA, 15 bp, Homo sapiens
ttacaataaaattca

SEQ ID NO: 880985 - DNA, 15 bp, Homo sapiens
tttacaataaaattc

SEQ ID NO: 880986 - DNA, 15 bp, Homo sapiens
ttttacaataaaatt

SEQ ID NO: 880987 - DNA, 15 bp, Homo sapiens
tttttacaataaaat

SEQ ID NO: 880988 - DNA, 15 bp, Homo sapiens
atttttacaataaaa

SEQ ID NO: 880989 - DNA, 15 bp, Homo sapiens
tatttttacaataaa

SEQ ID NO: 880990 - DNA, 15 bp, Homo sapiens
gtatttttacaataa

SEQ ID NO: 880991 - DNA, 15 bp, Homo sapiens
tgtatttttacaata

SEQ ID NO: 880992 - DNA, 15 bp, Homo sapiens
ttgtatttttacaat

SEQ ID NO: 880993 - DNA, 15 bp, Homo sapiens
gttgtatttttacaa

SEQ ID NO: 880994 - DNA, 15 bp, Homo sapiens
tgttgtatttttaca

SEQ ID NO: 880995 - DNA, 15 bp, Homo sapiens
atgttgtatttttac

SEQ ID NO: 880996 - DNA, 15 bp, Homo sapiens
tatgttgtattttta

SEQ ID NO: 880997 - DNA, 15 bp, Homo sapiens
atatgttgtattttt

SEQ ID NO: 880998 - DNA, 15 bp, Homo sapiens
gatatgttgtatttt

SEQ ID NO: 880999 - DNA, 15 bp, Homo sapiens
tgatatgttgtattt

SEQ ID NO: 881000 - DNA, 15 bp, Homo sapiens
ctgatatgttgtatt

SEQ ID NO: 881001 - DNA, 15 bp, Homo sapiens
cctgatatgttgtat

SEQ ID NO: 881002 - DNA, 15 bp, Homo sapiens
acctgatatgttgta

SEQ ID NO: 881003 - DNA, 15 bp, Homo sapiens
tacctgatatgttgt

SEQ ID NO: 881004 - DNA, 15 bp, Homo sapiens
gtacctgatatgttg

SEQ ID NO: 881005 - DNA, 15 bp, Homo sapiens
tgtacctgatatgtt

SEQ ID NO: 881006 - DNA, 15 bp, Homo sapiens
gtgtacctgatatgt

SEQ ID NO: 881007 - DNA, 15 bp, Homo sapiens
tgtgtacctgatatg

SEQ ID NO: 881008 - DNA, 15 bp, Homo sapiens
ctgtgtacctgatat

SEQ ID NO: 881009 - DNA, 15 bp, Homo sapiens
actgtgtacctgata

SEQ ID NO: 881010 - DNA, 15 bp, Homo sapiens
aactgtgtacctgat

SEQ ID NO: 881011 - DNA, 15 bp, Homo sapiens
gaactgtgtacctga

SEQ ID NO: 881012 - DNA, 15 bp, Homo sapiens
ggaactgtgtacctg

SEQ ID NO: 881013 - DNA, 15 bp, Homo sapiens
gggaactgtgtacct

SEQ ID NO: 881014 - DNA, 15 bp, Homo sapiens
agggaactgtgtacc

SEQ ID NO: 881015 - DNA, 15 bp, Homo sapiens
cagggaactgtgtac

SEQ ID NO: 881016 - DNA, 15 bp, Homo sapiens
tcagggaactgtgta

SEQ ID NO: 881017 - DNA, 15 bp, Homo sapiens
ttcagggaactgtgt

SEQ ID NO: 881018 - DNA, 15 bp, Homo sapiens
cttcagggaactgtg

SEQ ID NO: 881019 - DNA, 15 bp, Homo sapiens
tcttcagggaactgt

SEQ ID NO: 881020 - DNA, 15 bp, Homo sapiens
gtcttcagggaactg

SEQ ID NO: 881021 - DNA, 15 bp, Homo sapiens
cgtcttcagggaact

SEQ ID NO: 881022 - DNA, 15 bp, Homo sapiens
tcgtcttcagggaac

SEQ ID NO: 881023 - DNA, 15 bp, Homo sapiens
ctcgtcttcagggaa

SEQ ID NO: 881024 - DNA, 15 bp, Homo sapiens
cctcgtcttcaggga

SEQ ID NO: 881025 - DNA, 15 bp, Homo sapiens
gcctcgtcttcaggg

SEQ ID NO: 881026 - DNA, 15 bp, Homo sapiens
cgcctcgtcttcagg

SEQ ID NO: 881027 - DNA, 15 bp, Homo sapiens
gcgcctcgtcttcag

SEQ ID NO: 881028 - DNA, 15 bp, Homo sapiens
ggcgcctcgtcttca

SEQ ID NO: 881029 - DNA, 15 bp, Homo sapiens
tggcgcctcgtcttc

SEQ ID NO: 881030 - DNA, 15 bp, Homo sapiens
ctggcgcctcgtctt

SEQ ID NO: 881031 - DNA, 15 bp, Homo sapiens
cctggcgcctcgtct

SEQ ID NO: 881032 - DNA, 15 bp, Homo sapiens
gcctggcgcctcgtc

SEQ ID NO: 881033 - DNA, 15 bp, Homo sapiens
agcctggcgcctcgt

SEQ ID NO: 881034 - DNA, 15 bp, Homo sapiens
gagcctggcgcctcg

SEQ ID NO: 881035 - DNA, 15 bp, Homo sapiens
agagcctggcgcctc

SEQ ID NO: 881036 - DNA, 15 bp, Homo sapiens
gagagcctggcgcct

SEQ ID NO: 881037 - DNA, 15 bp, Homo sapiens
agagagcctggcgcc

SEQ ID NO: 881038 - DNA, 15 bp, Homo sapiens
gagagagcctggcgc

SEQ ID NO: 881039 - DNA, 15 bp, Homo sapiens
agagagagcctggcg

SEQ ID NO: 881040 - DNA, 15 bp, Homo sapiens
cagagagagcctggc

SEQ ID NO: 881041 - DNA, 15 bp, Homo sapiens
acagagagagcctgg

SEQ ID NO: 881042 - DNA, 15 bp, Homo sapiens
aacagagagagcctg

SEQ ID NO: 881043 - DNA, 15 bp, Homo sapiens
gaacagagagagcct

SEQ ID NO: 881044 - DNA, 15 bp, Homo sapiens
ggaacagagagagcc

SEQ ID NO: 881045 - DNA, 15 bp, Homo sapiens
aggaacagagagagc

SEQ ID NO: 881046 - DNA, 15 bp, Homo sapiens
aaggaacagagagag

SEQ ID NO: 881047 - DNA, 15 bp, Homo sapiens
aaaggaacagagaga

SEQ ID NO: 881048 - DNA, 15 bp, Homo sapiens
gaaaggaacagagag

SEQ ID NO: 881049 - DNA, 15 bp, Homo sapiens
tgaaaggaacagaga

SEQ ID NO: 881050 - DNA, 15 bp, Homo sapiens
atgaaaggaacagag

SEQ ID NO: 881051 - DNA, 15 bp, Homo sapiens
aatgaaaggaacaga

SEQ ID NO: 881052 - DNA, 15 bp, Homo sapiens
aaatgaaaggaacag

SEQ ID NO: 881053 - DNA, 15 bp, Homo sapiens
gaaatgaaaggaaca

SEQ ID NO: 881054 - DNA, 15 bp, Homo sapiens
agaaatgaaaggaac

SEQ ID NO: 881055 - DNA, 15 bp, Homo sapiens
gagaaatgaaaggaa

SEQ ID NO: 881056 - DNA, 15 bp, Homo sapiens
tgagaaatgaaagga

SEQ ID NO: 881057 - DNA, 15 bp, Homo sapiens
atgagaaatgaaagg

SEQ ID NO: 881058 - DNA, 15 bp, Homo sapiens
gatgagaaatgaaag

SEQ ID NO: 881059 - DNA, 15 bp, Homo sapiens
tgatgagaaatgaaa

SEQ ID NO: 881060 - DNA, 15 bp, Homo sapiens
ctgatgagaaatgaa

SEQ ID NO: 881061 - DNA, 15 bp, Homo sapiens
tctgatgagaaatga

SEQ ID NO: 881062 - DNA, 15 bp, Homo sapiens
atctgatgagaaatg

SEQ ID NO: 881063 - DNA, 15 bp, Homo sapiens
gatctgatgagaaat

SEQ ID NO: 881064 - DNA, 15 bp, Homo sapiens
ggatctgatgagaaa

SEQ ID NO: 881065 - DNA, 15 bp, Homo sapiens
gggatctgatgagaa

SEQ ID NO: 881066 - DNA, 15 bp, Homo sapiens
tgggatctgatgaga

SEQ ID NO: 881067 - DNA, 15 bp, Homo sapiens
ctgggatctgatgag

SEQ ID NO: 881068 - DNA, 15 bp, Homo sapiens
cctgggatctgatga

SEQ ID NO: 881069 - DNA, 15 bp, Homo sapiens
ccctgggatctgatg

SEQ ID NO: 881070 - DNA, 15 bp, Homo sapiens
tccctgggatctgat

SEQ ID NO: 881071 - DNA, 15 bp, Homo sapiens
gtccctgggatctga

SEQ ID NO: 881072 - DNA, 15 bp, Homo sapiens
cgtccctgggatctg

SEQ ID NO: 881073 - DNA, 15 bp, Homo sapiens
acgtccctgggatct

SEQ ID NO: 881074 - DNA, 15 bp, Homo sapiens
cacgtccctgggatc

SEQ ID NO: 881075 - DNA, 15 bp, Homo sapiens
ccacgtccctgggat

SEQ ID NO: 881076 - DNA, 15 bp, Homo sapiens
cccacgtccctggga

SEQ ID NO: 881077 - DNA, 15 bp, Homo sapiens
gcccacgtccctggg

SEQ ID NO: 881078 - DNA, 15 bp, Homo sapiens
ggcccacgtccctgg

SEQ ID NO: 881079 - DNA, 15 bp, Homo sapiens
tggcccacgtccctg

SEQ ID NO: 881080 - DNA, 15 bp, Homo sapiens
ttggcccacgtccct

SEQ ID NO: 881081 - DNA, 15 bp, Homo sapiens
cttggcccacgtccc

SEQ ID NO: 881082 - DNA, 15 bp, Homo sapiens
ccttggcccacgtcc

SEQ ID NO: 881083 - DNA, 15 bp, Homo sapiens
tccttggcccacgtc

SEQ ID NO: 881084 - DNA, 15 bp, Homo sapiens
gtccttggcccacgt

SEQ ID NO: 881085 - DNA, 15 bp, Homo sapiens
tgtccttggcccacg

SEQ ID NO: 881086 - DNA, 15 bp, Homo sapiens
ttgtccttggcccac

SEQ ID NO: 881087 - DNA, 15 bp, Homo sapiens
tttgtccttggccca

SEQ ID NO: 881088 - DNA, 15 bp, Homo sapiens
ttttgtccttggccc

SEQ ID NO: 881089 - DNA, 15 bp, Homo sapiens
gttttgtccttggcc

SEQ ID NO: 881090 - DNA, 15 bp, Homo sapiens
tgttttgtccttggc

SEQ ID NO: 881091 - DNA, 15 bp, Homo sapiens
ttgttttgtccttgg

SEQ ID NO: 881092 - DNA, 15 bp, Homo sapiens
tttgttttgtccttg

SEQ ID NO: 881093 - DNA, 15 bp, Homo sapiens
gtttgttttgtcctt

SEQ ID NO: 881094 - DNA, 15 bp, Homo sapiens
ggtttgttttgtcct

SEQ ID NO: 881095 - DNA, 15 bp, Homo sapiens
gggtttgttttgtcc

SEQ ID NO: 881096 - DNA, 15 bp, Homo sapiens
agggtttgttttgtc

SEQ ID NO: 881097 - DNA, 15 bp, Homo sapiens
gagggtttgttttgt

SEQ ID NO: 881098 - DNA, 15 bp, Homo sapiens
ggagggtttgttttg

SEQ ID NO: 881099 - DNA, 15 bp, Homo sapiens
tggagggtttgtttt

SEQ ID NO: 881100 - DNA, 15 bp, Homo sapiens
ctggagggtttgttt

SEQ ID NO: 881101 - DNA, 15 bp, Homo sapiens
gctggagggtttgtt

SEQ ID NO: 881102 - DNA, 15 bp, Homo sapiens
cgctggagggtttgt

SEQ ID NO: 881103 - DNA, 15 bp, Homo sapiens
acgctggagggtttg

SEQ ID NO: 881104 - DNA, 15 bp, Homo sapiens
cacgctggagggttt

SEQ ID NO: 881105 - DNA, 15 bp, Homo sapiens
gcacgctggagggtt

SEQ ID NO: 881106 - DNA, 15 bp, Homo sapiens
agcacgctggagggt

SEQ ID NO: 881107 - DNA, 15 bp, Homo sapiens
aagcacgctggaggg

SEQ ID NO: 881108 - DNA, 15 bp, Homo sapiens
aaagcacgctggagg

SEQ ID NO: 881109 - DNA, 15 bp, Homo sapiens
gaaagcacgctggag

SEQ ID NO: 881110 - DNA, 15 bp, Homo sapiens
ggaaagcacgctgga

SEQ ID NO: 881111 - DNA, 15 bp, Homo sapiens
gggaaagcacgctgg

SEQ ID NO: 881112 - DNA, 15 bp, Homo sapiens
gaggtgggaggattg

SEQ ID NO: 881113 - DNA, 15 bp, Homo sapiens
tgaggtgggaggatt

SEQ ID NO: 881114 - DNA, 15 bp, Homo sapiens
ctgaggtgggaggat

SEQ ID NO: 881115 - DNA, 15 bp, Homo sapiens
gctgaggtgggagga

SEQ ID NO: 881116 - DNA, 15 bp, Homo sapiens
ggctgaggtgggagg

SEQ ID NO: 881117 - DNA, 15 bp, Homo sapiens
aggctgaggtgggag

SEQ ID NO: 881118 - DNA, 15 bp, Homo sapiens
gaggctgaggtggga

SEQ ID NO: 881119 - DNA, 15 bp, Homo sapiens
ggaggctgaggtggg

SEQ ID NO: 881120 - DNA, 15 bp, Homo sapiens
aggaggctgaggtgg

SEQ ID NO: 881121 - DNA, 15 bp, Homo sapiens
caggaggctgaggtg

SEQ ID NO: 881122 - DNA, 15 bp, Homo sapiens
tcaggaggctgaggt

SEQ ID NO: 881123 - DNA, 15 bp, Homo sapiens
ctcaggaggctgagg

SEQ ID NO: 881124 - DNA, 15 bp, Homo sapiens
actcaggaggctgag

SEQ ID NO: 881125 - DNA, 15 bp, Homo sapiens
cactcaggaggctga

SEQ ID NO: 881126 - DNA, 15 bp, Homo sapiens
ccactcaggaggctg

SEQ ID NO: 881127 - DNA, 15 bp, Homo sapiens
gccactcaggaggct

SEQ ID NO: 881128 - DNA, 15 bp, Homo sapiens
agccactcaggaggc

SEQ ID NO: 881129 - DNA, 15 bp, Homo sapiens
cagccactcaggagg

SEQ ID NO: 881130 - DNA, 15 bp, Homo sapiens
ccagccactcaggag

SEQ ID NO: 881131 - DNA, 15 bp, Homo sapiens
cccagccactcagga

SEQ ID NO: 881132 - DNA, 15 bp, Homo sapiens
tcccagccactcagg

SEQ ID NO: 881133 - DNA, 15 bp, Homo sapiens
gtcccagccactcag

SEQ ID NO: 881134 - DNA, 15 bp, Homo sapiens
agtcccagccactca

SEQ ID NO: 881135 - DNA, 15 bp, Homo sapiens
tagtcccagccactc

SEQ ID NO: 881136 - DNA, 15 bp, Homo sapiens
gtagtcccagccact

SEQ ID NO: 881137 - DNA, 15 bp, Homo sapiens
tgtagtcccagccac

SEQ ID NO: 881138 - DNA, 15 bp, Homo sapiens
ttgtagtcccagcca

SEQ ID NO: 881139 - DNA, 15 bp, Homo sapiens
cttgtagtcccagcc

SEQ ID NO: 881140 - DNA, 15 bp, Homo sapiens
gcttgtagtcccagc

SEQ ID NO: 881141 - DNA, 15 bp, Homo sapiens
tgcttgtagtcccag

SEQ ID NO: 881142 - DNA, 15 bp, Homo sapiens
gtgcttgtagtccca

SEQ ID NO: 881143 - DNA, 15 bp, Homo sapiens
tgtgcttgtagtccc

SEQ ID NO: 881144 - DNA, 15 bp, Homo sapiens
atgtgcttgtagtcc

SEQ ID NO: 881145 - DNA, 15 bp, Homo sapiens
tatgtgcttgtagtc

SEQ ID NO: 881146 - DNA, 15 bp, Homo sapiens
gtatgtgcttgtagt

SEQ ID NO: 881147 - DNA, 15 bp, Homo sapiens
agtatgtgcttgtag

SEQ ID NO: 881148 - DNA, 15 bp, Homo sapiens
aagtatgtgcttgta

SEQ ID NO: 881149 - DNA, 15 bp, Homo sapiens
aaagtatgtgcttgt

SEQ ID NO: 881150 - DNA, 15 bp, Homo sapiens
gaaagtatgtgcttg

SEQ ID NO: 881151 - DNA, 15 bp, Homo sapiens
tgaaagtatgtgctt

SEQ ID NO: 881152 - DNA, 15 bp, Homo sapiens
atgaaagtatgtgct

SEQ ID NO: 881153 - DNA, 15 bp, Homo sapiens
catgaaagtatgtgc

SEQ ID NO: 881154 - DNA, 15 bp, Homo sapiens
gcatgaaagtatgtg

SEQ ID NO: 881155 - DNA, 15 bp, Homo sapiens
ggcatgaaagtatgt

SEQ ID NO: 881156 - DNA, 15 bp, Homo sapiens
aggcatgaaagtatg

SEQ ID NO: 881157 - DNA, 15 bp, Homo sapiens
caggcatgaaagtat

SEQ ID NO: 881158 - DNA, 15 bp, Homo sapiens
ccaggcatgaaagta

SEQ ID NO: 881159 - DNA, 15 bp, Homo sapiens
gccaggcatgaaagt

SEQ ID NO: 881160 - DNA, 15 bp, Homo sapiens
agccaggcatgaaag

SEQ ID NO: 881161 - DNA, 15 bp, Homo sapiens
cagccaggcatgaaa

SEQ ID NO: 881162 - DNA, 15 bp, Homo sapiens
tcagccaggcatgaa

SEQ ID NO: 881163 - DNA, 15 bp, Homo sapiens
ttcagccaggcatga

SEQ ID NO: 881164 - DNA, 15 bp, Homo sapiens
attcagccaggcatg

SEQ ID NO: 881165 - DNA, 15 bp, Homo sapiens
cattcagccaggcat

SEQ ID NO: 881166 - DNA, 15 bp, Homo sapiens
acattcagccaggca

SEQ ID NO: 881167 - DNA, 15 bp, Homo sapiens
aacattcagccaggc

SEQ ID NO: 881168 - DNA, 15 bp, Homo sapiens
aaacattcagccagg

SEQ ID NO: 881169 - DNA, 15 bp, Homo sapiens
aaaacattcagccag

SEQ ID NO: 881170 - DNA, 15 bp, Homo sapiens
taaaacattcagcca

SEQ ID NO: 881171 - DNA, 15 bp, Homo sapiens
ttaaaacattcagcc

SEQ ID NO: 881172 - DNA, 15 bp, Homo sapiens
attaaaacattcagc

SEQ ID NO: 881173 - DNA, 15 bp, Homo sapiens
aattaaaacattcag

SEQ ID NO: 881174 - DNA, 15 bp, Homo sapiens
aaattaaaacattca

SEQ ID NO: 881175 - DNA, 15 bp, Homo sapiens
aaaattaaaacattc

SEQ ID NO: 881176 - DNA, 15 bp, Homo sapiens
aaaaattaaaacatt

SEQ ID NO: 881177 - DNA, 15 bp, Homo sapiens
caaaaattaaaacat

SEQ ID NO: 881178 - DNA, 15 bp, Homo sapiens
acaaaaattaaaaca

SEQ ID NO: 881179 - DNA, 15 bp, Homo sapiens
cacaaaaattaaaac

SEQ ID NO: 881180 - DNA, 15 bp, Homo sapiens
ccacaaaaattaaaa

SEQ ID NO: 881181 - DNA, 15 bp, Homo sapiens
tccacaaaaattaaa

SEQ ID NO: 881182 - DNA, 15 bp, Homo sapiens
ctccacaaaaattaa

SEQ ID NO: 881183 - DNA, 15 bp, Homo sapiens
tctccacaaaaatta

SEQ ID NO: 881184 - DNA, 15 bp, Homo sapiens
gtctccacaaaaatt

SEQ ID NO: 881185 - DNA, 15 bp, Homo sapiens
tgtctccacaaaaat

SEQ ID NO: 881186 - DNA, 15 bp, Homo sapiens
ctgtctccacaaaaa

SEQ ID NO: 881187 - DNA, 15 bp, Homo sapiens
tctgtctccacaaaa

SEQ ID NO: 881188 - DNA, 15 bp, Homo sapiens
ctctgtctccacaaa

SEQ ID NO: 881189 - DNA, 15 bp, Homo sapiens
actctgtctccacaa

SEQ ID NO: 881190 - DNA, 15 bp, Homo sapiens
gactctgtctccaca

SEQ ID NO: 881191 - DNA, 15 bp, Homo sapiens
agactctgtctccac

SEQ ID NO: 881192 - DNA, 15 bp, Homo sapiens
gagactctgtctcca

SEQ ID NO: 881193 - DNA, 15 bp, Homo sapiens
tgagactctgtctcc

SEQ ID NO: 881194 - DNA, 15 bp, Homo sapiens
gtgagactctgtctc

SEQ ID NO: 881195 - DNA, 15 bp, Homo sapiens
agtgagactctgtct

SEQ ID NO: 881196 - DNA, 15 bp, Homo sapiens
tagtgagactctgtc

SEQ ID NO: 881197 - DNA, 15 bp, Homo sapiens
gtagtgagactctgt

SEQ ID NO: 881198 - DNA, 15 bp, Homo sapiens
tgtagtgagactctg

SEQ ID NO: 881199 - DNA, 15 bp, Homo sapiens
atgtagtgagactct

SEQ ID NO: 881200 - DNA, 15 bp, Homo sapiens
aatgtagtgagactc

SEQ ID NO: 881201 - DNA, 15 bp, Homo sapiens
caatgtagtgagact

SEQ ID NO: 881202 - DNA, 15 bp, Homo sapiens
gcaatgtagtgagac

SEQ ID NO: 881203 - DNA, 15 bp, Homo sapiens
agcaatgtagtgaga

SEQ ID NO: 881204 - DNA, 15 bp, Homo sapiens
cagcaatgtagtgag

SEQ ID NO: 881205 - DNA, 15 bp, Homo sapiens
tcagcaatgtagtga

SEQ ID NO: 881206 - DNA, 15 bp, Homo sapiens
ctcagcaatgtagtg

SEQ ID NO: 881207 - DNA, 15 bp, Homo sapiens
cctcagcaatgtagt

SEQ ID NO: 881208 - DNA, 15 bp, Homo sapiens
gcctcagcaatgtag

SEQ ID NO: 881209 - DNA, 15 bp, Homo sapiens
agcctcagcaatgta

SEQ ID NO: 881210 - DNA, 15 bp, Homo sapiens
cagcctcagcaatgt

SEQ ID NO: 881211 - DNA, 15 bp, Homo sapiens
tcagcctcagcaatg

SEQ ID NO: 881212 - DNA, 15 bp, Homo sapiens
gtcagcctcagcaat

SEQ ID NO: 881213 - DNA, 15 bp, Homo sapiens
ggtcagcctcagcaa

SEQ ID NO: 881214 - DNA, 15 bp, Homo sapiens
aggtcagcctcagca

SEQ ID NO: 881215 - DNA, 15 bp, Homo sapiens
gaggtcagcctcagc

SEQ ID NO: 881216 - DNA, 15 bp, Homo sapiens
tgaggtcagcctcag

SEQ ID NO: 881217 - DNA, 15 bp, Homo sapiens
ttgaggtcagcctca

SEQ ID NO: 881218 - DNA, 15 bp, Homo sapiens
tttgaggtcagcctc

SEQ ID NO: 881219 - DNA, 15 bp, Homo sapiens
gtttgaggtcagcct

SEQ ID NO: 881220 - DNA, 15 bp, Homo sapiens
agtttgaggtcagcc

SEQ ID NO: 881221 - DNA, 15 bp, Homo sapiens
gagtttgaggtcagc

SEQ ID NO: 881222 - DNA, 15 bp, Homo sapiens
agagtttgaggtcag

SEQ ID NO: 881223 - DNA, 15 bp, Homo sapiens
aagagtttgaggtca

SEQ ID NO: 881224 - DNA, 15 bp, Homo sapiens
caagagtttgaggtc

SEQ ID NO: 881225 - DNA, 15 bp, Homo sapiens
ccaagagtttgaggt

SEQ ID NO: 881226 - DNA, 15 bp, Homo sapiens
gccaagagtttgagg

SEQ ID NO: 881227 - DNA, 15 bp, Homo sapiens
ggccaagagtttgag

SEQ ID NO: 881228 - DNA, 15 bp, Homo sapiens
aggccaagagtttga

SEQ ID NO: 881229 - DNA, 15 bp, Homo sapiens
gaggccaagagtttg

SEQ ID NO: 881230 - DNA, 15 bp, Homo sapiens
tgaggccaagagttt

SEQ ID NO: 881231 - DNA, 15 bp, Homo sapiens
ttgaggccaagagtt

SEQ ID NO: 881232 - DNA, 15 bp, Homo sapiens
attgaggccaagagt

SEQ ID NO: 881233 - DNA, 15 bp, Homo sapiens
gattgaggccaagag

SEQ ID NO: 881234 - DNA, 15 bp, Homo sapiens
ggattgaggccaaga

SEQ ID NO: 881235 - DNA, 15 bp, Homo sapiens
aggattgaggccaag

SEQ ID NO: 881236 - DNA, 15 bp, Homo sapiens
gaggattgaggccaa

SEQ ID NO: 881237 - DNA, 15 bp, Homo sapiens
ggaggattgaggcca

SEQ ID NO: 881238 - DNA, 15 bp, Homo sapiens
gggaggattgaggcc

SEQ ID NO: 881239 - DNA, 15 bp, Homo sapiens
tgggaggattgaggc

SEQ ID NO: 881240 - DNA, 15 bp, Homo sapiens
atgggaggattgagg

SEQ ID NO: 881241 - DNA, 15 bp, Homo sapiens
gatgggaggattgag

SEQ ID NO: 881242 - DNA, 15 bp, Homo sapiens
agatgggaggattga

SEQ ID NO: 881243 - DNA, 15 bp, Homo sapiens
gagatgggaggattg

SEQ ID NO: 881244 - DNA, 15 bp, Homo sapiens
tgagatgggaggatt

SEQ ID NO: 881245 - DNA, 15 bp, Homo sapiens
gtgagatgggaggat

SEQ ID NO: 881246 - DNA, 15 bp, Homo sapiens
ggtgagatgggagga

SEQ ID NO: 881247 - DNA, 15 bp, Homo sapiens
gggtgagatgggagg

SEQ ID NO: 881248 - DNA, 15 bp, Homo sapiens
agggtgagatgggag

SEQ ID NO: 881249 - DNA, 15 bp, Homo sapiens
gagggtgagatggga

SEQ ID NO: 881250 - DNA, 15 bp, Homo sapiens
ggagggtgagatggg

SEQ ID NO: 881251 - DNA, 15 bp, Homo sapiens
gggagggtgagatgg

SEQ ID NO: 881252 - DNA, 15 bp, Homo sapiens
tgggagggtgagatg

SEQ ID NO: 881253 - DNA, 15 bp, Homo sapiens
ttgggagggtgagat

SEQ ID NO: 881254 - DNA, 15 bp, Homo sapiens
tttgggagggtgaga

SEQ ID NO: 881255 - DNA, 15 bp, Homo sapiens
ctttgggagggtgag

SEQ ID NO: 881256 - DNA, 15 bp, Homo sapiens
actttgggagggtga

SEQ ID NO: 881257 - DNA, 15 bp, Homo sapiens
cactttgggagggtg

SEQ ID NO: 881258 - DNA, 15 bp, Homo sapiens
gcactttgggagggt

SEQ ID NO: 881259 - DNA, 15 bp, Homo sapiens
agcactttgggaggg

SEQ ID NO: 881260 - DNA, 15 bp, Homo sapiens
tagcactttgggagg

SEQ ID NO: 881261 - DNA, 15 bp, Homo sapiens
ttagcactttgggag

SEQ ID NO: 881262 - DNA, 15 bp, Homo sapiens
cttagcactttggga

SEQ ID NO: 881263 - DNA, 15 bp, Homo sapiens
tcttagcactttggg

SEQ ID NO: 881264 - DNA, 15 bp, Homo sapiens
atcttagcactttgg

SEQ ID NO: 881265 - DNA, 15 bp, Homo sapiens
aatcttagcactttg

SEQ ID NO: 881266 - DNA, 15 bp, Homo sapiens
taatcttagcacttt

SEQ ID NO: 881267 - DNA, 15 bp, Homo sapiens
gtaatcttagcactt

SEQ ID NO: 881268 - DNA, 15 bp, Homo sapiens
tgtaatcttagcact

SEQ ID NO: 881269 - DNA, 15 bp, Homo sapiens
ctgtaatcttagcac

SEQ ID NO: 881270 - DNA, 15 bp, Homo sapiens
cctgtaatcttagca

SEQ ID NO: 881271 - DNA, 15 bp, Homo sapiens
gcctgtaatcttagc

SEQ ID NO: 881272 - DNA, 15 bp, Homo sapiens
tgcctgtaatcttag

SEQ ID NO: 881273 - DNA, 15 bp, Homo sapiens
ttgcctgtaatctta

SEQ ID NO: 881274 - DNA, 15 bp, Homo sapiens
cttgcctgtaatctt

SEQ ID NO: 881275 - DNA, 15 bp, Homo sapiens
tcttgcctgtaatct

SEQ ID NO: 881276 - DNA, 15 bp, Homo sapiens
ctcttgcctgtaatc

SEQ ID NO: 881277 - DNA, 15 bp, Homo sapiens
gctcttgcctgtaat

SEQ ID NO: 881278 - DNA, 15 bp, Homo sapiens
ggctcttgcctgtaa

SEQ ID NO: 881279 - DNA, 15 bp, Homo sapiens
tggctcttgcctgta

SEQ ID NO: 881280 - DNA, 15 bp, Homo sapiens
gtggctcttgcctgt

SEQ ID NO: 881281 - DNA, 15 bp, Homo sapiens
ggtggctcttgcctg

SEQ ID NO: 881282 - DNA, 15 bp, Homo sapiens
tggtggctcttgcct

SEQ ID NO: 881283 - DNA, 15 bp, Homo sapiens
gtggtggctcttgcc

SEQ ID NO: 881284 - DNA, 15 bp, Homo sapiens
tgtggtggctcttgc

SEQ ID NO: 881285 - DNA, 15 bp, Homo sapiens
gtgtggtggctcttg

SEQ ID NO: 881286 - DNA, 15 bp, Homo sapiens
ggtgtggtggctctt

SEQ ID NO: 881287 - DNA, 15 bp, Homo sapiens
aggtgtggtggctct

SEQ ID NO: 881288 - DNA, 15 bp, Homo sapiens
caggtgtggtggctc

SEQ ID NO: 881289 - DNA, 15 bp, Homo sapiens
ccaggtgtggtggct

SEQ ID NO: 881290 - DNA, 15 bp, Homo sapiens
gccaggtgtggtggc

SEQ ID NO: 881291 - DNA, 15 bp, Homo sapiens
ggccaggtgtggtgg

SEQ ID NO: 881292 - DNA, 15 bp, Homo sapiens
tggccaggtgtggtg

SEQ ID NO: 881293 - DNA, 15 bp, Homo sapiens
ttggccaggtgtggt

SEQ ID NO: 881294 - DNA, 15 bp, Homo sapiens
tttggccaggtgtgg

SEQ ID NO: 881295 - DNA, 15 bp, Homo sapiens
ttttggccaggtgtg

SEQ ID NO: 881296 - DNA, 15 bp, Homo sapiens
tttttggccaggtgt

SEQ ID NO: 881297 - DNA, 15 bp, Homo sapiens
ttttttggccaggtg

SEQ ID NO: 881298 - DNA, 15 bp, Homo sapiens
cttttttggccaggt

SEQ ID NO: 881299 - DNA, 15 bp, Homo sapiens
tcttttttggccagg

SEQ ID NO: 881300 - DNA, 15 bp, Homo sapiens
ttcttttttggccag

SEQ ID NO: 881301 - DNA, 15 bp, Homo sapiens
tttcttttttggcca

SEQ ID NO: 881302 - DNA, 15 bp, Homo sapiens
ctttcttttttggcc

SEQ ID NO: 881303 - DNA, 15 bp, Homo sapiens
actttcttttttggc

SEQ ID NO: 881304 - DNA, 15 bp, Homo sapiens
aactttcttttttgg

SEQ ID NO: 881305 - DNA, 15 bp, Homo sapiens
aaactttcttttttg

SEQ ID NO: 881306 - DNA, 15 bp, Homo sapiens
aaaactttctttttt

SEQ ID NO: 881307 - DNA, 15 bp, Homo sapiens
caaaactttcttttt

SEQ ID NO: 881308 - DNA, 15 bp, Homo sapiens
ccaaaactttctttt

SEQ ID NO: 881309 - DNA, 15 bp, Homo sapiens
cccaaaactttcttt

SEQ ID NO: 881310 - DNA, 15 bp, Homo sapiens
gcccaaaactttctt

SEQ ID NO: 881311 - DNA, 15 bp, Homo sapiens
agcccaaaactttct

SEQ ID NO: 881312 - DNA, 15 bp, Homo sapiens
cagcccaaaactttc

SEQ ID NO: 881313 - DNA, 15 bp, Homo sapiens
tcagcccaaaacttt

SEQ ID NO: 881314 - DNA, 15 bp, Homo sapiens
ctcagcccaaaactt

SEQ ID NO: 881315 - DNA, 15 bp, Homo sapiens
actcagcccaaaact

SEQ ID NO: 881316 - DNA, 15 bp, Homo sapiens
tactcagcccaaaac

SEQ ID NO: 881317 - DNA, 15 bp, Homo sapiens
ttactcagcccaaaa

SEQ ID NO: 881318 - DNA, 15 bp, Homo sapiens
tttactcagcccaaa

SEQ ID NO: 881319 - DNA, 15 bp, Homo sapiens
ttttactcagcccaa

SEQ ID NO: 881320 - DNA, 15 bp, Homo sapiens
attttactcagccca

SEQ ID NO: 881321 - DNA, 15 bp, Homo sapiens
tattttactcagccc

SEQ ID NO: 881322 - DNA, 15 bp, Homo sapiens
ttattttactcagcc

SEQ ID NO: 881323 - DNA, 15 bp, Homo sapiens
attattttactcagc

SEQ ID NO: 881324 - DNA, 15 bp, Homo sapiens
cattattttactcag

SEQ ID NO: 881325 - DNA, 15 bp, Homo sapiens
gcattattttactca

SEQ ID NO: 881326 - DNA, 15 bp, Homo sapiens
agcattattttactc

SEQ ID NO: 881327 - DNA, 15 bp, Homo sapiens
tagcattattttact

SEQ ID NO: 881328 - DNA, 15 bp, Homo sapiens
gtagcattattttac

SEQ ID NO: 881329 - DNA, 15 bp, Homo sapiens
ggtagcattatttta

SEQ ID NO: 881330 - DNA, 15 bp, Homo sapiens
tggtagcattatttt

SEQ ID NO: 881331 - DNA, 15 bp, Homo sapiens
ttggtagcattattt

SEQ ID NO: 881332 - DNA, 15 bp, Homo sapiens
attggtagcattatt

SEQ ID NO: 881333 - DNA, 15 bp, Homo sapiens
aattggtagcattat

SEQ ID NO: 881334 - DNA, 15 bp, Homo sapiens
gaattggtagcatta

SEQ ID NO: 881335 - DNA, 15 bp, Homo sapiens
agaattggtagcatt

SEQ ID NO: 881336 - DNA, 15 bp, Homo sapiens
gagaattggtagcat

SEQ ID NO: 881337 - DNA, 15 bp, Homo sapiens
agagaattggtagca

SEQ ID NO: 881338 - DNA, 15 bp, Homo sapiens
gagagaattggtagc

SEQ ID NO: 881339 - DNA, 15 bp, Homo sapiens
ggagagaattggtag

SEQ ID NO: 881340 - DNA, 15 bp, Homo sapiens
tggagagaattggta

SEQ ID NO: 881341 - DNA, 15 bp, Homo sapiens
ctggagagaattggt

SEQ ID NO: 881342 - DNA, 15 bp, Homo sapiens
cctggagagaattgg

SEQ ID NO: 881343 - DNA, 15 bp, Homo sapiens
gcctggagagaattg

SEQ ID NO: 881344 - DNA, 15 bp, Homo sapiens
tgcctggagagaatt

SEQ ID NO: 881345 - DNA, 15 bp, Homo sapiens
gtgcctggagagaat

SEQ ID NO: 881346 - DNA, 15 bp, Homo sapiens
agtgcctggagagaa

SEQ ID NO: 881347 - DNA, 15 bp, Homo sapiens
cagtgcctggagaga

SEQ ID NO: 881348 - DNA, 15 bp, Homo sapiens
tcagtgcctggagag

SEQ ID NO: 881349 - DNA, 15 bp, Homo sapiens
ctcagtgcctggaga

SEQ ID NO: 881350 - DNA, 15 bp, Homo sapiens
tctcagtgcctggag

SEQ ID NO: 881351 - DNA, 15 bp, Homo sapiens
ctctcagtgcctgga

SEQ ID NO: 881352 - DNA, 15 bp, Homo sapiens
cctctcagtgcctgg

SEQ ID NO: 881353 - DNA, 15 bp, Homo sapiens
gcctctcagtgcctg

SEQ ID NO: 881354 - DNA, 15 bp, Homo sapiens
tgcctctcagtgcct

SEQ ID NO: 881355 - DNA, 15 bp, Homo sapiens
ctgcctctcagtgcc

SEQ ID NO: 881356 - DNA, 15 bp, Homo sapiens
gctgcctctcagtgc

SEQ ID NO: 881357 - DNA, 15 bp, Homo sapiens
ggctgcctctcagtg

SEQ ID NO: 881358 - DNA, 15 bp, Homo sapiens
aggctgcctctcagt

SEQ ID NO: 881359 - DNA, 15 bp, Homo sapiens
taggctgcctctcag

SEQ ID NO: 881360 - DNA, 15 bp, Homo sapiens
ttaggctgcctctca

SEQ ID NO: 881361 - DNA, 15 bp, Homo sapiens
tttaggctgcctctc

SEQ ID NO: 881362 - DNA, 15 bp, Homo sapiens
ttttaggctgcctct

SEQ ID NO: 881363 - DNA, 15 bp, Homo sapiens
gttttaggctgcctc

SEQ ID NO: 881364 - DNA, 15 bp, Homo sapiens
ggttttaggctgcct

SEQ ID NO: 881365 - DNA, 15 bp, Homo sapiens
tggttttaggctgcc

SEQ ID NO: 881366 - DNA, 15 bp, Homo sapiens
atggttttaggctgc

SEQ ID NO: 881367 - DNA, 15 bp, Homo sapiens
catggttttaggctg

SEQ ID NO: 881368 - DNA, 15 bp, Homo sapiens
ccatggttttaggct

SEQ ID NO: 881369 - DNA, 15 bp, Homo sapiens
accatggttttaggc

SEQ ID NO: 881370 - DNA, 15 bp, Homo sapiens
aaccatggttttagg

SEQ ID NO: 881371 - DNA, 15 bp, Homo sapiens
aaaccatggttttag

SEQ ID NO: 881372 - DNA, 15 bp, Homo sapiens
caaaccatggtttta

SEQ ID NO: 881373 - DNA, 15 bp, Homo sapiens
ccaaaccatggtttt

SEQ ID NO: 881374 - DNA, 15 bp, Homo sapiens
accaaaccatggttt

SEQ ID NO: 881375 - DNA, 15 bp, Homo sapiens
taccaaaccatggtt

SEQ ID NO: 881376 - DNA, 15 bp, Homo sapiens
ctaccaaaccatggt

SEQ ID NO: 881377 - DNA, 15 bp, Homo sapiens
gctaccaaaccatgg

SEQ ID NO: 881378 - DNA, 15 bp, Homo sapiens
agctaccaaaccatg

SEQ ID NO: 881379 - DNA, 15 bp, Homo sapiens
cagctaccaaaccat

SEQ ID NO: 881380 - DNA, 15 bp, Homo sapiens
ccagctaccaaacca

SEQ ID NO: 881381 - DNA, 15 bp, Homo sapiens
cccagctaccaaacc

SEQ ID NO: 881382 - DNA, 15 bp, Homo sapiens
tcccagctaccaaac

SEQ ID NO: 881383 - DNA, 15 bp, Homo sapiens
atcccagctaccaaa

SEQ ID NO: 881384 - DNA, 15 bp, Homo sapiens
gatcccagctaccaa

SEQ ID NO: 881385 - DNA, 15 bp, Homo sapiens
tgatcccagctacca

SEQ ID NO: 881386 - DNA, 15 bp, Homo sapiens
atgatcccagctacc

SEQ ID NO: 881387 - DNA, 15 bp, Homo sapiens
catgatcccagctac

SEQ ID NO: 881388 - DNA, 15 bp, Homo sapiens
tcatgatcccagcta

SEQ ID NO: 881389 - DNA, 15 bp, Homo sapiens
ctcatgatcccagct

SEQ ID NO: 881390 - DNA, 15 bp, Homo sapiens
tctcatgatcccagc

SEQ ID NO: 881391 - DNA, 15 bp, Homo sapiens
ttctcatgatcccag

SEQ ID NO: 881392 - DNA, 15 bp, Homo sapiens
cttctcatgatccca

SEQ ID NO: 881393 - DNA, 15 bp, Homo sapiens
ccttctcatgatccc

SEQ ID NO: 881394 - DNA, 15 bp, Homo sapiens
accttctcatgatcc

SEQ ID NO: 881395 - DNA, 15 bp, Homo sapiens
aaccttctcatgatc

SEQ ID NO: 881396 - DNA, 15 bp, Homo sapiens
caaccttctcatgat

SEQ ID NO: 881397 - DNA, 15 bp, Homo sapiens
tcaaccttctcatga

SEQ ID NO: 881398 - DNA, 15 bp, Homo sapiens
ttcaaccttctcatg

SEQ ID NO: 881399 - DNA, 15 bp, Homo sapiens
attcaaccttctcat

SEQ ID NO: 881400 - DNA, 15 bp, Homo sapiens
cattcaaccttctca

SEQ ID NO: 881401 - DNA, 15 bp, Homo sapiens
ccattcaaccttctc

SEQ ID NO: 881402 - DNA, 15 bp, Homo sapiens
accattcaaccttct

SEQ ID NO: 881403 - DNA, 15 bp, Homo sapiens
caccattcaaccttc

SEQ ID NO: 881404 - DNA, 15 bp, Homo sapiens
acaccattcaacctt

SEQ ID NO: 881405 - DNA, 15 bp, Homo sapiens
aacaccattcaacct

SEQ ID NO: 881406 - DNA, 15 bp, Homo sapiens
gaacaccattcaacc

SEQ ID NO: 881407 - DNA, 15 bp, Homo sapiens
agaacaccattcaac

SEQ ID NO: 881408 - DNA, 15 bp, Homo sapiens
cagaacaccattcaa

SEQ ID NO: 881409 - DNA, 15 bp, Homo sapiens
tcagaacaccattca

SEQ ID NO: 881410 - DNA, 15 bp, Homo sapiens
atcagaacaccattc

SEQ ID NO: 881411 - DNA, 15 bp, Homo sapiens
catcagaacaccatt

SEQ ID NO: 881412 - DNA, 15 bp, Homo sapiens
acatcagaacaccat

SEQ ID NO: 881413 - DNA, 15 bp, Homo sapiens
tacatcagaacacca

SEQ ID NO: 881414 - DNA, 15 bp, Homo sapiens
gtacatcagaacacc

SEQ ID NO: 881415 - DNA, 15 bp, Homo sapiens
ggtacatcagaacac

SEQ ID NO: 881416 - DNA, 15 bp, Homo sapiens
aggtacatcagaaca

SEQ ID NO: 881417 - DNA, 15 bp, Homo sapiens
taggtacatcagaac

SEQ ID NO: 881418 - DNA, 15 bp, Homo sapiens
ctaggtacatcagaa

SEQ ID NO: 881419 - DNA, 15 bp, Homo sapiens
cctaggtacatcaga

SEQ ID NO: 881420 - DNA, 15 bp, Homo sapiens
gcctaggtacatcag

SEQ ID NO: 881421 - DNA, 15 bp, Homo sapiens
agcctaggtacatca

SEQ ID NO: 881422 - DNA, 15 bp, Homo sapiens
gagcctaggtacatc

SEQ ID NO: 881423 - DNA, 15 bp, Homo sapiens
ggagcctaggtacat

SEQ ID NO: 881424 - DNA, 15 bp, Homo sapiens
tggagcctaggtaca

SEQ ID NO: 881425 - DNA, 15 bp, Homo sapiens
ttggagcctaggtac

SEQ ID NO: 881426 - DNA, 15 bp, Homo sapiens
gttggagcctaggta

SEQ ID NO: 881427 - DNA, 15 bp, Homo sapiens
ggttggagcctaggt

SEQ ID NO: 881428 - DNA, 15 bp, Homo sapiens
gggttggagcctagg

SEQ ID NO: 881429 - DNA, 15 bp, Homo sapiens
agggttggagcctag

SEQ ID NO: 881430 - DNA, 15 bp, Homo sapiens
cagggttggagccta

SEQ ID NO: 881431 - DNA, 15 bp, Homo sapiens
gcagggttggagcct

SEQ ID NO: 881432 - DNA, 15 bp, Homo sapiens
ggcagggttggagcc

SEQ ID NO: 881433 - DNA, 15 bp, Homo sapiens
tggcagggttggagc

SEQ ID NO: 881434 - DNA, 15 bp, Homo sapiens
gtggcagggttggag

SEQ ID NO: 881435 - DNA, 15 bp, Homo sapiens
agtggcagggttgga

SEQ ID NO: 881436 - DNA, 15 bp, Homo sapiens
tagtggcagggttgg

SEQ ID NO: 881437 - DNA, 15 bp, Homo sapiens
ttagtggcagggttg

SEQ ID NO: 881438 - DNA, 15 bp, Homo sapiens
gttagtggcagggtt

SEQ ID NO: 881439 - DNA, 15 bp, Homo sapiens
ggttagtggcagggt

SEQ ID NO: 881440 - DNA, 15 bp, Homo sapiens
tggttagtggcaggg

SEQ ID NO: 881441 - DNA, 15 bp, Homo sapiens
ctggttagtggcagg

SEQ ID NO: 881442 - DNA, 15 bp, Homo sapiens
gctggttagtggcag

SEQ ID NO: 881443 - DNA, 15 bp, Homo sapiens
agctggttagtggca

SEQ ID NO: 881444 - DNA, 15 bp, Homo sapiens
cagctggttagtggc

SEQ ID NO: 881445 - DNA, 15 bp, Homo sapiens
acagctggttagtgg

SEQ ID NO: 881446 - DNA, 15 bp, Homo sapiens
cacagctggttagtg

SEQ ID NO: 881447 - DNA, 15 bp, Homo sapiens
acacagctggttagt

SEQ ID NO: 881448 - DNA, 15 bp, Homo sapiens
cacacagctggttag

SEQ ID NO: 881449 - DNA, 15 bp, Homo sapiens
tcacacagctggtta

SEQ ID NO: 881450 - DNA, 15 bp, Homo sapiens
gtcacacagctggtt

SEQ ID NO: 881451 - DNA, 15 bp, Homo sapiens
ggtcacacagctggt

SEQ ID NO: 881452 - DNA, 15 bp, Homo sapiens
aggtcacacagctgg

SEQ ID NO: 881453 - DNA, 15 bp, Homo sapiens
caggtcacacagctg

SEQ ID NO: 881454 - DNA, 15 bp, Homo sapiens
ccaggtcacacagct

SEQ ID NO: 881455 - DNA, 15 bp, Homo sapiens
cccaggtcacacagc

SEQ ID NO: 881456 - DNA, 15 bp, Homo sapiens
ccccaggtcacacag

SEQ ID NO: 881457 - DNA, 15 bp, Homo sapiens
accccaggtcacaca

SEQ ID NO: 881458 - DNA, 15 bp, Homo sapiens
aaccccaggtcacac

SEQ ID NO: 881459 - DNA, 15 bp, Homo sapiens
taaccccaggtcaca

SEQ ID NO: 881460 - DNA, 15 bp, Homo sapiens
gtaaccccaggtcac

SEQ ID NO: 881461 - DNA, 15 bp, Homo sapiens
tgtaaccccaggtca

SEQ ID NO: 881462 - DNA, 15 bp, Homo sapiens
atgtaaccccaggtc

SEQ ID NO: 881463 - DNA, 15 bp, Homo sapiens
aatgtaaccccaggt

SEQ ID NO: 881464 - DNA, 15 bp, Homo sapiens
taatgtaaccccagg

SEQ ID NO: 881465 - DNA, 15 bp, Homo sapiens
ataatgtaaccccag

SEQ ID NO: 881466 - DNA, 15 bp, Homo sapiens
gataatgtaacccca

SEQ ID NO: 881467 - DNA, 15 bp, Homo sapiens
tgataatgtaacccc

SEQ ID NO: 881468 - DNA, 15 bp, Homo sapiens
ctgataatgtaaccc

SEQ ID NO: 881469 - DNA, 15 bp, Homo sapiens
gctgataatgtaacc

SEQ ID NO: 881470 - DNA, 15 bp, Homo sapiens
ggctgataatgtaac

SEQ ID NO: 881471 - DNA, 15 bp, Homo sapiens
tggctgataatgtaa

SEQ ID NO: 881472 - DNA, 15 bp, Homo sapiens
gtggctgataatgta

SEQ ID NO: 881473 - DNA, 15 bp, Homo sapiens
ggtggctgataatgt

SEQ ID NO: 881474 - DNA, 15 bp, Homo sapiens
gggtggctgataatg

SEQ ID NO: 881475 - DNA, 15 bp, Homo sapiens
agggtggctgataat

SEQ ID NO: 881476 - DNA, 15 bp, Homo sapiens
cagggtggctgataa

SEQ ID NO: 881477 - DNA, 15 bp, Homo sapiens
acagggtggctgata

SEQ ID NO: 881478 - DNA, 15 bp, Homo sapiens
cacagggtggctgat

SEQ ID NO: 881479 - DNA, 15 bp, Homo sapiens
gcacagggtggctga

SEQ ID NO: 881480 - DNA, 15 bp, Homo sapiens
ggcacagggtggctg

SEQ ID NO: 881481 - DNA, 15 bp, Homo sapiens
aggcacagggtggct

SEQ ID NO: 881482 - DNA, 15 bp, Homo sapiens
gaggcacagggtggc

SEQ ID NO: 881483 - DNA, 15 bp, Homo sapiens
tgaggcacagggtgg

SEQ ID NO: 881484 - DNA, 15 bp, Homo sapiens
ctgaggcacagggtg

SEQ ID NO: 881485 - DNA, 15 bp, Homo sapiens
actgaggcacagggt

SEQ ID NO: 881486 - DNA, 15 bp, Homo sapiens
aactgaggcacaggg

SEQ ID NO: 881487 - DNA, 15 bp, Homo sapiens
aaactgaggcacagg

SEQ ID NO: 881488 - DNA, 15 bp, Homo sapiens
aaaactgaggcacag

SEQ ID NO: 881489 - DNA, 15 bp, Homo sapiens
taaaactgaggcaca

SEQ ID NO: 881490 - DNA, 15 bp, Homo sapiens
ttaaaactgaggcac

SEQ ID NO: 881491 - DNA, 15 bp, Homo sapiens
attaaaactgaggca

SEQ ID NO: 881492 - DNA, 15 bp, Homo sapiens
tattaaaactgaggc

SEQ ID NO: 881493 - DNA, 15 bp, Homo sapiens
ttattaaaactgagg

SEQ ID NO: 881494 - DNA, 15 bp, Homo sapiens
tttattaaaactgag

SEQ ID NO: 881495 - DNA, 15 bp, Homo sapiens
ttttattaaaactga

SEQ ID NO: 881496 - DNA, 15 bp, Homo sapiens
cttttattaaaactg

SEQ ID NO: 881497 - DNA, 15 bp, Homo sapiens
acttttattaaaact

SEQ ID NO: 881498 - DNA, 15 bp, Homo sapiens
cacttttattaaaac

SEQ ID NO: 881499 - DNA, 15 bp, Homo sapiens
ccacttttattaaaa

SEQ ID NO: 881500 - DNA, 15 bp, Homo sapiens
tccacttttattaaa

SEQ ID NO: 881501 - DNA, 15 bp, Homo sapiens
atccacttttattaa

SEQ ID NO: 881502 - DNA, 15 bp, Homo sapiens
gatccacttttatta

SEQ ID NO: 881503 - DNA, 15 bp, Homo sapiens
tgatccacttttatt

SEQ ID NO: 881504 - DNA, 15 bp, Homo sapiens
ctgatccacttttat

SEQ ID NO: 881505 - DNA, 15 bp, Homo sapiens
actgatccactttta

SEQ ID NO: 881506 - DNA, 15 bp, Homo sapiens
gactgatccactttt

SEQ ID NO: 881507 - DNA, 15 bp, Homo sapiens
tgactgatccacttt

SEQ ID NO: 881508 - DNA, 15 bp, Homo sapiens
ttgactgatccactt

SEQ ID NO: 881509 - DNA, 15 bp, Homo sapiens
tttgactgatccact

SEQ ID NO: 881510 - DNA, 15 bp, Homo sapiens
ttttgactgatccac

SEQ ID NO: 881511 - DNA, 15 bp, Homo sapiens
cttttgactgatcca

SEQ ID NO: 881512 - DNA, 15 bp, Homo sapiens
gcttttgactgatcc

SEQ ID NO: 881513 - DNA, 15 bp, Homo sapiens
ggcttttgactgatc

SEQ ID NO: 881514 - DNA, 15 bp, Homo sapiens
gggcttttgactgat

SEQ ID NO: 881515 - DNA, 15 bp, Homo sapiens
agggcttttgactga

SEQ ID NO: 881516 - DNA, 15 bp, Homo sapiens
gagggcttttgactg

SEQ ID NO: 881517 - DNA, 15 bp, Homo sapiens
agagggcttttgact

SEQ ID NO: 881518 - DNA, 15 bp, Homo sapiens
gagagggcttttgac

SEQ ID NO: 881519 - DNA, 15 bp, Homo sapiens
ggagagggcttttga

SEQ ID NO: 881520 - DNA, 15 bp, Homo sapiens
tggagagggcttttg

SEQ ID NO: 881521 - DNA, 15 bp, Homo sapiens
gtggagagggctttt

SEQ ID NO: 881522 - DNA, 15 bp, Homo sapiens
ggtggagagggcttt

SEQ ID NO: 881523 - DNA, 15 bp, Homo sapiens
tggtggagagggctt

SEQ ID NO: 881524 - DNA, 15 bp, Homo sapiens
ctggtggagagggct

SEQ ID NO: 881525 - DNA, 15 bp, Homo sapiens
actggtggagagggc

SEQ ID NO: 881526 - DNA, 15 bp, Homo sapiens
gactggtggagaggg

SEQ ID NO: 881527 - DNA, 15 bp, Homo sapiens
tgactggtggagagg

SEQ ID NO: 881528 - DNA, 15 bp, Homo sapiens
atgactggtggagag

SEQ ID NO: 881529 - DNA, 15 bp, Homo sapiens
gatgactggtggaga

SEQ ID NO: 881530 - DNA, 15 bp, Homo sapiens
agatgactggtggag

SEQ ID NO: 881531 - DNA, 15 bp, Homo sapiens
aagatgactggtgga

SEQ ID NO: 881532 - DNA, 15 bp, Homo sapiens
gaagatgactggtgg

SEQ ID NO: 881533 - DNA, 15 bp, Homo sapiens
ggaagatgactggtg

SEQ ID NO: 881534 - DNA, 15 bp, Homo sapiens
aggaagatgactggt

SEQ ID NO: 881535 - DNA, 15 bp, Homo sapiens
gaggaagatgactgg

SEQ ID NO: 881536 - DNA, 15 bp, Homo sapiens
tgaggaagatgactg

SEQ ID NO: 881537 - DNA, 15 bp, Homo sapiens
gtgaggaagatgact

SEQ ID NO: 881538 - DNA, 15 bp, Homo sapiens
tgtgaggaagatgac

SEQ ID NO: 881539 - DNA, 15 bp, Homo sapiens
ttgtgaggaagatga

SEQ ID NO: 881540 - DNA, 15 bp, Homo sapiens
tttgtgaggaagatg

SEQ ID NO: 881541 - DNA, 15 bp, Homo sapiens
ctttgtgaggaagat

SEQ ID NO: 881542 - DNA, 15 bp, Homo sapiens
tctttgtgaggaaga

SEQ ID NO: 881543 - DNA, 15 bp, Homo sapiens
ttctttgtgaggaag

SEQ ID NO: 881544 - DNA, 15 bp, Homo sapiens
cttctttgtgaggaa

SEQ ID NO: 881545 - DNA, 15 bp, Homo sapiens
gcttctttgtgagga

SEQ ID NO: 881546 - DNA, 15 bp, Homo sapiens
tgcttctttgtgagg

SEQ ID NO: 881547 - DNA, 15 bp, Homo sapiens
gtgcttctttgtgag

SEQ ID NO: 881548 - DNA, 15 bp, Homo sapiens
tgtgcttctttgtga

SEQ ID NO: 881549 - DNA, 15 bp, Homo sapiens
ttgtgcttctttgtg

SEQ ID NO: 881550 - DNA, 15 bp, Homo sapiens
cttgtgcttctttgt

SEQ ID NO: 881551 - DNA, 15 bp, Homo sapiens
tcttgtgcttctttg

SEQ ID NO: 881552 - DNA, 15 bp, Homo sapiens
ttcttgtgcttcttt

SEQ ID NO: 881553 - DNA, 15 bp, Homo sapiens
attcttgtgcttctt

SEQ ID NO: 881554 - DNA, 15 bp, Homo sapiens
gattcttgtgcttct

SEQ ID NO: 881555 - DNA, 15 bp, Homo sapiens
tgattcttgtgcttc

SEQ ID NO: 881556 - DNA, 15 bp, Homo sapiens
ttgattcttgtgctt

SEQ ID NO: 881557 - DNA, 15 bp, Homo sapiens
tttgattcttgtgct

SEQ ID NO: 881558 - DNA, 15 bp, Homo sapiens
atttgattcttgtgc

SEQ ID NO: 881559 - DNA, 15 bp, Homo sapiens
catttgattcttgtg

SEQ ID NO: 881560 - DNA, 15 bp, Homo sapiens
ccatttgattcttgt

SEQ ID NO: 881561 - DNA, 15 bp, Homo sapiens
tccatttgattcttg

SEQ ID NO: 881562 - DNA, 15 bp, Homo sapiens
ttccatttgattctt

SEQ ID NO: 881563 - DNA, 15 bp, Homo sapiens
attccatttgattct

SEQ ID NO: 881564 - DNA, 15 bp, Homo sapiens
cattccatttgattc

SEQ ID NO: 881565 - DNA, 15 bp, Homo sapiens
tcattccatttgatt

SEQ ID NO: 881566 - DNA, 15 bp, Homo sapiens
gtcattccatttgat

SEQ ID NO: 881567 - DNA, 15 bp, Homo sapiens
ggtcattccatttga

SEQ ID NO: 881568 - DNA, 15 bp, Homo sapiens
aggtcattccatttg

SEQ ID NO: 881569 - DNA, 15 bp, Homo sapiens
taggtcattccattt

SEQ ID NO: 881570 - DNA, 15 bp, Homo sapiens
ataggtcattccatt

SEQ ID NO: 881571 - DNA, 15 bp, Homo sapiens
cataggtcattccat

SEQ ID NO: 881572 - DNA, 15 bp, Homo sapiens
tcataggtcattcca

SEQ ID NO: 881573 - DNA, 15 bp, Homo sapiens
ctcataggtcattcc

SEQ ID NO: 881574 - DNA, 15 bp, Homo sapiens
gctcataggtcattc

SEQ ID NO: 881575 - DNA, 15 bp, Homo sapiens
tgctcataggtcatt

SEQ ID NO: 881576 - DNA, 15 bp, Homo sapiens
ttgctcataggtcat

SEQ ID NO: 881577 - DNA, 15 bp, Homo sapiens
tttgctcataggtca

SEQ ID NO: 881578 - DNA, 15 bp, Homo sapiens
atttgctcataggtc

SEQ ID NO: 881579 - DNA, 15 bp, Homo sapiens
catttgctcataggt

SEQ ID NO: 881580 - DNA, 15 bp, Homo sapiens
gcatttgctcatagg

SEQ ID NO: 881581 - DNA, 15 bp, Homo sapiens
agcatttgctcatag

SEQ ID NO: 881582 - DNA, 15 bp, Homo sapiens
cagcatttgctcata

SEQ ID NO: 881583 - DNA, 15 bp, Homo sapiens
tcagcatttgctcat

SEQ ID NO: 881584 - DNA, 15 bp, Homo sapiens
ctcagcatttgctca

SEQ ID NO: 881585 - DNA, 15 bp, Homo sapiens
gctcagcatttgctc

SEQ ID NO: 881586 - DNA, 15 bp, Homo sapiens
ggctcagcatttgct

SEQ ID NO: 881587 - DNA, 15 bp, Homo sapiens
tggctcagcatttgc

SEQ ID NO: 881588 - DNA, 15 bp, Homo sapiens
ttggctcagcatttg

SEQ ID NO: 881589 - DNA, 15 bp, Homo sapiens
cttggctcagcattt

SEQ ID NO: 881590 - DNA, 15 bp, Homo sapiens
acttggctcagcatt

SEQ ID NO: 881591 - DNA, 15 bp, Homo sapiens
tacttggctcagcat

SEQ ID NO: 881592 - DNA, 15 bp, Homo sapiens
atacttggctcagca

SEQ ID NO: 881593 - DNA, 15 bp, Homo sapiens
aatacttggctcagc

SEQ ID NO: 881594 - DNA, 15 bp, Homo sapiens
caatacttggctcag

SEQ ID NO: 881595 - DNA, 15 bp, Homo sapiens
ccaatacttggctca

SEQ ID NO: 881596 - DNA, 15 bp, Homo sapiens
cccaatacttggctc

SEQ ID NO: 881597 - DNA, 15 bp, Homo sapiens
tcccaatacttggct

SEQ ID NO: 881598 - DNA, 15 bp, Homo sapiens
atcccaatacttggc

SEQ ID NO: 881599 - DNA, 15 bp, Homo sapiens
aatcccaatacttgg

SEQ ID NO: 881600 - DNA, 15 bp, Homo sapiens
aaatcccaatacttg

SEQ ID NO: 881601 - DNA, 15 bp, Homo sapiens
gaaatcccaatactt

SEQ ID NO: 881602 - DNA, 15 bp, Homo sapiens
tgaaatcccaatact

SEQ ID NO: 881603 - DNA, 15 bp, Homo sapiens
ctgaaatcccaatac

SEQ ID NO: 881604 - DNA, 15 bp, Homo sapiens
tctgaaatcccaata

SEQ ID NO: 881605 - DNA, 15 bp, Homo sapiens
ttctgaaatcccaat

SEQ ID NO: 881606 - DNA, 15 bp, Homo sapiens
attctgaaatcccaa

SEQ ID NO: 881607 - DNA, 15 bp, Homo sapiens
tattctgaaatccca

SEQ ID NO: 881608 - DNA, 15 bp, Homo sapiens
ttattctgaaatccc

SEQ ID NO: 881609 - DNA, 15 bp, Homo sapiens
attattctgaaatcc

SEQ ID NO: 881610 - DNA, 15 bp, Homo sapiens
cattattctgaaatc

SEQ ID NO: 881611 - DNA, 15 bp, Homo sapiens
ccattattctgaaat

SEQ ID NO: 881612 - DNA, 15 bp, Homo sapiens
cccattattctgaaa

SEQ ID NO: 881613 - DNA, 15 bp, Homo sapiens
tcccattattctgaa

SEQ ID NO: 881614 - DNA, 15 bp, Homo sapiens
atcccattattctga

SEQ ID NO: 881615 - DNA, 15 bp, Homo sapiens
aatcccattattctg

SEQ ID NO: 881616 - DNA, 15 bp, Homo sapiens
caatcccattattct

SEQ ID NO: 881617 - DNA, 15 bp, Homo sapiens
acaatcccattattc

SEQ ID NO: 881618 - DNA, 15 bp, Homo sapiens
cacaatcccattatt

SEQ ID NO: 881619 - DNA, 15 bp, Homo sapiens
acacaatcccattat

SEQ ID NO: 881620 - DNA, 15 bp, Homo sapiens
cacacaatcccatta

SEQ ID NO: 881621 - DNA, 15 bp, Homo sapiens
acacacaatcccatt

SEQ ID NO: 881622 - DNA, 15 bp, Homo sapiens
cacacacaatcccat

SEQ ID NO: 881623 - DNA, 15 bp, Homo sapiens
tcacacacaatccca

SEQ ID NO: 881624 - DNA, 15 bp, Homo sapiens
ttcacacacaatccc

SEQ ID NO: 881625 - DNA, 15 bp, Homo sapiens
attcacacacaatcc

SEQ ID NO: 881626 - DNA, 15 bp, Homo sapiens
aattcacacacaatc

SEQ ID NO: 881627 - DNA, 15 bp, Homo sapiens
aaattcacacacaat

SEQ ID NO: 881628 - DNA, 15 bp, Homo sapiens
taaattcacacacaa

SEQ ID NO: 881629 - DNA, 15 bp, Homo sapiens
ttaaattcacacaca

SEQ ID NO: 881630 - DNA, 15 bp, Homo sapiens
attaaattcacacac

SEQ ID NO: 881631 - DNA, 15 bp, Homo sapiens
cattaaattcacaca

SEQ ID NO: 881632 - DNA, 15 bp, Homo sapiens
ccattaaattcacac

SEQ ID NO: 881633 - DNA, 15 bp, Homo sapiens
cccattaaattcaca

SEQ ID NO: 881634 - DNA, 15 bp, Homo sapiens
gcccattaaattcac

SEQ ID NO: 881635 - DNA, 15 bp, Homo sapiens
tgcccattaaattca

SEQ ID NO: 881636 - DNA, 15 bp, Homo sapiens
atgcccattaaattc

SEQ ID NO: 881637 - DNA, 15 bp, Homo sapiens
aatgcccattaaatt

SEQ ID NO: 881638 - DNA, 15 bp, Homo sapiens
aaatgcccattaaat

SEQ ID NO: 881639 - DNA, 15 bp, Homo sapiens
aaaatgcccattaaa

SEQ ID NO: 881640 - DNA, 15 bp, Homo sapiens
gaaaatgcccattaa

SEQ ID NO: 881641 - DNA, 15 bp, Homo sapiens
ggaaaatgcccatta

SEQ ID NO: 881642 - DNA, 15 bp, Homo sapiens
gggaaaatgcccatt

SEQ ID NO: 881643 - DNA, 15 bp, Homo sapiens
agggaaaatgcccat

SEQ ID NO: 881644 - DNA, 15 bp, Homo sapiens
gagggaaaatgccca

SEQ ID NO: 881645 - DNA, 15 bp, Homo sapiens
tgagggaaaatgccc

SEQ ID NO: 881646 - DNA, 15 bp, Homo sapiens
ctgagggaaaatgcc

SEQ ID NO: 881647 - DNA, 15 bp, Homo sapiens
gctgagggaaaatgc

SEQ ID NO: 881648 - DNA, 15 bp, Homo sapiens
agctgagggaaaatg

SEQ ID NO: 881649 - DNA, 15 bp, Homo sapiens
cagctgagggaaaat

SEQ ID NO: 881650 - DNA, 15 bp, Homo sapiens
ccagctgagggaaaa

SEQ ID NO: 881651 - DNA, 15 bp, Homo sapiens
gccagctgagggaaa

SEQ ID NO: 881652 - DNA, 15 bp, Homo sapiens
tgccagctgagggaa

SEQ ID NO: 881653 - DNA, 15 bp, Homo sapiens
ctgccagctgaggga

SEQ ID NO: 881654 - DNA, 15 bp, Homo sapiens
tctgccagctgaggg

SEQ ID NO: 881655 - DNA, 15 bp, Homo sapiens
ttctgccagctgagg

SEQ ID NO: 881656 - DNA, 15 bp, Homo sapiens
tttctgccagctgag

SEQ ID NO: 881657 - DNA, 15 bp, Homo sapiens
atttctgccagctga

SEQ ID NO: 881658 - DNA, 15 bp, Homo sapiens
tatttctgccagctg

SEQ ID NO: 881659 - DNA, 15 bp, Homo sapiens
ttatttctgccagct

SEQ ID NO: 881660 - DNA, 15 bp, Homo sapiens
tttatttctgccagc

SEQ ID NO: 881661 - DNA, 15 bp, Homo sapiens
gtttatttctgccag

SEQ ID NO: 881662 - DNA, 15 bp, Homo sapiens
tgtttatttctgcca

SEQ ID NO: 881663 - DNA, 15 bp, Homo sapiens
atgtttatttctgcc

SEQ ID NO: 881664 - DNA, 15 bp, Homo sapiens
aatgtttatttctgc

SEQ ID NO: 881665 - DNA, 15 bp, Homo sapiens
gaatgtttatttctg

SEQ ID NO: 881666 - DNA, 15 bp, Homo sapiens
ggaatgtttatttct

SEQ ID NO: 881667 - DNA, 15 bp, Homo sapiens
gggaatgtttatttc

SEQ ID NO: 881668 - DNA, 15 bp, Homo sapiens
tgggaatgtttattt

SEQ ID NO: 881669 - DNA, 15 bp, Homo sapiens
gtgggaatgtttatt

SEQ ID NO: 881670 - DNA, 15 bp, Homo sapiens
agtgggaatgtttat

SEQ ID NO: 881671 - DNA, 15 bp, Homo sapiens
cagtgggaatgttta

SEQ ID NO: 881672 - DNA, 15 bp, Homo sapiens
acagtgggaatgttt

SEQ ID NO: 881673 - DNA, 15 bp, Homo sapiens
gacagtgggaatgtt

SEQ ID NO: 881674 - DNA, 15 bp, Homo sapiens
tgacagtgggaatgt

SEQ ID NO: 881675 - DNA, 15 bp, Homo sapiens
ttgacagtgggaatg

SEQ ID NO: 881676 - DNA, 15 bp, Homo sapiens
tttgacagtgggaat

SEQ ID NO: 881677 - DNA, 15 bp, Homo sapiens
atttgacagtgggaa

SEQ ID NO: 881678 - DNA, 15 bp, Homo sapiens
tatttgacagtggga

SEQ ID NO: 881679 - DNA, 15 bp, Homo sapiens
ttatttgacagtggg

SEQ ID NO: 881680 - DNA, 15 bp, Homo sapiens
tttatttgacagtgg

SEQ ID NO: 881681 - DNA, 15 bp, Homo sapiens
ctttatttgacagtg

SEQ ID NO: 881682 - DNA, 15 bp, Homo sapiens
tctttatttgacagt

SEQ ID NO: 881683 - DNA, 15 bp, Homo sapiens
ttctttatttgacag

SEQ ID NO: 881684 - DNA, 15 bp, Homo sapiens
cttctttatttgaca

SEQ ID NO: 881685 - DNA, 15 bp, Homo sapiens
gcttctttatttgac

SEQ ID NO: 881686 - DNA, 15 bp, Homo sapiens
agcttctttatttga

SEQ ID NO: 881687 - DNA, 15 bp, Homo sapiens
tagcttctttatttg

SEQ ID NO: 881688 - DNA, 15 bp, Homo sapiens
gtagcttctttattt

SEQ ID NO: 881689 - DNA, 15 bp, Homo sapiens
ggtagcttctttatt

SEQ ID NO: 881690 - DNA, 15 bp, Homo sapiens
tggtagcttctttat

SEQ ID NO: 881691 - DNA, 15 bp, Homo sapiens
gtggtagcttcttta

SEQ ID NO: 881692 - DNA, 15 bp, Homo sapiens
agtggtagcttcttt

SEQ ID NO: 881693 - DNA, 15 bp, Homo sapiens
tagtggtagcttctt

SEQ ID NO: 881694 - DNA, 15 bp, Homo sapiens
ttagtggtagcttct

SEQ ID NO: 881695 - DNA, 15 bp, Homo sapiens
tttagtggtagcttc

SEQ ID NO: 881696 - DNA, 15 bp, Homo sapiens
atttagtggtagctt

SEQ ID NO: 881697 - DNA, 15 bp, Homo sapiens
tatttagtggtagct

SEQ ID NO: 881698 - DNA, 15 bp, Homo sapiens
atatttagtggtagc

SEQ ID NO: 881699 - DNA, 15 bp, Homo sapiens
aatatttagtggtag

SEQ ID NO: 881700 - DNA, 15 bp, Homo sapiens
aaatatttagtggta

SEQ ID NO: 881701 - DNA, 15 bp, Homo sapiens
caaatatttagtggt

SEQ ID NO: 881702 - DNA, 15 bp, Homo sapiens
tcaaatatttagtgg

SEQ ID NO: 881703 - DNA, 15 bp, Homo sapiens
ttcaaatatttagtg

SEQ ID NO: 881704 - DNA, 15 bp, Homo sapiens
tttcaaatatttagt

SEQ ID NO: 881705 - DNA, 15 bp, Homo sapiens
gtttcaaatatttag

SEQ ID NO: 881706 - DNA, 15 bp, Homo sapiens
tgtttcaaatattta

SEQ ID NO: 881707 - DNA, 15 bp, Homo sapiens
ttgtttcaaatattt

SEQ ID NO: 881708 - DNA, 15 bp, Homo sapiens
tttgtttcaaatatt

SEQ ID NO: 881709 - DNA, 15 bp, Homo sapiens
gtttgtttcaaatat

SEQ ID NO: 881710 - DNA, 15 bp, Homo sapiens
tgtttgtttcaaata

SEQ ID NO: 881711 - DNA, 15 bp, Homo sapiens
ttgtttgtttcaaat

SEQ ID NO: 881712 - DNA, 15 bp, Homo sapiens
tttgtttgtttcaaa

SEQ ID NO: 881713 - DNA, 15 bp, Homo sapiens
gtttgtttgtttcaa

SEQ ID NO: 881714 - DNA, 15 bp, Homo sapiens
tgtttgtttgtttca

SEQ ID NO: 881715 - DNA, 15 bp, Homo sapiens
ttgtttgtttgtttc

SEQ ID NO: 881716 - DNA, 15 bp, Homo sapiens
tttgtttgtttgttt

SEQ ID NO: 881717 - DNA, 15 bp, Homo sapiens
ttttgtttgtttgtt

SEQ ID NO: 881718 - DNA, 15 bp, Homo sapiens
tttttgtttgtttgt

SEQ ID NO: 881719 - DNA, 15 bp, Homo sapiens
ttttttgtttgtttg

SEQ ID NO: 881720 - DNA, 15 bp, Homo sapiens
cttttttgtttgttt

SEQ ID NO: 881721 - DNA, 15 bp, Homo sapiens
acttttttgtttgtt

SEQ ID NO: 881722 - DNA, 15 bp, Homo sapiens
cacttttttgtttgt

SEQ ID NO: 881723 - DNA, 15 bp, Homo sapiens
ccacttttttgtttg

SEQ ID NO: 881724 - DNA, 15 bp, Homo sapiens
tccacttttttgttt

SEQ ID NO: 881725 - DNA, 15 bp, Homo sapiens
ttccacttttttgtt

SEQ ID NO: 881726 - DNA, 15 bp, Homo sapiens
attccacttttttgt

SEQ ID NO: 881727 - DNA, 15 bp, Homo sapiens
aattccacttttttg

SEQ ID NO: 881728 - DNA, 15 bp, Homo sapiens
aaattccactttttt

SEQ ID NO: 881729 - DNA, 15 bp, Homo sapiens
taaattccacttttt

SEQ ID NO: 881730 - DNA, 15 bp, Homo sapiens
ataaattccactttt

SEQ ID NO: 881731 - DNA, 15 bp, Homo sapiens
aataaattccacttt

SEQ ID NO: 881732 - DNA, 15 bp, Homo sapiens
caataaattccactt

SEQ ID NO: 881733 - DNA, 15 bp, Homo sapiens
gcaataaattccact

SEQ ID NO: 881734 - DNA, 15 bp, Homo sapiens
agcaataaattccac

SEQ ID NO: 881735 - DNA, 15 bp, Homo sapiens
aagcaataaattcca

SEQ ID NO: 881736 - DNA, 15 bp, Homo sapiens
caagcaataaattcc

SEQ ID NO: 881737 - DNA, 15 bp, Homo sapiens
gcaagcaataaattc

SEQ ID NO: 881738 - DNA, 15 bp, Homo sapiens
agcaagcaataaatt

SEQ ID NO: 881739 - DNA, 15 bp, Homo sapiens
tagcaagcaataaat

SEQ ID NO: 881740 - DNA, 15 bp, Homo sapiens
ttagcaagcaataaa

SEQ ID NO: 881741 - DNA, 15 bp, Homo sapiens
cttagcaagcaataa

SEQ ID NO: 881742 - DNA, 15 bp, Homo sapiens
acttagcaagcaata

SEQ ID NO: 881743 - DNA, 15 bp, Homo sapiens
cacttagcaagcaat

SEQ ID NO: 881744 - DNA, 15 bp, Homo sapiens
tcacttagcaagcaa

SEQ ID NO: 881745 - DNA, 15 bp, Homo sapiens
ctcacttagcaagca

SEQ ID NO: 881746 - DNA, 15 bp, Homo sapiens
cctcacttagcaagc

SEQ ID NO: 881747 - DNA, 15 bp, Homo sapiens
ccctcacttagcaag

SEQ ID NO: 881748 - DNA, 15 bp, Homo sapiens
tccctcacttagcaa

SEQ ID NO: 881749 - DNA, 15 bp, Homo sapiens
ttccctcacttagca

SEQ ID NO: 881750 - DNA, 15 bp, Homo sapiens
tttccctcacttagc

SEQ ID NO: 881751 - DNA, 15 bp, Homo sapiens
ttttccctcacttag

SEQ ID NO: 881752 - DNA, 15 bp, Homo sapiens
gttttccctcactta

SEQ ID NO: 881753 - DNA, 15 bp, Homo sapiens
agttttccctcactt

SEQ ID NO: 881754 - DNA, 15 bp, Homo sapiens
cagttttccctcact

SEQ ID NO: 881755 - DNA, 15 bp, Homo sapiens
acagttttccctcac

SEQ ID NO: 881756 - DNA, 15 bp, Homo sapiens
tacagttttccctca

SEQ ID NO: 881757 - DNA, 15 bp, Homo sapiens
gtacagttttccctc

SEQ ID NO: 881758 - DNA, 15 bp, Homo sapiens
agtacagttttccct

SEQ ID NO: 881759 - DNA, 15 bp, Homo sapiens
aagtacagttttccc

SEQ ID NO: 881760 - DNA, 15 bp, Homo sapiens
caagtacagttttcc

SEQ ID NO: 881761 - DNA, 15 bp, Homo sapiens
acaagtacagttttc

SEQ ID NO: 881762 - DNA, 15 bp, Homo sapiens
tacaagtacagtttt

SEQ ID NO: 881763 - DNA, 15 bp, Homo sapiens
ttacaagtacagttt

SEQ ID NO: 881764 - DNA, 15 bp, Homo sapiens
cttacaagtacagtt

SEQ ID NO: 881765 - DNA, 15 bp, Homo sapiens
tcttacaagtacagt

SEQ ID NO: 881766 - DNA, 15 bp, Homo sapiens
atcttacaagtacag

SEQ ID NO: 881767 - DNA, 15 bp, Homo sapiens
catcttacaagtaca

SEQ ID NO: 881768 - DNA, 15 bp, Homo sapiens
gcatcttacaagtac

SEQ ID NO: 881769 - DNA, 15 bp, Homo sapiens
tgcatcttacaagta

SEQ ID NO: 881770 - DNA, 15 bp, Homo sapiens
ctgcatcttacaagt

SEQ ID NO: 881771 - DNA, 15 bp, Homo sapiens
gctgcatcttacaag

SEQ ID NO: 881772 - DNA, 15 bp, Homo sapiens
ggctgcatcttacaa

SEQ ID NO: 881773 - DNA, 15 bp, Homo sapiens
aggctgcatcttaca

SEQ ID NO: 881774 - DNA, 15 bp, Homo sapiens
gaggctgcatcttac

SEQ ID NO: 881775 - DNA, 15 bp, Homo sapiens
agaggctgcatctta

SEQ ID NO: 881776 - DNA, 15 bp, Homo sapiens
gagaggctgcatctt

SEQ ID NO: 881777 - DNA, 15 bp, Homo sapiens
agagaggctgcatct

SEQ ID NO: 881778 - DNA, 15 bp, Homo sapiens
tagagaggctgcatc

SEQ ID NO: 881779 - DNA, 15 bp, Homo sapiens
ttagagaggctgcat

SEQ ID NO: 881780 - DNA, 15 bp, Homo sapiens
tttagagaggctgca

SEQ ID NO: 881781 - DNA, 15 bp, Homo sapiens
gtttagagaggctgc

SEQ ID NO: 881782 - DNA, 15 bp, Homo sapiens
tgtttagagaggctg

SEQ ID NO: 881783 - DNA, 15 bp, Homo sapiens
ttgtttagagaggct

SEQ ID NO: 881784 - DNA, 15 bp, Homo sapiens
tttgtttagagaggc

SEQ ID NO: 881785 - DNA, 15 bp, Homo sapiens
ttttgtttagagagg

SEQ ID NO: 881786 - DNA, 15 bp, Homo sapiens
cttttgtttagagag

SEQ ID NO: 881787 - DNA, 15 bp, Homo sapiens
ccttttgtttagaga

SEQ ID NO: 881788 - DNA, 15 bp, Homo sapiens
tccttttgtttagag

SEQ ID NO: 881789 - DNA, 15 bp, Homo sapiens
ttccttttgtttaga

SEQ ID NO: 881790 - DNA, 15 bp, Homo sapiens
tttccttttgtttag

SEQ ID NO: 881791 - DNA, 15 bp, Homo sapiens
ttttccttttgttta

SEQ ID NO: 881792 - DNA, 15 bp, Homo sapiens
attttccttttgttt

SEQ ID NO: 881793 - DNA, 15 bp, Homo sapiens
aattttccttttgtt

SEQ ID NO: 881794 - DNA, 15 bp, Homo sapiens
taattttccttttgt

SEQ ID NO: 881795 - DNA, 15 bp, Homo sapiens
gtaattttccttttg

SEQ ID NO: 881796 - DNA, 15 bp, Homo sapiens
agtaattttcctttt

SEQ ID NO: 881797 - DNA, 15 bp, Homo sapiens
aagtaattttccttt

SEQ ID NO: 881798 - DNA, 15 bp, Homo sapiens
aaagtaattttcctt

SEQ ID NO: 881799 - DNA, 15 bp, Homo sapiens
aaaagtaattttcct

SEQ ID NO: 881800 - DNA, 15 bp, Homo sapiens
taaaagtaattttcc

SEQ ID NO: 881801 - DNA, 15 bp, Homo sapiens
ataaaagtaattttc

SEQ ID NO: 881802 - DNA, 15 bp, Homo sapiens
cataaaagtaatttt

SEQ ID NO: 881803 - DNA, 15 bp, Homo sapiens
acataaaagtaattt

SEQ ID NO: 881804 - DNA, 15 bp, Homo sapiens
cacataaaagtaatt

SEQ ID NO: 881805 - DNA, 15 bp, Homo sapiens
tcacataaaagtaat

SEQ ID NO: 881806 - DNA, 15 bp, Homo sapiens
ctcacataaaagtaa

SEQ ID NO: 881807 - DNA, 15 bp, Homo sapiens
cctcacataaaagta

SEQ ID NO: 881808 - DNA, 15 bp, Homo sapiens
acctcacataaaagt

SEQ ID NO: 881809 - DNA, 15 bp, Homo sapiens
aacctcacataaaag

SEQ ID NO: 881810 - DNA, 15 bp, Homo sapiens
aaacctcacataaaa

SEQ ID NO: 881811 - DNA, 15 bp, Homo sapiens
caaacctcacataaa

SEQ ID NO: 881812 - DNA, 15 bp, Homo sapiens
ccaaacctcacataa

SEQ ID NO: 881813 - DNA, 15 bp, Homo sapiens
cccaaacctcacata

SEQ ID NO: 881814 - DNA, 15 bp, Homo sapiens
ccccaaacctcacat

SEQ ID NO: 881815 - DNA, 15 bp, Homo sapiens
tccccaaacctcaca

SEQ ID NO: 881816 - DNA, 15 bp, Homo sapiens
ttccccaaacctcac

SEQ ID NO: 881817 - DNA, 15 bp, Homo sapiens
attccccaaacctca

SEQ ID NO: 881818 - DNA, 15 bp, Homo sapiens
aattccccaaacctc

SEQ ID NO: 881819 - DNA, 15 bp, Homo sapiens
taattccccaaacct

SEQ ID NO: 881820 - DNA, 15 bp, Homo sapiens
ataattccccaaacc

SEQ ID NO: 881821 - DNA, 15 bp, Homo sapiens
cataattccccaaac

SEQ ID NO: 881822 - DNA, 15 bp, Homo sapiens
ccataattccccaaa

SEQ ID NO: 881823 - DNA, 15 bp, Homo sapiens
tccataattccccaa

SEQ ID NO: 881824 - DNA, 15 bp, Homo sapiens
ctccataattcccca

SEQ ID NO: 881825 - DNA, 15 bp, Homo sapiens
actccataattcccc

SEQ ID NO: 881826 - DNA, 15 bp, Homo sapiens
aactccataattccc

SEQ ID NO: 881827 - DNA, 15 bp, Homo sapiens
gaactccataattcc

SEQ ID NO: 881828 - DNA, 15 bp, Homo sapiens
tgaactccataattc

SEQ ID NO: 881829 - DNA, 15 bp, Homo sapiens
ttgaactccataatt

SEQ ID NO: 881830 - DNA, 15 bp, Homo sapiens
tttgaactccataat

SEQ ID NO: 881831 - DNA, 15 bp, Homo sapiens
ctttgaactccataa

SEQ ID NO: 881832 - DNA, 15 bp, Homo sapiens
tctttgaactccata

SEQ ID NO: 881833 - DNA, 15 bp, Homo sapiens
atctttgaactccat

SEQ ID NO: 881834 - DNA, 15 bp, Homo sapiens
gatctttgaactcca

SEQ ID NO: 881835 - DNA, 15 bp, Homo sapiens
cgatctttgaactcc

SEQ ID NO: 881836 - DNA, 15 bp, Homo sapiens
acgatctttgaactc

SEQ ID NO: 881837 - DNA, 15 bp, Homo sapiens
aacgatctttgaact

SEQ ID NO: 881838 - DNA, 15 bp, Homo sapiens
caacgatctttgaac

SEQ ID NO: 881839 - DNA, 15 bp, Homo sapiens
ccaacgatctttgaa

SEQ ID NO: 881840 - DNA, 15 bp, Homo sapiens
tccaacgatctttga

SEQ ID NO: 881841 - DNA, 15 bp, Homo sapiens
gtccaacgatctttg

SEQ ID NO: 881842 - DNA, 15 bp, Homo sapiens
agtccaacgatcttt

SEQ ID NO: 881843 - DNA, 15 bp, Homo sapiens
aagtccaacgatctt

SEQ ID NO: 881844 - DNA, 15 bp, Homo sapiens
aaagtccaacgatct

SEQ ID NO: 881845 - DNA, 15 bp, Homo sapiens
aaaagtccaacgatc

SEQ ID NO: 881846 - DNA, 15 bp, Homo sapiens
caaaagtccaacgat

SEQ ID NO: 881847 - DNA, 15 bp, Homo sapiens
ccaaaagtccaacga

SEQ ID NO: 881848 - DNA, 15 bp, Homo sapiens
tccaaaagtccaacg

SEQ ID NO: 881849 - DNA, 15 bp, Homo sapiens
ttccaaaagtccaac

SEQ ID NO: 881850 - DNA, 15 bp, Homo sapiens
cttccaaaagtccaa

SEQ ID NO: 881851 - DNA, 15 bp, Homo sapiens
acttccaaaagtcca

SEQ ID NO: 881852 - DNA, 15 bp, Homo sapiens
cacttccaaaagtcc

SEQ ID NO: 881853 - DNA, 15 bp, Homo sapiens
ccacttccaaaagtc

SEQ ID NO: 881854 - DNA, 15 bp, Homo sapiens
tccacttccaaaagt

SEQ ID NO: 881855 - DNA, 15 bp, Homo sapiens
ttccacttccaaaag

SEQ ID NO: 881856 - DNA, 15 bp, Homo sapiens
cttccacttccaaaa

SEQ ID NO: 881857 - DNA, 15 bp, Homo sapiens
acttccacttccaaa

SEQ ID NO: 881858 - DNA, 15 bp, Homo sapiens
cacttccacttccaa

SEQ ID NO: 881859 - DNA, 15 bp, Homo sapiens
acacttccacttcca

SEQ ID NO: 881860 - DNA, 15 bp, Homo sapiens
aacacttccacttcc

SEQ ID NO: 881861 - DNA, 15 bp, Homo sapiens
aaacacttccacttc

SEQ ID NO: 881862 - DNA, 15 bp, Homo sapiens
gaaacacttccactt

SEQ ID NO: 881863 - DNA, 15 bp, Homo sapiens
cgaaacacttccact

SEQ ID NO: 881864 - DNA, 15 bp, Homo sapiens
ccgaaacacttccac

SEQ ID NO: 881865 - DNA, 15 bp, Homo sapiens
cccgaaacacttcca

SEQ ID NO: 881866 - DNA, 15 bp, Homo sapiens
tcccgaaacacttcc

SEQ ID NO: 881867 - DNA, 15 bp, Homo sapiens
atcccgaaacacttc

SEQ ID NO: 881868 - DNA, 15 bp, Homo sapiens
aatcccgaaacactt

SEQ ID NO: 881869 - DNA, 15 bp, Homo sapiens
taatcccgaaacact

SEQ ID NO: 881870 - DNA, 15 bp, Homo sapiens
ctaatcccgaaacac

SEQ ID NO: 881871 - DNA, 15 bp, Homo sapiens
actaatcccgaaaca

SEQ ID NO: 881872 - DNA, 15 bp, Homo sapiens
aactaatcccgaaac

SEQ ID NO: 881873 - DNA, 15 bp, Homo sapiens
caactaatcccgaaa

SEQ ID NO: 881874 - DNA, 15 bp, Homo sapiens
tcaactaatcccgaa

SEQ ID NO: 881875 - DNA, 15 bp, Homo sapiens
ttcaactaatcccga

SEQ ID NO: 881876 - DNA, 15 bp, Homo sapiens
gttcaactaatcccg

SEQ ID NO: 881877 - DNA, 15 bp, Homo sapiens
agttcaactaatccc

SEQ ID NO: 881878 - DNA, 15 bp, Homo sapiens
aagttcaactaatcc

SEQ ID NO: 881879 - DNA, 15 bp, Homo sapiens
aaagttcaactaatc

SEQ ID NO: 881880 - DNA, 15 bp, Homo sapiens
taaagttcaactaat

SEQ ID NO: 881881 - DNA, 15 bp, Homo sapiens
ttaaagttcaactaa

SEQ ID NO: 881882 - DNA, 15 bp, Homo sapiens
gttaaagttcaacta

SEQ ID NO: 881883 - DNA, 15 bp, Homo sapiens
agttaaagttcaact

SEQ ID NO: 881884 - DNA, 15 bp, Homo sapiens
cagttaaagttcaac

SEQ ID NO: 881885 - DNA, 15 bp, Homo sapiens
acagttaaagttcaa

SEQ ID NO: 881886 - DNA, 15 bp, Homo sapiens
tacagttaaagttca

SEQ ID NO: 881887 - DNA, 15 bp, Homo sapiens
ctacagttaaagttc

SEQ ID NO: 881888 - DNA, 15 bp, Homo sapiens
tctacagttaaagtt

SEQ ID NO: 881889 - DNA, 15 bp, Homo sapiens
ttctacagttaaagt

SEQ ID NO: 881890 - DNA, 15 bp, Homo sapiens
cttctacagttaaag

SEQ ID NO: 881891 - DNA, 15 bp, Homo sapiens
gcttctacagttaaa

SEQ ID NO: 881892 - DNA, 15 bp, Homo sapiens
tgcttctacagttaa

SEQ ID NO: 881893 - DNA, 15 bp, Homo sapiens
atgcttctacagtta

SEQ ID NO: 881894 - DNA, 15 bp, Homo sapiens
gatgcttctacagtt

SEQ ID NO: 881895 - DNA, 15 bp, Homo sapiens
tgatgcttctacagt

SEQ ID NO: 881896 - DNA, 15 bp, Homo sapiens
gtgatgcttctacag

SEQ ID NO: 881897 - DNA, 15 bp, Homo sapiens
ggtgatgcttctaca

SEQ ID NO: 881898 - DNA, 15 bp, Homo sapiens
tggtgatgcttctac

SEQ ID NO: 881899 - DNA, 15 bp, Homo sapiens
ttggtgatgcttcta

SEQ ID NO: 881900 - DNA, 15 bp, Homo sapiens
attggtgatgcttct

SEQ ID NO: 881901 - DNA, 15 bp, Homo sapiens
cattggtgatgcttc

SEQ ID NO: 881902 - DNA, 15 bp, Homo sapiens
tcattggtgatgctt

SEQ ID NO: 881903 - DNA, 15 bp, Homo sapiens
gtcattggtgatgct

SEQ ID NO: 881904 - DNA, 15 bp, Homo sapiens
tgtcattggtgatgc

SEQ ID NO: 881905 - DNA, 15 bp, Homo sapiens
atgtcattggtgatg

SEQ ID NO: 881906 - DNA, 15 bp, Homo sapiens
aatgtcattggtgat

SEQ ID NO: 881907 - DNA, 15 bp, Homo sapiens
gaatgtcattggtga

SEQ ID NO: 881908 - DNA, 15 bp, Homo sapiens
tgaatgtcattggtg

SEQ ID NO: 881909 - DNA, 15 bp, Homo sapiens
ctgaatgtcattggt

SEQ ID NO: 881910 - DNA, 15 bp, Homo sapiens
tctgaatgtcattgg

SEQ ID NO: 881911 - DNA, 15 bp, Homo sapiens
ttctgaatgtcattg

SEQ ID NO: 881912 - DNA, 15 bp, Homo sapiens
cttctgaatgtcatt

SEQ ID NO: 881913 - DNA, 15 bp, Homo sapiens
acttctgaatgtcat

SEQ ID NO: 881914 - DNA, 15 bp, Homo sapiens
cacttctgaatgtca

SEQ ID NO: 881915 - DNA, 15 bp, Homo sapiens
acacttctgaatgtc

SEQ ID NO: 881916 - DNA, 15 bp, Homo sapiens
cacacttctgaatgt

SEQ ID NO: 881917 - DNA, 15 bp, Homo sapiens
ccacacttctgaatg

SEQ ID NO: 881918 - DNA, 15 bp, Homo sapiens
accacacttctgaat

SEQ ID NO: 881919 - DNA, 15 bp, Homo sapiens
aaccacacttctgaa

SEQ ID NO: 881920 - DNA, 15 bp, Homo sapiens
taaccacacttctga

SEQ ID NO: 881921 - DNA, 15 bp, Homo sapiens
gtaaccacacttctg

SEQ ID NO: 881922 - DNA, 15 bp, Homo sapiens
agtaaccacacttct

SEQ ID NO: 881923 - DNA, 15 bp, Homo sapiens
cagtaaccacacttc

SEQ ID NO: 881924 - DNA, 15 bp, Homo sapiens
gcagtaaccacactt

SEQ ID NO: 881925 - DNA, 15 bp, Homo sapiens
agcagtaaccacact

SEQ ID NO: 881926 - DNA, 15 bp, Homo sapiens
cagcagtaaccacac

SEQ ID NO: 881927 - DNA, 15 bp, Homo sapiens
gcagcagtaaccaca

SEQ ID NO: 881928 - DNA, 15 bp, Homo sapiens
ggcagcagtaaccac

SEQ ID NO: 881929 - DNA, 15 bp, Homo sapiens
tggcagcagtaacca

SEQ ID NO: 881930 - DNA, 15 bp, Homo sapiens
ttggcagcagtaacc

SEQ ID NO: 881931 - DNA, 15 bp, Homo sapiens
cttggcagcagtaac

SEQ ID NO: 881932 - DNA, 15 bp, Homo sapiens
tcttggcagcagtaa

SEQ ID NO: 881933 - DNA, 15 bp, Homo sapiens
atcttggcagcagta

SEQ ID NO: 881934 - DNA, 15 bp, Homo sapiens
tatcttggcagcagt

SEQ ID NO: 881935 - DNA, 15 bp, Homo sapiens
atatcttggcagcag

SEQ ID NO: 881936 - DNA, 15 bp, Homo sapiens
gatatcttggcagca

SEQ ID NO: 881937 - DNA, 15 bp, Homo sapiens
agatatcttggcagc

SEQ ID NO: 881938 - DNA, 15 bp, Homo sapiens
aagatatcttggcag

SEQ ID NO: 881939 - DNA, 15 bp, Homo sapiens
aaagatatcttggca

SEQ ID NO: 881940 - DNA, 15 bp, Homo sapiens
caaagatatcttggc

SEQ ID NO: 881941 - DNA, 15 bp, Homo sapiens
tcaaagatatcttgg

SEQ ID NO: 881942 - DNA, 15 bp, Homo sapiens
atcaaagatatcttg

SEQ ID NO: 881943 - DNA, 15 bp, Homo sapiens
aatcaaagatatctt

SEQ ID NO: 881944 - DNA, 15 bp, Homo sapiens
caatcaaagatatct

SEQ ID NO: 881945 - DNA, 15 bp, Homo sapiens
gcaatcaaagatatc

SEQ ID NO: 881946 - DNA, 15 bp, Homo sapiens
agcaatcaaagatat

SEQ ID NO: 881947 - DNA, 15 bp, Homo sapiens
aagcaatcaaagata

SEQ ID NO: 881948 - DNA, 15 bp, Homo sapiens
caagcaatcaaagat

SEQ ID NO: 881949 - DNA, 15 bp, Homo sapiens
ccaagcaatcaaaga

SEQ ID NO: 881950 - DNA, 15 bp, Homo sapiens
cccaagcaatcaaag

SEQ ID NO: 881951 - DNA, 15 bp, Homo sapiens
tcccaagcaatcaaa

SEQ ID NO: 881952 - DNA, 15 bp, Homo sapiens
gtcccaagcaatcaa

SEQ ID NO: 881953 - DNA, 15 bp, Homo sapiens
tgtcccaagcaatca

SEQ ID NO: 881954 - DNA, 15 bp, Homo sapiens
ctgtcccaagcaatc

SEQ ID NO: 881955 - DNA, 15 bp, Homo sapiens
actgtcccaagcaat

SEQ ID NO: 881956 - DNA, 15 bp, Homo sapiens
aactgtcccaagcaa

SEQ ID NO: 881957 - DNA, 15 bp, Homo sapiens
aaactgtcccaagca

SEQ ID NO: 881958 - DNA, 15 bp, Homo sapiens
aaaactgtcccaagc

SEQ ID NO: 881959 - DNA, 15 bp, Homo sapiens
taaaactgtcccaag

SEQ ID NO: 881960 - DNA, 15 bp, Homo sapiens
ttaaaactgtcccaa

SEQ ID NO: 881961 - DNA, 15 bp, Homo sapiens
tttaaaactgtccca

SEQ ID NO: 881962 - DNA, 15 bp, Homo sapiens
ttttaaaactgtccc

SEQ ID NO: 881963 - DNA, 15 bp, Homo sapiens
attttaaaactgtcc

SEQ ID NO: 881964 - DNA, 15 bp, Homo sapiens
gattttaaaactgtc

SEQ ID NO: 881965 - DNA, 15 bp, Homo sapiens
agattttaaaactgt

SEQ ID NO: 881966 - DNA, 15 bp, Homo sapiens
cagattttaaaactg

SEQ ID NO: 881967 - DNA, 15 bp, Homo sapiens
ccagattttaaaact

SEQ ID NO: 881968 - DNA, 15 bp, Homo sapiens
tccagattttaaaac

SEQ ID NO: 881969 - DNA, 15 bp, Homo sapiens
atccagattttaaaa

SEQ ID NO: 881970 - DNA, 15 bp, Homo sapiens
aatccagattttaaa

SEQ ID NO: 881971 - DNA, 15 bp, Homo sapiens
aaatccagattttaa

SEQ ID NO: 881972 - DNA, 15 bp, Homo sapiens
caaatccagatttta

SEQ ID NO: 881973 - DNA, 15 bp, Homo sapiens
acaaatccagatttt

SEQ ID NO: 881974 - DNA, 15 bp, Homo sapiens
aacaaatccagattt

SEQ ID NO: 881975 - DNA, 15 bp, Homo sapiens
taacaaatccagatt

SEQ ID NO: 881976 - DNA, 15 bp, Homo sapiens
gtaacaaatccagat

SEQ ID NO: 881977 - DNA, 15 bp, Homo sapiens
agtaacaaatccaga

SEQ ID NO: 881978 - DNA, 15 bp, Homo sapiens
cagtaacaaatccag

SEQ ID NO: 881979 - DNA, 15 bp, Homo sapiens
acagtaacaaatcca

SEQ ID NO: 881980 - DNA, 15 bp, Homo sapiens
cacagtaacaaatcc

SEQ ID NO: 881981 - DNA, 15 bp, Homo sapiens
ccacagtaacaaatc

SEQ ID NO: 881982 - DNA, 15 bp, Homo sapiens
gccacagtaacaaat

SEQ ID NO: 881983 - DNA, 15 bp, Homo sapiens
ggccacagtaacaaa

SEQ ID NO: 881984 - DNA, 15 bp, Homo sapiens
tggccacagtaacaa

SEQ ID NO: 881985 - DNA, 15 bp, Homo sapiens
ttggccacagtaaca

SEQ ID NO: 881986 - DNA, 15 bp, Homo sapiens
tttggccacagtaac

SEQ ID NO: 881987 - DNA, 15 bp, Homo sapiens
ttttggccacagtaa

SEQ ID NO: 881988 - DNA, 15 bp, Homo sapiens
tttttggccacagta

SEQ ID NO: 881989 - DNA, 15 bp, Homo sapiens
ttttttggccacagt

SEQ ID NO: 881990 - DNA, 15 bp, Homo sapiens
gttttttggccacag

SEQ ID NO: 881991 - DNA, 15 bp, Homo sapiens
tgttttttggccaca

SEQ ID NO: 881992 - DNA, 15 bp, Homo sapiens
ttgttttttggccac

SEQ ID NO: 881993 - DNA, 15 bp, Homo sapiens
attgttttttggcca

SEQ ID NO: 881994 - DNA, 15 bp, Homo sapiens
gattgttttttggcc

SEQ ID NO: 881995 - DNA, 15 bp, Homo sapiens
tgattgttttttggc

SEQ ID NO: 881996 - DNA, 15 bp, Homo sapiens
ctgattgttttttgg

SEQ ID NO: 881997 - DNA, 15 bp, Homo sapiens
tctgattgttttttg

SEQ ID NO: 881998 - DNA, 15 bp, Homo sapiens
atctgattgtttttt

SEQ ID NO: 881999 - DNA, 15 bp, Homo sapiens
aatctgattgttttt

SEQ ID NO: 882000 - DNA, 15 bp, Homo sapiens
aaatctgattgtttt

SEQ ID NO: 882001 - DNA, 15 bp, Homo sapiens
aaaatctgattgttt

SEQ ID NO: 882002 - DNA, 15 bp, Homo sapiens
aaaaatctgattgtt

SEQ ID NO: 882003 - DNA, 15 bp, Homo sapiens
gaaaaatctgattgt

SEQ ID NO: 882004 - DNA, 15 bp, Homo sapiens
ggaaaaatctgattg

SEQ ID NO: 882005 - DNA, 15 bp, Homo sapiens
aggaaaaatctgatt

SEQ ID NO: 882006 - DNA, 15 bp, Homo sapiens
aaggaaaaatctgat

SEQ ID NO: 882007 - DNA, 15 bp, Homo sapiens
caaggaaaaatctga

SEQ ID NO: 882008 - DNA, 15 bp, Homo sapiens
tcaaggaaaaatctg

SEQ ID NO: 882009 - DNA, 15 bp, Homo sapiens
ttcaaggaaaaatct

SEQ ID NO: 882010 - DNA, 15 bp, Homo sapiens
cttcaaggaaaaatc

SEQ ID NO: 882011 - DNA, 15 bp, Homo sapiens
tcttcaaggaaaaat

SEQ ID NO: 882012 - DNA, 15 bp, Homo sapiens
ttcttcaaggaaaaa

SEQ ID NO: 882013 - DNA, 15 bp, Homo sapiens
attcttcaaggaaaa

SEQ ID NO: 882014 - DNA, 15 bp, Homo sapiens
tattcttcaaggaaa

SEQ ID NO: 882015 - DNA, 15 bp, Homo sapiens
ctattcttcaaggaa

SEQ ID NO: 882016 - DNA, 15 bp, Homo sapiens
cctattcttcaagga

SEQ ID NO: 882017 - DNA, 15 bp, Homo sapiens
tcctattcttcaagg

SEQ ID NO: 882018 - DNA, 15 bp, Homo sapiens
ttcctattcttcaag

SEQ ID NO: 882019 - DNA, 15 bp, Homo sapiens
gttcctattcttcaa

SEQ ID NO: 882020 - DNA, 15 bp, Homo sapiens
ggttcctattcttca

SEQ ID NO: 882021 - DNA, 15 bp, Homo sapiens
aggttcctattcttc

SEQ ID NO: 882022 - DNA, 15 bp, Homo sapiens
aaggttcctattctt

SEQ ID NO: 882023 - DNA, 15 bp, Homo sapiens
aaaggttcctattct

SEQ ID NO: 882024 - DNA, 15 bp, Homo sapiens
aaaaggttcctattc

SEQ ID NO: 882025 - DNA, 15 bp, Homo sapiens
taaaaggttcctatt

SEQ ID NO: 882026 - DNA, 15 bp, Homo sapiens
ataaaaggttcctat

SEQ ID NO: 882027 - DNA, 15 bp, Homo sapiens
aataaaaggttccta

SEQ ID NO: 882028 - DNA, 15 bp, Homo sapiens
gaataaaaggttcct

SEQ ID NO: 882029 - DNA, 15 bp, Homo sapiens
agaataaaaggttcc

SEQ ID NO: 882030 - DNA, 15 bp, Homo sapiens
aagaataaaaggttc

SEQ ID NO: 882031 - DNA, 15 bp, Homo sapiens
taagaataaaaggtt

SEQ ID NO: 882032 - DNA, 15 bp, Homo sapiens
gtaagaataaaaggt

SEQ ID NO: 882033 - DNA, 15 bp, Homo sapiens
ggtaagaataaaagg

SEQ ID NO: 882034 - DNA, 15 bp, Homo sapiens
tggtaagaataaaag

SEQ ID NO: 882035 - DNA, 15 bp, Homo sapiens
gtggtaagaataaaa

SEQ ID NO: 882036 - DNA, 15 bp, Homo sapiens
ggtggtaagaataaa

SEQ ID NO: 882037 - DNA, 15 bp, Homo sapiens
tggtggtaagaataa

SEQ ID NO: 882038 - DNA, 15 bp, Homo sapiens
ctggtggtaagaata

SEQ ID NO: 882039 - DNA, 15 bp, Homo sapiens
tctggtggtaagaat

SEQ ID NO: 882040 - DNA, 15 bp, Homo sapiens
ttctggtggtaagaa

SEQ ID NO: 882041 - DNA, 15 bp, Homo sapiens
cttctggtggtaaga

SEQ ID NO: 882042 - DNA, 15 bp, Homo sapiens
acttctggtggtaag

SEQ ID NO: 882043 - DNA, 15 bp, Homo sapiens
aacttctggtggtaa

SEQ ID NO: 882044 - DNA, 15 bp, Homo sapiens
taacttctggtggta

SEQ ID NO: 882045 - DNA, 15 bp, Homo sapiens
ctaacttctggtggt

SEQ ID NO: 882046 - DNA, 15 bp, Homo sapiens
actaacttctggtgg

SEQ ID NO: 882047 - DNA, 15 bp, Homo sapiens
aactaacttctggtg

SEQ ID NO: 882048 - DNA, 15 bp, Homo sapiens
aaactaacttctggt

SEQ ID NO: 882049 - DNA, 15 bp, Homo sapiens
taaactaacttctgg

SEQ ID NO: 882050 - DNA, 15 bp, Homo sapiens
gtaaactaacttctg

SEQ ID NO: 882051 - DNA, 15 bp, Homo sapiens
cgtaaactaacttct

SEQ ID NO: 882052 - DNA, 15 bp, Homo sapiens
tcgtaaactaacttc

SEQ ID NO: 882053 - DNA, 15 bp, Homo sapiens
ttcgtaaactaactt

SEQ ID NO: 882054 - DNA, 15 bp, Homo sapiens
cttcgtaaactaact

SEQ ID NO: 882055 - DNA, 15 bp, Homo sapiens
acttcgtaaactaac

SEQ ID NO: 882056 - DNA, 15 bp, Homo sapiens
gacttcgtaaactaa

SEQ ID NO: 882057 - DNA, 15 bp, Homo sapiens
tgacttcgtaaacta

SEQ ID NO: 882058 - DNA, 15 bp, Homo sapiens
ctgacttcgtaaact

SEQ ID NO: 882059 - DNA, 15 bp, Homo sapiens
tctgacttcgtaaac

SEQ ID NO: 882060 - DNA, 15 bp, Homo sapiens
ctctgacttcgtaaa

SEQ ID NO: 882061 - DNA, 15 bp, Homo sapiens
cctctgacttcgtaa

SEQ ID NO: 882062 - DNA, 15 bp, Homo sapiens
gcctctgacttcgta

SEQ ID NO: 882063 - DNA, 15 bp, Homo sapiens
agcctctgacttcgt

SEQ ID NO: 882064 - DNA, 15 bp, Homo sapiens
tagcctctgacttcg

SEQ ID NO: 882065 - DNA, 15 bp, Homo sapiens
ttagcctctgacttc

SEQ ID NO: 882066 - DNA, 15 bp, Homo sapiens
cttagcctctgactt

SEQ ID NO: 882067 - DNA, 15 bp, Homo sapiens
acttagcctctgact

SEQ ID NO: 882068 - DNA, 15 bp, Homo sapiens
cacttagcctctgac

SEQ ID NO: 882069 - DNA, 15 bp, Homo sapiens
ccacttagcctctga

SEQ ID NO: 882070 - DNA, 15 bp, Homo sapiens
gccacttagcctctg

SEQ ID NO: 882071 - DNA, 15 bp, Homo sapiens
tgccacttagcctct

SEQ ID NO: 882072 - DNA, 15 bp, Homo sapiens
ctgccacttagcctc

SEQ ID NO: 882073 - DNA, 15 bp, Homo sapiens
actgccacttagcct

SEQ ID NO: 882074 - DNA, 15 bp, Homo sapiens
gactgccacttagcc

SEQ ID NO: 882075 - DNA, 15 bp, Homo sapiens
ggactgccacttagc

SEQ ID NO: 882076 - DNA, 15 bp, Homo sapiens
aggactgccacttag

SEQ ID NO: 882077 - DNA, 15 bp, Homo sapiens
gaggactgccactta

SEQ ID NO: 882078 - DNA, 15 bp, Homo sapiens
ggaggactgccactt

SEQ ID NO: 882079 - DNA, 15 bp, Homo sapiens
aggaggactgccact

SEQ ID NO: 882080 - DNA, 15 bp, Homo sapiens
aaggaggactgccac

SEQ ID NO: 882081 - DNA, 15 bp, Homo sapiens
taaggaggactgcca

SEQ ID NO: 882082 - DNA, 15 bp, Homo sapiens
ttaaggaggactgcc

SEQ ID NO: 882083 - DNA, 15 bp, Homo sapiens
cttaaggaggactgc

SEQ ID NO: 882084 - DNA, 15 bp, Homo sapiens
gcttaaggaggactg

SEQ ID NO: 882085 - DNA, 15 bp, Homo sapiens
ggcttaaggaggact

SEQ ID NO: 882086 - DNA, 15 bp, Homo sapiens
tggcttaaggaggac

SEQ ID NO: 882087 - DNA, 15 bp, Homo sapiens
atggcttaaggagga

SEQ ID NO: 882088 - DNA, 15 bp, Homo sapiens
aatggcttaaggagg

SEQ ID NO: 882089 - DNA, 15 bp, Homo sapiens
aaatggcttaaggag

SEQ ID NO: 882090 - DNA, 15 bp, Homo sapiens
gaaatggcttaagga

SEQ ID NO: 882091 - DNA, 15 bp, Homo sapiens
ggaaatggcttaagg

SEQ ID NO: 882092 - DNA, 15 bp, Homo sapiens
tggaaatggcttaag

SEQ ID NO: 882093 - DNA, 15 bp, Homo sapiens
gtggaaatggcttaa

SEQ ID NO: 882094 - DNA, 15 bp, Homo sapiens
agtggaaatggctta

SEQ ID NO: 882095 - DNA, 15 bp, Homo sapiens
aagtggaaatggctt

SEQ ID NO: 882096 - DNA, 15 bp, Homo sapiens
aaagtggaaatggct

SEQ ID NO: 882097 - DNA, 15 bp, Homo sapiens
caaagtggaaatggc

SEQ ID NO: 882098 - DNA, 15 bp, Homo sapiens
ccaaagtggaaatgg

SEQ ID NO: 882099 - DNA, 15 bp, Homo sapiens
cccaaagtggaaatg

SEQ ID NO: 882100 - DNA, 15 bp, Homo sapiens
ccccaaagtggaaat

SEQ ID NO: 882101 - DNA, 15 bp, Homo sapiens
tccccaaagtggaaa

SEQ ID NO: 882102 - DNA, 15 bp, Homo sapiens
ttccccaaagtggaa

SEQ ID NO: 882103 - DNA, 15 bp, Homo sapiens
gttccccaaagtgga

SEQ ID NO: 882104 - DNA, 15 bp, Homo sapiens
ggttccccaaagtgg

SEQ ID NO: 882105 - DNA, 15 bp, Homo sapiens
gggttccccaaagtg

SEQ ID NO: 882106 - DNA, 15 bp, Homo sapiens
ggggttccccaaagt

SEQ ID NO: 882107 - DNA, 15 bp, Homo sapiens
tggggttccccaaag

SEQ ID NO: 882108 - DNA, 15 bp, Homo sapiens
gtggggttccccaaa

SEQ ID NO: 882109 - DNA, 15 bp, Homo sapiens
tgtggggttccccaa

SEQ ID NO: 882110 - DNA, 15 bp, Homo sapiens
ctgtggggttcccca

SEQ ID NO: 882111 - DNA, 15 bp, Homo sapiens
tctgtggggttcccc

SEQ ID NO: 882112 - DNA, 15 bp, Homo sapiens
ttctgtggggttccc

SEQ ID NO: 882113 - DNA, 15 bp, Homo sapiens
cttctgtggggttcc

SEQ ID NO: 882114 - DNA, 15 bp, Homo sapiens
tcttctgtggggttc

SEQ ID NO: 882115 - DNA, 15 bp, Homo sapiens
ctcttctgtggggtt

SEQ ID NO: 882116 - DNA, 15 bp, Homo sapiens
actcttctgtggggt

SEQ ID NO: 882117 - DNA, 15 bp, Homo sapiens
cactcttctgtgggg

SEQ ID NO: 882118 - DNA, 15 bp, Homo sapiens
ccactcttctgtggg

SEQ ID NO: 882119 - DNA, 15 bp, Homo sapiens
tccactcttctgtgg

SEQ ID NO: 882120 - DNA, 15 bp, Homo sapiens
gtccactcttctgtg

SEQ ID NO: 882121 - DNA, 15 bp, Homo sapiens
tgtccactcttctgt

SEQ ID NO: 882122 - DNA, 15 bp, Homo sapiens
ctgtccactcttctg

SEQ ID NO: 882123 - DNA, 15 bp, Homo sapiens
actgtccactcttct

SEQ ID NO: 882124 - DNA, 15 bp, Homo sapiens
aactgtccactcttc

SEQ ID NO: 882125 - DNA, 15 bp, Homo sapiens
caactgtccactctt

SEQ ID NO: 882126 - DNA, 15 bp, Homo sapiens
gcaactgtccactct

SEQ ID NO: 882127 - DNA, 15 bp, Homo sapiens
agcaactgtccactc

SEQ ID NO: 882128 - DNA, 15 bp, Homo sapiens
gagcaactgtccact

SEQ ID NO: 882129 - DNA, 15 bp, Homo sapiens
tgagcaactgtccac

SEQ ID NO: 882130 - DNA, 15 bp, Homo sapiens
ttgagcaactgtcca

SEQ ID NO: 882131 - DNA, 15 bp, Homo sapiens
cttgagcaactgtcc

SEQ ID NO: 882132 - DNA, 15 bp, Homo sapiens
acttgagcaactgtc

SEQ ID NO: 882133 - DNA, 15 bp, Homo sapiens
gacttgagcaactgt

SEQ ID NO: 882134 - DNA, 15 bp, Homo sapiens
tgacttgagcaactg

SEQ ID NO: 882135 - DNA, 15 bp, Homo sapiens
ttgacttgagcaact

SEQ ID NO: 882136 - DNA, 15 bp, Homo sapiens
gttgacttgagcaac

SEQ ID NO: 882137 - DNA, 15 bp, Homo sapiens
tgttgacttgagcaa

SEQ ID NO: 882138 - DNA, 15 bp, Homo sapiens
ttgttgacttgagca

SEQ ID NO: 882139 - DNA, 15 bp, Homo sapiens
tttgttgacttgagc

SEQ ID NO: 882140 - DNA, 15 bp, Homo sapiens
gtttgttgacttgag

SEQ ID NO: 882141 - DNA, 15 bp, Homo sapiens
tgtttgttgacttga

SEQ ID NO: 882142 - DNA, 15 bp, Homo sapiens
ctgtttgttgacttg

SEQ ID NO: 882143 - DNA, 15 bp, Homo sapiens
cctgtttgttgactt

SEQ ID NO: 882144 - DNA, 15 bp, Homo sapiens
tcctgtttgttgact

SEQ ID NO: 882145 - DNA, 15 bp, Homo sapiens
ctcctgtttgttgac

SEQ ID NO: 882146 - DNA, 15 bp, Homo sapiens
gctcctgtttgttga

SEQ ID NO: 882147 - DNA, 15 bp, Homo sapiens
agctcctgtttgttg

SEQ ID NO: 882148 - DNA, 15 bp, Homo sapiens
gagctcctgtttgtt

SEQ ID NO: 882149 - DNA, 15 bp, Homo sapiens
agagctcctgtttgt

SEQ ID NO: 882150 - DNA, 15 bp, Homo sapiens
aagagctcctgtttg

SEQ ID NO: 882151 - DNA, 15 bp, Homo sapiens
caagagctcctgttt

SEQ ID NO: 882152 - DNA, 15 bp, Homo sapiens
ccaagagctcctgtt

SEQ ID NO: 882153 - DNA, 15 bp, Homo sapiens
cccaagagctcctgt

SEQ ID NO: 882154 - DNA, 15 bp, Homo sapiens
ccccaagagctcctg

SEQ ID NO: 882155 - DNA, 15 bp, Homo sapiens
gccccaagagctcct

SEQ ID NO: 882156 - DNA, 15 bp, Homo sapiens
tgccccaagagctcc

SEQ ID NO: 882157 - DNA, 15 bp, Homo sapiens
atgccccaagagctc

SEQ ID NO: 882158 - DNA, 15 bp, Homo sapiens
gatgccccaagagct

SEQ ID NO: 882159 - DNA, 15 bp, Homo sapiens
tgatgccccaagagc

SEQ ID NO: 882160 - DNA, 15 bp, Homo sapiens
ctgatgccccaagag

SEQ ID NO: 882161 - DNA, 15 bp, Homo sapiens
actgatgccccaaga

SEQ ID NO: 882162 - DNA, 15 bp, Homo sapiens
cactgatgccccaag

SEQ ID NO: 882163 - DNA, 15 bp, Homo sapiens
acactgatgccccaa

SEQ ID NO: 882164 - DNA, 15 bp, Homo sapiens
gacactgatgcccca

SEQ ID NO: 882165 - DNA, 15 bp, Homo sapiens
tgacactgatgcccc

SEQ ID NO: 882166 - DNA, 15 bp, Homo sapiens
gtgacactgatgccc

SEQ ID NO: 882167 - DNA, 15 bp, Homo sapiens
tgtgacactgatgcc

SEQ ID NO: 882168 - DNA, 15 bp, Homo sapiens
atgtgacactgatgc

SEQ ID NO: 882169 - DNA, 15 bp, Homo sapiens
catgtgacactgatg

SEQ ID NO: 882170 - DNA, 15 bp, Homo sapiens
ccatgtgacactgat

SEQ ID NO: 882171 - DNA, 15 bp, Homo sapiens
accatgtgacactga

SEQ ID NO: 882172 - DNA, 15 bp, Homo sapiens
aaccatgtgacactg

SEQ ID NO: 882173 - DNA, 15 bp, Homo sapiens
gaaccatgtgacact

SEQ ID NO: 882174 - DNA, 15 bp, Homo sapiens
ggaaccatgtgacac

SEQ ID NO: 882175 - DNA, 15 bp, Homo sapiens
tggaaccatgtgaca

SEQ ID NO: 882176 - DNA, 15 bp, Homo sapiens
ttggaaccatgtgac

SEQ ID NO: 882177 - DNA, 15 bp, Homo sapiens
gttggaaccatgtga

SEQ ID NO: 882178 - DNA, 15 bp, Homo sapiens
agttggaaccatgtg

SEQ ID NO: 882179 - DNA, 15 bp, Homo sapiens
aagttggaaccatgt

SEQ ID NO: 882180 - DNA, 15 bp, Homo sapiens
aaagttggaaccatg

SEQ ID NO: 882181 - DNA, 15 bp, Homo sapiens
caaagttggaaccat

SEQ ID NO: 882182 - DNA, 15 bp, Homo sapiens
tcaaagttggaacca

SEQ ID NO: 882183 - DNA, 15 bp, Homo sapiens
atcaaagttggaacc

SEQ ID NO: 882184 - DNA, 15 bp, Homo sapiens
gatcaaagttggaac

SEQ ID NO: 882185 - DNA, 15 bp, Homo sapiens
agatcaaagttggaa

SEQ ID NO: 882186 - DNA, 15 bp, Homo sapiens
cagatcaaagttgga

SEQ ID NO: 882187 - DNA, 15 bp, Homo sapiens
ccagatcaaagttgg

SEQ ID NO: 882188 - DNA, 15 bp, Homo sapiens
tccagatcaaagttg

SEQ ID NO: 882189 - DNA, 15 bp, Homo sapiens
gtccagatcaaagtt

SEQ ID NO: 882190 - DNA, 15 bp, Homo sapiens
tgtccagatcaaagt

SEQ ID NO: 882191 - DNA, 15 bp, Homo sapiens
ctgtccagatcaaag

SEQ ID NO: 882192 - DNA, 15 bp, Homo sapiens
actgtccagatcaaa

SEQ ID NO: 882193 - DNA, 15 bp, Homo sapiens
aactgtccagatcaa

SEQ ID NO: 882194 - DNA, 15 bp, Homo sapiens
gaactgtccagatca

SEQ ID NO: 882195 - DNA, 15 bp, Homo sapiens
ggaactgtccagatc

SEQ ID NO: 882196 - DNA, 15 bp, Homo sapiens
tggaactgtccagat

SEQ ID NO: 882197 - DNA, 15 bp, Homo sapiens
ttggaactgtccaga

SEQ ID NO: 882198 - DNA, 15 bp, Homo sapiens
cttggaactgtccag

SEQ ID NO: 882199 - DNA, 15 bp, Homo sapiens
ccttggaactgtcca

SEQ ID NO: 882200 - DNA, 15 bp, Homo sapiens
gccttggaactgtcc

SEQ ID NO: 882201 - DNA, 15 bp, Homo sapiens
tgccttggaactgtc

SEQ ID NO: 882202 - DNA, 15 bp, Homo sapiens
ctgccttggaactgt

SEQ ID NO: 882203 - DNA, 15 bp, Homo sapiens
gctgccttggaactg

SEQ ID NO: 882204 - DNA, 15 bp, Homo sapiens
tgctgccttggaact

SEQ ID NO: 882205 - DNA, 15 bp, Homo sapiens
ttgctgccttggaac

SEQ ID NO: 882206 - DNA, 15 bp, Homo sapiens
cttgctgccttggaa

SEQ ID NO: 882207 - DNA, 15 bp, Homo sapiens
acttgctgccttgga

SEQ ID NO: 882208 - DNA, 15 bp, Homo sapiens
gacttgctgccttgg

SEQ ID NO: 882209 - DNA, 15 bp, Homo sapiens
tgacttgctgccttg

SEQ ID NO: 882210 - DNA, 15 bp, Homo sapiens
atgacttgctgcctt

SEQ ID NO: 882211 - DNA, 15 bp, Homo sapiens
catgacttgctgcct

SEQ ID NO: 882212 - DNA, 15 bp, Homo sapiens
acatgacttgctgcc

SEQ ID NO: 882213 - DNA, 15 bp, Homo sapiens
aacatgacttgctgc

SEQ ID NO: 882214 - DNA, 15 bp, Homo sapiens
caacatgacttgctg

SEQ ID NO: 882215 - DNA, 15 bp, Homo sapiens
tcaacatgacttgct

SEQ ID NO: 882216 - DNA, 15 bp, Homo sapiens
ttcaacatgacttgc

SEQ ID NO: 882217 - DNA, 15 bp, Homo sapiens
tttcaacatgacttg

SEQ ID NO: 882218 - DNA, 15 bp, Homo sapiens
ctttcaacatgactt

SEQ ID NO: 882219 - DNA, 15 bp, Homo sapiens
actttcaacatgact

SEQ ID NO: 882220 - DNA, 15 bp, Homo sapiens
aactttcaacatgac

SEQ ID NO: 882221 - DNA, 15 bp, Homo sapiens
aaactttcaacatga

SEQ ID NO: 882222 - DNA, 15 bp, Homo sapiens
gaaactttcaacatg

SEQ ID NO: 882223 - DNA, 15 bp, Homo sapiens
ggaaactttcaacat

SEQ ID NO: 882224 - DNA, 15 bp, Homo sapiens
aggaaactttcaaca

SEQ ID NO: 882225 - DNA, 15 bp, Homo sapiens
caggaaactttcaac

SEQ ID NO: 882226 - DNA, 15 bp, Homo sapiens
tcaggaaactttcaa

SEQ ID NO: 882227 - DNA, 15 bp, Homo sapiens
ctcaggaaactttca

SEQ ID NO: 882228 - DNA, 15 bp, Homo sapiens
tctcaggaaactttc

SEQ ID NO: 882229 - DNA, 15 bp, Homo sapiens
ttctcaggaaacttt

SEQ ID NO: 882230 - DNA, 15 bp, Homo sapiens
gttctcaggaaactt

SEQ ID NO: 882231 - DNA, 15 bp, Homo sapiens
tgttctcaggaaact

SEQ ID NO: 882232 - DNA, 15 bp, Homo sapiens
atgttctcaggaaac

SEQ ID NO: 882233 - DNA, 15 bp, Homo sapiens
aatgttctcaggaaa

SEQ ID NO: 882234 - DNA, 15 bp, Homo sapiens
gaatgttctcaggaa

SEQ ID NO: 882235 - DNA, 15 bp, Homo sapiens
ggaatgttctcagga

SEQ ID NO: 882236 - DNA, 15 bp, Homo sapiens
aggaatgttctcagg

SEQ ID NO: 882237 - DNA, 15 bp, Homo sapiens
aaggaatgttctcag

SEQ ID NO: 882238 - DNA, 15 bp, Homo sapiens
aaaggaatgttctca

SEQ ID NO: 882239 - DNA, 15 bp, Homo sapiens
aaaaggaatgttctc

SEQ ID NO: 882240 - DNA, 15 bp, Homo sapiens
aaaaaggaatgttct

SEQ ID NO: 882241 - DNA, 15 bp, Homo sapiens
caaaaaggaatgttc

SEQ ID NO: 882242 - DNA, 15 bp, Homo sapiens
tcaaaaaggaatgtt

SEQ ID NO: 882243 - DNA, 15 bp, Homo sapiens
atcaaaaaggaatgt

SEQ ID NO: 882244 - DNA, 15 bp, Homo sapiens
gatcaaaaaggaatg

SEQ ID NO: 882245 - DNA, 15 bp, Homo sapiens
tgatcaaaaaggaat

SEQ ID NO: 882246 - DNA, 15 bp, Homo sapiens
ctgatcaaaaaggaa

SEQ ID NO: 882247 - DNA, 15 bp, Homo sapiens
tctgatcaaaaagga

SEQ ID NO: 882248 - DNA, 15 bp, Homo sapiens
ctctgatcaaaaagg

SEQ ID NO: 882249 - DNA, 15 bp, Homo sapiens
cctctgatcaaaaag

SEQ ID NO: 882250 - DNA, 15 bp, Homo sapiens
gcctctgatcaaaaa

SEQ ID NO: 882251 - DNA, 15 bp, Homo sapiens
tgcctctgatcaaaa

SEQ ID NO: 882252 - DNA, 15 bp, Homo sapiens
ctgcctctgatcaaa

SEQ ID NO: 882253 - DNA, 15 bp, Homo sapiens
cctgcctctgatcaa

SEQ ID NO: 882254 - DNA, 15 bp, Homo sapiens
tcctgcctctgatca

SEQ ID NO: 882255 - DNA, 15 bp, Homo sapiens
gtcctgcctctgatc

SEQ ID NO: 882256 - DNA, 15 bp, Homo sapiens
agtcctgcctctgat

SEQ ID NO: 882257 - DNA, 15 bp, Homo sapiens
aagtcctgcctctga

SEQ ID NO: 882258 - DNA, 15 bp, Homo sapiens
caagtcctgcctctg

SEQ ID NO: 882259 - DNA, 15 bp, Homo sapiens
gcaagtcctgcctct

SEQ ID NO: 882260 - DNA, 15 bp, Homo sapiens
agcaagtcctgcctc

SEQ ID NO: 882261 - DNA, 15 bp, Homo sapiens
aagcaagtcctgcct

SEQ ID NO: 882262 - DNA, 15 bp, Homo sapiens
gaagcaagtcctgcc

SEQ ID NO: 882263 - DNA, 15 bp, Homo sapiens
ggaagcaagtcctgc

SEQ ID NO: 882264 - DNA, 15 bp, Homo sapiens
gggaagcaagtcctg

SEQ ID NO: 882265 - DNA, 15 bp, Homo sapiens
tgggaagcaagtcct

SEQ ID NO: 882266 - DNA, 15 bp, Homo sapiens
gtgggaagcaagtcc

SEQ ID NO: 882267 - DNA, 15 bp, Homo sapiens
agtgggaagcaagtc

SEQ ID NO: 882268 - DNA, 15 bp, Homo sapiens
tagtgggaagcaagt

SEQ ID NO: 882269 - DNA, 15 bp, Homo sapiens
gtagtgggaagcaag

SEQ ID NO: 882270 - DNA, 15 bp, Homo sapiens
tgtagtgggaagcaa

SEQ ID NO: 882271 - DNA, 15 bp, Homo sapiens
ctgtagtgggaagca

SEQ ID NO: 882272 - DNA, 15 bp, Homo sapiens
actgtagtgggaagc

SEQ ID NO: 882273 - DNA, 15 bp, Homo sapiens
tactgtagtgggaag

SEQ ID NO: 882274 - DNA, 15 bp, Homo sapiens
gtactgtagtgggaa

SEQ ID NO: 882275 - DNA, 15 bp, Homo sapiens
tgtactgtagtggga

SEQ ID NO: 882276 - DNA, 15 bp, Homo sapiens
ctgtactgtagtggg

SEQ ID NO: 882277 - DNA, 15 bp, Homo sapiens
cctgtactgtagtgg

SEQ ID NO: 882278 - DNA, 15 bp, Homo sapiens
tcctgtactgtagtg

SEQ ID NO: 882279 - DNA, 15 bp, Homo sapiens
atcctgtactgtagt

SEQ ID NO: 882280 - DNA, 15 bp, Homo sapiens
catcctgtactgtag

SEQ ID NO: 882281 - DNA, 15 bp, Homo sapiens
ccatcctgtactgta

SEQ ID NO: 882282 - DNA, 15 bp, Homo sapiens
tccatcctgtactgt

SEQ ID NO: 882283 - DNA, 15 bp, Homo sapiens
ctccatcctgtactg

SEQ ID NO: 882284 - DNA, 15 bp, Homo sapiens
actccatcctgtact

SEQ ID NO: 882285 - DNA, 15 bp, Homo sapiens
cactccatcctgtac

SEQ ID NO: 882286 - DNA, 15 bp, Homo sapiens
ccactccatcctgta

SEQ ID NO: 882287 - DNA, 15 bp, Homo sapiens
cccactccatcctgt

SEQ ID NO: 882288 - DNA, 15 bp, Homo sapiens
ccccactccatcctg

SEQ ID NO: 882289 - DNA, 15 bp, Homo sapiens
gccccactccatcct

SEQ ID NO: 882290 - DNA, 15 bp, Homo sapiens
agccccactccatcc

SEQ ID NO: 882291 - DNA, 15 bp, Homo sapiens
cagccccactccatc

SEQ ID NO: 882292 - DNA, 15 bp, Homo sapiens
ccagccccactccat

SEQ ID NO: 882293 - DNA, 15 bp, Homo sapiens
tccagccccactcca

SEQ ID NO: 882294 - DNA, 15 bp, Homo sapiens
ctccagccccactcc

SEQ ID NO: 882295 - DNA, 15 bp, Homo sapiens
gctccagccccactc

SEQ ID NO: 882296 - DNA, 15 bp, Homo sapiens
tgctccagccccact

SEQ ID NO: 882297 - DNA, 15 bp, Homo sapiens
gtgctccagccccac

SEQ ID NO: 882298 - DNA, 15 bp, Homo sapiens
tgtgctccagcccca

SEQ ID NO: 882299 - DNA, 15 bp, Homo sapiens
ctgtgctccagcccc

SEQ ID NO: 882300 - DNA, 15 bp, Homo sapiens
cctgtgctccagccc

SEQ ID NO: 882301 - DNA, 15 bp, Homo sapiens
ccctgtgctccagcc

SEQ ID NO: 882302 - DNA, 15 bp, Homo sapiens
tccctgtgctccagc

SEQ ID NO: 882303 - DNA, 15 bp, Homo sapiens
ttccctgtgctccag

SEQ ID NO: 882304 - DNA, 15 bp, Homo sapiens
attccctgtgctcca

SEQ ID NO: 882305 - DNA, 15 bp, Homo sapiens
cattccctgtgctcc

SEQ ID NO: 882306 - DNA, 15 bp, Homo sapiens
acattccctgtgctc

SEQ ID NO: 882307 - DNA, 15 bp, Homo sapiens
cacattccctgtgct

SEQ ID NO: 882308 - DNA, 15 bp, Homo sapiens
ccacattccctgtgc

SEQ ID NO: 882309 - DNA, 15 bp, Homo sapiens
cccacattccctgtg

SEQ ID NO: 882310 - DNA, 15 bp, Homo sapiens
ccccacattccctgt

SEQ ID NO: 882311 - DNA, 15 bp, Homo sapiens
gccccacattccctg

SEQ ID NO: 882312 - DNA, 15 bp, Homo sapiens
ggccccacattccct

SEQ ID NO: 882313 - DNA, 15 bp, Homo sapiens
gggccccacattccc

SEQ ID NO: 882314 - DNA, 15 bp, Homo sapiens
ggggccccacattcc

SEQ ID NO: 882315 - DNA, 15 bp, Homo sapiens
gggggccccacattc

SEQ ID NO: 882316 - DNA, 15 bp, Homo sapiens
ggggggccccacatt

SEQ ID NO: 882317 - DNA, 15 bp, Homo sapiens
aggggggccccacat

SEQ ID NO: 882318 - DNA, 15 bp, Homo sapiens
aaggggggccccaca

SEQ ID NO: 882319 - DNA, 15 bp, Homo sapiens
caaggggggccccac

SEQ ID NO: 882320 - DNA, 15 bp, Homo sapiens
acaaggggggcccca

SEQ ID NO: 882321 - DNA, 15 bp, Homo sapiens
aacaaggggggcccc

SEQ ID NO: 882322 - DNA, 15 bp, Homo sapiens
caacaaggggggccc

SEQ ID NO: 882323 - DNA, 15 bp, Homo sapiens
acaacaaggggggcc

SEQ ID NO: 882324 - DNA, 15 bp, Homo sapiens
tacaacaaggggggc

SEQ ID NO: 882325 - DNA, 15 bp, Homo sapiens
ctacaacaagggggg

SEQ ID NO: 882326 - DNA, 15 bp, Homo sapiens
cctacaacaaggggg

SEQ ID NO: 882327 - DNA, 15 bp, Homo sapiens
gcctacaacaagggg

SEQ ID NO: 882328 - DNA, 15 bp, Homo sapiens
tgcctacaacaaggg

SEQ ID NO: 882329 - DNA, 15 bp, Homo sapiens
ttgcctacaacaagg

SEQ ID NO: 882330 - DNA, 15 bp, Homo sapiens
tttgcctacaacaag

SEQ ID NO: 882331 - DNA, 15 bp, Homo sapiens
gtttgcctacaacaa

SEQ ID NO: 882332 - DNA, 15 bp, Homo sapiens
agtttgcctacaaca

SEQ ID NO: 882333 - DNA, 15 bp, Homo sapiens
gagtttgcctacaac

SEQ ID NO: 882334 - DNA, 15 bp, Homo sapiens
agagtttgcctacaa

SEQ ID NO: 882335 - DNA, 15 bp, Homo sapiens
tagagtttgcctaca

SEQ ID NO: 882336 - DNA, 15 bp, Homo sapiens
ctagagtttgcctac

SEQ ID NO: 882337 - DNA, 15 bp, Homo sapiens
cctagagtttgccta

SEQ ID NO: 882338 - DNA, 15 bp, Homo sapiens
gcctagagtttgcct

SEQ ID NO: 882339 - DNA, 15 bp, Homo sapiens
agcctagagtttgcc

SEQ ID NO: 882340 - DNA, 15 bp, Homo sapiens
gagcctagagtttgc

SEQ ID NO: 882341 - DNA, 15 bp, Homo sapiens
tgagcctagagtttg

SEQ ID NO: 882342 - DNA, 15 bp, Homo sapiens
gtgagcctagagttt

SEQ ID NO: 882343 - DNA, 15 bp, Homo sapiens
tgtgagcctagagtt

SEQ ID NO: 882344 - DNA, 15 bp, Homo sapiens
ttgtgagcctagagt

SEQ ID NO: 882345 - DNA, 15 bp, Homo sapiens
tttgtgagcctagag

SEQ ID NO: 882346 - DNA, 15 bp, Homo sapiens
ctttgtgagcctaga

SEQ ID NO: 882347 - DNA, 15 bp, Homo sapiens
tctttgtgagcctag

SEQ ID NO: 882348 - DNA, 15 bp, Homo sapiens
ttctttgtgagccta

SEQ ID NO: 882349 - DNA, 15 bp, Homo sapiens
attctttgtgagcct

SEQ ID NO: 882350 - DNA, 15 bp, Homo sapiens
cattctttgtgagcc

SEQ ID NO: 882351 - DNA, 15 bp, Homo sapiens
ccattctttgtgagc

SEQ ID NO: 882352 - DNA, 15 bp, Homo sapiens
accattctttgtgag

SEQ ID NO: 882353 - DNA, 15 bp, Homo sapiens
caccattctttgtga

SEQ ID NO: 882354 - DNA, 15 bp, Homo sapiens
tcaccattctttgtg

SEQ ID NO: 882355 - DNA, 15 bp, Homo sapiens
gtcaccattctttgt

SEQ ID NO: 882356 - DNA, 15 bp, Homo sapiens
agtcaccattctttg

SEQ ID NO: 882357 - DNA, 15 bp, Homo sapiens
tagtcaccattcttt

SEQ ID NO: 882358 - DNA, 15 bp, Homo sapiens
ttagtcaccattctt

SEQ ID NO: 882359 - DNA, 15 bp, Homo sapiens
cttagtcaccattct

SEQ ID NO: 882360 - DNA, 15 bp, Homo sapiens
tcttagtcaccattc

SEQ ID NO: 882361 - DNA, 15 bp, Homo sapiens
ctcttagtcaccatt

SEQ ID NO: 882362 - DNA, 15 bp, Homo sapiens
tctcttagtcaccat

SEQ ID NO: 882363 - DNA, 15 bp, Homo sapiens
ttctcttagtcacca

SEQ ID NO: 882364 - DNA, 15 bp, Homo sapiens
gttctcttagtcacc

SEQ ID NO: 882365 - DNA, 15 bp, Homo sapiens
tgttctcttagtcac

SEQ ID NO: 882366 - DNA, 15 bp, Homo sapiens
ttgttctcttagtca

SEQ ID NO: 882367 - DNA, 15 bp, Homo sapiens
cttgttctcttagtc

SEQ ID NO: 882368 - DNA, 15 bp, Homo sapiens
ccttgttctcttagt

SEQ ID NO: 882369 - DNA, 15 bp, Homo sapiens
gccttgttctcttag

SEQ ID NO: 882370 - DNA, 15 bp, Homo sapiens
cgccttgttctctta

SEQ ID NO: 882371 - DNA, 15 bp, Homo sapiens
gcgccttgttctctt

SEQ ID NO: 882372 - DNA, 15 bp, Homo sapiens
ggcgccttgttctct

SEQ ID NO: 882373 - DNA, 15 bp, Homo sapiens
tggcgccttgttctc

SEQ ID NO: 882374 - DNA, 15 bp, Homo sapiens
atggcgccttgttct

SEQ ID NO: 882375 - DNA, 15 bp, Homo sapiens
aatggcgccttgttc

SEQ ID NO: 882376 - DNA, 15 bp, Homo sapiens
aaatggcgccttgtt

SEQ ID NO: 882377 - DNA, 15 bp, Homo sapiens
aaaatggcgccttgt

SEQ ID NO: 882378 - DNA, 15 bp, Homo sapiens
caaaatggcgccttg

SEQ ID NO: 882379 - DNA, 15 bp, Homo sapiens
ccaaaatggcgcctt

SEQ ID NO: 882380 - DNA, 15 bp, Homo sapiens
accaaaatggcgcct

SEQ ID NO: 882381 - DNA, 15 bp, Homo sapiens
gaccaaaatggcgcc

SEQ ID NO: 882382 - DNA, 15 bp, Homo sapiens
agaccaaaatggcgc

SEQ ID NO: 882383 - DNA, 15 bp, Homo sapiens
aagaccaaaatggcg

SEQ ID NO: 882384 - DNA, 15 bp, Homo sapiens
caagaccaaaatggc

SEQ ID NO: 882385 - DNA, 15 bp, Homo sapiens
ccaagaccaaaatgg

SEQ ID NO: 882386 - DNA, 15 bp, Homo sapiens
tccaagaccaaaatg

SEQ ID NO: 882387 - DNA, 15 bp, Homo sapiens
atccaagaccaaaat

SEQ ID NO: 882388 - DNA, 15 bp, Homo sapiens
aatccaagaccaaaa

SEQ ID NO: 882389 - DNA, 15 bp, Homo sapiens
aaatccaagaccaaa

SEQ ID NO: 882390 - DNA, 15 bp, Homo sapiens
taaatccaagaccaa

SEQ ID NO: 882391 - DNA, 15 bp, Homo sapiens
ataaatccaagacca

SEQ ID NO: 882392 - DNA, 15 bp, Homo sapiens
gataaatccaagacc

SEQ ID NO: 882393 - DNA, 15 bp, Homo sapiens
tgataaatccaagac

SEQ ID NO: 882394 - DNA, 15 bp, Homo sapiens
ctgataaatccaaga

SEQ ID NO: 882395 - DNA, 15 bp, Homo sapiens
actgataaatccaag

SEQ ID NO: 882396 - DNA, 15 bp, Homo sapiens
cactgataaatccaa

SEQ ID NO: 882397 - DNA, 15 bp, Homo sapiens
ccactgataaatcca

SEQ ID NO: 882398 - DNA, 15 bp, Homo sapiens
accactgataaatcc

SEQ ID NO: 882399 - DNA, 15 bp, Homo sapiens
aaccactgataaatc

SEQ ID NO: 882400 - DNA, 15 bp, Homo sapiens
aaaccactgataaat

SEQ ID NO: 882401 - DNA, 15 bp, Homo sapiens
gaaaccactgataaa

SEQ ID NO: 882402 - DNA, 15 bp, Homo sapiens
agaaaccactgataa

SEQ ID NO: 882403 - DNA, 15 bp, Homo sapiens
tagaaaccactgata

SEQ ID NO: 882404 - DNA, 15 bp, Homo sapiens
ctagaaaccactgat

SEQ ID NO: 882405 - DNA, 15 bp, Homo sapiens
actagaaaccactga

SEQ ID NO: 882406 - DNA, 15 bp, Homo sapiens
aactagaaaccactg

SEQ ID NO: 882407 - DNA, 15 bp, Homo sapiens
caactagaaaccact

SEQ ID NO: 882408 - DNA, 15 bp, Homo sapiens
tcaactagaaaccac

SEQ ID NO: 882409 - DNA, 15 bp, Homo sapiens
ttcaactagaaacca

SEQ ID NO: 882410 - DNA, 15 bp, Homo sapiens
attcaactagaaacc

SEQ ID NO: 882411 - DNA, 15 bp, Homo sapiens
aattcaactagaaac

SEQ ID NO: 882412 - DNA, 15 bp, Homo sapiens
caattcaactagaaa

SEQ ID NO: 882413 - DNA, 15 bp, Homo sapiens
tcaattcaactagaa

SEQ ID NO: 882414 - DNA, 15 bp, Homo sapiens
ctcaattcaactaga

SEQ ID NO: 882415 - DNA, 15 bp, Homo sapiens
tctcaattcaactag

SEQ ID NO: 882416 - DNA, 15 bp, Homo sapiens
ctctcaattcaacta

SEQ ID NO: 882417 - DNA, 15 bp, Homo sapiens
tctctcaattcaact

SEQ ID NO: 882418 - DNA, 15 bp, Homo sapiens
ctctctcaattcaac

SEQ ID NO: 882419 - DNA, 15 bp, Homo sapiens
gctctctcaattcaa

SEQ ID NO: 882420 - DNA, 15 bp, Homo sapiens
tgctctctcaattca

SEQ ID NO: 882421 - DNA, 15 bp, Homo sapiens
ctgctctctcaattc

SEQ ID NO: 882422 - DNA, 15 bp, Homo sapiens
tctgctctctcaatt

SEQ ID NO: 882423 - DNA, 15 bp, Homo sapiens
atctgctctctcaat

SEQ ID NO: 882424 - DNA, 15 bp, Homo sapiens
gatctgctctctcaa

SEQ ID NO: 882425 - DNA, 15 bp, Homo sapiens
ggatctgctctctca

SEQ ID NO: 882426 - DNA, 15 bp, Homo sapiens
tggatctgctctctc

SEQ ID NO: 882427 - DNA, 15 bp, Homo sapiens
ctggatctgctctct

SEQ ID NO: 882428 - DNA, 15 bp, Homo sapiens
cctggatctgctctc

SEQ ID NO: 882429 - DNA, 15 bp, Homo sapiens
gcctggatctgctct

SEQ ID NO: 882430 - DNA, 15 bp, Homo sapiens
agcctggatctgctc

SEQ ID NO: 882431 - DNA, 15 bp, Homo sapiens
tagcctggatctgct

SEQ ID NO: 882432 - DNA, 15 bp, Homo sapiens
ttagcctggatctgc

SEQ ID NO: 882433 - DNA, 15 bp, Homo sapiens
cttagcctggatctg

SEQ ID NO: 882434 - DNA, 15 bp, Homo sapiens
tcttagcctggatct

SEQ ID NO: 882435 - DNA, 15 bp, Homo sapiens
ttcttagcctggatc

SEQ ID NO: 882436 - DNA, 15 bp, Homo sapiens
attcttagcctggat

SEQ ID NO: 882437 - DNA, 15 bp, Homo sapiens
aattcttagcctgga

SEQ ID NO: 882438 - DNA, 15 bp, Homo sapiens
aaattcttagcctgg

SEQ ID NO: 882439 - DNA, 15 bp, Homo sapiens
caaattcttagcctg

SEQ ID NO: 882440 - DNA, 15 bp, Homo sapiens
tcaaattcttagcct

SEQ ID NO: 882441 - DNA, 15 bp, Homo sapiens
ttcaaattcttagcc

SEQ ID NO: 882442 - DNA, 15 bp, Homo sapiens
attcaaattcttagc

SEQ ID NO: 882443 - DNA, 15 bp, Homo sapiens
aattcaaattcttag

SEQ ID NO: 882444 - DNA, 15 bp, Homo sapiens
aaattcaaattctta

SEQ ID NO: 882445 - DNA, 15 bp, Homo sapiens
caaattcaaattctt

SEQ ID NO: 882446 - DNA, 15 bp, Homo sapiens
ccaaattcaaattct

SEQ ID NO: 882447 - DNA, 15 bp, Homo sapiens
accaaattcaaattc

SEQ ID NO: 882448 - DNA, 15 bp, Homo sapiens
aaccaaattcaaatt

SEQ ID NO: 882449 - DNA, 15 bp, Homo sapiens
gaaccaaattcaaat

SEQ ID NO: 882450 - DNA, 15 bp, Homo sapiens
tgaaccaaattcaaa

SEQ ID NO: 882451 - DNA, 15 bp, Homo sapiens
gtgaaccaaattcaa

SEQ ID NO: 882452 - DNA, 15 bp, Homo sapiens
agtgaaccaaattca

SEQ ID NO: 882453 - DNA, 15 bp, Homo sapiens
gagtgaaccaaattc

SEQ ID NO: 882454 - DNA, 15 bp, Homo sapiens
agagtgaaccaaatt

SEQ ID NO: 882455 - DNA, 15 bp, Homo sapiens
tagagtgaaccaaat

SEQ ID NO: 882456 - DNA, 15 bp, Homo sapiens
ttagagtgaaccaaa

SEQ ID NO: 882457 - DNA, 15 bp, Homo sapiens
tttagagtgaaccaa

SEQ ID NO: 882458 - DNA, 15 bp, Homo sapiens
atttagagtgaacca

SEQ ID NO: 882459 - DNA, 15 bp, Homo sapiens
gatttagagtgaacc

SEQ ID NO: 882460 - DNA, 15 bp, Homo sapiens
tgatttagagtgaac

SEQ ID NO: 882461 - DNA, 15 bp, Homo sapiens
ctgatttagagtgaa

SEQ ID NO: 882462 - DNA, 15 bp, Homo sapiens
tctgatttagagtga

SEQ ID NO: 882463 - DNA, 15 bp, Homo sapiens
ttctgatttagagtg

SEQ ID NO: 882464 - DNA, 15 bp, Homo sapiens
tttctgatttagagt

SEQ ID NO: 882465 - DNA, 15 bp, Homo sapiens
ctttctgatttagag

SEQ ID NO: 882466 - DNA, 15 bp, Homo sapiens
actttctgatttaga

SEQ ID NO: 882467 - DNA, 15 bp, Homo sapiens
tactttctgatttag

SEQ ID NO: 882468 - DNA, 15 bp, Homo sapiens
atactttctgattta

SEQ ID NO: 882469 - DNA, 15 bp, Homo sapiens
aatactttctgattt

SEQ ID NO: 882470 - DNA, 15 bp, Homo sapiens
aaatactttctgatt

SEQ ID NO: 882471 - DNA, 15 bp, Homo sapiens
aaaatactttctgat

SEQ ID NO: 882472 - DNA, 15 bp, Homo sapiens
taaaatactttctga

SEQ ID NO: 882473 - DNA, 15 bp, Homo sapiens
ataaaatactttctg

SEQ ID NO: 882474 - DNA, 15 bp, Homo sapiens
tataaaatactttct

SEQ ID NO: 882475 - DNA, 15 bp, Homo sapiens
ttataaaatactttc

SEQ ID NO: 882476 - DNA, 15 bp, Homo sapiens
cttataaaatacttt

SEQ ID NO: 882477 - DNA, 15 bp, Homo sapiens
gcttataaaatactt

SEQ ID NO: 882478 - DNA, 15 bp, Homo sapiens
ggcttataaaatact

SEQ ID NO: 882479 - DNA, 15 bp, Homo sapiens
aggcttataaaatac

SEQ ID NO: 882480 - DNA, 15 bp, Homo sapiens
taggcttataaaata

SEQ ID NO: 882481 - DNA, 15 bp, Homo sapiens
ttaggcttataaaat

SEQ ID NO: 882482 - DNA, 15 bp, Homo sapiens
attaggcttataaaa

SEQ ID NO: 882483 - DNA, 15 bp, Homo sapiens
gattaggcttataaa

SEQ ID NO: 882484 - DNA, 15 bp, Homo sapiens
agattaggcttataa

SEQ ID NO: 882485 - DNA, 15 bp, Homo sapiens
cagattaggcttata

SEQ ID NO: 882486 - DNA, 15 bp, Homo sapiens
tcagattaggcttat

SEQ ID NO: 882487 - DNA, 15 bp, Homo sapiens
ttcagattaggctta

SEQ ID NO: 882488 - DNA, 15 bp, Homo sapiens
gttcagattaggctt

SEQ ID NO: 882489 - DNA, 15 bp, Homo sapiens
ggttcagattaggct

SEQ ID NO: 882490 - DNA, 15 bp, Homo sapiens
tggttcagattaggc

SEQ ID NO: 882491 - DNA, 15 bp, Homo sapiens
ctggttcagattagg

SEQ ID NO: 882492 - DNA, 15 bp, Homo sapiens
cctggttcagattag

SEQ ID NO: 882493 - DNA, 15 bp, Homo sapiens
gcctggttcagatta

SEQ ID NO: 882494 - DNA, 15 bp, Homo sapiens
agcctggttcagatt

SEQ ID NO: 882495 - DNA, 15 bp, Homo sapiens
gagcctggttcagat

SEQ ID NO: 882496 - DNA, 15 bp, Homo sapiens
agagcctggttcaga

SEQ ID NO: 882497 - DNA, 15 bp, Homo sapiens
cagagcctggttcag

SEQ ID NO: 882498 - DNA, 15 bp, Homo sapiens
ccagagcctggttca

SEQ ID NO: 882499 - DNA, 15 bp, Homo sapiens
tccagagcctggttc

SEQ ID NO: 882500 - DNA, 15 bp, Homo sapiens
gtccagagcctggtt

SEQ ID NO: 882501 - DNA, 15 bp, Homo sapiens
agtccagagcctggt

SEQ ID NO: 882502 - DNA, 15 bp, Homo sapiens
aagtccagagcctgg

SEQ ID NO: 882503 - DNA, 15 bp, Homo sapiens
caagtccagagcctg

SEQ ID NO: 882504 - DNA, 15 bp, Homo sapiens
ccaagtccagagcct

SEQ ID NO: 882505 - DNA, 15 bp, Homo sapiens
gccaagtccagagcc

SEQ ID NO: 882506 - DNA, 15 bp, Homo sapiens
ggccaagtccagagc

SEQ ID NO: 882507 - DNA, 15 bp, Homo sapiens
gggccaagtccagag

SEQ ID NO: 882508 - DNA, 15 bp, Homo sapiens
tgggccaagtccaga

SEQ ID NO: 882509 - DNA, 15 bp, Homo sapiens
ctgggccaagtccag

SEQ ID NO: 882510 - DNA, 15 bp, Homo sapiens
cctgggccaagtcca

SEQ ID NO: 882511 - DNA, 15 bp, Homo sapiens
ccctgggccaagtcc

SEQ ID NO: 882512 - DNA, 15 bp, Homo sapiens
tccctgggccaagtc

SEQ ID NO: 882513 - DNA, 15 bp, Homo sapiens
ctccctgggccaagt

SEQ ID NO: 882514 - DNA, 15 bp, Homo sapiens
actccctgggccaag

SEQ ID NO: 882515 - DNA, 15 bp, Homo sapiens
cactccctgggccaa

SEQ ID NO: 882516 - DNA, 15 bp, Homo sapiens
tcactccctgggcca

SEQ ID NO: 882517 - DNA, 15 bp, Homo sapiens
atcactccctgggcc

SEQ ID NO: 882518 - DNA, 15 bp, Homo sapiens
tatcactccctgggc

SEQ ID NO: 882519 - DNA, 15 bp, Homo sapiens
atatcactccctggg

SEQ ID NO: 882520 - DNA, 15 bp, Homo sapiens
tatatcactccctgg

SEQ ID NO: 882521 - DNA, 15 bp, Homo sapiens
ctatatcactccctg

SEQ ID NO: 882522 - DNA, 15 bp, Homo sapiens
tctatatcactccct

SEQ ID NO: 882523 - DNA, 15 bp, Homo sapiens
ctctatatcactccc

SEQ ID NO: 882524 - DNA, 15 bp, Homo sapiens
tctctatatcactcc

SEQ ID NO: 882525 - DNA, 15 bp, Homo sapiens
atctctatatcactc

SEQ ID NO: 882526 - DNA, 15 bp, Homo sapiens
catctctatatcact

SEQ ID NO: 882527 - DNA, 15 bp, Homo sapiens
gcatctctatatcac

SEQ ID NO: 882528 - DNA, 15 bp, Homo sapiens
tgcatctctatatca

SEQ ID NO: 882529 - DNA, 15 bp, Homo sapiens
ctgcatctctatatc

SEQ ID NO: 882530 - DNA, 15 bp, Homo sapiens
tctgcatctctatat

SEQ ID NO: 882531 - DNA, 15 bp, Homo sapiens
gtctgcatctctata

SEQ ID NO: 882532 - DNA, 15 bp, Homo sapiens
ggtctgcatctctat

SEQ ID NO: 882533 - DNA, 15 bp, Homo sapiens
tggtctgcatctcta

SEQ ID NO: 882534 - DNA, 15 bp, Homo sapiens
atggtctgcatctct

SEQ ID NO: 882535 - DNA, 15 bp, Homo sapiens
catggtctgcatctc

SEQ ID NO: 882536 - DNA, 15 bp, Homo sapiens
acatggtctgcatct

SEQ ID NO: 882537 - DNA, 15 bp, Homo sapiens
tacatggtctgcatc

SEQ ID NO: 882538 - DNA, 15 bp, Homo sapiens
ctacatggtctgcat

SEQ ID NO: 882539 - DNA, 15 bp, Homo sapiens
gctacatggtctgca

SEQ ID NO: 882540 - DNA, 15 bp, Homo sapiens
agctacatggtctgc

SEQ ID NO: 882541 - DNA, 15 bp, Homo sapiens
aagctacatggtctg

SEQ ID NO: 882542 - DNA, 15 bp, Homo sapiens
gaagctacatggtct

SEQ ID NO: 882543 - DNA, 15 bp, Homo sapiens
agaagctacatggtc

SEQ ID NO: 882544 - DNA, 15 bp, Homo sapiens
aagaagctacatggt

SEQ ID NO: 882545 - DNA, 15 bp, Homo sapiens
caagaagctacatgg

SEQ ID NO: 882546 - DNA, 15 bp, Homo sapiens
gcaagaagctacatg

SEQ ID NO: 882547 - DNA, 15 bp, Homo sapiens
agcaagaagctacat

SEQ ID NO: 882548 - DNA, 15 bp, Homo sapiens
aagcaagaagctaca

SEQ ID NO: 882549 - DNA, 15 bp, Homo sapiens
gaagcaagaagctac

SEQ ID NO: 882550 - DNA, 15 bp, Homo sapiens
tgaagcaagaagcta

SEQ ID NO: 882551 - DNA, 15 bp, Homo sapiens
ttgaagcaagaagct

SEQ ID NO: 882552 - DNA, 15 bp, Homo sapiens
tttgaagcaagaagc

SEQ ID NO: 882553 - DNA, 15 bp, Homo sapiens
ctttgaagcaagaag

SEQ ID NO: 882554 - DNA, 15 bp, Homo sapiens
actttgaagcaagaa

SEQ ID NO: 882555 - DNA, 15 bp, Homo sapiens
cactttgaagcaaga

SEQ ID NO: 882556 - DNA, 15 bp, Homo sapiens
ccactttgaagcaag

SEQ ID NO: 882557 - DNA, 15 bp, Homo sapiens
cccactttgaagcaa

SEQ ID NO: 882558 - DNA, 15 bp, Homo sapiens
acccactttgaagca

SEQ ID NO: 882559 - DNA, 15 bp, Homo sapiens
gacccactttgaagc

SEQ ID NO: 882560 - DNA, 15 bp, Homo sapiens
agacccactttgaag

SEQ ID NO: 882561 - DNA, 15 bp, Homo sapiens
tagacccactttgaa

SEQ ID NO: 882562 - DNA, 15 bp, Homo sapiens
ttagacccactttga

SEQ ID NO: 882563 - DNA, 15 bp, Homo sapiens
attagacccactttg

SEQ ID NO: 882564 - DNA, 15 bp, Homo sapiens
gattagacccacttt

SEQ ID NO: 882565 - DNA, 15 bp, Homo sapiens
tgattagacccactt

SEQ ID NO: 882566 - DNA, 15 bp, Homo sapiens
atgattagacccact

SEQ ID NO: 882567 - DNA, 15 bp, Homo sapiens
tatgattagacccac

SEQ ID NO: 882568 - DNA, 15 bp, Homo sapiens
ctatgattagaccca

SEQ ID NO: 882569 - DNA, 15 bp, Homo sapiens
actatgattagaccc

SEQ ID NO: 882570 - DNA, 15 bp, Homo sapiens
gactatgattagacc

SEQ ID NO: 882571 - DNA, 15 bp, Homo sapiens
agactatgattagac

SEQ ID NO: 882572 - DNA, 15 bp, Homo sapiens
aagactatgattaga

SEQ ID NO: 882573 - DNA, 15 bp, Homo sapiens
gaagactatgattag

SEQ ID NO: 882574 - DNA, 15 bp, Homo sapiens
tgaagactatgatta

SEQ ID NO: 882575 - DNA, 15 bp, Homo sapiens
atgaagactatgatt

SEQ ID NO: 882576 - DNA, 15 bp, Homo sapiens
gatgaagactatgat

SEQ ID NO: 882577 - DNA, 15 bp, Homo sapiens
agatgaagactatga

SEQ ID NO: 882578 - DNA, 15 bp, Homo sapiens
gagatgaagactatg

SEQ ID NO: 882579 - DNA, 15 bp, Homo sapiens
agagatgaagactat

SEQ ID NO: 882580 - DNA, 15 bp, Homo sapiens
cagagatgaagacta

SEQ ID NO: 882581 - DNA, 15 bp, Homo sapiens
acagagatgaagact

SEQ ID NO: 882582 - DNA, 15 bp, Homo sapiens
gacagagatgaagac

SEQ ID NO: 882583 - DNA, 15 bp, Homo sapiens
agacagagatgaaga

SEQ ID NO: 882584 - DNA, 15 bp, Homo sapiens
tagacagagatgaag

SEQ ID NO: 882585 - DNA, 15 bp, Homo sapiens
gtagacagagatgaa

SEQ ID NO: 882586 - DNA, 15 bp, Homo sapiens
tgtagacagagatga

SEQ ID NO: 882587 - DNA, 15 bp, Homo sapiens
ttgtagacagagatg

SEQ ID NO: 882588 - DNA, 15 bp, Homo sapiens
cttgtagacagagat

SEQ ID NO: 882589 - DNA, 15 bp, Homo sapiens
gcttgtagacagaga

SEQ ID NO: 882590 - DNA, 15 bp, Homo sapiens
tgcttgtagacagag

SEQ ID NO: 882591 - DNA, 15 bp, Homo sapiens
gtgcttgtagacaga

SEQ ID NO: 882592 - DNA, 15 bp, Homo sapiens
agtgcttgtagacag

SEQ ID NO: 882593 - DNA, 15 bp, Homo sapiens
gagtgcttgtagaca

SEQ ID NO: 882594 - DNA, 15 bp, Homo sapiens
ggagtgcttgtagac

SEQ ID NO: 882595 - DNA, 15 bp, Homo sapiens
aggagtgcttgtaga

SEQ ID NO: 882596 - DNA, 15 bp, Homo sapiens
gaggagtgcttgtag

SEQ ID NO: 882597 - DNA, 15 bp, Homo sapiens
agaggagtgcttgta

SEQ ID NO: 882598 - DNA, 15 bp, Homo sapiens
cagaggagtgcttgt

SEQ ID NO: 882599 - DNA, 15 bp, Homo sapiens
ccagaggagtgcttg

SEQ ID NO: 882600 - DNA, 15 bp, Homo sapiens
accagaggagtgctt

SEQ ID NO: 882601 - DNA, 15 bp, Homo sapiens
caccagaggagtgct

SEQ ID NO: 882602 - DNA, 15 bp, Homo sapiens
tcaccagaggagtgc

SEQ ID NO: 882603 - DNA, 15 bp, Homo sapiens
atcaccagaggagtg

SEQ ID NO: 882604 - DNA, 15 bp, Homo sapiens
gatcaccagaggagt

SEQ ID NO: 882605 - DNA, 15 bp, Homo sapiens
agatcaccagaggag

SEQ ID NO: 882606 - DNA, 15 bp, Homo sapiens
gagatcaccagagga

SEQ ID NO: 882607 - DNA, 15 bp, Homo sapiens
tgagatcaccagagg

SEQ ID NO: 882608 - DNA, 15 bp, Homo sapiens
gtgagatcaccagag

SEQ ID NO: 882609 - DNA, 15 bp, Homo sapiens
agtgagatcaccaga

SEQ ID NO: 882610 - DNA, 15 bp, Homo sapiens
gagtgagatcaccag

SEQ ID NO: 882611 - DNA, 15 bp, Homo sapiens
tgagtgagatcacca

SEQ ID NO: 882612 - DNA, 15 bp, Homo sapiens
ttgagtgagatcacc

SEQ ID NO: 882613 - DNA, 15 bp, Homo sapiens
attgagtgagatcac

SEQ ID NO: 882614 - DNA, 15 bp, Homo sapiens
aattgagtgagatca

SEQ ID NO: 882615 - DNA, 15 bp, Homo sapiens
aaattgagtgagatc

SEQ ID NO: 882616 - DNA, 15 bp, Homo sapiens
gaaattgagtgagat

SEQ ID NO: 882617 - DNA, 15 bp, Homo sapiens
tgaaattgagtgaga

SEQ ID NO: 882618 - DNA, 15 bp, Homo sapiens
atgaaattgagtgag

SEQ ID NO: 882619 - DNA, 15 bp, Homo sapiens
catgaaattgagtga

SEQ ID NO: 882620 - DNA, 15 bp, Homo sapiens
ccatgaaattgagtg

SEQ ID NO: 882621 - DNA, 15 bp, Homo sapiens
gccatgaaattgagt

SEQ ID NO: 882622 - DNA, 15 bp, Homo sapiens
agccatgaaattgag

SEQ ID NO: 882623 - DNA, 15 bp, Homo sapiens
aagccatgaaattga

SEQ ID NO: 882624 - DNA, 15 bp, Homo sapiens
aaagccatgaaattg

SEQ ID NO: 882625 - DNA, 15 bp, Homo sapiens
taaagccatgaaatt

SEQ ID NO: 882626 - DNA, 15 bp, Homo sapiens
ttaaagccatgaaat

SEQ ID NO: 882627 - DNA, 15 bp, Homo sapiens
tttaaagccatgaaa

SEQ ID NO: 882628 - DNA, 15 bp, Homo sapiens
atttaaagccatgaa

SEQ ID NO: 882629 - DNA, 15 bp, Homo sapiens
tatttaaagccatga

SEQ ID NO: 882630 - DNA, 15 bp, Homo sapiens
gtatttaaagccatg

SEQ ID NO: 882631 - DNA, 15 bp, Homo sapiens
ggtatttaaagccat

SEQ ID NO: 882632 - DNA, 15 bp, Homo sapiens
tggtatttaaagcca

SEQ ID NO: 882633 - DNA, 15 bp, Homo sapiens
atggtatttaaagcc

SEQ ID NO: 882634 - DNA, 15 bp, Homo sapiens
gatggtatttaaagc

SEQ ID NO: 882635 - DNA, 15 bp, Homo sapiens
agatggtatttaaag

SEQ ID NO: 882636 - DNA, 15 bp, Homo sapiens
gagatggtatttaaa

SEQ ID NO: 882637 - DNA, 15 bp, Homo sapiens
agagatggtatttaa

SEQ ID NO: 882638 - DNA, 15 bp, Homo sapiens
tagagatggtattta

SEQ ID NO: 882639 - DNA, 15 bp, Homo sapiens
gtagagatggtattt

SEQ ID NO: 882640 - DNA, 15 bp, Homo sapiens
agtagagatggtatt

SEQ ID NO: 882641 - DNA, 15 bp, Homo sapiens
gagtagagatggtat

SEQ ID NO: 882642 - DNA, 15 bp, Homo sapiens
agagtagagatggta

SEQ ID NO: 882643 - DNA, 15 bp, Homo sapiens
cagagtagagatggt

SEQ ID NO: 882644 - DNA, 15 bp, Homo sapiens
tcagagtagagatgg

SEQ ID NO: 882645 - DNA, 15 bp, Homo sapiens
atcagagtagagatg

SEQ ID NO: 882646 - DNA, 15 bp, Homo sapiens
catcagagtagagat

SEQ ID NO: 882647 - DNA, 15 bp, Homo sapiens
tcatcagagtagaga

SEQ ID NO: 882648 - DNA, 15 bp, Homo sapiens
gtcatcagagtagag

SEQ ID NO: 882649 - DNA, 15 bp, Homo sapiens
cgtcatcagagtaga

SEQ ID NO: 882650 - DNA, 15 bp, Homo sapiens
ccgtcatcagagtag

SEQ ID NO: 882651 - DNA, 15 bp, Homo sapiens
tccgtcatcagagta

SEQ ID NO: 882652 - DNA, 15 bp, Homo sapiens
gtccgtcatcagagt

SEQ ID NO: 882653 - DNA, 15 bp, Homo sapiens
tgtccgtcatcagag

SEQ ID NO: 882654 - DNA, 15 bp, Homo sapiens
gtgtccgtcatcaga

SEQ ID NO: 882655 - DNA, 15 bp, Homo sapiens
tgtgtccgtcatcag

SEQ ID NO: 882656 - DNA, 15 bp, Homo sapiens
atgtgtccgtcatca

SEQ ID NO: 882657 - DNA, 15 bp, Homo sapiens
aatgtgtccgtcatc

SEQ ID NO: 882658 - DNA, 15 bp, Homo sapiens
aaatgtgtccgtcat

SEQ ID NO: 882659 - DNA, 15 bp, Homo sapiens
taaatgtgtccgtca

SEQ ID NO: 882660 - DNA, 15 bp, Homo sapiens
gtaaatgtgtccgtc

SEQ ID NO: 882661 - DNA, 15 bp, Homo sapiens
tgtaaatgtgtccgt

SEQ ID NO: 882662 - DNA, 15 bp, Homo sapiens
atgtaaatgtgtccg

SEQ ID NO: 882663 - DNA, 15 bp, Homo sapiens
gatgtaaatgtgtcc

SEQ ID NO: 882664 - DNA, 15 bp, Homo sapiens
agatgtaaatgtgtc

SEQ ID NO: 882665 - DNA, 15 bp, Homo sapiens
cagatgtaaatgtgt

SEQ ID NO: 882666 - DNA, 15 bp, Homo sapiens
gcagatgtaaatgtg

SEQ ID NO: 882667 - DNA, 15 bp, Homo sapiens
tgcagatgtaaatgt

SEQ ID NO: 882668 - DNA, 15 bp, Homo sapiens
ctgcagatgtaaatg

SEQ ID NO: 882669 - DNA, 15 bp, Homo sapiens
gctgcagatgtaaat

SEQ ID NO: 882670 - DNA, 15 bp, Homo sapiens
ggctgcagatgtaaa

SEQ ID NO: 882671 - DNA, 15 bp, Homo sapiens
tggctgcagatgtaa

SEQ ID NO: 882672 - DNA, 15 bp, Homo sapiens
ttggctgcagatgta

SEQ ID NO: 882673 - DNA, 15 bp, Homo sapiens
cttggctgcagatgt

SEQ ID NO: 882674 - DNA, 15 bp, Homo sapiens
tcttggctgcagatg

SEQ ID NO: 882675 - DNA, 15 bp, Homo sapiens
gtcttggctgcagat

SEQ ID NO: 882676 - DNA, 15 bp, Homo sapiens
agtcttggctgcaga

SEQ ID NO: 882677 - DNA, 15 bp, Homo sapiens
aagtcttggctgcag

SEQ ID NO: 882678 - DNA, 15 bp, Homo sapiens
gaagtcttggctgca

SEQ ID NO: 882679 - DNA, 15 bp, Homo sapiens
tgaagtcttggctgc

SEQ ID NO: 882680 - DNA, 15 bp, Homo sapiens
ttgaagtcttggctg

SEQ ID NO: 882681 - DNA, 15 bp, Homo sapiens
attgaagtcttggct

SEQ ID NO: 882682 - DNA, 15 bp, Homo sapiens
gattgaagtcttggc

SEQ ID NO: 882683 - DNA, 15 bp, Homo sapiens
ggattgaagtcttgg

SEQ ID NO: 882684 - DNA, 15 bp, Homo sapiens
gggattgaagtcttg

SEQ ID NO: 882685 - DNA, 15 bp, Homo sapiens
ggggattgaagtctt

SEQ ID NO: 882686 - DNA, 15 bp, Homo sapiens
tggggattgaagtct

SEQ ID NO: 882687 - DNA, 15 bp, Homo sapiens
ttggggattgaagtc

SEQ ID NO: 882688 - DNA, 15 bp, Homo sapiens
tttggggattgaagt

SEQ ID NO: 882689 - DNA, 15 bp, Homo sapiens
atttggggattgaag

SEQ ID NO: 882690 - DNA, 15 bp, Homo sapiens
aatttggggattgaa

SEQ ID NO: 882691 - DNA, 15 bp, Homo sapiens
gaatttggggattga

SEQ ID NO: 882692 - DNA, 15 bp, Homo sapiens
tgaatttggggattg

SEQ ID NO: 882693 - DNA, 15 bp, Homo sapiens
ctgaatttggggatt

SEQ ID NO: 882694 - DNA, 15 bp, Homo sapiens
tctgaatttggggat

SEQ ID NO: 882695 - DNA, 15 bp, Homo sapiens
gtctgaatttgggga

SEQ ID NO: 882696 - DNA, 15 bp, Homo sapiens
agtctgaatttgggg

SEQ ID NO: 882697 - DNA, 15 bp, Homo sapiens
aagtctgaatttggg

SEQ ID NO: 882698 - DNA, 15 bp, Homo sapiens
caagtctgaatttgg

SEQ ID NO: 882699 - DNA, 15 bp, Homo sapiens
gcaagtctgaatttg

SEQ ID NO: 882700 - DNA, 15 bp, Homo sapiens
tgcaagtctgaattt

SEQ ID NO: 882701 - DNA, 15 bp, Homo sapiens
atgcaagtctgaatt

SEQ ID NO: 882702 - DNA, 15 bp, Homo sapiens
tatgcaagtctgaat

SEQ ID NO: 882703 - DNA, 15 bp, Homo sapiens
atatgcaagtctgaa

SEQ ID NO: 882704 - DNA, 15 bp, Homo sapiens
aatatgcaagtctga

SEQ ID NO: 882705 - DNA, 15 bp, Homo sapiens
caatatgcaagtctg

SEQ ID NO: 882706 - DNA, 15 bp, Homo sapiens
tcaatatgcaagtct

SEQ ID NO: 882707 - DNA, 15 bp, Homo sapiens
ttcaatatgcaagtc

SEQ ID NO: 882708 - DNA, 15 bp, Homo sapiens
attcaatatgcaagt

SEQ ID NO: 882709 - DNA, 15 bp, Homo sapiens
aattcaatatgcaag

SEQ ID NO: 882710 - DNA, 15 bp, Homo sapiens
caattcaatatgcaa

SEQ ID NO: 882711 - DNA, 15 bp, Homo sapiens
gcaattcaatatgca

SEQ ID NO: 882712 - DNA, 15 bp, Homo sapiens
ggcaattcaatatgc

SEQ ID NO: 882713 - DNA, 15 bp, Homo sapiens
aggcaattcaatatg

SEQ ID NO: 882714 - DNA, 15 bp, Homo sapiens
taggcaattcaatat

SEQ ID NO: 882715 - DNA, 15 bp, Homo sapiens
ataggcaattcaata

SEQ ID NO: 882716 - DNA, 15 bp, Homo sapiens
aataggcaattcaat

SEQ ID NO: 882717 - DNA, 15 bp, Homo sapiens
gaataggcaattcaa

SEQ ID NO: 882718 - DNA, 15 bp, Homo sapiens
tgaataggcaattca

SEQ ID NO: 882719 - DNA, 15 bp, Homo sapiens
ttgaataggcaattc

SEQ ID NO: 882720 - DNA, 15 bp, Homo sapiens
gttgaataggcaatt

SEQ ID NO: 882721 - DNA, 15 bp, Homo sapiens
tgttgaataggcaat

SEQ ID NO: 882722 - DNA, 15 bp, Homo sapiens
atgttgaataggcaa

SEQ ID NO: 882723 - DNA, 15 bp, Homo sapiens
gatgttgaataggca

SEQ ID NO: 882724 - DNA, 15 bp, Homo sapiens
agatgttgaataggc

SEQ ID NO: 882725 - DNA, 15 bp, Homo sapiens
gagatgttgaatagg

SEQ ID NO: 882726 - DNA, 15 bp, Homo sapiens
ggagatgttgaatag

SEQ ID NO: 882727 - DNA, 15 bp, Homo sapiens
gggagatgttgaata

SEQ ID NO: 882728 - DNA, 15 bp, Homo sapiens
ggggagatgttgaat

SEQ ID NO: 882729 - DNA, 15 bp, Homo sapiens
aggggagatgttgaa

SEQ ID NO: 882730 - DNA, 15 bp, Homo sapiens
aaggggagatgttga

SEQ ID NO: 882731 - DNA, 15 bp, Homo sapiens
caaggggagatgttg

SEQ ID NO: 882732 - DNA, 15 bp, Homo sapiens
ccaaggggagatgtt

SEQ ID NO: 882733 - DNA, 15 bp, Homo sapiens
tccaaggggagatgt

SEQ ID NO: 882734 - DNA, 15 bp, Homo sapiens
atccaaggggagatg

SEQ ID NO: 882735 - DNA, 15 bp, Homo sapiens
catccaaggggagat

SEQ ID NO: 882736 - DNA, 15 bp, Homo sapiens
acatccaaggggaga

SEQ ID NO: 882737 - DNA, 15 bp, Homo sapiens
gacatccaaggggag

SEQ ID NO: 882738 - DNA, 15 bp, Homo sapiens
agacatccaagggga

SEQ ID NO: 882739 - DNA, 15 bp, Homo sapiens
tagacatccaagggg

SEQ ID NO: 882740 - DNA, 15 bp, Homo sapiens
atagacatccaaggg

SEQ ID NO: 882741 - DNA, 15 bp, Homo sapiens
tatagacatccaagg

SEQ ID NO: 882742 - DNA, 15 bp, Homo sapiens
ttatagacatccaag

SEQ ID NO: 882743 - DNA, 15 bp, Homo sapiens
cttatagacatccaa

SEQ ID NO: 882744 - DNA, 15 bp, Homo sapiens
tcttatagacatcca

SEQ ID NO: 882745 - DNA, 15 bp, Homo sapiens
gtcttatagacatcc

SEQ ID NO: 882746 - DNA, 15 bp, Homo sapiens
tgtcttatagacatc

SEQ ID NO: 882747 - DNA, 15 bp, Homo sapiens
atgtcttatagacat

SEQ ID NO: 882748 - DNA, 15 bp, Homo sapiens
gatgtcttatagaca

SEQ ID NO: 882749 - DNA, 15 bp, Homo sapiens
agatgtcttatagac

SEQ ID NO: 882750 - DNA, 15 bp, Homo sapiens
gagatgtcttataga

SEQ ID NO: 882751 - DNA, 15 bp, Homo sapiens
agagatgtcttatag

SEQ ID NO: 882752 - DNA, 15 bp, Homo sapiens
tagagatgtcttata

SEQ ID NO: 882753 - DNA, 15 bp, Homo sapiens
ttagagatgtcttat

SEQ ID NO: 882754 - DNA, 15 bp, Homo sapiens
gttagagatgtctta

SEQ ID NO: 882755 - DNA, 15 bp, Homo sapiens
tgttagagatgtctt

SEQ ID NO: 882756 - DNA, 15 bp, Homo sapiens
atgttagagatgtct

SEQ ID NO: 882757 - DNA, 15 bp, Homo sapiens
gatgttagagatgtc

SEQ ID NO: 882758 - DNA, 15 bp, Homo sapiens
ggatgttagagatgt

SEQ ID NO: 882759 - DNA, 15 bp, Homo sapiens
aggatgttagagatg

SEQ ID NO: 882760 - DNA, 15 bp, Homo sapiens
taggatgttagagat

SEQ ID NO: 882761 - DNA, 15 bp, Homo sapiens
ataggatgttagaga

SEQ ID NO: 882762 - DNA, 15 bp, Homo sapiens
gataggatgttagag

SEQ ID NO: 882763 - DNA, 15 bp, Homo sapiens
ggataggatgttaga

SEQ ID NO: 882764 - DNA, 15 bp, Homo sapiens
tggataggatgttag

SEQ ID NO: 882765 - DNA, 15 bp, Homo sapiens
ttggataggatgtta

SEQ ID NO: 882766 - DNA, 15 bp, Homo sapiens
tttggataggatgtt

SEQ ID NO: 882767 - DNA, 15 bp, Homo sapiens
ttttggataggatgt

SEQ ID NO: 882768 - DNA, 15 bp, Homo sapiens
gttttggataggatg

SEQ ID NO: 882769 - DNA, 15 bp, Homo sapiens
agttttggataggat

SEQ ID NO: 882770 - DNA, 15 bp, Homo sapiens
cagttttggatagga

SEQ ID NO: 882771 - DNA, 15 bp, Homo sapiens
tcagttttggatagg

SEQ ID NO: 882772 - DNA, 15 bp, Homo sapiens
ctcagttttggatag

SEQ ID NO: 882773 - DNA, 15 bp, Homo sapiens
actcagttttggata

SEQ ID NO: 882774 - DNA, 15 bp, Homo sapiens
aactcagttttggat

SEQ ID NO: 882775 - DNA, 15 bp, Homo sapiens
gaactcagttttgga

SEQ ID NO: 882776 - DNA, 15 bp, Homo sapiens
agaactcagttttgg

SEQ ID NO: 882777 - DNA, 15 bp, Homo sapiens
cagaactcagttttg

SEQ ID NO: 882778 - DNA, 15 bp, Homo sapiens
ccagaactcagtttt

SEQ ID NO: 882779 - DNA, 15 bp, Homo sapiens
tccagaactcagttt

SEQ ID NO: 882780 - DNA, 15 bp, Homo sapiens
atccagaactcagtt

SEQ ID NO: 882781 - DNA, 15 bp, Homo sapiens
gatccagaactcagt

SEQ ID NO: 882782 - DNA, 15 bp, Homo sapiens
agatccagaactcag

SEQ ID NO: 882783 - DNA, 15 bp, Homo sapiens
aagatccagaactca

SEQ ID NO: 882784 - DNA, 15 bp, Homo sapiens
gaagatccagaactc

SEQ ID NO: 882785 - DNA, 15 bp, Homo sapiens
ggaagatccagaact

SEQ ID NO: 882786 - DNA, 15 bp, Homo sapiens
aggaagatccagaac

SEQ ID NO: 882787 - DNA, 15 bp, Homo sapiens
aaggaagatccagaa

SEQ ID NO: 882788 - DNA, 15 bp, Homo sapiens
gaaggaagatccaga

SEQ ID NO: 882789 - DNA, 15 bp, Homo sapiens
agaaggaagatccag

SEQ ID NO: 882790 - DNA, 15 bp, Homo sapiens
gagaaggaagatcca

SEQ ID NO: 882791 - DNA, 15 bp, Homo sapiens
tgagaaggaagatcc

SEQ ID NO: 882792 - DNA, 15 bp, Homo sapiens
ttgagaaggaagatc

SEQ ID NO: 882793 - DNA, 15 bp, Homo sapiens
tttgagaaggaagat

SEQ ID NO: 882794 - DNA, 15 bp, Homo sapiens
gtttgagaaggaaga

SEQ ID NO: 882795 - DNA, 15 bp, Homo sapiens
ggtttgagaaggaag

SEQ ID NO: 882796 - DNA, 15 bp, Homo sapiens
aggtttgagaaggaa

SEQ ID NO: 882797 - DNA, 15 bp, Homo sapiens
aaggtttgagaagga

SEQ ID NO: 882798 - DNA, 15 bp, Homo sapiens
gaaggtttgagaagg

SEQ ID NO: 882799 - DNA, 15 bp, Homo sapiens
agaaggtttgagaag

SEQ ID NO: 882800 - DNA, 15 bp, Homo sapiens
gagaaggtttgagaa

SEQ ID NO: 882801 - DNA, 15 bp, Homo sapiens
ggagaaggtttgaga

SEQ ID NO: 882802 - DNA, 15 bp, Homo sapiens
tggagaaggtttgag

SEQ ID NO: 882803 - DNA, 15 bp, Homo sapiens
ctggagaaggtttga

SEQ ID NO: 882804 - DNA, 15 bp, Homo sapiens
gctggagaaggtttg

SEQ ID NO: 882805 - DNA, 15 bp, Homo sapiens
tgctggagaaggttt

SEQ ID NO: 882806 - DNA, 15 bp, Homo sapiens
gtgctggagaaggtt

SEQ ID NO: 882807 - DNA, 15 bp, Homo sapiens
tgtgctggagaaggt

SEQ ID NO: 882808 - DNA, 15 bp, Homo sapiens
ctgtgctggagaagg

SEQ ID NO: 882809 - DNA, 15 bp, Homo sapiens
gctgtgctggagaag

SEQ ID NO: 882810 - DNA, 15 bp, Homo sapiens
agctgtgctggagaa

SEQ ID NO: 882811 - DNA, 15 bp, Homo sapiens
aagctgtgctggaga

SEQ ID NO: 882812 - DNA, 15 bp, Homo sapiens
aaagctgtgctggag

SEQ ID NO: 882813 - DNA, 15 bp, Homo sapiens
aaaagctgtgctgga

SEQ ID NO: 882814 - DNA, 15 bp, Homo sapiens
aaaaagctgtgctgg

SEQ ID NO: 882815 - DNA, 15 bp, Homo sapiens
gaaaaagctgtgctg

SEQ ID NO: 882816 - DNA, 15 bp, Homo sapiens
agaaaaagctgtgct

SEQ ID NO: 882817 - DNA, 15 bp, Homo sapiens
tagaaaaagctgtgc

SEQ ID NO: 882818 - DNA, 15 bp, Homo sapiens
atagaaaaagctgtg

SEQ ID NO: 882819 - DNA, 15 bp, Homo sapiens
aatagaaaaagctgt

SEQ ID NO: 882820 - DNA, 15 bp, Homo sapiens
taatagaaaaagctg

SEQ ID NO: 882821 - DNA, 15 bp, Homo sapiens
ataatagaaaaagct

SEQ ID NO: 882822 - DNA, 15 bp, Homo sapiens
gataatagaaaaagc

SEQ ID NO: 882823 - DNA, 15 bp, Homo sapiens
tgataatagaaaaag

SEQ ID NO: 882824 - DNA, 15 bp, Homo sapiens
ctgataatagaaaaa

SEQ ID NO: 882825 - DNA, 15 bp, Homo sapiens
actgataatagaaaa

SEQ ID NO: 882826 - DNA, 15 bp, Homo sapiens
aactgataatagaaa

SEQ ID NO: 882827 - DNA, 15 bp, Homo sapiens
gaactgataatagaa

SEQ ID NO: 882828 - DNA, 15 bp, Homo sapiens
tgaactgataataga

SEQ ID NO: 882829 - DNA, 15 bp, Homo sapiens
atgaactgataatag

SEQ ID NO: 882830 - DNA, 15 bp, Homo sapiens
tatgaactgataata

SEQ ID NO: 882831 - DNA, 15 bp, Homo sapiens
ctatgaactgataat

SEQ ID NO: 882832 - DNA, 15 bp, Homo sapiens
cctatgaactgataa

SEQ ID NO: 882833 - DNA, 15 bp, Homo sapiens
tcctatgaactgata

SEQ ID NO: 882834 - DNA, 15 bp, Homo sapiens
ttcctatgaactgat

SEQ ID NO: 882835 - DNA, 15 bp, Homo sapiens
attcctatgaactga

SEQ ID NO: 882836 - DNA, 15 bp, Homo sapiens
aattcctatgaactg

SEQ ID NO: 882837 - DNA, 15 bp, Homo sapiens
gaattcctatgaact

SEQ ID NO: 882838 - DNA, 15 bp, Homo sapiens
ggaattcctatgaac

SEQ ID NO: 882839 - DNA, 15 bp, Homo sapiens
cggaattcctatgaa

SEQ ID NO: 882840 - DNA, 15 bp, Homo sapiens
gcggaattcctatga

SEQ ID NO: 882841 - DNA, 15 bp, Homo sapiens
ggcggaattcctatg

SEQ ID NO: 882842 - DNA, 15 bp, Homo sapiens
gggcggaattcctat

SEQ ID NO: 882843 - DNA, 15 bp, Homo sapiens
agggcggaattccta

SEQ ID NO: 882844 - DNA, 15 bp, Homo sapiens
aagggcggaattcct

SEQ ID NO: 882845 - DNA, 15 bp, Homo sapiens
gaagggcggaattcc

SEQ ID NO: 882846 - DNA, 15 bp, Homo sapiens
ggaagggcggaattc

SEQ ID NO: 882847 - DNA, 15 bp, Homo sapiens
tggaagggcggaatt

SEQ ID NO: 882848 - DNA, 15 bp, Homo sapiens
ctggaagggcggaat

SEQ ID NO: 882849 - DNA, 15 bp, Homo sapiens
gctggaagggcggaa

SEQ ID NO: 882850 - DNA, 15 bp, Homo sapiens
agctggaagggcgga

SEQ ID NO: 882851 - DNA, 15 bp, Homo sapiens
cagctggaagggcgg

SEQ ID NO: 882852 - DNA, 15 bp, Homo sapiens
tcagctggaagggcg

SEQ ID NO: 882853 - DNA, 15 bp, Homo sapiens
atcagctggaagggc

SEQ ID NO: 882854 - DNA, 15 bp, Homo sapiens
gatcagctggaaggg

SEQ ID NO: 882855 - DNA, 15 bp, Homo sapiens
tgatcagctggaagg

SEQ ID NO: 882856 - DNA, 15 bp, Homo sapiens
ttgatcagctggaag

SEQ ID NO: 882857 - DNA, 15 bp, Homo sapiens
tttgatcagctggaa

SEQ ID NO: 882858 - DNA, 15 bp, Homo sapiens
gtttgatcagctgga

SEQ ID NO: 882859 - DNA, 15 bp, Homo sapiens
ggtttgatcagctgg

SEQ ID NO: 882860 - DNA, 15 bp, Homo sapiens
tggtttgatcagctg

SEQ ID NO: 882861 - DNA, 15 bp, Homo sapiens
atggtttgatcagct

SEQ ID NO: 882862 - DNA, 15 bp, Homo sapiens
tatggtttgatcagc

SEQ ID NO: 882863 - DNA, 15 bp, Homo sapiens
ttatggtttgatcag

SEQ ID NO: 882864 - DNA, 15 bp, Homo sapiens
cttatggtttgatca

SEQ ID NO: 882865 - DNA, 15 bp, Homo sapiens
gcttatggtttgatc

SEQ ID NO: 882866 - DNA, 15 bp, Homo sapiens
tgcttatggtttgat

SEQ ID NO: 882867 - DNA, 15 bp, Homo sapiens
gtgcttatggtttga

SEQ ID NO: 882868 - DNA, 15 bp, Homo sapiens
agtgcttatggtttg

SEQ ID NO: 882869 - DNA, 15 bp, Homo sapiens
aagtgcttatggttt

SEQ ID NO: 882870 - DNA, 15 bp, Homo sapiens
aaagtgcttatggtt

SEQ ID NO: 882871 - DNA, 15 bp, Homo sapiens
caaagtgcttatggt

SEQ ID NO: 882872 - DNA, 15 bp, Homo sapiens
ccaaagtgcttatgg

SEQ ID NO: 882873 - DNA, 15 bp, Homo sapiens
cccaaagtgcttatg

SEQ ID NO: 882874 - DNA, 15 bp, Homo sapiens
tcccaaagtgcttat

SEQ ID NO: 882875 - DNA, 15 bp, Homo sapiens
gtcccaaagtgctta

SEQ ID NO: 882876 - DNA, 15 bp, Homo sapiens
tgtcccaaagtgctt

SEQ ID NO: 882877 - DNA, 15 bp, Homo sapiens
atgtcccaaagtgct

SEQ ID NO: 882878 - DNA, 15 bp, Homo sapiens
aatgtcccaaagtgc

SEQ ID NO: 882879 - DNA, 15 bp, Homo sapiens
taatgtcccaaagtg

SEQ ID NO: 882880 - DNA, 15 bp, Homo sapiens
gtaatgtcccaaagt

SEQ ID NO: 882881 - DNA, 15 bp, Homo sapiens
ggtaatgtcccaaag

SEQ ID NO: 882882 - DNA, 15 bp, Homo sapiens
tggtaatgtcccaaa

SEQ ID NO: 882883 - DNA, 15 bp, Homo sapiens
ttggtaatgtcccaa

SEQ ID NO: 882884 - DNA, 15 bp, Homo sapiens
gttggtaatgtccca

SEQ ID NO: 882885 - DNA, 15 bp, Homo sapiens
agttggtaatgtccc

SEQ ID NO: 882886 - DNA, 15 bp, Homo sapiens
gagttggtaatgtcc

SEQ ID NO: 882887 - DNA, 15 bp, Homo sapiens
ggagttggtaatgtc

SEQ ID NO: 882888 - DNA, 15 bp, Homo sapiens
aggagttggtaatgt

SEQ ID NO: 882889 - DNA, 15 bp, Homo sapiens
aaggagttggtaatg

SEQ ID NO: 882890 - DNA, 15 bp, Homo sapiens
aaaggagttggtaat

SEQ ID NO: 882891 - DNA, 15 bp, Homo sapiens
aaaaggagttggtaa

SEQ ID NO: 882892 - DNA, 15 bp, Homo sapiens
aaaaaggagttggta

SEQ ID NO: 882893 - DNA, 15 bp, Homo sapiens
gaaaaaggagttggt

SEQ ID NO: 882894 - DNA, 15 bp, Homo sapiens
agaaaaaggagttgg

SEQ ID NO: 882895 - DNA, 15 bp, Homo sapiens
gagaaaaaggagttg

SEQ ID NO: 882896 - DNA, 15 bp, Homo sapiens
agagaaaaaggagtt

SEQ ID NO: 882897 - DNA, 15 bp, Homo sapiens
aagagaaaaaggagt

SEQ ID NO: 882898 - DNA, 15 bp, Homo sapiens
taagagaaaaaggag

SEQ ID NO: 882899 - DNA, 15 bp, Homo sapiens
ttaagagaaaaagga

SEQ ID NO: 882900 - DNA, 15 bp, Homo sapiens
gttaagagaaaaagg

SEQ ID NO: 882901 - DNA, 15 bp, Homo sapiens
ggttaagagaaaaag

SEQ ID NO: 882902 - DNA, 15 bp, Homo sapiens
gggttaagagaaaaa

SEQ ID NO: 882903 - DNA, 15 bp, Homo sapiens
ggggttaagagaaaa

SEQ ID NO: 882904 - DNA, 15 bp, Homo sapiens
tggggttaagagaaa

SEQ ID NO: 882905 - DNA, 15 bp, Homo sapiens
gtggggttaagagaa

SEQ ID NO: 882906 - DNA, 15 bp, Homo sapiens
tgtggggttaagaga

SEQ ID NO: 882907 - DNA, 15 bp, Homo sapiens
ctgtggggttaagag

SEQ ID NO: 882908 - DNA, 15 bp, Homo sapiens
gctgtggggttaaga

SEQ ID NO: 882909 - DNA, 15 bp, Homo sapiens
ggctgtggggttaag

SEQ ID NO: 882910 - DNA, 15 bp, Homo sapiens
tggctgtggggttaa

SEQ ID NO: 882911 - DNA, 15 bp, Homo sapiens
ttggctgtggggtta

SEQ ID NO: 882912 - DNA, 15 bp, Homo sapiens
attggctgtggggtt

SEQ ID NO: 882913 - DNA, 15 bp, Homo sapiens
gattggctgtggggt

SEQ ID NO: 882914 - DNA, 15 bp, Homo sapiens
agattggctgtgggg

SEQ ID NO: 882915 - DNA, 15 bp, Homo sapiens
aagattggctgtggg

SEQ ID NO: 882916 - DNA, 15 bp, Homo sapiens
aaagattggctgtgg

SEQ ID NO: 882917 - DNA, 15 bp, Homo sapiens
gaaagattggctgtg

SEQ ID NO: 882918 - DNA, 15 bp, Homo sapiens
tgaaagattggctgt

SEQ ID NO: 882919 - DNA, 15 bp, Homo sapiens
ctgaaagattggctg

SEQ ID NO: 882920 - DNA, 15 bp, Homo sapiens
tctgaaagattggct

SEQ ID NO: 882921 - DNA, 15 bp, Homo sapiens
ttctgaaagattggc

SEQ ID NO: 882922 - DNA, 15 bp, Homo sapiens
tttctgaaagattgg

SEQ ID NO: 882923 - DNA, 15 bp, Homo sapiens
ttttctgaaagattg

SEQ ID NO: 882924 - DNA, 15 bp, Homo sapiens
attttctgaaagatt

SEQ ID NO: 882925 - DNA, 15 bp, Homo sapiens
gattttctgaaagat

SEQ ID NO: 882926 - DNA, 15 bp, Homo sapiens
ggattttctgaaaga

SEQ ID NO: 882927 - DNA, 15 bp, Homo sapiens
aggattttctgaaag

SEQ ID NO: 882928 - DNA, 15 bp, Homo sapiens
caggattttctgaaa

SEQ ID NO: 882929 - DNA, 15 bp, Homo sapiens
acaggattttctgaa

SEQ ID NO: 882930 - DNA, 15 bp, Homo sapiens
cacaggattttctga

SEQ ID NO: 882931 - DNA, 15 bp, Homo sapiens
acacaggattttctg

SEQ ID NO: 882932 - DNA, 15 bp, Homo sapiens
cacacaggattttct

SEQ ID NO: 882933 - DNA, 15 bp, Homo sapiens
acacacaggattttc

SEQ ID NO: 882934 - DNA, 15 bp, Homo sapiens
aacacacaggatttt

SEQ ID NO: 882935 - DNA, 15 bp, Homo sapiens
gaacacacaggattt

SEQ ID NO: 882936 - DNA, 15 bp, Homo sapiens
agaacacacaggatt

SEQ ID NO: 882937 - DNA, 15 bp, Homo sapiens
tagaacacacaggat

SEQ ID NO: 882938 - DNA, 15 bp, Homo sapiens
gtagaacacacagga

SEQ ID NO: 882939 - DNA, 15 bp, Homo sapiens
ggtagaacacacagg

SEQ ID NO: 882940 - DNA, 15 bp, Homo sapiens
aggtagaacacacag

SEQ ID NO: 882941 - DNA, 15 bp, Homo sapiens
aaggtagaacacaca

SEQ ID NO: 882942 - DNA, 15 bp, Homo sapiens
gaaggtagaacacac

SEQ ID NO: 882943 - DNA, 15 bp, Homo sapiens
tgaaggtagaacaca

SEQ ID NO: 882944 - DNA, 15 bp, Homo sapiens
ttgaaggtagaacac

SEQ ID NO: 882945 - DNA, 15 bp, Homo sapiens
tttgaaggtagaaca

SEQ ID NO: 882946 - DNA, 15 bp, Homo sapiens
ttttgaaggtagaac

SEQ ID NO: 882947 - DNA, 15 bp, Homo sapiens
attttgaaggtagaa

SEQ ID NO: 882948 - DNA, 15 bp, Homo sapiens
tattttgaaggtaga

SEQ ID NO: 882949 - DNA, 15 bp, Homo sapiens
atattttgaaggtag

SEQ ID NO: 882950 - DNA, 15 bp, Homo sapiens
catattttgaaggta

SEQ ID NO: 882951 - DNA, 15 bp, Homo sapiens
acatattttgaaggt

SEQ ID NO: 882952 - DNA, 15 bp, Homo sapiens
cacatattttgaagg

SEQ ID NO: 882953 - DNA, 15 bp, Homo sapiens
acacatattttgaag

SEQ ID NO: 882954 - DNA, 15 bp, Homo sapiens
tacacatattttgaa

SEQ ID NO: 882955 - DNA, 15 bp, Homo sapiens
ctacacatattttga

SEQ ID NO: 882956 - DNA, 15 bp, Homo sapiens
tctacacatattttg

SEQ ID NO: 882957 - DNA, 15 bp, Homo sapiens
ctctacacatatttt

SEQ ID NO: 882958 - DNA, 15 bp, Homo sapiens
actctacacatattt

SEQ ID NO: 882959 - DNA, 15 bp, Homo sapiens
gactctacacatatt

SEQ ID NO: 882960 - DNA, 15 bp, Homo sapiens
agactctacacatat

SEQ ID NO: 882961 - DNA, 15 bp, Homo sapiens
cagactctacacata

SEQ ID NO: 882962 - DNA, 15 bp, Homo sapiens
tcagactctacacat

SEQ ID NO: 882963 - DNA, 15 bp, Homo sapiens
gtcagactctacaca

SEQ ID NO: 882964 - DNA, 15 bp, Homo sapiens
ggtcagactctacac

SEQ ID NO: 882965 - DNA, 15 bp, Homo sapiens
tggtcagactctaca

SEQ ID NO: 882966 - DNA, 15 bp, Homo sapiens
atggtcagactctac

SEQ ID NO: 882967 - DNA, 15 bp, Homo sapiens
aatggtcagactcta

SEQ ID NO: 882968 - DNA, 15 bp, Homo sapiens
aaatggtcagactct

SEQ ID NO: 882969 - DNA, 15 bp, Homo sapiens
gaaatggtcagactc

SEQ ID NO: 882970 - DNA, 15 bp, Homo sapiens
tgaaatggtcagact

SEQ ID NO: 882971 - DNA, 15 bp, Homo sapiens
ttgaaatggtcagac

SEQ ID NO: 882972 - DNA, 15 bp, Homo sapiens
attgaaatggtcaga

SEQ ID NO: 882973 - DNA, 15 bp, Homo sapiens
aattgaaatggtcag

SEQ ID NO: 882974 - DNA, 15 bp, Homo sapiens
taattgaaatggtca

SEQ ID NO: 882975 - DNA, 15 bp, Homo sapiens
ataattgaaatggtc

SEQ ID NO: 882976 - DNA, 15 bp, Homo sapiens
cataattgaaatggt

SEQ ID NO: 882977 - DNA, 15 bp, Homo sapiens
acataattgaaatgg

SEQ ID NO: 882978 - DNA, 15 bp, Homo sapiens
gacataattgaaatg

SEQ ID NO: 882979 - DNA, 15 bp, Homo sapiens
agacataattgaaat

SEQ ID NO: 882980 - DNA, 15 bp, Homo sapiens
tagacataattgaaa

SEQ ID NO: 882981 - DNA, 15 bp, Homo sapiens
gtagacataattgaa

SEQ ID NO: 882982 - DNA, 15 bp, Homo sapiens
agtagacataattga

SEQ ID NO: 882983 - DNA, 15 bp, Homo sapiens
cagtagacataattg

SEQ ID NO: 882984 - DNA, 15 bp, Homo sapiens
gcagtagacataatt

SEQ ID NO: 882985 - DNA, 15 bp, Homo sapiens
agcagtagacataat

SEQ ID NO: 882986 - DNA, 15 bp, Homo sapiens
tagcagtagacataa

SEQ ID NO: 882987 - DNA, 15 bp, Homo sapiens
gtagcagtagacata

SEQ ID NO: 882988 - DNA, 15 bp, Homo sapiens
ggtagcagtagacat

SEQ ID NO: 882989 - DNA, 15 bp, Homo sapiens
tggtagcagtagaca

SEQ ID NO: 882990 - DNA, 15 bp, Homo sapiens
ttggtagcagtagac

SEQ ID NO: 882991 - DNA, 15 bp, Homo sapiens
gttggtagcagtaga

SEQ ID NO: 882992 - DNA, 15 bp, Homo sapiens
agttggtagcagtag

SEQ ID NO: 882993 - DNA, 15 bp, Homo sapiens
aagttggtagcagta

SEQ ID NO: 882994 - DNA, 15 bp, Homo sapiens
caagttggtagcagt

SEQ ID NO: 882995 - DNA, 15 bp, Homo sapiens
ccaagttggtagcag

SEQ ID NO: 882996 - DNA, 15 bp, Homo sapiens
accaagttggtagca

SEQ ID NO: 882997 - DNA, 15 bp, Homo sapiens
gaccaagttggtagc

SEQ ID NO: 882998 - DNA, 15 bp, Homo sapiens
agaccaagttggtag

SEQ ID NO: 882999 - DNA, 15 bp, Homo sapiens
gagaccaagttggta

SEQ ID NO: 883000 - DNA, 15 bp, Homo sapiens
tgagaccaagttggt

SEQ ID NO: 883001 - DNA, 15 bp, Homo sapiens
ctgagaccaagttgg

SEQ ID NO: 883002 - DNA, 15 bp, Homo sapiens
gctgagaccaagttg

SEQ ID NO: 883003 - DNA, 15 bp, Homo sapiens
ggctgagaccaagtt

SEQ ID NO: 883004 - DNA, 15 bp, Homo sapiens
tggctgagaccaagt

SEQ ID NO: 883005 - DNA, 15 bp, Homo sapiens
gtggctgagaccaag

SEQ ID NO: 883006 - DNA, 15 bp, Homo sapiens
agtggctgagaccaa

SEQ ID NO: 883007 - DNA, 15 bp, Homo sapiens
tagtggctgagacca

SEQ ID NO: 883008 - DNA, 15 bp, Homo sapiens
atagtggctgagacc

SEQ ID NO: 883009 - DNA, 15 bp, Homo sapiens
gatagtggctgagac

SEQ ID NO: 883010 - DNA, 15 bp, Homo sapiens
tgatagtggctgaga

SEQ ID NO: 883011 - DNA, 15 bp, Homo sapiens
atgatagtggctgag

SEQ ID NO: 883012 - DNA, 15 bp, Homo sapiens
aatgatagtggctga

SEQ ID NO: 883013 - DNA, 15 bp, Homo sapiens
aaatgatagtggctg

SEQ ID NO: 883014 - DNA, 15 bp, Homo sapiens
gaaatgatagtggct

SEQ ID NO: 883015 - DNA, 15 bp, Homo sapiens
agaaatgatagtggc

SEQ ID NO: 883016 - DNA, 15 bp, Homo sapiens
gagaaatgatagtgg

SEQ ID NO: 883017 - DNA, 15 bp, Homo sapiens
tgagaaatgatagtg

SEQ ID NO: 883018 - DNA, 15 bp, Homo sapiens
atgagaaatgatagt

SEQ ID NO: 883019 - DNA, 15 bp, Homo sapiens
gatgagaaatgatag

SEQ ID NO: 883020 - DNA, 15 bp, Homo sapiens
ggatgagaaatgata

SEQ ID NO: 883021 - DNA, 15 bp, Homo sapiens
aggatgagaaatgat

SEQ ID NO: 883022 - DNA, 15 bp, Homo sapiens
taggatgagaaatga

SEQ ID NO: 883023 - DNA, 15 bp, Homo sapiens
ctaggatgagaaatg

SEQ ID NO: 883024 - DNA, 15 bp, Homo sapiens
actaggatgagaaat

SEQ ID NO: 883025 - DNA, 15 bp, Homo sapiens
cactaggatgagaaa

SEQ ID NO: 883026 - DNA, 15 bp, Homo sapiens
tcactaggatgagaa

SEQ ID NO: 883027 - DNA, 15 bp, Homo sapiens
gtcactaggatgaga

SEQ ID NO: 883028 - DNA, 15 bp, Homo sapiens
agtcactaggatgag

SEQ ID NO: 883029 - DNA, 15 bp, Homo sapiens
cagtcactaggatga

SEQ ID NO: 883030 - DNA, 15 bp, Homo sapiens
gcagtcactaggatg

SEQ ID NO: 883031 - DNA, 15 bp, Homo sapiens
cgcagtcactaggat

SEQ ID NO: 883032 - DNA, 15 bp, Homo sapiens
ccgcagtcactagga

SEQ ID NO: 883033 - DNA, 15 bp, Homo sapiens
accgcagtcactagg

SEQ ID NO: 883034 - DNA, 15 bp, Homo sapiens
taccgcagtcactag

SEQ ID NO: 883035 - DNA, 15 bp, Homo sapiens
ctaccgcagtcacta

SEQ ID NO: 883036 - DNA, 15 bp, Homo sapiens
gctaccgcagtcact

SEQ ID NO: 883037 - DNA, 15 bp, Homo sapiens
ggctaccgcagtcac

SEQ ID NO: 883038 - DNA, 15 bp, Homo sapiens
aggctaccgcagtca

SEQ ID NO: 883039 - DNA, 15 bp, Homo sapiens
gaggctaccgcagtc

SEQ ID NO: 883040 - DNA, 15 bp, Homo sapiens
ggaggctaccgcagt

SEQ ID NO: 883041 - DNA, 15 bp, Homo sapiens
aggaggctaccgcag

SEQ ID NO: 883042 - DNA, 15 bp, Homo sapiens
gaggaggctaccgca

SEQ ID NO: 883043 - DNA, 15 bp, Homo sapiens
tgaggaggctaccgc

SEQ ID NO: 883044 - DNA, 15 bp, Homo sapiens
ctgaggaggctaccg

SEQ ID NO: 883045 - DNA, 15 bp, Homo sapiens
actgaggaggctacc

SEQ ID NO: 883046 - DNA, 15 bp, Homo sapiens
cactgaggaggctac

SEQ ID NO: 883047 - DNA, 15 bp, Homo sapiens
ccactgaggaggcta

SEQ ID NO: 883048 - DNA, 15 bp, Homo sapiens
gccactgaggaggct

SEQ ID NO: 883049 - DNA, 15 bp, Homo sapiens
ggccactgaggaggc

SEQ ID NO: 883050 - DNA, 15 bp, Homo sapiens
gggccactgaggagg

SEQ ID NO: 883051 - DNA, 15 bp, Homo sapiens
ggggccactgaggag

SEQ ID NO: 883052 - DNA, 15 bp, Homo sapiens
gggggccactgagga

SEQ ID NO: 883053 - DNA, 15 bp, Homo sapiens
agggggccactgagg

SEQ ID NO: 883054 - DNA, 15 bp, Homo sapiens
gagggggccactgag

SEQ ID NO: 883055 - DNA, 15 bp, Homo sapiens
agagggggccactga

SEQ ID NO: 883056 - DNA, 15 bp, Homo sapiens
tagagggggccactg

SEQ ID NO: 883057 - DNA, 15 bp, Homo sapiens
ctagagggggccact

SEQ ID NO: 883058 - DNA, 15 bp, Homo sapiens
actagagggggccac

SEQ ID NO: 883059 - DNA, 15 bp, Homo sapiens
cactagagggggcca

SEQ ID NO: 883060 - DNA, 15 bp, Homo sapiens
ccactagagggggcc

SEQ ID NO: 883061 - DNA, 15 bp, Homo sapiens
accactagagggggc

SEQ ID NO: 883062 - DNA, 15 bp, Homo sapiens
gaccactagaggggg

SEQ ID NO: 883063 - DNA, 15 bp, Homo sapiens
agaccactagagggg

SEQ ID NO: 883064 - DNA, 15 bp, Homo sapiens
gagaccactagaggg

SEQ ID NO: 883065 - DNA, 15 bp, Homo sapiens
agagaccactagagg

SEQ ID NO: 883066 - DNA, 15 bp, Homo sapiens
tagagaccactagag

SEQ ID NO: 883067 - DNA, 15 bp, Homo sapiens
gtagagaccactaga

SEQ ID NO: 883068 - DNA, 15 bp, Homo sapiens
ggtagagaccactag

SEQ ID NO: 883069 - DNA, 15 bp, Homo sapiens
gggtagagaccacta

SEQ ID NO: 883070 - DNA, 15 bp, Homo sapiens
agggtagagaccact

SEQ ID NO: 883071 - DNA, 15 bp, Homo sapiens
cagggtagagaccac

SEQ ID NO: 883072 - DNA, 15 bp, Homo sapiens
ccagggtagagacca

SEQ ID NO: 883073 - DNA, 15 bp, Homo sapiens
tccagggtagagacc

SEQ ID NO: 883074 - DNA, 15 bp, Homo sapiens
gtccagggtagagac

SEQ ID NO: 883075 - DNA, 15 bp, Homo sapiens
ggtccagggtagaga

SEQ ID NO: 883076 - DNA, 15 bp, Homo sapiens
gggtccagggtagag

SEQ ID NO: 883077 - DNA, 15 bp, Homo sapiens
ggggtccagggtaga

SEQ ID NO: 883078 - DNA, 15 bp, Homo sapiens
aggggtccagggtag

SEQ ID NO: 883079 - DNA, 15 bp, Homo sapiens
gaggggtccagggta

SEQ ID NO: 883080 - DNA, 15 bp, Homo sapiens
ggaggggtccagggt

SEQ ID NO: 883081 - DNA, 15 bp, Homo sapiens
tggaggggtccaggg

SEQ ID NO: 883082 - DNA, 15 bp, Homo sapiens
ctggaggggtccagg

SEQ ID NO: 883083 - DNA, 15 bp, Homo sapiens
actggaggggtccag

SEQ ID NO: 883084 - DNA, 15 bp, Homo sapiens
gactggaggggtcca

SEQ ID NO: 883085 - DNA, 15 bp, Homo sapiens
agactggaggggtcc

SEQ ID NO: 883086 - DNA, 15 bp, Homo sapiens
gagactggaggggtc

SEQ ID NO: 883087 - DNA, 15 bp, Homo sapiens
ggagactggaggggt

SEQ ID NO: 883088 - DNA, 15 bp, Homo sapiens
tggagactggagggg

SEQ ID NO: 883089 - DNA, 15 bp, Homo sapiens
atggagactggaggg

SEQ ID NO: 883090 - DNA, 15 bp, Homo sapiens
catggagactggagg

SEQ ID NO: 883091 - DNA, 15 bp, Homo sapiens
acatggagactggag

SEQ ID NO: 883092 - DNA, 15 bp, Homo sapiens
cacatggagactgga

SEQ ID NO: 883093 - DNA, 15 bp, Homo sapiens
acacatggagactgg

SEQ ID NO: 883094 - DNA, 15 bp, Homo sapiens
aacacatggagactg

SEQ ID NO: 883095 - DNA, 15 bp, Homo sapiens
gaacacatggagact

SEQ ID NO: 883096 - DNA, 15 bp, Homo sapiens
agaacacatggagac

SEQ ID NO: 883097 - DNA, 15 bp, Homo sapiens
cagaacacatggaga

SEQ ID NO: 883098 - DNA, 15 bp, Homo sapiens
acagaacacatggag

SEQ ID NO: 883099 - DNA, 15 bp, Homo sapiens
gacagaacacatgga

SEQ ID NO: 883100 - DNA, 15 bp, Homo sapiens
agacagaacacatgg

SEQ ID NO: 883101 - DNA, 15 bp, Homo sapiens
tagacagaacacatg

SEQ ID NO: 883102 - DNA, 15 bp, Homo sapiens
gtagacagaacacat

SEQ ID NO: 883103 - DNA, 15 bp, Homo sapiens
tgtagacagaacaca

SEQ ID NO: 883104 - DNA, 15 bp, Homo sapiens
gtgtagacagaacac

SEQ ID NO: 883105 - DNA, 15 bp, Homo sapiens
agtgtagacagaaca

SEQ ID NO: 883106 - DNA, 15 bp, Homo sapiens
gagtgtagacagaac

SEQ ID NO: 883107 - DNA, 15 bp, Homo sapiens
tgagtgtagacagaa

SEQ ID NO: 883108 - DNA, 15 bp, Homo sapiens
ctgagtgtagacaga

SEQ ID NO: 883109 - DNA, 15 bp, Homo sapiens
gctgagtgtagacag

SEQ ID NO: 883110 - DNA, 15 bp, Homo sapiens
ggctgagtgtagaca

SEQ ID NO: 883111 - DNA, 15 bp, Homo sapiens
aggctgagtgtagac

SEQ ID NO: 883112 - DNA, 15 bp, Homo sapiens
gaggctgagtgtaga

SEQ ID NO: 883113 - DNA, 15 bp, Homo sapiens
agaggctgagtgtag

SEQ ID NO: 883114 - DNA, 15 bp, Homo sapiens
gagaggctgagtgta

SEQ ID NO: 883115 - DNA, 15 bp, Homo sapiens
ggagaggctgagtgt

SEQ ID NO: 883116 - DNA, 15 bp, Homo sapiens
tggagaggctgagtg

SEQ ID NO: 883117 - DNA, 15 bp, Homo sapiens
ctggagaggctgagt

SEQ ID NO: 883118 - DNA, 15 bp, Homo sapiens
actggagaggctgag

SEQ ID NO: 883119 - DNA, 15 bp, Homo sapiens
gactggagaggctga

SEQ ID NO: 883120 - DNA, 15 bp, Homo sapiens
agactggagaggctg

SEQ ID NO: 883121 - DNA, 15 bp, Homo sapiens
gagactggagaggct

SEQ ID NO: 883122 - DNA, 15 bp, Homo sapiens
ggagactggagaggc

SEQ ID NO: 883123 - DNA, 15 bp, Homo sapiens
aggagactggagagg

SEQ ID NO: 883124 - DNA, 15 bp, Homo sapiens
caggagactggagag

SEQ ID NO: 883125 - DNA, 15 bp, Homo sapiens
ccaggagactggaga

SEQ ID NO: 883126 - DNA, 15 bp, Homo sapiens
accaggagactggag

SEQ ID NO: 883127 - DNA, 15 bp, Homo sapiens
caccaggagactgga

SEQ ID NO: 883128 - DNA, 15 bp, Homo sapiens
acaccaggagactgg

SEQ ID NO: 883129 - DNA, 15 bp, Homo sapiens
gacaccaggagactg

SEQ ID NO: 883130 - DNA, 15 bp, Homo sapiens
ggacaccaggagact

SEQ ID NO: 883131 - DNA, 15 bp, Homo sapiens
gggacaccaggagac

SEQ ID NO: 883132 - DNA, 15 bp, Homo sapiens
tgggacaccaggaga

SEQ ID NO: 883133 - DNA, 15 bp, Homo sapiens
atgggacaccaggag

SEQ ID NO: 883134 - DNA, 15 bp, Homo sapiens
aatgggacaccagga

SEQ ID NO: 883135 - DNA, 15 bp, Homo sapiens
aaatgggacaccagg

SEQ ID NO: 883136 - DNA, 15 bp, Homo sapiens
taaatgggacaccag

SEQ ID NO: 883137 - DNA, 15 bp, Homo sapiens
gtaaatgggacacca

SEQ ID NO: 883138 - DNA, 15 bp, Homo sapiens
agtaaatgggacacc

SEQ ID NO: 883139 - DNA, 15 bp, Homo sapiens
gagtaaatgggacac

SEQ ID NO: 883140 - DNA, 15 bp, Homo sapiens
agagtaaatgggaca

SEQ ID NO: 883141 - DNA, 15 bp, Homo sapiens
gagagtaaatgggac

SEQ ID NO: 883142 - DNA, 15 bp, Homo sapiens
tgagagtaaatggga

SEQ ID NO: 883143 - DNA, 15 bp, Homo sapiens
ttgagagtaaatggg

SEQ ID NO: 883144 - DNA, 15 bp, Homo sapiens
gttgagagtaaatgg

SEQ ID NO: 883145 - DNA, 15 bp, Homo sapiens
ggttgagagtaaatg

SEQ ID NO: 883146 - DNA, 15 bp, Homo sapiens
aggttgagagtaaat

SEQ ID NO: 883147 - DNA, 15 bp, Homo sapiens
gaggttgagagtaaa

SEQ ID NO: 883148 - DNA, 15 bp, Homo sapiens
agaggttgagagtaa

SEQ ID NO: 883149 - DNA, 15 bp, Homo sapiens
gagaggttgagagta

SEQ ID NO: 883150 - DNA, 15 bp, Homo sapiens
ggagaggttgagagt

SEQ ID NO: 883151 - DNA, 15 bp, Homo sapiens
tggagaggttgagag

SEQ ID NO: 883152 - DNA, 15 bp, Homo sapiens
ctggagaggttgaga

SEQ ID NO: 883153 - DNA, 15 bp, Homo sapiens
actggagaggttgag

SEQ ID NO: 883154 - DNA, 15 bp, Homo sapiens
cactggagaggttga

SEQ ID NO: 883155 - DNA, 15 bp, Homo sapiens
acactggagaggttg

SEQ ID NO: 883156 - DNA, 15 bp, Homo sapiens
gacactggagaggtt

SEQ ID NO: 883157 - DNA, 15 bp, Homo sapiens
ggacactggagaggt

SEQ ID NO: 883158 - DNA, 15 bp, Homo sapiens
aggacactggagagg

SEQ ID NO: 883159 - DNA, 15 bp, Homo sapiens
caggacactggagag

SEQ ID NO: 883160 - DNA, 15 bp, Homo sapiens
ccaggacactggaga

SEQ ID NO: 883161 - DNA, 15 bp, Homo sapiens
accaggacactggag

SEQ ID NO: 883162 - DNA, 15 bp, Homo sapiens
caccaggacactgga

SEQ ID NO: 883163 - DNA, 15 bp, Homo sapiens
acaccaggacactgg

SEQ ID NO: 883164 - DNA, 15 bp, Homo sapiens
gacaccaggacactg

SEQ ID NO: 883165 - DNA, 15 bp, Homo sapiens
ggacaccaggacact

SEQ ID NO: 883166 - DNA, 15 bp, Homo sapiens
gggacaccaggacac

SEQ ID NO: 883167 - DNA, 15 bp, Homo sapiens
cgggacaccaggaca

SEQ ID NO: 883168 - DNA, 15 bp, Homo sapiens
acgggacaccaggac

SEQ ID NO: 883169 - DNA, 15 bp, Homo sapiens
gacgggacaccagga

SEQ ID NO: 883170 - DNA, 15 bp, Homo sapiens
agacgggacaccagg

SEQ ID NO: 883171 - DNA, 15 bp, Homo sapiens
tagacgggacaccag

SEQ ID NO: 883172 - DNA, 15 bp, Homo sapiens
gtagacgggacacca

SEQ ID NO: 883173 - DNA, 15 bp, Homo sapiens
tgtagacgggacacc

SEQ ID NO: 883174 - DNA, 15 bp, Homo sapiens
gtgtagacgggacac

SEQ ID NO: 883175 - DNA, 15 bp, Homo sapiens
agtgtagacgggaca

SEQ ID NO: 883176 - DNA, 15 bp, Homo sapiens
gagtgtagacgggac

SEQ ID NO: 883177 - DNA, 15 bp, Homo sapiens
tgagtgtagacggga

SEQ ID NO: 883178 - DNA, 15 bp, Homo sapiens
ctgagtgtagacggg

SEQ ID NO: 883179 - DNA, 15 bp, Homo sapiens
gctgagtgtagacgg

SEQ ID NO: 883180 - DNA, 15 bp, Homo sapiens
ggctgagtgtagacg

SEQ ID NO: 883181 - DNA, 15 bp, Homo sapiens
aaggagactggagag

SEQ ID NO: 883182 - DNA, 15 bp, Homo sapiens
caaggagactggaga

SEQ ID NO: 883183 - DNA, 15 bp, Homo sapiens
acaaggagactggag

SEQ ID NO: 883184 - DNA, 15 bp, Homo sapiens
cacaaggagactgga

SEQ ID NO: 883185 - DNA, 15 bp, Homo sapiens
acacaaggagactgg

SEQ ID NO: 883186 - DNA, 15 bp, Homo sapiens
aacacaaggagactg

SEQ ID NO: 883187 - DNA, 15 bp, Homo sapiens
gaacacaaggagact

SEQ ID NO: 883188 - DNA, 15 bp, Homo sapiens
agaacacaaggagac

SEQ ID NO: 883189 - DNA, 15 bp, Homo sapiens
cagaacacaaggaga

SEQ ID NO: 883190 - DNA, 15 bp, Homo sapiens
acagaacacaaggag

SEQ ID NO: 883191 - DNA, 15 bp, Homo sapiens
gacagaacacaagga

SEQ ID NO: 883192 - DNA, 15 bp, Homo sapiens
agacagaacacaagg

SEQ ID NO: 883193 - DNA, 15 bp, Homo sapiens
tagacagaacacaag

SEQ ID NO: 883194 - DNA, 15 bp, Homo sapiens
gtagacagaacacaa

SEQ ID NO: 883195 - DNA, 15 bp, Homo sapiens
ggtagacagaacaca

SEQ ID NO: 883196 - DNA, 15 bp, Homo sapiens
gggtagacagaacac

SEQ ID NO: 883197 - DNA, 15 bp, Homo sapiens
agggtagacagaaca

SEQ ID NO: 883198 - DNA, 15 bp, Homo sapiens
gagggtagacagaac

SEQ ID NO: 883199 - DNA, 15 bp, Homo sapiens
ggagggtagacagaa

SEQ ID NO: 883200 - DNA, 15 bp, Homo sapiens
tggagggtagacaga

SEQ ID NO: 883201 - DNA, 15 bp, Homo sapiens
gtggagggtagacag

SEQ ID NO: 883202 - DNA, 15 bp, Homo sapiens
ggtggagggtagaca

SEQ ID NO: 883203 - DNA, 15 bp, Homo sapiens
aggtggagggtagac

SEQ ID NO: 883204 - DNA, 15 bp, Homo sapiens
gaggtggagggtaga

SEQ ID NO: 883205 - DNA, 15 bp, Homo sapiens
agaggtggagggtag

SEQ ID NO: 883206 - DNA, 15 bp, Homo sapiens
gagaggtggagggta

SEQ ID NO: 883207 - DNA, 15 bp, Homo sapiens
ggagaggtggagggt

SEQ ID NO: 883208 - DNA, 15 bp, Homo sapiens
tggagaggtggaggg

SEQ ID NO: 883209 - DNA, 15 bp, Homo sapiens
ctggagaggtggagg

SEQ ID NO: 883210 - DNA, 15 bp, Homo sapiens
actggagaggtggag

SEQ ID NO: 883211 - DNA, 15 bp, Homo sapiens
gactggagaggtgga

SEQ ID NO: 883212 - DNA, 15 bp, Homo sapiens
agactggagaggtgg

SEQ ID NO: 883213 - DNA, 15 bp, Homo sapiens
gagactggagaggtg

SEQ ID NO: 883214 - DNA, 15 bp, Homo sapiens
ggagactggagaggt

SEQ ID NO: 883215 - DNA, 15 bp, Homo sapiens
agggacaccaggaga

SEQ ID NO: 883216 - DNA, 15 bp, Homo sapiens
aagggacaccaggag

SEQ ID NO: 883217 - DNA, 15 bp, Homo sapiens
aaagggacaccagga

SEQ ID NO: 883218 - DNA, 15 bp, Homo sapiens
taaagggacaccagg

SEQ ID NO: 883219 - DNA, 15 bp, Homo sapiens
ttaaagggacaccag

SEQ ID NO: 883220 - DNA, 15 bp, Homo sapiens
gttaaagggacacca

SEQ ID NO: 883221 - DNA, 15 bp, Homo sapiens
ggttaaagggacacc

SEQ ID NO: 883222 - DNA, 15 bp, Homo sapiens
gggttaaagggacac

SEQ ID NO: 883223 - DNA, 15 bp, Homo sapiens
agggttaaagggaca

SEQ ID NO: 883224 - DNA, 15 bp, Homo sapiens
gagggttaaagggac

SEQ ID NO: 883225 - DNA, 15 bp, Homo sapiens
tgagggttaaaggga

SEQ ID NO: 883226 - DNA, 15 bp, Homo sapiens
ctgagggttaaaggg

SEQ ID NO: 883227 - DNA, 15 bp, Homo sapiens
gctgagggttaaagg

SEQ ID NO: 883228 - DNA, 15 bp, Homo sapiens
ggctgagggttaaag

SEQ ID NO: 883229 - DNA, 15 bp, Homo sapiens
aggctgagggttaaa

SEQ ID NO: 883230 - DNA, 15 bp, Homo sapiens
aaggctgagggttaa

SEQ ID NO: 883231 - DNA, 15 bp, Homo sapiens
aaaggctgagggtta

SEQ ID NO: 883232 - DNA, 15 bp, Homo sapiens
gaaaggctgagggtt

SEQ ID NO: 883233 - DNA, 15 bp, Homo sapiens
cgaaaggctgagggt

SEQ ID NO: 883234 - DNA, 15 bp, Homo sapiens
ccgaaaggctgaggg

SEQ ID NO: 883235 - DNA, 15 bp, Homo sapiens
accgaaaggctgagg

SEQ ID NO: 883236 - DNA, 15 bp, Homo sapiens
caccgaaaggctgag

SEQ ID NO: 883237 - DNA, 15 bp, Homo sapiens
gcaccgaaaggctga

SEQ ID NO: 883238 - DNA, 15 bp, Homo sapiens
ggcaccgaaaggctg

SEQ ID NO: 883239 - DNA, 15 bp, Homo sapiens
gggcaccgaaaggct

SEQ ID NO: 883240 - DNA, 15 bp, Homo sapiens
agggcaccgaaaggc

SEQ ID NO: 883241 - DNA, 15 bp, Homo sapiens
cagggcaccgaaagg

SEQ ID NO: 883242 - DNA, 15 bp, Homo sapiens
ccagggcaccgaaag

SEQ ID NO: 883243 - DNA, 15 bp, Homo sapiens
accagggcaccgaaa

SEQ ID NO: 883244 - DNA, 15 bp, Homo sapiens
taccagggcaccgaa

SEQ ID NO: 883245 - DNA, 15 bp, Homo sapiens
ataccagggcaccga

SEQ ID NO: 883246 - DNA, 15 bp, Homo sapiens
aataccagggcaccg

SEQ ID NO: 883247 - DNA, 15 bp, Homo sapiens
caataccagggcacc

SEQ ID NO: 883248 - DNA, 15 bp, Homo sapiens
acaataccagggcac

SEQ ID NO: 883249 - DNA, 15 bp, Homo sapiens
cacaataccagggca

SEQ ID NO: 883250 - DNA, 15 bp, Homo sapiens
acacaataccagggc

SEQ ID NO: 883251 - DNA, 15 bp, Homo sapiens
gacacaataccaggg

SEQ ID NO: 883252 - DNA, 15 bp, Homo sapiens
agacacaataccagg

SEQ ID NO: 883253 - DNA, 15 bp, Homo sapiens
tagacacaataccag

SEQ ID NO: 883254 - DNA, 15 bp, Homo sapiens
gtagacacaatacca

SEQ ID NO: 883255 - DNA, 15 bp, Homo sapiens
tgtagacacaatacc

SEQ ID NO: 883256 - DNA, 15 bp, Homo sapiens
gtgtagacacaatac

SEQ ID NO: 883257 - DNA, 15 bp, Homo sapiens
agtgtagacacaata

SEQ ID NO: 883258 - DNA, 15 bp, Homo sapiens
gagtgtagacacaat

SEQ ID NO: 883259 - DNA, 15 bp, Homo sapiens
tgagtgtagacacaa

SEQ ID NO: 883260 - DNA, 15 bp, Homo sapiens
ctgagtgtagacaca

SEQ ID NO: 883261 - DNA, 15 bp, Homo sapiens
gctgagtgtagacac

SEQ ID NO: 883262 - DNA, 15 bp, Homo sapiens
aggacaccaggagac

SEQ ID NO: 883263 - DNA, 15 bp, Homo sapiens
caggacaccaggaga

SEQ ID NO: 883264 - DNA, 15 bp, Homo sapiens
acaggacaccaggag

SEQ ID NO: 883265 - DNA, 15 bp, Homo sapiens
aacaggacaccagga

SEQ ID NO: 883266 - DNA, 15 bp, Homo sapiens
aaacaggacaccagg

SEQ ID NO: 883267 - DNA, 15 bp, Homo sapiens
taaacaggacaccag

SEQ ID NO: 883268 - DNA, 15 bp, Homo sapiens
gtaaacaggacacca

SEQ ID NO: 883269 - DNA, 15 bp, Homo sapiens
ggtaaacaggacacc

SEQ ID NO: 883270 - DNA, 15 bp, Homo sapiens
gggtaaacaggacac

SEQ ID NO: 883271 - DNA, 15 bp, Homo sapiens
agggtaaacaggaca

SEQ ID NO: 883272 - DNA, 15 bp, Homo sapiens
gagggtaaacaggac

SEQ ID NO: 883273 - DNA, 15 bp, Homo sapiens
agagggtaaacagga

SEQ ID NO: 883274 - DNA, 15 bp, Homo sapiens
tagagggtaaacagg

SEQ ID NO: 883275 - DNA, 15 bp, Homo sapiens
gtagagggtaaacag

SEQ ID NO: 883276 - DNA, 15 bp, Homo sapiens
ggtagagggtaaaca

SEQ ID NO: 883277 - DNA, 15 bp, Homo sapiens
aggtagagggtaaac

SEQ ID NO: 883278 - DNA, 15 bp, Homo sapiens
gaggtagagggtaaa

SEQ ID NO: 883279 - DNA, 15 bp, Homo sapiens
agaggtagagggtaa

SEQ ID NO: 883280 - DNA, 15 bp, Homo sapiens
gagaggtagagggta

SEQ ID NO: 883281 - DNA, 15 bp, Homo sapiens
ggagaggtagagggt

SEQ ID NO: 883282 - DNA, 15 bp, Homo sapiens
tggagaggtagaggg

SEQ ID NO: 883283 - DNA, 15 bp, Homo sapiens
ctggagaggtagagg

SEQ ID NO: 883284 - DNA, 15 bp, Homo sapiens
actggagaggtagag

SEQ ID NO: 883285 - DNA, 15 bp, Homo sapiens
gactggagaggtaga

SEQ ID NO: 883286 - DNA, 15 bp, Homo sapiens
agactggagaggtag

SEQ ID NO: 883287 - DNA, 15 bp, Homo sapiens
gagactggagaggta

SEQ ID NO: 883288 - DNA, 15 bp, Homo sapiens
tcaccaggagactgg

SEQ ID NO: 883289 - DNA, 15 bp, Homo sapiens
gtcaccaggagactg

SEQ ID NO: 883290 - DNA, 15 bp, Homo sapiens
ggtcaccaggagact

SEQ ID NO: 883291 - DNA, 15 bp, Homo sapiens
aggtcaccaggagac

SEQ ID NO: 883292 - DNA, 15 bp, Homo sapiens
caggtcaccaggaga

SEQ ID NO: 883293 - DNA, 15 bp, Homo sapiens
acaggtcaccaggag

SEQ ID NO: 883294 - DNA, 15 bp, Homo sapiens
gacaggtcaccagga

SEQ ID NO: 883295 - DNA, 15 bp, Homo sapiens
agacaggtcaccagg

SEQ ID NO: 883296 - DNA, 15 bp, Homo sapiens
tagacaggtcaccag

SEQ ID NO: 883297 - DNA, 15 bp, Homo sapiens
gtagacaggtcacca

SEQ ID NO: 883298 - DNA, 15 bp, Homo sapiens
ggtagacaggtcacc

SEQ ID NO: 883299 - DNA, 15 bp, Homo sapiens
gggtagacaggtcac

SEQ ID NO: 883300 - DNA, 15 bp, Homo sapiens
agggtagacaggtca

SEQ ID NO: 883301 - DNA, 15 bp, Homo sapiens
gagggtagacaggtc

SEQ ID NO: 883302 - DNA, 15 bp, Homo sapiens
tgagggtagacaggt

SEQ ID NO: 883303 - DNA, 15 bp, Homo sapiens
ttgagggtagacagg

SEQ ID NO: 883304 - DNA, 15 bp, Homo sapiens
gttgagggtagacag

SEQ ID NO: 883305 - DNA, 15 bp, Homo sapiens
ggttgagggtagaca

SEQ ID NO: 883306 - DNA, 15 bp, Homo sapiens
aggttgagggtagac

SEQ ID NO: 883307 - DNA, 15 bp, Homo sapiens
gaggttgagggtaga

SEQ ID NO: 883308 - DNA, 15 bp, Homo sapiens
agaggttgagggtag

SEQ ID NO: 883309 - DNA, 15 bp, Homo sapiens
gagaggttgagggta

SEQ ID NO: 883310 - DNA, 15 bp, Homo sapiens
ggagaggttgagggt

SEQ ID NO: 883311 - DNA, 15 bp, Homo sapiens
tggagaggttgaggg

SEQ ID NO: 883312 - DNA, 15 bp, Homo sapiens
ctggagaggttgagg

SEQ ID NO: 883313 - DNA, 15 bp, Homo sapiens
gactggagaggttga

SEQ ID NO: 883314 - DNA, 15 bp, Homo sapiens
agactggagaggttg

SEQ ID NO: 883315 - DNA, 15 bp, Homo sapiens
gagactggagaggtt

SEQ ID NO: 883316 - DNA, 15 bp, Homo sapiens
gacaggacaccagga

SEQ ID NO: 883317 - DNA, 15 bp, Homo sapiens
agacaggacaccagg

SEQ ID NO: 883318 - DNA, 15 bp, Homo sapiens
tagacaggacaccag

SEQ ID NO: 883319 - DNA, 15 bp, Homo sapiens
gtagacaggacacca

SEQ ID NO: 883320 - DNA, 15 bp, Homo sapiens
agtagacaggacacc

SEQ ID NO: 883321 - DNA, 15 bp, Homo sapiens
gagtagacaggacac

SEQ ID NO: 883322 - DNA, 15 bp, Homo sapiens
agagtagacaggaca

SEQ ID NO: 883323 - DNA, 15 bp, Homo sapiens
gagagtagacaggac

SEQ ID NO: 883324 - DNA, 15 bp, Homo sapiens
ggagagtagacagga

SEQ ID NO: 883325 - DNA, 15 bp, Homo sapiens
cggagagtagacagg

SEQ ID NO: 883326 - DNA, 15 bp, Homo sapiens
gcggagagtagacag

SEQ ID NO: 883327 - DNA, 15 bp, Homo sapiens
ggcggagagtagaca

SEQ ID NO: 883328 - DNA, 15 bp, Homo sapiens
aggcggagagtagac

SEQ ID NO: 883329 - DNA, 15 bp, Homo sapiens
gaggcggagagtaga

SEQ ID NO: 883330 - DNA, 15 bp, Homo sapiens
agaggcggagagtag

SEQ ID NO: 883331 - DNA, 15 bp, Homo sapiens
gagaggcggagagta

SEQ ID NO: 883332 - DNA, 15 bp, Homo sapiens
ggagaggcggagagt

SEQ ID NO: 883333 - DNA, 15 bp, Homo sapiens
tggagaggcggagag

SEQ ID NO: 883334 - DNA, 15 bp, Homo sapiens
ctggagaggcggaga

SEQ ID NO: 883335 - DNA, 15 bp, Homo sapiens
actggagaggcggag

SEQ ID NO: 883336 - DNA, 15 bp, Homo sapiens
cactggagaggcgga

SEQ ID NO: 883337 - DNA, 15 bp, Homo sapiens
acactggagaggcgg

SEQ ID NO: 883338 - DNA, 15 bp, Homo sapiens
gacactggagaggcg

SEQ ID NO: 883339 - DNA, 15 bp, Homo sapiens
ggacactggagaggc

SEQ ID NO: 883340 - DNA, 15 bp, Homo sapiens
aggacaccaggacac

SEQ ID NO: 883341 - DNA, 15 bp, Homo sapiens
caggacaccaggaca

SEQ ID NO: 883342 - DNA, 15 bp, Homo sapiens
acaggacaccaggac

SEQ ID NO: 883343 - DNA, 15 bp, Homo sapiens
tgtagacaggacacc

SEQ ID NO: 883344 - DNA, 15 bp, Homo sapiens
gtgtagacaggacac

SEQ ID NO: 883345 - DNA, 15 bp, Homo sapiens
agtgtagacaggaca

SEQ ID NO: 883346 - DNA, 15 bp, Homo sapiens
gagtgtagacaggac

SEQ ID NO: 883347 - DNA, 15 bp, Homo sapiens
tgagtgtagacagga

SEQ ID NO: 883348 - DNA, 15 bp, Homo sapiens
ctgagtgtagacagg

SEQ ID NO: 883349 - DNA, 15 bp, Homo sapiens
atggagaggctgagt

SEQ ID NO: 883350 - DNA, 15 bp, Homo sapiens
aatggagaggctgag

SEQ ID NO: 883351 - DNA, 15 bp, Homo sapiens
gaatggagaggctga

SEQ ID NO: 883352 - DNA, 15 bp, Homo sapiens
agaatggagaggctg

SEQ ID NO: 883353 - DNA, 15 bp, Homo sapiens
gagaatggagaggct

SEQ ID NO: 883354 - DNA, 15 bp, Homo sapiens
ggagaatggagaggc

SEQ ID NO: 883355 - DNA, 15 bp, Homo sapiens
aggagaatggagagg

SEQ ID NO: 883356 - DNA, 15 bp, Homo sapiens
caggagaatggagag

SEQ ID NO: 883357 - DNA, 15 bp, Homo sapiens
ccaggagaatggaga

SEQ ID NO: 883358 - DNA, 15 bp, Homo sapiens
accaggagaatggag

SEQ ID NO: 883359 - DNA, 15 bp, Homo sapiens
caccaggagaatgga

SEQ ID NO: 883360 - DNA, 15 bp, Homo sapiens
acaccaggagaatgg

SEQ ID NO: 883361 - DNA, 15 bp, Homo sapiens
gacaccaggagaatg

SEQ ID NO: 883362 - DNA, 15 bp, Homo sapiens
ggacaccaggagaat

SEQ ID NO: 883363 - DNA, 15 bp, Homo sapiens
aggacaccaggagaa

SEQ ID NO: 883364 - DNA, 15 bp, Homo sapiens
cactggagaggtaga

SEQ ID NO: 883365 - DNA, 15 bp, Homo sapiens
acactggagaggtag

SEQ ID NO: 883366 - DNA, 15 bp, Homo sapiens
gacactggagaggta

SEQ ID NO: 883367 - DNA, 15 bp, Homo sapiens
agacaccaggacact

SEQ ID NO: 883368 - DNA, 15 bp, Homo sapiens
aagacaccaggacac

SEQ ID NO: 883369 - DNA, 15 bp, Homo sapiens
caagacaccaggaca

SEQ ID NO: 883370 - DNA, 15 bp, Homo sapiens
acaagacaccaggac

SEQ ID NO: 883371 - DNA, 15 bp, Homo sapiens
gacaagacaccagga

SEQ ID NO: 883372 - DNA, 15 bp, Homo sapiens
agacaagacaccagg

SEQ ID NO: 883373 - DNA, 15 bp, Homo sapiens
tagacaagacaccag

SEQ ID NO: 883374 - DNA, 15 bp, Homo sapiens
gtagacaagacacca

SEQ ID NO: 883375 - DNA, 15 bp, Homo sapiens
ggtagacaagacacc

SEQ ID NO: 883376 - DNA, 15 bp, Homo sapiens
gggtagacaagacac

SEQ ID NO: 883377 - DNA, 15 bp, Homo sapiens
agggtagacaagaca

SEQ ID NO: 883378 - DNA, 15 bp, Homo sapiens
gagggtagacaagac

SEQ ID NO: 883379 - DNA, 15 bp, Homo sapiens
tgagggtagacaaga

SEQ ID NO: 883380 - DNA, 15 bp, Homo sapiens
ttgagggtagacaag

SEQ ID NO: 883381 - DNA, 15 bp, Homo sapiens
gttgagggtagacaa

SEQ ID NO: 883382 - DNA, 15 bp, Homo sapiens
tcaggagactggaga

SEQ ID NO: 883383 - DNA, 15 bp, Homo sapiens
atcaggagactggag

SEQ ID NO: 883384 - DNA, 15 bp, Homo sapiens
catcaggagactgga

SEQ ID NO: 883385 - DNA, 15 bp, Homo sapiens
acatcaggagactgg

SEQ ID NO: 883386 - DNA, 15 bp, Homo sapiens
gacatcaggagactg

SEQ ID NO: 883387 - DNA, 15 bp, Homo sapiens
ggacatcaggagact

SEQ ID NO: 883388 - DNA, 15 bp, Homo sapiens
aggacatcaggagac

SEQ ID NO: 883389 - DNA, 15 bp, Homo sapiens
caggacatcaggaga

SEQ ID NO: 883390 - DNA, 15 bp, Homo sapiens
acaggacatcaggag

SEQ ID NO: 883391 - DNA, 15 bp, Homo sapiens
gacaggacatcagga

SEQ ID NO: 883392 - DNA, 15 bp, Homo sapiens
agacaggacatcagg

SEQ ID NO: 883393 - DNA, 15 bp, Homo sapiens
tagacaggacatcag

SEQ ID NO: 883394 - DNA, 15 bp, Homo sapiens
gtagacaggacatca

SEQ ID NO: 883395 - DNA, 15 bp, Homo sapiens
tgtagacaggacatc

SEQ ID NO: 883396 - DNA, 15 bp, Homo sapiens
gtgtagacaggacat

SEQ ID NO: 883397 - DNA, 15 bp, Homo sapiens
ggtagacaggacacc

SEQ ID NO: 883398 - DNA, 15 bp, Homo sapiens
gggtagacaggacac

SEQ ID NO: 883399 - DNA, 15 bp, Homo sapiens
agggtagacaggaca

SEQ ID NO: 883400 - DNA, 15 bp, Homo sapiens
gagggtagacaggac

SEQ ID NO: 883401 - DNA, 15 bp, Homo sapiens
ggagggtagacagga

SEQ ID NO: 883402 - DNA, 15 bp, Homo sapiens
tggagggtagacagg

SEQ ID NO: 883403 - DNA, 15 bp, Homo sapiens
atagacaggacacca

SEQ ID NO: 883404 - DNA, 15 bp, Homo sapiens
gatagacaggacacc

SEQ ID NO: 883405 - DNA, 15 bp, Homo sapiens
ggatagacaggacac

SEQ ID NO: 883406 - DNA, 15 bp, Homo sapiens
aggatagacaggaca

SEQ ID NO: 883407 - DNA, 15 bp, Homo sapiens
gaggatagacaggac

SEQ ID NO: 883408 - DNA, 15 bp, Homo sapiens
tgaggatagacagga

SEQ ID NO: 883409 - DNA, 15 bp, Homo sapiens
ttgaggatagacagg

SEQ ID NO: 883410 - DNA, 15 bp, Homo sapiens
gttgaggatagacag

SEQ ID NO: 883411 - DNA, 15 bp, Homo sapiens
ggttgaggatagaca

SEQ ID NO: 883412 - DNA, 15 bp, Homo sapiens
aggttgaggatagac

SEQ ID NO: 883413 - DNA, 15 bp, Homo sapiens
gaggttgaggataga

SEQ ID NO: 883414 - DNA, 15 bp, Homo sapiens
agaggttgaggatag

SEQ ID NO: 883415 - DNA, 15 bp, Homo sapiens
gagaggttgaggata

SEQ ID NO: 883416 - DNA, 15 bp, Homo sapiens
ggagaggttgaggat

SEQ ID NO: 883417 - DNA, 15 bp, Homo sapiens
tggagaggttgagga

SEQ ID NO: 883418 - DNA, 15 bp, Homo sapiens
gatgggacaccagga

SEQ ID NO: 883419 - DNA, 15 bp, Homo sapiens
agatgggacaccagg

SEQ ID NO: 883420 - DNA, 15 bp, Homo sapiens
tagatgggacaccag

SEQ ID NO: 883421 - DNA, 15 bp, Homo sapiens
gtagatgggacacca

SEQ ID NO: 883422 - DNA, 15 bp, Homo sapiens
tgtagatgggacacc

SEQ ID NO: 883423 - DNA, 15 bp, Homo sapiens
gtgtagatgggacac

SEQ ID NO: 883424 - DNA, 15 bp, Homo sapiens
agtgtagatgggaca

SEQ ID NO: 883425 - DNA, 15 bp, Homo sapiens
gagtgtagatgggac

SEQ ID NO: 883426 - DNA, 15 bp, Homo sapiens
tgagtgtagatggga

SEQ ID NO: 883427 - DNA, 15 bp, Homo sapiens
ctgagtgtagatggg

SEQ ID NO: 883428 - DNA, 15 bp, Homo sapiens
gctgagtgtagatgg

SEQ ID NO: 883429 - DNA, 15 bp, Homo sapiens
ggctgagtgtagatg

SEQ ID NO: 883430 - DNA, 15 bp, Homo sapiens
aggctgagtgtagat

SEQ ID NO: 883431 - DNA, 15 bp, Homo sapiens
aaggctgagtgtaga

SEQ ID NO: 883432 - DNA, 15 bp, Homo sapiens
aaaggctgagtgtag

SEQ ID NO: 883433 - DNA, 15 bp, Homo sapiens
gaaaggctgagtgta

SEQ ID NO: 883434 - DNA, 15 bp, Homo sapiens
agaaaggctgagtgt

SEQ ID NO: 883435 - DNA, 15 bp, Homo sapiens
tagaaaggctgagtg

SEQ ID NO: 883436 - DNA, 15 bp, Homo sapiens
ctagaaaggctgagt

SEQ ID NO: 883437 - DNA, 15 bp, Homo sapiens
actagaaaggctgag

SEQ ID NO: 883438 - DNA, 15 bp, Homo sapiens
cactagaaaggctga

SEQ ID NO: 883439 - DNA, 15 bp, Homo sapiens
acactagaaaggctg

SEQ ID NO: 883440 - DNA, 15 bp, Homo sapiens
gacactagaaaggct

SEQ ID NO: 883441 - DNA, 15 bp, Homo sapiens
ggacactagaaaggc

SEQ ID NO: 883442 - DNA, 15 bp, Homo sapiens
aggacactagaaagg

SEQ ID NO: 883443 - DNA, 15 bp, Homo sapiens
caggacactagaaag

SEQ ID NO: 883444 - DNA, 15 bp, Homo sapiens
ccaggacactagaaa

SEQ ID NO: 883445 - DNA, 15 bp, Homo sapiens
accaggacactagaa

SEQ ID NO: 883446 - DNA, 15 bp, Homo sapiens
caccaggacactaga

SEQ ID NO: 883447 - DNA, 15 bp, Homo sapiens
acaccaggacactag

SEQ ID NO: 883448 - DNA, 15 bp, Homo sapiens
gacaccaggacacta

SEQ ID NO: 883449 - DNA, 15 bp, Homo sapiens
ggtagacgggacacc

SEQ ID NO: 883450 - DNA, 15 bp, Homo sapiens
gggtagacgggacac

SEQ ID NO: 883451 - DNA, 15 bp, Homo sapiens
agggtagacgggaca

SEQ ID NO: 883452 - DNA, 15 bp, Homo sapiens
gagggtagacgggac

SEQ ID NO: 883453 - DNA, 15 bp, Homo sapiens
ggagggtagacggga

SEQ ID NO: 883454 - DNA, 15 bp, Homo sapiens
tggagggtagacggg

SEQ ID NO: 883455 - DNA, 15 bp, Homo sapiens
gtggagggtagacgg

SEQ ID NO: 883456 - DNA, 15 bp, Homo sapiens
ggtggagggtagacg

SEQ ID NO: 883457 - DNA, 15 bp, Homo sapiens
aagaggtggagggta

SEQ ID NO: 883458 - DNA, 15 bp, Homo sapiens
gaagaggtggagggt

SEQ ID NO: 883459 - DNA, 15 bp, Homo sapiens
tgaagaggtggaggg

SEQ ID NO: 883460 - DNA, 15 bp, Homo sapiens
ctgaagaggtggagg

SEQ ID NO: 883461 - DNA, 15 bp, Homo sapiens
actgaagaggtggag

SEQ ID NO: 883462 - DNA, 15 bp, Homo sapiens
gactgaagaggtgga

SEQ ID NO: 883463 - DNA, 15 bp, Homo sapiens
agactgaagaggtgg

SEQ ID NO: 883464 - DNA, 15 bp, Homo sapiens
gagactgaagaggtg

SEQ ID NO: 883465 - DNA, 15 bp, Homo sapiens
ggagactgaagaggt

SEQ ID NO: 883466 - DNA, 15 bp, Homo sapiens
aggagactgaagagg

SEQ ID NO: 883467 - DNA, 15 bp, Homo sapiens
caggagactgaagag

SEQ ID NO: 883468 - DNA, 15 bp, Homo sapiens
ccaggagactgaaga

SEQ ID NO: 883469 - DNA, 15 bp, Homo sapiens
accaggagactgaag

SEQ ID NO: 883470 - DNA, 15 bp, Homo sapiens
taccaggagactgaa

SEQ ID NO: 883471 - DNA, 15 bp, Homo sapiens
ataccaggagactga

SEQ ID NO: 883472 - DNA, 15 bp, Homo sapiens
gataccaggagactg

SEQ ID NO: 883473 - DNA, 15 bp, Homo sapiens
ggataccaggagact

SEQ ID NO: 883474 - DNA, 15 bp, Homo sapiens
aggataccaggagac

SEQ ID NO: 883475 - DNA, 15 bp, Homo sapiens
caggataccaggaga

SEQ ID NO: 883476 - DNA, 15 bp, Homo sapiens
acaggataccaggag

SEQ ID NO: 883477 - DNA, 15 bp, Homo sapiens
gacaggataccagga

SEQ ID NO: 883478 - DNA, 15 bp, Homo sapiens
agacaggataccagg

SEQ ID NO: 883479 - DNA, 15 bp, Homo sapiens
tagacaggataccag

SEQ ID NO: 883480 - DNA, 15 bp, Homo sapiens
gtagacaggatacca

SEQ ID NO: 883481 - DNA, 15 bp, Homo sapiens
ggtagacaggatacc

SEQ ID NO: 883482 - DNA, 15 bp, Homo sapiens
gggtagacaggatac

SEQ ID NO: 883483 - DNA, 15 bp, Homo sapiens
agggtagacaggata

SEQ ID NO: 883484 - DNA, 15 bp, Homo sapiens
gagggtagacaggat

SEQ ID NO: 883485 - DNA, 15 bp, Homo sapiens
aagtgtagacaggac

SEQ ID NO: 883486 - DNA, 15 bp, Homo sapiens
taagtgtagacagga

SEQ ID NO: 883487 - DNA, 15 bp, Homo sapiens
ttaagtgtagacagg

SEQ ID NO: 883488 - DNA, 15 bp, Homo sapiens
gttaagtgtagacag

SEQ ID NO: 883489 - DNA, 15 bp, Homo sapiens
ggttaagtgtagaca

SEQ ID NO: 883490 - DNA, 15 bp, Homo sapiens
aggttaagtgtagac

SEQ ID NO: 883491 - DNA, 15 bp, Homo sapiens
gaggttaagtgtaga

SEQ ID NO: 883492 - DNA, 15 bp, Homo sapiens
agaggttaagtgtag

SEQ ID NO: 883493 - DNA, 15 bp, Homo sapiens
gagaggttaagtgta

SEQ ID NO: 883494 - DNA, 15 bp, Homo sapiens
ggagaggttaagtgt

SEQ ID NO: 883495 - DNA, 15 bp, Homo sapiens
tggagaggttaagtg

SEQ ID NO: 883496 - DNA, 15 bp, Homo sapiens
ctggagaggttaagt

SEQ ID NO: 883497 - DNA, 15 bp, Homo sapiens
actggagaggttaag

SEQ ID NO: 883498 - DNA, 15 bp, Homo sapiens
gactggagaggttaa

SEQ ID NO: 883499 - DNA, 15 bp, Homo sapiens
agactggagaggtta

SEQ ID NO: 883500 - DNA, 15 bp, Homo sapiens
gggttgaggatagac

SEQ ID NO: 883501 - DNA, 15 bp, Homo sapiens
ggggttgaggataga

SEQ ID NO: 883502 - DNA, 15 bp, Homo sapiens
aggggttgaggatag

SEQ ID NO: 883503 - DNA, 15 bp, Homo sapiens
aaggggttgaggata

SEQ ID NO: 883504 - DNA, 15 bp, Homo sapiens
gaaggggttgaggat

SEQ ID NO: 883505 - DNA, 15 bp, Homo sapiens
tgaaggggttgagga

SEQ ID NO: 883506 - DNA, 15 bp, Homo sapiens
ctgaaggggttgagg

SEQ ID NO: 883507 - DNA, 15 bp, Homo sapiens
actgaaggggttgag

SEQ ID NO: 883508 - DNA, 15 bp, Homo sapiens
gactgaaggggttga

SEQ ID NO: 883509 - DNA, 15 bp, Homo sapiens
agactgaaggggttg

SEQ ID NO: 883510 - DNA, 15 bp, Homo sapiens
gagactgaaggggtt

SEQ ID NO: 883511 - DNA, 15 bp, Homo sapiens
ggagactgaaggggt

SEQ ID NO: 883512 - DNA, 15 bp, Homo sapiens
aggagactgaagggg

SEQ ID NO: 883513 - DNA, 15 bp, Homo sapiens
aaggagactgaaggg

SEQ ID NO: 883514 - DNA, 15 bp, Homo sapiens
caaggagactgaagg

SEQ ID NO: 883515 - DNA, 15 bp, Homo sapiens
acaaggagactgaag

SEQ ID NO: 883516 - DNA, 15 bp, Homo sapiens
aacaaggagactgaa

SEQ ID NO: 883517 - DNA, 15 bp, Homo sapiens
gaacaaggagactga

SEQ ID NO: 883518 - DNA, 15 bp, Homo sapiens
ggaacaaggagactg

SEQ ID NO: 883519 - DNA, 15 bp, Homo sapiens
gggaacaaggagact

SEQ ID NO: 883520 - DNA, 15 bp, Homo sapiens
agggaacaaggagac

SEQ ID NO: 883521 - DNA, 15 bp, Homo sapiens
cagggaacaaggaga

SEQ ID NO: 883522 - DNA, 15 bp, Homo sapiens
acagggaacaaggag

SEQ ID NO: 883523 - DNA, 15 bp, Homo sapiens
gacagggaacaagga

SEQ ID NO: 883524 - DNA, 15 bp, Homo sapiens
agacagggaacaagg

SEQ ID NO: 883525 - DNA, 15 bp, Homo sapiens
tagacagggaacaag

SEQ ID NO: 883526 - DNA, 15 bp, Homo sapiens
gtagacagggaacaa

SEQ ID NO: 883527 - DNA, 15 bp, Homo sapiens
ggtagacagggaaca

SEQ ID NO: 883528 - DNA, 15 bp, Homo sapiens
gggtagacagggaac

SEQ ID NO: 883529 - DNA, 15 bp, Homo sapiens
agggtagacagggaa

SEQ ID NO: 883530 - DNA, 15 bp, Homo sapiens
gagggtagacaggga

SEQ ID NO: 883531 - DNA, 15 bp, Homo sapiens
ggagggtagacaggg

SEQ ID NO: 883532 - DNA, 15 bp, Homo sapiens
ctggagggtagacag

SEQ ID NO: 883533 - DNA, 15 bp, Homo sapiens
actggagggtagaca

SEQ ID NO: 883534 - DNA, 15 bp, Homo sapiens
gactggagggtagac

SEQ ID NO: 883535 - DNA, 15 bp, Homo sapiens
agactggagggtaga

SEQ ID NO: 883536 - DNA, 15 bp, Homo sapiens
gagactggagggtag

SEQ ID NO: 883537 - DNA, 15 bp, Homo sapiens
ggagactggagggta

SEQ ID NO: 883538 - DNA, 15 bp, Homo sapiens
aggagactggagggt

SEQ ID NO: 883539 - DNA, 15 bp, Homo sapiens
caggagactggaggg

SEQ ID NO: 883540 - DNA, 15 bp, Homo sapiens
ccaggagactggagg

SEQ ID NO: 883541 - DNA, 15 bp, Homo sapiens
taggacaccaggaga

SEQ ID NO: 883542 - DNA, 15 bp, Homo sapiens
gtaggacaccaggag

SEQ ID NO: 883543 - DNA, 15 bp, Homo sapiens
agtaggacaccagga

SEQ ID NO: 883544 - DNA, 15 bp, Homo sapiens
gagtaggacaccagg

SEQ ID NO: 883545 - DNA, 15 bp, Homo sapiens
agagtaggacaccag

SEQ ID NO: 883546 - DNA, 15 bp, Homo sapiens
tagagtaggacacca

SEQ ID NO: 883547 - DNA, 15 bp, Homo sapiens
gtagagtaggacacc

SEQ ID NO: 883548 - DNA, 15 bp, Homo sapiens
ggtagagtaggacac

SEQ ID NO: 883549 - DNA, 15 bp, Homo sapiens
gggtagagtaggaca

SEQ ID NO: 883550 - DNA, 15 bp, Homo sapiens
agggtagagtaggac

SEQ ID NO: 883551 - DNA, 15 bp, Homo sapiens
gagggtagagtagga

SEQ ID NO: 883552 - DNA, 15 bp, Homo sapiens
tgagggtagagtagg

SEQ ID NO: 883553 - DNA, 15 bp, Homo sapiens
ttgagggtagagtag

SEQ ID NO: 883554 - DNA, 15 bp, Homo sapiens
gttgagggtagagta

SEQ ID NO: 883555 - DNA, 15 bp, Homo sapiens
ggttgagggtagagt

SEQ ID NO: 883556 - DNA, 15 bp, Homo sapiens
gggttgagggtagag

SEQ ID NO: 883557 - DNA, 15 bp, Homo sapiens
ggggttgagggtaga

SEQ ID NO: 883558 - DNA, 15 bp, Homo sapiens
aggggttgagggtag

SEQ ID NO: 883559 - DNA, 15 bp, Homo sapiens
taggggttgagggta

SEQ ID NO: 883560 - DNA, 15 bp, Homo sapiens
gtaggggttgagggt

SEQ ID NO: 883561 - DNA, 15 bp, Homo sapiens
ggtaggggttgaggg

SEQ ID NO: 883562 - DNA, 15 bp, Homo sapiens
tggtaggggttgagg

SEQ ID NO: 883563 - DNA, 15 bp, Homo sapiens
atggtaggggttgag

SEQ ID NO: 883564 - DNA, 15 bp, Homo sapiens
gatggtaggggttga

SEQ ID NO: 883565 - DNA, 15 bp, Homo sapiens
agatggtaggggttg

SEQ ID NO: 883566 - DNA, 15 bp, Homo sapiens
gagatggtaggggtt

SEQ ID NO: 883567 - DNA, 15 bp, Homo sapiens
agagatggtaggggt

SEQ ID NO: 883568 - DNA, 15 bp, Homo sapiens
aagagatggtagggg

SEQ ID NO: 883569 - DNA, 15 bp, Homo sapiens
caagagatggtaggg

SEQ ID NO: 883570 - DNA, 15 bp, Homo sapiens
ccaagagatggtagg

SEQ ID NO: 883571 - DNA, 15 bp, Homo sapiens
accaagagatggtag

SEQ ID NO: 883572 - DNA, 15 bp, Homo sapiens
caccaagagatggta

SEQ ID NO: 883573 - DNA, 15 bp, Homo sapiens
acaccaagagatggt

SEQ ID NO: 883574 - DNA, 15 bp, Homo sapiens
gacaccaagagatgg

SEQ ID NO: 883575 - DNA, 15 bp, Homo sapiens
ggacaccaagagatg

SEQ ID NO: 883576 - DNA, 15 bp, Homo sapiens
aggacaccaagagat

SEQ ID NO: 883577 - DNA, 15 bp, Homo sapiens
caggacaccaagaga

SEQ ID NO: 883578 - DNA, 15 bp, Homo sapiens
gcaggacaccaagag

SEQ ID NO: 883579 - DNA, 15 bp, Homo sapiens
ggcaggacaccaaga

SEQ ID NO: 883580 - DNA, 15 bp, Homo sapiens
aggcaggacaccaag

SEQ ID NO: 883581 - DNA, 15 bp, Homo sapiens
gaggcaggacaccaa

SEQ ID NO: 883582 - DNA, 15 bp, Homo sapiens
agaggcaggacacca

SEQ ID NO: 883583 - DNA, 15 bp, Homo sapiens
tagaggcaggacacc

SEQ ID NO: 883584 - DNA, 15 bp, Homo sapiens
gtagaggcaggacac

SEQ ID NO: 883585 - DNA, 15 bp, Homo sapiens
ggtagaggcaggaca

SEQ ID NO: 883586 - DNA, 15 bp, Homo sapiens
gggtagaggcaggac

SEQ ID NO: 883587 - DNA, 15 bp, Homo sapiens
agggtagaggcagga

SEQ ID NO: 883588 - DNA, 15 bp, Homo sapiens
gagggtagaggcagg

SEQ ID NO: 883589 - DNA, 15 bp, Homo sapiens
tgagggtagaggcag

SEQ ID NO: 883590 - DNA, 15 bp, Homo sapiens
ttgagggtagaggca

SEQ ID NO: 883591 - DNA, 15 bp, Homo sapiens
gttgagggtagaggc

SEQ ID NO: 883592 - DNA, 15 bp, Homo sapiens
agttgagggtagagg

SEQ ID NO: 883593 - DNA, 15 bp, Homo sapiens
cagttgagggtagag

SEQ ID NO: 883594 - DNA, 15 bp, Homo sapiens
gcagttgagggtaga

SEQ ID NO: 883595 - DNA, 15 bp, Homo sapiens
agcagttgagggtag

SEQ ID NO: 883596 - DNA, 15 bp, Homo sapiens
tagcagttgagggta

SEQ ID NO: 883597 - DNA, 15 bp, Homo sapiens
gtagcagttgagggt

SEQ ID NO: 883598 - DNA, 15 bp, Homo sapiens
ggtagcagttgaggg

SEQ ID NO: 883599 - DNA, 15 bp, Homo sapiens
tggtagcagttgagg

SEQ ID NO: 883600 - DNA, 15 bp, Homo sapiens
atggtagcagttgag

SEQ ID NO: 883601 - DNA, 15 bp, Homo sapiens
gatggtagcagttga

SEQ ID NO: 883602 - DNA, 15 bp, Homo sapiens
agatggtagcagttg

SEQ ID NO: 883603 - DNA, 15 bp, Homo sapiens
tagatggtagcagtt

SEQ ID NO: 883604 - DNA, 15 bp, Homo sapiens
atagatggtagcagt

SEQ ID NO: 883605 - DNA, 15 bp, Homo sapiens
aatagatggtagcag

SEQ ID NO: 883606 - DNA, 15 bp, Homo sapiens
gaatagatggtagca

SEQ ID NO: 883607 - DNA, 15 bp, Homo sapiens
agaatagatggtagc

SEQ ID NO: 883608 - DNA, 15 bp, Homo sapiens
gagaatagatggtag

SEQ ID NO: 883609 - DNA, 15 bp, Homo sapiens
tgagaatagatggta

SEQ ID NO: 883610 - DNA, 15 bp, Homo sapiens
atgagaatagatggt

SEQ ID NO: 883611 - DNA, 15 bp, Homo sapiens
tatgagaatagatgg

SEQ ID NO: 883612 - DNA, 15 bp, Homo sapiens
gtatgagaatagatg

SEQ ID NO: 883613 - DNA, 15 bp, Homo sapiens
tgtatgagaatagat

SEQ ID NO: 883614 - DNA, 15 bp, Homo sapiens
ctgtatgagaataga

SEQ ID NO: 883615 - DNA, 15 bp, Homo sapiens
gctgtatgagaatag

SEQ ID NO: 883616 - DNA, 15 bp, Homo sapiens
tgctgtatgagaata

SEQ ID NO: 883617 - DNA, 15 bp, Homo sapiens
ctgctgtatgagaat

SEQ ID NO: 883618 - DNA, 15 bp, Homo sapiens
cctgctgtatgagaa

SEQ ID NO: 883619 - DNA, 15 bp, Homo sapiens
gcctgctgtatgaga

SEQ ID NO: 883620 - DNA, 15 bp, Homo sapiens
tgcctgctgtatgag

SEQ ID NO: 883621 - DNA, 15 bp, Homo sapiens
ctgcctgctgtatga

SEQ ID NO: 883622 - DNA, 15 bp, Homo sapiens
tctgcctgctgtatg

SEQ ID NO: 883623 - DNA, 15 bp, Homo sapiens
ttctgcctgctgtat

SEQ ID NO: 883624 - DNA, 15 bp, Homo sapiens
cttctgcctgctgta

SEQ ID NO: 883625 - DNA, 15 bp, Homo sapiens
ccttctgcctgctgt

SEQ ID NO: 883626 - DNA, 15 bp, Homo sapiens
tccttctgcctgctg

SEQ ID NO: 883627 - DNA, 15 bp, Homo sapiens
ctccttctgcctgct

SEQ ID NO: 883628 - DNA, 15 bp, Homo sapiens
actccttctgcctgc

SEQ ID NO: 883629 - DNA, 15 bp, Homo sapiens
cactccttctgcctg

SEQ ID NO: 883630 - DNA, 15 bp, Homo sapiens
gcactccttctgcct

SEQ ID NO: 883631 - DNA, 15 bp, Homo sapiens
agcactccttctgcc

SEQ ID NO: 883632 - DNA, 15 bp, Homo sapiens
aagcactccttctgc

SEQ ID NO: 883633 - DNA, 15 bp, Homo sapiens
caagcactccttctg

SEQ ID NO: 883634 - DNA, 15 bp, Homo sapiens
ccaagcactccttct

SEQ ID NO: 883635 - DNA, 15 bp, Homo sapiens
accaagcactccttc

SEQ ID NO: 883636 - DNA, 15 bp, Homo sapiens
taccaagcactcctt

SEQ ID NO: 883637 - DNA, 15 bp, Homo sapiens
ttaccaagcactcct

SEQ ID NO: 883638 - DNA, 15 bp, Homo sapiens
gttaccaagcactcc

SEQ ID NO: 883639 - DNA, 15 bp, Homo sapiens
tgttaccaagcactc

SEQ ID NO: 883640 - DNA, 15 bp, Homo sapiens
gtgttaccaagcact

SEQ ID NO: 883641 - DNA, 15 bp, Homo sapiens
tgtgttaccaagcac

SEQ ID NO: 883642 - DNA, 15 bp, Homo sapiens
ttgtgttaccaagca

SEQ ID NO: 883643 - DNA, 15 bp, Homo sapiens
cttgtgttaccaagc

SEQ ID NO: 883644 - DNA, 15 bp, Homo sapiens
acttgtgttaccaag

SEQ ID NO: 883645 - DNA, 15 bp, Homo sapiens
cacttgtgttaccaa

SEQ ID NO: 883646 - DNA, 15 bp, Homo sapiens
tcacttgtgttacca

SEQ ID NO: 883647 - DNA, 15 bp, Homo sapiens
ctcacttgtgttacc

SEQ ID NO: 883648 - DNA, 15 bp, Homo sapiens
tctcacttgtgttac

SEQ ID NO: 883649 - DNA, 15 bp, Homo sapiens
atctcacttgtgtta

SEQ ID NO: 883650 - DNA, 15 bp, Homo sapiens
gatctcacttgtgtt

SEQ ID NO: 883651 - DNA, 15 bp, Homo sapiens
tgatctcacttgtgt

SEQ ID NO: 883652 - DNA, 15 bp, Homo sapiens
atgatctcacttgtg

SEQ ID NO: 883653 - DNA, 15 bp, Homo sapiens
catgatctcacttgt

SEQ ID NO: 883654 - DNA, 15 bp, Homo sapiens
tcatgatctcacttg

SEQ ID NO: 883655 - DNA, 15 bp, Homo sapiens
gtcatgatctcactt

SEQ ID NO: 883656 - DNA, 15 bp, Homo sapiens
ggtcatgatctcact

SEQ ID NO: 883657 - DNA, 15 bp, Homo sapiens
tggtcatgatctcac

SEQ ID NO: 883658 - DNA, 15 bp, Homo sapiens
atggtcatgatctca

SEQ ID NO: 883659 - DNA, 15 bp, Homo sapiens
gatggtcatgatctc

SEQ ID NO: 883660 - DNA, 15 bp, Homo sapiens
agatggtcatgatct

SEQ ID NO: 883661 - DNA, 15 bp, Homo sapiens
tagatggtcatgatc

SEQ ID NO: 883662 - DNA, 15 bp, Homo sapiens
atagatggtcatgat

SEQ ID NO: 883663 - DNA, 15 bp, Homo sapiens
gatagatggtcatga

SEQ ID NO: 883664 - DNA, 15 bp, Homo sapiens
agatagatggtcatg

SEQ ID NO: 883665 - DNA, 15 bp, Homo sapiens
cagatagatggtcat

SEQ ID NO: 883666 - DNA, 15 bp, Homo sapiens
gcagatagatggtca

SEQ ID NO: 883667 - DNA, 15 bp, Homo sapiens
agcagatagatggtc

SEQ ID NO: 883668 - DNA, 15 bp, Homo sapiens
gagcagatagatggt

SEQ ID NO: 883669 - DNA, 15 bp, Homo sapiens
tgagcagatagatgg

SEQ ID NO: 883670 - DNA, 15 bp, Homo sapiens
atgagcagatagatg

SEQ ID NO: 883671 - DNA, 15 bp, Homo sapiens
aatgagcagatagat

SEQ ID NO: 883672 - DNA, 15 bp, Homo sapiens
taatgagcagataga

SEQ ID NO: 883673 - DNA, 15 bp, Homo sapiens
gtaatgagcagatag

SEQ ID NO: 883674 - DNA, 15 bp, Homo sapiens
ggtaatgagcagata

SEQ ID NO: 883675 - DNA, 15 bp, Homo sapiens
gggtaatgagcagat

SEQ ID NO: 883676 - DNA, 15 bp, Homo sapiens
agggtaatgagcaga

SEQ ID NO: 883677 - DNA, 15 bp, Homo sapiens
cagggtaatgagcag

SEQ ID NO: 883678 - DNA, 15 bp, Homo sapiens
gcagggtaatgagca

SEQ ID NO: 883679 - DNA, 15 bp, Homo sapiens
tgcagggtaatgagc

SEQ ID NO: 883680 - DNA, 15 bp, Homo sapiens
ttgcagggtaatgag

SEQ ID NO: 883681 - DNA, 15 bp, Homo sapiens
attgcagggtaatga

SEQ ID NO: 883682 - DNA, 15 bp, Homo sapiens
cattgcagggtaatg

SEQ ID NO: 883683 - DNA, 15 bp, Homo sapiens
ccattgcagggtaat

SEQ ID NO: 883684 - DNA, 15 bp, Homo sapiens
gccattgcagggtaa

SEQ ID NO: 883685 - DNA, 15 bp, Homo sapiens
agccattgcagggta

SEQ ID NO: 883686 - DNA, 15 bp, Homo sapiens
gagccattgcagggt

SEQ ID NO: 883687 - DNA, 15 bp, Homo sapiens
ggagccattgcaggg

SEQ ID NO: 883688 - DNA, 15 bp, Homo sapiens
aggagccattgcagg

SEQ ID NO: 883689 - DNA, 15 bp, Homo sapiens
caggagccattgcag

SEQ ID NO: 883690 - DNA, 15 bp, Homo sapiens
acaggagccattgca

SEQ ID NO: 883691 - DNA, 15 bp, Homo sapiens
aacaggagccattgc

SEQ ID NO: 883692 - DNA, 15 bp, Homo sapiens
aaacaggagccattg

SEQ ID NO: 883693 - DNA, 15 bp, Homo sapiens
gaaacaggagccatt

SEQ ID NO: 883694 - DNA, 15 bp, Homo sapiens
tgaaacaggagccat

SEQ ID NO: 883695 - DNA, 15 bp, Homo sapiens
gtgaaacaggagcca

SEQ ID NO: 883696 - DNA, 15 bp, Homo sapiens
agtgaaacaggagcc

SEQ ID NO: 883697 - DNA, 15 bp, Homo sapiens
cagtgaaacaggagc

SEQ ID NO: 883698 - DNA, 15 bp, Homo sapiens
tcagtgaaacaggag

SEQ ID NO: 883699 - DNA, 15 bp, Homo sapiens
ttcagtgaaacagga

SEQ ID NO: 883700 - DNA, 15 bp, Homo sapiens
tttcagtgaaacagg

SEQ ID NO: 883701 - DNA, 15 bp, Homo sapiens
ctttcagtgaaacag

SEQ ID NO: 883702 - DNA, 15 bp, Homo sapiens
cctttcagtgaaaca

SEQ ID NO: 883703 - DNA, 15 bp, Homo sapiens
tcctttcagtgaaac

SEQ ID NO: 883704 - DNA, 15 bp, Homo sapiens
ttcctttcagtgaaa

SEQ ID NO: 883705 - DNA, 15 bp, Homo sapiens
tttcctttcagtgaa

SEQ ID NO: 883706 - DNA, 15 bp, Homo sapiens
ttttcctttcagtga

SEQ ID NO: 883707 - DNA, 15 bp, Homo sapiens
tttttcctttcagtg

SEQ ID NO: 883708 - DNA, 15 bp, Homo sapiens
gtttttcctttcagt

SEQ ID NO: 883709 - DNA, 15 bp, Homo sapiens
agtttttcctttcag

SEQ ID NO: 883710 - DNA, 15 bp, Homo sapiens
gagtttttcctttca

SEQ ID NO: 883711 - DNA, 15 bp, Homo sapiens
tgagtttttcctttc

SEQ ID NO: 883712 - DNA, 15 bp, Homo sapiens
ttgagtttttccttt

SEQ ID NO: 883713 - DNA, 15 bp, Homo sapiens
cttgagtttttcctt

SEQ ID NO: 883714 - DNA, 15 bp, Homo sapiens
gcttgagtttttcct

SEQ ID NO: 883715 - DNA, 15 bp, Homo sapiens
ggcttgagtttttcc

SEQ ID NO: 883716 - DNA, 15 bp, Homo sapiens
gggcttgagtttttc

SEQ ID NO: 883717 - DNA, 15 bp, Homo sapiens
agggcttgagttttt

SEQ ID NO: 883718 - DNA, 15 bp, Homo sapiens
tagggcttgagtttt

SEQ ID NO: 883719 - DNA, 15 bp, Homo sapiens
ttagggcttgagttt

SEQ ID NO: 883720 - DNA, 15 bp, Homo sapiens
tttagggcttgagtt

SEQ ID NO: 883721 - DNA, 15 bp, Homo sapiens
ttttagggcttgagt

SEQ ID NO: 883722 - DNA, 15 bp, Homo sapiens
gttttagggcttgag

SEQ ID NO: 883723 - DNA, 15 bp, Homo sapiens
tgttttagggcttga

SEQ ID NO: 883724 - DNA, 15 bp, Homo sapiens
atgttttagggcttg

SEQ ID NO: 883725 - DNA, 15 bp, Homo sapiens
gatgttttagggctt

SEQ ID NO: 883726 - DNA, 15 bp, Homo sapiens
agatgttttagggct

SEQ ID NO: 883727 - DNA, 15 bp, Homo sapiens
tagatgttttagggc

SEQ ID NO: 883728 - DNA, 15 bp, Homo sapiens
ttagatgttttaggg

SEQ ID NO: 883729 - DNA, 15 bp, Homo sapiens
tttagatgttttagg

SEQ ID NO: 883730 - DNA, 15 bp, Homo sapiens
ttttagatgttttag

SEQ ID NO: 883731 - DNA, 15 bp, Homo sapiens
tttttagatgtttta

SEQ ID NO: 883732 - DNA, 15 bp, Homo sapiens
atttttagatgtttt

SEQ ID NO: 883733 - DNA, 15 bp, Homo sapiens
tatttttagatgttt

SEQ ID NO: 883734 - DNA, 15 bp, Homo sapiens
atatttttagatgtt

SEQ ID NO: 883735 - DNA, 15 bp, Homo sapiens
aatatttttagatgt

SEQ ID NO: 883736 - DNA, 15 bp, Homo sapiens
gaatatttttagatg

SEQ ID NO: 883737 - DNA, 15 bp, Homo sapiens
agaatatttttagat

SEQ ID NO: 883738 - DNA, 15 bp, Homo sapiens
tagaatatttttaga

SEQ ID NO: 883739 - DNA, 15 bp, Homo sapiens
gtagaatatttttag

SEQ ID NO: 883740 - DNA, 15 bp, Homo sapiens
tgtagaatattttta

SEQ ID NO: 883741 - DNA, 15 bp, Homo sapiens
atgtagaatattttt

SEQ ID NO: 883742 - DNA, 15 bp, Homo sapiens
catgtagaatatttt

SEQ ID NO: 883743 - DNA, 15 bp, Homo sapiens
tcatgtagaatattt

SEQ ID NO: 883744 - DNA, 15 bp, Homo sapiens
atcatgtagaatatt

SEQ ID NO: 883745 - DNA, 15 bp, Homo sapiens
gatcatgtagaatat

SEQ ID NO: 883746 - DNA, 15 bp, Homo sapiens
agatcatgtagaata

SEQ ID NO: 883747 - DNA, 15 bp, Homo sapiens
cagatcatgtagaat

SEQ ID NO: 883748 - DNA, 15 bp, Homo sapiens
ccagatcatgtagaa

SEQ ID NO: 883749 - DNA, 15 bp, Homo sapiens
gccagatcatgtaga

SEQ ID NO: 883750 - DNA, 15 bp, Homo sapiens
agccagatcatgtag

SEQ ID NO: 883751 - DNA, 15 bp, Homo sapiens
gagccagatcatgta

SEQ ID NO: 883752 - DNA, 15 bp, Homo sapiens
agagccagatcatgt

SEQ ID NO: 883753 - DNA, 15 bp, Homo sapiens
cagagccagatcatg

SEQ ID NO: 883754 - DNA, 15 bp, Homo sapiens
ccagagccagatcat

SEQ ID NO: 883755 - DNA, 15 bp, Homo sapiens
tccagagccagatca

SEQ ID NO: 883756 - DNA, 15 bp, Homo sapiens
atccagagccagatc

SEQ ID NO: 883757 - DNA, 15 bp, Homo sapiens
gatccagagccagat

SEQ ID NO: 883758 - DNA, 15 bp, Homo sapiens
ggatccagagccaga

SEQ ID NO: 883759 - DNA, 15 bp, Homo sapiens
gggatccagagccag

SEQ ID NO: 883760 - DNA, 15 bp, Homo sapiens
agggatccagagcca

SEQ ID NO: 883761 - DNA, 15 bp, Homo sapiens
gagggatccagagcc

SEQ ID NO: 883762 - DNA, 15 bp, Homo sapiens
agagggatccagagc

SEQ ID NO: 883763 - DNA, 15 bp, Homo sapiens
aagagggatccagag

SEQ ID NO: 883764 - DNA, 15 bp, Homo sapiens
aaagagggatccaga

SEQ ID NO: 883765 - DNA, 15 bp, Homo sapiens
caaagagggatccag

SEQ ID NO: 883766 - DNA, 15 bp, Homo sapiens
tcaaagagggatcca

SEQ ID NO: 883767 - DNA, 15 bp, Homo sapiens
atcaaagagggatcc

SEQ ID NO: 883768 - DNA, 15 bp, Homo sapiens
tatcaaagagggatc

SEQ ID NO: 883769 - DNA, 15 bp, Homo sapiens
atatcaaagagggat

SEQ ID NO: 883770 - DNA, 15 bp, Homo sapiens
gatatcaaagaggga

SEQ ID NO: 883771 - DNA, 15 bp, Homo sapiens
tgatatcaaagaggg

SEQ ID NO: 883772 - DNA, 15 bp, Homo sapiens
gtgatatcaaagagg

SEQ ID NO: 883773 - DNA, 15 bp, Homo sapiens
ggtgatatcaaagag

SEQ ID NO: 883774 - DNA, 15 bp, Homo sapiens
aggtgatatcaaaga

SEQ ID NO: 883775 - DNA, 15 bp, Homo sapiens
caggtgatatcaaag

SEQ ID NO: 883776 - DNA, 15 bp, Homo sapiens
gcaggtgatatcaaa

SEQ ID NO: 883777 - DNA, 15 bp, Homo sapiens
ggcaggtgatatcaa

SEQ ID NO: 883778 - DNA, 15 bp, Homo sapiens
tggcaggtgatatca

SEQ ID NO: 883779 - DNA, 15 bp, Homo sapiens
gtggcaggtgatatc

SEQ ID NO: 883780 - DNA, 15 bp, Homo sapiens
agtggcaggtgatat

SEQ ID NO: 883781 - DNA, 15 bp, Homo sapiens
cagtggcaggtgata

SEQ ID NO: 883782 - DNA, 15 bp, Homo sapiens
gcagtggcaggtgat

SEQ ID NO: 883783 - DNA, 15 bp, Homo sapiens
ggcagtggcaggtga

SEQ ID NO: 883784 - DNA, 15 bp, Homo sapiens
gggcagtggcaggtg

SEQ ID NO: 883785 - DNA, 15 bp, Homo sapiens
ggggcagtggcaggt

SEQ ID NO: 883786 - DNA, 15 bp, Homo sapiens
gggggcagtggcagg

SEQ ID NO: 883787 - DNA, 15 bp, Homo sapiens
agggggcagtggcag

SEQ ID NO: 883788 - DNA, 15 bp, Homo sapiens
gagggggcagtggca

SEQ ID NO: 883789 - DNA, 15 bp, Homo sapiens
tgagggggcagtggc

SEQ ID NO: 883790 - DNA, 15 bp, Homo sapiens
gtgagggggcagtgg

SEQ ID NO: 883791 - DNA, 15 bp, Homo sapiens
agtgagggggcagtg

SEQ ID NO: 883792 - DNA, 15 bp, Homo sapiens
tagtgagggggcagt

SEQ ID NO: 883793 - DNA, 15 bp, Homo sapiens
ttagtgagggggcag

SEQ ID NO: 883794 - DNA, 15 bp, Homo sapiens
attagtgagggggca

SEQ ID NO: 883795 - DNA, 15 bp, Homo sapiens
aattagtgagggggc

SEQ ID NO: 883796 - DNA, 15 bp, Homo sapiens
gaattagtgaggggg

SEQ ID NO: 883797 - DNA, 15 bp, Homo sapiens
agaattagtgagggg

SEQ ID NO: 883798 - DNA, 15 bp, Homo sapiens
aagaattagtgaggg

SEQ ID NO: 883799 - DNA, 15 bp, Homo sapiens
gaagaattagtgagg

SEQ ID NO: 883800 - DNA, 15 bp, Homo sapiens
agaagaattagtgag

SEQ ID NO: 883801 - DNA, 15 bp, Homo sapiens
gagaagaattagtga

SEQ ID NO: 883802 - DNA, 15 bp, Homo sapiens
ggagaagaattagtg

SEQ ID NO: 883803 - DNA, 15 bp, Homo sapiens
tggagaagaattagt

SEQ ID NO: 883804 - DNA, 15 bp, Homo sapiens
ctggagaagaattag

SEQ ID NO: 883805 - DNA, 15 bp, Homo sapiens
gctggagaagaatta

SEQ ID NO: 883806 - DNA, 15 bp, Homo sapiens
ggctggagaagaatt

SEQ ID NO: 883807 - DNA, 15 bp, Homo sapiens
tggctggagaagaat

SEQ ID NO: 883808 - DNA, 15 bp, Homo sapiens
gtggctggagaagaa

SEQ ID NO: 883809 - DNA, 15 bp, Homo sapiens
tgtggctggagaaga

SEQ ID NO: 883810 - DNA, 15 bp, Homo sapiens
atgtggctggagaag

SEQ ID NO: 883811 - DNA, 15 bp, Homo sapiens
aatgtggctggagaa

SEQ ID NO: 883812 - DNA, 15 bp, Homo sapiens
caatgtggctggaga

SEQ ID NO: 883813 - DNA, 15 bp, Homo sapiens
ccaatgtggctggag

SEQ ID NO: 883814 - DNA, 15 bp, Homo sapiens
accaatgtggctgga

SEQ ID NO: 883815 - DNA, 15 bp, Homo sapiens
aaccaatgtggctgg

SEQ ID NO: 883816 - DNA, 15 bp, Homo sapiens
gaaccaatgtggctg

SEQ ID NO: 883817 - DNA, 15 bp, Homo sapiens
ggaaccaatgtggct

SEQ ID NO: 883818 - DNA, 15 bp, Homo sapiens
aggaaccaatgtggc

SEQ ID NO: 883819 - DNA, 15 bp, Homo sapiens
gaggaaccaatgtgg

SEQ ID NO: 883820 - DNA, 15 bp, Homo sapiens
ggaggaaccaatgtg

SEQ ID NO: 883821 - DNA, 15 bp, Homo sapiens
gggaggaaccaatgt

SEQ ID NO: 883822 - DNA, 15 bp, Homo sapiens
agggaggaaccaatg

SEQ ID NO: 883823 - DNA, 15 bp, Homo sapiens
cagggaggaaccaat

SEQ ID NO: 883824 - DNA, 15 bp, Homo sapiens
acagggaggaaccaa

SEQ ID NO: 883825 - DNA, 15 bp, Homo sapiens
cacagggaggaacca

SEQ ID NO: 883826 - DNA, 15 bp, Homo sapiens
acacagggaggaacc

SEQ ID NO: 883827 - DNA, 15 bp, Homo sapiens
gacacagggaggaac

SEQ ID NO: 883828 - DNA, 15 bp, Homo sapiens
agacacagggaggaa

SEQ ID NO: 883829 - DNA, 15 bp, Homo sapiens
aagacacagggagga

SEQ ID NO: 883830 - DNA, 15 bp, Homo sapiens
caagacacagggagg

SEQ ID NO: 883831 - DNA, 15 bp, Homo sapiens
tcaagacacagggag

SEQ ID NO: 883832 - DNA, 15 bp, Homo sapiens
gtcaagacacaggga

SEQ ID NO: 883833 - DNA, 15 bp, Homo sapiens
ggtcaagacacaggg

SEQ ID NO: 883834 - DNA, 15 bp, Homo sapiens
gggtcaagacacagg

SEQ ID NO: 883835 - DNA, 15 bp, Homo sapiens
tgggtcaagacacag

SEQ ID NO: 883836 - DNA, 15 bp, Homo sapiens
ttgggtcaagacaca

SEQ ID NO: 883837 - DNA, 15 bp, Homo sapiens
tttgggtcaagacac

SEQ ID NO: 883838 - DNA, 15 bp, Homo sapiens
gtttgggtcaagaca

SEQ ID NO: 883839 - DNA, 15 bp, Homo sapiens
tgtttgggtcaagac

SEQ ID NO: 883840 - DNA, 15 bp, Homo sapiens
ttgtttgggtcaaga

SEQ ID NO: 883841 - DNA, 15 bp, Homo sapiens
gttgtttgggtcaag

SEQ ID NO: 883842 - DNA, 15 bp, Homo sapiens
cgttgtttgggtcaa

SEQ ID NO: 883843 - DNA, 15 bp, Homo sapiens
gcgttgtttgggtca

SEQ ID NO: 883844 - DNA, 15 bp, Homo sapiens
agcgttgtttgggtc

SEQ ID NO: 883845 - DNA, 15 bp, Homo sapiens
cagcgttgtttgggt

SEQ ID NO: 883846 - DNA, 15 bp, Homo sapiens
gcagcgttgtttggg

SEQ ID NO: 883847 - DNA, 15 bp, Homo sapiens
ggcagcgttgtttgg

SEQ ID NO: 883848 - DNA, 15 bp, Homo sapiens
aggcagcgttgtttg

SEQ ID NO: 883849 - DNA, 15 bp, Homo sapiens
aaggcagcgttgttt

SEQ ID NO: 883850 - DNA, 15 bp, Homo sapiens
aaaggcagcgttgtt

SEQ ID NO: 883851 - DNA, 15 bp, Homo sapiens
aaaaggcagcgttgt

SEQ ID NO: 883852 - DNA, 15 bp, Homo sapiens
gaaaaggcagcgttg

SEQ ID NO: 883853 - DNA, 15 bp, Homo sapiens
agaaaaggcagcgtt

SEQ ID NO: 883854 - DNA, 15 bp, Homo sapiens
aagaaaaggcagcgt

SEQ ID NO: 883855 - DNA, 15 bp, Homo sapiens
caagaaaaggcagcg

SEQ ID NO: 883856 - DNA, 15 bp, Homo sapiens
ccaagaaaaggcagc

SEQ ID NO: 883857 - DNA, 15 bp, Homo sapiens
cccaagaaaaggcag

SEQ ID NO: 883858 - DNA, 15 bp, Homo sapiens
tcccaagaaaaggca

SEQ ID NO: 883859 - DNA, 15 bp, Homo sapiens
ttcccaagaaaaggc

SEQ ID NO: 883860 - DNA, 15 bp, Homo sapiens
tttcccaagaaaagg

SEQ ID NO: 883861 - DNA, 15 bp, Homo sapiens
ctttcccaagaaaag

SEQ ID NO: 883862 - DNA, 15 bp, Homo sapiens
tctttcccaagaaaa

SEQ ID NO: 883863 - DNA, 15 bp, Homo sapiens
ttctttcccaagaaa

SEQ ID NO: 883864 - DNA, 15 bp, Homo sapiens
tttctttcccaagaa

SEQ ID NO: 883865 - DNA, 15 bp, Homo sapiens
atttctttcccaaga

SEQ ID NO: 883866 - DNA, 15 bp, Homo sapiens
catttctttcccaag

SEQ ID NO: 883867 - DNA, 15 bp, Homo sapiens
gcatttctttcccaa

SEQ ID NO: 883868 - DNA, 15 bp, Homo sapiens
tgcatttctttccca

SEQ ID NO: 883869 - DNA, 15 bp, Homo sapiens
ttgcatttctttccc

SEQ ID NO: 883870 - DNA, 15 bp, Homo sapiens
cttgcatttctttcc

SEQ ID NO: 883871 - DNA, 15 bp, Homo sapiens
gcttgcatttctttc

SEQ ID NO: 883872 - DNA, 15 bp, Homo sapiens
agcttgcatttcttt

SEQ ID NO: 883873 - DNA, 15 bp, Homo sapiens
aagcttgcatttctt

SEQ ID NO: 883874 - DNA, 15 bp, Homo sapiens
aaagcttgcatttct

SEQ ID NO: 883875 - DNA, 15 bp, Homo sapiens
aaaagcttgcatttc

SEQ ID NO: 883876 - DNA, 15 bp, Homo sapiens
caaaagcttgcattt

SEQ ID NO: 883877 - DNA, 15 bp, Homo sapiens
gcaaaagcttgcatt

SEQ ID NO: 883878 - DNA, 15 bp, Homo sapiens
tgcaaaagcttgcat

SEQ ID NO: 883879 - DNA, 15 bp, Homo sapiens
gtgcaaaagcttgca

SEQ ID NO: 883880 - DNA, 15 bp, Homo sapiens
agtgcaaaagcttgc

SEQ ID NO: 883881 - DNA, 15 bp, Homo sapiens
cagtgcaaaagcttg

SEQ ID NO: 883882 - DNA, 15 bp, Homo sapiens
ccagtgcaaaagctt

SEQ ID NO: 883883 - DNA, 15 bp, Homo sapiens
gccagtgcaaaagct

SEQ ID NO: 883884 - DNA, 15 bp, Homo sapiens
agccagtgcaaaagc

SEQ ID NO: 883885 - DNA, 15 bp, Homo sapiens
tagccagtgcaaaag

SEQ ID NO: 883886 - DNA, 15 bp, Homo sapiens
atagccagtgcaaaa

SEQ ID NO: 883887 - DNA, 15 bp, Homo sapiens
tatagccagtgcaaa

SEQ ID NO: 883888 - DNA, 15 bp, Homo sapiens
atatagccagtgcaa

SEQ ID NO: 883889 - DNA, 15 bp, Homo sapiens
catatagccagtgca

SEQ ID NO: 883890 - DNA, 15 bp, Homo sapiens
gcatatagccagtgc

SEQ ID NO: 883891 - DNA, 15 bp, Homo sapiens
agcatatagccagtg

SEQ ID NO: 883892 - DNA, 15 bp, Homo sapiens
aagcatatagccagt

SEQ ID NO: 883893 - DNA, 15 bp, Homo sapiens
caagcatatagccag

SEQ ID NO: 883894 - DNA, 15 bp, Homo sapiens
ccaagcatatagcca

SEQ ID NO: 883895 - DNA, 15 bp, Homo sapiens
gccaagcatatagcc

SEQ ID NO: 883896 - DNA, 15 bp, Homo sapiens
ggccaagcatatagc

SEQ ID NO: 883897 - DNA, 15 bp, Homo sapiens
tggccaagcatatag

SEQ ID NO: 883898 - DNA, 15 bp, Homo sapiens
ttggccaagcatata

SEQ ID NO: 883899 - DNA, 15 bp, Homo sapiens
gttggccaagcatat

SEQ ID NO: 883900 - DNA, 15 bp, Homo sapiens
tgttggccaagcata

SEQ ID NO: 883901 - DNA, 15 bp, Homo sapiens
ctgttggccaagcat

SEQ ID NO: 883902 - DNA, 15 bp, Homo sapiens
actgttggccaagca

SEQ ID NO: 883903 - DNA, 15 bp, Homo sapiens
cactgttggccaagc

SEQ ID NO: 883904 - DNA, 15 bp, Homo sapiens
acactgttggccaag

SEQ ID NO: 883905 - DNA, 15 bp, Homo sapiens
cacactgttggccaa

SEQ ID NO: 883906 - DNA, 15 bp, Homo sapiens
gcacactgttggcca

SEQ ID NO: 883907 - DNA, 15 bp, Homo sapiens
agcacactgttggcc

SEQ ID NO: 883908 - DNA, 15 bp, Homo sapiens
aagcacactgttggc

SEQ ID NO: 883909 - DNA, 15 bp, Homo sapiens
gaagcacactgttgg

SEQ ID NO: 883910 - DNA, 15 bp, Homo sapiens
ggaagcacactgttg

SEQ ID NO: 883911 - DNA, 15 bp, Homo sapiens
gggaagcacactgtt

SEQ ID NO: 883912 - DNA, 15 bp, Homo sapiens
agggaagcacactgt

SEQ ID NO: 883913 - DNA, 15 bp, Homo sapiens
gagggaagcacactg

SEQ ID NO: 883914 - DNA, 15 bp, Homo sapiens
tgagggaagcacact

SEQ ID NO: 883915 - DNA, 15 bp, Homo sapiens
ctgagggaagcacac

SEQ ID NO: 883916 - DNA, 15 bp, Homo sapiens
tctgagggaagcaca

SEQ ID NO: 883917 - DNA, 15 bp, Homo sapiens
ttctgagggaagcac

SEQ ID NO: 883918 - DNA, 15 bp, Homo sapiens
cttctgagggaagca

SEQ ID NO: 883919 - DNA, 15 bp, Homo sapiens
acttctgagggaagc

SEQ ID NO: 883920 - DNA, 15 bp, Homo sapiens
gacttctgagggaag

SEQ ID NO: 883921 - DNA, 15 bp, Homo sapiens
tgacttctgagggaa

SEQ ID NO: 883922 - DNA, 15 bp, Homo sapiens
ctgacttctgaggga

SEQ ID NO: 883923 - DNA, 15 bp, Homo sapiens
actgacttctgaggg

SEQ ID NO: 883924 - DNA, 15 bp, Homo sapiens
tactgacttctgagg

SEQ ID NO: 883925 - DNA, 15 bp, Homo sapiens
atactgacttctgag

SEQ ID NO: 883926 - DNA, 15 bp, Homo sapiens
tatactgacttctga

SEQ ID NO: 883927 - DNA, 15 bp, Homo sapiens
ttatactgacttctg

SEQ ID NO: 883928 - DNA, 15 bp, Homo sapiens
gttatactgacttct

SEQ ID NO: 883929 - DNA, 15 bp, Homo sapiens
ggttatactgacttc

SEQ ID NO: 883930 - DNA, 15 bp, Homo sapiens
tggttatactgactt

SEQ ID NO: 883931 - DNA, 15 bp, Homo sapiens
ttggttatactgact

SEQ ID NO: 883932 - DNA, 15 bp, Homo sapiens
gttggttatactgac

SEQ ID NO: 883933 - DNA, 15 bp, Homo sapiens
tgttggttatactga

SEQ ID NO: 883934 - DNA, 15 bp, Homo sapiens
ttgttggttatactg

SEQ ID NO: 883935 - DNA, 15 bp, Homo sapiens
gttgttggttatact

SEQ ID NO: 883936 - DNA, 15 bp, Homo sapiens
agttgttggttatac

SEQ ID NO: 883937 - DNA, 15 bp, Homo sapiens
gagttgttggttata

SEQ ID NO: 883938 - DNA, 15 bp, Homo sapiens
ggagttgttggttat

SEQ ID NO: 883939 - DNA, 15 bp, Homo sapiens
tggagttgttggtta

SEQ ID NO: 883940 - DNA, 15 bp, Homo sapiens
gtggagttgttggtt

SEQ ID NO: 883941 - DNA, 15 bp, Homo sapiens
agtggagttgttggt

SEQ ID NO: 883942 - DNA, 15 bp, Homo sapiens
aagtggagttgttgg

SEQ ID NO: 883943 - DNA, 15 bp, Homo sapiens
gaagtggagttgttg

SEQ ID NO: 883944 - DNA, 15 bp, Homo sapiens
ggaagtggagttgtt

SEQ ID NO: 883945 - DNA, 15 bp, Homo sapiens
aggaagtggagttgt

SEQ ID NO: 883946 - DNA, 15 bp, Homo sapiens
aaggaagtggagttg

SEQ ID NO: 883947 - DNA, 15 bp, Homo sapiens
gaaggaagtggagtt

SEQ ID NO: 883948 - DNA, 15 bp, Homo sapiens
tgaaggaagtggagt

SEQ ID NO: 883949 - DNA, 15 bp, Homo sapiens
ttgaaggaagtggag

SEQ ID NO: 883950 - DNA, 15 bp, Homo sapiens
cttgaaggaagtgga

SEQ ID NO: 883951 - DNA, 15 bp, Homo sapiens
acttgaaggaagtgg

SEQ ID NO: 883952 - DNA, 15 bp, Homo sapiens
gacttgaaggaagtg

SEQ ID NO: 883953 - DNA, 15 bp, Homo sapiens
agacttgaaggaagt

SEQ ID NO: 883954 - DNA, 15 bp, Homo sapiens
cagacttgaaggaag

SEQ ID NO: 883955 - DNA, 15 bp, Homo sapiens
acagacttgaaggaa

SEQ ID NO: 883956 - DNA, 15 bp, Homo sapiens
cacagacttgaagga

SEQ ID NO: 883957 - DNA, 15 bp, Homo sapiens
gcacagacttgaagg

SEQ ID NO: 883958 - DNA, 15 bp, Homo sapiens
agcacagacttgaag

SEQ ID NO: 883959 - DNA, 15 bp, Homo sapiens
gagcacagacttgaa

SEQ ID NO: 883960 - DNA, 15 bp, Homo sapiens
tgagcacagacttga

SEQ ID NO: 883961 - DNA, 15 bp, Homo sapiens
ttgagcacagacttg

SEQ ID NO: 883962 - DNA, 15 bp, Homo sapiens
tttgagcacagactt

SEQ ID NO: 883963 - DNA, 15 bp, Homo sapiens
atttgagcacagact

SEQ ID NO: 883964 - DNA, 15 bp, Homo sapiens
tatttgagcacagac

SEQ ID NO: 883965 - DNA, 15 bp, Homo sapiens
atatttgagcacaga

SEQ ID NO: 883966 - DNA, 15 bp, Homo sapiens
catatttgagcacag

SEQ ID NO: 883967 - DNA, 15 bp, Homo sapiens
tcatatttgagcaca

SEQ ID NO: 883968 - DNA, 15 bp, Homo sapiens
gtcatatttgagcac

SEQ ID NO: 883969 - DNA, 15 bp, Homo sapiens
ggtcatatttgagca

SEQ ID NO: 883970 - DNA, 15 bp, Homo sapiens
aggtcatatttgagc

SEQ ID NO: 883971 - DNA, 15 bp, Homo sapiens
aaggtcatatttgag

SEQ ID NO: 883972 - DNA, 15 bp, Homo sapiens
gaaggtcatatttga

SEQ ID NO: 883973 - DNA, 15 bp, Homo sapiens
agaaggtcatatttg

SEQ ID NO: 883974 - DNA, 15 bp, Homo sapiens
gagaaggtcatattt

SEQ ID NO: 883975 - DNA, 15 bp, Homo sapiens
tgagaaggtcatatt

SEQ ID NO: 883976 - DNA, 15 bp, Homo sapiens
ttgagaaggtcatat

SEQ ID NO: 883977 - DNA, 15 bp, Homo sapiens
attgagaaggtcata

SEQ ID NO: 883978 - DNA, 15 bp, Homo sapiens
cattgagaaggtcat

SEQ ID NO: 883979 - DNA, 15 bp, Homo sapiens
tcattgagaaggtca

SEQ ID NO: 883980 - DNA, 15 bp, Homo sapiens
atcattgagaaggtc

SEQ ID NO: 883981 - DNA, 15 bp, Homo sapiens
catcattgagaaggt

SEQ ID NO: 883982 - DNA, 15 bp, Homo sapiens
gcatcattgagaagg

SEQ ID NO: 883983 - DNA, 15 bp, Homo sapiens
agcatcattgagaag

SEQ ID NO: 883984 - DNA, 15 bp, Homo sapiens
aagcatcattgagaa

SEQ ID NO: 883985 - DNA, 15 bp, Homo sapiens
taagcatcattgaga

SEQ ID NO: 883986 - DNA, 15 bp, Homo sapiens
gtaagcatcattgag

SEQ ID NO: 883987 - DNA, 15 bp, Homo sapiens
ggtaagcatcattga

SEQ ID NO: 883988 - DNA, 15 bp, Homo sapiens
gggtaagcatcattg

SEQ ID NO: 883989 - DNA, 15 bp, Homo sapiens
agggtaagcatcatt

SEQ ID NO: 883990 - DNA, 15 bp, Homo sapiens
cagggtaagcatcat

SEQ ID NO: 883991 - DNA, 15 bp, Homo sapiens
ccagggtaagcatca

SEQ ID NO: 883992 - DNA, 15 bp, Homo sapiens
tccagggtaagcatc

SEQ ID NO: 883993 - DNA, 15 bp, Homo sapiens
ttccagggtaagcat

SEQ ID NO: 883994 - DNA, 15 bp, Homo sapiens
gttccagggtaagca

SEQ ID NO: 883995 - DNA, 15 bp, Homo sapiens
ggttccagggtaagc

SEQ ID NO: 883996 - DNA, 15 bp, Homo sapiens
gggttccagggtaag

SEQ ID NO: 883997 - DNA, 15 bp, Homo sapiens
agggttccagggtaa

SEQ ID NO: 883998 - DNA, 15 bp, Homo sapiens
tagggttccagggta

SEQ ID NO: 883999 - DNA, 15 bp, Homo sapiens
atagggttccagggt

SEQ ID NO: 884000 - DNA, 15 bp, Homo sapiens
aatagggttccaggg

SEQ ID NO: 884001 - DNA, 15 bp, Homo sapiens
aaatagggttccagg

SEQ ID NO: 884002 - DNA, 15 bp, Homo sapiens
taaatagggttccag

SEQ ID NO: 884003 - DNA, 15 bp, Homo sapiens
ttaaatagggttcca

SEQ ID NO: 884004 - DNA, 15 bp, Homo sapiens
tttaaatagggttcc

SEQ ID NO: 884005 - DNA, 15 bp, Homo sapiens
ttttaaatagggttc

SEQ ID NO: 884006 - DNA, 15 bp, Homo sapiens
attttaaatagggtt

SEQ ID NO: 884007 - DNA, 15 bp, Homo sapiens
aattttaaatagggt

SEQ ID NO: 884008 - DNA, 15 bp, Homo sapiens
caattttaaataggg

SEQ ID NO: 884009 - DNA, 15 bp, Homo sapiens
tcaattttaaatagg

SEQ ID NO: 884010 - DNA, 15 bp, Homo sapiens
ttcaattttaaatag

SEQ ID NO: 884011 - DNA, 15 bp, Homo sapiens
cttcaattttaaata

SEQ ID NO: 884012 - DNA, 15 bp, Homo sapiens
acttcaattttaaat

SEQ ID NO: 884013 - DNA, 15 bp, Homo sapiens
gacttcaattttaaa

SEQ ID NO: 884014 - DNA, 15 bp, Homo sapiens
agacttcaattttaa

SEQ ID NO: 884015 - DNA, 15 bp, Homo sapiens
gagacttcaatttta

SEQ ID NO: 884016 - DNA, 15 bp, Homo sapiens
ggagacttcaatttt

SEQ ID NO: 884017 - DNA, 15 bp, Homo sapiens
gggagacttcaattt

SEQ ID NO: 884018 - DNA, 15 bp, Homo sapiens
ggggagacttcaatt

SEQ ID NO: 884019 - DNA, 15 bp, Homo sapiens
aggggagacttcaat

SEQ ID NO: 884020 - DNA, 15 bp, Homo sapiens
caggggagacttcaa

SEQ ID NO: 884021 - DNA, 15 bp, Homo sapiens
tcaggggagacttca

SEQ ID NO: 884022 - DNA, 15 bp, Homo sapiens
ttcaggggagacttc

SEQ ID NO: 884023 - DNA, 15 bp, Homo sapiens
attcaggggagactt

SEQ ID NO: 884024 - DNA, 15 bp, Homo sapiens
gattcaggggagact

SEQ ID NO: 884025 - DNA, 15 bp, Homo sapiens
ggattcaggggagac

SEQ ID NO: 884026 - DNA, 15 bp, Homo sapiens
gggattcaggggaga

SEQ ID NO: 884027 - DNA, 15 bp, Homo sapiens
ggggattcaggggag

SEQ ID NO: 884028 - DNA, 15 bp, Homo sapiens
aggggattcagggga

SEQ ID NO: 884029 - DNA, 15 bp, Homo sapiens
caggggattcagggg

SEQ ID NO: 884030 - DNA, 15 bp, Homo sapiens
ccaggggattcaggg

SEQ ID NO: 884031 - DNA, 15 bp, Homo sapiens
tccaggggattcagg

SEQ ID NO: 884032 - DNA, 15 bp, Homo sapiens
ctccaggggattcag

SEQ ID NO: 884033 - DNA, 15 bp, Homo sapiens
gctccaggggattca

SEQ ID NO: 884034 - DNA, 15 bp, Homo sapiens
agctccaggggattc

SEQ ID NO: 884035 - DNA, 15 bp, Homo sapiens
gagctccaggggatt

SEQ ID NO: 884036 - DNA, 15 bp, Homo sapiens
agagctccaggggat

SEQ ID NO: 884037 - DNA, 15 bp, Homo sapiens
aagagctccagggga

SEQ ID NO: 884038 - DNA, 15 bp, Homo sapiens
taagagctccagggg

SEQ ID NO: 884039 - DNA, 15 bp, Homo sapiens
ctaagagctccaggg

SEQ ID NO: 884040 - DNA, 15 bp, Homo sapiens
actaagagctccagg

SEQ ID NO: 884041 - DNA, 15 bp, Homo sapiens
gactaagagctccag

SEQ ID NO: 884042 - DNA, 15 bp, Homo sapiens
ggactaagagctcca

SEQ ID NO: 884043 - DNA, 15 bp, Homo sapiens
gggactaagagctcc

SEQ ID NO: 884044 - DNA, 15 bp, Homo sapiens
agggactaagagctc

SEQ ID NO: 884045 - DNA, 15 bp, Homo sapiens
gagggactaagagct

SEQ ID NO: 884046 - DNA, 15 bp, Homo sapiens
agagggactaagagc

SEQ ID NO: 884047 - DNA, 15 bp, Homo sapiens
aagagggactaagag

SEQ ID NO: 884048 - DNA, 15 bp, Homo sapiens
caagagggactaaga

SEQ ID NO: 884049 - DNA, 15 bp, Homo sapiens
acaagagggactaag

SEQ ID NO: 884050 - DNA, 15 bp, Homo sapiens
aacaagagggactaa

SEQ ID NO: 884051 - DNA, 15 bp, Homo sapiens
aaacaagagggacta

SEQ ID NO: 884052 - DNA, 15 bp, Homo sapiens
taaacaagagggact

SEQ ID NO: 884053 - DNA, 15 bp, Homo sapiens
ataaacaagagggac

SEQ ID NO: 884054 - DNA, 15 bp, Homo sapiens
aataaacaagaggga

SEQ ID NO: 884055 - DNA, 15 bp, Homo sapiens
aaataaacaagaggg

SEQ ID NO: 884056 - DNA, 15 bp, Homo sapiens
gaaataaacaagagg

SEQ ID NO: 884057 - DNA, 15 bp, Homo sapiens
agaaataaacaagag

SEQ ID NO: 884058 - DNA, 15 bp, Homo sapiens
aagaaataaacaaga

SEQ ID NO: 884059 - DNA, 15 bp, Homo sapiens
gaagaaataaacaag

SEQ ID NO: 884060 - DNA, 15 bp, Homo sapiens
agaagaaataaacaa

SEQ ID NO: 884061 - DNA, 15 bp, Homo sapiens
aagaagaaataaaca

SEQ ID NO: 884062 - DNA, 15 bp, Homo sapiens
aaagaagaaataaac

SEQ ID NO: 884063 - DNA, 15 bp, Homo sapiens
aaaagaagaaataaa

SEQ ID NO: 884064 - DNA, 15 bp, Homo sapiens
caaaagaagaaataa

SEQ ID NO: 884065 - DNA, 15 bp, Homo sapiens
acaaaagaagaaata

SEQ ID NO: 884066 - DNA, 15 bp, Homo sapiens
aacaaaagaagaaat

SEQ ID NO: 884067 - DNA, 15 bp, Homo sapiens
aaacaaaagaagaaa

SEQ ID NO: 884068 - DNA, 15 bp, Homo sapiens
gaaacaaaagaagaa

SEQ ID NO: 884069 - DNA, 15 bp, Homo sapiens
agaaacaaaagaaga

SEQ ID NO: 884070 - DNA, 15 bp, Homo sapiens
aagaaacaaaagaag

SEQ ID NO: 884071 - DNA, 15 bp, Homo sapiens
gaagaaacaaaagaa

SEQ ID NO: 884072 - DNA, 15 bp, Homo sapiens
agaagaaacaaaaga

SEQ ID NO: 884073 - DNA, 15 bp, Homo sapiens
aagaagaaacaaaag

SEQ ID NO: 884074 - DNA, 15 bp, Homo sapiens
aaagaagaaacaaaa

SEQ ID NO: 884075 - DNA, 15 bp, Homo sapiens
gaaagaagaaacaaa

SEQ ID NO: 884076 - DNA, 15 bp, Homo sapiens
ggaaagaagaaacaa

SEQ ID NO: 884077 - DNA, 15 bp, Homo sapiens
tggaaagaagaaaca

SEQ ID NO: 884078 - DNA, 15 bp, Homo sapiens
ttggaaagaagaaac

SEQ ID NO: 884079 - DNA, 15 bp, Homo sapiens
tttggaaagaagaaa

SEQ ID NO: 884080 - DNA, 15 bp, Homo sapiens
ctttggaaagaagaa

SEQ ID NO: 884081 - DNA, 15 bp, Homo sapiens
tctttggaaagaaga

SEQ ID NO: 884082 - DNA, 15 bp, Homo sapiens
ttctttggaaagaag

SEQ ID NO: 884083 - DNA, 15 bp, Homo sapiens
gttctttggaaagaa

SEQ ID NO: 884084 - DNA, 15 bp, Homo sapiens
agttctttggaaaga

SEQ ID NO: 884085 - DNA, 15 bp, Homo sapiens
aagttctttggaaag

SEQ ID NO: 884086 - DNA, 15 bp, Homo sapiens
taagttctttggaaa

SEQ ID NO: 884087 - DNA, 15 bp, Homo sapiens
ataagttctttggaa

SEQ ID NO: 884088 - DNA, 15 bp, Homo sapiens
tataagttctttgga

SEQ ID NO: 884089 - DNA, 15 bp, Homo sapiens
atataagttctttgg

SEQ ID NO: 884090 - DNA, 15 bp, Homo sapiens
aatataagttctttg

SEQ ID NO: 884091 - DNA, 15 bp, Homo sapiens
gaatataagttcttt

SEQ ID NO: 884092 - DNA, 15 bp, Homo sapiens
agaatataagttctt

SEQ ID NO: 884093 - DNA, 15 bp, Homo sapiens
aagaatataagttct

SEQ ID NO: 884094 - DNA, 15 bp, Homo sapiens
gaagaatataagttc

SEQ ID NO: 884095 - DNA, 15 bp, Homo sapiens
agaagaatataagtt

SEQ ID NO: 884096 - DNA, 15 bp, Homo sapiens
tagaagaatataagt

SEQ ID NO: 884097 - DNA, 15 bp, Homo sapiens
ttagaagaatataag

SEQ ID NO: 884098 - DNA, 15 bp, Homo sapiens
gttagaagaatataa

SEQ ID NO: 884099 - DNA, 15 bp, Homo sapiens
tgttagaagaatata

SEQ ID NO: 884100 - DNA, 15 bp, Homo sapiens
atgttagaagaatat

SEQ ID NO: 884101 - DNA, 15 bp, Homo sapiens
tatgttagaagaata

SEQ ID NO: 884102 - DNA, 15 bp, Homo sapiens
ctatgttagaagaat

SEQ ID NO: 884103 - DNA, 15 bp, Homo sapiens
actatgttagaagaa

SEQ ID NO: 884104 - DNA, 15 bp, Homo sapiens
aactatgttagaaga

SEQ ID NO: 884105 - DNA, 15 bp, Homo sapiens
taactatgttagaag

SEQ ID NO: 884106 - DNA, 15 bp, Homo sapiens
ataactatgttagaa

SEQ ID NO: 884107 - DNA, 15 bp, Homo sapiens
cataactatgttaga

SEQ ID NO: 884108 - DNA, 15 bp, Homo sapiens
acataactatgttag

SEQ ID NO: 884109 - DNA, 15 bp, Homo sapiens
tacataactatgtta

SEQ ID NO: 884110 - DNA, 15 bp, Homo sapiens
atacataactatgtt

SEQ ID NO: 884111 - DNA, 15 bp, Homo sapiens
tatacataactatgt

SEQ ID NO: 884112 - DNA, 15 bp, Homo sapiens
atatacataactatg

SEQ ID NO: 884113 - DNA, 15 bp, Homo sapiens
catatacataactat

SEQ ID NO: 884114 - DNA, 15 bp, Homo sapiens
acatatacataacta

SEQ ID NO: 884115 - DNA, 15 bp, Homo sapiens
aacatatacataact

SEQ ID NO: 884116 - DNA, 15 bp, Homo sapiens
gaacatatacataac

SEQ ID NO: 884117 - DNA, 15 bp, Homo sapiens
tgaacatatacataa

SEQ ID NO: 884118 - DNA, 15 bp, Homo sapiens
atgaacatatacata

SEQ ID NO: 884119 - DNA, 15 bp, Homo sapiens
aatgaacatatacat

SEQ ID NO: 884120 - DNA, 15 bp, Homo sapiens
taatgaacatataca

SEQ ID NO: 884121 - DNA, 15 bp, Homo sapiens
aggcagtgtataaaa

SEQ ID NO: 884122 - DNA, 15 bp, Homo sapiens
caggcagtgtataaa

SEQ ID NO: 884123 - DNA, 15 bp, Homo sapiens
ccaggcagtgtataa

SEQ ID NO: 884124 - DNA, 15 bp, Homo sapiens
gccaggcagtgtata

SEQ ID NO: 884125 - DNA, 15 bp, Homo sapiens
tgccaggcagtgtat

SEQ ID NO: 884126 - DNA, 15 bp, Homo sapiens
gtgccaggcagtgta

SEQ ID NO: 884127 - DNA, 15 bp, Homo sapiens
tgtgccaggcagtgt

SEQ ID NO: 884128 - DNA, 15 bp, Homo sapiens
atgtgccaggcagtg

SEQ ID NO: 884129 - DNA, 15 bp, Homo sapiens
gatgtgccaggcagt

SEQ ID NO: 884130 - DNA, 15 bp, Homo sapiens
tgatgtgccaggcag

SEQ ID NO: 884131 - DNA, 15 bp, Homo sapiens
ttgatgtgccaggca

SEQ ID NO: 884132 - DNA, 15 bp, Homo sapiens
tttgatgtgccaggc

SEQ ID NO: 884133 - DNA, 15 bp, Homo sapiens
atttgatgtgccagg

SEQ ID NO: 884134 - DNA, 15 bp, Homo sapiens
catttgatgtgccag

SEQ ID NO: 884135 - DNA, 15 bp, Homo sapiens
tcatttgatgtgcca

SEQ ID NO: 884136 - DNA, 15 bp, Homo sapiens
ttcatttgatgtgcc

SEQ ID NO: 884137 - DNA, 15 bp, Homo sapiens
gttcatttgatgtgc

SEQ ID NO: 884138 - DNA, 15 bp, Homo sapiens
agttcatttgatgtg

SEQ ID NO: 884139 - DNA, 15 bp, Homo sapiens
aagttcatttgatgt

SEQ ID NO: 884140 - DNA, 15 bp, Homo sapiens
taagttcatttgatg

SEQ ID NO: 884141 - DNA, 15 bp, Homo sapiens
ttaagttcatttgat

SEQ ID NO: 884142 - DNA, 15 bp, Homo sapiens
attaagttcatttga

SEQ ID NO: 884143 - DNA, 15 bp, Homo sapiens
tattaagttcatttg

SEQ ID NO: 884144 - DNA, 15 bp, Homo sapiens
ttattaagttcattt

SEQ ID NO: 884145 - DNA, 15 bp, Homo sapiens
tttattaagttcatt

SEQ ID NO: 884146 - DNA, 15 bp, Homo sapiens
atttattaagttcat

SEQ ID NO: 884147 - DNA, 15 bp, Homo sapiens
tatttattaagttca

SEQ ID NO: 884148 - DNA, 15 bp, Homo sapiens
atatttattaagttc

SEQ ID NO: 884149 - DNA, 15 bp, Homo sapiens
aatatttattaagtt

SEQ ID NO: 884150 - DNA, 15 bp, Homo sapiens
aaatatttattaagt

SEQ ID NO: 884151 - DNA, 15 bp, Homo sapiens
caaaatatttattaa

SEQ ID NO: 884152 - DNA, 15 bp, Homo sapiens
tcaaaatatttatta

SEQ ID NO: 884153 - DNA, 15 bp, Homo sapiens
ctcaaaatatttatt

SEQ ID NO: 884154 - DNA, 15 bp, Homo sapiens
tctcaaaatatttat

SEQ ID NO: 884155 - DNA, 15 bp, Homo sapiens
ctctcaaaatattta

SEQ ID NO: 884156 - DNA, 15 bp, Homo sapiens
actctcaaaatattt

SEQ ID NO: 884157 - DNA, 15 bp, Homo sapiens
cactctcaaaatatt

SEQ ID NO: 884158 - DNA, 15 bp, Homo sapiens
tcactctcaaaatat

SEQ ID NO: 884159 - DNA, 15 bp, Homo sapiens
ttcactctcaaaata

SEQ ID NO: 884160 - DNA, 15 bp, Homo sapiens
attcactctcaaaat

SEQ ID NO: 884161 - DNA, 15 bp, Homo sapiens
aattcactctcaaaa

SEQ ID NO: 884162 - DNA, 15 bp, Homo sapiens
taattcactctcaaa

SEQ ID NO: 884163 - DNA, 15 bp, Homo sapiens
ttaattcactctcaa

SEQ ID NO: 884164 - DNA, 15 bp, Homo sapiens
attaattcactctca

SEQ ID NO: 884165 - DNA, 15 bp, Homo sapiens
tattaattcactctc

SEQ ID NO: 884166 - DNA, 15 bp, Homo sapiens
atattaattcactct

SEQ ID NO: 884167 - DNA, 15 bp, Homo sapiens
tatattaattcactc

SEQ ID NO: 884168 - DNA, 15 bp, Homo sapiens
atatattaattcact

SEQ ID NO: 884169 - DNA, 15 bp, Homo sapiens
tatatattaattcac

SEQ ID NO: 884170 - DNA, 15 bp, Homo sapiens
gtatatattaattca

SEQ ID NO: 884171 - DNA, 15 bp, Homo sapiens
tgtatatattaattc

SEQ ID NO: 884172 - DNA, 15 bp, Homo sapiens
ctgtatatattaatt

SEQ ID NO: 884173 - DNA, 15 bp, Homo sapiens
actgtatatattaat

SEQ ID NO: 884174 - DNA, 15 bp, Homo sapiens
tactgtatatattaa

SEQ ID NO: 884175 - DNA, 15 bp, Homo sapiens
ctactgtatatatta

SEQ ID NO: 884176 - DNA, 15 bp, Homo sapiens
cctactgtatatatt

SEQ ID NO: 884177 - DNA, 15 bp, Homo sapiens
tcctactgtatatat

SEQ ID NO: 884178 - DNA, 15 bp, Homo sapiens
ttcctactgtatata

SEQ ID NO: 884179 - DNA, 15 bp, Homo sapiens
tttcctactgtatat

SEQ ID NO: 884180 - DNA, 15 bp, Homo sapiens
ctttcctactgtata

SEQ ID NO: 884181 - DNA, 15 bp, Homo sapiens
tctttcctactgtat

SEQ ID NO: 884182 - DNA, 15 bp, Homo sapiens
gtctttcctactgta

SEQ ID NO: 884183 - DNA, 15 bp, Homo sapiens
tgtctttcctactgt

SEQ ID NO: 884184 - DNA, 15 bp, Homo sapiens
gtgtctttcctactg

SEQ ID NO: 884185 - DNA, 15 bp, Homo sapiens
tgtgtctttcctact

SEQ ID NO: 884186 - DNA, 15 bp, Homo sapiens
atgtgtctttcctac

SEQ ID NO: 884187 - DNA, 15 bp, Homo sapiens
tatgtgtctttccta

SEQ ID NO: 884188 - DNA, 15 bp, Homo sapiens
gtatgtgtctttcct

SEQ ID NO: 884189 - DNA, 15 bp, Homo sapiens
tgtatgtgtctttcc

SEQ ID NO: 884190 - DNA, 15 bp, Homo sapiens
gtgtatgtgtctttc

SEQ ID NO: 884191 - DNA, 15 bp, Homo sapiens
tgtgtatgtgtcttt

SEQ ID NO: 884192 - DNA, 15 bp, Homo sapiens
gtgtgtatgtgtctt

SEQ ID NO: 884193 - DNA, 15 bp, Homo sapiens
tgtgtgtatgtgtct

SEQ ID NO: 884194 - DNA, 15 bp, Homo sapiens
ttgtgtgtatgtgtc

SEQ ID NO: 884195 - DNA, 15 bp, Homo sapiens
cttgtgtgtatgtgt

SEQ ID NO: 884196 - DNA, 15 bp, Homo sapiens
ccttgtgtgtatgtg

SEQ ID NO: 884197 - DNA, 15 bp, Homo sapiens
gccttgtgtgtatgt

SEQ ID NO: 884198 - DNA, 15 bp, Homo sapiens
tgccttgtgtgtatg

SEQ ID NO: 884199 - DNA, 15 bp, Homo sapiens
ctgccttgtgtgtat

SEQ ID NO: 884200 - DNA, 15 bp, Homo sapiens
cctgccttgtgtgta

SEQ ID NO: 884201 - DNA, 15 bp, Homo sapiens
gcctgccttgtgtgt

SEQ ID NO: 884202 - DNA, 15 bp, Homo sapiens
agcctgccttgtgtg

SEQ ID NO: 884203 - DNA, 15 bp, Homo sapiens
cagcctgccttgtgt

SEQ ID NO: 884204 - DNA, 15 bp, Homo sapiens
gcagcctgccttgtg

SEQ ID NO: 884205 - DNA, 15 bp, Homo sapiens
tgcagcctgccttgt

SEQ ID NO: 884206 - DNA, 15 bp, Homo sapiens
ctgcagcctgccttg

SEQ ID NO: 884207 - DNA, 15 bp, Homo sapiens
actgcagcctgcctt

SEQ ID NO: 884208 - DNA, 15 bp, Homo sapiens
tactgcagcctgcct

SEQ ID NO: 884209 - DNA, 15 bp, Homo sapiens
ttactgcagcctgcc

SEQ ID NO: 884210 - DNA, 15 bp, Homo sapiens
cttactgcagcctgc

SEQ ID NO: 884211 - DNA, 15 bp, Homo sapiens
acttactgcagcctg

SEQ ID NO: 884212 - DNA, 15 bp, Homo sapiens
cacttactgcagcct

SEQ ID NO: 884213 - DNA, 15 bp, Homo sapiens
gcacttactgcagcc

SEQ ID NO: 884214 - DNA, 15 bp, Homo sapiens
agcacttactgcagc

SEQ ID NO: 884215 - DNA, 15 bp, Homo sapiens
cagcacttactgcag

SEQ ID NO: 884216 - DNA, 15 bp, Homo sapiens
acagcacttactgca

SEQ ID NO: 884217 - DNA, 15 bp, Homo sapiens
tacagcacttactgc

SEQ ID NO: 884218 - DNA, 15 bp, Homo sapiens
ttacagcacttactg

SEQ ID NO: 884219 - DNA, 15 bp, Homo sapiens
tttacagcacttact

SEQ ID NO: 884220 - DNA, 15 bp, Homo sapiens
ttttacagcacttac

SEQ ID NO: 884221 - DNA, 15 bp, Homo sapiens
cttttacagcactta

SEQ ID NO: 884222 - DNA, 15 bp, Homo sapiens
tcttttacagcactt

SEQ ID NO: 884223 - DNA, 15 bp, Homo sapiens
ctcttttacagcact

SEQ ID NO: 884224 - DNA, 15 bp, Homo sapiens
tctcttttacagcac

SEQ ID NO: 884225 - DNA, 15 bp, Homo sapiens
gtctcttttacagca

SEQ ID NO: 884226 - DNA, 15 bp, Homo sapiens
tgtctcttttacagc

SEQ ID NO: 884227 - DNA, 15 bp, Homo sapiens
ttgtctcttttacag

SEQ ID NO: 884228 - DNA, 15 bp, Homo sapiens
attgtctcttttaca

SEQ ID NO: 884229 - DNA, 15 bp, Homo sapiens
cattgtctcttttac

SEQ ID NO: 884230 - DNA, 15 bp, Homo sapiens
tcattgtctctttta

SEQ ID NO: 884231 - DNA, 15 bp, Homo sapiens
ctcattgtctctttt

SEQ ID NO: 884232 - DNA, 15 bp, Homo sapiens
tctcattgtctcttt

SEQ ID NO: 884233 - DNA, 15 bp, Homo sapiens
gtctcattgtctctt

SEQ ID NO: 884234 - DNA, 15 bp, Homo sapiens
tgtctcattgtctct

SEQ ID NO: 884235 - DNA, 15 bp, Homo sapiens
ctgtctcattgtctc

SEQ ID NO: 884236 - DNA, 15 bp, Homo sapiens
actgtctcattgtct

SEQ ID NO: 884237 - DNA, 15 bp, Homo sapiens
tactgtctcattgtc

SEQ ID NO: 884238 - DNA, 15 bp, Homo sapiens
ctactgtctcattgt

SEQ ID NO: 884239 - DNA, 15 bp, Homo sapiens
tctactgtctcattg

SEQ ID NO: 884240 - DNA, 15 bp, Homo sapiens
ctctactgtctcatt

SEQ ID NO: 884241 - DNA, 15 bp, Homo sapiens
cctctactgtctcat

SEQ ID NO: 884242 - DNA, 15 bp, Homo sapiens
tcctctactgtctca

SEQ ID NO: 884243 - DNA, 15 bp, Homo sapiens
ttcctctactgtctc

SEQ ID NO: 884244 - DNA, 15 bp, Homo sapiens
attcctctactgtct

SEQ ID NO: 884245 - DNA, 15 bp, Homo sapiens
aattcctctactgtc

SEQ ID NO: 884246 - DNA, 15 bp, Homo sapiens
gaattcctctactgt

SEQ ID NO: 884247 - DNA, 15 bp, Homo sapiens
agaattcctctactg

SEQ ID NO: 884248 - DNA, 15 bp, Homo sapiens
cagaattcctctact

SEQ ID NO: 884249 - DNA, 15 bp, Homo sapiens
gcagaattcctctac

SEQ ID NO: 884250 - DNA, 15 bp, Homo sapiens
tgcagaattcctcta

SEQ ID NO: 884251 - DNA, 15 bp, Homo sapiens
ttgcagaattcctct

SEQ ID NO: 884252 - DNA, 15 bp, Homo sapiens
gttgcagaattcctc

SEQ ID NO: 884253 - DNA, 15 bp, Homo sapiens
tgttgcagaattcct

SEQ ID NO: 884254 - DNA, 15 bp, Homo sapiens
ctgttgcagaattcc

SEQ ID NO: 884255 - DNA, 15 bp, Homo sapiens
tctgttgcagaattc

SEQ ID NO: 884256 - DNA, 15 bp, Homo sapiens
ttctgttgcagaatt

SEQ ID NO: 884257 - DNA, 15 bp, Homo sapiens
cttctgttgcagaat

SEQ ID NO: 884258 - DNA, 15 bp, Homo sapiens
gcttctgttgcagaa

SEQ ID NO: 884259 - DNA, 15 bp, Homo sapiens
agcttctgttgcaga

SEQ ID NO: 884260 - DNA, 15 bp, Homo sapiens
cagcttctgttgcag

SEQ ID NO: 884261 - DNA, 15 bp, Homo sapiens
acagcttctgttgca

SEQ ID NO: 884262 - DNA, 15 bp, Homo sapiens
cacagcttctgttgc

SEQ ID NO: 884263 - DNA, 15 bp, Homo sapiens
ccacagcttctgttg

SEQ ID NO: 884264 - DNA, 15 bp, Homo sapiens
accacagcttctgtt

SEQ ID NO: 884265 - DNA, 15 bp, Homo sapiens
caccacagcttctgt

SEQ ID NO: 884266 - DNA, 15 bp, Homo sapiens
tcaccacagcttctg

SEQ ID NO: 884267 - DNA, 15 bp, Homo sapiens
ctcaccacagcttct

SEQ ID NO: 884268 - DNA, 15 bp, Homo sapiens
tctcaccacagcttc

SEQ ID NO: 884269 - DNA, 15 bp, Homo sapiens
ttctcaccacagctt

SEQ ID NO: 884270 - DNA, 15 bp, Homo sapiens
attctcaccacagct

SEQ ID NO: 884271 - DNA, 15 bp, Homo sapiens
aattctcaccacagc

SEQ ID NO: 884272 - DNA, 15 bp, Homo sapiens
taattctcaccacag

SEQ ID NO: 884273 - DNA, 15 bp, Homo sapiens
ttaattctcaccaca

SEQ ID NO: 884274 - DNA, 15 bp, Homo sapiens
attaattctcaccac

SEQ ID NO: 884275 - DNA, 15 bp, Homo sapiens
gattaattctcacca

SEQ ID NO: 884276 - DNA, 15 bp, Homo sapiens
agattaattctcacc

SEQ ID NO: 884277 - DNA, 15 bp, Homo sapiens
tagattaattctcac

SEQ ID NO: 884278 - DNA, 15 bp, Homo sapiens
atagattaattctca

SEQ ID NO: 884279 - DNA, 15 bp, Homo sapiens
catagattaattctc

SEQ ID NO: 884280 - DNA, 15 bp, Homo sapiens
tcatagattaattct

SEQ ID NO: 884281 - DNA, 15 bp, Homo sapiens
atcatagattaattc

SEQ ID NO: 884282 - DNA, 15 bp, Homo sapiens
catcatagattaatt

SEQ ID NO: 884283 - DNA, 15 bp, Homo sapiens
acatcatagattaat

SEQ ID NO: 884284 - DNA, 15 bp, Homo sapiens
cacatcatagattaa

SEQ ID NO: 884285 - DNA, 15 bp, Homo sapiens
acacatcatagatta

SEQ ID NO: 884286 - DNA, 15 bp, Homo sapiens
aacacatcatagatt

SEQ ID NO: 884287 - DNA, 15 bp, Homo sapiens
taacacatcatagat

SEQ ID NO: 884288 - DNA, 15 bp, Homo sapiens
ctaacacatcataga

SEQ ID NO: 884289 - DNA, 15 bp, Homo sapiens
tctaacacatcatag

SEQ ID NO: 884290 - DNA, 15 bp, Homo sapiens
gtctaacacatcata

SEQ ID NO: 884291 - DNA, 15 bp, Homo sapiens
agtctaacacatcat

SEQ ID NO: 884292 - DNA, 15 bp, Homo sapiens
gagtctaacacatca

SEQ ID NO: 884293 - DNA, 15 bp, Homo sapiens
agagtctaacacatc

SEQ ID NO: 884294 - DNA, 15 bp, Homo sapiens
gagagtctaacacat

SEQ ID NO: 884295 - DNA, 15 bp, Homo sapiens
ggagagtctaacaca

SEQ ID NO: 884296 - DNA, 15 bp, Homo sapiens
tggagagtctaacac

SEQ ID NO: 884297 - DNA, 15 bp, Homo sapiens
ctggagagtctaaca

SEQ ID NO: 884298 - DNA, 15 bp, Homo sapiens
gctggagagtctaac

SEQ ID NO: 884299 - DNA, 15 bp, Homo sapiens
agctggagagtctaa

SEQ ID NO: 884300 - DNA, 15 bp, Homo sapiens
tagctggagagtcta

SEQ ID NO: 884301 - DNA, 15 bp, Homo sapiens
atagctggagagtct

SEQ ID NO: 884302 - DNA, 15 bp, Homo sapiens
tatagctggagagtc

SEQ ID NO: 884303 - DNA, 15 bp, Homo sapiens
atatagctggagagt

SEQ ID NO: 884304 - DNA, 15 bp, Homo sapiens
tatatagctggagag

SEQ ID NO: 884305 - DNA, 15 bp, Homo sapiens
atatatagctggaga

SEQ ID NO: 884306 - DNA, 15 bp, Homo sapiens
tatatatagctggag

SEQ ID NO: 884307 - DNA, 15 bp, Homo sapiens
atatatatagctgga

SEQ ID NO: 884308 - DNA, 15 bp, Homo sapiens
catatatatagctgg

SEQ ID NO: 884309 - DNA, 15 bp, Homo sapiens
gcatatatatagctg

SEQ ID NO: 884310 - DNA, 15 bp, Homo sapiens
ggcatatatatagct

SEQ ID NO: 884311 - DNA, 15 bp, Homo sapiens
aggcatatatatagc

SEQ ID NO: 884312 - DNA, 15 bp, Homo sapiens
caggcatatatatag

SEQ ID NO: 884313 - DNA, 15 bp, Homo sapiens
ccaggcatatatata

SEQ ID NO: 884314 - DNA, 15 bp, Homo sapiens
tccaggcatatatat

SEQ ID NO: 884315 - DNA, 15 bp, Homo sapiens
gtccaggcatatata

SEQ ID NO: 884316 - DNA, 15 bp, Homo sapiens
ggtccaggcatatat

SEQ ID NO: 884317 - DNA, 15 bp, Homo sapiens
cggtccaggcatata

SEQ ID NO: 884318 - DNA, 15 bp, Homo sapiens
tcggtccaggcatat

SEQ ID NO: 884319 - DNA, 15 bp, Homo sapiens
atcggtccaggcata

SEQ ID NO: 884320 - DNA, 15 bp, Homo sapiens
catcggtccaggcat

SEQ ID NO: 884321 - DNA, 15 bp, Homo sapiens
acatcggtccaggca

SEQ ID NO: 884322 - DNA, 15 bp, Homo sapiens
gacatcggtccaggc

SEQ ID NO: 884323 - DNA, 15 bp, Homo sapiens
tgacatcggtccagg

SEQ ID NO: 884324 - DNA, 15 bp, Homo sapiens
gtgacatcggtccag

SEQ ID NO: 884325 - DNA, 15 bp, Homo sapiens
ggtgacatcggtcca

SEQ ID NO: 884326 - DNA, 15 bp, Homo sapiens
tggtgacatcggtcc

SEQ ID NO: 884327 - DNA, 15 bp, Homo sapiens
gtggtgacatcggtc

SEQ ID NO: 884328 - DNA, 15 bp, Homo sapiens
agtggtgacatcggt

SEQ ID NO: 884329 - DNA, 15 bp, Homo sapiens
aagtggtgacatcgg

SEQ ID NO: 884330 - DNA, 15 bp, Homo sapiens
taagtggtgacatcg

SEQ ID NO: 884331 - DNA, 15 bp, Homo sapiens
ataagtggtgacatc

SEQ ID NO: 884332 - DNA, 15 bp, Homo sapiens
gataagtggtgacat

SEQ ID NO: 884333 - DNA, 15 bp, Homo sapiens
agataagtggtgaca

SEQ ID NO: 884334 - DNA, 15 bp, Homo sapiens
cagataagtggtgac

SEQ ID NO: 884335 - DNA, 15 bp, Homo sapiens
gcagataagtggtga

SEQ ID NO: 884336 - DNA, 15 bp, Homo sapiens
tgcagataagtggtg

SEQ ID NO: 884337 - DNA, 15 bp, Homo sapiens
ctgcagataagtggt

SEQ ID NO: 884338 - DNA, 15 bp, Homo sapiens
actgcagataagtgg

SEQ ID NO: 884339 - DNA, 15 bp, Homo sapiens
aactgcagataagtg

SEQ ID NO: 884340 - DNA, 15 bp, Homo sapiens
gaactgcagataagt

SEQ ID NO: 884341 - DNA, 15 bp, Homo sapiens
agaactgcagataag

SEQ ID NO: 884342 - DNA, 15 bp, Homo sapiens
gagaactgcagataa

SEQ ID NO: 884343 - DNA, 15 bp, Homo sapiens
ggagaactgcagata

SEQ ID NO: 884344 - DNA, 15 bp, Homo sapiens
aggagaactgcagat

SEQ ID NO: 884345 - DNA, 15 bp, Homo sapiens
caggagaactgcaga

SEQ ID NO: 884346 - DNA, 15 bp, Homo sapiens
acaggagaactgcag

SEQ ID NO: 884347 - DNA, 15 bp, Homo sapiens
cacaggagaactgca

SEQ ID NO: 884348 - DNA, 15 bp, Homo sapiens
tcacaggagaactgc

SEQ ID NO: 884349 - DNA, 15 bp, Homo sapiens
atcacaggagaactg

SEQ ID NO: 884350 - DNA, 15 bp, Homo sapiens
catcacaggagaact

SEQ ID NO: 884351 - DNA, 15 bp, Homo sapiens
acatcacaggagaac

SEQ ID NO: 884352 - DNA, 15 bp, Homo sapiens
aacatcacaggagaa

SEQ ID NO: 884353 - DNA, 15 bp, Homo sapiens
aaacatcacaggaga

SEQ ID NO: 884354 - DNA, 15 bp, Homo sapiens
gaaacatcacaggag

SEQ ID NO: 884355 - DNA, 15 bp, Homo sapiens
ggaaacatcacagga

SEQ ID NO: 884356 - DNA, 15 bp, Homo sapiens
tggaaacatcacagg

SEQ ID NO: 884357 - DNA, 15 bp, Homo sapiens
ctggaaacatcacag

SEQ ID NO: 884358 - DNA, 15 bp, Homo sapiens
cctggaaacatcaca

SEQ ID NO: 884359 - DNA, 15 bp, Homo sapiens
ccctggaaacatcac

SEQ ID NO: 884360 - DNA, 15 bp, Homo sapiens
accctggaaacatca

SEQ ID NO: 884361 - DNA, 15 bp, Homo sapiens
taccctggaaacatc

SEQ ID NO: 884362 - DNA, 15 bp, Homo sapiens
gtaccctggaaacat

SEQ ID NO: 884363 - DNA, 15 bp, Homo sapiens
tgtaccctggaaaca

SEQ ID NO: 884364 - DNA, 15 bp, Homo sapiens
atgtaccctggaaac

SEQ ID NO: 884365 - DNA, 15 bp, Homo sapiens
catgtaccctggaaa

SEQ ID NO: 884366 - DNA, 15 bp, Homo sapiens
tcatgtaccctggaa

SEQ ID NO: 884367 - DNA, 15 bp, Homo sapiens
atcatgtaccctgga

SEQ ID NO: 884368 - DNA, 15 bp, Homo sapiens
aatcatgtaccctgg

SEQ ID NO: 884369 - DNA, 15 bp, Homo sapiens
taatcatgtaccctg

SEQ ID NO: 884370 - DNA, 15 bp, Homo sapiens
ttaatcatgtaccct

SEQ ID NO: 884371 - DNA, 15 bp, Homo sapiens
cttaatcatgtaccc

SEQ ID NO: 884372 - DNA, 15 bp, Homo sapiens
tcttaatcatgtacc

SEQ ID NO: 884373 - DNA, 15 bp, Homo sapiens
gtcttaatcatgtac

SEQ ID NO: 884374 - DNA, 15 bp, Homo sapiens
agtcttaatcatgta

SEQ ID NO: 884375 - DNA, 15 bp, Homo sapiens
gagtcttaatcatgt

SEQ ID NO: 884376 - DNA, 15 bp, Homo sapiens
tgagtcttaatcatg

SEQ ID NO: 884377 - DNA, 15 bp, Homo sapiens
atgagtcttaatcat

SEQ ID NO: 884378 - DNA, 15 bp, Homo sapiens
aatgagtcttaatca

SEQ ID NO: 884379 - DNA, 15 bp, Homo sapiens
aaatgagtcttaatc

SEQ ID NO: 884380 - DNA, 15 bp, Homo sapiens
taaatgagtcttaat

SEQ ID NO: 884381 - DNA, 15 bp, Homo sapiens
ttaaatgagtcttaa

SEQ ID NO: 884382 - DNA, 15 bp, Homo sapiens
gttaaatgagtctta

SEQ ID NO: 884383 - DNA, 15 bp, Homo sapiens
tgttaaatgagtctt

SEQ ID NO: 884384 - DNA, 15 bp, Homo sapiens
atgttaaatgagtct

SEQ ID NO: 884385 - DNA, 15 bp, Homo sapiens
aatgttaaatgagtc

SEQ ID NO: 884386 - DNA, 15 bp, Homo sapiens
gaatgttaaatgagt

SEQ ID NO: 884387 - DNA, 15 bp, Homo sapiens
ggaatgttaaatgag

SEQ ID NO: 884388 - DNA, 15 bp, Homo sapiens
tggaatgttaaatga

SEQ ID NO: 884389 - DNA, 15 bp, Homo sapiens
ctggaatgttaaatg

SEQ ID NO: 884390 - DNA, 15 bp, Homo sapiens
cctggaatgttaaat

SEQ ID NO: 884391 - DNA, 15 bp, Homo sapiens
tcctggaatgttaaa

SEQ ID NO: 884392 - DNA, 15 bp, Homo sapiens
ttcctggaatgttaa

SEQ ID NO: 884393 - DNA, 15 bp, Homo sapiens
attcctggaatgtta

SEQ ID NO: 884394 - DNA, 15 bp, Homo sapiens
tattcctggaatgtt

SEQ ID NO: 884395 - DNA, 15 bp, Homo sapiens
atattcctggaatgt

SEQ ID NO: 884396 - DNA, 15 bp, Homo sapiens
aatattcctggaatg

SEQ ID NO: 884397 - DNA, 15 bp, Homo sapiens
gaatattcctggaat

SEQ ID NO: 884398 - DNA, 15 bp, Homo sapiens
agaatattcctggaa

SEQ ID NO: 884399 - DNA, 15 bp, Homo sapiens
cagaatattcctgga

SEQ ID NO: 884400 - DNA, 15 bp, Homo sapiens
gcagaatattcctgg

SEQ ID NO: 884401 - DNA, 15 bp, Homo sapiens
agcagaatattcctg

SEQ ID NO: 884402 - DNA, 15 bp, Homo sapiens
cagcagaatattcct

SEQ ID NO: 884403 - DNA, 15 bp, Homo sapiens
tcagcagaatattcc

SEQ ID NO: 884404 - DNA, 15 bp, Homo sapiens
atcagcagaatattc

SEQ ID NO: 884405 - DNA, 15 bp, Homo sapiens
catcagcagaatatt

SEQ ID NO: 884406 - DNA, 15 bp, Homo sapiens
tcatcagcagaatat

SEQ ID NO: 884407 - DNA, 15 bp, Homo sapiens
ttcatcagcagaata

SEQ ID NO: 884408 - DNA, 15 bp, Homo sapiens
attcatcagcagaat

SEQ ID NO: 884409 - DNA, 15 bp, Homo sapiens
tattcatcagcagaa

SEQ ID NO: 884410 - DNA, 15 bp, Homo sapiens
ttattcatcagcaga

SEQ ID NO: 884411 - DNA, 15 bp, Homo sapiens
attattcatcagcag

SEQ ID NO: 884412 - DNA, 15 bp, Homo sapiens
gattattcatcagca

SEQ ID NO: 884413 - DNA, 15 bp, Homo sapiens
tgattattcatcagc

SEQ ID NO: 884414 - DNA, 15 bp, Homo sapiens
gtgattattcatcag

SEQ ID NO: 884415 - DNA, 15 bp, Homo sapiens
agtgattattcatca

SEQ ID NO: 884416 - DNA, 15 bp, Homo sapiens
cagtgattattcatc

SEQ ID NO: 884417 - DNA, 15 bp, Homo sapiens
tcagtgattattcat

SEQ ID NO: 884418 - DNA, 15 bp, Homo sapiens
ctcagtgattattca

SEQ ID NO: 884419 - DNA, 15 bp, Homo sapiens
gctcagtgattattc

SEQ ID NO: 884420 - DNA, 15 bp, Homo sapiens
agctcagtgattatt

SEQ ID NO: 884421 - DNA, 15 bp, Homo sapiens
cagctcagtgattat

SEQ ID NO: 884422 - DNA, 15 bp, Homo sapiens
ccagctcagtgatta

SEQ ID NO: 884423 - DNA, 15 bp, Homo sapiens
tccagctcagtgatt

SEQ ID NO: 884424 - DNA, 15 bp, Homo sapiens
ctccagctcagtgat

SEQ ID NO: 884425 - DNA, 15 bp, Homo sapiens
actccagctcagtga

SEQ ID NO: 884426 - DNA, 15 bp, Homo sapiens
gactccagctcagtg

SEQ ID NO: 884427 - DNA, 15 bp, Homo sapiens
tgactccagctcagt

SEQ ID NO: 884428 - DNA, 15 bp, Homo sapiens
ttgactccagctcag

SEQ ID NO: 884429 - DNA, 15 bp, Homo sapiens
cttgactccagctca

SEQ ID NO: 884430 - DNA, 15 bp, Homo sapiens
tcttgactccagctc

SEQ ID NO: 884431 - DNA, 15 bp, Homo sapiens
ctcttgactccagct

SEQ ID NO: 884432 - DNA, 15 bp, Homo sapiens
tctcttgactccagc

SEQ ID NO: 884433 - DNA, 15 bp, Homo sapiens
ttctcttgactccag

SEQ ID NO: 884434 - DNA, 15 bp, Homo sapiens
cttctcttgactcca

SEQ ID NO: 884435 - DNA, 15 bp, Homo sapiens
tcttctcttgactcc

SEQ ID NO: 884436 - DNA, 15 bp, Homo sapiens
ttcttctcttgactc

SEQ ID NO: 884437 - DNA, 15 bp, Homo sapiens
cttcttctcttgact

SEQ ID NO: 884438 - DNA, 15 bp, Homo sapiens
gcttcttctcttgac

SEQ ID NO: 884439 - DNA, 15 bp, Homo sapiens
agcttcttctcttga

SEQ ID NO: 884440 - DNA, 15 bp, Homo sapiens
aagcttcttctcttg

SEQ ID NO: 884441 - DNA, 15 bp, Homo sapiens
aaagcttcttctctt

SEQ ID NO: 884442 - DNA, 15 bp, Homo sapiens
taaagcttcttctct

SEQ ID NO: 884443 - DNA, 15 bp, Homo sapiens
ctaaagcttcttctc

SEQ ID NO: 884444 - DNA, 15 bp, Homo sapiens
tctaaagcttcttct

SEQ ID NO: 884445 - DNA, 15 bp, Homo sapiens
atctaaagcttcttc

SEQ ID NO: 884446 - DNA, 15 bp, Homo sapiens
tatctaaagcttctt

SEQ ID NO: 884447 - DNA, 15 bp, Homo sapiens
gtatctaaagcttct

SEQ ID NO: 884448 - DNA, 15 bp, Homo sapiens
agtatctaaagcttc

SEQ ID NO: 884449 - DNA, 15 bp, Homo sapiens
tagtatctaaagctt

SEQ ID NO: 884450 - DNA, 15 bp, Homo sapiens
ttagtatctaaagct

SEQ ID NO: 884451 - DNA, 15 bp, Homo sapiens
gttagtatctaaagc

SEQ ID NO: 884452 - DNA, 15 bp, Homo sapiens
ggttagtatctaaag

SEQ ID NO: 884453 - DNA, 15 bp, Homo sapiens
cggttagtatctaaa

SEQ ID NO: 884454 - DNA, 15 bp, Homo sapiens
tcggttagtatctaa

SEQ ID NO: 884455 - DNA, 15 bp, Homo sapiens
gtcggttagtatcta

SEQ ID NO: 884456 - DNA, 15 bp, Homo sapiens
ggtcggttagtatct

SEQ ID NO: 884457 - DNA, 15 bp, Homo sapiens
gggtcggttagtatc

SEQ ID NO: 884458 - DNA, 15 bp, Homo sapiens
agggtcggttagtat

SEQ ID NO: 884459 - DNA, 15 bp, Homo sapiens
cagggtcggttagta

SEQ ID NO: 884460 - DNA, 15 bp, Homo sapiens
acagggtcggttagt

SEQ ID NO: 884461 - DNA, 15 bp, Homo sapiens
cacagggtcggttag

SEQ ID NO: 884462 - DNA, 15 bp, Homo sapiens
tcacagggtcggtta

SEQ ID NO: 884463 - DNA, 15 bp, Homo sapiens
atcacagggtcggtt

SEQ ID NO: 884464 - DNA, 15 bp, Homo sapiens
gatcacagggtcggt

SEQ ID NO: 884465 - DNA, 15 bp, Homo sapiens
tgatcacagggtcgg

SEQ ID NO: 884466 - DNA, 15 bp, Homo sapiens
atgatcacagggtcg

SEQ ID NO: 884467 - DNA, 15 bp, Homo sapiens
catgatcacagggtc

SEQ ID NO: 884468 - DNA, 15 bp, Homo sapiens
tcatgatcacagggt

SEQ ID NO: 884469 - DNA, 15 bp, Homo sapiens
ctcatgatcacaggg

SEQ ID NO: 884470 - DNA, 15 bp, Homo sapiens
gctcatgatcacagg

SEQ ID NO: 884471 - DNA, 15 bp, Homo sapiens
tgctcatgatcacag

SEQ ID NO: 884472 - DNA, 15 bp, Homo sapiens
ttgctcatgatcaca

SEQ ID NO: 884473 - DNA, 15 bp, Homo sapiens
cttgctcatgatcac

SEQ ID NO: 884474 - DNA, 15 bp, Homo sapiens
acttgctcatgatca

SEQ ID NO: 884475 - DNA, 15 bp, Homo sapiens
gacttgctcatgatc

SEQ ID NO: 884476 - DNA, 15 bp, Homo sapiens
tgacttgctcatgat

SEQ ID NO: 884477 - DNA, 15 bp, Homo sapiens
gtgacttgctcatga

SEQ ID NO: 884478 - DNA, 15 bp, Homo sapiens
agtgacttgctcatg

SEQ ID NO: 884479 - DNA, 15 bp, Homo sapiens
aagtgacttgctcat

SEQ ID NO: 884480 - DNA, 15 bp, Homo sapiens
gaagtgacttgctca

SEQ ID NO: 884481 - DNA, 15 bp, Homo sapiens
ggaagtgacttgctc

SEQ ID NO: 884482 - DNA, 15 bp, Homo sapiens
gggaagtgacttgct

SEQ ID NO: 884483 - DNA, 15 bp, Homo sapiens
agggaagtgacttgc

SEQ ID NO: 884484 - DNA, 15 bp, Homo sapiens
aagggaagtgacttg

SEQ ID NO: 884485 - DNA, 15 bp, Homo sapiens
gaagggaagtgactt

SEQ ID NO: 884486 - DNA, 15 bp, Homo sapiens
agaagggaagtgact

SEQ ID NO: 884487 - DNA, 15 bp, Homo sapiens
gagaagggaagtgac

SEQ ID NO: 884488 - DNA, 15 bp, Homo sapiens
agagaagggaagtga

SEQ ID NO: 884489 - DNA, 15 bp, Homo sapiens
cagagaagggaagtg

SEQ ID NO: 884490 - DNA, 15 bp, Homo sapiens
acagagaagggaagt

SEQ ID NO: 884491 - DNA, 15 bp, Homo sapiens
cacagagaagggaag

SEQ ID NO: 884492 - DNA, 15 bp, Homo sapiens
gcacagagaagggaa

SEQ ID NO: 884493 - DNA, 15 bp, Homo sapiens
ggcacagagaaggga

SEQ ID NO: 884494 - DNA, 15 bp, Homo sapiens
aggcacagagaaggg

SEQ ID NO: 884495 - DNA, 15 bp, Homo sapiens
gaggcacagagaagg

SEQ ID NO: 884496 - DNA, 15 bp, Homo sapiens
ttgaggcacagagaa

SEQ ID NO: 884497 - DNA, 15 bp, Homo sapiens
attgaggcacagaga

SEQ ID NO: 884498 - DNA, 15 bp, Homo sapiens
aattgaggcacagag

SEQ ID NO: 884499 - DNA, 15 bp, Homo sapiens
aaattgaggcacaga

SEQ ID NO: 884500 - DNA, 15 bp, Homo sapiens
gaaattgaggcacag

SEQ ID NO: 884501 - DNA, 15 bp, Homo sapiens
ggaaattgaggcaca

SEQ ID NO: 884502 - DNA, 15 bp, Homo sapiens
aggaaattgaggcac

SEQ ID NO: 884503 - DNA, 15 bp, Homo sapiens
gaggaaattgaggca

SEQ ID NO: 884504 - DNA, 15 bp, Homo sapiens
tgaggaaattgaggc

SEQ ID NO: 884505 - DNA, 15 bp, Homo sapiens
gtgaggaaattgagg

SEQ ID NO: 884506 - DNA, 15 bp, Homo sapiens
agtgaggaaattgag

SEQ ID NO: 884507 - DNA, 15 bp, Homo sapiens
aagtgaggaaattga

SEQ ID NO: 884508 - DNA, 15 bp, Homo sapiens
taagtgaggaaattg

SEQ ID NO: 884509 - DNA, 15 bp, Homo sapiens
ataagtgaggaaatt

SEQ ID NO: 884510 - DNA, 15 bp, Homo sapiens
tataagtgaggaaat

SEQ ID NO: 884511 - DNA, 15 bp, Homo sapiens
ttataagtgaggaaa

SEQ ID NO: 884512 - DNA, 15 bp, Homo sapiens
tttataagtgaggaa

SEQ ID NO: 884513 - DNA, 15 bp, Homo sapiens
ctttataagtgagga

SEQ ID NO: 884514 - DNA, 15 bp, Homo sapiens
actttataagtgagg

SEQ ID NO: 884515 - DNA, 15 bp, Homo sapiens
cactttataagtgag

SEQ ID NO: 884516 - DNA, 15 bp, Homo sapiens
tcactttataagtga

SEQ ID NO: 884517 - DNA, 15 bp, Homo sapiens
ttcactttataagtg

SEQ ID NO: 884518 - DNA, 15 bp, Homo sapiens
tttcactttataagt

SEQ ID NO: 884519 - DNA, 15 bp, Homo sapiens
ttttcactttataag

SEQ ID NO: 884520 - DNA, 15 bp, Homo sapiens
gttttcactttataa

SEQ ID NO: 884521 - DNA, 15 bp, Homo sapiens
tgttttcactttata

SEQ ID NO: 884522 - DNA, 15 bp, Homo sapiens
ttgttttcactttat

SEQ ID NO: 884523 - DNA, 15 bp, Homo sapiens
tttgttttcacttta

SEQ ID NO: 884524 - DNA, 15 bp, Homo sapiens
ctttgttttcacttt

SEQ ID NO: 884525 - DNA, 15 bp, Homo sapiens
cctttgttttcactt

SEQ ID NO: 884526 - DNA, 15 bp, Homo sapiens
ccctttgttttcact

SEQ ID NO: 884527 - DNA, 15 bp, Homo sapiens
gccctttgttttcac

SEQ ID NO: 884528 - DNA, 15 bp, Homo sapiens
ggccctttgttttca

SEQ ID NO: 884529 - DNA, 15 bp, Homo sapiens
tggccctttgttttc

SEQ ID NO: 884530 - DNA, 15 bp, Homo sapiens
ttggccctttgtttt

SEQ ID NO: 884531 - DNA, 15 bp, Homo sapiens
cttggccctttgttt

SEQ ID NO: 884532 - DNA, 15 bp, Homo sapiens
acttggccctttgtt

SEQ ID NO: 884533 - DNA, 15 bp, Homo sapiens
cacttggccctttgt

SEQ ID NO: 884534 - DNA, 15 bp, Homo sapiens
tcacttggccctttg

SEQ ID NO: 884535 - DNA, 15 bp, Homo sapiens
ctcacttggcccttt

SEQ ID NO: 884536 - DNA, 15 bp, Homo sapiens
cctcacttggccctt

SEQ ID NO: 884537 - DNA, 15 bp, Homo sapiens
ccctcacttggccct

SEQ ID NO: 884538 - DNA, 15 bp, Homo sapiens
accctcacttggccc

SEQ ID NO: 884539 - DNA, 15 bp, Homo sapiens
caccctcacttggcc

SEQ ID NO: 884540 - DNA, 15 bp, Homo sapiens
ccaccctcacttggc

SEQ ID NO: 884541 - DNA, 15 bp, Homo sapiens
tccaccctcacttgg

SEQ ID NO: 884542 - DNA, 15 bp, Homo sapiens
ttccaccctcacttg

SEQ ID NO: 884543 - DNA, 15 bp, Homo sapiens
cttccaccctcactt

SEQ ID NO: 884544 - DNA, 15 bp, Homo sapiens
ccttccaccctcact

SEQ ID NO: 884545 - DNA, 15 bp, Homo sapiens
tccttccaccctcac

SEQ ID NO: 884546 - DNA, 15 bp, Homo sapiens
atccttccaccctca

SEQ ID NO: 884547 - DNA, 15 bp, Homo sapiens
gatccttccaccctc

SEQ ID NO: 884548 - DNA, 15 bp, Homo sapiens
ggatccttccaccct

SEQ ID NO: 884549 - DNA, 15 bp, Homo sapiens
gggatccttccaccc

SEQ ID NO: 884550 - DNA, 15 bp, Homo sapiens
ggggatccttccacc

SEQ ID NO: 884551 - DNA, 15 bp, Homo sapiens
gggggatccttccac

SEQ ID NO: 884552 - DNA, 15 bp, Homo sapiens
agggggatccttcca

SEQ ID NO: 884553 - DNA, 15 bp, Homo sapiens
tagggggatccttcc

SEQ ID NO: 884554 - DNA, 15 bp, Homo sapiens
gtagggggatccttc

SEQ ID NO: 884555 - DNA, 15 bp, Homo sapiens
ggtagggggatcctt

SEQ ID NO: 884556 - DNA, 15 bp, Homo sapiens
gggtagggggatcct

SEQ ID NO: 884557 - DNA, 15 bp, Homo sapiens
agggtagggggatcc

SEQ ID NO: 884558 - DNA, 15 bp, Homo sapiens
cagggtagggggatc

SEQ ID NO: 884559 - DNA, 15 bp, Homo sapiens
ccagggtagggggat

SEQ ID NO: 884560 - DNA, 15 bp, Homo sapiens
tccagggtaggggga

SEQ ID NO: 884561 - DNA, 15 bp, Homo sapiens
ctccagggtaggggg

SEQ ID NO: 884562 - DNA, 15 bp, Homo sapiens
tctccagggtagggg

SEQ ID NO: 884563 - DNA, 15 bp, Homo sapiens
atctccagggtaggg

SEQ ID NO: 884564 - DNA, 15 bp, Homo sapiens
gatctccagggtagg

SEQ ID NO: 884565 - DNA, 15 bp, Homo sapiens
agatctccagggtag

SEQ ID NO: 884566 - DNA, 15 bp, Homo sapiens
cagatctccagggta

SEQ ID NO: 884567 - DNA, 15 bp, Homo sapiens
acagatctccagggt

SEQ ID NO: 884568 - DNA, 15 bp, Homo sapiens
cacagatctccaggg

SEQ ID NO: 884569 - DNA, 15 bp, Homo sapiens
tcacagatctccagg

SEQ ID NO: 884570 - DNA, 15 bp, Homo sapiens
atcacagatctccag

SEQ ID NO: 884571 - DNA, 15 bp, Homo sapiens
aatcacagatctcca

SEQ ID NO: 884572 - DNA, 15 bp, Homo sapiens
gaatcacagatctcc

SEQ ID NO: 884573 - DNA, 15 bp, Homo sapiens
agaatcacagatctc

SEQ ID NO: 884574 - DNA, 15 bp, Homo sapiens
tagaatcacagatct

SEQ ID NO: 884575 - DNA, 15 bp, Homo sapiens
atagaatcacagatc

SEQ ID NO: 884576 - DNA, 15 bp, Homo sapiens
tatagaatcacagat

SEQ ID NO: 884577 - DNA, 15 bp, Homo sapiens
ttatagaatcacaga

SEQ ID NO: 884578 - DNA, 15 bp, Homo sapiens
gttatagaatcacag

SEQ ID NO: 884579 - DNA, 15 bp, Homo sapiens
tgttatagaatcaca

SEQ ID NO: 884580 - DNA, 15 bp, Homo sapiens
atgttatagaatcac

SEQ ID NO: 884581 - DNA, 15 bp, Homo sapiens
tatgttatagaatca

SEQ ID NO: 884582 - DNA, 15 bp, Homo sapiens
atatgttatagaatc

SEQ ID NO: 884583 - DNA, 15 bp, Homo sapiens
catatgttatagaat

SEQ ID NO: 884584 - DNA, 15 bp, Homo sapiens
ccatatgttatagaa

SEQ ID NO: 884585 - DNA, 15 bp, Homo sapiens
cccatatgttataga

SEQ ID NO: 884586 - DNA, 15 bp, Homo sapiens
gcccatatgttatag

SEQ ID NO: 884587 - DNA, 15 bp, Homo sapiens
tgcccatatgttata

SEQ ID NO: 884588 - DNA, 15 bp, Homo sapiens
ctgcccatatgttat

SEQ ID NO: 884589 - DNA, 15 bp, Homo sapiens
cctgcccatatgtta

SEQ ID NO: 884590 - DNA, 15 bp, Homo sapiens
tcctgcccatatgtt

SEQ ID NO: 884591 - DNA, 15 bp, Homo sapiens
ttcctgcccatatgt

SEQ ID NO: 884592 - DNA, 15 bp, Homo sapiens
tttcctgcccatatg

SEQ ID NO: 884593 - DNA, 15 bp, Homo sapiens
ctttcctgcccatat

SEQ ID NO: 884594 - DNA, 15 bp, Homo sapiens
tctttcctgcccata

SEQ ID NO: 884595 - DNA, 15 bp, Homo sapiens
gtctttcctgcccat

SEQ ID NO: 884596 - DNA, 15 bp, Homo sapiens
agtctttcctgccca

SEQ ID NO: 884597 - DNA, 15 bp, Homo sapiens
aagtctttcctgccc

SEQ ID NO: 884598 - DNA, 15 bp, Homo sapiens
caagtctttcctgcc

SEQ ID NO: 884599 - DNA, 15 bp, Homo sapiens
tcaagtctttcctgc

SEQ ID NO: 884600 - DNA, 15 bp, Homo sapiens
atcaagtctttcctg

SEQ ID NO: 884601 - DNA, 15 bp, Homo sapiens
tatcaagtctttcct

SEQ ID NO: 884602 - DNA, 15 bp, Homo sapiens
ttatcaagtctttcc

SEQ ID NO: 884603 - DNA, 15 bp, Homo sapiens
gttatcaagtctttc

SEQ ID NO: 884604 - DNA, 15 bp, Homo sapiens
tgttatcaagtcttt

SEQ ID NO: 884605 - DNA, 15 bp, Homo sapiens
gtgttatcaagtctt

SEQ ID NO: 884606 - DNA, 15 bp, Homo sapiens
tgtgttatcaagtct

SEQ ID NO: 884607 - DNA, 15 bp, Homo sapiens
gtgtgttatcaagtc

SEQ ID NO: 884608 - DNA, 15 bp, Homo sapiens
agtgtgttatcaagt

SEQ ID NO: 884609 - DNA, 15 bp, Homo sapiens
gagtgtgttatcaag

SEQ ID NO: 884610 - DNA, 15 bp, Homo sapiens
tgagtgtgttatcaa

SEQ ID NO: 884611 - DNA, 15 bp, Homo sapiens
ctgagtgtgttatca

SEQ ID NO: 884612 - DNA, 15 bp, Homo sapiens
cctgagtgtgttatc

SEQ ID NO: 884613 - DNA, 15 bp, Homo sapiens
ccctgagtgtgttat

SEQ ID NO: 884614 - DNA, 15 bp, Homo sapiens
accctgagtgtgtta

SEQ ID NO: 884615 - DNA, 15 bp, Homo sapiens
gaccctgagtgtgtt

SEQ ID NO: 884616 - DNA, 15 bp, Homo sapiens
agaccctgagtgtgt

SEQ ID NO: 884617 - DNA, 15 bp, Homo sapiens
tagaccctgagtgtg

SEQ ID NO: 884618 - DNA, 15 bp, Homo sapiens
atagaccctgagtgt

SEQ ID NO: 884619 - DNA, 15 bp, Homo sapiens
catagaccctgagtg

SEQ ID NO: 884620 - DNA, 15 bp, Homo sapiens
acatagaccctgagt

SEQ ID NO: 884621 - DNA, 15 bp, Homo sapiens
cacatagaccctgag

SEQ ID NO: 884622 - DNA, 15 bp, Homo sapiens
ccacatagaccctga

SEQ ID NO: 884623 - DNA, 15 bp, Homo sapiens
cccacatagaccctg

SEQ ID NO: 884624 - DNA, 15 bp, Homo sapiens
gcccacatagaccct

SEQ ID NO: 884625 - DNA, 15 bp, Homo sapiens
agcccacatagaccc

SEQ ID NO: 884626 - DNA, 15 bp, Homo sapiens
cagcccacatagacc

SEQ ID NO: 884627 - DNA, 15 bp, Homo sapiens
acagcccacatagac

SEQ ID NO: 884628 - DNA, 15 bp, Homo sapiens
aacagcccacataga

SEQ ID NO: 884629 - DNA, 15 bp, Homo sapiens
gaacagcccacatag

SEQ ID NO: 884630 - DNA, 15 bp, Homo sapiens
agaacagcccacata

SEQ ID NO: 884631 - DNA, 15 bp, Homo sapiens
cagaacagcccacat

SEQ ID NO: 884632 - DNA, 15 bp, Homo sapiens
tcagaacagcccaca

SEQ ID NO: 884633 - DNA, 15 bp, Homo sapiens
ttcagaacagcccac

SEQ ID NO: 884634 - DNA, 15 bp, Homo sapiens
cttcagaacagccca

SEQ ID NO: 884635 - DNA, 15 bp, Homo sapiens
ccttcagaacagccc

SEQ ID NO: 884636 - DNA, 15 bp, Homo sapiens
gccttcagaacagcc

SEQ ID NO: 884637 - DNA, 15 bp, Homo sapiens
tgccttcagaacagc

SEQ ID NO: 884638 - DNA, 15 bp, Homo sapiens
atgccttcagaacag

SEQ ID NO: 884639 - DNA, 15 bp, Homo sapiens
gatgccttcagaaca

SEQ ID NO: 884640 - DNA, 15 bp, Homo sapiens
agatgccttcagaac

SEQ ID NO: 884641 - DNA, 15 bp, Homo sapiens
cagatgccttcagaa

SEQ ID NO: 884642 - DNA, 15 bp, Homo sapiens
ccagatgccttcaga

SEQ ID NO: 884643 - DNA, 15 bp, Homo sapiens
gccagatgccttcag

SEQ ID NO: 884644 - DNA, 15 bp, Homo sapiens
ggccagatgccttca

SEQ ID NO: 884645 - DNA, 15 bp, Homo sapiens
tggccagatgccttc

SEQ ID NO: 884646 - DNA, 15 bp, Homo sapiens
gtggccagatgcctt

SEQ ID NO: 884647 - DNA, 15 bp, Homo sapiens
ggtggccagatgcct

SEQ ID NO: 884648 - DNA, 15 bp, Homo sapiens
gggtggccagatgcc

SEQ ID NO: 884649 - DNA, 15 bp, Homo sapiens
tgggtggccagatgc

SEQ ID NO: 884650 - DNA, 15 bp, Homo sapiens
atgggtggccagatg

SEQ ID NO: 884651 - DNA, 15 bp, Homo sapiens
gatgggtggccagat

SEQ ID NO: 884652 - DNA, 15 bp, Homo sapiens
tgatgggtggccaga

SEQ ID NO: 884653 - DNA, 15 bp, Homo sapiens
gtgatgggtggccag

SEQ ID NO: 884654 - DNA, 15 bp, Homo sapiens
ggtgatgggtggcca

SEQ ID NO: 884655 - DNA, 15 bp, Homo sapiens
aggtgatgggtggcc

SEQ ID NO: 884656 - DNA, 15 bp, Homo sapiens
aaggtgatgggtggc

SEQ ID NO: 884657 - DNA, 15 bp, Homo sapiens
aaaggtgatgggtgg

SEQ ID NO: 884658 - DNA, 15 bp, Homo sapiens
aaaaggtgatgggtg

SEQ ID NO: 884659 - DNA, 15 bp, Homo sapiens
aaaaaggtgatgggt

SEQ ID NO: 884660 - DNA, 15 bp, Homo sapiens
taaaaaggtgatggg

SEQ ID NO: 884661 - DNA, 15 bp, Homo sapiens
ataaaaaggtgatgg

SEQ ID NO: 884662 - DNA, 15 bp, Homo sapiens
cataaaaaggtgatg

SEQ ID NO: 884663 - DNA, 15 bp, Homo sapiens
ccataaaaaggtgat

SEQ ID NO: 884664 - DNA, 15 bp, Homo sapiens
gccataaaaaggtga

SEQ ID NO: 884665 - DNA, 15 bp, Homo sapiens
ggccataaaaaggtg

SEQ ID NO: 884666 - DNA, 15 bp, Homo sapiens
tggccataaaaaggt

SEQ ID NO: 884667 - DNA, 15 bp, Homo sapiens
ttggccataaaaagg

SEQ ID NO: 884668 - DNA, 15 bp, Homo sapiens
cttggccataaaaag

SEQ ID NO: 884669 - DNA, 15 bp, Homo sapiens
acttggccataaaaa

SEQ ID NO: 884670 - DNA, 15 bp, Homo sapiens
tacttggccataaaa

SEQ ID NO: 884671 - DNA, 15 bp, Homo sapiens
gtacttggccataaa

SEQ ID NO: 884672 - DNA, 15 bp, Homo sapiens
agtacttggccataa

SEQ ID NO: 884673 - DNA, 15 bp, Homo sapiens
tagtacttggccata

SEQ ID NO: 884674 - DNA, 15 bp, Homo sapiens
ctagtacttggccat

SEQ ID NO: 884675 - DNA, 15 bp, Homo sapiens
cctagtacttggcca

SEQ ID NO: 884676 - DNA, 15 bp, Homo sapiens
acctagtacttggcc

SEQ ID NO: 884677 - DNA, 15 bp, Homo sapiens
aacctagtacttggc

SEQ ID NO: 884678 - DNA, 15 bp, Homo sapiens
caacctagtacttgg

SEQ ID NO: 884679 - DNA, 15 bp, Homo sapiens
ccaacctagtacttg

SEQ ID NO: 884680 - DNA, 15 bp, Homo sapiens
accaacctagtactt

SEQ ID NO: 884681 - DNA, 15 bp, Homo sapiens
aaccaacctagtact

SEQ ID NO: 884682 - DNA, 15 bp, Homo sapiens
gaaccaacctagtac

SEQ ID NO: 884683 - DNA, 15 bp, Homo sapiens
agaaccaacctagta

SEQ ID NO: 884684 - DNA, 15 bp, Homo sapiens
cagaaccaacctagt

SEQ ID NO: 884685 - DNA, 15 bp, Homo sapiens
acagaaccaacctag

SEQ ID NO: 884686 - DNA, 15 bp, Homo sapiens
cacagaaccaaccta

SEQ ID NO: 884687 - DNA, 15 bp, Homo sapiens
ccacagaaccaacct

SEQ ID NO: 884688 - DNA, 15 bp, Homo sapiens
accacagaaccaacc

SEQ ID NO: 884689 - DNA, 15 bp, Homo sapiens
aaccacagaaccaac

SEQ ID NO: 884690 - DNA, 15 bp, Homo sapiens
gaaccacagaaccaa

SEQ ID NO: 884691 - DNA, 15 bp, Homo sapiens
ggaaccacagaacca

SEQ ID NO: 884692 - DNA, 15 bp, Homo sapiens
tggaaccacagaacc

SEQ ID NO: 884693 - DNA, 15 bp, Homo sapiens
ttggaaccacagaac

SEQ ID NO: 884694 - DNA, 15 bp, Homo sapiens
attggaaccacagaa

SEQ ID NO: 884695 - DNA, 15 bp, Homo sapiens
aattggaaccacaga

SEQ ID NO: 884696 - DNA, 15 bp, Homo sapiens
taattggaaccacag

SEQ ID NO: 884697 - DNA, 15 bp, Homo sapiens
gtaattggaaccaca

SEQ ID NO: 884698 - DNA, 15 bp, Homo sapiens
tgtaattggaaccac

SEQ ID NO: 884699 - DNA, 15 bp, Homo sapiens
ctgtaattggaacca

SEQ ID NO: 884700 - DNA, 15 bp, Homo sapiens
cctgtaattggaacc

SEQ ID NO: 884701 - DNA, 15 bp, Homo sapiens
tcctgtaattggaac

SEQ ID NO: 884702 - DNA, 15 bp, Homo sapiens
ttcctgtaattggaa

SEQ ID NO: 884703 - DNA, 15 bp, Homo sapiens
gttcctgtaattgga

SEQ ID NO: 884704 - DNA, 15 bp, Homo sapiens
tgttcctgtaattgg

SEQ ID NO: 884705 - DNA, 15 bp, Homo sapiens
ctgttcctgtaattg

SEQ ID NO: 884706 - DNA, 15 bp, Homo sapiens
tctgttcctgtaatt

SEQ ID NO: 884707 - DNA, 15 bp, Homo sapiens
ttctgttcctgtaat

SEQ ID NO: 884708 - DNA, 15 bp, Homo sapiens
gttctgttcctgtaa

SEQ ID NO: 884709 - DNA, 15 bp, Homo sapiens
tgttctgttcctgta

SEQ ID NO: 884710 - DNA, 15 bp, Homo sapiens
ctgttctgttcctgt

SEQ ID NO: 884711 - DNA, 15 bp, Homo sapiens
cctgttctgttcctg

SEQ ID NO: 884712 - DNA, 15 bp, Homo sapiens
acctgttctgttcct

SEQ ID NO: 884713 - DNA, 15 bp, Homo sapiens
aacctgttctgttcc

SEQ ID NO: 884714 - DNA, 15 bp, Homo sapiens
gaacctgttctgttc

SEQ ID NO: 884715 - DNA, 15 bp, Homo sapiens
agaacctgttctgtt

SEQ ID NO: 884716 - DNA, 15 bp, Homo sapiens
tagaacctgttctgt

SEQ ID NO: 884717 - DNA, 15 bp, Homo sapiens
atagaacctgttctg

SEQ ID NO: 884718 - DNA, 15 bp, Homo sapiens
aatagaacctgttct

SEQ ID NO: 884719 - DNA, 15 bp, Homo sapiens
aaatagaacctgttc

SEQ ID NO: 884720 - DNA, 15 bp, Homo sapiens
aaaatagaacctgtt

SEQ ID NO: 884721 - DNA, 15 bp, Homo sapiens
gaaaatagaacctgt

SEQ ID NO: 884722 - DNA, 15 bp, Homo sapiens
ggaaaatagaacctg

SEQ ID NO: 884723 - DNA, 15 bp, Homo sapiens
gggaaaatagaacct

SEQ ID NO: 884724 - DNA, 15 bp, Homo sapiens
ggggaaaatagaacc

SEQ ID NO: 884725 - DNA, 15 bp, Homo sapiens
gggggaaaatagaac

SEQ ID NO: 884726 - DNA, 15 bp, Homo sapiens
tgggggaaaatagaa

SEQ ID NO: 884727 - DNA, 15 bp, Homo sapiens
ttgggggaaaataga

SEQ ID NO: 884728 - DNA, 15 bp, Homo sapiens
attgggggaaaatag

SEQ ID NO: 884729 - DNA, 15 bp, Homo sapiens
aattgggggaaaata

SEQ ID NO: 884730 - DNA, 15 bp, Homo sapiens
taattgggggaaaat

SEQ ID NO: 884731 - DNA, 15 bp, Homo sapiens
gtaattgggggaaaa

SEQ ID NO: 884732 - DNA, 15 bp, Homo sapiens
tgtaattgggggaaa

SEQ ID NO: 884733 - DNA, 15 bp, Homo sapiens
ctgtaattgggggaa

SEQ ID NO: 884734 - DNA, 15 bp, Homo sapiens
cctgtaattggggga

SEQ ID NO: 884735 - DNA, 15 bp, Homo sapiens
tcctgtaattggggg

SEQ ID NO: 884736 - DNA, 15 bp, Homo sapiens
ttcctgtaattgggg

SEQ ID NO: 884737 - DNA, 15 bp, Homo sapiens
tttcctgtaattggg

SEQ ID NO: 884738 - DNA, 15 bp, Homo sapiens
atttcctgtaattgg

SEQ ID NO: 884739 - DNA, 15 bp, Homo sapiens
aatttcctgtaattg

SEQ ID NO: 884740 - DNA, 15 bp, Homo sapiens
caatttcctgtaatt

SEQ ID NO: 884741 - DNA, 15 bp, Homo sapiens
ccaatttcctgtaat

SEQ ID NO: 884742 - DNA, 15 bp, Homo sapiens
gccaatttcctgtaa

SEQ ID NO: 884743 - DNA, 15 bp, Homo sapiens
ggccaatttcctgta

SEQ ID NO: 884744 - DNA, 15 bp, Homo sapiens
aggccaatttcctgt

SEQ ID NO: 884745 - DNA, 15 bp, Homo sapiens
aaggccaatttcctg

SEQ ID NO: 884746 - DNA, 15 bp, Homo sapiens
caaggccaatttcct

SEQ ID NO: 884747 - DNA, 15 bp, Homo sapiens
gcaaggccaatttcc

SEQ ID NO: 884748 - DNA, 15 bp, Homo sapiens
ggcaaggccaatttc

SEQ ID NO: 884749 - DNA, 15 bp, Homo sapiens
aggcaaggccaattt

SEQ ID NO: 884750 - DNA, 15 bp, Homo sapiens
gaggcaaggccaatt

SEQ ID NO: 884751 - DNA, 15 bp, Homo sapiens
agaggcaaggccaat

SEQ ID NO: 884752 - DNA, 15 bp, Homo sapiens
gagaggcaaggccaa

SEQ ID NO: 884753 - DNA, 15 bp, Homo sapiens
agagaggcaaggcca

SEQ ID NO: 884754 - DNA, 15 bp, Homo sapiens
cagagaggcaaggcc

SEQ ID NO: 884755 - DNA, 15 bp, Homo sapiens
ccagagaggcaaggc

SEQ ID NO: 884756 - DNA, 15 bp, Homo sapiens
cccagagaggcaagg

SEQ ID NO: 884757 - DNA, 15 bp, Homo sapiens
acccagagaggcaag

SEQ ID NO: 884758 - DNA, 15 bp, Homo sapiens
cacccagagaggcaa

SEQ ID NO: 884759 - DNA, 15 bp, Homo sapiens
gcacccagagaggca

SEQ ID NO: 884760 - DNA, 15 bp, Homo sapiens
tgcacccagagaggc

SEQ ID NO: 884761 - DNA, 15 bp, Homo sapiens
gtgcacccagagagg

SEQ ID NO: 884762 - DNA, 15 bp, Homo sapiens
ggtgcacccagagag

SEQ ID NO: 884763 - DNA, 15 bp, Homo sapiens
aggtgcacccagaga

SEQ ID NO: 884764 - DNA, 15 bp, Homo sapiens
caggtgcacccagag

SEQ ID NO: 884765 - DNA, 15 bp, Homo sapiens
tcaggtgcacccaga

SEQ ID NO: 884766 - DNA, 15 bp, Homo sapiens
atcaggtgcacccag

SEQ ID NO: 884767 - DNA, 15 bp, Homo sapiens
catcaggtgcaccca

SEQ ID NO: 884768 - DNA, 15 bp, Homo sapiens
tcatcaggtgcaccc

SEQ ID NO: 884769 - DNA, 15 bp, Homo sapiens
ttcatcaggtgcacc

SEQ ID NO: 884770 - DNA, 15 bp, Homo sapiens
attcatcaggtgcac

SEQ ID NO: 884771 - DNA, 15 bp, Homo sapiens
tattcatcaggtgca

SEQ ID NO: 884772 - DNA, 15 bp, Homo sapiens
gtattcatcaggtgc

SEQ ID NO: 884773 - DNA, 15 bp, Homo sapiens
tgtattcatcaggtg

SEQ ID NO: 884774 - DNA, 15 bp, Homo sapiens
atgtattcatcaggt

SEQ ID NO: 884775 - DNA, 15 bp, Homo sapiens
aatgtattcatcagg

SEQ ID NO: 884776 - DNA, 15 bp, Homo sapiens
caatgtattcatcag

SEQ ID NO: 884777 - DNA, 15 bp, Homo sapiens
tcaatgtattcatca

SEQ ID NO: 884778 - DNA, 15 bp, Homo sapiens
ttcaatgtattcatc

SEQ ID NO: 884779 - DNA, 15 bp, Homo sapiens
tttcaatgtattcat

SEQ ID NO: 884780 - DNA, 15 bp, Homo sapiens
ttttcaatgtattca

SEQ ID NO: 884781 - DNA, 15 bp, Homo sapiens
cttttcaatgtattc

SEQ ID NO: 884782 - DNA, 15 bp, Homo sapiens
gcttttcaatgtatt

SEQ ID NO: 884783 - DNA, 15 bp, Homo sapiens
agcttttcaatgtat

SEQ ID NO: 884784 - DNA, 15 bp, Homo sapiens
gagcttttcaatgta

SEQ ID NO: 884785 - DNA, 15 bp, Homo sapiens
cgagcttttcaatgt

SEQ ID NO: 884786 - DNA, 15 bp, Homo sapiens
gcgagcttttcaatg

SEQ ID NO: 884787 - DNA, 15 bp, Homo sapiens
ggcgagcttttcaat

SEQ ID NO: 884788 - DNA, 15 bp, Homo sapiens
tggcgagcttttcaa

SEQ ID NO: 884789 - DNA, 15 bp, Homo sapiens
gtggcgagcttttca

SEQ ID NO: 884790 - DNA, 15 bp, Homo sapiens
tgtggcgagcttttc

SEQ ID NO: 884791 - DNA, 15 bp, Homo sapiens
ctgtggcgagctttt

SEQ ID NO: 884792 - DNA, 15 bp, Homo sapiens
actgtggcgagcttt

SEQ ID NO: 884793 - DNA, 15 bp, Homo sapiens
tactgtggcgagctt

SEQ ID NO: 884794 - DNA, 15 bp, Homo sapiens
ttactgtggcgagct

SEQ ID NO: 884795 - DNA, 15 bp, Homo sapiens
cttactgtggcgagc

SEQ ID NO: 884796 - DNA, 15 bp, Homo sapiens
acttactgtggcgag

SEQ ID NO: 884797 - DNA, 15 bp, Homo sapiens
gacttactgtggcga

SEQ ID NO: 884798 - DNA, 15 bp, Homo sapiens
ggacttactgtggcg

SEQ ID NO: 884799 - DNA, 15 bp, Homo sapiens
gggacttactgtggc

SEQ ID NO: 884800 - DNA, 15 bp, Homo sapiens
agggacttactgtgg

SEQ ID NO: 884801 - DNA, 15 bp, Homo sapiens
aagggacttactgtg

SEQ ID NO: 884802 - DNA, 15 bp, Homo sapiens
gaagggacttactgt

SEQ ID NO: 884803 - DNA, 15 bp, Homo sapiens
agaagggacttactg

SEQ ID NO: 884804 - DNA, 15 bp, Homo sapiens
gagaagggacttact

SEQ ID NO: 884805 - DNA, 15 bp, Homo sapiens
agagaagggacttac

SEQ ID NO: 884806 - DNA, 15 bp, Homo sapiens
gagagaagggactta

SEQ ID NO: 884807 - DNA, 15 bp, Homo sapiens
ggagagaagggactt

SEQ ID NO: 884808 - DNA, 15 bp, Homo sapiens
gggagagaagggact

SEQ ID NO: 884809 - DNA, 15 bp, Homo sapiens
agggagagaagggac

SEQ ID NO: 884810 - DNA, 15 bp, Homo sapiens
cagggagagaaggga

SEQ ID NO: 884811 - DNA, 15 bp, Homo sapiens
ccagggagagaaggg

SEQ ID NO: 884812 - DNA, 15 bp, Homo sapiens
cccagggagagaagg

SEQ ID NO: 884813 - DNA, 15 bp, Homo sapiens
acccagggagagaag

SEQ ID NO: 884814 - DNA, 15 bp, Homo sapiens
cacccagggagagaa

SEQ ID NO: 884815 - DNA, 15 bp, Homo sapiens
ccacccagggagaga

SEQ ID NO: 884816 - DNA, 15 bp, Homo sapiens
tccacccagggagag

SEQ ID NO: 884817 - DNA, 15 bp, Homo sapiens
atccacccagggaga

SEQ ID NO: 884818 - DNA, 15 bp, Homo sapiens
catccacccagggag

SEQ ID NO: 884819 - DNA, 15 bp, Homo sapiens
ccatccacccaggga

SEQ ID NO: 884820 - DNA, 15 bp, Homo sapiens
accatccacccaggg

SEQ ID NO: 884821 - DNA, 15 bp, Homo sapiens
caccatccacccagg

SEQ ID NO: 884822 - DNA, 15 bp, Homo sapiens
ccaccatccacccag

SEQ ID NO: 884823 - DNA, 15 bp, Homo sapiens
tccaccatccaccca

SEQ ID NO: 884824 - DNA, 15 bp, Homo sapiens
ctccaccatccaccc

SEQ ID NO: 884825 - DNA, 15 bp, Homo sapiens
actccaccatccacc

SEQ ID NO: 884826 - DNA, 15 bp, Homo sapiens
cactccaccatccac

SEQ ID NO: 884827 - DNA, 15 bp, Homo sapiens
gcactccaccatcca

SEQ ID NO: 884828 - DNA, 15 bp, Homo sapiens
agcactccaccatcc

SEQ ID NO: 884829 - DNA, 15 bp, Homo sapiens
tagcactccaccatc

SEQ ID NO: 884830 - DNA, 15 bp, Homo sapiens
atagcactccaccat

SEQ ID NO: 884831 - DNA, 15 bp, Homo sapiens
tatagcactccacca

SEQ ID NO: 884832 - DNA, 15 bp, Homo sapiens
ctatagcactccacc

SEQ ID NO: 884833 - DNA, 15 bp, Homo sapiens
cctatagcactccac

SEQ ID NO: 884834 - DNA, 15 bp, Homo sapiens
gcctatagcactcca

SEQ ID NO: 884835 - DNA, 15 bp, Homo sapiens
agcctatagcactcc

SEQ ID NO: 884836 - DNA, 15 bp, Homo sapiens
tagcctatagcactc

SEQ ID NO: 884837 - DNA, 15 bp, Homo sapiens
atagcctatagcact

SEQ ID NO: 884838 - DNA, 15 bp, Homo sapiens
catagcctatagcac

SEQ ID NO: 884839 - DNA, 15 bp, Homo sapiens
ccatagcctatagca

SEQ ID NO: 884840 - DNA, 15 bp, Homo sapiens
gccatagcctatagc

SEQ ID NO: 884841 - DNA, 15 bp, Homo sapiens
ggccatagcctatag

SEQ ID NO: 884842 - DNA, 15 bp, Homo sapiens
gggccatagcctata

SEQ ID NO: 884843 - DNA, 15 bp, Homo sapiens
agggccatagcctat

SEQ ID NO: 884844 - DNA, 15 bp, Homo sapiens
gagggccatagccta

SEQ ID NO: 884845 - DNA, 15 bp, Homo sapiens
tgagggccatagcct

SEQ ID NO: 884846 - DNA, 15 bp, Homo sapiens
ctgagggccatagcc

SEQ ID NO: 884847 - DNA, 15 bp, Homo sapiens
cctgagggccatagc

SEQ ID NO: 884848 - DNA, 15 bp, Homo sapiens
acctgagggccatag

SEQ ID NO: 884849 - DNA, 15 bp, Homo sapiens
gacctgagggccata

SEQ ID NO: 884850 - DNA, 15 bp, Homo sapiens
agacctgagggccat

SEQ ID NO: 884851 - DNA, 15 bp, Homo sapiens
aagacctgagggcca

SEQ ID NO: 884852 - DNA, 15 bp, Homo sapiens
aaagacctgagggcc

SEQ ID NO: 884853 - DNA, 15 bp, Homo sapiens
caaagacctgagggc

SEQ ID NO: 884854 - DNA, 15 bp, Homo sapiens
tcaaagacctgaggg

SEQ ID NO: 884855 - DNA, 15 bp, Homo sapiens
ttcaaagacctgagg

SEQ ID NO: 884856 - DNA, 15 bp, Homo sapiens
tttcaaagacctgag

SEQ ID NO: 884857 - DNA, 15 bp, Homo sapiens
gtttcaaagacctga

SEQ ID NO: 884858 - DNA, 15 bp, Homo sapiens
agtttcaaagacctg

SEQ ID NO: 884859 - DNA, 15 bp, Homo sapiens
aagtttcaaagacct

SEQ ID NO: 884860 - DNA, 15 bp, Homo sapiens
aaagtttcaaagacc

SEQ ID NO: 884861 - DNA, 15 bp, Homo sapiens
gaaagtttcaaagac

SEQ ID NO: 884862 - DNA, 15 bp, Homo sapiens
ggaaagtttcaaaga

SEQ ID NO: 884863 - DNA, 15 bp, Homo sapiens
aggaaagtttcaaag

SEQ ID NO: 884864 - DNA, 15 bp, Homo sapiens
taggaaagtttcaaa

SEQ ID NO: 884865 - DNA, 15 bp, Homo sapiens
gtaggaaagtttcaa

SEQ ID NO: 884866 - DNA, 15 bp, Homo sapiens
agtaggaaagtttca

SEQ ID NO: 884867 - DNA, 15 bp, Homo sapiens
gagtaggaaagtttc

SEQ ID NO: 884868 - DNA, 15 bp, Homo sapiens
ggagtaggaaagttt

SEQ ID NO: 884869 - DNA, 15 bp, Homo sapiens
gggagtaggaaagtt

SEQ ID NO: 884870 - DNA, 15 bp, Homo sapiens
ggggagtaggaaagt

SEQ ID NO: 884871 - DNA, 15 bp, Homo sapiens
aggggagtaggaaag

SEQ ID NO: 884872 - DNA, 15 bp, Homo sapiens
caggggagtaggaaa

SEQ ID NO: 884873 - DNA, 15 bp, Homo sapiens
ccaggggagtaggaa

SEQ ID NO: 884874 - DNA, 15 bp, Homo sapiens
tccaggggagtagga

SEQ ID NO: 884875 - DNA, 15 bp, Homo sapiens
ttccaggggagtagg

SEQ ID NO: 884876 - DNA, 15 bp, Homo sapiens
cttccaggggagtag

SEQ ID NO: 884877 - DNA, 15 bp, Homo sapiens
gcttccaggggagta

SEQ ID NO: 884878 - DNA, 15 bp, Homo sapiens
ggcttccaggggagt

SEQ ID NO: 884879 - DNA, 15 bp, Homo sapiens
tggcttccaggggag

SEQ ID NO: 884880 - DNA, 15 bp, Homo sapiens
ctggcttccagggga

SEQ ID NO: 884881 - DNA, 15 bp, Homo sapiens
cctggcttccagggg

SEQ ID NO: 884882 - DNA, 15 bp, Homo sapiens
acctggcttccaggg

SEQ ID NO: 884883 - DNA, 15 bp, Homo sapiens
aacctggcttccagg

SEQ ID NO: 884884 - DNA, 15 bp, Homo sapiens
taacctggcttccag

SEQ ID NO: 884885 - DNA, 15 bp, Homo sapiens
ataacctggcttcca

SEQ ID NO: 884886 - DNA, 15 bp, Homo sapiens
gataacctggcttcc

SEQ ID NO: 884887 - DNA, 15 bp, Homo sapiens
agataacctggcttc

SEQ ID NO: 884888 - DNA, 15 bp, Homo sapiens
cagataacctggctt

SEQ ID NO: 884889 - DNA, 15 bp, Homo sapiens
ccagataacctggct

SEQ ID NO: 884890 - DNA, 15 bp, Homo sapiens
cccagataacctggc

SEQ ID NO: 884891 - DNA, 15 bp, Homo sapiens
ccccagataacctgg

SEQ ID NO: 884892 - DNA, 15 bp, Homo sapiens
tccccagataacctg

SEQ ID NO: 884893 - DNA, 15 bp, Homo sapiens
ttccccagataacct

SEQ ID NO: 884894 - DNA, 15 bp, Homo sapiens
tttccccagataacc

SEQ ID NO: 884895 - DNA, 15 bp, Homo sapiens
ttttccccagataac

SEQ ID NO: 884896 - DNA, 15 bp, Homo sapiens
tttttccccagataa

SEQ ID NO: 884897 - DNA, 15 bp, Homo sapiens
ttttttccccagata

SEQ ID NO: 884898 - DNA, 15 bp, Homo sapiens
tttttttccccagat

SEQ ID NO: 884899 - DNA, 15 bp, Homo sapiens
atttttttccccaga

SEQ ID NO: 884900 - DNA, 15 bp, Homo sapiens
gatttttttccccag

SEQ ID NO: 884901 - DNA, 15 bp, Homo sapiens
tgatttttttcccca

SEQ ID NO: 884902 - DNA, 15 bp, Homo sapiens
ctgatttttttcccc

SEQ ID NO: 884903 - DNA, 15 bp, Homo sapiens
tctgatttttttccc

SEQ ID NO: 884904 - DNA, 15 bp, Homo sapiens
ttctgatttttttcc

SEQ ID NO: 884905 - DNA, 15 bp, Homo sapiens
attctgatttttttc

SEQ ID NO: 884906 - DNA, 15 bp, Homo sapiens
cattctgattttttt

SEQ ID NO: 884907 - DNA, 15 bp, Homo sapiens
acattctgatttttt

SEQ ID NO: 884908 - DNA, 15 bp, Homo sapiens
cacattctgattttt

SEQ ID NO: 884909 - DNA, 15 bp, Homo sapiens
ccacattctgatttt

SEQ ID NO: 884910 - DNA, 15 bp, Homo sapiens
accacattctgattt

SEQ ID NO: 884911 - DNA, 15 bp, Homo sapiens
caccacattctgatt

SEQ ID NO: 884912 - DNA, 15 bp, Homo sapiens
ccaccacattctgat

SEQ ID NO: 884913 - DNA, 15 bp, Homo sapiens
cccaccacattctga

SEQ ID NO: 884914 - DNA, 15 bp, Homo sapiens
acccaccacattctg

SEQ ID NO: 884915 - DNA, 15 bp, Homo sapiens
aacccaccacattct

SEQ ID NO: 884916 - DNA, 15 bp, Homo sapiens
taacccaccacattc

SEQ ID NO: 884917 - DNA, 15 bp, Homo sapiens
gtaacccaccacatt

SEQ ID NO: 884918 - DNA, 15 bp, Homo sapiens
tgtaacccaccacat

SEQ ID NO: 884919 - DNA, 15 bp, Homo sapiens
atgtaacccaccaca

SEQ ID NO: 884920 - DNA, 15 bp, Homo sapiens
aatgtaacccaccac

SEQ ID NO: 884921 - DNA, 15 bp, Homo sapiens
aaatgtaacccacca

SEQ ID NO: 884922 - DNA, 15 bp, Homo sapiens
caaatgtaacccacc

SEQ ID NO: 884923 - DNA, 15 bp, Homo sapiens
gcaaatgtaacccac

SEQ ID NO: 884924 - DNA, 15 bp, Homo sapiens
tgcaaatgtaaccca

SEQ ID NO: 884925 - DNA, 15 bp, Homo sapiens
gtgcaaatgtaaccc

SEQ ID NO: 884926 - DNA, 15 bp, Homo sapiens
tgtgcaaatgtaacc

SEQ ID NO: 884927 - DNA, 15 bp, Homo sapiens
ttgtgcaaatgtaac

SEQ ID NO: 884928 - DNA, 15 bp, Homo sapiens
cttgtgcaaatgtaa

SEQ ID NO: 884929 - DNA, 15 bp, Homo sapiens
acttgtgcaaatgta

SEQ ID NO: 884930 - DNA, 15 bp, Homo sapiens
cacttgtgcaaatgt

SEQ ID NO: 884931 - DNA, 15 bp, Homo sapiens
tcacttgtgcaaatg

SEQ ID NO: 884932 - DNA, 15 bp, Homo sapiens
ttcacttgtgcaaat

SEQ ID NO: 884933 - DNA, 15 bp, Homo sapiens
tttcacttgtgcaaa

SEQ ID NO: 884934 - DNA, 15 bp, Homo sapiens
gtttcacttgtgcaa

SEQ ID NO: 884935 - DNA, 15 bp, Homo sapiens
agtttcacttgtgca

SEQ ID NO: 884936 - DNA, 15 bp, Homo sapiens
aagtttcacttgtgc

SEQ ID NO: 884937 - DNA, 15 bp, Homo sapiens
gaagtttcacttgtg

SEQ ID NO: 884938 - DNA, 15 bp, Homo sapiens
tgaagtttcacttgt

SEQ ID NO: 884939 - DNA, 15 bp, Homo sapiens
gtgaagtttcacttg

SEQ ID NO: 884940 - DNA, 15 bp, Homo sapiens
tgtgaagtttcactt

SEQ ID NO: 884941 - DNA, 15 bp, Homo sapiens
atgtgaagtttcact

SEQ ID NO: 884942 - DNA, 15 bp, Homo sapiens
aatgtgaagtttcac

SEQ ID NO: 884943 - DNA, 15 bp, Homo sapiens
aaatgtgaagtttca

SEQ ID NO: 884944 - DNA, 15 bp, Homo sapiens
aaaatgtgaagtttc

SEQ ID NO: 884945 - DNA, 15 bp, Homo sapiens
caaaatgtgaagttt

SEQ ID NO: 884946 - DNA, 15 bp, Homo sapiens
tcaaaatgtgaagtt

SEQ ID NO: 884947 - DNA, 15 bp, Homo sapiens
atcaaaatgtgaagt

SEQ ID NO: 884948 - DNA, 15 bp, Homo sapiens
tatcaaaatgtgaag

SEQ ID NO: 884949 - DNA, 15 bp, Homo sapiens
ctatcaaaatgtgaa

SEQ ID NO: 884950 - DNA, 15 bp, Homo sapiens
tctatcaaaatgtga

SEQ ID NO: 884951 - DNA, 15 bp, Homo sapiens
atctatcaaaatgtg

SEQ ID NO: 884952 - DNA, 15 bp, Homo sapiens
aatctatcaaaatgt

SEQ ID NO: 884953 - DNA, 15 bp, Homo sapiens
aaatctatcaaaatg

SEQ ID NO: 884954 - DNA, 15 bp, Homo sapiens
gaaatctatcaaaat

SEQ ID NO: 884955 - DNA, 15 bp, Homo sapiens
agaaatctatcaaaa

SEQ ID NO: 884956 - DNA, 15 bp, Homo sapiens
gagaaatctatcaaa

SEQ ID NO: 884957 - DNA, 15 bp, Homo sapiens
ggagaaatctatcaa

SEQ ID NO: 884958 - DNA, 15 bp, Homo sapiens
aggagaaatctatca

SEQ ID NO: 884959 - DNA, 15 bp, Homo sapiens
aaggagaaatctatc

SEQ ID NO: 884960 - DNA, 15 bp, Homo sapiens
taaggagaaatctat

SEQ ID NO: 884961 - DNA, 15 bp, Homo sapiens
ttaaggagaaatcta

SEQ ID NO: 884962 - DNA, 15 bp, Homo sapiens
attaaggagaaatct

SEQ ID NO: 884963 - DNA, 15 bp, Homo sapiens
tattaaggagaaatc

SEQ ID NO: 884964 - DNA, 15 bp, Homo sapiens
ttattaaggagaaat

SEQ ID NO: 884965 - DNA, 15 bp, Homo sapiens
attattaaggagaaa

SEQ ID NO: 884966 - DNA, 15 bp, Homo sapiens
aattattaaggagaa

SEQ ID NO: 884967 - DNA, 15 bp, Homo sapiens
aaattattaaggaga

SEQ ID NO: 884968 - DNA, 15 bp, Homo sapiens
caaattattaaggag

SEQ ID NO: 884969 - DNA, 15 bp, Homo sapiens
tcaaattattaagga

SEQ ID NO: 884970 - DNA, 15 bp, Homo sapiens
atcaaattattaagg

SEQ ID NO: 884971 - DNA, 15 bp, Homo sapiens
aatcaaattattaag

SEQ ID NO: 884972 - DNA, 15 bp, Homo sapiens
aaatcaaattattaa

SEQ ID NO: 884973 - DNA, 15 bp, Homo sapiens
aaaatcaaattatta

SEQ ID NO: 884974 - DNA, 15 bp, Homo sapiens
caaaatcaaattatt

SEQ ID NO: 884975 - DNA, 15 bp, Homo sapiens
tcaaaatcaaattat

SEQ ID NO: 884976 - DNA, 15 bp, Homo sapiens
ttcaaaatcaaatta

SEQ ID NO: 884977 - DNA, 15 bp, Homo sapiens
tttcaaaatcaaatt

SEQ ID NO: 884978 - DNA, 15 bp, Homo sapiens
atttcaaaatcaaat

SEQ ID NO: 884979 - DNA, 15 bp, Homo sapiens
gatttcaaaatcaaa

SEQ ID NO: 884980 - DNA, 15 bp, Homo sapiens
tgatttcaaaatcaa

SEQ ID NO: 884981 - DNA, 15 bp, Homo sapiens
ctgatttcaaaatca

SEQ ID NO: 884982 - DNA, 15 bp, Homo sapiens
gctgatttcaaaatc

SEQ ID NO: 884983 - DNA, 15 bp, Homo sapiens
agctgatttcaaaat

SEQ ID NO: 884984 - DNA, 15 bp, Homo sapiens
tagctgatttcaaaa

SEQ ID NO: 884985 - DNA, 15 bp, Homo sapiens
gtagctgatttcaaa

SEQ ID NO: 884986 - DNA, 15 bp, Homo sapiens
ggtagctgatttcaa

SEQ ID NO: 884987 - DNA, 15 bp, Homo sapiens
aggtagctgatttca

SEQ ID NO: 884988 - DNA, 15 bp, Homo sapiens
taggtagctgatttc

SEQ ID NO: 884989 - DNA, 15 bp, Homo sapiens
gtaggtagctgattt

SEQ ID NO: 884990 - DNA, 15 bp, Homo sapiens
tgtaggtagctgatt

SEQ ID NO: 884991 - DNA, 15 bp, Homo sapiens
ctgtaggtagctgat

SEQ ID NO: 884992 - DNA, 15 bp, Homo sapiens
tctgtaggtagctga

SEQ ID NO: 884993 - DNA, 15 bp, Homo sapiens
atctgtaggtagctg

SEQ ID NO: 884994 - DNA, 15 bp, Homo sapiens
catctgtaggtagct

SEQ ID NO: 884995 - DNA, 15 bp, Homo sapiens
acatctgtaggtagc

SEQ ID NO: 884996 - DNA, 15 bp, Homo sapiens
aacatctgtaggtag

SEQ ID NO: 884997 - DNA, 15 bp, Homo sapiens
aaacatctgtaggta

SEQ ID NO: 884998 - DNA, 15 bp, Homo sapiens
taaacatctgtaggt

SEQ ID NO: 884999 - DNA, 15 bp, Homo sapiens
gtaaacatctgtagg

SEQ ID NO: 885000 - DNA, 15 bp, Homo sapiens
tgtaaacatctgtag

SEQ ID NO: 885001 - DNA, 15 bp, Homo sapiens
atgtaaacatctgta

SEQ ID NO: 885002 - DNA, 15 bp, Homo sapiens
gatgtaaacatctgt

SEQ ID NO: 885003 - DNA, 15 bp, Homo sapiens
agatgtaaacatctg

SEQ ID NO: 885004 - DNA, 15 bp, Homo sapiens
gagatgtaaacatct

SEQ ID NO: 885005 - DNA, 15 bp, Homo sapiens
agagatgtaaacatc

SEQ ID NO: 885006 - DNA, 15 bp, Homo sapiens
aagagatgtaaacat

SEQ ID NO: 885007 - DNA, 15 bp, Homo sapiens
taagagatgtaaaca

SEQ ID NO: 885008 - DNA, 15 bp, Homo sapiens
ttaagagatgtaaac

SEQ ID NO: 885009 - DNA, 15 bp, Homo sapiens
tttaagagatgtaaa

SEQ ID NO: 885010 - DNA, 15 bp, Homo sapiens
atttaagagatgtaa

SEQ ID NO: 885011 - DNA, 15 bp, Homo sapiens
aatttaagagatgta

SEQ ID NO: 885012 - DNA, 15 bp, Homo sapiens
aaatttaagagatgt

SEQ ID NO: 885013 - DNA, 15 bp, Homo sapiens
aaaatttaagagatg

SEQ ID NO: 885014 - DNA, 15 bp, Homo sapiens
taaaatttaagagat

SEQ ID NO: 885015 - DNA, 15 bp, Homo sapiens
ttaaaatttaagaga

SEQ ID NO: 885016 - DNA, 15 bp, Homo sapiens
cttaaaatttaagag

SEQ ID NO: 885017 - DNA, 15 bp, Homo sapiens
gcttaaaatttaaga

SEQ ID NO: 885018 - DNA, 15 bp, Homo sapiens
tgcttaaaatttaag

SEQ ID NO: 885019 - DNA, 15 bp, Homo sapiens
ctgcttaaaatttaa

SEQ ID NO: 885020 - DNA, 15 bp, Homo sapiens
actgcttaaaattta

SEQ ID NO: 885021 - DNA, 15 bp, Homo sapiens
tactgcttaaaattt

SEQ ID NO: 885022 - DNA, 15 bp, Homo sapiens
atactgcttaaaatt

SEQ ID NO: 885023 - DNA, 15 bp, Homo sapiens
gatactgcttaaaat

SEQ ID NO: 885024 - DNA, 15 bp, Homo sapiens
agatactgcttaaaa

SEQ ID NO: 885025 - DNA, 15 bp, Homo sapiens
aagatactgcttaaa

SEQ ID NO: 885026 - DNA, 15 bp, Homo sapiens
caagatactgcttaa

SEQ ID NO: 885027 - DNA, 15 bp, Homo sapiens
tcaagatactgctta

SEQ ID NO: 885028 - DNA, 15 bp, Homo sapiens
ttcaagatactgctt

SEQ ID NO: 885029 - DNA, 15 bp, Homo sapiens
gttcaagatactgct

SEQ ID NO: 885030 - DNA, 15 bp, Homo sapiens
ggttcaagatactgc

SEQ ID NO: 885031 - DNA, 15 bp, Homo sapiens
gggttcaagatactg

SEQ ID NO: 885032 - DNA, 15 bp, Homo sapiens
tgggttcaagatact

SEQ ID NO: 885033 - DNA, 15 bp, Homo sapiens
gtgggttcaagatac

SEQ ID NO: 885034 - DNA, 15 bp, Homo sapiens
ggtgggttcaagata

SEQ ID NO: 885035 - DNA, 15 bp, Homo sapiens
tggtgggttcaagat

SEQ ID NO: 885036 - DNA, 15 bp, Homo sapiens
ttggtgggttcaaga

SEQ ID NO: 885037 - DNA, 15 bp, Homo sapiens
gttggtgggttcaag

SEQ ID NO: 885038 - DNA, 15 bp, Homo sapiens
tgttggtgggttcaa

SEQ ID NO: 885039 - DNA, 15 bp, Homo sapiens
ctgttggtgggttca

SEQ ID NO: 885040 - DNA, 15 bp, Homo sapiens
cctgttggtgggttc

SEQ ID NO: 885041 - DNA, 15 bp, Homo sapiens
gcctgttggtgggtt

SEQ ID NO: 885042 - DNA, 15 bp, Homo sapiens
agcctgttggtgggt

SEQ ID NO: 885043 - DNA, 15 bp, Homo sapiens
tagcctgttggtggg

SEQ ID NO: 885044 - DNA, 15 bp, Homo sapiens
atagcctgttggtgg

SEQ ID NO: 885045 - DNA, 15 bp, Homo sapiens
tatagcctgttggtg

SEQ ID NO: 885046 - DNA, 15 bp, Homo sapiens
ttatagcctgttggt

SEQ ID NO: 885047 - DNA, 15 bp, Homo sapiens
attatagcctgttgg

SEQ ID NO: 885048 - DNA, 15 bp, Homo sapiens
tattatagcctgttg

SEQ ID NO: 885049 - DNA, 15 bp, Homo sapiens
ctattatagcctgtt

SEQ ID NO: 885050 - DNA, 15 bp, Homo sapiens
actattatagcctgt

SEQ ID NO: 885051 - DNA, 15 bp, Homo sapiens
tactattatagcctg

SEQ ID NO: 885052 - DNA, 15 bp, Homo sapiens
ctactattatagcct

SEQ ID NO: 885053 - DNA, 15 bp, Homo sapiens
gctactattatagcc

SEQ ID NO: 885054 - DNA, 15 bp, Homo sapiens
ggctactattatagc

SEQ ID NO: 885055 - DNA, 15 bp, Homo sapiens
gggctactattatag

SEQ ID NO: 885056 - DNA, 15 bp, Homo sapiens
agggctactattata

SEQ ID NO: 885057 - DNA, 15 bp, Homo sapiens
aagggctactattat

SEQ ID NO: 885058 - DNA, 15 bp, Homo sapiens
caagggctactatta

SEQ ID NO: 885059 - DNA, 15 bp, Homo sapiens
tcaagggctactatt

SEQ ID NO: 885060 - DNA, 15 bp, Homo sapiens
ttcaagggctactat

SEQ ID NO: 885061 - DNA, 15 bp, Homo sapiens
tttcaagggctacta

SEQ ID NO: 885062 - DNA, 15 bp, Homo sapiens
ttttcaagggctact

SEQ ID NO: 885063 - DNA, 15 bp, Homo sapiens
gttttcaagggctac

SEQ ID NO: 885064 - DNA, 15 bp, Homo sapiens
ggttttcaagggcta

SEQ ID NO: 885065 - DNA, 15 bp, Homo sapiens
gggttttcaagggct

SEQ ID NO: 885066 - DNA, 15 bp, Homo sapiens
agggttttcaagggc

SEQ ID NO: 885067 - DNA, 15 bp, Homo sapiens
aagggttttcaaggg

SEQ ID NO: 885068 - DNA, 15 bp, Homo sapiens
caagggttttcaagg

SEQ ID NO: 885069 - DNA, 15 bp, Homo sapiens
ccaagggttttcaag

SEQ ID NO: 885070 - DNA, 15 bp, Homo sapiens
gccaagggttttcaa

SEQ ID NO: 885071 - DNA, 15 bp, Homo sapiens
tgccaagggttttca

SEQ ID NO: 885072 - DNA, 15 bp, Homo sapiens
atgccaagggttttc

SEQ ID NO: 885073 - DNA, 15 bp, Homo sapiens
tatgccaagggtttt

SEQ ID NO: 885074 - DNA, 15 bp, Homo sapiens
ttatgccaagggttt

SEQ ID NO: 885075 - DNA, 15 bp, Homo sapiens
tttatgccaagggtt

SEQ ID NO: 885076 - DNA, 15 bp, Homo sapiens
ctttatgccaagggt

SEQ ID NO: 885077 - DNA, 15 bp, Homo sapiens
actttatgccaaggg

SEQ ID NO: 885078 - DNA, 15 bp, Homo sapiens
cactttatgccaagg

SEQ ID NO: 885079 - DNA, 15 bp, Homo sapiens
acactttatgccaag

SEQ ID NO: 885080 - DNA, 15 bp, Homo sapiens
cacactttatgccaa

SEQ ID NO: 885081 - DNA, 15 bp, Homo sapiens
acacactttatgcca

SEQ ID NO: 885082 - DNA, 15 bp, Homo sapiens
cacacactttatgcc

SEQ ID NO: 885083 - DNA, 15 bp, Homo sapiens
acacacactttatgc

SEQ ID NO: 885084 - DNA, 15 bp, Homo sapiens
tacacacactttatg

SEQ ID NO: 885085 - DNA, 15 bp, Homo sapiens
atacacacactttat

SEQ ID NO: 885086 - DNA, 15 bp, Homo sapiens
catacacacacttta

SEQ ID NO: 885087 - DNA, 15 bp, Homo sapiens
tcatacacacacttt

SEQ ID NO: 885088 - DNA, 15 bp, Homo sapiens
ttcatacacacactt

SEQ ID NO: 885089 - DNA, 15 bp, Homo sapiens
cttcatacacacact

SEQ ID NO: 885090 - DNA, 15 bp, Homo sapiens
acttcatacacacac

SEQ ID NO: 885091 - DNA, 15 bp, Homo sapiens
tacttcatacacaca

SEQ ID NO: 885092 - DNA, 15 bp, Homo sapiens
ttacttcatacacac

SEQ ID NO: 885093 - DNA, 15 bp, Homo sapiens
attacttcatacaca

SEQ ID NO: 885094 - DNA, 15 bp, Homo sapiens
gattacttcatacac

SEQ ID NO: 885095 - DNA, 15 bp, Homo sapiens
agattacttcataca

SEQ ID NO: 885096 - DNA, 15 bp, Homo sapiens
cagattacttcatac

SEQ ID NO: 885097 - DNA, 15 bp, Homo sapiens
ccagattacttcata

SEQ ID NO: 885098 - DNA, 15 bp, Homo sapiens
tccagattacttcat

SEQ ID NO: 885099 - DNA, 15 bp, Homo sapiens
atccagattacttca

SEQ ID NO: 885100 - DNA, 15 bp, Homo sapiens
gatccagattacttc

SEQ ID NO: 885101 - DNA, 15 bp, Homo sapiens
ggatccagattactt

SEQ ID NO: 885102 - DNA, 15 bp, Homo sapiens
tggatccagattact

SEQ ID NO: 885103 - DNA, 15 bp, Homo sapiens
ctggatccagattac

SEQ ID NO: 885104 - DNA, 15 bp, Homo sapiens
tctggatccagatta

SEQ ID NO: 885105 - DNA, 15 bp, Homo sapiens
ctctggatccagatt

SEQ ID NO: 885106 - DNA, 15 bp, Homo sapiens
gctctggatccagat

SEQ ID NO: 885107 - DNA, 15 bp, Homo sapiens
agctctggatccaga

SEQ ID NO: 885108 - DNA, 15 bp, Homo sapiens
aagctctggatccag

SEQ ID NO: 885109 - DNA, 15 bp, Homo sapiens
aaagctctggatcca

SEQ ID NO: 885110 - DNA, 15 bp, Homo sapiens
caaagctctggatcc

SEQ ID NO: 885111 - DNA, 15 bp, Homo sapiens
tcaaagctctggatc

SEQ ID NO: 885112 - DNA, 15 bp, Homo sapiens
ttcaaagctctggat

SEQ ID NO: 885113 - DNA, 15 bp, Homo sapiens
gttcaaagctctgga

SEQ ID NO: 885114 - DNA, 15 bp, Homo sapiens
tgttcaaagctctgg

SEQ ID NO: 885115 - DNA, 15 bp, Homo sapiens
atgttcaaagctctg

SEQ ID NO: 885116 - DNA, 15 bp, Homo sapiens
catgttcaaagctct

SEQ ID NO: 885117 - DNA, 15 bp, Homo sapiens
ccatgttcaaagctc

SEQ ID NO: 885118 - DNA, 15 bp, Homo sapiens
tccatgttcaaagct

SEQ ID NO: 885119 - DNA, 15 bp, Homo sapiens
ttccatgttcaaagc

SEQ ID NO: 885120 - DNA, 15 bp, Homo sapiens
attccatgttcaaag

SEQ ID NO: 885121 - DNA, 15 bp, Homo sapiens
cattccatgttcaaa

SEQ ID NO: 885122 - DNA, 15 bp, Homo sapiens
acattccatgttcaa

SEQ ID NO: 885123 - DNA, 15 bp, Homo sapiens
aacattccatgttca

SEQ ID NO: 885124 - DNA, 15 bp, Homo sapiens
aaacattccatgttc

SEQ ID NO: 885125 - DNA, 15 bp, Homo sapiens
taaacattccatgtt

SEQ ID NO: 885126 - DNA, 15 bp, Homo sapiens
gtaaacattccatgt

SEQ ID NO: 885127 - DNA, 15 bp, Homo sapiens
tgtaaacattccatg

SEQ ID NO: 885128 - DNA, 15 bp, Homo sapiens
atgtaaacattccat

SEQ ID NO: 885129 - DNA, 15 bp, Homo sapiens
gatgtaaacattcca

SEQ ID NO: 885130 - DNA, 15 bp, Homo sapiens
agatgtaaacattcc

SEQ ID NO: 885131 - DNA, 15 bp, Homo sapiens
gagatgtaaacattc

SEQ ID NO: 885132 - DNA, 15 bp, Homo sapiens
agagatgtaaacatt

SEQ ID NO: 885133 - DNA, 15 bp, Homo sapiens
tagagatgtaaacat

SEQ ID NO: 885134 - DNA, 15 bp, Homo sapiens
gtagagatgtaaaca

SEQ ID NO: 885135 - DNA, 15 bp, Homo sapiens
agtagagatgtaaac

SEQ ID NO: 885136 - DNA, 15 bp, Homo sapiens
aagtagagatgtaaa

SEQ ID NO: 885137 - DNA, 15 bp, Homo sapiens
aaagtagagatgtaa

SEQ ID NO: 885138 - DNA, 15 bp, Homo sapiens
aaaagtagagatgta

SEQ ID NO: 885139 - DNA, 15 bp, Homo sapiens
gaaaagtagagatgt

SEQ ID NO: 885140 - DNA, 15 bp, Homo sapiens
tgaaaagtagagatg

SEQ ID NO: 885141 - DNA, 15 bp, Homo sapiens
gtgaaaagtagagat

SEQ ID NO: 885142 - DNA, 15 bp, Homo sapiens
tgtgaaaagtagaga

SEQ ID NO: 885143 - DNA, 15 bp, Homo sapiens
gtgtgaaaagtagag

SEQ ID NO: 885144 - DNA, 15 bp, Homo sapiens
ggtgtgaaaagtaga

SEQ ID NO: 885145 - DNA, 15 bp, Homo sapiens
tggtgtgaaaagtag

SEQ ID NO: 885146 - DNA, 15 bp, Homo sapiens
ctggtgtgaaaagta

SEQ ID NO: 885147 - DNA, 15 bp, Homo sapiens
tctggtgtgaaaagt

SEQ ID NO: 885148 - DNA, 15 bp, Homo sapiens
ctctggtgtgaaaag

SEQ ID NO: 885149 - DNA, 15 bp, Homo sapiens
gctctggtgtgaaaa

SEQ ID NO: 885150 - DNA, 15 bp, Homo sapiens
tgctctggtgtgaaa

SEQ ID NO: 885151 - DNA, 15 bp, Homo sapiens
atgctctggtgtgaa

SEQ ID NO: 885152 - DNA, 15 bp, Homo sapiens
tatgctctggtgtga

SEQ ID NO: 885153 - DNA, 15 bp, Homo sapiens
gtatgctctggtgtg

SEQ ID NO: 885154 - DNA, 15 bp, Homo sapiens
tgtatgctctggtgt

SEQ ID NO: 885155 - DNA, 15 bp, Homo sapiens
atgtatgctctggtg

SEQ ID NO: 885156 - DNA, 15 bp, Homo sapiens
aatgtatgctctggt

SEQ ID NO: 885157 - DNA, 15 bp, Homo sapiens
taatgtatgctctgg

SEQ ID NO: 885158 - DNA, 15 bp, Homo sapiens
ctaatgtatgctctg

SEQ ID NO: 885159 - DNA, 15 bp, Homo sapiens
cctaatgtatgctct

SEQ ID NO: 885160 - DNA, 15 bp, Homo sapiens
tcctaatgtatgctc

SEQ ID NO: 885161 - DNA, 15 bp, Homo sapiens
atcctaatgtatgct

SEQ ID NO: 885162 - DNA, 15 bp, Homo sapiens
gatcctaatgtatgc

SEQ ID NO: 885163 - DNA, 15 bp, Homo sapiens
agatcctaatgtatg

SEQ ID NO: 885164 - DNA, 15 bp, Homo sapiens
aagatcctaatgtat

SEQ ID NO: 885165 - DNA, 15 bp, Homo sapiens
aaagatcctaatgta

SEQ ID NO: 885166 - DNA, 15 bp, Homo sapiens
aaaagatcctaatgt

SEQ ID NO: 885167 - DNA, 15 bp, Homo sapiens
gaaaagatcctaatg

SEQ ID NO: 885168 - DNA, 15 bp, Homo sapiens
agaaaagatcctaat

SEQ ID NO: 885169 - DNA, 15 bp, Homo sapiens
aagaaaagatcctaa

SEQ ID NO: 885170 - DNA, 15 bp, Homo sapiens
aaagaaaagatccta

SEQ ID NO: 885171 - DNA, 15 bp, Homo sapiens
gaaagaaaagatcct

SEQ ID NO: 885172 - DNA, 15 bp, Homo sapiens
agaaagaaaagatcc

SEQ ID NO: 885173 - DNA, 15 bp, Homo sapiens
gagaaagaaaagatc

SEQ ID NO: 885174 - DNA, 15 bp, Homo sapiens
tgagaaagaaaagat

SEQ ID NO: 885175 - DNA, 15 bp, Homo sapiens
ctgagaaagaaaaga

SEQ ID NO: 885176 - DNA, 15 bp, Homo sapiens
tctgagaaagaaaag

SEQ ID NO: 885177 - DNA, 15 bp, Homo sapiens
gtctgagaaagaaaa

SEQ ID NO: 885178 - DNA, 15 bp, Homo sapiens
tgtctgagaaagaaa

SEQ ID NO: 885179 - DNA, 15 bp, Homo sapiens
atgtctgagaaagaa

SEQ ID NO: 885180 - DNA, 15 bp, Homo sapiens
catgtctgagaaaga

SEQ ID NO: 885181 - DNA, 15 bp, Homo sapiens
tcatgtctgagaaag

SEQ ID NO: 885182 - DNA, 15 bp, Homo sapiens
ctcatgtctgagaaa

SEQ ID NO: 885183 - DNA, 15 bp, Homo sapiens
cctcatgtctgagaa

SEQ ID NO: 885184 - DNA, 15 bp, Homo sapiens
ccctcatgtctgaga

SEQ ID NO: 885185 - DNA, 15 bp, Homo sapiens
tccctcatgtctgag

SEQ ID NO: 885186 - DNA, 15 bp, Homo sapiens
ctccctcatgtctga

SEQ ID NO: 885187 - DNA, 15 bp, Homo sapiens
tctccctcatgtctg

SEQ ID NO: 885188 - DNA, 15 bp, Homo sapiens
ttctccctcatgtct

SEQ ID NO: 885189 - DNA, 15 bp, Homo sapiens
tttctccctcatgtc

SEQ ID NO: 885190 - DNA, 15 bp, Homo sapiens
atttctccctcatgt

SEQ ID NO: 885191 - DNA, 15 bp, Homo sapiens
catttctccctcatg

SEQ ID NO: 885192 - DNA, 15 bp, Homo sapiens
ccatttctccctcat

SEQ ID NO: 885193 - DNA, 15 bp, Homo sapiens
cccatttctccctca

SEQ ID NO: 885194 - DNA, 15 bp, Homo sapiens
ccccatttctccctc

SEQ ID NO: 885195 - DNA, 15 bp, Homo sapiens
cccccatttctccct

SEQ ID NO: 885196 - DNA, 15 bp, Homo sapiens
acccccatttctccc

SEQ ID NO: 885197 - DNA, 15 bp, Homo sapiens
cacccccatttctcc

SEQ ID NO: 885198 - DNA, 15 bp, Homo sapiens
ccacccccatttctc

SEQ ID NO: 885199 - DNA, 15 bp, Homo sapiens
cccacccccatttct

SEQ ID NO: 885200 - DNA, 15 bp, Homo sapiens
gcccacccccatttc

SEQ ID NO: 885201 - DNA, 15 bp, Homo sapiens
agcccacccccattt

SEQ ID NO: 885202 - DNA, 15 bp, Homo sapiens
aagcccacccccatt

SEQ ID NO: 885203 - DNA, 15 bp, Homo sapiens
aaagcccacccccat

SEQ ID NO: 885204 - DNA, 15 bp, Homo sapiens
gaaagcccaccccca

SEQ ID NO: 885205 - DNA, 15 bp, Homo sapiens
ggaaagcccaccccc

SEQ ID NO: 885206 - DNA, 15 bp, Homo sapiens
gggaaagcccacccc

SEQ ID NO: 885207 - DNA, 15 bp, Homo sapiens
ggggaaagcccaccc

SEQ ID NO: 885208 - DNA, 15 bp, Homo sapiens
aggggaaagcccacc

SEQ ID NO: 885209 - DNA, 15 bp, Homo sapiens
aaggggaaagcccac

SEQ ID NO: 885210 - DNA, 15 bp, Homo sapiens
gaaggggaaagccca

SEQ ID NO: 885211 - DNA, 15 bp, Homo sapiens
agaaggggaaagccc

SEQ ID NO: 885212 - DNA, 15 bp, Homo sapiens
aagaaggggaaagcc

SEQ ID NO: 885213 - DNA, 15 bp, Homo sapiens
caagaaggggaaagc

SEQ ID NO: 885214 - DNA, 15 bp, Homo sapiens
gcaagaaggggaaag

SEQ ID NO: 885215 - DNA, 15 bp, Homo sapiens
agcaagaaggggaaa

SEQ ID NO: 885216 - DNA, 15 bp, Homo sapiens
cagcaagaaggggaa

SEQ ID NO: 885217 - DNA, 15 bp, Homo sapiens
tcagcaagaagggga

SEQ ID NO: 885218 - DNA, 15 bp, Homo sapiens
ttcagcaagaagggg

SEQ ID NO: 885219 - DNA, 15 bp, Homo sapiens
gttcagcaagaaggg

SEQ ID NO: 885220 - DNA, 15 bp, Homo sapiens
tgttcagcaagaagg

SEQ ID NO: 885221 - DNA, 15 bp, Homo sapiens
gtgttcagcaagaag

SEQ ID NO: 885222 - DNA, 15 bp, Homo sapiens
agtgttcagcaagaa

SEQ ID NO: 885223 - DNA, 15 bp, Homo sapiens
aagtgttcagcaaga

SEQ ID NO: 885224 - DNA, 15 bp, Homo sapiens
aaagtgttcagcaag

SEQ ID NO: 885225 - DNA, 15 bp, Homo sapiens
gaaagtgttcagcaa

SEQ ID NO: 885226 - DNA, 15 bp, Homo sapiens
ggaaagtgttcagca

SEQ ID NO: 885227 - DNA, 15 bp, Homo sapiens
aggaaagtgttcagc

SEQ ID NO: 885228 - DNA, 15 bp, Homo sapiens
gaggaaagtgttcag

SEQ ID NO: 885229 - DNA, 15 bp, Homo sapiens
agaggaaagtgttca

SEQ ID NO: 885230 - DNA, 15 bp, Homo sapiens
gagaggaaagtgttc

SEQ ID NO: 885231 - DNA, 15 bp, Homo sapiens
ggagaggaaagtgtt

SEQ ID NO: 885232 - DNA, 15 bp, Homo sapiens
aggagaggaaagtgt

SEQ ID NO: 885233 - DNA, 15 bp, Homo sapiens
caggagaggaaagtg

SEQ ID NO: 885234 - DNA, 15 bp, Homo sapiens
tcaggagaggaaagt

SEQ ID NO: 885235 - DNA, 15 bp, Homo sapiens
ctcaggagaggaaag

SEQ ID NO: 885236 - DNA, 15 bp, Homo sapiens
actcaggagaggaaa

SEQ ID NO: 885237 - DNA, 15 bp, Homo sapiens
tactcaggagaggaa

SEQ ID NO: 885238 - DNA, 15 bp, Homo sapiens
atactcaggagagga

SEQ ID NO: 885239 - DNA, 15 bp, Homo sapiens
tatactcaggagagg

SEQ ID NO: 885240 - DNA, 15 bp, Homo sapiens
atatactcaggagag

SEQ ID NO: 885241 - DNA, 15 bp, Homo sapiens
gatatactcaggaga

SEQ ID NO: 885242 - DNA, 15 bp, Homo sapiens
agatatactcaggag

SEQ ID NO: 885243 - DNA, 15 bp, Homo sapiens
cagatatactcagga

SEQ ID NO: 885244 - DNA, 15 bp, Homo sapiens
tcagatatactcagg

SEQ ID NO: 885245 - DNA, 15 bp, Homo sapiens
atcagatatactcag

SEQ ID NO: 885246 - DNA, 15 bp, Homo sapiens
catcagatatactca

SEQ ID NO: 885247 - DNA, 15 bp, Homo sapiens
tcatcagatatactc

SEQ ID NO: 885248 - DNA, 15 bp, Homo sapiens
gtcatcagatatact

SEQ ID NO: 885249 - DNA, 15 bp, Homo sapiens
tgtcatcagatatac

SEQ ID NO: 885250 - DNA, 15 bp, Homo sapiens
gtgtcatcagatata

SEQ ID NO: 885251 - DNA, 15 bp, Homo sapiens
agtgtcatcagatat

SEQ ID NO: 885252 - DNA, 15 bp, Homo sapiens
aagtgtcatcagata

SEQ ID NO: 885253 - DNA, 15 bp, Homo sapiens
caagtgtcatcagat

SEQ ID NO: 885254 - DNA, 15 bp, Homo sapiens
acaagtgtcatcaga

SEQ ID NO: 885255 - DNA, 15 bp, Homo sapiens
gacaagtgtcatcag

SEQ ID NO: 885256 - DNA, 15 bp, Homo sapiens
ggacaagtgtcatca

SEQ ID NO: 885257 - DNA, 15 bp, Homo sapiens
tggacaagtgtcatc

SEQ ID NO: 885258 - DNA, 15 bp, Homo sapiens
gtggacaagtgtcat

SEQ ID NO: 885259 - DNA, 15 bp, Homo sapiens
agtggacaagtgtca

SEQ ID NO: 885260 - DNA, 15 bp, Homo sapiens
cagtggacaagtgtc

SEQ ID NO: 885261 - DNA, 15 bp, Homo sapiens
ccagtggacaagtgt

SEQ ID NO: 885262 - DNA, 15 bp, Homo sapiens
cccagtggacaagtg

SEQ ID NO: 885263 - DNA, 15 bp, Homo sapiens
ccccagtggacaagt

SEQ ID NO: 885264 - DNA, 15 bp, Homo sapiens
gccccagtggacaag

SEQ ID NO: 885265 - DNA, 15 bp, Homo sapiens
agccccagtggacaa

SEQ ID NO: 885266 - DNA, 15 bp, Homo sapiens
tagccccagtggaca

SEQ ID NO: 885267 - DNA, 15 bp, Homo sapiens
atagccccagtggac

SEQ ID NO: 885268 - DNA, 15 bp, Homo sapiens
tatagccccagtgga

SEQ ID NO: 885269 - DNA, 15 bp, Homo sapiens
ctatagccccagtgg

SEQ ID NO: 885270 - DNA, 15 bp, Homo sapiens
tctatagccccagtg

SEQ ID NO: 885271 - DNA, 15 bp, Homo sapiens
ttctatagccccagt

SEQ ID NO: 885272 - DNA, 15 bp, Homo sapiens
cttctatagccccag

SEQ ID NO: 885273 - DNA, 15 bp, Homo sapiens
gcttctatagcccca

SEQ ID NO: 885274 - DNA, 15 bp, Homo sapiens
tgcttctatagcccc

SEQ ID NO: 885275 - DNA, 15 bp, Homo sapiens
ttgcttctatagccc

SEQ ID NO: 885276 - DNA, 15 bp, Homo sapiens
attgcttctatagcc

SEQ ID NO: 885277 - DNA, 15 bp, Homo sapiens
aattgcttctatagc

SEQ ID NO: 885278 - DNA, 15 bp, Homo sapiens
gaattgcttctatag

SEQ ID NO: 885279 - DNA, 15 bp, Homo sapiens
agaattgcttctata

SEQ ID NO: 885280 - DNA, 15 bp, Homo sapiens
tagaattgcttctat

SEQ ID NO: 885281 - DNA, 15 bp, Homo sapiens
gtagaattgcttcta

SEQ ID NO: 885282 - DNA, 15 bp, Homo sapiens
tgtagaattgcttct

SEQ ID NO: 885283 - DNA, 15 bp, Homo sapiens
atgtagaattgcttc

SEQ ID NO: 885284 - DNA, 15 bp, Homo sapiens
tatgtagaattgctt

SEQ ID NO: 885285 - DNA, 15 bp, Homo sapiens
ctatgtagaattgct

SEQ ID NO: 885286 - DNA, 15 bp, Homo sapiens
gctatgtagaattgc

SEQ ID NO: 885287 - DNA, 15 bp, Homo sapiens
tgctatgtagaattg

SEQ ID NO: 885288 - DNA, 15 bp, Homo sapiens
ctgctatgtagaatt

SEQ ID NO: 885289 - DNA, 15 bp, Homo sapiens
cctgctatgtagaat

SEQ ID NO: 885290 - DNA, 15 bp, Homo sapiens
acctgctatgtagaa

SEQ ID NO: 885291 - DNA, 15 bp, Homo sapiens
cacctgctatgtaga

SEQ ID NO: 885292 - DNA, 15 bp, Homo sapiens
tcacctgctatgtag

SEQ ID NO: 885293 - DNA, 15 bp, Homo sapiens
atcacctgctatgta

SEQ ID NO: 885294 - DNA, 15 bp, Homo sapiens
aatcacctgctatgt

SEQ ID NO: 885295 - DNA, 15 bp, Homo sapiens
aaatcacctgctatg

SEQ ID NO: 885296 - DNA, 15 bp, Homo sapiens
gaaatcacctgctat

SEQ ID NO: 885297 - DNA, 15 bp, Homo sapiens
ggaaatcacctgcta

SEQ ID NO: 885298 - DNA, 15 bp, Homo sapiens
aggaaatcacctgct

SEQ ID NO: 885299 - DNA, 15 bp, Homo sapiens
aaggaaatcacctgc

SEQ ID NO: 885300 - DNA, 15 bp, Homo sapiens
gaaggaaatcacctg

SEQ ID NO: 885301 - DNA, 15 bp, Homo sapiens
ggaaggaaatcacct

SEQ ID NO: 885302 - DNA, 15 bp, Homo sapiens
aggaaggaaatcacc

SEQ ID NO: 885303 - DNA, 15 bp, Homo sapiens
aaggaaggaaatcac

SEQ ID NO: 885304 - DNA, 15 bp, Homo sapiens
gaaggaaggaaatca

SEQ ID NO: 885305 - DNA, 15 bp, Homo sapiens
tgaaggaaggaaatc

SEQ ID NO: 885306 - DNA, 15 bp, Homo sapiens
atgaaggaaggaaat

SEQ ID NO: 885307 - DNA, 15 bp, Homo sapiens
tatgaaggaaggaaa

SEQ ID NO: 885308 - DNA, 15 bp, Homo sapiens
gtatgaaggaaggaa

SEQ ID NO: 885309 - DNA, 15 bp, Homo sapiens
agtatgaaggaagga

SEQ ID NO: 885310 - DNA, 15 bp, Homo sapiens
gagtatgaaggaagg

SEQ ID NO: 885311 - DNA, 15 bp, Homo sapiens
cgagtatgaaggaag

SEQ ID NO: 885312 - DNA, 15 bp, Homo sapiens
acgagtatgaaggaa

SEQ ID NO: 885313 - DNA, 15 bp, Homo sapiens
aacgagtatgaagga

SEQ ID NO: 885314 - DNA, 15 bp, Homo sapiens
aaacgagtatgaagg

SEQ ID NO: 885315 - DNA, 15 bp, Homo sapiens
gaaacgagtatgaag

SEQ ID NO: 885316 - DNA, 15 bp, Homo sapiens
agaaacgagtatgaa

SEQ ID NO: 885317 - DNA, 15 bp, Homo sapiens
tagaaacgagtatga

SEQ ID NO: 885318 - DNA, 15 bp, Homo sapiens
ttagaaacgagtatg

SEQ ID NO: 885319 - DNA, 15 bp, Homo sapiens
attagaaacgagtat

SEQ ID NO: 885320 - DNA, 15 bp, Homo sapiens
aattagaaacgagta

SEQ ID NO: 885321 - DNA, 15 bp, Homo sapiens
aaattagaaacgagt

SEQ ID NO: 885322 - DNA, 15 bp, Homo sapiens
aaaattagaaacgag

SEQ ID NO: 885323 - DNA, 15 bp, Homo sapiens
taaaattagaaacga

SEQ ID NO: 885324 - DNA, 15 bp, Homo sapiens
ctaaaattagaaacg

SEQ ID NO: 885325 - DNA, 15 bp, Homo sapiens
actaaaattagaaac

SEQ ID NO: 885326 - DNA, 15 bp, Homo sapiens
tactaaaattagaaa

SEQ ID NO: 885327 - DNA, 15 bp, Homo sapiens
gtactaaaattagaa

SEQ ID NO: 885328 - DNA, 15 bp, Homo sapiens
tgtactaaaattaga

SEQ ID NO: 885329 - DNA, 15 bp, Homo sapiens
atgtactaaaattag

SEQ ID NO: 885330 - DNA, 15 bp, Homo sapiens
gatgtactaaaatta

SEQ ID NO: 885331 - DNA, 15 bp, Homo sapiens
ggatgtactaaaatt

SEQ ID NO: 885332 - DNA, 15 bp, Homo sapiens
gggatgtactaaaat

SEQ ID NO: 885333 - DNA, 15 bp, Homo sapiens
tgggatgtactaaaa

SEQ ID NO: 885334 - DNA, 15 bp, Homo sapiens
gtgggatgtactaaa

SEQ ID NO: 885335 - DNA, 15 bp, Homo sapiens
ggtgggatgtactaa

SEQ ID NO: 885336 - DNA, 15 bp, Homo sapiens
gggtgggatgtacta

SEQ ID NO: 885337 - DNA, 15 bp, Homo sapiens
ggggtgggatgtact

SEQ ID NO: 885338 - DNA, 15 bp, Homo sapiens
tggggtgggatgtac

SEQ ID NO: 885339 - DNA, 15 bp, Homo sapiens
ctggggtgggatgta

SEQ ID NO: 885340 - DNA, 15 bp, Homo sapiens
gctggggtgggatgt

SEQ ID NO: 885341 - DNA, 15 bp, Homo sapiens
ggctggggtgggatg

SEQ ID NO: 885342 - DNA, 15 bp, Homo sapiens
tggctggggtgggat

SEQ ID NO: 885343 - DNA, 15 bp, Homo sapiens
gtggctggggtggga

SEQ ID NO: 885344 - DNA, 15 bp, Homo sapiens
agtggctggggtggg

SEQ ID NO: 885345 - DNA, 15 bp, Homo sapiens
tagtggctggggtgg

SEQ ID NO: 885346 - DNA, 15 bp, Homo sapiens
ctagtggctggggtg

SEQ ID NO: 885347 - DNA, 15 bp, Homo sapiens
gctagtggctggggt

SEQ ID NO: 885348 - DNA, 15 bp, Homo sapiens
ggctagtggctgggg

SEQ ID NO: 885349 - DNA, 15 bp, Homo sapiens
tggctagtggctggg

SEQ ID NO: 885350 - DNA, 15 bp, Homo sapiens
gtggctagtggctgg

SEQ ID NO: 885351 - DNA, 15 bp, Homo sapiens
tgtggctagtggctg

SEQ ID NO: 885352 - DNA, 15 bp, Homo sapiens
atgtggctagtggct

SEQ ID NO: 885353 - DNA, 15 bp, Homo sapiens
aatgtggctagtggc

SEQ ID NO: 885354 - DNA, 15 bp, Homo sapiens
caatgtggctagtgg

SEQ ID NO: 885355 - DNA, 15 bp, Homo sapiens
gcaatgtggctagtg

SEQ ID NO: 885356 - DNA, 15 bp, Homo sapiens
ggcaatgtggctagt

SEQ ID NO: 885357 - DNA, 15 bp, Homo sapiens
aggcaatgtggctag

SEQ ID NO: 885358 - DNA, 15 bp, Homo sapiens
caggcaatgtggcta

SEQ ID NO: 885359 - DNA, 15 bp, Homo sapiens
acaggcaatgtggct

SEQ ID NO: 885360 - DNA, 15 bp, Homo sapiens
gacaggcaatgtggc

SEQ ID NO: 885361 - DNA, 15 bp, Homo sapiens
ggacaggcaatgtgg

SEQ ID NO: 885362 - DNA, 15 bp, Homo sapiens
aggacaggcaatgtg

SEQ ID NO: 885363 - DNA, 15 bp, Homo sapiens
caggacaggcaatgt

SEQ ID NO: 885364 - DNA, 15 bp, Homo sapiens
ccaggacaggcaatg

SEQ ID NO: 885365 - DNA, 15 bp, Homo sapiens
tccaggacaggcaat

SEQ ID NO: 885366 - DNA, 15 bp, Homo sapiens
ttccaggacaggcaa

SEQ ID NO: 885367 - DNA, 15 bp, Homo sapiens
cttccaggacaggca

SEQ ID NO: 885368 - DNA, 15 bp, Homo sapiens
acttccaggacaggc

SEQ ID NO: 885369 - DNA, 15 bp, Homo sapiens
aacttccaggacagg

SEQ ID NO: 885370 - DNA, 15 bp, Homo sapiens
caacttccaggacag

SEQ ID NO: 885371 - DNA, 15 bp, Homo sapiens
tcaacttccaggaca

SEQ ID NO: 885372 - DNA, 15 bp, Homo sapiens
ttcaacttccaggac

SEQ ID NO: 885373 - DNA, 15 bp, Homo sapiens
tttcaacttccagga

SEQ ID NO: 885374 - DNA, 15 bp, Homo sapiens
ttttcaacttccagg

SEQ ID NO: 885375 - DNA, 15 bp, Homo sapiens
tttttcaacttccag

SEQ ID NO: 885376 - DNA, 15 bp, Homo sapiens
atttttcaacttcca

SEQ ID NO: 885377 - DNA, 15 bp, Homo sapiens
tatttttcaacttcc

SEQ ID NO: 885378 - DNA, 15 bp, Homo sapiens
ttatttttcaacttc

SEQ ID NO: 885379 - DNA, 15 bp, Homo sapiens
tttatttttcaactt

SEQ ID NO: 885380 - DNA, 15 bp, Homo sapiens
gtttatttttcaact

SEQ ID NO: 885381 - DNA, 15 bp, Homo sapiens
tgtttatttttcaac

SEQ ID NO: 885382 - DNA, 15 bp, Homo sapiens
atgtttatttttcaa

SEQ ID NO: 885383 - DNA, 15 bp, Homo sapiens
aatgtttatttttca

SEQ ID NO: 885384 - DNA, 15 bp, Homo sapiens
aaatgtttatttttc

SEQ ID NO: 885385 - DNA, 15 bp, Homo sapiens
taaatgtttattttt

SEQ ID NO: 885386 - DNA, 15 bp, Homo sapiens
ataaatgtttatttt

SEQ ID NO: 885387 - DNA, 15 bp, Homo sapiens
tataaatgtttattt

SEQ ID NO: 885388 - DNA, 15 bp, Homo sapiens
ttataaatgtttatt

SEQ ID NO: 885389 - DNA, 15 bp, Homo sapiens
attataaatgtttat

SEQ ID NO: 885390 - DNA, 15 bp, Homo sapiens
aattataaatgttta

SEQ ID NO: 885391 - DNA, 15 bp, Homo sapiens
caattataaatgttt

SEQ ID NO: 885392 - DNA, 15 bp, Homo sapiens
tcaattataaatgtt

SEQ ID NO: 885393 - DNA, 15 bp, Homo sapiens
ttcaattataaatgt

SEQ ID NO: 885394 - DNA, 15 bp, Homo sapiens
attcaattataaatg

SEQ ID NO: 885395 - DNA, 15 bp, Homo sapiens
aattcaattataaat

SEQ ID NO: 885396 - DNA, 15 bp, Homo sapiens
caattcaattataaa

SEQ ID NO: 885397 - DNA, 15 bp, Homo sapiens
acaattcaattataa

SEQ ID NO: 885398 - DNA, 15 bp, Homo sapiens
cacaattcaattata

SEQ ID NO: 885399 - DNA, 15 bp, Homo sapiens
ccacaattcaattat

SEQ ID NO: 885400 - DNA, 15 bp, Homo sapiens
tccacaattcaatta

SEQ ID NO: 885401 - DNA, 15 bp, Homo sapiens
gtccacaattcaatt

SEQ ID NO: 885402 - DNA, 15 bp, Homo sapiens
agtccacaattcaat

SEQ ID NO: 885403 - DNA, 15 bp, Homo sapiens
cagtccacaattcaa

SEQ ID NO: 885404 - DNA, 15 bp, Homo sapiens
gcagtccacaattca

SEQ ID NO: 885405 - DNA, 15 bp, Homo sapiens
ggcagtccacaattc

SEQ ID NO: 885406 - DNA, 15 bp, Homo sapiens
tggcagtccacaatt

SEQ ID NO: 885407 - DNA, 15 bp, Homo sapiens
ttggcagtccacaat

SEQ ID NO: 885408 - DNA, 15 bp, Homo sapiens
attggcagtccacaa

SEQ ID NO: 885409 - DNA, 15 bp, Homo sapiens
cattggcagtccaca

SEQ ID NO: 885410 - DNA, 15 bp, Homo sapiens
tcattggcagtccac

SEQ ID NO: 885411 - DNA, 15 bp, Homo sapiens
ctcattggcagtcca

SEQ ID NO: 885412 - DNA, 15 bp, Homo sapiens
actcattggcagtcc

SEQ ID NO: 885413 - DNA, 15 bp, Homo sapiens
cactcattggcagtc

SEQ ID NO: 885414 - DNA, 15 bp, Homo sapiens
gcactcattggcagt

SEQ ID NO: 885415 - DNA, 15 bp, Homo sapiens
tgcactcattggcag

SEQ ID NO: 885416 - DNA, 15 bp, Homo sapiens
ttgcactcattggca

SEQ ID NO: 885417 - DNA, 15 bp, Homo sapiens
tttgcactcattggc

SEQ ID NO: 885418 - DNA, 15 bp, Homo sapiens
atttgcactcattgg

SEQ ID NO: 885419 - DNA, 15 bp, Homo sapiens
gatttgcactcattg

SEQ ID NO: 885420 - DNA, 15 bp, Homo sapiens
agatttgcactcatt

SEQ ID NO: 885421 - DNA, 15 bp, Homo sapiens
tagatttgcactcat

SEQ ID NO: 885422 - DNA, 15 bp, Homo sapiens
atagatttgcactca

SEQ ID NO: 885423 - DNA, 15 bp, Homo sapiens
aatagatttgcactc

SEQ ID NO: 885424 - DNA, 15 bp, Homo sapiens
taatagatttgcact

SEQ ID NO: 885425 - DNA, 15 bp, Homo sapiens
ataatagatttgcac

SEQ ID NO: 885426 - DNA, 15 bp, Homo sapiens
aataatagatttgca

SEQ ID NO: 885427 - DNA, 15 bp, Homo sapiens
taataatagatttgc

SEQ ID NO: 885428 - DNA, 15 bp, Homo sapiens
ttaataatagatttg

SEQ ID NO: 885429 - DNA, 15 bp, Homo sapiens
cttaataatagattt

SEQ ID NO: 885430 - DNA, 15 bp, Homo sapiens
tcttaataatagatt

SEQ ID NO: 885431 - DNA, 15 bp, Homo sapiens
atcttaataatagat

SEQ ID NO: 885432 - DNA, 15 bp, Homo sapiens
tatcttaataataga

SEQ ID NO: 885433 - DNA, 15 bp, Homo sapiens
atatcttaataatag

SEQ ID NO: 885434 - DNA, 15 bp, Homo sapiens
tatatcttaataata

SEQ ID NO: 885435 - DNA, 15 bp, Homo sapiens
atatatcttaataat

SEQ ID NO: 885436 - DNA, 15 bp, Homo sapiens
gatatatcttaataa

SEQ ID NO: 885437 - DNA, 15 bp, Homo sapiens
tgatatatcttaata

SEQ ID NO: 885438 - DNA, 15 bp, Homo sapiens
ctgatatatcttaat

SEQ ID NO: 885439 - DNA, 15 bp, Homo sapiens
actgatatatcttaa

SEQ ID NO: 885440 - DNA, 15 bp, Homo sapiens
aactgatatatctta

SEQ ID NO: 885441 - DNA, 15 bp, Homo sapiens
aaactgatatatctt

SEQ ID NO: 885442 - DNA, 15 bp, Homo sapiens
taaactgatatatct

SEQ ID NO: 885443 - DNA, 15 bp, Homo sapiens
ctaaactgatatatc

SEQ ID NO: 885444 - DNA, 15 bp, Homo sapiens
tctaaactgatatat

SEQ ID NO: 885445 - DNA, 15 bp, Homo sapiens
ttctaaactgatata

SEQ ID NO: 885446 - DNA, 15 bp, Homo sapiens
cttctaaactgatat

SEQ ID NO: 885447 - DNA, 15 bp, Homo sapiens
gcttctaaactgata

SEQ ID NO: 885448 - DNA, 15 bp, Homo sapiens
agcttctaaactgat

SEQ ID NO: 885449 - DNA, 15 bp, Homo sapiens
aagcttctaaactga

SEQ ID NO: 885450 - DNA, 15 bp, Homo sapiens
taagcttctaaactg

SEQ ID NO: 885451 - DNA, 15 bp, Homo sapiens
ataagcttctaaact

SEQ ID NO: 885452 - DNA, 15 bp, Homo sapiens
cataagcttctaaac

SEQ ID NO: 885453 - DNA, 15 bp, Homo sapiens
tcataagcttctaaa

SEQ ID NO: 885454 - DNA, 15 bp, Homo sapiens
ttcataagcttctaa

SEQ ID NO: 885455 - DNA, 15 bp, Homo sapiens
gttcataagcttcta

SEQ ID NO: 885456 - DNA, 15 bp, Homo sapiens
agttcataagcttct

SEQ ID NO: 885457 - DNA, 15 bp, Homo sapiens
gagttcataagcttc

SEQ ID NO: 885458 - DNA, 15 bp, Homo sapiens
cgagttcataagctt

SEQ ID NO: 885459 - DNA, 15 bp, Homo sapiens
acgagttcataagct

SEQ ID NO: 885460 - DNA, 15 bp, Homo sapiens
aacgagttcataagc

SEQ ID NO: 885461 - DNA, 15 bp, Homo sapiens
gaacgagttcataag

SEQ ID NO: 885462 - DNA, 15 bp, Homo sapiens
ggaacgagttcataa

SEQ ID NO: 885463 - DNA, 15 bp, Homo sapiens
tggaacgagttcata

SEQ ID NO: 885464 - DNA, 15 bp, Homo sapiens
atggaacgagttcat

SEQ ID NO: 885465 - DNA, 15 bp, Homo sapiens
gatggaacgagttca

SEQ ID NO: 885466 - DNA, 15 bp, Homo sapiens
tgatggaacgagttc

SEQ ID NO: 885467 - DNA, 15 bp, Homo sapiens
ttgatggaacgagtt

SEQ ID NO: 885468 - DNA, 15 bp, Homo sapiens
tttgatggaacgagt

SEQ ID NO: 885469 - DNA, 15 bp, Homo sapiens
ttttgatggaacgag

SEQ ID NO: 885470 - DNA, 15 bp, Homo sapiens
cttttgatggaacga

SEQ ID NO: 885471 - DNA, 15 bp, Homo sapiens
ccttttgatggaacg

SEQ ID NO: 885472 - DNA, 15 bp, Homo sapiens
gccttttgatggaac

SEQ ID NO: 885473 - DNA, 15 bp, Homo sapiens
agccttttgatggaa

SEQ ID NO: 885474 - DNA, 15 bp, Homo sapiens
tagccttttgatgga

SEQ ID NO: 885475 - DNA, 15 bp, Homo sapiens
ttagccttttgatgg

SEQ ID NO: 885476 - DNA, 15 bp, Homo sapiens
tttagccttttgatg

SEQ ID NO: 885477 - DNA, 15 bp, Homo sapiens
ttttagccttttgat

SEQ ID NO: 885478 - DNA, 15 bp, Homo sapiens
tttttagccttttga

SEQ ID NO: 885479 - DNA, 15 bp, Homo sapiens
gtttttagccttttg

SEQ ID NO: 885480 - DNA, 15 bp, Homo sapiens
agtttttagcctttt

SEQ ID NO: 885481 - DNA, 15 bp, Homo sapiens
gagtttttagccttt

SEQ ID NO: 885482 - DNA, 15 bp, Homo sapiens
ggagtttttagcctt

SEQ ID NO: 885483 - DNA, 15 bp, Homo sapiens
gggagtttttagcct

SEQ ID NO: 885484 - DNA, 15 bp, Homo sapiens
tgggagtttttagcc

SEQ ID NO: 885485 - DNA, 15 bp, Homo sapiens
ctgggagtttttagc

SEQ ID NO: 885486 - DNA, 15 bp, Homo sapiens
tctgggagtttttag

SEQ ID NO: 885487 - DNA, 15 bp, Homo sapiens
ttctgggagttttta

SEQ ID NO: 885488 - DNA, 15 bp, Homo sapiens
cttctgggagttttt

SEQ ID NO: 885489 - DNA, 15 bp, Homo sapiens
ccttctgggagtttt

SEQ ID NO: 885490 - DNA, 15 bp, Homo sapiens
accttctgggagttt

SEQ ID NO: 885491 - DNA, 15 bp, Homo sapiens
aaccttctgggagtt

SEQ ID NO: 885492 - DNA, 15 bp, Homo sapiens
taaccttctgggagt

SEQ ID NO: 885493 - DNA, 15 bp, Homo sapiens
ataaccttctgggag

SEQ ID NO: 885494 - DNA, 15 bp, Homo sapiens
gataaccttctggga

SEQ ID NO: 885495 - DNA, 15 bp, Homo sapiens
agataaccttctggg

SEQ ID NO: 885496 - DNA, 15 bp, Homo sapiens
aagataaccttctgg

SEQ ID NO: 885497 - DNA, 15 bp, Homo sapiens
gaagataaccttctg

SEQ ID NO: 885498 - DNA, 15 bp, Homo sapiens
agaagataaccttct

SEQ ID NO: 885499 - DNA, 15 bp, Homo sapiens
gagaagataaccttc

SEQ ID NO: 885500 - DNA, 15 bp, Homo sapiens
tgagaagataacctt

SEQ ID NO: 885501 - DNA, 15 bp, Homo sapiens
gtgagaagataacct

SEQ ID NO: 885502 - DNA, 15 bp, Homo sapiens
agtgagaagataacc

SEQ ID NO: 885503 - DNA, 15 bp, Homo sapiens
cagtgagaagataac

SEQ ID NO: 885504 - DNA, 15 bp, Homo sapiens
tcagtgagaagataa

SEQ ID NO: 885505 - DNA, 15 bp, Homo sapiens
gtcagtgagaagata

SEQ ID NO: 885506 - DNA, 15 bp, Homo sapiens
tgtcagtgagaagat

SEQ ID NO: 885507 - DNA, 15 bp, Homo sapiens
ctgtcagtgagaaga

SEQ ID NO: 885508 - DNA, 15 bp, Homo sapiens
gctgtcagtgagaag

SEQ ID NO: 885509 - DNA, 15 bp, Homo sapiens
agctgtcagtgagaa

SEQ ID NO: 885510 - DNA, 15 bp, Homo sapiens
cagctgtcagtgaga

SEQ ID NO: 885511 - DNA, 15 bp, Homo sapiens
gcagctgtcagtgag

SEQ ID NO: 885512 - DNA, 15 bp, Homo sapiens
agcagctgtcagtga

SEQ ID NO: 885513 - DNA, 15 bp, Homo sapiens
aagcagctgtcagtg

SEQ ID NO: 885514 - DNA, 15 bp, Homo sapiens
aaagcagctgtcagt

SEQ ID NO: 885515 - DNA, 15 bp, Homo sapiens
gaaagcagctgtcag

SEQ ID NO: 885516 - DNA, 15 bp, Homo sapiens
tgaaagcagctgtca

SEQ ID NO: 885517 - DNA, 15 bp, Homo sapiens
ctgaaagcagctgtc

SEQ ID NO: 885518 - DNA, 15 bp, Homo sapiens
cctgaaagcagctgt

SEQ ID NO: 885519 - DNA, 15 bp, Homo sapiens
acctgaaagcagctg

SEQ ID NO: 885520 - DNA, 15 bp, Homo sapiens
cacctgaaagcagct

SEQ ID NO: 885521 - DNA, 15 bp, Homo sapiens
gcacctgaaagcagc

SEQ ID NO: 885522 - DNA, 15 bp, Homo sapiens
agcacctgaaagcag

SEQ ID NO: 885523 - DNA, 15 bp, Homo sapiens
cagcacctgaaagca

SEQ ID NO: 885524 - DNA, 15 bp, Homo sapiens
ccagcacctgaaagc

SEQ ID NO: 885525 - DNA, 15 bp, Homo sapiens
tccagcacctgaaag

SEQ ID NO: 885526 - DNA, 15 bp, Homo sapiens
gtccagcacctgaaa

SEQ ID NO: 885527 - DNA, 15 bp, Homo sapiens
tgtccagcacctgaa

SEQ ID NO: 885528 - DNA, 15 bp, Homo sapiens
ttgtccagcacctga

SEQ ID NO: 885529 - DNA, 15 bp, Homo sapiens
cttgtccagcacctg

SEQ ID NO: 885530 - DNA, 15 bp, Homo sapiens
acttgtccagcacct

SEQ ID NO: 885531 - DNA, 15 bp, Homo sapiens
cacttgtccagcacc

SEQ ID NO: 885532 - DNA, 15 bp, Homo sapiens
ccacttgtccagcac

SEQ ID NO: 885533 - DNA, 15 bp, Homo sapiens
gccacttgtccagca

SEQ ID NO: 885534 - DNA, 15 bp, Homo sapiens
agccacttgtccagc

SEQ ID NO: 885535 - DNA, 15 bp, Homo sapiens
aagccacttgtccag

SEQ ID NO: 885536 - DNA, 15 bp, Homo sapiens
aaagccacttgtcca

SEQ ID NO: 885537 - DNA, 15 bp, Homo sapiens
aaaagccacttgtcc

SEQ ID NO: 885538 - DNA, 15 bp, Homo sapiens
aaaaagccacttgtc

SEQ ID NO: 885539 - DNA, 15 bp, Homo sapiens
gaaaaagccacttgt

SEQ ID NO: 885540 - DNA, 15 bp, Homo sapiens
agaaaaagccacttg

SEQ ID NO: 885541 - DNA, 15 bp, Homo sapiens
aagaaaaagccactt

SEQ ID NO: 885542 - DNA, 15 bp, Homo sapiens
gaagaaaaagccact

SEQ ID NO: 885543 - DNA, 15 bp, Homo sapiens
ggaagaaaaagccac

SEQ ID NO: 885544 - DNA, 15 bp, Homo sapiens
aggaagaaaaagcca

SEQ ID NO: 885545 - DNA, 15 bp, Homo sapiens
gaggaagaaaaagcc

SEQ ID NO: 885546 - DNA, 15 bp, Homo sapiens
tgaggaagaaaaagc

SEQ ID NO: 885547 - DNA, 15 bp, Homo sapiens
atgaggaagaaaaag

SEQ ID NO: 885548 - DNA, 15 bp, Homo sapiens
gatgaggaagaaaaa

SEQ ID NO: 885549 - DNA, 15 bp, Homo sapiens
agatgaggaagaaaa

SEQ ID NO: 885550 - DNA, 15 bp, Homo sapiens
gagatgaggaagaaa

SEQ ID NO: 885551 - DNA, 15 bp, Homo sapiens
agagatgaggaagaa

SEQ ID NO: 885552 - DNA, 15 bp, Homo sapiens
tagagatgaggaaga

SEQ ID NO: 885553 - DNA, 15 bp, Homo sapiens
ttagagatgaggaag

SEQ ID NO: 885554 - DNA, 15 bp, Homo sapiens
gttagagatgaggaa

SEQ ID NO: 885555 - DNA, 15 bp, Homo sapiens
tgttagagatgagga

SEQ ID NO: 885556 - DNA, 15 bp, Homo sapiens
ttgttagagatgagg

SEQ ID NO: 885557 - DNA, 15 bp, Homo sapiens
attgttagagatgag

SEQ ID NO: 885558 - DNA, 15 bp, Homo sapiens
cattgttagagatga

SEQ ID NO: 885559 - DNA, 15 bp, Homo sapiens
ccattgttagagatg

SEQ ID NO: 885560 - DNA, 15 bp, Homo sapiens
cccattgttagagat

SEQ ID NO: 885561 - DNA, 15 bp, Homo sapiens
tcccattgttagaga

SEQ ID NO: 885562 - DNA, 15 bp, Homo sapiens
atcccattgttagag

SEQ ID NO: 885563 - DNA, 15 bp, Homo sapiens
catcccattgttaga

SEQ ID NO: 885564 - DNA, 15 bp, Homo sapiens
gcatcccattgttag

SEQ ID NO: 885565 - DNA, 15 bp, Homo sapiens
tgcatcccattgtta

SEQ ID NO: 885566 - DNA, 15 bp, Homo sapiens
ttgcatcccattgtt

SEQ ID NO: 885567 - DNA, 15 bp, Homo sapiens
attgcatcccattgt

SEQ ID NO: 885568 - DNA, 15 bp, Homo sapiens
tattgcatcccattg

SEQ ID NO: 885569 - DNA, 15 bp, Homo sapiens
ctattgcatcccatt

SEQ ID NO: 885570 - DNA, 15 bp, Homo sapiens
gctattgcatcccat

SEQ ID NO: 885571 - DNA, 15 bp, Homo sapiens
agctattgcatccca

SEQ ID NO: 885572 - DNA, 15 bp, Homo sapiens
gagctattgcatccc

SEQ ID NO: 885573 - DNA, 15 bp, Homo sapiens
tgagctattgcatcc

SEQ ID NO: 885574 - DNA, 15 bp, Homo sapiens
atgagctattgcatc

SEQ ID NO: 885575 - DNA, 15 bp, Homo sapiens
tatgagctattgcat

SEQ ID NO: 885576 - DNA, 15 bp, Homo sapiens
atatgagctattgca

SEQ ID NO: 885577 - DNA, 15 bp, Homo sapiens
gatatgagctattgc

SEQ ID NO: 885578 - DNA, 15 bp, Homo sapiens
agatatgagctattg

SEQ ID NO: 885579 - DNA, 15 bp, Homo sapiens
aagatatgagctatt

SEQ ID NO: 885580 - DNA, 15 bp, Homo sapiens
caagatatgagctat

SEQ ID NO: 885581 - DNA, 15 bp, Homo sapiens
gcaagatatgagcta

SEQ ID NO: 885582 - DNA, 15 bp, Homo sapiens
ggcaagatatgagct

SEQ ID NO: 885583 - DNA, 15 bp, Homo sapiens
gggcaagatatgagc

SEQ ID NO: 885584 - DNA, 15 bp, Homo sapiens
tgggcaagatatgag

SEQ ID NO: 885585 - DNA, 15 bp, Homo sapiens
atgggcaagatatga

SEQ ID NO: 885586 - DNA, 15 bp, Homo sapiens
gatgggcaagatatg

SEQ ID NO: 885587 - DNA, 15 bp, Homo sapiens
agatgggcaagatat

SEQ ID NO: 885588 - DNA, 15 bp, Homo sapiens
gagatgggcaagata

SEQ ID NO: 885589 - DNA, 15 bp, Homo sapiens
tgagatgggcaagat

SEQ ID NO: 885590 - DNA, 15 bp, Homo sapiens
ttgagatgggcaaga

SEQ ID NO: 885591 - DNA, 15 bp, Homo sapiens
tttgagatgggcaag

SEQ ID NO: 885592 - DNA, 15 bp, Homo sapiens
ctttgagatgggcaa

SEQ ID NO: 885593 - DNA, 15 bp, Homo sapiens
cctttgagatgggca

SEQ ID NO: 885594 - DNA, 15 bp, Homo sapiens
gcctttgagatgggc

SEQ ID NO: 885595 - DNA, 15 bp, Homo sapiens
tgcctttgagatggg

SEQ ID NO: 885596 - DNA, 15 bp, Homo sapiens
ttgcctttgagatgg

SEQ ID NO: 885597 - DNA, 15 bp, Homo sapiens
gttgcctttgagatg

SEQ ID NO: 885598 - DNA, 15 bp, Homo sapiens
agttgcctttgagat

SEQ ID NO: 885599 - DNA, 15 bp, Homo sapiens
tagttgcctttgaga

SEQ ID NO: 885600 - DNA, 15 bp, Homo sapiens
ttagttgcctttgag

SEQ ID NO: 885601 - DNA, 15 bp, Homo sapiens
tttagttgcctttga

SEQ ID NO: 885602 - DNA, 15 bp, Homo sapiens
ttttagttgcctttg

SEQ ID NO: 885603 - DNA, 15 bp, Homo sapiens
tttttagttgccttt

SEQ ID NO: 885604 - DNA, 15 bp, Homo sapiens
atttttagttgcctt

SEQ ID NO: 885605 - DNA, 15 bp, Homo sapiens
aatttttagttgcct

SEQ ID NO: 885606 - DNA, 15 bp, Homo sapiens
aaatttttagttgcc

SEQ ID NO: 885607 - DNA, 15 bp, Homo sapiens
taaatttttagttgc

SEQ ID NO: 885608 - DNA, 15 bp, Homo sapiens
ttaaatttttagttg

SEQ ID NO: 885609 - DNA, 15 bp, Homo sapiens
gttaaatttttagtt

SEQ ID NO: 885610 - DNA, 15 bp, Homo sapiens
agttaaatttttagt

SEQ ID NO: 885611 - DNA, 15 bp, Homo sapiens
tagttaaatttttag

SEQ ID NO: 885612 - DNA, 15 bp, Homo sapiens
atagttaaattttta

SEQ ID NO: 885613 - DNA, 15 bp, Homo sapiens
aatagttaaattttt

SEQ ID NO: 885614 - DNA, 15 bp, Homo sapiens
aaatagttaaatttt

SEQ ID NO: 885615 - DNA, 15 bp, Homo sapiens
taaatagttaaattt

SEQ ID NO: 885616 - DNA, 15 bp, Homo sapiens
ttaaatagttaaatt

SEQ ID NO: 885617 - DNA, 15 bp, Homo sapiens
tttaaatagttaaat

SEQ ID NO: 885618 - DNA, 15 bp, Homo sapiens
atttaaatagttaaa

SEQ ID NO: 885619 - DNA, 15 bp, Homo sapiens
aatttaaatagttaa

SEQ ID NO: 885620 - DNA, 15 bp, Homo sapiens
caatttaaatagtta

SEQ ID NO: 885621 - DNA, 15 bp, Homo sapiens
tcaatttaaatagtt

SEQ ID NO: 885622 - DNA, 15 bp, Homo sapiens
ttcaatttaaatagt

SEQ ID NO: 885623 - DNA, 15 bp, Homo sapiens
attcaatttaaatag

SEQ ID NO: 885624 - DNA, 15 bp, Homo sapiens
aattcaatttaaata

SEQ ID NO: 885625 - DNA, 15 bp, Homo sapiens
taattcaatttaaat

SEQ ID NO: 885626 - DNA, 15 bp, Homo sapiens
ataattcaatttaaa

SEQ ID NO: 885627 - DNA, 15 bp, Homo sapiens
aataattcaatttaa

SEQ ID NO: 885628 - DNA, 15 bp, Homo sapiens
aaataattcaattta

SEQ ID NO: 885629 - DNA, 15 bp, Homo sapiens
taaataattcaattt

SEQ ID NO: 885630 - DNA, 15 bp, Homo sapiens
ttaaataattcaatt

SEQ ID NO: 885631 - DNA, 15 bp, Homo sapiens
tttaaataattcaat

SEQ ID NO: 885632 - DNA, 15 bp, Homo sapiens
atttaaataattcaa

SEQ ID NO: 885633 - DNA, 15 bp, Homo sapiens
aatttaaataattca

SEQ ID NO: 885634 - DNA, 15 bp, Homo sapiens
aaatttaaataattc

SEQ ID NO: 885635 - DNA, 15 bp, Homo sapiens
aaaatttaaataatt

SEQ ID NO: 885636 - DNA, 15 bp, Homo sapiens
aaaaatttaaataat

SEQ ID NO: 885637 - DNA, 15 bp, Homo sapiens
caaaaatttaaataa

SEQ ID NO: 885638 - DNA, 15 bp, Homo sapiens
acaaaaatttaaata

SEQ ID NO: 885639 - DNA, 15 bp, Homo sapiens
cacaaaaatttaaat

SEQ ID NO: 885640 - DNA, 15 bp, Homo sapiens
tcacaaaaatttaaa

SEQ ID NO: 885641 - DNA, 15 bp, Homo sapiens
ttcacaaaaatttaa

SEQ ID NO: 885642 - DNA, 15 bp, Homo sapiens
gttcacaaaaattta

SEQ ID NO: 885643 - DNA, 15 bp, Homo sapiens
tgttcacaaaaattt

SEQ ID NO: 885644 - DNA, 15 bp, Homo sapiens
atgttcacaaaaatt

SEQ ID NO: 885645 - DNA, 15 bp, Homo sapiens
catgttcacaaaaat

SEQ ID NO: 885646 - DNA, 15 bp, Homo sapiens
ccatgttcacaaaaa

SEQ ID NO: 885647 - DNA, 15 bp, Homo sapiens
cccatgttcacaaaa

SEQ ID NO: 885648 - DNA, 15 bp, Homo sapiens
acccatgttcacaaa

SEQ ID NO: 885649 - DNA, 15 bp, Homo sapiens
aacccatgttcacaa

SEQ ID NO: 885650 - DNA, 15 bp, Homo sapiens
aaacccatgttcaca

SEQ ID NO: 885651 - DNA, 15 bp, Homo sapiens
aaaacccatgttcac

SEQ ID NO: 885652 - DNA, 15 bp, Homo sapiens
aaaaacccatgttca

SEQ ID NO: 885653 - DNA, 15 bp, Homo sapiens
taaaaacccatgttc

SEQ ID NO: 885654 - DNA, 15 bp, Homo sapiens
ttaaaaacccatgtt

SEQ ID NO: 885655 - DNA, 15 bp, Homo sapiens
tttaaaaacccatgt

SEQ ID NO: 885656 - DNA, 15 bp, Homo sapiens
atttaaaaacccatg

SEQ ID NO: 885657 - DNA, 15 bp, Homo sapiens
catttaaaaacccat

SEQ ID NO: 885658 - DNA, 15 bp, Homo sapiens
gcatttaaaaaccca

SEQ ID NO: 885659 - DNA, 15 bp, Homo sapiens
ggcatttaaaaaccc

SEQ ID NO: 885660 - DNA, 15 bp, Homo sapiens
tggcatttaaaaacc

SEQ ID NO: 885661 - DNA, 15 bp, Homo sapiens
ctggcatttaaaaac

SEQ ID NO: 885662 - DNA, 15 bp, Homo sapiens
tctggcatttaaaaa

SEQ ID NO: 885663 - DNA, 15 bp, Homo sapiens
ctctggcatttaaaa

SEQ ID NO: 885664 - DNA, 15 bp, Homo sapiens
cctctggcatttaaa

SEQ ID NO: 885665 - DNA, 15 bp, Homo sapiens
gcctctggcatttaa

SEQ ID NO: 885666 - DNA, 15 bp, Homo sapiens
agcctctggcattta

SEQ ID NO: 885667 - DNA, 15 bp, Homo sapiens
tagcctctggcattt

SEQ ID NO: 885668 - DNA, 15 bp, Homo sapiens
gtagcctctggcatt

SEQ ID NO: 885669 - DNA, 15 bp, Homo sapiens
tgtagcctctggcat

SEQ ID NO: 885670 - DNA, 15 bp, Homo sapiens
ctgtagcctctggca

SEQ ID NO: 885671 - DNA, 15 bp, Homo sapiens
tctgtagcctctggc

SEQ ID NO: 885672 - DNA, 15 bp, Homo sapiens
ctctgtagcctctgg

SEQ ID NO: 885673 - DNA, 15 bp, Homo sapiens
tctctgtagcctctg

SEQ ID NO: 885674 - DNA, 15 bp, Homo sapiens
atctctgtagcctct

SEQ ID NO: 885675 - DNA, 15 bp, Homo sapiens
tatctctgtagcctc

SEQ ID NO: 885676 - DNA, 15 bp, Homo sapiens
gtatctctgtagcct

SEQ ID NO: 885677 - DNA, 15 bp, Homo sapiens
tgtatctctgtagcc

SEQ ID NO: 885678 - DNA, 15 bp, Homo sapiens
ttgtatctctgtagc

SEQ ID NO: 885679 - DNA, 15 bp, Homo sapiens
cttgtatctctgtag

SEQ ID NO: 885680 - DNA, 15 bp, Homo sapiens
ccttgtatctctgta

SEQ ID NO: 885681 - DNA, 15 bp, Homo sapiens
tccttgtatctctgt

SEQ ID NO: 885682 - DNA, 15 bp, Homo sapiens
ctccttgtatctctg

SEQ ID NO: 885683 - DNA, 15 bp, Homo sapiens
gctccttgtatctct

SEQ ID NO: 885684 - DNA, 15 bp, Homo sapiens
cgctccttgtatctc

SEQ ID NO: 885685 - DNA, 15 bp, Homo sapiens
ccgctccttgtatct

SEQ ID NO: 885686 - DNA, 15 bp, Homo sapiens
gccgctccttgtatc

SEQ ID NO: 885687 - DNA, 15 bp, Homo sapiens
agccgctccttgtat

SEQ ID NO: 885688 - DNA, 15 bp, Homo sapiens
aagccgctccttgta

SEQ ID NO: 885689 - DNA, 15 bp, Homo sapiens
aaagccgctccttgt

SEQ ID NO: 885690 - DNA, 15 bp, Homo sapiens
gaaagccgctccttg

SEQ ID NO: 885691 - DNA, 15 bp, Homo sapiens
tgaaagccgctcctt

SEQ ID NO: 885692 - DNA, 15 bp, Homo sapiens
ttgaaagccgctcct

SEQ ID NO: 885693 - DNA, 15 bp, Homo sapiens
tttgaaagccgctcc

SEQ ID NO: 885694 - DNA, 15 bp, Homo sapiens
ctttgaaagccgctc

SEQ ID NO: 885695 - DNA, 15 bp, Homo sapiens
tctttgaaagccgct

SEQ ID NO: 885696 - DNA, 15 bp, Homo sapiens
ttctttgaaagccgc

SEQ ID NO: 885697 - DNA, 15 bp, Homo sapiens
cttctttgaaagccg

SEQ ID NO: 885698 - DNA, 15 bp, Homo sapiens
acttctttgaaagcc

SEQ ID NO: 885699 - DNA, 15 bp, Homo sapiens
aacttctttgaaagc

SEQ ID NO: 885700 - DNA, 15 bp, Homo sapiens
taacttctttgaaag

SEQ ID NO: 885701 - DNA, 15 bp, Homo sapiens
gtaacttctttgaaa

SEQ ID NO: 885702 - DNA, 15 bp, Homo sapiens
tgtaacttctttgaa

SEQ ID NO: 885703 - DNA, 15 bp, Homo sapiens
ctgtaacttctttga

SEQ ID NO: 885704 - DNA, 15 bp, Homo sapiens
tctgtaacttctttg

SEQ ID NO: 885705 - DNA, 15 bp, Homo sapiens
ctctgtaacttcttt

SEQ ID NO: 885706 - DNA, 15 bp, Homo sapiens
gctctgtaacttctt

SEQ ID NO: 885707 - DNA, 15 bp, Homo sapiens
agctctgtaacttct

SEQ ID NO: 885708 - DNA, 15 bp, Homo sapiens
tagctctgtaacttc

SEQ ID NO: 885709 - DNA, 15 bp, Homo sapiens
ctagctctgtaactt

SEQ ID NO: 885710 - DNA, 15 bp, Homo sapiens
tctagctctgtaact

SEQ ID NO: 885711 - DNA, 15 bp, Homo sapiens
atctagctctgtaac

SEQ ID NO: 885712 - DNA, 15 bp, Homo sapiens
tatctagctctgtaa

SEQ ID NO: 885713 - DNA, 15 bp, Homo sapiens
ctatctagctctgta

SEQ ID NO: 885714 - DNA, 15 bp, Homo sapiens
tctatctagctctgt

SEQ ID NO: 885715 - DNA, 15 bp, Homo sapiens
ttctatctagctctg

SEQ ID NO: 885716 - DNA, 15 bp, Homo sapiens
attctatctagctct

SEQ ID NO: 885717 - DNA, 15 bp, Homo sapiens
aattctatctagctc

SEQ ID NO: 885718 - DNA, 15 bp, Homo sapiens
aaattctatctagct

SEQ ID NO: 885719 - DNA, 15 bp, Homo sapiens
gaaattctatctagc

SEQ ID NO: 885720 - DNA, 15 bp, Homo sapiens
agaaattctatctag

SEQ ID NO: 885721 - DNA, 15 bp, Homo sapiens
gagaaattctatcta

SEQ ID NO: 885722 - DNA, 15 bp, Homo sapiens
tgagaaattctatct

SEQ ID NO: 885723 - DNA, 15 bp, Homo sapiens
atgagaaattctatc

SEQ ID NO: 885724 - DNA, 15 bp, Homo sapiens
gatgagaaattctat

SEQ ID NO: 885725 - DNA, 15 bp, Homo sapiens
agatgagaaattcta

SEQ ID NO: 885726 - DNA, 15 bp, Homo sapiens
gagatgagaaattct

SEQ ID NO: 885727 - DNA, 15 bp, Homo sapiens
agagatgagaaattc

SEQ ID NO: 885728 - DNA, 15 bp, Homo sapiens
tagagatgagaaatt

SEQ ID NO: 885729 - DNA, 15 bp, Homo sapiens
gtagagatgagaaat

SEQ ID NO: 885730 - DNA, 15 bp, Homo sapiens
tgtagagatgagaaa

SEQ ID NO: 885731 - DNA, 15 bp, Homo sapiens
ttgtagagatgagaa

SEQ ID NO: 885732 - DNA, 15 bp, Homo sapiens
tttgtagagatgaga

SEQ ID NO: 885733 - DNA, 15 bp, Homo sapiens
ctttgtagagatgag

SEQ ID NO: 885734 - DNA, 15 bp, Homo sapiens
tctttgtagagatga

SEQ ID NO: 885735 - DNA, 15 bp, Homo sapiens
ttctttgtagagatg

SEQ ID NO: 885736 - DNA, 15 bp, Homo sapiens
tttctttgtagagat

SEQ ID NO: 885737 - DNA, 15 bp, Homo sapiens
ttttctttgtagaga

SEQ ID NO: 885738 - DNA, 15 bp, Homo sapiens
attttctttgtagag

SEQ ID NO: 885739 - DNA, 15 bp, Homo sapiens
tattttctttgtaga

SEQ ID NO: 885740 - DNA, 15 bp, Homo sapiens
ttattttctttgtag

SEQ ID NO: 885741 - DNA, 15 bp, Homo sapiens
tttattttctttgta

SEQ ID NO: 885742 - DNA, 15 bp, Homo sapiens
gtttattttctttgt

SEQ ID NO: 885743 - DNA, 15 bp, Homo sapiens
agtttattttctttg

SEQ ID NO: 885744 - DNA, 15 bp, Homo sapiens
aagtttattttcttt

SEQ ID NO: 885745 - DNA, 15 bp, Homo sapiens
caagtttattttctt

SEQ ID NO: 885746 - DNA, 15 bp, Homo sapiens
ccaagtttattttct

SEQ ID NO: 885747 - DNA, 15 bp, Homo sapiens
tccaagtttattttc

SEQ ID NO: 885748 - DNA, 15 bp, Homo sapiens
ttccaagtttatttt

SEQ ID NO: 885749 - DNA, 15 bp, Homo sapiens
cttccaagtttattt

SEQ ID NO: 885750 - DNA, 15 bp, Homo sapiens
acttccaagtttatt

SEQ ID NO: 885751 - DNA, 15 bp, Homo sapiens
gacttccaagtttat

SEQ ID NO: 885752 - DNA, 15 bp, Homo sapiens
tgacttccaagttta

SEQ ID NO: 885753 - DNA, 15 bp, Homo sapiens
ttgacttccaagttt

SEQ ID NO: 885754 - DNA, 15 bp, Homo sapiens
tttgacttccaagtt

SEQ ID NO: 885755 - DNA, 15 bp, Homo sapiens
ctttgacttccaagt

SEQ ID NO: 885756 - DNA, 15 bp, Homo sapiens
gctttgacttccaag

SEQ ID NO: 885757 - DNA, 15 bp, Homo sapiens
tgctttgacttccaa

SEQ ID NO: 885758 - DNA, 15 bp, Homo sapiens
atgctttgacttcca

SEQ ID NO: 885759 - DNA, 15 bp, Homo sapiens
gatgctttgacttcc

SEQ ID NO: 885760 - DNA, 15 bp, Homo sapiens
tgatgctttgacttc

SEQ ID NO: 885761 - DNA, 15 bp, Homo sapiens
atgatgctttgactt

SEQ ID NO: 885762 - DNA, 15 bp, Homo sapiens
catgatgctttgact

SEQ ID NO: 885763 - DNA, 15 bp, Homo sapiens
acatgatgctttgac

SEQ ID NO: 885764 - DNA, 15 bp, Homo sapiens
aacatgatgctttga

SEQ ID NO: 885765 - DNA, 15 bp, Homo sapiens
taacatgatgctttg

SEQ ID NO: 885766 - DNA, 15 bp, Homo sapiens
ataacatgatgcttt

SEQ ID NO: 885767 - DNA, 15 bp, Homo sapiens
gataacatgatgctt

SEQ ID NO: 885768 - DNA, 15 bp, Homo sapiens
agataacatgatgct

SEQ ID NO: 885769 - DNA, 15 bp, Homo sapiens
cagataacatgatgc

SEQ ID NO: 885770 - DNA, 15 bp, Homo sapiens
gcagataacatgatg

SEQ ID NO: 885771 - DNA, 15 bp, Homo sapiens
ggcagataacatgat

SEQ ID NO: 885772 - DNA, 15 bp, Homo sapiens
tggcagataacatga

SEQ ID NO: 885773 - DNA, 15 bp, Homo sapiens
atggcagataacatg

SEQ ID NO: 885774 - DNA, 15 bp, Homo sapiens
tatggcagataacat

SEQ ID NO: 885775 - DNA, 15 bp, Homo sapiens
ttatggcagataaca

SEQ ID NO: 885776 - DNA, 15 bp, Homo sapiens
gttatggcagataac

SEQ ID NO: 885777 - DNA, 15 bp, Homo sapiens
tgttatggcagataa

SEQ ID NO: 885778 - DNA, 15 bp, Homo sapiens
ttgttatggcagata

SEQ ID NO: 885779 - DNA, 15 bp, Homo sapiens
attgttatggcagat

SEQ ID NO: 885780 - DNA, 15 bp, Homo sapiens
tattgttatggcaga

SEQ ID NO: 885781 - DNA, 15 bp, Homo sapiens
atattgttatggcag

SEQ ID NO: 885782 - DNA, 15 bp, Homo sapiens
aatattgttatggca

SEQ ID NO: 885783 - DNA, 15 bp, Homo sapiens
taatattgttatggc

SEQ ID NO: 885784 - DNA, 15 bp, Homo sapiens
ttaatattgttatgg

SEQ ID NO: 885785 - DNA, 15 bp, Homo sapiens
tttaatattgttatg

SEQ ID NO: 885786 - DNA, 15 bp, Homo sapiens
ttttaatattgttat

SEQ ID NO: 885787 - DNA, 15 bp, Homo sapiens
attttaatattgtta

SEQ ID NO: 885788 - DNA, 15 bp, Homo sapiens
cattttaatattgtt

SEQ ID NO: 885789 - DNA, 15 bp, Homo sapiens
tcattttaatattgt

SEQ ID NO: 885790 - DNA, 15 bp, Homo sapiens
gtcattttaatattg

SEQ ID NO: 885791 - DNA, 15 bp, Homo sapiens
agtcattttaatatt

SEQ ID NO: 885792 - DNA, 15 bp, Homo sapiens
aagtcattttaatat

SEQ ID NO: 885793 - DNA, 15 bp, Homo sapiens
taagtcattttaata

SEQ ID NO: 885794 - DNA, 15 bp, Homo sapiens
ataagtcattttaat

SEQ ID NO: 885795 - DNA, 15 bp, Homo sapiens
gataagtcattttaa

SEQ ID NO: 885796 - DNA, 15 bp, Homo sapiens
tgataagtcatttta

SEQ ID NO: 885797 - DNA, 15 bp, Homo sapiens
gtgataagtcatttt

SEQ ID NO: 885798 - DNA, 15 bp, Homo sapiens
ggtgataagtcattt

SEQ ID NO: 885799 - DNA, 15 bp, Homo sapiens
tggtgataagtcatt

SEQ ID NO: 885800 - DNA, 15 bp, Homo sapiens
ttggtgataagtcat

SEQ ID NO: 885801 - DNA, 15 bp, Homo sapiens
attggtgataagtca

SEQ ID NO: 885802 - DNA, 15 bp, Homo sapiens
cattggtgataagtc

SEQ ID NO: 885803 - DNA, 15 bp, Homo sapiens
gcattggtgataagt

SEQ ID NO: 885804 - DNA, 15 bp, Homo sapiens
cgcattggtgataag

SEQ ID NO: 885805 - DNA, 15 bp, Homo sapiens
tcgcattggtgataa

SEQ ID NO: 885806 - DNA, 15 bp, Homo sapiens
gtcgcattggtgata

SEQ ID NO: 885807 - DNA, 15 bp, Homo sapiens
agtcgcattggtgat

SEQ ID NO: 885808 - DNA, 15 bp, Homo sapiens
aagtcgcattggtga

SEQ ID NO: 885809 - DNA, 15 bp, Homo sapiens
aaagtcgcattggtg

SEQ ID NO: 885810 - DNA, 15 bp, Homo sapiens
aaaagtcgcattggt

SEQ ID NO: 885811 - DNA, 15 bp, Homo sapiens
gaaaagtcgcattgg

SEQ ID NO: 885812 - DNA, 15 bp, Homo sapiens
agaaaagtcgcattg

SEQ ID NO: 885813 - DNA, 15 bp, Homo sapiens
tagaaaagtcgcatt

SEQ ID NO: 885814 - DNA, 15 bp, Homo sapiens
ttagaaaagtcgcat

SEQ ID NO: 885815 - DNA, 15 bp, Homo sapiens
tttagaaaagtcgca

SEQ ID NO: 885816 - DNA, 15 bp, Homo sapiens
ttttagaaaagtcgc

SEQ ID NO: 885817 - DNA, 15 bp, Homo sapiens
tttttagaaaagtcg

SEQ ID NO: 885818 - DNA, 15 bp, Homo sapiens
ttttttagaaaagtc

SEQ ID NO: 885819 - DNA, 15 bp, Homo sapiens
attttttagaaaagt

SEQ ID NO: 885820 - DNA, 15 bp, Homo sapiens
aattttttagaaaag

SEQ ID NO: 885821 - DNA, 15 bp, Homo sapiens
caattttttagaaaa

SEQ ID NO: 885822 - DNA, 15 bp, Homo sapiens
acaattttttagaaa

SEQ ID NO: 885823 - DNA, 15 bp, Homo sapiens
aacaattttttagaa

SEQ ID NO: 885824 - DNA, 15 bp, Homo sapiens
taacaattttttaga

SEQ ID NO: 885825 - DNA, 15 bp, Homo sapiens
gtaacaattttttag

SEQ ID NO: 885826 - DNA, 15 bp, Homo sapiens
agtaacaatttttta

SEQ ID NO: 885827 - DNA, 15 bp, Homo sapiens
cagtaacaatttttt

SEQ ID NO: 885828 - DNA, 15 bp, Homo sapiens
tcagtaacaattttt

SEQ ID NO: 885829 - DNA, 15 bp, Homo sapiens
atcagtaacaatttt

SEQ ID NO: 885830 - DNA, 15 bp, Homo sapiens
aatcagtaacaattt

SEQ ID NO: 885831 - DNA, 15 bp, Homo sapiens
caatcagtaacaatt

SEQ ID NO: 885832 - DNA, 15 bp, Homo sapiens
tcaatcagtaacaat

SEQ ID NO: 885833 - DNA, 15 bp, Homo sapiens
ttcaatcagtaacaa

SEQ ID NO: 885834 - DNA, 15 bp, Homo sapiens
tttcaatcagtaaca

SEQ ID NO: 885835 - DNA, 15 bp, Homo sapiens
ttttcaatcagtaac

SEQ ID NO: 885836 - DNA, 15 bp, Homo sapiens
tttttcaatcagtaa

SEQ ID NO: 885837 - DNA, 15 bp, Homo sapiens
ttttttcaatcagta

SEQ ID NO: 885838 - DNA, 15 bp, Homo sapiens
attttttcaatcagt

SEQ ID NO: 885839 - DNA, 15 bp, Homo sapiens
cattttttcaatcag

SEQ ID NO: 885840 - DNA, 15 bp, Homo sapiens
acattttttcaatca

SEQ ID NO: 885841 - DNA, 15 bp, Homo sapiens
aacattttttcaatc

SEQ ID NO: 885842 - DNA, 15 bp, Homo sapiens
taacattttttcaat

SEQ ID NO: 885843 - DNA, 15 bp, Homo sapiens
gtaacattttttcaa

SEQ ID NO: 885844 - DNA, 15 bp, Homo sapiens
agtaacattttttca

SEQ ID NO: 885845 - DNA, 15 bp, Homo sapiens
cagtaacattttttc

SEQ ID NO: 885846 - DNA, 15 bp, Homo sapiens
tcagtaacatttttt

SEQ ID NO: 885847 - DNA, 15 bp, Homo sapiens
atcagtaacattttt

SEQ ID NO: 885848 - DNA, 15 bp, Homo sapiens
aatcagtaacatttt

SEQ ID NO: 885849 - DNA, 15 bp, Homo sapiens
caatcagtaacattt

SEQ ID NO: 885850 - DNA, 15 bp, Homo sapiens
ccaatcagtaacatt

SEQ ID NO: 885851 - DNA, 15 bp, Homo sapiens
accaatcagtaacat

SEQ ID NO: 885852 - DNA, 15 bp, Homo sapiens
aaccaatcagtaaca

SEQ ID NO: 885853 - DNA, 15 bp, Homo sapiens
caaccaatcagtaac

SEQ ID NO: 885854 - DNA, 15 bp, Homo sapiens
tcaaccaatcagtaa

SEQ ID NO: 885855 - DNA, 15 bp, Homo sapiens
ctcaaccaatcagta

SEQ ID NO: 885856 - DNA, 15 bp, Homo sapiens
cctcaaccaatcagt

SEQ ID NO: 885857 - DNA, 15 bp, Homo sapiens
tcctcaaccaatcag

SEQ ID NO: 885858 - DNA, 15 bp, Homo sapiens
ttcctcaaccaatca

SEQ ID NO: 885859 - DNA, 15 bp, Homo sapiens
gttcctcaaccaatc

SEQ ID NO: 885860 - DNA, 15 bp, Homo sapiens
tgttcctcaaccaat

SEQ ID NO: 885861 - DNA, 15 bp, Homo sapiens
ctgttcctcaaccaa

SEQ ID NO: 885862 - DNA, 15 bp, Homo sapiens
actgttcctcaacca

SEQ ID NO: 885863 - DNA, 15 bp, Homo sapiens
gactgttcctcaacc

SEQ ID NO: 885864 - DNA, 15 bp, Homo sapiens
ggactgttcctcaac

SEQ ID NO: 885865 - DNA, 15 bp, Homo sapiens
aggactgttcctcaa

SEQ ID NO: 885866 - DNA, 15 bp, Homo sapiens
caggactgttcctca

SEQ ID NO: 885867 - DNA, 15 bp, Homo sapiens
ccaggactgttcctc

SEQ ID NO: 885868 - DNA, 15 bp, Homo sapiens
tccaggactgttcct

SEQ ID NO: 885869 - DNA, 15 bp, Homo sapiens
atccaggactgttcc

SEQ ID NO: 885870 - DNA, 15 bp, Homo sapiens
aatccaggactgttc

SEQ ID NO: 885871 - DNA, 15 bp, Homo sapiens
gaatccaggactgtt

SEQ ID NO: 885872 - DNA, 15 bp, Homo sapiens
agaatccaggactgt

SEQ ID NO: 885873 - DNA, 15 bp, Homo sapiens
aagaatccaggactg

SEQ ID NO: 885874 - DNA, 15 bp, Homo sapiens
caagaatccaggact

SEQ ID NO: 885875 - DNA, 15 bp, Homo sapiens
gcaagaatccaggac

SEQ ID NO: 885876 - DNA, 15 bp, Homo sapiens
agcaagaatccagga

SEQ ID NO: 885877 - DNA, 15 bp, Homo sapiens
cagcaagaatccagg

SEQ ID NO: 885878 - DNA, 15 bp, Homo sapiens
gcagcaagaatccag

SEQ ID NO: 885879 - DNA, 15 bp, Homo sapiens
ggcagcaagaatcca

SEQ ID NO: 885880 - DNA, 15 bp, Homo sapiens
gggcagcaagaatcc

SEQ ID NO: 885881 - DNA, 15 bp, Homo sapiens
agggcagcaagaatc

SEQ ID NO: 885882 - DNA, 15 bp, Homo sapiens
aagggcagcaagaat

SEQ ID NO: 885883 - DNA, 15 bp, Homo sapiens
taagggcagcaagaa

SEQ ID NO: 885884 - DNA, 15 bp, Homo sapiens
ttaagggcagcaaga

SEQ ID NO: 885885 - DNA, 15 bp, Homo sapiens
attaagggcagcaag

SEQ ID NO: 885886 - DNA, 15 bp, Homo sapiens
aattaagggcagcaa

SEQ ID NO: 885887 - DNA, 15 bp, Homo sapiens
aaattaagggcagca

SEQ ID NO: 885888 - DNA, 15 bp, Homo sapiens
caaattaagggcagc

SEQ ID NO: 885889 - DNA, 15 bp, Homo sapiens
gcaaattaagggcag

SEQ ID NO: 885890 - DNA, 15 bp, Homo sapiens
agcaaattaagggca

SEQ ID NO: 885891 - DNA, 15 bp, Homo sapiens
cagcaaattaagggc

SEQ ID NO: 885892 - DNA, 15 bp, Homo sapiens
acagcaaattaaggg

SEQ ID NO: 885893 - DNA, 15 bp, Homo sapiens
cacagcaaattaagg

SEQ ID NO: 885894 - DNA, 15 bp, Homo sapiens
acacagcaaattaag

SEQ ID NO: 885895 - DNA, 15 bp, Homo sapiens
tacacagcaaattaa

SEQ ID NO: 885896 - DNA, 15 bp, Homo sapiens
ttacacagcaaatta

SEQ ID NO: 885897 - DNA, 15 bp, Homo sapiens
gttacacagcaaatt

SEQ ID NO: 885898 - DNA, 15 bp, Homo sapiens
agttacacagcaaat

SEQ ID NO: 885899 - DNA, 15 bp, Homo sapiens
tagttacacagcaaa

SEQ ID NO: 885900 - DNA, 15 bp, Homo sapiens
gtagttacacagcaa

SEQ ID NO: 885901 - DNA, 15 bp, Homo sapiens
tgtagttacacagca

SEQ ID NO: 885902 - DNA, 15 bp, Homo sapiens
atgtagttacacagc

SEQ ID NO: 885903 - DNA, 15 bp, Homo sapiens
catgtagttacacag

SEQ ID NO: 885904 - DNA, 15 bp, Homo sapiens
gcatgtagttacaca

SEQ ID NO: 885905 - DNA, 15 bp, Homo sapiens
tgcatgtagttacac

SEQ ID NO: 885906 - DNA, 15 bp, Homo sapiens
atgcatgtagttaca

SEQ ID NO: 885907 - DNA, 15 bp, Homo sapiens
catgcatgtagttac

SEQ ID NO: 885908 - DNA, 15 bp, Homo sapiens
acatgcatgtagtta

SEQ ID NO: 885909 - DNA, 15 bp, Homo sapiens
aacatgcatgtagtt

SEQ ID NO: 885910 - DNA, 15 bp, Homo sapiens
caacatgcatgtagt

SEQ ID NO: 885911 - DNA, 15 bp, Homo sapiens
gcaacatgcatgtag

SEQ ID NO: 885912 - DNA, 15 bp, Homo sapiens
ggcaacatgcatgta

SEQ ID NO: 885913 - DNA, 15 bp, Homo sapiens
aggcaacatgcatgt

SEQ ID NO: 885914 - DNA, 15 bp, Homo sapiens
aaggcaacatgcatg

SEQ ID NO: 885915 - DNA, 15 bp, Homo sapiens
taaggcaacatgcat

SEQ ID NO: 885916 - DNA, 15 bp, Homo sapiens
gtaaggcaacatgca

SEQ ID NO: 885917 - DNA, 15 bp, Homo sapiens
ggtaaggcaacatgc

SEQ ID NO: 885918 - DNA, 15 bp, Homo sapiens
aggtaaggcaacatg

SEQ ID NO: 885919 - DNA, 15 bp, Homo sapiens
aaggtaaggcaacat

SEQ ID NO: 885920 - DNA, 15 bp, Homo sapiens
gaaggtaaggcaaca

SEQ ID NO: 885921 - DNA, 15 bp, Homo sapiens
ggaaggtaaggcaac

SEQ ID NO: 885922 - DNA, 15 bp, Homo sapiens
aggaaggtaaggcaa

SEQ ID NO: 885923 - DNA, 15 bp, Homo sapiens
caggaaggtaaggca

SEQ ID NO: 885924 - DNA, 15 bp, Homo sapiens
ccaggaaggtaaggc

SEQ ID NO: 885925 - DNA, 15 bp, Homo sapiens
cccaggaaggtaagg

SEQ ID NO: 885926 - DNA, 15 bp, Homo sapiens
gcccaggaaggtaag

SEQ ID NO: 885927 - DNA, 15 bp, Homo sapiens
agcccaggaaggtaa

SEQ ID NO: 885928 - DNA, 15 bp, Homo sapiens
cagcccaggaaggta

SEQ ID NO: 885929 - DNA, 15 bp, Homo sapiens
tcagcccaggaaggt

SEQ ID NO: 885930 - DNA, 15 bp, Homo sapiens
ttcagcccaggaagg

SEQ ID NO: 885931 - DNA, 15 bp, Homo sapiens
cttcagcccaggaag

SEQ ID NO: 885932 - DNA, 15 bp, Homo sapiens
tcttcagcccaggaa

SEQ ID NO: 885933 - DNA, 15 bp, Homo sapiens
gtcttcagcccagga

SEQ ID NO: 885934 - DNA, 15 bp, Homo sapiens
agtcttcagcccagg

SEQ ID NO: 885935 - DNA, 15 bp, Homo sapiens
gagtcttcagcccag

SEQ ID NO: 885936 - DNA, 15 bp, Homo sapiens
ggagtcttcagccca

SEQ ID NO: 885937 - DNA, 15 bp, Homo sapiens
aggagtcttcagccc

SEQ ID NO: 885938 - DNA, 15 bp, Homo sapiens
gaggagtcttcagcc

SEQ ID NO: 885939 - DNA, 15 bp, Homo sapiens
tgaggagtcttcagc

SEQ ID NO: 885940 - DNA, 15 bp, Homo sapiens
gtgaggagtcttcag

SEQ ID NO: 885941 - DNA, 15 bp, Homo sapiens
ggtgaggagtcttca

SEQ ID NO: 885942 - DNA, 15 bp, Homo sapiens
aggtgaggagtcttc

SEQ ID NO: 885943 - DNA, 15 bp, Homo sapiens
caggtgaggagtctt

SEQ ID NO: 885944 - DNA, 15 bp, Homo sapiens
acaggtgaggagtct

SEQ ID NO: 885945 - DNA, 15 bp, Homo sapiens
tacaggtgaggagtc

SEQ ID NO: 885946 - DNA, 15 bp, Homo sapiens
atacaggtgaggagt

SEQ ID NO: 885947 - DNA, 15 bp, Homo sapiens
catacaggtgaggag

SEQ ID NO: 885948 - DNA, 15 bp, Homo sapiens
acatacaggtgagga

SEQ ID NO: 885949 - DNA, 15 bp, Homo sapiens
cacatacaggtgagg

SEQ ID NO: 885950 - DNA, 15 bp, Homo sapiens
tcacatacaggtgag

SEQ ID NO: 885951 - DNA, 15 bp, Homo sapiens
ctcacatacaggtga

SEQ ID NO: 885952 - DNA, 15 bp, Homo sapiens
cctcacatacaggtg

SEQ ID NO: 885953 - DNA, 15 bp, Homo sapiens
tcctcacatacaggt

SEQ ID NO: 885954 - DNA, 15 bp, Homo sapiens
ctcctcacatacagg

SEQ ID NO: 885955 - DNA, 15 bp, Homo sapiens
cctcctcacatacag

SEQ ID NO: 885956 - DNA, 15 bp, Homo sapiens
acctcctcacataca

SEQ ID NO: 885957 - DNA, 15 bp, Homo sapiens
gacctcctcacatac

SEQ ID NO: 885958 - DNA, 15 bp, Homo sapiens
tgacctcctcacata

SEQ ID NO: 885959 - DNA, 15 bp, Homo sapiens
ctgacctcctcacat

SEQ ID NO: 885960 - DNA, 15 bp, Homo sapiens
tctgacctcctcaca

SEQ ID NO: 885961 - DNA, 15 bp, Homo sapiens
gtctgacctcctcac

SEQ ID NO: 885962 - DNA, 15 bp, Homo sapiens
agtctgacctcctca

SEQ ID NO: 885963 - DNA, 15 bp, Homo sapiens
cagtctgacctcctc

SEQ ID NO: 885964 - DNA, 15 bp, Homo sapiens
tcagtctgacctcct

SEQ ID NO: 885965 - DNA, 15 bp, Homo sapiens
gtcagtctgacctcc

SEQ ID NO: 885966 - DNA, 15 bp, Homo sapiens
agtcagtctgacctc

SEQ ID NO: 885967 - DNA, 15 bp, Homo sapiens
cagtcagtctgacct

SEQ ID NO: 885968 - DNA, 15 bp, Homo sapiens
tcagtcagtctgacc

SEQ ID NO: 885969 - DNA, 15 bp, Homo sapiens
ctcagtcagtctgac

SEQ ID NO: 885970 - DNA, 15 bp, Homo sapiens
gctcagtcagtctga

SEQ ID NO: 885971 - DNA, 15 bp, Homo sapiens
agctcagtcagtctg

SEQ ID NO: 885972 - DNA, 15 bp, Homo sapiens
gagctcagtcagtct

SEQ ID NO: 885973 - DNA, 15 bp, Homo sapiens
agagctcagtcagtc

SEQ ID NO: 885974 - DNA, 15 bp, Homo sapiens
cagagctcagtcagt

SEQ ID NO: 885975 - DNA, 15 bp, Homo sapiens
tcagagctcagtcag

SEQ ID NO: 885976 - DNA, 15 bp, Homo sapiens
gtcagagctcagtca

SEQ ID NO: 885977 - DNA, 15 bp, Homo sapiens
tgtcagagctcagtc

SEQ ID NO: 885978 - DNA, 15 bp, Homo sapiens
ctgtcagagctcagt

SEQ ID NO: 885979 - DNA, 15 bp, Homo sapiens
gctgtcagagctcag

SEQ ID NO: 885980 - DNA, 15 bp, Homo sapiens
ggctgtcagagctca

SEQ ID NO: 885981 - DNA, 15 bp, Homo sapiens
gggctgtcagagctc

SEQ ID NO: 885982 - DNA, 15 bp, Homo sapiens
agggctgtcagagct

SEQ ID NO: 885983 - DNA, 15 bp, Homo sapiens
gagggctgtcagagc

SEQ ID NO: 885984 - DNA, 15 bp, Homo sapiens
ggagggctgtcagag

SEQ ID NO: 885985 - DNA, 15 bp, Homo sapiens
gggagggctgtcaga

SEQ ID NO: 885986 - DNA, 15 bp, Homo sapiens
tgggagggctgtcag

SEQ ID NO: 885987 - DNA, 15 bp, Homo sapiens
ctgggagggctgtca

SEQ ID NO: 885988 - DNA, 15 bp, Homo sapiens
cctgggagggctgtc

SEQ ID NO: 885989 - DNA, 15 bp, Homo sapiens
acctgggagggctgt

SEQ ID NO: 885990 - DNA, 15 bp, Homo sapiens
aacctgggagggctg

SEQ ID NO: 885991 - DNA, 15 bp, Homo sapiens
aaacctgggagggct

SEQ ID NO: 885992 - DNA, 15 bp, Homo sapiens
taaacctgggagggc

SEQ ID NO: 885993 - DNA, 15 bp, Homo sapiens
ttaaacctgggaggg

SEQ ID NO: 885994 - DNA, 15 bp, Homo sapiens
gttaaacctgggagg

SEQ ID NO: 885995 - DNA, 15 bp, Homo sapiens
tgttaaacctgggag

SEQ ID NO: 885996 - DNA, 15 bp, Homo sapiens
atgttaaacctggga

SEQ ID NO: 885997 - DNA, 15 bp, Homo sapiens
aatgttaaacctggg

SEQ ID NO: 885998 - DNA, 15 bp, Homo sapiens
aaatgttaaacctgg

SEQ ID NO: 885999 - DNA, 15 bp, Homo sapiens
aaaatgttaaacctg

SEQ ID NO: 886000 - DNA, 15 bp, Homo sapiens
gaaaatgttaaacct

SEQ ID NO: 886001 - DNA, 15 bp, Homo sapiens
agaaaatgttaaacc

SEQ ID NO: 886002 - DNA, 15 bp, Homo sapiens
tagaaaatgttaaac

SEQ ID NO: 886003 - DNA, 15 bp, Homo sapiens
ctagaaaatgttaaa

SEQ ID NO: 886004 - DNA, 15 bp, Homo sapiens
actagaaaatgttaa

SEQ ID NO: 886005 - DNA, 15 bp, Homo sapiens
gactagaaaatgtta

SEQ ID NO: 886006 - DNA, 15 bp, Homo sapiens
ggactagaaaatgtt

SEQ ID NO: 886007 - DNA, 15 bp, Homo sapiens
tggactagaaaatgt

SEQ ID NO: 886008 - DNA, 15 bp, Homo sapiens
ttggactagaaaatg

SEQ ID NO: 886009 - DNA, 15 bp, Homo sapiens
attggactagaaaat

SEQ ID NO: 886010 - DNA, 15 bp, Homo sapiens
tattggactagaaaa

SEQ ID NO: 886011 - DNA, 15 bp, Homo sapiens
ttattggactagaaa

SEQ ID NO: 886012 - DNA, 15 bp, Homo sapiens
tttattggactagaa

SEQ ID NO: 886013 - DNA, 15 bp, Homo sapiens
gtttattggactaga

SEQ ID NO: 886014 - DNA, 15 bp, Homo sapiens
tgtttattggactag

SEQ ID NO: 886015 - DNA, 15 bp, Homo sapiens
ctgtttattggacta

SEQ ID NO: 886016 - DNA, 15 bp, Homo sapiens
tctgtttattggact

SEQ ID NO: 886017 - DNA, 15 bp, Homo sapiens
atctgtttattggac

SEQ ID NO: 886018 - DNA, 15 bp, Homo sapiens
catctgtttattgga

SEQ ID NO: 886019 - DNA, 15 bp, Homo sapiens
acatctgtttattgg

SEQ ID NO: 886020 - DNA, 15 bp, Homo sapiens
tacatctgtttattg

SEQ ID NO: 886021 - DNA, 15 bp, Homo sapiens
ttacatctgtttatt

SEQ ID NO: 886022 - DNA, 15 bp, Homo sapiens
gttacatctgtttat

SEQ ID NO: 886023 - DNA, 15 bp, Homo sapiens
agttacatctgttta

SEQ ID NO: 886024 - DNA, 15 bp, Homo sapiens
tagttacatctgttt

SEQ ID NO: 886025 - DNA, 15 bp, Homo sapiens
ttagttacatctgtt

SEQ ID NO: 886026 - DNA, 15 bp, Homo sapiens
attagttacatctgt

SEQ ID NO: 886027 - DNA, 15 bp, Homo sapiens
tattagttacatctg

SEQ ID NO: 886028 - DNA, 15 bp, Homo sapiens
ttattagttacatct

SEQ ID NO: 886029 - DNA, 15 bp, Homo sapiens
gttattagttacatc

SEQ ID NO: 886030 - DNA, 15 bp, Homo sapiens
ggttattagttacat

SEQ ID NO: 886031 - DNA, 15 bp, Homo sapiens
aggttattagttaca

SEQ ID NO: 886032 - DNA, 15 bp, Homo sapiens
taggttattagttac

SEQ ID NO: 886033 - DNA, 15 bp, Homo sapiens
gtaggttattagtta

SEQ ID NO: 886034 - DNA, 15 bp, Homo sapiens
ggtaggttattagtt

SEQ ID NO: 886035 - DNA, 15 bp, Homo sapiens
gggtaggttattagt

SEQ ID NO: 886036 - DNA, 15 bp, Homo sapiens
ggggtaggttattag

SEQ ID NO: 886037 - DNA, 15 bp, Homo sapiens
aggggtaggttatta

SEQ ID NO: 886038 - DNA, 15 bp, Homo sapiens
taggggtaggttatt

SEQ ID NO: 886039 - DNA, 15 bp, Homo sapiens
ttaggggtaggttat

SEQ ID NO: 886040 - DNA, 15 bp, Homo sapiens
attaggggtaggtta

SEQ ID NO: 886041 - DNA, 15 bp, Homo sapiens
aattaggggtaggtt

SEQ ID NO: 886042 - DNA, 15 bp, Homo sapiens
gaattaggggtaggt

SEQ ID NO: 886043 - DNA, 15 bp, Homo sapiens
agaattaggggtagg

SEQ ID NO: 886044 - DNA, 15 bp, Homo sapiens
gagaattaggggtag

SEQ ID NO: 886045 - DNA, 15 bp, Homo sapiens
ggagaattaggggta

SEQ ID NO: 886046 - DNA, 15 bp, Homo sapiens
tggagaattaggggt

SEQ ID NO: 886047 - DNA, 15 bp, Homo sapiens
ttggagaattagggg

SEQ ID NO: 886048 - DNA, 15 bp, Homo sapiens
tttggagaattaggg

SEQ ID NO: 886049 - DNA, 15 bp, Homo sapiens
ttttggagaattagg

SEQ ID NO: 886050 - DNA, 15 bp, Homo sapiens
gttttggagaattag

SEQ ID NO: 886051 - DNA, 15 bp, Homo sapiens
agttttggagaatta

SEQ ID NO: 886052 - DNA, 15 bp, Homo sapiens
cagttttggagaatt

SEQ ID NO: 886053 - DNA, 15 bp, Homo sapiens
acagttttggagaat

SEQ ID NO: 886054 - DNA, 15 bp, Homo sapiens
cacagttttggagaa

SEQ ID NO: 886055 - DNA, 15 bp, Homo sapiens
tcacagttttggaga

SEQ ID NO: 886056 - DNA, 15 bp, Homo sapiens
gtcacagttttggag

SEQ ID NO: 886057 - DNA, 15 bp, Homo sapiens
agtcacagttttgga

SEQ ID NO: 886058 - DNA, 15 bp, Homo sapiens
cagtcacagttttgg

SEQ ID NO: 886059 - DNA, 15 bp, Homo sapiens
acagtcacagttttg

SEQ ID NO: 886060 - DNA, 15 bp, Homo sapiens
gacagtcacagtttt

SEQ ID NO: 886061 - DNA, 15 bp, Homo sapiens
agacagtcacagttt

SEQ ID NO: 886062 - DNA, 15 bp, Homo sapiens
gagacagtcacagtt

SEQ ID NO: 886063 - DNA, 15 bp, Homo sapiens
ggagacagtcacagt

SEQ ID NO: 886064 - DNA, 15 bp, Homo sapiens
tggagacagtcacag

SEQ ID NO: 886065 - DNA, 15 bp, Homo sapiens
ctggagacagtcaca

SEQ ID NO: 886066 - DNA, 15 bp, Homo sapiens
gctggagacagtcac

SEQ ID NO: 886067 - DNA, 15 bp, Homo sapiens
tgctggagacagtca

SEQ ID NO: 886068 - DNA, 15 bp, Homo sapiens
ctgctggagacagtc

SEQ ID NO: 886069 - DNA, 15 bp, Homo sapiens
gctgctggagacagt

SEQ ID NO: 886070 - DNA, 15 bp, Homo sapiens
agctgctggagacag

SEQ ID NO: 886071 - DNA, 15 bp, Homo sapiens
tagctgctggagaca

SEQ ID NO: 886072 - DNA, 15 bp, Homo sapiens
ttagctgctggagac

SEQ ID NO: 886073 - DNA, 15 bp, Homo sapiens
gttagctgctggaga

SEQ ID NO: 886074 - DNA, 15 bp, Homo sapiens
agttagctgctggag

SEQ ID NO: 886075 - DNA, 15 bp, Homo sapiens
cagttagctgctgga

SEQ ID NO: 886076 - DNA, 15 bp, Homo sapiens
tcagttagctgctgg

SEQ ID NO: 886077 - DNA, 15 bp, Homo sapiens
ctcagttagctgctg

SEQ ID NO: 886078 - DNA, 15 bp, Homo sapiens
gctcagttagctgct

SEQ ID NO: 886079 - DNA, 15 bp, Homo sapiens
agctcagttagctgc

SEQ ID NO: 886080 - DNA, 15 bp, Homo sapiens
gagctcagttagctg

SEQ ID NO: 886081 - DNA, 15 bp, Homo sapiens
agagctcagttagct

SEQ ID NO: 886082 - DNA, 15 bp, Homo sapiens
cagagctcagttagc

SEQ ID NO: 886083 - DNA, 15 bp, Homo sapiens
ccagagctcagttag

SEQ ID NO: 886084 - DNA, 15 bp, Homo sapiens
cccagagctcagtta

SEQ ID NO: 886085 - DNA, 15 bp, Homo sapiens
acccagagctcagtt

SEQ ID NO: 886086 - DNA, 15 bp, Homo sapiens
aacccagagctcagt

SEQ ID NO: 886087 - DNA, 15 bp, Homo sapiens
gaacccagagctcag

SEQ ID NO: 886088 - DNA, 15 bp, Homo sapiens
ggaacccagagctca

SEQ ID NO: 886089 - DNA, 15 bp, Homo sapiens
aggaacccagagctc

SEQ ID NO: 886090 - DNA, 15 bp, Homo sapiens
gaggaacccagagct

SEQ ID NO: 886091 - DNA, 15 bp, Homo sapiens
agaggaacccagagc

SEQ ID NO: 886092 - DNA, 15 bp, Homo sapiens
aagaggaacccagag

SEQ ID NO: 886093 - DNA, 15 bp, Homo sapiens
taagaggaacccaga

SEQ ID NO: 886094 - DNA, 15 bp, Homo sapiens
ctaagaggaacccag

SEQ ID NO: 886095 - DNA, 15 bp, Homo sapiens
gctaagaggaaccca

SEQ ID NO: 886096 - DNA, 15 bp, Homo sapiens
ggctaagaggaaccc

SEQ ID NO: 886097 - DNA, 15 bp, Homo sapiens
gggctaagaggaacc

SEQ ID NO: 886098 - DNA, 15 bp, Homo sapiens
ggggctaagaggaac

SEQ ID NO: 886099 - DNA, 15 bp, Homo sapiens
tggggctaagaggaa

SEQ ID NO: 886100 - DNA, 15 bp, Homo sapiens
ctggggctaagagga

SEQ ID NO: 886101 - DNA, 15 bp, Homo sapiens
tctggggctaagagg

SEQ ID NO: 886102 - DNA, 15 bp, Homo sapiens
ttctggggctaagag

SEQ ID NO: 886103 - DNA, 15 bp, Homo sapiens
gttctggggctaaga

SEQ ID NO: 886104 - DNA, 15 bp, Homo sapiens
ggttctggggctaag

SEQ ID NO: 886105 - DNA, 15 bp, Homo sapiens
gggttctggggctaa

SEQ ID NO: 886106 - DNA, 15 bp, Homo sapiens
ggggttctggggcta

SEQ ID NO: 886107 - DNA, 15 bp, Homo sapiens
tggggttctggggct

SEQ ID NO: 886108 - DNA, 15 bp, Homo sapiens
ttggggttctggggc

SEQ ID NO: 886109 - DNA, 15 bp, Homo sapiens
attggggttctgggg

SEQ ID NO: 886110 - DNA, 15 bp, Homo sapiens
tattggggttctggg

SEQ ID NO: 886111 - DNA, 15 bp, Homo sapiens
atattggggttctgg

SEQ ID NO: 886112 - DNA, 15 bp, Homo sapiens
aatattggggttctg

SEQ ID NO: 886113 - DNA, 15 bp, Homo sapiens
gaatattggggttct

SEQ ID NO: 886114 - DNA, 15 bp, Homo sapiens
agaatattggggttc

SEQ ID NO: 886115 - DNA, 15 bp, Homo sapiens
aagaatattggggtt

SEQ ID NO: 886116 - DNA, 15 bp, Homo sapiens
aaagaatattggggt

SEQ ID NO: 886117 - DNA, 15 bp, Homo sapiens
aaaagaatattgggg

SEQ ID NO: 886118 - DNA, 15 bp, Homo sapiens
aaaaagaatattggg

SEQ ID NO: 886119 - DNA, 15 bp, Homo sapiens
aaaaaagaatattgg

SEQ ID NO: 886120 - DNA, 15 bp, Homo sapiens
aaaaaaagaatattg

SEQ ID NO: 886121 - DNA, 15 bp, Homo sapiens
gaaaaaaagaatatt

SEQ ID NO: 886122 - DNA, 15 bp, Homo sapiens
tgaaaaaaagaatat

SEQ ID NO: 886123 - DNA, 15 bp, Homo sapiens
ctgaaaaaaagaata

SEQ ID NO: 886124 - DNA, 15 bp, Homo sapiens
cctgaaaaaaagaat

SEQ ID NO: 886125 - DNA, 15 bp, Homo sapiens
gcctgaaaaaaagaa

SEQ ID NO: 886126 - DNA, 15 bp, Homo sapiens
ggcctgaaaaaaaga

SEQ ID NO: 886127 - DNA, 15 bp, Homo sapiens
tggcctgaaaaaaag

SEQ ID NO: 886128 - DNA, 15 bp, Homo sapiens
ttggcctgaaaaaaa

SEQ ID NO: 886129 - DNA, 15 bp, Homo sapiens
gttggcctgaaaaaa

SEQ ID NO: 886130 - DNA, 15 bp, Homo sapiens
agttggcctgaaaaa

SEQ ID NO: 886131 - DNA, 15 bp, Homo sapiens
gagttggcctgaaaa

SEQ ID NO: 886132 - DNA, 15 bp, Homo sapiens
agagttggcctgaaa

SEQ ID NO: 886133 - DNA, 15 bp, Homo sapiens
gagagttggcctgaa

SEQ ID NO: 886134 - DNA, 15 bp, Homo sapiens
agagagttggcctga

SEQ ID NO: 886135 - DNA, 15 bp, Homo sapiens
tagagagttggcctg

SEQ ID NO: 886136 - DNA, 15 bp, Homo sapiens
ctagagagttggcct

SEQ ID NO: 886137 - DNA, 15 bp, Homo sapiens
cctagagagttggcc

SEQ ID NO: 886138 - DNA, 15 bp, Homo sapiens
tcctagagagttggc

SEQ ID NO: 886139 - DNA, 15 bp, Homo sapiens
gtcctagagagttgg

SEQ ID NO: 886140 - DNA, 15 bp, Homo sapiens
tgtcctagagagttg

SEQ ID NO: 886141 - DNA, 15 bp, Homo sapiens
atgtcctagagagtt

SEQ ID NO: 886142 - DNA, 15 bp, Homo sapiens
tatgtcctagagagt

SEQ ID NO: 886143 - DNA, 15 bp, Homo sapiens
atatgtcctagagag

SEQ ID NO: 886144 - DNA, 15 bp, Homo sapiens
aatatgtcctagaga

SEQ ID NO: 886145 - DNA, 15 bp, Homo sapiens
caatatgtcctagag

SEQ ID NO: 886146 - DNA, 15 bp, Homo sapiens
tcaatatgtcctaga

SEQ ID NO: 886147 - DNA, 15 bp, Homo sapiens
ttcaatatgtcctag

SEQ ID NO: 886148 - DNA, 15 bp, Homo sapiens
gttcaatatgtccta

SEQ ID NO: 886149 - DNA, 15 bp, Homo sapiens
agttcaatatgtcct

SEQ ID NO: 886150 - DNA, 15 bp, Homo sapiens
cagttcaatatgtcc

SEQ ID NO: 886151 - DNA, 15 bp, Homo sapiens
acagttcaatatgtc

SEQ ID NO: 886152 - DNA, 15 bp, Homo sapiens
gacagttcaatatgt

SEQ ID NO: 886153 - DNA, 15 bp, Homo sapiens
tgacagttcaatatg

SEQ ID NO: 886154 - DNA, 15 bp, Homo sapiens
ctgacagttcaatat

SEQ ID NO: 886155 - DNA, 15 bp, Homo sapiens
actgacagttcaata

SEQ ID NO: 886156 - DNA, 15 bp, Homo sapiens
aactgacagttcaat

SEQ ID NO: 886157 - DNA, 15 bp, Homo sapiens
taactgacagttcaa

SEQ ID NO: 886158 - DNA, 15 bp, Homo sapiens
ataactgacagttca

SEQ ID NO: 886159 - DNA, 15 bp, Homo sapiens
aataactgacagttc

SEQ ID NO: 886160 - DNA, 15 bp, Homo sapiens
caataactgacagtt

SEQ ID NO: 886161 - DNA, 15 bp, Homo sapiens
tcaataactgacagt

SEQ ID NO: 886162 - DNA, 15 bp, Homo sapiens
ttcaataactgacag

SEQ ID NO: 886163 - DNA, 15 bp, Homo sapiens
tttcaataactgaca

SEQ ID NO: 886164 - DNA, 15 bp, Homo sapiens
ctttcaataactgac

SEQ ID NO: 886165 - DNA, 15 bp, Homo sapiens
tctttcaataactga

SEQ ID NO: 886166 - DNA, 15 bp, Homo sapiens
ttctttcaataactg

SEQ ID NO: 886167 - DNA, 15 bp, Homo sapiens
tttctttcaataact

SEQ ID NO: 886168 - DNA, 15 bp, Homo sapiens
ttttctttcaataac

SEQ ID NO: 886169 - DNA, 15 bp, Homo sapiens
cttttctttcaataa

SEQ ID NO: 886170 - DNA, 15 bp, Homo sapiens
acttttctttcaata

SEQ ID NO: 886171 - DNA, 15 bp, Homo sapiens
tacttttctttcaat

SEQ ID NO: 886172 - DNA, 15 bp, Homo sapiens
gtacttttctttcaa

SEQ ID NO: 886173 - DNA, 15 bp, Homo sapiens
agtacttttctttca

SEQ ID NO: 886174 - DNA, 15 bp, Homo sapiens
aagtacttttctttc

SEQ ID NO: 886175 - DNA, 15 bp, Homo sapiens
caagtacttttcttt

SEQ ID NO: 886176 - DNA, 15 bp, Homo sapiens
ccaagtacttttctt

SEQ ID NO: 886177 - DNA, 15 bp, Homo sapiens
accaagtacttttct

SEQ ID NO: 886178 - DNA, 15 bp, Homo sapiens
aaccaagtacttttc

SEQ ID NO: 886179 - DNA, 15 bp, Homo sapiens
taaccaagtactttt

SEQ ID NO: 886180 - DNA, 15 bp, Homo sapiens
ataaccaagtacttt

SEQ ID NO: 886181 - DNA, 15 bp, Homo sapiens
aataaccaagtactt

SEQ ID NO: 886182 - DNA, 15 bp, Homo sapiens
aaataaccaagtact

SEQ ID NO: 886183 - DNA, 15 bp, Homo sapiens
caaataaccaagtac

SEQ ID NO: 886184 - DNA, 15 bp, Homo sapiens
gcaaataaccaagta

SEQ ID NO: 886185 - DNA, 15 bp, Homo sapiens
tgcaaataaccaagt

SEQ ID NO: 886186 - DNA, 15 bp, Homo sapiens
atgcaaataaccaag

SEQ ID NO: 886187 - DNA, 15 bp, Homo sapiens
tatgcaaataaccaa

SEQ ID NO: 886188 - DNA, 15 bp, Homo sapiens
ttatgcaaataacca

SEQ ID NO: 886189 - DNA, 15 bp, Homo sapiens
tttatgcaaataacc

SEQ ID NO: 886190 - DNA, 15 bp, Homo sapiens
atttatgcaaataac

SEQ ID NO: 886191 - DNA, 15 bp, Homo sapiens
catttatgcaaataa

SEQ ID NO: 886192 - DNA, 15 bp, Homo sapiens
gcatttatgcaaata

SEQ ID NO: 886193 - DNA, 15 bp, Homo sapiens
tgcatttatgcaaat

SEQ ID NO: 886194 - DNA, 15 bp, Homo sapiens
ctgcatttatgcaaa

SEQ ID NO: 886195 - DNA, 15 bp, Homo sapiens
actgcatttatgcaa

SEQ ID NO: 886196 - DNA, 15 bp, Homo sapiens
tactgcatttatgca

SEQ ID NO: 886197 - DNA, 15 bp, Homo sapiens
ctactgcatttatgc

SEQ ID NO: 886198 - DNA, 15 bp, Homo sapiens
actactgcatttatg

SEQ ID NO: 886199 - DNA, 15 bp, Homo sapiens
aactactgcatttat

SEQ ID NO: 886200 - DNA, 15 bp, Homo sapiens
caactactgcattta

SEQ ID NO: 886201 - DNA, 15 bp, Homo sapiens
tcaactactgcattt

SEQ ID NO: 886202 - DNA, 15 bp, Homo sapiens
gtcaactactgcatt

SEQ ID NO: 886203 - DNA, 15 bp, Homo sapiens
agtcaactactgcat

SEQ ID NO: 886204 - DNA, 15 bp, Homo sapiens
aagtcaactactgca

SEQ ID NO: 886205 - DNA, 15 bp, Homo sapiens
gaagtcaactactgc

SEQ ID NO: 886206 - DNA, 15 bp, Homo sapiens
tgaagtcaactactg

SEQ ID NO: 886207 - DNA, 15 bp, Homo sapiens
ctgaagtcaactact

SEQ ID NO: 886208 - DNA, 15 bp, Homo sapiens
tctgaagtcaactac

SEQ ID NO: 886209 - DNA, 15 bp, Homo sapiens
ttctgaagtcaacta

SEQ ID NO: 886210 - DNA, 15 bp, Homo sapiens
tttctgaagtcaact

SEQ ID NO: 886211 - DNA, 15 bp, Homo sapiens
gtttctgaagtcaac

SEQ ID NO: 886212 - DNA, 15 bp, Homo sapiens
tgtttctgaagtcaa

SEQ ID NO: 886213 - DNA, 15 bp, Homo sapiens
atgtttctgaagtca

SEQ ID NO: 886214 - DNA, 15 bp, Homo sapiens
gatgtttctgaagtc

SEQ ID NO: 886215 - DNA, 15 bp, Homo sapiens
ggatgtttctgaagt

SEQ ID NO: 886216 - DNA, 15 bp, Homo sapiens
gggatgtttctgaag

SEQ ID NO: 886217 - DNA, 15 bp, Homo sapiens
ggggatgtttctgaa

SEQ ID NO: 886218 - DNA, 15 bp, Homo sapiens
tggggatgtttctga

SEQ ID NO: 886219 - DNA, 15 bp, Homo sapiens
ttggggatgtttctg

SEQ ID NO: 886220 - DNA, 15 bp, Homo sapiens
cttggggatgtttct

SEQ ID NO: 886221 - DNA, 15 bp, Homo sapiens
acttggggatgtttc

SEQ ID NO: 886222 - DNA, 15 bp, Homo sapiens
aacttggggatgttt

SEQ ID NO: 886223 - DNA, 15 bp, Homo sapiens
aaacttggggatgtt

SEQ ID NO: 886224 - DNA, 15 bp, Homo sapiens
aaaacttggggatgt

SEQ ID NO: 886225 - DNA, 15 bp, Homo sapiens
taaaacttggggatg

SEQ ID NO: 886226 - DNA, 15 bp, Homo sapiens
ctaaaacttggggat

SEQ ID NO: 886227 - DNA, 15 bp, Homo sapiens
gctaaaacttgggga

SEQ ID NO: 886228 - DNA, 15 bp, Homo sapiens
tgctaaaacttgggg

SEQ ID NO: 886229 - DNA, 15 bp, Homo sapiens
atgctaaaacttggg

SEQ ID NO: 886230 - DNA, 15 bp, Homo sapiens
catgctaaaacttgg

SEQ ID NO: 886231 - DNA, 15 bp, Homo sapiens
ccatgctaaaacttg

SEQ ID NO: 886232 - DNA, 15 bp, Homo sapiens
tccatgctaaaactt

SEQ ID NO: 886233 - DNA, 15 bp, Homo sapiens
atccatgctaaaact

SEQ ID NO: 886234 - DNA, 15 bp, Homo sapiens
catccatgctaaaac

SEQ ID NO: 886235 - DNA, 15 bp, Homo sapiens
tcatccatgctaaaa

SEQ ID NO: 886236 - DNA, 15 bp, Homo sapiens
atcatccatgctaaa

SEQ ID NO: 886237 - DNA, 15 bp, Homo sapiens
catcatccatgctaa

SEQ ID NO: 886238 - DNA, 15 bp, Homo sapiens
ccatcatccatgcta

SEQ ID NO: 886239 - DNA, 15 bp, Homo sapiens
cccatcatccatgct

SEQ ID NO: 886240 - DNA, 15 bp, Homo sapiens
tcccatcatccatgc

SEQ ID NO: 886241 - DNA, 15 bp, Homo sapiens
gtcccatcatccatg

SEQ ID NO: 886242 - DNA, 15 bp, Homo sapiens
tgtcccatcatccat

SEQ ID NO: 886243 - DNA, 15 bp, Homo sapiens
atgtcccatcatcca

SEQ ID NO: 886244 - DNA, 15 bp, Homo sapiens
aatgtcccatcatcc

SEQ ID NO: 886245 - DNA, 15 bp, Homo sapiens
gaatgtcccatcatc

SEQ ID NO: 886246 - DNA, 15 bp, Homo sapiens
agaatgtcccatcat

SEQ ID NO: 886247 - DNA, 15 bp, Homo sapiens
gagaatgtcccatca

SEQ ID NO: 886248 - DNA, 15 bp, Homo sapiens
ggagaatgtcccatc

SEQ ID NO: 886249 - DNA, 15 bp, Homo sapiens
aggagaatgtcccat

SEQ ID NO: 886250 - DNA, 15 bp, Homo sapiens
gaggagaatgtccca

SEQ ID NO: 886251 - DNA, 15 bp, Homo sapiens
tgaggagaatgtccc

SEQ ID NO: 886252 - DNA, 15 bp, Homo sapiens
gtgaggagaatgtcc

SEQ ID NO: 886253 - DNA, 15 bp, Homo sapiens
agtgaggagaatgtc

SEQ ID NO: 886254 - DNA, 15 bp, Homo sapiens
cagtgaggagaatgt

SEQ ID NO: 886255 - DNA, 15 bp, Homo sapiens
tcagtgaggagaatg

SEQ ID NO: 886256 - DNA, 15 bp, Homo sapiens
atcagtgaggagaat

SEQ ID NO: 886257 - DNA, 15 bp, Homo sapiens
aatcagtgaggagaa

SEQ ID NO: 886258 - DNA, 15 bp, Homo sapiens
gaatcagtgaggaga

SEQ ID NO: 886259 - DNA, 15 bp, Homo sapiens
agaatcagtgaggag

SEQ ID NO: 886260 - DNA, 15 bp, Homo sapiens
tagaatcagtgagga

SEQ ID NO: 886261 - DNA, 15 bp, Homo sapiens
atagaatcagtgagg

SEQ ID NO: 886262 - DNA, 15 bp, Homo sapiens
gatagaatcagtgag

SEQ ID NO: 886263 - DNA, 15 bp, Homo sapiens
tgatagaatcagtga

SEQ ID NO: 886264 - DNA, 15 bp, Homo sapiens
gtgatagaatcagtg

SEQ ID NO: 886265 - DNA, 15 bp, Homo sapiens
agtgatagaatcagt

SEQ ID NO: 886266 - DNA, 15 bp, Homo sapiens
tagtgatagaatcag

SEQ ID NO: 886267 - DNA, 15 bp, Homo sapiens
gtagtgatagaatca

SEQ ID NO: 886268 - DNA, 15 bp, Homo sapiens
ggtagtgatagaatc

SEQ ID NO: 886269 - DNA, 15 bp, Homo sapiens
gggtagtgatagaat

SEQ ID NO: 886270 - DNA, 15 bp, Homo sapiens
tgggtagtgatagaa

SEQ ID NO: 886271 - DNA, 15 bp, Homo sapiens
ctgggtagtgataga

SEQ ID NO: 886272 - DNA, 15 bp, Homo sapiens
actgggtagtgatag

SEQ ID NO: 886273 - DNA, 15 bp, Homo sapiens
gactgggtagtgata

SEQ ID NO: 886274 - DNA, 15 bp, Homo sapiens
agactgggtagtgat

SEQ ID NO: 886275 - DNA, 15 bp, Homo sapiens
cagactgggtagtga

SEQ ID NO: 886276 - DNA, 15 bp, Homo sapiens
gcagactgggtagtg

SEQ ID NO: 886277 - DNA, 15 bp, Homo sapiens
agcagactgggtagt

SEQ ID NO: 886278 - DNA, 15 bp, Homo sapiens
tagcagactgggtag

SEQ ID NO: 886279 - DNA, 15 bp, Homo sapiens
gtagcagactgggta

SEQ ID NO: 886280 - DNA, 15 bp, Homo sapiens
ggtagcagactgggt

SEQ ID NO: 886281 - DNA, 15 bp, Homo sapiens
aggtagcagactggg

SEQ ID NO: 886282 - DNA, 15 bp, Homo sapiens
gaggtagcagactgg

SEQ ID NO: 886283 - DNA, 15 bp, Homo sapiens
ggaggtagcagactg

SEQ ID NO: 886284 - DNA, 15 bp, Homo sapiens
gggaggtagcagact

SEQ ID NO: 886285 - DNA, 15 bp, Homo sapiens
tgggaggtagcagac

SEQ ID NO: 886286 - DNA, 15 bp, Homo sapiens
gtgggaggtagcaga

SEQ ID NO: 886287 - DNA, 15 bp, Homo sapiens
agtgggaggtagcag

SEQ ID NO: 886288 - DNA, 15 bp, Homo sapiens
cagtgggaggtagca

SEQ ID NO: 886289 - DNA, 15 bp, Homo sapiens
acagtgggaggtagc

SEQ ID NO: 886290 - DNA, 15 bp, Homo sapiens
aacagtgggaggtag

SEQ ID NO: 886291 - DNA, 15 bp, Homo sapiens
caacagtgggaggta

SEQ ID NO: 886292 - DNA, 15 bp, Homo sapiens
acaacagtgggaggt

SEQ ID NO: 886293 - DNA, 15 bp, Homo sapiens
cacaacagtgggagg

SEQ ID NO: 886294 - DNA, 15 bp, Homo sapiens
gcacaacagtgggag

SEQ ID NO: 886295 - DNA, 15 bp, Homo sapiens
ggcacaacagtggga

SEQ ID NO: 886296 - DNA, 15 bp, Homo sapiens
aggcacaacagtggg

SEQ ID NO: 886297 - DNA, 15 bp, Homo sapiens
taggcacaacagtgg

SEQ ID NO: 886298 - DNA, 15 bp, Homo sapiens
ttaggcacaacagtg

SEQ ID NO: 886299 - DNA, 15 bp, Homo sapiens
attaggcacaacagt

SEQ ID NO: 886300 - DNA, 15 bp, Homo sapiens
cattaggcacaacag

SEQ ID NO: 886301 - DNA, 15 bp, Homo sapiens
tcattaggcacaaca

SEQ ID NO: 886302 - DNA, 15 bp, Homo sapiens
ctcattaggcacaac

SEQ ID NO: 886303 - DNA, 15 bp, Homo sapiens
gctcattaggcacaa

SEQ ID NO: 886304 - DNA, 15 bp, Homo sapiens
agctcattaggcaca

SEQ ID NO: 886305 - DNA, 15 bp, Homo sapiens
gagctcattaggcac

SEQ ID NO: 886306 - DNA, 15 bp, Homo sapiens
agagctcattaggca

SEQ ID NO: 886307 - DNA, 15 bp, Homo sapiens
cagagctcattaggc

SEQ ID NO: 886308 - DNA, 15 bp, Homo sapiens
gcagagctcattagg

SEQ ID NO: 886309 - DNA, 15 bp, Homo sapiens
ggcagagctcattag

SEQ ID NO: 886310 - DNA, 15 bp, Homo sapiens
tggcagagctcatta

SEQ ID NO: 886311 - DNA, 15 bp, Homo sapiens
ctggcagagctcatt

SEQ ID NO: 886312 - DNA, 15 bp, Homo sapiens
gctggcagagctcat

SEQ ID NO: 886313 - DNA, 15 bp, Homo sapiens
agctggcagagctca

SEQ ID NO: 886314 - DNA, 15 bp, Homo sapiens
aagctggcagagctc

SEQ ID NO: 886315 - DNA, 15 bp, Homo sapiens
gaagctggcagagct

SEQ ID NO: 886316 - DNA, 15 bp, Homo sapiens
tgaagctggcagagc

SEQ ID NO: 886317 - DNA, 15 bp, Homo sapiens
ctgaagctggcagag

SEQ ID NO: 886318 - DNA, 15 bp, Homo sapiens
tctgaagctggcaga

SEQ ID NO: 886319 - DNA, 15 bp, Homo sapiens
ctctgaagctggcag

SEQ ID NO: 886320 - DNA, 15 bp, Homo sapiens
gctctgaagctggca

SEQ ID NO: 886321 - DNA, 15 bp, Homo sapiens
tgctctgaagctggc

SEQ ID NO: 886322 - DNA, 15 bp, Homo sapiens
atgctctgaagctgg

SEQ ID NO: 886323 - DNA, 15 bp, Homo sapiens
gatgctctgaagctg

SEQ ID NO: 886324 - DNA, 15 bp, Homo sapiens
agatgctctgaagct

SEQ ID NO: 886325 - DNA, 15 bp, Homo sapiens
cagatgctctgaagc

SEQ ID NO: 886326 - DNA, 15 bp, Homo sapiens
tcagatgctctgaag

SEQ ID NO: 886327 - DNA, 15 bp, Homo sapiens
ctcagatgctctgaa

SEQ ID NO: 886328 - DNA, 15 bp, Homo sapiens
cctcagatgctctga

SEQ ID NO: 886329 - DNA, 15 bp, Homo sapiens
tcctcagatgctctg

SEQ ID NO: 886330 - DNA, 15 bp, Homo sapiens
ttcctcagatgctct

SEQ ID NO: 886331 - DNA, 15 bp, Homo sapiens
gttcctcagatgctc

SEQ ID NO: 886332 - DNA, 15 bp, Homo sapiens
tgttcctcagatgct

SEQ ID NO: 886333 - DNA, 15 bp, Homo sapiens
atgttcctcagatgc

SEQ ID NO: 886334 - DNA, 15 bp, Homo sapiens
gatgttcctcagatg

SEQ ID NO: 886335 - DNA, 15 bp, Homo sapiens
agatgttcctcagat

SEQ ID NO: 886336 - DNA, 15 bp, Homo sapiens
gagatgttcctcaga

SEQ ID NO: 886337 - DNA, 15 bp, Homo sapiens
tgagatgttcctcag

SEQ ID NO: 886338 - DNA, 15 bp, Homo sapiens
ctgagatgttcctca

SEQ ID NO: 886339 - DNA, 15 bp, Homo sapiens
actgagatgttcctc

SEQ ID NO: 886340 - DNA, 15 bp, Homo sapiens
gactgagatgttcct

SEQ ID NO: 886341 - DNA, 15 bp, Homo sapiens
agactgagatgttcc

SEQ ID NO: 886342 - DNA, 15 bp, Homo sapiens
tagactgagatgttc

SEQ ID NO: 886343 - DNA, 15 bp, Homo sapiens
ctagactgagatgtt

SEQ ID NO: 886344 - DNA, 15 bp, Homo sapiens
actagactgagatgt

SEQ ID NO: 886345 - DNA, 15 bp, Homo sapiens
aactagactgagatg

SEQ ID NO: 886346 - DNA, 15 bp, Homo sapiens
caactagactgagat

SEQ ID NO: 886347 - DNA, 15 bp, Homo sapiens
tcaactagactgaga

SEQ ID NO: 886348 - DNA, 15 bp, Homo sapiens
gtcaactagactgag

SEQ ID NO: 886349 - DNA, 15 bp, Homo sapiens
tgtcaactagactga

SEQ ID NO: 886350 - DNA, 15 bp, Homo sapiens
gtgtcaactagactg

SEQ ID NO: 886351 - DNA, 15 bp, Homo sapiens
ggtgtcaactagact

SEQ ID NO: 886352 - DNA, 15 bp, Homo sapiens
tggtgtcaactagac

SEQ ID NO: 886353 - DNA, 15 bp, Homo sapiens
gtggtgtcaactaga

SEQ ID NO: 886354 - DNA, 15 bp, Homo sapiens
tgtggtgtcaactag

SEQ ID NO: 886355 - DNA, 15 bp, Homo sapiens
ctgtggtgtcaacta

SEQ ID NO: 886356 - DNA, 15 bp, Homo sapiens
tctgtggtgtcaact

SEQ ID NO: 886357 - DNA, 15 bp, Homo sapiens
ctctgtggtgtcaac

SEQ ID NO: 886358 - DNA, 15 bp, Homo sapiens
tctctgtggtgtcaa

SEQ ID NO: 886359 - DNA, 15 bp, Homo sapiens
ttctctgtggtgtca

SEQ ID NO: 886360 - DNA, 15 bp, Homo sapiens
tttctctgtggtgtc

SEQ ID NO: 886361 - DNA, 15 bp, Homo sapiens
ttttctctgtggtgt

SEQ ID NO: 886362 - DNA, 15 bp, Homo sapiens
tttttctctgtggtg

SEQ ID NO: 886363 - DNA, 15 bp, Homo sapiens
ttttttctctgtggt

SEQ ID NO: 886364 - DNA, 15 bp, Homo sapiens
tttttttctctgtgg

SEQ ID NO: 886365 - DNA, 15 bp, Homo sapiens
gtttttttctctgtg

SEQ ID NO: 886366 - DNA, 15 bp, Homo sapiens
tgtttttttctctgt

SEQ ID NO: 886367 - DNA, 15 bp, Homo sapiens
ttgtttttttctctg

SEQ ID NO: 886368 - DNA, 15 bp, Homo sapiens
tttgtttttttctct

SEQ ID NO: 886369 - DNA, 15 bp, Homo sapiens
ttttgtttttttctc

SEQ ID NO: 886370 - DNA, 15 bp, Homo sapiens
cttttgtttttttct

SEQ ID NO: 886371 - DNA, 15 bp, Homo sapiens
tcttttgtttttttc

SEQ ID NO: 886372 - DNA, 15 bp, Homo sapiens
ctcttttgttttttt

SEQ ID NO: 886373 - DNA, 15 bp, Homo sapiens
tctcttttgtttttt

SEQ ID NO: 886374 - DNA, 15 bp, Homo sapiens
atctcttttgttttt

SEQ ID NO: 886375 - DNA, 15 bp, Homo sapiens
catctcttttgtttt

SEQ ID NO: 886376 - DNA, 15 bp, Homo sapiens
ccatctcttttgttt

SEQ ID NO: 886377 - DNA, 15 bp, Homo sapiens
tccatctcttttgtt

SEQ ID NO: 886378 - DNA, 15 bp, Homo sapiens
ctccatctcttttgt

SEQ ID NO: 886379 - DNA, 15 bp, Homo sapiens
cctccatctcttttg

SEQ ID NO: 886380 - DNA, 15 bp, Homo sapiens
tcctccatctctttt

SEQ ID NO: 886381 - DNA, 15 bp, Homo sapiens
ctcctccatctcttt

SEQ ID NO: 886382 - DNA, 15 bp, Homo sapiens
actcctccatctctt

SEQ ID NO: 886383 - DNA, 15 bp, Homo sapiens
aactcctccatctct

SEQ ID NO: 886384 - DNA, 15 bp, Homo sapiens
gaactcctccatctc

SEQ ID NO: 886385 - DNA, 15 bp, Homo sapiens
ggaactcctccatct

SEQ ID NO: 886386 - DNA, 15 bp, Homo sapiens
aggaactcctccatc

SEQ ID NO: 886387 - DNA, 15 bp, Homo sapiens
caggaactcctccat

SEQ ID NO: 886388 - DNA, 15 bp, Homo sapiens
acaggaactcctcca

SEQ ID NO: 886389 - DNA, 15 bp, Homo sapiens
gacaggaactcctcc

SEQ ID NO: 886390 - DNA, 15 bp, Homo sapiens
tgacaggaactcctc

SEQ ID NO: 886391 - DNA, 15 bp, Homo sapiens
atgacaggaactcct

SEQ ID NO: 886392 - DNA, 15 bp, Homo sapiens
tatgacaggaactcc

SEQ ID NO: 886393 - DNA, 15 bp, Homo sapiens
atatgacaggaactc

SEQ ID NO: 886394 - DNA, 15 bp, Homo sapiens
catatgacaggaact

SEQ ID NO: 886395 - DNA, 15 bp, Homo sapiens
ccatatgacaggaac

SEQ ID NO: 886396 - DNA, 15 bp, Homo sapiens
tccatatgacaggaa

SEQ ID NO: 886397 - DNA, 15 bp, Homo sapiens
ctccatatgacagga

SEQ ID NO: 886398 - DNA, 15 bp, Homo sapiens
tctccatatgacagg

SEQ ID NO: 886399 - DNA, 15 bp, Homo sapiens
ttctccatatgacag

SEQ ID NO: 886400 - DNA, 15 bp, Homo sapiens
gttctccatatgaca

SEQ ID NO: 886401 - DNA, 15 bp, Homo sapiens
tgttctccatatgac

SEQ ID NO: 886402 - DNA, 15 bp, Homo sapiens
atgttctccatatga

SEQ ID NO: 886403 - DNA, 15 bp, Homo sapiens
tatgttctccatatg

SEQ ID NO: 886404 - DNA, 15 bp, Homo sapiens
atatgttctccatat

SEQ ID NO: 886405 - DNA, 15 bp, Homo sapiens
aatatgttctccata

SEQ ID NO: 886406 - DNA, 15 bp, Homo sapiens
caatatgttctccat

SEQ ID NO: 886407 - DNA, 15 bp, Homo sapiens
acaatatgttctcca

SEQ ID NO: 886408 - DNA, 15 bp, Homo sapiens
aacaatatgttctcc

SEQ ID NO: 886409 - DNA, 15 bp, Homo sapiens
caacaatatgttctc

SEQ ID NO: 886410 - DNA, 15 bp, Homo sapiens
ccaacaatatgttct

SEQ ID NO: 886411 - DNA, 15 bp, Homo sapiens
cccaacaatatgttc

SEQ ID NO: 886412 - DNA, 15 bp, Homo sapiens
tcccaacaatatgtt

SEQ ID NO: 886413 - DNA, 15 bp, Homo sapiens
ctcccaacaatatgt

SEQ ID NO: 886414 - DNA, 15 bp, Homo sapiens
gctcccaacaatatg

SEQ ID NO: 886415 - DNA, 15 bp, Homo sapiens
ggctcccaacaatat

SEQ ID NO: 886416 - DNA, 15 bp, Homo sapiens
aggctcccaacaata

SEQ ID NO: 886417 - DNA, 15 bp, Homo sapiens
gaggctcccaacaat

SEQ ID NO: 886418 - DNA, 15 bp, Homo sapiens
ggaggctcccaacaa

SEQ ID NO: 886419 - DNA, 15 bp, Homo sapiens
aggaggctcccaaca

SEQ ID NO: 886420 - DNA, 15 bp, Homo sapiens
aaggaggctcccaac

SEQ ID NO: 886421 - DNA, 15 bp, Homo sapiens
aaaggaggctcccaa

SEQ ID NO: 886422 - DNA, 15 bp, Homo sapiens
aaaaggaggctccca

SEQ ID NO: 886423 - DNA, 15 bp, Homo sapiens
caaaaggaggctccc

SEQ ID NO: 886424 - DNA, 15 bp, Homo sapiens
ccaaaaggaggctcc

SEQ ID NO: 886425 - DNA, 15 bp, Homo sapiens
cccaaaaggaggctc

SEQ ID NO: 886426 - DNA, 15 bp, Homo sapiens
ccccaaaaggaggct

SEQ ID NO: 886427 - DNA, 15 bp, Homo sapiens
gccccaaaaggaggc

SEQ ID NO: 886428 - DNA, 15 bp, Homo sapiens
agccccaaaaggagg

SEQ ID NO: 886429 - DNA, 15 bp, Homo sapiens
aagccccaaaaggag

SEQ ID NO: 886430 - DNA, 15 bp, Homo sapiens
gaagccccaaaagga

SEQ ID NO: 886431 - DNA, 15 bp, Homo sapiens
agaagccccaaaagg

SEQ ID NO: 886432 - DNA, 15 bp, Homo sapiens
aagaagccccaaaag

SEQ ID NO: 886433 - DNA, 15 bp, Homo sapiens
taagaagccccaaaa

SEQ ID NO: 886434 - DNA, 15 bp, Homo sapiens
ctaagaagccccaaa

SEQ ID NO: 886435 - DNA, 15 bp, Homo sapiens
actaagaagccccaa

SEQ ID NO: 886436 - DNA, 15 bp, Homo sapiens
tactaagaagcccca

SEQ ID NO: 886437 - DNA, 15 bp, Homo sapiens
gtactaagaagcccc

SEQ ID NO: 886438 - DNA, 15 bp, Homo sapiens
ggtactaagaagccc

SEQ ID NO: 886439 - DNA, 15 bp, Homo sapiens
aggtactaagaagcc

SEQ ID NO: 886440 - DNA, 15 bp, Homo sapiens
gaggtactaagaagc

SEQ ID NO: 886441 - DNA, 15 bp, Homo sapiens
ggaggtactaagaag

SEQ ID NO: 886442 - DNA, 15 bp, Homo sapiens
aggaggtactaagaa

SEQ ID NO: 886443 - DNA, 15 bp, Homo sapiens
caggaggtactaaga

SEQ ID NO: 886444 - DNA, 15 bp, Homo sapiens
tcaggaggtactaag

SEQ ID NO: 886445 - DNA, 15 bp, Homo sapiens
atcaggaggtactaa

SEQ ID NO: 886446 - DNA, 15 bp, Homo sapiens
tatcaggaggtacta

SEQ ID NO: 886447 - DNA, 15 bp, Homo sapiens
atatcaggaggtact

SEQ ID NO: 886448 - DNA, 15 bp, Homo sapiens
aatatcaggaggtac

SEQ ID NO: 886449 - DNA, 15 bp, Homo sapiens
aaatatcaggaggta

SEQ ID NO: 886450 - DNA, 15 bp, Homo sapiens
aaaatatcaggaggt

SEQ ID NO: 886451 - DNA, 15 bp, Homo sapiens
gaaaatatcaggagg

SEQ ID NO: 886452 - DNA, 15 bp, Homo sapiens
ggaaaatatcaggag

SEQ ID NO: 886453 - DNA, 15 bp, Homo sapiens
tggaaaatatcagga

SEQ ID NO: 886454 - DNA, 15 bp, Homo sapiens
atggaaaatatcagg

SEQ ID NO: 886455 - DNA, 15 bp, Homo sapiens
gatggaaaatatcag

SEQ ID NO: 886456 - DNA, 15 bp, Homo sapiens
tgatggaaaatatca

SEQ ID NO: 886457 - DNA, 15 bp, Homo sapiens
atgatggaaaatatc

SEQ ID NO: 886458 - DNA, 15 bp, Homo sapiens
catgatggaaaatat

SEQ ID NO: 886459 - DNA, 15 bp, Homo sapiens
gcatgatggaaaata

SEQ ID NO: 886460 - DNA, 15 bp, Homo sapiens
agcatgatggaaaat

SEQ ID NO: 886461 - DNA, 15 bp, Homo sapiens
aagcatgatggaaaa

SEQ ID NO: 886462 - DNA, 15 bp, Homo sapiens
aaagcatgatggaaa

SEQ ID NO: 886463 - DNA, 15 bp, Homo sapiens
taaagcatgatggaa

SEQ ID NO: 886464 - DNA, 15 bp, Homo sapiens
gtaaagcatgatgga

SEQ ID NO: 886465 - DNA, 15 bp, Homo sapiens
tgtaaagcatgatgg

SEQ ID NO: 886466 - DNA, 15 bp, Homo sapiens
atgtaaagcatgatg

SEQ ID NO: 886467 - DNA, 15 bp, Homo sapiens
aatgtaaagcatgat

SEQ ID NO: 886468 - DNA, 15 bp, Homo sapiens
gaatgtaaagcatga

SEQ ID NO: 886469 - DNA, 15 bp, Homo sapiens
tgaatgtaaagcatg

SEQ ID NO: 886470 - DNA, 15 bp, Homo sapiens
ctgaatgtaaagcat

SEQ ID NO: 886471 - DNA, 15 bp, Homo sapiens
gctgaatgtaaagca

SEQ ID NO: 886472 - DNA, 15 bp, Homo sapiens
ggctgaatgtaaagc

SEQ ID NO: 886473 - DNA, 15 bp, Homo sapiens
tggctgaatgtaaag

SEQ ID NO: 886474 - DNA, 15 bp, Homo sapiens
ctggctgaatgtaaa

SEQ ID NO: 886475 - DNA, 15 bp, Homo sapiens
gctggctgaatgtaa

SEQ ID NO: 886476 - DNA, 15 bp, Homo sapiens
tgctggctgaatgta

SEQ ID NO: 886477 - DNA, 15 bp, Homo sapiens
gtgctggctgaatgt

SEQ ID NO: 886478 - DNA, 15 bp, Homo sapiens
agtgctggctgaatg

SEQ ID NO: 886479 - DNA, 15 bp, Homo sapiens
gagtgctggctgaat

SEQ ID NO: 886480 - DNA, 15 bp, Homo sapiens
tgagtgctggctgaa

SEQ ID NO: 886481 - DNA, 15 bp, Homo sapiens
ttgagtgctggctga

SEQ ID NO: 886482 - DNA, 15 bp, Homo sapiens
gttgagtgctggctg

SEQ ID NO: 886483 - DNA, 15 bp, Homo sapiens
tgttgagtgctggct

SEQ ID NO: 886484 - DNA, 15 bp, Homo sapiens
ctgttgagtgctggc

SEQ ID NO: 886485 - DNA, 15 bp, Homo sapiens
cctgttgagtgctgg

SEQ ID NO: 886486 - DNA, 15 bp, Homo sapiens
acctgttgagtgctg

SEQ ID NO: 886487 - DNA, 15 bp, Homo sapiens
cacctgttgagtgct

SEQ ID NO: 886488 - DNA, 15 bp, Homo sapiens
tcacctgttgagtgc

SEQ ID NO: 886489 - DNA, 15 bp, Homo sapiens
gtcacctgttgagtg

SEQ ID NO: 886490 - DNA, 15 bp, Homo sapiens
agtcacctgttgagt

SEQ ID NO: 886491 - DNA, 15 bp, Homo sapiens
tagtcacctgttgag

SEQ ID NO: 886492 - DNA, 15 bp, Homo sapiens
ctagtcacctgttga

SEQ ID NO: 886493 - DNA, 15 bp, Homo sapiens
tctagtcacctgttg

SEQ ID NO: 886494 - DNA, 15 bp, Homo sapiens
atctagtcacctgtt

SEQ ID NO: 886495 - DNA, 15 bp, Homo sapiens
tatctagtcacctgt

SEQ ID NO: 886496 - DNA, 15 bp, Homo sapiens
ctatctagtcacctg

SEQ ID NO: 886497 - DNA, 15 bp, Homo sapiens
tctatctagtcacct

SEQ ID NO: 886498 - DNA, 15 bp, Homo sapiens
ctctatctagtcacc

SEQ ID NO: 886499 - DNA, 15 bp, Homo sapiens
actctatctagtcac

SEQ ID NO: 886500 - DNA, 15 bp, Homo sapiens
cactctatctagtca

SEQ ID NO: 886501 - DNA, 15 bp, Homo sapiens
tcactctatctagtc

SEQ ID NO: 886502 - DNA, 15 bp, Homo sapiens
ctcactctatctagt

SEQ ID NO: 886503 - DNA, 15 bp, Homo sapiens
tctcactctatctag

SEQ ID NO: 886504 - DNA, 15 bp, Homo sapiens
gtctcactctatcta

SEQ ID NO: 886505 - DNA, 15 bp, Homo sapiens
tgtctcactctatct

SEQ ID NO: 886506 - DNA, 15 bp, Homo sapiens
gtgtctcactctatc

SEQ ID NO: 886507 - DNA, 15 bp, Homo sapiens
tgtgtctcactctat

SEQ ID NO: 886508 - DNA, 15 bp, Homo sapiens
ctgtgtctcactcta

SEQ ID NO: 886509 - DNA, 15 bp, Homo sapiens
cctgtgtctcactct

SEQ ID NO: 886510 - DNA, 15 bp, Homo sapiens
tcctgtgtctcactc

SEQ ID NO: 886511 - DNA, 15 bp, Homo sapiens
gtcctgtgtctcact

SEQ ID NO: 886512 - DNA, 15 bp, Homo sapiens
tgtcctgtgtctcac

SEQ ID NO: 886513 - DNA, 15 bp, Homo sapiens
gtgtcctgtgtctca

SEQ ID NO: 886514 - DNA, 15 bp, Homo sapiens
tgtgtcctgtgtctc

SEQ ID NO: 886515 - DNA, 15 bp, Homo sapiens
ctgtgtcctgtgtct

SEQ ID NO: 886516 - DNA, 15 bp, Homo sapiens
tctgtgtcctgtgtc

SEQ ID NO: 886517 - DNA, 15 bp, Homo sapiens
ctctgtgtcctgtgt

SEQ ID NO: 886518 - DNA, 15 bp, Homo sapiens
tctctgtgtcctgtg

SEQ ID NO: 886519 - DNA, 15 bp, Homo sapiens
gtctctgtgtcctgt

SEQ ID NO: 886520 - DNA, 15 bp, Homo sapiens
cgtctctgtgtcctg

SEQ ID NO: 886521 - DNA, 15 bp, Homo sapiens
acgtctctgtgtcct

SEQ ID NO: 886522 - DNA, 15 bp, Homo sapiens
cacgtctctgtgtcc

SEQ ID NO: 886523 - DNA, 15 bp, Homo sapiens
tcacgtctctgtgtc

SEQ ID NO: 886524 - DNA, 15 bp, Homo sapiens
atcacgtctctgtgt

SEQ ID NO: 886525 - DNA, 15 bp, Homo sapiens
gatcacgtctctgtg

SEQ ID NO: 886526 - DNA, 15 bp, Homo sapiens
tgatcacgtctctgt

SEQ ID NO: 886527 - DNA, 15 bp, Homo sapiens
gtgatcacgtctctg

SEQ ID NO: 886528 - DNA, 15 bp, Homo sapiens
tgtgatcacgtctct

SEQ ID NO: 886529 - DNA, 15 bp, Homo sapiens
ctgtgatcacgtctc

SEQ ID NO: 886530 - DNA, 15 bp, Homo sapiens
cctgtgatcacgtct

SEQ ID NO: 886531 - DNA, 15 bp, Homo sapiens
acctgtgatcacgtc

SEQ ID NO: 886532 - DNA, 15 bp, Homo sapiens
gacctgtgatcacgt

SEQ ID NO: 886533 - DNA, 15 bp, Homo sapiens
tgacctgtgatcacg

SEQ ID NO: 886534 - DNA, 15 bp, Homo sapiens
atgacctgtgatcac

SEQ ID NO: 886535 - DNA, 15 bp, Homo sapiens
catgacctgtgatca

SEQ ID NO: 886536 - DNA, 15 bp, Homo sapiens
gcatgacctgtgatc

SEQ ID NO: 886537 - DNA, 15 bp, Homo sapiens
agcatgacctgtgat

SEQ ID NO: 886538 - DNA, 15 bp, Homo sapiens
cagcatgacctgtga

SEQ ID NO: 886539 - DNA, 15 bp, Homo sapiens
tcagcatgacctgtg

SEQ ID NO: 886540 - DNA, 15 bp, Homo sapiens
atcagcatgacctgt

SEQ ID NO: 886541 - DNA, 15 bp, Homo sapiens
aatcagcatgacctg

SEQ ID NO: 886542 - DNA, 15 bp, Homo sapiens
gaatcagcatgacct

SEQ ID NO: 886543 - DNA, 15 bp, Homo sapiens
tgaatcagcatgacc

SEQ ID NO: 886544 - DNA, 15 bp, Homo sapiens
ctgaatcagcatgac

SEQ ID NO: 886545 - DNA, 15 bp, Homo sapiens
tctgaatcagcatga

SEQ ID NO: 886546 - DNA, 15 bp, Homo sapiens
ctctgaatcagcatg

SEQ ID NO: 886547 - DNA, 15 bp, Homo sapiens
tctctgaatcagcat

SEQ ID NO: 886548 - DNA, 15 bp, Homo sapiens
ttctctgaatcagca

SEQ ID NO: 886549 - DNA, 15 bp, Homo sapiens
gttctctgaatcagc

SEQ ID NO: 886550 - DNA, 15 bp, Homo sapiens
tgttctctgaatcag

SEQ ID NO: 886551 - DNA, 15 bp, Homo sapiens
ttgttctctgaatca

SEQ ID NO: 886552 - DNA, 15 bp, Homo sapiens
tttgttctctgaatc

SEQ ID NO: 886553 - DNA, 15 bp, Homo sapiens
gtttgttctctgaat

SEQ ID NO: 886554 - DNA, 15 bp, Homo sapiens
ggtttgttctctgaa

SEQ ID NO: 886555 - DNA, 15 bp, Homo sapiens
aggtttgttctctga

SEQ ID NO: 886556 - DNA, 15 bp, Homo sapiens
caggtttgttctctg

SEQ ID NO: 886557 - DNA, 15 bp, Homo sapiens
gcaggtttgttctct

SEQ ID NO: 886558 - DNA, 15 bp, Homo sapiens
tgcaggtttgttctc

SEQ ID NO: 886559 - DNA, 15 bp, Homo sapiens
gtgcaggtttgttct

SEQ ID NO: 886560 - DNA, 15 bp, Homo sapiens
tgtgcaggtttgttc

SEQ ID NO: 886561 - DNA, 15 bp, Homo sapiens
ctgtgcaggtttgtt

SEQ ID NO: 886562 - DNA, 15 bp, Homo sapiens
cctgtgcaggtttgt

SEQ ID NO: 886563 - DNA, 15 bp, Homo sapiens
gcctgtgcaggtttg

SEQ ID NO: 886564 - DNA, 15 bp, Homo sapiens
agcctgtgcaggttt

SEQ ID NO: 886565 - DNA, 15 bp, Homo sapiens
aagcctgtgcaggtt

SEQ ID NO: 886566 - DNA, 15 bp, Homo sapiens
gaagcctgtgcaggt

SEQ ID NO: 886567 - DNA, 15 bp, Homo sapiens
agaagcctgtgcagg

SEQ ID NO: 886568 - DNA, 15 bp, Homo sapiens
tagaagcctgtgcag

SEQ ID NO: 886569 - DNA, 15 bp, Homo sapiens
gtagaagcctgtgca

SEQ ID NO: 886570 - DNA, 15 bp, Homo sapiens
ggtagaagcctgtgc

SEQ ID NO: 886571 - DNA, 15 bp, Homo sapiens
aggtagaagcctgtg

SEQ ID NO: 886572 - DNA, 15 bp, Homo sapiens
caggtagaagcctgt

SEQ ID NO: 886573 - DNA, 15 bp, Homo sapiens
ccaggtagaagcctg

SEQ ID NO: 886574 - DNA, 15 bp, Homo sapiens
cccaggtagaagcct

SEQ ID NO: 886575 - DNA, 15 bp, Homo sapiens
gcccaggtagaagcc

SEQ ID NO: 886576 - DNA, 15 bp, Homo sapiens
tgcccaggtagaagc

SEQ ID NO: 886577 - DNA, 15 bp, Homo sapiens
ttgcccaggtagaag

SEQ ID NO: 886578 - DNA, 15 bp, Homo sapiens
attgcccaggtagaa

SEQ ID NO: 886579 - DNA, 15 bp, Homo sapiens
gattgcccaggtaga

SEQ ID NO: 886580 - DNA, 15 bp, Homo sapiens
ggattgcccaggtag

SEQ ID NO: 886581 - DNA, 15 bp, Homo sapiens
aggattgcccaggta

SEQ ID NO: 886582 - DNA, 15 bp, Homo sapiens
caggattgcccaggt

SEQ ID NO: 886583 - DNA, 15 bp, Homo sapiens
acaggattgcccagg

SEQ ID NO: 886584 - DNA, 15 bp, Homo sapiens
gacaggattgcccag

SEQ ID NO: 886585 - DNA, 15 bp, Homo sapiens
ggacaggattgccca

SEQ ID NO: 886586 - DNA, 15 bp, Homo sapiens
tggacaggattgccc

SEQ ID NO: 886587 - DNA, 15 bp, Homo sapiens
atggacaggattgcc

SEQ ID NO: 886588 - DNA, 15 bp, Homo sapiens
catggacaggattgc

SEQ ID NO: 886589 - DNA, 15 bp, Homo sapiens
ccatggacaggattg

SEQ ID NO: 886590 - DNA, 15 bp, Homo sapiens
gccatggacaggatt

SEQ ID NO: 886591 - DNA, 15 bp, Homo sapiens
tgccatggacaggat

SEQ ID NO: 886592 - DNA, 15 bp, Homo sapiens
gtgccatggacagga

SEQ ID NO: 886593 - DNA, 15 bp, Homo sapiens
agtgccatggacagg

SEQ ID NO: 886594 - DNA, 15 bp, Homo sapiens
cagtgccatggacag

SEQ ID NO: 886595 - DNA, 15 bp, Homo sapiens
ccagtgccatggaca

SEQ ID NO: 886596 - DNA, 15 bp, Homo sapiens
cccagtgccatggac

SEQ ID NO: 886597 - DNA, 15 bp, Homo sapiens
ccccagtgccatgga

SEQ ID NO: 886598 - DNA, 15 bp, Homo sapiens
gccccagtgccatgg

SEQ ID NO: 886599 - DNA, 15 bp, Homo sapiens
tgccccagtgccatg

SEQ ID NO: 886600 - DNA, 15 bp, Homo sapiens
ctgccccagtgccat

SEQ ID NO: 886601 - DNA, 15 bp, Homo sapiens
actgccccagtgcca

SEQ ID NO: 886602 - DNA, 15 bp, Homo sapiens
aactgccccagtgcc

SEQ ID NO: 886603 - DNA, 15 bp, Homo sapiens
caactgccccagtgc

SEQ ID NO: 886604 - DNA, 15 bp, Homo sapiens
gcaactgccccagtg

SEQ ID NO: 886605 - DNA, 15 bp, Homo sapiens
agcaactgccccagt

SEQ ID NO: 886606 - DNA, 15 bp, Homo sapiens
cagcaactgccccag

SEQ ID NO: 886607 - DNA, 15 bp, Homo sapiens
gcagcaactgcccca

SEQ ID NO: 886608 - DNA, 15 bp, Homo sapiens
ggcagcaactgcccc

SEQ ID NO: 886609 - DNA, 15 bp, Homo sapiens
aggcagcaactgccc

SEQ ID NO: 886610 - DNA, 15 bp, Homo sapiens
aaggcagcaactgcc

SEQ ID NO: 886611 - DNA, 15 bp, Homo sapiens
gaaggcagcaactgc

SEQ ID NO: 886612 - DNA, 15 bp, Homo sapiens
agaaggcagcaactg

SEQ ID NO: 886613 - DNA, 15 bp, Homo sapiens
gagaaggcagcaact

SEQ ID NO: 886614 - DNA, 15 bp, Homo sapiens
ggagaaggcagcaac

SEQ ID NO: 886615 - DNA, 15 bp, Homo sapiens
aggagaaggcagcaa

SEQ ID NO: 886616 - DNA, 15 bp, Homo sapiens
aaggagaaggcagca

SEQ ID NO: 886617 - DNA, 15 bp, Homo sapiens
gaaggagaaggcagc

SEQ ID NO: 886618 - DNA, 15 bp, Homo sapiens
agaaggagaaggcag

SEQ ID NO: 886619 - DNA, 15 bp, Homo sapiens
aagaaggagaaggca

SEQ ID NO: 886620 - DNA, 15 bp, Homo sapiens
aaagaaggagaaggc

SEQ ID NO: 886621 - DNA, 15 bp, Homo sapiens
caaagaaggagaagg

SEQ ID NO: 886622 - DNA, 15 bp, Homo sapiens
tcaaagaaggagaag

SEQ ID NO: 886623 - DNA, 15 bp, Homo sapiens
ctcaaagaaggagaa

SEQ ID NO: 886624 - DNA, 15 bp, Homo sapiens
cctcaaagaaggaga

SEQ ID NO: 886625 - DNA, 15 bp, Homo sapiens
acctcaaagaaggag

SEQ ID NO: 886626 - DNA, 15 bp, Homo sapiens
cacctcaaagaagga

SEQ ID NO: 886627 - DNA, 15 bp, Homo sapiens
acacctcaaagaagg

SEQ ID NO: 886628 - DNA, 15 bp, Homo sapiens
cacacctcaaagaag

SEQ ID NO: 886629 - DNA, 15 bp, Homo sapiens
acacacctcaaagaa

SEQ ID NO: 886630 - DNA, 15 bp, Homo sapiens
tacacacctcaaaga

SEQ ID NO: 886631 - DNA, 15 bp, Homo sapiens
gtacacacctcaaag

SEQ ID NO: 886632 - DNA, 15 bp, Homo sapiens
agtacacacctcaaa

SEQ ID NO: 886633 - DNA, 15 bp, Homo sapiens
tagtacacacctcaa

SEQ ID NO: 886634 - DNA, 15 bp, Homo sapiens
ctagtacacacctca

SEQ ID NO: 886635 - DNA, 15 bp, Homo sapiens
actagtacacacctc

SEQ ID NO: 886636 - DNA, 15 bp, Homo sapiens
gactagtacacacct

SEQ ID NO: 886637 - DNA, 15 bp, Homo sapiens
tgactagtacacacc

SEQ ID NO: 886638 - DNA, 15 bp, Homo sapiens
ttgactagtacacac

SEQ ID NO: 886639 - DNA, 15 bp, Homo sapiens
tttgactagtacaca

SEQ ID NO: 886640 - DNA, 15 bp, Homo sapiens
ctttgactagtacac

SEQ ID NO: 886641 - DNA, 15 bp, Homo sapiens
tctttgactagtaca

SEQ ID NO: 886642 - DNA, 15 bp, Homo sapiens
atctttgactagtac

SEQ ID NO: 886643 - DNA, 15 bp, Homo sapiens
gatctttgactagta

SEQ ID NO: 886644 - DNA, 15 bp, Homo sapiens
agatctttgactagt

SEQ ID NO: 886645 - DNA, 15 bp, Homo sapiens
gagatctttgactag

SEQ ID NO: 886646 - DNA, 15 bp, Homo sapiens
ggagatctttgacta

SEQ ID NO: 886647 - DNA, 15 bp, Homo sapiens
tggagatctttgact

SEQ ID NO: 886648 - DNA, 15 bp, Homo sapiens
ctggagatctttgac

SEQ ID NO: 886649 - DNA, 15 bp, Homo sapiens
tctggagatctttga

SEQ ID NO: 886650 - DNA, 15 bp, Homo sapiens
ctctggagatctttg

SEQ ID NO: 886651 - DNA, 15 bp, Homo sapiens
tctctggagatcttt

SEQ ID NO: 886652 - DNA, 15 bp, Homo sapiens
ctctctggagatctt

SEQ ID NO: 886653 - DNA, 15 bp, Homo sapiens
tctctctggagatct

SEQ ID NO: 886654 - DNA, 15 bp, Homo sapiens
ttctctctggagatc

SEQ ID NO: 886655 - DNA, 15 bp, Homo sapiens
tttctctctggagat

SEQ ID NO: 886656 - DNA, 15 bp, Homo sapiens
ctttctctctggaga

SEQ ID NO: 886657 - DNA, 15 bp, Homo sapiens
tctttctctctggag

SEQ ID NO: 886658 - DNA, 15 bp, Homo sapiens
ttctttctctctgga

SEQ ID NO: 886659 - DNA, 15 bp, Homo sapiens
gttctttctctctgg

SEQ ID NO: 886660 - DNA, 15 bp, Homo sapiens
ggttctttctctctg

SEQ ID NO: 886661 - DNA, 15 bp, Homo sapiens
tggttctttctctct

SEQ ID NO: 886662 - DNA, 15 bp, Homo sapiens
ctggttctttctctc

SEQ ID NO: 886663 - DNA, 15 bp, Homo sapiens
actggttctttctct

SEQ ID NO: 886664 - DNA, 15 bp, Homo sapiens
cactggttctttctc

SEQ ID NO: 886665 - DNA, 15 bp, Homo sapiens
tcactggttctttct

SEQ ID NO: 886666 - DNA, 15 bp, Homo sapiens
ctcactggttctttc

SEQ ID NO: 886667 - DNA, 15 bp, Homo sapiens
tctcactggttcttt

SEQ ID NO: 886668 - DNA, 15 bp, Homo sapiens
atctcactggttctt

SEQ ID NO: 886669 - DNA, 15 bp, Homo sapiens
tatctcactggttct

SEQ ID NO: 886670 - DNA, 15 bp, Homo sapiens
atatctcactggttc

SEQ ID NO: 886671 - DNA, 15 bp, Homo sapiens
tatatctcactggtt

SEQ ID NO: 886672 - DNA, 15 bp, Homo sapiens
atatatctcactggt

SEQ ID NO: 886673 - DNA, 15 bp, Homo sapiens
tatatatctcactgg

SEQ ID NO: 886674 - DNA, 15 bp, Homo sapiens
atatatatctcactg

SEQ ID NO: 886675 - DNA, 15 bp, Homo sapiens
tatatatatctcact

SEQ ID NO: 886676 - DNA, 15 bp, Homo sapiens
ctatatatatctcac

SEQ ID NO: 886677 - DNA, 15 bp, Homo sapiens
tctatatatatctca

SEQ ID NO: 886678 - DNA, 15 bp, Homo sapiens
ctctatatatatctc

SEQ ID NO: 886679 - DNA, 15 bp, Homo sapiens
tctctatatatatct

SEQ ID NO: 886680 - DNA, 15 bp, Homo sapiens
ctctctatatatatc

SEQ ID NO: 886681 - DNA, 15 bp, Homo sapiens
tctctctatatatat

SEQ ID NO: 886682 - DNA, 15 bp, Homo sapiens
ctctctctatatata

SEQ ID NO: 886683 - DNA, 15 bp, Homo sapiens
tctctctctatatat

SEQ ID NO: 886684 - DNA, 15 bp, Homo sapiens
ttctctctctatata

SEQ ID NO: 886685 - DNA, 15 bp, Homo sapiens
tttctctctctatat

SEQ ID NO: 886686 - DNA, 15 bp, Homo sapiens
ctttctctctctata

SEQ ID NO: 886687 - DNA, 15 bp, Homo sapiens
tctttctctctctat

SEQ ID NO: 886688 - DNA, 15 bp, Homo sapiens
ctctttctctctcta

SEQ ID NO: 886689 - DNA, 15 bp, Homo sapiens
cctctctctctttct

SEQ ID NO: 886690 - DNA, 15 bp, Homo sapiens
ccctctctctctttc

SEQ ID NO: 886691 - DNA, 15 bp, Homo sapiens
tccctctctctcttt

SEQ ID NO: 886692 - DNA, 15 bp, Homo sapiens
ttccctctctctctt

SEQ ID NO: 886693 - DNA, 15 bp, Homo sapiens
tttccctctctctct

SEQ ID NO: 886694 - DNA, 15 bp, Homo sapiens
atttccctctctctc

SEQ ID NO: 886695 - DNA, 15 bp, Homo sapiens
gatttccctctctct

SEQ ID NO: 886696 - DNA, 15 bp, Homo sapiens
agatttccctctctc

SEQ ID NO: 886697 - DNA, 15 bp, Homo sapiens
cagatttccctctct

SEQ ID NO: 886698 - DNA, 15 bp, Homo sapiens
tcagatttccctctc

SEQ ID NO: 886699 - DNA, 15 bp, Homo sapiens
ctcagatttccctct

SEQ ID NO: 886700 - DNA, 15 bp, Homo sapiens
tctcagatttccctc

SEQ ID NO: 886701 - DNA, 15 bp, Homo sapiens
ctctcagatttccct

SEQ ID NO: 886702 - DNA, 15 bp, Homo sapiens
cctctcagatttccc

SEQ ID NO: 886703 - DNA, 15 bp, Homo sapiens
ccctctcagatttcc

SEQ ID NO: 886704 - DNA, 15 bp, Homo sapiens
cccctctcagatttc

SEQ ID NO: 886705 - DNA, 15 bp, Homo sapiens
tcccctctcagattt

SEQ ID NO: 886706 - DNA, 15 bp, Homo sapiens
gtcccctctcagatt

SEQ ID NO: 886707 - DNA, 15 bp, Homo sapiens
agtcccctctcagat

SEQ ID NO: 886708 - DNA, 15 bp, Homo sapiens
aagtcccctctcaga

SEQ ID NO: 886709 - DNA, 15 bp, Homo sapiens
taagtcccctctcag

SEQ ID NO: 886710 - DNA, 15 bp, Homo sapiens
ataagtcccctctca

SEQ ID NO: 886711 - DNA, 15 bp, Homo sapiens
aataagtcccctctc

SEQ ID NO: 886712 - DNA, 15 bp, Homo sapiens
taataagtcccctct

SEQ ID NO: 886713 - DNA, 15 bp, Homo sapiens
ctaataagtcccctc

SEQ ID NO: 886714 - DNA, 15 bp, Homo sapiens
cctaataagtcccct

SEQ ID NO: 886715 - DNA, 15 bp, Homo sapiens
ccctaataagtcccc

SEQ ID NO: 886716 - DNA, 15 bp, Homo sapiens
cccctaataagtccc

SEQ ID NO: 886717 - DNA, 15 bp, Homo sapiens
tcccctaataagtcc

SEQ ID NO: 886718 - DNA, 15 bp, Homo sapiens
ttcccctaataagtc

SEQ ID NO: 886719 - DNA, 15 bp, Homo sapiens
attcccctaataagt

SEQ ID NO: 886720 - DNA, 15 bp, Homo sapiens
aattcccctaataag

SEQ ID NO: 886721 - DNA, 15 bp, Homo sapiens
caattcccctaataa

SEQ ID NO: 886722 - DNA, 15 bp, Homo sapiens
ccaattcccctaata

SEQ ID NO: 886723 - DNA, 15 bp, Homo sapiens
gccaattcccctaat

SEQ ID NO: 886724 - DNA, 15 bp, Homo sapiens
agccaattcccctaa

SEQ ID NO: 886725 - DNA, 15 bp, Homo sapiens
aagccaattccccta

SEQ ID NO: 886726 - DNA, 15 bp, Homo sapiens
taagccaattcccct

SEQ ID NO: 886727 - DNA, 15 bp, Homo sapiens
gtaagccaattcccc

SEQ ID NO: 886728 - DNA, 15 bp, Homo sapiens
tgtaagccaattccc

SEQ ID NO: 886729 - DNA, 15 bp, Homo sapiens
gtgtaagccaattcc

SEQ ID NO: 886730 - DNA, 15 bp, Homo sapiens
tgtgtaagccaattc

SEQ ID NO: 886731 - DNA, 15 bp, Homo sapiens
ctgtgtaagccaatt

SEQ ID NO: 886732 - DNA, 15 bp, Homo sapiens
actgtgtaagccaat

SEQ ID NO: 886733 - DNA, 15 bp, Homo sapiens
aactgtgtaagccaa

SEQ ID NO: 886734 - DNA, 15 bp, Homo sapiens
taactgtgtaagcca

SEQ ID NO: 886735 - DNA, 15 bp, Homo sapiens
ataactgtgtaagcc

SEQ ID NO: 886736 - DNA, 15 bp, Homo sapiens
gataactgtgtaagc

SEQ ID NO: 886737 - DNA, 15 bp, Homo sapiens
tgataactgtgtaag

SEQ ID NO: 886738 - DNA, 15 bp, Homo sapiens
ttgataactgtgtaa

SEQ ID NO: 886739 - DNA, 15 bp, Homo sapiens
cttgataactgtgta

SEQ ID NO: 886740 - DNA, 15 bp, Homo sapiens
ccttgataactgtgt

SEQ ID NO: 886741 - DNA, 15 bp, Homo sapiens
gccttgataactgtg

SEQ ID NO: 886742 - DNA, 15 bp, Homo sapiens
agccttgataactgt

SEQ ID NO: 886743 - DNA, 15 bp, Homo sapiens
cagccttgataactg

SEQ ID NO: 886744 - DNA, 15 bp, Homo sapiens
tcagccttgataact

SEQ ID NO: 886745 - DNA, 15 bp, Homo sapiens
ctcagccttgataac

SEQ ID NO: 886746 - DNA, 15 bp, Homo sapiens
tctcagccttgataa

SEQ ID NO: 886747 - DNA, 15 bp, Homo sapiens
ctctcagccttgata

SEQ ID NO: 886748 - DNA, 15 bp, Homo sapiens
cctctcagccttgat

SEQ ID NO: 886749 - DNA, 15 bp, Homo sapiens
acctctcagccttga

SEQ ID NO: 886750 - DNA, 15 bp, Homo sapiens
gacctctcagccttg

SEQ ID NO: 886751 - DNA, 15 bp, Homo sapiens
ggacctctcagcctt

SEQ ID NO: 886752 - DNA, 15 bp, Homo sapiens
gggacctctcagcct

SEQ ID NO: 886753 - DNA, 15 bp, Homo sapiens
tgggacctctcagcc

SEQ ID NO: 886754 - DNA, 15 bp, Homo sapiens
gtgggacctctcagc

SEQ ID NO: 886755 - DNA, 15 bp, Homo sapiens
cgtgggacctctcag

SEQ ID NO: 886756 - DNA, 15 bp, Homo sapiens
tcgtgggacctctca

SEQ ID NO: 886757 - DNA, 15 bp, Homo sapiens
atcgtgggacctctc

SEQ ID NO: 886758 - DNA, 15 bp, Homo sapiens
tatcgtgggacctct

SEQ ID NO: 886759 - DNA, 15 bp, Homo sapiens
atatcgtgggacctc

SEQ ID NO: 886760 - DNA, 15 bp, Homo sapiens
catatcgtgggacct

SEQ ID NO: 886761 - DNA, 15 bp, Homo sapiens
gcatatcgtgggacc

SEQ ID NO: 886762 - DNA, 15 bp, Homo sapiens
agcatatcgtgggac

SEQ ID NO: 886763 - DNA, 15 bp, Homo sapiens
cagcatatcgtggga

SEQ ID NO: 886764 - DNA, 15 bp, Homo sapiens
gcagcatatcgtggg

SEQ ID NO: 886765 - DNA, 15 bp, Homo sapiens
ggcagcatatcgtgg

SEQ ID NO: 886766 - DNA, 15 bp, Homo sapiens
aggcagcatatcgtg

SEQ ID NO: 886767 - DNA, 15 bp, Homo sapiens
caggcagcatatcgt

SEQ ID NO: 886768 - DNA, 15 bp, Homo sapiens
gcaggcagcatatcg

SEQ ID NO: 886769 - DNA, 15 bp, Homo sapiens
tgcaggcagcatatc

SEQ ID NO: 886770 - DNA, 15 bp, Homo sapiens
ttgcaggcagcatat

SEQ ID NO: 886771 - DNA, 15 bp, Homo sapiens
cttgcaggcagcata

SEQ ID NO: 886772 - DNA, 15 bp, Homo sapiens
gcttgcaggcagcat

SEQ ID NO: 886773 - DNA, 15 bp, Homo sapiens
agcttgcaggcagca

SEQ ID NO: 886774 - DNA, 15 bp, Homo sapiens
cagcttgcaggcagc

SEQ ID NO: 886775 - DNA, 15 bp, Homo sapiens
ccagcttgcaggcag

SEQ ID NO: 886776 - DNA, 15 bp, Homo sapiens
tccagcttgcaggca

SEQ ID NO: 886777 - DNA, 15 bp, Homo sapiens
ctccagcttgcaggc

SEQ ID NO: 886778 - DNA, 15 bp, Homo sapiens
tctccagcttgcagg

SEQ ID NO: 886779 - DNA, 15 bp, Homo sapiens
ttctccagcttgcag

SEQ ID NO: 886780 - DNA, 15 bp, Homo sapiens
gttctccagcttgca

SEQ ID NO: 886781 - DNA, 15 bp, Homo sapiens
ggttctccagcttgc

SEQ ID NO: 886782 - DNA, 15 bp, Homo sapiens
aggttctccagcttg

SEQ ID NO: 886783 - DNA, 15 bp, Homo sapiens
caggttctccagctt

SEQ ID NO: 886784 - DNA, 15 bp, Homo sapiens
tcaggttctccagct

SEQ ID NO: 886785 - DNA, 15 bp, Homo sapiens
ttcaggttctccagc

SEQ ID NO: 886786 - DNA, 15 bp, Homo sapiens
tttcaggttctccag

SEQ ID NO: 886787 - DNA, 15 bp, Homo sapiens
ttttcaggttctcca

SEQ ID NO: 886788 - DNA, 15 bp, Homo sapiens
cttttcaggttctcc

SEQ ID NO: 886789 - DNA, 15 bp, Homo sapiens
acttttcaggttctc

SEQ ID NO: 886790 - DNA, 15 bp, Homo sapiens
gacttttcaggttct

SEQ ID NO: 886791 - DNA, 15 bp, Homo sapiens
tgacttttcaggttc

SEQ ID NO: 886792 - DNA, 15 bp, Homo sapiens
ctgacttttcaggtt

SEQ ID NO: 886793 - DNA, 15 bp, Homo sapiens
actgacttttcaggt

SEQ ID NO: 886794 - DNA, 15 bp, Homo sapiens
cactgacttttcagg

SEQ ID NO: 886795 - DNA, 15 bp, Homo sapiens
ccactgacttttcag

SEQ ID NO: 886796 - DNA, 15 bp, Homo sapiens
gccactgacttttca

SEQ ID NO: 886797 - DNA, 15 bp, Homo sapiens
cgccactgacttttc

SEQ ID NO: 886798 - DNA, 15 bp, Homo sapiens
acgccactgactttt

SEQ ID NO: 886799 - DNA, 15 bp, Homo sapiens
tacgccactgacttt

SEQ ID NO: 886800 - DNA, 15 bp, Homo sapiens
ctacgccactgactt

SEQ ID NO: 886801 - DNA, 15 bp, Homo sapiens
tctacgccactgact

SEQ ID NO: 886802 - DNA, 15 bp, Homo sapiens
atctacgccactgac

SEQ ID NO: 886803 - DNA, 15 bp, Homo sapiens
aatctacgccactga

SEQ ID NO: 886804 - DNA, 15 bp, Homo sapiens
taatctacgccactg

SEQ ID NO: 886805 - DNA, 15 bp, Homo sapiens
ctaatctacgccact

SEQ ID NO: 886806 - DNA, 15 bp, Homo sapiens
actaatctacgccac

SEQ ID NO: 886807 - DNA, 15 bp, Homo sapiens
gactaatctacgcca

SEQ ID NO: 886808 - DNA, 15 bp, Homo sapiens
tgactaatctacgcc

SEQ ID NO: 886809 - DNA, 15 bp, Homo sapiens
ttgactaatctacgc

SEQ ID NO: 886810 - DNA, 15 bp, Homo sapiens
tttgactaatctacg

SEQ ID NO: 886811 - DNA, 15 bp, Homo sapiens
ctttgactaatctac

SEQ ID NO: 886812 - DNA, 15 bp, Homo sapiens
actttgactaatcta

SEQ ID NO: 886813 - DNA, 15 bp, Homo sapiens
aactttgactaatct

SEQ ID NO: 886814 - DNA, 15 bp, Homo sapiens
gaactttgactaatc

SEQ ID NO: 886815 - DNA, 15 bp, Homo sapiens
tgaactttgactaat

SEQ ID NO: 886816 - DNA, 15 bp, Homo sapiens
ttgaactttgactaa

SEQ ID NO: 886817 - DNA, 15 bp, Homo sapiens
tttgaactttgacta

SEQ ID NO: 886818 - DNA, 15 bp, Homo sapiens
ttttgaactttgact

SEQ ID NO: 886819 - DNA, 15 bp, Homo sapiens
cttttgaactttgac

SEQ ID NO: 886820 - DNA, 15 bp, Homo sapiens
gcttttgaactttga

SEQ ID NO: 886821 - DNA, 15 bp, Homo sapiens
ggcttttgaactttg

SEQ ID NO: 886822 - DNA, 15 bp, Homo sapiens
aggcttttgaacttt

SEQ ID NO: 886823 - DNA, 15 bp, Homo sapiens
gaggcttttgaactt

SEQ ID NO: 886824 - DNA, 15 bp, Homo sapiens
tgaggcttttgaact

SEQ ID NO: 886825 - DNA, 15 bp, Homo sapiens
ctgaggcttttgaac

SEQ ID NO: 886826 - DNA, 15 bp, Homo sapiens
tctgaggcttttgaa

SEQ ID NO: 886827 - DNA, 15 bp, Homo sapiens
ttctgaggcttttga

SEQ ID NO: 886828 - DNA, 15 bp, Homo sapiens
gttctgaggcttttg

SEQ ID NO: 886829 - DNA, 15 bp, Homo sapiens
ggttctgaggctttt

SEQ ID NO: 886830 - DNA, 15 bp, Homo sapiens
tggttctgaggcttt

SEQ ID NO: 886831 - DNA, 15 bp, Homo sapiens
atggttctgaggctt

SEQ ID NO: 886832 - DNA, 15 bp, Homo sapiens
catggttctgaggct

SEQ ID NO: 886833 - DNA, 15 bp, Homo sapiens
ccatggttctgaggc

SEQ ID NO: 886834 - DNA, 15 bp, Homo sapiens
tccatggttctgagg

SEQ ID NO: 886835 - DNA, 15 bp, Homo sapiens
ttccatggttctgag

SEQ ID NO: 886836 - DNA, 15 bp, Homo sapiens
cttccatggttctga

SEQ ID NO: 886837 - DNA, 15 bp, Homo sapiens
acttccatggttctg

SEQ ID NO: 886838 - DNA, 15 bp, Homo sapiens
aacttccatggttct

SEQ ID NO: 886839 - DNA, 15 bp, Homo sapiens
caacttccatggttc

SEQ ID NO: 886840 - DNA, 15 bp, Homo sapiens
tcaacttccatggtt

SEQ ID NO: 886841 - DNA, 15 bp, Homo sapiens
atcaacttccatggt

SEQ ID NO: 886842 - DNA, 15 bp, Homo sapiens
catcaacttccatgg

SEQ ID NO: 886843 - DNA, 15 bp, Homo sapiens
ccatcaacttccatg

SEQ ID NO: 886844 - DNA, 15 bp, Homo sapiens
accatcaacttccat

SEQ ID NO: 886845 - DNA, 15 bp, Homo sapiens
taccatcaacttcca

SEQ ID NO: 886846 - DNA, 15 bp, Homo sapiens
ataccatcaacttcc

SEQ ID NO: 886847 - DNA, 15 bp, Homo sapiens
tataccatcaacttc

SEQ ID NO: 886848 - DNA, 15 bp, Homo sapiens
ctataccatcaactt

SEQ ID NO: 886849 - DNA, 15 bp, Homo sapiens
gctataccatcaact

SEQ ID NO: 886850 - DNA, 15 bp, Homo sapiens
agctataccatcaac

SEQ ID NO: 886851 - DNA, 15 bp, Homo sapiens
gagctataccatcaa

SEQ ID NO: 886852 - DNA, 15 bp, Homo sapiens
agagctataccatca

SEQ ID NO: 886853 - DNA, 15 bp, Homo sapiens
gagagctataccatc

SEQ ID NO: 886854 - DNA, 15 bp, Homo sapiens
tgagagctataccat

SEQ ID NO: 886855 - DNA, 15 bp, Homo sapiens
ctgagagctatacca

SEQ ID NO: 886856 - DNA, 15 bp, Homo sapiens
actgagagctatacc

SEQ ID NO: 886857 - DNA, 15 bp, Homo sapiens
gactgagagctatac

SEQ ID NO: 886858 - DNA, 15 bp, Homo sapiens
agactgagagctata

SEQ ID NO: 886859 - DNA, 15 bp, Homo sapiens
cagactgagagctat

SEQ ID NO: 886860 - DNA, 15 bp, Homo sapiens
tcagactgagagcta

SEQ ID NO: 886861 - DNA, 15 bp, Homo sapiens
ctcagactgagagct

SEQ ID NO: 886862 - DNA, 15 bp, Homo sapiens
tctcagactgagagc

SEQ ID NO: 886863 - DNA, 15 bp, Homo sapiens
gtctcagactgagag

SEQ ID NO: 886864 - DNA, 15 bp, Homo sapiens
ggtctcagactgaga

SEQ ID NO: 886865 - DNA, 15 bp, Homo sapiens
tggtctcagactgag

SEQ ID NO: 886866 - DNA, 15 bp, Homo sapiens
ttggtctcagactga

SEQ ID NO: 886867 - DNA, 15 bp, Homo sapiens
tttggtctcagactg

SEQ ID NO: 886868 - DNA, 15 bp, Homo sapiens
ctttggtctcagact

SEQ ID NO: 886869 - DNA, 15 bp, Homo sapiens
cctttggtctcagac

SEQ ID NO: 886870 - DNA, 15 bp, Homo sapiens
gcctttggtctcaga

SEQ ID NO: 886871 - DNA, 15 bp, Homo sapiens
ggcctttggtctcag

SEQ ID NO: 886872 - DNA, 15 bp, Homo sapiens
aggcctttggtctca

SEQ ID NO: 886873 - DNA, 15 bp, Homo sapiens
caggcctttggtctc

SEQ ID NO: 886874 - DNA, 15 bp, Homo sapiens
tcaggcctttggtct

SEQ ID NO: 886875 - DNA, 15 bp, Homo sapiens
ctcaggcctttggtc

SEQ ID NO: 886876 - DNA, 15 bp, Homo sapiens
tctcaggcctttggt

SEQ ID NO: 886877 - DNA, 15 bp, Homo sapiens
ttctcaggcctttgg

SEQ ID NO: 886878 - DNA, 15 bp, Homo sapiens
gttctcaggcctttg

SEQ ID NO: 886879 - DNA, 15 bp, Homo sapiens
ggttctcaggccttt

SEQ ID NO: 886880 - DNA, 15 bp, Homo sapiens
gggttctcaggcctt

SEQ ID NO: 886881 - DNA, 15 bp, Homo sapiens
ggggttctcaggcct

SEQ ID NO: 886882 - DNA, 15 bp, Homo sapiens
aggggttctcaggcc

SEQ ID NO: 886883 - DNA, 15 bp, Homo sapiens
caggggttctcaggc

SEQ ID NO: 886884 - DNA, 15 bp, Homo sapiens
ccaggggttctcagg

SEQ ID NO: 886885 - DNA, 15 bp, Homo sapiens
cccaggggttctcag

SEQ ID NO: 886886 - DNA, 15 bp, Homo sapiens
acccaggggttctca

SEQ ID NO: 886887 - DNA, 15 bp, Homo sapiens
cacccaggggttctc

SEQ ID NO: 886888 - DNA, 15 bp, Homo sapiens
ccacccaggggttct

SEQ ID NO: 886889 - DNA, 15 bp, Homo sapiens
accacccaggggttc

SEQ ID NO: 886890 - DNA, 15 bp, Homo sapiens
caccacccaggggtt

SEQ ID NO: 886891 - DNA, 15 bp, Homo sapiens
ccaccacccaggggt

SEQ ID NO: 886892 - DNA, 15 bp, Homo sapiens
accaccacccagggg

SEQ ID NO: 886893 - DNA, 15 bp, Homo sapiens
aaccaccacccaggg

SEQ ID NO: 886894 - DNA, 15 bp, Homo sapiens
caaccaccacccagg

SEQ ID NO: 886895 - DNA, 15 bp, Homo sapiens
ccaaccaccacccag

SEQ ID NO: 886896 - DNA, 15 bp, Homo sapiens
cccaaccaccaccca

SEQ ID NO: 886897 - DNA, 15 bp, Homo sapiens
acccaaccaccaccc

SEQ ID NO: 886898 - DNA, 15 bp, Homo sapiens
cacccaaccaccacc

SEQ ID NO: 886899 - DNA, 15 bp, Homo sapiens
gcacccaaccaccac

SEQ ID NO: 886900 - DNA, 15 bp, Homo sapiens
cgcacccaaccacca

SEQ ID NO: 886901 - DNA, 15 bp, Homo sapiens
tcgcacccaaccacc

SEQ ID NO: 886902 - DNA, 15 bp, Homo sapiens
ctcgcacccaaccac

SEQ ID NO: 886903 - DNA, 15 bp, Homo sapiens
actcgcacccaacca

SEQ ID NO: 886904 - DNA, 15 bp, Homo sapiens
gactcgcacccaacc

SEQ ID NO: 886905 - DNA, 15 bp, Homo sapiens
ggactcgcacccaac

SEQ ID NO: 886906 - DNA, 15 bp, Homo sapiens
gggactcgcacccaa

SEQ ID NO: 886907 - DNA, 15 bp, Homo sapiens
tgggactcgcaccca

SEQ ID NO: 886908 - DNA, 15 bp, Homo sapiens
ctgggactcgcaccc

SEQ ID NO: 886909 - DNA, 15 bp, Homo sapiens
tctgggactcgcacc

SEQ ID NO: 886910 - DNA, 15 bp, Homo sapiens
ttctgggactcgcac

SEQ ID NO: 886911 - DNA, 15 bp, Homo sapiens
attctgggactcgca

SEQ ID NO: 886912 - DNA, 15 bp, Homo sapiens
gattctgggactcgc

SEQ ID NO: 886913 - DNA, 15 bp, Homo sapiens
ggattctgggactcg

SEQ ID NO: 886914 - DNA, 15 bp, Homo sapiens
tggattctgggactc

SEQ ID NO: 886915 - DNA, 15 bp, Homo sapiens
ttggattctgggact

SEQ ID NO: 886916 - DNA, 15 bp, Homo sapiens
tttggattctgggac

SEQ ID NO: 886917 - DNA, 15 bp, Homo sapiens
ctttggattctggga

SEQ ID NO: 886918 - DNA, 15 bp, Homo sapiens
cctttggattctggg

SEQ ID NO: 886919 - DNA, 15 bp, Homo sapiens
gcctttggattctgg

SEQ ID NO: 886920 - DNA, 15 bp, Homo sapiens
ggcctttggattctg

SEQ ID NO: 886921 - DNA, 15 bp, Homo sapiens
tggcctttggattct

SEQ ID NO: 886922 - DNA, 15 bp, Homo sapiens
ctggcctttggattc

SEQ ID NO: 886923 - DNA, 15 bp, Homo sapiens
tctggcctttggatt

SEQ ID NO: 886924 - DNA, 15 bp, Homo sapiens
ttctggcctttggat

SEQ ID NO: 886925 - DNA, 15 bp, Homo sapiens
tttctggcctttgga

SEQ ID NO: 886926 - DNA, 15 bp, Homo sapiens
ctttctggcctttgg

SEQ ID NO: 886927 - DNA, 15 bp, Homo sapiens
gctttctggcctttg

SEQ ID NO: 886928 - DNA, 15 bp, Homo sapiens
ggctttctggccttt

SEQ ID NO: 886929 - DNA, 15 bp, Homo sapiens
aggctttctggcctt

SEQ ID NO: 886930 - DNA, 15 bp, Homo sapiens
caggctttctggcct

SEQ ID NO: 886931 - DNA, 15 bp, Homo sapiens
ccaggctttctggcc

SEQ ID NO: 886932 - DNA, 15 bp, Homo sapiens
tccaggctttctggc

SEQ ID NO: 886933 - DNA, 15 bp, Homo sapiens
ctccaggctttctgg

SEQ ID NO: 886934 - DNA, 15 bp, Homo sapiens
actccaggctttctg

SEQ ID NO: 886935 - DNA, 15 bp, Homo sapiens
aactccaggctttct

SEQ ID NO: 886936 - DNA, 15 bp, Homo sapiens
gaactccaggctttc

SEQ ID NO: 886937 - DNA, 15 bp, Homo sapiens
agaactccaggcttt

SEQ ID NO: 886938 - DNA, 15 bp, Homo sapiens
cagaactccaggctt

SEQ ID NO: 886939 - DNA, 15 bp, Homo sapiens
tcagaactccaggct

SEQ ID NO: 886940 - DNA, 15 bp, Homo sapiens
atcagaactccaggc

SEQ ID NO: 886941 - DNA, 15 bp, Homo sapiens
catcagaactccagg

SEQ ID NO: 886942 - DNA, 15 bp, Homo sapiens
acatcagaactccag

SEQ ID NO: 886943 - DNA, 15 bp, Homo sapiens
gacatcagaactcca

SEQ ID NO: 886944 - DNA, 15 bp, Homo sapiens
agacatcagaactcc

SEQ ID NO: 886945 - DNA, 15 bp, Homo sapiens
tagacatcagaactc

SEQ ID NO: 886946 - DNA, 15 bp, Homo sapiens
ttagacatcagaact

SEQ ID NO: 886947 - DNA, 15 bp, Homo sapiens
cttagacatcagaac

SEQ ID NO: 886948 - DNA, 15 bp, Homo sapiens
ccttagacatcagaa

SEQ ID NO: 886949 - DNA, 15 bp, Homo sapiens
cccttagacatcaga

SEQ ID NO: 886950 - DNA, 15 bp, Homo sapiens
acccttagacatcag

SEQ ID NO: 886951 - DNA, 15 bp, Homo sapiens
tacccttagacatca

SEQ ID NO: 886952 - DNA, 15 bp, Homo sapiens
ctacccttagacatc

SEQ ID NO: 886953 - DNA, 15 bp, Homo sapiens
cctacccttagacat

SEQ ID NO: 886954 - DNA, 15 bp, Homo sapiens
tcctacccttagaca

SEQ ID NO: 886955 - DNA, 15 bp, Homo sapiens
ctcctacccttagac

SEQ ID NO: 886956 - DNA, 15 bp, Homo sapiens
tctcctacccttaga

SEQ ID NO: 886957 - DNA, 15 bp, Homo sapiens
ttctcctacccttag

SEQ ID NO: 886958 - DNA, 15 bp, Homo sapiens
tttctcctaccctta

SEQ ID NO: 886959 - DNA, 15 bp, Homo sapiens
gtttctcctaccctt

SEQ ID NO: 886960 - DNA, 15 bp, Homo sapiens
tgtttctcctaccct

SEQ ID NO: 886961 - DNA, 15 bp, Homo sapiens
ctgtttctcctaccc

SEQ ID NO: 886962 - DNA, 15 bp, Homo sapiens
cctgtttctcctacc

SEQ ID NO: 886963 - DNA, 15 bp, Homo sapiens
ccctgtttctcctac

SEQ ID NO: 886964 - DNA, 15 bp, Homo sapiens
accctgtttctccta

SEQ ID NO: 886965 - DNA, 15 bp, Homo sapiens
caccctgtttctcct

SEQ ID NO: 886966 - DNA, 15 bp, Homo sapiens
acaccctgtttctcc

SEQ ID NO: 886967 - DNA, 15 bp, Homo sapiens
gacaccctgtttctc

SEQ ID NO: 886968 - DNA, 15 bp, Homo sapiens
ggacaccctgtttct

SEQ ID NO: 886969 - DNA, 15 bp, Homo sapiens
aggacaccctgtttc

SEQ ID NO: 886970 - DNA, 15 bp, Homo sapiens
caggacaccctgttt

SEQ ID NO: 886971 - DNA, 15 bp, Homo sapiens
ccaggacaccctgtt

SEQ ID NO: 886972 - DNA, 15 bp, Homo sapiens
accaggacaccctgt

SEQ ID NO: 886973 - DNA, 15 bp, Homo sapiens
aaccaggacaccctg

SEQ ID NO: 886974 - DNA, 15 bp, Homo sapiens
gaaccaggacaccct

SEQ ID NO: 886975 - DNA, 15 bp, Homo sapiens
ggaaccaggacaccc

SEQ ID NO: 886976 - DNA, 15 bp, Homo sapiens
tggaaccaggacacc

SEQ ID NO: 886977 - DNA, 15 bp, Homo sapiens
ttggaaccaggacac

SEQ ID NO: 886978 - DNA, 15 bp, Homo sapiens
cttggaaccaggaca

SEQ ID NO: 886979 - DNA, 15 bp, Homo sapiens
tcttggaaccaggac

SEQ ID NO: 886980 - DNA, 15 bp, Homo sapiens
ctcttggaaccagga

SEQ ID NO: 886981 - DNA, 15 bp, Homo sapiens
tctcttggaaccagg

SEQ ID NO: 886982 - DNA, 15 bp, Homo sapiens
ctctcttggaaccag

SEQ ID NO: 886983 - DNA, 15 bp, Homo sapiens
tctctcttggaacca

SEQ ID NO: 886984 - DNA, 15 bp, Homo sapiens
atctctcttggaacc

SEQ ID NO: 886985 - DNA, 15 bp, Homo sapiens
tatctctcttggaac

SEQ ID NO: 886986 - DNA, 15 bp, Homo sapiens
ctatctctcttggaa

SEQ ID NO: 886987 - DNA, 15 bp, Homo sapiens
tctatctctcttgga

SEQ ID NO: 886988 - DNA, 15 bp, Homo sapiens
ttctatctctcttgg

SEQ ID NO: 886989 - DNA, 15 bp, Homo sapiens
attctatctctcttg

SEQ ID NO: 886990 - DNA, 15 bp, Homo sapiens
tattctatctctctt

SEQ ID NO: 886991 - DNA, 15 bp, Homo sapiens
gtattctatctctct

SEQ ID NO: 886992 - DNA, 15 bp, Homo sapiens
cgtattctatctctc

SEQ ID NO: 886993 - DNA, 15 bp, Homo sapiens
acgtattctatctct

SEQ ID NO: 886994 - DNA, 15 bp, Homo sapiens
tacgtattctatctc

SEQ ID NO: 886995 - DNA, 15 bp, Homo sapiens
atacgtattctatct

SEQ ID NO: 886996 - DNA, 15 bp, Homo sapiens
catacgtattctatc

SEQ ID NO: 886997 - DNA, 15 bp, Homo sapiens
acatacgtattctat

SEQ ID NO: 886998 - DNA, 15 bp, Homo sapiens
cacatacgtattcta

SEQ ID NO: 886999 - DNA, 15 bp, Homo sapiens
ccacatacgtattct

SEQ ID NO: 887000 - DNA, 15 bp, Homo sapiens
gccacatacgtattc

SEQ ID NO: 887001 - DNA, 15 bp, Homo sapiens
agccacatacgtatt

SEQ ID NO: 887002 - DNA, 15 bp, Homo sapiens
aagccacatacgtat

SEQ ID NO: 887003 - DNA, 15 bp, Homo sapiens
aaagccacatacgta

SEQ ID NO: 887004 - DNA, 15 bp, Homo sapiens
gaaagccacatacgt

SEQ ID NO: 887005 - DNA, 15 bp, Homo sapiens
ggaaagccacatacg

SEQ ID NO: 887006 - DNA, 15 bp, Homo sapiens
aggaaagccacatac

SEQ ID NO: 887007 - DNA, 15 bp, Homo sapiens
gaggaaagccacata

SEQ ID NO: 887008 - DNA, 15 bp, Homo sapiens
agaggaaagccacat

SEQ ID NO: 887009 - DNA, 15 bp, Homo sapiens
cagaggaaagccaca

SEQ ID NO: 887010 - DNA, 15 bp, Homo sapiens
gcagaggaaagccac

SEQ ID NO: 887011 - DNA, 15 bp, Homo sapiens
ggcagaggaaagcca

SEQ ID NO: 887012 - DNA, 15 bp, Homo sapiens
aggcagaggaaagcc

SEQ ID NO: 887013 - DNA, 15 bp, Homo sapiens
aaggcagaggaaagc

SEQ ID NO: 887014 - DNA, 15 bp, Homo sapiens
aaaggcagaggaaag

SEQ ID NO: 887015 - DNA, 15 bp, Homo sapiens
aaaaggcagaggaaa

SEQ ID NO: 887016 - DNA, 15 bp, Homo sapiens
aaaaaggcagaggaa

SEQ ID NO: 887017 - DNA, 15 bp, Homo sapiens
gaaaaaggcagagga

SEQ ID NO: 887018 - DNA, 15 bp, Homo sapiens
agaaaaaggcagagg

SEQ ID NO: 887019 - DNA, 15 bp, Homo sapiens
aagaaaaaggcagag

SEQ ID NO: 887020 - DNA, 15 bp, Homo sapiens
gaagaaaaaggcaga

SEQ ID NO: 887021 - DNA, 15 bp, Homo sapiens
ggaagaaaaaggcag

SEQ ID NO: 887022 - DNA, 15 bp, Homo sapiens
tggaagaaaaaggca

SEQ ID NO: 887023 - DNA, 15 bp, Homo sapiens
atggaagaaaaaggc

SEQ ID NO: 887024 - DNA, 15 bp, Homo sapiens
gatggaagaaaaagg

SEQ ID NO: 887025 - DNA, 15 bp, Homo sapiens
agatggaagaaaaag

SEQ ID NO: 887026 - DNA, 15 bp, Homo sapiens
cagatggaagaaaaa

SEQ ID NO: 887027 - DNA, 15 bp, Homo sapiens
ccagatggaagaaaa

SEQ ID NO: 887028 - DNA, 15 bp, Homo sapiens
cccagatggaagaaa

SEQ ID NO: 887029 - DNA, 15 bp, Homo sapiens
tcccagatggaagaa

SEQ ID NO: 887030 - DNA, 15 bp, Homo sapiens
atcccagatggaaga

SEQ ID NO: 887031 - DNA, 15 bp, Homo sapiens
aatcccagatggaag

SEQ ID NO: 887032 - DNA, 15 bp, Homo sapiens
gaatcccagatggaa

SEQ ID NO: 887033 - DNA, 15 bp, Homo sapiens
ggaatcccagatgga

SEQ ID NO: 887034 - DNA, 15 bp, Homo sapiens
tggaatcccagatgg

SEQ ID NO: 887035 - DNA, 15 bp, Homo sapiens
ctggaatcccagatg

SEQ ID NO: 887036 - DNA, 15 bp, Homo sapiens
gctggaatcccagat

SEQ ID NO: 887037 - DNA, 15 bp, Homo sapiens
ggctggaatcccaga

SEQ ID NO: 887038 - DNA, 15 bp, Homo sapiens
gggctggaatcccag

SEQ ID NO: 887039 - DNA, 15 bp, Homo sapiens
tgggctggaatccca

SEQ ID NO: 887040 - DNA, 15 bp, Homo sapiens
atgggctggaatccc

SEQ ID NO: 887041 - DNA, 15 bp, Homo sapiens
aatgggctggaatcc

SEQ ID NO: 887042 - DNA, 15 bp, Homo sapiens
caatgggctggaatc

SEQ ID NO: 887043 - DNA, 15 bp, Homo sapiens
ccaatgggctggaat

SEQ ID NO: 887044 - DNA, 15 bp, Homo sapiens
cccaatgggctggaa

SEQ ID NO: 887045 - DNA, 15 bp, Homo sapiens
acccaatgggctgga

SEQ ID NO: 887046 - DNA, 15 bp, Homo sapiens
cacccaatgggctgg

SEQ ID NO: 887047 - DNA, 15 bp, Homo sapiens
ccacccaatgggctg

SEQ ID NO: 887048 - DNA, 15 bp, Homo sapiens
accacccaatgggct

SEQ ID NO: 887049 - DNA, 15 bp, Homo sapiens
aaccacccaatgggc

SEQ ID NO: 887050 - DNA, 15 bp, Homo sapiens
gaaccacccaatggg

SEQ ID NO: 887051 - DNA, 15 bp, Homo sapiens
ggaaccacccaatgg

SEQ ID NO: 887052 - DNA, 15 bp, Homo sapiens
gggaaccacccaatg

SEQ ID NO: 887053 - DNA, 15 bp, Homo sapiens
cgggaaccacccaat

SEQ ID NO: 887054 - DNA, 15 bp, Homo sapiens
gcgggaaccacccaa

SEQ ID NO: 887055 - DNA, 15 bp, Homo sapiens
ggcgggaaccaccca

SEQ ID NO: 887056 - DNA, 15 bp, Homo sapiens
gggcgggaaccaccc

SEQ ID NO: 887057 - DNA, 15 bp, Homo sapiens
tgggcgggaaccacc

SEQ ID NO: 887058 - DNA, 15 bp, Homo sapiens
gtgggcgggaaccac

SEQ ID NO: 887059 - DNA, 15 bp, Homo sapiens
tgtgggcgggaacca

SEQ ID NO: 887060 - DNA, 15 bp, Homo sapiens
ttgtgggcgggaacc

SEQ ID NO: 887061 - DNA, 15 bp, Homo sapiens
attgtgggcgggaac

SEQ ID NO: 887062 - DNA, 15 bp, Homo sapiens
cattgtgggcgggaa

SEQ ID NO: 887063 - DNA, 15 bp, Homo sapiens
tcattgtgggcggga

SEQ ID NO: 887064 - DNA, 15 bp, Homo sapiens
ctcattgtgggcggg

SEQ ID NO: 887065 - DNA, 15 bp, Homo sapiens
cctcattgtgggcgg

SEQ ID NO: 887066 - DNA, 15 bp, Homo sapiens
tcctcattgtgggcg

SEQ ID NO: 887067 - DNA, 15 bp, Homo sapiens
ttcctcattgtgggc

SEQ ID NO: 887068 - DNA, 15 bp, Homo sapiens
tttcctcattgtggg

SEQ ID NO: 887069 - DNA, 15 bp, Homo sapiens
ctttcctcattgtgg

SEQ ID NO: 887070 - DNA, 15 bp, Homo sapiens
tctttcctcattgtg

SEQ ID NO: 887071 - DNA, 15 bp, Homo sapiens
atctttcctcattgt

SEQ ID NO: 887072 - DNA, 15 bp, Homo sapiens
gatctttcctcattg

SEQ ID NO: 887073 - DNA, 15 bp, Homo sapiens
agatctttcctcatt

SEQ ID NO: 887074 - DNA, 15 bp, Homo sapiens
aagatctttcctcat

SEQ ID NO: 887075 - DNA, 15 bp, Homo sapiens
gaagatctttcctca

SEQ ID NO: 887076 - DNA, 15 bp, Homo sapiens
ggaagatctttcctc

SEQ ID NO: 887077 - DNA, 15 bp, Homo sapiens
gggaagatctttcct

SEQ ID NO: 887078 - DNA, 15 bp, Homo sapiens
ggggaagatctttcc

SEQ ID NO: 887079 - DNA, 15 bp, Homo sapiens
tggggaagatctttc

SEQ ID NO: 887080 - DNA, 15 bp, Homo sapiens
gtggggaagatcttt

SEQ ID NO: 887081 - DNA, 15 bp, Homo sapiens
agtggggaagatctt

SEQ ID NO: 887082 - DNA, 15 bp, Homo sapiens
gagtggggaagatct

SEQ ID NO: 887083 - DNA, 15 bp, Homo sapiens
tgagtggggaagatc

SEQ ID NO: 887084 - DNA, 15 bp, Homo sapiens
ctgagtggggaagat

SEQ ID NO: 887085 - DNA, 15 bp, Homo sapiens
actgagtggggaaga

SEQ ID NO: 887086 - DNA, 15 bp, Homo sapiens
gactgagtggggaag

SEQ ID NO: 887087 - DNA, 15 bp, Homo sapiens
ggactgagtggggaa

SEQ ID NO: 887088 - DNA, 15 bp, Homo sapiens
tggactgagtgggga

SEQ ID NO: 887089 - DNA, 15 bp, Homo sapiens
gtggactgagtgggg

SEQ ID NO: 887090 - DNA, 15 bp, Homo sapiens
agtggactgagtggg

SEQ ID NO: 887091 - DNA, 15 bp, Homo sapiens
cagtggactgagtgg

SEQ ID NO: 887092 - DNA, 15 bp, Homo sapiens
tcagtggactgagtg

SEQ ID NO: 887093 - DNA, 15 bp, Homo sapiens
gtcagtggactgagt

SEQ ID NO: 887094 - DNA, 15 bp, Homo sapiens
agtcagtggactgag

SEQ ID NO: 887095 - DNA, 15 bp, Homo sapiens
gagtcagtggactga

SEQ ID NO: 887096 - DNA, 15 bp, Homo sapiens
tgagtcagtggactg

SEQ ID NO: 887097 - DNA, 15 bp, Homo sapiens
gtgagtcagtggact

SEQ ID NO: 887098 - DNA, 15 bp, Homo sapiens
tgtgagtcagtggac

SEQ ID NO: 887099 - DNA, 15 bp, Homo sapiens
atgtgagtcagtgga

SEQ ID NO: 887100 - DNA, 15 bp, Homo sapiens
catgtgagtcagtgg

SEQ ID NO: 887101 - DNA, 15 bp, Homo sapiens
gcatgtgagtcagtg

SEQ ID NO: 887102 - DNA, 15 bp, Homo sapiens
ggcatgtgagtcagt

SEQ ID NO: 887103 - DNA, 15 bp, Homo sapiens
tggcatgtgagtcag

SEQ ID NO: 887104 - DNA, 15 bp, Homo sapiens
ttggcatgtgagtca

SEQ ID NO: 887105 - DNA, 15 bp, Homo sapiens
attggcatgtgagtc

SEQ ID NO: 887106 - DNA, 15 bp, Homo sapiens
gattggcatgtgagt

SEQ ID NO: 887107 - DNA, 15 bp, Homo sapiens
ggattggcatgtgag

SEQ ID NO: 887108 - DNA, 15 bp, Homo sapiens
gggattggcatgtga

SEQ ID NO: 887109 - DNA, 15 bp, Homo sapiens
ggggattggcatgtg

SEQ ID NO: 887110 - DNA, 15 bp, Homo sapiens
aggggattggcatgt

SEQ ID NO: 887111 - DNA, 15 bp, Homo sapiens
gaggggattggcatg

SEQ ID NO: 887112 - DNA, 15 bp, Homo sapiens
ggaggggattggcat

SEQ ID NO: 887113 - DNA, 15 bp, Homo sapiens
tggaggggattggca

SEQ ID NO: 887114 - DNA, 15 bp, Homo sapiens
ctggaggggattggc

SEQ ID NO: 887115 - DNA, 15 bp, Homo sapiens
tctggaggggattgg

SEQ ID NO: 887116 - DNA, 15 bp, Homo sapiens
ttctggaggggattg

SEQ ID NO: 887117 - DNA, 15 bp, Homo sapiens
tttctggaggggatt

SEQ ID NO: 887118 - DNA, 15 bp, Homo sapiens
gtttctggaggggat

SEQ ID NO: 887119 - DNA, 15 bp, Homo sapiens
tgtttctggagggga

SEQ ID NO: 887120 - DNA, 15 bp, Homo sapiens
gtgtttctggagggg

SEQ ID NO: 887121 - DNA, 15 bp, Homo sapiens
ggtgtttctggaggg

SEQ ID NO: 887122 - DNA, 15 bp, Homo sapiens
gggtgtttctggagg

SEQ ID NO: 887123 - DNA, 15 bp, Homo sapiens
agggtgtttctggag

SEQ ID NO: 887124 - DNA, 15 bp, Homo sapiens
gagggtgtttctgga

SEQ ID NO: 887125 - DNA, 15 bp, Homo sapiens
tgagggtgtttctgg

SEQ ID NO: 887126 - DNA, 15 bp, Homo sapiens
atgagggtgtttctg

SEQ ID NO: 887127 - DNA, 15 bp, Homo sapiens
tatgagggtgtttct

SEQ ID NO: 887128 - DNA, 15 bp, Homo sapiens
ctatgagggtgtttc

SEQ ID NO: 887129 - DNA, 15 bp, Homo sapiens
tctatgagggtgttt

SEQ ID NO: 887130 - DNA, 15 bp, Homo sapiens
gtctatgagggtgtt

SEQ ID NO: 887131 - DNA, 15 bp, Homo sapiens
tgtctatgagggtgt

SEQ ID NO: 887132 - DNA, 15 bp, Homo sapiens
atgtctatgagggtg

SEQ ID NO: 887133 - DNA, 15 bp, Homo sapiens
tatgtctatgagggt

SEQ ID NO: 887134 - DNA, 15 bp, Homo sapiens
ctatgtctatgaggg

SEQ ID NO: 887135 - DNA, 15 bp, Homo sapiens
tctatgtctatgagg

SEQ ID NO: 887136 - DNA, 15 bp, Homo sapiens
gtctatgtctatgag

SEQ ID NO: 887137 - DNA, 15 bp, Homo sapiens
tgtctatgtctatga

SEQ ID NO: 887138 - DNA, 15 bp, Homo sapiens
gtgtctatgtctatg

SEQ ID NO: 887139 - DNA, 15 bp, Homo sapiens
tgtgtctatgtctat

SEQ ID NO: 887140 - DNA, 15 bp, Homo sapiens
gtgtgtctatgtcta

SEQ ID NO: 887141 - DNA, 15 bp, Homo sapiens
ggtgtgtctatgtct

SEQ ID NO: 887142 - DNA, 15 bp, Homo sapiens
gggtgtgtctatgtc

SEQ ID NO: 887143 - DNA, 15 bp, Homo sapiens
ggggtgtgtctatgt

SEQ ID NO: 887144 - DNA, 15 bp, Homo sapiens
tggggtgtgtctatg

SEQ ID NO: 887145 - DNA, 15 bp, Homo sapiens
ttggggtgtgtctat

SEQ ID NO: 887146 - DNA, 15 bp, Homo sapiens
tttggggtgtgtcta

SEQ ID NO: 887147 - DNA, 15 bp, Homo sapiens
ttttggggtgtgtct

SEQ ID NO: 887148 - DNA, 15 bp, Homo sapiens
attttggggtgtgtc

SEQ ID NO: 887149 - DNA, 15 bp, Homo sapiens
tattttggggtgtgt

SEQ ID NO: 887150 - DNA, 15 bp, Homo sapiens
ttattttggggtgtg

SEQ ID NO: 887151 - DNA, 15 bp, Homo sapiens
attattttggggtgt

SEQ ID NO: 887152 - DNA, 15 bp, Homo sapiens
cattattttggggtg

SEQ ID NO: 887153 - DNA, 15 bp, Homo sapiens
gcattattttggggt

SEQ ID NO: 887154 - DNA, 15 bp, Homo sapiens
agcattattttgggg

SEQ ID NO: 887155 - DNA, 15 bp, Homo sapiens
aagcattattttggg

SEQ ID NO: 887156 - DNA, 15 bp, Homo sapiens
aaagcattattttgg

SEQ ID NO: 887157 - DNA, 15 bp, Homo sapiens
taaagcattattttg

SEQ ID NO: 887158 - DNA, 15 bp, Homo sapiens
gtaaagcattatttt

SEQ ID NO: 887159 - DNA, 15 bp, Homo sapiens
agtaaagcattattt

SEQ ID NO: 887160 - DNA, 15 bp, Homo sapiens
tagtaaagcattatt

SEQ ID NO: 887161 - DNA, 15 bp, Homo sapiens
atagtaaagcattat

SEQ ID NO: 887162 - DNA, 15 bp, Homo sapiens
gatagtaaagcatta

SEQ ID NO: 887163 - DNA, 15 bp, Homo sapiens
agatagtaaagcatt

SEQ ID NO: 887164 - DNA, 15 bp, Homo sapiens
tagatagtaaagcat

SEQ ID NO: 887165 - DNA, 15 bp, Homo sapiens
atagatagtaaagca

SEQ ID NO: 887166 - DNA, 15 bp, Homo sapiens
aatagatagtaaagc

SEQ ID NO: 887167 - DNA, 15 bp, Homo sapiens
gaatagatagtaaag

SEQ ID NO: 887168 - DNA, 15 bp, Homo sapiens
tgaatagatagtaaa

SEQ ID NO: 887169 - DNA, 15 bp, Homo sapiens
ctgaatagatagtaa

SEQ ID NO: 887170 - DNA, 15 bp, Homo sapiens
cctgaatagatagta

SEQ ID NO: 887171 - DNA, 15 bp, Homo sapiens
acctgaatagatagt

SEQ ID NO: 887172 - DNA, 15 bp, Homo sapiens
tacctgaatagatag

SEQ ID NO: 887173 - DNA, 15 bp, Homo sapiens
atacctgaatagata

SEQ ID NO: 887174 - DNA, 15 bp, Homo sapiens
gatacctgaatagat

SEQ ID NO: 887175 - DNA, 15 bp, Homo sapiens
ggatacctgaataga

SEQ ID NO: 887176 - DNA, 15 bp, Homo sapiens
gggatacctgaatag

SEQ ID NO: 887177 - DNA, 15 bp, Homo sapiens
agggatacctgaata

SEQ ID NO: 887178 - DNA, 15 bp, Homo sapiens
aagggatacctgaat

SEQ ID NO: 887179 - DNA, 15 bp, Homo sapiens
gaagggatacctgaa

SEQ ID NO: 887180 - DNA, 15 bp, Homo sapiens
tgaagggatacctga

SEQ ID NO: 887181 - DNA, 15 bp, Homo sapiens
atgaagggatacctg

SEQ ID NO: 887182 - DNA, 15 bp, Homo sapiens
gatgaagggatacct

SEQ ID NO: 887183 - DNA, 15 bp, Homo sapiens
ggatgaagggatacc

SEQ ID NO: 887184 - DNA, 15 bp, Homo sapiens
tggatgaagggatac

SEQ ID NO: 887185 - DNA, 15 bp, Homo sapiens
ctggatgaagggata

SEQ ID NO: 887186 - DNA, 15 bp, Homo sapiens
actggatgaagggat

SEQ ID NO: 887187 - DNA, 15 bp, Homo sapiens
gactggatgaaggga

SEQ ID NO: 887188 - DNA, 15 bp, Homo sapiens
tgactggatgaaggg

SEQ ID NO: 887189 - DNA, 15 bp, Homo sapiens
ttgactggatgaagg

SEQ ID NO: 887190 - DNA, 15 bp, Homo sapiens
cttgactggatgaag

SEQ ID NO: 887191 - DNA, 15 bp, Homo sapiens
ccttgactggatgaa

SEQ ID NO: 887192 - DNA, 15 bp, Homo sapiens
accttgactggatga

SEQ ID NO: 887193 - DNA, 15 bp, Homo sapiens
caccttgactggatg

SEQ ID NO: 887194 - DNA, 15 bp, Homo sapiens
tcaccttgactggat

SEQ ID NO: 887195 - DNA, 15 bp, Homo sapiens
gtcaccttgactgga

SEQ ID NO: 887196 - DNA, 15 bp, Homo sapiens
tgtcaccttgactgg

SEQ ID NO: 887197 - DNA, 15 bp, Homo sapiens
gtgtcaccttgactg

SEQ ID NO: 887198 - DNA, 15 bp, Homo sapiens
tgtgtcaccttgact

SEQ ID NO: 887199 - DNA, 15 bp, Homo sapiens
atgtgtcaccttgac

SEQ ID NO: 887200 - DNA, 15 bp, Homo sapiens
tatgtgtcaccttga

SEQ ID NO: 887201 - DNA, 15 bp, Homo sapiens
ttatgtgtcaccttg

SEQ ID NO: 887202 - DNA, 15 bp, Homo sapiens
tttatgtgtcacctt

SEQ ID NO: 887203 - DNA, 15 bp, Homo sapiens
ttttatgtgtcacct

SEQ ID NO: 887204 - DNA, 15 bp, Homo sapiens
attttatgtgtcacc

SEQ ID NO: 887205 - DNA, 15 bp, Homo sapiens
aattttatgtgtcac

SEQ ID NO: 887206 - DNA, 15 bp, Homo sapiens
taattttatgtgtca

SEQ ID NO: 887207 - DNA, 15 bp, Homo sapiens
ttaattttatgtgtc

SEQ ID NO: 887208 - DNA, 15 bp, Homo sapiens
gttaattttatgtgt

SEQ ID NO: 887209 - DNA, 15 bp, Homo sapiens
ggttaattttatgtg

SEQ ID NO: 887210 - DNA, 15 bp, Homo sapiens
tggttaattttatgt

SEQ ID NO: 887211 - DNA, 15 bp, Homo sapiens
atggttaattttatg

SEQ ID NO: 887212 - DNA, 15 bp, Homo sapiens
gatggttaattttat

SEQ ID NO: 887213 - DNA, 15 bp, Homo sapiens
tgatggttaatttta

SEQ ID NO: 887214 - DNA, 15 bp, Homo sapiens
atgatggttaatttt

SEQ ID NO: 887215 - DNA, 15 bp, Homo sapiens
tatgatggttaattt

SEQ ID NO: 887216 - DNA, 15 bp, Homo sapiens
ctatgatggttaatt

SEQ ID NO: 887217 - DNA, 15 bp, Homo sapiens
tctatgatggttaat

SEQ ID NO: 887218 - DNA, 15 bp, Homo sapiens
ctctatgatggttaa

SEQ ID NO: 887219 - DNA, 15 bp, Homo sapiens
actctatgatggtta

SEQ ID NO: 887220 - DNA, 15 bp, Homo sapiens
cactctatgatggtt

SEQ ID NO: 887221 - DNA, 15 bp, Homo sapiens
acactctatgatggt

SEQ ID NO: 887222 - DNA, 15 bp, Homo sapiens
cacactctatgatgg

SEQ ID NO: 887223 - DNA, 15 bp, Homo sapiens
gcacactctatgatg

SEQ ID NO: 887224 - DNA, 15 bp, Homo sapiens
agcacactctatgat

SEQ ID NO: 887225 - DNA, 15 bp, Homo sapiens
gagcacactctatga

SEQ ID NO: 887226 - DNA, 15 bp, Homo sapiens
agagcacactctatg

SEQ ID NO: 887227 - DNA, 15 bp, Homo sapiens
gagagcacactctat

SEQ ID NO: 887228 - DNA, 15 bp, Homo sapiens
tgagagcacactcta

SEQ ID NO: 887229 - DNA, 15 bp, Homo sapiens
ctgagagcacactct

SEQ ID NO: 887230 - DNA, 15 bp, Homo sapiens
tctgagagcacactc

SEQ ID NO: 887231 - DNA, 15 bp, Homo sapiens
atctgagagcacact

SEQ ID NO: 887232 - DNA, 15 bp, Homo sapiens
aatctgagagcacac

SEQ ID NO: 887233 - DNA, 15 bp, Homo sapiens
caatctgagagcaca

SEQ ID NO: 887234 - DNA, 15 bp, Homo sapiens
tcaatctgagagcac

SEQ ID NO: 887235 - DNA, 15 bp, Homo sapiens
gtcaatctgagagca

SEQ ID NO: 887236 - DNA, 15 bp, Homo sapiens
agtcaatctgagagc

SEQ ID NO: 887237 - DNA, 15 bp, Homo sapiens
aagtcaatctgagag

SEQ ID NO: 887238 - DNA, 15 bp, Homo sapiens
aaagtcaatctgaga

SEQ ID NO: 887239 - DNA, 15 bp, Homo sapiens
gaaagtcaatctgag

SEQ ID NO: 887240 - DNA, 15 bp, Homo sapiens
ggaaagtcaatctga

SEQ ID NO: 887241 - DNA, 15 bp, Homo sapiens
tggaaagtcaatctg

SEQ ID NO: 887242 - DNA, 15 bp, Homo sapiens
atggaaagtcaatct

SEQ ID NO: 887243 - DNA, 15 bp, Homo sapiens
aatggaaagtcaatc

SEQ ID NO: 887244 - DNA, 15 bp, Homo sapiens
gaatggaaagtcaat

SEQ ID NO: 887245 - DNA, 15 bp, Homo sapiens
ggaatggaaagtcaa

SEQ ID NO: 887246 - DNA, 15 bp, Homo sapiens
tggaatggaaagtca

SEQ ID NO: 887247 - DNA, 15 bp, Homo sapiens
ctggaatggaaagtc

SEQ ID NO: 887248 - DNA, 15 bp, Homo sapiens
tctggaatggaaagt

SEQ ID NO: 887249 - DNA, 15 bp, Homo sapiens
atctggaatggaaag

SEQ ID NO: 887250 - DNA, 15 bp, Homo sapiens
aatctggaatggaaa

SEQ ID NO: 887251 - DNA, 15 bp, Homo sapiens
aaatctggaatggaa

SEQ ID NO: 887252 - DNA, 15 bp, Homo sapiens
taaatctggaatgga

SEQ ID NO: 887253 - DNA, 15 bp, Homo sapiens
gtaaatctggaatgg

SEQ ID NO: 887254 - DNA, 15 bp, Homo sapiens
agtaaatctggaatg

SEQ ID NO: 887255 - DNA, 15 bp, Homo sapiens
cagtaaatctggaat

SEQ ID NO: 887256 - DNA, 15 bp, Homo sapiens
ccagtaaatctggaa

SEQ ID NO: 887257 - DNA, 15 bp, Homo sapiens
accagtaaatctgga

SEQ ID NO: 887258 - DNA, 15 bp, Homo sapiens
aaccagtaaatctgg

SEQ ID NO: 887259 - DNA, 15 bp, Homo sapiens
aaaccagtaaatctg

SEQ ID NO: 887260 - DNA, 15 bp, Homo sapiens
taaaccagtaaatct

SEQ ID NO: 887261 - DNA, 15 bp, Homo sapiens
gtaaaccagtaaatc

SEQ ID NO: 887262 - DNA, 15 bp, Homo sapiens
agtaaaccagtaaat

SEQ ID NO: 887263 - DNA, 15 bp, Homo sapiens
cagtaaaccagtaaa

SEQ ID NO: 887264 - DNA, 15 bp, Homo sapiens
acagtaaaccagtaa

SEQ ID NO: 887265 - DNA, 15 bp, Homo sapiens
cacagtaaaccagta

SEQ ID NO: 887266 - DNA, 15 bp, Homo sapiens
ccacagtaaaccagt

SEQ ID NO: 887267 - DNA, 15 bp, Homo sapiens
tccacagtaaaccag

SEQ ID NO: 887268 - DNA, 15 bp, Homo sapiens
ctccacagtaaacca

SEQ ID NO: 887269 - DNA, 15 bp, Homo sapiens
actccacagtaaacc

SEQ ID NO: 887270 - DNA, 15 bp, Homo sapiens
aactccacagtaaac

SEQ ID NO: 887271 - DNA, 15 bp, Homo sapiens
aaactccacagtaaa

SEQ ID NO: 887272 - DNA, 15 bp, Homo sapiens
caaactccacagtaa

SEQ ID NO: 887273 - DNA, 15 bp, Homo sapiens
ccaaactccacagta

SEQ ID NO: 887274 - DNA, 15 bp, Homo sapiens
cccaaactccacagt

SEQ ID NO: 887275 - DNA, 15 bp, Homo sapiens
gcccaaactccacag

SEQ ID NO: 887276 - DNA, 15 bp, Homo sapiens
agcccaaactccaca

SEQ ID NO: 887277 - DNA, 15 bp, Homo sapiens
gagcccaaactccac

SEQ ID NO: 887278 - DNA, 15 bp, Homo sapiens
agagcccaaactcca

SEQ ID NO: 887279 - DNA, 15 bp, Homo sapiens
cagagcccaaactcc

SEQ ID NO: 887280 - DNA, 15 bp, Homo sapiens
gcagagcccaaactc

SEQ ID NO: 887281 - DNA, 15 bp, Homo sapiens
tgcagagcccaaact

SEQ ID NO: 887282 - DNA, 15 bp, Homo sapiens
ttgcagagcccaaac

SEQ ID NO: 887283 - DNA, 15 bp, Homo sapiens
tttgcagagcccaaa

SEQ ID NO: 887284 - DNA, 15 bp, Homo sapiens
gtttgcagagcccaa

SEQ ID NO: 887285 - DNA, 15 bp, Homo sapiens
tgtttgcagagccca

SEQ ID NO: 887286 - DNA, 15 bp, Homo sapiens
ttgtttgcagagccc

SEQ ID NO: 887287 - DNA, 15 bp, Homo sapiens
cttgtttgcagagcc

SEQ ID NO: 887288 - DNA, 15 bp, Homo sapiens
ccttgtttgcagagc

SEQ ID NO: 887289 - DNA, 15 bp, Homo sapiens
tccttgtttgcagag

SEQ ID NO: 887290 - DNA, 15 bp, Homo sapiens
ctccttgtttgcaga

SEQ ID NO: 887291 - DNA, 15 bp, Homo sapiens
tctccttgtttgcag

SEQ ID NO: 887292 - DNA, 15 bp, Homo sapiens
gtctccttgtttgca

SEQ ID NO: 887293 - DNA, 15 bp, Homo sapiens
agtctccttgtttgc

SEQ ID NO: 887294 - DNA, 15 bp, Homo sapiens
gagtctccttgtttg

SEQ ID NO: 887295 - DNA, 15 bp, Homo sapiens
ggagtctccttgttt

SEQ ID NO: 887296 - DNA, 15 bp, Homo sapiens
tggagtctccttgtt

SEQ ID NO: 887297 - DNA, 15 bp, Homo sapiens
atggagtctccttgt

SEQ ID NO: 887298 - DNA, 15 bp, Homo sapiens
tatggagtctccttg

SEQ ID NO: 887299 - DNA, 15 bp, Homo sapiens
ttatggagtctcctt

SEQ ID NO: 887300 - DNA, 15 bp, Homo sapiens
tttatggagtctcct

SEQ ID NO: 887301 - DNA, 15 bp, Homo sapiens
ctttatggagtctcc

SEQ ID NO: 887302 - DNA, 15 bp, Homo sapiens
cctttatggagtctc

SEQ ID NO: 887303 - DNA, 15 bp, Homo sapiens
gcctttatggagtct

SEQ ID NO: 887304 - DNA, 15 bp, Homo sapiens
tgcctttatggagtc

SEQ ID NO: 887305 - DNA, 15 bp, Homo sapiens
atgcctttatggagt

SEQ ID NO: 887306 - DNA, 15 bp, Homo sapiens
tatgcctttatggag

SEQ ID NO: 887307 - DNA, 15 bp, Homo sapiens
atatgcctttatgga

SEQ ID NO: 887308 - DNA, 15 bp, Homo sapiens
catatgcctttatgg

SEQ ID NO: 887309 - DNA, 15 bp, Homo sapiens
ccatatgcctttatg

SEQ ID NO: 887310 - DNA, 15 bp, Homo sapiens
accatatgcctttat

SEQ ID NO: 887311 - DNA, 15 bp, Homo sapiens
caccatatgccttta

SEQ ID NO: 887312 - DNA, 15 bp, Homo sapiens
gcaccatatgccttt

SEQ ID NO: 887313 - DNA, 15 bp, Homo sapiens
agcaccatatgcctt

SEQ ID NO: 887314 - DNA, 15 bp, Homo sapiens
cagcaccatatgcct

SEQ ID NO: 887315 - DNA, 15 bp, Homo sapiens
ccagcaccatatgcc

SEQ ID NO: 887316 - DNA, 15 bp, Homo sapiens
cccagcaccatatgc

SEQ ID NO: 887317 - DNA, 15 bp, Homo sapiens
gcccagcaccatatg

SEQ ID NO: 887318 - DNA, 15 bp, Homo sapiens
agcccagcaccatat

SEQ ID NO: 887319 - DNA, 15 bp, Homo sapiens
gagcccagcaccata

SEQ ID NO: 887320 - DNA, 15 bp, Homo sapiens
ggagcccagcaccat

SEQ ID NO: 887321 - DNA, 15 bp, Homo sapiens
aggagcccagcacca

SEQ ID NO: 887322 - DNA, 15 bp, Homo sapiens
caggagcccagcacc

SEQ ID NO: 887323 - DNA, 15 bp, Homo sapiens
acaggagcccagcac

SEQ ID NO: 887324 - DNA, 15 bp, Homo sapiens
gacaggagcccagca

SEQ ID NO: 887325 - DNA, 15 bp, Homo sapiens
tgacaggagcccagc

SEQ ID NO: 887326 - DNA, 15 bp, Homo sapiens
atgacaggagcccag

SEQ ID NO: 887327 - DNA, 15 bp, Homo sapiens
gatgacaggagccca

SEQ ID NO: 887328 - DNA, 15 bp, Homo sapiens
ggatgacaggagccc

SEQ ID NO: 887329 - DNA, 15 bp, Homo sapiens
aggatgacaggagcc

SEQ ID NO: 887330 - DNA, 15 bp, Homo sapiens
aaggatgacaggagc

SEQ ID NO: 887331 - DNA, 15 bp, Homo sapiens
aaaggatgacaggag

SEQ ID NO: 887332 - DNA, 15 bp, Homo sapiens
caaaggatgacagga

SEQ ID NO: 887333 - DNA, 15 bp, Homo sapiens
ccaaaggatgacagg

SEQ ID NO: 887334 - DNA, 15 bp, Homo sapiens
accaaaggatgacag

SEQ ID NO: 887335 - DNA, 15 bp, Homo sapiens
caccaaaggatgaca

SEQ ID NO: 887336 - DNA, 15 bp, Homo sapiens
tcaccaaaggatgac

SEQ ID NO: 887337 - DNA, 15 bp, Homo sapiens
ttcaccaaaggatga

SEQ ID NO: 887338 - DNA, 15 bp, Homo sapiens
attcaccaaaggatg

SEQ ID NO: 887339 - DNA, 15 bp, Homo sapiens
aattcaccaaaggat

SEQ ID NO: 887340 - DNA, 15 bp, Homo sapiens
taattcaccaaagga

SEQ ID NO: 887341 - DNA, 15 bp, Homo sapiens
gtaattcaccaaagg

SEQ ID NO: 887342 - DNA, 15 bp, Homo sapiens
tgtaattcaccaaag

SEQ ID NO: 887343 - DNA, 15 bp, Homo sapiens
ctgtaattcaccaaa

SEQ ID NO: 887344 - DNA, 15 bp, Homo sapiens
cctgtaattcaccaa

SEQ ID NO: 887345 - DNA, 15 bp, Homo sapiens
acctgtaattcacca

SEQ ID NO: 887346 - DNA, 15 bp, Homo sapiens
tacctgtaattcacc

SEQ ID NO: 887347 - DNA, 15 bp, Homo sapiens
atacctgtaattcac

SEQ ID NO: 887348 - DNA, 15 bp, Homo sapiens
catacctgtaattca

SEQ ID NO: 887349 - DNA, 15 bp, Homo sapiens
tcatacctgtaattc

SEQ ID NO: 887350 - DNA, 15 bp, Homo sapiens
gtcatacctgtaatt

SEQ ID NO: 887351 - DNA, 15 bp, Homo sapiens
ggtcatacctgtaat

SEQ ID NO: 887352 - DNA, 15 bp, Homo sapiens
aggtcatacctgtaa

SEQ ID NO: 887353 - DNA, 15 bp, Homo sapiens
aaggtcatacctgta

SEQ ID NO: 887354 - DNA, 15 bp, Homo sapiens
gaaggtcatacctgt

SEQ ID NO: 887355 - DNA, 15 bp, Homo sapiens
tgaaggtcatacctg

SEQ ID NO: 887356 - DNA, 15 bp, Homo sapiens
gtgaaggtcatacct

SEQ ID NO: 887357 - DNA, 15 bp, Homo sapiens
tgtgaaggtcatacc

SEQ ID NO: 887358 - DNA, 15 bp, Homo sapiens
ctgtgaaggtcatac

SEQ ID NO: 887359 - DNA, 15 bp, Homo sapiens
cctgtgaaggtcata

SEQ ID NO: 887360 - DNA, 15 bp, Homo sapiens
tcctgtgaaggtcat

SEQ ID NO: 887361 - DNA, 15 bp, Homo sapiens
ttcctgtgaaggtca

SEQ ID NO: 887362 - DNA, 15 bp, Homo sapiens
gttcctgtgaaggtc

SEQ ID NO: 887363 - DNA, 15 bp, Homo sapiens
ggttcctgtgaaggt

SEQ ID NO: 887364 - DNA, 15 bp, Homo sapiens
tggttcctgtgaagg

SEQ ID NO: 887365 - DNA, 15 bp, Homo sapiens
ttggttcctgtgaag

SEQ ID NO: 887366 - DNA, 15 bp, Homo sapiens
cttggttcctgtgaa

SEQ ID NO: 887367 - DNA, 15 bp, Homo sapiens
ccttggttcctgtga

SEQ ID NO: 887368 - DNA, 15 bp, Homo sapiens
tccttggttcctgtg

SEQ ID NO: 887369 - DNA, 15 bp, Homo sapiens
atccttggttcctgt

SEQ ID NO: 887370 - DNA, 15 bp, Homo sapiens
tatccttggttcctg

SEQ ID NO: 887371 - DNA, 15 bp, Homo sapiens
ctatccttggttcct

SEQ ID NO: 887372 - DNA, 15 bp, Homo sapiens
tctatccttggttcc

SEQ ID NO: 887373 - DNA, 15 bp, Homo sapiens
atctatccttggttc

SEQ ID NO: 887374 - DNA, 15 bp, Homo sapiens
aatctatccttggtt

SEQ ID NO: 887375 - DNA, 15 bp, Homo sapiens
aaatctatccttggt

SEQ ID NO: 887376 - DNA, 15 bp, Homo sapiens
taaatctatccttgg

SEQ ID NO: 887377 - DNA, 15 bp, Homo sapiens
ttaaatctatccttg

SEQ ID NO: 887378 - DNA, 15 bp, Homo sapiens
tttaaatctatcctt

SEQ ID NO: 887379 - DNA, 15 bp, Homo sapiens
ttttaaatctatcct

SEQ ID NO: 887380 - DNA, 15 bp, Homo sapiens
cttttaaatctatcc

SEQ ID NO: 887381 - DNA, 15 bp, Homo sapiens
acttttaaatctatc

SEQ ID NO: 887382 - DNA, 15 bp, Homo sapiens
cacttttaaatctat

SEQ ID NO: 887383 - DNA, 15 bp, Homo sapiens
ccacttttaaatcta

SEQ ID NO: 887384 - DNA, 15 bp, Homo sapiens
accacttttaaatct

SEQ ID NO: 887385 - DNA, 15 bp, Homo sapiens
caccacttttaaatc

SEQ ID NO: 887386 - DNA, 15 bp, Homo sapiens
ccaccacttttaaat

SEQ ID NO: 887387 - DNA, 15 bp, Homo sapiens
cccaccacttttaaa

SEQ ID NO: 887388 - DNA, 15 bp, Homo sapiens
acccaccacttttaa

SEQ ID NO: 887389 - DNA, 15 bp, Homo sapiens
tacccaccactttta

SEQ ID NO: 887390 - DNA, 15 bp, Homo sapiens
gtacccaccactttt

SEQ ID NO: 887391 - DNA, 15 bp, Homo sapiens
tgtacccaccacttt

SEQ ID NO: 887392 - DNA, 15 bp, Homo sapiens
ctgtacccaccactt

SEQ ID NO: 887393 - DNA, 15 bp, Homo sapiens
tctgtacccaccact

SEQ ID NO: 887394 - DNA, 15 bp, Homo sapiens
ttctgtacccaccac

SEQ ID NO: 887395 - DNA, 15 bp, Homo sapiens
tttctgtacccacca

SEQ ID NO: 887396 - DNA, 15 bp, Homo sapiens
ttttctgtacccacc

SEQ ID NO: 887397 - DNA, 15 bp, Homo sapiens
gttttctgtacccac

SEQ ID NO: 887398 - DNA, 15 bp, Homo sapiens
ggttttctgtaccca

SEQ ID NO: 887399 - DNA, 15 bp, Homo sapiens
tggttttctgtaccc

SEQ ID NO: 887400 - DNA, 15 bp, Homo sapiens
atggttttctgtacc

SEQ ID NO: 887401 - DNA, 15 bp, Homo sapiens
aatggttttctgtac

SEQ ID NO: 887402 - DNA, 15 bp, Homo sapiens
taatggttttctgta

SEQ ID NO: 887403 - DNA, 15 bp, Homo sapiens
ataatggttttctgt

SEQ ID NO: 887404 - DNA, 15 bp, Homo sapiens
aataatggttttctg

SEQ ID NO: 887405 - DNA, 15 bp, Homo sapiens
caataatggttttct

SEQ ID NO: 887406 - DNA, 15 bp, Homo sapiens
acaataatggttttc

SEQ ID NO: 887407 - DNA, 15 bp, Homo sapiens
cacaataatggtttt

SEQ ID NO: 887408 - DNA, 15 bp, Homo sapiens
gcacaataatggttt

SEQ ID NO: 887409 - DNA, 15 bp, Homo sapiens
agcacaataatggtt

SEQ ID NO: 887410 - DNA, 15 bp, Homo sapiens
aagcacaataatggt

SEQ ID NO: 887411 - DNA, 15 bp, Homo sapiens
aaagcacaataatgg

SEQ ID NO: 887412 - DNA, 15 bp, Homo sapiens
gaaagcacaataatg

SEQ ID NO: 887413 - DNA, 15 bp, Homo sapiens
tgaaagcacaataat

SEQ ID NO: 887414 - DNA, 15 bp, Homo sapiens
ttgaaagcacaataa

SEQ ID NO: 887415 - DNA, 15 bp, Homo sapiens
attgaaagcacaata

SEQ ID NO: 887416 - DNA, 15 bp, Homo sapiens
tattgaaagcacaat

SEQ ID NO: 887417 - DNA, 15 bp, Homo sapiens
atattgaaagcacaa

SEQ ID NO: 887418 - DNA, 15 bp, Homo sapiens
aatattgaaagcaca

SEQ ID NO: 887419 - DNA, 15 bp, Homo sapiens
caatattgaaagcac

SEQ ID NO: 887420 - DNA, 15 bp, Homo sapiens
acaatattgaaagca

SEQ ID NO: 887421 - DNA, 15 bp, Homo sapiens
aacaatattgaaagc

SEQ ID NO: 887422 - DNA, 15 bp, Homo sapiens
caacaatattgaaag

SEQ ID NO: 887423 - DNA, 15 bp, Homo sapiens
tcaacaatattgaaa

SEQ ID NO: 887424 - DNA, 15 bp, Homo sapiens
ttcaacaatattgaa

SEQ ID NO: 887425 - DNA, 15 bp, Homo sapiens
tttcaacaatattga

SEQ ID NO: 887426 - DNA, 15 bp, Homo sapiens
gtttcaacaatattg

SEQ ID NO: 887427 - DNA, 15 bp, Homo sapiens
ggtttcaacaatatt

SEQ ID NO: 887428 - DNA, 15 bp, Homo sapiens
gggtttcaacaatat

SEQ ID NO: 887429 - DNA, 15 bp, Homo sapiens
agggtttcaacaata

SEQ ID NO: 887430 - DNA, 15 bp, Homo sapiens
tagggtttcaacaat

SEQ ID NO: 887431 - DNA, 15 bp, Homo sapiens
atagggtttcaacaa

SEQ ID NO: 887432 - DNA, 15 bp, Homo sapiens
aatagggtttcaaca

SEQ ID NO: 887433 - DNA, 15 bp, Homo sapiens
aaatagggtttcaac

SEQ ID NO: 887434 - DNA, 15 bp, Homo sapiens
caaatagggtttcaa

SEQ ID NO: 887435 - DNA, 15 bp, Homo sapiens
acaaatagggtttca

SEQ ID NO: 887436 - DNA, 15 bp, Homo sapiens
tacaaatagggtttc

SEQ ID NO: 887437 - DNA, 15 bp, Homo sapiens
atacaaatagggttt

SEQ ID NO: 887438 - DNA, 15 bp, Homo sapiens
gatacaaatagggtt

SEQ ID NO: 887439 - DNA, 15 bp, Homo sapiens
ggatacaaatagggt

SEQ ID NO: 887440 - DNA, 15 bp, Homo sapiens
cggatacaaataggg

SEQ ID NO: 887441 - DNA, 15 bp, Homo sapiens
acggatacaaatagg

SEQ ID NO: 887442 - DNA, 15 bp, Homo sapiens
aacggatacaaatag

SEQ ID NO: 887443 - DNA, 15 bp, Homo sapiens
aaacggatacaaata

SEQ ID NO: 887444 - DNA, 15 bp, Homo sapiens
aaaacggatacaaat

SEQ ID NO: 887445 - DNA, 15 bp, Homo sapiens
caaaacggatacaaa

SEQ ID NO: 887446 - DNA, 15 bp, Homo sapiens
tcaaaacggatacaa

SEQ ID NO: 887447 - DNA, 15 bp, Homo sapiens
atcaaaacggataca

SEQ ID NO: 887448 - DNA, 15 bp, Homo sapiens
tatcaaaacggatac

SEQ ID NO: 887449 - DNA, 15 bp, Homo sapiens
atatcaaaacggata

SEQ ID NO: 887450 - DNA, 15 bp, Homo sapiens
catatcaaaacggat

SEQ ID NO: 887451 - DNA, 15 bp, Homo sapiens
gcatatcaaaacgga

SEQ ID NO: 887452 - DNA, 15 bp, Homo sapiens
tgcatatcaaaacgg

SEQ ID NO: 887453 - DNA, 15 bp, Homo sapiens
ttgcatatcaaaacg

SEQ ID NO: 887454 - DNA, 15 bp, Homo sapiens
gttgcatatcaaaac

SEQ ID NO: 887455 - DNA, 15 bp, Homo sapiens
ggttgcatatcaaaa

SEQ ID NO: 887456 - DNA, 15 bp, Homo sapiens
aggttgcatatcaaa

SEQ ID NO: 887457 - DNA, 15 bp, Homo sapiens
caggttgcatatcaa

SEQ ID NO: 887458 - DNA, 15 bp, Homo sapiens
ccaggttgcatatca

SEQ ID NO: 887459 - DNA, 15 bp, Homo sapiens
cccaggttgcatatc

SEQ ID NO: 887460 - DNA, 15 bp, Homo sapiens
tcccaggttgcatat

SEQ ID NO: 887461 - DNA, 15 bp, Homo sapiens
ttcccaggttgcata

SEQ ID NO: 887462 - DNA, 15 bp, Homo sapiens
gttcccaggttgcat

SEQ ID NO: 887463 - DNA, 15 bp, Homo sapiens
agttcccaggttgca

SEQ ID NO: 887464 - DNA, 15 bp, Homo sapiens
gagttcccaggttgc

SEQ ID NO: 887465 - DNA, 15 bp, Homo sapiens
tgagttcccaggttg

SEQ ID NO: 887466 - DNA, 15 bp, Homo sapiens
atgagttcccaggtt

SEQ ID NO: 887467 - DNA, 15 bp, Homo sapiens
aatgagttcccaggt

SEQ ID NO: 887468 - DNA, 15 bp, Homo sapiens
gaatgagttcccagg

SEQ ID NO: 887469 - DNA, 15 bp, Homo sapiens
agaatgagttcccag

SEQ ID NO: 887470 - DNA, 15 bp, Homo sapiens
gagaatgagttccca

SEQ ID NO: 887471 - DNA, 15 bp, Homo sapiens
ggagaatgagttccc

SEQ ID NO: 887472 - DNA, 15 bp, Homo sapiens
tggagaatgagttcc

SEQ ID NO: 887473 - DNA, 15 bp, Homo sapiens
ctggagaatgagttc

SEQ ID NO: 887474 - DNA, 15 bp, Homo sapiens
actggagaatgagtt

SEQ ID NO: 887475 - DNA, 15 bp, Homo sapiens
cactggagaatgagt

SEQ ID NO: 887476 - DNA, 15 bp, Homo sapiens
tcactggagaatgag

SEQ ID NO: 887477 - DNA, 15 bp, Homo sapiens
atcactggagaatga

SEQ ID NO: 887478 - DNA, 15 bp, Homo sapiens
aatcactggagaatg

SEQ ID NO: 887479 - DNA, 15 bp, Homo sapiens
caatcactggagaat

SEQ ID NO: 887480 - DNA, 15 bp, Homo sapiens
ccaatcactggagaa

SEQ ID NO: 887481 - DNA, 15 bp, Homo sapiens
accaatcactggaga

SEQ ID NO: 887482 - DNA, 15 bp, Homo sapiens
taccaatcactggag

SEQ ID NO: 887483 - DNA, 15 bp, Homo sapiens
gtaccaatcactgga

SEQ ID NO: 887484 - DNA, 15 bp, Homo sapiens
ggtaccaatcactgg

SEQ ID NO: 887485 - DNA, 15 bp, Homo sapiens
aggtaccaatcactg

SEQ ID NO: 887486 - DNA, 15 bp, Homo sapiens
aaggtaccaatcact

SEQ ID NO: 887487 - DNA, 15 bp, Homo sapiens
taaggtaccaatcac

SEQ ID NO: 887488 - DNA, 15 bp, Homo sapiens
ctaaggtaccaatca

SEQ ID NO: 887489 - DNA, 15 bp, Homo sapiens
gctaaggtaccaatc

SEQ ID NO: 887490 - DNA, 15 bp, Homo sapiens
tgctaaggtaccaat

SEQ ID NO: 887491 - DNA, 15 bp, Homo sapiens
ctgctaaggtaccaa

SEQ ID NO: 887492 - DNA, 15 bp, Homo sapiens
gctgctaaggtacca

SEQ ID NO: 887493 - DNA, 15 bp, Homo sapiens
agctgctaaggtacc

SEQ ID NO: 887494 - DNA, 15 bp, Homo sapiens
tagctgctaaggtac

SEQ ID NO: 887495 - DNA, 15 bp, Homo sapiens
atagctgctaaggta

SEQ ID NO: 887496 - DNA, 15 bp, Homo sapiens
catagctgctaaggt

SEQ ID NO: 887497 - DNA, 15 bp, Homo sapiens
tcatagctgctaagg

SEQ ID NO: 887498 - DNA, 15 bp, Homo sapiens
atcatagctgctaag

SEQ ID NO: 887499 - DNA, 15 bp, Homo sapiens
aatcatagctgctaa

SEQ ID NO: 887500 - DNA, 15 bp, Homo sapiens
aaatcatagctgcta

SEQ ID NO: 887501 - DNA, 15 bp, Homo sapiens
caaatcatagctgct

SEQ ID NO: 887502 - DNA, 15 bp, Homo sapiens
tcaaatcatagctgc

SEQ ID NO: 887503 - DNA, 15 bp, Homo sapiens
atcaaatcatagctg

SEQ ID NO: 887504 - DNA, 15 bp, Homo sapiens
catcaaatcatagct

SEQ ID NO: 887505 - DNA, 15 bp, Homo sapiens
tcatcaaatcatagc

SEQ ID NO: 887506 - DNA, 15 bp, Homo sapiens
atcatcaaatcatag

SEQ ID NO: 887507 - DNA, 15 bp, Homo sapiens
catcatcaaatcata

SEQ ID NO: 887508 - DNA, 15 bp, Homo sapiens
ccatcatcaaatcat

SEQ ID NO: 887509 - DNA, 15 bp, Homo sapiens
gccatcatcaaatca

SEQ ID NO: 887510 - DNA, 15 bp, Homo sapiens
agccatcatcaaatc

SEQ ID NO: 887511 - DNA, 15 bp, Homo sapiens
cagccatcatcaaat

SEQ ID NO: 887512 - DNA, 15 bp, Homo sapiens
acagccatcatcaaa

SEQ ID NO: 887513 - DNA, 15 bp, Homo sapiens
cacagccatcatcaa

SEQ ID NO: 887514 - DNA, 15 bp, Homo sapiens
ccacagccatcatca

SEQ ID NO: 887515 - DNA, 15 bp, Homo sapiens
cccacagccatcatc

SEQ ID NO: 887516 - DNA, 15 bp, Homo sapiens
acccacagccatcat

SEQ ID NO: 887517 - DNA, 15 bp, Homo sapiens
aacccacagccatca

SEQ ID NO: 887518 - DNA, 15 bp, Homo sapiens
aaacccacagccatc

SEQ ID NO: 887519 - DNA, 15 bp, Homo sapiens
aaaacccacagccat

SEQ ID NO: 887520 - DNA, 15 bp, Homo sapiens
taaaacccacagcca

SEQ ID NO: 887521 - DNA, 15 bp, Homo sapiens
gtaaaacccacagcc

SEQ ID NO: 887522 - DNA, 15 bp, Homo sapiens
tgtaaaacccacagc

SEQ ID NO: 887523 - DNA, 15 bp, Homo sapiens
ctgtaaaacccacag

SEQ ID NO: 887524 - DNA, 15 bp, Homo sapiens
tctgtaaaacccaca

SEQ ID NO: 887525 - DNA, 15 bp, Homo sapiens
atctgtaaaacccac

SEQ ID NO: 887526 - DNA, 15 bp, Homo sapiens
tatctgtaaaaccca

SEQ ID NO: 887527 - DNA, 15 bp, Homo sapiens
ctatctgtaaaaccc

SEQ ID NO: 887528 - DNA, 15 bp, Homo sapiens
tctatctgtaaaacc

SEQ ID NO: 887529 - DNA, 15 bp, Homo sapiens
ttctatctgtaaaac

SEQ ID NO: 887530 - DNA, 15 bp, Homo sapiens
tttctatctgtaaaa

SEQ ID NO: 887531 - DNA, 15 bp, Homo sapiens
atttctatctgtaaa

SEQ ID NO: 887532 - DNA, 15 bp, Homo sapiens
catttctatctgtaa

SEQ ID NO: 887533 - DNA, 15 bp, Homo sapiens
ccatttctatctgta

SEQ ID NO: 887534 - DNA, 15 bp, Homo sapiens
tccatttctatctgt

SEQ ID NO: 887535 - DNA, 15 bp, Homo sapiens
ttccatttctatctg

SEQ ID NO: 887536 - DNA, 15 bp, Homo sapiens
attccatttctatct

SEQ ID NO: 887537 - DNA, 15 bp, Homo sapiens
aattccatttctatc

SEQ ID NO: 887538 - DNA, 15 bp, Homo sapiens
caattccatttctat

SEQ ID NO: 887539 - DNA, 15 bp, Homo sapiens
gcaattccatttcta

SEQ ID NO: 887540 - DNA, 15 bp, Homo sapiens
tgcaattccatttct

SEQ ID NO: 887541 - DNA, 15 bp, Homo sapiens
ttgcaattccatttc

SEQ ID NO: 887542 - DNA, 15 bp, Homo sapiens
cttgcaattccattt

SEQ ID NO: 887543 - DNA, 15 bp, Homo sapiens
acttgcaattccatt

SEQ ID NO: 887544 - DNA, 15 bp, Homo sapiens
tacttgcaattccat

SEQ ID NO: 887545 - DNA, 15 bp, Homo sapiens
gtacttgcaattcca

SEQ ID NO: 887546 - DNA, 15 bp, Homo sapiens
tgtacttgcaattcc

SEQ ID NO: 887547 - DNA, 15 bp, Homo sapiens
gtgtacttgcaattc

SEQ ID NO: 887548 - DNA, 15 bp, Homo sapiens
tgtgtacttgcaatt

SEQ ID NO: 887549 - DNA, 15 bp, Homo sapiens
atgtgtacttgcaat

SEQ ID NO: 887550 - DNA, 15 bp, Homo sapiens
tatgtgtacttgcaa

SEQ ID NO: 887551 - DNA, 15 bp, Homo sapiens
atatgtgtacttgca

SEQ ID NO: 887552 - DNA, 15 bp, Homo sapiens
gatatgtgtacttgc

SEQ ID NO: 887553 - DNA, 15 bp, Homo sapiens
agatatgtgtacttg

SEQ ID NO: 887554 - DNA, 15 bp, Homo sapiens
gagatatgtgtactt

SEQ ID NO: 887555 - DNA, 15 bp, Homo sapiens
agagatatgtgtact

SEQ ID NO: 887556 - DNA, 15 bp, Homo sapiens
cagagatatgtgtac

SEQ ID NO: 887557 - DNA, 15 bp, Homo sapiens
ccagagatatgtgta

SEQ ID NO: 887558 - DNA, 15 bp, Homo sapiens
cccagagatatgtgt

SEQ ID NO: 887559 - DNA, 15 bp, Homo sapiens
ccccagagatatgtg

SEQ ID NO: 887560 - DNA, 15 bp, Homo sapiens
tccccagagatatgt

SEQ ID NO: 887561 - DNA, 15 bp, Homo sapiens
ctccccagagatatg

SEQ ID NO: 887562 - DNA, 15 bp, Homo sapiens
tctccccagagatat

SEQ ID NO: 887563 - DNA, 15 bp, Homo sapiens
ttctccccagagata

SEQ ID NO: 887564 - DNA, 15 bp, Homo sapiens
cttctccccagagat

SEQ ID NO: 887565 - DNA, 15 bp, Homo sapiens
ccttctccccagaga

SEQ ID NO: 887566 - DNA, 15 bp, Homo sapiens
cccttctccccagag

SEQ ID NO: 887567 - DNA, 15 bp, Homo sapiens
ccccttctccccaga

SEQ ID NO: 887568 - DNA, 15 bp, Homo sapiens
gccccttctccccag

SEQ ID NO: 887569 - DNA, 15 bp, Homo sapiens
ggccccttctcccca

SEQ ID NO: 887570 - DNA, 15 bp, Homo sapiens
aggccccttctcccc

SEQ ID NO: 887571 - DNA, 15 bp, Homo sapiens
gaggccccttctccc

SEQ ID NO: 887572 - DNA, 15 bp, Homo sapiens
ggaggccccttctcc

SEQ ID NO: 887573 - DNA, 15 bp, Homo sapiens
aggaggccccttctc

SEQ ID NO: 887574 - DNA, 15 bp, Homo sapiens
caggaggccccttct

SEQ ID NO: 887575 - DNA, 15 bp, Homo sapiens
tcaggaggccccttc

SEQ ID NO: 887576 - DNA, 15 bp, Homo sapiens
atcaggaggcccctt

SEQ ID NO: 887577 - DNA, 15 bp, Homo sapiens
aatcaggaggcccct

SEQ ID NO: 887578 - DNA, 15 bp, Homo sapiens
gaatcaggaggcccc

SEQ ID NO: 887579 - DNA, 15 bp, Homo sapiens
ggaatcaggaggccc

SEQ ID NO: 887580 - DNA, 15 bp, Homo sapiens
tggaatcaggaggcc

SEQ ID NO: 887581 - DNA, 15 bp, Homo sapiens
ttggaatcaggaggc

SEQ ID NO: 887582 - DNA, 15 bp, Homo sapiens
cttggaatcaggagg

SEQ ID NO: 887583 - DNA, 15 bp, Homo sapiens
ccttggaatcaggag

SEQ ID NO: 887584 - DNA, 15 bp, Homo sapiens
gccttggaatcagga

SEQ ID NO: 887585 - DNA, 15 bp, Homo sapiens
agccttggaatcagg

SEQ ID NO: 887586 - DNA, 15 bp, Homo sapiens
cagccttggaatcag

SEQ ID NO: 887587 - DNA, 15 bp, Homo sapiens
tcagccttggaatca

SEQ ID NO: 887588 - DNA, 15 bp, Homo sapiens
gtcagccttggaatc

SEQ ID NO: 887589 - DNA, 15 bp, Homo sapiens
ggtcagccttggaat

SEQ ID NO: 887590 - DNA, 15 bp, Homo sapiens
aggtcagccttggaa

SEQ ID NO: 887591 - DNA, 15 bp, Homo sapiens
taggtcagccttgga

SEQ ID NO: 887592 - DNA, 15 bp, Homo sapiens
ataggtcagccttgg

SEQ ID NO: 887593 - DNA, 15 bp, Homo sapiens
cataggtcagccttg

SEQ ID NO: 887594 - DNA, 15 bp, Homo sapiens
gcataggtcagcctt

SEQ ID NO: 887595 - DNA, 15 bp, Homo sapiens
tgcataggtcagcct

SEQ ID NO: 887596 - DNA, 15 bp, Homo sapiens
atgcataggtcagcc

SEQ ID NO: 887597 - DNA, 15 bp, Homo sapiens
catgcataggtcagc

SEQ ID NO: 887598 - DNA, 15 bp, Homo sapiens
gcatgcataggtcag

SEQ ID NO: 887599 - DNA, 15 bp, Homo sapiens
tgcatgcataggtca

SEQ ID NO: 887600 - DNA, 15 bp, Homo sapiens
ctgcatgcataggtc

SEQ ID NO: 887601 - DNA, 15 bp, Homo sapiens
gctgcatgcataggt

SEQ ID NO: 887602 - DNA, 15 bp, Homo sapiens
ggctgcatgcatagg

SEQ ID NO: 887603 - DNA, 15 bp, Homo sapiens
aggctgcatgcatag

SEQ ID NO: 887604 - DNA, 15 bp, Homo sapiens
aaggctgcatgcata

SEQ ID NO: 887605 - DNA, 15 bp, Homo sapiens
caaggctgcatgcat

SEQ ID NO: 887606 - DNA, 15 bp, Homo sapiens
acaaggctgcatgca

SEQ ID NO: 887607 - DNA, 15 bp, Homo sapiens
cacaaggctgcatgc

SEQ ID NO: 887608 - DNA, 15 bp, Homo sapiens
tcacaaggctgcatg

SEQ ID NO: 887609 - DNA, 15 bp, Homo sapiens
ctcacaaggctgcat

SEQ ID NO: 887610 - DNA, 15 bp, Homo sapiens
actcacaaggctgca

SEQ ID NO: 887611 - DNA, 15 bp, Homo sapiens
tactcacaaggctgc

SEQ ID NO: 887612 - DNA, 15 bp, Homo sapiens
atactcacaaggctg

SEQ ID NO: 887613 - DNA, 15 bp, Homo sapiens
catactcacaaggct

SEQ ID NO: 887614 - DNA, 15 bp, Homo sapiens
gcatactcacaaggc

SEQ ID NO: 887615 - DNA, 15 bp, Homo sapiens
tgcatactcacaagg

SEQ ID NO: 887616 - DNA, 15 bp, Homo sapiens
ttgcatactcacaag

SEQ ID NO: 887617 - DNA, 15 bp, Homo sapiens
tttgcatactcacaa

SEQ ID NO: 887618 - DNA, 15 bp, Homo sapiens
gtttgcatactcaca

SEQ ID NO: 887619 - DNA, 15 bp, Homo sapiens
tgtttgcatactcac

SEQ ID NO: 887620 - DNA, 15 bp, Homo sapiens
gtgtttgcatactca

SEQ ID NO: 887621 - DNA, 15 bp, Homo sapiens
tgtgtttgcatactc

SEQ ID NO: 887622 - DNA, 15 bp, Homo sapiens
atgtgtttgcatact

SEQ ID NO: 887623 - DNA, 15 bp, Homo sapiens
catgtgtttgcatac

SEQ ID NO: 887624 - DNA, 15 bp, Homo sapiens
gcatgtgtttgcata

SEQ ID NO: 887625 - DNA, 15 bp, Homo sapiens
ggcatgtgtttgcat

SEQ ID NO: 887626 - DNA, 15 bp, Homo sapiens
tggcatgtgtttgca

SEQ ID NO: 887627 - DNA, 15 bp, Homo sapiens
ctggcatgtgtttgc

SEQ ID NO: 887628 - DNA, 15 bp, Homo sapiens
tctggcatgtgtttg

SEQ ID NO: 887629 - DNA, 15 bp, Homo sapiens
ttctggcatgtgttt

SEQ ID NO: 887630 - DNA, 15 bp, Homo sapiens
tttctggcatgtgtt

SEQ ID NO: 887631 - DNA, 15 bp, Homo sapiens
ctttctggcatgtgt

SEQ ID NO: 887632 - DNA, 15 bp, Homo sapiens
actttctggcatgtg

SEQ ID NO: 887633 - DNA, 15 bp, Homo sapiens
cactttctggcatgt

SEQ ID NO: 887634 - DNA, 15 bp, Homo sapiens
acactttctggcatg

SEQ ID NO: 887635 - DNA, 15 bp, Homo sapiens
cacactttctggcat

SEQ ID NO: 887636 - DNA, 15 bp, Homo sapiens
ccacactttctggca

SEQ ID NO: 887637 - DNA, 15 bp, Homo sapiens
accacactttctggc

SEQ ID NO: 887638 - DNA, 15 bp, Homo sapiens
aaccacactttctgg

SEQ ID NO: 887639 - DNA, 15 bp, Homo sapiens
caaccacactttctg

SEQ ID NO: 887640 - DNA, 15 bp, Homo sapiens
ccaaccacactttct

SEQ ID NO: 887641 - DNA, 15 bp, Homo sapiens
gccaaccacactttc

SEQ ID NO: 887642 - DNA, 15 bp, Homo sapiens
agccaaccacacttt

SEQ ID NO: 887643 - DNA, 15 bp, Homo sapiens
gagccaaccacactt

SEQ ID NO: 887644 - DNA, 15 bp, Homo sapiens
ggagccaaccacact

SEQ ID NO: 887645 - DNA, 15 bp, Homo sapiens
gggagccaaccacac

SEQ ID NO: 887646 - DNA, 15 bp, Homo sapiens
tgggagccaaccaca

SEQ ID NO: 887647 - DNA, 15 bp, Homo sapiens
gtgggagccaaccac

SEQ ID NO: 887648 - DNA, 15 bp, Homo sapiens
cgtgggagccaacca

SEQ ID NO: 887649 - DNA, 15 bp, Homo sapiens
acgtgggagccaacc

SEQ ID NO: 887650 - DNA, 15 bp, Homo sapiens
gacgtgggagccaac

SEQ ID NO: 887651 - DNA, 15 bp, Homo sapiens
tgacgtgggagccaa

SEQ ID NO: 887652 - DNA, 15 bp, Homo sapiens
atgacgtgggagcca

SEQ ID NO: 887653 - DNA, 15 bp, Homo sapiens
gatgacgtgggagcc

SEQ ID NO: 887654 - DNA, 15 bp, Homo sapiens
agatgacgtgggagc

SEQ ID NO: 887655 - DNA, 15 bp, Homo sapiens
tagatgacgtgggag

SEQ ID NO: 887656 - DNA, 15 bp, Homo sapiens
atagatgacgtggga

SEQ ID NO: 887657 - DNA, 15 bp, Homo sapiens
aatagatgacgtggg

SEQ ID NO: 887658 - DNA, 15 bp, Homo sapiens
caatagatgacgtgg

SEQ ID NO: 887659 - DNA, 15 bp, Homo sapiens
tcaatagatgacgtg

SEQ ID NO: 887660 - DNA, 15 bp, Homo sapiens
gtcaatagatgacgt

SEQ ID NO: 887661 - DNA, 15 bp, Homo sapiens
ggtcaatagatgacg

SEQ ID NO: 887662 - DNA, 15 bp, Homo sapiens
tggtcaatagatgac

SEQ ID NO: 887663 - DNA, 15 bp, Homo sapiens
gtggtcaatagatga

SEQ ID NO: 887664 - DNA, 15 bp, Homo sapiens
ggtggtcaatagatg

SEQ ID NO: 887665 - DNA, 15 bp, Homo sapiens
aggtggtcaatagat

SEQ ID NO: 887666 - DNA, 15 bp, Homo sapiens
aaggtggtcaataga

SEQ ID NO: 887667 - DNA, 15 bp, Homo sapiens
taaggtggtcaatag

SEQ ID NO: 887668 - DNA, 15 bp, Homo sapiens
gtaaggtggtcaata

SEQ ID NO: 887669 - DNA, 15 bp, Homo sapiens
agtaaggtggtcaat

SEQ ID NO: 887670 - DNA, 15 bp, Homo sapiens
aagtaaggtggtcaa

SEQ ID NO: 887671 - DNA, 15 bp, Homo sapiens
caagtaaggtggtca

SEQ ID NO: 887672 - DNA, 15 bp, Homo sapiens
tcaagtaaggtggtc

SEQ ID NO: 887673 - DNA, 15 bp, Homo sapiens
ttcaagtaaggtggt

SEQ ID NO: 887674 - DNA, 15 bp, Homo sapiens
tttcaagtaaggtgg

SEQ ID NO: 887675 - DNA, 15 bp, Homo sapiens
ctttcaagtaaggtg

SEQ ID NO: 887676 - DNA, 15 bp, Homo sapiens
actttcaagtaaggt

SEQ ID NO: 887677 - DNA, 15 bp, Homo sapiens
tactttcaagtaagg

SEQ ID NO: 887678 - DNA, 15 bp, Homo sapiens
ttactttcaagtaag

SEQ ID NO: 887679 - DNA, 15 bp, Homo sapiens
attactttcaagtaa

SEQ ID NO: 887680 - DNA, 15 bp, Homo sapiens
aattactttcaagta

SEQ ID NO: 887681 - DNA, 15 bp, Homo sapiens
caattactttcaagt

SEQ ID NO: 887682 - DNA, 15 bp, Homo sapiens
ccaattactttcaag

SEQ ID NO: 887683 - DNA, 15 bp, Homo sapiens
tccaattactttcaa

SEQ ID NO: 887684 - DNA, 15 bp, Homo sapiens
ttccaattactttca

SEQ ID NO: 887685 - DNA, 15 bp, Homo sapiens
attccaattactttc

SEQ ID NO: 887686 - DNA, 15 bp, Homo sapiens
cattccaattacttt

SEQ ID NO: 887687 - DNA, 15 bp, Homo sapiens
tcattccaattactt

SEQ ID NO: 887688 - DNA, 15 bp, Homo sapiens
ttcattccaattact

SEQ ID NO: 887689 - DNA, 15 bp, Homo sapiens
attcattccaattac

SEQ ID NO: 887690 - DNA, 15 bp, Homo sapiens
aattcattccaatta

SEQ ID NO: 887691 - DNA, 15 bp, Homo sapiens
taattcattccaatt

SEQ ID NO: 887692 - DNA, 15 bp, Homo sapiens
gtaattcattccaat

SEQ ID NO: 887693 - DNA, 15 bp, Homo sapiens
agtaattcattccaa

SEQ ID NO: 887694 - DNA, 15 bp, Homo sapiens
gagtaattcattcca

SEQ ID NO: 887695 - DNA, 15 bp, Homo sapiens
ggagtaattcattcc

SEQ ID NO: 887696 - DNA, 15 bp, Homo sapiens
aggagtaattcattc

SEQ ID NO: 887697 - DNA, 15 bp, Homo sapiens
aaggagtaattcatt

SEQ ID NO: 887698 - DNA, 15 bp, Homo sapiens
aaaggagtaattcat

SEQ ID NO: 887699 - DNA, 15 bp, Homo sapiens
gaaaggagtaattca

SEQ ID NO: 887700 - DNA, 15 bp, Homo sapiens
agaaaggagtaattc

SEQ ID NO: 887701 - DNA, 15 bp, Homo sapiens
gagaaaggagtaatt

SEQ ID NO: 887702 - DNA, 15 bp, Homo sapiens
ggagaaaggagtaat

SEQ ID NO: 887703 - DNA, 15 bp, Homo sapiens
gggagaaaggagtaa

SEQ ID NO: 887704 - DNA, 15 bp, Homo sapiens
agggagaaaggagta

SEQ ID NO: 887705 - DNA, 15 bp, Homo sapiens
aagggagaaaggagt

SEQ ID NO: 887706 - DNA, 15 bp, Homo sapiens
caagggagaaaggag

SEQ ID NO: 887707 - DNA, 15 bp, Homo sapiens
ccaagggagaaagga

SEQ ID NO: 887708 - DNA, 15 bp, Homo sapiens
gccaagggagaaagg

SEQ ID NO: 887709 - DNA, 15 bp, Homo sapiens
agccaagggagaaag

SEQ ID NO: 887710 - DNA, 15 bp, Homo sapiens
cagccaagggagaaa

SEQ ID NO: 887711 - DNA, 15 bp, Homo sapiens
acagccaagggagaa

SEQ ID NO: 887712 - DNA, 15 bp, Homo sapiens
tacagccaagggaga

SEQ ID NO: 887713 - DNA, 15 bp, Homo sapiens
ctacagccaagggag

SEQ ID NO: 887714 - DNA, 15 bp, Homo sapiens
cctacagccaaggga

SEQ ID NO: 887715 - DNA, 15 bp, Homo sapiens
acctacagccaaggg

SEQ ID NO: 887716 - DNA, 15 bp, Homo sapiens
aacctacagccaagg

SEQ ID NO: 887717 - DNA, 15 bp, Homo sapiens
aaacctacagccaag

SEQ ID NO: 887718 - DNA, 15 bp, Homo sapiens
aaaacctacagccaa

SEQ ID NO: 887719 - DNA, 15 bp, Homo sapiens
taaaacctacagcca

SEQ ID NO: 887720 - DNA, 15 bp, Homo sapiens
ctaaaacctacagcc

SEQ ID NO: 887721 - DNA, 15 bp, Homo sapiens
tctaaaacctacagc

SEQ ID NO: 887722 - DNA, 15 bp, Homo sapiens
atctaaaacctacag

SEQ ID NO: 887723 - DNA, 15 bp, Homo sapiens
catctaaaacctaca

SEQ ID NO: 887724 - DNA, 15 bp, Homo sapiens
tcatctaaaacctac

SEQ ID NO: 887725 - DNA, 15 bp, Homo sapiens
ctcatctaaaaccta

SEQ ID NO: 887726 - DNA, 15 bp, Homo sapiens
gctcatctaaaacct

SEQ ID NO: 887727 - DNA, 15 bp, Homo sapiens
agctcatctaaaacc

SEQ ID NO: 887728 - DNA, 15 bp, Homo sapiens
tagctcatctaaaac

SEQ ID NO: 887729 - DNA, 15 bp, Homo sapiens
atagctcatctaaaa

SEQ ID NO: 887730 - DNA, 15 bp, Homo sapiens
catagctcatctaaa

SEQ ID NO: 887731 - DNA, 15 bp, Homo sapiens
tcatagctcatctaa

SEQ ID NO: 887732 - DNA, 15 bp, Homo sapiens
ttcatagctcatcta

SEQ ID NO: 887733 - DNA, 15 bp, Homo sapiens
cttcatagctcatct

SEQ ID NO: 887734 - DNA, 15 bp, Homo sapiens
ccttcatagctcatc

SEQ ID NO: 887735 - DNA, 15 bp, Homo sapiens
cccttcatagctcat

SEQ ID NO: 887736 - DNA, 15 bp, Homo sapiens
acccttcatagctca

SEQ ID NO: 887737 - DNA, 15 bp, Homo sapiens
tacccttcatagctc

SEQ ID NO: 887738 - DNA, 15 bp, Homo sapiens
ctacccttcatagct

SEQ ID NO: 887739 - DNA, 15 bp, Homo sapiens
tctacccttcatagc

SEQ ID NO: 887740 - DNA, 15 bp, Homo sapiens
ttctacccttcatag

SEQ ID NO: 887741 - DNA, 15 bp, Homo sapiens
gttctacccttcata

SEQ ID NO: 887742 - DNA, 15 bp, Homo sapiens
ggttctacccttcat

SEQ ID NO: 887743 - DNA, 15 bp, Homo sapiens
aggttctacccttca

SEQ ID NO: 887744 - DNA, 15 bp, Homo sapiens
taggttctacccttc

SEQ ID NO: 887745 - DNA, 15 bp, Homo sapiens
ctaggttctaccctt

SEQ ID NO: 887746 - DNA, 15 bp, Homo sapiens
actaggttctaccct

SEQ ID NO: 887747 - DNA, 15 bp, Homo sapiens
tactaggttctaccc

SEQ ID NO: 887748 - DNA, 15 bp, Homo sapiens
atactaggttctacc

SEQ ID NO: 887749 - DNA, 15 bp, Homo sapiens
catactaggttctac

SEQ ID NO: 887750 - DNA, 15 bp, Homo sapiens
acatactaggttcta

SEQ ID NO: 887751 - DNA, 15 bp, Homo sapiens
cacatactaggttct

SEQ ID NO: 887752 - DNA, 15 bp, Homo sapiens
gcacatactaggttc

SEQ ID NO: 887753 - DNA, 15 bp, Homo sapiens
tgcacatactaggtt

SEQ ID NO: 887754 - DNA, 15 bp, Homo sapiens
ttgcacatactaggt

SEQ ID NO: 887755 - DNA, 15 bp, Homo sapiens
tttgcacatactagg

SEQ ID NO: 887756 - DNA, 15 bp, Homo sapiens
ctttgcacatactag

SEQ ID NO: 887757 - DNA, 15 bp, Homo sapiens
actttgcacatacta

SEQ ID NO: 887758 - DNA, 15 bp, Homo sapiens
tactttgcacatact

SEQ ID NO: 887759 - DNA, 15 bp, Homo sapiens
ttactttgcacatac

SEQ ID NO: 887760 - DNA, 15 bp, Homo sapiens
attactttgcacata

SEQ ID NO: 887761 - DNA, 15 bp, Homo sapiens
aattactttgcacat

SEQ ID NO: 887762 - DNA, 15 bp, Homo sapiens
aaattactttgcaca

SEQ ID NO: 887763 - DNA, 15 bp, Homo sapiens
caaattactttgcac

SEQ ID NO: 887764 - DNA, 15 bp, Homo sapiens
ccaaattactttgca

SEQ ID NO: 887765 - DNA, 15 bp, Homo sapiens
gccaaattactttgc

SEQ ID NO: 887766 - DNA, 15 bp, Homo sapiens
agccaaattactttg

SEQ ID NO: 887767 - DNA, 15 bp, Homo sapiens
gagccaaattacttt

SEQ ID NO: 887768 - DNA, 15 bp, Homo sapiens
tgagccaaattactt

SEQ ID NO: 887769 - DNA, 15 bp, Homo sapiens
gtgagccaaattact

SEQ ID NO: 887770 - DNA, 15 bp, Homo sapiens
tgtgagccaaattac

SEQ ID NO: 887771 - DNA, 15 bp, Homo sapiens
ctgtgagccaaatta

SEQ ID NO: 887772 - DNA, 15 bp, Homo sapiens
gctgtgagccaaatt

SEQ ID NO: 887773 - DNA, 15 bp, Homo sapiens
tgctgtgagccaaat

SEQ ID NO: 887774 - DNA, 15 bp, Homo sapiens
atgctgtgagccaaa

SEQ ID NO: 887775 - DNA, 15 bp, Homo sapiens
aatgctgtgagccaa

SEQ ID NO: 887776 - DNA, 15 bp, Homo sapiens
aaatgctgtgagcca

SEQ ID NO: 887777 - DNA, 15 bp, Homo sapiens
caaatgctgtgagcc

SEQ ID NO: 887778 - DNA, 15 bp, Homo sapiens
ccaaatgctgtgagc

SEQ ID NO: 887779 - DNA, 15 bp, Homo sapiens
cccaaatgctgtgag

SEQ ID NO: 887780 - DNA, 15 bp, Homo sapiens
gcccaaatgctgtga

SEQ ID NO: 887781 - DNA, 15 bp, Homo sapiens
agcccaaatgctgtg

SEQ ID NO: 887782 - DNA, 15 bp, Homo sapiens
cagcccaaatgctgt

SEQ ID NO: 887783 - DNA, 15 bp, Homo sapiens
acagcccaaatgctg

SEQ ID NO: 887784 - DNA, 15 bp, Homo sapiens
cacagcccaaatgct

SEQ ID NO: 887785 - DNA, 15 bp, Homo sapiens
tcacagcccaaatgc

SEQ ID NO: 887786 - DNA, 15 bp, Homo sapiens
atcacagcccaaatg

SEQ ID NO: 887787 - DNA, 15 bp, Homo sapiens
catcacagcccaaat

SEQ ID NO: 887788 - DNA, 15 bp, Homo sapiens
acatcacagcccaaa

SEQ ID NO: 887789 - DNA, 15 bp, Homo sapiens
tacatcacagcccaa

SEQ ID NO: 887790 - DNA, 15 bp, Homo sapiens
ctacatcacagccca

SEQ ID NO: 887791 - DNA, 15 bp, Homo sapiens
tctacatcacagccc

SEQ ID NO: 887792 - DNA, 15 bp, Homo sapiens
ttctacatcacagcc

SEQ ID NO: 887793 - DNA, 15 bp, Homo sapiens
cttctacatcacagc

SEQ ID NO: 887794 - DNA, 15 bp, Homo sapiens
ccttctacatcacag

SEQ ID NO: 887795 - DNA, 15 bp, Homo sapiens
tccttctacatcaca

SEQ ID NO: 887796 - DNA, 15 bp, Homo sapiens
ttccttctacatcac

SEQ ID NO: 887797 - DNA, 15 bp, Homo sapiens
attccttctacatca

SEQ ID NO: 887798 - DNA, 15 bp, Homo sapiens
gattccttctacatc

SEQ ID NO: 887799 - DNA, 15 bp, Homo sapiens
cgattccttctacat

SEQ ID NO: 887800 - DNA, 15 bp, Homo sapiens
ccgattccttctaca

SEQ ID NO: 887801 - DNA, 15 bp, Homo sapiens
cccgattccttctac

SEQ ID NO: 887802 - DNA, 15 bp, Homo sapiens
ccccgattccttcta

SEQ ID NO: 887803 - DNA, 15 bp, Homo sapiens
accccgattccttct

SEQ ID NO: 887804 - DNA, 15 bp, Homo sapiens
caccccgattccttc

SEQ ID NO: 887805 - DNA, 15 bp, Homo sapiens
tcaccccgattcctt

SEQ ID NO: 887806 - DNA, 15 bp, Homo sapiens
ctcaccccgattcct

SEQ ID NO: 887807 - DNA, 15 bp, Homo sapiens
tctcaccccgattcc

SEQ ID NO: 887808 - DNA, 15 bp, Homo sapiens
atctcaccccgattc

SEQ ID NO: 887809 - DNA, 15 bp, Homo sapiens
catctcaccccgatt

SEQ ID NO: 887810 - DNA, 15 bp, Homo sapiens
tcatctcaccccgat

SEQ ID NO: 887811 - DNA, 15 bp, Homo sapiens
ctcatctcaccccga

SEQ ID NO: 887812 - DNA, 15 bp, Homo sapiens
tctcatctcaccccg

SEQ ID NO: 887813 - DNA, 15 bp, Homo sapiens
ctctcatctcacccc

SEQ ID NO: 887814 - DNA, 15 bp, Homo sapiens
tctctcatctcaccc

SEQ ID NO: 887815 - DNA, 15 bp, Homo sapiens
ttctctcatctcacc

SEQ ID NO: 887816 - DNA, 15 bp, Homo sapiens
cttctctcatctcac

SEQ ID NO: 887817 - DNA, 15 bp, Homo sapiens
ccttctctcatctca

SEQ ID NO: 887818 - DNA, 15 bp, Homo sapiens
cccttctctcatctc

SEQ ID NO: 887819 - DNA, 15 bp, Homo sapiens
ccccttctctcatct

SEQ ID NO: 887820 - DNA, 15 bp, Homo sapiens
gccccttctctcatc

SEQ ID NO: 887821 - DNA, 15 bp, Homo sapiens
tgccccttctctcat

SEQ ID NO: 887822 - DNA, 15 bp, Homo sapiens
gtgccccttctctca

SEQ ID NO: 887823 - DNA, 15 bp, Homo sapiens
tgtgccccttctctc

SEQ ID NO: 887824 - DNA, 15 bp, Homo sapiens
ttgtgccccttctct

SEQ ID NO: 887825 - DNA, 15 bp, Homo sapiens
tttgtgccccttctc

SEQ ID NO: 887826 - DNA, 15 bp, Homo sapiens
atttgtgccccttct

SEQ ID NO: 887827 - DNA, 15 bp, Homo sapiens
catttgtgccccttc

SEQ ID NO: 887828 - DNA, 15 bp, Homo sapiens
ccatttgtgcccctt

SEQ ID NO: 887829 - DNA, 15 bp, Homo sapiens
gccatttgtgcccct

SEQ ID NO: 887830 - DNA, 15 bp, Homo sapiens
ggccatttgtgcccc

SEQ ID NO: 887831 - DNA, 15 bp, Homo sapiens
aggccatttgtgccc

SEQ ID NO: 887832 - DNA, 15 bp, Homo sapiens
taggccatttgtgcc

SEQ ID NO: 887833 - DNA, 15 bp, Homo sapiens
ataggccatttgtgc

SEQ ID NO: 887834 - DNA, 15 bp, Homo sapiens
cataggccatttgtg

SEQ ID NO: 887835 - DNA, 15 bp, Homo sapiens
ccataggccatttgt

SEQ ID NO: 887836 - DNA, 15 bp, Homo sapiens
cccataggccatttg

SEQ ID NO: 887837 - DNA, 15 bp, Homo sapiens
tcccataggccattt

SEQ ID NO: 887838 - DNA, 15 bp, Homo sapiens
atcccataggccatt

SEQ ID NO: 887839 - DNA, 15 bp, Homo sapiens
catcccataggccat

SEQ ID NO: 887840 - DNA, 15 bp, Homo sapiens
gcatcccataggcca

SEQ ID NO: 887841 - DNA, 15 bp, Homo sapiens
tgcatcccataggcc

SEQ ID NO: 887842 - DNA, 15 bp, Homo sapiens
ctgcatcccataggc

SEQ ID NO: 887843 - DNA, 15 bp, Homo sapiens
gctgcatcccatagg

SEQ ID NO: 887844 - DNA, 15 bp, Homo sapiens
tgctgcatcccatag

SEQ ID NO: 887845 - DNA, 15 bp, Homo sapiens
ctgctgcatcccata

SEQ ID NO: 887846 - DNA, 15 bp, Homo sapiens
cctgctgcatcccat

SEQ ID NO: 887847 - DNA, 15 bp, Homo sapiens
ccctgctgcatccca

SEQ ID NO: 887848 - DNA, 15 bp, Homo sapiens
tccctgctgcatccc

SEQ ID NO: 887849 - DNA, 15 bp, Homo sapiens
ttccctgctgcatcc

SEQ ID NO: 887850 - DNA, 15 bp, Homo sapiens
attccctgctgcatc

SEQ ID NO: 887851 - DNA, 15 bp, Homo sapiens
tattccctgctgcat

SEQ ID NO: 887852 - DNA, 15 bp, Homo sapiens
gtattccctgctgca

SEQ ID NO: 887853 - DNA, 15 bp, Homo sapiens
agtattccctgctgc

SEQ ID NO: 887854 - DNA, 15 bp, Homo sapiens
cagtattccctgctg

SEQ ID NO: 887855 - DNA, 15 bp, Homo sapiens
tcagtattccctgct

SEQ ID NO: 887856 - DNA, 15 bp, Homo sapiens
atcagtattccctgc

SEQ ID NO: 887857 - DNA, 15 bp, Homo sapiens
gatcagtattccctg

SEQ ID NO: 887858 - DNA, 15 bp, Homo sapiens
ggatcagtattccct

SEQ ID NO: 887859 - DNA, 15 bp, Homo sapiens
aggatcagtattccc

SEQ ID NO: 887860 - DNA, 15 bp, Homo sapiens
caggatcagtattcc

SEQ ID NO: 887861 - DNA, 15 bp, Homo sapiens
tcaggatcagtattc

SEQ ID NO: 887862 - DNA, 15 bp, Homo sapiens
atcaggatcagtatt

SEQ ID NO: 887863 - DNA, 15 bp, Homo sapiens
aatcaggatcagtat

SEQ ID NO: 887864 - DNA, 15 bp, Homo sapiens
aaatcaggatcagta

SEQ ID NO: 887865 - DNA, 15 bp, Homo sapiens
taaatcaggatcagt

SEQ ID NO: 887866 - DNA, 15 bp, Homo sapiens
ttaaatcaggatcag

SEQ ID NO: 887867 - DNA, 15 bp, Homo sapiens
gttaaatcaggatca

SEQ ID NO: 887868 - DNA, 15 bp, Homo sapiens
tgttaaatcaggatc

SEQ ID NO: 887869 - DNA, 15 bp, Homo sapiens
ctgttaaatcaggat

SEQ ID NO: 887870 - DNA, 15 bp, Homo sapiens
actgttaaatcagga

SEQ ID NO: 887871 - DNA, 15 bp, Homo sapiens
cactgttaaatcagg

SEQ ID NO: 887872 - DNA, 15 bp, Homo sapiens
tcactgttaaatcag

SEQ ID NO: 887873 - DNA, 15 bp, Homo sapiens
ataaaagtttttcag

SEQ ID NO: 887874 - DNA, 15 bp, Homo sapiens
taaaagtttttcagt

SEQ ID NO: 887875 - DNA, 15 bp, Homo sapiens
aaaagtttttcagtt

SEQ ID NO: 887876 - DNA, 15 bp, Homo sapiens
aaagtttttcagttt

SEQ ID NO: 887877 - DNA, 15 bp, Homo sapiens
aagtttttcagtttc

SEQ ID NO: 887878 - DNA, 15 bp, Homo sapiens
agtttttcagtttct

SEQ ID NO: 887879 - DNA, 15 bp, Homo sapiens
gtttttcagtttctt

SEQ ID NO: 887880 - DNA, 15 bp, Homo sapiens
tttttcagtttctta

SEQ ID NO: 887881 - DNA, 15 bp, Homo sapiens
ttttcagtttcttaa

SEQ ID NO: 887882 - DNA, 15 bp, Homo sapiens
tttcagtttcttaat

SEQ ID NO: 887883 - DNA, 15 bp, Homo sapiens
ttcagtttcttaatt

SEQ ID NO: 887884 - DNA, 15 bp, Homo sapiens
tcagtttcttaattg

SEQ ID NO: 887885 - DNA, 15 bp, Homo sapiens
cagtttcttaattgc

SEQ ID NO: 887886 - DNA, 15 bp, Homo sapiens
agtttcttaattgcg

SEQ ID NO: 887887 - DNA, 15 bp, Homo sapiens
gtttcttaattgcga

SEQ ID NO: 887888 - DNA, 15 bp, Homo sapiens
tttcttaattgcgaa

SEQ ID NO: 887889 - DNA, 15 bp, Homo sapiens
ttcttaattgcgaaa

SEQ ID NO: 887890 - DNA, 15 bp, Homo sapiens
tcttaattgcgaaag

SEQ ID NO: 887891 - DNA, 15 bp, Homo sapiens
cttaattgcgaaagt

SEQ ID NO: 887892 - DNA, 15 bp, Homo sapiens
ttaattgcgaaagtt

SEQ ID NO: 887893 - DNA, 15 bp, Homo sapiens
taattgcgaaagttc

SEQ ID NO: 887894 - DNA, 15 bp, Homo sapiens
aattgcgaaagttcc

SEQ ID NO: 887895 - DNA, 15 bp, Homo sapiens
attgcgaaagttccc

SEQ ID NO: 887896 - DNA, 15 bp, Homo sapiens
ttgcgaaagttcccc

SEQ ID NO: 887897 - DNA, 15 bp, Homo sapiens
tgcgaaagttcccca

SEQ ID NO: 887898 - DNA, 15 bp, Homo sapiens
gcgaaagttccccac

SEQ ID NO: 887899 - DNA, 15 bp, Homo sapiens
cgaaagttccccacc

SEQ ID NO: 887900 - DNA, 15 bp, Homo sapiens
gaaagttccccaccc

SEQ ID NO: 887901 - DNA, 15 bp, Homo sapiens
aaagttccccaccca

SEQ ID NO: 887902 - DNA, 15 bp, Homo sapiens
aagttccccacccaa

SEQ ID NO: 887903 - DNA, 15 bp, Homo sapiens
agttccccacccaaa

SEQ ID NO: 887904 - DNA, 15 bp, Homo sapiens
gttccccacccaaaa

SEQ ID NO: 887905 - DNA, 15 bp, Homo sapiens
ttccccacccaaaac

SEQ ID NO: 887906 - DNA, 15 bp, Homo sapiens
tccccacccaaaaca

SEQ ID NO: 887907 - DNA, 15 bp, Homo sapiens
ccccacccaaaacag

SEQ ID NO: 887908 - DNA, 15 bp, Homo sapiens
cccacccaaaacagc

SEQ ID NO: 887909 - DNA, 15 bp, Homo sapiens
ccacccaaaacagct

SEQ ID NO: 887910 - DNA, 15 bp, Homo sapiens
cacccaaaacagctt

SEQ ID NO: 887911 - DNA, 15 bp, Homo sapiens
acccaaaacagctta

SEQ ID NO: 887912 - DNA, 15 bp, Homo sapiens
cccaaaacagcttaa

SEQ ID NO: 887913 - DNA, 15 bp, Homo sapiens
ccaaaacagcttaag

SEQ ID NO: 887914 - DNA, 15 bp, Homo sapiens
caaaacagcttaaga

SEQ ID NO: 887915 - DNA, 15 bp, Homo sapiens
aaaacagcttaagag

SEQ ID NO: 887916 - DNA, 15 bp, Homo sapiens
aaacagcttaagaga

SEQ ID NO: 887917 - DNA, 15 bp, Homo sapiens
aacagcttaagagaa

SEQ ID NO: 887918 - DNA, 15 bp, Homo sapiens
acagcttaagagaag

SEQ ID NO: 887919 - DNA, 15 bp, Homo sapiens
cagcttaagagaagg

SEQ ID NO: 887920 - DNA, 15 bp, Homo sapiens
agcttaagagaaggt

SEQ ID NO: 887921 - DNA, 15 bp, Homo sapiens
gcttaagagaaggtt

SEQ ID NO: 887922 - DNA, 15 bp, Homo sapiens
cttaagagaaggtta

SEQ ID NO: 887923 - DNA, 15 bp, Homo sapiens
ttaagagaaggttaa

SEQ ID NO: 887924 - DNA, 15 bp, Homo sapiens
taagagaaggttaat

SEQ ID NO: 887925 - DNA, 15 bp, Homo sapiens
aagagaaggttaatt

SEQ ID NO: 887926 - DNA, 15 bp, Homo sapiens
agagaaggttaatta

SEQ ID NO: 887927 - DNA, 15 bp, Homo sapiens
gagaaggttaattac

SEQ ID NO: 887928 - DNA, 15 bp, Homo sapiens
agaaggttaattaca

SEQ ID NO: 887929 - DNA, 15 bp, Homo sapiens
gaaggttaattacag

SEQ ID NO: 887930 - DNA, 15 bp, Homo sapiens
aaggttaattacagc

SEQ ID NO: 887931 - DNA, 15 bp, Homo sapiens
aggttaattacagcg

SEQ ID NO: 887932 - DNA, 15 bp, Homo sapiens
ggttaattacagcga

SEQ ID NO: 887933 - DNA, 15 bp, Homo sapiens
gttaattacagcgac

SEQ ID NO: 887934 - DNA, 15 bp, Homo sapiens
ttaattacagcgaca

SEQ ID NO: 887935 - DNA, 15 bp, Homo sapiens
taattacagcgacat

SEQ ID NO: 887936 - DNA, 15 bp, Homo sapiens
aattacagcgacatg

SEQ ID NO: 887937 - DNA, 15 bp, Homo sapiens
attacagcgacatgg

SEQ ID NO: 887938 - DNA, 15 bp, Homo sapiens
ttacagcgacatggt

SEQ ID NO: 887939 - DNA, 15 bp, Homo sapiens
tacagcgacatggta

SEQ ID NO: 887940 - DNA, 15 bp, Homo sapiens
acagcgacatggtaa

SEQ ID NO: 887941 - DNA, 15 bp, Homo sapiens
cagcgacatggtaaa

SEQ ID NO: 887942 - DNA, 15 bp, Homo sapiens
agcgacatggtaaag

SEQ ID NO: 887943 - DNA, 15 bp, Homo sapiens
gcgacatggtaaaga

SEQ ID NO: 887944 - DNA, 15 bp, Homo sapiens
cgacatggtaaagaa

SEQ ID NO: 887945 - DNA, 15 bp, Homo sapiens
gacatggtaaagaaa

SEQ ID NO: 887946 - DNA, 15 bp, Homo sapiens
acatggtaaagaaac

SEQ ID NO: 887947 - DNA, 15 bp, Homo sapiens
catggtaaagaaacc

SEQ ID NO: 887948 - DNA, 15 bp, Homo sapiens
atggtaaagaaaccc

SEQ ID NO: 887949 - DNA, 15 bp, Homo sapiens
tggtaaagaaacccc

SEQ ID NO: 887950 - DNA, 15 bp, Homo sapiens
ggtaaagaaacccca

SEQ ID NO: 887951 - DNA, 15 bp, Homo sapiens
gtaaagaaaccccaa

SEQ ID NO: 887952 - DNA, 15 bp, Homo sapiens
taaagaaaccccaac

SEQ ID NO: 887953 - DNA, 15 bp, Homo sapiens
aaagaaaccccaacc

SEQ ID NO: 887954 - DNA, 15 bp, Homo sapiens
aagaaaccccaacct

SEQ ID NO: 887955 - DNA, 15 bp, Homo sapiens
agaaaccccaacctt

SEQ ID NO: 887956 - DNA, 15 bp, Homo sapiens
gaaaccccaaccttc

SEQ ID NO: 887957 - DNA, 15 bp, Homo sapiens
aaaccccaaccttct

SEQ ID NO: 887958 - DNA, 15 bp, Homo sapiens
aaccccaaccttctc

SEQ ID NO: 887959 - DNA, 15 bp, Homo sapiens
accccaaccttctca

SEQ ID NO: 887960 - DNA, 15 bp, Homo sapiens
ccccaaccttctcaa

SEQ ID NO: 887961 - DNA, 15 bp, Homo sapiens
cccaaccttctcaaa

SEQ ID NO: 887962 - DNA, 15 bp, Homo sapiens
ccaaccttctcaaat

SEQ ID NO: 887963 - DNA, 15 bp, Homo sapiens
caaccttctcaaatg

SEQ ID NO: 887964 - DNA, 15 bp, Homo sapiens
aaccttctcaaatgc

SEQ ID NO: 887965 - DNA, 15 bp, Homo sapiens
accttctcaaatgcc

SEQ ID NO: 887966 - DNA, 15 bp, Homo sapiens
ccttctcaaatgcct

SEQ ID NO: 887967 - DNA, 15 bp, Homo sapiens
cttctcaaatgcctc

SEQ ID NO: 887968 - DNA, 15 bp, Homo sapiens
ttctcaaatgcctcc

SEQ ID NO: 887969 - DNA, 15 bp, Homo sapiens
tctcaaatgcctcct

SEQ ID NO: 887970 - DNA, 15 bp, Homo sapiens
ctcaaatgcctcctg

SEQ ID NO: 887971 - DNA, 15 bp, Homo sapiens
tcaaatgcctcctgg

SEQ ID NO: 887972 - DNA, 15 bp, Homo sapiens
caaatgcctcctgga

SEQ ID NO: 887973 - DNA, 15 bp, Homo sapiens
aaatgcctcctggag

SEQ ID NO: 887974 - DNA, 15 bp, Homo sapiens
aatgcctcctggaga

SEQ ID NO: 887975 - DNA, 15 bp, Homo sapiens
atgcctcctggagaa

SEQ ID NO: 887976 - DNA, 15 bp, Homo sapiens
tgcctcctggagaag

SEQ ID NO: 887977 - DNA, 15 bp, Homo sapiens
gcctcctggagaagc

SEQ ID NO: 887978 - DNA, 15 bp, Homo sapiens
cctcctggagaagct

SEQ ID NO: 887979 - DNA, 15 bp, Homo sapiens
ctcctggagaagctg

SEQ ID NO: 887980 - DNA, 15 bp, Homo sapiens
tcctggagaagctga

SEQ ID NO: 887981 - DNA, 15 bp, Homo sapiens
cctggagaagctgat

SEQ ID NO: 887982 - DNA, 15 bp, Homo sapiens
ctggagaagctgatg

SEQ ID NO: 887983 - DNA, 15 bp, Homo sapiens
tggagaagctgatgt

SEQ ID NO: 887984 - DNA, 15 bp, Homo sapiens
ggagaagctgatgtg

SEQ ID NO: 887985 - DNA, 15 bp, Homo sapiens
gagaagctgatgtga

SEQ ID NO: 887986 - DNA, 15 bp, Homo sapiens
agaagctgatgtgaa

SEQ ID NO: 887987 - DNA, 15 bp, Homo sapiens
gaagctgatgtgaat

SEQ ID NO: 887988 - DNA, 15 bp, Homo sapiens
aagctgatgtgaatt

SEQ ID NO: 887989 - DNA, 15 bp, Homo sapiens
agctgatgtgaattt

SEQ ID NO: 887990 - DNA, 15 bp, Homo sapiens
gctgatgtgaattta

SEQ ID NO: 887991 - DNA, 15 bp, Homo sapiens
ctgatgtgaatttaa

SEQ ID NO: 887992 - DNA, 15 bp, Homo sapiens
tgatgtgaatttaat

SEQ ID NO: 887993 - DNA, 15 bp, Homo sapiens
gatgtgaatttaata

SEQ ID NO: 887994 - DNA, 15 bp, Homo sapiens
atgtgaatttaatag

SEQ ID NO: 887995 - DNA, 15 bp, Homo sapiens
tgtgaatttaatagg

SEQ ID NO: 887996 - DNA, 15 bp, Homo sapiens
gtgaatttaatagga

SEQ ID NO: 887997 - DNA, 15 bp, Homo sapiens
tgaatttaataggat

SEQ ID NO: 887998 - DNA, 15 bp, Homo sapiens
gaatttaataggatt

SEQ ID NO: 887999 - DNA, 15 bp, Homo sapiens
aatttaataggattt

SEQ ID NO: 888000 - DNA, 15 bp, Homo sapiens
atttaataggatttt

SEQ ID NO: 888001 - DNA, 15 bp, Homo sapiens
tttaataggatttta

SEQ ID NO: 888002 - DNA, 15 bp, Homo sapiens
ttaataggattttaa

SEQ ID NO: 888003 - DNA, 15 bp, Homo sapiens
taataggattttaat

SEQ ID NO: 888004 - DNA, 15 bp, Homo sapiens
aataggattttaatc

SEQ ID NO: 888005 - DNA, 15 bp, Homo sapiens
ataggattttaatcc

SEQ ID NO: 888006 - DNA, 15 bp, Homo sapiens
taggattttaatcca

SEQ ID NO: 888007 - DNA, 15 bp, Homo sapiens
aggattttaatccag

SEQ ID NO: 888008 - DNA, 15 bp, Homo sapiens
ggattttaatccaga

SEQ ID NO: 888009 - DNA, 15 bp, Homo sapiens
gattttaatccagag

SEQ ID NO: 888010 - DNA, 15 bp, Homo sapiens
attttaatccagaga

SEQ ID NO: 888011 - DNA, 15 bp, Homo sapiens
ttttaatccagagag

SEQ ID NO: 888012 - DNA, 15 bp, Homo sapiens
tttaatccagagagt

SEQ ID NO: 888013 - DNA, 15 bp, Homo sapiens
ttaatccagagagtc

SEQ ID NO: 888014 - DNA, 15 bp, Homo sapiens
taatccagagagtct

SEQ ID NO: 888015 - DNA, 15 bp, Homo sapiens
aatccagagagtctt

SEQ ID NO: 888016 - DNA, 15 bp, Homo sapiens
atccagagagtcttt

SEQ ID NO: 888017 - DNA, 15 bp, Homo sapiens
tccagagagtctttt

SEQ ID NO: 888018 - DNA, 15 bp, Homo sapiens
ccagagagtcttttg

SEQ ID NO: 888019 - DNA, 15 bp, Homo sapiens
cagagagtcttttga

SEQ ID NO: 888020 - DNA, 15 bp, Homo sapiens
agagagtcttttgaa

SEQ ID NO: 888021 - DNA, 15 bp, Homo sapiens
gagagtcttttgaat

SEQ ID NO: 888022 - DNA, 15 bp, Homo sapiens
agagtcttttgaata

SEQ ID NO: 888023 - DNA, 15 bp, Homo sapiens
gagtcttttgaatac

SEQ ID NO: 888024 - DNA, 15 bp, Homo sapiens
agtcttttgaatact

SEQ ID NO: 888025 - DNA, 15 bp, Homo sapiens
gtcttttgaatactt

SEQ ID NO: 888026 - DNA, 15 bp, Homo sapiens
tcttttgaatacttg

SEQ ID NO: 888027 - DNA, 15 bp, Homo sapiens
cttttgaatacttga

SEQ ID NO: 888028 - DNA, 15 bp, Homo sapiens
ttttgaatacttgag

SEQ ID NO: 888029 - DNA, 15 bp, Homo sapiens
tttgaatacttgagg

SEQ ID NO: 888030 - DNA, 15 bp, Homo sapiens
ttgaatacttgaggt

SEQ ID NO: 888031 - DNA, 15 bp, Homo sapiens
tgaatacttgaggtc

SEQ ID NO: 888032 - DNA, 15 bp, Homo sapiens
gaatacttgaggtct

SEQ ID NO: 888033 - DNA, 15 bp, Homo sapiens
aatacttgaggtcta

SEQ ID NO: 888034 - DNA, 15 bp, Homo sapiens
atacttgaggtctat

SEQ ID NO: 888035 - DNA, 15 bp, Homo sapiens
tacttgaggtctatt

SEQ ID NO: 888036 - DNA, 15 bp, Homo sapiens
acttgaggtctattc

SEQ ID NO: 888037 - DNA, 15 bp, Homo sapiens
cttgaggtctattct

SEQ ID NO: 888038 - DNA, 15 bp, Homo sapiens
ttgaggtctattctc

SEQ ID NO: 888039 - DNA, 15 bp, Homo sapiens
tgaggtctattctcc

SEQ ID NO: 888040 - DNA, 15 bp, Homo sapiens
gaggtctattctcct

SEQ ID NO: 888041 - DNA, 15 bp, Homo sapiens
aggtctattctcctg

SEQ ID NO: 888042 - DNA, 15 bp, Homo sapiens
ggtctattctcctgc

SEQ ID NO: 888043 - DNA, 15 bp, Homo sapiens
gtctattctcctgct

SEQ ID NO: 888044 - DNA, 15 bp, Homo sapiens
tctattctcctgcta

SEQ ID NO: 888045 - DNA, 15 bp, Homo sapiens
ctattctcctgctac

SEQ ID NO: 888046 - DNA, 15 bp, Homo sapiens
tattctcctgctacc

SEQ ID NO: 888047 - DNA, 15 bp, Homo sapiens
attctcctgctaccc

SEQ ID NO: 888048 - DNA, 15 bp, Homo sapiens
ttctcctgctaccct

SEQ ID NO: 888049 - DNA, 15 bp, Homo sapiens
tctcctgctaccctc

SEQ ID NO: 888050 - DNA, 15 bp, Homo sapiens
ctcctgctaccctct

SEQ ID NO: 888051 - DNA, 15 bp, Homo sapiens
tcctgctaccctctt

SEQ ID NO: 888052 - DNA, 15 bp, Homo sapiens
cctgctaccctcttt

SEQ ID NO: 888053 - DNA, 15 bp, Homo sapiens
ctgctaccctctttc

SEQ ID NO: 888054 - DNA, 15 bp, Homo sapiens
tgctaccctctttcc

SEQ ID NO: 888055 - DNA, 15 bp, Homo sapiens
gctaccctctttcct

SEQ ID NO: 888056 - DNA, 15 bp, Homo sapiens
ctaccctctttcctg

SEQ ID NO: 888057 - DNA, 15 bp, Homo sapiens
taccctctttcctga

SEQ ID NO: 888058 - DNA, 15 bp, Homo sapiens
accctctttcctgat

SEQ ID NO: 888059 - DNA, 15 bp, Homo sapiens
ccctctttcctgatg

SEQ ID NO: 888060 - DNA, 15 bp, Homo sapiens
cctctttcctgatga

SEQ ID NO: 888061 - DNA, 15 bp, Homo sapiens
ctctttcctgatgac

SEQ ID NO: 888062 - DNA, 15 bp, Homo sapiens
tctttcctgatgact

SEQ ID NO: 888063 - DNA, 15 bp, Homo sapiens
ctttcctgatgactt

SEQ ID NO: 888064 - DNA, 15 bp, Homo sapiens
tttcctgatgacttc

SEQ ID NO: 888065 - DNA, 15 bp, Homo sapiens
ttcctgatgacttca

SEQ ID NO: 888066 - DNA, 15 bp, Homo sapiens
tcctgatgacttcaa

SEQ ID NO: 888067 - DNA, 15 bp, Homo sapiens
cctgatgacttcaaa

SEQ ID NO: 888068 - DNA, 15 bp, Homo sapiens
ctgatgacttcaaat

SEQ ID NO: 888069 - DNA, 15 bp, Homo sapiens
tgatgacttcaaatc

SEQ ID NO: 888070 - DNA, 15 bp, Homo sapiens
gatgacttcaaatcc

SEQ ID NO: 888071 - DNA, 15 bp, Homo sapiens
atgacttcaaatcct

SEQ ID NO: 888072 - DNA, 15 bp, Homo sapiens
tgacttcaaatcctt

SEQ ID NO: 888073 - DNA, 15 bp, Homo sapiens
gacttcaaatccttc

SEQ ID NO: 888074 - DNA, 15 bp, Homo sapiens
acttcaaatccttct

SEQ ID NO: 888075 - DNA, 15 bp, Homo sapiens
cttcaaatccttctt

SEQ ID NO: 888076 - DNA, 15 bp, Homo sapiens
ttcaaatccttcttc

SEQ ID NO: 888077 - DNA, 15 bp, Homo sapiens
tcaaatccttcttca

SEQ ID NO: 888078 - DNA, 15 bp, Homo sapiens
caaatccttcttcaa

SEQ ID NO: 888079 - DNA, 15 bp, Homo sapiens
aaatccttcttcaac

SEQ ID NO: 888080 - DNA, 15 bp, Homo sapiens
aatccttcttcaacc

SEQ ID NO: 888081 - DNA, 15 bp, Homo sapiens
atccttcttcaaccc

SEQ ID NO: 888082 - DNA, 15 bp, Homo sapiens
tccttcttcaaccca

SEQ ID NO: 888083 - DNA, 15 bp, Homo sapiens
ccttcttcaacccaa

SEQ ID NO: 888084 - DNA, 15 bp, Homo sapiens
cttcttcaacccaac

SEQ ID NO: 888085 - DNA, 15 bp, Homo sapiens
ttcttcaacccaaca

SEQ ID NO: 888086 - DNA, 15 bp, Homo sapiens
tcttcaacccaacat

SEQ ID NO: 888087 - DNA, 15 bp, Homo sapiens
cttcaacccaacatg

SEQ ID NO: 888088 - DNA, 15 bp, Homo sapiens
ttcaacccaacatga

SEQ ID NO: 888089 - DNA, 15 bp, Homo sapiens
tcaacccaacatgaa

SEQ ID NO: 888090 - DNA, 15 bp, Homo sapiens
caacccaacatgaaa

SEQ ID NO: 888091 - DNA, 15 bp, Homo sapiens
aacccaacatgaaag

SEQ ID NO: 888092 - DNA, 15 bp, Homo sapiens
acccaacatgaaaga

SEQ ID NO: 888093 - DNA, 15 bp, Homo sapiens
cccaacatgaaagag

SEQ ID NO: 888094 - DNA, 15 bp, Homo sapiens
ccaacatgaaagagc

SEQ ID NO: 888095 - DNA, 15 bp, Homo sapiens
caacatgaaagagca

SEQ ID NO: 888096 - DNA, 15 bp, Homo sapiens
aacatgaaagagcat

SEQ ID NO: 888097 - DNA, 15 bp, Homo sapiens
acatgaaagagcatt

SEQ ID NO: 888098 - DNA, 15 bp, Homo sapiens
catgaaagagcatta

SEQ ID NO: 888099 - DNA, 15 bp, Homo sapiens
atgaaagagcattaa

SEQ ID NO: 888100 - DNA, 15 bp, Homo sapiens
tgaaagagcattaat

SEQ ID NO: 888101 - DNA, 15 bp, Homo sapiens
gaaagagcattaata

SEQ ID NO: 888102 - DNA, 15 bp, Homo sapiens
aaagagcattaatat

SEQ ID NO: 888103 - DNA, 15 bp, Homo sapiens
aagagcattaatatc

SEQ ID NO: 888104 - DNA, 15 bp, Homo sapiens
agagcattaatatct

SEQ ID NO: 888105 - DNA, 15 bp, Homo sapiens
gagcattaatatctt

SEQ ID NO: 888106 - DNA, 15 bp, Homo sapiens
agcattaatatcttt

SEQ ID NO: 888107 - DNA, 15 bp, Homo sapiens
gcattaatatctttc

SEQ ID NO: 888108 - DNA, 15 bp, Homo sapiens
cattaatatctttca

SEQ ID NO: 888109 - DNA, 15 bp, Homo sapiens
attaatatctttcat

SEQ ID NO: 888110 - DNA, 15 bp, Homo sapiens
ttaatatctttcatc

SEQ ID NO: 888111 - DNA, 15 bp, Homo sapiens
taatatctttcatcg

SEQ ID NO: 888112 - DNA, 15 bp, Homo sapiens
aatatctttcatcga

SEQ ID NO: 888113 - DNA, 15 bp, Homo sapiens
atatctttcatcgat

SEQ ID NO: 888114 - DNA, 15 bp, Homo sapiens
tatctttcatcgatc

SEQ ID NO: 888115 - DNA, 15 bp, Homo sapiens
atctttcatcgatca

SEQ ID NO: 888116 - DNA, 15 bp, Homo sapiens
tctttcatcgatcaa

SEQ ID NO: 888117 - DNA, 15 bp, Homo sapiens
ctttcatcgatcaat

SEQ ID NO: 888118 - DNA, 15 bp, Homo sapiens
tttcatcgatcaatc

SEQ ID NO: 888119 - DNA, 15 bp, Homo sapiens
ttcatcgatcaatct

SEQ ID NO: 888120 - DNA, 15 bp, Homo sapiens
tcatcgatcaatcta

SEQ ID NO: 888121 - DNA, 15 bp, Homo sapiens
catcgatcaatctac

SEQ ID NO: 888122 - DNA, 15 bp, Homo sapiens
atcgatcaatctact

SEQ ID NO: 888123 - DNA, 15 bp, Homo sapiens
tcgatcaatctacta

SEQ ID NO: 888124 - DNA, 15 bp, Homo sapiens
cgatcaatctactaa

SEQ ID NO: 888125 - DNA, 15 bp, Homo sapiens
gatcaatctactaat

SEQ ID NO: 888126 - DNA, 15 bp, Homo sapiens
atcaatctactaatc

SEQ ID NO: 888127 - DNA, 15 bp, Homo sapiens
tcaatctactaatcc

SEQ ID NO: 888128 - DNA, 15 bp, Homo sapiens
caatctactaatcct

SEQ ID NO: 888129 - DNA, 15 bp, Homo sapiens
aatctactaatcctt

SEQ ID NO: 888130 - DNA, 15 bp, Homo sapiens
atctactaatccttt

SEQ ID NO: 888131 - DNA, 15 bp, Homo sapiens
tctactaatcctttt

SEQ ID NO: 888132 - DNA, 15 bp, Homo sapiens
ctactaatcctttta

SEQ ID NO: 888133 - DNA, 15 bp, Homo sapiens
tactaatccttttac

SEQ ID NO: 888134 - DNA, 15 bp, Homo sapiens
actaatccttttacc

SEQ ID NO: 888135 - DNA, 15 bp, Homo sapiens
ctaatccttttacct

SEQ ID NO: 888136 - DNA, 15 bp, Homo sapiens
taatccttttacctt

SEQ ID NO: 888137 - DNA, 15 bp, Homo sapiens
aatccttttaccttt

SEQ ID NO: 888138 - DNA, 15 bp, Homo sapiens
atccttttacctttc

SEQ ID NO: 888139 - DNA, 15 bp, Homo sapiens
tccttttacctttcc

SEQ ID NO: 888140 - DNA, 15 bp, Homo sapiens
ccttttacctttccc

SEQ ID NO: 888141 - DNA, 15 bp, Homo sapiens
cttttacctttccct

SEQ ID NO: 888142 - DNA, 15 bp, Homo sapiens
ttttacctttccctt

SEQ ID NO: 888143 - DNA, 15 bp, Homo sapiens
tttacctttcccttt

SEQ ID NO: 888144 - DNA, 15 bp, Homo sapiens
ttacctttccctttg

SEQ ID NO: 888145 - DNA, 15 bp, Homo sapiens
tacctttccctttga

SEQ ID NO: 888146 - DNA, 15 bp, Homo sapiens
acctttccctttgag

SEQ ID NO: 888147 - DNA, 15 bp, Homo sapiens
cctttccctttgagt

SEQ ID NO: 888148 - DNA, 15 bp, Homo sapiens
ctttccctttgagtc

SEQ ID NO: 888149 - DNA, 15 bp, Homo sapiens
tttccctttgagtcg

SEQ ID NO: 888150 - DNA, 15 bp, Homo sapiens
ttccctttgagtcga

SEQ ID NO: 888151 - DNA, 15 bp, Homo sapiens
tccctttgagtcgac

SEQ ID NO: 888152 - DNA, 15 bp, Homo sapiens
ccctttgagtcgact

SEQ ID NO: 888153 - DNA, 15 bp, Homo sapiens
cctttgagtcgactg

SEQ ID NO: 888154 - DNA, 15 bp, Homo sapiens
ctttgagtcgactgc

SEQ ID NO: 888155 - DNA, 15 bp, Homo sapiens
tttgagtcgactgca

SEQ ID NO: 888156 - DNA, 15 bp, Homo sapiens
ttgagtcgactgcat

SEQ ID NO: 888157 - DNA, 15 bp, Homo sapiens
tgagtcgactgcatg

SEQ ID NO: 888158 - DNA, 15 bp, Homo sapiens
gagtcgactgcatga

SEQ ID NO: 888159 - DNA, 15 bp, Homo sapiens
agtcgactgcatgac

SEQ ID NO: 888160 - DNA, 15 bp, Homo sapiens
gtcgactgcatgaca

SEQ ID NO: 888161 - DNA, 15 bp, Homo sapiens
tcgactgcatgacat

SEQ ID NO: 888162 - DNA, 15 bp, Homo sapiens
cgactgcatgacatt

SEQ ID NO: 888163 - DNA, 15 bp, Homo sapiens
gactgcatgacatta

SEQ ID NO: 888164 - DNA, 15 bp, Homo sapiens
actgcatgacattac

SEQ ID NO: 888165 - DNA, 15 bp, Homo sapiens
ctgcatgacattaca

SEQ ID NO: 888166 - DNA, 15 bp, Homo sapiens
tgcatgacattacat

SEQ ID NO: 888167 - DNA, 15 bp, Homo sapiens
gcatgacattacatt

SEQ ID NO: 888168 - DNA, 15 bp, Homo sapiens
catgacattacattt

SEQ ID NO: 888169 - DNA, 15 bp, Homo sapiens
atgacattacattta

SEQ ID NO: 888170 - DNA, 15 bp, Homo sapiens
tgacattacatttag

SEQ ID NO: 888171 - DNA, 15 bp, Homo sapiens
gacattacatttagt

SEQ ID NO: 888172 - DNA, 15 bp, Homo sapiens
acattacatttagtg

SEQ ID NO: 888173 - DNA, 15 bp, Homo sapiens
cattacatttagtgg

SEQ ID NO: 888174 - DNA, 15 bp, Homo sapiens
attacatttagtggg

SEQ ID NO: 888175 - DNA, 15 bp, Homo sapiens
ttacatttagtgggg

SEQ ID NO: 888176 - DNA, 15 bp, Homo sapiens
tacatttagtggggg

SEQ ID NO: 888177 - DNA, 15 bp, Homo sapiens
acatttagtgggggc

SEQ ID NO: 888178 - DNA, 15 bp, Homo sapiens
catttagtgggggct

SEQ ID NO: 888179 - DNA, 15 bp, Homo sapiens
atttagtgggggcta

SEQ ID NO: 888180 - DNA, 15 bp, Homo sapiens
tttagtgggggctag

SEQ ID NO: 888181 - DNA, 15 bp, Homo sapiens
ttagtgggggctaga

SEQ ID NO: 888182 - DNA, 15 bp, Homo sapiens
tagtgggggctagaa

SEQ ID NO: 888183 - DNA, 15 bp, Homo sapiens
agtgggggctagaaa

SEQ ID NO: 888184 - DNA, 15 bp, Homo sapiens
gtgggggctagaaaa

SEQ ID NO: 888185 - DNA, 15 bp, Homo sapiens
tgggggctagaaaat

SEQ ID NO: 888186 - DNA, 15 bp, Homo sapiens
gggggctagaaaatt

SEQ ID NO: 888187 - DNA, 15 bp, Homo sapiens
ggggctagaaaattc

SEQ ID NO: 888188 - DNA, 15 bp, Homo sapiens
gggctagaaaattcc

SEQ ID NO: 888189 - DNA, 15 bp, Homo sapiens
ggctagaaaattcct

SEQ ID NO: 888190 - DNA, 15 bp, Homo sapiens
gctagaaaattccta

SEQ ID NO: 888191 - DNA, 15 bp, Homo sapiens
ctagaaaattcctac

SEQ ID NO: 888192 - DNA, 15 bp, Homo sapiens
tagaaaattcctacg

SEQ ID NO: 888193 - DNA, 15 bp, Homo sapiens
agaaaattcctacgt

SEQ ID NO: 888194 - DNA, 15 bp, Homo sapiens
gaaaattcctacgtg

SEQ ID NO: 888195 - DNA, 15 bp, Homo sapiens
aaaattcctacgtgg

SEQ ID NO: 888196 - DNA, 15 bp, Homo sapiens
aaattcctacgtgga

SEQ ID NO: 888197 - DNA, 15 bp, Homo sapiens
aattcctacgtggag

SEQ ID NO: 888198 - DNA, 15 bp, Homo sapiens
attcctacgtggaga

SEQ ID NO: 888199 - DNA, 15 bp, Homo sapiens
ttcctacgtggagag

SEQ ID NO: 888200 - DNA, 15 bp, Homo sapiens
tcctacgtggagaga

SEQ ID NO: 888201 - DNA, 15 bp, Homo sapiens
cctacgtggagagag

SEQ ID NO: 888202 - DNA, 15 bp, Homo sapiens
ctacgtggagagaga

SEQ ID NO: 888203 - DNA, 15 bp, Homo sapiens
tacgtggagagagat

SEQ ID NO: 888204 - DNA, 15 bp, Homo sapiens
acgtggagagagatt

SEQ ID NO: 888205 - DNA, 15 bp, Homo sapiens
cgtggagagagattg

SEQ ID NO: 888206 - DNA, 15 bp, Homo sapiens
gtggagagagattgc

SEQ ID NO: 888207 - DNA, 15 bp, Homo sapiens
tggagagagattgca

SEQ ID NO: 888208 - DNA, 15 bp, Homo sapiens
ggagagagattgcag

SEQ ID NO: 888209 - DNA, 15 bp, Homo sapiens
gagagagattgcagc

SEQ ID NO: 888210 - DNA, 15 bp, Homo sapiens
agagagattgcagcc

SEQ ID NO: 888211 - DNA, 15 bp, Homo sapiens
gagagattgcagcca

SEQ ID NO: 888212 - DNA, 15 bp, Homo sapiens
agagattgcagccag

SEQ ID NO: 888213 - DNA, 15 bp, Homo sapiens
gagattgcagccagg

SEQ ID NO: 888214 - DNA, 15 bp, Homo sapiens
agattgcagccagga

SEQ ID NO: 888215 - DNA, 15 bp, Homo sapiens
gattgcagccaggag

SEQ ID NO: 888216 - DNA, 15 bp, Homo sapiens
attgcagccaggaga

SEQ ID NO: 888217 - DNA, 15 bp, Homo sapiens
ttgcagccaggagaa

SEQ ID NO: 888218 - DNA, 15 bp, Homo sapiens
tgcagccaggagaag

SEQ ID NO: 888219 - DNA, 15 bp, Homo sapiens
gcagccaggagaagc

SEQ ID NO: 888220 - DNA, 15 bp, Homo sapiens
cagccaggagaagca

SEQ ID NO: 888221 - DNA, 15 bp, Homo sapiens
agccaggagaagcag

SEQ ID NO: 888222 - DNA, 15 bp, Homo sapiens
gccaggagaagcaga

SEQ ID NO: 888223 - DNA, 15 bp, Homo sapiens
ccaggagaagcagac

SEQ ID NO: 888224 - DNA, 15 bp, Homo sapiens
caggagaagcagaca

SEQ ID NO: 888225 - DNA, 15 bp, Homo sapiens
aggagaagcagacag

SEQ ID NO: 888226 - DNA, 15 bp, Homo sapiens
ggagaagcagacaga

SEQ ID NO: 888227 - DNA, 15 bp, Homo sapiens
gagaagcagacagac

SEQ ID NO: 888228 - DNA, 15 bp, Homo sapiens
agaagcagacagaca

SEQ ID NO: 888229 - DNA, 15 bp, Homo sapiens
gaagcagacagacac

SEQ ID NO: 888230 - DNA, 15 bp, Homo sapiens
aagcagacagacaca

SEQ ID NO: 888231 - DNA, 15 bp, Homo sapiens
agcagacagacacaa

SEQ ID NO: 888232 - DNA, 15 bp, Homo sapiens
gcagacagacacaat

SEQ ID NO: 888233 - DNA, 15 bp, Homo sapiens
cagacagacacaatg

SEQ ID NO: 888234 - DNA, 15 bp, Homo sapiens
agacagacacaatgt

SEQ ID NO: 888235 - DNA, 15 bp, Homo sapiens
gacagacacaatgtc

SEQ ID NO: 888236 - DNA, 15 bp, Homo sapiens
acagacacaatgtct

SEQ ID NO: 888237 - DNA, 15 bp, Homo sapiens
cagacacaatgtctt

SEQ ID NO: 888238 - DNA, 15 bp, Homo sapiens
agacacaatgtcttg

SEQ ID NO: 888239 - DNA, 15 bp, Homo sapiens
gacacaatgtcttgg

SEQ ID NO: 888240 - DNA, 15 bp, Homo sapiens
acacaatgtcttggg

SEQ ID NO: 888241 - DNA, 15 bp, Homo sapiens
cacaatgtcttgggt

SEQ ID NO: 888242 - DNA, 15 bp, Homo sapiens
acaatgtcttgggta

SEQ ID NO: 888243 - DNA, 15 bp, Homo sapiens
caatgtcttgggtag

SEQ ID NO: 888244 - DNA, 15 bp, Homo sapiens
aatgtcttgggtaga

SEQ ID NO: 888245 - DNA, 15 bp, Homo sapiens
atgtcttgggtagac

SEQ ID NO: 888246 - DNA, 15 bp, Homo sapiens
tgtcttgggtagaca

SEQ ID NO: 888247 - DNA, 15 bp, Homo sapiens
gtcttgggtagacag

SEQ ID NO: 888248 - DNA, 15 bp, Homo sapiens
tcttgggtagacaga

SEQ ID NO: 888249 - DNA, 15 bp, Homo sapiens
cttgggtagacagaa

SEQ ID NO: 888250 - DNA, 15 bp, Homo sapiens
ttgggtagacagaag

SEQ ID NO: 888251 - DNA, 15 bp, Homo sapiens
tgggtagacagaagt

SEQ ID NO: 888252 - DNA, 15 bp, Homo sapiens
gggtagacagaagtt

SEQ ID NO: 888253 - DNA, 15 bp, Homo sapiens
ggtagacagaagtta

SEQ ID NO: 888254 - DNA, 15 bp, Homo sapiens
gtagacagaagttag

SEQ ID NO: 888255 - DNA, 15 bp, Homo sapiens
tagacagaagttagg

SEQ ID NO: 888256 - DNA, 15 bp, Homo sapiens
agacagaagttagga

SEQ ID NO: 888257 - DNA, 15 bp, Homo sapiens
gacagaagttaggaa

SEQ ID NO: 888258 - DNA, 15 bp, Homo sapiens
acagaagttaggaac

SEQ ID NO: 888259 - DNA, 15 bp, Homo sapiens
cagaagttaggaaca

SEQ ID NO: 888260 - DNA, 15 bp, Homo sapiens
agaagttaggaacat

SEQ ID NO: 888261 - DNA, 15 bp, Homo sapiens
gaagttaggaacatc

SEQ ID NO: 888262 - DNA, 15 bp, Homo sapiens
aagttaggaacatca

SEQ ID NO: 888263 - DNA, 15 bp, Homo sapiens
agttaggaacatcac

SEQ ID NO: 888264 - DNA, 15 bp, Homo sapiens
gttaggaacatcacc

SEQ ID NO: 888265 - DNA, 15 bp, Homo sapiens
ttaggaacatcacca

SEQ ID NO: 888266 - DNA, 15 bp, Homo sapiens
taggaacatcaccat

SEQ ID NO: 888267 - DNA, 15 bp, Homo sapiens
aggaacatcaccatt

SEQ ID NO: 888268 - DNA, 15 bp, Homo sapiens
ggaacatcaccattt

SEQ ID NO: 888269 - DNA, 15 bp, Homo sapiens
gaacatcaccatttg

SEQ ID NO: 888270 - DNA, 15 bp, Homo sapiens
aacatcaccatttga

SEQ ID NO: 888271 - DNA, 15 bp, Homo sapiens
acatcaccatttgag

SEQ ID NO: 888272 - DNA, 15 bp, Homo sapiens
catcaccatttgaga

SEQ ID NO: 888273 - DNA, 15 bp, Homo sapiens
atcaccatttgagaa

SEQ ID NO: 888274 - DNA, 15 bp, Homo sapiens
tcaccatttgagaaa

SEQ ID NO: 888275 - DNA, 15 bp, Homo sapiens
caccatttgagaaat

SEQ ID NO: 888276 - DNA, 15 bp, Homo sapiens
accatttgagaaata

SEQ ID NO: 888277 - DNA, 15 bp, Homo sapiens
ccatttgagaaatat

SEQ ID NO: 888278 - DNA, 15 bp, Homo sapiens
catttgagaaatatg

SEQ ID NO: 888279 - DNA, 15 bp, Homo sapiens
atttgagaaatatgt

SEQ ID NO: 888280 - DNA, 15 bp, Homo sapiens
tttgagaaatatgtt

SEQ ID NO: 888281 - DNA, 15 bp, Homo sapiens
ttgagaaatatgttt

SEQ ID NO: 888282 - DNA, 15 bp, Homo sapiens
tgagaaatatgtttg

SEQ ID NO: 888283 - DNA, 15 bp, Homo sapiens
gagaaatatgtttgc

SEQ ID NO: 888284 - DNA, 15 bp, Homo sapiens
agaaatatgtttgca

SEQ ID NO: 888285 - DNA, 15 bp, Homo sapiens
gaaatatgtttgcag

SEQ ID NO: 888286 - DNA, 15 bp, Homo sapiens
aaatatgtttgcagt

SEQ ID NO: 888287 - DNA, 15 bp, Homo sapiens
aatatgtttgcagtt

SEQ ID NO: 888288 - DNA, 15 bp, Homo sapiens
atatgtttgcagtta

SEQ ID NO: 888289 - DNA, 15 bp, Homo sapiens
tatgtttgcagttat

SEQ ID NO: 888290 - DNA, 15 bp, Homo sapiens
atgtttgcagttatt

SEQ ID NO: 888291 - DNA, 15 bp, Homo sapiens
tgtttgcagttattt

SEQ ID NO: 888292 - DNA, 15 bp, Homo sapiens
gtttgcagttatttt

SEQ ID NO: 888293 - DNA, 15 bp, Homo sapiens
tttgcagttattttc

SEQ ID NO: 888294 - DNA, 15 bp, Homo sapiens
ttgcagttattttcc

SEQ ID NO: 888295 - DNA, 15 bp, Homo sapiens
tgcagttattttcca

SEQ ID NO: 888296 - DNA, 15 bp, Homo sapiens
gcagttattttccaa

SEQ ID NO: 888297 - DNA, 15 bp, Homo sapiens
cagttattttccaag

SEQ ID NO: 888298 - DNA, 15 bp, Homo sapiens
agttattttccaaga

SEQ ID NO: 888299 - DNA, 15 bp, Homo sapiens
gttattttccaagag

SEQ ID NO: 888300 - DNA, 15 bp, Homo sapiens
ttattttccaagagc

SEQ ID NO: 888301 - DNA, 15 bp, Homo sapiens
tattttccaagagca

SEQ ID NO: 888302 - DNA, 15 bp, Homo sapiens
attttccaagagcag

SEQ ID NO: 888303 - DNA, 15 bp, Homo sapiens
ttttccaagagcaga

SEQ ID NO: 888304 - DNA, 15 bp, Homo sapiens
tttccaagagcagat

SEQ ID NO: 888305 - DNA, 15 bp, Homo sapiens
ttccaagagcagata

SEQ ID NO: 888306 - DNA, 15 bp, Homo sapiens
tccaagagcagataa

SEQ ID NO: 888307 - DNA, 15 bp, Homo sapiens
ccaagagcagataaa

SEQ ID NO: 888308 - DNA, 15 bp, Homo sapiens
caagagcagataaat

SEQ ID NO: 888309 - DNA, 15 bp, Homo sapiens
aagagcagataaata

SEQ ID NO: 888310 - DNA, 15 bp, Homo sapiens
agagcagataaatat

SEQ ID NO: 888311 - DNA, 15 bp, Homo sapiens
gagcagataaatatc

SEQ ID NO: 888312 - DNA, 15 bp, Homo sapiens
agcagataaatatct

SEQ ID NO: 888313 - DNA, 15 bp, Homo sapiens
gcagataaatatctg

SEQ ID NO: 888314 - DNA, 15 bp, Homo sapiens
cagataaatatctgt

SEQ ID NO: 888315 - DNA, 15 bp, Homo sapiens
agataaatatctgtt

SEQ ID NO: 888316 - DNA, 15 bp, Homo sapiens
gataaatatctgttg

SEQ ID NO: 888317 - DNA, 15 bp, Homo sapiens
ataaatatctgttgg

SEQ ID NO: 888318 - DNA, 15 bp, Homo sapiens
taaatatctgttggg

SEQ ID NO: 888319 - DNA, 15 bp, Homo sapiens
aaatatctgttgggt

SEQ ID NO: 888320 - DNA, 15 bp, Homo sapiens
aatatctgttgggtt

SEQ ID NO: 888321 - DNA, 15 bp, Homo sapiens
atatctgttgggttt

SEQ ID NO: 888322 - DNA, 15 bp, Homo sapiens
tatctgttgggtttt

SEQ ID NO: 888323 - DNA, 15 bp, Homo sapiens
atctgttgggttttg

SEQ ID NO: 888324 - DNA, 15 bp, Homo sapiens
tctgttgggttttgt

SEQ ID NO: 888325 - DNA, 15 bp, Homo sapiens
ctgttgggttttgtt

SEQ ID NO: 888326 - DNA, 15 bp, Homo sapiens
tgttgggttttgttt

SEQ ID NO: 888327 - DNA, 15 bp, Homo sapiens
gttgggttttgttta

SEQ ID NO: 888328 - DNA, 15 bp, Homo sapiens
ttgggttttgtttaa

SEQ ID NO: 888329 - DNA, 15 bp, Homo sapiens
tgggttttgtttaat

SEQ ID NO: 888330 - DNA, 15 bp, Homo sapiens
gggttttgtttaatc

SEQ ID NO: 888331 - DNA, 15 bp, Homo sapiens
ggttttgtttaatct

SEQ ID NO: 888332 - DNA, 15 bp, Homo sapiens
gttttgtttaatcta

SEQ ID NO: 888333 - DNA, 15 bp, Homo sapiens
ttttgtttaatctat

SEQ ID NO: 888334 - DNA, 15 bp, Homo sapiens
tttgtttaatctatg

SEQ ID NO: 888335 - DNA, 15 bp, Homo sapiens
ttgtttaatctatgg

SEQ ID NO: 888336 - DNA, 15 bp, Homo sapiens
tgtttaatctatggt

SEQ ID NO: 888337 - DNA, 15 bp, Homo sapiens
gtttaatctatggtg

SEQ ID NO: 888338 - DNA, 15 bp, Homo sapiens
tttaatctatggtga

SEQ ID NO: 888339 - DNA, 15 bp, Homo sapiens
ttaatctatggtgat

SEQ ID NO: 888340 - DNA, 15 bp, Homo sapiens
taatctatggtgatt

SEQ ID NO: 888341 - DNA, 15 bp, Homo sapiens
aatctatggtgatta

SEQ ID NO: 888342 - DNA, 15 bp, Homo sapiens
atctatggtgattat

SEQ ID NO: 888343 - DNA, 15 bp, Homo sapiens
tctatggtgattata

SEQ ID NO: 888344 - DNA, 15 bp, Homo sapiens
ctatggtgattataa

SEQ ID NO: 888345 - DNA, 15 bp, Homo sapiens
tatggtgattataag

SEQ ID NO: 888346 - DNA, 15 bp, Homo sapiens
atggtgattataagg

SEQ ID NO: 888347 - DNA, 15 bp, Homo sapiens
tggtgattataaggg

SEQ ID NO: 888348 - DNA, 15 bp, Homo sapiens
ggtgattataagggt

SEQ ID NO: 888349 - DNA, 15 bp, Homo sapiens
gtgattataagggtc

SEQ ID NO: 888350 - DNA, 15 bp, Homo sapiens
tgattataagggtcc

SEQ ID NO: 888351 - DNA, 15 bp, Homo sapiens
gattataagggtcct

SEQ ID NO: 888352 - DNA, 15 bp, Homo sapiens
attataagggtcctg

SEQ ID NO: 888353 - DNA, 15 bp, Homo sapiens
ttataagggtcctgg

SEQ ID NO: 888354 - DNA, 15 bp, Homo sapiens
tataagggtcctggt

SEQ ID NO: 888355 - DNA, 15 bp, Homo sapiens
ataagggtcctggtg

SEQ ID NO: 888356 - DNA, 15 bp, Homo sapiens
taagggtcctggtgg

SEQ ID NO: 888357 - DNA, 15 bp, Homo sapiens
aagggtcctggtggg

SEQ ID NO: 888358 - DNA, 15 bp, Homo sapiens
agggtcctggtgggg

SEQ ID NO: 888359 - DNA, 15 bp, Homo sapiens
gggtcctggtgggga

SEQ ID NO: 888360 - DNA, 15 bp, Homo sapiens
ggtcctggtggggaa

SEQ ID NO: 888361 - DNA, 15 bp, Homo sapiens
gtcctggtggggaag

SEQ ID NO: 888362 - DNA, 15 bp, Homo sapiens
tcctggtggggaaga

SEQ ID NO: 888363 - DNA, 15 bp, Homo sapiens
cctggtggggaagaa

SEQ ID NO: 888364 - DNA, 15 bp, Homo sapiens
ctggtggggaagaaa

SEQ ID NO: 888365 - DNA, 15 bp, Homo sapiens
tggtggggaagaaaa

SEQ ID NO: 888366 - DNA, 15 bp, Homo sapiens
ggtggggaagaaaag

SEQ ID NO: 888367 - DNA, 15 bp, Homo sapiens
gtggggaagaaaagt

SEQ ID NO: 888368 - DNA, 15 bp, Homo sapiens
tggggaagaaaagtg

SEQ ID NO: 888369 - DNA, 15 bp, Homo sapiens
ggggaagaaaagtga

SEQ ID NO: 888370 - DNA, 15 bp, Homo sapiens
gggaagaaaagtgag

SEQ ID NO: 888371 - DNA, 15 bp, Homo sapiens
ggaagaaaagtgagt

SEQ ID NO: 888372 - DNA, 15 bp, Homo sapiens
gaagaaaagtgagtt

SEQ ID NO: 888373 - DNA, 15 bp, Homo sapiens
aagaaaagtgagttc

SEQ ID NO: 888374 - DNA, 15 bp, Homo sapiens
agaaaagtgagttca

SEQ ID NO: 888375 - DNA, 15 bp, Homo sapiens
gaaaagtgagttcaa

SEQ ID NO: 888376 - DNA, 15 bp, Homo sapiens
aaaagtgagttcaaa

SEQ ID NO: 888377 - DNA, 15 bp, Homo sapiens
aaagtgagttcaaat

SEQ ID NO: 888378 - DNA, 15 bp, Homo sapiens
aagtgagttcaaatt

SEQ ID NO: 888379 - DNA, 15 bp, Homo sapiens
agtgagttcaaattg

SEQ ID NO: 888380 - DNA, 15 bp, Homo sapiens
gtgagttcaaattgc

SEQ ID NO: 888381 - DNA, 15 bp, Homo sapiens
tgagttcaaattgcc

SEQ ID NO: 888382 - DNA, 15 bp, Homo sapiens
gagttcaaattgcca

SEQ ID NO: 888383 - DNA, 15 bp, Homo sapiens
agttcaaattgccag

SEQ ID NO: 888384 - DNA, 15 bp, Homo sapiens
gttcaaattgccaga

SEQ ID NO: 888385 - DNA, 15 bp, Homo sapiens
ttcaaattgccagaa

SEQ ID NO: 888386 - DNA, 15 bp, Homo sapiens
tcaaattgccagaac

SEQ ID NO: 888387 - DNA, 15 bp, Homo sapiens
caaattgccagaaca

SEQ ID NO: 888388 - DNA, 15 bp, Homo sapiens
aaattgccagaacaa

SEQ ID NO: 888389 - DNA, 15 bp, Homo sapiens
aattgccagaacaac

SEQ ID NO: 888390 - DNA, 15 bp, Homo sapiens
attgccagaacaact

SEQ ID NO: 888391 - DNA, 15 bp, Homo sapiens
ttgccagaacaacta

SEQ ID NO: 888392 - DNA, 15 bp, Homo sapiens
tgccagaacaactac

SEQ ID NO: 888393 - DNA, 15 bp, Homo sapiens
gccagaacaactact

SEQ ID NO: 888394 - DNA, 15 bp, Homo sapiens
ccagaacaactactg

SEQ ID NO: 888395 - DNA, 15 bp, Homo sapiens
cagaacaactactgg

SEQ ID NO: 888396 - DNA, 15 bp, Homo sapiens
agaacaactactggt

SEQ ID NO: 888397 - DNA, 15 bp, Homo sapiens
gaacaactactggtt

SEQ ID NO: 888398 - DNA, 15 bp, Homo sapiens
aacaactactggttc

SEQ ID NO: 888399 - DNA, 15 bp, Homo sapiens
acaactactggttct

SEQ ID NO: 888400 - DNA, 15 bp, Homo sapiens
caactactggttctg

SEQ ID NO: 888401 - DNA, 15 bp, Homo sapiens
aactactggttctgt

SEQ ID NO: 888402 - DNA, 15 bp, Homo sapiens
actactggttctgtg

SEQ ID NO: 888403 - DNA, 15 bp, Homo sapiens
ctactggttctgtgg

SEQ ID NO: 888404 - DNA, 15 bp, Homo sapiens
tactggttctgtgga

SEQ ID NO: 888405 - DNA, 15 bp, Homo sapiens
actggttctgtggaa

SEQ ID NO: 888406 - DNA, 15 bp, Homo sapiens
ctggttctgtggaaa

SEQ ID NO: 888407 - DNA, 15 bp, Homo sapiens
tggttctgtggaaag

SEQ ID NO: 888408 - DNA, 15 bp, Homo sapiens
ggttctgtggaaagc

SEQ ID NO: 888409 - DNA, 15 bp, Homo sapiens
gttctgtggaaagca

SEQ ID NO: 888410 - DNA, 15 bp, Homo sapiens
ttctgtggaaagcag

SEQ ID NO: 888411 - DNA, 15 bp, Homo sapiens
tctgtggaaagcaga

SEQ ID NO: 888412 - DNA, 15 bp, Homo sapiens
ctgtggaaagcagaa

SEQ ID NO: 888413 - DNA, 15 bp, Homo sapiens
tgtggaaagcagaaa

SEQ ID NO: 888414 - DNA, 15 bp, Homo sapiens
gtggaaagcagaaag

SEQ ID NO: 888415 - DNA, 15 bp, Homo sapiens
tggaaagcagaaaga

SEQ ID NO: 888416 - DNA, 15 bp, Homo sapiens
ggaaagcagaaagac

SEQ ID NO: 888417 - DNA, 15 bp, Homo sapiens
gaaagcagaaagacc

SEQ ID NO: 888418 - DNA, 15 bp, Homo sapiens
aaagcagaaagacct

SEQ ID NO: 888419 - DNA, 15 bp, Homo sapiens
aagcagaaagaccta

SEQ ID NO: 888420 - DNA, 15 bp, Homo sapiens
agcagaaagacctat

SEQ ID NO: 888421 - DNA, 15 bp, Homo sapiens
gcagaaagacctatc

SEQ ID NO: 888422 - DNA, 15 bp, Homo sapiens
cagaaagacctatct

SEQ ID NO: 888423 - DNA, 15 bp, Homo sapiens
agaaagacctatctg

SEQ ID NO: 888424 - DNA, 15 bp, Homo sapiens
gaaagacctatctgc

SEQ ID NO: 888425 - DNA, 15 bp, Homo sapiens
aaagacctatctgcc

SEQ ID NO: 888426 - DNA, 15 bp, Homo sapiens
aagacctatctgcct

SEQ ID NO: 888427 - DNA, 15 bp, Homo sapiens
agacctatctgcctg

SEQ ID NO: 888428 - DNA, 15 bp, Homo sapiens
gacctatctgcctgt

SEQ ID NO: 888429 - DNA, 15 bp, Homo sapiens
acctatctgcctgtc

SEQ ID NO: 888430 - DNA, 15 bp, Homo sapiens
cctatctgcctgtct

SEQ ID NO: 888431 - DNA, 15 bp, Homo sapiens
ctatctgcctgtcta

SEQ ID NO: 888432 - DNA, 15 bp, Homo sapiens
tatctgcctgtctat

SEQ ID NO: 888433 - DNA, 15 bp, Homo sapiens
atctgcctgtctatc

SEQ ID NO: 888434 - DNA, 15 bp, Homo sapiens
tctgcctgtctatct

SEQ ID NO: 888435 - DNA, 15 bp, Homo sapiens
ctgcctgtctatcta

SEQ ID NO: 888436 - DNA, 15 bp, Homo sapiens
tgcctgtctatctat

SEQ ID NO: 888437 - DNA, 15 bp, Homo sapiens
gcctgtctatctatc

SEQ ID NO: 888438 - DNA, 15 bp, Homo sapiens
cctgtctatctatct

SEQ ID NO: 888439 - DNA, 15 bp, Homo sapiens
ctgtctatctatcta

SEQ ID NO: 888440 - DNA, 15 bp, Homo sapiens
tgtctatctatctat

SEQ ID NO: 888441 - DNA, 15 bp, Homo sapiens
gtctatctatctatc

SEQ ID NO: 888442 - DNA, 15 bp, Homo sapiens
tctatctatctatct

SEQ ID NO: 888443 - DNA, 15 bp, Homo sapiens
ctatctatctatcta

SEQ ID NO: 888444 - DNA, 15 bp, Homo sapiens
tatctatctatctat

SEQ ID NO: 888445 - DNA, 15 bp, Homo sapiens
atctatctatctatc

SEQ ID NO: 888446 - DNA, 15 bp, Homo sapiens
ctatctatctatctg

SEQ ID NO: 888447 - DNA, 15 bp, Homo sapiens
tatctatctatctgt

SEQ ID NO: 888448 - DNA, 15 bp, Homo sapiens
atctatctatctgtc

SEQ ID NO: 888449 - DNA, 15 bp, Homo sapiens
tctatctatctgtct

SEQ ID NO: 888450 - DNA, 15 bp, Homo sapiens
ctatctatctgtcta

SEQ ID NO: 888451 - DNA, 15 bp, Homo sapiens
tatctatctgtctat

SEQ ID NO: 888452 - DNA, 15 bp, Homo sapiens
atctatctgtctatc

SEQ ID NO: 888453 - DNA, 15 bp, Homo sapiens
tctatctgtctatct

SEQ ID NO: 888454 - DNA, 15 bp, Homo sapiens
ctatctgtctatcta

SEQ ID NO: 888455 - DNA, 15 bp, Homo sapiens
tatctgtctatctat

SEQ ID NO: 888456 - DNA, 15 bp, Homo sapiens
atctgtctatctatc

SEQ ID NO: 888457 - DNA, 15 bp, Homo sapiens
tctgtctatctatct

SEQ ID NO: 888458 - DNA, 15 bp, Homo sapiens
tctatctatctatcc

SEQ ID NO: 888459 - DNA, 15 bp, Homo sapiens
ctatctatctatccg

SEQ ID NO: 888460 - DNA, 15 bp, Homo sapiens
tatctatctatccgt

SEQ ID NO: 888461 - DNA, 15 bp, Homo sapiens
atctatctatccgtc

SEQ ID NO: 888462 - DNA, 15 bp, Homo sapiens
tctatctatccgtct

SEQ ID NO: 888463 - DNA, 15 bp, Homo sapiens
ctatctatccgtcta

SEQ ID NO: 888464 - DNA, 15 bp, Homo sapiens
tatctatccgtctat

SEQ ID NO: 888465 - DNA, 15 bp, Homo sapiens
atctatccgtctatc

SEQ ID NO: 888466 - DNA, 15 bp, Homo sapiens
tctatccgtctatct

SEQ ID NO: 888467 - DNA, 15 bp, Homo sapiens
ctatccgtctatcta

SEQ ID NO: 888468 - DNA, 15 bp, Homo sapiens
tatccgtctatctat

SEQ ID NO: 888469 - DNA, 15 bp, Homo sapiens
atccgtctatctatc

SEQ ID NO: 888470 - DNA, 15 bp, Homo sapiens
tccgtctatctatcc

SEQ ID NO: 888471 - DNA, 15 bp, Homo sapiens
ccgtctatctatcca

SEQ ID NO: 888472 - DNA, 15 bp, Homo sapiens
cgtctatctatccat

SEQ ID NO: 888473 - DNA, 15 bp, Homo sapiens
gtctatctatccatc

SEQ ID NO: 888474 - DNA, 15 bp, Homo sapiens
tctatctatccatca

SEQ ID NO: 888475 - DNA, 15 bp, Homo sapiens
ctatctatccatcat

SEQ ID NO: 888476 - DNA, 15 bp, Homo sapiens
tatctatccatcatc

SEQ ID NO: 888477 - DNA, 15 bp, Homo sapiens
atctatccatcatct

SEQ ID NO: 888478 - DNA, 15 bp, Homo sapiens
tctatccatcatcta

SEQ ID NO: 888479 - DNA, 15 bp, Homo sapiens
ctatccatcatctat

SEQ ID NO: 888480 - DNA, 15 bp, Homo sapiens
tatccatcatctatc

SEQ ID NO: 888481 - DNA, 15 bp, Homo sapiens
atccatcatctatca

SEQ ID NO: 888482 - DNA, 15 bp, Homo sapiens
tccatcatctatcat

SEQ ID NO: 888483 - DNA, 15 bp, Homo sapiens
ccatcatctatcatc

SEQ ID NO: 888484 - DNA, 15 bp, Homo sapiens
catcatctatcatct

SEQ ID NO: 888485 - DNA, 15 bp, Homo sapiens
atcatctatcatcta

SEQ ID NO: 888486 - DNA, 15 bp, Homo sapiens
tcatctatcatctac

SEQ ID NO: 888487 - DNA, 15 bp, Homo sapiens
catctatcatctaca

SEQ ID NO: 888488 - DNA, 15 bp, Homo sapiens
atctatcatctacac

SEQ ID NO: 888489 - DNA, 15 bp, Homo sapiens
tctatcatctacacc

SEQ ID NO: 888490 - DNA, 15 bp, Homo sapiens
ctatcatctacacct

SEQ ID NO: 888491 - DNA, 15 bp, Homo sapiens
tatcatctacacctg

SEQ ID NO: 888492 - DNA, 15 bp, Homo sapiens
atcatctacacctgt

SEQ ID NO: 888493 - DNA, 15 bp, Homo sapiens
tcatctacacctgtc

SEQ ID NO: 888494 - DNA, 15 bp, Homo sapiens
catctacacctgtct

SEQ ID NO: 888495 - DNA, 15 bp, Homo sapiens
atctacacctgtcta

SEQ ID NO: 888496 - DNA, 15 bp, Homo sapiens
tctacacctgtctat

SEQ ID NO: 888497 - DNA, 15 bp, Homo sapiens
ctacacctgtctatc

SEQ ID NO: 888498 - DNA, 15 bp, Homo sapiens
tacacctgtctatct

SEQ ID NO: 888499 - DNA, 15 bp, Homo sapiens
acacctgtctatcta

SEQ ID NO: 888500 - DNA, 15 bp, Homo sapiens
cacctgtctatctat

SEQ ID NO: 888501 - DNA, 15 bp, Homo sapiens
acctgtctatctatc

SEQ ID NO: 888502 - DNA, 15 bp, Homo sapiens
cctgtctatctatca

SEQ ID NO: 888503 - DNA, 15 bp, Homo sapiens
ctgtctatctatcat

SEQ ID NO: 888504 - DNA, 15 bp, Homo sapiens
tgtctatctatcatc

SEQ ID NO: 888505 - DNA, 15 bp, Homo sapiens
gtctatctatcatct

SEQ ID NO: 888506 - DNA, 15 bp, Homo sapiens
tctatctatcatcta

SEQ ID NO: 888507 - DNA, 15 bp, Homo sapiens
ctatctatcatctat

SEQ ID NO: 888508 - DNA, 15 bp, Homo sapiens
tatctatcatctatc

SEQ ID NO: 888509 - DNA, 15 bp, Homo sapiens
atctatcatctatct

SEQ ID NO: 888510 - DNA, 15 bp, Homo sapiens
tctatcatctatcta

SEQ ID NO: 888511 - DNA, 15 bp, Homo sapiens
ctatcatctatctac

SEQ ID NO: 888512 - DNA, 15 bp, Homo sapiens
tatcatctatctacc

SEQ ID NO: 888513 - DNA, 15 bp, Homo sapiens
atcatctatctacct

SEQ ID NO: 888514 - DNA, 15 bp, Homo sapiens
tcatctatctaccta

SEQ ID NO: 888515 - DNA, 15 bp, Homo sapiens
catctatctacctat

SEQ ID NO: 888516 - DNA, 15 bp, Homo sapiens
atctatctacctatc

SEQ ID NO: 888517 - DNA, 15 bp, Homo sapiens
tctatctacctatct

SEQ ID NO: 888518 - DNA, 15 bp, Homo sapiens
ctatctacctatcta

SEQ ID NO: 888519 - DNA, 15 bp, Homo sapiens
tatctacctatctat

SEQ ID NO: 888520 - DNA, 15 bp, Homo sapiens
atctacctatctatc

SEQ ID NO: 888521 - DNA, 15 bp, Homo sapiens
tctacctatctatct

SEQ ID NO: 888522 - DNA, 15 bp, Homo sapiens
ctacctatctatctg

SEQ ID NO: 888523 - DNA, 15 bp, Homo sapiens
tacctatctatctgt

SEQ ID NO: 888524 - DNA, 15 bp, Homo sapiens
acctatctatctgtc

SEQ ID NO: 888525 - DNA, 15 bp, Homo sapiens
cctatctatctgtcc

SEQ ID NO: 888526 - DNA, 15 bp, Homo sapiens
ctatctatctgtcca

SEQ ID NO: 888527 - DNA, 15 bp, Homo sapiens
tatctatctgtccat

SEQ ID NO: 888528 - DNA, 15 bp, Homo sapiens
atctatctgtccatc

SEQ ID NO: 888529 - DNA, 15 bp, Homo sapiens
tctatctgtccatca

SEQ ID NO: 888530 - DNA, 15 bp, Homo sapiens
ctatctgtccatcaa

SEQ ID NO: 888531 - DNA, 15 bp, Homo sapiens
tatctgtccatcaat

SEQ ID NO: 888532 - DNA, 15 bp, Homo sapiens
atctgtccatcaatc

SEQ ID NO: 888533 - DNA, 15 bp, Homo sapiens
tctgtccatcaatca

SEQ ID NO: 888534 - DNA, 15 bp, Homo sapiens
ctgtccatcaatcat

SEQ ID NO: 888535 - DNA, 15 bp, Homo sapiens
tgtccatcaatcatc

SEQ ID NO: 888536 - DNA, 15 bp, Homo sapiens
gtccatcaatcatct

SEQ ID NO: 888537 - DNA, 15 bp, Homo sapiens
tccatcaatcatcta

SEQ ID NO: 888538 - DNA, 15 bp, Homo sapiens
ccatcaatcatctat

SEQ ID NO: 888539 - DNA, 15 bp, Homo sapiens
catcaatcatctatc

SEQ ID NO: 888540 - DNA, 15 bp, Homo sapiens
atcaatcatctatca

SEQ ID NO: 888541 - DNA, 15 bp, Homo sapiens
tcaatcatctatcat

SEQ ID NO: 888542 - DNA, 15 bp, Homo sapiens
caatcatctatcatc

SEQ ID NO: 888543 - DNA, 15 bp, Homo sapiens
aatcatctatcatct

SEQ ID NO: 888544 - DNA, 15 bp, Homo sapiens
tcatctatcatctat

SEQ ID NO: 888545 - DNA, 15 bp, Homo sapiens
catctatcatctatc

SEQ ID NO: 888546 - DNA, 15 bp, Homo sapiens
ctatcatctatctat

SEQ ID NO: 888547 - DNA, 15 bp, Homo sapiens
tatcatctatctatc

SEQ ID NO: 888548 - DNA, 15 bp, Homo sapiens
atcatctatctatct

SEQ ID NO: 888549 - DNA, 15 bp, Homo sapiens
tcatctatctatcta

SEQ ID NO: 888550 - DNA, 15 bp, Homo sapiens
catctatctatctat

SEQ ID NO: 888551 - DNA, 15 bp, Homo sapiens
atctatctatctatg

SEQ ID NO: 888552 - DNA, 15 bp, Homo sapiens
tctatctatctatgt

SEQ ID NO: 888553 - DNA, 15 bp, Homo sapiens
ctatctatctatgtt

SEQ ID NO: 888554 - DNA, 15 bp, Homo sapiens
tatctatctatgttg

SEQ ID NO: 888555 - DNA, 15 bp, Homo sapiens
atctatctatgttgt

SEQ ID NO: 888556 - DNA, 15 bp, Homo sapiens
tctatctatgttgtc

SEQ ID NO: 888557 - DNA, 15 bp, Homo sapiens
ctatctatgttgtct

SEQ ID NO: 888558 - DNA, 15 bp, Homo sapiens
tatctatgttgtctg

SEQ ID NO: 888559 - DNA, 15 bp, Homo sapiens
atctatgttgtctgg

SEQ ID NO: 888560 - DNA, 15 bp, Homo sapiens
tctatgttgtctggg

SEQ ID NO: 888561 - DNA, 15 bp, Homo sapiens
ctatgttgtctggga

SEQ ID NO: 888562 - DNA, 15 bp, Homo sapiens
tatgttgtctgggaa

SEQ ID NO: 888563 - DNA, 15 bp, Homo sapiens
atgttgtctgggaac

SEQ ID NO: 888564 - DNA, 15 bp, Homo sapiens
tgttgtctgggaaca

SEQ ID NO: 888565 - DNA, 15 bp, Homo sapiens
gttgtctgggaacac

SEQ ID NO: 888566 - DNA, 15 bp, Homo sapiens
ttgtctgggaacact

SEQ ID NO: 888567 - DNA, 15 bp, Homo sapiens
tgtctgggaacactt

SEQ ID NO: 888568 - DNA, 15 bp, Homo sapiens
gtctgggaacactta

SEQ ID NO: 888569 - DNA, 15 bp, Homo sapiens
tctgggaacacttat

SEQ ID NO: 888570 - DNA, 15 bp, Homo sapiens
ctgggaacacttatg

SEQ ID NO: 888571 - DNA, 15 bp, Homo sapiens
tgggaacacttatga

SEQ ID NO: 888572 - DNA, 15 bp, Homo sapiens
gggaacacttatgat

SEQ ID NO: 888573 - DNA, 15 bp, Homo sapiens
ggaacacttatgatt

SEQ ID NO: 888574 - DNA, 15 bp, Homo sapiens
gaacacttatgatta

SEQ ID NO: 888575 - DNA, 15 bp, Homo sapiens
aacacttatgattac

SEQ ID NO: 888576 - DNA, 15 bp, Homo sapiens
acacttatgattact

SEQ ID NO: 888577 - DNA, 15 bp, Homo sapiens
cacttatgattactg

SEQ ID NO: 888578 - DNA, 15 bp, Homo sapiens
acttatgattactgt

SEQ ID NO: 888579 - DNA, 15 bp, Homo sapiens
cttatgattactgtg

SEQ ID NO: 888580 - DNA, 15 bp, Homo sapiens
ttatgattactgtga

SEQ ID NO: 888581 - DNA, 15 bp, Homo sapiens
tatgattactgtgag

SEQ ID NO: 888582 - DNA, 15 bp, Homo sapiens
atgattactgtgaga

SEQ ID NO: 888583 - DNA, 15 bp, Homo sapiens
tgattactgtgagaa

SEQ ID NO: 888584 - DNA, 15 bp, Homo sapiens
gattactgtgagaag

SEQ ID NO: 888585 - DNA, 15 bp, Homo sapiens
attactgtgagaaga

SEQ ID NO: 888586 - DNA, 15 bp, Homo sapiens
ttactgtgagaagac

SEQ ID NO: 888587 - DNA, 15 bp, Homo sapiens
tactgtgagaagaca

SEQ ID NO: 888588 - DNA, 15 bp, Homo sapiens
actgtgagaagacaa

SEQ ID NO: 888589 - DNA, 15 bp, Homo sapiens
ctgtgagaagacaaa

SEQ ID NO: 888590 - DNA, 15 bp, Homo sapiens
tgtgagaagacaaaa

SEQ ID NO: 888591 - DNA, 15 bp, Homo sapiens
gtgagaagacaaaag

SEQ ID NO: 888592 - DNA, 15 bp, Homo sapiens
tgagaagacaaaagc

SEQ ID NO: 888593 - DNA, 15 bp, Homo sapiens
gagaagacaaaagca

SEQ ID NO: 888594 - DNA, 15 bp, Homo sapiens
agaagacaaaagcaa

SEQ ID NO: 888595 - DNA, 15 bp, Homo sapiens
gaagacaaaagcaac

SEQ ID NO: 888596 - DNA, 15 bp, Homo sapiens
aagacaaaagcaaca

SEQ ID NO: 888597 - DNA, 15 bp, Homo sapiens
agacaaaagcaacat

SEQ ID NO: 888598 - DNA, 15 bp, Homo sapiens
gacaaaagcaacatc

SEQ ID NO: 888599 - DNA, 15 bp, Homo sapiens
acaaaagcaacatca

SEQ ID NO: 888600 - DNA, 15 bp, Homo sapiens
caaaagcaacatcat

SEQ ID NO: 888601 - DNA, 15 bp, Homo sapiens
aaaagcaacatcatt

SEQ ID NO: 888602 - DNA, 15 bp, Homo sapiens
aaagcaacatcatta

SEQ ID NO: 888603 - DNA, 15 bp, Homo sapiens
aagcaacatcattat

SEQ ID NO: 888604 - DNA, 15 bp, Homo sapiens
agcaacatcattata

SEQ ID NO: 888605 - DNA, 15 bp, Homo sapiens
gcaacatcattatag

SEQ ID NO: 888606 - DNA, 15 bp, Homo sapiens
caacatcattatagt

SEQ ID NO: 888607 - DNA, 15 bp, Homo sapiens
aacatcattatagtc

SEQ ID NO: 888608 - DNA, 15 bp, Homo sapiens
acatcattatagtca

SEQ ID NO: 888609 - DNA, 15 bp, Homo sapiens
catcattatagtcat

SEQ ID NO: 888610 - DNA, 15 bp, Homo sapiens
atcattatagtcatt

SEQ ID NO: 888611 - DNA, 15 bp, Homo sapiens
tcattatagtcattc

SEQ ID NO: 888612 - DNA, 15 bp, Homo sapiens
cattatagtcattcc

SEQ ID NO: 888613 - DNA, 15 bp, Homo sapiens
attatagtcattcct

SEQ ID NO: 888614 - DNA, 15 bp, Homo sapiens
ttatagtcattcctt

SEQ ID NO: 888615 - DNA, 15 bp, Homo sapiens
tatagtcattccttc

SEQ ID NO: 888616 - DNA, 15 bp, Homo sapiens
atagtcattccttcc

SEQ ID NO: 888617 - DNA, 15 bp, Homo sapiens
tagtcattccttccc

SEQ ID NO: 888618 - DNA, 15 bp, Homo sapiens
agtcattccttccct

SEQ ID NO: 888619 - DNA, 15 bp, Homo sapiens
gtcattccttccctc

SEQ ID NO: 888620 - DNA, 15 bp, Homo sapiens
tcattccttccctct

SEQ ID NO: 888621 - DNA, 15 bp, Homo sapiens
cattccttccctctt

SEQ ID NO: 888622 - DNA, 15 bp, Homo sapiens
attccttccctcttg

SEQ ID NO: 888623 - DNA, 15 bp, Homo sapiens
ttccttccctcttgt

SEQ ID NO: 888624 - DNA, 15 bp, Homo sapiens
tccttccctcttgtt

SEQ ID NO: 888625 - DNA, 15 bp, Homo sapiens
ccttccctcttgttg

SEQ ID NO: 888626 - DNA, 15 bp, Homo sapiens
cttccctcttgttgc

SEQ ID NO: 888627 - DNA, 15 bp, Homo sapiens
ttccctcttgttgcc

SEQ ID NO: 888628 - DNA, 15 bp, Homo sapiens
tccctcttgttgccc

SEQ ID NO: 888629 - DNA, 15 bp, Homo sapiens
ccctcttgttgcccc

SEQ ID NO: 888630 - DNA, 15 bp, Homo sapiens
cctcttgttgcccct

SEQ ID NO: 888631 - DNA, 15 bp, Homo sapiens
ctcttgttgcccctc

SEQ ID NO: 888632 - DNA, 15 bp, Homo sapiens
tcttgttgcccctcc

SEQ ID NO: 888633 - DNA, 15 bp, Homo sapiens
cttgttgcccctcct

SEQ ID NO: 888634 - DNA, 15 bp, Homo sapiens
ttgttgcccctcctt

SEQ ID NO: 888635 - DNA, 15 bp, Homo sapiens
tgttgcccctccttg

SEQ ID NO: 888636 - DNA, 15 bp, Homo sapiens
gttgcccctccttgc

SEQ ID NO: 888637 - DNA, 15 bp, Homo sapiens
ttgcccctccttgcc

SEQ ID NO: 888638 - DNA, 15 bp, Homo sapiens
tgcccctccttgcct

SEQ ID NO: 888639 - DNA, 15 bp, Homo sapiens
gcccctccttgcctt

SEQ ID NO: 888640 - DNA, 15 bp, Homo sapiens
cccctccttgccttc

SEQ ID NO: 888641 - DNA, 15 bp, Homo sapiens
ccctccttgccttct

SEQ ID NO: 888642 - DNA, 15 bp, Homo sapiens
cctccttgccttctt

SEQ ID NO: 888643 - DNA, 15 bp, Homo sapiens
ctccttgccttcttg

SEQ ID NO: 888644 - DNA, 15 bp, Homo sapiens
tccttgccttcttga

SEQ ID NO: 888645 - DNA, 15 bp, Homo sapiens
ccttgccttcttgag

SEQ ID NO: 888646 - DNA, 15 bp, Homo sapiens
cttgccttcttgagt

SEQ ID NO: 888647 - DNA, 15 bp, Homo sapiens
ttgccttcttgagtt

SEQ ID NO: 888648 - DNA, 15 bp, Homo sapiens
tgccttcttgagttt

SEQ ID NO: 888649 - DNA, 15 bp, Homo sapiens
gccttcttgagtttc

SEQ ID NO: 888650 - DNA, 15 bp, Homo sapiens
ccttcttgagtttct

SEQ ID NO: 888651 - DNA, 15 bp, Homo sapiens
cttcttgagtttctt

SEQ ID NO: 888652 - DNA, 15 bp, Homo sapiens
ttcttgagtttcttc

SEQ ID NO: 888653 - DNA, 15 bp, Homo sapiens
tcttgagtttcttct

SEQ ID NO: 888654 - DNA, 15 bp, Homo sapiens
cttgagtttcttctg

SEQ ID NO: 888655 - DNA, 15 bp, Homo sapiens
ttgagtttcttctgc

SEQ ID NO: 888656 - DNA, 15 bp, Homo sapiens
tgagtttcttctgct

SEQ ID NO: 888657 - DNA, 15 bp, Homo sapiens
gagtttcttctgctt

SEQ ID NO: 888658 - DNA, 15 bp, Homo sapiens
agtttcttctgcttc

SEQ ID NO: 888659 - DNA, 15 bp, Homo sapiens
gtttcttctgcttca

SEQ ID NO: 888660 - DNA, 15 bp, Homo sapiens
tttcttctgcttcaa

SEQ ID NO: 888661 - DNA, 15 bp, Homo sapiens
ttcttctgcttcaac

SEQ ID NO: 888662 - DNA, 15 bp, Homo sapiens
tcttctgcttcaaca

SEQ ID NO: 888663 - DNA, 15 bp, Homo sapiens
cttctgcttcaacat

SEQ ID NO: 888664 - DNA, 15 bp, Homo sapiens
ttctgcttcaacatt

SEQ ID NO: 888665 - DNA, 15 bp, Homo sapiens
tctgcttcaacattg

SEQ ID NO: 888666 - DNA, 15 bp, Homo sapiens
ctgcttcaacattgc

SEQ ID NO: 888667 - DNA, 15 bp, Homo sapiens
tgcttcaacattgct

SEQ ID NO: 888668 - DNA, 15 bp, Homo sapiens
gcttcaacattgctg

SEQ ID NO: 888669 - DNA, 15 bp, Homo sapiens
cttcaacattgctga

SEQ ID NO: 888670 - DNA, 15 bp, Homo sapiens
ttcaacattgctgac

SEQ ID NO: 888671 - DNA, 15 bp, Homo sapiens
tcaacattgctgacc

SEQ ID NO: 888672 - DNA, 15 bp, Homo sapiens
caacattgctgacct

SEQ ID NO: 888673 - DNA, 15 bp, Homo sapiens
aacattgctgacctg

SEQ ID NO: 888674 - DNA, 15 bp, Homo sapiens
acattgctgacctga

SEQ ID NO: 888675 - DNA, 15 bp, Homo sapiens
cattgctgacctgaa

SEQ ID NO: 888676 - DNA, 15 bp, Homo sapiens
attgctgacctgaag

SEQ ID NO: 888677 - DNA, 15 bp, Homo sapiens
ttgctgacctgaaga

SEQ ID NO: 888678 - DNA, 15 bp, Homo sapiens
tgctgacctgaagaa

SEQ ID NO: 888679 - DNA, 15 bp, Homo sapiens
gctgacctgaagaac

SEQ ID NO: 888680 - DNA, 15 bp, Homo sapiens
ctgacctgaagaact

SEQ ID NO: 888681 - DNA, 15 bp, Homo sapiens
tgacctgaagaactg

SEQ ID NO: 888682 - DNA, 15 bp, Homo sapiens
gacctgaagaactgt

SEQ ID NO: 888683 - DNA, 15 bp, Homo sapiens
acctgaagaactgtg

SEQ ID NO: 888684 - DNA, 15 bp, Homo sapiens
cctgaagaactgtgc

SEQ ID NO: 888685 - DNA, 15 bp, Homo sapiens
ctgaagaactgtgct

SEQ ID NO: 888686 - DNA, 15 bp, Homo sapiens
tgaagaactgtgctg

SEQ ID NO: 888687 - DNA, 15 bp, Homo sapiens
gaagaactgtgctga

SEQ ID NO: 888688 - DNA, 15 bp, Homo sapiens
aagaactgtgctgag

SEQ ID NO: 888689 - DNA, 15 bp, Homo sapiens
agaactgtgctgagt

SEQ ID NO: 888690 - DNA, 15 bp, Homo sapiens
gaactgtgctgagta

SEQ ID NO: 888691 - DNA, 15 bp, Homo sapiens
aactgtgctgagtaa

SEQ ID NO: 888692 - DNA, 15 bp, Homo sapiens
actgtgctgagtaaa

SEQ ID NO: 888693 - DNA, 15 bp, Homo sapiens
ctgtgctgagtaaag

SEQ ID NO: 888694 - DNA, 15 bp, Homo sapiens
tgtgctgagtaaagc

SEQ ID NO: 888695 - DNA, 15 bp, Homo sapiens
gtgctgagtaaagct

SEQ ID NO: 888696 - DNA, 15 bp, Homo sapiens
tgctgagtaaagctg

SEQ ID NO: 888697 - DNA, 15 bp, Homo sapiens
gctgagtaaagctga

SEQ ID NO: 888698 - DNA, 15 bp, Homo sapiens
ctgagtaaagctgac

SEQ ID NO: 888699 - DNA, 15 bp, Homo sapiens
tgagtaaagctgaca

SEQ ID NO: 888700 - DNA, 15 bp, Homo sapiens
gagtaaagctgacat

SEQ ID NO: 888701 - DNA, 15 bp, Homo sapiens
agtaaagctgacatt

SEQ ID NO: 888702 - DNA, 15 bp, Homo sapiens
gtaaagctgacattt

SEQ ID NO: 888703 - DNA, 15 bp, Homo sapiens
taaagctgacatttc

SEQ ID NO: 888704 - DNA, 15 bp, Homo sapiens
aaagctgacatttca

SEQ ID NO: 888705 - DNA, 15 bp, Homo sapiens
aagctgacatttcag

SEQ ID NO: 888706 - DNA, 15 bp, Homo sapiens
agctgacatttcaga

SEQ ID NO: 888707 - DNA, 15 bp, Homo sapiens
gctgacatttcagat

SEQ ID NO: 888708 - DNA, 15 bp, Homo sapiens
ctgacatttcagatc

SEQ ID NO: 888709 - DNA, 15 bp, Homo sapiens
tgacatttcagatca

SEQ ID NO: 888710 - DNA, 15 bp, Homo sapiens
gacatttcagatcaa

SEQ ID NO: 888711 - DNA, 15 bp, Homo sapiens
acatttcagatcaat

SEQ ID NO: 888712 - DNA, 15 bp, Homo sapiens
catttcagatcaatt

SEQ ID NO: 888713 - DNA, 15 bp, Homo sapiens
atttcagatcaattg

SEQ ID NO: 888714 - DNA, 15 bp, Homo sapiens
tttcagatcaattgg

SEQ ID NO: 888715 - DNA, 15 bp, Homo sapiens
ttcagatcaattggg

SEQ ID NO: 888716 - DNA, 15 bp, Homo sapiens
tcagatcaattgggg

SEQ ID NO: 888717 - DNA, 15 bp, Homo sapiens
cagatcaattggggt

SEQ ID NO: 888718 - DNA, 15 bp, Homo sapiens
agatcaattggggtt

SEQ ID NO: 888719 - DNA, 15 bp, Homo sapiens
gatcaattggggttg

SEQ ID NO: 888720 - DNA, 15 bp, Homo sapiens
atcaattggggttga

SEQ ID NO: 888721 - DNA, 15 bp, Homo sapiens
tcaattggggttgaa

SEQ ID NO: 888722 - DNA, 15 bp, Homo sapiens
caattggggttgaag

SEQ ID NO: 888723 - DNA, 15 bp, Homo sapiens
aattggggttgaagg

SEQ ID NO: 888724 - DNA, 15 bp, Homo sapiens
attggggttgaaggg

SEQ ID NO: 888725 - DNA, 15 bp, Homo sapiens
ttggggttgaaggga

SEQ ID NO: 888726 - DNA, 15 bp, Homo sapiens
tggggttgaagggag

SEQ ID NO: 888727 - DNA, 15 bp, Homo sapiens
ggggttgaagggagg

SEQ ID NO: 888728 - DNA, 15 bp, Homo sapiens
gggttgaagggagga

SEQ ID NO: 888729 - DNA, 15 bp, Homo sapiens
ggttgaagggaggat

SEQ ID NO: 888730 - DNA, 15 bp, Homo sapiens
gttgaagggaggata

SEQ ID NO: 888731 - DNA, 15 bp, Homo sapiens
ttgaagggaggatag

SEQ ID NO: 888732 - DNA, 15 bp, Homo sapiens
tgaagggaggatagg

SEQ ID NO: 888733 - DNA, 15 bp, Homo sapiens
gaagggaggatagga

SEQ ID NO: 888734 - DNA, 15 bp, Homo sapiens
aagggaggataggat

SEQ ID NO: 888735 - DNA, 15 bp, Homo sapiens
agggaggataggatt

SEQ ID NO: 888736 - DNA, 15 bp, Homo sapiens
gggaggataggattc

SEQ ID NO: 888737 - DNA, 15 bp, Homo sapiens
ggaggataggattcc

SEQ ID NO: 888738 - DNA, 15 bp, Homo sapiens
gaggataggattcct

SEQ ID NO: 888739 - DNA, 15 bp, Homo sapiens
aggataggattcctt

SEQ ID NO: 888740 - DNA, 15 bp, Homo sapiens
ggataggattcctta

SEQ ID NO: 888741 - DNA, 15 bp, Homo sapiens
gataggattccttag

SEQ ID NO: 888742 - DNA, 15 bp, Homo sapiens
ataggattccttaga

SEQ ID NO: 888743 - DNA, 15 bp, Homo sapiens
taggattccttagag

SEQ ID NO: 888744 - DNA, 15 bp, Homo sapiens
aggattccttagagg

SEQ ID NO: 888745 - DNA, 15 bp, Homo sapiens
ggattccttagaggg

SEQ ID NO: 888746 - DNA, 15 bp, Homo sapiens
gattccttagagggc

SEQ ID NO: 888747 - DNA, 15 bp, Homo sapiens
attccttagagggct

SEQ ID NO: 888748 - DNA, 15 bp, Homo sapiens
ttccttagagggctc

SEQ ID NO: 888749 - DNA, 15 bp, Homo sapiens
tccttagagggctct

SEQ ID NO: 888750 - DNA, 15 bp, Homo sapiens
ccttagagggctctg

SEQ ID NO: 888751 - DNA, 15 bp, Homo sapiens
cttagagggctctga

SEQ ID NO: 888752 - DNA, 15 bp, Homo sapiens
ttagagggctctgaa

SEQ ID NO: 888753 - DNA, 15 bp, Homo sapiens
tagagggctctgaaa

SEQ ID NO: 888754 - DNA, 15 bp, Homo sapiens
agagggctctgaaaa

SEQ ID NO: 888755 - DNA, 15 bp, Homo sapiens
gagggctctgaaaag

SEQ ID NO: 888756 - DNA, 15 bp, Homo sapiens
agggctctgaaaagc

SEQ ID NO: 888757 - DNA, 15 bp, Homo sapiens
gggctctgaaaagcc

SEQ ID NO: 888758 - DNA, 15 bp, Homo sapiens
ggctctgaaaagccc

SEQ ID NO: 888759 - DNA, 15 bp, Homo sapiens
gctctgaaaagcccc

SEQ ID NO: 888760 - DNA, 15 bp, Homo sapiens
ctctgaaaagcccct

SEQ ID NO: 888761 - DNA, 15 bp, Homo sapiens
tctgaaaagcccctg

SEQ ID NO: 888762 - DNA, 15 bp, Homo sapiens
ctgaaaagcccctgg

SEQ ID NO: 888763 - DNA, 15 bp, Homo sapiens
tgaaaagcccctggg

SEQ ID NO: 888764 - DNA, 15 bp, Homo sapiens
gaaaagcccctggga

SEQ ID NO: 888765 - DNA, 15 bp, Homo sapiens
aaaagcccctgggat

SEQ ID NO: 888766 - DNA, 15 bp, Homo sapiens
aaagcccctgggatt

SEQ ID NO: 888767 - DNA, 15 bp, Homo sapiens
aagcccctgggattg

SEQ ID NO: 888768 - DNA, 15 bp, Homo sapiens
agcccctgggattgt

SEQ ID NO: 888769 - DNA, 15 bp, Homo sapiens
gcccctgggattgtg

SEQ ID NO: 888770 - DNA, 15 bp, Homo sapiens
cccctgggattgtgg

SEQ ID NO: 888771 - DNA, 15 bp, Homo sapiens
ccctgggattgtggg

SEQ ID NO: 888772 - DNA, 15 bp, Homo sapiens
cctgggattgtgggc

SEQ ID NO: 888773 - DNA, 15 bp, Homo sapiens
ctgggattgtgggca

SEQ ID NO: 888774 - DNA, 15 bp, Homo sapiens
tgggattgtgggcaa

SEQ ID NO: 888775 - DNA, 15 bp, Homo sapiens
gggattgtgggcaag

SEQ ID NO: 888776 - DNA, 15 bp, Homo sapiens
ggattgtgggcaaga

SEQ ID NO: 888777 - DNA, 15 bp, Homo sapiens
gattgtgggcaagat

SEQ ID NO: 888778 - DNA, 15 bp, Homo sapiens
attgtgggcaagata

SEQ ID NO: 888779 - DNA, 15 bp, Homo sapiens
ttgtgggcaagataa

SEQ ID NO: 888780 - DNA, 15 bp, Homo sapiens
tgtgggcaagataat

SEQ ID NO: 888781 - DNA, 15 bp, Homo sapiens
gtgggcaagataata

SEQ ID NO: 888782 - DNA, 15 bp, Homo sapiens
tgggcaagataatac

SEQ ID NO: 888783 - DNA, 15 bp, Homo sapiens
gggcaagataataca

SEQ ID NO: 888784 - DNA, 15 bp, Homo sapiens
ggcaagataatacat

SEQ ID NO: 888785 - DNA, 15 bp, Homo sapiens
gcaagataatacatg

SEQ ID NO: 888786 - DNA, 15 bp, Homo sapiens
caagataatacatgg

SEQ ID NO: 888787 - DNA, 15 bp, Homo sapiens
aagataatacatggg

SEQ ID NO: 888788 - DNA, 15 bp, Homo sapiens
agataatacatgggt

SEQ ID NO: 888789 - DNA, 15 bp, Homo sapiens
gataatacatgggtg

SEQ ID NO: 888790 - DNA, 15 bp, Homo sapiens
ataatacatgggtgt

SEQ ID NO: 888791 - DNA, 15 bp, Homo sapiens
taatacatgggtgtg

SEQ ID NO: 888792 - DNA, 15 bp, Homo sapiens
aatacatgggtgtgc

SEQ ID NO: 888793 - DNA, 15 bp, Homo sapiens
atacatgggtgtgca

SEQ ID NO: 888794 - DNA, 15 bp, Homo sapiens
tacatgggtgtgcat

SEQ ID NO: 888795 - DNA, 15 bp, Homo sapiens
acatgggtgtgcatg

SEQ ID NO: 888796 - DNA, 15 bp, Homo sapiens
catgggtgtgcatgc

SEQ ID NO: 888797 - DNA, 15 bp, Homo sapiens
atgggtgtgcatgca

SEQ ID NO: 888798 - DNA, 15 bp, Homo sapiens
tgggtgtgcatgcat

SEQ ID NO: 888799 - DNA, 15 bp, Homo sapiens
gggtgtgcatgcata

SEQ ID NO: 888800 - DNA, 15 bp, Homo sapiens
ggtgtgcatgcataa

SEQ ID NO: 888801 - DNA, 15 bp, Homo sapiens
gtgtgcatgcataat

SEQ ID NO: 888802 - DNA, 15 bp, Homo sapiens
tgtgcatgcataatt

SEQ ID NO: 888803 - DNA, 15 bp, Homo sapiens
gtgcatgcataattt

SEQ ID NO: 888804 - DNA, 15 bp, Homo sapiens
tgcatgcataatttt

SEQ ID NO: 888805 - DNA, 15 bp, Homo sapiens
gcatgcataattttt

SEQ ID NO: 888806 - DNA, 15 bp, Homo sapiens
catgcataattttta

SEQ ID NO: 888807 - DNA, 15 bp, Homo sapiens
atgcataatttttag

SEQ ID NO: 888808 - DNA, 15 bp, Homo sapiens
tgcataatttttagg

SEQ ID NO: 888809 - DNA, 15 bp, Homo sapiens
gcataatttttagga

SEQ ID NO: 888810 - DNA, 15 bp, Homo sapiens
cataatttttaggag

SEQ ID NO: 888811 - DNA, 15 bp, Homo sapiens
ataatttttaggaga

SEQ ID NO: 888812 - DNA, 15 bp, Homo sapiens
taatttttaggagac

SEQ ID NO: 888813 - DNA, 15 bp, Homo sapiens
aatttttaggagaca

SEQ ID NO: 888814 - DNA, 15 bp, Homo sapiens
atttttaggagacaa

SEQ ID NO: 888815 - DNA, 15 bp, Homo sapiens
tttttaggagacaag

SEQ ID NO: 888816 - DNA, 15 bp, Homo sapiens
ttttaggagacaaga

SEQ ID NO: 888817 - DNA, 15 bp, Homo sapiens
tttaggagacaagat

SEQ ID NO: 888818 - DNA, 15 bp, Homo sapiens
ttaggagacaagatt

SEQ ID NO: 888819 - DNA, 15 bp, Homo sapiens
taggagacaagattt

SEQ ID NO: 888820 - DNA, 15 bp, Homo sapiens
aggagacaagatttt

SEQ ID NO: 888821 - DNA, 15 bp, Homo sapiens
ggagacaagattttt

SEQ ID NO: 888822 - DNA, 15 bp, Homo sapiens
gagacaagatttttc

SEQ ID NO: 888823 - DNA, 15 bp, Homo sapiens
agacaagatttttca

SEQ ID NO: 888824 - DNA, 15 bp, Homo sapiens
gacaagatttttcaa

SEQ ID NO: 888825 - DNA, 15 bp, Homo sapiens
acaagatttttcaaa

SEQ ID NO: 888826 - DNA, 15 bp, Homo sapiens
caagatttttcaaag

SEQ ID NO: 888827 - DNA, 15 bp, Homo sapiens
aagatttttcaaagg

SEQ ID NO: 888828 - DNA, 15 bp, Homo sapiens
agatttttcaaaggg

SEQ ID NO: 888829 - DNA, 15 bp, Homo sapiens
gatttttcaaagggg

SEQ ID NO: 888830 - DNA, 15 bp, Homo sapiens
atttttcaaaggggc

SEQ ID NO: 888831 - DNA, 15 bp, Homo sapiens
tttttcaaaggggct

SEQ ID NO: 888832 - DNA, 15 bp, Homo sapiens
ttttcaaaggggcta

SEQ ID NO: 888833 - DNA, 15 bp, Homo sapiens
tttcaaaggggctat

SEQ ID NO: 888834 - DNA, 15 bp, Homo sapiens
ttcaaaggggctatg

SEQ ID NO: 888835 - DNA, 15 bp, Homo sapiens
tcaaaggggctatgg

SEQ ID NO: 888836 - DNA, 15 bp, Homo sapiens
caaaggggctatggt

SEQ ID NO: 888837 - DNA, 15 bp, Homo sapiens
aaaggggctatggtt

SEQ ID NO: 888838 - DNA, 15 bp, Homo sapiens
aaggggctatggttc

SEQ ID NO: 888839 - DNA, 15 bp, Homo sapiens
aggggctatggttcc

SEQ ID NO: 888840 - DNA, 15 bp, Homo sapiens
ggggctatggttccc

SEQ ID NO: 888841 - DNA, 15 bp, Homo sapiens
gggctatggttccca

SEQ ID NO: 888842 - DNA, 15 bp, Homo sapiens
ggctatggttcccaa

SEQ ID NO: 888843 - DNA, 15 bp, Homo sapiens
gctatggttcccaaa

SEQ ID NO: 888844 - DNA, 15 bp, Homo sapiens
ctatggttcccaaag

SEQ ID NO: 888845 - DNA, 15 bp, Homo sapiens
tatggttcccaaaga

SEQ ID NO: 888846 - DNA, 15 bp, Homo sapiens
atggttcccaaagag

SEQ ID NO: 888847 - DNA, 15 bp, Homo sapiens
tggttcccaaagagt

SEQ ID NO: 888848 - DNA, 15 bp, Homo sapiens
ggttcccaaagagtt

SEQ ID NO: 888849 - DNA, 15 bp, Homo sapiens
gttcccaaagagtta

SEQ ID NO: 888850 - DNA, 15 bp, Homo sapiens
ttcccaaagagttaa

SEQ ID NO: 888851 - DNA, 15 bp, Homo sapiens
tcccaaagagttaag

SEQ ID NO: 888852 - DNA, 15 bp, Homo sapiens
cccaaagagttaaga

SEQ ID NO: 888853 - DNA, 15 bp, Homo sapiens
ccaaagagttaagaa

SEQ ID NO: 888854 - DNA, 15 bp, Homo sapiens
caaagagttaagaat

SEQ ID NO: 888855 - DNA, 15 bp, Homo sapiens
aaagagttaagaatt

SEQ ID NO: 888856 - DNA, 15 bp, Homo sapiens
aagagttaagaattt

SEQ ID NO: 888857 - DNA, 15 bp, Homo sapiens
agagttaagaatttt

SEQ ID NO: 888858 - DNA, 15 bp, Homo sapiens
gagttaagaattttt

SEQ ID NO: 888859 - DNA, 15 bp, Homo sapiens
agttaagaattttta

SEQ ID NO: 888860 - DNA, 15 bp, Homo sapiens
gttaagaatttttag

SEQ ID NO: 888861 - DNA, 15 bp, Homo sapiens
ttaagaatttttaga

SEQ ID NO: 888862 - DNA, 15 bp, Homo sapiens
taagaatttttagag

SEQ ID NO: 888863 - DNA, 15 bp, Homo sapiens
aagaatttttagaga

SEQ ID NO: 888864 - DNA, 15 bp, Homo sapiens
agaatttttagagag

SEQ ID NO: 888865 - DNA, 15 bp, Homo sapiens
gaatttttagagaga

SEQ ID NO: 888866 - DNA, 15 bp, Homo sapiens
aatttttagagagaa

SEQ ID NO: 888867 - DNA, 15 bp, Homo sapiens
atttttagagagaag

SEQ ID NO: 888868 - DNA, 15 bp, Homo sapiens
tttttagagagaagc

SEQ ID NO: 888869 - DNA, 15 bp, Homo sapiens
ttttagagagaagcc

SEQ ID NO: 888870 - DNA, 15 bp, Homo sapiens
tttagagagaagccg

SEQ ID NO: 888871 - DNA, 15 bp, Homo sapiens
ttagagagaagccgc

SEQ ID NO: 888872 - DNA, 15 bp, Homo sapiens
tagagagaagccgct

SEQ ID NO: 888873 - DNA, 15 bp, Homo sapiens
agagagaagccgctt

SEQ ID NO: 888874 - DNA, 15 bp, Homo sapiens
gagagaagccgctta

SEQ ID NO: 888875 - DNA, 15 bp, Homo sapiens
agagaagccgcttag

SEQ ID NO: 888876 - DNA, 15 bp, Homo sapiens
gagaagccgcttagg

SEQ ID NO: 888877 - DNA, 15 bp, Homo sapiens
agaagccgcttaggg

SEQ ID NO: 888878 - DNA, 15 bp, Homo sapiens
gaagccgcttagggc

SEQ ID NO: 888879 - DNA, 15 bp, Homo sapiens
aagccgcttagggct

SEQ ID NO: 888880 - DNA, 15 bp, Homo sapiens
agccgcttagggctg

SEQ ID NO: 888881 - DNA, 15 bp, Homo sapiens
gccgcttagggctgg

SEQ ID NO: 888882 - DNA, 15 bp, Homo sapiens
ccgcttagggctgga

SEQ ID NO: 888883 - DNA, 15 bp, Homo sapiens
cgcttagggctggaa

SEQ ID NO: 888884 - DNA, 15 bp, Homo sapiens
gcttagggctggaag

SEQ ID NO: 888885 - DNA, 15 bp, Homo sapiens
cttagggctggaagg

SEQ ID NO: 888886 - DNA, 15 bp, Homo sapiens
ttagggctggaaggg

SEQ ID NO: 888887 - DNA, 15 bp, Homo sapiens
tagggctggaaggga

SEQ ID NO: 888888 - DNA, 15 bp, Homo sapiens
agggctggaagggaa

SEQ ID NO: 888889 - DNA, 15 bp, Homo sapiens
gggctggaagggaat

SEQ ID NO: 888890 - DNA, 15 bp, Homo sapiens
ggctggaagggaatc

SEQ ID NO: 888891 - DNA, 15 bp, Homo sapiens
gctggaagggaatcc

SEQ ID NO: 888892 - DNA, 15 bp, Homo sapiens
ctggaagggaatcca

SEQ ID NO: 888893 - DNA, 15 bp, Homo sapiens
tggaagggaatccat

SEQ ID NO: 888894 - DNA, 15 bp, Homo sapiens
ggaagggaatccatc

SEQ ID NO: 888895 - DNA, 15 bp, Homo sapiens
gaagggaatccatct

SEQ ID NO: 888896 - DNA, 15 bp, Homo sapiens
aagggaatccatctg

SEQ ID NO: 888897 - DNA, 15 bp, Homo sapiens
agggaatccatctgg

SEQ ID NO: 888898 - DNA, 15 bp, Homo sapiens
gggaatccatctggt

SEQ ID NO: 888899 - DNA, 15 bp, Homo sapiens
ggaatccatctggtt

SEQ ID NO: 888900 - DNA, 15 bp, Homo sapiens
gaatccatctggtta

SEQ ID NO: 888901 - DNA, 15 bp, Homo sapiens
aatccatctggttag

SEQ ID NO: 888902 - DNA, 15 bp, Homo sapiens
atccatctggttaga

SEQ ID NO: 888903 - DNA, 15 bp, Homo sapiens
tccatctggttagag

SEQ ID NO: 888904 - DNA, 15 bp, Homo sapiens
ccatctggttagagt

SEQ ID NO: 888905 - DNA, 15 bp, Homo sapiens
catctggttagagtt

SEQ ID NO: 888906 - DNA, 15 bp, Homo sapiens
atctggttagagttt

SEQ ID NO: 888907 - DNA, 15 bp, Homo sapiens
tctggttagagtttt

SEQ ID NO: 888908 - DNA, 15 bp, Homo sapiens
ctggttagagttttt

SEQ ID NO: 888909 - DNA, 15 bp, Homo sapiens
tggttagagtttttc

SEQ ID NO: 888910 - DNA, 15 bp, Homo sapiens
ggttagagtttttcc

SEQ ID NO: 888911 - DNA, 15 bp, Homo sapiens
gttagagtttttccc

SEQ ID NO: 888912 - DNA, 15 bp, Homo sapiens
ttagagtttttcccc

SEQ ID NO: 888913 - DNA, 15 bp, Homo sapiens
tagagtttttcccca

SEQ ID NO: 888914 - DNA, 15 bp, Homo sapiens
agagtttttccccac

SEQ ID NO: 888915 - DNA, 15 bp, Homo sapiens
gagtttttccccact

SEQ ID NO: 888916 - DNA, 15 bp, Homo sapiens
agtttttccccactc

SEQ ID NO: 888917 - DNA, 15 bp, Homo sapiens
gtttttccccactcc

SEQ ID NO: 888918 - DNA, 15 bp, Homo sapiens
tttttccccactccc

SEQ ID NO: 888919 - DNA, 15 bp, Homo sapiens
ttttccccactccca

SEQ ID NO: 888920 - DNA, 15 bp, Homo sapiens
tttccccactcccac

SEQ ID NO: 888921 - DNA, 15 bp, Homo sapiens
ttccccactcccacc

SEQ ID NO: 888922 - DNA, 15 bp, Homo sapiens
tccccactcccacca

SEQ ID NO: 888923 - DNA, 15 bp, Homo sapiens
ccccactcccaccac

SEQ ID NO: 888924 - DNA, 15 bp, Homo sapiens
cccactcccaccacc

SEQ ID NO: 888925 - DNA, 15 bp, Homo sapiens
ccactcccaccacct

SEQ ID NO: 888926 - DNA, 15 bp, Homo sapiens
cactcccaccacctg

SEQ ID NO: 888927 - DNA, 15 bp, Homo sapiens
actcccaccacctgc

SEQ ID NO: 888928 - DNA, 15 bp, Homo sapiens
ctcccaccacctgca

SEQ ID NO: 888929 - DNA, 15 bp, Homo sapiens
tcccaccacctgcac

SEQ ID NO: 888930 - DNA, 15 bp, Homo sapiens
cccaccacctgcact

SEQ ID NO: 888931 - DNA, 15 bp, Homo sapiens
ccaccacctgcactt

SEQ ID NO: 888932 - DNA, 15 bp, Homo sapiens
caccacctgcacttt

SEQ ID NO: 888933 - DNA, 15 bp, Homo sapiens
accacctgcactttt

SEQ ID NO: 888934 - DNA, 15 bp, Homo sapiens
ccacctgcacttttc

SEQ ID NO: 888935 - DNA, 15 bp, Homo sapiens
cacctgcacttttct

SEQ ID NO: 888936 - DNA, 15 bp, Homo sapiens
acctgcacttttctt

SEQ ID NO: 888937 - DNA, 15 bp, Homo sapiens
cctgcacttttcttt

SEQ ID NO: 888938 - DNA, 15 bp, Homo sapiens
ctgcacttttctttc

SEQ ID NO: 888939 - DNA, 15 bp, Homo sapiens
tgcacttttctttcc

SEQ ID NO: 888940 - DNA, 15 bp, Homo sapiens
gcacttttctttcct

SEQ ID NO: 888941 - DNA, 15 bp, Homo sapiens
cacttttctttcctc

SEQ ID NO: 888942 - DNA, 15 bp, Homo sapiens
acttttctttcctct

SEQ ID NO: 888943 - DNA, 15 bp, Homo sapiens
cttttctttcctctc

SEQ ID NO: 888944 - DNA, 15 bp, Homo sapiens
ttttctttcctctct

SEQ ID NO: 888945 - DNA, 15 bp, Homo sapiens
tttctttcctctctc

SEQ ID NO: 888946 - DNA, 15 bp, Homo sapiens
ttctttcctctctcc

SEQ ID NO: 888947 - DNA, 15 bp, Homo sapiens
tctttcctctctcct

SEQ ID NO: 888948 - DNA, 15 bp, Homo sapiens
ctttcctctctcctt

SEQ ID NO: 888949 - DNA, 15 bp, Homo sapiens
tttcctctctccttt

SEQ ID NO: 888950 - DNA, 15 bp, Homo sapiens
ttcctctctcctttc

SEQ ID NO: 888951 - DNA, 15 bp, Homo sapiens
tcctctctcctttcc

SEQ ID NO: 888952 - DNA, 15 bp, Homo sapiens
cctctctcctttcct

SEQ ID NO: 888953 - DNA, 15 bp, Homo sapiens
ctctctcctttcctc

SEQ ID NO: 888954 - DNA, 15 bp, Homo sapiens
tctctcctttcctct

SEQ ID NO: 888955 - DNA, 15 bp, Homo sapiens
ctctcctttcctctg

SEQ ID NO: 888956 - DNA, 15 bp, Homo sapiens
tctcctttcctctgc

SEQ ID NO: 888957 - DNA, 15 bp, Homo sapiens
ctcctttcctctgct

SEQ ID NO: 888958 - DNA, 15 bp, Homo sapiens
tcctttcctctgctt

SEQ ID NO: 888959 - DNA, 15 bp, Homo sapiens
cctttcctctgcttg

SEQ ID NO: 888960 - DNA, 15 bp, Homo sapiens
ctttcctctgcttgg

SEQ ID NO: 888961 - DNA, 15 bp, Homo sapiens
tttcctctgcttggc

SEQ ID NO: 888962 - DNA, 15 bp, Homo sapiens
ttcctctgcttggct

SEQ ID NO: 888963 - DNA, 15 bp, Homo sapiens
tcctctgcttggctt

SEQ ID NO: 888964 - DNA, 15 bp, Homo sapiens
cctctgcttggcttt

SEQ ID NO: 888965 - DNA, 15 bp, Homo sapiens
ctctgcttggctttt

SEQ ID NO: 888966 - DNA, 15 bp, Homo sapiens
tctgcttggcttttc

SEQ ID NO: 888967 - DNA, 15 bp, Homo sapiens
ctgcttggcttttct

SEQ ID NO: 888968 - DNA, 15 bp, Homo sapiens
tgcttggcttttctg

SEQ ID NO: 888969 - DNA, 15 bp, Homo sapiens
gcttggcttttctgt

SEQ ID NO: 888970 - DNA, 15 bp, Homo sapiens
cttggcttttctgtc

SEQ ID NO: 888971 - DNA, 15 bp, Homo sapiens
ttggcttttctgtct

SEQ ID NO: 888972 - DNA, 15 bp, Homo sapiens
tggcttttctgtctc

SEQ ID NO: 888973 - DNA, 15 bp, Homo sapiens
ggcttttctgtctcc

SEQ ID NO: 888974 - DNA, 15 bp, Homo sapiens
gcttttctgtctcca

SEQ ID NO: 888975 - DNA, 15 bp, Homo sapiens
cttttctgtctccac

SEQ ID NO: 888976 - DNA, 15 bp, Homo sapiens
ttttctgtctccacc

SEQ ID NO: 888977 - DNA, 15 bp, Homo sapiens
tttctgtctccacct

SEQ ID NO: 888978 - DNA, 15 bp, Homo sapiens
ttctgtctccacctt

SEQ ID NO: 888979 - DNA, 15 bp, Homo sapiens
tctgtctccaccttc

SEQ ID NO: 888980 - DNA, 15 bp, Homo sapiens
ctgtctccaccttcc

SEQ ID NO: 888981 - DNA, 15 bp, Homo sapiens
tgtctccaccttccc

SEQ ID NO: 888982 - DNA, 15 bp, Homo sapiens
gtctccaccttccca

SEQ ID NO: 888983 - DNA, 15 bp, Homo sapiens
tctccaccttcccat

SEQ ID NO: 888984 - DNA, 15 bp, Homo sapiens
ctccaccttcccatt

SEQ ID NO: 888985 - DNA, 15 bp, Homo sapiens
tccaccttcccattg

SEQ ID NO: 888986 - DNA, 15 bp, Homo sapiens
ccaccttcccattgc

SEQ ID NO: 888987 - DNA, 15 bp, Homo sapiens
caccttcccattgcc

SEQ ID NO: 888988 - DNA, 15 bp, Homo sapiens
accttcccattgccc

SEQ ID NO: 888989 - DNA, 15 bp, Homo sapiens
ccttcccattgccct

SEQ ID NO: 888990 - DNA, 15 bp, Homo sapiens
cttcccattgccctc

SEQ ID NO: 888991 - DNA, 15 bp, Homo sapiens
ttcccattgccctct

SEQ ID NO: 888992 - DNA, 15 bp, Homo sapiens
tcccattgccctctt

SEQ ID NO: 888993 - DNA, 15 bp, Homo sapiens
cccattgccctcttc

SEQ ID NO: 888994 - DNA, 15 bp, Homo sapiens
ccattgccctcttct

SEQ ID NO: 888995 - DNA, 15 bp, Homo sapiens
cattgccctcttctc

SEQ ID NO: 888996 - DNA, 15 bp, Homo sapiens
attgccctcttctca

SEQ ID NO: 888997 - DNA, 15 bp, Homo sapiens
ttgccctcttctcag

SEQ ID NO: 888998 - DNA, 15 bp, Homo sapiens
tgccctcttctcagt

SEQ ID NO: 888999 - DNA, 15 bp, Homo sapiens
gccctcttctcagtt

SEQ ID NO: 889000 - DNA, 15 bp, Homo sapiens
ccctcttctcagttc

SEQ ID NO: 889001 - DNA, 15 bp, Homo sapiens
cctcttctcagttct

SEQ ID NO: 889002 - DNA, 15 bp, Homo sapiens
ctcttctcagttcta

SEQ ID NO: 889003 - DNA, 15 bp, Homo sapiens
tcttctcagttctaa

SEQ ID NO: 889004 - DNA, 15 bp, Homo sapiens
cttctcagttctaaa

SEQ ID NO: 889005 - DNA, 15 bp, Homo sapiens
ttctcagttctaaac

SEQ ID NO: 889006 - DNA, 15 bp, Homo sapiens
tctcagttctaaacc

SEQ ID NO: 889007 - DNA, 15 bp, Homo sapiens
ctcagttctaaacct

SEQ ID NO: 889008 - DNA, 15 bp, Homo sapiens
tcagttctaaacctt

SEQ ID NO: 889009 - DNA, 15 bp, Homo sapiens
cagttctaaaccttc

SEQ ID NO: 889010 - DNA, 15 bp, Homo sapiens
agttctaaaccttct

SEQ ID NO: 889011 - DNA, 15 bp, Homo sapiens
gttctaaaccttctc

SEQ ID NO: 889012 - DNA, 15 bp, Homo sapiens
ttctaaaccttctcc

SEQ ID NO: 889013 - DNA, 15 bp, Homo sapiens
tctaaaccttctccc

SEQ ID NO: 889014 - DNA, 15 bp, Homo sapiens
ctaaaccttctcccg

SEQ ID NO: 889015 - DNA, 15 bp, Homo sapiens
taaaccttctcccgt

SEQ ID NO: 889016 - DNA, 15 bp, Homo sapiens
aaaccttctcccgtg

SEQ ID NO: 889017 - DNA, 15 bp, Homo sapiens
aaccttctcccgtgc

SEQ ID NO: 889018 - DNA, 15 bp, Homo sapiens
accttctcccgtgca

SEQ ID NO: 889019 - DNA, 15 bp, Homo sapiens
ccttctcccgtgcat

SEQ ID NO: 889020 - DNA, 15 bp, Homo sapiens
cttctcccgtgcatt

SEQ ID NO: 889021 - DNA, 15 bp, Homo sapiens
ttctcccgtgcattt

SEQ ID NO: 889022 - DNA, 15 bp, Homo sapiens
tctcccgtgcatttc

SEQ ID NO: 889023 - DNA, 15 bp, Homo sapiens
ctcccgtgcatttca

SEQ ID NO: 889024 - DNA, 15 bp, Homo sapiens
tcccgtgcatttcac

SEQ ID NO: 889025 - DNA, 15 bp, Homo sapiens
cccgtgcatttcact

SEQ ID NO: 889026 - DNA, 15 bp, Homo sapiens
ccgtgcatttcactt

SEQ ID NO: 889027 - DNA, 15 bp, Homo sapiens
cgtgcatttcacttt

SEQ ID NO: 889028 - DNA, 15 bp, Homo sapiens
gtgcatttcactttg

SEQ ID NO: 889029 - DNA, 15 bp, Homo sapiens
tgcatttcactttgt

SEQ ID NO: 889030 - DNA, 15 bp, Homo sapiens
gcatttcactttgtg

SEQ ID NO: 889031 - DNA, 15 bp, Homo sapiens
catttcactttgtgc

SEQ ID NO: 889032 - DNA, 15 bp, Homo sapiens
atttcactttgtgca

SEQ ID NO: 889033 - DNA, 15 bp, Homo sapiens
tttcactttgtgcat

SEQ ID NO: 889034 - DNA, 15 bp, Homo sapiens
ttcactttgtgcatt

SEQ ID NO: 889035 - DNA, 15 bp, Homo sapiens
tcactttgtgcattc

SEQ ID NO: 889036 - DNA, 15 bp, Homo sapiens
cactttgtgcattcc

SEQ ID NO: 889037 - DNA, 15 bp, Homo sapiens
actttgtgcattcca

SEQ ID NO: 889038 - DNA, 15 bp, Homo sapiens
ctttgtgcattccat

SEQ ID NO: 889039 - DNA, 15 bp, Homo sapiens
tttgtgcattccatg

SEQ ID NO: 889040 - DNA, 15 bp, Homo sapiens
ttgtgcattccatgt

SEQ ID NO: 889041 - DNA, 15 bp, Homo sapiens
tgtgcattccatgtg

SEQ ID NO: 889042 - DNA, 15 bp, Homo sapiens
gtgcattccatgtgt

SEQ ID NO: 889043 - DNA, 15 bp, Homo sapiens
tgcattccatgtgtg

SEQ ID NO: 889044 - DNA, 15 bp, Homo sapiens
gcattccatgtgtgc

SEQ ID NO: 889045 - DNA, 15 bp, Homo sapiens
cattccatgtgtgcc

SEQ ID NO: 889046 - DNA, 15 bp, Homo sapiens
attccatgtgtgcct

SEQ ID NO: 889047 - DNA, 15 bp, Homo sapiens
ttccatgtgtgcctt

SEQ ID NO: 889048 - DNA, 15 bp, Homo sapiens
tccatgtgtgccttt

SEQ ID NO: 889049 - DNA, 15 bp, Homo sapiens
ccatgtgtgcctttc

SEQ ID NO: 889050 - DNA, 15 bp, Homo sapiens
catgtgtgcctttca

SEQ ID NO: 889051 - DNA, 15 bp, Homo sapiens
atgtgtgcctttcac

SEQ ID NO: 889052 - DNA, 15 bp, Homo sapiens
tgtgtgcctttcaca

SEQ ID NO: 889053 - DNA, 15 bp, Homo sapiens
gtgtgcctttcacag

SEQ ID NO: 889054 - DNA, 15 bp, Homo sapiens
tgtgcctttcacagc

SEQ ID NO: 889055 - DNA, 15 bp, Homo sapiens
gtgcctttcacagct

SEQ ID NO: 889056 - DNA, 15 bp, Homo sapiens
tgcctttcacagctg

SEQ ID NO: 889057 - DNA, 15 bp, Homo sapiens
gcctttcacagctgt

SEQ ID NO: 889058 - DNA, 15 bp, Homo sapiens
cctttcacagctgta

SEQ ID NO: 889059 - DNA, 15 bp, Homo sapiens
ctttcacagctgtag

SEQ ID NO: 889060 - DNA, 15 bp, Homo sapiens
tttcacagctgtaga

SEQ ID NO: 889061 - DNA, 15 bp, Homo sapiens
ttcacagctgtagat

SEQ ID NO: 889062 - DNA, 15 bp, Homo sapiens
tcacagctgtagatg

SEQ ID NO: 889063 - DNA, 15 bp, Homo sapiens
cacagctgtagatgt

SEQ ID NO: 889064 - DNA, 15 bp, Homo sapiens
acagctgtagatgta

SEQ ID NO: 889065 - DNA, 15 bp, Homo sapiens
cagctgtagatgtat

SEQ ID NO: 889066 - DNA, 15 bp, Homo sapiens
agctgtagatgtatg

SEQ ID NO: 889067 - DNA, 15 bp, Homo sapiens
gctgtagatgtatgt

SEQ ID NO: 889068 - DNA, 15 bp, Homo sapiens
ctgtagatgtatgtg

SEQ ID NO: 889069 - DNA, 15 bp, Homo sapiens
tgtagatgtatgtgg

SEQ ID NO: 889070 - DNA, 15 bp, Homo sapiens
gtagatgtatgtggc

SEQ ID NO: 889071 - DNA, 15 bp, Homo sapiens
tagatgtatgtggct

SEQ ID NO: 889072 - DNA, 15 bp, Homo sapiens
agatgtatgtggctc

SEQ ID NO: 889073 - DNA, 15 bp, Homo sapiens
gatgtatgtggctct

SEQ ID NO: 889074 - DNA, 15 bp, Homo sapiens
atgtatgtggctctg

SEQ ID NO: 889075 - DNA, 15 bp, Homo sapiens
tgtatgtggctctgt

SEQ ID NO: 889076 - DNA, 15 bp, Homo sapiens
gtatgtggctctgtg

SEQ ID NO: 889077 - DNA, 15 bp, Homo sapiens
tatgtggctctgtgt

SEQ ID NO: 889078 - DNA, 15 bp, Homo sapiens
atgtggctctgtgtc

SEQ ID NO: 889079 - DNA, 15 bp, Homo sapiens
tgtggctctgtgtct

SEQ ID NO: 889080 - DNA, 15 bp, Homo sapiens
gtggctctgtgtctg

SEQ ID NO: 889081 - DNA, 15 bp, Homo sapiens
tggctctgtgtctgc

SEQ ID NO: 889082 - DNA, 15 bp, Homo sapiens
ggctctgtgtctgca

SEQ ID NO: 889083 - DNA, 15 bp, Homo sapiens
gctctgtgtctgcag

SEQ ID NO: 889084 - DNA, 15 bp, Homo sapiens
ctctgtgtctgcagg

SEQ ID NO: 889085 - DNA, 15 bp, Homo sapiens
tctgtgtctgcagga

SEQ ID NO: 889086 - DNA, 15 bp, Homo sapiens
ctgtgtctgcaggag

SEQ ID NO: 889087 - DNA, 15 bp, Homo sapiens
tgtgtctgcaggaga

SEQ ID NO: 889088 - DNA, 15 bp, Homo sapiens
gtgtctgcaggagac

SEQ ID NO: 889089 - DNA, 15 bp, Homo sapiens
tgtctgcaggagacc

SEQ ID NO: 889090 - DNA, 15 bp, Homo sapiens
gtctgcaggagacca

SEQ ID NO: 889091 - DNA, 15 bp, Homo sapiens
tctgcaggagaccaa

SEQ ID NO: 889092 - DNA, 15 bp, Homo sapiens
ctgcaggagaccaag

SEQ ID NO: 889093 - DNA, 15 bp, Homo sapiens
tgcaggagaccaagt

SEQ ID NO: 889094 - DNA, 15 bp, Homo sapiens
gcaggagaccaagta

SEQ ID NO: 889095 - DNA, 15 bp, Homo sapiens
caggagaccaagtat

SEQ ID NO: 889096 - DNA, 15 bp, Homo sapiens
aggagaccaagtatc

SEQ ID NO: 889097 - DNA, 15 bp, Homo sapiens
ggagaccaagtatct

SEQ ID NO: 889098 - DNA, 15 bp, Homo sapiens
gagaccaagtatctg

SEQ ID NO: 889099 - DNA, 15 bp, Homo sapiens
agaccaagtatctgc

SEQ ID NO: 889100 - DNA, 15 bp, Homo sapiens
gaccaagtatctgca

SEQ ID NO: 889101 - DNA, 15 bp, Homo sapiens
accaagtatctgcat

SEQ ID NO: 889102 - DNA, 15 bp, Homo sapiens
ccaagtatctgcatg

SEQ ID NO: 889103 - DNA, 15 bp, Homo sapiens
caagtatctgcatgt

SEQ ID NO: 889104 - DNA, 15 bp, Homo sapiens
aagtatctgcatgtt

SEQ ID NO: 889105 - DNA, 15 bp, Homo sapiens
agtatctgcatgttt

SEQ ID NO: 889106 - DNA, 15 bp, Homo sapiens
gtatctgcatgtttg

SEQ ID NO: 889107 - DNA, 15 bp, Homo sapiens
tatctgcatgtttgc

SEQ ID NO: 889108 - DNA, 15 bp, Homo sapiens
atctgcatgtttgca

SEQ ID NO: 889109 - DNA, 15 bp, Homo sapiens
tctgcatgtttgcaa

SEQ ID NO: 889110 - DNA, 15 bp, Homo sapiens
ctgcatgtttgcaaa

SEQ ID NO: 889111 - DNA, 15 bp, Homo sapiens
tgcatgtttgcaaaa

SEQ ID NO: 889112 - DNA, 15 bp, Homo sapiens
gcatgtttgcaaaaa

SEQ ID NO: 889113 - DNA, 15 bp, Homo sapiens
catgtttgcaaaaac

SEQ ID NO: 889114 - DNA, 15 bp, Homo sapiens
atgtttgcaaaaaca

SEQ ID NO: 889115 - DNA, 15 bp, Homo sapiens
tgtttgcaaaaacac

SEQ ID NO: 889116 - DNA, 15 bp, Homo sapiens
gtttgcaaaaacaca

SEQ ID NO: 889117 - DNA, 15 bp, Homo sapiens
tttgcaaaaacacac

SEQ ID NO: 889118 - DNA, 15 bp, Homo sapiens
ttgcaaaaacacaca

SEQ ID NO: 889119 - DNA, 15 bp, Homo sapiens
tgcaaaaacacacag

SEQ ID NO: 889120 - DNA, 15 bp, Homo sapiens
gcaaaaacacacagg

SEQ ID NO: 889121 - DNA, 15 bp, Homo sapiens
caaaaacacacagga

SEQ ID NO: 889122 - DNA, 15 bp, Homo sapiens
aaaaacacacaggat

SEQ ID NO: 889123 - DNA, 15 bp, Homo sapiens
aaaacacacaggatt

SEQ ID NO: 889124 - DNA, 15 bp, Homo sapiens
aaacacacaggattg

SEQ ID NO: 889125 - DNA, 15 bp, Homo sapiens
aacacacaggattgg

SEQ ID NO: 889126 - DNA, 15 bp, Homo sapiens
acacacaggattggc

SEQ ID NO: 889127 - DNA, 15 bp, Homo sapiens
cacacaggattggct

SEQ ID NO: 889128 - DNA, 15 bp, Homo sapiens
acacaggattggctg

SEQ ID NO: 889129 - DNA, 15 bp, Homo sapiens
cacaggattggctgt

SEQ ID NO: 889130 - DNA, 15 bp, Homo sapiens
acaggattggctgtc

SEQ ID NO: 889131 - DNA, 15 bp, Homo sapiens
caggattggctgtct

SEQ ID NO: 889132 - DNA, 15 bp, Homo sapiens
aggattggctgtctt

SEQ ID NO: 889133 - DNA, 15 bp, Homo sapiens
ggattggctgtcttt

SEQ ID NO: 889134 - DNA, 15 bp, Homo sapiens
gattggctgtctttt

SEQ ID NO: 889135 - DNA, 15 bp, Homo sapiens
attggctgtcttttt

SEQ ID NO: 889136 - DNA, 15 bp, Homo sapiens
ttggctgtctttttc

SEQ ID NO: 889137 - DNA, 15 bp, Homo sapiens
tggctgtctttttca

SEQ ID NO: 889138 - DNA, 15 bp, Homo sapiens
ggctgtctttttcag

SEQ ID NO: 889139 - DNA, 15 bp, Homo sapiens
gctgtctttttcagt

SEQ ID NO: 889140 - DNA, 15 bp, Homo sapiens
ctgtctttttcagtc

SEQ ID NO: 889141 - DNA, 15 bp, Homo sapiens
tgtctttttcagtct

SEQ ID NO: 889142 - DNA, 15 bp, Homo sapiens
gtctttttcagtctt

SEQ ID NO: 889143 - DNA, 15 bp, Homo sapiens
tctttttcagtcttt

SEQ ID NO: 889144 - DNA, 15 bp, Homo sapiens
ctttttcagtcttta

SEQ ID NO: 889145 - DNA, 15 bp, Homo sapiens
tttttcagtctttac

SEQ ID NO: 889146 - DNA, 15 bp, Homo sapiens
ttttcagtctttacc

SEQ ID NO: 889147 - DNA, 15 bp, Homo sapiens
tttcagtctttacct

SEQ ID NO: 889148 - DNA, 15 bp, Homo sapiens
ttcagtctttacctg

SEQ ID NO: 889149 - DNA, 15 bp, Homo sapiens
tcagtctttacctgg

SEQ ID NO: 889150 - DNA, 15 bp, Homo sapiens
cagtctttacctgga

SEQ ID NO: 889151 - DNA, 15 bp, Homo sapiens
agtctttacctggat

SEQ ID NO: 889152 - DNA, 15 bp, Homo sapiens
gtctttacctggatg

SEQ ID NO: 889153 - DNA, 15 bp, Homo sapiens
tctttacctggatgc

SEQ ID NO: 889154 - DNA, 15 bp, Homo sapiens
ctttacctggatgct

SEQ ID NO: 889155 - DNA, 15 bp, Homo sapiens
tttacctggatgctt

SEQ ID NO: 889156 - DNA, 15 bp, Homo sapiens
ttacctggatgcttg

SEQ ID NO: 889157 - DNA, 15 bp, Homo sapiens
tacctggatgcttgc

SEQ ID NO: 889158 - DNA, 15 bp, Homo sapiens
acctggatgcttgct

SEQ ID NO: 889159 - DNA, 15 bp, Homo sapiens
cctggatgcttgctg

SEQ ID NO: 889160 - DNA, 15 bp, Homo sapiens
ctggatgcttgctgg

SEQ ID NO: 889161 - DNA, 15 bp, Homo sapiens
tggatgcttgctgga

SEQ ID NO: 889162 - DNA, 15 bp, Homo sapiens
ggatgcttgctggat

SEQ ID NO: 889163 - DNA, 15 bp, Homo sapiens
gatgcttgctggatg

SEQ ID NO: 889164 - DNA, 15 bp, Homo sapiens
atgcttgctggatgc

SEQ ID NO: 889165 - DNA, 15 bp, Homo sapiens
tgcttgctggatgca

SEQ ID NO: 889166 - DNA, 15 bp, Homo sapiens
gcttgctggatgcac

SEQ ID NO: 889167 - DNA, 15 bp, Homo sapiens
cttgctggatgcact

SEQ ID NO: 889168 - DNA, 15 bp, Homo sapiens
ttgctggatgcactg

SEQ ID NO: 889169 - DNA, 15 bp, Homo sapiens
tgctggatgcactga

SEQ ID NO: 889170 - DNA, 15 bp, Homo sapiens
gctggatgcactgat

SEQ ID NO: 889171 - DNA, 15 bp, Homo sapiens
ctggatgcactgatg

SEQ ID NO: 889172 - DNA, 15 bp, Homo sapiens
tggatgcactgatgt

SEQ ID NO: 889173 - DNA, 15 bp, Homo sapiens
ggatgcactgatgta

SEQ ID NO: 889174 - DNA, 15 bp, Homo sapiens
gatgcactgatgtag

SEQ ID NO: 889175 - DNA, 15 bp, Homo sapiens
atgcactgatgtagc

SEQ ID NO: 889176 - DNA, 15 bp, Homo sapiens
tgcactgatgtagca

SEQ ID NO: 889177 - DNA, 15 bp, Homo sapiens
gcactgatgtagcac

SEQ ID NO: 889178 - DNA, 15 bp, Homo sapiens
cactgatgtagcact

SEQ ID NO: 889179 - DNA, 15 bp, Homo sapiens
actgatgtagcacta

SEQ ID NO: 889180 - DNA, 15 bp, Homo sapiens
ctgatgtagcactaa

SEQ ID NO: 889181 - DNA, 15 bp, Homo sapiens
tgatgtagcactaag

SEQ ID NO: 889182 - DNA, 15 bp, Homo sapiens
gatgtagcactaagt

SEQ ID NO: 889183 - DNA, 15 bp, Homo sapiens
atgtagcactaagtc

SEQ ID NO: 889184 - DNA, 15 bp, Homo sapiens
tgtagcactaagtcc

SEQ ID NO: 889185 - DNA, 15 bp, Homo sapiens
gtagcactaagtcct

SEQ ID NO: 889186 - DNA, 15 bp, Homo sapiens
tagcactaagtcctg

SEQ ID NO: 889187 - DNA, 15 bp, Homo sapiens
agcactaagtcctgg

SEQ ID NO: 889188 - DNA, 15 bp, Homo sapiens
gcactaagtcctggc

SEQ ID NO: 889189 - DNA, 15 bp, Homo sapiens
cactaagtcctggca

SEQ ID NO: 889190 - DNA, 15 bp, Homo sapiens
actaagtcctggcag

SEQ ID NO: 889191 - DNA, 15 bp, Homo sapiens
ctaagtcctggcagc

SEQ ID NO: 889192 - DNA, 15 bp, Homo sapiens
taagtcctggcagct

SEQ ID NO: 889193 - DNA, 15 bp, Homo sapiens
aagtcctggcagctg

SEQ ID NO: 889194 - DNA, 15 bp, Homo sapiens
agtcctggcagctgg

SEQ ID NO: 889195 - DNA, 15 bp, Homo sapiens
gtcctggcagctggg

SEQ ID NO: 889196 - DNA, 15 bp, Homo sapiens
tcctggcagctgggg

SEQ ID NO: 889197 - DNA, 15 bp, Homo sapiens
cctggcagctgggga

SEQ ID NO: 889198 - DNA, 15 bp, Homo sapiens
ctggcagctggggag

SEQ ID NO: 889199 - DNA, 15 bp, Homo sapiens
tggcagctggggagg

SEQ ID NO: 889200 - DNA, 15 bp, Homo sapiens
ggcagctggggaggt

SEQ ID NO: 889201 - DNA, 15 bp, Homo sapiens
gcagctggggaggtc

SEQ ID NO: 889202 - DNA, 15 bp, Homo sapiens
cagctggggaggtca

SEQ ID NO: 889203 - DNA, 15 bp, Homo sapiens
agctggggaggtcac

SEQ ID NO: 889204 - DNA, 15 bp, Homo sapiens
gctggggaggtcact

SEQ ID NO: 889205 - DNA, 15 bp, Homo sapiens
ctggggaggtcactc

SEQ ID NO: 889206 - DNA, 15 bp, Homo sapiens
tggggaggtcactcg

SEQ ID NO: 889207 - DNA, 15 bp, Homo sapiens
ggggaggtcactcgt

SEQ ID NO: 889208 - DNA, 15 bp, Homo sapiens
gggaggtcactcgtt

SEQ ID NO: 889209 - DNA, 15 bp, Homo sapiens
ggaggtcactcgttt

SEQ ID NO: 889210 - DNA, 15 bp, Homo sapiens
gaggtcactcgtttc

SEQ ID NO: 889211 - DNA, 15 bp, Homo sapiens
aggtcactcgtttca

SEQ ID NO: 889212 - DNA, 15 bp, Homo sapiens
ggtcactcgtttcag

SEQ ID NO: 889213 - DNA, 15 bp, Homo sapiens
gtcactcgtttcagc

SEQ ID NO: 889214 - DNA, 15 bp, Homo sapiens
tcactcgtttcagca

SEQ ID NO: 889215 - DNA, 15 bp, Homo sapiens
cactcgtttcagcaa

SEQ ID NO: 889216 - DNA, 15 bp, Homo sapiens
actcgtttcagcaaa

SEQ ID NO: 889217 - DNA, 15 bp, Homo sapiens
ctcgtttcagcaaac

SEQ ID NO: 889218 - DNA, 15 bp, Homo sapiens
tcgtttcagcaaact

SEQ ID NO: 889219 - DNA, 15 bp, Homo sapiens
cgtttcagcaaactg

SEQ ID NO: 889220 - DNA, 15 bp, Homo sapiens
gtttcagcaaactgc

SEQ ID NO: 889221 - DNA, 15 bp, Homo sapiens
tttcagcaaactgcc

SEQ ID NO: 889222 - DNA, 15 bp, Homo sapiens
ttcagcaaactgcct

SEQ ID NO: 889223 - DNA, 15 bp, Homo sapiens
tcagcaaactgcctc

SEQ ID NO: 889224 - DNA, 15 bp, Homo sapiens
cagcaaactgcctca

SEQ ID NO: 889225 - DNA, 15 bp, Homo sapiens
agcaaactgcctcac

SEQ ID NO: 889226 - DNA, 15 bp, Homo sapiens
gcaaactgcctcact

SEQ ID NO: 889227 - DNA, 15 bp, Homo sapiens
caaactgcctcactg

SEQ ID NO: 889228 - DNA, 15 bp, Homo sapiens
aaactgcctcactga

SEQ ID NO: 889229 - DNA, 15 bp, Homo sapiens
aactgcctcactgag

SEQ ID NO: 889230 - DNA, 15 bp, Homo sapiens
actgcctcactgaga

SEQ ID NO: 889231 - DNA, 15 bp, Homo sapiens
ctgcctcactgagac

SEQ ID NO: 889232 - DNA, 15 bp, Homo sapiens
tgcctcactgagaca

SEQ ID NO: 889233 - DNA, 15 bp, Homo sapiens
gcctcactgagacaa

SEQ ID NO: 889234 - DNA, 15 bp, Homo sapiens
cctcactgagacaag

SEQ ID NO: 889235 - DNA, 15 bp, Homo sapiens
ctcactgagacaagc

SEQ ID NO: 889236 - DNA, 15 bp, Homo sapiens
tcactgagacaagca

SEQ ID NO: 889237 - DNA, 15 bp, Homo sapiens
cactgagacaagcag

SEQ ID NO: 889238 - DNA, 15 bp, Homo sapiens
actgagacaagcaga

SEQ ID NO: 889239 - DNA, 15 bp, Homo sapiens
ctgagacaagcagac

SEQ ID NO: 889240 - DNA, 15 bp, Homo sapiens
tgagacaagcagact

SEQ ID NO: 889241 - DNA, 15 bp, Homo sapiens
gagacaagcagactc

SEQ ID NO: 889242 - DNA, 15 bp, Homo sapiens
agacaagcagactcc

SEQ ID NO: 889243 - DNA, 15 bp, Homo sapiens
gacaagcagactcca

SEQ ID NO: 889244 - DNA, 15 bp, Homo sapiens
acaagcagactccag

SEQ ID NO: 889245 - DNA, 15 bp, Homo sapiens
caagcagactccagc

SEQ ID NO: 889246 - DNA, 15 bp, Homo sapiens
aagcagactccagct

SEQ ID NO: 889247 - DNA, 15 bp, Homo sapiens
agcagactccagctg

SEQ ID NO: 889248 - DNA, 15 bp, Homo sapiens
gcagactccagctga

SEQ ID NO: 889249 - DNA, 15 bp, Homo sapiens
cagactccagctgag

SEQ ID NO: 889250 - DNA, 15 bp, Homo sapiens
agactccagctgaga

SEQ ID NO: 889251 - DNA, 15 bp, Homo sapiens
gactccagctgagag

SEQ ID NO: 889252 - DNA, 15 bp, Homo sapiens
actccagctgagagg

SEQ ID NO: 889253 - DNA, 15 bp, Homo sapiens
ctccagctgagagga

SEQ ID NO: 889254 - DNA, 15 bp, Homo sapiens
tccagctgagaggat

SEQ ID NO: 889255 - DNA, 15 bp, Homo sapiens
ccagctgagaggatc

SEQ ID NO: 889256 - DNA, 15 bp, Homo sapiens
cagctgagaggatca

SEQ ID NO: 889257 - DNA, 15 bp, Homo sapiens
agctgagaggatcag

SEQ ID NO: 889258 - DNA, 15 bp, Homo sapiens
gctgagaggatcagc

SEQ ID NO: 889259 - DNA, 15 bp, Homo sapiens
ctgagaggatcagcc

SEQ ID NO: 889260 - DNA, 15 bp, Homo sapiens
tgagaggatcagccc

SEQ ID NO: 889261 - DNA, 15 bp, Homo sapiens
gagaggatcagccca

SEQ ID NO: 889262 - DNA, 15 bp, Homo sapiens
agaggatcagcccat

SEQ ID NO: 889263 - DNA, 15 bp, Homo sapiens
gaggatcagcccatt

SEQ ID NO: 889264 - DNA, 15 bp, Homo sapiens
aggatcagcccattc

SEQ ID NO: 889265 - DNA, 15 bp, Homo sapiens
ggatcagcccattca

SEQ ID NO: 889266 - DNA, 15 bp, Homo sapiens
gatcagcccattcag

SEQ ID NO: 889267 - DNA, 15 bp, Homo sapiens
atcagcccattcagg

SEQ ID NO: 889268 - DNA, 15 bp, Homo sapiens
tcagcccattcaggg

SEQ ID NO: 889269 - DNA, 15 bp, Homo sapiens
cagcccattcagggg

SEQ ID NO: 889270 - DNA, 15 bp, Homo sapiens
agcccattcaggggg

SEQ ID NO: 889271 - DNA, 15 bp, Homo sapiens
gcccattcaggggga

SEQ ID NO: 889272 - DNA, 15 bp, Homo sapiens
cccattcagggggag

SEQ ID NO: 889273 - DNA, 15 bp, Homo sapiens
ccattcagggggagg

SEQ ID NO: 889274 - DNA, 15 bp, Homo sapiens
cattcagggggaggt

SEQ ID NO: 889275 - DNA, 15 bp, Homo sapiens
attcagggggaggtg

SEQ ID NO: 889276 - DNA, 15 bp, Homo sapiens
ttcagggggaggtga

SEQ ID NO: 889277 - DNA, 15 bp, Homo sapiens
tcagggggaggtgac

SEQ ID NO: 889278 - DNA, 15 bp, Homo sapiens
cagggggaggtgaca

SEQ ID NO: 889279 - DNA, 15 bp, Homo sapiens
agggggaggtgacac

SEQ ID NO: 889280 - DNA, 15 bp, Homo sapiens
gggggaggtgacacc

SEQ ID NO: 889281 - DNA, 15 bp, Homo sapiens
ggggaggtgacacca

SEQ ID NO: 889282 - DNA, 15 bp, Homo sapiens
gggaggtgacaccaa

SEQ ID NO: 889283 - DNA, 15 bp, Homo sapiens
ggaggtgacaccaac

SEQ ID NO: 889284 - DNA, 15 bp, Homo sapiens
gaggtgacaccaacc

SEQ ID NO: 889285 - DNA, 15 bp, Homo sapiens
aggtgacaccaaccc

SEQ ID NO: 889286 - DNA, 15 bp, Homo sapiens
ggtgacaccaaccca

SEQ ID NO: 889287 - DNA, 15 bp, Homo sapiens
gtgacaccaacccag

SEQ ID NO: 889288 - DNA, 15 bp, Homo sapiens
tgacaccaacccagg

SEQ ID NO: 889289 - DNA, 15 bp, Homo sapiens
gacaccaacccagga

SEQ ID NO: 889290 - DNA, 15 bp, Homo sapiens
acaccaacccaggag

SEQ ID NO: 889291 - DNA, 15 bp, Homo sapiens
caccaacccaggagt

SEQ ID NO: 889292 - DNA, 15 bp, Homo sapiens
accaacccaggagtg

SEQ ID NO: 889293 - DNA, 15 bp, Homo sapiens
ccaacccaggagtgg

SEQ ID NO: 889294 - DNA, 15 bp, Homo sapiens
caacccaggagtggg

SEQ ID NO: 889295 - DNA, 15 bp, Homo sapiens
aacccaggagtggga

SEQ ID NO: 889296 - DNA, 15 bp, Homo sapiens
acccaggagtgggaa

SEQ ID NO: 889297 - DNA, 15 bp, Homo sapiens
cccaggagtgggaag

SEQ ID NO: 889298 - DNA, 15 bp, Homo sapiens
ccaggagtgggaagc

SEQ ID NO: 889299 - DNA, 15 bp, Homo sapiens
caggagtgggaagca

SEQ ID NO: 889300 - DNA, 15 bp, Homo sapiens
aggagtgggaagcag

SEQ ID NO: 889301 - DNA, 15 bp, Homo sapiens
ggagtgggaagcaga

SEQ ID NO: 889302 - DNA, 15 bp, Homo sapiens
gagtgggaagcagag

SEQ ID NO: 889303 - DNA, 15 bp, Homo sapiens
agtgggaagcagagt

SEQ ID NO: 889304 - DNA, 15 bp, Homo sapiens
gtgggaagcagagtc

SEQ ID NO: 889305 - DNA, 15 bp, Homo sapiens
tgggaagcagagtcc

SEQ ID NO: 889306 - DNA, 15 bp, Homo sapiens
gggaagcagagtccc

SEQ ID NO: 889307 - DNA, 15 bp, Homo sapiens
ggaagcagagtccct

SEQ ID NO: 889308 - DNA, 15 bp, Homo sapiens
gaagcagagtccctt

SEQ ID NO: 889309 - DNA, 15 bp, Homo sapiens
aagcagagtcccttc

SEQ ID NO: 889310 - DNA, 15 bp, Homo sapiens
agcagagtcccttca

SEQ ID NO: 889311 - DNA, 15 bp, Homo sapiens
gcagagtcccttcat

SEQ ID NO: 889312 - DNA, 15 bp, Homo sapiens
cagagtcccttcata

SEQ ID NO: 889313 - DNA, 15 bp, Homo sapiens
agagtcccttcatat

SEQ ID NO: 889314 - DNA, 15 bp, Homo sapiens
gagtcccttcatatc

SEQ ID NO: 889315 - DNA, 15 bp, Homo sapiens
agtcccttcatatcc

SEQ ID NO: 889316 - DNA, 15 bp, Homo sapiens
gtcccttcatatcct

SEQ ID NO: 889317 - DNA, 15 bp, Homo sapiens
tcccttcatatcctt

SEQ ID NO: 889318 - DNA, 15 bp, Homo sapiens
cccttcatatccttg

SEQ ID NO: 889319 - DNA, 15 bp, Homo sapiens
ccttcatatccttgg

SEQ ID NO: 889320 - DNA, 15 bp, Homo sapiens
cttcatatccttggt

SEQ ID NO: 889321 - DNA, 15 bp, Homo sapiens
ttcatatccttggta

SEQ ID NO: 889322 - DNA, 15 bp, Homo sapiens
tcatatccttggtag

SEQ ID NO: 889323 - DNA, 15 bp, Homo sapiens
catatccttggtaga

SEQ ID NO: 889324 - DNA, 15 bp, Homo sapiens
atatccttggtagac

SEQ ID NO: 889325 - DNA, 15 bp, Homo sapiens
tatccttggtagact

SEQ ID NO: 889326 - DNA, 15 bp, Homo sapiens
atccttggtagactg

SEQ ID NO: 889327 - DNA, 15 bp, Homo sapiens
tccttggtagactgt

SEQ ID NO: 889328 - DNA, 15 bp, Homo sapiens
ccttggtagactgtc

SEQ ID NO: 889329 - DNA, 15 bp, Homo sapiens
cttggtagactgtct

SEQ ID NO: 889330 - DNA, 15 bp, Homo sapiens
ttggtagactgtctg

SEQ ID NO: 889331 - DNA, 15 bp, Homo sapiens
tggtagactgtctgc

SEQ ID NO: 889332 - DNA, 15 bp, Homo sapiens
ggtagactgtctgct

SEQ ID NO: 889333 - DNA, 15 bp, Homo sapiens
gtagactgtctgctc

SEQ ID NO: 889334 - DNA, 15 bp, Homo sapiens
tagactgtctgctcc

SEQ ID NO: 889335 - DNA, 15 bp, Homo sapiens
agactgtctgctccc

SEQ ID NO: 889336 - DNA, 15 bp, Homo sapiens
gactgtctgctccct

SEQ ID NO: 889337 - DNA, 15 bp, Homo sapiens
actgtctgctccctg

SEQ ID NO: 889338 - DNA, 15 bp, Homo sapiens
ctgtctgctccctgc

SEQ ID NO: 889339 - DNA, 15 bp, Homo sapiens
tgtctgctccctgca

SEQ ID NO: 889340 - DNA, 15 bp, Homo sapiens
gtctgctccctgcag

SEQ ID NO: 889341 - DNA, 15 bp, Homo sapiens
tctgctccctgcagt

SEQ ID NO: 889342 - DNA, 15 bp, Homo sapiens
ctgctccctgcagtc

SEQ ID NO: 889343 - DNA, 15 bp, Homo sapiens
tgctccctgcagtca

SEQ ID NO: 889344 - DNA, 15 bp, Homo sapiens
gctccctgcagtcag

SEQ ID NO: 889345 - DNA, 15 bp, Homo sapiens
ctccctgcagtcagt

SEQ ID NO: 889346 - DNA, 15 bp, Homo sapiens
tccctgcagtcagtc

SEQ ID NO: 889347 - DNA, 15 bp, Homo sapiens
ccctgcagtcagtca

SEQ ID NO: 889348 - DNA, 15 bp, Homo sapiens
cctgcagtcagtcac

SEQ ID NO: 889349 - DNA, 15 bp, Homo sapiens
ctgcagtcagtcaca

SEQ ID NO: 889350 - DNA, 15 bp, Homo sapiens
tgcagtcagtcacag

SEQ ID NO: 889351 - DNA, 15 bp, Homo sapiens
gcagtcagtcacagg

SEQ ID NO: 889352 - DNA, 15 bp, Homo sapiens
cagtcagtcacaggc

SEQ ID NO: 889353 - DNA, 15 bp, Homo sapiens
agtcagtcacaggca

SEQ ID NO: 889354 - DNA, 15 bp, Homo sapiens
gtcagtcacaggcaa

SEQ ID NO: 889355 - DNA, 15 bp, Homo sapiens
tcagtcacaggcaac

SEQ ID NO: 889356 - DNA, 15 bp, Homo sapiens
cagtcacaggcaact

SEQ ID NO: 889357 - DNA, 15 bp, Homo sapiens
agtcacaggcaactc

SEQ ID NO: 889358 - DNA, 15 bp, Homo sapiens
gtcacaggcaactct

SEQ ID NO: 889359 - DNA, 15 bp, Homo sapiens
tcacaggcaactcta

SEQ ID NO: 889360 - DNA, 15 bp, Homo sapiens
cacaggcaactctat

SEQ ID NO: 889361 - DNA, 15 bp, Homo sapiens
acaggcaactctatt

SEQ ID NO: 889362 - DNA, 15 bp, Homo sapiens
caggcaactctattc

SEQ ID NO: 889363 - DNA, 15 bp, Homo sapiens
aggcaactctattca

SEQ ID NO: 889364 - DNA, 15 bp, Homo sapiens
ggcaactctattcat

SEQ ID NO: 889365 - DNA, 15 bp, Homo sapiens
gcaactctattcatt

SEQ ID NO: 889366 - DNA, 15 bp, Homo sapiens
caactctattcattg

SEQ ID NO: 889367 - DNA, 15 bp, Homo sapiens
aactctattcattgg

SEQ ID NO: 889368 - DNA, 15 bp, Homo sapiens
actctattcattggc

SEQ ID NO: 889369 - DNA, 15 bp, Homo sapiens
ctctattcattggca

SEQ ID NO: 889370 - DNA, 15 bp, Homo sapiens
tctattcattggcaa

SEQ ID NO: 889371 - DNA, 15 bp, Homo sapiens
ctattcattggcaaa

SEQ ID NO: 889372 - DNA, 15 bp, Homo sapiens
tattcattggcaaag

SEQ ID NO: 889373 - DNA, 15 bp, Homo sapiens
attcattggcaaagg

SEQ ID NO: 889374 - DNA, 15 bp, Homo sapiens
ttcattggcaaagga

SEQ ID NO: 889375 - DNA, 15 bp, Homo sapiens
tcattggcaaaggaa

SEQ ID NO: 889376 - DNA, 15 bp, Homo sapiens
cattggcaaaggaag

SEQ ID NO: 889377 - DNA, 15 bp, Homo sapiens
attggcaaaggaaga

SEQ ID NO: 889378 - DNA, 15 bp, Homo sapiens
ttggcaaaggaagat

SEQ ID NO: 889379 - DNA, 15 bp, Homo sapiens
tggcaaaggaagatc

SEQ ID NO: 889380 - DNA, 15 bp, Homo sapiens
ggcaaaggaagatcc

SEQ ID NO: 889381 - DNA, 15 bp, Homo sapiens
gcaaaggaagatcct

SEQ ID NO: 889382 - DNA, 15 bp, Homo sapiens
caaaggaagatcctg

SEQ ID NO: 889383 - DNA, 15 bp, Homo sapiens
aaaggaagatcctga

SEQ ID NO: 889384 - DNA, 15 bp, Homo sapiens
aaggaagatcctgag

SEQ ID NO: 889385 - DNA, 15 bp, Homo sapiens
aggaagatcctgagc

SEQ ID NO: 889386 - DNA, 15 bp, Homo sapiens
ggaagatcctgagca

SEQ ID NO: 889387 - DNA, 15 bp, Homo sapiens
gaagatcctgagcaa

SEQ ID NO: 889388 - DNA, 15 bp, Homo sapiens
aagatcctgagcaaa

SEQ ID NO: 889389 - DNA, 15 bp, Homo sapiens
agatcctgagcaaat

SEQ ID NO: 889390 - DNA, 15 bp, Homo sapiens
gatcctgagcaaatg

SEQ ID NO: 889391 - DNA, 15 bp, Homo sapiens
atcctgagcaaatgc

SEQ ID NO: 889392 - DNA, 15 bp, Homo sapiens
tcctgagcaaatgct

SEQ ID NO: 889393 - DNA, 15 bp, Homo sapiens
cctgagcaaatgcta

SEQ ID NO: 889394 - DNA, 15 bp, Homo sapiens
ctgagcaaatgctat

SEQ ID NO: 889395 - DNA, 15 bp, Homo sapiens
tgagcaaatgctatt

SEQ ID NO: 889396 - DNA, 15 bp, Homo sapiens
gagcaaatgctattt

SEQ ID NO: 889397 - DNA, 15 bp, Homo sapiens
agcaaatgctatttc

SEQ ID NO: 889398 - DNA, 15 bp, Homo sapiens
gcaaatgctatttct

SEQ ID NO: 889399 - DNA, 15 bp, Homo sapiens
caaatgctatttctg

SEQ ID NO: 889400 - DNA, 15 bp, Homo sapiens
aaatgctatttctgc

SEQ ID NO: 889401 - DNA, 15 bp, Homo sapiens
aatgctatttctgca

SEQ ID NO: 889402 - DNA, 15 bp, Homo sapiens
atgctatttctgcag

SEQ ID NO: 889403 - DNA, 15 bp, Homo sapiens
tgctatttctgcagc

SEQ ID NO: 889404 - DNA, 15 bp, Homo sapiens
gctatttctgcagcc

SEQ ID NO: 889405 - DNA, 15 bp, Homo sapiens
ctatttctgcagccc

SEQ ID NO: 889406 - DNA, 15 bp, Homo sapiens
tatttctgcagccca

SEQ ID NO: 889407 - DNA, 15 bp, Homo sapiens
atttctgcagcccat

SEQ ID NO: 889408 - DNA, 15 bp, Homo sapiens
tttctgcagcccatc

SEQ ID NO: 889409 - DNA, 15 bp, Homo sapiens
ttctgcagcccatct

SEQ ID NO: 889410 - DNA, 15 bp, Homo sapiens
tctgcagcccatcta

SEQ ID NO: 889411 - DNA, 15 bp, Homo sapiens
ctgcagcccatctag

SEQ ID NO: 889412 - DNA, 15 bp, Homo sapiens
tgcagcccatctagt

SEQ ID NO: 889413 - DNA, 15 bp, Homo sapiens
gcagcccatctagtt

SEQ ID NO: 889414 - DNA, 15 bp, Homo sapiens
cagcccatctagttt

SEQ ID NO: 889415 - DNA, 15 bp, Homo sapiens
agcccatctagtttg

SEQ ID NO: 889416 - DNA, 15 bp, Homo sapiens
gcccatctagtttgc

SEQ ID NO: 889417 - DNA, 15 bp, Homo sapiens
cccatctagtttgcc

SEQ ID NO: 889418 - DNA, 15 bp, Homo sapiens
ccatctagtttgcca

SEQ ID NO: 889419 - DNA, 15 bp, Homo sapiens
catctagtttgccag

SEQ ID NO: 889420 - DNA, 15 bp, Homo sapiens
atctagtttgccagg

SEQ ID NO: 889421 - DNA, 15 bp, Homo sapiens
tctagtttgccaggt

SEQ ID NO: 889422 - DNA, 15 bp, Homo sapiens
ctagtttgccaggtc

SEQ ID NO: 889423 - DNA, 15 bp, Homo sapiens
tagtttgccaggtca

SEQ ID NO: 889424 - DNA, 15 bp, Homo sapiens
agtttgccaggtcac

SEQ ID NO: 889425 - DNA, 15 bp, Homo sapiens
gtttgccaggtcaca

SEQ ID NO: 889426 - DNA, 15 bp, Homo sapiens
tttgccaggtcacag

SEQ ID NO: 889427 - DNA, 15 bp, Homo sapiens
ttgccaggtcacaga

SEQ ID NO: 889428 - DNA, 15 bp, Homo sapiens
tgccaggtcacagag

SEQ ID NO: 889429 - DNA, 15 bp, Homo sapiens
gccaggtcacagagc

SEQ ID NO: 889430 - DNA, 15 bp, Homo sapiens
ccaggtcacagagct

SEQ ID NO: 889431 - DNA, 15 bp, Homo sapiens
caggtcacagagctt

SEQ ID NO: 889432 - DNA, 15 bp, Homo sapiens
aggtcacagagcttc

SEQ ID NO: 889433 - DNA, 15 bp, Homo sapiens
ggtcacagagcttca

SEQ ID NO: 889434 - DNA, 15 bp, Homo sapiens
gtcacagagcttcaa

SEQ ID NO: 889435 - DNA, 15 bp, Homo sapiens
tcacagagcttcaag

SEQ ID NO: 889436 - DNA, 15 bp, Homo sapiens
cacagagcttcaagc

SEQ ID NO: 889437 - DNA, 15 bp, Homo sapiens
acagagcttcaagct

SEQ ID NO: 889438 - DNA, 15 bp, Homo sapiens
cagagcttcaagctc

SEQ ID NO: 889439 - DNA, 15 bp, Homo sapiens
agagcttcaagctca

SEQ ID NO: 889440 - DNA, 15 bp, Homo sapiens
gagcttcaagctcag

SEQ ID NO: 889441 - DNA, 15 bp, Homo sapiens
agcttcaagctcagg

SEQ ID NO: 889442 - DNA, 15 bp, Homo sapiens
gcttcaagctcagga

SEQ ID NO: 889443 - DNA, 15 bp, Homo sapiens
cttcaagctcaggaa

SEQ ID NO: 889444 - DNA, 15 bp, Homo sapiens
ttcaagctcaggaag

SEQ ID NO: 889445 - DNA, 15 bp, Homo sapiens
tcaagctcaggaaga

SEQ ID NO: 889446 - DNA, 15 bp, Homo sapiens
caagctcaggaagat

SEQ ID NO: 889447 - DNA, 15 bp, Homo sapiens
aagctcaggaagatt

SEQ ID NO: 889448 - DNA, 15 bp, Homo sapiens
agctcaggaagatta

SEQ ID NO: 889449 - DNA, 15 bp, Homo sapiens
gctcaggaagattac

SEQ ID NO: 889450 - DNA, 15 bp, Homo sapiens
ctcaggaagattaca

SEQ ID NO: 889451 - DNA, 15 bp, Homo sapiens
tcaggaagattacaa

SEQ ID NO: 889452 - DNA, 15 bp, Homo sapiens
caggaagattacaaa

SEQ ID NO: 889453 - DNA, 15 bp, Homo sapiens
aggaagattacaaaa

SEQ ID NO: 889454 - DNA, 15 bp, Homo sapiens
ggaagattacaaaat

SEQ ID NO: 889455 - DNA, 15 bp, Homo sapiens
gaagattacaaaatt

SEQ ID NO: 889456 - DNA, 15 bp, Homo sapiens
aagattacaaaatta

SEQ ID NO: 889457 - DNA, 15 bp, Homo sapiens
agattacaaaattat

SEQ ID NO: 889458 - DNA, 15 bp, Homo sapiens
gattacaaaattata

SEQ ID NO: 889459 - DNA, 15 bp, Homo sapiens
attacaaaattataa

SEQ ID NO: 889460 - DNA, 15 bp, Homo sapiens
ttacaaaattataag

SEQ ID NO: 889461 - DNA, 15 bp, Homo sapiens
tacaaaattataagg

SEQ ID NO: 889462 - DNA, 15 bp, Homo sapiens
acaaaattataagga

SEQ ID NO: 889463 - DNA, 15 bp, Homo sapiens
caaaattataaggag

SEQ ID NO: 889464 - DNA, 15 bp, Homo sapiens
aaaattataaggagg

SEQ ID NO: 889465 - DNA, 15 bp, Homo sapiens
aaattataaggaggc

SEQ ID NO: 889466 - DNA, 15 bp, Homo sapiens
aattataaggaggct

SEQ ID NO: 889467 - DNA, 15 bp, Homo sapiens
attataaggaggctc

SEQ ID NO: 889468 - DNA, 15 bp, Homo sapiens
ttataaggaggctct

SEQ ID NO: 889469 - DNA, 15 bp, Homo sapiens
tataaggaggctctc

SEQ ID NO: 889470 - DNA, 15 bp, Homo sapiens
ataaggaggctctca

SEQ ID NO: 889471 - DNA, 15 bp, Homo sapiens
taaggaggctctcat

SEQ ID NO: 889472 - DNA, 15 bp, Homo sapiens
aaggaggctctcatt

SEQ ID NO: 889473 - DNA, 15 bp, Homo sapiens
aggaggctctcattc

SEQ ID NO: 889474 - DNA, 15 bp, Homo sapiens
ggaggctctcattct

SEQ ID NO: 889475 - DNA, 15 bp, Homo sapiens
gaggctctcattcta

SEQ ID NO: 889476 - DNA, 15 bp, Homo sapiens
aggctctcattctaa

SEQ ID NO: 889477 - DNA, 15 bp, Homo sapiens
ggctctcattctaag

SEQ ID NO: 889478 - DNA, 15 bp, Homo sapiens
gctctcattctaaga

SEQ ID NO: 889479 - DNA, 15 bp, Homo sapiens
ctctcattctaagag

SEQ ID NO: 889480 - DNA, 15 bp, Homo sapiens
tctcattctaagagg

SEQ ID NO: 889481 - DNA, 15 bp, Homo sapiens
ctcattctaagagga

SEQ ID NO: 889482 - DNA, 15 bp, Homo sapiens
tcattctaagaggaa

SEQ ID NO: 889483 - DNA, 15 bp, Homo sapiens
cattctaagaggaat

SEQ ID NO: 889484 - DNA, 15 bp, Homo sapiens
attctaagaggaatc

SEQ ID NO: 889485 - DNA, 15 bp, Homo sapiens
ttctaagaggaatcc

SEQ ID NO: 889486 - DNA, 15 bp, Homo sapiens
tctaagaggaatccc

SEQ ID NO: 889487 - DNA, 15 bp, Homo sapiens
ctaagaggaatccct

SEQ ID NO: 889488 - DNA, 15 bp, Homo sapiens
taagaggaatccctc

SEQ ID NO: 889489 - DNA, 15 bp, Homo sapiens
aagaggaatccctca

SEQ ID NO: 889490 - DNA, 15 bp, Homo sapiens
agaggaatccctcag

SEQ ID NO: 889491 - DNA, 15 bp, Homo sapiens
gaggaatccctcagt

SEQ ID NO: 889492 - DNA, 15 bp, Homo sapiens
aggaatccctcagtg

SEQ ID NO: 889493 - DNA, 15 bp, Homo sapiens
ggaatccctcagtga

SEQ ID NO: 889494 - DNA, 15 bp, Homo sapiens
gaatccctcagtgat

SEQ ID NO: 889495 - DNA, 15 bp, Homo sapiens
aatccctcagtgata

SEQ ID NO: 889496 - DNA, 15 bp, Homo sapiens
atccctcagtgatat

SEQ ID NO: 889497 - DNA, 15 bp, Homo sapiens
tccctcagtgatatg

SEQ ID NO: 889498 - DNA, 15 bp, Homo sapiens
ccctcagtgatatgc

SEQ ID NO: 889499 - DNA, 15 bp, Homo sapiens
cctcagtgatatgcc

SEQ ID NO: 889500 - DNA, 15 bp, Homo sapiens
ctcagtgatatgcca

SEQ ID NO: 889501 - DNA, 15 bp, Homo sapiens
tcagtgatatgccac

SEQ ID NO: 889502 - DNA, 15 bp, Homo sapiens
cagtgatatgccaca

SEQ ID NO: 889503 - DNA, 15 bp, Homo sapiens
agtgatatgccacac

SEQ ID NO: 889504 - DNA, 15 bp, Homo sapiens
gtgatatgccacacc

SEQ ID NO: 889505 - DNA, 15 bp, Homo sapiens
tgatatgccacaccc

SEQ ID NO: 889506 - DNA, 15 bp, Homo sapiens
gatatgccacaccca

SEQ ID NO: 889507 - DNA, 15 bp, Homo sapiens
atatgccacacccag

SEQ ID NO: 889508 - DNA, 15 bp, Homo sapiens
tatgccacacccagt

SEQ ID NO: 889509 - DNA, 15 bp, Homo sapiens
atgccacacccagtg

SEQ ID NO: 889510 - DNA, 15 bp, Homo sapiens
tgccacacccagtgt

SEQ ID NO: 889511 - DNA, 15 bp, Homo sapiens
gccacacccagtgtt

SEQ ID NO: 889512 - DNA, 15 bp, Homo sapiens
ccacacccagtgttt

SEQ ID NO: 889513 - DNA, 15 bp, Homo sapiens
cacacccagtgtttt

SEQ ID NO: 889514 - DNA, 15 bp, Homo sapiens
acacccagtgttttc

SEQ ID NO: 889515 - DNA, 15 bp, Homo sapiens
cacccagtgttttcc

SEQ ID NO: 889516 - DNA, 15 bp, Homo sapiens
acccagtgttttcca

SEQ ID NO: 889517 - DNA, 15 bp, Homo sapiens
cccagtgttttccaa

SEQ ID NO: 889518 - DNA, 15 bp, Homo sapiens
ccagtgttttccaaa

SEQ ID NO: 889519 - DNA, 15 bp, Homo sapiens
cagtgttttccaaat

SEQ ID NO: 889520 - DNA, 15 bp, Homo sapiens
agtgttttccaaatt

SEQ ID NO: 889521 - DNA, 15 bp, Homo sapiens
gtgttttccaaattc

SEQ ID NO: 889522 - DNA, 15 bp, Homo sapiens
tgttttccaaattct

SEQ ID NO: 889523 - DNA, 15 bp, Homo sapiens
gttttccaaattctt

SEQ ID NO: 889524 - DNA, 15 bp, Homo sapiens
ttttccaaattcttt

SEQ ID NO: 889525 - DNA, 15 bp, Homo sapiens
tttccaaattctttc

SEQ ID NO: 889526 - DNA, 15 bp, Homo sapiens
ttccaaattctttcg

SEQ ID NO: 889527 - DNA, 15 bp, Homo sapiens
tccaaattctttcgc

SEQ ID NO: 889528 - DNA, 15 bp, Homo sapiens
ccaaattctttcgca

SEQ ID NO: 889529 - DNA, 15 bp, Homo sapiens
caaattctttcgcat

SEQ ID NO: 889530 - DNA, 15 bp, Homo sapiens
aaattctttcgcatt

SEQ ID NO: 889531 - DNA, 15 bp, Homo sapiens
aattctttcgcatta

SEQ ID NO: 889532 - DNA, 15 bp, Homo sapiens
attctttcgcattag

SEQ ID NO: 889533 - DNA, 15 bp, Homo sapiens
ttctttcgcattagg

SEQ ID NO: 889534 - DNA, 15 bp, Homo sapiens
tctttcgcattaggt

SEQ ID NO: 889535 - DNA, 15 bp, Homo sapiens
ctttcgcattaggtt

SEQ ID NO: 889536 - DNA, 15 bp, Homo sapiens
tttcgcattaggtta

SEQ ID NO: 889537 - DNA, 15 bp, Homo sapiens
ttcgcattaggttat

SEQ ID NO: 889538 - DNA, 15 bp, Homo sapiens
tcgcattaggttatc

SEQ ID NO: 889539 - DNA, 15 bp, Homo sapiens
cgcattaggttatct

SEQ ID NO: 889540 - DNA, 15 bp, Homo sapiens
gcattaggttatctc

SEQ ID NO: 889541 - DNA, 15 bp, Homo sapiens
cattaggttatctca

SEQ ID NO: 889542 - DNA, 15 bp, Homo sapiens
attaggttatctcat

SEQ ID NO: 889543 - DNA, 15 bp, Homo sapiens
ttaggttatctcatt

SEQ ID NO: 889544 - DNA, 15 bp, Homo sapiens
taggttatctcattt

SEQ ID NO: 889545 - DNA, 15 bp, Homo sapiens
aggttatctcattta

SEQ ID NO: 889546 - DNA, 15 bp, Homo sapiens
ggttatctcatttaa

SEQ ID NO: 889547 - DNA, 15 bp, Homo sapiens
gttatctcatttaag

SEQ ID NO: 889548 - DNA, 15 bp, Homo sapiens
ttatctcatttaagc

SEQ ID NO: 889549 - DNA, 15 bp, Homo sapiens
tatctcatttaagct

SEQ ID NO: 889550 - DNA, 15 bp, Homo sapiens
atctcatttaagctt

SEQ ID NO: 889551 - DNA, 15 bp, Homo sapiens
tctcatttaagcttt

SEQ ID NO: 889552 - DNA, 15 bp, Homo sapiens
ctcatttaagctttg

SEQ ID NO: 889553 - DNA, 15 bp, Homo sapiens
tcatttaagctttgc

SEQ ID NO: 889554 - DNA, 15 bp, Homo sapiens
catttaagctttgca

SEQ ID NO: 889555 - DNA, 15 bp, Homo sapiens
atttaagctttgcaa

SEQ ID NO: 889556 - DNA, 15 bp, Homo sapiens
tttaagctttgcaac

SEQ ID NO: 889557 - DNA, 15 bp, Homo sapiens
ttaagctttgcaaca

SEQ ID NO: 889558 - DNA, 15 bp, Homo sapiens
taagctttgcaacaa

SEQ ID NO: 889559 - DNA, 15 bp, Homo sapiens
aagctttgcaacaac

SEQ ID NO: 889560 - DNA, 15 bp, Homo sapiens
agctttgcaacaacc

SEQ ID NO: 889561 - DNA, 15 bp, Homo sapiens
gctttgcaacaacca

SEQ ID NO: 889562 - DNA, 15 bp, Homo sapiens
ctttgcaacaaccaa

SEQ ID NO: 889563 - DNA, 15 bp, Homo sapiens
tttgcaacaaccaac

SEQ ID NO: 889564 - DNA, 15 bp, Homo sapiens
ttgcaacaaccaact

SEQ ID NO: 889565 - DNA, 15 bp, Homo sapiens
tgcaacaaccaactc

SEQ ID NO: 889566 - DNA, 15 bp, Homo sapiens
gcaacaaccaactca

SEQ ID NO: 889567 - DNA, 15 bp, Homo sapiens
caacaaccaactcag

SEQ ID NO: 889568 - DNA, 15 bp, Homo sapiens
aacaaccaactcagg

SEQ ID NO: 889569 - DNA, 15 bp, Homo sapiens
acaaccaactcaggc

SEQ ID NO: 889570 - DNA, 15 bp, Homo sapiens
caaccaactcaggca

SEQ ID NO: 889571 - DNA, 15 bp, Homo sapiens
aaccaactcaggcag

SEQ ID NO: 889572 - DNA, 15 bp, Homo sapiens
accaactcaggcagc

SEQ ID NO: 889573 - DNA, 15 bp, Homo sapiens
ccaactcaggcagct

SEQ ID NO: 889574 - DNA, 15 bp, Homo sapiens
caactcaggcagcta

SEQ ID NO: 889575 - DNA, 15 bp, Homo sapiens
aactcaggcagctaa

SEQ ID NO: 889576 - DNA, 15 bp, Homo sapiens
actcaggcagctaaa

SEQ ID NO: 889577 - DNA, 15 bp, Homo sapiens
ctcaggcagctaaag

SEQ ID NO: 889578 - DNA, 15 bp, Homo sapiens
tcaggcagctaaagc

SEQ ID NO: 889579 - DNA, 15 bp, Homo sapiens
caggcagctaaagca

SEQ ID NO: 889580 - DNA, 15 bp, Homo sapiens
aggcagctaaagcaa

SEQ ID NO: 889581 - DNA, 15 bp, Homo sapiens
ggcagctaaagcaaa

SEQ ID NO: 889582 - DNA, 15 bp, Homo sapiens
gcagctaaagcaaac

SEQ ID NO: 889583 - DNA, 15 bp, Homo sapiens
cagctaaagcaaaca

SEQ ID NO: 889584 - DNA, 15 bp, Homo sapiens
agctaaagcaaacat

SEQ ID NO: 889585 - DNA, 15 bp, Homo sapiens
gctaaagcaaacata

SEQ ID NO: 889586 - DNA, 15 bp, Homo sapiens
ctaaagcaaacatag

SEQ ID NO: 889587 - DNA, 15 bp, Homo sapiens
taaagcaaacatagt

SEQ ID NO: 889588 - DNA, 15 bp, Homo sapiens
aaagcaaacatagta

SEQ ID NO: 889589 - DNA, 15 bp, Homo sapiens
aagcaaacatagtat

SEQ ID NO: 889590 - DNA, 15 bp, Homo sapiens
agcaaacatagtatt

SEQ ID NO: 889591 - DNA, 15 bp, Homo sapiens
gcaaacatagtatta

SEQ ID NO: 889592 - DNA, 15 bp, Homo sapiens
caaacatagtattat

SEQ ID NO: 889593 - DNA, 15 bp, Homo sapiens
aaacatagtattatt

SEQ ID NO: 889594 - DNA, 15 bp, Homo sapiens
aacatagtattattc

SEQ ID NO: 889595 - DNA, 15 bp, Homo sapiens
acatagtattattct

SEQ ID NO: 889596 - DNA, 15 bp, Homo sapiens
catagtattattctt

SEQ ID NO: 889597 - DNA, 15 bp, Homo sapiens
atagtattattcttg

SEQ ID NO: 889598 - DNA, 15 bp, Homo sapiens
tagtattattcttgt

SEQ ID NO: 889599 - DNA, 15 bp, Homo sapiens
agtattattcttgtt

SEQ ID NO: 889600 - DNA, 15 bp, Homo sapiens
gtattattcttgttt

SEQ ID NO: 889601 - DNA, 15 bp, Homo sapiens
tattattcttgtttt

SEQ ID NO: 889602 - DNA, 15 bp, Homo sapiens
attattcttgttttc

SEQ ID NO: 889603 - DNA, 15 bp, Homo sapiens
ttattcttgttttca

SEQ ID NO: 889604 - DNA, 15 bp, Homo sapiens
tattcttgttttcaa

SEQ ID NO: 889605 - DNA, 15 bp, Homo sapiens
attcttgttttcaat

SEQ ID NO: 889606 - DNA, 15 bp, Homo sapiens
ttcttgttttcaata

SEQ ID NO: 889607 - DNA, 15 bp, Homo sapiens
tcttgttttcaatat

SEQ ID NO: 889608 - DNA, 15 bp, Homo sapiens
cttgttttcaatatt

SEQ ID NO: 889609 - DNA, 15 bp, Homo sapiens
ttgttttcaatatta

SEQ ID NO: 889610 - DNA, 15 bp, Homo sapiens
tgttttcaatattag

SEQ ID NO: 889611 - DNA, 15 bp, Homo sapiens
gttttcaatattaga

SEQ ID NO: 889612 - DNA, 15 bp, Homo sapiens
ttttcaatattagaa

SEQ ID NO: 889613 - DNA, 15 bp, Homo sapiens
tttcaatattagaaa

SEQ ID NO: 889614 - DNA, 15 bp, Homo sapiens
ttcaatattagaaaa

SEQ ID NO: 889615 - DNA, 15 bp, Homo sapiens
tcaatattagaaaac

SEQ ID NO: 889616 - DNA, 15 bp, Homo sapiens
caatattagaaaaca

SEQ ID NO: 889617 - DNA, 15 bp, Homo sapiens
aatattagaaaacaa

SEQ ID NO: 889618 - DNA, 15 bp, Homo sapiens
atattagaaaacaag

SEQ ID NO: 889619 - DNA, 15 bp, Homo sapiens
tattagaaaacaagt

SEQ ID NO: 889620 - DNA, 15 bp, Homo sapiens
attagaaaacaagtc

SEQ ID NO: 889621 - DNA, 15 bp, Homo sapiens
ttagaaaacaagtca

SEQ ID NO: 889622 - DNA, 15 bp, Homo sapiens
tagaaaacaagtcag

SEQ ID NO: 889623 - DNA, 15 bp, Homo sapiens
agaaaacaagtcaga

SEQ ID NO: 889624 - DNA, 15 bp, Homo sapiens
gaaaacaagtcagaa

SEQ ID NO: 889625 - DNA, 15 bp, Homo sapiens
aaaacaagtcagaaa

SEQ ID NO: 889626 - DNA, 15 bp, Homo sapiens
aaacaagtcagaaag

SEQ ID NO: 889627 - DNA, 15 bp, Homo sapiens
aacaagtcagaaagg

SEQ ID NO: 889628 - DNA, 15 bp, Homo sapiens
acaagtcagaaaggt

SEQ ID NO: 889629 - DNA, 15 bp, Homo sapiens
caagtcagaaaggta

SEQ ID NO: 889630 - DNA, 15 bp, Homo sapiens
aagtcagaaaggtat

SEQ ID NO: 889631 - DNA, 15 bp, Homo sapiens
agtcagaaaggtata

SEQ ID NO: 889632 - DNA, 15 bp, Homo sapiens
gtcagaaaggtataa

SEQ ID NO: 889633 - DNA, 15 bp, Homo sapiens
tcagaaaggtataat

SEQ ID NO: 889634 - DNA, 15 bp, Homo sapiens
cagaaaggtataatt

SEQ ID NO: 889635 - DNA, 15 bp, Homo sapiens
agaaaggtataatta

SEQ ID NO: 889636 - DNA, 15 bp, Homo sapiens
gaaaggtataattaa

SEQ ID NO: 889637 - DNA, 15 bp, Homo sapiens
aaaggtataattaaa

SEQ ID NO: 889638 - DNA, 15 bp, Homo sapiens
aaggtataattaaaa

SEQ ID NO: 889639 - DNA, 15 bp, Homo sapiens
aggtataattaaaag

SEQ ID NO: 889640 - DNA, 15 bp, Homo sapiens
ggtataattaaaagg

SEQ ID NO: 889641 - DNA, 15 bp, Homo sapiens
gtataattaaaaggt

SEQ ID NO: 889642 - DNA, 15 bp, Homo sapiens
tataattaaaaggtt

SEQ ID NO: 889643 - DNA, 15 bp, Homo sapiens
ataattaaaaggttg

SEQ ID NO: 889644 - DNA, 15 bp, Homo sapiens
taattaaaaggttgc

SEQ ID NO: 889645 - DNA, 15 bp, Homo sapiens
aattaaaaggttgca

SEQ ID NO: 889646 - DNA, 15 bp, Homo sapiens
attaaaaggttgcat

SEQ ID NO: 889647 - DNA, 15 bp, Homo sapiens
ttaaaaggttgcatg

SEQ ID NO: 889648 - DNA, 15 bp, Homo sapiens
taaaaggttgcatgg

SEQ ID NO: 889649 - DNA, 15 bp, Homo sapiens
aaaaggttgcatgga

SEQ ID NO: 889650 - DNA, 15 bp, Homo sapiens
aaaggttgcatggat

SEQ ID NO: 889651 - DNA, 15 bp, Homo sapiens
aaggttgcatggatt

SEQ ID NO: 889652 - DNA, 15 bp, Homo sapiens
aggttgcatggattt

SEQ ID NO: 889653 - DNA, 15 bp, Homo sapiens
ggttgcatggatttt

SEQ ID NO: 889654 - DNA, 15 bp, Homo sapiens
gttgcatggattttc

SEQ ID NO: 889655 - DNA, 15 bp, Homo sapiens
ttgcatggattttcc

SEQ ID NO: 889656 - DNA, 15 bp, Homo sapiens
tgcatggattttcca

SEQ ID NO: 889657 - DNA, 15 bp, Homo sapiens
gcatggattttccag

SEQ ID NO: 889658 - DNA, 15 bp, Homo sapiens
catggattttccagt

SEQ ID NO: 889659 - DNA, 15 bp, Homo sapiens
atggattttccagtt

SEQ ID NO: 889660 - DNA, 15 bp, Homo sapiens
tggattttccagttc

SEQ ID NO: 889661 - DNA, 15 bp, Homo sapiens
ggattttccagttca

SEQ ID NO: 889662 - DNA, 15 bp, Homo sapiens
gattttccagttcaa

SEQ ID NO: 889663 - DNA, 15 bp, Homo sapiens
attttccagttcaat

SEQ ID NO: 889664 - DNA, 15 bp, Homo sapiens
ttttccagttcaatt

SEQ ID NO: 889665 - DNA, 15 bp, Homo sapiens
tttccagttcaattc

SEQ ID NO: 889666 - DNA, 15 bp, Homo sapiens
ttccagttcaattcc

SEQ ID NO: 889667 - DNA, 15 bp, Homo sapiens
tccagttcaattcct

SEQ ID NO: 889668 - DNA, 15 bp, Homo sapiens
ccagttcaattcctg

SEQ ID NO: 889669 - DNA, 15 bp, Homo sapiens
cagttcaattcctgg

SEQ ID NO: 889670 - DNA, 15 bp, Homo sapiens
agttcaattcctggg

SEQ ID NO: 889671 - DNA, 15 bp, Homo sapiens
gttcaattcctgggc

SEQ ID NO: 889672 - DNA, 15 bp, Homo sapiens
ttcaattcctgggct

SEQ ID NO: 889673 - DNA, 15 bp, Homo sapiens
tcaattcctgggctg

SEQ ID NO: 889674 - DNA, 15 bp, Homo sapiens
caattcctgggctgt

SEQ ID NO: 889675 - DNA, 15 bp, Homo sapiens
aattcctgggctgta

SEQ ID NO: 889676 - DNA, 15 bp, Homo sapiens
attcctgggctgtag

SEQ ID NO: 889677 - DNA, 15 bp, Homo sapiens
ttcctgggctgtagc

SEQ ID NO: 889678 - DNA, 15 bp, Homo sapiens
tcctgggctgtagct

SEQ ID NO: 889679 - DNA, 15 bp, Homo sapiens
cctgggctgtagctg

SEQ ID NO: 889680 - DNA, 15 bp, Homo sapiens
ctgggctgtagctgt

SEQ ID NO: 889681 - DNA, 15 bp, Homo sapiens
tgggctgtagctgtt

SEQ ID NO: 889682 - DNA, 15 bp, Homo sapiens
gggctgtagctgttc

SEQ ID NO: 889683 - DNA, 15 bp, Homo sapiens
ggctgtagctgttcg

SEQ ID NO: 889684 - DNA, 15 bp, Homo sapiens
gctgtagctgttcgg

SEQ ID NO: 889685 - DNA, 15 bp, Homo sapiens
ctgtagctgttcggc

SEQ ID NO: 889686 - DNA, 15 bp, Homo sapiens
tgtagctgttcggcc

SEQ ID NO: 889687 - DNA, 15 bp, Homo sapiens
gtagctgttcggcca

SEQ ID NO: 889688 - DNA, 15 bp, Homo sapiens
tagctgttcggccaa

SEQ ID NO: 889689 - DNA, 15 bp, Homo sapiens
agctgttcggccaag

SEQ ID NO: 889690 - DNA, 15 bp, Homo sapiens
gctgttcggccaagt

SEQ ID NO: 889691 - DNA, 15 bp, Homo sapiens
ctgttcggccaagtt

SEQ ID NO: 889692 - DNA, 15 bp, Homo sapiens
tgttcggccaagttg

SEQ ID NO: 889693 - DNA, 15 bp, Homo sapiens
gttcggccaagttgc

SEQ ID NO: 889694 - DNA, 15 bp, Homo sapiens
ttcggccaagttgct

SEQ ID NO: 889695 - DNA, 15 bp, Homo sapiens
tcggccaagttgctt

SEQ ID NO: 889696 - DNA, 15 bp, Homo sapiens
cggccaagttgcttt

SEQ ID NO: 889697 - DNA, 15 bp, Homo sapiens
ggccaagttgctttc

SEQ ID NO: 889698 - DNA, 15 bp, Homo sapiens
gccaagttgctttcc

SEQ ID NO: 889699 - DNA, 15 bp, Homo sapiens
ccaagttgctttccc

SEQ ID NO: 889700 - DNA, 15 bp, Homo sapiens
caagttgctttccct

SEQ ID NO: 889701 - DNA, 15 bp, Homo sapiens
aagttgctttccctc

SEQ ID NO: 889702 - DNA, 15 bp, Homo sapiens
agttgctttccctct

SEQ ID NO: 889703 - DNA, 15 bp, Homo sapiens
gttgctttccctctt

SEQ ID NO: 889704 - DNA, 15 bp, Homo sapiens
ttgctttccctcttt

SEQ ID NO: 889705 - DNA, 15 bp, Homo sapiens
tgctttccctcttta

SEQ ID NO: 889706 - DNA, 15 bp, Homo sapiens
gctttccctctttag

SEQ ID NO: 889707 - DNA, 15 bp, Homo sapiens
ctttccctctttagg

SEQ ID NO: 889708 - DNA, 15 bp, Homo sapiens
tttccctctttaggc

SEQ ID NO: 889709 - DNA, 15 bp, Homo sapiens
ttccctctttaggcc

SEQ ID NO: 889710 - DNA, 15 bp, Homo sapiens
tccctctttaggcct

SEQ ID NO: 889711 - DNA, 15 bp, Homo sapiens
ccctctttaggcctc

SEQ ID NO: 889712 - DNA, 15 bp, Homo sapiens
cctctttaggcctca

SEQ ID NO: 889713 - DNA, 15 bp, Homo sapiens
ctctttaggcctcaa

SEQ ID NO: 889714 - DNA, 15 bp, Homo sapiens
tctttaggcctcaat

SEQ ID NO: 889715 - DNA, 15 bp, Homo sapiens
ctttaggcctcaatt

SEQ ID NO: 889716 - DNA, 15 bp, Homo sapiens
tttaggcctcaattt

SEQ ID NO: 889717 - DNA, 15 bp, Homo sapiens
ttaggcctcaatttt

SEQ ID NO: 889718 - DNA, 15 bp, Homo sapiens
taggcctcaattttc

SEQ ID NO: 889719 - DNA, 15 bp, Homo sapiens
aggcctcaattttct

SEQ ID NO: 889720 - DNA, 15 bp, Homo sapiens
ggcctcaattttctc

SEQ ID NO: 889721 - DNA, 15 bp, Homo sapiens
gcctcaattttctca

SEQ ID NO: 889722 - DNA, 15 bp, Homo sapiens
cctcaattttctcat

SEQ ID NO: 889723 - DNA, 15 bp, Homo sapiens
ctcaattttctcatc

SEQ ID NO: 889724 - DNA, 15 bp, Homo sapiens
tcaattttctcatct

SEQ ID NO: 889725 - DNA, 15 bp, Homo sapiens
caattttctcatctg

SEQ ID NO: 889726 - DNA, 15 bp, Homo sapiens
aattttctcatctgc

SEQ ID NO: 889727 - DNA, 15 bp, Homo sapiens
attttctcatctgca

SEQ ID NO: 889728 - DNA, 15 bp, Homo sapiens
ttttctcatctgcaa

SEQ ID NO: 889729 - DNA, 15 bp, Homo sapiens
tttctcatctgcaaa

SEQ ID NO: 889730 - DNA, 15 bp, Homo sapiens
ttctcatctgcaaat

SEQ ID NO: 889731 - DNA, 15 bp, Homo sapiens
tctcatctgcaaatg

SEQ ID NO: 889732 - DNA, 15 bp, Homo sapiens
ctcatctgcaaatga

SEQ ID NO: 889733 - DNA, 15 bp, Homo sapiens
tcatctgcaaatgaa

SEQ ID NO: 889734 - DNA, 15 bp, Homo sapiens
catctgcaaatgaag

SEQ ID NO: 889735 - DNA, 15 bp, Homo sapiens
atctgcaaatgaaga

SEQ ID NO: 889736 - DNA, 15 bp, Homo sapiens
tctgcaaatgaagaa

SEQ ID NO: 889737 - DNA, 15 bp, Homo sapiens
ctgcaaatgaagaaa

SEQ ID NO: 889738 - DNA, 15 bp, Homo sapiens
tgcaaatgaagaaat

SEQ ID NO: 889739 - DNA, 15 bp, Homo sapiens
gcaaatgaagaaatc

SEQ ID NO: 889740 - DNA, 15 bp, Homo sapiens
caaatgaagaaatcc

SEQ ID NO: 889741 - DNA, 15 bp, Homo sapiens
aaatgaagaaatcca

SEQ ID NO: 889742 - DNA, 15 bp, Homo sapiens
aatgaagaaatccag

SEQ ID NO: 889743 - DNA, 15 bp, Homo sapiens
atgaagaaatccagg

SEQ ID NO: 889744 - DNA, 15 bp, Homo sapiens
tgaagaaatccaggt

SEQ ID NO: 889745 - DNA, 15 bp, Homo sapiens
gaagaaatccaggta

SEQ ID NO: 889746 - DNA, 15 bp, Homo sapiens
aagaaatccaggtac

SEQ ID NO: 889747 - DNA, 15 bp, Homo sapiens
agaaatccaggtacc

SEQ ID NO: 889748 - DNA, 15 bp, Homo sapiens
gaaatccaggtacca

SEQ ID NO: 889749 - DNA, 15 bp, Homo sapiens
aaatccaggtaccag

SEQ ID NO: 889750 - DNA, 15 bp, Homo sapiens
aatccaggtaccagt

SEQ ID NO: 889751 - DNA, 15 bp, Homo sapiens
atccaggtaccagtg

SEQ ID NO: 889752 - DNA, 15 bp, Homo sapiens
tccaggtaccagtgt

SEQ ID NO: 889753 - DNA, 15 bp, Homo sapiens
ccaggtaccagtgtg

SEQ ID NO: 889754 - DNA, 15 bp, Homo sapiens
caggtaccagtgtgg

SEQ ID NO: 889755 - DNA, 15 bp, Homo sapiens
aggtaccagtgtggt

SEQ ID NO: 889756 - DNA, 15 bp, Homo sapiens
ggtaccagtgtggtt

SEQ ID NO: 889757 - DNA, 15 bp, Homo sapiens
gtaccagtgtggttg

SEQ ID NO: 889758 - DNA, 15 bp, Homo sapiens
taccagtgtggttgt

SEQ ID NO: 889759 - DNA, 15 bp, Homo sapiens
accagtgtggttgtg

SEQ ID NO: 889760 - DNA, 15 bp, Homo sapiens
ccagtgtggttgtgt

SEQ ID NO: 889761 - DNA, 15 bp, Homo sapiens
cagtgtggttgtgtg

SEQ ID NO: 889762 - DNA, 15 bp, Homo sapiens
agtgtggttgtgtgg

SEQ ID NO: 889763 - DNA, 15 bp, Homo sapiens
gtgtggttgtgtgga

SEQ ID NO: 889764 - DNA, 15 bp, Homo sapiens
tgtggttgtgtggat

SEQ ID NO: 889765 - DNA, 15 bp, Homo sapiens
gtggttgtgtggatt

SEQ ID NO: 889766 - DNA, 15 bp, Homo sapiens
tggttgtgtggatta

SEQ ID NO: 889767 - DNA, 15 bp, Homo sapiens
ggttgtgtggattat

SEQ ID NO: 889768 - DNA, 15 bp, Homo sapiens
gttgtgtggattata

SEQ ID NO: 889769 - DNA, 15 bp, Homo sapiens
ttgtgtggattatat

SEQ ID NO: 889770 - DNA, 15 bp, Homo sapiens
tgtgtggattatatg

SEQ ID NO: 889771 - DNA, 15 bp, Homo sapiens
gtgtggattatatga

SEQ ID NO: 889772 - DNA, 15 bp, Homo sapiens
tgtggattatatgat

SEQ ID NO: 889773 - DNA, 15 bp, Homo sapiens
gtggattatatgata

SEQ ID NO: 889774 - DNA, 15 bp, Homo sapiens
tggattatatgatat

SEQ ID NO: 889775 - DNA, 15 bp, Homo sapiens
ggattatatgatata

SEQ ID NO: 889776 - DNA, 15 bp, Homo sapiens
gattatatgatataa

SEQ ID NO: 889777 - DNA, 15 bp, Homo sapiens
attatatgatataat

SEQ ID NO: 889778 - DNA, 15 bp, Homo sapiens
ttatatgatataatt

SEQ ID NO: 889779 - DNA, 15 bp, Homo sapiens
tatatgatataattt

SEQ ID NO: 889780 - DNA, 15 bp, Homo sapiens
atatgatataatttg

SEQ ID NO: 889781 - DNA, 15 bp, Homo sapiens
tatgatataatttgc

SEQ ID NO: 889782 - DNA, 15 bp, Homo sapiens
atgatataatttgca

SEQ ID NO: 889783 - DNA, 15 bp, Homo sapiens
tgatataatttgcat

SEQ ID NO: 889784 - DNA, 15 bp, Homo sapiens
gatataatttgcata

SEQ ID NO: 889785 - DNA, 15 bp, Homo sapiens
atataatttgcataa

SEQ ID NO: 889786 - DNA, 15 bp, Homo sapiens
tataatttgcataaa

SEQ ID NO: 889787 - DNA, 15 bp, Homo sapiens
ataatttgcataaag

SEQ ID NO: 889788 - DNA, 15 bp, Homo sapiens
taatttgcataaagt

SEQ ID NO: 889789 - DNA, 15 bp, Homo sapiens
aatttgcataaagtg

SEQ ID NO: 889790 - DNA, 15 bp, Homo sapiens
atttgcataaagtgc

SEQ ID NO: 889791 - DNA, 15 bp, Homo sapiens
tttgcataaagtgcc

SEQ ID NO: 889792 - DNA, 15 bp, Homo sapiens
ttgcataaagtgcct

SEQ ID NO: 889793 - DNA, 15 bp, Homo sapiens
tgcataaagtgccta

SEQ ID NO: 889794 - DNA, 15 bp, Homo sapiens
gcataaagtgcctag

SEQ ID NO: 889795 - DNA, 15 bp, Homo sapiens
cataaagtgcctagc

SEQ ID NO: 889796 - DNA, 15 bp, Homo sapiens
ataaagtgcctagcg

SEQ ID NO: 889797 - DNA, 15 bp, Homo sapiens
taaagtgcctagcgt

SEQ ID NO: 889798 - DNA, 15 bp, Homo sapiens
aaagtgcctagcgtg

SEQ ID NO: 889799 - DNA, 15 bp, Homo sapiens
aagtgcctagcgtgt

SEQ ID NO: 889800 - DNA, 15 bp, Homo sapiens
agtgcctagcgtgta

SEQ ID NO: 889801 - DNA, 15 bp, Homo sapiens
gtgcctagcgtgtag

SEQ ID NO: 889802 - DNA, 15 bp, Homo sapiens
tgcctagcgtgtagg

SEQ ID NO: 889803 - DNA, 15 bp, Homo sapiens
gcctagcgtgtaggg

SEQ ID NO: 889804 - DNA, 15 bp, Homo sapiens
cctagcgtgtagggc

SEQ ID NO: 889805 - DNA, 15 bp, Homo sapiens
ctagcgtgtagggcc

SEQ ID NO: 889806 - DNA, 15 bp, Homo sapiens
tagcgtgtagggccc

SEQ ID NO: 889807 - DNA, 15 bp, Homo sapiens
agcgtgtagggccca

SEQ ID NO: 889808 - DNA, 15 bp, Homo sapiens
gcgtgtagggcccat

SEQ ID NO: 889809 - DNA, 15 bp, Homo sapiens
cgtgtagggcccatg

SEQ ID NO: 889810 - DNA, 15 bp, Homo sapiens
gtgtagggcccatgc

SEQ ID NO: 889811 - DNA, 15 bp, Homo sapiens
tgtagggcccatgca

SEQ ID NO: 889812 - DNA, 15 bp, Homo sapiens
gtagggcccatgcaa

SEQ ID NO: 889813 - DNA, 15 bp, Homo sapiens
tagggcccatgcaaa

SEQ ID NO: 889814 - DNA, 15 bp, Homo sapiens
agggcccatgcaaaa

SEQ ID NO: 889815 - DNA, 15 bp, Homo sapiens
gggcccatgcaaaag

SEQ ID NO: 889816 - DNA, 15 bp, Homo sapiens
ggcccatgcaaaagg

SEQ ID NO: 889817 - DNA, 15 bp, Homo sapiens
gcccatgcaaaaggt

SEQ ID NO: 889818 - DNA, 15 bp, Homo sapiens
cccatgcaaaaggtt

SEQ ID NO: 889819 - DNA, 15 bp, Homo sapiens
ccatgcaaaaggtta

SEQ ID NO: 889820 - DNA, 15 bp, Homo sapiens
catgcaaaaggttac

SEQ ID NO: 889821 - DNA, 15 bp, Homo sapiens
atgcaaaaggttaca

SEQ ID NO: 889822 - DNA, 15 bp, Homo sapiens
tgcaaaaggttacaa

SEQ ID NO: 889823 - DNA, 15 bp, Homo sapiens
gcaaaaggttacaag

SEQ ID NO: 889824 - DNA, 15 bp, Homo sapiens
caaaaggttacaagt

SEQ ID NO: 889825 - DNA, 15 bp, Homo sapiens
aaaaggttacaagta

SEQ ID NO: 889826 - DNA, 15 bp, Homo sapiens
aaaggttacaagtaa

SEQ ID NO: 889827 - DNA, 15 bp, Homo sapiens
aaggttacaagtaaa

SEQ ID NO: 889828 - DNA, 15 bp, Homo sapiens
aggttacaagtaaac

SEQ ID NO: 889829 - DNA, 15 bp, Homo sapiens
ggttacaagtaaact

SEQ ID NO: 889830 - DNA, 15 bp, Homo sapiens
gttacaagtaaactt

SEQ ID NO: 889831 - DNA, 15 bp, Homo sapiens
ttacaagtaaactta

SEQ ID NO: 889832 - DNA, 15 bp, Homo sapiens
tacaagtaaacttac

SEQ ID NO: 889833 - DNA, 15 bp, Homo sapiens
acaagtaaacttacc

SEQ ID NO: 889834 - DNA, 15 bp, Homo sapiens
caagtaaacttaccc

SEQ ID NO: 889835 - DNA, 15 bp, Homo sapiens
aagtaaacttaccct

SEQ ID NO: 889836 - DNA, 15 bp, Homo sapiens
agtaaacttaccctt

SEQ ID NO: 889837 - DNA, 15 bp, Homo sapiens
gtaaacttaccctta

SEQ ID NO: 889838 - DNA, 15 bp, Homo sapiens
taaacttacccttaa

SEQ ID NO: 889839 - DNA, 15 bp, Homo sapiens
aaacttacccttaag

SEQ ID NO: 889840 - DNA, 15 bp, Homo sapiens
aacttacccttaagt

SEQ ID NO: 889841 - DNA, 15 bp, Homo sapiens
acttacccttaagtc

SEQ ID NO: 889842 - DNA, 15 bp, Homo sapiens
cttacccttaagtct

SEQ ID NO: 889843 - DNA, 15 bp, Homo sapiens
ttacccttaagtctc

SEQ ID NO: 889844 - DNA, 15 bp, Homo sapiens
tacccttaagtctct

SEQ ID NO: 889845 - DNA, 15 bp, Homo sapiens
acccttaagtctctc

SEQ ID NO: 889846 - DNA, 15 bp, Homo sapiens
cccttaagtctctca

SEQ ID NO: 889847 - DNA, 15 bp, Homo sapiens
ccttaagtctctcat

SEQ ID NO: 889848 - DNA, 15 bp, Homo sapiens
cttaagtctctcata

SEQ ID NO: 889849 - DNA, 15 bp, Homo sapiens
ttaagtctctcataa

SEQ ID NO: 889850 - DNA, 15 bp, Homo sapiens
taagtctctcataag

SEQ ID NO: 889851 - DNA, 15 bp, Homo sapiens
aagtctctcataagg

SEQ ID NO: 889852 - DNA, 15 bp, Homo sapiens
agtctctcataaggg

SEQ ID NO: 889853 - DNA, 15 bp, Homo sapiens
gtctctcataagggt

SEQ ID NO: 889854 - DNA, 15 bp, Homo sapiens
tctctcataagggta

SEQ ID NO: 889855 - DNA, 15 bp, Homo sapiens
ctctcataagggtac

SEQ ID NO: 889856 - DNA, 15 bp, Homo sapiens
tctcataagggtaca

SEQ ID NO: 889857 - DNA, 15 bp, Homo sapiens
ctcataagggtacac

SEQ ID NO: 889858 - DNA, 15 bp, Homo sapiens
tcataagggtacaca

SEQ ID NO: 889859 - DNA, 15 bp, Homo sapiens
cataagggtacacaa

SEQ ID NO: 889860 - DNA, 15 bp, Homo sapiens
ataagggtacacaat

SEQ ID NO: 889861 - DNA, 15 bp, Homo sapiens
taagggtacacaatg

SEQ ID NO: 889862 - DNA, 15 bp, Homo sapiens
aagggtacacaatga

SEQ ID NO: 889863 - DNA, 15 bp, Homo sapiens
agggtacacaatgaa

SEQ ID NO: 889864 - DNA, 15 bp, Homo sapiens
gggtacacaatgaat

SEQ ID NO: 889865 - DNA, 15 bp, Homo sapiens
ggtacacaatgaatc

SEQ ID NO: 889866 - DNA, 15 bp, Homo sapiens
gtacacaatgaatct

SEQ ID NO: 889867 - DNA, 15 bp, Homo sapiens
tacacaatgaatctt

SEQ ID NO: 889868 - DNA, 15 bp, Homo sapiens
acacaatgaatctta

SEQ ID NO: 889869 - DNA, 15 bp, Homo sapiens
cacaatgaatcttag

SEQ ID NO: 889870 - DNA, 15 bp, Homo sapiens
acaatgaatcttagg

SEQ ID NO: 889871 - DNA, 15 bp, Homo sapiens
caatgaatcttaggg

SEQ ID NO: 889872 - DNA, 15 bp, Homo sapiens
aatgaatcttagggt

SEQ ID NO: 889873 - DNA, 15 bp, Homo sapiens
atgaatcttagggtt

SEQ ID NO: 889874 - DNA, 15 bp, Homo sapiens
tgaatcttagggttg

SEQ ID NO: 889875 - DNA, 15 bp, Homo sapiens
gaatcttagggttga

SEQ ID NO: 889876 - DNA, 15 bp, Homo sapiens
aatcttagggttgag

SEQ ID NO: 889877 - DNA, 15 bp, Homo sapiens
atcttagggttgagc

SEQ ID NO: 889878 - DNA, 15 bp, Homo sapiens
tcttagggttgagca

SEQ ID NO: 889879 - DNA, 15 bp, Homo sapiens
cttagggttgagcaa

SEQ ID NO: 889880 - DNA, 15 bp, Homo sapiens
ttagggttgagcaag

SEQ ID NO: 889881 - DNA, 15 bp, Homo sapiens
tagggttgagcaagt

SEQ ID NO: 889882 - DNA, 15 bp, Homo sapiens
agggttgagcaagtc

SEQ ID NO: 889883 - DNA, 15 bp, Homo sapiens
gggttgagcaagtcc

SEQ ID NO: 889884 - DNA, 15 bp, Homo sapiens
ggttgagcaagtcca

SEQ ID NO: 889885 - DNA, 15 bp, Homo sapiens
gttgagcaagtccaa

SEQ ID NO: 889886 - DNA, 15 bp, Homo sapiens
ttgagcaagtccaaa

SEQ ID NO: 889887 - DNA, 15 bp, Homo sapiens
tgagcaagtccaaac

SEQ ID NO: 889888 - DNA, 15 bp, Homo sapiens
gagcaagtccaaact

SEQ ID NO: 889889 - DNA, 15 bp, Homo sapiens
agcaagtccaaactc

SEQ ID NO: 889890 - DNA, 15 bp, Homo sapiens
gcaagtccaaactcc

SEQ ID NO: 889891 - DNA, 15 bp, Homo sapiens
caagtccaaactccc

SEQ ID NO: 889892 - DNA, 15 bp, Homo sapiens
aagtccaaactccca

SEQ ID NO: 889893 - DNA, 15 bp, Homo sapiens
agtccaaactcccaa

SEQ ID NO: 889894 - DNA, 15 bp, Homo sapiens
gtccaaactcccaaa

SEQ ID NO: 889895 - DNA, 15 bp, Homo sapiens
tccaaactcccaaaa

SEQ ID NO: 889896 - DNA, 15 bp, Homo sapiens
ccaaactcccaaaac

SEQ ID NO: 889897 - DNA, 15 bp, Homo sapiens
caaactcccaaaact

SEQ ID NO: 889898 - DNA, 15 bp, Homo sapiens
aaactcccaaaactc

SEQ ID NO: 889899 - DNA, 15 bp, Homo sapiens
aactcccaaaactcc

SEQ ID NO: 889900 - DNA, 15 bp, Homo sapiens
actcccaaaactcct

SEQ ID NO: 889901 - DNA, 15 bp, Homo sapiens
ctcccaaaactcctg

SEQ ID NO: 889902 - DNA, 15 bp, Homo sapiens
tcccaaaactcctga

SEQ ID NO: 889903 - DNA, 15 bp, Homo sapiens
cccaaaactcctgaa

SEQ ID NO: 889904 - DNA, 15 bp, Homo sapiens
ccaaaactcctgaag

SEQ ID NO: 889905 - DNA, 15 bp, Homo sapiens
caaaactcctgaagt

SEQ ID NO: 889906 - DNA, 15 bp, Homo sapiens
aaaactcctgaagtt

SEQ ID NO: 889907 - DNA, 15 bp, Homo sapiens
aaactcctgaagttt

SEQ ID NO: 889908 - DNA, 15 bp, Homo sapiens
aactcctgaagtttg

SEQ ID NO: 889909 - DNA, 15 bp, Homo sapiens
actcctgaagtttga

SEQ ID NO: 889910 - DNA, 15 bp, Homo sapiens
ctcctgaagtttgat

SEQ ID NO: 889911 - DNA, 15 bp, Homo sapiens
tcctgaagtttgata

SEQ ID NO: 889912 - DNA, 15 bp, Homo sapiens
cctgaagtttgataa

SEQ ID NO: 889913 - DNA, 15 bp, Homo sapiens
ctgaagtttgataaa

SEQ ID NO: 889914 - DNA, 15 bp, Homo sapiens
tgaagtttgataaac

SEQ ID NO: 889915 - DNA, 15 bp, Homo sapiens
gaagtttgataaaca

SEQ ID NO: 889916 - DNA, 15 bp, Homo sapiens
aagtttgataaacaa

SEQ ID NO: 889917 - DNA, 15 bp, Homo sapiens
agtttgataaacaaa

SEQ ID NO: 889918 - DNA, 15 bp, Homo sapiens
gtttgataaacaaag

SEQ ID NO: 889919 - DNA, 15 bp, Homo sapiens
tttgataaacaaagg

SEQ ID NO: 889920 - DNA, 15 bp, Homo sapiens
ttgataaacaaaggc

SEQ ID NO: 889921 - DNA, 15 bp, Homo sapiens
tgataaacaaaggca

SEQ ID NO: 889922 - DNA, 15 bp, Homo sapiens
gataaacaaaggcaa

SEQ ID NO: 889923 - DNA, 15 bp, Homo sapiens
ataaacaaaggcaac

SEQ ID NO: 889924 - DNA, 15 bp, Homo sapiens
taaacaaaggcaacc

SEQ ID NO: 889925 - DNA, 15 bp, Homo sapiens
aaacaaaggcaaccg

SEQ ID NO: 889926 - DNA, 15 bp, Homo sapiens
aacaaaggcaaccgt

SEQ ID NO: 889927 - DNA, 15 bp, Homo sapiens
acaaaggcaaccgtg

SEQ ID NO: 889928 - DNA, 15 bp, Homo sapiens
caaaggcaaccgtga

SEQ ID NO: 889929 - DNA, 15 bp, Homo sapiens
aaaggcaaccgtgaa

SEQ ID NO: 889930 - DNA, 15 bp, Homo sapiens
aaggcaaccgtgaaa

SEQ ID NO: 889931 - DNA, 15 bp, Homo sapiens
aggcaaccgtgaaat

SEQ ID NO: 889932 - DNA, 15 bp, Homo sapiens
ggcaaccgtgaaatg

SEQ ID NO: 889933 - DNA, 15 bp, Homo sapiens
gcaaccgtgaaatgc

SEQ ID NO: 889934 - DNA, 15 bp, Homo sapiens
caaccgtgaaatgcc

SEQ ID NO: 889935 - DNA, 15 bp, Homo sapiens
aaccgtgaaatgcca

SEQ ID NO: 889936 - DNA, 15 bp, Homo sapiens
accgtgaaatgccat

SEQ ID NO: 889937 - DNA, 15 bp, Homo sapiens
ccgtgaaatgccatt

SEQ ID NO: 889938 - DNA, 15 bp, Homo sapiens
cgtgaaatgccattt

SEQ ID NO: 889939 - DNA, 15 bp, Homo sapiens
gtgaaatgccatttg

SEQ ID NO: 889940 - DNA, 15 bp, Homo sapiens
tgaaatgccatttgg

SEQ ID NO: 889941 - DNA, 15 bp, Homo sapiens
gaaatgccatttggg

SEQ ID NO: 889942 - DNA, 15 bp, Homo sapiens
aaatgccatttgggt

SEQ ID NO: 889943 - DNA, 15 bp, Homo sapiens
aatgccatttgggtc

SEQ ID NO: 889944 - DNA, 15 bp, Homo sapiens
atgccatttgggtca

SEQ ID NO: 889945 - DNA, 15 bp, Homo sapiens
tgccatttgggtcag

SEQ ID NO: 889946 - DNA, 15 bp, Homo sapiens
gccatttgggtcagt

SEQ ID NO: 889947 - DNA, 15 bp, Homo sapiens
ccatttgggtcagtc

SEQ ID NO: 889948 - DNA, 15 bp, Homo sapiens
catttgggtcagtcc

SEQ ID NO: 889949 - DNA, 15 bp, Homo sapiens
atttgggtcagtcca

SEQ ID NO: 889950 - DNA, 15 bp, Homo sapiens
tttgggtcagtccaa

SEQ ID NO: 889951 - DNA, 15 bp, Homo sapiens
ttgggtcagtccaaa

SEQ ID NO: 889952 - DNA, 15 bp, Homo sapiens
tgggtcagtccaaaa

SEQ ID NO: 889953 - DNA, 15 bp, Homo sapiens
gggtcagtccaaaag

SEQ ID NO: 889954 - DNA, 15 bp, Homo sapiens
ggtcagtccaaaaga

SEQ ID NO: 889955 - DNA, 15 bp, Homo sapiens
gtcagtccaaaagat

SEQ ID NO: 889956 - DNA, 15 bp, Homo sapiens
tcagtccaaaagatt

SEQ ID NO: 889957 - DNA, 15 bp, Homo sapiens
cagtccaaaagattg

SEQ ID NO: 889958 - DNA, 15 bp, Homo sapiens
agtccaaaagattgt

SEQ ID NO: 889959 - DNA, 15 bp, Homo sapiens
gtccaaaagattgtg

SEQ ID NO: 889960 - DNA, 15 bp, Homo sapiens
tccaaaagattgtga

SEQ ID NO: 889961 - DNA, 15 bp, Homo sapiens
ccaaaagattgtgaa

SEQ ID NO: 889962 - DNA, 15 bp, Homo sapiens
caaaagattgtgaaa

SEQ ID NO: 889963 - DNA, 15 bp, Homo sapiens
aaaagattgtgaaag

SEQ ID NO: 889964 - DNA, 15 bp, Homo sapiens
aaagattgtgaaagg

SEQ ID NO: 889965 - DNA, 15 bp, Homo sapiens
aagattgtgaaaggt

SEQ ID NO: 889966 - DNA, 15 bp, Homo sapiens
agattgtgaaaggta

SEQ ID NO: 889967 - DNA, 15 bp, Homo sapiens
gattgtgaaaggtag

SEQ ID NO: 889968 - DNA, 15 bp, Homo sapiens
attgtgaaaggtaga

SEQ ID NO: 889969 - DNA, 15 bp, Homo sapiens
ttgtgaaaggtagaa

SEQ ID NO: 889970 - DNA, 15 bp, Homo sapiens
tgtgaaaggtagaaa

SEQ ID NO: 889971 - DNA, 15 bp, Homo sapiens
gtgaaaggtagaaaa

SEQ ID NO: 889972 - DNA, 15 bp, Homo sapiens
tgaaaggtagaaaaa

SEQ ID NO: 889973 - DNA, 15 bp, Homo sapiens
gaaaggtagaaaaat

SEQ ID NO: 889974 - DNA, 15 bp, Homo sapiens
aaaggtagaaaaatt

SEQ ID NO: 889975 - DNA, 15 bp, Homo sapiens
aaggtagaaaaattt

SEQ ID NO: 889976 - DNA, 15 bp, Homo sapiens
aggtagaaaaattta

SEQ ID NO: 889977 - DNA, 15 bp, Homo sapiens
ggtagaaaaatttag

SEQ ID NO: 889978 - DNA, 15 bp, Homo sapiens
gtagaaaaatttaga

SEQ ID NO: 889979 - DNA, 15 bp, Homo sapiens
tagaaaaatttagac

SEQ ID NO: 889980 - DNA, 15 bp, Homo sapiens
agaaaaatttagact

SEQ ID NO: 889981 - DNA, 15 bp, Homo sapiens
gaaaaatttagactg

SEQ ID NO: 889982 - DNA, 15 bp, Homo sapiens
aaaaatttagactgg

SEQ ID NO: 889983 - DNA, 15 bp, Homo sapiens
aaaatttagactggg

SEQ ID NO: 889984 - DNA, 15 bp, Homo sapiens
aaatttagactggga

SEQ ID NO: 889985 - DNA, 15 bp, Homo sapiens
aatttagactgggaa

SEQ ID NO: 889986 - DNA, 15 bp, Homo sapiens
atttagactgggaat

SEQ ID NO: 889987 - DNA, 15 bp, Homo sapiens
tttagactgggaata

SEQ ID NO: 889988 - DNA, 15 bp, Homo sapiens
ttagactgggaatac

SEQ ID NO: 889989 - DNA, 15 bp, Homo sapiens
tagactgggaataca

SEQ ID NO: 889990 - DNA, 15 bp, Homo sapiens
agactgggaatacat

SEQ ID NO: 889991 - DNA, 15 bp, Homo sapiens
gactgggaatacatt

SEQ ID NO: 889992 - DNA, 15 bp, Homo sapiens
actgggaatacattt

SEQ ID NO: 889993 - DNA, 15 bp, Homo sapiens
ctgggaatacatttt

SEQ ID NO: 889994 - DNA, 15 bp, Homo sapiens
tgggaatacattttc

SEQ ID NO: 889995 - DNA, 15 bp, Homo sapiens
gggaatacattttct

SEQ ID NO: 889996 - DNA, 15 bp, Homo sapiens
ggaatacattttctc

SEQ ID NO: 889997 - DNA, 15 bp, Homo sapiens
gaatacattttctct

SEQ ID NO: 889998 - DNA, 15 bp, Homo sapiens
aatacattttctctg

SEQ ID NO: 889999 - DNA, 15 bp, Homo sapiens
atacattttctctgt

SEQ ID NO: 890000 - DNA, 15 bp, Homo sapiens
tacattttctctgtg

SEQ ID NO: 890001 - DNA, 15 bp, Homo sapiens
acattttctctgtgt

SEQ ID NO: 890002 - DNA, 15 bp, Homo sapiens
cattttctctgtgtg

SEQ ID NO: 890003 - DNA, 15 bp, Homo sapiens
attttctctgtgtga

SEQ ID NO: 890004 - DNA, 15 bp, Homo sapiens
ttttctctgtgtgac

SEQ ID NO: 890005 - DNA, 15 bp, Homo sapiens
tttctctgtgtgaca

SEQ ID NO: 890006 - DNA, 15 bp, Homo sapiens
ttctctgtgtgacag

SEQ ID NO: 890007 - DNA, 15 bp, Homo sapiens
tctctgtgtgacagg

SEQ ID NO: 890008 - DNA, 15 bp, Homo sapiens
ctctgtgtgacaggt

SEQ ID NO: 890009 - DNA, 15 bp, Homo sapiens
tctgtgtgacaggtg

SEQ ID NO: 890010 - DNA, 15 bp, Homo sapiens
ctgtgtgacaggtgt

SEQ ID NO: 890011 - DNA, 15 bp, Homo sapiens
tgtgtgacaggtgtg

SEQ ID NO: 890012 - DNA, 15 bp, Homo sapiens
gtgtgacaggtgtgt

SEQ ID NO: 890013 - DNA, 15 bp, Homo sapiens
tgtgacaggtgtgtt

SEQ ID NO: 890014 - DNA, 15 bp, Homo sapiens
gtgacaggtgtgttc

SEQ ID NO: 890015 - DNA, 15 bp, Homo sapiens
tgacaggtgtgttct

SEQ ID NO: 890016 - DNA, 15 bp, Homo sapiens
gacaggtgtgttctc

SEQ ID NO: 890017 - DNA, 15 bp, Homo sapiens
acaggtgtgttctct

SEQ ID NO: 890018 - DNA, 15 bp, Homo sapiens
caggtgtgttctctc

SEQ ID NO: 890019 - DNA, 15 bp, Homo sapiens
aggtgtgttctctca

SEQ ID NO: 890020 - DNA, 15 bp, Homo sapiens
ggtgtgttctctcaa

SEQ ID NO: 890021 - DNA, 15 bp, Homo sapiens
gtgtgttctctcaat

SEQ ID NO: 890022 - DNA, 15 bp, Homo sapiens
tgtgttctctcaatt

SEQ ID NO: 890023 - DNA, 15 bp, Homo sapiens
gtgttctctcaattg

SEQ ID NO: 890024 - DNA, 15 bp, Homo sapiens
tgttctctcaattga

SEQ ID NO: 890025 - DNA, 15 bp, Homo sapiens
gttctctcaattgaa

SEQ ID NO: 890026 - DNA, 15 bp, Homo sapiens
ttctctcaattgaag

SEQ ID NO: 890027 - DNA, 15 bp, Homo sapiens
tctctcaattgaaga

SEQ ID NO: 890028 - DNA, 15 bp, Homo sapiens
ctctcaattgaagaa

SEQ ID NO: 890029 - DNA, 15 bp, Homo sapiens
tctcaattgaagaag

SEQ ID NO: 890030 - DNA, 15 bp, Homo sapiens
ctcaattgaagaagg

SEQ ID NO: 890031 - DNA, 15 bp, Homo sapiens
tcaattgaagaagga

SEQ ID NO: 890032 - DNA, 15 bp, Homo sapiens
caattgaagaaggaa

SEQ ID NO: 890033 - DNA, 15 bp, Homo sapiens
aattgaagaaggaag

SEQ ID NO: 890034 - DNA, 15 bp, Homo sapiens
attgaagaaggaagt

SEQ ID NO: 890035 - DNA, 15 bp, Homo sapiens
ttgaagaaggaagta

SEQ ID NO: 890036 - DNA, 15 bp, Homo sapiens
tgaagaaggaagtaa

SEQ ID NO: 890037 - DNA, 15 bp, Homo sapiens
gaagaaggaagtaaa

SEQ ID NO: 890038 - DNA, 15 bp, Homo sapiens
aagaaggaagtaaaa

SEQ ID NO: 890039 - DNA, 15 bp, Homo sapiens
agaaggaagtaaaag

SEQ ID NO: 890040 - DNA, 15 bp, Homo sapiens
gaaggaagtaaaagg

SEQ ID NO: 890041 - DNA, 15 bp, Homo sapiens
aaggaagtaaaagga

SEQ ID NO: 890042 - DNA, 15 bp, Homo sapiens
aggaagtaaaaggac

SEQ ID NO: 890043 - DNA, 15 bp, Homo sapiens
ggaagtaaaaggaca

SEQ ID NO: 890044 - DNA, 15 bp, Homo sapiens
gaagtaaaaggacat

SEQ ID NO: 890045 - DNA, 15 bp, Homo sapiens
aagtaaaaggacatg

SEQ ID NO: 890046 - DNA, 15 bp, Homo sapiens
agtaaaaggacatgg

SEQ ID NO: 890047 - DNA, 15 bp, Homo sapiens
gtaaaaggacatgga

SEQ ID NO: 890048 - DNA, 15 bp, Homo sapiens
taaaaggacatggaa

SEQ ID NO: 890049 - DNA, 15 bp, Homo sapiens
aaaaggacatggaat

SEQ ID NO: 890050 - DNA, 15 bp, Homo sapiens
aaaggacatggaatg

SEQ ID NO: 890051 - DNA, 15 bp, Homo sapiens
aaggacatggaatga

SEQ ID NO: 890052 - DNA, 15 bp, Homo sapiens
aggacatggaatgac

SEQ ID NO: 890053 - DNA, 15 bp, Homo sapiens
ggacatggaatgact

SEQ ID NO: 890054 - DNA, 15 bp, Homo sapiens
gacatggaatgacta

SEQ ID NO: 890055 - DNA, 15 bp, Homo sapiens
acatggaatgactaa

SEQ ID NO: 890056 - DNA, 15 bp, Homo sapiens
catggaatgactaac

SEQ ID NO: 890057 - DNA, 15 bp, Homo sapiens
atggaatgactaact

SEQ ID NO: 890058 - DNA, 15 bp, Homo sapiens
tggaatgactaacta

SEQ ID NO: 890059 - DNA, 15 bp, Homo sapiens
ggaatgactaactaa

SEQ ID NO: 890060 - DNA, 15 bp, Homo sapiens
gaatgactaactaaa

SEQ ID NO: 890061 - DNA, 15 bp, Homo sapiens
aatgactaactaaat

SEQ ID NO: 890062 - DNA, 15 bp, Homo sapiens
atgactaactaaata

SEQ ID NO: 890063 - DNA, 15 bp, Homo sapiens
tgactaactaaatat

SEQ ID NO: 890064 - DNA, 15 bp, Homo sapiens
gactaactaaatatc

SEQ ID NO: 890065 - DNA, 15 bp, Homo sapiens
actaactaaatatca

SEQ ID NO: 890066 - DNA, 15 bp, Homo sapiens
ctaactaaatatcac

SEQ ID NO: 890067 - DNA, 15 bp, Homo sapiens
taactaaatatcact

SEQ ID NO: 890068 - DNA, 15 bp, Homo sapiens
aactaaatatcactt

SEQ ID NO: 890069 - DNA, 15 bp, Homo sapiens
actaaatatcacttt

SEQ ID NO: 890070 - DNA, 15 bp, Homo sapiens
ctaaatatcactttg

SEQ ID NO: 890071 - DNA, 15 bp, Homo sapiens
taaatatcactttgc

SEQ ID NO: 890072 - DNA, 15 bp, Homo sapiens
aaatatcactttgcc

SEQ ID NO: 890073 - DNA, 15 bp, Homo sapiens
aatatcactttgcca

SEQ ID NO: 890074 - DNA, 15 bp, Homo sapiens
atatcactttgccat

SEQ ID NO: 890075 - DNA, 15 bp, Homo sapiens
tatcactttgccatc

SEQ ID NO: 890076 - DNA, 15 bp, Homo sapiens
atcactttgccatca

SEQ ID NO: 890077 - DNA, 15 bp, Homo sapiens
tcactttgccatcat

SEQ ID NO: 890078 - DNA, 15 bp, Homo sapiens
cactttgccatcatg

SEQ ID NO: 890079 - DNA, 15 bp, Homo sapiens
actttgccatcatgc

SEQ ID NO: 890080 - DNA, 15 bp, Homo sapiens
ctttgccatcatgct

SEQ ID NO: 890081 - DNA, 15 bp, Homo sapiens
tttgccatcatgctg

SEQ ID NO: 890082 - DNA, 15 bp, Homo sapiens
ttgccatcatgctgg

SEQ ID NO: 890083 - DNA, 15 bp, Homo sapiens
tgccatcatgctgga

SEQ ID NO: 890084 - DNA, 15 bp, Homo sapiens
gccatcatgctggat

SEQ ID NO: 890085 - DNA, 15 bp, Homo sapiens
ccatcatgctggatt

SEQ ID NO: 890086 - DNA, 15 bp, Homo sapiens
catcatgctggattg

SEQ ID NO: 890087 - DNA, 15 bp, Homo sapiens
atcatgctggattga

SEQ ID NO: 890088 - DNA, 15 bp, Homo sapiens
tcatgctggattgag

SEQ ID NO: 890089 - DNA, 15 bp, Homo sapiens
catgctggattgagg

SEQ ID NO: 890090 - DNA, 15 bp, Homo sapiens
atgctggattgaggg

SEQ ID NO: 890091 - DNA, 15 bp, Homo sapiens
tgctggattgaggga

SEQ ID NO: 890092 - DNA, 15 bp, Homo sapiens
gctggattgagggag

SEQ ID NO: 890093 - DNA, 15 bp, Homo sapiens
ctggattgagggagt

SEQ ID NO: 890094 - DNA, 15 bp, Homo sapiens
tggattgagggagta

SEQ ID NO: 890095 - DNA, 15 bp, Homo sapiens
ggattgagggagtat

SEQ ID NO: 890096 - DNA, 15 bp, Homo sapiens
gattgagggagtatt

SEQ ID NO: 890097 - DNA, 15 bp, Homo sapiens
attgagggagtattg

SEQ ID NO: 890098 - DNA, 15 bp, Homo sapiens
ttgagggagtattgt

SEQ ID NO: 890099 - DNA, 15 bp, Homo sapiens
tgagggagtattgtc

SEQ ID NO: 890100 - DNA, 15 bp, Homo sapiens
gagggagtattgtcg

SEQ ID NO: 890101 - DNA, 15 bp, Homo sapiens
agggagtattgtcgt

SEQ ID NO: 890102 - DNA, 15 bp, Homo sapiens
gggagtattgtcgtg

SEQ ID NO: 890103 - DNA, 15 bp, Homo sapiens
ggagtattgtcgtga

SEQ ID NO: 890104 - DNA, 15 bp, Homo sapiens
gagtattgtcgtgat

SEQ ID NO: 890105 - DNA, 15 bp, Homo sapiens
agtattgtcgtgatg

SEQ ID NO: 890106 - DNA, 15 bp, Homo sapiens
gtattgtcgtgatgc

SEQ ID NO: 890107 - DNA, 15 bp, Homo sapiens
tattgtcgtgatgca

SEQ ID NO: 890108 - DNA, 15 bp, Homo sapiens
attgtcgtgatgcac

SEQ ID NO: 890109 - DNA, 15 bp, Homo sapiens
ttgtcgtgatgcact

SEQ ID NO: 890110 - DNA, 15 bp, Homo sapiens
tgtcgtgatgcacta

SEQ ID NO: 890111 - DNA, 15 bp, Homo sapiens
gtcgtgatgcactaa

SEQ ID NO: 890112 - DNA, 15 bp, Homo sapiens
tcgtgatgcactaag

SEQ ID NO: 890113 - DNA, 15 bp, Homo sapiens
cgtgatgcactaagg

SEQ ID NO: 890114 - DNA, 15 bp, Homo sapiens
gtgatgcactaaggg

SEQ ID NO: 890115 - DNA, 15 bp, Homo sapiens
tgatgcactaagggc

SEQ ID NO: 890116 - DNA, 15 bp, Homo sapiens
gatgcactaagggcc

SEQ ID NO: 890117 - DNA, 15 bp, Homo sapiens
atgcactaagggcca

SEQ ID NO: 890118 - DNA, 15 bp, Homo sapiens
tgcactaagggccat

SEQ ID NO: 890119 - DNA, 15 bp, Homo sapiens
gcactaagggccatg

SEQ ID NO: 890120 - DNA, 15 bp, Homo sapiens
cactaagggccatga

SEQ ID NO: 890121 - DNA, 15 bp, Homo sapiens
actaagggccatgaa

SEQ ID NO: 890122 - DNA, 15 bp, Homo sapiens
ctaagggccatgaat

SEQ ID NO: 890123 - DNA, 15 bp, Homo sapiens
taagggccatgaatt

SEQ ID NO: 890124 - DNA, 15 bp, Homo sapiens
aagggccatgaattt

SEQ ID NO: 890125 - DNA, 15 bp, Homo sapiens
agggccatgaattta

SEQ ID NO: 890126 - DNA, 15 bp, Homo sapiens
gggccatgaatttag

SEQ ID NO: 890127 - DNA, 15 bp, Homo sapiens
ggccatgaatttaga

SEQ ID NO: 890128 - DNA, 15 bp, Homo sapiens
gccatgaatttagag

SEQ ID NO: 890129 - DNA, 15 bp, Homo sapiens
ccatgaatttagagt

SEQ ID NO: 890130 - DNA, 15 bp, Homo sapiens
catgaatttagagtc

SEQ ID NO: 890131 - DNA, 15 bp, Homo sapiens
atgaatttagagtca

SEQ ID NO: 890132 - DNA, 15 bp, Homo sapiens
tgaatttagagtcaa

SEQ ID NO: 890133 - DNA, 15 bp, Homo sapiens
gaatttagagtcaag

SEQ ID NO: 890134 - DNA, 15 bp, Homo sapiens
aatttagagtcaaga

SEQ ID NO: 890135 - DNA, 15 bp, Homo sapiens
atttagagtcaagag

SEQ ID NO: 890136 - DNA, 15 bp, Homo sapiens
tttagagtcaagagc

SEQ ID NO: 890137 - DNA, 15 bp, Homo sapiens
ttagagtcaagagcc

SEQ ID NO: 890138 - DNA, 15 bp, Homo sapiens
tagagtcaagagcca

SEQ ID NO: 890139 - DNA, 15 bp, Homo sapiens
agagtcaagagccag

SEQ ID NO: 890140 - DNA, 15 bp, Homo sapiens
gagtcaagagccagg

SEQ ID NO: 890141 - DNA, 15 bp, Homo sapiens
agtcaagagccagga

SEQ ID NO: 890142 - DNA, 15 bp, Homo sapiens
gtcaagagccaggat

SEQ ID NO: 890143 - DNA, 15 bp, Homo sapiens
tcaagagccaggatt

SEQ ID NO: 890144 - DNA, 15 bp, Homo sapiens
caagagccaggattt

SEQ ID NO: 890145 - DNA, 15 bp, Homo sapiens
aagagccaggatttg

SEQ ID NO: 890146 - DNA, 15 bp, Homo sapiens
agagccaggatttgg

SEQ ID NO: 890147 - DNA, 15 bp, Homo sapiens
gagccaggatttggg

SEQ ID NO: 890148 - DNA, 15 bp, Homo sapiens
agccaggatttgggt

SEQ ID NO: 890149 - DNA, 15 bp, Homo sapiens
gccaggatttgggtc

SEQ ID NO: 890150 - DNA, 15 bp, Homo sapiens
ccaggatttgggtct

SEQ ID NO: 890151 - DNA, 15 bp, Homo sapiens
caggatttgggtctc

SEQ ID NO: 890152 - DNA, 15 bp, Homo sapiens
aggatttgggtctcc

SEQ ID NO: 890153 - DNA, 15 bp, Homo sapiens
ggatttgggtctcca

SEQ ID NO: 890154 - DNA, 15 bp, Homo sapiens
gatttgggtctccat

SEQ ID NO: 890155 - DNA, 15 bp, Homo sapiens
atttgggtctccatt

SEQ ID NO: 890156 - DNA, 15 bp, Homo sapiens
tttgggtctccattt

SEQ ID NO: 890157 - DNA, 15 bp, Homo sapiens
ttgggtctccatttt

SEQ ID NO: 890158 - DNA, 15 bp, Homo sapiens
tgggtctccattttg

SEQ ID NO: 890159 - DNA, 15 bp, Homo sapiens
gggtctccattttgt

SEQ ID NO: 890160 - DNA, 15 bp, Homo sapiens
ggtctccattttgta

SEQ ID NO: 890161 - DNA, 15 bp, Homo sapiens
gtctccattttgtac

SEQ ID NO: 890162 - DNA, 15 bp, Homo sapiens
tctccattttgtaca

SEQ ID NO: 890163 - DNA, 15 bp, Homo sapiens
ctccattttgtacac

SEQ ID NO: 890164 - DNA, 15 bp, Homo sapiens
tccattttgtacact

SEQ ID NO: 890165 - DNA, 15 bp, Homo sapiens
ccattttgtacacta

SEQ ID NO: 890166 - DNA, 15 bp, Homo sapiens
cattttgtacactac

SEQ ID NO: 890167 - DNA, 15 bp, Homo sapiens
attttgtacactact

SEQ ID NO: 890168 - DNA, 15 bp, Homo sapiens
ttttgtacactacta

SEQ ID NO: 890169 - DNA, 15 bp, Homo sapiens
tttgtacactactag

SEQ ID NO: 890170 - DNA, 15 bp, Homo sapiens
ttgtacactactagc

SEQ ID NO: 890171 - DNA, 15 bp, Homo sapiens
tgtacactactagct

SEQ ID NO: 890172 - DNA, 15 bp, Homo sapiens
gtacactactagcta

SEQ ID NO: 890173 - DNA, 15 bp, Homo sapiens
tacactactagctag

SEQ ID NO: 890174 - DNA, 15 bp, Homo sapiens
acactactagctagg

SEQ ID NO: 890175 - DNA, 15 bp, Homo sapiens
cactactagctaggt

SEQ ID NO: 890176 - DNA, 15 bp, Homo sapiens
actactagctaggtt

SEQ ID NO: 890177 - DNA, 15 bp, Homo sapiens
ctactagctaggttt

SEQ ID NO: 890178 - DNA, 15 bp, Homo sapiens
tactagctaggtttg

SEQ ID NO: 890179 - DNA, 15 bp, Homo sapiens
actagctaggtttga

SEQ ID NO: 890180 - DNA, 15 bp, Homo sapiens
ctagctaggtttgaa

SEQ ID NO: 890181 - DNA, 15 bp, Homo sapiens
tagctaggtttgaat

SEQ ID NO: 890182 - DNA, 15 bp, Homo sapiens
agctaggtttgaatt

SEQ ID NO: 890183 - DNA, 15 bp, Homo sapiens
gctaggtttgaattc

SEQ ID NO: 890184 - DNA, 15 bp, Homo sapiens
ctaggtttgaattcc

SEQ ID NO: 890185 - DNA, 15 bp, Homo sapiens
taggtttgaattcca

SEQ ID NO: 890186 - DNA, 15 bp, Homo sapiens
aggtttgaattccat

SEQ ID NO: 890187 - DNA, 15 bp, Homo sapiens
ggtttgaattccatc

SEQ ID NO: 890188 - DNA, 15 bp, Homo sapiens
gtttgaattccatct

SEQ ID NO: 890189 - DNA, 15 bp, Homo sapiens
tttgaattccatctg

SEQ ID NO: 890190 - DNA, 15 bp, Homo sapiens
ttgaattccatctga

SEQ ID NO: 890191 - DNA, 15 bp, Homo sapiens
tgaattccatctgac

SEQ ID NO: 890192 - DNA, 15 bp, Homo sapiens
gaattccatctgaca

SEQ ID NO: 890193 - DNA, 15 bp, Homo sapiens
aattccatctgacac

SEQ ID NO: 890194 - DNA, 15 bp, Homo sapiens
attccatctgacacc

SEQ ID NO: 890195 - DNA, 15 bp, Homo sapiens
ttccatctgacaccc

SEQ ID NO: 890196 - DNA, 15 bp, Homo sapiens
tccatctgacaccct

SEQ ID NO: 890197 - DNA, 15 bp, Homo sapiens
ccatctgacaccctt

SEQ ID NO: 890198 - DNA, 15 bp, Homo sapiens
catctgacacccttc

SEQ ID NO: 890199 - DNA, 15 bp, Homo sapiens
atctgacacccttcc

SEQ ID NO: 890200 - DNA, 15 bp, Homo sapiens
tctgacacccttcca

SEQ ID NO: 890201 - DNA, 15 bp, Homo sapiens
ctgacacccttccag

SEQ ID NO: 890202 - DNA, 15 bp, Homo sapiens
tgacacccttccaga

SEQ ID NO: 890203 - DNA, 15 bp, Homo sapiens
gacacccttccagat

SEQ ID NO: 890204 - DNA, 15 bp, Homo sapiens
acacccttccagatg

SEQ ID NO: 890205 - DNA, 15 bp, Homo sapiens
cacccttccagatgg

SEQ ID NO: 890206 - DNA, 15 bp, Homo sapiens
acccttccagatgga

SEQ ID NO: 890207 - DNA, 15 bp, Homo sapiens
cccttccagatggat

SEQ ID NO: 890208 - DNA, 15 bp, Homo sapiens
ccttccagatggatg

SEQ ID NO: 890209 - DNA, 15 bp, Homo sapiens
cttccagatggatga

SEQ ID NO: 890210 - DNA, 15 bp, Homo sapiens
ttccagatggatgac

SEQ ID NO: 890211 - DNA, 15 bp, Homo sapiens
tccagatggatgacc

SEQ ID NO: 890212 - DNA, 15 bp, Homo sapiens
ccagatggatgaccg

SEQ ID NO: 890213 - DNA, 15 bp, Homo sapiens
cagatggatgaccgc

SEQ ID NO: 890214 - DNA, 15 bp, Homo sapiens
agatggatgaccgct

SEQ ID NO: 890215 - DNA, 15 bp, Homo sapiens
gatggatgaccgctt

SEQ ID NO: 890216 - DNA, 15 bp, Homo sapiens
atggatgaccgcttc

SEQ ID NO: 890217 - DNA, 15 bp, Homo sapiens
tggatgaccgcttct

SEQ ID NO: 890218 - DNA, 15 bp, Homo sapiens
ggatgaccgcttctc

SEQ ID NO: 890219 - DNA, 15 bp, Homo sapiens
gatgaccgcttctcc

SEQ ID NO: 890220 - DNA, 15 bp, Homo sapiens
atgaccgcttctcct

SEQ ID NO: 890221 - DNA, 15 bp, Homo sapiens
tgaccgcttctcctt

SEQ ID NO: 890222 - DNA, 15 bp, Homo sapiens
gaccgcttctccttc

SEQ ID NO: 890223 - DNA, 15 bp, Homo sapiens
accgcttctccttca

SEQ ID NO: 890224 - DNA, 15 bp, Homo sapiens
ccgcttctccttcat

SEQ ID NO: 890225 - DNA, 15 bp, Homo sapiens
cgcttctccttcatc

SEQ ID NO: 890226 - DNA, 15 bp, Homo sapiens
gcttctccttcatct

SEQ ID NO: 890227 - DNA, 15 bp, Homo sapiens
cttctccttcatctg

SEQ ID NO: 890228 - DNA, 15 bp, Homo sapiens
ttctccttcatctgt

SEQ ID NO: 890229 - DNA, 15 bp, Homo sapiens
tctccttcatctgtg

SEQ ID NO: 890230 - DNA, 15 bp, Homo sapiens
ctccttcatctgtga

SEQ ID NO: 890231 - DNA, 15 bp, Homo sapiens
tccttcatctgtgaa

SEQ ID NO: 890232 - DNA, 15 bp, Homo sapiens
ccttcatctgtgaaa

SEQ ID NO: 890233 - DNA, 15 bp, Homo sapiens
cttcatctgtgaaat

SEQ ID NO: 890234 - DNA, 15 bp, Homo sapiens
ttcatctgtgaaatg

SEQ ID NO: 890235 - DNA, 15 bp, Homo sapiens
tcatctgtgaaatgg

SEQ ID NO: 890236 - DNA, 15 bp, Homo sapiens
catctgtgaaatgga

SEQ ID NO: 890237 - DNA, 15 bp, Homo sapiens
atctgtgaaatggag

SEQ ID NO: 890238 - DNA, 15 bp, Homo sapiens
tctgtgaaatggagc

SEQ ID NO: 890239 - DNA, 15 bp, Homo sapiens
ctgtgaaatggagca

SEQ ID NO: 890240 - DNA, 15 bp, Homo sapiens
tgtgaaatggagcaa

SEQ ID NO: 890241 - DNA, 15 bp, Homo sapiens
gtgaaatggagcaaa

SEQ ID NO: 890242 - DNA, 15 bp, Homo sapiens
tgaaatggagcaaag

SEQ ID NO: 890243 - DNA, 15 bp, Homo sapiens
gaaatggagcaaaga

SEQ ID NO: 890244 - DNA, 15 bp, Homo sapiens
aaatggagcaaagac

SEQ ID NO: 890245 - DNA, 15 bp, Homo sapiens
aatggagcaaagacc

SEQ ID NO: 890246 - DNA, 15 bp, Homo sapiens
atggagcaaagaccc

SEQ ID NO: 890247 - DNA, 15 bp, Homo sapiens
tggagcaaagaccca

SEQ ID NO: 890248 - DNA, 15 bp, Homo sapiens
ggagcaaagacccac

SEQ ID NO: 890249 - DNA, 15 bp, Homo sapiens
gagcaaagacccact

SEQ ID NO: 890250 - DNA, 15 bp, Homo sapiens
agcaaagacccactc

SEQ ID NO: 890251 - DNA, 15 bp, Homo sapiens
gcaaagacccactct

SEQ ID NO: 890252 - DNA, 15 bp, Homo sapiens
caaagacccactctc

SEQ ID NO: 890253 - DNA, 15 bp, Homo sapiens
aaagacccactctcc

SEQ ID NO: 890254 - DNA, 15 bp, Homo sapiens
aagacccactctccc

SEQ ID NO: 890255 - DNA, 15 bp, Homo sapiens
agacccactctccca

SEQ ID NO: 890256 - DNA, 15 bp, Homo sapiens
gacccactctcccaa

SEQ ID NO: 890257 - DNA, 15 bp, Homo sapiens
acccactctcccaat

SEQ ID NO: 890258 - DNA, 15 bp, Homo sapiens
cccactctcccaatt

SEQ ID NO: 890259 - DNA, 15 bp, Homo sapiens
ccactctcccaattc

SEQ ID NO: 890260 - DNA, 15 bp, Homo sapiens
cactctcccaattcc

SEQ ID NO: 890261 - DNA, 15 bp, Homo sapiens
actctcccaattcct

SEQ ID NO: 890262 - DNA, 15 bp, Homo sapiens
ctctcccaattcctg

SEQ ID NO: 890263 - DNA, 15 bp, Homo sapiens
tctcccaattcctgt

SEQ ID NO: 890264 - DNA, 15 bp, Homo sapiens
ctcccaattcctgtg

SEQ ID NO: 890265 - DNA, 15 bp, Homo sapiens
tcccaattcctgtgg

SEQ ID NO: 890266 - DNA, 15 bp, Homo sapiens
cccaattcctgtggc

SEQ ID NO: 890267 - DNA, 15 bp, Homo sapiens
ccaattcctgtggct

SEQ ID NO: 890268 - DNA, 15 bp, Homo sapiens
caattcctgtggctc

SEQ ID NO: 890269 - DNA, 15 bp, Homo sapiens
aattcctgtggctca

SEQ ID NO: 890270 - DNA, 15 bp, Homo sapiens
attcctgtggctcat

SEQ ID NO: 890271 - DNA, 15 bp, Homo sapiens
ttcctgtggctcatg

SEQ ID NO: 890272 - DNA, 15 bp, Homo sapiens
tcctgtggctcatgg

SEQ ID NO: 890273 - DNA, 15 bp, Homo sapiens
cctgtggctcatgga

SEQ ID NO: 890274 - DNA, 15 bp, Homo sapiens
ctgtggctcatggag

SEQ ID NO: 890275 - DNA, 15 bp, Homo sapiens
tgtggctcatggagg

SEQ ID NO: 890276 - DNA, 15 bp, Homo sapiens
gtggctcatggaggg

SEQ ID NO: 890277 - DNA, 15 bp, Homo sapiens
tggctcatggagggg

SEQ ID NO: 890278 - DNA, 15 bp, Homo sapiens
ggctcatggagggga

SEQ ID NO: 890279 - DNA, 15 bp, Homo sapiens
gctcatggaggggat

SEQ ID NO: 890280 - DNA, 15 bp, Homo sapiens
ctcatggaggggatt

SEQ ID NO: 890281 - DNA, 15 bp, Homo sapiens
tcatggaggggatta

SEQ ID NO: 890282 - DNA, 15 bp, Homo sapiens
catggaggggattat

SEQ ID NO: 890283 - DNA, 15 bp, Homo sapiens
atggaggggattatg

SEQ ID NO: 890284 - DNA, 15 bp, Homo sapiens
tggaggggattatgt

SEQ ID NO: 890285 - DNA, 15 bp, Homo sapiens
ggaggggattatgtg

SEQ ID NO: 890286 - DNA, 15 bp, Homo sapiens
gaggggattatgtgg

SEQ ID NO: 890287 - DNA, 15 bp, Homo sapiens
aggggattatgtgga

SEQ ID NO: 890288 - DNA, 15 bp, Homo sapiens
ggggattatgtggag

SEQ ID NO: 890289 - DNA, 15 bp, Homo sapiens
gggattatgtggagt

SEQ ID NO: 890290 - DNA, 15 bp, Homo sapiens
ggattatgtggagta

SEQ ID NO: 890291 - DNA, 15 bp, Homo sapiens
gattatgtggagtac

SEQ ID NO: 890292 - DNA, 15 bp, Homo sapiens
attatgtggagtacc

SEQ ID NO: 890293 - DNA, 15 bp, Homo sapiens
ttatgtggagtaccc

SEQ ID NO: 890294 - DNA, 15 bp, Homo sapiens
tatgtggagtaccct

SEQ ID NO: 890295 - DNA, 15 bp, Homo sapiens
atgtggagtaccctg

SEQ ID NO: 890296 - DNA, 15 bp, Homo sapiens
tgtggagtaccctgt

SEQ ID NO: 890297 - DNA, 15 bp, Homo sapiens
gtggagtaccctgtg

SEQ ID NO: 890298 - DNA, 15 bp, Homo sapiens
tggagtaccctgtgc

SEQ ID NO: 890299 - DNA, 15 bp, Homo sapiens
ggagtaccctgtgca

SEQ ID NO: 890300 - DNA, 15 bp, Homo sapiens
gagtaccctgtgcat

SEQ ID NO: 890301 - DNA, 15 bp, Homo sapiens
agtaccctgtgcata

SEQ ID NO: 890302 - DNA, 15 bp, Homo sapiens
gtaccctgtgcataa

SEQ ID NO: 890303 - DNA, 15 bp, Homo sapiens
taccctgtgcataag

SEQ ID NO: 890304 - DNA, 15 bp, Homo sapiens
accctgtgcataagg

SEQ ID NO: 890305 - DNA, 15 bp, Homo sapiens
ccctgtgcataaggg

SEQ ID NO: 890306 - DNA, 15 bp, Homo sapiens
cctgtgcataagggt

SEQ ID NO: 890307 - DNA, 15 bp, Homo sapiens
ctgtgcataagggtg

SEQ ID NO: 890308 - DNA, 15 bp, Homo sapiens
tgtgcataagggtgc

SEQ ID NO: 890309 - DNA, 15 bp, Homo sapiens
gtgcataagggtgct

SEQ ID NO: 890310 - DNA, 15 bp, Homo sapiens
tgcataagggtgctt

SEQ ID NO: 890311 - DNA, 15 bp, Homo sapiens
gcataagggtgcttg

SEQ ID NO: 890312 - DNA, 15 bp, Homo sapiens
cataagggtgcttga

SEQ ID NO: 890313 - DNA, 15 bp, Homo sapiens
ataagggtgcttgaa

SEQ ID NO: 890314 - DNA, 15 bp, Homo sapiens
taagggtgcttgaaa

SEQ ID NO: 890315 - DNA, 15 bp, Homo sapiens
aagggtgcttgaaag

SEQ ID NO: 890316 - DNA, 15 bp, Homo sapiens
agggtgcttgaaaga

SEQ ID NO: 890317 - DNA, 15 bp, Homo sapiens
gggtgcttgaaagat

SEQ ID NO: 890318 - DNA, 15 bp, Homo sapiens
ggtgcttgaaagatc

SEQ ID NO: 890319 - DNA, 15 bp, Homo sapiens
gtgcttgaaagatca

SEQ ID NO: 890320 - DNA, 15 bp, Homo sapiens
tgcttgaaagatcaa

SEQ ID NO: 890321 - DNA, 15 bp, Homo sapiens
gcttgaaagatcaaa

SEQ ID NO: 890322 - DNA, 15 bp, Homo sapiens
cttgaaagatcaaat

SEQ ID NO: 890323 - DNA, 15 bp, Homo sapiens
ttgaaagatcaaatt

SEQ ID NO: 890324 - DNA, 15 bp, Homo sapiens
tgaaagatcaaattg

SEQ ID NO: 890325 - DNA, 15 bp, Homo sapiens
gaaagatcaaattgg

SEQ ID NO: 890326 - DNA, 15 bp, Homo sapiens
aaagatcaaattgga

SEQ ID NO: 890327 - DNA, 15 bp, Homo sapiens
aagatcaaattggac

SEQ ID NO: 890328 - DNA, 15 bp, Homo sapiens
agatcaaattggact

SEQ ID NO: 890329 - DNA, 15 bp, Homo sapiens
gatcaaattggactt

SEQ ID NO: 890330 - DNA, 15 bp, Homo sapiens
atcaaattggacttg

SEQ ID NO: 890331 - DNA, 15 bp, Homo sapiens
tcaaattggacttgc

SEQ ID NO: 890332 - DNA, 15 bp, Homo sapiens
caaattggacttgct

SEQ ID NO: 890333 - DNA, 15 bp, Homo sapiens
aaattggacttgctt

SEQ ID NO: 890334 - DNA, 15 bp, Homo sapiens
aattggacttgcttg

SEQ ID NO: 890335 - DNA, 15 bp, Homo sapiens
attggacttgcttga

SEQ ID NO: 890336 - DNA, 15 bp, Homo sapiens
ttggacttgcttgag

SEQ ID NO: 890337 - DNA, 15 bp, Homo sapiens
tggacttgcttgagt

SEQ ID NO: 890338 - DNA, 15 bp, Homo sapiens
ggacttgcttgagtt

SEQ ID NO: 890339 - DNA, 15 bp, Homo sapiens
gacttgcttgagttg

SEQ ID NO: 890340 - DNA, 15 bp, Homo sapiens
acttgcttgagttga

SEQ ID NO: 890341 - DNA, 15 bp, Homo sapiens
cttgcttgagttgaa

SEQ ID NO: 890342 - DNA, 15 bp, Homo sapiens
ttgcttgagttgaat

SEQ ID NO: 890343 - DNA, 15 bp, Homo sapiens
tgcttgagttgaata

SEQ ID NO: 890344 - DNA, 15 bp, Homo sapiens
gcttgagttgaatag

SEQ ID NO: 890345 - DNA, 15 bp, Homo sapiens
cttgagttgaatagg

SEQ ID NO: 890346 - DNA, 15 bp, Homo sapiens
ttgagttgaataggc

SEQ ID NO: 890347 - DNA, 15 bp, Homo sapiens
tgagttgaataggcc

SEQ ID NO: 890348 - DNA, 15 bp, Homo sapiens
gagttgaataggccc

SEQ ID NO: 890349 - DNA, 15 bp, Homo sapiens
agttgaataggccct

SEQ ID NO: 890350 - DNA, 15 bp, Homo sapiens
gttgaataggccctt

SEQ ID NO: 890351 - DNA, 15 bp, Homo sapiens
ttgaataggcccttg

SEQ ID NO: 890352 - DNA, 15 bp, Homo sapiens
tgaataggcccttga

SEQ ID NO: 890353 - DNA, 15 bp, Homo sapiens
gaataggcccttgat

SEQ ID NO: 890354 - DNA, 15 bp, Homo sapiens
aataggcccttgatc

SEQ ID NO: 890355 - DNA, 15 bp, Homo sapiens
ataggcccttgatct

SEQ ID NO: 890356 - DNA, 15 bp, Homo sapiens
taggcccttgatctt

SEQ ID NO: 890357 - DNA, 15 bp, Homo sapiens
aggcccttgatctta

SEQ ID NO: 890358 - DNA, 15 bp, Homo sapiens
ggcccttgatcttag

SEQ ID NO: 890359 - DNA, 15 bp, Homo sapiens
gcccttgatcttaga

SEQ ID NO: 890360 - DNA, 15 bp, Homo sapiens
cccttgatcttagac

SEQ ID NO: 890361 - DNA, 15 bp, Homo sapiens
ccttgatcttagaca

SEQ ID NO: 890362 - DNA, 15 bp, Homo sapiens
cttgatcttagacat

SEQ ID NO: 890363 - DNA, 15 bp, Homo sapiens
ttgatcttagacatc

SEQ ID NO: 890364 - DNA, 15 bp, Homo sapiens
tgatcttagacatcc

SEQ ID NO: 890365 - DNA, 15 bp, Homo sapiens
gatcttagacatcct

SEQ ID NO: 890366 - DNA, 15 bp, Homo sapiens
atcttagacatcctt

SEQ ID NO: 890367 - DNA, 15 bp, Homo sapiens
tcttagacatcctta

SEQ ID NO: 890368 - DNA, 15 bp, Homo sapiens
cttagacatccttaa

SEQ ID NO: 890369 - DNA, 15 bp, Homo sapiens
ttagacatccttaag

SEQ ID NO: 890370 - DNA, 15 bp, Homo sapiens
tagacatccttaagt

SEQ ID NO: 890371 - DNA, 15 bp, Homo sapiens
agacatccttaagtt

SEQ ID NO: 890372 - DNA, 15 bp, Homo sapiens
gacatccttaagttt

SEQ ID NO: 890373 - DNA, 15 bp, Homo sapiens
acatccttaagtttc

SEQ ID NO: 890374 - DNA, 15 bp, Homo sapiens
catccttaagtttca

SEQ ID NO: 890375 - DNA, 15 bp, Homo sapiens
atccttaagtttcaa

SEQ ID NO: 890376 - DNA, 15 bp, Homo sapiens
tccttaagtttcaat

SEQ ID NO: 890377 - DNA, 15 bp, Homo sapiens
ccttaagtttcaata

SEQ ID NO: 890378 - DNA, 15 bp, Homo sapiens
cttaagtttcaatag

SEQ ID NO: 890379 - DNA, 15 bp, Homo sapiens
ttaagtttcaatagg

SEQ ID NO: 890380 - DNA, 15 bp, Homo sapiens
taagtttcaataggg

SEQ ID NO: 890381 - DNA, 15 bp, Homo sapiens
aagtttcaataggga

SEQ ID NO: 890382 - DNA, 15 bp, Homo sapiens
agtttcaatagggag

SEQ ID NO: 890383 - DNA, 15 bp, Homo sapiens
gtttcaatagggaga

SEQ ID NO: 890384 - DNA, 15 bp, Homo sapiens
tttcaatagggagag

SEQ ID NO: 890385 - DNA, 15 bp, Homo sapiens
ttcaatagggagagc

SEQ ID NO: 890386 - DNA, 15 bp, Homo sapiens
tcaatagggagagct

SEQ ID NO: 890387 - DNA, 15 bp, Homo sapiens
caatagggagagctc

SEQ ID NO: 890388 - DNA, 15 bp, Homo sapiens
aatagggagagctct

SEQ ID NO: 890389 - DNA, 15 bp, Homo sapiens
atagggagagctctc

SEQ ID NO: 890390 - DNA, 15 bp, Homo sapiens
tagggagagctctct

SEQ ID NO: 890391 - DNA, 15 bp, Homo sapiens
agggagagctctcta

SEQ ID NO: 890392 - DNA, 15 bp, Homo sapiens
gggagagctctctat

SEQ ID NO: 890393 - DNA, 15 bp, Homo sapiens
ggagagctctctatg

SEQ ID NO: 890394 - DNA, 15 bp, Homo sapiens
gagagctctctatga

SEQ ID NO: 890395 - DNA, 15 bp, Homo sapiens
agagctctctatgat

SEQ ID NO: 890396 - DNA, 15 bp, Homo sapiens
gagctctctatgatc

SEQ ID NO: 890397 - DNA, 15 bp, Homo sapiens
agctctctatgatct

SEQ ID NO: 890398 - DNA, 15 bp, Homo sapiens
gctctctatgatcta

SEQ ID NO: 890399 - DNA, 15 bp, Homo sapiens
ctctctatgatctat

SEQ ID NO: 890400 - DNA, 15 bp, Homo sapiens
tctctatgatctata

SEQ ID NO: 890401 - DNA, 15 bp, Homo sapiens
ctctatgatctataa

SEQ ID NO: 890402 - DNA, 15 bp, Homo sapiens
tctatgatctataac

SEQ ID NO: 890403 - DNA, 15 bp, Homo sapiens
ctatgatctataacc

SEQ ID NO: 890404 - DNA, 15 bp, Homo sapiens
tatgatctataaccc

SEQ ID NO: 890405 - DNA, 15 bp, Homo sapiens
atgatctataacccc

SEQ ID NO: 890406 - DNA, 15 bp, Homo sapiens
tgatctataacccca

SEQ ID NO: 890407 - DNA, 15 bp, Homo sapiens
gatctataaccccag

SEQ ID NO: 890408 - DNA, 15 bp, Homo sapiens
atctataaccccagc

SEQ ID NO: 890409 - DNA, 15 bp, Homo sapiens
tctataaccccagcc

SEQ ID NO: 890410 - DNA, 15 bp, Homo sapiens
ctataaccccagcca

SEQ ID NO: 890411 - DNA, 15 bp, Homo sapiens
tataaccccagccaa

SEQ ID NO: 890412 - DNA, 15 bp, Homo sapiens
ataaccccagccaat

SEQ ID NO: 890413 - DNA, 15 bp, Homo sapiens
taaccccagccaata

SEQ ID NO: 890414 - DNA, 15 bp, Homo sapiens
aaccccagccaataa

SEQ ID NO: 890415 - DNA, 15 bp, Homo sapiens
accccagccaataac

SEQ ID NO: 890416 - DNA, 15 bp, Homo sapiens
ccccagccaataaca

SEQ ID NO: 890417 - DNA, 15 bp, Homo sapiens
cccagccaataacag

SEQ ID NO: 890418 - DNA, 15 bp, Homo sapiens
ccagccaataacagg

SEQ ID NO: 890419 - DNA, 15 bp, Homo sapiens
cagccaataacaggt

SEQ ID NO: 890420 - DNA, 15 bp, Homo sapiens
agccaataacaggtc

SEQ ID NO: 890421 - DNA, 15 bp, Homo sapiens
gccaataacaggtca

SEQ ID NO: 890422 - DNA, 15 bp, Homo sapiens
ccaataacaggtcac

SEQ ID NO: 890423 - DNA, 15 bp, Homo sapiens
caataacaggtcact

SEQ ID NO: 890424 - DNA, 15 bp, Homo sapiens
aataacaggtcactt

SEQ ID NO: 890425 - DNA, 15 bp, Homo sapiens
ataacaggtcacttg

SEQ ID NO: 890426 - DNA, 15 bp, Homo sapiens
taacaggtcacttgt

SEQ ID NO: 890427 - DNA, 15 bp, Homo sapiens
aacaggtcacttgtc

SEQ ID NO: 890428 - DNA, 15 bp, Homo sapiens
acaggtcacttgtca

SEQ ID NO: 890429 - DNA, 15 bp, Homo sapiens
caggtcacttgtcac

SEQ ID NO: 890430 - DNA, 15 bp, Homo sapiens
aggtcacttgtcacc

SEQ ID NO: 890431 - DNA, 15 bp, Homo sapiens
ggtcacttgtcacca

SEQ ID NO: 890432 - DNA, 15 bp, Homo sapiens
gtcacttgtcaccac

SEQ ID NO: 890433 - DNA, 15 bp, Homo sapiens
tcacttgtcaccacc

SEQ ID NO: 890434 - DNA, 15 bp, Homo sapiens
cacttgtcaccacca

SEQ ID NO: 890435 - DNA, 15 bp, Homo sapiens
acttgtcaccaccag

SEQ ID NO: 890436 - DNA, 15 bp, Homo sapiens
cttgtcaccaccagc

SEQ ID NO: 890437 - DNA, 15 bp, Homo sapiens
ttgtcaccaccagct

SEQ ID NO: 890438 - DNA, 15 bp, Homo sapiens
tgtcaccaccagctc

SEQ ID NO: 890439 - DNA, 15 bp, Homo sapiens
gtcaccaccagctcc

SEQ ID NO: 890440 - DNA, 15 bp, Homo sapiens
tcaccaccagctccg

SEQ ID NO: 890441 - DNA, 15 bp, Homo sapiens
caccaccagctccgt

SEQ ID NO: 890442 - DNA, 15 bp, Homo sapiens
accaccagctccgtg

SEQ ID NO: 890443 - DNA, 15 bp, Homo sapiens
ccaccagctccgtgg

SEQ ID NO: 890444 - DNA, 15 bp, Homo sapiens
caccagctccgtgga

SEQ ID NO: 890445 - DNA, 15 bp, Homo sapiens
accagctccgtggac

SEQ ID NO: 890446 - DNA, 15 bp, Homo sapiens
ccagctccgtggaca

SEQ ID NO: 890447 - DNA, 15 bp, Homo sapiens
cagctccgtggacat

SEQ ID NO: 890448 - DNA, 15 bp, Homo sapiens
agctccgtggacata

SEQ ID NO: 890449 - DNA, 15 bp, Homo sapiens
gctccgtggacatag

SEQ ID NO: 890450 - DNA, 15 bp, Homo sapiens
ctccgtggacataga

SEQ ID NO: 890451 - DNA, 15 bp, Homo sapiens
tccgtggacatagac

SEQ ID NO: 890452 - DNA, 15 bp, Homo sapiens
ccgtggacatagaca

SEQ ID NO: 890453 - DNA, 15 bp, Homo sapiens
cgtggacatagacac

SEQ ID NO: 890454 - DNA, 15 bp, Homo sapiens
gtggacatagacact

SEQ ID NO: 890455 - DNA, 15 bp, Homo sapiens
tggacatagacactt

SEQ ID NO: 890456 - DNA, 15 bp, Homo sapiens
ggacatagacactta

SEQ ID NO: 890457 - DNA, 15 bp, Homo sapiens
gacatagacacttag

SEQ ID NO: 890458 - DNA, 15 bp, Homo sapiens
acatagacacttagc

SEQ ID NO: 890459 - DNA, 15 bp, Homo sapiens
catagacacttagca

SEQ ID NO: 890460 - DNA, 15 bp, Homo sapiens
atagacacttagcag

SEQ ID NO: 890461 - DNA, 15 bp, Homo sapiens
tagacacttagcagg

SEQ ID NO: 890462 - DNA, 15 bp, Homo sapiens
agacacttagcaggc

SEQ ID NO: 890463 - DNA, 15 bp, Homo sapiens
gacacttagcaggcc

SEQ ID NO: 890464 - DNA, 15 bp, Homo sapiens
acacttagcaggcca

SEQ ID NO: 890465 - DNA, 15 bp, Homo sapiens
cacttagcaggccaa

SEQ ID NO: 890466 - DNA, 15 bp, Homo sapiens
acttagcaggccaat

SEQ ID NO: 890467 - DNA, 15 bp, Homo sapiens
cttagcaggccaata

SEQ ID NO: 890468 - DNA, 15 bp, Homo sapiens
ttagcaggccaataa

SEQ ID NO: 890469 - DNA, 15 bp, Homo sapiens
tagcaggccaataat

SEQ ID NO: 890470 - DNA, 15 bp, Homo sapiens
agcaggccaataata

SEQ ID NO: 890471 - DNA, 15 bp, Homo sapiens
gcaggccaataataa

SEQ ID NO: 890472 - DNA, 15 bp, Homo sapiens
caggccaataataat

SEQ ID NO: 890473 - DNA, 15 bp, Homo sapiens
aggccaataataata

SEQ ID NO: 890474 - DNA, 15 bp, Homo sapiens
ggccaataataatat

SEQ ID NO: 890475 - DNA, 15 bp, Homo sapiens
gccaataataatata

SEQ ID NO: 890476 - DNA, 15 bp, Homo sapiens
ccaataataatatat

SEQ ID NO: 890477 - DNA, 15 bp, Homo sapiens
caataataatatata

SEQ ID NO: 890478 - DNA, 15 bp, Homo sapiens
aataataatatataa

SEQ ID NO: 890479 - DNA, 15 bp, Homo sapiens
ataataatatataaa

SEQ ID NO: 890480 - DNA, 15 bp, Homo sapiens
taataatatataaag

SEQ ID NO: 890481 - DNA, 15 bp, Homo sapiens
aataatatataaaga

SEQ ID NO: 890482 - DNA, 15 bp, Homo sapiens
ataatatataaagag

SEQ ID NO: 890483 - DNA, 15 bp, Homo sapiens
taatatataaagagt

SEQ ID NO: 890484 - DNA, 15 bp, Homo sapiens
aatatataaagagtt

SEQ ID NO: 890485 - DNA, 15 bp, Homo sapiens
atatataaagagttg

SEQ ID NO: 890486 - DNA, 15 bp, Homo sapiens
tatataaagagttgg

SEQ ID NO: 890487 - DNA, 15 bp, Homo sapiens
atataaagagttggt

SEQ ID NO: 890488 - DNA, 15 bp, Homo sapiens
tataaagagttggtg

SEQ ID NO: 890489 - DNA, 15 bp, Homo sapiens
ataaagagttggtgg

SEQ ID NO: 890490 - DNA, 15 bp, Homo sapiens
taaagagttggtggc

SEQ ID NO: 890491 - DNA, 15 bp, Homo sapiens
aaagagttggtggca

SEQ ID NO: 890492 - DNA, 15 bp, Homo sapiens
aagagttggtggcag

SEQ ID NO: 890493 - DNA, 15 bp, Homo sapiens
agagttggtggcagc

SEQ ID NO: 890494 - DNA, 15 bp, Homo sapiens
gagttggtggcagcc

SEQ ID NO: 890495 - DNA, 15 bp, Homo sapiens
agttggtggcagcca

SEQ ID NO: 890496 - DNA, 15 bp, Homo sapiens
gttggtggcagccac

SEQ ID NO: 890497 - DNA, 15 bp, Homo sapiens
ttggtggcagccacc

SEQ ID NO: 890498 - DNA, 15 bp, Homo sapiens
tggtggcagccacca

SEQ ID NO: 890499 - DNA, 15 bp, Homo sapiens
ggtggcagccaccac

SEQ ID NO: 890500 - DNA, 15 bp, Homo sapiens
gtggcagccaccacc

SEQ ID NO: 890501 - DNA, 15 bp, Homo sapiens
tggcagccaccacct

SEQ ID NO: 890502 - DNA, 15 bp, Homo sapiens
ggcagccaccacctc

SEQ ID NO: 890503 - DNA, 15 bp, Homo sapiens
gcagccaccacctca

SEQ ID NO: 890504 - DNA, 15 bp, Homo sapiens
cagccaccacctcat

SEQ ID NO: 890505 - DNA, 15 bp, Homo sapiens
agccaccacctcatt

SEQ ID NO: 890506 - DNA, 15 bp, Homo sapiens
gccaccacctcattg

SEQ ID NO: 890507 - DNA, 15 bp, Homo sapiens
ccaccacctcattga

SEQ ID NO: 890508 - DNA, 15 bp, Homo sapiens
caccacctcattgaa

SEQ ID NO: 890509 - DNA, 15 bp, Homo sapiens
accacctcattgaag

SEQ ID NO: 890510 - DNA, 15 bp, Homo sapiens
ccacctcattgaagc

SEQ ID NO: 890511 - DNA, 15 bp, Homo sapiens
cacctcattgaagcc

SEQ ID NO: 890512 - DNA, 15 bp, Homo sapiens
acctcattgaagcca

SEQ ID NO: 890513 - DNA, 15 bp, Homo sapiens
cctcattgaagccag

SEQ ID NO: 890514 - DNA, 15 bp, Homo sapiens
ctcattgaagccagg

SEQ ID NO: 890515 - DNA, 15 bp, Homo sapiens
tcattgaagccaggc

SEQ ID NO: 890516 - DNA, 15 bp, Homo sapiens
cattgaagccaggct

SEQ ID NO: 890517 - DNA, 15 bp, Homo sapiens
attgaagccaggctt

SEQ ID NO: 890518 - DNA, 15 bp, Homo sapiens
ttgaagccaggctta

SEQ ID NO: 890519 - DNA, 15 bp, Homo sapiens
tgaagccaggcttac

SEQ ID NO: 890520 - DNA, 15 bp, Homo sapiens
gaagccaggcttacc

SEQ ID NO: 890521 - DNA, 15 bp, Homo sapiens
aagccaggcttacct

SEQ ID NO: 890522 - DNA, 15 bp, Homo sapiens
agccaggcttaccta

SEQ ID NO: 890523 - DNA, 15 bp, Homo sapiens
gccaggcttacctag

SEQ ID NO: 890524 - DNA, 15 bp, Homo sapiens
ccaggcttacctagc

SEQ ID NO: 890525 - DNA, 15 bp, Homo sapiens
caggcttacctagca

SEQ ID NO: 890526 - DNA, 15 bp, Homo sapiens
aggcttacctagcag

SEQ ID NO: 890527 - DNA, 15 bp, Homo sapiens
ggcttacctagcagc

SEQ ID NO: 890528 - DNA, 15 bp, Homo sapiens
gcttacctagcagcc

SEQ ID NO: 890529 - DNA, 15 bp, Homo sapiens
cttacctagcagcca

SEQ ID NO: 890530 - DNA, 15 bp, Homo sapiens
ttacctagcagccac

SEQ ID NO: 890531 - DNA, 15 bp, Homo sapiens
tacctagcagccacg

SEQ ID NO: 890532 - DNA, 15 bp, Homo sapiens
acctagcagccacgg

SEQ ID NO: 890533 - DNA, 15 bp, Homo sapiens
cctagcagccacgga

SEQ ID NO: 890534 - DNA, 15 bp, Homo sapiens
ctagcagccacggag

SEQ ID NO: 890535 - DNA, 15 bp, Homo sapiens
tagcagccacggaga

SEQ ID NO: 890536 - DNA, 15 bp, Homo sapiens
agcagccacggagac

SEQ ID NO: 890537 - DNA, 15 bp, Homo sapiens
gcagccacggagaca

SEQ ID NO: 890538 - DNA, 15 bp, Homo sapiens
cagccacggagacaa

SEQ ID NO: 890539 - DNA, 15 bp, Homo sapiens
agccacggagacaac

SEQ ID NO: 890540 - DNA, 15 bp, Homo sapiens
gccacggagacaact

SEQ ID NO: 890541 - DNA, 15 bp, Homo sapiens
ccacggagacaactt

SEQ ID NO: 890542 - DNA, 15 bp, Homo sapiens
cacggagacaacttc

SEQ ID NO: 890543 - DNA, 15 bp, Homo sapiens
acggagacaacttca

SEQ ID NO: 890544 - DNA, 15 bp, Homo sapiens
cggagacaacttcat

SEQ ID NO: 890545 - DNA, 15 bp, Homo sapiens
ggagacaacttcatg

SEQ ID NO: 890546 - DNA, 15 bp, Homo sapiens
gagacaacttcatgt

SEQ ID NO: 890547 - DNA, 15 bp, Homo sapiens
agacaacttcatgtg

SEQ ID NO: 890548 - DNA, 15 bp, Homo sapiens
gacaacttcatgtgt

SEQ ID NO: 890549 - DNA, 15 bp, Homo sapiens
acaacttcatgtgtg

SEQ ID NO: 890550 - DNA, 15 bp, Homo sapiens
caacttcatgtgtgg

SEQ ID NO: 890551 - DNA, 15 bp, Homo sapiens
aacttcatgtgtggg

SEQ ID NO: 890552 - DNA, 15 bp, Homo sapiens
acttcatgtgtggga

SEQ ID NO: 890553 - DNA, 15 bp, Homo sapiens
cttcatgtgtgggat

SEQ ID NO: 890554 - DNA, 15 bp, Homo sapiens
ttcatgtgtgggatt

SEQ ID NO: 890555 - DNA, 15 bp, Homo sapiens
tcatgtgtgggattg

SEQ ID NO: 890556 - DNA, 15 bp, Homo sapiens
catgtgtgggattgt

SEQ ID NO: 890557 - DNA, 15 bp, Homo sapiens
atgtgtgggattgta

SEQ ID NO: 890558 - DNA, 15 bp, Homo sapiens
tgtgtgggattgtat

SEQ ID NO: 890559 - DNA, 15 bp, Homo sapiens
gtgtgggattgtatg

SEQ ID NO: 890560 - DNA, 15 bp, Homo sapiens
tgtgggattgtatga

SEQ ID NO: 890561 - DNA, 15 bp, Homo sapiens
gtgggattgtatgag

SEQ ID NO: 890562 - DNA, 15 bp, Homo sapiens
tgggattgtatgagg

SEQ ID NO: 890563 - DNA, 15 bp, Homo sapiens
gggattgtatgaggg

SEQ ID NO: 890564 - DNA, 15 bp, Homo sapiens
ggattgtatgagggt

SEQ ID NO: 890565 - DNA, 15 bp, Homo sapiens
gattgtatgagggtc

SEQ ID NO: 890566 - DNA, 15 bp, Homo sapiens
attgtatgagggtcc

SEQ ID NO: 890567 - DNA, 15 bp, Homo sapiens
ttgtatgagggtccc

SEQ ID NO: 890568 - DNA, 15 bp, Homo sapiens
tgtatgagggtccct

SEQ ID NO: 890569 - DNA, 15 bp, Homo sapiens
gtatgagggtccctg

SEQ ID NO: 890570 - DNA, 15 bp, Homo sapiens
tatgagggtccctgt

SEQ ID NO: 890571 - DNA, 15 bp, Homo sapiens
atgagggtccctgtg

SEQ ID NO: 890572 - DNA, 15 bp, Homo sapiens
tgagggtccctgtga

SEQ ID NO: 890573 - DNA, 15 bp, Homo sapiens
gagggtccctgtgaa

SEQ ID NO: 890574 - DNA, 15 bp, Homo sapiens
agggtccctgtgaat

SEQ ID NO: 890575 - DNA, 15 bp, Homo sapiens
gggtccctgtgaatg

SEQ ID NO: 890576 - DNA, 15 bp, Homo sapiens
ggtccctgtgaatga

SEQ ID NO: 890577 - DNA, 15 bp, Homo sapiens
gtccctgtgaatgat

SEQ ID NO: 890578 - DNA, 15 bp, Homo sapiens
tccctgtgaatgatc

SEQ ID NO: 890579 - DNA, 15 bp, Homo sapiens
ccctgtgaatgatct

SEQ ID NO: 890580 - DNA, 15 bp, Homo sapiens
cctgtgaatgatctc

SEQ ID NO: 890581 - DNA, 15 bp, Homo sapiens
ctgtgaatgatctct

SEQ ID NO: 890582 - DNA, 15 bp, Homo sapiens
tgtgaatgatctctc

SEQ ID NO: 890583 - DNA, 15 bp, Homo sapiens
gtgaatgatctctca

SEQ ID NO: 890584 - DNA, 15 bp, Homo sapiens
tgaatgatctctcat

SEQ ID NO: 890585 - DNA, 15 bp, Homo sapiens
gaatgatctctcatt

SEQ ID NO: 890586 - DNA, 15 bp, Homo sapiens
aatgatctctcattt

SEQ ID NO: 890587 - DNA, 15 bp, Homo sapiens
atgatctctcatttc

SEQ ID NO: 890588 - DNA, 15 bp, Homo sapiens
tgatctctcatttcc

SEQ ID NO: 890589 - DNA, 15 bp, Homo sapiens
gatctctcatttcca

SEQ ID NO: 890590 - DNA, 15 bp, Homo sapiens
atctctcatttccaa

SEQ ID NO: 890591 - DNA, 15 bp, Homo sapiens
tctctcatttccaaa

SEQ ID NO: 890592 - DNA, 15 bp, Homo sapiens
ctctcatttccaaat

SEQ ID NO: 890593 - DNA, 15 bp, Homo sapiens
tctcatttccaaata

SEQ ID NO: 890594 - DNA, 15 bp, Homo sapiens
ctcatttccaaatat

SEQ ID NO: 890595 - DNA, 15 bp, Homo sapiens
tcatttccaaatatt

SEQ ID NO: 890596 - DNA, 15 bp, Homo sapiens
catttccaaatattt

SEQ ID NO: 890597 - DNA, 15 bp, Homo sapiens
atttccaaatatttt

SEQ ID NO: 890598 - DNA, 15 bp, Homo sapiens
tttccaaatattttt

SEQ ID NO: 890599 - DNA, 15 bp, Homo sapiens
ttccaaatatttttt

SEQ ID NO: 890600 - DNA, 15 bp, Homo sapiens
tccaaatattttttg

SEQ ID NO: 890601 - DNA, 15 bp, Homo sapiens
ccaaatattttttgt

SEQ ID NO: 890602 - DNA, 15 bp, Homo sapiens
caaatattttttgtg

SEQ ID NO: 890603 - DNA, 15 bp, Homo sapiens
aaatattttttgtgc

SEQ ID NO: 890604 - DNA, 15 bp, Homo sapiens
aatattttttgtgct

SEQ ID NO: 890605 - DNA, 15 bp, Homo sapiens
atattttttgtgctt

SEQ ID NO: 890606 - DNA, 15 bp, Homo sapiens
tattttttgtgctta

SEQ ID NO: 890607 - DNA, 15 bp, Homo sapiens
attttttgtgcttaa

SEQ ID NO: 890608 - DNA, 15 bp, Homo sapiens
ttttttgtgcttaac

SEQ ID NO: 890609 - DNA, 15 bp, Homo sapiens
tttttgtgcttaaca

SEQ ID NO: 890610 - DNA, 15 bp, Homo sapiens
ttttgtgcttaacat

SEQ ID NO: 890611 - DNA, 15 bp, Homo sapiens
tttgtgcttaacatc

SEQ ID NO: 890612 - DNA, 15 bp, Homo sapiens
ttgtgcttaacatca

SEQ ID NO: 890613 - DNA, 15 bp, Homo sapiens
tgtgcttaacatcat

SEQ ID NO: 890614 - DNA, 15 bp, Homo sapiens
gtgcttaacatcatc

SEQ ID NO: 890615 - DNA, 15 bp, Homo sapiens
tgcttaacatcatcc

SEQ ID NO: 890616 - DNA, 15 bp, Homo sapiens
gcttaacatcatcca

SEQ ID NO: 890617 - DNA, 15 bp, Homo sapiens
cttaacatcatccac

SEQ ID NO: 890618 - DNA, 15 bp, Homo sapiens
ttaacatcatccact

SEQ ID NO: 890619 - DNA, 15 bp, Homo sapiens
taacatcatccactt

SEQ ID NO: 890620 - DNA, 15 bp, Homo sapiens
aacatcatccacttg

SEQ ID NO: 890621 - DNA, 15 bp, Homo sapiens
acatcatccacttga

SEQ ID NO: 890622 - DNA, 15 bp, Homo sapiens
catcatccacttgac

SEQ ID NO: 890623 - DNA, 15 bp, Homo sapiens
atcatccacttgact

SEQ ID NO: 890624 - DNA, 15 bp, Homo sapiens
tcatccacttgactt

SEQ ID NO: 890625 - DNA, 15 bp, Homo sapiens
catccacttgacttt

SEQ ID NO: 890626 - DNA, 15 bp, Homo sapiens
atccacttgactttg

SEQ ID NO: 890627 - DNA, 15 bp, Homo sapiens
tccacttgactttgt

SEQ ID NO: 890628 - DNA, 15 bp, Homo sapiens
ccacttgactttgtg

SEQ ID NO: 890629 - DNA, 15 bp, Homo sapiens
cacttgactttgtgc

SEQ ID NO: 890630 - DNA, 15 bp, Homo sapiens
acttgactttgtgct

SEQ ID NO: 890631 - DNA, 15 bp, Homo sapiens
cttgactttgtgcta

SEQ ID NO: 890632 - DNA, 15 bp, Homo sapiens
ttgactttgtgctag

SEQ ID NO: 890633 - DNA, 15 bp, Homo sapiens
tgactttgtgctaga

SEQ ID NO: 890634 - DNA, 15 bp, Homo sapiens
gactttgtgctagat

SEQ ID NO: 890635 - DNA, 15 bp, Homo sapiens
actttgtgctagatt

SEQ ID NO: 890636 - DNA, 15 bp, Homo sapiens
ctttgtgctagattg

SEQ ID NO: 890637 - DNA, 15 bp, Homo sapiens
tttgtgctagattgc

SEQ ID NO: 890638 - DNA, 15 bp, Homo sapiens
ttgtgctagattgca

SEQ ID NO: 890639 - DNA, 15 bp, Homo sapiens
tgtgctagattgcac

SEQ ID NO: 890640 - DNA, 15 bp, Homo sapiens
gtgctagattgcaca

SEQ ID NO: 890641 - DNA, 15 bp, Homo sapiens
tgctagattgcacat

SEQ ID NO: 890642 - DNA, 15 bp, Homo sapiens
gctagattgcacatg

SEQ ID NO: 890643 - DNA, 15 bp, Homo sapiens
ctagattgcacatgg

SEQ ID NO: 890644 - DNA, 15 bp, Homo sapiens
tagattgcacatggc

SEQ ID NO: 890645 - DNA, 15 bp, Homo sapiens
agattgcacatggca

SEQ ID NO: 890646 - DNA, 15 bp, Homo sapiens
gattgcacatggcac

SEQ ID NO: 890647 - DNA, 15 bp, Homo sapiens
attgcacatggcact

SEQ ID NO: 890648 - DNA, 15 bp, Homo sapiens
ttgcacatggcactg

SEQ ID NO: 890649 - DNA, 15 bp, Homo sapiens
tgcacatggcactgg

SEQ ID NO: 890650 - DNA, 15 bp, Homo sapiens
gcacatggcactggc

SEQ ID NO: 890651 - DNA, 15 bp, Homo sapiens
cacatggcactggca

SEQ ID NO: 890652 - DNA, 15 bp, Homo sapiens
acatggcactggcat

SEQ ID NO: 890653 - DNA, 15 bp, Homo sapiens
catggcactggcata

SEQ ID NO: 890654 - DNA, 15 bp, Homo sapiens
atggcactggcatat

SEQ ID NO: 890655 - DNA, 15 bp, Homo sapiens
tggcactggcatatg

SEQ ID NO: 890656 - DNA, 15 bp, Homo sapiens
ggcactggcatatga

SEQ ID NO: 890657 - DNA, 15 bp, Homo sapiens
gcactggcatatgag

SEQ ID NO: 890658 - DNA, 15 bp, Homo sapiens
cactggcatatgaga

SEQ ID NO: 890659 - DNA, 15 bp, Homo sapiens
actggcatatgagat

SEQ ID NO: 890660 - DNA, 15 bp, Homo sapiens
ctggcatatgagata

SEQ ID NO: 890661 - DNA, 15 bp, Homo sapiens
tggcatatgagatag

SEQ ID NO: 890662 - DNA, 15 bp, Homo sapiens
ggcatatgagataga

SEQ ID NO: 890663 - DNA, 15 bp, Homo sapiens
gcatatgagatagaa

SEQ ID NO: 890664 - DNA, 15 bp, Homo sapiens
catatgagatagaag

SEQ ID NO: 890665 - DNA, 15 bp, Homo sapiens
atatgagatagaagg

SEQ ID NO: 890666 - DNA, 15 bp, Homo sapiens
tatgagatagaaggt

SEQ ID NO: 890667 - DNA, 15 bp, Homo sapiens
atgagatagaaggtc

SEQ ID NO: 890668 - DNA, 15 bp, Homo sapiens
tgagatagaaggtca

SEQ ID NO: 890669 - DNA, 15 bp, Homo sapiens
gagatagaaggtcag

SEQ ID NO: 890670 - DNA, 15 bp, Homo sapiens
agatagaaggtcagc

SEQ ID NO: 890671 - DNA, 15 bp, Homo sapiens
gatagaaggtcagct

SEQ ID NO: 890672 - DNA, 15 bp, Homo sapiens
atagaaggtcagctt

SEQ ID NO: 890673 - DNA, 15 bp, Homo sapiens
tagaaggtcagcttt

SEQ ID NO: 890674 - DNA, 15 bp, Homo sapiens
agaaggtcagctttt

SEQ ID NO: 890675 - DNA, 15 bp, Homo sapiens
gaaggtcagcttttc

SEQ ID NO: 890676 - DNA, 15 bp, Homo sapiens
aaggtcagcttttca

SEQ ID NO: 890677 - DNA, 15 bp, Homo sapiens
aggtcagcttttcat

SEQ ID NO: 890678 - DNA, 15 bp, Homo sapiens
ggtcagcttttcatg

SEQ ID NO: 890679 - DNA, 15 bp, Homo sapiens
gtcagcttttcatgc

SEQ ID NO: 890680 - DNA, 15 bp, Homo sapiens
tcagcttttcatgca

SEQ ID NO: 890681 - DNA, 15 bp, Homo sapiens
cagcttttcatgcag

SEQ ID NO: 890682 - DNA, 15 bp, Homo sapiens
agcttttcatgcagc

SEQ ID NO: 890683 - DNA, 15 bp, Homo sapiens
gcttttcatgcagct

SEQ ID NO: 890684 - DNA, 15 bp, Homo sapiens
cttttcatgcagctt

SEQ ID NO: 890685 - DNA, 15 bp, Homo sapiens
ttttcatgcagcttt

SEQ ID NO: 890686 - DNA, 15 bp, Homo sapiens
tttcatgcagctttt

SEQ ID NO: 890687 - DNA, 15 bp, Homo sapiens
ttcatgcagcttttc

SEQ ID NO: 890688 - DNA, 15 bp, Homo sapiens
tcatgcagcttttct

SEQ ID NO: 890689 - DNA, 15 bp, Homo sapiens
catgcagcttttctt

SEQ ID NO: 890690 - DNA, 15 bp, Homo sapiens
atgcagcttttcttt

SEQ ID NO: 890691 - DNA, 15 bp, Homo sapiens
tgcagcttttctttc

SEQ ID NO: 890692 - DNA, 15 bp, Homo sapiens
gcagcttttctttct

SEQ ID NO: 890693 - DNA, 15 bp, Homo sapiens
cagcttttctttctc

SEQ ID NO: 890694 - DNA, 15 bp, Homo sapiens
agcttttctttctcc

SEQ ID NO: 890695 - DNA, 15 bp, Homo sapiens
gcttttctttctcct

SEQ ID NO: 890696 - DNA, 15 bp, Homo sapiens
cttttctttctcctt

SEQ ID NO: 890697 - DNA, 15 bp, Homo sapiens
ttttctttctccttc

SEQ ID NO: 890698 - DNA, 15 bp, Homo sapiens
tttctttctccttcc

SEQ ID NO: 890699 - DNA, 15 bp, Homo sapiens
ttctttctccttccc

SEQ ID NO: 890700 - DNA, 15 bp, Homo sapiens
tctttctccttccct

SEQ ID NO: 890701 - DNA, 15 bp, Homo sapiens
ctttctccttccctt

SEQ ID NO: 890702 - DNA, 15 bp, Homo sapiens
tttctccttcccttc

SEQ ID NO: 890703 - DNA, 15 bp, Homo sapiens
ttctccttcccttct

SEQ ID NO: 890704 - DNA, 15 bp, Homo sapiens
tctccttcccttctt

SEQ ID NO: 890705 - DNA, 15 bp, Homo sapiens
ctccttcccttcttt

SEQ ID NO: 890706 - DNA, 15 bp, Homo sapiens
tccttcccttctttc

SEQ ID NO: 890707 - DNA, 15 bp, Homo sapiens
ccttcccttctttct

SEQ ID NO: 890708 - DNA, 15 bp, Homo sapiens
cttcccttctttctt

SEQ ID NO: 890709 - DNA, 15 bp, Homo sapiens
ttcccttctttcttc

SEQ ID NO: 890710 - DNA, 15 bp, Homo sapiens
tcccttctttcttcc

SEQ ID NO: 890711 - DNA, 15 bp, Homo sapiens
cccttctttcttcct

SEQ ID NO: 890712 - DNA, 15 bp, Homo sapiens
ccttctttcttcctc

SEQ ID NO: 890713 - DNA, 15 bp, Homo sapiens
cttctttcttcctcg

SEQ ID NO: 890714 - DNA, 15 bp, Homo sapiens
ttctttcttcctcgt

SEQ ID NO: 890715 - DNA, 15 bp, Homo sapiens
tctttcttcctcgtt

SEQ ID NO: 890716 - DNA, 15 bp, Homo sapiens
ctttcttcctcgttc

SEQ ID NO: 890717 - DNA, 15 bp, Homo sapiens
tttcttcctcgttcc

SEQ ID NO: 890718 - DNA, 15 bp, Homo sapiens
ttcttcctcgttcct

SEQ ID NO: 890719 - DNA, 15 bp, Homo sapiens
tcttcctcgttcctt

SEQ ID NO: 890720 - DNA, 15 bp, Homo sapiens
cttcctcgttccttc

SEQ ID NO: 890721 - DNA, 15 bp, Homo sapiens
ttcctcgttccttcc

SEQ ID NO: 890722 - DNA, 15 bp, Homo sapiens
tcctcgttccttccc

SEQ ID NO: 890723 - DNA, 15 bp, Homo sapiens
cctcgttccttccct

SEQ ID NO: 890724 - DNA, 15 bp, Homo sapiens
ctcgttccttcccta

SEQ ID NO: 890725 - DNA, 15 bp, Homo sapiens
tcgttccttccctac

SEQ ID NO: 890726 - DNA, 15 bp, Homo sapiens
cgttccttccctact

SEQ ID NO: 890727 - DNA, 15 bp, Homo sapiens
gttccttccctactt

SEQ ID NO: 890728 - DNA, 15 bp, Homo sapiens
ttccttccctacttc

SEQ ID NO: 890729 - DNA, 15 bp, Homo sapiens
tccttccctacttcc

SEQ ID NO: 890730 - DNA, 15 bp, Homo sapiens
ccttccctacttcca

SEQ ID NO: 890731 - DNA, 15 bp, Homo sapiens
cttccctacttccac

SEQ ID NO: 890732 - DNA, 15 bp, Homo sapiens
ttccctacttccacc

SEQ ID NO: 890733 - DNA, 15 bp, Homo sapiens
tccctacttccacca

SEQ ID NO: 890734 - DNA, 15 bp, Homo sapiens
ccctacttccaccat

SEQ ID NO: 890735 - DNA, 15 bp, Homo sapiens
cctacttccaccatc

SEQ ID NO: 890736 - DNA, 15 bp, Homo sapiens
ctacttccaccatcc

SEQ ID NO: 890737 - DNA, 15 bp, Homo sapiens
tacttccaccatcct

SEQ ID NO: 890738 - DNA, 15 bp, Homo sapiens
acttccaccatcctc

SEQ ID NO: 890739 - DNA, 15 bp, Homo sapiens
cttccaccatcctct

SEQ ID NO: 890740 - DNA, 15 bp, Homo sapiens
ttccaccatcctctt

SEQ ID NO: 890741 - DNA, 15 bp, Homo sapiens
tccaccatcctcttt

SEQ ID NO: 890742 - DNA, 15 bp, Homo sapiens
ccaccatcctctttc

SEQ ID NO: 890743 - DNA, 15 bp, Homo sapiens
caccatcctctttcc

SEQ ID NO: 890744 - DNA, 15 bp, Homo sapiens
accatcctctttcct

SEQ ID NO: 890745 - DNA, 15 bp, Homo sapiens
ccatcctctttcctc

SEQ ID NO: 890746 - DNA, 15 bp, Homo sapiens
catcctctttcctcc

SEQ ID NO: 890747 - DNA, 15 bp, Homo sapiens
atcctctttcctcct

SEQ ID NO: 890748 - DNA, 15 bp, Homo sapiens
tcctctttcctcctt

SEQ ID NO: 890749 - DNA, 15 bp, Homo sapiens
cctctttcctccttg

SEQ ID NO: 890750 - DNA, 15 bp, Homo sapiens
ctctttcctccttgc

SEQ ID NO: 890751 - DNA, 15 bp, Homo sapiens
tctttcctccttgct

SEQ ID NO: 890752 - DNA, 15 bp, Homo sapiens
ctttcctccttgctt

SEQ ID NO: 890753 - DNA, 15 bp, Homo sapiens
tttcctccttgcttc

SEQ ID NO: 890754 - DNA, 15 bp, Homo sapiens
ttcctccttgcttcc

SEQ ID NO: 890755 - DNA, 15 bp, Homo sapiens
tcctccttgcttcct

SEQ ID NO: 890756 - DNA, 15 bp, Homo sapiens
cctccttgcttcctt

SEQ ID NO: 890757 - DNA, 15 bp, Homo sapiens
ctccttgcttccttc

SEQ ID NO: 890758 - DNA, 15 bp, Homo sapiens
tccttgcttccttct

SEQ ID NO: 890759 - DNA, 15 bp, Homo sapiens
ccttgcttccttctt

SEQ ID NO: 890760 - DNA, 15 bp, Homo sapiens
cttgcttccttcttt

SEQ ID NO: 890761 - DNA, 15 bp, Homo sapiens
ttgcttccttctttc

SEQ ID NO: 890762 - DNA, 15 bp, Homo sapiens
tgcttccttctttct

SEQ ID NO: 890763 - DNA, 15 bp, Homo sapiens
gcttccttctttctt

SEQ ID NO: 890764 - DNA, 15 bp, Homo sapiens
cttccttctttcttc

SEQ ID NO: 890765 - DNA, 15 bp, Homo sapiens
ttccttctttcttct

SEQ ID NO: 890766 - DNA, 15 bp, Homo sapiens
tccttctttcttctt

SEQ ID NO: 890767 - DNA, 15 bp, Homo sapiens
ccttctttcttcttt

SEQ ID NO: 890768 - DNA, 15 bp, Homo sapiens
cttctttcttctttc

SEQ ID NO: 890769 - DNA, 15 bp, Homo sapiens
ttctttcttctttcc

SEQ ID NO: 890770 - DNA, 15 bp, Homo sapiens
tctttcttctttccc

SEQ ID NO: 890771 - DNA, 15 bp, Homo sapiens
ctttcttctttccct

SEQ ID NO: 890772 - DNA, 15 bp, Homo sapiens
tttcttctttccctt

SEQ ID NO: 890773 - DNA, 15 bp, Homo sapiens
ttcttctttcccttt

SEQ ID NO: 890774 - DNA, 15 bp, Homo sapiens
tcttctttccctttt

SEQ ID NO: 890775 - DNA, 15 bp, Homo sapiens
cttctttcccttttt

SEQ ID NO: 890776 - DNA, 15 bp, Homo sapiens
ttctttccctttttt

SEQ ID NO: 890777 - DNA, 15 bp, Homo sapiens
tctttcccttttttc

SEQ ID NO: 890778 - DNA, 15 bp, Homo sapiens
ctttcccttttttct

SEQ ID NO: 890779 - DNA, 15 bp, Homo sapiens
tttcccttttttctt

SEQ ID NO: 890780 - DNA, 15 bp, Homo sapiens
ttcccttttttcttc

SEQ ID NO: 890781 - DNA, 15 bp, Homo sapiens
tcccttttttcttct

SEQ ID NO: 890782 - DNA, 15 bp, Homo sapiens
cccttttttcttctc

SEQ ID NO: 890783 - DNA, 15 bp, Homo sapiens
ccttttttcttctca

SEQ ID NO: 890784 - DNA, 15 bp, Homo sapiens
cttttttcttctcat

SEQ ID NO: 890785 - DNA, 15 bp, Homo sapiens
ttttttcttctcatc

SEQ ID NO: 890786 - DNA, 15 bp, Homo sapiens
tttttcttctcatct

SEQ ID NO: 890787 - DNA, 15 bp, Homo sapiens
ttttcttctcatctt

SEQ ID NO: 890788 - DNA, 15 bp, Homo sapiens
tttcttctcatcttc

SEQ ID NO: 890789 - DNA, 15 bp, Homo sapiens
ttcttctcatcttcc

SEQ ID NO: 890790 - DNA, 15 bp, Homo sapiens
tcttctcatcttcct

SEQ ID NO: 890791 - DNA, 15 bp, Homo sapiens
cttctcatcttcctt

SEQ ID NO: 890792 - DNA, 15 bp, Homo sapiens
ttctcatcttccttt

SEQ ID NO: 890793 - DNA, 15 bp, Homo sapiens
tctcatcttcctttc

SEQ ID NO: 890794 - DNA, 15 bp, Homo sapiens
ctcatcttcctttct

SEQ ID NO: 890795 - DNA, 15 bp, Homo sapiens
tcatcttcctttctc

SEQ ID NO: 890796 - DNA, 15 bp, Homo sapiens
catcttcctttctct

SEQ ID NO: 890797 - DNA, 15 bp, Homo sapiens
atcttcctttctctt

SEQ ID NO: 890798 - DNA, 15 bp, Homo sapiens
tcttcctttctcttg

SEQ ID NO: 890799 - DNA, 15 bp, Homo sapiens
cttcctttctcttgt

SEQ ID NO: 890800 - DNA, 15 bp, Homo sapiens
ttcctttctcttgta

SEQ ID NO: 890801 - DNA, 15 bp, Homo sapiens
tcctttctcttgtac

SEQ ID NO: 890802 - DNA, 15 bp, Homo sapiens
cctttctcttgtacc

SEQ ID NO: 890803 - DNA, 15 bp, Homo sapiens
ctttctcttgtacca

SEQ ID NO: 890804 - DNA, 15 bp, Homo sapiens
tttctcttgtaccat

SEQ ID NO: 890805 - DNA, 15 bp, Homo sapiens
ttctcttgtaccatt

SEQ ID NO: 890806 - DNA, 15 bp, Homo sapiens
tctcttgtaccattc

SEQ ID NO: 890807 - DNA, 15 bp, Homo sapiens
ctcttgtaccattct

SEQ ID NO: 890808 - DNA, 15 bp, Homo sapiens
tcttgtaccattctg

SEQ ID NO: 890809 - DNA, 15 bp, Homo sapiens
cttgtaccattctga

SEQ ID NO: 890810 - DNA, 15 bp, Homo sapiens
ttgtaccattctgac

SEQ ID NO: 890811 - DNA, 15 bp, Homo sapiens
tgtaccattctgaca

SEQ ID NO: 890812 - DNA, 15 bp, Homo sapiens
gtaccattctgacaa

SEQ ID NO: 890813 - DNA, 15 bp, Homo sapiens
taccattctgacaat

SEQ ID NO: 890814 - DNA, 15 bp, Homo sapiens
accattctgacaata

SEQ ID NO: 890815 - DNA, 15 bp, Homo sapiens
ccattctgacaatac

SEQ ID NO: 890816 - DNA, 15 bp, Homo sapiens
cattctgacaatact

SEQ ID NO: 890817 - DNA, 15 bp, Homo sapiens
attctgacaatactc

SEQ ID NO: 890818 - DNA, 15 bp, Homo sapiens
ttctgacaatactca

SEQ ID NO: 890819 - DNA, 15 bp, Homo sapiens
tctgacaatactcaa

SEQ ID NO: 890820 - DNA, 15 bp, Homo sapiens
ctgacaatactcaaa

SEQ ID NO: 890821 - DNA, 15 bp, Homo sapiens
tgacaatactcaaaa

SEQ ID NO: 890822 - DNA, 15 bp, Homo sapiens
gacaatactcaaaac

SEQ ID NO: 890823 - DNA, 15 bp, Homo sapiens
acaatactcaaaacc

SEQ ID NO: 890824 - DNA, 15 bp, Homo sapiens
caatactcaaaacca

SEQ ID NO: 890825 - DNA, 15 bp, Homo sapiens
aatactcaaaaccaa

SEQ ID NO: 890826 - DNA, 15 bp, Homo sapiens
atactcaaaaccaat

SEQ ID NO: 890827 - DNA, 15 bp, Homo sapiens
tactcaaaaccaata

SEQ ID NO: 890828 - DNA, 15 bp, Homo sapiens
actcaaaaccaatag

SEQ ID NO: 890829 - DNA, 15 bp, Homo sapiens
ctcaaaaccaatagc

SEQ ID NO: 890830 - DNA, 15 bp, Homo sapiens
tcaaaaccaatagcc

SEQ ID NO: 890831 - DNA, 15 bp, Homo sapiens
caaaaccaatagcct

SEQ ID NO: 890832 - DNA, 15 bp, Homo sapiens
aaaaccaatagcctc

SEQ ID NO: 890833 - DNA, 15 bp, Homo sapiens
aaaccaatagcctct

SEQ ID NO: 890834 - DNA, 15 bp, Homo sapiens
aaccaatagcctctc

SEQ ID NO: 890835 - DNA, 15 bp, Homo sapiens
accaatagcctctct

SEQ ID NO: 890836 - DNA, 15 bp, Homo sapiens
ccaatagcctctctt

SEQ ID NO: 890837 - DNA, 15 bp, Homo sapiens
caatagcctctcttt

SEQ ID NO: 890838 - DNA, 15 bp, Homo sapiens
aatagcctctctttt

SEQ ID NO: 890839 - DNA, 15 bp, Homo sapiens
atagcctctcttttt

SEQ ID NO: 890840 - DNA, 15 bp, Homo sapiens
tagcctctctttttt

SEQ ID NO: 890841 - DNA, 15 bp, Homo sapiens
agcctctcttttttt

SEQ ID NO: 890842 - DNA, 15 bp, Homo sapiens
gcctctctttttttc

SEQ ID NO: 890843 - DNA, 15 bp, Homo sapiens
cctctctttttttca

SEQ ID NO: 890844 - DNA, 15 bp, Homo sapiens
ctctctttttttcat

SEQ ID NO: 890845 - DNA, 15 bp, Homo sapiens
tctctttttttcatc

SEQ ID NO: 890846 - DNA, 15 bp, Homo sapiens
ctctttttttcatcc

SEQ ID NO: 890847 - DNA, 15 bp, Homo sapiens
tctttttttcatcct

SEQ ID NO: 890848 - DNA, 15 bp, Homo sapiens
ctttttttcatcctc

SEQ ID NO: 890849 - DNA, 15 bp, Homo sapiens
tttttttcatcctct

SEQ ID NO: 890850 - DNA, 15 bp, Homo sapiens
ttttttcatcctctt

SEQ ID NO: 890851 - DNA, 15 bp, Homo sapiens
tttttcatcctcttc

SEQ ID NO: 890852 - DNA, 15 bp, Homo sapiens
ttttcatcctcttcg

SEQ ID NO: 890853 - DNA, 15 bp, Homo sapiens
tttcatcctcttcga

SEQ ID NO: 890854 - DNA, 15 bp, Homo sapiens
ttcatcctcttcgac

SEQ ID NO: 890855 - DNA, 15 bp, Homo sapiens
tcatcctcttcgaca

SEQ ID NO: 890856 - DNA, 15 bp, Homo sapiens
catcctcttcgacat

SEQ ID NO: 890857 - DNA, 15 bp, Homo sapiens
atcctcttcgacatt

SEQ ID NO: 890858 - DNA, 15 bp, Homo sapiens
tcctcttcgacattt

SEQ ID NO: 890859 - DNA, 15 bp, Homo sapiens
cctcttcgacatttt

SEQ ID NO: 890860 - DNA, 15 bp, Homo sapiens
ctcttcgacattttt

SEQ ID NO: 890861 - DNA, 15 bp, Homo sapiens
tcttcgacatttttg

SEQ ID NO: 890862 - DNA, 15 bp, Homo sapiens
cttcgacatttttgt

SEQ ID NO: 890863 - DNA, 15 bp, Homo sapiens
ttcgacatttttgta

SEQ ID NO: 890864 - DNA, 15 bp, Homo sapiens
tcgacatttttgtag

SEQ ID NO: 890865 - DNA, 15 bp, Homo sapiens
cgacatttttgtagc

SEQ ID NO: 890866 - DNA, 15 bp, Homo sapiens
gacatttttgtagca

SEQ ID NO: 890867 - DNA, 15 bp, Homo sapiens
acatttttgtagcat

SEQ ID NO: 890868 - DNA, 15 bp, Homo sapiens
catttttgtagcatt

SEQ ID NO: 890869 - DNA, 15 bp, Homo sapiens
atttttgtagcattt

SEQ ID NO: 890870 - DNA, 15 bp, Homo sapiens
tttttgtagcatttg

SEQ ID NO: 890871 - DNA, 15 bp, Homo sapiens
ttttgtagcatttga

SEQ ID NO: 890872 - DNA, 15 bp, Homo sapiens
tttgtagcatttgat

SEQ ID NO: 890873 - DNA, 15 bp, Homo sapiens
ttgtagcatttgata

SEQ ID NO: 890874 - DNA, 15 bp, Homo sapiens
tgtagcatttgatac

SEQ ID NO: 890875 - DNA, 15 bp, Homo sapiens
gtagcatttgataca

SEQ ID NO: 890876 - DNA, 15 bp, Homo sapiens
tagcatttgatacaa

SEQ ID NO: 890877 - DNA, 15 bp, Homo sapiens
agcatttgatacaaa

SEQ ID NO: 890878 - DNA, 15 bp, Homo sapiens
gcatttgatacaaat

SEQ ID NO: 890879 - DNA, 15 bp, Homo sapiens
catttgatacaaata

SEQ ID NO: 890880 - DNA, 15 bp, Homo sapiens
atttgatacaaatat

SEQ ID NO: 890881 - DNA, 15 bp, Homo sapiens
tttgatacaaatatc

SEQ ID NO: 890882 - DNA, 15 bp, Homo sapiens
ttgatacaaatatcc

SEQ ID NO: 890883 - DNA, 15 bp, Homo sapiens
tgatacaaatatccc

SEQ ID NO: 890884 - DNA, 15 bp, Homo sapiens
gatacaaatatcccc

SEQ ID NO: 890885 - DNA, 15 bp, Homo sapiens
atacaaatatccccc

SEQ ID NO: 890886 - DNA, 15 bp, Homo sapiens
tacaaatatccccca

SEQ ID NO: 890887 - DNA, 15 bp, Homo sapiens
acaaatatcccccag

SEQ ID NO: 890888 - DNA, 15 bp, Homo sapiens
caaatatcccccagg

SEQ ID NO: 890889 - DNA, 15 bp, Homo sapiens
aaatatcccccagga

SEQ ID NO: 890890 - DNA, 15 bp, Homo sapiens
aatatcccccaggaa

SEQ ID NO: 890891 - DNA, 15 bp, Homo sapiens
atatcccccaggaat

SEQ ID NO: 890892 - DNA, 15 bp, Homo sapiens
tatcccccaggaatt

SEQ ID NO: 890893 - DNA, 15 bp, Homo sapiens
atcccccaggaattc

SEQ ID NO: 890894 - DNA, 15 bp, Homo sapiens
tcccccaggaattct

SEQ ID NO: 890895 - DNA, 15 bp, Homo sapiens
cccccaggaattctc

SEQ ID NO: 890896 - DNA, 15 bp, Homo sapiens
ccccaggaattctct

SEQ ID NO: 890897 - DNA, 15 bp, Homo sapiens
cccaggaattctctc

SEQ ID NO: 890898 - DNA, 15 bp, Homo sapiens
ccaggaattctctct

SEQ ID NO: 890899 - DNA, 15 bp, Homo sapiens
caggaattctctctt

SEQ ID NO: 890900 - DNA, 15 bp, Homo sapiens
aggaattctctcttt

SEQ ID NO: 890901 - DNA, 15 bp, Homo sapiens
ggaattctctctttc

SEQ ID NO: 890902 - DNA, 15 bp, Homo sapiens
gaattctctctttcc

SEQ ID NO: 890903 - DNA, 15 bp, Homo sapiens
aattctctctttcct

SEQ ID NO: 890904 - DNA, 15 bp, Homo sapiens
attctctctttcctt

SEQ ID NO: 890905 - DNA, 15 bp, Homo sapiens
ttctctctttcctta

SEQ ID NO: 890906 - DNA, 15 bp, Homo sapiens
tctctctttccttag

SEQ ID NO: 890907 - DNA, 15 bp, Homo sapiens
ctctctttccttagc

SEQ ID NO: 890908 - DNA, 15 bp, Homo sapiens
tctctttccttagca

SEQ ID NO: 890909 - DNA, 15 bp, Homo sapiens
ctctttccttagcat

SEQ ID NO: 890910 - DNA, 15 bp, Homo sapiens
tctttccttagcatg

SEQ ID NO: 890911 - DNA, 15 bp, Homo sapiens
ctttccttagcatgt

SEQ ID NO: 890912 - DNA, 15 bp, Homo sapiens
tttccttagcatgtt

SEQ ID NO: 890913 - DNA, 15 bp, Homo sapiens
ttccttagcatgtta

SEQ ID NO: 890914 - DNA, 15 bp, Homo sapiens
tccttagcatgttat

SEQ ID NO: 890915 - DNA, 15 bp, Homo sapiens
ccttagcatgttatg

SEQ ID NO: 890916 - DNA, 15 bp, Homo sapiens
cttagcatgttatga

SEQ ID NO: 890917 - DNA, 15 bp, Homo sapiens
ttagcatgttatgaa

SEQ ID NO: 890918 - DNA, 15 bp, Homo sapiens
tagcatgttatgaat

SEQ ID NO: 890919 - DNA, 15 bp, Homo sapiens
agcatgttatgaatt

SEQ ID NO: 890920 - DNA, 15 bp, Homo sapiens
gcatgttatgaatta

SEQ ID NO: 890921 - DNA, 15 bp, Homo sapiens
catgttatgaattat

SEQ ID NO: 890922 - DNA, 15 bp, Homo sapiens
atgttatgaattatg

SEQ ID NO: 890923 - DNA, 15 bp, Homo sapiens
tgttatgaattatgt

SEQ ID NO: 890924 - DNA, 15 bp, Homo sapiens
gttatgaattatgtg

SEQ ID NO: 890925 - DNA, 15 bp, Homo sapiens
ttatgaattatgtgg

SEQ ID NO: 890926 - DNA, 15 bp, Homo sapiens
tatgaattatgtggc

SEQ ID NO: 890927 - DNA, 15 bp, Homo sapiens
atgaattatgtggcc

SEQ ID NO: 890928 - DNA, 15 bp, Homo sapiens
tgaattatgtggccc

SEQ ID NO: 890929 - DNA, 15 bp, Homo sapiens
gaattatgtggccct

SEQ ID NO: 890930 - DNA, 15 bp, Homo sapiens
aattatgtggccctt

SEQ ID NO: 890931 - DNA, 15 bp, Homo sapiens
attatgtggccctta

SEQ ID NO: 890932 - DNA, 15 bp, Homo sapiens
ttatgtggcccttac

SEQ ID NO: 890933 - DNA, 15 bp, Homo sapiens
tatgtggcccttact

SEQ ID NO: 890934 - DNA, 15 bp, Homo sapiens
atgtggcccttactt

SEQ ID NO: 890935 - DNA, 15 bp, Homo sapiens
tgtggcccttacttt

SEQ ID NO: 890936 - DNA, 15 bp, Homo sapiens
gtggcccttactttt

SEQ ID NO: 890937 - DNA, 15 bp, Homo sapiens
tggcccttacttttt

SEQ ID NO: 890938 - DNA, 15 bp, Homo sapiens
ggcccttacttttta

SEQ ID NO: 890939 - DNA, 15 bp, Homo sapiens
gcccttactttttaa

SEQ ID NO: 890940 - DNA, 15 bp, Homo sapiens
cccttactttttaaa

SEQ ID NO: 890941 - DNA, 15 bp, Homo sapiens
ccttactttttaaaa

SEQ ID NO: 890942 - DNA, 15 bp, Homo sapiens
cttactttttaaaaa

SEQ ID NO: 890943 - DNA, 15 bp, Homo sapiens
ttactttttaaaaac

SEQ ID NO: 890944 - DNA, 15 bp, Homo sapiens
tactttttaaaaacc

SEQ ID NO: 890945 - DNA, 15 bp, Homo sapiens
actttttaaaaacct

SEQ ID NO: 890946 - DNA, 15 bp, Homo sapiens
ctttttaaaaacctt

SEQ ID NO: 890947 - DNA, 15 bp, Homo sapiens
tttttaaaaaccttg

SEQ ID NO: 890948 - DNA, 15 bp, Homo sapiens
ttttaaaaaccttga

SEQ ID NO: 890949 - DNA, 15 bp, Homo sapiens
tttaaaaaccttgac

SEQ ID NO: 890950 - DNA, 15 bp, Homo sapiens
ttaaaaaccttgact

SEQ ID NO: 890951 - DNA, 15 bp, Homo sapiens
taaaaaccttgactg

SEQ ID NO: 890952 - DNA, 15 bp, Homo sapiens
aaaaaccttgactgt

SEQ ID NO: 890953 - DNA, 15 bp, Homo sapiens
aaaaccttgactgtt

SEQ ID NO: 890954 - DNA, 15 bp, Homo sapiens
aaaccttgactgttg

SEQ ID NO: 890955 - DNA, 15 bp, Homo sapiens
aaccttgactgttgg

SEQ ID NO: 890956 - DNA, 15 bp, Homo sapiens
accttgactgttggg

SEQ ID NO: 890957 - DNA, 15 bp, Homo sapiens
ccttgactgttggga

SEQ ID NO: 890958 - DNA, 15 bp, Homo sapiens
cttgactgttgggat

SEQ ID NO: 890959 - DNA, 15 bp, Homo sapiens
ttgactgttgggatt

SEQ ID NO: 890960 - DNA, 15 bp, Homo sapiens
tgactgttgggattt

SEQ ID NO: 890961 - DNA, 15 bp, Homo sapiens
gactgttgggatttt

SEQ ID NO: 890962 - DNA, 15 bp, Homo sapiens
actgttgggattttc

SEQ ID NO: 890963 - DNA, 15 bp, Homo sapiens
ctgttgggattttct

SEQ ID NO: 890964 - DNA, 15 bp, Homo sapiens
tgttgggattttctt

SEQ ID NO: 890965 - DNA, 15 bp, Homo sapiens
gttgggattttcttc

SEQ ID NO: 890966 - DNA, 15 bp, Homo sapiens
ttgggattttcttcc

SEQ ID NO: 890967 - DNA, 15 bp, Homo sapiens
tgggattttcttcct

SEQ ID NO: 890968 - DNA, 15 bp, Homo sapiens
gggattttcttcctt

SEQ ID NO: 890969 - DNA, 15 bp, Homo sapiens
ggattttcttccttc

SEQ ID NO: 890970 - DNA, 15 bp, Homo sapiens
gattttcttccttct

SEQ ID NO: 890971 - DNA, 15 bp, Homo sapiens
attttcttccttctc

SEQ ID NO: 890972 - DNA, 15 bp, Homo sapiens
ttttcttccttctct

SEQ ID NO: 890973 - DNA, 15 bp, Homo sapiens
tttcttccttctctt

SEQ ID NO: 890974 - DNA, 15 bp, Homo sapiens
ttcttccttctctta

SEQ ID NO: 890975 - DNA, 15 bp, Homo sapiens
tcttccttctcttac

SEQ ID NO: 890976 - DNA, 15 bp, Homo sapiens
cttccttctcttact

SEQ ID NO: 890977 - DNA, 15 bp, Homo sapiens
ttccttctcttacta

SEQ ID NO: 890978 - DNA, 15 bp, Homo sapiens
tccttctcttactac

SEQ ID NO: 890979 - DNA, 15 bp, Homo sapiens
ccttctcttactact

SEQ ID NO: 890980 - DNA, 15 bp, Homo sapiens
cttctcttactactc

SEQ ID NO: 890981 - DNA, 15 bp, Homo sapiens
ttctcttactactcc

SEQ ID NO: 890982 - DNA, 15 bp, Homo sapiens
tctcttactactcct

SEQ ID NO: 890983 - DNA, 15 bp, Homo sapiens
ctcttactactcctt

SEQ ID NO: 890984 - DNA, 15 bp, Homo sapiens
tcttactactccttc

SEQ ID NO: 890985 - DNA, 15 bp, Homo sapiens
cttactactccttct

SEQ ID NO: 890986 - DNA, 15 bp, Homo sapiens
ttactactccttctc

SEQ ID NO: 890987 - DNA, 15 bp, Homo sapiens
tactactccttctca

SEQ ID NO: 890988 - DNA, 15 bp, Homo sapiens
actactccttctcaa

SEQ ID NO: 890989 - DNA, 15 bp, Homo sapiens
ctactccttctcaaa

SEQ ID NO: 890990 - DNA, 15 bp, Homo sapiens
tactccttctcaaac

SEQ ID NO: 890991 - DNA, 15 bp, Homo sapiens
actccttctcaaaca

SEQ ID NO: 890992 - DNA, 15 bp, Homo sapiens
ctccttctcaaacag

SEQ ID NO: 890993 - DNA, 15 bp, Homo sapiens
tccttctcaaacagc

SEQ ID NO: 890994 - DNA, 15 bp, Homo sapiens
ccttctcaaacagca

SEQ ID NO: 890995 - DNA, 15 bp, Homo sapiens
cttctcaaacagcac

SEQ ID NO: 890996 - DNA, 15 bp, Homo sapiens
ttctcaaacagcaca

SEQ ID NO: 890997 - DNA, 15 bp, Homo sapiens
tctcaaacagcacag

SEQ ID NO: 890998 - DNA, 15 bp, Homo sapiens
ctcaaacagcacaga

SEQ ID NO: 890999 - DNA, 15 bp, Homo sapiens
tcaaacagcacagag

SEQ ID NO: 891000 - DNA, 15 bp, Homo sapiens
caaacagcacagagt

SEQ ID NO: 891001 - DNA, 15 bp, Homo sapiens
aaacagcacagagtc

SEQ ID NO: 891002 - DNA, 15 bp, Homo sapiens
aacagcacagagtca

SEQ ID NO: 891003 - DNA, 15 bp, Homo sapiens
acagcacagagtcag

SEQ ID NO: 891004 - DNA, 15 bp, Homo sapiens
cagcacagagtcagc

SEQ ID NO: 891005 - DNA, 15 bp, Homo sapiens
agcacagagtcagcg

SEQ ID NO: 891006 - DNA, 15 bp, Homo sapiens
gcacagagtcagcgt

SEQ ID NO: 891007 - DNA, 15 bp, Homo sapiens
cacagagtcagcgtt

SEQ ID NO: 891008 - DNA, 15 bp, Homo sapiens
acagagtcagcgttg

SEQ ID NO: 891009 - DNA, 15 bp, Homo sapiens
cagagtcagcgttgc

SEQ ID NO: 891010 - DNA, 15 bp, Homo sapiens
agagtcagcgttgcc

SEQ ID NO: 891011 - DNA, 15 bp, Homo sapiens
gagtcagcgttgcca

SEQ ID NO: 891012 - DNA, 15 bp, Homo sapiens
agtcagcgttgccaa

SEQ ID NO: 891013 - DNA, 15 bp, Homo sapiens
gtcagcgttgccaac

SEQ ID NO: 891014 - DNA, 15 bp, Homo sapiens
tcagcgttgccaact

SEQ ID NO: 891015 - DNA, 15 bp, Homo sapiens
cagcgttgccaactt

SEQ ID NO: 891016 - DNA, 15 bp, Homo sapiens
agcgttgccaacttc

SEQ ID NO: 891017 - DNA, 15 bp, Homo sapiens
gcgttgccaacttcc

SEQ ID NO: 891018 - DNA, 15 bp, Homo sapiens
cgttgccaacttcct

SEQ ID NO: 891019 - DNA, 15 bp, Homo sapiens
gttgccaacttcctc

SEQ ID NO: 891020 - DNA, 15 bp, Homo sapiens
ttgccaacttcctct

SEQ ID NO: 891021 - DNA, 15 bp, Homo sapiens
tgccaacttcctctc

SEQ ID NO: 891022 - DNA, 15 bp, Homo sapiens
gccaacttcctctct

SEQ ID NO: 891023 - DNA, 15 bp, Homo sapiens
ccaacttcctctctc

SEQ ID NO: 891024 - DNA, 15 bp, Homo sapiens
caacttcctctctca

SEQ ID NO: 891025 - DNA, 15 bp, Homo sapiens
aacttcctctctcat

SEQ ID NO: 891026 - DNA, 15 bp, Homo sapiens
acttcctctctcatt

SEQ ID NO: 891027 - DNA, 15 bp, Homo sapiens
cttcctctctcattc

SEQ ID NO: 891028 - DNA, 15 bp, Homo sapiens
ttcctctctcattca

SEQ ID NO: 891029 - DNA, 15 bp, Homo sapiens
tcctctctcattcac

SEQ ID NO: 891030 - DNA, 15 bp, Homo sapiens
cctctctcattcaca

SEQ ID NO: 891031 - DNA, 15 bp, Homo sapiens
ctctctcattcacat

SEQ ID NO: 891032 - DNA, 15 bp, Homo sapiens
tctctcattcacatc

SEQ ID NO: 891033 - DNA, 15 bp, Homo sapiens
ctctcattcacatct

SEQ ID NO: 891034 - DNA, 15 bp, Homo sapiens
tctcattcacatcta

SEQ ID NO: 891035 - DNA, 15 bp, Homo sapiens
ctcattcacatctat

SEQ ID NO: 891036 - DNA, 15 bp, Homo sapiens
tcattcacatctatc

SEQ ID NO: 891037 - DNA, 15 bp, Homo sapiens
cattcacatctatct

SEQ ID NO: 891038 - DNA, 15 bp, Homo sapiens
attcacatctatctc

SEQ ID NO: 891039 - DNA, 15 bp, Homo sapiens
ttcacatctatctcc

SEQ ID NO: 891040 - DNA, 15 bp, Homo sapiens
tcacatctatctcct

SEQ ID NO: 891041 - DNA, 15 bp, Homo sapiens
cacatctatctccta

SEQ ID NO: 891042 - DNA, 15 bp, Homo sapiens
acatctatctcctaa

SEQ ID NO: 891043 - DNA, 15 bp, Homo sapiens
catctatctcctaat

SEQ ID NO: 891044 - DNA, 15 bp, Homo sapiens
atctatctcctaatt

SEQ ID NO: 891045 - DNA, 15 bp, Homo sapiens
tctatctcctaattc

SEQ ID NO: 891046 - DNA, 15 bp, Homo sapiens
ctatctcctaattca

SEQ ID NO: 891047 - DNA, 15 bp, Homo sapiens
tatctcctaattcag

SEQ ID NO: 891048 - DNA, 15 bp, Homo sapiens
atctcctaattcagt

SEQ ID NO: 891049 - DNA, 15 bp, Homo sapiens
tctcctaattcagtt

SEQ ID NO: 891050 - DNA, 15 bp, Homo sapiens
ctcctaattcagttg

SEQ ID NO: 891051 - DNA, 15 bp, Homo sapiens
tcctaattcagttga

SEQ ID NO: 891052 - DNA, 15 bp, Homo sapiens
cctaattcagttgat

SEQ ID NO: 891053 - DNA, 15 bp, Homo sapiens
ctaattcagttgatc

SEQ ID NO: 891054 - DNA, 15 bp, Homo sapiens
taattcagttgatca

SEQ ID NO: 891055 - DNA, 15 bp, Homo sapiens
aattcagttgatcat

SEQ ID NO: 891056 - DNA, 15 bp, Homo sapiens
attcagttgatcatt

SEQ ID NO: 891057 - DNA, 15 bp, Homo sapiens
ttcagttgatcattt

SEQ ID NO: 891058 - DNA, 15 bp, Homo sapiens
tcagttgatcattta

SEQ ID NO: 891059 - DNA, 15 bp, Homo sapiens
cagttgatcatttat

SEQ ID NO: 891060 - DNA, 15 bp, Homo sapiens
agttgatcatttatg

SEQ ID NO: 891061 - DNA, 15 bp, Homo sapiens
gttgatcatttatgc

SEQ ID NO: 891062 - DNA, 15 bp, Homo sapiens
ttgatcatttatgct

SEQ ID NO: 891063 - DNA, 15 bp, Homo sapiens
tgatcatttatgcta

SEQ ID NO: 891064 - DNA, 15 bp, Homo sapiens
gatcatttatgctac

SEQ ID NO: 891065 - DNA, 15 bp, Homo sapiens
atcatttatgctacc

SEQ ID NO: 891066 - DNA, 15 bp, Homo sapiens
tcatttatgctaccg

SEQ ID NO: 891067 - DNA, 15 bp, Homo sapiens
catttatgctaccga

SEQ ID NO: 891068 - DNA, 15 bp, Homo sapiens
atttatgctaccgat

SEQ ID NO: 891069 - DNA, 15 bp, Homo sapiens
tttatgctaccgata

SEQ ID NO: 891070 - DNA, 15 bp, Homo sapiens
ttatgctaccgatat

SEQ ID NO: 891071 - DNA, 15 bp, Homo sapiens
tatgctaccgatatt

SEQ ID NO: 891072 - DNA, 15 bp, Homo sapiens
atgctaccgatattg

SEQ ID NO: 891073 - DNA, 15 bp, Homo sapiens
tgctaccgatattga

SEQ ID NO: 891074 - DNA, 15 bp, Homo sapiens
gctaccgatattgat

SEQ ID NO: 891075 - DNA, 15 bp, Homo sapiens
ctaccgatattgatt

SEQ ID NO: 891076 - DNA, 15 bp, Homo sapiens
taccgatattgattg

SEQ ID NO: 891077 - DNA, 15 bp, Homo sapiens
accgatattgattga

SEQ ID NO: 891078 - DNA, 15 bp, Homo sapiens
ccgatattgattgag

SEQ ID NO: 891079 - DNA, 15 bp, Homo sapiens
cgatattgattgagt

SEQ ID NO: 891080 - DNA, 15 bp, Homo sapiens
gatattgattgagtg

SEQ ID NO: 891081 - DNA, 15 bp, Homo sapiens
atattgattgagtgc

SEQ ID NO: 891082 - DNA, 15 bp, Homo sapiens
tattgattgagtgcc

SEQ ID NO: 891083 - DNA, 15 bp, Homo sapiens
attgattgagtgccc

SEQ ID NO: 891084 - DNA, 15 bp, Homo sapiens
ttgattgagtgccca

SEQ ID NO: 891085 - DNA, 15 bp, Homo sapiens
tgattgagtgcccac

SEQ ID NO: 891086 - DNA, 15 bp, Homo sapiens
gattgagtgcccact

SEQ ID NO: 891087 - DNA, 15 bp, Homo sapiens
attgagtgcccactc

SEQ ID NO: 891088 - DNA, 15 bp, Homo sapiens
ttgagtgcccactcg

SEQ ID NO: 891089 - DNA, 15 bp, Homo sapiens
tgagtgcccactcgg

SEQ ID NO: 891090 - DNA, 15 bp, Homo sapiens
gagtgcccactcggt

SEQ ID NO: 891091 - DNA, 15 bp, Homo sapiens
agtgcccactcggtg

SEQ ID NO: 891092 - DNA, 15 bp, Homo sapiens
gtgcccactcggtgt

SEQ ID NO: 891093 - DNA, 15 bp, Homo sapiens
tgcccactcggtgtc

SEQ ID NO: 891094 - DNA, 15 bp, Homo sapiens
gcccactcggtgtca

SEQ ID NO: 891095 - DNA, 15 bp, Homo sapiens
cccactcggtgtcag

SEQ ID NO: 891096 - DNA, 15 bp, Homo sapiens
ccactcggtgtcagc

SEQ ID NO: 891097 - DNA, 15 bp, Homo sapiens
cactcggtgtcagcc

SEQ ID NO: 891098 - DNA, 15 bp, Homo sapiens
actcggtgtcagcca

SEQ ID NO: 891099 - DNA, 15 bp, Homo sapiens
ctcggtgtcagccac

SEQ ID NO: 891100 - DNA, 15 bp, Homo sapiens
tcggtgtcagccaca

SEQ ID NO: 891101 - DNA, 15 bp, Homo sapiens
cggtgtcagccacat

SEQ ID NO: 891102 - DNA, 15 bp, Homo sapiens
ggtgtcagccacatg

SEQ ID NO: 891103 - DNA, 15 bp, Homo sapiens
gtgtcagccacatga

SEQ ID NO: 891104 - DNA, 15 bp, Homo sapiens
tgtcagccacatgat

SEQ ID NO: 891105 - DNA, 15 bp, Homo sapiens
gtcagccacatgata

SEQ ID NO: 891106 - DNA, 15 bp, Homo sapiens
tcagccacatgatag

SEQ ID NO: 891107 - DNA, 15 bp, Homo sapiens
cagccacatgatagg

SEQ ID NO: 891108 - DNA, 15 bp, Homo sapiens
agccacatgatagga

SEQ ID NO: 891109 - DNA, 15 bp, Homo sapiens
gccacatgataggat

SEQ ID NO: 891110 - DNA, 15 bp, Homo sapiens
ccacatgataggatg

SEQ ID NO: 891111 - DNA, 15 bp, Homo sapiens
cacatgataggatgc

SEQ ID NO: 891112 - DNA, 15 bp, Homo sapiens
acatgataggatgca

SEQ ID NO: 891113 - DNA, 15 bp, Homo sapiens
catgataggatgcaa

SEQ ID NO: 891114 - DNA, 15 bp, Homo sapiens
atgataggatgcaat

SEQ ID NO: 891115 - DNA, 15 bp, Homo sapiens
tgataggatgcaata

SEQ ID NO: 891116 - DNA, 15 bp, Homo sapiens
gataggatgcaatag

SEQ ID NO: 891117 - DNA, 15 bp, Homo sapiens
ataggatgcaatagt

SEQ ID NO: 891118 - DNA, 15 bp, Homo sapiens
taggatgcaatagtg

SEQ ID NO: 891119 - DNA, 15 bp, Homo sapiens
aggatgcaatagtga

SEQ ID NO: 891120 - DNA, 15 bp, Homo sapiens
ggatgcaatagtgaa

SEQ ID NO: 891121 - DNA, 15 bp, Homo sapiens
gatgcaatagtgaaa

SEQ ID NO: 891122 - DNA, 15 bp, Homo sapiens
atgcaatagtgaaaa

SEQ ID NO: 891123 - DNA, 15 bp, Homo sapiens
tgcaatagtgaaaaa

SEQ ID NO: 891124 - DNA, 15 bp, Homo sapiens
gcaatagtgaaaaag

SEQ ID NO: 891125 - DNA, 15 bp, Homo sapiens
caatagtgaaaaaga

SEQ ID NO: 891126 - DNA, 15 bp, Homo sapiens
aatagtgaaaaagac

SEQ ID NO: 891127 - DNA, 15 bp, Homo sapiens
atagtgaaaaagaca

SEQ ID NO: 891128 - DNA, 15 bp, Homo sapiens
tagtgaaaaagacag

SEQ ID NO: 891129 - DNA, 15 bp, Homo sapiens
agtgaaaaagacaga

SEQ ID NO: 891130 - DNA, 15 bp, Homo sapiens
gtgaaaaagacagac

SEQ ID NO: 891131 - DNA, 15 bp, Homo sapiens
tgaaaaagacagaca

SEQ ID NO: 891132 - DNA, 15 bp, Homo sapiens
gaaaaagacagacat

SEQ ID NO: 891133 - DNA, 15 bp, Homo sapiens
aaaaagacagacatg

SEQ ID NO: 891134 - DNA, 15 bp, Homo sapiens
aaaagacagacatgg

SEQ ID NO: 891135 - DNA, 15 bp, Homo sapiens
aaagacagacatggt

SEQ ID NO: 891136 - DNA, 15 bp, Homo sapiens
aagacagacatggtg

SEQ ID NO: 891137 - DNA, 15 bp, Homo sapiens
agacagacatggtgc

SEQ ID NO: 891138 - DNA, 15 bp, Homo sapiens
gacagacatggtgcc

SEQ ID NO: 891139 - DNA, 15 bp, Homo sapiens
acagacatggtgcct

SEQ ID NO: 891140 - DNA, 15 bp, Homo sapiens
cagacatggtgccta

SEQ ID NO: 891141 - DNA, 15 bp, Homo sapiens
agacatggtgcctag

SEQ ID NO: 891142 - DNA, 15 bp, Homo sapiens
gacatggtgcctaga

SEQ ID NO: 891143 - DNA, 15 bp, Homo sapiens
acatggtgcctagac

SEQ ID NO: 891144 - DNA, 15 bp, Homo sapiens
catggtgcctagacc

SEQ ID NO: 891145 - DNA, 15 bp, Homo sapiens
atggtgcctagaccc

SEQ ID NO: 891146 - DNA, 15 bp, Homo sapiens
tggtgcctagaccca

SEQ ID NO: 891147 - DNA, 15 bp, Homo sapiens
ggtgcctagacccat

SEQ ID NO: 891148 - DNA, 15 bp, Homo sapiens
gtgcctagacccatg

SEQ ID NO: 891149 - DNA, 15 bp, Homo sapiens
tgcctagacccatgc

SEQ ID NO: 891150 - DNA, 15 bp, Homo sapiens
gcctagacccatgca

SEQ ID NO: 891151 - DNA, 15 bp, Homo sapiens
cctagacccatgcat

SEQ ID NO: 891152 - DNA, 15 bp, Homo sapiens
ctagacccatgcatt

SEQ ID NO: 891153 - DNA, 15 bp, Homo sapiens
tagacccatgcattt

SEQ ID NO: 891154 - DNA, 15 bp, Homo sapiens
agacccatgcatttt

SEQ ID NO: 891155 - DNA, 15 bp, Homo sapiens
gacccatgcattttg

SEQ ID NO: 891156 - DNA, 15 bp, Homo sapiens
acccatgcattttgt

SEQ ID NO: 891157 - DNA, 15 bp, Homo sapiens
cccatgcattttgta

SEQ ID NO: 891158 - DNA, 15 bp, Homo sapiens
ccatgcattttgtaa

SEQ ID NO: 891159 - DNA, 15 bp, Homo sapiens
catgcattttgtaat

SEQ ID NO: 891160 - DNA, 15 bp, Homo sapiens
atgcattttgtaatc

SEQ ID NO: 891161 - DNA, 15 bp, Homo sapiens
tgcattttgtaatct

SEQ ID NO: 891162 - DNA, 15 bp, Homo sapiens
gcattttgtaatcta

SEQ ID NO: 891163 - DNA, 15 bp, Homo sapiens
cattttgtaatctag

SEQ ID NO: 891164 - DNA, 15 bp, Homo sapiens
attttgtaatctagt

SEQ ID NO: 891165 - DNA, 15 bp, Homo sapiens
ttttgtaatctagta

SEQ ID NO: 891166 - DNA, 15 bp, Homo sapiens
tttgtaatctagtag

SEQ ID NO: 891167 - DNA, 15 bp, Homo sapiens
ttgtaatctagtagg

SEQ ID NO: 891168 - DNA, 15 bp, Homo sapiens
tgtaatctagtaggt

SEQ ID NO: 891169 - DNA, 15 bp, Homo sapiens
gtaatctagtaggtt

SEQ ID NO: 891170 - DNA, 15 bp, Homo sapiens
taatctagtaggttg

SEQ ID NO: 891171 - DNA, 15 bp, Homo sapiens
aatctagtaggttgt

SEQ ID NO: 891172 - DNA, 15 bp, Homo sapiens
atctagtaggttgtg

SEQ ID NO: 891173 - DNA, 15 bp, Homo sapiens
tctagtaggttgtgg

SEQ ID NO: 891174 - DNA, 15 bp, Homo sapiens
ctagtaggttgtggc

SEQ ID NO: 891175 - DNA, 15 bp, Homo sapiens
tagtaggttgtggct

SEQ ID NO: 891176 - DNA, 15 bp, Homo sapiens
agtaggttgtggcta

SEQ ID NO: 891177 - DNA, 15 bp, Homo sapiens
gtaggttgtggctac

SEQ ID NO: 891178 - DNA, 15 bp, Homo sapiens
taggttgtggctaca

SEQ ID NO: 891179 - DNA, 15 bp, Homo sapiens
aggttgtggctacat

SEQ ID NO: 891180 - DNA, 15 bp, Homo sapiens
ggttgtggctacatg

SEQ ID NO: 891181 - DNA, 15 bp, Homo sapiens
gttgtggctacatgg

SEQ ID NO: 891182 - DNA, 15 bp, Homo sapiens
ttgtggctacatggc

SEQ ID NO: 891183 - DNA, 15 bp, Homo sapiens
tgtggctacatggca

SEQ ID NO: 891184 - DNA, 15 bp, Homo sapiens
gtggctacatggcat

SEQ ID NO: 891185 - DNA, 15 bp, Homo sapiens
tggctacatggcata

SEQ ID NO: 891186 - DNA, 15 bp, Homo sapiens
ggctacatggcataa

SEQ ID NO: 891187 - DNA, 15 bp, Homo sapiens
gctacatggcataat

SEQ ID NO: 891188 - DNA, 15 bp, Homo sapiens
ctacatggcataata

SEQ ID NO: 891189 - DNA, 15 bp, Homo sapiens
tacatggcataatac

SEQ ID NO: 891190 - DNA, 15 bp, Homo sapiens
acatggcataataca

SEQ ID NO: 891191 - DNA, 15 bp, Homo sapiens
catggcataatacat

SEQ ID NO: 891192 - DNA, 15 bp, Homo sapiens
atggcataatacatg

SEQ ID NO: 891193 - DNA, 15 bp, Homo sapiens
tggcataatacatgg

SEQ ID NO: 891194 - DNA, 15 bp, Homo sapiens
ggcataatacatggc

SEQ ID NO: 891195 - DNA, 15 bp, Homo sapiens
gcataatacatggca

SEQ ID NO: 891196 - DNA, 15 bp, Homo sapiens
cataatacatggcaa

SEQ ID NO: 891197 - DNA, 15 bp, Homo sapiens
ataatacatggcaat

SEQ ID NO: 891198 - DNA, 15 bp, Homo sapiens
taatacatggcaatg

SEQ ID NO: 891199 - DNA, 15 bp, Homo sapiens
aatacatggcaatga

SEQ ID NO: 891200 - DNA, 15 bp, Homo sapiens
atacatggcaatgat

SEQ ID NO: 891201 - DNA, 15 bp, Homo sapiens
tacatggcaatgata

SEQ ID NO: 891202 - DNA, 15 bp, Homo sapiens
acatggcaatgatag

SEQ ID NO: 891203 - DNA, 15 bp, Homo sapiens
catggcaatgataga

SEQ ID NO: 891204 - DNA, 15 bp, Homo sapiens
atggcaatgatagag

SEQ ID NO: 891205 - DNA, 15 bp, Homo sapiens
tggcaatgatagaga

SEQ ID NO: 891206 - DNA, 15 bp, Homo sapiens
ggcaatgatagagaa

SEQ ID NO: 891207 - DNA, 15 bp, Homo sapiens
gcaatgatagagaag

SEQ ID NO: 891208 - DNA, 15 bp, Homo sapiens
caatgatagagaaga

SEQ ID NO: 891209 - DNA, 15 bp, Homo sapiens
aatgatagagaagat

SEQ ID NO: 891210 - DNA, 15 bp, Homo sapiens
atgatagagaagatg

SEQ ID NO: 891211 - DNA, 15 bp, Homo sapiens
tgatagagaagatgg

SEQ ID NO: 891212 - DNA, 15 bp, Homo sapiens
gatagagaagatggc

SEQ ID NO: 891213 - DNA, 15 bp, Homo sapiens
atagagaagatggca

SEQ ID NO: 891214 - DNA, 15 bp, Homo sapiens
tagagaagatggcat

SEQ ID NO: 891215 - DNA, 15 bp, Homo sapiens
agagaagatggcatg

SEQ ID NO: 891216 - DNA, 15 bp, Homo sapiens
gagaagatggcatgc

SEQ ID NO: 891217 - DNA, 15 bp, Homo sapiens
agaagatggcatgcc

SEQ ID NO: 891218 - DNA, 15 bp, Homo sapiens
gaagatggcatgcct

SEQ ID NO: 891219 - DNA, 15 bp, Homo sapiens
aagatggcatgcctc

SEQ ID NO: 891220 - DNA, 15 bp, Homo sapiens
agatggcatgcctca

SEQ ID NO: 891221 - DNA, 15 bp, Homo sapiens
gatggcatgcctcag

SEQ ID NO: 891222 - DNA, 15 bp, Homo sapiens
atggcatgcctcagt

SEQ ID NO: 891223 - DNA, 15 bp, Homo sapiens
tggcatgcctcagta

SEQ ID NO: 891224 - DNA, 15 bp, Homo sapiens
ggcatgcctcagtag

SEQ ID NO: 891225 - DNA, 15 bp, Homo sapiens
gcatgcctcagtagt

SEQ ID NO: 891226 - DNA, 15 bp, Homo sapiens
catgcctcagtagtc

SEQ ID NO: 891227 - DNA, 15 bp, Homo sapiens
atgcctcagtagtct

SEQ ID NO: 891228 - DNA, 15 bp, Homo sapiens
tgcctcagtagtctt

SEQ ID NO: 891229 - DNA, 15 bp, Homo sapiens
gcctcagtagtctta

SEQ ID NO: 891230 - DNA, 15 bp, Homo sapiens
cctcagtagtcttag

SEQ ID NO: 891231 - DNA, 15 bp, Homo sapiens
ctcagtagtcttagg

SEQ ID NO: 891232 - DNA, 15 bp, Homo sapiens
tcagtagtcttagga

SEQ ID NO: 891233 - DNA, 15 bp, Homo sapiens
cagtagtcttaggag

SEQ ID NO: 891234 - DNA, 15 bp, Homo sapiens
agtagtcttaggagg

SEQ ID NO: 891235 - DNA, 15 bp, Homo sapiens
gtagtcttaggaggt

SEQ ID NO: 891236 - DNA, 15 bp, Homo sapiens
tagtcttaggaggtg

SEQ ID NO: 891237 - DNA, 15 bp, Homo sapiens
agtcttaggaggtgc

SEQ ID NO: 891238 - DNA, 15 bp, Homo sapiens
gtcttaggaggtgca

SEQ ID NO: 891239 - DNA, 15 bp, Homo sapiens
tcttaggaggtgcac

SEQ ID NO: 891240 - DNA, 15 bp, Homo sapiens
cttaggaggtgcacc

SEQ ID NO: 891241 - DNA, 15 bp, Homo sapiens
ttaggaggtgcacca

SEQ ID NO: 891242 - DNA, 15 bp, Homo sapiens
taggaggtgcaccaa

SEQ ID NO: 891243 - DNA, 15 bp, Homo sapiens
aggaggtgcaccaag

SEQ ID NO: 891244 - DNA, 15 bp, Homo sapiens
ggaggtgcaccaagg

SEQ ID NO: 891245 - DNA, 15 bp, Homo sapiens
gaggtgcaccaaggc

SEQ ID NO: 891246 - DNA, 15 bp, Homo sapiens
aggtgcaccaaggca

SEQ ID NO: 891247 - DNA, 15 bp, Homo sapiens
ggtgcaccaaggcac

SEQ ID NO: 891248 - DNA, 15 bp, Homo sapiens
gtgcaccaaggcact

SEQ ID NO: 891249 - DNA, 15 bp, Homo sapiens
tgcaccaaggcactg

SEQ ID NO: 891250 - DNA, 15 bp, Homo sapiens
gcaccaaggcactga

SEQ ID NO: 891251 - DNA, 15 bp, Homo sapiens
caccaaggcactgag

SEQ ID NO: 891252 - DNA, 15 bp, Homo sapiens
accaaggcactgagc

SEQ ID NO: 891253 - DNA, 15 bp, Homo sapiens
ccaaggcactgagcc

SEQ ID NO: 891254 - DNA, 15 bp, Homo sapiens
caaggcactgagccc

SEQ ID NO: 891255 - DNA, 15 bp, Homo sapiens
aaggcactgagccca

SEQ ID NO: 891256 - DNA, 15 bp, Homo sapiens
aggcactgagcccag

SEQ ID NO: 891257 - DNA, 15 bp, Homo sapiens
ggcactgagcccagg

SEQ ID NO: 891258 - DNA, 15 bp, Homo sapiens
gcactgagcccaggc

SEQ ID NO: 891259 - DNA, 15 bp, Homo sapiens
cactgagcccaggcg

SEQ ID NO: 891260 - DNA, 15 bp, Homo sapiens
actgagcccaggcgt

SEQ ID NO: 891261 - DNA, 15 bp, Homo sapiens
ctgagcccaggcgtg

SEQ ID NO: 891262 - DNA, 15 bp, Homo sapiens
tgagcccaggcgtgg

SEQ ID NO: 891263 - DNA, 15 bp, Homo sapiens
gagcccaggcgtggg

SEQ ID NO: 891264 - DNA, 15 bp, Homo sapiens
agcccaggcgtgggg

SEQ ID NO: 891265 - DNA, 15 bp, Homo sapiens
gcccaggcgtggggt

SEQ ID NO: 891266 - DNA, 15 bp, Homo sapiens
cccaggcgtggggtc

SEQ ID NO: 891267 - DNA, 15 bp, Homo sapiens
ccaggcgtggggtca

SEQ ID NO: 891268 - DNA, 15 bp, Homo sapiens
caggcgtggggtcag

SEQ ID NO: 891269 - DNA, 15 bp, Homo sapiens
aggcgtggggtcagt

SEQ ID NO: 891270 - DNA, 15 bp, Homo sapiens
ggcgtggggtcagtt

SEQ ID NO: 891271 - DNA, 15 bp, Homo sapiens
gcgtggggtcagttg

SEQ ID NO: 891272 - DNA, 15 bp, Homo sapiens
cgtggggtcagttga

SEQ ID NO: 891273 - DNA, 15 bp, Homo sapiens
gtggggtcagttgat

SEQ ID NO: 891274 - DNA, 15 bp, Homo sapiens
tggggtcagttgatg

SEQ ID NO: 891275 - DNA, 15 bp, Homo sapiens
ggggtcagttgatga

SEQ ID NO: 891276 - DNA, 15 bp, Homo sapiens
gggtcagttgatgag

SEQ ID NO: 891277 - DNA, 15 bp, Homo sapiens
ggtcagttgatgaga

SEQ ID NO: 891278 - DNA, 15 bp, Homo sapiens
gtcagttgatgagaa

SEQ ID NO: 891279 - DNA, 15 bp, Homo sapiens
tcagttgatgagaag

SEQ ID NO: 891280 - DNA, 15 bp, Homo sapiens
cagttgatgagaaga

SEQ ID NO: 891281 - DNA, 15 bp, Homo sapiens
agttgatgagaagaa

SEQ ID NO: 891282 - DNA, 15 bp, Homo sapiens
gttgatgagaagaag

SEQ ID NO: 891283 - DNA, 15 bp, Homo sapiens
ttgatgagaagaagg

SEQ ID NO: 891284 - DNA, 15 bp, Homo sapiens
tgatgagaagaaggg

SEQ ID NO: 891285 - DNA, 15 bp, Homo sapiens
gatgagaagaagggg

SEQ ID NO: 891286 - DNA, 15 bp, Homo sapiens
atgagaagaagggga

SEQ ID NO: 891287 - DNA, 15 bp, Homo sapiens
tgagaagaaggggag

SEQ ID NO: 891288 - DNA, 15 bp, Homo sapiens
gagaagaaggggagc

SEQ ID NO: 891289 - DNA, 15 bp, Homo sapiens
agaagaaggggagca

SEQ ID NO: 891290 - DNA, 15 bp, Homo sapiens
gaagaaggggagcag

SEQ ID NO: 891291 - DNA, 15 bp, Homo sapiens
aagaaggggagcagg

SEQ ID NO: 891292 - DNA, 15 bp, Homo sapiens
agaaggggagcaggg

SEQ ID NO: 891293 - DNA, 15 bp, Homo sapiens
gaaggggagcagggc

SEQ ID NO: 891294 - DNA, 15 bp, Homo sapiens
aaggggagcagggcc

SEQ ID NO: 891295 - DNA, 15 bp, Homo sapiens
aggggagcagggcca

SEQ ID NO: 891296 - DNA, 15 bp, Homo sapiens
ggggagcagggccaa

SEQ ID NO: 891297 - DNA, 15 bp, Homo sapiens
gggagcagggccaaa

SEQ ID NO: 891298 - DNA, 15 bp, Homo sapiens
ggagcagggccaaat

SEQ ID NO: 891299 - DNA, 15 bp, Homo sapiens
gagcagggccaaata

SEQ ID NO: 891300 - DNA, 15 bp, Homo sapiens
agcagggccaaataa

SEQ ID NO: 891301 - DNA, 15 bp, Homo sapiens
gcagggccaaataag

SEQ ID NO: 891302 - DNA, 15 bp, Homo sapiens
cagggccaaataagt

SEQ ID NO: 891303 - DNA, 15 bp, Homo sapiens
agggccaaataagtg

SEQ ID NO: 891304 - DNA, 15 bp, Homo sapiens
gggccaaataagtgc

SEQ ID NO: 891305 - DNA, 15 bp, Homo sapiens
ggccaaataagtgct

SEQ ID NO: 891306 - DNA, 15 bp, Homo sapiens
gccaaataagtgctc

SEQ ID NO: 891307 - DNA, 15 bp, Homo sapiens
ccaaataagtgctcc

SEQ ID NO: 891308 - DNA, 15 bp, Homo sapiens
caaataagtgctcct

SEQ ID NO: 891309 - DNA, 15 bp, Homo sapiens
aaataagtgctcctg

SEQ ID NO: 891310 - DNA, 15 bp, Homo sapiens
aataagtgctcctgg

SEQ ID NO: 891311 - DNA, 15 bp, Homo sapiens
ataagtgctcctgga

SEQ ID NO: 891312 - DNA, 15 bp, Homo sapiens
taagtgctcctggag

SEQ ID NO: 891313 - DNA, 15 bp, Homo sapiens
aagtgctcctggagt

SEQ ID NO: 891314 - DNA, 15 bp, Homo sapiens
agtgctcctggagtg

SEQ ID NO: 891315 - DNA, 15 bp, Homo sapiens
gtgctcctggagtga

SEQ ID NO: 891316 - DNA, 15 bp, Homo sapiens
tgctcctggagtgac

SEQ ID NO: 891317 - DNA, 15 bp, Homo sapiens
gctcctggagtgaca

SEQ ID NO: 891318 - DNA, 15 bp, Homo sapiens
ctcctggagtgacat

SEQ ID NO: 891319 - DNA, 15 bp, Homo sapiens
tcctggagtgacata

SEQ ID NO: 891320 - DNA, 15 bp, Homo sapiens
cctggagtgacataa

SEQ ID NO: 891321 - DNA, 15 bp, Homo sapiens
ctggagtgacataac

SEQ ID NO: 891322 - DNA, 15 bp, Homo sapiens
tggagtgacataacc

SEQ ID NO: 891323 - DNA, 15 bp, Homo sapiens
ggagtgacataacca

SEQ ID NO: 891324 - DNA, 15 bp, Homo sapiens
gagtgacataaccaa

SEQ ID NO: 891325 - DNA, 15 bp, Homo sapiens
agtgacataaccaat

SEQ ID NO: 891326 - DNA, 15 bp, Homo sapiens
gtgacataaccaata

SEQ ID NO: 891327 - DNA, 15 bp, Homo sapiens
tgacataaccaatac

SEQ ID NO: 891328 - DNA, 15 bp, Homo sapiens
gacataaccaataca

SEQ ID NO: 891329 - DNA, 15 bp, Homo sapiens
acataaccaatacat

SEQ ID NO: 891330 - DNA, 15 bp, Homo sapiens
cataaccaatacatg

SEQ ID NO: 891331 - DNA, 15 bp, Homo sapiens
ataaccaatacatgg

SEQ ID NO: 891332 - DNA, 15 bp, Homo sapiens
taaccaatacatgga

SEQ ID NO: 891333 - DNA, 15 bp, Homo sapiens
aaccaatacatggag

SEQ ID NO: 891334 - DNA, 15 bp, Homo sapiens
accaatacatggagg

SEQ ID NO: 891335 - DNA, 15 bp, Homo sapiens
ccaatacatggagga

SEQ ID NO: 891336 - DNA, 15 bp, Homo sapiens
caatacatggaggag

SEQ ID NO: 891337 - DNA, 15 bp, Homo sapiens
aatacatggaggagg

SEQ ID NO: 891338 - DNA, 15 bp, Homo sapiens
atacatggaggaggc

SEQ ID NO: 891339 - DNA, 15 bp, Homo sapiens
tacatggaggaggct

SEQ ID NO: 891340 - DNA, 15 bp, Homo sapiens
acatggaggaggctt

SEQ ID NO: 891341 - DNA, 15 bp, Homo sapiens
catggaggaggcttt

SEQ ID NO: 891342 - DNA, 15 bp, Homo sapiens
atggaggaggcttta

SEQ ID NO: 891343 - DNA, 15 bp, Homo sapiens
tggaggaggctttag

SEQ ID NO: 891344 - DNA, 15 bp, Homo sapiens
ggaggaggctttaga

SEQ ID NO: 891345 - DNA, 15 bp, Homo sapiens
gaggaggctttagat

SEQ ID NO: 891346 - DNA, 15 bp, Homo sapiens
aggaggctttagatg

SEQ ID NO: 891347 - DNA, 15 bp, Homo sapiens
ggaggctttagatgt

SEQ ID NO: 891348 - DNA, 15 bp, Homo sapiens
gaggctttagatgtc

SEQ ID NO: 891349 - DNA, 15 bp, Homo sapiens
aggctttagatgtct

SEQ ID NO: 891350 - DNA, 15 bp, Homo sapiens
ggctttagatgtctt

SEQ ID NO: 891351 - DNA, 15 bp, Homo sapiens
gctttagatgtcttc

SEQ ID NO: 891352 - DNA, 15 bp, Homo sapiens
ctttagatgtcttct

SEQ ID NO: 891353 - DNA, 15 bp, Homo sapiens
tttagatgtcttctg

SEQ ID NO: 891354 - DNA, 15 bp, Homo sapiens
ttagatgtcttctgt

SEQ ID NO: 891355 - DNA, 15 bp, Homo sapiens
tagatgtcttctgtt

SEQ ID NO: 891356 - DNA, 15 bp, Homo sapiens
agatgtcttctgttt

SEQ ID NO: 891357 - DNA, 15 bp, Homo sapiens
gatgtcttctgtttg

SEQ ID NO: 891358 - DNA, 15 bp, Homo sapiens
atgtcttctgtttga

SEQ ID NO: 891359 - DNA, 15 bp, Homo sapiens
tgtcttctgtttgac

SEQ ID NO: 891360 - DNA, 15 bp, Homo sapiens
gtcttctgtttgacc

SEQ ID NO: 891361 - DNA, 15 bp, Homo sapiens
tcttctgtttgaccc

SEQ ID NO: 891362 - DNA, 15 bp, Homo sapiens
cttctgtttgaccca

SEQ ID NO: 891363 - DNA, 15 bp, Homo sapiens
ttctgtttgacccaa

SEQ ID NO: 891364 - DNA, 15 bp, Homo sapiens
tctgtttgacccaat

SEQ ID NO: 891365 - DNA, 15 bp, Homo sapiens
ctgtttgacccaatg

SEQ ID NO: 891366 - DNA, 15 bp, Homo sapiens
tgtttgacccaatgt

SEQ ID NO: 891367 - DNA, 15 bp, Homo sapiens
gtttgacccaatgtt

SEQ ID NO: 891368 - DNA, 15 bp, Homo sapiens
tttgacccaatgttg

SEQ ID NO: 891369 - DNA, 15 bp, Homo sapiens
ttgacccaatgttgc

SEQ ID NO: 891370 - DNA, 15 bp, Homo sapiens
tgacccaatgttgct

SEQ ID NO: 891371 - DNA, 15 bp, Homo sapiens
gacccaatgttgctt

SEQ ID NO: 891372 - DNA, 15 bp, Homo sapiens
acccaatgttgcttg

SEQ ID NO: 891373 - DNA, 15 bp, Homo sapiens
cccaatgttgcttga

SEQ ID NO: 891374 - DNA, 15 bp, Homo sapiens
ccaatgttgcttgac

SEQ ID NO: 891375 - DNA, 15 bp, Homo sapiens
caatgttgcttgacc

SEQ ID NO: 891376 - DNA, 15 bp, Homo sapiens
aatgttgcttgacca

SEQ ID NO: 891377 - DNA, 15 bp, Homo sapiens
atgttgcttgaccat

SEQ ID NO: 891378 - DNA, 15 bp, Homo sapiens
tgttgcttgaccata

SEQ ID NO: 891379 - DNA, 15 bp, Homo sapiens
gttgcttgaccataa

SEQ ID NO: 891380 - DNA, 15 bp, Homo sapiens
ttgcttgaccataac

SEQ ID NO: 891381 - DNA, 15 bp, Homo sapiens
tgcttgaccataact

SEQ ID NO: 891382 - DNA, 15 bp, Homo sapiens
gcttgaccataacta

SEQ ID NO: 891383 - DNA, 15 bp, Homo sapiens
cttgaccataactag

SEQ ID NO: 891384 - DNA, 15 bp, Homo sapiens
ttgaccataactagg

SEQ ID NO: 891385 - DNA, 15 bp, Homo sapiens
tgaccataactaggg

SEQ ID NO: 891386 - DNA, 15 bp, Homo sapiens
gaccataactagggt

SEQ ID NO: 891387 - DNA, 15 bp, Homo sapiens
accataactagggtt

SEQ ID NO: 891388 - DNA, 15 bp, Homo sapiens
ccataactagggttg

SEQ ID NO: 891389 - DNA, 15 bp, Homo sapiens
cataactagggttgt

SEQ ID NO: 891390 - DNA, 15 bp, Homo sapiens
ataactagggttgtc

SEQ ID NO: 891391 - DNA, 15 bp, Homo sapiens
taactagggttgtca

SEQ ID NO: 891392 - DNA, 15 bp, Homo sapiens
aactagggttgtcag

SEQ ID NO: 891393 - DNA, 15 bp, Homo sapiens
actagggttgtcagt

SEQ ID NO: 891394 - DNA, 15 bp, Homo sapiens
ctagggttgtcagtg

SEQ ID NO: 891395 - DNA, 15 bp, Homo sapiens
tagggttgtcagtga

SEQ ID NO: 891396 - DNA, 15 bp, Homo sapiens
agggttgtcagtgac

SEQ ID NO: 891397 - DNA, 15 bp, Homo sapiens
gggttgtcagtgaca

SEQ ID NO: 891398 - DNA, 15 bp, Homo sapiens
ggttgtcagtgacag

SEQ ID NO: 891399 - DNA, 15 bp, Homo sapiens
gttgtcagtgacagg

SEQ ID NO: 891400 - DNA, 15 bp, Homo sapiens
ttgtcagtgacaggt

SEQ ID NO: 891401 - DNA, 15 bp, Homo sapiens
tgtcagtgacaggta

SEQ ID NO: 891402 - DNA, 15 bp, Homo sapiens
gtcagtgacaggtaa

SEQ ID NO: 891403 - DNA, 15 bp, Homo sapiens
tcagtgacaggtaac

SEQ ID NO: 891404 - DNA, 15 bp, Homo sapiens
cagtgacaggtaacc

SEQ ID NO: 891405 - DNA, 15 bp, Homo sapiens
agtgacaggtaacca

SEQ ID NO: 891406 - DNA, 15 bp, Homo sapiens
gtgacaggtaaccag

SEQ ID NO: 891407 - DNA, 15 bp, Homo sapiens
tgacaggtaaccaga

SEQ ID NO: 891408 - DNA, 15 bp, Homo sapiens
gacaggtaaccagat

SEQ ID NO: 891409 - DNA, 15 bp, Homo sapiens
acaggtaaccagatc

SEQ ID NO: 891410 - DNA, 15 bp, Homo sapiens
caggtaaccagatct

SEQ ID NO: 891411 - DNA, 15 bp, Homo sapiens
aggtaaccagatctc

SEQ ID NO: 891412 - DNA, 15 bp, Homo sapiens
ggtaaccagatctca

SEQ ID NO: 891413 - DNA, 15 bp, Homo sapiens
gtaaccagatctcaa

SEQ ID NO: 891414 - DNA, 15 bp, Homo sapiens
taaccagatctcaat

SEQ ID NO: 891415 - DNA, 15 bp, Homo sapiens
aaccagatctcaatg

SEQ ID NO: 891416 - DNA, 15 bp, Homo sapiens
accagatctcaatgc

SEQ ID NO: 891417 - DNA, 15 bp, Homo sapiens
ccagatctcaatgca

SEQ ID NO: 891418 - DNA, 15 bp, Homo sapiens
cagatctcaatgcaa

SEQ ID NO: 891419 - DNA, 15 bp, Homo sapiens
agatctcaatgcaat

SEQ ID NO: 891420 - DNA, 15 bp, Homo sapiens
gatctcaatgcaatg

SEQ ID NO: 891421 - DNA, 15 bp, Homo sapiens
atctcaatgcaatgg

SEQ ID NO: 891422 - DNA, 15 bp, Homo sapiens
tctcaatgcaatggt

SEQ ID NO: 891423 - DNA, 15 bp, Homo sapiens
ctcaatgcaatggtg

SEQ ID NO: 891424 - DNA, 15 bp, Homo sapiens
tcaatgcaatggtga

SEQ ID NO: 891425 - DNA, 15 bp, Homo sapiens
caatgcaatggtgag

SEQ ID NO: 891426 - DNA, 15 bp, Homo sapiens
aatgcaatggtgagc

SEQ ID NO: 891427 - DNA, 15 bp, Homo sapiens
atgcaatggtgagct

SEQ ID NO: 891428 - DNA, 15 bp, Homo sapiens
tgcaatggtgagctc

SEQ ID NO: 891429 - DNA, 15 bp, Homo sapiens
gcaatggtgagctct

SEQ ID NO: 891430 - DNA, 15 bp, Homo sapiens
caatggtgagctctc

SEQ ID NO: 891431 - DNA, 15 bp, Homo sapiens
aatggtgagctctca

SEQ ID NO: 891432 - DNA, 15 bp, Homo sapiens
atggtgagctctcag

SEQ ID NO: 891433 - DNA, 15 bp, Homo sapiens
tggtgagctctcaga

SEQ ID NO: 891434 - DNA, 15 bp, Homo sapiens
ggtgagctctcagaa

SEQ ID NO: 891435 - DNA, 15 bp, Homo sapiens
gtgagctctcagaag

SEQ ID NO: 891436 - DNA, 15 bp, Homo sapiens
tgagctctcagaaga

SEQ ID NO: 891437 - DNA, 15 bp, Homo sapiens
gagctctcagaagac

SEQ ID NO: 891438 - DNA, 15 bp, Homo sapiens
agctctcagaagaca

SEQ ID NO: 891439 - DNA, 15 bp, Homo sapiens
gctctcagaagacag

SEQ ID NO: 891440 - DNA, 15 bp, Homo sapiens
ctctcagaagacaga

SEQ ID NO: 891441 - DNA, 15 bp, Homo sapiens
tctcagaagacagaa

SEQ ID NO: 891442 - DNA, 15 bp, Homo sapiens
ctcagaagacagaat

SEQ ID NO: 891443 - DNA, 15 bp, Homo sapiens
tcagaagacagaatt

SEQ ID NO: 891444 - DNA, 15 bp, Homo sapiens
cagaagacagaatta

SEQ ID NO: 891445 - DNA, 15 bp, Homo sapiens
agaagacagaattag

SEQ ID NO: 891446 - DNA, 15 bp, Homo sapiens
gaagacagaattaga

SEQ ID NO: 891447 - DNA, 15 bp, Homo sapiens
aagacagaattagat

SEQ ID NO: 891448 - DNA, 15 bp, Homo sapiens
agacagaattagata

SEQ ID NO: 891449 - DNA, 15 bp, Homo sapiens
gacagaattagatat

SEQ ID NO: 891450 - DNA, 15 bp, Homo sapiens
acagaattagatatt

SEQ ID NO: 891451 - DNA, 15 bp, Homo sapiens
cagaattagatattt

SEQ ID NO: 891452 - DNA, 15 bp, Homo sapiens
agaattagatatttg

SEQ ID NO: 891453 - DNA, 15 bp, Homo sapiens
gaattagatatttgg

SEQ ID NO: 891454 - DNA, 15 bp, Homo sapiens
aattagatatttggg

SEQ ID NO: 891455 - DNA, 15 bp, Homo sapiens
attagatatttgggg

SEQ ID NO: 891456 - DNA, 15 bp, Homo sapiens
ttagatatttgggga

SEQ ID NO: 891457 - DNA, 15 bp, Homo sapiens
tagatatttggggat

SEQ ID NO: 891458 - DNA, 15 bp, Homo sapiens
agatatttggggata

SEQ ID NO: 891459 - DNA, 15 bp, Homo sapiens
gatatttggggatat

SEQ ID NO: 891460 - DNA, 15 bp, Homo sapiens
atatttggggatatg

SEQ ID NO: 891461 - DNA, 15 bp, Homo sapiens
tatttggggatatgg

SEQ ID NO: 891462 - DNA, 15 bp, Homo sapiens
atttggggatatggg

SEQ ID NO: 891463 - DNA, 15 bp, Homo sapiens
tttggggatatgggg

SEQ ID NO: 891464 - DNA, 15 bp, Homo sapiens
ttggggatatggggg

SEQ ID NO: 891465 - DNA, 15 bp, Homo sapiens
tggggatatgggggc

SEQ ID NO: 891466 - DNA, 15 bp, Homo sapiens
ggggatatgggggcc

SEQ ID NO: 891467 - DNA, 15 bp, Homo sapiens
gggatatgggggcca

SEQ ID NO: 891468 - DNA, 15 bp, Homo sapiens
ggatatgggggccaa

SEQ ID NO: 891469 - DNA, 15 bp, Homo sapiens
gatatgggggccaac

SEQ ID NO: 891470 - DNA, 15 bp, Homo sapiens
atatgggggccaacc

SEQ ID NO: 891471 - DNA, 15 bp, Homo sapiens
tatgggggccaacct

SEQ ID NO: 891472 - DNA, 15 bp, Homo sapiens
atgggggccaacctg

SEQ ID NO: 891473 - DNA, 15 bp, Homo sapiens
tgggggccaacctgc

SEQ ID NO: 891474 - DNA, 15 bp, Homo sapiens
gggggccaacctgcc

SEQ ID NO: 891475 - DNA, 15 bp, Homo sapiens
ggggccaacctgcca

SEQ ID NO: 891476 - DNA, 15 bp, Homo sapiens
gggccaacctgccaa

SEQ ID NO: 891477 - DNA, 15 bp, Homo sapiens
ggccaacctgccaat

SEQ ID NO: 891478 - DNA, 15 bp, Homo sapiens
gccaacctgccaatg

SEQ ID NO: 891479 - DNA, 15 bp, Homo sapiens
ccaacctgccaatgg

SEQ ID NO: 891480 - DNA, 15 bp, Homo sapiens
caacctgccaatgga

SEQ ID NO: 891481 - DNA, 15 bp, Homo sapiens
aacctgccaatggat

SEQ ID NO: 891482 - DNA, 15 bp, Homo sapiens
acctgccaatggata

SEQ ID NO: 891483 - DNA, 15 bp, Homo sapiens
cctgccaatggataa

SEQ ID NO: 891484 - DNA, 15 bp, Homo sapiens
ctgccaatggataat

SEQ ID NO: 891485 - DNA, 15 bp, Homo sapiens
tgccaatggataatg

SEQ ID NO: 891486 - DNA, 15 bp, Homo sapiens
gccaatggataatgt

SEQ ID NO: 891487 - DNA, 15 bp, Homo sapiens
ccaatggataatgtt

SEQ ID NO: 891488 - DNA, 15 bp, Homo sapiens
caatggataatgttt

SEQ ID NO: 891489 - DNA, 15 bp, Homo sapiens
aatggataatgttta

SEQ ID NO: 891490 - DNA, 15 bp, Homo sapiens
atggataatgtttat

SEQ ID NO: 891491 - DNA, 15 bp, Homo sapiens
tggataatgtttatg

SEQ ID NO: 891492 - DNA, 15 bp, Homo sapiens
ggataatgtttatga

SEQ ID NO: 891493 - DNA, 15 bp, Homo sapiens
gataatgtttatgag

SEQ ID NO: 891494 - DNA, 15 bp, Homo sapiens
ataatgtttatgaga

SEQ ID NO: 891495 - DNA, 15 bp, Homo sapiens
taatgtttatgagat

SEQ ID NO: 891496 - DNA, 15 bp, Homo sapiens
aatgtttatgagata

SEQ ID NO: 891497 - DNA, 15 bp, Homo sapiens
atgtttatgagatac

SEQ ID NO: 891498 - DNA, 15 bp, Homo sapiens
tgtttatgagataca

SEQ ID NO: 891499 - DNA, 15 bp, Homo sapiens
gtttatgagatacat

SEQ ID NO: 891500 - DNA, 15 bp, Homo sapiens
tttatgagatacata

SEQ ID NO: 891501 - DNA, 15 bp, Homo sapiens
ttatgagatacatag

SEQ ID NO: 891502 - DNA, 15 bp, Homo sapiens
tatgagatacatagt

SEQ ID NO: 891503 - DNA, 15 bp, Homo sapiens
atgagatacatagta

SEQ ID NO: 891504 - DNA, 15 bp, Homo sapiens
tgagatacatagtat

SEQ ID NO: 891505 - DNA, 15 bp, Homo sapiens
gagatacatagtatc

SEQ ID NO: 891506 - DNA, 15 bp, Homo sapiens
agatacatagtatct

SEQ ID NO: 891507 - DNA, 15 bp, Homo sapiens
gatacatagtatctt

SEQ ID NO: 891508 - DNA, 15 bp, Homo sapiens
atacatagtatctta

SEQ ID NO: 891509 - DNA, 15 bp, Homo sapiens
tacatagtatcttaa

SEQ ID NO: 891510 - DNA, 15 bp, Homo sapiens
acatagtatcttaaa

SEQ ID NO: 891511 - DNA, 15 bp, Homo sapiens
catagtatcttaaaa

SEQ ID NO: 891512 - DNA, 15 bp, Homo sapiens
atagtatcttaaaaa

SEQ ID NO: 891513 - DNA, 15 bp, Homo sapiens
tagtatcttaaaaag

SEQ ID NO: 891514 - DNA, 15 bp, Homo sapiens
agtatcttaaaaagg

SEQ ID NO: 891515 - DNA, 15 bp, Homo sapiens
gtatcttaaaaagga

SEQ ID NO: 891516 - DNA, 15 bp, Homo sapiens
tatcttaaaaaggat

SEQ ID NO: 891517 - DNA, 15 bp, Homo sapiens
atcttaaaaaggata

SEQ ID NO: 891518 - DNA, 15 bp, Homo sapiens
tcttaaaaaggatat

SEQ ID NO: 891519 - DNA, 15 bp, Homo sapiens
cttaaaaaggatatt

SEQ ID NO: 891520 - DNA, 15 bp, Homo sapiens
ttaaaaaggatattg

SEQ ID NO: 891521 - DNA, 15 bp, Homo sapiens
taaaaaggatattgg

SEQ ID NO: 891522 - DNA, 15 bp, Homo sapiens
aaaaaggatattggg

SEQ ID NO: 891523 - DNA, 15 bp, Homo sapiens
aaaaggatattggga

SEQ ID NO: 891524 - DNA, 15 bp, Homo sapiens
aaaggatattgggag

SEQ ID NO: 891525 - DNA, 15 bp, Homo sapiens
aaggatattgggagg

SEQ ID NO: 891526 - DNA, 15 bp, Homo sapiens
aggatattgggaggg

SEQ ID NO: 891527 - DNA, 15 bp, Homo sapiens
ggatattgggagggt

SEQ ID NO: 891528 - DNA, 15 bp, Homo sapiens
gatattgggagggta

SEQ ID NO: 891529 - DNA, 15 bp, Homo sapiens
atattgggagggtag

SEQ ID NO: 891530 - DNA, 15 bp, Homo sapiens
tattgggagggtagt

SEQ ID NO: 891531 - DNA, 15 bp, Homo sapiens
attgggagggtagtt

SEQ ID NO: 891532 - DNA, 15 bp, Homo sapiens
ttgggagggtagttg

SEQ ID NO: 891533 - DNA, 15 bp, Homo sapiens
tgggagggtagttgt

SEQ ID NO: 891534 - DNA, 15 bp, Homo sapiens
gggagggtagttgta

SEQ ID NO: 891535 - DNA, 15 bp, Homo sapiens
ggagggtagttgtaa

SEQ ID NO: 891536 - DNA, 15 bp, Homo sapiens
gagggtagttgtaat

SEQ ID NO: 891537 - DNA, 15 bp, Homo sapiens
agggtagttgtaatt

SEQ ID NO: 891538 - DNA, 15 bp, Homo sapiens
gggtagttgtaattt

SEQ ID NO: 891539 - DNA, 15 bp, Homo sapiens
ggtagttgtaattta

SEQ ID NO: 891540 - DNA, 15 bp, Homo sapiens
gtagttgtaatttag

SEQ ID NO: 891541 - DNA, 15 bp, Homo sapiens
tagttgtaatttagg

SEQ ID NO: 891542 - DNA, 15 bp, Homo sapiens
agttgtaatttaggt

SEQ ID NO: 891543 - DNA, 15 bp, Homo sapiens
gttgtaatttaggtg

SEQ ID NO: 891544 - DNA, 15 bp, Homo sapiens
ttgtaatttaggtgg

SEQ ID NO: 891545 - DNA, 15 bp, Homo sapiens
tgtaatttaggtggg

SEQ ID NO: 891546 - DNA, 15 bp, Homo sapiens
gtaatttaggtgggt

SEQ ID NO: 891547 - DNA, 15 bp, Homo sapiens
taatttaggtgggtg

SEQ ID NO: 891548 - DNA, 15 bp, Homo sapiens
aatttaggtgggtgg

SEQ ID NO: 891549 - DNA, 15 bp, Homo sapiens
atttaggtgggtggt

SEQ ID NO: 891550 - DNA, 15 bp, Homo sapiens
tttaggtgggtggtt

SEQ ID NO: 891551 - DNA, 15 bp, Homo sapiens
ttaggtgggtggttg

SEQ ID NO: 891552 - DNA, 15 bp, Homo sapiens
taggtgggtggttgg

SEQ ID NO: 891553 - DNA, 15 bp, Homo sapiens
aggtgggtggttgga

SEQ ID NO: 891554 - DNA, 15 bp, Homo sapiens
ggtgggtggttggaa

SEQ ID NO: 891555 - DNA, 15 bp, Homo sapiens
gtgggtggttggaat

SEQ ID NO: 891556 - DNA, 15 bp, Homo sapiens
tgggtggttggaata

SEQ ID NO: 891557 - DNA, 15 bp, Homo sapiens
gggtggttggaataa

SEQ ID NO: 891558 - DNA, 15 bp, Homo sapiens
ggtggttggaataaa

SEQ ID NO: 891559 - DNA, 15 bp, Homo sapiens
gtggttggaataaat

SEQ ID NO: 891560 - DNA, 15 bp, Homo sapiens
tggttggaataaata

SEQ ID NO: 891561 - DNA, 15 bp, Homo sapiens
ggttggaataaatag

SEQ ID NO: 891562 - DNA, 15 bp, Homo sapiens
gttggaataaatagc

SEQ ID NO: 891563 - DNA, 15 bp, Homo sapiens
ttggaataaatagcc

SEQ ID NO: 891564 - DNA, 15 bp, Homo sapiens
tggaataaatagccc

SEQ ID NO: 891565 - DNA, 15 bp, Homo sapiens
ggaataaatagccct

SEQ ID NO: 891566 - DNA, 15 bp, Homo sapiens
gaataaatagcccta

SEQ ID NO: 891567 - DNA, 15 bp, Homo sapiens
aataaatagccctac

SEQ ID NO: 891568 - DNA, 15 bp, Homo sapiens
ataaatagccctaca

SEQ ID NO: 891569 - DNA, 15 bp, Homo sapiens
taaatagccctacag

SEQ ID NO: 891570 - DNA, 15 bp, Homo sapiens
aaatagccctacagg

SEQ ID NO: 891571 - DNA, 15 bp, Homo sapiens
aatagccctacaggt

SEQ ID NO: 891572 - DNA, 15 bp, Homo sapiens
atagccctacaggtt

SEQ ID NO: 891573 - DNA, 15 bp, Homo sapiens
tagccctacaggtta

SEQ ID NO: 891574 - DNA, 15 bp, Homo sapiens
agccctacaggttat

SEQ ID NO: 891575 - DNA, 15 bp, Homo sapiens
gccctacaggttatt

SEQ ID NO: 891576 - DNA, 15 bp, Homo sapiens
ccctacaggttattt

SEQ ID NO: 891577 - DNA, 15 bp, Homo sapiens
cctacaggttatttt

SEQ ID NO: 891578 - DNA, 15 bp, Homo sapiens
ctacaggttatttta

SEQ ID NO: 891579 - DNA, 15 bp, Homo sapiens
tacaggttattttat

SEQ ID NO: 891580 - DNA, 15 bp, Homo sapiens
acaggttattttatt

SEQ ID NO: 891581 - DNA, 15 bp, Homo sapiens
caggttattttattt

SEQ ID NO: 891582 - DNA, 15 bp, Homo sapiens
aggttattttattta

SEQ ID NO: 891583 - DNA, 15 bp, Homo sapiens
ggttattttatttat

SEQ ID NO: 891584 - DNA, 15 bp, Homo sapiens
gttattttatttatt

SEQ ID NO: 891585 - DNA, 15 bp, Homo sapiens
ttattttatttattc

SEQ ID NO: 891586 - DNA, 15 bp, Homo sapiens
tattttatttattca

SEQ ID NO: 891587 - DNA, 15 bp, Homo sapiens
attttatttattcat

SEQ ID NO: 891588 - DNA, 15 bp, Homo sapiens
ttttatttattcata

SEQ ID NO: 891589 - DNA, 15 bp, Homo sapiens
tttatttattcataa

SEQ ID NO: 891590 - DNA, 15 bp, Homo sapiens
ttatttattcataat

SEQ ID NO: 891591 - DNA, 15 bp, Homo sapiens
tatttattcataatt

SEQ ID NO: 891592 - DNA, 15 bp, Homo sapiens
atttattcataattc

SEQ ID NO: 891593 - DNA, 15 bp, Homo sapiens
tttattcataattcc

SEQ ID NO: 891594 - DNA, 15 bp, Homo sapiens
ttattcataattcca

SEQ ID NO: 891595 - DNA, 15 bp, Homo sapiens
tattcataattccac

SEQ ID NO: 891596 - DNA, 15 bp, Homo sapiens
attcataattccact

SEQ ID NO: 891597 - DNA, 15 bp, Homo sapiens
ttcataattccactc

SEQ ID NO: 891598 - DNA, 15 bp, Homo sapiens
tcataattccactca

SEQ ID NO: 891599 - DNA, 15 bp, Homo sapiens
cataattccactcat

SEQ ID NO: 891600 - DNA, 15 bp, Homo sapiens
ataattccactcata

SEQ ID NO: 891601 - DNA, 15 bp, Homo sapiens
taattccactcatat

SEQ ID NO: 891602 - DNA, 15 bp, Homo sapiens
aattccactcatatc

SEQ ID NO: 891603 - DNA, 15 bp, Homo sapiens
attccactcatatct

SEQ ID NO: 891604 - DNA, 15 bp, Homo sapiens
ttccactcatatcta

SEQ ID NO: 891605 - DNA, 15 bp, Homo sapiens
tccactcatatctat

SEQ ID NO: 891606 - DNA, 15 bp, Homo sapiens
ccactcatatctatt

SEQ ID NO: 891607 - DNA, 15 bp, Homo sapiens
cactcatatctattc

SEQ ID NO: 891608 - DNA, 15 bp, Homo sapiens
actcatatctattca

SEQ ID NO: 891609 - DNA, 15 bp, Homo sapiens
ctcatatctattcac

SEQ ID NO: 891610 - DNA, 15 bp, Homo sapiens
tcatatctattcact

SEQ ID NO: 891611 - DNA, 15 bp, Homo sapiens
catatctattcactc

SEQ ID NO: 891612 - DNA, 15 bp, Homo sapiens
atatctattcactca

SEQ ID NO: 891613 - DNA, 15 bp, Homo sapiens
tatctattcactcac

SEQ ID NO: 891614 - DNA, 15 bp, Homo sapiens
atctattcactcact

SEQ ID NO: 891615 - DNA, 15 bp, Homo sapiens
tctattcactcactc

SEQ ID NO: 891616 - DNA, 15 bp, Homo sapiens
ctattcactcactcc

SEQ ID NO: 891617 - DNA, 15 bp, Homo sapiens
tattcactcactccc

SEQ ID NO: 891618 - DNA, 15 bp, Homo sapiens
attcactcactccct

SEQ ID NO: 891619 - DNA, 15 bp, Homo sapiens
ttcactcactccctc

SEQ ID NO: 891620 - DNA, 15 bp, Homo sapiens
tcactcactccctcc

SEQ ID NO: 891621 - DNA, 15 bp, Homo sapiens
cactcactccctccg

SEQ ID NO: 891622 - DNA, 15 bp, Homo sapiens
actcactccctccgc

SEQ ID NO: 891623 - DNA, 15 bp, Homo sapiens
ctcactccctccgct

SEQ ID NO: 891624 - DNA, 15 bp, Homo sapiens
tcactccctccgctt

SEQ ID NO: 891625 - DNA, 15 bp, Homo sapiens
cactccctccgctta

SEQ ID NO: 891626 - DNA, 15 bp, Homo sapiens
actccctccgcttat

SEQ ID NO: 891627 - DNA, 15 bp, Homo sapiens
ctccctccgcttatt

SEQ ID NO: 891628 - DNA, 15 bp, Homo sapiens
tccctccgcttatta

SEQ ID NO: 891629 - DNA, 15 bp, Homo sapiens
ccctccgcttattaa

SEQ ID NO: 891630 - DNA, 15 bp, Homo sapiens
cctccgcttattaag

SEQ ID NO: 891631 - DNA, 15 bp, Homo sapiens
ctccgcttattaagc

SEQ ID NO: 891632 - DNA, 15 bp, Homo sapiens
tccgcttattaagca

SEQ ID NO: 891633 - DNA, 15 bp, Homo sapiens
ccgcttattaagcac

SEQ ID NO: 891634 - DNA, 15 bp, Homo sapiens
cgcttattaagcaca

SEQ ID NO: 891635 - DNA, 15 bp, Homo sapiens
gcttattaagcacag

SEQ ID NO: 891636 - DNA, 15 bp, Homo sapiens
cttattaagcacagt

SEQ ID NO: 891637 - DNA, 15 bp, Homo sapiens
ttattaagcacagtt

SEQ ID NO: 891638 - DNA, 15 bp, Homo sapiens
tattaagcacagttt

SEQ ID NO: 891639 - DNA, 15 bp, Homo sapiens
attaagcacagtttc

SEQ ID NO: 891640 - DNA, 15 bp, Homo sapiens
ttaagcacagtttca

SEQ ID NO: 891641 - DNA, 15 bp, Homo sapiens
taagcacagtttcac

SEQ ID NO: 891642 - DNA, 15 bp, Homo sapiens
aagcacagtttcact

SEQ ID NO: 891643 - DNA, 15 bp, Homo sapiens
agcacagtttcactc

SEQ ID NO: 891644 - DNA, 15 bp, Homo sapiens
gcacagtttcactct

SEQ ID NO: 891645 - DNA, 15 bp, Homo sapiens
cacagtttcactctt

SEQ ID NO: 891646 - DNA, 15 bp, Homo sapiens
acagtttcactcttt

SEQ ID NO: 891647 - DNA, 15 bp, Homo sapiens
cagtttcactcttta

SEQ ID NO: 891648 - DNA, 15 bp, Homo sapiens
agtttcactctttac

SEQ ID NO: 891649 - DNA, 15 bp, Homo sapiens
gtttcactctttact

SEQ ID NO: 891650 - DNA, 15 bp, Homo sapiens
tttcactctttactt

SEQ ID NO: 891651 - DNA, 15 bp, Homo sapiens
ttcactctttacttc

SEQ ID NO: 891652 - DNA, 15 bp, Homo sapiens
tcactctttacttca

SEQ ID NO: 891653 - DNA, 15 bp, Homo sapiens
cactctttacttcat

SEQ ID NO: 891654 - DNA, 15 bp, Homo sapiens
actctttacttcatg

SEQ ID NO: 891655 - DNA, 15 bp, Homo sapiens
ctctttacttcatgt

SEQ ID NO: 891656 - DNA, 15 bp, Homo sapiens
tctttacttcatgtg

SEQ ID NO: 891657 - DNA, 15 bp, Homo sapiens
ctttacttcatgtgt

SEQ ID NO: 891658 - DNA, 15 bp, Homo sapiens
tttacttcatgtgtg

SEQ ID NO: 891659 - DNA, 15 bp, Homo sapiens
ttacttcatgtgtga

SEQ ID NO: 891660 - DNA, 15 bp, Homo sapiens
tacttcatgtgtgag

SEQ ID NO: 891661 - DNA, 15 bp, Homo sapiens
acttcatgtgtgaga

SEQ ID NO: 891662 - DNA, 15 bp, Homo sapiens
cttcatgtgtgagat

SEQ ID NO: 891663 - DNA, 15 bp, Homo sapiens
ttcatgtgtgagatc

SEQ ID NO: 891664 - DNA, 15 bp, Homo sapiens
tcatgtgtgagatcc

SEQ ID NO: 891665 - DNA, 15 bp, Homo sapiens
catgtgtgagatccc

SEQ ID NO: 891666 - DNA, 15 bp, Homo sapiens
atgtgtgagatccct

SEQ ID NO: 891667 - DNA, 15 bp, Homo sapiens
tgtgtgagatccctt

SEQ ID NO: 891668 - DNA, 15 bp, Homo sapiens
gtgtgagatcccttt

SEQ ID NO: 891669 - DNA, 15 bp, Homo sapiens
tgtgagatccctttt

SEQ ID NO: 891670 - DNA, 15 bp, Homo sapiens
gtgagatccctttta

SEQ ID NO: 891671 - DNA, 15 bp, Homo sapiens
tgagatcccttttat

SEQ ID NO: 891672 - DNA, 15 bp, Homo sapiens
gagatcccttttatt

SEQ ID NO: 891673 - DNA, 15 bp, Homo sapiens
agatcccttttattc

SEQ ID NO: 891674 - DNA, 15 bp, Homo sapiens
gatcccttttattca

SEQ ID NO: 891675 - DNA, 15 bp, Homo sapiens
atcccttttattcat

SEQ ID NO: 891676 - DNA, 15 bp, Homo sapiens
tcccttttattcatc

SEQ ID NO: 891677 - DNA, 15 bp, Homo sapiens
cccttttattcatct

SEQ ID NO: 891678 - DNA, 15 bp, Homo sapiens
ccttttattcatctg

SEQ ID NO: 891679 - DNA, 15 bp, Homo sapiens
cttttattcatctgg

SEQ ID NO: 891680 - DNA, 15 bp, Homo sapiens
ttttattcatctggt

SEQ ID NO: 891681 - DNA, 15 bp, Homo sapiens
tttattcatctggtt

SEQ ID NO: 891682 - DNA, 15 bp, Homo sapiens
ttattcatctggttt

SEQ ID NO: 891683 - DNA, 15 bp, Homo sapiens
tattcatctggtttg

SEQ ID NO: 891684 - DNA, 15 bp, Homo sapiens
attcatctggtttgg

SEQ ID NO: 891685 - DNA, 15 bp, Homo sapiens
ttcatctggtttggg

SEQ ID NO: 891686 - DNA, 15 bp, Homo sapiens
tcatctggtttgggg

SEQ ID NO: 891687 - DNA, 15 bp, Homo sapiens
catctggtttgggga

SEQ ID NO: 891688 - DNA, 15 bp, Homo sapiens
atctggtttggggat

SEQ ID NO: 891689 - DNA, 15 bp, Homo sapiens
tctggtttggggatt

SEQ ID NO: 891690 - DNA, 15 bp, Homo sapiens
ctggtttggggattc

SEQ ID NO: 891691 - DNA, 15 bp, Homo sapiens
tggtttggggattct

SEQ ID NO: 891692 - DNA, 15 bp, Homo sapiens
ggtttggggattctt

SEQ ID NO: 891693 - DNA, 15 bp, Homo sapiens
gtttggggattctta

SEQ ID NO: 891694 - DNA, 15 bp, Homo sapiens
tttggggattcttat

SEQ ID NO: 891695 - DNA, 15 bp, Homo sapiens
ttggggattcttatt

SEQ ID NO: 891696 - DNA, 15 bp, Homo sapiens
tggggattcttattt

SEQ ID NO: 891697 - DNA, 15 bp, Homo sapiens
ggggattcttatttt

SEQ ID NO: 891698 - DNA, 15 bp, Homo sapiens
gggattcttattttt

SEQ ID NO: 891699 - DNA, 15 bp, Homo sapiens
ggattcttatttttc

SEQ ID NO: 891700 - DNA, 15 bp, Homo sapiens
gattcttatttttcc

SEQ ID NO: 891701 - DNA, 15 bp, Homo sapiens
attcttatttttcca

SEQ ID NO: 891702 - DNA, 15 bp, Homo sapiens
ttcttatttttccat

SEQ ID NO: 891703 - DNA, 15 bp, Homo sapiens
tcttatttttccatg

SEQ ID NO: 891704 - DNA, 15 bp, Homo sapiens
cttatttttccatgt

SEQ ID NO: 891705 - DNA, 15 bp, Homo sapiens
ttatttttccatgtg

SEQ ID NO: 891706 - DNA, 15 bp, Homo sapiens
tatttttccatgtga

SEQ ID NO: 891707 - DNA, 15 bp, Homo sapiens
atttttccatgtgaa

SEQ ID NO: 891708 - DNA, 15 bp, Homo sapiens
tttttccatgtgaac

SEQ ID NO: 891709 - DNA, 15 bp, Homo sapiens
ttttccatgtgaaca

SEQ ID NO: 891710 - DNA, 15 bp, Homo sapiens
tttccatgtgaacag

SEQ ID NO: 891711 - DNA, 15 bp, Homo sapiens
ttccatgtgaacaga

SEQ ID NO: 891712 - DNA, 15 bp, Homo sapiens
tccatgtgaacagag

SEQ ID NO: 891713 - DNA, 15 bp, Homo sapiens
ccatgtgaacagaga

SEQ ID NO: 891714 - DNA, 15 bp, Homo sapiens
catgtgaacagagag

SEQ ID NO: 891715 - DNA, 15 bp, Homo sapiens
atgtgaacagagaga

SEQ ID NO: 891716 - DNA, 15 bp, Homo sapiens
tgtgaacagagagaa

SEQ ID NO: 891717 - DNA, 15 bp, Homo sapiens
gtgaacagagagaac

SEQ ID NO: 891718 - DNA, 15 bp, Homo sapiens
tgaacagagagaaca

SEQ ID NO: 891719 - DNA, 15 bp, Homo sapiens
gaacagagagaacag

SEQ ID NO: 891720 - DNA, 15 bp, Homo sapiens
aacagagagaacaga

SEQ ID NO: 891721 - DNA, 15 bp, Homo sapiens
acagagagaacagat

SEQ ID NO: 891722 - DNA, 15 bp, Homo sapiens
cagagagaacagatg

SEQ ID NO: 891723 - DNA, 15 bp, Homo sapiens
agagagaacagatgc

SEQ ID NO: 891724 - DNA, 15 bp, Homo sapiens
gagagaacagatgct

SEQ ID NO: 891725 - DNA, 15 bp, Homo sapiens
agagaacagatgctt

SEQ ID NO: 891726 - DNA, 15 bp, Homo sapiens
gagaacagatgcttt

SEQ ID NO: 891727 - DNA, 15 bp, Homo sapiens
agaacagatgctttg

SEQ ID NO: 891728 - DNA, 15 bp, Homo sapiens
gaacagatgctttgt

SEQ ID NO: 891729 - DNA, 15 bp, Homo sapiens
aacagatgctttgtc

SEQ ID NO: 891730 - DNA, 15 bp, Homo sapiens
acagatgctttgtcc

SEQ ID NO: 891731 - DNA, 15 bp, Homo sapiens
cagatgctttgtcct

SEQ ID NO: 891732 - DNA, 15 bp, Homo sapiens
agatgctttgtccta

SEQ ID NO: 891733 - DNA, 15 bp, Homo sapiens
gatgctttgtcctaa

SEQ ID NO: 891734 - DNA, 15 bp, Homo sapiens
atgctttgtcctaaa

SEQ ID NO: 891735 - DNA, 15 bp, Homo sapiens
tgctttgtcctaaaa

SEQ ID NO: 891736 - DNA, 15 bp, Homo sapiens
gctttgtcctaaaat

SEQ ID NO: 891737 - DNA, 15 bp, Homo sapiens
ctttgtcctaaaatc

SEQ ID NO: 891738 - DNA, 15 bp, Homo sapiens
tttgtcctaaaatca

SEQ ID NO: 891739 - DNA, 15 bp, Homo sapiens
ttgtcctaaaatcac

SEQ ID NO: 891740 - DNA, 15 bp, Homo sapiens
tgtcctaaaatcacc

SEQ ID NO: 891741 - DNA, 15 bp, Homo sapiens
gtcctaaaatcacca

SEQ ID NO: 891742 - DNA, 15 bp, Homo sapiens
tcctaaaatcaccac

SEQ ID NO: 891743 - DNA, 15 bp, Homo sapiens
cctaaaatcaccact

SEQ ID NO: 891744 - DNA, 15 bp, Homo sapiens
ctaaaatcaccactc

SEQ ID NO: 891745 - DNA, 15 bp, Homo sapiens
taaaatcaccactcc

SEQ ID NO: 891746 - DNA, 15 bp, Homo sapiens
aaaatcaccactcct

SEQ ID NO: 891747 - DNA, 15 bp, Homo sapiens
aaatcaccactcctg

SEQ ID NO: 891748 - DNA, 15 bp, Homo sapiens
aatcaccactcctga

SEQ ID NO: 891749 - DNA, 15 bp, Homo sapiens
atcaccactcctgac

SEQ ID NO: 891750 - DNA, 15 bp, Homo sapiens
tcaccactcctgact

SEQ ID NO: 891751 - DNA, 15 bp, Homo sapiens
caccactcctgactt

SEQ ID NO: 891752 - DNA, 15 bp, Homo sapiens
accactcctgacttc

SEQ ID NO: 891753 - DNA, 15 bp, Homo sapiens
ccactcctgacttct

SEQ ID NO: 891754 - DNA, 15 bp, Homo sapiens
cactcctgacttctg

SEQ ID NO: 891755 - DNA, 15 bp, Homo sapiens
actcctgacttctga

SEQ ID NO: 891756 - DNA, 15 bp, Homo sapiens
ctcctgacttctgac

SEQ ID NO: 891757 - DNA, 15 bp, Homo sapiens
tcctgacttctgacc

SEQ ID NO: 891758 - DNA, 15 bp, Homo sapiens
cctgacttctgacca

SEQ ID NO: 891759 - DNA, 15 bp, Homo sapiens
ctgacttctgaccac

SEQ ID NO: 891760 - DNA, 15 bp, Homo sapiens
tgacttctgaccact

SEQ ID NO: 891761 - DNA, 15 bp, Homo sapiens
gacttctgaccactg

SEQ ID NO: 891762 - DNA, 15 bp, Homo sapiens
acttctgaccactgc

SEQ ID NO: 891763 - DNA, 15 bp, Homo sapiens
cttctgaccactgct

SEQ ID NO: 891764 - DNA, 15 bp, Homo sapiens
ttctgaccactgctg

SEQ ID NO: 891765 - DNA, 15 bp, Homo sapiens
tctgaccactgctgt

SEQ ID NO: 891766 - DNA, 15 bp, Homo sapiens
ctgaccactgctgtc

SEQ ID NO: 891767 - DNA, 15 bp, Homo sapiens
tgaccactgctgtct

SEQ ID NO: 891768 - DNA, 15 bp, Homo sapiens
gaccactgctgtctc

SEQ ID NO: 891769 - DNA, 15 bp, Homo sapiens
accactgctgtctcc

SEQ ID NO: 891770 - DNA, 15 bp, Homo sapiens
ccactgctgtctcca

SEQ ID NO: 891771 - DNA, 15 bp, Homo sapiens
cactgctgtctccag

SEQ ID NO: 891772 - DNA, 15 bp, Homo sapiens
actgctgtctccagg

SEQ ID NO: 891773 - DNA, 15 bp, Homo sapiens
ctgctgtctccagga

SEQ ID NO: 891774 - DNA, 15 bp, Homo sapiens
tgctgtctccaggag

SEQ ID NO: 891775 - DNA, 15 bp, Homo sapiens
gctgtctccaggagg

SEQ ID NO: 891776 - DNA, 15 bp, Homo sapiens
ctgtctccaggaggc

SEQ ID NO: 891777 - DNA, 15 bp, Homo sapiens
tgtctccaggaggca

SEQ ID NO: 891778 - DNA, 15 bp, Homo sapiens
gtctccaggaggcag

SEQ ID NO: 891779 - DNA, 15 bp, Homo sapiens
tctccaggaggcaga

SEQ ID NO: 891780 - DNA, 15 bp, Homo sapiens
ctccaggaggcagag

SEQ ID NO: 891781 - DNA, 15 bp, Homo sapiens
tccaggaggcagagg

SEQ ID NO: 891782 - DNA, 15 bp, Homo sapiens
ccaggaggcagaggg

SEQ ID NO: 891783 - DNA, 15 bp, Homo sapiens
caggaggcagagggt

SEQ ID NO: 891784 - DNA, 15 bp, Homo sapiens
aggaggcagagggta

SEQ ID NO: 891785 - DNA, 15 bp, Homo sapiens
ggaggcagagggtaa

SEQ ID NO: 891786 - DNA, 15 bp, Homo sapiens
gaggcagagggtaat

SEQ ID NO: 891787 - DNA, 15 bp, Homo sapiens
aggcagagggtaata

SEQ ID NO: 891788 - DNA, 15 bp, Homo sapiens
ggcagagggtaatag

SEQ ID NO: 891789 - DNA, 15 bp, Homo sapiens
gcagagggtaatagc

SEQ ID NO: 891790 - DNA, 15 bp, Homo sapiens
cagagggtaatagct

SEQ ID NO: 891791 - DNA, 15 bp, Homo sapiens
agagggtaatagctg

SEQ ID NO: 891792 - DNA, 15 bp, Homo sapiens
gagggtaatagctgg

SEQ ID NO: 891793 - DNA, 15 bp, Homo sapiens
agggtaatagctggg

SEQ ID NO: 891794 - DNA, 15 bp, Homo sapiens
gggtaatagctgggc

SEQ ID NO: 891795 - DNA, 15 bp, Homo sapiens
ggtaatagctgggca

SEQ ID NO: 891796 - DNA, 15 bp, Homo sapiens
gtaatagctgggcat

SEQ ID NO: 891797 - DNA, 15 bp, Homo sapiens
taatagctgggcatc

SEQ ID NO: 891798 - DNA, 15 bp, Homo sapiens
aatagctgggcatca

SEQ ID NO: 891799 - DNA, 15 bp, Homo sapiens
atagctgggcatcat

SEQ ID NO: 891800 - DNA, 15 bp, Homo sapiens
tagctgggcatcatc

SEQ ID NO: 891801 - DNA, 15 bp, Homo sapiens
agctgggcatcatca

SEQ ID NO: 891802 - DNA, 15 bp, Homo sapiens
gctgggcatcatcag

SEQ ID NO: 891803 - DNA, 15 bp, Homo sapiens
ctgggcatcatcagc

SEQ ID NO: 891804 - DNA, 15 bp, Homo sapiens
tgggcatcatcagcc

SEQ ID NO: 891805 - DNA, 15 bp, Homo sapiens
gggcatcatcagcca

SEQ ID NO: 891806 - DNA, 15 bp, Homo sapiens
ggcatcatcagccag

SEQ ID NO: 891807 - DNA, 15 bp, Homo sapiens
gcatcatcagccagc

SEQ ID NO: 891808 - DNA, 15 bp, Homo sapiens
catcatcagccagcc

SEQ ID NO: 891809 - DNA, 15 bp, Homo sapiens
atcatcagccagcct

SEQ ID NO: 891810 - DNA, 15 bp, Homo sapiens
tcatcagccagcctt

SEQ ID NO: 891811 - DNA, 15 bp, Homo sapiens
catcagccagccttt

SEQ ID NO: 891812 - DNA, 15 bp, Homo sapiens
atcagccagcctttg

SEQ ID NO: 891813 - DNA, 15 bp, Homo sapiens
tcagccagcctttgg

SEQ ID NO: 891814 - DNA, 15 bp, Homo sapiens
cagccagcctttggc

SEQ ID NO: 891815 - DNA, 15 bp, Homo sapiens
agccagcctttggct

SEQ ID NO: 891816 - DNA, 15 bp, Homo sapiens
gccagcctttggctc

SEQ ID NO: 891817 - DNA, 15 bp, Homo sapiens
ccagcctttggctca

SEQ ID NO: 891818 - DNA, 15 bp, Homo sapiens
cagcctttggctcat

SEQ ID NO: 891819 - DNA, 15 bp, Homo sapiens
agcctttggctcatc

SEQ ID NO: 891820 - DNA, 15 bp, Homo sapiens
gcctttggctcatca

SEQ ID NO: 891821 - DNA, 15 bp, Homo sapiens
cctttggctcatcat

SEQ ID NO: 891822 - DNA, 15 bp, Homo sapiens
ctttggctcatcatt

SEQ ID NO: 891823 - DNA, 15 bp, Homo sapiens
tttggctcatcattc

SEQ ID NO: 891824 - DNA, 15 bp, Homo sapiens
ttggctcatcattct

SEQ ID NO: 891825 - DNA, 15 bp, Homo sapiens
tggctcatcattctt

SEQ ID NO: 891826 - DNA, 15 bp, Homo sapiens
ggctcatcattcttg

SEQ ID NO: 891827 - DNA, 15 bp, Homo sapiens
gctcatcattcttgc

SEQ ID NO: 891828 - DNA, 15 bp, Homo sapiens
ctcatcattcttgcc

SEQ ID NO: 891829 - DNA, 15 bp, Homo sapiens
tcatcattcttgcca

SEQ ID NO: 891830 - DNA, 15 bp, Homo sapiens
catcattcttgccaa

SEQ ID NO: 891831 - DNA, 15 bp, Homo sapiens
atcattcttgccaag

SEQ ID NO: 891832 - DNA, 15 bp, Homo sapiens
tcattcttgccaaga

SEQ ID NO: 891833 - DNA, 15 bp, Homo sapiens
cattcttgccaagag

SEQ ID NO: 891834 - DNA, 15 bp, Homo sapiens
attcttgccaagagc

SEQ ID NO: 891835 - DNA, 15 bp, Homo sapiens
ttcttgccaagagct

SEQ ID NO: 891836 - DNA, 15 bp, Homo sapiens
tcttgccaagagctt

SEQ ID NO: 891837 - DNA, 15 bp, Homo sapiens
cttgccaagagcttc

SEQ ID NO: 891838 - DNA, 15 bp, Homo sapiens
ttgccaagagcttcc

SEQ ID NO: 891839 - DNA, 15 bp, Homo sapiens
tgccaagagcttcct

SEQ ID NO: 891840 - DNA, 15 bp, Homo sapiens
gccaagagcttcctg

SEQ ID NO: 891841 - DNA, 15 bp, Homo sapiens
ccaagagcttcctga

SEQ ID NO: 891842 - DNA, 15 bp, Homo sapiens
caagagcttcctgaa

SEQ ID NO: 891843 - DNA, 15 bp, Homo sapiens
aagagcttcctgaag

SEQ ID NO: 891844 - DNA, 15 bp, Homo sapiens
agagcttcctgaaga

SEQ ID NO: 891845 - DNA, 15 bp, Homo sapiens
gagcttcctgaagag

SEQ ID NO: 891846 - DNA, 15 bp, Homo sapiens
agcttcctgaagagc

SEQ ID NO: 891847 - DNA, 15 bp, Homo sapiens
gcttcctgaagagca

SEQ ID NO: 891848 - DNA, 15 bp, Homo sapiens
cttcctgaagagcat

SEQ ID NO: 891849 - DNA, 15 bp, Homo sapiens
ttcctgaagagcatt

SEQ ID NO: 891850 - DNA, 15 bp, Homo sapiens
tcctgaagagcattc

SEQ ID NO: 891851 - DNA, 15 bp, Homo sapiens
cctgaagagcattcc

SEQ ID NO: 891852 - DNA, 15 bp, Homo sapiens
ctgaagagcattcct

SEQ ID NO: 891853 - DNA, 15 bp, Homo sapiens
tgaagagcattcctt

SEQ ID NO: 891854 - DNA, 15 bp, Homo sapiens
gaagagcattccttc

SEQ ID NO: 891855 - DNA, 15 bp, Homo sapiens
aagagcattccttct

SEQ ID NO: 891856 - DNA, 15 bp, Homo sapiens
agagcattccttctc

SEQ ID NO: 891857 - DNA, 15 bp, Homo sapiens
gagcattccttctcc

SEQ ID NO: 891858 - DNA, 15 bp, Homo sapiens
agcattccttctcca

SEQ ID NO: 891859 - DNA, 15 bp, Homo sapiens
gcattccttctccag

SEQ ID NO: 891860 - DNA, 15 bp, Homo sapiens
cattccttctccaga

SEQ ID NO: 891861 - DNA, 15 bp, Homo sapiens
attccttctccagaa

SEQ ID NO: 891862 - DNA, 15 bp, Homo sapiens
ttccttctccagaaa

SEQ ID NO: 891863 - DNA, 15 bp, Homo sapiens
tccttctccagaaag

SEQ ID NO: 891864 - DNA, 15 bp, Homo sapiens
ccttctccagaaaga

SEQ ID NO: 891865 - DNA, 15 bp, Homo sapiens
cttctccagaaagaa

SEQ ID NO: 891866 - DNA, 15 bp, Homo sapiens
ttctccagaaagaaa

SEQ ID NO: 891867 - DNA, 15 bp, Homo sapiens
tctccagaaagaaag

SEQ ID NO: 891868 - DNA, 15 bp, Homo sapiens
ctccagaaagaaagt

SEQ ID NO: 891869 - DNA, 15 bp, Homo sapiens
tccagaaagaaagta

SEQ ID NO: 891870 - DNA, 15 bp, Homo sapiens
ccagaaagaaagtag

SEQ ID NO: 891871 - DNA, 15 bp, Homo sapiens
cagaaagaaagtaga

SEQ ID NO: 891872 - DNA, 15 bp, Homo sapiens
agaaagaaagtagaa

SEQ ID NO: 891873 - DNA, 15 bp, Homo sapiens
gaaagaaagtagaag

SEQ ID NO: 891874 - DNA, 15 bp, Homo sapiens
aaagaaagtagaagc

SEQ ID NO: 891875 - DNA, 15 bp, Homo sapiens
aagaaagtagaagct

SEQ ID NO: 891876 - DNA, 15 bp, Homo sapiens
agaaagtagaagcta

SEQ ID NO: 891877 - DNA, 15 bp, Homo sapiens
gaaagtagaagctac

SEQ ID NO: 891878 - DNA, 15 bp, Homo sapiens
aaagtagaagctact

SEQ ID NO: 891879 - DNA, 15 bp, Homo sapiens
aagtagaagctactt

SEQ ID NO: 891880 - DNA, 15 bp, Homo sapiens
agtagaagctactta

SEQ ID NO: 891881 - DNA, 15 bp, Homo sapiens
gtagaagctacttaa

SEQ ID NO: 891882 - DNA, 15 bp, Homo sapiens
tagaagctacttaaa

SEQ ID NO: 891883 - DNA, 15 bp, Homo sapiens
agaagctacttaaaa

SEQ ID NO: 891884 - DNA, 15 bp, Homo sapiens
gaagctacttaaaag

SEQ ID NO: 891885 - DNA, 15 bp, Homo sapiens
aagctacttaaaaga

SEQ ID NO: 891886 - DNA, 15 bp, Homo sapiens
agctacttaaaagag

SEQ ID NO: 891887 - DNA, 15 bp, Homo sapiens
gctacttaaaagaga

SEQ ID NO: 891888 - DNA, 15 bp, Homo sapiens
ctacttaaaagagaa

SEQ ID NO: 891889 - DNA, 15 bp, Homo sapiens
tacttaaaagagaag

SEQ ID NO: 891890 - DNA, 15 bp, Homo sapiens
acttaaaagagaaga

SEQ ID NO: 891891 - DNA, 15 bp, Homo sapiens
cttaaaagagaagaa

SEQ ID NO: 891892 - DNA, 15 bp, Homo sapiens
ttaaaagagaagaat

SEQ ID NO: 891893 - DNA, 15 bp, Homo sapiens
taaaagagaagaata

SEQ ID NO: 891894 - DNA, 15 bp, Homo sapiens
aaaagagaagaataa

SEQ ID NO: 891895 - DNA, 15 bp, Homo sapiens
aaagagaagaataaa

SEQ ID NO: 891896 - DNA, 15 bp, Homo sapiens
aagagaagaataaaa

SEQ ID NO: 891897 - DNA, 15 bp, Homo sapiens
agagaagaataaaac

SEQ ID NO: 891898 - DNA, 15 bp, Homo sapiens
gagaagaataaaacc

SEQ ID NO: 891899 - DNA, 15 bp, Homo sapiens
agaagaataaaaccc

SEQ ID NO: 891900 - DNA, 15 bp, Homo sapiens
gaagaataaaaccct

SEQ ID NO: 891901 - DNA, 15 bp, Homo sapiens
aagaataaaaccctc

SEQ ID NO: 891902 - DNA, 15 bp, Homo sapiens
agaataaaaccctca

SEQ ID NO: 891903 - DNA, 15 bp, Homo sapiens
gaataaaaccctcaa

SEQ ID NO: 891904 - DNA, 15 bp, Homo sapiens
aataaaaccctcaaa

SEQ ID NO: 891905 - DNA, 15 bp, Homo sapiens
ataaaaccctcaaaa

SEQ ID NO: 891906 - DNA, 15 bp, Homo sapiens
taaaaccctcaaaag

SEQ ID NO: 891907 - DNA, 15 bp, Homo sapiens
aaaaccctcaaaagt

SEQ ID NO: 891908 - DNA, 15 bp, Homo sapiens
aaaccctcaaaagtc

SEQ ID NO: 891909 - DNA, 15 bp, Homo sapiens
aaccctcaaaagtct

SEQ ID NO: 891910 - DNA, 15 bp, Homo sapiens
accctcaaaagtctt

SEQ ID NO: 891911 - DNA, 15 bp, Homo sapiens
ccctcaaaagtcttc

SEQ ID NO: 891912 - DNA, 15 bp, Homo sapiens
cctcaaaagtcttcc

SEQ ID NO: 891913 - DNA, 15 bp, Homo sapiens
ctcaaaagtcttcct

SEQ ID NO: 891914 - DNA, 15 bp, Homo sapiens
tcaaaagtcttcctc

SEQ ID NO: 891915 - DNA, 15 bp, Homo sapiens
caaaagtcttcctcc

SEQ ID NO: 891916 - DNA, 15 bp, Homo sapiens
aaaagtcttcctcct

SEQ ID NO: 891917 - DNA, 15 bp, Homo sapiens
aaagtcttcctcctg

SEQ ID NO: 891918 - DNA, 15 bp, Homo sapiens
aagtcttcctcctgc

SEQ ID NO: 891919 - DNA, 15 bp, Homo sapiens
agtcttcctcctgca

SEQ ID NO: 891920 - DNA, 15 bp, Homo sapiens
gtcttcctcctgcag

SEQ ID NO: 891921 - DNA, 15 bp, Homo sapiens
tcttcctcctgcagg

SEQ ID NO: 891922 - DNA, 15 bp, Homo sapiens
cttcctcctgcagga

SEQ ID NO: 891923 - DNA, 15 bp, Homo sapiens
ttcctcctgcaggat

SEQ ID NO: 891924 - DNA, 15 bp, Homo sapiens
tcctcctgcaggatg

SEQ ID NO: 891925 - DNA, 15 bp, Homo sapiens
cctcctgcaggatgt

SEQ ID NO: 891926 - DNA, 15 bp, Homo sapiens
ctcctgcaggatgtt

SEQ ID NO: 891927 - DNA, 15 bp, Homo sapiens
tcctgcaggatgttg

SEQ ID NO: 891928 - DNA, 15 bp, Homo sapiens
cctgcaggatgttgg

SEQ ID NO: 891929 - DNA, 15 bp, Homo sapiens
ctgcaggatgttggc

SEQ ID NO: 891930 - DNA, 15 bp, Homo sapiens
tgcaggatgttggca

SEQ ID NO: 891931 - DNA, 15 bp, Homo sapiens
gcaggatgttggcat

SEQ ID NO: 891932 - DNA, 15 bp, Homo sapiens
caggatgttggcatg

SEQ ID NO: 891933 - DNA, 15 bp, Homo sapiens
aggatgttggcatgc

SEQ ID NO: 891934 - DNA, 15 bp, Homo sapiens
ggatgttggcatgcc

SEQ ID NO: 891935 - DNA, 15 bp, Homo sapiens
gatgttggcatgcca

SEQ ID NO: 891936 - DNA, 15 bp, Homo sapiens
atgttggcatgccat

SEQ ID NO: 891937 - DNA, 15 bp, Homo sapiens
tgttggcatgccatc

SEQ ID NO: 891938 - DNA, 15 bp, Homo sapiens
gttggcatgccatct

SEQ ID NO: 891939 - DNA, 15 bp, Homo sapiens
ttggcatgccatctc

SEQ ID NO: 891940 - DNA, 15 bp, Homo sapiens
tggcatgccatctct

SEQ ID NO: 891941 - DNA, 15 bp, Homo sapiens
ggcatgccatctctt

SEQ ID NO: 891942 - DNA, 15 bp, Homo sapiens
gcatgccatctcttc

SEQ ID NO: 891943 - DNA, 15 bp, Homo sapiens
catgccatctcttct

SEQ ID NO: 891944 - DNA, 15 bp, Homo sapiens
atgccatctcttctt

SEQ ID NO: 891945 - DNA, 15 bp, Homo sapiens
tgccatctcttcttc

SEQ ID NO: 891946 - DNA, 15 bp, Homo sapiens
gccatctcttcttcc

SEQ ID NO: 891947 - DNA, 15 bp, Homo sapiens
ccatctcttcttcct

SEQ ID NO: 891948 - DNA, 15 bp, Homo sapiens
catctcttcttcctt

SEQ ID NO: 891949 - DNA, 15 bp, Homo sapiens
atctcttcttccttt

SEQ ID NO: 891950 - DNA, 15 bp, Homo sapiens
tctcttcttcctttg

SEQ ID NO: 891951 - DNA, 15 bp, Homo sapiens
ctcttcttcctttgt

SEQ ID NO: 891952 - DNA, 15 bp, Homo sapiens
tcttcttcctttgtg

SEQ ID NO: 891953 - DNA, 15 bp, Homo sapiens
cttcttcctttgtgg

SEQ ID NO: 891954 - DNA, 15 bp, Homo sapiens
ttcttcctttgtggg

SEQ ID NO: 891955 - DNA, 15 bp, Homo sapiens
tcttcctttgtggga

SEQ ID NO: 891956 - DNA, 15 bp, Homo sapiens
cttcctttgtgggag

SEQ ID NO: 891957 - DNA, 15 bp, Homo sapiens
ttcctttgtgggagc

SEQ ID NO: 891958 - DNA, 15 bp, Homo sapiens
tcctttgtgggagct

SEQ ID NO: 891959 - DNA, 15 bp, Homo sapiens
cctttgtgggagctg

SEQ ID NO: 891960 - DNA, 15 bp, Homo sapiens
ctttgtgggagctgt

SEQ ID NO: 891961 - DNA, 15 bp, Homo sapiens
tttgtgggagctgtg

SEQ ID NO: 891962 - DNA, 15 bp, Homo sapiens
ttgtgggagctgtgg

SEQ ID NO: 891963 - DNA, 15 bp, Homo sapiens
tgtgggagctgtgga

SEQ ID NO: 891964 - DNA, 15 bp, Homo sapiens
gtgggagctgtggag

SEQ ID NO: 891965 - DNA, 15 bp, Homo sapiens
tgggagctgtggaga

SEQ ID NO: 891966 - DNA, 15 bp, Homo sapiens
gggagctgtggagat

SEQ ID NO: 891967 - DNA, 15 bp, Homo sapiens
ggagctgtggagatc

SEQ ID NO: 891968 - DNA, 15 bp, Homo sapiens
gagctgtggagatca

SEQ ID NO: 891969 - DNA, 15 bp, Homo sapiens
agctgtggagatcag

SEQ ID NO: 891970 - DNA, 15 bp, Homo sapiens
gctgtggagatcagc

SEQ ID NO: 891971 - DNA, 15 bp, Homo sapiens
ctgtggagatcagca

SEQ ID NO: 891972 - DNA, 15 bp, Homo sapiens
tgtggagatcagcac

SEQ ID NO: 891973 - DNA, 15 bp, Homo sapiens
gtggagatcagcaca

SEQ ID NO: 891974 - DNA, 15 bp, Homo sapiens
tggagatcagcacac

SEQ ID NO: 891975 - DNA, 15 bp, Homo sapiens
ggagatcagcacaca

SEQ ID NO: 891976 - DNA, 15 bp, Homo sapiens
gagatcagcacacag

SEQ ID NO: 891977 - DNA, 15 bp, Homo sapiens
agatcagcacacagg

SEQ ID NO: 891978 - DNA, 15 bp, Homo sapiens
gatcagcacacaggg

SEQ ID NO: 891979 - DNA, 15 bp, Homo sapiens
atcagcacacaggga

SEQ ID NO: 891980 - DNA, 15 bp, Homo sapiens
tcagcacacagggac

SEQ ID NO: 891981 - DNA, 15 bp, Homo sapiens
cagcacacagggact

SEQ ID NO: 891982 - DNA, 15 bp, Homo sapiens
agcacacagggactg

SEQ ID NO: 891983 - DNA, 15 bp, Homo sapiens
gcacacagggactgc

SEQ ID NO: 891984 - DNA, 15 bp, Homo sapiens
cacacagggactgct

SEQ ID NO: 891985 - DNA, 15 bp, Homo sapiens
acacagggactgctt

SEQ ID NO: 891986 - DNA, 15 bp, Homo sapiens
cacagggactgcttc

SEQ ID NO: 891987 - DNA, 15 bp, Homo sapiens
acagggactgcttct

SEQ ID NO: 891988 - DNA, 15 bp, Homo sapiens
cagggactgcttctc

SEQ ID NO: 891989 - DNA, 15 bp, Homo sapiens
agggactgcttctct

SEQ ID NO: 891990 - DNA, 15 bp, Homo sapiens
gggactgcttctctg

SEQ ID NO: 891991 - DNA, 15 bp, Homo sapiens
ggactgcttctctgg

SEQ ID NO: 891992 - DNA, 15 bp, Homo sapiens
gactgcttctctggg

SEQ ID NO: 891993 - DNA, 15 bp, Homo sapiens
actgcttctctgggg

SEQ ID NO: 891994 - DNA, 15 bp, Homo sapiens
ctgcttctctggggg

SEQ ID NO: 891995 - DNA, 15 bp, Homo sapiens
tgcttctctgggggg

SEQ ID NO: 891996 - DNA, 15 bp, Homo sapiens
gcttctctggggggc

SEQ ID NO: 891997 - DNA, 15 bp, Homo sapiens
cttctctggggggct

SEQ ID NO: 891998 - DNA, 15 bp, Homo sapiens
ttctctggggggctg

SEQ ID NO: 891999 - DNA, 15 bp, Homo sapiens
tctctggggggctgg

SEQ ID NO: 892000 - DNA, 15 bp, Homo sapiens
ctctggggggctgga

SEQ ID NO: 892001 - DNA, 15 bp, Homo sapiens
tctggggggctggag

SEQ ID NO: 892002 - DNA, 15 bp, Homo sapiens
ctggggggctggagg

SEQ ID NO: 892003 - DNA, 15 bp, Homo sapiens
tggggggctggaggc

SEQ ID NO: 892004 - DNA, 15 bp, Homo sapiens
ggggggctggaggcc

SEQ ID NO: 892005 - DNA, 15 bp, Homo sapiens
gggggctggaggcca

SEQ ID NO: 892006 - DNA, 15 bp, Homo sapiens
ggggctggaggccat

SEQ ID NO: 892007 - DNA, 15 bp, Homo sapiens
gggctggaggccatt

SEQ ID NO: 892008 - DNA, 15 bp, Homo sapiens
ggctggaggccattg

SEQ ID NO: 892009 - DNA, 15 bp, Homo sapiens
gctggaggccattgc

SEQ ID NO: 892010 - DNA, 15 bp, Homo sapiens
ctggaggccattgcc

SEQ ID NO: 892011 - DNA, 15 bp, Homo sapiens
tggaggccattgcct

SEQ ID NO: 892012 - DNA, 15 bp, Homo sapiens
ggaggccattgccta

SEQ ID NO: 892013 - DNA, 15 bp, Homo sapiens
gaggccattgcctaa

SEQ ID NO: 892014 - DNA, 15 bp, Homo sapiens
aggccattgcctaag

SEQ ID NO: 892015 - DNA, 15 bp, Homo sapiens
ggccattgcctaaga

SEQ ID NO: 892016 - DNA, 15 bp, Homo sapiens
gccattgcctaagag

SEQ ID NO: 892017 - DNA, 15 bp, Homo sapiens
ccattgcctaagagg

SEQ ID NO: 892018 - DNA, 15 bp, Homo sapiens
cattgcctaagagga

SEQ ID NO: 892019 - DNA, 15 bp, Homo sapiens
attgcctaagaggag

SEQ ID NO: 892020 - DNA, 15 bp, Homo sapiens
ttgcctaagaggaga

SEQ ID NO: 892021 - DNA, 15 bp, Homo sapiens
tgcctaagaggagac

SEQ ID NO: 892022 - DNA, 15 bp, Homo sapiens
gcctaagaggagaca

SEQ ID NO: 892023 - DNA, 15 bp, Homo sapiens
cctaagaggagacat

SEQ ID NO: 892024 - DNA, 15 bp, Homo sapiens
ctaagaggagacatc

SEQ ID NO: 892025 - DNA, 15 bp, Homo sapiens
taagaggagacatcc

SEQ ID NO: 892026 - DNA, 15 bp, Homo sapiens
aagaggagacatccg

SEQ ID NO: 892027 - DNA, 15 bp, Homo sapiens
agaggagacatccgg

SEQ ID NO: 892028 - DNA, 15 bp, Homo sapiens
gaggagacatccggg

SEQ ID NO: 892029 - DNA, 15 bp, Homo sapiens
aggagacatccggga

SEQ ID NO: 892030 - DNA, 15 bp, Homo sapiens
ggagacatccgggag

SEQ ID NO: 892031 - DNA, 15 bp, Homo sapiens
gagacatccgggagc

SEQ ID NO: 892032 - DNA, 15 bp, Homo sapiens
agacatccgggagcc

SEQ ID NO: 892033 - DNA, 15 bp, Homo sapiens
gacatccgggagcct

SEQ ID NO: 892034 - DNA, 15 bp, Homo sapiens
acatccgggagcctg

SEQ ID NO: 892035 - DNA, 15 bp, Homo sapiens
catccgggagcctgg

SEQ ID NO: 892036 - DNA, 15 bp, Homo sapiens
atccgggagcctggg

SEQ ID NO: 892037 - DNA, 15 bp, Homo sapiens
tccgggagcctggga

SEQ ID NO: 892038 - DNA, 15 bp, Homo sapiens
ccgggagcctgggag

SEQ ID NO: 892039 - DNA, 15 bp, Homo sapiens
cgggagcctgggagg

SEQ ID NO: 892040 - DNA, 15 bp, Homo sapiens
gggagcctgggagga

SEQ ID NO: 892041 - DNA, 15 bp, Homo sapiens
ggagcctgggaggag

SEQ ID NO: 892042 - DNA, 15 bp, Homo sapiens
gagcctgggaggagg

SEQ ID NO: 892043 - DNA, 15 bp, Homo sapiens
agcctgggaggaggt

SEQ ID NO: 892044 - DNA, 15 bp, Homo sapiens
gcctgggaggaggtg

SEQ ID NO: 892045 - DNA, 15 bp, Homo sapiens
cctgggaggaggtgg

SEQ ID NO: 892046 - DNA, 15 bp, Homo sapiens
ctgggaggaggtggt

SEQ ID NO: 892047 - DNA, 15 bp, Homo sapiens
tgggaggaggtggtg

SEQ ID NO: 892048 - DNA, 15 bp, Homo sapiens
gggaggaggtggtga

SEQ ID NO: 892049 - DNA, 15 bp, Homo sapiens
ggaggaggtggtgaa

SEQ ID NO: 892050 - DNA, 15 bp, Homo sapiens
gaggaggtggtgaaa

SEQ ID NO: 892051 - DNA, 15 bp, Homo sapiens
aggaggtggtgaaaa

SEQ ID NO: 892052 - DNA, 15 bp, Homo sapiens
ggaggtggtgaaaac

SEQ ID NO: 892053 - DNA, 15 bp, Homo sapiens
gaggtggtgaaaaca

SEQ ID NO: 892054 - DNA, 15 bp, Homo sapiens
aggtggtgaaaacag

SEQ ID NO: 892055 - DNA, 15 bp, Homo sapiens
ggtggtgaaaacagc

SEQ ID NO: 892056 - DNA, 15 bp, Homo sapiens
gtggtgaaaacagcc

SEQ ID NO: 892057 - DNA, 15 bp, Homo sapiens
tggtgaaaacagcct

SEQ ID NO: 892058 - DNA, 15 bp, Homo sapiens
ggtgaaaacagcctt

SEQ ID NO: 892059 - DNA, 15 bp, Homo sapiens
gtgaaaacagccttc

SEQ ID NO: 892060 - DNA, 15 bp, Homo sapiens
tgaaaacagccttct

SEQ ID NO: 892061 - DNA, 15 bp, Homo sapiens
gaaaacagccttcta

SEQ ID NO: 892062 - DNA, 15 bp, Homo sapiens
aaaacagccttctat

SEQ ID NO: 892063 - DNA, 15 bp, Homo sapiens
aaacagccttctatt

SEQ ID NO: 892064 - DNA, 15 bp, Homo sapiens
aacagccttctattt

SEQ ID NO: 892065 - DNA, 15 bp, Homo sapiens
acagccttctatttc

SEQ ID NO: 892066 - DNA, 15 bp, Homo sapiens
cagccttctatttca

SEQ ID NO: 892067 - DNA, 15 bp, Homo sapiens
agccttctatttcag

SEQ ID NO: 892068 - DNA, 15 bp, Homo sapiens
gccttctatttcaga

SEQ ID NO: 892069 - DNA, 15 bp, Homo sapiens
ccttctatttcagac

SEQ ID NO: 892070 - DNA, 15 bp, Homo sapiens
cttctatttcagacc

SEQ ID NO: 892071 - DNA, 15 bp, Homo sapiens
ttctatttcagaccc

SEQ ID NO: 892072 - DNA, 15 bp, Homo sapiens
tctatttcagaccca

SEQ ID NO: 892073 - DNA, 15 bp, Homo sapiens
ctatttcagacccaa

SEQ ID NO: 892074 - DNA, 15 bp, Homo sapiens
tatttcagacccaag

SEQ ID NO: 892075 - DNA, 15 bp, Homo sapiens
atttcagacccaaga

SEQ ID NO: 892076 - DNA, 15 bp, Homo sapiens
tttcagacccaagaa

SEQ ID NO: 892077 - DNA, 15 bp, Homo sapiens
ttcagacccaagaaa

SEQ ID NO: 892078 - DNA, 15 bp, Homo sapiens
tcagacccaagaaac

SEQ ID NO: 892079 - DNA, 15 bp, Homo sapiens
cagacccaagaaacc

SEQ ID NO: 892080 - DNA, 15 bp, Homo sapiens
agacccaagaaacca

SEQ ID NO: 892081 - DNA, 15 bp, Homo sapiens
gacccaagaaaccag

SEQ ID NO: 892082 - DNA, 15 bp, Homo sapiens
acccaagaaaccagg

SEQ ID NO: 892083 - DNA, 15 bp, Homo sapiens
cccaagaaaccagga

SEQ ID NO: 892084 - DNA, 15 bp, Homo sapiens
ccaagaaaccaggat

SEQ ID NO: 892085 - DNA, 15 bp, Homo sapiens
caagaaaccaggatt

SEQ ID NO: 892086 - DNA, 15 bp, Homo sapiens
aagaaaccaggattt

SEQ ID NO: 892087 - DNA, 15 bp, Homo sapiens
agaaaccaggattta

SEQ ID NO: 892088 - DNA, 15 bp, Homo sapiens
gaaaccaggatttat

SEQ ID NO: 892089 - DNA, 15 bp, Homo sapiens
aaaccaggatttatt

SEQ ID NO: 892090 - DNA, 15 bp, Homo sapiens
aaccaggatttattg

SEQ ID NO: 892091 - DNA, 15 bp, Homo sapiens
accaggatttattgc

SEQ ID NO: 892092 - DNA, 15 bp, Homo sapiens
ccaggatttattgct

SEQ ID NO: 892093 - DNA, 15 bp, Homo sapiens
caggatttattgctc

SEQ ID NO: 892094 - DNA, 15 bp, Homo sapiens
aggatttattgctct

SEQ ID NO: 892095 - DNA, 15 bp, Homo sapiens
ggatttattgctctc

SEQ ID NO: 892096 - DNA, 15 bp, Homo sapiens
gatttattgctctct

SEQ ID NO: 892097 - DNA, 15 bp, Homo sapiens
atttattgctctctc

SEQ ID NO: 892098 - DNA, 15 bp, Homo sapiens
tttattgctctctct

SEQ ID NO: 892099 - DNA, 15 bp, Homo sapiens
ttattgctctctctg

SEQ ID NO: 892100 - DNA, 15 bp, Homo sapiens
tattgctctctctga

SEQ ID NO: 892101 - DNA, 15 bp, Homo sapiens
attgctctctctgag

SEQ ID NO: 892102 - DNA, 15 bp, Homo sapiens
ttgctctctctgaga

SEQ ID NO: 892103 - DNA, 15 bp, Homo sapiens
tgctctctctgagac

SEQ ID NO: 892104 - DNA, 15 bp, Homo sapiens
gctctctctgagaca

SEQ ID NO: 892105 - DNA, 15 bp, Homo sapiens
ctctctctgagacag

SEQ ID NO: 892106 - DNA, 15 bp, Homo sapiens
tctctctgagacagg

SEQ ID NO: 892107 - DNA, 15 bp, Homo sapiens
ctctctgagacaggc

SEQ ID NO: 892108 - DNA, 15 bp, Homo sapiens
tctctgagacaggct

SEQ ID NO: 892109 - DNA, 15 bp, Homo sapiens
ctctgagacaggctg

SEQ ID NO: 892110 - DNA, 15 bp, Homo sapiens
tctgagacaggctgg

SEQ ID NO: 892111 - DNA, 15 bp, Homo sapiens
ctgagacaggctgga

SEQ ID NO: 892112 - DNA, 15 bp, Homo sapiens
tgagacaggctggag

SEQ ID NO: 892113 - DNA, 15 bp, Homo sapiens
gagacaggctggagg

SEQ ID NO: 892114 - DNA, 15 bp, Homo sapiens
agacaggctggaggc

SEQ ID NO: 892115 - DNA, 15 bp, Homo sapiens
gacaggctggaggca

SEQ ID NO: 892116 - DNA, 15 bp, Homo sapiens
acaggctggaggcaa

SEQ ID NO: 892117 - DNA, 15 bp, Homo sapiens
caggctggaggcaag

SEQ ID NO: 892118 - DNA, 15 bp, Homo sapiens
aggctggaggcaagc

SEQ ID NO: 892119 - DNA, 15 bp, Homo sapiens
ggctggaggcaagcc

SEQ ID NO: 892120 - DNA, 15 bp, Homo sapiens
gctggaggcaagcct

SEQ ID NO: 892121 - DNA, 15 bp, Homo sapiens
ctggaggcaagcctg

SEQ ID NO: 892122 - DNA, 15 bp, Homo sapiens
tggaggcaagcctgg

SEQ ID NO: 892123 - DNA, 15 bp, Homo sapiens
ggaggcaagcctggg

SEQ ID NO: 892124 - DNA, 15 bp, Homo sapiens
gaggcaagcctgggt

SEQ ID NO: 892125 - DNA, 15 bp, Homo sapiens
aggcaagcctgggtg

SEQ ID NO: 892126 - DNA, 15 bp, Homo sapiens
ggcaagcctgggtgc

SEQ ID NO: 892127 - DNA, 15 bp, Homo sapiens
gcaagcctgggtgcc

SEQ ID NO: 892128 - DNA, 15 bp, Homo sapiens
caagcctgggtgcct

SEQ ID NO: 892129 - DNA, 15 bp, Homo sapiens
aagcctgggtgcctt

SEQ ID NO: 892130 - DNA, 15 bp, Homo sapiens
agcctgggtgccttg

SEQ ID NO: 892131 - DNA, 15 bp, Homo sapiens
gcctgggtgccttgc

SEQ ID NO: 892132 - DNA, 15 bp, Homo sapiens
cctgggtgccttgct

SEQ ID NO: 892133 - DNA, 15 bp, Homo sapiens
ctgggtgccttgctg

SEQ ID NO: 892134 - DNA, 15 bp, Homo sapiens
tgggtgccttgctgg

SEQ ID NO: 892135 - DNA, 15 bp, Homo sapiens
gggtgccttgctggc

SEQ ID NO: 892136 - DNA, 15 bp, Homo sapiens
ggtgccttgctggct

SEQ ID NO: 892137 - DNA, 15 bp, Homo sapiens
gtgccttgctggcta

SEQ ID NO: 892138 - DNA, 15 bp, Homo sapiens
tgccttgctggctaa

SEQ ID NO: 892139 - DNA, 15 bp, Homo sapiens
gccttgctggctaac

SEQ ID NO: 892140 - DNA, 15 bp, Homo sapiens
ccttgctggctaacc

SEQ ID NO: 892141 - DNA, 15 bp, Homo sapiens
cttgctggctaaccc

SEQ ID NO: 892142 - DNA, 15 bp, Homo sapiens
ttgctggctaacccc

SEQ ID NO: 892143 - DNA, 15 bp, Homo sapiens
tgctggctaacccct

SEQ ID NO: 892144 - DNA, 15 bp, Homo sapiens
gctggctaacccctg

SEQ ID NO: 892145 - DNA, 15 bp, Homo sapiens
ctggctaacccctgg

SEQ ID NO: 892146 - DNA, 15 bp, Homo sapiens
tggctaacccctggg

SEQ ID NO: 892147 - DNA, 15 bp, Homo sapiens
ggctaacccctgggg

SEQ ID NO: 892148 - DNA, 15 bp, Homo sapiens
gctaacccctggggc

SEQ ID NO: 892149 - DNA, 15 bp, Homo sapiens
ctaacccctggggct

SEQ ID NO: 892150 - DNA, 15 bp, Homo sapiens
taacccctggggctg

SEQ ID NO: 892151 - DNA, 15 bp, Homo sapiens
aacccctggggctgg

SEQ ID NO: 892152 - DNA, 15 bp, Homo sapiens
acccctggggctggt

SEQ ID NO: 892153 - DNA, 15 bp, Homo sapiens
cccctggggctggtg

SEQ ID NO: 892154 - DNA, 15 bp, Homo sapiens
ccctggggctggtga

SEQ ID NO: 892155 - DNA, 15 bp, Homo sapiens
cctggggctggtgaa

SEQ ID NO: 892156 - DNA, 15 bp, Homo sapiens
ctggggctggtgaac

SEQ ID NO: 892157 - DNA, 15 bp, Homo sapiens
tggggctggtgaaca

SEQ ID NO: 892158 - DNA, 15 bp, Homo sapiens
ggggctggtgaacat

SEQ ID NO: 892159 - DNA, 15 bp, Homo sapiens
gggctggtgaacatc

SEQ ID NO: 892160 - DNA, 15 bp, Homo sapiens
ggctggtgaacatcg

SEQ ID NO: 892161 - DNA, 15 bp, Homo sapiens
gctggtgaacatcgg

SEQ ID NO: 892162 - DNA, 15 bp, Homo sapiens
ctggtgaacatcggg

SEQ ID NO: 892163 - DNA, 15 bp, Homo sapiens
tggtgaacatcgggt

SEQ ID NO: 892164 - DNA, 15 bp, Homo sapiens
ggtgaacatcgggtg

SEQ ID NO: 892165 - DNA, 15 bp, Homo sapiens
gtgaacatcgggtgg

SEQ ID NO: 892166 - DNA, 15 bp, Homo sapiens
tgaacatcgggtgga

SEQ ID NO: 892167 - DNA, 15 bp, Homo sapiens
gaacatcgggtggag

SEQ ID NO: 892168 - DNA, 15 bp, Homo sapiens
aacatcgggtggagg

SEQ ID NO: 892169 - DNA, 15 bp, Homo sapiens
acatcgggtggaggg

SEQ ID NO: 892170 - DNA, 15 bp, Homo sapiens
catcgggtggaggga

SEQ ID NO: 892171 - DNA, 15 bp, Homo sapiens
atcgggtggagggag

SEQ ID NO: 892172 - DNA, 15 bp, Homo sapiens
tcgggtggagggagg

SEQ ID NO: 892173 - DNA, 15 bp, Homo sapiens
cgggtggagggaggg

SEQ ID NO: 892174 - DNA, 15 bp, Homo sapiens
gggtggagggagggg

SEQ ID NO: 892175 - DNA, 15 bp, Homo sapiens
ggtggagggaggggc

SEQ ID NO: 892176 - DNA, 15 bp, Homo sapiens
gtggagggaggggct

SEQ ID NO: 892177 - DNA, 15 bp, Homo sapiens
tggagggaggggcta

SEQ ID NO: 892178 - DNA, 15 bp, Homo sapiens
ggagggaggggctaa

SEQ ID NO: 892179 - DNA, 15 bp, Homo sapiens
gagggaggggctaag

SEQ ID NO: 892180 - DNA, 15 bp, Homo sapiens
agggaggggctaaga

SEQ ID NO: 892181 - DNA, 15 bp, Homo sapiens
gggaggggctaagat

SEQ ID NO: 892182 - DNA, 15 bp, Homo sapiens
ggaggggctaagatt

SEQ ID NO: 892183 - DNA, 15 bp, Homo sapiens
gaggggctaagattg

SEQ ID NO: 892184 - DNA, 15 bp, Homo sapiens
aggggctaagattgg

SEQ ID NO: 892185 - DNA, 15 bp, Homo sapiens
ggggctaagattgga

SEQ ID NO: 892186 - DNA, 15 bp, Homo sapiens
gggctaagattggac

SEQ ID NO: 892187 - DNA, 15 bp, Homo sapiens
ggctaagattggact

SEQ ID NO: 892188 - DNA, 15 bp, Homo sapiens
gctaagattggactc

SEQ ID NO: 892189 - DNA, 15 bp, Homo sapiens
ctaagattggactca

SEQ ID NO: 892190 - DNA, 15 bp, Homo sapiens
taagattggactcag

SEQ ID NO: 892191 - DNA, 15 bp, Homo sapiens
aagattggactcagc

SEQ ID NO: 892192 - DNA, 15 bp, Homo sapiens
agattggactcagcc

SEQ ID NO: 892193 - DNA, 15 bp, Homo sapiens
gattggactcagcct

SEQ ID NO: 892194 - DNA, 15 bp, Homo sapiens
attggactcagcctg

SEQ ID NO: 892195 - DNA, 15 bp, Homo sapiens
ttggactcagcctgc

SEQ ID NO: 892196 - DNA, 15 bp, Homo sapiens
tggactcagcctgca

SEQ ID NO: 892197 - DNA, 15 bp, Homo sapiens
ggactcagcctgcac

SEQ ID NO: 892198 - DNA, 15 bp, Homo sapiens
gactcagcctgcacc

SEQ ID NO: 892199 - DNA, 15 bp, Homo sapiens
actcagcctgcacct

SEQ ID NO: 892200 - DNA, 15 bp, Homo sapiens
ctcagcctgcacctt

SEQ ID NO: 892201 - DNA, 15 bp, Homo sapiens
tcagcctgcaccttg

SEQ ID NO: 892202 - DNA, 15 bp, Homo sapiens
cagcctgcaccttga

SEQ ID NO: 892203 - DNA, 15 bp, Homo sapiens
agcctgcaccttgaa

SEQ ID NO: 892204 - DNA, 15 bp, Homo sapiens
gcctgcaccttgaac

SEQ ID NO: 892205 - DNA, 15 bp, Homo sapiens
cctgcaccttgaact

SEQ ID NO: 892206 - DNA, 15 bp, Homo sapiens
ctgcaccttgaactg

SEQ ID NO: 892207 - DNA, 15 bp, Homo sapiens
tgcaccttgaactgc

SEQ ID NO: 892208 - DNA, 15 bp, Homo sapiens
gcaccttgaactgct

SEQ ID NO: 892209 - DNA, 15 bp, Homo sapiens
caccttgaactgctg

SEQ ID NO: 892210 - DNA, 15 bp, Homo sapiens
accttgaactgctgt

SEQ ID NO: 892211 - DNA, 15 bp, Homo sapiens
ccttgaactgctgta

SEQ ID NO: 892212 - DNA, 15 bp, Homo sapiens
cttgaactgctgtaa

SEQ ID NO: 892213 - DNA, 15 bp, Homo sapiens
ttgaactgctgtaaa

SEQ ID NO: 892214 - DNA, 15 bp, Homo sapiens
tgaactgctgtaaat

SEQ ID NO: 892215 - DNA, 15 bp, Homo sapiens
gaactgctgtaaatt

SEQ ID NO: 892216 - DNA, 15 bp, Homo sapiens
aactgctgtaaattg

SEQ ID NO: 892217 - DNA, 15 bp, Homo sapiens
actgctgtaaattga

SEQ ID NO: 892218 - DNA, 15 bp, Homo sapiens
ctgctgtaaattgaa

SEQ ID NO: 892219 - DNA, 15 bp, Homo sapiens
tgctgtaaattgaat

SEQ ID NO: 892220 - DNA, 15 bp, Homo sapiens
gctgtaaattgaatg

SEQ ID NO: 892221 - DNA, 15 bp, Homo sapiens
ctgtaaattgaatgg

SEQ ID NO: 892222 - DNA, 15 bp, Homo sapiens
tgtaaattgaatggg

SEQ ID NO: 892223 - DNA, 15 bp, Homo sapiens
gtaaattgaatgggc

SEQ ID NO: 892224 - DNA, 15 bp, Homo sapiens
taaattgaatgggcc

SEQ ID NO: 892225 - DNA, 15 bp, Homo sapiens
aaattgaatgggcct

SEQ ID NO: 892226 - DNA, 15 bp, Homo sapiens
aattgaatgggcctc

SEQ ID NO: 892227 - DNA, 15 bp, Homo sapiens
attgaatgggcctcc

SEQ ID NO: 892228 - DNA, 15 bp, Homo sapiens
ttgaatgggcctcct

SEQ ID NO: 892229 - DNA, 15 bp, Homo sapiens
tgaatgggcctcctc

SEQ ID NO: 892230 - DNA, 15 bp, Homo sapiens
gaatgggcctcctct

SEQ ID NO: 892231 - DNA, 15 bp, Homo sapiens
aatgggcctcctctg

SEQ ID NO: 892232 - DNA, 15 bp, Homo sapiens
atgggcctcctctga

SEQ ID NO: 892233 - DNA, 15 bp, Homo sapiens
tgggcctcctctgac

SEQ ID NO: 892234 - DNA, 15 bp, Homo sapiens
gggcctcctctgacc

SEQ ID NO: 892235 - DNA, 15 bp, Homo sapiens
ggcctcctctgaccc

SEQ ID NO: 892236 - DNA, 15 bp, Homo sapiens
gcctcctctgaccca

SEQ ID NO: 892237 - DNA, 15 bp, Homo sapiens
cctcctctgacccac

SEQ ID NO: 892238 - DNA, 15 bp, Homo sapiens
ctcctctgacccact

SEQ ID NO: 892239 - DNA, 15 bp, Homo sapiens
tcctctgacccactg

SEQ ID NO: 892240 - DNA, 15 bp, Homo sapiens
cctctgacccactgg

SEQ ID NO: 892241 - DNA, 15 bp, Homo sapiens
ctctgacccactggc

SEQ ID NO: 892242 - DNA, 15 bp, Homo sapiens
tctgacccactggcc

SEQ ID NO: 892243 - DNA, 15 bp, Homo sapiens
ctgacccactggcca

SEQ ID NO: 892244 - DNA, 15 bp, Homo sapiens
tgacccactggccag

SEQ ID NO: 892245 - DNA, 15 bp, Homo sapiens
gacccactggccagg

SEQ ID NO: 892246 - DNA, 15 bp, Homo sapiens
acccactggccagga

SEQ ID NO: 892247 - DNA, 15 bp, Homo sapiens
cccactggccaggaa

SEQ ID NO: 892248 - DNA, 15 bp, Homo sapiens
ccactggccaggaag

SEQ ID NO: 892249 - DNA, 15 bp, Homo sapiens
cactggccaggaagc

SEQ ID NO: 892250 - DNA, 15 bp, Homo sapiens
actggccaggaagca

SEQ ID NO: 892251 - DNA, 15 bp, Homo sapiens
ctggccaggaagcag

SEQ ID NO: 892252 - DNA, 15 bp, Homo sapiens
tggccaggaagcagg

SEQ ID NO: 892253 - DNA, 15 bp, Homo sapiens
ggccaggaagcaggc

SEQ ID NO: 892254 - DNA, 15 bp, Homo sapiens
gccaggaagcaggct

SEQ ID NO: 892255 - DNA, 15 bp, Homo sapiens
ccaggaagcaggctc

SEQ ID NO: 892256 - DNA, 15 bp, Homo sapiens
caggaagcaggctct

SEQ ID NO: 892257 - DNA, 15 bp, Homo sapiens
aggaagcaggctctg

SEQ ID NO: 892258 - DNA, 15 bp, Homo sapiens
ggaagcaggctctgg

SEQ ID NO: 892259 - DNA, 15 bp, Homo sapiens
gaagcaggctctggc

SEQ ID NO: 892260 - DNA, 15 bp, Homo sapiens
aagcaggctctggcc

SEQ ID NO: 892261 - DNA, 15 bp, Homo sapiens
agcaggctctggcca

SEQ ID NO: 892262 - DNA, 15 bp, Homo sapiens
gcaggctctggccag

SEQ ID NO: 892263 - DNA, 15 bp, Homo sapiens
caggctctggccagg

SEQ ID NO: 892264 - DNA, 15 bp, Homo sapiens
aggctctggccaggc

SEQ ID NO: 892265 - DNA, 15 bp, Homo sapiens
ggctctggccaggcc

SEQ ID NO: 892266 - DNA, 15 bp, Homo sapiens
gctctggccaggcct

SEQ ID NO: 892267 - DNA, 15 bp, Homo sapiens
ctctggccaggcctg

SEQ ID NO: 892268 - DNA, 15 bp, Homo sapiens
tctggccaggcctgg

SEQ ID NO: 892269 - DNA, 15 bp, Homo sapiens
ctggccaggcctggg

SEQ ID NO: 892270 - DNA, 15 bp, Homo sapiens
tggccaggcctgggg

SEQ ID NO: 892271 - DNA, 15 bp, Homo sapiens
ggccaggcctggggg

SEQ ID NO: 892272 - DNA, 15 bp, Homo sapiens
gccaggcctgggggg

SEQ ID NO: 892273 - DNA, 15 bp, Homo sapiens
ccaggcctggggggt

SEQ ID NO: 892274 - DNA, 15 bp, Homo sapiens
caggcctggggggtc

SEQ ID NO: 892275 - DNA, 15 bp, Homo sapiens
aggcctggggggtct

SEQ ID NO: 892276 - DNA, 15 bp, Homo sapiens
ggcctggggggtctt

SEQ ID NO: 892277 - DNA, 15 bp, Homo sapiens
gcctggggggtcttt

SEQ ID NO: 892278 - DNA, 15 bp, Homo sapiens
cctggggggtctttt

SEQ ID NO: 892279 - DNA, 15 bp, Homo sapiens
ctggggggtcttttg

SEQ ID NO: 892280 - DNA, 15 bp, Homo sapiens
tggggggtcttttgc

SEQ ID NO: 892281 - DNA, 15 bp, Homo sapiens
ggggggtcttttgct

SEQ ID NO: 892282 - DNA, 15 bp, Homo sapiens
gggggtcttttgctc

SEQ ID NO: 892283 - DNA, 15 bp, Homo sapiens
ggggtcttttgctca

SEQ ID NO: 892284 - DNA, 15 bp, Homo sapiens
gggtcttttgctcag

SEQ ID NO: 892285 - DNA, 15 bp, Homo sapiens
ggtcttttgctcagt

SEQ ID NO: 892286 - DNA, 15 bp, Homo sapiens
gtcttttgctcagtg

SEQ ID NO: 892287 - DNA, 15 bp, Homo sapiens
tcttttgctcagtgg

SEQ ID NO: 892288 - DNA, 15 bp, Homo sapiens
cttttgctcagtggt

SEQ ID NO: 892289 - DNA, 15 bp, Homo sapiens
ttttgctcagtggtg

SEQ ID NO: 892290 - DNA, 15 bp, Homo sapiens
tttgctcagtggtgc

SEQ ID NO: 892291 - DNA, 15 bp, Homo sapiens
ttgctcagtggtgct

SEQ ID NO: 892292 - DNA, 15 bp, Homo sapiens
tgctcagtggtgctc

SEQ ID NO: 892293 - DNA, 15 bp, Homo sapiens
gctcagtggtgctcc

SEQ ID NO: 892294 - DNA, 15 bp, Homo sapiens
ctcagtggtgctcct

SEQ ID NO: 892295 - DNA, 15 bp, Homo sapiens
tcagtggtgctcctg

SEQ ID NO: 892296 - DNA, 15 bp, Homo sapiens
cagtggtgctcctga

SEQ ID NO: 892297 - DNA, 15 bp, Homo sapiens
agtggtgctcctgag

SEQ ID NO: 892298 - DNA, 15 bp, Homo sapiens
gtggtgctcctgagc

SEQ ID NO: 892299 - DNA, 15 bp, Homo sapiens
tggtgctcctgagcc

SEQ ID NO: 892300 - DNA, 15 bp, Homo sapiens
ggtgctcctgagcca

SEQ ID NO: 892301 - DNA, 15 bp, Homo sapiens
gtgctcctgagccag

SEQ ID NO: 892302 - DNA, 15 bp, Homo sapiens
tgctcctgagccagc

SEQ ID NO: 892303 - DNA, 15 bp, Homo sapiens
gctcctgagccagcc

SEQ ID NO: 892304 - DNA, 15 bp, Homo sapiens
ctcctgagccagcca

SEQ ID NO: 892305 - DNA, 15 bp, Homo sapiens
tcctgagccagccac

SEQ ID NO: 892306 - DNA, 15 bp, Homo sapiens
cctgagccagccacc

SEQ ID NO: 892307 - DNA, 15 bp, Homo sapiens
ctgagccagccaccc

SEQ ID NO: 892308 - DNA, 15 bp, Homo sapiens
tgagccagccacccc

SEQ ID NO: 892309 - DNA, 15 bp, Homo sapiens
gagccagccacccct

SEQ ID NO: 892310 - DNA, 15 bp, Homo sapiens
agccagccacccctt

SEQ ID NO: 892311 - DNA, 15 bp, Homo sapiens
gccagccaccccttg

SEQ ID NO: 892312 - DNA, 15 bp, Homo sapiens
ccagccaccccttgg

SEQ ID NO: 892313 - DNA, 15 bp, Homo sapiens
cagccaccccttggc

SEQ ID NO: 892314 - DNA, 15 bp, Homo sapiens
agccaccccttggcg

SEQ ID NO: 892315 - DNA, 15 bp, Homo sapiens
gccaccccttggcgt

SEQ ID NO: 892316 - DNA, 15 bp, Homo sapiens
ccaccccttggcgtc

SEQ ID NO: 892317 - DNA, 15 bp, Homo sapiens
caccccttggcgtcc

SEQ ID NO: 892318 - DNA, 15 bp, Homo sapiens
accccttggcgtccc

SEQ ID NO: 892319 - DNA, 15 bp, Homo sapiens
ccccttggcgtcccg

SEQ ID NO: 892320 - DNA, 15 bp, Homo sapiens
cccttggcgtcccgg

SEQ ID NO: 892321 - DNA, 15 bp, Homo sapiens
ccttggcgtcccggc

SEQ ID NO: 892322 - DNA, 15 bp, Homo sapiens
cttggcgtcccggct

SEQ ID NO: 892323 - DNA, 15 bp, Homo sapiens
ttggcgtcccggctg

SEQ ID NO: 892324 - DNA, 15 bp, Homo sapiens
tggcgtcccggctga

SEQ ID NO: 892325 - DNA, 15 bp, Homo sapiens
ggcgtcccggctgag

SEQ ID NO: 892326 - DNA, 15 bp, Homo sapiens
gcgtcccggctgagc

SEQ ID NO: 892327 - DNA, 15 bp, Homo sapiens
cgtcccggctgagca

SEQ ID NO: 892328 - DNA, 15 bp, Homo sapiens
gtcccggctgagcag

SEQ ID NO: 892329 - DNA, 15 bp, Homo sapiens
tcccggctgagcagt

SEQ ID NO: 892330 - DNA, 15 bp, Homo sapiens
cccggctgagcagtt

SEQ ID NO: 892331 - DNA, 15 bp, Homo sapiens
ccggctgagcagttg

SEQ ID NO: 892332 - DNA, 15 bp, Homo sapiens
cggctgagcagttga

SEQ ID NO: 892333 - DNA, 15 bp, Homo sapiens
ggctgagcagttgac

SEQ ID NO: 892334 - DNA, 15 bp, Homo sapiens
gctgagcagttgacc

SEQ ID NO: 892335 - DNA, 15 bp, Homo sapiens
ctgagcagttgaccc

SEQ ID NO: 892336 - DNA, 15 bp, Homo sapiens
tgagcagttgacccc

SEQ ID NO: 892337 - DNA, 15 bp, Homo sapiens
gagcagttgaccccg

SEQ ID NO: 892338 - DNA, 15 bp, Homo sapiens
agcagttgaccccga

SEQ ID NO: 892339 - DNA, 15 bp, Homo sapiens
gcagttgaccccgac

SEQ ID NO: 892340 - DNA, 15 bp, Homo sapiens
cagttgaccccgact

SEQ ID NO: 892341 - DNA, 15 bp, Homo sapiens
agttgaccccgactt

SEQ ID NO: 892342 - DNA, 15 bp, Homo sapiens
gttgaccccgactta

SEQ ID NO: 892343 - DNA, 15 bp, Homo sapiens
ttgaccccgacttaa

SEQ ID NO: 892344 - DNA, 15 bp, Homo sapiens
tgaccccgacttaat

SEQ ID NO: 892345 - DNA, 15 bp, Homo sapiens
gaccccgacttaatg

SEQ ID NO: 892346 - DNA, 15 bp, Homo sapiens
accccgacttaatgg

SEQ ID NO: 892347 - DNA, 15 bp, Homo sapiens
ccccgacttaatggg

SEQ ID NO: 892348 - DNA, 15 bp, Homo sapiens
cccgacttaatggga

SEQ ID NO: 892349 - DNA, 15 bp, Homo sapiens
ccgacttaatgggac

SEQ ID NO: 892350 - DNA, 15 bp, Homo sapiens
cgacttaatgggacc

SEQ ID NO: 892351 - DNA, 15 bp, Homo sapiens
gacttaatgggacca

SEQ ID NO: 892352 - DNA, 15 bp, Homo sapiens
acttaatgggaccac

SEQ ID NO: 892353 - DNA, 15 bp, Homo sapiens
cttaatgggaccact

SEQ ID NO: 892354 - DNA, 15 bp, Homo sapiens
ttaatgggaccacta

SEQ ID NO: 892355 - DNA, 15 bp, Homo sapiens
ttataccttagcatg

SEQ ID NO: 892356 - DNA, 15 bp, Homo sapiens
tataccttagcatgg

SEQ ID NO: 892357 - DNA, 15 bp, Homo sapiens
ataccttagcatgga

SEQ ID NO: 892358 - DNA, 15 bp, Homo sapiens
taccttagcatggat

SEQ ID NO: 892359 - DNA, 15 bp, Homo sapiens
accttagcatggatt

SEQ ID NO: 892360 - DNA, 15 bp, Homo sapiens
ccttagcatggattt

SEQ ID NO: 892361 - DNA, 15 bp, Homo sapiens
cttagcatggattta

SEQ ID NO: 892362 - DNA, 15 bp, Homo sapiens
ttagcatggatttat

SEQ ID NO: 892363 - DNA, 15 bp, Homo sapiens
tagcatggatttata

SEQ ID NO: 892364 - DNA, 15 bp, Homo sapiens
agcatggatttatat

SEQ ID NO: 892365 - DNA, 15 bp, Homo sapiens
gcatggatttatata

SEQ ID NO: 892366 - DNA, 15 bp, Homo sapiens
catggatttatatat

SEQ ID NO: 892367 - DNA, 15 bp, Homo sapiens
atggatttatatatt

SEQ ID NO: 892368 - DNA, 15 bp, Homo sapiens
tggatttatatattt

SEQ ID NO: 892369 - DNA, 15 bp, Homo sapiens
ggatttatatattta

SEQ ID NO: 892370 - DNA, 15 bp, Homo sapiens
gatttatatatttat

SEQ ID NO: 892371 - DNA, 15 bp, Homo sapiens
atttatatatttatt

SEQ ID NO: 892372 - DNA, 15 bp, Homo sapiens
tttatatatttattt

SEQ ID NO: 892373 - DNA, 15 bp, Homo sapiens
ttatatatttatttt

SEQ ID NO: 892374 - DNA, 15 bp, Homo sapiens
tatatatttattttc

SEQ ID NO: 892375 - DNA, 15 bp, Homo sapiens
atatatttattttct

SEQ ID NO: 892376 - DNA, 15 bp, Homo sapiens
tatatttattttctc

SEQ ID NO: 892377 - DNA, 15 bp, Homo sapiens
atatttattttctct

SEQ ID NO: 892378 - DNA, 15 bp, Homo sapiens
tatttattttctctc

SEQ ID NO: 892379 - DNA, 15 bp, Homo sapiens
atttattttctctcc

SEQ ID NO: 892380 - DNA, 15 bp, Homo sapiens
tttattttctctcct

SEQ ID NO: 892381 - DNA, 15 bp, Homo sapiens
ttattttctctcctt

SEQ ID NO: 892382 - DNA, 15 bp, Homo sapiens
tattttctctccttt

SEQ ID NO: 892383 - DNA, 15 bp, Homo sapiens
attttctctcctttg

SEQ ID NO: 892384 - DNA, 15 bp, Homo sapiens
ttttctctcctttgt

SEQ ID NO: 892385 - DNA, 15 bp, Homo sapiens
tttctctcctttgtt

SEQ ID NO: 892386 - DNA, 15 bp, Homo sapiens
ttctctcctttgttc

SEQ ID NO: 892387 - DNA, 15 bp, Homo sapiens
tctctcctttgttcc

SEQ ID NO: 892388 - DNA, 15 bp, Homo sapiens
ctctcctttgttcca

SEQ ID NO: 892389 - DNA, 15 bp, Homo sapiens
tctcctttgttccaa

SEQ ID NO: 892390 - DNA, 15 bp, Homo sapiens
ctcctttgttccaat

SEQ ID NO: 892391 - DNA, 15 bp, Homo sapiens
tcctttgttccaata

SEQ ID NO: 892392 - DNA, 15 bp, Homo sapiens
cctttgttccaatat

SEQ ID NO: 892393 - DNA, 15 bp, Homo sapiens
ctttgttccaatatt

SEQ ID NO: 892394 - DNA, 15 bp, Homo sapiens
tttgttccaatattt

SEQ ID NO: 892395 - DNA, 15 bp, Homo sapiens
ttgttccaatattta

SEQ ID NO: 892396 - DNA, 15 bp, Homo sapiens
tgttccaatatttat

SEQ ID NO: 892397 - DNA, 15 bp, Homo sapiens
gttccaatatttatt

SEQ ID NO: 892398 - DNA, 15 bp, Homo sapiens
ttccaatatttattt

SEQ ID NO: 892399 - DNA, 15 bp, Homo sapiens
tccaatatttattta

SEQ ID NO: 892400 - DNA, 15 bp, Homo sapiens
ccaatatttatttat

SEQ ID NO: 892401 - DNA, 15 bp, Homo sapiens
caatatttatttatt

SEQ ID NO: 892402 - DNA, 15 bp, Homo sapiens
aatatttatttatta

SEQ ID NO: 892403 - DNA, 15 bp, Homo sapiens
atatttatttattat

SEQ ID NO: 892404 - DNA, 15 bp, Homo sapiens
tatttatttattatc

SEQ ID NO: 892405 - DNA, 15 bp, Homo sapiens
atttatttattatcc

SEQ ID NO: 892406 - DNA, 15 bp, Homo sapiens
tttatttattatcct

SEQ ID NO: 892407 - DNA, 15 bp, Homo sapiens
ttatttattatcctt

SEQ ID NO: 892408 - DNA, 15 bp, Homo sapiens
tatttattatccttg

SEQ ID NO: 892409 - DNA, 15 bp, Homo sapiens
atttattatccttga

SEQ ID NO: 892410 - DNA, 15 bp, Homo sapiens
tttattatccttgat

SEQ ID NO: 892411 - DNA, 15 bp, Homo sapiens
ttattatccttgatc

SEQ ID NO: 892412 - DNA, 15 bp, Homo sapiens
tattatccttgatct

SEQ ID NO: 892413 - DNA, 15 bp, Homo sapiens
attatccttgatcta

SEQ ID NO: 892414 - DNA, 15 bp, Homo sapiens
ttatccttgatctag

SEQ ID NO: 892415 - DNA, 15 bp, Homo sapiens
tatccttgatctaga

SEQ ID NO: 892416 - DNA, 15 bp, Homo sapiens
atccttgatctagaa

SEQ ID NO: 892417 - DNA, 15 bp, Homo sapiens
tccttgatctagaac

SEQ ID NO: 892418 - DNA, 15 bp, Homo sapiens
ccttgatctagaact

SEQ ID NO: 892419 - DNA, 15 bp, Homo sapiens
cttgatctagaactt

SEQ ID NO: 892420 - DNA, 15 bp, Homo sapiens
ttgatctagaactta

SEQ ID NO: 892421 - DNA, 15 bp, Homo sapiens
tgatctagaacttat

SEQ ID NO: 892422 - DNA, 15 bp, Homo sapiens
gatctagaacttatt

SEQ ID NO: 892423 - DNA, 15 bp, Homo sapiens
atctagaacttattt

SEQ ID NO: 892424 - DNA, 15 bp, Homo sapiens
tctagaacttattta

SEQ ID NO: 892425 - DNA, 15 bp, Homo sapiens
ctagaacttatttat

SEQ ID NO: 892426 - DNA, 15 bp, Homo sapiens
tagaacttatttatt

SEQ ID NO: 892427 - DNA, 15 bp, Homo sapiens
agaacttatttattt

SEQ ID NO: 892428 - DNA, 15 bp, Homo sapiens
gaacttatttattta

SEQ ID NO: 892429 - DNA, 15 bp, Homo sapiens
aacttatttatttag

SEQ ID NO: 892430 - DNA, 15 bp, Homo sapiens
acttatttatttagt

SEQ ID NO: 892431 - DNA, 15 bp, Homo sapiens
cttatttatttagtt

SEQ ID NO: 892432 - DNA, 15 bp, Homo sapiens
ttatttatttagttt

SEQ ID NO: 892433 - DNA, 15 bp, Homo sapiens
tatttatttagtttt

SEQ ID NO: 892434 - DNA, 15 bp, Homo sapiens
atttatttagttttc

SEQ ID NO: 892435 - DNA, 15 bp, Homo sapiens
tttatttagttttct

SEQ ID NO: 892436 - DNA, 15 bp, Homo sapiens
ttatttagttttcta

SEQ ID NO: 892437 - DNA, 15 bp, Homo sapiens
tatttagttttctaa

SEQ ID NO: 892438 - DNA, 15 bp, Homo sapiens
atttagttttctaat

SEQ ID NO: 892439 - DNA, 15 bp, Homo sapiens
tttagttttctaatt

SEQ ID NO: 892440 - DNA, 15 bp, Homo sapiens
ttagttttctaattg

SEQ ID NO: 892441 - DNA, 15 bp, Homo sapiens
tagttttctaattga

SEQ ID NO: 892442 - DNA, 15 bp, Homo sapiens
agttttctaattgac

SEQ ID NO: 892443 - DNA, 15 bp, Homo sapiens
gttttctaattgaca

SEQ ID NO: 892444 - DNA, 15 bp, Homo sapiens
ttttctaattgacaa

SEQ ID NO: 892445 - DNA, 15 bp, Homo sapiens
tttctaattgacaaa

SEQ ID NO: 892446 - DNA, 15 bp, Homo sapiens
ttctaattgacaaat

SEQ ID NO: 892447 - DNA, 15 bp, Homo sapiens
tctaattgacaaata

SEQ ID NO: 892448 - DNA, 15 bp, Homo sapiens
ctaattgacaaataa

SEQ ID NO: 892449 - DNA, 15 bp, Homo sapiens
taattgacaaataaa

SEQ ID NO: 892450 - DNA, 15 bp, Homo sapiens
aattgacaaataaaa

SEQ ID NO: 892451 - DNA, 15 bp, Homo sapiens
attgacaaataaaaa

SEQ ID NO: 892452 - DNA, 15 bp, Homo sapiens
ttgacaaataaaaat

SEQ ID NO: 892453 - DNA, 15 bp, Homo sapiens
tgacaaataaaaatt

SEQ ID NO: 892454 - DNA, 15 bp, Homo sapiens
gacaaataaaaattg

SEQ ID NO: 892455 - DNA, 15 bp, Homo sapiens
acaaataaaaattgt

SEQ ID NO: 892456 - DNA, 15 bp, Homo sapiens
caaataaaaattgta

SEQ ID NO: 892457 - DNA, 15 bp, Homo sapiens
aaataaaaattgtat

SEQ ID NO: 892458 - DNA, 15 bp, Homo sapiens
aataaaaattgtata

SEQ ID NO: 892459 - DNA, 15 bp, Homo sapiens
ataaaaattgtatat

SEQ ID NO: 892460 - DNA, 15 bp, Homo sapiens
taaaaattgtatata

SEQ ID NO: 892461 - DNA, 15 bp, Homo sapiens
aaaaattgtatataa

SEQ ID NO: 892462 - DNA, 15 bp, Homo sapiens
aaaattgtatataat

SEQ ID NO: 892463 - DNA, 15 bp, Homo sapiens
aaattgtatataatt

SEQ ID NO: 892464 - DNA, 15 bp, Homo sapiens
aattgtatataattt

SEQ ID NO: 892465 - DNA, 15 bp, Homo sapiens
attgtatataatttt

SEQ ID NO: 892466 - DNA, 15 bp, Homo sapiens
ttgtatataattttt

SEQ ID NO: 892467 - DNA, 15 bp, Homo sapiens
tgtatataattttta

SEQ ID NO: 892468 - DNA, 15 bp, Homo sapiens
gtatataatttttaa

SEQ ID NO: 892469 - DNA, 15 bp, Homo sapiens
tatataatttttaat

SEQ ID NO: 892470 - DNA, 15 bp, Homo sapiens
atataatttttaatt

SEQ ID NO: 892471 - DNA, 15 bp, Homo sapiens
tataatttttaatta

SEQ ID NO: 892472 - DNA, 15 bp, Homo sapiens
ataatttttaattat

SEQ ID NO: 892473 - DNA, 15 bp, Homo sapiens
taatttttaattata

SEQ ID NO: 892474 - DNA, 15 bp, Homo sapiens
aatttttaattatat

SEQ ID NO: 892475 - DNA, 15 bp, Homo sapiens
atttttaattatata

SEQ ID NO: 892476 - DNA, 15 bp, Homo sapiens
tttttaattatatac

SEQ ID NO: 892477 - DNA, 15 bp, Homo sapiens
ttttaattatataca

SEQ ID NO: 892478 - DNA, 15 bp, Homo sapiens
tttaattatatacaa

SEQ ID NO: 892479 - DNA, 15 bp, Homo sapiens
ttaattatatacaat

SEQ ID NO: 892480 - DNA, 15 bp, Homo sapiens
taattatatacaatt

SEQ ID NO: 892481 - DNA, 15 bp, Homo sapiens
aattatatacaatta

SEQ ID NO: 892482 - DNA, 15 bp, Homo sapiens
attatatacaattat

SEQ ID NO: 892483 - DNA, 15 bp, Homo sapiens
ttatatacaattata

SEQ ID NO: 892484 - DNA, 15 bp, Homo sapiens
tatatacaattatat

SEQ ID NO: 892485 - DNA, 15 bp, Homo sapiens
atatacaattatata

SEQ ID NO: 892486 - DNA, 15 bp, Homo sapiens
tatacaattatataa

SEQ ID NO: 892487 - DNA, 15 bp, Homo sapiens
atacaattatataat

SEQ ID NO: 892488 - DNA, 15 bp, Homo sapiens
tacaattatataatt

SEQ ID NO: 892489 - DNA, 15 bp, Homo sapiens
acaattatataattg

SEQ ID NO: 892490 - DNA, 15 bp, Homo sapiens
caattatataattgt

SEQ ID NO: 892491 - DNA, 15 bp, Homo sapiens
aattatataattgta

SEQ ID NO: 892492 - DNA, 15 bp, Homo sapiens
attatataattgtat

SEQ ID NO: 892493 - DNA, 15 bp, Homo sapiens
ttatataattgtata

SEQ ID NO: 892494 - DNA, 15 bp, Homo sapiens
tatataattgtatat

SEQ ID NO: 892495 - DNA, 15 bp, Homo sapiens
atataattgtatata

SEQ ID NO: 892496 - DNA, 15 bp, Homo sapiens
tataattgtatataa

SEQ ID NO: 892497 - DNA, 15 bp, Homo sapiens
ataattgtatataat

SEQ ID NO: 892498 - DNA, 15 bp, Homo sapiens
taattgtatataatt

SEQ ID NO: 892499 - DNA, 15 bp, Homo sapiens
aattgtatataatta

SEQ ID NO: 892500 - DNA, 15 bp, Homo sapiens
attgtatataattat

SEQ ID NO: 892501 - DNA, 15 bp, Homo sapiens
ttgtatataattata

SEQ ID NO: 892502 - DNA, 15 bp, Homo sapiens
tgtatataattatat

SEQ ID NO: 892503 - DNA, 15 bp, Homo sapiens
tataattatataatt

SEQ ID NO: 892504 - DNA, 15 bp, Homo sapiens
ataattatataattg

SEQ ID NO: 892505 - DNA, 15 bp, Homo sapiens
taattatataattgt

SEQ ID NO: 892506 - DNA, 15 bp, Homo sapiens
ataattgtatataaa

SEQ ID NO: 892507 - DNA, 15 bp, Homo sapiens
taattgtatataaaa

SEQ ID NO: 892508 - DNA, 15 bp, Homo sapiens
aattgtatataaaat

SEQ ID NO: 892509 - DNA, 15 bp, Homo sapiens
attgtatataaaata

SEQ ID NO: 892510 - DNA, 15 bp, Homo sapiens
ttgtatataaaatat

SEQ ID NO: 892511 - DNA, 15 bp, Homo sapiens
tgtatataaaatatg

SEQ ID NO: 892512 - DNA, 15 bp, Homo sapiens
gtatataaaatatgg

SEQ ID NO: 892513 - DNA, 15 bp, Homo sapiens
tatataaaatatggt

SEQ ID NO: 892514 - DNA, 15 bp, Homo sapiens
atataaaatatggtg

SEQ ID NO: 892515 - DNA, 15 bp, Homo sapiens
tataaaatatggtgt

SEQ ID NO: 892516 - DNA, 15 bp, Homo sapiens
ataaaatatggtgta

SEQ ID NO: 892517 - DNA, 15 bp, Homo sapiens
taaaatatggtgtac

SEQ ID NO: 892518 - DNA, 15 bp, Homo sapiens
aaaatatggtgtaca

SEQ ID NO: 892519 - DNA, 15 bp, Homo sapiens
aaatatggtgtacaa

SEQ ID NO: 892520 - DNA, 15 bp, Homo sapiens
aatatggtgtacaac

SEQ ID NO: 892521 - DNA, 15 bp, Homo sapiens
atatggtgtacaaca

SEQ ID NO: 892522 - DNA, 15 bp, Homo sapiens
tatggtgtacaacat

SEQ ID NO: 892523 - DNA, 15 bp, Homo sapiens
atggtgtacaacatg

SEQ ID NO: 892524 - DNA, 15 bp, Homo sapiens
tggtgtacaacatga

SEQ ID NO: 892525 - DNA, 15 bp, Homo sapiens
ggtgtacaacatgat

SEQ ID NO: 892526 - DNA, 15 bp, Homo sapiens
gtgtacaacatgatg

SEQ ID NO: 892527 - DNA, 15 bp, Homo sapiens
tgtacaacatgatgt

SEQ ID NO: 892528 - DNA, 15 bp, Homo sapiens
gtacaacatgatgtt

SEQ ID NO: 892529 - DNA, 15 bp, Homo sapiens
tacaacatgatgttt

SEQ ID NO: 892530 - DNA, 15 bp, Homo sapiens
acaacatgatgtttt

SEQ ID NO: 892531 - DNA, 15 bp, Homo sapiens
caacatgatgttttg

SEQ ID NO: 892532 - DNA, 15 bp, Homo sapiens
aacatgatgttttga

SEQ ID NO: 892533 - DNA, 15 bp, Homo sapiens
acatgatgttttgat

SEQ ID NO: 892534 - DNA, 15 bp, Homo sapiens
catgatgttttgata

SEQ ID NO: 892535 - DNA, 15 bp, Homo sapiens
atgatgttttgatat

SEQ ID NO: 892536 - DNA, 15 bp, Homo sapiens
tgatgttttgatata

SEQ ID NO: 892537 - DNA, 15 bp, Homo sapiens
gatgttttgatatat

SEQ ID NO: 892538 - DNA, 15 bp, Homo sapiens
atgttttgatatatg

SEQ ID NO: 892539 - DNA, 15 bp, Homo sapiens
tgttttgatatatgt

SEQ ID NO: 892540 - DNA, 15 bp, Homo sapiens
gttttgatatatgta

SEQ ID NO: 892541 - DNA, 15 bp, Homo sapiens
ttttgatatatgtat

SEQ ID NO: 892542 - DNA, 15 bp, Homo sapiens
tttgatatatgtata

SEQ ID NO: 892543 - DNA, 15 bp, Homo sapiens
ttgatatatgtatac

SEQ ID NO: 892544 - DNA, 15 bp, Homo sapiens
tgatatatgtataca

SEQ ID NO: 892545 - DNA, 15 bp, Homo sapiens
gatatatgtatacaa

SEQ ID NO: 892546 - DNA, 15 bp, Homo sapiens
atatatgtatacaat

SEQ ID NO: 892547 - DNA, 15 bp, Homo sapiens
tatatgtatacaatg

SEQ ID NO: 892548 - DNA, 15 bp, Homo sapiens
atatgtatacaatgt

SEQ ID NO: 892549 - DNA, 15 bp, Homo sapiens
tatgtatacaatgtg

SEQ ID NO: 892550 - DNA, 15 bp, Homo sapiens
atgtatacaatgtgg

SEQ ID NO: 892551 - DNA, 15 bp, Homo sapiens
tgtatacaatgtgga

SEQ ID NO: 892552 - DNA, 15 bp, Homo sapiens
gtatacaatgtggaa

SEQ ID NO: 892553 - DNA, 15 bp, Homo sapiens
tatacaatgtggaat

SEQ ID NO: 892554 - DNA, 15 bp, Homo sapiens
atacaatgtggaatc

SEQ ID NO: 892555 - DNA, 15 bp, Homo sapiens
tacaatgtggaatct

SEQ ID NO: 892556 - DNA, 15 bp, Homo sapiens
acaatgtggaatctt

SEQ ID NO: 892557 - DNA, 15 bp, Homo sapiens
caatgtggaatctta

SEQ ID NO: 892558 - DNA, 15 bp, Homo sapiens
aatgtggaatcttaa

SEQ ID NO: 892559 - DNA, 15 bp, Homo sapiens
atgtggaatcttaat

SEQ ID NO: 892560 - DNA, 15 bp, Homo sapiens
tgtggaatcttaatt

SEQ ID NO: 892561 - DNA, 15 bp, Homo sapiens
gtggaatcttaatta

SEQ ID NO: 892562 - DNA, 15 bp, Homo sapiens
tggaatcttaattag

SEQ ID NO: 892563 - DNA, 15 bp, Homo sapiens
ggaatcttaattagt

SEQ ID NO: 892564 - DNA, 15 bp, Homo sapiens
gaatcttaattagta

SEQ ID NO: 892565 - DNA, 15 bp, Homo sapiens
aatcttaattagtat

SEQ ID NO: 892566 - DNA, 15 bp, Homo sapiens
atcttaattagtatg

SEQ ID NO: 892567 - DNA, 15 bp, Homo sapiens
tcttaattagtatgt

SEQ ID NO: 892568 - DNA, 15 bp, Homo sapiens
cttaattagtatgta

SEQ ID NO: 892569 - DNA, 15 bp, Homo sapiens
ttaattagtatgtat

SEQ ID NO: 892570 - DNA, 15 bp, Homo sapiens
taattagtatgtatt

SEQ ID NO: 892571 - DNA, 15 bp, Homo sapiens
aattagtatgtattt

SEQ ID NO: 892572 - DNA, 15 bp, Homo sapiens
attagtatgtattta

SEQ ID NO: 892573 - DNA, 15 bp, Homo sapiens
ttagtatgtatttaa

SEQ ID NO: 892574 - DNA, 15 bp, Homo sapiens
tagtatgtatttaaa

SEQ ID NO: 892575 - DNA, 15 bp, Homo sapiens
agtatgtatttaaat

SEQ ID NO: 892576 - DNA, 15 bp, Homo sapiens
gtatgtatttaaata

SEQ ID NO: 892577 - DNA, 15 bp, Homo sapiens
tatgtatttaaatac

SEQ ID NO: 892578 - DNA, 15 bp, Homo sapiens
atgtatttaaatacc

SEQ ID NO: 892579 - DNA, 15 bp, Homo sapiens
tgtatttaaatacct

SEQ ID NO: 892580 - DNA, 15 bp, Homo sapiens
gtatttaaatacctt

SEQ ID NO: 892581 - DNA, 15 bp, Homo sapiens
tatttaaataccttt

SEQ ID NO: 892582 - DNA, 15 bp, Homo sapiens
atttaaataccttta

SEQ ID NO: 892583 - DNA, 15 bp, Homo sapiens
tttaaatacctttat

SEQ ID NO: 892584 - DNA, 15 bp, Homo sapiens
ttaaatacctttata

SEQ ID NO: 892585 - DNA, 15 bp, Homo sapiens
taaatacctttataa

SEQ ID NO: 892586 - DNA, 15 bp, Homo sapiens
aaatacctttataac

SEQ ID NO: 892587 - DNA, 15 bp, Homo sapiens
aatacctttataact

SEQ ID NO: 892588 - DNA, 15 bp, Homo sapiens
atacctttataactt

SEQ ID NO: 892589 - DNA, 15 bp, Homo sapiens
tacctttataacttc

SEQ ID NO: 892590 - DNA, 15 bp, Homo sapiens
acctttataacttcc

SEQ ID NO: 892591 - DNA, 15 bp, Homo sapiens
cctttataacttccc

SEQ ID NO: 892592 - DNA, 15 bp, Homo sapiens
ctttataacttccca

SEQ ID NO: 892593 - DNA, 15 bp, Homo sapiens
tttataacttcccag

SEQ ID NO: 892594 - DNA, 15 bp, Homo sapiens
ttataacttcccagg

SEQ ID NO: 892595 - DNA, 15 bp, Homo sapiens
tataacttcccagga

SEQ ID NO: 892596 - DNA, 15 bp, Homo sapiens
ataacttcccaggag

SEQ ID NO: 892597 - DNA, 15 bp, Homo sapiens
taacttcccaggagc

SEQ ID NO: 892598 - DNA, 15 bp, Homo sapiens
aacttcccaggagca

SEQ ID NO: 892599 - DNA, 15 bp, Homo sapiens
acttcccaggagcag

SEQ ID NO: 892600 - DNA, 15 bp, Homo sapiens
cttcccaggagcaga

SEQ ID NO: 892601 - DNA, 15 bp, Homo sapiens
ttcccaggagcagaa

SEQ ID NO: 892602 - DNA, 15 bp, Homo sapiens
tcccaggagcagaaa

SEQ ID NO: 892603 - DNA, 15 bp, Homo sapiens
cccaggagcagaaat

SEQ ID NO: 892604 - DNA, 15 bp, Homo sapiens
ccaggagcagaaata

SEQ ID NO: 892605 - DNA, 15 bp, Homo sapiens
caggagcagaaatat

SEQ ID NO: 892606 - DNA, 15 bp, Homo sapiens
aggagcagaaatatc

SEQ ID NO: 892607 - DNA, 15 bp, Homo sapiens
ggagcagaaatatca

SEQ ID NO: 892608 - DNA, 15 bp, Homo sapiens
gagcagaaatatcaa

SEQ ID NO: 892609 - DNA, 15 bp, Homo sapiens
agcagaaatatcaaa

SEQ ID NO: 892610 - DNA, 15 bp, Homo sapiens
gcagaaatatcaaac

SEQ ID NO: 892611 - DNA, 15 bp, Homo sapiens
cagaaatatcaaacc

SEQ ID NO: 892612 - DNA, 15 bp, Homo sapiens
agaaatatcaaaccc

SEQ ID NO: 892613 - DNA, 15 bp, Homo sapiens
gaaatatcaaaccca

SEQ ID NO: 892614 - DNA, 15 bp, Homo sapiens
aaatatcaaacccaa

SEQ ID NO: 892615 - DNA, 15 bp, Homo sapiens
aatatcaaacccaat

SEQ ID NO: 892616 - DNA, 15 bp, Homo sapiens
atatcaaacccaata

SEQ ID NO: 892617 - DNA, 15 bp, Homo sapiens
tatcaaacccaataa

SEQ ID NO: 892618 - DNA, 15 bp, Homo sapiens
atcaaacccaataag

SEQ ID NO: 892619 - DNA, 15 bp, Homo sapiens
tcaaacccaataagt

SEQ ID NO: 892620 - DNA, 15 bp, Homo sapiens
caaacccaataagtg

SEQ ID NO: 892621 - DNA, 15 bp, Homo sapiens
aaacccaataagtgc

SEQ ID NO: 892622 - DNA, 15 bp, Homo sapiens
aacccaataagtgca

SEQ ID NO: 892623 - DNA, 15 bp, Homo sapiens
acccaataagtgcat

SEQ ID NO: 892624 - DNA, 15 bp, Homo sapiens
cccaataagtgcatg

SEQ ID NO: 892625 - DNA, 15 bp, Homo sapiens
ccaataagtgcatgc

SEQ ID NO: 892626 - DNA, 15 bp, Homo sapiens
caataagtgcatgcc

SEQ ID NO: 892627 - DNA, 15 bp, Homo sapiens
aataagtgcatgcct

SEQ ID NO: 892628 - DNA, 15 bp, Homo sapiens
ataagtgcatgccta

SEQ ID NO: 892629 - DNA, 15 bp, Homo sapiens
taagtgcatgcctac

SEQ ID NO: 892630 - DNA, 15 bp, Homo sapiens
aagtgcatgcctacc

SEQ ID NO: 892631 - DNA, 15 bp, Homo sapiens
agtgcatgcctacca

SEQ ID NO: 892632 - DNA, 15 bp, Homo sapiens
gtgcatgcctaccaa

SEQ ID NO: 892633 - DNA, 15 bp, Homo sapiens
tgcatgcctaccaaa

SEQ ID NO: 892634 - DNA, 15 bp, Homo sapiens
gcatgcctaccaaac

SEQ ID NO: 892635 - DNA, 15 bp, Homo sapiens
catgcctaccaaaca

SEQ ID NO: 892636 - DNA, 15 bp, Homo sapiens
atgcctaccaaacaa

SEQ ID NO: 892637 - DNA, 15 bp, Homo sapiens
tgcctaccaaacaaa

SEQ ID NO: 892638 - DNA, 15 bp, Homo sapiens
gcctaccaaacaaag

SEQ ID NO: 892639 - DNA, 15 bp, Homo sapiens
cctaccaaacaaagg

SEQ ID NO: 892640 - DNA, 15 bp, Homo sapiens
ctaccaaacaaaggg

SEQ ID NO: 892641 - DNA, 15 bp, Homo sapiens
taccaaacaaagggg

SEQ ID NO: 892642 - DNA, 15 bp, Homo sapiens
accaaacaaagggga

SEQ ID NO: 892643 - DNA, 15 bp, Homo sapiens
ccaaacaaaggggat

SEQ ID NO: 892644 - DNA, 15 bp, Homo sapiens
caaacaaaggggatc

SEQ ID NO: 892645 - DNA, 15 bp, Homo sapiens
aaacaaaggggatct

SEQ ID NO: 892646 - DNA, 15 bp, Homo sapiens
aacaaaggggatctc

SEQ ID NO: 892647 - DNA, 15 bp, Homo sapiens
acaaaggggatctca

SEQ ID NO: 892648 - DNA, 15 bp, Homo sapiens
caaaggggatctcag

SEQ ID NO: 892649 - DNA, 15 bp, Homo sapiens
aaaggggatctcaga

SEQ ID NO: 892650 - DNA, 15 bp, Homo sapiens
aaggggatctcagat

SEQ ID NO: 892651 - DNA, 15 bp, Homo sapiens
aggggatctcagatt

SEQ ID NO: 892652 - DNA, 15 bp, Homo sapiens
ggggatctcagattc

SEQ ID NO: 892653 - DNA, 15 bp, Homo sapiens
gggatctcagattcg

SEQ ID NO: 892654 - DNA, 15 bp, Homo sapiens
ggatctcagattcgt

SEQ ID NO: 892655 - DNA, 15 bp, Homo sapiens
gatctcagattcgtg

SEQ ID NO: 892656 - DNA, 15 bp, Homo sapiens
atctcagattcgtgg

SEQ ID NO: 892657 - DNA, 15 bp, Homo sapiens
tctcagattcgtggc

SEQ ID NO: 892658 - DNA, 15 bp, Homo sapiens
ctcagattcgtggcc

SEQ ID NO: 892659 - DNA, 15 bp, Homo sapiens
tcagattcgtggcct

SEQ ID NO: 892660 - DNA, 15 bp, Homo sapiens
cagattcgtggccta

SEQ ID NO: 892661 - DNA, 15 bp, Homo sapiens
agattcgtggcctac

SEQ ID NO: 892662 - DNA, 15 bp, Homo sapiens
gattcgtggcctaca

SEQ ID NO: 892663 - DNA, 15 bp, Homo sapiens
attcgtggcctacat

SEQ ID NO: 892664 - DNA, 15 bp, Homo sapiens
ttcgtggcctacata

SEQ ID NO: 892665 - DNA, 15 bp, Homo sapiens
tcgtggcctacatat

SEQ ID NO: 892666 - DNA, 15 bp, Homo sapiens
cgtggcctacatatt

SEQ ID NO: 892667 - DNA, 15 bp, Homo sapiens
gtggcctacatatta

SEQ ID NO: 892668 - DNA, 15 bp, Homo sapiens
tggcctacatattaa

SEQ ID NO: 892669 - DNA, 15 bp, Homo sapiens
ggcctacatattaaa

SEQ ID NO: 892670 - DNA, 15 bp, Homo sapiens
gcctacatattaaat

SEQ ID NO: 892671 - DNA, 15 bp, Homo sapiens
cctacatattaaatc

SEQ ID NO: 892672 - DNA, 15 bp, Homo sapiens
ctacatattaaatcc

SEQ ID NO: 892673 - DNA, 15 bp, Homo sapiens
tacatattaaatcca

SEQ ID NO: 892674 - DNA, 15 bp, Homo sapiens
acatattaaatccag

SEQ ID NO: 892675 - DNA, 15 bp, Homo sapiens
catattaaatccagt

SEQ ID NO: 892676 - DNA, 15 bp, Homo sapiens
atattaaatccagtt

SEQ ID NO: 892677 - DNA, 15 bp, Homo sapiens
tattaaatccagttt

SEQ ID NO: 892678 - DNA, 15 bp, Homo sapiens
attaaatccagttta

SEQ ID NO: 892679 - DNA, 15 bp, Homo sapiens
ttaaatccagtttag

SEQ ID NO: 892680 - DNA, 15 bp, Homo sapiens
taaatccagtttagc

SEQ ID NO: 892681 - DNA, 15 bp, Homo sapiens
aaatccagtttagcc

SEQ ID NO: 892682 - DNA, 15 bp, Homo sapiens
aatccagtttagccc

SEQ ID NO: 892683 - DNA, 15 bp, Homo sapiens
atccagtttagccca

SEQ ID NO: 892684 - DNA, 15 bp, Homo sapiens
tccagtttagcccac

SEQ ID NO: 892685 - DNA, 15 bp, Homo sapiens
ccagtttagcccact

SEQ ID NO: 892686 - DNA, 15 bp, Homo sapiens
cagtttagcccactg

SEQ ID NO: 892687 - DNA, 15 bp, Homo sapiens
agtttagcccactgg

SEQ ID NO: 892688 - DNA, 15 bp, Homo sapiens
gtttagcccactggt

SEQ ID NO: 892689 - DNA, 15 bp, Homo sapiens
tttagcccactggtt

SEQ ID NO: 892690 - DNA, 15 bp, Homo sapiens
ttagcccactggttt

SEQ ID NO: 892691 - DNA, 15 bp, Homo sapiens
tagcccactggttta

SEQ ID NO: 892692 - DNA, 15 bp, Homo sapiens
agcccactggtttaa

SEQ ID NO: 892693 - DNA, 15 bp, Homo sapiens
gcccactggtttaat

SEQ ID NO: 892694 - DNA, 15 bp, Homo sapiens
cccactggtttaatt

SEQ ID NO: 892695 - DNA, 15 bp, Homo sapiens
ccactggtttaattg

SEQ ID NO: 892696 - DNA, 15 bp, Homo sapiens
cactggtttaattgc

SEQ ID NO: 892697 - DNA, 15 bp, Homo sapiens
actggtttaattgct

SEQ ID NO: 892698 - DNA, 15 bp, Homo sapiens
ctggtttaattgctt

SEQ ID NO: 892699 - DNA, 15 bp, Homo sapiens
tggtttaattgcttt

SEQ ID NO: 892700 - DNA, 15 bp, Homo sapiens
ggtttaattgcttta

SEQ ID NO: 892701 - DNA, 15 bp, Homo sapiens
gtttaattgctttag

SEQ ID NO: 892702 - DNA, 15 bp, Homo sapiens
tttaattgctttagc

SEQ ID NO: 892703 - DNA, 15 bp, Homo sapiens
ttaattgctttagct

SEQ ID NO: 892704 - DNA, 15 bp, Homo sapiens
taattgctttagcta

SEQ ID NO: 892705 - DNA, 15 bp, Homo sapiens
aattgctttagctaa

SEQ ID NO: 892706 - DNA, 15 bp, Homo sapiens
attgctttagctaac

SEQ ID NO: 892707 - DNA, 15 bp, Homo sapiens
ttgctttagctaaca

SEQ ID NO: 892708 - DNA, 15 bp, Homo sapiens
tgctttagctaacac

SEQ ID NO: 892709 - DNA, 15 bp, Homo sapiens
gctttagctaacacc

SEQ ID NO: 892710 - DNA, 15 bp, Homo sapiens
ctttagctaacacca

SEQ ID NO: 892711 - DNA, 15 bp, Homo sapiens
tttagctaacaccat

SEQ ID NO: 892712 - DNA, 15 bp, Homo sapiens
ttagctaacaccata

SEQ ID NO: 892713 - DNA, 15 bp, Homo sapiens
tagctaacaccataa

SEQ ID NO: 892714 - DNA, 15 bp, Homo sapiens
agctaacaccataaa

SEQ ID NO: 892715 - DNA, 15 bp, Homo sapiens
gctaacaccataaaa

SEQ ID NO: 892716 - DNA, 15 bp, Homo sapiens
ctaacaccataaaaa

SEQ ID NO: 892717 - DNA, 15 bp, Homo sapiens
taacaccataaaaat

SEQ ID NO: 892718 - DNA, 15 bp, Homo sapiens
aacaccataaaaata

SEQ ID NO: 892719 - DNA, 15 bp, Homo sapiens
acaccataaaaatac

SEQ ID NO: 892720 - DNA, 15 bp, Homo sapiens
caccataaaaataca

SEQ ID NO: 892721 - DNA, 15 bp, Homo sapiens
accataaaaatacac

SEQ ID NO: 892722 - DNA, 15 bp, Homo sapiens
ccataaaaatacact

SEQ ID NO: 892723 - DNA, 15 bp, Homo sapiens
cataaaaatacactg

SEQ ID NO: 892724 - DNA, 15 bp, Homo sapiens
ataaaaatacactgt

SEQ ID NO: 892725 - DNA, 15 bp, Homo sapiens
taaaaatacactgtg

SEQ ID NO: 892726 - DNA, 15 bp, Homo sapiens
aaaaatacactgtgt

SEQ ID NO: 892727 - DNA, 15 bp, Homo sapiens
aaaatacactgtgtt

SEQ ID NO: 892728 - DNA, 15 bp, Homo sapiens
aaatacactgtgttg

SEQ ID NO: 892729 - DNA, 15 bp, Homo sapiens
aatacactgtgttgc

SEQ ID NO: 892730 - DNA, 15 bp, Homo sapiens
atacactgtgttgct

SEQ ID NO: 892731 - DNA, 15 bp, Homo sapiens
tacactgtgttgctt

SEQ ID NO: 892732 - DNA, 15 bp, Homo sapiens
acactgtgttgcttt

SEQ ID NO: 892733 - DNA, 15 bp, Homo sapiens
cactgtgttgcttta

SEQ ID NO: 892734 - DNA, 15 bp, Homo sapiens
actgtgttgctttaa

SEQ ID NO: 892735 - DNA, 15 bp, Homo sapiens
ctgtgttgctttaac

SEQ ID NO: 892736 - DNA, 15 bp, Homo sapiens
tgtgttgctttaact

SEQ ID NO: 892737 - DNA, 15 bp, Homo sapiens
gtgttgctttaactt

SEQ ID NO: 892738 - DNA, 15 bp, Homo sapiens
tgttgctttaactta

SEQ ID NO: 892739 - DNA, 15 bp, Homo sapiens
gttgctttaacttag

SEQ ID NO: 892740 - DNA, 15 bp, Homo sapiens
ttgctttaacttaga

SEQ ID NO: 892741 - DNA, 15 bp, Homo sapiens
tgctttaacttagat

SEQ ID NO: 892742 - DNA, 15 bp, Homo sapiens
gctttaacttagatg

SEQ ID NO: 892743 - DNA, 15 bp, Homo sapiens
ctttaacttagatgc

SEQ ID NO: 892744 - DNA, 15 bp, Homo sapiens
tttaacttagatgcc

SEQ ID NO: 892745 - DNA, 15 bp, Homo sapiens
ttaacttagatgccc

SEQ ID NO: 892746 - DNA, 15 bp, Homo sapiens
taacttagatgccct

SEQ ID NO: 892747 - DNA, 15 bp, Homo sapiens
aacttagatgccctg

SEQ ID NO: 892748 - DNA, 15 bp, Homo sapiens
acttagatgccctgg

SEQ ID NO: 892749 - DNA, 15 bp, Homo sapiens
cttagatgccctggt

SEQ ID NO: 892750 - DNA, 15 bp, Homo sapiens
ttagatgccctggtt

SEQ ID NO: 892751 - DNA, 15 bp, Homo sapiens
tagatgccctggttt

SEQ ID NO: 892752 - DNA, 15 bp, Homo sapiens
agatgccctggttta

SEQ ID NO: 892753 - DNA, 15 bp, Homo sapiens
gatgccctggtttag

SEQ ID NO: 892754 - DNA, 15 bp, Homo sapiens
atgccctggtttaga

SEQ ID NO: 892755 - DNA, 15 bp, Homo sapiens
tgccctggtttagaa

SEQ ID NO: 892756 - DNA, 15 bp, Homo sapiens
gccctggtttagaaa

SEQ ID NO: 892757 - DNA, 15 bp, Homo sapiens
ccctggtttagaaag

SEQ ID NO: 892758 - DNA, 15 bp, Homo sapiens
cctggtttagaaagg

SEQ ID NO: 892759 - DNA, 15 bp, Homo sapiens
ctggtttagaaaggg

SEQ ID NO: 892760 - DNA, 15 bp, Homo sapiens
tggtttagaaaggga

SEQ ID NO: 892761 - DNA, 15 bp, Homo sapiens
ggtttagaaagggaa

SEQ ID NO: 892762 - DNA, 15 bp, Homo sapiens
gtttagaaagggaat

SEQ ID NO: 892763 - DNA, 15 bp, Homo sapiens
tttagaaagggaata

SEQ ID NO: 892764 - DNA, 15 bp, Homo sapiens
ttagaaagggaatat

SEQ ID NO: 892765 - DNA, 15 bp, Homo sapiens
tagaaagggaatata

SEQ ID NO: 892766 - DNA, 15 bp, Homo sapiens
agaaagggaatatat

SEQ ID NO: 892767 - DNA, 15 bp, Homo sapiens
gaaagggaatatatt

SEQ ID NO: 892768 - DNA, 15 bp, Homo sapiens
aaagggaatatattc

SEQ ID NO: 892769 - DNA, 15 bp, Homo sapiens
aagggaatatattct

SEQ ID NO: 892770 - DNA, 15 bp, Homo sapiens
agggaatatattctc

SEQ ID NO: 892771 - DNA, 15 bp, Homo sapiens
gggaatatattctcc

SEQ ID NO: 892772 - DNA, 15 bp, Homo sapiens
ggaatatattctcct

SEQ ID NO: 892773 - DNA, 15 bp, Homo sapiens
gaatatattctcctg

SEQ ID NO: 892774 - DNA, 15 bp, Homo sapiens
aatatattctcctgc

SEQ ID NO: 892775 - DNA, 15 bp, Homo sapiens
atatattctcctgcc

SEQ ID NO: 892776 - DNA, 15 bp, Homo sapiens
tatattctcctgcca

SEQ ID NO: 892777 - DNA, 15 bp, Homo sapiens
atattctcctgccag

SEQ ID NO: 892778 - DNA, 15 bp, Homo sapiens
tattctcctgccagc

SEQ ID NO: 892779 - DNA, 15 bp, Homo sapiens
attctcctgccagcc

SEQ ID NO: 892780 - DNA, 15 bp, Homo sapiens
ttctcctgccagccc

SEQ ID NO: 892781 - DNA, 15 bp, Homo sapiens
tctcctgccagcccc

SEQ ID NO: 892782 - DNA, 15 bp, Homo sapiens
ctcctgccagccccc

SEQ ID NO: 892783 - DNA, 15 bp, Homo sapiens
tcctgccagccccca

SEQ ID NO: 892784 - DNA, 15 bp, Homo sapiens
cctgccagcccccat

SEQ ID NO: 892785 - DNA, 15 bp, Homo sapiens
ctgccagcccccatt

SEQ ID NO: 892786 - DNA, 15 bp, Homo sapiens
tgccagcccccattc

SEQ ID NO: 892787 - DNA, 15 bp, Homo sapiens
gccagcccccattct

SEQ ID NO: 892788 - DNA, 15 bp, Homo sapiens
ccagcccccattctc

SEQ ID NO: 892789 - DNA, 15 bp, Homo sapiens
cagcccccattctcc

SEQ ID NO: 892790 - DNA, 15 bp, Homo sapiens
agcccccattctcct

SEQ ID NO: 892791 - DNA, 15 bp, Homo sapiens
gcccccattctcctt

SEQ ID NO: 892792 - DNA, 15 bp, Homo sapiens
cccccattctcctta

SEQ ID NO: 892793 - DNA, 15 bp, Homo sapiens
ccccattctccttat

SEQ ID NO: 892794 - DNA, 15 bp, Homo sapiens
cccattctccttatt

SEQ ID NO: 892795 - DNA, 15 bp, Homo sapiens
ccattctccttattg

SEQ ID NO: 892796 - DNA, 15 bp, Homo sapiens
cattctccttattgc

SEQ ID NO: 892797 - DNA, 15 bp, Homo sapiens
attctccttattgcc

SEQ ID NO: 892798 - DNA, 15 bp, Homo sapiens
ttctccttattgcca

SEQ ID NO: 892799 - DNA, 15 bp, Homo sapiens
tctccttattgccaa

SEQ ID NO: 892800 - DNA, 15 bp, Homo sapiens
ctccttattgccaat

SEQ ID NO: 892801 - DNA, 15 bp, Homo sapiens
tccttattgccaatc

SEQ ID NO: 892802 - DNA, 15 bp, Homo sapiens
ccttattgccaatct

SEQ ID NO: 892803 - DNA, 15 bp, Homo sapiens
cttattgccaatctc

SEQ ID NO: 892804 - DNA, 15 bp, Homo sapiens
ttattgccaatctct

SEQ ID NO: 892805 - DNA, 15 bp, Homo sapiens
tattgccaatctctg

SEQ ID NO: 892806 - DNA, 15 bp, Homo sapiens
attgccaatctctgc

SEQ ID NO: 892807 - DNA, 15 bp, Homo sapiens
ttgccaatctctgca

SEQ ID NO: 892808 - DNA, 15 bp, Homo sapiens
tgccaatctctgcaa

SEQ ID NO: 892809 - DNA, 15 bp, Homo sapiens
gccaatctctgcaac

SEQ ID NO: 892810 - DNA, 15 bp, Homo sapiens
ccaatctctgcaact

SEQ ID NO: 892811 - DNA, 15 bp, Homo sapiens
caatctctgcaactt

SEQ ID NO: 892812 - DNA, 15 bp, Homo sapiens
aatctctgcaacttt

SEQ ID NO: 892813 - DNA, 15 bp, Homo sapiens
atctctgcaacttta

SEQ ID NO: 892814 - DNA, 15 bp, Homo sapiens
tctctgcaactttac

SEQ ID NO: 892815 - DNA, 15 bp, Homo sapiens
ctctgcaactttaca

SEQ ID NO: 892816 - DNA, 15 bp, Homo sapiens
tctgcaactttacag

SEQ ID NO: 892817 - DNA, 15 bp, Homo sapiens
ctgcaactttacagc

SEQ ID NO: 892818 - DNA, 15 bp, Homo sapiens
tgcaactttacagct

SEQ ID NO: 892819 - DNA, 15 bp, Homo sapiens
gcaactttacagctt

SEQ ID NO: 892820 - DNA, 15 bp, Homo sapiens
caactttacagcttt

SEQ ID NO: 892821 - DNA, 15 bp, Homo sapiens
aactttacagctttg

SEQ ID NO: 892822 - DNA, 15 bp, Homo sapiens
actttacagctttgt

SEQ ID NO: 892823 - DNA, 15 bp, Homo sapiens
ctttacagctttgtg

SEQ ID NO: 892824 - DNA, 15 bp, Homo sapiens
tttacagctttgtga

SEQ ID NO: 892825 - DNA, 15 bp, Homo sapiens
ttacagctttgtgat

SEQ ID NO: 892826 - DNA, 15 bp, Homo sapiens
tacagctttgtgata

SEQ ID NO: 892827 - DNA, 15 bp, Homo sapiens
acagctttgtgatac

SEQ ID NO: 892828 - DNA, 15 bp, Homo sapiens
cagctttgtgatacc

SEQ ID NO: 892829 - DNA, 15 bp, Homo sapiens
agctttgtgatacct

SEQ ID NO: 892830 - DNA, 15 bp, Homo sapiens
gctttgtgatacctg

SEQ ID NO: 892831 - DNA, 15 bp, Homo sapiens
ctttgtgatacctga

SEQ ID NO: 892832 - DNA, 15 bp, Homo sapiens
tttgtgatacctgac

SEQ ID NO: 892833 - DNA, 15 bp, Homo sapiens
ttgtgatacctgact

SEQ ID NO: 892834 - DNA, 15 bp, Homo sapiens
tgtgatacctgactg

SEQ ID NO: 892835 - DNA, 15 bp, Homo sapiens
gtgatacctgactgg

SEQ ID NO: 892836 - DNA, 15 bp, Homo sapiens
tgatacctgactggc

SEQ ID NO: 892837 - DNA, 15 bp, Homo sapiens
gatacctgactggcc

SEQ ID NO: 892838 - DNA, 15 bp, Homo sapiens
atacctgactggccc

SEQ ID NO: 892839 - DNA, 15 bp, Homo sapiens
tacctgactggcccg

SEQ ID NO: 892840 - DNA, 15 bp, Homo sapiens
acctgactggcccgt

SEQ ID NO: 892841 - DNA, 15 bp, Homo sapiens
cctgactggcccgtg

SEQ ID NO: 892842 - DNA, 15 bp, Homo sapiens
ctgactggcccgtgc

SEQ ID NO: 892843 - DNA, 15 bp, Homo sapiens
tgactggcccgtgca

SEQ ID NO: 892844 - DNA, 15 bp, Homo sapiens
gactggcccgtgcag

SEQ ID NO: 892845 - DNA, 15 bp, Homo sapiens
actggcccgtgcagg

SEQ ID NO: 892846 - DNA, 15 bp, Homo sapiens
ctggcccgtgcaggt

SEQ ID NO: 892847 - DNA, 15 bp, Homo sapiens
tggcccgtgcaggta

SEQ ID NO: 892848 - DNA, 15 bp, Homo sapiens
ggcccgtgcaggtaa

SEQ ID NO: 892849 - DNA, 15 bp, Homo sapiens
gcccgtgcaggtaag

SEQ ID NO: 892850 - DNA, 15 bp, Homo sapiens
cccgtgcaggtaagt

SEQ ID NO: 892851 - DNA, 15 bp, Homo sapiens
ccgtgcaggtaagtg

SEQ ID NO: 892852 - DNA, 15 bp, Homo sapiens
cgtgcaggtaagtga

SEQ ID NO: 892853 - DNA, 15 bp, Homo sapiens
gtgcaggtaagtgaa

SEQ ID NO: 892854 - DNA, 15 bp, Homo sapiens
tgcaggtaagtgaat

SEQ ID NO: 892855 - DNA, 15 bp, Homo sapiens
gcaggtaagtgaatt

SEQ ID NO: 892856 - DNA, 15 bp, Homo sapiens
caggtaagtgaattt

SEQ ID NO: 892857 - DNA, 15 bp, Homo sapiens
aggtaagtgaatttc

SEQ ID NO: 892858 - DNA, 15 bp, Homo sapiens
ggtaagtgaatttct

SEQ ID NO: 892859 - DNA, 15 bp, Homo sapiens
gtaagtgaatttcta

SEQ ID NO: 892860 - DNA, 15 bp, Homo sapiens
taagtgaatttctac

SEQ ID NO: 892861 - DNA, 15 bp, Homo sapiens
aagtgaatttctacc

SEQ ID NO: 892862 - DNA, 15 bp, Homo sapiens
agtgaatttctaccc

SEQ ID NO: 892863 - DNA, 15 bp, Homo sapiens
gtgaatttctacccc

SEQ ID NO: 892864 - DNA, 15 bp, Homo sapiens
tgaatttctacccca

SEQ ID NO: 892865 - DNA, 15 bp, Homo sapiens
gaatttctaccccag

SEQ ID NO: 892866 - DNA, 15 bp, Homo sapiens
atttctaccccaggt

SEQ ID NO: 892867 - DNA, 15 bp, Homo sapiens
tttctaccccaggta

SEQ ID NO: 892868 - DNA, 15 bp, Homo sapiens
ttctaccccaggtaa

SEQ ID NO: 892869 - DNA, 15 bp, Homo sapiens
tctaccccaggtaag

SEQ ID NO: 892870 - DNA, 15 bp, Homo sapiens
ctaccccaggtaagc

SEQ ID NO: 892871 - DNA, 15 bp, Homo sapiens
taccccaggtaagca

SEQ ID NO: 892872 - DNA, 15 bp, Homo sapiens
accccaggtaagcaa

SEQ ID NO: 892873 - DNA, 15 bp, Homo sapiens
ccccaggtaagcaat

SEQ ID NO: 892874 - DNA, 15 bp, Homo sapiens
cccaggtaagcaatt

SEQ ID NO: 892875 - DNA, 15 bp, Homo sapiens
ccaggtaagcaatta

SEQ ID NO: 892876 - DNA, 15 bp, Homo sapiens
caggtaagcaattag

SEQ ID NO: 892877 - DNA, 15 bp, Homo sapiens
aggtaagcaattaga

SEQ ID NO: 892878 - DNA, 15 bp, Homo sapiens
ggtaagcaattagag

SEQ ID NO: 892879 - DNA, 15 bp, Homo sapiens
gtaagcaattagaga

SEQ ID NO: 892880 - DNA, 15 bp, Homo sapiens
taagcaattagagaa

SEQ ID NO: 892881 - DNA, 15 bp, Homo sapiens
aagcaattagagaat

SEQ ID NO: 892882 - DNA, 15 bp, Homo sapiens
agcaattagagaatt

SEQ ID NO: 892883 - DNA, 15 bp, Homo sapiens
gcaattagagaatta

SEQ ID NO: 892884 - DNA, 15 bp, Homo sapiens
caattagagaattag

SEQ ID NO: 892885 - DNA, 15 bp, Homo sapiens
aattagagaattaga

SEQ ID NO: 892886 - DNA, 15 bp, Homo sapiens
attagagaattagaa

SEQ ID NO: 892887 - DNA, 15 bp, Homo sapiens
ttagagaattagaag

SEQ ID NO: 892888 - DNA, 15 bp, Homo sapiens
tagagaattagaaga

SEQ ID NO: 892889 - DNA, 15 bp, Homo sapiens
agagaattagaagag

SEQ ID NO: 892890 - DNA, 15 bp, Homo sapiens
gagaattagaagagt

SEQ ID NO: 892891 - DNA, 15 bp, Homo sapiens
agaattagaagagta

SEQ ID NO: 892892 - DNA, 15 bp, Homo sapiens
gaattagaagagtag

SEQ ID NO: 892893 - DNA, 15 bp, Homo sapiens
aattagaagagtaga

SEQ ID NO: 892894 - DNA, 15 bp, Homo sapiens
attagaagagtagaa

SEQ ID NO: 892895 - DNA, 15 bp, Homo sapiens
ttagaagagtagaaa

SEQ ID NO: 892896 - DNA, 15 bp, Homo sapiens
tagaagagtagaaaa

SEQ ID NO: 892897 - DNA, 15 bp, Homo sapiens
agaagagtagaaaaa

SEQ ID NO: 892898 - DNA, 15 bp, Homo sapiens
gaagagtagaaaaac

SEQ ID NO: 892899 - DNA, 15 bp, Homo sapiens
aagagtagaaaaacc

SEQ ID NO: 892900 - DNA, 15 bp, Homo sapiens
agagtagaaaaacca

SEQ ID NO: 892901 - DNA, 15 bp, Homo sapiens
gagtagaaaaaccaa

SEQ ID NO: 892902 - DNA, 15 bp, Homo sapiens
agtagaaaaaccaag

SEQ ID NO: 892903 - DNA, 15 bp, Homo sapiens
gtagaaaaaccaagt

SEQ ID NO: 892904 - DNA, 15 bp, Homo sapiens
tagaaaaaccaagtg

SEQ ID NO: 892905 - DNA, 15 bp, Homo sapiens
agaaaaaccaagtga

SEQ ID NO: 892906 - DNA, 15 bp, Homo sapiens
gaaaaaccaagtgat

SEQ ID NO: 892907 - DNA, 15 bp, Homo sapiens
aaaaaccaagtgatt

SEQ ID NO: 892908 - DNA, 15 bp, Homo sapiens
aaaaccaagtgattt

SEQ ID NO: 892909 - DNA, 15 bp, Homo sapiens
aaaccaagtgatttc

SEQ ID NO: 892910 - DNA, 15 bp, Homo sapiens
aaccaagtgatttcc

SEQ ID NO: 892911 - DNA, 15 bp, Homo sapiens
accaagtgatttccc

SEQ ID NO: 892912 - DNA, 15 bp, Homo sapiens
ccaagtgatttcccg

SEQ ID NO: 892913 - DNA, 15 bp, Homo sapiens
caagtgatttcccga

SEQ ID NO: 892914 - DNA, 15 bp, Homo sapiens
aagtgatttcccgaa

SEQ ID NO: 892915 - DNA, 15 bp, Homo sapiens
agtgatttcccgaaa

SEQ ID NO: 892916 - DNA, 15 bp, Homo sapiens
gtgatttcccgaaag

SEQ ID NO: 892917 - DNA, 15 bp, Homo sapiens
tgatttcccgaaagt

SEQ ID NO: 892918 - DNA, 15 bp, Homo sapiens
gatttcccgaaagtg

SEQ ID NO: 892919 - DNA, 15 bp, Homo sapiens
atttcccgaaagtga

SEQ ID NO: 892920 - DNA, 15 bp, Homo sapiens
tttcccgaaagtgag

SEQ ID NO: 892921 - DNA, 15 bp, Homo sapiens
ttcccgaaagtgaga

SEQ ID NO: 892922 - DNA, 15 bp, Homo sapiens
tcccgaaagtgagag

SEQ ID NO: 892923 - DNA, 15 bp, Homo sapiens
cccgaaagtgagagc

SEQ ID NO: 892924 - DNA, 15 bp, Homo sapiens
ccgaaagtgagagca

SEQ ID NO: 892925 - DNA, 15 bp, Homo sapiens
cgaaagtgagagcaa

SEQ ID NO: 892926 - DNA, 15 bp, Homo sapiens
gaaagtgagagcaaa

SEQ ID NO: 892927 - DNA, 15 bp, Homo sapiens
aaagtgagagcaaat

SEQ ID NO: 892928 - DNA, 15 bp, Homo sapiens
aagtgagagcaaatc

SEQ ID NO: 892929 - DNA, 15 bp, Homo sapiens
agtgagagcaaatcc

SEQ ID NO: 892930 - DNA, 15 bp, Homo sapiens
gtgagagcaaatcct

SEQ ID NO: 892931 - DNA, 15 bp, Homo sapiens
tgagagcaaatcctc

SEQ ID NO: 892932 - DNA, 15 bp, Homo sapiens
gagagcaaatcctca

SEQ ID NO: 892933 - DNA, 15 bp, Homo sapiens
agagcaaatcctcat

SEQ ID NO: 892934 - DNA, 15 bp, Homo sapiens
gagcaaatcctcatt

SEQ ID NO: 892935 - DNA, 15 bp, Homo sapiens
agcaaatcctcattg

SEQ ID NO: 892936 - DNA, 15 bp, Homo sapiens
gcaaatcctcattgt

SEQ ID NO: 892937 - DNA, 15 bp, Homo sapiens
caaatcctcattgta

SEQ ID NO: 892938 - DNA, 15 bp, Homo sapiens
aaatcctcattgtag

SEQ ID NO: 892939 - DNA, 15 bp, Homo sapiens
aatcctcattgtagc

SEQ ID NO: 892940 - DNA, 15 bp, Homo sapiens
atcctcattgtagcc

SEQ ID NO: 892941 - DNA, 15 bp, Homo sapiens
tcctcattgtagcct

SEQ ID NO: 892942 - DNA, 15 bp, Homo sapiens
cctcattgtagcctg

SEQ ID NO: 892943 - DNA, 15 bp, Homo sapiens
ctcattgtagcctgt

SEQ ID NO: 892944 - DNA, 15 bp, Homo sapiens
tcattgtagcctgta

SEQ ID NO: 892945 - DNA, 15 bp, Homo sapiens
cattgtagcctgtat

SEQ ID NO: 892946 - DNA, 15 bp, Homo sapiens
attgtagcctgtatc

SEQ ID NO: 892947 - DNA, 15 bp, Homo sapiens
ttgtagcctgtatca

SEQ ID NO: 892948 - DNA, 15 bp, Homo sapiens
tgtagcctgtatcac

SEQ ID NO: 892949 - DNA, 15 bp, Homo sapiens
gtagcctgtatcact

SEQ ID NO: 892950 - DNA, 15 bp, Homo sapiens
tagcctgtatcactg

SEQ ID NO: 892951 - DNA, 15 bp, Homo sapiens
agcctgtatcactgc

SEQ ID NO: 892952 - DNA, 15 bp, Homo sapiens
gcctgtatcactgct

SEQ ID NO: 892953 - DNA, 15 bp, Homo sapiens
cctgtatcactgctt

SEQ ID NO: 892954 - DNA, 15 bp, Homo sapiens
ctgtatcactgctta

SEQ ID NO: 892955 - DNA, 15 bp, Homo sapiens
tgtatcactgcttaa

SEQ ID NO: 892956 - DNA, 15 bp, Homo sapiens
gtatcactgcttaac

SEQ ID NO: 892957 - DNA, 15 bp, Homo sapiens
tatcactgcttaacc

SEQ ID NO: 892958 - DNA, 15 bp, Homo sapiens
atcactgcttaacca

SEQ ID NO: 892959 - DNA, 15 bp, Homo sapiens
tcactgcttaaccaa

SEQ ID NO: 892960 - DNA, 15 bp, Homo sapiens
cactgcttaaccaaa

SEQ ID NO: 892961 - DNA, 15 bp, Homo sapiens
actgcttaaccaaat

SEQ ID NO: 892962 - DNA, 15 bp, Homo sapiens
ctgcttaaccaaatc

SEQ ID NO: 892963 - DNA, 15 bp, Homo sapiens
tgcttaaccaaatca

SEQ ID NO: 892964 - DNA, 15 bp, Homo sapiens
gcttaaccaaatcac

SEQ ID NO: 892965 - DNA, 15 bp, Homo sapiens
cttaaccaaatcacc

SEQ ID NO: 892966 - DNA, 15 bp, Homo sapiens
ttaaccaaatcaccc

SEQ ID NO: 892967 - DNA, 15 bp, Homo sapiens
taaccaaatcaccct

SEQ ID NO: 892968 - DNA, 15 bp, Homo sapiens
aaccaaatcaccctt

SEQ ID NO: 892969 - DNA, 15 bp, Homo sapiens
accaaatcacccttt

SEQ ID NO: 892970 - DNA, 15 bp, Homo sapiens
ccaaatcaccctttc

SEQ ID NO: 892971 - DNA, 15 bp, Homo sapiens
caaatcaccctttca

SEQ ID NO: 892972 - DNA, 15 bp, Homo sapiens
aaatcaccctttcat

SEQ ID NO: 892973 - DNA, 15 bp, Homo sapiens
aatcaccctttcatg

SEQ ID NO: 892974 - DNA, 15 bp, Homo sapiens
atcaccctttcatgt

SEQ ID NO: 892975 - DNA, 15 bp, Homo sapiens
tcaccctttcatgtg

SEQ ID NO: 892976 - DNA, 15 bp, Homo sapiens
caccctttcatgtgg

SEQ ID NO: 892977 - DNA, 15 bp, Homo sapiens
accctttcatgtggg

SEQ ID NO: 892978 - DNA, 15 bp, Homo sapiens
ccctttcatgtggga

SEQ ID NO: 892979 - DNA, 15 bp, Homo sapiens
cctttcatgtgggaa

SEQ ID NO: 892980 - DNA, 15 bp, Homo sapiens
ctttcatgtgggaaa

SEQ ID NO: 892981 - DNA, 15 bp, Homo sapiens
tttcatgtgggaaat

SEQ ID NO: 892982 - DNA, 15 bp, Homo sapiens
ttcatgtgggaaatc

SEQ ID NO: 892983 - DNA, 15 bp, Homo sapiens
tcatgtgggaaatca

SEQ ID NO: 892984 - DNA, 15 bp, Homo sapiens
catgtgggaaatcaa

SEQ ID NO: 892985 - DNA, 15 bp, Homo sapiens
atgtgggaaatcaaa

SEQ ID NO: 892986 - DNA, 15 bp, Homo sapiens
tgtgggaaatcaaaa

SEQ ID NO: 892987 - DNA, 15 bp, Homo sapiens
gtgggaaatcaaaac

SEQ ID NO: 892988 - DNA, 15 bp, Homo sapiens
tgggaaatcaaaaca

SEQ ID NO: 892989 - DNA, 15 bp, Homo sapiens
gggaaatcaaaacaa

SEQ ID NO: 892990 - DNA, 15 bp, Homo sapiens
ggaaatcaaaacaac

SEQ ID NO: 892991 - DNA, 15 bp, Homo sapiens
gaaatcaaaacaaca

SEQ ID NO: 892992 - DNA, 15 bp, Homo sapiens
aaatcaaaacaacaa

SEQ ID NO: 892993 - DNA, 15 bp, Homo sapiens
aatcaaaacaacaat

SEQ ID NO: 892994 - DNA, 15 bp, Homo sapiens
atcaaaacaacaatg

SEQ ID NO: 892995 - DNA, 15 bp, Homo sapiens
tcaaaacaacaatgt

SEQ ID NO: 892996 - DNA, 15 bp, Homo sapiens
caaaacaacaatgtt

SEQ ID NO: 892997 - DNA, 15 bp, Homo sapiens
aaaacaacaatgttt

SEQ ID NO: 892998 - DNA, 15 bp, Homo sapiens
aaacaacaatgtttc

SEQ ID NO: 892999 - DNA, 15 bp, Homo sapiens
aacaacaatgtttcc

SEQ ID NO: 893000 - DNA, 15 bp, Homo sapiens
acaacaatgtttcct

SEQ ID NO: 893001 - DNA, 15 bp, Homo sapiens
caacaatgtttccta

SEQ ID NO: 893002 - DNA, 15 bp, Homo sapiens
aacaatgtttcctat

SEQ ID NO: 893003 - DNA, 15 bp, Homo sapiens
acaatgtttcctata

SEQ ID NO: 893004 - DNA, 15 bp, Homo sapiens
caatgtttcctatat

SEQ ID NO: 893005 - DNA, 15 bp, Homo sapiens
aatgtttcctatatc

SEQ ID NO: 893006 - DNA, 15 bp, Homo sapiens
atgtttcctatatca

SEQ ID NO: 893007 - DNA, 15 bp, Homo sapiens
tgtttcctatatcaa

SEQ ID NO: 893008 - DNA, 15 bp, Homo sapiens
gtttcctatatcaag

SEQ ID NO: 893009 - DNA, 15 bp, Homo sapiens
tttcctatatcaaga

SEQ ID NO: 893010 - DNA, 15 bp, Homo sapiens
ttcctatatcaagat

SEQ ID NO: 893011 - DNA, 15 bp, Homo sapiens
tcctatatcaagatg

SEQ ID NO: 893012 - DNA, 15 bp, Homo sapiens
cctatatcaagatgt

SEQ ID NO: 893013 - DNA, 15 bp, Homo sapiens
ctatatcaagatgtg

SEQ ID NO: 893014 - DNA, 15 bp, Homo sapiens
tatatcaagatgtgg

SEQ ID NO: 893015 - DNA, 15 bp, Homo sapiens
atatcaagatgtgga

SEQ ID NO: 893016 - DNA, 15 bp, Homo sapiens
tatcaagatgtggaa

SEQ ID NO: 893017 - DNA, 15 bp, Homo sapiens
atcaagatgtggaat

SEQ ID NO: 893018 - DNA, 15 bp, Homo sapiens
tcaagatgtggaatt

SEQ ID NO: 893019 - DNA, 15 bp, Homo sapiens
caagatgtggaattt

SEQ ID NO: 893020 - DNA, 15 bp, Homo sapiens
aagatgtggaatttt

SEQ ID NO: 893021 - DNA, 15 bp, Homo sapiens
agatgtggaattttt

SEQ ID NO: 893022 - DNA, 15 bp, Homo sapiens
gatgtggaatttttc

SEQ ID NO: 893023 - DNA, 15 bp, Homo sapiens
atgtggaatttttct

SEQ ID NO: 893024 - DNA, 15 bp, Homo sapiens
tgtggaatttttctc

SEQ ID NO: 893025 - DNA, 15 bp, Homo sapiens
gtggaatttttctct

SEQ ID NO: 893026 - DNA, 15 bp, Homo sapiens
tggaatttttctctt

SEQ ID NO: 893027 - DNA, 15 bp, Homo sapiens
ggaatttttctcttt

SEQ ID NO: 893028 - DNA, 15 bp, Homo sapiens
gaatttttctctttc

SEQ ID NO: 893029 - DNA, 15 bp, Homo sapiens
aatttttctctttca

SEQ ID NO: 893030 - DNA, 15 bp, Homo sapiens
atttttctctttcaa

SEQ ID NO: 893031 - DNA, 15 bp, Homo sapiens
tttttctctttcaaa

SEQ ID NO: 893032 - DNA, 15 bp, Homo sapiens
ttttctctttcaaat

SEQ ID NO: 893033 - DNA, 15 bp, Homo sapiens
tttctctttcaaata

SEQ ID NO: 893034 - DNA, 15 bp, Homo sapiens
ttctctttcaaataa

SEQ ID NO: 893035 - DNA, 15 bp, Homo sapiens
tctctttcaaataat

SEQ ID NO: 893036 - DNA, 15 bp, Homo sapiens
ctctttcaaataatg

SEQ ID NO: 893037 - DNA, 15 bp, Homo sapiens
tctttcaaataatgt

SEQ ID NO: 893038 - DNA, 15 bp, Homo sapiens
ctttcaaataatgta

SEQ ID NO: 893039 - DNA, 15 bp, Homo sapiens
tttcaaataatgtat

SEQ ID NO: 893040 - DNA, 15 bp, Homo sapiens
ttcaaataatgtatg

SEQ ID NO: 893041 - DNA, 15 bp, Homo sapiens
tcaaataatgtatga

SEQ ID NO: 893042 - DNA, 15 bp, Homo sapiens
caaataatgtatgaa

SEQ ID NO: 893043 - DNA, 15 bp, Homo sapiens
aaataatgtatgaaa

SEQ ID NO: 893044 - DNA, 15 bp, Homo sapiens
aataatgtatgaaat

SEQ ID NO: 893045 - DNA, 15 bp, Homo sapiens
ataatgtatgaaatt

SEQ ID NO: 893046 - DNA, 15 bp, Homo sapiens
taatgtatgaaattc

SEQ ID NO: 893047 - DNA, 15 bp, Homo sapiens
aatgtatgaaattca

SEQ ID NO: 893048 - DNA, 15 bp, Homo sapiens
atgtatgaaattcac

SEQ ID NO: 893049 - DNA, 15 bp, Homo sapiens
tgtatgaaattcact

SEQ ID NO: 893050 - DNA, 15 bp, Homo sapiens
gtatgaaattcactg

SEQ ID NO: 893051 - DNA, 15 bp, Homo sapiens
tatgaaattcactgt

SEQ ID NO: 893052 - DNA, 15 bp, Homo sapiens
atgaaattcactgta

SEQ ID NO: 893053 - DNA, 15 bp, Homo sapiens
tgaaattcactgtag

SEQ ID NO: 893054 - DNA, 15 bp, Homo sapiens
gaaattcactgtagc

SEQ ID NO: 893055 - DNA, 15 bp, Homo sapiens
aaattcactgtagca

SEQ ID NO: 893056 - DNA, 15 bp, Homo sapiens
aattcactgtagcaa

SEQ ID NO: 893057 - DNA, 15 bp, Homo sapiens
attcactgtagcaag

SEQ ID NO: 893058 - DNA, 15 bp, Homo sapiens
ttcactgtagcaagt

SEQ ID NO: 893059 - DNA, 15 bp, Homo sapiens
tcactgtagcaagtg

SEQ ID NO: 893060 - DNA, 15 bp, Homo sapiens
cactgtagcaagtga

SEQ ID NO: 893061 - DNA, 15 bp, Homo sapiens
actgtagcaagtgat

SEQ ID NO: 893062 - DNA, 15 bp, Homo sapiens
ctgtagcaagtgatg

SEQ ID NO: 893063 - DNA, 15 bp, Homo sapiens
tgtagcaagtgatgg

SEQ ID NO: 893064 - DNA, 15 bp, Homo sapiens
gtagcaagtgatggc

SEQ ID NO: 893065 - DNA, 15 bp, Homo sapiens
tagcaagtgatggca

SEQ ID NO: 893066 - DNA, 15 bp, Homo sapiens
agcaagtgatggcag

SEQ ID NO: 893067 - DNA, 15 bp, Homo sapiens
gcaagtgatggcagc

SEQ ID NO: 893068 - DNA, 15 bp, Homo sapiens
caagtgatggcagct

SEQ ID NO: 893069 - DNA, 15 bp, Homo sapiens
aagtgatggcagctc

SEQ ID NO: 893070 - DNA, 15 bp, Homo sapiens
agtgatggcagctca

SEQ ID NO: 893071 - DNA, 15 bp, Homo sapiens
gtgatggcagctcac

SEQ ID NO: 893072 - DNA, 15 bp, Homo sapiens
tgatggcagctcaca

SEQ ID NO: 893073 - DNA, 15 bp, Homo sapiens
gatggcagctcacag

SEQ ID NO: 893074 - DNA, 15 bp, Homo sapiens
atggcagctcacagg

SEQ ID NO: 893075 - DNA, 15 bp, Homo sapiens
tggcagctcacaggt

SEQ ID NO: 893076 - DNA, 15 bp, Homo sapiens
ggcagctcacaggtt

SEQ ID NO: 893077 - DNA, 15 bp, Homo sapiens
gcagctcacaggttc

SEQ ID NO: 893078 - DNA, 15 bp, Homo sapiens
cagctcacaggttct

SEQ ID NO: 893079 - DNA, 15 bp, Homo sapiens
agctcacaggttctg

SEQ ID NO: 893080 - DNA, 15 bp, Homo sapiens
gctcacaggttctgg

SEQ ID NO: 893081 - DNA, 15 bp, Homo sapiens
ctcacaggttctggt

SEQ ID NO: 893082 - DNA, 15 bp, Homo sapiens
tcacaggttctggtc

SEQ ID NO: 893083 - DNA, 15 bp, Homo sapiens
cacaggttctggtcc

SEQ ID NO: 893084 - DNA, 15 bp, Homo sapiens
acaggttctggtccc

SEQ ID NO: 893085 - DNA, 15 bp, Homo sapiens
caggttctggtcccc

SEQ ID NO: 893086 - DNA, 15 bp, Homo sapiens
aggttctggtccccg

SEQ ID NO: 893087 - DNA, 15 bp, Homo sapiens
ggttctggtccccga

SEQ ID NO: 893088 - DNA, 15 bp, Homo sapiens
gttctggtccccgac

SEQ ID NO: 893089 - DNA, 15 bp, Homo sapiens
ttctggtccccgact

SEQ ID NO: 893090 - DNA, 15 bp, Homo sapiens
tctggtccccgactc

SEQ ID NO: 893091 - DNA, 15 bp, Homo sapiens
ctggtccccgactcc

SEQ ID NO: 893092 - DNA, 15 bp, Homo sapiens
tggtccccgactccc

SEQ ID NO: 893093 - DNA, 15 bp, Homo sapiens
ggtccccgactccct

SEQ ID NO: 893094 - DNA, 15 bp, Homo sapiens
gtccccgactccctc

SEQ ID NO: 893095 - DNA, 15 bp, Homo sapiens
tccccgactccctct

SEQ ID NO: 893096 - DNA, 15 bp, Homo sapiens
ccccgactccctctg

SEQ ID NO: 893097 - DNA, 15 bp, Homo sapiens
cccgactccctctgc

SEQ ID NO: 893098 - DNA, 15 bp, Homo sapiens
ccgactccctctgct

SEQ ID NO: 893099 - DNA, 15 bp, Homo sapiens
cgactccctctgcta

SEQ ID NO: 893100 - DNA, 15 bp, Homo sapiens
gactccctctgctaa

SEQ ID NO: 893101 - DNA, 15 bp, Homo sapiens
actccctctgctaac

SEQ ID NO: 893102 - DNA, 15 bp, Homo sapiens
ctccctctgctaacc

SEQ ID NO: 893103 - DNA, 15 bp, Homo sapiens
tccctctgctaacct

SEQ ID NO: 893104 - DNA, 15 bp, Homo sapiens
ccctctgctaaccta

SEQ ID NO: 893105 - DNA, 15 bp, Homo sapiens
cctctgctaacctaa

SEQ ID NO: 893106 - DNA, 15 bp, Homo sapiens
ctctgctaacctaac

SEQ ID NO: 893107 - DNA, 15 bp, Homo sapiens
tctgctaacctaacc

SEQ ID NO: 893108 - DNA, 15 bp, Homo sapiens
ctgctaacctaacct

SEQ ID NO: 893109 - DNA, 15 bp, Homo sapiens
tgctaacctaacctg

SEQ ID NO: 893110 - DNA, 15 bp, Homo sapiens
gctaacctaacctgc

SEQ ID NO: 893111 - DNA, 15 bp, Homo sapiens
ctaacctaacctgcg

SEQ ID NO: 893112 - DNA, 15 bp, Homo sapiens
taacctaacctgcgt

SEQ ID NO: 893113 - DNA, 15 bp, Homo sapiens
aacctaacctgcgtt

SEQ ID NO: 893114 - DNA, 15 bp, Homo sapiens
acctaacctgcgttc

SEQ ID NO: 893115 - DNA, 15 bp, Homo sapiens
cctaacctgcgttct

SEQ ID NO: 893116 - DNA, 15 bp, Homo sapiens
ctaacctgcgttctg

SEQ ID NO: 893117 - DNA, 15 bp, Homo sapiens
taacctgcgttctgc

SEQ ID NO: 893118 - DNA, 15 bp, Homo sapiens
aacctgcgttctgct

SEQ ID NO: 893119 - DNA, 15 bp, Homo sapiens
acctgcgttctgctg

SEQ ID NO: 893120 - DNA, 15 bp, Homo sapiens
cctgcgttctgctgt

SEQ ID NO: 893121 - DNA, 15 bp, Homo sapiens
ctgcgttctgctgtg

SEQ ID NO: 893122 - DNA, 15 bp, Homo sapiens
tgcgttctgctgtgc

SEQ ID NO: 893123 - DNA, 15 bp, Homo sapiens
gcgttctgctgtgcc

SEQ ID NO: 893124 - DNA, 15 bp, Homo sapiens
cgttctgctgtgccc

SEQ ID NO: 893125 - DNA, 15 bp, Homo sapiens
gttctgctgtgcccc

SEQ ID NO: 893126 - DNA, 15 bp, Homo sapiens
ttctgctgtgcccct

SEQ ID NO: 893127 - DNA, 15 bp, Homo sapiens
tctgctgtgcccctg

SEQ ID NO: 893128 - DNA, 15 bp, Homo sapiens
ctgctgtgcccctgc

SEQ ID NO: 893129 - DNA, 15 bp, Homo sapiens
tgctgtgcccctgcc

SEQ ID NO: 893130 - DNA, 15 bp, Homo sapiens
gctgtgcccctgccc

SEQ ID NO: 893131 - DNA, 15 bp, Homo sapiens
ctgtgcccctgccct

SEQ ID NO: 893132 - DNA, 15 bp, Homo sapiens
tgtgcccctgccctg

SEQ ID NO: 893133 - DNA, 15 bp, Homo sapiens
gtgcccctgccctgc

SEQ ID NO: 893134 - DNA, 15 bp, Homo sapiens
tgcccctgccctgct

SEQ ID NO: 893135 - DNA, 15 bp, Homo sapiens
gcccctgccctgctt

SEQ ID NO: 893136 - DNA, 15 bp, Homo sapiens
cccctgccctgcttg

SEQ ID NO: 893137 - DNA, 15 bp, Homo sapiens
ccctgccctgcttga

SEQ ID NO: 893138 - DNA, 15 bp, Homo sapiens
cctgccctgcttgag

SEQ ID NO: 893139 - DNA, 15 bp, Homo sapiens
ctgccctgcttgaga

SEQ ID NO: 893140 - DNA, 15 bp, Homo sapiens
tgccctgcttgagac

SEQ ID NO: 893141 - DNA, 15 bp, Homo sapiens
gccctgcttgagaca

SEQ ID NO: 893142 - DNA, 15 bp, Homo sapiens
ccctgcttgagacac

SEQ ID NO: 893143 - DNA, 15 bp, Homo sapiens
cctgcttgagacacc

SEQ ID NO: 893144 - DNA, 15 bp, Homo sapiens
ctgcttgagacacct

SEQ ID NO: 893145 - DNA, 15 bp, Homo sapiens
tgcttgagacaccta

SEQ ID NO: 893146 - DNA, 15 bp, Homo sapiens
gcttgagacacctat

SEQ ID NO: 893147 - DNA, 15 bp, Homo sapiens
cttgagacacctatt

SEQ ID NO: 893148 - DNA, 15 bp, Homo sapiens
ttgagacacctattt

SEQ ID NO: 893149 - DNA, 15 bp, Homo sapiens
tgagacacctatttt

SEQ ID NO: 893150 - DNA, 15 bp, Homo sapiens
gagacacctattttg

SEQ ID NO: 893151 - DNA, 15 bp, Homo sapiens
agacacctattttgt

SEQ ID NO: 893152 - DNA, 15 bp, Homo sapiens
gacacctattttgtg

SEQ ID NO: 893153 - DNA, 15 bp, Homo sapiens
acacctattttgtgc

SEQ ID NO: 893154 - DNA, 15 bp, Homo sapiens
cacctattttgtgcc

SEQ ID NO: 893155 - DNA, 15 bp, Homo sapiens
acctattttgtgcct

SEQ ID NO: 893156 - DNA, 15 bp, Homo sapiens
cctattttgtgcctg

SEQ ID NO: 893157 - DNA, 15 bp, Homo sapiens
ctattttgtgcctgt

SEQ ID NO: 893158 - DNA, 15 bp, Homo sapiens
tattttgtgcctgta

SEQ ID NO: 893159 - DNA, 15 bp, Homo sapiens
attttgtgcctgtat

SEQ ID NO: 893160 - DNA, 15 bp, Homo sapiens
ttttgtgcctgtatt

SEQ ID NO: 893161 - DNA, 15 bp, Homo sapiens
tttgtgcctgtattc

SEQ ID NO: 893162 - DNA, 15 bp, Homo sapiens
ttgtgcctgtattct

SEQ ID NO: 893163 - DNA, 15 bp, Homo sapiens
tgtgcctgtattcta

SEQ ID NO: 893164 - DNA, 15 bp, Homo sapiens
gtgcctgtattctag

SEQ ID NO: 893165 - DNA, 15 bp, Homo sapiens
tgcctgtattctagt

SEQ ID NO: 893166 - DNA, 15 bp, Homo sapiens
gcctgtattctagtg

SEQ ID NO: 893167 - DNA, 15 bp, Homo sapiens
cctgtattctagtgg

SEQ ID NO: 893168 - DNA, 15 bp, Homo sapiens
ctgtattctagtggg

SEQ ID NO: 893169 - DNA, 15 bp, Homo sapiens
tgtattctagtgggc

SEQ ID NO: 893170 - DNA, 15 bp, Homo sapiens
gtattctagtgggca

SEQ ID NO: 893171 - DNA, 15 bp, Homo sapiens
tattctagtgggcag

SEQ ID NO: 893172 - DNA, 15 bp, Homo sapiens
attctagtgggcagc

SEQ ID NO: 893173 - DNA, 15 bp, Homo sapiens
ttctagtgggcagcc

SEQ ID NO: 893174 - DNA, 15 bp, Homo sapiens
tctagtgggcagccc

SEQ ID NO: 893175 - DNA, 15 bp, Homo sapiens
ctagtgggcagccca

SEQ ID NO: 893176 - DNA, 15 bp, Homo sapiens
tagtgggcagcccat

SEQ ID NO: 893177 - DNA, 15 bp, Homo sapiens
agtgggcagcccatc

SEQ ID NO: 893178 - DNA, 15 bp, Homo sapiens
gtgggcagcccatcc

SEQ ID NO: 893179 - DNA, 15 bp, Homo sapiens
tgggcagcccatccc

SEQ ID NO: 893180 - DNA, 15 bp, Homo sapiens
gggcagcccatccct

SEQ ID NO: 893181 - DNA, 15 bp, Homo sapiens
ggcagcccatccctc

SEQ ID NO: 893182 - DNA, 15 bp, Homo sapiens
gcagcccatccctcg

SEQ ID NO: 893183 - DNA, 15 bp, Homo sapiens
cagcccatccctcga

SEQ ID NO: 893184 - DNA, 15 bp, Homo sapiens
agcccatccctcgag

SEQ ID NO: 893185 - DNA, 15 bp, Homo sapiens
gcccatccctcgagt

SEQ ID NO: 893186 - DNA, 15 bp, Homo sapiens
cccatccctcgagtg

SEQ ID NO: 893187 - DNA, 15 bp, Homo sapiens
ccatccctcgagtgg

SEQ ID NO: 893188 - DNA, 15 bp, Homo sapiens
catccctcgagtgga

SEQ ID NO: 893189 - DNA, 15 bp, Homo sapiens
atccctcgagtggaa

SEQ ID NO: 893190 - DNA, 15 bp, Homo sapiens
tccctcgagtggaat

SEQ ID NO: 893191 - DNA, 15 bp, Homo sapiens
ccctcgagtggaata

SEQ ID NO: 893192 - DNA, 15 bp, Homo sapiens
cctcgagtggaatac

SEQ ID NO: 893193 - DNA, 15 bp, Homo sapiens
ctcgagtggaataca

SEQ ID NO: 893194 - DNA, 15 bp, Homo sapiens
tcgagtggaatacat

SEQ ID NO: 893195 - DNA, 15 bp, Homo sapiens
cgagtggaatacatg

SEQ ID NO: 893196 - DNA, 15 bp, Homo sapiens
gagtggaatacatgg

SEQ ID NO: 893197 - DNA, 15 bp, Homo sapiens
agtggaatacatgga

SEQ ID NO: 893198 - DNA, 15 bp, Homo sapiens
gtggaatacatggag

SEQ ID NO: 893199 - DNA, 15 bp, Homo sapiens
tggaatacatggagg

SEQ ID NO: 893200 - DNA, 15 bp, Homo sapiens
ggaatacatggagga

SEQ ID NO: 893201 - DNA, 15 bp, Homo sapiens
gaatacatggaggaa

SEQ ID NO: 893202 - DNA, 15 bp, Homo sapiens
aatacatggaggaag

SEQ ID NO: 893203 - DNA, 15 bp, Homo sapiens
atacatggaggaaga

SEQ ID NO: 893204 - DNA, 15 bp, Homo sapiens
tacatggaggaagaa

SEQ ID NO: 893205 - DNA, 15 bp, Homo sapiens
acatggaggaagaaa

SEQ ID NO: 893206 - DNA, 15 bp, Homo sapiens
catggaggaagaaaa

SEQ ID NO: 893207 - DNA, 15 bp, Homo sapiens
atggaggaagaaaag

SEQ ID NO: 893208 - DNA, 15 bp, Homo sapiens
tggaggaagaaaaga

SEQ ID NO: 893209 - DNA, 15 bp, Homo sapiens
ggaggaagaaaagaa

SEQ ID NO: 893210 - DNA, 15 bp, Homo sapiens
gaggaagaaaagaaa

SEQ ID NO: 893211 - DNA, 15 bp, Homo sapiens
aggaagaaaagaaaa

SEQ ID NO: 893212 - DNA, 15 bp, Homo sapiens
ggaagaaaagaaaac

SEQ ID NO: 893213 - DNA, 15 bp, Homo sapiens
gaagaaaagaaaaca

SEQ ID NO: 893214 - DNA, 15 bp, Homo sapiens
aagaaaagaaaacat

SEQ ID NO: 893215 - DNA, 15 bp, Homo sapiens
agaaaagaaaacatg

SEQ ID NO: 893216 - DNA, 15 bp, Homo sapiens
gaaaagaaaacatgg

SEQ ID NO: 893217 - DNA, 15 bp, Homo sapiens
aaaagaaaacatggg

SEQ ID NO: 893218 - DNA, 15 bp, Homo sapiens
aaagaaaacatgggg

SEQ ID NO: 893219 - DNA, 15 bp, Homo sapiens
aagaaaacatggggc

SEQ ID NO: 893220 - DNA, 15 bp, Homo sapiens
agaaaacatggggca

SEQ ID NO: 893221 - DNA, 15 bp, Homo sapiens
gaaaacatggggcac

SEQ ID NO: 893222 - DNA, 15 bp, Homo sapiens
aaaacatggggcaca

SEQ ID NO: 893223 - DNA, 15 bp, Homo sapiens
aaacatggggcacag

SEQ ID NO: 893224 - DNA, 15 bp, Homo sapiens
aacatggggcacagt

SEQ ID NO: 893225 - DNA, 15 bp, Homo sapiens
acatggggcacagtg

SEQ ID NO: 893226 - DNA, 15 bp, Homo sapiens
catggggcacagtgt

SEQ ID NO: 893227 - DNA, 15 bp, Homo sapiens
atggggcacagtgtt

SEQ ID NO: 893228 - DNA, 15 bp, Homo sapiens
tggggcacagtgttc

SEQ ID NO: 893229 - DNA, 15 bp, Homo sapiens
ggggcacagtgttca

SEQ ID NO: 893230 - DNA, 15 bp, Homo sapiens
gggcacagtgttcaa

SEQ ID NO: 893231 - DNA, 15 bp, Homo sapiens
ggcacagtgttcaag

SEQ ID NO: 893232 - DNA, 15 bp, Homo sapiens
gcacagtgttcaaga

SEQ ID NO: 893233 - DNA, 15 bp, Homo sapiens
cacagtgttcaagac

SEQ ID NO: 893234 - DNA, 15 bp, Homo sapiens
acagtgttcaagact

SEQ ID NO: 893235 - DNA, 15 bp, Homo sapiens
cagtgttcaagactc

SEQ ID NO: 893236 - DNA, 15 bp, Homo sapiens
agtgttcaagactct

SEQ ID NO: 893237 - DNA, 15 bp, Homo sapiens
gtgttcaagactctg

SEQ ID NO: 893238 - DNA, 15 bp, Homo sapiens
tgttcaagactctga

SEQ ID NO: 893239 - DNA, 15 bp, Homo sapiens
gttcaagactctgaa

SEQ ID NO: 893240 - DNA, 15 bp, Homo sapiens
ttcaagactctgaag

SEQ ID NO: 893241 - DNA, 15 bp, Homo sapiens
tcaagactctgaagt

SEQ ID NO: 893242 - DNA, 15 bp, Homo sapiens
caagactctgaagtc

SEQ ID NO: 893243 - DNA, 15 bp, Homo sapiens
aagactctgaagtcc

SEQ ID NO: 893244 - DNA, 15 bp, Homo sapiens
agactctgaagtcct

SEQ ID NO: 893245 - DNA, 15 bp, Homo sapiens
gactctgaagtcctt

SEQ ID NO: 893246 - DNA, 15 bp, Homo sapiens
actctgaagtccttg

SEQ ID NO: 893247 - DNA, 15 bp, Homo sapiens
ctctgaagtccttgt

SEQ ID NO: 893248 - DNA, 15 bp, Homo sapiens
tctgaagtccttgta

SEQ ID NO: 893249 - DNA, 15 bp, Homo sapiens
ctgaagtccttgtat

SEQ ID NO: 893250 - DNA, 15 bp, Homo sapiens
tgaagtccttgtata

SEQ ID NO: 893251 - DNA, 15 bp, Homo sapiens
gaagtccttgtataa

SEQ ID NO: 893252 - DNA, 15 bp, Homo sapiens
aagtccttgtataaa

SEQ ID NO: 893253 - DNA, 15 bp, Homo sapiens
agtccttgtataaaa

SEQ ID NO: 893254 - DNA, 15 bp, Homo sapiens
gtccttgtataaaac

SEQ ID NO: 893255 - DNA, 15 bp, Homo sapiens
tccttgtataaaacc

SEQ ID NO: 893256 - DNA, 15 bp, Homo sapiens
ccttgtataaaaccc

SEQ ID NO: 893257 - DNA, 15 bp, Homo sapiens
cttgtataaaaccca

SEQ ID NO: 893258 - DNA, 15 bp, Homo sapiens
ttgtataaaacccat

SEQ ID NO: 893259 - DNA, 15 bp, Homo sapiens
tgtataaaacccatg

SEQ ID NO: 893260 - DNA, 15 bp, Homo sapiens
gtataaaacccatgc

SEQ ID NO: 893261 - DNA, 15 bp, Homo sapiens
tataaaacccatgct

SEQ ID NO: 893262 - DNA, 15 bp, Homo sapiens
ataaaacccatgctt

SEQ ID NO: 893263 - DNA, 15 bp, Homo sapiens
taaaacccatgcttg

SEQ ID NO: 893264 - DNA, 15 bp, Homo sapiens
aaaacccatgcttgc

SEQ ID NO: 893265 - DNA, 15 bp, Homo sapiens
aaacccatgcttgct

SEQ ID NO: 893266 - DNA, 15 bp, Homo sapiens
aacccatgcttgcta

SEQ ID NO: 893267 - DNA, 15 bp, Homo sapiens
acccatgcttgctat

SEQ ID NO: 893268 - DNA, 15 bp, Homo sapiens
cccatgcttgctatg

SEQ ID NO: 893269 - DNA, 15 bp, Homo sapiens
ccatgcttgctatga

SEQ ID NO: 893270 - DNA, 15 bp, Homo sapiens
catgcttgctatgag

SEQ ID NO: 893271 - DNA, 15 bp, Homo sapiens
atgcttgctatgagt

SEQ ID NO: 893272 - DNA, 15 bp, Homo sapiens
tgcttgctatgagta

SEQ ID NO: 893273 - DNA, 15 bp, Homo sapiens
gcttgctatgagtac

SEQ ID NO: 893274 - DNA, 15 bp, Homo sapiens
cttgctatgagtaca

SEQ ID NO: 893275 - DNA, 15 bp, Homo sapiens
ttgctatgagtacaa

SEQ ID NO: 893276 - DNA, 15 bp, Homo sapiens
tgctatgagtacaat

SEQ ID NO: 893277 - DNA, 15 bp, Homo sapiens
gctatgagtacaatc

SEQ ID NO: 893278 - DNA, 15 bp, Homo sapiens
ctatgagtacaatca

SEQ ID NO: 893279 - DNA, 15 bp, Homo sapiens
tatgagtacaatcac

SEQ ID NO: 893280 - DNA, 15 bp, Homo sapiens
atgagtacaatcaca

SEQ ID NO: 893281 - DNA, 15 bp, Homo sapiens
tgagtacaatcacat

SEQ ID NO: 893282 - DNA, 15 bp, Homo sapiens
gagtacaatcacatt

SEQ ID NO: 893283 - DNA, 15 bp, Homo sapiens
agtacaatcacattt

SEQ ID NO: 893284 - DNA, 15 bp, Homo sapiens
gtacaatcacatttt

SEQ ID NO: 893285 - DNA, 15 bp, Homo sapiens
tacaatcacattttt

SEQ ID NO: 893286 - DNA, 15 bp, Homo sapiens
acaatcacatttttc

SEQ ID NO: 893287 - DNA, 15 bp, Homo sapiens
caatcacatttttcc

SEQ ID NO: 893288 - DNA, 15 bp, Homo sapiens
aatcacatttttcca

SEQ ID NO: 893289 - DNA, 15 bp, Homo sapiens
atcacatttttccac

SEQ ID NO: 893290 - DNA, 15 bp, Homo sapiens
tcacatttttccact

SEQ ID NO: 893291 - DNA, 15 bp, Homo sapiens
cacatttttccactt

SEQ ID NO: 893292 - DNA, 15 bp, Homo sapiens
acatttttccacttc

SEQ ID NO: 893293 - DNA, 15 bp, Homo sapiens
catttttccacttct

SEQ ID NO: 893294 - DNA, 15 bp, Homo sapiens
atttttccacttctt

SEQ ID NO: 893295 - DNA, 15 bp, Homo sapiens
tttttccacttcttg

SEQ ID NO: 893296 - DNA, 15 bp, Homo sapiens
ttttccacttcttga

SEQ ID NO: 893297 - DNA, 15 bp, Homo sapiens
tttccacttcttgaa

SEQ ID NO: 893298 - DNA, 15 bp, Homo sapiens
ttccacttcttgaaa

SEQ ID NO: 893299 - DNA, 15 bp, Homo sapiens
tccacttcttgaaaa

SEQ ID NO: 893300 - DNA, 15 bp, Homo sapiens
ccacttcttgaaaag

SEQ ID NO: 893301 - DNA, 15 bp, Homo sapiens
cacttcttgaaaagt

SEQ ID NO: 893302 - DNA, 15 bp, Homo sapiens
acttcttgaaaagta

SEQ ID NO: 893303 - DNA, 15 bp, Homo sapiens
cttcttgaaaagtac

SEQ ID NO: 893304 - DNA, 15 bp, Homo sapiens
ttcttgaaaagtact

SEQ ID NO: 893305 - DNA, 15 bp, Homo sapiens
tcttgaaaagtactg

SEQ ID NO: 893306 - DNA, 15 bp, Homo sapiens
cttgaaaagtactgt

SEQ ID NO: 893307 - DNA, 15 bp, Homo sapiens
ttgaaaagtactgtg

SEQ ID NO: 893308 - DNA, 15 bp, Homo sapiens
tgaaaagtactgtgg

SEQ ID NO: 893309 - DNA, 15 bp, Homo sapiens
gaaaagtactgtggc

SEQ ID NO: 893310 - DNA, 15 bp, Homo sapiens
aaaagtactgtggct

SEQ ID NO: 893311 - DNA, 15 bp, Homo sapiens
aaagtactgtggctt

SEQ ID NO: 893312 - DNA, 15 bp, Homo sapiens
aagtactgtggcttc

SEQ ID NO: 893313 - DNA, 15 bp, Homo sapiens
agtactgtggcttcc

SEQ ID NO: 893314 - DNA, 15 bp, Homo sapiens
gtactgtggcttcca

SEQ ID NO: 893315 - DNA, 15 bp, Homo sapiens
tactgtggcttccat

SEQ ID NO: 893316 - DNA, 15 bp, Homo sapiens
actgtggcttccatg

SEQ ID NO: 893317 - DNA, 15 bp, Homo sapiens
ctgtggcttccatga

SEQ ID NO: 893318 - DNA, 15 bp, Homo sapiens
tgtggcttccatgaa

SEQ ID NO: 893319 - DNA, 15 bp, Homo sapiens
gtggcttccatgaag

SEQ ID NO: 893320 - DNA, 15 bp, Homo sapiens
tggcttccatgaaga

SEQ ID NO: 893321 - DNA, 15 bp, Homo sapiens
ggcttccatgaagat

SEQ ID NO: 893322 - DNA, 15 bp, Homo sapiens
gcttccatgaagata

SEQ ID NO: 893323 - DNA, 15 bp, Homo sapiens
cttccatgaagataa

SEQ ID NO: 893324 - DNA, 15 bp, Homo sapiens
ttccatgaagataac

SEQ ID NO: 893325 - DNA, 15 bp, Homo sapiens
tccatgaagataaca

SEQ ID NO: 893326 - DNA, 15 bp, Homo sapiens
ccatgaagataacat

SEQ ID NO: 893327 - DNA, 15 bp, Homo sapiens
catgaagataacatt

SEQ ID NO: 893328 - DNA, 15 bp, Homo sapiens
atgaagataacattc

SEQ ID NO: 893329 - DNA, 15 bp, Homo sapiens
tgaagataacattcc

SEQ ID NO: 893330 - DNA, 15 bp, Homo sapiens
gaagataacattccc

SEQ ID NO: 893331 - DNA, 15 bp, Homo sapiens
aagataacattcccc

SEQ ID NO: 893332 - DNA, 15 bp, Homo sapiens
agataacattcccca

SEQ ID NO: 893333 - DNA, 15 bp, Homo sapiens
gataacattccccag

SEQ ID NO: 893334 - DNA, 15 bp, Homo sapiens
ataacattccccagc

SEQ ID NO: 893335 - DNA, 15 bp, Homo sapiens
taacattccccagct

SEQ ID NO: 893336 - DNA, 15 bp, Homo sapiens
aacattccccagctg

SEQ ID NO: 893337 - DNA, 15 bp, Homo sapiens
acattccccagctgg

SEQ ID NO: 893338 - DNA, 15 bp, Homo sapiens
cattccccagctgga

SEQ ID NO: 893339 - DNA, 15 bp, Homo sapiens
attccccagctggaa

SEQ ID NO: 893340 - DNA, 15 bp, Homo sapiens
ttccccagctggaag

SEQ ID NO: 893341 - DNA, 15 bp, Homo sapiens
tccccagctggaaga

SEQ ID NO: 893342 - DNA, 15 bp, Homo sapiens
ccccagctggaagac

SEQ ID NO: 893343 - DNA, 15 bp, Homo sapiens
cccagctggaagacg

SEQ ID NO: 893344 - DNA, 15 bp, Homo sapiens
ccagctggaagacgt

SEQ ID NO: 893345 - DNA, 15 bp, Homo sapiens
cagctggaagacgtt

SEQ ID NO: 893346 - DNA, 15 bp, Homo sapiens
agctggaagacgttt

SEQ ID NO: 893347 - DNA, 15 bp, Homo sapiens
gctggaagacgtttc

SEQ ID NO: 893348 - DNA, 15 bp, Homo sapiens
ctggaagacgtttct

SEQ ID NO: 893349 - DNA, 15 bp, Homo sapiens
tggaagacgtttctc

SEQ ID NO: 893350 - DNA, 15 bp, Homo sapiens
ggaagacgtttctca

SEQ ID NO: 893351 - DNA, 15 bp, Homo sapiens
gaagacgtttctcag

SEQ ID NO: 893352 - DNA, 15 bp, Homo sapiens
aagacgtttctcagt

SEQ ID NO: 893353 - DNA, 15 bp, Homo sapiens
agacgtttctcagtt

SEQ ID NO: 893354 - DNA, 15 bp, Homo sapiens
gacgtttctcagttc

SEQ ID NO: 893355 - DNA, 15 bp, Homo sapiens
acgtttctcagttcc

SEQ ID NO: 893356 - DNA, 15 bp, Homo sapiens
cgtttctcagttcct

SEQ ID NO: 893357 - DNA, 15 bp, Homo sapiens
gtttctcagttcctg

SEQ ID NO: 893358 - DNA, 15 bp, Homo sapiens
tttctcagttcctgc

SEQ ID NO: 893359 - DNA, 15 bp, Homo sapiens
ttctcagttcctgca

SEQ ID NO: 893360 - DNA, 15 bp, Homo sapiens
tctcagttcctgcag

SEQ ID NO: 893361 - DNA, 15 bp, Homo sapiens
ctcagttcctgcaga

SEQ ID NO: 893362 - DNA, 15 bp, Homo sapiens
tcagttcctgcagag

SEQ ID NO: 893363 - DNA, 15 bp, Homo sapiens
cagttcctgcagagt

SEQ ID NO: 893364 - DNA, 15 bp, Homo sapiens
agttcctgcagagta

SEQ ID NO: 893365 - DNA, 15 bp, Homo sapiens
gttcctgcagagtaa

SEQ ID NO: 893366 - DNA, 15 bp, Homo sapiens
ttcctgcagagtaag

SEQ ID NO: 893367 - DNA, 15 bp, Homo sapiens
tcctgcagagtaagt

SEQ ID NO: 893368 - DNA, 15 bp, Homo sapiens
cctgcagagtaagtc

SEQ ID NO: 893369 - DNA, 15 bp, Homo sapiens
ctgcagagtaagtcc

SEQ ID NO: 893370 - DNA, 15 bp, Homo sapiens
tgcagagtaagtcca

SEQ ID NO: 893371 - DNA, 15 bp, Homo sapiens
gcagagtaagtccac

SEQ ID NO: 893372 - DNA, 15 bp, Homo sapiens
cagagtaagtccaca

SEQ ID NO: 893373 - DNA, 15 bp, Homo sapiens
agagtaagtccacat

SEQ ID NO: 893374 - DNA, 15 bp, Homo sapiens
gagtaagtccacatc

SEQ ID NO: 893375 - DNA, 15 bp, Homo sapiens
agtaagtccacatca

SEQ ID NO: 893376 - DNA, 15 bp, Homo sapiens
gtaagtccacatcag

SEQ ID NO: 893377 - DNA, 15 bp, Homo sapiens
taagtccacatcagg

SEQ ID NO: 893378 - DNA, 15 bp, Homo sapiens
aagtccacatcaggg

SEQ ID NO: 893379 - DNA, 15 bp, Homo sapiens
agtccacatcagggt

SEQ ID NO: 893380 - DNA, 15 bp, Homo sapiens
gtccacatcagggtc

SEQ ID NO: 893381 - DNA, 15 bp, Homo sapiens
tccacatcagggtca

SEQ ID NO: 893382 - DNA, 15 bp, Homo sapiens
ccacatcagggtcaa

SEQ ID NO: 893383 - DNA, 15 bp, Homo sapiens
cacatcagggtcaat

SEQ ID NO: 893384 - DNA, 15 bp, Homo sapiens
acatcagggtcaatg

SEQ ID NO: 893385 - DNA, 15 bp, Homo sapiens
catcagggtcaatgg

SEQ ID NO: 893386 - DNA, 15 bp, Homo sapiens
atcagggtcaatggc

SEQ ID NO: 893387 - DNA, 15 bp, Homo sapiens
tcagggtcaatggcc

SEQ ID NO: 893388 - DNA, 15 bp, Homo sapiens
cagggtcaatggccc

SEQ ID NO: 893389 - DNA, 15 bp, Homo sapiens
agggtcaatggccct

SEQ ID NO: 893390 - DNA, 15 bp, Homo sapiens
gggtcaatggccctg

SEQ ID NO: 893391 - DNA, 15 bp, Homo sapiens
ggtcaatggccctgc

SEQ ID NO: 893392 - DNA, 15 bp, Homo sapiens
gtcaatggccctgca

SEQ ID NO: 893393 - DNA, 15 bp, Homo sapiens
tcaatggccctgcag

SEQ ID NO: 893394 - DNA, 15 bp, Homo sapiens
caatggccctgcaga

SEQ ID NO: 893395 - DNA, 15 bp, Homo sapiens
aatggccctgcagaa

SEQ ID NO: 893396 - DNA, 15 bp, Homo sapiens
atggccctgcagaaa

SEQ ID NO: 893397 - DNA, 15 bp, Homo sapiens
tggccctgcagaaag

SEQ ID NO: 893398 - DNA, 15 bp, Homo sapiens
ggccctgcagaaagt

SEQ ID NO: 893399 - DNA, 15 bp, Homo sapiens
gccctgcagaaagtt

SEQ ID NO: 893400 - DNA, 15 bp, Homo sapiens
ccctgcagaaagttg

SEQ ID NO: 893401 - DNA, 15 bp, Homo sapiens
cctgcagaaagttgg

SEQ ID NO: 893402 - DNA, 15 bp, Homo sapiens
ctgcagaaagttggg

SEQ ID NO: 893403 - DNA, 15 bp, Homo sapiens
tgcagaaagttgggg

SEQ ID NO: 893404 - DNA, 15 bp, Homo sapiens
gcagaaagttggggg

SEQ ID NO: 893405 - DNA, 15 bp, Homo sapiens
cagaaagttggggga

SEQ ID NO: 893406 - DNA, 15 bp, Homo sapiens
agaaagttgggggag

SEQ ID NO: 893407 - DNA, 15 bp, Homo sapiens
gaaagttgggggagg

SEQ ID NO: 893408 - DNA, 15 bp, Homo sapiens
aaagttgggggagga

SEQ ID NO: 893409 - DNA, 15 bp, Homo sapiens
aagttgggggaggat

SEQ ID NO: 893410 - DNA, 15 bp, Homo sapiens
agttgggggaggatt

SEQ ID NO: 893411 - DNA, 15 bp, Homo sapiens
gttgggggaggattg

SEQ ID NO: 893412 - DNA, 15 bp, Homo sapiens
ttgggggaggattga

SEQ ID NO: 893413 - DNA, 15 bp, Homo sapiens
tgggggaggattgag

SEQ ID NO: 893414 - DNA, 15 bp, Homo sapiens
gggggaggattgagg

SEQ ID NO: 893415 - DNA, 15 bp, Homo sapiens
ggggaggattgaggc

SEQ ID NO: 893416 - DNA, 15 bp, Homo sapiens
gggaggattgaggca

SEQ ID NO: 893417 - DNA, 15 bp, Homo sapiens
ggaggattgaggcag

SEQ ID NO: 893418 - DNA, 15 bp, Homo sapiens
gaggattgaggcaga

SEQ ID NO: 893419 - DNA, 15 bp, Homo sapiens
aggattgaggcagag

SEQ ID NO: 893420 - DNA, 15 bp, Homo sapiens
ggattgaggcagagg

SEQ ID NO: 893421 - DNA, 15 bp, Homo sapiens
gattgaggcagagga

SEQ ID NO: 893422 - DNA, 15 bp, Homo sapiens
attgaggcagaggag

SEQ ID NO: 893423 - DNA, 15 bp, Homo sapiens
ttgaggcagaggaga

SEQ ID NO: 893424 - DNA, 15 bp, Homo sapiens
tgaggcagaggagag

SEQ ID NO: 893425 - DNA, 15 bp, Homo sapiens
gaggcagaggagagg

SEQ ID NO: 893426 - DNA, 15 bp, Homo sapiens
aggcagaggagaggg

SEQ ID NO: 893427 - DNA, 15 bp, Homo sapiens
ggcagaggagaggga

SEQ ID NO: 893428 - DNA, 15 bp, Homo sapiens
gcagaggagagggaa

SEQ ID NO: 893429 - DNA, 15 bp, Homo sapiens
cagaggagagggaag

SEQ ID NO: 893430 - DNA, 15 bp, Homo sapiens
agaggagagggaagg

SEQ ID NO: 893431 - DNA, 15 bp, Homo sapiens
gaggagagggaaggg

SEQ ID NO: 893432 - DNA, 15 bp, Homo sapiens
aggagagggaagggg

SEQ ID NO: 893433 - DNA, 15 bp, Homo sapiens
ggagagggaagggga

SEQ ID NO: 893434 - DNA, 15 bp, Homo sapiens
gagagggaaggggaa

SEQ ID NO: 893435 - DNA, 15 bp, Homo sapiens
agagggaaggggaag

SEQ ID NO: 893436 - DNA, 15 bp, Homo sapiens
gagggaaggggaaga

SEQ ID NO: 893437 - DNA, 15 bp, Homo sapiens
agggaaggggaagac

SEQ ID NO: 893438 - DNA, 15 bp, Homo sapiens
gggaaggggaagaca

SEQ ID NO: 893439 - DNA, 15 bp, Homo sapiens
ggaaggggaagacaa

SEQ ID NO: 893440 - DNA, 15 bp, Homo sapiens
gaaggggaagacaag

SEQ ID NO: 893441 - DNA, 15 bp, Homo sapiens
aaggggaagacaagt

SEQ ID NO: 893442 - DNA, 15 bp, Homo sapiens
aggggaagacaagta

SEQ ID NO: 893443 - DNA, 15 bp, Homo sapiens
ggggaagacaagtat

SEQ ID NO: 893444 - DNA, 15 bp, Homo sapiens
gggaagacaagtatg

SEQ ID NO: 893445 - DNA, 15 bp, Homo sapiens
ggaagacaagtatgt

SEQ ID NO: 893446 - DNA, 15 bp, Homo sapiens
gaagacaagtatgtg

SEQ ID NO: 893447 - DNA, 15 bp, Homo sapiens
aagacaagtatgtgg

SEQ ID NO: 893448 - DNA, 15 bp, Homo sapiens
agacaagtatgtgga

SEQ ID NO: 893449 - DNA, 15 bp, Homo sapiens
gacaagtatgtggag

SEQ ID NO: 893450 - DNA, 15 bp, Homo sapiens
acaagtatgtggagg

SEQ ID NO: 893451 - DNA, 15 bp, Homo sapiens
caagtatgtggaggc

SEQ ID NO: 893452 - DNA, 15 bp, Homo sapiens
aagtatgtggaggca

SEQ ID NO: 893453 - DNA, 15 bp, Homo sapiens
agtatgtggaggcaa

SEQ ID NO: 893454 - DNA, 15 bp, Homo sapiens
gtatgtggaggcaag

SEQ ID NO: 893455 - DNA, 15 bp, Homo sapiens
tatgtggaggcaagt

SEQ ID NO: 893456 - DNA, 15 bp, Homo sapiens
atgtggaggcaagta

SEQ ID NO: 893457 - DNA, 15 bp, Homo sapiens
tgtggaggcaagtat

SEQ ID NO: 893458 - DNA, 15 bp, Homo sapiens
gtggaggcaagtatg

SEQ ID NO: 893459 - DNA, 15 bp, Homo sapiens
tggaggcaagtatga

SEQ ID NO: 893460 - DNA, 15 bp, Homo sapiens
ggaggcaagtatgaa

SEQ ID NO: 893461 - DNA, 15 bp, Homo sapiens
gaggcaagtatgaaa

SEQ ID NO: 893462 - DNA, 15 bp, Homo sapiens
aggcaagtatgaaag

SEQ ID NO: 893463 - DNA, 15 bp, Homo sapiens
ggcaagtatgaaagc

SEQ ID NO: 893464 - DNA, 15 bp, Homo sapiens
gcaagtatgaaagca

SEQ ID NO: 893465 - DNA, 15 bp, Homo sapiens
caagtatgaaagcat

SEQ ID NO: 893466 - DNA, 15 bp, Homo sapiens
aagtatgaaagcatg

SEQ ID NO: 893467 - DNA, 15 bp, Homo sapiens
agtatgaaagcatgt

SEQ ID NO: 893468 - DNA, 15 bp, Homo sapiens
gtatgaaagcatgtg

SEQ ID NO: 893469 - DNA, 15 bp, Homo sapiens
tatgaaagcatgtgc

SEQ ID NO: 893470 - DNA, 15 bp, Homo sapiens
atgaaagcatgtgct

SEQ ID NO: 893471 - DNA, 15 bp, Homo sapiens
tgaaagcatgtgctt

SEQ ID NO: 893472 - DNA, 15 bp, Homo sapiens
gaaagcatgtgcttg

SEQ ID NO: 893473 - DNA, 15 bp, Homo sapiens
aaagcatgtgcttgt

SEQ ID NO: 893474 - DNA, 15 bp, Homo sapiens
aagcatgtgcttgta

SEQ ID NO: 893475 - DNA, 15 bp, Homo sapiens
agcatgtgcttgtag

SEQ ID NO: 893476 - DNA, 15 bp, Homo sapiens
gcatgtgcttgtagg

SEQ ID NO: 893477 - DNA, 15 bp, Homo sapiens
catgtgcttgtagga

SEQ ID NO: 893478 - DNA, 15 bp, Homo sapiens
atgtgcttgtaggaa

SEQ ID NO: 893479 - DNA, 15 bp, Homo sapiens
tgtgcttgtaggaat

SEQ ID NO: 893480 - DNA, 15 bp, Homo sapiens
gtgcttgtaggaatg

SEQ ID NO: 893481 - DNA, 15 bp, Homo sapiens
tgcttgtaggaatgc

SEQ ID NO: 893482 - DNA, 15 bp, Homo sapiens
gcttgtaggaatgca

SEQ ID NO: 893483 - DNA, 15 bp, Homo sapiens
cttgtaggaatgcat

SEQ ID NO: 893484 - DNA, 15 bp, Homo sapiens
ttgtaggaatgcatg

SEQ ID NO: 893485 - DNA, 15 bp, Homo sapiens
tgtaggaatgcatgc

SEQ ID NO: 893486 - DNA, 15 bp, Homo sapiens
gtaggaatgcatgca

SEQ ID NO: 893487 - DNA, 15 bp, Homo sapiens
taggaatgcatgcag

SEQ ID NO: 893488 - DNA, 15 bp, Homo sapiens
aggaatgcatgcagg

SEQ ID NO: 893489 - DNA, 15 bp, Homo sapiens
ggaatgcatgcaggt

SEQ ID NO: 893490 - DNA, 15 bp, Homo sapiens
gaatgcatgcaggtt

SEQ ID NO: 893491 - DNA, 15 bp, Homo sapiens
aatgcatgcaggttg

SEQ ID NO: 893492 - DNA, 15 bp, Homo sapiens
atgcatgcaggttga

SEQ ID NO: 893493 - DNA, 15 bp, Homo sapiens
tgcatgcaggttgat

SEQ ID NO: 893494 - DNA, 15 bp, Homo sapiens
gcatgcaggttgatt

SEQ ID NO: 893495 - DNA, 15 bp, Homo sapiens
catgcaggttgattc

SEQ ID NO: 893496 - DNA, 15 bp, Homo sapiens
atgcaggttgattcc

SEQ ID NO: 893497 - DNA, 15 bp, Homo sapiens
tgcaggttgattcct

SEQ ID NO: 893498 - DNA, 15 bp, Homo sapiens
gcaggttgattcctc

SEQ ID NO: 893499 - DNA, 15 bp, Homo sapiens
caggttgattcctcc

SEQ ID NO: 893500 - DNA, 15 bp, Homo sapiens
aggttgattcctcca

SEQ ID NO: 893501 - DNA, 15 bp, Homo sapiens
ggttgattcctccag

SEQ ID NO: 893502 - DNA, 15 bp, Homo sapiens
gttgattcctccagg

SEQ ID NO: 893503 - DNA, 15 bp, Homo sapiens
ttgattcctccagga

SEQ ID NO: 893504 - DNA, 15 bp, Homo sapiens
tgattcctccaggaa

SEQ ID NO: 893505 - DNA, 15 bp, Homo sapiens
gattcctccaggaag

SEQ ID NO: 893506 - DNA, 15 bp, Homo sapiens
attcctccaggaaga

SEQ ID NO: 893507 - DNA, 15 bp, Homo sapiens
ttcctccaggaagaa

SEQ ID NO: 893508 - DNA, 15 bp, Homo sapiens
tcctccaggaagaac

SEQ ID NO: 893509 - DNA, 15 bp, Homo sapiens
cctccaggaagaact

SEQ ID NO: 893510 - DNA, 15 bp, Homo sapiens
ctccaggaagaacta

SEQ ID NO: 893511 - DNA, 15 bp, Homo sapiens
tccaggaagaactaa

SEQ ID NO: 893512 - DNA, 15 bp, Homo sapiens
ccaggaagaactaaa

SEQ ID NO: 893513 - DNA, 15 bp, Homo sapiens
caggaagaactaaat

SEQ ID NO: 893514 - DNA, 15 bp, Homo sapiens
aggaagaactaaatt

SEQ ID NO: 893515 - DNA, 15 bp, Homo sapiens
ggaagaactaaattt

SEQ ID NO: 893516 - DNA, 15 bp, Homo sapiens
gaagaactaaatttc

SEQ ID NO: 893517 - DNA, 15 bp, Homo sapiens
aagaactaaatttca

SEQ ID NO: 893518 - DNA, 15 bp, Homo sapiens
agaactaaatttcac

SEQ ID NO: 893519 - DNA, 15 bp, Homo sapiens
gaactaaatttcact

SEQ ID NO: 893520 - DNA, 15 bp, Homo sapiens
aactaaatttcactg

SEQ ID NO: 893521 - DNA, 15 bp, Homo sapiens
actaaatttcactgt

SEQ ID NO: 893522 - DNA, 15 bp, Homo sapiens
ctaaatttcactgtg

SEQ ID NO: 893523 - DNA, 15 bp, Homo sapiens
taaatttcactgtgc

SEQ ID NO: 893524 - DNA, 15 bp, Homo sapiens
aaatttcactgtgct

SEQ ID NO: 893525 - DNA, 15 bp, Homo sapiens
aatttcactgtgctc

SEQ ID NO: 893526 - DNA, 15 bp, Homo sapiens
atttcactgtgctct

SEQ ID NO: 893527 - DNA, 15 bp, Homo sapiens
tttcactgtgctctg

SEQ ID NO: 893528 - DNA, 15 bp, Homo sapiens
ttcactgtgctctgc

SEQ ID NO: 893529 - DNA, 15 bp, Homo sapiens
tcactgtgctctgcc

SEQ ID NO: 893530 - DNA, 15 bp, Homo sapiens
cactgtgctctgcct

SEQ ID NO: 893531 - DNA, 15 bp, Homo sapiens
actgtgctctgcctt

SEQ ID NO: 893532 - DNA, 15 bp, Homo sapiens
ctgtgctctgccttc

SEQ ID NO: 893533 - DNA, 15 bp, Homo sapiens
tgtgctctgccttcc

SEQ ID NO: 893534 - DNA, 15 bp, Homo sapiens
gtgctctgccttccc

SEQ ID NO: 893535 - DNA, 15 bp, Homo sapiens
tgctctgccttccct

SEQ ID NO: 893536 - DNA, 15 bp, Homo sapiens
gctctgccttccctc

SEQ ID NO: 893537 - DNA, 15 bp, Homo sapiens
ctctgccttccctcc

SEQ ID NO: 893538 - DNA, 15 bp, Homo sapiens
tctgccttccctcca

SEQ ID NO: 893539 - DNA, 15 bp, Homo sapiens
ctgccttccctccag

SEQ ID NO: 893540 - DNA, 15 bp, Homo sapiens
tgccttccctccagc

SEQ ID NO: 893541 - DNA, 15 bp, Homo sapiens
gccttccctccagcc

SEQ ID NO: 893542 - DNA, 15 bp, Homo sapiens
ccttccctccagccc

SEQ ID NO: 893543 - DNA, 15 bp, Homo sapiens
cttccctccagcccc

SEQ ID NO: 893544 - DNA, 15 bp, Homo sapiens
ttccctccagcccct

SEQ ID NO: 893545 - DNA, 15 bp, Homo sapiens
tccctccagccccta

SEQ ID NO: 893546 - DNA, 15 bp, Homo sapiens
ccctccagcccctac

SEQ ID NO: 893547 - DNA, 15 bp, Homo sapiens
cctccagcccctact

SEQ ID NO: 893548 - DNA, 15 bp, Homo sapiens
ctccagcccctactg

SEQ ID NO: 893549 - DNA, 15 bp, Homo sapiens
tccagcccctactgt

SEQ ID NO: 893550 - DNA, 15 bp, Homo sapiens
ccagcccctactgtg

SEQ ID NO: 893551 - DNA, 15 bp, Homo sapiens
cagcccctactgtgt

SEQ ID NO: 893552 - DNA, 15 bp, Homo sapiens
agcccctactgtgtt

SEQ ID NO: 893553 - DNA, 15 bp, Homo sapiens
gcccctactgtgttt

SEQ ID NO: 893554 - DNA, 15 bp, Homo sapiens
cccctactgtgttta

SEQ ID NO: 893555 - DNA, 15 bp, Homo sapiens
ccctactgtgtttat

SEQ ID NO: 893556 - DNA, 15 bp, Homo sapiens
cctactgtgtttatc

SEQ ID NO: 893557 - DNA, 15 bp, Homo sapiens
ctactgtgtttatcc

SEQ ID NO: 893558 - DNA, 15 bp, Homo sapiens
tactgtgtttatcca

SEQ ID NO: 893559 - DNA, 15 bp, Homo sapiens
actgtgtttatccac

SEQ ID NO: 893560 - DNA, 15 bp, Homo sapiens
ctgtgtttatccact

SEQ ID NO: 893561 - DNA, 15 bp, Homo sapiens
tgtgtttatccactt

SEQ ID NO: 893562 - DNA, 15 bp, Homo sapiens
gtgtttatccacttt

SEQ ID NO: 893563 - DNA, 15 bp, Homo sapiens
tgtttatccactttc

SEQ ID NO: 893564 - DNA, 15 bp, Homo sapiens
gtttatccactttca

SEQ ID NO: 893565 - DNA, 15 bp, Homo sapiens
tttatccactttcat

SEQ ID NO: 893566 - DNA, 15 bp, Homo sapiens
ttatccactttcatt

SEQ ID NO: 893567 - DNA, 15 bp, Homo sapiens
tatccactttcattc

SEQ ID NO: 893568 - DNA, 15 bp, Homo sapiens
atccactttcattca

SEQ ID NO: 893569 - DNA, 15 bp, Homo sapiens
tccactttcattcaa

SEQ ID NO: 893570 - DNA, 15 bp, Homo sapiens
ccactttcattcaat

SEQ ID NO: 893571 - DNA, 15 bp, Homo sapiens
cactttcattcaatc

SEQ ID NO: 893572 - DNA, 15 bp, Homo sapiens
actttcattcaatca

SEQ ID NO: 893573 - DNA, 15 bp, Homo sapiens
ctttcattcaatcaa

SEQ ID NO: 893574 - DNA, 15 bp, Homo sapiens
tttcattcaatcaaa

SEQ ID NO: 893575 - DNA, 15 bp, Homo sapiens
ttcattcaatcaaac

SEQ ID NO: 893576 - DNA, 15 bp, Homo sapiens
tcattcaatcaaaca

SEQ ID NO: 893577 - DNA, 15 bp, Homo sapiens
cattcaatcaaacac

SEQ ID NO: 893578 - DNA, 15 bp, Homo sapiens
attcaatcaaacacc

SEQ ID NO: 893579 - DNA, 15 bp, Homo sapiens
ttcaatcaaacacct

SEQ ID NO: 893580 - DNA, 15 bp, Homo sapiens
tcaatcaaacacctg

SEQ ID NO: 893581 - DNA, 15 bp, Homo sapiens
caatcaaacacctga

SEQ ID NO: 893582 - DNA, 15 bp, Homo sapiens
aatcaaacacctgag

SEQ ID NO: 893583 - DNA, 15 bp, Homo sapiens
atcaaacacctgagg

SEQ ID NO: 893584 - DNA, 15 bp, Homo sapiens
tcaaacacctgaggc

SEQ ID NO: 893585 - DNA, 15 bp, Homo sapiens
caaacacctgaggct

SEQ ID NO: 893586 - DNA, 15 bp, Homo sapiens
aaacacctgaggctg

SEQ ID NO: 893587 - DNA, 15 bp, Homo sapiens
aacacctgaggctgt

SEQ ID NO: 893588 - DNA, 15 bp, Homo sapiens
acacctgaggctgtg

SEQ ID NO: 893589 - DNA, 15 bp, Homo sapiens
cacctgaggctgtgg

SEQ ID NO: 893590 - DNA, 15 bp, Homo sapiens
acctgaggctgtgga

SEQ ID NO: 893591 - DNA, 15 bp, Homo sapiens
cctgaggctgtggat

SEQ ID NO: 893592 - DNA, 15 bp, Homo sapiens
ctgaggctgtggatt

SEQ ID NO: 893593 - DNA, 15 bp, Homo sapiens
tgaggctgtggattt

SEQ ID NO: 893594 - DNA, 15 bp, Homo sapiens
gaggctgtggatttt

SEQ ID NO: 893595 - DNA, 15 bp, Homo sapiens
aggctgtggattttg

SEQ ID NO: 893596 - DNA, 15 bp, Homo sapiens
ggctgtggattttgc

SEQ ID NO: 893597 - DNA, 15 bp, Homo sapiens
gctgtggattttgcc

SEQ ID NO: 893598 - DNA, 15 bp, Homo sapiens
ctgtggattttgccg

SEQ ID NO: 893599 - DNA, 15 bp, Homo sapiens
tgtggattttgccgt

SEQ ID NO: 893600 - DNA, 15 bp, Homo sapiens
gtggattttgccgtg

SEQ ID NO: 893601 - DNA, 15 bp, Homo sapiens
tggattttgccgtgt

SEQ ID NO: 893602 - DNA, 15 bp, Homo sapiens
ggattttgccgtgta

SEQ ID NO: 893603 - DNA, 15 bp, Homo sapiens
gattttgccgtgtac

SEQ ID NO: 893604 - DNA, 15 bp, Homo sapiens
attttgccgtgtacc

SEQ ID NO: 893605 - DNA, 15 bp, Homo sapiens
ttttgccgtgtacct

SEQ ID NO: 893606 - DNA, 15 bp, Homo sapiens
tttgccgtgtacctg

SEQ ID NO: 893607 - DNA, 15 bp, Homo sapiens
ttgccgtgtacctgt

SEQ ID NO: 893608 - DNA, 15 bp, Homo sapiens
tgccgtgtacctgtc

SEQ ID NO: 893609 - DNA, 15 bp, Homo sapiens
gccgtgtacctgtcc

SEQ ID NO: 893610 - DNA, 15 bp, Homo sapiens
ccgtgtacctgtccc

SEQ ID NO: 893611 - DNA, 15 bp, Homo sapiens
cgtgtacctgtccct

SEQ ID NO: 893612 - DNA, 15 bp, Homo sapiens
gtgtacctgtccctg

SEQ ID NO: 893613 - DNA, 15 bp, Homo sapiens
tgtacctgtccctga

SEQ ID NO: 893614 - DNA, 15 bp, Homo sapiens
gtacctgtccctgaa

SEQ ID NO: 893615 - DNA, 15 bp, Homo sapiens
tacctgtccctgaaa

SEQ ID NO: 893616 - DNA, 15 bp, Homo sapiens
acctgtccctgaaaa

SEQ ID NO: 893617 - DNA, 15 bp, Homo sapiens
cctgtccctgaaaag

SEQ ID NO: 893618 - DNA, 15 bp, Homo sapiens
ctgtccctgaaaagt

SEQ ID NO: 893619 - DNA, 15 bp, Homo sapiens
tgtccctgaaaagta

SEQ ID NO: 893620 - DNA, 15 bp, Homo sapiens
gtccctgaaaagtat

SEQ ID NO: 893621 - DNA, 15 bp, Homo sapiens
tccctgaaaagtatt

SEQ ID NO: 893622 - DNA, 15 bp, Homo sapiens
ccctgaaaagtattt

SEQ ID NO: 893623 - DNA, 15 bp, Homo sapiens
cctgaaaagtatttt

SEQ ID NO: 893624 - DNA, 15 bp, Homo sapiens
ctgaaaagtattttc

SEQ ID NO: 893625 - DNA, 15 bp, Homo sapiens
tgaaaagtattttct

SEQ ID NO: 893626 - DNA, 15 bp, Homo sapiens
gaaaagtattttctt

SEQ ID NO: 893627 - DNA, 15 bp, Homo sapiens
aaaagtattttcttt

SEQ ID NO: 893628 - DNA, 15 bp, Homo sapiens
aaagtattttctttc

SEQ ID NO: 893629 - DNA, 15 bp, Homo sapiens
aagtattttctttca

SEQ ID NO: 893630 - DNA, 15 bp, Homo sapiens
agtattttctttcac

SEQ ID NO: 893631 - DNA, 15 bp, Homo sapiens
gtattttctttcaca

SEQ ID NO: 893632 - DNA, 15 bp, Homo sapiens
tattttctttcacac

SEQ ID NO: 893633 - DNA, 15 bp, Homo sapiens
attttctttcacact

SEQ ID NO: 893634 - DNA, 15 bp, Homo sapiens
ttttctttcacactt

SEQ ID NO: 893635 - DNA, 15 bp, Homo sapiens
tttctttcacactta

SEQ ID NO: 893636 - DNA, 15 bp, Homo sapiens
ttctttcacacttaa

SEQ ID NO: 893637 - DNA, 15 bp, Homo sapiens
tctttcacacttaaa

SEQ ID NO: 893638 - DNA, 15 bp, Homo sapiens
ctttcacacttaaag

SEQ ID NO: 893639 - DNA, 15 bp, Homo sapiens
tttcacacttaaagc

SEQ ID NO: 893640 - DNA, 15 bp, Homo sapiens
ttcacacttaaagcc

SEQ ID NO: 893641 - DNA, 15 bp, Homo sapiens
tcacacttaaagccc

SEQ ID NO: 893642 - DNA, 15 bp, Homo sapiens
cacacttaaagccca

SEQ ID NO: 893643 - DNA, 15 bp, Homo sapiens
acacttaaagcccaa

SEQ ID NO: 893644 - DNA, 15 bp, Homo sapiens
cacttaaagcccaag

SEQ ID NO: 893645 - DNA, 15 bp, Homo sapiens
acttaaagcccaagg

SEQ ID NO: 893646 - DNA, 15 bp, Homo sapiens
cttaaagcccaaggt

SEQ ID NO: 893647 - DNA, 15 bp, Homo sapiens
ttaaagcccaaggtg

SEQ ID NO: 893648 - DNA, 15 bp, Homo sapiens
taaagcccaaggtgc

SEQ ID NO: 893649 - DNA, 15 bp, Homo sapiens
aaagcccaaggtgct

SEQ ID NO: 893650 - DNA, 15 bp, Homo sapiens
aagcccaaggtgctt

SEQ ID NO: 893651 - DNA, 15 bp, Homo sapiens
agcccaaggtgcttc

SEQ ID NO: 893652 - DNA, 15 bp, Homo sapiens
gcccaaggtgcttca

SEQ ID NO: 893653 - DNA, 15 bp, Homo sapiens
cccaaggtgcttcac

SEQ ID NO: 893654 - DNA, 15 bp, Homo sapiens
ccaaggtgcttcact

SEQ ID NO: 893655 - DNA, 15 bp, Homo sapiens
caaggtgcttcactg

SEQ ID NO: 893656 - DNA, 15 bp, Homo sapiens
aaggtgcttcactga

SEQ ID NO: 893657 - DNA, 15 bp, Homo sapiens
aggtgcttcactgag

SEQ ID NO: 893658 - DNA, 15 bp, Homo sapiens
ggtgcttcactgagg

SEQ ID NO: 893659 - DNA, 15 bp, Homo sapiens
gtgcttcactgaggt

SEQ ID NO: 893660 - DNA, 15 bp, Homo sapiens
tgcttcactgaggtt

SEQ ID NO: 893661 - DNA, 15 bp, Homo sapiens
gcttcactgaggttt

SEQ ID NO: 893662 - DNA, 15 bp, Homo sapiens
cttcactgaggtttt

SEQ ID NO: 893663 - DNA, 15 bp, Homo sapiens
ttcactgaggttttt

SEQ ID NO: 893664 - DNA, 15 bp, Homo sapiens
tcactgaggtttttt

SEQ ID NO: 893665 - DNA, 15 bp, Homo sapiens
cactgaggttttttt

SEQ ID NO: 893666 - DNA, 15 bp, Homo sapiens
actgaggtttttttt

SEQ ID NO: 893667 - DNA, 15 bp, Homo sapiens
ctgaggttttttttt

SEQ ID NO: 893668 - DNA, 15 bp, Homo sapiens
tgaggtttttttttg

SEQ ID NO: 893669 - DNA, 15 bp, Homo sapiens
gaggtttttttttgt

SEQ ID NO: 893670 - DNA, 15 bp, Homo sapiens
aggtttttttttgtt

SEQ ID NO: 893671 - DNA, 15 bp, Homo sapiens
ggtttttttttgttt

SEQ ID NO: 893672 - DNA, 15 bp, Homo sapiens
gtttttttttgtttt

SEQ ID NO: 893673 - DNA, 15 bp, Homo sapiens
tttttttttgttttg

SEQ ID NO: 893674 - DNA, 15 bp, Homo sapiens
ttttttttgttttgt

SEQ ID NO: 893675 - DNA, 15 bp, Homo sapiens
tttttttgttttgtt

SEQ ID NO: 893676 - DNA, 15 bp, Homo sapiens
ttttttgttttgttt

SEQ ID NO: 893677 - DNA, 15 bp, Homo sapiens
tttttgttttgtttt

SEQ ID NO: 893678 - DNA, 15 bp, Homo sapiens
ttttgttttgttttg

SEQ ID NO: 893679 - DNA, 15 bp, Homo sapiens
tttgttttgttttgt

SEQ ID NO: 893680 - DNA, 15 bp, Homo sapiens
ttgttttgttttgtt

SEQ ID NO: 893681 - DNA, 15 bp, Homo sapiens
tgttttgttttgttt

SEQ ID NO: 893682 - DNA, 15 bp, Homo sapiens
gttttgttttgtttt

SEQ ID NO: 893683 - DNA, 15 bp, Homo sapiens
gttttgttttgtttg

SEQ ID NO: 893684 - DNA, 15 bp, Homo sapiens
ttttgttttgtttgc

SEQ ID NO: 893685 - DNA, 15 bp, Homo sapiens
tttgttttgtttgcc

SEQ ID NO: 893686 - DNA, 15 bp, Homo sapiens
ttgttttgtttgccc

SEQ ID NO: 893687 - DNA, 15 bp, Homo sapiens
tgttttgtttgccct

SEQ ID NO: 893688 - DNA, 15 bp, Homo sapiens
gttttgtttgccctg

SEQ ID NO: 893689 - DNA, 15 bp, Homo sapiens
ttttgtttgccctgt

SEQ ID NO: 893690 - DNA, 15 bp, Homo sapiens
tttgtttgccctgta

SEQ ID NO: 893691 - DNA, 15 bp, Homo sapiens
ttgtttgccctgtag

SEQ ID NO: 893692 - DNA, 15 bp, Homo sapiens
tgtttgccctgtagt

SEQ ID NO: 893693 - DNA, 15 bp, Homo sapiens
gtttgccctgtagtt

SEQ ID NO: 893694 - DNA, 15 bp, Homo sapiens
tttgccctgtagttc

SEQ ID NO: 893695 - DNA, 15 bp, Homo sapiens
ttgccctgtagttcc

SEQ ID NO: 893696 - DNA, 15 bp, Homo sapiens
tgccctgtagttcct

SEQ ID NO: 893697 - DNA, 15 bp, Homo sapiens
gccctgtagttcctg

SEQ ID NO: 893698 - DNA, 15 bp, Homo sapiens
ccctgtagttcctgc

SEQ ID NO: 893699 - DNA, 15 bp, Homo sapiens
cctgtagttcctgct

SEQ ID NO: 893700 - DNA, 15 bp, Homo sapiens
ctgtagttcctgctg

SEQ ID NO: 893701 - DNA, 15 bp, Homo sapiens
tgtagttcctgctgt

SEQ ID NO: 893702 - DNA, 15 bp, Homo sapiens
gtagttcctgctgtg

SEQ ID NO: 893703 - DNA, 15 bp, Homo sapiens
tagttcctgctgtgt

SEQ ID NO: 893704 - DNA, 15 bp, Homo sapiens
agttcctgctgtgtt

SEQ ID NO: 893705 - DNA, 15 bp, Homo sapiens
gttcctgctgtgtta

SEQ ID NO: 893706 - DNA, 15 bp, Homo sapiens
ttcctgctgtgttat

SEQ ID NO: 893707 - DNA, 15 bp, Homo sapiens
tcctgctgtgttatg

SEQ ID NO: 893708 - DNA, 15 bp, Homo sapiens
cctgctgtgttatga

SEQ ID NO: 893709 - DNA, 15 bp, Homo sapiens
ctgctgtgttatgag

SEQ ID NO: 893710 - DNA, 15 bp, Homo sapiens
tgctgtgttatgagt

SEQ ID NO: 893711 - DNA, 15 bp, Homo sapiens
gctgtgttatgagtt

SEQ ID NO: 893712 - DNA, 15 bp, Homo sapiens
ctgtgttatgagtta

SEQ ID NO: 893713 - DNA, 15 bp, Homo sapiens
tgtgttatgagttag

SEQ ID NO: 893714 - DNA, 15 bp, Homo sapiens
gtgttatgagttagg

SEQ ID NO: 893715 - DNA, 15 bp, Homo sapiens
tgttatgagttagga

SEQ ID NO: 893716 - DNA, 15 bp, Homo sapiens
gttatgagttaggag

SEQ ID NO: 893717 - DNA, 15 bp, Homo sapiens
ttatgagttaggagt

SEQ ID NO: 893718 - DNA, 15 bp, Homo sapiens
tatgagttaggagtg

SEQ ID NO: 893719 - DNA, 15 bp, Homo sapiens
atgagttaggagtgt

SEQ ID NO: 893720 - DNA, 15 bp, Homo sapiens
tgagttaggagtgtg

SEQ ID NO: 893721 - DNA, 15 bp, Homo sapiens
gagttaggagtgtgt

SEQ ID NO: 893722 - DNA, 15 bp, Homo sapiens
agttaggagtgtgtg

SEQ ID NO: 893723 - DNA, 15 bp, Homo sapiens
gttaggagtgtgtgt

SEQ ID NO: 893724 - DNA, 15 bp, Homo sapiens
ttaggagtgtgtgtt

SEQ ID NO: 893725 - DNA, 15 bp, Homo sapiens
taggagtgtgtgttt

SEQ ID NO: 893726 - DNA, 15 bp, Homo sapiens
aggagtgtgtgtttg

SEQ ID NO: 893727 - DNA, 15 bp, Homo sapiens
ggagtgtgtgtttgt

SEQ ID NO: 893728 - DNA, 15 bp, Homo sapiens
gagtgtgtgtttgtg

SEQ ID NO: 893729 - DNA, 15 bp, Homo sapiens
agtgtgtgtttgtgt

SEQ ID NO: 893730 - DNA, 15 bp, Homo sapiens
gtgtgtgtttgtgta

SEQ ID NO: 893731 - DNA, 15 bp, Homo sapiens
tgtgtgtttgtgtaa

SEQ ID NO: 893732 - DNA, 15 bp, Homo sapiens
gtgtgtttgtgtaag

SEQ ID NO: 893733 - DNA, 15 bp, Homo sapiens
tgtgtttgtgtaaga

SEQ ID NO: 893734 - DNA, 15 bp, Homo sapiens
gtgtttgtgtaagaa

SEQ ID NO: 893735 - DNA, 15 bp, Homo sapiens
tgtttgtgtaagaaa

SEQ ID NO: 893736 - DNA, 15 bp, Homo sapiens
gtttgtgtaagaaat

SEQ ID NO: 893737 - DNA, 15 bp, Homo sapiens
tttgtgtaagaaatg

SEQ ID NO: 893738 - DNA, 15 bp, Homo sapiens
ttgtgtaagaaatgt

SEQ ID NO: 893739 - DNA, 15 bp, Homo sapiens
tgtgtaagaaatgtg

SEQ ID NO: 893740 - DNA, 15 bp, Homo sapiens
gtgtaagaaatgtgc

SEQ ID NO: 893741 - DNA, 15 bp, Homo sapiens
tgtaagaaatgtgct

SEQ ID NO: 893742 - DNA, 15 bp, Homo sapiens
gtaagaaatgtgcta

SEQ ID NO: 893743 - DNA, 15 bp, Homo sapiens
taagaaatgtgctat

SEQ ID NO: 893744 - DNA, 15 bp, Homo sapiens
aagaaatgtgctatt

SEQ ID NO: 893745 - DNA, 15 bp, Homo sapiens
agaaatgtgctattt

SEQ ID NO: 893746 - DNA, 15 bp, Homo sapiens
gaaatgtgctatttt

SEQ ID NO: 893747 - DNA, 15 bp, Homo sapiens
aaatgtgctattttc

SEQ ID NO: 893748 - DNA, 15 bp, Homo sapiens
aatgtgctattttcg

SEQ ID NO: 893749 - DNA, 15 bp, Homo sapiens
atgtgctattttcgg

SEQ ID NO: 893750 - DNA, 15 bp, Homo sapiens
tgtgctattttcggg

SEQ ID NO: 893751 - DNA, 15 bp, Homo sapiens
gtgctattttcgggg

SEQ ID NO: 893752 - DNA, 15 bp, Homo sapiens
tgctattttcgggga

SEQ ID NO: 893753 - DNA, 15 bp, Homo sapiens
gctattttcggggat

SEQ ID NO: 893754 - DNA, 15 bp, Homo sapiens
ctattttcggggatg

SEQ ID NO: 893755 - DNA, 15 bp, Homo sapiens
tattttcggggatgg

SEQ ID NO: 893756 - DNA, 15 bp, Homo sapiens
attttcggggatggt

SEQ ID NO: 893757 - DNA, 15 bp, Homo sapiens
ttttcggggatggtg

SEQ ID NO: 893758 - DNA, 15 bp, Homo sapiens
tttcggggatggtgc

SEQ ID NO: 893759 - DNA, 15 bp, Homo sapiens
ttcggggatggtgcc

SEQ ID NO: 893760 - DNA, 15 bp, Homo sapiens
tcggggatggtgcca

SEQ ID NO: 893761 - DNA, 15 bp, Homo sapiens
cggggatggtgccaa

SEQ ID NO: 893762 - DNA, 15 bp, Homo sapiens
ggggatggtgccaag

SEQ ID NO: 893763 - DNA, 15 bp, Homo sapiens
gggatggtgccaaga

SEQ ID NO: 893764 - DNA, 15 bp, Homo sapiens
ggatggtgccaagag

SEQ ID NO: 893765 - DNA, 15 bp, Homo sapiens
gatggtgccaagagc

SEQ ID NO: 893766 - DNA, 15 bp, Homo sapiens
atggtgccaagagcc

SEQ ID NO: 893767 - DNA, 15 bp, Homo sapiens
tggtgccaagagccc

SEQ ID NO: 893768 - DNA, 15 bp, Homo sapiens
ggtgccaagagccct

SEQ ID NO: 893769 - DNA, 15 bp, Homo sapiens
gtgccaagagccctg

SEQ ID NO: 893770 - DNA, 15 bp, Homo sapiens
tgccaagagccctga

SEQ ID NO: 893771 - DNA, 15 bp, Homo sapiens
gccaagagccctgag

SEQ ID NO: 893772 - DNA, 15 bp, Homo sapiens
ccaagagccctgagc

SEQ ID NO: 893773 - DNA, 15 bp, Homo sapiens
caagagccctgagct

SEQ ID NO: 893774 - DNA, 15 bp, Homo sapiens
aagagccctgagctc

SEQ ID NO: 893775 - DNA, 15 bp, Homo sapiens
agagccctgagctct

SEQ ID NO: 893776 - DNA, 15 bp, Homo sapiens
gagccctgagctctg

SEQ ID NO: 893777 - DNA, 15 bp, Homo sapiens
agccctgagctctga

SEQ ID NO: 893778 - DNA, 15 bp, Homo sapiens
gccctgagctctgag

SEQ ID NO: 893779 - DNA, 15 bp, Homo sapiens
ccctgagctctgagt

SEQ ID NO: 893780 - DNA, 15 bp, Homo sapiens
cctgagctctgagtc

SEQ ID NO: 893781 - DNA, 15 bp, Homo sapiens
ctgagctctgagtct

SEQ ID NO: 893782 - DNA, 15 bp, Homo sapiens
tgagctctgagtctg

SEQ ID NO: 893783 - DNA, 15 bp, Homo sapiens
gagctctgagtctgt

SEQ ID NO: 893784 - DNA, 15 bp, Homo sapiens
agctctgagtctgtg

SEQ ID NO: 893785 - DNA, 15 bp, Homo sapiens
gctctgagtctgtgc

SEQ ID NO: 893786 - DNA, 15 bp, Homo sapiens
ctctgagtctgtgca

SEQ ID NO: 893787 - DNA, 15 bp, Homo sapiens
tctgagtctgtgcat

SEQ ID NO: 893788 - DNA, 15 bp, Homo sapiens
ctgagtctgtgcatc

SEQ ID NO: 893789 - DNA, 15 bp, Homo sapiens
tgagtctgtgcatct

SEQ ID NO: 893790 - DNA, 15 bp, Homo sapiens
gagtctgtgcatctg

SEQ ID NO: 893791 - DNA, 15 bp, Homo sapiens
agtctgtgcatctgg

SEQ ID NO: 893792 - DNA, 15 bp, Homo sapiens
gtctgtgcatctggt

SEQ ID NO: 893793 - DNA, 15 bp, Homo sapiens
tctgtgcatctggta

SEQ ID NO: 893794 - DNA, 15 bp, Homo sapiens
ctgtgcatctggtat

SEQ ID NO: 893795 - DNA, 15 bp, Homo sapiens
tgtgcatctggtatg

SEQ ID NO: 893796 - DNA, 15 bp, Homo sapiens
gtgcatctggtatga

SEQ ID NO: 893797 - DNA, 15 bp, Homo sapiens
tgcatctggtatgaa

SEQ ID NO: 893798 - DNA, 15 bp, Homo sapiens
gcatctggtatgaat

SEQ ID NO: 893799 - DNA, 15 bp, Homo sapiens
catctggtatgaatc

SEQ ID NO: 893800 - DNA, 15 bp, Homo sapiens
atctggtatgaatcc

SEQ ID NO: 893801 - DNA, 15 bp, Homo sapiens
tctggtatgaatcct

SEQ ID NO: 893802 - DNA, 15 bp, Homo sapiens
ctggtatgaatcctg

SEQ ID NO: 893803 - DNA, 15 bp, Homo sapiens
tggtatgaatcctgc

SEQ ID NO: 893804 - DNA, 15 bp, Homo sapiens
ggtatgaatcctgcc

SEQ ID NO: 893805 - DNA, 15 bp, Homo sapiens
gtatgaatcctgcct

SEQ ID NO: 893806 - DNA, 15 bp, Homo sapiens
tatgaatcctgcctt

SEQ ID NO: 893807 - DNA, 15 bp, Homo sapiens
atgaatcctgccttc

SEQ ID NO: 893808 - DNA, 15 bp, Homo sapiens
tgaatcctgccttca

SEQ ID NO: 893809 - DNA, 15 bp, Homo sapiens
gaatcctgccttcaa

SEQ ID NO: 893810 - DNA, 15 bp, Homo sapiens
aatcctgccttcaat

SEQ ID NO: 893811 - DNA, 15 bp, Homo sapiens
atcctgccttcaatc

SEQ ID NO: 893812 - DNA, 15 bp, Homo sapiens
tcctgccttcaatcc

SEQ ID NO: 893813 - DNA, 15 bp, Homo sapiens
cctgccttcaatcct

SEQ ID NO: 893814 - DNA, 15 bp, Homo sapiens
ctgccttcaatcctc

SEQ ID NO: 893815 - DNA, 15 bp, Homo sapiens
tgccttcaatcctct

SEQ ID NO: 893816 - DNA, 15 bp, Homo sapiens
gccttcaatcctctc

SEQ ID NO: 893817 - DNA, 15 bp, Homo sapiens
ccttcaatcctctcc

SEQ ID NO: 893818 - DNA, 15 bp, Homo sapiens
cttcaatcctctcca

SEQ ID NO: 893819 - DNA, 15 bp, Homo sapiens
ttcaatcctctccag

SEQ ID NO: 893820 - DNA, 15 bp, Homo sapiens
tcaatcctctccagc

SEQ ID NO: 893821 - DNA, 15 bp, Homo sapiens
caatcctctccagct

SEQ ID NO: 893822 - DNA, 15 bp, Homo sapiens
aatcctctccagctg

SEQ ID NO: 893823 - DNA, 15 bp, Homo sapiens
atcctctccagctga

SEQ ID NO: 893824 - DNA, 15 bp, Homo sapiens
tcctctccagctgag

SEQ ID NO: 893825 - DNA, 15 bp, Homo sapiens
cctctccagctgagt

SEQ ID NO: 893826 - DNA, 15 bp, Homo sapiens
ctctccagctgagta

SEQ ID NO: 893827 - DNA, 15 bp, Homo sapiens
tctccagctgagtaa

SEQ ID NO: 893828 - DNA, 15 bp, Homo sapiens
ctccagctgagtaaa

SEQ ID NO: 893829 - DNA, 15 bp, Homo sapiens
tccagctgagtaaac

SEQ ID NO: 893830 - DNA, 15 bp, Homo sapiens
ccagctgagtaaacc

SEQ ID NO: 893831 - DNA, 15 bp, Homo sapiens
cagctgagtaaacct

SEQ ID NO: 893832 - DNA, 15 bp, Homo sapiens
agctgagtaaacctg

SEQ ID NO: 893833 - DNA, 15 bp, Homo sapiens
gctgagtaaacctgc

SEQ ID NO: 893834 - DNA, 15 bp, Homo sapiens
ctgagtaaacctgcc

SEQ ID NO: 893835 - DNA, 15 bp, Homo sapiens
tgagtaaacctgcct

SEQ ID NO: 893836 - DNA, 15 bp, Homo sapiens
gagtaaacctgcctc

SEQ ID NO: 893837 - DNA, 15 bp, Homo sapiens
agtaaacctgcctca

SEQ ID NO: 893838 - DNA, 15 bp, Homo sapiens
gtaaacctgcctcag

SEQ ID NO: 893839 - DNA, 15 bp, Homo sapiens
taaacctgcctcagt

SEQ ID NO: 893840 - DNA, 15 bp, Homo sapiens
aaacctgcctcagtt

SEQ ID NO: 893841 - DNA, 15 bp, Homo sapiens
aacctgcctcagttt

SEQ ID NO: 893842 - DNA, 15 bp, Homo sapiens
acctgcctcagtttt

SEQ ID NO: 893843 - DNA, 15 bp, Homo sapiens
cctgcctcagttttg

SEQ ID NO: 893844 - DNA, 15 bp, Homo sapiens
ctgcctcagttttgt

SEQ ID NO: 893845 - DNA, 15 bp, Homo sapiens
tgcctcagttttgtc

SEQ ID NO: 893846 - DNA, 15 bp, Homo sapiens
gcctcagttttgtca

SEQ ID NO: 893847 - DNA, 15 bp, Homo sapiens
cctcagttttgtcat

SEQ ID NO: 893848 - DNA, 15 bp, Homo sapiens
ctcagttttgtcatc

SEQ ID NO: 893849 - DNA, 15 bp, Homo sapiens
tcagttttgtcatct

SEQ ID NO: 893850 - DNA, 15 bp, Homo sapiens
cagttttgtcatctg

SEQ ID NO: 893851 - DNA, 15 bp, Homo sapiens
agttttgtcatctgt

SEQ ID NO: 893852 - DNA, 15 bp, Homo sapiens
gttttgtcatctgtc

SEQ ID NO: 893853 - DNA, 15 bp, Homo sapiens
ttttgtcatctgtca

SEQ ID NO: 893854 - DNA, 15 bp, Homo sapiens
tttgtcatctgtcaa

SEQ ID NO: 893855 - DNA, 15 bp, Homo sapiens
ttgtcatctgtcaaa

SEQ ID NO: 893856 - DNA, 15 bp, Homo sapiens
tgtcatctgtcaaat

SEQ ID NO: 893857 - DNA, 15 bp, Homo sapiens
gtcatctgtcaaatg

SEQ ID NO: 893858 - DNA, 15 bp, Homo sapiens
tcatctgtcaaatgg

SEQ ID NO: 893859 - DNA, 15 bp, Homo sapiens
catctgtcaaatgga

SEQ ID NO: 893860 - DNA, 15 bp, Homo sapiens
atctgtcaaatggac

SEQ ID NO: 893861 - DNA, 15 bp, Homo sapiens
tctgtcaaatggaca

SEQ ID NO: 893862 - DNA, 15 bp, Homo sapiens
ctgtcaaatggacac

SEQ ID NO: 893863 - DNA, 15 bp, Homo sapiens
tgtcaaatggacact

SEQ ID NO: 893864 - DNA, 15 bp, Homo sapiens
gtcaaatggacactg

SEQ ID NO: 893865 - DNA, 15 bp, Homo sapiens
tcaaatggacactgt

SEQ ID NO: 893866 - DNA, 15 bp, Homo sapiens
caaatggacactgta

SEQ ID NO: 893867 - DNA, 15 bp, Homo sapiens
aaatggacactgtat

SEQ ID NO: 893868 - DNA, 15 bp, Homo sapiens
aatggacactgtatc

SEQ ID NO: 893869 - DNA, 15 bp, Homo sapiens
atggacactgtatca

SEQ ID NO: 893870 - DNA, 15 bp, Homo sapiens
tggacactgtatcaa

SEQ ID NO: 893871 - DNA, 15 bp, Homo sapiens
ggacactgtatcaac

SEQ ID NO: 893872 - DNA, 15 bp, Homo sapiens
gacactgtatcaact

SEQ ID NO: 893873 - DNA, 15 bp, Homo sapiens
acactgtatcaactc

SEQ ID NO: 893874 - DNA, 15 bp, Homo sapiens
cactgtatcaactct

SEQ ID NO: 893875 - DNA, 15 bp, Homo sapiens
actgtatcaactctt

SEQ ID NO: 893876 - DNA, 15 bp, Homo sapiens
ctgtatcaactcttt

SEQ ID NO: 893877 - DNA, 15 bp, Homo sapiens
tgtatcaactcttta

SEQ ID NO: 893878 - DNA, 15 bp, Homo sapiens
gtatcaactctttag

SEQ ID NO: 893879 - DNA, 15 bp, Homo sapiens
tatcaactctttagc

SEQ ID NO: 893880 - DNA, 15 bp, Homo sapiens
atcaactctttagct

SEQ ID NO: 893881 - DNA, 15 bp, Homo sapiens
tcaactctttagctt

SEQ ID NO: 893882 - DNA, 15 bp, Homo sapiens
caactctttagcttt

SEQ ID NO: 893883 - DNA, 15 bp, Homo sapiens
aactctttagctttt

SEQ ID NO: 893884 - DNA, 15 bp, Homo sapiens
actctttagcttttc

SEQ ID NO: 893885 - DNA, 15 bp, Homo sapiens
ctctttagcttttcc

SEQ ID NO: 893886 - DNA, 15 bp, Homo sapiens
tctttagcttttccc

SEQ ID NO: 893887 - DNA, 15 bp, Homo sapiens
ctttagcttttccca

SEQ ID NO: 893888 - DNA, 15 bp, Homo sapiens
tttagcttttcccat

SEQ ID NO: 893889 - DNA, 15 bp, Homo sapiens
ttagcttttcccata

SEQ ID NO: 893890 - DNA, 15 bp, Homo sapiens
tagcttttcccatag

SEQ ID NO: 893891 - DNA, 15 bp, Homo sapiens
agcttttcccatagg

SEQ ID NO: 893892 - DNA, 15 bp, Homo sapiens
gcttttcccataggg

SEQ ID NO: 893893 - DNA, 15 bp, Homo sapiens
cttttcccataggga

SEQ ID NO: 893894 - DNA, 15 bp, Homo sapiens
ttttcccatagggaa

SEQ ID NO: 893895 - DNA, 15 bp, Homo sapiens
tttcccatagggaaa

SEQ ID NO: 893896 - DNA, 15 bp, Homo sapiens
ttcccatagggaaat

SEQ ID NO: 893897 - DNA, 15 bp, Homo sapiens
tcccatagggaaatt

SEQ ID NO: 893898 - DNA, 15 bp, Homo sapiens
cccatagggaaatta

SEQ ID NO: 893899 - DNA, 15 bp, Homo sapiens
ccatagggaaattat

SEQ ID NO: 893900 - DNA, 15 bp, Homo sapiens
catagggaaattatg

SEQ ID NO: 893901 - DNA, 15 bp, Homo sapiens
atagggaaattatga

SEQ ID NO: 893902 - DNA, 15 bp, Homo sapiens
tagggaaattatgag

SEQ ID NO: 893903 - DNA, 15 bp, Homo sapiens
agggaaattatgaga

SEQ ID NO: 893904 - DNA, 15 bp, Homo sapiens
gggaaattatgagaa

SEQ ID NO: 893905 - DNA, 15 bp, Homo sapiens
ggaaattatgagaat

SEQ ID NO: 893906 - DNA, 15 bp, Homo sapiens
gaaattatgagaatg

SEQ ID NO: 893907 - DNA, 15 bp, Homo sapiens
aaattatgagaatga

SEQ ID NO: 893908 - DNA, 15 bp, Homo sapiens
aattatgagaatgaa

SEQ ID NO: 893909 - DNA, 15 bp, Homo sapiens
attatgagaatgaag

SEQ ID NO: 893910 - DNA, 15 bp, Homo sapiens
ttatgagaatgaagt

SEQ ID NO: 893911 - DNA, 15 bp, Homo sapiens
tatgagaatgaagta

SEQ ID NO: 893912 - DNA, 15 bp, Homo sapiens
atgagaatgaagtaa

SEQ ID NO: 893913 - DNA, 15 bp, Homo sapiens
tgagaatgaagtaag

SEQ ID NO: 893914 - DNA, 15 bp, Homo sapiens
gagaatgaagtaagg

SEQ ID NO: 893915 - DNA, 15 bp, Homo sapiens
agaatgaagtaaggt

SEQ ID NO: 893916 - DNA, 15 bp, Homo sapiens
gaatgaagtaaggtg

SEQ ID NO: 893917 - DNA, 15 bp, Homo sapiens
aatgaagtaaggtgc

SEQ ID NO: 893918 - DNA, 15 bp, Homo sapiens
atgaagtaaggtgct

SEQ ID NO: 893919 - DNA, 15 bp, Homo sapiens
tgaagtaaggtgctg

SEQ ID NO: 893920 - DNA, 15 bp, Homo sapiens
gaagtaaggtgctgc

SEQ ID NO: 893921 - DNA, 15 bp, Homo sapiens
aagtaaggtgctgca

SEQ ID NO: 893922 - DNA, 15 bp, Homo sapiens
agtaaggtgctgcat

SEQ ID NO: 893923 - DNA, 15 bp, Homo sapiens
gtaaggtgctgcata

SEQ ID NO: 893924 - DNA, 15 bp, Homo sapiens
taaggtgctgcatat

SEQ ID NO: 893925 - DNA, 15 bp, Homo sapiens
aaggtgctgcatatg

SEQ ID NO: 893926 - DNA, 15 bp, Homo sapiens
aggtgctgcatatgg

SEQ ID NO: 893927 - DNA, 15 bp, Homo sapiens
ggtgctgcatatgga

SEQ ID NO: 893928 - DNA, 15 bp, Homo sapiens
gtgctgcatatggaa

SEQ ID NO: 893929 - DNA, 15 bp, Homo sapiens
tgctgcatatggaaa

SEQ ID NO: 893930 - DNA, 15 bp, Homo sapiens
gctgcatatggaaac

SEQ ID NO: 893931 - DNA, 15 bp, Homo sapiens
ctgcatatggaaaca

SEQ ID NO: 893932 - DNA, 15 bp, Homo sapiens
tgcatatggaaacaa

SEQ ID NO: 893933 - DNA, 15 bp, Homo sapiens
gcatatggaaacaac

SEQ ID NO: 893934 - DNA, 15 bp, Homo sapiens
catatggaaacaacc

SEQ ID NO: 893935 - DNA, 15 bp, Homo sapiens
atatggaaacaacca

SEQ ID NO: 893936 - DNA, 15 bp, Homo sapiens
tatggaaacaaccag

SEQ ID NO: 893937 - DNA, 15 bp, Homo sapiens
atggaaacaaccagc

SEQ ID NO: 893938 - DNA, 15 bp, Homo sapiens
tggaaacaaccagca

SEQ ID NO: 893939 - DNA, 15 bp, Homo sapiens
ggaaacaaccagcac

SEQ ID NO: 893940 - DNA, 15 bp, Homo sapiens
gaaacaaccagcaca

SEQ ID NO: 893941 - DNA, 15 bp, Homo sapiens
aaacaaccagcacag

SEQ ID NO: 893942 - DNA, 15 bp, Homo sapiens
aacaaccagcacagt

SEQ ID NO: 893943 - DNA, 15 bp, Homo sapiens
acaaccagcacagtc

SEQ ID NO: 893944 - DNA, 15 bp, Homo sapiens
caaccagcacagtct

SEQ ID NO: 893945 - DNA, 15 bp, Homo sapiens
aaccagcacagtctt

SEQ ID NO: 893946 - DNA, 15 bp, Homo sapiens
accagcacagtcttg

SEQ ID NO: 893947 - DNA, 15 bp, Homo sapiens
ccagcacagtcttgc

SEQ ID NO: 893948 - DNA, 15 bp, Homo sapiens
cagcacagtcttgca

SEQ ID NO: 893949 - DNA, 15 bp, Homo sapiens
agcacagtcttgcat

SEQ ID NO: 893950 - DNA, 15 bp, Homo sapiens
gcacagtcttgcata

SEQ ID NO: 893951 - DNA, 15 bp, Homo sapiens
cacagtcttgcatat

SEQ ID NO: 893952 - DNA, 15 bp, Homo sapiens
acagtcttgcatata

SEQ ID NO: 893953 - DNA, 15 bp, Homo sapiens
cagtcttgcatatac

SEQ ID NO: 893954 - DNA, 15 bp, Homo sapiens
agtcttgcatataca

SEQ ID NO: 893955 - DNA, 15 bp, Homo sapiens
gtcttgcatatacag

SEQ ID NO: 893956 - DNA, 15 bp, Homo sapiens
tcttgcatatacagc

SEQ ID NO: 893957 - DNA, 15 bp, Homo sapiens
cttgcatatacagca

SEQ ID NO: 893958 - DNA, 15 bp, Homo sapiens
ttgcatatacagcag

SEQ ID NO: 893959 - DNA, 15 bp, Homo sapiens
tgcatatacagcagg

SEQ ID NO: 893960 - DNA, 15 bp, Homo sapiens
gcatatacagcaggt

SEQ ID NO: 893961 - DNA, 15 bp, Homo sapiens
catatacagcaggta

SEQ ID NO: 893962 - DNA, 15 bp, Homo sapiens
atatacagcaggtat

SEQ ID NO: 893963 - DNA, 15 bp, Homo sapiens
tatacagcaggtatt

SEQ ID NO: 893964 - DNA, 15 bp, Homo sapiens
atacagcaggtattc

SEQ ID NO: 893965 - DNA, 15 bp, Homo sapiens
tacagcaggtattca

SEQ ID NO: 893966 - DNA, 15 bp, Homo sapiens
acagcaggtattcag

SEQ ID NO: 893967 - DNA, 15 bp, Homo sapiens
cagcaggtattcagt

SEQ ID NO: 893968 - DNA, 15 bp, Homo sapiens
agcaggtattcagtg

SEQ ID NO: 893969 - DNA, 15 bp, Homo sapiens
gcaggtattcagtga

SEQ ID NO: 893970 - DNA, 15 bp, Homo sapiens
caggtattcagtgaa

SEQ ID NO: 893971 - DNA, 15 bp, Homo sapiens
aggtattcagtgaat

SEQ ID NO: 893972 - DNA, 15 bp, Homo sapiens
ggtattcagtgaatt

SEQ ID NO: 893973 - DNA, 15 bp, Homo sapiens
gtattcagtgaattt

SEQ ID NO: 893974 - DNA, 15 bp, Homo sapiens
tattcagtgaatttg

SEQ ID NO: 893975 - DNA, 15 bp, Homo sapiens
attcagtgaatttgg

SEQ ID NO: 893976 - DNA, 15 bp, Homo sapiens
ttcagtgaatttgga

SEQ ID NO: 893977 - DNA, 15 bp, Homo sapiens
tcagtgaatttggac

SEQ ID NO: 893978 - DNA, 15 bp, Homo sapiens
cagtgaatttggact

SEQ ID NO: 893979 - DNA, 15 bp, Homo sapiens
agtgaatttggactg

SEQ ID NO: 893980 - DNA, 15 bp, Homo sapiens
gtgaatttggactga

SEQ ID NO: 893981 - DNA, 15 bp, Homo sapiens
tgaatttggactgaa

SEQ ID NO: 893982 - DNA, 15 bp, Homo sapiens
gaatttggactgaat

SEQ ID NO: 893983 - DNA, 15 bp, Homo sapiens
aatttggactgaatt

SEQ ID NO: 893984 - DNA, 15 bp, Homo sapiens
atttggactgaattg

SEQ ID NO: 893985 - DNA, 15 bp, Homo sapiens
tttggactgaattga

SEQ ID NO: 893986 - DNA, 15 bp, Homo sapiens
ttggactgaattgaa

SEQ ID NO: 893987 - DNA, 15 bp, Homo sapiens
tggactgaattgaaa

SEQ ID NO: 893988 - DNA, 15 bp, Homo sapiens
ggactgaattgaaat

SEQ ID NO: 893989 - DNA, 15 bp, Homo sapiens
gactgaattgaaatc

SEQ ID NO: 893990 - DNA, 15 bp, Homo sapiens
actgaattgaaatct

SEQ ID NO: 893991 - DNA, 15 bp, Homo sapiens
ctgaattgaaatctg

SEQ ID NO: 893992 - DNA, 15 bp, Homo sapiens
tgaattgaaatctga

SEQ ID NO: 893993 - DNA, 15 bp, Homo sapiens
gaattgaaatctgag

SEQ ID NO: 893994 - DNA, 15 bp, Homo sapiens
aattgaaatctgagt

SEQ ID NO: 893995 - DNA, 15 bp, Homo sapiens
attgaaatctgagta

SEQ ID NO: 893996 - DNA, 15 bp, Homo sapiens
ttgaaatctgagtag

SEQ ID NO: 893997 - DNA, 15 bp, Homo sapiens
tgaaatctgagtagc

SEQ ID NO: 893998 - DNA, 15 bp, Homo sapiens
gaaatctgagtagct

SEQ ID NO: 893999 - DNA, 15 bp, Homo sapiens
aaatctgagtagctt

SEQ ID NO: 894000 - DNA, 15 bp, Homo sapiens
aatctgagtagctta

SEQ ID NO: 894001 - DNA, 15 bp, Homo sapiens
atctgagtagcttaa

SEQ ID NO: 894002 - DNA, 15 bp, Homo sapiens
tctgagtagcttaat

SEQ ID NO: 894003 - DNA, 15 bp, Homo sapiens
ctgagtagcttaata

SEQ ID NO: 894004 - DNA, 15 bp, Homo sapiens
tgagtagcttaatag

SEQ ID NO: 894005 - DNA, 15 bp, Homo sapiens
gagtagcttaatagg

SEQ ID NO: 894006 - DNA, 15 bp, Homo sapiens
agtagcttaataggt

SEQ ID NO: 894007 - DNA, 15 bp, Homo sapiens
gtagcttaataggta

SEQ ID NO: 894008 - DNA, 15 bp, Homo sapiens
tagcttaataggtaa

SEQ ID NO: 894009 - DNA, 15 bp, Homo sapiens
agcttaataggtaag

SEQ ID NO: 894010 - DNA, 15 bp, Homo sapiens
gcttaataggtaagt

SEQ ID NO: 894011 - DNA, 15 bp, Homo sapiens
cttaataggtaagta

SEQ ID NO: 894012 - DNA, 15 bp, Homo sapiens
ttaataggtaagtac

SEQ ID NO: 894013 - DNA, 15 bp, Homo sapiens
taataggtaagtaca

SEQ ID NO: 894014 - DNA, 15 bp, Homo sapiens
aataggtaagtacat

SEQ ID NO: 894015 - DNA, 15 bp, Homo sapiens
ataggtaagtacatt

SEQ ID NO: 894016 - DNA, 15 bp, Homo sapiens
taggtaagtacattg

SEQ ID NO: 894017 - DNA, 15 bp, Homo sapiens
aggtaagtacattga

SEQ ID NO: 894018 - DNA, 15 bp, Homo sapiens
ggtaagtacattgag

SEQ ID NO: 894019 - DNA, 15 bp, Homo sapiens
gtaagtacattgagt

SEQ ID NO: 894020 - DNA, 15 bp, Homo sapiens
taagtacattgagtc

SEQ ID NO: 894021 - DNA, 15 bp, Homo sapiens
aagtacattgagtcg

SEQ ID NO: 894022 - DNA, 15 bp, Homo sapiens
agtacattgagtcgc

SEQ ID NO: 894023 - DNA, 15 bp, Homo sapiens
gtacattgagtcgca

SEQ ID NO: 894024 - DNA, 15 bp, Homo sapiens
tacattgagtcgcaa

SEQ ID NO: 894025 - DNA, 15 bp, Homo sapiens
acattgagtcgcaag

SEQ ID NO: 894026 - DNA, 15 bp, Homo sapiens
cattgagtcgcaagc

SEQ ID NO: 894027 - DNA, 15 bp, Homo sapiens
attgagtcgcaagcc

SEQ ID NO: 894028 - DNA, 15 bp, Homo sapiens
ttgagtcgcaagcct

SEQ ID NO: 894029 - DNA, 15 bp, Homo sapiens
tgagtcgcaagcctc

SEQ ID NO: 894030 - DNA, 15 bp, Homo sapiens
gagtcgcaagcctct

SEQ ID NO: 894031 - DNA, 15 bp, Homo sapiens
agtcgcaagcctctc

SEQ ID NO: 894032 - DNA, 15 bp, Homo sapiens
gtcgcaagcctctct

SEQ ID NO: 894033 - DNA, 15 bp, Homo sapiens
tcgcaagcctctctg

SEQ ID NO: 894034 - DNA, 15 bp, Homo sapiens
cgcaagcctctctgt

SEQ ID NO: 894035 - DNA, 15 bp, Homo sapiens
gcaagcctctctgta

SEQ ID NO: 894036 - DNA, 15 bp, Homo sapiens
caagcctctctgtac

SEQ ID NO: 894037 - DNA, 15 bp, Homo sapiens
aagcctctctgtaca

SEQ ID NO: 894038 - DNA, 15 bp, Homo sapiens
agcctctctgtacag

SEQ ID NO: 894039 - DNA, 15 bp, Homo sapiens
gcctctctgtacagt

SEQ ID NO: 894040 - DNA, 15 bp, Homo sapiens
cctctctgtacagta

SEQ ID NO: 894041 - DNA, 15 bp, Homo sapiens
ctctctgtacagtat

SEQ ID NO: 894042 - DNA, 15 bp, Homo sapiens
tctctgtacagtata

SEQ ID NO: 894043 - DNA, 15 bp, Homo sapiens
ctctgtacagtatat

SEQ ID NO: 894044 - DNA, 15 bp, Homo sapiens
tctgtacagtatatc

SEQ ID NO: 894045 - DNA, 15 bp, Homo sapiens
ctgtacagtatatcc

SEQ ID NO: 894046 - DNA, 15 bp, Homo sapiens
tgtacagtatatcca

SEQ ID NO: 894047 - DNA, 15 bp, Homo sapiens
gtacagtatatccag

SEQ ID NO: 894048 - DNA, 15 bp, Homo sapiens
tacagtatatccagg

SEQ ID NO: 894049 - DNA, 15 bp, Homo sapiens
acagtatatccaggt

SEQ ID NO: 894050 - DNA, 15 bp, Homo sapiens
cagtatatccaggtg

SEQ ID NO: 894051 - DNA, 15 bp, Homo sapiens
agtatatccaggtga

SEQ ID NO: 894052 - DNA, 15 bp, Homo sapiens
gtatatccaggtgaa

SEQ ID NO: 894053 - DNA, 15 bp, Homo sapiens
tatatccaggtgaaa

SEQ ID NO: 894054 - DNA, 15 bp, Homo sapiens
atatccaggtgaaat

SEQ ID NO: 894055 - DNA, 15 bp, Homo sapiens
tatccaggtgaaatg

SEQ ID NO: 894056 - DNA, 15 bp, Homo sapiens
atccaggtgaaatgg

SEQ ID NO: 894057 - DNA, 15 bp, Homo sapiens
tccaggtgaaatggg

SEQ ID NO: 894058 - DNA, 15 bp, Homo sapiens
ccaggtgaaatgggt

SEQ ID NO: 894059 - DNA, 15 bp, Homo sapiens
caggtgaaatgggtg

SEQ ID NO: 894060 - DNA, 15 bp, Homo sapiens
aggtgaaatgggtgt

SEQ ID NO: 894061 - DNA, 15 bp, Homo sapiens
ggtgaaatgggtgtt

SEQ ID NO: 894062 - DNA, 15 bp, Homo sapiens
gtgaaatgggtgtta

SEQ ID NO: 894063 - DNA, 15 bp, Homo sapiens
tgaaatgggtgttac

SEQ ID NO: 894064 - DNA, 15 bp, Homo sapiens
gaaatgggtgttact

SEQ ID NO: 894065 - DNA, 15 bp, Homo sapiens
aaatgggtgttactc

SEQ ID NO: 894066 - DNA, 15 bp, Homo sapiens
aatgggtgttactct

SEQ ID NO: 894067 - DNA, 15 bp, Homo sapiens
atgggtgttactctt

SEQ ID NO: 894068 - DNA, 15 bp, Homo sapiens
tgggtgttactcttt

SEQ ID NO: 894069 - DNA, 15 bp, Homo sapiens
gggtgttactctttc

SEQ ID NO: 894070 - DNA, 15 bp, Homo sapiens
ggtgttactctttct

SEQ ID NO: 894071 - DNA, 15 bp, Homo sapiens
gtgttactctttctg

SEQ ID NO: 894072 - DNA, 15 bp, Homo sapiens
tgttactctttctgt

SEQ ID NO: 894073 - DNA, 15 bp, Homo sapiens
gttactctttctgtc

SEQ ID NO: 894074 - DNA, 15 bp, Homo sapiens
ttactctttctgtca

SEQ ID NO: 894075 - DNA, 15 bp, Homo sapiens
tactctttctgtcaa

SEQ ID NO: 894076 - DNA, 15 bp, Homo sapiens
actctttctgtcaag

SEQ ID NO: 894077 - DNA, 15 bp, Homo sapiens
ctctttctgtcaaga

SEQ ID NO: 894078 - DNA, 15 bp, Homo sapiens
tctttctgtcaagag

SEQ ID NO: 894079 - DNA, 15 bp, Homo sapiens
ctttctgtcaagagg

SEQ ID NO: 894080 - DNA, 15 bp, Homo sapiens
tttctgtcaagagga

SEQ ID NO: 894081 - DNA, 15 bp, Homo sapiens
ttctgtcaagaggat

SEQ ID NO: 894082 - DNA, 15 bp, Homo sapiens
tctgtcaagaggatg

SEQ ID NO: 894083 - DNA, 15 bp, Homo sapiens
ctgtcaagaggatgt

SEQ ID NO: 894084 - DNA, 15 bp, Homo sapiens
tgtcaagaggatgtt

SEQ ID NO: 894085 - DNA, 15 bp, Homo sapiens
gtcaagaggatgtta

SEQ ID NO: 894086 - DNA, 15 bp, Homo sapiens
tcaagaggatgttaa

SEQ ID NO: 894087 - DNA, 15 bp, Homo sapiens
caagaggatgttaat

SEQ ID NO: 894088 - DNA, 15 bp, Homo sapiens
aagaggatgttaatt

SEQ ID NO: 894089 - DNA, 15 bp, Homo sapiens
agaggatgttaattt

SEQ ID NO: 894090 - DNA, 15 bp, Homo sapiens
gaggatgttaattta

SEQ ID NO: 894091 - DNA, 15 bp, Homo sapiens
aggatgttaatttag

SEQ ID NO: 894092 - DNA, 15 bp, Homo sapiens
ggatgttaatttagc

SEQ ID NO: 894093 - DNA, 15 bp, Homo sapiens
gatgttaatttagca

SEQ ID NO: 894094 - DNA, 15 bp, Homo sapiens
atgttaatttagcaa

SEQ ID NO: 894095 - DNA, 15 bp, Homo sapiens
tgttaatttagcaaa

SEQ ID NO: 894096 - DNA, 15 bp, Homo sapiens
gttaatttagcaaaa

SEQ ID NO: 894097 - DNA, 15 bp, Homo sapiens
ttaatttagcaaaaa

SEQ ID NO: 894098 - DNA, 15 bp, Homo sapiens
taatttagcaaaaac

SEQ ID NO: 894099 - DNA, 15 bp, Homo sapiens
aatttagcaaaaaca

SEQ ID NO: 894100 - DNA, 15 bp, Homo sapiens
atttagcaaaaacaa

SEQ ID NO: 894101 - DNA, 15 bp, Homo sapiens
tttagcaaaaacaaa

SEQ ID NO: 894102 - DNA, 15 bp, Homo sapiens
ttagcaaaaacaaaa

SEQ ID NO: 894103 - DNA, 15 bp, Homo sapiens
tagcaaaaacaaaat

SEQ ID NO: 894104 - DNA, 15 bp, Homo sapiens
agcaaaaacaaaata

SEQ ID NO: 894105 - DNA, 15 bp, Homo sapiens
gcaaaaacaaaataa

SEQ ID NO: 894106 - DNA, 15 bp, Homo sapiens
caaaaacaaaataat

SEQ ID NO: 894107 - DNA, 15 bp, Homo sapiens
aaaaacaaaataatg

SEQ ID NO: 894108 - DNA, 15 bp, Homo sapiens
aaaacaaaataatga

SEQ ID NO: 894109 - DNA, 15 bp, Homo sapiens
aaacaaaataatgaa

SEQ ID NO: 894110 - DNA, 15 bp, Homo sapiens
aacaaaataatgaac

SEQ ID NO: 894111 - DNA, 15 bp, Homo sapiens
acaaaataatgaact

SEQ ID NO: 894112 - DNA, 15 bp, Homo sapiens
caaaataatgaacta

SEQ ID NO: 894113 - DNA, 15 bp, Homo sapiens
aaaataatgaactag

SEQ ID NO: 894114 - DNA, 15 bp, Homo sapiens
aaataatgaactagc

SEQ ID NO: 894115 - DNA, 15 bp, Homo sapiens
aataatgaactagca

SEQ ID NO: 894116 - DNA, 15 bp, Homo sapiens
ataatgaactagcac

SEQ ID NO: 894117 - DNA, 15 bp, Homo sapiens
taatgaactagcaca

SEQ ID NO: 894118 - DNA, 15 bp, Homo sapiens
aatgaactagcacat

SEQ ID NO: 894119 - DNA, 15 bp, Homo sapiens
atgaactagcacata

SEQ ID NO: 894120 - DNA, 15 bp, Homo sapiens
tgaactagcacatat

SEQ ID NO: 894121 - DNA, 15 bp, Homo sapiens
gaactagcacatatt

SEQ ID NO: 894122 - DNA, 15 bp, Homo sapiens
aactagcacatattg

SEQ ID NO: 894123 - DNA, 15 bp, Homo sapiens
actagcacatattga

SEQ ID NO: 894124 - DNA, 15 bp, Homo sapiens
ctagcacatattgaa

SEQ ID NO: 894125 - DNA, 15 bp, Homo sapiens
tagcacatattgaac

SEQ ID NO: 894126 - DNA, 15 bp, Homo sapiens
agcacatattgaaca

SEQ ID NO: 894127 - DNA, 15 bp, Homo sapiens
gcacatattgaacac

SEQ ID NO: 894128 - DNA, 15 bp, Homo sapiens
cacatattgaacacc

SEQ ID NO: 894129 - DNA, 15 bp, Homo sapiens
acatattgaacacct

SEQ ID NO: 894130 - DNA, 15 bp, Homo sapiens
catattgaacaccta

SEQ ID NO: 894131 - DNA, 15 bp, Homo sapiens
atattgaacacctac

SEQ ID NO: 894132 - DNA, 15 bp, Homo sapiens
tattgaacacctact

SEQ ID NO: 894133 - DNA, 15 bp, Homo sapiens
attgaacacctactg

SEQ ID NO: 894134 - DNA, 15 bp, Homo sapiens
ttgaacacctactgt

SEQ ID NO: 894135 - DNA, 15 bp, Homo sapiens
tgaacacctactgtg

SEQ ID NO: 894136 - DNA, 15 bp, Homo sapiens
gaacacctactgtgt

SEQ ID NO: 894137 - DNA, 15 bp, Homo sapiens
aacacctactgtgtg

SEQ ID NO: 894138 - DNA, 15 bp, Homo sapiens
acacctactgtgtgc

SEQ ID NO: 894139 - DNA, 15 bp, Homo sapiens
cacctactgtgtgcc

SEQ ID NO: 894140 - DNA, 15 bp, Homo sapiens
acctactgtgtgcca

SEQ ID NO: 894141 - DNA, 15 bp, Homo sapiens
cctactgtgtgccag

SEQ ID NO: 894142 - DNA, 15 bp, Homo sapiens
ctactgtgtgccagg

SEQ ID NO: 894143 - DNA, 15 bp, Homo sapiens
tactgtgtgccaggt

SEQ ID NO: 894144 - DNA, 15 bp, Homo sapiens
actgtgtgccaggta

SEQ ID NO: 894145 - DNA, 15 bp, Homo sapiens
ctgtgtgccaggtag

SEQ ID NO: 894146 - DNA, 15 bp, Homo sapiens
tgtgtgccaggtaga

SEQ ID NO: 894147 - DNA, 15 bp, Homo sapiens
gtgtgccaggtagaa

SEQ ID NO: 894148 - DNA, 15 bp, Homo sapiens
tgtgccaggtagaat

SEQ ID NO: 894149 - DNA, 15 bp, Homo sapiens
gtgccaggtagaata

SEQ ID NO: 894150 - DNA, 15 bp, Homo sapiens
tgccaggtagaataa

SEQ ID NO: 894151 - DNA, 15 bp, Homo sapiens
gccaggtagaataag

SEQ ID NO: 894152 - DNA, 15 bp, Homo sapiens
ccaggtagaataagc

SEQ ID NO: 894153 - DNA, 15 bp, Homo sapiens
caggtagaataagca

SEQ ID NO: 894154 - DNA, 15 bp, Homo sapiens
aggtagaataagcag

SEQ ID NO: 894155 - DNA, 15 bp, Homo sapiens
ggtagaataagcaga

SEQ ID NO: 894156 - DNA, 15 bp, Homo sapiens
gtagaataagcagaa

SEQ ID NO: 894157 - DNA, 15 bp, Homo sapiens
tagaataagcagaag

SEQ ID NO: 894158 - DNA, 15 bp, Homo sapiens
agaataagcagaagt

SEQ ID NO: 894159 - DNA, 15 bp, Homo sapiens
gaataagcagaagtg

SEQ ID NO: 894160 - DNA, 15 bp, Homo sapiens
aataagcagaagtgg

SEQ ID NO: 894161 - DNA, 15 bp, Homo sapiens
ataagcagaagtggg

SEQ ID NO: 894162 - DNA, 15 bp, Homo sapiens
taagcagaagtgggg

SEQ ID NO: 894163 - DNA, 15 bp, Homo sapiens
aagcagaagtgggga

SEQ ID NO: 894164 - DNA, 15 bp, Homo sapiens
agcagaagtggggag

SEQ ID NO: 894165 - DNA, 15 bp, Homo sapiens
gcagaagtggggaga

SEQ ID NO: 894166 - DNA, 15 bp, Homo sapiens
cagaagtggggagac

SEQ ID NO: 894167 - DNA, 15 bp, Homo sapiens
agaagtggggagaca

SEQ ID NO: 894168 - DNA, 15 bp, Homo sapiens
gaagtggggagacag

SEQ ID NO: 894169 - DNA, 15 bp, Homo sapiens
aagtggggagacaga

SEQ ID NO: 894170 - DNA, 15 bp, Homo sapiens
agtggggagacagac

SEQ ID NO: 894171 - DNA, 15 bp, Homo sapiens
gtggggagacagact

SEQ ID NO: 894172 - DNA, 15 bp, Homo sapiens
tggggagacagacta

SEQ ID NO: 894173 - DNA, 15 bp, Homo sapiens
ggggagacagactac

SEQ ID NO: 894174 - DNA, 15 bp, Homo sapiens
gggagacagactaca

SEQ ID NO: 894175 - DNA, 15 bp, Homo sapiens
ggagacagactacag

SEQ ID NO: 894176 - DNA, 15 bp, Homo sapiens
gagacagactacagg

SEQ ID NO: 894177 - DNA, 15 bp, Homo sapiens
agacagactacaggt

SEQ ID NO: 894178 - DNA, 15 bp, Homo sapiens
gacagactacaggtt

SEQ ID NO: 894179 - DNA, 15 bp, Homo sapiens
acagactacaggtta

SEQ ID NO: 894180 - DNA, 15 bp, Homo sapiens
cagactacaggttac

SEQ ID NO: 894181 - DNA, 15 bp, Homo sapiens
agactacaggttaca

SEQ ID NO: 894182 - DNA, 15 bp, Homo sapiens
gactacaggttacaa

SEQ ID NO: 894183 - DNA, 15 bp, Homo sapiens
actacaggttacaaa

SEQ ID NO: 894184 - DNA, 15 bp, Homo sapiens
ctacaggttacaaaa

SEQ ID NO: 894185 - DNA, 15 bp, Homo sapiens
tacaggttacaaaat

SEQ ID NO: 894186 - DNA, 15 bp, Homo sapiens
acaggttacaaaatt

SEQ ID NO: 894187 - DNA, 15 bp, Homo sapiens
caggttacaaaattt

SEQ ID NO: 894188 - DNA, 15 bp, Homo sapiens
aggttacaaaatttt

SEQ ID NO: 894189 - DNA, 15 bp, Homo sapiens
ggttacaaaattttc

SEQ ID NO: 894190 - DNA, 15 bp, Homo sapiens
gttacaaaattttct

SEQ ID NO: 894191 - DNA, 15 bp, Homo sapiens
ttacaaaattttcta

SEQ ID NO: 894192 - DNA, 15 bp, Homo sapiens
tacaaaattttctat

SEQ ID NO: 894193 - DNA, 15 bp, Homo sapiens
acaaaattttctata

SEQ ID NO: 894194 - DNA, 15 bp, Homo sapiens
caaaattttctatat

SEQ ID NO: 894195 - DNA, 15 bp, Homo sapiens
aaaattttctatata

SEQ ID NO: 894196 - DNA, 15 bp, Homo sapiens
aaattttctatatat

SEQ ID NO: 894197 - DNA, 15 bp, Homo sapiens
aattttctatatatc

SEQ ID NO: 894198 - DNA, 15 bp, Homo sapiens
attttctatatatca

SEQ ID NO: 894199 - DNA, 15 bp, Homo sapiens
ttttctatatatcag

SEQ ID NO: 894200 - DNA, 15 bp, Homo sapiens
tttctatatatcaga

SEQ ID NO: 894201 - DNA, 15 bp, Homo sapiens
ttctatatatcagag

SEQ ID NO: 894202 - DNA, 15 bp, Homo sapiens
tctatatatcagagc

SEQ ID NO: 894203 - DNA, 15 bp, Homo sapiens
ctatatatcagagct

SEQ ID NO: 894204 - DNA, 15 bp, Homo sapiens
tatatatcagagctg

SEQ ID NO: 894205 - DNA, 15 bp, Homo sapiens
atatatcagagctgt

SEQ ID NO: 894206 - DNA, 15 bp, Homo sapiens
tatatcagagctgtg

SEQ ID NO: 894207 - DNA, 15 bp, Homo sapiens
atatcagagctgtgc

SEQ ID NO: 894208 - DNA, 15 bp, Homo sapiens
tatcagagctgtgca

SEQ ID NO: 894209 - DNA, 15 bp, Homo sapiens
atcagagctgtgcag

SEQ ID NO: 894210 - DNA, 15 bp, Homo sapiens
tcagagctgtgcaga

SEQ ID NO: 894211 - DNA, 15 bp, Homo sapiens
cagagctgtgcagag

SEQ ID NO: 894212 - DNA, 15 bp, Homo sapiens
agagctgtgcagaga

SEQ ID NO: 894213 - DNA, 15 bp, Homo sapiens
gagctgtgcagagat

SEQ ID NO: 894214 - DNA, 15 bp, Homo sapiens
agctgtgcagagatg

SEQ ID NO: 894215 - DNA, 15 bp, Homo sapiens
gctgtgcagagatgg

SEQ ID NO: 894216 - DNA, 15 bp, Homo sapiens
ctgtgcagagatggg

SEQ ID NO: 894217 - DNA, 15 bp, Homo sapiens
tgtgcagagatgggc

SEQ ID NO: 894218 - DNA, 15 bp, Homo sapiens
gtgcagagatgggcc

SEQ ID NO: 894219 - DNA, 15 bp, Homo sapiens
tgcagagatgggcca

SEQ ID NO: 894220 - DNA, 15 bp, Homo sapiens
gcagagatgggccac

SEQ ID NO: 894221 - DNA, 15 bp, Homo sapiens
cagagatgggccact

SEQ ID NO: 894222 - DNA, 15 bp, Homo sapiens
agagatgggccactg

SEQ ID NO: 894223 - DNA, 15 bp, Homo sapiens
gagatgggccactgt

SEQ ID NO: 894224 - DNA, 15 bp, Homo sapiens
agatgggccactgtg

SEQ ID NO: 894225 - DNA, 15 bp, Homo sapiens
gatgggccactgtgg

SEQ ID NO: 894226 - DNA, 15 bp, Homo sapiens
atgggccactgtggg

SEQ ID NO: 894227 - DNA, 15 bp, Homo sapiens
tgggccactgtgggg

SEQ ID NO: 894228 - DNA, 15 bp, Homo sapiens
gggccactgtggggg

SEQ ID NO: 894229 - DNA, 15 bp, Homo sapiens
ggccactgtgggggc

SEQ ID NO: 894230 - DNA, 15 bp, Homo sapiens
gccactgtgggggca

SEQ ID NO: 894231 - DNA, 15 bp, Homo sapiens
ccactgtgggggcaa

SEQ ID NO: 894232 - DNA, 15 bp, Homo sapiens
cactgtgggggcaat

SEQ ID NO: 894233 - DNA, 15 bp, Homo sapiens
actgtgggggcaatg

SEQ ID NO: 894234 - DNA, 15 bp, Homo sapiens
ctgtgggggcaatga

SEQ ID NO: 894235 - DNA, 15 bp, Homo sapiens
tgtgggggcaatgag

SEQ ID NO: 894236 - DNA, 15 bp, Homo sapiens
gtgggggcaatgagc

SEQ ID NO: 894237 - DNA, 15 bp, Homo sapiens
tgggggcaatgagcc

SEQ ID NO: 894238 - DNA, 15 bp, Homo sapiens
gggggcaatgagcca

SEQ ID NO: 894239 - DNA, 15 bp, Homo sapiens
ggggcaatgagccag

SEQ ID NO: 894240 - DNA, 15 bp, Homo sapiens
gggcaatgagccagg

SEQ ID NO: 894241 - DNA, 15 bp, Homo sapiens
ggcaatgagccaggg

SEQ ID NO: 894242 - DNA, 15 bp, Homo sapiens
gcaatgagccaggga

SEQ ID NO: 894243 - DNA, 15 bp, Homo sapiens
caatgagccagggaa

SEQ ID NO: 894244 - DNA, 15 bp, Homo sapiens
aatgagccagggaaa

SEQ ID NO: 894245 - DNA, 15 bp, Homo sapiens
atgagccagggaaat

SEQ ID NO: 894246 - DNA, 15 bp, Homo sapiens
tgagccagggaaatt

SEQ ID NO: 894247 - DNA, 15 bp, Homo sapiens
gagccagggaaatta

SEQ ID NO: 894248 - DNA, 15 bp, Homo sapiens
agccagggaaattac

SEQ ID NO: 894249 - DNA, 15 bp, Homo sapiens
gccagggaaattact

SEQ ID NO: 894250 - DNA, 15 bp, Homo sapiens
ccagggaaattactt

SEQ ID NO: 894251 - DNA, 15 bp, Homo sapiens
cagggaaattacttg

SEQ ID NO: 894252 - DNA, 15 bp, Homo sapiens
agggaaattacttgg

SEQ ID NO: 894253 - DNA, 15 bp, Homo sapiens
gggaaattacttggc

SEQ ID NO: 894254 - DNA, 15 bp, Homo sapiens
ggaaattacttggca

SEQ ID NO: 894255 - DNA, 15 bp, Homo sapiens
gaaattacttggcag

SEQ ID NO: 894256 - DNA, 15 bp, Homo sapiens
aaattacttggcagg

SEQ ID NO: 894257 - DNA, 15 bp, Homo sapiens
aattacttggcagga

SEQ ID NO: 894258 - DNA, 15 bp, Homo sapiens
attacttggcaggaa

SEQ ID NO: 894259 - DNA, 15 bp, Homo sapiens
ttacttggcaggaag

SEQ ID NO: 894260 - DNA, 15 bp, Homo sapiens
tacttggcaggaagg

SEQ ID NO: 894261 - DNA, 15 bp, Homo sapiens
acttggcaggaaggg

SEQ ID NO: 894262 - DNA, 15 bp, Homo sapiens
cttggcaggaaggga

SEQ ID NO: 894263 - DNA, 15 bp, Homo sapiens
ttggcaggaagggaa

SEQ ID NO: 894264 - DNA, 15 bp, Homo sapiens
tggcaggaagggaag

SEQ ID NO: 894265 - DNA, 15 bp, Homo sapiens
ggcaggaagggaagt

SEQ ID NO: 894266 - DNA, 15 bp, Homo sapiens
gcaggaagggaagtt

SEQ ID NO: 894267 - DNA, 15 bp, Homo sapiens
caggaagggaagttg

SEQ ID NO: 894268 - DNA, 15 bp, Homo sapiens
aggaagggaagttgt

SEQ ID NO: 894269 - DNA, 15 bp, Homo sapiens
ggaagggaagttgta

SEQ ID NO: 894270 - DNA, 15 bp, Homo sapiens
gaagggaagttgtag

SEQ ID NO: 894271 - DNA, 15 bp, Homo sapiens
aagggaagttgtagc

SEQ ID NO: 894272 - DNA, 15 bp, Homo sapiens
agggaagttgtagcc

SEQ ID NO: 894273 - DNA, 15 bp, Homo sapiens
gggaagttgtagcca

SEQ ID NO: 894274 - DNA, 15 bp, Homo sapiens
ggaagttgtagccag

SEQ ID NO: 894275 - DNA, 15 bp, Homo sapiens
gaagttgtagccagg

SEQ ID NO: 894276 - DNA, 15 bp, Homo sapiens
aagttgtagccagga

SEQ ID NO: 894277 - DNA, 15 bp, Homo sapiens
agttgtagccaggac

SEQ ID NO: 894278 - DNA, 15 bp, Homo sapiens
gttgtagccaggaca

SEQ ID NO: 894279 - DNA, 15 bp, Homo sapiens
ttgtagccaggacag

SEQ ID NO: 894280 - DNA, 15 bp, Homo sapiens
tgtagccaggacagt

SEQ ID NO: 894281 - DNA, 15 bp, Homo sapiens
gtagccaggacagtt

SEQ ID NO: 894282 - DNA, 15 bp, Homo sapiens
tagccaggacagttt

SEQ ID NO: 894283 - DNA, 15 bp, Homo sapiens
agccaggacagtttg

SEQ ID NO: 894284 - DNA, 15 bp, Homo sapiens
gccaggacagtttgg

SEQ ID NO: 894285 - DNA, 15 bp, Homo sapiens
ccaggacagtttggg

SEQ ID NO: 894286 - DNA, 15 bp, Homo sapiens
caggacagtttgggg

SEQ ID NO: 894287 - DNA, 15 bp, Homo sapiens
aggacagtttggggg

SEQ ID NO: 894288 - DNA, 15 bp, Homo sapiens
ggacagtttgggggt

SEQ ID NO: 894289 - DNA, 15 bp, Homo sapiens
gacagtttgggggtg

SEQ ID NO: 894290 - DNA, 15 bp, Homo sapiens
acagtttgggggtga

SEQ ID NO: 894291 - DNA, 15 bp, Homo sapiens
cagtttgggggtgag

SEQ ID NO: 894292 - DNA, 15 bp, Homo sapiens
agtttgggggtgagt

SEQ ID NO: 894293 - DNA, 15 bp, Homo sapiens
gtttgggggtgagtt

SEQ ID NO: 894294 - DNA, 15 bp, Homo sapiens
tttgggggtgagtta

SEQ ID NO: 894295 - DNA, 15 bp, Homo sapiens
ttgggggtgagttag

SEQ ID NO: 894296 - DNA, 15 bp, Homo sapiens
tgggggtgagttaga

SEQ ID NO: 894297 - DNA, 15 bp, Homo sapiens
gggggtgagttagat

SEQ ID NO: 894298 - DNA, 15 bp, Homo sapiens
ggggtgagttagatg

SEQ ID NO: 894299 - DNA, 15 bp, Homo sapiens
gggtgagttagatga

SEQ ID NO: 894300 - DNA, 15 bp, Homo sapiens
ggtgagttagatgac

SEQ ID NO: 894301 - DNA, 15 bp, Homo sapiens
gtgagttagatgacc

SEQ ID NO: 894302 - DNA, 15 bp, Homo sapiens
tgagttagatgacct

SEQ ID NO: 894303 - DNA, 15 bp, Homo sapiens
gagttagatgacctt

SEQ ID NO: 894304 - DNA, 15 bp, Homo sapiens
agttagatgaccttt

SEQ ID NO: 894305 - DNA, 15 bp, Homo sapiens
gttagatgacctttt

SEQ ID NO: 894306 - DNA, 15 bp, Homo sapiens
ttagatgaccttttg

SEQ ID NO: 894307 - DNA, 15 bp, Homo sapiens
tagatgaccttttgg

SEQ ID NO: 894308 - DNA, 15 bp, Homo sapiens
agatgaccttttggg

SEQ ID NO: 894309 - DNA, 15 bp, Homo sapiens
gatgaccttttgggt

SEQ ID NO: 894310 - DNA, 15 bp, Homo sapiens
atgaccttttgggtc

SEQ ID NO: 894311 - DNA, 15 bp, Homo sapiens
tgaccttttgggtcc

SEQ ID NO: 894312 - DNA, 15 bp, Homo sapiens
gaccttttgggtccc

SEQ ID NO: 894313 - DNA, 15 bp, Homo sapiens
accttttgggtccct

SEQ ID NO: 894314 - DNA, 15 bp, Homo sapiens
ccttttgggtccctt

SEQ ID NO: 894315 - DNA, 15 bp, Homo sapiens
cttttgggtcccttc

SEQ ID NO: 894316 - DNA, 15 bp, Homo sapiens
ttttgggtcccttcc

SEQ ID NO: 894317 - DNA, 15 bp, Homo sapiens
tttgggtcccttcca

SEQ ID NO: 894318 - DNA, 15 bp, Homo sapiens
ttgggtcccttccat

SEQ ID NO: 894319 - DNA, 15 bp, Homo sapiens
tgggtcccttccatt

SEQ ID NO: 894320 - DNA, 15 bp, Homo sapiens
gggtcccttccatta

SEQ ID NO: 894321 - DNA, 15 bp, Homo sapiens
ggtcccttccattag

SEQ ID NO: 894322 - DNA, 15 bp, Homo sapiens
gtcccttccattaga

SEQ ID NO: 894323 - DNA, 15 bp, Homo sapiens
tcccttccattagaa

SEQ ID NO: 894324 - DNA, 15 bp, Homo sapiens
cccttccattagaaa

SEQ ID NO: 894325 - DNA, 15 bp, Homo sapiens
ccttccattagaaag

SEQ ID NO: 894326 - DNA, 15 bp, Homo sapiens
cttccattagaaagt

SEQ ID NO: 894327 - DNA, 15 bp, Homo sapiens
ttccattagaaagtc

SEQ ID NO: 894328 - DNA, 15 bp, Homo sapiens
tccattagaaagtct

SEQ ID NO: 894329 - DNA, 15 bp, Homo sapiens
ccattagaaagtctt

SEQ ID NO: 894330 - DNA, 15 bp, Homo sapiens
cattagaaagtcttt

SEQ ID NO: 894331 - DNA, 15 bp, Homo sapiens
attagaaagtctttg

SEQ ID NO: 894332 - DNA, 15 bp, Homo sapiens
ttagaaagtctttgc

SEQ ID NO: 894333 - DNA, 15 bp, Homo sapiens
tagaaagtctttgct

SEQ ID NO: 894334 - DNA, 15 bp, Homo sapiens
agaaagtctttgctt

SEQ ID NO: 894335 - DNA, 15 bp, Homo sapiens
gaaagtctttgcttc

SEQ ID NO: 894336 - DNA, 15 bp, Homo sapiens
aaagtctttgcttct

SEQ ID NO: 894337 - DNA, 15 bp, Homo sapiens
aagtctttgcttctt

SEQ ID NO: 894338 - DNA, 15 bp, Homo sapiens
agtctttgcttctta

SEQ ID NO: 894339 - DNA, 15 bp, Homo sapiens
gtctttgcttcttag

SEQ ID NO: 894340 - DNA, 15 bp, Homo sapiens
tctttgcttcttaga

SEQ ID NO: 894341 - DNA, 15 bp, Homo sapiens
ctttgcttcttagat

SEQ ID NO: 894342 - DNA, 15 bp, Homo sapiens
tttgcttcttagata

SEQ ID NO: 894343 - DNA, 15 bp, Homo sapiens
ttgcttcttagataa

SEQ ID NO: 894344 - DNA, 15 bp, Homo sapiens
tgcttcttagataaa

SEQ ID NO: 894345 - DNA, 15 bp, Homo sapiens
gcttcttagataaag

SEQ ID NO: 894346 - DNA, 15 bp, Homo sapiens
cttcttagataaaga

SEQ ID NO: 894347 - DNA, 15 bp, Homo sapiens
ttcttagataaagaa

SEQ ID NO: 894348 - DNA, 15 bp, Homo sapiens
tcttagataaagaag

SEQ ID NO: 894349 - DNA, 15 bp, Homo sapiens
cttagataaagaagg

SEQ ID NO: 894350 - DNA, 15 bp, Homo sapiens
ttagataaagaaggg

SEQ ID NO: 894351 - DNA, 15 bp, Homo sapiens
tagataaagaaggga

SEQ ID NO: 894352 - DNA, 15 bp, Homo sapiens
agataaagaagggag

SEQ ID NO: 894353 - DNA, 15 bp, Homo sapiens
gataaagaagggagt

SEQ ID NO: 894354 - DNA, 15 bp, Homo sapiens
ataaagaagggagta

SEQ ID NO: 894355 - DNA, 15 bp, Homo sapiens
taaagaagggagtaa

SEQ ID NO: 894356 - DNA, 15 bp, Homo sapiens
aaagaagggagtaag

SEQ ID NO: 894357 - DNA, 15 bp, Homo sapiens
aagaagggagtaagg

SEQ ID NO: 894358 - DNA, 15 bp, Homo sapiens
agaagggagtaaggg

SEQ ID NO: 894359 - DNA, 15 bp, Homo sapiens
gaagggagtaagggt

SEQ ID NO: 894360 - DNA, 15 bp, Homo sapiens
aagggagtaagggtc

SEQ ID NO: 894361 - DNA, 15 bp, Homo sapiens
agggagtaagggtcc

SEQ ID NO: 894362 - DNA, 15 bp, Homo sapiens
gggagtaagggtcca

SEQ ID NO: 894363 - DNA, 15 bp, Homo sapiens
ggagtaagggtccaa

SEQ ID NO: 894364 - DNA, 15 bp, Homo sapiens
gagtaagggtccaag

SEQ ID NO: 894365 - DNA, 15 bp, Homo sapiens
agtaagggtccaagc

SEQ ID NO: 894366 - DNA, 15 bp, Homo sapiens
gtaagggtccaagca

SEQ ID NO: 894367 - DNA, 15 bp, Homo sapiens
taagggtccaagcag

SEQ ID NO: 894368 - DNA, 15 bp, Homo sapiens
aagggtccaagcaga

SEQ ID NO: 894369 - DNA, 15 bp, Homo sapiens
agggtccaagcagag

SEQ ID NO: 894370 - DNA, 15 bp, Homo sapiens
gggtccaagcagagt

SEQ ID NO: 894371 - DNA, 15 bp, Homo sapiens
ggtccaagcagagtg

SEQ ID NO: 894372 - DNA, 15 bp, Homo sapiens
gtccaagcagagtgt

SEQ ID NO: 894373 - DNA, 15 bp, Homo sapiens
tccaagcagagtgtg

SEQ ID NO: 894374 - DNA, 15 bp, Homo sapiens
ccaagcagagtgtgc

SEQ ID NO: 894375 - DNA, 15 bp, Homo sapiens
caagcagagtgtgct

SEQ ID NO: 894376 - DNA, 15 bp, Homo sapiens
aagcagagtgtgctt

SEQ ID NO: 894377 - DNA, 15 bp, Homo sapiens
agcagagtgtgcttc

SEQ ID NO: 894378 - DNA, 15 bp, Homo sapiens
gcagagtgtgcttca

SEQ ID NO: 894379 - DNA, 15 bp, Homo sapiens
cagagtgtgcttcag

SEQ ID NO: 894380 - DNA, 15 bp, Homo sapiens
agagtgtgcttcagc

SEQ ID NO: 894381 - DNA, 15 bp, Homo sapiens
gagtgtgcttcagcc

SEQ ID NO: 894382 - DNA, 15 bp, Homo sapiens
agtgtgcttcagcct

SEQ ID NO: 894383 - DNA, 15 bp, Homo sapiens
gtgtgcttcagcctg

SEQ ID NO: 894384 - DNA, 15 bp, Homo sapiens
tgtgcttcagcctga

SEQ ID NO: 894385 - DNA, 15 bp, Homo sapiens
gtgcttcagcctgaa

SEQ ID NO: 894386 - DNA, 15 bp, Homo sapiens
tgcttcagcctgaag

SEQ ID NO: 894387 - DNA, 15 bp, Homo sapiens
gcttcagcctgaaga

SEQ ID NO: 894388 - DNA, 15 bp, Homo sapiens
cttcagcctgaagac

SEQ ID NO: 894389 - DNA, 15 bp, Homo sapiens
ttcagcctgaagaca

SEQ ID NO: 894390 - DNA, 15 bp, Homo sapiens
tcagcctgaagacac

SEQ ID NO: 894391 - DNA, 15 bp, Homo sapiens
cagcctgaagacaca

SEQ ID NO: 894392 - DNA, 15 bp, Homo sapiens
agcctgaagacacag

SEQ ID NO: 894393 - DNA, 15 bp, Homo sapiens
gcctgaagacacaga

SEQ ID NO: 894394 - DNA, 15 bp, Homo sapiens
cctgaagacacagag

SEQ ID NO: 894395 - DNA, 15 bp, Homo sapiens
ctgaagacacagaga

SEQ ID NO: 894396 - DNA, 15 bp, Homo sapiens
tgaagacacagagaa

SEQ ID NO: 894397 - DNA, 15 bp, Homo sapiens
gaagacacagagaac

SEQ ID NO: 894398 - DNA, 15 bp, Homo sapiens
aagacacagagaaca

SEQ ID NO: 894399 - DNA, 15 bp, Homo sapiens
agacacagagaacat

SEQ ID NO: 894400 - DNA, 15 bp, Homo sapiens
gacacagagaacatg

SEQ ID NO: 894401 - DNA, 15 bp, Homo sapiens
acacagagaacatgg

SEQ ID NO: 894402 - DNA, 15 bp, Homo sapiens
cacagagaacatggg

SEQ ID NO: 894403 - DNA, 15 bp, Homo sapiens
acagagaacatgggg

SEQ ID NO: 894404 - DNA, 15 bp, Homo sapiens
cagagaacatggggg

SEQ ID NO: 894405 - DNA, 15 bp, Homo sapiens
agagaacatgggggc

SEQ ID NO: 894406 - DNA, 15 bp, Homo sapiens
gagaacatgggggca

SEQ ID NO: 894407 - DNA, 15 bp, Homo sapiens
agaacatgggggcaa

SEQ ID NO: 894408 - DNA, 15 bp, Homo sapiens
gaacatgggggcaag

SEQ ID NO: 894409 - DNA, 15 bp, Homo sapiens
aacatgggggcaaga

SEQ ID NO: 894410 - DNA, 15 bp, Homo sapiens
acatgggggcaagag

SEQ ID NO: 894411 - DNA, 15 bp, Homo sapiens
catgggggcaagagg

SEQ ID NO: 894412 - DNA, 15 bp, Homo sapiens
atgggggcaagaggc

SEQ ID NO: 894413 - DNA, 15 bp, Homo sapiens
tgggggcaagaggca

SEQ ID NO: 894414 - DNA, 15 bp, Homo sapiens
gggggcaagaggcaa

SEQ ID NO: 894415 - DNA, 15 bp, Homo sapiens
ggggcaagaggcaag

SEQ ID NO: 894416 - DNA, 15 bp, Homo sapiens
gggcaagaggcaagg

SEQ ID NO: 894417 - DNA, 15 bp, Homo sapiens
ggcaagaggcaaggg

SEQ ID NO: 894418 - DNA, 15 bp, Homo sapiens
gcaagaggcaagggg

SEQ ID NO: 894419 - DNA, 15 bp, Homo sapiens
caagaggcaagggga

SEQ ID NO: 894420 - DNA, 15 bp, Homo sapiens
aagaggcaaggggat

SEQ ID NO: 894421 - DNA, 15 bp, Homo sapiens
agaggcaaggggatc

SEQ ID NO: 894422 - DNA, 15 bp, Homo sapiens
gaggcaaggggatct

SEQ ID NO: 894423 - DNA, 15 bp, Homo sapiens
aggcaaggggatctc

SEQ ID NO: 894424 - DNA, 15 bp, Homo sapiens
ggcaaggggatctca

SEQ ID NO: 894425 - DNA, 15 bp, Homo sapiens
gcaaggggatctcaa

SEQ ID NO: 894426 - DNA, 15 bp, Homo sapiens
caaggggatctcaaa

SEQ ID NO: 894427 - DNA, 15 bp, Homo sapiens
aaggggatctcaaag

SEQ ID NO: 894428 - DNA, 15 bp, Homo sapiens
aggggatctcaaaga

SEQ ID NO: 894429 - DNA, 15 bp, Homo sapiens
ggggatctcaaagac

SEQ ID NO: 894430 - DNA, 15 bp, Homo sapiens
gggatctcaaagact

SEQ ID NO: 894431 - DNA, 15 bp, Homo sapiens
ggatctcaaagactt

SEQ ID NO: 894432 - DNA, 15 bp, Homo sapiens
gatctcaaagacttc

SEQ ID NO: 894433 - DNA, 15 bp, Homo sapiens
atctcaaagacttct

SEQ ID NO: 894434 - DNA, 15 bp, Homo sapiens
tctcaaagacttctt

SEQ ID NO: 894435 - DNA, 15 bp, Homo sapiens
ctcaaagacttcttt

SEQ ID NO: 894436 - DNA, 15 bp, Homo sapiens
tcaaagacttcttta

SEQ ID NO: 894437 - DNA, 15 bp, Homo sapiens
caaagacttctttag

SEQ ID NO: 894438 - DNA, 15 bp, Homo sapiens
aaagacttctttagc

SEQ ID NO: 894439 - DNA, 15 bp, Homo sapiens
aagacttctttagct

SEQ ID NO: 894440 - DNA, 15 bp, Homo sapiens
agacttctttagcta

SEQ ID NO: 894441 - DNA, 15 bp, Homo sapiens
gacttctttagctaa

SEQ ID NO: 894442 - DNA, 15 bp, Homo sapiens
acttctttagctaat

SEQ ID NO: 894443 - DNA, 15 bp, Homo sapiens
cttctttagctaatt

SEQ ID NO: 894444 - DNA, 15 bp, Homo sapiens
ttctttagctaatta

SEQ ID NO: 894445 - DNA, 15 bp, Homo sapiens
tctttagctaattac

SEQ ID NO: 894446 - DNA, 15 bp, Homo sapiens
ctttagctaattact

SEQ ID NO: 894447 - DNA, 15 bp, Homo sapiens
tttagctaattactt

SEQ ID NO: 894448 - DNA, 15 bp, Homo sapiens
ttagctaattacttc

SEQ ID NO: 894449 - DNA, 15 bp, Homo sapiens
tagctaattacttcc

SEQ ID NO: 894450 - DNA, 15 bp, Homo sapiens
agctaattacttcca

SEQ ID NO: 894451 - DNA, 15 bp, Homo sapiens
gctaattacttccat

SEQ ID NO: 894452 - DNA, 15 bp, Homo sapiens
ctaattacttccatt

SEQ ID NO: 894453 - DNA, 15 bp, Homo sapiens
taattacttccattg

SEQ ID NO: 894454 - DNA, 15 bp, Homo sapiens
aattacttccattgc

SEQ ID NO: 894455 - DNA, 15 bp, Homo sapiens
attacttccattgcc

SEQ ID NO: 894456 - DNA, 15 bp, Homo sapiens
ttacttccattgcca

SEQ ID NO: 894457 - DNA, 15 bp, Homo sapiens
tacttccattgccat

SEQ ID NO: 894458 - DNA, 15 bp, Homo sapiens
acttccattgccatg

SEQ ID NO: 894459 - DNA, 15 bp, Homo sapiens
cttccattgccatgg

SEQ ID NO: 894460 - DNA, 15 bp, Homo sapiens
ttccattgccatggc

SEQ ID NO: 894461 - DNA, 15 bp, Homo sapiens
tccattgccatggcc

SEQ ID NO: 894462 - DNA, 15 bp, Homo sapiens
ccattgccatggcca

SEQ ID NO: 894463 - DNA, 15 bp, Homo sapiens
cattgccatggccaa

SEQ ID NO: 894464 - DNA, 15 bp, Homo sapiens
attgccatggccaat

SEQ ID NO: 894465 - DNA, 15 bp, Homo sapiens
ttgccatggccaata

SEQ ID NO: 894466 - DNA, 15 bp, Homo sapiens
tgccatggccaataa

SEQ ID NO: 894467 - DNA, 15 bp, Homo sapiens
gccatggccaataat

SEQ ID NO: 894468 - DNA, 15 bp, Homo sapiens
ccatggccaataata

SEQ ID NO: 894469 - DNA, 15 bp, Homo sapiens
catggccaataataa

SEQ ID NO: 894470 - DNA, 15 bp, Homo sapiens
atggccaataataag

SEQ ID NO: 894471 - DNA, 15 bp, Homo sapiens
tggccaataataaga

SEQ ID NO: 894472 - DNA, 15 bp, Homo sapiens
ggccaataataagaa

SEQ ID NO: 894473 - DNA, 15 bp, Homo sapiens
gccaataataagaat

SEQ ID NO: 894474 - DNA, 15 bp, Homo sapiens
ccaataataagaata

SEQ ID NO: 894475 - DNA, 15 bp, Homo sapiens
caataataagaataa

SEQ ID NO: 894476 - DNA, 15 bp, Homo sapiens
aataataagaataat

SEQ ID NO: 894477 - DNA, 15 bp, Homo sapiens
ataataagaataata

SEQ ID NO: 894478 - DNA, 15 bp, Homo sapiens
taataagaataataa

SEQ ID NO: 894479 - DNA, 15 bp, Homo sapiens
aataagaataataaa

SEQ ID NO: 894480 - DNA, 15 bp, Homo sapiens
ataagaataataaaa

SEQ ID NO: 894481 - DNA, 15 bp, Homo sapiens
taagaataataaaac

SEQ ID NO: 894482 - DNA, 15 bp, Homo sapiens
aagaataataaaaca

SEQ ID NO: 894483 - DNA, 15 bp, Homo sapiens
agaataataaaacag

SEQ ID NO: 894484 - DNA, 15 bp, Homo sapiens
gaataataaaacagt

SEQ ID NO: 894485 - DNA, 15 bp, Homo sapiens
aataataaaacagta

SEQ ID NO: 894486 - DNA, 15 bp, Homo sapiens
ataataaaacagtaa

SEQ ID NO: 894487 - DNA, 15 bp, Homo sapiens
taataaaacagtaat

SEQ ID NO: 894488 - DNA, 15 bp, Homo sapiens
aataaaacagtaata

SEQ ID NO: 894489 - DNA, 15 bp, Homo sapiens
ataaaacagtaatac

SEQ ID NO: 894490 - DNA, 15 bp, Homo sapiens
taaaacagtaatact

SEQ ID NO: 894491 - DNA, 15 bp, Homo sapiens
aaaacagtaatacta

SEQ ID NO: 894492 - DNA, 15 bp, Homo sapiens
aaacagtaatactag

SEQ ID NO: 894493 - DNA, 15 bp, Homo sapiens
aacagtaatactagc

SEQ ID NO: 894494 - DNA, 15 bp, Homo sapiens
acagtaatactagca

SEQ ID NO: 894495 - DNA, 15 bp, Homo sapiens
cagtaatactagcag

SEQ ID NO: 894496 - DNA, 15 bp, Homo sapiens
agtaatactagcagt

SEQ ID NO: 894497 - DNA, 15 bp, Homo sapiens
gtaatactagcagtt

SEQ ID NO: 894498 - DNA, 15 bp, Homo sapiens
taatactagcagttg

SEQ ID NO: 894499 - DNA, 15 bp, Homo sapiens
aatactagcagttgg

SEQ ID NO: 894500 - DNA, 15 bp, Homo sapiens
atactagcagttggg

SEQ ID NO: 894501 - DNA, 15 bp, Homo sapiens
tactagcagttggga

SEQ ID NO: 894502 - DNA, 15 bp, Homo sapiens
actagcagttgggaa

SEQ ID NO: 894503 - DNA, 15 bp, Homo sapiens
ctagcagttgggaag

SEQ ID NO: 894504 - DNA, 15 bp, Homo sapiens
tagcagttgggaagc

SEQ ID NO: 894505 - DNA, 15 bp, Homo sapiens
agcagttgggaagct

SEQ ID NO: 894506 - DNA, 15 bp, Homo sapiens
gcagttgggaagcta

SEQ ID NO: 894507 - DNA, 15 bp, Homo sapiens
cagttgggaagctac

SEQ ID NO: 894508 - DNA, 15 bp, Homo sapiens
agttgggaagctaca

SEQ ID NO: 894509 - DNA, 15 bp, Homo sapiens
gttgggaagctacat

SEQ ID NO: 894510 - DNA, 15 bp, Homo sapiens
ttgggaagctacata

SEQ ID NO: 894511 - DNA, 15 bp, Homo sapiens
tgggaagctacataa

SEQ ID NO: 894512 - DNA, 15 bp, Homo sapiens
gggaagctacataat

SEQ ID NO: 894513 - DNA, 15 bp, Homo sapiens
ggaagctacataata

SEQ ID NO: 894514 - DNA, 15 bp, Homo sapiens
gaagctacataatag

SEQ ID NO: 894515 - DNA, 15 bp, Homo sapiens
aagctacataatagt

SEQ ID NO: 894516 - DNA, 15 bp, Homo sapiens
agctacataatagta

SEQ ID NO: 894517 - DNA, 15 bp, Homo sapiens
gctacataatagtaa

SEQ ID NO: 894518 - DNA, 15 bp, Homo sapiens
ctacataatagtaat

SEQ ID NO: 894519 - DNA, 15 bp, Homo sapiens
tacataatagtaatt

SEQ ID NO: 894520 - DNA, 15 bp, Homo sapiens
acataatagtaatta

SEQ ID NO: 894521 - DNA, 15 bp, Homo sapiens
cataatagtaattaa

SEQ ID NO: 894522 - DNA, 15 bp, Homo sapiens
ataatagtaattaag

SEQ ID NO: 894523 - DNA, 15 bp, Homo sapiens
taatagtaattaaga

SEQ ID NO: 894524 - DNA, 15 bp, Homo sapiens
aatagtaattaagag

SEQ ID NO: 894525 - DNA, 15 bp, Homo sapiens
atagtaattaagaga

SEQ ID NO: 894526 - DNA, 15 bp, Homo sapiens
tagtaattaagagaa

SEQ ID NO: 894527 - DNA, 15 bp, Homo sapiens
agtaattaagagaac

SEQ ID NO: 894528 - DNA, 15 bp, Homo sapiens
gtaattaagagaaca

SEQ ID NO: 894529 - DNA, 15 bp, Homo sapiens
taattaagagaacag

SEQ ID NO: 894530 - DNA, 15 bp, Homo sapiens
aattaagagaacaga

SEQ ID NO: 894531 - DNA, 15 bp, Homo sapiens
attaagagaacagac

SEQ ID NO: 894532 - DNA, 15 bp, Homo sapiens
ttaagagaacagact

SEQ ID NO: 894533 - DNA, 15 bp, Homo sapiens
taagagaacagactt

SEQ ID NO: 894534 - DNA, 15 bp, Homo sapiens
aagagaacagacttt

SEQ ID NO: 894535 - DNA, 15 bp, Homo sapiens
agagaacagactttg

SEQ ID NO: 894536 - DNA, 15 bp, Homo sapiens
gagaacagactttga

SEQ ID NO: 894537 - DNA, 15 bp, Homo sapiens
agaacagactttgaa

SEQ ID NO: 894538 - DNA, 15 bp, Homo sapiens
gaacagactttgaag

SEQ ID NO: 894539 - DNA, 15 bp, Homo sapiens
aacagactttgaagc

SEQ ID NO: 894540 - DNA, 15 bp, Homo sapiens
acagactttgaagct

SEQ ID NO: 894541 - DNA, 15 bp, Homo sapiens
cagactttgaagcta

SEQ ID NO: 894542 - DNA, 15 bp, Homo sapiens
agactttgaagctag

SEQ ID NO: 894543 - DNA, 15 bp, Homo sapiens
gactttgaagctaga

SEQ ID NO: 894544 - DNA, 15 bp, Homo sapiens
actttgaagctagac

SEQ ID NO: 894545 - DNA, 15 bp, Homo sapiens
ctttgaagctagact

SEQ ID NO: 894546 - DNA, 15 bp, Homo sapiens
tttgaagctagactg

SEQ ID NO: 894547 - DNA, 15 bp, Homo sapiens
ttgaagctagactgc

SEQ ID NO: 894548 - DNA, 15 bp, Homo sapiens
tgaagctagactgcc

SEQ ID NO: 894549 - DNA, 15 bp, Homo sapiens
gaagctagactgcct

SEQ ID NO: 894550 - DNA, 15 bp, Homo sapiens
aagctagactgcctg

SEQ ID NO: 894551 - DNA, 15 bp, Homo sapiens
agctagactgcctgt

SEQ ID NO: 894552 - DNA, 15 bp, Homo sapiens
gctagactgcctgtg

SEQ ID NO: 894553 - DNA, 15 bp, Homo sapiens
ctagactgcctgtgg

SEQ ID NO: 894554 - DNA, 15 bp, Homo sapiens
tagactgcctgtggc

SEQ ID NO: 894555 - DNA, 15 bp, Homo sapiens
agactgcctgtggct

SEQ ID NO: 894556 - DNA, 15 bp, Homo sapiens
gactgcctgtggctg

SEQ ID NO: 894557 - DNA, 15 bp, Homo sapiens
actgcctgtggctgt

SEQ ID NO: 894558 - DNA, 15 bp, Homo sapiens
ctgcctgtggctgtg

SEQ ID NO: 894559 - DNA, 15 bp, Homo sapiens
tgcctgtggctgtga

SEQ ID NO: 894560 - DNA, 15 bp, Homo sapiens
gcctgtggctgtgac

SEQ ID NO: 894561 - DNA, 15 bp, Homo sapiens
cctgtggctgtgacc

SEQ ID NO: 894562 - DNA, 15 bp, Homo sapiens
ctgtggctgtgacct

SEQ ID NO: 894563 - DNA, 15 bp, Homo sapiens
tgtggctgtgacctt

SEQ ID NO: 894564 - DNA, 15 bp, Homo sapiens
gtggctgtgaccttg

SEQ ID NO: 894565 - DNA, 15 bp, Homo sapiens
tggctgtgaccttga

SEQ ID NO: 894566 - DNA, 15 bp, Homo sapiens
ggctgtgaccttgaa

SEQ ID NO: 894567 - DNA, 15 bp, Homo sapiens
gctgtgaccttgaat

SEQ ID NO: 894568 - DNA, 15 bp, Homo sapiens
ctgtgaccttgaata

SEQ ID NO: 894569 - DNA, 15 bp, Homo sapiens
tgtgaccttgaataa

SEQ ID NO: 894570 - DNA, 15 bp, Homo sapiens
gtgaccttgaataaa

SEQ ID NO: 894571 - DNA, 15 bp, Homo sapiens
tgaccttgaataaaa

SEQ ID NO: 894572 - DNA, 15 bp, Homo sapiens
gaccttgaataaaac

SEQ ID NO: 894573 - DNA, 15 bp, Homo sapiens
accttgaataaaacc

SEQ ID NO: 894574 - DNA, 15 bp, Homo sapiens
ccttgaataaaacct

SEQ ID NO: 894575 - DNA, 15 bp, Homo sapiens
cttgaataaaacctt

SEQ ID NO: 894576 - DNA, 15 bp, Homo sapiens
ttgaataaaaccttt

SEQ ID NO: 894577 - DNA, 15 bp, Homo sapiens
tgaataaaaccttta

SEQ ID NO: 894578 - DNA, 15 bp, Homo sapiens
gaataaaacctttaa

SEQ ID NO: 894579 - DNA, 15 bp, Homo sapiens
aataaaacctttaac

SEQ ID NO: 894580 - DNA, 15 bp, Homo sapiens
ataaaacctttaacc

SEQ ID NO: 894581 - DNA, 15 bp, Homo sapiens
taaaacctttaacct

SEQ ID NO: 894582 - DNA, 15 bp, Homo sapiens
aaaacctttaaccta

SEQ ID NO: 894583 - DNA, 15 bp, Homo sapiens
aaacctttaacctat

SEQ ID NO: 894584 - DNA, 15 bp, Homo sapiens
aacctttaacctatc

SEQ ID NO: 894585 - DNA, 15 bp, Homo sapiens
acctttaacctatct

SEQ ID NO: 894586 - DNA, 15 bp, Homo sapiens
cctttaacctatctc

SEQ ID NO: 894587 - DNA, 15 bp, Homo sapiens
ctttaacctatctct

SEQ ID NO: 894588 - DNA, 15 bp, Homo sapiens
tttaacctatctctg

SEQ ID NO: 894589 - DNA, 15 bp, Homo sapiens
ttaacctatctctgt

SEQ ID NO: 894590 - DNA, 15 bp, Homo sapiens
taacctatctctgtc

SEQ ID NO: 894591 - DNA, 15 bp, Homo sapiens
aacctatctctgtct

SEQ ID NO: 894592 - DNA, 15 bp, Homo sapiens
acctatctctgtctc

SEQ ID NO: 894593 - DNA, 15 bp, Homo sapiens
cctatctctgtctca

SEQ ID NO: 894594 - DNA, 15 bp, Homo sapiens
ctatctctgtctcag

SEQ ID NO: 894595 - DNA, 15 bp, Homo sapiens
tatctctgtctcagc

SEQ ID NO: 894596 - DNA, 15 bp, Homo sapiens
atctctgtctcagct

SEQ ID NO: 894597 - DNA, 15 bp, Homo sapiens
tctctgtctcagctt

SEQ ID NO: 894598 - DNA, 15 bp, Homo sapiens
ctctgtctcagcttt

SEQ ID NO: 894599 - DNA, 15 bp, Homo sapiens
tctgtctcagctttc

SEQ ID NO: 894600 - DNA, 15 bp, Homo sapiens
ctgtctcagctttcc

SEQ ID NO: 894601 - DNA, 15 bp, Homo sapiens
tgtctcagctttccc

SEQ ID NO: 894602 - DNA, 15 bp, Homo sapiens
gtctcagctttccca

SEQ ID NO: 894603 - DNA, 15 bp, Homo sapiens
tctcagctttcccat

SEQ ID NO: 894604 - DNA, 15 bp, Homo sapiens
ctcagctttcccatc

SEQ ID NO: 894605 - DNA, 15 bp, Homo sapiens
tcagctttcccatcg

SEQ ID NO: 894606 - DNA, 15 bp, Homo sapiens
cagctttcccatcgg

SEQ ID NO: 894607 - DNA, 15 bp, Homo sapiens
agctttcccatcggt

SEQ ID NO: 894608 - DNA, 15 bp, Homo sapiens
gctttcccatcggta

SEQ ID NO: 894609 - DNA, 15 bp, Homo sapiens
ctttcccatcggtaa

SEQ ID NO: 894610 - DNA, 15 bp, Homo sapiens
tttcccatcggtaaa

SEQ ID NO: 894611 - DNA, 15 bp, Homo sapiens
ttcccatcggtaaag

SEQ ID NO: 894612 - DNA, 15 bp, Homo sapiens
tcccatcggtaaagt

SEQ ID NO: 894613 - DNA, 15 bp, Homo sapiens
cccatcggtaaagtg

SEQ ID NO: 894614 - DNA, 15 bp, Homo sapiens
ccatcggtaaagtgg

SEQ ID NO: 894615 - DNA, 15 bp, Homo sapiens
catcggtaaagtggg

SEQ ID NO: 894616 - DNA, 15 bp, Homo sapiens
atcggtaaagtgggc

SEQ ID NO: 894617 - DNA, 15 bp, Homo sapiens
tcggtaaagtgggca

SEQ ID NO: 894618 - DNA, 15 bp, Homo sapiens
cggtaaagtgggcat

SEQ ID NO: 894619 - DNA, 15 bp, Homo sapiens
ggtaaagtgggcata

SEQ ID NO: 894620 - DNA, 15 bp, Homo sapiens
gtaaagtgggcataa

SEQ ID NO: 894621 - DNA, 15 bp, Homo sapiens
taaagtgggcataat

SEQ ID NO: 894622 - DNA, 15 bp, Homo sapiens
aaagtgggcataata

SEQ ID NO: 894623 - DNA, 15 bp, Homo sapiens
aagtgggcataataa

SEQ ID NO: 894624 - DNA, 15 bp, Homo sapiens
agtgggcataataaa

SEQ ID NO: 894625 - DNA, 15 bp, Homo sapiens
gtgggcataataaaa

SEQ ID NO: 894626 - DNA, 15 bp, Homo sapiens
tgggcataataaaag

SEQ ID NO: 894627 - DNA, 15 bp, Homo sapiens
gggcataataaaagt

SEQ ID NO: 894628 - DNA, 15 bp, Homo sapiens
ggcataataaaagtg

SEQ ID NO: 894629 - DNA, 15 bp, Homo sapiens
gcataataaaagtgt

SEQ ID NO: 894630 - DNA, 15 bp, Homo sapiens
cataataaaagtgtc

SEQ ID NO: 894631 - DNA, 15 bp, Homo sapiens
ataataaaagtgtct

SEQ ID NO: 894632 - DNA, 15 bp, Homo sapiens
taataaaagtgtcta

SEQ ID NO: 894633 - DNA, 15 bp, Homo sapiens
aataaaagtgtctac

SEQ ID NO: 894634 - DNA, 15 bp, Homo sapiens
ataaaagtgtctact

SEQ ID NO: 894635 - DNA, 15 bp, Homo sapiens
taaaagtgtctactt

SEQ ID NO: 894636 - DNA, 15 bp, Homo sapiens
aaaagtgtctacttc

SEQ ID NO: 894637 - DNA, 15 bp, Homo sapiens
aaagtgtctacttca

SEQ ID NO: 894638 - DNA, 15 bp, Homo sapiens
aagtgtctacttcat

SEQ ID NO: 894639 - DNA, 15 bp, Homo sapiens
agtgtctacttcata

SEQ ID NO: 894640 - DNA, 15 bp, Homo sapiens
gtgtctacttcatag

SEQ ID NO: 894641 - DNA, 15 bp, Homo sapiens
tgtctacttcatagg

SEQ ID NO: 894642 - DNA, 15 bp, Homo sapiens
gtctacttcataggg

SEQ ID NO: 894643 - DNA, 15 bp, Homo sapiens
tctacttcatagggc

SEQ ID NO: 894644 - DNA, 15 bp, Homo sapiens
ctacttcatagggct

SEQ ID NO: 894645 - DNA, 15 bp, Homo sapiens
tacttcatagggcta

SEQ ID NO: 894646 - DNA, 15 bp, Homo sapiens
acttcatagggctat

SEQ ID NO: 894647 - DNA, 15 bp, Homo sapiens
cttcatagggctatt

SEQ ID NO: 894648 - DNA, 15 bp, Homo sapiens
ttcatagggctattg

SEQ ID NO: 894649 - DNA, 15 bp, Homo sapiens
tcatagggctattgt

SEQ ID NO: 894650 - DNA, 15 bp, Homo sapiens
catagggctattgtg

SEQ ID NO: 894651 - DNA, 15 bp, Homo sapiens
atagggctattgtgg

SEQ ID NO: 894652 - DNA, 15 bp, Homo sapiens
tagggctattgtggg

SEQ ID NO: 894653 - DNA, 15 bp, Homo sapiens
agggctattgtgggg

SEQ ID NO: 894654 - DNA, 15 bp, Homo sapiens
gggctattgtgggga

SEQ ID NO: 894655 - DNA, 15 bp, Homo sapiens
ggctattgtggggat

SEQ ID NO: 894656 - DNA, 15 bp, Homo sapiens
gctattgtggggatt

SEQ ID NO: 894657 - DNA, 15 bp, Homo sapiens
ctattgtggggatta

SEQ ID NO: 894658 - DNA, 15 bp, Homo sapiens
tattgtggggattag

SEQ ID NO: 894659 - DNA, 15 bp, Homo sapiens
attgtggggattagt

SEQ ID NO: 894660 - DNA, 15 bp, Homo sapiens
ttgtggggattagta

SEQ ID NO: 894661 - DNA, 15 bp, Homo sapiens
tgtggggattagtag

SEQ ID NO: 894662 - DNA, 15 bp, Homo sapiens
gtggggattagtagc

SEQ ID NO: 894663 - DNA, 15 bp, Homo sapiens
tggggattagtagca

SEQ ID NO: 894664 - DNA, 15 bp, Homo sapiens
ggggattagtagcat

SEQ ID NO: 894665 - DNA, 15 bp, Homo sapiens
gggattagtagcata

SEQ ID NO: 894666 - DNA, 15 bp, Homo sapiens
ggattagtagcatat

SEQ ID NO: 894667 - DNA, 15 bp, Homo sapiens
gattagtagcatatc

SEQ ID NO: 894668 - DNA, 15 bp, Homo sapiens
attagtagcatatct

SEQ ID NO: 894669 - DNA, 15 bp, Homo sapiens
ttagtagcatatcta

SEQ ID NO: 894670 - DNA, 15 bp, Homo sapiens
tagtagcatatctaa

SEQ ID NO: 894671 - DNA, 15 bp, Homo sapiens
agtagcatatctaaa

SEQ ID NO: 894672 - DNA, 15 bp, Homo sapiens
gtagcatatctaaag

SEQ ID NO: 894673 - DNA, 15 bp, Homo sapiens
tagcatatctaaagt

SEQ ID NO: 894674 - DNA, 15 bp, Homo sapiens
agcatatctaaagta

SEQ ID NO: 894675 - DNA, 15 bp, Homo sapiens
gcatatctaaagtag

SEQ ID NO: 894676 - DNA, 15 bp, Homo sapiens
catatctaaagtagc

SEQ ID NO: 894677 - DNA, 15 bp, Homo sapiens
atatctaaagtagct

SEQ ID NO: 894678 - DNA, 15 bp, Homo sapiens
tatctaaagtagctt

SEQ ID NO: 894679 - DNA, 15 bp, Homo sapiens
atctaaagtagctta

SEQ ID NO: 894680 - DNA, 15 bp, Homo sapiens
tctaaagtagcttaa

SEQ ID NO: 894681 - DNA, 15 bp, Homo sapiens
ctaaagtagcttaaa

SEQ ID NO: 894682 - DNA, 15 bp, Homo sapiens
taaagtagcttaaaa

SEQ ID NO: 894683 - DNA, 15 bp, Homo sapiens
aaagtagcttaaaac

SEQ ID NO: 894684 - DNA, 15 bp, Homo sapiens
aagtagcttaaaaca

SEQ ID NO: 894685 - DNA, 15 bp, Homo sapiens
agtagcttaaaacag

SEQ ID NO: 894686 - DNA, 15 bp, Homo sapiens
gtagcttaaaacagt

SEQ ID NO: 894687 - DNA, 15 bp, Homo sapiens
tagcttaaaacagtg

SEQ ID NO: 894688 - DNA, 15 bp, Homo sapiens
agcttaaaacagtgt

SEQ ID NO: 894689 - DNA, 15 bp, Homo sapiens
gcttaaaacagtgtc

SEQ ID NO: 894690 - DNA, 15 bp, Homo sapiens
cttaaaacagtgtct

SEQ ID NO: 894691 - DNA, 15 bp, Homo sapiens
ttaaaacagtgtctt

SEQ ID NO: 894692 - DNA, 15 bp, Homo sapiens
taaaacagtgtctta

SEQ ID NO: 894693 - DNA, 15 bp, Homo sapiens
aaaacagtgtcttac

SEQ ID NO: 894694 - DNA, 15 bp, Homo sapiens
aaacagtgtcttaca

SEQ ID NO: 894695 - DNA, 15 bp, Homo sapiens
aacagtgtcttacat

SEQ ID NO: 894696 - DNA, 15 bp, Homo sapiens
acagtgtcttacata

SEQ ID NO: 894697 - DNA, 15 bp, Homo sapiens
cagtgtcttacatac

SEQ ID NO: 894698 - DNA, 15 bp, Homo sapiens
agtgtcttacataca

SEQ ID NO: 894699 - DNA, 15 bp, Homo sapiens
gtgtcttacatacag

SEQ ID NO: 894700 - DNA, 15 bp, Homo sapiens
tgtcttacatacagt

SEQ ID NO: 894701 - DNA, 15 bp, Homo sapiens
gtcttacatacagta

SEQ ID NO: 894702 - DNA, 15 bp, Homo sapiens
tcttacatacagtag

SEQ ID NO: 894703 - DNA, 15 bp, Homo sapiens
cttacatacagtagg

SEQ ID NO: 894704 - DNA, 15 bp, Homo sapiens
ttacatacagtaggt

SEQ ID NO: 894705 - DNA, 15 bp, Homo sapiens
tacatacagtaggtc

SEQ ID NO: 894706 - DNA, 15 bp, Homo sapiens
acatacagtaggtca

SEQ ID NO: 894707 - DNA, 15 bp, Homo sapiens
catacagtaggtcaa

SEQ ID NO: 894708 - DNA, 15 bp, Homo sapiens
atacagtaggtcaaa

SEQ ID NO: 894709 - DNA, 15 bp, Homo sapiens
tacagtaggtcaaat

SEQ ID NO: 894710 - DNA, 15 bp, Homo sapiens
acagtaggtcaaata

SEQ ID NO: 894711 - DNA, 15 bp, Homo sapiens
cagtaggtcaaatat

SEQ ID NO: 894712 - DNA, 15 bp, Homo sapiens
agtaggtcaaatata

SEQ ID NO: 894713 - DNA, 15 bp, Homo sapiens
gtaggtcaaatatag

SEQ ID NO: 894714 - DNA, 15 bp, Homo sapiens
taggtcaaatatagt

SEQ ID NO: 894715 - DNA, 15 bp, Homo sapiens
aggtcaaatatagtg

SEQ ID NO: 894716 - DNA, 15 bp, Homo sapiens
ggtcaaatatagtgt

SEQ ID NO: 894717 - DNA, 15 bp, Homo sapiens
gtcaaatatagtgtt

SEQ ID NO: 894718 - DNA, 15 bp, Homo sapiens
tcaaatatagtgtta

SEQ ID NO: 894719 - DNA, 15 bp, Homo sapiens
caaatatagtgttag

SEQ ID NO: 894720 - DNA, 15 bp, Homo sapiens
aaatatagtgttagc

SEQ ID NO: 894721 - DNA, 15 bp, Homo sapiens
aatatagtgttagct

SEQ ID NO: 894722 - DNA, 15 bp, Homo sapiens
atatagtgttagcta

SEQ ID NO: 894723 - DNA, 15 bp, Homo sapiens
tatagtgttagctat

SEQ ID NO: 894724 - DNA, 15 bp, Homo sapiens
atagtgttagctatt

SEQ ID NO: 894725 - DNA, 15 bp, Homo sapiens
tagtgttagctatta

SEQ ID NO: 894726 - DNA, 15 bp, Homo sapiens
agtgttagctattat

SEQ ID NO: 894727 - DNA, 15 bp, Homo sapiens
gtgttagctattatt

SEQ ID NO: 894728 - DNA, 15 bp, Homo sapiens
tgttagctattatta

SEQ ID NO: 894729 - DNA, 15 bp, Homo sapiens
gttagctattattac

SEQ ID NO: 894730 - DNA, 15 bp, Homo sapiens
ttagctattattacc

SEQ ID NO: 894731 - DNA, 15 bp, Homo sapiens
tagctattattacca

SEQ ID NO: 894732 - DNA, 15 bp, Homo sapiens
agctattattaccat

SEQ ID NO: 894733 - DNA, 15 bp, Homo sapiens
gctattattaccatt

SEQ ID NO: 894734 - DNA, 15 bp, Homo sapiens
ctattattaccatta

SEQ ID NO: 894735 - DNA, 15 bp, Homo sapiens
tattattaccattat

SEQ ID NO: 894736 - DNA, 15 bp, Homo sapiens
attattaccattatc

SEQ ID NO: 894737 - DNA, 15 bp, Homo sapiens
ttattaccattatca

SEQ ID NO: 894738 - DNA, 15 bp, Homo sapiens
tattaccattatcac

SEQ ID NO: 894739 - DNA, 15 bp, Homo sapiens
attaccattatcact

SEQ ID NO: 894740 - DNA, 15 bp, Homo sapiens
ttaccattatcactg

SEQ ID NO: 894741 - DNA, 15 bp, Homo sapiens
taccattatcactgt

SEQ ID NO: 894742 - DNA, 15 bp, Homo sapiens
accattatcactgtc

SEQ ID NO: 894743 - DNA, 15 bp, Homo sapiens
ccattatcactgtca

SEQ ID NO: 894744 - DNA, 15 bp, Homo sapiens
cattatcactgtcac

SEQ ID NO: 894745 - DNA, 15 bp, Homo sapiens
attatcactgtcact

SEQ ID NO: 894746 - DNA, 15 bp, Homo sapiens
ttatcactgtcacta

SEQ ID NO: 894747 - DNA, 15 bp, Homo sapiens
tatcactgtcactat

SEQ ID NO: 894748 - DNA, 15 bp, Homo sapiens
atcactgtcactatc

SEQ ID NO: 894749 - DNA, 15 bp, Homo sapiens
tcactgtcactatcc

SEQ ID NO: 894750 - DNA, 15 bp, Homo sapiens
cactgtcactatcct

SEQ ID NO: 894751 - DNA, 15 bp, Homo sapiens
actgtcactatcctt

SEQ ID NO: 894752 - DNA, 15 bp, Homo sapiens
ctgtcactatcctta

SEQ ID NO: 894753 - DNA, 15 bp, Homo sapiens
tgtcactatccttat

SEQ ID NO: 894754 - DNA, 15 bp, Homo sapiens
gtcactatccttatc

SEQ ID NO: 894755 - DNA, 15 bp, Homo sapiens
tcactatccttatcc

SEQ ID NO: 894756 - DNA, 15 bp, Homo sapiens
cactatccttatcct

SEQ ID NO: 894757 - DNA, 15 bp, Homo sapiens
actatccttatcctc

SEQ ID NO: 894758 - DNA, 15 bp, Homo sapiens
ctatccttatcctcc

SEQ ID NO: 894759 - DNA, 15 bp, Homo sapiens
tatccttatcctcca

SEQ ID NO: 894760 - DNA, 15 bp, Homo sapiens
atccttatcctccaa

SEQ ID NO: 894761 - DNA, 15 bp, Homo sapiens
tccttatcctccaaa

SEQ ID NO: 894762 - DNA, 15 bp, Homo sapiens
ccttatcctccaaag

SEQ ID NO: 894763 - DNA, 15 bp, Homo sapiens
cttatcctccaaagt

SEQ ID NO: 894764 - DNA, 15 bp, Homo sapiens
ttatcctccaaagtt

SEQ ID NO: 894765 - DNA, 15 bp, Homo sapiens
tatcctccaaagttt

SEQ ID NO: 894766 - DNA, 15 bp, Homo sapiens
atcctccaaagtttg

SEQ ID NO: 894767 - DNA, 15 bp, Homo sapiens
tcctccaaagtttgc

SEQ ID NO: 894768 - DNA, 15 bp, Homo sapiens
cctccaaagtttgca

SEQ ID NO: 894769 - DNA, 15 bp, Homo sapiens
ctccaaagtttgcaa

SEQ ID NO: 894770 - DNA, 15 bp, Homo sapiens
tccaaagtttgcaac

SEQ ID NO: 894771 - DNA, 15 bp, Homo sapiens
ccaaagtttgcaaca

SEQ ID NO: 894772 - DNA, 15 bp, Homo sapiens
caaagtttgcaacaa

SEQ ID NO: 894773 - DNA, 15 bp, Homo sapiens
aaagtttgcaacaaa

SEQ ID NO: 894774 - DNA, 15 bp, Homo sapiens
aagtttgcaacaaac

SEQ ID NO: 894775 - DNA, 15 bp, Homo sapiens
agtttgcaacaaact

SEQ ID NO: 894776 - DNA, 15 bp, Homo sapiens
gtttgcaacaaactg

SEQ ID NO: 894777 - DNA, 15 bp, Homo sapiens
tttgcaacaaactga

SEQ ID NO: 894778 - DNA, 15 bp, Homo sapiens
ttgcaacaaactgag

SEQ ID NO: 894779 - DNA, 15 bp, Homo sapiens
tgcaacaaactgaga

SEQ ID NO: 894780 - DNA, 15 bp, Homo sapiens
gcaacaaactgagag

SEQ ID NO: 894781 - DNA, 15 bp, Homo sapiens
caacaaactgagaga

SEQ ID NO: 894782 - DNA, 15 bp, Homo sapiens
aacaaactgagagac

SEQ ID NO: 894783 - DNA, 15 bp, Homo sapiens
acaaactgagagaca

SEQ ID NO: 894784 - DNA, 15 bp, Homo sapiens
caaactgagagacag

SEQ ID NO: 894785 - DNA, 15 bp, Homo sapiens
aaactgagagacaga

SEQ ID NO: 894786 - DNA, 15 bp, Homo sapiens
aactgagagacagat

SEQ ID NO: 894787 - DNA, 15 bp, Homo sapiens
actgagagacagata

SEQ ID NO: 894788 - DNA, 15 bp, Homo sapiens
ctgagagacagatac

SEQ ID NO: 894789 - DNA, 15 bp, Homo sapiens
tgagagacagataca

SEQ ID NO: 894790 - DNA, 15 bp, Homo sapiens
gagagacagatacag

SEQ ID NO: 894791 - DNA, 15 bp, Homo sapiens
agagacagatacagg

SEQ ID NO: 894792 - DNA, 15 bp, Homo sapiens
gagacagatacagga

SEQ ID NO: 894793 - DNA, 15 bp, Homo sapiens
agacagatacaggaa

SEQ ID NO: 894794 - DNA, 15 bp, Homo sapiens
gacagatacaggaac

SEQ ID NO: 894795 - DNA, 15 bp, Homo sapiens
acagatacaggaacc

SEQ ID NO: 894796 - DNA, 15 bp, Homo sapiens
cagatacaggaacca

SEQ ID NO: 894797 - DNA, 15 bp, Homo sapiens
agatacaggaaccat

SEQ ID NO: 894798 - DNA, 15 bp, Homo sapiens
gatacaggaaccata

SEQ ID NO: 894799 - DNA, 15 bp, Homo sapiens
atacaggaaccatag

SEQ ID NO: 894800 - DNA, 15 bp, Homo sapiens
tacaggaaccataga

SEQ ID NO: 894801 - DNA, 15 bp, Homo sapiens
acaggaaccatagag

SEQ ID NO: 894802 - DNA, 15 bp, Homo sapiens
caggaaccatagaga

SEQ ID NO: 894803 - DNA, 15 bp, Homo sapiens
aggaaccatagagat

SEQ ID NO: 894804 - DNA, 15 bp, Homo sapiens
ggaaccatagagatg

SEQ ID NO: 894805 - DNA, 15 bp, Homo sapiens
gaaccatagagatgg

SEQ ID NO: 894806 - DNA, 15 bp, Homo sapiens
aaccatagagatggt

SEQ ID NO: 894807 - DNA, 15 bp, Homo sapiens
accatagagatggtg

SEQ ID NO: 894808 - DNA, 15 bp, Homo sapiens
ccatagagatggtga

SEQ ID NO: 894809 - DNA, 15 bp, Homo sapiens
catagagatggtgat

SEQ ID NO: 894810 - DNA, 15 bp, Homo sapiens
atagagatggtgatc

SEQ ID NO: 894811 - DNA, 15 bp, Homo sapiens
tagagatggtgatca

SEQ ID NO: 894812 - DNA, 15 bp, Homo sapiens
agagatggtgatcag

SEQ ID NO: 894813 - DNA, 15 bp, Homo sapiens
gagatggtgatcaga

SEQ ID NO: 894814 - DNA, 15 bp, Homo sapiens
agatggtgatcagag

SEQ ID NO: 894815 - DNA, 15 bp, Homo sapiens
gatggtgatcagagg

SEQ ID NO: 894816 - DNA, 15 bp, Homo sapiens
atggtgatcagaggt

SEQ ID NO: 894817 - DNA, 15 bp, Homo sapiens
tggtgatcagaggtc

SEQ ID NO: 894818 - DNA, 15 bp, Homo sapiens
ggtgatcagaggtca

SEQ ID NO: 894819 - DNA, 15 bp, Homo sapiens
gtgatcagaggtcag

SEQ ID NO: 894820 - DNA, 15 bp, Homo sapiens
tgatcagaggtcagc

SEQ ID NO: 894821 - DNA, 15 bp, Homo sapiens
gatcagaggtcagct

SEQ ID NO: 894822 - DNA, 15 bp, Homo sapiens
atcagaggtcagctt

SEQ ID NO: 894823 - DNA, 15 bp, Homo sapiens
tcagaggtcagcttt

SEQ ID NO: 894824 - DNA, 15 bp, Homo sapiens
cagaggtcagcttta

SEQ ID NO: 894825 - DNA, 15 bp, Homo sapiens
agaggtcagctttaa

SEQ ID NO: 894826 - DNA, 15 bp, Homo sapiens
gaggtcagctttaaa

SEQ ID NO: 894827 - DNA, 15 bp, Homo sapiens
aggtcagctttaaaa

SEQ ID NO: 894828 - DNA, 15 bp, Homo sapiens
ggtcagctttaaaat

SEQ ID NO: 894829 - DNA, 15 bp, Homo sapiens
gtcagctttaaaatt

SEQ ID NO: 894830 - DNA, 15 bp, Homo sapiens
tcagctttaaaattg

SEQ ID NO: 894831 - DNA, 15 bp, Homo sapiens
cagctttaaaattga

SEQ ID NO: 894832 - DNA, 15 bp, Homo sapiens
agctttaaaattgag

SEQ ID NO: 894833 - DNA, 15 bp, Homo sapiens
gctttaaaattgagc

SEQ ID NO: 894834 - DNA, 15 bp, Homo sapiens
ctttaaaattgagcg

SEQ ID NO: 894835 - DNA, 15 bp, Homo sapiens
tttaaaattgagcga

SEQ ID NO: 894836 - DNA, 15 bp, Homo sapiens
ttaaaattgagcgat

SEQ ID NO: 894837 - DNA, 15 bp, Homo sapiens
taaaattgagcgatt

SEQ ID NO: 894838 - DNA, 15 bp, Homo sapiens
aaaattgagcgattt

SEQ ID NO: 894839 - DNA, 15 bp, Homo sapiens
aaattgagcgattta

SEQ ID NO: 894840 - DNA, 15 bp, Homo sapiens
aattgagcgatttag

SEQ ID NO: 894841 - DNA, 15 bp, Homo sapiens
attgagcgatttaga

SEQ ID NO: 894842 - DNA, 15 bp, Homo sapiens
ttgagcgatttagag

SEQ ID NO: 894843 - DNA, 15 bp, Homo sapiens
tgagcgatttagaga

SEQ ID NO: 894844 - DNA, 15 bp, Homo sapiens
gagcgatttagagaa

SEQ ID NO: 894845 - DNA, 15 bp, Homo sapiens
agcgatttagagaat

SEQ ID NO: 894846 - DNA, 15 bp, Homo sapiens
gcgatttagagaatg

SEQ ID NO: 894847 - DNA, 15 bp, Homo sapiens
cgatttagagaatgt

SEQ ID NO: 894848 - DNA, 15 bp, Homo sapiens
gatttagagaatgtg

SEQ ID NO: 894849 - DNA, 15 bp, Homo sapiens
atttagagaatgtga

SEQ ID NO: 894850 - DNA, 15 bp, Homo sapiens
tttagagaatgtgat

SEQ ID NO: 894851 - DNA, 15 bp, Homo sapiens
ttagagaatgtgata

SEQ ID NO: 894852 - DNA, 15 bp, Homo sapiens
tagagaatgtgatat

SEQ ID NO: 894853 - DNA, 15 bp, Homo sapiens
agagaatgtgatata

SEQ ID NO: 894854 - DNA, 15 bp, Homo sapiens
gagaatgtgatatag

SEQ ID NO: 894855 - DNA, 15 bp, Homo sapiens
agaatgtgatataga

SEQ ID NO: 894856 - DNA, 15 bp, Homo sapiens
gaatgtgatatagat

SEQ ID NO: 894857 - DNA, 15 bp, Homo sapiens
aatgtgatatagata

SEQ ID NO: 894858 - DNA, 15 bp, Homo sapiens
atgtgatatagatat

SEQ ID NO: 894859 - DNA, 15 bp, Homo sapiens
tgtgatatagatatg

SEQ ID NO: 894860 - DNA, 15 bp, Homo sapiens
gtgatatagatatgc

SEQ ID NO: 894861 - DNA, 15 bp, Homo sapiens
tgatatagatatgca

SEQ ID NO: 894862 - DNA, 15 bp, Homo sapiens
gatatagatatgcac

SEQ ID NO: 894863 - DNA, 15 bp, Homo sapiens
atatagatatgcaca

SEQ ID NO: 894864 - DNA, 15 bp, Homo sapiens
tatagatatgcacac

SEQ ID NO: 894865 - DNA, 15 bp, Homo sapiens
atagatatgcacaca

SEQ ID NO: 894866 - DNA, 15 bp, Homo sapiens
tagatatgcacacaa

SEQ ID NO: 894867 - DNA, 15 bp, Homo sapiens
agatatgcacacaaa

SEQ ID NO: 894868 - DNA, 15 bp, Homo sapiens
gatatgcacacaaat

SEQ ID NO: 894869 - DNA, 15 bp, Homo sapiens
atatgcacacaaatg

SEQ ID NO: 894870 - DNA, 15 bp, Homo sapiens
tatgcacacaaatgg

SEQ ID NO: 894871 - DNA, 15 bp, Homo sapiens
atgcacacaaatgga

SEQ ID NO: 894872 - DNA, 15 bp, Homo sapiens
tgcacacaaatggac

SEQ ID NO: 894873 - DNA, 15 bp, Homo sapiens
gcacacaaatggact

SEQ ID NO: 894874 - DNA, 15 bp, Homo sapiens
cacacaaatggactt

SEQ ID NO: 894875 - DNA, 15 bp, Homo sapiens
acacaaatggacttg

SEQ ID NO: 894876 - DNA, 15 bp, Homo sapiens
cacaaatggacttgc

SEQ ID NO: 894877 - DNA, 15 bp, Homo sapiens
acaaatggacttgct

SEQ ID NO: 894878 - DNA, 15 bp, Homo sapiens
caaatggacttgcta

SEQ ID NO: 894879 - DNA, 15 bp, Homo sapiens
aaatggacttgctaa

SEQ ID NO: 894880 - DNA, 15 bp, Homo sapiens
aatggacttgctaat

SEQ ID NO: 894881 - DNA, 15 bp, Homo sapiens
atggacttgctaata

SEQ ID NO: 894882 - DNA, 15 bp, Homo sapiens
tggacttgctaatat

SEQ ID NO: 894883 - DNA, 15 bp, Homo sapiens
ggacttgctaatatt

SEQ ID NO: 894884 - DNA, 15 bp, Homo sapiens
gacttgctaatattt

SEQ ID NO: 894885 - DNA, 15 bp, Homo sapiens
acttgctaatatttt

SEQ ID NO: 894886 - DNA, 15 bp, Homo sapiens
cttgctaatatttta

SEQ ID NO: 894887 - DNA, 15 bp, Homo sapiens
ttgctaatattttac

SEQ ID NO: 894888 - DNA, 15 bp, Homo sapiens
tgctaatattttacc

SEQ ID NO: 894889 - DNA, 15 bp, Homo sapiens
gctaatattttaccc

SEQ ID NO: 894890 - DNA, 15 bp, Homo sapiens
ctaatattttacccc

SEQ ID NO: 894891 - DNA, 15 bp, Homo sapiens
taatattttacccct

SEQ ID NO: 894892 - DNA, 15 bp, Homo sapiens
aatattttacccctt

SEQ ID NO: 894893 - DNA, 15 bp, Homo sapiens
atattttacccctta

SEQ ID NO: 894894 - DNA, 15 bp, Homo sapiens
tattttaccccttaa

SEQ ID NO: 894895 - DNA, 15 bp, Homo sapiens
attttaccccttaat

SEQ ID NO: 894896 - DNA, 15 bp, Homo sapiens
ttttaccccttaatt

SEQ ID NO: 894897 - DNA, 15 bp, Homo sapiens
tttaccccttaatta

SEQ ID NO: 894898 - DNA, 15 bp, Homo sapiens
ttaccccttaattag

SEQ ID NO: 894899 - DNA, 15 bp, Homo sapiens
taccccttaattagg

SEQ ID NO: 894900 - DNA, 15 bp, Homo sapiens
accccttaattaggt

SEQ ID NO: 894901 - DNA, 15 bp, Homo sapiens
ccccttaattaggta

SEQ ID NO: 894902 - DNA, 15 bp, Homo sapiens
cccttaattaggtaa

SEQ ID NO: 894903 - DNA, 15 bp, Homo sapiens
ccttaattaggtaaa

SEQ ID NO: 894904 - DNA, 15 bp, Homo sapiens
cttaattaggtaaac

SEQ ID NO: 894905 - DNA, 15 bp, Homo sapiens
ttaattaggtaaact

SEQ ID NO: 894906 - DNA, 15 bp, Homo sapiens
taattaggtaaactt

SEQ ID NO: 894907 - DNA, 15 bp, Homo sapiens
aattaggtaaactta

SEQ ID NO: 894908 - DNA, 15 bp, Homo sapiens
attaggtaaacttac

SEQ ID NO: 894909 - DNA, 15 bp, Homo sapiens
ttaggtaaacttacc

SEQ ID NO: 894910 - DNA, 15 bp, Homo sapiens
taggtaaacttacct

SEQ ID NO: 894911 - DNA, 15 bp, Homo sapiens
aggtaaacttacctg

SEQ ID NO: 894912 - DNA, 15 bp, Homo sapiens
ggtaaacttacctgc

SEQ ID NO: 894913 - DNA, 15 bp, Homo sapiens
gtaaacttacctgcc

SEQ ID NO: 894914 - DNA, 15 bp, Homo sapiens
taaacttacctgcca

SEQ ID NO: 894915 - DNA, 15 bp, Homo sapiens
aaacttacctgccaa

SEQ ID NO: 894916 - DNA, 15 bp, Homo sapiens
aacttacctgccaat

SEQ ID NO: 894917 - DNA, 15 bp, Homo sapiens
acttacctgccaatt

SEQ ID NO: 894918 - DNA, 15 bp, Homo sapiens
cttacctgccaattc

SEQ ID NO: 894919 - DNA, 15 bp, Homo sapiens
ttacctgccaattca

SEQ ID NO: 894920 - DNA, 15 bp, Homo sapiens
tacctgccaattcat

SEQ ID NO: 894921 - DNA, 15 bp, Homo sapiens
acctgccaattcata

SEQ ID NO: 894922 - DNA, 15 bp, Homo sapiens
cctgccaattcatag

SEQ ID NO: 894923 - DNA, 15 bp, Homo sapiens
ctgccaattcataga

SEQ ID NO: 894924 - DNA, 15 bp, Homo sapiens
tgccaattcatagag

SEQ ID NO: 894925 - DNA, 15 bp, Homo sapiens
gccaattcatagagc

SEQ ID NO: 894926 - DNA, 15 bp, Homo sapiens
ccaattcatagagca

SEQ ID NO: 894927 - DNA, 15 bp, Homo sapiens
caattcatagagcat

SEQ ID NO: 894928 - DNA, 15 bp, Homo sapiens
aattcatagagcata

SEQ ID NO: 894929 - DNA, 15 bp, Homo sapiens
attcatagagcatag

SEQ ID NO: 894930 - DNA, 15 bp, Homo sapiens
ttcatagagcatagt

SEQ ID NO: 894931 - DNA, 15 bp, Homo sapiens
tcatagagcatagtc

SEQ ID NO: 894932 - DNA, 15 bp, Homo sapiens
catagagcatagtcc

SEQ ID NO: 894933 - DNA, 15 bp, Homo sapiens
atagagcatagtcca

SEQ ID NO: 894934 - DNA, 15 bp, Homo sapiens
tagagcatagtccat

SEQ ID NO: 894935 - DNA, 15 bp, Homo sapiens
agagcatagtccatt

SEQ ID NO: 894936 - DNA, 15 bp, Homo sapiens
gagcatagtccattg

SEQ ID NO: 894937 - DNA, 15 bp, Homo sapiens
agcatagtccattgc

SEQ ID NO: 894938 - DNA, 15 bp, Homo sapiens
gcatagtccattgca

SEQ ID NO: 894939 - DNA, 15 bp, Homo sapiens
catagtccattgcat

SEQ ID NO: 894940 - DNA, 15 bp, Homo sapiens
atagtccattgcatg

SEQ ID NO: 894941 - DNA, 15 bp, Homo sapiens
tagtccattgcatgg

SEQ ID NO: 894942 - DNA, 15 bp, Homo sapiens
agtccattgcatggc

SEQ ID NO: 894943 - DNA, 15 bp, Homo sapiens
gtccattgcatggcc

SEQ ID NO: 894944 - DNA, 15 bp, Homo sapiens
tccattgcatggcca

SEQ ID NO: 894945 - DNA, 15 bp, Homo sapiens
ccattgcatggccaa

SEQ ID NO: 894946 - DNA, 15 bp, Homo sapiens
cattgcatggccaag

SEQ ID NO: 894947 - DNA, 15 bp, Homo sapiens
attgcatggccaaga

SEQ ID NO: 894948 - DNA, 15 bp, Homo sapiens
ttgcatggccaagag

SEQ ID NO: 894949 - DNA, 15 bp, Homo sapiens
tgcatggccaagagc

SEQ ID NO: 894950 - DNA, 15 bp, Homo sapiens
gcatggccaagagca

SEQ ID NO: 894951 - DNA, 15 bp, Homo sapiens
catggccaagagcag

SEQ ID NO: 894952 - DNA, 15 bp, Homo sapiens
atggccaagagcaga

SEQ ID NO: 894953 - DNA, 15 bp, Homo sapiens
tggccaagagcagac

SEQ ID NO: 894954 - DNA, 15 bp, Homo sapiens
ggccaagagcagact

SEQ ID NO: 894955 - DNA, 15 bp, Homo sapiens
gccaagagcagactg

SEQ ID NO: 894956 - DNA, 15 bp, Homo sapiens
ccaagagcagactgg

SEQ ID NO: 894957 - DNA, 15 bp, Homo sapiens
caagagcagactgga

SEQ ID NO: 894958 - DNA, 15 bp, Homo sapiens
aagagcagactggaa

SEQ ID NO: 894959 - DNA, 15 bp, Homo sapiens
agagcagactggaat

SEQ ID NO: 894960 - DNA, 15 bp, Homo sapiens
gagcagactggaatg

SEQ ID NO: 894961 - DNA, 15 bp, Homo sapiens
agcagactggaatga

SEQ ID NO: 894962 - DNA, 15 bp, Homo sapiens
gcagactggaatgag

SEQ ID NO: 894963 - DNA, 15 bp, Homo sapiens
cagactggaatgagg

SEQ ID NO: 894964 - DNA, 15 bp, Homo sapiens
agactggaatgaggt

SEQ ID NO: 894965 - DNA, 15 bp, Homo sapiens
gactggaatgaggtc

SEQ ID NO: 894966 - DNA, 15 bp, Homo sapiens
actggaatgaggtcc

SEQ ID NO: 894967 - DNA, 15 bp, Homo sapiens
ctggaatgaggtcct

SEQ ID NO: 894968 - DNA, 15 bp, Homo sapiens
tggaatgaggtcctc

SEQ ID NO: 894969 - DNA, 15 bp, Homo sapiens
ggaatgaggtcctct

SEQ ID NO: 894970 - DNA, 15 bp, Homo sapiens
gaatgaggtcctctg

SEQ ID NO: 894971 - DNA, 15 bp, Homo sapiens
aatgaggtcctctgt

SEQ ID NO: 894972 - DNA, 15 bp, Homo sapiens
atgaggtcctctgtg

SEQ ID NO: 894973 - DNA, 15 bp, Homo sapiens
tgaggtcctctgtga

SEQ ID NO: 894974 - DNA, 15 bp, Homo sapiens
gaggtcctctgtgaa

SEQ ID NO: 894975 - DNA, 15 bp, Homo sapiens
aggtcctctgtgaac

SEQ ID NO: 894976 - DNA, 15 bp, Homo sapiens
ggtcctctgtgaaca

SEQ ID NO: 894977 - DNA, 15 bp, Homo sapiens
gtcctctgtgaacaa

SEQ ID NO: 894978 - DNA, 15 bp, Homo sapiens
tcctctgtgaacaat

SEQ ID NO: 894979 - DNA, 15 bp, Homo sapiens
cctctgtgaacaatc

SEQ ID NO: 894980 - DNA, 15 bp, Homo sapiens
ctctgtgaacaatca

SEQ ID NO: 894981 - DNA, 15 bp, Homo sapiens
tctgtgaacaatcaa

SEQ ID NO: 894982 - DNA, 15 bp, Homo sapiens
ctgtgaacaatcaag

SEQ ID NO: 894983 - DNA, 15 bp, Homo sapiens
tgtgaacaatcaaga

SEQ ID NO: 894984 - DNA, 15 bp, Homo sapiens
gtgaacaatcaagag

SEQ ID NO: 894985 - DNA, 15 bp, Homo sapiens
tgaacaatcaagaga

SEQ ID NO: 894986 - DNA, 15 bp, Homo sapiens
gaacaatcaagagag

SEQ ID NO: 894987 - DNA, 15 bp, Homo sapiens
aacaatcaagagaga

SEQ ID NO: 894988 - DNA, 15 bp, Homo sapiens
acaatcaagagagaa

SEQ ID NO: 894989 - DNA, 15 bp, Homo sapiens
caatcaagagagaaa

SEQ ID NO: 894990 - DNA, 15 bp, Homo sapiens
aatcaagagagaaag

SEQ ID NO: 894991 - DNA, 15 bp, Homo sapiens
atcaagagagaaaga

SEQ ID NO: 894992 - DNA, 15 bp, Homo sapiens
tcaagagagaaagag

SEQ ID NO: 894993 - DNA, 15 bp, Homo sapiens
caagagagaaagagc

SEQ ID NO: 894994 - DNA, 15 bp, Homo sapiens
aagagagaaagagca

SEQ ID NO: 894995 - DNA, 15 bp, Homo sapiens
agagagaaagagcag

SEQ ID NO: 894996 - DNA, 15 bp, Homo sapiens
gagagaaagagcagt

SEQ ID NO: 894997 - DNA, 15 bp, Homo sapiens
agagaaagagcagta

SEQ ID NO: 894998 - DNA, 15 bp, Homo sapiens
gagaaagagcagtac

SEQ ID NO: 894999 - DNA, 15 bp, Homo sapiens
agaaagagcagtaca

SEQ ID NO: 895000 - DNA, 15 bp, Homo sapiens
gaaagagcagtacag

SEQ ID NO: 895001 - DNA, 15 bp, Homo sapiens
aaagagcagtacaga

SEQ ID NO: 895002 - DNA, 15 bp, Homo sapiens
aagagcagtacagaa

SEQ ID NO: 895003 - DNA, 15 bp, Homo sapiens
agagcagtacagaaa

SEQ ID NO: 895004 - DNA, 15 bp, Homo sapiens
gagcagtacagaaag

SEQ ID NO: 895005 - DNA, 15 bp, Homo sapiens
agcagtacagaaaga

SEQ ID NO: 895006 - DNA, 15 bp, Homo sapiens
gcagtacagaaagag

SEQ ID NO: 895007 - DNA, 15 bp, Homo sapiens
cagtacagaaagagt

SEQ ID NO: 895008 - DNA, 15 bp, Homo sapiens
agtacagaaagagtt

SEQ ID NO: 895009 - DNA, 15 bp, Homo sapiens
gtacagaaagagtta

SEQ ID NO: 895010 - DNA, 15 bp, Homo sapiens
tacagaaagagttaa

SEQ ID NO: 895011 - DNA, 15 bp, Homo sapiens
acagaaagagttaaa

SEQ ID NO: 895012 - DNA, 15 bp, Homo sapiens
cagaaagagttaaat

SEQ ID NO: 895013 - DNA, 15 bp, Homo sapiens
agaaagagttaaatt

SEQ ID NO: 895014 - DNA, 15 bp, Homo sapiens
gaaagagttaaattg

SEQ ID NO: 895015 - DNA, 15 bp, Homo sapiens
aaagagttaaattga

SEQ ID NO: 895016 - DNA, 15 bp, Homo sapiens
aagagttaaattgac

SEQ ID NO: 895017 - DNA, 15 bp, Homo sapiens
agagttaaattgaca

SEQ ID NO: 895018 - DNA, 15 bp, Homo sapiens
gagttaaattgacaa

SEQ ID NO: 895019 - DNA, 15 bp, Homo sapiens
agttaaattgacaat

SEQ ID NO: 895020 - DNA, 15 bp, Homo sapiens
gttaaattgacaata

SEQ ID NO: 895021 - DNA, 15 bp, Homo sapiens
ttaaattgacaatat

SEQ ID NO: 895022 - DNA, 15 bp, Homo sapiens
taaattgacaatatt

SEQ ID NO: 895023 - DNA, 15 bp, Homo sapiens
aaattgacaatattc

SEQ ID NO: 895024 - DNA, 15 bp, Homo sapiens
aattgacaatattca

SEQ ID NO: 895025 - DNA, 15 bp, Homo sapiens
attgacaatattcat

SEQ ID NO: 895026 - DNA, 15 bp, Homo sapiens
ttgacaatattcata

SEQ ID NO: 895027 - DNA, 15 bp, Homo sapiens
tgacaatattcatat

SEQ ID NO: 895028 - DNA, 15 bp, Homo sapiens
gacaatattcatatt

SEQ ID NO: 895029 - DNA, 15 bp, Homo sapiens
acaatattcatattc

SEQ ID NO: 895030 - DNA, 15 bp, Homo sapiens
caatattcatattct

SEQ ID NO: 895031 - DNA, 15 bp, Homo sapiens
aatattcatattctc

SEQ ID NO: 895032 - DNA, 15 bp, Homo sapiens
atattcatattctct

SEQ ID NO: 895033 - DNA, 15 bp, Homo sapiens
tattcatattctctt

SEQ ID NO: 895034 - DNA, 15 bp, Homo sapiens
attcatattctcttc

SEQ ID NO: 895035 - DNA, 15 bp, Homo sapiens
ttcatattctcttcc

SEQ ID NO: 895036 - DNA, 15 bp, Homo sapiens
tcatattctcttccc

SEQ ID NO: 895037 - DNA, 15 bp, Homo sapiens
catattctcttccca

SEQ ID NO: 895038 - DNA, 15 bp, Homo sapiens
atattctcttcccaa

SEQ ID NO: 895039 - DNA, 15 bp, Homo sapiens
tattctcttcccaaa

SEQ ID NO: 895040 - DNA, 15 bp, Homo sapiens
attctcttcccaaat

SEQ ID NO: 895041 - DNA, 15 bp, Homo sapiens
ttctcttcccaaatg

SEQ ID NO: 895042 - DNA, 15 bp, Homo sapiens
tctcttcccaaatgc

SEQ ID NO: 895043 - DNA, 15 bp, Homo sapiens
ctcttcccaaatgct

SEQ ID NO: 895044 - DNA, 15 bp, Homo sapiens
tcttcccaaatgctc

SEQ ID NO: 895045 - DNA, 15 bp, Homo sapiens
cttcccaaatgctcc

SEQ ID NO: 895046 - DNA, 15 bp, Homo sapiens
ttcccaaatgctcca

SEQ ID NO: 895047 - DNA, 15 bp, Homo sapiens
tcccaaatgctccag

SEQ ID NO: 895048 - DNA, 15 bp, Homo sapiens
cccaaatgctccagt

SEQ ID NO: 895049 - DNA, 15 bp, Homo sapiens
ccaaatgctccagtc

SEQ ID NO: 895050 - DNA, 15 bp, Homo sapiens
caaatgctccagtca

SEQ ID NO: 895051 - DNA, 15 bp, Homo sapiens
aaatgctccagtcag

SEQ ID NO: 895052 - DNA, 15 bp, Homo sapiens
aatgctccagtcaga

SEQ ID NO: 895053 - DNA, 15 bp, Homo sapiens
atgctccagtcagac

SEQ ID NO: 895054 - DNA, 15 bp, Homo sapiens
tgctccagtcagaca

SEQ ID NO: 895055 - DNA, 15 bp, Homo sapiens
gctccagtcagacag

SEQ ID NO: 895056 - DNA, 15 bp, Homo sapiens
ctccagtcagacagg

SEQ ID NO: 895057 - DNA, 15 bp, Homo sapiens
tccagtcagacaggt

SEQ ID NO: 895058 - DNA, 15 bp, Homo sapiens
ccagtcagacaggtc

SEQ ID NO: 895059 - DNA, 15 bp, Homo sapiens
cagtcagacaggtca

SEQ ID NO: 895060 - DNA, 15 bp, Homo sapiens
agtcagacaggtcac

SEQ ID NO: 895061 - DNA, 15 bp, Homo sapiens
gtcagacaggtcact

SEQ ID NO: 895062 - DNA, 15 bp, Homo sapiens
tcagacaggtcactg

SEQ ID NO: 895063 - DNA, 15 bp, Homo sapiens
cagacaggtcactgc

SEQ ID NO: 895064 - DNA, 15 bp, Homo sapiens
agacaggtcactgct

SEQ ID NO: 895065 - DNA, 15 bp, Homo sapiens
gacaggtcactgcta

SEQ ID NO: 895066 - DNA, 15 bp, Homo sapiens
acaggtcactgctac

SEQ ID NO: 895067 - DNA, 15 bp, Homo sapiens
caggtcactgctact

SEQ ID NO: 895068 - DNA, 15 bp, Homo sapiens
aggtcactgctactt

SEQ ID NO: 895069 - DNA, 15 bp, Homo sapiens
ggtcactgctactta

SEQ ID NO: 895070 - DNA, 15 bp, Homo sapiens
gtcactgctacttat

SEQ ID NO: 895071 - DNA, 15 bp, Homo sapiens
tcactgctacttatg

SEQ ID NO: 895072 - DNA, 15 bp, Homo sapiens
cactgctacttatgg

SEQ ID NO: 895073 - DNA, 15 bp, Homo sapiens
actgctacttatggg

SEQ ID NO: 895074 - DNA, 15 bp, Homo sapiens
ctgctacttatgggg

SEQ ID NO: 895075 - DNA, 15 bp, Homo sapiens
tgctacttatggggt

SEQ ID NO: 895076 - DNA, 15 bp, Homo sapiens
gctacttatggggta

SEQ ID NO: 895077 - DNA, 15 bp, Homo sapiens
ctacttatggggtag

SEQ ID NO: 895078 - DNA, 15 bp, Homo sapiens
tacttatggggtaga

SEQ ID NO: 895079 - DNA, 15 bp, Homo sapiens
acttatggggtagac

SEQ ID NO: 895080 - DNA, 15 bp, Homo sapiens
cttatggggtagact

SEQ ID NO: 895081 - DNA, 15 bp, Homo sapiens
ttatggggtagactg

SEQ ID NO: 895082 - DNA, 15 bp, Homo sapiens
tatggggtagactgt

SEQ ID NO: 895083 - DNA, 15 bp, Homo sapiens
atggggtagactgtg

SEQ ID NO: 895084 - DNA, 15 bp, Homo sapiens
tggggtagactgtgt

SEQ ID NO: 895085 - DNA, 15 bp, Homo sapiens
ggggtagactgtgtg

SEQ ID NO: 895086 - DNA, 15 bp, Homo sapiens
gggtagactgtgtga

SEQ ID NO: 895087 - DNA, 15 bp, Homo sapiens
ggtagactgtgtgag

SEQ ID NO: 895088 - DNA, 15 bp, Homo sapiens
gtagactgtgtgagg

SEQ ID NO: 895089 - DNA, 15 bp, Homo sapiens
tagactgtgtgaggt

SEQ ID NO: 895090 - DNA, 15 bp, Homo sapiens
agactgtgtgaggtg

SEQ ID NO: 895091 - DNA, 15 bp, Homo sapiens
gactgtgtgaggtgc

SEQ ID NO: 895092 - DNA, 15 bp, Homo sapiens
actgtgtgaggtgca

SEQ ID NO: 895093 - DNA, 15 bp, Homo sapiens
ctgtgtgaggtgcag

SEQ ID NO: 895094 - DNA, 15 bp, Homo sapiens
tgtgtgaggtgcagt

SEQ ID NO: 895095 - DNA, 15 bp, Homo sapiens
gtgtgaggtgcagta

SEQ ID NO: 895096 - DNA, 15 bp, Homo sapiens
tgtgaggtgcagtac

SEQ ID NO: 895097 - DNA, 15 bp, Homo sapiens
gtgaggtgcagtaca

SEQ ID NO: 895098 - DNA, 15 bp, Homo sapiens
tgaggtgcagtacag

SEQ ID NO: 895099 - DNA, 15 bp, Homo sapiens
gaggtgcagtacaga

SEQ ID NO: 895100 - DNA, 15 bp, Homo sapiens
aggtgcagtacagaa

SEQ ID NO: 895101 - DNA, 15 bp, Homo sapiens
ggtgcagtacagaag

SEQ ID NO: 895102 - DNA, 15 bp, Homo sapiens
gtgcagtacagaagc

SEQ ID NO: 895103 - DNA, 15 bp, Homo sapiens
tgcagtacagaagct

SEQ ID NO: 895104 - DNA, 15 bp, Homo sapiens
gcagtacagaagctg

SEQ ID NO: 895105 - DNA, 15 bp, Homo sapiens
cagtacagaagctgg

SEQ ID NO: 895106 - DNA, 15 bp, Homo sapiens
agtacagaagctgga

SEQ ID NO: 895107 - DNA, 15 bp, Homo sapiens
gtacagaagctggaa

SEQ ID NO: 895108 - DNA, 15 bp, Homo sapiens
tacagaagctggaag

SEQ ID NO: 895109 - DNA, 15 bp, Homo sapiens
acagaagctggaagc

SEQ ID NO: 895110 - DNA, 15 bp, Homo sapiens
cagaagctggaagca

SEQ ID NO: 895111 - DNA, 15 bp, Homo sapiens
agaagctggaagcac

SEQ ID NO: 895112 - DNA, 15 bp, Homo sapiens
gaagctggaagcact

SEQ ID NO: 895113 - DNA, 15 bp, Homo sapiens
aagctggaagcactc

SEQ ID NO: 895114 - DNA, 15 bp, Homo sapiens
agctggaagcactct

SEQ ID NO: 895115 - DNA, 15 bp, Homo sapiens
gctggaagcactcta

SEQ ID NO: 895116 - DNA, 15 bp, Homo sapiens
ctggaagcactctat

SEQ ID NO: 895117 - DNA, 15 bp, Homo sapiens
tggaagcactctatc

SEQ ID NO: 895118 - DNA, 15 bp, Homo sapiens
ggaagcactctatcc

SEQ ID NO: 895119 - DNA, 15 bp, Homo sapiens
gaagcactctatcca

SEQ ID NO: 895120 - DNA, 15 bp, Homo sapiens
aagcactctatccat

SEQ ID NO: 895121 - DNA, 15 bp, Homo sapiens
agcactctatccata

SEQ ID NO: 895122 - DNA, 15 bp, Homo sapiens
gcactctatccatac

SEQ ID NO: 895123 - DNA, 15 bp, Homo sapiens
cactctatccatact

SEQ ID NO: 895124 - DNA, 15 bp, Homo sapiens
actctatccatactc

SEQ ID NO: 895125 - DNA, 15 bp, Homo sapiens
ctctatccatactct

SEQ ID NO: 895126 - DNA, 15 bp, Homo sapiens
tctatccatactctt

SEQ ID NO: 895127 - DNA, 15 bp, Homo sapiens
ctatccatactcttc

SEQ ID NO: 895128 - DNA, 15 bp, Homo sapiens
tatccatactcttcc

SEQ ID NO: 895129 - DNA, 15 bp, Homo sapiens
atccatactcttccc

SEQ ID NO: 895130 - DNA, 15 bp, Homo sapiens
tccatactcttccct

SEQ ID NO: 895131 - DNA, 15 bp, Homo sapiens
ccatactcttccctt

SEQ ID NO: 895132 - DNA, 15 bp, Homo sapiens
catactcttcccttc

SEQ ID NO: 895133 - DNA, 15 bp, Homo sapiens
atactcttcccttct

SEQ ID NO: 895134 - DNA, 15 bp, Homo sapiens
tactcttcccttctg

SEQ ID NO: 895135 - DNA, 15 bp, Homo sapiens
actcttcccttctgg

SEQ ID NO: 895136 - DNA, 15 bp, Homo sapiens
ctcttcccttctggg

SEQ ID NO: 895137 - DNA, 15 bp, Homo sapiens
tcttcccttctggga

SEQ ID NO: 895138 - DNA, 15 bp, Homo sapiens
cttcccttctgggaa

SEQ ID NO: 895139 - DNA, 15 bp, Homo sapiens
ttcccttctgggaaa

SEQ ID NO: 895140 - DNA, 15 bp, Homo sapiens
tcccttctgggaaat

SEQ ID NO: 895141 - DNA, 15 bp, Homo sapiens
cccttctgggaaatg

SEQ ID NO: 895142 - DNA, 15 bp, Homo sapiens
ccttctgggaaatga

SEQ ID NO: 895143 - DNA, 15 bp, Homo sapiens
cttctgggaaatgag

SEQ ID NO: 895144 - DNA, 15 bp, Homo sapiens
ttctgggaaatgagg

SEQ ID NO: 895145 - DNA, 15 bp, Homo sapiens
tctgggaaatgaggt

SEQ ID NO: 895146 - DNA, 15 bp, Homo sapiens
ctgggaaatgaggtt

SEQ ID NO: 895147 - DNA, 15 bp, Homo sapiens
tgggaaatgaggttc

SEQ ID NO: 895148 - DNA, 15 bp, Homo sapiens
gggaaatgaggttca

SEQ ID NO: 895149 - DNA, 15 bp, Homo sapiens
ggaaatgaggttcaa

SEQ ID NO: 895150 - DNA, 15 bp, Homo sapiens
gaaatgaggttcaaa

SEQ ID NO: 895151 - DNA, 15 bp, Homo sapiens
aaatgaggttcaaat

SEQ ID NO: 895152 - DNA, 15 bp, Homo sapiens
aatgaggttcaaatt

SEQ ID NO: 895153 - DNA, 15 bp, Homo sapiens
atgaggttcaaattc

SEQ ID NO: 895154 - DNA, 15 bp, Homo sapiens
tgaggttcaaattcc

SEQ ID NO: 895155 - DNA, 15 bp, Homo sapiens
gaggttcaaattccc

SEQ ID NO: 895156 - DNA, 15 bp, Homo sapiens
aggttcaaattccct

SEQ ID NO: 895157 - DNA, 15 bp, Homo sapiens
ggttcaaattccctc

SEQ ID NO: 895158 - DNA, 15 bp, Homo sapiens
gttcaaattccctct

SEQ ID NO: 895159 - DNA, 15 bp, Homo sapiens
ttcaaattccctctt

SEQ ID NO: 895160 - DNA, 15 bp, Homo sapiens
tcaaattccctcttc

SEQ ID NO: 895161 - DNA, 15 bp, Homo sapiens
caaattccctcttca

SEQ ID NO: 895162 - DNA, 15 bp, Homo sapiens
aaattccctcttcac

SEQ ID NO: 895163 - DNA, 15 bp, Homo sapiens
aattccctcttcact

SEQ ID NO: 895164 - DNA, 15 bp, Homo sapiens
attccctcttcactc

SEQ ID NO: 895165 - DNA, 15 bp, Homo sapiens
ttccctcttcactct

SEQ ID NO: 895166 - DNA, 15 bp, Homo sapiens
tccctcttcactcta

SEQ ID NO: 895167 - DNA, 15 bp, Homo sapiens
ccctcttcactctag

SEQ ID NO: 895168 - DNA, 15 bp, Homo sapiens
cctcttcactctaga

SEQ ID NO: 895169 - DNA, 15 bp, Homo sapiens
ctcttcactctagaa

SEQ ID NO: 895170 - DNA, 15 bp, Homo sapiens
tcttcactctagaag

SEQ ID NO: 895171 - DNA, 15 bp, Homo sapiens
cttcactctagaagc

SEQ ID NO: 895172 - DNA, 15 bp, Homo sapiens
ttcactctagaagca

SEQ ID NO: 895173 - DNA, 15 bp, Homo sapiens
tcactctagaagcag

SEQ ID NO: 895174 - DNA, 15 bp, Homo sapiens
cactctagaagcagg

SEQ ID NO: 895175 - DNA, 15 bp, Homo sapiens
actctagaagcagga

SEQ ID NO: 895176 - DNA, 15 bp, Homo sapiens
ctctagaagcaggag

SEQ ID NO: 895177 - DNA, 15 bp, Homo sapiens
tctagaagcaggaga

SEQ ID NO: 895178 - DNA, 15 bp, Homo sapiens
ctagaagcaggagaa

SEQ ID NO: 895179 - DNA, 15 bp, Homo sapiens
tagaagcaggagaag

SEQ ID NO: 895180 - DNA, 15 bp, Homo sapiens
agaagcaggagaagt

SEQ ID NO: 895181 - DNA, 15 bp, Homo sapiens
gaagcaggagaagta

SEQ ID NO: 895182 - DNA, 15 bp, Homo sapiens
aagcaggagaagtag

SEQ ID NO: 895183 - DNA, 15 bp, Homo sapiens
agcaggagaagtagg

SEQ ID NO: 895184 - DNA, 15 bp, Homo sapiens
gcaggagaagtaggg

SEQ ID NO: 895185 - DNA, 15 bp, Homo sapiens
caggagaagtaggga

SEQ ID NO: 895186 - DNA, 15 bp, Homo sapiens
aggagaagtagggaa

SEQ ID NO: 895187 - DNA, 15 bp, Homo sapiens
ggagaagtagggaat

SEQ ID NO: 895188 - DNA, 15 bp, Homo sapiens
gagaagtagggaatc

SEQ ID NO: 895189 - DNA, 15 bp, Homo sapiens
agaagtagggaatca

SEQ ID NO: 895190 - DNA, 15 bp, Homo sapiens
gaagtagggaatcat

SEQ ID NO: 895191 - DNA, 15 bp, Homo sapiens
aagtagggaatcatt

SEQ ID NO: 895192 - DNA, 15 bp, Homo sapiens
agtagggaatcattg

SEQ ID NO: 895193 - DNA, 15 bp, Homo sapiens
gtagggaatcattgt

SEQ ID NO: 895194 - DNA, 15 bp, Homo sapiens
tagggaatcattgtt

SEQ ID NO: 895195 - DNA, 15 bp, Homo sapiens
agggaatcattgttc

SEQ ID NO: 895196 - DNA, 15 bp, Homo sapiens
gggaatcattgttcc

SEQ ID NO: 895197 - DNA, 15 bp, Homo sapiens
ggaatcattgttcca

SEQ ID NO: 895198 - DNA, 15 bp, Homo sapiens
gaatcattgttccac

SEQ ID NO: 895199 - DNA, 15 bp, Homo sapiens
aatcattgttccacc

SEQ ID NO: 895200 - DNA, 15 bp, Homo sapiens
atcattgttccaccc

SEQ ID NO: 895201 - DNA, 15 bp, Homo sapiens
tcattgttccaccct

SEQ ID NO: 895202 - DNA, 15 bp, Homo sapiens
cattgttccacccta

SEQ ID NO: 895203 - DNA, 15 bp, Homo sapiens
attgttccaccctaa

SEQ ID NO: 895204 - DNA, 15 bp, Homo sapiens
ttgttccaccctaac

SEQ ID NO: 895205 - DNA, 15 bp, Homo sapiens
tgttccaccctaaca

SEQ ID NO: 895206 - DNA, 15 bp, Homo sapiens
gttccaccctaacaa

SEQ ID NO: 895207 - DNA, 15 bp, Homo sapiens
ttccaccctaacaaa

SEQ ID NO: 895208 - DNA, 15 bp, Homo sapiens
tccaccctaacaaat

SEQ ID NO: 895209 - DNA, 15 bp, Homo sapiens
ccaccctaacaaatg

SEQ ID NO: 895210 - DNA, 15 bp, Homo sapiens
caccctaacaaatgg

SEQ ID NO: 895211 - DNA, 15 bp, Homo sapiens
accctaacaaatggt

SEQ ID NO: 895212 - DNA, 15 bp, Homo sapiens
ccctaacaaatggta

SEQ ID NO: 895213 - DNA, 15 bp, Homo sapiens
cctaacaaatggtaa

SEQ ID NO: 895214 - DNA, 15 bp, Homo sapiens
ctaacaaatggtaat

SEQ ID NO: 895215 - DNA, 15 bp, Homo sapiens
taacaaatggtaatg

SEQ ID NO: 895216 - DNA, 15 bp, Homo sapiens
aacaaatggtaatga

SEQ ID NO: 895217 - DNA, 15 bp, Homo sapiens
acaaatggtaatgaa

SEQ ID NO: 895218 - DNA, 15 bp, Homo sapiens
caaatggtaatgaaa

SEQ ID NO: 895219 - DNA, 15 bp, Homo sapiens
aaatggtaatgaaag

SEQ ID NO: 895220 - DNA, 15 bp, Homo sapiens
aatggtaatgaaagc

SEQ ID NO: 895221 - DNA, 15 bp, Homo sapiens
atggtaatgaaagct

SEQ ID NO: 895222 - DNA, 15 bp, Homo sapiens
tggtaatgaaagcta

SEQ ID NO: 895223 - DNA, 15 bp, Homo sapiens
ggtaatgaaagctaa

SEQ ID NO: 895224 - DNA, 15 bp, Homo sapiens
gtaatgaaagctaaa

SEQ ID NO: 895225 - DNA, 15 bp, Homo sapiens
taatgaaagctaaat

SEQ ID NO: 895226 - DNA, 15 bp, Homo sapiens
aatgaaagctaaatt

SEQ ID NO: 895227 - DNA, 15 bp, Homo sapiens
atgaaagctaaattt

SEQ ID NO: 895228 - DNA, 15 bp, Homo sapiens
tgaaagctaaattta

SEQ ID NO: 895229 - DNA, 15 bp, Homo sapiens
gaaagctaaatttat

SEQ ID NO: 895230 - DNA, 15 bp, Homo sapiens
aaagctaaatttatt

SEQ ID NO: 895231 - DNA, 15 bp, Homo sapiens
aagctaaatttattg

SEQ ID NO: 895232 - DNA, 15 bp, Homo sapiens
agctaaatttattgc

SEQ ID NO: 895233 - DNA, 15 bp, Homo sapiens
gctaaatttattgca

SEQ ID NO: 895234 - DNA, 15 bp, Homo sapiens
ctaaatttattgcat

SEQ ID NO: 895235 - DNA, 15 bp, Homo sapiens
taaatttattgcatg

SEQ ID NO: 895236 - DNA, 15 bp, Homo sapiens
aaatttattgcatgt

SEQ ID NO: 895237 - DNA, 15 bp, Homo sapiens
aatttattgcatgtt

SEQ ID NO: 895238 - DNA, 15 bp, Homo sapiens
atttattgcatgttt

SEQ ID NO: 895239 - DNA, 15 bp, Homo sapiens
tttattgcatgtttc

SEQ ID NO: 895240 - DNA, 15 bp, Homo sapiens
ttattgcatgtttcc

SEQ ID NO: 895241 - DNA, 15 bp, Homo sapiens
tattgcatgtttcca

SEQ ID NO: 895242 - DNA, 15 bp, Homo sapiens
attgcatgtttccaa

SEQ ID NO: 895243 - DNA, 15 bp, Homo sapiens
ttgcatgtttccaat

SEQ ID NO: 895244 - DNA, 15 bp, Homo sapiens
tgcatgtttccaatg

SEQ ID NO: 895245 - DNA, 15 bp, Homo sapiens
gcatgtttccaatgt

SEQ ID NO: 895246 - DNA, 15 bp, Homo sapiens
catgtttccaatgtg

SEQ ID NO: 895247 - DNA, 15 bp, Homo sapiens
atgtttccaatgtgc

SEQ ID NO: 895248 - DNA, 15 bp, Homo sapiens
tgtttccaatgtgct

SEQ ID NO: 895249 - DNA, 15 bp, Homo sapiens
gtttccaatgtgcta

SEQ ID NO: 895250 - DNA, 15 bp, Homo sapiens
tttccaatgtgctag

SEQ ID NO: 895251 - DNA, 15 bp, Homo sapiens
ttccaatgtgctagg

SEQ ID NO: 895252 - DNA, 15 bp, Homo sapiens
tccaatgtgctaggc

SEQ ID NO: 895253 - DNA, 15 bp, Homo sapiens
ccaatgtgctaggct

SEQ ID NO: 895254 - DNA, 15 bp, Homo sapiens
caatgtgctaggctc

SEQ ID NO: 895255 - DNA, 15 bp, Homo sapiens
aatgtgctaggctct

SEQ ID NO: 895256 - DNA, 15 bp, Homo sapiens
atgtgctaggctctg

SEQ ID NO: 895257 - DNA, 15 bp, Homo sapiens
tgtgctaggctctgt

SEQ ID NO: 895258 - DNA, 15 bp, Homo sapiens
gtgctaggctctgtg

SEQ ID NO: 895259 - DNA, 15 bp, Homo sapiens
tgctaggctctgtgc

SEQ ID NO: 895260 - DNA, 15 bp, Homo sapiens
gctaggctctgtgct

SEQ ID NO: 895261 - DNA, 15 bp, Homo sapiens
ctaggctctgtgcta

SEQ ID NO: 895262 - DNA, 15 bp, Homo sapiens
taggctctgtgctaa

SEQ ID NO: 895263 - DNA, 15 bp, Homo sapiens
aggctctgtgctaag

SEQ ID NO: 895264 - DNA, 15 bp, Homo sapiens
ggctctgtgctaagt

SEQ ID NO: 895265 - DNA, 15 bp, Homo sapiens
gctctgtgctaagta

SEQ ID NO: 895266 - DNA, 15 bp, Homo sapiens
ctctgtgctaagtac

SEQ ID NO: 895267 - DNA, 15 bp, Homo sapiens
tctgtgctaagtact

SEQ ID NO: 895268 - DNA, 15 bp, Homo sapiens
ctgtgctaagtactt

SEQ ID NO: 895269 - DNA, 15 bp, Homo sapiens
tgtgctaagtacttt

SEQ ID NO: 895270 - DNA, 15 bp, Homo sapiens
gtgctaagtactttg

SEQ ID NO: 895271 - DNA, 15 bp, Homo sapiens
tgctaagtactttgt

SEQ ID NO: 895272 - DNA, 15 bp, Homo sapiens
gctaagtactttgta

SEQ ID NO: 895273 - DNA, 15 bp, Homo sapiens
ctaagtactttgtat

SEQ ID NO: 895274 - DNA, 15 bp, Homo sapiens
taagtactttgtatt

SEQ ID NO: 895275 - DNA, 15 bp, Homo sapiens
aagtactttgtattc

SEQ ID NO: 895276 - DNA, 15 bp, Homo sapiens
agtactttgtattca

SEQ ID NO: 895277 - DNA, 15 bp, Homo sapiens
gtactttgtattcat

SEQ ID NO: 895278 - DNA, 15 bp, Homo sapiens
tactttgtattcatt

SEQ ID NO: 895279 - DNA, 15 bp, Homo sapiens
actttgtattcatta

SEQ ID NO: 895280 - DNA, 15 bp, Homo sapiens
ctttgtattcattag

SEQ ID NO: 895281 - DNA, 15 bp, Homo sapiens
tttgtattcattagc

SEQ ID NO: 895282 - DNA, 15 bp, Homo sapiens
ttgtattcattagct

SEQ ID NO: 895283 - DNA, 15 bp, Homo sapiens
tgtattcattagctc

SEQ ID NO: 895284 - DNA, 15 bp, Homo sapiens
gtattcattagctct

SEQ ID NO: 895285 - DNA, 15 bp, Homo sapiens
tattcattagctctt

SEQ ID NO: 895286 - DNA, 15 bp, Homo sapiens
attcattagctcttt

SEQ ID NO: 895287 - DNA, 15 bp, Homo sapiens
ttcattagctctttt

SEQ ID NO: 895288 - DNA, 15 bp, Homo sapiens
tcattagctcttttt

SEQ ID NO: 895289 - DNA, 15 bp, Homo sapiens
cattagctcttttta

SEQ ID NO: 895290 - DNA, 15 bp, Homo sapiens
attagctctttttat

SEQ ID NO: 895291 - DNA, 15 bp, Homo sapiens
ttagctctttttatt

SEQ ID NO: 895292 - DNA, 15 bp, Homo sapiens
tagctctttttattc

SEQ ID NO: 895293 - DNA, 15 bp, Homo sapiens
agctctttttattct

SEQ ID NO: 895294 - DNA, 15 bp, Homo sapiens
gctctttttattctt

SEQ ID NO: 895295 - DNA, 15 bp, Homo sapiens
ctctttttattcttg

SEQ ID NO: 895296 - DNA, 15 bp, Homo sapiens
tctttttattcttgg

SEQ ID NO: 895297 - DNA, 15 bp, Homo sapiens
ctttttattcttgga

SEQ ID NO: 895298 - DNA, 15 bp, Homo sapiens
tttttattcttggaa

SEQ ID NO: 895299 - DNA, 15 bp, Homo sapiens
ttttattcttggaac

SEQ ID NO: 895300 - DNA, 15 bp, Homo sapiens
tttattcttggaaca

SEQ ID NO: 895301 - DNA, 15 bp, Homo sapiens
ttattcttggaacat

SEQ ID NO: 895302 - DNA, 15 bp, Homo sapiens
tattcttggaacatt

SEQ ID NO: 895303 - DNA, 15 bp, Homo sapiens
attcttggaacattt

SEQ ID NO: 895304 - DNA, 15 bp, Homo sapiens
ttcttggaacatttc

SEQ ID NO: 895305 - DNA, 15 bp, Homo sapiens
tcttggaacatttct

SEQ ID NO: 895306 - DNA, 15 bp, Homo sapiens
cttggaacatttcta

SEQ ID NO: 895307 - DNA, 15 bp, Homo sapiens
ttggaacatttctaa

SEQ ID NO: 895308 - DNA, 15 bp, Homo sapiens
tggaacatttctaag

SEQ ID NO: 895309 - DNA, 15 bp, Homo sapiens
ggaacatttctaaga

SEQ ID NO: 895310 - DNA, 15 bp, Homo sapiens
gaacatttctaagaa

SEQ ID NO: 895311 - DNA, 15 bp, Homo sapiens
aacatttctaagaag

SEQ ID NO: 895312 - DNA, 15 bp, Homo sapiens
acatttctaagaagt

SEQ ID NO: 895313 - DNA, 15 bp, Homo sapiens
catttctaagaagta

SEQ ID NO: 895314 - DNA, 15 bp, Homo sapiens
atttctaagaagtat

SEQ ID NO: 895315 - DNA, 15 bp, Homo sapiens
tttctaagaagtatc

SEQ ID NO: 895316 - DNA, 15 bp, Homo sapiens
ttctaagaagtatct

SEQ ID NO: 895317 - DNA, 15 bp, Homo sapiens
tctaagaagtatcta

SEQ ID NO: 895318 - DNA, 15 bp, Homo sapiens
ctaagaagtatctat

SEQ ID NO: 895319 - DNA, 15 bp, Homo sapiens
taagaagtatctatc

SEQ ID NO: 895320 - DNA, 15 bp, Homo sapiens
aagaagtatctatcc

SEQ ID NO: 895321 - DNA, 15 bp, Homo sapiens
agaagtatctatcca

SEQ ID NO: 895322 - DNA, 15 bp, Homo sapiens
gaagtatctatccac

SEQ ID NO: 895323 - DNA, 15 bp, Homo sapiens
aagtatctatccaca

SEQ ID NO: 895324 - DNA, 15 bp, Homo sapiens
agtatctatccacat

SEQ ID NO: 895325 - DNA, 15 bp, Homo sapiens
gtatctatccacatt

SEQ ID NO: 895326 - DNA, 15 bp, Homo sapiens
tatctatccacatta

SEQ ID NO: 895327 - DNA, 15 bp, Homo sapiens
atctatccacattat

SEQ ID NO: 895328 - DNA, 15 bp, Homo sapiens
tctatccacattatg

SEQ ID NO: 895329 - DNA, 15 bp, Homo sapiens
ctatccacattatgc

SEQ ID NO: 895330 - DNA, 15 bp, Homo sapiens
tatccacattatgca

SEQ ID NO: 895331 - DNA, 15 bp, Homo sapiens
atccacattatgcag

SEQ ID NO: 895332 - DNA, 15 bp, Homo sapiens
tccacattatgcaga

SEQ ID NO: 895333 - DNA, 15 bp, Homo sapiens
ccacattatgcagat

SEQ ID NO: 895334 - DNA, 15 bp, Homo sapiens
cacattatgcagatg

SEQ ID NO: 895335 - DNA, 15 bp, Homo sapiens
acattatgcagatga

SEQ ID NO: 895336 - DNA, 15 bp, Homo sapiens
cattatgcagatgag

SEQ ID NO: 895337 - DNA, 15 bp, Homo sapiens
attatgcagatgagg

SEQ ID NO: 895338 - DNA, 15 bp, Homo sapiens
ttatgcagatgagga

SEQ ID NO: 895339 - DNA, 15 bp, Homo sapiens
tatgcagatgaggaa

SEQ ID NO: 895340 - DNA, 15 bp, Homo sapiens
atgcagatgaggaaa

SEQ ID NO: 895341 - DNA, 15 bp, Homo sapiens
tgcagatgaggaaac

SEQ ID NO: 895342 - DNA, 15 bp, Homo sapiens
gcagatgaggaaact

SEQ ID NO: 895343 - DNA, 15 bp, Homo sapiens
cagatgaggaaactg

SEQ ID NO: 895344 - DNA, 15 bp, Homo sapiens
agatgaggaaactga

SEQ ID NO: 895345 - DNA, 15 bp, Homo sapiens
gatgaggaaactgag

SEQ ID NO: 895346 - DNA, 15 bp, Homo sapiens
atgaggaaactgagg

SEQ ID NO: 895347 - DNA, 15 bp, Homo sapiens
tgaggaaactgaggc

SEQ ID NO: 895348 - DNA, 15 bp, Homo sapiens
gaggaaactgaggct

SEQ ID NO: 895349 - DNA, 15 bp, Homo sapiens
aggaaactgaggctc

SEQ ID NO: 895350 - DNA, 15 bp, Homo sapiens
ggaaactgaggctca

SEQ ID NO: 895351 - DNA, 15 bp, Homo sapiens
gaaactgaggctcag

SEQ ID NO: 895352 - DNA, 15 bp, Homo sapiens
aaactgaggctcaga

SEQ ID NO: 895353 - DNA, 15 bp, Homo sapiens
aactgaggctcagaa

SEQ ID NO: 895354 - DNA, 15 bp, Homo sapiens
actgaggctcagaaa

SEQ ID NO: 895355 - DNA, 15 bp, Homo sapiens
ctgaggctcagaaat

SEQ ID NO: 895356 - DNA, 15 bp, Homo sapiens
tgaggctcagaaatg

SEQ ID NO: 895357 - DNA, 15 bp, Homo sapiens
gaggctcagaaatgg

SEQ ID NO: 895358 - DNA, 15 bp, Homo sapiens
aggctcagaaatggg

SEQ ID NO: 895359 - DNA, 15 bp, Homo sapiens
ggctcagaaatggga

SEQ ID NO: 895360 - DNA, 15 bp, Homo sapiens
gctcagaaatgggaa

SEQ ID NO: 895361 - DNA, 15 bp, Homo sapiens
ctcagaaatgggaat

SEQ ID NO: 895362 - DNA, 15 bp, Homo sapiens
tcagaaatgggaatt

SEQ ID NO: 895363 - DNA, 15 bp, Homo sapiens
cagaaatgggaattt

SEQ ID NO: 895364 - DNA, 15 bp, Homo sapiens
agaaatgggaattta

SEQ ID NO: 895365 - DNA, 15 bp, Homo sapiens
gaaatgggaatttac

SEQ ID NO: 895366 - DNA, 15 bp, Homo sapiens
aaatgggaatttact

SEQ ID NO: 895367 - DNA, 15 bp, Homo sapiens
aatgggaatttactt

SEQ ID NO: 895368 - DNA, 15 bp, Homo sapiens
atgggaatttacttg

SEQ ID NO: 895369 - DNA, 15 bp, Homo sapiens
tgggaatttacttga

SEQ ID NO: 895370 - DNA, 15 bp, Homo sapiens
gggaatttacttgat

SEQ ID NO: 895371 - DNA, 15 bp, Homo sapiens
ggaatttacttgatc

SEQ ID NO: 895372 - DNA, 15 bp, Homo sapiens
gaatttacttgatcc

SEQ ID NO: 895373 - DNA, 15 bp, Homo sapiens
aatttacttgatcca

SEQ ID NO: 895374 - DNA, 15 bp, Homo sapiens
atttacttgatccag

SEQ ID NO: 895375 - DNA, 15 bp, Homo sapiens
tttacttgatccaga

SEQ ID NO: 895376 - DNA, 15 bp, Homo sapiens
ttacttgatccagat

SEQ ID NO: 895377 - DNA, 15 bp, Homo sapiens
tacttgatccagatc

SEQ ID NO: 895378 - DNA, 15 bp, Homo sapiens
acttgatccagatca

SEQ ID NO: 895379 - DNA, 15 bp, Homo sapiens
cttgatccagatcac

SEQ ID NO: 895380 - DNA, 15 bp, Homo sapiens
ttgatccagatcacc

SEQ ID NO: 895381 - DNA, 15 bp, Homo sapiens
tgatccagatcacct

SEQ ID NO: 895382 - DNA, 15 bp, Homo sapiens
gatccagatcaccta

SEQ ID NO: 895383 - DNA, 15 bp, Homo sapiens
atccagatcacctag

SEQ ID NO: 895384 - DNA, 15 bp, Homo sapiens
tccagatcacctagc

SEQ ID NO: 895385 - DNA, 15 bp, Homo sapiens
ccagatcacctagct

SEQ ID NO: 895386 - DNA, 15 bp, Homo sapiens
cagatcacctagcta

SEQ ID NO: 895387 - DNA, 15 bp, Homo sapiens
agatcacctagctag

SEQ ID NO: 895388 - DNA, 15 bp, Homo sapiens
gatcacctagctaga

SEQ ID NO: 895389 - DNA, 15 bp, Homo sapiens
atcacctagctagaa

SEQ ID NO: 895390 - DNA, 15 bp, Homo sapiens
tcacctagctagaaa

SEQ ID NO: 895391 - DNA, 15 bp, Homo sapiens
cacctagctagaaag

SEQ ID NO: 895392 - DNA, 15 bp, Homo sapiens
acctagctagaaagc

SEQ ID NO: 895393 - DNA, 15 bp, Homo sapiens
cctagctagaaagca

SEQ ID NO: 895394 - DNA, 15 bp, Homo sapiens
ctagctagaaagcag

SEQ ID NO: 895395 - DNA, 15 bp, Homo sapiens
tagctagaaagcagc

SEQ ID NO: 895396 - DNA, 15 bp, Homo sapiens
agctagaaagcagcg

SEQ ID NO: 895397 - DNA, 15 bp, Homo sapiens
gctagaaagcagcga

SEQ ID NO: 895398 - DNA, 15 bp, Homo sapiens
ctagaaagcagcgag

SEQ ID NO: 895399 - DNA, 15 bp, Homo sapiens
tagaaagcagcgagg

SEQ ID NO: 895400 - DNA, 15 bp, Homo sapiens
agaaagcagcgaggc

SEQ ID NO: 895401 - DNA, 15 bp, Homo sapiens
gaaagcagcgaggca

SEQ ID NO: 895402 - DNA, 15 bp, Homo sapiens
aaagcagcgaggcag

SEQ ID NO: 895403 - DNA, 15 bp, Homo sapiens
aagcagcgaggcaga

SEQ ID NO: 895404 - DNA, 15 bp, Homo sapiens
agcagcgaggcagac

SEQ ID NO: 895405 - DNA, 15 bp, Homo sapiens
gcagcgaggcagaca

SEQ ID NO: 895406 - DNA, 15 bp, Homo sapiens
cagcgaggcagacat

SEQ ID NO: 895407 - DNA, 15 bp, Homo sapiens
agcgaggcagacatc

SEQ ID NO: 895408 - DNA, 15 bp, Homo sapiens
gcgaggcagacatct

SEQ ID NO: 895409 - DNA, 15 bp, Homo sapiens
cgaggcagacatctg

SEQ ID NO: 895410 - DNA, 15 bp, Homo sapiens
gaggcagacatctga

SEQ ID NO: 895411 - DNA, 15 bp, Homo sapiens
aggcagacatctgaa

SEQ ID NO: 895412 - DNA, 15 bp, Homo sapiens
ggcagacatctgaag

SEQ ID NO: 895413 - DNA, 15 bp, Homo sapiens
gcagacatctgaagc

SEQ ID NO: 895414 - DNA, 15 bp, Homo sapiens
cagacatctgaagcc

SEQ ID NO: 895415 - DNA, 15 bp, Homo sapiens
agacatctgaagcca

SEQ ID NO: 895416 - DNA, 15 bp, Homo sapiens
gacatctgaagccaa

SEQ ID NO: 895417 - DNA, 15 bp, Homo sapiens
acatctgaagccaag

SEQ ID NO: 895418 - DNA, 15 bp, Homo sapiens
catctgaagccaagt

SEQ ID NO: 895419 - DNA, 15 bp, Homo sapiens
atctgaagccaagtc

SEQ ID NO: 895420 - DNA, 15 bp, Homo sapiens
tctgaagccaagtct

SEQ ID NO: 895421 - DNA, 15 bp, Homo sapiens
ctgaagccaagtctg

SEQ ID NO: 895422 - DNA, 15 bp, Homo sapiens
tgaagccaagtctgc

SEQ ID NO: 895423 - DNA, 15 bp, Homo sapiens
gaagccaagtctgcc

SEQ ID NO: 895424 - DNA, 15 bp, Homo sapiens
aagccaagtctgcct

SEQ ID NO: 895425 - DNA, 15 bp, Homo sapiens
agccaagtctgccta

SEQ ID NO: 895426 - DNA, 15 bp, Homo sapiens
gccaagtctgcctag

SEQ ID NO: 895427 - DNA, 15 bp, Homo sapiens
ccaagtctgcctagc

SEQ ID NO: 895428 - DNA, 15 bp, Homo sapiens
caagtctgcctagcg

SEQ ID NO: 895429 - DNA, 15 bp, Homo sapiens
aagtctgcctagcgt

SEQ ID NO: 895430 - DNA, 15 bp, Homo sapiens
agtctgcctagcgtc

SEQ ID NO: 895431 - DNA, 15 bp, Homo sapiens
gtctgcctagcgtca

SEQ ID NO: 895432 - DNA, 15 bp, Homo sapiens
tctgcctagcgtcaa

SEQ ID NO: 895433 - DNA, 15 bp, Homo sapiens
ctgcctagcgtcaaa

SEQ ID NO: 895434 - DNA, 15 bp, Homo sapiens
tgcctagcgtcaaag

SEQ ID NO: 895435 - DNA, 15 bp, Homo sapiens
gcctagcgtcaaagc

SEQ ID NO: 895436 - DNA, 15 bp, Homo sapiens
cctagcgtcaaagcc

SEQ ID NO: 895437 - DNA, 15 bp, Homo sapiens
ctagcgtcaaagcct

SEQ ID NO: 895438 - DNA, 15 bp, Homo sapiens
tagcgtcaaagccta

SEQ ID NO: 895439 - DNA, 15 bp, Homo sapiens
agcgtcaaagcctat

SEQ ID NO: 895440 - DNA, 15 bp, Homo sapiens
gcgtcaaagcctatg

SEQ ID NO: 895441 - DNA, 15 bp, Homo sapiens
cgtcaaagcctatgt

SEQ ID NO: 895442 - DNA, 15 bp, Homo sapiens
gtcaaagcctatgtc

SEQ ID NO: 895443 - DNA, 15 bp, Homo sapiens
tcaaagcctatgtcc

SEQ ID NO: 895444 - DNA, 15 bp, Homo sapiens
caaagcctatgtccc

SEQ ID NO: 895445 - DNA, 15 bp, Homo sapiens
aaagcctatgtccct

SEQ ID NO: 895446 - DNA, 15 bp, Homo sapiens
aagcctatgtccctg

SEQ ID NO: 895447 - DNA, 15 bp, Homo sapiens
agcctatgtccctgg

SEQ ID NO: 895448 - DNA, 15 bp, Homo sapiens
gcctatgtccctggg

SEQ ID NO: 895449 - DNA, 15 bp, Homo sapiens
cctatgtccctgggc

SEQ ID NO: 895450 - DNA, 15 bp, Homo sapiens
ctatgtccctgggca

SEQ ID NO: 895451 - DNA, 15 bp, Homo sapiens
tatgtccctgggcag

SEQ ID NO: 895452 - DNA, 15 bp, Homo sapiens
atgtccctgggcagt

SEQ ID NO: 895453 - DNA, 15 bp, Homo sapiens
tgtccctgggcagtt

SEQ ID NO: 895454 - DNA, 15 bp, Homo sapiens
gtccctgggcagtta

SEQ ID NO: 895455 - DNA, 15 bp, Homo sapiens
tccctgggcagttat

SEQ ID NO: 895456 - DNA, 15 bp, Homo sapiens
ccctgggcagttatg

SEQ ID NO: 895457 - DNA, 15 bp, Homo sapiens
cctgggcagttatgt

SEQ ID NO: 895458 - DNA, 15 bp, Homo sapiens
ctgggcagttatgtg

SEQ ID NO: 895459 - DNA, 15 bp, Homo sapiens
tgggcagttatgtgt

SEQ ID NO: 895460 - DNA, 15 bp, Homo sapiens
gggcagttatgtgta

SEQ ID NO: 895461 - DNA, 15 bp, Homo sapiens
ggcagttatgtgtac

SEQ ID NO: 895462 - DNA, 15 bp, Homo sapiens
gcagttatgtgtact

SEQ ID NO: 895463 - DNA, 15 bp, Homo sapiens
cagttatgtgtacta

SEQ ID NO: 895464 - DNA, 15 bp, Homo sapiens
agttatgtgtactac

SEQ ID NO: 895465 - DNA, 15 bp, Homo sapiens
gttatgtgtactact

SEQ ID NO: 895466 - DNA, 15 bp, Homo sapiens
ttatgtgtactactc

SEQ ID NO: 895467 - DNA, 15 bp, Homo sapiens
tatgtgtactactcc

SEQ ID NO: 895468 - DNA, 15 bp, Homo sapiens
atgtgtactactcca

SEQ ID NO: 895469 - DNA, 15 bp, Homo sapiens
tgtgtactactccac

SEQ ID NO: 895470 - DNA, 15 bp, Homo sapiens
gtgtactactccact

SEQ ID NO: 895471 - DNA, 15 bp, Homo sapiens
tgtactactccacta

SEQ ID NO: 895472 - DNA, 15 bp, Homo sapiens
gtactactccactac

SEQ ID NO: 895473 - DNA, 15 bp, Homo sapiens
tactactccactacc

SEQ ID NO: 895474 - DNA, 15 bp, Homo sapiens
actactccactacct

SEQ ID NO: 895475 - DNA, 15 bp, Homo sapiens
ctactccactaccta

SEQ ID NO: 895476 - DNA, 15 bp, Homo sapiens
tactccactacctaa

SEQ ID NO: 895477 - DNA, 15 bp, Homo sapiens
actccactacctaaa

SEQ ID NO: 895478 - DNA, 15 bp, Homo sapiens
ctccactacctaaag

SEQ ID NO: 895479 - DNA, 15 bp, Homo sapiens
tccactacctaaagg

SEQ ID NO: 895480 - DNA, 15 bp, Homo sapiens
ccactacctaaaggt

SEQ ID NO: 895481 - DNA, 15 bp, Homo sapiens
cactacctaaaggtc

SEQ ID NO: 895482 - DNA, 15 bp, Homo sapiens
actacctaaaggtct

SEQ ID NO: 895483 - DNA, 15 bp, Homo sapiens
ctacctaaaggtctc

SEQ ID NO: 895484 - DNA, 15 bp, Homo sapiens
tacctaaaggtctcc

SEQ ID NO: 895485 - DNA, 15 bp, Homo sapiens
acctaaaggtctcct

SEQ ID NO: 895486 - DNA, 15 bp, Homo sapiens
cctaaaggtctccta

SEQ ID NO: 895487 - DNA, 15 bp, Homo sapiens
ctaaaggtctcctag

SEQ ID NO: 895488 - DNA, 15 bp, Homo sapiens
taaaggtctcctagt

SEQ ID NO: 895489 - DNA, 15 bp, Homo sapiens
aaaggtctcctagtg

SEQ ID NO: 895490 - DNA, 15 bp, Homo sapiens
aaggtctcctagtgc

SEQ ID NO: 895491 - DNA, 15 bp, Homo sapiens
aggtctcctagtgcc

SEQ ID NO: 895492 - DNA, 15 bp, Homo sapiens
ggtctcctagtgcct

SEQ ID NO: 895493 - DNA, 15 bp, Homo sapiens
gtctcctagtgcctc

SEQ ID NO: 895494 - DNA, 15 bp, Homo sapiens
tctcctagtgcctct

SEQ ID NO: 895495 - DNA, 15 bp, Homo sapiens
ctcctagtgcctctg

SEQ ID NO: 895496 - DNA, 15 bp, Homo sapiens
tcctagtgcctctga

SEQ ID NO: 895497 - DNA, 15 bp, Homo sapiens
cctagtgcctctgac

SEQ ID NO: 895498 - DNA, 15 bp, Homo sapiens
ctagtgcctctgact

SEQ ID NO: 895499 - DNA, 15 bp, Homo sapiens
tagtgcctctgactc

SEQ ID NO: 895500 - DNA, 15 bp, Homo sapiens
agtgcctctgactca

SEQ ID NO: 895501 - DNA, 15 bp, Homo sapiens
gtgcctctgactcag

SEQ ID NO: 895502 - DNA, 15 bp, Homo sapiens
tgcctctgactcagt

SEQ ID NO: 895503 - DNA, 15 bp, Homo sapiens
gcctctgactcagtg

SEQ ID NO: 895504 - DNA, 15 bp, Homo sapiens
cctctgactcagtgg

SEQ ID NO: 895505 - DNA, 15 bp, Homo sapiens
ctctgactcagtggt

SEQ ID NO: 895506 - DNA, 15 bp, Homo sapiens
tctgactcagtggtg

SEQ ID NO: 895507 - DNA, 15 bp, Homo sapiens
ctgactcagtggtga

SEQ ID NO: 895508 - DNA, 15 bp, Homo sapiens
tgactcagtggtgat

SEQ ID NO: 895509 - DNA, 15 bp, Homo sapiens
gactcagtggtgatg

SEQ ID NO: 895510 - DNA, 15 bp, Homo sapiens
actcagtggtgatga

SEQ ID NO: 895511 - DNA, 15 bp, Homo sapiens
ctcagtggtgatgag

SEQ ID NO: 895512 - DNA, 15 bp, Homo sapiens
tcagtggtgatgagc

SEQ ID NO: 895513 - DNA, 15 bp, Homo sapiens
cagtggtgatgagct

SEQ ID NO: 895514 - DNA, 15 bp, Homo sapiens
agtggtgatgagctt

SEQ ID NO: 895515 - DNA, 15 bp, Homo sapiens
gtggtgatgagcttt

SEQ ID NO: 895516 - DNA, 15 bp, Homo sapiens
tggtgatgagctttg

SEQ ID NO: 895517 - DNA, 15 bp, Homo sapiens
ggtgatgagctttga

SEQ ID NO: 895518 - DNA, 15 bp, Homo sapiens
gtgatgagctttgag

SEQ ID NO: 895519 - DNA, 15 bp, Homo sapiens
tgatgagctttgagt

SEQ ID NO: 895520 - DNA, 15 bp, Homo sapiens
gatgagctttgagtt

SEQ ID NO: 895521 - DNA, 15 bp, Homo sapiens
atgagctttgagttt

SEQ ID NO: 895522 - DNA, 15 bp, Homo sapiens
tgagctttgagtttt

SEQ ID NO: 895523 - DNA, 15 bp, Homo sapiens
gagctttgagttttc

SEQ ID NO: 895524 - DNA, 15 bp, Homo sapiens
agctttgagttttct

SEQ ID NO: 895525 - DNA, 15 bp, Homo sapiens
gctttgagttttctt

SEQ ID NO: 895526 - DNA, 15 bp, Homo sapiens
ctttgagttttcttt

SEQ ID NO: 895527 - DNA, 15 bp, Homo sapiens
tttgagttttctttc

SEQ ID NO: 895528 - DNA, 15 bp, Homo sapiens
ttgagttttctttct

SEQ ID NO: 895529 - DNA, 15 bp, Homo sapiens
tgagttttctttctt

SEQ ID NO: 895530 - DNA, 15 bp, Homo sapiens
gagttttctttcttc

SEQ ID NO: 895531 - DNA, 15 bp, Homo sapiens
agttttctttcttct

SEQ ID NO: 895532 - DNA, 15 bp, Homo sapiens
gttttctttcttctt

SEQ ID NO: 895533 - DNA, 15 bp, Homo sapiens
ttttctttcttcttt

SEQ ID NO: 895534 - DNA, 15 bp, Homo sapiens
tttctttcttctttt

SEQ ID NO: 895535 - DNA, 15 bp, Homo sapiens
ttctttcttcttttc

SEQ ID NO: 895536 - DNA, 15 bp, Homo sapiens
tctttcttcttttca

SEQ ID NO: 895537 - DNA, 15 bp, Homo sapiens
ctttcttcttttcat

SEQ ID NO: 895538 - DNA, 15 bp, Homo sapiens
tttcttcttttcatc

SEQ ID NO: 895539 - DNA, 15 bp, Homo sapiens
ttcttcttttcatcc

SEQ ID NO: 895540 - DNA, 15 bp, Homo sapiens
tcttcttttcatccc

SEQ ID NO: 895541 - DNA, 15 bp, Homo sapiens
cttcttttcatccca

SEQ ID NO: 895542 - DNA, 15 bp, Homo sapiens
ttcttttcatcccag

SEQ ID NO: 895543 - DNA, 15 bp, Homo sapiens
tcttttcatcccagc

SEQ ID NO: 895544 - DNA, 15 bp, Homo sapiens
cttttcatcccagct

SEQ ID NO: 895545 - DNA, 15 bp, Homo sapiens
ttttcatcccagctt

SEQ ID NO: 895546 - DNA, 15 bp, Homo sapiens
tttcatcccagcttg

SEQ ID NO: 895547 - DNA, 15 bp, Homo sapiens
ttcatcccagcttgc

SEQ ID NO: 895548 - DNA, 15 bp, Homo sapiens
tcatcccagcttgca

SEQ ID NO: 895549 - DNA, 15 bp, Homo sapiens
catcccagcttgcac

SEQ ID NO: 895550 - DNA, 15 bp, Homo sapiens
atcccagcttgcact

SEQ ID NO: 895551 - DNA, 15 bp, Homo sapiens
tcccagcttgcactg

SEQ ID NO: 895552 - DNA, 15 bp, Homo sapiens
cccagcttgcactgg

SEQ ID NO: 895553 - DNA, 15 bp, Homo sapiens
ccagcttgcactggt

SEQ ID NO: 895554 - DNA, 15 bp, Homo sapiens
cagcttgcactggtt

SEQ ID NO: 895555 - DNA, 15 bp, Homo sapiens
agcttgcactggttt

SEQ ID NO: 895556 - DNA, 15 bp, Homo sapiens
gcttgcactggtttc

SEQ ID NO: 895557 - DNA, 15 bp, Homo sapiens
cttgcactggtttcc

SEQ ID NO: 895558 - DNA, 15 bp, Homo sapiens
ttgcactggtttccg

SEQ ID NO: 895559 - DNA, 15 bp, Homo sapiens
tgcactggtttccgc

SEQ ID NO: 895560 - DNA, 15 bp, Homo sapiens
gcactggtttccgcc

SEQ ID NO: 895561 - DNA, 15 bp, Homo sapiens
cactggtttccgcct

SEQ ID NO: 895562 - DNA, 15 bp, Homo sapiens
actggtttccgcctc

SEQ ID NO: 895563 - DNA, 15 bp, Homo sapiens
ctggtttccgcctcc

SEQ ID NO: 895564 - DNA, 15 bp, Homo sapiens
tggtttccgcctccg

SEQ ID NO: 895565 - DNA, 15 bp, Homo sapiens
ggtttccgcctccga

SEQ ID NO: 895566 - DNA, 15 bp, Homo sapiens
gtttccgcctccgac

SEQ ID NO: 895567 - DNA, 15 bp, Homo sapiens
tttccgcctccgacc

SEQ ID NO: 895568 - DNA, 15 bp, Homo sapiens
ttccgcctccgacct

SEQ ID NO: 895569 - DNA, 15 bp, Homo sapiens
tccgcctccgacctg

SEQ ID NO: 895570 - DNA, 15 bp, Homo sapiens
ccgcctccgacctgt

SEQ ID NO: 895571 - DNA, 15 bp, Homo sapiens
cgcctccgacctgtg

SEQ ID NO: 895572 - DNA, 15 bp, Homo sapiens
gcctccgacctgtgg

SEQ ID NO: 895573 - DNA, 15 bp, Homo sapiens
cctccgacctgtggc

SEQ ID NO: 895574 - DNA, 15 bp, Homo sapiens
ctccgacctgtggct

SEQ ID NO: 895575 - DNA, 15 bp, Homo sapiens
tccgacctgtggctg

SEQ ID NO: 895576 - DNA, 15 bp, Homo sapiens
ccgacctgtggctgg

SEQ ID NO: 895577 - DNA, 15 bp, Homo sapiens
cgacctgtggctggc

SEQ ID NO: 895578 - DNA, 15 bp, Homo sapiens
gacctgtggctggcc

SEQ ID NO: 895579 - DNA, 15 bp, Homo sapiens
acctgtggctggcct

SEQ ID NO: 895580 - DNA, 15 bp, Homo sapiens
cctgtggctggcctg

SEQ ID NO: 895581 - DNA, 15 bp, Homo sapiens
ctgtggctggcctgc

SEQ ID NO: 895582 - DNA, 15 bp, Homo sapiens
tgtggctggcctgct

SEQ ID NO: 895583 - DNA, 15 bp, Homo sapiens
gtggctggcctgctt

SEQ ID NO: 895584 - DNA, 15 bp, Homo sapiens
tggctggcctgcttt

SEQ ID NO: 895585 - DNA, 15 bp, Homo sapiens
ggctggcctgctttc

SEQ ID NO: 895586 - DNA, 15 bp, Homo sapiens
gctggcctgctttcc

SEQ ID NO: 895587 - DNA, 15 bp, Homo sapiens
ctggcctgctttcct

SEQ ID NO: 895588 - DNA, 15 bp, Homo sapiens
tggcctgctttcctc

SEQ ID NO: 895589 - DNA, 15 bp, Homo sapiens
ggcctgctttcctct

SEQ ID NO: 895590 - DNA, 15 bp, Homo sapiens
gcctgctttcctctc

SEQ ID NO: 895591 - DNA, 15 bp, Homo sapiens
cctgctttcctctcg

SEQ ID NO: 895592 - DNA, 15 bp, Homo sapiens
ctgctttcctctcgg

SEQ ID NO: 895593 - DNA, 15 bp, Homo sapiens
tgctttcctctcggg

SEQ ID NO: 895594 - DNA, 15 bp, Homo sapiens
gctttcctctcggga

SEQ ID NO: 895595 - DNA, 15 bp, Homo sapiens
ctttcctctcgggat

SEQ ID NO: 895596 - DNA, 15 bp, Homo sapiens
tttcctctcgggatt

SEQ ID NO: 895597 - DNA, 15 bp, Homo sapiens
ttcctctcgggattt

SEQ ID NO: 895598 - DNA, 15 bp, Homo sapiens
tcctctcgggatttc

SEQ ID NO: 895599 - DNA, 15 bp, Homo sapiens
cctctcgggatttct

SEQ ID NO: 895600 - DNA, 15 bp, Homo sapiens
ctctcgggatttctt

SEQ ID NO: 895601 - DNA, 15 bp, Homo sapiens
tctcgggatttcttg

SEQ ID NO: 895602 - DNA, 15 bp, Homo sapiens
ctcgggatttcttgg

SEQ ID NO: 895603 - DNA, 15 bp, Homo sapiens
tcgggatttcttggg

SEQ ID NO: 895604 - DNA, 15 bp, Homo sapiens
cgggatttcttgggt

SEQ ID NO: 895605 - DNA, 15 bp, Homo sapiens
gggatttcttgggtg

SEQ ID NO: 895606 - DNA, 15 bp, Homo sapiens
ggatttcttgggtgg

SEQ ID NO: 895607 - DNA, 15 bp, Homo sapiens
gatttcttgggtggc

SEQ ID NO: 895608 - DNA, 15 bp, Homo sapiens
atttcttgggtggcc

SEQ ID NO: 895609 - DNA, 15 bp, Homo sapiens
tttcttgggtggcct

SEQ ID NO: 895610 - DNA, 15 bp, Homo sapiens
ttcttgggtggcctg

SEQ ID NO: 895611 - DNA, 15 bp, Homo sapiens
tcttgggtggcctgg

SEQ ID NO: 895612 - DNA, 15 bp, Homo sapiens
cttgggtggcctggc

SEQ ID NO: 895613 - DNA, 15 bp, Homo sapiens
ttgggtggcctggcc

SEQ ID NO: 895614 - DNA, 15 bp, Homo sapiens
tgggtggcctggcct

SEQ ID NO: 895615 - DNA, 15 bp, Homo sapiens
gggtggcctggcctt

SEQ ID NO: 895616 - DNA, 15 bp, Homo sapiens
ggtggcctggccttc

SEQ ID NO: 895617 - DNA, 15 bp, Homo sapiens
gtggcctggccttcc

SEQ ID NO: 895618 - DNA, 15 bp, Homo sapiens
tggcctggccttccg

SEQ ID NO: 895619 - DNA, 15 bp, Homo sapiens
ggcctggccttccga

SEQ ID NO: 895620 - DNA, 15 bp, Homo sapiens
gcctggccttccgag

SEQ ID NO: 895621 - DNA, 15 bp, Homo sapiens
cctggccttccgagt

SEQ ID NO: 895622 - DNA, 15 bp, Homo sapiens
ctggccttccgagtc

SEQ ID NO: 895623 - DNA, 15 bp, Homo sapiens
tggccttccgagtct

SEQ ID NO: 895624 - DNA, 15 bp, Homo sapiens
ggccttccgagtctt

SEQ ID NO: 895625 - DNA, 15 bp, Homo sapiens
gccttccgagtcttc

SEQ ID NO: 895626 - DNA, 15 bp, Homo sapiens
ccttccgagtcttcc

SEQ ID NO: 895627 - DNA, 15 bp, Homo sapiens
cttccgagtcttcca

SEQ ID NO: 895628 - DNA, 15 bp, Homo sapiens
ttccgagtcttccac

SEQ ID NO: 895629 - DNA, 15 bp, Homo sapiens
tccgagtcttccact

SEQ ID NO: 895630 - DNA, 15 bp, Homo sapiens
ccgagtcttccactg

SEQ ID NO: 895631 - DNA, 15 bp, Homo sapiens
cgagtcttccactgc

SEQ ID NO: 895632 - DNA, 15 bp, Homo sapiens
gagtcttccactgca

SEQ ID NO: 895633 - DNA, 15 bp, Homo sapiens
agtcttccactgcac

SEQ ID NO: 895634 - DNA, 15 bp, Homo sapiens
gtcttccactgcaca

SEQ ID NO: 895635 - DNA, 15 bp, Homo sapiens
tcttccactgcacac

SEQ ID NO: 895636 - DNA, 15 bp, Homo sapiens
cttccactgcacaca

SEQ ID NO: 895637 - DNA, 15 bp, Homo sapiens
ttccactgcacacag

SEQ ID NO: 895638 - DNA, 15 bp, Homo sapiens
tccactgcacacagt

SEQ ID NO: 895639 - DNA, 15 bp, Homo sapiens
ccactgcacacagta

SEQ ID NO: 895640 - DNA, 15 bp, Homo sapiens
cactgcacacagtac

SEQ ID NO: 895641 - DNA, 15 bp, Homo sapiens
actgcacacagtaca

SEQ ID NO: 895642 - DNA, 15 bp, Homo sapiens
ctgcacacagtacat

SEQ ID NO: 895643 - DNA, 15 bp, Homo sapiens
tgcacacagtacatc

SEQ ID NO: 895644 - DNA, 15 bp, Homo sapiens
gcacacagtacatca

SEQ ID NO: 895645 - DNA, 15 bp, Homo sapiens
cacacagtacatcag

SEQ ID NO: 895646 - DNA, 15 bp, Homo sapiens
acacagtacatcaga

SEQ ID NO: 895647 - DNA, 15 bp, Homo sapiens
cacagtacatcagac

SEQ ID NO: 895648 - DNA, 15 bp, Homo sapiens
acagtacatcagaca

SEQ ID NO: 895649 - DNA, 15 bp, Homo sapiens
cagtacatcagacat

SEQ ID NO: 895650 - DNA, 15 bp, Homo sapiens
agtacatcagacatg

SEQ ID NO: 895651 - DNA, 15 bp, Homo sapiens
gtacatcagacatgg

SEQ ID NO: 895652 - DNA, 15 bp, Homo sapiens
tacatcagacatgga

SEQ ID NO: 895653 - DNA, 15 bp, Homo sapiens
acatcagacatggat

SEQ ID NO: 895654 - DNA, 15 bp, Homo sapiens
catcagacatggatc

SEQ ID NO: 895655 - DNA, 15 bp, Homo sapiens
atcagacatggatcc

SEQ ID NO: 895656 - DNA, 15 bp, Homo sapiens
tcagacatggatcca

SEQ ID NO: 895657 - DNA, 15 bp, Homo sapiens
cagacatggatccaa

SEQ ID NO: 895658 - DNA, 15 bp, Homo sapiens
agacatggatccaag

SEQ ID NO: 895659 - DNA, 15 bp, Homo sapiens
gacatggatccaagc

SEQ ID NO: 895660 - DNA, 15 bp, Homo sapiens
acatggatccaagcc

SEQ ID NO: 895661 - DNA, 15 bp, Homo sapiens
catggatccaagccc

SEQ ID NO: 895662 - DNA, 15 bp, Homo sapiens
atggatccaagccca

SEQ ID NO: 895663 - DNA, 15 bp, Homo sapiens
tggatccaagcccat

SEQ ID NO: 895664 - DNA, 15 bp, Homo sapiens
ggatccaagcccatg

SEQ ID NO: 895665 - DNA, 15 bp, Homo sapiens
gatccaagcccatgt

SEQ ID NO: 895666 - DNA, 15 bp, Homo sapiens
atccaagcccatgta

SEQ ID NO: 895667 - DNA, 15 bp, Homo sapiens
tccaagcccatgtat

SEQ ID NO: 895668 - DNA, 15 bp, Homo sapiens
ccaagcccatgtata

SEQ ID NO: 895669 - DNA, 15 bp, Homo sapiens
caagcccatgtatac

SEQ ID NO: 895670 - DNA, 15 bp, Homo sapiens
aagcccatgtatacc

SEQ ID NO: 895671 - DNA, 15 bp, Homo sapiens
agcccatgtataccc

SEQ ID NO: 895672 - DNA, 15 bp, Homo sapiens
gcccatgtatacccc

SEQ ID NO: 895673 - DNA, 15 bp, Homo sapiens
cccatgtataccccc

SEQ ID NO: 895674 - DNA, 15 bp, Homo sapiens
ccatgtatacccccg

SEQ ID NO: 895675 - DNA, 15 bp, Homo sapiens
catgtatacccccga

SEQ ID NO: 895676 - DNA, 15 bp, Homo sapiens
atgtatacccccgaa

SEQ ID NO: 895677 - DNA, 15 bp, Homo sapiens
tgtatacccccgaac

SEQ ID NO: 895678 - DNA, 15 bp, Homo sapiens
gtatacccccgaacc

SEQ ID NO: 895679 - DNA, 15 bp, Homo sapiens
tatacccccgaaccg

SEQ ID NO: 895680 - DNA, 15 bp, Homo sapiens
atacccccgaaccgt

SEQ ID NO: 895681 - DNA, 15 bp, Homo sapiens
tacccccgaaccgtg

SEQ ID NO: 895682 - DNA, 15 bp, Homo sapiens
acccccgaaccgtga

SEQ ID NO: 895683 - DNA, 15 bp, Homo sapiens
cccccgaaccgtgag

SEQ ID NO: 895684 - DNA, 15 bp, Homo sapiens
ccccgaaccgtgagt

SEQ ID NO: 895685 - DNA, 15 bp, Homo sapiens
cccgaaccgtgagta

SEQ ID NO: 895686 - DNA, 15 bp, Homo sapiens
ccgaaccgtgagtac

SEQ ID NO: 895687 - DNA, 15 bp, Homo sapiens
cgaaccgtgagtact

SEQ ID NO: 895688 - DNA, 15 bp, Homo sapiens
gaaccgtgagtactg

SEQ ID NO: 895689 - DNA, 15 bp, Homo sapiens
aaccgtgagtactgt

SEQ ID NO: 895690 - DNA, 15 bp, Homo sapiens
accgtgagtactgtc

SEQ ID NO: 895691 - DNA, 15 bp, Homo sapiens
ccgtgagtactgtcc

SEQ ID NO: 895692 - DNA, 15 bp, Homo sapiens
cgtgagtactgtcct

SEQ ID NO: 895693 - DNA, 15 bp, Homo sapiens
gtgagtactgtcctc

SEQ ID NO: 895694 - DNA, 15 bp, Homo sapiens
tgagtactgtcctcc

SEQ ID NO: 895695 - DNA, 15 bp, Homo sapiens
gagtactgtcctcca

SEQ ID NO: 895696 - DNA, 15 bp, Homo sapiens
agtactgtcctccag

SEQ ID NO: 895697 - DNA, 15 bp, Homo sapiens
gtactgtcctccagc

SEQ ID NO: 895698 - DNA, 15 bp, Homo sapiens
tactgtcctccagct

SEQ ID NO: 895699 - DNA, 15 bp, Homo sapiens
actgtcctccagcta

SEQ ID NO: 895700 - DNA, 15 bp, Homo sapiens
ctgtcctccagctac

SEQ ID NO: 895701 - DNA, 15 bp, Homo sapiens
tgtcctccagctacc

SEQ ID NO: 895702 - DNA, 15 bp, Homo sapiens
gtcctccagctacca

SEQ ID NO: 895703 - DNA, 15 bp, Homo sapiens
tcctccagctaccag

SEQ ID NO: 895704 - DNA, 15 bp, Homo sapiens
cctccagctaccagt

SEQ ID NO: 895705 - DNA, 15 bp, Homo sapiens
ctccagctaccagtt

SEQ ID NO: 895706 - DNA, 15 bp, Homo sapiens
tccagctaccagttg

SEQ ID NO: 895707 - DNA, 15 bp, Homo sapiens
ccagctaccagttgc

SEQ ID NO: 895708 - DNA, 15 bp, Homo sapiens
cagctaccagttgcc

SEQ ID NO: 895709 - DNA, 15 bp, Homo sapiens
agctaccagttgcca

SEQ ID NO: 895710 - DNA, 15 bp, Homo sapiens
gctaccagttgccag

SEQ ID NO: 895711 - DNA, 15 bp, Homo sapiens
ctaccagttgccagg

SEQ ID NO: 895712 - DNA, 15 bp, Homo sapiens
taccagttgccaggc

SEQ ID NO: 895713 - DNA, 15 bp, Homo sapiens
accagttgccaggca

SEQ ID NO: 895714 - DNA, 15 bp, Homo sapiens
ccagttgccaggcac

SEQ ID NO: 895715 - DNA, 15 bp, Homo sapiens
cagttgccaggcaca

SEQ ID NO: 895716 - DNA, 15 bp, Homo sapiens
agttgccaggcacaa

SEQ ID NO: 895717 - DNA, 15 bp, Homo sapiens
gttgccaggcacaat

SEQ ID NO: 895718 - DNA, 15 bp, Homo sapiens
ttgccaggcacaatg

SEQ ID NO: 895719 - DNA, 15 bp, Homo sapiens
tgccaggcacaatga

SEQ ID NO: 895720 - DNA, 15 bp, Homo sapiens
gccaggcacaatgag

SEQ ID NO: 895721 - DNA, 15 bp, Homo sapiens
ccaggcacaatgagc

SEQ ID NO: 895722 - DNA, 15 bp, Homo sapiens
caggcacaatgagcg

SEQ ID NO: 895723 - DNA, 15 bp, Homo sapiens
aggcacaatgagcgc

SEQ ID NO: 895724 - DNA, 15 bp, Homo sapiens
ggcacaatgagcgcc

SEQ ID NO: 895725 - DNA, 15 bp, Homo sapiens
gcacaatgagcgcca

SEQ ID NO: 895726 - DNA, 15 bp, Homo sapiens
cacaatgagcgccat

SEQ ID NO: 895727 - DNA, 15 bp, Homo sapiens
acaatgagcgccatc

SEQ ID NO: 895728 - DNA, 15 bp, Homo sapiens
caatgagcgccatct

SEQ ID NO: 895729 - DNA, 15 bp, Homo sapiens
aatgagcgccatctt

SEQ ID NO: 895730 - DNA, 15 bp, Homo sapiens
atgagcgccatcttt

SEQ ID NO: 895731 - DNA, 15 bp, Homo sapiens
tgagcgccatctttt

SEQ ID NO: 895732 - DNA, 15 bp, Homo sapiens
gagcgccatcttttc

SEQ ID NO: 895733 - DNA, 15 bp, Homo sapiens
agcgccatcttttcc

SEQ ID NO: 895734 - DNA, 15 bp, Homo sapiens
gcgccatcttttcct

SEQ ID NO: 895735 - DNA, 15 bp, Homo sapiens
cgccatcttttcctg

SEQ ID NO: 895736 - DNA, 15 bp, Homo sapiens
gccatcttttcctgc

SEQ ID NO: 895737 - DNA, 15 bp, Homo sapiens
ccatcttttcctgct

SEQ ID NO: 895738 - DNA, 15 bp, Homo sapiens
catcttttcctgctg

SEQ ID NO: 895739 - DNA, 15 bp, Homo sapiens
atcttttcctgctgc

SEQ ID NO: 895740 - DNA, 15 bp, Homo sapiens
tcttttcctgctgca

SEQ ID NO: 895741 - DNA, 15 bp, Homo sapiens
cttttcctgctgcaa

SEQ ID NO: 895742 - DNA, 15 bp, Homo sapiens
ttttcctgctgcaag

SEQ ID NO: 895743 - DNA, 15 bp, Homo sapiens
tttcctgctgcaaga

SEQ ID NO: 895744 - DNA, 15 bp, Homo sapiens
ttcctgctgcaagaa

SEQ ID NO: 895745 - DNA, 15 bp, Homo sapiens
tcctgctgcaagaat

SEQ ID NO: 895746 - DNA, 15 bp, Homo sapiens
cctgctgcaagaatg

SEQ ID NO: 895747 - DNA, 15 bp, Homo sapiens
ctgctgcaagaatga

SEQ ID NO: 895748 - DNA, 15 bp, Homo sapiens
tgctgcaagaatgag

SEQ ID NO: 895749 - DNA, 15 bp, Homo sapiens
gctgcaagaatgagg

SEQ ID NO: 895750 - DNA, 15 bp, Homo sapiens
ctgcaagaatgaggt

SEQ ID NO: 895751 - DNA, 15 bp, Homo sapiens
tgcaagaatgaggtt

SEQ ID NO: 895752 - DNA, 15 bp, Homo sapiens
gcaagaatgaggttt

SEQ ID NO: 895753 - DNA, 15 bp, Homo sapiens
caagaatgaggtttg

SEQ ID NO: 895754 - DNA, 15 bp, Homo sapiens
aagaatgaggtttgg

SEQ ID NO: 895755 - DNA, 15 bp, Homo sapiens
agaatgaggtttggg

SEQ ID NO: 895756 - DNA, 15 bp, Homo sapiens
gaatgaggtttgggt

SEQ ID NO: 895757 - DNA, 15 bp, Homo sapiens
aatgaggtttgggtt

SEQ ID NO: 895758 - DNA, 15 bp, Homo sapiens
atgaggtttgggttc

SEQ ID NO: 895759 - DNA, 15 bp, Homo sapiens
tgaggtttgggttca

SEQ ID NO: 895760 - DNA, 15 bp, Homo sapiens
gaggtttgggttcat

SEQ ID NO: 895761 - DNA, 15 bp, Homo sapiens
aggtttgggttcatt

SEQ ID NO: 895762 - DNA, 15 bp, Homo sapiens
ggtttgggttcattg

SEQ ID NO: 895763 - DNA, 15 bp, Homo sapiens
gtttgggttcattgc

SEQ ID NO: 895764 - DNA, 15 bp, Homo sapiens
tttgggttcattgct

SEQ ID NO: 895765 - DNA, 15 bp, Homo sapiens
ttgggttcattgctg

SEQ ID NO: 895766 - DNA, 15 bp, Homo sapiens
tgggttcattgctgg

SEQ ID NO: 895767 - DNA, 15 bp, Homo sapiens
gggttcattgctggc

SEQ ID NO: 895768 - DNA, 15 bp, Homo sapiens
ggttcattgctggct

SEQ ID NO: 895769 - DNA, 15 bp, Homo sapiens
gttcattgctggctg

SEQ ID NO: 895770 - DNA, 15 bp, Homo sapiens
ttcattgctggctgg

SEQ ID NO: 895771 - DNA, 15 bp, Homo sapiens
tcattgctggctggt

SEQ ID NO: 895772 - DNA, 15 bp, Homo sapiens
cattgctggctggtc

SEQ ID NO: 895773 - DNA, 15 bp, Homo sapiens
attgctggctggtcc

SEQ ID NO: 895774 - DNA, 15 bp, Homo sapiens
ttgctggctggtcca

SEQ ID NO: 895775 - DNA, 15 bp, Homo sapiens
tgctggctggtccac

SEQ ID NO: 895776 - DNA, 15 bp, Homo sapiens
gctggctggtccaca

SEQ ID NO: 895777 - DNA, 15 bp, Homo sapiens
ctggctggtccacag

SEQ ID NO: 895778 - DNA, 15 bp, Homo sapiens
tggctggtccacagg

SEQ ID NO: 895779 - DNA, 15 bp, Homo sapiens
ggctggtccacagga

SEQ ID NO: 895780 - DNA, 15 bp, Homo sapiens
gctggtccacaggac

SEQ ID NO: 895781 - DNA, 15 bp, Homo sapiens
ctggtccacaggact

SEQ ID NO: 895782 - DNA, 15 bp, Homo sapiens
tggtccacaggacta

SEQ ID NO: 895783 - DNA, 15 bp, Homo sapiens
ggtccacaggactag

SEQ ID NO: 895784 - DNA, 15 bp, Homo sapiens
gtccacaggactagt

SEQ ID NO: 895785 - DNA, 15 bp, Homo sapiens
tccacaggactagtt

SEQ ID NO: 895786 - DNA, 15 bp, Homo sapiens
ccacaggactagttg

SEQ ID NO: 895787 - DNA, 15 bp, Homo sapiens
cacaggactagttgt

SEQ ID NO: 895788 - DNA, 15 bp, Homo sapiens
acaggactagttgtc

SEQ ID NO: 895789 - DNA, 15 bp, Homo sapiens
caggactagttgtct

SEQ ID NO: 895790 - DNA, 15 bp, Homo sapiens
aggactagttgtcta

SEQ ID NO: 895791 - DNA, 15 bp, Homo sapiens
ggactagttgtctag

SEQ ID NO: 895792 - DNA, 15 bp, Homo sapiens
gactagttgtctaga

SEQ ID NO: 895793 - DNA, 15 bp, Homo sapiens
actagttgtctagac

SEQ ID NO: 895794 - DNA, 15 bp, Homo sapiens
ctagttgtctagact

SEQ ID NO: 895795 - DNA, 15 bp, Homo sapiens
tagttgtctagactg

SEQ ID NO: 895796 - DNA, 15 bp, Homo sapiens
agttgtctagactgt

SEQ ID NO: 895797 - DNA, 15 bp, Homo sapiens
gttgtctagactgtt

SEQ ID NO: 895798 - DNA, 15 bp, Homo sapiens
ttgtctagactgttt

SEQ ID NO: 895799 - DNA, 15 bp, Homo sapiens
tgtctagactgtttg

SEQ ID NO: 895800 - DNA, 15 bp, Homo sapiens
gtctagactgtttgc

SEQ ID NO: 895801 - DNA, 15 bp, Homo sapiens
tctagactgtttgct

SEQ ID NO: 895802 - DNA, 15 bp, Homo sapiens
ctagactgtttgctg

SEQ ID NO: 895803 - DNA, 15 bp, Homo sapiens
tagactgtttgctgg

SEQ ID NO: 895804 - DNA, 15 bp, Homo sapiens
agactgtttgctggt

SEQ ID NO: 895805 - DNA, 15 bp, Homo sapiens
gactgtttgctggta

SEQ ID NO: 895806 - DNA, 15 bp, Homo sapiens
actgtttgctggtag

SEQ ID NO: 895807 - DNA, 15 bp, Homo sapiens
ctgtttgctggtagt

SEQ ID NO: 895808 - DNA, 15 bp, Homo sapiens
tgtttgctggtagta

SEQ ID NO: 895809 - DNA, 15 bp, Homo sapiens
gtttgctggtagtac

SEQ ID NO: 895810 - DNA, 15 bp, Homo sapiens
tttgctggtagtact

SEQ ID NO: 895811 - DNA, 15 bp, Homo sapiens
ttgctggtagtacta

SEQ ID NO: 895812 - DNA, 15 bp, Homo sapiens
tgctggtagtactaa

SEQ ID NO: 895813 - DNA, 15 bp, Homo sapiens
gctggtagtactaaa

SEQ ID NO: 895814 - DNA, 15 bp, Homo sapiens
ctggtagtactaaaa

SEQ ID NO: 895815 - DNA, 15 bp, Homo sapiens
tggtagtactaaaaa

SEQ ID NO: 895816 - DNA, 15 bp, Homo sapiens
ggtagtactaaaaac

SEQ ID NO: 895817 - DNA, 15 bp, Homo sapiens
gtagtactaaaaaca

SEQ ID NO: 895818 - DNA, 15 bp, Homo sapiens
tagtactaaaaacaa

SEQ ID NO: 895819 - DNA, 15 bp, Homo sapiens
agtactaaaaacaat

SEQ ID NO: 895820 - DNA, 15 bp, Homo sapiens
gtactaaaaacaatt

SEQ ID NO: 895821 - DNA, 15 bp, Homo sapiens
tactaaaaacaattc

SEQ ID NO: 895822 - DNA, 15 bp, Homo sapiens
actaaaaacaattca

SEQ ID NO: 895823 - DNA, 15 bp, Homo sapiens
ctaaaaacaattcat

SEQ ID NO: 895824 - DNA, 15 bp, Homo sapiens
taaaaacaattcatc

SEQ ID NO: 895825 - DNA, 15 bp, Homo sapiens
aaaaacaattcatct

SEQ ID NO: 895826 - DNA, 15 bp, Homo sapiens
aaaacaattcatcta

SEQ ID NO: 895827 - DNA, 15 bp, Homo sapiens
aaacaattcatctat

SEQ ID NO: 895828 - DNA, 15 bp, Homo sapiens
aacaattcatctatt

SEQ ID NO: 895829 - DNA, 15 bp, Homo sapiens
acaattcatctattc

SEQ ID NO: 895830 - DNA, 15 bp, Homo sapiens
caattcatctattct

SEQ ID NO: 895831 - DNA, 15 bp, Homo sapiens
aattcatctattctg

SEQ ID NO: 895832 - DNA, 15 bp, Homo sapiens
attcatctattctgg

SEQ ID NO: 895833 - DNA, 15 bp, Homo sapiens
ttcatctattctgga

SEQ ID NO: 895834 - DNA, 15 bp, Homo sapiens
tcatctattctggag

SEQ ID NO: 895835 - DNA, 15 bp, Homo sapiens
catctattctggaga

SEQ ID NO: 895836 - DNA, 15 bp, Homo sapiens
atctattctggagat

SEQ ID NO: 895837 - DNA, 15 bp, Homo sapiens
tctattctggagatt

SEQ ID NO: 895838 - DNA, 15 bp, Homo sapiens
ctattctggagattt

SEQ ID NO: 895839 - DNA, 15 bp, Homo sapiens
tattctggagatttg

SEQ ID NO: 895840 - DNA, 15 bp, Homo sapiens
attctggagatttgc

SEQ ID NO: 895841 - DNA, 15 bp, Homo sapiens
ttctggagatttgct

SEQ ID NO: 895842 - DNA, 15 bp, Homo sapiens
tctggagatttgctc

SEQ ID NO: 895843 - DNA, 15 bp, Homo sapiens
ctggagatttgctcc

SEQ ID NO: 895844 - DNA, 15 bp, Homo sapiens
tggagatttgctcca

SEQ ID NO: 895845 - DNA, 15 bp, Homo sapiens
ggagatttgctccat

SEQ ID NO: 895846 - DNA, 15 bp, Homo sapiens
gagatttgctccatc

SEQ ID NO: 895847 - DNA, 15 bp, Homo sapiens
agatttgctccatcc

SEQ ID NO: 895848 - DNA, 15 bp, Homo sapiens
gatttgctccatcca

SEQ ID NO: 895849 - DNA, 15 bp, Homo sapiens
atttgctccatccaa

SEQ ID NO: 895850 - DNA, 15 bp, Homo sapiens
tttgctccatccaag

SEQ ID NO: 895851 - DNA, 15 bp, Homo sapiens
ttgctccatccaagt

SEQ ID NO: 895852 - DNA, 15 bp, Homo sapiens
tgctccatccaagta

SEQ ID NO: 895853 - DNA, 15 bp, Homo sapiens
gctccatccaagtag

SEQ ID NO: 895854 - DNA, 15 bp, Homo sapiens
ctccatccaagtaga

SEQ ID NO: 895855 - DNA, 15 bp, Homo sapiens
tccatccaagtagat

SEQ ID NO: 895856 - DNA, 15 bp, Homo sapiens
ccatccaagtagata

SEQ ID NO: 895857 - DNA, 15 bp, Homo sapiens
catccaagtagatag

SEQ ID NO: 895858 - DNA, 15 bp, Homo sapiens
atccaagtagataga

SEQ ID NO: 895859 - DNA, 15 bp, Homo sapiens
tccaagtagatagac

SEQ ID NO: 895860 - DNA, 15 bp, Homo sapiens
ccaagtagatagacc

SEQ ID NO: 895861 - DNA, 15 bp, Homo sapiens
caagtagatagacca

SEQ ID NO: 895862 - DNA, 15 bp, Homo sapiens
aagtagatagaccag

SEQ ID NO: 895863 - DNA, 15 bp, Homo sapiens
agtagatagaccaga

SEQ ID NO: 895864 - DNA, 15 bp, Homo sapiens
gtagatagaccagac

SEQ ID NO: 895865 - DNA, 15 bp, Homo sapiens
tagatagaccagact

SEQ ID NO: 895866 - DNA, 15 bp, Homo sapiens
agatagaccagactg

SEQ ID NO: 895867 - DNA, 15 bp, Homo sapiens
gatagaccagactga

SEQ ID NO: 895868 - DNA, 15 bp, Homo sapiens
atagaccagactgat

SEQ ID NO: 895869 - DNA, 15 bp, Homo sapiens
tagaccagactgatt

SEQ ID NO: 895870 - DNA, 15 bp, Homo sapiens
agaccagactgattg

SEQ ID NO: 895871 - DNA, 15 bp, Homo sapiens
gaccagactgattgg

SEQ ID NO: 895872 - DNA, 15 bp, Homo sapiens
accagactgattgga

SEQ ID NO: 895873 - DNA, 15 bp, Homo sapiens
ccagactgattggag

SEQ ID NO: 895874 - DNA, 15 bp, Homo sapiens
cagactgattggaga

SEQ ID NO: 895875 - DNA, 15 bp, Homo sapiens
agactgattggagat

SEQ ID NO: 895876 - DNA, 15 bp, Homo sapiens
gactgattggagatt

SEQ ID NO: 895877 - DNA, 15 bp, Homo sapiens
actgattggagattt

SEQ ID NO: 895878 - DNA, 15 bp, Homo sapiens
ctgattggagatttg

SEQ ID NO: 895879 - DNA, 15 bp, Homo sapiens
tgattggagatttgg

SEQ ID NO: 895880 - DNA, 15 bp, Homo sapiens
gattggagatttggt

SEQ ID NO: 895881 - DNA, 15 bp, Homo sapiens
attggagatttggtc

SEQ ID NO: 895882 - DNA, 15 bp, Homo sapiens
ttggagatttggtca

SEQ ID NO: 895883 - DNA, 15 bp, Homo sapiens
tggagatttggtcat

SEQ ID NO: 895884 - DNA, 15 bp, Homo sapiens
ggagatttggtcatc

SEQ ID NO: 895885 - DNA, 15 bp, Homo sapiens
gagatttggtcatcc

SEQ ID NO: 895886 - DNA, 15 bp, Homo sapiens
agatttggtcatcct

SEQ ID NO: 895887 - DNA, 15 bp, Homo sapiens
gatttggtcatcctg

SEQ ID NO: 895888 - DNA, 15 bp, Homo sapiens
atttggtcatcctgt

SEQ ID NO: 895889 - DNA, 15 bp, Homo sapiens
tttggtcatcctgtg

SEQ ID NO: 895890 - DNA, 15 bp, Homo sapiens
ttggtcatcctgtga

SEQ ID NO: 895891 - DNA, 15 bp, Homo sapiens
tggtcatcctgtgat

SEQ ID NO: 895892 - DNA, 15 bp, Homo sapiens
ggtcatcctgtgatc

SEQ ID NO: 895893 - DNA, 15 bp, Homo sapiens
gtcatcctgtgatcc

SEQ ID NO: 895894 - DNA, 15 bp, Homo sapiens
tcatcctgtgatcca

SEQ ID NO: 895895 - DNA, 15 bp, Homo sapiens
catcctgtgatccaa

SEQ ID NO: 895896 - DNA, 15 bp, Homo sapiens
atcctgtgatccaat

SEQ ID NO: 895897 - DNA, 15 bp, Homo sapiens
tcctgtgatccaata

SEQ ID NO: 895898 - DNA, 15 bp, Homo sapiens
cctgtgatccaataa

SEQ ID NO: 895899 - DNA, 15 bp, Homo sapiens
ctgtgatccaataac

SEQ ID NO: 895900 - DNA, 15 bp, Homo sapiens
tgtgatccaataact

SEQ ID NO: 895901 - DNA, 15 bp, Homo sapiens
gtgatccaataactc

SEQ ID NO: 895902 - DNA, 15 bp, Homo sapiens
tgatccaataactca

SEQ ID NO: 895903 - DNA, 15 bp, Homo sapiens
gatccaataactcag

SEQ ID NO: 895904 - DNA, 15 bp, Homo sapiens
atccaataactcaga

SEQ ID NO: 895905 - DNA, 15 bp, Homo sapiens
tccaataactcagaa

SEQ ID NO: 895906 - DNA, 15 bp, Homo sapiens
ccaataactcagaac

SEQ ID NO: 895907 - DNA, 15 bp, Homo sapiens
caataactcagaact

SEQ ID NO: 895908 - DNA, 15 bp, Homo sapiens
aataactcagaactc

SEQ ID NO: 895909 - DNA, 15 bp, Homo sapiens
ataactcagaactcc

SEQ ID NO: 895910 - DNA, 15 bp, Homo sapiens
taactcagaactccc

SEQ ID NO: 895911 - DNA, 15 bp, Homo sapiens
aactcagaactccct

SEQ ID NO: 895912 - DNA, 15 bp, Homo sapiens
actcagaactccctt

SEQ ID NO: 895913 - DNA, 15 bp, Homo sapiens
ctcagaactcccttg

SEQ ID NO: 895914 - DNA, 15 bp, Homo sapiens
tcagaactcccttgg

SEQ ID NO: 895915 - DNA, 15 bp, Homo sapiens
cagaactcccttggc

SEQ ID NO: 895916 - DNA, 15 bp, Homo sapiens
agaactcccttggca

SEQ ID NO: 895917 - DNA, 15 bp, Homo sapiens
gaactcccttggcag

SEQ ID NO: 895918 - DNA, 15 bp, Homo sapiens
aactcccttggcagt

SEQ ID NO: 895919 - DNA, 15 bp, Homo sapiens
actcccttggcagtg

SEQ ID NO: 895920 - DNA, 15 bp, Homo sapiens
ctcccttggcagtga

SEQ ID NO: 895921 - DNA, 15 bp, Homo sapiens
tcccttggcagtgag

SEQ ID NO: 895922 - DNA, 15 bp, Homo sapiens
cccttggcagtgaga

SEQ ID NO: 895923 - DNA, 15 bp, Homo sapiens
ccttggcagtgagaa

SEQ ID NO: 895924 - DNA, 15 bp, Homo sapiens
cttggcagtgagaat

SEQ ID NO: 895925 - DNA, 15 bp, Homo sapiens
ttggcagtgagaatg

SEQ ID NO: 895926 - DNA, 15 bp, Homo sapiens
tggcagtgagaatga

SEQ ID NO: 895927 - DNA, 15 bp, Homo sapiens
ggcagtgagaatgag

SEQ ID NO: 895928 - DNA, 15 bp, Homo sapiens
gcagtgagaatgaga

SEQ ID NO: 895929 - DNA, 15 bp, Homo sapiens
cagtgagaatgagag

SEQ ID NO: 895930 - DNA, 15 bp, Homo sapiens
agtgagaatgagaga

SEQ ID NO: 895931 - DNA, 15 bp, Homo sapiens
gtgagaatgagagat

SEQ ID NO: 895932 - DNA, 15 bp, Homo sapiens
tgagaatgagagatc

SEQ ID NO: 895933 - DNA, 15 bp, Homo sapiens
gagaatgagagatcc

SEQ ID NO: 895934 - DNA, 15 bp, Homo sapiens
agaatgagagatccc

SEQ ID NO: 895935 - DNA, 15 bp, Homo sapiens
gaatgagagatccca

SEQ ID NO: 895936 - DNA, 15 bp, Homo sapiens
aatgagagatcccaa

SEQ ID NO: 895937 - DNA, 15 bp, Homo sapiens
atgagagatcccaat

SEQ ID NO: 895938 - DNA, 15 bp, Homo sapiens
tgagagatcccaatc

SEQ ID NO: 895939 - DNA, 15 bp, Homo sapiens
gagagatcccaatca

SEQ ID NO: 895940 - DNA, 15 bp, Homo sapiens
agagatcccaatcaa

SEQ ID NO: 895941 - DNA, 15 bp, Homo sapiens
gagatcccaatcaag

SEQ ID NO: 895942 - DNA, 15 bp, Homo sapiens
agatcccaatcaagt

SEQ ID NO: 895943 - DNA, 15 bp, Homo sapiens
gatcccaatcaagtt

SEQ ID NO: 895944 - DNA, 15 bp, Homo sapiens
atcccaatcaagttc

SEQ ID NO: 895945 - DNA, 15 bp, Homo sapiens
tcccaatcaagttcc

SEQ ID NO: 895946 - DNA, 15 bp, Homo sapiens
cccaatcaagttcca

SEQ ID NO: 895947 - DNA, 15 bp, Homo sapiens
ccaatcaagttccaa

SEQ ID NO: 895948 - DNA, 15 bp, Homo sapiens
caatcaagttccaaa

SEQ ID NO: 895949 - DNA, 15 bp, Homo sapiens
aatcaagttccaaag

SEQ ID NO: 895950 - DNA, 15 bp, Homo sapiens
atcaagttccaaagt

SEQ ID NO: 895951 - DNA, 15 bp, Homo sapiens
tcaagttccaaagtc

SEQ ID NO: 895952 - DNA, 15 bp, Homo sapiens
caagttccaaagtca

SEQ ID NO: 895953 - DNA, 15 bp, Homo sapiens
aagttccaaagtcaa

SEQ ID NO: 895954 - DNA, 15 bp, Homo sapiens
agttccaaagtcaaa

SEQ ID NO: 895955 - DNA, 15 bp, Homo sapiens
gttccaaagtcaaag

SEQ ID NO: 895956 - DNA, 15 bp, Homo sapiens
ttccaaagtcaaagc

SEQ ID NO: 895957 - DNA, 15 bp, Homo sapiens
tccaaagtcaaagct

SEQ ID NO: 895958 - DNA, 15 bp, Homo sapiens
ccaaagtcaaagcta

SEQ ID NO: 895959 - DNA, 15 bp, Homo sapiens
caaagtcaaagctac

SEQ ID NO: 895960 - DNA, 15 bp, Homo sapiens
aaagtcaaagctacg

SEQ ID NO: 895961 - DNA, 15 bp, Homo sapiens
aagtcaaagctacga

SEQ ID NO: 895962 - DNA, 15 bp, Homo sapiens
agtcaaagctacgaa

SEQ ID NO: 895963 - DNA, 15 bp, Homo sapiens
gtcaaagctacgaag

SEQ ID NO: 895964 - DNA, 15 bp, Homo sapiens
tcaaagctacgaagt

SEQ ID NO: 895965 - DNA, 15 bp, Homo sapiens
caaagctacgaagtt

SEQ ID NO: 895966 - DNA, 15 bp, Homo sapiens
aaagctacgaagttg

SEQ ID NO: 895967 - DNA, 15 bp, Homo sapiens
aagctacgaagttgc

SEQ ID NO: 895968 - DNA, 15 bp, Homo sapiens
agctacgaagttgca

SEQ ID NO: 895969 - DNA, 15 bp, Homo sapiens
gctacgaagttgcaa

SEQ ID NO: 895970 - DNA, 15 bp, Homo sapiens
ctacgaagttgcaaa

SEQ ID NO: 895971 - DNA, 15 bp, Homo sapiens
tacgaagttgcaaat

SEQ ID NO: 895972 - DNA, 15 bp, Homo sapiens
acgaagttgcaaatg

SEQ ID NO: 895973 - DNA, 15 bp, Homo sapiens
cgaagttgcaaatga

SEQ ID NO: 895974 - DNA, 15 bp, Homo sapiens
gaagttgcaaatgag

SEQ ID NO: 895975 - DNA, 15 bp, Homo sapiens
aagttgcaaatgaga

SEQ ID NO: 895976 - DNA, 15 bp, Homo sapiens
agttgcaaatgagaa

SEQ ID NO: 895977 - DNA, 15 bp, Homo sapiens
gttgcaaatgagaac

SEQ ID NO: 895978 - DNA, 15 bp, Homo sapiens
ttgcaaatgagaaca

SEQ ID NO: 895979 - DNA, 15 bp, Homo sapiens
tgcaaatgagaacag

SEQ ID NO: 895980 - DNA, 15 bp, Homo sapiens
gcaaatgagaacagg

SEQ ID NO: 895981 - DNA, 15 bp, Homo sapiens
caaatgagaacagga

SEQ ID NO: 895982 - DNA, 15 bp, Homo sapiens
aaatgagaacaggaa

SEQ ID NO: 895983 - DNA, 15 bp, Homo sapiens
aatgagaacaggaac

SEQ ID NO: 895984 - DNA, 15 bp, Homo sapiens
atgagaacaggaaca

SEQ ID NO: 895985 - DNA, 15 bp, Homo sapiens
tgagaacaggaacaa

SEQ ID NO: 895986 - DNA, 15 bp, Homo sapiens
gagaacaggaacaag

SEQ ID NO: 895987 - DNA, 15 bp, Homo sapiens
agaacaggaacaagt

SEQ ID NO: 895988 - DNA, 15 bp, Homo sapiens
gaacaggaacaagtg

SEQ ID NO: 895989 - DNA, 15 bp, Homo sapiens
aacaggaacaagtgg

SEQ ID NO: 895990 - DNA, 15 bp, Homo sapiens
acaggaacaagtggc

SEQ ID NO: 895991 - DNA, 15 bp, Homo sapiens
caggaacaagtggca

SEQ ID NO: 895992 - DNA, 15 bp, Homo sapiens
aggaacaagtggcag

SEQ ID NO: 895993 - DNA, 15 bp, Homo sapiens
ggaacaagtggcagc

SEQ ID NO: 895994 - DNA, 15 bp, Homo sapiens
gaacaagtggcagcc

SEQ ID NO: 895995 - DNA, 15 bp, Homo sapiens
aacaagtggcagcca

SEQ ID NO: 895996 - DNA, 15 bp, Homo sapiens
acaagtggcagccaa

SEQ ID NO: 895997 - DNA, 15 bp, Homo sapiens
caagtggcagccaag

SEQ ID NO: 895998 - DNA, 15 bp, Homo sapiens
aagtggcagccaagc

SEQ ID NO: 895999 - DNA, 15 bp, Homo sapiens
agtggcagccaagct

SEQ ID NO: 896000 - DNA, 15 bp, Homo sapiens
gtggcagccaagcta

SEQ ID NO: 896001 - DNA, 15 bp, Homo sapiens
tggcagccaagctat

SEQ ID NO: 896002 - DNA, 15 bp, Homo sapiens
ggcagccaagctatc

SEQ ID NO: 896003 - DNA, 15 bp, Homo sapiens
gcagccaagctatct

SEQ ID NO: 896004 - DNA, 15 bp, Homo sapiens
cagccaagctatctc

SEQ ID NO: 896005 - DNA, 15 bp, Homo sapiens
agccaagctatctca

SEQ ID NO: 896006 - DNA, 15 bp, Homo sapiens
gccaagctatctcaa

SEQ ID NO: 896007 - DNA, 15 bp, Homo sapiens
ccaagctatctcaat

SEQ ID NO: 896008 - DNA, 15 bp, Homo sapiens
caagctatctcaata

SEQ ID NO: 896009 - DNA, 15 bp, Homo sapiens
aagctatctcaatac

SEQ ID NO: 896010 - DNA, 15 bp, Homo sapiens
agctatctcaatact

SEQ ID NO: 896011 - DNA, 15 bp, Homo sapiens
gctatctcaatactt

SEQ ID NO: 896012 - DNA, 15 bp, Homo sapiens
ctatctcaatacttc

SEQ ID NO: 896013 - DNA, 15 bp, Homo sapiens
tatctcaatacttcc

SEQ ID NO: 896014 - DNA, 15 bp, Homo sapiens
atctcaatacttcct

SEQ ID NO: 896015 - DNA, 15 bp, Homo sapiens
tctcaatacttccta

SEQ ID NO: 896016 - DNA, 15 bp, Homo sapiens
ctcaatacttcctaa

SEQ ID NO: 896017 - DNA, 15 bp, Homo sapiens
tcaatacttcctaag

SEQ ID NO: 896018 - DNA, 15 bp, Homo sapiens
caatacttcctaagt

SEQ ID NO: 896019 - DNA, 15 bp, Homo sapiens
aatacttcctaagta

SEQ ID NO: 896020 - DNA, 15 bp, Homo sapiens
atacttcctaagtat

SEQ ID NO: 896021 - DNA, 15 bp, Homo sapiens
tacttcctaagtata

SEQ ID NO: 896022 - DNA, 15 bp, Homo sapiens
acttcctaagtatac

SEQ ID NO: 896023 - DNA, 15 bp, Homo sapiens
cttcctaagtataca

SEQ ID NO: 896024 - DNA, 15 bp, Homo sapiens
ttcctaagtatacat

SEQ ID NO: 896025 - DNA, 15 bp, Homo sapiens
tcctaagtatacatc

SEQ ID NO: 896026 - DNA, 15 bp, Homo sapiens
cctaagtatacatct

SEQ ID NO: 896027 - DNA, 15 bp, Homo sapiens
ctaagtatacatcta

SEQ ID NO: 896028 - DNA, 15 bp, Homo sapiens
taagtatacatctag

SEQ ID NO: 896029 - DNA, 15 bp, Homo sapiens
aagtatacatctaga

SEQ ID NO: 896030 - DNA, 15 bp, Homo sapiens
agtatacatctagat

SEQ ID NO: 896031 - DNA, 15 bp, Homo sapiens
gtatacatctagatt

SEQ ID NO: 896032 - DNA, 15 bp, Homo sapiens
tatacatctagatta

SEQ ID NO: 896033 - DNA, 15 bp, Homo sapiens
atacatctagattac

SEQ ID NO: 896034 - DNA, 15 bp, Homo sapiens
tacatctagattact

SEQ ID NO: 896035 - DNA, 15 bp, Homo sapiens
acatctagattactc

SEQ ID NO: 896036 - DNA, 15 bp, Homo sapiens
catctagattactct

SEQ ID NO: 896037 - DNA, 15 bp, Homo sapiens
atctagattactctt

SEQ ID NO: 896038 - DNA, 15 bp, Homo sapiens
tctagattactctta

SEQ ID NO: 896039 - DNA, 15 bp, Homo sapiens
ctagattactcttat

SEQ ID NO: 896040 - DNA, 15 bp, Homo sapiens
tagattactcttatc

SEQ ID NO: 896041 - DNA, 15 bp, Homo sapiens
agattactcttatct

SEQ ID NO: 896042 - DNA, 15 bp, Homo sapiens
gattactcttatctt

SEQ ID NO: 896043 - DNA, 15 bp, Homo sapiens
attactcttatcttt

SEQ ID NO: 896044 - DNA, 15 bp, Homo sapiens
ttactcttatctttc

SEQ ID NO: 896045 - DNA, 15 bp, Homo sapiens
tactcttatctttct

SEQ ID NO: 896046 - DNA, 15 bp, Homo sapiens
actcttatctttctt

SEQ ID NO: 896047 - DNA, 15 bp, Homo sapiens
ctcttatctttcttt

SEQ ID NO: 896048 - DNA, 15 bp, Homo sapiens
tcttatctttctttg

SEQ ID NO: 896049 - DNA, 15 bp, Homo sapiens
cttatctttctttgc

SEQ ID NO: 896050 - DNA, 15 bp, Homo sapiens
ttatctttctttgcc

SEQ ID NO: 896051 - DNA, 15 bp, Homo sapiens
tatctttctttgcct

SEQ ID NO: 896052 - DNA, 15 bp, Homo sapiens
atctttctttgccta

SEQ ID NO: 896053 - DNA, 15 bp, Homo sapiens
tctttctttgcctag

SEQ ID NO: 896054 - DNA, 15 bp, Homo sapiens
ctttctttgcctaga

SEQ ID NO: 896055 - DNA, 15 bp, Homo sapiens
tttctttgcctagat

SEQ ID NO: 896056 - DNA, 15 bp, Homo sapiens
ttctttgcctagatt

SEQ ID NO: 896057 - DNA, 15 bp, Homo sapiens
tctttgcctagattg

SEQ ID NO: 896058 - DNA, 15 bp, Homo sapiens
ctttgcctagattgt

SEQ ID NO: 896059 - DNA, 15 bp, Homo sapiens
tttgcctagattgtg

SEQ ID NO: 896060 - DNA, 15 bp, Homo sapiens
ttgcctagattgtgt

SEQ ID NO: 896061 - DNA, 15 bp, Homo sapiens
tgcctagattgtgta

SEQ ID NO: 896062 - DNA, 15 bp, Homo sapiens
gcctagattgtgtat

SEQ ID NO: 896063 - DNA, 15 bp, Homo sapiens
cctagattgtgtatt

SEQ ID NO: 896064 - DNA, 15 bp, Homo sapiens
ctagattgtgtattg

SEQ ID NO: 896065 - DNA, 15 bp, Homo sapiens
tagattgtgtattgg

SEQ ID NO: 896066 - DNA, 15 bp, Homo sapiens
agattgtgtattggg

SEQ ID NO: 896067 - DNA, 15 bp, Homo sapiens
gattgtgtattgggt

SEQ ID NO: 896068 - DNA, 15 bp, Homo sapiens
attgtgtattgggta

SEQ ID NO: 896069 - DNA, 15 bp, Homo sapiens
ttgtgtattgggtag

SEQ ID NO: 896070 - DNA, 15 bp, Homo sapiens
tgtgtattgggtaga

SEQ ID NO: 896071 - DNA, 15 bp, Homo sapiens
gtgtattgggtagag

SEQ ID NO: 896072 - DNA, 15 bp, Homo sapiens
tgtattgggtagagg

SEQ ID NO: 896073 - DNA, 15 bp, Homo sapiens
gtattgggtagaggt

SEQ ID NO: 896074 - DNA, 15 bp, Homo sapiens
tattgggtagaggta

SEQ ID NO: 896075 - DNA, 15 bp, Homo sapiens
attgggtagaggtag

SEQ ID NO: 896076 - DNA, 15 bp, Homo sapiens
ttgggtagaggtaga

SEQ ID NO: 896077 - DNA, 15 bp, Homo sapiens
tgggtagaggtagag

SEQ ID NO: 896078 - DNA, 15 bp, Homo sapiens
gggtagaggtagaga

SEQ ID NO: 896079 - DNA, 15 bp, Homo sapiens
ggtagaggtagagaa

SEQ ID NO: 896080 - DNA, 15 bp, Homo sapiens
gtagaggtagagaat

SEQ ID NO: 896081 - DNA, 15 bp, Homo sapiens
tagaggtagagaatt

SEQ ID NO: 896082 - DNA, 15 bp, Homo sapiens
agaggtagagaattg

SEQ ID NO: 896083 - DNA, 15 bp, Homo sapiens
gaggtagagaattgc

SEQ ID NO: 896084 - DNA, 15 bp, Homo sapiens
aggtagagaattgca

SEQ ID NO: 896085 - DNA, 15 bp, Homo sapiens
ggtagagaattgcag

SEQ ID NO: 896086 - DNA, 15 bp, Homo sapiens
gtagagaattgcagc

SEQ ID NO: 896087 - DNA, 15 bp, Homo sapiens
tagagaattgcagcc

SEQ ID NO: 896088 - DNA, 15 bp, Homo sapiens
agagaattgcagcca

SEQ ID NO: 896089 - DNA, 15 bp, Homo sapiens
gagaattgcagccat

SEQ ID NO: 896090 - DNA, 15 bp, Homo sapiens
agaattgcagccatt

SEQ ID NO: 896091 - DNA, 15 bp, Homo sapiens
gaattgcagccatta

SEQ ID NO: 896092 - DNA, 15 bp, Homo sapiens
aattgcagccattat

SEQ ID NO: 896093 - DNA, 15 bp, Homo sapiens
attgcagccattatg

SEQ ID NO: 896094 - DNA, 15 bp, Homo sapiens
ttgcagccattatgc

SEQ ID NO: 896095 - DNA, 15 bp, Homo sapiens
tgcagccattatgct

SEQ ID NO: 896096 - DNA, 15 bp, Homo sapiens
gcagccattatgctt

SEQ ID NO: 896097 - DNA, 15 bp, Homo sapiens
cagccattatgcttc

SEQ ID NO: 896098 - DNA, 15 bp, Homo sapiens
agccattatgcttct

SEQ ID NO: 896099 - DNA, 15 bp, Homo sapiens
gccattatgcttctt

SEQ ID NO: 896100 - DNA, 15 bp, Homo sapiens
ccattatgcttctta

SEQ ID NO: 896101 - DNA, 15 bp, Homo sapiens
cattatgcttcttac

SEQ ID NO: 896102 - DNA, 15 bp, Homo sapiens
attatgcttcttact

SEQ ID NO: 896103 - DNA, 15 bp, Homo sapiens
ttatgcttcttactt

SEQ ID NO: 896104 - DNA, 15 bp, Homo sapiens
tatgcttcttacttg

SEQ ID NO: 896105 - DNA, 15 bp, Homo sapiens
atgcttcttacttgg

SEQ ID NO: 896106 - DNA, 15 bp, Homo sapiens
tgcttcttacttggg

SEQ ID NO: 896107 - DNA, 15 bp, Homo sapiens
gcttcttacttgggt

SEQ ID NO: 896108 - DNA, 15 bp, Homo sapiens
cttcttacttgggtg

SEQ ID NO: 896109 - DNA, 15 bp, Homo sapiens
ttcttacttgggtgt

SEQ ID NO: 896110 - DNA, 15 bp, Homo sapiens
tcttacttgggtgtt

SEQ ID NO: 896111 - DNA, 15 bp, Homo sapiens
cttacttgggtgttt

SEQ ID NO: 896112 - DNA, 15 bp, Homo sapiens
ttacttgggtgtttc

SEQ ID NO: 896113 - DNA, 15 bp, Homo sapiens
tacttgggtgtttcg

SEQ ID NO: 896114 - DNA, 15 bp, Homo sapiens
acttgggtgtttcgt

SEQ ID NO: 896115 - DNA, 15 bp, Homo sapiens
cttgggtgtttcgtt

SEQ ID NO: 896116 - DNA, 15 bp, Homo sapiens
ttgggtgtttcgtta

SEQ ID NO: 896117 - DNA, 15 bp, Homo sapiens
tgggtgtttcgttat

SEQ ID NO: 896118 - DNA, 15 bp, Homo sapiens
gggtgtttcgttatc

SEQ ID NO: 896119 - DNA, 15 bp, Homo sapiens
ggtgtttcgttatcc

SEQ ID NO: 896120 - DNA, 15 bp, Homo sapiens
gtgtttcgttatccc

SEQ ID NO: 896121 - DNA, 15 bp, Homo sapiens
tgtttcgttatcccc

SEQ ID NO: 896122 - DNA, 15 bp, Homo sapiens
gtttcgttatcccct

SEQ ID NO: 896123 - DNA, 15 bp, Homo sapiens
tttcgttatcccctt

SEQ ID NO: 896124 - DNA, 15 bp, Homo sapiens
ttcgttatcccctta

SEQ ID NO: 896125 - DNA, 15 bp, Homo sapiens
tcgttatccccttag

SEQ ID NO: 896126 - DNA, 15 bp, Homo sapiens
cgttatccccttagt

SEQ ID NO: 896127 - DNA, 15 bp, Homo sapiens
gttatccccttagtc

SEQ ID NO: 896128 - DNA, 15 bp, Homo sapiens
ttatccccttagtct

SEQ ID NO: 896129 - DNA, 15 bp, Homo sapiens
tatccccttagtctg

SEQ ID NO: 896130 - DNA, 15 bp, Homo sapiens
atccccttagtctga

SEQ ID NO: 896131 - DNA, 15 bp, Homo sapiens
tccccttagtctgat

SEQ ID NO: 896132 - DNA, 15 bp, Homo sapiens
ccccttagtctgata

SEQ ID NO: 896133 - DNA, 15 bp, Homo sapiens
cccttagtctgataa

SEQ ID NO: 896134 - DNA, 15 bp, Homo sapiens
ccttagtctgataaa

SEQ ID NO: 896135 - DNA, 15 bp, Homo sapiens
cttagtctgataaaa

SEQ ID NO: 896136 - DNA, 15 bp, Homo sapiens
ttagtctgataaaac

SEQ ID NO: 896137 - DNA, 15 bp, Homo sapiens
tagtctgataaaact

SEQ ID NO: 896138 - DNA, 15 bp, Homo sapiens
agtctgataaaactt

SEQ ID NO: 896139 - DNA, 15 bp, Homo sapiens
gtctgataaaactta

SEQ ID NO: 896140 - DNA, 15 bp, Homo sapiens
tctgataaaacttat

SEQ ID NO: 896141 - DNA, 15 bp, Homo sapiens
ctgataaaacttatg

SEQ ID NO: 896142 - DNA, 15 bp, Homo sapiens
tgataaaacttatgc

SEQ ID NO: 896143 - DNA, 15 bp, Homo sapiens
gataaaacttatgca

SEQ ID NO: 896144 - DNA, 15 bp, Homo sapiens
ataaaacttatgcaa

SEQ ID NO: 896145 - DNA, 15 bp, Homo sapiens
taaaacttatgcaac

SEQ ID NO: 896146 - DNA, 15 bp, Homo sapiens
aaaacttatgcaact

SEQ ID NO: 896147 - DNA, 15 bp, Homo sapiens
aaacttatgcaactt

SEQ ID NO: 896148 - DNA, 15 bp, Homo sapiens
aacttatgcaactta

SEQ ID NO: 896149 - DNA, 15 bp, Homo sapiens
acttatgcaacttat

SEQ ID NO: 896150 - DNA, 15 bp, Homo sapiens
cttatgcaacttata

SEQ ID NO: 896151 - DNA, 15 bp, Homo sapiens
ttatgcaacttataa

SEQ ID NO: 896152 - DNA, 15 bp, Homo sapiens
tatgcaacttataaa

SEQ ID NO: 896153 - DNA, 15 bp, Homo sapiens
atgcaacttataaaa

SEQ ID NO: 896154 - DNA, 15 bp, Homo sapiens
tgcaacttataaaaa

SEQ ID NO: 896155 - DNA, 15 bp, Homo sapiens
gcaacttataaaaaa

SEQ ID NO: 896156 - DNA, 15 bp, Homo sapiens
caacttataaaaaaa

SEQ ID NO: 896157 - DNA, 15 bp, Homo sapiens
aacttataaaaaaat

SEQ ID NO: 896158 - DNA, 15 bp, Homo sapiens
acttataaaaaaatt

SEQ ID NO: 896159 - DNA, 15 bp, Homo sapiens
cttataaaaaaatta

SEQ ID NO: 896160 - DNA, 15 bp, Homo sapiens
ttataaaaaaattaa

SEQ ID NO: 896161 - DNA, 15 bp, Homo sapiens
tataaaaaaattaat

SEQ ID NO: 896162 - DNA, 15 bp, Homo sapiens
ataaaaaaattaatg

SEQ ID NO: 896163 - DNA, 15 bp, Homo sapiens
taaaaaaattaatgg

SEQ ID NO: 896164 - DNA, 15 bp, Homo sapiens
aaaaaaattaatgga

SEQ ID NO: 896165 - DNA, 15 bp, Homo sapiens
aaaaaattaatggaa

SEQ ID NO: 896166 - DNA, 15 bp, Homo sapiens
aaaaattaatggaac

SEQ ID NO: 896167 - DNA, 15 bp, Homo sapiens
aaaattaatggaaca

SEQ ID NO: 896168 - DNA, 15 bp, Homo sapiens
aaattaatggaacat

SEQ ID NO: 896169 - DNA, 15 bp, Homo sapiens
aattaatggaacatc

SEQ ID NO: 896170 - DNA, 15 bp, Homo sapiens
attaatggaacatcc

SEQ ID NO: 896171 - DNA, 15 bp, Homo sapiens
ttaatggaacatcca

SEQ ID NO: 896172 - DNA, 15 bp, Homo sapiens
taatggaacatccaa

SEQ ID NO: 896173 - DNA, 15 bp, Homo sapiens
aatggaacatccaaa

SEQ ID NO: 896174 - DNA, 15 bp, Homo sapiens
atggaacatccaaaa

SEQ ID NO: 896175 - DNA, 15 bp, Homo sapiens
tggaacatccaaaat

SEQ ID NO: 896176 - DNA, 15 bp, Homo sapiens
ggaacatccaaaatt

SEQ ID NO: 896177 - DNA, 15 bp, Homo sapiens
gaacatccaaaattg

SEQ ID NO: 896178 - DNA, 15 bp, Homo sapiens
aacatccaaaattgt

SEQ ID NO: 896179 - DNA, 15 bp, Homo sapiens
acatccaaaattgtt

SEQ ID NO: 896180 - DNA, 15 bp, Homo sapiens
catccaaaattgttt

SEQ ID NO: 896181 - DNA, 15 bp, Homo sapiens
atccaaaattgtttt

SEQ ID NO: 896182 - DNA, 15 bp, Homo sapiens
tccaaaattgttttt

SEQ ID NO: 896183 - DNA, 15 bp, Homo sapiens
ccaaaattgtttttc

SEQ ID NO: 896184 - DNA, 15 bp, Homo sapiens
caaaattgtttttcc

SEQ ID NO: 896185 - DNA, 15 bp, Homo sapiens
aaaattgtttttcct

SEQ ID NO: 896186 - DNA, 15 bp, Homo sapiens
aaattgtttttcctt

SEQ ID NO: 896187 - DNA, 15 bp, Homo sapiens
aattgtttttccttg

SEQ ID NO: 896188 - DNA, 15 bp, Homo sapiens
attgtttttccttgc

SEQ ID NO: 896189 - DNA, 15 bp, Homo sapiens
ttgtttttccttgcc

SEQ ID NO: 896190 - DNA, 15 bp, Homo sapiens
tgtttttccttgccc

SEQ ID NO: 896191 - DNA, 15 bp, Homo sapiens
gtttttccttgccca

SEQ ID NO: 896192 - DNA, 15 bp, Homo sapiens
tttttccttgcccat

SEQ ID NO: 896193 - DNA, 15 bp, Homo sapiens
ttttccttgcccata

SEQ ID NO: 896194 - DNA, 15 bp, Homo sapiens
tttccttgcccataa

SEQ ID NO: 896195 - DNA, 15 bp, Homo sapiens
ttccttgcccataaa

SEQ ID NO: 896196 - DNA, 15 bp, Homo sapiens
tccttgcccataaag

SEQ ID NO: 896197 - DNA, 15 bp, Homo sapiens
ccttgcccataaagt

SEQ ID NO: 896198 - DNA, 15 bp, Homo sapiens
cttgcccataaagtt

SEQ ID NO: 896199 - DNA, 15 bp, Homo sapiens
ttgcccataaagttc

SEQ ID NO: 896200 - DNA, 15 bp, Homo sapiens
tgcccataaagttca

SEQ ID NO: 896201 - DNA, 15 bp, Homo sapiens
gcccataaagttcat

SEQ ID NO: 896202 - DNA, 15 bp, Homo sapiens
cccataaagttcatt

SEQ ID NO: 896203 - DNA, 15 bp, Homo sapiens
ccataaagttcattg

SEQ ID NO: 896204 - DNA, 15 bp, Homo sapiens
cataaagttcattgc

SEQ ID NO: 896205 - DNA, 15 bp, Homo sapiens
ataaagttcattgct

SEQ ID NO: 896206 - DNA, 15 bp, Homo sapiens
taaagttcattgcta

SEQ ID NO: 896207 - DNA, 15 bp, Homo sapiens
aaagttcattgctac

SEQ ID NO: 896208 - DNA, 15 bp, Homo sapiens
aagttcattgctaca

SEQ ID NO: 896209 - DNA, 15 bp, Homo sapiens
agttcattgctacaa

SEQ ID NO: 896210 - DNA, 15 bp, Homo sapiens
gttcattgctacaaa

SEQ ID NO: 896211 - DNA, 15 bp, Homo sapiens
ttcattgctacaaat

SEQ ID NO: 896212 - DNA, 15 bp, Homo sapiens
tcattgctacaaatc

SEQ ID NO: 896213 - DNA, 15 bp, Homo sapiens
cattgctacaaatcc

SEQ ID NO: 896214 - DNA, 15 bp, Homo sapiens
attgctacaaatcca

SEQ ID NO: 896215 - DNA, 15 bp, Homo sapiens
ttgctacaaatccaa

SEQ ID NO: 896216 - DNA, 15 bp, Homo sapiens
tgctacaaatccaaa

SEQ ID NO: 896217 - DNA, 15 bp, Homo sapiens
gctacaaatccaaaa

SEQ ID NO: 896218 - DNA, 15 bp, Homo sapiens
ctacaaatccaaaaa

SEQ ID NO: 896219 - DNA, 15 bp, Homo sapiens
tacaaatccaaaaag

SEQ ID NO: 896220 - DNA, 15 bp, Homo sapiens
acaaatccaaaaaga

SEQ ID NO: 896221 - DNA, 15 bp, Homo sapiens
caaatccaaaaagac

SEQ ID NO: 896222 - DNA, 15 bp, Homo sapiens
aaatccaaaaagacc

SEQ ID NO: 896223 - DNA, 15 bp, Homo sapiens
aatccaaaaagacct

SEQ ID NO: 896224 - DNA, 15 bp, Homo sapiens
atccaaaaagacctg

SEQ ID NO: 896225 - DNA, 15 bp, Homo sapiens
tccaaaaagacctgt

SEQ ID NO: 896226 - DNA, 15 bp, Homo sapiens
ccaaaaagacctgtt

SEQ ID NO: 896227 - DNA, 15 bp, Homo sapiens
caaaaagacctgttc

SEQ ID NO: 896228 - DNA, 15 bp, Homo sapiens
aaaaagacctgttcc

SEQ ID NO: 896229 - DNA, 15 bp, Homo sapiens
aaaagacctgttcca

SEQ ID NO: 896230 - DNA, 15 bp, Homo sapiens
aaagacctgttccaa

SEQ ID NO: 896231 - DNA, 15 bp, Homo sapiens
aagacctgttccaaa

SEQ ID NO: 896232 - DNA, 15 bp, Homo sapiens
agacctgttccaaat

SEQ ID NO: 896233 - DNA, 15 bp, Homo sapiens
gacctgttccaaatg

SEQ ID NO: 896234 - DNA, 15 bp, Homo sapiens
acctgttccaaatgg

SEQ ID NO: 896235 - DNA, 15 bp, Homo sapiens
cctgttccaaatgga

SEQ ID NO: 896236 - DNA, 15 bp, Homo sapiens
ctgttccaaatggac

SEQ ID NO: 896237 - DNA, 15 bp, Homo sapiens
tgttccaaatggaca

SEQ ID NO: 896238 - DNA, 15 bp, Homo sapiens
gttccaaatggacat

SEQ ID NO: 896239 - DNA, 15 bp, Homo sapiens
ttccaaatggacata

SEQ ID NO: 896240 - DNA, 15 bp, Homo sapiens
tccaaatggacatag

SEQ ID NO: 896241 - DNA, 15 bp, Homo sapiens
ccaaatggacatagc

SEQ ID NO: 896242 - DNA, 15 bp, Homo sapiens
caaatggacatagca

SEQ ID NO: 896243 - DNA, 15 bp, Homo sapiens
aaatggacatagcac

SEQ ID NO: 896244 - DNA, 15 bp, Homo sapiens
aatggacatagcaca

SEQ ID NO: 896245 - DNA, 15 bp, Homo sapiens
atggacatagcacat

SEQ ID NO: 896246 - DNA, 15 bp, Homo sapiens
tggacatagcacata

SEQ ID NO: 896247 - DNA, 15 bp, Homo sapiens
ggacatagcacatac

SEQ ID NO: 896248 - DNA, 15 bp, Homo sapiens
gacatagcacataca

SEQ ID NO: 896249 - DNA, 15 bp, Homo sapiens
acatagcacatacag

SEQ ID NO: 896250 - DNA, 15 bp, Homo sapiens
catagcacatacagt

SEQ ID NO: 896251 - DNA, 15 bp, Homo sapiens
atagcacatacagtg

SEQ ID NO: 896252 - DNA, 15 bp, Homo sapiens
tagcacatacagtgt

SEQ ID NO: 896253 - DNA, 15 bp, Homo sapiens
agcacatacagtgtt

SEQ ID NO: 896254 - DNA, 15 bp, Homo sapiens
gcacatacagtgtta

SEQ ID NO: 896255 - DNA, 15 bp, Homo sapiens
cacatacagtgttaa

SEQ ID NO: 896256 - DNA, 15 bp, Homo sapiens
acatacagtgttaaa

SEQ ID NO: 896257 - DNA, 15 bp, Homo sapiens
catacagtgttaaat

SEQ ID NO: 896258 - DNA, 15 bp, Homo sapiens
atacagtgttaaata

SEQ ID NO: 896259 - DNA, 15 bp, Homo sapiens
tacagtgttaaataa

SEQ ID NO: 896260 - DNA, 15 bp, Homo sapiens
acagtgttaaataaa

SEQ ID NO: 896261 - DNA, 15 bp, Homo sapiens
cagtgttaaataaat

SEQ ID NO: 896262 - DNA, 15 bp, Homo sapiens
agtgttaaataaatg

SEQ ID NO: 896263 - DNA, 15 bp, Homo sapiens
gtgttaaataaatgt

SEQ ID NO: 896264 - DNA, 15 bp, Homo sapiens
tgttaaataaatgta

SEQ ID NO: 896265 - DNA, 15 bp, Homo sapiens
gttaaataaatgtag

SEQ ID NO: 896266 - DNA, 15 bp, Homo sapiens
ttaaataaatgtagg

SEQ ID NO: 896267 - DNA, 15 bp, Homo sapiens
taaataaatgtaggt

SEQ ID NO: 896268 - DNA, 15 bp, Homo sapiens
aaataaatgtaggtt

SEQ ID NO: 896269 - DNA, 15 bp, Homo sapiens
aataaatgtaggttt

SEQ ID NO: 896270 - DNA, 15 bp, Homo sapiens
ataaatgtaggtttt

SEQ ID NO: 896271 - DNA, 15 bp, Homo sapiens
taaatgtaggttttc

SEQ ID NO: 896272 - DNA, 15 bp, Homo sapiens
aaatgtaggttttct

SEQ ID NO: 896273 - DNA, 15 bp, Homo sapiens
aatgtaggttttctt

SEQ ID NO: 896274 - DNA, 15 bp, Homo sapiens
atgtaggttttcttc

SEQ ID NO: 896275 - DNA, 15 bp, Homo sapiens
tgtaggttttcttcc

SEQ ID NO: 896276 - DNA, 15 bp, Homo sapiens
gtaggttttcttccc

SEQ ID NO: 896277 - DNA, 15 bp, Homo sapiens
taggttttcttccct

SEQ ID NO: 896278 - DNA, 15 bp, Homo sapiens
aggttttcttccctc

SEQ ID NO: 896279 - DNA, 15 bp, Homo sapiens
ggttttcttccctca

SEQ ID NO: 896280 - DNA, 15 bp, Homo sapiens
gttttcttccctcac

SEQ ID NO: 896281 - DNA, 15 bp, Homo sapiens
ttttcttccctcact

SEQ ID NO: 896282 - DNA, 15 bp, Homo sapiens
tttcttccctcactg

SEQ ID NO: 896283 - DNA, 15 bp, Homo sapiens
ttcttccctcactgc

SEQ ID NO: 896284 - DNA, 15 bp, Homo sapiens
tcttccctcactgct

SEQ ID NO: 896285 - DNA, 15 bp, Homo sapiens
cttccctcactgctg

SEQ ID NO: 896286 - DNA, 15 bp, Homo sapiens
ttccctcactgctgt

SEQ ID NO: 896287 - DNA, 15 bp, Homo sapiens
tccctcactgctgtc

SEQ ID NO: 896288 - DNA, 15 bp, Homo sapiens
ccctcactgctgtcc

SEQ ID NO: 896289 - DNA, 15 bp, Homo sapiens
cctcactgctgtcca

SEQ ID NO: 896290 - DNA, 15 bp, Homo sapiens
ctcactgctgtccac

SEQ ID NO: 896291 - DNA, 15 bp, Homo sapiens
tcactgctgtccacc

SEQ ID NO: 896292 - DNA, 15 bp, Homo sapiens
cactgctgtccacct

SEQ ID NO: 896293 - DNA, 15 bp, Homo sapiens
actgctgtccacctc

SEQ ID NO: 896294 - DNA, 15 bp, Homo sapiens
ctgctgtccacctcc

SEQ ID NO: 896295 - DNA, 15 bp, Homo sapiens
tgctgtccacctcca

SEQ ID NO: 896296 - DNA, 15 bp, Homo sapiens
gctgtccacctccag

SEQ ID NO: 896297 - DNA, 15 bp, Homo sapiens
ctgtccacctccaga

SEQ ID NO: 896298 - DNA, 15 bp, Homo sapiens
tgtccacctccagac

SEQ ID NO: 896299 - DNA, 15 bp, Homo sapiens
gtccacctccagact

SEQ ID NO: 896300 - DNA, 15 bp, Homo sapiens
tccacctccagacta

SEQ ID NO: 896301 - DNA, 15 bp, Homo sapiens
ccacctccagactaa

SEQ ID NO: 896302 - DNA, 15 bp, Homo sapiens
cacctccagactaac

SEQ ID NO: 896303 - DNA, 15 bp, Homo sapiens
acctccagactaaca

SEQ ID NO: 896304 - DNA, 15 bp, Homo sapiens
cctccagactaacag

SEQ ID NO: 896305 - DNA, 15 bp, Homo sapiens
ctccagactaacaga

SEQ ID NO: 896306 - DNA, 15 bp, Homo sapiens
tccagactaacagaa

SEQ ID NO: 896307 - DNA, 15 bp, Homo sapiens
ccagactaacagaag

SEQ ID NO: 896308 - DNA, 15 bp, Homo sapiens
cagactaacagaaga

SEQ ID NO: 896309 - DNA, 15 bp, Homo sapiens
agactaacagaagag

SEQ ID NO: 896310 - DNA, 15 bp, Homo sapiens
gactaacagaagagc

SEQ ID NO: 896311 - DNA, 15 bp, Homo sapiens
actaacagaagagca

SEQ ID NO: 896312 - DNA, 15 bp, Homo sapiens
ctaacagaagagcag

SEQ ID NO: 896313 - DNA, 15 bp, Homo sapiens
taacagaagagcagc

SEQ ID NO: 896314 - DNA, 15 bp, Homo sapiens
aacagaagagcagca

SEQ ID NO: 896315 - DNA, 15 bp, Homo sapiens
acagaagagcagcac

SEQ ID NO: 896316 - DNA, 15 bp, Homo sapiens
cagaagagcagcact

SEQ ID NO: 896317 - DNA, 15 bp, Homo sapiens
agaagagcagcactg

SEQ ID NO: 896318 - DNA, 15 bp, Homo sapiens
gaagagcagcactgt

SEQ ID NO: 896319 - DNA, 15 bp, Homo sapiens
aagagcagcactgtt

SEQ ID NO: 896320 - DNA, 15 bp, Homo sapiens
agagcagcactgttt

SEQ ID NO: 896321 - DNA, 15 bp, Homo sapiens
gagcagcactgtttt

SEQ ID NO: 896322 - DNA, 15 bp, Homo sapiens
agcagcactgttttt

SEQ ID NO: 896323 - DNA, 15 bp, Homo sapiens
gcagcactgtttttg

SEQ ID NO: 896324 - DNA, 15 bp, Homo sapiens
cagcactgtttttgt

SEQ ID NO: 896325 - DNA, 15 bp, Homo sapiens
agcactgtttttgtt

SEQ ID NO: 896326 - DNA, 15 bp, Homo sapiens
gcactgtttttgttt

SEQ ID NO: 896327 - DNA, 15 bp, Homo sapiens
cactgtttttgtttt

SEQ ID NO: 896328 - DNA, 15 bp, Homo sapiens
actgtttttgtttta

SEQ ID NO: 896329 - DNA, 15 bp, Homo sapiens
ctgtttttgttttag

SEQ ID NO: 896330 - DNA, 15 bp, Homo sapiens
tgtttttgttttagt

SEQ ID NO: 896331 - DNA, 15 bp, Homo sapiens
gtttttgttttagtt

SEQ ID NO: 896332 - DNA, 15 bp, Homo sapiens
tttttgttttagttc

SEQ ID NO: 896333 - DNA, 15 bp, Homo sapiens
ttttgttttagttcc

SEQ ID NO: 896334 - DNA, 15 bp, Homo sapiens
tttgttttagttccc

SEQ ID NO: 896335 - DNA, 15 bp, Homo sapiens
ttgttttagttccca

SEQ ID NO: 896336 - DNA, 15 bp, Homo sapiens
tgttttagttcccag

SEQ ID NO: 896337 - DNA, 15 bp, Homo sapiens
gttttagttcccagt

SEQ ID NO: 896338 - DNA, 15 bp, Homo sapiens
ttttagttcccagtg

SEQ ID NO: 896339 - DNA, 15 bp, Homo sapiens
tttagttcccagtgg

SEQ ID NO: 896340 - DNA, 15 bp, Homo sapiens
ttagttcccagtgga

SEQ ID NO: 896341 - DNA, 15 bp, Homo sapiens
tagttcccagtggaa

SEQ ID NO: 896342 - DNA, 15 bp, Homo sapiens
agttcccagtggaat

SEQ ID NO: 896343 - DNA, 15 bp, Homo sapiens
gttcccagtggaata

SEQ ID NO: 896344 - DNA, 15 bp, Homo sapiens
ttcccagtggaatag

SEQ ID NO: 896345 - DNA, 15 bp, Homo sapiens
tcccagtggaatagc

SEQ ID NO: 896346 - DNA, 15 bp, Homo sapiens
cccagtggaatagct

SEQ ID NO: 896347 - DNA, 15 bp, Homo sapiens
ccagtggaatagctg

SEQ ID NO: 896348 - DNA, 15 bp, Homo sapiens
cagtggaatagctga

SEQ ID NO: 896349 - DNA, 15 bp, Homo sapiens
agtggaatagctgag

SEQ ID NO: 896350 - DNA, 15 bp, Homo sapiens
gtggaatagctgagc

SEQ ID NO: 896351 - DNA, 15 bp, Homo sapiens
tggaatagctgagca

SEQ ID NO: 896352 - DNA, 15 bp, Homo sapiens
ggaatagctgagcat

SEQ ID NO: 896353 - DNA, 15 bp, Homo sapiens
gaatagctgagcata

SEQ ID NO: 896354 - DNA, 15 bp, Homo sapiens
aatagctgagcatat

SEQ ID NO: 896355 - DNA, 15 bp, Homo sapiens
atagctgagcatatt

SEQ ID NO: 896356 - DNA, 15 bp, Homo sapiens
tagctgagcatattg

SEQ ID NO: 896357 - DNA, 15 bp, Homo sapiens
agctgagcatattgt

SEQ ID NO: 896358 - DNA, 15 bp, Homo sapiens
gctgagcatattgta

SEQ ID NO: 896359 - DNA, 15 bp, Homo sapiens
ctgagcatattgtat

SEQ ID NO: 896360 - DNA, 15 bp, Homo sapiens
tgagcatattgtatc

SEQ ID NO: 896361 - DNA, 15 bp, Homo sapiens
gagcatattgtatct

SEQ ID NO: 896362 - DNA, 15 bp, Homo sapiens
agcatattgtatctg

SEQ ID NO: 896363 - DNA, 15 bp, Homo sapiens
gcatattgtatctgc

SEQ ID NO: 896364 - DNA, 15 bp, Homo sapiens
catattgtatctgcc

SEQ ID NO: 896365 - DNA, 15 bp, Homo sapiens
atattgtatctgccc

SEQ ID NO: 896366 - DNA, 15 bp, Homo sapiens
tattgtatctgccca

SEQ ID NO: 896367 - DNA, 15 bp, Homo sapiens
attgtatctgcccag

SEQ ID NO: 896368 - DNA, 15 bp, Homo sapiens
ttgtatctgcccagg

SEQ ID NO: 896369 - DNA, 15 bp, Homo sapiens
tgtatctgcccaggg

SEQ ID NO: 896370 - DNA, 15 bp, Homo sapiens
gtatctgcccaggga

SEQ ID NO: 896371 - DNA, 15 bp, Homo sapiens
tatctgcccagggaa

SEQ ID NO: 896372 - DNA, 15 bp, Homo sapiens
atctgcccagggaag

SEQ ID NO: 896373 - DNA, 15 bp, Homo sapiens
tctgcccagggaagt

SEQ ID NO: 896374 - DNA, 15 bp, Homo sapiens
ctgcccagggaagtc

SEQ ID NO: 896375 - DNA, 15 bp, Homo sapiens
tgcccagggaagtca

SEQ ID NO: 896376 - DNA, 15 bp, Homo sapiens
gcccagggaagtcaa

SEQ ID NO: 896377 - DNA, 15 bp, Homo sapiens
cccagggaagtcaat

SEQ ID NO: 896378 - DNA, 15 bp, Homo sapiens
ccagggaagtcaata

SEQ ID NO: 896379 - DNA, 15 bp, Homo sapiens
cagggaagtcaatac

SEQ ID NO: 896380 - DNA, 15 bp, Homo sapiens
agggaagtcaatacc

SEQ ID NO: 896381 - DNA, 15 bp, Homo sapiens
gggaagtcaatacca

SEQ ID NO: 896382 - DNA, 15 bp, Homo sapiens
ggaagtcaataccag

SEQ ID NO: 896383 - DNA, 15 bp, Homo sapiens
gaagtcaataccagg

SEQ ID NO: 896384 - DNA, 15 bp, Homo sapiens
aagtcaataccaggg

SEQ ID NO: 896385 - DNA, 15 bp, Homo sapiens
agtcaataccaggga

SEQ ID NO: 896386 - DNA, 15 bp, Homo sapiens
gtcaataccagggag

SEQ ID NO: 896387 - DNA, 15 bp, Homo sapiens
tcaataccagggaga

SEQ ID NO: 896388 - DNA, 15 bp, Homo sapiens
caataccagggagaa

SEQ ID NO: 896389 - DNA, 15 bp, Homo sapiens
aataccagggagaag

SEQ ID NO: 896390 - DNA, 15 bp, Homo sapiens
ataccagggagaaga

SEQ ID NO: 896391 - DNA, 15 bp, Homo sapiens
taccagggagaagac

SEQ ID NO: 896392 - DNA, 15 bp, Homo sapiens
accagggagaagaca

SEQ ID NO: 896393 - DNA, 15 bp, Homo sapiens
ccagggagaagacag

SEQ ID NO: 896394 - DNA, 15 bp, Homo sapiens
cagggagaagacagg

SEQ ID NO: 896395 - DNA, 15 bp, Homo sapiens
agggagaagacagga

SEQ ID NO: 896396 - DNA, 15 bp, Homo sapiens
gggagaagacaggat

SEQ ID NO: 896397 - DNA, 15 bp, Homo sapiens
ggagaagacaggatg

SEQ ID NO: 896398 - DNA, 15 bp, Homo sapiens
gagaagacaggatga

SEQ ID NO: 896399 - DNA, 15 bp, Homo sapiens
agaagacaggatgag

SEQ ID NO: 896400 - DNA, 15 bp, Homo sapiens
gaagacaggatgaga

SEQ ID NO: 896401 - DNA, 15 bp, Homo sapiens
aagacaggatgagaa

SEQ ID NO: 896402 - DNA, 15 bp, Homo sapiens
agacaggatgagaag

SEQ ID NO: 896403 - DNA, 15 bp, Homo sapiens
gacaggatgagaagt

SEQ ID NO: 896404 - DNA, 15 bp, Homo sapiens
acaggatgagaagtg

SEQ ID NO: 896405 - DNA, 15 bp, Homo sapiens
caggatgagaagtgt

SEQ ID NO: 896406 - DNA, 15 bp, Homo sapiens
aggatgagaagtgtt

SEQ ID NO: 896407 - DNA, 15 bp, Homo sapiens
ggatgagaagtgttc

SEQ ID NO: 896408 - DNA, 15 bp, Homo sapiens
gatgagaagtgttca

SEQ ID NO: 896409 - DNA, 15 bp, Homo sapiens
atgagaagtgttcat

SEQ ID NO: 896410 - DNA, 15 bp, Homo sapiens
tgagaagtgttcatg

SEQ ID NO: 896411 - DNA, 15 bp, Homo sapiens
gagaagtgttcatga

SEQ ID NO: 896412 - DNA, 15 bp, Homo sapiens
agaagtgttcatgac

SEQ ID NO: 896413 - DNA, 15 bp, Homo sapiens
gaagtgttcatgact

SEQ ID NO: 896414 - DNA, 15 bp, Homo sapiens
aagtgttcatgactc

SEQ ID NO: 896415 - DNA, 15 bp, Homo sapiens
agtgttcatgactca

SEQ ID NO: 896416 - DNA, 15 bp, Homo sapiens
gtgttcatgactcat

SEQ ID NO: 896417 - DNA, 15 bp, Homo sapiens
tgttcatgactcata

SEQ ID NO: 896418 - DNA, 15 bp, Homo sapiens
gttcatgactcatag

SEQ ID NO: 896419 - DNA, 15 bp, Homo sapiens
ttcatgactcatagc

SEQ ID NO: 896420 - DNA, 15 bp, Homo sapiens
tcatgactcatagct

SEQ ID NO: 896421 - DNA, 15 bp, Homo sapiens
catgactcatagctc

SEQ ID NO: 896422 - DNA, 15 bp, Homo sapiens
atgactcatagctca

SEQ ID NO: 896423 - DNA, 15 bp, Homo sapiens
tgactcatagctcac

SEQ ID NO: 896424 - DNA, 15 bp, Homo sapiens
gactcatagctcact

SEQ ID NO: 896425 - DNA, 15 bp, Homo sapiens
actcatagctcactt

SEQ ID NO: 896426 - DNA, 15 bp, Homo sapiens
ctcatagctcactta

SEQ ID NO: 896427 - DNA, 15 bp, Homo sapiens
tcatagctcacttag

SEQ ID NO: 896428 - DNA, 15 bp, Homo sapiens
catagctcacttagg

SEQ ID NO: 896429 - DNA, 15 bp, Homo sapiens
atagctcacttaggt

SEQ ID NO: 896430 - DNA, 15 bp, Homo sapiens
tagctcacttaggta

SEQ ID NO: 896431 - DNA, 15 bp, Homo sapiens
agctcacttaggtat

SEQ ID NO: 896432 - DNA, 15 bp, Homo sapiens
gctcacttaggtata

SEQ ID NO: 896433 - DNA, 15 bp, Homo sapiens
ctcacttaggtatat

SEQ ID NO: 896434 - DNA, 15 bp, Homo sapiens
tcacttaggtatatg

SEQ ID NO: 896435 - DNA, 15 bp, Homo sapiens
cacttaggtatatgg

SEQ ID NO: 896436 - DNA, 15 bp, Homo sapiens
acttaggtatatggg

SEQ ID NO: 896437 - DNA, 15 bp, Homo sapiens
cttaggtatatggga

SEQ ID NO: 896438 - DNA, 15 bp, Homo sapiens
ttaggtatatgggag

SEQ ID NO: 896439 - DNA, 15 bp, Homo sapiens
taggtatatgggagc

SEQ ID NO: 896440 - DNA, 15 bp, Homo sapiens
aggtatatgggagca

SEQ ID NO: 896441 - DNA, 15 bp, Homo sapiens
ggtatatgggagcat

SEQ ID NO: 896442 - DNA, 15 bp, Homo sapiens
gtatatgggagcatg

SEQ ID NO: 896443 - DNA, 15 bp, Homo sapiens
tatatgggagcatgt

SEQ ID NO: 896444 - DNA, 15 bp, Homo sapiens
atatgggagcatgtc

SEQ ID NO: 896445 - DNA, 15 bp, Homo sapiens
tatgggagcatgtcc

SEQ ID NO: 896446 - DNA, 15 bp, Homo sapiens
atgggagcatgtcca

SEQ ID NO: 896447 - DNA, 15 bp, Homo sapiens
tgggagcatgtccac

SEQ ID NO: 896448 - DNA, 15 bp, Homo sapiens
gggagcatgtccaca

SEQ ID NO: 896449 - DNA, 15 bp, Homo sapiens
ggagcatgtccacag

SEQ ID NO: 896450 - DNA, 15 bp, Homo sapiens
gagcatgtccacagg

SEQ ID NO: 896451 - DNA, 15 bp, Homo sapiens
agcatgtccacagga

SEQ ID NO: 896452 - DNA, 15 bp, Homo sapiens
gcatgtccacaggaa

SEQ ID NO: 896453 - DNA, 15 bp, Homo sapiens
catgtccacaggaat

SEQ ID NO: 896454 - DNA, 15 bp, Homo sapiens
atgtccacaggaata

SEQ ID NO: 896455 - DNA, 15 bp, Homo sapiens
tgtccacaggaatat

SEQ ID NO: 896456 - DNA, 15 bp, Homo sapiens
gtccacaggaatatt

SEQ ID NO: 896457 - DNA, 15 bp, Homo sapiens
tccacaggaatatta

SEQ ID NO: 896458 - DNA, 15 bp, Homo sapiens
ccacaggaatattag

SEQ ID NO: 896459 - DNA, 15 bp, Homo sapiens
cacaggaatattagc

SEQ ID NO: 896460 - DNA, 15 bp, Homo sapiens
acaggaatattagct

SEQ ID NO: 896461 - DNA, 15 bp, Homo sapiens
caggaatattagctc

SEQ ID NO: 896462 - DNA, 15 bp, Homo sapiens
aggaatattagctct

SEQ ID NO: 896463 - DNA, 15 bp, Homo sapiens
ggaatattagctctt

SEQ ID NO: 896464 - DNA, 15 bp, Homo sapiens
gaatattagctcttc

SEQ ID NO: 896465 - DNA, 15 bp, Homo sapiens
aatattagctcttct

SEQ ID NO: 896466 - DNA, 15 bp, Homo sapiens
atattagctcttctg

SEQ ID NO: 896467 - DNA, 15 bp, Homo sapiens
tattagctcttctgc

SEQ ID NO: 896468 - DNA, 15 bp, Homo sapiens
attagctcttctgcc

SEQ ID NO: 896469 - DNA, 15 bp, Homo sapiens
ttagctcttctgcct

SEQ ID NO: 896470 - DNA, 15 bp, Homo sapiens
tagctcttctgcctg

SEQ ID NO: 896471 - DNA, 15 bp, Homo sapiens
agctcttctgcctgg

SEQ ID NO: 896472 - DNA, 15 bp, Homo sapiens
gctcttctgcctggt

SEQ ID NO: 896473 - DNA, 15 bp, Homo sapiens
ctcttctgcctggta

SEQ ID NO: 896474 - DNA, 15 bp, Homo sapiens
tcttctgcctggtac

SEQ ID NO: 896475 - DNA, 15 bp, Homo sapiens
cttctgcctggtacc

SEQ ID NO: 896476 - DNA, 15 bp, Homo sapiens
ttctgcctggtaccc

SEQ ID NO: 896477 - DNA, 15 bp, Homo sapiens
tctgcctggtacccc

SEQ ID NO: 896478 - DNA, 15 bp, Homo sapiens
ctgcctggtacccca

SEQ ID NO: 896479 - DNA, 15 bp, Homo sapiens
tgcctggtaccccac

SEQ ID NO: 896480 - DNA, 15 bp, Homo sapiens
gcctggtaccccact

SEQ ID NO: 896481 - DNA, 15 bp, Homo sapiens
cctggtaccccactg

SEQ ID NO: 896482 - DNA, 15 bp, Homo sapiens
ctggtaccccactgg

SEQ ID NO: 896483 - DNA, 15 bp, Homo sapiens
tggtaccccactggg

SEQ ID NO: 896484 - DNA, 15 bp, Homo sapiens
ggtaccccactgggg

SEQ ID NO: 896485 - DNA, 15 bp, Homo sapiens
gtaccccactgggga

SEQ ID NO: 896486 - DNA, 15 bp, Homo sapiens
taccccactggggat

SEQ ID NO: 896487 - DNA, 15 bp, Homo sapiens
accccactggggata

SEQ ID NO: 896488 - DNA, 15 bp, Homo sapiens
ccccactggggatac

SEQ ID NO: 896489 - DNA, 15 bp, Homo sapiens
cccactggggatact

SEQ ID NO: 896490 - DNA, 15 bp, Homo sapiens
ccactggggatactc

SEQ ID NO: 896491 - DNA, 15 bp, Homo sapiens
cactggggatactct

SEQ ID NO: 896492 - DNA, 15 bp, Homo sapiens
actggggatactctt

SEQ ID NO: 896493 - DNA, 15 bp, Homo sapiens
ctggggatactctta

SEQ ID NO: 896494 - DNA, 15 bp, Homo sapiens
tggggatactcttaa

SEQ ID NO: 896495 - DNA, 15 bp, Homo sapiens
ggggatactcttaag

SEQ ID NO: 896496 - DNA, 15 bp, Homo sapiens
gggatactcttaaga

SEQ ID NO: 896497 - DNA, 15 bp, Homo sapiens
ggatactcttaagac

SEQ ID NO: 896498 - DNA, 15 bp, Homo sapiens
gatactcttaagacc

SEQ ID NO: 896499 - DNA, 15 bp, Homo sapiens
atactcttaagaccc

SEQ ID NO: 896500 - DNA, 15 bp, Homo sapiens
tactcttaagaccct

SEQ ID NO: 896501 - DNA, 15 bp, Homo sapiens
actcttaagaccctt

SEQ ID NO: 896502 - DNA, 15 bp, Homo sapiens
ctcttaagacccttg

SEQ ID NO: 896503 - DNA, 15 bp, Homo sapiens
tcttaagacccttgg

SEQ ID NO: 896504 - DNA, 15 bp, Homo sapiens
cttaagacccttggc

SEQ ID NO: 896505 - DNA, 15 bp, Homo sapiens
ttaagacccttggct

SEQ ID NO: 896506 - DNA, 15 bp, Homo sapiens
taagacccttggctg

SEQ ID NO: 896507 - DNA, 15 bp, Homo sapiens
aagacccttggctgc

SEQ ID NO: 896508 - DNA, 15 bp, Homo sapiens
agacccttggctgct

SEQ ID NO: 896509 - DNA, 15 bp, Homo sapiens
gacccttggctgctg

SEQ ID NO: 896510 - DNA, 15 bp, Homo sapiens
acccttggctgctgt

SEQ ID NO: 896511 - DNA, 15 bp, Homo sapiens
cccttggctgctgtg

SEQ ID NO: 896512 - DNA, 15 bp, Homo sapiens
ccttggctgctgtgc

SEQ ID NO: 896513 - DNA, 15 bp, Homo sapiens
cttggctgctgtgcc

SEQ ID NO: 896514 - DNA, 15 bp, Homo sapiens
ttggctgctgtgccc

SEQ ID NO: 896515 - DNA, 15 bp, Homo sapiens
tggctgctgtgccct

SEQ ID NO: 896516 - DNA, 15 bp, Homo sapiens
ggctgctgtgcccta

SEQ ID NO: 896517 - DNA, 15 bp, Homo sapiens
gctgctgtgccctac

SEQ ID NO: 896518 - DNA, 15 bp, Homo sapiens
ctgctgtgccctacc

SEQ ID NO: 896519 - DNA, 15 bp, Homo sapiens
tgctgtgccctaccc

SEQ ID NO: 896520 - DNA, 15 bp, Homo sapiens
gctgtgccctaccct

SEQ ID NO: 896521 - DNA, 15 bp, Homo sapiens
ctgtgccctaccctg

SEQ ID NO: 896522 - DNA, 15 bp, Homo sapiens
tgtgccctaccctgc

SEQ ID NO: 896523 - DNA, 15 bp, Homo sapiens
gtgccctaccctgca

SEQ ID NO: 896524 - DNA, 15 bp, Homo sapiens
tgccctaccctgcac

SEQ ID NO: 896525 - DNA, 15 bp, Homo sapiens
gccctaccctgcacc

SEQ ID NO: 896526 - DNA, 15 bp, Homo sapiens
ccctaccctgcacct

SEQ ID NO: 896527 - DNA, 15 bp, Homo sapiens
cctaccctgcacctg

SEQ ID NO: 896528 - DNA, 15 bp, Homo sapiens
ctaccctgcacctgt

SEQ ID NO: 896529 - DNA, 15 bp, Homo sapiens
taccctgcacctgtc

SEQ ID NO: 896530 - DNA, 15 bp, Homo sapiens
accctgcacctgtct

SEQ ID NO: 896531 - DNA, 15 bp, Homo sapiens
ccctgcacctgtctc

SEQ ID NO: 896532 - DNA, 15 bp, Homo sapiens
cctgcacctgtctct

SEQ ID NO: 896533 - DNA, 15 bp, Homo sapiens
ctgcacctgtctctt

SEQ ID NO: 896534 - DNA, 15 bp, Homo sapiens
tgcacctgtctctta

SEQ ID NO: 896535 - DNA, 15 bp, Homo sapiens
gcacctgtctcttat

SEQ ID NO: 896536 - DNA, 15 bp, Homo sapiens
cacctgtctcttatt

SEQ ID NO: 896537 - DNA, 15 bp, Homo sapiens
acctgtctcttattt

SEQ ID NO: 896538 - DNA, 15 bp, Homo sapiens
cctgtctcttatttt

SEQ ID NO: 896539 - DNA, 15 bp, Homo sapiens
ctgtctcttattttt

SEQ ID NO: 896540 - DNA, 15 bp, Homo sapiens
tgtctcttatttttc

SEQ ID NO: 896541 - DNA, 15 bp, Homo sapiens
gtctcttatttttcc

SEQ ID NO: 896542 - DNA, 15 bp, Homo sapiens
tctcttatttttcct

SEQ ID NO: 896543 - DNA, 15 bp, Homo sapiens
ctcttatttttcctt

SEQ ID NO: 896544 - DNA, 15 bp, Homo sapiens
tcttatttttccttc

SEQ ID NO: 896545 - DNA, 15 bp, Homo sapiens
cttatttttccttcc

SEQ ID NO: 896546 - DNA, 15 bp, Homo sapiens
ttatttttccttcct

SEQ ID NO: 896547 - DNA, 15 bp, Homo sapiens
tatttttccttcctt

SEQ ID NO: 896548 - DNA, 15 bp, Homo sapiens
atttttccttccttt

SEQ ID NO: 896549 - DNA, 15 bp, Homo sapiens
tttttccttcctttt

SEQ ID NO: 896550 - DNA, 15 bp, Homo sapiens
ttttccttccttttc

SEQ ID NO: 896551 - DNA, 15 bp, Homo sapiens
tttccttccttttct

SEQ ID NO: 896552 - DNA, 15 bp, Homo sapiens
ttccttccttttctt

SEQ ID NO: 896553 - DNA, 15 bp, Homo sapiens
tccttccttttcttc

SEQ ID NO: 896554 - DNA, 15 bp, Homo sapiens
ccttccttttcttct

SEQ ID NO: 896555 - DNA, 15 bp, Homo sapiens
cttccttttcttctt

SEQ ID NO: 896556 - DNA, 15 bp, Homo sapiens
ttccttttcttcttt

SEQ ID NO: 896557 - DNA, 15 bp, Homo sapiens
tccttttcttctttt

SEQ ID NO: 896558 - DNA, 15 bp, Homo sapiens
ccttttcttcttttt

SEQ ID NO: 896559 - DNA, 15 bp, Homo sapiens
cttttcttcttttta

SEQ ID NO: 896560 - DNA, 15 bp, Homo sapiens
ttttcttctttttac

SEQ ID NO: 896561 - DNA, 15 bp, Homo sapiens
tttcttctttttacc

SEQ ID NO: 896562 - DNA, 15 bp, Homo sapiens
ttcttctttttacct

SEQ ID NO: 896563 - DNA, 15 bp, Homo sapiens
tcttctttttacctt

SEQ ID NO: 896564 - DNA, 15 bp, Homo sapiens
cttctttttaccttg

SEQ ID NO: 896565 - DNA, 15 bp, Homo sapiens
ttctttttaccttgt

SEQ ID NO: 896566 - DNA, 15 bp, Homo sapiens
tctttttaccttgta

SEQ ID NO: 896567 - DNA, 15 bp, Homo sapiens
ctttttaccttgtac

SEQ ID NO: 896568 - DNA, 15 bp, Homo sapiens
tttttaccttgtacc

SEQ ID NO: 896569 - DNA, 15 bp, Homo sapiens
ttttaccttgtaccc

SEQ ID NO: 896570 - DNA, 15 bp, Homo sapiens
tttaccttgtaccct

SEQ ID NO: 896571 - DNA, 15 bp, Homo sapiens
ttaccttgtaccctg

SEQ ID NO: 896572 - DNA, 15 bp, Homo sapiens
taccttgtaccctgc

SEQ ID NO: 896573 - DNA, 15 bp, Homo sapiens
accttgtaccctgcc

SEQ ID NO: 896574 - DNA, 15 bp, Homo sapiens
ccttgtaccctgcct

SEQ ID NO: 896575 - DNA, 15 bp, Homo sapiens
cttgtaccctgcctt

SEQ ID NO: 896576 - DNA, 15 bp, Homo sapiens
ttgtaccctgccttt

SEQ ID NO: 896577 - DNA, 15 bp, Homo sapiens
tgtaccctgcctttt

SEQ ID NO: 896578 - DNA, 15 bp, Homo sapiens
gtaccctgcctttta

SEQ ID NO: 896579 - DNA, 15 bp, Homo sapiens
taccctgccttttat

SEQ ID NO: 896580 - DNA, 15 bp, Homo sapiens
accctgccttttatg

SEQ ID NO: 896581 - DNA, 15 bp, Homo sapiens
ccctgccttttatga

SEQ ID NO: 896582 - DNA, 15 bp, Homo sapiens
cctgccttttatgat

SEQ ID NO: 896583 - DNA, 15 bp, Homo sapiens
ctgccttttatgatc

SEQ ID NO: 896584 - DNA, 15 bp, Homo sapiens
tgccttttatgatcc

SEQ ID NO: 896585 - DNA, 15 bp, Homo sapiens
gccttttatgatccc

SEQ ID NO: 896586 - DNA, 15 bp, Homo sapiens
ccttttatgatccca

SEQ ID NO: 896587 - DNA, 15 bp, Homo sapiens
cttttatgatcccaa

SEQ ID NO: 896588 - DNA, 15 bp, Homo sapiens
ttttatgatcccaac

SEQ ID NO: 896589 - DNA, 15 bp, Homo sapiens
tttatgatcccaacc

SEQ ID NO: 896590 - DNA, 15 bp, Homo sapiens
ttatgatcccaacct

SEQ ID NO: 896591 - DNA, 15 bp, Homo sapiens
tatgatcccaacctc

SEQ ID NO: 896592 - DNA, 15 bp, Homo sapiens
atgatcccaacctct

SEQ ID NO: 896593 - DNA, 15 bp, Homo sapiens
tgatcccaacctctg

SEQ ID NO: 896594 - DNA, 15 bp, Homo sapiens
gatcccaacctctgc

SEQ ID NO: 896595 - DNA, 15 bp, Homo sapiens
atcccaacctctgca

SEQ ID NO: 896596 - DNA, 15 bp, Homo sapiens
tcccaacctctgcat

SEQ ID NO: 896597 - DNA, 15 bp, Homo sapiens
cccaacctctgcata

SEQ ID NO: 896598 - DNA, 15 bp, Homo sapiens
ccaacctctgcatat

SEQ ID NO: 896599 - DNA, 15 bp, Homo sapiens
caacctctgcatatc

SEQ ID NO: 896600 - DNA, 15 bp, Homo sapiens
aacctctgcatatca

SEQ ID NO: 896601 - DNA, 15 bp, Homo sapiens
acctctgcatatcac

SEQ ID NO: 896602 - DNA, 15 bp, Homo sapiens
cctctgcatatcact

SEQ ID NO: 896603 - DNA, 15 bp, Homo sapiens
ctctgcatatcactt

SEQ ID NO: 896604 - DNA, 15 bp, Homo sapiens
tctgcatatcactta

SEQ ID NO: 896605 - DNA, 15 bp, Homo sapiens
ctgcatatcacttat

SEQ ID NO: 896606 - DNA, 15 bp, Homo sapiens
tgcatatcacttatt

SEQ ID NO: 896607 - DNA, 15 bp, Homo sapiens
gcatatcacttattc

SEQ ID NO: 896608 - DNA, 15 bp, Homo sapiens
catatcacttattcc

SEQ ID NO: 896609 - DNA, 15 bp, Homo sapiens
atatcacttattcct

SEQ ID NO: 896610 - DNA, 15 bp, Homo sapiens
tatcacttattcctg

SEQ ID NO: 896611 - DNA, 15 bp, Homo sapiens
atcacttattcctgg

SEQ ID NO: 896612 - DNA, 15 bp, Homo sapiens
tcacttattcctggg

SEQ ID NO: 896613 - DNA, 15 bp, Homo sapiens
cacttattcctggga

SEQ ID NO: 896614 - DNA, 15 bp, Homo sapiens
acttattcctgggag

SEQ ID NO: 896615 - DNA, 15 bp, Homo sapiens
cttattcctgggaga

SEQ ID NO: 896616 - DNA, 15 bp, Homo sapiens
ttattcctgggagag

SEQ ID NO: 896617 - DNA, 15 bp, Homo sapiens
tattcctgggagagg

SEQ ID NO: 896618 - DNA, 15 bp, Homo sapiens
attcctgggagaggg

SEQ ID NO: 896619 - DNA, 15 bp, Homo sapiens
ttcctgggagaggga

SEQ ID NO: 896620 - DNA, 15 bp, Homo sapiens
tcctgggagagggat

SEQ ID NO: 896621 - DNA, 15 bp, Homo sapiens
cctgggagagggatc

SEQ ID NO: 896622 - DNA, 15 bp, Homo sapiens
ctgggagagggatca

SEQ ID NO: 896623 - DNA, 15 bp, Homo sapiens
tgggagagggatcat

SEQ ID NO: 896624 - DNA, 15 bp, Homo sapiens
gggagagggatcata

SEQ ID NO: 896625 - DNA, 15 bp, Homo sapiens
ggagagggatcataa

SEQ ID NO: 896626 - DNA, 15 bp, Homo sapiens
gagagggatcataag

SEQ ID NO: 896627 - DNA, 15 bp, Homo sapiens
agagggatcataagc

SEQ ID NO: 896628 - DNA, 15 bp, Homo sapiens
gagggatcataagcc

SEQ ID NO: 896629 - DNA, 15 bp, Homo sapiens
agggatcataagcct

SEQ ID NO: 896630 - DNA, 15 bp, Homo sapiens
gggatcataagccta

SEQ ID NO: 896631 - DNA, 15 bp, Homo sapiens
ggatcataagcctaa

SEQ ID NO: 896632 - DNA, 15 bp, Homo sapiens
gatcataagcctaaa

SEQ ID NO: 896633 - DNA, 15 bp, Homo sapiens
atcataagcctaaaa

SEQ ID NO: 896634 - DNA, 15 bp, Homo sapiens
tcataagcctaaaag

SEQ ID NO: 896635 - DNA, 15 bp, Homo sapiens
cataagcctaaaaga

SEQ ID NO: 896636 - DNA, 15 bp, Homo sapiens
ataagcctaaaagag

SEQ ID NO: 896637 - DNA, 15 bp, Homo sapiens
taagcctaaaagagt

SEQ ID NO: 896638 - DNA, 15 bp, Homo sapiens
aagcctaaaagagtt

SEQ ID NO: 896639 - DNA, 15 bp, Homo sapiens
agcctaaaagagtta

SEQ ID NO: 896640 - DNA, 15 bp, Homo sapiens
gcctaaaagagttat

SEQ ID NO: 896641 - DNA, 15 bp, Homo sapiens
cctaaaagagttatt

SEQ ID NO: 896642 - DNA, 15 bp, Homo sapiens
ctaaaagagttattt

SEQ ID NO: 896643 - DNA, 15 bp, Homo sapiens
taaaagagttatttc

SEQ ID NO: 896644 - DNA, 15 bp, Homo sapiens
aaaagagttatttcc

SEQ ID NO: 896645 - DNA, 15 bp, Homo sapiens
aaagagttatttcca

SEQ ID NO: 896646 - DNA, 15 bp, Homo sapiens
aagagttatttccat

SEQ ID NO: 896647 - DNA, 15 bp, Homo sapiens
agagttatttccatt

SEQ ID NO: 896648 - DNA, 15 bp, Homo sapiens
gagttatttccattc

SEQ ID NO: 896649 - DNA, 15 bp, Homo sapiens
agttatttccattct

SEQ ID NO: 896650 - DNA, 15 bp, Homo sapiens
gttatttccattctt

SEQ ID NO: 896651 - DNA, 15 bp, Homo sapiens
ttatttccattcttt

SEQ ID NO: 896652 - DNA, 15 bp, Homo sapiens
tatttccattctttc

SEQ ID NO: 896653 - DNA, 15 bp, Homo sapiens
atttccattctttct

SEQ ID NO: 896654 - DNA, 15 bp, Homo sapiens
tttccattctttctg

SEQ ID NO: 896655 - DNA, 15 bp, Homo sapiens
ttccattctttctgc

SEQ ID NO: 896656 - DNA, 15 bp, Homo sapiens
tccattctttctgcc

SEQ ID NO: 896657 - DNA, 15 bp, Homo sapiens
ccattctttctgccc

SEQ ID NO: 896658 - DNA, 15 bp, Homo sapiens
cattctttctgccca

SEQ ID NO: 896659 - DNA, 15 bp, Homo sapiens
attctttctgcccat

SEQ ID NO: 896660 - DNA, 15 bp, Homo sapiens
ttctttctgcccatt

SEQ ID NO: 896661 - DNA, 15 bp, Homo sapiens
tctttctgcccattc

SEQ ID NO: 896662 - DNA, 15 bp, Homo sapiens
ctttctgcccattcc

SEQ ID NO: 896663 - DNA, 15 bp, Homo sapiens
tttctgcccattcct

SEQ ID NO: 896664 - DNA, 15 bp, Homo sapiens
ttctgcccattcctc

SEQ ID NO: 896665 - DNA, 15 bp, Homo sapiens
tctgcccattcctca

SEQ ID NO: 896666 - DNA, 15 bp, Homo sapiens
ctgcccattcctcat

SEQ ID NO: 896667 - DNA, 15 bp, Homo sapiens
tgcccattcctcatg

SEQ ID NO: 896668 - DNA, 15 bp, Homo sapiens
gcccattcctcatgt

SEQ ID NO: 896669 - DNA, 15 bp, Homo sapiens
cccattcctcatgta

SEQ ID NO: 896670 - DNA, 15 bp, Homo sapiens
ccattcctcatgtag

SEQ ID NO: 896671 - DNA, 15 bp, Homo sapiens
cattcctcatgtaga

SEQ ID NO: 896672 - DNA, 15 bp, Homo sapiens
attcctcatgtagaa

SEQ ID NO: 896673 - DNA, 15 bp, Homo sapiens
ttcctcatgtagaaa

SEQ ID NO: 896674 - DNA, 15 bp, Homo sapiens
tcctcatgtagaaag

SEQ ID NO: 896675 - DNA, 15 bp, Homo sapiens
cctcatgtagaaaga

SEQ ID NO: 896676 - DNA, 15 bp, Homo sapiens
ctcatgtagaaagac

SEQ ID NO: 896677 - DNA, 15 bp, Homo sapiens
tcatgtagaaagact

SEQ ID NO: 896678 - DNA, 15 bp, Homo sapiens
catgtagaaagactg

SEQ ID NO: 896679 - DNA, 15 bp, Homo sapiens
atgtagaaagactga

SEQ ID NO: 896680 - DNA, 15 bp, Homo sapiens
tgtagaaagactgag

SEQ ID NO: 896681 - DNA, 15 bp, Homo sapiens
gtagaaagactgagt

SEQ ID NO: 896682 - DNA, 15 bp, Homo sapiens
tagaaagactgagtc

SEQ ID NO: 896683 - DNA, 15 bp, Homo sapiens
agaaagactgagtct

SEQ ID NO: 896684 - DNA, 15 bp, Homo sapiens
gaaagactgagtctg

SEQ ID NO: 896685 - DNA, 15 bp, Homo sapiens
aaagactgagtctgg

SEQ ID NO: 896686 - DNA, 15 bp, Homo sapiens
aagactgagtctggc

SEQ ID NO: 896687 - DNA, 15 bp, Homo sapiens
agactgagtctggct

SEQ ID NO: 896688 - DNA, 15 bp, Homo sapiens
gactgagtctggctt

SEQ ID NO: 896689 - DNA, 15 bp, Homo sapiens
actgagtctggcttg

SEQ ID NO: 896690 - DNA, 15 bp, Homo sapiens
ctgagtctggcttgg

SEQ ID NO: 896691 - DNA, 15 bp, Homo sapiens
tgagtctggcttggc

SEQ ID NO: 896692 - DNA, 15 bp, Homo sapiens
gagtctggcttggct

SEQ ID NO: 896693 - DNA, 15 bp, Homo sapiens
agtctggcttggctt

SEQ ID NO: 896694 - DNA, 15 bp, Homo sapiens
gtctggcttggctta

SEQ ID NO: 896695 - DNA, 15 bp, Homo sapiens
tctggcttggcttaa

SEQ ID NO: 896696 - DNA, 15 bp, Homo sapiens
ctggcttggcttaaa

SEQ ID NO: 896697 - DNA, 15 bp, Homo sapiens
tggcttggcttaaac

SEQ ID NO: 896698 - DNA, 15 bp, Homo sapiens
ggcttggcttaaacc

SEQ ID NO: 896699 - DNA, 15 bp, Homo sapiens
gcttggcttaaacct

SEQ ID NO: 896700 - DNA, 15 bp, Homo sapiens
cttggcttaaacctc

SEQ ID NO: 896701 - DNA, 15 bp, Homo sapiens
ttggcttaaacctcc

SEQ ID NO: 896702 - DNA, 15 bp, Homo sapiens
tggcttaaacctcct

SEQ ID NO: 896703 - DNA, 15 bp, Homo sapiens
ggcttaaacctcctc

SEQ ID NO: 896704 - DNA, 15 bp, Homo sapiens
gcttaaacctcctcc

SEQ ID NO: 896705 - DNA, 15 bp, Homo sapiens
cttaaacctcctccc

SEQ ID NO: 896706 - DNA, 15 bp, Homo sapiens
ttaaacctcctcccc

SEQ ID NO: 896707 - DNA, 15 bp, Homo sapiens
taaacctcctcccct

SEQ ID NO: 896708 - DNA, 15 bp, Homo sapiens
aaacctcctcccctc

SEQ ID NO: 896709 - DNA, 15 bp, Homo sapiens
aacctcctcccctcc

SEQ ID NO: 896710 - DNA, 15 bp, Homo sapiens
acctcctcccctccg

SEQ ID NO: 896711 - DNA, 15 bp, Homo sapiens
cctcctcccctccga

SEQ ID NO: 896712 - DNA, 15 bp, Homo sapiens
ctcctcccctccgag

SEQ ID NO: 896713 - DNA, 15 bp, Homo sapiens
tcctcccctccgagc

SEQ ID NO: 896714 - DNA, 15 bp, Homo sapiens
cctcccctccgagct

SEQ ID NO: 896715 - DNA, 15 bp, Homo sapiens
ctcccctccgagctc

SEQ ID NO: 896716 - DNA, 15 bp, Homo sapiens
tcccctccgagctct

SEQ ID NO: 896717 - DNA, 15 bp, Homo sapiens
cccctccgagctctc

SEQ ID NO: 896718 - DNA, 15 bp, Homo sapiens
ccctccgagctctct

SEQ ID NO: 896719 - DNA, 15 bp, Homo sapiens
cctccgagctctctg

SEQ ID NO: 896720 - DNA, 15 bp, Homo sapiens
ctccgagctctctgt

SEQ ID NO: 896721 - DNA, 15 bp, Homo sapiens
tccgagctctctgtg

SEQ ID NO: 896722 - DNA, 15 bp, Homo sapiens
ccgagctctctgtgc

SEQ ID NO: 896723 - DNA, 15 bp, Homo sapiens
cgagctctctgtgct

SEQ ID NO: 896724 - DNA, 15 bp, Homo sapiens
gagctctctgtgctt

SEQ ID NO: 896725 - DNA, 15 bp, Homo sapiens
agctctctgtgcttt

SEQ ID NO: 896726 - DNA, 15 bp, Homo sapiens
gctctctgtgctttc

SEQ ID NO: 896727 - DNA, 15 bp, Homo sapiens
ctctctgtgctttct

SEQ ID NO: 896728 - DNA, 15 bp, Homo sapiens
tctctgtgctttctg

SEQ ID NO: 896729 - DNA, 15 bp, Homo sapiens
ctctgtgctttctgt

SEQ ID NO: 896730 - DNA, 15 bp, Homo sapiens
tctgtgctttctgtc

SEQ ID NO: 896731 - DNA, 15 bp, Homo sapiens
ctgtgctttctgtct

SEQ ID NO: 896732 - DNA, 15 bp, Homo sapiens
tgtgctttctgtctt

SEQ ID NO: 896733 - DNA, 15 bp, Homo sapiens
gtgctttctgtcttt

SEQ ID NO: 896734 - DNA, 15 bp, Homo sapiens
tgctttctgtctttc

SEQ ID NO: 896735 - DNA, 15 bp, Homo sapiens
gctttctgtctttca

SEQ ID NO: 896736 - DNA, 15 bp, Homo sapiens
ctttctgtctttcag

SEQ ID NO: 896737 - DNA, 15 bp, Homo sapiens
tttctgtctttcagt

SEQ ID NO: 896738 - DNA, 15 bp, Homo sapiens
ttctgtctttcagtg

SEQ ID NO: 896739 - DNA, 15 bp, Homo sapiens
tctgtctttcagtga

SEQ ID NO: 896740 - DNA, 15 bp, Homo sapiens
ctgtctttcagtgac

SEQ ID NO: 896741 - DNA, 15 bp, Homo sapiens
tgtctttcagtgaca

SEQ ID NO: 896742 - DNA, 15 bp, Homo sapiens
gtctttcagtgacat

SEQ ID NO: 896743 - DNA, 15 bp, Homo sapiens
tctttcagtgacatc

SEQ ID NO: 896744 - DNA, 15 bp, Homo sapiens
ctttcagtgacatct

SEQ ID NO: 896745 - DNA, 15 bp, Homo sapiens
tttcagtgacatctg

SEQ ID NO: 896746 - DNA, 15 bp, Homo sapiens
ttcagtgacatctgc

SEQ ID NO: 896747 - DNA, 15 bp, Homo sapiens
tcagtgacatctgcc

SEQ ID NO: 896748 - DNA, 15 bp, Homo sapiens
cagtgacatctgcca

SEQ ID NO: 896749 - DNA, 15 bp, Homo sapiens
agtgacatctgccat

SEQ ID NO: 896750 - DNA, 15 bp, Homo sapiens
gtgacatctgccatg

SEQ ID NO: 896751 - DNA, 15 bp, Homo sapiens
tgacatctgccatga

SEQ ID NO: 896752 - DNA, 15 bp, Homo sapiens
gacatctgccatgag

SEQ ID NO: 896753 - DNA, 15 bp, Homo sapiens
acatctgccatgagc

SEQ ID NO: 896754 - DNA, 15 bp, Homo sapiens
catctgccatgagct

SEQ ID NO: 896755 - DNA, 15 bp, Homo sapiens
atctgccatgagctg

SEQ ID NO: 896756 - DNA, 15 bp, Homo sapiens
tctgccatgagctgt

SEQ ID NO: 896757 - DNA, 15 bp, Homo sapiens
ctgccatgagctgtt

SEQ ID NO: 896758 - DNA, 15 bp, Homo sapiens
tgccatgagctgttg

SEQ ID NO: 896759 - DNA, 15 bp, Homo sapiens
gccatgagctgttgg

SEQ ID NO: 896760 - DNA, 15 bp, Homo sapiens
ccatgagctgttggg

SEQ ID NO: 896761 - DNA, 15 bp, Homo sapiens
catgagctgttggga

SEQ ID NO: 896762 - DNA, 15 bp, Homo sapiens
atgagctgttgggac

SEQ ID NO: 896763 - DNA, 15 bp, Homo sapiens
tgagctgttgggaca

SEQ ID NO: 896764 - DNA, 15 bp, Homo sapiens
gagctgttgggacat

SEQ ID NO: 896765 - DNA, 15 bp, Homo sapiens
agctgttgggacatg

SEQ ID NO: 896766 - DNA, 15 bp, Homo sapiens
gctgttgggacatgt

SEQ ID NO: 896767 - DNA, 15 bp, Homo sapiens
ctgttgggacatgtg

SEQ ID NO: 896768 - DNA, 15 bp, Homo sapiens
tgttgggacatgtgc

SEQ ID NO: 896769 - DNA, 15 bp, Homo sapiens
gttgggacatgtgcc

SEQ ID NO: 896770 - DNA, 15 bp, Homo sapiens
ttgggacatgtgccc

SEQ ID NO: 896771 - DNA, 15 bp, Homo sapiens
tgggacatgtgccct

SEQ ID NO: 896772 - DNA, 15 bp, Homo sapiens
gggacatgtgccctt

SEQ ID NO: 896773 - DNA, 15 bp, Homo sapiens
ggacatgtgcccttg

SEQ ID NO: 896774 - DNA, 15 bp, Homo sapiens
gacatgtgcccttgt

SEQ ID NO: 896775 - DNA, 15 bp, Homo sapiens
acatgtgcccttgtt

SEQ ID NO: 896776 - DNA, 15 bp, Homo sapiens
catgtgcccttgttt

SEQ ID NO: 896777 - DNA, 15 bp, Homo sapiens
atgtgcccttgtttt

SEQ ID NO: 896778 - DNA, 15 bp, Homo sapiens
tgtgcccttgttttc

SEQ ID NO: 896779 - DNA, 15 bp, Homo sapiens
gtgcccttgttttca

SEQ ID NO: 896780 - DNA, 15 bp, Homo sapiens
tgcccttgttttcag

SEQ ID NO: 896781 - DNA, 15 bp, Homo sapiens
gcccttgttttcaga

SEQ ID NO: 896782 - DNA, 15 bp, Homo sapiens
cccttgttttcagat

SEQ ID NO: 896783 - DNA, 15 bp, Homo sapiens
ccttgttttcagatc

SEQ ID NO: 896784 - DNA, 15 bp, Homo sapiens
cttgttttcagatcg

SEQ ID NO: 896785 - DNA, 15 bp, Homo sapiens
ttgttttcagatcgc

SEQ ID NO: 896786 - DNA, 15 bp, Homo sapiens
tgttttcagatcgca

SEQ ID NO: 896787 - DNA, 15 bp, Homo sapiens
gttttcagatcgcag

SEQ ID NO: 896788 - DNA, 15 bp, Homo sapiens
ttttcagatcgcagc

SEQ ID NO: 896789 - DNA, 15 bp, Homo sapiens
tttcagatcgcagct

SEQ ID NO: 896790 - DNA, 15 bp, Homo sapiens
ttcagatcgcagctt

SEQ ID NO: 896791 - DNA, 15 bp, Homo sapiens
tcagatcgcagcttt

SEQ ID NO: 896792 - DNA, 15 bp, Homo sapiens
cagatcgcagctttg

SEQ ID NO: 896793 - DNA, 15 bp, Homo sapiens
agatcgcagctttgc

SEQ ID NO: 896794 - DNA, 15 bp, Homo sapiens
gatcgcagctttgcc

SEQ ID NO: 896795 - DNA, 15 bp, Homo sapiens
atcgcagctttgccc

SEQ ID NO: 896796 - DNA, 15 bp, Homo sapiens
tcgcagctttgccca

SEQ ID NO: 896797 - DNA, 15 bp, Homo sapiens
cgcagctttgcccag

SEQ ID NO: 896798 - DNA, 15 bp, Homo sapiens
gcagctttgcccagt

SEQ ID NO: 896799 - DNA, 15 bp, Homo sapiens
cagctttgcccagtt

SEQ ID NO: 896800 - DNA, 15 bp, Homo sapiens
agctttgcccagttt

SEQ ID NO: 896801 - DNA, 15 bp, Homo sapiens
gctttgcccagtttt

SEQ ID NO: 896802 - DNA, 15 bp, Homo sapiens
ctttgcccagttttc

SEQ ID NO: 896803 - DNA, 15 bp, Homo sapiens
tttgcccagttttcc

SEQ ID NO: 896804 - DNA, 15 bp, Homo sapiens
ttgcccagttttccc

SEQ ID NO: 896805 - DNA, 15 bp, Homo sapiens
tgcccagttttccca

SEQ ID NO: 896806 - DNA, 15 bp, Homo sapiens
gcccagttttcccag

SEQ ID NO: 896807 - DNA, 15 bp, Homo sapiens
cccagttttcccagg

SEQ ID NO: 896808 - DNA, 15 bp, Homo sapiens
ccagttttcccaggt

SEQ ID NO: 896809 - DNA, 15 bp, Homo sapiens
cagttttcccaggta

SEQ ID NO: 896810 - DNA, 15 bp, Homo sapiens
agttttcccaggtaa

SEQ ID NO: 896811 - DNA, 15 bp, Homo sapiens
gttttcccaggtaag

SEQ ID NO: 896812 - DNA, 15 bp, Homo sapiens
ttttcccaggtaagg

SEQ ID NO: 896813 - DNA, 15 bp, Homo sapiens
tttcccaggtaagga

SEQ ID NO: 896814 - DNA, 15 bp, Homo sapiens
ttcccaggtaaggaa

SEQ ID NO: 896815 - DNA, 15 bp, Homo sapiens
tcccaggtaaggaat

SEQ ID NO: 896816 - DNA, 15 bp, Homo sapiens
cccaggtaaggaatg

SEQ ID NO: 896817 - DNA, 15 bp, Homo sapiens
ccaggtaaggaatgg

SEQ ID NO: 896818 - DNA, 15 bp, Homo sapiens
caggtaaggaatgga

SEQ ID NO: 896819 - DNA, 15 bp, Homo sapiens
aggtaaggaatggat

SEQ ID NO: 896820 - DNA, 15 bp, Homo sapiens
ggtaaggaatggatt

SEQ ID NO: 896821 - DNA, 15 bp, Homo sapiens
gtaaggaatggattt

SEQ ID NO: 896822 - DNA, 15 bp, Homo sapiens
taaggaatggatttt

SEQ ID NO: 896823 - DNA, 15 bp, Homo sapiens
aaggaatggattttt

SEQ ID NO: 896824 - DNA, 15 bp, Homo sapiens
aggaatggatttttt

SEQ ID NO: 896825 - DNA, 15 bp, Homo sapiens
ggaatggatttttta

SEQ ID NO: 896826 - DNA, 15 bp, Homo sapiens
gaatggattttttag

SEQ ID NO: 896827 - DNA, 15 bp, Homo sapiens
aatggattttttagc

SEQ ID NO: 896828 - DNA, 15 bp, Homo sapiens
atggattttttagcc

SEQ ID NO: 896829 - DNA, 15 bp, Homo sapiens
tggattttttagcct

SEQ ID NO: 896830 - DNA, 15 bp, Homo sapiens
ggattttttagcctt

SEQ ID NO: 896831 - DNA, 15 bp, Homo sapiens
gattttttagccttc

SEQ ID NO: 896832 - DNA, 15 bp, Homo sapiens
attttttagccttct

SEQ ID NO: 896833 - DNA, 15 bp, Homo sapiens
ttttttagccttcta

SEQ ID NO: 896834 - DNA, 15 bp, Homo sapiens
tttttagccttctag

SEQ ID NO: 896835 - DNA, 15 bp, Homo sapiens
ttttagccttctagt

SEQ ID NO: 896836 - DNA, 15 bp, Homo sapiens
tttagccttctagtt

SEQ ID NO: 896837 - DNA, 15 bp, Homo sapiens
ttagccttctagtta

SEQ ID NO: 896838 - DNA, 15 bp, Homo sapiens
tagccttctagttat

SEQ ID NO: 896839 - DNA, 15 bp, Homo sapiens
agccttctagttata

SEQ ID NO: 896840 - DNA, 15 bp, Homo sapiens
gccttctagttatag

SEQ ID NO: 896841 - DNA, 15 bp, Homo sapiens
ccttctagttatagg

SEQ ID NO: 896842 - DNA, 15 bp, Homo sapiens
cttctagttataggt

SEQ ID NO: 896843 - DNA, 15 bp, Homo sapiens
ttctagttataggtc

SEQ ID NO: 896844 - DNA, 15 bp, Homo sapiens
tctagttataggtct

SEQ ID NO: 896845 - DNA, 15 bp, Homo sapiens
ctagttataggtctg

SEQ ID NO: 896846 - DNA, 15 bp, Homo sapiens
tagttataggtctgt

SEQ ID NO: 896847 - DNA, 15 bp, Homo sapiens
agttataggtctgtg

SEQ ID NO: 896848 - DNA, 15 bp, Homo sapiens
gttataggtctgtga

SEQ ID NO: 896849 - DNA, 15 bp, Homo sapiens
ttataggtctgtgac

SEQ ID NO: 896850 - DNA, 15 bp, Homo sapiens
tataggtctgtgacc

SEQ ID NO: 896851 - DNA, 15 bp, Homo sapiens
ataggtctgtgacct

SEQ ID NO: 896852 - DNA, 15 bp, Homo sapiens
taggtctgtgacctg

SEQ ID NO: 896853 - DNA, 15 bp, Homo sapiens
aggtctgtgacctga

SEQ ID NO: 896854 - DNA, 15 bp, Homo sapiens
ggtctgtgacctgaa

SEQ ID NO: 896855 - DNA, 15 bp, Homo sapiens
gtctgtgacctgaat

SEQ ID NO: 896856 - DNA, 15 bp, Homo sapiens
tctgtgacctgaatt

SEQ ID NO: 896857 - DNA, 15 bp, Homo sapiens
ctgtgacctgaattt

SEQ ID NO: 896858 - DNA, 15 bp, Homo sapiens
tgtgacctgaatttc

SEQ ID NO: 896859 - DNA, 15 bp, Homo sapiens
gtgacctgaatttct

SEQ ID NO: 896860 - DNA, 15 bp, Homo sapiens
tgacctgaatttctc

SEQ ID NO: 896861 - DNA, 15 bp, Homo sapiens
gacctgaatttctca

SEQ ID NO: 896862 - DNA, 15 bp, Homo sapiens
acctgaatttctcaa

SEQ ID NO: 896863 - DNA, 15 bp, Homo sapiens
cctgaatttctcaaa

SEQ ID NO: 896864 - DNA, 15 bp, Homo sapiens
ctgaatttctcaaat

SEQ ID NO: 896865 - DNA, 15 bp, Homo sapiens
tgaatttctcaaatg

SEQ ID NO: 896866 - DNA, 15 bp, Homo sapiens
gaatttctcaaatga

SEQ ID NO: 896867 - DNA, 15 bp, Homo sapiens
aatttctcaaatgag

SEQ ID NO: 896868 - DNA, 15 bp, Homo sapiens
atttctcaaatgagt

SEQ ID NO: 896869 - DNA, 15 bp, Homo sapiens
tttctcaaatgagtt

SEQ ID NO: 896870 - DNA, 15 bp, Homo sapiens
ttctcaaatgagttg

SEQ ID NO: 896871 - DNA, 15 bp, Homo sapiens
tctcaaatgagttga

SEQ ID NO: 896872 - DNA, 15 bp, Homo sapiens
ctcaaatgagttgag

SEQ ID NO: 896873 - DNA, 15 bp, Homo sapiens
tcaaatgagttgagc

SEQ ID NO: 896874 - DNA, 15 bp, Homo sapiens
caaatgagttgagcc

SEQ ID NO: 896875 - DNA, 15 bp, Homo sapiens
aaatgagttgagccc

SEQ ID NO: 896876 - DNA, 15 bp, Homo sapiens
aatgagttgagccca

SEQ ID NO: 896877 - DNA, 15 bp, Homo sapiens
atgagttgagcccag

SEQ ID NO: 896878 - DNA, 15 bp, Homo sapiens
tgagttgagcccagg

SEQ ID NO: 896879 - DNA, 15 bp, Homo sapiens
gagttgagcccaggg

SEQ ID NO: 896880 - DNA, 15 bp, Homo sapiens
agttgagcccaggga

SEQ ID NO: 896881 - DNA, 15 bp, Homo sapiens
gttgagcccagggag

SEQ ID NO: 896882 - DNA, 15 bp, Homo sapiens
ttgagcccagggagg

SEQ ID NO: 896883 - DNA, 15 bp, Homo sapiens
tgagcccagggaggg

SEQ ID NO: 896884 - DNA, 15 bp, Homo sapiens
gagcccagggagggg

SEQ ID NO: 896885 - DNA, 15 bp, Homo sapiens
agcccagggaggggt

SEQ ID NO: 896886 - DNA, 15 bp, Homo sapiens
gcccagggaggggtc

SEQ ID NO: 896887 - DNA, 15 bp, Homo sapiens
cccagggaggggtcc

SEQ ID NO: 896888 - DNA, 15 bp, Homo sapiens
ccagggaggggtcct

SEQ ID NO: 896889 - DNA, 15 bp, Homo sapiens
cagggaggggtcctc

SEQ ID NO: 896890 - DNA, 15 bp, Homo sapiens
agggaggggtcctca

SEQ ID NO: 896891 - DNA, 15 bp, Homo sapiens
gggaggggtcctcat

SEQ ID NO: 896892 - DNA, 15 bp, Homo sapiens
ggaggggtcctcatg

SEQ ID NO: 896893 - DNA, 15 bp, Homo sapiens
gaggggtcctcatgc

SEQ ID NO: 896894 - DNA, 15 bp, Homo sapiens
aggggtcctcatgcc

SEQ ID NO: 896895 - DNA, 15 bp, Homo sapiens
ggggtcctcatgccc

SEQ ID NO: 896896 - DNA, 15 bp, Homo sapiens
gggtcctcatgccct

SEQ ID NO: 896897 - DNA, 15 bp, Homo sapiens
ggtcctcatgccctc

SEQ ID NO: 896898 - DNA, 15 bp, Homo sapiens
gtcctcatgccctct

SEQ ID NO: 896899 - DNA, 15 bp, Homo sapiens
tcctcatgccctctg

SEQ ID NO: 896900 - DNA, 15 bp, Homo sapiens
cctcatgccctctgc

SEQ ID NO: 896901 - DNA, 15 bp, Homo sapiens
ctcatgccctctgca

SEQ ID NO: 896902 - DNA, 15 bp, Homo sapiens
tcatgccctctgcaa

SEQ ID NO: 896903 - DNA, 15 bp, Homo sapiens
catgccctctgcaag

SEQ ID NO: 896904 - DNA, 15 bp, Homo sapiens
atgccctctgcaaga

SEQ ID NO: 896905 - DNA, 15 bp, Homo sapiens
tgccctctgcaagag

SEQ ID NO: 896906 - DNA, 15 bp, Homo sapiens
gccctctgcaagagc

SEQ ID NO: 896907 - DNA, 15 bp, Homo sapiens
ccctctgcaagagcg

SEQ ID NO: 896908 - DNA, 15 bp, Homo sapiens
cctctgcaagagcgg

SEQ ID NO: 896909 - DNA, 15 bp, Homo sapiens
ctctgcaagagcgga

SEQ ID NO: 896910 - DNA, 15 bp, Homo sapiens
tctgcaagagcggaa

SEQ ID NO: 896911 - DNA, 15 bp, Homo sapiens
ctgcaagagcggaaa

SEQ ID NO: 896912 - DNA, 15 bp, Homo sapiens
tgcaagagcggaaac

SEQ ID NO: 896913 - DNA, 15 bp, Homo sapiens
gcaagagcggaaacc

SEQ ID NO: 896914 - DNA, 15 bp, Homo sapiens
caagagcggaaacca

SEQ ID NO: 896915 - DNA, 15 bp, Homo sapiens
aagagcggaaaccag

SEQ ID NO: 896916 - DNA, 15 bp, Homo sapiens
agagcggaaaccagg

SEQ ID NO: 896917 - DNA, 15 bp, Homo sapiens
gagcggaaaccaggt

SEQ ID NO: 896918 - DNA, 15 bp, Homo sapiens
agcggaaaccaggta

SEQ ID NO: 896919 - DNA, 15 bp, Homo sapiens
gcggaaaccaggtac

SEQ ID NO: 896920 - DNA, 15 bp, Homo sapiens
cggaaaccaggtaca

SEQ ID NO: 896921 - DNA, 15 bp, Homo sapiens
ggaaaccaggtacag

SEQ ID NO: 896922 - DNA, 15 bp, Homo sapiens
gaaaccaggtacagt

SEQ ID NO: 896923 - DNA, 15 bp, Homo sapiens
aaaccaggtacagtt

SEQ ID NO: 896924 - DNA, 15 bp, Homo sapiens
aaccaggtacagttc

SEQ ID NO: 896925 - DNA, 15 bp, Homo sapiens
accaggtacagttct

SEQ ID NO: 896926 - DNA, 15 bp, Homo sapiens
ccaggtacagttcta

SEQ ID NO: 896927 - DNA, 15 bp, Homo sapiens
caggtacagttctat

SEQ ID NO: 896928 - DNA, 15 bp, Homo sapiens
aggtacagttctatg

SEQ ID NO: 896929 - DNA, 15 bp, Homo sapiens
ggtacagttctatga

SEQ ID NO: 896930 - DNA, 15 bp, Homo sapiens
gtacagttctatgat

SEQ ID NO: 896931 - DNA, 15 bp, Homo sapiens
tacagttctatgatc

SEQ ID NO: 896932 - DNA, 15 bp, Homo sapiens
acagttctatgatcc

SEQ ID NO: 896933 - DNA, 15 bp, Homo sapiens
cagttctatgatccc

SEQ ID NO: 896934 - DNA, 15 bp, Homo sapiens
agttctatgatccca

SEQ ID NO: 896935 - DNA, 15 bp, Homo sapiens
gttctatgatcccac

SEQ ID NO: 896936 - DNA, 15 bp, Homo sapiens
ttctatgatcccacc

SEQ ID NO: 896937 - DNA, 15 bp, Homo sapiens
tctatgatcccacct

SEQ ID NO: 896938 - DNA, 15 bp, Homo sapiens
ctatgatcccacctg

SEQ ID NO: 896939 - DNA, 15 bp, Homo sapiens
tatgatcccacctga

SEQ ID NO: 896940 - DNA, 15 bp, Homo sapiens
atgatcccacctgaa

SEQ ID NO: 896941 - DNA, 15 bp, Homo sapiens
tgatcccacctgaaa

SEQ ID NO: 896942 - DNA, 15 bp, Homo sapiens
gatcccacctgaaat

SEQ ID NO: 896943 - DNA, 15 bp, Homo sapiens
atcccacctgaaatg

SEQ ID NO: 896944 - DNA, 15 bp, Homo sapiens
tcccacctgaaatgg

SEQ ID NO: 896945 - DNA, 15 bp, Homo sapiens
cccacctgaaatggg

SEQ ID NO: 896946 - DNA, 15 bp, Homo sapiens
ccacctgaaatgggt

SEQ ID NO: 896947 - DNA, 15 bp, Homo sapiens
cacctgaaatgggtg

SEQ ID NO: 896948 - DNA, 15 bp, Homo sapiens
acctgaaatgggtgt

SEQ ID NO: 896949 - DNA, 15 bp, Homo sapiens
cctgaaatgggtgtg

SEQ ID NO: 896950 - DNA, 15 bp, Homo sapiens
ctgaaatgggtgtgt

SEQ ID NO: 896951 - DNA, 15 bp, Homo sapiens
tgaaatgggtgtgtg

SEQ ID NO: 896952 - DNA, 15 bp, Homo sapiens
gaaatgggtgtgtgg

SEQ ID NO: 896953 - DNA, 15 bp, Homo sapiens
aaatgggtgtgtggt

SEQ ID NO: 896954 - DNA, 15 bp, Homo sapiens
aatgggtgtgtggtt

SEQ ID NO: 896955 - DNA, 15 bp, Homo sapiens
atgggtgtgtggttc

SEQ ID NO: 896956 - DNA, 15 bp, Homo sapiens
tgggtgtgtggttct

SEQ ID NO: 896957 - DNA, 15 bp, Homo sapiens
gggtgtgtggttctg

SEQ ID NO: 896958 - DNA, 15 bp, Homo sapiens
ggtgtgtggttctgg

SEQ ID NO: 896959 - DNA, 15 bp, Homo sapiens
gtgtgtggttctggg

SEQ ID NO: 896960 - DNA, 15 bp, Homo sapiens
tgtgtggttctggga

SEQ ID NO: 896961 - DNA, 15 bp, Homo sapiens
gtgtggttctgggaa

SEQ ID NO: 896962 - DNA, 15 bp, Homo sapiens
tgtggttctgggaag

SEQ ID NO: 896963 - DNA, 15 bp, Homo sapiens
gtggttctgggaagc

SEQ ID NO: 896964 - DNA, 15 bp, Homo sapiens
tggttctgggaagct

SEQ ID NO: 896965 - DNA, 15 bp, Homo sapiens
ggttctgggaagcta

SEQ ID NO: 896966 - DNA, 15 bp, Homo sapiens
gttctgggaagctaa

SEQ ID NO: 896967 - DNA, 15 bp, Homo sapiens
ttctgggaagctaaa

SEQ ID NO: 896968 - DNA, 15 bp, Homo sapiens
tctgggaagctaaat

SEQ ID NO: 896969 - DNA, 15 bp, Homo sapiens
ctgggaagctaaata

SEQ ID NO: 896970 - DNA, 15 bp, Homo sapiens
tgggaagctaaatac

SEQ ID NO: 896971 - DNA, 15 bp, Homo sapiens
gggaagctaaatacc

SEQ ID NO: 896972 - DNA, 15 bp, Homo sapiens
ggaagctaaataccc

SEQ ID NO: 896973 - DNA, 15 bp, Homo sapiens
gaagctaaataccca

SEQ ID NO: 896974 - DNA, 15 bp, Homo sapiens
aagctaaatacccat

SEQ ID NO: 896975 - DNA, 15 bp, Homo sapiens
agctaaatacccatt

SEQ ID NO: 896976 - DNA, 15 bp, Homo sapiens
gctaaatacccattt

SEQ ID NO: 896977 - DNA, 15 bp, Homo sapiens
ctaaatacccatttc

SEQ ID NO: 896978 - DNA, 15 bp, Homo sapiens
taaatacccatttcg

SEQ ID NO: 896979 - DNA, 15 bp, Homo sapiens
aaatacccatttcgg

SEQ ID NO: 896980 - DNA, 15 bp, Homo sapiens
aatacccatttcgga

SEQ ID NO: 896981 - DNA, 15 bp, Homo sapiens
atacccatttcggag

SEQ ID NO: 896982 - DNA, 15 bp, Homo sapiens
tacccatttcggaga

SEQ ID NO: 896983 - DNA, 15 bp, Homo sapiens
acccatttcggagat

SEQ ID NO: 896984 - DNA, 15 bp, Homo sapiens
cccatttcggagatc

SEQ ID NO: 896985 - DNA, 15 bp, Homo sapiens
ccatttcggagatca

SEQ ID NO: 896986 - DNA, 15 bp, Homo sapiens
catttcggagatcaa

SEQ ID NO: 896987 - DNA, 15 bp, Homo sapiens
atttcggagatcaag

SEQ ID NO: 896988 - DNA, 15 bp, Homo sapiens
tttcggagatcaagc

SEQ ID NO: 896989 - DNA, 15 bp, Homo sapiens
ttcggagatcaagca

SEQ ID NO: 896990 - DNA, 15 bp, Homo sapiens
tcggagatcaagcat

SEQ ID NO: 896991 - DNA, 15 bp, Homo sapiens
cggagatcaagcatg

SEQ ID NO: 896992 - DNA, 15 bp, Homo sapiens
ggagatcaagcatgg

SEQ ID NO: 896993 - DNA, 15 bp, Homo sapiens
gagatcaagcatggg

SEQ ID NO: 896994 - DNA, 15 bp, Homo sapiens
agatcaagcatgggg

SEQ ID NO: 896995 - DNA, 15 bp, Homo sapiens
gatcaagcatggggt

SEQ ID NO: 896996 - DNA, 15 bp, Homo sapiens
atcaagcatggggtt

SEQ ID NO: 896997 - DNA, 15 bp, Homo sapiens
tcaagcatggggttg

SEQ ID NO: 896998 - DNA, 15 bp, Homo sapiens
caagcatggggttgg

SEQ ID NO: 896999 - DNA, 15 bp, Homo sapiens
aagcatggggttggt

SEQ ID NO: 897000 - DNA, 15 bp, Homo sapiens
agcatggggttggtg

SEQ ID NO: 897001 - DNA, 15 bp, Homo sapiens
gcatggggttggtga

SEQ ID NO: 897002 - DNA, 15 bp, Homo sapiens
catggggttggtgaa

SEQ ID NO: 897003 - DNA, 15 bp, Homo sapiens
atggggttggtgaat

SEQ ID NO: 897004 - DNA, 15 bp, Homo sapiens
tggggttggtgaatc

SEQ ID NO: 897005 - DNA, 15 bp, Homo sapiens
ggggttggtgaatca

SEQ ID NO: 897006 - DNA, 15 bp, Homo sapiens
gggttggtgaatcac

SEQ ID NO: 897007 - DNA, 15 bp, Homo sapiens
ggttggtgaatcact

SEQ ID NO: 897008 - DNA, 15 bp, Homo sapiens
gttggtgaatcactc

SEQ ID NO: 897009 - DNA, 15 bp, Homo sapiens
ttggtgaatcactca

SEQ ID NO: 897010 - DNA, 15 bp, Homo sapiens
tggtgaatcactcat

SEQ ID NO: 897011 - DNA, 15 bp, Homo sapiens
ggtgaatcactcatc

SEQ ID NO: 897012 - DNA, 15 bp, Homo sapiens
gtgaatcactcatcc

SEQ ID NO: 897013 - DNA, 15 bp, Homo sapiens
tgaatcactcatcct

SEQ ID NO: 897014 - DNA, 15 bp, Homo sapiens
gaatcactcatcctc

SEQ ID NO: 897015 - DNA, 15 bp, Homo sapiens
aatcactcatcctct

SEQ ID NO: 897016 - DNA, 15 bp, Homo sapiens
atcactcatcctctg

SEQ ID NO: 897017 - DNA, 15 bp, Homo sapiens
tcactcatcctctga

SEQ ID NO: 897018 - DNA, 15 bp, Homo sapiens
cactcatcctctgaa

SEQ ID NO: 897019 - DNA, 15 bp, Homo sapiens
actcatcctctgaat

SEQ ID NO: 897020 - DNA, 15 bp, Homo sapiens
ctcatcctctgaatc

SEQ ID NO: 897021 - DNA, 15 bp, Homo sapiens
tcatcctctgaatca

SEQ ID NO: 897022 - DNA, 15 bp, Homo sapiens
catcctctgaatcat

SEQ ID NO: 897023 - DNA, 15 bp, Homo sapiens
atcctctgaatcata

SEQ ID NO: 897024 - DNA, 15 bp, Homo sapiens
tcctctgaatcatat

SEQ ID NO: 897025 - DNA, 15 bp, Homo sapiens
cctctgaatcatatg

SEQ ID NO: 897026 - DNA, 15 bp, Homo sapiens
ctctgaatcatatgt

SEQ ID NO: 897027 - DNA, 15 bp, Homo sapiens
tctgaatcatatgtg

SEQ ID NO: 897028 - DNA, 15 bp, Homo sapiens
ctgaatcatatgtgt

SEQ ID NO: 897029 - DNA, 15 bp, Homo sapiens
tgaatcatatgtgtg

SEQ ID NO: 897030 - DNA, 15 bp, Homo sapiens
gaatcatatgtgtgt

SEQ ID NO: 897031 - DNA, 15 bp, Homo sapiens
aatcatatgtgtgtt

SEQ ID NO: 897032 - DNA, 15 bp, Homo sapiens
atcatatgtgtgttc

SEQ ID NO: 897033 - DNA, 15 bp, Homo sapiens
tcatatgtgtgttct

SEQ ID NO: 897034 - DNA, 15 bp, Homo sapiens
catatgtgtgttctt

SEQ ID NO: 897035 - DNA, 15 bp, Homo sapiens
atatgtgtgttcttc

SEQ ID NO: 897036 - DNA, 15 bp, Homo sapiens
tatgtgtgttcttca

SEQ ID NO: 897037 - DNA, 15 bp, Homo sapiens
atgtgtgttcttcag

SEQ ID NO: 897038 - DNA, 15 bp, Homo sapiens
tgtgtgttcttcagt

SEQ ID NO: 897039 - DNA, 15 bp, Homo sapiens
gtgtgttcttcagtg

SEQ ID NO: 897040 - DNA, 15 bp, Homo sapiens
tgtgttcttcagtgt

SEQ ID NO: 897041 - DNA, 15 bp, Homo sapiens
gtgttcttcagtgta

SEQ ID NO: 897042 - DNA, 15 bp, Homo sapiens
tgttcttcagtgtac

SEQ ID NO: 897043 - DNA, 15 bp, Homo sapiens
gttcttcagtgtact

SEQ ID NO: 897044 - DNA, 15 bp, Homo sapiens
ttcttcagtgtacta

SEQ ID NO: 897045 - DNA, 15 bp, Homo sapiens
tcttcagtgtactaa

SEQ ID NO: 897046 - DNA, 15 bp, Homo sapiens
cttcagtgtactaat

SEQ ID NO: 897047 - DNA, 15 bp, Homo sapiens
ttcagtgtactaatc

SEQ ID NO: 897048 - DNA, 15 bp, Homo sapiens
tcagtgtactaatct

SEQ ID NO: 897049 - DNA, 15 bp, Homo sapiens
cagtgtactaatctc

SEQ ID NO: 897050 - DNA, 15 bp, Homo sapiens
agtgtactaatctca

SEQ ID NO: 897051 - DNA, 15 bp, Homo sapiens
gtgtactaatctcat

SEQ ID NO: 897052 - DNA, 15 bp, Homo sapiens
tgtactaatctcatt

SEQ ID NO: 897053 - DNA, 15 bp, Homo sapiens
gtactaatctcattt

SEQ ID NO: 897054 - DNA, 15 bp, Homo sapiens
tactaatctcatttt

SEQ ID NO: 897055 - DNA, 15 bp, Homo sapiens
actaatctcattttt

SEQ ID NO: 897056 - DNA, 15 bp, Homo sapiens
ctaatctcatttttc

SEQ ID NO: 897057 - DNA, 15 bp, Homo sapiens
taatctcatttttcc

SEQ ID NO: 897058 - DNA, 15 bp, Homo sapiens
aatctcatttttcct

SEQ ID NO: 897059 - DNA, 15 bp, Homo sapiens
atctcatttttcctg

SEQ ID NO: 897060 - DNA, 15 bp, Homo sapiens
tctcatttttcctgc

SEQ ID NO: 897061 - DNA, 15 bp, Homo sapiens
ctcatttttcctgct

SEQ ID NO: 897062 - DNA, 15 bp, Homo sapiens
tcatttttcctgcta

SEQ ID NO: 897063 - DNA, 15 bp, Homo sapiens
catttttcctgctag

SEQ ID NO: 897064 - DNA, 15 bp, Homo sapiens
atttttcctgctaga

SEQ ID NO: 897065 - DNA, 15 bp, Homo sapiens
tttttcctgctagag

SEQ ID NO: 897066 - DNA, 15 bp, Homo sapiens
ttttcctgctagagc

SEQ ID NO: 897067 - DNA, 15 bp, Homo sapiens
tttcctgctagagcc

SEQ ID NO: 897068 - DNA, 15 bp, Homo sapiens
ttcctgctagagcct

SEQ ID NO: 897069 - DNA, 15 bp, Homo sapiens
tcctgctagagcctt

SEQ ID NO: 897070 - DNA, 15 bp, Homo sapiens
cctgctagagccttt

SEQ ID NO: 897071 - DNA, 15 bp, Homo sapiens
ctgctagagcctttc

SEQ ID NO: 897072 - DNA, 15 bp, Homo sapiens
tgctagagcctttca

SEQ ID NO: 897073 - DNA, 15 bp, Homo sapiens
gctagagcctttcat

SEQ ID NO: 897074 - DNA, 15 bp, Homo sapiens
ctagagcctttcatc

SEQ ID NO: 897075 - DNA, 15 bp, Homo sapiens
tagagcctttcatcc

SEQ ID NO: 897076 - DNA, 15 bp, Homo sapiens
agagcctttcatcca

SEQ ID NO: 897077 - DNA, 15 bp, Homo sapiens
gagcctttcatccat

SEQ ID NO: 897078 - DNA, 15 bp, Homo sapiens
agcctttcatccatg

SEQ ID NO: 897079 - DNA, 15 bp, Homo sapiens
gcctttcatccatga

SEQ ID NO: 897080 - DNA, 15 bp, Homo sapiens
cctttcatccatgaa

SEQ ID NO: 897081 - DNA, 15 bp, Homo sapiens
ctttcatccatgaaa

SEQ ID NO: 897082 - DNA, 15 bp, Homo sapiens
tttcatccatgaaag

SEQ ID NO: 897083 - DNA, 15 bp, Homo sapiens
ttcatccatgaaagc

SEQ ID NO: 897084 - DNA, 15 bp, Homo sapiens
tcatccatgaaagcc

SEQ ID NO: 897085 - DNA, 15 bp, Homo sapiens
catccatgaaagcct

SEQ ID NO: 897086 - DNA, 15 bp, Homo sapiens
atccatgaaagcctc

SEQ ID NO: 897087 - DNA, 15 bp, Homo sapiens
tccatgaaagcctcc

SEQ ID NO: 897088 - DNA, 15 bp, Homo sapiens
ccatgaaagcctccc

SEQ ID NO: 897089 - DNA, 15 bp, Homo sapiens
catgaaagcctccct

SEQ ID NO: 897090 - DNA, 15 bp, Homo sapiens
atgaaagcctccctg

SEQ ID NO: 897091 - DNA, 15 bp, Homo sapiens
tgaaagcctccctga

SEQ ID NO: 897092 - DNA, 15 bp, Homo sapiens
gaaagcctccctgat

SEQ ID NO: 897093 - DNA, 15 bp, Homo sapiens
aaagcctccctgatt

SEQ ID NO: 897094 - DNA, 15 bp, Homo sapiens
aagcctccctgattc

SEQ ID NO: 897095 - DNA, 15 bp, Homo sapiens
agcctccctgattcc

SEQ ID NO: 897096 - DNA, 15 bp, Homo sapiens
gcctccctgattccc

SEQ ID NO: 897097 - DNA, 15 bp, Homo sapiens
cctccctgattccca

SEQ ID NO: 897098 - DNA, 15 bp, Homo sapiens
ctccctgattcccat

SEQ ID NO: 897099 - DNA, 15 bp, Homo sapiens
tccctgattcccatg

SEQ ID NO: 897100 - DNA, 15 bp, Homo sapiens
ccctgattcccatgc

SEQ ID NO: 897101 - DNA, 15 bp, Homo sapiens
cctgattcccatgca

SEQ ID NO: 897102 - DNA, 15 bp, Homo sapiens
ctgattcccatgcag

SEQ ID NO: 897103 - DNA, 15 bp, Homo sapiens
tgattcccatgcagg

SEQ ID NO: 897104 - DNA, 15 bp, Homo sapiens
gattcccatgcagga

SEQ ID NO: 897105 - DNA, 15 bp, Homo sapiens
attcccatgcaggaa

SEQ ID NO: 897106 - DNA, 15 bp, Homo sapiens
ttcccatgcaggaac

SEQ ID NO: 897107 - DNA, 15 bp, Homo sapiens
tcccatgcaggaact

SEQ ID NO: 897108 - DNA, 15 bp, Homo sapiens
cccatgcaggaacta

SEQ ID NO: 897109 - DNA, 15 bp, Homo sapiens
ccatgcaggaactac

SEQ ID NO: 897110 - DNA, 15 bp, Homo sapiens
catgcaggaactacc

SEQ ID NO: 897111 - DNA, 15 bp, Homo sapiens
atgcaggaactacct

SEQ ID NO: 897112 - DNA, 15 bp, Homo sapiens
tgcaggaactacctc

SEQ ID NO: 897113 - DNA, 15 bp, Homo sapiens
gcaggaactacctca

SEQ ID NO: 897114 - DNA, 15 bp, Homo sapiens
caggaactacctcac

SEQ ID NO: 897115 - DNA, 15 bp, Homo sapiens
aggaactacctcacc

SEQ ID NO: 897116 - DNA, 15 bp, Homo sapiens
ggaactacctcacct

SEQ ID NO: 897117 - DNA, 15 bp, Homo sapiens
gaactacctcacctt

SEQ ID NO: 897118 - DNA, 15 bp, Homo sapiens
aactacctcaccttc

SEQ ID NO: 897119 - DNA, 15 bp, Homo sapiens
actacctcaccttct

SEQ ID NO: 897120 - DNA, 15 bp, Homo sapiens
ctacctcaccttctt

SEQ ID NO: 897121 - DNA, 15 bp, Homo sapiens
tacctcaccttcttc

SEQ ID NO: 897122 - DNA, 15 bp, Homo sapiens
acctcaccttcttcc

SEQ ID NO: 897123 - DNA, 15 bp, Homo sapiens
cctcaccttcttcca

SEQ ID NO: 897124 - DNA, 15 bp, Homo sapiens
ctcaccttcttccaa

SEQ ID NO: 897125 - DNA, 15 bp, Homo sapiens
tcaccttcttccaat

SEQ ID NO: 897126 - DNA, 15 bp, Homo sapiens
caccttcttccaatc

SEQ ID NO: 897127 - DNA, 15 bp, Homo sapiens
accttcttccaatct

SEQ ID NO: 897128 - DNA, 15 bp, Homo sapiens
ccttcttccaatctc

SEQ ID NO: 897129 - DNA, 15 bp, Homo sapiens
cttcttccaatctct

SEQ ID NO: 897130 - DNA, 15 bp, Homo sapiens
ttcttccaatctctt

SEQ ID NO: 897131 - DNA, 15 bp, Homo sapiens
tcttccaatctctta

SEQ ID NO: 897132 - DNA, 15 bp, Homo sapiens
cttccaatctcttag

SEQ ID NO: 897133 - DNA, 15 bp, Homo sapiens
ttccaatctcttagt

SEQ ID NO: 897134 - DNA, 15 bp, Homo sapiens
tccaatctcttagta

SEQ ID NO: 897135 - DNA, 15 bp, Homo sapiens
ccaatctcttagtac

SEQ ID NO: 897136 - DNA, 15 bp, Homo sapiens
caatctcttagtaca

SEQ ID NO: 897137 - DNA, 15 bp, Homo sapiens
aatctcttagtacat

SEQ ID NO: 897138 - DNA, 15 bp, Homo sapiens
atctcttagtacatt

SEQ ID NO: 897139 - DNA, 15 bp, Homo sapiens
tctcttagtacattc

SEQ ID NO: 897140 - DNA, 15 bp, Homo sapiens
ctcttagtacattcc

SEQ ID NO: 897141 - DNA, 15 bp, Homo sapiens
tcttagtacattccc

SEQ ID NO: 897142 - DNA, 15 bp, Homo sapiens
cttagtacattcccc

SEQ ID NO: 897143 - DNA, 15 bp, Homo sapiens
ttagtacattcccct

SEQ ID NO: 897144 - DNA, 15 bp, Homo sapiens
tagtacattcccctt

SEQ ID NO: 897145 - DNA, 15 bp, Homo sapiens
agtacattcccctta

SEQ ID NO: 897146 - DNA, 15 bp, Homo sapiens
gtacattccccttac

SEQ ID NO: 897147 - DNA, 15 bp, Homo sapiens
tacattccccttacc

SEQ ID NO: 897148 - DNA, 15 bp, Homo sapiens
acattccccttacct

SEQ ID NO: 897149 - DNA, 15 bp, Homo sapiens
cattccccttacctt

SEQ ID NO: 897150 - DNA, 15 bp, Homo sapiens
attccccttaccttt

SEQ ID NO: 897151 - DNA, 15 bp, Homo sapiens
ttccccttacctttt

SEQ ID NO: 897152 - DNA, 15 bp, Homo sapiens
tccccttaccttttc

SEQ ID NO: 897153 - DNA, 15 bp, Homo sapiens
ccccttaccttttca

SEQ ID NO: 897154 - DNA, 15 bp, Homo sapiens
cccttaccttttcag

SEQ ID NO: 897155 - DNA, 15 bp, Homo sapiens
ccttaccttttcagg

SEQ ID NO: 897156 - DNA, 15 bp, Homo sapiens
cttaccttttcaggg

SEQ ID NO: 897157 - DNA, 15 bp, Homo sapiens
ttaccttttcagggc

SEQ ID NO: 897158 - DNA, 15 bp, Homo sapiens
taccttttcagggct

SEQ ID NO: 897159 - DNA, 15 bp, Homo sapiens
accttttcagggctg

SEQ ID NO: 897160 - DNA, 15 bp, Homo sapiens
ccttttcagggctgt

SEQ ID NO: 897161 - DNA, 15 bp, Homo sapiens
cttttcagggctgtt

SEQ ID NO: 897162 - DNA, 15 bp, Homo sapiens
ttttcagggctgttg

SEQ ID NO: 897163 - DNA, 15 bp, Homo sapiens
tttcagggctgttgc

SEQ ID NO: 897164 - DNA, 15 bp, Homo sapiens
ttcagggctgttgca

SEQ ID NO: 897165 - DNA, 15 bp, Homo sapiens
tcagggctgttgcaa

SEQ ID NO: 897166 - DNA, 15 bp, Homo sapiens
cagggctgttgcaac

SEQ ID NO: 897167 - DNA, 15 bp, Homo sapiens
agggctgttgcaact

SEQ ID NO: 897168 - DNA, 15 bp, Homo sapiens
gggctgttgcaactt

SEQ ID NO: 897169 - DNA, 15 bp, Homo sapiens
ggctgttgcaacttt

SEQ ID NO: 897170 - DNA, 15 bp, Homo sapiens
gctgttgcaactttc

SEQ ID NO: 897171 - DNA, 15 bp, Homo sapiens
ctgttgcaactttct

SEQ ID NO: 897172 - DNA, 15 bp, Homo sapiens
tgttgcaactttcta

SEQ ID NO: 897173 - DNA, 15 bp, Homo sapiens
gttgcaactttctac

SEQ ID NO: 897174 - DNA, 15 bp, Homo sapiens
ttgcaactttctacc

SEQ ID NO: 897175 - DNA, 15 bp, Homo sapiens
tgcaactttctacct

SEQ ID NO: 897176 - DNA, 15 bp, Homo sapiens
gcaactttctacctt

SEQ ID NO: 897177 - DNA, 15 bp, Homo sapiens
caactttctaccttg

SEQ ID NO: 897178 - DNA, 15 bp, Homo sapiens
aactttctaccttgt

SEQ ID NO: 897179 - DNA, 15 bp, Homo sapiens
actttctaccttgtc

SEQ ID NO: 897180 - DNA, 15 bp, Homo sapiens
ctttctaccttgtca

SEQ ID NO: 897181 - DNA, 15 bp, Homo sapiens
tttctaccttgtcag

SEQ ID NO: 897182 - DNA, 15 bp, Homo sapiens
ttctaccttgtcagg

SEQ ID NO: 897183 - DNA, 15 bp, Homo sapiens
tctaccttgtcaggc

SEQ ID NO: 897184 - DNA, 15 bp, Homo sapiens
ctaccttgtcaggca

SEQ ID NO: 897185 - DNA, 15 bp, Homo sapiens
taccttgtcaggcag

SEQ ID NO: 897186 - DNA, 15 bp, Homo sapiens
accttgtcaggcagt

SEQ ID NO: 897187 - DNA, 15 bp, Homo sapiens
ccttgtcaggcagtt

SEQ ID NO: 897188 - DNA, 15 bp, Homo sapiens
cttgtcaggcagtta

SEQ ID NO: 897189 - DNA, 15 bp, Homo sapiens
ttgtcaggcagttat

SEQ ID NO: 897190 - DNA, 15 bp, Homo sapiens
tgtcaggcagttatt

SEQ ID NO: 897191 - DNA, 15 bp, Homo sapiens
gtcaggcagttattt

SEQ ID NO: 897192 - DNA, 15 bp, Homo sapiens
tcaggcagttatttg

SEQ ID NO: 897193 - DNA, 15 bp, Homo sapiens
caggcagttatttgt

SEQ ID NO: 897194 - DNA, 15 bp, Homo sapiens
aggcagttatttgtg

SEQ ID NO: 897195 - DNA, 15 bp, Homo sapiens
ggcagttatttgtgt

SEQ ID NO: 897196 - DNA, 15 bp, Homo sapiens
gcagttatttgtgta

SEQ ID NO: 897197 - DNA, 15 bp, Homo sapiens
cagttatttgtgtat

SEQ ID NO: 897198 - DNA, 15 bp, Homo sapiens
agttatttgtgtata

SEQ ID NO: 897199 - DNA, 15 bp, Homo sapiens
gttatttgtgtatat

SEQ ID NO: 897200 - DNA, 15 bp, Homo sapiens
ttatttgtgtatatg

SEQ ID NO: 897201 - DNA, 15 bp, Homo sapiens
tatttgtgtatatgc

SEQ ID NO: 897202 - DNA, 15 bp, Homo sapiens
atttgtgtatatgct

SEQ ID NO: 897203 - DNA, 15 bp, Homo sapiens
tttgtgtatatgctt

SEQ ID NO: 897204 - DNA, 15 bp, Homo sapiens
ttgtgtatatgcttg

SEQ ID NO: 897205 - DNA, 15 bp, Homo sapiens
tgtgtatatgcttga

SEQ ID NO: 897206 - DNA, 15 bp, Homo sapiens
gtgtatatgcttgaa

SEQ ID NO: 897207 - DNA, 15 bp, Homo sapiens
tgtatatgcttgaat

SEQ ID NO: 897208 - DNA, 15 bp, Homo sapiens
gtatatgcttgaatt

SEQ ID NO: 897209 - DNA, 15 bp, Homo sapiens
tatatgcttgaatta

SEQ ID NO: 897210 - DNA, 15 bp, Homo sapiens
atatgcttgaattaa

SEQ ID NO: 897211 - DNA, 15 bp, Homo sapiens
tatgcttgaattaag

SEQ ID NO: 897212 - DNA, 15 bp, Homo sapiens
atgcttgaattaagt

SEQ ID NO: 897213 - DNA, 15 bp, Homo sapiens
tgcttgaattaagtg

SEQ ID NO: 897214 - DNA, 15 bp, Homo sapiens
gcttgaattaagtga

SEQ ID NO: 897215 - DNA, 15 bp, Homo sapiens
cttgaattaagtgag

SEQ ID NO: 897216 - DNA, 15 bp, Homo sapiens
ttgaattaagtgagg

SEQ ID NO: 897217 - DNA, 15 bp, Homo sapiens
tgaattaagtgaggt

SEQ ID NO: 897218 - DNA, 15 bp, Homo sapiens
gaattaagtgaggtg

SEQ ID NO: 897219 - DNA, 15 bp, Homo sapiens
aattaagtgaggtga

SEQ ID NO: 897220 - DNA, 15 bp, Homo sapiens
attaagtgaggtgac

SEQ ID NO: 897221 - DNA, 15 bp, Homo sapiens
ttaagtgaggtgaca

SEQ ID NO: 897222 - DNA, 15 bp, Homo sapiens
taagtgaggtgacat

SEQ ID NO: 897223 - DNA, 15 bp, Homo sapiens
aagtgaggtgacatt

SEQ ID NO: 897224 - DNA, 15 bp, Homo sapiens
agtgaggtgacattt

SEQ ID NO: 897225 - DNA, 15 bp, Homo sapiens
gtgaggtgacatttg

SEQ ID NO: 897226 - DNA, 15 bp, Homo sapiens
tgaggtgacatttgc

SEQ ID NO: 897227 - DNA, 15 bp, Homo sapiens
gaggtgacatttgcc

SEQ ID NO: 897228 - DNA, 15 bp, Homo sapiens
aggtgacatttgcca

SEQ ID NO: 897229 - DNA, 15 bp, Homo sapiens
ggtgacatttgccaa

SEQ ID NO: 897230 - DNA, 15 bp, Homo sapiens
gtgacatttgccaag

SEQ ID NO: 897231 - DNA, 15 bp, Homo sapiens
tgacatttgccaaga

SEQ ID NO: 897232 - DNA, 15 bp, Homo sapiens
gacatttgccaagaa

SEQ ID NO: 897233 - DNA, 15 bp, Homo sapiens
acatttgccaagaat

SEQ ID NO: 897234 - DNA, 15 bp, Homo sapiens
catttgccaagaatc

SEQ ID NO: 897235 - DNA, 15 bp, Homo sapiens
atttgccaagaatcc

SEQ ID NO: 897236 - DNA, 15 bp, Homo sapiens
tttgccaagaatcca

SEQ ID NO: 897237 - DNA, 15 bp, Homo sapiens
ttgccaagaatccaa

SEQ ID NO: 897238 - DNA, 15 bp, Homo sapiens
tgccaagaatccaat

SEQ ID NO: 897239 - DNA, 15 bp, Homo sapiens
gccaagaatccaatg

SEQ ID NO: 897240 - DNA, 15 bp, Homo sapiens
ccaagaatccaatgc

SEQ ID NO: 897241 - DNA, 15 bp, Homo sapiens
caagaatccaatgct

SEQ ID NO: 897242 - DNA, 15 bp, Homo sapiens
aagaatccaatgctg

SEQ ID NO: 897243 - DNA, 15 bp, Homo sapiens
agaatccaatgctga

SEQ ID NO: 897244 - DNA, 15 bp, Homo sapiens
gaatccaatgctgat

SEQ ID NO: 897245 - DNA, 15 bp, Homo sapiens
aatccaatgctgata

SEQ ID NO: 897246 - DNA, 15 bp, Homo sapiens
atccaatgctgatac

SEQ ID NO: 897247 - DNA, 15 bp, Homo sapiens
tccaatgctgatacc

SEQ ID NO: 897248 - DNA, 15 bp, Homo sapiens
ccaatgctgataccc

SEQ ID NO: 897249 - DNA, 15 bp, Homo sapiens
caatgctgataccct

SEQ ID NO: 897250 - DNA, 15 bp, Homo sapiens
aatgctgataccctg

SEQ ID NO: 897251 - DNA, 15 bp, Homo sapiens
atgctgataccctga

SEQ ID NO: 897252 - DNA, 15 bp, Homo sapiens
tgctgataccctgac

SEQ ID NO: 897253 - DNA, 15 bp, Homo sapiens
gctgataccctgact

SEQ ID NO: 897254 - DNA, 15 bp, Homo sapiens
ctgataccctgactt

SEQ ID NO: 897255 - DNA, 15 bp, Homo sapiens
tgataccctgactta

SEQ ID NO: 897256 - DNA, 15 bp, Homo sapiens
gataccctgacttag

SEQ ID NO: 897257 - DNA, 15 bp, Homo sapiens
ataccctgacttaga

SEQ ID NO: 897258 - DNA, 15 bp, Homo sapiens
taccctgacttagag

SEQ ID NO: 897259 - DNA, 15 bp, Homo sapiens
accctgacttagagt

SEQ ID NO: 897260 - DNA, 15 bp, Homo sapiens
ccctgacttagagtt

SEQ ID NO: 897261 - DNA, 15 bp, Homo sapiens
cctgacttagagtta

SEQ ID NO: 897262 - DNA, 15 bp, Homo sapiens
ctgacttagagttaa

SEQ ID NO: 897263 - DNA, 15 bp, Homo sapiens
tgacttagagttaac

SEQ ID NO: 897264 - DNA, 15 bp, Homo sapiens
gacttagagttaaca

SEQ ID NO: 897265 - DNA, 15 bp, Homo sapiens
acttagagttaacaa

SEQ ID NO: 897266 - DNA, 15 bp, Homo sapiens
cttagagttaacaaa

SEQ ID NO: 897267 - DNA, 15 bp, Homo sapiens
ttagagttaacaaag

SEQ ID NO: 897268 - DNA, 15 bp, Homo sapiens
tagagttaacaaaga

SEQ ID NO: 897269 - DNA, 15 bp, Homo sapiens
agagttaacaaagaa

SEQ ID NO: 897270 - DNA, 15 bp, Homo sapiens
gagttaacaaagaaa

SEQ ID NO: 897271 - DNA, 15 bp, Homo sapiens
agttaacaaagaaaa

SEQ ID NO: 897272 - DNA, 15 bp, Homo sapiens
gttaacaaagaaaaa

SEQ ID NO: 897273 - DNA, 15 bp, Homo sapiens
ttaacaaagaaaaaa

SEQ ID NO: 897274 - DNA, 15 bp, Homo sapiens
taacaaagaaaaaaa

SEQ ID NO: 897275 - DNA, 15 bp, Homo sapiens
aacaaagaaaaaaat

SEQ ID NO: 897276 - DNA, 15 bp, Homo sapiens
acaaagaaaaaaatg

SEQ ID NO: 897277 - DNA, 15 bp, Homo sapiens
caaagaaaaaaatga

SEQ ID NO: 897278 - DNA, 15 bp, Homo sapiens
aaagaaaaaaatgag

SEQ ID NO: 897279 - DNA, 15 bp, Homo sapiens
aagaaaaaaatgagc

SEQ ID NO: 897280 - DNA, 15 bp, Homo sapiens
agaaaaaaatgagct

SEQ ID NO: 897281 - DNA, 15 bp, Homo sapiens
gaaaaaaatgagctg

SEQ ID NO: 897282 - DNA, 15 bp, Homo sapiens
aaaaaaatgagctga

SEQ ID NO: 897283 - DNA, 15 bp, Homo sapiens
aaaaaatgagctgaa

SEQ ID NO: 897284 - DNA, 15 bp, Homo sapiens
aaaaatgagctgaat

SEQ ID NO: 897285 - DNA, 15 bp, Homo sapiens
aaaatgagctgaata

SEQ ID NO: 897286 - DNA, 15 bp, Homo sapiens
aaatgagctgaatat

SEQ ID NO: 897287 - DNA, 15 bp, Homo sapiens
aatgagctgaatatc

SEQ ID NO: 897288 - DNA, 15 bp, Homo sapiens
atgagctgaatatct

SEQ ID NO: 897289 - DNA, 15 bp, Homo sapiens
tgagctgaatatctt

SEQ ID NO: 897290 - DNA, 15 bp, Homo sapiens
gagctgaatatctta

SEQ ID NO: 897291 - DNA, 15 bp, Homo sapiens
agctgaatatcttat

SEQ ID NO: 897292 - DNA, 15 bp, Homo sapiens
gctgaatatcttatc

SEQ ID NO: 897293 - DNA, 15 bp, Homo sapiens
ctgaatatcttatca

SEQ ID NO: 897294 - DNA, 15 bp, Homo sapiens
tgaatatcttatcac

SEQ ID NO: 897295 - DNA, 15 bp, Homo sapiens
gaatatcttatcacc

SEQ ID NO: 897296 - DNA, 15 bp, Homo sapiens
aatatcttatcacca

SEQ ID NO: 897297 - DNA, 15 bp, Homo sapiens
atatcttatcaccat

SEQ ID NO: 897298 - DNA, 15 bp, Homo sapiens
tatcttatcaccatc

SEQ ID NO: 897299 - DNA, 15 bp, Homo sapiens
atcttatcaccatca

SEQ ID NO: 897300 - DNA, 15 bp, Homo sapiens
tcttatcaccatcat

SEQ ID NO: 897301 - DNA, 15 bp, Homo sapiens
cttatcaccatcatc

SEQ ID NO: 897302 - DNA, 15 bp, Homo sapiens
ttatcaccatcatca

SEQ ID NO: 897303 - DNA, 15 bp, Homo sapiens
tatcaccatcatcaa

SEQ ID NO: 897304 - DNA, 15 bp, Homo sapiens
atcaccatcatcaaa

SEQ ID NO: 897305 - DNA, 15 bp, Homo sapiens
tcaccatcatcaaag

SEQ ID NO: 897306 - DNA, 15 bp, Homo sapiens
caccatcatcaaagc

SEQ ID NO: 897307 - DNA, 15 bp, Homo sapiens
accatcatcaaagct

SEQ ID NO: 897308 - DNA, 15 bp, Homo sapiens
ccatcatcaaagctg

SEQ ID NO: 897309 - DNA, 15 bp, Homo sapiens
catcatcaaagctgc

SEQ ID NO: 897310 - DNA, 15 bp, Homo sapiens
atcatcaaagctgca

SEQ ID NO: 897311 - DNA, 15 bp, Homo sapiens
tcatcaaagctgcaa

SEQ ID NO: 897312 - DNA, 15 bp, Homo sapiens
catcaaagctgcaac

SEQ ID NO: 897313 - DNA, 15 bp, Homo sapiens
atcaaagctgcaacc

SEQ ID NO: 897314 - DNA, 15 bp, Homo sapiens
tcaaagctgcaaccc

SEQ ID NO: 897315 - DNA, 15 bp, Homo sapiens
caaagctgcaaccct

SEQ ID NO: 897316 - DNA, 15 bp, Homo sapiens
aaagctgcaaccctg

SEQ ID NO: 897317 - DNA, 15 bp, Homo sapiens
aagctgcaaccctgc

SEQ ID NO: 897318 - DNA, 15 bp, Homo sapiens
agctgcaaccctgca

SEQ ID NO: 897319 - DNA, 15 bp, Homo sapiens
gctgcaaccctgcaa

SEQ ID NO: 897320 - DNA, 15 bp, Homo sapiens
ctgcaaccctgcaac

SEQ ID NO: 897321 - DNA, 15 bp, Homo sapiens
tgcaaccctgcaacc

SEQ ID NO: 897322 - DNA, 15 bp, Homo sapiens
gcaaccctgcaacct

SEQ ID NO: 897323 - DNA, 15 bp, Homo sapiens
caaccctgcaaccta

SEQ ID NO: 897324 - DNA, 15 bp, Homo sapiens
aaccctgcaacctag

SEQ ID NO: 897325 - DNA, 15 bp, Homo sapiens
accctgcaacctaga

SEQ ID NO: 897326 - DNA, 15 bp, Homo sapiens
ccctgcaacctagaa

SEQ ID NO: 897327 - DNA, 15 bp, Homo sapiens
cctgcaacctagaat

SEQ ID NO: 897328 - DNA, 15 bp, Homo sapiens
ctgcaacctagaatt

SEQ ID NO: 897329 - DNA, 15 bp, Homo sapiens
tgcaacctagaattt

SEQ ID NO: 897330 - DNA, 15 bp, Homo sapiens
gcaacctagaatttc

SEQ ID NO: 897331 - DNA, 15 bp, Homo sapiens
caacctagaatttca

SEQ ID NO: 897332 - DNA, 15 bp, Homo sapiens
aacctagaatttcat

SEQ ID NO: 897333 - DNA, 15 bp, Homo sapiens
acctagaatttcatt

SEQ ID NO: 897334 - DNA, 15 bp, Homo sapiens
cctagaatttcattc

SEQ ID NO: 897335 - DNA, 15 bp, Homo sapiens
ctagaatttcattca

SEQ ID NO: 897336 - DNA, 15 bp, Homo sapiens
tagaatttcattcat

SEQ ID NO: 897337 - DNA, 15 bp, Homo sapiens
agaatttcattcatc

SEQ ID NO: 897338 - DNA, 15 bp, Homo sapiens
gaatttcattcatct

SEQ ID NO: 897339 - DNA, 15 bp, Homo sapiens
aatttcattcatctt

SEQ ID NO: 897340 - DNA, 15 bp, Homo sapiens
atttcattcatcttt

SEQ ID NO: 897341 - DNA, 15 bp, Homo sapiens
tttcattcatctttc

SEQ ID NO: 897342 - DNA, 15 bp, Homo sapiens
ttcattcatctttca

SEQ ID NO: 897343 - DNA, 15 bp, Homo sapiens
tcattcatctttcac

SEQ ID NO: 897344 - DNA, 15 bp, Homo sapiens
cattcatctttcaca

SEQ ID NO: 897345 - DNA, 15 bp, Homo sapiens
attcatctttcacag

SEQ ID NO: 897346 - DNA, 15 bp, Homo sapiens
ttcatctttcacagt

SEQ ID NO: 897347 - DNA, 15 bp, Homo sapiens
tcatctttcacagtg

SEQ ID NO: 897348 - DNA, 15 bp, Homo sapiens
catctttcacagtgg

SEQ ID NO: 897349 - DNA, 15 bp, Homo sapiens
atctttcacagtggt

SEQ ID NO: 897350 - DNA, 15 bp, Homo sapiens
tctttcacagtggtt

SEQ ID NO: 897351 - DNA, 15 bp, Homo sapiens
ctttcacagtggtta

SEQ ID NO: 897352 - DNA, 15 bp, Homo sapiens
tttcacagtggttaa

SEQ ID NO: 897353 - DNA, 15 bp, Homo sapiens
ttcacagtggttaac

SEQ ID NO: 897354 - DNA, 15 bp, Homo sapiens
tcacagtggttaaca

SEQ ID NO: 897355 - DNA, 15 bp, Homo sapiens
cacagtggttaacaa

SEQ ID NO: 897356 - DNA, 15 bp, Homo sapiens
acagtggttaacaag

SEQ ID NO: 897357 - DNA, 15 bp, Homo sapiens
cagtggttaacaagc

SEQ ID NO: 897358 - DNA, 15 bp, Homo sapiens
agtggttaacaagct

SEQ ID NO: 897359 - DNA, 15 bp, Homo sapiens
gtggttaacaagctc

SEQ ID NO: 897360 - DNA, 15 bp, Homo sapiens
tggttaacaagctca

SEQ ID NO: 897361 - DNA, 15 bp, Homo sapiens
ggttaacaagctcaa

SEQ ID NO: 897362 - DNA, 15 bp, Homo sapiens
gttaacaagctcaaa

SEQ ID NO: 897363 - DNA, 15 bp, Homo sapiens
ttaacaagctcaaaa

SEQ ID NO: 897364 - DNA, 15 bp, Homo sapiens
taacaagctcaaaaa

SEQ ID NO: 897365 - DNA, 15 bp, Homo sapiens
aacaagctcaaaaaa

SEQ ID NO: 897366 - DNA, 15 bp, Homo sapiens
acaagctcaaaaaaa

SEQ ID NO: 897367 - DNA, 15 bp, Homo sapiens
caagctcaaaaaaaa

SEQ ID NO: 897368 - DNA, 15 bp, Homo sapiens
aagctcaaaaaaaag

SEQ ID NO: 897369 - DNA, 15 bp, Homo sapiens
agctcaaaaaaaagc

SEQ ID NO: 897370 - DNA, 15 bp, Homo sapiens
gctcaaaaaaaagct

SEQ ID NO: 897371 - DNA, 15 bp, Homo sapiens
ctcaaaaaaaagctt

SEQ ID NO: 897372 - DNA, 15 bp, Homo sapiens
tcaaaaaaaagcttt

SEQ ID NO: 897373 - DNA, 15 bp, Homo sapiens
caaaaaaaagctttc

SEQ ID NO: 897374 - DNA, 15 bp, Homo sapiens
aaaaaaaagctttct

SEQ ID NO: 897375 - DNA, 15 bp, Homo sapiens
aaaaaaagctttctt

SEQ ID NO: 897376 - DNA, 15 bp, Homo sapiens
aaaaaagctttcttt

SEQ ID NO: 897377 - DNA, 15 bp, Homo sapiens
aaaaagctttctttt

SEQ ID NO: 897378 - DNA, 15 bp, Homo sapiens
aaaagctttcttttt

SEQ ID NO: 897379 - DNA, 15 bp, Homo sapiens
aaagctttctttttc

SEQ ID NO: 897380 - DNA, 15 bp, Homo sapiens
aagctttctttttct

SEQ ID NO: 897381 - DNA, 15 bp, Homo sapiens
agctttctttttctt

SEQ ID NO: 897382 - DNA, 15 bp, Homo sapiens
gctttctttttcttt

SEQ ID NO: 897383 - DNA, 15 bp, Homo sapiens
ctttctttttctttt

SEQ ID NO: 897384 - DNA, 15 bp, Homo sapiens
tttctttttcttttt

SEQ ID NO: 897385 - DNA, 15 bp, Homo sapiens
ttctttttctttttc

SEQ ID NO: 897386 - DNA, 15 bp, Homo sapiens
tctttttctttttct

SEQ ID NO: 897387 - DNA, 15 bp, Homo sapiens
ctttttctttttctt

SEQ ID NO: 897388 - DNA, 15 bp, Homo sapiens
tttttctttttcttt

SEQ ID NO: 897389 - DNA, 15 bp, Homo sapiens
ttttctttttctttc

SEQ ID NO: 897390 - DNA, 15 bp, Homo sapiens
tttctttttctttct

SEQ ID NO: 897391 - DNA, 15 bp, Homo sapiens
ttctttttctttctt

SEQ ID NO: 897392 - DNA, 15 bp, Homo sapiens
tctttttctttcttt

SEQ ID NO: 897393 - DNA, 15 bp, Homo sapiens
ctttttctttctttt

SEQ ID NO: 897394 - DNA, 15 bp, Homo sapiens
tttttctttcttttt

SEQ ID NO: 897395 - DNA, 15 bp, Homo sapiens
ttttctttctttttt

SEQ ID NO: 897396 - DNA, 15 bp, Homo sapiens
tttctttcttttttt

SEQ ID NO: 897397 - DNA, 15 bp, Homo sapiens
ttctttctttttttt

SEQ ID NO: 897398 - DNA, 15 bp, Homo sapiens
tttcttttttttttc

SEQ ID NO: 897399 - DNA, 15 bp, Homo sapiens
ttcttttttttttct

SEQ ID NO: 897400 - DNA, 15 bp, Homo sapiens
tcttttttttttctt

SEQ ID NO: 897401 - DNA, 15 bp, Homo sapiens
cttttttttttcttt

SEQ ID NO: 897402 - DNA, 15 bp, Homo sapiens
ttttttttttctttt

SEQ ID NO: 897403 - DNA, 15 bp, Homo sapiens
tttttttttctttta

SEQ ID NO: 897404 - DNA, 15 bp, Homo sapiens
ttttttttcttttaa

SEQ ID NO: 897405 - DNA, 15 bp, Homo sapiens
tttttttcttttaag

SEQ ID NO: 897406 - DNA, 15 bp, Homo sapiens
ttttttcttttaagg

SEQ ID NO: 897407 - DNA, 15 bp, Homo sapiens
tttttcttttaaggc

SEQ ID NO: 897408 - DNA, 15 bp, Homo sapiens
ttttcttttaaggca

SEQ ID NO: 897409 - DNA, 15 bp, Homo sapiens
tttcttttaaggcaa

SEQ ID NO: 897410 - DNA, 15 bp, Homo sapiens
ttcttttaaggcaag

SEQ ID NO: 897411 - DNA, 15 bp, Homo sapiens
tcttttaaggcaagg

SEQ ID NO: 897412 - DNA, 15 bp, Homo sapiens
cttttaaggcaaggt

SEQ ID NO: 897413 - DNA, 15 bp, Homo sapiens
ttttaaggcaaggtc

SEQ ID NO: 897414 - DNA, 15 bp, Homo sapiens
tttaaggcaaggtct

SEQ ID NO: 897415 - DNA, 15 bp, Homo sapiens
ttaaggcaaggtctc

SEQ ID NO: 897416 - DNA, 15 bp, Homo sapiens
taaggcaaggtctca

SEQ ID NO: 897417 - DNA, 15 bp, Homo sapiens
aaggcaaggtctcac

SEQ ID NO: 897418 - DNA, 15 bp, Homo sapiens
aggcaaggtctcact

SEQ ID NO: 897419 - DNA, 15 bp, Homo sapiens
ggcaaggtctcactc

SEQ ID NO: 897420 - DNA, 15 bp, Homo sapiens
gcaaggtctcactct

SEQ ID NO: 897421 - DNA, 15 bp, Homo sapiens
caaggtctcactctg

SEQ ID NO: 897422 - DNA, 15 bp, Homo sapiens
aaggtctcactctgt

SEQ ID NO: 897423 - DNA, 15 bp, Homo sapiens
aggtctcactctgtc

SEQ ID NO: 897424 - DNA, 15 bp, Homo sapiens
ggtctcactctgtca

SEQ ID NO: 897425 - DNA, 15 bp, Homo sapiens
gtctcactctgtcac

SEQ ID NO: 897426 - DNA, 15 bp, Homo sapiens
tctcactctgtcacc

SEQ ID NO: 897427 - DNA, 15 bp, Homo sapiens
ctcactctgtcaccc

SEQ ID NO: 897428 - DNA, 15 bp, Homo sapiens
tcactctgtcaccca

SEQ ID NO: 897429 - DNA, 15 bp, Homo sapiens
cactctgtcacccag

SEQ ID NO: 897430 - DNA, 15 bp, Homo sapiens
actctgtcacccagg

SEQ ID NO: 897431 - DNA, 15 bp, Homo sapiens
ctctgtcacccaggc

SEQ ID NO: 897432 - DNA, 15 bp, Homo sapiens
tctgtcacccaggct

SEQ ID NO: 897433 - DNA, 15 bp, Homo sapiens
ctgtcacccaggctg

SEQ ID NO: 897434 - DNA, 15 bp, Homo sapiens
tcacccaggctggac

SEQ ID NO: 897435 - DNA, 15 bp, Homo sapiens
cacccaggctggact

SEQ ID NO: 897436 - DNA, 15 bp, Homo sapiens
acccaggctggactg

SEQ ID NO: 897437 - DNA, 15 bp, Homo sapiens
cccaggctggactgg

SEQ ID NO: 897438 - DNA, 15 bp, Homo sapiens
ccaggctggactgga

SEQ ID NO: 897439 - DNA, 15 bp, Homo sapiens
caggctggactggag

SEQ ID NO: 897440 - DNA, 15 bp, Homo sapiens
aggctggactggagt

SEQ ID NO: 897441 - DNA, 15 bp, Homo sapiens
ggctggactggagtg

SEQ ID NO: 897442 - DNA, 15 bp, Homo sapiens
gctggactggagtgc

SEQ ID NO: 897443 - DNA, 15 bp, Homo sapiens
ctggactggagtgca

SEQ ID NO: 897444 - DNA, 15 bp, Homo sapiens
tggactggagtgcag

SEQ ID NO: 897445 - DNA, 15 bp, Homo sapiens
ggactggagtgcagt

SEQ ID NO: 897446 - DNA, 15 bp, Homo sapiens
gactggagtgcagtg

SEQ ID NO: 897447 - DNA, 15 bp, Homo sapiens
actggagtgcagtgg

SEQ ID NO: 897448 - DNA, 15 bp, Homo sapiens
ctggagtgcagtggt

SEQ ID NO: 897449 - DNA, 15 bp, Homo sapiens
tggagtgcagtggta

SEQ ID NO: 897450 - DNA, 15 bp, Homo sapiens
ggagtgcagtggtat

SEQ ID NO: 897451 - DNA, 15 bp, Homo sapiens
gagtgcagtggtata

SEQ ID NO: 897452 - DNA, 15 bp, Homo sapiens
agtgcagtggtataa

SEQ ID NO: 897453 - DNA, 15 bp, Homo sapiens
gtgcagtggtataat

SEQ ID NO: 897454 - DNA, 15 bp, Homo sapiens
tgcagtggtataatc

SEQ ID NO: 897455 - DNA, 15 bp, Homo sapiens
gcagtggtataatca

SEQ ID NO: 897456 - DNA, 15 bp, Homo sapiens
cagtggtataatcac

SEQ ID NO: 897457 - DNA, 15 bp, Homo sapiens
agtggtataatcacg

SEQ ID NO: 897458 - DNA, 15 bp, Homo sapiens
gtggtataatcacgg

SEQ ID NO: 897459 - DNA, 15 bp, Homo sapiens
tggtataatcacggt

SEQ ID NO: 897460 - DNA, 15 bp, Homo sapiens
ggtataatcacggtt

SEQ ID NO: 897461 - DNA, 15 bp, Homo sapiens
gtataatcacggttc

SEQ ID NO: 897462 - DNA, 15 bp, Homo sapiens
tataatcacggttca

SEQ ID NO: 897463 - DNA, 15 bp, Homo sapiens
ataatcacggttcac

SEQ ID NO: 897464 - DNA, 15 bp, Homo sapiens
taatcacggttcact

SEQ ID NO: 897465 - DNA, 15 bp, Homo sapiens
aatcacggttcactg

SEQ ID NO: 897466 - DNA, 15 bp, Homo sapiens
atcacggttcactgc

SEQ ID NO: 897467 - DNA, 15 bp, Homo sapiens
tcacggttcactgca

SEQ ID NO: 897468 - DNA, 15 bp, Homo sapiens
cacggttcactgcag

SEQ ID NO: 897469 - DNA, 15 bp, Homo sapiens
acggttcactgcagc

SEQ ID NO: 897470 - DNA, 15 bp, Homo sapiens
cggttcactgcagcc

SEQ ID NO: 897471 - DNA, 15 bp, Homo sapiens
ggttcactgcagcct

SEQ ID NO: 897472 - DNA, 15 bp, Homo sapiens
gttcactgcagcctc

SEQ ID NO: 897473 - DNA, 15 bp, Homo sapiens
ttcactgcagcctca

SEQ ID NO: 897474 - DNA, 15 bp, Homo sapiens
tcactgcagcctcag

SEQ ID NO: 897475 - DNA, 15 bp, Homo sapiens
cactgcagcctcaga

SEQ ID NO: 897476 - DNA, 15 bp, Homo sapiens
actgcagcctcagac

SEQ ID NO: 897477 - DNA, 15 bp, Homo sapiens
ctgcagcctcagact

SEQ ID NO: 897478 - DNA, 15 bp, Homo sapiens
tgcagcctcagactt

SEQ ID NO: 897479 - DNA, 15 bp, Homo sapiens
gcagcctcagacttc

SEQ ID NO: 897480 - DNA, 15 bp, Homo sapiens
cagcctcagacttct

SEQ ID NO: 897481 - DNA, 15 bp, Homo sapiens
agcctcagacttctg

SEQ ID NO: 897482 - DNA, 15 bp, Homo sapiens
gcctcagacttctgg

SEQ ID NO: 897483 - DNA, 15 bp, Homo sapiens
cctcagacttctggg

SEQ ID NO: 897484 - DNA, 15 bp, Homo sapiens
ctcagacttctgggc

SEQ ID NO: 897485 - DNA, 15 bp, Homo sapiens
tcagacttctgggct

SEQ ID NO: 897486 - DNA, 15 bp, Homo sapiens
cagacttctgggctc

SEQ ID NO: 897487 - DNA, 15 bp, Homo sapiens
agacttctgggctca

SEQ ID NO: 897488 - DNA, 15 bp, Homo sapiens
gacttctgggctcaa

SEQ ID NO: 897489 - DNA, 15 bp, Homo sapiens
acttctgggctcaaa

SEQ ID NO: 897490 - DNA, 15 bp, Homo sapiens
cttctgggctcaaac

SEQ ID NO: 897491 - DNA, 15 bp, Homo sapiens
ttctgggctcaaaca

SEQ ID NO: 897492 - DNA, 15 bp, Homo sapiens
tctgggctcaaacaa

SEQ ID NO: 897493 - DNA, 15 bp, Homo sapiens
ctgggctcaaacaat

SEQ ID NO: 897494 - DNA, 15 bp, Homo sapiens
tgggctcaaacaatc

SEQ ID NO: 897495 - DNA, 15 bp, Homo sapiens
gggctcaaacaatcc

SEQ ID NO: 897496 - DNA, 15 bp, Homo sapiens
ggctcaaacaatcct

SEQ ID NO: 897497 - DNA, 15 bp, Homo sapiens
gctcaaacaatcctc

SEQ ID NO: 897498 - DNA, 15 bp, Homo sapiens
ctcaaacaatcctcc

SEQ ID NO: 897499 - DNA, 15 bp, Homo sapiens
tcaaacaatcctccc

SEQ ID NO: 897500 - DNA, 15 bp, Homo sapiens
caaacaatcctccca

SEQ ID NO: 897501 - DNA, 15 bp, Homo sapiens
aaacaatcctcccac

SEQ ID NO: 897502 - DNA, 15 bp, Homo sapiens
aacaatcctcccacc

SEQ ID NO: 897503 - DNA, 15 bp, Homo sapiens
acaatcctcccacct

SEQ ID NO: 897504 - DNA, 15 bp, Homo sapiens
tgatttaacagtgat

SEQ ID NO: 897505 - DNA, 15 bp, Homo sapiens
gatttaacagtgata

SEQ ID NO: 897506 - DNA, 15 bp, Homo sapiens
atttaacagtgataa

SEQ ID NO: 897507 - DNA, 15 bp, Homo sapiens
tttaacagtgataat

SEQ ID NO: 897508 - DNA, 15 bp, Homo sapiens
ttaacagtgataata

SEQ ID NO: 897509 - DNA, 15 bp, Homo sapiens
taacagtgataataa

SEQ ID NO: 897510 - DNA, 15 bp, Homo sapiens
aacagtgataataac

SEQ ID NO: 897511 - DNA, 15 bp, Homo sapiens
acagtgataataact

SEQ ID NO: 897512 - DNA, 15 bp, Homo sapiens
cagtgataataactt

SEQ ID NO: 897513 - DNA, 15 bp, Homo sapiens
agtgataataacttt

SEQ ID NO: 897514 - DNA, 15 bp, Homo sapiens
gtgataataactttt

SEQ ID NO: 897515 - DNA, 15 bp, Homo sapiens
tgataataacttttc

SEQ ID NO: 897516 - DNA, 15 bp, Homo sapiens
gataataacttttca

SEQ ID NO: 897517 - DNA, 15 bp, Homo sapiens
ataataacttttcac

SEQ ID NO: 897518 - DNA, 15 bp, Homo sapiens
taataacttttcact

SEQ ID NO: 897519 - DNA, 15 bp, Homo sapiens
aataacttttcactt

SEQ ID NO: 897520 - DNA, 15 bp, Homo sapiens
ataacttttcacttg

SEQ ID NO: 897521 - DNA, 15 bp, Homo sapiens
taacttttcacttgg

SEQ ID NO: 897522 - DNA, 15 bp, Homo sapiens
aacttttcacttggg

SEQ ID NO: 897523 - DNA, 15 bp, Homo sapiens
acttttcacttgggg

SEQ ID NO: 897524 - DNA, 15 bp, Homo sapiens
cttttcacttggggc

SEQ ID NO: 897525 - DNA, 15 bp, Homo sapiens
ttttcacttggggcc

SEQ ID NO: 897526 - DNA, 15 bp, Homo sapiens
tttcacttggggcct

SEQ ID NO: 897527 - DNA, 15 bp, Homo sapiens
ttcacttggggccta

SEQ ID NO: 897528 - DNA, 15 bp, Homo sapiens
tcacttggggcctac

SEQ ID NO: 897529 - DNA, 15 bp, Homo sapiens
cacttggggcctaca

SEQ ID NO: 897530 - DNA, 15 bp, Homo sapiens
acttggggcctacag

SEQ ID NO: 897531 - DNA, 15 bp, Homo sapiens
cttggggcctacagt

SEQ ID NO: 897532 - DNA, 15 bp, Homo sapiens
ttggggcctacagta

SEQ ID NO: 897533 - DNA, 15 bp, Homo sapiens
tggggcctacagtac

SEQ ID NO: 897534 - DNA, 15 bp, Homo sapiens
ggggcctacagtact

SEQ ID NO: 897535 - DNA, 15 bp, Homo sapiens
gggcctacagtactg

SEQ ID NO: 897536 - DNA, 15 bp, Homo sapiens
ggcctacagtactgc

SEQ ID NO: 897537 - DNA, 15 bp, Homo sapiens
gcctacagtactgct

SEQ ID NO: 897538 - DNA, 15 bp, Homo sapiens
cctacagtactgctt

SEQ ID NO: 897539 - DNA, 15 bp, Homo sapiens
ctacagtactgctta

SEQ ID NO: 897540 - DNA, 15 bp, Homo sapiens
tacagtactgcttat

SEQ ID NO: 897541 - DNA, 15 bp, Homo sapiens
acagtactgcttatc

SEQ ID NO: 897542 - DNA, 15 bp, Homo sapiens
cagtactgcttatca

SEQ ID NO: 897543 - DNA, 15 bp, Homo sapiens
agtactgcttatcag

SEQ ID NO: 897544 - DNA, 15 bp, Homo sapiens
gtactgcttatcaga

SEQ ID NO: 897545 - DNA, 15 bp, Homo sapiens
tactgcttatcagag

SEQ ID NO: 897546 - DNA, 15 bp, Homo sapiens
actgcttatcagaga

SEQ ID NO: 897547 - DNA, 15 bp, Homo sapiens
ctgcttatcagagaa

SEQ ID NO: 897548 - DNA, 15 bp, Homo sapiens
tgcttatcagagaag

SEQ ID NO: 897549 - DNA, 15 bp, Homo sapiens
gcttatcagagaagc

SEQ ID NO: 897550 - DNA, 15 bp, Homo sapiens
cttatcagagaagcc

SEQ ID NO: 897551 - DNA, 15 bp, Homo sapiens
ttatcagagaagcca

SEQ ID NO: 897552 - DNA, 15 bp, Homo sapiens
tatcagagaagccaa

SEQ ID NO: 897553 - DNA, 15 bp, Homo sapiens
atcagagaagccaaa

SEQ ID NO: 897554 - DNA, 15 bp, Homo sapiens
tcagagaagccaaag

SEQ ID NO: 897555 - DNA, 15 bp, Homo sapiens
cagagaagccaaagc

SEQ ID NO: 897556 - DNA, 15 bp, Homo sapiens
agagaagccaaagct

SEQ ID NO: 897557 - DNA, 15 bp, Homo sapiens
gagaagccaaagctt

SEQ ID NO: 897558 - DNA, 15 bp, Homo sapiens
agaagccaaagcttc

SEQ ID NO: 897559 - DNA, 15 bp, Homo sapiens
gaagccaaagcttct

SEQ ID NO: 897560 - DNA, 15 bp, Homo sapiens
aagccaaagcttctc

SEQ ID NO: 897561 - DNA, 15 bp, Homo sapiens
agccaaagcttctcc

SEQ ID NO: 897562 - DNA, 15 bp, Homo sapiens
gccaaagcttctccc

SEQ ID NO: 897563 - DNA, 15 bp, Homo sapiens
ccaaagcttctcccc

SEQ ID NO: 897564 - DNA, 15 bp, Homo sapiens
caaagcttctccccc

SEQ ID NO: 897565 - DNA, 15 bp, Homo sapiens
aaagcttctccccct

SEQ ID NO: 897566 - DNA, 15 bp, Homo sapiens
aagcttctccccctg

SEQ ID NO: 897567 - DNA, 15 bp, Homo sapiens
agcttctccccctgg

SEQ ID NO: 897568 - DNA, 15 bp, Homo sapiens
gcttctccccctgga

SEQ ID NO: 897569 - DNA, 15 bp, Homo sapiens
cttctccccctggag

SEQ ID NO: 897570 - DNA, 15 bp, Homo sapiens
ttctccccctggagc

SEQ ID NO: 897571 - DNA, 15 bp, Homo sapiens
tctccccctggagct

SEQ ID NO: 897572 - DNA, 15 bp, Homo sapiens
ctccccctggagctg

SEQ ID NO: 897573 - DNA, 15 bp, Homo sapiens
tccccctggagctgg

SEQ ID NO: 897574 - DNA, 15 bp, Homo sapiens
ccccctggagctgga

SEQ ID NO: 897575 - DNA, 15 bp, Homo sapiens
cccctggagctggag

SEQ ID NO: 897576 - DNA, 15 bp, Homo sapiens
ccctggagctggaga

SEQ ID NO: 897577 - DNA, 15 bp, Homo sapiens
cctggagctggagaa

SEQ ID NO: 897578 - DNA, 15 bp, Homo sapiens
ctggagctggagaag

SEQ ID NO: 897579 - DNA, 15 bp, Homo sapiens
tggagctggagaaga

SEQ ID NO: 897580 - DNA, 15 bp, Homo sapiens
ggagctggagaagac

SEQ ID NO: 897581 - DNA, 15 bp, Homo sapiens
gagctggagaagaca

SEQ ID NO: 897582 - DNA, 15 bp, Homo sapiens
agctggagaagacag

SEQ ID NO: 897583 - DNA, 15 bp, Homo sapiens
gctggagaagacagc

SEQ ID NO: 897584 - DNA, 15 bp, Homo sapiens
ctggagaagacagcc

SEQ ID NO: 897585 - DNA, 15 bp, Homo sapiens
tggagaagacagcca

SEQ ID NO: 897586 - DNA, 15 bp, Homo sapiens
ggagaagacagccat

SEQ ID NO: 897587 - DNA, 15 bp, Homo sapiens
gagaagacagccatc

SEQ ID NO: 897588 - DNA, 15 bp, Homo sapiens
agaagacagccatcc

SEQ ID NO: 897589 - DNA, 15 bp, Homo sapiens
gaagacagccatcca

SEQ ID NO: 897590 - DNA, 15 bp, Homo sapiens
aagacagccatccaa

SEQ ID NO: 897591 - DNA, 15 bp, Homo sapiens
agacagccatccaaa

SEQ ID NO: 897592 - DNA, 15 bp, Homo sapiens
gacagccatccaaaa

SEQ ID NO: 897593 - DNA, 15 bp, Homo sapiens
acagccatccaaaat

SEQ ID NO: 897594 - DNA, 15 bp, Homo sapiens
cagccatccaaaatt

SEQ ID NO: 897595 - DNA, 15 bp, Homo sapiens
agccatccaaaatta

SEQ ID NO: 897596 - DNA, 15 bp, Homo sapiens
gccatccaaaattac

SEQ ID NO: 897597 - DNA, 15 bp, Homo sapiens
ccatccaaaattaca

SEQ ID NO: 897598 - DNA, 15 bp, Homo sapiens
catccaaaattacac

SEQ ID NO: 897599 - DNA, 15 bp, Homo sapiens
atccaaaattacact

SEQ ID NO: 897600 - DNA, 15 bp, Homo sapiens
tccaaaattacactg

SEQ ID NO: 897601 - DNA, 15 bp, Homo sapiens
ccaaaattacactgt

SEQ ID NO: 897602 - DNA, 15 bp, Homo sapiens
caaaattacactgtc

SEQ ID NO: 897603 - DNA, 15 bp, Homo sapiens
aaaattacactgtca

SEQ ID NO: 897604 - DNA, 15 bp, Homo sapiens
aaattacactgtcac

SEQ ID NO: 897605 - DNA, 15 bp, Homo sapiens
aattacactgtcacg

SEQ ID NO: 897606 - DNA, 15 bp, Homo sapiens
attacactgtcacgg

SEQ ID NO: 897607 - DNA, 15 bp, Homo sapiens
ttacactgtcacgga

SEQ ID NO: 897608 - DNA, 15 bp, Homo sapiens
tacactgtcacggag

SEQ ID NO: 897609 - DNA, 15 bp, Homo sapiens
acactgtcacggagt

SEQ ID NO: 897610 - DNA, 15 bp, Homo sapiens
cactgtcacggagtt

SEQ ID NO: 897611 - DNA, 15 bp, Homo sapiens
actgtcacggagttc

SEQ ID NO: 897612 - DNA, 15 bp, Homo sapiens
ctgtcacggagttcc

SEQ ID NO: 897613 - DNA, 15 bp, Homo sapiens
tgtcacggagttcca

SEQ ID NO: 897614 - DNA, 15 bp, Homo sapiens
gtcacggagttccag

SEQ ID NO: 897615 - DNA, 15 bp, Homo sapiens
tcacggagttccagc

SEQ ID NO: 897616 - DNA, 15 bp, Homo sapiens
cacggagttccagcc

SEQ ID NO: 897617 - DNA, 15 bp, Homo sapiens
acggagttccagccc

SEQ ID NO: 897618 - DNA, 15 bp, Homo sapiens
cggagttccagcccc

SEQ ID NO: 897619 - DNA, 15 bp, Homo sapiens
ggagttccagcccct

SEQ ID NO: 897620 - DNA, 15 bp, Homo sapiens
gagttccagcccctc

SEQ ID NO: 897621 - DNA, 15 bp, Homo sapiens
agttccagcccctct

SEQ ID NO: 897622 - DNA, 15 bp, Homo sapiens
gttccagcccctcta

SEQ ID NO: 897623 - DNA, 15 bp, Homo sapiens
ttccagcccctctat

SEQ ID NO: 897624 - DNA, 15 bp, Homo sapiens
tccagcccctctatt

SEQ ID NO: 897625 - DNA, 15 bp, Homo sapiens
ccagcccctctatta

SEQ ID NO: 897626 - DNA, 15 bp, Homo sapiens
cagcccctctattac

SEQ ID NO: 897627 - DNA, 15 bp, Homo sapiens
agcccctctattacg

SEQ ID NO: 897628 - DNA, 15 bp, Homo sapiens
gcccctctattacgt

SEQ ID NO: 897629 - DNA, 15 bp, Homo sapiens
cccctctattacgtg

SEQ ID NO: 897630 - DNA, 15 bp, Homo sapiens
ccctctattacgtgg

SEQ ID NO: 897631 - DNA, 15 bp, Homo sapiens
cctctattacgtggc

SEQ ID NO: 897632 - DNA, 15 bp, Homo sapiens
ctctattacgtggca

SEQ ID NO: 897633 - DNA, 15 bp, Homo sapiens
tctattacgtggcag

SEQ ID NO: 897634 - DNA, 15 bp, Homo sapiens
ctattacgtggcaga

SEQ ID NO: 897635 - DNA, 15 bp, Homo sapiens
tattacgtggcagag

SEQ ID NO: 897636 - DNA, 15 bp, Homo sapiens
attacgtggcagaga

SEQ ID NO: 897637 - DNA, 15 bp, Homo sapiens
ttacgtggcagagag

SEQ ID NO: 897638 - DNA, 15 bp, Homo sapiens
tacgtggcagagagt

SEQ ID NO: 897639 - DNA, 15 bp, Homo sapiens
acgtggcagagagtt

SEQ ID NO: 897640 - DNA, 15 bp, Homo sapiens
cgtggcagagagttt

SEQ ID NO: 897641 - DNA, 15 bp, Homo sapiens
gtggcagagagtttt

SEQ ID NO: 897642 - DNA, 15 bp, Homo sapiens
tggcagagagtttta

SEQ ID NO: 897643 - DNA, 15 bp, Homo sapiens
ggcagagagttttaa

SEQ ID NO: 897644 - DNA, 15 bp, Homo sapiens
gcagagagttttaat

SEQ ID NO: 897645 - DNA, 15 bp, Homo sapiens
cagagagttttaatg

SEQ ID NO: 897646 - DNA, 15 bp, Homo sapiens
agagagttttaatga

SEQ ID NO: 897647 - DNA, 15 bp, Homo sapiens
gagagttttaatgat

SEQ ID NO: 897648 - DNA, 15 bp, Homo sapiens
agagttttaatgatg

SEQ ID NO: 897649 - DNA, 15 bp, Homo sapiens
gagttttaatgatgc

SEQ ID NO: 897650 - DNA, 15 bp, Homo sapiens
agttttaatgatgcc

SEQ ID NO: 897651 - DNA, 15 bp, Homo sapiens
gttttaatgatgcca

SEQ ID NO: 897652 - DNA, 15 bp, Homo sapiens
ttttaatgatgccaa

SEQ ID NO: 897653 - DNA, 15 bp, Homo sapiens
tttaatgatgccaag

SEQ ID NO: 897654 - DNA, 15 bp, Homo sapiens
ttaatgatgccaagg

SEQ ID NO: 897655 - DNA, 15 bp, Homo sapiens
taatgatgccaagga

SEQ ID NO: 897656 - DNA, 15 bp, Homo sapiens
aatgatgccaaggag

SEQ ID NO: 897657 - DNA, 15 bp, Homo sapiens
atgatgccaaggaga

SEQ ID NO: 897658 - DNA, 15 bp, Homo sapiens
tgatgccaaggagaa

SEQ ID NO: 897659 - DNA, 15 bp, Homo sapiens
gatgccaaggagaaa

SEQ ID NO: 897660 - DNA, 15 bp, Homo sapiens
atgccaaggagaaag

SEQ ID NO: 897661 - DNA, 15 bp, Homo sapiens
tgccaaggagaaagt

SEQ ID NO: 897662 - DNA, 15 bp, Homo sapiens
gccaaggagaaagta

SEQ ID NO: 897663 - DNA, 15 bp, Homo sapiens
ccaaggagaaagtaa

SEQ ID NO: 897664 - DNA, 15 bp, Homo sapiens
caaggagaaagtaag

SEQ ID NO: 897665 - DNA, 15 bp, Homo sapiens
aaggagaaagtaagg

SEQ ID NO: 897666 - DNA, 15 bp, Homo sapiens
aggagaaagtaaggt

SEQ ID NO: 897667 - DNA, 15 bp, Homo sapiens
ggagaaagtaaggtg

SEQ ID NO: 897668 - DNA, 15 bp, Homo sapiens
gagaaagtaaggtga

SEQ ID NO: 897669 - DNA, 15 bp, Homo sapiens
agaaagtaaggtgag

SEQ ID NO: 897670 - DNA, 15 bp, Homo sapiens
gaaagtaaggtgagg

SEQ ID NO: 897671 - DNA, 15 bp, Homo sapiens
aaagtaaggtgaggt

SEQ ID NO: 897672 - DNA, 15 bp, Homo sapiens
aagtaaggtgaggtg

SEQ ID NO: 897673 - DNA, 15 bp, Homo sapiens
agtaaggtgaggtgg

SEQ ID NO: 897674 - DNA, 15 bp, Homo sapiens
gtaaggtgaggtggt

SEQ ID NO: 897675 - DNA, 15 bp, Homo sapiens
taaggtgaggtggtg

SEQ ID NO: 897676 - DNA, 15 bp, Homo sapiens
aaggtgaggtggtga

SEQ ID NO: 897677 - DNA, 15 bp, Homo sapiens
aggtgaggtggtgac

SEQ ID NO: 897678 - DNA, 15 bp, Homo sapiens
ggtgaggtggtgaca

SEQ ID NO: 897679 - DNA, 15 bp, Homo sapiens
gtgaggtggtgacaa

SEQ ID NO: 897680 - DNA, 15 bp, Homo sapiens
tgaggtggtgacaaa

SEQ ID NO: 897681 - DNA, 15 bp, Homo sapiens
gaggtggtgacaaag

SEQ ID NO: 897682 - DNA, 15 bp, Homo sapiens
aggtggtgacaaagg

SEQ ID NO: 897683 - DNA, 15 bp, Homo sapiens
ggtggtgacaaaggt

SEQ ID NO: 897684 - DNA, 15 bp, Homo sapiens
gtggtgacaaaggtg

SEQ ID NO: 897685 - DNA, 15 bp, Homo sapiens
tggtgacaaaggtga

SEQ ID NO: 897686 - DNA, 15 bp, Homo sapiens
ggtgacaaaggtgag

SEQ ID NO: 897687 - DNA, 15 bp, Homo sapiens
gtgacaaaggtgagc

SEQ ID NO: 897688 - DNA, 15 bp, Homo sapiens
tgacaaaggtgagcc

SEQ ID NO: 897689 - DNA, 15 bp, Homo sapiens
gacaaaggtgagcca

SEQ ID NO: 897690 - DNA, 15 bp, Homo sapiens
acaaaggtgagccac

SEQ ID NO: 897691 - DNA, 15 bp, Homo sapiens
caaaggtgagccact

SEQ ID NO: 897692 - DNA, 15 bp, Homo sapiens
aaaggtgagccacta

SEQ ID NO: 897693 - DNA, 15 bp, Homo sapiens
aaggtgagccactag

SEQ ID NO: 897694 - DNA, 15 bp, Homo sapiens
aggtgagccactagc

SEQ ID NO: 897695 - DNA, 15 bp, Homo sapiens
ggtgagccactagct

SEQ ID NO: 897696 - DNA, 15 bp, Homo sapiens
gtgagccactagctc

SEQ ID NO: 897697 - DNA, 15 bp, Homo sapiens
tgagccactagctct

SEQ ID NO: 897698 - DNA, 15 bp, Homo sapiens
gagccactagctctg

SEQ ID NO: 897699 - DNA, 15 bp, Homo sapiens
agccactagctctgg

SEQ ID NO: 897700 - DNA, 15 bp, Homo sapiens
gccactagctctggg

SEQ ID NO: 897701 - DNA, 15 bp, Homo sapiens
ccactagctctgggg

SEQ ID NO: 897702 - DNA, 15 bp, Homo sapiens
cactagctctggggg

SEQ ID NO: 897703 - DNA, 15 bp, Homo sapiens
actagctctgggggc

SEQ ID NO: 897704 - DNA, 15 bp, Homo sapiens
ctagctctgggggcc

SEQ ID NO: 897705 - DNA, 15 bp, Homo sapiens
tagctctgggggcct

SEQ ID NO: 897706 - DNA, 15 bp, Homo sapiens
agctctgggggcctc

SEQ ID NO: 897707 - DNA, 15 bp, Homo sapiens
gctctgggggcctcc

SEQ ID NO: 897708 - DNA, 15 bp, Homo sapiens
ctctgggggcctcct

SEQ ID NO: 897709 - DNA, 15 bp, Homo sapiens
tctgggggcctcctg

SEQ ID NO: 897710 - DNA, 15 bp, Homo sapiens
ctgggggcctcctga

SEQ ID NO: 897711 - DNA, 15 bp, Homo sapiens
tgggggcctcctgac

SEQ ID NO: 897712 - DNA, 15 bp, Homo sapiens
gggggcctcctgact

SEQ ID NO: 897713 - DNA, 15 bp, Homo sapiens
ggggcctcctgactg

SEQ ID NO: 897714 - DNA, 15 bp, Homo sapiens
gggcctcctgactgg

SEQ ID NO: 897715 - DNA, 15 bp, Homo sapiens
ggcctcctgactggt

SEQ ID NO: 897716 - DNA, 15 bp, Homo sapiens
gcctcctgactggtg

SEQ ID NO: 897717 - DNA, 15 bp, Homo sapiens
cctcctgactggtgc

SEQ ID NO: 897718 - DNA, 15 bp, Homo sapiens
ctcctgactggtgcc

SEQ ID NO: 897719 - DNA, 15 bp, Homo sapiens
tcctgactggtgcca

SEQ ID NO: 897720 - DNA, 15 bp, Homo sapiens
cctgactggtgccac

SEQ ID NO: 897721 - DNA, 15 bp, Homo sapiens
ctgactggtgccact

SEQ ID NO: 897722 - DNA, 15 bp, Homo sapiens
tgactggtgccactc

SEQ ID NO: 897723 - DNA, 15 bp, Homo sapiens
gactggtgccactca

SEQ ID NO: 897724 - DNA, 15 bp, Homo sapiens
actggtgccactcat

SEQ ID NO: 897725 - DNA, 15 bp, Homo sapiens
ctggtgccactcatc

SEQ ID NO: 897726 - DNA, 15 bp, Homo sapiens
tggtgccactcatct

SEQ ID NO: 897727 - DNA, 15 bp, Homo sapiens
ggtgccactcatctg

SEQ ID NO: 897728 - DNA, 15 bp, Homo sapiens
gtgccactcatctgt

SEQ ID NO: 897729 - DNA, 15 bp, Homo sapiens
tgccactcatctgtg

SEQ ID NO: 897730 - DNA, 15 bp, Homo sapiens
gccactcatctgtgg

SEQ ID NO: 897731 - DNA, 15 bp, Homo sapiens
ccactcatctgtggg

SEQ ID NO: 897732 - DNA, 15 bp, Homo sapiens
cactcatctgtgggt

SEQ ID NO: 897733 - DNA, 15 bp, Homo sapiens
actcatctgtgggtg

SEQ ID NO: 897734 - DNA, 15 bp, Homo sapiens
ctcatctgtgggtgg

SEQ ID NO: 897735 - DNA, 15 bp, Homo sapiens
tcatctgtgggtggt

SEQ ID NO: 897736 - DNA, 15 bp, Homo sapiens
catctgtgggtggtt

SEQ ID NO: 897737 - DNA, 15 bp, Homo sapiens
atctgtgggtggttg

SEQ ID NO: 897738 - DNA, 15 bp, Homo sapiens
tctgtgggtggttgg

SEQ ID NO: 897739 - DNA, 15 bp, Homo sapiens
ctgtgggtggttggc

SEQ ID NO: 897740 - DNA, 15 bp, Homo sapiens
tgtgggtggttggcc

SEQ ID NO: 897741 - DNA, 15 bp, Homo sapiens
gtgggtggttggcca

SEQ ID NO: 897742 - DNA, 15 bp, Homo sapiens
tgggtggttggccag

SEQ ID NO: 897743 - DNA, 15 bp, Homo sapiens
gggtggttggccagg

SEQ ID NO: 897744 - DNA, 15 bp, Homo sapiens
ggtggttggccagga

SEQ ID NO: 897745 - DNA, 15 bp, Homo sapiens
gtggttggccaggag

SEQ ID NO: 897746 - DNA, 15 bp, Homo sapiens
tggttggccaggaga

SEQ ID NO: 897747 - DNA, 15 bp, Homo sapiens
ggttggccaggagag

SEQ ID NO: 897748 - DNA, 15 bp, Homo sapiens
gttggccaggagagt

SEQ ID NO: 897749 - DNA, 15 bp, Homo sapiens
ttggccaggagagtg

SEQ ID NO: 897750 - DNA, 15 bp, Homo sapiens
tggccaggagagtgg

SEQ ID NO: 897751 - DNA, 15 bp, Homo sapiens
ggccaggagagtgga

SEQ ID NO: 897752 - DNA, 15 bp, Homo sapiens
gccaggagagtggac

SEQ ID NO: 897753 - DNA, 15 bp, Homo sapiens
ccaggagagtggact

SEQ ID NO: 897754 - DNA, 15 bp, Homo sapiens
caggagagtggactc

SEQ ID NO: 897755 - DNA, 15 bp, Homo sapiens
aggagagtggactcc

SEQ ID NO: 897756 - DNA, 15 bp, Homo sapiens
ggagagtggactcca

SEQ ID NO: 897757 - DNA, 15 bp, Homo sapiens
gagagtggactccaa

SEQ ID NO: 897758 - DNA, 15 bp, Homo sapiens
agagtggactccaat

SEQ ID NO: 897759 - DNA, 15 bp, Homo sapiens
gagtggactccaatg

SEQ ID NO: 897760 - DNA, 15 bp, Homo sapiens
agtggactccaatgt

SEQ ID NO: 897761 - DNA, 15 bp, Homo sapiens
gtggactccaatgtc

SEQ ID NO: 897762 - DNA, 15 bp, Homo sapiens
tggactccaatgtct

SEQ ID NO: 897763 - DNA, 15 bp, Homo sapiens
ggactccaatgtcta

SEQ ID NO: 897764 - DNA, 15 bp, Homo sapiens
gactccaatgtctac

SEQ ID NO: 897765 - DNA, 15 bp, Homo sapiens
actccaatgtctaca

SEQ ID NO: 897766 - DNA, 15 bp, Homo sapiens
ctccaatgtctacag

SEQ ID NO: 897767 - DNA, 15 bp, Homo sapiens
tccaatgtctacagc

SEQ ID NO: 897768 - DNA, 15 bp, Homo sapiens
ccaatgtctacagca

SEQ ID NO: 897769 - DNA, 15 bp, Homo sapiens
caatgtctacagcaa

SEQ ID NO: 897770 - DNA, 15 bp, Homo sapiens
aatgtctacagcaac

SEQ ID NO: 897771 - DNA, 15 bp, Homo sapiens
atgtctacagcaact

SEQ ID NO: 897772 - DNA, 15 bp, Homo sapiens
tgtctacagcaactt

SEQ ID NO: 897773 - DNA, 15 bp, Homo sapiens
gtctacagcaacttt

SEQ ID NO: 897774 - DNA, 15 bp, Homo sapiens
tctacagcaactttg

SEQ ID NO: 897775 - DNA, 15 bp, Homo sapiens
ctacagcaactttgt

SEQ ID NO: 897776 - DNA, 15 bp, Homo sapiens
tacagcaactttgta

SEQ ID NO: 897777 - DNA, 15 bp, Homo sapiens
acagcaactttgtac

SEQ ID NO: 897778 - DNA, 15 bp, Homo sapiens
cagcaactttgtacc

SEQ ID NO: 897779 - DNA, 15 bp, Homo sapiens
agcaactttgtacca

SEQ ID NO: 897780 - DNA, 15 bp, Homo sapiens
gcaactttgtaccat

SEQ ID NO: 897781 - DNA, 15 bp, Homo sapiens
caactttgtaccata

SEQ ID NO: 897782 - DNA, 15 bp, Homo sapiens
aactttgtaccatag

SEQ ID NO: 897783 - DNA, 15 bp, Homo sapiens
actttgtaccataga

SEQ ID NO: 897784 - DNA, 15 bp, Homo sapiens
ctttgtaccatagac

SEQ ID NO: 897785 - DNA, 15 bp, Homo sapiens
tttgtaccatagaca

SEQ ID NO: 897786 - DNA, 15 bp, Homo sapiens
ttgtaccatagacag

SEQ ID NO: 897787 - DNA, 15 bp, Homo sapiens
tgtaccatagacagt

SEQ ID NO: 897788 - DNA, 15 bp, Homo sapiens
gtaccatagacagtt

SEQ ID NO: 897789 - DNA, 15 bp, Homo sapiens
taccatagacagttt

SEQ ID NO: 897790 - DNA, 15 bp, Homo sapiens
accatagacagtttc

SEQ ID NO: 897791 - DNA, 15 bp, Homo sapiens
ccatagacagtttct

SEQ ID NO: 897792 - DNA, 15 bp, Homo sapiens
catagacagtttctc

SEQ ID NO: 897793 - DNA, 15 bp, Homo sapiens
atagacagtttctct

SEQ ID NO: 897794 - DNA, 15 bp, Homo sapiens
tagacagtttctctc

SEQ ID NO: 897795 - DNA, 15 bp, Homo sapiens
agacagtttctctcc

SEQ ID NO: 897796 - DNA, 15 bp, Homo sapiens
gacagtttctctccc

SEQ ID NO: 897797 - DNA, 15 bp, Homo sapiens
acagtttctctccca

SEQ ID NO: 897798 - DNA, 15 bp, Homo sapiens
cagtttctctcccat

SEQ ID NO: 897799 - DNA, 15 bp, Homo sapiens
agtttctctcccatg

SEQ ID NO: 897800 - DNA, 15 bp, Homo sapiens
gtttctctcccatgt

SEQ ID NO: 897801 - DNA, 15 bp, Homo sapiens
tttctctcccatgtt

SEQ ID NO: 897802 - DNA, 15 bp, Homo sapiens
ttctctcccatgttc

SEQ ID NO: 897803 - DNA, 15 bp, Homo sapiens
tctctcccatgttct

SEQ ID NO: 897804 - DNA, 15 bp, Homo sapiens
ctctcccatgttctc

SEQ ID NO: 897805 - DNA, 15 bp, Homo sapiens
tctcccatgttctcc

SEQ ID NO: 897806 - DNA, 15 bp, Homo sapiens
ctcccatgttctcca

SEQ ID NO: 897807 - DNA, 15 bp, Homo sapiens
tcccatgttctccac

SEQ ID NO: 897808 - DNA, 15 bp, Homo sapiens
cccatgttctccacc

SEQ ID NO: 897809 - DNA, 15 bp, Homo sapiens
ccatgttctccaccc

SEQ ID NO: 897810 - DNA, 15 bp, Homo sapiens
catgttctccaccct

SEQ ID NO: 897811 - DNA, 15 bp, Homo sapiens
atgttctccaccctc

SEQ ID NO: 897812 - DNA, 15 bp, Homo sapiens
tgttctccaccctcc

SEQ ID NO: 897813 - DNA, 15 bp, Homo sapiens
gttctccaccctcct

SEQ ID NO: 897814 - DNA, 15 bp, Homo sapiens
ttctccaccctcctt

SEQ ID NO: 897815 - DNA, 15 bp, Homo sapiens
tctccaccctccttt

SEQ ID NO: 897816 - DNA, 15 bp, Homo sapiens
ctccaccctcctttt

SEQ ID NO: 897817 - DNA, 15 bp, Homo sapiens
tccaccctccttttc

SEQ ID NO: 897818 - DNA, 15 bp, Homo sapiens
ccaccctccttttct

SEQ ID NO: 897819 - DNA, 15 bp, Homo sapiens
caccctccttttctt

SEQ ID NO: 897820 - DNA, 15 bp, Homo sapiens
accctccttttcttc

SEQ ID NO: 897821 - DNA, 15 bp, Homo sapiens
ccctccttttcttcc

SEQ ID NO: 897822 - DNA, 15 bp, Homo sapiens
cctccttttcttccg

SEQ ID NO: 897823 - DNA, 15 bp, Homo sapiens
ctccttttcttccgt

SEQ ID NO: 897824 - DNA, 15 bp, Homo sapiens
tccttttcttccgtt

SEQ ID NO: 897825 - DNA, 15 bp, Homo sapiens
ccttttcttccgttc

SEQ ID NO: 897826 - DNA, 15 bp, Homo sapiens
cttttcttccgttct

SEQ ID NO: 897827 - DNA, 15 bp, Homo sapiens
ttttcttccgttctc

SEQ ID NO: 897828 - DNA, 15 bp, Homo sapiens
tttcttccgttctct

SEQ ID NO: 897829 - DNA, 15 bp, Homo sapiens
ttcttccgttctctg

SEQ ID NO: 897830 - DNA, 15 bp, Homo sapiens
tcttccgttctctgt

SEQ ID NO: 897831 - DNA, 15 bp, Homo sapiens
cttccgttctctgtt

SEQ ID NO: 897832 - DNA, 15 bp, Homo sapiens
ttccgttctctgttg

SEQ ID NO: 897833 - DNA, 15 bp, Homo sapiens
tccgttctctgttgg

SEQ ID NO: 897834 - DNA, 15 bp, Homo sapiens
ccgttctctgttgga

SEQ ID NO: 897835 - DNA, 15 bp, Homo sapiens
cgttctctgttggaa

SEQ ID NO: 897836 - DNA, 15 bp, Homo sapiens
gttctctgttggaag

SEQ ID NO: 897837 - DNA, 15 bp, Homo sapiens
ttctctgttggaagg

SEQ ID NO: 897838 - DNA, 15 bp, Homo sapiens
tctctgttggaaggt

SEQ ID NO: 897839 - DNA, 15 bp, Homo sapiens
ctctgttggaaggtt

SEQ ID NO: 897840 - DNA, 15 bp, Homo sapiens
tctgttggaaggttg

SEQ ID NO: 897841 - DNA, 15 bp, Homo sapiens
ctgttggaaggttgg

SEQ ID NO: 897842 - DNA, 15 bp, Homo sapiens
tgttggaaggttggg

SEQ ID NO: 897843 - DNA, 15 bp, Homo sapiens
gttggaaggttgggc

SEQ ID NO: 897844 - DNA, 15 bp, Homo sapiens
ttggaaggttgggca

SEQ ID NO: 897845 - DNA, 15 bp, Homo sapiens
tggaaggttgggcat

SEQ ID NO: 897846 - DNA, 15 bp, Homo sapiens
ggaaggttgggcatg

SEQ ID NO: 897847 - DNA, 15 bp, Homo sapiens
gaaggttgggcatgc

SEQ ID NO: 897848 - DNA, 15 bp, Homo sapiens
aaggttgggcatgct

SEQ ID NO: 897849 - DNA, 15 bp, Homo sapiens
aggttgggcatgctg

SEQ ID NO: 897850 - DNA, 15 bp, Homo sapiens
ggttgggcatgctga

SEQ ID NO: 897851 - DNA, 15 bp, Homo sapiens
gttgggcatgctgac

SEQ ID NO: 897852 - DNA, 15 bp, Homo sapiens
ttgggcatgctgacc

SEQ ID NO: 897853 - DNA, 15 bp, Homo sapiens
tgggcatgctgacct

SEQ ID NO: 897854 - DNA, 15 bp, Homo sapiens
gggcatgctgacctt

SEQ ID NO: 897855 - DNA, 15 bp, Homo sapiens
ggcatgctgaccttt

SEQ ID NO: 897856 - DNA, 15 bp, Homo sapiens
gcatgctgacctttg

SEQ ID NO: 897857 - DNA, 15 bp, Homo sapiens
catgctgacctttgc

SEQ ID NO: 897858 - DNA, 15 bp, Homo sapiens
atgctgacctttgca

SEQ ID NO: 897859 - DNA, 15 bp, Homo sapiens
tgctgacctttgcac

SEQ ID NO: 897860 - DNA, 15 bp, Homo sapiens
gctgacctttgcaca

SEQ ID NO: 897861 - DNA, 15 bp, Homo sapiens
ctgacctttgcacac

SEQ ID NO: 897862 - DNA, 15 bp, Homo sapiens
tgacctttgcacaca

SEQ ID NO: 897863 - DNA, 15 bp, Homo sapiens
gacctttgcacacac

SEQ ID NO: 897864 - DNA, 15 bp, Homo sapiens
acctttgcacacacc

SEQ ID NO: 897865 - DNA, 15 bp, Homo sapiens
cctttgcacacaccc

SEQ ID NO: 897866 - DNA, 15 bp, Homo sapiens
ctttgcacacacccc

SEQ ID NO: 897867 - DNA, 15 bp, Homo sapiens
tttgcacacacccct

SEQ ID NO: 897868 - DNA, 15 bp, Homo sapiens
ttgcacacacccctg

SEQ ID NO: 897869 - DNA, 15 bp, Homo sapiens
tgcacacacccctgc

SEQ ID NO: 897870 - DNA, 15 bp, Homo sapiens
gcacacacccctgcc

SEQ ID NO: 897871 - DNA, 15 bp, Homo sapiens
cacacacccctgcca

SEQ ID NO: 897872 - DNA, 15 bp, Homo sapiens
acacacccctgccac

SEQ ID NO: 897873 - DNA, 15 bp, Homo sapiens
cacacccctgccacc

SEQ ID NO: 897874 - DNA, 15 bp, Homo sapiens
acacccctgccacct

SEQ ID NO: 897875 - DNA, 15 bp, Homo sapiens
cacccctgccacctg

SEQ ID NO: 897876 - DNA, 15 bp, Homo sapiens
acccctgccacctgg

SEQ ID NO: 897877 - DNA, 15 bp, Homo sapiens
cccctgccacctggt

SEQ ID NO: 897878 - DNA, 15 bp, Homo sapiens
ccctgccacctggtc

SEQ ID NO: 897879 - DNA, 15 bp, Homo sapiens
cctgccacctggtcc

SEQ ID NO: 897880 - DNA, 15 bp, Homo sapiens
ctgccacctggtccc

SEQ ID NO: 897881 - DNA, 15 bp, Homo sapiens
tgccacctggtccct

SEQ ID NO: 897882 - DNA, 15 bp, Homo sapiens
gccacctggtccctg

SEQ ID NO: 897883 - DNA, 15 bp, Homo sapiens
ccacctggtccctgt

SEQ ID NO: 897884 - DNA, 15 bp, Homo sapiens
cacctggtccctgtt

SEQ ID NO: 897885 - DNA, 15 bp, Homo sapiens
acctggtccctgttc

SEQ ID NO: 897886 - DNA, 15 bp, Homo sapiens
cctggtccctgttca

SEQ ID NO: 897887 - DNA, 15 bp, Homo sapiens
ctggtccctgttcaa

SEQ ID NO: 897888 - DNA, 15 bp, Homo sapiens
tggtccctgttcaac

SEQ ID NO: 897889 - DNA, 15 bp, Homo sapiens
ggtccctgttcaacg

SEQ ID NO: 897890 - DNA, 15 bp, Homo sapiens
gtccctgttcaacgc

SEQ ID NO: 897891 - DNA, 15 bp, Homo sapiens
tccctgttcaacgca

SEQ ID NO: 897892 - DNA, 15 bp, Homo sapiens
ccctgttcaacgcaa

SEQ ID NO: 897893 - DNA, 15 bp, Homo sapiens
cctgttcaacgcaac

SEQ ID NO: 897894 - DNA, 15 bp, Homo sapiens
ctgttcaacgcaacc

SEQ ID NO: 897895 - DNA, 15 bp, Homo sapiens
tgttcaacgcaacca

SEQ ID NO: 897896 - DNA, 15 bp, Homo sapiens
gttcaacgcaaccac

SEQ ID NO: 897897 - DNA, 15 bp, Homo sapiens
ttcaacgcaaccacc

SEQ ID NO: 897898 - DNA, 15 bp, Homo sapiens
tcaacgcaaccacca

SEQ ID NO: 897899 - DNA, 15 bp, Homo sapiens
caacgcaaccaccaa

SEQ ID NO: 897900 - DNA, 15 bp, Homo sapiens
aacgcaaccaccaag

SEQ ID NO: 897901 - DNA, 15 bp, Homo sapiens
acgcaaccaccaagt

SEQ ID NO: 897902 - DNA, 15 bp, Homo sapiens
cgcaaccaccaagtc

SEQ ID NO: 897903 - DNA, 15 bp, Homo sapiens
gcaaccaccaagtca

SEQ ID NO: 897904 - DNA, 15 bp, Homo sapiens
caaccaccaagtcaa

SEQ ID NO: 897905 - DNA, 15 bp, Homo sapiens
aaccaccaagtcaag

SEQ ID NO: 897906 - DNA, 15 bp, Homo sapiens
accaccaagtcaaga

SEQ ID NO: 897907 - DNA, 15 bp, Homo sapiens
ccaccaagtcaagac

SEQ ID NO: 897908 - DNA, 15 bp, Homo sapiens
caccaagtcaagaca

SEQ ID NO: 897909 - DNA, 15 bp, Homo sapiens
accaagtcaagacac

SEQ ID NO: 897910 - DNA, 15 bp, Homo sapiens
ccaagtcaagacact

SEQ ID NO: 897911 - DNA, 15 bp, Homo sapiens
caagtcaagacactg

SEQ ID NO: 897912 - DNA, 15 bp, Homo sapiens
aagtcaagacactga

SEQ ID NO: 897913 - DNA, 15 bp, Homo sapiens
agtcaagacactgaa

SEQ ID NO: 897914 - DNA, 15 bp, Homo sapiens
gtcaagacactgaac

SEQ ID NO: 897915 - DNA, 15 bp, Homo sapiens
tcaagacactgaacc

SEQ ID NO: 897916 - DNA, 15 bp, Homo sapiens
caagacactgaaccc

SEQ ID NO: 897917 - DNA, 15 bp, Homo sapiens
aagacactgaaccct

SEQ ID NO: 897918 - DNA, 15 bp, Homo sapiens
agacactgaaccctc

SEQ ID NO: 897919 - DNA, 15 bp, Homo sapiens
gacactgaaccctcc

SEQ ID NO: 897920 - DNA, 15 bp, Homo sapiens
acactgaaccctcct

SEQ ID NO: 897921 - DNA, 15 bp, Homo sapiens
cactgaaccctcctg

SEQ ID NO: 897922 - DNA, 15 bp, Homo sapiens
actgaaccctcctgc

SEQ ID NO: 897923 - DNA, 15 bp, Homo sapiens
ctgaaccctcctgca

SEQ ID NO: 897924 - DNA, 15 bp, Homo sapiens
tgaaccctcctgcat

SEQ ID NO: 897925 - DNA, 15 bp, Homo sapiens
gaaccctcctgcata

SEQ ID NO: 897926 - DNA, 15 bp, Homo sapiens
aaccctcctgcatac

SEQ ID NO: 897927 - DNA, 15 bp, Homo sapiens
accctcctgcataca

SEQ ID NO: 897928 - DNA, 15 bp, Homo sapiens
ccctcctgcatacag

SEQ ID NO: 897929 - DNA, 15 bp, Homo sapiens
cctcctgcatacaga

SEQ ID NO: 897930 - DNA, 15 bp, Homo sapiens
ctcctgcatacagag

SEQ ID NO: 897931 - DNA, 15 bp, Homo sapiens
tcctgcatacagagt

SEQ ID NO: 897932 - DNA, 15 bp, Homo sapiens
cctgcatacagagtg

SEQ ID NO: 897933 - DNA, 15 bp, Homo sapiens
ctgcatacagagtgg

SEQ ID NO: 897934 - DNA, 15 bp, Homo sapiens
tgcatacagagtggc

SEQ ID NO: 897935 - DNA, 15 bp, Homo sapiens
gcatacagagtggcc

SEQ ID NO: 897936 - DNA, 15 bp, Homo sapiens
catacagagtggcca

SEQ ID NO: 897937 - DNA, 15 bp, Homo sapiens
atacagagtggccac

SEQ ID NO: 897938 - DNA, 15 bp, Homo sapiens
tacagagtggccaca

SEQ ID NO: 897939 - DNA, 15 bp, Homo sapiens
acagagtggccacag

SEQ ID NO: 897940 - DNA, 15 bp, Homo sapiens
cagagtggccacaga

SEQ ID NO: 897941 - DNA, 15 bp, Homo sapiens
agagtggccacagaa

SEQ ID NO: 897942 - DNA, 15 bp, Homo sapiens
gagtggccacagaag

SEQ ID NO: 897943 - DNA, 15 bp, Homo sapiens
agtggccacagaagt

SEQ ID NO: 897944 - DNA, 15 bp, Homo sapiens
gtggccacagaagtc

SEQ ID NO: 897945 - DNA, 15 bp, Homo sapiens
tggccacagaagtct

SEQ ID NO: 897946 - DNA, 15 bp, Homo sapiens
ggccacagaagtctc

SEQ ID NO: 897947 - DNA, 15 bp, Homo sapiens
gccacagaagtctcc

SEQ ID NO: 897948 - DNA, 15 bp, Homo sapiens
ccacagaagtctccc

SEQ ID NO: 897949 - DNA, 15 bp, Homo sapiens
cacagaagtctcccc

SEQ ID NO: 897950 - DNA, 15 bp, Homo sapiens
acagaagtctcccca

SEQ ID NO: 897951 - DNA, 15 bp, Homo sapiens
cagaagtctccccac

SEQ ID NO: 897952 - DNA, 15 bp, Homo sapiens
agaagtctccccaca

SEQ ID NO: 897953 - DNA, 15 bp, Homo sapiens
gaagtctccccacaa

SEQ ID NO: 897954 - DNA, 15 bp, Homo sapiens
aagtctccccacaaa

SEQ ID NO: 897955 - DNA, 15 bp, Homo sapiens
agtctccccacaaaa

SEQ ID NO: 897956 - DNA, 15 bp, Homo sapiens
gtctccccacaaaat

SEQ ID NO: 897957 - DNA, 15 bp, Homo sapiens
tctccccacaaaatc

SEQ ID NO: 897958 - DNA, 15 bp, Homo sapiens
ctccccacaaaatca

SEQ ID NO: 897959 - DNA, 15 bp, Homo sapiens
tccccacaaaatcaa

SEQ ID NO: 897960 - DNA, 15 bp, Homo sapiens
ccccacaaaatcaaa

SEQ ID NO: 897961 - DNA, 15 bp, Homo sapiens
cccacaaaatcaaag

SEQ ID NO: 897962 - DNA, 15 bp, Homo sapiens
ccacaaaatcaaaga

SEQ ID NO: 897963 - DNA, 15 bp, Homo sapiens
cacaaaatcaaagaa

SEQ ID NO: 897964 - DNA, 15 bp, Homo sapiens
acaaaatcaaagaag

SEQ ID NO: 897965 - DNA, 15 bp, Homo sapiens
caaaatcaaagaagt

SEQ ID NO: 897966 - DNA, 15 bp, Homo sapiens
aaaatcaaagaagtc

SEQ ID NO: 897967 - DNA, 15 bp, Homo sapiens
aaatcaaagaagtct

SEQ ID NO: 897968 - DNA, 15 bp, Homo sapiens
aatcaaagaagtctt

SEQ ID NO: 897969 - DNA, 15 bp, Homo sapiens
atcaaagaagtctta

SEQ ID NO: 897970 - DNA, 15 bp, Homo sapiens
tcaaagaagtcttat

SEQ ID NO: 897971 - DNA, 15 bp, Homo sapiens
caaagaagtcttata

SEQ ID NO: 897972 - DNA, 15 bp, Homo sapiens
aaagaagtcttataa

SEQ ID NO: 897973 - DNA, 15 bp, Homo sapiens
aagaagtcttataac

SEQ ID NO: 897974 - DNA, 15 bp, Homo sapiens
agaagtcttataacc

SEQ ID NO: 897975 - DNA, 15 bp, Homo sapiens
gaagtcttataacct

SEQ ID NO: 897976 - DNA, 15 bp, Homo sapiens
aagtcttataaccta

SEQ ID NO: 897977 - DNA, 15 bp, Homo sapiens
agtcttataacctag

SEQ ID NO: 897978 - DNA, 15 bp, Homo sapiens
gtcttataacctagg

SEQ ID NO: 897979 - DNA, 15 bp, Homo sapiens
tcttataacctagga

SEQ ID NO: 897980 - DNA, 15 bp, Homo sapiens
cttataacctaggaa

SEQ ID NO: 897981 - DNA, 15 bp, Homo sapiens
ttataacctaggaag

SEQ ID NO: 897982 - DNA, 15 bp, Homo sapiens
tataacctaggaagt

SEQ ID NO: 897983 - DNA, 15 bp, Homo sapiens
ataacctaggaagtc

SEQ ID NO: 897984 - DNA, 15 bp, Homo sapiens
taacctaggaagtcc

SEQ ID NO: 897985 - DNA, 15 bp, Homo sapiens
aacctaggaagtcct

SEQ ID NO: 897986 - DNA, 15 bp, Homo sapiens
acctaggaagtcctt

SEQ ID NO: 897987 - DNA, 15 bp, Homo sapiens
cctaggaagtccttt

SEQ ID NO: 897988 - DNA, 15 bp, Homo sapiens
ctaggaagtcctttc

SEQ ID NO: 897989 - DNA, 15 bp, Homo sapiens
taggaagtcctttct

SEQ ID NO: 897990 - DNA, 15 bp, Homo sapiens
aggaagtcctttctt

SEQ ID NO: 897991 - DNA, 15 bp, Homo sapiens
ggaagtcctttcttc

SEQ ID NO: 897992 - DNA, 15 bp, Homo sapiens
gaagtcctttcttca

SEQ ID NO: 897993 - DNA, 15 bp, Homo sapiens
aagtcctttcttcac

SEQ ID NO: 897994 - DNA, 15 bp, Homo sapiens
agtcctttcttcact

SEQ ID NO: 897995 - DNA, 15 bp, Homo sapiens
gtcctttcttcactt

SEQ ID NO: 897996 - DNA, 15 bp, Homo sapiens
tcctttcttcacttt

SEQ ID NO: 897997 - DNA, 15 bp, Homo sapiens
cctttcttcactttc

SEQ ID NO: 897998 - DNA, 15 bp, Homo sapiens
ctttcttcactttct

SEQ ID NO: 897999 - DNA, 15 bp, Homo sapiens
tttcttcactttctt

SEQ ID NO: 898000 - DNA, 15 bp, Homo sapiens
ttcttcactttcttc

SEQ ID NO: 898001 - DNA, 15 bp, Homo sapiens
tcttcactttcttct

SEQ ID NO: 898002 - DNA, 15 bp, Homo sapiens
cttcactttcttctc

SEQ ID NO: 898003 - DNA, 15 bp, Homo sapiens
ttcactttcttctcc

SEQ ID NO: 898004 - DNA, 15 bp, Homo sapiens
tcactttcttctccc

SEQ ID NO: 898005 - DNA, 15 bp, Homo sapiens
cactttcttctccca

SEQ ID NO: 898006 - DNA, 15 bp, Homo sapiens
actttcttctcccaa

SEQ ID NO: 898007 - DNA, 15 bp, Homo sapiens
ctttcttctcccaaa

SEQ ID NO: 898008 - DNA, 15 bp, Homo sapiens
tttcttctcccaaac

SEQ ID NO: 898009 - DNA, 15 bp, Homo sapiens
ttcttctcccaaaca

SEQ ID NO: 898010 - DNA, 15 bp, Homo sapiens
tcttctcccaaacac

SEQ ID NO: 898011 - DNA, 15 bp, Homo sapiens
cttctcccaaacacc

SEQ ID NO: 898012 - DNA, 15 bp, Homo sapiens
ttctcccaaacacct

SEQ ID NO: 898013 - DNA, 15 bp, Homo sapiens
tctcccaaacaccta

SEQ ID NO: 898014 - DNA, 15 bp, Homo sapiens
ctcccaaacacctac

SEQ ID NO: 898015 - DNA, 15 bp, Homo sapiens
tcccaaacacctaca

SEQ ID NO: 898016 - DNA, 15 bp, Homo sapiens
cccaaacacctacaa

SEQ ID NO: 898017 - DNA, 15 bp, Homo sapiens
ccaaacacctacaaa

SEQ ID NO: 898018 - DNA, 15 bp, Homo sapiens
caaacacctacaaaa

SEQ ID NO: 898019 - DNA, 15 bp, Homo sapiens
aaacacctacaaaat

SEQ ID NO: 898020 - DNA, 15 bp, Homo sapiens
aacacctacaaaatt

SEQ ID NO: 898021 - DNA, 15 bp, Homo sapiens
acacctacaaaattt

SEQ ID NO: 898022 - DNA, 15 bp, Homo sapiens
cacctacaaaatttg

SEQ ID NO: 898023 - DNA, 15 bp, Homo sapiens
acctacaaaatttgc

SEQ ID NO: 898024 - DNA, 15 bp, Homo sapiens
cctacaaaatttgct

SEQ ID NO: 898025 - DNA, 15 bp, Homo sapiens
ctacaaaatttgctt

SEQ ID NO: 898026 - DNA, 15 bp, Homo sapiens
tacaaaatttgcttc

SEQ ID NO: 898027 - DNA, 15 bp, Homo sapiens
acaaaatttgcttcc

SEQ ID NO: 898028 - DNA, 15 bp, Homo sapiens
caaaatttgcttcct

SEQ ID NO: 898029 - DNA, 15 bp, Homo sapiens
aaaatttgcttcctc

SEQ ID NO: 898030 - DNA, 15 bp, Homo sapiens
aaatttgcttcctcc

SEQ ID NO: 898031 - DNA, 15 bp, Homo sapiens
aatttgcttcctcct

SEQ ID NO: 898032 - DNA, 15 bp, Homo sapiens
atttgcttcctcctt

SEQ ID NO: 898033 - DNA, 15 bp, Homo sapiens
tttgcttcctccttt

SEQ ID NO: 898034 - DNA, 15 bp, Homo sapiens
ttgcttcctcctttg

SEQ ID NO: 898035 - DNA, 15 bp, Homo sapiens
tgcttcctcctttgt

SEQ ID NO: 898036 - DNA, 15 bp, Homo sapiens
gcttcctcctttgtg

SEQ ID NO: 898037 - DNA, 15 bp, Homo sapiens
cttcctcctttgtgt

SEQ ID NO: 898038 - DNA, 15 bp, Homo sapiens
ttcctcctttgtgtc

SEQ ID NO: 898039 - DNA, 15 bp, Homo sapiens
tcctcctttgtgtct

SEQ ID NO: 898040 - DNA, 15 bp, Homo sapiens
cctcctttgtgtctt

SEQ ID NO: 898041 - DNA, 15 bp, Homo sapiens
ctcctttgtgtcttt

SEQ ID NO: 898042 - DNA, 15 bp, Homo sapiens
tcctttgtgtcttta

SEQ ID NO: 898043 - DNA, 15 bp, Homo sapiens
cctttgtgtctttac

SEQ ID NO: 898044 - DNA, 15 bp, Homo sapiens
ctttgtgtctttacc

SEQ ID NO: 898045 - DNA, 15 bp, Homo sapiens
tttgtgtctttaccc

SEQ ID NO: 898046 - DNA, 15 bp, Homo sapiens
ttgtgtctttaccca

SEQ ID NO: 898047 - DNA, 15 bp, Homo sapiens
tgtgtctttacccaa

SEQ ID NO: 898048 - DNA, 15 bp, Homo sapiens
gtgtctttacccaaa

SEQ ID NO: 898049 - DNA, 15 bp, Homo sapiens
tgtctttacccaaat

SEQ ID NO: 898050 - DNA, 15 bp, Homo sapiens
gtctttacccaaatt

SEQ ID NO: 898051 - DNA, 15 bp, Homo sapiens
tctttacccaaattt

SEQ ID NO: 898052 - DNA, 15 bp, Homo sapiens
ctttacccaaattta

SEQ ID NO: 898053 - DNA, 15 bp, Homo sapiens
tttacccaaatttaa

SEQ ID NO: 898054 - DNA, 15 bp, Homo sapiens
ttacccaaatttaat

SEQ ID NO: 898055 - DNA, 15 bp, Homo sapiens
tacccaaatttaatc

SEQ ID NO: 898056 - DNA, 15 bp, Homo sapiens
acccaaatttaatct

SEQ ID NO: 898057 - DNA, 15 bp, Homo sapiens
cccaaatttaatctc

SEQ ID NO: 898058 - DNA, 15 bp, Homo sapiens
ccaaatttaatctct

SEQ ID NO: 898059 - DNA, 15 bp, Homo sapiens
caaatttaatctcta

SEQ ID NO: 898060 - DNA, 15 bp, Homo sapiens
aaatttaatctctat

SEQ ID NO: 898061 - DNA, 15 bp, Homo sapiens
aatttaatctctata

SEQ ID NO: 898062 - DNA, 15 bp, Homo sapiens
atttaatctctatat

SEQ ID NO: 898063 - DNA, 15 bp, Homo sapiens
tttaatctctatatg

SEQ ID NO: 898064 - DNA, 15 bp, Homo sapiens
ttaatctctatatgt

SEQ ID NO: 898065 - DNA, 15 bp, Homo sapiens
taatctctatatgtc

SEQ ID NO: 898066 - DNA, 15 bp, Homo sapiens
aatctctatatgtct

SEQ ID NO: 898067 - DNA, 15 bp, Homo sapiens
atctctatatgtctt

SEQ ID NO: 898068 - DNA, 15 bp, Homo sapiens
tctctatatgtcttt

SEQ ID NO: 898069 - DNA, 15 bp, Homo sapiens
ctctatatgtctttc

SEQ ID NO: 898070 - DNA, 15 bp, Homo sapiens
tctatatgtctttct

SEQ ID NO: 898071 - DNA, 15 bp, Homo sapiens
ctatatgtctttctc

SEQ ID NO: 898072 - DNA, 15 bp, Homo sapiens
tatatgtctttctct

SEQ ID NO: 898073 - DNA, 15 bp, Homo sapiens
atatgtctttctcta

SEQ ID NO: 898074 - DNA, 15 bp, Homo sapiens
tatgtctttctctaa

SEQ ID NO: 898075 - DNA, 15 bp, Homo sapiens
atgtctttctctaac

SEQ ID NO: 898076 - DNA, 15 bp, Homo sapiens
tgtctttctctaacc

SEQ ID NO: 898077 - DNA, 15 bp, Homo sapiens
gtctttctctaacca

SEQ ID NO: 898078 - DNA, 15 bp, Homo sapiens
tctttctctaaccaa

SEQ ID NO: 898079 - DNA, 15 bp, Homo sapiens
ctttctctaaccaac

SEQ ID NO: 898080 - DNA, 15 bp, Homo sapiens
tttctctaaccaact

SEQ ID NO: 898081 - DNA, 15 bp, Homo sapiens
ttctctaaccaactt

SEQ ID NO: 898082 - DNA, 15 bp, Homo sapiens
tctctaaccaactta

SEQ ID NO: 898083 - DNA, 15 bp, Homo sapiens
ctctaaccaacttat

SEQ ID NO: 898084 - DNA, 15 bp, Homo sapiens
tctaaccaacttatt

SEQ ID NO: 898085 - DNA, 15 bp, Homo sapiens
ctaaccaacttattt

SEQ ID NO: 898086 - DNA, 15 bp, Homo sapiens
taaccaacttatttc

SEQ ID NO: 898087 - DNA, 15 bp, Homo sapiens
aaccaacttatttct

SEQ ID NO: 898088 - DNA, 15 bp, Homo sapiens
accaacttatttcta

SEQ ID NO: 898089 - DNA, 15 bp, Homo sapiens
ccaacttatttctac

SEQ ID NO: 898090 - DNA, 15 bp, Homo sapiens
caacttatttctact

SEQ ID NO: 898091 - DNA, 15 bp, Homo sapiens
aacttatttctactc

SEQ ID NO: 898092 - DNA, 15 bp, Homo sapiens
acttatttctactca

SEQ ID NO: 898093 - DNA, 15 bp, Homo sapiens
cttatttctactcat

SEQ ID NO: 898094 - DNA, 15 bp, Homo sapiens
ttatttctactcatc

SEQ ID NO: 898095 - DNA, 15 bp, Homo sapiens
tatttctactcatcc

SEQ ID NO: 898096 - DNA, 15 bp, Homo sapiens
atttctactcatccc

SEQ ID NO: 898097 - DNA, 15 bp, Homo sapiens
tttctactcatccct

SEQ ID NO: 898098 - DNA, 15 bp, Homo sapiens
ttctactcatccctg

SEQ ID NO: 898099 - DNA, 15 bp, Homo sapiens
tctactcatccctgc

SEQ ID NO: 898100 - DNA, 15 bp, Homo sapiens
ctactcatccctgcc

SEQ ID NO: 898101 - DNA, 15 bp, Homo sapiens
tactcatccctgcca

SEQ ID NO: 898102 - DNA, 15 bp, Homo sapiens
actcatccctgccac

SEQ ID NO: 898103 - DNA, 15 bp, Homo sapiens
ctcatccctgccacc

SEQ ID NO: 898104 - DNA, 15 bp, Homo sapiens
tcatccctgccacca

SEQ ID NO: 898105 - DNA, 15 bp, Homo sapiens
catccctgccaccag

SEQ ID NO: 898106 - DNA, 15 bp, Homo sapiens
atccctgccaccagt

SEQ ID NO: 898107 - DNA, 15 bp, Homo sapiens
tccctgccaccagtg

SEQ ID NO: 898108 - DNA, 15 bp, Homo sapiens
ccctgccaccagtgc

SEQ ID NO: 898109 - DNA, 15 bp, Homo sapiens
cctgccaccagtgcg

SEQ ID NO: 898110 - DNA, 15 bp, Homo sapiens
ctgccaccagtgcgt

SEQ ID NO: 898111 - DNA, 15 bp, Homo sapiens
tgccaccagtgcgtc

SEQ ID NO: 898112 - DNA, 15 bp, Homo sapiens
gccaccagtgcgtct

SEQ ID NO: 898113 - DNA, 15 bp, Homo sapiens
ccaccagtgcgtctg

SEQ ID NO: 898114 - DNA, 15 bp, Homo sapiens
caccagtgcgtctgt

SEQ ID NO: 898115 - DNA, 15 bp, Homo sapiens
accagtgcgtctgta

SEQ ID NO: 898116 - DNA, 15 bp, Homo sapiens
ccagtgcgtctgtaa

SEQ ID NO: 898117 - DNA, 15 bp, Homo sapiens
cagtgcgtctgtaat

SEQ ID NO: 898118 - DNA, 15 bp, Homo sapiens
agtgcgtctgtaata

SEQ ID NO: 898119 - DNA, 15 bp, Homo sapiens
gtgcgtctgtaatac

SEQ ID NO: 898120 - DNA, 15 bp, Homo sapiens
tgcgtctgtaatact

SEQ ID NO: 898121 - DNA, 15 bp, Homo sapiens
gcgtctgtaatactt

SEQ ID NO: 898122 - DNA, 15 bp, Homo sapiens
cgtctgtaatactta

SEQ ID NO: 898123 - DNA, 15 bp, Homo sapiens
gtctgtaatacttat

SEQ ID NO: 898124 - DNA, 15 bp, Homo sapiens
tctgtaatacttatt

SEQ ID NO: 898125 - DNA, 15 bp, Homo sapiens
ctgtaatacttatta

SEQ ID NO: 898126 - DNA, 15 bp, Homo sapiens
tgtaatacttattaa

SEQ ID NO: 898127 - DNA, 15 bp, Homo sapiens
gtaatacttattaac

SEQ ID NO: 898128 - DNA, 15 bp, Homo sapiens
taatacttattaact

SEQ ID NO: 898129 - DNA, 15 bp, Homo sapiens
aatacttattaactt

SEQ ID NO: 898130 - DNA, 15 bp, Homo sapiens
atacttattaacttg

SEQ ID NO: 898131 - DNA, 15 bp, Homo sapiens
tacttattaacttgt

SEQ ID NO: 898132 - DNA, 15 bp, Homo sapiens
acttattaacttgta

SEQ ID NO: 898133 - DNA, 15 bp, Homo sapiens
cttattaacttgtaa

SEQ ID NO: 898134 - DNA, 15 bp, Homo sapiens
ttattaacttgtaat

SEQ ID NO: 898135 - DNA, 15 bp, Homo sapiens
tattaacttgtaata

SEQ ID NO: 898136 - DNA, 15 bp, Homo sapiens
attaacttgtaatat

SEQ ID NO: 898137 - DNA, 15 bp, Homo sapiens
ttaacttgtaatata

SEQ ID NO: 898138 - DNA, 15 bp, Homo sapiens
taacttgtaatatat

SEQ ID NO: 898139 - DNA, 15 bp, Homo sapiens
aacttgtaatatatt

SEQ ID NO: 898140 - DNA, 15 bp, Homo sapiens
acttgtaatatatta

SEQ ID NO: 898141 - DNA, 15 bp, Homo sapiens
cttgtaatatattac

SEQ ID NO: 898142 - DNA, 15 bp, Homo sapiens
ttgtaatatattaca

SEQ ID NO: 898143 - DNA, 15 bp, Homo sapiens
tgtaatatattacat

SEQ ID NO: 898144 - DNA, 15 bp, Homo sapiens
gtaatatattacata

SEQ ID NO: 898145 - DNA, 15 bp, Homo sapiens
taatatattacataa

SEQ ID NO: 898146 - DNA, 15 bp, Homo sapiens
aatatattacataag

SEQ ID NO: 898147 - DNA, 15 bp, Homo sapiens
atatattacataagg

SEQ ID NO: 898148 - DNA, 15 bp, Homo sapiens
tatattacataaggt

SEQ ID NO: 898149 - DNA, 15 bp, Homo sapiens
atattacataaggta

SEQ ID NO: 898150 - DNA, 15 bp, Homo sapiens
tattacataaggtaa

SEQ ID NO: 898151 - DNA, 15 bp, Homo sapiens
attacataaggtaag

SEQ ID NO: 898152 - DNA, 15 bp, Homo sapiens
ttacataaggtaagc

SEQ ID NO: 898153 - DNA, 15 bp, Homo sapiens
tacataaggtaagct

SEQ ID NO: 898154 - DNA, 15 bp, Homo sapiens
acataaggtaagctc

SEQ ID NO: 898155 - DNA, 15 bp, Homo sapiens
cataaggtaagctcc

SEQ ID NO: 898156 - DNA, 15 bp, Homo sapiens
ataaggtaagctcca

SEQ ID NO: 898157 - DNA, 15 bp, Homo sapiens
taaggtaagctccat

SEQ ID NO: 898158 - DNA, 15 bp, Homo sapiens
aaggtaagctccatg

SEQ ID NO: 898159 - DNA, 15 bp, Homo sapiens
aggtaagctccatga

SEQ ID NO: 898160 - DNA, 15 bp, Homo sapiens
ggtaagctccatgag

SEQ ID NO: 898161 - DNA, 15 bp, Homo sapiens
gtaagctccatgagg

SEQ ID NO: 898162 - DNA, 15 bp, Homo sapiens
taagctccatgaggg

SEQ ID NO: 898163 - DNA, 15 bp, Homo sapiens
aagctccatgagggt

SEQ ID NO: 898164 - DNA, 15 bp, Homo sapiens
agctccatgagggta

SEQ ID NO: 898165 - DNA, 15 bp, Homo sapiens
gctccatgagggtag

SEQ ID NO: 898166 - DNA, 15 bp, Homo sapiens
ctccatgagggtaga

SEQ ID NO: 898167 - DNA, 15 bp, Homo sapiens
tccatgagggtagaa

SEQ ID NO: 898168 - DNA, 15 bp, Homo sapiens
ccatgagggtagaaa

SEQ ID NO: 898169 - DNA, 15 bp, Homo sapiens
catgagggtagaaat

SEQ ID NO: 898170 - DNA, 15 bp, Homo sapiens
atgagggtagaaatt

SEQ ID NO: 898171 - DNA, 15 bp, Homo sapiens
tgagggtagaaattt

SEQ ID NO: 898172 - DNA, 15 bp, Homo sapiens
gagggtagaaatttt

SEQ ID NO: 898173 - DNA, 15 bp, Homo sapiens
agggtagaaattttg

SEQ ID NO: 898174 - DNA, 15 bp, Homo sapiens
gggtagaaattttgt

SEQ ID NO: 898175 - DNA, 15 bp, Homo sapiens
ggtagaaattttgtt

SEQ ID NO: 898176 - DNA, 15 bp, Homo sapiens
gtagaaattttgttc

SEQ ID NO: 898177 - DNA, 15 bp, Homo sapiens
tagaaattttgttct

SEQ ID NO: 898178 - DNA, 15 bp, Homo sapiens
agaaattttgttctt

SEQ ID NO: 898179 - DNA, 15 bp, Homo sapiens
gaaattttgttcttt

SEQ ID NO: 898180 - DNA, 15 bp, Homo sapiens
aaattttgttctttc

SEQ ID NO: 898181 - DNA, 15 bp, Homo sapiens
aattttgttctttct

SEQ ID NO: 898182 - DNA, 15 bp, Homo sapiens
attttgttctttcta

SEQ ID NO: 898183 - DNA, 15 bp, Homo sapiens
ttttgttctttctat

SEQ ID NO: 898184 - DNA, 15 bp, Homo sapiens
tttgttctttctatt

SEQ ID NO: 898185 - DNA, 15 bp, Homo sapiens
ttgttctttctattt

SEQ ID NO: 898186 - DNA, 15 bp, Homo sapiens
tgttctttctatttt

SEQ ID NO: 898187 - DNA, 15 bp, Homo sapiens
gttctttctattttc

SEQ ID NO: 898188 - DNA, 15 bp, Homo sapiens
ttctttctattttct

SEQ ID NO: 898189 - DNA, 15 bp, Homo sapiens
tctttctattttctg

SEQ ID NO: 898190 - DNA, 15 bp, Homo sapiens
ctttctattttctgt

SEQ ID NO: 898191 - DNA, 15 bp, Homo sapiens
tttctattttctgtt

SEQ ID NO: 898192 - DNA, 15 bp, Homo sapiens
ttctattttctgttt

SEQ ID NO: 898193 - DNA, 15 bp, Homo sapiens
tctattttctgtttt

SEQ ID NO: 898194 - DNA, 15 bp, Homo sapiens
ctattttctgttttt

SEQ ID NO: 898195 - DNA, 15 bp, Homo sapiens
tattttctgtttttc

SEQ ID NO: 898196 - DNA, 15 bp, Homo sapiens
attttctgtttttcc

SEQ ID NO: 898197 - DNA, 15 bp, Homo sapiens
ttttctgtttttcct

SEQ ID NO: 898198 - DNA, 15 bp, Homo sapiens
tttctgtttttcctc

SEQ ID NO: 898199 - DNA, 15 bp, Homo sapiens
ttctgtttttcctcc

SEQ ID NO: 898200 - DNA, 15 bp, Homo sapiens
tctgtttttcctcca

SEQ ID NO: 898201 - DNA, 15 bp, Homo sapiens
ctgtttttcctccag

SEQ ID NO: 898202 - DNA, 15 bp, Homo sapiens
tgtttttcctccagc

SEQ ID NO: 898203 - DNA, 15 bp, Homo sapiens
gtttttcctccagcc

SEQ ID NO: 898204 - DNA, 15 bp, Homo sapiens
tttttcctccagccc

SEQ ID NO: 898205 - DNA, 15 bp, Homo sapiens
ttttcctccagcccc

SEQ ID NO: 898206 - DNA, 15 bp, Homo sapiens
tttcctccagcccct

SEQ ID NO: 898207 - DNA, 15 bp, Homo sapiens
ttcctccagcccctg

SEQ ID NO: 898208 - DNA, 15 bp, Homo sapiens
tcctccagcccctgg

SEQ ID NO: 898209 - DNA, 15 bp, Homo sapiens
cctccagcccctgga

SEQ ID NO: 898210 - DNA, 15 bp, Homo sapiens
ctccagcccctggaa

SEQ ID NO: 898211 - DNA, 15 bp, Homo sapiens
tccagcccctggaac

SEQ ID NO: 898212 - DNA, 15 bp, Homo sapiens
ccagcccctggaaca

SEQ ID NO: 898213 - DNA, 15 bp, Homo sapiens
cagcccctggaacaa

SEQ ID NO: 898214 - DNA, 15 bp, Homo sapiens
agcccctggaacaat

SEQ ID NO: 898215 - DNA, 15 bp, Homo sapiens
gcccctggaacaata

SEQ ID NO: 898216 - DNA, 15 bp, Homo sapiens
cccctggaacaatac

SEQ ID NO: 898217 - DNA, 15 bp, Homo sapiens
ccctggaacaatacc

SEQ ID NO: 898218 - DNA, 15 bp, Homo sapiens
cctggaacaatacct

SEQ ID NO: 898219 - DNA, 15 bp, Homo sapiens
ctggaacaatacctg

SEQ ID NO: 898220 - DNA, 15 bp, Homo sapiens
tggaacaatacctga

SEQ ID NO: 898221 - DNA, 15 bp, Homo sapiens
ggaacaatacctgac

SEQ ID NO: 898222 - DNA, 15 bp, Homo sapiens
gaacaatacctgaca

SEQ ID NO: 898223 - DNA, 15 bp, Homo sapiens
aacaatacctgacac

SEQ ID NO: 898224 - DNA, 15 bp, Homo sapiens
acaatacctgacaca

SEQ ID NO: 898225 - DNA, 15 bp, Homo sapiens
caatacctgacacag

SEQ ID NO: 898226 - DNA, 15 bp, Homo sapiens
aatacctgacacaga

SEQ ID NO: 898227 - DNA, 15 bp, Homo sapiens
atacctgacacagag

SEQ ID NO: 898228 - DNA, 15 bp, Homo sapiens
tacctgacacagagt

SEQ ID NO: 898229 - DNA, 15 bp, Homo sapiens
acctgacacagagta

SEQ ID NO: 898230 - DNA, 15 bp, Homo sapiens
cctgacacagagtaa

SEQ ID NO: 898231 - DNA, 15 bp, Homo sapiens
ctgacacagagtaag

SEQ ID NO: 898232 - DNA, 15 bp, Homo sapiens
tgacacagagtaagc

SEQ ID NO: 898233 - DNA, 15 bp, Homo sapiens
gacacagagtaagca

SEQ ID NO: 898234 - DNA, 15 bp, Homo sapiens
acacagagtaagcac

SEQ ID NO: 898235 - DNA, 15 bp, Homo sapiens
cacagagtaagcact

SEQ ID NO: 898236 - DNA, 15 bp, Homo sapiens
acagagtaagcactc

SEQ ID NO: 898237 - DNA, 15 bp, Homo sapiens
cagagtaagcactca

SEQ ID NO: 898238 - DNA, 15 bp, Homo sapiens
agagtaagcactcaa

SEQ ID NO: 898239 - DNA, 15 bp, Homo sapiens
gagtaagcactcaat

SEQ ID NO: 898240 - DNA, 15 bp, Homo sapiens
agtaagcactcaata

SEQ ID NO: 898241 - DNA, 15 bp, Homo sapiens
gtaagcactcaataa

SEQ ID NO: 898242 - DNA, 15 bp, Homo sapiens
taagcactcaataaa

SEQ ID NO: 898243 - DNA, 15 bp, Homo sapiens
aagcactcaataaat

SEQ ID NO: 898244 - DNA, 15 bp, Homo sapiens
agcactcaataaata

SEQ ID NO: 898245 - DNA, 15 bp, Homo sapiens
gcactcaataaataa

SEQ ID NO: 898246 - DNA, 15 bp, Homo sapiens
cactcaataaataat

SEQ ID NO: 898247 - DNA, 15 bp, Homo sapiens
actcaataaataatt

SEQ ID NO: 898248 - DNA, 15 bp, Homo sapiens
ctcaataaataattg

SEQ ID NO: 898249 - DNA, 15 bp, Homo sapiens
tcaataaataattgg

SEQ ID NO: 898250 - DNA, 15 bp, Homo sapiens
caataaataattggt

SEQ ID NO: 898251 - DNA, 15 bp, Homo sapiens
aataaataattggtg

SEQ ID NO: 898252 - DNA, 15 bp, Homo sapiens
ataaataattggtga

SEQ ID NO: 898253 - DNA, 15 bp, Homo sapiens
taaataattggtgaa

SEQ ID NO: 898254 - DNA, 15 bp, Homo sapiens
aaataattggtgaag

SEQ ID NO: 898255 - DNA, 15 bp, Homo sapiens
aataattggtgaagg

SEQ ID NO: 898256 - DNA, 15 bp, Homo sapiens
ataattggtgaaggc

SEQ ID NO: 898257 - DNA, 15 bp, Homo sapiens
taattggtgaaggca

SEQ ID NO: 898258 - DNA, 15 bp, Homo sapiens
aattggtgaaggcat

SEQ ID NO: 898259 - DNA, 15 bp, Homo sapiens
attggtgaaggcatt

SEQ ID NO: 898260 - DNA, 15 bp, Homo sapiens
ttggtgaaggcatta

SEQ ID NO: 898261 - DNA, 15 bp, Homo sapiens
tggtgaaggcattaa

SEQ ID NO: 898262 - DNA, 15 bp, Homo sapiens
ggtgaaggcattaat

SEQ ID NO: 898263 - DNA, 15 bp, Homo sapiens
gtgaaggcattaatc

SEQ ID NO: 898264 - DNA, 15 bp, Homo sapiens
tgaaggcattaatcc

SEQ ID NO: 898265 - DNA, 15 bp, Homo sapiens
gaaggcattaatccc

SEQ ID NO: 898266 - DNA, 15 bp, Homo sapiens
aaggcattaatccca

SEQ ID NO: 898267 - DNA, 15 bp, Homo sapiens
aggcattaatcccag

SEQ ID NO: 898268 - DNA, 15 bp, Homo sapiens
ggcattaatcccaga

SEQ ID NO: 898269 - DNA, 15 bp, Homo sapiens
gcattaatcccagag

SEQ ID NO: 898270 - DNA, 15 bp, Homo sapiens
cattaatcccagagg

SEQ ID NO: 898271 - DNA, 15 bp, Homo sapiens
attaatcccagaggc

SEQ ID NO: 898272 - DNA, 15 bp, Homo sapiens
ttaatcccagaggca

SEQ ID NO: 898273 - DNA, 15 bp, Homo sapiens
taatcccagaggcag

SEQ ID NO: 898274 - DNA, 15 bp, Homo sapiens
aatcccagaggcagt

SEQ ID NO: 898275 - DNA, 15 bp, Homo sapiens
atcccagaggcagtt

SEQ ID NO: 898276 - DNA, 15 bp, Homo sapiens
tcccagaggcagttc

SEQ ID NO: 898277 - DNA, 15 bp, Homo sapiens
cccagaggcagttca

SEQ ID NO: 898278 - DNA, 15 bp, Homo sapiens
ccagaggcagttcag

SEQ ID NO: 898279 - DNA, 15 bp, Homo sapiens
cagaggcagttcagc

SEQ ID NO: 898280 - DNA, 15 bp, Homo sapiens
agaggcagttcagca

SEQ ID NO: 898281 - DNA, 15 bp, Homo sapiens
gaggcagttcagcaa

SEQ ID NO: 898282 - DNA, 15 bp, Homo sapiens
aggcagttcagcaag

SEQ ID NO: 898283 - DNA, 15 bp, Homo sapiens
ggcagttcagcaaga

SEQ ID NO: 898284 - DNA, 15 bp, Homo sapiens
gcagttcagcaagag

SEQ ID NO: 898285 - DNA, 15 bp, Homo sapiens
cagttcagcaagagg

SEQ ID NO: 898286 - DNA, 15 bp, Homo sapiens
agttcagcaagaggc

SEQ ID NO: 898287 - DNA, 15 bp, Homo sapiens
gttcagcaagaggct

SEQ ID NO: 898288 - DNA, 15 bp, Homo sapiens
ttcagcaagaggctg

SEQ ID NO: 898289 - DNA, 15 bp, Homo sapiens
tcagcaagaggctga

SEQ ID NO: 898290 - DNA, 15 bp, Homo sapiens
cagcaagaggctgat

SEQ ID NO: 898291 - DNA, 15 bp, Homo sapiens
agcaagaggctgatg

SEQ ID NO: 898292 - DNA, 15 bp, Homo sapiens
gcaagaggctgatgg

SEQ ID NO: 898293 - DNA, 15 bp, Homo sapiens
caagaggctgatgga

SEQ ID NO: 898294 - DNA, 15 bp, Homo sapiens
aagaggctgatggag

SEQ ID NO: 898295 - DNA, 15 bp, Homo sapiens
agaggctgatggagt

SEQ ID NO: 898296 - DNA, 15 bp, Homo sapiens
gaggctgatggagtg

SEQ ID NO: 898297 - DNA, 15 bp, Homo sapiens
aggctgatggagtgg

SEQ ID NO: 898298 - DNA, 15 bp, Homo sapiens
ggctgatggagtggt

SEQ ID NO: 898299 - DNA, 15 bp, Homo sapiens
gctgatggagtggtt

SEQ ID NO: 898300 - DNA, 15 bp, Homo sapiens
ctgatggagtggttc

SEQ ID NO: 898301 - DNA, 15 bp, Homo sapiens
tgatggagtggttct

SEQ ID NO: 898302 - DNA, 15 bp, Homo sapiens
gatggagtggttctg

SEQ ID NO: 898303 - DNA, 15 bp, Homo sapiens
atggagtggttctgg

SEQ ID NO: 898304 - DNA, 15 bp, Homo sapiens
tggagtggttctggg

SEQ ID NO: 898305 - DNA, 15 bp, Homo sapiens
ggagtggttctggga

SEQ ID NO: 898306 - DNA, 15 bp, Homo sapiens
gagtggttctgggac

SEQ ID NO: 898307 - DNA, 15 bp, Homo sapiens
agtggttctgggact

SEQ ID NO: 898308 - DNA, 15 bp, Homo sapiens
gtggttctgggactc

SEQ ID NO: 898309 - DNA, 15 bp, Homo sapiens
tggttctgggactct

SEQ ID NO: 898310 - DNA, 15 bp, Homo sapiens
ggttctgggactctg

SEQ ID NO: 898311 - DNA, 15 bp, Homo sapiens
gttctgggactctga

SEQ ID NO: 898312 - DNA, 15 bp, Homo sapiens
ttctgggactctgag

SEQ ID NO: 898313 - DNA, 15 bp, Homo sapiens
tctgggactctgaga

SEQ ID NO: 898314 - DNA, 15 bp, Homo sapiens
ctgggactctgagac

SEQ ID NO: 898315 - DNA, 15 bp, Homo sapiens
tgggactctgagact

SEQ ID NO: 898316 - DNA, 15 bp, Homo sapiens
gggactctgagactg

SEQ ID NO: 898317 - DNA, 15 bp, Homo sapiens
ggactctgagactgt

SEQ ID NO: 898318 - DNA, 15 bp, Homo sapiens
gactctgagactgtt

SEQ ID NO: 898319 - DNA, 15 bp, Homo sapiens
actctgagactgttg

SEQ ID NO: 898320 - DNA, 15 bp, Homo sapiens
ctctgagactgttgg

SEQ ID NO: 898321 - DNA, 15 bp, Homo sapiens
tctgagactgttggc

SEQ ID NO: 898322 - DNA, 15 bp, Homo sapiens
ctgagactgttggcc

SEQ ID NO: 898323 - DNA, 15 bp, Homo sapiens
tgagactgttggccc

SEQ ID NO: 898324 - DNA, 15 bp, Homo sapiens
gagactgttggccct

SEQ ID NO: 898325 - DNA, 15 bp, Homo sapiens
agactgttggccctc

SEQ ID NO: 898326 - DNA, 15 bp, Homo sapiens
gactgttggccctct

SEQ ID NO: 898327 - DNA, 15 bp, Homo sapiens
actgttggccctctg

SEQ ID NO: 898328 - DNA, 15 bp, Homo sapiens
ctgttggccctctga

SEQ ID NO: 898329 - DNA, 15 bp, Homo sapiens
tgttggccctctgag

SEQ ID NO: 898330 - DNA, 15 bp, Homo sapiens
gttggccctctgagt

SEQ ID NO: 898331 - DNA, 15 bp, Homo sapiens
ttggccctctgagtg

SEQ ID NO: 898332 - DNA, 15 bp, Homo sapiens
tggccctctgagtgc

SEQ ID NO: 898333 - DNA, 15 bp, Homo sapiens
ggccctctgagtgca

SEQ ID NO: 898334 - DNA, 15 bp, Homo sapiens
gccctctgagtgcac

SEQ ID NO: 898335 - DNA, 15 bp, Homo sapiens
ccctctgagtgcaca

SEQ ID NO: 898336 - DNA, 15 bp, Homo sapiens
cctctgagtgcacag

SEQ ID NO: 898337 - DNA, 15 bp, Homo sapiens
ctctgagtgcacagt

SEQ ID NO: 898338 - DNA, 15 bp, Homo sapiens
tctgagtgcacagtt

SEQ ID NO: 898339 - DNA, 15 bp, Homo sapiens
ctgagtgcacagttc

SEQ ID NO: 898340 - DNA, 15 bp, Homo sapiens
tgagtgcacagttcc

SEQ ID NO: 898341 - DNA, 15 bp, Homo sapiens
gagtgcacagttcct

SEQ ID NO: 898342 - DNA, 15 bp, Homo sapiens
agtgcacagttcctg

SEQ ID NO: 898343 - DNA, 15 bp, Homo sapiens
gtgcacagttcctgc

SEQ ID NO: 898344 - DNA, 15 bp, Homo sapiens
tgcacagttcctgca

SEQ ID NO: 898345 - DNA, 15 bp, Homo sapiens
gcacagttcctgcac

SEQ ID NO: 898346 - DNA, 15 bp, Homo sapiens
cacagttcctgcacc

SEQ ID NO: 898347 - DNA, 15 bp, Homo sapiens
acagttcctgcaccc

SEQ ID NO: 898348 - DNA, 15 bp, Homo sapiens
cagttcctgcaccca

SEQ ID NO: 898349 - DNA, 15 bp, Homo sapiens
agttcctgcacccaa

SEQ ID NO: 898350 - DNA, 15 bp, Homo sapiens
gttcctgcacccaag

SEQ ID NO: 898351 - DNA, 15 bp, Homo sapiens
ttcctgcacccaagc

SEQ ID NO: 898352 - DNA, 15 bp, Homo sapiens
tcctgcacccaagca

SEQ ID NO: 898353 - DNA, 15 bp, Homo sapiens
cctgcacccaagcag

SEQ ID NO: 898354 - DNA, 15 bp, Homo sapiens
ctgcacccaagcagg

SEQ ID NO: 898355 - DNA, 15 bp, Homo sapiens
tgcacccaagcagga

SEQ ID NO: 898356 - DNA, 15 bp, Homo sapiens
gcacccaagcaggag

SEQ ID NO: 898357 - DNA, 15 bp, Homo sapiens
cacccaagcaggaga

SEQ ID NO: 898358 - DNA, 15 bp, Homo sapiens
acccaagcaggagac

SEQ ID NO: 898359 - DNA, 15 bp, Homo sapiens
cccaagcaggagaca

SEQ ID NO: 898360 - DNA, 15 bp, Homo sapiens
ccaagcaggagacag

SEQ ID NO: 898361 - DNA, 15 bp, Homo sapiens
caagcaggagacaga

SEQ ID NO: 898362 - DNA, 15 bp, Homo sapiens
aagcaggagacagac

SEQ ID NO: 898363 - DNA, 15 bp, Homo sapiens
agcaggagacagact

SEQ ID NO: 898364 - DNA, 15 bp, Homo sapiens
gcaggagacagactg

SEQ ID NO: 898365 - DNA, 15 bp, Homo sapiens
caggagacagactgg

SEQ ID NO: 898366 - DNA, 15 bp, Homo sapiens
aggagacagactggg

SEQ ID NO: 898367 - DNA, 15 bp, Homo sapiens
ggagacagactgggc

SEQ ID NO: 898368 - DNA, 15 bp, Homo sapiens
gagacagactgggca

SEQ ID NO: 898369 - DNA, 15 bp, Homo sapiens
agacagactgggcag

SEQ ID NO: 898370 - DNA, 15 bp, Homo sapiens
gacagactgggcaga

SEQ ID NO: 898371 - DNA, 15 bp, Homo sapiens
acagactgggcagag

SEQ ID NO: 898372 - DNA, 15 bp, Homo sapiens
cagactgggcagagg

SEQ ID NO: 898373 - DNA, 15 bp, Homo sapiens
agactgggcagaggg

SEQ ID NO: 898374 - DNA, 15 bp, Homo sapiens
gactgggcagagggt

SEQ ID NO: 898375 - DNA, 15 bp, Homo sapiens
actgggcagagggtc

SEQ ID NO: 898376 - DNA, 15 bp, Homo sapiens
ctgggcagagggtcc

SEQ ID NO: 898377 - DNA, 15 bp, Homo sapiens
tgggcagagggtcca

SEQ ID NO: 898378 - DNA, 15 bp, Homo sapiens
gggcagagggtccac

SEQ ID NO: 898379 - DNA, 15 bp, Homo sapiens
ggcagagggtccacc

SEQ ID NO: 898380 - DNA, 15 bp, Homo sapiens
gcagagggtccacct

SEQ ID NO: 898381 - DNA, 15 bp, Homo sapiens
cagagggtccacctg

SEQ ID NO: 898382 - DNA, 15 bp, Homo sapiens
agagggtccacctgg

SEQ ID NO: 898383 - DNA, 15 bp, Homo sapiens
gagggtccacctgga

SEQ ID NO: 898384 - DNA, 15 bp, Homo sapiens
agggtccacctggac

SEQ ID NO: 898385 - DNA, 15 bp, Homo sapiens
gggtccacctggaca

SEQ ID NO: 898386 - DNA, 15 bp, Homo sapiens
ggtccacctggacat

SEQ ID NO: 898387 - DNA, 15 bp, Homo sapiens
gtccacctggacatg

SEQ ID NO: 898388 - DNA, 15 bp, Homo sapiens
tccacctggacatga

SEQ ID NO: 898389 - DNA, 15 bp, Homo sapiens
ccacctggacatgaa

SEQ ID NO: 898390 - DNA, 15 bp, Homo sapiens
cacctggacatgaat

SEQ ID NO: 898391 - DNA, 15 bp, Homo sapiens
acctggacatgaata

SEQ ID NO: 898392 - DNA, 15 bp, Homo sapiens
cctggacatgaatat

SEQ ID NO: 898393 - DNA, 15 bp, Homo sapiens
ctggacatgaatatc

SEQ ID NO: 898394 - DNA, 15 bp, Homo sapiens
tggacatgaatatcc

SEQ ID NO: 898395 - DNA, 15 bp, Homo sapiens
ggacatgaatatcct

SEQ ID NO: 898396 - DNA, 15 bp, Homo sapiens
gacatgaatatccta

SEQ ID NO: 898397 - DNA, 15 bp, Homo sapiens
acatgaatatcctaa

SEQ ID NO: 898398 - DNA, 15 bp, Homo sapiens
catgaatatcctaat

SEQ ID NO: 898399 - DNA, 15 bp, Homo sapiens
atgaatatcctaata

SEQ ID NO: 898400 - DNA, 15 bp, Homo sapiens
tgaatatcctaatac

SEQ ID NO: 898401 - DNA, 15 bp, Homo sapiens
gaatatcctaatact

SEQ ID NO: 898402 - DNA, 15 bp, Homo sapiens
aatatcctaatactc

SEQ ID NO: 898403 - DNA, 15 bp, Homo sapiens
atatcctaatactca

SEQ ID NO: 898404 - DNA, 15 bp, Homo sapiens
tatcctaatactcac

SEQ ID NO: 898405 - DNA, 15 bp, Homo sapiens
atcctaatactcact

SEQ ID NO: 898406 - DNA, 15 bp, Homo sapiens
tcctaatactcactg

SEQ ID NO: 898407 - DNA, 15 bp, Homo sapiens
cctaatactcactgt

SEQ ID NO: 898408 - DNA, 15 bp, Homo sapiens
ctaatactcactgta

SEQ ID NO: 898409 - DNA, 15 bp, Homo sapiens
taatactcactgtat

SEQ ID NO: 898410 - DNA, 15 bp, Homo sapiens
aatactcactgtatg

SEQ ID NO: 898411 - DNA, 15 bp, Homo sapiens
atactcactgtatgt

SEQ ID NO: 898412 - DNA, 15 bp, Homo sapiens
tactcactgtatgtt

SEQ ID NO: 898413 - DNA, 15 bp, Homo sapiens
actcactgtatgtta

SEQ ID NO: 898414 - DNA, 15 bp, Homo sapiens
ctcactgtatgttac

SEQ ID NO: 898415 - DNA, 15 bp, Homo sapiens
tcactgtatgttacc

SEQ ID NO: 898416 - DNA, 15 bp, Homo sapiens
cactgtatgttacca

SEQ ID NO: 898417 - DNA, 15 bp, Homo sapiens
actgtatgttaccac

SEQ ID NO: 898418 - DNA, 15 bp, Homo sapiens
ctgtatgttaccact

SEQ ID NO: 898419 - DNA, 15 bp, Homo sapiens
tgtatgttaccactt

SEQ ID NO: 898420 - DNA, 15 bp, Homo sapiens
gtatgttaccactta

SEQ ID NO: 898421 - DNA, 15 bp, Homo sapiens
tatgttaccacttaa

SEQ ID NO: 898422 - DNA, 15 bp, Homo sapiens
atgttaccacttaaa

SEQ ID NO: 898423 - DNA, 15 bp, Homo sapiens
tgttaccacttaaaa

SEQ ID NO: 898424 - DNA, 15 bp, Homo sapiens
gttaccacttaaaaa

SEQ ID NO: 898425 - DNA, 15 bp, Homo sapiens
ttaccacttaaaaaa

SEQ ID NO: 898426 - DNA, 15 bp, Homo sapiens
taccacttaaaaaaa

SEQ ID NO: 898427 - DNA, 15 bp, Homo sapiens
accacttaaaaaaat

SEQ ID NO: 898428 - DNA, 15 bp, Homo sapiens
ccacttaaaaaaatc

SEQ ID NO: 898429 - DNA, 15 bp, Homo sapiens
cacttaaaaaaatct

SEQ ID NO: 898430 - DNA, 15 bp, Homo sapiens
acttaaaaaaatctt

SEQ ID NO: 898431 - DNA, 15 bp, Homo sapiens
cttaaaaaaatctta

SEQ ID NO: 898432 - DNA, 15 bp, Homo sapiens
ttaaaaaaatcttat

SEQ ID NO: 898433 - DNA, 15 bp, Homo sapiens
taaaaaaatcttatc

SEQ ID NO: 898434 - DNA, 15 bp, Homo sapiens
aaaaaaatcttatca

SEQ ID NO: 898435 - DNA, 15 bp, Homo sapiens
aaaaaatcttatcag

SEQ ID NO: 898436 - DNA, 15 bp, Homo sapiens
aaaaatcttatcagt

SEQ ID NO: 898437 - DNA, 15 bp, Homo sapiens
aaaatcttatcagtg

SEQ ID NO: 898438 - DNA, 15 bp, Homo sapiens
aaatcttatcagtga

SEQ ID NO: 898439 - DNA, 15 bp, Homo sapiens
aatcttatcagtgat

SEQ ID NO: 898440 - DNA, 15 bp, Homo sapiens
atcttatcagtgatg

SEQ ID NO: 898441 - DNA, 15 bp, Homo sapiens
tcttatcagtgatgg

SEQ ID NO: 898442 - DNA, 15 bp, Homo sapiens
cttatcagtgatgga

SEQ ID NO: 898443 - DNA, 15 bp, Homo sapiens
ttatcagtgatggat

SEQ ID NO: 898444 - DNA, 15 bp, Homo sapiens
tatcagtgatggatg

SEQ ID NO: 898445 - DNA, 15 bp, Homo sapiens
atcagtgatggatga

SEQ ID NO: 898446 - DNA, 15 bp, Homo sapiens
tcagtgatggatgac

SEQ ID NO: 898447 - DNA, 15 bp, Homo sapiens
cagtgatggatgaca

SEQ ID NO: 898448 - DNA, 15 bp, Homo sapiens
agtgatggatgacag

SEQ ID NO: 898449 - DNA, 15 bp, Homo sapiens
gtgatggatgacagg

SEQ ID NO: 898450 - DNA, 15 bp, Homo sapiens
tgatggatgacaggc

SEQ ID NO: 898451 - DNA, 15 bp, Homo sapiens
gatggatgacaggca

SEQ ID NO: 898452 - DNA, 15 bp, Homo sapiens
atggatgacaggcat

SEQ ID NO: 898453 - DNA, 15 bp, Homo sapiens
tggatgacaggcatg

SEQ ID NO: 898454 - DNA, 15 bp, Homo sapiens
ggatgacaggcatgg

SEQ ID NO: 898455 - DNA, 15 bp, Homo sapiens
gatgacaggcatgga

SEQ ID NO: 898456 - DNA, 15 bp, Homo sapiens
atgacaggcatggaa

SEQ ID NO: 898457 - DNA, 15 bp, Homo sapiens
tgacaggcatggaac

SEQ ID NO: 898458 - DNA, 15 bp, Homo sapiens
gacaggcatggaaca

SEQ ID NO: 898459 - DNA, 15 bp, Homo sapiens
acaggcatggaacat

SEQ ID NO: 898460 - DNA, 15 bp, Homo sapiens
caggcatggaacata

SEQ ID NO: 898461 - DNA, 15 bp, Homo sapiens
aggcatggaacatac

SEQ ID NO: 898462 - DNA, 15 bp, Homo sapiens
ggcatggaacataca

SEQ ID NO: 898463 - DNA, 15 bp, Homo sapiens
gcatggaacatacag

SEQ ID NO: 898464 - DNA, 15 bp, Homo sapiens
catggaacatacagg

SEQ ID NO: 898465 - DNA, 15 bp, Homo sapiens
atggaacatacaggc

SEQ ID NO: 898466 - DNA, 15 bp, Homo sapiens
tggaacatacaggcc

SEQ ID NO: 898467 - DNA, 15 bp, Homo sapiens
ggaacatacaggcct

SEQ ID NO: 898468 - DNA, 15 bp, Homo sapiens
gaacatacaggcctt

SEQ ID NO: 898469 - DNA, 15 bp, Homo sapiens
aacatacaggccttt

SEQ ID NO: 898470 - DNA, 15 bp, Homo sapiens
acatacaggcctttg

SEQ ID NO: 898471 - DNA, 15 bp, Homo sapiens
catacaggcctttgg

SEQ ID NO: 898472 - DNA, 15 bp, Homo sapiens
atacaggcctttggg

SEQ ID NO: 898473 - DNA, 15 bp, Homo sapiens
tacaggcctttggga

SEQ ID NO: 898474 - DNA, 15 bp, Homo sapiens
acaggcctttgggag

SEQ ID NO: 898475 - DNA, 15 bp, Homo sapiens
caggcctttgggagt

SEQ ID NO: 898476 - DNA, 15 bp, Homo sapiens
aggcctttgggagtc

SEQ ID NO: 898477 - DNA, 15 bp, Homo sapiens
ggcctttgggagtct

SEQ ID NO: 898478 - DNA, 15 bp, Homo sapiens
gcctttgggagtcta

SEQ ID NO: 898479 - DNA, 15 bp, Homo sapiens
cctttgggagtctat

SEQ ID NO: 898480 - DNA, 15 bp, Homo sapiens
ctttgggagtctatg

SEQ ID NO: 898481 - DNA, 15 bp, Homo sapiens
tttgggagtctatga

SEQ ID NO: 898482 - DNA, 15 bp, Homo sapiens
ttgggagtctatgac

SEQ ID NO: 898483 - DNA, 15 bp, Homo sapiens
tgggagtctatgaca

SEQ ID NO: 898484 - DNA, 15 bp, Homo sapiens
gggagtctatgacac

SEQ ID NO: 898485 - DNA, 15 bp, Homo sapiens
ggagtctatgacact

SEQ ID NO: 898486 - DNA, 15 bp, Homo sapiens
gagtctatgacactg

SEQ ID NO: 898487 - DNA, 15 bp, Homo sapiens
agtctatgacactgg

SEQ ID NO: 898488 - DNA, 15 bp, Homo sapiens
gtctatgacactggg

SEQ ID NO: 898489 - DNA, 15 bp, Homo sapiens
tctatgacactgggt

SEQ ID NO: 898490 - DNA, 15 bp, Homo sapiens
ctatgacactgggta

SEQ ID NO: 898491 - DNA, 15 bp, Homo sapiens
tatgacactgggtat

SEQ ID NO: 898492 - DNA, 15 bp, Homo sapiens
atgacactgggtatg

SEQ ID NO: 898493 - DNA, 15 bp, Homo sapiens
tgacactgggtatgt

SEQ ID NO: 898494 - DNA, 15 bp, Homo sapiens
gacactgggtatgtt

SEQ ID NO: 898495 - DNA, 15 bp, Homo sapiens
acactgggtatgtta

SEQ ID NO: 898496 - DNA, 15 bp, Homo sapiens
cactgggtatgttag

SEQ ID NO: 898497 - DNA, 15 bp, Homo sapiens
actgggtatgttagc

SEQ ID NO: 898498 - DNA, 15 bp, Homo sapiens
ctgggtatgttagct

SEQ ID NO: 898499 - DNA, 15 bp, Homo sapiens
tgggtatgttagctt

SEQ ID NO: 898500 - DNA, 15 bp, Homo sapiens
gggtatgttagcttt

SEQ ID NO: 898501 - DNA, 15 bp, Homo sapiens
ggtatgttagctttc

SEQ ID NO: 898502 - DNA, 15 bp, Homo sapiens
gtatgttagctttca

SEQ ID NO: 898503 - DNA, 15 bp, Homo sapiens
tatgttagctttcaa

SEQ ID NO: 898504 - DNA, 15 bp, Homo sapiens
atgttagctttcaac

SEQ ID NO: 898505 - DNA, 15 bp, Homo sapiens
tgttagctttcaacc

SEQ ID NO: 898506 - DNA, 15 bp, Homo sapiens
gttagctttcaaccc

SEQ ID NO: 898507 - DNA, 15 bp, Homo sapiens
ttagctttcaaccct

SEQ ID NO: 898508 - DNA, 15 bp, Homo sapiens
tagctttcaacccta

SEQ ID NO: 898509 - DNA, 15 bp, Homo sapiens
agctttcaaccctat

SEQ ID NO: 898510 - DNA, 15 bp, Homo sapiens
gctttcaaccctatc

SEQ ID NO: 898511 - DNA, 15 bp, Homo sapiens
ctttcaaccctatct

SEQ ID NO: 898512 - DNA, 15 bp, Homo sapiens
tttcaaccctatcta

SEQ ID NO: 898513 - DNA, 15 bp, Homo sapiens
ttcaaccctatctat

SEQ ID NO: 898514 - DNA, 15 bp, Homo sapiens
tcaaccctatctatg

SEQ ID NO: 898515 - DNA, 15 bp, Homo sapiens
caaccctatctatgg

SEQ ID NO: 898516 - DNA, 15 bp, Homo sapiens
aaccctatctatggc

SEQ ID NO: 898517 - DNA, 15 bp, Homo sapiens
accctatctatggcc

SEQ ID NO: 898518 - DNA, 15 bp, Homo sapiens
ccctatctatggcct

SEQ ID NO: 898519 - DNA, 15 bp, Homo sapiens
cctatctatggcctc

SEQ ID NO: 898520 - DNA, 15 bp, Homo sapiens
ctatctatggcctct

SEQ ID NO: 898521 - DNA, 15 bp, Homo sapiens
tatctatggcctctg

SEQ ID NO: 898522 - DNA, 15 bp, Homo sapiens
atctatggcctctga

SEQ ID NO: 898523 - DNA, 15 bp, Homo sapiens
tctatggcctctgag

SEQ ID NO: 898524 - DNA, 15 bp, Homo sapiens
ctatggcctctgaga

SEQ ID NO: 898525 - DNA, 15 bp, Homo sapiens
tatggcctctgagag

SEQ ID NO: 898526 - DNA, 15 bp, Homo sapiens
atggcctctgagagg

SEQ ID NO: 898527 - DNA, 15 bp, Homo sapiens
tggcctctgagaggt

SEQ ID NO: 898528 - DNA, 15 bp, Homo sapiens
ggcctctgagaggtc

SEQ ID NO: 898529 - DNA, 15 bp, Homo sapiens
gcctctgagaggtca

SEQ ID NO: 898530 - DNA, 15 bp, Homo sapiens
cctctgagaggtcag

SEQ ID NO: 898531 - DNA, 15 bp, Homo sapiens
ctctgagaggtcaga

SEQ ID NO: 898532 - DNA, 15 bp, Homo sapiens
tctgagaggtcagag

SEQ ID NO: 898533 - DNA, 15 bp, Homo sapiens
ctgagaggtcagagg

SEQ ID NO: 898534 - DNA, 15 bp, Homo sapiens
tgagaggtcagagga

SEQ ID NO: 898535 - DNA, 15 bp, Homo sapiens
gagaggtcagaggaa

SEQ ID NO: 898536 - DNA, 15 bp, Homo sapiens
agaggtcagaggaat

SEQ ID NO: 898537 - DNA, 15 bp, Homo sapiens
gaggtcagaggaatg

SEQ ID NO: 898538 - DNA, 15 bp, Homo sapiens
aggtcagaggaatgg

SEQ ID NO: 898539 - DNA, 15 bp, Homo sapiens
ggtcagaggaatgga

SEQ ID NO: 898540 - DNA, 15 bp, Homo sapiens
gtcagaggaatggag

SEQ ID NO: 898541 - DNA, 15 bp, Homo sapiens
tcagaggaatggagg

SEQ ID NO: 898542 - DNA, 15 bp, Homo sapiens
cagaggaatggaggg

SEQ ID NO: 898543 - DNA, 15 bp, Homo sapiens
agaggaatggagggg

SEQ ID NO: 898544 - DNA, 15 bp, Homo sapiens
gaggaatggagggga

SEQ ID NO: 898545 - DNA, 15 bp, Homo sapiens
aggaatggaggggag

SEQ ID NO: 898546 - DNA, 15 bp, Homo sapiens
ggaatggaggggagt

SEQ ID NO: 898547 - DNA, 15 bp, Homo sapiens
gaatggaggggagtg

SEQ ID NO: 898548 - DNA, 15 bp, Homo sapiens
aatggaggggagtgg

SEQ ID NO: 898549 - DNA, 15 bp, Homo sapiens
atggaggggagtggt

SEQ ID NO: 898550 - DNA, 15 bp, Homo sapiens
tggaggggagtggtg

SEQ ID NO: 898551 - DNA, 15 bp, Homo sapiens
ggaggggagtggtga

SEQ ID NO: 898552 - DNA, 15 bp, Homo sapiens
gaggggagtggtgat

SEQ ID NO: 898553 - DNA, 15 bp, Homo sapiens
aggggagtggtgata

SEQ ID NO: 898554 - DNA, 15 bp, Homo sapiens
ggggagtggtgatag

SEQ ID NO: 898555 - DNA, 15 bp, Homo sapiens
gggagtggtgataga

SEQ ID NO: 898556 - DNA, 15 bp, Homo sapiens
ggagtggtgatagaa

SEQ ID NO: 898557 - DNA, 15 bp, Homo sapiens
gagtggtgatagaat

SEQ ID NO: 898558 - DNA, 15 bp, Homo sapiens
agtggtgatagaata

SEQ ID NO: 898559 - DNA, 15 bp, Homo sapiens
gtggtgatagaataa

SEQ ID NO: 898560 - DNA, 15 bp, Homo sapiens
tggtgatagaataaa

SEQ ID NO: 898561 - DNA, 15 bp, Homo sapiens
ggtgatagaataaat

SEQ ID NO: 898562 - DNA, 15 bp, Homo sapiens
gtgatagaataaatg

SEQ ID NO: 898563 - DNA, 15 bp, Homo sapiens
tgatagaataaatga

SEQ ID NO: 898564 - DNA, 15 bp, Homo sapiens
gatagaataaatgac

SEQ ID NO: 898565 - DNA, 15 bp, Homo sapiens
atagaataaatgact

SEQ ID NO: 898566 - DNA, 15 bp, Homo sapiens
tagaataaatgactt

SEQ ID NO: 898567 - DNA, 15 bp, Homo sapiens
agaataaatgacttc

SEQ ID NO: 898568 - DNA, 15 bp, Homo sapiens
gaataaatgacttct

SEQ ID NO: 898569 - DNA, 15 bp, Homo sapiens
aataaatgacttctc

SEQ ID NO: 898570 - DNA, 15 bp, Homo sapiens
ataaatgacttctca

SEQ ID NO: 898571 - DNA, 15 bp, Homo sapiens
taaatgacttctcaa

SEQ ID NO: 898572 - DNA, 15 bp, Homo sapiens
aaatgacttctcaaa

SEQ ID NO: 898573 - DNA, 15 bp, Homo sapiens
aatgacttctcaaag

SEQ ID NO: 898574 - DNA, 15 bp, Homo sapiens
atgacttctcaaaga

SEQ ID NO: 898575 - DNA, 15 bp, Homo sapiens
tgacttctcaaagaa

SEQ ID NO: 898576 - DNA, 15 bp, Homo sapiens
gacttctcaaagaaa

SEQ ID NO: 898577 - DNA, 15 bp, Homo sapiens
acttctcaaagaaat

SEQ ID NO: 898578 - DNA, 15 bp, Homo sapiens
cttctcaaagaaatc

SEQ ID NO: 898579 - DNA, 15 bp, Homo sapiens
ttctcaaagaaatcc

SEQ ID NO: 898580 - DNA, 15 bp, Homo sapiens
tctcaaagaaatccg

SEQ ID NO: 898581 - DNA, 15 bp, Homo sapiens
ctcaaagaaatccgc

SEQ ID NO: 898582 - DNA, 15 bp, Homo sapiens
tcaaagaaatccgca

SEQ ID NO: 898583 - DNA, 15 bp, Homo sapiens
caaagaaatccgcac

SEQ ID NO: 898584 - DNA, 15 bp, Homo sapiens
aaagaaatccgcact

SEQ ID NO: 898585 - DNA, 15 bp, Homo sapiens
aagaaatccgcactt

SEQ ID NO: 898586 - DNA, 15 bp, Homo sapiens
agaaatccgcacttt

SEQ ID NO: 898587 - DNA, 15 bp, Homo sapiens
gaaatccgcactttt

SEQ ID NO: 898588 - DNA, 15 bp, Homo sapiens
aaatccgcacttttg

SEQ ID NO: 898589 - DNA, 15 bp, Homo sapiens
aatccgcacttttga

SEQ ID NO: 898590 - DNA, 15 bp, Homo sapiens
atccgcacttttgaa

SEQ ID NO: 898591 - DNA, 15 bp, Homo sapiens
tccgcacttttgaaa

SEQ ID NO: 898592 - DNA, 15 bp, Homo sapiens
ccgcacttttgaaaa

SEQ ID NO: 898593 - DNA, 15 bp, Homo sapiens
cgcacttttgaaaag

SEQ ID NO: 898594 - DNA, 15 bp, Homo sapiens
gcacttttgaaaaga

SEQ ID NO: 898595 - DNA, 15 bp, Homo sapiens
cacttttgaaaagag

SEQ ID NO: 898596 - DNA, 15 bp, Homo sapiens
acttttgaaaagaga

SEQ ID NO: 898597 - DNA, 15 bp, Homo sapiens
cttttgaaaagagag

SEQ ID NO: 898598 - DNA, 15 bp, Homo sapiens
ttttgaaaagagaga

SEQ ID NO: 898599 - DNA, 15 bp, Homo sapiens
tttgaaaagagagac

SEQ ID NO: 898600 - DNA, 15 bp, Homo sapiens
ttgaaaagagagaca

SEQ ID NO: 898601 - DNA, 15 bp, Homo sapiens
tgaaaagagagacat

SEQ ID NO: 898602 - DNA, 15 bp, Homo sapiens
gaaaagagagacatg

SEQ ID NO: 898603 - DNA, 15 bp, Homo sapiens
aaaagagagacatga

SEQ ID NO: 898604 - DNA, 15 bp, Homo sapiens
aaagagagacatgag

SEQ ID NO: 898605 - DNA, 15 bp, Homo sapiens
aagagagacatgagg

SEQ ID NO: 898606 - DNA, 15 bp, Homo sapiens
agagagacatgaggg

SEQ ID NO: 898607 - DNA, 15 bp, Homo sapiens
gagagacatgaggga

SEQ ID NO: 898608 - DNA, 15 bp, Homo sapiens
agagacatgagggag

SEQ ID NO: 898609 - DNA, 15 bp, Homo sapiens
gagacatgagggagg

SEQ ID NO: 898610 - DNA, 15 bp, Homo sapiens
agacatgagggagga

SEQ ID NO: 898611 - DNA, 15 bp, Homo sapiens
gacatgagggaggaa

SEQ ID NO: 898612 - DNA, 15 bp, Homo sapiens
acatgagggaggaaa

SEQ ID NO: 898613 - DNA, 15 bp, Homo sapiens
catgagggaggaaag

SEQ ID NO: 898614 - DNA, 15 bp, Homo sapiens
atgagggaggaaaga

SEQ ID NO: 898615 - DNA, 15 bp, Homo sapiens
tgagggaggaaagag

SEQ ID NO: 898616 - DNA, 15 bp, Homo sapiens
gagggaggaaagaga

SEQ ID NO: 898617 - DNA, 15 bp, Homo sapiens
agggaggaaagagag

SEQ ID NO: 898618 - DNA, 15 bp, Homo sapiens
gggaggaaagagaga

SEQ ID NO: 898619 - DNA, 15 bp, Homo sapiens
ggaggaaagagagac

SEQ ID NO: 898620 - DNA, 15 bp, Homo sapiens
gaggaaagagagaca

SEQ ID NO: 898621 - DNA, 15 bp, Homo sapiens
aggaaagagagacat

SEQ ID NO: 898622 - DNA, 15 bp, Homo sapiens
ggaaagagagacata

SEQ ID NO: 898623 - DNA, 15 bp, Homo sapiens
gaaagagagacataa

SEQ ID NO: 898624 - DNA, 15 bp, Homo sapiens
aaagagagacataag

SEQ ID NO: 898625 - DNA, 15 bp, Homo sapiens
aagagagacataagg

SEQ ID NO: 898626 - DNA, 15 bp, Homo sapiens
agagagacataaggg

SEQ ID NO: 898627 - DNA, 15 bp, Homo sapiens
gagagacataaggga

SEQ ID NO: 898628 - DNA, 15 bp, Homo sapiens
agagacataagggag

SEQ ID NO: 898629 - DNA, 15 bp, Homo sapiens
gagacataagggaga

SEQ ID NO: 898630 - DNA, 15 bp, Homo sapiens
agacataagggagaa

SEQ ID NO: 898631 - DNA, 15 bp, Homo sapiens
gacataagggagaaa

SEQ ID NO: 898632 - DNA, 15 bp, Homo sapiens
acataagggagaaag

SEQ ID NO: 898633 - DNA, 15 bp, Homo sapiens
cataagggagaaagt

SEQ ID NO: 898634 - DNA, 15 bp, Homo sapiens
ataagggagaaagtc

SEQ ID NO: 898635 - DNA, 15 bp, Homo sapiens
taagggagaaagtca

SEQ ID NO: 898636 - DNA, 15 bp, Homo sapiens
aagggagaaagtcaa

SEQ ID NO: 898637 - DNA, 15 bp, Homo sapiens
agggagaaagtcaaa

SEQ ID NO: 898638 - DNA, 15 bp, Homo sapiens
gggagaaagtcaaag

SEQ ID NO: 898639 - DNA, 15 bp, Homo sapiens
ggagaaagtcaaaga

SEQ ID NO: 898640 - DNA, 15 bp, Homo sapiens
gagaaagtcaaagac

SEQ ID NO: 898641 - DNA, 15 bp, Homo sapiens
agaaagtcaaagaca

SEQ ID NO: 898642 - DNA, 15 bp, Homo sapiens
gaaagtcaaagacaa

SEQ ID NO: 898643 - DNA, 15 bp, Homo sapiens
aaagtcaaagacaaa

SEQ ID NO: 898644 - DNA, 15 bp, Homo sapiens
aagtcaaagacaaat

SEQ ID NO: 898645 - DNA, 15 bp, Homo sapiens
agtcaaagacaaatg

SEQ ID NO: 898646 - DNA, 15 bp, Homo sapiens
gtcaaagacaaatga

SEQ ID NO: 898647 - DNA, 15 bp, Homo sapiens
tcaaagacaaatgaa

SEQ ID NO: 898648 - DNA, 15 bp, Homo sapiens
caaagacaaatgaac

SEQ ID NO: 898649 - DNA, 15 bp, Homo sapiens
aaagacaaatgaaca

SEQ ID NO: 898650 - DNA, 15 bp, Homo sapiens
aagacaaatgaacat

SEQ ID NO: 898651 - DNA, 15 bp, Homo sapiens
agacaaatgaacata

SEQ ID NO: 898652 - DNA, 15 bp, Homo sapiens
gacaaatgaacatac

SEQ ID NO: 898653 - DNA, 15 bp, Homo sapiens
acaaatgaacataca

SEQ ID NO: 898654 - DNA, 15 bp, Homo sapiens
caaatgaacatacat

SEQ ID NO: 898655 - DNA, 15 bp, Homo sapiens
aaatgaacatacatc

SEQ ID NO: 898656 - DNA, 15 bp, Homo sapiens
aatgaacatacatct

SEQ ID NO: 898657 - DNA, 15 bp, Homo sapiens
atgaacatacatctt

SEQ ID NO: 898658 - DNA, 15 bp, Homo sapiens
tgaacatacatctta

SEQ ID NO: 898659 - DNA, 15 bp, Homo sapiens
gaacatacatcttag

SEQ ID NO: 898660 - DNA, 15 bp, Homo sapiens
aacatacatcttagt

SEQ ID NO: 898661 - DNA, 15 bp, Homo sapiens
acatacatcttagtc

SEQ ID NO: 898662 - DNA, 15 bp, Homo sapiens
catacatcttagtcc

SEQ ID NO: 898663 - DNA, 15 bp, Homo sapiens
atacatcttagtcct

SEQ ID NO: 898664 - DNA, 15 bp, Homo sapiens
tacatcttagtcctt

SEQ ID NO: 898665 - DNA, 15 bp, Homo sapiens
acatcttagtccttc

SEQ ID NO: 898666 - DNA, 15 bp, Homo sapiens
catcttagtccttcc

SEQ ID NO: 898667 - DNA, 15 bp, Homo sapiens
atcttagtccttcct

SEQ ID NO: 898668 - DNA, 15 bp, Homo sapiens
tcttagtccttcctt

SEQ ID NO: 898669 - DNA, 15 bp, Homo sapiens
cttagtccttccttt

SEQ ID NO: 898670 - DNA, 15 bp, Homo sapiens
ttagtccttcctttc

SEQ ID NO: 898671 - DNA, 15 bp, Homo sapiens
tagtccttcctttct

SEQ ID NO: 898672 - DNA, 15 bp, Homo sapiens
agtccttcctttcta

SEQ ID NO: 898673 - DNA, 15 bp, Homo sapiens
gtccttcctttctaa

SEQ ID NO: 898674 - DNA, 15 bp, Homo sapiens
tccttcctttctaaa

SEQ ID NO: 898675 - DNA, 15 bp, Homo sapiens
ccttcctttctaaat

SEQ ID NO: 898676 - DNA, 15 bp, Homo sapiens
cttcctttctaaatc

SEQ ID NO: 898677 - DNA, 15 bp, Homo sapiens
ttcctttctaaatcc

SEQ ID NO: 898678 - DNA, 15 bp, Homo sapiens
tcctttctaaatcca

SEQ ID NO: 898679 - DNA, 15 bp, Homo sapiens
cctttctaaatccaa

SEQ ID NO: 898680 - DNA, 15 bp, Homo sapiens
ctttctaaatccaaa

SEQ ID NO: 898681 - DNA, 15 bp, Homo sapiens
tttctaaatccaaat

SEQ ID NO: 898682 - DNA, 15 bp, Homo sapiens
ttctaaatccaaatt

SEQ ID NO: 898683 - DNA, 15 bp, Homo sapiens
tctaaatccaaattc

SEQ ID NO: 898684 - DNA, 15 bp, Homo sapiens
ctaaatccaaattcc

SEQ ID NO: 898685 - DNA, 15 bp, Homo sapiens
taaatccaaattcca

SEQ ID NO: 898686 - DNA, 15 bp, Homo sapiens
aaatccaaattccat

SEQ ID NO: 898687 - DNA, 15 bp, Homo sapiens
aatccaaattccatc

SEQ ID NO: 898688 - DNA, 15 bp, Homo sapiens
atccaaattccatcc

SEQ ID NO: 898689 - DNA, 15 bp, Homo sapiens
tccaaattccatccc

SEQ ID NO: 898690 - DNA, 15 bp, Homo sapiens
ccaaattccatcccc

SEQ ID NO: 898691 - DNA, 15 bp, Homo sapiens
caaattccatccccc

SEQ ID NO: 898692 - DNA, 15 bp, Homo sapiens
aaattccatcccccc

SEQ ID NO: 898693 - DNA, 15 bp, Homo sapiens
aattccatccccccc

SEQ ID NO: 898694 - DNA, 15 bp, Homo sapiens
attccatccccccca

SEQ ID NO: 898695 - DNA, 15 bp, Homo sapiens
ttccatcccccccag

SEQ ID NO: 898696 - DNA, 15 bp, Homo sapiens
tccatcccccccaga

SEQ ID NO: 898697 - DNA, 15 bp, Homo sapiens
ccatcccccccagac

SEQ ID NO: 898698 - DNA, 15 bp, Homo sapiens
catcccccccagacc

SEQ ID NO: 898699 - DNA, 15 bp, Homo sapiens
atcccccccagaccc

SEQ ID NO: 898700 - DNA, 15 bp, Homo sapiens
tcccccccagacccc

SEQ ID NO: 898701 - DNA, 15 bp, Homo sapiens
cccccccagacccct

SEQ ID NO: 898702 - DNA, 15 bp, Homo sapiens
ccccccagacccctc

SEQ ID NO: 898703 - DNA, 15 bp, Homo sapiens
cccccagacccctca

SEQ ID NO: 898704 - DNA, 15 bp, Homo sapiens
ccccagacccctcac

SEQ ID NO: 898705 - DNA, 15 bp, Homo sapiens
cccagacccctcaca

SEQ ID NO: 898706 - DNA, 15 bp, Homo sapiens
ccagacccctcacaa

SEQ ID NO: 898707 - DNA, 15 bp, Homo sapiens
cagacccctcacaaa

SEQ ID NO: 898708 - DNA, 15 bp, Homo sapiens
agacccctcacaaag

SEQ ID NO: 898709 - DNA, 15 bp, Homo sapiens
gacccctcacaaaga

SEQ ID NO: 898710 - DNA, 15 bp, Homo sapiens
acccctcacaaagaa

SEQ ID NO: 898711 - DNA, 15 bp, Homo sapiens
cccctcacaaagaaa

SEQ ID NO: 898712 - DNA, 15 bp, Homo sapiens
ccctcacaaagaaag

SEQ ID NO: 898713 - DNA, 15 bp, Homo sapiens
cctcacaaagaaagg

SEQ ID NO: 898714 - DNA, 15 bp, Homo sapiens
ctcacaaagaaaggt

SEQ ID NO: 898715 - DNA, 15 bp, Homo sapiens
tcacaaagaaaggta

SEQ ID NO: 898716 - DNA, 15 bp, Homo sapiens
cacaaagaaaggtaa

SEQ ID NO: 898717 - DNA, 15 bp, Homo sapiens
acaaagaaaggtaaa

SEQ ID NO: 898718 - DNA, 15 bp, Homo sapiens
caaagaaaggtaaaa

SEQ ID NO: 898719 - DNA, 15 bp, Homo sapiens
aaagaaaggtaaaaa

SEQ ID NO: 898720 - DNA, 15 bp, Homo sapiens
aagaaaggtaaaaat

SEQ ID NO: 898721 - DNA, 15 bp, Homo sapiens
agaaaggtaaaaatt

SEQ ID NO: 898722 - DNA, 15 bp, Homo sapiens
gaaaggtaaaaatta

SEQ ID NO: 898723 - DNA, 15 bp, Homo sapiens
aaaggtaaaaattat

SEQ ID NO: 898724 - DNA, 15 bp, Homo sapiens
aaggtaaaaattatc

SEQ ID NO: 898725 - DNA, 15 bp, Homo sapiens
aggtaaaaattatcc

SEQ ID NO: 898726 - DNA, 15 bp, Homo sapiens
ggtaaaaattatcct

SEQ ID NO: 898727 - DNA, 15 bp, Homo sapiens
gtaaaaattatcctt

SEQ ID NO: 898728 - DNA, 15 bp, Homo sapiens
taaaaattatccttt

SEQ ID NO: 898729 - DNA, 15 bp, Homo sapiens
aaaaattatcctttt

SEQ ID NO: 898730 - DNA, 15 bp, Homo sapiens
aaaattatccttttg

SEQ ID NO: 898731 - DNA, 15 bp, Homo sapiens
aaattatccttttgc

SEQ ID NO: 898732 - DNA, 15 bp, Homo sapiens
aattatccttttgcc

SEQ ID NO: 898733 - DNA, 15 bp, Homo sapiens
attatccttttgcca

SEQ ID NO: 898734 - DNA, 15 bp, Homo sapiens
ttatccttttgccag

SEQ ID NO: 898735 - DNA, 15 bp, Homo sapiens
tatccttttgccagc

SEQ ID NO: 898736 - DNA, 15 bp, Homo sapiens
atccttttgccagct

SEQ ID NO: 898737 - DNA, 15 bp, Homo sapiens
tccttttgccagctc

SEQ ID NO: 898738 - DNA, 15 bp, Homo sapiens
ccttttgccagctca

SEQ ID NO: 898739 - DNA, 15 bp, Homo sapiens
cttttgccagctcat

SEQ ID NO: 898740 - DNA, 15 bp, Homo sapiens
ttttgccagctcatt

SEQ ID NO: 898741 - DNA, 15 bp, Homo sapiens
tttgccagctcattc

SEQ ID NO: 898742 - DNA, 15 bp, Homo sapiens
ttgccagctcattca

SEQ ID NO: 898743 - DNA, 15 bp, Homo sapiens
tgccagctcattcac

SEQ ID NO: 898744 - DNA, 15 bp, Homo sapiens
gccagctcattcact

SEQ ID NO: 898745 - DNA, 15 bp, Homo sapiens
ccagctcattcactt

SEQ ID NO: 898746 - DNA, 15 bp, Homo sapiens
cagctcattcactta

SEQ ID NO: 898747 - DNA, 15 bp, Homo sapiens
agctcattcacttac

SEQ ID NO: 898748 - DNA, 15 bp, Homo sapiens
gctcattcacttacc

SEQ ID NO: 898749 - DNA, 15 bp, Homo sapiens
ctcattcacttacct

SEQ ID NO: 898750 - DNA, 15 bp, Homo sapiens
tcattcacttacctt

SEQ ID NO: 898751 - DNA, 15 bp, Homo sapiens
cattcacttacctta

SEQ ID NO: 898752 - DNA, 15 bp, Homo sapiens
attcacttaccttac

SEQ ID NO: 898753 - DNA, 15 bp, Homo sapiens
ttcacttaccttaca

SEQ ID NO: 898754 - DNA, 15 bp, Homo sapiens
tcacttaccttacat

SEQ ID NO: 898755 - DNA, 15 bp, Homo sapiens
cacttaccttacatt

SEQ ID NO: 898756 - DNA, 15 bp, Homo sapiens
acttaccttacattt

SEQ ID NO: 898757 - DNA, 15 bp, Homo sapiens
cttaccttacatttg

SEQ ID NO: 898758 - DNA, 15 bp, Homo sapiens
ttaccttacatttgc

SEQ ID NO: 898759 - DNA, 15 bp, Homo sapiens
taccttacatttgca

SEQ ID NO: 898760 - DNA, 15 bp, Homo sapiens
accttacatttgcaa

SEQ ID NO: 898761 - DNA, 15 bp, Homo sapiens
ccttacatttgcaag

SEQ ID NO: 898762 - DNA, 15 bp, Homo sapiens
cttacatttgcaagg

SEQ ID NO: 898763 - DNA, 15 bp, Homo sapiens
ttacatttgcaaggt

SEQ ID NO: 898764 - DNA, 15 bp, Homo sapiens
tacatttgcaaggta

SEQ ID NO: 898765 - DNA, 15 bp, Homo sapiens
acatttgcaaggtaa

SEQ ID NO: 898766 - DNA, 15 bp, Homo sapiens
catttgcaaggtaag

SEQ ID NO: 898767 - DNA, 15 bp, Homo sapiens
atttgcaaggtaaga

SEQ ID NO: 898768 - DNA, 15 bp, Homo sapiens
tttgcaaggtaagat

SEQ ID NO: 898769 - DNA, 15 bp, Homo sapiens
ttgcaaggtaagatt

SEQ ID NO: 898770 - DNA, 15 bp, Homo sapiens
tgcaaggtaagattg

SEQ ID NO: 898771 - DNA, 15 bp, Homo sapiens
gcaaggtaagattgt

SEQ ID NO: 898772 - DNA, 15 bp, Homo sapiens
caaggtaagattgtg

SEQ ID NO: 898773 - DNA, 15 bp, Homo sapiens
aaggtaagattgtgg

SEQ ID NO: 898774 - DNA, 15 bp, Homo sapiens
aggtaagattgtggg

SEQ ID NO: 898775 - DNA, 15 bp, Homo sapiens
ggtaagattgtggga

SEQ ID NO: 898776 - DNA, 15 bp, Homo sapiens
gtaagattgtgggac

SEQ ID NO: 898777 - DNA, 15 bp, Homo sapiens
taagattgtgggaca

SEQ ID NO: 898778 - DNA, 15 bp, Homo sapiens
aagattgtgggacaa

SEQ ID NO: 898779 - DNA, 15 bp, Homo sapiens
agattgtgggacaag

SEQ ID NO: 898780 - DNA, 15 bp, Homo sapiens
gattgtgggacaaga

SEQ ID NO: 898781 - DNA, 15 bp, Homo sapiens
attgtgggacaagac

SEQ ID NO: 898782 - DNA, 15 bp, Homo sapiens
ttgtgggacaagaca

SEQ ID NO: 898783 - DNA, 15 bp, Homo sapiens
tgtgggacaagacag

SEQ ID NO: 898784 - DNA, 15 bp, Homo sapiens
gtgggacaagacagg

SEQ ID NO: 898785 - DNA, 15 bp, Homo sapiens
tgggacaagacaggt

SEQ ID NO: 898786 - DNA, 15 bp, Homo sapiens
gggacaagacaggtc

SEQ ID NO: 898787 - DNA, 15 bp, Homo sapiens
ggacaagacaggtcc

SEQ ID NO: 898788 - DNA, 15 bp, Homo sapiens
gacaagacaggtcca

SEQ ID NO: 898789 - DNA, 15 bp, Homo sapiens
acaagacaggtccag

SEQ ID NO: 898790 - DNA, 15 bp, Homo sapiens
caagacaggtccagc

SEQ ID NO: 898791 - DNA, 15 bp, Homo sapiens
aagacaggtccagct

SEQ ID NO: 898792 - DNA, 15 bp, Homo sapiens
agacaggtccagcta

SEQ ID NO: 898793 - DNA, 15 bp, Homo sapiens
gacaggtccagctaa

SEQ ID NO: 898794 - DNA, 15 bp, Homo sapiens
acaggtccagctaac

SEQ ID NO: 898795 - DNA, 15 bp, Homo sapiens
caggtccagctaaca

SEQ ID NO: 898796 - DNA, 15 bp, Homo sapiens
aggtccagctaacat

SEQ ID NO: 898797 - DNA, 15 bp, Homo sapiens
ggtccagctaacatt

SEQ ID NO: 898798 - DNA, 15 bp, Homo sapiens
gtccagctaacattt

SEQ ID NO: 898799 - DNA, 15 bp, Homo sapiens
tccagctaacatttg

SEQ ID NO: 898800 - DNA, 15 bp, Homo sapiens
ccagctaacatttgt

SEQ ID NO: 898801 - DNA, 15 bp, Homo sapiens
cagctaacatttgtt

SEQ ID NO: 898802 - DNA, 15 bp, Homo sapiens
agctaacatttgttt

SEQ ID NO: 898803 - DNA, 15 bp, Homo sapiens
gctaacatttgtttg

SEQ ID NO: 898804 - DNA, 15 bp, Homo sapiens
ctaacatttgtttga

SEQ ID NO: 898805 - DNA, 15 bp, Homo sapiens
taacatttgtttgag

SEQ ID NO: 898806 - DNA, 15 bp, Homo sapiens
aacatttgtttgaga

SEQ ID NO: 898807 - DNA, 15 bp, Homo sapiens
acatttgtttgagaa

SEQ ID NO: 898808 - DNA, 15 bp, Homo sapiens
catttgtttgagaac

SEQ ID NO: 898809 - DNA, 15 bp, Homo sapiens
atttgtttgagaacc

SEQ ID NO: 898810 - DNA, 15 bp, Homo sapiens
tttgtttgagaaccc

SEQ ID NO: 898811 - DNA, 15 bp, Homo sapiens
ttgtttgagaaccct

SEQ ID NO: 898812 - DNA, 15 bp, Homo sapiens
tgtttgagaaccctt

SEQ ID NO: 898813 - DNA, 15 bp, Homo sapiens
gtttgagaacccttt

SEQ ID NO: 898814 - DNA, 15 bp, Homo sapiens
tttgagaaccctttg

SEQ ID NO: 898815 - DNA, 15 bp, Homo sapiens
ttgagaaccctttgg

SEQ ID NO: 898816 - DNA, 15 bp, Homo sapiens
tgagaaccctttgga

SEQ ID NO: 898817 - DNA, 15 bp, Homo sapiens
gagaaccctttggaa

SEQ ID NO: 898818 - DNA, 15 bp, Homo sapiens
agaaccctttggaat

SEQ ID NO: 898819 - DNA, 15 bp, Homo sapiens
gaaccctttggaata

SEQ ID NO: 898820 - DNA, 15 bp, Homo sapiens
aaccctttggaataa

SEQ ID NO: 898821 - DNA, 15 bp, Homo sapiens
accctttggaataaa

SEQ ID NO: 898822 - DNA, 15 bp, Homo sapiens
ccctttggaataaag

SEQ ID NO: 898823 - DNA, 15 bp, Homo sapiens
cctttggaataaaga

SEQ ID NO: 898824 - DNA, 15 bp, Homo sapiens
ctttggaataaagag

SEQ ID NO: 898825 - DNA, 15 bp, Homo sapiens
tttggaataaagaga

SEQ ID NO: 898826 - DNA, 15 bp, Homo sapiens
ttggaataaagagac

SEQ ID NO: 898827 - DNA, 15 bp, Homo sapiens
tggaataaagagact

SEQ ID NO: 898828 - DNA, 15 bp, Homo sapiens
ggaataaagagactt

SEQ ID NO: 898829 - DNA, 15 bp, Homo sapiens
gaataaagagacttc

SEQ ID NO: 898830 - DNA, 15 bp, Homo sapiens
aataaagagacttca

SEQ ID NO: 898831 - DNA, 15 bp, Homo sapiens
ataaagagacttcaa

SEQ ID NO: 898832 - DNA, 15 bp, Homo sapiens
taaagagacttcaaa

SEQ ID NO: 898833 - DNA, 15 bp, Homo sapiens
aaagagacttcaaag

SEQ ID NO: 898834 - DNA, 15 bp, Homo sapiens
aagagacttcaaaga

SEQ ID NO: 898835 - DNA, 15 bp, Homo sapiens
agagacttcaaagag

SEQ ID NO: 898836 - DNA, 15 bp, Homo sapiens
gagacttcaaagagg

SEQ ID NO: 898837 - DNA, 15 bp, Homo sapiens
agacttcaaagagga

SEQ ID NO: 898838 - DNA, 15 bp, Homo sapiens
gacttcaaagaggac

SEQ ID NO: 898839 - DNA, 15 bp, Homo sapiens
acttcaaagaggact

SEQ ID NO: 898840 - DNA, 15 bp, Homo sapiens
cttcaaagaggacta

SEQ ID NO: 898841 - DNA, 15 bp, Homo sapiens
ttcaaagaggactaa

SEQ ID NO: 898842 - DNA, 15 bp, Homo sapiens
tcaaagaggactaac

SEQ ID NO: 898843 - DNA, 15 bp, Homo sapiens
caaagaggactaact

SEQ ID NO: 898844 - DNA, 15 bp, Homo sapiens
aaagaggactaactt

SEQ ID NO: 898845 - DNA, 15 bp, Homo sapiens
aagaggactaacttt

SEQ ID NO: 898846 - DNA, 15 bp, Homo sapiens
agaggactaactttc

SEQ ID NO: 898847 - DNA, 15 bp, Homo sapiens
gaggactaactttct

SEQ ID NO: 898848 - DNA, 15 bp, Homo sapiens
aggactaactttctt

SEQ ID NO: 898849 - DNA, 15 bp, Homo sapiens
ggactaactttcttt

SEQ ID NO: 898850 - DNA, 15 bp, Homo sapiens
gactaactttctttc

SEQ ID NO: 898851 - DNA, 15 bp, Homo sapiens
actaactttctttct

SEQ ID NO: 898852 - DNA, 15 bp, Homo sapiens
ctaactttctttctt

SEQ ID NO: 898853 - DNA, 15 bp, Homo sapiens
taactttctttcttt

SEQ ID NO: 898854 - DNA, 15 bp, Homo sapiens
aactttctttctttt

SEQ ID NO: 898855 - DNA, 15 bp, Homo sapiens
actttctttctttta

SEQ ID NO: 898856 - DNA, 15 bp, Homo sapiens
ctttctttcttttaa

SEQ ID NO: 898857 - DNA, 15 bp, Homo sapiens
tttctttcttttaaa

SEQ ID NO: 898858 - DNA, 15 bp, Homo sapiens
ttctttcttttaaaa

SEQ ID NO: 898859 - DNA, 15 bp, Homo sapiens
tctttcttttaaaat

SEQ ID NO: 898860 - DNA, 15 bp, Homo sapiens
tttcttttaaaatgg

SEQ ID NO: 898861 - DNA, 15 bp, Homo sapiens
ttcttttaaaatgga

SEQ ID NO: 898862 - DNA, 15 bp, Homo sapiens
tcttttaaaatggat

SEQ ID NO: 898863 - DNA, 15 bp, Homo sapiens
cttttaaaatggata

SEQ ID NO: 898864 - DNA, 15 bp, Homo sapiens
ttttaaaatggatat

SEQ ID NO: 898865 - DNA, 15 bp, Homo sapiens
tttaaaatggatatt

SEQ ID NO: 898866 - DNA, 15 bp, Homo sapiens
ttaaaatggatattc

SEQ ID NO: 898867 - DNA, 15 bp, Homo sapiens
taaaatggatattcc

SEQ ID NO: 898868 - DNA, 15 bp, Homo sapiens
aaaatggatattcct

SEQ ID NO: 898869 - DNA, 15 bp, Homo sapiens
aaatggatattcctt

SEQ ID NO: 898870 - DNA, 15 bp, Homo sapiens
aatggatattcctta

SEQ ID NO: 898871 - DNA, 15 bp, Homo sapiens
atggatattccttaa

SEQ ID NO: 898872 - DNA, 15 bp, Homo sapiens
tggatattccttaat

SEQ ID NO: 898873 - DNA, 15 bp, Homo sapiens
ggatattccttaatt

SEQ ID NO: 898874 - DNA, 15 bp, Homo sapiens
gatattccttaattt

SEQ ID NO: 898875 - DNA, 15 bp, Homo sapiens
atattccttaattta

SEQ ID NO: 898876 - DNA, 15 bp, Homo sapiens
tattccttaatttat

SEQ ID NO: 898877 - DNA, 15 bp, Homo sapiens
attccttaatttatg

SEQ ID NO: 898878 - DNA, 15 bp, Homo sapiens
ttccttaatttatgt

SEQ ID NO: 898879 - DNA, 15 bp, Homo sapiens
tccttaatttatgtc

SEQ ID NO: 898880 - DNA, 15 bp, Homo sapiens
ccttaatttatgtct

SEQ ID NO: 898881 - DNA, 15 bp, Homo sapiens
cttaatttatgtcta

SEQ ID NO: 898882 - DNA, 15 bp, Homo sapiens
ttaatttatgtctac

SEQ ID NO: 898883 - DNA, 15 bp, Homo sapiens
taatttatgtctact

SEQ ID NO: 898884 - DNA, 15 bp, Homo sapiens
aatttatgtctacta

SEQ ID NO: 898885 - DNA, 15 bp, Homo sapiens
atttatgtctactat

SEQ ID NO: 898886 - DNA, 15 bp, Homo sapiens
tttatgtctactatc

SEQ ID NO: 898887 - DNA, 15 bp, Homo sapiens
ttatgtctactatct

SEQ ID NO: 898888 - DNA, 15 bp, Homo sapiens
tatgtctactatctt

SEQ ID NO: 898889 - DNA, 15 bp, Homo sapiens
atgtctactatcttt

SEQ ID NO: 898890 - DNA, 15 bp, Homo sapiens
tgtctactatcttta

SEQ ID NO: 898891 - DNA, 15 bp, Homo sapiens
gtctactatctttag

SEQ ID NO: 898892 - DNA, 15 bp, Homo sapiens
tctactatctttaga

SEQ ID NO: 898893 - DNA, 15 bp, Homo sapiens
ctactatctttagat

SEQ ID NO: 898894 - DNA, 15 bp, Homo sapiens
tactatctttagata

SEQ ID NO: 898895 - DNA, 15 bp, Homo sapiens
actatctttagataa

SEQ ID NO: 898896 - DNA, 15 bp, Homo sapiens
ctatctttagataat

SEQ ID NO: 898897 - DNA, 15 bp, Homo sapiens
tatctttagataatt

SEQ ID NO: 898898 - DNA, 15 bp, Homo sapiens
atctttagataatta

SEQ ID NO: 898899 - DNA, 15 bp, Homo sapiens
tctttagataattaa

SEQ ID NO: 898900 - DNA, 15 bp, Homo sapiens
ctttagataattaaa

SEQ ID NO: 898901 - DNA, 15 bp, Homo sapiens
tttagataattaaag

SEQ ID NO: 898902 - DNA, 15 bp, Homo sapiens
ttagataattaaagg

SEQ ID NO: 898903 - DNA, 15 bp, Homo sapiens
tagataattaaaggt

SEQ ID NO: 898904 - DNA, 15 bp, Homo sapiens
agataattaaaggta

SEQ ID NO: 898905 - DNA, 15 bp, Homo sapiens
gataattaaaggtaa

SEQ ID NO: 898906 - DNA, 15 bp, Homo sapiens
ataattaaaggtaaa

SEQ ID NO: 898907 - DNA, 15 bp, Homo sapiens
taattaaaggtaaaa

SEQ ID NO: 898908 - DNA, 15 bp, Homo sapiens
aattaaaggtaaaat

SEQ ID NO: 898909 - DNA, 15 bp, Homo sapiens
attaaaggtaaaatg

SEQ ID NO: 898910 - DNA, 15 bp, Homo sapiens
ttaaaggtaaaatgc

SEQ ID NO: 898911 - DNA, 15 bp, Homo sapiens
taaaggtaaaatgct

SEQ ID NO: 898912 - DNA, 15 bp, Homo sapiens
aaaggtaaaatgctg

SEQ ID NO: 898913 - DNA, 15 bp, Homo sapiens
aaggtaaaatgctgg

SEQ ID NO: 898914 - DNA, 15 bp, Homo sapiens
aggtaaaatgctggc

SEQ ID NO: 898915 - DNA, 15 bp, Homo sapiens
ggtaaaatgctggcc

SEQ ID NO: 898916 - DNA, 15 bp, Homo sapiens
gtaaaatgctggccc

SEQ ID NO: 898917 - DNA, 15 bp, Homo sapiens
taaaatgctggccca

SEQ ID NO: 898918 - DNA, 15 bp, Homo sapiens
aaaatgctggcccac

SEQ ID NO: 898919 - DNA, 15 bp, Homo sapiens
aaatgctggcccaca

SEQ ID NO: 898920 - DNA, 15 bp, Homo sapiens
aatgctggcccacaa

SEQ ID NO: 898921 - DNA, 15 bp, Homo sapiens
atgctggcccacaaa

SEQ ID NO: 898922 - DNA, 15 bp, Homo sapiens
tgctggcccacaaat

SEQ ID NO: 898923 - DNA, 15 bp, Homo sapiens
gctggcccacaaatc

SEQ ID NO: 898924 - DNA, 15 bp, Homo sapiens
ctggcccacaaatcc

SEQ ID NO: 898925 - DNA, 15 bp, Homo sapiens
tggcccacaaatcca

SEQ ID NO: 898926 - DNA, 15 bp, Homo sapiens
ggcccacaaatccac

SEQ ID NO: 898927 - DNA, 15 bp, Homo sapiens
gcccacaaatccact

SEQ ID NO: 898928 - DNA, 15 bp, Homo sapiens
cccacaaatccactt

SEQ ID NO: 898929 - DNA, 15 bp, Homo sapiens
ccacaaatccacttg

SEQ ID NO: 898930 - DNA, 15 bp, Homo sapiens
cacaaatccacttgg

SEQ ID NO: 898931 - DNA, 15 bp, Homo sapiens
acaaatccacttggt

SEQ ID NO: 898932 - DNA, 15 bp, Homo sapiens
caaatccacttggtg

SEQ ID NO: 898933 - DNA, 15 bp, Homo sapiens
aaatccacttggtgt

SEQ ID NO: 898934 - DNA, 15 bp, Homo sapiens
aatccacttggtgtg

SEQ ID NO: 898935 - DNA, 15 bp, Homo sapiens
atccacttggtgtgg

SEQ ID NO: 898936 - DNA, 15 bp, Homo sapiens
tccacttggtgtggc

SEQ ID NO: 898937 - DNA, 15 bp, Homo sapiens
ccacttggtgtggcc

SEQ ID NO: 898938 - DNA, 15 bp, Homo sapiens
cacttggtgtggcct

SEQ ID NO: 898939 - DNA, 15 bp, Homo sapiens
acttggtgtggccta

SEQ ID NO: 898940 - DNA, 15 bp, Homo sapiens
cttggtgtggcctaa

SEQ ID NO: 898941 - DNA, 15 bp, Homo sapiens
ttggtgtggcctaaa

SEQ ID NO: 898942 - DNA, 15 bp, Homo sapiens
tggtgtggcctaaaa

SEQ ID NO: 898943 - DNA, 15 bp, Homo sapiens
ggtgtggcctaaaat

SEQ ID NO: 898944 - DNA, 15 bp, Homo sapiens
gtgtggcctaaaatg

SEQ ID NO: 898945 - DNA, 15 bp, Homo sapiens
tgtggcctaaaatga

SEQ ID NO: 898946 - DNA, 15 bp, Homo sapiens
gtggcctaaaatgac

SEQ ID NO: 898947 - DNA, 15 bp, Homo sapiens
tggcctaaaatgact

SEQ ID NO: 898948 - DNA, 15 bp, Homo sapiens
ggcctaaaatgacta

SEQ ID NO: 898949 - DNA, 15 bp, Homo sapiens
gcctaaaatgactat

SEQ ID NO: 898950 - DNA, 15 bp, Homo sapiens
cctaaaatgactatt

SEQ ID NO: 898951 - DNA, 15 bp, Homo sapiens
ctaaaatgactattt

SEQ ID NO: 898952 - DNA, 15 bp, Homo sapiens
taaaatgactatttc

SEQ ID NO: 898953 - DNA, 15 bp, Homo sapiens
aaaatgactatttct

SEQ ID NO: 898954 - DNA, 15 bp, Homo sapiens
aaatgactatttctc

SEQ ID NO: 898955 - DNA, 15 bp, Homo sapiens
aatgactatttctcc

SEQ ID NO: 898956 - DNA, 15 bp, Homo sapiens
atgactatttctcca

SEQ ID NO: 898957 - DNA, 15 bp, Homo sapiens
tgactatttctccag

SEQ ID NO: 898958 - DNA, 15 bp, Homo sapiens
gactatttctccagc

SEQ ID NO: 898959 - DNA, 15 bp, Homo sapiens
actatttctccagct

SEQ ID NO: 898960 - DNA, 15 bp, Homo sapiens
ctatttctccagctc

SEQ ID NO: 898961 - DNA, 15 bp, Homo sapiens
tatttctccagctct

SEQ ID NO: 898962 - DNA, 15 bp, Homo sapiens
atttctccagctctg

SEQ ID NO: 898963 - DNA, 15 bp, Homo sapiens
tttctccagctctgt

SEQ ID NO: 898964 - DNA, 15 bp, Homo sapiens
ttctccagctctgtc

SEQ ID NO: 898965 - DNA, 15 bp, Homo sapiens
tctccagctctgtcc

SEQ ID NO: 898966 - DNA, 15 bp, Homo sapiens
ctccagctctgtcca

SEQ ID NO: 898967 - DNA, 15 bp, Homo sapiens
tccagctctgtccag

SEQ ID NO: 898968 - DNA, 15 bp, Homo sapiens
ccagctctgtccaga

SEQ ID NO: 898969 - DNA, 15 bp, Homo sapiens
cagctctgtccagag

SEQ ID NO: 898970 - DNA, 15 bp, Homo sapiens
agctctgtccagagc

SEQ ID NO: 898971 - DNA, 15 bp, Homo sapiens
gctctgtccagagct

SEQ ID NO: 898972 - DNA, 15 bp, Homo sapiens
ctctgtccagagctc

SEQ ID NO: 898973 - DNA, 15 bp, Homo sapiens
tctgtccagagctct

SEQ ID NO: 898974 - DNA, 15 bp, Homo sapiens
ctgtccagagctctc

SEQ ID NO: 898975 - DNA, 15 bp, Homo sapiens
tgtccagagctctca

SEQ ID NO: 898976 - DNA, 15 bp, Homo sapiens
gtccagagctctcaa

SEQ ID NO: 898977 - DNA, 15 bp, Homo sapiens
tccagagctctcaag

SEQ ID NO: 898978 - DNA, 15 bp, Homo sapiens
ccagagctctcaagt

SEQ ID NO: 898979 - DNA, 15 bp, Homo sapiens
cagagctctcaagtc

SEQ ID NO: 898980 - DNA, 15 bp, Homo sapiens
agagctctcaagtcc

SEQ ID NO: 898981 - DNA, 15 bp, Homo sapiens
gagctctcaagtcct

SEQ ID NO: 898982 - DNA, 15 bp, Homo sapiens
agctctcaagtcctt

SEQ ID NO: 898983 - DNA, 15 bp, Homo sapiens
gctctcaagtccttc

SEQ ID NO: 898984 - DNA, 15 bp, Homo sapiens
ctctcaagtccttct

SEQ ID NO: 898985 - DNA, 15 bp, Homo sapiens
tctcaagtccttctg

SEQ ID NO: 898986 - DNA, 15 bp, Homo sapiens
ctcaagtccttctgg

SEQ ID NO: 898987 - DNA, 15 bp, Homo sapiens
tcaagtccttctggc

SEQ ID NO: 898988 - DNA, 15 bp, Homo sapiens
caagtccttctggct

SEQ ID NO: 898989 - DNA, 15 bp, Homo sapiens
aagtccttctggctc

SEQ ID NO: 898990 - DNA, 15 bp, Homo sapiens
agtccttctggctct

SEQ ID NO: 898991 - DNA, 15 bp, Homo sapiens
gtccttctggctctg

SEQ ID NO: 898992 - DNA, 15 bp, Homo sapiens
tccttctggctctgc

SEQ ID NO: 898993 - DNA, 15 bp, Homo sapiens
ccttctggctctgct

SEQ ID NO: 898994 - DNA, 15 bp, Homo sapiens
cttctggctctgctt

SEQ ID NO: 898995 - DNA, 15 bp, Homo sapiens
ttctggctctgcttt

SEQ ID NO: 898996 - DNA, 15 bp, Homo sapiens
tctggctctgctttt

SEQ ID NO: 898997 - DNA, 15 bp, Homo sapiens
ctggctctgcttttt

SEQ ID NO: 898998 - DNA, 15 bp, Homo sapiens
tggctctgctttttt

SEQ ID NO: 898999 - DNA, 15 bp, Homo sapiens
ggctctgctttttta

SEQ ID NO: 899000 - DNA, 15 bp, Homo sapiens
gctctgcttttttaa

SEQ ID NO: 899001 - DNA, 15 bp, Homo sapiens
ctctgcttttttaat

SEQ ID NO: 899002 - DNA, 15 bp, Homo sapiens
tctgcttttttaatt

SEQ ID NO: 899003 - DNA, 15 bp, Homo sapiens
ctgcttttttaattc

SEQ ID NO: 899004 - DNA, 15 bp, Homo sapiens
tgcttttttaattct

SEQ ID NO: 899005 - DNA, 15 bp, Homo sapiens
gcttttttaattctc

SEQ ID NO: 899006 - DNA, 15 bp, Homo sapiens
cttttttaattctct

SEQ ID NO: 899007 - DNA, 15 bp, Homo sapiens
ttttttaattctctc

SEQ ID NO: 899008 - DNA, 15 bp, Homo sapiens
tttttaattctctcc

SEQ ID NO: 899009 - DNA, 15 bp, Homo sapiens
ttttaattctctcct

SEQ ID NO: 899010 - DNA, 15 bp, Homo sapiens
tttaattctctccta

SEQ ID NO: 899011 - DNA, 15 bp, Homo sapiens
ttaattctctcctaa

SEQ ID NO: 899012 - DNA, 15 bp, Homo sapiens
taattctctcctaaa

SEQ ID NO: 899013 - DNA, 15 bp, Homo sapiens
aattctctcctaaac

SEQ ID NO: 899014 - DNA, 15 bp, Homo sapiens
attctctcctaaact

SEQ ID NO: 899015 - DNA, 15 bp, Homo sapiens
ttctctcctaaactg

SEQ ID NO: 899016 - DNA, 15 bp, Homo sapiens
tctctcctaaactgg

SEQ ID NO: 899017 - DNA, 15 bp, Homo sapiens
ctctcctaaactggg

SEQ ID NO: 899018 - DNA, 15 bp, Homo sapiens
tctcctaaactggga

SEQ ID NO: 899019 - DNA, 15 bp, Homo sapiens
ctcctaaactgggag

SEQ ID NO: 899020 - DNA, 15 bp, Homo sapiens
tcctaaactgggagc

SEQ ID NO: 899021 - DNA, 15 bp, Homo sapiens
cctaaactgggagcc

SEQ ID NO: 899022 - DNA, 15 bp, Homo sapiens
ctaaactgggagcct

SEQ ID NO: 899023 - DNA, 15 bp, Homo sapiens
taaactgggagccta

SEQ ID NO: 899024 - DNA, 15 bp, Homo sapiens
aaactgggagcctag

SEQ ID NO: 899025 - DNA, 15 bp, Homo sapiens
aactgggagcctagc

SEQ ID NO: 899026 - DNA, 15 bp, Homo sapiens
actgggagcctagcc

SEQ ID NO: 899027 - DNA, 15 bp, Homo sapiens
ctgggagcctagcct

SEQ ID NO: 899028 - DNA, 15 bp, Homo sapiens
tgggagcctagcctc

SEQ ID NO: 899029 - DNA, 15 bp, Homo sapiens
gggagcctagcctcc

SEQ ID NO: 899030 - DNA, 15 bp, Homo sapiens
ggagcctagcctcct

SEQ ID NO: 899031 - DNA, 15 bp, Homo sapiens
gagcctagcctcctt

SEQ ID NO: 899032 - DNA, 15 bp, Homo sapiens
agcctagcctccttc

SEQ ID NO: 899033 - DNA, 15 bp, Homo sapiens
gcctagcctccttcc

SEQ ID NO: 899034 - DNA, 15 bp, Homo sapiens
cctagcctccttcca

SEQ ID NO: 899035 - DNA, 15 bp, Homo sapiens
ctagcctccttccag

SEQ ID NO: 899036 - DNA, 15 bp, Homo sapiens
tagcctccttccagc

SEQ ID NO: 899037 - DNA, 15 bp, Homo sapiens
agcctccttccagca

SEQ ID NO: 899038 - DNA, 15 bp, Homo sapiens
gcctccttccagcat

SEQ ID NO: 899039 - DNA, 15 bp, Homo sapiens
cctccttccagcatc

SEQ ID NO: 899040 - DNA, 15 bp, Homo sapiens
ctccttccagcatca

SEQ ID NO: 899041 - DNA, 15 bp, Homo sapiens
tccttccagcatcat

SEQ ID NO: 899042 - DNA, 15 bp, Homo sapiens
ccttccagcatcatc

SEQ ID NO: 899043 - DNA, 15 bp, Homo sapiens
cttccagcatcatcc

SEQ ID NO: 899044 - DNA, 15 bp, Homo sapiens
ttccagcatcatccc

SEQ ID NO: 899045 - DNA, 15 bp, Homo sapiens
tccagcatcatcccc

SEQ ID NO: 899046 - DNA, 15 bp, Homo sapiens
ccagcatcatccccc

SEQ ID NO: 899047 - DNA, 15 bp, Homo sapiens
cagcatcatccccct

SEQ ID NO: 899048 - DNA, 15 bp, Homo sapiens
agcatcatccccctc

SEQ ID NO: 899049 - DNA, 15 bp, Homo sapiens
gcatcatccccctct

SEQ ID NO: 899050 - DNA, 15 bp, Homo sapiens
catcatccccctctc

SEQ ID NO: 899051 - DNA, 15 bp, Homo sapiens
atcatccccctctcc

SEQ ID NO: 899052 - DNA, 15 bp, Homo sapiens
tcatccccctctccc

SEQ ID NO: 899053 - DNA, 15 bp, Homo sapiens
catccccctctccct

SEQ ID NO: 899054 - DNA, 15 bp, Homo sapiens
atccccctctccctc

SEQ ID NO: 899055 - DNA, 15 bp, Homo sapiens
tccccctctccctcc

SEQ ID NO: 899056 - DNA, 15 bp, Homo sapiens
ccccctctccctcca

SEQ ID NO: 899057 - DNA, 15 bp, Homo sapiens
cccctctccctccaa

SEQ ID NO: 899058 - DNA, 15 bp, Homo sapiens
ccctctccctccaag

SEQ ID NO: 899059 - DNA, 15 bp, Homo sapiens
cctctccctccaagg

SEQ ID NO: 899060 - DNA, 15 bp, Homo sapiens
ctctccctccaaggc

SEQ ID NO: 899061 - DNA, 15 bp, Homo sapiens
tctccctccaaggcc

SEQ ID NO: 899062 - DNA, 15 bp, Homo sapiens
ctccctccaaggccc

SEQ ID NO: 899063 - DNA, 15 bp, Homo sapiens
tccctccaaggccca

SEQ ID NO: 899064 - DNA, 15 bp, Homo sapiens
ccctccaaggcccaa

SEQ ID NO: 899065 - DNA, 15 bp, Homo sapiens
cctccaaggcccaag

SEQ ID NO: 899066 - DNA, 15 bp, Homo sapiens
ctccaaggcccaagg

SEQ ID NO: 899067 - DNA, 15 bp, Homo sapiens
tccaaggcccaaggt

SEQ ID NO: 899068 - DNA, 15 bp, Homo sapiens
ccaaggcccaaggtt

SEQ ID NO: 899069 - DNA, 15 bp, Homo sapiens
caaggcccaaggttt

SEQ ID NO: 899070 - DNA, 15 bp, Homo sapiens
aaggcccaaggtttg

SEQ ID NO: 899071 - DNA, 15 bp, Homo sapiens
aggcccaaggtttgg

SEQ ID NO: 899072 - DNA, 15 bp, Homo sapiens
ggcccaaggtttgga

SEQ ID NO: 899073 - DNA, 15 bp, Homo sapiens
gcccaaggtttggac

SEQ ID NO: 899074 - DNA, 15 bp, Homo sapiens
cccaaggtttggacc

SEQ ID NO: 899075 - DNA, 15 bp, Homo sapiens
ccaaggtttggaccc

SEQ ID NO: 899076 - DNA, 15 bp, Homo sapiens
caaggtttggaccca

SEQ ID NO: 899077 - DNA, 15 bp, Homo sapiens
aaggtttggacccag

SEQ ID NO: 899078 - DNA, 15 bp, Homo sapiens
aggtttggacccagg

SEQ ID NO: 899079 - DNA, 15 bp, Homo sapiens
ggtttggacccaggc

SEQ ID NO: 899080 - DNA, 15 bp, Homo sapiens
gtttggacccaggca

SEQ ID NO: 899081 - DNA, 15 bp, Homo sapiens
tttggacccaggcat

SEQ ID NO: 899082 - DNA, 15 bp, Homo sapiens
ttggacccaggcatt

SEQ ID NO: 899083 - DNA, 15 bp, Homo sapiens
tggacccaggcattg

SEQ ID NO: 899084 - DNA, 15 bp, Homo sapiens
ggacccaggcattgg

SEQ ID NO: 899085 - DNA, 15 bp, Homo sapiens
gacccaggcattgga

SEQ ID NO: 899086 - DNA, 15 bp, Homo sapiens
acccaggcattggag

SEQ ID NO: 899087 - DNA, 15 bp, Homo sapiens
cccaggcattggagc

SEQ ID NO: 899088 - DNA, 15 bp, Homo sapiens
ccaggcattggagct

SEQ ID NO: 899089 - DNA, 15 bp, Homo sapiens
caggcattggagctt

SEQ ID NO: 899090 - DNA, 15 bp, Homo sapiens
aggcattggagctta

SEQ ID NO: 899091 - DNA, 15 bp, Homo sapiens
ggcattggagcttag

SEQ ID NO: 899092 - DNA, 15 bp, Homo sapiens
gcattggagcttaga

SEQ ID NO: 899093 - DNA, 15 bp, Homo sapiens
cattggagcttagag

SEQ ID NO: 899094 - DNA, 15 bp, Homo sapiens
attggagcttagagg

SEQ ID NO: 899095 - DNA, 15 bp, Homo sapiens
ttggagcttagaggc

SEQ ID NO: 899096 - DNA, 15 bp, Homo sapiens
tggagcttagaggca

SEQ ID NO: 899097 - DNA, 15 bp, Homo sapiens
ggagcttagaggcag

SEQ ID NO: 899098 - DNA, 15 bp, Homo sapiens
gagcttagaggcagt

SEQ ID NO: 899099 - DNA, 15 bp, Homo sapiens
agcttagaggcagtg

SEQ ID NO: 899100 - DNA, 15 bp, Homo sapiens
gcttagaggcagtgc

SEQ ID NO: 899101 - DNA, 15 bp, Homo sapiens
cttagaggcagtgct

SEQ ID NO: 899102 - DNA, 15 bp, Homo sapiens
ttagaggcagtgctg

SEQ ID NO: 899103 - DNA, 15 bp, Homo sapiens
tagaggcagtgctga

SEQ ID NO: 899104 - DNA, 15 bp, Homo sapiens
agaggcagtgctgat

SEQ ID NO: 899105 - DNA, 15 bp, Homo sapiens
gaggcagtgctgatg

SEQ ID NO: 899106 - DNA, 15 bp, Homo sapiens
aggcagtgctgatga

SEQ ID NO: 899107 - DNA, 15 bp, Homo sapiens
ggcagtgctgatgag

SEQ ID NO: 899108 - DNA, 15 bp, Homo sapiens
gcagtgctgatgagc

SEQ ID NO: 899109 - DNA, 15 bp, Homo sapiens
cagtgctgatgagca

SEQ ID NO: 899110 - DNA, 15 bp, Homo sapiens
agtgctgatgagcac

SEQ ID NO: 899111 - DNA, 15 bp, Homo sapiens
gtgctgatgagcacc

SEQ ID NO: 899112 - DNA, 15 bp, Homo sapiens
tgctgatgagcaccc

SEQ ID NO: 899113 - DNA, 15 bp, Homo sapiens
gctgatgagcaccct

SEQ ID NO: 899114 - DNA, 15 bp, Homo sapiens
ctgatgagcaccctg

SEQ ID NO: 899115 - DNA, 15 bp, Homo sapiens
tgatgagcaccctgt

SEQ ID NO: 899116 - DNA, 15 bp, Homo sapiens
gatgagcaccctgtc

SEQ ID NO: 899117 - DNA, 15 bp, Homo sapiens
atgagcaccctgtca

SEQ ID NO: 899118 - DNA, 15 bp, Homo sapiens
tgagcaccctgtcat

SEQ ID NO: 899119 - DNA, 15 bp, Homo sapiens
gagcaccctgtcatg

SEQ ID NO: 899120 - DNA, 15 bp, Homo sapiens
agcaccctgtcatgc

SEQ ID NO: 899121 - DNA, 15 bp, Homo sapiens
gcaccctgtcatgcc

SEQ ID NO: 899122 - DNA, 15 bp, Homo sapiens
caccctgtcatgcca

SEQ ID NO: 899123 - DNA, 15 bp, Homo sapiens
accctgtcatgccaa

SEQ ID NO: 899124 - DNA, 15 bp, Homo sapiens
ccctgtcatgccaag

SEQ ID NO: 899125 - DNA, 15 bp, Homo sapiens
cctgtcatgccaaga

SEQ ID NO: 899126 - DNA, 15 bp, Homo sapiens
ctgtcatgccaagat

SEQ ID NO: 899127 - DNA, 15 bp, Homo sapiens
tgtcatgccaagatc

SEQ ID NO: 899128 - DNA, 15 bp, Homo sapiens
gtcatgccaagatca

SEQ ID NO: 899129 - DNA, 15 bp, Homo sapiens
tcatgccaagatcac

SEQ ID NO: 899130 - DNA, 15 bp, Homo sapiens
catgccaagatcaca

SEQ ID NO: 899131 - DNA, 15 bp, Homo sapiens
atgccaagatcacat

SEQ ID NO: 899132 - DNA, 15 bp, Homo sapiens
tgccaagatcacatt

SEQ ID NO: 899133 - DNA, 15 bp, Homo sapiens
gccaagatcacattt

SEQ ID NO: 899134 - DNA, 15 bp, Homo sapiens
ccaagatcacatttg

SEQ ID NO: 899135 - DNA, 15 bp, Homo sapiens
caagatcacatttgg

SEQ ID NO: 899136 - DNA, 15 bp, Homo sapiens
aagatcacatttgga

SEQ ID NO: 899137 - DNA, 15 bp, Homo sapiens
agatcacatttggat

SEQ ID NO: 899138 - DNA, 15 bp, Homo sapiens
gatcacatttggatg

SEQ ID NO: 899139 - DNA, 15 bp, Homo sapiens
atcacatttggatgg

SEQ ID NO: 899140 - DNA, 15 bp, Homo sapiens
tcacatttggatggg

SEQ ID NO: 899141 - DNA, 15 bp, Homo sapiens
cacatttggatgggc

SEQ ID NO: 899142 - DNA, 15 bp, Homo sapiens
acatttggatgggcc

SEQ ID NO: 899143 - DNA, 15 bp, Homo sapiens
catttggatgggccc

SEQ ID NO: 899144 - DNA, 15 bp, Homo sapiens
atttggatgggccct

SEQ ID NO: 899145 - DNA, 15 bp, Homo sapiens
tttggatgggccctc

SEQ ID NO: 899146 - DNA, 15 bp, Homo sapiens
ttggatgggccctcc

SEQ ID NO: 899147 - DNA, 15 bp, Homo sapiens
tggatgggccctcct

SEQ ID NO: 899148 - DNA, 15 bp, Homo sapiens
ggatgggccctcctg

SEQ ID NO: 899149 - DNA, 15 bp, Homo sapiens
gatgggccctcctgg

SEQ ID NO: 899150 - DNA, 15 bp, Homo sapiens
atgggccctcctgga

SEQ ID NO: 899151 - DNA, 15 bp, Homo sapiens
tgggccctcctggag

SEQ ID NO: 899152 - DNA, 15 bp, Homo sapiens
gggccctcctggaga

SEQ ID NO: 899153 - DNA, 15 bp, Homo sapiens
ggccctcctggagac

SEQ ID NO: 899154 - DNA, 15 bp, Homo sapiens
gccctcctggagaca

SEQ ID NO: 899155 - DNA, 15 bp, Homo sapiens
ccctcctggagacaa

SEQ ID NO: 899156 - DNA, 15 bp, Homo sapiens
cctcctggagacaac

SEQ ID NO: 899157 - DNA, 15 bp, Homo sapiens
ctcctggagacaact

SEQ ID NO: 899158 - DNA, 15 bp, Homo sapiens
tcctggagacaactc

SEQ ID NO: 899159 - DNA, 15 bp, Homo sapiens
cctggagacaactct

SEQ ID NO: 899160 - DNA, 15 bp, Homo sapiens
ctggagacaactctc

SEQ ID NO: 899161 - DNA, 15 bp, Homo sapiens
tggagacaactctct

SEQ ID NO: 899162 - DNA, 15 bp, Homo sapiens
ggagacaactctcta

SEQ ID NO: 899163 - DNA, 15 bp, Homo sapiens
gagacaactctctaa

SEQ ID NO: 899164 - DNA, 15 bp, Homo sapiens
agacaactctctaac

SEQ ID NO: 899165 - DNA, 15 bp, Homo sapiens
gacaactctctaacc

SEQ ID NO: 899166 - DNA, 15 bp, Homo sapiens
acaactctctaacca

SEQ ID NO: 899167 - DNA, 15 bp, Homo sapiens
caactctctaaccag

SEQ ID NO: 899168 - DNA, 15 bp, Homo sapiens
aactctctaaccagc

SEQ ID NO: 899169 - DNA, 15 bp, Homo sapiens
actctctaaccagca

SEQ ID NO: 899170 - DNA, 15 bp, Homo sapiens
ctctctaaccagcaa

SEQ ID NO: 899171 - DNA, 15 bp, Homo sapiens
tctctaaccagcaag

SEQ ID NO: 899172 - DNA, 15 bp, Homo sapiens
ctctaaccagcaagt

SEQ ID NO: 899173 - DNA, 15 bp, Homo sapiens
tctaaccagcaagtg

SEQ ID NO: 899174 - DNA, 15 bp, Homo sapiens
ctaaccagcaagtga

SEQ ID NO: 899175 - DNA, 15 bp, Homo sapiens
taaccagcaagtgat

SEQ ID NO: 899176 - DNA, 15 bp, Homo sapiens
aaccagcaagtgatc

SEQ ID NO: 899177 - DNA, 15 bp, Homo sapiens
accagcaagtgatca

SEQ ID NO: 899178 - DNA, 15 bp, Homo sapiens
ccagcaagtgatcag

SEQ ID NO: 899179 - DNA, 15 bp, Homo sapiens
cagcaagtgatcagt

SEQ ID NO: 899180 - DNA, 15 bp, Homo sapiens
agcaagtgatcagtc

SEQ ID NO: 899181 - DNA, 15 bp, Homo sapiens
gcaagtgatcagtcc

SEQ ID NO: 899182 - DNA, 15 bp, Homo sapiens
caagtgatcagtccc

SEQ ID NO: 899183 - DNA, 15 bp, Homo sapiens
aagtgatcagtccca

SEQ ID NO: 899184 - DNA, 15 bp, Homo sapiens
agtgatcagtcccag

SEQ ID NO: 899185 - DNA, 15 bp, Homo sapiens
gtgatcagtcccaga

SEQ ID NO: 899186 - DNA, 15 bp, Homo sapiens
tgatcagtcccagac

SEQ ID NO: 899187 - DNA, 15 bp, Homo sapiens
gatcagtcccagacc

SEQ ID NO: 899188 - DNA, 15 bp, Homo sapiens
atcagtcccagacca

SEQ ID NO: 899189 - DNA, 15 bp, Homo sapiens
tcagtcccagaccag

SEQ ID NO: 899190 - DNA, 15 bp, Homo sapiens
cagtcccagaccagc

SEQ ID NO: 899191 - DNA, 15 bp, Homo sapiens
agtcccagaccagca

SEQ ID NO: 899192 - DNA, 15 bp, Homo sapiens
gtcccagaccagcag

SEQ ID NO: 899193 - DNA, 15 bp, Homo sapiens
tcccagaccagcagg

SEQ ID NO: 899194 - DNA, 15 bp, Homo sapiens
cccagaccagcaggg

SEQ ID NO: 899195 - DNA, 15 bp, Homo sapiens
ccagaccagcaggga

SEQ ID NO: 899196 - DNA, 15 bp, Homo sapiens
cagaccagcagggaa

SEQ ID NO: 899197 - DNA, 15 bp, Homo sapiens
agaccagcagggaag

SEQ ID NO: 899198 - DNA, 15 bp, Homo sapiens
gaccagcagggaaga

SEQ ID NO: 899199 - DNA, 15 bp, Homo sapiens
accagcagggaagag

SEQ ID NO: 899200 - DNA, 15 bp, Homo sapiens
ccagcagggaagagc

SEQ ID NO: 899201 - DNA, 15 bp, Homo sapiens
cagcagggaagagct

SEQ ID NO: 899202 - DNA, 15 bp, Homo sapiens
agcagggaagagctt

SEQ ID NO: 899203 - DNA, 15 bp, Homo sapiens
gcagggaagagcttg

SEQ ID NO: 899204 - DNA, 15 bp, Homo sapiens
cagggaagagcttgc

SEQ ID NO: 899205 - DNA, 15 bp, Homo sapiens
agggaagagcttgcc

SEQ ID NO: 899206 - DNA, 15 bp, Homo sapiens
gggaagagcttgcca

SEQ ID NO: 899207 - DNA, 15 bp, Homo sapiens
ggaagagcttgccag

SEQ ID NO: 899208 - DNA, 15 bp, Homo sapiens
gaagagcttgccagg

SEQ ID NO: 899209 - DNA, 15 bp, Homo sapiens
aagagcttgccagga

SEQ ID NO: 899210 - DNA, 15 bp, Homo sapiens
agagcttgccaggaa

SEQ ID NO: 899211 - DNA, 15 bp, Homo sapiens
gagcttgccaggaaa

SEQ ID NO: 899212 - DNA, 15 bp, Homo sapiens
agcttgccaggaaac

SEQ ID NO: 899213 - DNA, 15 bp, Homo sapiens
gcttgccaggaaaca

SEQ ID NO: 899214 - DNA, 15 bp, Homo sapiens
cttgccaggaaacag

SEQ ID NO: 899215 - DNA, 15 bp, Homo sapiens
ttgccaggaaacagg

SEQ ID NO: 899216 - DNA, 15 bp, Homo sapiens
tgccaggaaacaggc

SEQ ID NO: 899217 - DNA, 15 bp, Homo sapiens
gccaggaaacaggcc

SEQ ID NO: 899218 - DNA, 15 bp, Homo sapiens
ccaggaaacaggcct

SEQ ID NO: 899219 - DNA, 15 bp, Homo sapiens
caggaaacaggcctg

SEQ ID NO: 899220 - DNA, 15 bp, Homo sapiens
aggaaacaggcctgt

SEQ ID NO: 899221 - DNA, 15 bp, Homo sapiens
ggaaacaggcctgtc

SEQ ID NO: 899222 - DNA, 15 bp, Homo sapiens
gaaacaggcctgtca

SEQ ID NO: 899223 - DNA, 15 bp, Homo sapiens
aaacaggcctgtcag

SEQ ID NO: 899224 - DNA, 15 bp, Homo sapiens
aacaggcctgtcagt

SEQ ID NO: 899225 - DNA, 15 bp, Homo sapiens
acaggcctgtcagta

SEQ ID NO: 899226 - DNA, 15 bp, Homo sapiens
caggcctgtcagtac

SEQ ID NO: 899227 - DNA, 15 bp, Homo sapiens
aggcctgtcagtacc

SEQ ID NO: 899228 - DNA, 15 bp, Homo sapiens
ggcctgtcagtaccg

SEQ ID NO: 899229 - DNA, 15 bp, Homo sapiens
gcctgtcagtaccga

SEQ ID NO: 899230 - DNA, 15 bp, Homo sapiens
cctgtcagtaccgag

SEQ ID NO: 899231 - DNA, 15 bp, Homo sapiens
ctgtcagtaccgagg

SEQ ID NO: 899232 - DNA, 15 bp, Homo sapiens
tgtcagtaccgaggc

SEQ ID NO: 899233 - DNA, 15 bp, Homo sapiens
gtcagtaccgaggcc

SEQ ID NO: 899234 - DNA, 15 bp, Homo sapiens
tcagtaccgaggcct

SEQ ID NO: 899235 - DNA, 15 bp, Homo sapiens
cagtaccgaggcctc

SEQ ID NO: 899236 - DNA, 15 bp, Homo sapiens
agtaccgaggcctca

SEQ ID NO: 899237 - DNA, 15 bp, Homo sapiens
gtaccgaggcctcaa

SEQ ID NO: 899238 - DNA, 15 bp, Homo sapiens
taccgaggcctcaag

SEQ ID NO: 899239 - DNA, 15 bp, Homo sapiens
accgaggcctcaagg

SEQ ID NO: 899240 - DNA, 15 bp, Homo sapiens
ccgaggcctcaaggg

SEQ ID NO: 899241 - DNA, 15 bp, Homo sapiens
cgaggcctcaaggga

SEQ ID NO: 899242 - DNA, 15 bp, Homo sapiens
gaggcctcaagggaa

SEQ ID NO: 899243 - DNA, 15 bp, Homo sapiens
aggcctcaagggaaa

SEQ ID NO: 899244 - DNA, 15 bp, Homo sapiens
ggcctcaagggaaac

SEQ ID NO: 899245 - DNA, 15 bp, Homo sapiens
gcctcaagggaaaca

SEQ ID NO: 899246 - DNA, 15 bp, Homo sapiens
cctcaagggaaacaa

SEQ ID NO: 899247 - DNA, 15 bp, Homo sapiens
ctcaagggaaacaac

SEQ ID NO: 899248 - DNA, 15 bp, Homo sapiens
tcaagggaaacaacc

SEQ ID NO: 899249 - DNA, 15 bp, Homo sapiens
caagggaaacaacca

SEQ ID NO: 899250 - DNA, 15 bp, Homo sapiens
aagggaaacaaccat

SEQ ID NO: 899251 - DNA, 15 bp, Homo sapiens
agggaaacaaccatg

SEQ ID NO: 899252 - DNA, 15 bp, Homo sapiens
gggaaacaaccatga

SEQ ID NO: 899253 - DNA, 15 bp, Homo sapiens
ggaaacaaccatgaa

SEQ ID NO: 899254 - DNA, 15 bp, Homo sapiens
gaaacaaccatgaaa

SEQ ID NO: 899255 - DNA, 15 bp, Homo sapiens
aaacaaccatgaaaa

SEQ ID NO: 899256 - DNA, 15 bp, Homo sapiens
aacaaccatgaaaac

SEQ ID NO: 899257 - DNA, 15 bp, Homo sapiens
acaaccatgaaaacc

SEQ ID NO: 899258 - DNA, 15 bp, Homo sapiens
caaccatgaaaaccc

SEQ ID NO: 899259 - DNA, 15 bp, Homo sapiens
aaccatgaaaacccc

SEQ ID NO: 899260 - DNA, 15 bp, Homo sapiens
accatgaaaacccca

SEQ ID NO: 899261 - DNA, 15 bp, Homo sapiens
ccatgaaaaccccat

SEQ ID NO: 899262 - DNA, 15 bp, Homo sapiens
catgaaaaccccatt

SEQ ID NO: 899263 - DNA, 15 bp, Homo sapiens
atgaaaaccccattc

SEQ ID NO: 899264 - DNA, 15 bp, Homo sapiens
tgaaaaccccattct

SEQ ID NO: 899265 - DNA, 15 bp, Homo sapiens
gaaaaccccattctg

SEQ ID NO: 899266 - DNA, 15 bp, Homo sapiens
aaaaccccattctgc

SEQ ID NO: 899267 - DNA, 15 bp, Homo sapiens
aaaccccattctgct

SEQ ID NO: 899268 - DNA, 15 bp, Homo sapiens
aaccccattctgctg

SEQ ID NO: 899269 - DNA, 15 bp, Homo sapiens
accccattctgctga

SEQ ID NO: 899270 - DNA, 15 bp, Homo sapiens
ccccattctgctgag

SEQ ID NO: 899271 - DNA, 15 bp, Homo sapiens
cccattctgctgaga

SEQ ID NO: 899272 - DNA, 15 bp, Homo sapiens
ccattctgctgagaa

SEQ ID NO: 899273 - DNA, 15 bp, Homo sapiens
cattctgctgagaag

SEQ ID NO: 899274 - DNA, 15 bp, Homo sapiens
attctgctgagaagt

SEQ ID NO: 899275 - DNA, 15 bp, Homo sapiens
ttctgctgagaagtg

SEQ ID NO: 899276 - DNA, 15 bp, Homo sapiens
tctgctgagaagtgg

SEQ ID NO: 899277 - DNA, 15 bp, Homo sapiens
ctgctgagaagtggc

SEQ ID NO: 899278 - DNA, 15 bp, Homo sapiens
tgctgagaagtggct

SEQ ID NO: 899279 - DNA, 15 bp, Homo sapiens
gctgagaagtggctc

SEQ ID NO: 899280 - DNA, 15 bp, Homo sapiens
ctgagaagtggctca

SEQ ID NO: 899281 - DNA, 15 bp, Homo sapiens
tgagaagtggctcag

SEQ ID NO: 899282 - DNA, 15 bp, Homo sapiens
gagaagtggctcaga

SEQ ID NO: 899283 - DNA, 15 bp, Homo sapiens
agaagtggctcagag

SEQ ID NO: 899284 - DNA, 15 bp, Homo sapiens
gaagtggctcagaga

SEQ ID NO: 899285 - DNA, 15 bp, Homo sapiens
aagtggctcagagaa

SEQ ID NO: 899286 - DNA, 15 bp, Homo sapiens
agtggctcagagaat

SEQ ID NO: 899287 - DNA, 15 bp, Homo sapiens
gtggctcagagaatc

SEQ ID NO: 899288 - DNA, 15 bp, Homo sapiens
tggctcagagaatca

SEQ ID NO: 899289 - DNA, 15 bp, Homo sapiens
ggctcagagaatcaa

SEQ ID NO: 899290 - DNA, 15 bp, Homo sapiens
gctcagagaatcaaa

SEQ ID NO: 899291 - DNA, 15 bp, Homo sapiens
ctcagagaatcaaag

SEQ ID NO: 899292 - DNA, 15 bp, Homo sapiens
tcagagaatcaaaga

SEQ ID NO: 899293 - DNA, 15 bp, Homo sapiens
cagagaatcaaagag

SEQ ID NO: 899294 - DNA, 15 bp, Homo sapiens
agagaatcaaagaga

SEQ ID NO: 899295 - DNA, 15 bp, Homo sapiens
gagaatcaaagagaa

SEQ ID NO: 899296 - DNA, 15 bp, Homo sapiens
agaatcaaagagaat

SEQ ID NO: 899297 - DNA, 15 bp, Homo sapiens
gaatcaaagagaatg

SEQ ID NO: 899298 - DNA, 15 bp, Homo sapiens
aatcaaagagaatgc

SEQ ID NO: 899299 - DNA, 15 bp, Homo sapiens
atcaaagagaatgct

SEQ ID NO: 899300 - DNA, 15 bp, Homo sapiens
tcaaagagaatgcta

SEQ ID NO: 899301 - DNA, 15 bp, Homo sapiens
caaagagaatgctaa

SEQ ID NO: 899302 - DNA, 15 bp, Homo sapiens
aaagagaatgctaaa

SEQ ID NO: 899303 - DNA, 15 bp, Homo sapiens
aagagaatgctaaag

SEQ ID NO: 899304 - DNA, 15 bp, Homo sapiens
agagaatgctaaaga

SEQ ID NO: 899305 - DNA, 15 bp, Homo sapiens
gagaatgctaaagaa

SEQ ID NO: 899306 - DNA, 15 bp, Homo sapiens
agaatgctaaagaac

SEQ ID NO: 899307 - DNA, 15 bp, Homo sapiens
gaatgctaaagaaca

SEQ ID NO: 899308 - DNA, 15 bp, Homo sapiens
aatgctaaagaacag

SEQ ID NO: 899309 - DNA, 15 bp, Homo sapiens
atgctaaagaacaga

SEQ ID NO: 899310 - DNA, 15 bp, Homo sapiens
tgctaaagaacagag

SEQ ID NO: 899311 - DNA, 15 bp, Homo sapiens
gctaaagaacagagt

SEQ ID NO: 899312 - DNA, 15 bp, Homo sapiens
ctaaagaacagagtt

SEQ ID NO: 899313 - DNA, 15 bp, Homo sapiens
taaagaacagagttc

SEQ ID NO: 899314 - DNA, 15 bp, Homo sapiens
aaagaacagagttca

SEQ ID NO: 899315 - DNA, 15 bp, Homo sapiens
aagaacagagttcaa

SEQ ID NO: 899316 - DNA, 15 bp, Homo sapiens
agaacagagttcaaa

SEQ ID NO: 899317 - DNA, 15 bp, Homo sapiens
gaacagagttcaaaa

SEQ ID NO: 899318 - DNA, 15 bp, Homo sapiens
aacagagttcaaaac

SEQ ID NO: 899319 - DNA, 15 bp, Homo sapiens
acagagttcaaaaca

SEQ ID NO: 899320 - DNA, 15 bp, Homo sapiens
cagagttcaaaacaa

SEQ ID NO: 899321 - DNA, 15 bp, Homo sapiens
agagttcaaaacaag

SEQ ID NO: 899322 - DNA, 15 bp, Homo sapiens
gagttcaaaacaagg

SEQ ID NO: 899323 - DNA, 15 bp, Homo sapiens
agttcaaaacaagga

SEQ ID NO: 899324 - DNA, 15 bp, Homo sapiens
gttcaaaacaaggaa

SEQ ID NO: 899325 - DNA, 15 bp, Homo sapiens
ttcaaaacaaggaat

SEQ ID NO: 899326 - DNA, 15 bp, Homo sapiens
tcaaaacaaggaatc

SEQ ID NO: 899327 - DNA, 15 bp, Homo sapiens
caaaacaaggaatct

SEQ ID NO: 899328 - DNA, 15 bp, Homo sapiens
aaaacaaggaatctg

SEQ ID NO: 899329 - DNA, 15 bp, Homo sapiens
aaacaaggaatctgc

SEQ ID NO: 899330 - DNA, 15 bp, Homo sapiens
aacaaggaatctgca

SEQ ID NO: 899331 - DNA, 15 bp, Homo sapiens
acaaggaatctgcac

SEQ ID NO: 899332 - DNA, 15 bp, Homo sapiens
caaggaatctgcaca

SEQ ID NO: 899333 - DNA, 15 bp, Homo sapiens
aaggaatctgcacat

SEQ ID NO: 899334 - DNA, 15 bp, Homo sapiens
aggaatctgcacatc

SEQ ID NO: 899335 - DNA, 15 bp, Homo sapiens
ggaatctgcacatcc

SEQ ID NO: 899336 - DNA, 15 bp, Homo sapiens
gaatctgcacatccc

SEQ ID NO: 899337 - DNA, 15 bp, Homo sapiens
aatctgcacatccct

SEQ ID NO: 899338 - DNA, 15 bp, Homo sapiens
atctgcacatccctt

SEQ ID NO: 899339 - DNA, 15 bp, Homo sapiens
tctgcacatcccttt

SEQ ID NO: 899340 - DNA, 15 bp, Homo sapiens
ctgcacatccctttg

SEQ ID NO: 899341 - DNA, 15 bp, Homo sapiens
tgcacatccctttgg

SEQ ID NO: 899342 - DNA, 15 bp, Homo sapiens
gcacatccctttgga

SEQ ID NO: 899343 - DNA, 15 bp, Homo sapiens
cacatccctttggat

SEQ ID NO: 899344 - DNA, 15 bp, Homo sapiens
acatccctttggatt

SEQ ID NO: 899345 - DNA, 15 bp, Homo sapiens
catccctttggattc

SEQ ID NO: 899346 - DNA, 15 bp, Homo sapiens
atccctttggattcc

SEQ ID NO: 899347 - DNA, 15 bp, Homo sapiens
tccctttggattccc

SEQ ID NO: 899348 - DNA, 15 bp, Homo sapiens
ccctttggattccct

SEQ ID NO: 899349 - DNA, 15 bp, Homo sapiens
cctttggattccctc

SEQ ID NO: 899350 - DNA, 15 bp, Homo sapiens
ctttggattccctca

SEQ ID NO: 899351 - DNA, 15 bp, Homo sapiens
tttggattccctcaa

SEQ ID NO: 899352 - DNA, 15 bp, Homo sapiens
ttggattccctcaaa

SEQ ID NO: 899353 - DNA, 15 bp, Homo sapiens
tggattccctcaaag

SEQ ID NO: 899354 - DNA, 15 bp, Homo sapiens
ggattccctcaaagc

SEQ ID NO: 899355 - DNA, 15 bp, Homo sapiens
gattccctcaaagca

SEQ ID NO: 899356 - DNA, 15 bp, Homo sapiens
attccctcaaagcat

SEQ ID NO: 899357 - DNA, 15 bp, Homo sapiens
ttccctcaaagcatc

SEQ ID NO: 899358 - DNA, 15 bp, Homo sapiens
tccctcaaagcatct

SEQ ID NO: 899359 - DNA, 15 bp, Homo sapiens
ccctcaaagcatctc

SEQ ID NO: 899360 - DNA, 15 bp, Homo sapiens
cctcaaagcatctca

SEQ ID NO: 899361 - DNA, 15 bp, Homo sapiens
ctcaaagcatctcag

SEQ ID NO: 899362 - DNA, 15 bp, Homo sapiens
tcaaagcatctcagc

SEQ ID NO: 899363 - DNA, 15 bp, Homo sapiens
caaagcatctcagcc

SEQ ID NO: 899364 - DNA, 15 bp, Homo sapiens
aaagcatctcagcca

SEQ ID NO: 899365 - DNA, 15 bp, Homo sapiens
aagcatctcagccaa

SEQ ID NO: 899366 - DNA, 15 bp, Homo sapiens
agcatctcagccaag

SEQ ID NO: 899367 - DNA, 15 bp, Homo sapiens
gcatctcagccaaga

SEQ ID NO: 899368 - DNA, 15 bp, Homo sapiens
catctcagccaagag

SEQ ID NO: 899369 - DNA, 15 bp, Homo sapiens
atctcagccaagaga

SEQ ID NO: 899370 - DNA, 15 bp, Homo sapiens
tctcagccaagagaa

SEQ ID NO: 899371 - DNA, 15 bp, Homo sapiens
ctcagccaagagaaa

SEQ ID NO: 899372 - DNA, 15 bp, Homo sapiens
tcagccaagagaaac

SEQ ID NO: 899373 - DNA, 15 bp, Homo sapiens
cagccaagagaaacc

SEQ ID NO: 899374 - DNA, 15 bp, Homo sapiens
agccaagagaaacca

SEQ ID NO: 899375 - DNA, 15 bp, Homo sapiens
gccaagagaaaccaa

SEQ ID NO: 899376 - DNA, 15 bp, Homo sapiens
ccaagagaaaccaat

SEQ ID NO: 899377 - DNA, 15 bp, Homo sapiens
caagagaaaccaatt

SEQ ID NO: 899378 - DNA, 15 bp, Homo sapiens
aagagaaaccaattc

SEQ ID NO: 899379 - DNA, 15 bp, Homo sapiens
agagaaaccaattct

SEQ ID NO: 899380 - DNA, 15 bp, Homo sapiens
gagaaaccaattcta

SEQ ID NO: 899381 - DNA, 15 bp, Homo sapiens
agaaaccaattctaa

SEQ ID NO: 899382 - DNA, 15 bp, Homo sapiens
gaaaccaattctaac

SEQ ID NO: 899383 - DNA, 15 bp, Homo sapiens
aaaccaattctaacc

SEQ ID NO: 899384 - DNA, 15 bp, Homo sapiens
aaccaattctaacca

SEQ ID NO: 899385 - DNA, 15 bp, Homo sapiens
accaattctaaccac

SEQ ID NO: 899386 - DNA, 15 bp, Homo sapiens
ccaattctaaccact

SEQ ID NO: 899387 - DNA, 15 bp, Homo sapiens
caattctaaccactt

SEQ ID NO: 899388 - DNA, 15 bp, Homo sapiens
aattctaaccacttg

SEQ ID NO: 899389 - DNA, 15 bp, Homo sapiens
attctaaccacttgg

SEQ ID NO: 899390 - DNA, 15 bp, Homo sapiens
ttctaaccacttgga

SEQ ID NO: 899391 - DNA, 15 bp, Homo sapiens
tctaaccacttggag

SEQ ID NO: 899392 - DNA, 15 bp, Homo sapiens
ctaaccacttggagt

SEQ ID NO: 899393 - DNA, 15 bp, Homo sapiens
taaccacttggagtt

SEQ ID NO: 899394 - DNA, 15 bp, Homo sapiens
aaccacttggagttt

SEQ ID NO: 899395 - DNA, 15 bp, Homo sapiens
accacttggagtttt

SEQ ID NO: 899396 - DNA, 15 bp, Homo sapiens
ccacttggagtttta

SEQ ID NO: 899397 - DNA, 15 bp, Homo sapiens
cacttggagttttaa

SEQ ID NO: 899398 - DNA, 15 bp, Homo sapiens
acttggagttttaag

SEQ ID NO: 899399 - DNA, 15 bp, Homo sapiens
cttggagttttaaga

SEQ ID NO: 899400 - DNA, 15 bp, Homo sapiens
ttggagttttaagat

SEQ ID NO: 899401 - DNA, 15 bp, Homo sapiens
tggagttttaagatt

SEQ ID NO: 899402 - DNA, 15 bp, Homo sapiens
ggagttttaagattc

SEQ ID NO: 899403 - DNA, 15 bp, Homo sapiens
gagttttaagattca

SEQ ID NO: 899404 - DNA, 15 bp, Homo sapiens
agttttaagattcaa

SEQ ID NO: 899405 - DNA, 15 bp, Homo sapiens
gttttaagattcaag

SEQ ID NO: 899406 - DNA, 15 bp, Homo sapiens
ttttaagattcaagt

SEQ ID NO: 899407 - DNA, 15 bp, Homo sapiens
tttaagattcaagtt

SEQ ID NO: 899408 - DNA, 15 bp, Homo sapiens
ttaagattcaagttg

SEQ ID NO: 899409 - DNA, 15 bp, Homo sapiens
taagattcaagttgt

SEQ ID NO: 899410 - DNA, 15 bp, Homo sapiens
aagattcaagttgta

SEQ ID NO: 899411 - DNA, 15 bp, Homo sapiens
agattcaagttgtag

SEQ ID NO: 899412 - DNA, 15 bp, Homo sapiens
gattcaagttgtagg

SEQ ID NO: 899413 - DNA, 15 bp, Homo sapiens
attcaagttgtaggc

SEQ ID NO: 899414 - DNA, 15 bp, Homo sapiens
ttcaagttgtaggca

SEQ ID NO: 899415 - DNA, 15 bp, Homo sapiens
tcaagttgtaggcag

SEQ ID NO: 899416 - DNA, 15 bp, Homo sapiens
caagttgtaggcaga

SEQ ID NO: 899417 - DNA, 15 bp, Homo sapiens
aagttgtaggcagag

SEQ ID NO: 899418 - DNA, 15 bp, Homo sapiens
agttgtaggcagaga

SEQ ID NO: 899419 - DNA, 15 bp, Homo sapiens
gttgtaggcagagat

SEQ ID NO: 899420 - DNA, 15 bp, Homo sapiens
ttgtaggcagagatg

SEQ ID NO: 899421 - DNA, 15 bp, Homo sapiens
tgtaggcagagatgt

SEQ ID NO: 899422 - DNA, 15 bp, Homo sapiens
gtaggcagagatgtg

SEQ ID NO: 899423 - DNA, 15 bp, Homo sapiens
taggcagagatgtga

SEQ ID NO: 899424 - DNA, 15 bp, Homo sapiens
aggcagagatgtgat

SEQ ID NO: 899425 - DNA, 15 bp, Homo sapiens
ggcagagatgtgatt

SEQ ID NO: 899426 - DNA, 15 bp, Homo sapiens
gcagagatgtgattg

SEQ ID NO: 899427 - DNA, 15 bp, Homo sapiens
cagagatgtgattgg

SEQ ID NO: 899428 - DNA, 15 bp, Homo sapiens
agagatgtgattggc

SEQ ID NO: 899429 - DNA, 15 bp, Homo sapiens
gagatgtgattggct

SEQ ID NO: 899430 - DNA, 15 bp, Homo sapiens
agatgtgattggctg

SEQ ID NO: 899431 - DNA, 15 bp, Homo sapiens
gatgtgattggctga

SEQ ID NO: 899432 - DNA, 15 bp, Homo sapiens
atgtgattggctgag

SEQ ID NO: 899433 - DNA, 15 bp, Homo sapiens
tgtgattggctgagc

SEQ ID NO: 899434 - DNA, 15 bp, Homo sapiens
gtgattggctgagca

SEQ ID NO: 899435 - DNA, 15 bp, Homo sapiens
tgattggctgagcat

SEQ ID NO: 899436 - DNA, 15 bp, Homo sapiens
gattggctgagcatg

SEQ ID NO: 899437 - DNA, 15 bp, Homo sapiens
attggctgagcatgg

SEQ ID NO: 899438 - DNA, 15 bp, Homo sapiens
ttggctgagcatggt

SEQ ID NO: 899439 - DNA, 15 bp, Homo sapiens
tggctgagcatggtt

SEQ ID NO: 899440 - DNA, 15 bp, Homo sapiens
ggctgagcatggttc

SEQ ID NO: 899441 - DNA, 15 bp, Homo sapiens
gctgagcatggttca

SEQ ID NO: 899442 - DNA, 15 bp, Homo sapiens
ctgagcatggttcac

SEQ ID NO: 899443 - DNA, 15 bp, Homo sapiens
tgagcatggttcaca

SEQ ID NO: 899444 - DNA, 15 bp, Homo sapiens
gagcatggttcacat

SEQ ID NO: 899445 - DNA, 15 bp, Homo sapiens
agcatggttcacatg

SEQ ID NO: 899446 - DNA, 15 bp, Homo sapiens
gcatggttcacatgc

SEQ ID NO: 899447 - DNA, 15 bp, Homo sapiens
catggttcacatgct

SEQ ID NO: 899448 - DNA, 15 bp, Homo sapiens
atggttcacatgcta

SEQ ID NO: 899449 - DNA, 15 bp, Homo sapiens
tggttcacatgctac

SEQ ID NO: 899450 - DNA, 15 bp, Homo sapiens
ggttcacatgctacc

SEQ ID NO: 899451 - DNA, 15 bp, Homo sapiens
gttcacatgctacct

SEQ ID NO: 899452 - DNA, 15 bp, Homo sapiens
ttcacatgctacctc

SEQ ID NO: 899453 - DNA, 15 bp, Homo sapiens
tcacatgctacctcc

SEQ ID NO: 899454 - DNA, 15 bp, Homo sapiens
cacatgctacctcct

SEQ ID NO: 899455 - DNA, 15 bp, Homo sapiens
acatgctacctcctt

SEQ ID NO: 899456 - DNA, 15 bp, Homo sapiens
catgctacctccttt

SEQ ID NO: 899457 - DNA, 15 bp, Homo sapiens
atgctacctcctttc

SEQ ID NO: 899458 - DNA, 15 bp, Homo sapiens
tgctacctcctttcc

SEQ ID NO: 899459 - DNA, 15 bp, Homo sapiens
gctacctcctttcca

SEQ ID NO: 899460 - DNA, 15 bp, Homo sapiens
ctacctcctttccag

SEQ ID NO: 899461 - DNA, 15 bp, Homo sapiens
tacctcctttccaga

SEQ ID NO: 899462 - DNA, 15 bp, Homo sapiens
acctcctttccagag

SEQ ID NO: 899463 - DNA, 15 bp, Homo sapiens
cctcctttccagagg

SEQ ID NO: 899464 - DNA, 15 bp, Homo sapiens
ctcctttccagagga

SEQ ID NO: 899465 - DNA, 15 bp, Homo sapiens
tcctttccagaggag

SEQ ID NO: 899466 - DNA, 15 bp, Homo sapiens
cctttccagaggagg

SEQ ID NO: 899467 - DNA, 15 bp, Homo sapiens
ctttccagaggaggg

SEQ ID NO: 899468 - DNA, 15 bp, Homo sapiens
tttccagaggagggc

SEQ ID NO: 899469 - DNA, 15 bp, Homo sapiens
ttccagaggagggct

SEQ ID NO: 899470 - DNA, 15 bp, Homo sapiens
tccagaggagggctg

SEQ ID NO: 899471 - DNA, 15 bp, Homo sapiens
ccagaggagggctgg

SEQ ID NO: 899472 - DNA, 15 bp, Homo sapiens
cagaggagggctggc

SEQ ID NO: 899473 - DNA, 15 bp, Homo sapiens
agaggagggctggca

SEQ ID NO: 899474 - DNA, 15 bp, Homo sapiens
gaggagggctggcac

SEQ ID NO: 899475 - DNA, 15 bp, Homo sapiens
aggagggctggcacc

SEQ ID NO: 899476 - DNA, 15 bp, Homo sapiens
ggagggctggcaccg

SEQ ID NO: 899477 - DNA, 15 bp, Homo sapiens
gagggctggcaccga

SEQ ID NO: 899478 - DNA, 15 bp, Homo sapiens
agggctggcaccgaa

SEQ ID NO: 899479 - DNA, 15 bp, Homo sapiens
gggctggcaccgaat

SEQ ID NO: 899480 - DNA, 15 bp, Homo sapiens
ggctggcaccgaata

SEQ ID NO: 899481 - DNA, 15 bp, Homo sapiens
gctggcaccgaatac

SEQ ID NO: 899482 - DNA, 15 bp, Homo sapiens
ctggcaccgaatact

SEQ ID NO: 899483 - DNA, 15 bp, Homo sapiens
tggcaccgaatactg

SEQ ID NO: 899484 - DNA, 15 bp, Homo sapiens
ggcaccgaatactga

SEQ ID NO: 899485 - DNA, 15 bp, Homo sapiens
gcaccgaatactgac

SEQ ID NO: 899486 - DNA, 15 bp, Homo sapiens
caccgaatactgact

SEQ ID NO: 899487 - DNA, 15 bp, Homo sapiens
accgaatactgactt

SEQ ID NO: 899488 - DNA, 15 bp, Homo sapiens
ccgaatactgacttc

SEQ ID NO: 899489 - DNA, 15 bp, Homo sapiens
cgaatactgacttct

SEQ ID NO: 899490 - DNA, 15 bp, Homo sapiens
gaatactgacttctg

SEQ ID NO: 899491 - DNA, 15 bp, Homo sapiens
aatactgacttctgg

SEQ ID NO: 899492 - DNA, 15 bp, Homo sapiens
atactgacttctgga

SEQ ID NO: 899493 - DNA, 15 bp, Homo sapiens
tactgacttctggac

SEQ ID NO: 899494 - DNA, 15 bp, Homo sapiens
actgacttctggact

SEQ ID NO: 899495 - DNA, 15 bp, Homo sapiens
ctgacttctggactg

SEQ ID NO: 899496 - DNA, 15 bp, Homo sapiens
tgacttctggactga

SEQ ID NO: 899497 - DNA, 15 bp, Homo sapiens
gacttctggactgat

SEQ ID NO: 899498 - DNA, 15 bp, Homo sapiens
acttctggactgata

SEQ ID NO: 899499 - DNA, 15 bp, Homo sapiens
cttctggactgatac

SEQ ID NO: 899500 - DNA, 15 bp, Homo sapiens
ttctggactgataca

SEQ ID NO: 899501 - DNA, 15 bp, Homo sapiens
tctggactgatacac

SEQ ID NO: 899502 - DNA, 15 bp, Homo sapiens
ctggactgatacaca

SEQ ID NO: 899503 - DNA, 15 bp, Homo sapiens
tggactgatacacac

SEQ ID NO: 899504 - DNA, 15 bp, Homo sapiens
ggactgatacacacc

SEQ ID NO: 899505 - DNA, 15 bp, Homo sapiens
gactgatacacacct

SEQ ID NO: 899506 - DNA, 15 bp, Homo sapiens
actgatacacaccta

SEQ ID NO: 899507 - DNA, 15 bp, Homo sapiens
ctgatacacacctag

SEQ ID NO: 899508 - DNA, 15 bp, Homo sapiens
tgatacacacctagt

SEQ ID NO: 899509 - DNA, 15 bp, Homo sapiens
gatacacacctagta

SEQ ID NO: 899510 - DNA, 15 bp, Homo sapiens
atacacacctagtag

SEQ ID NO: 899511 - DNA, 15 bp, Homo sapiens
tacacacctagtagg

SEQ ID NO: 899512 - DNA, 15 bp, Homo sapiens
acacacctagtaggg

SEQ ID NO: 899513 - DNA, 15 bp, Homo sapiens
cacacctagtagggt

SEQ ID NO: 899514 - DNA, 15 bp, Homo sapiens
acacctagtagggta

SEQ ID NO: 899515 - DNA, 15 bp, Homo sapiens
cacctagtagggtag

SEQ ID NO: 899516 - DNA, 15 bp, Homo sapiens
acctagtagggtagg

SEQ ID NO: 899517 - DNA, 15 bp, Homo sapiens
cctagtagggtaggg

SEQ ID NO: 899518 - DNA, 15 bp, Homo sapiens
ctagtagggtagggg

SEQ ID NO: 899519 - DNA, 15 bp, Homo sapiens
tagtagggtaggggt

SEQ ID NO: 899520 - DNA, 15 bp, Homo sapiens
agtagggtaggggta

SEQ ID NO: 899521 - DNA, 15 bp, Homo sapiens
gtagggtaggggtaa

SEQ ID NO: 899522 - DNA, 15 bp, Homo sapiens
tagggtaggggtaaa

SEQ ID NO: 899523 - DNA, 15 bp, Homo sapiens
agggtaggggtaaat

SEQ ID NO: 899524 - DNA, 15 bp, Homo sapiens
gggtaggggtaaatc

SEQ ID NO: 899525 - DNA, 15 bp, Homo sapiens
ggtaggggtaaatca

SEQ ID NO: 899526 - DNA, 15 bp, Homo sapiens
gtaggggtaaatcac

SEQ ID NO: 899527 - DNA, 15 bp, Homo sapiens
taggggtaaatcacc

SEQ ID NO: 899528 - DNA, 15 bp, Homo sapiens
aggggtaaatcaccc

SEQ ID NO: 899529 - DNA, 15 bp, Homo sapiens
ggggtaaatcaccca

SEQ ID NO: 899530 - DNA, 15 bp, Homo sapiens
gggtaaatcacccaa

SEQ ID NO: 899531 - DNA, 15 bp, Homo sapiens
ggtaaatcacccaaa

SEQ ID NO: 899532 - DNA, 15 bp, Homo sapiens
gtaaatcacccaaag

SEQ ID NO: 899533 - DNA, 15 bp, Homo sapiens
taaatcacccaaagc

SEQ ID NO: 899534 - DNA, 15 bp, Homo sapiens
aaatcacccaaagca

SEQ ID NO: 899535 - DNA, 15 bp, Homo sapiens
aatcacccaaagcaa

SEQ ID NO: 899536 - DNA, 15 bp, Homo sapiens
atcacccaaagcaaa

SEQ ID NO: 899537 - DNA, 15 bp, Homo sapiens
tcacccaaagcaaaa

SEQ ID NO: 899538 - DNA, 15 bp, Homo sapiens
cacccaaagcaaaaa

SEQ ID NO: 899539 - DNA, 15 bp, Homo sapiens
acccaaagcaaaaat

SEQ ID NO: 899540 - DNA, 15 bp, Homo sapiens
cccaaagcaaaaatg

SEQ ID NO: 899541 - DNA, 15 bp, Homo sapiens
ccaaagcaaaaatga

SEQ ID NO: 899542 - DNA, 15 bp, Homo sapiens
caaagcaaaaatgag

SEQ ID NO: 899543 - DNA, 15 bp, Homo sapiens
aaagcaaaaatgagc

SEQ ID NO: 899544 - DNA, 15 bp, Homo sapiens
aagcaaaaatgagct

SEQ ID NO: 899545 - DNA, 15 bp, Homo sapiens
agcaaaaatgagctg

SEQ ID NO: 899546 - DNA, 15 bp, Homo sapiens
gcaaaaatgagctgc

SEQ ID NO: 899547 - DNA, 15 bp, Homo sapiens
caaaaatgagctgct

SEQ ID NO: 899548 - DNA, 15 bp, Homo sapiens
aaaaatgagctgctt

SEQ ID NO: 899549 - DNA, 15 bp, Homo sapiens
aaaatgagctgcttt

SEQ ID NO: 899550 - DNA, 15 bp, Homo sapiens
aaatgagctgcttta

SEQ ID NO: 899551 - DNA, 15 bp, Homo sapiens
aatgagctgctttat

SEQ ID NO: 899552 - DNA, 15 bp, Homo sapiens
atgagctgctttatg

SEQ ID NO: 899553 - DNA, 15 bp, Homo sapiens
tgagctgctttatgg

SEQ ID NO: 899554 - DNA, 15 bp, Homo sapiens
gagctgctttatggg

SEQ ID NO: 899555 - DNA, 15 bp, Homo sapiens
agctgctttatggga

SEQ ID NO: 899556 - DNA, 15 bp, Homo sapiens
gctgctttatgggaa

SEQ ID NO: 899557 - DNA, 15 bp, Homo sapiens
ctgctttatgggaag

SEQ ID NO: 899558 - DNA, 15 bp, Homo sapiens
tgctttatgggaaga

SEQ ID NO: 899559 - DNA, 15 bp, Homo sapiens
gctttatgggaagaa

SEQ ID NO: 899560 - DNA, 15 bp, Homo sapiens
ctttatgggaagaag

SEQ ID NO: 899561 - DNA, 15 bp, Homo sapiens
tttatgggaagaagg

SEQ ID NO: 899562 - DNA, 15 bp, Homo sapiens
ttatgggaagaagga

SEQ ID NO: 899563 - DNA, 15 bp, Homo sapiens
tatgggaagaaggag

SEQ ID NO: 899564 - DNA, 15 bp, Homo sapiens
atgggaagaaggagg

SEQ ID NO: 899565 - DNA, 15 bp, Homo sapiens
tgggaagaaggagga

SEQ ID NO: 899566 - DNA, 15 bp, Homo sapiens
gggaagaaggaggaa

SEQ ID NO: 899567 - DNA, 15 bp, Homo sapiens
ggaagaaggaggaag

SEQ ID NO: 899568 - DNA, 15 bp, Homo sapiens
gaagaaggaggaaga

SEQ ID NO: 899569 - DNA, 15 bp, Homo sapiens
aagaaggaggaagag

SEQ ID NO: 899570 - DNA, 15 bp, Homo sapiens
agaaggaggaagagg

SEQ ID NO: 899571 - DNA, 15 bp, Homo sapiens
gaaggaggaagaggt

SEQ ID NO: 899572 - DNA, 15 bp, Homo sapiens
aaggaggaagaggtg

SEQ ID NO: 899573 - DNA, 15 bp, Homo sapiens
aggaggaagaggtgc

SEQ ID NO: 899574 - DNA, 15 bp, Homo sapiens
ggaggaagaggtgca

SEQ ID NO: 899575 - DNA, 15 bp, Homo sapiens
gaggaagaggtgcag

SEQ ID NO: 899576 - DNA, 15 bp, Homo sapiens
aggaagaggtgcaga

SEQ ID NO: 899577 - DNA, 15 bp, Homo sapiens
ggaagaggtgcagag

SEQ ID NO: 899578 - DNA, 15 bp, Homo sapiens
gaagaggtgcagagc

SEQ ID NO: 899579 - DNA, 15 bp, Homo sapiens
aagaggtgcagagca

SEQ ID NO: 899580 - DNA, 15 bp, Homo sapiens
agaggtgcagagcag

SEQ ID NO: 899581 - DNA, 15 bp, Homo sapiens
gaggtgcagagcagg

SEQ ID NO: 899582 - DNA, 15 bp, Homo sapiens
aggtgcagagcaggc

SEQ ID NO: 899583 - DNA, 15 bp, Homo sapiens
ggtgcagagcaggca

SEQ ID NO: 899584 - DNA, 15 bp, Homo sapiens
gtgcagagcaggcaa

SEQ ID NO: 899585 - DNA, 15 bp, Homo sapiens
tgcagagcaggcaaa

SEQ ID NO: 899586 - DNA, 15 bp, Homo sapiens
gcagagcaggcaaaa

SEQ ID NO: 899587 - DNA, 15 bp, Homo sapiens
cagagcaggcaaaat

SEQ ID NO: 899588 - DNA, 15 bp, Homo sapiens
agagcaggcaaaatc

SEQ ID NO: 899589 - DNA, 15 bp, Homo sapiens
gagcaggcaaaatca

SEQ ID NO: 899590 - DNA, 15 bp, Homo sapiens
agcaggcaaaatcac

SEQ ID NO: 899591 - DNA, 15 bp, Homo sapiens
gcaggcaaaatcaca

SEQ ID NO: 899592 - DNA, 15 bp, Homo sapiens
caggcaaaatcacag

SEQ ID NO: 899593 - DNA, 15 bp, Homo sapiens
aggcaaaatcacaga

SEQ ID NO: 899594 - DNA, 15 bp, Homo sapiens
ggcaaaatcacagat

SEQ ID NO: 899595 - DNA, 15 bp, Homo sapiens
gcaaaatcacagatg

SEQ ID NO: 899596 - DNA, 15 bp, Homo sapiens
caaaatcacagatgt

SEQ ID NO: 899597 - DNA, 15 bp, Homo sapiens
aaaatcacagatgtg

SEQ ID NO: 899598 - DNA, 15 bp, Homo sapiens
aaatcacagatgtgt

SEQ ID NO: 899599 - DNA, 15 bp, Homo sapiens
aatcacagatgtgta

SEQ ID NO: 899600 - DNA, 15 bp, Homo sapiens
atcacagatgtgtaa

SEQ ID NO: 899601 - DNA, 15 bp, Homo sapiens
tcacagatgtgtaac

SEQ ID NO: 899602 - DNA, 15 bp, Homo sapiens
cacagatgtgtaaca

SEQ ID NO: 899603 - DNA, 15 bp, Homo sapiens
acagatgtgtaacat

SEQ ID NO: 899604 - DNA, 15 bp, Homo sapiens
cagatgtgtaacatg

SEQ ID NO: 899605 - DNA, 15 bp, Homo sapiens
agatgtgtaacatgt

SEQ ID NO: 899606 - DNA, 15 bp, Homo sapiens
gatgtgtaacatgtg

SEQ ID NO: 899607 - DNA, 15 bp, Homo sapiens
atgtgtaacatgtgg

SEQ ID NO: 899608 - DNA, 15 bp, Homo sapiens
tgtgtaacatgtggc

SEQ ID NO: 899609 - DNA, 15 bp, Homo sapiens
gtgtaacatgtggct

SEQ ID NO: 899610 - DNA, 15 bp, Homo sapiens
tgtaacatgtggctc

SEQ ID NO: 899611 - DNA, 15 bp, Homo sapiens
gtaacatgtggctca

SEQ ID NO: 899612 - DNA, 15 bp, Homo sapiens
taacatgtggctcat

SEQ ID NO: 899613 - DNA, 15 bp, Homo sapiens
aacatgtggctcatg

SEQ ID NO: 899614 - DNA, 15 bp, Homo sapiens
acatgtggctcatgc

SEQ ID NO: 899615 - DNA, 15 bp, Homo sapiens
catgtggctcatgcc

SEQ ID NO: 899616 - DNA, 15 bp, Homo sapiens
atgtggctcatgcca

SEQ ID NO: 899617 - DNA, 15 bp, Homo sapiens
tgtggctcatgccac

SEQ ID NO: 899618 - DNA, 15 bp, Homo sapiens
gtggctcatgccacc

SEQ ID NO: 899619 - DNA, 15 bp, Homo sapiens
tggctcatgccacca

SEQ ID NO: 899620 - DNA, 15 bp, Homo sapiens
ggctcatgccaccag

SEQ ID NO: 899621 - DNA, 15 bp, Homo sapiens
gctcatgccaccagc

SEQ ID NO: 899622 - DNA, 15 bp, Homo sapiens
ctcatgccaccagct

SEQ ID NO: 899623 - DNA, 15 bp, Homo sapiens
tcatgccaccagctg

SEQ ID NO: 899624 - DNA, 15 bp, Homo sapiens
catgccaccagctgg

SEQ ID NO: 899625 - DNA, 15 bp, Homo sapiens
atgccaccagctggg

SEQ ID NO: 899626 - DNA, 15 bp, Homo sapiens
tgccaccagctgggt

SEQ ID NO: 899627 - DNA, 15 bp, Homo sapiens
gccaccagctgggtt

SEQ ID NO: 899628 - DNA, 15 bp, Homo sapiens
ccaccagctgggttg

SEQ ID NO: 899629 - DNA, 15 bp, Homo sapiens
caccagctgggttga

SEQ ID NO: 899630 - DNA, 15 bp, Homo sapiens
accagctgggttgag

SEQ ID NO: 899631 - DNA, 15 bp, Homo sapiens
ccagctgggttgaga

SEQ ID NO: 899632 - DNA, 15 bp, Homo sapiens
cagctgggttgagac

SEQ ID NO: 899633 - DNA, 15 bp, Homo sapiens
agctgggttgagaca

SEQ ID NO: 899634 - DNA, 15 bp, Homo sapiens
gctgggttgagacag

SEQ ID NO: 899635 - DNA, 15 bp, Homo sapiens
ctgggttgagacagc

SEQ ID NO: 899636 - DNA, 15 bp, Homo sapiens
tgggttgagacagct

SEQ ID NO: 899637 - DNA, 15 bp, Homo sapiens
gggttgagacagctc

SEQ ID NO: 899638 - DNA, 15 bp, Homo sapiens
ggttgagacagctcc

SEQ ID NO: 899639 - DNA, 15 bp, Homo sapiens
gttgagacagctcct

SEQ ID NO: 899640 - DNA, 15 bp, Homo sapiens
ttgagacagctcctt

SEQ ID NO: 899641 - DNA, 15 bp, Homo sapiens
tgagacagctccttt

SEQ ID NO: 899642 - DNA, 15 bp, Homo sapiens
gagacagctcctttc

SEQ ID NO: 899643 - DNA, 15 bp, Homo sapiens
agacagctcctttca

SEQ ID NO: 899644 - DNA, 15 bp, Homo sapiens
gacagctcctttcag

SEQ ID NO: 899645 - DNA, 15 bp, Homo sapiens
acagctcctttcaga

SEQ ID NO: 899646 - DNA, 15 bp, Homo sapiens
cagctcctttcagag

SEQ ID NO: 899647 - DNA, 15 bp, Homo sapiens
agctcctttcagaga

SEQ ID NO: 899648 - DNA, 15 bp, Homo sapiens
gctcctttcagagaa

SEQ ID NO: 899649 - DNA, 15 bp, Homo sapiens
ctcctttcagagaag

SEQ ID NO: 899650 - DNA, 15 bp, Homo sapiens
tcctttcagagaaga

SEQ ID NO: 899651 - DNA, 15 bp, Homo sapiens
cctttcagagaagaa

SEQ ID NO: 899652 - DNA, 15 bp, Homo sapiens
ctttcagagaagaag

SEQ ID NO: 899653 - DNA, 15 bp, Homo sapiens
tttcagagaagaagg

SEQ ID NO: 899654 - DNA, 15 bp, Homo sapiens
ttcagagaagaaggg

SEQ ID NO: 899655 - DNA, 15 bp, Homo sapiens
tcagagaagaagggg

SEQ ID NO: 899656 - DNA, 15 bp, Homo sapiens
cagagaagaaggggt

SEQ ID NO: 899657 - DNA, 15 bp, Homo sapiens
agagaagaaggggtg

SEQ ID NO: 899658 - DNA, 15 bp, Homo sapiens
gagaagaaggggtgg

SEQ ID NO: 899659 - DNA, 15 bp, Homo sapiens
agaagaaggggtgga

SEQ ID NO: 899660 - DNA, 15 bp, Homo sapiens
gaagaaggggtggaa

SEQ ID NO: 899661 - DNA, 15 bp, Homo sapiens
aagaaggggtggaaa

SEQ ID NO: 899662 - DNA, 15 bp, Homo sapiens
agaaggggtggaaat

SEQ ID NO: 899663 - DNA, 15 bp, Homo sapiens
gaaggggtggaaata

SEQ ID NO: 899664 - DNA, 15 bp, Homo sapiens
aaggggtggaaatat

SEQ ID NO: 899665 - DNA, 15 bp, Homo sapiens
aggggtggaaatata

SEQ ID NO: 899666 - DNA, 15 bp, Homo sapiens
ggggtggaaatatat

SEQ ID NO: 899667 - DNA, 15 bp, Homo sapiens
gggtggaaatatata

SEQ ID NO: 899668 - DNA, 15 bp, Homo sapiens
ggtggaaatatatac

SEQ ID NO: 899669 - DNA, 15 bp, Homo sapiens
gtggaaatatatact

SEQ ID NO: 899670 - DNA, 15 bp, Homo sapiens
tggaaatatatactt

SEQ ID NO: 899671 - DNA, 15 bp, Homo sapiens
ggaaatatatacttg

SEQ ID NO: 899672 - DNA, 15 bp, Homo sapiens
gaaatatatacttgg

SEQ ID NO: 899673 - DNA, 15 bp, Homo sapiens
aaatatatacttggc

SEQ ID NO: 899674 - DNA, 15 bp, Homo sapiens
aatatatacttggcc

SEQ ID NO: 899675 - DNA, 15 bp, Homo sapiens
atatatacttggcca

SEQ ID NO: 899676 - DNA, 15 bp, Homo sapiens
tatatacttggccat

SEQ ID NO: 899677 - DNA, 15 bp, Homo sapiens
atatacttggccatt

SEQ ID NO: 899678 - DNA, 15 bp, Homo sapiens
tatacttggccattt

SEQ ID NO: 899679 - DNA, 15 bp, Homo sapiens
atacttggccatttg

SEQ ID NO: 899680 - DNA, 15 bp, Homo sapiens
tacttggccatttgt

SEQ ID NO: 899681 - DNA, 15 bp, Homo sapiens
acttggccatttgtt

SEQ ID NO: 899682 - DNA, 15 bp, Homo sapiens
cttggccatttgttc

SEQ ID NO: 899683 - DNA, 15 bp, Homo sapiens
ttggccatttgttct

SEQ ID NO: 899684 - DNA, 15 bp, Homo sapiens
tggccatttgttctt

SEQ ID NO: 899685 - DNA, 15 bp, Homo sapiens
ggccatttgttcttc

SEQ ID NO: 899686 - DNA, 15 bp, Homo sapiens
gccatttgttcttca

SEQ ID NO: 899687 - DNA, 15 bp, Homo sapiens
ccatttgttcttcat

SEQ ID NO: 899688 - DNA, 15 bp, Homo sapiens
catttgttcttcatg

SEQ ID NO: 899689 - DNA, 15 bp, Homo sapiens
atttgttcttcatga

SEQ ID NO: 899690 - DNA, 15 bp, Homo sapiens
tttgttcttcatgaa

SEQ ID NO: 899691 - DNA, 15 bp, Homo sapiens
ttgttcttcatgaaa

SEQ ID NO: 899692 - DNA, 15 bp, Homo sapiens
tgttcttcatgaaag

SEQ ID NO: 899693 - DNA, 15 bp, Homo sapiens
gttcttcatgaaaga

SEQ ID NO: 899694 - DNA, 15 bp, Homo sapiens
ttcttcatgaaagat

SEQ ID NO: 899695 - DNA, 15 bp, Homo sapiens
tcttcatgaaagata

SEQ ID NO: 899696 - DNA, 15 bp, Homo sapiens
cttcatgaaagatag

SEQ ID NO: 899697 - DNA, 15 bp, Homo sapiens
ttcatgaaagatagc

SEQ ID NO: 899698 - DNA, 15 bp, Homo sapiens
tcatgaaagatagca

SEQ ID NO: 899699 - DNA, 15 bp, Homo sapiens
catgaaagatagcaa

SEQ ID NO: 899700 - DNA, 15 bp, Homo sapiens
atgaaagatagcaac

SEQ ID NO: 899701 - DNA, 15 bp, Homo sapiens
tgaaagatagcaact

SEQ ID NO: 899702 - DNA, 15 bp, Homo sapiens
gaaagatagcaacta

SEQ ID NO: 899703 - DNA, 15 bp, Homo sapiens
aaagatagcaactaa

SEQ ID NO: 899704 - DNA, 15 bp, Homo sapiens
aagatagcaactaac

SEQ ID NO: 899705 - DNA, 15 bp, Homo sapiens
agatagcaactaaca

SEQ ID NO: 899706 - DNA, 15 bp, Homo sapiens
gatagcaactaacac

SEQ ID NO: 899707 - DNA, 15 bp, Homo sapiens
atagcaactaacact

SEQ ID NO: 899708 - DNA, 15 bp, Homo sapiens
tagcaactaacactc

SEQ ID NO: 899709 - DNA, 15 bp, Homo sapiens
agcaactaacactca

SEQ ID NO: 899710 - DNA, 15 bp, Homo sapiens
gcaactaacactcat

SEQ ID NO: 899711 - DNA, 15 bp, Homo sapiens
caactaacactcata

SEQ ID NO: 899712 - DNA, 15 bp, Homo sapiens
aactaacactcatag

SEQ ID NO: 899713 - DNA, 15 bp, Homo sapiens
actaacactcatagg

SEQ ID NO: 899714 - DNA, 15 bp, Homo sapiens
ctaacactcataggg

SEQ ID NO: 899715 - DNA, 15 bp, Homo sapiens
taacactcatagggc

SEQ ID NO: 899716 - DNA, 15 bp, Homo sapiens
aacactcatagggca

SEQ ID NO: 899717 - DNA, 15 bp, Homo sapiens
acactcatagggcac

SEQ ID NO: 899718 - DNA, 15 bp, Homo sapiens
cactcatagggcact

SEQ ID NO: 899719 - DNA, 15 bp, Homo sapiens
actcatagggcactt

SEQ ID NO: 899720 - DNA, 15 bp, Homo sapiens
ctcatagggcactta

SEQ ID NO: 899721 - DNA, 15 bp, Homo sapiens
tcatagggcacttac

SEQ ID NO: 899722 - DNA, 15 bp, Homo sapiens
catagggcacttaca

SEQ ID NO: 899723 - DNA, 15 bp, Homo sapiens
atagggcacttacac

SEQ ID NO: 899724 - DNA, 15 bp, Homo sapiens
tagggcacttacacc

SEQ ID NO: 899725 - DNA, 15 bp, Homo sapiens
agggcacttacacca

SEQ ID NO: 899726 - DNA, 15 bp, Homo sapiens
gggcacttacaccat

SEQ ID NO: 899727 - DNA, 15 bp, Homo sapiens
ggcacttacaccata

SEQ ID NO: 899728 - DNA, 15 bp, Homo sapiens
gcacttacaccatag

SEQ ID NO: 899729 - DNA, 15 bp, Homo sapiens
cacttacaccatagt

SEQ ID NO: 899730 - DNA, 15 bp, Homo sapiens
acttacaccatagta

SEQ ID NO: 899731 - DNA, 15 bp, Homo sapiens
cttacaccatagtat

SEQ ID NO: 899732 - DNA, 15 bp, Homo sapiens
ttacaccatagtata

SEQ ID NO: 899733 - DNA, 15 bp, Homo sapiens
tacaccatagtataa

SEQ ID NO: 899734 - DNA, 15 bp, Homo sapiens
acaccatagtataac

SEQ ID NO: 899735 - DNA, 15 bp, Homo sapiens
caccatagtataaca

SEQ ID NO: 899736 - DNA, 15 bp, Homo sapiens
accatagtataacag

SEQ ID NO: 899737 - DNA, 15 bp, Homo sapiens
ccatagtataacagc

SEQ ID NO: 899738 - DNA, 15 bp, Homo sapiens
catagtataacagca

SEQ ID NO: 899739 - DNA, 15 bp, Homo sapiens
atagtataacagcat

SEQ ID NO: 899740 - DNA, 15 bp, Homo sapiens
tagtataacagcatt

SEQ ID NO: 899741 - DNA, 15 bp, Homo sapiens
agtataacagcattt

SEQ ID NO: 899742 - DNA, 15 bp, Homo sapiens
gtataacagcatttg

SEQ ID NO: 899743 - DNA, 15 bp, Homo sapiens
tataacagcatttgc

SEQ ID NO: 899744 - DNA, 15 bp, Homo sapiens
ataacagcatttgct

SEQ ID NO: 899745 - DNA, 15 bp, Homo sapiens
taacagcatttgctg

SEQ ID NO: 899746 - DNA, 15 bp, Homo sapiens
aacagcatttgctgc

SEQ ID NO: 899747 - DNA, 15 bp, Homo sapiens
acagcatttgctgca

SEQ ID NO: 899748 - DNA, 15 bp, Homo sapiens
cagcatttgctgcaa

SEQ ID NO: 899749 - DNA, 15 bp, Homo sapiens
agcatttgctgcaac

SEQ ID NO: 899750 - DNA, 15 bp, Homo sapiens
gcatttgctgcaacc

SEQ ID NO: 899751 - DNA, 15 bp, Homo sapiens
catttgctgcaaccc

SEQ ID NO: 899752 - DNA, 15 bp, Homo sapiens
atttgctgcaacccc

SEQ ID NO: 899753 - DNA, 15 bp, Homo sapiens
tttgctgcaaccccc

SEQ ID NO: 899754 - DNA, 15 bp, Homo sapiens
ttgctgcaaccccct

SEQ ID NO: 899755 - DNA, 15 bp, Homo sapiens
tgctgcaaccccctg

SEQ ID NO: 899756 - DNA, 15 bp, Homo sapiens
gctgcaaccccctga

SEQ ID NO: 899757 - DNA, 15 bp, Homo sapiens
ctgcaaccccctgag

SEQ ID NO: 899758 - DNA, 15 bp, Homo sapiens
tgcaaccccctgagg

SEQ ID NO: 899759 - DNA, 15 bp, Homo sapiens
gcaaccccctgaggc

SEQ ID NO: 899760 - DNA, 15 bp, Homo sapiens
caaccccctgaggca

SEQ ID NO: 899761 - DNA, 15 bp, Homo sapiens
aaccccctgaggcag

SEQ ID NO: 899762 - DNA, 15 bp, Homo sapiens
accccctgaggcagg

SEQ ID NO: 899763 - DNA, 15 bp, Homo sapiens
ccccctgaggcaggt

SEQ ID NO: 899764 - DNA, 15 bp, Homo sapiens
cccctgaggcaggta

SEQ ID NO: 899765 - DNA, 15 bp, Homo sapiens
ccctgaggcaggtac

SEQ ID NO: 899766 - DNA, 15 bp, Homo sapiens
cctgaggcaggtacc

SEQ ID NO: 899767 - DNA, 15 bp, Homo sapiens
ctgaggcaggtacca

SEQ ID NO: 899768 - DNA, 15 bp, Homo sapiens
tgaggcaggtaccac

SEQ ID NO: 899769 - DNA, 15 bp, Homo sapiens
gaggcaggtaccact

SEQ ID NO: 899770 - DNA, 15 bp, Homo sapiens
aggcaggtaccacta

SEQ ID NO: 899771 - DNA, 15 bp, Homo sapiens
ggcaggtaccactaa

SEQ ID NO: 899772 - DNA, 15 bp, Homo sapiens
gcaggtaccactaat

SEQ ID NO: 899773 - DNA, 15 bp, Homo sapiens
caggtaccactaatg

SEQ ID NO: 899774 - DNA, 15 bp, Homo sapiens
aggtaccactaatgc

SEQ ID NO: 899775 - DNA, 15 bp, Homo sapiens
ggtaccactaatgcc

SEQ ID NO: 899776 - DNA, 15 bp, Homo sapiens
gtaccactaatgccc

SEQ ID NO: 899777 - DNA, 15 bp, Homo sapiens
taccactaatgcccc

SEQ ID NO: 899778 - DNA, 15 bp, Homo sapiens
accactaatgcccca

SEQ ID NO: 899779 - DNA, 15 bp, Homo sapiens
ccactaatgccccaa

SEQ ID NO: 899780 - DNA, 15 bp, Homo sapiens
cactaatgccccaat

SEQ ID NO: 899781 - DNA, 15 bp, Homo sapiens
actaatgccccaatt

SEQ ID NO: 899782 - DNA, 15 bp, Homo sapiens
ctaatgccccaattt

SEQ ID NO: 899783 - DNA, 15 bp, Homo sapiens
taatgccccaatttt

SEQ ID NO: 899784 - DNA, 15 bp, Homo sapiens
aatgccccaatttta

SEQ ID NO: 899785 - DNA, 15 bp, Homo sapiens
atgccccaattttac

SEQ ID NO: 899786 - DNA, 15 bp, Homo sapiens
tgccccaattttaca

SEQ ID NO: 899787 - DNA, 15 bp, Homo sapiens
gccccaattttacag

SEQ ID NO: 899788 - DNA, 15 bp, Homo sapiens
ccccaattttacaga

SEQ ID NO: 899789 - DNA, 15 bp, Homo sapiens
cccaattttacagag

SEQ ID NO: 899790 - DNA, 15 bp, Homo sapiens
ccaattttacagagg

SEQ ID NO: 899791 - DNA, 15 bp, Homo sapiens
caattttacagagga

SEQ ID NO: 899792 - DNA, 15 bp, Homo sapiens
aattttacagaggaa

SEQ ID NO: 899793 - DNA, 15 bp, Homo sapiens
attttacagaggaaa

SEQ ID NO: 899794 - DNA, 15 bp, Homo sapiens
ttttacagaggaaat

SEQ ID NO: 899795 - DNA, 15 bp, Homo sapiens
tttacagaggaaatt

SEQ ID NO: 899796 - DNA, 15 bp, Homo sapiens
ttacagaggaaattg

SEQ ID NO: 899797 - DNA, 15 bp, Homo sapiens
tacagaggaaattgg

SEQ ID NO: 899798 - DNA, 15 bp, Homo sapiens
acagaggaaattggg

SEQ ID NO: 899799 - DNA, 15 bp, Homo sapiens
cagaggaaattgggg

SEQ ID NO: 899800 - DNA, 15 bp, Homo sapiens
agaggaaattggggt

SEQ ID NO: 899801 - DNA, 15 bp, Homo sapiens
gaggaaattggggta

SEQ ID NO: 899802 - DNA, 15 bp, Homo sapiens
aggaaattggggtac

SEQ ID NO: 899803 - DNA, 15 bp, Homo sapiens
ggaaattggggtaca

SEQ ID NO: 899804 - DNA, 15 bp, Homo sapiens
gaaattggggtacag

SEQ ID NO: 899805 - DNA, 15 bp, Homo sapiens
aaattggggtacaga

SEQ ID NO: 899806 - DNA, 15 bp, Homo sapiens
aattggggtacagaa

SEQ ID NO: 899807 - DNA, 15 bp, Homo sapiens
attggggtacagaag

SEQ ID NO: 899808 - DNA, 15 bp, Homo sapiens
ttggggtacagaaga

SEQ ID NO: 899809 - DNA, 15 bp, Homo sapiens
tggggtacagaagag

SEQ ID NO: 899810 - DNA, 15 bp, Homo sapiens
ggggtacagaagagt

SEQ ID NO: 899811 - DNA, 15 bp, Homo sapiens
gggtacagaagagtg

SEQ ID NO: 899812 - DNA, 15 bp, Homo sapiens
ggtacagaagagtgg

SEQ ID NO: 899813 - DNA, 15 bp, Homo sapiens
gtacagaagagtggt

SEQ ID NO: 899814 - DNA, 15 bp, Homo sapiens
tacagaagagtggtc

SEQ ID NO: 899815 - DNA, 15 bp, Homo sapiens
acagaagagtggtcc

SEQ ID NO: 899816 - DNA, 15 bp, Homo sapiens
cagaagagtggtccc

SEQ ID NO: 899817 - DNA, 15 bp, Homo sapiens
agaagagtggtcccc

SEQ ID NO: 899818 - DNA, 15 bp, Homo sapiens
gaagagtggtcccct

SEQ ID NO: 899819 - DNA, 15 bp, Homo sapiens
aagagtggtcccctg

SEQ ID NO: 899820 - DNA, 15 bp, Homo sapiens
agagtggtcccctgt

SEQ ID NO: 899821 - DNA, 15 bp, Homo sapiens
gagtggtcccctgtg

SEQ ID NO: 899822 - DNA, 15 bp, Homo sapiens
agtggtcccctgtgc

SEQ ID NO: 899823 - DNA, 15 bp, Homo sapiens
gtggtcccctgtgcc

SEQ ID NO: 899824 - DNA, 15 bp, Homo sapiens
tggtcccctgtgccc

SEQ ID NO: 899825 - DNA, 15 bp, Homo sapiens
ggtcccctgtgccca

SEQ ID NO: 899826 - DNA, 15 bp, Homo sapiens
gtcccctgtgcccat

SEQ ID NO: 899827 - DNA, 15 bp, Homo sapiens
tcccctgtgcccatg

SEQ ID NO: 899828 - DNA, 15 bp, Homo sapiens
cccctgtgcccatgg

SEQ ID NO: 899829 - DNA, 15 bp, Homo sapiens
ccctgtgcccatggt

SEQ ID NO: 899830 - DNA, 15 bp, Homo sapiens
cctgtgcccatggtc

SEQ ID NO: 899831 - DNA, 15 bp, Homo sapiens
ctgtgcccatggtca

SEQ ID NO: 899832 - DNA, 15 bp, Homo sapiens
tgtgcccatggtcac

SEQ ID NO: 899833 - DNA, 15 bp, Homo sapiens
gtgcccatggtcaca

SEQ ID NO: 899834 - DNA, 15 bp, Homo sapiens
tgcccatggtcacaa

SEQ ID NO: 899835 - DNA, 15 bp, Homo sapiens
gcccatggtcacaag

SEQ ID NO: 899836 - DNA, 15 bp, Homo sapiens
cccatggtcacaagg

SEQ ID NO: 899837 - DNA, 15 bp, Homo sapiens
ccatggtcacaaggg

SEQ ID NO: 899838 - DNA, 15 bp, Homo sapiens
catggtcacaagggc

SEQ ID NO: 899839 - DNA, 15 bp, Homo sapiens
atggtcacaagggcc

SEQ ID NO: 899840 - DNA, 15 bp, Homo sapiens
tggtcacaagggcca

SEQ ID NO: 899841 - DNA, 15 bp, Homo sapiens
ggtcacaagggccat

SEQ ID NO: 899842 - DNA, 15 bp, Homo sapiens
gtcacaagggccata

SEQ ID NO: 899843 - DNA, 15 bp, Homo sapiens
tcacaagggccataa

SEQ ID NO: 899844 - DNA, 15 bp, Homo sapiens
cacaagggccataat

SEQ ID NO: 899845 - DNA, 15 bp, Homo sapiens
acaagggccataata

SEQ ID NO: 899846 - DNA, 15 bp, Homo sapiens
caagggccataatag

SEQ ID NO: 899847 - DNA, 15 bp, Homo sapiens
aagggccataataga

SEQ ID NO: 899848 - DNA, 15 bp, Homo sapiens
agggccataatagac

SEQ ID NO: 899849 - DNA, 15 bp, Homo sapiens
gggccataatagaca

SEQ ID NO: 899850 - DNA, 15 bp, Homo sapiens
ggccataatagacag

SEQ ID NO: 899851 - DNA, 15 bp, Homo sapiens
gccataatagacaga

SEQ ID NO: 899852 - DNA, 15 bp, Homo sapiens
ccataatagacagag

SEQ ID NO: 899853 - DNA, 15 bp, Homo sapiens
cataatagacagagg

SEQ ID NO: 899854 - DNA, 15 bp, Homo sapiens
ataatagacagaggc

SEQ ID NO: 899855 - DNA, 15 bp, Homo sapiens
taatagacagaggca

SEQ ID NO: 899856 - DNA, 15 bp, Homo sapiens
aatagacagaggcag

SEQ ID NO: 899857 - DNA, 15 bp, Homo sapiens
atagacagaggcagg

SEQ ID NO: 899858 - DNA, 15 bp, Homo sapiens
tagacagaggcaggg

SEQ ID NO: 899859 - DNA, 15 bp, Homo sapiens
agacagaggcagggt

SEQ ID NO: 899860 - DNA, 15 bp, Homo sapiens
gacagaggcagggtt

SEQ ID NO: 899861 - DNA, 15 bp, Homo sapiens
acagaggcagggttt

SEQ ID NO: 899862 - DNA, 15 bp, Homo sapiens
cagaggcagggtttc

SEQ ID NO: 899863 - DNA, 15 bp, Homo sapiens
agaggcagggtttca

SEQ ID NO: 899864 - DNA, 15 bp, Homo sapiens
gaggcagggtttcag

SEQ ID NO: 899865 - DNA, 117204 bp, Homo sapiens
aaatactttaatttccgtaacttttcaagtgcacatttgtttcttaaacattctttgggtgccctcaggtggtgaatttgtgaatcttacataaatagacatttattagtgactcttaacagtttatacttttttaaatttattttgaaataataataagacttataggaagtttcaaaactagtaaagagagatcttgcgtactctttatccagctttctccaatggtaaccacgtaaatatggtagaatatctagaacttaagtacttcttacatattttcttaaaatacgaatgttcttaatatacaaaggcaccataaattcaaaaagttacatctcataataaatctgaaaaataaagtttaaaaagacaataaactttaaatagtccttagaaatcttgttcattaaaaaaagtgaccgaagaactgtattcatgtatatatttctaaacagattttatattattgaatgaaaaatgtttatgtttcaaaaatgttaaatttaaaaattttacacagtaggaagttatactttgcatactaggaagttaagaattaactgtacgaatttaagagtcttcaaatatttggattaaagtcagggttaatttttttttttcttaaaaatatataccattataatcactgtgcaggatttgtaaaaaaggaaaaagaaaaaaagtcagttcatagttttacttactgcttctgtatgtattgggtgcactgcaaaaagtaaagaagcaatcacactactcttgttgtccagaaaaagtttgcatactttgagaaatatcacactaaccacagcatgaaaaatcatattcaggagatgatatgacattggttttagttcacttaacaaataatttaagcgaaatgtcaatactgttaagggacggtaagacttgtggcttctctcctacaaggaaaaaacgatcagtgattattaaagtaccttggtccaacagggtacaaaagctcatcactgcatttaccattaaagatattaatatctacattttactgagaaataacaataaaatatgaaatgtcgtaagagtaacacaaaaataaaatacagttttataatctgtgtttttctatttccttaggccacaaacaaggttaatttcctcctggatatacagtggtcagagaactaacagtaaaaggacatttgacaattaattcctcttcaatataacaattttaaaaaaagacaatgccggcattggtcaagttagagcacaggattctctccaaagcctgcctccatatctatcagcaatacaaaagttcatgtaactactggctagatcttcaaaaggaaatgtaagaacagaatgcttaccagttcaattaaaatagtgatgactcaaaaaggtactgtctagctgttttatgaaaaacatctccataatgtgtaaatctgaatatattaaactaggaattcccaaattacagagagtaatacaagagtaaaaactttcttagaatatgcaaatagacaccattcttgtggtattctcctttggtaataaataaaatttcatgtaaagtactgaatctctttttaaattataagttacatttaatcagaaatacttctttccctaacacaaaaccaaaccagatttaagaataaaacacacagttcgaatatatataaaatattaataaagttattttttgtagttttatacaaagggcattgacatagtttggatgtttgtcccctccaaatctcatgctgaaatatgaggaggttgaaatgttgaaggttgggcctggtgggagatgtttgggtcattggggttgggtcctttatgaatggtttggtgtcttccccactgtaatgagttcatgtgaaagctggttgcttaaaagagcctggaacctcctctcctccctcttgctccccctctcaccatgtgatacacctgctcccccttcaccttctacaggtagtaaaactttcaaggcctcaccagaagccaagaagacgctgttgccatgcttgtacagtgtgcagatccatatgccaaataaacatattttccttataaattaccaggtattcctttatactaacgcaaaacagactaatatacgcatccatattcagcttctttgctcttctacttcctatcatattttgctgtaactttctggcacacaagtagacttaagcctgttcatccttagtagggaacattaggaaacacaaagaataaatctttctcatcttgaaattaggaacattttagtatctctgtactgactatatactccataatgtactatctacttagaatgttctttcctgcttgcctaattcctttacatccttcaaatttcatctcaggcatataaagctatttttaaggcactgtactgaactgacatgatttgtactagaaagtagaaaaggactctagaaacccttcgagtacctgaaatgtcactgtggctacaatggaacatatattctaggtgaaaggatgtactcagaaagtagaagggaatatgtattttgaattgcagtatacataattgttcagttaggactattagacatacatatactataggtgatgaccaactaacagacagaccaattattaacataattattcacataactcattagggatctatttcagattccactgtgacaaatcatcatcagcctattagatactaagtttactttgtgaaaacacctagggccattatgaataaaacaattcagatcattattactttcgggcatattaaagaaaaaattactcatgatattagttggcaataaaaatacacaacagtgtaatgaatgattaagctaacagttccctgttaatgtgaatctcaatatagggatggcaaaatcataatgagataaaatatttgcagaagttaccttagcacaaggtactttataggccaaatgccagaggaaggtggctcattacagccccctcgctctcagccacggctataccaaagaatcacctggatgacttaaacaaaagccccaccctccctcccacacaaaacaactaaacacacacacacaaaataagacaaaaatattgatacctatatcccactctgagattatctgaaataacaggtttggacagagccttggtaatatgttttcattcttttaaatgccccaggcaaattctaatacggcagtcagggttgagatccaatgaattatcaataaatagagcagcacatatctatagcataagcctactagagagataatctaaacactgagaggttcacatgagtccaaagacccctaatacggcagtatttatatggcttaggagaatgtcctaagcccaaaatgtgtctttaagacctgcattggtacaaaaattcttgtaagatacgtgtggacacgtatcttctaggctatcataacttgatgatatcaatgattagatctttgaatatgctaattccaggcttatcatgaaacctatgacacctaaggattacctagaataattttccctagtgtcacatttgccttcagggagagaatatgcccatcagaaaatacaaggaaactacacaactacactcttcactcttaataaactgttattctagtttgttcatccattctgtcagaacatatgagtctttttcttagtccatctgcttacgggctttctgaacaaaatcaaattttcaatctgcaaagctgagaaaatcactgaacagatcactgacaccatggtatgtgatatgtgtgtgtccctgcccaaatcttatatcaaaatgtaatccccaatattggaagtggggcctggtgggaaatgattggattattagggtggatttcctatgaatggtttagcaccaccccacttggtactgtatttgctacaatgagttcttgagagagctggctgttcaaaactgtgtagcacctcccaccgtactcctcttgctcctgcttttgctatgtgaagtgcctgctcctgcttccccttctgccatgactgcaagcttcttgaggcctccccagaagcagatgctgctatgcttcttgtacagctgacagaactgtgagccaataaaacctcttttcttatatattaccctgtctcaggtatttcttcgtagcaatacaagaatagcctaatctagaaaatgagaccatttaatatggccagctaaaccatcagttcaaaacctcaacattatgattaaaatcataacagatactagcataaattgagggaatggacacatagttctgagggtctctggagatcaaaggtaggtatagaggaggacaagctgtgtagaataatgtataatagggccatattttcccccttactatcaaaagattttttttcaaaagctagaattgggtgagaacaaaaaggcgaataaagtcttcttactaaataagacaaaataattatatgtgcttgtgatcagaggaatgaaagattccatccctaaccttgagaggcttccaaatttggggaatggggaaagaggccacaatgaccgagaaacatactgttaacattgcagagagttacatgttatgtttcaacaatttattcaatatctatgtgccaggtagtgtagataaaataattcatttattacttgagaccttaaatgacttatgtttttattctacttttccacctgggaaatttaggtttattaatatagaattttagtttagaaatcaatatcccccagaaatttgaagcattactctcttttttattttggaaaggaattatcctcttttacagatcaggaaaattactttccatctgaaagatgtattctcacctatttcacacagttaatatatgacataactaaaattagaatccattctatatgatatcaagctgataagggtttaatcccaacagtttaacagtgaccttcaaaacagtaaaaataccctcataaaaatgaaccatatggatgaataaaatattaaattattgaactaaacttttgggttctcgatatataacctaaataactattatgtaagagataggacaaagattcaaaatttgtaataaccacttcttctgcaagagaaattggcaatatgtgtacttactatttttactcttaaattcttatctatttatattgaagttgccatattttaaaatgttgaaatatatcacatctcttttgccttactcacaagacagaaaaaagagaaataaagtcaattagcaagaaacaggcatgtattacacctattgctctccctatacatttggttttcacataaatatatattatttttaagaagttaagccaaaactacctattgggtactatactcgctgtctgggtgacagattggtaccccaaacatcagcataacgcaatatacccacgtgacaaatctgcatatgtagccctgtatctaaaataaaagttaaaaaaaaaaaagcagcagccaaggtacacaggcaaagaaataaccaagtactgctttaaagtactcatcctcagcttcctgttcaatttattacaaacatgttacgtttcatataaacattttagggttaaaaatctgtaactgttgtgatgataatgttgataaagaattagaagtaataaaataccagaatatttcaaaatctgagacatgtacaagtaatatgtaagtaattacttacctcagacataggggttccccagaagtcattttgaaataaagtttttaaaggtgtagatggatgcaagtctttgttatccagtattgctgaaacatcatcaaaaacaaaaccacaaaagaggctgttccaatagcaggcagtaaccacacctactattaaggttatttcttttaggttaatattagccatcttttctataagcacttctggacaaaaactggaaaaaaaatcatgaagataaaataaggaacatatttattccaagtaagttcaattttagtaggtgggtaagtaattgcatattaattctccagagaaaagcgcagctaaaatgccatccacttctaagaagcataagctagtcacattgttgaaactcagccccatctcttactggataatgtccctgataacggggacattatgtcagccccctctcttacgggataaagccaagtaacctctcctattccaaggcagaagactggaggtttcctctgtggattatttaaaacatagggtctctgataacagggaaaaggcagcatattgaaaataaaggctaagtaaaaaaaagtctgtccatatattttaggttgagaccctccatcccttttctactgggcacaaaattctgtaaaactttacaacactgaaaacaaataggattctaaaagcttctggaaataaaaaaggttccagagtaaggatcaggaatcaaaaatcttttttttttcacccaaaatgctgttagaaacaaaacaaaacaaaaaattcccttccaaaataaaaaaggagtaatgcttcaaacttctgaggcatattgatttctaaactaaaattctatattaataaacctaagttttccaggtgggaaagtagaataaaaacctaagtcattaaaggtctcaaaaaatttacctctgatgttccttttcaagaaactaggagaaaaggtacactagtaaaatgaaacagtatattaagaaacaaagatacagaaatcaggaaatgggatccaatataggacagctatatatacatgttgtaatttagaaaaaccgaatgaaacaactcaggatatctacctttgggtaggtaaaaatcaagttttgtgtacaggtcagaaacctctcttcccataaataacctcaggccactggcttggtaacatcaattcacttggggtgacaaactgttgtttggttaaatgttctaaccacaggaaagtttaaaattaatagaagaaaaaagtaaattaaacctgtggtttcagtgctttaaagttatacttgggaacaacttatgtatctaatttttagagtacttgcaatgtttaagagaatctaacatcctggagacttgatacattagctgttaaattattgttaaattaaataatttaaaataaattaaataatttaaaaatatataaaaatatacaataatatgcataataaacaatattaaattatgcatctgattttttagagtaactgcaacctttaagagaatctgacatcctggagactttgatatattagctgcataactataattttaaaatatacaataatacgtataataaacatattaaacataataaacatattaaactactgactatgtagtttctggattcacaactatagttgaaaagtataataattagctaaatacacaaatagtattggaatttttataagaacttgggatttgctatagtttcaagttttatttcctaaatttaatcagttatttaagtactgagaaagttttctttgttaagttaggcatctgaagtacttaaaaatgaatacattcaaaataattcaattcttcaatatatctttattttacatatatatacatatatatgtatatatatatatacacacacacacacacacacaaatatataggtatgtatatggttcttctgttagttgtgcctggggtcactcatgtgcttatagttatccagtggcttgattagggctggatggcttttaaagggtagatttctcagctttgaaaactagtctctgctacttattaacacatcctctaataggttatcttaggcttcttaaatgatgatctcaggacaacaggagggcaaggttcaatgcacaagctctttataaggctctatttagtgcgtattttaaaaattattattcaagcaaggtacatcctgaatcaatggggaagaagttataaaagggccaagataacagaatttttaagattccccaagggagcatagtatgagagaaagggagagagagcatgttacgagctcagttgtggagtcatcttaggttacttccaagagccacctgcaaagtagaggttgcagggaagggacagatttacacaaaggcataggcagacggggacctgactcactgggggccattattgcaaacatgtaacacactattcttgttagttgtgagaacttctaatttttcctaggcacagaagcagacttacagatgcagtttaagtggatgggatgactgatttctgtttgcttacaaaaatggggtgttactatatatgtgcacaaaatccaagtgcaattggaaatgtgaaaggaaaataaaacttgggatctcaattcattatgtctataagaaaaaattagggtgaaagctgagtcatgcaagaaactgctctccttttgttcttagcagacagctacacatcaaatgttaaatatctccacaggtagctactttaggacattcatcttatctcacgtaaagtgctgatttaccaccccacgtgaatacataatatctatttccctctctgctctttttctcttgcaacacatagattaccatatctaccctttttctcttccaatggatttttcccctttaaatactgaagccctcaaaatcatcttagagaaaggaagagactacagactgtttctgtgattcagtgtttatttcttttcggcatgtccctaaccttggcaaaataaacttctaaattgattgagacccgtcttagacactttttggttcacaaagacttctcatgagctacattatagatatacaaaactaaatacaatcccttcaataaaactgtaaattgtattaaggcaaattgttttgccttaatttcatggacaagaatgagtgtgcagcaagcagatacttgtcttccttcaacatgaggaaactggaaagatcagtagggagtcagtgtgaattaagccattaaccatggcttaatttgccatgaagataaggcaaaacaaaatgtttaggacacacaatggatacaaaatggccatgctttgttttagagatcggagaagtaagctactatgacttttcttggtaagtcagcaaaaaggaactagaagtaacatccaaggaatataaattcattgctacagagaacaaaggtaagcaataataaaaggtgaggccttcttgtgaagtgattttggtcagataaaactgttcacaaaagcctagggcagaaagaaggcaggtccagacaagtgttcttataacaaggccacttacaacattgtcacataagtcccatttcttgatgaaaactgacaggtgcagaaaatctgacgaaaaataatagttttgccaattttcctcaaaaatatacagtgagttattgaactagaacctgagttaaatttcctgactcacacttaggtacagacgacaatgcataaaaacttagttgacttgttcaagccagagctgacttgttcactgctgtatccccagtgcctagcacaggaaacaggataaaaaatactgttagaatgagttaaagaataaaatttaggtaagattttgcttttagttacaattgtcactgagatctaggttacaatcttagcttcatcaattattacttaacttctatgaacttgttctcacttctgaaaaattagaataaaatttaccattagagaccaggcaccttgagtttatgaatgtgagcaagagggtggtggcagaagggtagaaaagagtaatacagacaaacgaaacttgtaagtgaatacataaaaataagttataacgaatgaaaaaaaaaacagaagaaaaggtgttagagaaaacagacttctattatgaaaacaaacacgcagtagtcagcatagtgtatgacataacatgtgctcagtaactattaaatttcattcctaccattgtcagaggtatttgaatcacaacaactccatcttgaataggggctgggtaaaataagggtgagacctactgggctgcattctcaggatgtctgtcagtcattctaagtcacaggatgagataggaggtgggcacaagatactgatcataaagactttgctgataaaacagcatgcagtaaagaagccagccaaatcccaccaaatccaagatggcgagaaaggtgggacgtctgctcgttctcactgctcattatacactaattataatgcattagcatcctaaaagacactcccaccagtgctatgacagtttacagatgccatggcaatgtgaagaagttactctatatagtctaaaaaggggaggaacactcagatctaggaatggcctaccctcttcccagaaaactcatgaataacccaccccttgtttagcatataatcaagaaataactataacaatccttagtctaccacctccaatgggggtgtatgcacctccaattctttcttggcgagatccaggagccctctcctggggtccagatcagaacacctttccagaaacaccatcccatgttaaattatgaattaagaacactgaacatgaagaatgtttaattcaaattattgagtaaacacttacaaaattaaaatataacatttaataaaaatagcaagattgaggaacaagcacttcacaaatattggtttcccagaatgtctgaggaggtgtatagaagttaagaatatgtcctccagccagagagatctgtgttcaatcacactatttaagttacttagcttctccaagcctcagtttcttaactcagatggaaaatgaggacaatgtaagcacctatttcactggattgtaaggaagaataaacaagataatgaatagtatttggcatataatctttcagaaaagtagtaaaattgtcattcctataaatctaactaatgtctttaaaattcatctcacaaaatcagtatctttttattttgtactgagctacttattttacccaaattgggggtttaaaaagaaactcattacttattttcgaaaggaaaatttactgtcaagtacagtaattttttttttaaagcagcgtttaaaaaaaaaaaaagacaaagcactggtccagatagttggaaatgtcatttagatttaagtctacagcttcttaggaaagttaggtagagatgtatcatactccagcatgattgtgagcagacgagcaggatgagcaaaacttgcacgagtaagagtggtaaacaccagagaaggcgctttcatggaagggcaccctaggtaaccaagcaagtggcaacaatagtacaggtgagtccttggatcccttctctctccacccccggcagtggtccggacaagtactaacctctcctctctagagccttgactttatactagctccacaaccatcaagccccacgatccgcgaaaggaatggtgctacaggtaaggcgggcggggtcgggatgccgagacctcttgtcaattcttcgctcgcccccaaacgaggatcacggctgcgcggctctcactctaactatcaagacagattctgatactaaacaaggctaaaactttttgttttttccttcttacagaaggcactaccctggacgccgcttgcaaacgcctgaagagaaggcagggtgttcccactttttcagaatgggaccaggccctacggccccaatagcagaagcttctctaacccaggactgctcccctcaattcctcccaatatgctgaccgacagctcgacctcacctgggggcggttccgccaggggatggcttaggaaaacctcaggaagagcagcccagcgagtgacgccactgaaaccacagtcatggtctacctcgttcaggccaccagtttgcaggcgcctgagccgctgctcctcccgcctctcggtccttccccgccgccccggtaccgtcgcagtcttacgcgttgcatgccgggagcgccttacctcctcttctcagggacttcagttcccagcatgcagaagcctcaggcagaactgcactctgggatttgaagtcctcgttccacgccttctcatcatcctgaacaccgagctctgggactccggcggagaatctaaacgtaaagcatcacccacggtcgtgaactgtaggctctcctggcatccgggatcttattctggccttggcggagttggggatggtgtcgcctagcagccgctgccgctttggcttgctcgggaccatttggctggacccagagtccgcgtggaaccgcgatagggatctgtcagggcccgcggccgggtccagcttggtggttgcggtagtgagaggcctccgctggttgccaggcttggtctaggtgggtggatccttgtaagcaggattagcgagtcactccacgctcaggttctttagcctgagggcccgtgtgccacagcatagctaccccgcccttccagcctcgggtccctaatactgccttgcttcggttccagtttccgccgcacaacttcactcattccaaatgttaatttctgcgttttttttcagccccaattctgtttctccaaatcagggatgattgtcggccttccacagaccctcgcgcttgccaggattagggtgttcgcgcgcattgtgggtaggggtgtggaggaagggatccagaaatcttaagtattaacttagattagtgttagcaaggaagccgtcacattttatttagccgggacactctgacagtttgtgccgactgctatttttgatcaaggctattttgcccacttgtctattttgtggcccaattgtctgttttgctaacatcagaaagttataatgaaataatctgcaaaaaatgtaaggtgctagaaaaccaataatactgtgtaccttgaaaatgctaatatacacctgttttgttacagaggtggagcacagtgaaagaattcaagatgccacctaatataaactggaaagaaataatgaaagttgacccagatgacctgccccgtcaagaagaactggcagataatttattgatttccttatccaaggtgcttaattggtcaataataatagatatatacattaacttatgattaatttattaataaaatatgaatttatttttttcagggacaactataattgtcacaatctggaagtgttcttatattttgcttgaaggttataaaatataaaacagttgcttttctgtttacttaggtggaagtaaatgagctaaaaagtgaaaagcaagaaaatgtgatacaccttttcagaattactcagtcactaatgaaggtttgtatgtagtaggttttaactataggtttggctattagtggaactataaaaatctgttcttatataaggtaatctttgtgaaaatacctggtaatatctacatcaccactaaaaaatgcaatatatttaaatgtgaattaagtattttagtgtataaaacattgctagtttctacttaaagtttctaaaagggtgtgtaggggaaatagaatgagtatgttgaaaagtaacataaggaaatatatcttgaggtccaaatgacaaatgcagacaatgactgctatagggatttgttaagaggggaaatgatttaagagatgtcagaagacttcacaaaggatcaatactgaggagtagtgttagataagtggaaggcaatgcagtggtaagatagtaagggaattctagagctgttggttaccataaataaatactgagaacaggaaatatgtttattctttatatttgaggaaacaaggtgcagcaagtttgtagcagactgtagagaaaacaaatcttgggtaagtactttgagataggttgttgagggccttaaaggtgtattttatgctatcagcaattgagaaggcagtaaaggttttcgaaacacaattgataggtacaaaaatacaccttaagaaggcaaaactgagtatattatgtaggacaaactgaaggaaattggagctttgtagacatcacattatagcggagtttaaacctgaaattatggattagaataatagcaattggaacagaaaaaaagtagtggaaagacattacaaagggagatgttgcattactggatataagacttgaggacttgaggtaaaaaggagaatcaaaaatgtttcatgctattaaaaatctagaaattgtagtcttaagtaagaaaattgcctggcatggtggctcacgtctgtaatcccagcactttgggaggccaaggcaggaggattgcttgagcctgggagttcaagactagcctggataatatagtgagtccttgcctgtacgaaaaaatttgccgagcatgatggcacaccaagcatgatggcacgccaagcatgatggcatgcacctgtagtcccagctactcaggagactgagatgggaagattgcttgagcccaggaggcaggaggttgcagtgagctgagattgtgccactgcactccagcctgggtgacaaagtgaggccctatctcaaaagcaaaaaaaacaaaaacaaaaaccaaaaactatttattcagcaaatatttactgaacgtctccatgtgccagccattgctggcactaaggatcataacaaataaaacagaatttttattttcagtgcttacattccagtataaaggcatattgaaataacctttttttaatgtttagatgaaagctcaagaagtggagctggctttggaagaagtagaaaaagctggagaagaacaagcaaaatttggtaagcaccttggaaaaagtttattatggtattaaataatgaattccatttgttcattaaactgtagaaaattaaattatattctataaaatatatatattcagtttatttttaatatataacatttaataataaatatttctagactcctattttatggatctgccatataatactttttgttaccttataatcatgatggactcttttaaaagaattaattttgttattgaaatttatttaaaagtttgttttgtggtaactaatcaattaaaacgtttttctttttttttaaaaaaatagaaaatcaattaaaaactaaagtaatgaaactggaaaatgaactggaggtatgtctttttgtattccctaggatgtaattgtcattaattttattttgaattgttttcaaattttaaaattattgttggctggaaaaattataaggatgattgtaatcatggttatttgtttattctgtatatgttctacatgcctattatgtgccttatatagtactaaggactgagcatatggttgtgaacaaaataagaagttaactgctggatggagcttatagtcttgggaaatatacagaaagattactagtaactgaggtggagggtgggtggggatttgaggaatagtgacgaaagggtgttatagaagtaatttttgacaaagctgaaggctaaaatatgaatgtattgttgaagaacaaaatacattgagattcctgagaaggtaggaatgtgatacaaatggatcagcctttgaaaggaggaatacccttttcctttgtgttaggagaggaggatgagtggatgagcgtgggaagagtggatgtgtatagaggcttttatgtttgtaggcataatgcttggaagttgaggggttggtgatgacatcttctgttaaaaagagtgggaaatggtgtggtcacattttaaggaaattaggtaaaatttgaaatatattggagacaggactggagagttggggatctggagtcagacagatttgagttctagtcctgattcttctactcgttaactctctgaacttggatgacctattgtttttgattgtatatccagctcctgggaaaatgccaagcactttcaataaatactaaatgaattatggagttggatcagttctgtgttagtgtttagctaggtagctgctgtagaatagaagggtagcacagttgaagatattggtaggaaagtggttgaagtgatgattatgaagtcttaactgaatagataaaatcaagattggggttgggtgggcagaagggtagggatatggagggagaagatgaggggttagagtgtcctgtgaggtcgaaggacaggcatagtgggaataattgaaagaatgttctggttggacaaggatctgatgtgggtgtgggagtgagagactatagtgaattcaagaaaaaaatagactagaacaaaagttatgtggagattgcttagtgggcatttgatagacatctgtgggccacatgcttaaattcccagtgcattttgcggagttactggaaggttggtggcttgtttctaccatgagtaggtaaagatggagagcaggatattttgtgagaaagcagctgaagtttctataggatgatggaggaatgataggaatgatcacctgaagttgcagggtggggtaaacctagaagcaccaacaccttcttctgaccctcatgtatttggaatctgaaagaatgagcaccttccaattgaaagagttccaagggcattagtatactaaaggatccaaattgcagctaagccaaggagatggaaaggaggattcagtaaagaatctgaggatgtgaaatattaatttatcttggaagagaattttagagagcacaatggaatgctttttggaggagagaaagagtaagaacaatttggttaaggtagaggaataacagaactataaggtgaagaaatgaatgtgagacacattagatgaccaaatgatttgatgttcttggccatgacctgaattaacaagactgtgaggtaaaatggatttaatcggctacaaatcttaagataaccaaaacctgagctgtttaatatggtagcactagcactaaccacttgtagctatttatatttacattggttaaaattaaaatgaaaaatttagttcttcagttgcactagccacacttcaaatgcccgaacatagctacatgtagcgagtggctattgaactggacagcactgacagcatgtccattatgctagaaagtcctatgggacagcactggtctaaacagtgcatggtatgagagaaagggcaggttaaggcactcagcttcactgactggggtggagattctgatggtttgtactcaggttccagatccctgaggctcaggaacctttgcagtttagtctggttacctgtggcccagtggttacaacagaatgattaacagtcaattctttgcatctctgggtggctcaggaaaaatttaaggagttattagctgtgaactaaccttaagtaagttaaattaaaaaaaaaaaagttcttaagctaatatgattttaaatatctgcactgaagtataatgcaaatttaaattcagcataattatttgcttgttgttgactcatttgaacctcaaaatataatgggattaatttatactttgggtttattactttaagatggctcagcagtctgcaggtggacgagatactcggtttttacgtaatgaaatttgccaacttgaaaaacaattagaacaaaaagatagagaattggaggacatggaaaaggagttggagaaagagaagaaagttaatgagcaagtaaagcactttttttttccatgaatcttcactgttcaagttacctggctttttattattattggtaacaatatcaatttttatattgtatgttatatttgaaaaatgatgtacacttatctctaaggttttatatcactgttcattttgtcatcaccaattttaaaatataatggtacttctagtgaatatgacttgaagattaattctttatatttggaagtacatttttctcaggacatcaaacttgttacctaaaattaatgcttttgtctggaagattggtatcaagtaactaatagattttcataaagaagtgatctttctagtgccatagtttattttgggtaaaagttatatttgttcatttcaatgtatttatatgattagtagattcgcaaatgaatctttcgatatattcaataatggttaattaaatatcttgtttttggttgtaccttattttatgtgagatatatatatatatgtatagtttttgaaaagttgtgttcatgtcagcagtttataaatcacatatttaaaataacatttttaatgcatagtttttattacctcgttattccttgttataaactaataattcttgcagtgttcacttgaatttagttttaggaaaaaagttttttgcagatcaacttgtatttcctggaagaaaatttcctattttacctcagcttcctatttaatgtattatttatttatttacttaacatttatttgttttttatttcacctgaactgttagtaaacttagtaaaatttggtgcctacatgtggtaactgtcctgtcccttatactcagaaacgttttccacctttgtgtcctttaggtcattgttgtgttatattccatttattttattttgtccattgttctctcagaaattgagggtcatacattttaagaaaacaatgatatgctatttaagagaatgtatcataaattgatttgtaaggaaaagtatccccattcttcatgtatgtattttactctaaaatgttgaagaatcatatagaagttagctatgaaaacaatgtggtagagaaagtatggatcgatgccacttaaatgttaggaagaagctcttagagcattatctgtttagctaactgcaaaacatagcagacatgtggattttttaatagtcatcaaggatctaacttataatatacactggtagaattgcttagggggatgtctgtggttttctggacttttgttcttctatatagacctgtatcagttgacttatcattcataccacacacccttagctaatcagaactaccttgtccatttatatcttagactattgtcttttttcatagtcacacacagagaaaacttgaatatatggcctgtgttcctttttggctgctcaattccttgagatgaaatatgggtatgggttgctttggcaattacttctttgccgttaaccagtcattcagttttattgagtctttacagcataccagaggctgctagttactagtgatatagtgggcaactatgttctggttctcaagaatattcatagtcaataataagcataacatagtgataatatgatacttagggagatacataaggtcatattctggcatactctggagagagataccgtaatcagccttgaggtgcaggatgtgatctgtaaactgagacctgaagtatagttagactggtaagaggaatgaggatatatatggtggttaataaaagaacattctgggtagaagatatagcatttgctaagacctagaggtaagagatgttatggagtatttaggaaactacagttattcattttgactgaaatataagtgaaaatagctttcatagagtccttactatgtgccaggcacttcatatgcattaattcattattgcttatttgatacttgtcatatgagatagttgtcatttctgccatgatacagatgaagaaatggagacacagaaagagtaattgcccatggttgcacagcttataaatggtaaaggtaggatttgaaaacagtcttactcaagagtctgtgctatcttgccttcccagttttattttttatgatcctctggagagataagcaagggccagttcctaatgaatttggttcttttcctgaaaggagccagtgaagagttttgagcacaggatatcatgatcagatctatactttaaaagtttactgtactttgtagagagtggattgaaaagggccaagactagtaaggaaacatttgtgttaattcagggaagtgctaatgatggcatttgcctgagaaagacaagtgtgagagaagtagatgtaattggatgtggtgaatgtaattggttgttggaggagagggaggatggagagtctgcctaattttgtgggttgggccactaaataggtagatagtgccattcattaaggaggaacacaagaggaatttggaaagcttgagattatttcagttttgtagatgttgagtttgaggttcttctgggcatattcaaaaagggtatctgtggatatggaattcacaagagaccctgtacagatgatgaggatttatgaatcatcaatgtagacattattgaagccagagaagtgattgtaaggcacgtctctgagaaatgtctaataaagcaatgaaataggaagagtgcttcaaggaaaagctcaagaaaggagaaacagagtgtgatgtttgagaagacaagggaaaaaaacattaatagcattaaatgctttagcattaagttcttggcttctcttcttgtaaaaatttcccaattcagaacacagtgggattattaactttcaattgataataataatgataggcaaacttctaaaatttgtattgtagtttgcattttattataaactttctttaaatttttattttgaaaaatgtcatatcttcataaagattgtaagaaacacactgttggtgttaatgtaaattagttcaaccattgtgggagacagtgtggcaattcctcgaagatctagaagcagaaataccacttgacccagcaatcccattactgggtatatacccaaaagaatataaatcattttcttataaagatacttgcacacatatgttcattgcagcactattcacaatagcaaagacatggaatcaacccaaatgctcatcaatgatagactggataatgaaaatgtggaacatatacatcatagaatactatgcagccatcaaaagagaatgagaggtcaagcgtggtgactcatgcctacagtcccagcactttgggaggccgaggcaggcagatcacttgaggtcaggagttcaagaccagcctggccagtatggtgaaaccccatctctacaaaaacaaaacaaaacaaacaaaaattaactggtcatggtactgtatgcctgcagtcccagctacttgggaggctgaggcaggagaatgacttgaacccagaaggcagaggttgcagtgagctgagatcgcaccactggactctagccttagcaacaaaactagagtttgtctcaaaaaaaaaaaaaaaaaaaaaccggaacaagatcatgtcctttgcagggacatgggatggaggtggaagccattatcctcagcaaactcacacaggaacagaaaaccaaacactgcatgttctcacttataagtgggagctgaacaatgagaacacatggacacatggtggggaacaacacacactgggacccgtcaaggggtcggggtgggagaacatcaggaagaatagctaatggatgctgggcttaatatctaggttatgggttgatctgtgcagcaagccaccattgtacacatttacctaagtaacaaacctgcacatcttacacatgtaccccagaacttaaaagttgatgggaaaaagaaaaacaataaccacccacatacccttcatatagattcaccagttcttaatgttgtgccaactttgctttatctttttgtcagtatttttacacacacatgtatttctctgtctcttgtttgttcaatcacattttttgctgagtcatttaagagctaattgcagatatgatactttgcacttaaatatttcagcttgtctgtttgaaaaagaaagatgttctcctacaatgaacacaatataattgtcatgctcaggaattttaatattgattcaacaccattatctagtccataatgagatttcttctaatggcccaataatatccttcagtctccccacctccaatatccaaagttctgtcaaggatcacatactacatttggttctttattatagactttttaaatatcgttgtataccattgtgattctatcgtctcctttaataaagaggagaaccagaaaaatgaaaggtcataagaggaatgaggtttggagaataggtgaaaaaaggcatcataatgtttataataatgtttgcctgttcagagaaacaagaatcacagataaagtcacttatatgtagataagagaatgctgtattactttttgctattctattcactgatcatttttctaagaactctgtatgcttcttgtttaactcttatgtcagcatgtatgagaaaactgagttaaagagatgttaagtaactcattcatgctttactagaaattggttgatgagggacataaacctaggccggtgtgattttagattgcttcttttaaccattgtgttgtattgccttatatttctaagtaatttatgttcactgagagcaaataatagtctagctatgacttagaaaagtaaaataaagatgttgggcagaaaaccattttattaggggtttttttggaggagcagattaatttgtttctgtattctttggttagtttgtgtgtgtgttctttttaattctttaaaatgaaactgtttaatccttaaatccttaagttttgaaaattttggcctattatttatgtgttaggttgatattaaatccttaatagctttaacattttctactttgttagagaggatttaaaatttaagtagataagctgaatatctggctttatattaaattactgctgatggccaggcacagtggctcatgtctgaaatcctagcactttgggaggttgaggcagatggatcacttgaggccaggagttcaagaccagcctggctaacacagtgaaaccccgtctctactaaaaatacaaaaattagccagttatggtaatgcatgccagtaattccagctactcggtaggctgaggtgggagaattgcttgaaccgggaggcagaggttgcagtgagccgagatcgcaccactgtactccagcctaggcgacaaagactttgtctcaaaaaaaaaaaaaattactgctgaattttatcttcttcttatttattttttttttttactattttagttggctcttcgaaatgaggaggcagaaaatgaaaacagcaaattaagaagagaggtaaaaaattttagtagttgtggtggttcaacaaaggtacttattaaaataagtacctaagtttacataaatttatattttaaccaggactggagtcttctaagtaactgatgttttcagactgattttatggtatgactttgtctcagggaaatagaaaacaaagcaaaatgtgaggccattaagtattacattcatctcaggtctatgcgggtaaatctttttttgttgttttataagccattctttgctagttttctaattgaatagatgactggatttctattcttatttctcttacccagaatcctttaaaattttttgttacttgtggaatcttataaattctgattatcatttggttctactgagccaaataatgtttgtacattgtttattctgatagaagttcttaagtttctaacataattgaaatattatttgttttggtagataattagtattctttctttggttattcaagataatatgcatcattttcccaaaatttttttgttttctttagtttctgattattatttttaattatgtattacctttctcatttctaattaccgttttcctgtccttttctgtagaacaaacgtctaaagaaaaaggtgaggctttaagtgtggtgaaatcttgggaatttaaaatatgttgtgagagcactatttagaggatatgattttgttattctgaatagttttgtaattgaatgttgtgtttggttaccttcagaatgaacaactttgtcaggatattattgactaccagaaacaaatagattcacagaaagaaacacttttatcaagaagaggggaagacagtgactaccgatcacagttgtctaaaaaaaactatgagcttatccaatatcttgatgaaattcaggtaaaatggctagaagtcaattcagagcaatggttcctaaaaactttaatttcattacaatgtaaatataatatttagccctacatgtaaattccctggtataaatctgtcactatgtacttgtaaaatgtgaaataaattacatctttgaagttgcaactttttagccatttttatatttgcctgtcttggtcattaagaacaattgaggtccttatgtactattttcttgattcaatttgatttaattggtcaatgccaattagtaaaggtctataaagaattctctttttttctagaggacacttatggctgcgtttaattttaatttggtttaaatttcagtttttttaaaattactttttaattatagtgtctttaacttttttagactttaacagaagctaatgagaaaattgaagttcagaatcaagaaatgagaaaaaatttagaagagtctgtacaggaaatggagaagatgactgatgaatataatagaatgaaagctattgtgcatcagacagataatgtaatagatcagttaaaaaaagaaaacgatcattatcaacttcaagtaagaattacttttagaataacttatttattcagacttcatattatctcattactatttatttgacactagaaagtactttttctaggatgtgaatttttgtctgtctttttaatagtgtaatatcttgtcatgttggtatatttgtccatatgtgtttctccaatcacctcacaaacactaatttttgcaatttaggatatataaatgatacttgaatgaatgtgtagatagcagtcattatggggttttctataaaagactactgaaaatcctgtggatcataacatttcattttatcttaaaataaatacattataaatgtattagaaaccaatacattgttcagtatttatgtggattaaatttgtttaaaaggtagaataatgtttaaaaataaaattttctagtaatgaaagataattatgcaattataagatgcagaaactattaaatgtcacctataattccaggatgacttcaatgataaatacacatatgtaatgtaatgtatccgtatgtatgtgtatataagtatgaatacgtatgtgtgtgtatgtagatatatttatatatataatgtatatgtaaatatgcacaggtgtaaatatatgttacatcagtttgcaacaactcttgaaataactttgtcttttaggtgcaggagcttacagatcttctgaaatcaaaaaatgaagaagatgatccaattatggtagctgtcaatgcaaaagtagaagaatggaaggtattttttttcaattgacataataactttttctttttgtattttagatttaaattttagtcttatttttctttaaatgtcttatactggtttataacacgtttattagggtttttaaacataagtttattttatttattggttagaaaagctctagaactgtcctttttgatctctagctaatttgttattgaatgacctctttcacatcaatgagtttaactttaaactttttgatagaagtctaactccaaaatatatttggcatctaaaatatataattcgaaatataatttaaatttttttacttaactcatagttaccttatatacattagttaaatagttgcaggtttaattttagtttttctaactaaatgtcaggttcatcagtgggaatgggaataagcaaagggatcagaataacttgggaagccttttcaaaatacacttttcttcctcaccaccactctccaaccttaaccaaattgtcaggccttaccatattagaagctgggattatgatggttgtatacttgaaaaacatcagagattattctgaatgaataattctaattttaaaaactatcacttctagagtcattgctttctagtatggttcacataaatcttgtgggcagtttggaactggttagcatctagggagctcagataacctatattttaaacaaaagcattagcaatggaaataaggcctatagaatcagtcatgtctccataaactttatataaagggccagacagtgaatattttagaccacctggtctctgctataactaaactctgcttatagcatgaaagcagccattgacaatacgtaaatgagtgagcaaggtggttttccggtaaaattttatttacaaaagcagatgggaggccagatttgacctttgggccatagtctaccaacccctggaaaaaacagttgtctttaccagattgaatgttggcagggtaaatggtgacatgttatatgtattctgtactttgttttgacttaataccatttcataattattttatatcagtacgtatagtattgctgttctttttaaaggctatgtaatttttctttttatacaggtgttaatttgataatttgtgaagtttatgaagtttccaattttggggttgtaaactgttttaatgaatatccttatatatgttattttgcaaatgtacaagtatatctgtggaataaattgctgcaagtgttgtaattgtcatgtatgttgcaaatacattctaacagtttgtcactttttttgctttatggcattttttgctgtgaaatatttctttttatgcttagttaaatttattattttttaatgacttttgacatttgttataatgagaaaggcttctgagtataaacttgttttctcatcttttctcctaatatcttgttttgtttttgtttttgtttttgtttttgagacagagtctcactcagttgcttaggctggagtgcaatggtacaatctcagctcactgcaaatgccacctcctgggttcaggtggttcttgtgcctcagcctcctgagtagctgggattacaggcatgtgccgccatgcgcagctaatttttgtagttttagtagacatggggtcacactgtgttggccaggctggtcttgaacccctggcctcaagtgatcctcctgcctgggcctcccaaagtgctggaattacaggtgtgactctgcctggcctttttttacatttaaatcttcgaaacatataattcattttgatgtaaggagtatcatgtggattcaacagagctactctgttgtccaaacatcttttattgattatttcatcttttattgaattgattgatctattttctagcagtgtatacttgttttaatttgtgtatgttttaatatctaaaaacgttattatttttctgcttttagacttctttatgaatatttttaatgtgaattatagaactggcttgtccagttcttaaaaaatatcttgtggatttttattgggtatgtgttaaagttataaattgttttatagattgatttaggataaacctttttatgttatttggtccttctagctaaagaacacaagataccttttctttcattcattcaagatattttatgcctcttggttgcattttaatgcatacttcataaagatcaattgtataaaacttttcacagttgtatggaagtacttcttgtttataaatgagttttgaaaggttgaaatatttttaaagattgaattataaaaaaagaaaattcggtatatattttaaaatcattttctatttgaatttcaggttgtatatacaaaaggaacagagattatgccagtagttgctcatactttctcatttcaaataatttttattttctgtatcataaatctactaacggtgtttattatttatgataatgaagaatgttttattaactttccttttgcataacagattctattgtgtttatttctagctaattttgtcttctaaagatgatgaaattattgagtatcagcaaatgttacataacctaagggagaaacttaagaatgctcagcttgatgctgataaaagtaatgttatggctctacagcaggtaaaatcttaacagaattttgtttatcaaccagttttattacagttggaactctgaacgatgtcttttatttattatatcatcagtgcctagtgtagcggctggtactaccaagtgtataataatgtcttttgaaatttcttctaccacctggtcccaataaaaaattagaattaagtttagatcacggattagacttagaactagagttactgtgtttatttttctatgtttatgtggatagtacacacattgttttggttagaaattatttaacaagaaatgattaaaaacttttagaaatttaaaataattttatactcttttaaggtttattttactgtatcttagtcctaacataccctatacaatgtgaaataagctaaaagcatggttataatttgactgtgctacctattttatttttagtgaaaataacccaaataaaaggaagtaatacttttattatttgtgctgtagttatagtccacaagtaagaagatgatttgaaaagtgtatgctgaataagaacaattacaggggacaacattttttaataaagtacgaaaggggaaaaagctaagttgaataaaagagaaagcacagagcaaaacagaaacatacaaaatggtaaaaaggtggaattgaatggaggatgaggaaagtaacatataaggaagtatagaagccataaacattagggagttctggaaatcctattttccagagtgttagccattatatccatctttcagtattggagtaacagcagtgtacctatcattgtgtattacagttgaagtgtacaaaatggtaaaaggcatacttgtacccacaagaaaatatgttctacagtcttgttgaaaaaaatcagacgtacttttttccttacctttttaggttaatattcatgaagggatatatattgttttaaaatattttatagggtatacaggaacgagacagtcaaattaagatgctcaccgaacaagtagaacaatatacaaaagaaatggaaaagaatacttgtattattgaagatttgaaaaatgagctccaaagaaacaaaggtatttttataaatatatagttattttatatacaattatgtttttaacgactttatttttattaaaataaaatgtcaagtcaatattgagttttctccatttgaattttatattttcaaaaaattgtacaagatatttattattatacttatattactagtgcttacatttgtaaatgatggatgcattttctattatttttctcctctggtgaaaattacattaacgtttattaccaggtcactggtatgaaagaaatgaaaaattgtgatacaattatttttatttaactttttataattaacaaagaatggaagataataaaattttgaccagtgtaacagcattgcagatagttttcagaggtaatttcacattaatcttacccaaattaatgtttcatcatattctccttaccctgagccatattaccttttttaacacatcaaattctatgaatataagttcttacaatatctgtgttgttatatttccatagcactacatactatagttatgccagggcacactagtgcgaactgttcatgggaaattcatggacatgtttattataattggtgactatgtatatatgtatacactacatttatacacacgcgcatggaatcactatttcttcttcatgtcatatatatatacatatatacacatatatatacatgtcatatgtgtgtgtgtatatatatatatttgtatatatgacatgaagaagaaatagtgattccgtgcacatatgtgtgtgtaagtgtagtgatgtgtttgcaggtacggttgtaatttcaaaaatgaagcaaaagccttgctcaggagataattgaaccaatacttaaaggaagtaaaggagtgaaacatgcagatggctctaagcagtgggaataagttcaaaggcagtaaagcaggagtgtaccaatcatgtctgagaacaacaaagaagtctttttggctggagtagagtcagcaagtgaggcagtgataagaccagagaggtaaacagaggccatatcatatggggccttatagttcattgtgcagacttggcttttaagtgagaagggacaccggggaaagtttctgaagatagaaatgatataatttgacttaggctgtgtttgcagtagactgtaggagtggtaaataagaatcagggagacctgttagaagactattgcaataatctggagaaaagtgatggtggtttggggcatggtggtagcagtggagttactggatgcagcagttctggatgtattttgaaagtgataaaaatggaatttgctaacagatcagatgtaggatgtgagagagagagaactcttggtctgaaccaaaagttttggtcatggtggggttgtgggaagagcaggttgagagataatcaggtacttaattttagacatgttaggtttgagatgcttattagacattcaagtgaaggtgttaagtaggcacttgtatataaaagtttaaggtttaggacaacaatctaggctaaagatatgtttggtaactgtctctgtaaaagtaattgaaataatgaggctggctaagatcaccaagggagtaaatgtaggttaagaagaaaaatctaaagagcttctactttagcagctggggagataaaaaggagctaccaaaggagactgaaaaggaaagcccagagagctaggaggaaaagcaggagtatggagagccctgaaaaccacatgaggaatgtaaccaaggaagaagaaacaactgctttcagagctgtgttcattgctgctgataggtcaagatgatcactaaaagttgactattggacttagcaatggtcatttttggttcaagagaaaatgggtagagaggaaatgtaataaagaaatataggaacccttttccaggactgtttctataaagagaaggagaaaacaaggtggtagcttgaggggaaagagggattaagaaaacatttttctctttaagatggaagaaataactcatgattttaggttaataggagagctccattaaagaagaaacattaatgaatcaatgaagtggagagagagaacttctggaacaataatatttttaagaatgcaatgggatgggatcctagtgtgccagtgaagaggttggccttaactaggaacacagagttcatccataattgtagaaaagaaggtagagtgtatagatatcgatgtaggtggcttggtagacatcctggtaatgggaatttgtggaagttctaaactggttgctgcttttttctcagtgaacaagggagcaaggttcttagctgaaggtgaggataggagaagatgtttcataagtttgaggagaaagaagagaagtgaaagtataaaatggtcatctgaaagattgaagacgtggagaatgtggtatgactgttgagtaacttcaagagcccacgatatatatatgtatttctatttatgtgtttattatatttgtatcagaacactttgaaagtagtttaaactgctttaaaaggatgactaatagtatggattgtgcgtattctaattactaggagaaaaagtggcaattgatctctgctgtcaaataaggaaaaggacttatctgataacactttagtcagtccgtagttatataatccctaaagctcacagaaggtgtgtgtactagactgtactctacatcttgaacttaacttgtaaaacgtaatggctaatggtattcttccttcataagattaggattaggtttagttatcaggaacagagagctgaagaataatggcaaaatcaagatagacatttatttctcatctatgtaatggcctagaattaagcattccagggtgttgccttcatctgccccatccaaaatggatggaatgcagctttatctcatgtctgtgtcccaaacagcaagacagaggaagaggggcaagagttaaaagcatgtgctgaaggataggcaggtaaatatagtgtttattgtgtagggccatgtggaagaatgataggagaatagatatgtggatggaagggagaatagatactgggggacaactcagcctgtgtcatgttccacagcttagatgttagctccagacagctgtgctcatttcttaaaaacttttgtgatctcaaacgtactagttttatgcctaagtccaatattaaatatataacctatatattagtaaatgcttataatgaatgagtgtgagaatgatctgtcaatcaattttggaatgatagcaatattatgttttggtcttttaacaatttagtaagatattacaagtaggcatttaggaagtttttagcttagtttggattaaatttagctgcaagtgacagaaaaatcaagcataatacaataatttaaacaagatagaaatttatttctctataatatagacaaagttgaagcaactagggcaggatttgtgtgacagatgctcaaatatcccctatcaggaaccctgtctcttgttgctgtgcctatctcaacatgtggtttctaactcatgtgaagttgccaccctcatatccatgtggatttcagctagcaggaaggaggaaagagaagagagattactcctttattttaaaaacatttttttttttttttttgaaattcacatatgaactttgcgtttatattccattactgacatgaccacacatagctgcttgtgtgtaagtggaaatttagttctttatttcaaatggccacgtgtcaagctaaaaatccatagttttagtacagtggacaaaagggaggttaaatattaggaacagctagcagtctgtatcacaatgatcattttttgtaaagcagtattttgcaaccttttaaaatccataccccttcagctaagaaggttttactgaacttcagttttttagtaaattgtattagtaaaaccaaaacaaaactttcatcttacaaatataaaatgacaactttaaaggatttttttttaatggcataccacttttcttgccaccatgttgggatcactgatttgaaggaataagtagtcaattcaattcatgatttttgtttttactctgtaggtgcttcaaccctttctcaacagactcatatgaaaattcagtcaacgttagacattttaaaagagaaaactaaagaggctgagagaacagctgaactggctgaggctgatgctagggaaaaggataaagaattagttgaggctctgaagaggttaaaagattatgaatcggtatgtatttttatcttgtcattcaaggagcttagaattattcttgccattcacagactattctgtgctatttactgcataccatttaaaaaacattccataagtatcttttgataaagattatcctcattaatttatactaaactattgaaacctttgagcatttactttttgccagaattgttttcaaacttttgatcacagtgatttgtccaaataatcagttttggtgaagcagcaggattacttttttttattatctgtgttcattgggccaccatgtagatgtgacaccactggccaatttgacagaatttatgacaggaacatactgtgtcaatacaacctgctctccactttttatactttttcattggttacaactaattcaagcaactaatgacttacttattctactggtattgctgatttgcttttactaattcttttagtattttggtaagtgttttttatatgtaatgcatattcagagtcactttgcctttaggatattatactggaaagttttaactgttgcatattacatcattattattactggatttggtttataaaagcacaataaaaaaccagtgtaatgatataaattataggcatatgtacattttcctttagacttagtaaaaaaaaaatcatgaacttgataaatttattcaagtaaaccatgttatattttaaattaaattggatatttttcagggagtatatggtttagaagatgctgtcgttgaaataaagaattgtaaaaaccaaattaaaataagagatcgagagattgaaatattaacaaaggaaatcaataaacttgaattgaagatcagtgatttccttgatgaaaatgaggcacttagagagcgtgtgggtaagccatgttttaagttacatagtttgcgcaacctgatttacaagtctttttttttaatttaaattttgtttattattatttattaagtagtttaatgcttttttcaaatgcttttataaaacatttaatacaaataaaagtggagctaacctgattgaagtggaatcagattttatggggttggagtggtgggtgggcagggctggaacattgctttatttggtctagcatctcctcagtaatagctgcttgtttaaaaagatgaaagtttattaataccacatatcagagattaacctttttttttcccaacaaaagtagggtctgtattacccatgtttgtttgcaaaatgctcttgtaacagatgagatatttaaacttcttgctctgtgttgtgattctcctgcctctgcctcctgagtagctgggattacaggtgtgcaccactatgcccggctaatttttgtatttttggtagagatgggatttcaccatgttggctaggctggtctccaactcctgaccttaagtgatccacccgccttggcctcccaaagtgctgggataataggcatgagccaccgcgcctggcctgttaaaatcttttaaagatttttaagtacttgatttttataatttagactacttacgttttactttgttcgagtattttaaggagtaattagtaatatagcttgagagtttatatatttattttaataaatagcctattagttaatattactaatttgagtgttatgatagtgcagactaagttgctgctttaaaatgaaaataaatatctaaatatcaatttcattattgctaaatttcatttaatgctttcttagttaaaaatgatcatttgtaaaaactattatctaaagaaaagacaaatagacaaataagtattttatacagatatatatgtgtgaaaagtatctaacttggatccgtagttgtgctaggaccccaaattagacttctgatcaacttggactatcagatcacagccttctgatcaacttggactatcagatcacagccaagaatctggaagttcctaaagatgacttctggcccgtctaggtagctgtcatagacatcatattttctgtgcttaaaaagctccaaatcttggtttataatttcatttaggtttttgttaggatttccattaataattgtgataaaattttaacttgggttacagtttaaatatctggaaaattctttcacagaaagttacctcattcttcagtgatactggctaagtgaattataaccagttgcttgatggtatatgacatttttgcagcttatttgaatgtttttaagtttttaattatattgctttctattgtaggccttgaaccaaagacaatgattgatttaactgaatttagaaatagcaaacacttaaaacagcagcagtacagagctgaaaaccagattcttttgaaagaggcaagtgtggtagtcagttgattattttcttggctgaactatagagaaatactaataatttatactttgcagattgaaagtctagaggaagaacgacttgatctgaaaaaaaaaattcgtcaaatggctcaagaaagaggaaaaagaagtgcaacttcaggtatactcagttattctaaacctttaaaaagaattattgataagtgagttgtctggatatgaaattatttgtgtcttagctgtttttgctgttctattgtggatctgctacaaatttaataaatgacaataataacctgaaggagataagtgagtgtcagtgggttcagtcctgaatctgaaatagacaaaaacaaaacaaaacaaaataacaaaaaccaagcaaacaaaaaagaaaaaaaccttagaattatggaatttttgaaaagttttatagtatagtattttaatttctagacagcaccaatatgttgttattaataataataaaacttagtagtttttatgttaatatatgttactcaacattttccctttccttaaggactatgcattgaaaagcttttcttgtaagttattattattattattattattaatatttgagatggagtctgtcttgttctattgcccaggctggagtgcactggtgcgatcttgctcattgcaacctccgcctcccgggttctagtgattcttgtgcttcagcctcctgagtagttgagactacaggcgtgagccaccacgcctgacttatttttgtatttttagtagaaacagggtttcaccatgttggcccaggctggtcttgaactcctgacctcaagtgatccatccactttggctccccaaagtgctggaattataggcgtgagccaccatgcctggccttaaattattcttttctaagtgaaagtaatgttttattgaatataaattaacatctttcttgggtttattttacttgagctaaagagaacagttggttaagttttataatagccattgcagtgcttttttgtaagaagaccacacagaaggactgtctttttcacttgccccaaatccccaagcacgtatatgagtaatagcagagtggttctttttagcattatgatttctataatacatccaaaactttctcaagaaaaaacttcatgatttattagtacaataatcagtttactcattactcatcatttatatttactttatatgtcttttaactggtgcttattaagtagcactttaatatagaataggcaaagaatggtagagaagatgaaattcaaaaattaggttctcacattattaatagttcattaaaagtgagctaaatgagaagcttgtattggctatgtagaattttggagggattttggaaacaattattctacctttgcattaaaacttgattgtaggttttaagaattaaagtgttggaatagtaggagggttattttaatgtttttagtttgttaattctcttatatataggattaaccactgaggacctgaacctaactgaaaacatttctcaaggagatagaataagtgaaagaaaattggatttattgagcctcaaaaatatgagtgaagcacaatcaaaggtaatagtaaagtattgcaaagagagtaaaggaaaatatttttttttttttttttttttgagacggagtctcgctctgtctcccaggctggagtgcagtggcgcgatctcggctcactgcaagctccgcctcccgggttcatgccattctcctgcctcagcctcccaagtagctgggactacaggcgcccgccaccacgcccggctaattttttgtatttttagtagagacggggtttcaccgttttagccgggatggtctcgatcttctgacctcgtgatccgcccgcctcggcctcccaaagtgctgggattacaggcgtgagccaccgcgcccggccaggaaaatatttttattgtgttttcatttcttccccctttatctcattcttgaacatctaatcttattattgttgttaaataagtagagggaaatatttgcttatttaacctgttgattcaaagattgattaatgagacattatttactctgaatacagattaggagttcagataaagcagagctgctgcataggagatcatcattcaataccccacagtcagatcagaatgagacagaagagaatatgaccataggatcattatcaagaatgttatctgaaattcaccatagtgtagaaagtggaatgcatccttttgtccctttaactagactttcttcatccatgcaagttaaagagaattcaactccagaaactattacaataagagagatttttaaagcaccatgtctgcagtcttcaagaaatctagaatcgttagtcagcacctttagtagggaaagccatgaagaaataaatgacatatgccttttttctgatgactgtatgaagaaggtgtcaagaagccatcaagcactagagaagactagttttgtacaaaaaagcaattcatcttttcatggcttatcaacagcttcagacataatgcagaagttatcacttaggcaaaaatctgcaatattttgtcaacaaattcatgaaaatagagctgacatggataaatcacaagtagcaacattagaagaagaacaggttcattcccaagtaaagtatgctgatatcaatttgaaagaagatataataaaaagtgaagtacccttacagacagagatattgaaaaataagcttaaggttaatcttccagaccctgtgtctattactgcacaatcaaaattatctcagataaattctcttgaaaatcttatagaacagttacggagagagctagtatttcttagatctcaggtgagtttttctccaaattatatttctgtggttgttcttttatgacgtctctaacaaagttctgtaacaattatagttagaatatttttgtttgcactttaacatcagttatacacattgtactttttaaaatctaaaatgcagtacattgatatgaactcattgacttgtctaatttattaaatttttctttagaatgaaatcatagcacaggaattcttgatcaaagaagcagagtgtagaaatgcagatatagagcttgaacatcacagaagccaggcagaacaggtagtgtaaaggcagaacattaaaagagatgattgtggtactaaagacaaaaaccgttatatctttttgcctcttaccatggatgttgggagagggagaaagtgggattaagatcaccatctgctttactgtttagattttagtttatttttatgattgctgctatgtcttcatagctcgttttttttgttttgttttgttatacttaattgatcaaacttttcttaacttgaaaattatagacttgtgatattttgttgaaaaaaatcaattttattctctctgcttttttcagaatgaatttctttcaagagaactaattgaaaaagaaagagatttagaaaggagtaggacagtgatagccaaatttcagaataaatgtaagttacaattatcttttacttttctgttcttatttttcctatacttaaaatcatgggcctaaaagggcgttaacacattctctgttttctaatctgctttactcctaattacctctgtactgtatatacttcagtctgtcactatccagttgatttgccttgctgttttcattgtgagagaatgttactaatatgaattttttgtgagaatatataactcctttttcttgtgtgttcttcaatcaaaatgaagttagaacaccaaatttaaaatactttaatataaagcatagtttaagttaaggcagaagtatgccttatatacgtgtgtatatgcacgtgatataaataggtctgtcatttaactcaactattcacgttggatttatagttgaatttttttgtatgtttatttacatttggatttttccaatgatgtctttggtatatgtgaaatatttgtcatctgtatagcatagtgtaaattgtgaaaaagatctgatcatccaatgagaaaactgtgtaattacagtaaaagaattagttgaagaaaataagcaacttgaagaaggtatgaaagaaatattgcaagcaattaaggaaatgcagaaagatcctgatgttaaaggaggagaaacatctctaattatccctagccttgaaagactagttaatgtaagttatttttttcatgttaatgtttttcccctatcactttagagagattttctgctgtgtacagatctccatagtttctgatgagatatttttagtcatttgaatcattgtttccctgtatgtaaagtgtagtttttcttgagctgctttcaatacttttcttctaccaattggataattgttattaatctgtcttcaagttcactgacattttcctctttatctgtgttcttttggttcaagggtcagcttgagaccttgaggagttttttacaccgactttggagctcgtttttgctgactcttttcttattgggattttcctttcacttatcccatggctttgggctgtatcctgtggttttctagatgagaaagatgatagatctctgcaattgcaccctgccctatgactaaatctttaaaaatggcaaagtcaatctttgctggtcctgtcttccgtatttgaggggttttttcccaaaatctgcttgcttttgttcattttctagaacatctaggtagttttttttcattcattttttatttatgggagtgtagatctcttaggaacttatgccatcagaagtattatgaaatggctttattctaaatgtttaaagatttactcattgctacaagaaagatttagccatcactaatattctatatatatttaccatatagggacttgagaatttcacaggattcagtatctgtatataaacttgaataatatacacattttagattgttaatatttaagtatatgtcatttatgttatctgaacatatttagcgtacattgtcatattatttcccaaatttgtgcttgatttcaaatgggaaaaaaattcttattatttattgaattgtttttttaaaaaaatcatgattaatcagtaattggatactttttaaaataacactataattgttaacagagaatgagagtgatactggtatgttaaaaacttcctgaggcaagaaaataatttgattcccattatatctttctcatactgactttccttctctgattggtgattttgttttgcctctgccactttgaatgtctaaaatgattctttatgctttttttatgtgaacatcttttgtccgtgatgatgcccactactgatactgtgtcccagatcaaacttaattttccaagggcagctctacttagtgaccaaatgaaaacacagtgaatagcccaagaaatcctaacttctatttatgttgacaatctctggaccttcctgaagccactgtttgcatagacttcatttacttttatccgggattgtcattgttttttcagattcataggccctatctgaaattcacaaatcacctagcaatacttctctaagaaatcttcagaatccatgacaatttagaccagacaatgctggattatgcacttcagttcactttttgttactacaaggtatttttcagtgcccccaacagctatcttaactcattctcattttaccaaagtccatgtagacacggcactattcctcaatgagacaactaactagaccaccttgttgtcagtcagagtaccttcctctacctacttttatcttccttatatcctctttgagttagtataagttattactctgcatgacctgctctaatctccttcaggggaaggcttttacaaatctactacctagagttaaaccccagatcaccttcctgagtaggagattgcatttggttctattcattttaccttatttggcttctaccttcactttttaagacttactttgcctttaacagttttttccatacagttcatctaaagtccaaatatatttattagatgtgtgcattgtgtgtatatacttagatatgccactgttggagatttcgggccagtgatgccactctgataatattttaatatttgacatattatttttgcttactcattattcttagataatatcatgttatgataccttgcctttatttttatttatgcttcaactatgtggagaggaagcactgaaaaattcacttaattgaatgttgtattgatcaattgttcaatattgtattccattcctttgcgcatgctttgaatgcaggtgctatataatttcagagaaaaatacctcattttgactgtacaaaaaccccatgtagggagcagagctcacattgttttccccttttagagacaagaaaactaagatacagagaatttaagtcacttgcccagctgttaagtgactgattaaaatttgaaccctggtcatcttattcccgtctggttgtttttctagtctaccagtctattaagattagctaggtgttttttaattgttttaatgaagtaattactatgcttggtaatgtaaatgaaagttttatagattcataaataagaatttgaattggcatactttattatcatgcttggcaatgaaaataggaaaatgcttaaatgtccattttatttaaagacagactgttttttactatgattttactgtttttctccacatttctaatatataatataaatttgctaggctatagaatcaaagaatgcagaaggaatctttgatgcgagtctgcatttgaaagcccaagttgatcagcttaccggaagaaatgaagaattaagacaggagctcagggaatctcggaaagaggctataaattattcacagcagttggcaaaagctaatttaaaggtgagaattttattaaataaaagaaaatgctaaacataagaatgtagatttaataggaaatttttaattttttaaaaagaatgctttatgagaaaatgccccttgaattaattctttcaatattaagaaactggatttctcttataaaattataagtggaaaataagtgccttataagattgaaaagaatacaaaaattctaaatctcatacctaggcatttctaagcagaaactgaagtatggttgaggtaaaattcctggcagggcattcacatatctgtcaatttgtctttctttgggtgtaagagttgtgattctcattgctggatttttttttccagatagaccatcttgaaaaagaaactagtcttttacgacaatcagaaggatcaaatgttgtttttaaaggaattgacttacctgatgggatagcaccatctagtgccagtatcattaattctcagaatgaatatttaatacatttgttacaggtattgaaaattttgttacaggtattgaaaattttacatgtgaataacaaaaatcattggtagtatgtttctttatgtttttatttttattttactttattttaatttttccatcaccaaagcatgcagatagtacttttctcaatatttagtcttcatgtattcctgagttctcaaaatagtaacagtgaaatatattttttatggattttgatgttagatggattataaataaaagcaatttataccattcattccattcatctgcatgagcagcatgttcatacatcttgttcgcacacctgtcattcatgtgaaatatatggttcacaagcagaacaacaagcagctattataaagcagtgttaagtaaatgagcacttttatttcttgctgggtggaaaacaaaagaataaagtctgtcaaggctttttagtgtcatgatagaattgttcccctttttgcattcacaagtaaaaactactttttttttgagacagagcctcactctgtcactcaggctggagtgcagttgcgctatcttggctcactgcaacttccacctcctgagtttaagtgattctcatgcctcagcctcctgagtagctgggactacaggcatgcatccctggctaatttttgtatttttttttagtagagatggtgtgtcgtcatattggccaggctggtctcaaactcctggtctcaagtgattcgcctgccttggcctcccaaggtgctagggttacagacgtgagccactgcacacagccataagcaaaaacttctaaaccaaattattcttcatctttgtcttccctttacgcaataaaatgttaatctaccaccaaagaggaaagggtactctactatactacctgccctgggtttctcagttttgctgtctatataatggtcgttatgaatgtcctaatgacagatccttttcattattttatttgaaatttgactatctataacatcacatacattataaatataattacaaatatatgttcagaatcaatgaaaatatatttttgattatatgggccactatttctctctgctaggtgatccatttgtgagtatacttgagttataattattaagtactcatttttattttggaaattacagtaattcatctttttctcaatattgggatttttattattattttatgttgtctaaggacagccttaactacttattagaatattgctttgtatgtgatattattatttttaaatgtataattttaacattattatttctcttatttacctgaggtataggaacactatcagcaaatattggtagtatggcattgtcgtattttttgagataaaattcatgatttttaatctttgtataagaaatatatcagaagtttgtagtagattagagagtaccaactgggagtctgaaaagctgtccaaagtggcaaaacaggtacttagactctcaatcctaaggctgtatagagctataaacgtggcaagacctttggagtcagacagacccaaactcaaatgttggatccatgtatatggaaagcacctgacaacaagcctagcatatgtacttggtaaaaatgattgccaagtgtagtgttaatgagtttttggatattgagtaagttatttaaatttcaatttcatctttaaaatgaaataattggaaaggataatttgagtgagggtatgaaattatgtgttcataagagagggtatgtggccgagtgactagaggcgagtttataactattctatctaataaaactttgtaatctggtaatttgtgtgctaaaaataactttacctgttgtatagtactctttttttatgccttaaactaaagtgttcaaaatatcatggaaaaatgatctgtgttgcttacagatttggtgacttttaactttcctataatgttgtcagaatatgaatttatactttcaaattcagcatttattctattgtgtttttttttgcattcttatttctaaaccacttttcaggaactagaaaataaagaaaaaaagttaaagaatttagaagattctcttgaagattacaacagaaaatttgctgtaattcgtcatcaacaaagtttgttgtataaagaatacctaaggtataggtattagcaaaactataaatataattgcagtatattcttgttaattgtgaaagtaacgtaagaataatttatgttttgttcttcccttcttcttcttcctttgcaattgtatttttttttactctggtaactactgttaggaacttatttatggagacagtgtagcttaatgattacattaagcctgggattatcctgcctgggtttgagtcatttaacgtttgctttttgtaagagcttgagcaagtcatcttacctatctgtgtctcagtttccttatctgtaagttactttgtaagtaatacccttttcataggattattgtaaaacgtaaatgaattattagatgaaaatgctcggactagtgtgtggcacatatgaacagtttgtaaatgttagctgttgttagcatcattcatcatcatcacaatcatcattgttcatatatgtttatagggaactaacatatttctccttatttctgtcatctcatctaaatcaatagaatgatttccttaataggaattagaatacctaatcaaaggtgatttaaacactaagaataattattatctgacctaaccagaaccacaaagctagttgtagggcaggtcatatttgaaggttgttgttatcgcctatgatggttgtaaaatagctgcatgaattcaagaaagatgatgtgcccattgaagaagaggagcatttttttctacatagcttttatttttaaataaacatttttttctggtgatacctggcagacattgactccgatctcatttgctagaattggatcacatgtccaagtctgaaccattcagttgcaaagagaatgataccgctatactgggtttatgccaagaacattacacatgtttgtggaatgctcatgtgtagacaacagtgtcttacacaacttcaaaaaaataatttatatataaatatgttttaaattactttttaaattcacaagaatttatggtatacaacatggtgttctatatatgtatatactatgctatacaacatggtgttctatatatgtatatactatgctatacaacatggtgttctatatatgtatatactgtggaatggctaaatcaagctacttaacatatgtattacctcgcatacttttttttttttttccttgagacagagtcttgctctgtcacccaggctggagtgcagtggcgctatcttggctcactgcaacctctgcctcctgggtccaagttattttcttgcctcagcctcccaagtagctgagattacaggcatgtgccaccacgcctggctaatttttgtatttttggtaaagacggagttttgccatattgtccacgctagtctcaaaattcctagcctcaagcaatctgcccaccttggcctcccaaagtgctgggattacagcatacttcttcttatttttttttttttttgcactaagaacacttaaaatttactctcttagcaattttaaagtatataatatactgttattaactttggtcactattttaattagacttaagatgtgtttgtattcaaattattttgtaagcatttaacacccaaatttgagagtggggtcagaatgttggaatttgatttctagaattagtatagggtattattttcctactttttttctgtgttcaataaaatgtttataagattcagcttcaattatattataacccatttagtggtgaatcagggaagaatgaaaataatttgataactttgttgccttgcatttatttaaaaaatttttaattctaggctaaaccctttttaaatgaaagtttaacttcttgtgttttcagatactgaatagctatgatacctcttgtgttgagaaaactttaaatttgcataatctgaagttatcttttcttataaacattttattaggtttacagtattgtctttttgttttgttttgtttttagtgaaaaggagacctggaaaacagaatctaaaacaataaaagaggaaaagagaaaacttgaggatcaagtccaacaagatgctataaaagtaaaagaatataatgtaagtaaaacatttttaacattagtatgcaatattgtacaaagtaggatagctagattcaacaagtaatatggatgtgtctttgtgcagaatttgctcaatgctcttcagatggattcggatgaaatgaaaaaaatacttgcagaaaatagtaggaaaattactgttttgcaagtgaatgaaaaatcacttataaggcaatatacaaccttagtagaattggagcgacaacttagaaaagaaaatgagaagcaaaagaatgaattgttgtcaatggaggctgaagtttgtgaaaaaattgggtgtttgcaaagatttaaggtacatctgattcttattttgctttttctgactatgaaaaatttcaaatatgcagaagataggatggtatcaataatgctcatcacctgaattaatagttaacatttattaacattttgtcataattgcttcttctgatttttgtgggatgtttgaattgcagacattcctcccctaaatatttaatgtacccttttgaaaaaggcttttttctttaactaaccatagtaactttattatacctaacaaaatgacagtaattttctaatatcgcctaataccctgattatagtcacattttttacattttttgatcaaagaataagcatttggatgttacatctcataaatctttttaatatagaatccccttggttttctttttctccaaaaaatgtttgaagatgtatctaacttttgtgtgtgtgtcattttacttgttcctgtgtcccttgtattactaaaagttaggtcagaaccctaagttacattcaggtttaaacatttttggcaagaatacttcataagtagtgttctatactttatattgcatcacttcaagagtatctggttgttccatgttttgtaattgattactctgttaaggaaaagacaagcagaccaagtatggtggctcatgcctataattccaacattttggaaggcccaggcaggaaaatttcctgagcccagaccagcctaggcaatatagtgagactccgtctctacaaaaaatgtttttttttttgtttgtttgtttttaattagcttggtgtagtggcacatgcttgtaatcccagctacctgggacattgaggtgggaggatcgcttgagcccaggaagttgggggctgcagtgagctgtgatcatgtgccactgatctccagcctatgtgcctgtataacagagcgagtctctctcttaaaagaaaaaaagaagaagaagaagaagaaaagataaccatatacctccattattaagcaatttagctaactggtgatattttggtaccatacaaataacaaattatttgtcagtcctaatgattttagcatctgctgatgattgttgcctaacccaattattaaaagttgcaaacatcataattttctagttatattatgcacttacatttattaacagacatgcttttgtaaaataaatagcgtttcctcattagcccaggctatttgtttatcttgaagtttagctcctactacaaaggcaagataaatgcttttctctttaattaccagttttcagaatacacacttggtgtactctgcactacctgctttttttgtcccctccgctttctcttttttaagtatcagattagactcacagatttttaaatattccatgtgttttagttggagtcatattcttttgtctcaactttagccaaagagagtcctttaaagttgactcttatattgtcttgacaaaaattcattagtcttttgaacgaagcctcaaagcttgacttgttttctagcataagatgtcttagacttacctacatacttcatgcccatacttggaataaaccatttctttaaagagcccaggttccttttagtggggaaggcatttagataccaaaaactggccactgggcatcattgctctcagagtatcattgccactagtctctcagtagacaagttagaaaaatatgtatatatttaaaccatgagttcatattgttatttccagtttaattataacattatggggtaagtaaatagtatcggatttttactaagcttctttgattttgcacttgtatttttttcttacatagaaaacctttattattaacattaaaatatttgttttatcctacaatatacatacaataatttgaaaaataatacttgaattgatattaatagtaacaacaacagcactgctgccaaacatagtttaaagttttatttcaggtcttattttcttcagaatatatcttgctgagaatgtataggcaaagtattctacacttacttgaaataattgtcttcatgcggttatgttatacatttgatatatagttaggctcatttgtttttcattttttttattttagggatttttttcctttattgaattttaatatatacaatatttatatatgcaaaatatttaatcagagaaatcttaattctggtcttacgcctttcatattattctgctccaccctctgtaggtaacttattatctttctcatgtttcctttttggaaacataaacaaagacaagacaggttacatgacatgtatacccttctgcacctagttttataccttaccttgtagtttatttttaagcatgtaaatgttcaatgttcatgactaaatttggacaggatcataggaacacagaattcaaagtgaaattaaaatgggcttgggttctttactttccactttaaaggttgtaatgggtgatgtcaggctaataaacctattttcagcttgatctaaagcttaatactgagcatcaagaaattctttaataaatataagtgatatttattcagacatgtaataaggaaatgttcatgtcttatttttgtgttagatttttttagaatctacttttgttagagttttataaatacagttagtgtttgagatagaaagagaaaagaattagttttcttcctcttctacctgctcatgaacttgatttttttctcccaacaattgaagagccaagaaaaagggagattcttaagagatgggaaatagaatctcatctacccctgtttcccccagaacagtgaaactgaatcttaagggtaagatagaatagtgtgtacttaacttagatggagaagaaaggctgccaaaatgagatctgaagcgctattacaaatatttccatcgttactgtacttcagaatgaattacaaccgtaagtttttttacttcctcattcataaatttgattattccttataccacttctcagctttcatcattctttattgtacttttctatgtaatgtttgcctattatacagcaacttaagagaactgtaagtttggacatttcattttggtgttgataatagaatatctttgaatagttctatagttgatgagtagaaccatgaaccaagtaacttaaagtccttgatgttatttattacagagaactataatagaagctctcccgctaatgtttccatcatgtgtacaaaaagttttcttgttattaaagctagtccgtttaacttacaataagcataaatagctaagctgtgaaagttacctgtgataatgctaattttcccatttattaaaaggcaagttgttttccgatcataagaaatttagaaaagccatccaaagataaattccgagtgatatattcctgctgtttgttatgttttctcaaattaattgagttttattttacaatgacaggagttattaaagtattttatttttattatgattaagattttcaaagtaacatttcttatatgaaagaaattatgttaatgcatgtttttcttacatgggaaatcatatattttaaaaatgattttaaaattcgttttactttaagttgtattatctttctcaaaagtggctagtgcttgaccagaaaaaaagacaccagcataactcagtgtatctttatttacataggaaatggccattttcaagattgcagctctccaaaaagttgtagataatagtgtttctttgtctgaactagaactggctaataaacagtacaatgaactgactgctaagtacagggacatcttgcaaaaagataatatgcttgttcaaagaacaagtaacttggaacacctggaggtaagtttgtgtgattcttgaaccttgtgaaattagccatttttcttcaatatttttgtgtttggggggatttggcagattttaattaaagtttgcctgcatttatataaatttaacagagatataattatccatattattcattcagtttagttataaatattttgttcccacataacacacacacacacacacaatatattatctatttatagtggctgaatgacttctgaatgattatctagatcattctccttaggtcacttgcatgatttagctgaatcaaacctcttttaaccagacatctaagagaaaaaggagcatgaaacaggtagaatattgtaatcaaaggagggaagcactcattaagtgcccatccctttctcttacccctgtacccagaacaaactattctcccatggtccctggcttttgttccttggaatggatgtagccaacagtagctgaaatattaagggctcttcctggaccatggatgcactctgtaaattctcatcattttttattgtagaataaatgtagaattttaatgtagaataaatttatttaatgtagaataaaaaataaaaaaactagagtagaatatcataagttacaatctgtgaatatggaccagaccctttgtagttatcttacagccacttgaactctataccttttactgaggacagaacaagctcctgatttgttcatcttcctcatcagaaatagaggcttatggattttggattattcttatctaagatcctttcacaggagtagaataagatctaattctattagctcaaaagcttttgctggctcatagagacacattcagtaaatgaaaacgttgttctgagtagctttcaggattcctactaaattatgagtcatgtttatcaatattatttagaagtaatcataatcagtttgctttctgctgcttttgccaaagagaggtgattatgttactttttatagaaaattatgcctatttagtgtggtgataatttatttttttccattctccatgtcctctgtcctatcctctccagcattagaaagtcctaggcaagagacatcttgtggataatgtatcaatgagtgatgtttaacgttatcattttcccaaagagtatttttcatctttcctaaagattttttttttttttttttgagatggagtttcattctgtcacccaggctgagtgcagtggcacgatctcggcttaacgcttactgcatcctctgcctcccagattcaagcagttctcctgcctcagcctctgagtagctgggattacaggtgtgcaccaccacaccagctaatttttttttttttttttttttttttgaggcagagtctcgctctgtcacccaggctggagtgcagtggcgccatcttggctcactgcaagctccacctcccgggttcaggccgttctcctgcctcagcctcctgagtagctggtaccacaggcacccaccatcatgcccggctaattttttgtatttttagtagagatggggtttcaccttgttagccaggatggtgtcgatctcctgaactcgtgatccacccgcctcggcctcctaaagtgctgggattacagatgtgagccaccgcacctggccccagttgtaattgtgaatatctcatacctatccctattggcagtgtcttagttttattttttattatctttattgtggcagccattattcctgtctctatctccagtcttacatcctccttactgccacaagaatgatcattctaaacatgaatcctaccctgtgactcccatgtgactccccgccttaaaaactgtcaaaagctaccggttacctgaagggtaaaagtcaagtcccctacttacctcatgtcatctagagcaagagatgaactagctgagttttctgaccacagtgttctttcttatgtatgttcttttgtacgtgctcttttctatatatagggaaccatttctctcttccagttgttttgctcagtgaatttctattcctgtttcaaaacttgttcaggcattaccttttttttcttaagcatactttttttaatggaacaaagtcactcctgtctacactagttctgcatcttatacataggttttgtacatagtacatatttatatcacatcaaattatatgtgtttacatatctgtcttccttaatggaatataagtcttttgatataaggaactatttaatttgtttctgtgtgttgagtatctcctgtttggcacagagttcaagctaatacatgagagtgattagtggtggagagccacagtgcatgtggtgtcaaatatggtgcttaggaaattattgttgctttttgagaggtaaaggttcatgagactagaggtcacgaaaatcagatttcatgtgtgaagaatggaatagataataaggaaatacaaaaactggatgggtaataaagcaaaagaaaaacttgaaatttgatagtagaagaaaaaagaaatagatgtagattgaggtagaatcaagaagaggattctttttttgttgtttttttttttgaaacagagtctcactgtgttgcccaggctggagtgcagtggagtgatcttggcttactgcaacctctgcctcccaggttcaagcgattcttctgcttcagtctcccgagtagctggaattacaggtgcccaccagcacggccggctaatttagtagagacagggttttgccatgttggccgggctggtctcaaactttggatctcaggtaatccgccagcctcaacttcccaaagtgctgggattacaggcatgagccactgtgcccagcctgtttttttttttttaaaggagaccagtgaagtttcaggaggagggaaagaaaatttagagttactagggagagagtgatgaagataagagatgaaagtggtaataagggaaatagcaaaatatcagggtaggtgggagaaaaagagatttgtaacaaacaataggattatcctgtgaaaaaggatgaaaggaagaaaaaaatggatagaaagatatttaaaacaccctcagcctcctgttttccctcctgtgtattcatagtatataaaactataattatgtactttacttaaaaaatatattattattaccttatcgtgcttatttaatcatagcatgtcctctttttagtctcattaccctgtttgtattattcttcataacacttaatacctgacattgtattatatattggcttattttccaggtactccactcaaatataagttctaggatataatttatttatcactgaaatccattgcttagagtacctggcatgtagtaaataggcattctgttttttcaaataaaaaataaaggaacttaagatatatatttatgttatatcgccagcctttttcctcacagctctattctgttgtacagaattacctactttacaattcctgtgtttcaaggggatctcaaatttaacgtgtccacaatgaactcctgatttctgtttctctcctagtcattcttatttcaatatatgttcagttacctaaccagctagtcaaggcagatactttagagttattctgtagtcattctttttccctaccatttttgttttccaaatgtaatttatgtgtgtcttcttcatcctcgcagctctaacccttgtccaaaccagcatcatcactcatctggagttccacaatgtctttctggctagtttccctgatttctctattgacccctttattctccacagtgcagccagaatgattgtttaaaacttcctccttaaaatctttaaattgttttcttttatacgttaagttaaattccagttccttgtcttggcatgccatgccctgcctggtgtggcccctgatggtctctccaacttcatgttttactactattgactcttatttttgcttactctgcttgggtgctccagtcctccaaatcatttcctgctccaatcatttcaatcattttttcctctcagatcttatagtattccaaatgctttcttcctttggagcatctgggtttactaataaatacttcgtacctcacagttcagcttaaatatcaattatttggtggttaagacatccttcaaccgctctatctaaatgttcctttctattattcactggctcagtactctgtttttattttctttctaaatgtcaacttttttttttttgagtcagggtctcactgttgcccaggctcgagtgcagttgcacaatcatagctcattgcagccttgccctcctgggatcaagtaattctcccacctcagcctccaaaatagctgggattacaggtatgcatcaccatgctcagctaattttttgtgtttttttgtagagatgaggtctcactttgttgcccaggctggtctcaaactcctggactcaagtgattctcccacctcagcctcccaaagtgctggggttacaggtgtgagccactgcacctggtcgatactgacttttttttttttttgagatggagttttgctctgttgcccaggctagagcgcagtggtgtgatctcagctcactgcaacctccacctcccaggttaaagggattcttctgcctcagtctcctgagtagctgggattacaggcaagtgccatcatgactggctaatttttgtatttttagcactatgtttagtactgtgttggccaggcttgtctcgaactcctgacctcaagtgatccacccacctcagcctcccaaagtgctgggattacaggtgtgagccaccgtaatcggccaacattgacatttttagtagactttttgtttgtttacttgcttattatctgctgccttccacactctggcgaaatcctgccacccacccacacacacataggcactgaatgggcagaactctgaaggccagaattttatatttcttttcactgtaaacatcatcatctgtcactgatggcacactaggatgctcagcaactgtgtgcatgaaggaagtaagcactagtttgtgaaggctgcaaaactcttgagtattctaagagttttggccaaaatgaatgtacagctttagtggcagaagctaatactcagaaattgaggccgtatattggataacacaggatttggatgattattttaaaataatattttacattgtatatatgtgtgtgtgtgtgtgtgtgtgtgtgtgtatgtgtgtgtgtgtgtatatatatatgtatgtatgtgtattagtccgttctcatgctgctatgaagaaatacctgagactgggtaatttataaaggaaagaggtttaattgactcacagttccacagagctggggaggcctcagaaaacttaacagttatggcagaaggggaagcaaacacatttttcttcacatggtggccggaattagaagaatgtgagccgagcaaaggggaaagccccttataaaaccatcagacatcgtgagaacttactattatgagaatagcgtgggggaaaccacccccacgattcaattacctcccaccaaatccctcccatgacatatgaggattatgggaactatgattcaagatgagatttgggtagggacacagccaaaccatatcagtatgtatatgtatacaagtattatatatatatgtatgtgtttgtatgcatacatgtattatatatggaggaaattctaattttgtaaaaaactggattgtgagttttaaggagatgttatataaagttaagacaatgtcattttgtggtattggtctgaattacaatgtagtttcttagtgatatttttcctttattcagtgtgaaaacatctccttaaaagaacaagtggagtctataaataaagaactggagattaccaaggaaaaacttcacactattgaacaagcctgggaacaggaaactaaattaggtaagttttatgactctgataatataaaatgattaacatctaataatgaatatttcttatttaaagttccttttttatgctagattaaaaggaagtattttgactaaaaaaagaaagaactttctgcctaataatttaacttaggcagatgaataatcctgtacttaaccccaccaaagtttagttttcagtccttaagttagatttgtttctaatgaaatcatatatgttaaaaatttatgactaagtattagctactttgaaccgtttaacaattaaaactgatgatattttattaatggtattatgagttctttcactgagtgcaagttatattagttatatatcacttgatatttttaaattaaaagataccaggaaacagcaaagaaaatgtgaaaagaagttgtatttctcatagttttactactatattactgtatatttttgctcctatatgcttacatattttatatattttaaattattataaacatggttttatactgtatttagatagtaatatcaaaaatatttttatggccggcgcagtggctcacacctgtaattccagcacttgggaggctgaggagagcagatcccctggggtcaggagttcgagaccagcctggccaacatggcaaaaccccatctctactaaaagtacaaaaattagccaggcgtggtggcagttgcctgtaattccatctactcaggaggctgaggcaggagaattgcttgaacctaggagtcagaggttgcagtgagccaagatcataccacagcactccagcctaggcgataagagtgagactccgtctcaaaaaaaaaaaaaaatttgttttattcatcatacttataaatacttatacaatagcctaatgtgtttgagtgattaaatcactagctttttatatttttgctattgcttatagtgccacagtgaacattttcatgtatatctaacagagatattactgtctcagaaggtattgaaatctttgttgctctcattagagttttccatattaatttttcaaacagttatatagtttataagattttcataattttatctcatatattgtgcttcataattttcaaataaatttgctgctttcgataatgtattttcatgtatttgtttcctagacgttagagctattcaaggtttttattactaaatagagctgttctcttaaattggtaatgagatacttggtttagagaagcctaacactgggaaatcttacataagctacttttagaaatgtaatttttagctcaataagagattaaatatgaattgacttttgtgtagtatttgcatggaagaaggtaccatttaaatgaagacatgagagtattacgtacaattttagtaggttctttttattttatcatctttatttttaataaatgctgaattccctacagaaattctttaatttttacatatcttgatctctttcatatatggatttatatcaccgaagttttaagagtgtttccctattccctgttgcccttatatctttgtttaaaaatgtcacatcattagctttttttcatctaggaatttgttagtgttgggctgttgtgctctaccctctctttaagaaaactccaaacccaaaaacatacaagatggctagtctgcttcagcctttgtgatgtgcttttctcttctaatcagagtttagcacaatacagaatggagaaggactcctttatatattggtatttattgcagtatttttctacatggtgcctaaggttacttgaatgagtctttattccataatgaactgatttactaatgcttttagcacctgttagtgatccattattgttagttacttgattactgcttgccacagctattctaaaataatacattttaaagataaatacagaacataatgaagtactttttaaaactgagatagagaccaatttttttttcaggaaatgtatattactttgagaaaactcagttataaaacttgaacttatgaagctggaaaaacaggagggggcattattggtattgtaaaaggctgtttacaaagtgagttgctgcttagttcctttaagtaattggctaccctaaacacatcagttttaagttgctgaaaagcaaaacactctaccaaattttgttttttttctagaccatgtttacaaagcaaaagtatgttttcttccccccccctcaaaaaatgactaatgacactcctatgcgatgcctttttatggtaaattgaggcttttagttctctttccatttagccacagacttttgtgtccaaagacaagctgcgtaactgcatatataaggttaaggcataactactaataaaagaatgtaaaatatttgatattaggtctgtacaaagaccaaataatactcatgattagacaagattatatttggtagaatctatccatcatatggcttcagattttacttttcagcttggctttgtgagactttaaaaatcaagtcattgcacttatattcacaaagtcacattgctttactgcattgcttctcatacagtttatctcctttcagtaaaatgtttacttgccatttttaaaatttcttatatgtgacacttctacactaagtcctttatgttgttagttccacaattctgtgaggaataggtttttttttttaatcatttgattgatgaagaacattaagttccacagagattaaatggtacaggcatcacacaggcaggaagtaacagagctaagattagagtccaggtctgatggaattcagaaagctaatgtgctttccatggaactataatgctttctaatatacagcatctaaaatatctgaggtaattttaatataaacagcatgagattgacttaaatattattgcatgtaggtaatgaatctagcatggataaggcaaagaaatcaataaccaacagtgacattgtttccatttcaaaaaaaataactatgctggaaatgaaggaattaaatgaaaggcagcgggctgaacattgtcaaaaaatgtatgaacacttacggacttcgttaaagcaaatggaggaacgtaattttgaattggaaaccaaatttgctgaggtttgatattataagttttatcatacaattatagaataaagaattagttttggtagacattgtattattgttaagtggtttgtctggatctctgaaatatcttattaatatagtgcctatgttttgtgtaataaataaataaaagatttaaatctgaattgtttaaaaggaaagcagatatttctgtaagtttttctcaccaatgttatattattagatttaatttatgaaatgttatttactaaacaatggaattgcctttcaccaccatcccttcatttaacaaatatttattcattgcctattacatgtcagaccctgtgttgggactggcagtatagcaagaaacaaaatagacaataatctctactttcagggactttacattctaattggtggttttatatatttttgatgtggtcagaatcattaaactgtgtggcagtaaatatagtttgcaagtatttaacaatttatgattaaacacaactcttacagtgtttgcttaccttgagatttaatatattttcaaagcatttatatcatttttgttttaactatgtcactaaatctatatgagtaagattttattaactcatttggatttatttatagatgatacaattgaagtaaaatataatgagcagattgcattctaagcaaagtaagaatattgcaagttcagatattattagataatgagttgcctaataaaaatgacttttggtggattggaatataaccagagtttccatagtttgtttctgattctttcatattttttaccctccttcagtctgttcttaacacttcacacttaatataatatgtgaactaaggccaagtaaagaggattgcagtactttaaaagctaaattacaaagaaaacctcaccaaaaattgatgtatctgaacattttttgttacatttccttagcttaccaaaatcaatttggatgcacagaaggtggaacagatgttaagagatgaattagctgatagtgtgagcaaggcagtaagtgatgctgataggcaacggattctagaattagagaagaatgaaatggaactaaaagttgaagtgtcaaagtaagtgcatataagcattttagccatttgactagatgtatcttctttaatttgtctttaagaaacccaattacaggtatacaattcttagtagtaattgatactgatttctttttataagaacaggattaagtaatattaagatcggttttaacagggttaaataataatattgacgagaataatattgttaaagaggaagtgacctctcaagatttgcattttttagagttcaggaatattattgcagaaaggtccagttcctccacatattgattttttggggaaggggtgatggaggaggaatggttgtttattgtatttaaacttaagtttcttcattttaataagggagtaatagtacctcttctacctgtttcataaggttgctgtaagaatataataaaaaattcagattttgatttagtttacatttatcgggcatctactatgtactagtcacggtgcaaggtattaaacatatattgacttgtacaattatacttaaccttgaggttatatttttgttttcattttacatgaagaaatatgcccagctagtttagaacacaaaatatatataaggagtaaatactgcgtgctggctgggcgtggtgacatgtgcctgtagccccagctactcgggaggcagaggcaggagaatcgcttgatcccgggaggtggaggttgcagtgagccgagatcgcgccactgcactcctgcctggtgacagagcgagactctgtcaaacaaacaaacaaacaaagaaaaacaaaacaaaaaaaccgtgtgccagctatatgctgtattttcattctcttttgtaattaggtgatatttcagtagaaaagtataaggagcacttagttaatctgtcaagcataaatagtaaaaatattttatggcctactcataaaaatataaccattcctttggagccttgatagttctcttgggaatatcagtttttgacatctttttcactatgaaagacccttttttttaaaaaaattgatcctttcttctcatggacctcttttgatataaactaacttataatagttcattttaatcatattttgttaatcatgcaactggcaatgagagcctctcatcagtatgaggaaacctgccttatctataatactgaactaaaattattctaacccaaagcaaagaaactttacattttgctttgcctgtattagcttatcacagtattcatgagggaatttgaaggacttattaccattaggctatctctttttttttttttttgtaattttattaaatgcatgttttgtttcttttcacattactgataacttgtagattaaaacaaatcaaaacatgcattaatccatctaaggatcctagaaattttacatttctgtgttcttaactgtgtgatggtcttagataaatgtactaaataccttatcctagcatattccaaattatgacaataaatgttttatggaaaaaagtatgggaacagaagttctttggctatatacatttggaaaatactatatagtaagtatgatttgagataattatatatgatagaacctctgggagcactgaatatatgttaggaatattcaagagggaggagggatgttgagaatgaagttttttttatatagcaaacatgataacctctgatggaattatgtttcatgaaacagtttaggaaatcctgttttaatatttcatacaaagaagagatagatgctgaaaacgaatggctttttgaaaaagggtctagaaattttgaattttggcatttacttagaaagtgtacttaattgttcctgaaataccttatcatttcctagactgagagagatttctgatattgccagaagacaagttgaaattttgaatgcacaacaacaatctagggacaaggaagtagagtccctcagaatgcaactgctagactatcaggtatgtgcagtattggctcttctacatagaatccacttttttccctaaatttacattagatgttgggagtgggatatgttatactttttgtttgtttcgagatagggtctcattctgttgcccagggtggagtgcagtggtacattcaaggctcattgcagccttcaccacctgggttcaggtgatcctcccacctcagcctcttagacagctgggactacaggcacgtgccaccacacctaatttttttgcattttttgtagagacagggtttcaccatgttgcctaggctggtcccaaactcctgggttaaaatgatctgcccaccttgacttcccagaatgctgggattacaggtatgagccaccatgctgggccattgttacatttttaatcaaaagatataccaaccagaggctgttattcttgttagttggaacctgattagaaagctctttaatttgaaatattgttcagtaatccagtacagcatttaaatgcctatagatgaattatgctgctgatcaaaattaggacactgagaattgtagttagtaaatctttaataacaatattttctcttgtatttatatgtaactttttacatattcttacgttatatatgttgggaattataaaaacatacacattgtcctgatcagtattatgttacttgcaatggaggttaaaaaaaaactgtaacagtcaggcatggtggctcacgcctgtaatcccagcactctgggaggccgaggcaggcggatcacgaggtcaggagttcgagaccagcctgaccaatatggtgaaaccccgtccctactaaaaatacaaaagttagccaggcgtggtggcatgtgcctgtaatcccagctacccaggaggctgaggcaggagaattgcttgaacccgggaggtggaggttgcagtgagccaaaatcacgccattgcactccagcttgggtgacagagtgaaactctgtctcaaaaaaaaaaaaaaaaaacaccagtaacatacccactgttattcagttacatttggattttaagtttgtttgattctaggttttttcttttacagttctttggtaattatttgtattaaagcaaagttacatttttgtagatctcatgtgccactgtgttaaaactttgcttagtaaattgtgaattttaaatctgtgataactttcactggaaaaatttgaaacttactacaaatatatattttttttaatatcaggcacagtctgatgaaaagtcgctcattgccaagttgcaccaacataatgtctctcttcaactgagtgaggctactgctcttggtaagttggagtcaattacatctaaactgcagaagatggaggcctacaacttgcgcttagagcagaaacttgatgaaaaagaacaggctctctattatgctcgtttggagggaagaaacagagcaaaacatctgcgccaaacaattcagtctctacgacgacagtttagtggagctttacccttggcacaacaggaaaagttctccaaaacaatgattcaactacaaaatgacaaacttaagataatgcaagaaatgaaaaattctcaacaagaacatagaaatatggagaacaaaacattggagatggaattaaaattaaagggcctggaagagttaataagcactttaaaggataccaaaggagcccaaaaggtaaacatttaaacttgatttttttttttaagagacagtatcttgatctgtttcccaggctggagttcagtggtgcaaacatagctggaactcctgggctcaagggactctctagcctcagcctcctgagtagttgtagctggcagtacaggtgcacaccaccatacctacctaattttttaaaatttttaaatttttttgtagagacaaggtctcactttgtcacccaggctggccttgaactcctggcttcaagtaatcctcctgctttggtctctcaaaagtgctgagattacaggcatgagccactgtgcccagccaattttaaattcattatcttcaaaagagttacatgataatttcttaatatatgcctatatgaaaaatgcttaagatacaaattccaattatgattcattaatttagattttataacttagcagtgttggctatttgaatgtctattatacgtaaaaataaaattaggcttttctaaccaaagattttagtgggaatgttcagattgtataatagcaaagaattttaattactataggaaaatttatattaattaaacactaattattatatttaaacattgtagtagttatcagttgatttctactgttcataattatctttgatctacaagtagtgggcccacatttacttttaatatggtttaatcttcatttagaaagaattaaatgaaaaataattatcttgcaactacatcctgttctctaggctagaaacatttaggatttctgtttttgaaagtaataccaaagttccaatgacctgcttatagtcagtgttcaataaacgtataacaaatgaaagtgaatattagtgatgtccattccaacataatttgaagatttttattgtaaaatcccacatatttgtagaaaagtctatggaaatcctaaataagattttgtcatgtagtttgacaaaagataacattgtgtcttattttattttagaatggccattactttcaattaaaatcattatcatcaatggaggaatgttatttgttaatatagcatttatatttgtgtatataaattgtaaatcttaggtaatcaactggcatatgaaaatagaagaacttcgtcttcaagaacttaaactaaatcgggaattagtcaaggataaagaagaaataaaatatttgaataacataatttctgaatatgaacgtacaatcagcagtcttgaagaagaaattgtgcaacagaacaaggttttattttatatttatttcatttttttccctaagttttttttttttttttttttttttgagatggagtctcactctgtcgcccagactggagtgcagtggcgtgatctcggctcactgcaagctctgcctcccgggttcatgccattctcctgcctcagcctcccaagtagctgggactacaggcacccgccaccgtgcctggctaattttttgtatttttagtagagacggggtttcaccatattagccaggatggtcttgatctcctgacctcatgatccgcccgcctcggcctcccaaagtgctgggattacaggcgtgagcccctaagattttaaacaagaatattgcacaaatgactatgttatccttctaattaagtgcaccttccattactaattgattatataataatttgttttttattttctaaactattctaaaaattcatatttatttagcttttataacagtagtcttaatcttaaaaacggcaatacataagcaacctcatttggtaagttaatttttattttgatattggttatttgacttttcacagttccacgtttctactggctctcactgatagagtaagaagtcagcttcttatagaataaagtatatacttcagagacagatgaaattcgtcaaacatatgactgtctcagagattgttccccctgcttaaattgttcttaccctagatacctttggtatttacactgtcagtgcctgcaggtcttagctcaaatgtcttaccttatcagtgtatccttcaccagccacctaatatacaacagtaaatcctactatccagattcctaaatagagattaattaacttaatttttctccaaagtgcttgtaaccttctgacgtattacatacttactggtttattattgactgtctttccttcgccagaatgcaagttccgtggtgacacggacttggttttgtttactgccatgtttgtatttcctagaatgatgcttggcacataatatatgtcatcaaatatctttcgtatagctgaacggatggatggatggatggatggatggatggatagactgaaatccttacttcacatctgcctttgtgatcttacacaagttacttcacctctctgagtttgtatttttttccataaaaggaaaataattacagtttcttcaatgtgttgtgaggattagataagaaaatatatataaaatgcctgttatgtgcctgatgtcttcgtgtatgtgtctgacacaaattgtcctttttttagtttcatgaagaaagacaaatggcctgggatcaaagagaagttgacctggaacgccaactagacatttttgaccgtcagcaaaatgaaatactaaatgcggcacaaaaggtatgaatgattaatcttgtttgttactctgtagcatagtctagagtgttaactcacagaaatatttcctgtatcagatgtaattttaattgatgttatattgtatatttaaaatataagaggggtttaatctatgttttatcatacagctgtaaaaattaatagttactctcaatgctgcaactgcttttttaaaaaacatactatttcttaatagtttgaagaagctacaggatcaatccctgaccctagtttgccccttccaaatcaacttgagatcgctctaaggaaaattaaggagaacattcgaataattctagaaacacgggcaacttgcaaatcactagaagaggtaattagaagaatttgcattttgattagtgtattatttggtatgtttggggggctttctaaataatatttctttatgagggcaatgcatagaatgatgaatctattgctaatttcactatttttctattctcctataatgtttctaatagccaataatgaacagcagatatagttaatttgaattcactatttaattattagttggtacctttcggtacactgaatatgaaaggaaataaaaagcatttaattgtagttctatgagcaatatattctcttatatgatctctttattcttacttttttggttttattttgaagtgcatgttacataatctatgaatcaattttcagttcattgcctttaatgcatggttaaagggttgaaggtaaattagaaattactttctgttttaacctagatcttgaatttgattagtaggtgatcaaatctgtcatcttcattaaattattcagaaaataatgtaaactgaatgtgttttcattttagttttcatctaaataaactgcaaatacatttaaaatatacataaagaagtttttcaagtaaaactgtacatttttaatcatttcaggaaacgtagattttcttcagtaattttaagatttgtcatttatgtgaattgccattgaattacttaatttaaaatactcaccttaatcctcttgaagagtaaaaatttttctgtttttttctctttgttttaataagctgcggattttatattcgtaatttattgagttgggcctctaaaattccagttttgtacttaactgacttatagattagtctcctaatgctctgctagtcaatggaccaaaataaaagaaataatttattacatattcttcctaaatctagtaccaccatacatgtataattctaaactgtaatatctcaataaagtaccttaattaaattttatgttcatcataacaatgaagtttctagcatatgtaatagtcttataaataagcatgcaaataactgctgtcaattagaattagtcagtttaaccttattaagtatcaaatggctattgtacatatgatgtgaaaaataaagtgaattttttttggctaataactaatctaaaattcagatgaagcattttaaagggaaaaagatactttaatgatttattataatttaatcattgcagaaactaaaagagaaagaatctgctttaaggttagcagaacaaaatatactgtcaagagacaaagtaatcaatgaactgaggcttcgattgcctgccactgcagaaagagaaaagctcatagctgagctaggcagaaaagagatggaaccaaaatctcaccacacattgaaaattgctcatcaaaccattgcaaacatgcaagcaaggttaaatcaaaaagaagaagtattaaagaagtatcaacgtcttctagaaaaagccagagaggtattttattatattatgagttatgctgttatccattagtttttttaagcaaatgctaaatattattttaccctaaagtggtatttcttttcttgctttcaaatgattctatttaagaattgttacttgcatgtgattggattacacctctgtcagtaaaactggaagtttgtgtacatgtatctttctattatacactgactaaaccacgagtagctatcatggtgaaatcatatgattttgaaaaatattttaattgagtttataggtgaggattgaggcaatagggtggaatgaaatatatcacaccggtaatcagtagaaatcagatttgttagaacttcgtgggggaaagctaacatttaattttttctagaagtaagttaaaagatgatagatacatgtcattctaatgttaagaataaattatgaactgaggctgggcttgtcaacttgaacattgtctgaggggacatgcataccagtctagatacatacatatatggagatactgtttcttcctcatctcaaaggaattttagaagattgaagagaaaatatataaggtcttcaaaatgtgaatttgttttaatcacaatttaagatatagtttcgattttctgtaaaacaggagcaaagagaaattgtgaagaaacatgaggaagaccttcatattcttcatcacagattagaactacaggctgatagttcactaaataaattcaaacaaacggcttgggtaagattctaagaactttgttccattctttattgatttttgtgaccatgtaaattaaaattcagctctcttcttttttggaatggaagttaccctttttgttgccaaaataatcttctgaaaacatagctctgatcattcttcctcctgtagctcaccgctgttcacaaaattatatttataattcttagccatgtactcaatctgctatgaacctacctgcctttcttttcaaattctactcactgtgagtttagctatatctaacttccagaattcagctcatatttgcctcttttgaccattctgttccatatgtatgaaatgacatgtctttcatcttttaatgtgtaaccttagcatatttgagcattacctcgttaattcggtcaacacttattgatctcctgctacgtgcagacattttgctagctattgtaaatacaaataataaagtctgcatttcctgtcttctttaagccttcattgcctattaaatcattacattttagattagatattatattttgatcatttgaggaaccaaattaaaaatatggaataagtatggcattgaattatacatgcctattgctaatatattcatattttataggatttaatgaaacagtctcccactccagttcctaccaacaagcattttattcgtctggctgagatggaacagacagtagcagaacaagatgactctctttcctcactcttggtcaaactaaagaaagtatcacaagatttggagagacaaagagaaatcactgaattaaaagtaaaagaatttgaaaatatcaaattacagtaagtcttcgaaatgtattgtaaaaataggcaaatgataagtgatataatgaagataaacataagtgtttgctatgccaggcactgttctaagacttttaagtatattgtctcatttttatcctcaggactgctggttacatatgttatcattttccccattttaaagagaggatatggcctcaggaatgcttaatagcatgtctgggggtagatgggaaagccataatttgaaactagtcagtctgactcaaaagccaatacaaattcttttccagaatctcatttttaccttctttgagcctcagtttcatcttatttatttatttttatttttgagacaaggtctggctctatttcctaggctggagtgcagtgacataatctcagctcactgcaaccttgaccttccaggctcaaaccatcttcccacctcagcctgcagagtagctggcactacaggcaggtgccaccacacctgggtagtttttttgtatttttgtagagacaaggtttctccatgttgcccaggctggtcttgaactcgtgagctcaagtgatccgcccacttcggcctcccaaagtgctgggattacaggcctgagccattgcacccagcctcatcatctttaaaatggaaataataatacttaccctggccctttcagggtggttatatgaaggtcaaattataccgtgtatgaaagtaatttgaaaactgtaaaataacatacagatagaaaacttttgattacacacttataagagtgtctgtcatataatagagattctaaacattgttcaaccactttatcagaacgtagattttaaactcaaaataggtttatagttaggtagtttctaatcattataatattatctctatgggcctaaattttattatctgaaaaaacatgagaaaattgaactgcttgacttataattccatttcagctctcaagcccctgctagagtctttgattctttactcacttattcaaatgcctctgacagaattaacactatttttgctttgctaaggagctgccactgttaagaaattactctctaaaagaaagaaaattggcaacagcatatgtgtattttcagtctcttttcctcactctattaaattttgtacaagagatgttatttttggtctagtaaatttctgtcatgttttggagtataaaattacttgtgcttttgcatctaatttgtgggtgtagaaaatcataatcttttgaaataccttatataatacatttttttgccacaggaaatacttgaagttattgttgtgtaccttacgtcattttagtccaaaattatacttgtgttctctgtgtgcatattttgatatgtattaggagattatggatctgtgtgatttcttaagtaaatcctgatattttcacaatttgatgatgactctttaaagttagacttaagttttgccaaaagcaagaagcctcaaagagtaacatttgttcatgtcttaacactatctccctcttattggtcagaatctcagtatggatgcagtgtccatatgcacaacaatatattaattcagtttaacagacttaatgctgaataagcaataagattaattgaattaactaaatcttttgatagtatccacttccatatatatagttatagatataatgctagtgaatttgaaccataaacaaattaataatacatgtgatttctgtgaaaatttatattagtcttttcaatatgtcaatatagggcagtatttctcaaatatagaggatcagtttttcaccattgtccctcttggggacatttggcgatgtctggagacatttttgattgtcatggctcgggggtgctactggtatccagtgggtagaatcaaaagatgctgctaaacatcctatcatgcacaaggcagccccaccaccaacaaagaattatccagtcaaaaatgttactagtagtatggttaggaaactatcatatagaggaagcaatcacattttacaagagccataatatttaaaatgcctttttgttcattctctgtatatttgactagagtcacaaaataacttgataagattgttgccaaaaatattagaaactagaagaaaaatgtgttgttaagtctaagagtagttaaatgaaataaagaattattcttctttggatttggatgcctgcatcaagatttagattgtaaggatacttaggactgaacatttgctctatatgaaatttgtattaatcaaggtatgaattgcagcaaccactctattaattacatatgtttggccaggtgtggtggctcacacctgtaatcccagcaatttgggatgccaaagcgggcttatcacctgaggtcatgcgttcaaactggcctggccaacatggtgaaaccccatctctactaaaaatacaaaaattagctgggcctgatggtgcacgcccgtagtcccagctactcaggaagttgaggcaaaaaaatcacttgaatctgggaggcagaggttgcagtcagccgagattgcgctgctgcactccagcctgggtgacagagtgagactgggtctcaaaaaaattaaaaattaaaaaacacacacacacatatgtttatttacatcaggcttcaagaaaaccatgaagatgaagtgaaaaaagtaaaagcggaagtagaggatttaaagtatcttctggaccagtcacaaaaggagtcacagtgtttaaaatctgaacttcaggctcaaaaagaagcaaattcaagagctccaacaactacaatgagaaatctagtagaacggctaaagagccaattagccttgaaggagaaacaacagaaagtaagtaacaacagaaaattatcaacatttaggaaaaatatgtggtagattgcttttagagaagatttgtaaatttataaaagatggtagtataaatctccgtgttgtaataaaaagtatgagctttatcttatgctgttaaacaaggtattttagacaatgctgtttttgtgggcagatatagtccaatttatctttttatgttttcgtcaatctgatttgtgaattatctatatgaagttaggaaaaatcttaatgtacattacaaaaatataatatatattacattgtattttctttttttctactggaattttatgctactgaggctatttttaacaaatgaacaattttgaacaatttgagggattgagggaagtatgataatgacaaaaagggatgaaaaaagggggtcatagagatgtttttgtgagaaggagttggtcagtgtattctgatttattagggttttttttagtttatctcagatttgatctatttaaattgttttagaagatgctggtgtttttctgtgctagctatgaaatttatgggtaaactttaagcctttcctagtccttttgttgtctacctaaattcaattaatttcatatggaaggatgtagtaagtgagtaatataaatatctaaaattggatgtttgaaaacaaaacatacctgttttttgtaatagcttgatttaatgctgagttctcaaaatcattattaagattttgaactttcacattcaatgtggaaagaattgagtgtaattacaaaagatttatttgaaaaagttgagttgttaatttgtgaaatatgttccattaaactcataatattttagaaaaatagtaggaagtaataaagcttgtttattttttatatcatatattcatataaaatgtcagttttcctttaaaaattacattttttttttggttaatttttaggcacttagtcgggcacttttagaactccgggcagaaatgacagcagctgctgaagaacgtattatttctgcaacttctcaaaaagaggcccatctcaatgttcaacaaatcgttgatcgacatactagagagctaaaggtgaacatcaacacgtgttaatgtaacaaaatttctgataattcctattggaagagaattcactatgatatatagtaattttgttgatgaatagggaatttataatgcactgttggtggctagacatagacacacacatgcatttttcaacaataagtctctttatgatactcatttactgattatcatcttggggattaggaaaggataggccattatgaactactgtttctaatgaaattaaatttaagaaatattttacttaggattttttttaagactttattatttttttagagcaattttaggttcacagcaaaattgagaggaaggtacagagatttcctgtatatctcctaccctgaaagtggtacatttgttaaaattgatgaacctatattgatacatcataatcacccaaagtccaagtttacctctattttagctcttggtattttacactctgtgtgtttagacaaatgtataatgatatgtatccatcattatagtattatacagggtattttcactgccctaaaaatcttctgtgcctctcttcttcattccttcctctgcacctcaccaaacccctggcaaccagtgatctttttactgtctccatagtttcaccttttccagaatatgttatagatggaaacatacagtgtgtccccatcattctcaccataggacagctaggaactcctttctagtggcatacatattgtctagtattgtaagttacccttttatatcttatctttgtaaactaggttagaaattacttcaagtcagagatttgttctgtactactcttatgcttcatagtgtttaaaacgttgtcatatatattgttatatacttgtttgtttaattaattcagccaaaatgaaacgtgcatatttgataaaattttgtttgtgggtgtttgttgaagatgaattgctttacactagttttttttttttttctcaaagtcgacttttttcctcaaggtagacttgacatgaatatggaaaaatatatgtagtttgtggttattttttttctcttgtgtacttaaaaattcagactgaatttttcttataatggtatattttctgttttatgttccttttatcattgatacttcttgaagagtcatgaataatacctttctttttctcttattagacacaagttgaagatttaaatgaaaatcttttaaaattgaaagaagcacttaaaacaagtaaaaacagagaaaactcactaactgataatttgaatgacttaaataatgaactgcaaaagaaacaaaaagcctataataaaatacttagagagaaagaggaaattgatcaagagaatgatgaactgaaaaggcaaattaaaagactaaccagtggattacaggtaattttatatttaactctgataatgtctgatttacaatatagaggtagtagtttatttctactttatcattttatctatggtatttgttaaaactgactttcaaatcactttgattaatgtaattaatttcttttgtgacttctattgtgtttatagttctagagtagcatattagtatgttgtattaaaatgcagaagcagctaccagattatcttatgtattaagtgtcatttagaaagtatggtcagtgatagcttcagaaagttgctattatataattgaaatatttactgtctattttgttttacatttatttgtaaaaatataaagttacattttattttttagggcaaacccctgacagataataaacaaagtctaattgaagaactccaaaggaaagttaaaaaactagagaaccaattagagggaaaggtggaggaagtagacctaaaacctatgaaagaaaaggtatgtgaagaaacatactgacttatatgcttaaggtagtgacagagtaagttaaatacatagctgattaacagttaatatactgccttaatttgatgacctggctgtattaattctgtattaattttgaggactataagcagtattgaataacgtagaaaagtctaagtttctgttctgtaggaatttagagtctacttgaggagatacctataatgtaactcttatttggaaattactacatcaatttcattcatctttctgacattagagtacctctgaagttccttcacaccttaacatattcaactgtgtatcatttctctccaaagtaatcatttacacaggttggtgcttttgacttttgggacagaaagatagacattttaagataccccactttgacccaaataggtcctttttaatccttcaggagactaggctgttatttcagatagcaaagttatttggaatatcttcagtatttgcagtaataatcagtaaccaatctgctcatagattaattctgtgggagaaattgcttaaaattttatagttcatagtaaactgttttgtaataaaaattactgattgaaataaccccaaaaaaaactaaaattggctaaaatgcgtgtaattaaatttgttatggacaataaattggagataacttgttggtaacattcaaaatatcgaaagtgaactgggaaatgttgatgttagcagtaatatttgccattgaagaaaatcagtatggaggagctatggttaggaaaatttttattataaaatttacccagaaaatatttaatgtctataaaataatttcaatcacatgaaaatggaaaagaaaattctgtctttaaaggcattgaatagaaaataggtaatggaattcaaatttcttaatagagtatgctcccaaaattattttctatgaaaattcattaatgtcagtgtaatttattgacactatttgcgtggagtcacaacatgcttgctgtcagaagctttgctggtgaaaactgtaagatcaaagtgtccttaatcttttggatttccatctttctaactccctaattggggataggcctgatcttatccctaaatggggataggttagaaactggtatgtttgttcctaactggtgtgtttctataccagtttctaacctgattcctatcagaatgttttaagagccttgtggctttgcctggactcttctatgctacagtttatttagtttatttattcagtttattcctccttaaagtgggaataatactatctgtattgccagtttctcaggattattttacataaaatgatatgatatgcggaagtcttttgtaagccatcacatccatagcagtataagatattactactaactagaaagagaaaacaggggtctatgcccagtattaaaattggcattcaggaatctagtgagaatattttttcaggttcattgcttgggcatttctaatttatactcaagaaatgctttcatattgtttggaaattttagtacccttttctctgtaaacagaatttgtagtctacctatgtaacaaaacccacccctgtgccttgcatttcattctccttagcatttattactatcttaacatactagacatgtacttgtcttttgttcatcttttttttttctttttttattagaccataaactttgatggcaggaactttgcctattttatttattattgtattcccagcacctagaacaatcgctggcacatagtagatgctcagtatttgttgaatgaatataaatttttaaatgttataataatattattctgaaatctatgcatacgaagcttttggtacagaaaacatgaaaagagaactactgccttatcatccagtcttcttccctcttctcattcagtctagaacataacctgttttggaaaaagttctcaaaccatatgtttatcttgccctcaaaccataacaacaatcaatgcaaaagacttctgtgacccccagaatatgtggggatttctccacatcagcaagcaagcagttggttttgtagcagacaccaactgggtgtcgtccaattcaattcatcatctacctggagatagtgtcagatcccacagatatcttacttcgatcaaatcacaagtccaggcctccgtgacttccgaagttcccacatccccagcccccagctttgggtttgattaatttcctggagtggctcacagaactcagggaaacatttacttacatttaccagtttataataaaggttattacaaaggatacaggttaagagatgtgtaagaagagatatgggggaaggggtgtggaccttccatgcctttctggggtgccaccttcctctagaaacctccacatgttcagttctccagaacctctctgaacccagtcctcttggtttttagggaagcttcatgacatcagtatttcttctcctagggtatggggcaggaccccctcgtattagggttttaagacccacagtcagaaaggcaggggaagattacagtcctgccttagggcaggtgaaaggaggatgggagaaggtcagagagactcttttctgaggtgtgctcggaaggcctaacacactcaatattataactaaagatgaggacaagggctatgagagttataagccaggaaccatggaaaaaagcctatatgtaataacaccacaatacccatggtaccattcacgtttgttgtttttctgtttttcaattgttctttcagtcttggttcccttaatcttaatttagcaagtaatgccaggtgggataaaattgcccaaacccaacaaagtactgtgtgctgcaggattatttaatgacataccttatgtcccccactagtatttacatttctgggagtacagaaaaattcttgtacatatttcagaaaaaatgaaattaataactatcaaccacttagtgaagtttttacttttttttttgagatggagttttattcttgtcacccaggctggagtgcaatggcgcaatctcagctcactgcaacctccgcctcctgggttcaagtgattctcctgcatcaacctcccaagtagctgggattacaggtgcctggcaccacgactggctaatttttgaatttttagtaaagatggggtttcaccatgttggccaggctagtctcaaactcctgacctcaggtgatctgcccgccttggccccccaaagtgctggattacaggtatgagccaccacacccagactgaagtttttacattttttaaagggcacttattagctgaattaaataaggtaaaaaattgactagtattagagacaagaattggagaatatagttctctagtattcgagaaagtcgttttgataggacaactaatcttagtgagaatttggctttatttcatatttttttaattttttgagatgacgtcttactatgttgccctggctggtctttgaactctgggctcaaacaatcttcctgcctcggcctcccaaagtgctgagattataagcatgagccatctccccaggaatttgactttaaaccatggttctcaaccctttcagattcaacattccctttaataaaaaatataatgtttcataatttcccctttactattataattgaaatgcatagttaacataaactctacctacttacataatttcaaaaatgtcattatgaatgtcctaaatgaaatatatagggggaacataaaaggaatattcatatttcaacatgtaaatgctttggcatgactccattggaaaatataatgaactagtcatgtgcttgcaccttcattaatgtgagttcaaagctacgattgcagactgacacaaatgtgttctattggcaactgatgggtcatgatggtattgccatttgtaatttgatttccaaaatggtaaacaaattgttggtgcagttctcagcaaaacaatgtctataatcttaccttttataagactgttgtattcctagaaaacttagtgtatagtaaaaccattaaaaaattacttagtgtgaatatgttagttggagataaattcttagctcagaccagtgtaagcagaattttttactgtattaatatccagtagaacatttgaaagttgttcagtgcatgagactattctgcattggataggctttctttggctcctttatcatagttataataaaccatgacacctacccctgaaatgccctaattcccttccgtttctttttcttttttctttttagcacttaaaactagctaacttactacaaaatagatttagatttatttcttgttttgttatctgtatcgtttgctcccttctccccaatctatctaaccaactagtataaactagatagtaagattcatgaagatacacttttttatctgattttattcatttgttctattcctattgcctctagagtagtacttggcacatggttagcactaaataagtacctgtcaaatgagtgaagtaatgtgcattgaagacttgaaggggctctgatgctaggaaattgtcatgggataatagatgaggttggtcgtttgtacagaggattcttgttagaagcttactctagtcatgattgtattagaatcttcatttaaaggctcctgaagggtgttggcattagtcagaactgtctcccagaattttatttgtcttgtgatagaataaagcatagttagcctaaagagcagttttcctaatagctcggcatgcccaaagattctaggagttatacaggttgaacatctaatccaaaaatctgaaatgctccaagatacaaaattttttgagcaccaatatgatgccacaagtggaaaattctgatgtgacctcatatgatgagtcacagtcaaaacacagtcaaaactttgtttcatgtacaaaattattaaaaaatattgtataatactacctccaagctatgtgtagaaggtgtatgtgaaacataagtgaattttgtgtttggacttgggacccatccctaagatatctcattatgtatatgcaaatattccaaaaatattttttaaaaaaatccaaattctaaaacacggctggttccaagcgtttcgtaagggatactcaacctgtatagcaaaatgaacatatttacatattctctaggaaatattagtttacaatttttctaggcaaattataattgataaatcataaagaaaatttaaaataacactggtaattttcctacctccttcgttattgttacagaatgctaaagaagaattaattaggtgggaagaaggtaaaaagtggcaagccaaaatagaaggaattcgaaacaagttaaaagagaaagagggggaagtctttactttaacaaagcagttgaatactttgaaggatctttttgccaagtgagtttaaatatcattataaaactaattatgtgtaaaatcctttagtgacctggaaattatatagctttatcatagttgataatatgagaaatggtctagtttaaatgatcatttattatctatgatttacttactttttattttctttaaaatctgttttaaatatattgtaacaattatagatggattttcctgtgatctcgttgtaaattagcttatgacaaatatagggtgttacaattattgtaatttggtttggtaatgagtatgcaattgaaaagccaaacactgaatggtatatttcatgattctatattaaattccacagagccgataaagagaaacttactttgcagaggaaactaaaaacaactggcatgactgttgatcaggttttgggaatacgagctttggagtcagaaaaagaattggaagaattaaaaaagagaaatcttgacttagaaaatgatatattgtatatgaggtaagctattatgtggaaatgtgccacccattgtaatgaaaaactggttgacccctagaaattgaaataataaatgtgtgttgtcttaagcttgggttatgttttcttttcccatgtgaattgagatattcctggttcttcatatgccacataattttggtgtatttttgatcttttgaatattatattgtgagactctggttcttgtttaaattctatgggaaaatgtagatacttttgttttagcatgcaatcggtctaattaggttcaggccacaagttccaacctcatttcttgggctgtggttccatttttcaaagccttttcaatactcttcagatctgtcctgcctgtgtacctcacaataggtgatctggtatgtgagctatgtaccattagttcagttcttagaaactttggtattctgattaggatcgatccatacatttgcagctcaagagtgagcccagaagttcataaacaactttatagggtccctttcttgagctcctccctctttgccatctctctgatactttgtttccctagggatttccatttggggctttagttacccagtgatgccatgtacttcaggaattgcacacttctgcagccaagcaagcaagaggagagtagaaagaggaagaaaaaaacgacttttaccttaccctcttagtatcatagctctaccaattggagatttccctcccaaaaaatattagcttctgtgagttcccattgcagcctctattaccactgctatgggatggcttaagggttggggcatgaaagaacagatagaagaaaaaaaaagtgaggtgttttcatattgtctcttgagtgttaaaagattccctttctctttactcgagctagaattagaaggtttacctggagctctctctgtcagtgcagacacccatcttcaggtttcaaataatgttgtcttcagggcaggcagtaacagaataaaagaaaaggtaaattcatcacctgtttgctgctactttaagtcctggtattctattgtaatctgccttctactcctttgcaaagtcctcaaatggttgctccatgcatttaggagagagaagattgaatgtatttactccattgtacctggaaccagatgcccttgccctgcatcaccccatgtcatttcttagcagagcctttgagatttttgtgtgtgtgtgctttacaatctctttccaagttatatcttctgatacagtcatggtcgtgaaaagcaaaataaaatcatgtgttaacatttaaaactttttaattttattctgacaacagctaaaactatttaatcttctgtttcgctcatttcttccaaggtaaacttcagttggttttacgtgatttgctatttcttcttctttgcatttacaaatgatctgtgatcatattactgatctttgtaaagggctaatatctacctgcaacatttggatatgacagtatttaccctttgtaaatacacattttctatttatcttcaaaaattaccattcattagtctgtgttaatgtctgtttactattgtgtcattatgaatgtgatgtgaacatacgaagttgaacttatttaaacgaacactctcatgagcttctaatccacattccttccttttccttctaagttaccatttcttaaaaatcttttagaagtttccttgatagggaaaacacaaattattgaggaatttttctttctcttgacatctgtttatagttactctcttgttccagcagtggatatttcccctccatgtttttctttgtctaaacatatgttcaaaacaaaacacttttattcttctttgcaggttttacaaggatcaacttttagttttgaaacctgctattacttttagaggccattttttttttctctaataatgtgagttcatgcgggctgaagtaattggaatactttatagaaaagattgaatttgtcttctctctgaactctagtttgaatttctaaattttatgaatcatctagatattaaagaggaggggcatatcaaagaggagaaccctagcagagataagaggcaagagtaaatgtttcatgtatgggtaagagtggatttgtatttacctaagtaaaggtagaccctggacaataaggttggatagatgtggaggtggcaaaccatggagggtcttgtaggtcaagtggatgtttttagacttgaagtgttaaattattatctgaaatcattaagagtctttttagatccttgagcttcttgagaagaccatggatattatgcagttattatataatgttttaaaatagtaagtattttagtttaactgtcttatgtaattccatataaatggatgcatgttctttaaaaatgttaatgtatttcagtaaatcaaaatatactttttgactcatcatttaaaggaggccttcagtgaatgctctgtagaggattattttataatactaattttgatatcctaatttatttgttataaagtttagaaggtttgaagaatttaaaatatagtgttaataaacacactgaacttttctttttttatcttgtatttttatatagtacaacagaaaaaagatgaaatgtgaatagtaaagagtctgtgattgttgttcatagggcccaccaagctcttcctcgagattctgttgtagaagatttacatttacaaaatagatacctccaagaaaaacttcatgctttagaaaaacagttttcaaaggatacatattctaagccttcagtaagtgtatatcttttattatttttttcttttttccatgttaaaatgcatgaaagtgaaatcaacttctttcttaatctggccaaaagcattacatctttctcattaatagtaatacagtaaattcaacttttatttttaacaggtagtgatgtgtaataatttatttaatcctttttaacataataacagtaaacttaagattcttaagcttttcataaagctcataaatgatttctagaaattttaaatatgtagttatcattatgtattttgctgtagcagcagtatacagttaaataaaataggaaaacatgttccaagactgttttcattcaaatatttatgctatatttttagcttataaaaactcattaatcattaatgtaaaattatttgttggattttttaaatatttagtgtattatttttgtttcttttttctttccatgtttcttcattcttccaccttaagcagaatcaggtgtgtgacacaactatgttttctatccttgttaccattattaataaatacaagggcatgatatttttcacaaaagaaacactttgttcagaaccaaaaaagatcatggcaacagtcagaattaaaaatggtaaaagactaggtgccaaagatgacttacataattgggtacctagaaatattctatggtattacagtaatgatgaaaaatacaaattagaacacattttagatcctattgagttaaataaatcagagtcaagaccaaacaataaataaagtcaatttacgtcaacaaatggtaagttggcagattttaactccctttttgaaaatgaaccatgatcctaaggttggtaaaattaatcaagaatgttgtcaaaatgataaagataaaaatgaggaagagaataagataggcaagagtgagaaaggaaagagacacatagctgaaaatgtgagtcacaacaactacatagatccgtagaatctgctatggaggactgtgattatgtgacagttgctgatgccgtggcttagtgagctgagggtgatgcacaggcaggcgatgtaactgatgcgtcagtccagccaagaaaggacgcgtccctggtttggctacgtggccgtcctttatttctttgttaactgaattttcttatagtaagtagcttacgtacatatatagtgcaaatgggaaagtgtgtaagatttagaaaaagcattaactattagtaaactttatcttaagctctaacttttgattagttcctacaaaaattagtgaatatgcattttctaatttagtgctttttttttttttacaattggtgttcacttaatgttatattagataaatgaatagcaaaaataaggtactttagagttgattgttttgccttacaaacttctaatccatccagctgtatttagaagtaagatctcactacagcgaattatatcagtaaaattttgttacagtgttgtgcagtgtcctaagatgtatactaagttccttcagtggctttttttgccatgttttataacagataattttgttataatgagaaaaggaaacttggatgtgttgctgtctatattgtgttaggctcaggcaggatgctgtggcttactcatttaatcactttgggaggcaggggcaggaagattgcttgaggccaagagtttgagatcagcttgggcagcatagccagaccctgtctctacaaaaaatttagacagatgtggtggaacacatttgtagtcctagctattagggaggctgtggtgggaggatcatttgagcccaggagtttgatgttacattgccctattgcactccagactgggcaacagagtgagacctgtctctaaaataataataatgataatgataaatggtgttaggctctgtgcctaagtatatttttcacataggctgggtaaagtggctcatgcctgcaatcccagcactttgggaggccaaggcagcaggagcatttgaggccaggagtcaaagaccagccttgagagaccccatctctaccagaaaaaaaaaaaaaaagaaacaattagctgggtgtgattgtgcacacctgtagtcctagctactcgggaggcagaggtgggcagatcacttgagcccaggagtttgaggttatagtgagctaagattgtgccactgcactccagactgggcaacagagcaagactgtctcaaacaaaaacaaacaaacaaaaagcactttgcagaatatcagtctaactctacagtttatggactttttatgtacgtactacttttggctagcttacattgagatacagaataaaagtttgttcatagcatttatcgtttttttctttatactgtccacctgagatattccagtcacctaagtcatggaaacatcaactaaaattaaatatctatgttaagagaaaatggctgaaagtgatttaattcataacactttttttcacatgctaataaataagagtttgagacttccactaggcattatctctaactcctatccactaagaatttgattttaagtagttgatggcttttaaccggattattcttctgtaagagtttggaagtctcgtgaagttcgttatacaagaattctgtttacaagagagcattacattagaatttgtttttcagaaatttggactatctcaacgaatacctttagttttattatttcaaaatgcaagggaaaaaatgagccataatcactaatagtaactgcatcatattttagtgagaaatgtgttaaaaatatcctcatgtgagatcttccttagatagaattaccctctactctaatatttaatatattttatatctaccaatcagtgatattaataggtgtttatcatttgctgaatcaaataggtacaacagaagacaggaagtttgggagatagaagagctcagggacaggaaatcacagatgtccatatctgaaataaccttaaaagttatcctgtctaatgccttcacttataaactgtagtggtagaatttgcctagtattaacctaatagtggtagatttgaatgtatacttgggctttcttattaagtggaaatgtattcctgtgatttacatatatcaacaaaaatgtttgtcttcttttttttgctacgacatatgtgcatgtgcacacacatctcctcaaacaaaaatcagatggacacatgcagtcattggatctaaaagatgttataaagttgtgtataataggtattttataataatatattttaagacccataatgtcggtggagtaactgactttacagcccatcaagccaatagagagagaaaggagaaaaaaatgaaagttgtgctgaataattaaaaaaaattatttcctatgatgcttataacagtcctatgaggtaggtggtattctaatttatagaaaaaatgcatagaaaaatataattaagcacagttaaaaaaaataaagtttagaatgagaagtaacaacataaataatgacccaatgtagattcaggtcaaaagaaatgaaaatataatattaatggttttcaaagagggaaccattactttagctcaaagaatgaaggagggctttccgaaggagtaaagaattatggcagttcttttgtagcctagtgtattcatttgctaaggtggctgtaacagactactacagatttggtggcttaaacaatagaaatttatggtcttagttctggagacctagaagtccaaaatcaagacatcagcagggttgatttcctctgcacaatcagagggaaagatctttcccaatcctctctccttggcttataaatgtccatgttttccctgtttctttttatcatcttccttctgtacatgtctctgtgtctaaatccccaaattttctcttttcataaggataccagtcacagtcgaatagggtttaccctgaaatctcattttaacttgaatacctctgtaaagacccagtctccaaataaagtcacattctgaggtactggaaattatgactttaatatataaatgtggagggtaaggggaacacagttcaacccataacggttagataacaatcgtgctttattttggactagtaaaaccaccatagatcagtttaaccattatgaaattatacatgaaggcattatatgtatggacattattaagtcatacttgctttgcttccattgtaattaaaacaaaccatactacctttgttctgcaagttttgtattctaacttatttatttttggctttcaccagaacactccgattttctcatattcctttgaggaaaaaaagttaccttttgacagtattttcttatccagtatgtcttttatggcttttatttattaaactttaaaaatattcctaatttcatttccctgaagatttcaggaatagagtcagatgatcattgtcagagagaacaggagcttcagaaggaaaacttgaagttgtcatctgaaaatattgaactgaaatttcagcttgaacaagcaaataaagatttgccaagattaaaggtgaatttaatgttttttattaggaaatctaatgcctaaaactccttccttagttgttatgtttacttttattagcttattaagaagtcaaaaatgcatattcctaatatatcatggtgatggtatactttatacatttgctctttagcatttatttgttgaaggcctactttatattaaacactcctccagatgctgggaaacagcagtcaaaaaattccttatactcataggacttacgttctagtggagaagactgacaataaacaagtcactaaatagtatgtcatctgatgttagtgctaaggagagaaataaagcatgattggtgtaaagagtatggggagagagaaggggtgtaactgaaaatagagtagtaagggaggtcttccttaataagatgatatatgaacagagagctaaggaggggtaaaggaagtgagtcatacagatactagaaaaataattacagacaacagaaatagcaagttcagatgtcctaaggtgggaggatgcgtggtatatttcattaaaaattatcacactgtaaaatataagaataatttgtttcttttagaaattttactttattctgatattaataatgattttttaatctttggttttccaagtcttaccctatttatgggaatcttttttttcttttggctagctaattgcttcagttttgttttctaatctagaatgttagcaatctgttaattccactggtaatgatatagttaagctatgtcttgcttctcacactttatttatttatttactcagggcactaatctgccattttttcgcactttttttccttttttttttttttggtactgcttcttattctggtttttacattgatagaaccaatgttagacgttcatttgccttttgctgtgtatatttgggtaaggatctatatgtgcaatatatgggacagttaaaatcagaattctaaatttgtattattgcatcaggcaataatgtgggaaataccttgacatttcatatacacaatattcttgtattaatttaacgtcttagttcaaaatcttccttgttaatatagagaccctattatttggtttggcaatacagttgaagagattgatggttcttatgaattgtttgccttttcttttcaatggctgtagctatgttaaattattacatgtttgcttgttatctttcagaatcaagtcagagatttgaaggaaatgtgtgaatttcttaagaaagaaaaagcagaagttcagcggaaacttggccatgttagaggggtatgtgagaatttaccatacatttgttttggtttcagcagtgataagccagaaatgaaaagtttagatatgttgtaaaagtactgatatgcctctacaagtgccctgtagtttcagtgtttattctgcatctgtaatataaaacagtaagcatttctatgtgtctcaaagtattttatcatctgttataccttacatactttcatctctctttttattgaatatgcctccataccttgaaaacatttaacttccaggaatccttttgtttatggaggtaactgctaactggtccttggtccaatgctgccattttgtaaccatttgttatgatatcttcccagcttggtataatgttttataattacattgttcctccccctctttttttgtgttcttgtaattttctccctatgttattttgtattcattttatataatgaataaatgttgcttatgaggtcaaggccaaagacttaagctcctgttgatttcatgttgctgagtgtcataaatggaagcaatcataatgcagagtcattctggtagtaatattaaatatatgatggattcagtgaaaatattatgtgttattagaaaaatattcagaacaggccgggggcagtggctcacacctgtaatcccagcaatttgggaggccgaggcgggcagatcactggaagtcaggagttcaagaccagcctggccgacatggtgaaaccccatctctactaaaaatatgaaaattagctgggcatggtggctcatgcctgtaatcctagctactcaggaggttgaggcaggagaattgcttgaacctggcaggcggaggttacagtgagccatggtcacacaactgtactccagcctgggcgacagagcgagactccatcttttaaaacaaaaaaaaaaaaggaaaaatattcagaacagtatcttgctggcagcaacatttgtttcatcaatgaaaatatgtgttaatttgaccttttctatctaagttaattatgaaagtgcatactaaaatgatgtaaaagtttatatttcaggattattcttattcatggatgattaactaaaatgcaaaaagaaattaagcatactgtttggctaaactgttaaaaattatttttattttaaatgataagcagttaaacttattaagtgatgactcatctctgctgatatatttatgcaaggttttttatttcagataactcttctatttatattaaacagaaactgtatttctaagcaatagcatttcttagagaaaattgcctctattatgttgcaattaaaatttaattactcatgagctctttaaagacacaatttctcttgtgtggttttatttcatataaagaaaaactctgatatactggagagaacattagctaaatagactatttagacttaatcattttgatcagacatcaaggctagactatttaagctgttacttattagctgcatgattttaggaatgtcaaatttcctaagtcttggttttcttgtatttaaaatggaaattataattcctatctcatagaattgttttaaggatgaattgaattaatacagttttgacttcaaatattaggaattattgagtataataagcctgttgtattgttggtacttcgtattatacttactaaaatatttgattaaagatttaacatattctttcgtagtctggtagaagtggaaagacaatcccagaactggaaaaaaccattggtttaatgaaaaaagtagttgaaaaagtccagagagaaaatgaacagttgaaaaaagcatcaggaatattgactagtgaaaaaatggctaatattgagcaggaaaatgaaaaattgaaggtaattttttttaatgtgatcatttttaggggaatattttacgttttgttactatttaggaaaatttcaaatatgctcattactatataaaatggctttaatgaatacaatacatattttataaatatagaaaaaaacttatgagaggcaaggctaagggttatagagtaggtctacctgatctttcttgttatttcaagaccaatacttttcacttttctctctgacagcatagattaattacctgtgtctctcttttttttttcttttgagatggagtactgctttgtcacccaggctggaatgcagtggtgcaatcttgactcactgcaagctctgcctcccgggttcatgccattctcctgcctcagcctcccccagtagctgggactacaggtgcccaccaccacgcctggctaacttttcgtatttttagtagagatggggtttcaccatgttaaccaggactgtctcgatctcctgacctcgtgatccgcccactgcggcctctgtgtctctttgtgaaaatacagatgcccaagctcccatccctgaaattgatttaattattttagggtgggtcctgacacagatatgtatgttgttgttattttaagtcatcaatttattctaatatgtagccaacgttgggaacttcgttctcactaatattcaaatgaagactttaattctaatcatatcaaatatggtttctaaaactactttgaagatttatgagtttataagattatcttttatttccttgttttgataatgtatactttttattttgtttgtttttttactaggctgaattagaaaaacttaaagctcatcttgggcatcagttgagcatgcactatgaatccaagaccaaaggcacagaaaaaattattgctgaaaatgaaaggcttcgtaaagaacttaaaaaagtatgacttttatgactgattataacttttgatttttattttacttaatacctcttggaaaaactggaagtagatccttgatgagagtgtctgtaaaggtagatattaagagattgaggaattgtgtttctatgcctgctgtcatcacattccaccatgaaaaacattgataataaaagttaatacatttaggctgggcacggtggctcacgcctgtaatcccagcactttgggaggccaaggcgggtggatcacgaggtcaggagatcgagaccatcctggctaacacggtgaaaccccgtctctactaaaaatacaaaaaattagccgggcgtggtggcgggcgcctgtagtcccagctactcgggaagctgaggcaggagaatcgcttgaacccgggaggcagaggttgcagtgagccgagatcgcaccactacactccagcctgggcaacagagcgagactccatctcaaacaaacaaaaaaaagaaatgatctacgttgcttacacataccttatgcttatagctaggtctcgtaagcattaggaagtcaaaacaaagaatcttttacatgtgtaaaggtataaactatcccatttttctaaaaatatagaggaacaaagtgtcaaatttaaagtaatcactagtaactaaatatattcctctgacctcattttcgtgatctgttgttctaattattattggccatattgctgctttaaaggagagatgttgaatttgttgaaattttaatcagcatttagagccccaggttatttttgttttccaatttgtaatgataattttgaatacactgaatctatgagaacagtattatgttttctcataaaatactaattagcatttaatgataggaaactgatgctgcagagaaattacggatagcaaagaataatttagagatattaaatgagaagatgacagttcaactagaagagactggtaagagattgcagtttgcagaaagcagaggtccacagcttgaaggtgctgacagtaagagctggaaatccattgtggttacaaggtaggaacagagttttaaacttgtacaaagtttaatcatttcaaattttggcattgttttaaaagacaacactattctggataacctggtttcttcctgatgaacagtttgtttggttgttgttttaacataatactttttttctgttgtagtattgttggagactttttcttccttgaaatgtttaacttgtttaaccttgtttgggtggcagggcatggaacagtgtagagctggggctgggcgaaggagttggagctgtgtgtgcgtcatgaagctgtcatcagctatgagcctgggctgaggctgctcagcttctcctgggtgctatttttctccaactgcagcttcagcttcttgattgtataatttgcttcctcaagtatgagccaggaataattgagctgtcttgtcacaatgtgtggcatactggatctaggctgtgctgcaatgcttttagagttatatcctgggcaactttctcttcagatagccccaagagatgaattcagcaccagctttgatgttttactagcttctgctttctggtacttgattttctcccaccccgaacacatgggattccaacctgtgaaactaatttttgtggctatgaaagaggtagtggtagtttatgagtaaacattcagtctgttgccactatcatcatgtgtggttcatcatgactgtgatgagtaggtaaaaggctctttgtgtcattctcatttccaattttaagcagctgcttcaaggagtctggaagtcattgaccagtgggatcctgcctgtgtcttttcccattaaagccatcctgtatgaagtggtatcctttaccatctagcacatctgccgcccccatttcaaaaggcatactcatctttatctcaacattctcatacagttccttatgtccatgcacctccaatgtcccctttgatgtctttgaggttttcatcttccatgtctgctatttggaatggtcttgatgggaggcaagatagtgatcactacaactaggatgggagtcttagtaccgtgaggctacagcaagtcccacagagggcctgctgcactgtacttgcctctgtcaaccaagtctaaggagaaagattaagcaggcatattaaaggacagcccagatggacatgaagtcctggaggaggccttggttcctgtcctaatactaaacctagagtacccagaatccacacttctccactctagctctcacttttcccatctacacactgggaaaaattattctgtcagaaagccagtgtcaaggtgagaacaaataacaaatgtgatgatatggagtgggagaaggggtctcttctactgtcttattggaccctagcagtggctctgagccagcagtcctgtcagttgatttcttggtcgttcctttgttttcttctataatcacatgtggactcagaatgaattttgagttactctgaaatctatttattcaacagatatttacttagtacctcctattgccagactctgctttatgttggatattattttttaaaagcccaccttgcctagatttcctcaaaggaccaggtggcttccctggttttgaaagaccctaattcttactatgatcttaagtaaattatatcctttctgtgggctcaagttctttctaagagggctctttggggctacaaaagaaattgttagtgcaaaaagagtttataaggtttataaatggttagtagaggtgatgatgatatttaaccataattgaagatgactttgcattttagatcatatacgtgtttttcgtctgagaacgatacaggtcactgagcataccataagccttcagtaaatcatttgcagaagacattgcagaagacataagtctaagtagaaatctcttgacagagagaaggctcgttttgatccttgacctcaaatttaggttccctaaatccattaaaaaagagaaagaaaaagaaaaaaagttactaaagtttaaatctgggaggattatatacccttctcaataaagcagtttagagagatctcttttgggacccatgacacaggtcttgctcatgctgacatctttatagttgctttattatttattcaacaaacttagtaacacgtattctatgtcaggccttttcctgactactgggacaaaccagggtgatgtgggggctgttttagatagggtgatcagaggaggcctctctgtttgggtggcttttgaatagaaaattagatgaagtgaaggagtaagcttctgatatttcactgtttacttgtggtagatctgtgataatctctgtcaggttaaaaacattcccttctaatctaagtttctaagatctatcaaaagctgtttgaatatatttagacaatcataattttcctttcttgtattatcctagcagattttgttgccaaagctatactggccattttaacttagaatgcagtctttctattcatttctctggaaaagtttggatattgtaagcattatttttctttaggtatgatgaacctgcagaactgtttggttcaattatgaattttttttttctggagtctgtatttttttgaactattaatcatttctttaatgattataaatctattcagatttttacaagctttatccctctcccatcatacactatttttcttacccatgcttttgcacaattttttcctctcccttagtgttttcctacctagatacctcctatgtgtgtctgtgtatgtgagaaaagctttttatttgccatctttatatttctaagaatatctagtaatacagaattttatattctgaagaattttactttgcattttcttattttgtgattgaaaaaaggtattaattttaaaatggtcaaatcaggctccatccttggaaaatacccaaatcctttattttgattgggccatctgttaattagggataccttatctcttgccaccactttttaatgctaaataaatatgtagctaaaactttgactagaagaaacagtaaaataagatattcttgcttatttttagtacagttatttgaactgacttttaaatcagtgacataaattatttgccatgtctatactttttttccttatacttttagaatgtatgaaaccaagttaaaagaattggaaactgatattgccaaaaaaaatcaaagcattactgaccttaaacagcttgtaaaagaagcaacagagagagaacaaaaagttaacaaatacaatgaagaccttgaacaacaggtaagtaacgtaatttttctttacatgataaaataatgcataatatcgcaagatgttccttgcattgtcttatatagataaaaatggactctattaagaagacccatctaactgaagggcaccccattcacccatttgcttaagccagaaactttggatcatcaacgacttcattcttttcattctccacattttctatcattaaatcatgtcagctctattttcaaactatatcctaaatatgaccacttcttggtatcttgagacatcactaccagtcttgtccaagctattgttttatacctgaataactgcaataatttccaagctggtatctcagcttccactcttggattatttcaccctatttctatttctgggctgtctccacacagttgccaggtaacccttttaaaacataaagcacatcacaaagcacaaagtcctatcctcagaatcttccagtggttctccatcaccctaaaataaaacttaaaagttcttttcatatcccaaaacaacatatgaggtctggcacccagttttcttcccaatctcatcttctactacttttcccttcatttcattcacaatgttttaaccacagtaaccttctttcagtactttaaacaatccaaactcgtttaagcgtcaagtccttatacttgtttcctttgtttagaatactgttcacccaaatattctcatagcttgctcccagacttcatgtctctgctgaaatagaggctccttagagagaccttccctaaccctaaccctaaccctatactacttgccatcactctttatcctcttaccctggattattttttcttgatagctcttcctaccatctggcactatattacatcatatcatattaaacacacattctttgtgcttccccactaaacaaggaccatgcaagatggaacattgccattttgttcactgctgttagcctctgtgcctaggacaatgccagttatgcagtagttactcaatacttgttgaatgaatggtgaatagaacatagaaatttgcctatgcgtgcttttgaaaaccatattttaatattacgctttgttaaaaatgtgtatctttataaatcctcatatttccatggcaaaccttatcttctaacttttcattgtcctcaaagattaagattcttaaacatgttcctgaaggtgctgagacagagcaaggccttaaacgggagcttcaagttcttaggtacatcatgtattcatatgactactttgtttttttctttaaaaaaaaaattattagtttttatatactccgaattgctacaactagagacaagcatttttcgactttactgcctaacaggcttattaggtccttatttcttccctctaatgctaatcactctttttcataatacacactagaaaaaaaggataaacccaactctaagtttccagtttgtaatttagtttaaacttttctaagagcatagaatgagttaaaccttagcttcccagaggaaaatactaatgaaagagaacaagtaatttttttactttcaggggtctctgtagcctgctttcattaagctcctcttataacgaaaccacacttgcaaatgccatcaggtcagatattaagaaaaacgtgaaggcttttgtattccaggctttttgtttgagaatggtgacattgtagcattgagagtaaatgtttacttcgataaaggctagcttgttctgattactgtacatcactagttcataagaaatgcccatatattttatgaagcaatatctgctttatttttttaacacattatcattgtgttctagattagctaatcatcagctggataaagagaaagcagaattaatccatcagatagaagctaacaaggaccaaagtggagctgaaagcaccatacctggtaatgtattttaaaaaacatgttagctacccccaagtttttgaatttgggtttgccttttttttttttttttggctcagatttctgatcattgtctccctgtaaaatcgaattcctgataagctttgggtcttttgtctctctgtgctattaatataaaaatattcccatttttctctttgtgttgtttatactatagagtagcaagtacccaagtgttcttctctttgttctccatctgggtgttacagatttaatcacaatacagtgctaagcaatgaatactaaatctgttgcttccagtttctaagtataggctctttcaagtcctctgaacatttttaaaaactgcaaataagtaaatactgcctatatttttttccgtttacaaagtaaaaagaaaatctttctgctcccttccattcccattcaaaagtgattactaatcattcctcattcctgcatatacatacacacatattttgtatacatatatatcacacatatgcatacatgtgtttgtatgttcatatgtacaatgtacatatcctcattatttgtggattctgtattttctaaatcacctcctcactaaagtgtgtatgtaatcccaaatcaacactcgcagcacatttgcaaacatccacagagccttggaaagtttgaataatccaacctacatgtccccagcagaagtccaacaaggcagtgctcagtatcctcatttcagttttcatagagaaatgagcagaggatggagacagtagagggcagcacagcatagtgcaagaagctgtggctctggggcctggtggaagggatttgaatcccaattctgaggcttgttactgctctagccttaggagagtcatgtaacacttctgaatcttgttttcttatgtaaataaatagaatttaccaggatgagttatctttaggatttaagattatcatctgtgtgagatatgtaggtgtatgtatatatatgcgtgtatgtatatatatgcgtgtatgtatatatatgcatgtctgtacatatttcccgtagcagcagtggtttgatattcactaattgggctaactttatagaccaaaactactatggatagagaatactttgtttgcatttacgtatatatattttcttggcaagtaacataaaattgaactaatactatacacatttctagcatatttgcctttaacagtttatcatggacatcttttgaggtctgttcataaattatctcatccatttaataattccatagtgtattattgcatgtataagcacatcgaaccatttatgttttgatggatatttagtttgcttccaagtttctgcttctataaaatatgattaatctattgacctaattatgccattgtgataggatgatagagatgccattctctccaaaggattataccaatttatatctgaactatctttgactatctcttgtagctttttcagtatgctatgtagtcctattactaatttgtaataaaagccatcatgtgtgagttgtactagacactatgctaattgccttacaagcattctatatttacaaccatatatgataggtattactgtctccattttatgtgataaacaaattcaaagtggttaagtaaccattccctaagccagctaggaaatagaggcaggattaaaatctaaatgtatgaaactccacagctccttggcattcctagtccttaacccgctatgctatgctacgtcttggtaactaaaagtacatattaaatactctcaaaatatgtctcatagcagccagcttggtatgtacactagacacagtattaatgctgttgatgtgaggaaaattttataattttccttccatccatatactaaccaggcccaacagtgcttagcttctgagatcagagatcaggtgcatgtgcattaagggtcatatggccatagatagttctctaatctttccattcctcagtttcttaagggaatttctgaaccctcaaaattccttatttcctaagtagacagattacctgtcatttttcaaagattaaggcttaagatcaaaccagaactgttttggaaattctaaatcactgtctatataaatggcaagataacttttaagatatttataccaagcccagtacagtagcacaccacacctgtaatcccagcactttgggaggctgaagtgggtggatcacatgaggtcaggagttcgagaccactctggccaacatggtgaaaccctgtctctactaaaaatataaaaattagccaggcatggtggcacttgcctgttatcccagctacaagggaggctaaggcaggagaatcgctttaacctgggaggcagtggttgttgcagtgagccaagattgcaccactgcactctagcctgggcgacagagtgagactgtctcaaaaaaaaaaaaaaaaaaaaagatacttgtcccagccatgaaaatgtttgctgccccttactttcgcaaacttttagtattttattatttttcaatggctgtaaaatatgacttattaaatgtagtataatataaagaaaagagatatctagcaaagatagcattaaagcaaaaatcctatttgcctgctgataaagttagaggtgttaacttggagggtgaatccaataaattagaacttttgtgctatatttggagacttttgttttcctaccaaagtatcagggctatgtcttacttatctttgtattacacagcctgcatgacacgttttgcacatagtaattgcacagtaaatgtgtaataacctacatggaatagccagtgttgtgttggatagcgggagcatttggctagcttatggttatagtcccttacccaacagtctgcttttcttctgttgtacttttagtacctaacaagtttccctggctttaggattttttccatgtaaaatttctatcatgtgaagaaaaaataacttggcctacacttctaatacctagcacatacctctttctgcctgctatgaaattataatacttgatggagggaggcagcattaagtgtttacatcctgaagtatttcagccataacatccagtgttttccaggttctaggtttcataaaatgtatctctgttctctagaacaaatccattaccttgaactcattcgtagtgggaaaaagctgagtctaatttgtatgactttttcaacagatgctgatcaactaaaggaaaaaataaaagatctagagacacagctcaaaatgtcagatctagaaaagcagcatttgaaggtaatatttaattatattttagtatcgttttgtgaaaacagctgttgaaaactattttcattaccatctttaactacgtatcctaaaaaattcagtaataacatcttatatttgacctttatattgcaaagttaattatgttcatctgactattcctaacatattagagttaacaaaaaattcagactcaacataggattaagtagtaaatttattttttaattgtaacaaatatatgccattagtatgttcttaagttttgggtcacattggcaacagtgtctttattttttttttgaaattcttttcaggaatcctaaggttatagttcccttaaaaaaatatttgctgttttacctcttttaagactgtaaacaggacaaaaaggcatggatatgagaattagctagtgatcactggctattctaaatagtcactaaggcttgaattgtctcttcaccagatgcctgtcagaagtcccaaaggtttccctgatcatattaataactttataaaaaattgatcattattcattaaatattagatattagtaaggaaaatataaatgaagtctaaaccaaaactcttaaccagactaacttcaatgttatgaatcacaaaatctttttgattgattgctctattgacaagctcttatatgcttttagagaaagattaagtcccattataagagatgataaattttagtcaaagactagaacacaacttacagaatacataactggacttgacagttaacaacttagttatttacactgtacaatggaacaaagaaaaatcttaattcttctgcctttattgctgtatttgaccattcaggaatactttggctttcatatttacaattaaatctccttgttcaaacgtaaaatatgtatatttcctatatgcaacttttaaagataatgtttccattaggaggaaataaagaagctgaaaaaagaactggaaaattttgatccttcattttttgaagaaattgaagatcttaagtataattacaaggaagaagtgaagaagaatattctcttagaagagaaggtaaaaaaactttcagaacaattgggagttgaattaactagccctgttgctgcttctgaagagtttgaagatgaagaagaaagtcctgttaatttccccatttactaaaggtcacctataaactttgtttcatttaactatttattaactttataagttaaatatacttggaaataagcagttctccgaactgtagtatttccttctcactaccttgtacctttatacttagattggaattcttaataaataaaattatatgaaattttcaacttattataaaagtatatacttgaagacttgttacagccatcaaataggcagtgagctctggtgaatttctctacattcataatgctttaagttttttaaagaatatgagggtaaattcagcaattttaagatttaaaattggagtttatatatacttatttatacatgtgttaagattctcaaatcctatgatatatacacagatgtagacatacacacatataggttatgaggttgagccgtatgttttgttaaatatctagcaaaattaaattgagcttaaactatttaattttgaaaattagtgacattaaattgttgtctttaaattaccactcagttatagtgaagagaatccagcctttgtccaagcttaggagcttactattacttatgtttttatggctagagattaaaattaatttgctggtttttaataaaattttgaataggtacttgaaactggaaaattcatttcttcacaaatggtagaaaacatattgatgtttcataatgaacagaaaccttgagatatttttaaatatggtagaatattcaagattagaatataatgataaactaattttatttgcattttatacatcaaatattatatctttgagtctaacaaatttctgattatctatttttaaaaaatgattaaacaaacacttaatatcaaaggcagagtcacatttgttcaggttcatgttgataataactggtcttgaattcatgtaagtatctggaattggccagcataagccaagatgatggcgatggacctggaaagagaaaaaaggtattagctttagcatacagatactatcttcattcacttagaaatatttgagtgcccactgtctgccaggtactgggtaagactccactttatcttactgtttttttttttatagctggtcttctcctgacatattacatatttgtttattgtctatcttccccattagaatgtgagcttcatgaaggcagacaccttgttttgttgactgtgtatgtccagcacctggaaacatgccaggaacattatcaggggctccataaaatgttatgaatcatagagcctgttgctgagtacagactagctacctgaaaaatgtgggcaaggaggcattctaattgaaaggaatgttatatgatagaatggagttttttgctctaattgcaatcatgtaaatatggttacagcaaacacagtgtgagtgtgtttgcgggggcagaggtggagagcagttctgggaaattaagtaggggccagatcatgaatgtttaatgtaactgaacagatttatgcaggaaagtaatatgctcattcatttgtgaagaatggagaggacagggctaaaactgaaagatactatttttggagggtgatatgatagttaaagcatgaatcttggcttaaattaaaattaacagttgggaagaagtacatagattagaactgttaggaattgataactggatgtatgaagtaatgaaaagaggggttaaaattaatatccaagtttttacttcagtgaattatgtggactcagagagttacaactaggcccagttttgaatattatgaatttcaggtacctgtgagaaatcaaacagacaagtccaggagacagaaagggaacaaagtataagataattcattctgtatatatcaactgctaccttggcactctttttactcaacagattctacactcaagtctgggagatgctgagttaagttagtacaagatgtctctgagagcactactgtgcaacatgaatttccacgcaggggatatatagttatcactttaattctgaagcacacctgttatgatcgatgccccacacaatacacactgggaagcactgttttacctcttaaaaaatggtggtacatgggatgagaaaattaaatttctttactgcaaataagaattgctgccatttgtagagagaattttagtgtcacttctactctattgtaggaatataagatgacataaccccaccggagctatttttgccattacctttattaaacagccatcactgcaatgccacactattccttcaattttaccctctttgcaatcttcaaaccaggacacgagatcattgtgcttcaatgaaggtagatttcttatttgaaatgctccatgtggtataagaagatgtaatggatgtttcttgctccctaaccctaagtgggaaaatttgccattagccatattcatttaaaggaactttcagaactagaaaacgtacctcttcaaataaagtcttttgaaacacttaggaataaaggtagaaaggctggttggtttccttaaaaagaatataacccagtgcactggcaccttattccaataactctaaattccaccttggtgtactctccaccacggttcagcaaactatgacctgcaggtcaagtctggacagatactttttttgtaaatagttttccatgaacacagccgcacccactcatgtaagtactgtctgtagctcctttcagaagagtggcctacaaaacttaaaatacctactctggcatttggcagaaaaagtctaccaacctttggtaccagtgtggcactggccacattcaactattcttcaacgtttgccaaacagctgcactgtatctctgataacttgtctaactaccatcttagcttctttacacctggcagtcttcttttgatctccatataggattttcctattatagctttagcatccttaggtctgtcttcccatccccttgtcagcaaggtgtaacccatagtgctctcagtacttgcactcaattcatcatgatatatattttgatacttaacatggtattattcattgccaattctttataccgttggctatttaaattgatgctataataaccatgaaaagtgcattttcatcaatcgactcaactcacctgaatttttaaaagcaagggggttacaactgagtcattacttttcatatatagttgtgtaatgttattacaggaaagaatgaggataaaaatcaaccttttggattaataaaatggtttcatttctctgtgaatgtaaagttaacagaaatggatataatcctaggaaactaactcaaatttgttagtcatttctttagtgtgtgtatgttttttaagttgacctagaaagttctctttataaatgtcagttacaataactgaacaagaaaaagtcttcactcaccatatgggtttccattgatatttgttcctatgagttccagtgtttgttctaagagatctgaaagtggcactgcactaatttccaaaagtccagaatcatcaggatgatgttttagtaccagggcaatttcaaattcataattaactacagaggaatgccagcaatactgtttgttgtttttctctactggtacccaacctatcatataaagaagaaaattatttgttattagatcgtttttctttggactgacactacaggtaatttatatttttgttgtaaatttctcatgttttctgggtgtctatcgcaaagagatattactttaaaattcagtgggaaagttaacagtttattactttttaaaaaatcataagggttcattttttattctgtagaattaacctattattcactacacagcacctagcattctcttactagaaaattcacccttattcattaagaactgaacattattctaagacacagcactcaaaattttttatataaaataagttttctctctgccttctctcaagcttcagggacaatggacataatgcagttaagtgttccaagtttattaaaatgttccaatatataccgaacaatttactgatgccacgtttattgaatgttattgctattacccttctcattcttattgccagaattccttcattactcacactagattactgtaataacttctttgctggtcacctagcctccagtgaaatccaacccacttttatcatagttctatttctaaaacttaaatttgcttttgctgtaccactgattaaaaaccattatcttcaggataaacttcaaactcctttagatggaataaaagggcctttccgatctgagcccaccacacttctagcctcaacttttacagccacttcatgatgtcatataccctgaacattctagctgcaataaagtgttacataaaatattcaaaataccccatgccctctcctcttcctgggagtttgcctaagctgatattccctcttcctgggagtttgcctaagctgatcttccctcttccttgtcagctgacttcctggtccttaagcttcagtacagatgtctactcctcttgggagcctccactaaccacaagctgaatgaggaattcctcttttctccagtggcacctgatgtattcattcctgttagttcttaaatcatactattattggttaatttctcccaatgtctaattaaagatcattgaggacaagggttctgaccttcatttttgtattaccagaaactaagaggactttgcacataatgggcactcaagacatgccggttgagaacctataaccttaatctgggatatcttcctattcagcataccttcgcaaaattttcccatccctaatctaaaggtatagccacttcttgaaatctcatttcagactagatcatctcatctatcctgacaagaacttggaagctattccctcttcttttgttgtttttttgagacaaggtcacagtccaactctcaggctagagtgcagtggcacgatcatggttcactgcagtctcaacttccggggcttaggtgtttcccacattagtctcccgagtagctgagactacaggcgcacaatgccatgcccaactaattttttgtatttttggtagagacagggttttgccatgttgcccaggttagtcttaaaactcctaggctcaagcaatccacccacctcagcctcccaaagtgctgggattacaggtgtgaccactgcacctggcctcaaggctattctcttttgacgctttattgtcacagactacagctagtaaaaaatgcccatcttagaaaagattctaaacctaagaggacattcttgatatgaaacatctttgatataaaatgtatgtaggactttacataaatttgattcagaaattctgtgctatacatattaatgaagacccagattaaaattctgtaatttctgattgaatggatattttgatcattttactagtaaacacaaaactgcactagaagagatatcatgataccaggaatgtgtccattttcatcaggcactgggttcccatttatttgttctgtctcctttgctggtatccagcactccggagctggtttgaagtcctcctcaacgttccaaaaaaattctaaaaaatattaaaaagataatattgtatgtggtgatacttaaaaaacgtaaaatactaaacagactcaaaatgggaacagctactaaaacctcataatatcaggtgtgatacaattattctccattcattatcaccacaacatgactgtacttaagattagggtactaacaatttaaatattcaatttcatatacgccatttgtatacagtatttaacagtcaaactaaagtaatcatattccattaagtattagatttatgaatttttaatatactatgaatacaaatataaacataaatacatgaatgcatagatatacaatgagtatctactacagatatttaaaagcattttaataattaaaaatattaatttcctgagatttgtacttgatttataaaattacgtatttgtctcttacacaaaatgtcactcatttcaatatgcagtaatttgtatgttttaatagactcatactataaagaagtgacaaatattacaaaaatattttacaatatttttcaataatatccttttatatataaaagtattcaattatagttttcctaaattgcttaaattacacagaaggatataatgtatagaaataccacagcaataaatatgccacaaatttcagctatttaaacatgaaaagttaaaaaaaaactaaccttttgggttttcttttgaatgtagaaaatttttaaatcttttttcagcttgtttgttgggttttctatctagtcgagcccaaaggtatggctgatctaaaaaagtaataacaaaaggaaaagtatgatgcaaacaaaacttatcttgaaagacatttcagaatacagtttgtcaacaaacaggaggctaatttctcaaagaagacaaagggaaatatggagtctaagaatatatacctcctagcagtacctgatgctatgagaagacttatttctctggttaaagaatgagggggatgagacaaaaagtaaatatatgatcttttttataaggacactgcatagtcatattgtatgagttagcagcatttatggacaactgaagctacctcttcaaaatggaaacataaccagataactgtatttaccccaccccttccccccaaacataacactgtgctgtaagggttaattctgacacatctggaatcaggctgagctgttctgcatggcactgacccctgatcaaggcatgaaaatactaataatgttgatttgtactcatggatctgaggagttgcagggcactgtgctagtattctttattggtaggagtgagactgatagcttggtctgagaaccctggagggctctgctgttgaagctgagcatcagctgcctacctacgtgaccagcaaaaatataaaaatctccagctgtgagtccattttgcattccctggttccaagctgtttgcctgcacacataagtggttcctgatctaagaaaatgtgtcctgccaaggctctaaagcagggaacaatagtagcttttacttggcctctccatactccttactgtgagacagtccttggctataatacacatctttacttttaatgccttagtagtaataatttagtagtaattctttagtagtaataaatgtggatttgtaagcattgtcactttgggttctgtgacttgagtttagcagttaaattctaacccagtttgccgtcctcacgcataatgatacacactatagtttcttaatagacatcaaagtctaaaaaatcttttacagttttctcaagtatacaaatccaaggtttataaagaaactgctgcacagtggtccaaatattctgtactacttattagctatccagataaataatatgaagaaccagattaaaactgtattatcgtttctggttcaatggaccttttgtttcttttttaccagtaaacataaaaaatgcaatttatttacatccattagaatggctactatccaaaaacaaaaacaaaaatccaaacagaaaaaagcagaaaataagtgctggtgaggaaattgaaaaactggaacctttgtgcactgttggtagaaaggtaaatgtctgcagccactatgcaaaacagtatagtggctcctcaaaaaatcagaatttccatatcatccagtaattccacttctgtggaagcacagcctcagatatctgttcatgcctgtttacagtggcattattcgcaatagtcaaaagatgaaagcaacccaactgtccagcaatggttgactggataaacaagatgtgctagatacatgcaatggaatattactcagctttaaaaaggaataaaattctgatacatgcaaccaacatgaatgaaccttaaggacattatgctaagtgaaataagccagtcacaaaaaataaacactgtatgattctacttatatgaaatacctagagtagtcaaattcatagagacaggagaatgctggttacaaggggctggtggtgggagaataaggagttgtttcatgggtagcatttcagttttataaaatgaaaacaattcttgagatggaaggtgatgatagtagcacaacaatgtaaacatacttaatgccactgaactgcatacttaaaaatggttaagatggcaaatattatgtatgctttagcccagttattttactgcatttcagaataaatttcctgatacaaggaatgtgtccagatgtccatttaatgccccaggaatgtgtccagatgctatttttttctggaagtgagaggtaatctcaccgtccaaaaataattgcaaaaaaaaaaatctcttttccgtacatttcttcttaaaatgactgacaatttctatttgcatttctaccttttaaactacattaaagtgaaattaattagagacactgccaagaggaataaagcccctggaatcagtgcaggaagaacaagcttaagggtcacacgaacataggtcccattgccagttcagccattcagtcactattgggtcttggacaaattatttaagtttgctaaacctcatttttattgtctgtgaaatggagaggctacttgtacaaattggagataatatatgtcaagcaccatactgcctgagcccttaagggtattaagtaaatattttagttacctttcttttttccaccaggaagaaaatacagtaacataagtgaactataacaattgtgacctttttgttttgctactatacttaggtttccaagtgtttatgaagagcaaatgcctcatttcagatagactgtaaagtgattaagaaaaataagtaatatttgtagtaaatattatagttttattttacctttataggtagtaacataacaacatgttccatccactttttctgttggaattgcactgtatatatctgcatctaatgccttgtgacttacagtttcagttgccaaaactttaaatggcttaaaaaaagagagagagaaaaccggtttaagatagatagcctctatgtctttgcacacatgctcacctgaaatcttcttaatttcattagttttaaggaatgatctccagttcatctttcagaatgatttaaaaatatttattctgtgaagttccgaattgtttgctcccttctgtactatcacagcaacacctgattttctacacaattctgtagttatttacgtttctttatccacctttgttctttgcaatgctgcatccctagcaaaggcattcagtatatttaatcatatacctgcaattatttactaaatgcctaagattaagcattgtcttcagcactggaaatacagaggtgaacaaaaaagtacctgccttgggtgaaacttgcattttaatgagggagacaaaagaagcacaatgcataatataatgttagctatgacaagcaagtgctaaaaacaaatgggtaaaggaaagagggatgaggtgctattttggatacggtggaaagggaaactttgaggaggcaacctttaaccaaatttgaagcaaaggaataccatgtaaatatctgaggaaaaaaacaaaaggtaaggtttcttgatgtgtctgaagaatgcaaggcagacattgagtctggatctgcgtgaagtaaaactagattgtatgcttaattaacttaaacttcataagtgcttctggtagttcaatacaagtatctttcaattgtaattttcagttttcccaagagtcaatctactcttcagtacatgagactttccccctgttttataagcacaaacatttttgtgatttacaaaacttgttttttaattaagacttggttcataaggagtcttagcaaggatgtggtaatgtactcctgtctcaggtcacattctcagggagcaggcaaaagagacggaagatagttcatactttgtttttgccttttttaacctttttttccttgcaaagctaatagatgctcattatagaaaatttgtaaatgaaatatacaaaggcataaatgaatcacccacgtcatcacccttcagatgtatcacaaagaacgttttggcatacttcttgtctctttttcagtgcatttttctcaatataattgacatcagtttctatttgctaccaagaagtttctttaagagccaaaatcaaatggtttctggatttacttttttcatgtttttcctcctcaactgcatgataaacaagtgctattataagcacaggctgaaaaactaatgatcttcatccttttcatgaagcaattatcattagtataccttcattgtcacagagcttgcatctctgtctaaacataacagatcacagactttaaaagcatcttaattttcagaactattctatccttgattcagttttatatcctaaaaatcttcagatgtatcatcataaagttcaacaaatactcttaggaaaatatattatctgcctgaaaggaaagttcaccccgatggtttcctaccattaatagtgatttatattagacatgacagtactacaaacttaaatttctgagctgtatcagctatggtttatttacttaaaaaatgttcaagatggcaaaagaaaaattgcctctataaaacaaatctcttgactcttgagttaggcttcactttgacaacagttttcttcacagttacctgacatccccatgtagtctgatgaattgtttactttgaaagttgtatttaggagtctatgttgatctaaaaatctttgtggtaactcattcaacaaagcttgagcatctagtttgtgaacggccttgtcctagactatgcaggcagaatataaaaaaaggagtaaaacccgctggcatcacctcttagacgagacctcatattagcactcctgtaaatacagccccactgatagcacaagctggcccactatgccatcttagagatgttataccgtatacttcagaaccattttagttctatgtctttgcaccatgagtactcaagatttgaagttgattttgtttttttcatgtttttcccctaacaattttcaccgttaaaactagtaagaatcacttgccttttgtttttcctttgagtttgtttgctttgagagtactcactttttgtccctttcagctttatcagtagtcagctgtttacatatttaatttatggtttttctactgtcaggaagaagaagggcaccaaggatgaggaaaaggcagtttcttgggttcctactaactttttatctataatttattttcatttctgaaaaagacttatgccacttctatagtctgtatctgaagtagcatcatcttacaaagtgaaacaacactgtacaatataaacatactgctgtgtgtgagcttaagacttatgcactattgcaaacaggtaaactaagaaattagccccttctagtactgattcaatacttttaaaatataatcgtctagtagggattcagtactttaaaaatacaactggttttcactaacttatgatgctggtttcaaaggatatcaatttaacccagggtggtagagccacagggtctggtccaatagcagtgtgtgtgtatctaaatttatcaaagatcctatgtgggggggaagattactctgccccatggagctcctgatgagtataaacattccttccataaaaatcaatcatctgctctttgctatcgacatatccaaaggacaacacgagacactgaggggtacacaaagttctccttctccacctgtcataaaaggctttagactattaccggaaaaacaaggtacgtgtattaaaatagtgaatatcaattgagtggccctctacaatttctgggtaggggaaatcactgaaatggctaaattgataagattttatggagaagaactgacttgaaaaattaaaaacactctagaggtgatccagagtgaacagtctgagcaaaaatatgagacaggattgtggttgatatgttcacaggatgaaatagatggttaaaacagaatccactttaaggacgatggaaggtagattgagcctcattagtgggaggccctgaattataattaagaatgtggatgctatgctataaacgatactgta

SEQ ID NO: 899866 - DNA, 117204 bp, Homo sapiens
tacagtatcgtttatagcatagcatccacattcttaattataattcagggcctcccactaatgaggctcaatctaccttccatcgtccttaaagtggattctgttttaaccatctatttcatcctgtgaacatatcaaccacaatcctgtctcatatttttgctcagactgttcactctggatcacctctagagtgtttttaatttttcaagtcagttcttctccataaaatcttatcaatttagccatttcagtgatttcccctacccagaaattgtagagggccactcaattgatattcactattttaatacacgtaccttgtttttccggtaatagtctaaagccttttatgacaggtggagaaggagaactttgtgtacccctcagtgtctcgtgttgtcctttggatatgtcgatagcaaagagcagatgattgatttttatggaaggaatgtttatactcatcaggagctccatggggcagagtaatcttcccccccacataggatctttgataaatttagatacacacacactgctattggaccagaccctgtggctctaccaccctgggttaaattgatatcctttgaaaccagcatcataagttagtgaaaaccagttgtatttttaaagtactgaatccctactagacgattatattttaaaagtattgaatcagtactagaaggggctaatttcttagtttacctgtttgcaatagtgcataagtcttaagctcacacacagcagtatgtttatattgtacagtgttgtttcactttgtaagatgatgctacttcagatacagactatagaagtggcataagtctttttcagaaatgaaaataaattatagataaaaagttagtaggaacccaagaaactgccttttcctcatccttggtgcccttcttcttcctgacagtagaaaaaccataaattaaatatgtaaacagctgactactgataaagctgaaagggacaaaaagtgagtactctcaaagcaaacaaactcaaaggaaaaacaaaaggcaagtgattcttactagttttaacggtgaaaattgttaggggaaaaacatgaaaaaaacaaaatcaacttcaaatcttgagtactcatggtgcaaagacatagaactaaaatggttctgaagtatacggtataacatctctaagatggcatagtgggccagcttgtgctatcagtggggctgtatttacaggagtgctaatatgaggtctcgtctaagaggtgatgccagcgggttttactcctttttttatattctgcctgcatagtctaggacaaggccgttcacaaactagatgctcaagctttgttgaatgagttaccacaaagatttttagatcaacatagactcctaaatacaactttcaaagtaaacaattcatcagactacatggggatgtcaggtaactgtgaagaaaactgttgtcaaagtgaagcctaactcaagagtcaagagatttgttttatagaggcaatttttcttttgccatcttgaacattttttaagtaaataaaccatagctgatacagctcagaaatttaagtttgtagtactgtcatgtctaatataaatcactattaatggtaggaaaccatcggggtgaactttcctttcaggcagataatatattttcctaagagtatttgttgaactttatgatgatacatctgaagatttttaggatataaaactgaatcaaggatagaatagttctgaaaattaagatgcttttaaagtctgtgatctgttatgtttagacagagatgcaagctctgtgacaatgaaggtatactaatgataattgcttcatgaaaaggatgaagatcattagtttttcagcctgtgcttataatagcacttgtttatcatgcagttgaggaggaaaaacatgaaaaaagtaaatccagaaaccatttgattttggctcttaaagaaacttcttggtagcaaatagaaactgatgtcaattatattgagaaaaatgcactgaaaaagagacaagaagtatgccaaaacgttctttgtgatacatctgaagggtgatgacgtgggtgattcatttatgcctttgtatatttcatttacaaattttctataatgagcatctattagctttgcaaggaaaaaaaggttaaaaaaggcaaaaacaaagtatgaactatcttccgtctcttttgcctgctccctgagaatgtgacctgagacaggagtacattaccacatccttgctaagactccttatgaaccaagtcttaattaaaaaacaagttttgtaaatcacaaaaatgtttgtgcttataaaacagggggaaagtctcatgtactgaagagtagattgactcttgggaaaactgaaaattacaattgaaagatacttgtattgaactaccagaagcacttatgaagtttaagttaattaagcatacaatctagttttacttcacgcagatccagactcaatgtctgccttgcattcttcagacacatcaagaaaccttaccttttgtttttttcctcagatatttacatggtattcctttgcttcaaatttggttaaaggttgcctcctcaaagtttccctttccaccgtatccaaaatagcacctcatccctctttcctttacccatttgtttttagcacttgcttgtcatagctaacattatattatgcattgtgcttcttttgtctccctcattaaaatgcaagtttcacccaaggcaggtacttttttgttcacctctgtatttccagtgctgaagacaatgcttaatcttaggcatttagtaaataattgcaggtatatgattaaatatactgaatgcctttgctagggatgcagcattgcaaagaacaaaggtggataaagaaacgtaaataactacagaattgtgtagaaaatcaggtgttgctgtgatagtacagaagggagcaaacaattcggaacttcacagaataaatatttttaaatcattctgaaagatgaactggagatcattccttaaaactaatgaaattaagaagatttcaggtgagcatgtgtgcaaagacatagaggctatctatcttaaaccggttttctctctctctttttttaagccatttaaagttttggcaactgaaactgtaagtcacaaggcattagatgcagatatatacagtgcaattccaacagaaaaagtggatggaacatgttgttatgttactacctataaaggtaaaataaaactataatatttactacaaatattacttatttttcttaatcactttacagtctatctgaaatgaggcatttgctcttcataaacacttggaaacctaagtatagtagcaaaacaaaaaggtcacaattgttatagttcacttatgttactgtattttcttcctggtggaaaaaagaaaggtaactaaaatatttacttaatacccttaagggctcaggcagtatggtgcttgacatatattatctccaatttgtacaagtagcctctccatttcacagacaataaaaatgaggtttagcaaacttaaataatttgtccaagacccaatagtgactgaatggctgaactggcaatgggacctatgttcgtgtgacccttaagcttgttcttcctgcactgattccaggggctttattcctcttggcagtgtctctaattaatttcactttaatgtagtttaaaaggtagaaatgcaaatagaaattgtcagtcattttaagaagaaatgtacggaaaagagatttttttttttgcaattatttttggacggtgagattacctctcacttccagaaaaaaatagcatctggacacattcctggggcattaaatggacatctggacacattccttgtatcaggaaatttattctgaaatgcagtaaaataactgggctaaagcatacataatatttgccatcttaaccatttttaagtatgcagttcagtggcattaagtatgtttacattgttgtgctactatcatcaccttccatctcaagaattgttttcattttataaaactgaaatgctacccatgaaacaactccttattctcccaccaccagccccttgtaaccagcattctcctgtctctatgaatttgactactctaggtatttcatataagtagaatcatacagtgtttattttttgtgactggcttatttcacttagcataatgtccttaaggttcattcatgttggttgcatgtatcagaattttattcctttttaaagctgagtaatattccattgcatgtatctagcacatcttgtttatccagtcaaccattgctggacagttgggttgctttcatcttttgactattgcgaataatgccactgtaaacaggcatgaacagatatctgaggctgtgcttccacagaagtggaattactggatgatatggaaattctgattttttgaggagccactatactgttttgcatagtggctgcagacatttacctttctaccaacagtgcacaaaggttccagtttttcaatttcctcaccagcacttattttctgcttttttctgtttggatttttgtttttgtttttggatagtagccattctaatggatgtaaataaattgcattttttatgtttactggtaaaaaagaaacaaaaggtccattgaaccagaaacgataatacagttttaatctggttcttcatattatttatctggatagctaataagtagtacagaatatttggaccactgtgcagcagtttctttataaaccttggatttgtatacttgagaaaactgtaaaagattttttagactttgatgtctattaagaaactatagtgtgtatcattatgcgtgaggacggcaaactgggttagaatttaactgctaaactcaagtcacagaacccaaagtgacaatgcttacaaatccacatttattactactaaagaattactactaaattattactactaaggcattaaaagtaaagatgtgtattatagccaaggactgtctcacagtaaggagtatggagaggccaagtaaaagctactattgttccctgctttagagccttggcaggacacattttcttagatcaggaaccacttatgtgtgcaggcaaacagcttggaaccagggaatgcaaaatggactcacagctggagatttttatatttttgctggtcacgtaggtaggcagctgatgctcagcttcaacagcagagccctccagggttctcagaccaagctatcagtctcactcctaccaataaagaatactagcacagtgccctgcaactcctcagatccatgagtacaaatcaacattattagtattttcatgccttgatcaggggtcagtgccatgcagaacagctcagcctgattccagatgtgtcagaattaacccttacagcacagtgttatgtttggggggaaggggtggggtaaatacagttatctggttatgtttccattttgaagaggtagcttcagttgtccataaatgctgctaactcatacaatatgactatgcagtgtccttataaaaaagatcatatatttactttttgtctcatccccctcattctttaaccagagaaataagtcttctcatagcatcaggtactgctaggaggtatatattcttagactccatatttccctttgtcttctttgagaaattagcctcctgtttgttgacaaactgtattctgaaatgtctttcaagataagttttgtttgcatcatacttttccttttgttattacttttttagatcagccatacctttgggctcgactagatagaaaacccaacaaacaagctgaaaaaagatttaaaaattttctacattcaaaagaaaacccaaaaggttagtttttttttaacttttcatgtttaaatagctgaaatttgtggcatatttattgctgtggtatttctatacattatatccttctgtgtaatttaagcaatttaggaaaactataattgaatacttttatatataaaaggatattattgaaaaatattgtaaaatatttttgtaatatttgtcacttctttatagtatgagtctattaaaacatacaaattactgcatattgaaatgagtgacattttgtgtaagagacaaatacgtaattttataaatcaagtacaaatctcaggaaattaatatttttaattattaaaatgcttttaaatatctgtagtagatactcattgtatatctatgcattcatgtatttatgtttatatttgtattcatagtatattaaaaattcataaatctaatacttaatggaatatgattactttagtttgactgttaaatactgtatacaaatggcgtatatgaaattgaatatttaaattgttagtaccctaatcttaagtacagtcatgttgtggtgataatgaatggagaataattgtatcacacctgatattatgaggttttagtagctgttcccattttgagtctgtttagtattttacgttttttaagtatcaccacatacaatattatctttttaatattttttagaatttttttggaacgttgaggaggacttcaaaccagctccggagtgctggataccagcaaaggagacagaacaaataaatgggaacccagtgcctgatgaaaatggacacattcctggtatcatgatatctcttctagtgcagttttgtgtttactagtaaaatgatcaaaatatccattcaatcagaaattacagaattttaatctgggtcttcattaatatgtatagcacagaatttctgaatcaaatttatgtaaagtcctacatacattttatatcaaagatgtttcatatcaagaatgtcctcttaggtttagaatcttttctaagatgggcattttttactagctgtagtctgtgacaataaagcgtcaaaagagaatagccttgaggccaggtgcagtggtcacacctgtaatcccagcactttgggaggctgaggtgggtggattgcttgagcctaggagttttaagactaacctgggcaacatggcaaaaccctgtctctaccaaaaatacaaaaaattagttgggcatggcattgtgcgcctgtagtctcagctactcgggagactaatgtgggaaacacctaagccccggaagttgagactgcagtgaaccatgatcgtgccactgcactctagcctgagagttggactgtgaccttgtctcaaaaaaacaacaaaagaagagggaatagcttccaagttcttgtcaggatagatgagatgatctagtctgaaatgagatttcaagaagtggctatacctttagattagggatgggaaaattttgcgaaggtatgctgaataggaagatatcccagattaaggttataggttctcaaccggcatgtcttgagtgcccattatgtgcaaagtcctcttagtttctggtaatacaaaaatgaaggtcagaacccttgtcctcaatgatctttaattagacattgggagaaattaaccaataatagtatgatttaagaactaacaggaatgaatacatcaggtgccactggagaaaagaggaattcctcattcagcttgtggttagtggaggctcccaagaggagtagacatctgtactgaagcttaaggaccaggaagtcagctgacaaggaagagggaagatcagcttaggcaaactcccaggaagagggaatatcagcttaggcaaactcccaggaagaggagagggcatggggtattttgaatattttatgtaacactttattgcagctagaatgttcagggtatatgacatcatgaagtggctgtaaaagttgaggctagaagtgtggtgggctcagatcggaaaggcccttttattccatctaaaggagtttgaagtttatcctgaagataatggtttttaatcagtggtacagcaaaagcaaatttaagttttagaaatagaactatgataaaagtgggttggatttcactggaggctaggtgaccagcaaagaagttattacagtaatctagtgtgagtaatgaaggaattctggcaataagaatgagaagggtaatagcaataacattcaataaacgtggcatcagtaaattgttcggtatatattggaacattttaataaacttggaacacttaactgcattatgtccattgtccctgaagcttgagagaaggcagagagaaaacttattttatataaaaaattttgagtgctgtgtcttagaataatgttcagttcttaatgaataagggtgaattttctagtaagagaatgctaggtgctgtgtagtgaataataggttaattctacagaataaaaaatgaacccttatgattttttaaaaagtaataaactgttaactttcccactgaattttaaagtaatatctctttgcgatagacacccagaaaacatgagaaatttacaacaaaaatataaattacctgtagtgtcagtccaaagaaaaacgatctaataacaaataattttcttctttatatgataggttgggtaccagtagagaaaaacaacaaacagtattgctggcattcctctgtagttaattatgaatttgaaattgccctggtactaaaacatcatcctgatgattctggacttttggaaattagtgcagtgccactttcagatctcttagaacaaacactggaactcataggaacaaatatcaatggaaacccatatggtgagtgaagactttttcttgttcagttattgtaactgacatttataaagagaactttctaggtcaacttaaaaaacatacacacactaaagaaatgactaacaaatttgagttagtttcctaggattatatccatttctgttaactttacattcacagagaaatgaaaccattttattaatccaaaaggttgatttttatcctcattctttcctgtaataacattacacaactatatatgaaaagtaatgactcagttgtaacccccttgcttttaaaaattcaggtgagttgagtcgattgatgaaaatgcacttttcatggttattatagcatcaatttaaatagccaacggtataaagaattggcaatgaataataccatgttaagtatcaaaatatatatcatgatgaattgagtgcaagtactgagagcactatgggttacaccttgctgacaaggggatgggaagacagacctaaggatgctaaagctataataggaaaatcctatatggagatcaaaagaagactgccaggtgtaaagaagctaagatggtagttagacaagttatcagagatacagtgcagctgtttggcaaacgttgaagaatagttgaatgtggccagtgccacactggtaccaaaggttggtagactttttctgccaaatgccagagtaggtattttaagttttgtaggccactcttctgaaaggagctacagacagtacttacatgagtgggtgcggctgtgttcatggaaaactatttacaaaaaaagtatctgtccagacttgacctgcaggtcatagtttgctgaaccgtggtggagagtacaccaaggtggaatttagagttattggaataaggtgccagtgcactgggttatattctttttaaggaaaccaaccagcctttctacctttattcctaagtgtttcaaaagactttatttgaagaggtacgttttctagttctgaaagttcctttaaatgaatatggctaatggcaaattttcccacttagggttagggagcaagaaacatccattacatcttcttataccacatggagcatttcaaataagaaatctaccttcattgaagcacaatgatctcgtgtcctggtttgaagattgcaaagagggtaaaattgaaggaatagtgtggcattgcagtgatggctgtttaataaaggtaatggcaaaaatagctccggtggggttatgtcatcttatattcctacaatagagtagaagtgacactaaaattctctctacaaatggcagcaattcttatttgcagtaaagaaatttaattttctcatcccatgtaccaccattttttaagaggtaaaacagtgcttcccagtgtgtattgtgtggggcatcgatcataacaggtgtgcttcagaattaaagtgataactatatatcccctgcgtggaaattcatgttgcacagtagtgctctcagagacatcttgtactaacttaactcagcatctcccagacttgagtgtagaatctgttgagtaaaaagagtgccaaggtagcagttgatatatacagaatgaattatcttatactttgttccctttctgtctcctggacttgtctgtttgatttctcacaggtacctgaaattcataatattcaaaactgggcctagttgtaactctctgagtccacataattcactgaagtaaaaacttggatattaattttaacccctcttttcattacttcatacatccagttatcaattcctaacagttctaatctatgtacttcttcccaactgttaattttaatttaagccaagattcatgctttaactatcatatcaccctccaaaaatagtatctttcagttttagccctgtcctctccattcttcacaaatgaatgagcatattactttcctgcataaatctgttcagttacattaaacattcatgatctggcccctacttaatttcccagaactgctctccacctctgcccccgcaaacacactcacactgtgtttgctgtaaccatatttacatgattgcaattagagcaaaaaactccattctatcatataacattcctttcaattagaatgcctccttgcccacatttttcaggtagctagtctgtactcagcaacaggctctatgattcataacattttatggagcccctgataatgttcctggcatgtttccaggtgctggacatacacagtcaacaaaacaaggtgtctgccttcatgaagctcacattctaatggggaagatagacaataaacaaatatgtaatatgtcaggagaagaccagctataaaaaaaaaaacagtaagataaagtggagtcttacccagtacctggcagacagtgggcactcaaatatttctaagtgaatgaagatagtatctgtatgctaaagctaataccttttttctctttccaggtccatcgccatcatcttggcttatgctggccaattccagatacttacatgaattcaagaccagttattatcaacatgaacctgaacaaatgtgactctgcctttgatattaagtgtttgtttaatcattttttaaaaatagataatcagaaatttgttagactcaaagatataatatttgatgtataaaatgcaaataaaattagtttatcattatattctaatcttgaatattctaccatatttaaaaatatctcaaggtttctgttcattatgaaacatcaatatgttttctaccatttgtgaagaaatgaattttccagtttcaagtacctattcaaaattttattaaaaaccagcaaattaattttaatctctagccataaaaacataagtaatagtaagctcctaagcttggacaaaggctggattctcttcactataactgagtggtaatttaaagacaacaatttaatgtcactaattttcaaaattaaatagtttaagctcaatttaattttgctagatatttaacaaaacatacggctcaacctcataacctatatgtgtgtatgtctacatctgtgtatatatcataggatttgagaatcttaacacatgtataaataagtatatataaactccaattttaaatcttaaaattgctgaatttaccctcatattctttaaaaaacttaaagcattatgaatgtagagaaattcaccagagctcactgcctatttgatggctgtaacaagtcttcaagtatatacttttataataagttgaaaatttcatataattttatttattaagaattccaatctaagtataaaggtacaaggtagtgagaaggaaatactacagttcggagaactgcttatttccaagtatatttaacttataaagttaataaatagttaaatgaaacaaagtttataggtgacctttagtaaatggggaaattaacaggactttcttcttcatcttcaaactcttcagaagcagcaacagggctagttaattcaactcccaattgttctgaaagtttttttaccttctcttctaagagaatattcttcttcacttcttccttgtaattatacttaagatcttcaatttcttcaaaaaatgaaggatcaaaattttccagttcttttttcagcttctttatttcctcctaatggaaacattatctttaaaagttgcatataggaaatatacatattttacgtttgaacaaggagatttaattgtaaatatgaaagccaaagtattcctgaatggtcaaatacagcaataaaggcagaagaattaagatttttctttgttccattgtacagtgtaaataactaagttgttaactgtcaagtccagttatgtattctgtaagttgtgttctagtctttgactaaaatttatcatctcttataatgggacttaatctttctctaaaagcatataagagcttgtcaatagagcaatcaatcaaaaagattttgtgattcataacattgaagttagtctggttaagagttttggtttagacttcatttatattttccttactaatatctaatatttaatgaataatgatcaattttttataaagttattaatatgatcagggaaacctttgggacttctgacaggcatctggtgaagagacaattcaagccttagtgactatttagaatagccagtgatcactagctaattctcatatccatgcctttttgtcctgtttacagtcttaaaagaggtaaaacagcaaatatttttttaagggaactataaccttaggattcctgaaaagaatttcaaaaaaaaaataaagacactgttgccaatgtgacccaaaacttaagaacatactaatggcatatatttgttacaattaaaaaataaatttactacttaatcctatgttgagtctgaattttttgttaactctaatatgttaggaatagtcagatgaacataattaactttgcaatataaaggtcaaatataagatgttattactgaattttttaggatacgtagttaaagatggtaatgaaaatagttttcaacagctgttttcacaaaacgatactaaaatataattaaatattaccttcaaatgctgcttttctagatctgacattttgagctgtgtctctagatcttttattttttcctttagttgatcagcatctgttgaaaaagtcatacaaattagactcagctttttcccactacgaatgagttcaaggtaatggatttgttctagagaacagagatacattttatgaaacctagaacctggaaaacactggatgttatggctgaaatacttcaggatgtaaacacttaatgctgcctccctccatcaagtattataatttcatagcaggcagaaagaggtatgtgctaggtattagaagtgtaggccaagttattttttcttcacatgatagaaattttacatggaaaaaatcctaaagccagggaaacttgttaggtactaaaagtacaacagaagaaaagcagactgttgggtaagggactataaccataagctagccaaatgctcccgctatccaacacaacactggctattccatgtaggttattacacatttactgtgcaattactatgtgcaaaacgtgtcatgcaggctgtgtaatacaaagataagtaagacatagccctgatactttggtaggaaaacaaaagtctccaaatatagcacaaaagttctaatttattggattcaccctccaagttaacacctctaactttatcagcaggcaaataggatttttgctttaatgctatctttgctagatatctcttttctttatattatactacatttaataagtcatattttacagccattgaaaaataataaaatactaaaagtttgcgaaagtaaggggcagcaaacattttcatggctgggacaagtatctttttttttttttttttttttgagacagtctcactctgtcgcccaggctagagtgcagtggtgcaatcttggctcactgcaacaaccactgcctcccaggttaaagcgattctcctgccttagcctcccttgtagctgggataacaggcaagtgccaccatgcctggctaatttttatatttttagtagagacagggtttcaccatgttggccagagtggtctcgaactcctgacctcatgtgatccacccacttcagcctcccaaagtgctgggattacaggtgtggtgtgctactgtactgggcttggtataaatatcttaaaagttatcttgccatttatatagacagtgatttagaatttccaaaacagttctggtttgatcttaagccttaatctttgaaaaatgacaggtaatctgtctacttaggaaataaggaattttgagggttcagaaattcccttaagaaactgaggaatggaaagattagagaactatctatggccatatgacccttaatgcacatgcacctgatctctgatctcagaagctaagcactgttgggcctggttagtatatggatggaaggaaaattataaaattttcctcacatcaacagcattaatactgtgtctagtgtacataccaagctggctgctatgagacatattttgagagtatttaatatgtacttttagttaccaagacgtagcatagcatagcgggttaaggactaggaatgccaaggagctgtggagtttcatacatttagattttaatcctgcctctatttcctagctggcttagggaatggttacttaaccactttgaatttgtttatcacataaaatggagacagtaatacctatcatatatggttgtaaatatagaatgcttgtaaggcaattagcatagtgtctagtacaactcacacatgatggcttttattacaaattagtaataggactacatagcatactgaaaaagctacaagagatagtcaaagatagttcagatataaattggtataatcctttggagagaatggcatctctatcatcctatcacaatggcataattaggtcaatagattaatcatattttatagaagcagaaacttggaagcaaactaaatatccatcaaaacataaatggttcgatgtgcttatacatgcaataatacactatggaattattaaatggatgagataatttatgaacagacctcaaaagatgtccatgataaactgttaaaggcaaatatgctagaaatgtgtatagtattagttcaattttatgttacttgccaagaaaatatatatacgtaaatgcaaacaaagtattctctatccatagtagttttggtctataaagttagcccaattagtgaatatcaaaccactgctgctacgggaaatatgtacagacatgcatatatatacatacacgcatatatatacatacacgcatatatatacatacacctacatatctcacacagatgataatcttaaatcctaaagataactcatcctggtaaattctatttatttacataagaaaacaagattcagaagtgttacatgactctcctaaggctagagcagtaacaagcctcagaattgggattcaaatcccttccaccaggccccagagccacagcttcttgcactatgctgtgctgccctctactgtctccatcctctgctcatttctctatgaaaactgaaatgaggatactgagcactgccttgttggacttctgctggggacatgtaggttggattattcaaactttccaaggctctgtggatgtttgcaaatgtgctgcgagtgttgatttgggattacatacacactttagtgaggaggtgatttagaaaatacagaatccacaaataatgaggatatgtacattgtacatatgaacatacaaacacatgtatgcatatgtgtgatatatatgtatacaaaatatgtgtgtatgtatatgcaggaatgaggaatgattagtaatcacttttgaatgggaatggaagggagcagaaagattttctttttactttgtaaacggaaaaaaatataggcagtatttacttatttgcagtttttaaaaatgttcagaggacttgaaagagcctatacttagaaactggaagcaacagatttagtattcattgcttagcactgtattgtgattaaatctgtaacacccagatggagaacaaagagaagaacacttgggtacttgctactctatagtataaacaacacaaagagaaaaatgggaatatttttatattaatagcacagagagacaaaagacccaaagcttatcaggaattcgattttacagggagacaatgatcagaaatctgagccaaaaaaaaaaaaaaaaggcaaacccaaattcaaaaacttgggggtagctaacatgttttttaaaatacattaccaggtatggtgctttcagctccactttggtccttgttagcttctatctgatggattaattctgctttctctttatccagctgatgattagctaatctagaacacaatgataatgtgttaaaaaaataaagcagatattgcttcataaaatatatgggcatttcttatgaactagtgatgtacagtaatcagaacaagctagcctttatcgaagtaaacatttactctcaatgctacaatgtcaccattctcaaacaaaaagcctggaatacaaaagccttcacgtttttcttaatatctgacctgatggcatttgcaagtgtggtttcgttataagaggagcttaatgaaagcaggctacagagacccctgaaagtaaaaaaattacttgttctctttcattagtattttcctctgggaagctaaggtttaactcattctatgctcttagaaaagtttaaactaaattacaaactggaaacttagagttgggtttatcctttttttctagtgtgtattatgaaaaagagtgattagcattagagggaagaaataaggacctaataagcctgttaggcagtaaagtcgaaaaatgcttgtctctagttgtagcaattcggagtatataaaaactaataattttttttttaaagaaaaaaacaaagtagtcatatgaatacatgatgtacctaagaacttgaagctcccgtttaaggccttgctctgtctcagcaccttcaggaacatgtttaagaatcttaatctttgaggacaatgaaaagttagaagataaggtttgccatggaaatatgaggatttataaagatacacatttttaacaaagcgtaatattaaaatatggttttcaaaagcacgcataggcaaatttctatgttctattcaccattcattcaacaagtattgagtaactactgcataactggcattgtcctaggcacagaggctaacagcagtgaacaaaatggcaatgttccatcttgcatggtccttgtttagtggggaagcacaaagaatgtgtgtttaatatgatatgatgtaatatagtgccagatggtaggaagagctatcaagaaaaaataatccagggtaagaggataaagagtgatggcaagtagtatagggttagggttagggttagggaaggtctctctaaggagcctctatttcagcagagacatgaagtctgggagcaagctatgagaatatttgggtgaacagtattctaaacaaaggaaacaagtataaggacttgacgcttaaacgagtttggattgtttaaagtactgaaagaaggttactgtggttaaaacattgtgaatgaaatgaagggaaaagtagtagaagatgagattgggaagaaaactgggtgccagacctcatatgttgttttgggatatgaaaagaacttttaagttttattttagggtgatggagaaccactggaagattctgaggataggactttgtgctttgtgatgtgctttatgttttaaaagggttacctggcaactgtgtggagacagcccagaaatagaaatagggtgaaataatccaagagtggaagctgagataccagcttggaaattattgcagttattcaggtataaaacaatagcttggacaagactggtagtgatgtctcaagataccaagaagtggtcatatttaggatatagtttgaaaatagagctgacatgatttaatgatagaaaatgtggagaatgaaaagaatgaagtcgttgatgatccaaagtttctggcttaagcaaatgggtgaatggggtgcccttcagttagatgggtcttcttaatagagtccatttttatctatataagacaatgcaaggaacatcttgcgatattatgcattattttatcatgtaaagaaaaattacgttacttacctgttgttcaaggtcttcattgtatttgttaactttttgttctctctctgttgcttcttttacaagctgtttaaggtcagtaatgctttgattttttttggcaatatcagtttccaattcttttaacttggtttcatacattctaaaagtataaggaaaaaaagtatagacatggcaaataatttatgtcactgatttaaaagtcagttcaaataactgtactaaaaataagcaagaatatcttattttactgtttcttctagtcaaagttttagctacatatttatttagcattaaaaagtggtggcaagagataaggtatccctaattaacagatggcccaatcaaaataaaggatttgggtattttccaaggatggagcctgatttgaccattttaaaattaataccttttttcaatcacaaaataagaaaatgcaaagtaaaattcttcagaatataaaattctgtattactagatattcttagaaatataaagatggcaaataaaaagcttttctcacatacacagacacacataggaggtatctaggtaggaaaacactaagggagaggaaaaaattgtgcaaaagcatgggtaagaaaaatagtgtatgatgggagagggataaagcttgtaaaaatctgaatagatttataatcattaaagaaatgattaatagttcaaaaaaatacagactccagaaaaaaaaaattcataattgaaccaaacagttctgcaggttcatcatacctaaagaaaaataatgcttacaatatccaaacttttccagagaaatgaatagaaagactgcattctaagttaaaatggccagtatagctttggcaacaaaatctgctaggataatacaagaaaggaaaattatgattgtctaaatatattcaaacagcttttgatagatcttagaaacttagattagaagggaatgtttttaacctgacagagattatcacagatctaccacaagtaaacagtgaaatatcagaagcttactccttcacttcatctaattttctattcaaaagccacccaaacagagaggcctcctctgatcaccctatctaaaacagcccccacatcaccctggtttgtcccagtagtcaggaaaaggcctgacatagaatacgtgttactaagtttgttgaataaataataaagcaactataaagatgtcagcatgagcaagacctgtgtcatgggtcccaaaagagatctctctaaactgctttattgagaagggtatataatcctcccagatttaaactttagtaactttttttctttttctttctcttttttaatggatttagggaacctaaatttgaggtcaaggatcaaaacgagccttctctctgtcaagagatttctacttagacttatgtcttctgcaatgtcttctgcaaatgatttactgaaggcttatggtatgctcagtgacctgtatcgttctcagacgaaaaacacgtatatgatctaaaatgcaaagtcatcttcaattatggttaaatatcatcatcacctctactaaccatttataaaccttataaactctttttgcactaacaatttcttttgtagccccaaagagccctcttagaaagaacttgagcccacagaaaggatataatttacttaagatcatagtaagaattagggtctttcaaaaccagggaagccacctggtcctttgaggaaatctaggcaaggtgggcttttaaaaaataatatccaacataaagcagagtctggcaataggaggtactaagtaaatatctgttgaataaatagatttcagagtaactcaaaattcattctgagtccacatgtgattatagaagaaaacaaaggaacgaccaagaaatcaactgacaggactgctggctcagagccactgctagggtccaataagacagtagaagagaccccttctcccactccatatcatcacatttgttatttgttctcaccttgacactggctttctgacagaataatttttcccagtgtgtagatgggaaaagtgagagctagagtggagaagtgtggattctgggtactctaggtttagtattaggacaggaaccaaggcctcctccaggacttcatgtccatctgggctgtcctttaatatgcctgcttaatctttctccttagacttggttgacagaggcaagtacagtgcagcaggccctctgtgggacttgctgtagcctcacggtactaagactcccatcctagttgtagtgatcactatcttgcctcccatcaagaccattccaaatagcagacatggaagatgaaaacctcaaagacatcaaaggggacattggaggtgcatggacataaggaactgtatgagaatgttgagataaagatgagtatgccttttgaaatgggggcggcagatgtgctagatggtaaaggataccacttcatacaggatggctttaatgggaaaagacacaggcaggatcccactggtcaatgacttccagactccttgaagcagctgcttaaaattggaaatgagaatgacacaaagagccttttacctactcatcacagtcatgatgaaccacacatgatgatagtggcaacagactgaatgtttactcataaactaccactacctctttcatagccacaaaaattagtttcacaggttggaatcccatgtgttcggggtgggagaaaatcaagtaccagaaagcagaagctagtaaaacatcaaagctggtgctgaattcatctcttggggctatctgaagagaaagttgcccaggatataactctaaaagcattgcagcacagcctagatccagtatgccacacattgtgacaagacagctcaattattcctggctcatacttgaggaagcaaattatacaatcaagaagctgaagctgcagttggagaaaaatagcacccaggagaagctgagcagcctcagcccaggctcatagctgatgacagcttcatgacgcacacacagctccaactccttcgcccagccccagctctacactgttccatgccctgccacccaaacaaggttaaacaagttaaacatttcaaggaagaaaaagtctccaacaatactacaacagaaaaaaagtattatgttaaaacaacaaccaaacaaactgttcatcaggaagaaaccaggttatccagaatagtgttgtcttttaaaacaatgccaaaatttgaaatgattaaactttgtacaagtttaaaactctgttcctaccttgtaaccacaatggatttccagctcttactgtcagcaccttcaagctgtggacctctgctttctgcaaactgcaatctcttaccagtctcttctagttgaactgtcatcttctcatttaatatctctaaattattctttgctatccgtaatttctctgcagcatcagtttcctatcattaaatgctaattagtattttatgagaaaacataatactgttctcatagattcagtgtattcaaaattatcattacaaattggaaaacaaaaataacctggggctctaaatgctgattaaaatttcaacaaattcaacatctctcctttaaagcagcaatatggccaataataattagaacaacagatcacgaaaatgaggtcagaggaatatatttagttactagtgattactttaaatttgacactttgttcctctatatttttagaaaaatgggatagtttatacctttacacatgtaaaagattctttgttttgacttcctaatgcttacgagacctagctataagcataaggtatgtgtaagcaacgtagatcatttcttttttttgtttgtttgagatggagtctcgctctgttgcccaggctggagtgtagtggtgcgatctcggctcactgcaacctctgcctcccgggttcaagcgattctcctgcctcagcttcccgagtagctgggactacaggcgcccgccaccacgcccggctaattttttgtatttttagtagagacggggtttcaccgtgttagccaggatggtctcgatctcctgacctcgtgatccacccgccttggcctcccaaagtgctgggattacaggcgtgagccaccgtgcccagcctaaatgtattaacttttattatcaatgtttttcatggtggaatgtgatgacagcaggcatagaaacacaattcctcaatctcttaatatctacctttacagacactctcatcaaggatctacttccagtttttccaagaggtattaagtaaaataaaaatcaaaagttataatcagtcataaaagtcatacttttttaagttctttacgaagcctttcattttcagcaataattttttctgtgcctttggtcttggattcatagtgcatgctcaactgatgcccaagatgagctttaagtttttctaattcagcctagtaaaaaaacaaacaaaataaaaagtatacattatcaaaacaaggaaataaaagataatcttataaactcataaatcttcaaagtagttttagaaaccatatttgatatgattagaattaaagtcttcatttgaatattagtgagaacgaagttcccaacgttggctacatattagaataaattgatgacttaaaataacaacaacatacatatctgtgtcaggacccaccctaaaataattaaatcaatttcagggatgggagcttgggcatctgtattttcacaaagagacacagaggccgcagtgggcggatcacgaggtcaggagatcgagacagtcctggttaacatggtgaaaccccatctctactaaaaatacgaaaagttagccaggcgtggtggtgggcacctgtagtcccagctactgggggaggctgaggcaggagaatggcatgaacccgggaggcagagcttgcagtgagtcaagattgcaccactgcattccagcctgggtgacaaagcagtactccatctcaaaagaaaaaaaaaagagagacacaggtaattaatctatgctgtcagagagaaaagtgaaaagtattggtcttgaaataacaagaaagatcaggtagacctactctataacccttagccttgcctctcataagtttttttctatatttataaaatatgtattgtattcattaaagccattttatatagtaatgagcatatttgaaattttcctaaatagtaacaaaacgtaaaatattcccctaaaaatgatcacattaaaaaaaattaccttcaatttttcattttcctgctcaatattagccattttttcactagtcaatattcctgatgcttttttcaactgttcattttctctctggactttttcaactacttttttcattaaaccaatggttttttccagttctgggattgtctttccacttctaccagactacgaaagaatatgttaaatctttaatcaaatattttagtaagtataatacgaagtaccaacaatacaacaggcttattatactcaataattcctaatatttgaagtcaaaactgtattaattcaattcatccttaaaacaattctatgagataggaattataatttccattttaaatacaagaaaaccaagacttaggaaatttgacattcctaaaatcatgcagctaataagtaacagcttaaatagtctagccttgatgtctgatcaaaatgattaagtctaaatagtctatttagctaatgttctctccagtatatcagagtttttctttatatgaaataaaaccacacaagagaaattgtgtctttaaagagctcatgagtaattaaattttaattgcaacataatagaggcaattttctctaagaaatgctattgcttagaaatacagtttctgtttaatataaatagaagagttatctgaaataaaaaaccttgcataaatatatcagcagagatgagtcatcacttaataagtttaactgcttatcatttaaaataaaaataatttttaacagtttagccaaacagtatgcttaatttctttttgcattttagttaatcatccatgaataagaataatcctgaaatataaacttttacatcattttagtatgcactttcataattaacttagatagaaaaggtcaaattaacacatattttcattgatgaaacaaatgttgctgccagcaagatactgttctgaatatttttccttttttttttttgttttaaaagatggagtctcgctctgtcgcccaggctggagtacagttgtgtgaccatggctcactgtaacctccgcctgccaggttcaagcaattctcctgcctcaacctcctgagtagctaggattacaggcatgagccaccatgcccagctaattttcatatttttagtagagatggggtttcaccatgtcggccaggctggtcttgaactcctgacttccagtgatctgcccgcctcggcctcccaaattgctgggattacaggtgtgagccactgcccccggcctgttctgaatatttttctaataacacataatattttcactgaatccatcatatatttaatattactaccagaatgactctgcattatgattgcttccatttatgacactcagcaacatgaaatcaacaggagcttaagtctttggccttgacctcataagcaacatttattcattatataaaatgaatacaaaataacatagggagaaaattacaagaacacaaaaaaagagggggaggaacaatgtaattataaaacattataccaagctgggaagatatcataacaaatggttacaaaatggcagcattggaccaaggaccagttagcagttacctccataaacaaaaggattcctggaagttaaatgttttcaaggtatggaggcatattcaataaaaagagagatgaaagtatgtaaggtataacagatgataaaatactttgagacacatagaaatgcttactgttttatattacagatgcagaataaacactgaaactacagggcacttgtagaggcatatcagtacttttacaacatatctaaacttttcatttctggcttatcactgctgaaaccaaaacaaatgtatggtaaattctcacatacccctctaacatggccaagtttccgctgaacttctgctttttctttcttaagaaattcacacatttccttcaaatctctgacttgattctgaaagataacaagcaaacatgtaataatttaacatagctacagccattgaaaagaaaaggcaaacaattcataagaaccatcaatctcttcaactgtattgccaaaccaaataatagggtctctatattaacaaggaagattttgaactaagacgttaaattaatacaagaatattgtgtatatgaaatgtcaaggtatttcccacattattgcctgatgcaataatacaaatttagaattctgattttaactgtcccatatattgcacatatagatccttacccaaatatacacagcaaaaggcaaatgaacgtctaacattggttctatcaatgtaaaaaccagaataagaagcagtaccaaaaaaaaaaaaaaggaaaaaaagtgcgaaaaaatggcagattagtgccctgagtaaataaataaataaagtgtgagaagcaagacatagcttaactatatcattaccagtggaattaacagattgctaacattctagattagaaaacaaaactgaagcaattagctagccaaaagaaaaaaaagattcccataaatagggtaagacttggaaaaccaaagattaaaaaatcattattaatatcagaataaagtaaaatttctaaaagaaacaaattattcttatattttacagtgtgataatttttaatgaaatataccacgcatcctcccaccttaggacatctgaacttgctatttctgttgtctgtaattatttttctagtatctgtatgactcacttcctttacccctccttagctctctgttcatatatcatcttattaaggaagacctcccttactactctattttcagttacaccccttctctctccccatactctttacaccaatcatgctttatttctctccttagcactaacatcagatgacatactatttagtgacttgtttattgtcagtcttctccactagaacgtaagtcctatgagtataaggaattttttgactgctgtttcccagcatctggaggagtgtttaatataaagtaggccttcaacaaataaatgctaaagagcaaatgtataaagtataccatcaccatgatatattaggaatatgcatttttgacttcttaataagctaataaaagtaaacataacaactaaggaaggagttttaggcattagatttcctaataaaaaacattaaattcacctttaatcttggcaaatctttatttgcttgttcaagctgaaatttcagttcaatattttcagatgacaacttcaagttttccttctgaagctcctgttctctctgacaatgatcatctgactctattcctgaaatcttcagggaaatgaaattaggaatatttttaaagtttaataaataaaagccataaaagacatactggataagaaaatactgtcaaaaggtaactttttttcctcaaaggaatatgagaaaatcggagtgttctggtgaaagccaaaaataaataagttagaatacaaaacttgcagaacaaaggtagtatggtttgttttaattacaatggaagcaaagcaagtatgacttaataatgtccatacatataatgccttcatgtataatttcataatggttaaactgatctatggtggttttactagtccaaaataaagcacgattgttatctaaccgttatgggttgaactgtgttccccttaccctccacatttatatattaaagtcataatttccagtacctcagaatgtgactttatttggagactgggtctttacagaggtattcaagttaaaatgagatttcagggtaaaccctattcgactgtgactggtatccttatgaaaagagaaaatttggggatttagacacagagacatgtacagaaggaagatgataaaaagaaacagggaaaacatggacatttataagccaaggagagaggattgggaaagatctttccctctgattgtgcagaggaaatcaaccctgctgatgtcttgattttggacttctaggtctccagaactaagaccataaatttctattgtttaagccaccaaatctgtagtagtctgttacagccaccttagcaaatgaatacactaggctacaaaagaactgccataattctttactccttcggaaagccctccttcattctttgagctaaagtaatggttccctctttgaaaaccattaatattatattttcatttcttttgacctgaatctacattgggtcattatttatgttgttacttctcattctaaactttattttttttaactgtgcttaattatatttttctatgcattttttctataaattagaataccacctacctcataggactgttataagcatcataggaaataattttttttaattattcagcacaactttcatttttttctcctttctctctctattggcttgatgggctgtaaagtcagttactccaccgacattatgggtcttaaaatatattattataaaatacctattatacacaactttataacatcttttagatccaatgactgcatgtgtccatctgatttttgtttgaggagatgtgtgtgcacatgcacatatgtcgtagcaaaaaaaagaagacaaacatttttgttgatatatgtaaatcacaggaatacatttccacttaataagaaagcccaagtatacattcaaatctaccactattaggttaatactaggcaaattctaccactacagtttataagtgaaggcattagacaggataacttttaaggttatttcagatatggacatctgtgatttcctgtccctgagctcttctatctcccaaacttcctgtcttctgttgtacctatttgattcagcaaatgataaacacctattaatatcactgattggtagatataaaatatattaaatattagagtagagggtaattctatctaaggaagatctcacatgaggatatttttaacacatttctcactaaaatatgatgcagttactattagtgattatggctcattttttcccttgcattttgaaataataaaactaaaggtattcgttgagatagtccaaatttctgaaaaacaaattctaatgtaatgctctcttgtaaacagaattcttgtataacgaacttcacgagacttccaaactcttacagaagaataatccggttaaaagccatcaactacttaaaatcaaattcttagtggataggagttagagataatgcctagtggaagtctcaaactcttatttattagcatgtgaaaaaaagtgttatgaattaaatcactttcagccattttctcttaacatagatatttaattttagttgatgtttccatgacttaggtgactggaatatctcaggtggacagtataaagaaaaaaacgataaatgctatgaacaaacttttattctgtatctcaatgtaagctagccaaaagtagtacgtacataaaaagtccataaactgtagagttagactgatattctgcaaagtgctttttgtttgtttgtttttgtttgagacagtcttgctctgttgcccagtctggagtgcagtggcacaatcttagctcactataacctcaaactcctgggctcaagtgatctgcccacctctgcctcccgagtagctaggactacaggtgtgcacaatcacacccagctaattgtttctttttttttttttttctggtagagatggggtctctcaaggctggtctttgactcctggcctcaaatgctcctgctgccttggcctcccaaagtgctgggattgcaggcatgagccactttacccagcctatgtgaaaaatatacttaggcacagagcctaacaccatttatcattatcattattattattttagagacaggtctcactctgttgcccagtctggagtgcaatagggcaatgtaacatcaaactcctgggctcaaatgatcctcccaccacagcctccctaatagctaggactacaaatgtgttccaccacatctgtctaaattttttgtagagacagggtctggctatgctgcccaagctgatctcaaactcttggcctcaagcaatcttcctgcccctgcctcccaaagtgattaaatgagtaagccacagcatcctgcctgagcctaacacaatatagacagcaacacatccaagtttccttttctcattataacaaaattatctgttataaaacatggcaaaaaaagccactgaaggaacttagtatacatcttaggacactgcacaacactgtaacaaaattttactgatataattcgctgtagtgagatcttacttctaaatacagctggatggattagaagtttgtaaggcaaaacaatcaactctaaagtaccttatttttgctattcatttatctaatataacattaagtgaacaccaattgtaaaaaaaaaaaaagcactaaattagaaaatgcatattcactaatttttgtaggaactaatcaaaagttagagcttaagataaagtttactaatagttaatgctttttctaaatcttacacactttcccatttgcactatatatgtacgtaagctacttactataagaaaattcagttaacaaagaaataaaggacggccacgtagccaaaccagggacgcgtcctttcttggctggactgacgcatcagttacatcgcctgcctgtgcatcaccctcagctcactaagccacggcatcagcaactgtcacataatcacagtcctccatagcagattctacggatctatgtagttgttgtgactcacattttcagctatgtgtctctttcctttctcactcttgcctatcttattctcttcctcatttttatctttatcattttgacaacattcttgattaattttaccaaccttaggatcatggttcattttcaaaaagggagttaaaatctgccaacttaccatttgttgacgtaaattgactttatttattgtttggtcttgactctgatttatttaactcaataggatctaaaatgtgttctaatttgtatttttcatcattactgtaataccatagaatatttctaggtacccaattatgtaagtcatctttggcacctagtcttttaccatttttaattctgactgttgccatgatcttttttggttctgaacaaagtgtttcttttgtgaaaaatatcatgcccttgtatttattaataatggtaacaaggatagaaaacatagttgtgtcacacacctgattctgcttaaggtggaagaatgaagaaacatggaaagaaaaaagaaacaaaaataatacactaaatatttaaaaaatccaacaaataattttacattaatgattaatgagtttttataagctaaaaatatagcataaatatttgaatgaaaacagtcttggaacatgttttcctattttatttaactgtatactgctgctacagcaaaatacataatgataactacatatttaaaatttctagaaatcatttatgagctttatgaaaagcttaagaatcttaagtttactgttattatgttaaaaaggattaaataaattattacacatcactacctgttaaaaataaaagttgaatttactgtattactattaatgagaaagatgtaatgcttttggccagattaagaaagaagttgatttcactttcatgcattttaacatggaaaaaagaaaaaaataataaaagatatacacttactgaaggcttagaatatgtatcctttgaaaactgtttttctaaagcatgaagtttttcttggaggtatctattttgtaaatgtaaatcttctacaacagaatctcgaggaagagcttggtgggccctatgaacaacaatcacagactctttactattcacatttcatcttttttctgttgtactatataaaaatacaagataaaaaaagaaaagttcagtgtgtttattaacactatattttaaattcttcaaaccttctaaactttataacaaataaattaggatatcaaaattagtattataaaataatcctctacagagcattcactgaaggcctcctttaaatgatgagtcaaaaagtatattttgatttactgaaatacattaacatttttaaagaacatgcatccatttatatggaattacataagacagttaaactaaaatacttactattttaaaacattatataataactgcataatatccatggtcttctcaagaagctcaaggatctaaaaagactcttaatgatttcagataataatttaacacttcaagtctaaaaacatccacttgacctacaagaccctccatggtttgccacctccacatctatccaaccttattgtccagggtctacctttacttaggtaaatacaaatccactcttacccatacatgaaacatttactcttgcctcttatctctgctagggttctcctctttgatatgcccctcctctttaatatctagatgattcataaaatttagaaattcaaactagagttcagagagaagacaaattcaatcttttctataaagtattccaattacttcagcccgcatgaactcacattattagagaaaaaaaaaatggcctctaaaagtaatagcaggtttcaaaactaaaagttgatccttgtaaaacctgcaaagaagaataaaagtgttttgttttgaacatatgtttagacaaagaaaaacatggaggggaaatatccactgctggaacaagagagtaactataaacagatgtcaagagaaagaaaaattcctcaataatttgtgttttccctatcaaggaaacttctaaaagatttttaagaaatggtaacttagaaggaaaaggaaggaatgtggattagaagctcatgagagtgttcgtttaaataagttcaacttcgtatgttcacatcacattcataatgacacaatagtaaacagacattaacacagactaatgaatggtaatttttgaagataaatagaaaatgtgtatttacaaagggtaaatactgtcatatccaaatgttgcaggtagatattagccctttacaaagatcagtaatatgatcacagatcatttgtaaatgcaaagaagaagaaatagcaaatcacgtaaaaccaactgaagtttaccttggaagaaatgagcgaaacagaagattaaatagttttagctgttgtcagaataaaattaaaaagttttaaatgttaacacatgattttattttgcttttcacgaccatgactgtatcagaagatataacttggaaagagattgtaaagcacacacacacaaaaatctcaaaggctctgctaagaaatgacatggggtgatgcagggcaagggcatctggttccaggtacaatggagtaaatacattcaatcttctctctcctaaatgcatggagcaaccatttgaggactttgcaaaggagtagaaggcagattacaatagaataccaggacttaaagtagcagcaaacaggtgatgaatttaccttttcttttattctgttactgcctgccctgaagacaacattatttgaaacctgaagatgggtgtctgcactgacagagagagctccaggtaaaccttctaattctagctcgagtaaagagaaagggaatcttttaacactcaagagacaatatgaaaacacctcactttttttttcttctatctgttctttcatgccccaacccttaagccatcccatagcagtggtaatagaggctgcaatgggaactcacagaagctaatattttttgggagggaaatctccaattggtagagctatgatactaagagggtaaggtaaaagtcgtttttttcttcctctttctactctcctcttgcttgcttggctgcagaagtgtgcaattcctgaagtacatggcatcactgggtaactaaagccccaaatggaaatccctagggaaacaaagtatcagagagatggcaaagagggaggagctcaagaaagggaccctataaagttgtttatgaacttctgggctcactcttgagctgcaaatgtatggatcgatcctaatcagaataccaaagtttctaagaactgaactaatggtacatagctcacataccagatcacctattgtgaggtacacaggcaggacagatctgaagagtattgaaaaggctttgaaaaatggaaccacagcccaagaaatgaggttggaacttgtggcctgaacctaattagaccgattgcatgctaaaacaaaagtatctacattttcccatagaatttaaacaagaaccagagtctcacaatataatattcaaaagatcaaaaatacaccaaaattatgtggcatatgaagaaccaggaatatctcaattcacatgggaaaagaaaacataacccaagcttaagacaacacacatttattatttcaatttctaggggtcaaccagtttttcattacaatgggtggcacatttccacataatagcttacctcatatacaatatatcattttctaagtcaagatttctcttttttaattcttccaattctttttctgactccaaagctcgtattcccaaaacctgatcaacagtcatgccagttgtttttagtttcctctgcaaagtaagtttctctttatcggctctgtggaatttaatatagaatcatgaaatataccattcagtgtttggcttttcaattgcatactcattaccaaaccaaattacaataattgtaacaccctatatttgtcataagctaatttacaacgagatcacaggaaaatccatctataattgttacaatatatttaaaacagattttaaagaaaataaaaagtaagtaaatcatagataataaatgatcatttaaactagaccatttctcatattatcaactatgataaagctatataatttccaggtcactaaaggattttacacataattagttttataatgatatttaaactcacttggcaaaaagatccttcaaagtattcaactgctttgttaaagtaaagacttccccctctttctcttttaacttgtttcgaattccttctattttggcttgccactttttaccttcttcccacctaattaattcttctttagcattctgtaacaataacgaaggaggtaggaaaattaccagtgttattttaaattttctttatgatttatcaattataatttgcctagaaaaattgtaaactaatatttcctagagaatatgtaaatatgttcattttgctatacaggttgagtatcccttacgaaacgcttggaaccagccgtgttttagaatttggatttttttaaaaaatatttttggaatatttgcatatacataatgagatatcttagggatgggtcccaagtccaaacacaaaattcacttatgtttcacatacaccttctacacatagcttggaggtagtattatacaatattttttaataattttgtacatgaaacaaagttttgactgtgttttgactgtgactcatcatatgaggtcacatcagaattttccacttgtggcatcatattggtgctcaaaaaattttgtatcttggagcatttcagatttttggattagatgttcaacctgtataactcctagaatctttgggcatgccgagctattaggaaaactgctctttaggctaactatgctttattctatcacaagacaaataaaattctgggagacagttctgactaatgccaacacccttcaggagcctttaaatgaagattctaatacaatcatgactagagtaagcttctaacaagaatcctctgtacaaacgaccaacctcatctattatcccatgacaatttcctagcatcagagccccttcaagtcttcaatgcacattacttcactcatttgacaggtacttatttagtgctaaccatgtgccaagtactactctagaggcaataggaatagaacaaatgaataaaatcagataaaaaagtgtatcttcatgaatcttactatctagtttatactagttggttagatagattggggagaagggagcaaacgatacagataacaaaacaagaaataaatctaaatctattttgtagtaagttagctagttttaagtgctaaaaagaaaaaagaaaaagaaacggaagggaattagggcatttcaggggtaggtgtcatggtttattataactatgataaaggagccaaagaaagcctatccaatgcagaatagtctcatgcactgaacaactttcaaatgttctactggatattaatacagtaaaaaattctgcttacactggtctgagctaagaatttatctccaactaacatattcacactaagtaattttttaatggttttactatacactaagttttctaggaatacaacagtcttataaaaggtaagattatagacattgttttgctgagaactgcaccaacaatttgtttaccattttggaaatcaaattacaaatggcaataccatcatgacccatcagttgccaatagaacacatttgtgtcagtctgcaatcgtagctttgaactcacattaatgaaggtgcaagcacatgactagttcattatattttccaatggagtcatgccaaagcatttacatgttgaaatatgaatattccttttatgttccccctatatatttcatttaggacattcataatgacatttttgaaattatgtaagtaggtagagtttatgttaactatgcatttcaattataatagtaaaggggaaattatgaaacattatattttttattaaagggaatgttgaatctgaaagggttgagaaccatggtttaaagtcaaattcctggggagatggctcatgcttataatctcagcactttgggaggccgaggcaggaagattgtttgagcccagagttcaaagaccagccagggcaacatagtaagacgtcatctcaaaaaattaaaaaaatatgaaataaagccaaattctcactaagattagttgtcctatcaaaacgactttctcgaatactagagaactatattctccaattcttgtctctaatactagtcaattttttaccttatttaattcagctaataagtgccctttaaaaaatgtaaaaacttcagtctgggtgtggtggctcatacctgtaatccagcactttggggggccaaggcgggcagatcacctgaggtcaggagtttgagactagcctggccaacatggtgaaaccccatctttactaaaaattcaaaaattagccagtcgtggtgccaggcacctgtaatcccagctacttgggaggttgatgcaggagaatcacttgaacccaggaggcggaggttgcagtgagctgagattgcgccattgcactccagcctgggtgacaagaataaaactccatctcaaaaaaaaaagtaaaaacttcactaagtggttgatagttattaatttcattttttctgaaatatgtacaagaatttttctgtactcccagaaatgtaaatactagtgggggacataaggtatgtcattaaataatcctgcagcacacagtactttgttgggtttgggcaattttatcccacctggcattacttgctaaattaagattaagggaaccaagactgaaagaacaattgaaaaacagaaaaacaacaaacgtgaatggtaccatgggtattgtggtgttattacatataggcttttttccatggttcctggcttataactctcatagcccttgtcctcatctttagttataatattgagtgtgttaggccttccgagcacacctcagaaaagagtctctctgaccttctcccatcctcctttcacctgccctaaggcaggactgtaatcttcccctgcctttctgactgtgggtcttaaaaccctaatacgagggggtcctgccccataccctaggagaagaaatactgatgtcatgaagcttccctaaaaaccaagaggactgggttcagagaggttctggagaactgaacatgtggaggtttctagaggaaggtggcaccccagaaaggcatggaaggtccacaccccttcccccatatctcttcttacacatctcttaacctgtatcctttgtaataacctttattataaactggtaaatgtaagtaaatgtttccctgagttctgtgagccactccaggaaattaatcaaacccaaagctgggggctggggatgtgggaacttcggaagtcacggaggcctggacttgtgatttgatcgaagtaagatatctgtgggatctgacactatctccaggtagatgatgaattgaattggacgacacccagttggtgtctgctacaaaaccaactgcttgcttgctgatgtggagaaatccccacatattctgggggtcacagaagtcttttgcattgattgttgttatggtttgagggcaagataaacatatggtttgagaactttttccaaaacaggttatgttctagactgaatgagaagagggaagaagactggatgataaggcagtagttctcttttcatgttttctgtaccaaaagcttcgtatgcatagatttcagaataatattattataacatttaaaaatttatattcattcaacaaatactgagcatctactatgtgccagcgattgttctaggtgctgggaatacaataataaataaaataggcaaagttcctgccatcaaagtttatggtctaataaaaaaagaaaaaaaaaagatgaacaaaagacaagtacatgtctagtatgttaagatagtaataaatgctaaggagaatgaaatgcaaggcacaggggtgggttttgttacataggtagactacaaattctgtttacagagaaaagggtactaaaatttccaaacaatatgaaagcatttcttgagtataaattagaaatgcccaagcaatgaacctgaaaaaatattctcactagattcctgaatgccaattttaatactgggcatagacccctgttttctctttctagttagtagtaatatcttatactgctatggatgtgatggcttacaaaagacttccgcatatcatatcattttatgtaaaataatcctgagaaactggcaatacagatagtattattcccactttaaggaggaataaactgaataaataaactaaataaactgtagcatagaagagtccaggcaaagccacaaggctcttaaaacattctgataggaatcaggttagaaactggtatagaaacacaccagttaggaacaaacataccagtttctaacctatccccatttagggataagatcaggcctatccccaattagggagttagaaagatggaaatccaaaagattaaggacactttgatcttacagttttcaccagcaaagcttctgacagcaagcatgttgtgactccacgcaaatagtgtcaataaattacactgacattaatgaattttcatagaaaataattttgggagcatactctattaagaaatttgaattccattacctattttctattcaatgcctttaaagacagaattttcttttccattttcatgtgattgaaattattttatagacattaaatattttctgggtaaattttataataaaaattttcctaaccatagctcctccatactgattttcttcaatggcaaatattactgctaacatcaacatttcccagttcactttcgatattttgaatgttaccaacaagttatctccaatttattgtccataacaaatttaattacacgcattttagccaattttagttttttttggggttatttcaatcagtaatttttattacaaaacagtttactatgaactataaaattttaagcaatttctcccacagaattaatctatgagcagattggttactgattattactgcaaatactgaagatattccaaataactttgctatctgaaataacagcctagtctcctgaaggattaaaaaggacctatttgggtcaaagtggggtatcttaaaatgtctatctttctgtcccaaaagtcaaaagcaccaacctgtgtaaatgattactttggagagaaatgatacacagttgaatatgttaaggtgtgaaggaacttcagaggtactctaatgtcagaaagatgaatgaaattgatgtagtaatttccaaataagagttacattataggtatctcctcaagtagactctaaattcctacagaacagaaacttagacttttctacgttattcaatactgcttatagtcctcaaaattaatacagaattaatacagccaggtcatcaaattaaggcagtatattaactgttaatcagctatgtatttaacttactctgtcactaccttaagcatataagtcagtatgtttcttcacataccttttctttcataggttttaggtctacttcctccacctttccctctaattggttctctagttttttaactttcctttggagttcttcaattagactttgtttattatctgtcaggggtttgccctaaaaaataaaatgtaactttatatttttacaaataaatgtaaaacaaaatagacagtaaatatttcaattatataatagcaactttctgaagctatcactgaccatactttctaaatgacacttaatacataagataatctggtagctgcttctgcattttaatacaacatactaatatgctactctagaactataaacacaatagaagtcacaaaagaaattaattacattaatcaaagtgatttgaaagtcagttttaacaaataccatagataaaatgataaagtagaaataaactactacctctatattgtaaatcagacattatcagagttaaatataaaattacctgtaatccactggttagtcttttaatttgccttttcagttcatcattctcttgatcaatttcctctttctctctaagtattttattataggctttttgtttcttttgcagttcattatttaagtcattcaaattatcagttagtgagttttctctgtttttacttgttttaagtgcttctttcaattttaaaagattttcatttaaatcttcaacttgtgtctaataagagaaaaagaaaggtattattcatgactcttcaagaagtatcaatgataaaaggaacataaaacagaaaatataccattataagaaaaattcagtctgaatttttaagtacacaagagaaaaaaaataaccacaaactacatatatttttccatattcatgtcaagtctaccttgaggaaaaaagtcgactttgagaaaaaaaaaaaaaactagtgtaaagcaattcatcttcaacaaacacccacaaacaaaattttatcaaatatgcacgtttcattttggctgaattaattaaacaaacaagtatataacaatatatatgacaacgttttaaacactatgaagcataagagtagtacagaacaaatctctgacttgaagtaatttctaacctagtttacaaagataagatataaaagggtaacttacaatactagacaatatgtatgccactagaaaggagttcctagctgtcctatggtgagaatgatggggacacactgtatgtttccatctataacatattctggaaaaggtgaaactatggagacagtaaaaagatcactggttgccaggggtttggtgaggtgcagaggaaggaatgaagaagagaggcacagaagatttttagggcagtgaaaataccctgtataatactataatgatggatacatatcattatacatttgtctaaacacacagagtgtaaaataccaagagctaaaatagaggtaaacttggactttgggtgattatgatgtatcaatataggttcatcaattttaacaaatgtaccactttcagggtaggagatatacaggaaatctctgtaccttcctctcaattttgctgtgaacctaaaattgctctaaaaaaataataaagtcttaaaaaaaatcctaagtaaaatatttcttaaatttaatttcattagaaacagtagttcataatggcctatcctttcctaatccccaagatgataatcagtaaatgagtatcataaagagacttattgttgaaaaatgcatgtgtgtgtctatgtctagccaccaacagtgcattataaattccctattcatcaacaaaattactatatatcatagtgaattctcttccaataggaattatcagaaattttgttacattaacacgtgttgatgttcacctttagctctctagtatgtcgatcaacgatttgttgaacattgagatgggcctctttttgagaagttgcagaaataatacgttcttcagcagctgctgtcatttctgcccggagttctaaaagtgcccgactaagtgcctaaaaattaaccaaaaaaaaaatgtaatttttaaaggaaaactgacattttatatgaatatatgatataaaaaataaacaagctttattacttcctactatttttctaaaatattatgagtttaatggaacatatttcacaaattaacaactcaactttttcaaataaatcttttgtaattacactcaattctttccacattgaatgtgaaagttcaaaatcttaataatgattttgagaactcagcattaaatcaagctattacaaaaaacaggtatgttttgttttcaaacatccaattttagatatttatattactcacttactacatccttccatatgaaattaattgaatttaggtagacaacaaaaggactaggaaaggcttaaagtttacccataaatttcatagctagcacagaaaaacaccagcatcttctaaaacaatttaaatagatcaaatctgagataaactaaaaaaaaccctaataaatcagaatacactgaccaactccttctcacaaaaacatctctatgacccccttttttcatccctttttgtcattatcatacttccctcaatccctcaaattgttcaaaattgttcatttgttaaaaatagcctcagtagcataaaattccagtagaaaaaaagaaaatacaatgtaatatatattatatttttgtaatgtacattaagatttttcctaacttcatatagataattcacaaatcagattgacgaaaacataaaaagataaattggactatatctgcccacaaaaacagcattgtctaaaataccttgtttaacagcataagataaagctcatactttttattacaacacggagatttatactaccatcttttataaatttacaaatcttctctaaaagcaatctaccacatatttttcctaaatgttgataattttctgttgttacttactttctgttgtttctccttcaaggctaattggctctttagccgttctactagatttctcattgtagttgttggagctcttgaatttgcttctttttgagcctgaagttcagattttaaacactgtgactccttttgtgactggtccagaagatactttaaatcctctacttccgcttttacttttttcacttcatcttcatggttttcttgaagcctgatgtaaataaacatatgtgtgtgtgtgttttttaatttttaatttttttgagacccagtctcactctgtcacccaggctggagtgcagcagcgcaatctcggctgactgcaacctctgcctcccagattcaagtgatttttttgcctcaacttcctgagtagctgggactacgggcgtgcaccatcaggcccagctaatttttgtatttttagtagagatggggtttcaccatgttggccaggccagtttgaacgcatgacctcaggtgataagcccgctttggcatcccaaattgctgggattacaggtgtgagccaccacacctggccaaacatatgtaattaatagagtggttgctgcaattcataccttgattaatacaaatttcatatagagcaaatgttcagtcctaagtatccttacaatctaaatcttgatgcaggcatccaaatccaaagaagaataattctttatttcatttaactactcttagacttaacaacacatttttcttctagtttctaatatttttggcaacaatcttatcaagttattttgtgactctagtcaaatatacagagaatgaacaaaaaggcattttaaatattatggctcttgtaaaatgtgattgcttcctctatatgatagtttcctaaccatactactagtaacatttttgactggataattctttgttggtggtggggctgccttgtgcatgataggatgtttagcagcatcttttgattctacccactggataccagtagcacccccgagccatgacaatcaaaaatgtctccagacatcgccaaatgtccccaagagggacaatggtgaaaaactgatcctctatatttgagaaatactgccctatattgacatattgaaaagactaatataaattttcacagaaatcacatgtattattaatttgtttatggttcaaattcactagcattatatctataactatatatatggaagtggatactatcaaaagatttagttaattcaattaatcttattgcttattcagcattaagtctgttaaactgaattaatatattgttgtgcatatggacactgcatccatactgagattctgaccaataagagggagatagtgttaagacatgaacaaatgttactctttgaggcttcttgcttttggcaaaacttaagtctaactttaaagagtcatcatcaaattgtgaaaatatcaggatttacttaagaaatcacacagatccataatctcctaatacatatcaaaatatgcacacagagaacacaagtataattttggactaaaatgacgtaaggtacacaacaataacttcaagtatttcctgtggcaaaaaaatgtattatataaggtatttcaaaagattatgattttctacacccacaaattagatgcaaaagcacaagtaattttatactccaaaacatgacagaaatttactagaccaaaaataacatctcttgtacaaaatttaatagagtgaggaaaagagactgaaaatacacatatgctgttgccaattttctttcttttagagagtaatttcttaacagtggcagctccttagcaaagcaaaaatagtgttaattctgtcagaggcatttgaataagtgagtaaagaatcaaagactctagcaggggcttgagagctgaaatggaattataagtcaagcagttcaattttctcatgttttttcagataataaaatttaggcccatagagataatattataatgattagaaactacctaactataaacctattttgagtttaaaatctacgttctgataaagtggttgaacaatgtttagaatctctattatatgacagacactcttataagtgtgtaatcaaaagttttctatctgtatgttattttacagttttcaaattactttcatacacggtataatttgaccttcatataaccaccctgaaagggccagggtaagtattattatttccattttaaagatgatgaggctgggtgcaatggctcaggcctgtaatcccagcactttgggaggccgaagtgggcggatcacttgagctcacgagttcaagaccagcctgggcaacatggagaaaccttgtctctacaaaaatacaaaaaaactacccaggtgtggtggcacctgcctgtagtgccagctactctgcaggctgaggtgggaagatggtttgagcctggaaggtcaaggttgcagtgagctgagattatgtcactgcactccagcctaggaaatagagccagaccttgtctcaaaaataaaaataaataaataagatgaaactgaggctcaaagaaggtaaaaatgagattctggaaaagaatttgtattggcttttgagtcagactgactagtttcaaattatggctttcccatctacccccagacatgctattaagcattcctgaggccatatcctctctttaaaatggggaaaatgataacatatgtaaccagcagtcctgaggataaaaatgagacaatatacttaaaagtcttagaacagtgcctggcatagcaaacacttatgtttatcttcattatatcacttatcatttgcctatttttacaatacatttcgaagacttactgtaatttgatattttcaaattcttttacttttaattcagtgatttctctttgtctctccaaatcttgtgatactttctttagtttgaccaagagtgaggaaagagagtcatcttgttctgctactgtctgttccatctcagccagacgaataaaatgcttgttggtaggaactggagtgggagactgtttcattaaatcctataaaatatgaatatattagcaataggcatgtataattcaatgccatacttattccatatttttaatttggttcctcaaatgatcaaaatataatatctaatctaaaatgtaatgatttaataggcaatgaaggcttaaagaagacaggaaatgcagactttattatttgtatttacaatagctagcaaaatgtctgcacgtagcaggagatcaataagtgttgaccgaattaacgaggtaatgctcaaatatgctaaggttacacattaaaagatgaaagacatgtcatttcatacatatggaacagaatggtcaaaagaggcaaatatgagctgaattctggaagttagatatagctaaactcacagtgagtagaatttgaaaagaaaggcaggtaggttcatagcagattgagtacatggctaagaattataaatataattttgtgaacagcggtgagctacaggaggaagaatgatcagagctatgttttcagaagattattttggcaacaaaaagggtaacttccattccaaaaaagaagagagctgaattttaatttacatggtcacaaaaatcaataaagaatggaacaaagttcttagaatcttacccaagccgtttgtttgaatttatttagtgaactatcagcctgtagttctaatctgtgatgaagaatatgaaggtcttcctcatgtttcttcacaatttctctttgctcctgttttacagaaaatcgaaactatatcttaaattgtgattaaaacaaattcacattttgaagaccttatatattttctcttcaatcttctaaaattcctttgagatgaggaagaaacagtatctccatatatgtatgtatctagactggtatgcatgtcccctcagacaatgttcaagttgacaagcccagcctcagttcataatttattcttaacattagaatgacatgtatctatcatcttttaacttacttctagaaaaaattaaatgttagctttcccccacgaagttctaacaaatctgatttctactgattaccggtgtgatatatttcattccaccctattgcctcaatcctcacctataaactcaattaaaatatttttcaaaatcatatgatttcaccatgatagctactcgtggtttagtcagtgtataatagaaagatacatgtacacaaacttccagttttactgacagaggtgtaatccaatcacatgcaagtaacaattcttaaatagaatcatttgaaagcaagaaaagaaataccactttagggtaaaataatatttagcatttgcttaaaaaaactaatggataacagcataactcataatataataaaatacctctctggctttttctagaagacgttgatacttctttaatacttcttctttttgatttaaccttgcttgcatgtttgcaatggtttgatgagcaattttcaatgtgtggtgagattttggttccatctcttttctgcctagctcagctatgagcttttctctttctgcagtggcaggcaatcgaagcctcagttcattgattactttgtctcttgacagtatattttgttctgctaaccttaaagcagattctttctcttttagtttctgcaatgattaaattataataaatcattaaagtatctttttccctttaaaatgcttcatctgaattttagattagttattagccaaaaaaaattcactttatttttcacatcatatgtacaatagccatttgatacttaataaggttaaactgactaattctaattgacagcagttatttgcatgcttatttataagactattacatatgctagaaacttcattgttatgatgaacataaaatttaattaaggtactttattgagatattacagtttagaattatacatgtatggtggtactagatttaggaagaatatgtaataaattatttcttttattttggtccattgactagcagagcattaggagactaatctataagtcagttaagtacaaaactggaattttagaggcccaactcaataaattacgaatataaaatccgcagcttattaaaacaaagagaaaaaaacagaaaaatttttactcttcaagaggattaaggtgagtattttaaattaagtaattcaatggcaattcacataaatgacaaatcttaaaattactgaagaaaatctacgtttcctgaaatgattaaaaatgtacagttttacttgaaaaacttctttatgtatattttaaatgtatttgcagtttatttagatgaaaactaaaatgaaaacacattcagtttacattattttctgaataatttaatgaagatgacagatttgatcacctactaatcaaattcaagatctaggttaaaacagaaagtaatttctaatttaccttcaaccctttaaccatgcattaaaggcaatgaactgaaaattgattcatagattatgtaacatgcacttcaaaataaaaccaaaaaagtaagaataaagagatcatataagagaatatattgctcatagaactacaattaaatgctttttatttcctttcatattcagtgtaccgaaaggtaccaactaataattaaatagtgaattcaaattaactatatctgctgttcattattggctattagaaacattataggagaatagaaaaatagtgaaattagcaatagattcatcattctatgcattgccctcataaagaaatattatttagaaagccccccaaacataccaaataatacactaatcaaaatgcaaattcttctaattacctcttctagtgatttgcaagttgcccgtgtttctagaattattcgaatgttctccttaattttccttagagcgatctcaagttgatttggaaggggcaaactagggtcagggattgatcctgtagcttcttcaaactattaagaaatagtatgttttttaaaaaagcagttgcagcattgagagtaactattaatttttacagctgtatgataaaacatagattaaacccctcttatattttaaatatacaatataacatcaattaaaattacatctgatacaggaaatatttctgtgagttaacactctagactatgctacagagtaacaaacaagattaatcattcataccttttgtgccgcatttagtatttcattttgctgacggtcaaaaatgtctagttggcgttccaggtcaacttctctttgatcccaggccatttgtctttcttcatgaaactaaaaaaaggacaatttgtgtcagacacatacacgaagacatcaggcacataacaggcattttatatatattttcttatctaatcctcacaacacattgaagaaactgtaattattttccttttatggaaaaaaatacaaactcagagaggtgaagtaacttgtgtaagatcacaaaggcagatgtgaagtaaggatttcagtctatccatccatccatccatccatccatccatccgttcagctatacgaaagatatttgatgacatatattatgtgccaagcatcattctaggaaatacaaacatggcagtaaacaaaaccaagtccgtgtcaccacggaacttgcattctggcgaaggaaagacagtcaataataaaccagtaagtatgtaatacgtcagaaggttacaagcactttggagaaaaattaagttaattaatctctatttaggaatctggatagtaggatttactgttgtatattaggtggctggtgaaggatacactgataaggtaagacatttgagctaagacctgcaggcactgacagtgtaaataccaaaggtatctagggtaagaacaatttaagcagggggaacaatctctgagacagtcatatgtttgacgaatttcatctgtctctgaagtatatactttattctataagaagctgacttcttactctatcagtgagagccagtagaaacgtggaactgtgaaaagtcaaataaccaatatcaaaataaaaattaacttaccaaatgaggttgcttatgtattgccgtttttaagattaagactactgttataaaagctaaataaatatgaatttttagaatagtttagaaaataaaaaacaaattattatataatcaattagtaatggaaggtgcacttaattagaaggataacatagtcatttgtgcaatattcttgtttaaaatcttaggggctcacgcctgtaatcccagcactttgggaggccgaggcgggcggatcatgaggtcaggagatcaagaccatcctggctaatatggtgaaaccccgtctctactaaaaatacaaaaaattagccaggcacggtggcgggtgcctgtagtcccagctacttgggaggctgaggcaggagaatggcatgaacccgggaggcagagcttgcagtgagccgagatcacgccactgcactccagtctgggcgacagagtgagactccatctcaaaaaaaaaaaaaaaaaaaaaaaacttagggaaaaaaatgaaataaatataaaataaaaccttgttctgttgcacaatttcttcttcaagactgctgattgtacgttcatattcagaaattatgttattcaaatattttatttcttctttatccttgactaattcccgatttagtttaagttcttgaagacgaagttcttctattttcatatgccagttgattacctaagatttacaatttatatacacaaatataaatgctatattaacaaataacattcctccattgatgataatgattttaattgaaagtaatggccattctaaaataaaataagacacaatgttatcttttgtcaaactacatgacaaaatcttatttaggatttccatagacttttctacaaatatgtgggattttacaataaaaatcttcaaattatgttggaatggacatcactaatattcactttcatttgttatacgtttattgaacactgactataagcaggtcattggaactttggtattactttcaaaaacagaaatcctaaatgtttctagcctagagaacaggatgtagttgcaagataattatttttcatttaattctttctaaatgaagattaaaccatattaaaagtaaatgtgggcccactacttgtagatcaaagataattatgaacagtagaaatcaactgataactactacaatgtttaaatataataattagtgtttaattaatataaattttcctatagtaattaaaattctttgctattatacaatctgaacattcccactaaaatctttggttagaaaagcctaattttatttttacgtataatagacattcaaatagccaacactgctaagttataaaatctaaattaatgaatcataattggaatttgtatcttaagcatttttcatataggcatatattaagaaattatcatgtaactcttttgaagataatgaatttaaaattggctgggcacagtggctcatgcctgtaatctcagcacttttgagagaccaaagcaggaggattacttgaagccaggagttcaaggccagcctgggtgacaaagtgagaccttgtctctacaaaaaaatttaaaaattttaaaaaattaggtaggtatggtggtgtgcacctgtactgccagctacaactactcaggaggctgaggctagagagtcccttgagcccaggagttccagctatgtttgcaccactgaactccagcctgggaaacagatcaagatactgtctcttaaaaaaaaaaatcaagtttaaatgtttaccttttgggctcctttggtatcctttaaagtgcttattaactcttccaggccctttaattttaattccatctccaatgttttgttctccatatttctatgttcttgttgagaatttttcatttcttgcattatcttaagtttgtcattttgtagttgaatcattgttttggagaacttttcctgttgtgccaagggtaaagctccactaaactgtcgtcgtagagactgaattgtttggcgcagatgttttgctctgtttcttccctccaaacgagcataatagagagcctgttctttttcatcaagtttctgctctaagcgcaagttgtaggcctccatcttctgcagtttagatgtaattgactccaacttaccaagagcagtagcctcactcagttgaagagagacattatgttggtgcaacttggcaatgagcgacttttcatcagactgtgcctgatattaaaaaaaatatatatttgtagtaagtttcaaatttttccagtgaaagttatcacagatttaaaattcacaatttactaagcaaagttttaacacagtggcacatgagatctacaaaaatgtaactttgctttaatacaaataattaccaaagaactgtaaaagaaaaaacctagaatcaaacaaacttaaaatccaaatgtaactgaataacagtgggtatgttactggtgttttttttttttttttttgagacagagtttcactctgtcacccaagctggagtgcaatggcgtgattttggctcactgcaacctccacctcccgggttcaagcaattctcctgcctcagcctcctgggtagctgggattacaggcacatgccaccacgcctggctaacttttgtatttttagtagggacggggtttcaccatattggtcaggctggtctcgaactcctgacctcgtgatccgcctgcctcggcctcccagagtgctgggattacaggcgtgagccaccatgcctgactgttacagtttttttttaacctccattgcaagtaacataatactgatcaggacaatgtgtatgtttttataattcccaacatatataacgtaagaatatgtaaaaagttacatataaatacaagagaaaatattgttattaaagatttactaactacaattctcagtgtcctaattttgatcagcagcataattcatctataggcatttaaatgctgtactggattactgaacaatatttcaaattaaagagctttctaatcaggttccaactaacaagaataacagcctctggttggtatatcttttgattaaaaatgtaacaatggcccagcatggtggctcatacctgtaatcccagcattctgggaagtcaaggtgggcagatcattttaacccaggagtttgggaccagcctaggcaacatggtgaaaccctgtctctacaaaaaatgcaaaaaaattaggtgtggtggcacgtgcctgtagtcccagctgtctaagaggctgaggtgggaggatcacctgaacccaggtggtgaaggctgcaatgagccttgaatgtaccactgcactccaccctgggcaacagaatgagaccctatctcgaaacaaacaaaaagtataacatatcccactcccaacatctaatgtaaatttagggaaaaaagtggattctatgtagaagagccaatactgcacatacctgatagtctagcagttgcattctgagggactctacttccttgtccctagattgttgttgtgcattcaaaatttcaacttgtcttctggcaatatcagaaatctctctcagtctaggaaatgataaggtatttcaggaacaattaagtacactttctaagtaaatgccaaaattcaaaatttctagaccctttttcaaaaagccattcgttttcagcatctatctcttctttgtatgaaatattaaaacaggatttcctaaactgtttcatgaaacataattccatcagaggttatcatgtttgctatataaaaaaaacttcattctcaacatccctcctccctcttgaatattcctaacatatattcagtgctcccagaggttctatcatatataattatctcaaatcatacttactatatagtattttccaaatgtatatagccaaagaacttctgttcccatacttttttccataaaacatttattgtcataatttggaatatgctaggataaggtatttagtacatttatctaagaccatcacacagttaagaacacagaaatgtaaaatttctaggatccttagatggattaatgcatgttttgatttgttttaatctacaagttatcagtaatgtgaaaagaaacaaaacatgcatttaataaaattacaaaaaaaaaaaaaaagagatagcctaatggtaataagtccttcaaattccctcatgaatactgtgataagctaatacaggcaaagcaaaatgtaaagtttctttgctttgggttagaataattttagttcagtattatagataaggcaggtttcctcatactgatgagaggctctcattgccagttgcatgattaacaaaatatgattaaaatgaactattataagttagtttatatcaaaagaggtccatgagaagaaaggatcaatttttttaaaaaaaagggtctttcatagtgaaaaagatgtcaaaaactgatattcccaagagaactatcaaggctccaaaggaatggttatatttttatgagtaggccataaaatatttttactatttatgcttgacagattaactaagtgctccttatacttttctactgaaatatcacctaattacaaaagagaatgaaaatacagcatatagctggcacacggtttttttgttttgtttttctttgtttgtttgtttgtttgacagagtctcgctctgtcaccaggcaggagtgcagtggcgcgatctcggctcactgcaacctccacctcccgggatcaagcgattctcctgcctctgcctcccgagtagctggggctacaggcacatgtcaccacgcccagccagcacgcagtatttactccttatatatattttgtgttctaaactagctgggcatatttcttcatgtaaaatgaaaacaaaaatataacctcaaggttaagtataattgtacaagtcaatatatgtttaataccttgcaccgtgactagtacatagtagatgcccgataaatgtaaactaaatcaaaatctgaattttttattatattcttacagcaaccttatgaaacaggtagaagaggtactattactcccttattaaaatgaagaaacttaagtttaaatacaataaacaaccattcctcctccatcaccccttccccaaaaaatcaatatgtggaggaactggacctttctgcaataatattcctgaactctaaaaaatgcaaatcttgagaggtcacttcctctttaacaatattattctcgtcaatattattatttaaccctgttaaaaccgatcttaatattacttaatcctgttcttataaaaagaaatcagtatcaattactactaagaattgtatacctgtaattgggtttcttaaagacaaattaaagaagatacatctagtcaaatggctaaaatgcttatatgcacttactttgacacttcaacttttagttccatttcattcttctctaattctagaatccgttgcctatcagcatcacttactgccttgctcacactatcagctaattcatctcttaacatctgttccaccttctgtgcatccaaattgattttggtaagctaaggaaatgtaacaaaaaatgttcagatacatcaatttttggtgaggttttctttgtaatttagcttttaaagtactgcaatcctctttacttggccttagttcacatattatattaagtgtgaagtgttaagaacagactgaaggagggtaaaaaatatgaaagaatcagaaacaaactatggaaactctggttatattccaatccaccaaaagtcatttttattaggcaactcattatctaataatatctgaacttgcaatattcttactttgcttagaatgcaatctgctcattatattttacttcaattgtatcatctataaataaatccaaatgagttaataaaatcttactcatatagatttagtgacatagttaaaacaaaaatgatataaatgctttgaaaatatattaaatctcaaggtaagcaaacactgtaagagttgtgtttaatcataaattgttaaatacttgcaaactatatttactgccacacagtttaatgattctgaccacatcaaaaatatataaaaccaccaattagaatgtaaagtccctgaaagtagagattattgtctattttgtttcttgctatactgccagtcccaacacagggtctgacatgtaataggcaatgaataaatatttgttaaatgaagggatggtggtgaaaggcaattccattgtttagtaaataacatttcataaattaaatctaataatataacattggtgagaaaaacttacagaaatatctgctttccttttaaacaattcagatttaaatcttttatttatttattacacaaaacataggcactatattaataagatatttcagagatccagacaaaccacttaacaataatacaatgtctaccaaaactaattctttattctataattgtatgataaaacttataatatcaaacctcagcaaatttggtttccaattcaaaattacgttcctccatttgctttaacgaagtccgtaagtgttcatacattttttgacaatgttcagcccgctgcctttcatttaattccttcatttccagcatagttattttttttgaaatggaaacaatgtcactgttggttattgatttctttgccttatccatgctagattcattacctacatgcaataatatttaagtcaatctcatgctgtttatattaaaattacctcagatattttagatgctgtatattagaaagcattatagttccatggaaagcacattagctttctgaattccatcagacctggactctaatcttagctctgttacttcctgcctgtgtgatgcctgtaccatttaatctctgtggaacttaatgttcttcatcaatcaaatgattaaaaaaaaaaacctattcctcacagaattgtggaactaacaacataaaggacttagtgtagaagtgtcacatataagaaattttaaaaatggcaagtaaacattttactgaaaggagataaactgtatgagaagcaatgcagtaaagcaatgtgactttgtgaatataagtgcaatgacttgatttttaaagtctcacaaagccaagctgaaaagtaaaatctgaagccatatgatggatagattctaccaaatataatcttgtctaatcatgagtattatttggtctttgtacagacctaatatcaaatattttacattcttttattagtagttatgccttaaccttatatatgcagttacgcagcttgtctttggacacaaaagtctgtggctaaatggaaagagaactaaaagcctcaatttaccataaaaaggcatcgcataggagtgtcattagtcattttttgagggggggggaagaaaacatacttttgctttgtaaacatggtctagaaaaaaaacaaaatttggtagagtgttttgcttttcagcaacttaaaactgatgtgtttagggtagccaattacttaaaggaactaagcagcaactcactttgtaaacagccttttacaataccaataatgccccctcctgtttttccagcttcataagttcaagttttataactgagttttctcaaagtaatatacatttcctgaaaaaaaaattggtctctatctcagttttaaaaagtacttcattatgttctgtatttatctttaaaatgtattattttagaatagctgtggcaagcagtaatcaagtaactaacaataatggatcactaacaggtgctaaaagcattagtaaatcagttcattatggaataaagactcattcaagtaaccttaggcaccatgtagaaaaatactgcaataaataccaatatataaaggagtccttctccattctgtattgtgctaaactctgattagaagagaaaagcacatcacaaaggctgaagcagactagccatcttgtatgtttttgggtttggagttttcttaaagagagggtagagcacaacagcccaacactaacaaattcctagatgaaaaaaagctaatgatgtgacatttttaaacaaagatataagggcaacagggaatagggaaacactcttaaaacttcggtgatataaatccatatatgaaagagatcaagatatgtaaaaattaaagaatttctgtagggaattcagcatttattaaaaataaagatgataaaataaaaagaacctactaaaattgtacgtaatactctcatgtcttcatttaaatggtaccttcttccatgcaaatactacacaaaagtcaattcatatttaatctcttattgagctaaaaattacatttctaaaagtagcttatgtaagatttcccagtgttaggcttctctaaaccaagtatctcattaccaatttaagagaacagctctatttagtaataaaaaccttgaatagctctaacgtctaggaaacaaatacatgaaaatacattatcgaaagcagcaaatttatttgaaaattatgaagcacaatatatgagataaaattatgaaaatcttataaactatataactgtttgaaaaattaatatggaaaactctaatgagagcaacaaagatttcaataccttctgagacagtaatatctctgttagatatacatgaaaatgttcactgtggcactataagcaatagcaaaaatataaaaagctagtgatttaatcactcaaacacattaggctattgtataagtatttataagtatgatgaataaaacaaatttttttttttttttgagacggagtctcactcttatcgcctaggctggagtgctgtggtatgatcttggctcactgcaacctctgactcctaggttcaagcaattctcctgcctcagcctcctgagtagatggaattacaggcaactgccaccacgcctggctaatttttgtacttttagtagagatggggttttgccatgttggccaggctggtctcgaactcctgaccccaggggatctgctctcctcagcctcccaagtgctggaattacaggtgtgagccactgcgccggccataaaaatatttttgatattactatctaaatacagtataaaaccatgtttataataatttaaaatatataaaatatgtaagcatataggagcaaaaatatacagtaatatagtagtaaaactatgagaaatacaacttcttttcacattttctttgctgtttcctggtatcttttaatttaaaaatatcaagtgatatataactaatataacttgcactcagtgaaagaactcataataccattaataaaatatcatcagttttaattgttaaacggttcaaagtagctaatacttagtcataaatttttaacatatatgatttcattagaaacaaatctaacttaaggactgaaaactaaactttggtggggttaagtacaggattattcatctgcctaagttaaattattaggcagaaagttctttctttttttagtcaaaatacttccttttaatctagcataaaaaaggaactttaaataagaaatattcattattagatgttaatcattttatattatcagagtcataaaacttacctaatttagtttcctgttcccaggcttgttcaatagtgtgaagtttttccttggtaatctccagttctttatttatagactccacttgttcttttaaggagatgttttcacactgaataaaggaaaaatatcactaagaaactacattgtaattcagaccaataccacaaaatgacattgtcttaactttatataacatctccttaaaactcacaatccagttttttacaaaattagaatttcctccatatataatacatgtatgcatacaaacacatacatatatatataatacttgtatacatatacatactgatatggtttggctgtgtccctacccaaatctcatcttgaatcatagttcccataatcctcatatgtcatgggagggatttggtgggaggtaattgaatcgtgggggtggtttcccccacgctattctcataatagtaagttctcacgatgtctgatggttttataaggggctttcccctttgctcggctcacattcttctaattccggccaccatgtgaagaaaaatgtgtttgcttccccttctgccataactgttaagttttctgaggcctccccagctctgtggaactgtgagtcaattaaacctctttcctttataaattacccagtctcaggtatttcttcatagcagcatgagaacggactaatacacatacatacatatatatatacacacacacacacatacacacacacacacacacacacacacacatatatacaatgtaaaatattattttaaaataatcatccaaatcctgtgttatccaatatacggcctcaatttctgagtattagcttctgccactaaagctgtacattcattttggccaaaactcttagaatactcaagagttttgcagccttcacaaactagtgcttacttccttcatgcacacagttgctgagcatcctagtgtgccatcagtgacagatgatgatgtttacagtgaaaagaaatataaaattctggccttcagagttctgcccattcagtgcctatgtgtgtgtgggtgggtggcaggatttcgccagagtgtggaaggcagcagataataagcaagtaaacaaacaaaaagtctactaaaaatgtcaatgttggccgattacggtggctcacacctgtaatcccagcactttgggaggctgaggtgggtggatcacttgaggtcaggagttcgagacaagcctggccaacacagtactaaacatagtgctaaaaatacaaaaattagccagtcatgatggcacttgcctgtaatcccagctactcaggagactgaggcagaagaatccctttaacctgggaggtggaggttgcagtgagctgagatcacaccactgcgctctagcctgggcaacagagcaaaactccatctcaaaaaaaaaaaaaagtcagtatcgaccaggtgcagtggctcacacctgtaaccccagcactttgggaggctgaggtgggagaatcacttgagtccaggagtttgagaccagcctgggcaacaaagtgagacctcatctctacaaaaaaacacaaaaaattagctgagcatggtgatgcatacctgtaatcccagctattttggaggctgaggtgggagaattacttgatcccaggagggcaaggctgcaatgagctatgattgtgcaactgcactcgagcctgggcaacagtgagaccctgactcaaaaaaaaaaaagttgacatttagaaagaaaataaaaacagagtactgagccagtgaataatagaaaggaacatttagatagagcggttgaaggatgtcttaaccaccaaataattgatatttaagctgaactgtgaggtacgaagtatttattagtaaacccagatgctccaaaggaagaaagcatttggaatactataagatctgagaggaaaaaatgattgaaatgattggagcaggaaatgatttggaggactggagcacccaagcagagtaagcaaaaataagagtcaatagtagtaaaacatgaagttggagagaccatcaggggccacaccaggcagggcatggcatgccaagacaaggaactggaatttaacttaacgtataaaagaaaacaatttaaagattttaaggaggaagttttaaacaatcattctggctgcactgtggagaataaaggggtcaatagagaaatcagggaaactagccagaaagacattgtggaactccagatgagtgatgatgctggtttggacaagggttagagctgcgaggatgaagaagacacacataaattacatttggaaaacaaaaatggtagggaaaaagaatgactacagaataactctaaagtatctgccttgactagctggttaggtaactgaacatatattgaaataagaatgactaggagagaaacagaaatcaggagttcattgtggacacgttaaatttgagatccccttgaaacacaggaattgtaaagtaggtaattctgtacaacagaatagagctgtgaggaaaaaggctggcgatataacataaatatatatcttaagttcctttattttttatttgaaaaaacagaatgcctatttactacatgccaggtactctaagcaatggatttcagtgataaataaattatatcctagaacttatatttgagtggagtacctggaaaataagccaatatataatacaatgtcaggtattaagtgttatgaagaataatacaaacagggtaatgagactaaaaagaggacatgctatgattaaataagcacgataaggtaataataatatattttttaagtaaagtacataattatagttttatatactatgaatacacaggagggaaaacaggaggctgagggtgttttaaatatctttctatccatttttttcttcctttcatcctttttcacaggataatcctattgtttgttacaaatctctttttctcccacctaccctgatattttgctatttcccttattaccactttcatctcttatcttcatcactctctccctagtaactctaaattttctttccctcctcctgaaacttcactggtctcctttaaaaaaaaaaaaacaggctgggcacagtggctcatgcctgtaatcccagcactttgggaagttgaggctggcggattacctgagatccaaagtttgagaccagcccggccaacatggcaaaaccctgtctctactaaattagccggccgtgctggtgggcacctgtaattccagctactcgggagactgaagcagaagaatcgcttgaacctgggaggcagaggttgcagtaagccaagatcactccactgcactccagcctgggcaacacagtgagactctgtttcaaaaaaaaaaacaacaaaaaaagaatcctcttcttgattctacctcaatctacatctatttcttttttcttctactatcaaatttcaagtttttcttttgctttattacccatccagtttttgtatttccttattatctattccattcttcacacatgaaatctgattttcgtgacctctagtctcatgaacctttacctctcaaaaagcaacaataatttcctaagcaccatatttgacaccacatgcactgtggctctccaccactaatcactctcatgtattagcttgaactctgtgccaaacaggagatactcaacacacagaaacaaattaaatagttccttatatcaaaagacttatattccattaaggaagacagatatgtaaacacatataatttgatgtgatataaatatgtactatgtacaaaacctatgtataagatgcagaactagtgtagacaggagtgactttgttccattaaaaaaagtatgcttaagaaaaaaaaggtaatgcctgaacaagttttgaaacaggaatagaaattcactgagcaaaacaactggaagagagaaatggttccctatatatagaaaagagcacgtacaaaagaacatacataagaaagaacactgtggtcagaaaactcagctagttcatctcttgctctagatgacatgaggtaagtaggggacttgacttttacccttcaggtaaccggtagcttttgacagtttttaaggcggggagtcacatgggagtcacagggtaggattcatgtttagaatgatcattcttgtggcagtaaggaggatgtaagactggagatagagacaggaataatggctgccacaataaagataataaaaaataaaactaagacactgccaatagggataggtatgagatattcacaattacaactggggccaggtgcggtggctcacatctgtaatcccagcactttaggaggccgaggcgggtggatcacgagttcaggagatcgacaccatcctggctaacaaggtgaaaccccatctctactaaaaatacaaaaaattagccgggcatgatggtgggtgcctgtggtaccagctactcaggaggctgaggcaggagaacggcctgaacccgggaggtggagcttgcagtgagccaagatggcgccactgcactccagcctgggtgacagagcgagactctgcctcaaaaaaaaaaaaaaaaaaaaaaaaattagctggtgtggtggtgcacacctgtaatcccagctactcagaggctgaggcaggagaactgcttgaatctgggaggcagaggatgcagtaagcgttaagccgagatcgtgccactgcactcagcctgggtgacagaatgaaactccatctcaaaaaaaaaaaaaaaaaatctttaggaaagatgaaaaatactctttgggaaaatgataacgttaaacatcactcattgatacattatccacaagatgtctcttgcctaggactttctaatgctggagaggataggacagaggacatggagaatggaaaaaaataaattatcaccacactaaataggcataattttctataaaaagtaacataatcacctctctttggcaaaagcagcagaaagcaaactgattatgattacttctaaataatattgataaacatgactcataatttagtaggaatcctgaaagctactcagaacaacgttttcatttactgaatgtgtctctatgagccagcaaaagcttttgagctaatagaattagatcttattctactcctgtgaaaggatcttagataagaataatccaaaatccataagcctctatttctgatgaggaagatgaacaaatcaggagcttgttctgtcctcagtaaaaggtatagagttcaagtggctgtaagataactacaaagggtctggtccatattcacagattgtaacttatgatattctactctagtttttttattttttattctacattaaataaatttattctacattaaaattctacatttattctacaataaaaaatgatgagaatttacagagtgcatccatggtccaggaagagcccttaatatttcagctactgttggctacatccattccaaggaacaaaagccagggaccatgggagaatagtttgttctgggtacaggggtaagagaaagggatgggcacttaatgagtgcttccctcctttgattacaatattctacctgtttcatgctcctttttctcttagatgtctggttaaaagaggtttgattcagctaaatcatgcaagtgacctaaggagaatgatctagataatcattcagaagtcattcagccactataaatagataatatattgtgtgtgtgtgtgtgtgttatgtgggaacaaaatatttataactaaactgaatgaataatatggataattatatctctgttaaatttatataaatgcaggcaaactttaattaaaatctgccaaatccccccaaacacaaaaatattgaagaaaaatggctaatttcacaaggttcaagaatcacacaaacttacctccaggtgttccaagttacttgttctttgaacaagcatattatctttttgcaagatgtccctgtacttagcagtcagttcattgtactgtttattagccagttctagttcagacaaagaaacactattatctacaactttttggagagctgcaatcttgaaaatggccatttcctatgtaaataaagatacactgagttatgctggtgtctttttttctggtcaagcactagccacttttgagaaagataatacaacttaaagtaaaacgaattttaaaatcatttttaaaatatatgatttcccatgtaagaaaaacatgcattaacataatttctttcatataagaaatgttactttgaaaatcttaatcataataaaaataaaatactttaataactcctgtcattgtaaaataaaactcaattaatttgagaaaacataacaaacagcaggaatatatcactcggaatttatctttggatggcttttctaaatttcttatgatcggaaaacaacttgccttttaataaatgggaaaattagcattatcacaggtaactttcacagcttagctatttatgcttattgtaagttaaacggactagctttaataacaagaaaactttttgtacacatgatggaaacattagcgggagagcttctattatagttctctgtaataaataacatcaaggactttaagttacttggttcatggttctactcatcaactatagaactattcaaagatattctattatcaacaccaaaatgaaatgtccaaacttacagttctcttaagttgctgtataataggcaaacattacatagaaaagtacaataaagaatgatgaaagctgagaagtggtataaggaataatcaaatttatgaatgaggaagtaaaaaaacttacggttgtaattcattctgaagtacagtaacgatggaaatatttgtaatagcgcttcagatctcattttggcagcctttcttctccatctaagttaagtacacactattctatcttacccttaagattcagtttcactgttctgggggaaacaggggtagatgagattctatttcccatctcttaagaatctccctttttcttggctcttcaattgttgggagaaaaaaatcaagttcatgagcaggtagaagaggaagaaaactaattcttttctctttctatctcaaacactaactgtatttataaaactctaacaaaagtagattctaaaaaaatctaacacaaaaataagacatgaacatttccttattacatgtctgaataaatatcacttatatttattaaagaatttcttgatgctcagtattaagctttagatcaagctgaaaataggtttattagcctgacatcacccattacaacctttaaagtggaaagtaaagaacccaagcccattttaatttcactttgaattctgtgttcctatgatcctgtccaaatttagtcatgaacattgaacatttacatgcttaaaaataaactacaaggtaaggtataaaactaggtgcagaagggtatacatgtcatgtaacctgtcttgtctttgtttatgtttccaaaaaggaaacatgagaaagataataagttacctacagagggtggagcagaataatatgaaaggcgtaagaccagaattaagatttctctgattaaatattttgcatatataaatattgtatatattaaaattcaataaaggaaaaaaatccctaaaataaaaaaaatgaaaaacaaatgagcctaactatatatcaaatgtataacataaccgcatgaagacaattatttcaagtaagtgtagaatactttgcctatacattctcagcaagatatattctgaagaaaataagacctgaaataaaactttaaactatgtttggcagcagtgctgttgttgttactattaatatcaattcaagtattatttttcaaattattgtatgtatattgtaggataaaacaaatattttaatgttaataataaaggttttctatgtaagaaaaaaatacaagtgcaaaatcaaagaagcttagtaaaaatccgatactatttacttaccccataatgttataattaaactggaaataacaatatgaactcatggtttaaatatatacatatttttctaacttgtctactgagagactagtggcaatgatactctgagagcaatgatgcccagtggccagtttttggtatctaaatgccttccccactaaaaggaacctgggctctttaaagaaatggtttattccaagtatgggcatgaagtatgtaggtaagtctaagacatcttatgctagaaaacaagtcaagctttgaggcttcgttcaaaagactaatgaatttttgtcaagacaatataagagtcaactttaaaggactctctttggctaaagttgagacaaaagaatatgactccaactaaaacacatggaatatttaaaaatctgtgagtctaatctgatacttaaaaaagagaaagcggaggggacaaaaaaagcaggtagtgcagagtacaccaagtgtgtattctgaaaactggtaattaaagagaaaagcatttatcttgcctttgtagtaggagctaaacttcaagataaacaaatagcctgggctaatgaggaaacgctatttattttacaaaagcatgtctgttaataaatgtaagtgcataatataactagaaaattatgatgtttgcaacttttaataattgggttaggcaacaatcatcagcagatgctaaaatcattaggactgacaaataatttgttatttgtatggtaccaaaatatcaccagttagctaaattgcttaataatggaggtatatggttatcttttcttcttcttcttcttctttttttcttttaagagagagactcgctctgttatacaggcacataggctggagatcagtggcacatgatcacagctcactgcagcccccaacttcctgggctcaagcgatcctcccacctcaatgtcccaggtagctgggattacaagcatgtgccactacaccaagctaattaaaaacaaacaaacaaaaaaaaaaacattttttgtagagacggagtctcactatattgcctaggctggtctgggctcaggaaattttcctgcctgggccttccaaaatgttggaattataggcatgagccaccatacttggtctgcttgtcttttccttaacagagtaatcaattacaaaacatggaacaaccagatactcttgaagtgatgcaatataaagtatagaacactacttatgaagtattcttgccaaaaatgtttaaacctgaatgtaacttagggttctgacctaacttttagtaatacaagggacacaggaacaagtaaaatgacacacacacaaaagttagatacatcttcaaacattttttggagaaaaagaaaaccaaggggattctatattaaaaagatttatgagatgtaacatccaaatgcttattctttgatcaaaaaatgtaaaaaatgtgactataatcagggtattaggcgatattagaaaattactgtcattttgttaggtataataaagttactatggttagttaaagaaaaaagcctttttcaaaagggtacattaaatatttaggggaggaatgtctgcaattcaaacatcccacaaaaatcagaagaagcaattatgacaaaatgttaataaatgttaactattaattcaggtgatgagcattattgataccatcctatcttctgcatatttgaaatttttcatagtcagaaaaagcaaaataagaatcagatgtaccttaaatctttgcaaacacccaattttttcacaaacttcagcctccattgacaacaattcattcttttgcttctcattttcttttctaagttgtcgctccaattctactaaggttgtatattgccttataagtgatttttcattcacttgcaaaacagtaattttcctactattttctgcaagtatttttttcatttcatccgaatccatctgaagagcattgagcaaattctgcacaaagacacatccatattacttgttgaatctagctatcctactttgtacaatattgcatactaatgttaaaaatgttttacttacattatattcttttacttttatagcatcttgttggacttgatcctcaagttttctcttttcctcttttattgttttagattctgttttccaggtctccttttcactaaaaacaaaacaaaacaaaaagacaatactgtaaacctaataaaatgtttataagaaaagataacttcagattatgcaaatttaaagttttctcaacacaagaggtatcatagctattcagtatctgaaaacacaagaagttaaactttcatttaaaaagggtttagcctagaattaaaaattttttaaataaatgcaaggcaacaaagttatcaaattattttcattcttccctgattcaccactaaatgggttataatataattgaagctgaatcttataaacattttattgaacacagaaaaaaagtaggaaaataataccctatactaattctagaaatcaaattccaacattctgaccccactctcaaatttgggtgttaaatgcttacaaaataatttgaatacaaacacatcttaagtctaattaaaatagtgaccaaagttaataacagtatattatatactttaaaattgctaagagagtaaattttaagtgttcttagtgcaaaaaaaaaaaaaaataagaagaagtatgctgtaatcccagcactttgggaggccaaggtgggcagattgcttgaggctaggaattttgagactagcgtggacaatatggcaaaactccgtctttaccaaaaatacaaaaattagccaggcgtggtggcacatgcctgtaatctcagctacttgggaggctgaggcaagaaaataacttggacccaggaggcagaggttgcagtgagccaagatagcgccactgcactccagcctgggtgacagagcaagactctgtctcaaggaaaaaaaaaaaaaagtatgcgaggtaatacatatgttaagtagcttgatttagccattccacagtatatacatatatagaacaccatgttgtatagcatagtatatacatatatagaacaccatgttgtatagcatagtatatacatatatagaacaccatgttgtataccataaattcttgtgaatttaaaaagtaatttaaaacatatttatatataaattatttttttgaagttgtgtaagacactgttgtctacacatgagcattccacaaacatgtgtaatgttcttggcataaacccagtatagcggtatcattctctttgcaactgaatggttcagacttggacatgtgatccaattctagcaaatgagatcggagtcaatgtctgccaggtatcaccagaaaaaaatgtttatttaaaaataaaagctatgtagaaaaaaatgctcctcttcttcaatgggcacatcatctttcttgaattcatgcagctattttacaaccatcataggcgataacaacaaccttcaaatatgacctgccctacaactagctttgtggttctggttaggtcagataataattattcttagtgtttaaatcacctttgattaggtattctaattcctattaaggaaatcattctattgatttagatgagatgacagaaataaggagaaatatgttagttccctataaacatatatgaacaatgatgattgtgatgatgatgaatgatgctaacaacagctaacatttacaaactgttcatatgtgccacacactagtccgagcattttcatctaataattcatttacgttttacaataatcctatgaaaagggtattacttacaaagtaacttacagataaggaaactgagacacagataggtaagatgacttgctcaagctcttacaaaaagcaaacgttaaatgactcaaacccaggcaggataatcccaggcttaatgtaatcattaagctacactgtctccataaataagttcctaacagtagttaccagagtaaaaaaaaatacaattgcaaaggaagaagaagaagggaagaacaaaacataaattattcttacgttactttcacaattaacaagaatatactgcaattatatttatagttttgctaatacctataccttaggtattctttatacaacaaactttgttgatgacgaattacagcaaattttctgttgtaatcttcaagagaatcttctaaattctttaactttttttctttattttctagttcctgaaaagtggtttagaaataagaatgcaaaaaaaaacacaatagaataaatgctgaatttgaaagtataaattcatattctgacaacattataggaaagttaaaagtcaccaaatctgtaagcaacacagatcatttttccatgatattttgaacactttagtttaaggcataaaaaaagagtactatacaacaggtaaagttatttttagcacacaaattaccagattacaaagttttattagatagaatagttataaactcgcctctagtcactcggccacataccctctcttatgaacacataatttcataccctcactcaaattatcctttccaattatttcattttaaagatgaaattgaaatttaaataacttactcaatatccaaaaactcattaacactacacttggcaatcatttttaccaagtacatatgctaggcttgttgtcaggtgctttccatatacatggatccaacatttgagtttgggtctgtctgactccaaaggtcttgccacgtttatagctctatacagccttaggattgagagtctaagtacctgttttgccactttggacagcttttcagactcccagttggtactctctaatctactacaaacttctgatatatttcttatacaaagattaaaaatcatgaattttatctcaaaaaatacgacaatgccatactaccaatatttgctgatagtgttcctatacctcaggtaaataagagaaataataatgttaaaattatacatttaaaaataataatatcacatacaaagcaatattctaataagtagttaaggctgtccttagacaacataaaataataataaaaatcccaatattgagaaaaagatgaattactgtaatttccaaaataaaaatgagtacttaataattataactcaagtatactcacaaatggatcacctagcagagagaaatagtggcccatataatcaaaaatatattttcattgattctgaacatatatttgtaattatatttataatgtatgtgatgttatagatagtcaaatttcaaataaaataatgaaaaggatctgtcattaggacattcataacgaccattatatagacagcaaaactgagaaacccagggcaggtagtatagtagagtaccctttcctctttggtggtagattaacattttattgcgtaaagggaagacaaagatgaagaataatttggtttagaagtttttgcttatggctgtgtgcagtggctcacgtctgtaaccctagcaccttgggaggccaaggcaggcgaatcacttgagaccaggagtttgagaccagcctggccaatatgacgacacaccatctctactaaaaaaaaatacaaaaattagccagggatgcatgcctgtagtcccagctactcaggaggctgaggcatgagaatcacttaaactcaggaggtggaagttgcagtgagccaagatagcgcaactgcactccagcctgagtgacagagtgaggctctgtctcaaaaaaaaagtagtttttacttgtgaatgcaaaaaggggaacaattctatcatgacactaaaaagccttgacagactttattcttttgttttccacccagcaagaaataaaagtgctcatttacttaacactgctttataatagctgcttgttgttctgcttgtgaaccatatatttcacatgaatgacaggtgtgcgaacaagatgtatgaacatgctgctcatgcagatgaatggaatgaatggtataaattgcttttatttataatccatctaacatcaaaatccataaaaaatatatttcactgttactattttgagaactcaggaatacatgaagactaaatattgagaaaagtactatctgcatgctttggtgatggaaaaattaaaataaagtaaaataaaaataaaaacataaagaaacatactaccaatgatttttgttattcacatgtaaaattttcaatacctgtaacaaaattttcaatacctgtaacaaatgtattaaatattcattctgagaattaatgatactggcactagatggtgctatcccatcaggtaagtcaattcctttaaaaacaacatttgatccttctgattgtcgtaaaagactagtttctttttcaagatggtctatctggaaaaaaaaatccagcaatgagaatcacaactcttacacccaaagaaagacaaattgacagatatgtgaatgccctgccaggaattttacctcaaccatacttcagtttctgcttagaaatgcctaggtatgagatttagaatttttgtattcttttcaatcttataaggcacttattttccacttataattttataagagaaatccagtttcttaatattgaaagaattaattcaaggggcattttctcataaagcattctttttaaaaaattaaaaatttcctattaaatctacattcttatgtttagcattttcttttatttaataaaattctcacctttaaattagcttttgccaactgctgtgaataatttatagcctctttccgagattccctgagctcctgtcttaattcttcatttcttccggtaagctgatcaacttgggctttcaaatgcagactcgcatcaaagattccttctgcattctttgattctatagcctagcaaatttatattatatattagaaatgtggagaaaaacagtaaaatcatagtaaaaaacagtctgtctttaaataaaatggacatttaagcattttcctattttcattgccaagcatgataataaagtatgccaattcaaattcttatttatgaatctataaaactttcatttacattaccaagcatagtaattacttcattaaaacaattaaaaaacacctagctaatcttaatagactggtagactagaaaaacaaccagacgggaataagatgaccagggttcaaattttaatcagtcacttaacagctgggcaagtgacttaaattctctgtatcttagttttcttgtctctaaaaggggaaaacaatgtgagctctgctccctacatggggtttttgtacagtcaaaatgaggtatttttctctgaaattatatagcacctgcattcaaagcatgcgcaaaggaatggaatacaatattgaacaattgatcaatacaacattcaattaagtgaatttttcagtgcttcctctccacatagttgaagcataaataaaaataaaggcaaggtatcataacatgatattatctaagaataatgagtaagcaaaaataatatgtcaaatattaaaatattatcagagtggcatcactggcccgaaatctccaacagtggcatatctaagtatatacacacaatgcacacatctaataaatatatttggactttagatgaactgtatggaaaaaactgttaaaggcaaagtaagtcttaaaaagtgaaggtagaagccaaataaggtaaaatgaatagaaccaaatgcaatctcctactcaggaaggtgatctggggtttaactctaggtagtagatttgtaaaagccttcccctgaaggagattagagcaggtcatgcagagtaataacttatactaactcaaagaggatataaggaagataaaagtaggtagaggaaggtactctgactgacaacaaggtggtctagttagttgtctcattgaggaatagtgccgtgtctacatggactttggtaaaatgagaatgagttaagatagctgttgggggcactgaaaaataccttgtagtaacaaaaagtgaactgaagtgcataatccagcattgtctggtctaaattgtcatggattctgaagatttcttagagaagtattgctaggtgatttgtgaatttcagatagggcctatgaatctgaaaaaacaatgacaatcccggataaaagtaaatgaagtctatgcaaacagtggcttcaggaaggtccagagattgtcaacataaatagaagttaggatttcttgggctattcactgtgttttcatttggtcactaagtagagctgcccttggaaaattaagtttgatctgggacacagtatcagtagtgggcatcatcacggacaaaagatgttcacataaaaaaagcataaagaatcattttagacattcaaagtggcagaggcaaaacaaaatcaccaatcagagaaggaaagtcagtatgagaaagatataatgggaatcaaattattttcttgcctcaggaagtttttaacataccagtatcactctcattctctgttaacaattatagtgttattttaaaaagtatccaattactgattaatcatgatttttttaaaaaaacaattcaataaataataagaatttttttcccatttgaaatcaagcacaaatttgggaaataatatgacaatgtacgctaaatatgttcagataacataaatgacatatacttaaatattaacaatctaaaatgtgtatattattcaagtttatatacagatactgaatcctgtgaaattctcaagtccctatatggtaaatatatatagaatattagtgatggctaaatctttcttgtagcaatgagtaaatctttaaacatttagaataaagccatttcataatacttctgatggcataagttcctaagagatctacactcccataaataaaaaatgaatgaaaaaaaactacctagatgttctagaaaatgaacaaaagcaagcagattttgggaaaaaacccctcaaatacggaagacaggaccagcaaagattgactttgccatttttaaagatttagtcatagggcagggtgcaattgcagagatctatcatctttctcatctagaaaaccacaggatacagcccaaagccatgggataagtgaaaggaaaatcccaataagaaaagagtcagcaaaaacgagctccaaagtcggtgtaaaaaactcctcaaggtctcaagctgacccttgaaccaaaagaacacagataaagaggaaaatgtcagtgaacttgaagacagattaataacaattatccaattggtagaagaaaagtattgaaagcagctcaagaaaaactacactttacatacagggaaacaatgattcaaatgactaaaaatatctcatcagaaactatggagatctgtacacagcagaaaatctctctaaagtgataggggaaaaacattaacatgaaaaaaataacttacattaactagtctttcaaggctagggataattagagatgtttctcctcctttaacatcaggatctttctgcatttccttaattgcttgcaatatttctttcataccttcttcaagttgcttattttcttcaactaattcttttactgtaattacacagttttctcattggatgatcagatctttttcacaatttacactatgctatacagatgacaaatatttcacatataccaaagacatcattggaaaaatccaaatgtaaataaacatacaaaaaaattcaactataaatccaacgtgaatagttgagttaaatgacagacctatttatatcacgtgcatatacacacgtatataaggcatacttctgccttaacttaaactatgctttatattaaagtattttaaatttggtgttctaacttcattttgattgaagaacacacaagaaaaaggagttatatattctcacaaaaaattcatattagtaacattctctcacaatgaaaacagcaaggcaaatcaactggatagtgacagactgaagtatatacagtacagaggtaattaggagtaaagcagattagaaaacagagaatgtgttaacgcccttttaggcccatgattttaagtataggaaaaataagaacagaaaagtaaaagataattgtaacttacatttattctgaaatttggctatcactgtcctactcctttctaaatctctttctttttcaattagttctcttgaaagaaattcattctgaaaaaagcagagagaataaaattgatttttttcaacaaaatatcacaagtctataattttcaagttaagaaaagtttgatcaattaagtataacaaaacaaaacaaaaaaaacgagctatgaagacatagcagcaatcataaaaataaactaaaatctaaacagtaaagcagatggtgatcttaatcccactttctccctctcccaacatccatggtaagaggcaaaaagatataacggtttttgtctttagtaccacaatcatctcttttaatgttctgcctttacactacctgttctgcctggcttctgtgatgttcaagctctatatctgcatttctacactctgcttctttgatcaagaattcctgtgctatgatttcattctaaagaaaaatttaataaattagacaagtcaatgagttcatatcaatgtactgcattttagattttaaaaagtacaatgtgtataactgatgttaaagtgcaaacaaaaatattctaactataattgttacagaactttgttagagacgtcataaaagaacaaccacagaaatataatttggagaaaaactcacctgagatctaagaaatactagctctctccgtaactgttctataagattttcaagagaatttatctgagataattttgattgtgcagtaatagacacagggtctggaagattaaccttaagcttatttttcaatatctctgtctgtaagggtacttcactttttattatatcttctttcaaattgatatcagcatactttacttgggaatgaacctgttcttcttctaatgttgctacttgtgatttatccatgtcagctctattttcatgaatttgttgacaaaatattgcagatttttgcctaagtgataacttctgcattatgtctgaagctgttgataagccatgaaaagatgaattgcttttttgtacaaaactagtcttctctagtgcttgatggcttcttgacaccttcttcatacagtcatcagaaaaaaggcatatgtcatttatttcttcatggctttccctactaaaggtgctgactaacgattctagatttcttgaagactgcagacatggtgctttaaaaatctctcttattgtaatagtttctggagttgaattctctttaacttgcatggatgaagaaagtctagttaaagggacaaaaggatgcattccactttctacactatggtgaatttcagataacattcttgataatgatcctatggtcatattctcttctgtctcattctgatctgactgtggggtattgaatgatgatctcctatgcagcagctctgctttatctgaactcctaatctgtattcagagtaaataatgtctcattaatcaatctttgaatcaacaggttaaataagcaaatatttccctctacttatttaacaacaataataagattagatgttcaagaatgagataaagggggaagaaatgaaaacacaataaaaatattttcctggccgggcgcggtggctcacgcctgtaatcccagcactttgggaggccgaggcgggcggatcacgaggtcagaagatcgagaccatcccggctaaaacggtgaaaccccgtctctactaaaaatacaaaaaattagccgggcgtggtggcgggcgcctgtagtcccagctacttgggaggctgaggcaggagaatggcatgaacccgggaggcggagcttgcagtgagccgagatcgcgccactgcactccagcctgggagacagagcgagactccgtctcaaaaaaaaaaaaaaaaaaaaatattttcctttactctctttgcaatactttactattacctttgattgtgcttcactcatatttttgaggctcaataaatccaattttctttcacttattctatctccttgagaaatgttttcagttaggttcaggtcctcagtggttaatcctatatataagagaattaacaaactaaaaacattaaaataaccctcctactattccaacactttaattcttaaaacctacaatcaagttttaatgcaaaggtagaataattgtttccaaaatccctccaaaattctacatagccaatacaagcttctcatttagctcacttttaatgaactattaataatgtgagaacctaatttttgaatttcatcttctctaccattctttgcctattctatattaaagtgctacttaataagcaccagttaaaagacatataaagtaaatataaatgatgagtaatgagtaaactgattattgtactaataaatcatgaagttttttcttgagaaagttttggatgtattatagaaatcataatgctaaaaagaaccactctgctattactcatatacgtgcttggggatttggggcaagtgaaaaagacagtccttctgtgtggtcttcttacaaaaaagcactgcaatggctattataaaacttaaccaactgttctctttagctcaagtaaaataaacccaagaaagatgttaatttatattcaataaaacattactttcacttagaaaagaataatttaaggccaggcatggtggctcacgcctataattccagcactttggggagccaaagtggatggatcacttgaggtcaggagttcaagaccagcctgggccaacatggtgaaaccctgtttctactaaaaatacaaaaataagtcaggcgtggtggctcacgcctgtagtctcaactactcaggaggctgaagcacaagaatcactagaacccgggaggcggaggttgcaatgagcaagatcgcaccagtgcactccagcctgggcaatagaacaagacagactccatctcaaatattaataataataataataataataacttacaagaaaagcttttcaatgcatagtccttaaggaaagggaaaatgttgagtaacatatattaacataaaaactactaagttttattattattaataacaacatattggtgctgtctagaaattaaaatactatactataaaacttttcaaaaattccataattctaaggtttttttcttttttgtttgcttggtttttgttattttgttttgttttgtttttgtctatttcagattcaggactgaacccactgacactcacttatctccttcaggttattattgtcatttattaaatttgtagcagatccacaatagaacagcaaaaacagctaagacacaaataatttcatatccagacaactcacttatcaataattctttttaaaggtttagaataactgagtatacctgaagttgcacttctttttcctctttcttgagccatttgacgaattttttttttcagatcaagtcgttcttcctctagactttcaatctgcaaagtataaattattagtatttctctatagttcagccaagaaaataatcaactgactaccacacttgcctctttcaaaagaatctggttttcagctctgtactgctgctgttttaagtgtttgctatttctaaattcagttaaatcaatcattgtctttggttcaaggcctacaatagaaagcaatataattaaaaacttaaaaacattcaaataagctgcaaaaatgtcatataccatcaagcaactggttataattcacttagccagtatcactgaagaatgaggtaactttctgtgaaagaattttccagatatttaaactgtaacccaagttaaaattttatcacaattattaatggaaatcctaacaaaaacctaaatgaaattataaaccaagatttggagctttttaagcacagaaaatatgatgtctatgacagctacctagacgggccagaagtcatctttaggaacttccagattcttggctgtgatctgatagtccaagttgatcagaaggctgtgatctgatagtccaagttgatcagaagtctaatttggggtcctagcacaactacggatccaagttagatacttttcacacatatatatctgtataaaatacttatttgtctatttgtcttttctttagataatagtttttacaaatgatcatttttaactaagaaagcattaaatgaaatttagcaataatgaaattgatatttagatatttattttcattttaaagcagcaacttagtctgcactatcataacactcaaattagtaatattaactaataggctatttattaaaataaatatataaactctcaagctatattactaattactccttaaaatactcgaacaaagtaaaacgtaagtagtctaaattataaaaatcaagtacttaaaaatctttaaaagattttaacaggccaggcgcggtggctcatgcctattatcccagcactttgggaggccaaggcgggtggatcacttaaggtcaggagttggagaccagcctagccaacatggtgaaatcccatctctaccaaaaatacaaaaattagccgggcatagtggtgcacacctgtaatcccagctactcaggaggcagaggcaggagaatcacaacacagagcaagaagtttaaatatctcatctgttacaagagcattttgcaaacaaacatgggtaatacagaccctacttttgttgggaaaaaaaaaggttaatctctgatatgtggtattaataaactttcatctttttaaacaagcagctattactgaggagatgctagaccaaataaagcaatgttccagccctgcccacccaccactccaaccccataaaatctgattccacttcaatcaggttagctccacttttatttgtattaaatgttttataaaagcatttgaaaaaagcattaaactacttaataaataataataaacaaaatttaaattaaaaaaaaagacttgtaaatcaggttgcgcaaactatgtaacttaaaacatggcttacccacacgctctctaagtgcctcattttcatcaaggaaatcactgatcttcaattcaagtttattgatttcctttgttaatatttcaatctctcgatctcttattttaatttggtttttacaattctttatttcaacgacagcatcttctaaaccatatactccctgaaaaatatccaatttaatttaaaatataacatggtttacttgaataaatttatcaagttcatgattttttttttactaagtctaaaggaaaatgtacatatgcctataatttatatcattacactggttttttattgtgcttttataaaccaaatccagtaataataatgatgtaatatgcaacagttaaaactttccagtataatatcctaaaggcaaagtgactctgaatatgcattacatataaaaaacacttaccaaaatactaaaagaattagtaaaagcaaatcagcaataccagtagaataagtaagtcattagttgcttgaattagttgtaaccaatgaaaaagtataaaaagtggagagcaggttgtattgacacagtatgttcctgtcataaattctgtcaaattggccagtggtgtcacatctacatggtggcccaatgaacacagataataaaaaaaagtaatcctgctgcttcaccaaaactgattatttggacaaatcactgtgatcaaaagtttgaaaacaattctggcaaaaagtaaatgctcaaaggtttcaatagtttagtataaattaatgaggataatctttatcaaaagatacttatggaatgttttttaaatggtatgcagtaaatagcacagaatagtctgtgaatggcaagaataattctaagctccttgaatgacaagataaaaatacataccgattcataatcttttaacctcttcagagcctcaactaattctttatccttttccctagcatcagcctcagccagttcagctgttctctcagcctctttagttttctcttttaaaatgtctaacgttgactgaattttcatatgagtctgttgagaaagggttgaagcacctacagagtaaaaacaaaaatcatgaattgaattgactacttattccttcaaatcagtgatcccaacatggtggcaagaaaagtggtatgccattaaaaaaaaatcctttaaagttgtcattttatatttgtaagatgaaagttttgttttggttttactaatacaatttactaaaaaactgaagttcagtaaaaccttcttagctgaaggggtatggattttaaaaggttgcaaaatactgctttacaaaaaatgatcattgtgatacagactgctagctgttcctaatatttaacctcccttttgtccactgtactaaaactatggatttttagcttgacacgtggccatttgaaataaagaactaaatttccacttacacacaagcagctatgtgtggtcatgtcagtaatggaatataaacgcaaagttcatatgtgaatttcaaaaaaaaaaaaaaaaatgtttttaaaataaaggagtaatctctcttctctttcctccttcctgctagctgaaatccacatggatatgagggtggcaacttcacatgagttagaaaccacatgttgagataggcacagcaacaagagacagggttcctgataggggatatttgagcatctgtcacacaaatcctgccctagttgcttcaactttgtctatattatagagaaataaatttctatcttgtttaaattattgtattatgcttgatttttctgtcacttgcagctaaatttaatccaaactaagctaaaaacttcctaaatgcctacttgtaatatcttactaaattgttaaaagaccaaaacataatattgctatcattccaaaattgattgacagatcattctcacactcattcattataagcatttactaatatataggttatatatttaatattggacttaggcataaaactagtacgtttgagatcacaaaagtttttaagaaatgagcacagctgtctggagctaacatctaagctgtggaacatgacacaggctgagttgtcccccagtatctattctcccttccatccacatatctattctcctatcattcttccacatggccctacacaataaacactatatttacctgcctatccttcagcacatgcttttaactcttgcccctcttcctctgtcttgctgtttgggacacagacatgagataaagctgcattccatccattttggatggggcagatgaaggcaacaccctggaatgcttaattctaggccattacatagatgagaaataaatgtctatcttgattttgccattattcttcagctctctgttcctgataactaaacctaatcctaatcttatgaaggaagaataccattagccattacgttttacaagttaagttcaagatgtagagtacagtctagtacacacaccttctgtgagctttagggattatataactacggactgactaaagtgttatcagataagtccttttccttatttgacagcagagatcaattgccactttttctcctagtaattagaatacgcacaatccatactattagtcatccttttaaagcagtttaaactactttcaaagtgttctgatacaaatataataaacacataaatagaaatacatatatatatcgtgggctcttgaagttactcaacagtcataccacattctccacgtcttcaatctttcagatgaccattttatactttcacttctcttctttctcctcaaacttatgaaacatcttctcctatcctcaccttcagctaagaaccttgctcccttgttcactgagaaaaaagcagcaaccagtttagaacttccacaaattcccattaccaggatgtctaccaagccacctacatcgatatctatacactctaccttcttttctacaattatggatgaactctgtgttcctagttaaggccaacctcttcactggcacactaggatcccatcccattgcattcttaaaaatattattgttccagaagttctctctctccacttcattgattcattaatgtttcttctttaatggagctctcctattaacctaaaatcatgagttatttcttccatcttaaagagaaaaatgttttcttaatccctctttcccctcaagctaccaccttgttttctccttctctttatagaaacagtcctggaaaagggttcctatatttctttattacatttcctctctacccattttctcttgaaccaaaaatgaccattgctaagtccaatagtcaacttttagtgatcatcttgacctatcagcagcaatgaacacagctctgaaagcagttgtttcttcttccttggttacattcctcatgtggttttcagggctctccatactcctgcttttcctcctagctctctgggctttccttttcagtctcctttggtagctcctttttatctccccagctgctaaagtagaagctctttagatttttcttcttaacctacatttactcccttggtgatcttagccagcctcattatttcaattacttttacagagacagttaccaaacatatctttagcctagattgttgtcctaaaccttaaacttttatatacaagtgcctacttaacaccttcacttgaatgtctaataagcatctcaaacctaacatgtctaaaattaagtacctgattatctctcaacctgctcttcccacaaccccaccatgaccaaaacttttggttcagaccaagagttctctctctctcacatcctacatctgatctgttagcaaattccatttttatcactttcaaaatacatccagaactgctgcatccagtaactccactgctaccaccatgccccaaaccaccatcacttttctccagattattgcaatagtcttctaacaggtctccctgattcttatttaccactcctacagtctactgcaaacacagcctaagtcaaattatatcatttctatcttcagaaactttccccggtgtcccttctcacttaaaagccaagtctgcacaatgaactataaggccccatatgatatggcctctgtttacctctctggtcttatcactgcctcacttgctgactctactccagccaaaaagacttctttgttgttctcagacatgattggtacactcctgctttactgcctttgaacttattcccactgcttagagccatctgcatgtttcactcctttacttcctttaagtattggttcaattatctcctgagcaaggcttttgcttcatttttgaaattacaaccgtacctgcaaacacatcactacacttacacacacatatgtgcacggaatcactatttcttcttcatgtcatatatacaaatatatatatatacacacacacatatgacatgtatatatatgtgtatatatgtatatatatatgacatgaagaagaaatagtgattccatgcgcgtgtgtataaatgtagtgtatacatatatacatagtcaccaattataataaacatgtccatgaatttcccatgaacagttcgcactagtgtgccctggcataactatagtatgtagtgctatggaaatataacaacacagatattgtaagaacttatattcatagaatttgatgtgttaaaaaaggtaatatggctcagggtaaggagaatatgatgaaacattaatttgggtaagattaatgtgaaattacctctgaaaactatctgcaatgctgttacactggtcaaaattttattatcttccattctttgttaattataaaaagttaaataaaaataattgtatcacaatttttcatttctttcataccagtgacctggtaataaacgttaatgtaattttcaccagaggagaaaaataatagaaaatgcatccatcatttacaaatgtaagcactagtaatataagtataataataaatatcttgtacaattttttgaaaatataaaattcaaatggagaaaactcaatattgacttgacattttattttaataaaaataaagtcgttaaaaacataattgtatataaaataactatatatttataaaaatacctttgtttctttggagctcatttttcaaatcttcaataatacaagtattcttttccatttcttttgtatattgttctacttgttcggtgagcatcttaatttgactgtctcgttcctgtataccctataaaatattttaaaacaatatatatcccttcatgaatattaacctaaaaaggtaaggaaaaaagtacgtctgatttttttcaacaagactgtagaacatattttcttgtgggtacaagtatgccttttaccattttgtacacttcaactgtaatacacaatgataggtacactgctgttactccaatactgaaagatggatataatggctaacactctggaaaataggatttccagaactccctaatgtttatggcttctatacttccttatatgttactttcctcatcctccattcaattccacctttttaccattttgtatgtttctgttttgctctgtgctttctcttttattcaacttagctttttcccctttcgtactttattaaaaaatgttgtcccctgtaattgttcttattcagcatacacttttcaaatcatcttcttacttgtggactataactacagcacaaataataaaagtattacttccttttatttgggttattttcactaaaaataaaataggtagcacagtcaaattataaccatgcttttagcttatttcacattgtatagggtatgttaggactaagatacagtaaaataaaccttaaaagagtataaaattattttaaatttctaaaagtttttaatcatttcttgttaaataatttctaaccaaaacaatgtgtgtactatccacataaacatagaaaaataaacacagtaactctagttctaagtctaatccgtgatctaaacttaattctaattttttattgggaccaggtggtagaagaaatttcaaaagacattattatacacttggtagtaccagccgctacactaggcactgatgatataataaataaaagacatcgttcagagttccaactgtaataaaactggttgataaacaaaattctgttaagattttacctgctgtagagccataacattacttttatcagcatcaagctgagcattcttaagtttctcccttaggttatgtaacatttgctgatactcaataatttcatcatctttagaagacaaaattagctagaaataaacacaatagaatctgttatgcaaaaggaaagttaataaaacattcttcattatcataaataataaacaccgttagtagatttatgatacagaaaataaaaattatttgaaatgagaaagtatgagcaactactggcataatctctgttccttttgtatatacaacctgaaattcaaatagaaaatgattttaaaatatataccgaattttctttttttataattcaatctttaaaaatatttcaacctttcaaaactcatttataaacaagaagtacttccatacaactgtgaaaagttttatacaattgatctttatgaagtatgcattaaaatgcaaccaagaggcataaaatatcttgaatgaatgaaagaaaaggtatcttgtgttctttagctagaaggaccaaataacataaaaaggtttatcctaaatcaatctataaaacaatttataactttaacacatacccaataaaaatccacaagatattttttaagaactggacaagccagttctataattcacattaaaaatattcataaagaagtctaaaagcagaaaaataataacgtttttagatattaaaacatacacaaattaaaacaagtatacactgctagaaaatagatcaatcaattcaataaaagatgaaataatcaataaaagatgtttggacaacagagtagctctgttgaatccacatgatactccttacatcaaaatgaattatatgtttcgaagatttaaatgtaaaaaaaggccaggcagagtcacacctgtaattccagcactttgggaggcccaggcaggaggatcacttgaggccaggggttcaagaccagcctggccaacacagtgtgaccccatgtctactaaaactacaaaaattagctgcgcatggcggcacatgcctgtaatcccagctactcaggaggctgaggcacaagaaccacctgaacccaggaggtggcatttgcagtgagctgagattgtaccattgcactccagcctaagcaactgagtgagactctgtctcaaaaacaaaaacaaaaacaaaaacaaaacaagatattaggagaaaagatgagaaaacaagtttatactcagaagcctttctcattataacaaatgtcaaaagtcattaaaaaataataaatttaactaagcataaaaagaaatatttcacagcaaaaaatgccataaagcaaaaaaagtgacaaactgttagaatgtatttgcaacatacatgacaattacaacacttgcagcaatttattccacagatatacttgtacatttgcaaaataacatatataaggatattcattaaaacagtttacaaccccaaaattggaaacttcataaacttcacaaattatcaaattaacacctgtataaaaagaaaaattacatagcctttaaaaagaacagcaatactatacgtactgatataaaataattatgaaatggtattaagtcaaaacaaagtacagaatacatataacatgtcaccatttaccctgccaacattcaatctggtaaagacaactgttttttccaggggttggtagactatggcccaaaggtcaaatctggcctcccatctgcttttgtaaataaaattttaccggaaaaccaccttgctcactcatttacgtattgtcaatggctgctttcatgctataagcagagtttagttatagcagagaccaggtggtctaaaatattcactgtctggccctttatataaagtttatggagacatgactgattctataggccttatttccattgctaatgcttttgtttaaaatataggttatctgagctccctagatgctaaccagttccaaactgcccacaagatttatgtgaaccatactagaaagcaatgactctagaagtgatagtttttaaaattagaattattcattcagaataatctctgatgtttttcaagtatacaaccatcataatcccagcttctaatatggtaaggcctgacaatttggttaaggttggagagtggtggtgaggaagaaaagtgtattttgaaaaggcttcccaagttattctgatccctttgcttattcccattcccactgatgaacctgacatttagttagaaaaactaaaattaaacctgcaactatttaactaatgtatataaggtaactatgagttaagtaaaaaaatttaaattatatttcgaattatatattttagatgccaaatatattttggagttagacttctatcaaaaagtttaaagttaaactcattgatgtgaaagaggtcattcaataacaaattagctagagatcaaaaaggacagttctagagcttttctaaccaataaataaaataaacttatgtttaaaaaccctaataaacgtgttataaaccagtataagacatttaaagaaaaataagactaaaatttaaatctaaaatacaaaaagaaaaagttattatgtcaattgaaaaaaaataccttccattcttctacttttgcattgacagctaccataattggatcatcttcttcattttttgatttcagaagatctgtaagctcctgcacctaaaagacaaagttatttcaagagttgttgcaaactgatgtaacatatatttacacctgtgcatatttacatatacattatatatataaatatatctacatacacacacatacgtattcatacttatatacacatacatacggatacattacattacatatgtgtatttatcattgaagtcatcctggaattataggtgacatttaatagtttctgcatcttataattgcataattatctttcattactagaaaattttatttttaaacattattctaccttttaaacaaatttaatccacataaatactgaacaatgtattggtttctaatacatttataatgtatttattttaagataaaatgaaatgttatgatccacaggattttcagtagtcttttatagaaaaccccataatgactgctatctacacattcattcaagtatcatttatatatcctaaattgcaaaaattagtgtttgtgaggtgattggagaaacacatatggacaaatataccaacatgacaagatattacactattaaaaagacagacaaaaattcacatcctagaaaaagtactttctagtgtcaaataaatagtaatgagataatatgaagtctgaataaataagttattctaaaagtaattcttacttgaagttgataatgatcgttttctttttttaactgatctattacattatctgtctgatgcacaatagctttcattctattatattcatcagtcatcttctccatttcctgtacagactcttctaaattttttctcatttcttgattctgaacttcaattttctcattagcttctgttaaagtctaaaaaagttaaagacactataattaaaaagtaattttaaaaaaactgaaatttaaaccaaattaaaattaaacgcagccataagtgtcctctagaaaaaaagagaattctttatagacctttactaattggcattgaccaattaaatcaaattgaatcaagaaaatagtacataaggacctcaattgttcttaatgaccaagacaggcaaatataaaaatggctaaaaagttgcaacttcaaagatgtaatttatttcacattttacaagtacatagtgacagatttataccagggaatttacatgtagggctaaatattatatttacattgtaatgaaattaaagtttttaggaaccattgctctgaattgacttctagccattttacctgaatttcatcaagatattggataagctcatagttttttttagacaactgtgatcggtagtcactgtcttcccctcttcttgataaaagtgtttctttctgtgaatctatttgtttctggtagtcaataatatcctgacaaagttgttcattctgaaggtaaccaaacacaacattcaattacaaaactattcagaataacaaaatcatatcctctaaatagtgctctcacaacatattttaaattcccaagatttcaccacacttaaagcctcacctttttctttagacgtttgttctacagaaaaggacaggaaaacggtaattagaaatgagaaaggtaatacataattaaaaataataatcagaaactaaagaaaacaaaaaaattttgggaaaatgatgcatattatcttgaataaccaaagaaagaatactaattatctaccaaaacaaataatatttcaattatgttagaaacttaagaacttctatcagaataaacaatgtacaaacattatttggctcagtagaaccaaatgataatcagaatttataagattccacaagtaacaaaaaattttaaaggattctgggtaagagaaataagaatagaaatccagtcatctattcaattagaaaactagcaaagaatggcttataaaacaacaaaaaaagatttacccgcatagacctgagatgaatgtaatacttaatggcctcacattttgctttgttttctatttccctgagacaaagtcataccataaaatcagtctgaaaacatcagttacttagaagactccagtcctggttaaaatataaatttatgtaaacttaggtacttattttaataagtacctttgttgaaccaccacaactactaaaattttttacctctcttcttaatttgctgttttcattttctgcctcctcatttcgaagagccaactaaaatagtaaaaaaaaaaaataaataagaagaagataaaattcagcagtaattttttttttttttgagacaaagtctttgtcgcctaggctggagtacagtggtgcgatctcggctcactgcaacctctgcctcccggttcaagcaattctcccacctcagcctaccgagtagctggaattactggcatgcattaccataactggctaatttttgtatttttagtagagacggggtttcactgtgttagccaggctggtcttgaactcctggcctcaagtgatccatctgcctcaacctcccaaagtgctaggatttcagacatgagccactgtgcctggccatcagcagtaatttaatataaagccagatattcagcttatctacttaaattttaaatcctctctaacaaagtagaaaatgttaaagctattaaggatttaatatcaacctaacacataaataataggccaaaattttcaaaacttaaggatttaaggattaaacagtttcattttaaagaattaaaaagaacacacacacaaactaaccaaagaatacagaaacaaattaatctgctcctccaaaaaaacccctaataaaatggttttctgcccaacatctttattttacttttctaagtcatagctagactattatttgctctcagtgaacataaattacttagaaatataaggcaatacaacacaatggttaaaagaagcaatctaaaatcacaccggcctaggtttatgtccctcatcaaccaatttctagtaaagcatgaatgagttacttaacatctctttaactcagttttctcatacatgctgacataagagttaaacaagaagcatacagagttcttagaaaaatgatcagtgaatagaatagcaaaaagtaatacagcattctcttatctacatataagtgactttatctgtgattcttgtttctctgaacaggcaaacattattataaacattatgatgccttttttcacctattctccaaacctcattcctcttatgacctttcatttttctggttctcctctttattaaaggagacgatagaatcacaatggtatacaacgatatttaaaaagtctataataaagaaccaaatgtagtatgtgatccttgacagaactttggatattggaggtggggagactgaaggatattattgggccattagaagaaatctcattatggactagataatggtgttgaatcaatattaaaattcctgagcatgacaattatattgtgttcattgtaggagaacatctttctttttcaaacagacaagctgaaatatttaagtgcaaagtatcatatctgcaattagctcttaaatgactcagcaaaaaatgtgattgaacaaacaagagacagagaaatacatgtgtgtgtaaaaatactgacaaaaagataaagcaaagttggcacaacattaagaactggtgaatctatatgaagggtatgtgggtggttattgtttttctttttcccatcaacttttaagttctggggtacatgtgtaagatgtgcaggtttgttacttaggtaaatgtgtacaatggtggcttgctgcacagatcaacccataacctagatattaagcccagcatccattagctattcttcctgatgttctcccaccccgaccccttgacgggtcccagtgtgtgttgttccccaccatgtgtccatgtgttctcattgttcagctcccacttataagtgagaacatgcagtgtttggttttctgttcctgtgtgagtttgctgaggataatggcttccacctccatcccatgtccctgcaaaggacatgatcttgttccggtttttttttttttttttttttgagacaaactctagttttgttgctaaggctagagtccagtggtgcgatctcagctcactgcaacctctgccttctgggttcaagtcattctcctgcctcagcctcccaagtagctgggactgcaggcatacagtaccatgaccagttaatttttgtttgttttgttttgtttttgtagagatggggtttcaccatactggccaggctggtcttgaactcctgacctcaagtgatctgcctgcctcggcctcccaaagtgctgggactgtaggcatgagtcaccacgcttgacctctcattctcttttgatggctgcatagtattctatgatgtatatgttccacattttcattatccagtctatcattgatgagcatttgggttgattccatgtctttgctattgtgaatagtgctgcaatgaacatatgtgtgcaagtatctttataagaaaatgatttatattcttttgggtatatacccagtaatgggattgctgggtcaagtggtatttctgcttctagatcttcgaggaattgccacactgtctcccacaatggttgaactaatttacattaacaccaacagtgtgtttcttacaatctttatgaagatatgacatttttcaaaataaaaatttaaagaaagtttataataaaatgcaaactacaatacaaattttagaagtttgcctatcattattattatcaattgaaagttaataatcccactgtgttctgaattgggaaatttttacaagaagagaagccaagaacttaatgctaaagcatttaatgctattaatgtttttttcccttgtcttctcaaacatcacactctgtttctcctttcttgagcttttccttgaagcactcttcctatttcattgctttattagacatttctcagagacgtgccttacaatcacttctctggcttcaataatgtctacattgatgattcataaatcctcatcatctgtacagggtctcttgtgaattccatatccacagataccctttttgaatatgcccagaagaacctcaaactcaacatctacaaaactgaaataatctcaagctttccaaattcctcttgtgttcctccttaatgaatggcactatctacctatttagtggcccaacccacaaaattaggcagactctccatcctccctctcctccaacaaccaattacattcaccacatccaattacatctacttctctcacacttgtctttctcaggcaaatgccatcattagcacttccctgaattaacacaaatgtttccttactagtcttggcccttttcaatccactctctacaaagtacagtaaacttttaaagtatagatctgatcatgatatcctgtgctcaaaactcttcactggctcctttcaggaaaagaaccaaattcattaggaactggcccttgcttatctctccagaggatcataaaaaataaaactgggaaggcaagatagcacagactcttgagtaagactgttttcaaatcctacctttaccatttataagctgtgcaaccatgggcaattactctttctgtgtctccatttcttcatctgtatcatggcagaaatgacaactatctcatatgacaagtatcaaataagcaataatgaattaatgcatatgaagtgcctggcacatagtaaggactctatgaaagctattttcacttatatttcagtcaaaatgaataactgtagtttcctaaatactccataacatctcttacctctaggtcttagcaaatgctatatcttctacccagaatgttcttttattaaccaccatatatatcctcattcctcttaccagtctaactatacttcaggtctcagtttacagatcacatcctgcacctcaaggctgattacggtatctctctccagagtatgccagaatatgaccttatgtatctccctaagtatcatattatcactatgttatgcttattattgactatgaatattcttgagaaccagaacatagttgcccactatatcactagtaactagcagcctctggtatgctgtaaagactcaataaaactgaatgactggttaacggcaaagaagtaattgccaaagcaacccatacccatatttcatctcaaggaattgagcagccaaaaaggaacacaggccatatattcaagttttctctgtgtgtgactatgaaaaaagacaatagtctaagatataaatggacaaggtagttctgattagctaagggtgtgtggtatgaatgataagtcaactgatacaggtctatatagaagaacaaaagtccagaaaaccacagacatccccctaagcaattctaccagtgtatattataagttagatccttgatgactattaaaaaatccacatgtctgctatgttttgcagttagctaaacagataatgctctaagagcttcttcctaacatttaagtggcatcgatccatactttctctaccacattgttttcatagctaacttctatatgattcttcaacattttagagtaaaatacatacatgaagaatggggatacttttccttacaaatcaatttatgatacattctcttaaatagcatatcattgttttcttaaaatgtatgaccctcaatttctgagagaacaatggacaaaataaaataaatggaatataacacaacaatgacctaaaggacacaaaggtggaaaacgtttctgagtataagggacaggacagttaccacatgtaggcaccaaattttactaagtttactaacagttcaggtgaaataaaaaacaaataaatgttaagtaaataaataaataatacattaaataggaagctgaggtaaaataggaaattttcttccaggaaatacaagttgatctgcaaaaaacttttttcctaaaactaaattcaagtgaacactgcaagaattattagtttataacaaggaataacgaggtaataaaaactatgcattaaaaatgttattttaaatatgtgatttataaactgctgacatgaacacaacttttcaaaaactatacatatatatatatatctcacataaaataaggtacaaccaaaaacaagatatttaattaaccattattgaatatatcgaaagattcatttgcgaatctactaatcatataaatacattgaaatgaacaaatataacttttacccaaaataaactatggcactagaaagatcacttctttatgaaaatctattagttacttgataccaatcttccagacaaaagcattaattttaggtaacaagtttgatgtcctgagaaaaatgtacttccaaatataaagaattaatcttcaagtcatattcactagaagtaccattatattttaaaattggtgatgacaaaatgaacagtgatataaaaccttagagataagtgtacatcatttttcaaatataacatacaatataaaaattgatattgttaccaataataataaaaagccaggtaacttgaacagtgaagattcatggaaaaaaaaagtgctttacttgctcattaactttcttctctttctccaactccttttccatgtcctccaattctctatctttttgttctaattgtttttcaagttggcaaatttcattacgtaaaaaccgagtatctcgtccacctgcagactgctgagccatcttaaagtaataaacccaaagtataaattaatcccattatattttgaggttcaaatgagtcaacaacaagcaaataattatgctgaatttaaatttgcattatacttcagtgcagatatttaaaatcatattagcttaagaacttttttttttttaatttaacttacttaaggttagttcacagctaataactccttaaatttttcctgagccacccagagatgcaaagaattgactgttaatcattctgttgtaaccactgggccacaggtaaccagactaaactgcaaaggttcctgagcctcagggatctggaacctgagtacaaaccatcagaatctccaccccagtcagtgaagctgagtgccttaacctgccctttctctcataccatgcactgtttagaccagtgctgtcccataggactttctagcataatggacatgctgtcagtgctgtccagttcaatagccactcgctacatgtagctatgttcgggcatttgaagtgtggctagtgcaactgaagaactaaatttttcattttaattttaaccaatgtaaatataaatagctacaagtggttagtgctagtgctaccatattaaacagctcaggttttggttatcttaagatttgtagccgattaaatccattttacctcacagtcttgttaattcaggtcatggccaagaacatcaaatcatttggtcatctaatgtgtctcacattcatttcttcaccttatagttctgttattcctctaccttaaccaaattgttcttactctttctctcctccaaaaagcattccattgtgctctctaaaattctcttccaagataaattaatatttcacatcctcagattctttactgaatcctcctttccatctccttggcttagctgcaatttggatcctttagtatactaatgcccttggaactctttcaattggaaggtgctcattctttcagattccaaatacatgagggtcagaagaaggtgttggtgcttctaggtttaccccaccctgcaacttcaggtgatcattcctatcattcctccatcatcctatagaaacttcagctgctttctcacaaaatatcctgctctccatctttacctactcatggtagaaacaagccaccaaccttccagtaactccgcaaaatgcactgggaatttaagcatgtggcccacagatgtctatcaaatgcccactaagcaatctccacataacttttgttctagtctatttttttcttgaattcactatagtctctcactcccacacccacatcagatccttgtccaaccagaacattctttcaattattcccactatgcctgtccttcgacctcacaggacactctaacccctcatcttctccctccatatccctacccttctgcccacccaaccccaatcttgattttatctattcagttaagacttcataatcatcacttcaaccactttcctaccaatatcttcaactgtgctacccttctattctacagcagctacctagctaaacactaacacagaactgatccaactccataattcatttagtatttattgaaagtgcttggcattttcccaggagctggatatacaatcaaaaacaataggtcatccaagttcagagagttaacgagtagaagaatcaggactagaactcaaatctgtctgactccagatccccaactctccagtcctgtctccaatatatttcaaattttacctaatttccttaaaatgtgaccacaccatttcccactctttttaacagaagatgtcatcaccaacccctcaacttccaagcattatgcctacaaacataaaagcctctatacacatccactcttcccacgctcatccactcatcctcctctcctaacacaaaggaaaagggtattcctcctttcaaaggctgatccatttgtatcacattcctaccttctcaggaatctcaatgtattttgttcttcaacaatacattcatattttagccttcagctttgtcaaaaattacttctataacaccctttcgtcactattcctcaaatccccacccaccctccacctcagttactagtaatctttctgtatatttcccaagactataagctccatccagcagttaacttcttattttgttcacaaccatatgctcagtccttagtactatataaggcacataataggcatgtagaacatatacagaataaacaaataaccatgattacaatcatccttataatttttccagccaacaataattttaaaatttgaaaacaattcaaaataaaattaatgacaattacatcctagggaatacaaaaagacatacctccagttcattttccagtttcattactttagtttttaattgattttctatttttttaaaaaaaaagaaaaacgttttaattgattagttaccacaaaacaaacttttaaataaatttcaataacaaaattaattcttttaaaagagtccatcatgattataaggtaacaaaaagtattatatggcagatccataaaataggagtctagaaatatttattattaaatgttatatattaaaaataaactgaatatatatattttatagaatataatttaattttctacagtttaatgaacaaatggaattcattatttaataccataataaactttttccaaggtgcttaccaaattttgcttgttcttctccagctttttctacttcttccaaagccagctccacttcttgagctttcatctaaacattaaaaaaaggttatttcaatatgcctttatactggaatgtaagcactgaaaataaaaattctgttttatttgttatgatccttagtgccagcaatggctggcacatggagacgttcagtaaatatttgctgaataaatagtttttggtttttgtttttgttttttttgcttttgagatagggcctcactttgtcacccaggctggagtgcagtggcacaatctcagctcactgcaacctcctgcctcctgggctcaagcaatcttcccatctcagtctcctgagtagctgggactacaggtgcatgccatcatgcttggcgtgccatcatgcttggtgtgccatcatgctcggcaaattttttcgtacaggcaaggactcactatattatccaggctagtcttgaactcccaggctcaagcaatcctcctgccttggcctcccaaagtgctgggattacagacgtgagccaccatgccaggcaattttcttacttaagactacaatttctagatttttaatagcatgaaacatttttgattctcctttttacctcaagtcctcaagtcttatatccagtaatgcaacatctccctttgtaatgtctttccactactttttttctgttccaattgctattattctaatccataatttcaggtttaaactccgctataatgtgatgtctacaaagctccaatttccttcagtttgtcctacataatatactcagttttgccttcttaaggtgtatttttgtacctatcaattgtgtttcgaaaacctttactgccttctcaattgctgatagcataaaatacacctttaaggccctcaacaacctatctcaaagtacttacccaagatttgttttctctacagtctgctacaaacttgctgcaccttgtttcctcaaatataaagaataaacatatttcctgttctcagtatttatttatggtaaccaacagctctagaattcccttactatcttaccactgcattgccttccacttatctaacactactcctcagtattgatcctttgtgaagtcttctgacatctcttaaatcatttcccctcttaacaaatccctatagcagtcattgtctgcatttgtcatttggacctcaagatatatttccttatgttacttttcaacatactcattctatttcccctacacacccttttagaaactttaagtagaaactagcaatgttttatacactaaaatacttaattcacatttaaatatattgcattttttagtggtgatgtagatattaccaggtattttcacaaagattaccttatataagaacagatttttatagttccactaatagccaaacctatagttaaaacctactacatacaaaccttcattagtgactgagtaattctgaaaaggtgtatcacattttcttgcttttcactttttagctcatttacttccacctaagtaaacagaaaagcaactgttttatattttataaccttcaagcaaaatataagaacacttccagattgtgacaattatagttgtccctgaaaaaaataaattcatattttattaataaattaatcataagttaatgtatatatctattattattgaccaattaagcaccttggataaggaaatcaataaattatctgccagttcttcttgacggggcaggtcatctgggtcaactttcattatttctttccagtttatattaggtggcatcttgaattctttcactgtgctccacctctgtaacaaaacaggtgtatattagcattttcaaggtacacagtattattggttttctagcaccttacattttttgcagattatttcattataactttctgatgttagcaaaacagacaattgggccacaaaatagacaagtgggcaaaatagccttgatcaaaaatagcagtcggcacaaactgtcagagtgtcccggctaaataaaatgtgacggcttccttgctaacactaatctaagttaatacttaagatttctggatcccttcctccacacccctacccacaatgcgcgcgaacaccctaatcctggcaagcgcgagggtctgtggaaggccgacaatcatccctgatttggagaaacagaattggggctgaaaaaaaacgcagaaattaacatttggaatgagtgaagttgtgcggcggaaactggaaccgaagcaaggcagtattagggacccgaggctggaagggcggggtagctatgctgtggcacacgggccctcaggctaaagaacctgagcgtggagtgactcgctaatcctgcttacaaggatccacccacctagaccaagcctggcaaccagcggaggcctctcactaccgcaaccaccaagctggacccggccgcgggccctgacagatccctatcgcggttccacgcggactctgggtccagccaaatggtcccgagcaagccaaagcggcagcggctgctaggcgacaccatccccaactccgccaaggccagaataagatcccggatgccaggagagcctacagttcacgaccgtgggtgatgctttacgtttagattctccgccggagtcccagagctcggtgttcaggatgatgagaaggcgtggaacgaggacttcaaatcccagagtgcagttctgcctgaggcttctgcatgctgggaactgaagtccctgagaagaggaggtaaggcgctcccggcatgcaacgcgtaagactgcgacggtaccggggcggcggggaaggaccgagaggcgggaggagcagcggctcaggcgcctgcaaactggtggcctgaacgaggtagaccatgactgtggtttcagtggcgtcactcgctgggctgctcttcctgaggttttcctaagccatcccctggcggaaccgcccccaggtgaggtcgagctgtcggtcagcatattgggaggaattgaggggagcagtcctgggttagagaagcttctgctattggggccgtagggcctggtcccattctgaaaaagtgggaacaccctgccttctcttcaggcgtttgcaagcggcgtccagggtagtgccttctgtaagaaggaaaaaacaaaaagttttagccttgtttagtatcagaatctgtcttgatagttagagtgagagccgcgcagccgtgatcctcgtttgggggcgagcgaagaattgacaagaggtctcggcatcccgaccccgcccgccttacctgtagcaccattcctttcgcggatcgtggggcttgatggttgtggagctagtataaagtcaaggctctagagaggagaggttagtacttgtccggaccactgccgggggtggagagagaagggatccaaggactcacctgtactattgttgccacttgcttggttacctagggtgcccttccatgaaagcgccttctctggtgtttaccactcttactcgtgcaagttttgctcatcctgctcgtctgctcacaatcatgctggagtatgatacatctctacctaactttcctaagaagctgtagacttaaatctaaatgacatttccaactatctggaccagtgctttgtctttttttttttttaaacgctgctttaaaaaaaaaattactgtacttgacagtaaattttcctttcgaaaataagtaatgagtttctttttaaacccccaatttgggtaaaataagtagctcagtacaaaataaaaagatactgattttgtgagatgaattttaaagacattagttagatttataggaatgacaattttactacttttctgaaagattatatgccaaatactattcattatcttgtttattcttccttacaatccagtgaaataggtgcttacattgtcctcattttccatctgagttaagaaactgaggcttggagaagctaagtaacttaaatagtgtgattgaacacagatctctctggctggaggacatattcttaacttctatacacctcctcagacattctgggaaaccaatatttgtgaagtgcttgttcctcaatcttgctatttttattaaatgttatattttaattttgtaagtgtttactcaataatttgaattaaacattcttcatgttcagtgttcttaattcataatttaacatgggatggtgtttctggaaaggtgttctgatctggaccccaggagagggctcctggatctcgccaagaaagaattggaggtgcatacacccccattggaggtggtagactaaggattgttatagttatttcttgattatatgctaaacaaggggtgggttattcatgagttttctgggaagagggtaggccattcctagatctgagtgttcctcccctttttagactatatagagtaacttcttcacattgccatggcatctgtaaactgtcatagcactggtgggagtgtcttttaggatgctaatgcattataattagtgtataatgagcagtgagaacgagcagacgtcccacctttctcgccatcttggatttggtgggatttggctggcttctttactgcatgctgttttatcagcaaagtctttatgatcagtatcttgtgcccacctcctatctcatcctgtgacttagaatgactgacagacatcctgagaatgcagcccagtaggtctcacccttattttacccagcccctattcaagatggagttgttgtgattcaaatacctctgacaatggtaggaatgaaatttaatagttactgagcacatgttatgtcatacactatgctgactactgcgtgtttgttttcataatagaagtctgttttctctaacaccttttcttctgttttttttttcattcgttataacttatttttatgtattcacttacaagtttcgtttgtctgtattactcttttctacccttctgccaccaccctcttgctcacattcataaactcaaggtgcctggtctctaatggtaaattttattctaatttttcagaagtgagaacaagttcatagaagttaagtaataattgatgaagctaagattgtaacctagatctcagtgacaattgtaactaaaagcaaaatcttacctaaattttattctttaactcattctaacagtattttttatcctgtttcctgtgctaggcactggggatacagcagtgaacaagtcagctctggcttgaacaagtcaactaagtttttatgcattgtcgtctgtacctaagtgtgagtcaggaaatttaactcaggttctagttcaataactcactgtatatttttgaggaaaattggcaaaactattatttttcgtcagattttctgcacctgtcagttttcatcaagaaatgggacttatgtgacaatgttgtaagtggccttgttataagaacacttgtctggacctgccttctttctgccctaggcttttgtgaacagttttatctgaccaaaatcacttcacaagaaggcctcaccttttattattgcttacctttgttctctgtagcaatgaatttatattccttggatgttacttctagttcctttttgctgacttaccaagaaaagtcatagtagcttacttctccgatctctaaaacaaagcatggccattttgtatccattgtgtgtcctaaacattttgttttgccttatcttcatggcaaattaagccatggttaatggcttaattcacactgactccctactgatctttccagtttcctcatgttgaaggaagacaagtatctgcttgctgcacactcattcttgtccatgaaattaaggcaaaacaatttgccttaatacaatttacagttttattgaagggattgtatttagttttgtatatctataatgtagctcatgagaagtctttgtgaaccaaaaagtgtctaagacgggtctcaatcaatttagaagtttattttgccaaggttagggacatgccgaaaagaaataaacactgaatcacagaaacagtctgtagtctcttcctttctctaagatgattttgagggcttcagtatttaaaggggaaaaatccattggaagagaaaaagggtagatatggtaatctatgtgttgcaagagaaaaagagcagagagggaaatagatattatgtattcacgtggggtggtaaatcagcactttacgtgagataagatgaatgtcctaaagtagctacctgtggagatatttaacatttgatgtgtagctgtctgctaagaacaaaaggagagcagtttcttgcatgactcagctttcaccctaattttttcttatagacataatgaattgagatcccaagttttattttcctttcacatttccaattgcacttggattttgtgcacatatatagtaacaccccatttttgtaagcaaacagaaatcagtcatcccatccacttaaactgcatctgtaagtctgcttctgtgcctaggaaaaattagaagttctcacaactaacaagaatagtgtgttacatgtttgcaataatggcccccagtgagtcaggtccccgtctgcctatgcctttgtgtaaatctgtcccttccctgcaacctctactttgcaggtggctcttggaagtaacctaagatgactccacaactgagctcgtaacatgctctctctccctttctctcatactatgctcccttggggaatcttaaaaattctgttatcttggcccttttataacttcttccccattgattcaggatgtaccttgcttgaataataatttttaaaatacgcactaaatagagccttataaagagcttgtgcattgaaccttgccctcctgttgtcctgagatcatcatttaagaagcctaagataacctattagaggatgtgttaataagtagcagagactagttttcaaagctgagaaatctaccctttaaaagccatccagccctaatcaagccactggataactataagcacatgagtgaccccaggcacaactaacagaagaaccatatacatacctatatatttgtgtgtgtgtgtgtgtgtgtatatatatatatacatatatatgtatatatatgtaaaataaagatatattgaagaattgaattattttgaatgtattcatttttaagtacttcagatgcctaacttaacaaagaaaactttctcagtacttaaataactgattaaatttaggaaataaaacttgaaactatagcaaatcccaagttcttataaaaattccaatactatttgtgtatttagctaattattatacttttcaactatagttgtgaatccagaaactacatagtcagtagtttaatatgtttattatgtttaatatgtttattatacgtattattgtatattttaaaattatagttatgcagctaatatatcaaagtctccaggatgtcagattctcttaaaggttgcagttactctaaaaaatcagatgcataatttaatattgtttattatgcatattattgtatatttttatatatttttaaattatttaatttattttaaattatttaatttaacaataatttaacagctaatgtatcaagtctccaggatgttagattctcttaaacattgcaagtactctaaaaattagatacataagttgttcccaagtataactttaaagcactgaaaccacaggtttaatttacttttttcttctattaattttaaactttcctgtggttagaacatttaaccaaacaacagtttgtcaccccaagtgaattgatgttaccaagccagtggcctgaggttatttatgggaagagaggtttctgacctgtacacaaaacttgatttttacctacccaaaggtagatatcctgagttgtttcattcggtttttctaaattacaacatgtatatatagctgtcctatattggatcccatttcctgatttctgtatctttgtttcttaatatactgtttcattttactagtgtaccttttctcctagtttcttgaaaaggaacatcagaggtaaattttttgagacctttaatgacttaggtttttattctactttcccacctggaaaacttaggtttattaatatagaattttagtttagaaatcaatatgcctcagaagtttgaagcattactccttttttattttggaagggaattttttgttttgttttgtttctaacagcattttgggtgaaaaaaaaaagatttttgattcctgatccttactctggaaccttttttatttccagaagcttttagaatcctatttgttttcagtgttgtaaagttttacagaattttgtgcccagtagaaaagggatggagggtctcaacctaaaatatatggacagacttttttttacttagcctttattttcaatatgctgccttttccctgttatcagagaccctatgttttaaataatccacagaggaaacctccagtcttctgccttggaataggagaggttacttggctttatcccgtaagagagggggctgacataatgtccccgttatcagggacattatccagtaagagatggggctgagtttcaacaatgtgactagcttatgcttcttagaagtggatggcattttagctgcgcttttctctggagaattaatatgcaattacttacccacctactaaaattgaacttacttggaataaatatgttccttattttatcttcatgattttttttccagtttttgtccagaagtgcttatagaaaagatggctaatattaacctaaaagaaataaccttaatagtaggtgtggttactgcctgctattggaacagcctcttttgtggttttgtttttgatgatgtttcagcaatactggataacaaagacttgcatccatctacacctttaaaaactttatttcaaaatgacttctggggaacccctatgtctgaggtaagtaattacttacatattacttgtacatgtctcagattttgaaatattctggtattttattacttctaattctttatcaacattatcatcacaacagttacagatttttaaccctaaaatgtttatatgaaacgtaacatgtttgtaataaattgaacaggaagctgaggatgagtactttaaagcagtacttggttatttctttgcctgtgtaccttggctgctgcttttttttttttaacttttattttagatacagggctacatatgcagatttgtcacgtgggtatattgcgttatgctgatgtttggggtaccaatctgtcacccagacagcgagtatagtacccaataggtagttttggcttaacttcttaaaaataatatatatttatgtgaaaaccaaatgtatagggagagcaataggtgtaatacatgcctgtttcttgctaattgactttatttctcttttttctgtcttgtgagtaaggcaaaagagatgtgatatatttcaacattttaaaatatggcaacttcaatataaatagataagaatttaagagtaaaaatagtaagtacacatattgccaatttctcttgcagaagaagtggttattacaaattttgaatctttgtcctatctcttacataatagttatttaggttatatatcgagaacccaaaagtttagttcaataatttaatattttattcatccatatggttcatttttatgagggtatttttactgttttgaaggtcactgttaaactgttgggattaaacccttatcagcttgatatcatatagaatggattctaattttagttatgtcatatattaactgtgtgaaataggtgagaatacatctttcagatggaaagtaattttcctgatctgtaaaagaggataattcctttccaaaataaaaaagagagtaatgcttcaaatttctgggggatattgatttctaaactaaaattctatattaataaacctaaatttcccaggtggaaaagtagaataaaaacataagtcatttaaggtctcaagtaataaatgaattattttatctacactacctggcacatagatattgaataaattgttgaaacataacatgtaactctctgcaatgttaacagtatgtttctcggtcattgtggcctctttccccattccccaaatttggaagcctctcaaggttagggatggaatctttcattcctctgatcacaagcacatataattattttgtcttatttagtaagaagactttattcgcctttttgttctcacccaattctagcttttgaaaaaaaatcttttgatagtaagggggaaaatatggccctattatacattattctacacagcttgtcctcctctatacctacctttgatctccagagaccctcagaactatgtgtccattccctcaatttatgctagtatctgttatgattttaatcataatgttgaggttttgaactgatggtttagctggccatattaaatggtctcattttctagattaggctattcttgtattgctacgaagaaatacctgagacagggtaatatataagaaaagaggttttattggctcacagttctgtcagctgtacaagaagcatagcagcatctgcttctggggaggcctcaagaagcttgcagtcatggcagaaggggaagcaggagcaggcacttcacatagcaaaagcaggagcaagaggagtacggtgggaggtgctacacagttttgaacagccagctctctcaagaactcattgtagcaaatacagtaccaagtggggtggtgctaaaccattcataggaaatccaccctaataatccaatcatttcccaccaggccccacttccaatattggggattacattttgatataagatttgggcagggacacacacatatcacataccatggtgtcagtgatctgttcagtgattttctcagctttgcagattgaaaatttgattttgttcagaaagcccgtaagcagatggactaagaaaaagactcatatgttctgacagaatggatgaacaaactagaataacagtttattaagagtgaagagtgtagttgtgtagtttccttgtattttctgatgggcatattctctccctgaaggcaaatgtgacactagggaaaattattctaggtaatccttaggtgtcataggtttcatgataagcctggaattagcatattcaaagatctaatcattgatatcatcaagttatgatagcctagaagatacgtgtccacacgtatcttacaagaatttttgtaccaatgcaggtcttaaagacacattttgggcttaggacattctcctaagccatataaatactgccgtattaggggtctttggactcatgtgaacctctcagtgtttagattatctctctagtaggcttatgctatagatatgtgctgctctatttattgataattcattggatctcaaccctgactgccgtattagaatttgcctggggcatttaaaagaatgaaaacatattaccaaggctctgtccaaacctgttatttcagataatctcagagtgggatataggtatcaatatttttgtcttattttgtgtgtgtgtgtttagttgttttgtgtgggagggagggtggggcttttgtttaagtcatccaggtgattctttggtatagccgtggctgagagcgagggggctgtaatgagccaccttcctctggcatttggcctataaagtaccttgtgctaaggtaacttctgcaaatattttatctcattatgattttgccatccctatattgagattcacattaacagggaactgttagcttaatcattcattacactgttgtgtatttttattgccaactaatatcatgagtaattttttctttaatatgcccgaaagtaataatgatctgaattgttttattcataatggccctaggtgttttcacaaagtaaacttagtatctaataggctgatgatgatttgtcacagtggaatctgaaatagatccctaatgagttatgtgaataattatgttaataattggtctgtctgttagttggtcatcacctatagtatatgtatgtctaatagtcctaactgaacaattatgtatactgcaattcaaaatacatattcccttctactttctgagtacatcctttcacctagaatatatgttccattgtagccacagtgacatttcaggtactcgaagggtttctagagtccttttctactttctagtacaaatcatgtcagttcagtacagtgccttaaaaatagctttatatgcctgagatgaaatttgaaggatgtaaaggaattaggcaagcaggaaagaacattctaagtagatagtacattatggagtatatagtcagtacagagatactaaaatgttcctaatttcaagatgagaaagatttattctttgtgtttcctaatgttccctactaaggatgaacaggcttaagtctacttgtgtgccagaaagttacagcaaaatatgataggaagtagaagagcaaagaagctgaatatggatgcgtatattagtctgttttgcgttagtataaaggaatacctggtaatttataaggaaaatatgtttatttggcatatggatctgcacactgtacaagcatggcaacagcgtcttcttggcttctggtgaggccttgaaagttttactacctgtagaaggtgaagggggagcaggtgtatcacatggtgagagggggagcaagagggaggagaggaggttccaggctcttttaagcaaccagctttcacatgaactcattacagtggggaagacaccaaaccattcataaaggacccaaccccaatgacccaaacatctcccaccaggcccaaccttcaacatttcaacctcctcatatttcagcatgagatttggaggggacaaacatccaaactatgtcaatgccctttgtataaaactacaaaaaataactttattaatattttatatatattcgaactgtgtgttttattcttaaatctggtttggttttgtgttagggaaagaagtatttctgattaaatgtaacttataatttaaaaagagattcagtactttacatgaaattttatttattaccaaaggagaataccacaagaatggtgtctatttgcatattctaagaaagtttttactcttgtattactctctgtaatttgggaattcctagtttaatatattcagatttacacattatggagatgtttttcataaaacagctagacagtacctttttgagtcatcactattttaattgaactggtaagcattctgttcttacatttccttttgaagatctagccagtagttacatgaacttttgtattgctgatagatatggaggcaggctttggagagaatcctgtgctctaacttgaccaatgccggcattgtctttttttaaaattgttatattgaagaggaattaattgtcaaatgtccttttactgttagttctctgaccactgtatatccaggaggaaattaaccttgtttgtggcctaaggaaatagaaaaacacagattataaaactgtattttatttttgtgttactcttacgacatttcatattttattgttatttctcagtaaaatgtagatattaatatctttaatggtaaatgcagtgatgagcttttgtaccctgttggaccaaggtactttaataatcactgatcgttttttccttgtaggagagaagccacaagtcttaccgtcccttaacagtattgacatttcgcttaaattatttgttaagtgaactaaaaccaatgtcatatcatctcctgaatatgatttttcatgctgtggttagtgtgatatttctcaaagtatgcaaactttttctggacaacaagagtagtgtgattgcttctttactttttgcagtgcacccaatacatacagaagcagtaagtaaaactatgaactgactttttttctttttccttttttacaaatcctgcacagtgattataatggtatatatttttaagaaaaaaaaaaattaaccctgactttaatccaaatatttgaagactcttaaattcgtacagttaattcttaacttcctagtatgcaaagtataacttcctactgtgtaaaatttttaaatttaacatttttgaaacataaacatttttcattcaataatataaaatctgtttagaaatatatacatgaatacagttcttcggtcactttttttaatgaacaagatttctaaggactatttaaagtttattgtctttttaaactttatttttcagatttattatgagatgtaactttttgaatttatggtgcctttgtatattaagaacattcgtattttaagaaaatatgtaagaagtacttaagttctagatattctaccatatttacgtggttaccattggagaaagctggataaagagtacgcaagatctctctttactagttttgaaacttcctataagtcttattattatttcaaaataaatttaaaaaagtataaactgttaagagtcactaataaatgtctatttatgtaagattcacaaattcaccacctgagggcacccaaagaatgtttaagaaacaaatgtgcacttgaaaagttacggaaattaaagtattt

SEQ ID NO: 899867 - DNA, 109367 bp, Mus musculus
ctctccctcacactgtagactgcatgcgcctgctcccacacctggctgttcacacgggtgttagggacacaagctcagctgtgcatgcttgtgataatcactacctacacatacactcttgaacaacactatatttcaaacattaatttaaatttaaaatttttatatgctaggtaagctggactttgtgcatgggagaataagactgtactaaactaggaatatttactgcttaagatgtaaaaagtgcttgtgcagccgtacttactgcctcggtatggattgggtgcactgcgaagagcagagccgcaatcatgctgctcctcttatccagaaagagtctgcagaccttaaggaagatcacgctgacgacagcgtggaacactgtgttcaggaggtggtaagacatgggtttcagctcactgaggagataatttaagcgaaatgtcaacaccgttaagggcctgtatgacttgtggcttctctcctgaaaggaaaaacaaacaaccatggattattaaagtacctcccatcttctggctagtcatcactttattaagataatgatcaaagagttacacaaatgacacactgtgttcactcgtcaccagaaggactgaggcctggaaagcctccagactaggtgtatggggacatttacggcacgcttctcacgcatggatgatggctgagattcggactgtggagcagcacacattacgtttcaaagcgtttcactccaaagtgacctgacaggcagtgcagataaatacctcagggaatcatccggtcttatagccaggggaatattttaccatctaaaagttgtagtttatttcacatagctaatgaatgacagatctaacatcagagtccagtctatacaattcccagtgacaagggtttaaccttaagtaagttaacactgaccttcaaaatgattctaagtgaacactttcttactgcagaggaataggcagtatgcactcaactttaatctacttatattgaatttaccatgctttaattgttaaattaagacaattctgttgcctgactcaaagcaaagaaaagtggctaaagacttttgttaacacctgttggcctccctacacatacatatgttatcctcacacaaagatattatttttaaaaagttaagtcatagcacatgcccaatggaacgaatcctgcttttaagataagggagttacagtacacagacatattcacagctgcatttgtttttagtaggaaagtaattatttttttttttcaaacacctgaaaaataaaatctggaaactgattttttttaaagccctcaatattcgtattccctatagtgaatcgtcaagaatcttcttgaggtttgtgttggatattagggatatagcagaatttaatagctaactagttagttatttattaaatatctatctaatatactgatttaagtgatactcataatttgagttttatttaaaattgttttatataaaaaagtaattatttacctcagacataggagttccccagaagtcattctgaaataaagtttttaaaggtgtagatggatgcaggtctttattatccaatattgctgaaacatcatcaaaaacaaacccacagaacaggctgttccagtagcaggcggcaaccacgctgactattaaagtcacttctttgaagttaatatcagccatcttcccttcaagcatcgatcaccctcaaactgaaaaaacatgcaagataaaaatgaaataagcaacattttcctccaaataattacagcgttagtgttacaatgcatttagaataaagaccggacattaacactcccagagaaaggatcagttaaacgccacatgcttttacaggagaattcaccgattaaccccatatttctaaggcaaatatttcttttataccacttaatctttgtccctctgtctttgggtaactaaacagtgtaagtcccatcggctgtcaccggttaggctcactgggaagcagacacagagtacatttcatgggagaacctctatgctgagtatgagatttccaagactaatggaacttttatttcagtattttatatatttaaaaatcaacttaagccagaccttctgtagttttgtttagttttgttgaaagctttgtagtcaatagcaccaagattaggtgtattacctaatcctaatatctcttactatcaaatttattcctttgaaaaaaccaatttgtctctttgtttatttgagtttgtgacctggattgaaatcatttctttggcccactgcactgaaagcttttagcttagaatttgtgtcataaatgacaatccttattggagtaagaatataacatgggaggcagaggcactgctttagaaaatgctgagttagggaattgtgcagtgaagaaagaactctactaactggaaaagacagaaaaggaaaatcaggtacacaacaaagcgaaaattatttaaaacaaaacttaaaccaaactggccattatctgttctgggtagtgtctctagctcagagttattacactagcacttgtaaaatgcatattactaaatagttcctaacgactgttactatccacataccaaatctttgtctacaatgtttagacagcaagtgactttaaaagtgtgatggttttaccagaggaatcacctgggcaggtccaacacaacagcaaagcccttaagagtgaaagaaatacaatggtgtcagcctttggatgctgattatggggtggatccctggatacactagcaagattttatcgaaaggacccagatgtagctgtctcttgtgagactatgccggggcctagcaaacacagaagtggatgctcacagtcagctattggatggatcacagggctcccaatggaggagctagagaaagtacccaaggagctaaagggatctgcaaccctataggtggaacaacattatgaactaaccagtaccccggagctcttgactctagctgcatatgtatcaaaagatggcctagtcggccatcactggaaagagaggcccattggacacacaaactttatatgccccagtacaggggaacgccagggccaaaaagggggagtgggtgggtaggggagtgggggtgggtgggtatgggggacttttggtatagcattggaatgtaaatgagctaaatacctaataaaaaatggaaaaaaaaaaagagtgaaagaaataagcagacaaaccaaaggcctgacggaagatttctccataagccaaaagtgacagcagcccttgctggtcacttggaaaaggcaaataaagaaattgaatttagaatctttcgtagcacatctaaaacaactactgacactgtggctgtatacagatagagtcattttgcacttttgattcagattggtaagaagtaagtttagctgagtcagctatgtctgtggcactctgttaatctcctgataggcactaatgtaccattcagttttgagatctgagtttgtctgcaggacttctgactgttttcagaaagaaatgagaaataaatttatagtcagcaataaaatagctcacacgggtacagatttaaaatccaatgtaaagctcaaaggatatacttaaactatatatgtgatacataacacgtgaaagcatgagctttcttcggtaaccattaaatgccattcacttaaagacaacttaaaattcagaacaacaaagcacagggtcacagctgcaccgtcttggaaatagttttcaagttaaaaatattatttaaagcttcatcttgactcgggagcgacttcccacctctgaaggttatggagttgtgtgatcctgttaactcacacaccccaaagctgatggtgtttctaattaaaggatgaattcaactagcattttcttcagtgctcgccaaattggacaagagaatatgaggcatctttactatgggacggatgtaagtacgcaagtataaggagctgcaaaggcaacagcaaacactagaagcttgcaactgacaggctcagcaagttaagccgtgcgtcactggaaagtgagttctaggctggaagagaagctggggcctactgttcccagcaccctctggacagcatcagaacagagtctcaagatcttaggaaacaggactaggaacagacacccctctcccatcctactcctaggtaacgactggaattttctttttgagaatataaaacacagggtctcttacataggctgcacagcaatgggcaacgattagtattgtaaatgagggttagataagtttgtctacattatttgtgctaagaccctctagctctcttctctattaaggcagatagttttctccagttttacaccactggaaacggggaagattctaaaggtttacaaaattaaaacaggcttcacactccaaaccaggggggcggggaaaaacggtcaacagtggtacattttagaataaacacctaacaaagcaaggaggagcagtgacttaaatttctacgaggcagtgagctccaaaataaaattcttcatctaggaaaccaaattatgtgcatggaaaagcagaatggagaagttttaaagttcggtttaaagatgtttataactaacagccaaattagggcaatgctaaatagtgtatacaacaatagggaacaaatagggaaattggagaactgaatccagcatgtggtagtcaaatttctatgaaaacacctgaagggaagagggcttagttcagcttatggcttcagaaggttgagggaatgcatatctgcagtcactgctgtgaccgtgccatgggaggacagctcgacaaggcggcatcaggtaagaacgttgctaggctgaagcgagggaagactagagaagagaccaaggctggatacaggggcaagtcatggccttcacatgcctgctgctggacacccacaacctgccaggccccacccaacaagttttactacctcttaagagtccacttaactatgaacacatggcttatgttatacaattcatgatccaattatttctgaaaagctgctcttctgaacactaaacttgggaccaagtattcaacacatgaagcttcagggaacttgtcacatcaaagttacaatataaagcagtgacaaaggaaatacccagaatgacggcacagcatgtcacaaagtttctcagcgatgaccccaagatgatataaacccagtgcatataaacagaagtgtcagggttatgtaagctgtacatagattcatgtgcatgcatatgtgtgtgtgtgtgtgtgtgtgtgtgtatgtgagtcttgctttcctttttcctgacttacaacttgtaagtcaggaaagcaattcatgcatccattattaggtagatttaaaaaacaagtgttaatggagtactactcagctattaaaaagaatgaatttgtgaaattcctaggcaaatggttggacctggagggcatcatcctgagtgaggtaacacaatcacaaaagaactcaaatgatatgtactcactgataagtggatattagcccagaaacttagtatagcgagatataaggtacaatttgcaaaacacatgaaactgaagaagaacaaagaccaaagtgtggacactttgccccttcttagaattggaaacaatcacccatggaaggagttagcaaacacacaagtggatgctcacagtcaactattagatggatcacagggcccccaatggaggagctagagaaagtatccaaggagctaaagagatctgcaaccctgtaggtgcaacattatgaaaaaaacaaaacaaaacaaaacaacaaaacaaaaaaacaagtgttgctgggcatggtggtgcacgcctttaatcccagcacttgggaagcagaggtaggcgaatttctgagttagaggccagcctggtctacagagtgagttccaggacagtcagggctacacagagaaaacctgccttgaaaaaccaaaacaaacaaacaaaaacaataaaacaaaacaaaacaaccccaagtgttacataaggttggaaacctttctcattataaagtcttaggcttcagatctgctaagaccatctacttataatgaaatgtgttctttgattaaaggttttaattaattacacatttaattaatagacaataatctgacatattggaaactgacaagctagtttcataattataacttagaatatctgcgataatgtgcaatataaaatattaagttcactaatttatatacgaattatagaaacccttgagttgctagttctgagtttaatttactagctttatggaagttagtgaacttgtcatacaatatatgacattgattgcagtcaacagaatacattctgaatagtagacctttaagattaaacagcctaatgtattagctttatagtctatgtaaatacattctagatacaatgacaatggcttaatgatacacctttaagaaaaaattctcatcattaaatgacatgtaattacactgcaaatatttggcttaaattaggcatctcatttaagtacttattaaagatgaatacatccaaattataaatatagttttaaatgaaaccatttaaccaaggattttctttttatgggtgtgtttttattaactttgttgtcttccagtttcatgtatataatattttaattgctcagaccttcagtctctctccctttcagtcttcttagctcttcctcctccctacaaatcctgttcacacatttgtccttttcttttaaagaagagcaaacatagatttattcagaacaagtggaaaagaactatgaagatagggaaggctccaaggaagaaataacatgtaaaaaaaatgtaattaaaaatgtaaactaaattaaaagtgaccttttataatacacaaagtaagatttttaggttctaaaagttaaagactacagaatacaaagtgttgcgttagtaaagtcagacagacccatggcatctgtctagttaggtatgattataagaattattgtactgcaagagggggaagaaggacttaaggagccaaggcatcagacaacacaagaaatcctacagaatcaactaacctgggcccagaggggttcacagagactgaactgtcaaccagacctaagccctctgcacacatctaacagttgtacagctgggtcttcatgtgggactaacagtgggagcagggaccgtctctgactacactgcctgccttggaatccctttccctaactgggctgccttgtctgcctcaacagaagacgtgcctagtcttactgcaatttgatatgccaaggcaggttgatacccgagggacaggggcctctccttttccaaggagaagggatggaagcatgggatgtgaggtgagagggagggacttggaggagaggcaggatgtaaagtaaataaataccaataaaaaatttacagtacttttaagctacagaagcgcaattcagtcagaataatgctcagttctgatgttatcattaaaactctgaacttgatttaactttgagacctgtcctctaacctagacataggatcactaaaaatgagatatcatctgtcctccgtcatggataagtagtatctcatgttcttattatacacacagacacacatgttgctttgttcttatcactgatgtcaaggtagaataaagagacaagaataataagctcttatattcagctctcacttgactactatattcagacgctcatggatgtttgtgggttctctggagaacaaaaccccatatcaaggcaaggaatgttgttcagtggtagtgtttggttaacatatagtatgttgcatgcatgtgagtttacgtgcacacttgcatgctgcgcatgtgtatgtatgaatttgttcctgtacattaaagatcttattatatatgtagcccagtctatttaacttgagacctttctgagcctcatgtctgggattatagtcatgtaccattatgtctatctttccgtcccttaaagattccccaaaactgtatatcacaagagggagaattagtcctcgtacagatcgtgagtgcagttctggcattgttgaaggtttcccccgtgtagatctggagaaaagtgcctacacagtactctctcctcactagaagattcactgtgggtaaaggcatgtttatacatgtatgcagtataagccaacttgtctgtttacaaaaaaattatctcagcatatatgcacacaaaatccaactatcatcaaatgtcatcaaagacctatacttcaaaattatactaagtgcttttttttctttctttctttctttctttctttctttctttctttctttctttctttctttctttctttctttctttctttttttttttttttttttggtttttctagacagggtttctctgtatagccctggctgtcctggaactcagtttgtagaccaggctggccttgaactcagcaatccgcctgcctctgcctcccaagtgctgggattaaaggcctgcgccaccaccgcccggcttactaagtgcttcttgggttaacaatctaatgatacactttcggaaagacaaagctattggacaaagctatgactcagggggatctttaattaagggaagtctatcctgtgctgcttcctgggaaaacaagtcatttagaccttctctataacttcctctatttaatattacctttagtgtacagaccgtttgaatgggacgtctgcattcaggctgaatcagacttctccgtccagtctcctcatgctaaagagaaacaagtatctgcttgttatgcatacattcctttacccgaacatgaaggtcctttgaaaaataaaatcttgataaacacctttactctatacctcagttaatacacttcttatggtcatgcaacattttaaacattagagcagtatgattctcaggaaatcagcaaaggacaggtaatgaatttaagtccattggtacagagaacagaggtaacaattacaagaggcagggctttgtcacaaagtgatttgggttagataaagctcttcatacaagcccaggctagatagaacacaggtccaggcaagtgctccagcaacaaggctattgatagaactgtcacatacaaaccagctcttggaaaaatttgaaaaatggagaaattctgaagaaaaattatcttagccatttgaaaattatatagcaacctgcagaaccagaacttcagttaaatgccctgactcacaggtaagtgcaatataaaaacctggatcataatataatttgtttcctgcagtattcttataccaagaaaagcgtattagctcaaaaataccgttaagttacagaatggaatttaataaagaatatacttaagttgttactttcactgagatatacaatcctagcttcatcagttactaataaatgactttgaacttctcccttctgaagagaatacaatttattacttgaagatattacgaacatgaagagaaacaggggtggagagaccaataaaatgacacaaaaatagtaaatgagtaatagaaaatatgtattaaaatcatacaaaaaaatcaaggtattgtgattaaaaacagcaaattcttaaggtagtatactagtgaacatattacatgtgtttaataaatactagtctcatttcttagtactactgacaaaatgaacaggaaaaataattcaaactcttgagtaaatgaagccataaaattaaatgtgcaaaacacaagtaaagcttagtattaacgtttaaaagagaaactgggaagtgcaactatatcacgcatttcacaaacattagcttgtagaatgaatgattgtgttcatcacattaaataagaaaacagcgtttaacctctccgagcttcaatctcttagatggacaatgcggataatactgctgtatctccacaaagaataattccaaaactaaacagtatttagaaataaagcaaacactgcaatcaggcctacaaatctgaagaacgtctttaaaatttgtttcaaataccatttttttgtgctatttgtttttctcaaccgcagaaatcttttcaaaagaaaaatgtaactgtctacatttttcttttaattacttaatatctattatgtatgatatgtataagtaccttatatatctatccacgtatacatacatacatacattcatacatatatacgagacgcactctttcaaatagatgcttacagctcctaaagttacctgctggtgtagaatagctgtgcatttggcaacagttccctgagtaagaagattaacatctgagaaggagaaggcactttcccccaagaactcccttggtacccagcaaatgacagcaaaatgccatcgcttggcatggccctcctccctccctccagcccggcttaagagccttgggcgcactaaggctcctctttccttggccttcactccactcttattaacctaataagcactacaatccgcaagctgctgcaggaggctgccccatcttgacgctccttcttcactcaaccagagcgtgaactcagggggtgcggtgggggtgggggcgctccactttcccagacaccaaggaggctggaaacttttattgactcccctcttagggaagccactaactgggagcccctcgcacctacctgagtagccggaggactctttcccaaacctctgcaagatccgccagcccttcggcagccccaagctagcgcttccctaaaaacgcaaaggttccctgagctactcctggctgtgggttgacacgccccgacctcacctgagggcggctccgccaggagacggttcaggaaagcttctgggatggtggaccggagaaggactccgcagaaaacacagtcatagcctgccacgctcggactccggggcggccgcaccttagcagccgctcctcccgcctcccgagccttcccccagctcttccagggcggccgcagactcccgcattgcacgccgggaacgcgccgctcttcccaaaaacttccaatcccaggatgcacagccgcgacgccgaactgcactctgggacgtagagtcctcatctcacggctctccctcatccacagtaaggagggcttggaggggaaatagagccgtaaagctttttccagggtcgtgaaatgtagtcttcccaggtatcccggggcctagttccggtcttggcaggctggggggcggggagtggtgtcgcctagcagccggcgccgcttcggctcggtcgggaagagttggcgggagcagcctgagtgcgcgaggaccgctctgggaagcgtgaggccggggcggtggccgaacccggaggtggtcgctgtagatgagtgactgctgctggtggcaggtcttggtttcggtgggtggatcctcgtgagccggagccgcttagtgtcgttcacaggatcgtaatcccgagggacagggtgcagccctacctatccagacctctgtcgctcttgtctgcagtgtcgtctcggcctccctgattgagcttgattccgcaaacacttcatttagctcagtctttttatctactttaaaaatcctctggtcccctttcctcagaaggttttcaaaaacttccaaacatcttgggagttggtaccatcattgatggtaggggacttggaaaaggggcctcggggttttagctccgaattcgtcttagcaagaaaataataatttagcgtgtacattatcgtatagcctgtgtcaggggaactaattttcgtcgaggctgtttgcctctgcatctgttttgcagttcaggagccatagctcttagccagcacctagagagttaagtaagaccgctcatgatcatgtaaacactgcaaggccattttccttgaaaatgctaaaatccacctgcttctttgtagaggctgagagacagtgaaagaattcaagatgccacctaatataaagtggaaagaattaatcaaagttgatccagatgacctgccacggcaagaagagttagcagataaattattgatatctttatccaaggtacttaataaatgatttgtacacagagcctgatgtacaatgtcatgaattgaaattgcttcttgaaatcattgaatgctataactggaagagtgcttgtatttaatgtgcagggtatgaaatagtccattttttgtgtgtttgtttccttaggtggaagtaaatgaactaaaaaatgaagaccaagaaaacatgatacatctattcagaattacccagtctctaatgaaggtttgtaggaaagagtgtgtaggaaaagaaatattttttaggagaaacataaagagtcataaagaatcatatggtcaaataaaatacaaaatctctcccctataagctatacatgaaatgataagaggattctagattcttcataaataaatactgagaaagaatatgtattctttacattaaggtaaaagcatatagaaaaatatttggggccagtaatttgggatatactgttcaagagtttgagagtatattttggttatcagcattttagaagggaataaaggtttttaaatcatacttggtaaagaaatgtacttatgaaggcaacattaaatgtgttgtatagactgaagggatgagagctgattagttccaattataagaaggaattactaaatttattaataataacaattgggatagtaaaaaagatattgaaaacattttaagtaatggctataaagtttaacggaaaaatcagatataattcaaagtcttgccattctggaatttctagccttatgtatttattcaacaactatttactgactgtctctgtgtgttagtcatcgtacacactacagactgagatagcaaattccacacagtttccattcccactgtttacattacagtgtaaataatacagattcttcccctctcgttttaatgttcagatgaaagcccaggaagtagagctcgctttggaagaagttgaaaaggctggagaagaacaagcaaaatttggtaaatgtcttgggaaaaaactactgtggttccattacttattagacagtataaaatctatcctattctataacatatgtattcaatttatactgaaagatgctacatccttgtgcagttccaggtactggcctgagtgctgtggtagggggtgaagaaaagaaaacacacagacacttagaacagttgttttcggttggaccaggctctctaatggagcaactgccccaccccagaagctcactgtctgtattatatccacttgaccagagcagtggagttgttgcatagctgaacataaagtcgagtgagtgcatacagataaacatgaaggcagggtttctgctgttgaatagggaggcagatttatcaaatctcagtaggagtagtctctataagggagccataaacattagggggacattttctgcacaccctgtcaacatccacagtcagacgaggagggaaggctttgccgtttgccataggcctgagacatttggagttcctgacgtggctttgcccatgtcagtagtacacactgactcagggctcatgcactgaagccttcctctgctctctacatgaggcatttctagaatgcatattttatgcatttagtatataataattactttcctgtatctgttaaggatggaatcttttacagagaacagtactattttattaaagtttacttaaaatctgattataggaaacttaaccaattaaaacatttgtgtttttttttaaatagaaaatcaattaaagacaaaagtaatgaaactggaaaatgaactggaggtatatatatatccttttatatttccttgtttttgaattttcttgtagttgttattaattgcattattttaaattgttttcaaatcctcccagattggaaaatacaagattttgtgctcatgcgtttattcattacacagaatgtgcttttgtgacttgagttctaagaattatgcatccagtgaagtaaaaacggatcccttctgaatggggctgtcagtctggagaagcatatagaaagcttagtagcagctgagggggaagggtgtgggaagtaaccacaccgagattctgagaagctgagaggggatgcagtaggaaaggaccagactttgaaaggaggaaccagggaaaggagaggtccacaaggttttatgcttgtgagtttagttcttagaagcagagacagggatgagatcgcttgtaaggtttagccatgggagactgtgagaataagataacctttgagacatcgtagacaaagggctgaagaccaagggctatgggctcagatgggagttctagtcctcattattttgacttgattaactctgtgcacatggataagttatttcacatcttcagctagatttcaagctcccgggaaactgtcaggcacttttaataagcacttttgtagtaaacgatgtctgaagttgagctgattctgtgcttgtatttaggcagacagctggtaaagaatagaagactctggcagttcaaggtcttggtcagaatgtgtttaaagtattggtgatgaaatctatgctaaatggggatgatgtcaagactggcgttgggacaggggaagtgtggagtcagggagcaggaacagtgaagcatgtgttgggcccattgtgtttatcaaagggaaagtcctagagaagagctgagggaatgcttctttgggcagagtctgttaggactggcggaacgcagtaaatcaagaaacacgtcgtttcttacttgtcctttaaagctactttaaaataaaaggagcgagtcatgtggttgtagcagtggctcaggctgatttgtgtagaagactgagctgccacatgcctgcatcctaaggacttacaagcctgcacaggaaagtggtggtttgctggtgcgtattggagtgtttaggatagcgacatatcttgtaaagtcaaaatgggtgaagatgtggaggagccctcagagactgttgtcaccttttcttgatcttgaactgacaaacaactcgcaaaggaatgagcgctctaaaagaacctaactgtagttttgtaaggaaataaggaaaggtttagttaagaacaaatgctcaggatgtaaaatcagtgttttggaagatgctttaagagagcagagtggtgagccgggcgtggtggtgcacgcttttaatcctagcacttgggaggcagaggcaggtggatttctgagttcgaggccagcctggtctacaaagtgagttccaggacagccagggctacacagagaaaccctgtctcaaaaaaaccaaaaaaagagagagaaagagagagagagaaagagaaagagagagagagagagagagagagagcgcagagtgggaagcttcatgaagcagagaagactgaaaagcatctgagtaagaggacgtagcagaaatgtgtggggagtgttccctgtgacgcaagcttaggggcctagtggcccagtggtttgcgccatggtctagttgtcaggaatgtgaagtaaaataaattgaaatgtctgctaagctttaaagtggttctgtcttggcttgcttgtagagtagtaccaagcagtcatggtgctgtgcagttacatttgttaaagctgaacattcaggtcttcgttgcgctggacacaagtcaagtgtgcacatgactcagaacgagcaaggacagacacgactgagagtgtttcttctagactagagtgatgtctgatccaaccagcctgccgtgtcaggaaagggcagacagagaaagaggaccaagctgctttcagttttccttcacagcctttacagtttctaagccttcgcattttagtctgtccctaggcttagtgactgtaacagcgcctgcctgcagtctgttcttcatggttcttttggtagtcaaggaaagcttgtgggttgccgacttacaaattaaagcctaataagttcagggggttttctagttatatttttattatataaagcgattttaaatgtacatattttgctcttattcttccctttccccaagtccttccatatcctctcctcctccctacccacccaactcttaagttcttttaaaatggcatttgcacgacaagccttaagctgcctggtgtttctgaagcagactgaaaatttacagtggagtacttgttcgttggttcctttaaaccttcaagtgaaaaagaattacttatagttggaagactgaattctttgcttctgactttaagatggctcagcagtctgcagggggacgtgacactcggtttttacgtgacgaaattcgccaacttgagaagcagctggaacaaaaagatagagaattagaggatatggaaaaagaattggataaagaaaagaaggttaatgaacaagtaagacccgcttttctctatgaatcttaatatttaggataatcctacaccattactcttactgctgtagttgcctttgggagcagttcttggttatatgtctagttgaggagcagcatgcacccaggtaagttttgtaccagtcttcattttgtagtcacatttgaaatacataatggaattgactacctacttctaatgatacactggaaaatgtgctccctctcgctctcctgtccttccttcccagctttgatacccatgagcctctggtaaaggctgcagactaaaggatctttctaaagaaacaagagagctgagcacaaggctaggtcaaatccgagcttttaaagcttaccctgctttgtggagagcagactgaggagggtcaaattagtaaggaaacacttgtattggttccgacagtgctgatggtggactagttaagggaataactgctgggatgactagacatgcctgagggaaagggtgactgggctggtgaatgacaggatggagagcagaggagaggctgcctgtctgtggcatgcatgtggctaggtgcaatggtgccctttggaacaccgagttgtgtgcaggtttaacattattggttcagttttgcccagttgatcttgaggttcttgtaatatttaaatctcatatacatagtagacaccacactgatcatggtctttagtatagatattaatgaagccagaaccttgattgtaagatttaccactgaaaaagttgaataaaataatggaataggttgcacgaaagaaagctatcaagagtgaagctaaaggaaaacagtggagtagccctgagtgcttgagtattgaattttcacctttccaatttagaatacaattggacagatagtaccagataataattgtcacattaatcatcatcaaacttataaaattttcatttgcattgcatgtgaaatgtttttttcttggaaaataataaatattctttatattttataaagacttgtcagaaaaaaacaataaatattcatattctcatggttattcatcaattgagatttctgtcatatcgttgtacacataattctttatctctcatttttcttttgttgaaccatttaagacttaattttagacataataatactttataattaaataggtctaaaaatgtgaatattcccttatacaaccaaaatagacttatgatgttcaggaaatgaaatgttgattcggtagtattgtagtctataatcagattttctctactgacctaatagtatattttatttcctacctgtctaaagaaccattctatgcctccttatagatgggtttaagctttttgcatactattgtgattgaattttttgcttgagtaaggcagaaaaacagaaaggtaaaagaccattaaaatgatgttatatagagaatagataataaagaaaagctatcatattggttataatattttttctgtccaaaagaaaacagaaactgctgcaaatgaactgttgtaggtgaagaaaacagcatttagtactgtttgctggtctgtttgttgagtatcttgttaaggactttatgcacatcatatttctcatgtcaacaagagacatgaaaccaattgaagggatggtaaatggattttttgtacttatgtaagaattgatactcaaaggatatataaacttaggccaacctgatttctgatttcagcttgtttcagtcatttctgtacccgccccccctttttgtaggtatttcagttcataaagagggaagagtgatttctccttcagcagtttttaggaaattgggcaatataactttgagattgttgtcttctttagcctttagtttgctttggtatatatagattatttttcctttaaagctgagtctttccttctgtactttattaagtccttagtttaaactcgtgttttatttgtgttctagtgtgatatgaagtctttactagtccttagtagttacatggtctctcttggaaaggaataagaatttaagtaaaaaaagctaaatgtggaacttagattgcattatttttgagttttatcttttttttattcttttactgttttagttggctcttcgaaatgaggaggcagaaaatgaaaacagcaaattaagaagagaggttagtaaagactttcagttttggggtggttcgacaatgacttccttgtttaaaatgtttacttaaaatgctattttaaccagaatctcatcttctgtgtaactgatgatagtcatactggctcattttatgaggctttgtctcagggaattacagagtcaaccaaaatgcgaggccattaggtagttcatccctgccttggaaccgtgtggggcgatgttgtttcctgttccatgaccgtcttgctaacagcgaactgggcatttgaggaggtttcttttcttatgacgttttgtctggcattgtcatagttttgtttctcatgaagtctgataatacaatttgtgtatatgtgctaaatcataactttctgtcttgtaacagaaatgttttaattcacatttaatatgatcatatcatttcccctattcctgttcttcttctgaccgccacctactgtgtcctcttcttttaattgttttatctaaaatttctttttagcctagttagaatttttttccttttggctcatacttaatattttttcttttctttcactattttaaataatgcattcagttgttctaaaatgttccttattctcactttctttaatacatacatgttggttttaattatgtgttgcctttctcatctctaattattcttttcctgtccttttgaagaacaaacgtctaaagaaaaaggtgaggccctaagggtagttaaagcttgggagcttagagagcggctctggggtcagcagcaggggtagagttttgtcatcctcagtagtgttgtcctgttggctcgtttttggctctggatagaggtttaacgctgactgctgtgtttgctctaaactcagaatgagcagcttcggcaggacattattgactaccagaaacaaatagattcacagaaagaatcacttctgtcaaggagaggagaagacagtgactaccgatcacagttgtctaaaaagaactatgaacttgttcaatatctggacgaaatacaggtaatatgagtaagtcagttcagaggcttggttttacaaatgtattaccaggctggggtaaatctaacattcactgcttgttgttacttttgagtatgtatttgctactgtgtccattaactgatttatcttgtgtgtgtataatgctgcctgtccatgtgtgtatgcacattggtgcctgcatgtgtgctgaggtcaggggtagcctctggtatttgttaccagcttctgccttatgtgaggtaggatccccttgtggttcactactctgcagtctgggccatcgagctcccagattccatggattcacctctgtgctctctcagtaggagcactgagaataaacacgcaaactgcagcgtctggctttatgtgcattcacatgtttatgctgcaagtattttattcacaaacacatctctctgcctccacatgtactattaaaacacaaaataagttgtgcctttgaattttcaattatttatttacactgcatttctctgtcctgggcaccaagatcaactgagatgccaaagacaattttcttgacatttaatttcatttaactggccaatgtcgtgttaatcctaatgggctatcaagaatccatttttcctctggaggaccctatggctctatttaattgtagtttagtataaatttcagtttcttgtaagacttgtttaaagtaatagtgtatttaacatttttagaccttaacagaagctaatgagaagattgaagttcagaaccaagaaatgaggaaaaacctggaagagtctgtgcaggagatggagaagatgactgatgagtacaacaggatgaaagcgcttgtgcatcagtcggatgctgtcatggaccagatcaagaaggagaatgagcactatcgcctgcaagtaagcgagctcaccgttgaaaccgagcctggttctcaccagcctcattcattgctgtgtgtttgaaactagacagactttaatgttctaggatgttgcttttgttgcttgtcttaatacaggaatgtgttgccatcctgacatacttgtccaaagggctcttcacgtgcaccttggtcctggccatttggggaaaatgaatgatgctcaagggagtgtagacaggagtgctgagaatagtttcagggatatgaagacttttaaaaacccaatggctataatgacagggtttctctgtatagccttggctgttctggaactcactttgtagaccaggctggcctcgaactcagaaatccacctgactctgcctcccatgtgctgggattaaaggcatgcgccaccaccgcctgacttaattttatttcttaaaacactgaaaatatatcagagatcaatatattatttattatttacattgggtagcttgtttgaaaagtacaataatgtttaaaaatgtggttctctagtaataattatataatagttccttgagtagcacttatctaaaatgcacgggattataaatgtccagagtgtggtttatttttatttttcatttttttattttatttagacttttggggggttttcaggttttggaagtagtgcaggatagatatatacatgagcacttgtggggataccgttaatagctaaacactagactcatgtatgcttcatgtggccctgataggtaaaccatcaatacagtatttttatgcctgtattttgactaaaacacagcaaattaaatgtgatacataattttccacttgtggcaacataaaaagtgtccaatttgagagcatttcagattttaaagttttatttagaattatacagctattacatttcacctttaagaataagactacgctagtaatgaatagcacatgtaatatagtgcagctgtaaacatgtctttgtgcatgcttcagtatgcacatgcaatcacgggaactcgccctgctttgaactattttacaagctgattgttcctctcaggttcgagagctcacggatcttctgaaggcgaaggatgaagaggacgatccagtcatgatggctgttaacgcaaaagtggaagagtggaaggtgctgtgccacaggatccgacccttctcatttagtattttgatttgactttgattttgatccttaaggacttatatcagacaataacatgttgatttttaagaagttcattccatacctgggtataaaagctctaaagcttctgtatgtgctcctcgagcttgttcatttattagacaagcactttccaggcaagagtgatcaggaatggcatcaggggaaagatttatcagtctcatgtggaaagccttttcagaatactccatttctttgtctaacttccattttccagcctaagtccagagctgtaccccatcagagactaggattaggatggtgagatgactgaactagtaattctagtaaaagctggcccttctagcatctccacctctggccacgcccactgaacccttatctgcagttaggaactgtttgttatctgggaaggtcagatagtttatgtcgcagctgtagttgcaatgggacgaagctgcattcatcctgcaggggtcagataatctgtaaagctctagaaagtaacagttttagctgtcctgttctagccatgcaactgcttggaaagggtagtgcacagacaatccatgagtggataagcatggctgcctgacagggccttaagaaacaagctaggccaggcttgctttcaaccttagagtgtagtttctaacctttggaaaaaacccagttccaatcacattttaatatttaatttttgtacatataatgaatgagtaccctgttgtatgacactcaggaggtttccagtttttcttttgaaggcagtattttaatgagaagttatatgtgtgtgtgtgtgtgtgtgtgtgtatacatacacacacacatagacacaaacacattataaatgcacactgaaaaaaattaaaaagaattttatttttgtattcttttaaatgtgctaaaggtatttatacttttctataaattatgagtggtttgttaatttacgtttttataacagatcttattattattttttttttttagttaattttgtcttctaaagatgatgaaatcattgaatatcagcaaatgctacagagtctgagagggaaacttaaaaatgcccaacttgatgcagacaaaagtaacatcatggctctgaaacaggtaaaaccttctcaaggatggtaacatcagggaatgatgctgtcttagctgctcatccgtgggcctggtcggcttccattactgtgtgtgtaacaagctttgaagtctctcatgcatagctcatgggggaggcaaaggtagaagtaagtttagagagagtgtaacactttagaattattttgctttttcatattattatttattgtcagtttggaattacttagtatctattcaaaagctgtagcttttaaaataccttgcttcttattaatgtttgttattgtgtatcttatgcctaaactactaagtgaaccaagtgtgcttatattgtgagtgtgctacttaaaagttgtttttaggaaaacaaactcattcagaaaacccctctcactcctcttgtatgtgttctttcagtgaagtggtaagatagacgctgtttgaaaatgagggcagtgatgaggaccttgtttctcagtggggtgtagaaggcacagaagcctgactggccggaaagaaagaacagagcaaacagagagagtaccaaagagaaggttcaatgggtaactagcaagaatactgtatcaggagttataaaagccatggacactaaggagttctagaataaaaatttccatctttaaatattcacatgagaacagttgtgtaggctgtttgaggaatacatacgaaacttactttcctgggtctggtaggtggccacgtaggtaaagacacttaatgtccttcctgacaaccttagttcagtctctggaacccacaaggtgaaagaagttgtcacctgatcccacacatctgcctatacatggacacacaaataaataaatgtaataaaaaaaatgtttaaaagaaacagtttatctaccaggaagtgtgttctcttatttattataaaaatgtatgttcatattaatgaatatttgctatttcaaaatattttgtagggtatccaggagcgagacagtcaaattaagatgcttactgagcaagtagaacagtatacgaaagaaatggaaaaaaatacgtttattattgaagatttgaaaaatgaactccaaaaagacaaaggtatcttagtattttataagaaaacagcttacatatatcattgtgcttcaaacgactttttacatttcaaatgatattctcctttccagttaccccttcacaatcccccctctcatcctcccctccccctcccctttgcctctatgagggtcctcctccacccactcaccctttcctgcctctgaatccgagggaaaggggaactggagagaagaaacagaaaatcttttctgcaatagggtagtaaaaaaacaaacaaacaaacaaaaaaaaactaggtagtagcctgaggagaaagaaagcttaaaaatgttgtaagttttaaagaagaaacaacacatttttgtagattaatggaaagactccattggtgaagcagaggagaaagagacgtctgaaggtttaggctggcaatacatctagctgaaaatctattttactgttaatagtggttgaaagaaatgttgattattatcaccattaaatattttctgtcacagagatgcatcctctgtaaagtgggcttttacaacattttttttttaataacccatatccttatagctaaagtaactgtaatcaactctactttttagttgattttcctttttttggttcaaatgactttagtaaaagctgcagtgcccacactccccagttgccattagttggttttcttaataaaaccaaagagtgcattggtcttacagtgagtagacacctaagaagcttttgtgccttactgatgctgcagctcctttttgggaacagcagattcataagaaggagaactcaattcagttcgttcatgatttcttttttcacactgtaggtacttcaaacttttatcagcagactcattatatgaaaattcactcaaaagtacaaattttagaagagaaaacaaaagaggccgagagaatagctgagctggctgaggctgatgccagggagaaggacaaagaattggttgaggctctgaagagattaaaagattatgaatctgtaagtatttttatcttgtcagtcagagagcttagttattctgacagcaagctggctctgtggctcgtactgtgtcccatggagaaaacattctggatccccgcaccgtcaactcgtcagacctcacagcattcgctttctgtcaagagaattgcttccaaacctgttttccttcttaaaaagagtttattttattattattttttttaagtttgagattattacatcatttttctcttctctttcttccctccaaaccatccacacacacataaccctcctcactcttattgcttcctttctccttaattattgtttcttatatatatgtaatatatatgtacatgtatgatatatatatgttagatatattcataaatataatgaactcaggatgtatatgttagaataccttttatttgttggaggcagttgtattctcagagacttactgcccctatcttctaacctatgcctagtcctggaagtttctagcccctgtacaatcttctcgaggcctagaatgttttctgcctttgagactttactgttgaataagctcactcctccctaactctttctgatctctcaactgagctgttctggctcaaattcctctccaagctaactgattcaatctggcttctctcttgtcctctgaatttttgctctgcttggcctcaaactatctttggcaatatctgatgtggttaaatctcattttctggcttgttctgtcttcatctatgtctggcttatctctctgtaacctgtctctgtactgttatcccagtaaaaactgcctcatctctgtctttgtgctattgtttcttaagatgcatctctttcctctctcttctcctgagagttgggcatatcctattctgtaaactccatctctgatttatcactttgtctgtcacacaggtagacatcacttccaaacatgcttgcttccttctacaaataacctttaccttctttgtttgcaattaaagttattgtactaagtgtgtttctgttttccagccagagggattaaaggtatatgctaatggctgagccacaccacaactagaaagagtttttttcagtaaataacacaatctcggtgttcacagtgtgatcatatatcctgttacatgtagaattacttgtatgtatttattggatattggataaccaaacatgctttttcactggagaagactatttttttctgctcactttgtgaattgctctgtgtgtagttctctgtgttagggctgaggtactgtgggctcttactgcaaagagaaagagcatgaccttatctgtaggtaaaaggacaaatgtttacaacgttggtgggattatgctgctttcgtagagtagtagctgtgaccctacagtaaccgtgactgaacgagtactgagtagtttcccttaggattactgtggcatgctggtcagtgaggttcataagctgcagaggttggcagggttacttgcgttccaccttttcaagcttgcatggtaccttctgggaccttgaaagctcgtcctcagggaagaataggcttaaaaaatgagttccaacttgaagtctctaggtcttgtttctgaaatgcattgtgtattcagtaattgggacttactctctacctctgagggccaatcaggggcaatagcaataagctgtatgttttcagagtcttttagacaaccttggctagcaactcaaaaaaagacatctcatgtctggtattgggttttcgttacatggtctttggctcttggtgggattgttgtcagtatagatgagaaaagattatttaaaccatgtatgtatttatacataaaattagatttggtatcaggttgtttgtactttcatatgaatagtcaatcatgtgattctttatggcttttcagacagcattattgctttttaccctccctcctcctccgtctgtctttacttccccattaagccttttgatgaagtgttttgttcagacaagcagctcaggtgaggtatcatgattagtcccttgtatctctgtcctttgtgcctgaatggaggtatgactgtgactaccttgatgaacttgtggtggggatggctttggtgcctacaatatctgtatcaactgactccacttggacttttcatatctttttttattattattaggtattttcttcatttacatttccaatgctatcccaaaagtcccccagaccatcccccccacccacccaaccactcacacttcttggccttggtgttcccccatactgaggcatataaagttttcaagaccaaggggcctctcttcccaatgagggccgactacgccatcttctgatagatacgtatgcagctagagacacgagttcccggggtactggttagttcatattgttgttccacctatggggttgcagacccctttagctccttggatgctttctctagcttctccattgggggccctgtgatccatccaatagctgactgtgaacatccacttctgtgtttgccaggacctggaatagcctcacaagagatagctatatcagggtcctttcagcaaaatcttgctggtgtatgcaatggtgtcagcatttggaggctgattatgggatggatccctgggtatgacagtctctagatggtccatcctttcatctcagctcgaagtttgtctctgtaactccttccatgggtgtattgttcccaattctaagaaggggcaaagtgtccacactccagtcttcgttcttcttgagtttaatgtgttttgcaaattgtatcttgtatcttgggtattctaagtttcagggctaatatccacttatcagtgagtacatatcatgtgagttcttttgtgaatctgttaactcactcaggatgatgccctccaggtccatccatttgcctaggaattttataaattcattctttttaatagctgagtagtactccattgtgtaaatgtaccacattttctgtatccattcctctgttgaggggcatctgggttctttccagcttctggctattctaaataaggctgctatgaacatagtggaacatgtgtccttcataccggttggaacatcttctggatatatgcccaggagaggtattgcgggatcctccagtagtactatgtccaattttctgaggaaccgccagactgatttccagagtggttgtacaagcttgcaatcccaccaacaatggaggagtgttcctctttctccacatcctcaccagcatctgctgtcatctgaatttttgatcttagccattctgactggtgtaaggtggaatctcagagttgttttgatttgcatttccctgatgattaaggatgctgaacatttttttcaagtgcttctctgccattcggtattcctcaggtgagaattctttgtttagctctgagcccaattttttaatggggttatttgattttctggagtccaccttcttgagttctttatatatattgggtattagtcccctgatttaggattggtaaagatcctttcccaaactgttggtggcctttttgtcttattgaatgtgtcttttgccttacagaagttttgtaattttatgaggtcccatttgtcaattctcgatcttacagcacaagccattgctgttctattcaggaatttttcccctgtgcccatatcttcaaggcttttccccactttctcctctataagtttcagtgtctctggttttatgtggagttccttgatccacttagatttgaccttagtacaaggagataggaatggatcaattcgcattcttctacatgataactgccaattgtgccagcaccatttgttgaaaatgctgtctgttttcccactggatggttttagctcccttgtcaaagatcaagtgaccataggtgtgtgggttcctttctgggtcttcaattgtattccattggtctacttgtctgttgctataccaataccatgcagtttttatgacaattgctctgtagtatagctttaggtcaggcatggtgattccaccagaggttcttttatcattgagagtgtttttgctatcctaggctttttgttattccagatgaatgtgcaaattgccctctctaattcgttgaagaattgagttggaattttgatggggattgcattgaatctgtagattgcttttggcaagatagccatttttactatattgaacctgccaatccatgagcatgggagatctttccatcttctgagatcctctttagtttctttcttcagagacttgaagttcttatcatacagatctttcacttccttagttagagtcacaccaaggtattttatattatttgtgactattgagaagggtgttgtttccctaatttctttctcagcctgtttatcctttgtgtagagaaaggcctttggcttgtttgagttaattttatatccaggtatttcactgaagctgtttatccagttcaggagttttctggtggaatttttagtgtcacttatatatactatcatatcatctgcaaaaagtgatattttgacttcttccttttcaatttatatccccttgatctccttttgttgtctaattgctctggctaggacttcaagtacaatgttgaataggtagggacaaagtgggcagccttgtctagtccctgattttagtgggattgctccagcttctcaccatttactttgatgttggctactggtttgctgtagattgcttttatcatgtttaggtatgggccttgaattcctgatctttccaagacttttatcatgaatgggtgttggattttgtcaaatactttctccacatctaacgagatactcatgtggtttttgtctttgagtttgtttatataatggattacattgatggatttccgtatattaaaccatccctgcatccctggaatgaaacctactttggtcaggatggatgattgttttgatgtgttcttggatttggttagcgagaattttattgagtatttttgcatcgatattcataagggaaattggtctgaagttctctatctttgttgggtctttctgtgatttaggtatcagagtaattgtggcttcatagaatgaattgggtagagtaccttctgtttctattttatggaatagtttgtgaagagtttgtgaagaactgtaattagatcttccttgaaagtcagatagaactctgcactaaaaccatctgtcctgggctttttttggttgggagactattaatggctgcttttttttttaatattttttattacatattttcctcaattacatttcctcaattacatttccaatgctatcccaaaagtcccccatgccctcccccccacttccctacccacccattcccatttttttggccctgtactggggcatataccgtttgtgtgtccaatgggcctctctttccagtgatggccgactaggccatcttttgatacatatgcagctagactcaagagctccggggtactggttagttcataatgttgttgcacctacagggttgcagatctctttagctccttggatactttctctagctcctccatgggggccctgtgacccatccaatagctgactgtgagcatccacttctgtgtttgctaggccccggcctagtctcacaagagacagctatatctggttccttacagcaaaatcttgctagtgtatgcgatggtgtcagcgtttggaatcttattatggggtggatccctggatatggcagtctctagatggtccatcctttcgtctcagctccaaactttgtaactccttccatgggtgttttgttcccaattctaaggaggggcatagtgtccacacttcagtcttcattcttcttgagtttcatgtttttagcaaattgtatcttatatcttgggtatcctaggttttgggctattatccacttatcagtgagtacatattttgtgagttcctttgtgaatgtgttacctcactcaggatgatgccctccaggtccatccatttgcctaggaatttcataaattcattctttttaatagctgagtagtactccattgtgtaaatgtaccacattttctgaactcaagaaggtggacatcagaaaatcaaataaccccattaaaaaatggggctcagaactgaacaaagaattctcacctgaggaatactgaatggcagagatgcacctgaaaaaatgttcaacatccttaatggctgcttctatttctttaggggggatataggactgtttagatcattaatctgatcctgatttaactttggtacctggtatctgtctagaaacttgtccatttcatccaggttctccagttttgttgagtatagccttttgtagaaggatctgatggtgttttggatttcttcaggatatgttgttatgtctcccttttcatttctgattttgttaattaggatgctgtccctgtgccctctagtgagtctggctaagagtttgtctatcttgttgattttctaaaagaaccagctcctcgtttggttgattctttgaatagttcctcttgtttccacttggctgagttcacccctgagtttgattatttcttgccgtctactcctcctgggtgaatttgcttccttttgttctagagcttttaggtgtgttgtcaagctgctagtgtgtgttctctctagtttctttttggaggcactcagagctatgagttttcctcttagaaatgctttcattgtgtcccataggtttgggtacgttgtggcttcattttcattaaactctaaaaagtctttaatttctttctttattccttccttgaccaaggtatcattgagtagagtgttgttcagtttccacgtgaatattggctctttattatttatgttgttattgaagatcagccttagtccatggtgatctgataggatgcatgggacaatttcaatattttcatatctgttgaggcctgacttttcatatctctaaattgattcatcaggcagctaagaatacattctgattggtatgctttatctctgcctttatgtctgtctgtatgtactcagtgttcaatttgtaatatgctgagtcacattgcctttgggccagatgtttatattctgccctctttactagatttggtttatagaagcacagtgaaagataatatgtaccattaatatgtactatttttattttttatgtatcagttataaaaagtctgccatttaaaatacaggtataggtaagttaacccatcaccttaataaaaaaagtaaattcatacctttgatttgtttattcaaataaattatgaaatattgaagttagatggggtatttttcagggagtatatggcttagaagatgctgttatcgaaataaagaattgtaaagcccaaattaaaataagagatggagagatggaagtgttgaccaaggagatcaataagcttgagatgaagatcaatgacatccttgatgaaaacgaagcccttagagagcgggctggtaagctgttttctgagatactgctttgtcctcagtctgattttgaagtcctttttgttttctttaggttggttttacttttgtaggggaagtggtcctaatcctcaagcaaagtgcacatattctgctgaggtgttctccttcctgccctctccttcccctttagctcttaccttacatttgtttatttctttctagcagttggtggtatttttacccaaataaatgtttctgtagaagcacttaaacaaaagtggaggtactctgacagaagtgggtttggggcttgataaagaacatggctttcatcgacccagtatgccttcagtaataatcgaatggtgaaagtgcattgcgttatgctgcatgtaagaggatagctggttctctgcaataagaaacaactgtacagccgggcatggtggcgcacgcctttaatcccagcacttgggaggcagaggcaggcggatttctgagttcaaggccagcctggtctacagagtgagttccaggacagccggggctacacagagaaaccctgtcttgaaaaacccaaccaaacaacaacaacaaaaaaagaacaacaacaacaacaaaaagaactgtatgaattgttagcttacaaaatgattttttgaggccatttaaaagtcctttgtaaaccttttaaggatatataaacacattataaactgcttatattttcttgcgtattttaggagttccatttagtctaagatgtaatttccaaatataacatggggatttatgtacttttaaaattaggggtgaaatatttagtactactactttacatggggtaagttataactaaagtgtccaatctaaattgcttctttaaaatgactgatttatatagtgattcattgtgctcactggctatcaattagtgcttcctagagttaaactaacaatcgaggaaatctttgtgtagaagaaaaataaatactttatattgatcatttctgaaataatttaactagaacttaggattatactaggtggttaagctagatttctgattgacgtgactagtctagtcccagctaggaatgtagacgtatgtgtggataacttatgacctatctagactgctggcacaaacaccatgtttcttgtctgtaatgggtttagcttttaatatccaaagtctgatgcacaactatttagactgtcttggtacttgattttcaccacctagttatttatgaatcaggttctataatggaggcatataatggaggagttaggttagctgagaggtttaaatcaataacaacatgattagtaataaagattgctatttgacaagtatcactctaagcatttgatttagtctaatcatattattaaatgtcatctccatagtaagtttcaagtgagcactgagtcgtttacttaatgacagactttcttagttaatgaattgcagtacctttgcagcatccccatatgcgtttgttaggactttcataattagctaacatttagctttcttgtagtataactgtctagacatcttatacaagaaggctctatgtttcaaatgataatgaatactacttatttggtgttttgtgaagattttgtcattgttttgcaagtttttaagtttgtaattatttgctttctatttcaggccttgaacccaagacaatgattgatttgactgaatttagaaacagcaaacggttaaagcagcaacagtacagagctgagaaccaggttcttttgaaagaggcaagtgatgctcgctcagttgacgagtttcttatctgaactaaggagaactactaataactcgtgctttgcagatcgaaagtctagaggaggagcgtcttgacttgaaaagaaagattcgtcaaatggctcaagaaagaggcaaaaggaacgcagcctcaggtattctcagttacccgaacttggaaagagtcacgcggaaagcaggcgcctgcatgtggggcggtctgtgtgttgaggatggttgtgctctgttgctgtgcatgtgctctcacaaagagataactgggtataattgagtgtgaccctgaatctgagacagttaaagaatttagattggaattatggacttttgaaaaattcagtgtacactctggtccctaccttgttatgtcgaatatcttaaaacagtaatttttatattgctgtatttcatccttagaatgcttctttgttctcaaagctgtacattgggagtacttaaattaaattttattaaaatttactggaatttttcattaatcttatattaacattcatttgttcaccttccttttaaaaggacggtgtgatgtttataacagctattgcagttcactttttgaggatcatatatagacgctttcttcatatatatatatatatatatataatatttccatatgtctgtttgcctgctctatgtatgcccgtgcccgtggaagccagaaaaaagcactggatcccctggagccagaattccgtgcagttgtgagctgcatggtgtgggtgctgggaactaaacttgggtcctctgaaagagcattatacacatttaaaaattaaaatatagagagattattttctcaccctcctttacctcccatgtctcatcccaccttcatcctgtgtgtgtgtgtgtgtgtgtgtgtgtgtgtgtgtgtgtgtgtatataaataaaactactgaatccattagtgttgggcttatatgcttgctgttagggctgacacttggcattggtatactgggtagaggacttatctaaggggaagacaaattctccctctctcagcatttttcaatttcctgtaacttttcatctagtgttgaggcccagtgtcattttccctgtccatgttagtatattaactggcattttcattgttcaggtcttgtttaaacggctgtgctgttgcagtttcatgggtgtaacttctatgtcgtgtacaaaagactctatctttgctcagatgtcctggtcctctggctcctaaaatatttctgcccccttttctgccatgttatgctagcctcgggtgaaaccctagtattgggacacttgtctaccatgtatagaacctgcacaaagtcacttgccagcagcacacacaaaaaaagtaaaatgtaaatatatacagtaaaaatttatgggttttaatttatttctttatatttttaaaatgtcttactacttattaatgggtactttaaaattaatacagaataaaatgataaagatgataaaattcaaattattgccttattgatatagcttattaaaataagctagatcaaagttatattggctgcatgttggtcaaagattttaaaaatattaaaccattttttgcgttaaaactttattcttgtattaggataaaagagttattatttttgttgttgctgcttcttatttgttatttctttcgtcttgtaggattaaccattgacgacttgaacttatctgaaaccttttctcatgaaaataaaatagaaggaagaaaactaaattttatgagcctcaataatatgaatgaaacacaatcaaaggtaaataaaacagtaatgctctgacttaagaagaaggaaaaatgctagcagttgggtatttttcttcacttaacctcatttagcacatctgcccccttagcttattaaataataatttttgcttgtttaaatagtgtggtgatcagaagattgattaatgagacattatttactttgcatacagattaagagttcagctaaaacagagctgctgcataggaggccatcattcagtgttgtacagtcagatcaaagtgaggcagaggagaacatggccacacgatccttatcgagaatgctgtctggaatccatcagagtgtaggcagtgcaggggaccctattgtctccttaaccagatgctcctcatttatgcaagtgaaagacagcagtgcaactccagaagctattacaataagggagatttttaaagcaccatgcctacgatctttgagaaagctagaatcgttagtcagtaccttcagtaaggacggcagtgaagaactaagtgaatacttatgctctctctctgatgaccatatgaagagagggtcaggaaaccatcgaggtctagagaaaaccaggttcctacagaagagcagttcatcttttcaagtgtcaccagcagctgcagaattaatgcagaaactatcacataggcagagctccgcaatatttcctcaacagtcgtatgaccgtgatgtggataaagtaacgtcagaagataaccaggtctattctcaaatagagcatgccgttctcagtttgaaagacgataaaggacaaagtgaattaccctcccaaactgagatgctgagcagtaagacccaagtgaatctttcagatcttgtgcccattactgcccagtccaaaccgtctctgatacacccccttgaaaagctcatagggcagccacagcgccagctagcgttccttaggtctcaggtgagcttcctttccaaatagattcatgcaattcctgggctactactattactattactattaaccggagttctctaaaaaattctggaaagatttctttttacttacacattaacactcatgtataacaaatctatacttttaaaaaatctaaagttgcagtatatttgcattaaatttgttgactcccctaattaatacattaaatgtttctttagaacgaaaccatagttcaggacttaccgatccaagaagagcagagtagaaatgcagaattagaacttgaccatcagagaagccaggcagaacaggtagtgtaaagatcgaccattaagacaacgatatagttgacgctaaagacagaaaacccctgtatatctctgtgccctgccatggggaatgtgggtgaatgaggtggtagaatcgtggccatctctgttttgccctctggactttataactgctatgctgctctagcttgttttctggtgggctaaacttgaatcagtaaagcattgttttaacttgaaacctgcttattactgagatataacacatttttattctctttgttcagaatgagtttctttcaagagaattggctgaaaaggaaaaagatttagaaagaagtaggacagtaattgctaaattccagagtaaacgtaagtcactcttatgtctttcttatctgctccattttttaaatctttaattgcctttataatatatagctcagtctatgttacttagctttgtagtttacattgctatgtttattgttatagaatatttccagtttttatgaaaatatgtgtcacatattttatgctcaagtgaaggtaaacttataaacatttaaagatttttaataggtcaaagctatgctatatctatctgtatttacatatatattaattttcatttatatatttgcatatgtatattactaaaacaggtgtggtgtttaattcagcatttatgttgaatttatagttgaattttttatttccttgtttgtttttcattttttttccatttgaaatctgtcatgaaacaagaagtaatatgttgtagaaaagacctattcatttaacgtgaaaaaattataattacagtaaaagaattagtcgaagaaaataagcaacttgaagaaggtatgaaagaaattttgcaagctattaaggacatgccgaaggattctgatgtgaaaggaggtgaaacatctttaatcatcccgagtcttgaaagactggttaacgtaagttatgttttcacgttaatgtctgcattcagccaactcatctcctgtattggtttcattttgatgctgtgataaaatactcagttaaaaagcaacataagaaaaaggacaaattatattccaggcatagcctgttgtggcaggcaaatgcagacagctggtgccagctacagctgctcagcactgcgtccacaggctggccgactgatgctctacgtgatagatgagtgaggacgtggacatggaaggagtcaaagttatttgctcagctaataagctggctcatgagtgctgatcattttctaatctataaatatttactaaatgctatttattttaatgaagtaattactgtgtaataaatacactaaacttaaattttataaatattacttcataagaaatataaatagcatattagacattgcagtgagcatggaaagatgattagttatttaaaggcatatttttcttgactatgattttactgtttttcattgcattcataatacattatatatatatgcaaggctatggaatcaaagaatgcagaaggaatcttcgatgccagcttgcatctaaaagcccaagttgaccaacttacaggaaggaatgaagaattaaggcaagaactcaggcaatctcggaaagaggctgtaaattattcacagcagttggtaaaagcaaacttaaaggtaaaaattttattaaatataagaaaatattaaacctatgattatctttaataggaaacttcctaacaacactgctttatgaggggaagatgtcctttgtgttctttcaaccctaagaccacgtttttttaaagagactttgaaaaatgtttctagtctttgataatttcatatggtatatttgatcatatcctgcccttctcagatccttcttaagttcatatttgttgtccatcttaaagcaaaccacctacaataaacaaaggcaaaccatgggatctgattagggatggccgactaagtactgagcatggtgcttgccctgggggtgcttcatcacccagggtttctctactaaagagagcagatttttttttctctctcctggtagctaccaattagaaagctttttcactagggttgggactttgtgaccacatccttttctctgtgctggggtcttgtcaggctgctcttgtgtagatatggagtgtactctcacaaccgtctcgatgagttctgatgtgcatgtgccctgctgggtctgaaaaatgtgttgtccttggagccatctacaaccaccggtccttttgacctttctgcatactcttccacgtagatccttaggccctgtctcggctaaacatcccagcatctcaccctctgcacatcgttttttaagaagttatgtggaaaaataagttctttgcactataaaagagaaagggatagctctaaatctaattttaggcattcctaagacaaattaaggcttaatttaattgattcatgtcagtataacttgctgagttgtagttttcctaaatgcgataatcattcctggattgtttccagattgaccaccttgagaaggaaactgaccttctacgtcagtctgcaggctccaatgtagtatacaaaggcatagacttacccgatgggatagcaccatccagtgcctatatcatcaattctcagaatgaatacttaatacatcttttgcaggtaatgagaatttttatcttaatgacagttttgatagtatgtttctgaatttagtctatgaatttttttgaattctcagaataaataaatatattgttagtagatagtcagctggactaatataaataaagaagtttattccatttacgtacatgtaaaatatgttcgtgattttcattcacttgtgtgttattcatttgaaatatagaaggagacgaagaattataagcagtcaataggaagtagatgagtatttgtgtttattgctgcttagaaaagtgagagaatgaaatgctaaggtttggtggtgtttggtgctgttattagaattgtctctttttgtgtaaatcacaagaaaagcttgcaagtaaacttgacttccgtctaacctttcctgtgtaaactgttagctgatagggtactcactctattataacacttgccctgcagttgctttactgtttgctgtctatataatgggattaaaaggagctgatgaggtatttttttcagattttcatttacactttaatatctacagcatcaccaaccctattactgtacttagaaaaatctactcaaaaccaccaaaatacacttgtaattgtaagcttccctgtttcccactgctaggttatcagttggtctgatacttgagttacacttatcgtttcctggttttatatttgggcatgacattagtcttgtctttatttgaatatgtgtgctactcaagtcagataagggtaactttaacgacagagcaaaacatttctttaaaatgcatcttagaccactactctgaagtacatagaaatattaatgatttattttcatacattatagggataccatcaacaaataatggcaacctggtattgtcatgctttatctaggatttgtagtttttatttttattaaaaaaaatggggaccaacaaaatgtctcagtatgtaaaggtacctggtgccagcaagcctttaataacctgtgtctgtgttcagtcactgggaccacatggtggaaggagaggttagactccacaagtgtctgacctctaaatatgccctgtgcatgcactgcatgcaaataaatgattatggtgaaaaccaccgttttaccatagctaaagagaaagaggctaattttagtggtggcacagtagtatatgttggtaaagaatatgtgactaagtaataggagttgagtgtgtaacttgtcagtcagataaacagttgtgcttaacgtgaattgtggatctgatagtttgtgtgcttactgcagctaccatatttaaaagaataatttgcttgtcttatagacctttttatgtatattgcctcattctttttaccttataaagtgttgaaaatactgagtttgaataatcattttggaatgtgagcatgcagtttccagattcaaaacatagtctaatgctatttatattcttatttataaaccaaattttaggaactagacaataaagaaaagaaattaaaacatttagaagattcccttgaagattataacagaaagtttgcagtgattcgtcatcaacaaagtttattatataaagaatacctaaggtatttatattttgaaaactttataaatatagtttcactattgtactgacagtcacaaagaaagtattgatccttctccacataatcactgttgagaacatgtttaaacatatttcttttttttttttaaagatttatttatttattatatgtaagtacactgtagctgtcttcagacactccagaagagggcgtcagatctcattacagatggttgtgagccaccatgtggttgctgggatttgaacttcagacatttggaagagcagtcgggtgctcttaccactgagccatctcaccagccctaaacatatttctaaactggcttagtgatcgtaactctctgtatctgggactgataagagtttagtcagattccaacactcggtaggtgtgcggcattgagcaagttgctctgactttactgtctgtctttcattctgagaaactttaaagctctcataacctaaatgtatccctcttgtggttcagcactttattcggtttactttattctcttttttattctttttttctaaatcattattgtatttgttacagtgaaaaggatatttggaaaacagactctgagatgataagagaggagaagagaaaactggaagatcaagctgagcaggatgctgtgaaagtaaaagagtacaacgtaagtgtagctccgagcacccttctggccgcagggacacatgaggacagctccgttcactcagtaatgtcgctgtggttctctccagaatttgctcagtgctcttcagatggattcgaacgagatgaagaaaatgctctcagaaaacagtaggaaaatcaccgttctgcaagtgaacgagaagtccctcatccggcagtacaccaccttagtggagatggagcggcacctgagaaaggaaaacgggaaacacaggaatgacgtcatagccatggaagccgaagtcactgaaaaacttggaagtttgcaaagattcaaggtatttctgacatttctttgctcaggaactttttgggtctgatgatagtgaggatcgtgtgcatatatcaccagggctaacggttaatgtctattgacatttggtgtaattacttcatccattttttgtaggaatatttaaattgttgacatttctctcctaaatatttttagtgtacatctctacaatggaaagcttttgtttacacaactgtaataatgtcactctactgaaaacactgacagttttcccttttttctcatgtgtaggctgtattcagttttctttggttttctaggatttgatggtgaataatgcatttattgaatttgatggttacatgtcttaaatcccattactgcaacctattttgctttgttatacttttctctctgaggaatatttaattgatccattttattttgtttttatcaagtttcgctctgaggcctgtgttttgattcaatttaaatagttttagcaagaatatatcttaaacaataatcattagttcaaacgatatcctggtttggatggtgttttgtggggaattacatagttttggatgtacacattcatttgttttgtttttgtttgtttgttttccgagacagggtttctctgtgtagccctggctgtcctggaactcactctgtagaccaggctggtcttgaactcagaaatctacctgcctttgcttctcaagtgctgggattaaaggcatgcgctaccactgctcggcttataccttcatttttaagtggtaagatttcacatgatttaaaaaaaggctttttttatttttctcaataattttagcattcatggttagtgcctggtatcactaatttttacgattttcccattacgttagtgttttacatcctttaggaagcggaaaacttcttgttattacccagggcatctcgtactctggaagtgtatccccactgtaaagcaggacgagtgctttgatctctccttctcaccgccagttatagaaggcaggtgtgtgcacgtgtacaggtgtaggcaggtgtgtgcacgtgtacaggtgtaggcaggtgtgtgcacgtgtacaggtgtaggcaagtgtgtgcacgtgtacaggtataggcaggtgtgtgcacgtgtacaggtataggcaggtgtgtgcacgtgtacaggtgtaggcaagtgtgtgcacgtgtacaggtataggcaggtgtgtgcacgtgtacaggtgtaggcaggtgtgtgcacgtgtgtacaggtgtaggcaggtgtgtgcacgtgtacaggtgtaggcaagtgtgtgcacgtgtgtacaggtataggcaggtgtgtgcacgtgtacaggtgtaggcaagtgtgtgcacgtgtgtacaggtataggcaggtgtgtgcacgtgtacaggtgtaggcaagtgtgtgcacgtgtgtacaggtataggcaagtgtgtgcacgtgtacaggtgtaggcaagtgtgtgcacatgtgtacaggtgtaggcaggtgtgtgcacgtgtacagatataggcaagtgtgtgcacgtgtgtacaggtgtaggcaagtgtgtgcacgtgcacaggtataggcaagtgtgtgcacgtgtacaggtgtaggcaggtgtgtgcacatgtgtacaggtgtagccaggtgtgtgtacaggtgtaggcaggtgtgtgtacaggtttagccaggtttgtgtagaggtatgttcacatgtgcacaggtgtaggcaggtgtgtgtacaggtgtaggcaggcgtgtgtacatgtgtataggtgtagccaggtttgtgtagaggtgtaggcaggtatgttcacatgtgcacaggtgtaggcaggtgtgtgtacaggtgtaggcagttgtgtgtacaggtataggcagtgtgtgtacaggtgtaggcagttgtgagtacaggtgtaggcaggtgtgttcacatgtgcacaggtgtgggcaggtatatgcacatgtgtgtgctctggttctgaggtaatttctttgtttccccataaagttcttctgtggctatcatgagagcgtcacagacttttaaacagtaggcacatcttactcaattgttaattctcattacaggcttttgataatggatgttagttattttagcaaggacccattgtttttttgtgttttgggttttttgtttgtttgtttgtttttttcgagacagggtttctctgtatagctctggctgtcctggaactcactttgtagtccaggctggcctcgaactaagaaatcctcctgcctctgcctcccaagtgctgggattaaaggtgtgcgccaccacacccggctcattgttttttaaaacctagcttgatgtgttttctggcataataatgttttctagacctaacatacatactacttctgctcggttataaagtaatctaattccttaaggagccctatttctttgtagagatgaaaatatttccatgcccagaacttattacaccatgtctgtcattgctttgagaatattattgctgcttctctctttccttggacaacatgtaatgtatatctttagaatgtgaattcatatttaactttgtagttttatgttcttcactattttacatacagctgagagattaaagtatttatatcatatattaatttaaaataataacagctgtaatacttcttaatatatcctaaaaccgctttaaagttcttatgttccttggaatctatctcctgaacatacattggcaaaaataacatattctagtaatttgaaatgatactttttgctttcaatattaggattttttttttgagctgaaatgaactatataaaacatttgtattttcaaaagattcagtgtgaagtgtctagctgctgcccctgccctgctaccctgataacagaatatcctccaggtagctcttctgcaacagaagcagtcacgtgcatctggactgtcacgtgagagctggctctctcagatgaggaagttttgagacttacaaatgttcttgtttttattattgtggcttttaaaacatattggacttttctgaagttttgccagtacagagagtatgaaatatacgagctggaggtttctgccatcctccttctttcttgtttcttcaaccacagtttttagggttcgtgatttttttcttttttatagaaaataagaaaagaggatattttaacggaaacaagacataattcatgtcttttaaccagccttcactgcaaaatgaaaccagatgcctctaaggtagaatagtatatgctcatttacatgaggggaagctgtttgaattagacagaaagttcactacactcaggagtgaattagaactataagagcctcatctccccttcagtggtttggttctttgttgctcccatgatctcactgtactttcttatcatggagcatttcactgggaagaactggaaagagtcccggctccttgttggtgttcatcaaaccacctcctgccattcatgaatgccttttcagagctatcggagaatattgcgttaccctcttcccaggactctaccgaatacctcagattattaaacttagaaacagaaaaaggttgttttggttcagctacttgaaggtttgggactatgacctcattacctttggactgtggtaactcgtatacatcatagtaagagggcgggtaatagggaccttgtcacttcatagccaattataatgaaaagaaaaagagggcaccaagacaaaggtcccacggtcctctttgaaagcacaactaaagtgatcttagagttcacaccagcaccagtcttagctggtgccacttccggattgcaccgtgccggagaagactgtagcatgtgtctttgggggaatgttctatattaaactatagcaaacatgaaataagtcaattaaatccttattgttactatttaggtattttaatcagtcgataacaagaaccaaaccttgcgtttgtgtcacttgaagaaagcagacatagacagcatacattaattctgtcacttaaactgccagatgcttagtggattttaatcttctatgacttagagaaggtatccaaagatatcttctgcttactatactttctcaaattcattgtacttcctttttctctgataacttgtaaaaggactcacttaaatccttaattaaaactttccaaataattgttttctacgagaaagaataacaggaaatattacacatttttcaaatggctttcaactattttgctttcaattgaattttctttttaaaaagtgactaaggctttgccagaaaaaaatatgcaaagttaacttggtatatcctttttttttttttttttttttatttttcaggaaatggccatcttcaagattgcagctcttcagaaggttatagataatagtgtttctttgtctgaattagaactagccaataaacagtacaatgagctgactactaagtacagggacatcttgcagaaagataatatgcttgttcaaagaacaagtaacttagaacacctggaggtgagtgtctatgacctttaaaccttgttattccagtcatttactttagggcatcctggggtctgtaagaattttgctgatttcaaatgattaaaattggttcttatttatctaataatgctggaggtatgataatagttataatctatctaattgtggtttgtcctggatatcaatgcatataccaacatgtgacatactatgtatttataattgcaaatgacttgatggtgactttatctaggtcatcctcttatggctcttgtatgatttagctaagccaaacttctttcacagcacagctaggatatggtaattaaagagggaaatgctattctgtatccatttctttcttttctgaccctttcagagtccctagattctatttctttttttttttttttaagatttattcatatttattcatttattttatgtagctgtcttcagacacaccagaagagggcatcagatcccattacagatggttgtgagccaacatgtgggtgctgggaattgaactcaggacctttggaagaacagtcagtgctcttaaccgctgagccatctctcccgcccctagattctatttcttatgatggatttatttgactgtggatgcattattagtggcattgcctagatattggatgagctttccagttttccatcctttcatgttatagaaatactaaaaatcagggcggggatgaaggagatgtatataaaaatatttacctgacaagtcatttggatcttggaatgcatatgtctttgtttcttttttttgtttgtttccatactaaatcacttcataacaacttaaaaaaggatctcacagatcatgatagtgtgtatcatggtagaattcaacatatcagaatctcaaagtgctggtcacgttgtatacacattcaagacgcagaccaattaatattttctattgctcagcttgctttctccattttatatagtcatttccactaataaggacatgaatcctgtccccacagtcaagatgggttttcctatattaattaatggagccaattattatggacccataatactgttggtcctatagcaagaagggagtcggcgaaaggaaaactgccttgcctagaagcctgtggtcagctagtctgcaatatgtagcagaggatgaaacgataaaaatactgcttatttcaaaatgaatactaagaacagacttccaaaagttgttcttagacctctgcatatatgttaagtcacaggtgtgcctaccctcaaacacatgtctcacgcagcttagacattctgtcatgactcttaacctttgtatccttggtgttccgtgtggatgtggatgtgtgtttgtatgcatgtggcacattgccttgtgcagatgaatatgcacatatgtgcatgtgaagacctgcagttggtgttggatatcttcctcgattactcctcactttttattagtgaataaaatacctattttattcttgctgtggcttctgggtgtcagaactcggtcagcatgctacagatagcttatctttgttctgcagtgtctgttaggttaggaagaatcgaaggactcagaatgacagttaggtcagtggaaactgatcagaatgtagtgtatgaaaaataattttcagtaaaatattccattgaaaaatgataatgggagtggcaggggtactggggtcaatgtgaaaatgctcactcacatacatggcccccagccagggctcagagaagggttcattttcaggtgggcttgtctcctagagtatgtgcctgtgagtggagctcacagtctggtactcttagtgtacttcaatgtctcaagctattgtctaaataggaagatagaaattctgttgctttctataactttggaagagggacatctcattctttactattgtctgttgctcaacaaggcttccaaaatttacttaaagacgacatagttcagtgcccatccctcagtattagagattttaagagatttgtgacccctttaagattgtaagttttttttttttttaaatagtcaattaatttatttctggcctgcttgacagctacttcaaacctcagtatttcaaggctattctctctactacagaagcccatcaccagttatagaaactgttagagactagtgtggatacatacaccttcaatcccatctcttgagagttaggaacaattagatcatgagtccattgctagcctagactgtatacgaatgaggccactgtcagttagactgcctcaaacaaccaaacaaaagtatgagtgagcatcacaagaagtgggaatctgttagtgttttctttgacttttatactttcttcaatttatttataattttaacattataatcacatcttttatggcctatctttaatggtattgtctataccttgttcattgcagtggtttctcatactgctatctccagacttaaatctcctttaatttactgccactaaatgattgtcataaacactatcatcatgtcactcacttcatatttaggcttcaattgaatggcaaaagatcacattatttctctatttaccttaggttatttcttggtcttagaaatttcacaaactgtcttagacactgagctcctacttgcctgcatcgtggtttttttcttacatgcattttgtacatctgttttgtaaccaggttttctctcttttcgttatcttagtaatttttatttgtagttcaaagctgttttactgctgtttccccctcccgccatccccctcgcctgtactgaaagcaattttgttttcttctttatggttgctacctatagcaatacaaaattctactatttatgttacatcatgactatgtatttacatgtctgcctcctttagtgaaatgtaaacctcttatgaggaaatgtttaaggcatttccatgtgagtttaaaaccatggaattactgctaatttattctgaaaggagttttgagggatagaattgagagagaatatgaatatagggccatggttatagtgatcaggaaaatgttgataccgtttaagagtaaagtgtcatgagaatgtagactataaaaatcagatttcaaaatataaagaaatagtagaagaaaagaataagaaacactggacagataatgtggaaggcagatgggaaactggaaaatgtgataggtgaggagaaacagatataaattgtgataaaatgaacaaaaggatttgtttttatctttttattatttaagcactaagatactattgaaattggggaaaattaaagggtagtaaagagagacagaaaagaaaatggctctgacatctggcataaggactaaagacctagggtacagggaggataggatatgagcaataccatgtgaagtgaaggtaaaaagggaaattgagtagtatggtatttatttttattttaaaaaaaatcacaatgtcttttcatcatagttttgcttcccacctccaatcacatcttactcacttttctccccactcgactttatgttcttttgctttctttaaaaaaacaaaaccaaaccaaacaggaaaaataacaaccttccatccaaaaggaagaagaaaatcaatagtcaaacaaaacagcaaaggactgaaaattagtgagacagaaaggacacacacacacacacacaccccaaaatgaaaaaaaaaaaaaaccctcaatatatttaaaagaccctcaggcctctgtttctgtttattttatattcattgtatataaaacttggcgtaattttattccttaacaaaacaatcatattttatttatttttatcttgtatatttcattatatataaatatatataaatttctgcatgcttacccggatcagaaattgcctcctaggtagtggttgaactcacaatggatggtgtaatccatattaatagttagttaaaacaatcccccatacaggtgcacacaggccaacctactattggtaatacttcattgagactcacattccctaaattccaaaatctgaagtgctaggctcttaatattgcttgttgttgaagaggtcttctaatacacagcctttccctaattgatccttgttttccttatctgttctttccagctcttgtcttgctttagagcagaggttctcaaccttctctgtggtgatccccaactataaagttatttccattgctacttcataactggaatattgctagtgttatgaattattatgtaaatatctgctttctggtggttgttatgtgacccctgtgaaagattacttcagtcaccttaggaatcgcaacccacaggttgagaaacactgctttagagcagttgagtttgctgaacattgtctcttttcatggttcattgattgtcaagatgggtttcttctcatacttttggtgttagtataaattctgctcttacatagatatgcctgcttcctcccctcttgttctgaaccatgtatatttgcttcctaggtctagaagcttttgatgcagtttttaatttaccttcttattgtccatcatttgttgtaccttccccgaattcctatcacacacacacacacacacacacacacacacacacacacacacacaccacaaatggagaagcctgtgaactatgggcttttggcttatttctttttattgttaacatctagcacctgcctcagatgatgtgctagggatgtgcatctaagtgcttgtgtgaatgaggcatgaggctctagttcatgaaagttgggaaaaccctcactcgtccttattagttaagatgggtaggtacattcagtggtaaaaatgaatgcttggcgatctagagacaggtgtattctctctctctctctctctctctctctctctctctctctctctctccctctctctctctctctctcatgtttgtatgatgtgtgagaaattataatttgtaaaaatttctagatctagctaatttcactttgtgatttttttattctcatctttttataatgaggcttatttagaataaaatgtagattgtgagttttaaggctgctgcataaagtcaaggcaaagcagctctcatcatcattgctcatctgtggtgtctgtccgctacgcagtgtgagaatgcatcgctaaaagaacagatggaggctatcagtaaagagctggagattacaaaggaaaaactccataccattgaacaggcctgggaacaagaaacgaagttaggtgagtcttattaccctgggaatactaactgataaatatcttacagtgctttttttagtttttttgttttgtttttttactgaaaaattctttttttttgtagcagaatacatagatgtagtgttaaaatcatatgttataaatctatgattcaacactagctgtttctatttttttcattaatttatttattcactttctatcctaattacagcaaccctccctactcttcttccagtcccaccctcacaaatccctcccccattgcctcctccccttcccctcagagaggggaagccccacttgggtaccactctgccctgtgacctcaagtcacagcaggactaagagcatcctctccccttgaggccagaccaggcagtccagcttggggaaggggctccagtgacaggcaactgagtcagagaaagacccaggtccaattgttacaggacccacatgaagacctgttttaattatcattacagtaaaaactaatgataattttgaaacacatgtttttctgactacaaagtttatgtgttgtatactatctgataccttttaccttgaaatatcaaagaaaatttgaggatttatattgcttatatttgcagcagtatatcatcataactctcttatgtatgtttttatttttatgtattttaaataataaacattacttgttacatactataccaatttatcagaaattccaagtatttccatattttaaccatttttcttacagaaatttatgcagtatcatattgtttgagtgattataattaaagcattatttttttacttttgccattatttataatgctacagatatctccatttatacctgacttgccatattattgaatataaaattgtaatatgatattgtttgatattgcatgcttataatacccaaaataatgctcatgatttgagattgtcttgtagattttcttaatcatatcacttaagattttactgttgactttggtgtttggtaactttaaaactgttgcacctatatgtctaaagtcacactgatgtcctgtattgtcccagtgcaattaatattacttccataacaagtgttcatttactgcttgttacaatcctctaacctctgacagctctacattgaccatcacatgattatttcagtaacattacagtttttattgtcatttgataaatggagatgtttattctagaaagaatacacagagaagcatcagagaggtagggataaataaataaaatacagtaatgtcttaattcagaaagttcatagaactgtgctacttttttacacctctcctgaattatcttttgtttgttgtattgttgcacataggaaatgactcaaacatggataaggctaagaaatcaatgacaaacagtgacattgtttctatttcaaagaaaatcactgtgttggagatgaaggaattaaatgaaaggcagagggctgaacactgtcagaaaatgtatgagcacttaaggacttcattaaagcaaatggaagaacgtaattttgaattggaaaccaagttcactgaggtttgatacaatttttatcctgtaattagacattcggtagtagacactggattatttctaaaaacgctgtctctaagctagtgcacacatacagcattttcattttatgtatggatttatagactattcttttaaaatctcaattgctgtacatcaaagcacttgtttccgtagacagattctttcttgctaatggtatggtgttgtttttagtgagtagaagaatgttgtctctttaaacctcatctctttgtttaaaaaatattcattctcttctgtactccagaacctgtttgggagctgagactatagtaagaggcaaaatatttaacaattttctgttttccaagtctttaatatcaggtaattaaagacacttaatgtggtctgaattaagcagtctgcagatactcaaccacctatgattgagtcacactttgcagatgctaaggttgacatagggttcaaagcataagtatcatttttttcttttaagacatttaatgttaataaaaacttaataaataatttcataaaacttaaaaaaatttgttaagtcgcttggatttatttgtaagtactttgcttatattcaaaaattaagcagtgattgcctgacataaataatttatgatagaattagactattattacatcttttttatagtttgttcttacttctttatacctgtttctggagtaagggaaagaaaagaagcctttagtactctagagaccagaagttacgtgtccagactcgagctggagttcactggctttagttgacgcaggtcctggctgttctcagcatcaggtaaaatagagtaaatagaataacactcctggggatattttgttgttgttgcttttcccatagcttactaaaatcaacctggatgcacaaaaggtggagcagatgttgagagacgaattagctgatagtgtgaccaaggcagtaagtgatgctgaccgacagcggattctagaactagagaagagtgaagtggagctcaaagttgaagtgtccaagtaagtgcttgaaaacaaatttcatcatttgatgagtctatttgatttgtctttaagttcagtttcaaatatatggagcagttgctatactcattttttttaaagaagaggatttatattctttatggttattttttaaccagatgacatacattgaagaggaaataacattacacagtttgcttttgttttccctgagtgtagagctgtgcctgtagaaggcactaaaactgagacagaaacttactcctagtgcctgttttgggggaaggagagatagaagagtcagttagtatttagtttattcactttaacaagaaagaaattttacctttttataaggttgatgtagacatataattcacatgtagatttaatttaatttccttaggagctagctatgtgataggcattgtgtaagacatcagacatattaactcatgaactcttgcttaggtaaactgttttttcatttggcagtggaaaatactcccagttactttagaacactaaatatatgtgctaggtagatattctccactcacttttctggtcaggtgctgctttagtgggtgatcataaggagctttgagttaatgtgtcaagcacaaataactagtgtatttgtgtatgtgtgtgtgtgtgtgtgtgtgtgtgtgtgtgtgtgtgtgtgcgtgtgtatgtgtgtgtgtgtatgtgtgcgtgtgtatgtgtgtgtgtgtgtgtgtatgtgtgtgtgtgtgtatgtgtgcgtgtgtatgtgtgtgtgtgtatgtgtgcgtgtgtatgtgtgtgtgtatgtgtgtgtgtatgtgtgtgtgttcataaaatgacagccacccctttacagccttgggaaaccagtcgtctttaatcttcacactatgattgacttgtttctttcttcgcataaaccttaccttataagaagactaatttataattattcatcttattatattttttattaaccactaaactacagaggccttcagaccaatatgaggaaacctgatgcatatgtcccacttagctcaaattgttctgcttcaaacaaaaagactttttttattgagctttgtaatcacagaaatcataagaaaaatttgtataaatgcccaatgtgtgtgtgtgcatgtgtgtgtgtgtttcagctaatgaataagttttagtaaatgaatcatgttttctgtatgtaacatgactttcaaatataatataaaggtctgtgtatgaagcacttaacttccatattgaaaaagttaaaatgggaactttacatcgactcctaagtgcaatggcaatggttaacttatctctgttatcctgccatttccttgtttttaaattaaatttatttatttattccctttacaattcaatatcagcccttctcctcccagtataccctcacaaaagtccttcacccaagctcccttactcttttcttttgagaagtagacccccccccaccttggggtgccagtcccccacccccttaacctccctctgatccccacacatcaagtcactgtgagaatatgcacttccttcctactgaggtctgtcaaggctatccacttaggggcgcaagatccaaagacaggcaggcaggcaacaggctcacagacaaccctgttccagttgtttgggaaacccaattggagaccaagctgctggtctgctacatatgtacagggggattaggtccatcccctgctcactctttggttggtgattcaaaccctgtgagcccccaaaggtccaggttagttagactctgttggtcttcctgcggagttcctgtcctctttggatctctcaatctttttttcaactcttccatgagattcattaagctccatctaatgtttggcagtgagtctctttccattgactgttgggtggagcctctcagaggactgttaagctaggttactgtcttcaagcataagagagtatcattactactgtcagggactagttcttgctcatgggattggtatcaagtttggccagacattccctcactctcctccatctttgcccctgcacatcttgtaggtaggacacattttcagtctaaggctttatggacgggttggtgttcttatccttacactgggagttctgcctggctacaggaagtggacacttcaggacccatatctgccattgctaggaatctcatagagtgaccctcttagaccctctccttgttcccggtctttggcacctcctagagattgccccccaacccccagctgatctctcttctatctccactgctcttctacctatgtgatctaccccaccactccctaccatcccctcttccacccagatccctccttccatccatctctgatatctattttgttttcctttctgagaaagattcaaacatcctcacttgtgttctacttgttattagacttgtttgggtctgtttattctagcatgattatcttgtacttaatggctagtatctacttataaatgagtacattccatacatgtccttttggctctgagttactcactcaggatattttctagttccatccatttgcctgtgaaattcatgatgtctttatttttaatggttgagtagtattccttgtgtagatataccatattttctgaatccattccattgatagacatctaggttctttacggtttctggctattatgaataaagctgctgtgagcatcgatgagcaagtgtccttgtggtacagtagagcaccttttgggaatatgcccagcggtagtatatctgggttttgagctggaagtattcagtcttctgagaaaccaccaaattgatctccagactagttgttcgagtttgcattctcaccagcaatggaggagtgtttccttgctccacatcctctccagaatatgctgtcctttgaatttttgttcttagccattctgattggtgtaaggtggaatttcagcagtcattttgacttgcgtttctctgatgactaaggactttatatgctttcagctattcgagattcctctgttgagaattatgttccttgtacatactttttaatgggttatttaggttgttggagtcttaacttcttgagttctttatatattttggttatcagtcccctgttggaattagggttagtgaagaacttttcccagtttgcaggctgcccttttatcctgatgatggtgtcctttgatttacataagctttttacttttatgtggttctttgtattaattcttgaccttagtgcctgagacattggtgttctgttcaagaagttacctcctgtactggttaaatgtgtctgattttatgttgaggtcttttgatccatttggacttgagttttgtgcagggttatgaatatggatctattttcattcttttatatgcaaatatccagttacatttgttgaagatgctctcccttttccattgaatggttttggcttctttgtcaaaaatcaaatgtctataggtatataggtttatatctgggtcttcgatttgattccattagtacatttgtctgtctctataacaatatcgtgcagtttttatcactattgctcggtagtataattttagtcagtgatggtgataccaccagacgttcttttactgttcaggattgtttggctgttgtgagttttctgtttttccatatgaagttgagaattgttctttccatgtctgtgaagaattttgtgttggaattttgatgggcattgcattgaatctgtagattgtttttggtaggatggccattttcactatgattatcctactgactcatgaccaaggaaaatcattccatcttctgatatcttcctcaatttcttttttcagggacttgaagttcttgtcatacaggtctttcactcgcttggttaggtttttttttgtttgtttgtttgtttttgttttgtttttgtttttttatgttatctgtgactattctaaagagtgttgtttccccaacttttttttcagtctgattatcacttgtgtagaagatggctactgatttctttgaggtaattttgtatctagcaactttgcttaaagtgtttatcagctgtaggaattctctagtagatttatagggtcacttacatatactatcataccatctgcaaatagcaattctttgatttcatccatttcagtttgtattcagttgattccttttgttgtcttactgctctagacagggcttcaagtactatattgaagagatctgaggagagagtggacagctttggcttgtccctgattttagtggaaatgctttagtttccatttaatttaatgttggctattggcttgctatattgtgtttagctatgcactttgtatcctttttgtctccaagacttttagcttgaaggggtgttgtattgttgtcaaatgcctttttggcatctagtgagatgatcatgtttgtttgttttaaagttggtggattaccttgatgggcttttgtgtattgaaccaacaccgcatccctgggaggaagcttgcttgatcatagtgaatggtgtcttagacgtgttcttggattcagtttgcaagtattttattgagtatttttttgtgtcagtatttggaagggaaattggtctgaaattttctttgttaagactatagcctcatcaaatgagtttggcagtgtttccattagctcttctatgaaagtctggtagaatcctgcactaaactctctggcccagggcttttttttttttttttttttctgttgggaaacatttaataacagcttctatttccttaggtgttataggactattcaaatagtttacctgatcttgatttagttttgctaattggcctctctagaaaaatcaactgtttgaagtagattttcgagtgttgtggagtacaggcttttgaagtaagacctagtgatttcttgaatgtcctcagtgtccattgttatgtctccctcttcatttctgattttgttaatttggatactgtctctctgcctttgagttttgctaagggttcgtctatcttgttgattttctgaaataacaacctctggtttcattgattatttgtattattctcagggaggtaggtttctcttgtgttcccagagggctcctctggaccaaggagcaatgccagagctaggcaatggacctaccatcttctaaataaaataaaaagtatcttaggaaaaatgtgtgggaggaagtgttctctgacatcctacgtttatagaatgtcatatattaagtgaaattgggatcatgacatatgtcattatctttcaaaatgtatatattatgctatactacaggttaaagactttccagagtagaagatgtttttgatcacatataaaattaggtttcatgaaatagttcaagagacctttgaactctttaagtttgatacaatgaagagactcaaaaactaaattgcttttctagatgggtatctcaaaattggtgcttttggtatttactgaattgttgcttaaatatgttatcactttctaggctgagagagatttcagatattgccaaaagacaagttgattttttgaattcgcaacaacagtccagggaaaaggaagtggaatccctcagaacgcagctgctggacttccaggtgcatatggtgttagctctgctgtttagtctgttgcttgctaatctcacctgagatattgctgtttgagggtagtgctatccagacattagtgtagcagtaaaacggtgttcctgttggttgggactttagagaacatctttcatttgaaatacctatagatgcatttcaaggctgctggtcggttaacacactgaggaggagtaattagtgaatctttaacacactaaggaggagtaattaatgaatctttactgactattttctcttgtatgtatatgtagtttttcatatattccatgtactgtagtttttagaggattaaaaggtgttcattgtatatagcagaattgtgttgttaatgttatctgtgaattataaggcaaaattagaaatttaagtatgcttcatttgtttgtttttaaatctcatgtgccagtgttttaaaatttatttactgaattatgactttgaacccatgacgtatttgttggtaaatatgtattttttactgctaggcacaatctgacgaaaaggctctaattgccaaattgcaccaacatgttgtctctcttcaaattagtgaggccactgccctcggtaagttagagtcagttacgtccaaactccagaagatggaagcctacaatttgcgcttagaacagaaactggatgaaaaagagcaggcgctctactatgctcgtttggaaggtagaaacagagcaaaacacctgcgccaaaccattcagtcgcttcgaagacagttcagtggagctctacccttagcacagcaggaaaagttctccaaaacgatgattcagttgcaaaatgacaaacttaagataatgcaagaaatgaagaattcgcaacaggaacacagaaatatggaaaacaaaacactggagttggaattaaaattaaaaggcttagaagaattgatcagtactttaaaggatgccaggggagcccagaaggtaaaacttgatctgaaatgtagtagtattcagtgttatactgtaatatagctcttagtctgtagctgtgtaaatatgcttaatatgcatctaacatactcattgggtagcttagattttctaaattgggaatttaggagttcataagcaaagatctttaggaaaattactctttgtgtataaaaacagaattttaaatattctagaaaagtccaaagatatattaagtataataattttaaatgacttatagtcatcagttgattgctactttgcacaaatatttcctgtttgaattgtttgtttttctgtgttttcacttttagatatttcttgtgtatactgtgagttttcatagagctccattgtactttttaaagattagcctttacttccatttgggaagagttgaatggtaaataactgtcttgcagttaagtcctattccctgtgctagaaataattacaatttccttttttaaaaaaatatttcttgggtggatttctaaaaatgaactctttgatatacatacacacgcagacacacacgcacacacgcatgcatataatgagttgtggccactctcacctctctgttttctcctcctttcccacccggcaccatatcctcccataaatcctgacccatgtttcatatgtttctgttgtcattctgtgacccactgagcttcctcagcaccattgacgtggtcatgggtatgatgctgtccactggagcatggaaaagtgaccagtgacgccatcattgtagaaaaggctaggatttctgtgtttaatctgtagcaatgtgtcaataacatgactgcagtcagcacttaataaacaagtgacagtgaatgagaaattgatagcaaatgttactaggctattcatttcgaaataatttgaagaatgttttgttctaatagtctacatactttagaatattctatggaaattctaaatagctttgccattaatttcgattaaaatcataatcagtaatgtagcatttatgtttatatataatttaggtaatcaattggcatgtgaaaatagaagaacttcgcctccaagaacttaagctaaatagagaactagtcaagggtaaagaagaaatcaaatatttgaataatatcatctctgaatatgagcatacaatcaacagtctagaggaagaaattgttcagcaaagcaaggtttcattttctatttatttctgttctttctaaagctttcacgctcagatcactgtattttaactatgttgttgtgactagataattaagtatagttcccattataatgagtaacaaaataacctgtttcttgctttttaaattcccaaacatgcaaatttacttagttgtaacagaaacttacttggtaagttagtttttattttgatattggttattttatttcttcagtctagttcctcctggatgtcagtgctgatttagaacacagcatagggtagagaaagatgcttaagtgacagatagtgctcataagcacactcagcacacagactattctattccccactcagatctctctctctctctctctctctctctctctctctctctctctctctctctctctctctctctccctctctctctctctctctttctttctcatttgagatactttatgttttgttcccattaagatttcttatatagggagcatttgctttcattttctaaagagtgtttgccatcctctgatgtgctatgtatttgtttgttatttcctgtttccctcttcctgggatataatttccttggagacaggaattaagttttgtttattgctatgcttgccctgctccatatagtgcttgagaaatgtgtgtcatgtatgtggttagaatggatgaatgaataggtacatgacggctgaaattctgcctctgggttcttaggcaagttgcttgaccattgagtttgcttgtttttcccataaaataagagtgatagctgaggataaaataagctacaggtaaaatgagaaaatgtttatacgcatgctatatgctcattgtcactggatatacctaacaaaaacaagtgtcattttttagttccatgaagaaagacagatggcttgggatcaaagagaagttgagctggaacgccagttagacatttttgatcatcagcaaaatgaaatactcagtgcagcacaaaaggtatcaataactaattatatttgctgctttgtaccatggcttaaagcattactaactaacagatagtctctgaattcaatatattttgaactttaggatgtatgctttatgtgaattgtcatgagtttctttgtttaaagataagtgaaatttagtttactaatttttatacagttaaaagaagatttaatattgttttctccatattacagtacaatttttaaagcatattatttctccatagtttgaagactctacaggatcaatgccagaccccagcttgcctcttccaaaccaacttgaaattgctctaagaaaaattaaggagaatattcaagtaattcttaaaacacaagcaacttgcaagtcactagaagaggtaattggaataatttgcattttgattagtatattactgggaatgtttttagaatttttaaaatatttatttacgttaattaattaaagtggcagagttttgctaattcctctctttattcttatatactatttctaatggctgataatagtccatgtagttaatttgaatttataattcatttgtttacttcattctactttgagacatactaaataggtaataaaagttatttaattgaagctttataaacaatatattgccttttgttaactactattttcattgttacttatttttgtcacttattttacattatatgttatatatctttgctcattttctttgtgagtaaaaaaagttgaagcaaatgaaattatttaatctatgaactgaatttcattaattgttggcaaatcagctcattaaattattcataaagtaatataaactgaatatcacttaaatttttagtttccacctaaacatattaattacaagtacatttacaaagaatttatcatatacaattttggctttttgatcagttcaggaaaactaatttaaaatttttggtttatatgagctaccactaaatcatgtgttttaaaatatccgtcttaatcttactgaagatgaaacttctctgctttggcttggtaaacttccaatctcaacacaatgattcactggcctgtgcccctgaaatcccaactgtgtctccagtgctctgccttagtgctctgtgacatcagaggggtgatgggactgcactttctttccaattctaccaccaccactcattgttagttctaaactgcaggatataagtaaagttaattaaattttgtgtctaacctaacaaagttttgacaagtgataatcttatgagcaacttagaatacatgcaaataaatgtgtcacataataatgttaataaatagaattttattgtcaactggctattataaataagtgtgaaacagctgttttgcttgtaagcagtcttaagtaaaatttatatgaagcattttaaaggacaaacggtgctgaaataatttattgtgtctttgctgtagaaactaaaagaaaaagaatctgctttacggttggcagagcaaaatattctgtcaagagacaaagtaatcaatgaactgaggcttcgattgcctgccacggctgatcgagaaaaacttatagctgagctagaaagaaaagagctggagccgaaatctcatcacacaatgaaaattgcccaccaaactattgccaacatgcaggcaaggttaaatcacaaggaagaagtattgaagaaataccagcaccttctggagaaggccagagaggtattttgtcacgctgctttccgtcctgagtttttctgtcaggggcagaagttattttctcttaaagtggtagttcatttttgctctcacatgattctatataggaattgctgcttttatatgattggattacagatctgtcagtcaaactggcagcttgtgtttgtgtgtctccccattcgactgaggtaaacaggagcagctctcatgcagaagctgggtggttaggaaagatcaggtgaacgttgagtaaaccgtgaaacaataaggtaagtggtgctgccacaggagtgactaatgggaatgtacttttctagagcaacaggagagatatttagtattttaaaatctttctcaaaacaaattaaaggtaatggatacatgttactctattactaagaataaattgtaatgaaaggctccagtggccaaaatgagcacatgccagcagaaatatataatggtctaatatacatatgcatgcagagattatctcttctgtttcaaggttttagaaatttaaagatcttctaagatcttttagaatgtgaatgtatttcagtcataatttatggtacaacttcaactgtctatgaacaggagcaaagagaaattgttaagaagcatgaggaagaccttcatgttcttcatcacaaattagaacaacaggccgataattcactcaataaattcagacagacagctcaggtaagattctgagaactttgtgttcttctttattgagatttcatatcacacaatttaaaatcctttcctcttatgtctcacagtagaacatacctcacccttttcttgccaaaatcatctccagaaaagcagctctgatcatgaaaacaggatcattttccttttcttttcaattcattttacttgtaattcattttttttacactccatattccattccctgcccctccccatccatcctcttactgctccatatcccacacctcctccccaccccaccccatcttcatgtggatgccccacacccccactccacctgacctctaaactccctggggctccagtctcttgatggttaggtgcttcatctctgaatgaacacaggcccagcagtcctctaatgtatgtgtgttgggggcctcatatcagctggtgtgtgctgtctgtttgccgccttttgatcattatgttcttactgtgcaaagtggcccttctcgtaacccacagcattaggctcctcgggcctcactcgttagttcatgctcataaccgtgcattgcacttagacactgactaaagataatagtctatacctcgtcttccctagttcgtcttttcctcttcaatttcagactttattgactcataaagaaaattgtaggatgagtcatagtctcaaattgactttcccagtactaatatgtttgtatctcataggatttacttaagcagtctcctgctccagttcccaccaacaaacatttcattcgtctggccgagatggagcagacagtagcagaacaagatgactctctgtcctcacttttgaccaaactaaagaaagtatcaaaagatttggaaaaacaaaaagaaatcactgagttaaaagtcagagagtttgaaaataccaaactacggtaacttttacaaatctttttaaaataagcatatggaagttatgctatgataaagcttgtacctgctgtgtgagctccctcctaaagccttgatgtgcattgtcccattgtgtcctcaggaacacccgggactcactgctttataaaagtaaggccctaggaaggctccagagcgtgacagagtggacgtggggagaaagaatcacactgtgaaactagtcactcttcctcaaaagccaatttcttttcttcttagaatcttatttttaactatttccactgtcctctttatcctttttaaatgaaaatggcagtgtttacttgggctccttcagagtggttaagtgaagtccccatggtacaaaaataactttaaggggctagagagatggttcaacggttaagagcattgactgctcttccaggttcagcctgagttcaattcccagcaaccacatggtggctcacaaccatctgtaatgggatctgatgctctcttctggtgtctctaaagacagctacagtgtacttatcatatagacagatagatagatagatagatagatagatagatagatagatagatagatagatagatagatagatagatatagatataaacaaataaaatctttaaaaaaaaagtaacttgaaaattgtaaattcacatagaagtagcttttcctcaaacgtctgagatagtctgtgattacaaccaggctgagtaaatgttaaagtatttgcttttagggaactgtaataacagagtattcacattattatattaaagattacaagcattactcagccttcttttgaaaatagcctttaaaacagaattggtatgaaattgttcagttcctaatcacagaccacagcctgggcctcaggtcctctgtgacggaagtgagaatgttggcccacttagggttctgtccctttctgatggcccattagaactttgactgtatactcttggacccaagatacctctcaaaaacttcccacacatttgtgagtatgtaagtagctgccacttaaaagtttatatatttttgtatactaatctgatgccatgtactggatttcaaattaggtttttatcatctgttttcatttcttttatgagacacatctcactctaacccaggctgtcttagctagagctcactggacagtctacgctgtcgttgggctcactgtgatcttgtgccttaactggctcaatgctgagatcacaggaatgaacccccataccatactgaagactacttaggcttttgaatctaattttgaaattcaggaaataacaaagttctgaaataacttgcatgtatagtcttttaccacataaaactctgtcgttgtggctttatactgttataaacttgttttgttttgttttgctttgtttttgaatcaaggtattacttgcaatacccagcctggtaaatacatgtgcttgtttatctcaggctccaagaaactcatgccagtgaggtaaagaaagtgaaagcagaggtagaggacttaaggcatgctctagcccaagcacacaaggactcccagagtttaaagtctgaactccaggctcagaaagaagcaaactccagagctccaacaaccacaatgaggaatcttgtagacaggctaaagagccaactagccttgaaagagaagcaacaaaaggtaagtgcccgacagctaccaaagaaaaaggcctagagatctggagatctgaaaaaggcctacgaaccattgaccaaccaaagagtacacatggagggaccaatggctccagctgcatatgtagcagaggatggccttatctggcatcattgggaggagaggctcttgatcctgtgaaggatcaatgccccagtgtaggggaatgccaggatggggaagcagaagagggtgggtggatggaggagcaccctcatagaaacaggggcagaggggatggaataggggatttgtggaagggaaactgggaaaggggataacatttcaaatgtaaataaataaaatatccaataaagagaaaaagaatgctatttgtaatgttgttgcatagttttttcacatactctgcactgcgctagtgctgttttaaaatgcagatatagtacaatttatttatgtgtggtgatctgttaaatattgtaagaaaggaaaagaagtcttagccccattattttcttacttcccattggttctcatgttacagaggcagatttgaacacattagaagattagtggtgatatggtgtaagaaggaagagagatgaaagggtgtggccacggtgtctttgtgtgagaactggtcaataggtttaataggatatcgtagttttgctttgtttttttatttatctcagaagtagcaaatggtttagaagatggtacactttccccaccttcgttcatgagttttatgggcaagtattatatacagtgtcttataacattactcatctacttaaattcaatttccacgtggaggggtctactgagtgaagttgcttttttttttttcttttttgctaaatgaagaaggtaaacttggaaattatcaaacaaagcatgctttcttttccaataggaattgcttgactgaattagtgcttggttctgaaaataatcgtcagggtttgtgaaaagctggtaaaagtacaaggacagtcacttgaaaaagctcaggagtttgtgagttacctttgattaagcacattccctgcgataatctcgtctttgtgtagccgccttgtgccgagagcataggctagaactgcagtgccacgtggaagccacttaggatattgcatctaataggacagcagtagaaagccatactgcctgcttgtattctgttttgctcatacacagtgtcaatttcccactattttttttttttaatattgtaattttaggcacttagtcgagccctgttggaacttcggtcggaaatgacagcagcagctgaggaacgtataatcgctgtaacttctcaaaaagaggcaaatctcaatgttcaacaagttgttgagcgccatactagagagctaaaggtgagcaccagatgtgtattaatgtggccagacacccgcgcacgccagagagcttgtattgaactagtggctaattagacaggtacatacatagttttaaacactatgtatctttatgttattcacgtatggactatcatcttgcggagtttgaaaagatagaccatgatgacttgtgcttactaaaaggactaatttaagaaacattttactttaagaaaattttaagacatttttagtaaattttaagcattaactgggattcaggtccagcatgggtgaatactctactgctgagctaaacctccaaccctcagaattctgttaaggctgtttggttggagtaatttcagtttcacagcaaaattgagaagtcacaccgagatcttacagatacaccgtgcaccaaatgtttgcagcttcttctgtagcgggcattccccaccagtacggcatgctttcttactgtttgtgaggcatttcaactgcagagctagctggctctgaagcctggtcttccaataaattatttttatcaacatacttcatcatttttttatctgaccattaagcttagtgattaaatttttttccctaagcatatatttcataataacttgcaatttctctattttgccccacaaatttcacatagtatattgtggtaaaatgaaaaatctaatcaattctttttgttgtttttttttttttagtttaatttacttttgatatctttatatgctttttactatcattaaatagtttggaaaatagattttcattaatttttcaaaaattgcctattgcacttttcagtcatgttgtcatagttaataataaaaaattctctaaataaatatataaaagggaatagtcttttcctgatgtaattttattatctcttcatctggaatgctattcctgaattttatgttttcaaatccttcttgtaaaactttctctgagatgttaaatttttcttttaaacagaataataattaatatcaccaataagatcatttgaccttaataatttatttaataaaatctttatacacttagttgaataaaccataacaggacaaataataataaggacatgtttctgccttgtcgtcgcatgtttttaccattgtctttgttcaggcagctaaagtatacacacatgcaggattataaatgttgcttttatttccggagatgaagtgatgagatgagaatcacacacaagcagtatacatacacagcttggctgagcccagagcatttccttctctcttctagctacccctagacctaggcctggaagcttctagcctccatgcaatctaatcttccaagatgactgagtaaatctgtcttctcttagcttctgacagaattgctctgtctggcctcatactcattttggcaataaattctaatcttctggctccttctcattctctgacctggtctgtcttcacctgtgtctagcttgttctgtttgtaatctgtctctgtaaaactcccagtaaaactgccatataaacaccacacaccaaacaccacatatacctttttcttctgtccctgctcttaagtagtctctcttcttccgctgtcctcctgtgagttgggtatatcctgtctgtcaaagctttctctgactcatcactatgtcttcccctcaattaaacttcactttcaaacatggctgcttccttctacacgctaacattaccttcgttgtcagaaattaaaggtatactaagggtctgtctgcattccagccagatcatatctttggatgtgatcgctagccagagcaatcatggtgctggatgaaagttcctctacaagagtctgctgtctcaagcagtccttccatgtctttatcttcacaaggattttacaacatacttgaagtcaaagatttagtcttatactaacctcatgctgttcatcctgatctcttttaccaattgacctgtagtgaaacattctttttttgttttgttttctttgtcttttcttgtggttgtagttctctcagtgaacttgcttcatttgacatgaatggagaaaatattgcagcttgtagttttcccttgtgtgagatatttaaaaatttataatgaaatgctgtttctaatgcatattattatgacctcagttttctgttgatttattattaatacttgaagaaatttgtaatacctttgtcttttattagtcacaaattgaagatttaaatgaaaatcttttaaaattgaaagaagctcttaaaacaagtaagaacaaagaaaattcactagctgatgatttaaatgaattaaataatgaactgcaaaaaaagcaaaaagcttataataaaatccttagagagaaagatggaattgatcaagaaaatgatgaactgagaagacagattaaaagactgtccagtggactgcaggtaatttgtttttacgtcaaataatttgtttgatctgtaatgtataagttatggtcctccctcattttacaatatgtgccaaaactatctccagttgtttgattagtttcttgagaggcctctgttatagtttctgactatagtgggacatttttataaggcacagtggtagctttcatgctatcctgatactcaatgtcatatagaaagcatgattaatcatagcctcccagattttgataattggaatatttaatgtctcctttaatattgtcatgtaaagttatatcttaatgtttttagagcaaaactttgatagataacaagcaaagtttaatcgatgaacttcaaaagaaagttaaaaaacttgaaagccaactggaaagaaaggtggatgacgtagacataaagccggtgaaggaaaaggtatgtgaagtgaacccatgaatagtcttagactaagtgaggcgtgcactgataagcaggtgatttactctgagtgtaagggcctcatacatactgtgtatgggcctaaataaggctgagatgtctaagacagatttctgtcatttagaaagctgcactccacttgaagacacaccagagagaaacctccatgtcatttcctgatattggagggccattagtgtctcctcacatcctatgtagctcgtgagtttctcatttctccccactctttaattgccagcgcaaaccctaagaaggattccatctcatgctgcccagctatttttttttaagatttatttatatttaaatacactgtagctgtcctcagacactccagaagagggagtcagatctcgttatggatggttgtgagccaccatgtggttgctgggatttgaactcctgaccttcagaagagcagtcgggtgcacttaccctctgagccatctcaccagccctgcccagctatttatgtatccatctctttctccagctagtactcaggtttccagaggtcacatgactcttggagtacattttttttttaaaaagaacaatcagtcaggaaaggtttttgtaatttttaaaaggatacttagtagctgattgaataaataaggttagaatctaatttggagaaaaaatattgtatgctctctagctttagaggacattctttaatttgacttcaaactctacctcccagcctttttagacatgacatcctcatttccagtaaccatgatgtttcataatatctcctgtatcattgtaaatgaaatttggagtcaatataaacttctatgatttcaaaaatgttttaaatgtaccaaatgaaattagaataagtataaaaataatttacaaaggaattaacataatacattatttatatatcatcatgtctctgatctatactagatgaatatggtagtcatgtgcttgtaacttaggtattactaatgtgaatcctaagcctcaaagataaactctgcaaaaatgtattctagtagcagtttccatggtaccagtgttattgctgtaatttgatttccaaaatgataagcagttataattttcaacaaaataacatttaacctttatttttaaaaggtaattgtactcttactaattcagtgtatagactgaaattataaatggtaaaatggagttaaattattagttcatgaaattgtgaacagaagttttaactctatgaacaccctgcaggactttctcagaacatgggactatcgtgtatcacacagctttctttgactcttttattgtaatactagcaaccctaatcctaccatcaccattacctgatgatctgttcctgtaagaacctagatcctgcctttcccatttttaatagcacttatcaccagttgacctactccctgcatttatatcttcttctcaagtttgttctacaaatcatcattgtaatatttggttcacatatacgttctgctctttgtatctacagtagtagctgggcacgtggttagcacaaaataaatgcatgttgggtggtaagtaatgtggatttagaccagagtgaattacagtaatagaaaagtgtcagttgtcactcagtaacaagactggattggtgactcacacacaattaattgttccttagaagcttacttacataaatcatgtatttgaattctcatttaacttcttgagtatttgttgtggtaatttctttggcattagagtcttgtctgaaactcttatctgtcaagtgatgagccaagtctacttaaatggaagtagttttcctaatagtttgccatagctaaagattctaggacttatataacagaatgaactatttacatattatcttgtatagtttaaaattgtgcttaaatatttaaaatgaggtgaaaaatactgacagtttataacacatttgttactgcttgcagagtagtaaagaagaattaattaggtgggaagaaggtaagaaatggcaaaccaaagtagagggactacgaaacagactaaaggagaaggaaggagaagcccacggcctggcaaagcagctgaataccttaaaggaactttttgccaagtgagctaaaattcattgtaaaactaataatagtataaatttctatcttgaacttatatagtttattttatttgataaatgacaaatttgctagttttgattatctttgatttatattttatcacctttcaaatgtactatattttaccaagtatgaattatgtgatttttaaatacgttcatgccaagaacaaaatggtgcacttacttcattaacagaacaatgatgcctaaactgcagtgtaatgaaccaaacaataaaagtttcaaagatacatttgttttcattctttattaaattctacagagctgataaagagaaacttactttgcagaagaaactgaaaacaacaggaatgactgttgaccaggttttaggagtgcgagctttggaatctgaaaaagagttggaagagctaaaaaagaaaaatctggacctagaaaatgacatattatacatgaggtaagccagtgcatggagttatggtacctatgttgatgaagaattggcttatatacatgaaaatataaatgtactgcttcaaggatggcttgtattgattatctttgtcatgcacatgcagctcaagagtgagcctagaaggtcataaccaacgcttaaagcccttgtttagagctcctcgtggtcatctttgtgatatttctggtgtctcttgcctttgtttctttgggtggaacgggactttaattaaacccttaagttatatagtttctaaatgcatgtgcctgaacaggcgcagaagggaggcacagaggaatttttgctgtactcattcaacaactagagaggaagatttcctcttttaaaaaggtatcaattttgggttcctgttgcccactctgccacagccaccatctgtgggctgagatgtggtgtaacttaagagggagtacagccttagtcacgtgagtttaaggttctctgtgaaactaagactctttcacagagaatcatagccattccctttcttgttgagtcaaaattgggcttttctggaactctcctcagtgctgttggccatcttcatgtttcaaatctgagttcagaccaagtagtaagaggagagggtaaactttgtttgctatctgatgcttctactattgttccaatctaaatatattggttttcaaagtcataagtagttggcccttatgtttgactaagatgagattgtattccagctgtgcagacctgaagacccccacctcccaccccatccacctatctcttagagaagcctttcatacttatttaacttcacttcttcttgaaacctatgtcttctgcaaagctatggtcagagtaagataaaatcataccatagtaacacagtatataatttttatttgaatcacttcttccaagatctttaaacatacgtgtaaaatatttactcttcataaatgtatacctttttatttgtctttaaaaatacagttagtgctttttaaaacaaaacatgaaacataattatacaatgagttgtttgtgatgttgaacagcacgtaatgttcaaatcaaggtagatagacacttatctttcccatgccgttaaagcattcaaaattagtccttctaagcttttttgtaaacttgttgactatgtattcgttttgagaaatatctgtttatgtatctcttcttttgacatttaagagtctccatacatttttcttgatgtgtaggttgtctttttgtagtgcagagattccgtgttagatataatctcatttttatcaatttttggatattttgtaagtttctgtttcttagaatagtaccttcttgtttacattcatgagtgtgtcagtttgaatacagtgatgtgaacacaggaagttgaagtcttctagtcaagcattctcaccaacctctcaccaagagatagaatgtattccttgcaacattccaattactgtttattttttaattttctttttttttctttctctttgtttatctttcagtattttttttaaggaataatgtgattaaggaactttttctcttgacaggtccagtctggctttcagctatgggcctttccttgttcctcatctaaacagatgctgctaacaaaagtctattcgcctctctctgtgaattttactaaaattattttaatattttgaaaggtcctagtacctttaaggtttcttatttttctaatgtgaatatattgataagtaactggagatgtcctagaagagatttatcttgttttctctctaaattcaggaagtttgactatctgaatgttattaatcaaatacataattaatgagaggaaggatatactatagataagtttttagtaaagatatagagacaagtgtgaatattaatgttttcacattaagtgtgcatttacttcttaaatggagaaaaaaatcctgaaccaaaaggtttcatagatttatttgtgtcagagtatggtaggacctgtagccagccagttaagtttggacatgatatgacaacatttaatgaaacgttagagtcgtgttggattcatgagtttttttgacaatgaaattgatagtatagttactctgtaagctttttaaaatagtattttagtccttctatatagttccatataagaaaatacatatgctttaaaaatgttaatgtgtttctataaatcagacttcaactgatggtataaagaagtcttttgtagaagcctgagagtaaaggatggatcatttttaatataaattataatatcctaatttgtttcttgtgaactttggaagttgaaaaaaatttaagttatagtattgatatacacactatatttttttcttttctgtatcataacttcataaattttagaaaaattgaggatcacataatattctggttgttgttcataggacccagcaggctcttccacgagattctgttgtggaagacttacatttacaaaataaataccttcaagaaaaacttcatactttagaaaaaaaactttcaaaggagaaatattctcagtctttggtaagtatgcatctttcctttccttagtgttaaaggcgtaaaagtgacataagattcttcctttagctggacaaaaaatgttagctcctccttgttaatgttgactggcactttccctttcactcactcatttctctgatcctgtctgataggacagtagttaatttacatcctcaagcattgtctaaccttcattgcaaaaatctgcatcatgggctggagagatggctcagtggttaggagcactgagtgctctttcaaggtcctgagttcaattctcaacaaccacatggtggctcacaaccatctgtaatgggatctgatgccctcttctcgtgtgtctgaagacagcaacagtgtactcatatacattaaataaataaatcttttttaaaaaaaatctgtagcagttccagctccagttagagatgctgctgtgtagccctcacgtgttctgtaatggttagcaagtttgctgcatccccagatcttctcagatgtctccaggtgcttaccacccatcccatgctgttagtgtgctcaagatacaaacactgtctttcctcaaaaattcttcagctaaaaaagtatacagaagctgggcagtggtggcacatgcctttaatcccagcacttgagaggcagaggcaggtagatttttgagttcgaggccaggctggtctacagagtgagttctaggacagccagggctacacagagaaaccctgtctcaaaaaaccaaaaaaaaaaaaaaaagtatacagaaaaacgagacatgaacagacaaaatgctgccacataaccatacttggaacaaaaactaggaaagaaaacaaatatcgctgatgacttgtatatgtatctacagatattctgtgatgttacagaagtgttgtagatctaactgaactaaatatggaggcaataccaaataataaatcaatcaaatttaagtcagctttgcagatttttaccgtcaattataaaaatgtaccagctcctaaagctaagtaattaataattttgttaaaatgaaaatgagaaacataaaaatgagaacaagaataaggctggtaaggaaaggctgaaagaaaaggcacatgtagccaaaaatgtcaggcacgtaatgttggtcagggaagacctgctgaggaggaccatgctgatatggcacatatgtgtcgatgctgcacagaggatggcacatgtgtgtcgaagctgaacagggcagagaggaaactggtgagtcagtcagtccagaaaagtaccctcttttaaatacactgaagtcctttatctctttaccagctaagactgcttataaaacgtcatatacatacactatgacaatctaacaaagaaggtaagactcataaaaggaaaaggactgattaataaacagttttgtagaaattaggacaatctacacggtaatatttaaaagctttcttttcagaaaataacaggaaaaagttacaaatctcttatatagtaaatacattcataattagatgagaaatatgttaaaatgcctccttgggaaatcttcagatatattctttcctataagtcatatttaatcctttgttattaagcagtcattgatactgatatcattaggcagatcataacagtaccagagataaaatagacaaactaaaagaagaaaaaatgttaaaaaacagattcaaagatttccatgtctgatggagactttaaaaatcattgcagatgctaaaggtgtcggctttgtaaattgcaggacttgcattgtagtaaagatcctaagactgaaagaacctgcatacgtgctcaggccatgtgaataggcggggacctgcttctcattgtgggctatgcctgtcacaaaacattgctttctttcttgccattccatttgtatccttcaaacaacaacaaatcacacccagggctgccttcttgccagtgtcctttgtctcaacagcagcaaagatctatccagaatgtctttagctttgtatcctttttattccttttttatcttcacttcaaatatgtattatatggtataattttaataatttgagatatgttataaagaaagtctaaggtctatttctacaatattattttaagcagagcatctagggaggtcctggcttcatagcctgctgagctagtagggcgctggtgagaaagagccagagccatgctgacaactggtacaacgtctgttatatacacagcagtcctaaagcatcctaacattctgatgggccagcctatcagcctactcatttcaaaacctccgtcaaaaaacatcctccttagcatcaaaaaattagcataaatagtaacccatgggagattaatgccaagaaaaaatgcaaatacagtgtttaattcatttcagaggacaaaaattggtaactgtatctcaaacttgtgaatgccttctggaagaagaaaatgagatggttatctatgcctgagtcacagagtacagcctccttctatgttgataagtctgcatctaagtttcaagcaacaatagaaaatatttgggggaaaaataggtcttcagtaaatgtatacagactttctagtttgcctttttattctgtatactatatattctgtaaacaagcttataatagttatttatattgcttttataatatattaggtataaacaatctcaccatgatttgaagtatatggaaaatatatttaaattagatacatgcatgctattttatttagtggtagtaaacccccatagaagtagaagggaagtgtcctggagcccgttttctttggatactaagaaacacttgcctataaatgtcccttaagtagcagaagcctactgtctactgtcctgtgaacagagtgcccgaagcccagctgctgcagtgttgttgctttctgaagactgagatgaaaatcagatccgaggcttgccacttaggcgaccatctactctacaattaatctaagaaaacgtgttcatgtttctttacttagaagaaggatagtgtgaagtctcttaatattatcttcctacaatgcatatctctgtccaaattctctgatttcctccttgcataggaaccgatcttcctcaaccagggttgactctaatgacctccttttaacttgattatctctgtaaagcaaataagatcacatctgagatgctgagagttaggaattagggttgaggggtaattccaaccctcacaacttgaataacctttattttgaactaacaaaacgagtataggaaagtttaaacattatgggagtgtctgtgaagtcactgtatgcatagatttttaaaccatattgactttgctttctgttttaatttttaaaaatgacctttctggaagttttctaatgtgttttaacttggttttgattttatgtaatacttgcaattttctccgcacattccttttagaaatttcacttttgacaatgtttccttattcagtatgtctttgttgcttttattaaatgttgaacatactctaaatattactttccagacttcagaaatagagtcagatgatcactgtcaaaaagaacaagaacttcagaaggaaaatttgaagttgtcatctgaaaacatcgagctgaaatttcaacttgaacaagcaaataaagatttgccaagactaaaggtaaacttgactttattataatgcctgaattcaccaaattcaccaaattcgtcacatacttaagttttcttatattactttctgaattgcatatacgtgacatctttgtgatgttatatccatttcctgatatataagagttatttattgagttctctactttgtgtcagatatgctttaaggtgctagagaaggcagtcagttaaagtccacagctaataaaacttgtcttccaatgagggagattcccaaccacaagcaaccaggttacattgtaagagtttagccgacacagaatgctatgggaaaagaggaagccccattacaaaagggaagaggggaggtctggcttaggatcatgagagggttcgcattgaagacttagtggacaaataggaggtgagtcatactgacagtgagaatggaagtgtcagcttcatgtgttccaaggtaaggcgattatttcttacattccattagtaattgtactaactacgatcgaagtgtgactctagaagtattacttctgatgttaatgtctacctttgactttttatatcttaccctgttatggttacagctttcctctttgctagctgattgtttcagacttattttataatcaagaacattagcattctgtcatttccactggtagtgatacaattgcacttactgcttttcattgtgattgatacacctagtaaccagagcagtgtcttcagttctttttctgtctaccagaaagataagtatcaaggtatgtacgttatggcacagcaaagtcacactgagaagcctaagttttgtagtgtattaaggtagtagtttgaaaaatagttattgtttttatactaatactctttatctaccatgttgtgttagttagggttctattgtcttaaacatgaccaaaagcaacttggggaaggaaggatttattcattttaaacttctgcatcacagcccatcaaggttgatcagggcagggacctggaggacagggctgatgcagagaccaaggaggaaaactcctacgggtttgctcttcaggacttccttggcctgctttcttctacagctcaggaccacctgcccaaggacacccacagtgagctggaatcttccacatcaatcttgcatcacaaaaagacaccacagacctgtagcctgataatagggaggcatttttttctcaattgaggttcctgctctgagtttcctctagcatgtgtctagctgacagaaatccagcacacatcttttatcaaaatttcttttgtttaaagacacaattgtttggttctgtagttgagttgttaatttaattttttcctctttttttcaggagctatcatattgttataacagattgctgttattttcttttaccttttagaatcaagtgaaagatttgaaggaaatgtgtgaatttcttaagaaaggaaaactggaacttgagcggaagcttggtcaggtcagaggggtgagtgaatgtccttaagcaactagtgccgaaaaaagccaggcatggtggcgcatgcctttaatcccagcactcgggaggcagaggcaggtggatttttgagttcgaggccagcctggtctacaaagtgagttccaggatagccagggctatacagagaaaccctgtctcaaaaaaaaaaaaaagaacaacaaaaaaaagaaattaacacaatcttttttttctttctttcttagatattttcttatttacatttcaaatgttattccctttcctagtttcccctccgaaaattcccccccctccccccccaatccctgcttcccaacccacccactcctgcttcctggccctagcattcgcctatactggggcattgaaccttcacagaaccaagggcctctcctctcattgatgacctactaggccatcctctgctacatatgcagctaaagccatgagtcccaccatgtgttttctttggttggtggtttagtctcagggagctctgggggtactggttagttcatgttgttgttcctcctatggggctgcaaaccccttcagctccctgggtactttctttagctccttcattggggaccctgtgctccattcaatggatggctgtgagcatccacttctgtatttgccaggcactggccgagcctctcaggaggcagctatatcaggctcctgtcagcaaaaccttgtttgcatctacagtagtttgggtttggtgtttgtttatgtaatggatccccaatggggcagtctctggatggtccttccttcagtctttgttctatactttgtctctgtaactccttccatgggtattttagtcccccttctaagaaggatcaaagtatccactctttggtcttccttcttcttgagtttcatgtgttttgcaaattgtatcttgggtgttccgagcttctgggctaatatccacttatcagtgagtgcataccatgtgtgttcttttgtgattggtacctcacttaggagattccacctcacactagtcagaatggctaagatcaaaaactcaggtgacagcagatgctggtgaggatgtggagaaagaggaacactcctccattgttggagggattgcaagctggtacaaccagcttctggaaatcaggctggcggttcatcagaaaattggacatagtagtactgcaggatccagtaatacctctcctgggcatattcccagaagatgctccaacttgtaataaggacacatgctccactatgtttatagcagccttatttgtaatagccagaagctggaaagagcccagatgcccctcaacagagggatggatacagaaaatgtacatttacacaatggaatagtacacagctattaaaaacaatgaatttaacacaatctttagaatcaaatattaggaattattaaagatgagtacaaaattagacccgttttggcattattagtacatcataatctctaagatactacttttaaaaaaaattttttttgtttttgtttttttgttttttgttttgtaggctggtagaagtgggaagacaatcccagaactagaaaaaaccattgggttaatgaagaaagtagttgaaaaagtccaaagagaaaatgaacaattgaaaaaggcatcaggaatactgactagtgaaaaaatggctactattgaggaagaaaatagaaacttaaaggtaattttatgtgttcattttatatgaatgctttcctgttttaatttgcattgctttttcagggaagtgttaagtgtgctcacagtacatggaatgtcctcaatggacgcactgttattttacaccgtgaacagattgattggcaagcaatctaatggtcgctgcagagtgggtctgttcatctctgctgtttctaaaccagttgtccttttctgtgatagagtaattacatgtgtctatttcagatttgatttgctaagttgggatgctgtgggggttcctatatttccttttaatcttaaaactcattctaatgaatagccaaggttgaataggaactttggttataaataacaagtttgggggagtctttaattttagtcaagtcaaatgaggtttcaaaaactacctagcttaagttttatgagtttaaataataatctttatgtttacatttaagagaagtaaactagatctgcatcattagtcattttcctttgctcccctgtcacctcccatgcccccacctcacctcctttcacatggatcacctcctttcctttatcagttacatataaacatgcataaagacatagctacaacttgcaaagtccattaaaatcgttgcttgtgtatatgattttgtataaacaatgatcttttcttgatgttttcattttgatatgttgcttcatcactaccaggctgaactagaaaagcttaaagctcactttggacgtcagttgagtatgcagtttgaatctaagaacaaaggtactgagaaaattgttgccgaaaatgaacggcttcggaaagaacttaagaaagtaagacgattatgacgtattacatttatttttattaactgacataccttgtcaaaaatcaaaattgatagatctttgacaccagtgtctattcacatacatattaagagaactcacattgattaagagattcatttatatgaaaatttaggaccgggtggtttatgttcttagctctacatactggggattgttcaaagttggataatgtctttctgttcctcaaatccctcctatatgaaattgggagtagtaaatatacatatctcttagctggtcatggaattgagcacctggtattccagcactcagtctggaagaaggagagaccagcctaggctacatagagaatctatctcaaaaaagaaatctatacacatattatatgtctcacagagatgttgagaaatttaaatgagttaatatttatgcatatgacttagatcaatgtccaatttatagagcaaagaacataaccattttgttagtaagattcatttctatttaaataatacagtatattccttactcctgacaaataggtataatttttaacatgtattacctaatgaatgaattgaaattataatccttaaaacttttaacagtaactcattgtactgtgaagccagagctgtactctcttgaatcatttctggaaataacctgtgacatacatggtgcttgtattacagagtcaaaacaaagcatcctttaaggtgtagcaagattaactgtgtcgcttttctgaacatttttcatgagaagcaaatgacaactttagagtagcccttagatactttagataataagtacttctacatacatttctgtgccttcacttaatttatcttttgtgctagttactatgaatagattgctgttttagacaaaacaaatatttttgcaattttaaaacagcacagcttgttttatgatttccagcctttagtgataattttaaatacctgacatctatgagaacagtattatgctttgtcctaatttactaattaataaatgttcacggataggaaatagaagcctctgagaaactgcggatagctaagaacaacttagagctggtgaacgacaagatggcagctcaactcgaagaaactgggaagagactacagtttgcagaaagtagagccccacagctggaaggtgctgacagcaagagctggaagtcaattgtggtctcaaggtaggatcagacagtttcaaatttggacaggtttatcagttctaactgtagcatcaatccttcaaagttgaccatctgctggataacctagttttttcctgatggacagtttggttgtttatcagtgtctctgcattctgccctatcattaccaagactctttcctagctagtgtggttagctagctttcttggaagattgcagaacatcgcaaacctgtgattgcgctgattacctagtgatacatgtgcatcatgaagttgctgctggccttgggctgaggctgatgctgcccagcttcttctagatgctgtttctgaagctccaacgccaggttcttgattggagttatttatttctgatgcagatatggcctaagcaactggatattttatactgtatctggaataagctgcattgccttttttgtatactgggaaactttctttacagagaacccagtatatgaatacagcagccatgttagtgtcttattcgcctctactttccgattcattttctcccatcctttgaatgttttctataagtatattggatttgtgtctatggcactcactgttgtctctatgaaagctaactttacttcaccgtatttgcacatttgtgtattcctccctgatgccctagtaggccatatttgccctatttggattgacatgacaggaattaacatgacacccattatcatgccaatgaaaatgtgagctgtagcactgagacccctggctccattgtggctcttgtgttgcatttgcctctctcagccaaatttaagaagagacagagctaagcaagcagaattgagaacattcagagagatggctctaattctggagaagaatccttttcctctcctacccgagagtggatgagtcagagttccagactttcccctgtatctctcactttctcgtctacagacaaggcttctgtcagagtgcttgtgtaggtatggaggaacaagtggaacagcgtgaaggggaggaaaggatcatcttggaccctgtggctttgagccagcagttatcagttgtcagttgattgtctggggtcactcttcttatgttgtgacatgtgttgagtggctttgagatttactttttccacaaatattcattcaacatctgctattaccacactgtgtgtgcttcagagactttctagaaagtccagtcttacttaggatgctttaagaaccagcttccagctgggcgtggtggtgcacgcctttaatcccagcacttgggaggcagaggcaggtggatttctgaattcgaggccagcctggtctacaaagtgagttccaggacagccagggctacacagagaaaccctgtctctaaaagccaaaaaaacaaaaacaaaaaaccagcttccatctgttagaaaaacttgcttttcactgtgatattacatagatgatatcccttcgtgggtcaagatacctttaactgtggagatggtagaccctgcccttatttttctatagattacttactggcatagaaagactattcagctttaagtcagttgtggattgatggcactatttaaccttgattgaagatgagtttacatgttaaatcacttggttcttcttctgcacaatgacaacatcttcaggaaacataactcctgcttgtttttatttcagtcttgggtgtatccaaggctgacctcaaactctgccatgcccttccaagtgccccacctatatttacctctaagcatgttgtgctttataaaaaagagaaagagccaaggatgtttgatagaggtgcagtaatgtgaggtggaagggatacctctgcgggcccatgctgagacatcccttcccctgaggtagcagtcattatgatggatgcagtatggaacagagtttatttagagcatgggaagtgaagttgggaagggaggagagagagggagaggcggggagggggcagggggaagggaagaagataggggaggggagaggagggggaagggaagggaagagggaagggcaggaaagagggaagggaagggaaggggagggaagggaagggaagagggaaaggaagggaagagggaaggcaagggaaaagggaaaagagaggctagccaggaacaagtggagagatatgggggagggagaaaggggttaaggagagaaaggacagagagtaagtttgaaaggaaggaggcagaaaaccccttttataataagccaggcatacctatccattgccaggtaactgtagagtggagcctagaaggaatgacaaggaggagcaaggttaatgtatgggctagctaggtggaataatgcaataaagaaggtctttaggtggctttcttagttattattctgttgctgtgagaagacgacatgaacaaggcagttcttataaaagcatttaaatggggccttgtttatagtgtctaggcttcgttcattatcatcatggcagggagcatgatggtacacaaggtgctagagcaatagctggggatcaggatgcagatcctgatctgtaggcagcatacggacaaggctggacctagcaagggctttccatacctagaagtccaccccccagtggcacaacttctgccaaccaggccatatctcctaatccttctaatcccttcaaagagttctactctctagtggccaagcactcaaatacatgagtctatgggagggggttggaggcaggcattctcattcaaaccaccagagtggcttttgaacatagaaatggttgaagtagcttctgatatttcacattaacctttgggatatctctgctcgttagtccttgtcaagtaagcacactcttctaatcggagcgtaagctctgtccaaattgtttgaaagtgtttacggaatcatacctgcccttccttatgctgtcactgccagatactcttctatagcaataccttccttttttaattgattcggaagacagtacataaaattttccttcagaaatgtttgaatacagtaaacattatcttcctgtaagtatatgcctgtaaaactgtttggctcaaactttgaagatttctcgtgattgatgttgttaggccatttgtcatatcagtgttgctccctataacccatggcatgcactgctcctctcaggtgagctctgaacagcttgtgatttctgcagtgtcccttacagctgtttctgcctaaatacctgctgcggtagggaagggtgctggaagtgggagagatgtttgtaaactgatggattaggtattttcttatgcctgaaataaaatatcaacctaaaagctttacagttgccaaattcagccctcacccctgatcttaatccccataggattactttaatattctgttttaatttgtacatgttaactaggctgtgtatcccttaacagcatcttttaatgctaaatacatagccagaggtttgactagaagtactatgtacattgccttgcatatattactgtgatttaagtggacttttaaattagtgagaggaattgcttataatgcccgtaatactttttcttcatctttttagagtgtatgagaccaagatgaaagagcttgaaagtgacattgccaaaaagaatcaaagtatcactgaccttaaacagcttgtaagagaagcaacagagagagaacagaaagctaagaaatacactgaagaccttgaacaacaggcatgtaatagtctttaaatgataaaacaatgtaatatagctcgacaatccctgaattgcctgaaggtgaaaaaaaaaaaaaaaaaaaaaaaaaaacaaaaaaccctcctacagtgatggctggctcccctaggagactaatccactgaatcatacttgctcccactcacgtgtgtgtatgtgtaagccacaagctgggtcatcactgacttcctgctctcagtctacatcctcatcatgaaccatgccaggtgtacttttaaagtacttccaagtctgagtactgttcactgtggaagccattacctcacaatgaatgactgcagcaatttcctaattggtccctggaatacagctcttttcatagcctgtatctatggacaagtatctaacattttgcatcgtctacccatgttaatgttggctttcccaacattaaccctctcaaacctttgaacaactgaaactcagtcaagcttcagagctttatacctggttgctttgtctagaacactagtcaccattcccagaatccatgtagctgacctgtgaactcctctttccttaaattgaggctctccagagaccctatttgagcaccctgtccttcctagattatttttctccctatcctgatgtgttgcatcctatcacagtatcactactgtcctccctcagtaaaaacacagagagtctgtaagagattccagttcttctctatgctgcatcctcattactaggacgtgcctgggcatgcagtagcctgttgctcgagaattgatggcttgagtgcatagactagagcacagaactgtggttatttcatgcctccaaaaacccagatcttataccttattaaagctcatctctctaaaacatcttatttccatgatgaacttttagctttaattttctgttctgctcaaagattgagatcctcaaaaatgttcctgaaggtgccgagacagagcaagagcttatacgggaactccagcttcttaggtacatacattatgttcgactacttaaaatgctttaccatcatgtgtgtgtgtctgtctgtgtgtgtgtgtgtgtgtgtgtgtgtgtgtgagagagagagagagagagagagagccacctgaccatttatttatttttagaaaattgtttgatatagccaggcttctattcttaaagactagggtttttccaactttattatcatttcatcctgtttctgggaacagaaagggggtgggatcccaatcctagtatttacactagtcagtactggtgtaaattacagtatcctgttgtaaccgagttcaaacttctctagtagcatagagttgaaccttagcagtccagaagcaagtcataattctatgcttctaggaatttctgcagtcttttatcgtaagaaaactactcttgaaaataatatcaggactgatagtaaaacttagatttcgtgttgtttgggaattggcagcattgaaacccagagagtaaatatttaccttgatgaccctatgccacctcttcgggctatggtaaccagcacacaccaccagaaccctgagctgagtaacctttaccgccactctataggaattgcctatgtcctgtatagagctgcccctattgtttcttttctaacatgctatcattgtattctagattagccaataatcagatggataaagaaagggcagaattaatccatcagatagaaattaacaaggaccaaaccagagctgacagtagcatacctggtaatgtatttcataaaatttgttgactcccccaaatttttgacttgcttgtgtctagtgtctctgatcattgttttcattagtgtcaagtaccccataggagcattcagagctcttctaaatgttctgaatagccccacatgcaggctatgaaaatattcccatttatcagactcctacgtggcctgtttgtctccttgtaatccatctaggtgttaaaacataatcatagtatgttatcaagcaatgaatgttgttgtttgcctctagtttcgaagtatacttccttaagttcctattaacattttctcttaatattagtttagtaatttaaaaagtacttgtattattttgttataaaataaaactttgctttttatttacttccattcctagtcagaagttagcagtcaattccctgtataacacataattacatacaaacatttttttgtatgtgtgcttacatacataatattgtttttaactatttgcaggtctgtatttgcaaatgttcatcacagtatatttataatccctcaagtcaactcatggtgtttttgcaaaaaggcacagtgacaagtttaactagtttcctatattcccatcccagggataacaagttagctcttggcattcagttttcatatagaggtgacctatcttggagtactgggtacctgtataaccagttagagattgaatcctagctctgacacttttaatgggacaacctcagtggcttaagaccactgaacattttcttttgaaactaaagaatatataatgaggataagttgtttgtaaaatctaagatgacaatttgagaatatatatttatgaatatattttcatttgtcctacgatacatctacttgctaattgttttctaccaagtttataggatatcatttttaaaaagggaatagaccttatatgtatattgaattttgtgtatttttctggatgcacactataattccagctgcccttaacttactacagagacctcttaagatctgtacattagtcatgtctttaatagttccatagtatgctagtgaatgggtaccagtgagcagtttacctcaggatatatgcttagcacagttctaacgcttctggcataactacactgtacctcctaacctaaccatgccatccattatctgatagttgatgaagtgtcatgttttacccaacagaattataccaattttatattctgaaccattttaaactattcatagagctcctgaagagtcctgatgctacattgtattaatgtgtgatatgatttgttccaggcacaagggatttgcaacatttttactttattcttagaatatcataggatcagtattgttgtctttattttatatttaataaatgattaataactgtcttagttagggtttctattcctgcacaaacatcatgaccaagaagcaagttggagaggaaagggtttattcagcttacacttccacactgctgttcatcaccaaaggaagtcaggactggaactcaagcaggtcaggaagcaggagctgatgcagaggtcatggagggatgttacttactgacttgcttccccaggcttgctcagcttgctttcttatagaacccaagactatcagcccaggggtggcaccacccaccatggaccctatactcatgatcactaattgagaaaatgccttacagctggatctcatggaggcatttcctcacctgaagctcctttctctatgataactacagctgtgtcaagttgacccaaaaccagccagtgcaataacctgtcctcaagctcaggaccaatggaaagtggcatgggaagggcaagcattaactctgagccaaccacggtcttaagccctgtgctcctgtgctttctgatacctgaaaccagtgttcatccactgggagggaactcgtgtgagcgctagcttggtgtgctctgaacgcagtaccagagacttcttgatgcattaggaggttctccagcttgtccaatcccaagcctttgtattgtatctgttgtgagtgaaggaaggcgagcagattaccgcatttcagagaatacctgtgtcaaaatcaatccgtttggatgttcccaaatcaacatttaaagatgaggaccattcagaactttcagaatatgttgtacctattttcttcatgcaatttttcaccaacagtgtgtataagatctcaatgactaggatcaaactaagaaatatatacatactaatcatgtttactagggcactcaggtaaatagaatcagccactgtgtccatcaacagatgcactgagataaaatgtggtacatatatataggagagttttattaagtcataaaaatatctgtaggaaaatgtgactacagatcaccttaactctcaggaagacaaatagtttatcttttcttcatctgtagaattgagatttacatgacatatgacatagaaatagaaggggaacattatttttttttttgcctctaaaaggaaaatgcattgttgtttatttggaaccctgcttgtttgtccagtctctgagtgatagaggacaccccagagcactccagtacacttcccgtccttaccatgaaaactcgctttccttagttcatcaaactcgaacattaaaacaaaactctttacctttcaaagactgcatggagtggcaggacactgtctattaacctgtgtgctgattcctcctccacaacttcatctgtgccacacgtagtcttagatgtttggcgtaaagtgtaaaaaaaaaccttacacacagtagccaaagctatgtggtgtgaaggcataagtggccagcttagcattttaattcgttgcctgtatacatagtacctaacaaatttactggttgcaaggtttttctctcaaaaataagaattcctctcatataaaaaaagaatagcccacatttctgatagctggcagctaccttacttgctgagtcatggccatgcagtttgcatgcgaagtcttcccaccatacagtgccagatgatgcagaccttcgctttcatgtttcctgtttattctgaaacaaatcctctatctttaactcactcacagtaaagaaaaacataagtcataattttcctgactattttggcagattctgatcaactaaaggaaaagataaatgacctggagacacaactcagaaagttggagctagaaaagcaacattcgaaggtaattcgtattggtgtctaactttagtatgctcagtgttttgtgaaaacagctttgggaaataatttttatgatcaccatctttaagtgtataacccaaaattcatggatttatttcacacttattatttgactcatgacaactttttattaaacaactatcaacagcaaaaaatcagacaaacagaaagtactagagaataaatttatttttaaattgtaaccaatgcacatctcttaatagtttttttaaactattttcttaatttgtgggtcatggtggggaaagtgttttctaagtcccttttgaaattattttcagggatctttcccttaaatcatttagtggtctggctgctcgtcactggtctgtgtagatgctgtaagcatgcacttcaccaggtgcttaacctttccaagtcccagggttcccatgatcataagtattatatataaaagataaaaaattagaacattataaatactgaaaactcttgaatgttgttgtaaaaaagcaaagtccctttcgcttgcctgggaatatctgaggcagtttaaagatttaatcttataatttagctaaagatggcagcttctacattattcacatggtacaacggaaccttgaacagtaaaatataaagaaaaatatttacatttaagattttgagtttttatgtttataattaaatctaaaatttcaaaccaaaaacatgtatcctgtatgtaacttttaggaggaagttaaaaagctgaaaaaagaactggaaaattttgatccttcattttttgaagaaattgaagacctgaagtataattataaggaagaagtgaaaaagaatatcctattagaagagaagctaaaaaaactgtcggaacagtttggatttgaactgcctagtcctcttgctgcttctgaacactcggaagatggagaaagtcctcatagtttccctatttattagtgccctcgtgtaactgcaggtttaaaactattttatgagtgaaaaaagtttcagctggaaatcaagcagtctctgtgttatagaatttacagctcaaaatattgtattttttttgtttaaaaaaatcatatttagttttaacttgttagaaaagtatatttttgaagacttcattaatttatgactatacagtgcacaatgagctatgataaatattactattttcataataacttaaattttcaaaaagcataaaggtaagcttatatcaatttactatttaaaattgattattttatatttatttttgtgttaagatagtcaaatcctaacgatgatttctataaatacctagaaacatgtttagaagttgacaggttttgccaaacagctagcaaaattaaatgcaaactattcagtcttagaaaatcacaataatctcaacaattagttccattttatacatcaagtattatgtctttgagtctctcaaatttctgtttatctatttttgaaaactgattaaacaaagactggttatcaaaagcacagtcataattgttcaggttcaggttcatgttaataataactggtttggaattcatgtaagtatctggaagtggccagcataaaccaagatggtgacgatggacctgtaaggagaaaaaaatgatggtattaactttagtcgaaaacagcatcgtaacttatacttgtgaatactgctacctgccaggtccactgtaagggtctaccttttctcattctagttcagttccatagctgctcttttgacagtgctgtctgtcttccccattgggatatgagcttcctgaaggcagagcaaatgttttgtttactctgccaatacctgaaaagtgccagtaacataatgaatatagtctgttagtgactacagaaaaagtaagtgtgagcctgactctagtgtcaccaaaggaatgttagtggcagaatggtagggtagtctgggatcacagttggttaggacgttgctgggtagctgtttcctccacatgaaaacaagcactctagatggagcctctttaagacccagaaagtaaacaaacttcacacgtctcactgtactggctagttttgtgtcaacttgacacaggctggagttatcatagagaaaggagcttcagttgaggaaatgcctccatgagatccagctgtaaggcattttctcaattagtgatcaaggggggaaaggccccttgtgggtgggaccatctctgggctggtagtcttggttctataagagagcaggctgagcaagccaagggaagcaagccagtaaggaccatccctccatggcctctgcatcagctcctgctttctgacctgcttgagttccagtcctgacttccttggtaatgaacagcaatgtggaagtgtaagctgaataaaccctttcctccccaccttgcttcttggtcacgatgtttgtgcaggaatagaaaccctgactaagacaggcgctaaagctcaacattcccaaaactttctgcaaggtcacaattgaggggctgggagcagcctgcacaatgtgcaggagtccccaggagtccccaggatgctgctttcgtgagtcatcactcaagctgggagggctttttactgatgctgcagcctttgggtccacattgctccttgtaagcagctacctacccatattcctgtaagtaaccccagtaaagtccctggttcactactgggtctgtcctcagtacctgtgtctgtgggaagtaggcattcgtgtatatctccctagaactaaacagtcacacaacaaccagacagtgtgttttctcagatggtaaaggagtggtgatggggagataagaaggggctgtagcgtggcacgtcttatcatacctgaacagcattacgcaggaagtaataagtcagttgtgaagactgaacacaagcagagtagaaatgaaagatgagtgctttagggtgtgataggataattcaagccactgtatactggcctaaattaaagtgagcacctagttggatataaagaacagagattcaatagatgagacctttgaagaactggttaccagatgtatgaaggaatggcaagaggacatagacaacgaatgcaggcttctgatttcagtgaataatgtggagatgggagtgcttaaactcagatttgaacattataaatttcatataccagtgagaaatcagacaagttgaggggacggggcacaagggtaaggtaactcactctgtaacctaccactgggcactttctgctcaacagtctctaagttcgtttaggaagtgctgagttacgctagacacagcatgcctcagagaactaatgtgccccctgagttcccaggagggactgactgtgttatcactaactcagaagctcatctgacatagacagtgccaggctgaacaccgtcgtcagcctgacacgtcccataaacttgactgttttagcctgatggcatacggaatggggttaatatactaactgcatgccagaaataatacaacctggacagagaaactgagtaccacacctttaagaacaaacttaagttgtttcttgtcattaccttaattaaacagccgtcaccgcaatgccacacaatcccttcaatttgaccctctctgcagtcttcaaaccaggacagcaggtcattgtgtttcagtgtgggcagatttctgacctggaatgctccgtgtggtgtgagaaaatgtaacggggatttcttgcttcccagccctaaatggtaaaattttcaaaatcaaaaacagaaactaaaaaacatgttcagtcaccttcttttcagaaagagtgagaaaatgtatcttgccaagtgtataaacgtctaagcatttaggaataatgttaacaaaaagttagattctctgtagtgtgcaggaagtccttttctcactcaagtgtggtacttcttccaaaaactctaaattcactttcatgtactctctacactgagcgtcggggcaccgacctgtggaccaagtccagacaggcatccatggtaagtagtttcactggaagatgcagccttatcaattcatagaagtactgctgatagtccatctcaagatatggcggccaataaagcttcaaagattggctatcaaacattgtttacataaaaaaatcttgatagcatgtgttatatcattagctacactctgcttttactccacgtttacctaatgtcgactttgattctataggtaagcttagtacccatcacccagacatacttcagtttttgtctgcatacctgtttttgtggagtacaggtgtgtgcatgtttgcagcctgcattatggagacagtagatcagtactgggtatcttctattgctttctccgtgtattttgaaaaaagggtgtcttgatgtacctgaggctcaatgactaggctatactggatacactgcgaggcccagagaacctcttatgtatacctcgctggctcctggactacaggcatgcaacgctgtgcccagcttttaacatgggtgtgagggatccaaactcttatggactgggccacttcccgctaacttcactctgcttttgctctctctagaactgttgttatagctttagtgtctttattctattttatgactcttctttcaactctgtactccagaatgccactgactgactcaattaattatggcctgcattctgatgctggatacagtatgttgccaattcgtactcttgcctctatttattaatgacctgacaggggacagcaccttttcacccagctgcatctcagtgattccttttcatgcacagttgataaagctatcacggggcaggagaatgggataaaatcaaccttttgcattaataaacccaatgattagccatatataaattttcccatgaacataagatttgcggagacagatgtgctcctagcaaatggacacaaatgtgttagttagctcttcagtatgcttaacttgactttaggactttataacgaatgccttcacttaccataggggtttccattgatactcgtgcctatcagctccagggtttgctctaaaagctctgacaggggaacagcactaatttccaaaaccccgggatcatcaggatggtgccttagtaccagggcaattccaaactcgtaattcactaccgacgagtgccagcaatattgcttgctgcccttctctactggtacccaacctggtaaagaagaaattattatcacattggttcactggttcttttaaaagatacagcagacttggtcttttttttttttttttggttataatcattacttcttttctagattcccttatcacacagacattgataatcagtgaggaagttaacaggtttactatttttgttataatcgtaaagtattcatttgtgtatcctgttgggtattcacatgaattgaacatattcttcaaaaaactcatcttgcttcaggagcaactgaacactatactgagacagcattaaactgttttctttcgtcttttaaaaaagctttagcatcttttttaactgcctagtattgtcaaaacttttttcttttttttttcccccgagacagggtttctctgtgtagccctggctgtcctggaactcactctgtagaccaggctggccttgaactcagaaatccacctgcctctgcctccctaagtgctgagattaaaggcactcgccaccaccgcccgacaacttttttcatttaatgaagtgagtttctctctagtatccaagacaacaaatagatacagcaagtgttccagtttagaccactgttccagtcacactccagtcgacagtttactgatttcctgtttgttacttttttgatagaataaggtccctcaatacagaaaacttgctacaaataaacaagtcgctctaagcaatatctgataaagtatgttcatccttaagaaagattcaaacctaaaaggatctcccctcctatttttcccctcctatttttttaatataaactgtttagacttttcaatgaacttgattcagaaaaatttgcactatgaatataaataaactgaagagctagattaaaacaaattcctgattggaccttttttgtttatttcttacacttaaacacaaaacacacttgggaggagattatgtgataccagggatgtgtccgttttcatcaggcactggcttcccgttttgtttttctatttcctttgctggtatccagcactctgggacaggcttgaagtcttcctcagtgttccagtgaaactctgtaagacatgaaatacaaagctgacatacaaactggaaataacaaacccatcactcctcagatgtgctaagtcctctctgttatcactgccatgtaactacattccaaagtaggggactaactgtaaatacgcaacttttagtacactaccacgttgcacactaccgtctaaagtgccaaaattctctgaggatttatgagttttaatgtgctcactacttagtactttataagacctatacggatcagaatagataagtaatgaatgtgtatagtagagtcatcagtgaaataataaaaaatcttcatatttataacatgacttagaaaaatatttttatcatacaaacaaaatgaaaatatatctcaaataatactgtatgtttaaacagcatagattgttttccaatatttatgtgtgggcatgtgtccgccagattgcctctgtctgtcagagcactgtgttaattttttattcctaaaagtgattattttatatataagtaaatatatatgtatatatctatgtatgtgtgtatatatatgttgggagccgcccccacattcgccgtcacaagatggcgctgacatcctgtgttctaagtggtaaacaaataatctgcgcatgtgccaagggtattttacgactacttgtactctgcctttcccgtgaacgtcagctcggccatgggctgcagccaatcagggagtgatgcgtcctaggcgaaatataactctcctaaatagggaaggggtttcggtttcattattgaaggggctttcgcttttggggctgggggtttgcgctcctagctcctgaagatgtaagcaataaagttttgccgcagaagattctggtctgttgtgttcttcctggccgggcgtgagaacgctattaagaattggtgctgaaatccgggacgagaaaaaatccgggacgaaaaaatacaagaaaactcgggaccggcgcaaggaagatccctcattccagaaccagaactgcgggtcgcggtaataaaggttcccgtaaagcagactgttaagaaggattcaactgcatgaattcagaacttttcagctggggaacgagagtaccagtgagtacagctttacgaggtaagtctggtcttaaactttctaaggaaattcaagacagtctatcagaagtaaagtggggaatagctttacaaggtacgcctggccttgaactttctaacgaaattcaagacagtctatcagaagtaaagtggaaaatggctttgcaaggtatgtttggccttgaattttttctagtgttaggagcccttttgttccttttcacatgttatcaggtgattaaaatagggctgaaaattctggatgaaattcaggacaatctatcagaagtaaagcggggagagagaataggagcaaagagaaaatatggttcacaaaataagtatacaggcctttccaagggtcttgaacccgaggaaaagtttaggtcaggtaagaatacctggggagagattagaaggaaggagaaggaaaaagaaaagaaaaaagatcaattagaggagccagttcttagtagttctgaatcagatgaaaaggctattagggcctggaaggcgctctcccgagcaggtgaagccactggacaataatgacagaggcaggctcttgcagcctacaaggtcttattgtccaccctagagttgtagatcaagattataaaggggaacttcaggttctctgttcttgtcctcaagttgtcttttctatatcacaaggggacagaatagctcaactaataattttgccaagcctacatggctgttttttcttcctctggtattcctagagctgccagagagattggttctactggaaatgattctgattacttaataatgcctttagattgttgtcaaattttatctactcacgtaggggtaaaccctcgtggcgtcaggccattacaggtctgacaaatggatgtcacgcatatttcctcctttgagagaaatcaatatttacatgtttagataaaaagagatcacctccataccttaaatgattttcaaaagctgttgggagatattaattggctcagaccttttttaaagattccttccgctgagttaaggcctttgtttggtattttagaaggagatcctcatatctcctcccctaggactcttactctagctgctaaccaggccttacaaaaggtggaaaaagccttacagaatgcacaattacaacgtattgaggattcgcagcctttcagtttgtgtgtctttaagacagcacaattgccaaccgcagttttgtggcagaatgggccattgttgtggatccatccaaacgtatccccagctaaaataatagattggtatcctgatgcaattgcacagcttgcccttagaggcctaaaagcagcaatcacccactttgggcgaagtccatatcttttaattgtaccttataccgctgcacaggttcaaaccttggcagccacatctaatgattgggcagttttagttacctccttttcaggacaaatagataaccattatccaaaacatccaattttacagtttgcccaaaatcaatctgttgggtttccacaaataacagtaagaaacccacttaaaaatgggattgtggtatatactgatggatcaaaaactggcataggtgcctatgtggctaatggtaaagtggtatccaaacaatataatgaaaattcacctcaagtggtagaatgtttagtggttttagaagttttaaaaacctttttagaaccccttaatattgtgtcagattcctgttatgtggttaatgcagtaaatcttttagaagtggctggagtgattaagccttccagtagagttgccaatatttttcagcagatacaattagttttgttatctagaagatttcctgtttatattactcatgttagagcccattcaggcctacctggccccatggctctggaaaatgatttggcagataaggccactaaagtggtggctgctgccctatcatccccggtagaggctgcaagaaattttcataacaattttcatgtgacggctgaaacattacgcagtcgtttctccttgacaagaaaagaagcccgtgacattgttactcaatgtcaaagctgctgtgagttcttgccagttcctcatgtgggaattaacccacgcggtattcgacctctacaggtctggcaaatggatgttacacatgtttcttcctttggaaaacttcaatatctccatgtgtccattgacacatgttctggcatcatgtttgcttctccgttaaccggagaaaaagcctcacatgtgattcaacattgccttgaggcatggagtgcttgggggaaacccaaactccttaagactgataatggaccagcttatacgtctcaaaaattccagcagttctgccgtcagatggacgtgacccacctgactggacttccatacaaccctcaaggacagggtattgttgagcgtgcgcatcgcaccctcaaagcctatcttataaaacagaagaggggaacttttgaggagactttaccccgagcaccaagagtgtctgtgtctatggcactctttacactcaattttttaaatattgatgctcatggccatactgcggctgaacgtcattgttcagagccagataggcccaatgagatggttaaatggaaaaatgtccttgataataaatggtatggcccggatcctattttgataagatccaggggagctatttgtgttttcccacagaatgaagacaacccattttggataccagaaagactcacccgaaaaatccagactgaccaagggaatactgatgtccctcgtcttggtgatgtccagggcttcaataataaagagagagcagcgttgggggataatgtcgacatttccactcccaatgacggtgatgtataatgctcaagtattctcctgcttttttaccactaactaggaactgggtttggccttaattcagacagccttggctctgtctggacaggtccagatgactgacaccattaacactttgtcagcctcagtgactacagtcatagataaacaggcctcagctaatgtcaagatacagagaggtctcatgctggttaatcaactcatagatcttgtccagatacaactagatgtattatgacaaataactcagctgggatgtgaacaaaagtttccgggattgtgtgttatttccattcagtatgttaaatttactagggcagctaatttgtcaaaaagtctttttcagtatatgttacagaattggacggctgaatttgaacagatccttcgggaattgagacttcaggtcaactccacgcgcttggacctgtccctgaccaaaggattacccaattggatctcctcaacattttccttctttaaagaatgggtgggattgatattatttggagatacactttgctgtggattagtgttgcttctttggttggtctgtaagcttaaggcccaaactaggagagacaaggtggttattgcccaggcgcttgcaggactagaacatggagcttcccctgatatatctatgcttaggcaataggtcgctggccactcagctcttatatcccatgaggctagtctcattgcacgggatagagtgagtgtgcttcagcagcccgagagagttgcacggctaagcactgcaatagaagggctctgcggcataaaatgagcctattctagggagacatgtcatctttcaagaaggttgagtgttcaagtgtccttcccccaggaaaaacaacacgggaccagaccaggacccctctgggtgatgagcctgggaggaggttatgtgtacggctcctttacctacacactggggatttgacctctatctccactctcattaatatgggtggcctatttgctcttattaaaagaaaagggggagatgttgggagccgcccccacattcgccgtcacaagatggcgctgacatcctgtgttctaagtggtaaacaaataatctgcgcatgtgccaagggtattttacgactacttgtactctgcctttcccgtgaacgtcagctcggccatgggctgcagccaatcagggagtgatgcgtcctaggcgaaatataactctcctaaatagggaaggggtttcggtttcattattgaaggggctttcgcttttggggttgggggtttgcgctcctagctcctgaagatgtaagcaataaagttttgccgcagaagattctggtctgttgtgttcttcctggccgggcgtgagaacgcgtataagatatatatatatatatataatgactatatgatatataaaattatttttcccaaagatggaaattcaagatggatatacccagaagaaccatagccacaaaccacaaatttcaaccatttaaatctgaaaagtttaaacaacaacccactaaccttttgcactttcttttgaatgtagaaattttttaaatctcttgtcagcctgcttgttaggttttctatctagtcgagcccaaaggtatggctgacctgaaaatggagaaataaaaggaaaagtcaaaagaaaacaaagtttgtcttgaaagacatttcaaaattcaatcaaacaaaacaaaatagttttgttttttttctgtaagaaaaccaaggtccttgaaagacaagagaaacagtctccggtgtgcaggatggaggcctcatcccagtgtgagataggatgctcgtcctttgttaaataaagagggtgacaagaattcacaaccctttgatcagaatgctccctggtcccttcctaaaggagagtgagcatagccaggcgattgtactgacacataccctgaacattaccctgcagcatgggcttaattcaaggtcaagtcattacacacactggttttgtaatctggttgtaacagtgtgagggcactgtgccaatattccttattgctaaaagtgagacgtttgaattgcacctggcttccctgagacttctgcatagcttgctggtgctactgcttaggtagctggaagatctgtaggcaacaagtaaaaccagaaaattccacaactaagacttgacttcaagttcctgatcccagcagtggttcccacgctgagaaaaatgtgtcctgcgggacaaaagcaggataagagacagacttgccgtggcatttccaggtgctctgctcggagatagacttacttctgatatccttatttgattttgtatttattcacctgtcatctgagtcctgtgagcattcttgagcagtaaagctccaacagtaatttcacccatcatgcgcatcacacatatgaataagagcccgatagaacttacgccaatatataaatcagtttcataaaaattgttaattacaatcctattactagtcagccacatacataatataaagaactagataaaaactatagtttctggttgaataaaccttttgtgcttttcactggtaaacataaaaagtgtgcttcatacattatcattagtatggctactatcaccaatagtaataagaacagtcagagaatggatatagaaaaattggaatttctagaagcaagaacgtctagtgtgaccattatggaaaatgagtaacgggtactcagattttctaaatgaatattaacatatgatccagtaatcctatgtgaaggcagtacttcaggagacgaatctagcgctgtttgtttcattttccacaacggcaatccgcatgcccatcagtgactgaagtgaacaaaatgggctatgtatacaataagcaatcttaaaattatacatgatctgacatatgatttattccaatagggtaagacattgcactaagctaagagagtaagccagccacaaagaggccattcacatgtgttacctacagtcaaattaagagacaaagtttgggctaagaggctgagggttgggctctgtggagaggggaggtggatgagggagttcccagcaagcagttgaagttctggaagatggagtattctgcaggtgagtagtggggatggtaagatcatgtgaatgtccttaatgccagtgtgacacaccatttaaagtatagttccgatggtaaatctttctgtgtatcttatcacagtagaaaaaaagttttaaagtgcatttcagaacattccttgacaccaaggac

SEQ ID NO: 899868 - DNA, 109367 bp, Mus musculus
gtccttggtgtcaaggaatgttctgaaatgcactttaaaactttttttctactgtgataagatacacagaaagatttaccatcggaactatactttaaatggtgtgtcacactggcattaaggacattcacatgatcttaccatccccactactcacctgcagaatactccatcttccagaacttcaactgcttgctgggaactccctcatccacctcccctctccacagagcccaaccctcagcctcttagcccaaactttgtctcttaatttgactgtaggtaacacatgtgaatggcctctttgtggctggcttactctcttagcttagtgcaatgtcttaccctattggaataaatcatatgtcagatcatgtataattttaagattgcttattgtatacatagcccattttgttcacttcagtcactgatgggcatgcggattgccgttgtggaaaatgaaacaaacagcgctagattcgtctcctgaagtactgccttcacataggattactggatcatatgttaatattcatttagaaaatctgagtacccgttactcattttccataatggtcacactagacgttcttgcttctagaaattccaatttttctatatccattctctgactgttcttattactattggtgatagtagccatactaatgataatgtatgaagcacactttttatgtttaccagtgaaaagcacaaaaggtttattcaaccagaaactatagtttttatctagttctttatattatgtatgtggctgactagtaataggattgtaattaacaatttttatgaaactgatttatatattggcgtaagttctatcgggctcttattcatatgtgtgatgcgcatgatgggtgaaattactgttggagctttactgctcaagaatgctcacaggactcagatgacaggtgaataaatacaaaatcaaataaggatatcagaagtaagtctatctccgagcagagcacctggaaatgccacggcaagtctgtctcttatcctgcttttgtcccgcaggacacatttttctcagcgtgggaaccactgctgggatcaggaacttgaagtcaagtcttagttgtggaattttctggttttacttgttgcctacagatcttccagctacctaagcagtagcaccagcaagctatgcagaagtctcagggaagccaggtgcaattcaaacgtctcacttttagcaataaggaatattggcacagtgccctcacactgttacaaccagattacaaaaccagtgtgtgtaatgacttgaccttgaattaagcccatgctgcagggtaatgttcagggtatgtgtcagtacaatcgcctggctatgctcactctcctttaggaagggaccagggagcattctgatcaaagggttgtgaattcttgtcaccctctttatttaacaaaggacgagcatcctatctcacactgggatgaggcctccatcctgcacaccggagactgtttctcttgtctttcaaggaccttggttttcttacagaaaaaaaacaaaactattttgttttgtttgattgaattttgaaatgtctttcaagacaaactttgttttcttttgacttttccttttatttctccattttcaggtcagccatacctttgggctcgactagatagaaaacctaacaagcaggctgacaagagatttaaaaaatttctacattcaaaagaaagtgcaaaaggttagtgggttgttgtttaaacttttcagatttaaatggttgaaatttgtggtttgtggctatggttcttctgggtatatccatcttgaatttccatctttgggaaaaataattttatatatcatatagtcattatatatatatatatatatcttatacgcgttctcacgcccggccaggaagaacacaacagaccagaatcttctgcggcaaaactttattgcttacatcttcaggagctaggagcgcaaacccccaaccccaaaagcgaaagccccttcaataatgaaaccgaaaccccttccctatttaggagagttatatttcgcctaggacgcatcactccctgattggctgcagcccatggccgagctgacgttcacgggaaaggcagagtacaagtagtcgtaaaatacccttggcacatgcgcagattatttgtttaccacttagaacacaggatgtcagcgccatcttgtgacggcgaatgtgggggcggctcccaacatctcccccttttcttttaataagagcaaataggccacccatattaatgagagtggagatagaggtcaaatccccagtgtgtaggtaaaggagccgtacacataacctcctcccaggctcatcacccagaggggtcctggtctggtcccgtgttgtttttcctgggggaaggacacttgaacactcaaccttcttgaaagatgacatgtctccctagaataggctcattttatgccgcagagcccttctattgcagtgcttagccgtgcaactctctcgggctgctgaagcacactcactctatcccgtgcaatgagactagcctcatgggatataagagctgagtggccagcgacctattgcctaagcatagatatatcaggggaagctccatgttctagtcctgcaagcgcctgggcaataaccaccttgtctctcctagtttgggccttaagcttacagaccaaccaaagaagcaacactaatccacagcaaagtgtatctccaaataatatcaatcccacccattctttaaagaaggaaaatgttgaggagatccaattgggtaatcctttggtcagggacaggtccaagcgcgtggagttgacctgaagtctcaattcccgaaggatctgttcaaattcagccgtccaattctgtaacatatactgaaaaagactttttgacaaattagctgccctagtaaatttaacatactgaatggaaataacacacaatcccggaaacttttgttcacatcccagctgagttatttgtcataatacatctagttgtatctggacaagatctatgagttgattaaccagcatgagacctctctgtatcttgacattagctgaggcctgtttatctatgactgtagtcactgaggctgacaaagtgttaatggtgtcagtcatctggacctgtccagacagagccaaggctgtctgaattaaggccaaacccagttcctagttagtggtaaaaaagcaggagaatacttgagcattatacatcaccgtcattgggagtggaaatgtcgacattatcccccaacgctgctctctctttattattgaagccctggacatcaccaagacgagggacatcagtattcccttggtcagtctggatttttcgggtgagtctttctggtatccaaaatgggttgtcttcattctgtgggaaaacacaaatagctcccctggatcttatcaaaataggatccgggccataccatttattatcaaggacatttttccatttaaccatctcattgggcctatctggctctgaacaatgacgttcagccgcagtatggccatgagcatcaatatttaaaaaattgagtgtaaagagtgccatagacacagacactcttggtgctcggggtaaagtctcctcaaaagttcccctcttctgttttataagataggctttgagggtgcgatgcgcacgctcaacaataccctgtccttgagggttgtatggaagtccagtcaggtgggtcacgtccatctgacggcagaactgctggaatttttgagacgtataagctggtccattatcagtcttaaggagtttgggtttcccccaagcactccatgcctcaaggcaatgttgaatcacatgtgaggctttttctccggttaacggagaagcaaacatgatgccagaacatgtgtcaatggacacatggagatattgaagttttccaaaggaagaaacatgtgtaacatccatttgccagacctgtagaggtcgaataccgcgtgggttaattcccacatgaggaactggcaagaactcacagcagctttgacattgagtaacaatgtcacgggcttcttttcttgtcaaggagaaacgactgcgtaatgtttcagccgtcacatgaaaattgttatgaaaatttcttgcagcctctaccggggatgatagggcagcagccaccactttagtggccttatctgccaaatcattttccagagccatggggccaggtaggcctgaatgggctctaacatgagtaatataaacaggaaatcttctagataacaaaactaattgtatctgctgaaaaatattggcaactctactggaaggcttaatcactccagccacttctaaaagatttactgcattaaccacataacaggaatctgacacaatattaaggggttctaaaaaggtttttaaaacttctaaaaccactaaacattctaccacttgaggtgaattttcattatattgtttggataccactttaccattagccacataggcacctatgccagtttttgatccatcagtatataccacaatcccatttttaagtgggtttcttactgttatttgtggaaacccaacagattgattttgggcaaactgtaaaattggatgttttggataatggttatctatttgtcctgaaaaggaggtaactaaaactgcccaatcattagatgtggctgccaaggtttgaacctgtgcagcggtataaggtacaattaaaagatatggacttcgcccaaagtgggtgattgctgcttttaggcctctaagggcaagctgtgcaattgcatcaggataccaatctattattttagctggggatacgtttggatggatccacaacaatggcccattctgccacaaaactgcggttggcaattgtgctgtcttaaagacacacaaactgaaaggctgcgaatcctcaatacgttgtaattgtgcattctgtaaggctttttccaccttttgtaaggcctggttagcagctagagtaagagtcctaggggaggagatatgaggatctccttctaaaataccaaacaaaggccttaactcagcggaaggaatctttaaaaaaggtctgagccaattaatatctcccaacagcttttgaaaatcatttaaggtatggaggtgatctctttttatctaaacatgtaaatattgatttctctcaaaggaggaaatatgcgtgacatccatttgtcagacctgtaatggcctgacgccacgagggtttacccctacgtgagtagataaaatttgacaacaatctaaaggcattattaagtaatcagaatcatttccagtagaaccaatctctctggcagctctaggaataccagaggaagaaaaaacagccatgtaggcttggcaaaattattagttgagctattctgtccccttgtgatatagaaaagacaacttgaggacaagaacagagaacctgaagttcccctttataatcttgatctacaactctagggtggacaataagaccttgtaggctgcaagagcctgcctctgtcattattgtccagtggcttcacctgctcgggagagcgccttccaggccctaatagccttttcatctgattcagaactactaagaactggctcctctaattgatcttttttcttttctttttccttctccttccttctaatctctccccaggtattcttacctgacctaaacttttcctcgggttcaagacccttggaaaggcctgtatacttattttgtgaaccatattttctctttgctcctattctctctccccgctttacttctgatagattgtcctgaatttcatccagaattttcagccctattttaatcacctgataacatgtgaaaaggaacaaaagggctcctaacactagaaaaaattcaaggccaaacataccttgcaaagccattttccactttacttctgatagactgtcttgaatttcgttagaaagttcaaggccaggcgtaccttgtaaagctattccccactttacttctgatagactgtcttgaatttccttagaaagtttaagaccagacttacctcgtaaagctgtactcactggtactctcgttccccagctgaaaagttctgaattcatgcagttgaatccttcttaacagtctgctttacgggaacctttattaccgcgacccgcagttctggttctggaatgagggatcttccttgcgccggtcccgagttttcttgtattttttcgtcccggattttttctcgtcccggatttcagcaccaattcttaatagcgttctcacgcccggccaggaagaacacaacagaccagaatcttctgcggcaaaactttattgcttacatcttcaggagctaggagcgcaaacccccagccccaaaagcgaaagccccttcaataatgaaaccgaaaccccttccctatttaggagagttatatttcgcctaggacgcatcactccctgattggctgcagcccatggccgagctgacgttcacgggaaaggcagagtacaagtagtcgtaaaatacccttggcacatgcgcagattatttgtttaccacttagaacacaggatgtcagcgccatcttgtgacggcgaatgtgggggcggctcccaacatatatatacacacatacatagatatatacatatatatttacttatatataaaataatcacttttaggaataaaaaattaacacagtgctctgacagacagaggcaatctggcggacacatgcccacacataaatattggaaaacaatctatgctgtttaaacatacagtattatttgagatatattttcattttgtttgtatgataaaaatatttttctaagtcatgttataaatatgaagattttttattatttcactgatgactctactatacacattcattacttatctattctgatccgtataggtcttataaagtactaagtagtgagcacattaaaactcataaatcctcagagaattttggcactttagacggtagtgtgcaacgtggtagtgtactaaaagttgcgtatttacagttagtcccctactttggaatgtagttacatggcagtgataacagagaggacttagcacatctgaggagtgatgggtttgttatttccagtttgtatgtcagctttgtatttcatgtcttacagagtttcactggaacactgaggaagacttcaagcctgtcccagagtgctggataccagcaaaggaaatagaaaaacaaaacgggaagccagtgcctgatgaaaacggacacatccctggtatcacataatctcctcccaagtgtgttttgtgtttaagtgtaagaaataaacaaaaaaggtccaatcaggaatttgttttaatctagctcttcagtttatttatattcatagtgcaaatttttctgaatcaagttcattgaaaagtctaaacagtttatattaaaaaaataggaggggaaaaataggaggggagatccttttaggtttgaatctttcttaaggatgaacatactttatcagatattgcttagagcgacttgtttatttgtagcaagttttctgtattgagggaccttattctatcaaaaaagtaacaaacaggaaatcagtaaactgtcgactggagtgtgactggaacagtggtctaaactggaacacttgctgtatctatttgttgtcttggatactagagagaaactcacttcattaaatgaaaaaagttgtcgggcggtggtggcgagtgcctttaatctcagcacttagggaggcagaggcaggtggatttctgagttcaaggccagcctggtctacagagtgagttccaggacagccagggctacacagagaaaccctgtctcgggggaaaaaaaaaagaaaaaagttttgacaatactaggcagttaaaaaagatgctaaagcttttttaaaagacgaaagaaaacagtttaatgctgtctcagtatagtgttcagttgctcctgaagcaagatgagttttttgaagaatatgttcaattcatgtgaatacccaacaggatacacaaatgaatactttacgattataacaaaaatagtaaacctgttaacttcctcactgattatcaatgtctgtgtgataagggaatctagaaaagaagtaatgattataaccaaaaaaaaaaaaaaaagaccaagtctgctgtatcttttaaaagaaccagtgaaccaatgtgataataatttcttctttaccaggttgggtaccagtagagaagggcagcaagcaatattgctggcactcgtcggtagtgaattacgagtttggaattgccctggtactaaggcaccatcctgatgatcccggggttttggaaattagtgctgttcccctgtcagagcttttagagcaaaccctggagctgataggcacgagtatcaatggaaacccctatggtaagtgaaggcattcgttataaagtcctaaagtcaagttaagcatactgaagagctaactaacacatttgtgtccatttgctaggagcacatctgtctccgcaaatcttatgttcatgggaaaatttatatatggctaatcattgggtttattaatgcaaaaggttgattttatcccattctcctgccccgtgatagctttatcaactgtgcatgaaaaggaatcactgagatgcagctgggtgaaaaggtgctgtcccctgtcaggtcattaataaatagaggcaagagtacgaattggcaacatactgtatccagcatcagaatgcaggccataattaattgagtcagtcagtggcattctggagtacagagttgaaagaagagtcataaaatagaataaagacactaaagctataacaacagttctagagagagcaaaagcagagtgaagttagcgggaagtggcccagtccataagagtttggatccctcacacccatgttaaaagctgggcacagcgttgcatgcctgtagtccaggagccagcgaggtatacataagaggttctctgggcctcgcagtgtatccagtatagcctagtcattgagcctcaggtacatcaagacacccttttttcaaaatacacggagaaagcaatagaagatacccagtactgatctactgtctccataatgcaggctgcaaacatgcacacacctgtactccacaaaaacaggtatgcagacaaaaactgaagtatgtctgggtgatgggtactaagcttacctatagaatcaaagtcgacattaggtaaacgtggagtaaaagcagagtgtagctaatgatataacacatgctatcaagatttttttatgtaaacaatgtttgatagccaatctttgaagctttattggccgccatatcttgagatggactatcagcagtacttctatgaattgataaggctgcatcttccagtgaaactacttaccatggatgcctgtctggacttggtccacaggtcggtgccccgacgctcagtgtagagagtacatgaaagtgaatttagagtttttggaagaagtaccacacttgagtgagaaaaggacttcctgcacactacagagaatctaactttttgttaacattattcctaaatgcttagacgtttatacacttggcaagatacattttctcactctttctgaaaagaaggtgactgaacatgttttttagtttctgtttttgattttgaaaattttaccatttagggctgggaagcaagaaatccccgttacattttctcacaccacacggagcattccaggtcagaaatctgcccacactgaaacacaatgacctgctgtcctggtttgaagactgcagagagggtcaaattgaagggattgtgtggcattgcggtgacggctgtttaattaaggtaatgacaagaaacaacttaagtttgttcttaaaggtgtggtactcagtttctctgtccaggttgtattatttctggcatgcagttagtatattaaccccattccgtatgccatcaggctaaaacagtcaagtttatgggacgtgtcaggctgacgacggtgttcagcctggcactgtctatgtcagatgagcttctgagttagtgataacacagtcagtccctcctgggaactcagggggcacattagttctctgaggcatgctgtgtctagcgtaactcagcacttcctaaacgaacttagagactgttgagcagaaagtgcccagtggtaggttacagagtgagttaccttacccttgtgccccgtcccctcaacttgtctgatttctcactggtatatgaaatttataatgttcaaatctgagtttaagcactcccatctccacattattcactgaaatcagaagcctgcattcgttgtctatgtcctcttgccattccttcatacatctggtaaccagttcttcaaaggtctcatctattgaatctctgttctttatatccaactaggtgctcactttaatttaggccagtatacagtggcttgaattatcctatcacaccctaaagcactcatctttcatttctactctgcttgtgttcagtcttcacaactgacttattacttcctgcgtaatgctgttcaggtatgataagacgtgccacgctacagccccttcttatctccccatcaccactcctttaccatctgagaaaacacactgtctggttgttgtgtgactgtttagttctagggagatatacacgaatgcctacttcccacagacacaggtactgaggacagacccagtagtgaaccagggactttactggggttacttacaggaatatgggtaggtagctgcttacaaggagcaatgtggacccaaaggctgcagcatcagtaaaaagccctcccagcttgagtgatgactcacgaaagcagcatcctggggactcctggggactcctgcacattgtgcaggctgctcccagcccctcaattgtgaccttgcagaaagttttgggaatgttgagctttagcgcctgtcttagtcagggtttctattcctgcacaaacatcgtgaccaagaagcaaggtggggaggaaagggtttattcagcttacacttccacattgctgttcattaccaaggaagtcaggactggaactcaagcaggtcagaaagcaggagctgatgcagaggccatggagggatggtccttactggcttgcttcccttggcttgctcagcctgctctcttatagaaccaagactaccagcccagagatggtcccacccacaaggggcctttccccccttgatcactaattgagaaaatgccttacagctggatctcatggaggcatttcctcaactgaagctcctttctctatgataactccagcctgtgtcaagttgacacaaaactagccagtacagtgagacgtgtgaagtttgtttactttctgggtcttaaagaggctccatctagagtgcttgttttcatgtggaggaaacagctacccagcaacgtcctaaccaactgtgatcccagactaccctaccattctgccactaacattcctttggtgacactagagtcaggctcacacttactttttctgtagtcactaacagactatattcattatgttactggcacttttcaggtattggcagagtaaacaaaacatttgctctgccttcaggaagctcatatcccaatggggaagacagacagcactgtcaaaagagcagctatggaactgaactagaatgagaaaaggtagacccttacagtggacctggcaggtagcagtattcacaagtataagttacgatgctgttttcgactaaagttaataccatcatttttttctccttacaggtccatcgtcaccatcttggtttatgctggccacttccagatacttacatgaattccaaaccagttattattaacatgaacctgaacctgaacaattatgactgtgcttttgataaccagtctttgtttaatcagttttcaaaaatagataaacagaaatttgagagactcaaagacataatacttgatgtataaaatggaactaattgttgagattattgtgattttctaagactgaatagtttgcatttaattttgctagctgtttggcaaaacctgtcaacttctaaacatgtttctaggtatttatagaaatcatcgttaggatttgactatcttaacacaaaaataaatataaaataatcaattttaaatagtaaattgatataagcttacctttatgctttttgaaaatttaagttattatgaaaatagtaatatttatcatagctcattgtgcactgtatagtcataaattaatgaagtcttcaaaaatatacttttctaacaagttaaaactaaatatgatttttttaaacaaaaaaaatacaatattttgagctgtaaattctataacacagagactgcttgatttccagctgaaacttttttcactcataaaatagttttaaacctgcagttacacgagggcactaataaatagggaaactatgaggactttctccatcttccgagtgttcagaagcagcaagaggactaggcagttcaaatccaaactgttccgacagtttttttagcttctcttctaataggatattctttttcacttcttccttataattatacttcaggtcttcaatttcttcaaaaaatgaaggatcaaaattttccagttcttttttcagctttttaacttcctcctaaaagttacatacaggatacatgtttttggtttgaaattttagatttaattataaacataaaaactcaaaatcttaaatgtaaatatttttctttatattttactgttcaaggttccgttgtaccatgtgaataatgtagaagctgccatctttagctaaattataagattaaatctttaaactgcctcagatattcccaggcaagcgaaagggactttgcttttttacaacaacattcaagagttttcagtatttataatgttctaattttttatcttttatatataatacttatgatcatgggaaccctgggacttggaaaggttaagcacctggtgaagtgcatgcttacagcatctacacagaccagtgacgagcagccagaccactaaatgatttaagggaaagatccctgaaaataatttcaaaagggacttagaaaacactttccccaccatgacccacaaattaagaaaatagtttaaaaaaactattaagagatgtgcattggttacaatttaaaaataaatttattctctagtactttctgtttgtctgattttttgctgttgatagttgtttaataaaaagttgtcatgagtcaaataataagtgtgaaataaatccatgaattttgggttatacacttaaagatggtgatcataaaaattatttcccaaagctgttttcacaaaacactgagcatactaaagttagacaccaatacgaattaccttcgaatgttgcttttctagctccaactttctgagttgtgtctccaggtcatttatcttttcctttagttgatcagaatctgccaaaatagtcaggaaaattatgacttatgtttttctttactgtgagtgagttaaagatagaggatttgtttcagaataaacaggaaacatgaaagcgaaggtctgcatcatctggcactgtatggtgggaagacttcgcatgcaaactgcatggccatgactcagcaagtaaggtagctgccagctatcagaaatgtgggctattctttttttatatgagaggaattcttatttttgagagaaaaaccttgcaaccagtaaatttgttaggtactatgtatacaggcaacgaattaaaatgctaagctggccacttatgccttcacaccacatagctttggctactgtgtgtaaggtttttttttacactttacgccaaacatctaagactacgtgtggcacagatgaagttgtggaggaggaatcagcacacaggttaatagacagtgtcctgccactccatgcagtctttgaaaggtaaagagttttgttttaatgttcgagtttgatgaactaaggaaagcgagttttcatggtaaggacgggaagtgtactggagtgctctggggtgtcctctatcactcagagactggacaaacaagcagggttccaaataaacaacaatgcattttccttttagaggcaaaaaaaaaaataatgttccccttctatttctatgtcatatgtcatgtaaatctcaattctacagatgaagaaaagataaactatttgtcttcctgagagttaaggtgatctgtagtcacattttcctacagatatttttatgacttaataaaactctcctatatatatgtaccacattttatctcagtgcatctgttgatggacacagtggctgattctatttacctgagtgccctagtaaacatgattagtatgtatatatttcttagtttgatcctagtcattgagatcttatacacactgttggtgaaaaattgcatgaagaaaataggtacaacatattctgaaagttctgaatggtcctcatctttaaatgttgatttgggaacatccaaacggattgattttgacacaggtattctctgaaatgcggtaatctgctcgccttccttcactcacaacagatacaatacaaaggcttgggattggacaagctggagaacctcctaatgcatcaagaagtctctggtactgcgttcagagcacaccaagctagcgctcacacgagttccctcccagtggatgaacactggtttcaggtatcagaaagcacaggagcacagggcttaagaccgtggttggctcagagttaatgcttgcccttcccatgccactttccattggtcctgagcttgaggacaggttattgcactggctggttttgggtcaacttgacacagctgtagttatcatagagaaaggagcttcaggtgaggaaatgcctccatgagatccagctgtaaggcattttctcaattagtgatcatgagtatagggtccatggtgggtggtgccacccctgggctgatagtcttgggttctataagaaagcaagctgagcaagcctggggaagcaagtcagtaagtaacatccctccatgacctctgcatcagctcctgcttcctgacctgcttgagttccagtcctgacttcctttggtgatgaacagcagtgtggaagtgtaagctgaataaaccctttcctctccaacttgcttcttggtcatgatgtttgtgcaggaatagaaaccctaactaagacagttattaatcatttattaaatataaaataaagacaacaatactgatcctatgatattctaagaataaagtaaaaatgttgcaaatcccttgtgcctggaacaaatcatatcacacattaatacaatgtagcatcaggactcttcaggagctctatgaatagtttaaaatggttcagaatataaaattggtataattctgttgggtaaaacatgacacttcatcaactatcagataatggatggcatggttaggttaggaggtacagtgtagttatgccagaagcgttagaactgtgctaagcatatatcctgaggtaaactgctcactggtacccattcactagcatactatggaactattaaagacatgactaatgtacagatcttaagaggtctctgtagtaagttaagggcagctggaattatagtgtgcatccagaaaaatacacaaaattcaatatacatataaggtctattccctttttaaaaatgatatcctataaacttggtagaaaacaattagcaagtagatgtatcgtaggacaaatgaaaatatattcataaatatatattctcaaattgtcatcttagattttacaaacaacttatcctcattatatattctttagtttcaaaagaaaatgttcagtggtcttaagccactgaggttgtcccattaaaagtgtcagagctaggattcaatctctaactggttatacaggtacccagtactccaagataggtcacctctatatgaaaactgaatgccaagagctaacttgttatccctgggatgggaatataggaaactagttaaacttgtcactgtgcctttttgcaaaaacaccatgagttgacttgagggattataaatatactgtgatgaacatttgcaaatacagacctgcaaatagttaaaaacaatattatgtatgtaagcacacatacaaaaaaatgtttgtatgtaattatgtgttatacagggaattgactgctaacttctgactaggaatggaagtaaataaaaagcaaagttttattttataacaaaataatacaagtactttttaaattactaaactaatattaagagaaaatgttaataggaacttaaggaagtatacttcgaaactagaggcaaacaacaacattcattgcttgataacatactatgattatgttttaacacctagatggattacaaggagacaaacaggccacgtaggagtctgataaatgggaatattttcatagcctgcatgtggggctattcagaacatttagaagagctctgaatgctcctatggggtacttgacactaatgaaaacaatgatcagagacactagacacaagcaagtcaaaaatttgggggagtcaacaaattttatgaaatacattaccaggtatgctactgtcagctctggtttggtccttgttaatttctatctgatggattaattctgccctttctttatccatctgattattggctaatctagaatacaatgatagcatgttagaaaagaaacaataggggcagctctatacaggacataggcaattcctatagagtggcggtaaaggttactcagctcagggttctggtggtgtgtgctggttaccatagcccgaagaggtggcatagggtcatcaaggtaaatatttactctctgggtttcaatgctgccaattcccaaacaacacgaaatctaagttttactatcagtcctgatattattttcaagagtagttttcttacgataaaagactgcagaaattcctagaagcatagaattatgacttgcttctggactgctaaggttcaactctatgctactagagaagtttgaactcggttacaacaggatactgtaatttacaccagtactgactagtgtaaatactaggattgggatcccaccccctttctgttcccagaaacaggatgaaatgataataaagttggaaaaaccctagtctttaagaatagaagcctggctatatcaaacaattttctaaaaataaataaatggtcaggtggctctctctctctctctctctctctcacacacacacacacacacacacacacacacagacagacacacacacatgatggtaaagcattttaagtagtcgaacataatgtatgtacctaagaagctggagttcccgtataagctcttgctctgtctcggcaccttcaggaacatttttgaggatctcaatctttgagcagaacagaaaattaaagctaaaagttcatcatggaaataagatgttttagagagatgagctttaataaggtataagatctgggtttttggaggcatgaaataaccacagttctgtgctctagtctatgcactcaagccatcaattctcgagcaacaggctactgcatgcccaggcacgtcctagtaatgaggatgcagcatagagaagaactggaatctcttacagactctctgtgtttttactgagggaggacagtagtgatactgtgataggatgcaacacatcaggatagggagaaaaataatctaggaaggacagggtgctcaaatagggtctctggagagcctcaatttaaggaaagaggagttcacaggtcagctacatggattctgggaatggtgactagtgttctagacaaagcaaccaggtataaagctctgaagcttgactgagtttcagttgttcaaaggtttgagagggttaatgttgggaaagccaacattaacatgggtagacgatgcaaaatgttagatacttgtccatagatacaggctatgaaaagagctgtattccagggaccaattaggaaattgctgcagtcattcattgtgaggtaatggcttccacagtgaacagtactcagacttggaagtactttaaaagtacacctggcatggttcatgatgaggatgtagactgagagcaggaagtcagtgatgacccagcttgtggcttacacatacacacacgtgagtgggagcaagtatgattcagtggattagtctcctaggggagccagccatcactgtaggagggttttttgtttttttttttttttttttttttttttcaccttcaggcaattcagggattgtcgagctatattacattgttttatcatttaaagactattacatgcctgttgttcaaggtcttcagtgtatttcttagctttctgttctctctctgttgcttctcttacaagctgtttaaggtcagtgatactttgattctttttggcaatgtcactttcaagctctttcatcttggtctcatacactctaaaaagatgaagaaaaagtattacgggcattataagcaattcctctcactaatttaaaagtccacttaaatcacagtaatatatgcaaggcaatgtacatagtacttctagtcaaacctctggctatgtatttagcattaaaagatgctgttaagggatacacagcctagttaacatgtacaaattaaaacagaatattaaagtaatcctatggggattaagatcaggggtgagggctgaatttggcaactgtaaagcttttaggttgatattttatttcaggcataagaaaatacctaatccatcagtttacaaacatctctcccacttccagcacccttccctaccgcagcaggtatttaggcagaaacagctgtaagggacactgcagaaatcacaagctgttcagagctcacctgagaggagcagtgcatgccatgggttatagggagcaacactgatatgacaaatggcctaacaacatcaatcacgagaaatcttcaaagtttgagccaaacagttttacaggcatatacttacaggaagataatgtttactgtattcaaacatttctgaaggaaaattttatgtactgtcttccgaatcaattaaaaaaggaaggtattgctatagaagagtatctggcagtgacagcataaggaagggcaggtatgattccgtaaacactttcaaacaatttggacagagcttacgctccgattagaagagtgtgcttacttgacaaggactaacgagcagagatatcccaaaggttaatgtgaaatatcagaagctacttcaaccatttctatgttcaaaagccactctggtggtttgaatgagaatgcctgcctccaaccccctcccatagactcatgtatttgagtgcttggccactagagagtagaactctttgaagggattagaaggattaggagatatggcctggttggcagaagttgtgccactggggggtggacttctaggtatggaaagcccttgctaggtccagccttgtccgtatgctgcctacagatcaggatctgcatcctgatccccagctattgctctagcaccttgtgtaccatcatgctccctgccatgatgataatgaacgaagcctagacactataaacaaggccccatttaaatgcttttataagaactgccttgttcatgtcgtcttctcacagcaacagaataataactaagaaagccacctaaagaccttctttattgcattattccacctagctagcccatacattaaccttgctcctccttgtcattccttctaggctccactctacagttacctggcaatggataggtatgcctggcttattataaaaggggttttctgcctccttcctttcaaacttactctctgtcctttctctccttaacccctttctccctcccccatatctctccacttgttcctggctagcctctcttttcccttttcccttgccttccctcttcccttcctttccctcttcccttcccttccctccccttcccttcccttccctctttcctgcccttccctcttcccttcccttccccctcctctcccctcccctatcttcttcccttccccctgccccctccccgcctctccctctctctcctcccttcccaacttcacttcccatgctctaaataaactctgttccatactgcatccatcataatgactgctacctcaggggaagggatgtctcagcatgggcccgcagaggtatcccttccacctcacattactgcacctctatcaaacatccttggctctttctcttttttataaagcacaacatgcttagaggtaaatataggtggggcacttggaagggcatggcagagtttgaggtcagccttggatacacccaagactgaaataaaaacaagcaggagttatgtttcctgaagatgttgtcattgtgcagaagaagaaccaagtgatttaacatgtaaactcatcttcaatcaaggttaaatagtgccatcaatccacaactgacttaaagctgaatagtctttctatgccagtaagtaatctatagaaaaataagggcagggtctaccatctccacagttaaaggtatcttgacccacgaagggatatcatctatgtaatatcacagtgaaaagcaagtttttctaacagatggaagctggttttttgtttttgtttttttggcttttagagacagggtttctctgtgtagccctggctgtcctggaactcactttgtagaccaggctggcctcgaattcagaaatccacctgcctctgcctcccaagtgctgggattaaaggcgtgcaccaccacgcccagctggaagctggttcttaaagcatcctaagtaagactggactttctagaaagtctctgaagcacacacagtgtggtaatagcagatgttgaatgaatatttgtggaaaaagtaaatctcaaagccactcaacacatgtcacaacataagaagagtgaccccagacaatcaactgacaactgataactgctggctcaaagccacagggtccaagatgatcctttcctccccttcacgctgttccacttgttcctccatacctacacaagcactctgacagaagccttgtctgtagacgagaaagtgagagatacaggggaaagtctggaactctgactcatccactctcgggtaggagaggaaaaggattcttctccagaattagagccatctctctgaatgttctcaattctgcttgcttagctctgtctcttcttaaatttggctgagagaggcaaatgcaacacaagagccacaatggagccaggggtctcagtgctacagctcacattttcattggcatgataatgggtgtcatgttaattcctgtcatgtcaatccaaatagggcaaatatggcctactagggcatcagggaggaatacacaaatgtgcaaatacggtgaagtaaagttagctttcatagagacaacagtgagtgccatagacacaaatccaatatacttatagaaaacattcaaaggatgggagaaaatgaatcggaaagtagaggcgaataagacactaacatggctgctgtattcatatactgggttctctgtaaagaaagtttcccagtatacaaaaaaggcaatgcagcttattccagatacagtataaaatatccagttgcttaggccatatctgcatcagaaataaataactccaatcaagaacctggcgttggagcttcagaaacagcatctagaagaagctgggcagcatcagcctcagcccaaggccagcagcaacttcatgatgcacatgtatcactaggtaatcagcgcaatcacaggtttgcgatgttctgcaatcttccaagaaagctagctaaccacactagctaggaaagagtcttggtaatgatagggcagaatgcagagacactgataaacaaccaaactgtccatcaggaaaaaactaggttatccagcagatggtcaactttgaaggattgatgctacagttagaactgataaacctgtccaaatttgaaactgtctgatcctaccttgagaccacaattgacttccagctcttgctgtcagcaccttccagctgtggggctctactttctgcaaactgtagtctcttcccagtttcttcgagttgagctgccatcttgtcgttcaccagctctaagttgttcttagctatccgcagtttctcagaggcttctatttcctatccgtgaacatttattaattagtaaattaggacaaagcataatactgttctcatagatgtcaggtatttaaaattatcactaaaggctggaaatcataaaacaagctgtgctgttttaaaattgcaaaaatatttgttttgtctaaaacagcaatctattcatagtaactagcacaaaagataaattaagtgaaggcacagaaatgtatgtagaagtacttattatctaaagtatctaagggctactctaaagttgtcatttgcttctcatgaaaaatgttcagaaaagcgacacagttaatcttgctacaccttaaaggatgctttgttttgactctgtaatacaagcaccatgtatgtcacaggttatttccagaaatgattcaagagagtacagctctggcttcacagtacaatgagttactgttaaaagttttaaggattataatttcaattcattcattaggtaatacatgttaaaaattatacctatttgtcaggagtaaggaatatactgtattatttaaatagaaatgaatcttactaacaaaatggttatgttctttgctctataaattggacattgatctaagtcatatgcataaatattaactcatttaaatttctcaacatctctgtgagacatataatatgtgtatagatttcttttttgagatagattctctatgtagcctaggctggtctctccttcttccagactgagtgctggaataccaggtgctcaattccatgaccagctaagagatatgtatatttactactcccaatttcatataggagggatttgaggaacagaaagacattatccaactttgaacaatccccagtatgtagagctaagaacataaaccacccggtcctaaattttcatataaatgaatctcttaatcaatgtgagttctcttaatatgtatgtgaatagacactggtgtcaaagatctatcaattttgatttttgacaaggtatgtcagttaataaaaataaatgtaatacgtcataatcgtcttactttcttaagttctttccgaagccgttcattttcggcaacaattttctcagtacctttgttcttagattcaaactgcatactcaactgacgtccaaagtgagctttaagcttttctagttcagcctggtagtgatgaagcaacatatcaaaatgaaaacatcaagaaaagatcattgtttatacaaaatcatatacacaagcaacgattttaatggactttgcaagttgtagctatgtctttatgcatgtttatatgtaactgataaaggaaaggaggtgatccatgtgaaaggaggtgaggtgggggcatgggaggtgacaggggagcaaaggaaaatgactaatgatgcagatctagtttacttctcttaaatgtaaacataaagattattatttaaactcataaaacttaagctaggtagtttttgaaacctcatttgacttgactaaaattaaagactcccccaaacttgttatttataaccaaagttcctattcaaccttggctattcattagaatgagttttaagattaaaaggaaatataggaacccccacagcatcccaacttagcaaatcaaatctgaaatagacacatgtaattactctatcacagaaaaggacaactggtttagaaacagcagagatgaacagacccactctgcagcgaccattagattgcttgccaatcaatctgttcacggtgtaaaataacagtgcgtccattgaggacattccatgtactgtgagcacacttaacacttccctgaaaaagcaatgcaaattaaaacaggaaagcattcatataaaatgaacacataaaattacctttaagtttctattttcttcctcaatagtagccattttttcactagtcagtattcctgatgcctttttcaattgttcattttctctttggactttttcaactactttcttcattaacccaatggttttttctagttctgggattgtcttcccacttctaccagcctacaaaacaaaaaacaaaaaaacaaaaacaaaaaaaattttttttaaaagtagtatcttagagattatgatgtactaataatgccaaaacgggtctaattttgtactcatctttaataattcctaatatttgattctaaagattgtgttaaattcattgtttttaatagctgtgtactattccattgtgtaaatgtacattttctgtatccatccctctgttgaggggcatctgggctctttccagcttctggctattacaaataaggctgctataaacatagtggagcatgtgtccttattacaagttggagcatcttctgggaatatgcccaggagaggtattactggatcctgcagtactactatgtccaattttctgatgaaccgccagcctgatttccagaagctggttgtaccagcttgcaatccctccaacaatggaggagtgttcctctttctccacatcctcaccagcatctgctgtcacctgagtttttgatcttagccattctgactagtgtgaggtggaatctcctaagtgaggtaccaatcacaaaagaacacacatggtatgcactcactgataagtggatattagcccagaagctcggaacacccaagatacaatttgcaaaacacatgaaactcaagaagaaggaagaccaaagagtggatactttgatccttcttagaagggggactaaaatacccatggaaggagttacagagacaaagtatagaacaaagactgaaggaaggaccatccagagactgccccattggggatccattacataaacaaacaccaaacccaaactactgtagatgcaaacaaggttttgctgacaggagcctgatatagctgcctcctgagaggctcggccagtgcctggcaaatacagaagtggatgctcacagccatccattgaatggagcacagggtccccaatgaaggagctaaagaaagtacccagggagctgaaggggtttgcagccccataggaggaacaacaacatgaactaaccagtacccccagagctccctgagactaaaccaccaaccaaagaaaacacatggtgggactcatggctttagctgcatatgtagcagaggatggcctagtaggtcatcaatgagaggagaggcccttggttctgtgaaggttcaatgccccagtataggcgaatgctagggccaggaagcaggagtgggtgggttgggaagcagggattggggggggaggggggggaattttcggaggggaaactaggaaagggaataacatttgaaatgtaaataagaaaatatctaagaaagaaagaaaaaaaagattgtgttaatttcttttttttgttgttcttttttttttttttgagacagggtttctctgtatagccctggctatcctggaactcactttgtagaccaggctggcctcgaactcaaaaatccacctgcctctgcctcccgagtgctgggattaaaggcatgcgccaccatgcctggcttttttcggcactagttgcttaaggacattcactcacccctctgacctgaccaagcttccgctcaagttccagttttcctttcttaagaaattcacacatttccttcaaatctttcacttgattctaaaaggtaaaagaaaataacagcaatctgttataacaatatgatagctcctgaaaaaaagaggaaaaaattaaattaacaactcaactacagaaccaaacaattgtgtctttaaacaaaagaaattttgataaaagatgtgtgctggatttctgtcagctagacacatgctagaggaaactcagagcaggaacctcaattgagaaaaaaatgcctccctattatcaggctacaggtctgtggtgtctttttgtgatgcaagattgatgtggaagattccagctcactgtgggtgtccttgggcaggtggtcctgagctgtagaagaaagcaggccaaggaagtcctgaagagcaaacccgtaggagttttcctccttggtctctgcatcagccctgtcctccaggtccctgccctgatcaaccttgatgggctgtgatgcagaagtttaaaatgaataaatccttccttccccaagttgcttttggtcatgtttaagacaatagaaccctaactaacacaacatggtagataaagagtattagtataaaaacaataactatttttcaaactactaccttaatacactacaaaacttaggcttctcagtgtgactttgctgtgccataacgtacataccttgatacttatctttctggtagacagaaaaagaactgaagacactgctctggttactaggtgtatcaatcacaatgaaaagcagtaagtgcaattgtatcactaccagtggaaatgacagaatgctaatgttcttgattataaaataagtctgaaacaatcagctagcaaagaggaaagctgtaaccataacagggtaagatataaaaagtcaaaggtagacattaacatcagaagtaatacttctagagtcacacttcgatcgtagttagtacaattactaatggaatgtaagaaataatcgccttaccttggaacacatgaagctgacacttccattctcactgtcagtatgactcacctcctatttgtccactaagtcttcaatgcgaaccctctcatgatcctaagccagacctcccctcttcccttttgtaatggggcttcctcttttcccatagcattctgtgtcggctaaactcttacaatgtaacctggttgcttgtggttgggaatctccctcattggaagacaagttttattagctgtggactttaactgactgccttctctagcaccttaaagcatatctgacacaaagtagagaactcaataaataactcttatatatcaggaaatggatataacatcacaaagatgtcacgtatatgcaattcagaaagtaatataagaaaacttaagtatgtgacgaatttggtgaatttggtgaattcaggcattataataaagtcaagtttacctttagtcttggcaaatctttatttgcttgttcaagttgaaatttcagctcgatgttttcagatgacaacttcaaattttccttctgaagttcttgttctttttgacagtgatcatctgactctatttctgaagtctggaaagtaatatttagagtatgttcaacatttaataaaagcaacaaagacatactgaataaggaaacattgtcaaaagtgaaatttctaaaaggaatgtgcggagaaaattgcaagtattacataaaatcaaaaccaagttaaaacacattagaaaacttccagaaaggtcatttttaaaaattaaaacagaaagcaaagtcaatatggtttaaaaatctatgcatacagtgacttcacagacactcccataatgtttaaactttcctatactcgttttgttagttcaaaataaaggttattcaagttgtgagggttggaattacccctcaaccctaattcctaactctcagcatctcagatgtgatcttatttgctttacagagataatcaagttaaaaggaggtcattagagtcaaccctggttgaggaagatcggttcctatgcaaggaggaaatcagagaatttggacagagatatgcattgtaggaagataatattaagagacttcacactatccttcttctaagtaaagaaacatgaacacgttttcttagattaattgtagagtagatggtcgcctaagtggcaagcctcggatctgattttcatctcagtcttcagaaagcaacaacactgcagcagctgggcttcgggcactctgttcacaggacagtagacagtaggcttctgctacttaagggacatttataggcaagtgtttcttagtatccaaagaaaacgggctccaggacacttcccttctacttctatgggggtttactaccactaaataaaatagcatgcatgtatctaatttaaatatattttccatatacttcaaatcatggtgagattgtttatacctaatatattataaaagcaatataaataactattataagcttgtttacagaatatatagtatacagaataaaaaggcaaactagaaagtctgtatacatttactgaagacctatttttcccccaaatattttctattgttgcttgaaacttagatgcagacttatcaacatagaaggaggctgtactctgtgactcaggcatagataaccatctcattttcttcttccagaaggcattcacaagtttgagatacagttaccaatttttgtcctctgaaatgaattaaacactgtatttgcattttttcttggcattaatctcccatgggttactatttatgctaattttttgatgctaaggaggatgttttttgacggaggttttgaaatgagtaggctgataggctggcccatcagaatgttaggatgctttaggactgctgtgtatataacagacgttgtaccagttgtcagcatggctctggctctttctcaccagcgccctactagctcagcaggctatgaagccaggacctccctagatgctctgcttaaaataatattgtagaaatagaccttagactttctttataacatatctcaaattattaaaattataccatataatacatatttgaagtgaagataaaaaaggaataaaaaggatacaaagctaaagacattctggatagatctttgctgctgttgagacaaaggacactggcaagaaggcagccctgggtgtgatttgttgttgtttgaaggatacaaatggaatggcaagaaagaaagcaatgttttgtgacaggcatagcccacaatgagaagcaggtccccgcctattcacatggcctgagcacgtatgcaggttctttcagtcttaggatctttactacaatgcaagtcctgcaatttacaaagccgacacctttagcatctgcaatgatttttaaagtctccatcagacatggaaatctttgaatctgttttttaacattttttcttcttttagtttgtctattttatctctggtactgttatgatctgcctaatgatatcagtatcaatgactgcttaataacaaaggattaaatatgacttataggaaagaatatatctgaagatttcccaaggaggcattttaacatatttctcatctaattatgaatgtatttactatataagagatttgtaactttttcctgttattttctgaaaagaaagcttttaaatattaccgtgtagattgtcctaatttctacaaaactgtttattaatcagtccttttccttttatgagtcttaccttctttgttagattgtcatagtgtatgtatatgacgttttataagcagtcttagctggtaaagagataaaggacttcagtgtatttaaaagagggtacttttctggactgactgactcaccagtttcctctctgccctgttcagcttcgacacacatgtgccatcctctgtgcagcatcgacacatatgtgccatatcagcatggtcctcctcagcaggtcttccctgaccaacattacgtgcctgacatttttggctacatgtgccttttctttcagcctttccttaccagccttattcttgttctcatttttatgtttctcattttcattttaacaaaattattaattacttagctttaggagctggtacatttttataattgacggtaaaaatctgcaaagctgacttaaatttgattgatttattatttggtattgcctccatatttagttcagttagatctacaacacttctgtaacatcacagaatatctgtagatacatatacaagtcatcagcgatatttgttttctttcctagtttttgttccaagtatggttatgtggcagcattttgtctgttcatgtctcgtttttctgtatacttttttttttttttttggttttttgagacagggtttctctgtgtagccctggctgtcctagaactcactctgtagaccagcctggcctcgaactcaaaaatctacctgcctctgcctctcaagtgctgggattaaaggcatgtgccaccactgcccagcttctgtatacttttttagctgaagaatttttgaggaaagacagtgtttgtatcttgagcacactaacagcatgggatgggtggtaagcacctggagacatctgagaagatctggggatgcagcaaacttgctaaccattacagaacacgtgagggctacacagcagcatctctaactggagctggaactgctacagattttttttaaaaaagatttatttatttaatgtatatgagtacactgttgctgtcttcagacacacgagaagagggcatcagatcccattacagatggttgtgagccaccatgtggttgttgagaattgaactcaggaccttgaaagagcactcagtgctcctaaccactgagccatctctccagcccatgatgcagatttttgcaatgaaggttagacaatgcttgaggatgtaaattaactactgtcctatcagacaggatcagagaaatgagtgagtgaaagggaaagtgccagtcaacattaacaaggaggagctaacattttttgtccagctaaaggaagaatcttatgtcacttttacgcctttaacactaaggaaaggaaagatgcatacttaccaaagactgagaatatttctcctttgaaagttttttttctaaagtatgaagtttttcttgaaggtatttattttgtaaatgtaagtcttccacaacagaatctcgtggaagagcctgctgggtcctatgaacaacaaccagaatattatgtgatcctcaatttttctaaaatttatgaagttatgatacagaaaagaaaaaaatatagtgtgtatatcaatactataacttaaatttttttcaacttccaaagttcacaagaaacaaattaggatattataatttatattaaaaatgatccatcctttactctcaggcttctacaaaagacttctttataccatcagttgaagtctgatttatagaaacacattaacatttttaaagcatatgtattttcttatatggaactatatagaaggactaaaatactattttaaaaagcttacagagtaactatactatcaatttcattgtcaaaaaaactcatgaatccaacacgactctaacgtttcattaaatgttgtcatatcatgtccaaacttaactggctggctacaggtcctaccatactctgacacaaataaatctatgaaaccttttggttcaggatttttttctccatttaagaagtaaatgcacacttaatgtgaaaacattaatattcacacttgtctctatatctttactaaaaacttatctatagtatatccttcctctcattaattatgtatttgattaataacattcagatagtcaaacttcctgaatttagagagaaaacaagataaatctcttctaggacatctccagttacttatcaatatattcacattagaaaaataagaaaccttaaaggtactaggacctttcaaaatattaaaataattttagtaaaattcacagagagaggcgaatagacttttgttagcagcatctgtttagatgaggaacaaggaaaggcccatagctgaaagccagactggacctgtcaagagaaaaagttccttaatcacattattccttaaaaaaaatactgaaagataaacaaagagaaagaaaaaaaaagaaaattaaaaaataaacagtaattggaatgttgcaaggaatacattctatctcttggtgagaggttggtgagaatgcttgactagaagacttcaacttcctgtgttcacatcactgtattcaaactgacacactcatgaatgtaaacaagaaggtactattctaagaaacagaaacttacaaaatatccaaaaattgataaaaatgagattatatctaacacggaatctctgcactacaaaaagacaacctacacatcaagaaaaatgtatggagactcttaaatgtcaaaagaagagatacataaacagatatttctcaaaacgaatacatagtcaacaagtttacaaaaaagcttagaaggactaattttgaatgctttaacggcatgggaaagataagtgtctatctaccttgatttgaacattacgtgctgttcaacatcacaaacaactcattgtataattatgtttcatgttttgttttaaaaagcactaactgtatttttaaagacaaataaaaaggtatacatttatgaagagtaaatattttacacgtatgtttaaagatcttggaagaagtgattcaaataaaaattatatactgtgttactatggtatgattttatcttactctgaccatagctttgcagaagacataggtttcaagaagaagtgaagttaaataagtatgaaaggcttctctaagagataggtggatggggtgggaggtgggggtcttcaggtctgcacagctggaatacaatctcatcttagtcaaacataagggccaactacttatgactttgaaaaccaatatatttagattggaacaatagtagaagcatcagatagcaaacaaagtttaccctctcctcttactacttggtctgaactcagatttgaaacatgaagatggccaacagcactgaggagagttccagaaaagcccaattttgactcaacaagaaagggaatggctatgattctctgtgaaagagtcttagtttcacagagaaccttaaactcacgtgactaaggctgtactccctcttaagttacaccacatctcagcccacagatggtggctgtggcagagtgggcaacaggaacccaaaattgatacctttttaaaagaggaaatcttcctctctagttgttgaatgagtacagcaaaaattcctctgtgcctcccttctgcgcctgttcaggcacatgcatttagaaactatataacttaagggtttaattaaagtcccgttccacccaaagaaacaaaggcaagagacaccagaaatatcacaaagatgaccacgaggagctctaaacaagggctttaagcgttggttatgaccttctaggctcactcttgagctgcatgtgcatgacaaagataatcaatacaagccatccttgaagcagtacatttatattttcatgtatataagccaattcttcatcaacataggtaccataactccatgcactggcttacctcatgtataatatgtcattttctaggtccagatttttcttttttagctcttccaactctttttcagattccaaagctcgcactcctaaaacctggtcaacagtcattcctgttgttttcagtttcttctgcaaagtaagtttctctttatcagctctgtagaatttaataaagaatgaaaacaaatgtatctttgaaacttttattgtttggttcattacactgcagtttaggcatcattgttctgttaatgaagtaagtgcaccattttgttcttggcatgaacgtatttaaaaatcacataattcatacttggtaaaatatagtacatttgaaaggtgataaaatataaatcaaagataatcaaaactagcaaatttgtcatttatcaaataaaataaactatataagttcaagatagaaatttatactattattagttttacaatgaattttagctcacttggcaaaaagttcctttaaggtattcagctgctttgccaggccgtgggcttctccttccttctcctttagtctgtttcgtagtccctctactttggtttgccatttcttaccttcttcccacctaattaattcttctttactactctgcaagcagtaacaaatgtgttataaactgtcagtatttttcacctcattttaaatatttaagcacaattttaaactatacaagataatatgtaaatagttcattctgttatataagtcctagaatctttagctatggcaaactattaggaaaactacttccatttaagtagacttggctcatcacttgacagataagagtttcagacaagactctaatgccaaagaaattaccacaacaaatactcaagaagttaaatgagaattcaaatacatgatttatgtaagtaagcttctaaggaacaattaattgtgtgtgagtcaccaatccagtcttgttactgagtgacaactgacacttttctattactgtaattcactctggtctaaatccacattacttaccacccaacatgcatttattttgtgctaaccacgtgcccagctactactgtagatacaaagagcagaacgtatatgtgaaccaaatattacaatgatgatttgtagaacaaacttgagaagaagatataaatgcagggagtaggtcaactggtgataagtgctattaaaaatgggaaaggcaggatctaggttcttacaggaacagatcatcaggtaatggtgatggtaggattagggttgctagtattacaataaaagagtcaaagaaagctgtgtgatacacgatagtcccatgttctgagaaagtcctgcagggtgttcatagagttaaaacttctgttcacaatttcatgaactaataatttaactccattttaccatttataatttcagtctatacactgaattagtaagagtacaattaccttttaaaaataaaggttaaatgttattttgttgaaaattataactgcttatcattttggaaatcaaattacagcaataacactggtaccatggaaactgctactagaatacatttttgcagagtttatctttgaggcttaggattcacattagtaatacctaagttacaagcacatgactaccatattcatctagtatagatcagagacatgatgatatataaataatgtattatgttaattcctttgtaaattatttttatacttattctaatttcatttggtacatttaaaacatttttgaaatcatagaagtttatattgactccaaatttcatttacaatgatacaggagatattatgaaacatcatggttactggaaatgaggatgtcatgtctaaaaaggctgggaggtagagtttgaagtcaaattaaagaatgtcctctaaagctagagagcatacaatattttttctccaaattagattctaaccttatttattcaatcagctactaagtatccttttaaaaattacaaaaacctttcctgactgattgttctttttaaaaaaaaaatgtactccaagagtcatgtgacctctggaaacctgagtactagctggagaaagagatggatacataaatagctgggcagggctggtgagatggctcagagggtaagtgcacccgactgctcttctgaaggtcaggagttcaaatcccagcaaccacatggtggctcacaaccatccataacgagatctgactccctcttctggagtgtctgaggacagctacagtgtatttaaatataaataaatcttaaaaaaaaatagctgggcagcatgagatggaatccttcttagggtttgcgctggcaattaaagagtggggagaaatgagaaactcacgagctacataggatgtgaggagacactaatggccctccaatatcaggaaatgacatggaggtttctctctggtgtgtcttcaagtggagtgcagctttctaaatgacagaaatctgtcttagacatctcagccttatttaggcccatacacagtatgtatgaggcccttacactcagagtaaatcacctgcttatcagtgcacgcctcacttagtctaagactattcatgggttcacttcacataccttttccttcaccggctttatgtctacgtcatccacctttctttccagttggctttcaagttttttaactttcttttgaagttcatcgattaaactttgcttgttatctatcaaagttttgctctaaaaacattaagatataactttacatgacaatattaaaggagacattaaatattccaattatcaaaatctgggaggctatgattaatcatgctttctatatgacattgagtatcaggatagcatgaaagctaccactgtgccttataaaaatgtcccactatagtcagaaactataacagaggcctctcaagaaactaatcaaacaactggagatagttttggcacatattgtaaaatgagggaggaccataacttatacattacagatcaaacaaattatttgacgtaaaaacaaattacctgcagtccactggacagtcttttaatctgtcttctcagttcatcattttcttgatcaattccatctttctctctaaggattttattataagctttttgctttttttgcagttcattatttaattcatttaaatcatcagctagtgaattttctttgttcttacttgttttaagagcttctttcaattttaaaagattttcatttaaatcttcaatttgtgactaataaaagacaaaggtattacaaatttcttcaagtattaataataaatcaacagaaaactgaggtcataataatatgcattagaaacagcatttcattataaatttttaaatatctcacacaagggaaaactacaagctgcaatattttctccattcatgtcaaatgaagcaagttcactgagagaactacaaccacaagaaaagacaaagaaaacaaaacaaaaaaagaatgtttcactacaggtcaattggtaaaagagatcaggatgaacagcatgaggttagtataagactaaatctttgacttcaagtatgttgtaaaatccttgtgaagataaagacatggaaggactgcttgagacagcagactcttgtagaggaactttcatccagcaccatgattgctctggctagcgatcacatccaaagatatgatctggctggaatgcagacagacccttagtatacctttaatttctgacaacgaaggtaatgttagcgtgtagaaggaagcagccatgtttgaaagtgaagtttaattgaggggaagacatagtgatgagtcagagaaagctttgacagacaggatatacccaactcacaggaggacagcggaagaagagagactacttaagagcagggacagaagaaaaaggtatatgtggtgtttggtgtgtggtgtttatatggcagttttactgggagttttacagagacagattacaaacagaacaagctagacacaggtgaagacagaccaggtcagagaatgagaaggagccagaagattagaatttattgccaaaatgagtatgaggccagacagagcaattctgtcagaagctaagagaagacagatttactcagtcatcttggaagattagattgcatggaggctagaagcttccaggcctaggtctaggggtagctagaagagagaaggaaatgctctgggctcagccaagctgtgtatgtatactgcttgtgtgtgattctcatctcatcacttcatctccggaaataaaagcaacatttataatcctgcatgtgtgtatactttagctgcctgaacaaagacaatggtaaaaacatgcgacgacaaggcagaaacatgtccttattattatttgtcctgttatggtttattcaactaagtgtataaagattttattaaataaattattaaggtcaaatgatcttattggtgatattaattattattctgtttaaaagaaaaatttaacatctcagagaaagttttacaagaaggatttgaaaacataaaattcaggaatagcattccagatgaagagataataaaattacatcaggaaaagactattcccttttatatatttatttagagaattttttattattaactatgacaacatgactgaaaagtgcaataggcaatttttgaaaaattaatgaaaatctattttccaaactatttaatgatagtaaaaagcatataaagatatcaaaagtaaattaaactaaaaaaaaaaaaacaacaaaaagaattgattagatttttcattttaccacaatatactatgtgaaatttgtggggcaaaatagagaaattgcaagttattatgaaatatatgcttagggaaaaaaatttaatcactaagcttaatggtcagataaaaaaatgatgaagtatgttgataaaaataatttattggaagaccaggcttcagagccagctagctctgcagttgaaatgcctcacaaacagtaagaaagcatgccgtactggtggggaatgcccgctacagaagaagctgcaaacatttggtgcacggtgtatctgtaagatctcggtgtgacttctcaattttgctgtgaaactgaaattactccaaccaaacagccttaacagaattctgagggttggaggtttagctcagcagtagagtattcacccatgctggacctgaatcccagttaatgcttaaaatttactaaaaatgtcttaaaattttcttaaagtaaaatgtttcttaaattagtccttttagtaagcacaagtcatcatggtctatcttttcaaactccgcaagatgatagtccatacgtgaataacataaagatacatagtgtttaaaactatgtatgtacctgtctaattagccactagttcaatacaagctctctggcgtgcgcgggtgtctggccacattaatacacatctggtgctcacctttagctctctagtatggcgctcaacaacttgttgaacattgagatttgcctctttttgagaagttacagcgattatacgttcctcagctgctgctgtcatttccgaccgaagttccaacagggctcgactaagtgcctaaaattacaatattaaaaaaaaaaaatagtgggaaattgacactgtgtatgagcaaaacagaatacaagcaggcagtatggctttctactgctgtcctattagatgcaatatcctaagtggcttccacgtggcactgcagttctagcctatgctctcggcacaaggcggctacacaaagacgagattatcgcagggaatgtgcttaatcaaaggtaactcacaaactcctgagctttttcaagtgactgtccttgtacttttaccagcttttcacaaaccctgacgattattttcagaaccaagcactaattcagtcaagcaattcctattggaaaagaaagcatgctttgtttgataatttccaagtttaccttcttcatttagcaaaaaagaaaaaaaaaaaagcaacttcactcagtagacccctccacgtggaaattgaatttaagtagatgagtaatgttataagacactgtatataatacttgcccataaaactcatgaacgaaggtggggaaagtgtaccatcttctaaaccatttgctacttctgagataaataaaaaaacaaagcaaaactacgatatcctattaaacctattgaccagttctcacacaaagacaccgtggccacaccctttcatctctcttccttcttacaccatatcaccactaatcttctaatgtgttcaaatctgcctctgtaacatgagaaccaatgggaagtaagaaaataatggggctaagacttcttttcctttcttacaatatttaacagatcaccacacataaataaattgtactatatctgcattttaaaacagcactagcgcagtgcagagtatgtgaaaaaactatgcaacaacattacaaatagcattctttttctctttattggatattttatttatttacatttgaaatgttatcccctttcccagtttcccttccacaaatcccctattccatcccctctgcccctgtttctatgagggtgctcctccatccacccaccctcttctgcttccccatcctggcattcccctacactggggcattgatccttcacaggatcaagagcctctcctcccaatgatgccagataaggccatcctctgctacatatgcagctggagccattggtccctccatgtgtactctttggttggtcaatggttcgtaggcctttttcagatctccagatctctaggcctttttctttggtagctgtcgggcacttaccttttgttgcttctctttcaaggctagttggctctttagcctgtctacaagattcctcattgtggttgttggagctctggagtttgcttctttctgagcctggagttcagactttaaactctgggagtccttgtgtgcttgggctagagcatgccttaagtcctctacctctgctttcactttctttacctcactggcatgagtttcttggagcctgagataaacaagcacatgtatttaccaggctgggtattgcaagtaataccttgattcaaaaacaaagcaaaacaaaacaaaacaagtttataacagtataaagccacaacgacagagttttatgtggtaaaagactatacatgcaagttatttcagaactttgttatttcctgaatttcaaaattagattcaaaagcctaagtagtcttcagtatggtatgggggttcattcctgtgatctcagcattgagccagttaaggcacaagatcacagtgagcccaacgacagcgtagactgtccagtgagctctagctaagacagcctgggttagagtgagatgtgtctcataaaagaaatgaaaacagatgataaaaacctaatttgaaatccagtacatggcatcagattagtatacaaaaatatataaacttttaagtggcagctacttacatactcacaaatgtgtgggaagtttttgagaggtatcttgggtccaagagtatacagtcaaagttctaatgggccatcagaaagggacagaaccctaagtgggccaacattctcacttccgtcacagaggacctgaggcccaggctgtggtctgtgattaggaactgaacaatttcataccaattctgttttaaaggctattttcaaaagaaggctgagtaatgcttgtaatctttaatataataatgtgaatactctgttattacagttccctaaaagcaaatactttaacatttactcagcctggttgtaatcacagactatctcagacgtttgaggaaaagctacttctatgtgaatttacaattttcaagttactttttttttaaagattttatttgtttatatctatatctatctatctatctatctatctatctatctatctatctatctatctatctatctatctatctatctgtctatatgataagtacactgtagctgtctttagagacaccagaagagagcatcagatcccattacagatggttgtgagccaccatgtggttgctgggaattgaactcaggctgaacctggaagagcagtcaatgctcttaaccgttgaaccatctctctagccccttaaagttatttttgtaccatggggacttcacttaaccactctgaaggagcccaagtaaacactgccattttcatttaaaaaggataaagaggacagtggaaatagttaaaaataagattctaagaagaaaagaaattggcttttgaggaagagtgactagtttcacagtgtgattctttctccccacgtccactctgtcacgctctggagccttcctagggccttacttttataaagcagtgagtcccgggtgttcctgaggacacaatgggacaatgcacatcaaggctttaggagggagctcacacagcaggtacaagctttatcatagcataacttccatatgcttattttaaaaagatttgtaaaagttaccgtagtttggtattttcaaactctctgacttttaactcagtgatttctttttgtttttccaaatcttttgatactttctttagtttggtcaaaagtgaggacagagagtcatcttgttctgctactgtctgctccatctcggccagacgaatgaaatgtttgttggtgggaactggagcaggagactgcttaagtaaatcctatgagatacaaacatattagtactgggaaagtcaatttgagactatgactcatcctacaattttctttatgagtcaataaagtctgaaattgaagaggaaaagacgaactagggaagacgaggtatagactattatctttagtcagtgtctaagtgcaatgcacggttatgagcatgaactaacgagtgaggcccgaggagcctaatgctgtgggttacgagaagggccactttgcacagtaagaacataatgatcaaaaggcggcaaacagacagcacacaccagctgatatgaggcccccaacacacatacattagaggactgctgggcctgtgttcattcagagatgaagcacctaaccatcaagagactggagccccagggagtttagaggtcaggtggagtgggggtgtggggcatccacatgaagatggggtggggtggggaggaggtgtgggatatggagcagtaagaggatggatggggaggggcagggaatggaatatggagtgtaaaaaaaatgaattacaagtaaaatgaattgaaaagaaaaggaaaatgatcctgttttcatgatcagagctgcttttctggagatgattttggcaagaaaagggtgaggtatgttctactgtgagacataagaggaaaggattttaaattgtgtgatatgaaatctcaataaagaagaacacaaagttctcagaatcttacctgagctgtctgtctgaatttattgagtgaattatcggcctgttgttctaatttgtgatgaagaacatgaaggtcttcctcatgcttcttaacaatttctctttgctcctgttcatagacagttgaagttgtaccataaattatgactgaaatacattcacattctaaaagatcttagaagatctttaaatttctaaaaccttgaaacagaagagataatctctgcatgcatatgtatattagaccattatatatttctgctggcatgtgctcattttggccactggagcctttcattacaatttattcttagtaatagagtaacatgtatccattacctttaatttgttttgagaaagattttaaaatactaaatatctctcctgttgctctagaaaagtacattcccattagtcactcctgtggcagcaccacttaccttattgtttcacggtttactcaacgttcacctgatctttcctaaccacccagcttctgcatgagagctgctcctgtttacctcagtcgaatggggagacacacaaacacaagctgccagtttgactgacagatctgtaatccaatcatataaaagcagcaattcctatatagaatcatgtgagagcaaaaatgaactaccactttaagagaaaataacttctgcccctgacagaaaaactcaggacggaaagcagcgtgacaaaatacctctctggccttctccagaaggtgctggtatttcttcaatacttcttccttgtgatttaaccttgcctgcatgttggcaatagtttggtgggcaattttcattgtgtgatgagatttcggctccagctcttttctttctagctcagctataagtttttctcgatcagccgtggcaggcaatcgaagcctcagttcattgattactttgtctcttgacagaatattttgctctgccaaccgtaaagcagattctttttcttttagtttctacagcaaagacacaataaattatttcagcaccgtttgtcctttaaaatgcttcatataaattttacttaagactgcttacaagcaaaacagctgtttcacacttatttataatagccagttgacaataaaattctatttattaacattattatgtgacacatttatttgcatgtattctaagttgctcataagattatcacttgtcaaaactttgttaggttagacacaaaatttaattaactttacttatatcctgcagtttagaactaacaatgagtggtggtggtagaattggaaagaaagtgcagtcccatcacccctctgatgtcacagagcactaaggcagagcactggagacacagttgggatttcaggggcacaggccagtgaatcattgtgttgagattggaagtttaccaagccaaagcagagaagtttcatcttcagtaagattaagacggatattttaaaacacatgatttagtggtagctcatataaaccaaaaattttaaattagttttcctgaactgatcaaaaagccaaaattgtatatgataaattctttgtaaatgtacttgtaattaatatgtttaggtggaaactaaaaatttaagtgatattcagtttatattactttatgaataatttaatgagctgatttgccaacaattaatgaaattcagttcatagattaaataatttcatttgcttcaactttttttactcacaaagaaaatgagcaaagatatataacatataatgtaaaataagtgacaaaaataagtaacaatgaaaatagtagttaacaaaaggcaatatattgtttataaagcttcaattaaataacttttattacctatttagtatgtctcaaagtagaatgaagtaaacaaatgaattataaattcaaattaactacatggactattatcagccattagaaatagtatataagaataaagagaggaattagcaaaactctgccactttaattaattaacgtaaataaatattttaaaaattctaaaaacattcccagtaatatactaatcaaaatgcaaattattccaattacctcttctagtgacttgcaagttgcttgtgttttaagaattacttgaatattctccttaatttttcttagagcaatttcaagttggtttggaagaggcaagctggggtctggcattgatcctgtagagtcttcaaactatggagaaataatatgctttaaaaattgtactgtaatatggagaaaacaatattaaatcttcttttaactgtataaaaattagtaaactaaatttcacttatctttaaacaaagaaactcatgacaattcacataaagcatacatcctaaagttcaaaatatattgaattcagagactatctgttagttagtaatgctttaagccatggtacaaagcagcaaatataattagttattgataccttttgtgctgcactgagtatttcattttgctgatgatcaaaaatgtctaactggcgttccagctcaacttctctttgatcccaagccatctgtctttcttcatggaactaaaaaatgacacttgtttttgttaggtatatccagtgacaatgagcatatagcatgcgtataaacattttctcattttacctgtagcttattttatcctcagctatcactcttattttatgggaaaaacaagcaaactcaatggtcaagcaacttgcctaagaacccagaggcagaatttcagccgtcatgtacctattcattcatccattctaaccacatacatgacacacatttctcaagcactatatggagcagggcaagcatagcaataaacaaaacttaattcctgtctccaaggaaattatatcccaggaagagggaaacaggaaataacaaacaaatacatagcacatcagaggatggcaaacactctttagaaaatgaaagcaaatgctccctatataagaaatcttaatgggaacaaaacataaagtatctcaaatgagaaagaaagagagagagagagagagggagagagagagagagagagagagagagagagagagagagagagagagagagagagagagagagatctgagtggggaatagaatagtctgtgtgctgagtgtgcttatgagcactatctgtcacttaagcatctttctctaccctatgctgtgttctaaatcagcactgacatccaggaggaactagactgaagaaataaaataaccaatatcaaaataaaaactaacttaccaagtaagtttctgttacaactaagtaaatttgcatgtttgggaatttaaaaagcaagaaacaggttattttgttactcattataatgggaactatacttaattatctagtcacaacaacatagttaaaatacagtgatctgagcgtgaaagctttagaaagaacagaaataaatagaaaatgaaaccttgctttgctgaacaatttcttcctctagactgttgattgtatgctcatattcagagatgatattattcaaatatttgatttcttctttacccttgactagttctctatttagcttaagttcttggaggcgaagttcttctattttcacatgccaattgattacctaaattatatataaacataaatgctacattactgattatgattttaatcgaaattaatggcaaagctatttagaatttccatagaatattctaaagtatgtagactattagaacaaaacattcttcaaattatttcgaaatgaatagcctagtaacatttgctatcaatttctcattcactgtcacttgtttattaagtgctgactgcagtcatgttattgacacattgctacagattaaacacagaaatcctagccttttctacaatgatggcgtcactggtcacttttccatgctccagtggacagcatcatacccatgaccacgtcaatggtgctgaggaagctcagtgggtcacagaatgacaacagaaacatatgaaacatgggtcaggatttatgggaggatatggtgccgggtgggaaaggaggagaaaacagagaggtgagagtggccacaactcattatatgcatgcgtgtgtgcgtgtgtgtctgcgtgtgtatgtatatcaaagagttcatttttagaaatccacccaagaaatatttttttaaaaaaggaaattgtaattatttctagcacagggaataggacttaactgcaagacagttatttaccattcaactcttcccaaatggaagtaaaggctaatctttaaaaagtacaatggagctctatgaaaactcacagtatacacaagaaatatctaaaagtgaaaacacagaaaaacaaacaattcaaacaggaaatatttgtgcaaagtagcaatcaactgatgactataagtcatttaaaattattatacttaatatatctttggacttttctagaatatttaaaattctgtttttatacacaaagagtaattttcctaaagatctttgcttatgaactcctaaattcccaatttagaaaatctaagctacccaatgagtatgttagatgcatattaagcatatttacacagctacagactaagagctatattacagtataacactgaatactactacatttcagatcaagttttaccttctgggctcccctggcatcctttaaagtactgatcaattcttctaagccttttaattttaattccaactccagtgttttgttttccatatttctgtgttcctgttgcgaattcttcatttcttgcattatcttaagtttgtcattttgcaactgaatcatcgttttggagaacttttcctgctgtgctaagggtagagctccactgaactgtcttcgaagcgactgaatggtttggcgcaggtgttttgctctgtttctaccttccaaacgagcatagtagagcgcctgctctttttcatccagtttctgttctaagcgcaaattgtaggcttccatcttctggagtttggacgtaactgactctaacttaccgagggcagtggcctcactaatttgaagagagacaacatgttggtgcaatttggcaattagagccttttcgtcagattgtgcctagcagtaaaaaatacatatttaccaacaaatacgtcatgggttcaaagtcataattcagtaaataaattttaaaacactggcacatgagatttaaaaacaaacaaatgaagcatacttaaatttctaattttgccttataattcacagataacattaacaacacaattctgctatatacaatgaacaccttttaatcctctaaaaactacagtacatggaatatatgaaaaactacatatacatacaagagaaaatagtcagtaaagattcattaattactcctccttagtgtgttaaagattcactaattactcctcctcagtgtgttaaccgaccagcagccttgaaatgcatctataggtatttcaaatgaaagatgttctctaaagtcccaaccaacaggaacaccgttttactgctacactaatgtctggatagcactaccctcaaacagcaatatctcaggtgagattagcaagcaacagactaaacagcagagctaacaccatatgcacctggaagtccagcagctgcgttctgagggattccacttccttttccctggactgttgttgcgaattcaaaaaatcaacttgtcttttggcaatatctgaaatctctctcagcctagaaagtgataacatatttaagcaacaattcagtaaataccaaaagcaccaattttgagatacccatctagaaaagcaatttagtttttgagtctcttcattgtatcaaacttaaagagttcaaaggtctcttgaactatttcatgaaacctaattttatatgtgatcaaaaacatcttctactctggaaagtctttaacctgtagtatagcataatatatacattttgaaagataatgacatatgtcatgatcccaatttcacttaatatatgacattctataaacgtaggatgtcagagaacacttcctcccacacatttttcctaagatactttttattttatttagaagatggtaggtccattgcctagctctggcattgctccttggtccagaggagccctctgggaacacaagagaaacctacctccctgagaataatacaaataatcaatgaaaccagaggttgttatttcagaaaatcaacaagatagacgaacccttagcaaaactcaaaggcagagagacagtatccaaattaacaaaatcagaaatgaagagggagacataacaatggacactgaggacattcaagaaatcactaggtcttacttcaaaagcctgtactccacaacactcgaaaatctacttcaaacagttgatttttctagagaggccaattagcaaaactaaatcaagatcaggtaaactatttgaatagtcctataacacctaaggaaatagaagctgttattaaatgtttcccaacagaaaaaaaaaaaaaaaaaaaagccctgggccagagagtttagtgcaggattctaccagactttcatagaagagctaatggaaacactgccaaactcatttgatgaggctatagtcttaacaaagaaaatttcagaccaatttcccttccaaatactgacacaaaaaaatactcaataaaatacttgcaaactgaatccaagaacacgtctaagacaccattcactatgatcaagcaagcttcctcccagggatgcggtgttggttcaatacacaaaagcccatcaaggtaatccaccaactttaaaacaaacaaacatgatcatctcactagatgccaaaaaggcatttgacaacaatacaacaccccttcaagctaaaagtcttggagacaaaaaggatacaaagtgcatagctaaacacaatatagcaagccaatagccaacattaaattaaatggaaactaaagcatttccactaaaatcagggacaagccaaagctgtccactctctcctcagatctcttcaatatagtacttgaagccctgtctagagcagtaagacaacaaaaggaatcaactgaatacaaactgaaatggatgaaatcaaagaattgctatttgcagatggtatgatagtatatgtaagtgaccctataaatctactagagaattcctacagctgataaacactttaagcaaagttgctagatacaaaattacctcaaagaaatcagtagccatcttctacacaagtgataatcagactgaaaaaaaagttggggaaacaacactctttagaatagtcacagataacataaaaaaacaaaaacaaaacaaaaacaaacaaacaaacaaaaaaaaacctaaccaagcgagtgaaagacctgtatgacaagaacttcaagtccctgaaaaaagaaattgaggaagatatcagaagatggaatgattttccttggtcatgagtcagtaggataatcatagtgaaaatggccatcctaccaaaaacaatctacagattcaatgcaatgcccatcaaaattccaacacaaaattcttcacagacatggaaagaacaattctcaacttcatatggaaaaacagaaaactcacaacagccaaacaatcctgaacagtaaaagaacgtctggtggtatcaccatcactgactaaaattatactaccgagcaatagtgataaaaactgcacgatattgttatagagacagacaaatgtactaatggaatcaaatcgaagacccagatataaacctatatacctatagacatttgatttttgacaaagaagccaaaaccattcaatggaaaagggagagcatcttcaacaaatgtaactggatatttgcatataaaagaatgaaaatagatccatattcataaccctgcacaaaactcaagtccaaatggatcaaaagacctcaacataaaatcagacacatttaaccagtacaggaggtaacttcttgaacagaacaccaatgtctcaggcactaaggtcaagaattaatacaaagaaccacataaaagtaaaaagcttatgtaaatcaaaggacaccatcatcaggataaaagggcagcctgcaaactgggaaaagttcttcactaaccctaattccaacaggggactgataaccaaaatatataaagaactcaagaagttaagactccaacaacctaaataacccattaaaaagtatgtacaaggaacataattctcaacagaggaatctcgaatagctgaaagcatataaagtccttagtcatcagagaaacgcaagtcaaaatgactgctgaaattccaccttacaccaatcagaatggctaagaacaaaaattcaaaggacagcatattctggagaggatgtggagcaaggaaacactcctccattgctggtgagaatgcaaactcgaacaactagtctggagatcaatttggtggtttctcagaagactgaatacttccagctcaaaacccagatatactaccgctgggcatattcccaaaaggtgctctactgtaccacaaggacacttgctcatcgatgctcacagcagctttattcataatagccagaaaccgtaaagaacctagatgtctatcaatggaatggattcagaaaatatggtatatctacacaaggaatactactcaaccattaaaaataaagacatcatgaatttcacaggcaaatggatggaactagaaaatatcctgagtgagtaactcagagccaaaaggacatgtatggaatgtactcatttataagtagatactagccattaagtacaagataatcatgctagaataaacagacccaaacaagtctaataacaagtagaacacaagtgaggatgtttgaatctttctcagaaaggaaaacaaaatagatatcagagatggatggaaggagggatctgggtggaagaggggatggtagggagtggtggggtagatcacataggtagaagagcagtggagatagaagagagatcagctgggggttggggggcaatctctaggaggtgccaaagaccgggaacaaggagagggtctaagagggtcactctatgagattcctagcaatggcagatatgggtcctgaagtgtccacttcctgtagccaggcagaactcccagtgtaaggataagaacaccaacccgtccataaagccttagactgaaaatgtgtcctacctacaagatgtgcaggggcaaagatggaggagagtgagggaatgtctggccaaacttgataccaatcccatgagcaagaactagtccctgacagtagtaatgatactctcttatgcttgaagacagtaacctagcttaacagtcctctgagaggctccacccaacagtcaatggaaagagactcactgccaaacattagatggagcttaatgaatctcatggaagagttgaaaaaaagattgagagatccaaagaggacaggaactccgcaggaagaccaacagagtctaactaacctggacctttgggggctcacagggtttgaatcaccaaccaaagagtgagcaggggatggacctaatccccctgtacatatgtagcagaccagcagcttggtctccaattgggtttcccaaacaactggaacagggttgtctgtgagcctgttgcctgcctgcctgtctttggatcttgcgcccctaagtggatagccttgacagacctcagtaggaaggaagtgcatattctcacagtgacttgatgtgtggggatcagagggaggttaagggggtgggggactggcaccccaaggtgggggggggtctacttctcaaaagaaaagagtaagggagcttgggtgaaggacttttgtgagggtatactgggaggagaagggctgatattgaattgtaaagggaataaataaataaatttaatttaaaaacaaggaaatggcaggataacagagataagttaaccattgccattgcacttaggagtcgatgtaaagttcccattttaactttttcaatatggaagttaagtgcttcatacacagacctttatattatatttgaaagtcatgttacatacagaaaacatgattcatttactaaaacttattcattagctgaaacacacacacacatgcacacacacacattgggcatttatacaaatttttcttatgatttctgtgattacaaagctcaataaaaaaagtctttttgtttgaagcagaacaatttgagctaagtgggacatatgcatcaggtttcctcatattggtctgaaggcctctgtagtttagtggttaataaaaaatataataagatgaataattataaattagtcttcttataaggtaaggtttatgcgaagaaagaaacaagtcaatcatagtgtgaagattaaagacgactggtttcccaaggctgtaaaggggtggctgtcattttatgaacacacacacatacacacacacatacacacacacatacacacgcacacatacacacacacacatacacacgcacacatacacacacacacacatacacacacacacacacacatacacacgcacacatacacacacacacatacacacgcacacacacacacacacacacacacacacacacacacacacatacacaaatacactagttatttgtgcttgacacattaactcaaagctccttatgatcacccactaaagcagcacctgaccagaaaagtgagtggagaatatctacctagcacatatatttagtgttctaaagtaactgggagtattttccactgccaaatgaaaaaacagtttacctaagcaagagttcatgagttaatatgtctgatgtcttacacaatgcctatcacatagctagctcctaaggaaattaaattaaatctacatgtgaattatatgtctacatcaaccttataaaaaggtaaaatttctttcttgttaaagtgaataaactaaatactaactgactcttctatctctccttcccccaaaacaggcactaggagtaagtttctgtctcagttttagtgccttctacaggcacagctctacactcagggaaaacaaaagcaaactgtgtaatgttatttcctcttcaatgtatgtcatctggttaaaaaataaccataaagaatataaatcctcttctttaaaaaaaatgagtatagcaactgctccatatatttgaaactgaacttaaagacaaatcaaatagactcatcaaatgatgaaatttgttttcaagcacttacttggacacttcaactttgagctccacttcactcttctctagttctagaatccgctgtcggtcagcatcacttactgccttggtcacactatcagctaattcgtctctcaacatctgctccaccttttgtgcatccaggttgattttagtaagctatgggaaaagcaacaacaacaaaatatccccaggagtgttattctatttactctattttacctgatgctgagaacagccaggacctgcgtcaactaaagccagtgaactccagctcgagtctggacacgtaacttctggtctctagagtactaaaggcttcttttctttcccttactccagaaacaggtataaagaagtaagaacaaactataaaaaagatgtaataatagtctaattctatcataaattatttatgtcaggcaatcactgcttaatttttgaatataagcaaagtacttacaaataaatccaagcgacttaacaaatttttttaagttttatgaaattatttattaagtttttattaacattaaatgtcttaaaagaaaaaaatgatacttatgctttgaaccctatgtcaaccttagcatctgcaaagtgtgactcaatcataggtggttgagtatctgcagactgcttaattcagaccacattaagtgtctttaattacctgatattaaagacttggaaaacagaaaattgttaaatattttgcctcttactatagtctcagctcccaaacaggttctggagtacagaagagaatgaatattttttaaacaaagagatgaggtttaaagagacaacattcttctactcactaaaaacaacaccataccattagcaagaaagaatctgtctacggaaacaagtgctttgatgtacagcaattgagattttaaaagaatagtctataaatccatacataaaatgaaaatgctgtatgtgtgcactagcttagagacagcgtttttagaaataatccagtgtctactaccgaatgtctaattacaggataaaaattgtatcaaacctcagtgaacttggtttccaattcaaaattacgttcttccatttgctttaatgaagtccttaagtgctcatacattttctgacagtgttcagccctctgcctttcatttaattccttcatctccaacacagtgattttctttgaaatagaaacaatgtcactgtttgtcattgatttcttagccttatccatgtttgagtcatttcctatgtgcaacaatacaacaaacaaaagataattcaggagaggtgtaaaaaagtagcacagttctatgaactttctgaattaagacattactgtattttatttatttatccctacctctctgatgcttctctgtgtattctttctagaataaacatctccatttatcaaatgacaataaaaactgtaatgttactgaaataatcatgtgatggtcaatgtagagctgtcagaggttagaggattgtaacaagcagtaaatgaacacttgttatggaagtaatattaattgcactgggacaatacaggacatcagtgtgactttagacatataggtgcaacagttttaaagttaccaaacaccaaagtcaacagtaaaatcttaagtgatatgattaagaaaatctacaagacaatctcaaatcatgagcattattttgggtattataagcatgcaatatcaaacaatatcatattacaattttatattcaataatatggcaagtcaggtataaatggagatatctgtagcattataaataatggcaaaagtaaaaaaataatgctttaattataatcactcaaacaatatgatactgcataaatttctgtaagaaaaatggttaaaatatggaaatacttggaatttctgataaattggtatagtatgtaacaagtaatgtttattatttaaaatacataaaaataaaaacatacataagagagttatgatgatatactgctgcaaatataagcaatataaatcctcaaattttctttgatatttcaaggtaaaaggtatcagatagtatacaacacataaactttgtagtcagaaaaacatgtgtttcaaaattatcattagtttttactgtaatgataattaaaacaggtcttcatgtgggtcctgtaacaattggacctgggtctttctctgactcagttgcctgtcactggagccccttccccaagctggactgcctggtctggcctcaaggggagaggatgctcttagtcctgctgtgacttgaggtcacagggcagagtggtacccaagtggggcttcccctctctgaggggaaggggaggaggcaatgggggagggatttgtgagggtgggactggaagaagagtagggagggttgctgtaattaggatagaaagtgaataaataaattaatgaaaaaaatagaaacagctagtgttgaatcatagatttataacatatgattttaacactacatctatgtattctgctacaaaaaaaaagaatttttcagtaaaaaaacaaaacaaaaaaactaaaaaaagcactgtaagatatttatcagttagtattcccagggtaataagactcacctaacttcgtttcttgttcccaggcctgttcaatggtatggagtttttcctttgtaatctccagctctttactgatagcctccatctgttcttttagcgatgcattctcacactgcgtagcggacagacaccacagatgagcaatgatgatgagagctgctttgccttgactttatgcagcagccttaaaactcacaatctacattttattctaaataagcctcattataaaaagatgagaataaaaaaatcacaaagtgaaattagctagatctagaaatttttacaaattataatttctcacacatcatacaaacatgagagagagagagagagagggagagagagagagagagagagagagagagagagagagagagagagaatacacctgtctctagatcgccaagcattcatttttaccactgaatgtacctacccatcttaactaataaggacgagtgagggttttcccaactttcatgaactagagcctcatgcctcattcacacaagcacttagatgcacatccctagcacatcatctgaggcaggtgctagatgttaacaataaaaagaaataagccaaaagcccatagttcacaggcttctccatttgtggtgtgtgtgtgtgtgtgtgtgtgtgtgtgtgtgtgtgtgtgtgtgtgataggaattcggggaaggtacaacaaatgatggacaataagaaggtaaattaaaaactgcatcaaaagcttctagacctaggaagcaaatatacatggttcagaacaagaggggaggaagcaggcatatctatgtaagagcagaatttatactaacaccaaaagtatgagaagaaacccatcttgacaatcaatgaaccatgaaaagagacaatgttcagcaaactcaactgctctaaagcagtgtttctcaacctgtgggttgcgattcctaaggtgactgaagtaatctttcacaggggtcacataacaaccaccagaaagcagatatttacataataattcataacactagcaatattccagttatgaagtagcaatggaaataactttatagttggggatcaccacagagaaggttgagaacctctgctctaaagcaagacaagagctggaaagaacagataaggaaaacaaggatcaattagggaaaggctgtgtattagaagacctcttcaacaacaagcaatattaagagcctagcacttcagattttggaatttagggaatgtgagtctcaatgaagtattaccaatagtaggttggcctgtgtgcacctgtatgggggattgttttaactaactattaatatggattacaccatccattgtgagttcaaccactacctaggaggcaatttctgatccgggtaagcatgcagaaatttatatatatttatatataatgaaatatacaagataaaaataaataaaatatgattgttttgttaaggaataaaattacgccaagttttatatacaatgaatataaaataaacagaaacagaggcctgagggtcttttaaatatattgagggttttttttttttttcattttggggtgtgtgtgtgtgtgtgtgtcctttctgtctcactaattttcagtcctttgctgttttgtttgactattgattttcttcttccttttggatggaaggttgttatttttcctgtttggtttggttttgtttttttaaagaaagcaaaagaacataaagtcgagtggggagaaaagtgagtaagatgtgattggaggtgggaagcaaaactatgatgaaaagacattgtgattttttttaaaataaaaataaataccatactactcaatttccctttttaccttcacttcacatggtattgctcatatcctatcctccctgtaccctaggtctttagtccttatgccagatgtcagagccattttcttttctgtctctctttactaccctttaattttccccaatttcaatagtatcttagtgcttaaataataaaaagataaaaacaaatccttttgttcattttatcacaatttatatctgtttctcctcacctatcacattttccagtttcccatctgccttccacattatctgtccagtgtttcttattcttttcttctactatttctttatattttgaaatctgatttttatagtctacattctcatgacactttactcttaaacggtatcaacattttcctgatcactataaccatggccctatattcatattctctctcaattctatccctcaaaactcctttcagaataaattagcagtaattccatggttttaaactcacatggaaatgccttaaacatttcctcataagaggtttacatttcactaaaggaggcagacatgtaaatacatagtcatgatgtaacataaatagtagaattttgtattgctataggtagcaaccataaagaagaaaacaaaattgctttcagtacaggcgagggggatggcgggagggggaaacagcagtaaaacagctttgaactacaaataaaaattactaagataacgaaaagagagaaaacctggttacaaaacagatgtacaaaatgcatgtaagaaaaaaaccacgatgcaggcaagtaggagctcagtgtctaagacagtttgtgaaatttctaagaccaagaaataacctaaggtaaatagagaaataatgtgatcttttgccattcaattgaagcctaaatatgaagtgagtgacatgatgatagtgtttatgacaatcatttagtggcagtaaattaaaggagatttaagtctggagatagcagtatgagaaaccactgcaatgaacaaggtatagacaataccattaaagataggccataaaagatgtgattataatgttaaaattataaataaattgaagaaagtataaaagtcaaagaaaacactaacagattcccacttcttgtgatgctcactcatacttttgtttggttgtttgaggcagtctaactgacagtggcctcattcgtatacagtctaggctagcaatggactcatgatctaattgttcctaactctcaagagatgggattgaaggtgtatgtatccacactagtctctaacagtttctataactggtgatgggcttctgtagtagagagaatagccttgaaatactgaggtttgaagtagctgtcaagcaggccagaaataaattaattgactatttaaaaaaaaaaaaaacttacaatcttaaaggggtcacaaatctcttaaaatctctaatactgagggatgggcactgaactatgtcgtctttaagtaaattttggaagccttgttgagcaacagacaatagtaaagaatgagatgtccctcttccaaagttatagaaagcaacagaatttctatcttcctatttagacaatagcttgagacattgaagtacactaagagtaccagactgtgagctccactcacaggcacatactctaggagacaagcccacctgaaaatgaacccttctctgagccctggctgggggccatgtatgtgagtgagcattttcacattgaccccagtacccctgccactcccattatcatttttcaatggaatattttactgaaaattatttttcatacactacattctgatcagtttccactgacctaactgtcattctgagtccttcgattcttcctaacctaacagacactgcagaacaaagataagctatctgtagcatgctgaccgagttctgacacccagaagccacagcaagaataaaataggtattttattcactaataaaaagtgaggagtaatcgaggaagatatccaacaccaactgcaggtcttcacatgcacatatgtgcatattcatctgcacaaggcaatgtgccacatgcatacaaacacacatccacatccacacggaacaccaaggatacaaaggttaagagtcatgacagaatgtctaagctgcgtgagacatgtgtttgagggtaggcacacctgtgacttaacatatatgcagaggtctaagaacaacttttggaagtctgttcttagtattcattttgaaataagcagtatttttatcgtttcatcctctgctacatattgcagactagctgaccacaggcttctaggcaaggcagttttcctttcgccgactcccttcttgctataggaccaacagtattatgggtccataataattggctccattaattaatataggaaaacccatcttgactgtggggacaggattcatgtccttattagtggaaatgactatataaaatggagaaagcaagctgagcaatagaaaatattaattggtctgcgtcttgaatgtgtatacaacgtgaccagcactttgagattctgatatgttgaattctaccatgatacacactatcatgatctgtgagatccttttttaagttgttatgaagtgatttagtatggaaacaaacaaaaaaaagaaacaaagacatatgcattccaagatccaaatgacttgtcaggtaaatatttttatatacatctccttcatccccgccctgatttttagtatttctataacatgaaaggatggaaaactggaaagctcatccaatatctaggcaatgccactaataatgcatccacagtcaaataaatccatcataagaaatagaatctaggggcgggagagatggctcagcggttaagagcactgactgttcttccaaaggtcctgagttcaattcccagcacccacatgttggctcacaaccatctgtaatgggatctgatgccctcttctggtgtgtctgaagacagctacataaaataaatgaataaatatgaataaatcttaaaaaaaaaaaaaaagaaatagaatctagggactctgaaagggtcagaaaagaaagaaatggatacagaatagcatttccctctttaattaccatatcctagctgtgctgtgaaagaagtttggcttagctaaatcatacaagagccataagaggatgacctagataaagtcaccatcaagtcatttgcaattataaatacatagtatgtcacatgttggtatatgcattgatatccaggacaaaccacaattagatagattataactattatcatacctccagcattattagataaataagaaccaattttaatcatttgaaatcagcaaaattcttacagaccccaggatgccctaaagtaaatgactggaataacaaggtttaaaggtcatagacactcacctccaggtgttctaagttacttgttctttgaacaagcatattatctttctgcaagatgtccctgtacttagtagtcagctcattgtactgtttattggctagttctaattcagacaaagaaacactattatctataaccttctgaagagctgcaatcttgaagatggccatttcctgaaaaataaaaaaaaaaaaaaaaaaaaaggatataccaagttaactttgcatatttttttctggcaaagccttagtcactttttaaaaagaaaattcaattgaaagcaaaatagttgaaagccatttgaaaaatgtgtaatatttcctgttattctttctcgtagaaaacaattatttggaaagttttaattaaggatttaagtgagtccttttacaagttatcagagaaaaaggaagtacaatgaatttgagaaagtatagtaagcagaagatatctttggataccttctctaagtcatagaagattaaaatccactaagcatctggcagtttaagtgacagaattaatgtatgctgtctatgtctgctttcttcaagtgacacaaacgcaaggtttggttcttgttatcgactgattaaaatacctaaatagtaacaataaggatttaattgacttatttcatgtttgctatagtttaatatagaacattcccccaaagacacatgctacagtcttctccggcacggtgcaatccggaagtggcaccagctaagactggtgctggtgtgaactctaagatcactttagttgtgctttcaaagaggaccgtgggacctttgtcttggtgccctctttttcttttcattataattggctatgaagtgacaaggtccctattacccgccctcttactatgatgtatacgagttaccacagtccaaaggtaatgaggtcatagtcccaaaccttcaagtagctgaaccaaaacaacctttttctgtttctaagtttaataatctgaggtattcggtagagtcctgggaagagggtaacgcaatattctccgatagctctgaaaaggcattcatgaatggcaggaggtggtttgatgaacaccaacaaggagccgggactctttccagttcttcccagtgaaatgctccatgataagaaagtacagtgagatcatgggagcaacaaagaaccaaaccactgaaggggagatgaggctcttatagttctaattcactcctgagtgtagtgaactttctgtctaattcaaacagcttcccctcatgtaaatgagcatatactattctaccttagaggcatctggtttcattttgcagtgaaggctggttaaaagacatgaattatgtcttgtttccgttaaaatatcctcttttcttattttctataaaaaagaaaaaaatcacgaaccctaaaaactgtggttgaagaaacaagaaagaaggaggatggcagaaacctccagctcgtatatttcatactctctgtactggcaaaacttcagaaaagtccaatatgttttaaaagccacaataataaaaacaagaacatttgtaagtctcaaaacttcctcatctgagagagccagctctcacgtgacagtccagatgcacgtgactgcttctgttgcagaagagctacctggaggatattctgttatcagggtagcagggcaggggcagcagctagacacttcacactgaatcttttgaaaatacaaatgttttatatagttcatttcagctcaaaaaaaaaatcctaatattgaaagcaaaaagtatcatttcaaattactagaatatgttatttttgccaatgtatgttcaggagatagattccaaggaacataagaactttaaagcggttttaggatatattaagaagtattacagctgttattattttaaattaatatatgatataaatactttaatctctcagctgtatgtaaaatagtgaagaacataaaactacaaagttaaatatgaattcacattctaaagatatacattacatgttgtccaaggaaagagagaagcagcaataatattctcaaagcaatgacagacatggtgtaataagttctgggcatggaaatattttcatctctacaaagaaatagggctccttaaggaattagattactttataaccgagcagaagtagtatgtatgttaggtctagaaaacattattatgccagaaaacacatcaagctaggttttaaaaaacaatgagccgggtgtggtggcgcacacctttaatcccagcacttgggaggcagaggcaggaggatttcttagttcgaggccagcctggactacaaagtgagttccaggacagccagagctatacagagaaaccctgtctcgaaaaaaacaaacaaacaaacaaaaaacccaaaacacaaaaaaacaatgggtccttgctaaaataactaacatccattatcaaaagcctgtaatgagaattaacaattgagtaagatgtgcctactgtttaaaagtctgtgacgctctcatgatagccacagaagaactttatggggaaacaaagaaattacctcagaaccagagcacacacatgtgcatatacctgcccacacctgtgcacatgtgaacacacctgcctacacctgtactcacaactgcctacacctgtacacacactgcctatacctgtacacacaactgcctacacctgtacacacacctgcctacacctgtgcacatgtgaacatacctgcctacacctctacacaaacctggctacacctatacacatgtacacacgcctgcctacacctgtacacacacctgcctacacctgtgcacatgtgaacatacctctacacaaacctggctaaacctgtacacacacctgcctacacctgtacacacacctggctacacctgtacacatgtgcacacacctgcctacacctgtacacgtgcacacacttgcctatacctgtgcacgtgcacacacttgcctacacctgtacacacgtgcacacacttgcctatatctgtacacgtgcacacacctgcctacacctgtacacatgtgcacacacttgcctacacctgtacacgtgcacacacttgcctatacctgtacacacgtgcacacacttgcctacacctgtacacgtgcacacacctgcctatacctgtacacacgtgcacacacttgcctacacctgtacacgtgcacacacctgcctatacctgtacacacgtgcacacacttgcctacacctgtacacgtgcacacacctgcctacacctgtacacacgtgcacacacctgcctacacctgtacacgtgcacacacctgcctatacctgtacacgtgcacacacttgcctacacctgtacacgtgcacacacctgcctatacctgtacacgtgcacacacctgcctatacctgtacacgtgcacacacttgcctacacctgtacacgtgcacacacctgcctacacctgtacacgtgcacacacctgcctacacctgtacacgtgcacacacctgccttctataactggcggtgagaaggagagatcaaagcactcgtcctgctttacagtggggatacacttccagagtacgagatgccctgggtaataacaagaagttttccgcttcctaaaggatgtaaaacactaacgtaatgggaaaatcgtaaaaattagtgataccaggcactaaccatgaatgctaaaattattgagaaaaataaaaaaagcctttttttaaatcatgtgaaatcttaccacttaaaaatgaaggtataagccgagcagtggtagcgcatgcctttaatcccagcacttgagaagcaaaggcaggtagatttctgagttcaagaccagcctggtctacagagtgagttccaggacagccagggctacacagagaaaccctgtctcggaaaacaaacaaacaaaaacaaaacaaatgaatgtgtacatccaaaactatgtaattccccacaaaacaccatccaaaccaggatatcgtttgaactaatgattattgtttaagatatattcttgctaaaactatttaaattgaatcaaaacacaggcctcagagcgaaacttgataaaaacaaaataaaatggatcaattaaatattcctcagagagaaaagtataacaaagcaaaataggttgcagtaatgggatttaagacatgtaaccatcaaattcaataaatgcattattcaccatcaaatcctagaaaaccaaagaaaactgaatacagcctacacatgagaaaaaagggaaaactgtcagtgttttcagtagagtgacattattacagttgtgtaaacaaaagctttccattgtagagatgtacactaaaaatatttaggagagaaatgtcaacaatttaaatattcctacaaaaaatggatgaagtaattacaccaaatgtcaatagacattaaccgttagccctggtgatatatgcacacgatcctcactatcatcagacccaaaaagttcctgagcaaagaaatgtcagaaataccttgaatctttgcaaacttccaagtttttcagtgacttcggcttccatggctatgacgtcattcctgtgtttcccgttttcctttctcaggtgccgctccatctccactaaggtggtgtactgccggatgagggacttctcgttcacttgcagaacggtgattttcctactgttttctgagagcattttcttcatctcgttcgaatccatctgaagagcactgagcaaattctggagagaaccacagcgacattactgagtgaacggagctgtcctcatgtgtccctgcggccagaagggtgctcggagctacacttacgttgtactcttttactttcacagcatcctgctcagcttgatcttccagttttctcttctcctctcttatcatctcagagtctgttttccaaatatccttttcactgtaacaaatacaataatgatttagaaaaaaagaataaaaaagagaataaagtaaaccgaataaagtgctgaaccacaagagggatacatttaggttatgagagctttaaagtttctcagaatgaaagacagacagtaaagtcagagcaacttgctcaatgccgcacacctaccgagtgttggaatctgactaaactcttatcagtcccagatacagagagttacgatcactaagccagtttagaaatatgtttagggctggtgagatggctcagtggtaagagcacccgactgctcttccaaatgtctgaagttcaaatcccagcaaccacatggtggctcacaaccatctgtaatgagatctgacgccctcttctggagtgtctgaagacagctacagtgtacttacatataataaataaataaatctttaaaaaaaaaaaagaaatatgtttaaacatgttctcaacagtgattatgtggagaaggatcaatactttctttgtgactgtcagtacaatagtgaaactatatttataaagttttcaaaatataaataccttaggtattctttatataataaactttgttgatgacgaatcactgcaaactttctgttataatcttcaagggaatcttctaaatgttttaatttcttttctttattgtctagttcctaaaatttggtttataaataagaatataaatagcattagactatgttttgaatctggaaactgcatgctcacattccaaaatgattattcaaactcagtattttcaacactttataaggtaaaaagaatgaggcaatatacataaaaaggtctataagacaagcaaattattcttttaaatatggtagctgcagtaagcacacaaactatcagatccacaattcacgttaagcacaactgtttatctgactgacaagttacacactcaactcctattacttagtcacatattctttaccaacatatactactgtgccaccactaaaattagcctctttctctttagctatggtaaaacggtggttttcaccataatcatttatttgcatgcagtgcatgcacagggcatatttagaggtcagacacttgtggagtctaacctctccttccaccatgtggtcccagtgactgaacacagacacaggttattaaaggcttgctggcaccaggtacctttacatactgagacattttgttggtccccattttttttaataaaaataaaaactacaaatcctagataaagcatgacaataccaggttgccattatttgttgatggtatccctataatgtatgaaaataaatcattaatatttctatgtacttcagagtagtggtctaagatgcattttaaagaaatgttttgctctgtcgttaaagttacccttatctgacttgagtagcacacatattcaaataaagacaagactaatgtcatgcccaaatataaaaccaggaaacgataagtgtaactcaagtatcagaccaactgataacctagcagtgggaaacagggaagcttacaattacaagtgtattttggtggttttgagtagatttttctaagtacagtaatagggttggtgatgctgtagatattaaagtgtaaatgaaaatctgaaaaaaatacctcatcagctccttttaatcccattatatagacagcaaacagtaaagcaactgcagggcaagtgttataatagagtgagtaccctatcagctaacagtttacacaggaaaggttagacggaagtcaagtttacttgcaagcttttcttgtgatttacacaaaaagagacaattctaataacagcaccaaacaccaccaaaccttagcatttcattctctcacttttctaagcagcaataaacacaaatactcatctacttcctattgactgcttataattcttcgtctccttctatatttcaaatgaataacacacaagtgaatgaaaatcacgaacatattttacatgtacgtaaatggaataaacttctttatttatattagtccagctgactatctactaacaatatatttatttattctgagaattcaaaaaaattcatagactaaattcagaaacatactatcaaaactgtcattaagataaaaattctcattacctgcaaaagatgtattaagtattcattctgagaattgatgatataggcactggatggtgctatcccatcgggtaagtctatgcctttgtatactacattggagcctgcagactgacgtagaaggtcagtttccttctcaaggtggtcaatctggaaacaatccaggaatgattatcgcatttaggaaaactacaactcagcaagttatactgacatgaatcaattaaattaagccttaatttgtcttaggaatgcctaaaattagatttagagctatccctttctcttttatagtgcaaagaacttatttttccacataacttcttaaaaaacgatgtgcagagggtgagatgctgggatgtttagccgagacagggcctaaggatctacgtggaagagtatgcagaaaggtcaaaaggaccggtggttgtagatggctccaaggacaacacatttttcagacccagcagggcacatgcacatcagaactcatcgagacggttgtgagagtacactccatatctacacaagagcagcctgacaagaccccagcacagagaaaaggatgtggtcacaaagtcccaaccctagtgaaaaagctttctaattggtagctaccaggagagagaaaaaaaaatctgctctctttagtagagaaaccctgggtgatgaagcacccccagggcaagcaccatgctcagtacttagtcggccatccctaatcagatcccatggtttgcctttgtttattgtaggtggtttgctttaagatggacaacaaatatgaacttaagaaggatctgagaagggcaggatatgatcaaatataccatatgaaattatcaaagactagaaacatttttcaaagtctctttaaaaaaacgtggtcttagggttgaaagaacacaaaggacatcttcccctcataaagcagtgttgttaggaagtttcctattaaagataatcataggtttaatattttcttatatttaataaaatttttacctttaagtttgcttttaccaactgctgtgaataatttacagcctctttccgagattgcctgagttcttgccttaattcttcattccttcctgtaagttggtcaacttgggcttttagatgcaagctggcatcgaagattccttctgcattctttgattccatagccttgcatatatatataatgtattatgaatgcaatgaaaaacagtaaaatcatagtcaagaaaaatatgcctttaaataactaatcatctttccatgctcactgcaatgtctaatatgctatttatatttcttatgaagtaatatttataaaatttaagtttagtgtatttattacacagtaattacttcattaaaataaatagcatttagtaaatatttatagattagaaaatgatcagcactcatgagccagcttattagctgagcaaataactttgactccttccatgtccacgtcctcactcatctatcacgtagagcatcagtcggccagcctgtggacgcagtgctgagcagctgtagctggcaccagctgtctgcatttgcctgccacaacaggctatgcctggaatataatttgtcctttttcttatgttgctttttaactgagtattttatcacagcatcaaaatgaaaccaatacaggagatgagttggctgaatgcagacattaacgtgaaaacataacttacgttaaccagtctttcaagactcgggatgattaaagatgtttcacctcctttcacatcagaatccttcggcatgtccttaatagcttgcaaaatttctttcataccttcttcaagttgcttattttcttcgactaattcttttactgtaattataattttttcacgttaaatgaataggtcttttctacaacatattacttcttgtttcatgacagatttcaaatggaaaaaaaatgaaaaacaaacaaggaaataaaaaattcaactataaattcaacataaatgctgaattaaacaccacacctgttttagtaatatacatatgcaaatatataaatgaaaattaatatatatgtaaatacagatagatatagcatagctttgacctattaaaaatctttaaatgtttataagtttaccttcacttgagcataaaatatgtgacacatattttcataaaaactggaaatattctataacaataaacatagcaatgtaaactacaaagctaagtaacatagactgagctatatattataaaggcaattaaagatttaaaaaatggagcagataagaaagacataagagtgacttacgtttactctggaatttagcaattactgtcctacttctttctaaatctttttccttttcagccaattctcttgaaagaaactcattctgaacaaagagaataaaaatgtgttatatctcagtaataagcaggtttcaagttaaaacaatgctttactgattcaagtttagcccaccagaaaacaagctagagcagcatagcagttataaagtccagagggcaaaacagagatggccacgattctaccacctcattcacccacattccccatggcagggcacagagatatacaggggttttctgtctttagcgtcaactatatcgttgtcttaatggtcgatctttacactacctgttctgcctggcttctctgatggtcaagttctaattctgcatttctactctgctcttcttggatcggtaagtcctgaactatggtttcgttctaaagaaacatttaatgtattaattaggggagtcaacaaatttaatgcaaatatactgcaactttagattttttaaaagtatagatttgttatacatgagtgttaatgtgtaagtaaaaagaaatctttccagaattttttagagaactccggttaatagtaatagtaatagtagtagcccaggaattgcatgaatctatttggaaaggaagctcacctgagacctaaggaacgctagctggcgctgtggctgccctatgagcttttcaagggggtgtatcagagacggtttggactgggcagtaatgggcacaagatctgaaagattcacttgggtcttactgctcagcatctcagtttgggagggtaattcactttgtcctttatcgtctttcaaactgagaacggcatgctctatttgagaatagacctggttatcttctgacgttactttatccacatcacggtcatacgactgttgaggaaatattgcggagctctgcctatgtgatagtttctgcattaattctgcagctgctggtgacacttgaaaagatgaactgctcttctgtaggaacctggttttctctagacctcgatggtttcctgaccctctcttcatatggtcatcagagagagagcataagtattcacttagttcttcactgccgtccttactgaaggtactgactaacgattctagctttctcaaagatcgtaggcatggtgctttaaaaatctcccttattgtaatagcttctggagttgcactgctgtctttcacttgcataaatgaggagcatctggttaaggagacaatagggtcccctgcactgcctacactctgatggattccagacagcattctcgataaggatcgtgtggccatgttctcctctgcctcactttgatctgactgtacaacactgaatgatggcctcctatgcagcagctctgttttagctgaactcttaatctgtatgcaaagtaaataatgtctcattaatcaatcttctgatcaccacactatttaaacaagcaaaaattattatttaataagctaagggggcagatgtgctaaatgaggttaagtgaagaaaaatacccaactgctagcatttttccttcttcttaagtcagagcattactgttttatttacctttgattgtgtttcattcatattattgaggctcataaaatttagttttcttccttctattttattttcatgagaaaaggtttcagataagttcaagtcgtcaatggttaatcctacaagacgaaagaaataacaaataagaagcagcaacaacaaaaataataactcttttatcctaatacaagaataaagttttaacgcaaaaaatggtttaatatttttaaaatctttgaccaacatgcagccaatataactttgatctagcttattttaataagctatatcaataaggcaataatttgaattttatcatctttatcattttattctgtattaattttaaagtacccattaataagtagtaagacattttaaaaatataaagaaataaattaaaacccataaatttttactgtatatatttacattttactttttttgtgtgtgctgctggcaagtgactttgtgcaggttctatacatggtagacaagtgtcccaatactagggtttcacccgaggctagcataacatggcagaaaagggggcagaaatattttaggagccagaggaccaggacatctgagcaaagatagagtcttttgtacacgacatagaagttacacccatgaaactgcaacagcacagccgtttaaacaagacctgaacaatgaaaatgccagttaatatactaacatggacagggaaaatgacactgggcctcaacactagatgaaaagttacaggaaattgaaaaatgctgagagagggagaatttgtcttccccttagataagtcctctacccagtataccaatgccaagtgtcagccctaacagcaagcatataagcccaacactaatggattcagtagttttatttatatacacacacacacacacacacacacacacacacacacacacacaggatgaaggtgggatgagacatgggaggtaaaggagggtgagaaaataatctctctatattttaatttttaaatgtgtataatgctctttcagaggacccaagtttagttcccagcacccacaccatgcagctcacaactgcacggaattctggctccaggggatccagtgcttttttctggcttccacgggcacgggcatacatagagcaggcaaacagacatatggaaatattatatatatatatatatatatatgaagaaagcgtctatatatgatcctcaaaaagtgaactgcaatagctgttataaacatcacaccgtccttttaaaaggaaggtgaacaaatgaatgttaatataagattaatgaaaaattccagtaaattttaataaaatttaatttaagtactcccaatgtacagctttgagaacaaagaagcattctaaggatgaaatacagcaatataaaaattactgttttaagatattcgacataacaaggtagggaccagagtgtacactgaatttttcaaaagtccataattccaatctaaattctttaactgtctcagattcagggtcacactcaattatacccagttatctctttgtgagagcacatgcacagcaacagagcacaaccatcctcaacacacagaccgccccacatgcaggcgcctgctttccgcgtgactctttccaagttcgggtaactgagaatacctgaggctgcgttccttttgcctctttcttgagccatttgacgaatctttcttttcaagtcaagacgctcctcctctagactttcgatctgcaaagcacgagttattagtagttctccttagttcagataagaaactcgtcaactgagcgagcatcacttgcctctttcaaaagaacctggttctcagctctgtactgttgctgctttaaccgtttgctgtttctaaattcagtcaaatcaatcattgtcttgggttcaaggcctgaaatagaaagcaaataattacaaacttaaaaacttgcaaaacaatgacaaaatcttcacaaaacaccaaataagtagtattcattatcatttgaaacatagagccttcttgtataagatgtctagacagttatactacaagaaagctaaatgttagctaattatgaaagtcctaacaaacgcatatggggatgctgcaaaggtactgcaattcattaactaagaaagtctgtcattaagtaaacgactcagtgctcacttgaaacttactatggagatgacatttaataatatgattagactaaatcaaatgcttagagtgatacttgtcaaatagcaatctttattactaatcatgttgttattgatttaaacctctcagctaacctaactcctccattatatgcctccattatagaacctgattcataaataactaggtggtgaaaatcaagtaccaagacagtctaaatagttgtgcatcagactttggatattaaaagctaaacccattacagacaagaaacatggtgtttgtgccagcagtctagataggtcataagttatccacacatacgtctacattcctagctgggactagactagtcacgtcaatcagaaatctagcttaaccacctagtataatcctaagttctagttaaattatttcagaaatgatcaatataaagtatttatttttcttctacacaaagatttcctcgattgttagtttaactctaggaagcactaattgatagccagtgagcacaatgaatcactatataaatcagtcattttaaagaagcaatttagattggacactttagttataacttaccccatgtaaagtagtagtactaaatatttcacccctaattttaaaagtacataaatccccatgttatatttggaaattacatcttagactaaatggaactcctaaaatacgcaagaaaatataagcagtttataatgtgtttatatatccttaaaaggtttacaaaggacttttaaatggcctcaaaaaatcattttgtaagctaacaattcatacagttctttttgttgttgttgttgttctttttttgttgttgttgtttggttgggtttttcaagacagggtttctctgtgtagccccggctgtcctggaactcactctgtagaccaggctggccttgaactcagaaatccgcctgcctctgcctcccaagtgctgggattaaaggcgtgcgccaccatgcccggctgtacagttgtttcttattgcagagaaccagctatcctcttacatgcagcataacgcaatgcactttcaccattcgattattactgaaggcatactgggtcgatgaaagccatgttctttatcaagccccaaacccacttctgtcagagtacctccacttttgtttaagtgcttctacagaaacatttatttgggtaaaaataccaccaactgctagaaagaaataaacaaatgtaaggtaagagctaaaggggaaggagagggcaggaaggagaacacctcagcagaatatgtgcactttgcttgaggattaggaccacttcccctacaaaagtaaaaccaacctaaagaaaacaaaaaggacttcaaaatcagactgaggacaaagcagtatctcagaaaacagcttaccagcccgctctctaagggcttcgttttcatcaaggatgtcattgatcttcatctcaagcttattgatctccttggtcaacacttccatctctccatctcttattttaatttgggctttacaattctttatttcgataacagcatcttctaagccatatactccctgaaaaataccccatctaacttcaatatttcataatttatttgaataaacaaatcaaaggtatgaatttactttttttattaaggtgatgggttaacttacctatacctgtattttaaatggcagactttttataactgatacataaaaaataaaaatagtacatattaatggtacatattatctttcactgtgcttctataaaccaaatctagtaaagagggcagaatataaacatctggcccaaaggcaatgtgactcagcatattacaaattgaacactgagtacatacagacagacataaaggcagagataaagcataccaatcagaatgtattcttagctgcctgatgaatcaatttagagatatgaaaagtcaggcctcaacagatatgaaaatattgaaattgtcccatgcatcctatcagatcaccatggactaaggctgatcttcaataacaacataaataataaagagccaatattcacgtggaaactgaacaacactctactcaatgataccttggtcaaggaaggaataaagaaagaaattaaagactttttagagtttaatgaaaatgaagccacaacgtacccaaacctatgggacacaatgaaagcatttctaagaggaaaactcatagctctgagtgcctccaaaaagaaactagagagaacacacactagcagcttgacaacacacctaaaagctctagaacaaaaggaagcaaattcacccaggaggagtagacggcaagaaataatcaaactcaggggtgaactcagccaagtggaaacaagaggaactattcaaagaatcaaccaaacgaggagctggttcttttagaaaatcaacaagatagacaaactcttagccagactcactagagggcacagggacagcatcctaattaacaaaatcagaaatgaaaagggagacataacaacatatcctgaagaaatccaaaacaccatcagatccttctacaaaaggctatactcaacaaaactggagaacctggatgaaatggacaagtttctagacagataccaggtaccaaagttaaatcaggatcagattaatgatctaaacagtcctatatcccccctaaagaaatagaagcagccattaaggatgttgaacattttttcaggtgcatctctgccattcagtattcctcaggtgagaattctttgttcagttctgagccccattttttaatggggttatttgattttctgatgtccaccttcttgagttcagaaaatgtggtacatttacacaatggagtactactcagctattaaaaagaatgaatttatgaaattcctaggcaaatggatggacctggagggcatcatcctgagtgaggtaacacattcacaaaggaactcacaaaatatgtactcactgataagtggataatagcccaaaacctaggatacccaagatataagatacaatttgctaaaaacatgaaactcaagaagaatgaagactgaagtgtggacactatgcccctccttagaattgggaacaaaacacccatggaaggagttacaaagtttggagctgagacgaaaggatggaccatctagagactgccatatccagggatccaccccataataagattccaaacgctgacaccatcgcatacactagcaagattttgctgtaaggaaccagatatagctgtctcttgtgagactaggccggggcctagcaaacacagaagtggatgctcacagtcagctattggatgggtcacagggcccccatggaggagctagagaaagtatccaaggagctaaagagatctgcaaccctgtaggtgcaacaacattatgaactaaccagtaccccggagctcttgagtctagctgcatatgtatcaaaagatggcctagtcggccatcactggaaagagaggcccattggacacacaaacggtatatgccccagtacagggccaaaaaaatgggaatgggtgggtagggaagtgggggggagggcatgggggacttttgggatagcattggaaatgtaattgaggaaatgtaattgaggaaaatatgtaataaaaaatattaaaaaaaaaagcagccattaatagtctcccaaccaaaaaaagcccaggacagatggttttagtgcagagttctatctgactttcaaggaagatctaattacagttcttcacaaactcttcacaaactattccataaaatagaaacagaaggtactctacccaattcattctatgaagccacaattactctgatacctaaatcacagaaagacccaacaaagatagagaacttcagaccaatttcccttatgaatatcgatgcaaaaatactcaataaaattctcgctaaccaaatccaagaacacatcaaaacaatcatccatcctgaccaaagtaggtttcattccagggatgcagggatggtttaatatacggaaatccatcaatgtaatccattatataaacaaactcaaagacaaaaaccacatgagtatctcgttagatgtggagaaagtatttgacaaaatccaacacccattcatgataaaagtcttggaaagatcaggaattcaaggcccatacctaaacatgataaaagcaatctacagcaaaccagtagccaacatcaaagtaaatggtgagaagctggagcaatcccactaaaatcagggactagacaaggctgcccactttgtccctacctattcaacattgtacttgaagtcctagccagagcaattagacaacaaaaggagatcaaggggatataaattgaaaaggaagaagtcaaaatatcactttttgcagatgatatgatagtatatataagtgacactaaaaattccaccagaaaactcctgaactggataaacagcttcagtgaaatacctggatataaaattaactcaaacaagccaaaggcctttctctacacaaaggataaacaggctgagaaagaaattagggaaacaacacccttctcaatagtcacaaataatataaaataccttggtgtgactctaactaaggaagtgaaagatctgtatgataagaacttcaagtctctgaagaaagaaactaaagaggatctcagaagatggaaagatctcccatgctcatggattggcaggttcaatatagtaaaaatggctatcttgccaaaagcaatctacagattcaatgcaatccccatcaaaattccaactcaattcttcaacgaattagagagggcaatttgcacattcatctggaataacaaaaagcctaggatagcaaaaacactctcaatgataaaagaacctctggtggaatcaccatgcctgacctaaagctatactacagagcaattgtcataaaaactgcatggtattggtatagcaacagacaagtagaccaatggaatacaattgaagacccagaaaggaacccacacacctatggtcacttgatctttgacaagggagctaaaaccatccagtgggaaaacagacagcattttcaacaaatggtgctggcacaattggcagttatcatgtagaagaatgcgaattgatccattcctatctccttgtactaaggtcaaatctaagtggatcaaggaactccacataaaaccagagacactgaaacttatagaggagaaagtggggaaaagccttgaagatatgggcacaggggaaaaattcctgaatagaacagcaatggcttgtgctgtaagatcgagaattgacaaatgggacctcataaaattacaaaacttctgtaaggcaaaagacacattcaataagacaaaaaggccaccaacagtttgggaaaggatctttaccaatcctaaatcaggggactaatacccaatatatataaagaactcaagaaggtggactccagaaaatcaaataaccccattaaaaaattgggctcagagctaaacaaagaattctcacctgaggaataccgaatggcagagaagcacttgaaaaaaatgttcagcatccttaatcatcagggaaatgcaaatcaaaacaactctgagattccaccttacaccagtcagaatggctaagatcaaaaattcagatgacagcagatgctggtgaggatgtggagaaagaggaacactcctccattgttggtgggattgcaagcttgtacaaccactctggaaatcagtctggcggttcctcagaaaattggacatagtactactggaggatcccgcaatacctctcctgggcatatatccagaagatgttccaaccggtatgaaggacacatgttccactatgttcatagcagccttatttagaatagccagaagctggaaagaacccagatgcccctcaacagaggaatggatacagaaaatgtggtacatttacacaatggagtactactcagctattaaaaagaatgaatttataaaattcctaggcaaatggatggacctggagggcatcatcctgagtgagttaacagattcacaaaagaactcacatgatatgtactcactgataagtggatattagccctgaaacttagaatacccaagatacaagatacaatttgcaaaacacattaaactcaagaagaacgaagactggagtgtggacactttgccccttcttagaattgggaacaatacacccatggaaggagttacagagacaaacttcgagctgagatgaaaggatggaccatctagagactgtcatacccagggatccatcccataatcagcctccaaatgctgacaccattgcatacaccagcaagattttgctgaaaggaccctgatatagctatctcttgtgaggctattccaggtcctggcaaacacagaagtggatgttcacagtcagctattggatggatcacagggcccccaatggagaagctagagaaagcatccaaggagctaaaggggtctgcaaccccataggtggaacaacaatatgaactaaccagtaccccgggaactcgtgtctctagctgcatacgtatctatcagaagatggcgtagtcggccctcattgggaagagaggccccttggtcttgaaaactttatatgcctcagtatgggggaacaccaaggccaagaagtgtgagtggttgggtgggtgggggggatggtctgggggacttttgggatagcattggaaatgtaaatgaagaaaatacctaataataataaaaaaagatatgaaaagtccaagtggagtcagttgatacagatattgtaggcaccaaagccatccccaccacaagttcatcaaggtagtcacagtcatacctccattcaggcacaaaggacagagatacaagggactaatcatgatacctcacctgagctgcttgtctgaacaaaacacttcatcaaaaggcttaatggggaagtaaagacagacggaggaggagggagggtaaaaagcaataatgctgtctgaaaagccataaagaatcacatgattgactattcatatgaaagtacaaacaacctgataccaaatctaattttatgtataaatacatacatggtttaaataatcttttctcatctatactgacaacaatcccaccaagagccaaagaccatgtaacgaaaacccaataccagacatgagatgtctttttttgagttgctagccaaggttgtctaaaagactctgaaaacatacagcttattgctattgcccctgattggccctcagaggtagagagtaagtcccaattactgaatacacaatgcatttcagaaacaagacctagagacttcaagttggaactcattttttaagcctattcttccctgaggacgagctttcaaggtcccagaaggtaccatgcaagcttgaaaaggtggaacgcaagtaaccctgccaacctctgcagcttatgaacctcactgaccagcatgccacagtaatcctaagggaaactactcagtactcgttcagtcacggttactgtagggtcacagctactactctacgaaagcagcataatcccaccaacgttgtaaacatttgtccttttacctacagataaggtcatgctctttctctttgcagtaagagcccacagtacctcagccctaacacagagaactacacacagagcaattcacaaagtgagcagaaaaaaatagtcttctccagtgaaaaagcatgtttggttatccaatatccaataaatacatacaagtaattctacatgtaacaggatatatgatcacactgtgaacaccgagattgtgttatttactgaaaaaaactctttctagttgtggtgtggctcagccattagcatatacctttaatccctctggctggaaaacagaaacacacttagtacaataactttaattgcaaacaaagaaggtaaaggttatttgtagaaggaagcaagcatgtttggaagtgatgtctacctgtgtgacagacaaagtgataaatcagagatggagtttacagaataggatatgcccaactctcaggagaagagagaggaaagagatgcatcttaagaaacaatagcacaaagacagagatgaggcagtttttactgggataacagtacagagacaggttacagagagataagccagacatagatgaagacagaacaagccagaaaatgagatttaaccacatcagatattgccaaagatagtttgaggccaagcagagcaaaaattcagaggacaagagagaagccagattgaatcagttagcttggagaggaatttgagccagaacagctcagttgagagatcagaaagagttagggaggagtgagcttattcaacagtaaagtctcaaaggcagaaaacattctaggcctcgagaagattgtacaggggctagaaacttccaggactaggcataggttagaagataggggcagtaagtctctgagaatacaactgcctccaacaaataaaaggtattctaacatatacatcctgagttcattatatttatgaatatatctaacatatatatatcatacatgtacatatatattacatatatataagaaacaataattaaggagaaaggaagcaataagagtgaggagggttatgtgtgtgtggatggtttggagggaagaaagagaagagaaaaatgatgtaataatctcaaacttaaaaaaaataataataaaataaactctttttaagaaggaaaacaggtttggaagcaattctcttgacagaaagcgaatgctgtgaggtctgacgagttgacggtgcggggatccagaatgttttctccatgggacacagtacgagccacagagccagcttgctgtcagaataactaagctctctgactgacaagataaaaatacttacagattcataatcttttaatctcttcagagcctcaaccaattctttgtccttctccctggcatcagcctcagccagctcagctattctctcggcctcttttgttttctcttctaaaatttgtacttttgagtgaattttcatataatgagtctgctgataaaagtttgaagtacctacagtgtgaaaaaagaaatcatgaacgaactgaattgagttctccttcttatgaatctgctgttcccaaaaaggagctgcagcatcagtaaggcacaaaagcttcttaggtgtctactcactgtaagaccaatgcactctttggttttattaagaaaaccaactaatggcaactggggagtgtgggcactgcagcttttactaaagtcatttgaaccaaaaaaaggaaaatcaactaaaaagtagagttgattacagttactttagctataaggatatgggttattaaaaaaaaaatgttgtaaaagcccactttacagaggatgcatctctgtgacagaaaatatttaatggtgataataatcaacatttctttcaaccactattaacagtaaaatagattttcagctagatgtattgccagcctaaaccttcagacgtctctttctcctctgcttcaccaatggagtctttccattaatctacaaaaatgtgttgtttcttctttaaaacttacaacatttttaagctttctttctcctcaggctactacctagtttttttttgtttgtttgtttgtttttttactaccctattgcagaaaagattttctgtttcttctctccagttcccctttccctcggattcagaggcaggaaagggtgagtgggtggaggaggaccctcatagaggcaaaggggagggggaggggaggatgagaggggggattgtgaaggggtaactggaaaggagaatatcatttgaaatgtaaaaagtcgtttgaagcacaatgatatatgtaagctgttttcttataaaatactaagatacctttgtctttttggagttcatttttcaaatcttcaataataaacgtatttttttccatttctttcgtatactgttctacttgctcagtaagcatcttaatttgactgtctcgctcctggataccctacaaaatattttgaaatagcaaatattcattaatatgaacatacatttttataataaataagagaacacacttcctggtagataaactgtttcttttaaacattttttttattacatttatttatttgtgtgtccatgtataggcagatgtgtgggatcaggtgacaacttctttcaccttgtgggttccagagactgaactaaggttgtcaggaaggacattaagtgtctttacctacgtggccacctaccagacccaggaaagtaagtttcgtatgtattcctcaaacagcctacacaactgttctcatgtgaatatttaaagatggaaatttttattctagaactccttagtgtccatggcttttataactcctgatacagtattcttgctagttacccattgaaccttctctttggtactctctctgtttgctctgttctttctttccggccagtcaggcttctgtgccttctacaccccactgagaaacaaggtcctcatcactgccctcattttcaaacagcgtctatcttaccacttcactgaaagaacacatacaagaggagtgagaggggttttctgaatgagtttgttttcctaaaaacaacttttaagtagcacactcacaatataagcacacttggttcacttagtagtttaggcataagatacacaataacaaacattaataagaagcaaggtattttaaaagctacagcttttgaatagatactaagtaattccaaactgacaataaataataatatgaaaaagcaaaataattctaaagtgttacactctctctaaacttacttctacctttgcctcccccatgagctatgcatgagagacttcaaagcttgttacacacacagtaatggaagccgaccaggcccacggatgagcagctaagacagcatcattccctgatgttaccatccttgagaaggttttacctgtttcagagccatgatgttacttttgtctgcatcaagttgggcatttttaagtttccctctcagactctgtagcatttgctgatattcaatgatttcatcatctttagaagacaaaattaactaaaaaaaaaaaataataataagatctgttataaaaacgtaaattaacaaaccactcataatttatagaaaagtataaatacctttagcacatttaaaagaatacaaaaataaaattctttttaatttttttcagtgtgcatttataatgtgtttgtgtctatgtgtgtgtgtatgtatacacacacacacacacacacacacatataacttctcattaaaatactgccttcaaaagaaaaactggaaacctcctgagtgtcatacaacagggtactcattcattatatgtacaaaaattaaatattaaaatgtgattggaactgggttttttccaaaggttagaaactacactctaaggttgaaagcaagcctggcctagcttgtttcttaaggccctgtcaggcagccatgcttatccactcatggattgtctgtgcactaccctttccaagcagttgcatggctagaacaggacagctaaaactgttactttctagagctttacagattatctgacccctgcaggatgaatgcagcttcgtcccattgcaactacagctgcgacataaactatctgaccttcccagataacaaacagttcctaactgcagataagggttcagtgggcgtggccagaggtggagatgctagaagggccagcttttactagaattactagttcagtcatctcaccatcctaatcctagtctctgatggggtacagctctggacttaggctggaaaatggaagttagacaaagaaatggagtattctgaaaaggctttccacatgagactgataaatctttcccctgatgccattcctgatcactcttgcctggaaagtgcttgtctaataaatgaacaagctcgaggagcacatacagaagctttagagcttttatacccaggtatggaatgaacttcttaaaaatcaacatgttattgtctgatataagtccttaaggatcaaaatcaaagtcaaatcaaaatactaaatgagaagggtcggatcctgtggcacagcaccttccactcttccacttttgcgttaacagccatcatgactggatcgtcctcttcatccttcgccttcagaagatccgtgagctctcgaacctgagaggaacaatcagcttgtaaaatagttcaaagcagggcgagttcccgtgattgcatgtgcatactgaagcatgcacaaagacatgtttacagctgcactatattacatgtgctattcattactagcgtagtcttattcttaaaggtgaaatgtaatagctgtataattctaaataaaactttaaaatctgaaatgctctcaaattggacactttttatgttgccacaagtggaaaattatgtatcacatttaatttgctgtgttttagtcaaaatacaggcataaaaatactgtattgatggtttacctatcagggccacatgaagcatacatgagtctagtgtttagctattaacggtatccccacaagtgctcatgtatatatctatcctgcactacttccaaaacctgaaaaccccccaaaagtctaaataaaataaaaaaatgaaaaataaaaataaaccacactctggacatttataatcccgtgcattttagataagtgctactcaaggaactattatataattattactagagaaccacatttttaaacattattgtacttttcaaacaagctacccaatgtaaataataaataatatattgatctctgatatattttcagtgttttaagaaataaaattaagtcaggcggtggtggcgcatgcctttaatcccagcacatgggaggcagagtcaggtggatttctgagttcgaggccagcctggtctacaaagtgagttccagaacagccaaggctatacagagaaaccctgtcattatagccattgggtttttaaaagtcttcatatccctgaaactattctcagcactcctgtctacactcccttgagcatcattcattttccccaaatggccaggaccaaggtgcacgtgaagagccctttggacaagtatgtcaggatggcaacacattcctgtattaagacaagcaacaaaagcaacatcctagaacattaaagtctgtctagtttcaaacacacagcaatgaatgaggctggtgagaaccaggctcggtttcaacggtgagctcgcttacttgcaggcgatagtgctcattctccttcttgatctggtccatgacagcatccgactgatgcacaagcgctttcatcctgttgtactcatcagtcatcttctccatctcctgcacagactcttccaggtttttcctcatttcttggttctgaacttcaatcttctcattagcttctgttaaggtctaaaaatgttaaatacactattactttaaacaagtcttacaagaaactgaaatttatactaaactacaattaaatagagccatagggtcctccagaggaaaaatggattcttgatagcccattaggattaacacgacattggccagttaaatgaaattaaatgtcaagaaaattgtctttggcatctcagttgatcttggtgcccaggacagagaaatgcagtgtaaataaataattgaaaattcaaaggcacaacttattttgtgttttaatagtacatgtggaggcagagagatgtgtttgtgaataaaatacttgcagcataaacatgtgaatgcacataaagccagacgctgcagtttgcgtgtttattctcagtgctcctactgagagagcacagaggtgaatccatggaatctgggagctcgatggcccagactgcagagtagtgaaccacaaggggatcctacctcacataaggcagaagctggtaacaaataccagaggctacccctgacctcagcacacatgcaggcaccaatgtgcatacacacatggacaggcagcattatacacacacaagataaatcagttaatggacacagtagcaaatacatactcaaaagtaacaacaagcagtgaatgttagatttaccccagcctggtaatacatttgtaaaaccaagcctctgaactgacttactcatattacctgtatttcgtccagatattgaacaagttcatagttctttttagacaactgtgatcggtagtcactgtcttctcctctccttgacagaagtgattctttctgtgaatctatttgtttctggtagtcaataatgtcctgccgaagctgctcattctgagtttagagcaaacacagcagtcagcgttaaacctctatccagagccaaaaacgagccaacaggacaacactactgaggatgacaaaactctacccctgctgctgaccccagagccgctctctaagctcccaagctttaactacccttagggcctcacctttttctttagacgtttgttcttcaaaaggacaggaaaagaataattagagatgagaaaggcaacacataattaaaaccaacatgtatgtattaaagaaagtgagaataaggaacattttagaacaactgaatgcattatttaaaatagtgaaagaaaagaaaaaatattaagtatgagccaaaaggaaaaaaattctaactaggctaaaaagaaattttagataaaacaattaaaagaagaggacacagtaggtggcggtcagaagaagaacaggaataggggaaatgatatgatcatattaaatgtgaattaaaacatttctgttacaagacagaaagttatgatttagcacatatacacaaattgtattatcagacttcatgagaaacaaaactatgacaatgccagacaaaacgtcataagaaaagaaacctcctcaaatgcccagttcgctgttagcaagacggtcatggaacaggaaacaacatcgccccacacggttccaaggcagggatgaactacctaatggcctcgcattttggttgactctgtaattccctgagacaaagcctcataaaatgagccagtatgactatcatcagttacacagaagatgagattctggttaaaatagcattttaagtaaacattttaaacaaggaagtcattgtcgaaccaccccaaaactgaaagtctttactaacctctcttcttaatttgctgttttcattttctgcctcctcatttcgaagagccaactaaaacagtaaaagaataaaaaaaagataaaactcaaaaataatgcaatctaagttccacatttagctttttttacttaaattcttattcctttccaagagagaccatgtaactactaaggactagtaaagacttcatatcacactagaacacaaataaaacacgagtttaaactaaggacttaataaagtacagaaggaaagactcagctttaaaggaaaaataatctatatataccaaagcaaactaaaggctaaagaagacaacaatctcaaagttatattgcccaatttcctaaaaactgctgaaggagaaatcactcttccctctttatgaactgaaatacctacaaaaagggggggcgggtacagaaatgactgaaacaagctgaaatcagaaatcaggttggcctaagtttatatatcctttgagtatcaattcttacataagtacaaaaaatccatttaccatcccttcaattggtttcatgtctcttgttgacatgagaaatatgatgtgcataaagtccttaacaagatactcaacaaacagaccagcaaacagtactaaatgctgttttcttcacctacaacagttcatttgcagcagtttctgttttcttttggacagaaaaaatattataaccaatatgatagcttttctttattatctattctctatataacatcattttaatggtcttttacctttctgtttttctgccttactcaagcaaaaaattcaatcacaatagtatgcaaaaagcttaaacccatctataaggaggcatagaatggttctttagacaggtaggaaataaaatatactattaggtcagtagagaaaatctgattatagactacaatactaccgaatcaacatttcatttcctgaacatcataagtctattttggttgtataagggaatattcacatttttagacctatttaattataaagtattattatgtctaaaattaagtcttaaatggttcaacaaaagaaaaatgagagataaagaattatgtgtacaacgatatgacagaaatctcaattgatgaataaccatgagaatatgaatatttattgtttttttctgacaagtctttataaaatataaagaatatttattattttccaagaaaaaaacatttcacatgcaatgcaaatgaaaattttataagtttgatgatgattaatgtgacaattattatctggtactatctgtccaattgtattctaaattggaaaggtgaaaattcaatactcaagcactcagggctactccactgttttcctttagcttcactcttgatagctttctttcgtgcaacctattccattattttattcaactttttcagtggtaaatcttacaatcaaggttctggcttcattaatatctatactaaagaccatgatcagtgtggtgtctactatgtatatgagatttaaatattacaagaacctcaagatcaactgggcaaaactgaaccaataatgttaaacctgcacacaactcggtgttccaaagggcaccattgcacctagccacatgcatgccacagacaggcagcctctcctctgctctccatcctgtcattcaccagcccagtcaccctttccctcaggcatgtctagtcatcccagcagttattcccttaactagtccaccatcagcactgtcggaaccaatacaagtgtttccttactaatttgaccctcctcagtctgctctccacaaagcagggtaagctttaaaagctcggatttgacctagccttgtgctcagctctcttgtttctttagaaagatcctttagtctgcagcctttaccagaggctcatgggtatcaaagctgggaaggaaggacaggagagcgagagggagcacattttccagtgtatcattagaagtaggtagtcaattccattatgtatttcaaatgtgactacaaaatgaagactggtacaaaacttacctgggtgcatgctgctcctcaactagacatataaccaagaactgctcccaaaggcaactacagcagtaagagtaatggtgtaggattatcctaaatattaagattcatagagaaaagcgggtcttacttgttcattaaccttcttttctttatccaattctttttccatatcctctaattctctatctttttgttccagctgcttctcaagttggcgaatttcgtcacgtaaaaaccgagtgtcacgtccccctgcagactgctgagccatcttaaagtcagaagcaaagaattcagtcttccaactataagtaattctttttcacttgaaggtttaaaggaaccaacgaacaagtactccactgtaaattttcagtctgcttcagaaacaccaggcagcttaaggcttgtcgtgcaaatgccattttaaaagaacttaagagttgggtgggtagggaggaggagaggatatggaaggacttggggaaagggaagaataagagcaaaatatgtacatttaaaatcgctttatataataaaaatataactagaaaaccccctgaacttattaggctttaatttgtaagtcggcaacccacaagctttccttgactaccaaaagaaccatgaagaacagactgcaggcaggcgctgttacagtcactaagcctagggacagactaaaatgcgaaggcttagaaactgtaaaggctgtgaaggaaaactgaaagcagcttggtcctctttctctgtctgccctttcctgacacggcaggctggttggatcagacatcactctagtctagaagaaacactctcagtcgtgtctgtccttgctcgttctgagtcatgtgcacacttgacttgtgtccagcgcaacgaagacctgaatgttcagctttaacaaatgtaactgcacagcaccatgactgcttggtactactctacaagcaagccaagacagaaccactttaaagcttagcagacatttcaatttattttacttcacattcctgacaactagaccatggcgcaaaccactgggccactaggcccctaagcttgcgtcacagggaacactccccacacatttctgctacgtcctcttactcagatgcttttcagtcttctctgcttcatgaagcttcccactctgcgctctctctctctctctctctctctctttctctttctctctctctctttctctctctttttttggtttttttgagacagggtttctctgtgtagccctggctgtcctggaactcactttgtagaccaggctggcctcgaactcagaaatccacctgcctctgcctcccaagtgctaggattaaaagcgtgcaccaccacgcccggctcaccactctgctctcttaaagcatcttccaaaacactgattttacatcctgagcatttgttcttaactaaacctttccttatttccttacaaaactacagttaggttcttttagagcgctcattcctttgcgagttgtttgtcagttcaagatcaagaaaaggtgacaacagtctctgagggctcctccacatcttcacccattttgactttacaagatatgtcgctatcctaaacactccaatacgcaccagcaaaccaccactttcctgtgcaggcttgtaagtccttaggatgcaggcatgtggcagctcagtcttctacacaaatcagcctgagccactgctacaaccacatgactcgctccttttattttaaagtagctttaaaggacaagtaagaaacgacgtgtttcttgatttactgcgttccgccagtcctaacagactctgcccaaagaagcattccctcagctcttctctaggactttccctttgataaacacaatgggcccaacacatgcttcactgttcctgctccctgactccacacttcccctgtcccaacgccagtcttgacatcatccccatttagcatagatttcatcaccaatactttaaacacattctgaccaagaccttgaactgccagagtcttctattctttaccagctgtctgcctaaatacaagcacagaatcagctcaacttcagacatcgtttactacaaaagtgcttattaaaagtgcctgacagtttcccgggagcttgaaatctagctgaagatgtgaaataacttatccatgtgcacagagttaatcaagtcaaaataatgaggactagaactcccatctgagcccatagcccttggtcttcagccctttgtctacgatgtctcaaaggttatcttattctcacagtctcccatggctaaaccttacaagcgatctcatccctgtctctgcttctaagaactaaactcacaagcataaaaccttgtggacctctcctttccctggttcctcctttcaaagtctggtcctttcctactgcatcccctctcagcttctcagaatctcggtgtggttacttcccacacccttccccctcagctgctactaagctttctatatgcttctccagactgacagccccattcagaagggatccgtttttacttcactggatgcataattcttagaactcaagtcacaaaagcacattctgtgtaatgaataaacgcatgagcacaaaatcttgtattttccaatctgggaggatttgaaaacaatttaaaataatgcaattaataacaactacaagaaaattcaaaaacaaggaaatataaaaggatatatatatacctccagttcattttccagtttcattacttttgtctttaattgattttctatttaaaaaaaaacacaaatgttttaattggttaagtttcctataatcagattttaagtaaactttaataaaatagtactgttctctgtaaaagattccatccttaacagatacaggaaagtaattattatatactaaatgcataaaatatgcattctagaaatgcctcatgtagagagcagaggaaggcttcagtgcatgagccctgagtcagtgtgtactactgacatgggcaaagccacgtcaggaactccaaatgtctcaggcctatggcaaacggcaaagccttccctcctcgtctgactgtggatgttgacagggtgtgcagaaaatgtccccctaatgtttatggctcccttatagagactactcctactgagatttgataaatctgcctccctattcaacagcagaaaccctgccttcatgtttatctgtatgcactcactcgactttatgttcagctatgcaacaactccactgctctggtcaagtggatataatacagacagtgagcttctggggtggggcagttgctccattagagagcctggtccaaccgaaaacaactgttctaagtgtctgtgtgttttcttttcttcaccccctaccacagcactcaggccagtacctggaactgcacaaggatgtagcatctttcagtataaattgaatacatatgttatagaataggatagattttatactgtctaataagtaatggaaccacagtagttttttcccaagacatttaccaaattttgcttgttcttctccagccttttcaacttcttccaaagcgagctctacttcctgggctttcatctgaacattaaaacgagaggggaagaatctgtattatttacactgtaatgtaaacagtgggaatggaaactgtgtggaatttgctatctcagtctgtagtgtgtacgatgactaacacacagagacagtcagtaaatagttgttgaataaatacataaggctagaaattccagaatggcaagactttgaattatatctgatttttccgttaaactttatagccattacttaaaatgttttcaatatcttttttactatcccaattgttattattaataaatttagtaattccttcttataattggaactaatcagctctcatcccttcagtctatacaacacatttaatgttgccttcataagtacatttctttaccaagtatgatttaaaaacctttattcccttctaaaatgctgataaccaaaatatactctcaaactcttgaacagtatatcccaaattactggccccaaatatttttctatatgcttttaccttaatgtaaagaatacatattctttctcagtatttatttatgaagaatctagaatcctcttatcatttcatgtatagcttataggggagagattttgtattttatttgaccatatgattctttatgactctttatgtttctcctaaaaaatatttcttttcctacacactctttcctacaaaccttcattagagactgggtaattctgaatagatgtatcatgttttcttggtcttcattttttagttcatttacttccacctaaggaaacaaacacacaaaaaatggactatttcataccctgcacattaaatacaagcactcttccagttatagcattcaatgatttcaagaagcaatttcaattcatgacattgtacatcaggctctgtgtacaaatcatttattaagtaccttggataaagatatcaataatttatctgctaactcttcttgccgtggcaggtcatctggatcaactttgattaattctttccactttatattaggtggcatcttgaattctttcactgtctctcagcctctacaaagaagcaggtggattttagcattttcaaggaaaatggccttgcagtgtttacatgatcatgagcggtcttacttaactctctaggtgctggctaagagctatggctcctgaactgcaaaacagatgcagaggcaaacagcctcgacgaaaattagttcccctgacacaggctatacgataatgtacacgctaaattattattttcttgctaagacgaattcggagctaaaaccccgaggccccttttccaagtcccctaccatcaatgatggtaccaactcccaagatgtttggaagtttttgaaaaccttctgaggaaaggggaccagaggatttttaaagtagataaaaagactgagctaaatgaagtgtttgcggaatcaagctcaatcagggaggccgagacgacactgcagacaagagcgacagaggtctggataggtagggctgcaccctgtccctcgggattacgatcctgtgaacgacactaagcggctccggctcacgaggatccacccaccgaaaccaagacctgccaccagcagcagtcactcatctacagcgaccacctccgggttcggccaccgccccggcctcacgcttcccagagcggtcctcgcgcactcaggctgctcccgccaactcttcccgaccgagccgaagcggcgccggctgctaggcgacaccactccccgccccccagcctgccaagaccggaactaggccccgggatacctgggaagactacatttcacgaccctggaaaaagctttacggctctatttcccctccaagccctccttactgtggatgagggagagccgtgagatgaggactctacgtcccagagtgcagttcggcgtcgcggctgtgcatcctgggattggaagtttttgggaagagcggcgcgttcccggcgtgcaatgcgggagtctgcggccgccctggaagagctgggggaaggctcgggaggcgggaggagcggctgctaaggtgcggccgccccggagtccgagcgtggcaggctatgactgtgttttctgcggagtccttctccggtccaccatcccagaagctttcctgaaccgtctcctggcggagccgccctcaggtgaggtcggggcgtgtcaacccacagccaggagtagctcagggaacctttgcgtttttagggaagcgctagcttggggctgccgaagggctggcggatcttgcagaggtttgggaaagagtcctccggctactcaggtaggtgcgaggggctcccagttagtggcttccctaagaggggagtcaataaaagtttccagcctccttggtgtctgggaaagtggagcgcccccacccccaccgcaccccctgagttcacgctctggttgagtgaagaaggagcgtcaagatggggcagcctcctgcagcagcttgcggattgtagtgcttattaggttaataagagtggagtgaaggccaaggaaagaggagccttagtgcgcccaaggctcttaagccgggctggagggagggaggagggccatgccaagcgatggcattttgctgtcatttgctgggtaccaagggagttcttgggggaaagtgccttctccttctcagatgttaatcttcttactcagggaactgttgccaaatgcacagctattctacaccagcaggtaactttaggagctgtaagcatctatttgaaagagtgcgtctcgtatatatgtatgaatgtatgtatgtatgtatacgtggatagatatataaggtacttatacatatcatacataatagatattaagtaattaaaagaaaaatgtagacagttacatttttcttttgaaaagatttctgcggttgagaaaaacaaatagcacaaaaaaatggtatttgaaacaaattttaaagacgttcttcagatttgtaggcctgattgcagtgtttgctttatttctaaatactgtttagttttggaattattctttgtggagatacagcagtattatccgcattgtccatctaagagattgaagctcggagaggttaaacgctgttttcttatttaatgtgatgaacacaatcattcattctacaagctaatgtttgtgaaatgcgtgatatagttgcacttcccagtttctcttttaaacgttaatactaagctttacttgtgttttgcacatttaattttatggcttcatttactcaagagtttgaattatttttcctgttcattttgtcagtagtactaagaaatgagactagtatttattaaacacatgtaatatgttcactagtatactaccttaagaatttgctgtttttaatcacaataccttgatttttttgtatgattttaatacatattttctattactcatttactatttttgtgtcattttattggtctctccacccctgtttctcttcatgttcgtaatatcttcaagtaataaattgtattctcttcagaagggagaagttcaaagtcatttattagtaactgatgaagctaggattgtatatctcagtgaaagtaacaacttaagtatattctttattaaattccattctgtaacttaacggtatttttgagctaatacgcttttcttggtataagaatactgcaggaaacaaattatattatgatccaggtttttatattgcacttacctgtgagtcagggcatttaactgaagttctggttctgcaggttgctatataattttcaaatggctaagataatttttcttcagaatttctccatttttcaaatttttccaagagctggtttgtatgtgacagttctatcaatagccttgttgctggagcacttgcctggacctgtgttctatctagcctgggcttgtatgaagagctttatctaacccaaatcactttgtgacaaagccctgcctcttgtaattgttacctctgttctctgtaccaatggacttaaattcattacctgtcctttgctgatttcctgagaatcatactgctctaatgtttaaaatgttgcatgaccataagaagtgtattaactgaggtatagagtaaaggtgtttatcaagattttatttttcaaaggaccttcatgttcgggtaaaggaatgtatgcataacaagcagatacttgtttctctttagcatgaggagactggacggagaagtctgattcagcctgaatgcagacgtcccattcaaacggtctgtacactaaaggtaatattaaatagaggaagttatagagaaggtctaaatgacttgttttcccaggaagcagcacaggatagacttcccttaattaaagatccccctgagtcatagctttgtccaatagctttgtctttccgaaagtgtatcattagattgttaacccaagaagcacttagtaagccgggcggtggtggcgcaggcctttaatcccagcacttgggaggcagaggcaggcggattgctgagttcaaggccagcctggtctacaaactgagttccaggacagccagggctatacagagaaaccctgtctagaaaaaccaaaaaaaaaaaaaaaaaaagaaagaaagaaagaaagaaagaaagaaagaaagaaagaaagaaagaaagaaagaaagaaagaaagaaagaaaaaaaagcacttagtataattttgaagtataggtctttgatgacatttgatgatagttggattttgtgtgcatatatgctgagataatttttttgtaaacagacaagttggcttatactgcatacatgtataaacatgcctttacccacagtgaatcttctagtgaggagagagtactgtgtaggcacttttctccagatctacacgggggaaaccttcaacaatgccagaactgcactcacgatctgtacgaggactaattctccctcttgtgatatacagttttggggaatctttaagggacggaaagatagacataatggtacatgactataatcccagacatgaggctcagaaaggtctcaagttaaatagactgggctacatatataataagatctttaatgtacaggaacaaattcatacatacacatgcgcagcatgcaagtgtgcacgtaaactcacatgcatgcaacatactatatgttaaccaaacactaccactgaacaacattccttgccttgatatggggttttgttctccagagaacccacaaacatccatgagcgtctgaatatagtagtcaagtgagagctgaatataagagcttattattcttgtctctttattctaccttgacatcagtgataagaacaaagcaacatgtgtgtctgtgtgtataataagaacatgagatactacttatccatgacggaggacagatgatatctcatttttagtgatcctatgtctaggttagaggacaggtctcaaagttaaatcaagttcagagttttaatgataacatcagaactgagcattattctgactgaattgcgcttctgtagcttaaaagtactgtaaattttttattggtatttatttactttacatcctgcctctcctccaagtccctccctctcacctcacatcccatgcttccatcccttctccttggaaaaggagaggcccctgtccctcgggtatcaacctgccttggcatatcaaattgcagtaagactaggcacgtcttctgttgaggcagacaaggcagcccagttagggaaagggattccaaggcaggcagtgtagtcagagacggtccctgctcccactgttagtcccacatgaagacccagctgtacaactgttagatgtgtgcagagggcttaggtctggttgacagttcagtctctgtgaacccctctgggcccaggttagttgattctgtaggatttcttgtgttgtctgatgccttggctccttaagtccttcttccccctcttgcagtacaataattcttataatcatacctaactagacagatgccatgggtctgtctgactttactaacgcaacactttgtattctgtagtctttaacttttagaacctaaaaatcttactttgtgtattataaaaggtcacttttaatttagtttacatttttaattacattttttttacatgttatttcttccttggagccttccctatcttcatagttcttttccacttgttctgaataaatctatgtttgctcttctttaaaagaaaaggacaaatgtgtgaacaggatttgtagggaggaggaagagctaagaagactgaaagggagagagactgaaggtctgagcaattaaaatattatatacatgaaactggaagacaacaaagttaataaaaacacacccataaaaagaaaatccttggttaaatggtttcatttaaaactatatttataatttggatgtattcatctttaataagtacttaaatgagatgcctaatttaagccaaatatttgcagtgtaattacatgtcatttaatgatgagaattttttcttaaaggtgtatcattaagccattgtcattgtatctagaatgtatttacatagactataaagctaatacattaggctgtttaatcttaaaggtctactattcagaatgtattctgttgactgcaatcaatgtcatatattgtatgacaagttcactaacttccataaagctagtaaattaaactcagaactagcaactcaagggtttctataattcgtatataaattagtgaacttaatattttatattgcacattatcgcagatattctaagttataattatgaaactagcttgtcagtttccaatatgtcagattattgtctattaattaaatgtgtaattaattaaaacctttaatcaaagaacacatttcattataagtagatggtcttagcagatctgaagcctaagactttataatgagaaaggtttccaaccttatgtaacacttggggttgttttgttttgttttattgtttttgtttgtttgttttggtttttcaaggcaggttttctctgtgtagccctgactgtcctggaactcactctgtagaccaggctggcctctaactcagaaattcgcctacctctgcttcccaagtgctgggattaaaggcgtgcaccaccatgcccagcaacacttgtttttttgttttgttgttttgttttgttttgtttttttcataatgttgcacctacagggttgcagatctctttagctccttggatactttctctagctcctccattgggggccctgtgatccatctaatagttgactgtgagcatccacttgtgtgtttgctaactccttccatgggtgattgtttccaattctaagaaggggcaaagtgtccacactttggtctttgttcttcttcagtttcatgtgttttgcaaattgtaccttatatctcgctatactaagtttctgggctaatatccacttatcagtgagtacatatcatttgagttcttttgtgattgtgttacctcactcaggatgatgccctccaggtccaaccatttgcctaggaatttcacaaattcattctttttaatagctgagtagtactccattaacacttgttttttaaatctacctaataatggatgcatgaattgctttcctgacttacaagttgtaagtcaggaaaaaggaaagcaagactcacatacacacacacacacacacacacacacatatgcatgcacatgaatctatgtacagcttacataaccctgacacttctgtttatatgcactgggtttatatcatcttggggtcatcgctgagaaactttgtgacatgctgtgccgtcattctgggtatttcctttgtcactgctttatattgtaactttgatgtgacaagttccctgaagcttcatgtgttgaatacttggtcccaagtttagtgttcagaagagcagcttttcagaaataattggatcatgaattgtataacataagccatgtgttcatagttaagtggactcttaagaggtagtaaaacttgttgggtggggcctggcaggttgtgggtgtccagcagcaggcatgtgaaggccatgacttgcccctgtatccagccttggtctcttctctagtcttccctcgcttcagcctagcaacgttcttacctgatgccgccttgtcgagctgtcctcccatggcacggtcacagcagtgactgcagatatgcattccctcaaccttctgaagccataagctgaactaagccctcttcccttcaggtgttttcatagaaatttgactaccacatgctggattcagttctccaatttccctatttgttccctattgttgtatacactatttagcattgccctaatttggctgttagttataaacatctttaaaccgaactttaaaacttctccattctgcttttccatgcacataatttggtttcctagatgaagaattttattttggagctcactgcctcgtagaaatttaagtcactgctcctccttgctttgttaggtgtttattctaaaatgtaccactgttgaccgtttttccccgcccccctggtttggagtgtgaagcctgttttaattttgtaaacctttagaatcttccccgtttccagtggtgtaaaactggagaaaactatctgccttaatagagaagagagctagagggtcttagcacaaataatgtagacaaacttatctaaccctcatttacaatactaatcgttgcccattgctgtgcagcctatgtaagagaccctgtgttttatattctcaaaaagaaaattccagtcgttacctaggagtaggatgggagaggggtgtctgttcctagtcctgtttcctaagatcttgagactctgttctgatgctgtccagagggtgctgggaacagtaggccccagcttctcttccagcctagaactcactttccagtgacgcacggcttaacttgctgagcctgtcagttgcaagcttctagtgtttgctgttgcctttgcagctccttatacttgcgtacttacatccgtcccatagtaaagatgcctcatattctcttgtccaatttggcgagcactgaagaaaatgctagttgaattcatcctttaattagaaacaccatcagctttggggtgtgtgagttaacaggatcacacaactccataaccttcagaggtgggaagtcgctcccgagtcaagatgaagctttaaataatatttttaacttgaaaactatttccaagacggtgcagctgtgaccctgtgctttgttgttctgaattttaagttgtctttaagtgaatggcatttaatggttaccgaagaaagctcatgctttcacgtgttatgtatcacatatatagtttaagtatatcctttgagctttacattggattttaaatctgtacccgtgtgagctattttattgctgactataaatttatttctcatttctttctgaaaacagtcagaagtcctgcagacaaactcagatctcaaaactgaatggtacattagtgcctatcaggagattaacagagtgccacagacatagctgactcagctaaacttacttcttaccaatctgaatcaaaagtgcaaaatgactctatctgtatacagccacagtgtcagtagttgttttagatgtgctacgaaagattctaaattcaatttctttatttgccttttccaagtgaccagcaagggctgctgtcacttttggcttatggagaaatcttccgtcaggcctttggtttgtctgcttatttctttcactctttttttttttccattttttattaggtatttagctcatttacattccaatgctataccaaaagtcccccatacccacccacccccactcccctacccacccactccccctttttggccctggcgttcccctgtactggggcatataaagtttgtgtgtccaatgggcctctctttccagtgatggccgactaggccatcttttgatacatatgcagctagagtcaagagctccggggtactggttagttcataatgttgttccacctatagggttgcagatccctttagctccttgggtactttctctagctcctccattgggagccctgtgatccatccaatagctgactgtgagcatccacttctgtgtttgctaggccccggcatagtctcacaagagacagctacatctgggtcctttcgataaaatcttgctagtgtatccagggatccaccccataatcagcatccaaaggctgacaccattgtatttctttcactcttaagggctttgctgttgtgttggacctgcccaggtgattcctctggtaaaaccatcacacttttaaagtcacttgctgtctaaacattgtagacaaagatttggtatgtggatagtaacagtcgttaggaactatttagtaatatgcattttacaagtgctagtgtaataactctgagctagagacactacccagaacagataatggccagtttggtttaagttttgttttaaataattttcgctttgttgtgtacctgattttccttttctgtcttttccagttagtagagttctttcttcactgcacaattccctaactcagcattttctaaagcagtgcctctgcctcccatgttatattcttactccaataaggattgtcatttatgacacaaattctaagctaaaagctttcagtgcagtgggccaaagaaatgatttcaatccaggtcacaaactcaaataaacaaagagacaaattggttttttcaaaggaataaatttgatagtaagagatattaggattaggtaatacacctaatcttggtgctattgactacaaagctttcaacaaaactaaacaaaactacagaaggtctggcttaagttgatttttaaatatataaaatactgaaataaaagttccattagtcttggaaatctcatactcagcatagaggttctcccatgaaatgtactctgtgtctgcttcccagtgagcctaaccggtgacagccgatgggacttacactgtttagttacccaaagacagagggacaaagattaagtggtataaaagaaatatttgccttagaaatatggggttaatcggtgaattctcctgtaaaagcatgtggcgtttaactgatcctttctctgggagtgttaatgtccggtctttattctaaatgcattgtaacactaacgctgtaattatttggaggaaaatgttgcttatttcatttttatcttgcatgttttttcagtttgagggtgatcgatgcttgaagggaagatggctgatattaacttcaaagaagtgactttaatagtcagcgtggttgccgcctgctactggaacagcctgttctgtgggtttgtttttgatgatgtttcagcaatattggataataaagacctgcatccatctacacctttaaaaactttatttcagaatgacttctggggaactcctatgtctgaggtaaataattacttttttatataaaacaattttaaataaaactcaaattatgagtatcacttaaatcagtatattagatagatatttaataaataactaactagttagctattaaattctgctatatccctaatatccaacacaaacctcaagaagattcttgacgattcactatagggaatacgaatattgagggctttaaaaaaaatcagtttccagattttatttttcaggtgtttgaaaaaaaaaaataattactttcctactaaaaacaaatgcagctgtgaatatgtctgtgtactgtaactcccttatcttaaaagcaggattcgttccattgggcatgtgctatgacttaactttttaaaaataatatctttgtgtgaggataacatatgtatgtgtagggaggccaacaggtgttaacaaaagtctttagccacttttctttgctttgagtcaggcaacagaattgtcttaatttaacaattaaagcatggtaaattcaatataagtagattaaagttgagtgcatactgcctattcctctgcagtaagaaagtgttcacttagaatcattttgaaggtcagtgttaacttacttaaggttaaacccttgtcactgggaattgtatagactggactctgatgttagatctgtcattcattagctatgtgaaataaactacaacttttagatggtaaaatattcccctggctataagaccggatgattccctgaggtatttatctgcactgcctgtcaggtcactttggagtgaaacgctttgaaacgtaatgtgtgctgctccacagtccgaatctcagccatcatccatgcgtgagaagcgtgccgtaaatgtccccatacacctagtctggaggctttccaggcctcagtccttctggtgacgagtgaacacagtgtgtcatttgtgtaactctttgatcattatcttaataaagtgatgactagccagaagatgggaggtactttaataatccatggttgtttgtttttcctttcaggagagaagccacaagtcatacaggcccttaacggtgttgacatttcgcttaaattatctcctcagtgagctgaaacccatgtcttaccacctcctgaacacagtgttccacgctgtcgtcagcgtgatcttccttaaggtctgcagactctttctggataagaggagcagcatgattgcggctctgctcttcgcagtgcacccaatccataccgaggcagtaagtacggctgcacaagcactttttacatcttaagcagtaaatattcctagtttagtacagtcttattctcccatgcacaaagtccagcttacctagcatataaaaattttaaatttaaattaatgtttgaaatatagtgttgttcaagagtgtatgtgtaggtagtgattatcacaagcatgcacagctgagcttgtgtccctaacacccgtgtgaacagccaggtgtgggagcaggcgcatgcagtctacagtgtgagggagag

SEQ ID NO: 899869 - DNA, 46 bp, Homo sapiens
gggagttgaattaactagccctgttgctgcttctgaagagtttgaa

SEQ ID NO: 899870 - DNA, 41 bp, Homo sapiens
gtctatactttttttccttatacttttagaatgtatgaaac

SEQ ID NO: 899871 - DNA, 45 bp, Homo sapiens
tttcttaagaaagaaaaagcagaagttcagcggaaacttggccat

SEQ ID NO: 899872 - DNA, 45 bp, Homo sapiens
aagtggcaagccaaaatagaaggaattcgaaacaagttaaaagag

SEQ ID NO: 899873 - DNA, 41 bp, Homo sapiens
caagaaaaccatgaagatgaagtgaaaaaagtaaaagcgga

SEQ ID NO: 899874 - DNA, 58 bp, Homo sapiens
catatgttatcattttccccattttaaagagaggatatggcctcaggaatgcttaata

SEQ ID NO: 899875 - DNA, 37 bp, Homo sapiens
tgcagacattttgctagctattgtaaatacaaataat

SEQ ID NO: 899876 - DNA, 46 bp, Homo sapiens
tagacatttttgaccgtcagcaaaatgaaatactaaatgcggcaca

SEQ ID NO: 899877 - DNA, 59 bp, Homo sapiens
aatacttcataagtagtgttctatactttatattgcatcacttcaagagtatctggttg

SEQ ID NO: 899878 - DNA, 45 bp, Homo sapiens
gtgaatgaaaaatcacttataaggcaatatacaaccttagtagaa

SEQ ID NO: 899879 - DNA, 36 bp, Homo sapiens
gcagtacagagctgaaaaccagattcttttgaaaga

SEQ ID NO: 899880 - DNA, 45 bp, Homo sapiens
gctgtcgttgaaataaagaattgtaaaaaccaaattaaaataaga

SEQ ID NO: 899881 - DNA, 46 bp, Homo sapiens
aaatgaagaagatgatccaattatggtagctgtcaatgcaaaagta

SEQ ID NO: 899882 - DNA, 44 bp, Homo sapiens
agaatgaaagctattgtgcatcagacagataatgtaatagatca

SEQ ID NO: 899883 - DNA, 46 bp, Homo sapiens
cagaagctaatgagaaaattgaagttcagaatcaagaaatgagaaa

SEQ ID NO: 899884 - DNA, 52 bp, Homo sapiens
aaatttgccaacttgaaaaacaattagaacaaaaagatagagaattggagga

SEQ ID NO: 899885 - DNA, 143 bp, Homo sapiens
ggggatttgaggaatagtgacgaaagggtgttatagaagtaatttttgacaaagctgaaggctaaaatatgaatgtattgttgaagaacaaaatacattgagattcctgagaaggtaggaatgtgatacaaatggatcagcct

SEQ ID NO: 899886 - DNA, 46 bp, Homo sapiens
gagcttatagtcttgggaaatatacagaaagattactagtaactga

SEQ ID NO: 899887 - DNA, 31 bp, Homo sapiens
ctggctttggaagaagtagaaaaagctggag

SEQ ID NO: 899888 - DNA, 67 bp, Homo sapiens
ttatatttgaggaaacaaggtgcagcaagtttgtagcagactgtagagaaaacaaatcttgggtaag

SEQ ID NO: 899889 - DNA, 45 bp, Homo sapiens
gctaaaaagtgaaaagcaagaaaatgtgatacaccttttcagaat

SEQ ID NO: 899890 - DNA, 65 bp, Homo sapiens
agttgacccagatgacctgccccgtcaagaagaactggcagataatttattgatttccttatcca

SEQ ID NO: 899891 - DNA, 41 bp, Homo sapiens
gtcagggcccgcggccgggtccagcttggtggttgcggtag

SEQ ID NO: 899892 - DNA, 56 bp, Homo sapiens
tgaatagtatttggcatataatctttcagaaaagtagtaaaattgtcattcctata

SEQ ID NO: 899893 - DNA, 4046 bp, Homo sapiens
agccaagattgcaccactgcactctagcctgggcgacagagtgagactgtctcaaaaaaaaaaaaaaaaaaaaagatacttgtcccagccatgaaaatgtttgctgccccttactttcgcaaacttttagtattttattatttttcaatggctgtaaaatatgacttattaaatgtagtataatataaagaaaagagatatctagcaaagatagcattaaagcaaaaatcctatttgcctgctgataaagttagaggtgttaacttggagggtgaatccaataaattagaacttttgtgctatatttggagacttttgttttcctaccaaagtatcagggctatgtcttacttatctttgtattacacagcctgcatgacacgttttgcacatagtaattgcacagtaaatgtgtaataacctacatggaatagccagtgttgtgttggatagcgggagcatttggctagcttatggttatagtcccttacccaacagtctgcttttcttctgttgtacttttagtacctaacaagtttccctggctttaggattttttccatgtaaaatttctatcatgtgaagaaaaaataacttggcctacacttctaatacctagcacatacctctttctgcctgctatgaaattataatacttgatggagggaggcagcattaagtgtttacatcctgaagtatttcagccataacatccagtgttttccaggttctaggtttcataaaatgtatctctgttctctagaacaaatccattaccttgaactcattcgtagtgggaaaaagctgagtctaatttgtatgactttttcaacagatgctgatcaactaaaggaaaaaataaaagatctagagacacagctcaaaatgtcagatctagaaaagcagcatttgaaggtaatatttaattatattttagtatcgttttgtgaaaacagctgttgaaaactattttcattaccatctttaactacgtatcctaaaaaattcagtaataacatcttatatttgacctttatattgcaaagttaattatgttcatctgactattcctaacatattagagttaacaaaaaattcagactcaacataggattaagtagtaaatttattttttaattgtaacaaatatatgccattagtatgttcttaagttttgggtcacattggcaacagtgtctttattttttttttgaaattcttttcaggaatcctaaggttatagttcccttaaaaaaatatttgctgttttacctcttttaagactgtaaacaggacaaaaaggcatggatatgagaattagctagtgatcactggctattctaaatagtcactaaggcttgaattgtctcttcaccagatgcctgtcagaagtcccaaaggtttccctgatcatattaataactttataaaaaattgatcattattcattaaatattagatattagtaaggaaaatataaatgaagtctaaaccaaaactcttaaccagactaacttcaatgttatgaatcacaaaatctttttgattgattgctctattgacaagctcttatatgcttttagagaaagattaagtcccattataagagatgataaattttagtcaaagactagaacacaacttacagaatacataactggacttgacagttaacaacttagttatttacactgtacaatggaacaaagaaaaatcttaattcttctgcctttattgctgtatttgaccattcaggaatactttggctttcatatttacaattaaatctccttgttcaaacgtaaaatatgtatatttcctatatgcaacttttaaagataatgtttccattaggaggaaataaagaagctgaaaaaagaactggaaaattttgatccttcattttttgaagaaattgaagatcttaagtataattacaaggaagaagtgaagaagaatattctcttagaagagaaggtaaaaaaactttcagaacaattgggagttgaattaactagccctgttgctgcttctgaagagtttgaagatgaagaagaaagtcctgttaatttccccatttactaaaggtcacctataaactttgtttcatttaactatttattaactttataagttaaatatacttggaaataagcagttctccgaactgtagtatttccttctcactaccttgtacctttatacttagattggaattcttaataaataaaattatatgaaattttcaacttattataaaagtatatacttgaagacttgttacagccatcaaataggcagtgagctctggtgaatttctctacattcataatgctttaagttttttaaagaatatgagggtaaattcagcaattttaagatttaaaattggagtttatatatacttatttatacatgtgttaagattctcaaatcctatgatatatacacagatgtagacatacacacatataggttatgaggttgagccgtatgttttgttaaatatctagcaaaattaaattgagcttaaactatttaattttgaaaattagtgacattaaattgttgtctttaaattaccactcagttatagtgaagagaatccagcctttgtccaagcttaggagcttactattacttatgtttttatggctagagattaaaattaatttgctggtttttaataaaattttgaataggtacttgaaactggaaaattcatttcttcacaaatggtagaaaacatattgatgtttcataatgaacagaaaccttgagatatttttaaatatggtagaatattcaagattagaatataatgataaactaattttatttgcattttatacatcaaatattatatctttgagtctaacaaatttctgattatctatttttaaaaaatgattaaacaaacacttaatatcaaaggcagagtcacatttgttcaggttcatgttgataataactggtcttgaattcatgtaagtatctggaattggccagcataagccaagatgatggcgatggacctggaaagagaaaaaaggtattagctttagcatacagatactatcttcattcacttagaaatatttgagtgcccactgtctgccaggtactgggtaagactccactttatcttactgtttttttttttatagctggtcttctcctgacatattacatatttgtttattgtctatcttccccattagaatgtgagcttcatgaaggcagacaccttgttttgttgactgtgtatgtccagcacctggaaacatgccaggaacattatcaggggctccataaaatgttatgaatcatagagcctgttgctgagtacagactagctacctgaaaaatgtgggcaaggaggcattctaattgaaaggaatgttatatgatagaatggagttttttgctctaattgcaatcatgtaaatatggttacagcaaacacagtgtgagtgtgtttgcgggggcagaggtggagagcagttctgggaaattaagtaggggccagatcatgaatgtttaatgtaactgaacagatttatgcaggaaagtaatatgctcattcatttgtgaagaatggagaggacagggctaaaactgaaagatactatttttggagggtgatatgatagttaaagcatgaatcttggcttaaattaaaattaacagttgggaagaagtacatagattagaactgttaggaattgataactggatgtatgaagtaatgaaaagaggggttaaaattaatatccaagtttttacttcagtgaattatgtggactcagagagttacaactaggcccagttttgaatattatgaatttcaggtacctgtgagaaatcaaacagacaagtccaggagacagaaagggaacaaagtataagataattcattctgtatatatcaactgctaccttggcactctttttactcaacagattctacactcaagtctgggagatgctgagttaagttagtacaagatgtctctgagagcactactgtgcaacatgaatttcca

SEQ ID NO: 899894 - DNA, 4041 bp, Homo sapiens
ggagaaagattaagcaggcatattaaaggacagcccagatggacatgaagtcctggaggaggccttggttcctgtcctaatactaaacctagagtacccagaatccacacttctccactctagctctcacttttcccatctacacactgggaaaaattattctgtcagaaagccagtgtcaaggtgagaacaaataacaaatgtgatgatatggagtgggagaaggggtctcttctactgtcttattggaccctagcagtggctctgagccagcagtcctgtcagttgatttcttggtcgttcctttgttttcttctataatcacatgtggactcagaatgaattttgagttactctgaaatctatttattcaacagatatttacttagtacctcctattgccagactctgctttatgttggatattattttttaaaagcccaccttgcctagatttcctcaaaggaccaggtggcttccctggttttgaaagaccctaattcttactatgatcttaagtaaattatatcctttctgtgggctcaagttctttctaagagggctctttggggctacaaaagaaattgttagtgcaaaaagagtttataaggtttataaatggttagtagaggtgatgatgatatttaaccataattgaagatgactttgcattttagatcatatacgtgtttttcgtctgagaacgatacaggtcactgagcataccataagccttcagtaaatcatttgcagaagacattgcagaagacataagtctaagtagaaatctcttgacagagagaaggctcgttttgatccttgacctcaaatttaggttccctaaatccattaaaaaagagaaagaaaaagaaaaaaagttactaaagtttaaatctgggaggattatatacccttctcaataaagcagtttagagagatctcttttgggacccatgacacaggtcttgctcatgctgacatctttatagttgctttattatttattcaacaaacttagtaacacgtattctatgtcaggccttttcctgactactgggacaaaccagggtgatgtgggggctgttttagatagggtgatcagaggaggcctctctgtttgggtggcttttgaatagaaaattagatgaagtgaaggagtaagcttctgatatttcactgtttacttgtggtagatctgtgataatctctgtcaggttaaaaacattcccttctaatctaagtttctaagatctatcaaaagctgtttgaatatatttagacaatcataattttcctttcttgtattatcctagcagattttgttgccaaagctatactggccattttaacttagaatgcagtctttctattcatttctctggaaaagtttggatattgtaagcattatttttctttaggtatgatgaacctgcagaactgtttggttcaattatgaattttttttttctggagtctgtatttttttgaactattaatcatttctttaatgattataaatctattcagatttttacaagctttatccctctcccatcatacactatttttcttacccatgcttttgcacaattttttcctctcccttagtgttttcctacctagatacctcctatgtgtgtctgtgtatgtgagaaaagctttttatttgccatctttatatttctaagaatatctagtaatacagaattttatattctgaagaattttactttgcattttcttattttgtgattgaaaaaaggtattaattttaaaatggtcaaatcaggctccatccttggaaaatacccaaatcctttattttgattgggccatctgttaattagggataccttatctcttgccaccactttttaatgctaaataaatatgtagctaaaactttgactagaagaaacagtaaaataagatattcttgcttatttttagtacagttatttgaactgacttttaaatcagtgacataaattatttgccatgtctatactttttttccttatacttttagaatgtatgaaaccaagttaaaagaattggaaactgatattgccaaaaaaaatcaaagcattactgaccttaaacagcttgtaaaagaagcaacagagagagaacaaaaagttaacaaatacaatgaagaccttgaacaacaggtaagtaacgtaatttttctttacatgataaaataatgcataatatcgcaagatgttccttgcattgtcttatatagataaaaatggactctattaagaagacccatctaactgaagggcaccccattcacccatttgcttaagccagaaactttggatcatcaacgacttcattcttttcattctccacattttctatcattaaatcatgtcagctctattttcaaactatatcctaaatatgaccacttcttggtatcttgagacatcactaccagtcttgtccaagctattgttttatacctgaataactgcaataatttccaagctggtatctcagcttccactcttggattatttcaccctatttctatttctgggctgtctccacacagttgccaggtaacccttttaaaacataaagcacatcacaaagcacaaagtcctatcctcagaatcttccagtggttctccatcaccctaaaataaaacttaaaagttcttttcatatcccaaaacaacatatgaggtctggcacccagttttcttcccaatctcatcttctactacttttcccttcatttcattcacaatgttttaaccacagtaaccttctttcagtactttaaacaatccaaactcgtttaagcgtcaagtccttatacttgtttcctttgtttagaatactgttcacccaaatattctcatagcttgctcccagacttcatgtctctgctgaaatagaggctccttagagagaccttccctaaccctaaccctaaccctatactacttgccatcactctttatcctcttaccctggattattttttcttgatagctcttcctaccatctggcactatattacatcatatcatattaaacacacattctttgtgcttccccactaaacaaggaccatgcaagatggaacattgccattttgttcactgctgttagcctctgtgcctaggacaatgccagttatgcagtagttactcaatacttgttgaatgaatggtgaatagaacatagaaatttgcctatgcgtgcttttgaaaaccatattttaatattacgctttgttaaaaatgtgtatctttataaatcctcatatttccatggcaaaccttatcttctaacttttcattgtcctcaaagattaagattcttaaacatgttcctgaaggtgctgagacagagcaaggccttaaacgggagcttcaagttcttaggtacatcatgtattcatatgactactttgtttttttctttaaaaaaaaaattattagtttttatatactccgaattgctacaactagagacaagcatttttcgactttactgcctaacaggcttattaggtccttatttcttccctctaatgctaatcactctttttcataatacacactagaaaaaaaggataaacccaactctaagtttccagtttgtaatttagtttaaacttttctaagagcatagaatgagttaaaccttagcttcccagaggaaaatactaatgaaagagaacaagtaatttttttactttcaggggtctctgtagcctgctttcattaagctcctcttataacgaaaccacacttgcaaatgccatcaggtcagatattaagaaaaacgtgaaggcttttgtattccaggctttttgtttgagaatggtgacattgtagcattgagagtaaatgtttacttcgataaaggctagcttgttctgattactgtacatcactagttcataagaaatgcccatatattttatgaagcaatatctgctttatttttttaacacattatcattgtgttctagattagctaatcatcagctggataaagagaaagcagaattaa

SEQ ID NO: 899895 - DNA, 4045 bp, Homo sapiens
atcagagggaaagatctttcccaatcctctctccttggcttataaatgtccatgttttccctgtttctttttatcatcttccttctgtacatgtctctgtgtctaaatccccaaattttctcttttcataaggataccagtcacagtcgaatagggtttaccctgaaatctcattttaacttgaatacctctgtaaagacccagtctccaaataaagtcacattctgaggtactggaaattatgactttaatatataaatgtggagggtaaggggaacacagttcaacccataacggttagataacaatcgtgctttattttggactagtaaaaccaccatagatcagtttaaccattatgaaattatacatgaaggcattatatgtatggacattattaagtcatacttgctttgcttccattgtaattaaaacaaaccatactacctttgttctgcaagttttgtattctaacttatttatttttggctttcaccagaacactccgattttctcatattcctttgaggaaaaaaagttaccttttgacagtattttcttatccagtatgtcttttatggcttttatttattaaactttaaaaatattcctaatttcatttccctgaagatttcaggaatagagtcagatgatcattgtcagagagaacaggagcttcagaaggaaaacttgaagttgtcatctgaaaatattgaactgaaatttcagcttgaacaagcaaataaagatttgccaagattaaaggtgaatttaatgttttttattaggaaatctaatgcctaaaactccttccttagttgttatgtttacttttattagcttattaagaagtcaaaaatgcatattcctaatatatcatggtgatggtatactttatacatttgctctttagcatttatttgttgaaggcctactttatattaaacactcctccagatgctgggaaacagcagtcaaaaaattccttatactcataggacttacgttctagtggagaagactgacaataaacaagtcactaaatagtatgtcatctgatgttagtgctaaggagagaaataaagcatgattggtgtaaagagtatggggagagagaaggggtgtaactgaaaatagagtagtaagggaggtcttccttaataagatgatatatgaacagagagctaaggaggggtaaaggaagtgagtcatacagatactagaaaaataattacagacaacagaaatagcaagttcagatgtcctaaggtgggaggatgcgtggtatatttcattaaaaattatcacactgtaaaatataagaataatttgtttcttttagaaattttactttattctgatattaataatgattttttaatctttggttttccaagtcttaccctatttatgggaatcttttttttcttttggctagctaattgcttcagttttgttttctaatctagaatgttagcaatctgttaattccactggtaatgatatagttaagctatgtcttgcttctcacactttatttatttatttactcagggcactaatctgccattttttcgcactttttttccttttttttttttttggtactgcttcttattctggtttttacattgatagaaccaatgttagacgttcatttgccttttgctgtgtatatttgggtaaggatctatatgtgcaatatatgggacagttaaaatcagaattctaaatttgtattattgcatcaggcaataatgtgggaaataccttgacatttcatatacacaatattcttgtattaatttaacgtcttagttcaaaatcttccttgttaatatagagaccctattatttggtttggcaatacagttgaagagattgatggttcttatgaattgtttgccttttcttttcaatggctgtagctatgttaaattattacatgtttgcttgttatctttcagaatcaagtcagagatttgaaggaaatgtgtgaatttcttaagaaagaaaaagcagaagttcagcggaaacttggccatgttagaggggtatgtgagaatttaccatacatttgttttggtttcagcagtgataagccagaaatgaaaagtttagatatgttgtaaaagtactgatatgcctctacaagtgccctgtagtttcagtgtttattctgcatctgtaatataaaacagtaagcatttctatgtgtctcaaagtattttatcatctgttataccttacatactttcatctctctttttattgaatatgcctccataccttgaaaacatttaacttccaggaatccttttgtttatggaggtaactgctaactggtccttggtccaatgctgccattttgtaaccatttgttatgatatcttcccagcttggtataatgttttataattacattgttcctccccctctttttttgtgttcttgtaattttctccctatgttattttgtattcattttatataatgaataaatgttgcttatgaggtcaaggccaaagacttaagctcctgttgatttcatgttgctgagtgtcataaatggaagcaatcataatgcagagtcattctggtagtaatattaaatatatgatggattcagtgaaaatattatgtgttattagaaaaatattcagaacaggccgggggcagtggctcacacctgtaatcccagcaatttgggaggccgaggcgggcagatcactggaagtcaggagttcaagaccagcctggccgacatggtgaaaccccatctctactaaaaatatgaaaattagctgggcatggtggctcatgcctgtaatcctagctactcaggaggttgaggcaggagaattgcttgaacctggcaggcggaggttacagtgagccatggtcacacaactgtactccagcctgggcgacagagcgagactccatcttttaaaacaaaaaaaaaaaaggaaaaatattcagaacagtatcttgctggcagcaacatttgtttcatcaatgaaaatatgtgttaatttgaccttttctatctaagttaattatgaaagtgcatactaaaatgatgtaaaagtttatatttcaggattattcttattcatggatgattaactaaaatgcaaaaagaaattaagcatactgtttggctaaactgttaaaaattatttttattttaaatgataagcagttaaacttattaagtgatgactcatctctgctgatatatttatgcaaggttttttatttcagataactcttctatttatattaaacagaaactgtatttctaagcaatagcatttcttagagaaaattgcctctattatgttgcaattaaaatttaattactcatgagctctttaaagacacaatttctcttgtgtggttttatttcatataaagaaaaactctgatatactggagagaacattagctaaatagactatttagacttaatcattttgatcagacatcaaggctagactatttaagctgttacttattagctgcatgattttaggaatgtcaaatttcctaagtcttggttttcttgtatttaaaatggaaattataattcctatctcatagaattgttttaaggatgaattgaattaatacagttttgacttcaaatattaggaattattgagtataataagcctgttgtattgttggtacttcgtattatacttactaaaatatttgattaaagatttaacatattctttcgtagtctggtagaagtggaaagacaatcccagaactggaaaaaaccattggtttaatgaaaaaagtagttgaaaaagtccagagagaaaatgaacagttgaaaaaagcatcaggaatattgactagtgaaaaaatggctaatattgagcaggaaaatgaaaaattgaaggtaattttttttaatgtgatcatttttaggggaatattttacgttttgttactatttaggaaaatttcaaatatgctcattactatataaaatggctttaatgaatacaatacatattttataaatata

SEQ ID NO: 899896 - DNA, 4045 bp, Homo sapiens
attgactagtattagagacaagaattggagaatatagttctctagtattcgagaaagtcgttttgataggacaactaatcttagtgagaatttggctttatttcatatttttttaattttttgagatgacgtcttactatgttgccctggctggtctttgaactctgggctcaaacaatcttcctgcctcggcctcccaaagtgctgagattataagcatgagccatctccccaggaatttgactttaaaccatggttctcaaccctttcagattcaacattccctttaataaaaaatataatgtttcataatttcccctttactattataattgaaatgcatagttaacataaactctacctacttacataatttcaaaaatgtcattatgaatgtcctaaatgaaatatatagggggaacataaaaggaatattcatatttcaacatgtaaatgctttggcatgactccattggaaaatataatgaactagtcatgtgcttgcaccttcattaatgtgagttcaaagctacgattgcagactgacacaaatgtgttctattggcaactgatgggtcatgatggtattgccatttgtaatttgatttccaaaatggtaaacaaattgttggtgcagttctcagcaaaacaatgtctataatcttaccttttataagactgttgtattcctagaaaacttagtgtatagtaaaaccattaaaaaattacttagtgtgaatatgttagttggagataaattcttagctcagaccagtgtaagcagaattttttactgtattaatatccagtagaacatttgaaagttgttcagtgcatgagactattctgcattggataggctttctttggctcctttatcatagttataataaaccatgacacctacccctgaaatgccctaattcccttccgtttctttttcttttttctttttagcacttaaaactagctaacttactacaaaatagatttagatttatttcttgttttgttatctgtatcgtttgctcccttctccccaatctatctaaccaactagtataaactagatagtaagattcatgaagatacacttttttatctgattttattcatttgttctattcctattgcctctagagtagtacttggcacatggttagcactaaataagtacctgtcaaatgagtgaagtaatgtgcattgaagacttgaaggggctctgatgctaggaaattgtcatgggataatagatgaggttggtcgtttgtacagaggattcttgttagaagcttactctagtcatgattgtattagaatcttcatttaaaggctcctgaagggtgttggcattagtcagaactgtctcccagaattttatttgtcttgtgatagaataaagcatagttagcctaaagagcagttttcctaatagctcggcatgcccaaagattctaggagttatacaggttgaacatctaatccaaaaatctgaaatgctccaagatacaaaattttttgagcaccaatatgatgccacaagtggaaaattctgatgtgacctcatatgatgagtcacagtcaaaacacagtcaaaactttgtttcatgtacaaaattattaaaaaatattgtataatactacctccaagctatgtgtagaaggtgtatgtgaaacataagtgaattttgtgtttggacttgggacccatccctaagatatctcattatgtatatgcaaatattccaaaaatattttttaaaaaaatccaaattctaaaacacggctggttccaagcgtttcgtaagggatactcaacctgtatagcaaaatgaacatatttacatattctctaggaaatattagtttacaatttttctaggcaaattataattgataaatcataaagaaaatttaaaataacactggtaattttcctacctccttcgttattgttacagaatgctaaagaagaattaattaggtgggaagaaggtaaaaagtggcaagccaaaatagaaggaattcgaaacaagttaaaagagaaagagggggaagtctttactttaacaaagcagttgaatactttgaaggatctttttgccaagtgagtttaaatatcattataaaactaattatgtgtaaaatcctttagtgacctggaaattatatagctttatcatagttgataatatgagaaatggtctagtttaaatgatcatttattatctatgatttacttactttttattttctttaaaatctgttttaaatatattgtaacaattatagatggattttcctgtgatctcgttgtaaattagcttatgacaaatatagggtgttacaattattgtaatttggtttggtaatgagtatgcaattgaaaagccaaacactgaatggtatatttcatgattctatattaaattccacagagccgataaagagaaacttactttgcagaggaaactaaaaacaactggcatgactgttgatcaggttttgggaatacgagctttggagtcagaaaaagaattggaagaattaaaaaagagaaatcttgacttagaaaatgatatattgtatatgaggtaagctattatgtggaaatgtgccacccattgtaatgaaaaactggttgacccctagaaattgaaataataaatgtgtgttgtcttaagcttgggttatgttttcttttcccatgtgaattgagatattcctggttcttcatatgccacataattttggtgtatttttgatcttttgaatattatattgtgagactctggttcttgtttaaattctatgggaaaatgtagatacttttgttttagcatgcaatcggtctaattaggttcaggccacaagttccaacctcatttcttgggctgtggttccatttttcaaagccttttcaatactcttcagatctgtcctgcctgtgtacctcacaataggtgatctggtatgtgagctatgtaccattagttcagttcttagaaactttggtattctgattaggatcgatccatacatttgcagctcaagagtgagcccagaagttcataaacaactttatagggtccctttcttgagctcctccctctttgccatctctctgatactttgtttccctagggatttccatttggggctttagttacccagtgatgccatgtacttcaggaattgcacacttctgcagccaagcaagcaagaggagagtagaaagaggaagaaaaaaacgacttttaccttaccctcttagtatcatagctctaccaattggagatttccctcccaaaaaatattagcttctgtgagttcccattgcagcctctattaccactgctatgggatggcttaagggttggggcatgaaagaacagatagaagaaaaaaaaagtgaggtgttttcatattgtctcttgagtgttaaaagattccctttctctttactcgagctagaattagaaggtttacctggagctctctctgtcagtgcagacacccatcttcaggtttcaaataatgttgtcttcagggcaggcagtaacagaataaaagaaaaggtaaattcatcacctgtttgctgctactttaagtcctggtattctattgtaatctgccttctactcctttgcaaagtcctcaaatggttgctccatgcatttaggagagagaagattgaatgtatttactccattgtacctggaaccagatgcccttgccctgcatcaccccatgtcatttcttagcagagcctttgagatttttgtgtgtgtgtgctttacaatctctttccaagttatatcttctgatacagtcatggtcgtgaaaagcaaaataaaatcatgtgttaacatttaaaactttttaattttattctgacaacagctaaaactatttaatcttctgtttcgctcatttcttccaaggtaaacttcagttggttttacgtgatttgctatttcttcttctttgcatttacaaatgatctgtgatcatattactgatctttgtaaagggctaatatcta

SEQ ID NO: 899897 - DNA, 4041 bp, Homo sapiens
aataataatacttaccctggccctttcagggtggttatatgaaggtcaaattataccgtgtatgaaagtaatttgaaaactgtaaaataacatacagatagaaaacttttgattacacacttataagagtgtctgtcatataatagagattctaaacattgttcaaccactttatcagaacgtagattttaaactcaaaataggtttatagttaggtagtttctaatcattataatattatctctatgggcctaaattttattatctgaaaaaacatgagaaaattgaactgcttgacttataattccatttcagctctcaagcccctgctagagtctttgattctttactcacttattcaaatgcctctgacagaattaacactatttttgctttgctaaggagctgccactgttaagaaattactctctaaaagaaagaaaattggcaacagcatatgtgtattttcagtctcttttcctcactctattaaattttgtacaagagatgttatttttggtctagtaaatttctgtcatgttttggagtataaaattacttgtgcttttgcatctaatttgtgggtgtagaaaatcataatcttttgaaataccttatataatacatttttttgccacaggaaatacttgaagttattgttgtgtaccttacgtcattttagtccaaaattatacttgtgttctctgtgtgcatattttgatatgtattaggagattatggatctgtgtgatttcttaagtaaatcctgatattttcacaatttgatgatgactctttaaagttagacttaagttttgccaaaagcaagaagcctcaaagagtaacatttgttcatgtcttaacactatctccctcttattggtcagaatctcagtatggatgcagtgtccatatgcacaacaatatattaattcagtttaacagacttaatgctgaataagcaataagattaattgaattaactaaatcttttgatagtatccacttccatatatatagttatagatataatgctagtgaatttgaaccataaacaaattaataatacatgtgatttctgtgaaaatttatattagtcttttcaatatgtcaatatagggcagtatttctcaaatatagaggatcagtttttcaccattgtccctcttggggacatttggcgatgtctggagacatttttgattgtcatggctcgggggtgctactggtatccagtgggtagaatcaaaagatgctgctaaacatcctatcatgcacaaggcagccccaccaccaacaaagaattatccagtcaaaaatgttactagtagtatggttaggaaactatcatatagaggaagcaatcacattttacaagagccataatatttaaaatgcctttttgttcattctctgtatatttgactagagtcacaaaataacttgataagattgttgccaaaaatattagaaactagaagaaaaatgtgttgttaagtctaagagtagttaaatgaaataaagaattattcttctttggatttggatgcctgcatcaagatttagattgtaaggatacttaggactgaacatttgctctatatgaaatttgtattaatcaaggtatgaattgcagcaaccactctattaattacatatgtttggccaggtgtggtggctcacacctgtaatcccagcaatttgggatgccaaagcgggcttatcacctgaggtcatgcgttcaaactggcctggccaacatggtgaaaccccatctctactaaaaatacaaaaattagctgggcctgatggtgcacgcccgtagtcccagctactcaggaagttgaggcaaaaaaatcacttgaatctgggaggcagaggttgcagtcagccgagattgcgctgctgcactccagcctgggtgacagagtgagactgggtctcaaaaaaattaaaaattaaaaaacacacacacacatatgtttatttacatcaggcttcaagaaaaccatgaagatgaagtgaaaaaagtaaaagcggaagtagaggatttaaagtatcttctggaccagtcacaaaaggagtcacagtgtttaaaatctgaacttcaggctcaaaaagaagcaaattcaagagctccaacaactacaatgagaaatctagtagaacggctaaagagccaattagccttgaaggagaaacaacagaaagtaagtaacaacagaaaattatcaacatttaggaaaaatatgtggtagattgcttttagagaagatttgtaaatttataaaagatggtagtataaatctccgtgttgtaataaaaagtatgagctttatcttatgctgttaaacaaggtattttagacaatgctgtttttgtgggcagatatagtccaatttatctttttatgttttcgtcaatctgatttgtgaattatctatatgaagttaggaaaaatcttaatgtacattacaaaaatataatatatattacattgtattttctttttttctactggaattttatgctactgaggctatttttaacaaatgaacaattttgaacaatttgagggattgagggaagtatgataatgacaaaaagggatgaaaaaagggggtcatagagatgtttttgtgagaaggagttggtcagtgtattctgatttattagggttttttttagtttatctcagatttgatctatttaaattgttttagaagatgctggtgtttttctgtgctagctatgaaatttatgggtaaactttaagcctttcctagtccttttgttgtctacctaaattcaattaatttcatatggaaggatgtagtaagtgagtaatataaatatctaaaattggatgtttgaaaacaaaacatacctgttttttgtaatagcttgatttaatgctgagttctcaaaatcattattaagattttgaactttcacattcaatgtggaaagaattgagtgtaattacaaaagatttatttgaaaaagttgagttgttaatttgtgaaatatgttccattaaactcataatattttagaaaaatagtaggaagtaataaagcttgtttattttttatatcatatattcatataaaatgtcagttttcctttaaaaattacattttttttttggttaatttttaggcacttagtcgggcacttttagaactccgggcagaaatgacagcagctgctgaagaacgtattatttctgcaacttctcaaaaagaggcccatctcaatgttcaacaaatcgttgatcgacatactagagagctaaaggtgaacatcaacacgtgttaatgtaacaaaatttctgataattcctattggaagagaattcactatgatatatagtaattttgttgatgaatagggaatttataatgcactgttggtggctagacatagacacacacatgcatttttcaacaataagtctctttatgatactcatttactgattatcatcttggggattaggaaaggataggccattatgaactactgtttctaatgaaattaaatttaagaaatattttacttaggattttttttaagactttattatttttttagagcaattttaggttcacagcaaaattgagaggaaggtacagagatttcctgtatatctcctaccctgaaagtggtacatttgttaaaattgatgaacctatattgatacatcataatcacccaaagtccaagtttacctctattttagctcttggtattttacactctgtgtgtttagacaaatgtataatgatatgtatccatcattatagtattatacagggtattttcactgccctaaaaatcttctgtgcctctcttcttcattccttcctctgcacctcaccaaacccctggcaaccagtgatctttttactgtctccatagtttcaccttttccagaatatgttatagatggaaacatacagtgtgtccccatcattctcaccataggacagctaggaactcctttctagtggcatacatattgtctagtattgtaag

SEQ ID NO: 899898 - DNA, 4058 bp, Homo sapiens
agatactttaatgatttattataatttaatcattgcagaaactaaaagagaaagaatctgctttaaggttagcagaacaaaatatactgtcaagagacaaagtaatcaatgaactgaggcttcgattgcctgccactgcagaaagagaaaagctcatagctgagctaggcagaaaagagatggaaccaaaatctcaccacacattgaaaattgctcatcaaaccattgcaaacatgcaagcaaggttaaatcaaaaagaagaagtattaaagaagtatcaacgtcttctagaaaaagccagagaggtattttattatattatgagttatgctgttatccattagtttttttaagcaaatgctaaatattattttaccctaaagtggtatttcttttcttgctttcaaatgattctatttaagaattgttacttgcatgtgattggattacacctctgtcagtaaaactggaagtttgtgtacatgtatctttctattatacactgactaaaccacgagtagctatcatggtgaaatcatatgattttgaaaaatattttaattgagtttataggtgaggattgaggcaatagggtggaatgaaatatatcacaccggtaatcagtagaaatcagatttgttagaacttcgtgggggaaagctaacatttaattttttctagaagtaagttaaaagatgatagatacatgtcattctaatgttaagaataaattatgaactgaggctgggcttgtcaacttgaacattgtctgaggggacatgcataccagtctagatacatacatatatggagatactgtttcttcctcatctcaaaggaattttagaagattgaagagaaaatatataaggtcttcaaaatgtgaatttgttttaatcacaatttaagatatagtttcgattttctgtaaaacaggagcaaagagaaattgtgaagaaacatgaggaagaccttcatattcttcatcacagattagaactacaggctgatagttcactaaataaattcaaacaaacggcttgggtaagattctaagaactttgttccattctttattgatttttgtgaccatgtaaattaaaattcagctctcttcttttttggaatggaagttaccctttttgttgccaaaataatcttctgaaaacatagctctgatcattcttcctcctgtagctcaccgctgttcacaaaattatatttataattcttagccatgtactcaatctgctatgaacctacctgcctttcttttcaaattctactcactgtgagtttagctatatctaacttccagaattcagctcatatttgcctcttttgaccattctgttccatatgtatgaaatgacatgtctttcatcttttaatgtgtaaccttagcatatttgagcattacctcgttaattcggtcaacacttattgatctcctgctacgtgcagacattttgctagctattgtaaatacaaataataaagtctgcatttcctgtcttctttaagccttcattgcctattaaatcattacattttagattagatattatattttgatcatttgaggaaccaaattaaaaatatggaataagtatggcattgaattatacatgcctattgctaatatattcatattttataggatttaatgaaacagtctcccactccagttcctaccaacaagcattttattcgtctggctgagatggaacagacagtagcagaacaagatgactctctttcctcactcttggtcaaactaaagaaagtatcacaagatttggagagacaaagagaaatcactgaattaaaagtaaaagaatttgaaaatatcaaattacagtaagtcttcgaaatgtattgtaaaaataggcaaatgataagtgatataatgaagataaacataagtgtttgctatgccaggcactgttctaagacttttaagtatattgtctcatttttatcctcaggactgctggttacatatgttatcattttccccattttaaagagaggatatggcctcaggaatgcttaatagcatgtctgggggtagatgggaaagccataatttgaaactagtcagtctgactcaaaagccaatacaaattcttttccagaatctcatttttaccttctttgagcctcagtttcatcttatttatttatttttatttttgagacaaggtctggctctatttcctaggctggagtgcagtgacataatctcagctcactgcaaccttgaccttccaggctcaaaccatcttcccacctcagcctgcagagtagctggcactacaggcaggtgccaccacacctgggtagtttttttgtatttttgtagagacaaggtttctccatgttgcccaggctggtcttgaactcgtgagctcaagtgatccgcccacttcggcctcccaaagtgctgggattacaggcctgagccattgcacccagcctcatcatctttaaaatggaaataataatacttaccctggccctttcagggtggttatatgaaggtcaaattataccgtgtatgaaagtaatttgaaaactgtaaaataacatacagatagaaaacttttgattacacacttataagagtgtctgtcatataatagagattctaaacattgttcaaccactttatcagaacgtagattttaaactcaaaataggtttatagttaggtagtttctaatcattataatattatctctatgggcctaaattttattatctgaaaaaacatgagaaaattgaactgcttgacttataattccatttcagctctcaagcccctgctagagtctttgattctttactcacttattcaaatgcctctgacagaattaacactatttttgctttgctaaggagctgccactgttaagaaattactctctaaaagaaagaaaattggcaacagcatatgtgtattttcagtctcttttcctcactctattaaattttgtacaagagatgttatttttggtctagtaaatttctgtcatgttttggagtataaaattacttgtgcttttgcatctaatttgtgggtgtagaaaatcataatcttttgaaataccttatataatacatttttttgccacaggaaatacttgaagttattgttgtgtaccttacgtcattttagtccaaaattatacttgtgttctctgtgtgcatattttgatatgtattaggagattatggatctgtgtgatttcttaagtaaatcctgatattttcacaatttgatgatgactctttaaagttagacttaagttttgccaaaagcaagaagcctcaaagagtaacatttgttcatgtcttaacactatctccctcttattggtcagaatctcagtatggatgcagtgtccatatgcacaacaatatattaattcagtttaacagacttaatgctgaataagcaataagattaattgaattaactaaatcttttgatagtatccacttccatatatatagttatagatataatgctagtgaatttgaaccataaacaaattaataatacatgtgatttctgtgaaaatttatattagtcttttcaatatgtcaatatagggcagtatttctcaaatatagaggatcagtttttcaccattgtccctcttggggacatttggcgatgtctggagacatttttgattgtcatggctcgggggtgctactggtatccagtgggtagaatcaaaagatgctgctaaacatcctatcatgcacaaggcagccccaccaccaacaaagaattatccagtcaaaaatgttactagtagtatggttaggaaactatcatatagaggaagcaatcacattttacaagagccataatatttaaaatgcctttttgttcattctctgtatatttgactagagtcacaaaataacttgataagattgttgccaaaaatattagaaactagaagaaaaatgtgttgttaagtctaagagtagttaaatgaaataaagaattattcttctttggatttggatgcctgcatcaa

SEQ ID NO: 899899 - DNA, 4037 bp, Homo sapiens
attttcttcagtaattttaagatttgtcatttatgtgaattgccattgaattacttaatttaaaatactcaccttaatcctcttgaagagtaaaaatttttctgtttttttctctttgttttaataagctgcggattttatattcgtaatttattgagttgggcctctaaaattccagttttgtacttaactgacttatagattagtctcctaatgctctgctagtcaatggaccaaaataaaagaaataatttattacatattcttcctaaatctagtaccaccatacatgtataattctaaactgtaatatctcaataaagtaccttaattaaattttatgttcatcataacaatgaagtttctagcatatgtaatagtcttataaataagcatgcaaataactgctgtcaattagaattagtcagtttaaccttattaagtatcaaatggctattgtacatatgatgtgaaaaataaagtgaattttttttggctaataactaatctaaaattcagatgaagcattttaaagggaaaaagatactttaatgatttattataatttaatcattgcagaaactaaaagagaaagaatctgctttaaggttagcagaacaaaatatactgtcaagagacaaagtaatcaatgaactgaggcttcgattgcctgccactgcagaaagagaaaagctcatagctgagctaggcagaaaagagatggaaccaaaatctcaccacacattgaaaattgctcatcaaaccattgcaaacatgcaagcaaggttaaatcaaaaagaagaagtattaaagaagtatcaacgtcttctagaaaaagccagagaggtattttattatattatgagttatgctgttatccattagtttttttaagcaaatgctaaatattattttaccctaaagtggtatttcttttcttgctttcaaatgattctatttaagaattgttacttgcatgtgattggattacacctctgtcagtaaaactggaagtttgtgtacatgtatctttctattatacactgactaaaccacgagtagctatcatggtgaaatcatatgattttgaaaaatattttaattgagtttataggtgaggattgaggcaatagggtggaatgaaatatatcacaccggtaatcagtagaaatcagatttgttagaacttcgtgggggaaagctaacatttaattttttctagaagtaagttaaaagatgatagatacatgtcattctaatgttaagaataaattatgaactgaggctgggcttgtcaacttgaacattgtctgaggggacatgcataccagtctagatacatacatatatggagatactgtttcttcctcatctcaaaggaattttagaagattgaagagaaaatatataaggtcttcaaaatgtgaatttgttttaatcacaatttaagatatagtttcgattttctgtaaaacaggagcaaagagaaattgtgaagaaacatgaggaagaccttcatattcttcatcacagattagaactacaggctgatagttcactaaataaattcaaacaaacggcttgggtaagattctaagaactttgttccattctttattgatttttgtgaccatgtaaattaaaattcagctctcttcttttttggaatggaagttaccctttttgttgccaaaataatcttctgaaaacatagctctgatcattcttcctcctgtagctcaccgctgttcacaaaattatatttataattcttagccatgtactcaatctgctatgaacctacctgcctttcttttcaaattctactcactgtgagtttagctatatctaacttccagaattcagctcatatttgcctcttttgaccattctgttccatatgtatgaaatgacatgtctttcatcttttaatgtgtaaccttagcatatttgagcattacctcgttaattcggtcaacacttattgatctcctgctacgtgcagacattttgctagctattgtaaatacaaataataaagtctgcatttcctgtcttctttaagccttcattgcctattaaatcattacattttagattagatattatattttgatcatttgaggaaccaaattaaaaatatggaataagtatggcattgaattatacatgcctattgctaatatattcatattttataggatttaatgaaacagtctcccactccagttcctaccaacaagcattttattcgtctggctgagatggaacagacagtagcagaacaagatgactctctttcctcactcttggtcaaactaaagaaagtatcacaagatttggagagacaaagagaaatcactgaattaaaagtaaaagaatttgaaaatatcaaattacagtaagtcttcgaaatgtattgtaaaaataggcaaatgataagtgatataatgaagataaacataagtgtttgctatgccaggcactgttctaagacttttaagtatattgtctcatttttatcctcaggactgctggttacatatgttatcattttccccattttaaagagaggatatggcctcaggaatgcttaatagcatgtctgggggtagatgggaaagccataatttgaaactagtcagtctgactcaaaagccaatacaaattcttttccagaatctcatttttaccttctttgagcctcagtttcatcttatttatttatttttatttttgagacaaggtctggctctatttcctaggctggagtgcagtgacataatctcagctcactgcaaccttgaccttccaggctcaaaccatcttcccacctcagcctgcagagtagctggcactacaggcaggtgccaccacacctgggtagtttttttgtatttttgtagagacaaggtttctccatgttgcccaggctggtcttgaactcgtgagctcaagtgatccgcccacttcggcctcccaaagtgctgggattacaggcctgagccattgcacccagcctcatcatctttaaaatggaaataataatacttaccctggccctttcagggtggttatatgaaggtcaaattataccgtgtatgaaagtaatttgaaaactgtaaaataacatacagatagaaaacttttgattacacacttataagagtgtctgtcatataatagagattctaaacattgttcaaccactttatcagaacgtagattttaaactcaaaataggtttatagttaggtagtttctaatcattataatattatctctatgggcctaaattttattatctgaaaaaacatgagaaaattgaactgcttgacttataattccatttcagctctcaagcccctgctagagtctttgattctttactcacttattcaaatgcctctgacagaattaacactatttttgctttgctaaggagctgccactgttaagaaattactctctaaaagaaagaaaattggcaacagcatatgtgtattttcagtctcttttcctcactctattaaattttgtacaagagatgttatttttggtctagtaaatttctgtcatgttttggagtataaaattacttgtgcttttgcatctaatttgtgggtgtagaaaatcataatcttttgaaataccttatataatacatttttttgccacaggaaatacttgaagttattgttgtgtaccttacgtcattttagtccaaaattatacttgtgttctctgtgtgcatattttgatatgtattaggagattatggatctgtgtgatttcttaagtaaatcctgatattttcacaatttgatgatgactctttaaagttagacttaagttttgccaaaagcaagaagcctcaaagagtaacatttgttcatgtcttaacactatctccctcttattggtcagaatctcagtatggatgcagtgtccatatgcacaacaatatattaattcagtttaacagacttaatgctgaataagcaataagattaattgaattaactaaatcttttgat

SEQ ID NO: 899900 - DNA, 4046 bp, Homo sapiens
ttaaacattgtagtagttatcagttgatttctactgttcataattatctttgatctacaagtagtgggcccacatttacttttaatatggtttaatcttcatttagaaagaattaaatgaaaaataattatcttgcaactacatcctgttctctaggctagaaacatttaggatttctgtttttgaaagtaataccaaagttccaatgacctgcttatagtcagtgttcaataaacgtataacaaatgaaagtgaatattagtgatgtccattccaacataatttgaagatttttattgtaaaatcccacatatttgtagaaaagtctatggaaatcctaaataagattttgtcatgtagtttgacaaaagataacattgtgtcttattttattttagaatggccattactttcaattaaaatcattatcatcaatggaggaatgttatttgttaatatagcatttatatttgtgtatataaattgtaaatcttaggtaatcaactggcatatgaaaatagaagaacttcgtcttcaagaacttaaactaaatcgggaattagtcaaggataaagaagaaataaaatatttgaataacataatttctgaatatgaacgtacaatcagcagtcttgaagaagaaattgtgcaacagaacaaggttttattttatatttatttcatttttttccctaagttttttttttttttttttttttttgagatggagtctcactctgtcgcccagactggagtgcagtggcgtgatctcggctcactgcaagctctgcctcccgggttcatgccattctcctgcctcagcctcccaagtagctgggactacaggcacccgccaccgtgcctggctaattttttgtatttttagtagagacggggtttcaccatattagccaggatggtcttgatctcctgacctcatgatccgcccgcctcggcctcccaaagtgctgggattacaggcgtgagcccctaagattttaaacaagaatattgcacaaatgactatgttatccttctaattaagtgcaccttccattactaattgattatataataatttgttttttattttctaaactattctaaaaattcatatttatttagcttttataacagtagtcttaatcttaaaaacggcaatacataagcaacctcatttggtaagttaatttttattttgatattggttatttgacttttcacagttccacgtttctactggctctcactgatagagtaagaagtcagcttcttatagaataaagtatatacttcagagacagatgaaattcgtcaaacatatgactgtctcagagattgttccccctgcttaaattgttcttaccctagatacctttggtatttacactgtcagtgcctgcaggtcttagctcaaatgtcttaccttatcagtgtatccttcaccagccacctaatatacaacagtaaatcctactatccagattcctaaatagagattaattaacttaatttttctccaaagtgcttgtaaccttctgacgtattacatacttactggtttattattgactgtctttccttcgccagaatgcaagttccgtggtgacacggacttggttttgtttactgccatgtttgtatttcctagaatgatgcttggcacataatatatgtcatcaaatatctttcgtatagctgaacggatggatggatggatggatggatggatggatagactgaaatccttacttcacatctgcctttgtgatcttacacaagttacttcacctctctgagtttgtatttttttccataaaaggaaaataattacagtttcttcaatgtgttgtgaggattagataagaaaatatatataaaatgcctgttatgtgcctgatgtcttcgtgtatgtgtctgacacaaattgtcctttttttagtttcatgaagaaagacaaatggcctgggatcaaagagaagttgacctggaacgccaactagacatttttgaccgtcagcaaaatgaaatactaaatgcggcacaaaaggtatgaatgattaatcttgtttgttactctgtagcatagtctagagtgttaactcacagaaatatttcctgtatcagatgtaattttaattgatgttatattgtatatttaaaatataagaggggtttaatctatgttttatcatacagctgtaaaaattaatagttactctcaatgctgcaactgcttttttaaaaaacatactatttcttaatagtttgaagaagctacaggatcaatccctgaccctagtttgccccttccaaatcaacttgagatcgctctaaggaaaattaaggagaacattcgaataattctagaaacacgggcaacttgcaaatcactagaagaggtaattagaagaatttgcattttgattagtgtattatttggtatgtttggggggctttctaaataatatttctttatgagggcaatgcatagaatgatgaatctattgctaatttcactatttttctattctcctataatgtttctaatagccaataatgaacagcagatatagttaatttgaattcactatttaattattagttggtacctttcggtacactgaatatgaaaggaaataaaaagcatttaattgtagttctatgagcaatatattctcttatatgatctctttattcttacttttttggttttattttgaagtgcatgttacataatctatgaatcaattttcagttcattgcctttaatgcatggttaaagggttgaaggtaaattagaaattactttctgttttaacctagatcttgaatttgattagtaggtgatcaaatctgtcatcttcattaaattattcagaaaataatgtaaactgaatgtgttttcattttagttttcatctaaataaactgcaaatacatttaaaatatacataaagaagtttttcaagtaaaactgtacatttttaatcatttcaggaaacgtagattttcttcagtaattttaagatttgtcatttatgtgaattgccattgaattacttaatttaaaatactcaccttaatcctcttgaagagtaaaaatttttctgtttttttctctttgttttaataagctgcggattttatattcgtaatttattgagttgggcctctaaaattccagttttgtacttaactgacttatagattagtctcctaatgctctgctagtcaatggaccaaaataaaagaaataatttattacatattcttcctaaatctagtaccaccatacatgtataattctaaactgtaatatctcaataaagtaccttaattaaattttatgttcatcataacaatgaagtttctagcatatgtaatagtcttataaataagcatgcaaataactgctgtcaattagaattagtcagtttaaccttattaagtatcaaatggctattgtacatatgatgtgaaaaataaagtgaattttttttggctaataactaatctaaaattcagatgaagcattttaaagggaaaaagatactttaatgatttattataatttaatcattgcagaaactaaaagagaaagaatctgctttaaggttagcagaacaaaatatactgtcaagagacaaagtaatcaatgaactgaggcttcgattgcctgccactgcagaaagagaaaagctcatagctgagctaggcagaaaagagatggaaccaaaatctcaccacacattgaaaattgctcatcaaaccattgcaaacatgcaagcaaggttaaatcaaaaagaagaagtattaaagaagtatcaacgtcttctagaaaaagccagagaggtattttattatattatgagttatgctgttatccattagtttttttaagcaaatgctaaatattattttaccctaaagtggtatttcttttcttgctttcaaatgattctatttaagaattgttacttgcatgtgattggattacacctctgtcagtaaaactggaagtttgtgtacatgtatctttctat

SEQ ID NO: 899901 - DNA, 4059 bp, Homo sapiens
acaacagtgtcttacacaacttcaaaaaaataatttatatataaatatgttttaaattactttttaaattcacaagaatttatggtatacaacatggtgttctatatatgtatatactatgctatacaacatggtgttctatatatgtatatactatgctatacaacatggtgttctatatatgtatatactgtggaatggctaaatcaagctacttaacatatgtattacctcgcatacttttttttttttttccttgagacagagtcttgctctgtcacccaggctggagtgcagtggcgctatcttggctcactgcaacctctgcctcctgggtccaagttattttcttgcctcagcctcccaagtagctgagattacaggcatgtgccaccacgcctggctaatttttgtatttttggtaaagacggagttttgccatattgtccacgctagtctcaaaattcctagcctcaagcaatctgcccaccttggcctcccaaagtgctgggattacagcatacttcttcttatttttttttttttttgcactaagaacacttaaaatttactctcttagcaattttaaagtatataatatactgttattaactttggtcactattttaattagacttaagatgtgtttgtattcaaattattttgtaagcatttaacacccaaatttgagagtggggtcagaatgttggaatttgatttctagaattagtatagggtattattttcctactttttttctgtgttcaataaaatgtttataagattcagcttcaattatattataacccatttagtggtgaatcagggaagaatgaaaataatttgataactttgttgccttgcatttatttaaaaaatttttaattctaggctaaaccctttttaaatgaaagtttaacttcttgtgttttcagatactgaatagctatgatacctcttgtgttgagaaaactttaaatttgcataatctgaagttatcttttcttataaacattttattaggtttacagtattgtctttttgttttgttttgtttttagtgaaaaggagacctggaaaacagaatctaaaacaataaaagaggaaaagagaaaacttgaggatcaagtccaacaagatgctataaaagtaaaagaatataatgtaagtaaaacatttttaacattagtatgcaatattgtacaaagtaggatagctagattcaacaagtaatatggatgtgtctttgtgcagaatttgctcaatgctcttcagatggattcggatgaaatgaaaaaaatacttgcagaaaatagtaggaaaattactgttttgcaagtgaatgaaaaatcacttataaggcaatatacaaccttagtagaattggagcgacaacttagaaaagaaaatgagaagcaaaagaatgaattgttgtcaatggaggctgaagtttgtgaaaaaattgggtgtttgcaaagatttaaggtacatctgattcttattttgctttttctgactatgaaaaatttcaaatatgcagaagataggatggtatcaataatgctcatcacctgaattaatagttaacatttattaacattttgtcataattgcttcttctgatttttgtgggatgtttgaattgcagacattcctcccctaaatatttaatgtacccttttgaaaaaggcttttttctttaactaaccatagtaactttattatacctaacaaaatgacagtaattttctaatatcgcctaataccctgattatagtcacattttttacattttttgatcaaagaataagcatttggatgttacatctcataaatctttttaatatagaatccccttggttttctttttctccaaaaaatgtttgaagatgtatctaacttttgtgtgtgtgtcattttacttgttcctgtgtcccttgtattactaaaagttaggtcagaaccctaagttacattcaggtttaaacatttttggcaagaatacttcataagtagtgttctatactttatattgcatcacttcaagagtatctggttgttccatgttttgtaattgattactctgttaaggaaaagacaagcagaccaagtatggtggctcatgcctataattccaacattttggaaggcccaggcaggaaaatttcctgagcccagaccagcctaggcaatatagtgagactccgtctctacaaaaaatgtttttttttttgtttgtttgtttttaattagcttggtgtagtggcacatgcttgtaatcccagctacctgggacattgaggtgggaggatcgcttgagcccaggaagttgggggctgcagtgagctgtgatcatgtgccactgatctccagcctatgtgcctgtataacagagcgagtctctctcttaaaagaaaaaaagaagaagaagaagaagaaaagataaccatatacctccattattaagcaatttagctaactggtgatattttggtaccatacaaataacaaattatttgtcagtcctaatgattttagcatctgctgatgattgttgcctaacccaattattaaaagttgcaaacatcataattttctagttatattatgcacttacatttattaacagacatgcttttgtaaaataaatagcgtttcctcattagcccaggctatttgtttatcttgaagtttagctcctactacaaaggcaagataaatgcttttctctttaattaccagttttcagaatacacacttggtgtactctgcactacctgctttttttgtcccctccgctttctcttttttaagtatcagattagactcacagatttttaaatattccatgtgttttagttggagtcatattcttttgtctcaactttagccaaagagagtcctttaaagttgactcttatattgtcttgacaaaaattcattagtcttttgaacgaagcctcaaagcttgacttgttttctagcataagatgtcttagacttacctacatacttcatgcccatacttggaataaaccatttctttaaagagcccaggttccttttagtggggaaggcatttagataccaaaaactggccactgggcatcattgctctcagagtatcattgccactagtctctcagtagacaagttagaaaaatatgtatatatttaaaccatgagttcatattgttatttccagtttaattataacattatggggtaagtaaatagtatcggatttttactaagcttctttgattttgcacttgtatttttttcttacatagaaaacctttattattaacattaaaatatttgttttatcctacaatatacatacaataatttgaaaaataatacttgaattgatattaatagtaacaacaacagcactgctgccaaacatagtttaaagttttatttcaggtcttattttcttcagaatatatcttgctgagaatgtataggcaaagtattctacacttacttgaaataattgtcttcatgcggttatgttatacatttgatatatagttaggctcatttgtttttcattttttttattttagggatttttttcctttattgaattttaatatatacaatatttatatatgcaaaatatttaatcagagaaatcttaattctggtcttacgcctttcatattattctgctccaccctctgtaggtaacttattatctttctcatgtttcctttttggaaacataaacaaagacaagacaggttacatgacatgtatacccttctgcacctagttttataccttaccttgtagtttatttttaagcatgtaaatgttcaatgttcatgactaaatttggacaggatcataggaacacagaattcaaagtgaaattaaaatgggcttgggttctttactttccactttaaaggttgtaatgggtgatgtcaggctaataaacctattttcagcttgatctaaagcttaatactgagcatcaagaaattctttaataaatataagtgatatttattcagacatgtaataaggaaatgttcatgtcttatt

SEQ ID NO: 899902 - DNA, 4045 bp, Homo sapiens
ttgagcaagtcatcttacctatctgtgtctcagtttccttatctgtaagttactttgtaagtaatacccttttcataggattattgtaaaacgtaaatgaattattagatgaaaatgctcggactagtgtgtggcacatatgaacagtttgtaaatgttagctgttgttagcatcattcatcatcatcacaatcatcattgttcatatatgtttatagggaactaacatatttctccttatttctgtcatctcatctaaatcaatagaatgatttccttaataggaattagaatacctaatcaaaggtgatttaaacactaagaataattattatctgacctaaccagaaccacaaagctagttgtagggcaggtcatatttgaaggttgttgttatcgcctatgatggttgtaaaatagctgcatgaattcaagaaagatgatgtgcccattgaagaagaggagcatttttttctacatagcttttatttttaaataaacatttttttctggtgatacctggcagacattgactccgatctcatttgctagaattggatcacatgtccaagtctgaaccattcagttgcaaagagaatgataccgctatactgggtttatgccaagaacattacacatgtttgtggaatgctcatgtgtagacaacagtgtcttacacaacttcaaaaaaataatttatatataaatatgttttaaattactttttaaattcacaagaatttatggtatacaacatggtgttctatatatgtatatactatgctatacaacatggtgttctatatatgtatatactatgctatacaacatggtgttctatatatgtatatactgtggaatggctaaatcaagctacttaacatatgtattacctcgcatacttttttttttttttccttgagacagagtcttgctctgtcacccaggctggagtgcagtggcgctatcttggctcactgcaacctctgcctcctgggtccaagttattttcttgcctcagcctcccaagtagctgagattacaggcatgtgccaccacgcctggctaatttttgtatttttggtaaagacggagttttgccatattgtccacgctagtctcaaaattcctagcctcaagcaatctgcccaccttggcctcccaaagtgctgggattacagcatacttcttcttatttttttttttttttgcactaagaacacttaaaatttactctcttagcaattttaaagtatataatatactgttattaactttggtcactattttaattagacttaagatgtgtttgtattcaaattattttgtaagcatttaacacccaaatttgagagtggggtcagaatgttggaatttgatttctagaattagtatagggtattattttcctactttttttctgtgttcaataaaatgtttataagattcagcttcaattatattataacccatttagtggtgaatcagggaagaatgaaaataatttgataactttgttgccttgcatttatttaaaaaatttttaattctaggctaaaccctttttaaatgaaagtttaacttcttgtgttttcagatactgaatagctatgatacctcttgtgttgagaaaactttaaatttgcataatctgaagttatcttttcttataaacattttattaggtttacagtattgtctttttgttttgttttgtttttagtgaaaaggagacctggaaaacagaatctaaaacaataaaagaggaaaagagaaaacttgaggatcaagtccaacaagatgctataaaagtaaaagaatataatgtaagtaaaacatttttaacattagtatgcaatattgtacaaagtaggatagctagattcaacaagtaatatggatgtgtctttgtgcagaatttgctcaatgctcttcagatggattcggatgaaatgaaaaaaatacttgcagaaaatagtaggaaaattactgttttgcaagtgaatgaaaaatcacttataaggcaatatacaaccttagtagaattggagcgacaacttagaaaagaaaatgagaagcaaaagaatgaattgttgtcaatggaggctgaagtttgtgaaaaaattgggtgtttgcaaagatttaaggtacatctgattcttattttgctttttctgactatgaaaaatttcaaatatgcagaagataggatggtatcaataatgctcatcacctgaattaatagttaacatttattaacattttgtcataattgcttcttctgatttttgtgggatgtttgaattgcagacattcctcccctaaatatttaatgtacccttttgaaaaaggcttttttctttaactaaccatagtaactttattatacctaacaaaatgacagtaattttctaatatcgcctaataccctgattatagtcacattttttacattttttgatcaaagaataagcatttggatgttacatctcataaatctttttaatatagaatccccttggttttctttttctccaaaaaatgtttgaagatgtatctaacttttgtgtgtgtgtcattttacttgttcctgtgtcccttgtattactaaaagttaggtcagaaccctaagttacattcaggtttaaacatttttggcaagaatacttcataagtagtgttctatactttatattgcatcacttcaagagtatctggttgttccatgttttgtaattgattactctgttaaggaaaagacaagcagaccaagtatggtggctcatgcctataattccaacattttggaaggcccaggcaggaaaatttcctgagcccagaccagcctaggcaatatagtgagactccgtctctacaaaaaatgtttttttttttgtttgtttgtttttaattagcttggtgtagtggcacatgcttgtaatcccagctacctgggacattgaggtgggaggatcgcttgagcccaggaagttgggggctgcagtgagctgtgatcatgtgccactgatctccagcctatgtgcctgtataacagagcgagtctctctcttaaaagaaaaaaagaagaagaagaagaagaaaagataaccatatacctccattattaagcaatttagctaactggtgatattttggtaccatacaaataacaaattatttgtcagtcctaatgattttagcatctgctgatgattgttgcctaacccaattattaaaagttgcaaacatcataattttctagttatattatgcacttacatttattaacagacatgcttttgtaaaataaatagcgtttcctcattagcccaggctatttgtttatcttgaagtttagctcctactacaaaggcaagataaatgcttttctctttaattaccagttttcagaatacacacttggtgtactctgcactacctgctttttttgtcccctccgctttctcttttttaagtatcagattagactcacagatttttaaatattccatgtgttttagttggagtcatattcttttgtctcaactttagccaaagagagtcctttaaagttgactcttatattgtcttgacaaaaattcattagtcttttgaacgaagcctcaaagcttgacttgttttctagcataagatgtcttagacttacctacatacttcatgcccatacttggaataaaccatttctttaaagagcccaggttccttttagtggggaaggcatttagataccaaaaactggccactgggcatcattgctctcagagtatcattgccactagtctctcagtagacaagttagaaaaatatgtatatatttaaaccatgagttcatattgttatttccagtttaattataacattatggggtaagtaaatagtatcggatttttactaagcttctttgattttgcacttgtatttttttcttacatagaaaacctttattattaacattaaaatatttgttttatcctacaatatacatacaataatttgaaaaataatacttgaattgatattaata

SEQ ID NO: 899903 - DNA, 4036 bp, Homo sapiens
atgacaggaacatactgtgtcaatacaacctgctctccactttttatactttttcattggttacaactaattcaagcaactaatgacttacttattctactggtattgctgatttgcttttactaattcttttagtattttggtaagtgttttttatatgtaatgcatattcagagtcactttgcctttaggatattatactggaaagttttaactgttgcatattacatcattattattactggatttggtttataaaagcacaataaaaaaccagtgtaatgatataaattataggcatatgtacattttcctttagacttagtaaaaaaaaaatcatgaacttgataaatttattcaagtaaaccatgttatattttaaattaaattggatatttttcagggagtatatggtttagaagatgctgtcgttgaaataaagaattgtaaaaaccaaattaaaataagagatcgagagattgaaatattaacaaaggaaatcaataaacttgaattgaagatcagtgatttccttgatgaaaatgaggcacttagagagcgtgtgggtaagccatgttttaagttacatagtttgcgcaacctgatttacaagtctttttttttaatttaaattttgtttattattatttattaagtagtttaatgcttttttcaaatgcttttataaaacatttaatacaaataaaagtggagctaacctgattgaagtggaatcagattttatggggttggagtggtgggtgggcagggctggaacattgctttatttggtctagcatctcctcagtaatagctgcttgtttaaaaagatgaaagtttattaataccacatatcagagattaacctttttttttcccaacaaaagtagggtctgtattacccatgtttgtttgcaaaatgctcttgtaacagatgagatatttaaacttcttgctctgtgttgtgattctcctgcctctgcctcctgagtagctgggattacaggtgtgcaccactatgcccggctaatttttgtatttttggtagagatgggatttcaccatgttggctaggctggtctccaactcctgaccttaagtgatccacccgccttggcctcccaaagtgctgggataataggcatgagccaccgcgcctggcctgttaaaatcttttaaagatttttaagtacttgatttttataatttagactacttacgttttactttgttcgagtattttaaggagtaattagtaatatagcttgagagtttatatatttattttaataaatagcctattagttaatattactaatttgagtgttatgatagtgcagactaagttgctgctttaaaatgaaaataaatatctaaatatcaatttcattattgctaaatttcatttaatgctttcttagttaaaaatgatcatttgtaaaaactattatctaaagaaaagacaaatagacaaataagtattttatacagatatatatgtgtgaaaagtatctaacttggatccgtagttgtgctaggaccccaaattagacttctgatcaacttggactatcagatcacagccttctgatcaacttggactatcagatcacagccaagaatctggaagttcctaaagatgacttctggcccgtctaggtagctgtcatagacatcatattttctgtgcttaaaaagctccaaatcttggtttataatttcatttaggtttttgttaggatttccattaataattgtgataaaattttaacttgggttacagtttaaatatctggaaaattctttcacagaaagttacctcattcttcagtgatactggctaagtgaattataaccagttgcttgatggtatatgacatttttgcagcttatttgaatgtttttaagtttttaattatattgctttctattgtaggccttgaaccaaagacaatgattgatttaactgaatttagaaatagcaaacacttaaaacagcagcagtacagagctgaaaaccagattcttttgaaagaggcaagtgtggtagtcagttgattattttcttggctgaactatagagaaatactaataatttatactttgcagattgaaagtctagaggaagaacgacttgatctgaaaaaaaaaattcgtcaaatggctcaagaaagaggaaaaagaagtgcaacttcaggtatactcagttattctaaacctttaaaaagaattattgataagtgagttgtctggatatgaaattatttgtgtcttagctgtttttgctgttctattgtggatctgctacaaatttaataaatgacaataataacctgaaggagataagtgagtgtcagtgggttcagtcctgaatctgaaatagacaaaaacaaaacaaaacaaaataacaaaaaccaagcaaacaaaaaagaaaaaaaccttagaattatggaatttttgaaaagttttatagtatagtattttaatttctagacagcaccaatatgttgttattaataataataaaacttagtagtttttatgttaatatatgttactcaacattttccctttccttaaggactatgcattgaaaagcttttcttgtaagttattattattattattattattaatatttgagatggagtctgtcttgttctattgcccaggctggagtgcactggtgcgatcttgctcattgcaacctccgcctcccgggttctagtgattcttgtgcttcagcctcctgagtagttgagactacaggcgtgagccaccacgcctgacttatttttgtatttttagtagaaacagggtttcaccatgttggcccaggctggtcttgaactcctgacctcaagtgatccatccactttggctccccaaagtgctggaattataggcgtgagccaccatgcctggccttaaattattcttttctaagtgaaagtaatgttttattgaatataaattaacatctttcttgggtttattttacttgagctaaagagaacagttggttaagttttataatagccattgcagtgcttttttgtaagaagaccacacagaaggactgtctttttcacttgccccaaatccccaagcacgtatatgagtaatagcagagtggttctttttagcattatgatttctataatacatccaaaactttctcaagaaaaaacttcatgatttattagtacaataatcagtttactcattactcatcatttatatttactttatatgtcttttaactggtgcttattaagtagcactttaatatagaataggcaaagaatggtagagaagatgaaattcaaaaattaggttctcacattattaatagttcattaaaagtgagctaaatgagaagcttgtattggctatgtagaattttggagggattttggaaacaattattctacctttgcattaaaacttgattgtaggttttaagaattaaagtgttggaatagtaggagggttattttaatgtttttagtttgttaattctcttatatataggattaaccactgaggacctgaacctaactgaaaacatttctcaaggagatagaataagtgaaagaaaattggatttattgagcctcaaaaatatgagtgaagcacaatcaaaggtaatagtaaagtattgcaaagagagtaaaggaaaatatttttttttttttttttttttgagacggagtctcgctctgtctcccaggctggagtgcagtggcgcgatctcggctcactgcaagctccgcctcccgggttcatgccattctcctgcctcagcctcccaagtagctgggactacaggcgcccgccaccacgcccggctaattttttgtatttttagtagagacggggtttcaccgttttagccgggatggtctcgatcttctgacctcgtgatccgcccgcctcggcctcccaaagtgctgggattacaggcgtgagccaccgcgcccggccaggaaaatatttttattgtgttttcatttcttccccctttatctcattc

SEQ ID NO: 899904 - DNA, 4045 bp, Homo sapiens
tgtagggccatgtggaagaatgataggagaatagatatgtggatggaagggagaatagatactgggggacaactcagcctgtgtcatgttccacagcttagatgttagctccagacagctgtgctcatttcttaaaaacttttgtgatctcaaacgtactagttttatgcctaagtccaatattaaatatataacctatatattagtaaatgcttataatgaatgagtgtgagaatgatctgtcaatcaattttggaatgatagcaatattatgttttggtcttttaacaatttagtaagatattacaagtaggcatttaggaagtttttagcttagtttggattaaatttagctgcaagtgacagaaaaatcaagcataatacaataatttaaacaagatagaaatttatttctctataatatagacaaagttgaagcaactagggcaggatttgtgtgacagatgctcaaatatcccctatcaggaaccctgtctcttgttgctgtgcctatctcaacatgtggtttctaactcatgtgaagttgccaccctcatatccatgtggatttcagctagcaggaaggaggaaagagaagagagattactcctttattttaaaaacatttttttttttttttttgaaattcacatatgaactttgcgtttatattccattactgacatgaccacacatagctgcttgtgtgtaagtggaaatttagttctttatttcaaatggccacgtgtcaagctaaaaatccatagttttagtacagtggacaaaagggaggttaaatattaggaacagctagcagtctgtatcacaatgatcattttttgtaaagcagtattttgcaaccttttaaaatccataccccttcagctaagaaggttttactgaacttcagttttttagtaaattgtattagtaaaaccaaaacaaaactttcatcttacaaatataaaatgacaactttaaaggatttttttttaatggcataccacttttcttgccaccatgttgggatcactgatttgaaggaataagtagtcaattcaattcatgatttttgtttttactctgtaggtgcttcaaccctttctcaacagactcatatgaaaattcagtcaacgttagacattttaaaagagaaaactaaagaggctgagagaacagctgaactggctgaggctgatgctagggaaaaggataaagaattagttgaggctctgaagaggttaaaagattatgaatcggtatgtatttttatcttgtcattcaaggagcttagaattattcttgccattcacagactattctgtgctatttactgcataccatttaaaaaacattccataagtatcttttgataaagattatcctcattaatttatactaaactattgaaacctttgagcatttactttttgccagaattgttttcaaacttttgatcacagtgatttgtccaaataatcagttttggtgaagcagcaggattacttttttttattatctgtgttcattgggccaccatgtagatgtgacaccactggccaatttgacagaatttatgacaggaacatactgtgtcaatacaacctgctctccactttttatactttttcattggttacaactaattcaagcaactaatgacttacttattctactggtattgctgatttgcttttactaattcttttagtattttggtaagtgttttttatatgtaatgcatattcagagtcactttgcctttaggatattatactggaaagttttaactgttgcatattacatcattattattactggatttggtttataaaagcacaataaaaaaccagtgtaatgatataaattataggcatatgtacattttcctttagacttagtaaaaaaaaaatcatgaacttgataaatttattcaagtaaaccatgttatattttaaattaaattggatatttttcagggagtatatggtttagaagatgctgtcgttgaaataaagaattgtaaaaaccaaattaaaataagagatcgagagattgaaatattaacaaaggaaatcaataaacttgaattgaagatcagtgatttccttgatgaaaatgaggcacttagagagcgtgtgggtaagccatgttttaagttacatagtttgcgcaacctgatttacaagtctttttttttaatttaaattttgtttattattatttattaagtagtttaatgcttttttcaaatgcttttataaaacatttaatacaaataaaagtggagctaacctgattgaagtggaatcagattttatggggttggagtggtgggtgggcagggctggaacattgctttatttggtctagcatctcctcagtaatagctgcttgtttaaaaagatgaaagtttattaataccacatatcagagattaacctttttttttcccaacaaaagtagggtctgtattacccatgtttgtttgcaaaatgctcttgtaacagatgagatatttaaacttcttgctctgtgttgtgattctcctgcctctgcctcctgagtagctgggattacaggtgtgcaccactatgcccggctaatttttgtatttttggtagagatgggatttcaccatgttggctaggctggtctccaactcctgaccttaagtgatccacccgccttggcctcccaaagtgctgggataataggcatgagccaccgcgcctggcctgttaaaatcttttaaagatttttaagtacttgatttttataatttagactacttacgttttactttgttcgagtattttaaggagtaattagtaatatagcttgagagtttatatatttattttaataaatagcctattagttaatattactaatttgagtgttatgatagtgcagactaagttgctgctttaaaatgaaaataaatatctaaatatcaatttcattattgctaaatttcatttaatgctttcttagttaaaaatgatcatttgtaaaaactattatctaaagaaaagacaaatagacaaataagtattttatacagatatatatgtgtgaaaagtatctaacttggatccgtagttgtgctaggaccccaaattagacttctgatcaacttggactatcagatcacagccttctgatcaacttggactatcagatcacagccaagaatctggaagttcctaaagatgacttctggcccgtctaggtagctgtcatagacatcatattttctgtgcttaaaaagctccaaatcttggtttataatttcatttaggtttttgttaggatttccattaataattgtgataaaattttaacttgggttacagtttaaatatctggaaaattctttcacagaaagttacctcattcttcagtgatactggctaagtgaattataaccagttgcttgatggtatatgacatttttgcagcttatttgaatgtttttaagtttttaattatattgctttctattgtaggccttgaaccaaagacaatgattgatttaactgaatttagaaatagcaaacacttaaaacagcagcagtacagagctgaaaaccagattcttttgaaagaggcaagtgtggtagtcagttgattattttcttggctgaactatagagaaatactaataatttatactttgcagattgaaagtctagaggaagaacgacttgatctgaaaaaaaaaattcgtcaaatggctcaagaaagaggaaaaagaagtgcaacttcaggtatactcagttattctaaacctttaaaaagaattattgataagtgagttgtctggatatgaaattatttgtgtcttagctgtttttgctgttctattgtggatctgctacaaatttaataaatgacaataataacctgaaggagataagtgagtgtcagtgggttcagtcctgaatctgaaatagacaaaaacaaaacaaaacaaaataacaaaaaccaagcaaacaaaaaagaaaaaaaccttagaattatggaatttttgaaaagtttt

SEQ ID NO: 899905 - DNA, 4046 bp, Homo sapiens
caaagcaaaatgtgaggccattaagtattacattcatctcaggtctatgcgggtaaatctttttttgttgttttataagccattctttgctagttttctaattgaatagatgactggatttctattcttatttctcttacccagaatcctttaaaattttttgttacttgtggaatcttataaattctgattatcatttggttctactgagccaaataatgtttgtacattgtttattctgatagaagttcttaagtttctaacataattgaaatattatttgttttggtagataattagtattctttctttggttattcaagataatatgcatcattttcccaaaatttttttgttttctttagtttctgattattatttttaattatgtattacctttctcatttctaattaccgttttcctgtccttttctgtagaacaaacgtctaaagaaaaaggtgaggctttaagtgtggtgaaatcttgggaatttaaaatatgttgtgagagcactatttagaggatatgattttgttattctgaatagttttgtaattgaatgttgtgtttggttaccttcagaatgaacaactttgtcaggatattattgactaccagaaacaaatagattcacagaaagaaacacttttatcaagaagaggggaagacagtgactaccgatcacagttgtctaaaaaaaactatgagcttatccaatatcttgatgaaattcaggtaaaatggctagaagtcaattcagagcaatggttcctaaaaactttaatttcattacaatgtaaatataatatttagccctacatgtaaattccctggtataaatctgtcactatgtacttgtaaaatgtgaaataaattacatctttgaagttgcaactttttagccatttttatatttgcctgtcttggtcattaagaacaattgaggtccttatgtactattttcttgattcaatttgatttaattggtcaatgccaattagtaaaggtctataaagaattctctttttttctagaggacacttatggctgcgtttaattttaatttggtttaaatttcagtttttttaaaattactttttaattatagtgtctttaacttttttagactttaacagaagctaatgagaaaattgaagttcagaatcaagaaatgagaaaaaatttagaagagtctgtacaggaaatggagaagatgactgatgaatataatagaatgaaagctattgtgcatcagacagataatgtaatagatcagttaaaaaaagaaaacgatcattatcaacttcaagtaagaattacttttagaataacttatttattcagacttcatattatctcattactatttatttgacactagaaagtactttttctaggatgtgaatttttgtctgtctttttaatagtgtaatatcttgtcatgttggtatatttgtccatatgtgtttctccaatcacctcacaaacactaatttttgcaatttaggatatataaatgatacttgaatgaatgtgtagatagcagtcattatggggttttctataaaagactactgaaaatcctgtggatcataacatttcattttatcttaaaataaatacattataaatgtattagaaaccaatacattgttcagtatttatgtggattaaatttgtttaaaaggtagaataatgtttaaaaataaaattttctagtaatgaaagataattatgcaattataagatgcagaaactattaaatgtcacctataattccaggatgacttcaatgataaatacacatatgtaatgtaatgtatccgtatgtatgtgtatataagtatgaatacgtatgtgtgtgtatgtagatatatttatatatataatgtatatgtaaatatgcacaggtgtaaatatatgttacatcagtttgcaacaactcttgaaataactttgtcttttaggtgcaggagcttacagatcttctgaaatcaaaaaatgaagaagatgatccaattatggtagctgtcaatgcaaaagtagaagaatggaaggtattttttttcaattgacataataactttttctttttgtattttagatttaaattttagtcttatttttctttaaatgtcttatactggtttataacacgtttattagggtttttaaacataagtttattttatttattggttagaaaagctctagaactgtcctttttgatctctagctaatttgttattgaatgacctctttcacatcaatgagtttaactttaaactttttgatagaagtctaactccaaaatatatttggcatctaaaatatataattcgaaatataatttaaatttttttacttaactcatagttaccttatatacattagttaaatagttgcaggtttaattttagtttttctaactaaatgtcaggttcatcagtgggaatgggaataagcaaagggatcagaataacttgggaagccttttcaaaatacacttttcttcctcaccaccactctccaaccttaaccaaattgtcaggccttaccatattagaagctgggattatgatggttgtatacttgaaaaacatcagagattattctgaatgaataattctaattttaaaaactatcacttctagagtcattgctttctagtatggttcacataaatcttgtgggcagtttggaactggttagcatctagggagctcagataacctatattttaaacaaaagcattagcaatggaaataaggcctatagaatcagtcatgtctccataaactttatataaagggccagacagtgaatattttagaccacctggtctctgctataactaaactctgcttatagcatgaaagcagccattgacaatacgtaaatgagtgagcaaggtggttttccggtaaaattttatttacaaaagcagatgggaggccagatttgacctttgggccatagtctaccaacccctggaaaaaacagttgtctttaccagattgaatgttggcagggtaaatggtgacatgttatatgtattctgtactttgttttgacttaataccatttcataattattttatatcagtacgtatagtattgctgttctttttaaaggctatgtaatttttctttttatacaggtgttaatttgataatttgtgaagtttatgaagtttccaattttggggttgtaaactgttttaatgaatatccttatatatgttattttgcaaatgtacaagtatatctgtggaataaattgctgcaagtgttgtaattgtcatgtatgttgcaaatacattctaacagtttgtcactttttttgctttatggcattttttgctgtgaaatatttctttttatgcttagttaaatttattattttttaatgacttttgacatttgttataatgagaaaggcttctgagtataaacttgttttctcatcttttctcctaatatcttgttttgtttttgtttttgtttttgtttttgagacagagtctcactcagttgcttaggctggagtgcaatggtacaatctcagctcactgcaaatgccacctcctgggttcaggtggttcttgtgcctcagcctcctgagtagctgggattacaggcatgtgccgccatgcgcagctaatttttgtagttttagtagacatggggtcacactgtgttggccaggctggtcttgaacccctggcctcaagtgatcctcctgcctgggcctcccaaagtgctggaattacaggtgtgactctgcctggcctttttttacatttaaatcttcgaaacatataattcattttgatgtaaggagtatcatgtggattcaacagagctactctgttgtccaaacatcttttattgattatttcatcttttattgaattgattgatctattttctagcagtgtatacttgttttaatttgtgtatgttttaatatctaaaaacgttattatttttctgcttttagacttctttatgaatatttttaatgtgaattatagaactggct

SEQ ID NO: 899906 - DNA, 4044 bp, Homo sapiens
ggttagtttgtgtgtgtgttctttttaattctttaaaatgaaactgtttaatccttaaatccttaagttttgaaaattttggcctattatttatgtgttaggttgatattaaatccttaatagctttaacattttctactttgttagagaggatttaaaatttaagtagataagctgaatatctggctttatattaaattactgctgatggccaggcacagtggctcatgtctgaaatcctagcactttgggaggttgaggcagatggatcacttgaggccaggagttcaagaccagcctggctaacacagtgaaaccccgtctctactaaaaatacaaaaattagccagttatggtaatgcatgccagtaattccagctactcggtaggctgaggtgggagaattgcttgaaccgggaggcagaggttgcagtgagccgagatcgcaccactgtactccagcctaggcgacaaagactttgtctcaaaaaaaaaaaaaattactgctgaattttatcttcttcttatttattttttttttttactattttagttggctcttcgaaatgaggaggcagaaaatgaaaacagcaaattaagaagagaggtaaaaaattttagtagttgtggtggttcaacaaaggtacttattaaaataagtacctaagtttacataaatttatattttaaccaggactggagtcttctaagtaactgatgttttcagactgattttatggtatgactttgtctcagggaaatagaaaacaaagcaaaatgtgaggccattaagtattacattcatctcaggtctatgcgggtaaatctttttttgttgttttataagccattctttgctagttttctaattgaatagatgactggatttctattcttatttctcttacccagaatcctttaaaattttttgttacttgtggaatcttataaattctgattatcatttggttctactgagccaaataatgtttgtacattgtttattctgatagaagttcttaagtttctaacataattgaaatattatttgttttggtagataattagtattctttctttggttattcaagataatatgcatcattttcccaaaatttttttgttttctttagtttctgattattatttttaattatgtattacctttctcatttctaattaccgttttcctgtccttttctgtagaacaaacgtctaaagaaaaaggtgaggctttaagtgtggtgaaatcttgggaatttaaaatatgttgtgagagcactatttagaggatatgattttgttattctgaatagttttgtaattgaatgttgtgtttggttaccttcagaatgaacaactttgtcaggatattattgactaccagaaacaaatagattcacagaaagaaacacttttatcaagaagaggggaagacagtgactaccgatcacagttgtctaaaaaaaactatgagcttatccaatatcttgatgaaattcaggtaaaatggctagaagtcaattcagagcaatggttcctaaaaactttaatttcattacaatgtaaatataatatttagccctacatgtaaattccctggtataaatctgtcactatgtacttgtaaaatgtgaaataaattacatctttgaagttgcaactttttagccatttttatatttgcctgtcttggtcattaagaacaattgaggtccttatgtactattttcttgattcaatttgatttaattggtcaatgccaattagtaaaggtctataaagaattctctttttttctagaggacacttatggctgcgtttaattttaatttggtttaaatttcagtttttttaaaattactttttaattatagtgtctttaacttttttagactttaacagaagctaatgagaaaattgaagttcagaatcaagaaatgagaaaaaatttagaagagtctgtacaggaaatggagaagatgactgatgaatataatagaatgaaagctattgtgcatcagacagataatgtaatagatcagttaaaaaaagaaaacgatcattatcaacttcaagtaagaattacttttagaataacttatttattcagacttcatattatctcattactatttatttgacactagaaagtactttttctaggatgtgaatttttgtctgtctttttaatagtgtaatatcttgtcatgttggtatatttgtccatatgtgtttctccaatcacctcacaaacactaatttttgcaatttaggatatataaatgatacttgaatgaatgtgtagatagcagtcattatggggttttctataaaagactactgaaaatcctgtggatcataacatttcattttatcttaaaataaatacattataaatgtattagaaaccaatacattgttcagtatttatgtggattaaatttgtttaaaaggtagaataatgtttaaaaataaaattttctagtaatgaaagataattatgcaattataagatgcagaaactattaaatgtcacctataattccaggatgacttcaatgataaatacacatatgtaatgtaatgtatccgtatgtatgtgtatataagtatgaatacgtatgtgtgtgtatgtagatatatttatatatataatgtatatgtaaatatgcacaggtgtaaatatatgttacatcagtttgcaacaactcttgaaataactttgtcttttaggtgcaggagcttacagatcttctgaaatcaaaaaatgaagaagatgatccaattatggtagctgtcaatgcaaaagtagaagaatggaaggtattttttttcaattgacataataactttttctttttgtattttagatttaaattttagtcttatttttctttaaatgtcttatactggtttataacacgtttattagggtttttaaacataagtttattttatttattggttagaaaagctctagaactgtcctttttgatctctagctaatttgttattgaatgacctctttcacatcaatgagtttaactttaaactttttgatagaagtctaactccaaaatatatttggcatctaaaatatataattcgaaatataatttaaatttttttacttaactcatagttaccttatatacattagttaaatagttgcaggtttaattttagtttttctaactaaatgtcaggttcatcagtgggaatgggaataagcaaagggatcagaataacttgggaagccttttcaaaatacacttttcttcctcaccaccactctccaaccttaaccaaattgtcaggccttaccatattagaagctgggattatgatggttgtatacttgaaaaacatcagagattattctgaatgaataattctaattttaaaaactatcacttctagagtcattgctttctagtatggttcacataaatcttgtgggcagtttggaactggttagcatctagggagctcagataacctatattttaaacaaaagcattagcaatggaaataaggcctatagaatcagtcatgtctccataaactttatataaagggccagacagtgaatattttagaccacctggtctctgctataactaaactctgcttatagcatgaaagcagccattgacaatacgtaaatgagtgagcaaggtggttttccggtaaaattttatttacaaaagcagatgggaggccagatttgacctttgggccatagtctaccaacccctggaaaaaacagttgtctttaccagattgaatgttggcagggtaaatggtgacatgttatatgtattctgtactttgttttgacttaataccatttcataattattttatatcagtacgtatagtattgctgttctttttaaaggctatgtaatttttctttttatacaggtgttaatttgataatttgtgaagtttatgaagtttccaattttggggttgtaaactgttttaatgaatatccttatatatgttattttgcaaatgtacaagtatatctgtgga

SEQ ID NO: 899907 - DNA, 4046 bp, Homo sapiens
agctatgacttagaaaagtaaaataaagatgttgggcagaaaaccattttattaggggtttttttggaggagcagattaatttgtttctgtattctttggttagtttgtgtgtgtgttctttttaattctttaaaatgaaactgtttaatccttaaatccttaagttttgaaaattttggcctattatttatgtgttaggttgatattaaatccttaatagctttaacattttctactttgttagagaggatttaaaatttaagtagataagctgaatatctggctttatattaaattactgctgatggccaggcacagtggctcatgtctgaaatcctagcactttgggaggttgaggcagatggatcacttgaggccaggagttcaagaccagcctggctaacacagtgaaaccccgtctctactaaaaatacaaaaattagccagttatggtaatgcatgccagtaattccagctactcggtaggctgaggtgggagaattgcttgaaccgggaggcagaggttgcagtgagccgagatcgcaccactgtactccagcctaggcgacaaagactttgtctcaaaaaaaaaaaaaattactgctgaattttatcttcttcttatttattttttttttttactattttagttggctcttcgaaatgaggaggcagaaaatgaaaacagcaaattaagaagagaggtaaaaaattttagtagttgtggtggttcaacaaaggtacttattaaaataagtacctaagtttacataaatttatattttaaccaggactggagtcttctaagtaactgatgttttcagactgattttatggtatgactttgtctcagggaaatagaaaacaaagcaaaatgtgaggccattaagtattacattcatctcaggtctatgcgggtaaatctttttttgttgttttataagccattctttgctagttttctaattgaatagatgactggatttctattcttatttctcttacccagaatcctttaaaattttttgttacttgtggaatcttataaattctgattatcatttggttctactgagccaaataatgtttgtacattgtttattctgatagaagttcttaagtttctaacataattgaaatattatttgttttggtagataattagtattctttctttggttattcaagataatatgcatcattttcccaaaatttttttgttttctttagtttctgattattatttttaattatgtattacctttctcatttctaattaccgttttcctgtccttttctgtagaacaaacgtctaaagaaaaaggtgaggctttaagtgtggtgaaatcttgggaatttaaaatatgttgtgagagcactatttagaggatatgattttgttattctgaatagttttgtaattgaatgttgtgtttggttaccttcagaatgaacaactttgtcaggatattattgactaccagaaacaaatagattcacagaaagaaacacttttatcaagaagaggggaagacagtgactaccgatcacagttgtctaaaaaaaactatgagcttatccaatatcttgatgaaattcaggtaaaatggctagaagtcaattcagagcaatggttcctaaaaactttaatttcattacaatgtaaatataatatttagccctacatgtaaattccctggtataaatctgtcactatgtacttgtaaaatgtgaaataaattacatctttgaagttgcaactttttagccatttttatatttgcctgtcttggtcattaagaacaattgaggtccttatgtactattttcttgattcaatttgatttaattggtcaatgccaattagtaaaggtctataaagaattctctttttttctagaggacacttatggctgcgtttaattttaatttggtttaaatttcagtttttttaaaattactttttaattatagtgtctttaacttttttagactttaacagaagctaatgagaaaattgaagttcagaatcaagaaatgagaaaaaatttagaagagtctgtacaggaaatggagaagatgactgatgaatataatagaatgaaagctattgtgcatcagacagataatgtaatagatcagttaaaaaaagaaaacgatcattatcaacttcaagtaagaattacttttagaataacttatttattcagacttcatattatctcattactatttatttgacactagaaagtactttttctaggatgtgaatttttgtctgtctttttaatagtgtaatatcttgtcatgttggtatatttgtccatatgtgtttctccaatcacctcacaaacactaatttttgcaatttaggatatataaatgatacttgaatgaatgtgtagatagcagtcattatggggttttctataaaagactactgaaaatcctgtggatcataacatttcattttatcttaaaataaatacattataaatgtattagaaaccaatacattgttcagtatttatgtggattaaatttgtttaaaaggtagaataatgtttaaaaataaaattttctagtaatgaaagataattatgcaattataagatgcagaaactattaaatgtcacctataattccaggatgacttcaatgataaatacacatatgtaatgtaatgtatccgtatgtatgtgtatataagtatgaatacgtatgtgtgtgtatgtagatatatttatatatataatgtatatgtaaatatgcacaggtgtaaatatatgttacatcagtttgcaacaactcttgaaataactttgtcttttaggtgcaggagcttacagatcttctgaaatcaaaaaatgaagaagatgatccaattatggtagctgtcaatgcaaaagtagaagaatggaaggtattttttttcaattgacataataactttttctttttgtattttagatttaaattttagtcttatttttctttaaatgtcttatactggtttataacacgtttattagggtttttaaacataagtttattttatttattggttagaaaagctctagaactgtcctttttgatctctagctaatttgttattgaatgacctctttcacatcaatgagtttaactttaaactttttgatagaagtctaactccaaaatatatttggcatctaaaatatataattcgaaatataatttaaatttttttacttaactcatagttaccttatatacattagttaaatagttgcaggtttaattttagtttttctaactaaatgtcaggttcatcagtgggaatgggaataagcaaagggatcagaataacttgggaagccttttcaaaatacacttttcttcctcaccaccactctccaaccttaaccaaattgtcaggccttaccatattagaagctgggattatgatggttgtatacttgaaaaacatcagagattattctgaatgaataattctaattttaaaaactatcacttctagagtcattgctttctagtatggttcacataaatcttgtgggcagtttggaactggttagcatctagggagctcagataacctatattttaaacaaaagcattagcaatggaaataaggcctatagaatcagtcatgtctccataaactttatataaagggccagacagtgaatattttagaccacctggtctctgctataactaaactctgcttatagcatgaaagcagccattgacaatacgtaaatgagtgagcaaggtggttttccggtaaaattttatttacaaaagcagatgggaggccagatttgacctttgggccatagtctaccaacccctggaaaaaacagttgtctttaccagattgaatgttggcagggtaaatggtgacatgttatatgtattctgtactttgttttgacttaataccatttcataattattttatatcagtacgtatagtattgctgttctttttaaaggctatgtaatttttctttttatacaggtgttaatttgataattt

SEQ ID NO: 899908 - DNA, 4052 bp, Homo sapiens
acaaatggatcagcctttgaaaggaggaatacccttttcctttgtgttaggagaggaggatgagtggatgagcgtgggaagagtggatgtgtatagaggcttttatgtttgtaggcataatgcttggaagttgaggggttggtgatgacatcttctgttaaaaagagtgggaaatggtgtggtcacattttaaggaaattaggtaaaatttgaaatatattggagacaggactggagagttggggatctggagtcagacagatttgagttctagtcctgattcttctactcgttaactctctgaacttggatgacctattgtttttgattgtatatccagctcctgggaaaatgccaagcactttcaataaatactaaatgaattatggagttggatcagttctgtgttagtgtttagctaggtagctgctgtagaatagaagggtagcacagttgaagatattggtaggaaagtggttgaagtgatgattatgaagtcttaactgaatagataaaatcaagattggggttgggtgggcagaagggtagggatatggagggagaagatgaggggttagagtgtcctgtgaggtcgaaggacaggcatagtgggaataattgaaagaatgttctggttggacaaggatctgatgtgggtgtgggagtgagagactatagtgaattcaagaaaaaaatagactagaacaaaagttatgtggagattgcttagtgggcatttgatagacatctgtgggccacatgcttaaattcccagtgcattttgcggagttactggaaggttggtggcttgtttctaccatgagtaggtaaagatggagagcaggatattttgtgagaaagcagctgaagtttctataggatgatggaggaatgataggaatgatcacctgaagttgcagggtggggtaaacctagaagcaccaacaccttcttctgaccctcatgtatttggaatctgaaagaatgagcaccttccaattgaaagagttccaagggcattagtatactaaaggatccaaattgcagctaagccaaggagatggaaaggaggattcagtaaagaatctgaggatgtgaaatattaatttatcttggaagagaattttagagagcacaatggaatgctttttggaggagagaaagagtaagaacaatttggttaaggtagaggaataacagaactataaggtgaagaaatgaatgtgagacacattagatgaccaaatgatttgatgttcttggccatgacctgaattaacaagactgtgaggtaaaatggatttaatcggctacaaatcttaagataaccaaaacctgagctgtttaatatggtagcactagcactaaccacttgtagctatttatatttacattggttaaaattaaaatgaaaaatttagttcttcagttgcactagccacacttcaaatgcccgaacatagctacatgtagcgagtggctattgaactggacagcactgacagcatgtccattatgctagaaagtcctatgggacagcactggtctaaacagtgcatggtatgagagaaagggcaggttaaggcactcagcttcactgactggggtggagattctgatggtttgtactcaggttccagatccctgaggctcaggaacctttgcagtttagtctggttacctgtggcccagtggttacaacagaatgattaacagtcaattctttgcatctctgggtggctcaggaaaaatttaaggagttattagctgtgaactaaccttaagtaagttaaattaaaaaaaaaaaagttcttaagctaatatgattttaaatatctgcactgaagtataatgcaaatttaaattcagcataattatttgcttgttgttgactcatttgaacctcaaaatataatgggattaatttatactttgggtttattactttaagatggctcagcagtctgcaggtggacgagatactcggtttttacgtaatgaaatttgccaacttgaaaaacaattagaacaaaaagatagagaattggaggacatggaaaaggagttggagaaagagaagaaagttaatgagcaagtaaagcactttttttttccatgaatcttcactgttcaagttacctggctttttattattattggtaacaatatcaatttttatattgtatgttatatttgaaaaatgatgtacacttatctctaaggttttatatcactgttcattttgtcatcaccaattttaaaatataatggtacttctagtgaatatgacttgaagattaattctttatatttggaagtacatttttctcaggacatcaaacttgttacctaaaattaatgcttttgtctggaagattggtatcaagtaactaatagattttcataaagaagtgatctttctagtgccatagtttattttgggtaaaagttatatttgttcatttcaatgtatttatatgattagtagattcgcaaatgaatctttcgatatattcaataatggttaattaaatatcttgtttttggttgtaccttattttatgtgagatatatatatatatgtatagtttttgaaaagttgtgttcatgtcagcagtttataaatcacatatttaaaataacatttttaatgcatagtttttattacctcgttattccttgttataaactaataattcttgcagtgttcacttgaatttagttttaggaaaaaagttttttgcagatcaacttgtatttcctggaagaaaatttcctattttacctcagcttcctatttaatgtattatttatttatttacttaacatttatttgttttttatttcacctgaactgttagtaaacttagtaaaatttggtgcctacatgtggtaactgtcctgtcccttatactcagaaacgttttccacctttgtgtcctttaggtcattgttgtgttatattccatttattttattttgtccattgttctctcagaaattgagggtcatacattttaagaaaacaatgatatgctatttaagagaatgtatcataaattgatttgtaaggaaaagtatccccattcttcatgtatgtattttactctaaaatgttgaagaatcatatagaagttagctatgaaaacaatgtggtagagaaagtatggatcgatgccacttaaatgttaggaagaagctcttagagcattatctgtttagctaactgcaaaacatagcagacatgtggattttttaatagtcatcaaggatctaacttataatatacactggtagaattgcttagggggatgtctgtggttttctggacttttgttcttctatatagacctgtatcagttgacttatcattcataccacacacccttagctaatcagaactaccttgtccatttatatcttagactattgtcttttttcatagtcacacacagagaaaacttgaatatatggcctgtgttcctttttggctgctcaattccttgagatgaaatatgggtatgggttgctttggcaattacttctttgccgttaaccagtcattcagttttattgagtctttacagcataccagaggctgctagttactagtgatatagtgggcaactatgttctggttctcaagaatattcatagtcaataataagcataacatagtgataatatgatacttagggagatacataaggtcatattctggcatactctggagagagataccgtaatcagccttgaggtgcaggatgtgatctgtaaactgagacctgaagtatagttagactggtaagaggaatgaggatatatatggtggttaataaaagaacattctgggtagaagatatagcatttgctaagacctagaggtaagagatgttatggagtatttaggaaactacagttattcattttgactgaaatataagtgaaaatagctttcatagagtccttactatgtgccaggcacttcatatgcattaattcattattgcttatttgatacttgtcatatgagatagttgtcatttctgcca

SEQ ID NO: 899909 - DNA, 4143 bp, Homo sapiens
tggtaatatctacatcaccactaaaaaatgcaatatatttaaatgtgaattaagtattttagtgtataaaacattgctagtttctacttaaagtttctaaaagggtgtgtaggggaaatagaatgagtatgttgaaaagtaacataaggaaatatatcttgaggtccaaatgacaaatgcagacaatgactgctatagggatttgttaagaggggaaatgatttaagagatgtcagaagacttcacaaaggatcaatactgaggagtagtgttagataagtggaaggcaatgcagtggtaagatagtaagggaattctagagctgttggttaccataaataaatactgagaacaggaaatatgtttattctttatatttgaggaaacaaggtgcagcaagtttgtagcagactgtagagaaaacaaatcttgggtaagtactttgagataggttgttgagggccttaaaggtgtattttatgctatcagcaattgagaaggcagtaaaggttttcgaaacacaattgataggtacaaaaatacaccttaagaaggcaaaactgagtatattatgtaggacaaactgaaggaaattggagctttgtagacatcacattatagcggagtttaaacctgaaattatggattagaataatagcaattggaacagaaaaaaagtagtggaaagacattacaaagggagatgttgcattactggatataagacttgaggacttgaggtaaaaaggagaatcaaaaatgtttcatgctattaaaaatctagaaattgtagtcttaagtaagaaaattgcctggcatggtggctcacgtctgtaatcccagcactttgggaggccaaggcaggaggattgcttgagcctgggagttcaagactagcctggataatatagtgagtccttgcctgtacgaaaaaatttgccgagcatgatggcacaccaagcatgatggcacgccaagcatgatggcatgcacctgtagtcccagctactcaggagactgagatgggaagattgcttgagcccaggaggcaggaggttgcagtgagctgagattgtgccactgcactccagcctgggtgacaaagtgaggccctatctcaaaagcaaaaaaaacaaaaacaaaaaccaaaaactatttattcagcaaatatttactgaacgtctccatgtgccagccattgctggcactaaggatcataacaaataaaacagaatttttattttcagtgcttacattccagtataaaggcatattgaaataacctttttttaatgtttagatgaaagctcaagaagtggagctggctttggaagaagtagaaaaagctggagaagaacaagcaaaatttggtaagcaccttggaaaaagtttattatggtattaaataatgaattccatttgttcattaaactgtagaaaattaaattatattctataaaatatatatattcagtttatttttaatatataacatttaataataaatatttctagactcctattttatggatctgccatataatactttttgttaccttataatcatgatggactcttttaaaagaattaattttgttattgaaatttatttaaaagtttgttttgtggtaactaatcaattaaaacgtttttctttttttttaaaaaaatagaaaatcaattaaaaactaaagtaatgaaactggaaaatgaactggaggtatgtctttttgtattccctaggatgtaattgtcattaattttattttgaattgttttcaaattttaaaattattgttggctggaaaaattataaggatgattgtaatcatggttatttgtttattctgtatatgttctacatgcctattatgtgccttatatagtactaaggactgagcatatggttgtgaacaaaataagaagttaactgctggatggagcttatagtcttgggaaatatacagaaagattactagtaactgaggtggagggtgggtggggatttgaggaatagtgacgaaagggtgttatagaagtaatttttgacaaagctgaaggctaaaatatgaatgtattgttgaagaacaaaatacattgagattcctgagaaggtaggaatgtgatacaaatggatcagcctttgaaaggaggaatacccttttcctttgtgttaggagaggaggatgagtggatgagcgtgggaagagtggatgtgtatagaggcttttatgtttgtaggcataatgcttggaagttgaggggttggtgatgacatcttctgttaaaaagagtgggaaatggtgtggtcacattttaaggaaattaggtaaaatttgaaatatattggagacaggactggagagttggggatctggagtcagacagatttgagttctagtcctgattcttctactcgttaactctctgaacttggatgacctattgtttttgattgtatatccagctcctgggaaaatgccaagcactttcaataaatactaaatgaattatggagttggatcagttctgtgttagtgtttagctaggtagctgctgtagaatagaagggtagcacagttgaagatattggtaggaaagtggttgaagtgatgattatgaagtcttaactgaatagataaaatcaagattggggttgggtgggcagaagggtagggatatggagggagaagatgaggggttagagtgtcctgtgaggtcgaaggacaggcatagtgggaataattgaaagaatgttctggttggacaaggatctgatgtgggtgtgggagtgagagactatagtgaattcaagaaaaaaatagactagaacaaaagttatgtggagattgcttagtgggcatttgatagacatctgtgggccacatgcttaaattcccagtgcattttgcggagttactggaaggttggtggcttgtttctaccatgagtaggtaaagatggagagcaggatattttgtgagaaagcagctgaagtttctataggatgatggaggaatgataggaatgatcacctgaagttgcagggtggggtaaacctagaagcaccaacaccttcttctgaccctcatgtatttggaatctgaaagaatgagcaccttccaattgaaagagttccaagggcattagtatactaaaggatccaaattgcagctaagccaaggagatggaaaggaggattcagtaaagaatctgaggatgtgaaatattaatttatcttggaagagaattttagagagcacaatggaatgctttttggaggagagaaagagtaagaacaatttggttaaggtagaggaataacagaactataaggtgaagaaatgaatgtgagacacattagatgaccaaatgatttgatgttcttggccatgacctgaattaacaagactgtgaggtaaaatggatttaatcggctacaaatcttaagataaccaaaacctgagctgtttaatatggtagcactagcactaaccacttgtagctatttatatttacattggttaaaattaaaatgaaaaatttagttcttcagttgcactagccacacttcaaatgcccgaacatagctacatgtagcgagtggctattgaactggacagcactgacagcatgtccattatgctagaaagtcctatgggacagcactggtctaaacagtgcatggtatgagagaaagggcaggttaaggcactcagcttcactgactggggtggagattctgatggtttgtactcaggttccagatccctgaggctcaggaacctttgcagtttagtctggttacctgtggcccagtggttacaacagaatgattaacagtcaattctttgcatctctgggtggctcaggaaaaatttaaggagttattagctgtgaactaaccttaagtaagttaaattaaaaaaaaaaaagttcttaagctaatatgattttaaatatctgcactgaagtataatgcaaatttaaattcagcataattatttgcttgttgttgactcatttgaacctcaaaatataatgggattaatttatactttgggtttattactttaagatggctcagcagtctgcaggtggacgagatactcggtttttacgtaatgaaatttgccaacttga

SEQ ID NO: 899910 - DNA, 4046 bp, Homo sapiens
tggctattagtggaactataaaaatctgttcttatataaggtaatctttgtgaaaatacctggtaatatctacatcaccactaaaaaatgcaatatatttaaatgtgaattaagtattttagtgtataaaacattgctagtttctacttaaagtttctaaaagggtgtgtaggggaaatagaatgagtatgttgaaaagtaacataaggaaatatatcttgaggtccaaatgacaaatgcagacaatgactgctatagggatttgttaagaggggaaatgatttaagagatgtcagaagacttcacaaaggatcaatactgaggagtagtgttagataagtggaaggcaatgcagtggtaagatagtaagggaattctagagctgttggttaccataaataaatactgagaacaggaaatatgtttattctttatatttgaggaaacaaggtgcagcaagtttgtagcagactgtagagaaaacaaatcttgggtaagtactttgagataggttgttgagggccttaaaggtgtattttatgctatcagcaattgagaaggcagtaaaggttttcgaaacacaattgataggtacaaaaatacaccttaagaaggcaaaactgagtatattatgtaggacaaactgaaggaaattggagctttgtagacatcacattatagcggagtttaaacctgaaattatggattagaataatagcaattggaacagaaaaaaagtagtggaaagacattacaaagggagatgttgcattactggatataagacttgaggacttgaggtaaaaaggagaatcaaaaatgtttcatgctattaaaaatctagaaattgtagtcttaagtaagaaaattgcctggcatggtggctcacgtctgtaatcccagcactttgggaggccaaggcaggaggattgcttgagcctgggagttcaagactagcctggataatatagtgagtccttgcctgtacgaaaaaatttgccgagcatgatggcacaccaagcatgatggcacgccaagcatgatggcatgcacctgtagtcccagctactcaggagactgagatgggaagattgcttgagcccaggaggcaggaggttgcagtgagctgagattgtgccactgcactccagcctgggtgacaaagtgaggccctatctcaaaagcaaaaaaaacaaaaacaaaaaccaaaaactatttattcagcaaatatttactgaacgtctccatgtgccagccattgctggcactaaggatcataacaaataaaacagaatttttattttcagtgcttacattccagtataaaggcatattgaaataacctttttttaatgtttagatgaaagctcaagaagtggagctggctttggaagaagtagaaaaagctggagaagaacaagcaaaatttggtaagcaccttggaaaaagtttattatggtattaaataatgaattccatttgttcattaaactgtagaaaattaaattatattctataaaatatatatattcagtttatttttaatatataacatttaataataaatatttctagactcctattttatggatctgccatataatactttttgttaccttataatcatgatggactcttttaaaagaattaattttgttattgaaatttatttaaaagtttgttttgtggtaactaatcaattaaaacgtttttctttttttttaaaaaaatagaaaatcaattaaaaactaaagtaatgaaactggaaaatgaactggaggtatgtctttttgtattccctaggatgtaattgtcattaattttattttgaattgttttcaaattttaaaattattgttggctggaaaaattataaggatgattgtaatcatggttatttgtttattctgtatatgttctacatgcctattatgtgccttatatagtactaaggactgagcatatggttgtgaacaaaataagaagttaactgctggatggagcttatagtcttgggaaatatacagaaagattactagtaactgaggtggagggtgggtggggatttgaggaatagtgacgaaagggtgttatagaagtaatttttgacaaagctgaaggctaaaatatgaatgtattgttgaagaacaaaatacattgagattcctgagaaggtaggaatgtgatacaaatggatcagcctttgaaaggaggaatacccttttcctttgtgttaggagaggaggatgagtggatgagcgtgggaagagtggatgtgtatagaggcttttatgtttgtaggcataatgcttggaagttgaggggttggtgatgacatcttctgttaaaaagagtgggaaatggtgtggtcacattttaaggaaattaggtaaaatttgaaatatattggagacaggactggagagttggggatctggagtcagacagatttgagttctagtcctgattcttctactcgttaactctctgaacttggatgacctattgtttttgattgtatatccagctcctgggaaaatgccaagcactttcaataaatactaaatgaattatggagttggatcagttctgtgttagtgtttagctaggtagctgctgtagaatagaagggtagcacagttgaagatattggtaggaaagtggttgaagtgatgattatgaagtcttaactgaatagataaaatcaagattggggttgggtgggcagaagggtagggatatggagggagaagatgaggggttagagtgtcctgtgaggtcgaaggacaggcatagtgggaataattgaaagaatgttctggttggacaaggatctgatgtgggtgtgggagtgagagactatagtgaattcaagaaaaaaatagactagaacaaaagttatgtggagattgcttagtgggcatttgatagacatctgtgggccacatgcttaaattcccagtgcattttgcggagttactggaaggttggtggcttgtttctaccatgagtaggtaaagatggagagcaggatattttgtgagaaagcagctgaagtttctataggatgatggaggaatgataggaatgatcacctgaagttgcagggtggggtaaacctagaagcaccaacaccttcttctgaccctcatgtatttggaatctgaaagaatgagcaccttccaattgaaagagttccaagggcattagtatactaaaggatccaaattgcagctaagccaaggagatggaaaggaggattcagtaaagaatctgaggatgtgaaatattaatttatcttggaagagaattttagagagcacaatggaatgctttttggaggagagaaagagtaagaacaatttggttaaggtagaggaataacagaactataaggtgaagaaatgaatgtgagacacattagatgaccaaatgatttgatgttcttggccatgacctgaattaacaagactgtgaggtaaaatggatttaatcggctacaaatcttaagataaccaaaacctgagctgtttaatatggtagcactagcactaaccacttgtagctatttatatttacattggttaaaattaaaatgaaaaatttagttcttcagttgcactagccacacttcaaatgcccgaacatagctacatgtagcgagtggctattgaactggacagcactgacagcatgtccattatgctagaaagtcctatgggacagcactggtctaaacagtgcatggtatgagagaaagggcaggttaaggcactcagcttcactgactggggtggagattctgatggtttgtactcaggttccagatccctgaggctcaggaacctttgcagtttagtctggttacctgtggcccagtggttacaacagaatgattaacagtcaattctttgcatctctgggtggctcaggaaaaatttaaggagttattagctgtgaactaaccttaagtaagttaaattaaaaaaaaaaaagttcttaagctaatatgattttaaatatctgcactgaagtataatgcaaat

SEQ ID NO: 899911 - DNA, 4031 bp, Homo sapiens
ttttatttagccgggacactctgacagtttgtgccgactgctatttttgatcaaggctattttgcccacttgtctattttgtggcccaattgtctgttttgctaacatcagaaagttataatgaaataatctgcaaaaaatgtaaggtgctagaaaaccaataatactgtgtaccttgaaaatgctaatatacacctgttttgttacagaggtggagcacagtgaaagaattcaagatgccacctaatataaactggaaagaaataatgaaagttgacccagatgacctgccccgtcaagaagaactggcagataatttattgatttccttatccaaggtgcttaattggtcaataataatagatatatacattaacttatgattaatttattaataaaatatgaatttatttttttcagggacaactataattgtcacaatctggaagtgttcttatattttgcttgaaggttataaaatataaaacagttgcttttctgtttacttaggtggaagtaaatgagctaaaaagtgaaaagcaagaaaatgtgatacaccttttcagaattactcagtcactaatgaaggtttgtatgtagtaggttttaactataggtttggctattagtggaactataaaaatctgttcttatataaggtaatctttgtgaaaatacctggtaatatctacatcaccactaaaaaatgcaatatatttaaatgtgaattaagtattttagtgtataaaacattgctagtttctacttaaagtttctaaaagggtgtgtaggggaaatagaatgagtatgttgaaaagtaacataaggaaatatatcttgaggtccaaatgacaaatgcagacaatgactgctatagggatttgttaagaggggaaatgatttaagagatgtcagaagacttcacaaaggatcaatactgaggagtagtgttagataagtggaaggcaatgcagtggtaagatagtaagggaattctagagctgttggttaccataaataaatactgagaacaggaaatatgtttattctttatatttgaggaaacaaggtgcagcaagtttgtagcagactgtagagaaaacaaatcttgggtaagtactttgagataggttgttgagggccttaaaggtgtattttatgctatcagcaattgagaaggcagtaaaggttttcgaaacacaattgataggtacaaaaatacaccttaagaaggcaaaactgagtatattatgtaggacaaactgaaggaaattggagctttgtagacatcacattatagcggagtttaaacctgaaattatggattagaataatagcaattggaacagaaaaaaagtagtggaaagacattacaaagggagatgttgcattactggatataagacttgaggacttgaggtaaaaaggagaatcaaaaatgtttcatgctattaaaaatctagaaattgtagtcttaagtaagaaaattgcctggcatggtggctcacgtctgtaatcccagcactttgggaggccaaggcaggaggattgcttgagcctgggagttcaagactagcctggataatatagtgagtccttgcctgtacgaaaaaatttgccgagcatgatggcacaccaagcatgatggcacgccaagcatgatggcatgcacctgtagtcccagctactcaggagactgagatgggaagattgcttgagcccaggaggcaggaggttgcagtgagctgagattgtgccactgcactccagcctgggtgacaaagtgaggccctatctcaaaagcaaaaaaaacaaaaacaaaaaccaaaaactatttattcagcaaatatttactgaacgtctccatgtgccagccattgctggcactaaggatcataacaaataaaacagaatttttattttcagtgcttacattccagtataaaggcatattgaaataacctttttttaatgtttagatgaaagctcaagaagtggagctggctttggaagaagtagaaaaagctggagaagaacaagcaaaatttggtaagcaccttggaaaaagtttattatggtattaaataatgaattccatttgttcattaaactgtagaaaattaaattatattctataaaatatatatattcagtttatttttaatatataacatttaataataaatatttctagactcctattttatggatctgccatataatactttttgttaccttataatcatgatggactcttttaaaagaattaattttgttattgaaatttatttaaaagtttgttttgtggtaactaatcaattaaaacgtttttctttttttttaaaaaaatagaaaatcaattaaaaactaaagtaatgaaactggaaaatgaactggaggtatgtctttttgtattccctaggatgtaattgtcattaattttattttgaattgttttcaaattttaaaattattgttggctggaaaaattataaggatgattgtaatcatggttatttgtttattctgtatatgttctacatgcctattatgtgccttatatagtactaaggactgagcatatggttgtgaacaaaataagaagttaactgctggatggagcttatagtcttgggaaatatacagaaagattactagtaactgaggtggagggtgggtggggatttgaggaatagtgacgaaagggtgttatagaagtaatttttgacaaagctgaaggctaaaatatgaatgtattgttgaagaacaaaatacattgagattcctgagaaggtaggaatgtgatacaaatggatcagcctttgaaaggaggaatacccttttcctttgtgttaggagaggaggatgagtggatgagcgtgggaagagtggatgtgtatagaggcttttatgtttgtaggcataatgcttggaagttgaggggttggtgatgacatcttctgttaaaaagagtgggaaatggtgtggtcacattttaaggaaattaggtaaaatttgaaatatattggagacaggactggagagttggggatctggagtcagacagatttgagttctagtcctgattcttctactcgttaactctctgaacttggatgacctattgtttttgattgtatatccagctcctgggaaaatgccaagcactttcaataaatactaaatgaattatggagttggatcagttctgtgttagtgtttagctaggtagctgctgtagaatagaagggtagcacagttgaagatattggtaggaaagtggttgaagtgatgattatgaagtcttaactgaatagataaaatcaagattggggttgggtgggcagaagggtagggatatggagggagaagatgaggggttagagtgtcctgtgaggtcgaaggacaggcatagtgggaataattgaaagaatgttctggttggacaaggatctgatgtgggtgtgggagtgagagactatagtgaattcaagaaaaaaatagactagaacaaaagttatgtggagattgcttagtgggcatttgatagacatctgtgggccacatgcttaaattcccagtgcattttgcggagttactggaaggttggtggcttgtttctaccatgagtaggtaaagatggagagcaggatattttgtgagaaagcagctgaagtttctataggatgatggaggaatgataggaatgatcacctgaagttgcagggtggggtaaacctagaagcaccaacaccttcttctgaccctcatgtatttggaatctgaaagaatgagcaccttccaattgaaagagttccaagggcattagtatactaaaggatccaaattgcagctaagccaaggagatggaaaggaggattcagtaaagaatctgaggatgtgaaatattaatttatcttggaagagaattttagagagcacaatggaatgctttttggaggagagaaagagtaagaacaatttggttaaggtagaggaataacagaactataaggtgaagaaatgaatgt

SEQ ID NO: 899912 - DNA, 4067 bp, Homo sapiens
cctcacctgggggcggttccgccaggggatggcttaggaaaacctcaggaagagcagcccagcgagtgacgccactgaaaccacagtcatggtctacctcgttcaggccaccagtttgcaggcgcctgagccgctgctcctcccgcctctcggtccttccccgccgccccggtaccgtcgcagtcttacgcgttgcatgccgggagcgccttacctcctcttctcagggacttcagttcccagcatgcagaagcctcaggcagaactgcactctgggatttgaagtcctcgttccacgccttctcatcatcctgaacaccgagctctgggactccggcggagaatctaaacgtaaagcatcacccacggtcgtgaactgtaggctctcctggcatccgggatcttattctggccttggcggagttggggatggtgtcgcctagcagccgctgccgctttggcttgctcgggaccatttggctggacccagagtccgcgtggaaccgcgatagggatctgtcagggcccgcggccgggtccagcttggtggttgcggtagtgagaggcctccgctggttgccaggcttggtctaggtgggtggatccttgtaagcaggattagcgagtcactccacgctcaggttctttagcctgagggcccgtgtgccacagcatagctaccccgcccttccagcctcgggtccctaatactgccttgcttcggttccagtttccgccgcacaacttcactcattccaaatgttaatttctgcgttttttttcagccccaattctgtttctccaaatcagggatgattgtcggccttccacagaccctcgcgcttgccaggattagggtgttcgcgcgcattgtgggtaggggtgtggaggaagggatccagaaatcttaagtattaacttagattagtgttagcaaggaagccgtcacattttatttagccgggacactctgacagtttgtgccgactgctatttttgatcaaggctattttgcccacttgtctattttgtggcccaattgtctgttttgctaacatcagaaagttataatgaaataatctgcaaaaaatgtaaggtgctagaaaaccaataatactgtgtaccttgaaaatgctaatatacacctgttttgttacagaggtggagcacagtgaaagaattcaagatgccacctaatataaactggaaagaaataatgaaagttgacccagatgacctgccccgtcaagaagaactggcagataatttattgatttccttatccaaggtgcttaattggtcaataataatagatatatacattaacttatgattaatttattaataaaatatgaatttatttttttcagggacaactataattgtcacaatctggaagtgttcttatattttgcttgaaggttataaaatataaaacagttgcttttctgtttacttaggtggaagtaaatgagctaaaaagtgaaaagcaagaaaatgtgatacaccttttcagaattactcagtcactaatgaaggtttgtatgtagtaggttttaactataggtttggctattagtggaactataaaaatctgttcttatataaggtaatctttgtgaaaatacctggtaatatctacatcaccactaaaaaatgcaatatatttaaatgtgaattaagtattttagtgtataaaacattgctagtttctacttaaagtttctaaaagggtgtgtaggggaaatagaatgagtatgttgaaaagtaacataaggaaatatatcttgaggtccaaatgacaaatgcagacaatgactgctatagggatttgttaagaggggaaatgatttaagagatgtcagaagacttcacaaaggatcaatactgaggagtagtgttagataagtggaaggcaatgcagtggtaagatagtaagggaattctagagctgttggttaccataaataaatactgagaacaggaaatatgtttattctttatatttgaggaaacaaggtgcagcaagtttgtagcagactgtagagaaaacaaatcttgggtaagtactttgagataggttgttgagggccttaaaggtgtattttatgctatcagcaattgagaaggcagtaaaggttttcgaaacacaattgataggtacaaaaatacaccttaagaaggcaaaactgagtatattatgtaggacaaactgaaggaaattggagctttgtagacatcacattatagcggagtttaaacctgaaattatggattagaataatagcaattggaacagaaaaaaagtagtggaaagacattacaaagggagatgttgcattactggatataagacttgaggacttgaggtaaaaaggagaatcaaaaatgtttcatgctattaaaaatctagaaattgtagtcttaagtaagaaaattgcctggcatggtggctcacgtctgtaatcccagcactttgggaggccaaggcaggaggattgcttgagcctgggagttcaagactagcctggataatatagtgagtccttgcctgtacgaaaaaatttgccgagcatgatggcacaccaagcatgatggcacgccaagcatgatggcatgcacctgtagtcccagctactcaggagactgagatgggaagattgcttgagcccaggaggcaggaggttgcagtgagctgagattgtgccactgcactccagcctgggtgacaaagtgaggccctatctcaaaagcaaaaaaaacaaaaacaaaaaccaaaaactatttattcagcaaatatttactgaacgtctccatgtgccagccattgctggcactaaggatcataacaaataaaacagaatttttattttcagtgcttacattccagtataaaggcatattgaaataacctttttttaatgtttagatgaaagctcaagaagtggagctggctttggaagaagtagaaaaagctggagaagaacaagcaaaatttggtaagcaccttggaaaaagtttattatggtattaaataatgaattccatttgttcattaaactgtagaaaattaaattatattctataaaatatatatattcagtttatttttaatatataacatttaataataaatatttctagactcctattttatggatctgccatataatactttttgttaccttataatcatgatggactcttttaaaagaattaattttgttattgaaatttatttaaaagtttgttttgtggtaactaatcaattaaaacgtttttctttttttttaaaaaaatagaaaatcaattaaaaactaaagtaatgaaactggaaaatgaactggaggtatgtctttttgtattccctaggatgtaattgtcattaattttattttgaattgttttcaaattttaaaattattgttggctggaaaaattataaggatgattgtaatcatggttatttgtttattctgtatatgttctacatgcctattatgtgccttatatagtactaaggactgagcatatggttgtgaacaaaataagaagttaactgctggatggagcttatagtcttgggaaatatacagaaagattactagtaactgaggtggagggtgggtggggatttgaggaatagtgacgaaagggtgttatagaagtaatttttgacaaagctgaaggctaaaatatgaatgtattgttgaagaacaaaatacattgagattcctgagaaggtaggaatgtgatacaaatggatcagcctttgaaaggaggaatacccttttcctttgtgttaggagaggaggatgagtggatgagcgtgggaagagtggatgtgtatagaggcttttatgtttgtaggcataatgcttggaagttgaggggttggtgatgacatcttctgttaaaaagagtgggaaatggtgtggtcacattttaaggaaattaggtaaaatttgaaatatattggagacaggactggagagttggggatctggagtcagacagatttgagttctagtcctgattcttctactcgttaactctctgaacttgga

SEQ ID NO: 899913 - DNA, 4045 bp, Homo sapiens
gagtggtaaacaccagagaaggcgctttcatggaagggcaccctaggtaaccaagcaagtggcaacaatagtacaggtgagtccttggatcccttctctctccacccccggcagtggtccggacaagtactaacctctcctctctagagccttgactttatactagctccacaaccatcaagccccacgatccgcgaaaggaatggtgctacaggtaaggcgggcggggtcgggatgccgagacctcttgtcaattcttcgctcgcccccaaacgaggatcacggctgcgcggctctcactctaactatcaagacagattctgatactaaacaaggctaaaactttttgttttttccttcttacagaaggcactaccctggacgccgcttgcaaacgcctgaagagaaggcagggtgttcccactttttcagaatgggaccaggccctacggccccaatagcagaagcttctctaacccaggactgctcccctcaattcctcccaatatgctgaccgacagctcgacctcacctgggggcggttccgccaggggatggcttaggaaaacctcaggaagagcagcccagcgagtgacgccactgaaaccacagtcatggtctacctcgttcaggccaccagtttgcaggcgcctgagccgctgctcctcccgcctctcggtccttccccgccgccccggtaccgtcgcagtcttacgcgttgcatgccgggagcgccttacctcctcttctcagggacttcagttcccagcatgcagaagcctcaggcagaactgcactctgggatttgaagtcctcgttccacgccttctcatcatcctgaacaccgagctctgggactccggcggagaatctaaacgtaaagcatcacccacggtcgtgaactgtaggctctcctggcatccgggatcttattctggccttggcggagttggggatggtgtcgcctagcagccgctgccgctttggcttgctcgggaccatttggctggacccagagtccgcgtggaaccgcgatagggatctgtcagggcccgcggccgggtccagcttggtggttgcggtagtgagaggcctccgctggttgccaggcttggtctaggtgggtggatccttgtaagcaggattagcgagtcactccacgctcaggttctttagcctgagggcccgtgtgccacagcatagctaccccgcccttccagcctcgggtccctaatactgccttgcttcggttccagtttccgccgcacaacttcactcattccaaatgttaatttctgcgttttttttcagccccaattctgtttctccaaatcagggatgattgtcggccttccacagaccctcgcgcttgccaggattagggtgttcgcgcgcattgtgggtaggggtgtggaggaagggatccagaaatcttaagtattaacttagattagtgttagcaaggaagccgtcacattttatttagccgggacactctgacagtttgtgccgactgctatttttgatcaaggctattttgcccacttgtctattttgtggcccaattgtctgttttgctaacatcagaaagttataatgaaataatctgcaaaaaatgtaaggtgctagaaaaccaataatactgtgtaccttgaaaatgctaatatacacctgttttgttacagaggtggagcacagtgaaagaattcaagatgccacctaatataaactggaaagaaataatgaaagttgacccagatgacctgccccgtcaagaagaactggcagataatttattgatttccttatccaaggtgcttaattggtcaataataatagatatatacattaacttatgattaatttattaataaaatatgaatttatttttttcagggacaactataattgtcacaatctggaagtgttcttatattttgcttgaaggttataaaatataaaacagttgcttttctgtttacttaggtggaagtaaatgagctaaaaagtgaaaagcaagaaaatgtgatacaccttttcagaattactcagtcactaatgaaggtttgtatgtagtaggttttaactataggtttggctattagtggaactataaaaatctgttcttatataaggtaatctttgtgaaaatacctggtaatatctacatcaccactaaaaaatgcaatatatttaaatgtgaattaagtattttagtgtataaaacattgctagtttctacttaaagtttctaaaagggtgtgtaggggaaatagaatgagtatgttgaaaagtaacataaggaaatatatcttgaggtccaaatgacaaatgcagacaatgactgctatagggatttgttaagaggggaaatgatttaagagatgtcagaagacttcacaaaggatcaatactgaggagtagtgttagataagtggaaggcaatgcagtggtaagatagtaagggaattctagagctgttggttaccataaataaatactgagaacaggaaatatgtttattctttatatttgaggaaacaaggtgcagcaagtttgtagcagactgtagagaaaacaaatcttgggtaagtactttgagataggttgttgagggccttaaaggtgtattttatgctatcagcaattgagaaggcagtaaaggttttcgaaacacaattgataggtacaaaaatacaccttaagaaggcaaaactgagtatattatgtaggacaaactgaaggaaattggagctttgtagacatcacattatagcggagtttaaacctgaaattatggattagaataatagcaattggaacagaaaaaaagtagtggaaagacattacaaagggagatgttgcattactggatataagacttgaggacttgaggtaaaaaggagaatcaaaaatgtttcatgctattaaaaatctagaaattgtagtcttaagtaagaaaattgcctggcatggtggctcacgtctgtaatcccagcactttgggaggccaaggcaggaggattgcttgagcctgggagttcaagactagcctggataatatagtgagtccttgcctgtacgaaaaaatttgccgagcatgatggcacaccaagcatgatggcacgccaagcatgatggcatgcacctgtagtcccagctactcaggagactgagatgggaagattgcttgagcccaggaggcaggaggttgcagtgagctgagattgtgccactgcactccagcctgggtgacaaagtgaggccctatctcaaaagcaaaaaaaacaaaaacaaaaaccaaaaactatttattcagcaaatatttactgaacgtctccatgtgccagccattgctggcactaaggatcataacaaataaaacagaatttttattttcagtgcttacattccagtataaaggcatattgaaataacctttttttaatgtttagatgaaagctcaagaagtggagctggctttggaagaagtagaaaaagctggagaagaacaagcaaaatttggtaagcaccttggaaaaagtttattatggtattaaataatgaattccatttgttcattaaactgtagaaaattaaattatattctataaaatatatatattcagtttatttttaatatataacatttaataataaatatttctagactcctattttatggatctgccatataatactttttgttaccttataatcatgatggactcttttaaaagaattaattttgttattgaaatttatttaaaagtttgttttgtggtaactaatcaattaaaacgtttttctttttttttaaaaaaatagaaaatcaattaaaaactaaagtaatgaaactggaaaatgaactggaggtatgtctttttgtattccctaggatgtaattgtcattaattttattttgaattgttttcaaattttaaaattattgttggctggaaaaattataaggatgattgtaatcatggttatttgtttattctgtatatgttctacatgcctattatgtgccttatatagtact

SEQ ID NO: 899914 - DNA, 4065 bp, Homo sapiens
ttattttacccaaattgggggtttaaaaagaaactcattacttattttcgaaaggaaaatttactgtcaagtacagtaattttttttttaaagcagcgtttaaaaaaaaaaaaagacaaagcactggtccagatagttggaaatgtcatttagatttaagtctacagcttcttaggaaagttaggtagagatgtatcatactccagcatgattgtgagcagacgagcaggatgagcaaaacttgcacgagtaagagtggtaaacaccagagaaggcgctttcatggaagggcaccctaggtaaccaagcaagtggcaacaatagtacaggtgagtccttggatcccttctctctccacccccggcagtggtccggacaagtactaacctctcctctctagagccttgactttatactagctccacaaccatcaagccccacgatccgcgaaaggaatggtgctacaggtaaggcgggcggggtcgggatgccgagacctcttgtcaattcttcgctcgcccccaaacgaggatcacggctgcgcggctctcactctaactatcaagacagattctgatactaaacaaggctaaaactttttgttttttccttcttacagaaggcactaccctggacgccgcttgcaaacgcctgaagagaaggcagggtgttcccactttttcagaatgggaccaggccctacggccccaatagcagaagcttctctaacccaggactgctcccctcaattcctcccaatatgctgaccgacagctcgacctcacctgggggcggttccgccaggggatggcttaggaaaacctcaggaagagcagcccagcgagtgacgccactgaaaccacagtcatggtctacctcgttcaggccaccagtttgcaggcgcctgagccgctgctcctcccgcctctcggtccttccccgccgccccggtaccgtcgcagtcttacgcgttgcatgccgggagcgccttacctcctcttctcagggacttcagttcccagcatgcagaagcctcaggcagaactgcactctgggatttgaagtcctcgttccacgccttctcatcatcctgaacaccgagctctgggactccggcggagaatctaaacgtaaagcatcacccacggtcgtgaactgtaggctctcctggcatccgggatcttattctggccttggcggagttggggatggtgtcgcctagcagccgctgccgctttggcttgctcgggaccatttggctggacccagagtccgcgtggaaccgcgatagggatctgtcagggcccgcggccgggtccagcttggtggttgcggtagtgagaggcctccgctggttgccaggcttggtctaggtgggtggatccttgtaagcaggattagcgagtcactccacgctcaggttctttagcctgagggcccgtgtgccacagcatagctaccccgcccttccagcctcgggtccctaatactgccttgcttcggttccagtttccgccgcacaacttcactcattccaaatgttaatttctgcgttttttttcagccccaattctgtttctccaaatcagggatgattgtcggccttccacagaccctcgcgcttgccaggattagggtgttcgcgcgcattgtgggtaggggtgtggaggaagggatccagaaatcttaagtattaacttagattagtgttagcaaggaagccgtcacattttatttagccgggacactctgacagtttgtgccgactgctatttttgatcaaggctattttgcccacttgtctattttgtggcccaattgtctgttttgctaacatcagaaagttataatgaaataatctgcaaaaaatgtaaggtgctagaaaaccaataatactgtgtaccttgaaaatgctaatatacacctgttttgttacagaggtggagcacagtgaaagaattcaagatgccacctaatataaactggaaagaaataatgaaagttgacccagatgacctgccccgtcaagaagaactggcagataatttattgatttccttatccaaggtgcttaattggtcaataataatagatatatacattaacttatgattaatttattaataaaatatgaatttatttttttcagggacaactataattgtcacaatctggaagtgttcttatattttgcttgaaggttataaaatataaaacagttgcttttctgtttacttaggtggaagtaaatgagctaaaaagtgaaaagcaagaaaatgtgatacaccttttcagaattactcagtcactaatgaaggtttgtatgtagtaggttttaactataggtttggctattagtggaactataaaaatctgttcttatataaggtaatctttgtgaaaatacctggtaatatctacatcaccactaaaaaatgcaatatatttaaatgtgaattaagtattttagtgtataaaacattgctagtttctacttaaagtttctaaaagggtgtgtaggggaaatagaatgagtatgttgaaaagtaacataaggaaatatatcttgaggtccaaatgacaaatgcagacaatgactgctatagggatttgttaagaggggaaatgatttaagagatgtcagaagacttcacaaaggatcaatactgaggagtagtgttagataagtggaaggcaatgcagtggtaagatagtaagggaattctagagctgttggttaccataaataaatactgagaacaggaaatatgtttattctttatatttgaggaaacaaggtgcagcaagtttgtagcagactgtagagaaaacaaatcttgggtaagtactttgagataggttgttgagggccttaaaggtgtattttatgctatcagcaattgagaaggcagtaaaggttttcgaaacacaattgataggtacaaaaatacaccttaagaaggcaaaactgagtatattatgtaggacaaactgaaggaaattggagctttgtagacatcacattatagcggagtttaaacctgaaattatggattagaataatagcaattggaacagaaaaaaagtagtggaaagacattacaaagggagatgttgcattactggatataagacttgaggacttgaggtaaaaaggagaatcaaaaatgtttcatgctattaaaaatctagaaattgtagtcttaagtaagaaaattgcctggcatggtggctcacgtctgtaatcccagcactttgggaggccaaggcaggaggattgcttgagcctgggagttcaagactagcctggataatatagtgagtccttgcctgtacgaaaaaatttgccgagcatgatggcacaccaagcatgatggcacgccaagcatgatggcatgcacctgtagtcccagctactcaggagactgagatgggaagattgcttgagcccaggaggcaggaggttgcagtgagctgagattgtgccactgcactccagcctgggtgacaaagtgaggccctatctcaaaagcaaaaaaaacaaaaacaaaaaccaaaaactatttattcagcaaatatttactgaacgtctccatgtgccagccattgctggcactaaggatcataacaaataaaacagaatttttattttcagtgcttacattccagtataaaggcatattgaaataacctttttttaatgtttagatgaaagctcaagaagtggagctggctttggaagaagtagaaaaagctggagaagaacaagcaaaatttggtaagcaccttggaaaaagtttattatggtattaaataatgaattccatttgttcattaaactgtagaaaattaaattatattctataaaatatatatattcagtttatttttaatatataacatttaataataaatatttctagactcctattttatggatctgccatataatactttttgttaccttataatcatgatggactcttttaaaagaattaattttgttattgaaatttatttaaaagtttgttttgtggtaactaatcaattaaaacgtttttcttt

SEQ ID NO: 899915 - DNA, 4041 bp, Homo sapiens
gatgccatggcaatgtgaagaagttactctatatagtctaaaaaggggaggaacactcagatctaggaatggcctaccctcttcccagaaaactcatgaataacccaccccttgtttagcatataatcaagaaataactataacaatccttagtctaccacctccaatgggggtgtatgcacctccaattctttcttggcgagatccaggagccctctcctggggtccagatcagaacacctttccagaaacaccatcccatgttaaattatgaattaagaacactgaacatgaagaatgtttaattcaaattattgagtaaacacttacaaaattaaaatataacatttaataaaaatagcaagattgaggaacaagcacttcacaaatattggtttcccagaatgtctgaggaggtgtatagaagttaagaatatgtcctccagccagagagatctgtgttcaatcacactatttaagttacttagcttctccaagcctcagtttcttaactcagatggaaaatgaggacaatgtaagcacctatttcactggattgtaaggaagaataaacaagataatgaatagtatttggcatataatctttcagaaaagtagtaaaattgtcattcctataaatctaactaatgtctttaaaattcatctcacaaaatcagtatctttttattttgtactgagctacttattttacccaaattgggggtttaaaaagaaactcattacttattttcgaaaggaaaatttactgtcaagtacagtaattttttttttaaagcagcgtttaaaaaaaaaaaaagacaaagcactggtccagatagttggaaatgtcatttagatttaagtctacagcttcttaggaaagttaggtagagatgtatcatactccagcatgattgtgagcagacgagcaggatgagcaaaacttgcacgagtaagagtggtaaacaccagagaaggcgctttcatggaagggcaccctaggtaaccaagcaagtggcaacaatagtacaggtgagtccttggatcccttctctctccacccccggcagtggtccggacaagtactaacctctcctctctagagccttgactttatactagctccacaaccatcaagccccacgatccgcgaaaggaatggtgctacaggtaaggcgggcggggtcgggatgccgagacctcttgtcaattcttcgctcgcccccaaacgaggatcacggctgcgcggctctcactctaactatcaagacagattctgatactaaacaaggctaaaactttttgttttttccttcttacagaaggcactaccctggacgccgcttgcaaacgcctgaagagaaggcagggtgttcccactttttcagaatgggaccaggccctacggccccaatagcagaagcttctctaacccaggactgctcccctcaattcctcccaatatgctgaccgacagctcgacctcacctgggggcggttccgccaggggatggcttaggaaaacctcaggaagagcagcccagcgagtgacgccactgaaaccacagtcatggtctacctcgttcaggccaccagtttgcaggcgcctgagccgctgctcctcccgcctctcggtccttccccgccgccccggtaccgtcgcagtcttacgcgttgcatgccgggagcgccttacctcctcttctcagggacttcagttcccagcatgcagaagcctcaggcagaactgcactctgggatttgaagtcctcgttccacgccttctcatcatcctgaacaccgagctctgggactccggcggagaatctaaacgtaaagcatcacccacggtcgtgaactgtaggctctcctggcatccgggatcttattctggccttggcggagttggggatggtgtcgcctagcagccgctgccgctttggcttgctcgggaccatttggctggacccagagtccgcgtggaaccgcgatagggatctgtcagggcccgcggccgggtccagcttggtggttgcggtagtgagaggcctccgctggttgccaggcttggtctaggtgggtggatccttgtaagcaggattagcgagtcactccacgctcaggttctttagcctgagggcccgtgtgccacagcatagctaccccgcccttccagcctcgggtccctaatactgccttgcttcggttccagtttccgccgcacaacttcactcattccaaatgttaatttctgcgttttttttcagccccaattctgtttctccaaatcagggatgattgtcggccttccacagaccctcgcgcttgccaggattagggtgttcgcgcgcattgtgggtaggggtgtggaggaagggatccagaaatcttaagtattaacttagattagtgttagcaaggaagccgtcacattttatttagccgggacactctgacagtttgtgccgactgctatttttgatcaaggctattttgcccacttgtctattttgtggcccaattgtctgttttgctaacatcagaaagttataatgaaataatctgcaaaaaatgtaaggtgctagaaaaccaataatactgtgtaccttgaaaatgctaatatacacctgttttgttacagaggtggagcacagtgaaagaattcaagatgccacctaatataaactggaaagaaataatgaaagttgacccagatgacctgccccgtcaagaagaactggcagataatttattgatttccttatccaaggtgcttaattggtcaataataatagatatatacattaacttatgattaatttattaataaaatatgaatttatttttttcagggacaactataattgtcacaatctggaagtgttcttatattttgcttgaaggttataaaatataaaacagttgcttttctgtttacttaggtggaagtaaatgagctaaaaagtgaaaagcaagaaaatgtgatacaccttttcagaattactcagtcactaatgaaggtttgtatgtagtaggttttaactataggtttggctattagtggaactataaaaatctgttcttatataaggtaatctttgtgaaaatacctggtaatatctacatcaccactaaaaaatgcaatatatttaaatgtgaattaagtattttagtgtataaaacattgctagtttctacttaaagtttctaaaagggtgtgtaggggaaatagaatgagtatgttgaaaagtaacataaggaaatatatcttgaggtccaaatgacaaatgcagacaatgactgctatagggatttgttaagaggggaaatgatttaagagatgtcagaagacttcacaaaggatcaatactgaggagtagtgttagataagtggaaggcaatgcagtggtaagatagtaagggaattctagagctgttggttaccataaataaatactgagaacaggaaatatgtttattctttatatttgaggaaacaaggtgcagcaagtttgtagcagactgtagagaaaacaaatcttgggtaagtactttgagataggttgttgagggccttaaaggtgtattttatgctatcagcaattgagaaggcagtaaaggttttcgaaacacaattgataggtacaaaaatacaccttaagaaggcaaaactgagtatattatgtaggacaaactgaaggaaattggagctttgtagacatcacattatagcggagtttaaacctgaaattatggattagaataatagcaattggaacagaaaaaaagtagtggaaagacattacaaagggagatgttgcattactggatataagacttgaggacttgaggtaaaaaggagaatcaaaaatgtttcatgctattaaaaatctagaaattgtagtcttaagtaagaaaattgcctggcatggtggctcacgtctgtaatcccagcactttgggaggccaaggcaggaggattgcttgagcctgggagttcaagactagcctggataatatagtgagtccttgcctgtacga

SEQ ID NO: 899916 - DNA, 4056 bp, Homo sapiens
taaattgtattaaggcaaattgttttgccttaatttcatggacaagaatgagtgtgcagcaagcagatacttgtcttccttcaacatgaggaaactggaaagatcagtagggagtcagtgtgaattaagccattaaccatggcttaatttgccatgaagataaggcaaaacaaaatgtttaggacacacaatggatacaaaatggccatgctttgttttagagatcggagaagtaagctactatgacttttcttggtaagtcagcaaaaaggaactagaagtaacatccaaggaatataaattcattgctacagagaacaaaggtaagcaataataaaaggtgaggccttcttgtgaagtgattttggtcagataaaactgttcacaaaagcctagggcagaaagaaggcaggtccagacaagtgttcttataacaaggccacttacaacattgtcacataagtcccatttcttgatgaaaactgacaggtgcagaaaatctgacgaaaaataatagttttgccaattttcctcaaaaatatacagtgagttattgaactagaacctgagttaaatttcctgactcacacttaggtacagacgacaatgcataaaaacttagttgacttgttcaagccagagctgacttgttcactgctgtatccccagtgcctagcacaggaaacaggataaaaaatactgttagaatgagttaaagaataaaatttaggtaagattttgcttttagttacaattgtcactgagatctaggttacaatcttagcttcatcaattattacttaacttctatgaacttgttctcacttctgaaaaattagaataaaatttaccattagagaccaggcaccttgagtttatgaatgtgagcaagagggtggtggcagaagggtagaaaagagtaatacagacaaacgaaacttgtaagtgaatacataaaaataagttataacgaatgaaaaaaaaaacagaagaaaaggtgttagagaaaacagacttctattatgaaaacaaacacgcagtagtcagcatagtgtatgacataacatgtgctcagtaactattaaatttcattcctaccattgtcagaggtatttgaatcacaacaactccatcttgaataggggctgggtaaaataagggtgagacctactgggctgcattctcaggatgtctgtcagtcattctaagtcacaggatgagataggaggtgggcacaagatactgatcataaagactttgctgataaaacagcatgcagtaaagaagccagccaaatcccaccaaatccaagatggcgagaaaggtgggacgtctgctcgttctcactgctcattatacactaattataatgcattagcatcctaaaagacactcccaccagtgctatgacagtttacagatgccatggcaatgtgaagaagttactctatatagtctaaaaaggggaggaacactcagatctaggaatggcctaccctcttcccagaaaactcatgaataacccaccccttgtttagcatataatcaagaaataactataacaatccttagtctaccacctccaatgggggtgtatgcacctccaattctttcttggcgagatccaggagccctctcctggggtccagatcagaacacctttccagaaacaccatcccatgttaaattatgaattaagaacactgaacatgaagaatgtttaattcaaattattgagtaaacacttacaaaattaaaatataacatttaataaaaatagcaagattgaggaacaagcacttcacaaatattggtttcccagaatgtctgaggaggtgtatagaagttaagaatatgtcctccagccagagagatctgtgttcaatcacactatttaagttacttagcttctccaagcctcagtttcttaactcagatggaaaatgaggacaatgtaagcacctatttcactggattgtaaggaagaataaacaagataatgaatagtatttggcatataatctttcagaaaagtagtaaaattgtcattcctataaatctaactaatgtctttaaaattcatctcacaaaatcagtatctttttattttgtactgagctacttattttacccaaattgggggtttaaaaagaaactcattacttattttcgaaaggaaaatttactgtcaagtacagtaattttttttttaaagcagcgtttaaaaaaaaaaaaagacaaagcactggtccagatagttggaaatgtcatttagatttaagtctacagcttcttaggaaagttaggtagagatgtatcatactccagcatgattgtgagcagacgagcaggatgagcaaaacttgcacgagtaagagtggtaaacaccagagaaggcgctttcatggaagggcaccctaggtaaccaagcaagtggcaacaatagtacaggtgagtccttggatcccttctctctccacccccggcagtggtccggacaagtactaacctctcctctctagagccttgactttatactagctccacaaccatcaagccccacgatccgcgaaaggaatggtgctacaggtaaggcgggcggggtcgggatgccgagacctcttgtcaattcttcgctcgcccccaaacgaggatcacggctgcgcggctctcactctaactatcaagacagattctgatactaaacaaggctaaaactttttgttttttccttcttacagaaggcactaccctggacgccgcttgcaaacgcctgaagagaaggcagggtgttcccactttttcagaatgggaccaggccctacggccccaatagcagaagcttctctaacccaggactgctcccctcaattcctcccaatatgctgaccgacagctcgacctcacctgggggcggttccgccaggggatggcttaggaaaacctcaggaagagcagcccagcgagtgacgccactgaaaccacagtcatggtctacctcgttcaggccaccagtttgcaggcgcctgagccgctgctcctcccgcctctcggtccttccccgccgccccggtaccgtcgcagtcttacgcgttgcatgccgggagcgccttacctcctcttctcagggacttcagttcccagcatgcagaagcctcaggcagaactgcactctgggatttgaagtcctcgttccacgccttctcatcatcctgaacaccgagctctgggactccggcggagaatctaaacgtaaagcatcacccacggtcgtgaactgtaggctctcctggcatccgggatcttattctggccttggcggagttggggatggtgtcgcctagcagccgctgccgctttggcttgctcgggaccatttggctggacccagagtccgcgtggaaccgcgatagggatctgtcagggcccgcggccgggtccagcttggtggttgcggtagtgagaggcctccgctggttgccaggcttggtctaggtgggtggatccttgtaagcaggattagcgagtcactccacgctcaggttctttagcctgagggcccgtgtgccacagcatagctaccccgcccttccagcctcgggtccctaatactgccttgcttcggttccagtttccgccgcacaacttcactcattccaaatgttaatttctgcgttttttttcagccccaattctgtttctccaaatcagggatgattgtcggccttccacagaccctcgcgcttgccaggattagggtgttcgcgcgcattgtgggtaggggtgtggaggaagggatccagaaatcttaagtattaacttagattagtgttagcaaggaagccgtcacattttatttagccgggacactctgacagtttgtgccgactgctatttttgatcaaggctattttgcccacttgtctattttgtggcccaattgtctgttttgctaacatcagaaagttataatgaaataatctgcaaaaaatgtaaggtgctagaaaaccaataatactgtgtaccttgaaaatgctaatatacacctgttttgtt

SEQ ID NO: 899917 - DNA, 46 bp, Homo sapiens
cttaagaatcttaagtttactgttattatgttaaaaaggattaaat

SEQ ID NO: 899918 - DNA, 41 bp, Homo sapiens
cagctactgttggctacatccattccaaggaacaaaagcca

SEQ ID NO: 899919 - DNA, 46 bp, Homo sapiens
ttcttgccaaaaatgtttaaacctgaatgtaacttagggttctgac

SEQ ID NO: 899920 - DNA, 41 bp, Homo sapiens
ctttcactgtgctccacctctgtaacaaaacaggtgtatat

SEQ ID NO: 899921 - DNA, 41 bp, Homo sapiens
aacgaggtagaccatgactgtggtttcagtggcgtcactcg

SEQ ID NO: 899922 - DNA, 28 bp, Homo sapiens
agtgagagccgcgcagccgtgatcctcg

SEQ ID NO: 899923 - DNA, 68 bp, Homo sapiens
cggcatcccgaccccgcccgccttacctgtagcaccattcctttcgcggatcgtggggcttgatggtt

SEQ ID NO: 899924 - DNA, 65 bp, Homo sapiens
attggaacagcctcttttgtggttttgtttttgatgatgtttcagcaatactggataacaaagac

SEQ ID NO: 899925 - DNA, 4046 bp, Homo sapiens
tttttgtttgagacagtcttgctctgttgcccagtctggagtgcagtggcacaatcttagctcactataacctcaaactcctgggctcaagtgatctgcccacctctgcctcccgagtagctaggactacaggtgtgcacaatcacacccagctaattgtttctttttttttttttttctggtagagatggggtctctcaaggctggtctttgactcctggcctcaaatgctcctgctgccttggcctcccaaagtgctgggattgcaggcatgagccactttacccagcctatgtgaaaaatatacttaggcacagagcctaacaccatttatcattatcattattattattttagagacaggtctcactctgttgcccagtctggagtgcaatagggcaatgtaacatcaaactcctgggctcaaatgatcctcccaccacagcctccctaatagctaggactacaaatgtgttccaccacatctgtctaaattttttgtagagacagggtctggctatgctgcccaagctgatctcaaactcttggcctcaagcaatcttcctgcccctgcctcccaaagtgattaaatgagtaagccacagcatcctgcctgagcctaacacaatatagacagcaacacatccaagtttccttttctcattataacaaaattatctgttataaaacatggcaaaaaaagccactgaaggaacttagtatacatcttaggacactgcacaacactgtaacaaaattttactgatataattcgctgtagtgagatcttacttctaaatacagctggatggattagaagtttgtaaggcaaaacaatcaactctaaagtaccttatttttgctattcatttatctaatataacattaagtgaacaccaattgtaaaaaaaaaaaaagcactaaattagaaaatgcatattcactaatttttgtaggaactaatcaaaagttagagcttaagataaagtttactaatagttaatgctttttctaaatcttacacactttcccatttgcactatatatgtacgtaagctacttactataagaaaattcagttaacaaagaaataaaggacggccacgtagccaaaccagggacgcgtcctttcttggctggactgacgcatcagttacatcgcctgcctgtgcatcaccctcagctcactaagccacggcatcagcaactgtcacataatcacagtcctccatagcagattctacggatctatgtagttgttgtgactcacattttcagctatgtgtctctttcctttctcactcttgcctatcttattctcttcctcatttttatctttatcattttgacaacattcttgattaattttaccaaccttaggatcatggttcattttcaaaaagggagttaaaatctgccaacttaccatttgttgacgtaaattgactttatttattgtttggtcttgactctgatttatttaactcaataggatctaaaatgtgttctaatttgtatttttcatcattactgtaataccatagaatatttctaggtacccaattatgtaagtcatctttggcacctagtcttttaccatttttaattctgactgttgccatgatcttttttggttctgaacaaagtgtttcttttgtgaaaaatatcatgcccttgtatttattaataatggtaacaaggatagaaaacatagttgtgtcacacacctgattctgcttaaggtggaagaatgaagaaacatggaaagaaaaaagaaacaaaaataatacactaaatatttaaaaaatccaacaaataattttacattaatgattaatgagtttttataagctaaaaatatagcataaatatttgaatgaaaacagtcttggaacatgttttcctattttatttaactgtatactgctgctacagcaaaatacataatgataactacatatttaaaatttctagaaatcatttatgagctttatgaaaagcttaagaatcttaagtttactgttattatgttaaaaaggattaaataaattattacacatcactacctgttaaaaataaaagttgaatttactgtattactattaatgagaaagatgtaatgcttttggccagattaagaaagaagttgatttcactttcatgcattttaacatggaaaaaagaaaaaaataataaaagatatacacttactgaaggcttagaatatgtatcctttgaaaactgtttttctaaagcatgaagtttttcttggaggtatctattttgtaaatgtaaatcttctacaacagaatctcgaggaagagcttggtgggccctatgaacaacaatcacagactctttactattcacatttcatcttttttctgttgtactatataaaaatacaagataaaaaaagaaaagttcagtgtgtttattaacactatattttaaattcttcaaaccttctaaactttataacaaataaattaggatatcaaaattagtattataaaataatcctctacagagcattcactgaaggcctcctttaaatgatgagtcaaaaagtatattttgatttactgaaatacattaacatttttaaagaacatgcatccatttatatggaattacataagacagttaaactaaaatacttactattttaaaacattatataataactgcataatatccatggtcttctcaagaagctcaaggatctaaaaagactcttaatgatttcagataataatttaacacttcaagtctaaaaacatccacttgacctacaagaccctccatggtttgccacctccacatctatccaaccttattgtccagggtctacctttacttaggtaaatacaaatccactcttacccatacatgaaacatttactcttgcctcttatctctgctagggttctcctctttgatatgcccctcctctttaatatctagatgattcataaaatttagaaattcaaactagagttcagagagaagacaaattcaatcttttctataaagtattccaattacttcagcccgcatgaactcacattattagagaaaaaaaaaatggcctctaaaagtaatagcaggtttcaaaactaaaagttgatccttgtaaaacctgcaaagaagaataaaagtgttttgttttgaacatatgtttagacaaagaaaaacatggaggggaaatatccactgctggaacaagagagtaactataaacagatgtcaagagaaagaaaaattcctcaataatttgtgttttccctatcaaggaaacttctaaaagatttttaagaaatggtaacttagaaggaaaaggaaggaatgtggattagaagctcatgagagtgttcgtttaaataagttcaacttcgtatgttcacatcacattcataatgacacaatagtaaacagacattaacacagactaatgaatggtaatttttgaagataaatagaaaatgtgtatttacaaagggtaaatactgtcatatccaaatgttgcaggtagatattagccctttacaaagatcagtaatatgatcacagatcatttgtaaatgcaaagaagaagaaatagcaaatcacgtaaaaccaactgaagtttaccttggaagaaatgagcgaaacagaagattaaatagttttagctgttgtcagaataaaattaaaaagttttaaatgttaacacatgattttattttgcttttcacgaccatgactgtatcagaagatataacttggaaagagattgtaaagcacacacacacaaaaatctcaaaggctctgctaagaaatgacatggggtgatgcagggcaagggcatctggttccaggtacaatggagtaaatacattcaatcttctctctcctaaatgcatggagcaaccatttgaggactttgcaaaggagtagaaggcagattacaatagaataccaggacttaaagtagcagcaaacaggtgatgaatttaccttttcttttattctgttactgcctgccctgaagacaacattatttg

SEQ ID NO: 899926 - DNA, 4041 bp, Homo sapiens
tttattacccatccagtttttgtatttccttattatctattccattcttcacacatgaaatctgattttcgtgacctctagtctcatgaacctttacctctcaaaaagcaacaataatttcctaagcaccatatttgacaccacatgcactgtggctctccaccactaatcactctcatgtattagcttgaactctgtgccaaacaggagatactcaacacacagaaacaaattaaatagttccttatatcaaaagacttatattccattaaggaagacagatatgtaaacacatataatttgatgtgatataaatatgtactatgtacaaaacctatgtataagatgcagaactagtgtagacaggagtgactttgttccattaaaaaaagtatgcttaagaaaaaaaaggtaatgcctgaacaagttttgaaacaggaatagaaattcactgagcaaaacaactggaagagagaaatggttccctatatatagaaaagagcacgtacaaaagaacatacataagaaagaacactgtggtcagaaaactcagctagttcatctcttgctctagatgacatgaggtaagtaggggacttgacttttacccttcaggtaaccggtagcttttgacagtttttaaggcggggagtcacatgggagtcacagggtaggattcatgtttagaatgatcattcttgtggcagtaaggaggatgtaagactggagatagagacaggaataatggctgccacaataaagataataaaaaataaaactaagacactgccaatagggataggtatgagatattcacaattacaactggggccaggtgcggtggctcacatctgtaatcccagcactttaggaggccgaggcgggtggatcacgagttcaggagatcgacaccatcctggctaacaaggtgaaaccccatctctactaaaaatacaaaaaattagccgggcatgatggtgggtgcctgtggtaccagctactcaggaggctgaggcaggagaacggcctgaacccgggaggtggagcttgcagtgagccaagatggcgccactgcactccagcctgggtgacagagcgagactctgcctcaaaaaaaaaaaaaaaaaaaaaaaaattagctggtgtggtggtgcacacctgtaatcccagctactcagaggctgaggcaggagaactgcttgaatctgggaggcagaggatgcagtaagcgttaagccgagatcgtgccactgcactcagcctgggtgacagaatgaaactccatctcaaaaaaaaaaaaaaaaaatctttaggaaagatgaaaaatactctttgggaaaatgataacgttaaacatcactcattgatacattatccacaagatgtctcttgcctaggactttctaatgctggagaggataggacagaggacatggagaatggaaaaaaataaattatcaccacactaaataggcataattttctataaaaagtaacataatcacctctctttggcaaaagcagcagaaagcaaactgattatgattacttctaaataatattgataaacatgactcataatttagtaggaatcctgaaagctactcagaacaacgttttcatttactgaatgtgtctctatgagccagcaaaagcttttgagctaatagaattagatcttattctactcctgtgaaaggatcttagataagaataatccaaaatccataagcctctatttctgatgaggaagatgaacaaatcaggagcttgttctgtcctcagtaaaaggtatagagttcaagtggctgtaagataactacaaagggtctggtccatattcacagattgtaacttatgatattctactctagtttttttattttttattctacattaaataaatttattctacattaaaattctacatttattctacaataaaaaatgatgagaatttacagagtgcatccatggtccaggaagagcccttaatatttcagctactgttggctacatccattccaaggaacaaaagccagggaccatgggagaatagtttgttctgggtacaggggtaagagaaagggatgggcacttaatgagtgcttccctcctttgattacaatattctacctgtttcatgctcctttttctcttagatgtctggttaaaagaggtttgattcagctaaatcatgcaagtgacctaaggagaatgatctagataatcattcagaagtcattcagccactataaatagataatatattgtgtgtgtgtgtgtgtgttatgtgggaacaaaatatttataactaaactgaatgaataatatggataattatatctctgttaaatttatataaatgcaggcaaactttaattaaaatctgccaaatccccccaaacacaaaaatattgaagaaaaatggctaatttcacaaggttcaagaatcacacaaacttacctccaggtgttccaagttacttgttctttgaacaagcatattatctttttgcaagatgtccctgtacttagcagtcagttcattgtactgtttattagccagttctagttcagacaaagaaacactattatctacaactttttggagagctgcaatcttgaaaatggccatttcctatgtaaataaagatacactgagttatgctggtgtctttttttctggtcaagcactagccacttttgagaaagataatacaacttaaagtaaaacgaattttaaaatcatttttaaaatatatgatttcccatgtaagaaaaacatgcattaacataatttctttcatataagaaatgttactttgaaaatcttaatcataataaaaataaaatactttaataactcctgtcattgtaaaataaaactcaattaatttgagaaaacataacaaacagcaggaatatatcactcggaatttatctttggatggcttttctaaatttcttatgatcggaaaacaacttgccttttaataaatgggaaaattagcattatcacaggtaactttcacagcttagctatttatgcttattgtaagttaaacggactagctttaataacaagaaaactttttgtacacatgatggaaacattagcgggagagcttctattatagttctctgtaataaataacatcaaggactttaagttacttggttcatggttctactcatcaactatagaactattcaaagatattctattatcaacaccaaaatgaaatgtccaaacttacagttctcttaagttgctgtataataggcaaacattacatagaaaagtacaataaagaatgatgaaagctgagaagtggtataaggaataatcaaatttatgaatgaggaagtaaaaaaacttacggttgtaattcattctgaagtacagtaacgatggaaatatttgtaatagcgcttcagatctcattttggcagcctttcttctccatctaagttaagtacacactattctatcttacccttaagattcagtttcactgttctgggggaaacaggggtagatgagattctatttcccatctcttaagaatctccctttttcttggctcttcaattgttgggagaaaaaaatcaagttcatgagcaggtagaagaggaagaaaactaattcttttctctttctatctcaaacactaactgtatttataaaactctaacaaaagtagattctaaaaaaatctaacacaaaaataagacatgaacatttccttattacatgtctgaataaatatcacttatatttattaaagaatttcttgatgctcagtattaagctttagatcaagctgaaaataggtttattagcctgacatcacccattacaacctttaaagtggaaagtaaagaacccaagcccattttaatttcactttgaattctgtgttcctatgatcctgtccaaatttagtcatgaacattgaacatttacatgcttaaaaataaactacaaggtaaggtataaaactaggtgcagaagggtatacatgtcatgtaacctgt

SEQ ID NO: 899927 - DNA, 4046 bp, Homo sapiens
aaagaatttcttgatgctcagtattaagctttagatcaagctgaaaataggtttattagcctgacatcacccattacaacctttaaagtggaaagtaaagaacccaagcccattttaatttcactttgaattctgtgttcctatgatcctgtccaaatttagtcatgaacattgaacatttacatgcttaaaaataaactacaaggtaaggtataaaactaggtgcagaagggtatacatgtcatgtaacctgtcttgtctttgtttatgtttccaaaaaggaaacatgagaaagataataagttacctacagagggtggagcagaataatatgaaaggcgtaagaccagaattaagatttctctgattaaatattttgcatatataaatattgtatatattaaaattcaataaaggaaaaaaatccctaaaataaaaaaaatgaaaaacaaatgagcctaactatatatcaaatgtataacataaccgcatgaagacaattatttcaagtaagtgtagaatactttgcctatacattctcagcaagatatattctgaagaaaataagacctgaaataaaactttaaactatgtttggcagcagtgctgttgttgttactattaatatcaattcaagtattatttttcaaattattgtatgtatattgtaggataaaacaaatattttaatgttaataataaaggttttctatgtaagaaaaaaatacaagtgcaaaatcaaagaagcttagtaaaaatccgatactatttacttaccccataatgttataattaaactggaaataacaatatgaactcatggtttaaatatatacatatttttctaacttgtctactgagagactagtggcaatgatactctgagagcaatgatgcccagtggccagtttttggtatctaaatgccttccccactaaaaggaacctgggctctttaaagaaatggtttattccaagtatgggcatgaagtatgtaggtaagtctaagacatcttatgctagaaaacaagtcaagctttgaggcttcgttcaaaagactaatgaatttttgtcaagacaatataagagtcaactttaaaggactctctttggctaaagttgagacaaaagaatatgactccaactaaaacacatggaatatttaaaaatctgtgagtctaatctgatacttaaaaaagagaaagcggaggggacaaaaaaagcaggtagtgcagagtacaccaagtgtgtattctgaaaactggtaattaaagagaaaagcatttatcttgcctttgtagtaggagctaaacttcaagataaacaaatagcctgggctaatgaggaaacgctatttattttacaaaagcatgtctgttaataaatgtaagtgcataatataactagaaaattatgatgtttgcaacttttaataattgggttaggcaacaatcatcagcagatgctaaaatcattaggactgacaaataatttgttatttgtatggtaccaaaatatcaccagttagctaaattgcttaataatggaggtatatggttatcttttcttcttcttcttcttctttttttcttttaagagagagactcgctctgttatacaggcacataggctggagatcagtggcacatgatcacagctcactgcagcccccaacttcctgggctcaagcgatcctcccacctcaatgtcccaggtagctgggattacaagcatgtgccactacaccaagctaattaaaaacaaacaaacaaaaaaaaaaacattttttgtagagacggagtctcactatattgcctaggctggtctgggctcaggaaattttcctgcctgggccttccaaaatgttggaattataggcatgagccaccatacttggtctgcttgtcttttccttaacagagtaatcaattacaaaacatggaacaaccagatactcttgaagtgatgcaatataaagtatagaacactacttatgaagtattcttgccaaaaatgtttaaacctgaatgtaacttagggttctgacctaacttttagtaatacaagggacacaggaacaagtaaaatgacacacacacaaaagttagatacatcttcaaacattttttggagaaaaagaaaaccaaggggattctatattaaaaagatttatgagatgtaacatccaaatgcttattctttgatcaaaaaatgtaaaaaatgtgactataatcagggtattaggcgatattagaaaattactgtcattttgttaggtataataaagttactatggttagttaaagaaaaaagcctttttcaaaagggtacattaaatatttaggggaggaatgtctgcaattcaaacatcccacaaaaatcagaagaagcaattatgacaaaatgttaataaatgttaactattaattcaggtgatgagcattattgataccatcctatcttctgcatatttgaaatttttcatagtcagaaaaagcaaaataagaatcagatgtaccttaaatctttgcaaacacccaattttttcacaaacttcagcctccattgacaacaattcattcttttgcttctcattttcttttctaagttgtcgctccaattctactaaggttgtatattgccttataagtgatttttcattcacttgcaaaacagtaattttcctactattttctgcaagtatttttttcatttcatccgaatccatctgaagagcattgagcaaattctgcacaaagacacatccatattacttgttgaatctagctatcctactttgtacaatattgcatactaatgttaaaaatgttttacttacattatattcttttacttttatagcatcttgttggacttgatcctcaagttttctcttttcctcttttattgttttagattctgttttccaggtctccttttcactaaaaacaaaacaaaacaaaaagacaatactgtaaacctaataaaatgtttataagaaaagataacttcagattatgcaaatttaaagttttctcaacacaagaggtatcatagctattcagtatctgaaaacacaagaagttaaactttcatttaaaaagggtttagcctagaattaaaaattttttaaataaatgcaaggcaacaaagttatcaaattattttcattcttccctgattcaccactaaatgggttataatataattgaagctgaatcttataaacattttattgaacacagaaaaaaagtaggaaaataataccctatactaattctagaaatcaaattccaacattctgaccccactctcaaatttgggtgttaaatgcttacaaaataatttgaatacaaacacatcttaagtctaattaaaatagtgaccaaagttaataacagtatattatatactttaaaattgctaagagagtaaattttaagtgttcttagtgcaaaaaaaaaaaaaaataagaagaagtatgctgtaatcccagcactttgggaggccaaggtgggcagattgcttgaggctaggaattttgagactagcgtggacaatatggcaaaactccgtctttaccaaaaatacaaaaattagccaggcgtggtggcacatgcctgtaatctcagctacttgggaggctgaggcaagaaaataacttggacccaggaggcagaggttgcagtgagccaagatagcgccactgcactccagcctgggtgacagagcaagactctgtctcaaggaaaaaaaaaaaaaagtatgcgaggtaatacatatgttaagtagcttgatttagccattccacagtatatacatatatagaacaccatgttgtatagcatagtatatacatatatagaacaccatgttgtatagcatagtatatacatatatagaacaccatgttgtataccataaattcttgtgaatttaaaaagtaatttaaaacatatttatatataaattatttttttgaagttgtgtaagacactgttgtctacacatgagcattccacaaacatgtgtaatgttcttggcata

SEQ ID NO: 899928 - DNA, 4041 bp, Homo sapiens
aaagtattatatggcagatccataaaataggagtctagaaatatttattattaaatgttatatattaaaaataaactgaatatatatattttatagaatataatttaattttctacagtttaatgaacaaatggaattcattatttaataccataataaactttttccaaggtgcttaccaaattttgcttgttcttctccagctttttctacttcttccaaagccagctccacttcttgagctttcatctaaacattaaaaaaaggttatttcaatatgcctttatactggaatgtaagcactgaaaataaaaattctgttttatttgttatgatccttagtgccagcaatggctggcacatggagacgttcagtaaatatttgctgaataaatagtttttggtttttgtttttgttttttttgcttttgagatagggcctcactttgtcacccaggctggagtgcagtggcacaatctcagctcactgcaacctcctgcctcctgggctcaagcaatcttcccatctcagtctcctgagtagctgggactacaggtgcatgccatcatgcttggcgtgccatcatgcttggtgtgccatcatgctcggcaaattttttcgtacaggcaaggactcactatattatccaggctagtcttgaactcccaggctcaagcaatcctcctgccttggcctcccaaagtgctgggattacagacgtgagccaccatgccaggcaattttcttacttaagactacaatttctagatttttaatagcatgaaacatttttgattctcctttttacctcaagtcctcaagtcttatatccagtaatgcaacatctccctttgtaatgtctttccactactttttttctgttccaattgctattattctaatccataatttcaggtttaaactccgctataatgtgatgtctacaaagctccaatttccttcagtttgtcctacataatatactcagttttgccttcttaaggtgtatttttgtacctatcaattgtgtttcgaaaacctttactgccttctcaattgctgatagcataaaatacacctttaaggccctcaacaacctatctcaaagtacttacccaagatttgttttctctacagtctgctacaaacttgctgcaccttgtttcctcaaatataaagaataaacatatttcctgttctcagtatttatttatggtaaccaacagctctagaattcccttactatcttaccactgcattgccttccacttatctaacactactcctcagtattgatcctttgtgaagtcttctgacatctcttaaatcatttcccctcttaacaaatccctatagcagtcattgtctgcatttgtcatttggacctcaagatatatttccttatgttacttttcaacatactcattctatttcccctacacacccttttagaaactttaagtagaaactagcaatgttttatacactaaaatacttaattcacatttaaatatattgcattttttagtggtgatgtagatattaccaggtattttcacaaagattaccttatataagaacagatttttatagttccactaatagccaaacctatagttaaaacctactacatacaaaccttcattagtgactgagtaattctgaaaaggtgtatcacattttcttgcttttcactttttagctcatttacttccacctaagtaaacagaaaagcaactgttttatattttataaccttcaagcaaaatataagaacacttccagattgtgacaattatagttgtccctgaaaaaaataaattcatattttattaataaattaatcataagttaatgtatatatctattattattgaccaattaagcaccttggataaggaaatcaataaattatctgccagttcttcttgacggggcaggtcatctgggtcaactttcattatttctttccagtttatattaggtggcatcttgaattctttcactgtgctccacctctgtaacaaaacaggtgtatattagcattttcaaggtacacagtattattggttttctagcaccttacattttttgcagattatttcattataactttctgatgttagcaaaacagacaattgggccacaaaatagacaagtgggcaaaatagccttgatcaaaaatagcagtcggcacaaactgtcagagtgtcccggctaaataaaatgtgacggcttccttgctaacactaatctaagttaatacttaagatttctggatcccttcctccacacccctacccacaatgcgcgcgaacaccctaatcctggcaagcgcgagggtctgtggaaggccgacaatcatccctgatttggagaaacagaattggggctgaaaaaaaacgcagaaattaacatttggaatgagtgaagttgtgcggcggaaactggaaccgaagcaaggcagtattagggacccgaggctggaagggcggggtagctatgctgtggcacacgggccctcaggctaaagaacctgagcgtggagtgactcgctaatcctgcttacaaggatccacccacctagaccaagcctggcaaccagcggaggcctctcactaccgcaaccaccaagctggacccggccgcgggccctgacagatccctatcgcggttccacgcggactctgggtccagccaaatggtcccgagcaagccaaagcggcagcggctgctaggcgacaccatccccaactccgccaaggccagaataagatcccggatgccaggagagcctacagttcacgaccgtgggtgatgctttacgtttagattctccgccggagtcccagagctcggtgttcaggatgatgagaaggcgtggaacgaggacttcaaatcccagagtgcagttctgcctgaggcttctgcatgctgggaactgaagtccctgagaagaggaggtaaggcgctcccggcatgcaacgcgtaagactgcgacggtaccggggcggcggggaaggaccgagaggcgggaggagcagcggctcaggcgcctgcaaactggtggcctgaacgaggtagaccatgactgtggtttcagtggcgtcactcgctgggctgctcttcctgaggttttcctaagccatcccctggcggaaccgcccccaggtgaggtcgagctgtcggtcagcatattgggaggaattgaggggagcagtcctgggttagagaagcttctgctattggggccgtagggcctggtcccattctgaaaaagtgggaacaccctgccttctcttcaggcgtttgcaagcggcgtccagggtagtgccttctgtaagaaggaaaaaacaaaaagttttagccttgtttagtatcagaatctgtcttgatagttagagtgagagccgcgcagccgtgatcctcgtttgggggcgagcgaagaattgacaagaggtctcggcatcccgaccccgcccgccttacctgtagcaccattcctttcgcggatcgtggggcttgatggttgtggagctagtataaagtcaaggctctagagaggagaggttagtacttgtccggaccactgccgggggtggagagagaagggatccaaggactcacctgtactattgttgccacttgcttggttacctagggtgcccttccatgaaagcgccttctctggtgtttaccactcttactcgtgcaagttttgctcatcctgctcgtctgctcacaatcatgctggagtatgatacatctctacctaactttcctaagaagctgtagacttaaatctaaatgacatttccaactatctggaccagtgctttgtctttttttttttttaaacgctgctttaaaaaaaaaattactgtacttgacagtaaattttcctttcgaaaataagtaatgagtttctttttaaacccccaatttgggtaaaataagtagctcagtacaaaataaaaagatactgattttgtgagatgaattttaaagacattagttagatttataggaatgacaatttt

SEQ ID NO: 899929 - DNA, 4041 bp, Homo sapiens
acacctttaaggccctcaacaacctatctcaaagtacttacccaagatttgttttctctacagtctgctacaaacttgctgcaccttgtttcctcaaatataaagaataaacatatttcctgttctcagtatttatttatggtaaccaacagctctagaattcccttactatcttaccactgcattgccttccacttatctaacactactcctcagtattgatcctttgtgaagtcttctgacatctcttaaatcatttcccctcttaacaaatccctatagcagtcattgtctgcatttgtcatttggacctcaagatatatttccttatgttacttttcaacatactcattctatttcccctacacacccttttagaaactttaagtagaaactagcaatgttttatacactaaaatacttaattcacatttaaatatattgcattttttagtggtgatgtagatattaccaggtattttcacaaagattaccttatataagaacagatttttatagttccactaatagccaaacctatagttaaaacctactacatacaaaccttcattagtgactgagtaattctgaaaaggtgtatcacattttcttgcttttcactttttagctcatttacttccacctaagtaaacagaaaagcaactgttttatattttataaccttcaagcaaaatataagaacacttccagattgtgacaattatagttgtccctgaaaaaaataaattcatattttattaataaattaatcataagttaatgtatatatctattattattgaccaattaagcaccttggataaggaaatcaataaattatctgccagttcttcttgacggggcaggtcatctgggtcaactttcattatttctttccagtttatattaggtggcatcttgaattctttcactgtgctccacctctgtaacaaaacaggtgtatattagcattttcaaggtacacagtattattggttttctagcaccttacattttttgcagattatttcattataactttctgatgttagcaaaacagacaattgggccacaaaatagacaagtgggcaaaatagccttgatcaaaaatagcagtcggcacaaactgtcagagtgtcccggctaaataaaatgtgacggcttccttgctaacactaatctaagttaatacttaagatttctggatcccttcctccacacccctacccacaatgcgcgcgaacaccctaatcctggcaagcgcgagggtctgtggaaggccgacaatcatccctgatttggagaaacagaattggggctgaaaaaaaacgcagaaattaacatttggaatgagtgaagttgtgcggcggaaactggaaccgaagcaaggcagtattagggacccgaggctggaagggcggggtagctatgctgtggcacacgggccctcaggctaaagaacctgagcgtggagtgactcgctaatcctgcttacaaggatccacccacctagaccaagcctggcaaccagcggaggcctctcactaccgcaaccaccaagctggacccggccgcgggccctgacagatccctatcgcggttccacgcggactctgggtccagccaaatggtcccgagcaagccaaagcggcagcggctgctaggcgacaccatccccaactccgccaaggccagaataagatcccggatgccaggagagcctacagttcacgaccgtgggtgatgctttacgtttagattctccgccggagtcccagagctcggtgttcaggatgatgagaaggcgtggaacgaggacttcaaatcccagagtgcagttctgcctgaggcttctgcatgctgggaactgaagtccctgagaagaggaggtaaggcgctcccggcatgcaacgcgtaagactgcgacggtaccggggcggcggggaaggaccgagaggcgggaggagcagcggctcaggcgcctgcaaactggtggcctgaacgaggtagaccatgactgtggtttcagtggcgtcactcgctgggctgctcttcctgaggttttcctaagccatcccctggcggaaccgcccccaggtgaggtcgagctgtcggtcagcatattgggaggaattgaggggagcagtcctgggttagagaagcttctgctattggggccgtagggcctggtcccattctgaaaaagtgggaacaccctgccttctcttcaggcgtttgcaagcggcgtccagggtagtgccttctgtaagaaggaaaaaacaaaaagttttagccttgtttagtatcagaatctgtcttgatagttagagtgagagccgcgcagccgtgatcctcgtttgggggcgagcgaagaattgacaagaggtctcggcatcccgaccccgcccgccttacctgtagcaccattcctttcgcggatcgtggggcttgatggttgtggagctagtataaagtcaaggctctagagaggagaggttagtacttgtccggaccactgccgggggtggagagagaagggatccaaggactcacctgtactattgttgccacttgcttggttacctagggtgcccttccatgaaagcgccttctctggtgtttaccactcttactcgtgcaagttttgctcatcctgctcgtctgctcacaatcatgctggagtatgatacatctctacctaactttcctaagaagctgtagacttaaatctaaatgacatttccaactatctggaccagtgctttgtctttttttttttttaaacgctgctttaaaaaaaaaattactgtacttgacagtaaattttcctttcgaaaataagtaatgagtttctttttaaacccccaatttgggtaaaataagtagctcagtacaaaataaaaagatactgattttgtgagatgaattttaaagacattagttagatttataggaatgacaattttactacttttctgaaagattatatgccaaatactattcattatcttgtttattcttccttacaatccagtgaaataggtgcttacattgtcctcattttccatctgagttaagaaactgaggcttggagaagctaagtaacttaaatagtgtgattgaacacagatctctctggctggaggacatattcttaacttctatacacctcctcagacattctgggaaaccaatatttgtgaagtgcttgttcctcaatcttgctatttttattaaatgttatattttaattttgtaagtgtttactcaataatttgaattaaacattcttcatgttcagtgttcttaattcataatttaacatgggatggtgtttctggaaaggtgttctgatctggaccccaggagagggctcctggatctcgccaagaaagaattggaggtgcatacacccccattggaggtggtagactaaggattgttatagttatttcttgattatatgctaaacaaggggtgggttattcatgagttttctgggaagagggtaggccattcctagatctgagtgttcctcccctttttagactatatagagtaacttcttcacattgccatggcatctgtaaactgtcatagcactggtgggagtgtcttttaggatgctaatgcattataattagtgtataatgagcagtgagaacgagcagacgtcccacctttctcgccatcttggatttggtgggatttggctggcttctttactgcatgctgttttatcagcaaagtctttatgatcagtatcttgtgcccacctcctatctcatcctgtgacttagaatgactgacagacatcctgagaatgcagcccagtaggtctcacccttattttacccagcccctattcaagatggagttgttgtgattcaaatacctctgacaatggtaggaatgaaatttaatagttactgagcacatgttatgtcatacactatgctgactactgcgtgtttgttttcataatagaagtctgttttctctaacaccttttcttctgttttttttttcattcgttataac

SEQ ID NO: 899930 - DNA, 4028 bp, Homo sapiens
tatgttacttttcaacatactcattctatttcccctacacacccttttagaaactttaagtagaaactagcaatgttttatacactaaaatacttaattcacatttaaatatattgcattttttagtggtgatgtagatattaccaggtattttcacaaagattaccttatataagaacagatttttatagttccactaatagccaaacctatagttaaaacctactacatacaaaccttcattagtgactgagtaattctgaaaaggtgtatcacattttcttgcttttcactttttagctcatttacttccacctaagtaaacagaaaagcaactgttttatattttataaccttcaagcaaaatataagaacacttccagattgtgacaattatagttgtccctgaaaaaaataaattcatattttattaataaattaatcataagttaatgtatatatctattattattgaccaattaagcaccttggataaggaaatcaataaattatctgccagttcttcttgacggggcaggtcatctgggtcaactttcattatttctttccagtttatattaggtggcatcttgaattctttcactgtgctccacctctgtaacaaaacaggtgtatattagcattttcaaggtacacagtattattggttttctagcaccttacattttttgcagattatttcattataactttctgatgttagcaaaacagacaattgggccacaaaatagacaagtgggcaaaatagccttgatcaaaaatagcagtcggcacaaactgtcagagtgtcccggctaaataaaatgtgacggcttccttgctaacactaatctaagttaatacttaagatttctggatcccttcctccacacccctacccacaatgcgcgcgaacaccctaatcctggcaagcgcgagggtctgtggaaggccgacaatcatccctgatttggagaaacagaattggggctgaaaaaaaacgcagaaattaacatttggaatgagtgaagttgtgcggcggaaactggaaccgaagcaaggcagtattagggacccgaggctggaagggcggggtagctatgctgtggcacacgggccctcaggctaaagaacctgagcgtggagtgactcgctaatcctgcttacaaggatccacccacctagaccaagcctggcaaccagcggaggcctctcactaccgcaaccaccaagctggacccggccgcgggccctgacagatccctatcgcggttccacgcggactctgggtccagccaaatggtcccgagcaagccaaagcggcagcggctgctaggcgacaccatccccaactccgccaaggccagaataagatcccggatgccaggagagcctacagttcacgaccgtgggtgatgctttacgtttagattctccgccggagtcccagagctcggtgttcaggatgatgagaaggcgtggaacgaggacttcaaatcccagagtgcagttctgcctgaggcttctgcatgctgggaactgaagtccctgagaagaggaggtaaggcgctcccggcatgcaacgcgtaagactgcgacggtaccggggcggcggggaaggaccgagaggcgggaggagcagcggctcaggcgcctgcaaactggtggcctgaacgaggtagaccatgactgtggtttcagtggcgtcactcgctgggctgctcttcctgaggttttcctaagccatcccctggcggaaccgcccccaggtgaggtcgagctgtcggtcagcatattgggaggaattgaggggagcagtcctgggttagagaagcttctgctattggggccgtagggcctggtcccattctgaaaaagtgggaacaccctgccttctcttcaggcgtttgcaagcggcgtccagggtagtgccttctgtaagaaggaaaaaacaaaaagttttagccttgtttagtatcagaatctgtcttgatagttagagtgagagccgcgcagccgtgatcctcgtttgggggcgagcgaagaattgacaagaggtctcggcatcccgaccccgcccgccttacctgtagcaccattcctttcgcggatcgtggggcttgatggttgtggagctagtataaagtcaaggctctagagaggagaggttagtacttgtccggaccactgccgggggtggagagagaagggatccaaggactcacctgtactattgttgccacttgcttggttacctagggtgcccttccatgaaagcgccttctctggtgtttaccactcttactcgtgcaagttttgctcatcctgctcgtctgctcacaatcatgctggagtatgatacatctctacctaactttcctaagaagctgtagacttaaatctaaatgacatttccaactatctggaccagtgctttgtctttttttttttttaaacgctgctttaaaaaaaaaattactgtacttgacagtaaattttcctttcgaaaataagtaatgagtttctttttaaacccccaatttgggtaaaataagtagctcagtacaaaataaaaagatactgattttgtgagatgaattttaaagacattagttagatttataggaatgacaattttactacttttctgaaagattatatgccaaatactattcattatcttgtttattcttccttacaatccagtgaaataggtgcttacattgtcctcattttccatctgagttaagaaactgaggcttggagaagctaagtaacttaaatagtgtgattgaacacagatctctctggctggaggacatattcttaacttctatacacctcctcagacattctgggaaaccaatatttgtgaagtgcttgttcctcaatcttgctatttttattaaatgttatattttaattttgtaagtgtttactcaataatttgaattaaacattcttcatgttcagtgttcttaattcataatttaacatgggatggtgtttctggaaaggtgttctgatctggaccccaggagagggctcctggatctcgccaagaaagaattggaggtgcatacacccccattggaggtggtagactaaggattgttatagttatttcttgattatatgctaaacaaggggtgggttattcatgagttttctgggaagagggtaggccattcctagatctgagtgttcctcccctttttagactatatagagtaacttcttcacattgccatggcatctgtaaactgtcatagcactggtgggagtgtcttttaggatgctaatgcattataattagtgtataatgagcagtgagaacgagcagacgtcccacctttctcgccatcttggatttggtgggatttggctggcttctttactgcatgctgttttatcagcaaagtctttatgatcagtatcttgtgcccacctcctatctcatcctgtgacttagaatgactgacagacatcctgagaatgcagcccagtaggtctcacccttattttacccagcccctattcaagatggagttgttgtgattcaaatacctctgacaatggtaggaatgaaatttaatagttactgagcacatgttatgtcatacactatgctgactactgcgtgtttgttttcataatagaagtctgttttctctaacaccttttcttctgttttttttttcattcgttataacttatttttatgtattcacttacaagtttcgtttgtctgtattactcttttctacccttctgccaccaccctcttgctcacattcataaactcaaggtgcctggtctctaatggtaaattttattctaatttttcagaagtgagaacaagttcatagaagttaagtaataattgatgaagctaagattgtaacctagatctcagtgacaattgtaactaaaagcaaaatcttacctaaattttattctttaactcattctaacagtattttttatcctgtttcctgtgctaggcactggggatacagcagtgaaca

SEQ ID NO: 899931 - DNA, 4068 bp, Homo sapiens
agaaactagcaatgttttatacactaaaatacttaattcacatttaaatatattgcattttttagtggtgatgtagatattaccaggtattttcacaaagattaccttatataagaacagatttttatagttccactaatagccaaacctatagttaaaacctactacatacaaaccttcattagtgactgagtaattctgaaaaggtgtatcacattttcttgcttttcactttttagctcatttacttccacctaagtaaacagaaaagcaactgttttatattttataaccttcaagcaaaatataagaacacttccagattgtgacaattatagttgtccctgaaaaaaataaattcatattttattaataaattaatcataagttaatgtatatatctattattattgaccaattaagcaccttggataaggaaatcaataaattatctgccagttcttcttgacggggcaggtcatctgggtcaactttcattatttctttccagtttatattaggtggcatcttgaattctttcactgtgctccacctctgtaacaaaacaggtgtatattagcattttcaaggtacacagtattattggttttctagcaccttacattttttgcagattatttcattataactttctgatgttagcaaaacagacaattgggccacaaaatagacaagtgggcaaaatagccttgatcaaaaatagcagtcggcacaaactgtcagagtgtcccggctaaataaaatgtgacggcttccttgctaacactaatctaagttaatacttaagatttctggatcccttcctccacacccctacccacaatgcgcgcgaacaccctaatcctggcaagcgcgagggtctgtggaaggccgacaatcatccctgatttggagaaacagaattggggctgaaaaaaaacgcagaaattaacatttggaatgagtgaagttgtgcggcggaaactggaaccgaagcaaggcagtattagggacccgaggctggaagggcggggtagctatgctgtggcacacgggccctcaggctaaagaacctgagcgtggagtgactcgctaatcctgcttacaaggatccacccacctagaccaagcctggcaaccagcggaggcctctcactaccgcaaccaccaagctggacccggccgcgggccctgacagatccctatcgcggttccacgcggactctgggtccagccaaatggtcccgagcaagccaaagcggcagcggctgctaggcgacaccatccccaactccgccaaggccagaataagatcccggatgccaggagagcctacagttcacgaccgtgggtgatgctttacgtttagattctccgccggagtcccagagctcggtgttcaggatgatgagaaggcgtggaacgaggacttcaaatcccagagtgcagttctgcctgaggcttctgcatgctgggaactgaagtccctgagaagaggaggtaaggcgctcccggcatgcaacgcgtaagactgcgacggtaccggggcggcggggaaggaccgagaggcgggaggagcagcggctcaggcgcctgcaaactggtggcctgaacgaggtagaccatgactgtggtttcagtggcgtcactcgctgggctgctcttcctgaggttttcctaagccatcccctggcggaaccgcccccaggtgaggtcgagctgtcggtcagcatattgggaggaattgaggggagcagtcctgggttagagaagcttctgctattggggccgtagggcctggtcccattctgaaaaagtgggaacaccctgccttctcttcaggcgtttgcaagcggcgtccagggtagtgccttctgtaagaaggaaaaaacaaaaagttttagccttgtttagtatcagaatctgtcttgatagttagagtgagagccgcgcagccgtgatcctcgtttgggggcgagcgaagaattgacaagaggtctcggcatcccgaccccgcccgccttacctgtagcaccattcctttcgcggatcgtggggcttgatggttgtggagctagtataaagtcaaggctctagagaggagaggttagtacttgtccggaccactgccgggggtggagagagaagggatccaaggactcacctgtactattgttgccacttgcttggttacctagggtgcccttccatgaaagcgccttctctggtgtttaccactcttactcgtgcaagttttgctcatcctgctcgtctgctcacaatcatgctggagtatgatacatctctacctaactttcctaagaagctgtagacttaaatctaaatgacatttccaactatctggaccagtgctttgtctttttttttttttaaacgctgctttaaaaaaaaaattactgtacttgacagtaaattttcctttcgaaaataagtaatgagtttctttttaaacccccaatttgggtaaaataagtagctcagtacaaaataaaaagatactgattttgtgagatgaattttaaagacattagttagatttataggaatgacaattttactacttttctgaaagattatatgccaaatactattcattatcttgtttattcttccttacaatccagtgaaataggtgcttacattgtcctcattttccatctgagttaagaaactgaggcttggagaagctaagtaacttaaatagtgtgattgaacacagatctctctggctggaggacatattcttaacttctatacacctcctcagacattctgggaaaccaatatttgtgaagtgcttgttcctcaatcttgctatttttattaaatgttatattttaattttgtaagtgtttactcaataatttgaattaaacattcttcatgttcagtgttcttaattcataatttaacatgggatggtgtttctggaaaggtgttctgatctggaccccaggagagggctcctggatctcgccaagaaagaattggaggtgcatacacccccattggaggtggtagactaaggattgttatagttatttcttgattatatgctaaacaaggggtgggttattcatgagttttctgggaagagggtaggccattcctagatctgagtgttcctcccctttttagactatatagagtaacttcttcacattgccatggcatctgtaaactgtcatagcactggtgggagtgtcttttaggatgctaatgcattataattagtgtataatgagcagtgagaacgagcagacgtcccacctttctcgccatcttggatttggtgggatttggctggcttctttactgcatgctgttttatcagcaaagtctttatgatcagtatcttgtgcccacctcctatctcatcctgtgacttagaatgactgacagacatcctgagaatgcagcccagtaggtctcacccttattttacccagcccctattcaagatggagttgttgtgattcaaatacctctgacaatggtaggaatgaaatttaatagttactgagcacatgttatgtcatacactatgctgactactgcgtgtttgttttcataatagaagtctgttttctctaacaccttttcttctgttttttttttcattcgttataacttatttttatgtattcacttacaagtttcgtttgtctgtattactcttttctacccttctgccaccaccctcttgctcacattcataaactcaaggtgcctggtctctaatggtaaattttattctaatttttcagaagtgagaacaagttcatagaagttaagtaataattgatgaagctaagattgtaacctagatctcagtgacaattgtaactaaaagcaaaatcttacctaaattttattctttaactcattctaacagtattttttatcctgtttcctgtgctaggcactggggatacagcagtgaacaagtcagctctggcttgaacaagtcaactaagtttttatgcattgtcgtctgtacctaagtgtgagtcaggaaatttaactcaggttctagttcaataactc

SEQ ID NO: 899932 - DNA, 4065 bp, Homo sapiens
cattgaaccttgccctcctgttgtcctgagatcatcatttaagaagcctaagataacctattagaggatgtgttaataagtagcagagactagttttcaaagctgagaaatctaccctttaaaagccatccagccctaatcaagccactggataactataagcacatgagtgaccccaggcacaactaacagaagaaccatatacatacctatatatttgtgtgtgtgtgtgtgtgtgtatatatatatatacatatatatgtatatatatgtaaaataaagatatattgaagaattgaattattttgaatgtattcatttttaagtacttcagatgcctaacttaacaaagaaaactttctcagtacttaaataactgattaaatttaggaaataaaacttgaaactatagcaaatcccaagttcttataaaaattccaatactatttgtgtatttagctaattattatacttttcaactatagttgtgaatccagaaactacatagtcagtagtttaatatgtttattatgtttaatatgtttattatacgtattattgtatattttaaaattatagttatgcagctaatatatcaaagtctccaggatgtcagattctcttaaaggttgcagttactctaaaaaatcagatgcataatttaatattgtttattatgcatattattgtatatttttatatatttttaaattatttaatttattttaaattatttaatttaacaataatttaacagctaatgtatcaagtctccaggatgttagattctcttaaacattgcaagtactctaaaaattagatacataagttgttcccaagtataactttaaagcactgaaaccacaggtttaatttacttttttcttctattaattttaaactttcctgtggttagaacatttaaccaaacaacagtttgtcaccccaagtgaattgatgttaccaagccagtggcctgaggttatttatgggaagagaggtttctgacctgtacacaaaacttgatttttacctacccaaaggtagatatcctgagttgtttcattcggtttttctaaattacaacatgtatatatagctgtcctatattggatcccatttcctgatttctgtatctttgtttcttaatatactgtttcattttactagtgtaccttttctcctagtttcttgaaaaggaacatcagaggtaaattttttgagacctttaatgacttaggtttttattctactttcccacctggaaaacttaggtttattaatatagaattttagtttagaaatcaatatgcctcagaagtttgaagcattactccttttttattttggaagggaattttttgttttgttttgtttctaacagcattttgggtgaaaaaaaaaagatttttgattcctgatccttactctggaaccttttttatttccagaagcttttagaatcctatttgttttcagtgttgtaaagttttacagaattttgtgcccagtagaaaagggatggagggtctcaacctaaaatatatggacagacttttttttacttagcctttattttcaatatgctgccttttccctgttatcagagaccctatgttttaaataatccacagaggaaacctccagtcttctgccttggaataggagaggttacttggctttatcccgtaagagagggggctgacataatgtccccgttatcagggacattatccagtaagagatggggctgagtttcaacaatgtgactagcttatgcttcttagaagtggatggcattttagctgcgcttttctctggagaattaatatgcaattacttacccacctactaaaattgaacttacttggaataaatatgttccttattttatcttcatgattttttttccagtttttgtccagaagtgcttatagaaaagatggctaatattaacctaaaagaaataaccttaatagtaggtgtggttactgcctgctattggaacagcctcttttgtggttttgtttttgatgatgtttcagcaatactggataacaaagacttgcatccatctacacctttaaaaactttatttcaaaatgacttctggggaacccctatgtctgaggtaagtaattacttacatattacttgtacatgtctcagattttgaaatattctggtattttattacttctaattctttatcaacattatcatcacaacagttacagatttttaaccctaaaatgtttatatgaaacgtaacatgtttgtaataaattgaacaggaagctgaggatgagtactttaaagcagtacttggttatttctttgcctgtgtaccttggctgctgcttttttttttttaacttttattttagatacagggctacatatgcagatttgtcacgtgggtatattgcgttatgctgatgtttggggtaccaatctgtcacccagacagcgagtatagtacccaataggtagttttggcttaacttcttaaaaataatatatatttatgtgaaaaccaaatgtatagggagagcaataggtgtaatacatgcctgtttcttgctaattgactttatttctcttttttctgtcttgtgagtaaggcaaaagagatgtgatatatttcaacattttaaaatatggcaacttcaatataaatagataagaatttaagagtaaaaatagtaagtacacatattgccaatttctcttgcagaagaagtggttattacaaattttgaatctttgtcctatctcttacataatagttatttaggttatatatcgagaacccaaaagtttagttcaataatttaatattttattcatccatatggttcatttttatgagggtatttttactgttttgaaggtcactgttaaactgttgggattaaacccttatcagcttgatatcatatagaatggattctaattttagttatgtcatatattaactgtgtgaaataggtgagaatacatctttcagatggaaagtaattttcctgatctgtaaaagaggataattcctttccaaaataaaaaagagagtaatgcttcaaatttctgggggatattgatttctaaactaaaattctatattaataaacctaaatttcccaggtggaaaagtagaataaaaacataagtcatttaaggtctcaagtaataaatgaattattttatctacactacctggcacatagatattgaataaattgttgaaacataacatgtaactctctgcaatgttaacagtatgtttctcggtcattgtggcctctttccccattccccaaatttggaagcctctcaaggttagggatggaatctttcattcctctgatcacaagcacatataattattttgtcttatttagtaagaagactttattcgcctttttgttctcacccaattctagcttttgaaaaaaaatcttttgatagtaagggggaaaatatggccctattatacattattctacacagcttgtcctcctctatacctacctttgatctccagagaccctcagaactatgtgtccattccctcaatttatgctagtatctgttatgattttaatcataatgttgaggttttgaactgatggtttagctggccatattaaatggtctcattttctagattaggctattcttgtattgctacgaagaaatacctgagacagggtaatatataagaaaagaggttttattggctcacagttctgtcagctgtacaagaagcatagcagcatctgcttctggggaggcctcaagaagcttgcagtcatggcagaaggggaagcaggagcaggcacttcacatagcaaaagcaggagcaagaggagtacggtgggaggtgctacacagttttgaacagccagctctctcaagaactcattgtagcaaatacagtaccaagtggggtggtgctaaaccattcataggaaatccaccctaataatccaatcatttcccaccaggccccacttccaatattggggattacattttgatataagatttgggcagggacacaca

SEQ ID NO: 899933 - DNA, 15 bp, Homo sapiens
acagttttattgaag

SEQ ID NO: 899934 - DNA, 15 bp, Homo sapiens
tacagttttattgaa

SEQ ID NO: 899935 - DNA, 15 bp, Homo sapiens
ttacagttttattga

SEQ ID NO: 899936 - DNA, 15 bp, Homo sapiens
tttacagttttattg

SEQ ID NO: 899937 - DNA, 15 bp, Homo sapiens
atttacagttttatt

SEQ ID NO: 899938 - DNA, 15 bp, Homo sapiens
aatttacagttttat

SEQ ID NO: 899939 - DNA, 15 bp, Homo sapiens
caatttacagtttta

SEQ ID NO: 899940 - DNA, 15 bp, Homo sapiens
acaatttacagtttt

SEQ ID NO: 899941 - DNA, 15 bp, Homo sapiens
tacaatttacagttt

SEQ ID NO: 899942 - DNA, 15 bp, Homo sapiens
atacaatttacagtt

SEQ ID NO: 899943 - DNA, 15 bp, Homo sapiens
aatacaatttacagt

SEQ ID NO: 899944 - DNA, 15 bp, Homo sapiens
taatacaatttacag

SEQ ID NO: 899945 - DNA, 15 bp, Homo sapiens
ttaatacaatttaca

SEQ ID NO: 899946 - DNA, 15 bp, Homo sapiens
cttaatacaatttac

SEQ ID NO: 899947 - DNA, 15 bp, Homo sapiens
ccttaatacaattta

SEQ ID NO: 899948 - DNA, 15 bp, Homo sapiens
gccttaatacaattt

SEQ ID NO: 899949 - DNA, 15 bp, Homo sapiens
tgccttaatacaatt

SEQ ID NO: 899950 - DNA, 15 bp, Homo sapiens
ttgccttaatacaat

SEQ ID NO: 899951 - DNA, 15 bp, Homo sapiens
tttgccttaatacaa

SEQ ID NO: 899952 - DNA, 15 bp, Homo sapiens
atttgccttaataca

SEQ ID NO: 899953 - DNA, 15 bp, Homo sapiens
aatttgccttaatac

SEQ ID NO: 899954 - DNA, 15 bp, Homo sapiens
caatttgccttaata

SEQ ID NO: 899955 - DNA, 15 bp, Homo sapiens
acaatttgccttaat

SEQ ID NO: 899956 - DNA, 15 bp, Homo sapiens
aacaatttgccttaa

SEQ ID NO: 899957 - DNA, 15 bp, Homo sapiens
aaacaatttgcctta

SEQ ID NO: 899958 - DNA, 15 bp, Homo sapiens
aaaacaatttgcctt

SEQ ID NO: 899959 - DNA, 15 bp, Homo sapiens
caaaacaatttgcct

SEQ ID NO: 899960 - DNA, 15 bp, Homo sapiens
gcaaaacaatttgcc

SEQ ID NO: 899961 - DNA, 15 bp, Homo sapiens
ggcaaaacaatttgc

SEQ ID NO: 899962 - DNA, 15 bp, Homo sapiens
aggcaaaacaatttg

SEQ ID NO: 899963 - DNA, 15 bp, Homo sapiens
aaggcaaaacaattt

SEQ ID NO: 899964 - DNA, 15 bp, Homo sapiens
taaggcaaaacaatt

SEQ ID NO: 899965 - DNA, 15 bp, Homo sapiens
ttaaggcaaaacaat

SEQ ID NO: 899966 - DNA, 15 bp, Homo sapiens
attaaggcaaaacaa

SEQ ID NO: 899967 - DNA, 15 bp, Homo sapiens
aattaaggcaaaaca

SEQ ID NO: 899968 - DNA, 15 bp, Homo sapiens
aaattaaggcaaaac

SEQ ID NO: 899969 - DNA, 15 bp, Homo sapiens
gaaattaaggcaaaa

SEQ ID NO: 899970 - DNA, 15 bp, Homo sapiens
tgaaattaaggcaaa

SEQ ID NO: 899971 - DNA, 15 bp, Homo sapiens
atgaaattaaggcaa

SEQ ID NO: 899972 - DNA, 15 bp, Homo sapiens
catgaaattaaggca

SEQ ID NO: 899973 - DNA, 15 bp, Homo sapiens
ccatgaaattaaggc

SEQ ID NO: 899974 - DNA, 15 bp, Homo sapiens
tccatgaaattaagg

SEQ ID NO: 899975 - DNA, 15 bp, Homo sapiens
gtccatgaaattaag

SEQ ID NO: 899976 - DNA, 15 bp, Homo sapiens
tgtccatgaaattaa

SEQ ID NO: 899977 - DNA, 15 bp, Homo sapiens
ttgtccatgaaatta

SEQ ID NO: 899978 - DNA, 15 bp, Homo sapiens
cttgtccatgaaatt

SEQ ID NO: 899979 - DNA, 15 bp, Homo sapiens
tcttgtccatgaaat

SEQ ID NO: 899980 - DNA, 15 bp, Homo sapiens
ttcttgtccatgaaa

SEQ ID NO: 899981 - DNA, 15 bp, Homo sapiens
attcttgtccatgaa

SEQ ID NO: 899982 - DNA, 15 bp, Homo sapiens
cattcttgtccatga

SEQ ID NO: 899983 - DNA, 15 bp, Homo sapiens
tcattcttgtccatg

SEQ ID NO: 899984 - DNA, 15 bp, Homo sapiens
ctcattcttgtccat

SEQ ID NO: 899985 - DNA, 15 bp, Homo sapiens
actcattcttgtcca

SEQ ID NO: 899986 - DNA, 15 bp, Homo sapiens
cactcattcttgtcc

SEQ ID NO: 899987 - DNA, 15 bp, Homo sapiens
acactcattcttgtc

SEQ ID NO: 899988 - DNA, 15 bp, Homo sapiens
cacactcattcttgt

SEQ ID NO: 899989 - DNA, 15 bp, Homo sapiens
gcacactcattcttg

SEQ ID NO: 899990 - DNA, 15 bp, Homo sapiens
tgcacactcattctt

SEQ ID NO: 899991 - DNA, 15 bp, Homo sapiens
ctgcacactcattct

SEQ ID NO: 899992 - DNA, 15 bp, Homo sapiens
gctgcacactcattc

SEQ ID NO: 899993 - DNA, 15 bp, Homo sapiens
tgctgcacactcatt

SEQ ID NO: 899994 - DNA, 15 bp, Homo sapiens
ttgctgcacactcat

SEQ ID NO: 899995 - DNA, 15 bp, Homo sapiens
cttgctgcacactca

SEQ ID NO: 899996 - DNA, 15 bp, Homo sapiens
gcttgctgcacactc

SEQ ID NO: 899997 - DNA, 15 bp, Homo sapiens
tgcttgctgcacact

SEQ ID NO: 899998 - DNA, 15 bp, Homo sapiens
ctgcttgctgcacac

SEQ ID NO: 899999 - DNA, 15 bp, Homo sapiens
tctgcttgctgcaca

SEQ ID NO: 900000 - DNA, 15 bp, Homo sapiens
atctgcttgctgcac

SEQ ID NO: 900001 - DNA, 15 bp, Homo sapiens
tatctgcttgctgca

SEQ ID NO: 900002 - DNA, 15 bp, Homo sapiens
gtatctgcttgctgc

SEQ ID NO: 900003 - DNA, 15 bp, Homo sapiens
agtatctgcttgctg

SEQ ID NO: 900004 - DNA, 15 bp, Homo sapiens
aagtatctgcttgct

SEQ ID NO: 900005 - DNA, 15 bp, Homo sapiens
caagtatctgcttgc

SEQ ID NO: 900006 - DNA, 15 bp, Homo sapiens
acaagtatctgcttg

SEQ ID NO: 900007 - DNA, 15 bp, Homo sapiens
gacaagtatctgctt

SEQ ID NO: 900008 - DNA, 15 bp, Homo sapiens
agacaagtatctgct

SEQ ID NO: 900009 - DNA, 15 bp, Homo sapiens
aagacaagtatctgc

SEQ ID NO: 900010 - DNA, 15 bp, Homo sapiens
gaagacaagtatctg

SEQ ID NO: 900011 - DNA, 15 bp, Homo sapiens
ggaagacaagtatct

SEQ ID NO: 900012 - DNA, 15 bp, Homo sapiens
aggaagacaagtatc

SEQ ID NO: 900013 - DNA, 15 bp, Homo sapiens
aaggaagacaagtat

SEQ ID NO: 900014 - DNA, 15 bp, Homo sapiens
gaaggaagacaagta

SEQ ID NO: 900015 - DNA, 15 bp, Homo sapiens
tgaaggaagacaagt

SEQ ID NO: 900016 - DNA, 15 bp, Homo sapiens
ttgaaggaagacaag

SEQ ID NO: 900017 - DNA, 15 bp, Homo sapiens
gttgaaggaagacaa

SEQ ID NO: 900018 - DNA, 15 bp, Homo sapiens
tgttgaaggaagaca

SEQ ID NO: 900019 - DNA, 15 bp, Homo sapiens
atgttgaaggaagac

SEQ ID NO: 900020 - DNA, 15 bp, Homo sapiens
catgttgaaggaaga

SEQ ID NO: 900021 - DNA, 15 bp, Homo sapiens
tcatgttgaaggaag

SEQ ID NO: 900022 - DNA, 15 bp, Homo sapiens
ctcatgttgaaggaa

SEQ ID NO: 900023 - DNA, 15 bp, Homo sapiens
cctcatgttgaagga

SEQ ID NO: 900024 - DNA, 15 bp, Homo sapiens
tcctcatgttgaagg

SEQ ID NO: 900025 - DNA, 15 bp, Homo sapiens
ttcctcatgttgaag

SEQ ID NO: 900026 - DNA, 15 bp, Homo sapiens
tttcctcatgttgaa

SEQ ID NO: 900027 - DNA, 15 bp, Homo sapiens
gtttcctcatgttga

SEQ ID NO: 900028 - DNA, 15 bp, Homo sapiens
agtttcctcatgttg

SEQ ID NO: 900029 - DNA, 15 bp, Homo sapiens
cagtttcctcatgtt

SEQ ID NO: 900030 - DNA, 15 bp, Homo sapiens
ccagtttcctcatgt

SEQ ID NO: 900031 - DNA, 15 bp, Homo sapiens
tccagtttcctcatg

SEQ ID NO: 900032 - DNA, 15 bp, Homo sapiens
ttccagtttcctcat

SEQ ID NO: 900033 - DNA, 15 bp, Homo sapiens
tttccagtttcctca

SEQ ID NO: 900034 - DNA, 15 bp, Homo sapiens
ctttccagtttcctc

SEQ ID NO: 900035 - DNA, 15 bp, Homo sapiens
tctttccagtttcct

SEQ ID NO: 900036 - DNA, 15 bp, Homo sapiens
atctttccagtttcc

SEQ ID NO: 900037 - DNA, 15 bp, Homo sapiens
gatctttccagtttc

SEQ ID NO: 900038 - DNA, 15 bp, Homo sapiens
tgatctttccagttt

SEQ ID NO: 900039 - DNA, 15 bp, Homo sapiens
ctgatctttccagtt

SEQ ID NO: 900040 - DNA, 15 bp, Homo sapiens
actgatctttccagt

SEQ ID NO: 900041 - DNA, 15 bp, Homo sapiens
tactgatctttccag

SEQ ID NO: 900042 - DNA, 15 bp, Homo sapiens
ctactgatctttcca

SEQ ID NO: 900043 - DNA, 15 bp, Homo sapiens
cctactgatctttcc

SEQ ID NO: 900044 - DNA, 15 bp, Homo sapiens
ccctactgatctttc

SEQ ID NO: 900045 - DNA, 15 bp, Homo sapiens
tccctactgatcttt

SEQ ID NO: 900046 - DNA, 15 bp, Homo sapiens
ctccctactgatctt

SEQ ID NO: 900047 - DNA, 15 bp, Homo sapiens
actccctactgatct

SEQ ID NO: 900048 - DNA, 15 bp, Homo sapiens
gactccctactgatc

SEQ ID NO: 900049 - DNA, 15 bp, Homo sapiens
tgactccctactgat

SEQ ID NO: 900050 - DNA, 15 bp, Homo sapiens
ctgactccctactga

SEQ ID NO: 900051 - DNA, 15 bp, Homo sapiens
actgactccctactg

SEQ ID NO: 900052 - DNA, 15 bp, Homo sapiens
cactgactccctact

SEQ ID NO: 900053 - DNA, 15 bp, Homo sapiens
acactgactccctac

SEQ ID NO: 900054 - DNA, 15 bp, Homo sapiens
cacactgactcccta

SEQ ID NO: 900055 - DNA, 15 bp, Homo sapiens
tcacactgactccct

SEQ ID NO: 900056 - DNA, 15 bp, Homo sapiens
ttcacactgactccc

SEQ ID NO: 900057 - DNA, 15 bp, Homo sapiens
attcacactgactcc

SEQ ID NO: 900058 - DNA, 15 bp, Homo sapiens
aattcacactgactc

SEQ ID NO: 900059 - DNA, 15 bp, Homo sapiens
taattcacactgact

SEQ ID NO: 900060 - DNA, 15 bp, Homo sapiens
ttaattcacactgac

SEQ ID NO: 900061 - DNA, 15 bp, Homo sapiens
cttaattcacactga

SEQ ID NO: 900062 - DNA, 15 bp, Homo sapiens
gcttaattcacactg

SEQ ID NO: 900063 - DNA, 15 bp, Homo sapiens
ggcttaattcacact

SEQ ID NO: 900064 - DNA, 15 bp, Homo sapiens
tggcttaattcacac

SEQ ID NO: 900065 - DNA, 15 bp, Homo sapiens
atggcttaattcaca

SEQ ID NO: 900066 - DNA, 15 bp, Homo sapiens
aatggcttaattcac

SEQ ID NO: 900067 - DNA, 15 bp, Homo sapiens
taatggcttaattca

SEQ ID NO: 900068 - DNA, 15 bp, Homo sapiens
ttaatggcttaattc

SEQ ID NO: 900069 - DNA, 15 bp, Homo sapiens
gttaatggcttaatt

SEQ ID NO: 900070 - DNA, 15 bp, Homo sapiens
ggttaatggcttaat

SEQ ID NO: 900071 - DNA, 15 bp, Homo sapiens
tggttaatggcttaa

SEQ ID NO: 900072 - DNA, 15 bp, Homo sapiens
atggttaatggctta

SEQ ID NO: 900073 - DNA, 15 bp, Homo sapiens
catggttaatggctt

SEQ ID NO: 900074 - DNA, 15 bp, Homo sapiens
ccatggttaatggct

SEQ ID NO: 900075 - DNA, 15 bp, Homo sapiens
gccatggttaatggc

SEQ ID NO: 900076 - DNA, 15 bp, Homo sapiens
agccatggttaatgg

SEQ ID NO: 900077 - DNA, 15 bp, Homo sapiens
aagccatggttaatg

SEQ ID NO: 900078 - DNA, 15 bp, Homo sapiens
taagccatggttaat

SEQ ID NO: 900079 - DNA, 15 bp, Homo sapiens
ttaagccatggttaa

SEQ ID NO: 900080 - DNA, 15 bp, Homo sapiens
attaagccatggtta

SEQ ID NO: 900081 - DNA, 15 bp, Homo sapiens
aattaagccatggtt

SEQ ID NO: 900082 - DNA, 15 bp, Homo sapiens
aaattaagccatggt

SEQ ID NO: 900083 - DNA, 15 bp, Homo sapiens
caaattaagccatgg

SEQ ID NO: 900084 - DNA, 15 bp, Homo sapiens
gcaaattaagccatg

SEQ ID NO: 900085 - DNA, 15 bp, Homo sapiens
ggcaaattaagccat

SEQ ID NO: 900086 - DNA, 15 bp, Homo sapiens
tggcaaattaagcca

SEQ ID NO: 900087 - DNA, 15 bp, Homo sapiens
atggcaaattaagcc

SEQ ID NO: 900088 - DNA, 15 bp, Homo sapiens
catggcaaattaagc

SEQ ID NO: 900089 - DNA, 15 bp, Homo sapiens
tcatggcaaattaag

SEQ ID NO: 900090 - DNA, 15 bp, Homo sapiens
ttcatggcaaattaa

SEQ ID NO: 900091 - DNA, 15 bp, Homo sapiens
cttcatggcaaatta

SEQ ID NO: 900092 - DNA, 15 bp, Homo sapiens
tcttcatggcaaatt

SEQ ID NO: 900093 - DNA, 15 bp, Homo sapiens
atcttcatggcaaat

SEQ ID NO: 900094 - DNA, 15 bp, Homo sapiens
tatcttcatggcaaa

SEQ ID NO: 900095 - DNA, 15 bp, Homo sapiens
ttatcttcatggcaa

SEQ ID NO: 900096 - DNA, 15 bp, Homo sapiens
cttatcttcatggca

SEQ ID NO: 900097 - DNA, 15 bp, Homo sapiens
ccttatcttcatggc

SEQ ID NO: 900098 - DNA, 15 bp, Homo sapiens
gccttatcttcatgg

SEQ ID NO: 900099 - DNA, 15 bp, Homo sapiens
tgccttatcttcatg

SEQ ID NO: 900100 - DNA, 15 bp, Homo sapiens
ttgccttatcttcat

SEQ ID NO: 900101 - DNA, 15 bp, Homo sapiens
tttgccttatcttca

SEQ ID NO: 900102 - DNA, 15 bp, Homo sapiens
ttttgccttatcttc

SEQ ID NO: 900103 - DNA, 15 bp, Homo sapiens
gttttgccttatctt

SEQ ID NO: 900104 - DNA, 15 bp, Homo sapiens
tgttttgccttatct

SEQ ID NO: 900105 - DNA, 15 bp, Homo sapiens
ttgttttgccttatc

SEQ ID NO: 900106 - DNA, 15 bp, Homo sapiens
tttgttttgccttat

SEQ ID NO: 900107 - DNA, 15 bp, Homo sapiens
ttttgttttgcctta

SEQ ID NO: 900108 - DNA, 15 bp, Homo sapiens
attttgttttgcctt

SEQ ID NO: 900109 - DNA, 15 bp, Homo sapiens
cattttgttttgcct

SEQ ID NO: 900110 - DNA, 15 bp, Homo sapiens
acattttgttttgcc

SEQ ID NO: 900111 - DNA, 15 bp, Homo sapiens
aacattttgttttgc

SEQ ID NO: 900112 - DNA, 15 bp, Homo sapiens
aaacattttgttttg

SEQ ID NO: 900113 - DNA, 15 bp, Homo sapiens
taaacattttgtttt

SEQ ID NO: 900114 - DNA, 15 bp, Homo sapiens
ctaaacattttgttt

SEQ ID NO: 900115 - DNA, 15 bp, Homo sapiens
cctaaacattttgtt

SEQ ID NO: 900116 - DNA, 15 bp, Homo sapiens
tcctaaacattttgt

SEQ ID NO: 900117 - DNA, 15 bp, Homo sapiens
gtcctaaacattttg

SEQ ID NO: 900118 - DNA, 15 bp, Homo sapiens
tgtcctaaacatttt

SEQ ID NO: 900119 - DNA, 15 bp, Homo sapiens
gtgtcctaaacattt

SEQ ID NO: 900120 - DNA, 15 bp, Homo sapiens
tgtgtcctaaacatt

SEQ ID NO: 900121 - DNA, 15 bp, Homo sapiens
gtgtgtcctaaacat

SEQ ID NO: 900122 - DNA, 15 bp, Homo sapiens
tgtgtgtcctaaaca

SEQ ID NO: 900123 - DNA, 15 bp, Homo sapiens
ttgtgtgtcctaaac

SEQ ID NO: 900124 - DNA, 15 bp, Homo sapiens
attgtgtgtcctaaa

SEQ ID NO: 900125 - DNA, 15 bp, Homo sapiens
cattgtgtgtcctaa

SEQ ID NO: 900126 - DNA, 15 bp, Homo sapiens
ccattgtgtgtccta

SEQ ID NO: 900127 - DNA, 15 bp, Homo sapiens
tccattgtgtgtcct

SEQ ID NO: 900128 - DNA, 15 bp, Homo sapiens
atccattgtgtgtcc

SEQ ID NO: 900129 - DNA, 15 bp, Homo sapiens
tatccattgtgtgtc

SEQ ID NO: 900130 - DNA, 15 bp, Homo sapiens
gtatccattgtgtgt

SEQ ID NO: 900131 - DNA, 15 bp, Homo sapiens
tgtatccattgtgtg

SEQ ID NO: 900132 - DNA, 15 bp, Homo sapiens
ttgtatccattgtgt

SEQ ID NO: 900133 - DNA, 15 bp, Homo sapiens
tttgtatccattgtg

SEQ ID NO: 900134 - DNA, 15 bp, Homo sapiens
ttttgtatccattgt

SEQ ID NO: 900135 - DNA, 15 bp, Homo sapiens
attttgtatccattg

SEQ ID NO: 900136 - DNA, 15 bp, Homo sapiens
cattttgtatccatt

SEQ ID NO: 900137 - DNA, 15 bp, Homo sapiens
ccattttgtatccat

SEQ ID NO: 900138 - DNA, 15 bp, Homo sapiens
gccattttgtatcca

SEQ ID NO: 900139 - DNA, 15 bp, Homo sapiens
ggccattttgtatcc

SEQ ID NO: 900140 - DNA, 15 bp, Homo sapiens
tggccattttgtatc

SEQ ID NO: 900141 - DNA, 15 bp, Homo sapiens
atggccattttgtat

SEQ ID NO: 900142 - DNA, 15 bp, Homo sapiens
catggccattttgta

SEQ ID NO: 900143 - DNA, 15 bp, Homo sapiens
gcatggccattttgt

SEQ ID NO: 900144 - DNA, 15 bp, Homo sapiens
agcatggccattttg

SEQ ID NO: 900145 - DNA, 15 bp, Homo sapiens
aagcatggccatttt

SEQ ID NO: 900146 - DNA, 15 bp, Homo sapiens
aaagcatggccattt

SEQ ID NO: 900147 - DNA, 15 bp, Homo sapiens
caaagcatggccatt

SEQ ID NO: 900148 - DNA, 15 bp, Homo sapiens
acaaagcatggccat

SEQ ID NO: 900149 - DNA, 15 bp, Homo sapiens
aacaaagcatggcca

SEQ ID NO: 900150 - DNA, 15 bp, Homo sapiens
aaacaaagcatggcc

SEQ ID NO: 900151 - DNA, 15 bp, Homo sapiens
aaaacaaagcatggc

SEQ ID NO: 900152 - DNA, 15 bp, Homo sapiens
taaaacaaagcatgg

SEQ ID NO: 900153 - DNA, 15 bp, Homo sapiens
ctaaaacaaagcatg

SEQ ID NO: 900154 - DNA, 15 bp, Homo sapiens
tctaaaacaaagcat

SEQ ID NO: 900155 - DNA, 15 bp, Homo sapiens
ctctaaaacaaagca

SEQ ID NO: 900156 - DNA, 15 bp, Homo sapiens
tctctaaaacaaagc

SEQ ID NO: 900157 - DNA, 15 bp, Homo sapiens
atctctaaaacaaag

SEQ ID NO: 900158 - DNA, 15 bp, Homo sapiens
gatctctaaaacaaa

SEQ ID NO: 900159 - DNA, 15 bp, Homo sapiens
cgatctctaaaacaa

SEQ ID NO: 900160 - DNA, 15 bp, Homo sapiens
ccgatctctaaaaca

SEQ ID NO: 900161 - DNA, 15 bp, Homo sapiens
tccgatctctaaaac

SEQ ID NO: 900162 - DNA, 15 bp, Homo sapiens
ctccgatctctaaaa

SEQ ID NO: 900163 - DNA, 15 bp, Homo sapiens
tctccgatctctaaa

SEQ ID NO: 900164 - DNA, 15 bp, Homo sapiens
ttctccgatctctaa

SEQ ID NO: 900165 - DNA, 15 bp, Homo sapiens
cttctccgatctcta

SEQ ID NO: 900166 - DNA, 15 bp, Homo sapiens
acttctccgatctct

SEQ ID NO: 900167 - DNA, 15 bp, Homo sapiens
tacttctccgatctc

SEQ ID NO: 900168 - DNA, 15 bp, Homo sapiens
ttacttctccgatct

SEQ ID NO: 900169 - DNA, 15 bp, Homo sapiens
cttacttctccgatc

SEQ ID NO: 900170 - DNA, 15 bp, Homo sapiens
gcttacttctccgat

SEQ ID NO: 900171 - DNA, 15 bp, Homo sapiens
agcttacttctccga

SEQ ID NO: 900172 - DNA, 15 bp, Homo sapiens
tagcttacttctccg

SEQ ID NO: 900173 - DNA, 15 bp, Homo sapiens
gtagcttacttctcc

SEQ ID NO: 900174 - DNA, 15 bp, Homo sapiens
agtagcttacttctc

SEQ ID NO: 900175 - DNA, 15 bp, Homo sapiens
tagtagcttacttct

SEQ ID NO: 900176 - DNA, 15 bp, Homo sapiens
atagtagcttacttc

SEQ ID NO: 900177 - DNA, 15 bp, Homo sapiens
catagtagcttactt

SEQ ID NO: 900178 - DNA, 15 bp, Homo sapiens
tcatagtagcttact

SEQ ID NO: 900179 - DNA, 15 bp, Homo sapiens
gtcatagtagcttac

SEQ ID NO: 900180 - DNA, 15 bp, Homo sapiens
agtcatagtagctta

SEQ ID NO: 900181 - DNA, 15 bp, Homo sapiens
aagtcatagtagctt

SEQ ID NO: 900182 - DNA, 15 bp, Homo sapiens
aaagtcatagtagct

SEQ ID NO: 900183 - DNA, 15 bp, Homo sapiens
aaaagtcatagtagc

SEQ ID NO: 900184 - DNA, 15 bp, Homo sapiens
gaaaagtcatagtag

SEQ ID NO: 900185 - DNA, 15 bp, Homo sapiens
agaaaagtcatagta

SEQ ID NO: 900186 - DNA, 15 bp, Homo sapiens
aagaaaagtcatagt

SEQ ID NO: 900187 - DNA, 15 bp, Homo sapiens
caagaaaagtcatag

SEQ ID NO: 900188 - DNA, 15 bp, Homo sapiens
ccaagaaaagtcata

SEQ ID NO: 900189 - DNA, 15 bp, Homo sapiens
accaagaaaagtcat

SEQ ID NO: 900190 - DNA, 15 bp, Homo sapiens
taccaagaaaagtca

SEQ ID NO: 900191 - DNA, 15 bp, Homo sapiens
ttaccaagaaaagtc

SEQ ID NO: 900192 - DNA, 15 bp, Homo sapiens
cttaccaagaaaagt

SEQ ID NO: 900193 - DNA, 15 bp, Homo sapiens
acttaccaagaaaag

SEQ ID NO: 900194 - DNA, 15 bp, Homo sapiens
gacttaccaagaaaa

SEQ ID NO: 900195 - DNA, 15 bp, Homo sapiens
tgacttaccaagaaa

SEQ ID NO: 900196 - DNA, 15 bp, Homo sapiens
ctgacttaccaagaa

SEQ ID NO: 900197 - DNA, 15 bp, Homo sapiens
gctgacttaccaaga

SEQ ID NO: 900198 - DNA, 15 bp, Homo sapiens
tgctgacttaccaag

SEQ ID NO: 900199 - DNA, 15 bp, Homo sapiens
ttgctgacttaccaa

SEQ ID NO: 900200 - DNA, 15 bp, Homo sapiens
tttgctgacttacca

SEQ ID NO: 900201 - DNA, 15 bp, Homo sapiens
ttttgctgacttacc

SEQ ID NO: 900202 - DNA, 15 bp, Homo sapiens
tttttgctgacttac

SEQ ID NO: 900203 - DNA, 15 bp, Homo sapiens
ctttttgctgactta

SEQ ID NO: 900204 - DNA, 15 bp, Homo sapiens
cctttttgctgactt

SEQ ID NO: 900205 - DNA, 15 bp, Homo sapiens
tcctttttgctgact

SEQ ID NO: 900206 - DNA, 15 bp, Homo sapiens
ttcctttttgctgac

SEQ ID NO: 900207 - DNA, 15 bp, Homo sapiens
gttcctttttgctga

SEQ ID NO: 900208 - DNA, 15 bp, Homo sapiens
agttcctttttgctg

SEQ ID NO: 900209 - DNA, 15 bp, Homo sapiens
tagttcctttttgct

SEQ ID NO: 900210 - DNA, 15 bp, Homo sapiens
ctagttcctttttgc

SEQ ID NO: 900211 - DNA, 15 bp, Homo sapiens
tctagttcctttttg

SEQ ID NO: 900212 - DNA, 15 bp, Homo sapiens
ttctagttccttttt

SEQ ID NO: 900213 - DNA, 15 bp, Homo sapiens
cttctagttcctttt

SEQ ID NO: 900214 - DNA, 15 bp, Homo sapiens
acttctagttccttt

SEQ ID NO: 900215 - DNA, 15 bp, Homo sapiens
tacttctagttcctt

SEQ ID NO: 900216 - DNA, 15 bp, Homo sapiens
ttacttctagttcct

SEQ ID NO: 900217 - DNA, 15 bp, Homo sapiens
gttacttctagttcc

SEQ ID NO: 900218 - DNA, 15 bp, Homo sapiens
tgttacttctagttc

SEQ ID NO: 900219 - DNA, 15 bp, Homo sapiens
atgttacttctagtt

SEQ ID NO: 900220 - DNA, 15 bp, Homo sapiens
gatgttacttctagt

SEQ ID NO: 900221 - DNA, 15 bp, Homo sapiens
ggatgttacttctag

SEQ ID NO: 900222 - DNA, 15 bp, Homo sapiens
tggatgttacttcta

SEQ ID NO: 900223 - DNA, 15 bp, Homo sapiens
ttggatgttacttct

SEQ ID NO: 900224 - DNA, 15 bp, Homo sapiens
cttggatgttacttc

SEQ ID NO: 900225 - DNA, 15 bp, Homo sapiens
ccttggatgttactt

SEQ ID NO: 900226 - DNA, 15 bp, Homo sapiens
tccttggatgttact

SEQ ID NO: 900227 - DNA, 15 bp, Homo sapiens
ttccttggatgttac

SEQ ID NO: 900228 - DNA, 15 bp, Homo sapiens
attccttggatgtta

SEQ ID NO: 900229 - DNA, 15 bp, Homo sapiens
tattccttggatgtt

SEQ ID NO: 900230 - DNA, 15 bp, Homo sapiens
atattccttggatgt

SEQ ID NO: 900231 - DNA, 15 bp, Homo sapiens
tatattccttggatg

SEQ ID NO: 900232 - DNA, 15 bp, Homo sapiens
ttatattccttggat

SEQ ID NO: 900233 - DNA, 15 bp, Homo sapiens
tttatattccttgga

SEQ ID NO: 900234 - DNA, 15 bp, Homo sapiens
atttatattccttgg

SEQ ID NO: 900235 - DNA, 15 bp, Homo sapiens
aatttatattccttg

SEQ ID NO: 900236 - DNA, 15 bp, Homo sapiens
gaatttatattcctt

SEQ ID NO: 900237 - DNA, 15 bp, Homo sapiens
tgaatttatattcct

SEQ ID NO: 900238 - DNA, 15 bp, Homo sapiens
atgaatttatattcc

SEQ ID NO: 900239 - DNA, 15 bp, Homo sapiens
aatgaatttatattc

SEQ ID NO: 900240 - DNA, 15 bp, Homo sapiens
caatgaatttatatt

SEQ ID NO: 900241 - DNA, 15 bp, Homo sapiens
gcaatgaatttatat

SEQ ID NO: 900242 - DNA, 15 bp, Homo sapiens
agcaatgaatttata

SEQ ID NO: 900243 - DNA, 15 bp, Homo sapiens
tagcaatgaatttat

SEQ ID NO: 900244 - DNA, 15 bp, Homo sapiens
gtagcaatgaattta

SEQ ID NO: 900245 - DNA, 15 bp, Homo sapiens
tgtagcaatgaattt

SEQ ID NO: 900246 - DNA, 15 bp, Homo sapiens
ctgtagcaatgaatt

SEQ ID NO: 900247 - DNA, 15 bp, Homo sapiens
tctgtagcaatgaat

SEQ ID NO: 900248 - DNA, 15 bp, Homo sapiens
ctctgtagcaatgaa

SEQ ID NO: 900249 - DNA, 15 bp, Homo sapiens
tctctgtagcaatga

SEQ ID NO: 900250 - DNA, 15 bp, Homo sapiens
ttctctgtagcaatg

SEQ ID NO: 900251 - DNA, 15 bp, Homo sapiens
gttctctgtagcaat

SEQ ID NO: 900252 - DNA, 15 bp, Homo sapiens
tgttctctgtagcaa

SEQ ID NO: 900253 - DNA, 15 bp, Homo sapiens
ttgttctctgtagca

SEQ ID NO: 900254 - DNA, 15 bp, Homo sapiens
tttgttctctgtagc

SEQ ID NO: 900255 - DNA, 15 bp, Homo sapiens
ctttgttctctgtag

SEQ ID NO: 900256 - DNA, 15 bp, Homo sapiens
cctttgttctctgta

SEQ ID NO: 900257 - DNA, 15 bp, Homo sapiens
acctttgttctctgt

SEQ ID NO: 900258 - DNA, 15 bp, Homo sapiens
tacctttgttctctg

SEQ ID NO: 900259 - DNA, 15 bp, Homo sapiens
ttacctttgttctct

SEQ ID NO: 900260 - DNA, 15 bp, Homo sapiens
cttacctttgttctc

SEQ ID NO: 900261 - DNA, 15 bp, Homo sapiens
gcttacctttgttct

SEQ ID NO: 900262 - DNA, 15 bp, Homo sapiens
tgcttacctttgttc

SEQ ID NO: 900263 - DNA, 15 bp, Homo sapiens
ttgcttacctttgtt

SEQ ID NO: 900264 - DNA, 15 bp, Homo sapiens
attgcttacctttgt

SEQ ID NO: 900265 - DNA, 15 bp, Homo sapiens
tattgcttacctttg

SEQ ID NO: 900266 - DNA, 15 bp, Homo sapiens
ttattgcttaccttt

SEQ ID NO: 900267 - DNA, 15 bp, Homo sapiens
attattgcttacctt

SEQ ID NO: 900268 - DNA, 15 bp, Homo sapiens
tattattgcttacct

SEQ ID NO: 900269 - DNA, 15 bp, Homo sapiens
ttattattgcttacc

SEQ ID NO: 900270 - DNA, 15 bp, Homo sapiens
tttattattgcttac

SEQ ID NO: 900271 - DNA, 15 bp, Homo sapiens
ttttattattgctta

SEQ ID NO: 900272 - DNA, 15 bp, Homo sapiens
cttttattattgctt

SEQ ID NO: 900273 - DNA, 15 bp, Homo sapiens
ccttttattattgct

SEQ ID NO: 900274 - DNA, 15 bp, Homo sapiens
accttttattattgc

SEQ ID NO: 900275 - DNA, 15 bp, Homo sapiens
caccttttattattg

SEQ ID NO: 900276 - DNA, 15 bp, Homo sapiens
tcaccttttattatt

SEQ ID NO: 900277 - DNA, 15 bp, Homo sapiens
ctcaccttttattat

SEQ ID NO: 900278 - DNA, 15 bp, Homo sapiens
cctcaccttttatta

SEQ ID NO: 900279 - DNA, 15 bp, Homo sapiens
gcctcaccttttatt

SEQ ID NO: 900280 - DNA, 15 bp, Homo sapiens
ggcctcaccttttat

SEQ ID NO: 900281 - DNA, 15 bp, Homo sapiens
aggcctcacctttta

SEQ ID NO: 900282 - DNA, 15 bp, Homo sapiens
aaggcctcacctttt

SEQ ID NO: 900283 - DNA, 15 bp, Homo sapiens
gaaggcctcaccttt

SEQ ID NO: 900284 - DNA, 15 bp, Homo sapiens
agaaggcctcacctt

SEQ ID NO: 900285 - DNA, 15 bp, Homo sapiens
aagaaggcctcacct

SEQ ID NO: 900286 - DNA, 15 bp, Homo sapiens
caagaaggcctcacc

SEQ ID NO: 900287 - DNA, 15 bp, Homo sapiens
acaagaaggcctcac

SEQ ID NO: 900288 - DNA, 15 bp, Homo sapiens
cacaagaaggcctca

SEQ ID NO: 900289 - DNA, 15 bp, Homo sapiens
tcacaagaaggcctc

SEQ ID NO: 900290 - DNA, 15 bp, Homo sapiens
ttcacaagaaggcct

SEQ ID NO: 900291 - DNA, 15 bp, Homo sapiens
cttcacaagaaggcc

SEQ ID NO: 900292 - DNA, 15 bp, Homo sapiens
acttcacaagaaggc

SEQ ID NO: 900293 - DNA, 15 bp, Homo sapiens
cacttcacaagaagg

SEQ ID NO: 900294 - DNA, 15 bp, Homo sapiens
tcacttcacaagaag

SEQ ID NO: 900295 - DNA, 15 bp, Homo sapiens
atcacttcacaagaa

SEQ ID NO: 900296 - DNA, 15 bp, Homo sapiens
aatcacttcacaaga

SEQ ID NO: 900297 - DNA, 15 bp, Homo sapiens
aaatcacttcacaag

SEQ ID NO: 900298 - DNA, 15 bp, Homo sapiens
aaaatcacttcacaa

SEQ ID NO: 900299 - DNA, 15 bp, Homo sapiens
caaaatcacttcaca

SEQ ID NO: 900300 - DNA, 15 bp, Homo sapiens
ccaaaatcacttcac

SEQ ID NO: 900301 - DNA, 15 bp, Homo sapiens
accaaaatcacttca

SEQ ID NO: 900302 - DNA, 15 bp, Homo sapiens
gaccaaaatcacttc

SEQ ID NO: 900303 - DNA, 15 bp, Homo sapiens
tgaccaaaatcactt

SEQ ID NO: 900304 - DNA, 15 bp, Homo sapiens
ctgaccaaaatcact

SEQ ID NO: 900305 - DNA, 15 bp, Homo sapiens
tctgaccaaaatcac

SEQ ID NO: 900306 - DNA, 15 bp, Homo sapiens
atctgaccaaaatca

SEQ ID NO: 900307 - DNA, 15 bp, Homo sapiens
tatctgaccaaaatc

SEQ ID NO: 900308 - DNA, 15 bp, Homo sapiens
ttatctgaccaaaat

SEQ ID NO: 900309 - DNA, 15 bp, Homo sapiens
tttatctgaccaaaa

SEQ ID NO: 900310 - DNA, 15 bp, Homo sapiens
ttttatctgaccaaa

SEQ ID NO: 900311 - DNA, 15 bp, Homo sapiens
gttttatctgaccaa

SEQ ID NO: 900312 - DNA, 15 bp, Homo sapiens
agttttatctgacca

SEQ ID NO: 900313 - DNA, 15 bp, Homo sapiens
cagttttatctgacc

SEQ ID NO: 900314 - DNA, 15 bp, Homo sapiens
acagttttatctgac

SEQ ID NO: 900315 - DNA, 15 bp, Homo sapiens
aacagttttatctga

SEQ ID NO: 900316 - DNA, 15 bp, Homo sapiens
gaacagttttatctg

SEQ ID NO: 900317 - DNA, 15 bp, Homo sapiens
tgaacagttttatct

SEQ ID NO: 900318 - DNA, 15 bp, Homo sapiens
gtgaacagttttatc

SEQ ID NO: 900319 - DNA, 15 bp, Homo sapiens
tgtgaacagttttat

SEQ ID NO: 900320 - DNA, 15 bp, Homo sapiens
ttgtgaacagtttta

SEQ ID NO: 900321 - DNA, 15 bp, Homo sapiens
tttgtgaacagtttt

SEQ ID NO: 900322 - DNA, 15 bp, Homo sapiens
ttttgtgaacagttt

SEQ ID NO: 900323 - DNA, 15 bp, Homo sapiens
cttttgtgaacagtt

SEQ ID NO: 900324 - DNA, 15 bp, Homo sapiens
gcttttgtgaacagt

SEQ ID NO: 900325 - DNA, 15 bp, Homo sapiens
ggcttttgtgaacag

SEQ ID NO: 900326 - DNA, 15 bp, Homo sapiens
aggcttttgtgaaca

SEQ ID NO: 900327 - DNA, 15 bp, Homo sapiens
taggcttttgtgaac

SEQ ID NO: 900328 - DNA, 15 bp, Homo sapiens
ctaggcttttgtgaa

SEQ ID NO: 900329 - DNA, 15 bp, Homo sapiens
cctaggcttttgtga

SEQ ID NO: 900330 - DNA, 15 bp, Homo sapiens
ccctaggcttttgtg

SEQ ID NO: 900331 - DNA, 15 bp, Homo sapiens
gccctaggcttttgt

SEQ ID NO: 900332 - DNA, 15 bp, Homo sapiens
tgccctaggcttttg

SEQ ID NO: 900333 - DNA, 15 bp, Homo sapiens
ctgccctaggctttt

SEQ ID NO: 900334 - DNA, 15 bp, Homo sapiens
tctgccctaggcttt

SEQ ID NO: 900335 - DNA, 15 bp, Homo sapiens
ttctgccctaggctt

SEQ ID NO: 900336 - DNA, 15 bp, Homo sapiens
tttctgccctaggct

SEQ ID NO: 900337 - DNA, 15 bp, Homo sapiens
ctttctgccctaggc

SEQ ID NO: 900338 - DNA, 15 bp, Homo sapiens
tctttctgccctagg

SEQ ID NO: 900339 - DNA, 15 bp, Homo sapiens
ttctttctgccctag

SEQ ID NO: 900340 - DNA, 15 bp, Homo sapiens
cttctttctgcccta

SEQ ID NO: 900341 - DNA, 15 bp, Homo sapiens
ccttctttctgccct

SEQ ID NO: 900342 - DNA, 15 bp, Homo sapiens
gccttctttctgccc

SEQ ID NO: 900343 - DNA, 15 bp, Homo sapiens
tgccttctttctgcc

SEQ ID NO: 900344 - DNA, 15 bp, Homo sapiens
ctgccttctttctgc

SEQ ID NO: 900345 - DNA, 15 bp, Homo sapiens
cctgccttctttctg

SEQ ID NO: 900346 - DNA, 15 bp, Homo sapiens
acctgccttctttct

SEQ ID NO: 900347 - DNA, 15 bp, Homo sapiens
gacctgccttctttc

SEQ ID NO: 900348 - DNA, 15 bp, Homo sapiens
ggacctgccttcttt

SEQ ID NO: 900349 - DNA, 15 bp, Homo sapiens
tggacctgccttctt

SEQ ID NO: 900350 - DNA, 15 bp, Homo sapiens
ctggacctgccttct

SEQ ID NO: 900351 - DNA, 15 bp, Homo sapiens
tctggacctgccttc

SEQ ID NO: 900352 - DNA, 15 bp, Homo sapiens
gtctggacctgcctt

SEQ ID NO: 900353 - DNA, 15 bp, Homo sapiens
tgtctggacctgcct

SEQ ID NO: 900354 - DNA, 15 bp, Homo sapiens
ttgtctggacctgcc

SEQ ID NO: 900355 - DNA, 15 bp, Homo sapiens
cttgtctggacctgc

SEQ ID NO: 900356 - DNA, 15 bp, Homo sapiens
acttgtctggacctg

SEQ ID NO: 900357 - DNA, 15 bp, Homo sapiens
cacttgtctggacct

SEQ ID NO: 900358 - DNA, 15 bp, Homo sapiens
acacttgtctggacc

SEQ ID NO: 900359 - DNA, 15 bp, Homo sapiens
aacacttgtctggac

SEQ ID NO: 900360 - DNA, 15 bp, Homo sapiens
gaacacttgtctgga

SEQ ID NO: 900361 - DNA, 15 bp, Homo sapiens
agaacacttgtctgg

SEQ ID NO: 900362 - DNA, 15 bp, Homo sapiens
aagaacacttgtctg

SEQ ID NO: 900363 - DNA, 15 bp, Homo sapiens
taagaacacttgtct

SEQ ID NO: 900364 - DNA, 15 bp, Homo sapiens
ataagaacacttgtc

SEQ ID NO: 900365 - DNA, 15 bp, Homo sapiens
tataagaacacttgt

SEQ ID NO: 900366 - DNA, 15 bp, Homo sapiens
ttataagaacacttg

SEQ ID NO: 900367 - DNA, 15 bp, Homo sapiens
gttataagaacactt

SEQ ID NO: 900368 - DNA, 15 bp, Homo sapiens
tgttataagaacact

SEQ ID NO: 900369 - DNA, 15 bp, Homo sapiens
ttgttataagaacac

SEQ ID NO: 900370 - DNA, 15 bp, Homo sapiens
cttgttataagaaca

SEQ ID NO: 900371 - DNA, 15 bp, Homo sapiens
ccttgttataagaac

SEQ ID NO: 900372 - DNA, 15 bp, Homo sapiens
gccttgttataagaa

SEQ ID NO: 900373 - DNA, 15 bp, Homo sapiens
ggccttgttataaga

SEQ ID NO: 900374 - DNA, 15 bp, Homo sapiens
tggccttgttataag

SEQ ID NO: 900375 - DNA, 15 bp, Homo sapiens
gtggccttgttataa

SEQ ID NO: 900376 - DNA, 15 bp, Homo sapiens
agtggccttgttata

SEQ ID NO: 900377 - DNA, 15 bp, Homo sapiens
aagtggccttgttat

SEQ ID NO: 900378 - DNA, 15 bp, Homo sapiens
taagtggccttgtta

SEQ ID NO: 900379 - DNA, 15 bp, Homo sapiens
gtaagtggccttgtt

SEQ ID NO: 900380 - DNA, 15 bp, Homo sapiens
tgtaagtggccttgt

SEQ ID NO: 900381 - DNA, 15 bp, Homo sapiens
ttgtaagtggccttg

SEQ ID NO: 900382 - DNA, 15 bp, Homo sapiens
gttgtaagtggcctt

SEQ ID NO: 900383 - DNA, 15 bp, Homo sapiens
tgttgtaagtggcct

SEQ ID NO: 900384 - DNA, 15 bp, Homo sapiens
atgttgtaagtggcc

SEQ ID NO: 900385 - DNA, 15 bp, Homo sapiens
aatgttgtaagtggc

SEQ ID NO: 900386 - DNA, 15 bp, Homo sapiens
caatgttgtaagtgg

SEQ ID NO: 900387 - DNA, 15 bp, Homo sapiens
acaatgttgtaagtg

SEQ ID NO: 900388 - DNA, 15 bp, Homo sapiens
gacaatgttgtaagt

SEQ ID NO: 900389 - DNA, 15 bp, Homo sapiens
tgacaatgttgtaag

SEQ ID NO: 900390 - DNA, 15 bp, Homo sapiens
gtgacaatgttgtaa

SEQ ID NO: 900391 - DNA, 15 bp, Homo sapiens
tgtgacaatgttgta

SEQ ID NO: 900392 - DNA, 15 bp, Homo sapiens
atgtgacaatgttgt

SEQ ID NO: 900393 - DNA, 15 bp, Homo sapiens
tatgtgacaatgttg

SEQ ID NO: 900394 - DNA, 15 bp, Homo sapiens
ttatgtgacaatgtt

SEQ ID NO: 900395 - DNA, 15 bp, Homo sapiens
cttatgtgacaatgt

SEQ ID NO: 900396 - DNA, 15 bp, Homo sapiens
acttatgtgacaatg

SEQ ID NO: 900397 - DNA, 15 bp, Homo sapiens
gacttatgtgacaat

SEQ ID NO: 900398 - DNA, 15 bp, Homo sapiens
ggacttatgtgacaa

SEQ ID NO: 900399 - DNA, 15 bp, Homo sapiens
gggacttatgtgaca

SEQ ID NO: 900400 - DNA, 15 bp, Homo sapiens
tgggacttatgtgac

SEQ ID NO: 900401 - DNA, 15 bp, Homo sapiens
atgggacttatgtga

SEQ ID NO: 900402 - DNA, 15 bp, Homo sapiens
aatgggacttatgtg

SEQ ID NO: 900403 - DNA, 15 bp, Homo sapiens
aaatgggacttatgt

SEQ ID NO: 900404 - DNA, 15 bp, Homo sapiens
gaaatgggacttatg

SEQ ID NO: 900405 - DNA, 15 bp, Homo sapiens
agaaatgggacttat

SEQ ID NO: 900406 - DNA, 15 bp, Homo sapiens
aagaaatgggactta

SEQ ID NO: 900407 - DNA, 15 bp, Homo sapiens
caagaaatgggactt

SEQ ID NO: 900408 - DNA, 15 bp, Homo sapiens
tcaagaaatgggact

SEQ ID NO: 900409 - DNA, 15 bp, Homo sapiens
atcaagaaatgggac

SEQ ID NO: 900410 - DNA, 15 bp, Homo sapiens
catcaagaaatggga

SEQ ID NO: 900411 - DNA, 15 bp, Homo sapiens
tcatcaagaaatggg

SEQ ID NO: 900412 - DNA, 15 bp, Homo sapiens
ttcatcaagaaatgg

SEQ ID NO: 900413 - DNA, 15 bp, Homo sapiens
tttcatcaagaaatg

SEQ ID NO: 900414 - DNA, 15 bp, Homo sapiens
ttttcatcaagaaat

SEQ ID NO: 900415 - DNA, 15 bp, Homo sapiens
gttttcatcaagaaa

SEQ ID NO: 900416 - DNA, 15 bp, Homo sapiens
agttttcatcaagaa

SEQ ID NO: 900417 - DNA, 15 bp, Homo sapiens
cagttttcatcaaga

SEQ ID NO: 900418 - DNA, 15 bp, Homo sapiens
tcagttttcatcaag

SEQ ID NO: 900419 - DNA, 15 bp, Homo sapiens
gtcagttttcatcaa

SEQ ID NO: 900420 - DNA, 15 bp, Homo sapiens
tgtcagttttcatca

SEQ ID NO: 900421 - DNA, 15 bp, Homo sapiens
ctgtcagttttcatc

SEQ ID NO: 900422 - DNA, 15 bp, Homo sapiens
cctgtcagttttcat

SEQ ID NO: 900423 - DNA, 15 bp, Homo sapiens
acctgtcagttttca

SEQ ID NO: 900424 - DNA, 15 bp, Homo sapiens
cacctgtcagttttc

SEQ ID NO: 900425 - DNA, 15 bp, Homo sapiens
gcacctgtcagtttt

SEQ ID NO: 900426 - DNA, 15 bp, Homo sapiens
tgcacctgtcagttt

SEQ ID NO: 900427 - DNA, 15 bp, Homo sapiens
ctgcacctgtcagtt

SEQ ID NO: 900428 - DNA, 15 bp, Homo sapiens
tctgcacctgtcagt

SEQ ID NO: 900429 - DNA, 15 bp, Homo sapiens
ttctgcacctgtcag

SEQ ID NO: 900430 - DNA, 15 bp, Homo sapiens
tttctgcacctgtca

SEQ ID NO: 900431 - DNA, 15 bp, Homo sapiens
ttttctgcacctgtc

SEQ ID NO: 900432 - DNA, 15 bp, Homo sapiens
attttctgcacctgt

SEQ ID NO: 900433 - DNA, 15 bp, Homo sapiens
gattttctgcacctg

SEQ ID NO: 900434 - DNA, 15 bp, Homo sapiens
agattttctgcacct

SEQ ID NO: 900435 - DNA, 15 bp, Homo sapiens
cagattttctgcacc

SEQ ID NO: 900436 - DNA, 15 bp, Homo sapiens
tcagattttctgcac

SEQ ID NO: 900437 - DNA, 15 bp, Homo sapiens
gtcagattttctgca

SEQ ID NO: 900438 - DNA, 15 bp, Homo sapiens
cgtcagattttctgc

SEQ ID NO: 900439 - DNA, 15 bp, Homo sapiens
tcgtcagattttctg

SEQ ID NO: 900440 - DNA, 15 bp, Homo sapiens
ttcgtcagattttct

SEQ ID NO: 900441 - DNA, 15 bp, Homo sapiens
tttcgtcagattttc

SEQ ID NO: 900442 - DNA, 15 bp, Homo sapiens
ttttcgtcagatttt

SEQ ID NO: 900443 - DNA, 15 bp, Homo sapiens
tttttcgtcagattt

SEQ ID NO: 900444 - DNA, 15 bp, Homo sapiens
atttttcgtcagatt

SEQ ID NO: 900445 - DNA, 15 bp, Homo sapiens
tatttttcgtcagat

SEQ ID NO: 900446 - DNA, 15 bp, Homo sapiens
ttatttttcgtcaga

SEQ ID NO: 900447 - DNA, 15 bp, Homo sapiens
attatttttcgtcag

SEQ ID NO: 900448 - DNA, 15 bp, Homo sapiens
tattatttttcgtca

SEQ ID NO: 900449 - DNA, 15 bp, Homo sapiens
ctattatttttcgtc

SEQ ID NO: 900450 - DNA, 15 bp, Homo sapiens
actattatttttcgt

SEQ ID NO: 900451 - DNA, 15 bp, Homo sapiens
aactattatttttcg

SEQ ID NO: 900452 - DNA, 15 bp, Homo sapiens
aaactattatttttc

SEQ ID NO: 900453 - DNA, 15 bp, Homo sapiens
aaaactattattttt

SEQ ID NO: 900454 - DNA, 15 bp, Homo sapiens
caaaactattatttt

SEQ ID NO: 900455 - DNA, 15 bp, Homo sapiens
gcaaaactattattt

SEQ ID NO: 900456 - DNA, 15 bp, Homo sapiens
ggcaaaactattatt

SEQ ID NO: 900457 - DNA, 15 bp, Homo sapiens
tggcaaaactattat

SEQ ID NO: 900458 - DNA, 15 bp, Homo sapiens
ttggcaaaactatta

SEQ ID NO: 900459 - DNA, 15 bp, Homo sapiens
attggcaaaactatt

SEQ ID NO: 900460 - DNA, 15 bp, Homo sapiens
aattggcaaaactat

SEQ ID NO: 900461 - DNA, 15 bp, Homo sapiens
aaattggcaaaacta

SEQ ID NO: 900462 - DNA, 15 bp, Homo sapiens
aaaattggcaaaact

SEQ ID NO: 900463 - DNA, 15 bp, Homo sapiens
gaaaattggcaaaac

SEQ ID NO: 900464 - DNA, 15 bp, Homo sapiens
ggaaaattggcaaaa

SEQ ID NO: 900465 - DNA, 15 bp, Homo sapiens
aggaaaattggcaaa

SEQ ID NO: 900466 - DNA, 15 bp, Homo sapiens
gaggaaaattggcaa

SEQ ID NO: 900467 - DNA, 15 bp, Homo sapiens
tgaggaaaattggca

SEQ ID NO: 900468 - DNA, 15 bp, Homo sapiens
ttgaggaaaattggc

SEQ ID NO: 900469 - DNA, 15 bp, Homo sapiens
tttgaggaaaattgg

SEQ ID NO: 900470 - DNA, 15 bp, Homo sapiens
ttttgaggaaaattg

SEQ ID NO: 900471 - DNA, 15 bp, Homo sapiens
tttttgaggaaaatt

SEQ ID NO: 900472 - DNA, 15 bp, Homo sapiens
atttttgaggaaaat

SEQ ID NO: 900473 - DNA, 15 bp, Homo sapiens
tatttttgaggaaaa

SEQ ID NO: 900474 - DNA, 15 bp, Homo sapiens
atatttttgaggaaa

SEQ ID NO: 900475 - DNA, 15 bp, Homo sapiens
tatatttttgaggaa

SEQ ID NO: 900476 - DNA, 15 bp, Homo sapiens
gtatatttttgagga

SEQ ID NO: 900477 - DNA, 15 bp, Homo sapiens
tgtatatttttgagg

SEQ ID NO: 900478 - DNA, 15 bp, Homo sapiens
ctgtatatttttgag

SEQ ID NO: 900479 - DNA, 15 bp, Homo sapiens
actgtatatttttga

SEQ ID NO: 900480 - DNA, 15 bp, Homo sapiens
cactgtatatttttg

SEQ ID NO: 900481 - DNA, 15 bp, Homo sapiens
tcactgtatattttt

SEQ ID NO: 900482 - DNA, 15 bp, Homo sapiens
ctcactgtatatttt

SEQ ID NO: 900483 - DNA, 15 bp, Homo sapiens
actcactgtatattt

SEQ ID NO: 900484 - DNA, 15 bp, Homo sapiens
aactcactgtatatt

SEQ ID NO: 900485 - DNA, 15 bp, Homo sapiens
taactcactgtatat

SEQ ID NO: 900486 - DNA, 15 bp, Homo sapiens
ataactcactgtata

SEQ ID NO: 900487 - DNA, 15 bp, Homo sapiens
aataactcactgtat

SEQ ID NO: 900488 - DNA, 15 bp, Homo sapiens
caataactcactgta

SEQ ID NO: 900489 - DNA, 15 bp, Homo sapiens
tcaataactcactgt

SEQ ID NO: 900490 - DNA, 15 bp, Homo sapiens
ttcaataactcactg

SEQ ID NO: 900491 - DNA, 15 bp, Homo sapiens
gttcaataactcact

SEQ ID NO: 900492 - DNA, 15 bp, Homo sapiens
agttcaataactcac

SEQ ID NO: 900493 - DNA, 15 bp, Homo sapiens
tagttcaataactca

SEQ ID NO: 900494 - DNA, 15 bp, Homo sapiens
ctagttcaataactc

SEQ ID NO: 900495 - DNA, 15 bp, Homo sapiens
tctagttcaataact

SEQ ID NO: 900496 - DNA, 15 bp, Homo sapiens
ttctagttcaataac

SEQ ID NO: 900497 - DNA, 15 bp, Homo sapiens
gttctagttcaataa

SEQ ID NO: 900498 - DNA, 15 bp, Homo sapiens
ggttctagttcaata

SEQ ID NO: 900499 - DNA, 15 bp, Homo sapiens
aggttctagttcaat

SEQ ID NO: 900500 - DNA, 15 bp, Homo sapiens
caggttctagttcaa

SEQ ID NO: 900501 - DNA, 15 bp, Homo sapiens
tcaggttctagttca

SEQ ID NO: 900502 - DNA, 15 bp, Homo sapiens
ctcaggttctagttc

SEQ ID NO: 900503 - DNA, 15 bp, Homo sapiens
actcaggttctagtt

SEQ ID NO: 900504 - DNA, 15 bp, Homo sapiens
aactcaggttctagt

SEQ ID NO: 900505 - DNA, 15 bp, Homo sapiens
taactcaggttctag

SEQ ID NO: 900506 - DNA, 15 bp, Homo sapiens
ttaactcaggttcta

SEQ ID NO: 900507 - DNA, 15 bp, Homo sapiens
tttaactcaggttct

SEQ ID NO: 900508 - DNA, 15 bp, Homo sapiens
atttaactcaggttc

SEQ ID NO: 900509 - DNA, 15 bp, Homo sapiens
aatttaactcaggtt

SEQ ID NO: 900510 - DNA, 15 bp, Homo sapiens
aaatttaactcaggt

SEQ ID NO: 900511 - DNA, 15 bp, Homo sapiens
gaaatttaactcagg

SEQ ID NO: 900512 - DNA, 15 bp, Homo sapiens
ggaaatttaactcag

SEQ ID NO: 900513 - DNA, 15 bp, Homo sapiens
aggaaatttaactca

SEQ ID NO: 900514 - DNA, 15 bp, Homo sapiens
caggaaatttaactc

SEQ ID NO: 900515 - DNA, 15 bp, Homo sapiens
tcaggaaatttaact

SEQ ID NO: 900516 - DNA, 15 bp, Homo sapiens
gtcaggaaatttaac

SEQ ID NO: 900517 - DNA, 15 bp, Homo sapiens
agtcaggaaatttaa

SEQ ID NO: 900518 - DNA, 15 bp, Homo sapiens
gagtcaggaaattta

SEQ ID NO: 900519 - DNA, 15 bp, Homo sapiens
tgagtcaggaaattt

SEQ ID NO: 900520 - DNA, 15 bp, Homo sapiens
gtgagtcaggaaatt

SEQ ID NO: 900521 - DNA, 15 bp, Homo sapiens
tgtgagtcaggaaat

SEQ ID NO: 900522 - DNA, 15 bp, Homo sapiens
gtgtgagtcaggaaa

SEQ ID NO: 900523 - DNA, 15 bp, Homo sapiens
agtgtgagtcaggaa

SEQ ID NO: 900524 - DNA, 15 bp, Homo sapiens
aagtgtgagtcagga

SEQ ID NO: 900525 - DNA, 15 bp, Homo sapiens
taagtgtgagtcagg

SEQ ID NO: 900526 - DNA, 15 bp, Homo sapiens
ctaagtgtgagtcag

SEQ ID NO: 900527 - DNA, 15 bp, Homo sapiens
cctaagtgtgagtca

SEQ ID NO: 900528 - DNA, 15 bp, Homo sapiens
acctaagtgtgagtc

SEQ ID NO: 900529 - DNA, 15 bp, Homo sapiens
tacctaagtgtgagt

SEQ ID NO: 900530 - DNA, 15 bp, Homo sapiens
gtacctaagtgtgag

SEQ ID NO: 900531 - DNA, 15 bp, Homo sapiens
tgtacctaagtgtga

SEQ ID NO: 900532 - DNA, 15 bp, Homo sapiens
ctgtacctaagtgtg

SEQ ID NO: 900533 - DNA, 15 bp, Homo sapiens
tctgtacctaagtgt

SEQ ID NO: 900534 - DNA, 15 bp, Homo sapiens
gtctgtacctaagtg

SEQ ID NO: 900535 - DNA, 15 bp, Homo sapiens
cgtctgtacctaagt

SEQ ID NO: 900536 - DNA, 15 bp, Homo sapiens
tcgtctgtacctaag

SEQ ID NO: 900537 - DNA, 15 bp, Homo sapiens
gtcgtctgtacctaa

SEQ ID NO: 900538 - DNA, 15 bp, Homo sapiens
tgtcgtctgtaccta

SEQ ID NO: 900539 - DNA, 15 bp, Homo sapiens
ttgtcgtctgtacct

SEQ ID NO: 900540 - DNA, 15 bp, Homo sapiens
attgtcgtctgtacc

SEQ ID NO: 900541 - DNA, 15 bp, Homo sapiens
cattgtcgtctgtac

SEQ ID NO: 900542 - DNA, 15 bp, Homo sapiens
gcattgtcgtctgta

SEQ ID NO: 900543 - DNA, 15 bp, Homo sapiens
tgcattgtcgtctgt

SEQ ID NO: 900544 - DNA, 15 bp, Homo sapiens
atgcattgtcgtctg

SEQ ID NO: 900545 - DNA, 15 bp, Homo sapiens
tatgcattgtcgtct

SEQ ID NO: 900546 - DNA, 15 bp, Homo sapiens
ttatgcattgtcgtc

SEQ ID NO: 900547 - DNA, 15 bp, Homo sapiens
tttatgcattgtcgt

SEQ ID NO: 900548 - DNA, 15 bp, Homo sapiens
ttttatgcattgtcg

SEQ ID NO: 900549 - DNA, 15 bp, Homo sapiens
tttttatgcattgtc

SEQ ID NO: 900550 - DNA, 15 bp, Homo sapiens
gtttttatgcattgt

SEQ ID NO: 900551 - DNA, 15 bp, Homo sapiens
agtttttatgcattg

SEQ ID NO: 900552 - DNA, 15 bp, Homo sapiens
aagtttttatgcatt

SEQ ID NO: 900553 - DNA, 15 bp, Homo sapiens
taagtttttatgcat

SEQ ID NO: 900554 - DNA, 15 bp, Homo sapiens
ctaagtttttatgca

SEQ ID NO: 900555 - DNA, 15 bp, Homo sapiens
actaagtttttatgc

SEQ ID NO: 900556 - DNA, 15 bp, Homo sapiens
aactaagtttttatg

SEQ ID NO: 900557 - DNA, 15 bp, Homo sapiens
caactaagtttttat

SEQ ID NO: 900558 - DNA, 15 bp, Homo sapiens
tcaactaagttttta

SEQ ID NO: 900559 - DNA, 15 bp, Homo sapiens
gtcaactaagttttt

SEQ ID NO: 900560 - DNA, 15 bp, Homo sapiens
agtcaactaagtttt

SEQ ID NO: 900561 - DNA, 15 bp, Homo sapiens
aagtcaactaagttt

SEQ ID NO: 900562 - DNA, 15 bp, Homo sapiens
caagtcaactaagtt

SEQ ID NO: 900563 - DNA, 15 bp, Homo sapiens
acaagtcaactaagt

SEQ ID NO: 900564 - DNA, 15 bp, Homo sapiens
aacaagtcaactaag

SEQ ID NO: 900565 - DNA, 15 bp, Homo sapiens
gaacaagtcaactaa

SEQ ID NO: 900566 - DNA, 15 bp, Homo sapiens
tgaacaagtcaacta

SEQ ID NO: 900567 - DNA, 15 bp, Homo sapiens
ttgaacaagtcaact

SEQ ID NO: 900568 - DNA, 15 bp, Homo sapiens
cttgaacaagtcaac

SEQ ID NO: 900569 - DNA, 15 bp, Homo sapiens
gcttgaacaagtcaa

SEQ ID NO: 900570 - DNA, 15 bp, Homo sapiens
ggcttgaacaagtca

SEQ ID NO: 900571 - DNA, 15 bp, Homo sapiens
tggcttgaacaagtc

SEQ ID NO: 900572 - DNA, 15 bp, Homo sapiens
ctggcttgaacaagt

SEQ ID NO: 900573 - DNA, 15 bp, Homo sapiens
tctggcttgaacaag

SEQ ID NO: 900574 - DNA, 15 bp, Homo sapiens
ctctggcttgaacaa

SEQ ID NO: 900575 - DNA, 15 bp, Homo sapiens
gctctggcttgaaca

SEQ ID NO: 900576 - DNA, 15 bp, Homo sapiens
agctctggcttgaac

SEQ ID NO: 900577 - DNA, 15 bp, Homo sapiens
cagctctggcttgaa

SEQ ID NO: 900578 - DNA, 15 bp, Homo sapiens
tcagctctggcttga

SEQ ID NO: 900579 - DNA, 15 bp, Homo sapiens
gtcagctctggcttg

SEQ ID NO: 900580 - DNA, 15 bp, Homo sapiens
agtcagctctggctt

SEQ ID NO: 900581 - DNA, 15 bp, Homo sapiens
aagtcagctctggct

SEQ ID NO: 900582 - DNA, 15 bp, Homo sapiens
caagtcagctctggc

SEQ ID NO: 900583 - DNA, 15 bp, Homo sapiens
acaagtcagctctgg

SEQ ID NO: 900584 - DNA, 15 bp, Homo sapiens
aacaagtcagctctg

SEQ ID NO: 900585 - DNA, 15 bp, Homo sapiens
gaacaagtcagctct

SEQ ID NO: 900586 - DNA, 15 bp, Homo sapiens
tgaacaagtcagctc

SEQ ID NO: 900587 - DNA, 15 bp, Homo sapiens
gtgaacaagtcagct

SEQ ID NO: 900588 - DNA, 15 bp, Homo sapiens
agtgaacaagtcagc

SEQ ID NO: 900589 - DNA, 15 bp, Homo sapiens
cagtgaacaagtcag

SEQ ID NO: 900590 - DNA, 15 bp, Homo sapiens
gcagtgaacaagtca

SEQ ID NO: 900591 - DNA, 15 bp, Homo sapiens
agcagtgaacaagtc

SEQ ID NO: 900592 - DNA, 15 bp, Homo sapiens
cagcagtgaacaagt

SEQ ID NO: 900593 - DNA, 15 bp, Homo sapiens
acagcagtgaacaag

SEQ ID NO: 900594 - DNA, 15 bp, Homo sapiens
tacagcagtgaacaa

SEQ ID NO: 900595 - DNA, 15 bp, Homo sapiens
atacagcagtgaaca

SEQ ID NO: 900596 - DNA, 15 bp, Homo sapiens
gatacagcagtgaac

SEQ ID NO: 900597 - DNA, 15 bp, Homo sapiens
ggatacagcagtgaa

SEQ ID NO: 900598 - DNA, 15 bp, Homo sapiens
gggatacagcagtga

SEQ ID NO: 900599 - DNA, 15 bp, Homo sapiens
ggggatacagcagtg

SEQ ID NO: 900600 - DNA, 15 bp, Homo sapiens
tggggatacagcagt

SEQ ID NO: 900601 - DNA, 15 bp, Homo sapiens
ctggggatacagcag

SEQ ID NO: 900602 - DNA, 15 bp, Homo sapiens
actggggatacagca

SEQ ID NO: 900603 - DNA, 15 bp, Homo sapiens
cactggggatacagc

SEQ ID NO: 900604 - DNA, 15 bp, Homo sapiens
gcactggggatacag

SEQ ID NO: 900605 - DNA, 15 bp, Homo sapiens
ggcactggggataca

SEQ ID NO: 900606 - DNA, 15 bp, Homo sapiens
aggcactggggatac

SEQ ID NO: 900607 - DNA, 15 bp, Homo sapiens
taggcactggggata

SEQ ID NO: 900608 - DNA, 15 bp, Homo sapiens
ctaggcactggggat

SEQ ID NO: 900609 - DNA, 15 bp, Homo sapiens
gctaggcactgggga

SEQ ID NO: 900610 - DNA, 15 bp, Homo sapiens
tgctaggcactgggg

SEQ ID NO: 900611 - DNA, 15 bp, Homo sapiens
gtgctaggcactggg

SEQ ID NO: 900612 - DNA, 15 bp, Homo sapiens
tgtgctaggcactgg

SEQ ID NO: 900613 - DNA, 15 bp, Homo sapiens
ctgtgctaggcactg

SEQ ID NO: 900614 - DNA, 15 bp, Homo sapiens
cctgtgctaggcact

SEQ ID NO: 900615 - DNA, 15 bp, Homo sapiens
tcctgtgctaggcac

SEQ ID NO: 900616 - DNA, 15 bp, Homo sapiens
ttcctgtgctaggca

SEQ ID NO: 900617 - DNA, 15 bp, Homo sapiens
tttcctgtgctaggc

SEQ ID NO: 900618 - DNA, 15 bp, Homo sapiens
gtttcctgtgctagg

SEQ ID NO: 900619 - DNA, 15 bp, Homo sapiens
tgtttcctgtgctag

SEQ ID NO: 900620 - DNA, 15 bp, Homo sapiens
ctgtttcctgtgcta

SEQ ID NO: 900621 - DNA, 15 bp, Homo sapiens
cctgtttcctgtgct

SEQ ID NO: 900622 - DNA, 15 bp, Homo sapiens
tcctgtttcctgtgc

SEQ ID NO: 900623 - DNA, 15 bp, Homo sapiens
atcctgtttcctgtg

SEQ ID NO: 900624 - DNA, 15 bp, Homo sapiens
tatcctgtttcctgt

SEQ ID NO: 900625 - DNA, 15 bp, Homo sapiens
ttatcctgtttcctg

SEQ ID NO: 900626 - DNA, 15 bp, Homo sapiens
tttatcctgtttcct

SEQ ID NO: 900627 - DNA, 15 bp, Homo sapiens
ttttatcctgtttcc

SEQ ID NO: 900628 - DNA, 15 bp, Homo sapiens
tttttatcctgtttc

SEQ ID NO: 900629 - DNA, 15 bp, Homo sapiens
ttttttatcctgttt

SEQ ID NO: 900630 - DNA, 15 bp, Homo sapiens
attttttatcctgtt

SEQ ID NO: 900631 - DNA, 15 bp, Homo sapiens
tattttttatcctgt

SEQ ID NO: 900632 - DNA, 15 bp, Homo sapiens
gtattttttatcctg

SEQ ID NO: 900633 - DNA, 15 bp, Homo sapiens
agtattttttatcct

SEQ ID NO: 900634 - DNA, 15 bp, Homo sapiens
cagtattttttatcc

SEQ ID NO: 900635 - DNA, 15 bp, Homo sapiens
acagtattttttatc

SEQ ID NO: 900636 - DNA, 15 bp, Homo sapiens
aacagtattttttat

SEQ ID NO: 900637 - DNA, 15 bp, Homo sapiens
taacagtatttttta

SEQ ID NO: 900638 - DNA, 15 bp, Homo sapiens
ctaacagtatttttt

SEQ ID NO: 900639 - DNA, 15 bp, Homo sapiens
tctaacagtattttt

SEQ ID NO: 900640 - DNA, 15 bp, Homo sapiens
ttctaacagtatttt

SEQ ID NO: 900641 - DNA, 15 bp, Homo sapiens
attctaacagtattt

SEQ ID NO: 900642 - DNA, 15 bp, Homo sapiens
cattctaacagtatt

SEQ ID NO: 900643 - DNA, 15 bp, Homo sapiens
tcattctaacagtat

SEQ ID NO: 900644 - DNA, 15 bp, Homo sapiens
ctcattctaacagta

SEQ ID NO: 900645 - DNA, 15 bp, Homo sapiens
actcattctaacagt

SEQ ID NO: 900646 - DNA, 15 bp, Homo sapiens
aactcattctaacag

SEQ ID NO: 900647 - DNA, 15 bp, Homo sapiens
taactcattctaaca

SEQ ID NO: 900648 - DNA, 15 bp, Homo sapiens
ttaactcattctaac

SEQ ID NO: 900649 - DNA, 15 bp, Homo sapiens
tttaactcattctaa

SEQ ID NO: 900650 - DNA, 15 bp, Homo sapiens
ctttaactcattcta

SEQ ID NO: 900651 - DNA, 15 bp, Homo sapiens
tctttaactcattct

SEQ ID NO: 900652 - DNA, 15 bp, Homo sapiens
ttctttaactcattc

SEQ ID NO: 900653 - DNA, 15 bp, Homo sapiens
attctttaactcatt

SEQ ID NO: 900654 - DNA, 15 bp, Homo sapiens
tattctttaactcat

SEQ ID NO: 900655 - DNA, 15 bp, Homo sapiens
ttattctttaactca

SEQ ID NO: 900656 - DNA, 15 bp, Homo sapiens
tttattctttaactc

SEQ ID NO: 900657 - DNA, 15 bp, Homo sapiens
ttttattctttaact

SEQ ID NO: 900658 - DNA, 15 bp, Homo sapiens
attttattctttaac

SEQ ID NO: 900659 - DNA, 15 bp, Homo sapiens
aattttattctttaa

SEQ ID NO: 900660 - DNA, 15 bp, Homo sapiens
aaattttattcttta

SEQ ID NO: 900661 - DNA, 15 bp, Homo sapiens
taaattttattcttt

SEQ ID NO: 900662 - DNA, 15 bp, Homo sapiens
ctaaattttattctt

SEQ ID NO: 900663 - DNA, 15 bp, Homo sapiens
cctaaattttattct

SEQ ID NO: 900664 - DNA, 15 bp, Homo sapiens
acctaaattttattc

SEQ ID NO: 900665 - DNA, 15 bp, Homo sapiens
tacctaaattttatt

SEQ ID NO: 900666 - DNA, 15 bp, Homo sapiens
ttacctaaattttat

SEQ ID NO: 900667 - DNA, 15 bp, Homo sapiens
cttacctaaatttta

SEQ ID NO: 900668 - DNA, 15 bp, Homo sapiens
tcttacctaaatttt

SEQ ID NO: 900669 - DNA, 15 bp, Homo sapiens
atcttacctaaattt

SEQ ID NO: 900670 - DNA, 15 bp, Homo sapiens
aatcttacctaaatt

SEQ ID NO: 900671 - DNA, 15 bp, Homo sapiens
aaatcttacctaaat

SEQ ID NO: 900672 - DNA, 15 bp, Homo sapiens
aaaatcttacctaaa

SEQ ID NO: 900673 - DNA, 15 bp, Homo sapiens
caaaatcttacctaa

SEQ ID NO: 900674 - DNA, 15 bp, Homo sapiens
gcaaaatcttaccta

SEQ ID NO: 900675 - DNA, 15 bp, Homo sapiens
agcaaaatcttacct

SEQ ID NO: 900676 - DNA, 15 bp, Homo sapiens
aagcaaaatcttacc

SEQ ID NO: 900677 - DNA, 15 bp, Homo sapiens
aaagcaaaatcttac

SEQ ID NO: 900678 - DNA, 15 bp, Homo sapiens
aaaagcaaaatctta

SEQ ID NO: 900679 - DNA, 15 bp, Homo sapiens
taaaagcaaaatctt

SEQ ID NO: 900680 - DNA, 15 bp, Homo sapiens
ctaaaagcaaaatct

SEQ ID NO: 900681 - DNA, 15 bp, Homo sapiens
actaaaagcaaaatc

SEQ ID NO: 900682 - DNA, 15 bp, Homo sapiens
aactaaaagcaaaat

SEQ ID NO: 900683 - DNA, 15 bp, Homo sapiens
taactaaaagcaaaa

SEQ ID NO: 900684 - DNA, 15 bp, Homo sapiens
gtaactaaaagcaaa

SEQ ID NO: 900685 - DNA, 15 bp, Homo sapiens
tgtaactaaaagcaa

SEQ ID NO: 900686 - DNA, 15 bp, Homo sapiens
ttgtaactaaaagca

SEQ ID NO: 900687 - DNA, 15 bp, Homo sapiens
attgtaactaaaagc

SEQ ID NO: 900688 - DNA, 15 bp, Homo sapiens
aattgtaactaaaag

SEQ ID NO: 900689 - DNA, 15 bp, Homo sapiens
caattgtaactaaaa

SEQ ID NO: 900690 - DNA, 15 bp, Homo sapiens
acaattgtaactaaa

SEQ ID NO: 900691 - DNA, 15 bp, Homo sapiens
gacaattgtaactaa

SEQ ID NO: 900692 - DNA, 15 bp, Homo sapiens
tgacaattgtaacta

SEQ ID NO: 900693 - DNA, 15 bp, Homo sapiens
gtgacaattgtaact

SEQ ID NO: 900694 - DNA, 15 bp, Homo sapiens
agtgacaattgtaac

SEQ ID NO: 900695 - DNA, 15 bp, Homo sapiens
cagtgacaattgtaa

SEQ ID NO: 900696 - DNA, 15 bp, Homo sapiens
tcagtgacaattgta

SEQ ID NO: 900697 - DNA, 15 bp, Homo sapiens
ctcagtgacaattgt

SEQ ID NO: 900698 - DNA, 15 bp, Homo sapiens
tctcagtgacaattg

SEQ ID NO: 900699 - DNA, 15 bp, Homo sapiens
atctcagtgacaatt

SEQ ID NO: 900700 - DNA, 15 bp, Homo sapiens
gatctcagtgacaat

SEQ ID NO: 900701 - DNA, 15 bp, Homo sapiens
agatctcagtgacaa

SEQ ID NO: 900702 - DNA, 15 bp, Homo sapiens
tagatctcagtgaca

SEQ ID NO: 900703 - DNA, 15 bp, Homo sapiens
ctagatctcagtgac

SEQ ID NO: 900704 - DNA, 15 bp, Homo sapiens
cctagatctcagtga

SEQ ID NO: 900705 - DNA, 15 bp, Homo sapiens
acctagatctcagtg

SEQ ID NO: 900706 - DNA, 15 bp, Homo sapiens
aacctagatctcagt

SEQ ID NO: 900707 - DNA, 15 bp, Homo sapiens
taacctagatctcag

SEQ ID NO: 900708 - DNA, 15 bp, Homo sapiens
gtaacctagatctca

SEQ ID NO: 900709 - DNA, 15 bp, Homo sapiens
tgtaacctagatctc

SEQ ID NO: 900710 - DNA, 15 bp, Homo sapiens
ttgtaacctagatct

SEQ ID NO: 900711 - DNA, 15 bp, Homo sapiens
attgtaacctagatc

SEQ ID NO: 900712 - DNA, 15 bp, Homo sapiens
gattgtaacctagat

SEQ ID NO: 900713 - DNA, 15 bp, Homo sapiens
agattgtaacctaga

SEQ ID NO: 900714 - DNA, 15 bp, Homo sapiens
aagattgtaacctag

SEQ ID NO: 900715 - DNA, 15 bp, Homo sapiens
taagattgtaaccta

SEQ ID NO: 900716 - DNA, 15 bp, Homo sapiens
ctaagattgtaacct

SEQ ID NO: 900717 - DNA, 15 bp, Homo sapiens
gctaagattgtaacc

SEQ ID NO: 900718 - DNA, 15 bp, Homo sapiens
agctaagattgtaac

SEQ ID NO: 900719 - DNA, 15 bp, Homo sapiens
aagctaagattgtaa

SEQ ID NO: 900720 - DNA, 15 bp, Homo sapiens
gaagctaagattgta

SEQ ID NO: 900721 - DNA, 15 bp, Homo sapiens
tgaagctaagattgt

SEQ ID NO: 900722 - DNA, 15 bp, Homo sapiens
atgaagctaagattg

SEQ ID NO: 900723 - DNA, 15 bp, Homo sapiens
gatgaagctaagatt

SEQ ID NO: 900724 - DNA, 15 bp, Homo sapiens
tgatgaagctaagat

SEQ ID NO: 900725 - DNA, 15 bp, Homo sapiens
ttgatgaagctaaga

SEQ ID NO: 900726 - DNA, 15 bp, Homo sapiens
attgatgaagctaag

SEQ ID NO: 900727 - DNA, 15 bp, Homo sapiens
aattgatgaagctaa

SEQ ID NO: 900728 - DNA, 15 bp, Homo sapiens
taattgatgaagcta

SEQ ID NO: 900729 - DNA, 15 bp, Homo sapiens
ataattgatgaagct

SEQ ID NO: 900730 - DNA, 15 bp, Homo sapiens
aataattgatgaagc

SEQ ID NO: 900731 - DNA, 15 bp, Homo sapiens
taataattgatgaag

SEQ ID NO: 900732 - DNA, 15 bp, Homo sapiens
gtaataattgatgaa

SEQ ID NO: 900733 - DNA, 15 bp, Homo sapiens
agtaataattgatga

SEQ ID NO: 900734 - DNA, 15 bp, Homo sapiens
aagtaataattgatg

SEQ ID NO: 900735 - DNA, 15 bp, Homo sapiens
taagtaataattgat

SEQ ID NO: 900736 - DNA, 15 bp, Homo sapiens
ttaagtaataattga

SEQ ID NO: 900737 - DNA, 15 bp, Homo sapiens
gttaagtaataattg

SEQ ID NO: 900738 - DNA, 15 bp, Homo sapiens
agttaagtaataatt

SEQ ID NO: 900739 - DNA, 15 bp, Homo sapiens
aagttaagtaataat

SEQ ID NO: 900740 - DNA, 15 bp, Homo sapiens
gaagttaagtaataa

SEQ ID NO: 900741 - DNA, 15 bp, Homo sapiens
agaagttaagtaata

SEQ ID NO: 900742 - DNA, 15 bp, Homo sapiens
tagaagttaagtaat

SEQ ID NO: 900743 - DNA, 15 bp, Homo sapiens
atagaagttaagtaa

SEQ ID NO: 900744 - DNA, 15 bp, Homo sapiens
catagaagttaagta

SEQ ID NO: 900745 - DNA, 15 bp, Homo sapiens
tcatagaagttaagt

SEQ ID NO: 900746 - DNA, 15 bp, Homo sapiens
ttcatagaagttaag

SEQ ID NO: 900747 - DNA, 15 bp, Homo sapiens
gttcatagaagttaa

SEQ ID NO: 900748 - DNA, 15 bp, Homo sapiens
agttcatagaagtta

SEQ ID NO: 900749 - DNA, 15 bp, Homo sapiens
aagttcatagaagtt

SEQ ID NO: 900750 - DNA, 15 bp, Homo sapiens
caagttcatagaagt

SEQ ID NO: 900751 - DNA, 15 bp, Homo sapiens
acaagttcatagaag

SEQ ID NO: 900752 - DNA, 15 bp, Homo sapiens
aacaagttcatagaa

SEQ ID NO: 900753 - DNA, 15 bp, Homo sapiens
gaacaagttcataga

SEQ ID NO: 900754 - DNA, 15 bp, Homo sapiens
agaacaagttcatag

SEQ ID NO: 900755 - DNA, 15 bp, Homo sapiens
gagaacaagttcata

SEQ ID NO: 900756 - DNA, 15 bp, Homo sapiens
tgagaacaagttcat

SEQ ID NO: 900757 - DNA, 15 bp, Homo sapiens
gtgagaacaagttca

SEQ ID NO: 900758 - DNA, 15 bp, Homo sapiens
agtgagaacaagttc

SEQ ID NO: 900759 - DNA, 15 bp, Homo sapiens
aagtgagaacaagtt

SEQ ID NO: 900760 - DNA, 15 bp, Homo sapiens
gaagtgagaacaagt

SEQ ID NO: 900761 - DNA, 15 bp, Homo sapiens
agaagtgagaacaag

SEQ ID NO: 900762 - DNA, 15 bp, Homo sapiens
cagaagtgagaacaa

SEQ ID NO: 900763 - DNA, 15 bp, Homo sapiens
tcagaagtgagaaca

SEQ ID NO: 900764 - DNA, 15 bp, Homo sapiens
ttcagaagtgagaac

SEQ ID NO: 900765 - DNA, 15 bp, Homo sapiens
tttcagaagtgagaa

SEQ ID NO: 900766 - DNA, 15 bp, Homo sapiens
ttttcagaagtgaga

SEQ ID NO: 900767 - DNA, 15 bp, Homo sapiens
tttttcagaagtgag

SEQ ID NO: 900768 - DNA, 15 bp, Homo sapiens
atttttcagaagtga

SEQ ID NO: 900769 - DNA, 15 bp, Homo sapiens
aatttttcagaagtg

SEQ ID NO: 900770 - DNA, 15 bp, Homo sapiens
taatttttcagaagt

SEQ ID NO: 900771 - DNA, 15 bp, Homo sapiens
ctaatttttcagaag

SEQ ID NO: 900772 - DNA, 15 bp, Homo sapiens
tctaatttttcagaa

SEQ ID NO: 900773 - DNA, 15 bp, Homo sapiens
ttctaatttttcaga

SEQ ID NO: 900774 - DNA, 15 bp, Homo sapiens
attctaatttttcag

SEQ ID NO: 900775 - DNA, 15 bp, Homo sapiens
tattctaatttttca

SEQ ID NO: 900776 - DNA, 15 bp, Homo sapiens
ttattctaatttttc

SEQ ID NO: 900777 - DNA, 15 bp, Homo sapiens
tttattctaattttt

SEQ ID NO: 900778 - DNA, 15 bp, Homo sapiens
ttttattctaatttt

SEQ ID NO: 900779 - DNA, 15 bp, Homo sapiens
attttattctaattt

SEQ ID NO: 900780 - DNA, 15 bp, Homo sapiens
aattttattctaatt

SEQ ID NO: 900781 - DNA, 15 bp, Homo sapiens
aaattttattctaat

SEQ ID NO: 900782 - DNA, 15 bp, Homo sapiens
taaattttattctaa

SEQ ID NO: 900783 - DNA, 15 bp, Homo sapiens
gtaaattttattcta

SEQ ID NO: 900784 - DNA, 15 bp, Homo sapiens
ggtaaattttattct

SEQ ID NO: 900785 - DNA, 15 bp, Homo sapiens
tggtaaattttattc

SEQ ID NO: 900786 - DNA, 15 bp, Homo sapiens
atggtaaattttatt

SEQ ID NO: 900787 - DNA, 15 bp, Homo sapiens
aatggtaaattttat

SEQ ID NO: 900788 - DNA, 15 bp, Homo sapiens
taatggtaaatttta

SEQ ID NO: 900789 - DNA, 15 bp, Homo sapiens
ctaatggtaaatttt

SEQ ID NO: 900790 - DNA, 15 bp, Homo sapiens
tctaatggtaaattt

SEQ ID NO: 900791 - DNA, 15 bp, Homo sapiens
ctctaatggtaaatt

SEQ ID NO: 900792 - DNA, 15 bp, Homo sapiens
tctctaatggtaaat

SEQ ID NO: 900793 - DNA, 15 bp, Homo sapiens
gtctctaatggtaaa

SEQ ID NO: 900794 - DNA, 15 bp, Homo sapiens
ggtctctaatggtaa

SEQ ID NO: 900795 - DNA, 15 bp, Homo sapiens
tggtctctaatggta

SEQ ID NO: 900796 - DNA, 15 bp, Homo sapiens
ctggtctctaatggt

SEQ ID NO: 900797 - DNA, 15 bp, Homo sapiens
cctggtctctaatgg

SEQ ID NO: 900798 - DNA, 15 bp, Homo sapiens
gcctggtctctaatg

SEQ ID NO: 900799 - DNA, 15 bp, Homo sapiens
tgcctggtctctaat

SEQ ID NO: 900800 - DNA, 15 bp, Homo sapiens
gtgcctggtctctaa

SEQ ID NO: 900801 - DNA, 15 bp, Homo sapiens
ggtgcctggtctcta

SEQ ID NO: 900802 - DNA, 15 bp, Homo sapiens
aggtgcctggtctct

SEQ ID NO: 900803 - DNA, 15 bp, Homo sapiens
aaggtgcctggtctc

SEQ ID NO: 900804 - DNA, 15 bp, Homo sapiens
caaggtgcctggtct

SEQ ID NO: 900805 - DNA, 15 bp, Homo sapiens
tcaaggtgcctggtc

SEQ ID NO: 900806 - DNA, 15 bp, Homo sapiens
ctcaaggtgcctggt

SEQ ID NO: 900807 - DNA, 15 bp, Homo sapiens
actcaaggtgcctgg

SEQ ID NO: 900808 - DNA, 15 bp, Homo sapiens
aactcaaggtgcctg

SEQ ID NO: 900809 - DNA, 15 bp, Homo sapiens
aaactcaaggtgcct

SEQ ID NO: 900810 - DNA, 15 bp, Homo sapiens
taaactcaaggtgcc

SEQ ID NO: 900811 - DNA, 15 bp, Homo sapiens
ataaactcaaggtgc

SEQ ID NO: 900812 - DNA, 15 bp, Homo sapiens
cataaactcaaggtg

SEQ ID NO: 900813 - DNA, 15 bp, Homo sapiens
tcataaactcaaggt

SEQ ID NO: 900814 - DNA, 15 bp, Homo sapiens
ttcataaactcaagg

SEQ ID NO: 900815 - DNA, 15 bp, Homo sapiens
attcataaactcaag

SEQ ID NO: 900816 - DNA, 15 bp, Homo sapiens
cattcataaactcaa

SEQ ID NO: 900817 - DNA, 15 bp, Homo sapiens
acattcataaactca

SEQ ID NO: 900818 - DNA, 15 bp, Homo sapiens
cacattcataaactc

SEQ ID NO: 900819 - DNA, 15 bp, Homo sapiens
tcacattcataaact

SEQ ID NO: 900820 - DNA, 15 bp, Homo sapiens
ctcacattcataaac

SEQ ID NO: 900821 - DNA, 15 bp, Homo sapiens
gctcacattcataaa

SEQ ID NO: 900822 - DNA, 15 bp, Homo sapiens
tgctcacattcataa

SEQ ID NO: 900823 - DNA, 15 bp, Homo sapiens
ttgctcacattcata

SEQ ID NO: 900824 - DNA, 15 bp, Homo sapiens
cttgctcacattcat

SEQ ID NO: 900825 - DNA, 15 bp, Homo sapiens
tcttgctcacattca

SEQ ID NO: 900826 - DNA, 15 bp, Homo sapiens
ctcttgctcacattc

SEQ ID NO: 900827 - DNA, 15 bp, Homo sapiens
cctcttgctcacatt

SEQ ID NO: 900828 - DNA, 15 bp, Homo sapiens
ccctcttgctcacat

SEQ ID NO: 900829 - DNA, 15 bp, Homo sapiens
accctcttgctcaca

SEQ ID NO: 900830 - DNA, 15 bp, Homo sapiens
caccctcttgctcac

SEQ ID NO: 900831 - DNA, 15 bp, Homo sapiens
ccaccctcttgctca

SEQ ID NO: 900832 - DNA, 15 bp, Homo sapiens
accaccctcttgctc

SEQ ID NO: 900833 - DNA, 15 bp, Homo sapiens
caccaccctcttgct

SEQ ID NO: 900834 - DNA, 15 bp, Homo sapiens
ccaccaccctcttgc

SEQ ID NO: 900835 - DNA, 15 bp, Homo sapiens
gccaccaccctcttg

SEQ ID NO: 900836 - DNA, 15 bp, Homo sapiens
tgccaccaccctctt

SEQ ID NO: 900837 - DNA, 15 bp, Homo sapiens
ctgccaccaccctct

SEQ ID NO: 900838 - DNA, 15 bp, Homo sapiens
tctgccaccaccctc

SEQ ID NO: 900839 - DNA, 15 bp, Homo sapiens
ttctgccaccaccct

SEQ ID NO: 900840 - DNA, 15 bp, Homo sapiens
cttctgccaccaccc

SEQ ID NO: 900841 - DNA, 15 bp, Homo sapiens
ccttctgccaccacc

SEQ ID NO: 900842 - DNA, 15 bp, Homo sapiens
cccttctgccaccac

SEQ ID NO: 900843 - DNA, 15 bp, Homo sapiens
acccttctgccacca

SEQ ID NO: 900844 - DNA, 15 bp, Homo sapiens
tacccttctgccacc

SEQ ID NO: 900845 - DNA, 15 bp, Homo sapiens
ctacccttctgccac

SEQ ID NO: 900846 - DNA, 15 bp, Homo sapiens
tctacccttctgcca

SEQ ID NO: 900847 - DNA, 15 bp, Homo sapiens
ttctacccttctgcc

SEQ ID NO: 900848 - DNA, 15 bp, Homo sapiens
tttctacccttctgc

SEQ ID NO: 900849 - DNA, 15 bp, Homo sapiens
ttttctacccttctg

SEQ ID NO: 900850 - DNA, 15 bp, Homo sapiens
cttttctacccttct

SEQ ID NO: 900851 - DNA, 15 bp, Homo sapiens
tcttttctacccttc

SEQ ID NO: 900852 - DNA, 15 bp, Homo sapiens
ctcttttctaccctt

SEQ ID NO: 900853 - DNA, 15 bp, Homo sapiens
actcttttctaccct

SEQ ID NO: 900854 - DNA, 15 bp, Homo sapiens
tactcttttctaccc

SEQ ID NO: 900855 - DNA, 15 bp, Homo sapiens
ttactcttttctacc

SEQ ID NO: 900856 - DNA, 15 bp, Homo sapiens
attactcttttctac

SEQ ID NO: 900857 - DNA, 15 bp, Homo sapiens
tattactcttttcta

SEQ ID NO: 900858 - DNA, 15 bp, Homo sapiens
gtattactcttttct

SEQ ID NO: 900859 - DNA, 15 bp, Homo sapiens
tgtattactcttttc

SEQ ID NO: 900860 - DNA, 15 bp, Homo sapiens
ctgtattactctttt

SEQ ID NO: 900861 - DNA, 15 bp, Homo sapiens
tctgtattactcttt

SEQ ID NO: 900862 - DNA, 15 bp, Homo sapiens
gtctgtattactctt

SEQ ID NO: 900863 - DNA, 15 bp, Homo sapiens
tgtctgtattactct

SEQ ID NO: 900864 - DNA, 15 bp, Homo sapiens
ttgtctgtattactc

SEQ ID NO: 900865 - DNA, 15 bp, Homo sapiens
tttgtctgtattact

SEQ ID NO: 900866 - DNA, 15 bp, Homo sapiens
gtttgtctgtattac

SEQ ID NO: 900867 - DNA, 15 bp, Homo sapiens
cgtttgtctgtatta

SEQ ID NO: 900868 - DNA, 15 bp, Homo sapiens
tcgtttgtctgtatt

SEQ ID NO: 900869 - DNA, 15 bp, Homo sapiens
ttcgtttgtctgtat

SEQ ID NO: 900870 - DNA, 15 bp, Homo sapiens
tttcgtttgtctgta

SEQ ID NO: 900871 - DNA, 15 bp, Homo sapiens
gtttcgtttgtctgt

SEQ ID NO: 900872 - DNA, 15 bp, Homo sapiens
agtttcgtttgtctg

SEQ ID NO: 900873 - DNA, 15 bp, Homo sapiens
aagtttcgtttgtct

SEQ ID NO: 900874 - DNA, 15 bp, Homo sapiens
caagtttcgtttgtc

SEQ ID NO: 900875 - DNA, 15 bp, Homo sapiens
acaagtttcgtttgt

SEQ ID NO: 900876 - DNA, 15 bp, Homo sapiens
tacaagtttcgtttg

SEQ ID NO: 900877 - DNA, 15 bp, Homo sapiens
ttacaagtttcgttt

SEQ ID NO: 900878 - DNA, 15 bp, Homo sapiens
cttacaagtttcgtt

SEQ ID NO: 900879 - DNA, 15 bp, Homo sapiens
acttacaagtttcgt

SEQ ID NO: 900880 - DNA, 15 bp, Homo sapiens
cacttacaagtttcg

SEQ ID NO: 900881 - DNA, 15 bp, Homo sapiens
tcacttacaagtttc

SEQ ID NO: 900882 - DNA, 15 bp, Homo sapiens
ttcacttacaagttt

SEQ ID NO: 900883 - DNA, 15 bp, Homo sapiens
attcacttacaagtt

SEQ ID NO: 900884 - DNA, 15 bp, Homo sapiens
tattcacttacaagt

SEQ ID NO: 900885 - DNA, 15 bp, Homo sapiens
gtattcacttacaag

SEQ ID NO: 900886 - DNA, 15 bp, Homo sapiens
tgtattcacttacaa

SEQ ID NO: 900887 - DNA, 15 bp, Homo sapiens
atgtattcacttaca

SEQ ID NO: 900888 - DNA, 15 bp, Homo sapiens
tatgtattcacttac

SEQ ID NO: 900889 - DNA, 15 bp, Homo sapiens
ttatgtattcactta

SEQ ID NO: 900890 - DNA, 15 bp, Homo sapiens
tttatgtattcactt

SEQ ID NO: 900891 - DNA, 15 bp, Homo sapiens
ttttatgtattcact

SEQ ID NO: 900892 - DNA, 15 bp, Homo sapiens
tttttatgtattcac

SEQ ID NO: 900893 - DNA, 15 bp, Homo sapiens
atttttatgtattca

SEQ ID NO: 900894 - DNA, 15 bp, Homo sapiens
tatttttatgtattc

SEQ ID NO: 900895 - DNA, 15 bp, Homo sapiens
ttatttttatgtatt

SEQ ID NO: 900896 - DNA, 15 bp, Homo sapiens
cttatttttatgtat

SEQ ID NO: 900897 - DNA, 15 bp, Homo sapiens
acttatttttatgta

SEQ ID NO: 900898 - DNA, 15 bp, Homo sapiens
aacttatttttatgt

SEQ ID NO: 900899 - DNA, 15 bp, Homo sapiens
taacttatttttatg

SEQ ID NO: 900900 - DNA, 15 bp, Homo sapiens
ataacttatttttat

SEQ ID NO: 900901 - DNA, 15 bp, Homo sapiens
tataacttattttta

SEQ ID NO: 900902 - DNA, 15 bp, Homo sapiens
ttataacttattttt

SEQ ID NO: 900903 - DNA, 15 bp, Homo sapiens
gttataacttatttt

SEQ ID NO: 900904 - DNA, 15 bp, Homo sapiens
cgttataacttattt

SEQ ID NO: 900905 - DNA, 15 bp, Homo sapiens
tcgttataacttatt

SEQ ID NO: 900906 - DNA, 15 bp, Homo sapiens
ttcgttataacttat

SEQ ID NO: 900907 - DNA, 15 bp, Homo sapiens
attcgttataactta

SEQ ID NO: 900908 - DNA, 15 bp, Homo sapiens
cattcgttataactt

SEQ ID NO: 900909 - DNA, 15 bp, Homo sapiens
tcattcgttataact

SEQ ID NO: 900910 - DNA, 15 bp, Homo sapiens
ttcattcgttataac

SEQ ID NO: 900911 - DNA, 15 bp, Homo sapiens
tttcattcgttataa

SEQ ID NO: 900912 - DNA, 15 bp, Homo sapiens
ttttcattcgttata

SEQ ID NO: 900913 - DNA, 15 bp, Homo sapiens
tttttcattcgttat

SEQ ID NO: 900914 - DNA, 15 bp, Homo sapiens
ttttttcattcgtta

SEQ ID NO: 900915 - DNA, 15 bp, Homo sapiens
tttttttcattcgtt

SEQ ID NO: 900916 - DNA, 15 bp, Homo sapiens
ttttttttcattcgt

SEQ ID NO: 900917 - DNA, 15 bp, Homo sapiens
tttttttttcattcg

SEQ ID NO: 900918 - DNA, 15 bp, Homo sapiens
ttttttttttcattc

SEQ ID NO: 900919 - DNA, 15 bp, Homo sapiens
gttttttttttcatt

SEQ ID NO: 900920 - DNA, 15 bp, Homo sapiens
tgttttttttttcat

SEQ ID NO: 900921 - DNA, 15 bp, Homo sapiens
ctgttttttttttca

SEQ ID NO: 900922 - DNA, 15 bp, Homo sapiens
tctgttttttttttc

SEQ ID NO: 900923 - DNA, 15 bp, Homo sapiens
ttctgtttttttttt

SEQ ID NO: 900924 - DNA, 15 bp, Homo sapiens
cttctgttttttttt

SEQ ID NO: 900925 - DNA, 15 bp, Homo sapiens
tcttctgtttttttt

SEQ ID NO: 900926 - DNA, 15 bp, Homo sapiens
ttcttctgttttttt

SEQ ID NO: 900927 - DNA, 15 bp, Homo sapiens
tttcttctgtttttt

SEQ ID NO: 900928 - DNA, 15 bp, Homo sapiens
ttttcttctgttttt

SEQ ID NO: 900929 - DNA, 15 bp, Homo sapiens
cttttcttctgtttt

SEQ ID NO: 900930 - DNA, 15 bp, Homo sapiens
ccttttcttctgttt

SEQ ID NO: 900931 - DNA, 15 bp, Homo sapiens
accttttcttctgtt

SEQ ID NO: 900932 - DNA, 15 bp, Homo sapiens
caccttttcttctgt

SEQ ID NO: 900933 - DNA, 15 bp, Homo sapiens
acaccttttcttctg

SEQ ID NO: 900934 - DNA, 15 bp, Homo sapiens
aacaccttttcttct

SEQ ID NO: 900935 - DNA, 15 bp, Homo sapiens
taacaccttttcttc

SEQ ID NO: 900936 - DNA, 15 bp, Homo sapiens
ctaacaccttttctt

SEQ ID NO: 900937 - DNA, 15 bp, Homo sapiens
tctaacaccttttct

SEQ ID NO: 900938 - DNA, 15 bp, Homo sapiens
ctctaacaccttttc

SEQ ID NO: 900939 - DNA, 15 bp, Homo sapiens
tctctaacacctttt

SEQ ID NO: 900940 - DNA, 15 bp, Homo sapiens
ttctctaacaccttt

SEQ ID NO: 900941 - DNA, 15 bp, Homo sapiens
tttctctaacacctt

SEQ ID NO: 900942 - DNA, 15 bp, Homo sapiens
ttttctctaacacct

SEQ ID NO: 900943 - DNA, 15 bp, Homo sapiens
gttttctctaacacc

SEQ ID NO: 900944 - DNA, 15 bp, Homo sapiens
tgttttctctaacac

SEQ ID NO: 900945 - DNA, 15 bp, Homo sapiens
ctgttttctctaaca

SEQ ID NO: 900946 - DNA, 15 bp, Homo sapiens
tctgttttctctaac

SEQ ID NO: 900947 - DNA, 15 bp, Homo sapiens
gtctgttttctctaa

SEQ ID NO: 900948 - DNA, 15 bp, Homo sapiens
agtctgttttctcta

SEQ ID NO: 900949 - DNA, 15 bp, Homo sapiens
aagtctgttttctct

SEQ ID NO: 900950 - DNA, 15 bp, Homo sapiens
gaagtctgttttctc

SEQ ID NO: 900951 - DNA, 15 bp, Homo sapiens
agaagtctgttttct

SEQ ID NO: 900952 - DNA, 15 bp, Homo sapiens
tagaagtctgttttc

SEQ ID NO: 900953 - DNA, 15 bp, Homo sapiens
atagaagtctgtttt

SEQ ID NO: 900954 - DNA, 15 bp, Homo sapiens
aatagaagtctgttt

SEQ ID NO: 900955 - DNA, 15 bp, Homo sapiens
taatagaagtctgtt

SEQ ID NO: 900956 - DNA, 15 bp, Homo sapiens
ataatagaagtctgt

SEQ ID NO: 900957 - DNA, 15 bp, Homo sapiens
cataatagaagtctg

SEQ ID NO: 900958 - DNA, 15 bp, Homo sapiens
tcataatagaagtct

SEQ ID NO: 900959 - DNA, 15 bp, Homo sapiens
ttcataatagaagtc

SEQ ID NO: 900960 - DNA, 15 bp, Homo sapiens
tttcataatagaagt

SEQ ID NO: 900961 - DNA, 15 bp, Homo sapiens
ttttcataatagaag

SEQ ID NO: 900962 - DNA, 15 bp, Homo sapiens
gttttcataatagaa

SEQ ID NO: 900963 - DNA, 15 bp, Homo sapiens
tgttttcataataga

SEQ ID NO: 900964 - DNA, 15 bp, Homo sapiens
ttgttttcataatag

SEQ ID NO: 900965 - DNA, 15 bp, Homo sapiens
tttgttttcataata

SEQ ID NO: 900966 - DNA, 15 bp, Homo sapiens
gtttgttttcataat

SEQ ID NO: 900967 - DNA, 15 bp, Homo sapiens
tgtttgttttcataa

SEQ ID NO: 900968 - DNA, 15 bp, Homo sapiens
gtgtttgttttcata

SEQ ID NO: 900969 - DNA, 15 bp, Homo sapiens
cgtgtttgttttcat

SEQ ID NO: 900970 - DNA, 15 bp, Homo sapiens
gcgtgtttgttttca

SEQ ID NO: 900971 - DNA, 15 bp, Homo sapiens
tgcgtgtttgttttc

SEQ ID NO: 900972 - DNA, 15 bp, Homo sapiens
ctgcgtgtttgtttt

SEQ ID NO: 900973 - DNA, 15 bp, Homo sapiens
actgcgtgtttgttt

SEQ ID NO: 900974 - DNA, 15 bp, Homo sapiens
tactgcgtgtttgtt

SEQ ID NO: 900975 - DNA, 15 bp, Homo sapiens
ctactgcgtgtttgt

SEQ ID NO: 900976 - DNA, 15 bp, Homo sapiens
actactgcgtgtttg

SEQ ID NO: 900977 - DNA, 15 bp, Homo sapiens
gactactgcgtgttt

SEQ ID NO: 900978 - DNA, 15 bp, Homo sapiens
tgactactgcgtgtt

SEQ ID NO: 900979 - DNA, 15 bp, Homo sapiens
ctgactactgcgtgt

SEQ ID NO: 900980 - DNA, 15 bp, Homo sapiens
gctgactactgcgtg

SEQ ID NO: 900981 - DNA, 15 bp, Homo sapiens
tgctgactactgcgt

SEQ ID NO: 900982 - DNA, 15 bp, Homo sapiens
atgctgactactgcg

SEQ ID NO: 900983 - DNA, 15 bp, Homo sapiens
tatgctgactactgc

SEQ ID NO: 900984 - DNA, 15 bp, Homo sapiens
ctatgctgactactg

SEQ ID NO: 900985 - DNA, 15 bp, Homo sapiens
actatgctgactact

SEQ ID NO: 900986 - DNA, 15 bp, Homo sapiens
cactatgctgactac

SEQ ID NO: 900987 - DNA, 15 bp, Homo sapiens
acactatgctgacta

SEQ ID NO: 900988 - DNA, 15 bp, Homo sapiens
tacactatgctgact

SEQ ID NO: 900989 - DNA, 15 bp, Homo sapiens
atacactatgctgac

SEQ ID NO: 900990 - DNA, 15 bp, Homo sapiens
catacactatgctga

SEQ ID NO: 900991 - DNA, 15 bp, Homo sapiens
tcatacactatgctg

SEQ ID NO: 900992 - DNA, 15 bp, Homo sapiens
gtcatacactatgct

SEQ ID NO: 900993 - DNA, 15 bp, Homo sapiens
tgtcatacactatgc

SEQ ID NO: 900994 - DNA, 15 bp, Homo sapiens
atgtcatacactatg

SEQ ID NO: 900995 - DNA, 15 bp, Homo sapiens
tatgtcatacactat

SEQ ID NO: 900996 - DNA, 15 bp, Homo sapiens
ttatgtcatacacta

SEQ ID NO: 900997 - DNA, 15 bp, Homo sapiens
gttatgtcatacact

SEQ ID NO: 900998 - DNA, 15 bp, Homo sapiens
tgttatgtcatacac

SEQ ID NO: 900999 - DNA, 15 bp, Homo sapiens
atgttatgtcataca

SEQ ID NO: 901000 - DNA, 15 bp, Homo sapiens
catgttatgtcatac

SEQ ID NO: 901001 - DNA, 15 bp, Homo sapiens
acatgttatgtcata

SEQ ID NO: 901002 - DNA, 15 bp, Homo sapiens
cacatgttatgtcat

SEQ ID NO: 901003 - DNA, 15 bp, Homo sapiens
gcacatgttatgtca

SEQ ID NO: 901004 - DNA, 15 bp, Homo sapiens
agcacatgttatgtc

SEQ ID NO: 901005 - DNA, 15 bp, Homo sapiens
gagcacatgttatgt

SEQ ID NO: 901006 - DNA, 15 bp, Homo sapiens
tgagcacatgttatg

SEQ ID NO: 901007 - DNA, 15 bp, Homo sapiens
ctgagcacatgttat

SEQ ID NO: 901008 - DNA, 15 bp, Homo sapiens
actgagcacatgtta

SEQ ID NO: 901009 - DNA, 15 bp, Homo sapiens
tactgagcacatgtt

SEQ ID NO: 901010 - DNA, 15 bp, Homo sapiens
ttactgagcacatgt

SEQ ID NO: 901011 - DNA, 15 bp, Homo sapiens
gttactgagcacatg

SEQ ID NO: 901012 - DNA, 15 bp, Homo sapiens
agttactgagcacat

SEQ ID NO: 901013 - DNA, 15 bp, Homo sapiens
tagttactgagcaca

SEQ ID NO: 901014 - DNA, 15 bp, Homo sapiens
atagttactgagcac

SEQ ID NO: 901015 - DNA, 15 bp, Homo sapiens
aatagttactgagca

SEQ ID NO: 901016 - DNA, 15 bp, Homo sapiens
taatagttactgagc

SEQ ID NO: 901017 - DNA, 15 bp, Homo sapiens
ttaatagttactgag

SEQ ID NO: 901018 - DNA, 15 bp, Homo sapiens
tttaatagttactga

SEQ ID NO: 901019 - DNA, 15 bp, Homo sapiens
atttaatagttactg

SEQ ID NO: 901020 - DNA, 15 bp, Homo sapiens
aatttaatagttact

SEQ ID NO: 901021 - DNA, 15 bp, Homo sapiens
aaatttaatagttac

SEQ ID NO: 901022 - DNA, 15 bp, Homo sapiens
gaaatttaatagtta

SEQ ID NO: 901023 - DNA, 15 bp, Homo sapiens
tgaaatttaatagtt

SEQ ID NO: 901024 - DNA, 15 bp, Homo sapiens
atgaaatttaatagt

SEQ ID NO: 901025 - DNA, 15 bp, Homo sapiens
aatgaaatttaatag

SEQ ID NO: 901026 - DNA, 15 bp, Homo sapiens
gaatgaaatttaata

SEQ ID NO: 901027 - DNA, 15 bp, Homo sapiens
ggaatgaaatttaat

SEQ ID NO: 901028 - DNA, 15 bp, Homo sapiens
aggaatgaaatttaa

SEQ ID NO: 901029 - DNA, 15 bp, Homo sapiens
taggaatgaaattta

SEQ ID NO: 901030 - DNA, 15 bp, Homo sapiens
gtaggaatgaaattt

SEQ ID NO: 901031 - DNA, 15 bp, Homo sapiens
ggtaggaatgaaatt

SEQ ID NO: 901032 - DNA, 15 bp, Homo sapiens
tggtaggaatgaaat

SEQ ID NO: 901033 - DNA, 15 bp, Homo sapiens
atggtaggaatgaaa

SEQ ID NO: 901034 - DNA, 15 bp, Homo sapiens
aatggtaggaatgaa

SEQ ID NO: 901035 - DNA, 15 bp, Homo sapiens
caatggtaggaatga

SEQ ID NO: 901036 - DNA, 15 bp, Homo sapiens
acaatggtaggaatg

SEQ ID NO: 901037 - DNA, 15 bp, Homo sapiens
gacaatggtaggaat

SEQ ID NO: 901038 - DNA, 15 bp, Homo sapiens
tgacaatggtaggaa

SEQ ID NO: 901039 - DNA, 15 bp, Homo sapiens
ctgacaatggtagga

SEQ ID NO: 901040 - DNA, 15 bp, Homo sapiens
tctgacaatggtagg

SEQ ID NO: 901041 - DNA, 15 bp, Homo sapiens
ctctgacaatggtag

SEQ ID NO: 901042 - DNA, 15 bp, Homo sapiens
cctctgacaatggta

SEQ ID NO: 901043 - DNA, 15 bp, Homo sapiens
acctctgacaatggt

SEQ ID NO: 901044 - DNA, 15 bp, Homo sapiens
tacctctgacaatgg

SEQ ID NO: 901045 - DNA, 15 bp, Homo sapiens
atacctctgacaatg

SEQ ID NO: 901046 - DNA, 15 bp, Homo sapiens
aatacctctgacaat

SEQ ID NO: 901047 - DNA, 15 bp, Homo sapiens
aaatacctctgacaa

SEQ ID NO: 901048 - DNA, 15 bp, Homo sapiens
caaatacctctgaca

SEQ ID NO: 901049 - DNA, 15 bp, Homo sapiens
tcaaatacctctgac

SEQ ID NO: 901050 - DNA, 15 bp, Homo sapiens
ttcaaatacctctga

SEQ ID NO: 901051 - DNA, 15 bp, Homo sapiens
attcaaatacctctg

SEQ ID NO: 901052 - DNA, 15 bp, Homo sapiens
gattcaaatacctct

SEQ ID NO: 901053 - DNA, 15 bp, Homo sapiens
tgattcaaatacctc

SEQ ID NO: 901054 - DNA, 15 bp, Homo sapiens
gtgattcaaatacct

SEQ ID NO: 901055 - DNA, 15 bp, Homo sapiens
tgtgattcaaatacc

SEQ ID NO: 901056 - DNA, 15 bp, Homo sapiens
ttgtgattcaaatac

SEQ ID NO: 901057 - DNA, 15 bp, Homo sapiens
gttgtgattcaaata

SEQ ID NO: 901058 - DNA, 15 bp, Homo sapiens
tgttgtgattcaaat

SEQ ID NO: 901059 - DNA, 15 bp, Homo sapiens
ttgttgtgattcaaa

SEQ ID NO: 901060 - DNA, 15 bp, Homo sapiens
gttgttgtgattcaa

SEQ ID NO: 901061 - DNA, 15 bp, Homo sapiens
agttgttgtgattca

SEQ ID NO: 901062 - DNA, 15 bp, Homo sapiens
gagttgttgtgattc

SEQ ID NO: 901063 - DNA, 15 bp, Homo sapiens
ggagttgttgtgatt

SEQ ID NO: 901064 - DNA, 15 bp, Homo sapiens
tggagttgttgtgat

SEQ ID NO: 901065 - DNA, 15 bp, Homo sapiens
atggagttgttgtga

SEQ ID NO: 901066 - DNA, 15 bp, Homo sapiens
gatggagttgttgtg

SEQ ID NO: 901067 - DNA, 15 bp, Homo sapiens
agatggagttgttgt

SEQ ID NO: 901068 - DNA, 15 bp, Homo sapiens
aagatggagttgttg

SEQ ID NO: 901069 - DNA, 15 bp, Homo sapiens
caagatggagttgtt

SEQ ID NO: 901070 - DNA, 15 bp, Homo sapiens
tcaagatggagttgt

SEQ ID NO: 901071 - DNA, 15 bp, Homo sapiens
ttcaagatggagttg

SEQ ID NO: 901072 - DNA, 15 bp, Homo sapiens
attcaagatggagtt

SEQ ID NO: 901073 - DNA, 15 bp, Homo sapiens
tattcaagatggagt

SEQ ID NO: 901074 - DNA, 15 bp, Homo sapiens
ctattcaagatggag

SEQ ID NO: 901075 - DNA, 15 bp, Homo sapiens
cctattcaagatgga

SEQ ID NO: 901076 - DNA, 15 bp, Homo sapiens
ccctattcaagatgg

SEQ ID NO: 901077 - DNA, 15 bp, Homo sapiens
cccctattcaagatg

SEQ ID NO: 901078 - DNA, 15 bp, Homo sapiens
gcccctattcaagat

SEQ ID NO: 901079 - DNA, 15 bp, Homo sapiens
agcccctattcaaga

SEQ ID NO: 901080 - DNA, 15 bp, Homo sapiens
cagcccctattcaag

SEQ ID NO: 901081 - DNA, 15 bp, Homo sapiens
ccagcccctattcaa

SEQ ID NO: 901082 - DNA, 15 bp, Homo sapiens
cccagcccctattca

SEQ ID NO: 901083 - DNA, 15 bp, Homo sapiens
acccagcccctattc

SEQ ID NO: 901084 - DNA, 15 bp, Homo sapiens
tacccagcccctatt

SEQ ID NO: 901085 - DNA, 15 bp, Homo sapiens
ttacccagcccctat

SEQ ID NO: 901086 - DNA, 15 bp, Homo sapiens
tttacccagccccta

SEQ ID NO: 901087 - DNA, 15 bp, Homo sapiens
ttttacccagcccct

SEQ ID NO: 901088 - DNA, 15 bp, Homo sapiens
attttacccagcccc

SEQ ID NO: 901089 - DNA, 15 bp, Homo sapiens
tattttacccagccc

SEQ ID NO: 901090 - DNA, 15 bp, Homo sapiens
ttattttacccagcc

SEQ ID NO: 901091 - DNA, 15 bp, Homo sapiens
cttattttacccagc

SEQ ID NO: 901092 - DNA, 15 bp, Homo sapiens
ccttattttacccag

SEQ ID NO: 901093 - DNA, 15 bp, Homo sapiens
cccttattttaccca

SEQ ID NO: 901094 - DNA, 15 bp, Homo sapiens
acccttattttaccc

SEQ ID NO: 901095 - DNA, 15 bp, Homo sapiens
cacccttattttacc

SEQ ID NO: 901096 - DNA, 15 bp, Homo sapiens
tcacccttattttac

SEQ ID NO: 901097 - DNA, 15 bp, Homo sapiens
ctcacccttatttta

SEQ ID NO: 901098 - DNA, 15 bp, Homo sapiens
tctcacccttatttt

SEQ ID NO: 901099 - DNA, 15 bp, Homo sapiens
gtctcacccttattt

SEQ ID NO: 901100 - DNA, 15 bp, Homo sapiens
ggtctcacccttatt

SEQ ID NO: 901101 - DNA, 15 bp, Homo sapiens
aggtctcacccttat

SEQ ID NO: 901102 - DNA, 15 bp, Homo sapiens
taggtctcaccctta

SEQ ID NO: 901103 - DNA, 15 bp, Homo sapiens
gtaggtctcaccctt

SEQ ID NO: 901104 - DNA, 15 bp, Homo sapiens
agtaggtctcaccct

SEQ ID NO: 901105 - DNA, 15 bp, Homo sapiens
cagtaggtctcaccc

SEQ ID NO: 901106 - DNA, 15 bp, Homo sapiens
ccagtaggtctcacc

SEQ ID NO: 901107 - DNA, 15 bp, Homo sapiens
cccagtaggtctcac

SEQ ID NO: 901108 - DNA, 15 bp, Homo sapiens
gcccagtaggtctca

SEQ ID NO: 901109 - DNA, 15 bp, Homo sapiens
agcccagtaggtctc

SEQ ID NO: 901110 - DNA, 15 bp, Homo sapiens
cagcccagtaggtct

SEQ ID NO: 901111 - DNA, 15 bp, Homo sapiens
gcagcccagtaggtc

SEQ ID NO: 901112 - DNA, 15 bp, Homo sapiens
tgcagcccagtaggt

SEQ ID NO: 901113 - DNA, 15 bp, Homo sapiens
atgcagcccagtagg

SEQ ID NO: 901114 - DNA, 15 bp, Homo sapiens
aatgcagcccagtag

SEQ ID NO: 901115 - DNA, 15 bp, Homo sapiens
gaatgcagcccagta

SEQ ID NO: 901116 - DNA, 15 bp, Homo sapiens
agaatgcagcccagt

SEQ ID NO: 901117 - DNA, 15 bp, Homo sapiens
gagaatgcagcccag

SEQ ID NO: 901118 - DNA, 15 bp, Homo sapiens
tgagaatgcagccca

SEQ ID NO: 901119 - DNA, 15 bp, Homo sapiens
ctgagaatgcagccc

SEQ ID NO: 901120 - DNA, 15 bp, Homo sapiens
cctgagaatgcagcc

SEQ ID NO: 901121 - DNA, 15 bp, Homo sapiens
tcctgagaatgcagc

SEQ ID NO: 901122 - DNA, 15 bp, Homo sapiens
atcctgagaatgcag

SEQ ID NO: 901123 - DNA, 15 bp, Homo sapiens
catcctgagaatgca

SEQ ID NO: 901124 - DNA, 15 bp, Homo sapiens
acatcctgagaatgc

SEQ ID NO: 901125 - DNA, 15 bp, Homo sapiens
gacatcctgagaatg

SEQ ID NO: 901126 - DNA, 15 bp, Homo sapiens
agacatcctgagaat

SEQ ID NO: 901127 - DNA, 15 bp, Homo sapiens
cagacatcctgagaa

SEQ ID NO: 901128 - DNA, 15 bp, Homo sapiens
acagacatcctgaga

SEQ ID NO: 901129 - DNA, 15 bp, Homo sapiens
gacagacatcctgag

SEQ ID NO: 901130 - DNA, 15 bp, Homo sapiens
tgacagacatcctga

SEQ ID NO: 901131 - DNA, 15 bp, Homo sapiens
ctgacagacatcctg

SEQ ID NO: 901132 - DNA, 15 bp, Homo sapiens
actgacagacatcct

SEQ ID NO: 901133 - DNA, 15 bp, Homo sapiens
gactgacagacatcc

SEQ ID NO: 901134 - DNA, 15 bp, Homo sapiens
tgactgacagacatc

SEQ ID NO: 901135 - DNA, 15 bp, Homo sapiens
atgactgacagacat

SEQ ID NO: 901136 - DNA, 15 bp, Homo sapiens
aatgactgacagaca

SEQ ID NO: 901137 - DNA, 15 bp, Homo sapiens
gaatgactgacagac

SEQ ID NO: 901138 - DNA, 15 bp, Homo sapiens
agaatgactgacaga

SEQ ID NO: 901139 - DNA, 15 bp, Homo sapiens
tagaatgactgacag

SEQ ID NO: 901140 - DNA, 15 bp, Homo sapiens
ttagaatgactgaca

SEQ ID NO: 901141 - DNA, 15 bp, Homo sapiens
cttagaatgactgac

SEQ ID NO: 901142 - DNA, 15 bp, Homo sapiens
acttagaatgactga

SEQ ID NO: 901143 - DNA, 15 bp, Homo sapiens
gacttagaatgactg

SEQ ID NO: 901144 - DNA, 15 bp, Homo sapiens
tgacttagaatgact

SEQ ID NO: 901145 - DNA, 15 bp, Homo sapiens
gtgacttagaatgac

SEQ ID NO: 901146 - DNA, 15 bp, Homo sapiens
tgtgacttagaatga

SEQ ID NO: 901147 - DNA, 15 bp, Homo sapiens
ctgtgacttagaatg

SEQ ID NO: 901148 - DNA, 15 bp, Homo sapiens
cctgtgacttagaat

SEQ ID NO: 901149 - DNA, 15 bp, Homo sapiens
tcctgtgacttagaa

SEQ ID NO: 901150 - DNA, 15 bp, Homo sapiens
atcctgtgacttaga

SEQ ID NO: 901151 - DNA, 15 bp, Homo sapiens
catcctgtgacttag

SEQ ID NO: 901152 - DNA, 15 bp, Homo sapiens
tcatcctgtgactta

SEQ ID NO: 901153 - DNA, 15 bp, Homo sapiens
ctcatcctgtgactt

SEQ ID NO: 901154 - DNA, 15 bp, Homo sapiens
tctcatcctgtgact

SEQ ID NO: 901155 - DNA, 15 bp, Homo sapiens
atctcatcctgtgac

SEQ ID NO: 901156 - DNA, 15 bp, Homo sapiens
tatctcatcctgtga

SEQ ID NO: 901157 - DNA, 15 bp, Homo sapiens
ctatctcatcctgtg

SEQ ID NO: 901158 - DNA, 15 bp, Homo sapiens
cctatctcatcctgt

SEQ ID NO: 901159 - DNA, 15 bp, Homo sapiens
tcctatctcatcctg

SEQ ID NO: 901160 - DNA, 15 bp, Homo sapiens
ctcctatctcatcct

SEQ ID NO: 901161 - DNA, 15 bp, Homo sapiens
cctcctatctcatcc

SEQ ID NO: 901162 - DNA, 15 bp, Homo sapiens
acctcctatctcatc

SEQ ID NO: 901163 - DNA, 15 bp, Homo sapiens
cacctcctatctcat

SEQ ID NO: 901164 - DNA, 15 bp, Homo sapiens
ccacctcctatctca

SEQ ID NO: 901165 - DNA, 15 bp, Homo sapiens
cccacctcctatctc

SEQ ID NO: 901166 - DNA, 15 bp, Homo sapiens
gcccacctcctatct

SEQ ID NO: 901167 - DNA, 15 bp, Homo sapiens
tgcccacctcctatc

SEQ ID NO: 901168 - DNA, 15 bp, Homo sapiens
gtgcccacctcctat

SEQ ID NO: 901169 - DNA, 15 bp, Homo sapiens
tgtgcccacctccta

SEQ ID NO: 901170 - DNA, 15 bp, Homo sapiens
ttgtgcccacctcct

SEQ ID NO: 901171 - DNA, 15 bp, Homo sapiens
cttgtgcccacctcc

SEQ ID NO: 901172 - DNA, 15 bp, Homo sapiens
tcttgtgcccacctc

SEQ ID NO: 901173 - DNA, 15 bp, Homo sapiens
atcttgtgcccacct

SEQ ID NO: 901174 - DNA, 15 bp, Homo sapiens
tatcttgtgcccacc

SEQ ID NO: 901175 - DNA, 15 bp, Homo sapiens
gtatcttgtgcccac

SEQ ID NO: 901176 - DNA, 15 bp, Homo sapiens
agtatcttgtgccca

SEQ ID NO: 901177 - DNA, 15 bp, Homo sapiens
cagtatcttgtgccc

SEQ ID NO: 901178 - DNA, 15 bp, Homo sapiens
tcagtatcttgtgcc

SEQ ID NO: 901179 - DNA, 15 bp, Homo sapiens
atcagtatcttgtgc

SEQ ID NO: 901180 - DNA, 15 bp, Homo sapiens
gatcagtatcttgtg

SEQ ID NO: 901181 - DNA, 15 bp, Homo sapiens
tgatcagtatcttgt

SEQ ID NO: 901182 - DNA, 15 bp, Homo sapiens
atgatcagtatcttg

SEQ ID NO: 901183 - DNA, 15 bp, Homo sapiens
tatgatcagtatctt

SEQ ID NO: 901184 - DNA, 15 bp, Homo sapiens
ttatgatcagtatct

SEQ ID NO: 901185 - DNA, 15 bp, Homo sapiens
tttatgatcagtatc

SEQ ID NO: 901186 - DNA, 15 bp, Homo sapiens
ctttatgatcagtat

SEQ ID NO: 901187 - DNA, 15 bp, Homo sapiens
tctttatgatcagta

SEQ ID NO: 901188 - DNA, 15 bp, Homo sapiens
gtctttatgatcagt

SEQ ID NO: 901189 - DNA, 15 bp, Homo sapiens
agtctttatgatcag

SEQ ID NO: 901190 - DNA, 15 bp, Homo sapiens
aagtctttatgatca

SEQ ID NO: 901191 - DNA, 15 bp, Homo sapiens
aaagtctttatgatc

SEQ ID NO: 901192 - DNA, 15 bp, Homo sapiens
caaagtctttatgat

SEQ ID NO: 901193 - DNA, 15 bp, Homo sapiens
gcaaagtctttatga

SEQ ID NO: 901194 - DNA, 15 bp, Homo sapiens
agcaaagtctttatg

SEQ ID NO: 901195 - DNA, 15 bp, Homo sapiens
cagcaaagtctttat

SEQ ID NO: 901196 - DNA, 15 bp, Homo sapiens
tcagcaaagtcttta

SEQ ID NO: 901197 - DNA, 15 bp, Homo sapiens
atcagcaaagtcttt

SEQ ID NO: 901198 - DNA, 15 bp, Homo sapiens
tatcagcaaagtctt

SEQ ID NO: 901199 - DNA, 15 bp, Homo sapiens
ttatcagcaaagtct

SEQ ID NO: 901200 - DNA, 15 bp, Homo sapiens
tttatcagcaaagtc

SEQ ID NO: 901201 - DNA, 15 bp, Homo sapiens
ttttatcagcaaagt

SEQ ID NO: 901202 - DNA, 15 bp, Homo sapiens
gttttatcagcaaag

SEQ ID NO: 901203 - DNA, 15 bp, Homo sapiens
tgttttatcagcaaa

SEQ ID NO: 901204 - DNA, 15 bp, Homo sapiens
ctgttttatcagcaa

SEQ ID NO: 901205 - DNA, 15 bp, Homo sapiens
gctgttttatcagca

SEQ ID NO: 901206 - DNA, 15 bp, Homo sapiens
tgctgttttatcagc

SEQ ID NO: 901207 - DNA, 15 bp, Homo sapiens
atgctgttttatcag

SEQ ID NO: 901208 - DNA, 15 bp, Homo sapiens
catgctgttttatca

SEQ ID NO: 901209 - DNA, 15 bp, Homo sapiens
gcatgctgttttatc

SEQ ID NO: 901210 - DNA, 15 bp, Homo sapiens
tgcatgctgttttat

SEQ ID NO: 901211 - DNA, 15 bp, Homo sapiens
ctgcatgctgtttta

SEQ ID NO: 901212 - DNA, 15 bp, Homo sapiens
actgcatgctgtttt

SEQ ID NO: 901213 - DNA, 15 bp, Homo sapiens
tactgcatgctgttt

SEQ ID NO: 901214 - DNA, 15 bp, Homo sapiens
ttactgcatgctgtt

SEQ ID NO: 901215 - DNA, 15 bp, Homo sapiens
tttactgcatgctgt

SEQ ID NO: 901216 - DNA, 15 bp, Homo sapiens
ctttactgcatgctg

SEQ ID NO: 901217 - DNA, 15 bp, Homo sapiens
tctttactgcatgct

SEQ ID NO: 901218 - DNA, 15 bp, Homo sapiens
ttctttactgcatgc

SEQ ID NO: 901219 - DNA, 15 bp, Homo sapiens
cttctttactgcatg

SEQ ID NO: 901220 - DNA, 15 bp, Homo sapiens
gcttctttactgcat

SEQ ID NO: 901221 - DNA, 15 bp, Homo sapiens
ggcttctttactgca

SEQ ID NO: 901222 - DNA, 15 bp, Homo sapiens
tggcttctttactgc

SEQ ID NO: 901223 - DNA, 15 bp, Homo sapiens
ctggcttctttactg

SEQ ID NO: 901224 - DNA, 15 bp, Homo sapiens
gctggcttctttact

SEQ ID NO: 901225 - DNA, 15 bp, Homo sapiens
ggctggcttctttac

SEQ ID NO: 901226 - DNA, 15 bp, Homo sapiens
tggctggcttcttta

SEQ ID NO: 901227 - DNA, 15 bp, Homo sapiens
ttggctggcttcttt

SEQ ID NO: 901228 - DNA, 15 bp, Homo sapiens
tttggctggcttctt

SEQ ID NO: 901229 - DNA, 15 bp, Homo sapiens
atttggctggcttct

SEQ ID NO: 901230 - DNA, 15 bp, Homo sapiens
gatttggctggcttc

SEQ ID NO: 901231 - DNA, 15 bp, Homo sapiens
ggatttggctggctt

SEQ ID NO: 901232 - DNA, 15 bp, Homo sapiens
gggatttggctggct

SEQ ID NO: 901233 - DNA, 15 bp, Homo sapiens
tgggatttggctggc

SEQ ID NO: 901234 - DNA, 15 bp, Homo sapiens
gtgggatttggctgg

SEQ ID NO: 901235 - DNA, 15 bp, Homo sapiens
ggtgggatttggctg

SEQ ID NO: 901236 - DNA, 15 bp, Homo sapiens
tggtgggatttggct

SEQ ID NO: 901237 - DNA, 15 bp, Homo sapiens
ttggtgggatttggc

SEQ ID NO: 901238 - DNA, 15 bp, Homo sapiens
tttggtgggatttgg

SEQ ID NO: 901239 - DNA, 15 bp, Homo sapiens
atttggtgggatttg

SEQ ID NO: 901240 - DNA, 15 bp, Homo sapiens
gatttggtgggattt

SEQ ID NO: 901241 - DNA, 15 bp, Homo sapiens
ggatttggtgggatt

SEQ ID NO: 901242 - DNA, 15 bp, Homo sapiens
tggatttggtgggat

SEQ ID NO: 901243 - DNA, 15 bp, Homo sapiens
ttggatttggtggga

SEQ ID NO: 901244 - DNA, 15 bp, Homo sapiens
cttggatttggtggg

SEQ ID NO: 901245 - DNA, 15 bp, Homo sapiens
tcttggatttggtgg

SEQ ID NO: 901246 - DNA, 15 bp, Homo sapiens
atcttggatttggtg

SEQ ID NO: 901247 - DNA, 15 bp, Homo sapiens
catcttggatttggt

SEQ ID NO: 901248 - DNA, 15 bp, Homo sapiens
ccatcttggatttgg

SEQ ID NO: 901249 - DNA, 15 bp, Homo sapiens
gccatcttggatttg

SEQ ID NO: 901250 - DNA, 15 bp, Homo sapiens
cgccatcttggattt

SEQ ID NO: 901251 - DNA, 15 bp, Homo sapiens
tcgccatcttggatt

SEQ ID NO: 901252 - DNA, 15 bp, Homo sapiens
ctcgccatcttggat

SEQ ID NO: 901253 - DNA, 15 bp, Homo sapiens
tctcgccatcttgga

SEQ ID NO: 901254 - DNA, 15 bp, Homo sapiens
ttctcgccatcttgg

SEQ ID NO: 901255 - DNA, 15 bp, Homo sapiens
tttctcgccatcttg

SEQ ID NO: 901256 - DNA, 15 bp, Homo sapiens
ctttctcgccatctt

SEQ ID NO: 901257 - DNA, 15 bp, Homo sapiens
cctttctcgccatct

SEQ ID NO: 901258 - DNA, 15 bp, Homo sapiens
acctttctcgccatc

SEQ ID NO: 901259 - DNA, 15 bp, Homo sapiens
cacctttctcgccat

SEQ ID NO: 901260 - DNA, 15 bp, Homo sapiens
ccacctttctcgcca

SEQ ID NO: 901261 - DNA, 15 bp, Homo sapiens
cccacctttctcgcc

SEQ ID NO: 901262 - DNA, 15 bp, Homo sapiens
tcccacctttctcgc

SEQ ID NO: 901263 - DNA, 15 bp, Homo sapiens
gtcccacctttctcg

SEQ ID NO: 901264 - DNA, 15 bp, Homo sapiens
cgtcccacctttctc

SEQ ID NO: 901265 - DNA, 15 bp, Homo sapiens
acgtcccacctttct

SEQ ID NO: 901266 - DNA, 15 bp, Homo sapiens
gacgtcccacctttc

SEQ ID NO: 901267 - DNA, 15 bp, Homo sapiens
agacgtcccaccttt

SEQ ID NO: 901268 - DNA, 15 bp, Homo sapiens
cagacgtcccacctt

SEQ ID NO: 901269 - DNA, 15 bp, Homo sapiens
gcagacgtcccacct

SEQ ID NO: 901270 - DNA, 15 bp, Homo sapiens
agcagacgtcccacc

SEQ ID NO: 901271 - DNA, 15 bp, Homo sapiens
gagcagacgtcccac

SEQ ID NO: 901272 - DNA, 15 bp, Homo sapiens
cgagcagacgtccca

SEQ ID NO: 901273 - DNA, 15 bp, Homo sapiens
acgagcagacgtccc

SEQ ID NO: 901274 - DNA, 15 bp, Homo sapiens
aacgagcagacgtcc

SEQ ID NO: 901275 - DNA, 15 bp, Homo sapiens
gaacgagcagacgtc

SEQ ID NO: 901276 - DNA, 15 bp, Homo sapiens
agaacgagcagacgt

SEQ ID NO: 901277 - DNA, 15 bp, Homo sapiens
gagaacgagcagacg

SEQ ID NO: 901278 - DNA, 15 bp, Homo sapiens
tgagaacgagcagac

SEQ ID NO: 901279 - DNA, 15 bp, Homo sapiens
gtgagaacgagcaga

SEQ ID NO: 901280 - DNA, 15 bp, Homo sapiens
agtgagaacgagcag

SEQ ID NO: 901281 - DNA, 15 bp, Homo sapiens
cagtgagaacgagca

SEQ ID NO: 901282 - DNA, 15 bp, Homo sapiens
gcagtgagaacgagc

SEQ ID NO: 901283 - DNA, 15 bp, Homo sapiens
agcagtgagaacgag

SEQ ID NO: 901284 - DNA, 15 bp, Homo sapiens
gagcagtgagaacga

SEQ ID NO: 901285 - DNA, 15 bp, Homo sapiens
tgagcagtgagaacg

SEQ ID NO: 901286 - DNA, 15 bp, Homo sapiens
atgagcagtgagaac

SEQ ID NO: 901287 - DNA, 15 bp, Homo sapiens
aatgagcagtgagaa

SEQ ID NO: 901288 - DNA, 15 bp, Homo sapiens
taatgagcagtgaga

SEQ ID NO: 901289 - DNA, 15 bp, Homo sapiens
ataatgagcagtgag

SEQ ID NO: 901290 - DNA, 15 bp, Homo sapiens
tataatgagcagtga

SEQ ID NO: 901291 - DNA, 15 bp, Homo sapiens
gtataatgagcagtg

SEQ ID NO: 901292 - DNA, 15 bp, Homo sapiens
tgtataatgagcagt

SEQ ID NO: 901293 - DNA, 15 bp, Homo sapiens
gtgtataatgagcag

SEQ ID NO: 901294 - DNA, 15 bp, Homo sapiens
agtgtataatgagca

SEQ ID NO: 901295 - DNA, 15 bp, Homo sapiens
tagtgtataatgagc

SEQ ID NO: 901296 - DNA, 15 bp, Homo sapiens
ttagtgtataatgag

SEQ ID NO: 901297 - DNA, 15 bp, Homo sapiens
attagtgtataatga

SEQ ID NO: 901298 - DNA, 15 bp, Homo sapiens
aattagtgtataatg

SEQ ID NO: 901299 - DNA, 15 bp, Homo sapiens
taattagtgtataat

SEQ ID NO: 901300 - DNA, 15 bp, Homo sapiens
ataattagtgtataa

SEQ ID NO: 901301 - DNA, 15 bp, Homo sapiens
tataattagtgtata

SEQ ID NO: 901302 - DNA, 15 bp, Homo sapiens
ttataattagtgtat

SEQ ID NO: 901303 - DNA, 15 bp, Homo sapiens
attataattagtgta

SEQ ID NO: 901304 - DNA, 15 bp, Homo sapiens
cattataattagtgt

SEQ ID NO: 901305 - DNA, 15 bp, Homo sapiens
gcattataattagtg

SEQ ID NO: 901306 - DNA, 15 bp, Homo sapiens
tgcattataattagt

SEQ ID NO: 901307 - DNA, 15 bp, Homo sapiens
atgcattataattag

SEQ ID NO: 901308 - DNA, 15 bp, Homo sapiens
aatgcattataatta

SEQ ID NO: 901309 - DNA, 15 bp, Homo sapiens
taatgcattataatt

SEQ ID NO: 901310 - DNA, 15 bp, Homo sapiens
ctaatgcattataat

SEQ ID NO: 901311 - DNA, 15 bp, Homo sapiens
gctaatgcattataa

SEQ ID NO: 901312 - DNA, 15 bp, Homo sapiens
tgctaatgcattata

SEQ ID NO: 901313 - DNA, 15 bp, Homo sapiens
atgctaatgcattat

SEQ ID NO: 901314 - DNA, 15 bp, Homo sapiens
gatgctaatgcatta

SEQ ID NO: 901315 - DNA, 15 bp, Homo sapiens
ggatgctaatgcatt

SEQ ID NO: 901316 - DNA, 15 bp, Homo sapiens
aggatgctaatgcat

SEQ ID NO: 901317 - DNA, 15 bp, Homo sapiens
taggatgctaatgca

SEQ ID NO: 901318 - DNA, 15 bp, Homo sapiens
ttaggatgctaatgc

SEQ ID NO: 901319 - DNA, 15 bp, Homo sapiens
tttaggatgctaatg

SEQ ID NO: 901320 - DNA, 15 bp, Homo sapiens
ttttaggatgctaat

SEQ ID NO: 901321 - DNA, 15 bp, Homo sapiens
cttttaggatgctaa

SEQ ID NO: 901322 - DNA, 15 bp, Homo sapiens
tcttttaggatgcta

SEQ ID NO: 901323 - DNA, 15 bp, Homo sapiens
gtcttttaggatgct

SEQ ID NO: 901324 - DNA, 15 bp, Homo sapiens
tgtcttttaggatgc

SEQ ID NO: 901325 - DNA, 15 bp, Homo sapiens
gtgtcttttaggatg

SEQ ID NO: 901326 - DNA, 15 bp, Homo sapiens
agtgtcttttaggat

SEQ ID NO: 901327 - DNA, 15 bp, Homo sapiens
gagtgtcttttagga

SEQ ID NO: 901328 - DNA, 15 bp, Homo sapiens
ggagtgtcttttagg

SEQ ID NO: 901329 - DNA, 15 bp, Homo sapiens
gggagtgtcttttag

SEQ ID NO: 901330 - DNA, 15 bp, Homo sapiens
tgggagtgtctttta

SEQ ID NO: 901331 - DNA, 15 bp, Homo sapiens
gtgggagtgtctttt

SEQ ID NO: 901332 - DNA, 15 bp, Homo sapiens
ggtgggagtgtcttt

SEQ ID NO: 901333 - DNA, 15 bp, Homo sapiens
tggtgggagtgtctt

SEQ ID NO: 901334 - DNA, 15 bp, Homo sapiens
ctggtgggagtgtct

SEQ ID NO: 901335 - DNA, 15 bp, Homo sapiens
actggtgggagtgtc

SEQ ID NO: 901336 - DNA, 15 bp, Homo sapiens
cactggtgggagtgt

SEQ ID NO: 901337 - DNA, 15 bp, Homo sapiens
gcactggtgggagtg

SEQ ID NO: 901338 - DNA, 15 bp, Homo sapiens
agcactggtgggagt

SEQ ID NO: 901339 - DNA, 15 bp, Homo sapiens
tagcactggtgggag

SEQ ID NO: 901340 - DNA, 15 bp, Homo sapiens
atagcactggtggga

SEQ ID NO: 901341 - DNA, 15 bp, Homo sapiens
catagcactggtggg

SEQ ID NO: 901342 - DNA, 15 bp, Homo sapiens
tcatagcactggtgg

SEQ ID NO: 901343 - DNA, 15 bp, Homo sapiens
gtcatagcactggtg

SEQ ID NO: 901344 - DNA, 15 bp, Homo sapiens
tgtcatagcactggt

SEQ ID NO: 901345 - DNA, 15 bp, Homo sapiens
ctgtcatagcactgg

SEQ ID NO: 901346 - DNA, 15 bp, Homo sapiens
actgtcatagcactg

SEQ ID NO: 901347 - DNA, 15 bp, Homo sapiens
aactgtcatagcact

SEQ ID NO: 901348 - DNA, 15 bp, Homo sapiens
aaactgtcatagcac

SEQ ID NO: 901349 - DNA, 15 bp, Homo sapiens
taaactgtcatagca

SEQ ID NO: 901350 - DNA, 15 bp, Homo sapiens
gtaaactgtcatagc

SEQ ID NO: 901351 - DNA, 15 bp, Homo sapiens
tgtaaactgtcatag

SEQ ID NO: 901352 - DNA, 15 bp, Homo sapiens
ctgtaaactgtcata

SEQ ID NO: 901353 - DNA, 15 bp, Homo sapiens
tctgtaaactgtcat

SEQ ID NO: 901354 - DNA, 15 bp, Homo sapiens
atctgtaaactgtca

SEQ ID NO: 901355 - DNA, 15 bp, Homo sapiens
catctgtaaactgtc

SEQ ID NO: 901356 - DNA, 15 bp, Homo sapiens
gcatctgtaaactgt

SEQ ID NO: 901357 - DNA, 15 bp, Homo sapiens
ggcatctgtaaactg

SEQ ID NO: 901358 - DNA, 15 bp, Homo sapiens
tggcatctgtaaact

SEQ ID NO: 901359 - DNA, 15 bp, Homo sapiens
atggcatctgtaaac

SEQ ID NO: 901360 - DNA, 15 bp, Homo sapiens
catggcatctgtaaa

SEQ ID NO: 901361 - DNA, 15 bp, Homo sapiens
ccatggcatctgtaa

SEQ ID NO: 901362 - DNA, 15 bp, Homo sapiens
gccatggcatctgta

SEQ ID NO: 901363 - DNA, 15 bp, Homo sapiens
tgccatggcatctgt

SEQ ID NO: 901364 - DNA, 15 bp, Homo sapiens
ttgccatggcatctg

SEQ ID NO: 901365 - DNA, 15 bp, Homo sapiens
attgccatggcatct

SEQ ID NO: 901366 - DNA, 15 bp, Homo sapiens
cattgccatggcatc

SEQ ID NO: 901367 - DNA, 15 bp, Homo sapiens
acattgccatggcat

SEQ ID NO: 901368 - DNA, 15 bp, Homo sapiens
cacattgccatggca

SEQ ID NO: 901369 - DNA, 15 bp, Homo sapiens
tcacattgccatggc

SEQ ID NO: 901370 - DNA, 15 bp, Homo sapiens
ttcacattgccatgg

SEQ ID NO: 901371 - DNA, 15 bp, Homo sapiens
cttcacattgccatg

SEQ ID NO: 901372 - DNA, 15 bp, Homo sapiens
tcttcacattgccat

SEQ ID NO: 901373 - DNA, 15 bp, Homo sapiens
ttcttcacattgcca

SEQ ID NO: 901374 - DNA, 15 bp, Homo sapiens
cttcttcacattgcc

SEQ ID NO: 901375 - DNA, 15 bp, Homo sapiens
acttcttcacattgc

SEQ ID NO: 901376 - DNA, 15 bp, Homo sapiens
aacttcttcacattg

SEQ ID NO: 901377 - DNA, 15 bp, Homo sapiens
taacttcttcacatt

SEQ ID NO: 901378 - DNA, 15 bp, Homo sapiens
gtaacttcttcacat

SEQ ID NO: 901379 - DNA, 15 bp, Homo sapiens
agtaacttcttcaca

SEQ ID NO: 901380 - DNA, 15 bp, Homo sapiens
gagtaacttcttcac

SEQ ID NO: 901381 - DNA, 15 bp, Homo sapiens
agagtaacttcttca

SEQ ID NO: 901382 - DNA, 15 bp, Homo sapiens
tagagtaacttcttc

SEQ ID NO: 901383 - DNA, 15 bp, Homo sapiens
atagagtaacttctt

SEQ ID NO: 901384 - DNA, 15 bp, Homo sapiens
tatagagtaacttct

SEQ ID NO: 901385 - DNA, 15 bp, Homo sapiens
atatagagtaacttc

SEQ ID NO: 901386 - DNA, 15 bp, Homo sapiens
tatatagagtaactt

SEQ ID NO: 901387 - DNA, 15 bp, Homo sapiens
ctatatagagtaact

SEQ ID NO: 901388 - DNA, 15 bp, Homo sapiens
actatatagagtaac

SEQ ID NO: 901389 - DNA, 15 bp, Homo sapiens
gactatatagagtaa

SEQ ID NO: 901390 - DNA, 15 bp, Homo sapiens
agactatatagagta

SEQ ID NO: 901391 - DNA, 15 bp, Homo sapiens
tagactatatagagt

SEQ ID NO: 901392 - DNA, 15 bp, Homo sapiens
ttagactatatagag

SEQ ID NO: 901393 - DNA, 15 bp, Homo sapiens
tttagactatataga

SEQ ID NO: 901394 - DNA, 15 bp, Homo sapiens
ttttagactatatag

SEQ ID NO: 901395 - DNA, 15 bp, Homo sapiens
tttttagactatata

SEQ ID NO: 901396 - DNA, 15 bp, Homo sapiens
ctttttagactatat

SEQ ID NO: 901397 - DNA, 15 bp, Homo sapiens
cctttttagactata

SEQ ID NO: 901398 - DNA, 15 bp, Homo sapiens
ccctttttagactat

SEQ ID NO: 901399 - DNA, 15 bp, Homo sapiens
cccctttttagacta

SEQ ID NO: 901400 - DNA, 15 bp, Homo sapiens
tcccctttttagact

SEQ ID NO: 901401 - DNA, 15 bp, Homo sapiens
ctcccctttttagac

SEQ ID NO: 901402 - DNA, 15 bp, Homo sapiens
cctcccctttttaga

SEQ ID NO: 901403 - DNA, 15 bp, Homo sapiens
tcctcccctttttag

SEQ ID NO: 901404 - DNA, 15 bp, Homo sapiens
ttcctccccttttta

SEQ ID NO: 901405 - DNA, 15 bp, Homo sapiens
gttcctccccttttt

SEQ ID NO: 901406 - DNA, 15 bp, Homo sapiens
tgttcctcccctttt

SEQ ID NO: 901407 - DNA, 15 bp, Homo sapiens
gtgttcctccccttt

SEQ ID NO: 901408 - DNA, 15 bp, Homo sapiens
agtgttcctcccctt

SEQ ID NO: 901409 - DNA, 15 bp, Homo sapiens
gagtgttcctcccct

SEQ ID NO: 901410 - DNA, 15 bp, Homo sapiens
tgagtgttcctcccc

SEQ ID NO: 901411 - DNA, 15 bp, Homo sapiens
ctgagtgttcctccc

SEQ ID NO: 901412 - DNA, 15 bp, Homo sapiens
tctgagtgttcctcc

SEQ ID NO: 901413 - DNA, 15 bp, Homo sapiens
atctgagtgttcctc

SEQ ID NO: 901414 - DNA, 15 bp, Homo sapiens
gatctgagtgttcct

SEQ ID NO: 901415 - DNA, 15 bp, Homo sapiens
agatctgagtgttcc

SEQ ID NO: 901416 - DNA, 15 bp, Homo sapiens
tagatctgagtgttc

SEQ ID NO: 901417 - DNA, 15 bp, Homo sapiens
ctagatctgagtgtt

SEQ ID NO: 901418 - DNA, 15 bp, Homo sapiens
cctagatctgagtgt

SEQ ID NO: 901419 - DNA, 15 bp, Homo sapiens
tcctagatctgagtg

SEQ ID NO: 901420 - DNA, 15 bp, Homo sapiens
ttcctagatctgagt

SEQ ID NO: 901421 - DNA, 15 bp, Homo sapiens
attcctagatctgag

SEQ ID NO: 901422 - DNA, 15 bp, Homo sapiens
cattcctagatctga

SEQ ID NO: 901423 - DNA, 15 bp, Homo sapiens
ccattcctagatctg

SEQ ID NO: 901424 - DNA, 15 bp, Homo sapiens
gccattcctagatct

SEQ ID NO: 901425 - DNA, 15 bp, Homo sapiens
ggccattcctagatc

SEQ ID NO: 901426 - DNA, 15 bp, Homo sapiens
aggccattcctagat

SEQ ID NO: 901427 - DNA, 15 bp, Homo sapiens
taggccattcctaga

SEQ ID NO: 901428 - DNA, 15 bp, Homo sapiens
gtaggccattcctag

SEQ ID NO: 901429 - DNA, 15 bp, Homo sapiens
ggtaggccattccta

SEQ ID NO: 901430 - DNA, 15 bp, Homo sapiens
gggtaggccattcct

SEQ ID NO: 901431 - DNA, 15 bp, Homo sapiens
agggtaggccattcc

SEQ ID NO: 901432 - DNA, 15 bp, Homo sapiens
gagggtaggccattc

SEQ ID NO: 901433 - DNA, 15 bp, Homo sapiens
agagggtaggccatt

SEQ ID NO: 901434 - DNA, 15 bp, Homo sapiens
aagagggtaggccat

SEQ ID NO: 901435 - DNA, 15 bp, Homo sapiens
gaagagggtaggcca

SEQ ID NO: 901436 - DNA, 15 bp, Homo sapiens
ggaagagggtaggcc

SEQ ID NO: 901437 - DNA, 15 bp, Homo sapiens
gggaagagggtaggc

SEQ ID NO: 901438 - DNA, 15 bp, Homo sapiens
tgggaagagggtagg

SEQ ID NO: 901439 - DNA, 15 bp, Homo sapiens
ctgggaagagggtag

SEQ ID NO: 901440 - DNA, 15 bp, Homo sapiens
tctgggaagagggta

SEQ ID NO: 901441 - DNA, 15 bp, Homo sapiens
ttctgggaagagggt

SEQ ID NO: 901442 - DNA, 15 bp, Homo sapiens
tttctgggaagaggg

SEQ ID NO: 901443 - DNA, 15 bp, Homo sapiens
ttttctgggaagagg

SEQ ID NO: 901444 - DNA, 15 bp, Homo sapiens
gttttctgggaagag

SEQ ID NO: 901445 - DNA, 15 bp, Homo sapiens
agttttctgggaaga

SEQ ID NO: 901446 - DNA, 15 bp, Homo sapiens
gagttttctgggaag

SEQ ID NO: 901447 - DNA, 15 bp, Homo sapiens
tgagttttctgggaa

SEQ ID NO: 901448 - DNA, 15 bp, Homo sapiens
atgagttttctggga

SEQ ID NO: 901449 - DNA, 15 bp, Homo sapiens
catgagttttctggg

SEQ ID NO: 901450 - DNA, 15 bp, Homo sapiens
tcatgagttttctgg

SEQ ID NO: 901451 - DNA, 15 bp, Homo sapiens
ttcatgagttttctg

SEQ ID NO: 901452 - DNA, 15 bp, Homo sapiens
attcatgagttttct

SEQ ID NO: 901453 - DNA, 15 bp, Homo sapiens
tattcatgagttttc

SEQ ID NO: 901454 - DNA, 15 bp, Homo sapiens
ttattcatgagtttt

SEQ ID NO: 901455 - DNA, 15 bp, Homo sapiens
gttattcatgagttt

SEQ ID NO: 901456 - DNA, 15 bp, Homo sapiens
ggttattcatgagtt

SEQ ID NO: 901457 - DNA, 15 bp, Homo sapiens
gggttattcatgagt

SEQ ID NO: 901458 - DNA, 15 bp, Homo sapiens
tgggttattcatgag

SEQ ID NO: 901459 - DNA, 15 bp, Homo sapiens
gtgggttattcatga

SEQ ID NO: 901460 - DNA, 15 bp, Homo sapiens
ggtgggttattcatg

SEQ ID NO: 901461 - DNA, 15 bp, Homo sapiens
gggtgggttattcat

SEQ ID NO: 901462 - DNA, 15 bp, Homo sapiens
ggggtgggttattca

SEQ ID NO: 901463 - DNA, 15 bp, Homo sapiens
aggggtgggttattc

SEQ ID NO: 901464 - DNA, 15 bp, Homo sapiens
aaggggtgggttatt

SEQ ID NO: 901465 - DNA, 15 bp, Homo sapiens
caaggggtgggttat

SEQ ID NO: 901466 - DNA, 15 bp, Homo sapiens
acaaggggtgggtta

SEQ ID NO: 901467 - DNA, 15 bp, Homo sapiens
aacaaggggtgggtt

SEQ ID NO: 901468 - DNA, 15 bp, Homo sapiens
aaacaaggggtgggt

SEQ ID NO: 901469 - DNA, 15 bp, Homo sapiens
taaacaaggggtggg

SEQ ID NO: 901470 - DNA, 15 bp, Homo sapiens
ctaaacaaggggtgg

SEQ ID NO: 901471 - DNA, 15 bp, Homo sapiens
gctaaacaaggggtg

SEQ ID NO: 901472 - DNA, 15 bp, Homo sapiens
tgctaaacaaggggt

SEQ ID NO: 901473 - DNA, 15 bp, Homo sapiens
atgctaaacaagggg

SEQ ID NO: 901474 - DNA, 15 bp, Homo sapiens
tatgctaaacaaggg

SEQ ID NO: 901475 - DNA, 15 bp, Homo sapiens
atatgctaaacaagg

SEQ ID NO: 901476 - DNA, 15 bp, Homo sapiens
tatatgctaaacaag

SEQ ID NO: 901477 - DNA, 15 bp, Homo sapiens
ttatatgctaaacaa

SEQ ID NO: 901478 - DNA, 15 bp, Homo sapiens
attatatgctaaaca

SEQ ID NO: 901479 - DNA, 15 bp, Homo sapiens
gattatatgctaaac

SEQ ID NO: 901480 - DNA, 15 bp, Homo sapiens
tgattatatgctaaa

SEQ ID NO: 901481 - DNA, 15 bp, Homo sapiens
ttgattatatgctaa

SEQ ID NO: 901482 - DNA, 15 bp, Homo sapiens
cttgattatatgcta

SEQ ID NO: 901483 - DNA, 15 bp, Homo sapiens
tcttgattatatgct

SEQ ID NO: 901484 - DNA, 15 bp, Homo sapiens
ttcttgattatatgc

SEQ ID NO: 901485 - DNA, 15 bp, Homo sapiens
tttcttgattatatg

SEQ ID NO: 901486 - DNA, 15 bp, Homo sapiens
atttcttgattatat

SEQ ID NO: 901487 - DNA, 15 bp, Homo sapiens
tatttcttgattata

SEQ ID NO: 901488 - DNA, 15 bp, Homo sapiens
ttatttcttgattat

SEQ ID NO: 901489 - DNA, 15 bp, Homo sapiens
gttatttcttgatta

SEQ ID NO: 901490 - DNA, 15 bp, Homo sapiens
agttatttcttgatt

SEQ ID NO: 901491 - DNA, 15 bp, Homo sapiens
tagttatttcttgat

SEQ ID NO: 901492 - DNA, 15 bp, Homo sapiens
atagttatttcttga

SEQ ID NO: 901493 - DNA, 15 bp, Homo sapiens
tatagttatttcttg

SEQ ID NO: 901494 - DNA, 15 bp, Homo sapiens
ttatagttatttctt

SEQ ID NO: 901495 - DNA, 15 bp, Homo sapiens
gttatagttatttct

SEQ ID NO: 901496 - DNA, 15 bp, Homo sapiens
tgttatagttatttc

SEQ ID NO: 901497 - DNA, 15 bp, Homo sapiens
ttgttatagttattt

SEQ ID NO: 901498 - DNA, 15 bp, Homo sapiens
attgttatagttatt

SEQ ID NO: 901499 - DNA, 15 bp, Homo sapiens
gattgttatagttat

SEQ ID NO: 901500 - DNA, 15 bp, Homo sapiens
ggattgttatagtta

SEQ ID NO: 901501 - DNA, 15 bp, Homo sapiens
aggattgttatagtt

SEQ ID NO: 901502 - DNA, 15 bp, Homo sapiens
aaggattgttatagt

SEQ ID NO: 901503 - DNA, 15 bp, Homo sapiens
taaggattgttatag

SEQ ID NO: 901504 - DNA, 15 bp, Homo sapiens
ctaaggattgttata

SEQ ID NO: 901505 - DNA, 15 bp, Homo sapiens
actaaggattgttat

SEQ ID NO: 901506 - DNA, 15 bp, Homo sapiens
gactaaggattgtta

SEQ ID NO: 901507 - DNA, 15 bp, Homo sapiens
agactaaggattgtt

SEQ ID NO: 901508 - DNA, 15 bp, Homo sapiens
tagactaaggattgt

SEQ ID NO: 901509 - DNA, 15 bp, Homo sapiens
gtagactaaggattg

SEQ ID NO: 901510 - DNA, 15 bp, Homo sapiens
ggtagactaaggatt

SEQ ID NO: 901511 - DNA, 15 bp, Homo sapiens
tggtagactaaggat

SEQ ID NO: 901512 - DNA, 15 bp, Homo sapiens
gtggtagactaagga

SEQ ID NO: 901513 - DNA, 15 bp, Homo sapiens
ggtggtagactaagg

SEQ ID NO: 901514 - DNA, 15 bp, Homo sapiens
aggtggtagactaag

SEQ ID NO: 901515 - DNA, 15 bp, Homo sapiens
gaggtggtagactaa

SEQ ID NO: 901516 - DNA, 15 bp, Homo sapiens
ggaggtggtagacta

SEQ ID NO: 901517 - DNA, 15 bp, Homo sapiens
tggaggtggtagact

SEQ ID NO: 901518 - DNA, 15 bp, Homo sapiens
ttggaggtggtagac

SEQ ID NO: 901519 - DNA, 15 bp, Homo sapiens
attggaggtggtaga

SEQ ID NO: 901520 - DNA, 15 bp, Homo sapiens
cattggaggtggtag

SEQ ID NO: 901521 - DNA, 15 bp, Homo sapiens
ccattggaggtggta

SEQ ID NO: 901522 - DNA, 15 bp, Homo sapiens
cccattggaggtggt

SEQ ID NO: 901523 - DNA, 15 bp, Homo sapiens
ccccattggaggtgg

SEQ ID NO: 901524 - DNA, 15 bp, Homo sapiens
cccccattggaggtg

SEQ ID NO: 901525 - DNA, 15 bp, Homo sapiens
acccccattggaggt

SEQ ID NO: 901526 - DNA, 15 bp, Homo sapiens
cacccccattggagg

SEQ ID NO: 901527 - DNA, 15 bp, Homo sapiens
acacccccattggag

SEQ ID NO: 901528 - DNA, 15 bp, Homo sapiens
tacacccccattgga

SEQ ID NO: 901529 - DNA, 15 bp, Homo sapiens
atacacccccattgg

SEQ ID NO: 901530 - DNA, 15 bp, Homo sapiens
catacacccccattg

SEQ ID NO: 901531 - DNA, 15 bp, Homo sapiens
gcatacacccccatt

SEQ ID NO: 901532 - DNA, 15 bp, Homo sapiens
tgcatacacccccat

SEQ ID NO: 901533 - DNA, 15 bp, Homo sapiens
gtgcatacaccccca

SEQ ID NO: 901534 - DNA, 15 bp, Homo sapiens
ggtgcatacaccccc

SEQ ID NO: 901535 - DNA, 15 bp, Homo sapiens
aggtgcatacacccc

SEQ ID NO: 901536 - DNA, 15 bp, Homo sapiens
gaggtgcatacaccc

SEQ ID NO: 901537 - DNA, 15 bp, Homo sapiens
ggaggtgcatacacc

SEQ ID NO: 901538 - DNA, 15 bp, Homo sapiens
tggaggtgcatacac

SEQ ID NO: 901539 - DNA, 15 bp, Homo sapiens
ttggaggtgcataca

SEQ ID NO: 901540 - DNA, 15 bp, Homo sapiens
attggaggtgcatac

SEQ ID NO: 901541 - DNA, 15 bp, Homo sapiens
aattggaggtgcata

SEQ ID NO: 901542 - DNA, 15 bp, Homo sapiens
gaattggaggtgcat

SEQ ID NO: 901543 - DNA, 15 bp, Homo sapiens
agaattggaggtgca

SEQ ID NO: 901544 - DNA, 15 bp, Homo sapiens
aagaattggaggtgc

SEQ ID NO: 901545 - DNA, 15 bp, Homo sapiens
aaagaattggaggtg

SEQ ID NO: 901546 - DNA, 15 bp, Homo sapiens
gaaagaattggaggt

SEQ ID NO: 901547 - DNA, 15 bp, Homo sapiens
agaaagaattggagg

SEQ ID NO: 901548 - DNA, 15 bp, Homo sapiens
aagaaagaattggag

SEQ ID NO: 901549 - DNA, 15 bp, Homo sapiens
caagaaagaattgga

SEQ ID NO: 901550 - DNA, 15 bp, Homo sapiens
ccaagaaagaattgg

SEQ ID NO: 901551 - DNA, 15 bp, Homo sapiens
gccaagaaagaattg

SEQ ID NO: 901552 - DNA, 15 bp, Homo sapiens
cgccaagaaagaatt

SEQ ID NO: 901553 - DNA, 15 bp, Homo sapiens
tcgccaagaaagaat

SEQ ID NO: 901554 - DNA, 15 bp, Homo sapiens
ctcgccaagaaagaa

SEQ ID NO: 901555 - DNA, 15 bp, Homo sapiens
tctcgccaagaaaga

SEQ ID NO: 901556 - DNA, 15 bp, Homo sapiens
atctcgccaagaaag

SEQ ID NO: 901557 - DNA, 15 bp, Homo sapiens
gatctcgccaagaaa

SEQ ID NO: 901558 - DNA, 15 bp, Homo sapiens
ggatctcgccaagaa

SEQ ID NO: 901559 - DNA, 15 bp, Homo sapiens
tggatctcgccaaga

SEQ ID NO: 901560 - DNA, 15 bp, Homo sapiens
ctggatctcgccaag

SEQ ID NO: 901561 - DNA, 15 bp, Homo sapiens
cctggatctcgccaa

SEQ ID NO: 901562 - DNA, 15 bp, Homo sapiens
tcctggatctcgcca

SEQ ID NO: 901563 - DNA, 15 bp, Homo sapiens
ctcctggatctcgcc

SEQ ID NO: 901564 - DNA, 15 bp, Homo sapiens
gctcctggatctcgc

SEQ ID NO: 901565 - DNA, 15 bp, Homo sapiens
ggctcctggatctcg

SEQ ID NO: 901566 - DNA, 15 bp, Homo sapiens
gggctcctggatctc

SEQ ID NO: 901567 - DNA, 15 bp, Homo sapiens
agggctcctggatct

SEQ ID NO: 901568 - DNA, 15 bp, Homo sapiens
gagggctcctggatc

SEQ ID NO: 901569 - DNA, 15 bp, Homo sapiens
agagggctcctggat

SEQ ID NO: 901570 - DNA, 15 bp, Homo sapiens
gagagggctcctgga

SEQ ID NO: 901571 - DNA, 15 bp, Homo sapiens
ggagagggctcctgg

SEQ ID NO: 901572 - DNA, 15 bp, Homo sapiens
aggagagggctcctg

SEQ ID NO: 901573 - DNA, 15 bp, Homo sapiens
caggagagggctcct

SEQ ID NO: 901574 - DNA, 15 bp, Homo sapiens
ccaggagagggctcc

SEQ ID NO: 901575 - DNA, 15 bp, Homo sapiens
cccaggagagggctc

SEQ ID NO: 901576 - DNA, 15 bp, Homo sapiens
ccccaggagagggct

SEQ ID NO: 901577 - DNA, 15 bp, Homo sapiens
accccaggagagggc

SEQ ID NO: 901578 - DNA, 15 bp, Homo sapiens
gaccccaggagaggg

SEQ ID NO: 901579 - DNA, 15 bp, Homo sapiens
ggaccccaggagagg

SEQ ID NO: 901580 - DNA, 15 bp, Homo sapiens
tggaccccaggagag

SEQ ID NO: 901581 - DNA, 15 bp, Homo sapiens
ctggaccccaggaga

SEQ ID NO: 901582 - DNA, 15 bp, Homo sapiens
tctggaccccaggag

SEQ ID NO: 901583 - DNA, 15 bp, Homo sapiens
atctggaccccagga

SEQ ID NO: 901584 - DNA, 15 bp, Homo sapiens
gatctggaccccagg

SEQ ID NO: 901585 - DNA, 15 bp, Homo sapiens
tgatctggaccccag

SEQ ID NO: 901586 - DNA, 15 bp, Homo sapiens
ctgatctggacccca

SEQ ID NO: 901587 - DNA, 15 bp, Homo sapiens
tctgatctggacccc

SEQ ID NO: 901588 - DNA, 15 bp, Homo sapiens
ttctgatctggaccc

SEQ ID NO: 901589 - DNA, 15 bp, Homo sapiens
gttctgatctggacc

SEQ ID NO: 901590 - DNA, 15 bp, Homo sapiens
tgttctgatctggac

SEQ ID NO: 901591 - DNA, 15 bp, Homo sapiens
gtgttctgatctgga

SEQ ID NO: 901592 - DNA, 15 bp, Homo sapiens
ggtgttctgatctgg

SEQ ID NO: 901593 - DNA, 15 bp, Homo sapiens
aggtgttctgatctg

SEQ ID NO: 901594 - DNA, 15 bp, Homo sapiens
aaggtgttctgatct

SEQ ID NO: 901595 - DNA, 15 bp, Homo sapiens
aaaggtgttctgatc

SEQ ID NO: 901596 - DNA, 15 bp, Homo sapiens
gaaaggtgttctgat

SEQ ID NO: 901597 - DNA, 15 bp, Homo sapiens
ggaaaggtgttctga

SEQ ID NO: 901598 - DNA, 15 bp, Homo sapiens
tggaaaggtgttctg

SEQ ID NO: 901599 - DNA, 15 bp, Homo sapiens
ctggaaaggtgttct

SEQ ID NO: 901600 - DNA, 15 bp, Homo sapiens
tctggaaaggtgttc

SEQ ID NO: 901601 - DNA, 15 bp, Homo sapiens
ttctggaaaggtgtt

SEQ ID NO: 901602 - DNA, 15 bp, Homo sapiens
tttctggaaaggtgt

SEQ ID NO: 901603 - DNA, 15 bp, Homo sapiens
gtttctggaaaggtg

SEQ ID NO: 901604 - DNA, 15 bp, Homo sapiens
tgtttctggaaaggt

SEQ ID NO: 901605 - DNA, 15 bp, Homo sapiens
gtgtttctggaaagg

SEQ ID NO: 901606 - DNA, 15 bp, Homo sapiens
ggtgtttctggaaag

SEQ ID NO: 901607 - DNA, 15 bp, Homo sapiens
tggtgtttctggaaa

SEQ ID NO: 901608 - DNA, 15 bp, Homo sapiens
atggtgtttctggaa

SEQ ID NO: 901609 - DNA, 15 bp, Homo sapiens
gatggtgtttctgga

SEQ ID NO: 901610 - DNA, 15 bp, Homo sapiens
ggatggtgtttctgg

SEQ ID NO: 901611 - DNA, 15 bp, Homo sapiens
gggatggtgtttctg

SEQ ID NO: 901612 - DNA, 15 bp, Homo sapiens
tgggatggtgtttct

SEQ ID NO: 901613 - DNA, 15 bp, Homo sapiens
atgggatggtgtttc

SEQ ID NO: 901614 - DNA, 15 bp, Homo sapiens
catgggatggtgttt

SEQ ID NO: 901615 - DNA, 15 bp, Homo sapiens
acatgggatggtgtt

SEQ ID NO: 901616 - DNA, 15 bp, Homo sapiens
aacatgggatggtgt

SEQ ID NO: 901617 - DNA, 15 bp, Homo sapiens
taacatgggatggtg

SEQ ID NO: 901618 - DNA, 15 bp, Homo sapiens
ttaacatgggatggt

SEQ ID NO: 901619 - DNA, 15 bp, Homo sapiens
tttaacatgggatgg

SEQ ID NO: 901620 - DNA, 15 bp, Homo sapiens
atttaacatgggatg

SEQ ID NO: 901621 - DNA, 15 bp, Homo sapiens
aatttaacatgggat

SEQ ID NO: 901622 - DNA, 15 bp, Homo sapiens
taatttaacatggga

SEQ ID NO: 901623 - DNA, 15 bp, Homo sapiens
ataatttaacatggg

SEQ ID NO: 901624 - DNA, 15 bp, Homo sapiens
cataatttaacatgg

SEQ ID NO: 901625 - DNA, 15 bp, Homo sapiens
tcataatttaacatg

SEQ ID NO: 901626 - DNA, 15 bp, Homo sapiens
ttcataatttaacat

SEQ ID NO: 901627 - DNA, 15 bp, Homo sapiens
attcataatttaaca

SEQ ID NO: 901628 - DNA, 15 bp, Homo sapiens
aattcataatttaac

SEQ ID NO: 901629 - DNA, 15 bp, Homo sapiens
taattcataatttaa

SEQ ID NO: 901630 - DNA, 15 bp, Homo sapiens
ttaattcataattta

SEQ ID NO: 901631 - DNA, 15 bp, Homo sapiens
cttaattcataattt

SEQ ID NO: 901632 - DNA, 15 bp, Homo sapiens
tcttaattcataatt

SEQ ID NO: 901633 - DNA, 15 bp, Homo sapiens
ttcttaattcataat

SEQ ID NO: 901634 - DNA, 15 bp, Homo sapiens
gttcttaattcataa

SEQ ID NO: 901635 - DNA, 15 bp, Homo sapiens
tgttcttaattcata

SEQ ID NO: 901636 - DNA, 15 bp, Homo sapiens
gtgttcttaattcat

SEQ ID NO: 901637 - DNA, 15 bp, Homo sapiens
agtgttcttaattca

SEQ ID NO: 901638 - DNA, 15 bp, Homo sapiens
cagtgttcttaattc

SEQ ID NO: 901639 - DNA, 15 bp, Homo sapiens
tcagtgttcttaatt

SEQ ID NO: 901640 - DNA, 15 bp, Homo sapiens
ttcagtgttcttaat

SEQ ID NO: 901641 - DNA, 15 bp, Homo sapiens
gttcagtgttcttaa

SEQ ID NO: 901642 - DNA, 15 bp, Homo sapiens
tgttcagtgttctta

SEQ ID NO: 901643 - DNA, 15 bp, Homo sapiens
atgttcagtgttctt

SEQ ID NO: 901644 - DNA, 15 bp, Homo sapiens
catgttcagtgttct

SEQ ID NO: 901645 - DNA, 15 bp, Homo sapiens
tcatgttcagtgttc

SEQ ID NO: 901646 - DNA, 15 bp, Homo sapiens
ttcatgttcagtgtt

SEQ ID NO: 901647 - DNA, 15 bp, Homo sapiens
cttcatgttcagtgt

SEQ ID NO: 901648 - DNA, 15 bp, Homo sapiens
tcttcatgttcagtg

SEQ ID NO: 901649 - DNA, 15 bp, Homo sapiens
ttcttcatgttcagt

SEQ ID NO: 901650 - DNA, 15 bp, Homo sapiens
attcttcatgttcag

SEQ ID NO: 901651 - DNA, 15 bp, Homo sapiens
cattcttcatgttca

SEQ ID NO: 901652 - DNA, 15 bp, Homo sapiens
acattcttcatgttc

SEQ ID NO: 901653 - DNA, 15 bp, Homo sapiens
aacattcttcatgtt

SEQ ID NO: 901654 - DNA, 15 bp, Homo sapiens
aaacattcttcatgt

SEQ ID NO: 901655 - DNA, 15 bp, Homo sapiens
taaacattcttcatg

SEQ ID NO: 901656 - DNA, 15 bp, Homo sapiens
ttaaacattcttcat

SEQ ID NO: 901657 - DNA, 15 bp, Homo sapiens
attaaacattcttca

SEQ ID NO: 901658 - DNA, 15 bp, Homo sapiens
aattaaacattcttc

SEQ ID NO: 901659 - DNA, 15 bp, Homo sapiens
gaattaaacattctt

SEQ ID NO: 901660 - DNA, 15 bp, Homo sapiens
tgaattaaacattct

SEQ ID NO: 901661 - DNA, 15 bp, Homo sapiens
ttgaattaaacattc

SEQ ID NO: 901662 - DNA, 15 bp, Homo sapiens
tttgaattaaacatt

SEQ ID NO: 901663 - DNA, 15 bp, Homo sapiens
atttgaattaaacat

SEQ ID NO: 901664 - DNA, 15 bp, Homo sapiens
aatttgaattaaaca

SEQ ID NO: 901665 - DNA, 15 bp, Homo sapiens
taatttgaattaaac

SEQ ID NO: 901666 - DNA, 15 bp, Homo sapiens
ataatttgaattaaa

SEQ ID NO: 901667 - DNA, 15 bp, Homo sapiens
aataatttgaattaa

SEQ ID NO: 901668 - DNA, 15 bp, Homo sapiens
caataatttgaatta

SEQ ID NO: 901669 - DNA, 15 bp, Homo sapiens
tcaataatttgaatt

SEQ ID NO: 901670 - DNA, 15 bp, Homo sapiens
ctcaataatttgaat

SEQ ID NO: 901671 - DNA, 15 bp, Homo sapiens
actcaataatttgaa

SEQ ID NO: 901672 - DNA, 15 bp, Homo sapiens
tactcaataatttga

SEQ ID NO: 901673 - DNA, 15 bp, Homo sapiens
ttactcaataatttg

SEQ ID NO: 901674 - DNA, 15 bp, Homo sapiens
tttactcaataattt

SEQ ID NO: 901675 - DNA, 15 bp, Homo sapiens
gtttactcaataatt

SEQ ID NO: 901676 - DNA, 15 bp, Homo sapiens
tgtttactcaataat

SEQ ID NO: 901677 - DNA, 15 bp, Homo sapiens
gtgtttactcaataa

SEQ ID NO: 901678 - DNA, 15 bp, Homo sapiens
agtgtttactcaata

SEQ ID NO: 901679 - DNA, 15 bp, Homo sapiens
aagtgtttactcaat

SEQ ID NO: 901680 - DNA, 15 bp, Homo sapiens
taagtgtttactcaa

SEQ ID NO: 901681 - DNA, 15 bp, Homo sapiens
gtaagtgtttactca

SEQ ID NO: 901682 - DNA, 15 bp, Homo sapiens
tgtaagtgtttactc

SEQ ID NO: 901683 - DNA, 15 bp, Homo sapiens
ttgtaagtgtttact

SEQ ID NO: 901684 - DNA, 15 bp, Homo sapiens
tttgtaagtgtttac

SEQ ID NO: 901685 - DNA, 15 bp, Homo sapiens
ttttgtaagtgttta

SEQ ID NO: 901686 - DNA, 15 bp, Homo sapiens
attttgtaagtgttt

SEQ ID NO: 901687 - DNA, 15 bp, Homo sapiens
aattttgtaagtgtt

SEQ ID NO: 901688 - DNA, 15 bp, Homo sapiens
taattttgtaagtgt

SEQ ID NO: 901689 - DNA, 15 bp, Homo sapiens
ttaattttgtaagtg

SEQ ID NO: 901690 - DNA, 15 bp, Homo sapiens
tttaattttgtaagt

SEQ ID NO: 901691 - DNA, 15 bp, Homo sapiens
ttttaattttgtaag

SEQ ID NO: 901692 - DNA, 15 bp, Homo sapiens
attttaattttgtaa

SEQ ID NO: 901693 - DNA, 15 bp, Homo sapiens
tattttaattttgta

SEQ ID NO: 901694 - DNA, 15 bp, Homo sapiens
atattttaattttgt

SEQ ID NO: 901695 - DNA, 15 bp, Homo sapiens
tatattttaattttg

SEQ ID NO: 901696 - DNA, 15 bp, Homo sapiens
ttatattttaatttt

SEQ ID NO: 901697 - DNA, 15 bp, Homo sapiens
gttatattttaattt

SEQ ID NO: 901698 - DNA, 15 bp, Homo sapiens
tgttatattttaatt

SEQ ID NO: 901699 - DNA, 15 bp, Homo sapiens
atgttatattttaat

SEQ ID NO: 901700 - DNA, 15 bp, Homo sapiens
aatgttatattttaa

SEQ ID NO: 901701 - DNA, 15 bp, Homo sapiens
aaatgttatatttta

SEQ ID NO: 901702 - DNA, 15 bp, Homo sapiens
taaatgttatatttt

SEQ ID NO: 901703 - DNA, 15 bp, Homo sapiens
ttaaatgttatattt

SEQ ID NO: 901704 - DNA, 15 bp, Homo sapiens
attaaatgttatatt

SEQ ID NO: 901705 - DNA, 15 bp, Homo sapiens
tattaaatgttatat

SEQ ID NO: 901706 - DNA, 15 bp, Homo sapiens
ttattaaatgttata

SEQ ID NO: 901707 - DNA, 15 bp, Homo sapiens
tttattaaatgttat

SEQ ID NO: 901708 - DNA, 15 bp, Homo sapiens
ttttattaaatgtta

SEQ ID NO: 901709 - DNA, 15 bp, Homo sapiens
tttttattaaatgtt

SEQ ID NO: 901710 - DNA, 15 bp, Homo sapiens
atttttattaaatgt

SEQ ID NO: 901711 - DNA, 15 bp, Homo sapiens
tatttttattaaatg

SEQ ID NO: 901712 - DNA, 15 bp, Homo sapiens
ctatttttattaaat

SEQ ID NO: 901713 - DNA, 15 bp, Homo sapiens
gctatttttattaaa

SEQ ID NO: 901714 - DNA, 15 bp, Homo sapiens
tgctatttttattaa

SEQ ID NO: 901715 - DNA, 15 bp, Homo sapiens
ttgctatttttatta

SEQ ID NO: 901716 - DNA, 15 bp, Homo sapiens
cttgctatttttatt

SEQ ID NO: 901717 - DNA, 15 bp, Homo sapiens
tcttgctatttttat

SEQ ID NO: 901718 - DNA, 15 bp, Homo sapiens
atcttgctattttta

SEQ ID NO: 901719 - DNA, 15 bp, Homo sapiens
aatcttgctattttt

SEQ ID NO: 901720 - DNA, 15 bp, Homo sapiens
caatcttgctatttt

SEQ ID NO: 901721 - DNA, 15 bp, Homo sapiens
tcaatcttgctattt

SEQ ID NO: 901722 - DNA, 15 bp, Homo sapiens
ctcaatcttgctatt

SEQ ID NO: 901723 - DNA, 15 bp, Homo sapiens
cctcaatcttgctat

SEQ ID NO: 901724 - DNA, 15 bp, Homo sapiens
tcctcaatcttgcta

SEQ ID NO: 901725 - DNA, 15 bp, Homo sapiens
ttcctcaatcttgct

SEQ ID NO: 901726 - DNA, 15 bp, Homo sapiens
gttcctcaatcttgc

SEQ ID NO: 901727 - DNA, 15 bp, Homo sapiens
tgttcctcaatcttg

SEQ ID NO: 901728 - DNA, 15 bp, Homo sapiens
ttgttcctcaatctt

SEQ ID NO: 901729 - DNA, 15 bp, Homo sapiens
cttgttcctcaatct

SEQ ID NO: 901730 - DNA, 15 bp, Homo sapiens
gcttgttcctcaatc

SEQ ID NO: 901731 - DNA, 15 bp, Homo sapiens
tgcttgttcctcaat

SEQ ID NO: 901732 - DNA, 15 bp, Homo sapiens
gtgcttgttcctcaa

SEQ ID NO: 901733 - DNA, 15 bp, Homo sapiens
agtgcttgttcctca

SEQ ID NO: 901734 - DNA, 15 bp, Homo sapiens
aagtgcttgttcctc

SEQ ID NO: 901735 - DNA, 15 bp, Homo sapiens
gaagtgcttgttcct

SEQ ID NO: 901736 - DNA, 15 bp, Homo sapiens
tgaagtgcttgttcc

SEQ ID NO: 901737 - DNA, 15 bp, Homo sapiens
gtgaagtgcttgttc

SEQ ID NO: 901738 - DNA, 15 bp, Homo sapiens
tgtgaagtgcttgtt

SEQ ID NO: 901739 - DNA, 15 bp, Homo sapiens
ttgtgaagtgcttgt

SEQ ID NO: 901740 - DNA, 15 bp, Homo sapiens
tttgtgaagtgcttg

SEQ ID NO: 901741 - DNA, 15 bp, Homo sapiens
atttgtgaagtgctt

SEQ ID NO: 901742 - DNA, 15 bp, Homo sapiens
tatttgtgaagtgct

SEQ ID NO: 901743 - DNA, 15 bp, Homo sapiens
atatttgtgaagtgc

SEQ ID NO: 901744 - DNA, 15 bp, Homo sapiens
aatatttgtgaagtg

SEQ ID NO: 901745 - DNA, 15 bp, Homo sapiens
caatatttgtgaagt

SEQ ID NO: 901746 - DNA, 15 bp, Homo sapiens
ccaatatttgtgaag

SEQ ID NO: 901747 - DNA, 15 bp, Homo sapiens
accaatatttgtgaa

SEQ ID NO: 901748 - DNA, 15 bp, Homo sapiens
aaccaatatttgtga

SEQ ID NO: 901749 - DNA, 15 bp, Homo sapiens
aaaccaatatttgtg

SEQ ID NO: 901750 - DNA, 15 bp, Homo sapiens
gaaaccaatatttgt

SEQ ID NO: 901751 - DNA, 15 bp, Homo sapiens
ggaaaccaatatttg

SEQ ID NO: 901752 - DNA, 15 bp, Homo sapiens
gggaaaccaatattt

SEQ ID NO: 901753 - DNA, 15 bp, Homo sapiens
tgggaaaccaatatt

SEQ ID NO: 901754 - DNA, 15 bp, Homo sapiens
ctgggaaaccaatat

SEQ ID NO: 901755 - DNA, 15 bp, Homo sapiens
tctgggaaaccaata

SEQ ID NO: 901756 - DNA, 15 bp, Homo sapiens
ttctgggaaaccaat

SEQ ID NO: 901757 - DNA, 15 bp, Homo sapiens
attctgggaaaccaa

SEQ ID NO: 901758 - DNA, 15 bp, Homo sapiens
cattctgggaaacca

SEQ ID NO: 901759 - DNA, 15 bp, Homo sapiens
acattctgggaaacc

SEQ ID NO: 901760 - DNA, 15 bp, Homo sapiens
gacattctgggaaac

SEQ ID NO: 901761 - DNA, 15 bp, Homo sapiens
agacattctgggaaa

SEQ ID NO: 901762 - DNA, 15 bp, Homo sapiens
cagacattctgggaa

SEQ ID NO: 901763 - DNA, 15 bp, Homo sapiens
tcagacattctggga

SEQ ID NO: 901764 - DNA, 15 bp, Homo sapiens
ctcagacattctggg

SEQ ID NO: 901765 - DNA, 15 bp, Homo sapiens
cctcagacattctgg

SEQ ID NO: 901766 - DNA, 15 bp, Homo sapiens
tcctcagacattctg

SEQ ID NO: 901767 - DNA, 15 bp, Homo sapiens
ctcctcagacattct

SEQ ID NO: 901768 - DNA, 15 bp, Homo sapiens
cctcctcagacattc

SEQ ID NO: 901769 - DNA, 15 bp, Homo sapiens
acctcctcagacatt

SEQ ID NO: 901770 - DNA, 15 bp, Homo sapiens
cacctcctcagacat

SEQ ID NO: 901771 - DNA, 15 bp, Homo sapiens
acacctcctcagaca

SEQ ID NO: 901772 - DNA, 15 bp, Homo sapiens
tacacctcctcagac

SEQ ID NO: 901773 - DNA, 15 bp, Homo sapiens
atacacctcctcaga

SEQ ID NO: 901774 - DNA, 15 bp, Homo sapiens
tatacacctcctcag

SEQ ID NO: 901775 - DNA, 15 bp, Homo sapiens
ctatacacctcctca

SEQ ID NO: 901776 - DNA, 15 bp, Homo sapiens
tctatacacctcctc

SEQ ID NO: 901777 - DNA, 15 bp, Homo sapiens
ttctatacacctcct

SEQ ID NO: 901778 - DNA, 15 bp, Homo sapiens
cttctatacacctcc

SEQ ID NO: 901779 - DNA, 15 bp, Homo sapiens
acttctatacacctc

SEQ ID NO: 901780 - DNA, 15 bp, Homo sapiens
aacttctatacacct

SEQ ID NO: 901781 - DNA, 15 bp, Homo sapiens
taacttctatacacc

SEQ ID NO: 901782 - DNA, 15 bp, Homo sapiens
ttaacttctatacac

SEQ ID NO: 901783 - DNA, 15 bp, Homo sapiens
cttaacttctataca

SEQ ID NO: 901784 - DNA, 15 bp, Homo sapiens
tcttaacttctatac

SEQ ID NO: 901785 - DNA, 15 bp, Homo sapiens
ttcttaacttctata

SEQ ID NO: 901786 - DNA, 15 bp, Homo sapiens
attcttaacttctat

SEQ ID NO: 901787 - DNA, 15 bp, Homo sapiens
tattcttaacttcta

SEQ ID NO: 901788 - DNA, 15 bp, Homo sapiens
atattcttaacttct

SEQ ID NO: 901789 - DNA, 15 bp, Homo sapiens
catattcttaacttc

SEQ ID NO: 901790 - DNA, 15 bp, Homo sapiens
acatattcttaactt

SEQ ID NO: 901791 - DNA, 15 bp, Homo sapiens
gacatattcttaact

SEQ ID NO: 901792 - DNA, 15 bp, Homo sapiens
ggacatattcttaac

SEQ ID NO: 901793 - DNA, 15 bp, Homo sapiens
aggacatattcttaa

SEQ ID NO: 901794 - DNA, 15 bp, Homo sapiens
gaggacatattctta

SEQ ID NO: 901795 - DNA, 15 bp, Homo sapiens
ggaggacatattctt

SEQ ID NO: 901796 - DNA, 15 bp, Homo sapiens
tggaggacatattct

SEQ ID NO: 901797 - DNA, 15 bp, Homo sapiens
ctggaggacatattc

SEQ ID NO: 901798 - DNA, 15 bp, Homo sapiens
gctggaggacatatt

SEQ ID NO: 901799 - DNA, 15 bp, Homo sapiens
ggctggaggacatat

SEQ ID NO: 901800 - DNA, 15 bp, Homo sapiens
tggctggaggacata

SEQ ID NO: 901801 - DNA, 15 bp, Homo sapiens
ctggctggaggacat

SEQ ID NO: 901802 - DNA, 15 bp, Homo sapiens
tctggctggaggaca

SEQ ID NO: 901803 - DNA, 15 bp, Homo sapiens
ctctggctggaggac

SEQ ID NO: 901804 - DNA, 15 bp, Homo sapiens
tctctggctggagga

SEQ ID NO: 901805 - DNA, 15 bp, Homo sapiens
ctctctggctggagg

SEQ ID NO: 901806 - DNA, 15 bp, Homo sapiens
tctctctggctggag

SEQ ID NO: 901807 - DNA, 15 bp, Homo sapiens
atctctctggctgga

SEQ ID NO: 901808 - DNA, 15 bp, Homo sapiens
gatctctctggctgg

SEQ ID NO: 901809 - DNA, 15 bp, Homo sapiens
agatctctctggctg

SEQ ID NO: 901810 - DNA, 15 bp, Homo sapiens
cagatctctctggct

SEQ ID NO: 901811 - DNA, 15 bp, Homo sapiens
acagatctctctggc

SEQ ID NO: 901812 - DNA, 15 bp, Homo sapiens
cacagatctctctgg

SEQ ID NO: 901813 - DNA, 15 bp, Homo sapiens
acacagatctctctg

SEQ ID NO: 901814 - DNA, 15 bp, Homo sapiens
aacacagatctctct

SEQ ID NO: 901815 - DNA, 15 bp, Homo sapiens
gaacacagatctctc

SEQ ID NO: 901816 - DNA, 15 bp, Homo sapiens
tgaacacagatctct

SEQ ID NO: 901817 - DNA, 15 bp, Homo sapiens
ttgaacacagatctc

SEQ ID NO: 901818 - DNA, 15 bp, Homo sapiens
attgaacacagatct

SEQ ID NO: 901819 - DNA, 15 bp, Homo sapiens
gattgaacacagatc

SEQ ID NO: 901820 - DNA, 15 bp, Homo sapiens
tgattgaacacagat

SEQ ID NO: 901821 - DNA, 15 bp, Homo sapiens
gtgattgaacacaga

SEQ ID NO: 901822 - DNA, 15 bp, Homo sapiens
tgtgattgaacacag

SEQ ID NO: 901823 - DNA, 15 bp, Homo sapiens
gtgtgattgaacaca

SEQ ID NO: 901824 - DNA, 15 bp, Homo sapiens
agtgtgattgaacac

SEQ ID NO: 901825 - DNA, 15 bp, Homo sapiens
tagtgtgattgaaca

SEQ ID NO: 901826 - DNA, 15 bp, Homo sapiens
atagtgtgattgaac

SEQ ID NO: 901827 - DNA, 15 bp, Homo sapiens
aatagtgtgattgaa

SEQ ID NO: 901828 - DNA, 15 bp, Homo sapiens
aaatagtgtgattga

SEQ ID NO: 901829 - DNA, 15 bp, Homo sapiens
taaatagtgtgattg

SEQ ID NO: 901830 - DNA, 15 bp, Homo sapiens
ttaaatagtgtgatt

SEQ ID NO: 901831 - DNA, 15 bp, Homo sapiens
cttaaatagtgtgat

SEQ ID NO: 901832 - DNA, 15 bp, Homo sapiens
acttaaatagtgtga

SEQ ID NO: 901833 - DNA, 15 bp, Homo sapiens
aacttaaatagtgtg

SEQ ID NO: 901834 - DNA, 15 bp, Homo sapiens
taacttaaatagtgt

SEQ ID NO: 901835 - DNA, 15 bp, Homo sapiens
gtaacttaaatagtg

SEQ ID NO: 901836 - DNA, 15 bp, Homo sapiens
agtaacttaaatagt

SEQ ID NO: 901837 - DNA, 15 bp, Homo sapiens
aagtaacttaaatag

SEQ ID NO: 901838 - DNA, 15 bp, Homo sapiens
taagtaacttaaata

SEQ ID NO: 901839 - DNA, 15 bp, Homo sapiens
ctaagtaacttaaat

SEQ ID NO: 901840 - DNA, 15 bp, Homo sapiens
gctaagtaacttaaa

SEQ ID NO: 901841 - DNA, 15 bp, Homo sapiens
agctaagtaacttaa

SEQ ID NO: 901842 - DNA, 15 bp, Homo sapiens
aagctaagtaactta

SEQ ID NO: 901843 - DNA, 15 bp, Homo sapiens
gaagctaagtaactt

SEQ ID NO: 901844 - DNA, 15 bp, Homo sapiens
agaagctaagtaact

SEQ ID NO: 901845 - DNA, 15 bp, Homo sapiens
gagaagctaagtaac

SEQ ID NO: 901846 - DNA, 15 bp, Homo sapiens
ggagaagctaagtaa

SEQ ID NO: 901847 - DNA, 15 bp, Homo sapiens
tggagaagctaagta

SEQ ID NO: 901848 - DNA, 15 bp, Homo sapiens
ttggagaagctaagt

SEQ ID NO: 901849 - DNA, 15 bp, Homo sapiens
cttggagaagctaag

SEQ ID NO: 901850 - DNA, 15 bp, Homo sapiens
gcttggagaagctaa

SEQ ID NO: 901851 - DNA, 15 bp, Homo sapiens
ggcttggagaagcta

SEQ ID NO: 901852 - DNA, 15 bp, Homo sapiens
aggcttggagaagct

SEQ ID NO: 901853 - DNA, 15 bp, Homo sapiens
gaggcttggagaagc

SEQ ID NO: 901854 - DNA, 15 bp, Homo sapiens
tgaggcttggagaag

SEQ ID NO: 901855 - DNA, 15 bp, Homo sapiens
ctgaggcttggagaa

SEQ ID NO: 901856 - DNA, 15 bp, Homo sapiens
actgaggcttggaga

SEQ ID NO: 901857 - DNA, 15 bp, Homo sapiens
aactgaggcttggag

SEQ ID NO: 901858 - DNA, 15 bp, Homo sapiens
aaactgaggcttgga

SEQ ID NO: 901859 - DNA, 15 bp, Homo sapiens
gaaactgaggcttgg

SEQ ID NO: 901860 - DNA, 15 bp, Homo sapiens
agaaactgaggcttg

SEQ ID NO: 901861 - DNA, 15 bp, Homo sapiens
aagaaactgaggctt

SEQ ID NO: 901862 - DNA, 15 bp, Homo sapiens
taagaaactgaggct

SEQ ID NO: 901863 - DNA, 15 bp, Homo sapiens
ttaagaaactgaggc

SEQ ID NO: 901864 - DNA, 15 bp, Homo sapiens
gttaagaaactgagg

SEQ ID NO: 901865 - DNA, 15 bp, Homo sapiens
agttaagaaactgag

SEQ ID NO: 901866 - DNA, 15 bp, Homo sapiens
gagttaagaaactga

SEQ ID NO: 901867 - DNA, 15 bp, Homo sapiens
tgagttaagaaactg

SEQ ID NO: 901868 - DNA, 15 bp, Homo sapiens
ctgagttaagaaact

SEQ ID NO: 901869 - DNA, 15 bp, Homo sapiens
tctgagttaagaaac

SEQ ID NO: 901870 - DNA, 15 bp, Homo sapiens
atctgagttaagaaa

SEQ ID NO: 901871 - DNA, 15 bp, Homo sapiens
catctgagttaagaa

SEQ ID NO: 901872 - DNA, 15 bp, Homo sapiens
ccatctgagttaaga

SEQ ID NO: 901873 - DNA, 15 bp, Homo sapiens
tccatctgagttaag

SEQ ID NO: 901874 - DNA, 15 bp, Homo sapiens
ttccatctgagttaa

SEQ ID NO: 901875 - DNA, 15 bp, Homo sapiens
tttccatctgagtta

SEQ ID NO: 901876 - DNA, 15 bp, Homo sapiens
ttttccatctgagtt

SEQ ID NO: 901877 - DNA, 15 bp, Homo sapiens
attttccatctgagt

SEQ ID NO: 901878 - DNA, 15 bp, Homo sapiens
cattttccatctgag

SEQ ID NO: 901879 - DNA, 15 bp, Homo sapiens
tcattttccatctga

SEQ ID NO: 901880 - DNA, 15 bp, Homo sapiens
ctcattttccatctg

SEQ ID NO: 901881 - DNA, 15 bp, Homo sapiens
cctcattttccatct

SEQ ID NO: 901882 - DNA, 15 bp, Homo sapiens
tcctcattttccatc

SEQ ID NO: 901883 - DNA, 15 bp, Homo sapiens
gtcctcattttccat

SEQ ID NO: 901884 - DNA, 15 bp, Homo sapiens
tgtcctcattttcca

SEQ ID NO: 901885 - DNA, 15 bp, Homo sapiens
ttgtcctcattttcc

SEQ ID NO: 901886 - DNA, 15 bp, Homo sapiens
attgtcctcattttc

SEQ ID NO: 901887 - DNA, 15 bp, Homo sapiens
cattgtcctcatttt

SEQ ID NO: 901888 - DNA, 15 bp, Homo sapiens
acattgtcctcattt

SEQ ID NO: 901889 - DNA, 15 bp, Homo sapiens
tacattgtcctcatt

SEQ ID NO: 901890 - DNA, 15 bp, Homo sapiens
ttacattgtcctcat

SEQ ID NO: 901891 - DNA, 15 bp, Homo sapiens
cttacattgtcctca

SEQ ID NO: 901892 - DNA, 15 bp, Homo sapiens
gcttacattgtcctc

SEQ ID NO: 901893 - DNA, 15 bp, Homo sapiens
tgcttacattgtcct

SEQ ID NO: 901894 - DNA, 15 bp, Homo sapiens
gtgcttacattgtcc

SEQ ID NO: 901895 - DNA, 15 bp, Homo sapiens
ggtgcttacattgtc

SEQ ID NO: 901896 - DNA, 15 bp, Homo sapiens
aggtgcttacattgt

SEQ ID NO: 901897 - DNA, 15 bp, Homo sapiens
taggtgcttacattg

SEQ ID NO: 901898 - DNA, 15 bp, Homo sapiens
ataggtgcttacatt

SEQ ID NO: 901899 - DNA, 15 bp, Homo sapiens
aataggtgcttacat

SEQ ID NO: 901900 - DNA, 15 bp, Homo sapiens
aaataggtgcttaca

SEQ ID NO: 901901 - DNA, 15 bp, Homo sapiens
gaaataggtgcttac

SEQ ID NO: 901902 - DNA, 15 bp, Homo sapiens
tgaaataggtgctta

SEQ ID NO: 901903 - DNA, 15 bp, Homo sapiens
gtgaaataggtgctt

SEQ ID NO: 901904 - DNA, 15 bp, Homo sapiens
agtgaaataggtgct

SEQ ID NO: 901905 - DNA, 15 bp, Homo sapiens
cagtgaaataggtgc

SEQ ID NO: 901906 - DNA, 15 bp, Homo sapiens
ccagtgaaataggtg

SEQ ID NO: 901907 - DNA, 15 bp, Homo sapiens
tccagtgaaataggt

SEQ ID NO: 901908 - DNA, 15 bp, Homo sapiens
atccagtgaaatagg

SEQ ID NO: 901909 - DNA, 15 bp, Homo sapiens
aatccagtgaaatag

SEQ ID NO: 901910 - DNA, 15 bp, Homo sapiens
caatccagtgaaata

SEQ ID NO: 901911 - DNA, 15 bp, Homo sapiens
acaatccagtgaaat

SEQ ID NO: 901912 - DNA, 15 bp, Homo sapiens
tacaatccagtgaaa

SEQ ID NO: 901913 - DNA, 15 bp, Homo sapiens
ttacaatccagtgaa

SEQ ID NO: 901914 - DNA, 15 bp, Homo sapiens
cttacaatccagtga

SEQ ID NO: 901915 - DNA, 15 bp, Homo sapiens
ccttacaatccagtg

SEQ ID NO: 901916 - DNA, 15 bp, Homo sapiens
tccttacaatccagt

SEQ ID NO: 901917 - DNA, 15 bp, Homo sapiens
ttccttacaatccag

SEQ ID NO: 901918 - DNA, 15 bp, Homo sapiens
cttccttacaatcca

SEQ ID NO: 901919 - DNA, 15 bp, Homo sapiens
tcttccttacaatcc

SEQ ID NO: 901920 - DNA, 15 bp, Homo sapiens
ttcttccttacaatc

SEQ ID NO: 901921 - DNA, 15 bp, Homo sapiens
attcttccttacaat

SEQ ID NO: 901922 - DNA, 15 bp, Homo sapiens
tattcttccttacaa

SEQ ID NO: 901923 - DNA, 15 bp, Homo sapiens
ttattcttccttaca

SEQ ID NO: 901924 - DNA, 15 bp, Homo sapiens
tttattcttccttac

SEQ ID NO: 901925 - DNA, 15 bp, Homo sapiens
gtttattcttcctta

SEQ ID NO: 901926 - DNA, 15 bp, Homo sapiens
tgtttattcttcctt

SEQ ID NO: 901927 - DNA, 15 bp, Homo sapiens
ttgtttattcttcct

SEQ ID NO: 901928 - DNA, 15 bp, Homo sapiens
cttgtttattcttcc

SEQ ID NO: 901929 - DNA, 15 bp, Homo sapiens
tcttgtttattcttc

SEQ ID NO: 901930 - DNA, 15 bp, Homo sapiens
atcttgtttattctt

SEQ ID NO: 901931 - DNA, 15 bp, Homo sapiens
tatcttgtttattct

SEQ ID NO: 901932 - DNA, 15 bp, Homo sapiens
ttatcttgtttattc

SEQ ID NO: 901933 - DNA, 15 bp, Homo sapiens
attatcttgtttatt

SEQ ID NO: 901934 - DNA, 15 bp, Homo sapiens
cattatcttgtttat

SEQ ID NO: 901935 - DNA, 15 bp, Homo sapiens
tcattatcttgttta

SEQ ID NO: 901936 - DNA, 15 bp, Homo sapiens
ttcattatcttgttt

SEQ ID NO: 901937 - DNA, 15 bp, Homo sapiens
attcattatcttgtt

SEQ ID NO: 901938 - DNA, 15 bp, Homo sapiens
tattcattatcttgt

SEQ ID NO: 901939 - DNA, 15 bp, Homo sapiens
ctattcattatcttg

SEQ ID NO: 901940 - DNA, 15 bp, Homo sapiens
actattcattatctt

SEQ ID NO: 901941 - DNA, 15 bp, Homo sapiens
tactattcattatct

SEQ ID NO: 901942 - DNA, 15 bp, Homo sapiens
atactattcattatc

SEQ ID NO: 901943 - DNA, 15 bp, Homo sapiens
aatactattcattat

SEQ ID NO: 901944 - DNA, 15 bp, Homo sapiens
aaatactattcatta

SEQ ID NO: 901945 - DNA, 15 bp, Homo sapiens
caaatactattcatt

SEQ ID NO: 901946 - DNA, 15 bp, Homo sapiens
ccaaatactattcat

SEQ ID NO: 901947 - DNA, 15 bp, Homo sapiens
gccaaatactattca

SEQ ID NO: 901948 - DNA, 15 bp, Homo sapiens
tgccaaatactattc

SEQ ID NO: 901949 - DNA, 15 bp, Homo sapiens
atgccaaatactatt

SEQ ID NO: 901950 - DNA, 15 bp, Homo sapiens
tatgccaaatactat

SEQ ID NO: 901951 - DNA, 15 bp, Homo sapiens
atatgccaaatacta

SEQ ID NO: 901952 - DNA, 15 bp, Homo sapiens
tatatgccaaatact

SEQ ID NO: 901953 - DNA, 15 bp, Homo sapiens
ttatatgccaaatac

SEQ ID NO: 901954 - DNA, 15 bp, Homo sapiens
attatatgccaaata

SEQ ID NO: 901955 - DNA, 15 bp, Homo sapiens
gattatatgccaaat

SEQ ID NO: 901956 - DNA, 15 bp, Homo sapiens
agattatatgccaaa

SEQ ID NO: 901957 - DNA, 15 bp, Homo sapiens
aagattatatgccaa

SEQ ID NO: 901958 - DNA, 15 bp, Homo sapiens
aaagattatatgcca

SEQ ID NO: 901959 - DNA, 15 bp, Homo sapiens
gaaagattatatgcc

SEQ ID NO: 901960 - DNA, 15 bp, Homo sapiens
tgaaagattatatgc

SEQ ID NO: 901961 - DNA, 15 bp, Homo sapiens
ctgaaagattatatg

SEQ ID NO: 901962 - DNA, 15 bp, Homo sapiens
tctgaaagattatat

SEQ ID NO: 901963 - DNA, 15 bp, Homo sapiens
ttctgaaagattata

SEQ ID NO: 901964 - DNA, 15 bp, Homo sapiens
tttctgaaagattat

SEQ ID NO: 901965 - DNA, 15 bp, Homo sapiens
ttttctgaaagatta

SEQ ID NO: 901966 - DNA, 15 bp, Homo sapiens
cttttctgaaagatt

SEQ ID NO: 901967 - DNA, 15 bp, Homo sapiens
acttttctgaaagat

SEQ ID NO: 901968 - DNA, 15 bp, Homo sapiens
tacttttctgaaaga

SEQ ID NO: 901969 - DNA, 15 bp, Homo sapiens
ctacttttctgaaag

SEQ ID NO: 901970 - DNA, 15 bp, Homo sapiens
actacttttctgaaa

SEQ ID NO: 901971 - DNA, 15 bp, Homo sapiens
tactacttttctgaa

SEQ ID NO: 901972 - DNA, 15 bp, Homo sapiens
ttactacttttctga

SEQ ID NO: 901973 - DNA, 15 bp, Homo sapiens
tttactacttttctg

SEQ ID NO: 901974 - DNA, 15 bp, Homo sapiens
ttttactacttttct

SEQ ID NO: 901975 - DNA, 15 bp, Homo sapiens
attttactacttttc

SEQ ID NO: 901976 - DNA, 15 bp, Homo sapiens
aattttactactttt

SEQ ID NO: 901977 - DNA, 15 bp, Homo sapiens
caattttactacttt

SEQ ID NO: 901978 - DNA, 15 bp, Homo sapiens
acaattttactactt

SEQ ID NO: 901979 - DNA, 15 bp, Homo sapiens
gacaattttactact

SEQ ID NO: 901980 - DNA, 15 bp, Homo sapiens
tgacaattttactac

SEQ ID NO: 901981 - DNA, 15 bp, Homo sapiens
atgacaattttacta

SEQ ID NO: 901982 - DNA, 15 bp, Homo sapiens
aatgacaattttact

SEQ ID NO: 901983 - DNA, 15 bp, Homo sapiens
gaatgacaattttac

SEQ ID NO: 901984 - DNA, 15 bp, Homo sapiens
ggaatgacaatttta

SEQ ID NO: 901985 - DNA, 15 bp, Homo sapiens
aggaatgacaatttt

SEQ ID NO: 901986 - DNA, 15 bp, Homo sapiens
taggaatgacaattt

SEQ ID NO: 901987 - DNA, 15 bp, Homo sapiens
ataggaatgacaatt

SEQ ID NO: 901988 - DNA, 15 bp, Homo sapiens
tataggaatgacaat

SEQ ID NO: 901989 - DNA, 15 bp, Homo sapiens
ttataggaatgacaa

SEQ ID NO: 901990 - DNA, 15 bp, Homo sapiens
tttataggaatgaca

SEQ ID NO: 901991 - DNA, 15 bp, Homo sapiens
atttataggaatgac

SEQ ID NO: 901992 - DNA, 15 bp, Homo sapiens
gatttataggaatga

SEQ ID NO: 901993 - DNA, 15 bp, Homo sapiens
agatttataggaatg

SEQ ID NO: 901994 - DNA, 15 bp, Homo sapiens
tagatttataggaat

SEQ ID NO: 901995 - DNA, 15 bp, Homo sapiens
ttagatttataggaa

SEQ ID NO: 901996 - DNA, 15 bp, Homo sapiens
gttagatttatagga

SEQ ID NO: 901997 - DNA, 15 bp, Homo sapiens
agttagatttatagg

SEQ ID NO: 901998 - DNA, 15 bp, Homo sapiens
tagttagatttatag

SEQ ID NO: 901999 - DNA, 15 bp, Homo sapiens
ttagttagatttata

SEQ ID NO: 902000 - DNA, 15 bp, Homo sapiens
attagttagatttat

SEQ ID NO: 902001 - DNA, 15 bp, Homo sapiens
cattagttagattta

SEQ ID NO: 902002 - DNA, 15 bp, Homo sapiens
acattagttagattt

SEQ ID NO: 902003 - DNA, 15 bp, Homo sapiens
gacattagttagatt

SEQ ID NO: 902004 - DNA, 15 bp, Homo sapiens
agacattagttagat

SEQ ID NO: 902005 - DNA, 15 bp, Homo sapiens
aagacattagttaga

SEQ ID NO: 902006 - DNA, 15 bp, Homo sapiens
aaagacattagttag

SEQ ID NO: 902007 - DNA, 15 bp, Homo sapiens
taaagacattagtta

SEQ ID NO: 902008 - DNA, 15 bp, Homo sapiens
ttaaagacattagtt

SEQ ID NO: 902009 - DNA, 15 bp, Homo sapiens
tttaaagacattagt

SEQ ID NO: 902010 - DNA, 15 bp, Homo sapiens
ttttaaagacattag

SEQ ID NO: 902011 - DNA, 15 bp, Homo sapiens
attttaaagacatta

SEQ ID NO: 902012 - DNA, 15 bp, Homo sapiens
aattttaaagacatt

SEQ ID NO: 902013 - DNA, 15 bp, Homo sapiens
gaattttaaagacat

SEQ ID NO: 902014 - DNA, 15 bp, Homo sapiens
tgaattttaaagaca

SEQ ID NO: 902015 - DNA, 15 bp, Homo sapiens
atgaattttaaagac

SEQ ID NO: 902016 - DNA, 15 bp, Homo sapiens
gatgaattttaaaga

SEQ ID NO: 902017 - DNA, 15 bp, Homo sapiens
agatgaattttaaag

SEQ ID NO: 902018 - DNA, 15 bp, Homo sapiens
gagatgaattttaaa

SEQ ID NO: 902019 - DNA, 15 bp, Homo sapiens
tgagatgaattttaa

SEQ ID NO: 902020 - DNA, 15 bp, Homo sapiens
gtgagatgaatttta

SEQ ID NO: 902021 - DNA, 15 bp, Homo sapiens
tgtgagatgaatttt

SEQ ID NO: 902022 - DNA, 15 bp, Homo sapiens
ttgtgagatgaattt

SEQ ID NO: 902023 - DNA, 15 bp, Homo sapiens
tttgtgagatgaatt

SEQ ID NO: 902024 - DNA, 15 bp, Homo sapiens
ttttgtgagatgaat

SEQ ID NO: 902025 - DNA, 15 bp, Homo sapiens
attttgtgagatgaa

SEQ ID NO: 902026 - DNA, 15 bp, Homo sapiens
gattttgtgagatga

SEQ ID NO: 902027 - DNA, 15 bp, Homo sapiens
tgattttgtgagatg

SEQ ID NO: 902028 - DNA, 15 bp, Homo sapiens
ctgattttgtgagat

SEQ ID NO: 902029 - DNA, 15 bp, Homo sapiens
actgattttgtgaga

SEQ ID NO: 902030 - DNA, 15 bp, Homo sapiens
tactgattttgtgag

SEQ ID NO: 902031 - DNA, 15 bp, Homo sapiens
atactgattttgtga

SEQ ID NO: 902032 - DNA, 15 bp, Homo sapiens
gatactgattttgtg

SEQ ID NO: 902033 - DNA, 15 bp, Homo sapiens
agatactgattttgt

SEQ ID NO: 902034 - DNA, 15 bp, Homo sapiens
aagatactgattttg

SEQ ID NO: 902035 - DNA, 15 bp, Homo sapiens
aaagatactgatttt

SEQ ID NO: 902036 - DNA, 15 bp, Homo sapiens
aaaagatactgattt

SEQ ID NO: 902037 - DNA, 15 bp, Homo sapiens
aaaaagatactgatt

SEQ ID NO: 902038 - DNA, 15 bp, Homo sapiens
taaaaagatactgat

SEQ ID NO: 902039 - DNA, 15 bp, Homo sapiens
ataaaaagatactga

SEQ ID NO: 902040 - DNA, 15 bp, Homo sapiens
aataaaaagatactg

SEQ ID NO: 902041 - DNA, 15 bp, Homo sapiens
aaataaaaagatact

SEQ ID NO: 902042 - DNA, 15 bp, Homo sapiens
aaaataaaaagatac

SEQ ID NO: 902043 - DNA, 15 bp, Homo sapiens
caaaataaaaagata

SEQ ID NO: 902044 - DNA, 15 bp, Homo sapiens
acaaaataaaaagat

SEQ ID NO: 902045 - DNA, 15 bp, Homo sapiens
tacaaaataaaaaga

SEQ ID NO: 902046 - DNA, 15 bp, Homo sapiens
gtacaaaataaaaag

SEQ ID NO: 902047 - DNA, 15 bp, Homo sapiens
agtacaaaataaaaa

SEQ ID NO: 902048 - DNA, 15 bp, Homo sapiens
cagtacaaaataaaa

SEQ ID NO: 902049 - DNA, 15 bp, Homo sapiens
tcagtacaaaataaa

SEQ ID NO: 902050 - DNA, 15 bp, Homo sapiens
ctcagtacaaaataa

SEQ ID NO: 902051 - DNA, 15 bp, Homo sapiens
gctcagtacaaaata

SEQ ID NO: 902052 - DNA, 15 bp, Homo sapiens
agctcagtacaaaat

SEQ ID NO: 902053 - DNA, 15 bp, Homo sapiens
tagctcagtacaaaa

SEQ ID NO: 902054 - DNA, 15 bp, Homo sapiens
gtagctcagtacaaa

SEQ ID NO: 902055 - DNA, 15 bp, Homo sapiens
agtagctcagtacaa

SEQ ID NO: 902056 - DNA, 15 bp, Homo sapiens
aagtagctcagtaca

SEQ ID NO: 902057 - DNA, 15 bp, Homo sapiens
taagtagctcagtac

SEQ ID NO: 902058 - DNA, 15 bp, Homo sapiens
ataagtagctcagta

SEQ ID NO: 902059 - DNA, 15 bp, Homo sapiens
aataagtagctcagt

SEQ ID NO: 902060 - DNA, 15 bp, Homo sapiens
aaataagtagctcag

SEQ ID NO: 902061 - DNA, 15 bp, Homo sapiens
aaaataagtagctca

SEQ ID NO: 902062 - DNA, 15 bp, Homo sapiens
taaaataagtagctc

SEQ ID NO: 902063 - DNA, 15 bp, Homo sapiens
gtaaaataagtagct

SEQ ID NO: 902064 - DNA, 15 bp, Homo sapiens
ggtaaaataagtagc

SEQ ID NO: 902065 - DNA, 15 bp, Homo sapiens
gggtaaaataagtag

SEQ ID NO: 902066 - DNA, 15 bp, Homo sapiens
tgggtaaaataagta

SEQ ID NO: 902067 - DNA, 15 bp, Homo sapiens
ttgggtaaaataagt

SEQ ID NO: 902068 - DNA, 15 bp, Homo sapiens
tttgggtaaaataag

SEQ ID NO: 902069 - DNA, 15 bp, Homo sapiens
atttgggtaaaataa

SEQ ID NO: 902070 - DNA, 15 bp, Homo sapiens
aatttgggtaaaata

SEQ ID NO: 902071 - DNA, 15 bp, Homo sapiens
caatttgggtaaaat

SEQ ID NO: 902072 - DNA, 15 bp, Homo sapiens
ccaatttgggtaaaa

SEQ ID NO: 902073 - DNA, 15 bp, Homo sapiens
cccaatttgggtaaa

SEQ ID NO: 902074 - DNA, 15 bp, Homo sapiens
ccccaatttgggtaa

SEQ ID NO: 902075 - DNA, 15 bp, Homo sapiens
cccccaatttgggta

SEQ ID NO: 902076 - DNA, 15 bp, Homo sapiens
acccccaatttgggt

SEQ ID NO: 902077 - DNA, 15 bp, Homo sapiens
aacccccaatttggg

SEQ ID NO: 902078 - DNA, 15 bp, Homo sapiens
aaacccccaatttgg

SEQ ID NO: 902079 - DNA, 15 bp, Homo sapiens
taaacccccaatttg

SEQ ID NO: 902080 - DNA, 15 bp, Homo sapiens
ttaaacccccaattt

SEQ ID NO: 902081 - DNA, 15 bp, Homo sapiens
tttaaacccccaatt

SEQ ID NO: 902082 - DNA, 15 bp, Homo sapiens
ttttaaacccccaat

SEQ ID NO: 902083 - DNA, 15 bp, Homo sapiens
tttttaaacccccaa

SEQ ID NO: 902084 - DNA, 15 bp, Homo sapiens
ctttttaaaccccca

SEQ ID NO: 902085 - DNA, 15 bp, Homo sapiens
tctttttaaaccccc

SEQ ID NO: 902086 - DNA, 15 bp, Homo sapiens
ttctttttaaacccc

SEQ ID NO: 902087 - DNA, 15 bp, Homo sapiens
tttctttttaaaccc

SEQ ID NO: 902088 - DNA, 15 bp, Homo sapiens
gtttctttttaaacc

SEQ ID NO: 902089 - DNA, 15 bp, Homo sapiens
agtttctttttaaac

SEQ ID NO: 902090 - DNA, 15 bp, Homo sapiens
gagtttctttttaaa

SEQ ID NO: 902091 - DNA, 15 bp, Homo sapiens
tgagtttctttttaa

SEQ ID NO: 902092 - DNA, 15 bp, Homo sapiens
atgagtttcttttta

SEQ ID NO: 902093 - DNA, 15 bp, Homo sapiens
aatgagtttcttttt

SEQ ID NO: 902094 - DNA, 15 bp, Homo sapiens
taatgagtttctttt

SEQ ID NO: 902095 - DNA, 15 bp, Homo sapiens
gtaatgagtttcttt

SEQ ID NO: 902096 - DNA, 15 bp, Homo sapiens
agtaatgagtttctt

SEQ ID NO: 902097 - DNA, 15 bp, Homo sapiens
aagtaatgagtttct

SEQ ID NO: 902098 - DNA, 15 bp, Homo sapiens
taagtaatgagtttc

SEQ ID NO: 902099 - DNA, 15 bp, Homo sapiens
ataagtaatgagttt

SEQ ID NO: 902100 - DNA, 15 bp, Homo sapiens
aataagtaatgagtt

SEQ ID NO: 902101 - DNA, 15 bp, Homo sapiens
aaataagtaatgagt

SEQ ID NO: 902102 - DNA, 15 bp, Homo sapiens
aaaataagtaatgag

SEQ ID NO: 902103 - DNA, 15 bp, Homo sapiens
gaaaataagtaatga

SEQ ID NO: 902104 - DNA, 15 bp, Homo sapiens
cgaaaataagtaatg

SEQ ID NO: 902105 - DNA, 15 bp, Homo sapiens
tcgaaaataagtaat

SEQ ID NO: 902106 - DNA, 15 bp, Homo sapiens
ttcgaaaataagtaa

SEQ ID NO: 902107 - DNA, 15 bp, Homo sapiens
tttcgaaaataagta

SEQ ID NO: 902108 - DNA, 15 bp, Homo sapiens
ctttcgaaaataagt

SEQ ID NO: 902109 - DNA, 15 bp, Homo sapiens
cctttcgaaaataag

SEQ ID NO: 902110 - DNA, 15 bp, Homo sapiens
tcctttcgaaaataa

SEQ ID NO: 902111 - DNA, 15 bp, Homo sapiens
ttcctttcgaaaata

SEQ ID NO: 902112 - DNA, 15 bp, Homo sapiens
tttcctttcgaaaat

SEQ ID NO: 902113 - DNA, 15 bp, Homo sapiens
ttttcctttcgaaaa

SEQ ID NO: 902114 - DNA, 15 bp, Homo sapiens
attttcctttcgaaa

SEQ ID NO: 902115 - DNA, 15 bp, Homo sapiens
aattttcctttcgaa

SEQ ID NO: 902116 - DNA, 15 bp, Homo sapiens
aaattttcctttcga

SEQ ID NO: 902117 - DNA, 15 bp, Homo sapiens
taaattttcctttcg

SEQ ID NO: 902118 - DNA, 15 bp, Homo sapiens
gtaaattttcctttc

SEQ ID NO: 902119 - DNA, 15 bp, Homo sapiens
agtaaattttccttt

SEQ ID NO: 902120 - DNA, 15 bp, Homo sapiens
cagtaaattttcctt

SEQ ID NO: 902121 - DNA, 15 bp, Homo sapiens
acagtaaattttcct

SEQ ID NO: 902122 - DNA, 15 bp, Homo sapiens
gacagtaaattttcc

SEQ ID NO: 902123 - DNA, 15 bp, Homo sapiens
tgacagtaaattttc

SEQ ID NO: 902124 - DNA, 15 bp, Homo sapiens
ttgacagtaaatttt

SEQ ID NO: 902125 - DNA, 15 bp, Homo sapiens
cttgacagtaaattt

SEQ ID NO: 902126 - DNA, 15 bp, Homo sapiens
acttgacagtaaatt

SEQ ID NO: 902127 - DNA, 15 bp, Homo sapiens
tacttgacagtaaat

SEQ ID NO: 902128 - DNA, 15 bp, Homo sapiens
gtacttgacagtaaa

SEQ ID NO: 902129 - DNA, 15 bp, Homo sapiens
tgtacttgacagtaa

SEQ ID NO: 902130 - DNA, 15 bp, Homo sapiens
ctgtacttgacagta

SEQ ID NO: 902131 - DNA, 15 bp, Homo sapiens
actgtacttgacagt

SEQ ID NO: 902132 - DNA, 15 bp, Homo sapiens
tactgtacttgacag

SEQ ID NO: 902133 - DNA, 15 bp, Homo sapiens
ttactgtacttgaca

SEQ ID NO: 902134 - DNA, 15 bp, Homo sapiens
attactgtacttgac

SEQ ID NO: 902135 - DNA, 15 bp, Homo sapiens
aattactgtacttga

SEQ ID NO: 902136 - DNA, 15 bp, Homo sapiens
aaattactgtacttg

SEQ ID NO: 902137 - DNA, 15 bp, Homo sapiens
aaaattactgtactt

SEQ ID NO: 902138 - DNA, 15 bp, Homo sapiens
aaaaattactgtact

SEQ ID NO: 902139 - DNA, 15 bp, Homo sapiens
aaaaaattactgtac

SEQ ID NO: 902140 - DNA, 15 bp, Homo sapiens
aaaaaaattactgta

SEQ ID NO: 902141 - DNA, 15 bp, Homo sapiens
aaaaaaaattactgt

SEQ ID NO: 902142 - DNA, 15 bp, Homo sapiens
aaaaaaaaattactg

SEQ ID NO: 902143 - DNA, 15 bp, Homo sapiens
aaaaaaaaaattact

SEQ ID NO: 902144 - DNA, 15 bp, Homo sapiens
taaaaaaaaaattac

SEQ ID NO: 902145 - DNA, 15 bp, Homo sapiens
ttaaaaaaaaaatta

SEQ ID NO: 902146 - DNA, 15 bp, Homo sapiens
tttaaaaaaaaaatt

SEQ ID NO: 902147 - DNA, 15 bp, Homo sapiens
ctttaaaaaaaaaat

SEQ ID NO: 902148 - DNA, 15 bp, Homo sapiens
gctttaaaaaaaaaa

SEQ ID NO: 902149 - DNA, 15 bp, Homo sapiens
tgctttaaaaaaaaa

SEQ ID NO: 902150 - DNA, 15 bp, Homo sapiens
ctgctttaaaaaaaa

SEQ ID NO: 902151 - DNA, 15 bp, Homo sapiens
gctgctttaaaaaaa

SEQ ID NO: 902152 - DNA, 15 bp, Homo sapiens
cgctgctttaaaaaa

SEQ ID NO: 902153 - DNA, 15 bp, Homo sapiens
acgctgctttaaaaa

SEQ ID NO: 902154 - DNA, 15 bp, Homo sapiens
aacgctgctttaaaa

SEQ ID NO: 902155 - DNA, 15 bp, Homo sapiens
aaacgctgctttaaa

SEQ ID NO: 902156 - DNA, 15 bp, Homo sapiens
taaacgctgctttaa

SEQ ID NO: 902157 - DNA, 15 bp, Homo sapiens
ttaaacgctgcttta

SEQ ID NO: 902158 - DNA, 15 bp, Homo sapiens
tttaaacgctgcttt

SEQ ID NO: 902159 - DNA, 15 bp, Homo sapiens
ttttaaacgctgctt

SEQ ID NO: 902160 - DNA, 15 bp, Homo sapiens
tttttaaacgctgct

SEQ ID NO: 902161 - DNA, 15 bp, Homo sapiens
ttttttaaacgctgc

SEQ ID NO: 902162 - DNA, 15 bp, Homo sapiens
tttttttaaacgctg

SEQ ID NO: 902163 - DNA, 15 bp, Homo sapiens
ttttttttaaacgct

SEQ ID NO: 902164 - DNA, 15 bp, Homo sapiens
tttttttttaaacgc

SEQ ID NO: 902165 - DNA, 15 bp, Homo sapiens
ttttttttttaaacg

SEQ ID NO: 902166 - DNA, 15 bp, Homo sapiens
tttttttttttaaac

SEQ ID NO: 902167 - DNA, 15 bp, Homo sapiens
ttttttttttttaaa

SEQ ID NO: 902168 - DNA, 15 bp, Homo sapiens
tttttttttttttaa

SEQ ID NO: 902169 - DNA, 15 bp, Homo sapiens
cttttttttttttta

SEQ ID NO: 902170 - DNA, 15 bp, Homo sapiens
tcttttttttttttt

SEQ ID NO: 902171 - DNA, 15 bp, Homo sapiens
gtctttttttttttt

SEQ ID NO: 902172 - DNA, 15 bp, Homo sapiens
tgtcttttttttttt

SEQ ID NO: 902173 - DNA, 15 bp, Homo sapiens
ttgtctttttttttt

SEQ ID NO: 902174 - DNA, 15 bp, Homo sapiens
tttgtcttttttttt

SEQ ID NO: 902175 - DNA, 15 bp, Homo sapiens
ctttgtctttttttt

SEQ ID NO: 902176 - DNA, 15 bp, Homo sapiens
gctttgtcttttttt

SEQ ID NO: 902177 - DNA, 15 bp, Homo sapiens
tgctttgtctttttt

SEQ ID NO: 902178 - DNA, 15 bp, Homo sapiens
gtgctttgtcttttt

SEQ ID NO: 902179 - DNA, 15 bp, Homo sapiens
agtgctttgtctttt

SEQ ID NO: 902180 - DNA, 15 bp, Homo sapiens
cagtgctttgtcttt

SEQ ID NO: 902181 - DNA, 15 bp, Homo sapiens
ccagtgctttgtctt

SEQ ID NO: 902182 - DNA, 15 bp, Homo sapiens
accagtgctttgtct

SEQ ID NO: 902183 - DNA, 15 bp, Homo sapiens
gaccagtgctttgtc

SEQ ID NO: 902184 - DNA, 15 bp, Homo sapiens
ggaccagtgctttgt

SEQ ID NO: 902185 - DNA, 15 bp, Homo sapiens
tggaccagtgctttg

SEQ ID NO: 902186 - DNA, 15 bp, Homo sapiens
ctggaccagtgcttt

SEQ ID NO: 902187 - DNA, 15 bp, Homo sapiens
tctggaccagtgctt

SEQ ID NO: 902188 - DNA, 15 bp, Homo sapiens
atctggaccagtgct

SEQ ID NO: 902189 - DNA, 15 bp, Homo sapiens
tatctggaccagtgc

SEQ ID NO: 902190 - DNA, 15 bp, Homo sapiens
ctatctggaccagtg

SEQ ID NO: 902191 - DNA, 15 bp, Homo sapiens
actatctggaccagt

SEQ ID NO: 902192 - DNA, 15 bp, Homo sapiens
aactatctggaccag

SEQ ID NO: 902193 - DNA, 15 bp, Homo sapiens
caactatctggacca

SEQ ID NO: 902194 - DNA, 15 bp, Homo sapiens
ccaactatctggacc

SEQ ID NO: 902195 - DNA, 15 bp, Homo sapiens
tccaactatctggac

SEQ ID NO: 902196 - DNA, 15 bp, Homo sapiens
ttccaactatctgga

SEQ ID NO: 902197 - DNA, 15 bp, Homo sapiens
tttccaactatctgg

SEQ ID NO: 902198 - DNA, 15 bp, Homo sapiens
atttccaactatctg

SEQ ID NO: 902199 - DNA, 15 bp, Homo sapiens
catttccaactatct

SEQ ID NO: 902200 - DNA, 15 bp, Homo sapiens
acatttccaactatc

SEQ ID NO: 902201 - DNA, 15 bp, Homo sapiens
gacatttccaactat

SEQ ID NO: 902202 - DNA, 15 bp, Homo sapiens
tgacatttccaacta

SEQ ID NO: 902203 - DNA, 15 bp, Homo sapiens
atgacatttccaact

SEQ ID NO: 902204 - DNA, 15 bp, Homo sapiens
aatgacatttccaac

SEQ ID NO: 902205 - DNA, 15 bp, Homo sapiens
aaatgacatttccaa

SEQ ID NO: 902206 - DNA, 15 bp, Homo sapiens
taaatgacatttcca

SEQ ID NO: 902207 - DNA, 15 bp, Homo sapiens
ctaaatgacatttcc

SEQ ID NO: 902208 - DNA, 15 bp, Homo sapiens
tctaaatgacatttc

SEQ ID NO: 902209 - DNA, 15 bp, Homo sapiens
atctaaatgacattt

SEQ ID NO: 902210 - DNA, 15 bp, Homo sapiens
aatctaaatgacatt

SEQ ID NO: 902211 - DNA, 15 bp, Homo sapiens
aaatctaaatgacat

SEQ ID NO: 902212 - DNA, 15 bp, Homo sapiens
taaatctaaatgaca

SEQ ID NO: 902213 - DNA, 15 bp, Homo sapiens
ttaaatctaaatgac

SEQ ID NO: 902214 - DNA, 15 bp, Homo sapiens
cttaaatctaaatga

SEQ ID NO: 902215 - DNA, 15 bp, Homo sapiens
acttaaatctaaatg

SEQ ID NO: 902216 - DNA, 15 bp, Homo sapiens
gacttaaatctaaat

SEQ ID NO: 902217 - DNA, 15 bp, Homo sapiens
agacttaaatctaaa

SEQ ID NO: 902218 - DNA, 15 bp, Homo sapiens
tagacttaaatctaa

SEQ ID NO: 902219 - DNA, 15 bp, Homo sapiens
gtagacttaaatcta

SEQ ID NO: 902220 - DNA, 15 bp, Homo sapiens
tgtagacttaaatct

SEQ ID NO: 902221 - DNA, 15 bp, Homo sapiens
ctgtagacttaaatc

SEQ ID NO: 902222 - DNA, 15 bp, Homo sapiens
gctgtagacttaaat

SEQ ID NO: 902223 - DNA, 15 bp, Homo sapiens
agctgtagacttaaa

SEQ ID NO: 902224 - DNA, 15 bp, Homo sapiens
aagctgtagacttaa

SEQ ID NO: 902225 - DNA, 15 bp, Homo sapiens
gaagctgtagactta

SEQ ID NO: 902226 - DNA, 15 bp, Homo sapiens
agaagctgtagactt

SEQ ID NO: 902227 - DNA, 15 bp, Homo sapiens
aagaagctgtagact

SEQ ID NO: 902228 - DNA, 15 bp, Homo sapiens
taagaagctgtagac

SEQ ID NO: 902229 - DNA, 15 bp, Homo sapiens
ctaagaagctgtaga

SEQ ID NO: 902230 - DNA, 15 bp, Homo sapiens
cctaagaagctgtag

SEQ ID NO: 902231 - DNA, 15 bp, Homo sapiens
tcctaagaagctgta

SEQ ID NO: 902232 - DNA, 15 bp, Homo sapiens
ttcctaagaagctgt

SEQ ID NO: 902233 - DNA, 15 bp, Homo sapiens
tttcctaagaagctg

SEQ ID NO: 902234 - DNA, 15 bp, Homo sapiens
ctttcctaagaagct

SEQ ID NO: 902235 - DNA, 15 bp, Homo sapiens
actttcctaagaagc

SEQ ID NO: 902236 - DNA, 15 bp, Homo sapiens
aactttcctaagaag

SEQ ID NO: 902237 - DNA, 15 bp, Homo sapiens
taactttcctaagaa

SEQ ID NO: 902238 - DNA, 15 bp, Homo sapiens
ctaactttcctaaga

SEQ ID NO: 902239 - DNA, 15 bp, Homo sapiens
cctaactttcctaag

SEQ ID NO: 902240 - DNA, 15 bp, Homo sapiens
acctaactttcctaa

SEQ ID NO: 902241 - DNA, 15 bp, Homo sapiens
tacctaactttccta

SEQ ID NO: 902242 - DNA, 15 bp, Homo sapiens
gtgttcaggatgatg

SEQ ID NO: 902243 - DNA, 15 bp, Homo sapiens
ggtgttcaggatgat

SEQ ID NO: 902244 - DNA, 15 bp, Homo sapiens
cggtgttcaggatga

SEQ ID NO: 902245 - DNA, 15 bp, Homo sapiens
tcggtgttcaggatg

SEQ ID NO: 902246 - DNA, 15 bp, Homo sapiens
ctcggtgttcaggat

SEQ ID NO: 902247 - DNA, 15 bp, Homo sapiens
gctcggtgttcagga

SEQ ID NO: 902248 - DNA, 15 bp, Homo sapiens
agctcggtgttcagg

SEQ ID NO: 902249 - DNA, 15 bp, Homo sapiens
gagctcggtgttcag

SEQ ID NO: 902250 - DNA, 15 bp, Homo sapiens
agagctcggtgttca

SEQ ID NO: 902251 - DNA, 15 bp, Homo sapiens
cagagctcggtgttc

SEQ ID NO: 902252 - DNA, 15 bp, Homo sapiens
ccagagctcggtgtt

SEQ ID NO: 902253 - DNA, 15 bp, Homo sapiens
cccagagctcggtgt

SEQ ID NO: 902254 - DNA, 15 bp, Homo sapiens
tcccagagctcggtg

SEQ ID NO: 902255 - DNA, 15 bp, Homo sapiens
gtcccagagctcggt

SEQ ID NO: 902256 - DNA, 15 bp, Homo sapiens
agtcccagagctcgg

SEQ ID NO: 902257 - DNA, 15 bp, Homo sapiens
gagtcccagagctcg

SEQ ID NO: 902258 - DNA, 15 bp, Homo sapiens
ggagtcccagagctc

SEQ ID NO: 902259 - DNA, 15 bp, Homo sapiens
cggagtcccagagct

SEQ ID NO: 902260 - DNA, 15 bp, Homo sapiens
ccggagtcccagagc

SEQ ID NO: 902261 - DNA, 15 bp, Homo sapiens
gccggagtcccagag

SEQ ID NO: 902262 - DNA, 15 bp, Homo sapiens
cgccggagtcccaga

SEQ ID NO: 902263 - DNA, 15 bp, Homo sapiens
ccgccggagtcccag

SEQ ID NO: 902264 - DNA, 15 bp, Homo sapiens
tccgccggagtccca

SEQ ID NO: 902265 - DNA, 15 bp, Homo sapiens
ctccgccggagtccc

SEQ ID NO: 902266 - DNA, 15 bp, Homo sapiens
tctccgccggagtcc

SEQ ID NO: 902267 - DNA, 15 bp, Homo sapiens
ttctccgccggagtc

SEQ ID NO: 902268 - DNA, 15 bp, Homo sapiens
attctccgccggagt

SEQ ID NO: 902269 - DNA, 15 bp, Homo sapiens
gattctccgccggag

SEQ ID NO: 902270 - DNA, 15 bp, Homo sapiens
agattctccgccgga

SEQ ID NO: 902271 - DNA, 15 bp, Homo sapiens
tagattctccgccgg

SEQ ID NO: 902272 - DNA, 15 bp, Homo sapiens
ttagattctccgccg

SEQ ID NO: 902273 - DNA, 15 bp, Homo sapiens
tttagattctccgcc

SEQ ID NO: 902274 - DNA, 15 bp, Homo sapiens
gtttagattctccgc

SEQ ID NO: 902275 - DNA, 15 bp, Homo sapiens
cgtttagattctccg

SEQ ID NO: 902276 - DNA, 15 bp, Homo sapiens
acgtttagattctcc

SEQ ID NO: 902277 - DNA, 15 bp, Homo sapiens
tacgtttagattctc

SEQ ID NO: 902278 - DNA, 15 bp, Homo sapiens
ttacgtttagattct

SEQ ID NO: 902279 - DNA, 15 bp, Homo sapiens
tttacgtttagattc

SEQ ID NO: 902280 - DNA, 15 bp, Homo sapiens
ctttacgtttagatt

SEQ ID NO: 902281 - DNA, 15 bp, Homo sapiens
gctttacgtttagat

SEQ ID NO: 902282 - DNA, 15 bp, Homo sapiens
tgctttacgtttaga

SEQ ID NO: 902283 - DNA, 15 bp, Homo sapiens
atgctttacgtttag

SEQ ID NO: 902284 - DNA, 15 bp, Homo sapiens
gatgctttacgttta

SEQ ID NO: 902285 - DNA, 15 bp, Homo sapiens
tgatgctttacgttt

SEQ ID NO: 902286 - DNA, 15 bp, Homo sapiens
gtgatgctttacgtt

SEQ ID NO: 902287 - DNA, 15 bp, Homo sapiens
ggtgatgctttacgt

SEQ ID NO: 902288 - DNA, 15 bp, Homo sapiens
gggtgatgctttacg

SEQ ID NO: 902289 - DNA, 15 bp, Homo sapiens
tgggtgatgctttac

SEQ ID NO: 902290 - DNA, 15 bp, Homo sapiens
gtgggtgatgcttta

SEQ ID NO: 902291 - DNA, 15 bp, Homo sapiens
cgtgggtgatgcttt

SEQ ID NO: 902292 - DNA, 15 bp, Homo sapiens
ccgtgggtgatgctt

SEQ ID NO: 902293 - DNA, 15 bp, Homo sapiens
accgtgggtgatgct

SEQ ID NO: 902294 - DNA, 15 bp, Homo sapiens
gaccgtgggtgatgc

SEQ ID NO: 902295 - DNA, 15 bp, Homo sapiens
cgaccgtgggtgatg

SEQ ID NO: 902296 - DNA, 15 bp, Homo sapiens
acgaccgtgggtgat

SEQ ID NO: 902297 - DNA, 15 bp, Homo sapiens
cacgaccgtgggtga

SEQ ID NO: 902298 - DNA, 15 bp, Homo sapiens
tcacgaccgtgggtg

SEQ ID NO: 902299 - DNA, 15 bp, Homo sapiens
ttcacgaccgtgggt

SEQ ID NO: 902300 - DNA, 15 bp, Homo sapiens
gttcacgaccgtggg

SEQ ID NO: 902301 - DNA, 15 bp, Homo sapiens
agttcacgaccgtgg

SEQ ID NO: 902302 - DNA, 15 bp, Homo sapiens
cagttcacgaccgtg

SEQ ID NO: 902303 - DNA, 15 bp, Homo sapiens
acagttcacgaccgt

SEQ ID NO: 902304 - DNA, 15 bp, Homo sapiens
tacagttcacgaccg

SEQ ID NO: 902305 - DNA, 15 bp, Homo sapiens
ctacagttcacgacc

SEQ ID NO: 902306 - DNA, 15 bp, Homo sapiens
cctacagttcacgac

SEQ ID NO: 902307 - DNA, 15 bp, Homo sapiens
gcctacagttcacga

SEQ ID NO: 902308 - DNA, 15 bp, Homo sapiens
agcctacagttcacg

SEQ ID NO: 902309 - DNA, 15 bp, Homo sapiens
gagcctacagttcac

SEQ ID NO: 902310 - DNA, 15 bp, Homo sapiens
agagcctacagttca

SEQ ID NO: 902311 - DNA, 15 bp, Homo sapiens
gagagcctacagttc

SEQ ID NO: 902312 - DNA, 15 bp, Homo sapiens
ggagagcctacagtt

SEQ ID NO: 902313 - DNA, 15 bp, Homo sapiens
aggagagcctacagt

SEQ ID NO: 902314 - DNA, 15 bp, Homo sapiens
caggagagcctacag

SEQ ID NO: 902315 - DNA, 15 bp, Homo sapiens
ccaggagagcctaca

SEQ ID NO: 902316 - DNA, 15 bp, Homo sapiens
gccaggagagcctac

SEQ ID NO: 902317 - DNA, 15 bp, Homo sapiens
tgccaggagagccta

SEQ ID NO: 902318 - DNA, 15 bp, Homo sapiens
atgccaggagagcct

SEQ ID NO: 902319 - DNA, 15 bp, Homo sapiens
gatgccaggagagcc

SEQ ID NO: 902320 - DNA, 15 bp, Homo sapiens
ggatgccaggagagc

SEQ ID NO: 902321 - DNA, 15 bp, Homo sapiens
cggatgccaggagag

SEQ ID NO: 902322 - DNA, 15 bp, Homo sapiens
ccggatgccaggaga

SEQ ID NO: 902323 - DNA, 15 bp, Homo sapiens
cccggatgccaggag

SEQ ID NO: 902324 - DNA, 15 bp, Homo sapiens
tcccggatgccagga

SEQ ID NO: 902325 - DNA, 15 bp, Homo sapiens
atcccggatgccagg

SEQ ID NO: 902326 - DNA, 15 bp, Homo sapiens
gatcccggatgccag

SEQ ID NO: 902327 - DNA, 15 bp, Homo sapiens
agatcccggatgcca

SEQ ID NO: 902328 - DNA, 15 bp, Homo sapiens
aagatcccggatgcc

SEQ ID NO: 902329 - DNA, 15 bp, Homo sapiens
taagatcccggatgc

SEQ ID NO: 902330 - DNA, 15 bp, Homo sapiens
ataagatcccggatg

SEQ ID NO: 902331 - DNA, 15 bp, Homo sapiens
aataagatcccggat

SEQ ID NO: 902332 - DNA, 15 bp, Homo sapiens
gaataagatcccgga

SEQ ID NO: 902333 - DNA, 15 bp, Homo sapiens
agaataagatcccgg

SEQ ID NO: 902334 - DNA, 15 bp, Homo sapiens
cagaataagatcccg

SEQ ID NO: 902335 - DNA, 15 bp, Homo sapiens
ccagaataagatccc

SEQ ID NO: 902336 - DNA, 15 bp, Homo sapiens
gccagaataagatcc

SEQ ID NO: 902337 - DNA, 15 bp, Homo sapiens
ggccagaataagatc

SEQ ID NO: 902338 - DNA, 15 bp, Homo sapiens
aggccagaataagat

SEQ ID NO: 902339 - DNA, 15 bp, Homo sapiens
aaggccagaataaga

SEQ ID NO: 902340 - DNA, 15 bp, Homo sapiens
caaggccagaataag

SEQ ID NO: 902341 - DNA, 15 bp, Homo sapiens
ccaaggccagaataa

SEQ ID NO: 902342 - DNA, 15 bp, Homo sapiens
gccaaggccagaata

SEQ ID NO: 902343 - DNA, 15 bp, Homo sapiens
cgccaaggccagaat

SEQ ID NO: 902344 - DNA, 15 bp, Homo sapiens
ccgccaaggccagaa

SEQ ID NO: 902345 - DNA, 15 bp, Homo sapiens
tccgccaaggccaga

SEQ ID NO: 902346 - DNA, 15 bp, Homo sapiens
ctccgccaaggccag

SEQ ID NO: 902347 - DNA, 15 bp, Homo sapiens
actccgccaaggcca

SEQ ID NO: 902348 - DNA, 15 bp, Homo sapiens
aactccgccaaggcc

SEQ ID NO: 902349 - DNA, 15 bp, Homo sapiens
caactccgccaaggc

SEQ ID NO: 902350 - DNA, 15 bp, Homo sapiens
ccaactccgccaagg

SEQ ID NO: 902351 - DNA, 15 bp, Homo sapiens
cccaactccgccaag

SEQ ID NO: 902352 - DNA, 15 bp, Homo sapiens
ccccaactccgccaa

SEQ ID NO: 902353 - DNA, 15 bp, Homo sapiens
tccccaactccgcca

SEQ ID NO: 902354 - DNA, 15 bp, Homo sapiens
atccccaactccgcc

SEQ ID NO: 902355 - DNA, 15 bp, Homo sapiens
catccccaactccgc

SEQ ID NO: 902356 - DNA, 15 bp, Homo sapiens
ccatccccaactccg

SEQ ID NO: 902357 - DNA, 15 bp, Homo sapiens
accatccccaactcc

SEQ ID NO: 902358 - DNA, 15 bp, Homo sapiens
caccatccccaactc

SEQ ID NO: 902359 - DNA, 15 bp, Homo sapiens
acaccatccccaact

SEQ ID NO: 902360 - DNA, 15 bp, Homo sapiens
gacaccatccccaac

SEQ ID NO: 902361 - DNA, 15 bp, Homo sapiens
cgacaccatccccaa

SEQ ID NO: 902362 - DNA, 15 bp, Homo sapiens
gcgacaccatcccca

SEQ ID NO: 902363 - DNA, 15 bp, Homo sapiens
ggcgacaccatcccc

SEQ ID NO: 902364 - DNA, 15 bp, Homo sapiens
aggcgacaccatccc

SEQ ID NO: 902365 - DNA, 15 bp, Homo sapiens
taggcgacaccatcc

SEQ ID NO: 902366 - DNA, 15 bp, Homo sapiens
ctaggcgacaccatc

SEQ ID NO: 902367 - DNA, 15 bp, Homo sapiens
gctaggcgacaccat

SEQ ID NO: 902368 - DNA, 15 bp, Homo sapiens
tgctaggcgacacca

SEQ ID NO: 902369 - DNA, 15 bp, Homo sapiens
ctgctaggcgacacc

SEQ ID NO: 902370 - DNA, 15 bp, Homo sapiens
gctgctaggcgacac

SEQ ID NO: 902371 - DNA, 15 bp, Homo sapiens
ggctgctaggcgaca

SEQ ID NO: 902372 - DNA, 15 bp, Homo sapiens
cggctgctaggcgac

SEQ ID NO: 902373 - DNA, 15 bp, Homo sapiens
gcggctgctaggcga

SEQ ID NO: 902374 - DNA, 15 bp, Homo sapiens
agcggctgctaggcg

SEQ ID NO: 902375 - DNA, 15 bp, Homo sapiens
cagcggctgctaggc

SEQ ID NO: 902376 - DNA, 15 bp, Homo sapiens
gcagcggctgctagg

SEQ ID NO: 902377 - DNA, 15 bp, Homo sapiens
ggcagcggctgctag

SEQ ID NO: 902378 - DNA, 15 bp, Homo sapiens
cggcagcggctgcta

SEQ ID NO: 902379 - DNA, 15 bp, Homo sapiens
gcggcagcggctgct

SEQ ID NO: 902380 - DNA, 15 bp, Homo sapiens
agcggcagcggctgc

SEQ ID NO: 902381 - DNA, 15 bp, Homo sapiens
aagcggcagcggctg

SEQ ID NO: 902382 - DNA, 15 bp, Homo sapiens
aaagcggcagcggct

SEQ ID NO: 902383 - DNA, 15 bp, Homo sapiens
caaagcggcagcggc

SEQ ID NO: 902384 - DNA, 15 bp, Homo sapiens
ccaaagcggcagcgg

SEQ ID NO: 902385 - DNA, 15 bp, Homo sapiens
gccaaagcggcagcg

SEQ ID NO: 902386 - DNA, 15 bp, Homo sapiens
agccaaagcggcagc

SEQ ID NO: 902387 - DNA, 15 bp, Homo sapiens
aagccaaagcggcag

SEQ ID NO: 902388 - DNA, 15 bp, Homo sapiens
caagccaaagcggca

SEQ ID NO: 902389 - DNA, 15 bp, Homo sapiens
gcaagccaaagcggc

SEQ ID NO: 902390 - DNA, 15 bp, Homo sapiens
agcaagccaaagcgg

SEQ ID NO: 902391 - DNA, 15 bp, Homo sapiens
gagcaagccaaagcg

SEQ ID NO: 902392 - DNA, 15 bp, Homo sapiens
cgagcaagccaaagc

SEQ ID NO: 902393 - DNA, 15 bp, Homo sapiens
ccgagcaagccaaag

SEQ ID NO: 902394 - DNA, 15 bp, Homo sapiens
cccgagcaagccaaa

SEQ ID NO: 902395 - DNA, 15 bp, Homo sapiens
tcccgagcaagccaa

SEQ ID NO: 902396 - DNA, 15 bp, Homo sapiens
gtcccgagcaagcca

SEQ ID NO: 902397 - DNA, 15 bp, Homo sapiens
ggtcccgagcaagcc

SEQ ID NO: 902398 - DNA, 15 bp, Homo sapiens
tggtcccgagcaagc

SEQ ID NO: 902399 - DNA, 15 bp, Homo sapiens
atggtcccgagcaag

SEQ ID NO: 902400 - DNA, 15 bp, Homo sapiens
aatggtcccgagcaa

SEQ ID NO: 902401 - DNA, 15 bp, Homo sapiens
aaatggtcccgagca

SEQ ID NO: 902402 - DNA, 15 bp, Homo sapiens
caaatggtcccgagc

SEQ ID NO: 902403 - DNA, 15 bp, Homo sapiens
ccaaatggtcccgag

SEQ ID NO: 902404 - DNA, 15 bp, Homo sapiens
gccaaatggtcccga

SEQ ID NO: 902405 - DNA, 15 bp, Homo sapiens
agccaaatggtcccg

SEQ ID NO: 902406 - DNA, 15 bp, Homo sapiens
cagccaaatggtccc

SEQ ID NO: 902407 - DNA, 15 bp, Homo sapiens
ccagccaaatggtcc

SEQ ID NO: 902408 - DNA, 15 bp, Homo sapiens
tccagccaaatggtc

SEQ ID NO: 902409 - DNA, 15 bp, Homo sapiens
gtccagccaaatggt

SEQ ID NO: 902410 - DNA, 15 bp, Homo sapiens
ggtccagccaaatgg

SEQ ID NO: 902411 - DNA, 15 bp, Homo sapiens
gggtccagccaaatg

SEQ ID NO: 902412 - DNA, 15 bp, Homo sapiens
tgggtccagccaaat

SEQ ID NO: 902413 - DNA, 15 bp, Homo sapiens
ctgggtccagccaaa

SEQ ID NO: 902414 - DNA, 15 bp, Homo sapiens
tctgggtccagccaa

SEQ ID NO: 902415 - DNA, 15 bp, Homo sapiens
ctctgggtccagcca

SEQ ID NO: 902416 - DNA, 15 bp, Homo sapiens
actctgggtccagcc

SEQ ID NO: 902417 - DNA, 15 bp, Homo sapiens
gactctgggtccagc

SEQ ID NO: 902418 - DNA, 15 bp, Homo sapiens
ggactctgggtccag

SEQ ID NO: 902419 - DNA, 15 bp, Homo sapiens
cggactctgggtcca

SEQ ID NO: 902420 - DNA, 15 bp, Homo sapiens
gcggactctgggtcc

SEQ ID NO: 902421 - DNA, 15 bp, Homo sapiens
cgcggactctgggtc

SEQ ID NO: 902422 - DNA, 15 bp, Homo sapiens
acgcggactctgggt

SEQ ID NO: 902423 - DNA, 15 bp, Homo sapiens
cacgcggactctggg

SEQ ID NO: 902424 - DNA, 15 bp, Homo sapiens
ccacgcggactctgg

SEQ ID NO: 902425 - DNA, 15 bp, Homo sapiens
tccacgcggactctg

SEQ ID NO: 902426 - DNA, 15 bp, Homo sapiens
ttccacgcggactct

SEQ ID NO: 902427 - DNA, 15 bp, Homo sapiens
gttccacgcggactc

SEQ ID NO: 902428 - DNA, 15 bp, Homo sapiens
ggttccacgcggact

SEQ ID NO: 902429 - DNA, 15 bp, Homo sapiens
cggttccacgcggac

SEQ ID NO: 902430 - DNA, 15 bp, Homo sapiens
gcggttccacgcgga

SEQ ID NO: 902431 - DNA, 15 bp, Homo sapiens
cgcggttccacgcgg

SEQ ID NO: 902432 - DNA, 15 bp, Homo sapiens
tcgcggttccacgcg

SEQ ID NO: 902433 - DNA, 15 bp, Homo sapiens
atcgcggttccacgc

SEQ ID NO: 902434 - DNA, 15 bp, Homo sapiens
tatcgcggttccacg

SEQ ID NO: 902435 - DNA, 15 bp, Homo sapiens
ctatcgcggttccac

SEQ ID NO: 902436 - DNA, 15 bp, Homo sapiens
cctatcgcggttcca

SEQ ID NO: 902437 - DNA, 15 bp, Homo sapiens
ccctatcgcggttcc

SEQ ID NO: 902438 - DNA, 15 bp, Homo sapiens
tccctatcgcggttc

SEQ ID NO: 902439 - DNA, 15 bp, Homo sapiens
atccctatcgcggtt

SEQ ID NO: 902440 - DNA, 15 bp, Homo sapiens
gatccctatcgcggt

SEQ ID NO: 902441 - DNA, 15 bp, Homo sapiens
agatccctatcgcgg

SEQ ID NO: 902442 - DNA, 15 bp, Homo sapiens
cagatccctatcgcg

SEQ ID NO: 902443 - DNA, 15 bp, Homo sapiens
acagatccctatcgc

SEQ ID NO: 902444 - DNA, 15 bp, Homo sapiens
gacagatccctatcg

SEQ ID NO: 902445 - DNA, 15 bp, Homo sapiens
tgacagatccctatc

SEQ ID NO: 902446 - DNA, 15 bp, Homo sapiens
ctgacagatccctat

SEQ ID NO: 902447 - DNA, 15 bp, Homo sapiens
cctgacagatcccta

SEQ ID NO: 902448 - DNA, 15 bp, Homo sapiens
ccctgacagatccct

SEQ ID NO: 902449 - DNA, 15 bp, Homo sapiens
gccctgacagatccc

SEQ ID NO: 902450 - DNA, 15 bp, Homo sapiens
ggccctgacagatcc

SEQ ID NO: 902451 - DNA, 15 bp, Homo sapiens
gggccctgacagatc

SEQ ID NO: 902452 - DNA, 15 bp, Homo sapiens
cgggccctgacagat

SEQ ID NO: 902453 - DNA, 15 bp, Homo sapiens
gcgggccctgacaga

SEQ ID NO: 902454 - DNA, 15 bp, Homo sapiens
cgcgggccctgacag

SEQ ID NO: 902455 - DNA, 15 bp, Homo sapiens
ccgcgggccctgaca

SEQ ID NO: 902456 - DNA, 15 bp, Homo sapiens
gccgcgggccctgac

SEQ ID NO: 902457 - DNA, 15 bp, Homo sapiens
ggccgcgggccctga

SEQ ID NO: 902458 - DNA, 15 bp, Homo sapiens
cggccgcgggccctg

SEQ ID NO: 902459 - DNA, 15 bp, Homo sapiens
ccggccgcgggccct

SEQ ID NO: 902460 - DNA, 15 bp, Homo sapiens
cccggccgcgggccc

SEQ ID NO: 902461 - DNA, 15 bp, Homo sapiens
acccggccgcgggcc

SEQ ID NO: 902462 - DNA, 15 bp, Homo sapiens
gacccggccgcgggc

SEQ ID NO: 902463 - DNA, 15 bp, Homo sapiens
ggacccggccgcggg

SEQ ID NO: 902464 - DNA, 15 bp, Homo sapiens
tggacccggccgcgg

SEQ ID NO: 902465 - DNA, 15 bp, Homo sapiens
ctggacccggccgcg

SEQ ID NO: 902466 - DNA, 15 bp, Homo sapiens
gctggacccggccgc

SEQ ID NO: 902467 - DNA, 15 bp, Homo sapiens
agctggacccggccg

SEQ ID NO: 902468 - DNA, 15 bp, Homo sapiens
aagctggacccggcc

SEQ ID NO: 902469 - DNA, 15 bp, Homo sapiens
caagctggacccggc

SEQ ID NO: 902470 - DNA, 15 bp, Homo sapiens
ccaagctggacccgg

SEQ ID NO: 902471 - DNA, 15 bp, Homo sapiens
accaagctggacccg

SEQ ID NO: 902472 - DNA, 15 bp, Homo sapiens
caccaagctggaccc

SEQ ID NO: 902473 - DNA, 15 bp, Homo sapiens
ccaccaagctggacc

SEQ ID NO: 902474 - DNA, 15 bp, Homo sapiens
accaccaagctggac

SEQ ID NO: 902475 - DNA, 15 bp, Homo sapiens
aaccaccaagctgga

SEQ ID NO: 902476 - DNA, 15 bp, Homo sapiens
caaccaccaagctgg

SEQ ID NO: 902477 - DNA, 15 bp, Homo sapiens
gcaaccaccaagctg

SEQ ID NO: 902478 - DNA, 15 bp, Homo sapiens
cgcaaccaccaagct

SEQ ID NO: 902479 - DNA, 15 bp, Homo sapiens
ccgcaaccaccaagc

SEQ ID NO: 902480 - DNA, 15 bp, Homo sapiens
accgcaaccaccaag

SEQ ID NO: 902481 - DNA, 15 bp, Homo sapiens
taccgcaaccaccaa

SEQ ID NO: 902482 - DNA, 15 bp, Homo sapiens
ctaccgcaaccacca

SEQ ID NO: 902483 - DNA, 15 bp, Homo sapiens
actaccgcaaccacc

SEQ ID NO: 902484 - DNA, 15 bp, Homo sapiens
cactaccgcaaccac

SEQ ID NO: 902485 - DNA, 15 bp, Homo sapiens
tcactaccgcaacca

SEQ ID NO: 902486 - DNA, 15 bp, Homo sapiens
ctcactaccgcaacc

SEQ ID NO: 902487 - DNA, 15 bp, Homo sapiens
tctcactaccgcaac

SEQ ID NO: 902488 - DNA, 15 bp, Homo sapiens
ctctcactaccgcaa

SEQ ID NO: 902489 - DNA, 15 bp, Homo sapiens
cctctcactaccgca

SEQ ID NO: 902490 - DNA, 15 bp, Homo sapiens
gcctctcactaccgc

SEQ ID NO: 902491 - DNA, 15 bp, Homo sapiens
ggcctctcactaccg

SEQ ID NO: 902492 - DNA, 15 bp, Homo sapiens
aggcctctcactacc

SEQ ID NO: 902493 - DNA, 15 bp, Homo sapiens
gaggcctctcactac

SEQ ID NO: 902494 - DNA, 15 bp, Homo sapiens
ggaggcctctcacta

SEQ ID NO: 902495 - DNA, 15 bp, Homo sapiens
cggaggcctctcact

SEQ ID NO: 902496 - DNA, 15 bp, Homo sapiens
gcggaggcctctcac

SEQ ID NO: 902497 - DNA, 15 bp, Homo sapiens
agcggaggcctctca

SEQ ID NO: 902498 - DNA, 15 bp, Homo sapiens
cagcggaggcctctc

SEQ ID NO: 902499 - DNA, 15 bp, Homo sapiens
ccagcggaggcctct

SEQ ID NO: 902500 - DNA, 15 bp, Homo sapiens
accagcggaggcctc

SEQ ID NO: 902501 - DNA, 15 bp, Homo sapiens
aaccagcggaggcct

SEQ ID NO: 902502 - DNA, 15 bp, Homo sapiens
caaccagcggaggcc

SEQ ID NO: 902503 - DNA, 15 bp, Homo sapiens
gcaaccagcggaggc

SEQ ID NO: 902504 - DNA, 15 bp, Homo sapiens
ggcaaccagcggagg

SEQ ID NO: 902505 - DNA, 15 bp, Homo sapiens
tggcaaccagcggag

SEQ ID NO: 902506 - DNA, 15 bp, Homo sapiens
ctggcaaccagcgga

SEQ ID NO: 902507 - DNA, 15 bp, Homo sapiens
cctggcaaccagcgg

SEQ ID NO: 902508 - DNA, 15 bp, Homo sapiens
gcctggcaaccagcg

SEQ ID NO: 902509 - DNA, 15 bp, Homo sapiens
agcctggcaaccagc

SEQ ID NO: 902510 - DNA, 15 bp, Homo sapiens
aagcctggcaaccag

SEQ ID NO: 902511 - DNA, 15 bp, Homo sapiens
caagcctggcaacca

SEQ ID NO: 902512 - DNA, 15 bp, Homo sapiens
ccaagcctggcaacc

SEQ ID NO: 902513 - DNA, 15 bp, Homo sapiens
accaagcctggcaac

SEQ ID NO: 902514 - DNA, 15 bp, Homo sapiens
gaccaagcctggcaa

SEQ ID NO: 902515 - DNA, 15 bp, Homo sapiens
agaccaagcctggca

SEQ ID NO: 902516 - DNA, 15 bp, Homo sapiens
tagaccaagcctggc

SEQ ID NO: 902517 - DNA, 15 bp, Homo sapiens
ctagaccaagcctgg

SEQ ID NO: 902518 - DNA, 15 bp, Homo sapiens
cctagaccaagcctg

SEQ ID NO: 902519 - DNA, 15 bp, Homo sapiens
acctagaccaagcct

SEQ ID NO: 902520 - DNA, 15 bp, Homo sapiens
cacctagaccaagcc

SEQ ID NO: 902521 - DNA, 15 bp, Homo sapiens
ccacctagaccaagc

SEQ ID NO: 902522 - DNA, 15 bp, Homo sapiens
cccacctagaccaag

SEQ ID NO: 902523 - DNA, 15 bp, Homo sapiens
acccacctagaccaa

SEQ ID NO: 902524 - DNA, 15 bp, Homo sapiens
cacccacctagacca

SEQ ID NO: 902525 - DNA, 15 bp, Homo sapiens
ccacccacctagacc

SEQ ID NO: 902526 - DNA, 15 bp, Homo sapiens
tccacccacctagac

SEQ ID NO: 902527 - DNA, 15 bp, Homo sapiens
atccacccacctaga

SEQ ID NO: 902528 - DNA, 15 bp, Homo sapiens
gatccacccacctag

SEQ ID NO: 902529 - DNA, 15 bp, Homo sapiens
ggatccacccaccta

SEQ ID NO: 902530 - DNA, 15 bp, Homo sapiens
aggatccacccacct

SEQ ID NO: 902531 - DNA, 15 bp, Homo sapiens
aaggatccacccacc

SEQ ID NO: 902532 - DNA, 15 bp, Homo sapiens
caaggatccacccac

SEQ ID NO: 902533 - DNA, 15 bp, Homo sapiens
acaaggatccaccca

SEQ ID NO: 902534 - DNA, 15 bp, Homo sapiens
tacaaggatccaccc

SEQ ID NO: 902535 - DNA, 15 bp, Homo sapiens
ttacaaggatccacc

SEQ ID NO: 902536 - DNA, 15 bp, Homo sapiens
cttacaaggatccac

SEQ ID NO: 902537 - DNA, 15 bp, Homo sapiens
gcttacaaggatcca

SEQ ID NO: 902538 - DNA, 15 bp, Homo sapiens
tgcttacaaggatcc

SEQ ID NO: 902539 - DNA, 15 bp, Homo sapiens
ctgcttacaaggatc

SEQ ID NO: 902540 - DNA, 15 bp, Homo sapiens
cctgcttacaaggat

SEQ ID NO: 902541 - DNA, 15 bp, Homo sapiens
tcctgcttacaagga

SEQ ID NO: 902542 - DNA, 15 bp, Homo sapiens
atcctgcttacaagg

SEQ ID NO: 902543 - DNA, 15 bp, Homo sapiens
aatcctgcttacaag

SEQ ID NO: 902544 - DNA, 15 bp, Homo sapiens
taatcctgcttacaa

SEQ ID NO: 902545 - DNA, 15 bp, Homo sapiens
ctaatcctgcttaca

SEQ ID NO: 902546 - DNA, 15 bp, Homo sapiens
gctaatcctgcttac

SEQ ID NO: 902547 - DNA, 15 bp, Homo sapiens
cgctaatcctgctta

SEQ ID NO: 902548 - DNA, 15 bp, Homo sapiens
tcgctaatcctgctt

SEQ ID NO: 902549 - DNA, 15 bp, Homo sapiens
ctcgctaatcctgct

SEQ ID NO: 902550 - DNA, 15 bp, Homo sapiens
actcgctaatcctgc

SEQ ID NO: 902551 - DNA, 15 bp, Homo sapiens
gactcgctaatcctg

SEQ ID NO: 902552 - DNA, 15 bp, Homo sapiens
tgactcgctaatcct

SEQ ID NO: 902553 - DNA, 15 bp, Homo sapiens
gtgactcgctaatcc

SEQ ID NO: 902554 - DNA, 15 bp, Homo sapiens
agtgactcgctaatc

SEQ ID NO: 902555 - DNA, 15 bp, Homo sapiens
gagtgactcgctaat

SEQ ID NO: 902556 - DNA, 15 bp, Homo sapiens
ggagtgactcgctaa

SEQ ID NO: 902557 - DNA, 15 bp, Homo sapiens
tggagtgactcgcta

SEQ ID NO: 902558 - DNA, 15 bp, Homo sapiens
gtggagtgactcgct

SEQ ID NO: 902559 - DNA, 15 bp, Homo sapiens
cgtggagtgactcgc

SEQ ID NO: 902560 - DNA, 15 bp, Homo sapiens
gcgtggagtgactcg

SEQ ID NO: 902561 - DNA, 15 bp, Homo sapiens
agcgtggagtgactc

SEQ ID NO: 902562 - DNA, 15 bp, Homo sapiens
gagcgtggagtgact

SEQ ID NO: 902563 - DNA, 15 bp, Homo sapiens
tgagcgtggagtgac

SEQ ID NO: 902564 - DNA, 15 bp, Homo sapiens
ctgagcgtggagtga

SEQ ID NO: 902565 - DNA, 15 bp, Homo sapiens
cctgagcgtggagtg

SEQ ID NO: 902566 - DNA, 15 bp, Homo sapiens
acctgagcgtggagt

SEQ ID NO: 902567 - DNA, 15 bp, Homo sapiens
aacctgagcgtggag

SEQ ID NO: 902568 - DNA, 15 bp, Homo sapiens
gaacctgagcgtgga

SEQ ID NO: 902569 - DNA, 15 bp, Homo sapiens
agaacctgagcgtgg

SEQ ID NO: 902570 - DNA, 15 bp, Homo sapiens
aagaacctgagcgtg

SEQ ID NO: 902571 - DNA, 15 bp, Homo sapiens
aaagaacctgagcgt

SEQ ID NO: 902572 - DNA, 15 bp, Homo sapiens
taaagaacctgagcg

SEQ ID NO: 902573 - DNA, 15 bp, Homo sapiens
ctaaagaacctgagc

SEQ ID NO: 902574 - DNA, 15 bp, Homo sapiens
gctaaagaacctgag

SEQ ID NO: 902575 - DNA, 15 bp, Homo sapiens
ggctaaagaacctga

SEQ ID NO: 902576 - DNA, 15 bp, Homo sapiens
aggctaaagaacctg

SEQ ID NO: 902577 - DNA, 15 bp, Homo sapiens
caggctaaagaacct

SEQ ID NO: 902578 - DNA, 15 bp, Homo sapiens
tcaggctaaagaacc

SEQ ID NO: 902579 - DNA, 15 bp, Homo sapiens
ctcaggctaaagaac

SEQ ID NO: 902580 - DNA, 15 bp, Homo sapiens
cctcaggctaaagaa

SEQ ID NO: 902581 - DNA, 15 bp, Homo sapiens
ccctcaggctaaaga

SEQ ID NO: 902582 - DNA, 15 bp, Homo sapiens
gccctcaggctaaag

SEQ ID NO: 902583 - DNA, 15 bp, Homo sapiens
ggccctcaggctaaa

SEQ ID NO: 902584 - DNA, 15 bp, Homo sapiens
gggccctcaggctaa

SEQ ID NO: 902585 - DNA, 15 bp, Homo sapiens
cgggccctcaggcta

SEQ ID NO: 902586 - DNA, 15 bp, Homo sapiens
acgggccctcaggct

SEQ ID NO: 902587 - DNA, 15 bp, Homo sapiens
cacgggccctcaggc

SEQ ID NO: 902588 - DNA, 15 bp, Homo sapiens
acacgggccctcagg

SEQ ID NO: 902589 - DNA, 15 bp, Homo sapiens
cacacgggccctcag

SEQ ID NO: 902590 - DNA, 15 bp, Homo sapiens
gcacacgggccctca

SEQ ID NO: 902591 - DNA, 15 bp, Homo sapiens
ggcacacgggccctc

SEQ ID NO: 902592 - DNA, 15 bp, Homo sapiens
tggcacacgggccct

SEQ ID NO: 902593 - DNA, 15 bp, Homo sapiens
gtggcacacgggccc

SEQ ID NO: 902594 - DNA, 15 bp, Homo sapiens
tgtggcacacgggcc

SEQ ID NO: 902595 - DNA, 15 bp, Homo sapiens
ctgtggcacacgggc

SEQ ID NO: 902596 - DNA, 15 bp, Homo sapiens
gctgtggcacacggg

SEQ ID NO: 902597 - DNA, 15 bp, Homo sapiens
tgctgtggcacacgg

SEQ ID NO: 902598 - DNA, 15 bp, Homo sapiens
atgctgtggcacacg

SEQ ID NO: 902599 - DNA, 15 bp, Homo sapiens
tatgctgtggcacac

SEQ ID NO: 902600 - DNA, 15 bp, Homo sapiens
ctatgctgtggcaca

SEQ ID NO: 902601 - DNA, 15 bp, Homo sapiens
gctatgctgtggcac

SEQ ID NO: 902602 - DNA, 15 bp, Homo sapiens
agctatgctgtggca

SEQ ID NO: 902603 - DNA, 15 bp, Homo sapiens
tagctatgctgtggc

SEQ ID NO: 902604 - DNA, 15 bp, Homo sapiens
gtagctatgctgtgg

SEQ ID NO: 902605 - DNA, 15 bp, Homo sapiens
ggtagctatgctgtg

SEQ ID NO: 902606 - DNA, 15 bp, Homo sapiens
gggtagctatgctgt

SEQ ID NO: 902607 - DNA, 15 bp, Homo sapiens
ggggtagctatgctg

SEQ ID NO: 902608 - DNA, 15 bp, Homo sapiens
cggggtagctatgct

SEQ ID NO: 902609 - DNA, 15 bp, Homo sapiens
gcggggtagctatgc

SEQ ID NO: 902610 - DNA, 15 bp, Homo sapiens
ggcggggtagctatg

SEQ ID NO: 902611 - DNA, 15 bp, Homo sapiens
gggcggggtagctat

SEQ ID NO: 902612 - DNA, 15 bp, Homo sapiens
agggcggggtagcta

SEQ ID NO: 902613 - DNA, 15 bp, Homo sapiens
aagggcggggtagct

SEQ ID NO: 902614 - DNA, 15 bp, Homo sapiens
gaagggcggggtagc

SEQ ID NO: 902615 - DNA, 15 bp, Homo sapiens
ggaagggcggggtag

SEQ ID NO: 902616 - DNA, 15 bp, Homo sapiens
tggaagggcggggta

SEQ ID NO: 902617 - DNA, 15 bp, Homo sapiens
ctggaagggcggggt

SEQ ID NO: 902618 - DNA, 15 bp, Homo sapiens
gctggaagggcgggg

SEQ ID NO: 902619 - DNA, 15 bp, Homo sapiens
ggctggaagggcggg

SEQ ID NO: 902620 - DNA, 15 bp, Homo sapiens
aggctggaagggcgg

SEQ ID NO: 902621 - DNA, 15 bp, Homo sapiens
gaggctggaagggcg

SEQ ID NO: 902622 - DNA, 15 bp, Homo sapiens
cgaggctggaagggc

SEQ ID NO: 902623 - DNA, 15 bp, Homo sapiens
ccgaggctggaaggg

SEQ ID NO: 902624 - DNA, 15 bp, Homo sapiens
cccgaggctggaagg

SEQ ID NO: 902625 - DNA, 15 bp, Homo sapiens
acccgaggctggaag

SEQ ID NO: 902626 - DNA, 15 bp, Homo sapiens
gacccgaggctggaa

SEQ ID NO: 902627 - DNA, 15 bp, Homo sapiens
ggacccgaggctgga

SEQ ID NO: 902628 - DNA, 15 bp, Homo sapiens
gggacccgaggctgg

SEQ ID NO: 902629 - DNA, 15 bp, Homo sapiens
agggacccgaggctg

SEQ ID NO: 902630 - DNA, 15 bp, Homo sapiens
tagggacccgaggct

SEQ ID NO: 902631 - DNA, 15 bp, Homo sapiens
ttagggacccgaggc

SEQ ID NO: 902632 - DNA, 15 bp, Homo sapiens
attagggacccgagg

SEQ ID NO: 902633 - DNA, 15 bp, Homo sapiens
tattagggacccgag

SEQ ID NO: 902634 - DNA, 15 bp, Homo sapiens
gtattagggacccga

SEQ ID NO: 902635 - DNA, 15 bp, Homo sapiens
agtattagggacccg

SEQ ID NO: 902636 - DNA, 15 bp, Homo sapiens
cagtattagggaccc

SEQ ID NO: 902637 - DNA, 15 bp, Homo sapiens
gcagtattagggacc

SEQ ID NO: 902638 - DNA, 15 bp, Homo sapiens
ggcagtattagggac

SEQ ID NO: 902639 - DNA, 15 bp, Homo sapiens
aggcagtattaggga

SEQ ID NO: 902640 - DNA, 15 bp, Homo sapiens
aaggcagtattaggg

SEQ ID NO: 902641 - DNA, 15 bp, Homo sapiens
caaggcagtattagg

SEQ ID NO: 902642 - DNA, 15 bp, Homo sapiens
gcaaggcagtattag

SEQ ID NO: 902643 - DNA, 15 bp, Homo sapiens
agcaaggcagtatta

SEQ ID NO: 902644 - DNA, 15 bp, Homo sapiens
aagcaaggcagtatt

SEQ ID NO: 902645 - DNA, 15 bp, Homo sapiens
gaagcaaggcagtat

SEQ ID NO: 902646 - DNA, 15 bp, Homo sapiens
cgaagcaaggcagta

SEQ ID NO: 902647 - DNA, 15 bp, Homo sapiens
ccgaagcaaggcagt

SEQ ID NO: 902648 - DNA, 15 bp, Homo sapiens
accgaagcaaggcag

SEQ ID NO: 902649 - DNA, 15 bp, Homo sapiens
aaccgaagcaaggca

SEQ ID NO: 902650 - DNA, 15 bp, Homo sapiens
gaaccgaagcaaggc

SEQ ID NO: 902651 - DNA, 15 bp, Homo sapiens
ggaaccgaagcaagg

SEQ ID NO: 902652 - DNA, 15 bp, Homo sapiens
tggaaccgaagcaag

SEQ ID NO: 902653 - DNA, 15 bp, Homo sapiens
ctggaaccgaagcaa

SEQ ID NO: 902654 - DNA, 15 bp, Homo sapiens
actggaaccgaagca

SEQ ID NO: 902655 - DNA, 15 bp, Homo sapiens
aactggaaccgaagc

SEQ ID NO: 902656 - DNA, 15 bp, Homo sapiens
aaactggaaccgaag

SEQ ID NO: 902657 - DNA, 15 bp, Homo sapiens
gaaactggaaccgaa

SEQ ID NO: 902658 - DNA, 15 bp, Homo sapiens
ggaaactggaaccga

SEQ ID NO: 902659 - DNA, 15 bp, Homo sapiens
cggaaactggaaccg

SEQ ID NO: 902660 - DNA, 15 bp, Homo sapiens
gcggaaactggaacc

SEQ ID NO: 902661 - DNA, 15 bp, Homo sapiens
ggcggaaactggaac

SEQ ID NO: 902662 - DNA, 15 bp, Homo sapiens
cggcggaaactggaa

SEQ ID NO: 902663 - DNA, 15 bp, Homo sapiens
gcggcggaaactgga

SEQ ID NO: 902664 - DNA, 15 bp, Homo sapiens
tgcggcggaaactgg

SEQ ID NO: 902665 - DNA, 15 bp, Homo sapiens
gtgcggcggaaactg

SEQ ID NO: 902666 - DNA, 15 bp, Homo sapiens
tgtgcggcggaaact

SEQ ID NO: 902667 - DNA, 15 bp, Homo sapiens
ttgtgcggcggaaac

SEQ ID NO: 902668 - DNA, 15 bp, Homo sapiens
gttgtgcggcggaaa

SEQ ID NO: 902669 - DNA, 15 bp, Homo sapiens
agttgtgcggcggaa

SEQ ID NO: 902670 - DNA, 15 bp, Homo sapiens
aagttgtgcggcgga

SEQ ID NO: 902671 - DNA, 15 bp, Homo sapiens
gaagttgtgcggcgg

SEQ ID NO: 902672 - DNA, 15 bp, Homo sapiens
tgaagttgtgcggcg

SEQ ID NO: 902673 - DNA, 15 bp, Homo sapiens
gtgaagttgtgcggc

SEQ ID NO: 902674 - DNA, 15 bp, Homo sapiens
agtgaagttgtgcgg

SEQ ID NO: 902675 - DNA, 15 bp, Homo sapiens
gagtgaagttgtgcg

SEQ ID NO: 902676 - DNA, 15 bp, Homo sapiens
tgagtgaagttgtgc

SEQ ID NO: 902677 - DNA, 15 bp, Homo sapiens
atgagtgaagttgtg

SEQ ID NO: 902678 - DNA, 15 bp, Homo sapiens
aatgagtgaagttgt

SEQ ID NO: 902679 - DNA, 15 bp, Homo sapiens
gaatgagtgaagttg

SEQ ID NO: 902680 - DNA, 15 bp, Homo sapiens
ggaatgagtgaagtt

SEQ ID NO: 902681 - DNA, 15 bp, Homo sapiens
tggaatgagtgaagt

SEQ ID NO: 902682 - DNA, 15 bp, Homo sapiens
ttggaatgagtgaag

SEQ ID NO: 902683 - DNA, 15 bp, Homo sapiens
tttggaatgagtgaa

SEQ ID NO: 902684 - DNA, 15 bp, Homo sapiens
atttggaatgagtga

SEQ ID NO: 902685 - DNA, 15 bp, Homo sapiens
catttggaatgagtg

SEQ ID NO: 902686 - DNA, 15 bp, Homo sapiens
acatttggaatgagt

SEQ ID NO: 902687 - DNA, 15 bp, Homo sapiens
aacatttggaatgag

SEQ ID NO: 902688 - DNA, 15 bp, Homo sapiens
taacatttggaatga

SEQ ID NO: 902689 - DNA, 15 bp, Homo sapiens
ttaacatttggaatg

SEQ ID NO: 902690 - DNA, 15 bp, Homo sapiens
attaacatttggaat

SEQ ID NO: 902691 - DNA, 15 bp, Homo sapiens
aattaacatttggaa

SEQ ID NO: 902692 - DNA, 15 bp, Homo sapiens
aaattaacatttgga

SEQ ID NO: 902693 - DNA, 15 bp, Homo sapiens
gaaattaacatttgg

SEQ ID NO: 902694 - DNA, 15 bp, Homo sapiens
agaaattaacatttg

SEQ ID NO: 902695 - DNA, 15 bp, Homo sapiens
cagaaattaacattt

SEQ ID NO: 902696 - DNA, 15 bp, Homo sapiens
gcagaaattaacatt

SEQ ID NO: 902697 - DNA, 15 bp, Homo sapiens
cgcagaaattaacat

SEQ ID NO: 902698 - DNA, 15 bp, Homo sapiens
acgcagaaattaaca

SEQ ID NO: 902699 - DNA, 15 bp, Homo sapiens
aacgcagaaattaac

SEQ ID NO: 902700 - DNA, 15 bp, Homo sapiens
aaacgcagaaattaa

SEQ ID NO: 902701 - DNA, 15 bp, Homo sapiens
aaaacgcagaaatta

SEQ ID NO: 902702 - DNA, 15 bp, Homo sapiens
aaaaacgcagaaatt

SEQ ID NO: 902703 - DNA, 15 bp, Homo sapiens
aaaaaacgcagaaat

SEQ ID NO: 902704 - DNA, 15 bp, Homo sapiens
aaaaaaacgcagaaa

SEQ ID NO: 902705 - DNA, 15 bp, Homo sapiens
aaaaaaaacgcagaa

SEQ ID NO: 902706 - DNA, 15 bp, Homo sapiens
gaaaaaaaacgcaga

SEQ ID NO: 902707 - DNA, 15 bp, Homo sapiens
tgaaaaaaaacgcag

SEQ ID NO: 902708 - DNA, 15 bp, Homo sapiens
ctgaaaaaaaacgca

SEQ ID NO: 902709 - DNA, 15 bp, Homo sapiens
gctgaaaaaaaacgc

SEQ ID NO: 902710 - DNA, 15 bp, Homo sapiens
ggctgaaaaaaaacg

SEQ ID NO: 902711 - DNA, 15 bp, Homo sapiens
gggctgaaaaaaaac

SEQ ID NO: 902712 - DNA, 15 bp, Homo sapiens
ggggctgaaaaaaaa

SEQ ID NO: 902713 - DNA, 15 bp, Homo sapiens
tggggctgaaaaaaa

SEQ ID NO: 902714 - DNA, 15 bp, Homo sapiens
ttggggctgaaaaaa

SEQ ID NO: 902715 - DNA, 15 bp, Homo sapiens
attggggctgaaaaa

SEQ ID NO: 902716 - DNA, 15 bp, Homo sapiens
aattggggctgaaaa

SEQ ID NO: 902717 - DNA, 15 bp, Homo sapiens
gaattggggctgaaa

SEQ ID NO: 902718 - DNA, 15 bp, Homo sapiens
agaattggggctgaa

SEQ ID NO: 902719 - DNA, 15 bp, Homo sapiens
cagaattggggctga

SEQ ID NO: 902720 - DNA, 15 bp, Homo sapiens
acagaattggggctg

SEQ ID NO: 902721 - DNA, 15 bp, Homo sapiens
aacagaattggggct

SEQ ID NO: 902722 - DNA, 15 bp, Homo sapiens
aaacagaattggggc

SEQ ID NO: 902723 - DNA, 15 bp, Homo sapiens
gaaacagaattgggg

SEQ ID NO: 902724 - DNA, 15 bp, Homo sapiens
agaaacagaattggg

SEQ ID NO: 902725 - DNA, 15 bp, Homo sapiens
gagaaacagaattgg

SEQ ID NO: 902726 - DNA, 15 bp, Homo sapiens
ggagaaacagaattg

SEQ ID NO: 902727 - DNA, 15 bp, Homo sapiens
tggagaaacagaatt

SEQ ID NO: 902728 - DNA, 15 bp, Homo sapiens
ttggagaaacagaat

SEQ ID NO: 902729 - DNA, 15 bp, Homo sapiens
tttggagaaacagaa

SEQ ID NO: 902730 - DNA, 15 bp, Homo sapiens
atttggagaaacaga

SEQ ID NO: 902731 - DNA, 15 bp, Homo sapiens
gatttggagaaacag

SEQ ID NO: 902732 - DNA, 15 bp, Homo sapiens
tgatttggagaaaca

SEQ ID NO: 902733 - DNA, 15 bp, Homo sapiens
ctgatttggagaaac

SEQ ID NO: 902734 - DNA, 15 bp, Homo sapiens
cctgatttggagaaa

SEQ ID NO: 902735 - DNA, 15 bp, Homo sapiens
ccctgatttggagaa

SEQ ID NO: 902736 - DNA, 15 bp, Homo sapiens
tccctgatttggaga

SEQ ID NO: 902737 - DNA, 15 bp, Homo sapiens
atccctgatttggag

SEQ ID NO: 902738 - DNA, 15 bp, Homo sapiens
catccctgatttgga

SEQ ID NO: 902739 - DNA, 15 bp, Homo sapiens
tcatccctgatttgg

SEQ ID NO: 902740 - DNA, 15 bp, Homo sapiens
atcatccctgatttg

SEQ ID NO: 902741 - DNA, 15 bp, Homo sapiens
aatcatccctgattt

SEQ ID NO: 902742 - DNA, 15 bp, Homo sapiens
caatcatccctgatt

SEQ ID NO: 902743 - DNA, 15 bp, Homo sapiens
acaatcatccctgat

SEQ ID NO: 902744 - DNA, 15 bp, Homo sapiens
gacaatcatccctga

SEQ ID NO: 902745 - DNA, 15 bp, Homo sapiens
cgacaatcatccctg

SEQ ID NO: 902746 - DNA, 15 bp, Homo sapiens
ccgacaatcatccct

SEQ ID NO: 902747 - DNA, 15 bp, Homo sapiens
gccgacaatcatccc

SEQ ID NO: 902748 - DNA, 15 bp, Homo sapiens
ggccgacaatcatcc

SEQ ID NO: 902749 - DNA, 15 bp, Homo sapiens
aggccgacaatcatc

SEQ ID NO: 902750 - DNA, 15 bp, Homo sapiens
aaggccgacaatcat

SEQ ID NO: 902751 - DNA, 15 bp, Homo sapiens
gaaggccgacaatca

SEQ ID NO: 902752 - DNA, 15 bp, Homo sapiens
ggaaggccgacaatc

SEQ ID NO: 902753 - DNA, 15 bp, Homo sapiens
tggaaggccgacaat

SEQ ID NO: 902754 - DNA, 15 bp, Homo sapiens
gtggaaggccgacaa

SEQ ID NO: 902755 - DNA, 15 bp, Homo sapiens
tgtggaaggccgaca

SEQ ID NO: 902756 - DNA, 15 bp, Homo sapiens
ctgtggaaggccgac

SEQ ID NO: 902757 - DNA, 15 bp, Homo sapiens
tctgtggaaggccga

SEQ ID NO: 902758 - DNA, 15 bp, Homo sapiens
gtctgtggaaggccg

SEQ ID NO: 902759 - DNA, 15 bp, Homo sapiens
ggtctgtggaaggcc

SEQ ID NO: 902760 - DNA, 15 bp, Homo sapiens
gggtctgtggaaggc

SEQ ID NO: 902761 - DNA, 15 bp, Homo sapiens
agggtctgtggaagg

SEQ ID NO: 902762 - DNA, 15 bp, Homo sapiens
gagggtctgtggaag

SEQ ID NO: 902763 - DNA, 15 bp, Homo sapiens
cgagggtctgtggaa

SEQ ID NO: 902764 - DNA, 15 bp, Homo sapiens
gcgagggtctgtgga

SEQ ID NO: 902765 - DNA, 15 bp, Homo sapiens
cgcgagggtctgtgg

SEQ ID NO: 902766 - DNA, 15 bp, Homo sapiens
gcgcgagggtctgtg

SEQ ID NO: 902767 - DNA, 15 bp, Homo sapiens
agcgcgagggtctgt

SEQ ID NO: 902768 - DNA, 15 bp, Homo sapiens
aagcgcgagggtctg

SEQ ID NO: 902769 - DNA, 15 bp, Homo sapiens
caagcgcgagggtct

SEQ ID NO: 902770 - DNA, 15 bp, Homo sapiens
gcaagcgcgagggtc

SEQ ID NO: 902771 - DNA, 15 bp, Homo sapiens
ggcaagcgcgagggt

SEQ ID NO: 902772 - DNA, 15 bp, Homo sapiens
tggcaagcgcgaggg

SEQ ID NO: 902773 - DNA, 15 bp, Homo sapiens
ctggcaagcgcgagg

SEQ ID NO: 902774 - DNA, 15 bp, Homo sapiens
cctggcaagcgcgag

SEQ ID NO: 902775 - DNA, 15 bp, Homo sapiens
tcctggcaagcgcga

SEQ ID NO: 902776 - DNA, 15 bp, Homo sapiens
atcctggcaagcgcg

SEQ ID NO: 902777 - DNA, 15 bp, Homo sapiens
aatcctggcaagcgc

SEQ ID NO: 902778 - DNA, 15 bp, Homo sapiens
taatcctggcaagcg

SEQ ID NO: 902779 - DNA, 15 bp, Homo sapiens
tccagtttatattag

SEQ ID NO: 902780 - DNA, 15 bp, Homo sapiens
ttccagtttatatta

SEQ ID NO: 902781 - DNA, 15 bp, Homo sapiens
tttccagtttatatt

SEQ ID NO: 902782 - DNA, 15 bp, Homo sapiens
ctttccagtttatat

SEQ ID NO: 902783 - DNA, 15 bp, Homo sapiens
tctttccagtttata

SEQ ID NO: 902784 - DNA, 15 bp, Homo sapiens
ttctttccagtttat

SEQ ID NO: 902785 - DNA, 15 bp, Homo sapiens
tttctttccagttta

SEQ ID NO: 902786 - DNA, 15 bp, Homo sapiens
atttctttccagttt

SEQ ID NO: 902787 - DNA, 15 bp, Homo sapiens
tatttctttccagtt

SEQ ID NO: 902788 - DNA, 15 bp, Homo sapiens
ttatttctttccagt

SEQ ID NO: 902789 - DNA, 15 bp, Homo sapiens
attatttctttccag

SEQ ID NO: 902790 - DNA, 15 bp, Homo sapiens
cattatttctttcca

SEQ ID NO: 902791 - DNA, 15 bp, Homo sapiens
tcattatttctttcc

SEQ ID NO: 902792 - DNA, 15 bp, Homo sapiens
ttcattatttctttc

SEQ ID NO: 902793 - DNA, 15 bp, Homo sapiens
tttcattatttcttt

SEQ ID NO: 902794 - DNA, 15 bp, Homo sapiens
ctttcattatttctt

SEQ ID NO: 902795 - DNA, 15 bp, Homo sapiens
actttcattatttct

SEQ ID NO: 902796 - DNA, 15 bp, Homo sapiens
aactttcattatttc

SEQ ID NO: 902797 - DNA, 15 bp, Homo sapiens
caactttcattattt

SEQ ID NO: 902798 - DNA, 15 bp, Homo sapiens
tcaactttcattatt

SEQ ID NO: 902799 - DNA, 15 bp, Homo sapiens
gtcaactttcattat

SEQ ID NO: 902800 - DNA, 15 bp, Homo sapiens
ggtcaactttcatta

SEQ ID NO: 902801 - DNA, 15 bp, Homo sapiens
gggtcaactttcatt

SEQ ID NO: 902802 - DNA, 15 bp, Homo sapiens
tgggtcaactttcat

SEQ ID NO: 902803 - DNA, 15 bp, Homo sapiens
ctgggtcaactttca

SEQ ID NO: 902804 - DNA, 15 bp, Homo sapiens
tctgggtcaactttc

SEQ ID NO: 902805 - DNA, 15 bp, Homo sapiens
atctgggtcaacttt

SEQ ID NO: 902806 - DNA, 15 bp, Homo sapiens
catctgggtcaactt

SEQ ID NO: 902807 - DNA, 15 bp, Homo sapiens
tcatctgggtcaact

SEQ ID NO: 902808 - DNA, 15 bp, Homo sapiens
gtcatctgggtcaac

SEQ ID NO: 902809 - DNA, 15 bp, Homo sapiens
ggtcatctgggtcaa

SEQ ID NO: 902810 - DNA, 15 bp, Homo sapiens
aggtcatctgggtca

SEQ ID NO: 902811 - DNA, 15 bp, Homo sapiens
caggtcatctgggtc

SEQ ID NO: 902812 - DNA, 15 bp, Homo sapiens
gcaggtcatctgggt

SEQ ID NO: 902813 - DNA, 15 bp, Homo sapiens
ggcaggtcatctggg

SEQ ID NO: 902814 - DNA, 15 bp, Homo sapiens
gggcaggtcatctgg

SEQ ID NO: 902815 - DNA, 15 bp, Homo sapiens
ggggcaggtcatctg

SEQ ID NO: 902816 - DNA, 15 bp, Homo sapiens
cggggcaggtcatct

SEQ ID NO: 902817 - DNA, 15 bp, Homo sapiens
acggggcaggtcatc

SEQ ID NO: 902818 - DNA, 15 bp, Homo sapiens
gacggggcaggtcat

SEQ ID NO: 902819 - DNA, 15 bp, Homo sapiens
tgacggggcaggtca

SEQ ID NO: 902820 - DNA, 15 bp, Homo sapiens
ttgacggggcaggtc

SEQ ID NO: 902821 - DNA, 15 bp, Homo sapiens
cttgacggggcaggt

SEQ ID NO: 902822 - DNA, 15 bp, Homo sapiens
tcttgacggggcagg

SEQ ID NO: 902823 - DNA, 15 bp, Homo sapiens
ttcttgacggggcag

SEQ ID NO: 902824 - DNA, 15 bp, Homo sapiens
cttcttgacggggca

SEQ ID NO: 902825 - DNA, 15 bp, Homo sapiens
tcttcttgacggggc

SEQ ID NO: 902826 - DNA, 15 bp, Homo sapiens
ttcttcttgacgggg

SEQ ID NO: 902827 - DNA, 15 bp, Homo sapiens
gttcttcttgacggg

SEQ ID NO: 902828 - DNA, 15 bp, Homo sapiens
agttcttcttgacgg

SEQ ID NO: 902829 - DNA, 15 bp, Homo sapiens
cagttcttcttgacg

SEQ ID NO: 902830 - DNA, 15 bp, Homo sapiens
ccagttcttcttgac

SEQ ID NO: 902831 - DNA, 15 bp, Homo sapiens
gccagttcttcttga

SEQ ID NO: 902832 - DNA, 15 bp, Homo sapiens
tgccagttcttcttg

SEQ ID NO: 902833 - DNA, 15 bp, Homo sapiens
ctgccagttcttctt

SEQ ID NO: 902834 - DNA, 15 bp, Homo sapiens
tctgccagttcttct

SEQ ID NO: 902835 - DNA, 15 bp, Homo sapiens
atctgccagttcttc

SEQ ID NO: 902836 - DNA, 15 bp, Homo sapiens
tatctgccagttctt

SEQ ID NO: 902837 - DNA, 15 bp, Homo sapiens
ttatctgccagttct

SEQ ID NO: 902838 - DNA, 15 bp, Homo sapiens
attatctgccagttc

SEQ ID NO: 902839 - DNA, 15 bp, Homo sapiens
aattatctgccagtt

SEQ ID NO: 902840 - DNA, 15 bp, Homo sapiens
aaattatctgccagt

SEQ ID NO: 902841 - DNA, 15 bp, Homo sapiens
taaattatctgccag

SEQ ID NO: 902842 - DNA, 15 bp, Homo sapiens
ataaattatctgcca

SEQ ID NO: 902843 - DNA, 15 bp, Homo sapiens
aataaattatctgcc

SEQ ID NO: 902844 - DNA, 15 bp, Homo sapiens
caataaattatctgc

SEQ ID NO: 902845 - DNA, 15 bp, Homo sapiens
tcaataaattatctg

SEQ ID NO: 902846 - DNA, 15 bp, Homo sapiens
atcaataaattatct

SEQ ID NO: 902847 - DNA, 15 bp, Homo sapiens
aatcaataaattatc

SEQ ID NO: 902848 - DNA, 15 bp, Homo sapiens
aaatcaataaattat

SEQ ID NO: 902849 - DNA, 15 bp, Homo sapiens
gaaatcaataaatta

SEQ ID NO: 902850 - DNA, 15 bp, Homo sapiens
ggaaatcaataaatt

SEQ ID NO: 902851 - DNA, 15 bp, Homo sapiens
aggaaatcaataaat

SEQ ID NO: 902852 - DNA, 15 bp, Homo sapiens
aaggaaatcaataaa

SEQ ID NO: 902853 - DNA, 15 bp, Homo sapiens
taaggaaatcaataa

SEQ ID NO: 902854 - DNA, 15 bp, Homo sapiens
ataaggaaatcaata

SEQ ID NO: 902855 - DNA, 15 bp, Homo sapiens
gataaggaaatcaat

SEQ ID NO: 902856 - DNA, 15 bp, Homo sapiens
ggataaggaaatcaa

SEQ ID NO: 902857 - DNA, 15 bp, Homo sapiens
tggataaggaaatca

SEQ ID NO: 902858 - DNA, 15 bp, Homo sapiens
ttggataaggaaatc

SEQ ID NO: 902859 - DNA, 15 bp, Homo sapiens
cttggataaggaaat

SEQ ID NO: 902860 - DNA, 15 bp, Homo sapiens
ccttggataaggaaa

SEQ ID NO: 902861 - DNA, 15 bp, Homo sapiens
accttggataaggaa

SEQ ID NO: 902862 - DNA, 15 bp, Homo sapiens
caccttggataagga

SEQ ID NO: 902863 - DNA, 15 bp, Homo sapiens
gcaccttggataagg

SEQ ID NO: 902864 - DNA, 15 bp, Homo sapiens
agcaccttggataag

SEQ ID NO: 902865 - DNA, 15 bp, Homo sapiens
aagcaccttggataa

SEQ ID NO: 902866 - DNA, 15 bp, Homo sapiens
taagcaccttggata

SEQ ID NO: 902867 - DNA, 15 bp, Homo sapiens
ttaagcaccttggat

SEQ ID NO: 902868 - DNA, 15 bp, Homo sapiens
attaagcaccttgga

SEQ ID NO: 902869 - DNA, 15 bp, Homo sapiens
aattaagcaccttgg

SEQ ID NO: 902870 - DNA, 15 bp, Homo sapiens
caattaagcaccttg

SEQ ID NO: 902871 - DNA, 15 bp, Homo sapiens
ccaattaagcacctt

SEQ ID NO: 902872 - DNA, 15 bp, Homo sapiens
accaattaagcacct

SEQ ID NO: 902873 - DNA, 15 bp, Homo sapiens
gaccaattaagcacc

SEQ ID NO: 902874 - DNA, 15 bp, Homo sapiens
tgaccaattaagcac

SEQ ID NO: 902875 - DNA, 15 bp, Homo sapiens
ttgaccaattaagca

SEQ ID NO: 902876 - DNA, 15 bp, Homo sapiens
attgaccaattaagc

SEQ ID NO: 902877 - DNA, 15 bp, Homo sapiens
tattgaccaattaag

SEQ ID NO: 902878 - DNA, 15 bp, Homo sapiens
ttattgaccaattaa

SEQ ID NO: 902879 - DNA, 15 bp, Homo sapiens
attattgaccaatta

SEQ ID NO: 902880 - DNA, 15 bp, Homo sapiens
tattattgaccaatt

SEQ ID NO: 902881 - DNA, 15 bp, Homo sapiens
ttattattgaccaat

SEQ ID NO: 902882 - DNA, 15 bp, Homo sapiens
attattattgaccaa

SEQ ID NO: 902883 - DNA, 15 bp, Homo sapiens
tattattattgacca

SEQ ID NO: 902884 - DNA, 15 bp, Homo sapiens
ctattattattgacc

SEQ ID NO: 902885 - DNA, 15 bp, Homo sapiens
tctattattattgac

SEQ ID NO: 902886 - DNA, 15 bp, Homo sapiens
atctattattattga

SEQ ID NO: 902887 - DNA, 15 bp, Homo sapiens
tatctattattattg

SEQ ID NO: 902888 - DNA, 15 bp, Homo sapiens
atatctattattatt

SEQ ID NO: 902889 - DNA, 15 bp, Homo sapiens
tatatctattattat

SEQ ID NO: 902890 - DNA, 15 bp, Homo sapiens
atatatctattatta

SEQ ID NO: 902891 - DNA, 15 bp, Homo sapiens
tatatatctattatt

SEQ ID NO: 902892 - DNA, 15 bp, Homo sapiens
gtatatatctattat

SEQ ID NO: 902893 - DNA, 15 bp, Homo sapiens
tgtatatatctatta

SEQ ID NO: 902894 - DNA, 15 bp, Homo sapiens
atgtatatatctatt

SEQ ID NO: 902895 - DNA, 15 bp, Homo sapiens
aatgtatatatctat

SEQ ID NO: 902896 - DNA, 15 bp, Homo sapiens
taatgtatatatcta

SEQ ID NO: 902897 - DNA, 15 bp, Homo sapiens
ttaatgtatatatct

SEQ ID NO: 902898 - DNA, 15 bp, Homo sapiens
gttaatgtatatatc

SEQ ID NO: 902899 - DNA, 15 bp, Homo sapiens
agttaatgtatatat

SEQ ID NO: 902900 - DNA, 15 bp, Homo sapiens
aagttaatgtatata

SEQ ID NO: 902901 - DNA, 15 bp, Homo sapiens
taagttaatgtatat

SEQ ID NO: 902902 - DNA, 15 bp, Homo sapiens
ataagttaatgtata

SEQ ID NO: 902903 - DNA, 15 bp, Homo sapiens
cataagttaatgtat

SEQ ID NO: 902904 - DNA, 15 bp, Homo sapiens
tcataagttaatgta

SEQ ID NO: 902905 - DNA, 15 bp, Homo sapiens
atcataagttaatgt

SEQ ID NO: 902906 - DNA, 15 bp, Homo sapiens
aatcataagttaatg

SEQ ID NO: 902907 - DNA, 15 bp, Homo sapiens
taatcataagttaat

SEQ ID NO: 902908 - DNA, 15 bp, Homo sapiens
ttaatcataagttaa

SEQ ID NO: 902909 - DNA, 15 bp, Homo sapiens
attaatcataagtta

SEQ ID NO: 902910 - DNA, 15 bp, Homo sapiens
aattaatcataagtt

SEQ ID NO: 902911 - DNA, 15 bp, Homo sapiens
aaattaatcataagt

SEQ ID NO: 902912 - DNA, 15 bp, Homo sapiens
taaattaatcataag

SEQ ID NO: 902913 - DNA, 15 bp, Homo sapiens
ataaattaatcataa

SEQ ID NO: 902914 - DNA, 15 bp, Homo sapiens
aataaattaatcata

SEQ ID NO: 902915 - DNA, 15 bp, Homo sapiens
taataaattaatcat

SEQ ID NO: 902916 - DNA, 15 bp, Homo sapiens
ttaataaattaatca

SEQ ID NO: 902917 - DNA, 15 bp, Homo sapiens
attaataaattaatc

SEQ ID NO: 902918 - DNA, 15 bp, Homo sapiens
tattaataaattaat

SEQ ID NO: 902919 - DNA, 15 bp, Homo sapiens
ttattaataaattaa

SEQ ID NO: 902920 - DNA, 15 bp, Homo sapiens
tttattaataaatta

SEQ ID NO: 902921 - DNA, 15 bp, Homo sapiens
ttttattaataaatt

SEQ ID NO: 902922 - DNA, 15 bp, Homo sapiens
attttattaataaat

SEQ ID NO: 902923 - DNA, 15 bp, Homo sapiens
tattttattaataaa

SEQ ID NO: 902924 - DNA, 15 bp, Homo sapiens
atattttattaataa

SEQ ID NO: 902925 - DNA, 15 bp, Homo sapiens
catattttattaata

SEQ ID NO: 902926 - DNA, 15 bp, Homo sapiens
tcatattttattaat

SEQ ID NO: 902927 - DNA, 15 bp, Homo sapiens
ttcatattttattaa

SEQ ID NO: 902928 - DNA, 15 bp, Homo sapiens
attcatattttatta

SEQ ID NO: 902929 - DNA, 15 bp, Homo sapiens
aattcatattttatt

SEQ ID NO: 902930 - DNA, 15 bp, Homo sapiens
aaattcatattttat

SEQ ID NO: 902931 - DNA, 15 bp, Homo sapiens
taaattcatatttta

SEQ ID NO: 902932 - DNA, 15 bp, Homo sapiens
ataaattcatatttt

SEQ ID NO: 902933 - DNA, 15 bp, Homo sapiens
aataaattcatattt

SEQ ID NO: 902934 - DNA, 15 bp, Homo sapiens
aaataaattcatatt

SEQ ID NO: 902935 - DNA, 15 bp, Homo sapiens
aaaataaattcatat

SEQ ID NO: 902936 - DNA, 15 bp, Homo sapiens
aaaaataaattcata

SEQ ID NO: 902937 - DNA, 15 bp, Homo sapiens
aaaaaataaattcat

SEQ ID NO: 902938 - DNA, 15 bp, Homo sapiens
aaaaaaataaattca

SEQ ID NO: 902939 - DNA, 15 bp, Homo sapiens
gaaaaaaataaattc

SEQ ID NO: 902940 - DNA, 15 bp, Homo sapiens
tgaaaaaaataaatt

SEQ ID NO: 902941 - DNA, 15 bp, Homo sapiens
ctgaaaaaaataaat

SEQ ID NO: 902942 - DNA, 15 bp, Homo sapiens
cctgaaaaaaataaa

SEQ ID NO: 902943 - DNA, 15 bp, Homo sapiens
ccctgaaaaaaataa

SEQ ID NO: 902944 - DNA, 15 bp, Homo sapiens
tccctgaaaaaaata

SEQ ID NO: 902945 - DNA, 15 bp, Homo sapiens
gtccctgaaaaaaat

SEQ ID NO: 902946 - DNA, 15 bp, Homo sapiens
tgtccctgaaaaaaa

SEQ ID NO: 902947 - DNA, 15 bp, Homo sapiens
ttgtccctgaaaaaa

SEQ ID NO: 902948 - DNA, 15 bp, Homo sapiens
gttgtccctgaaaaa

SEQ ID NO: 902949 - DNA, 15 bp, Homo sapiens
agttgtccctgaaaa

SEQ ID NO: 902950 - DNA, 15 bp, Homo sapiens
tagttgtccctgaaa

SEQ ID NO: 902951 - DNA, 15 bp, Homo sapiens
atagttgtccctgaa

SEQ ID NO: 902952 - DNA, 15 bp, Homo sapiens
tatagttgtccctga

SEQ ID NO: 902953 - DNA, 15 bp, Homo sapiens
ttatagttgtccctg

SEQ ID NO: 902954 - DNA, 15 bp, Homo sapiens
attatagttgtccct

SEQ ID NO: 902955 - DNA, 15 bp, Homo sapiens
aattatagttgtccc

SEQ ID NO: 902956 - DNA, 15 bp, Homo sapiens
caattatagttgtcc

SEQ ID NO: 902957 - DNA, 15 bp, Homo sapiens
acaattatagttgtc

SEQ ID NO: 902958 - DNA, 15 bp, Homo sapiens
gacaattatagttgt

SEQ ID NO: 902959 - DNA, 15 bp, Homo sapiens
tgacaattatagttg

SEQ ID NO: 902960 - DNA, 15 bp, Homo sapiens
gtgacaattatagtt

SEQ ID NO: 902961 - DNA, 15 bp, Homo sapiens
tgtgacaattatagt

SEQ ID NO: 902962 - DNA, 15 bp, Homo sapiens
ttgtgacaattatag

SEQ ID NO: 902963 - DNA, 15 bp, Homo sapiens
attgtgacaattata

SEQ ID NO: 902964 - DNA, 15 bp, Homo sapiens
gattgtgacaattat

SEQ ID NO: 902965 - DNA, 15 bp, Homo sapiens
agattgtgacaatta

SEQ ID NO: 902966 - DNA, 15 bp, Homo sapiens
cagattgtgacaatt

SEQ ID NO: 902967 - DNA, 15 bp, Homo sapiens
ccagattgtgacaat

SEQ ID NO: 902968 - DNA, 15 bp, Homo sapiens
tccagattgtgacaa

SEQ ID NO: 902969 - DNA, 15 bp, Homo sapiens
ttccagattgtgaca

SEQ ID NO: 902970 - DNA, 15 bp, Homo sapiens
cttccagattgtgac

SEQ ID NO: 902971 - DNA, 15 bp, Homo sapiens
acttccagattgtga

SEQ ID NO: 902972 - DNA, 15 bp, Homo sapiens
cacttccagattgtg

SEQ ID NO: 902973 - DNA, 15 bp, Homo sapiens
acacttccagattgt

SEQ ID NO: 902974 - DNA, 15 bp, Homo sapiens
aacacttccagattg

SEQ ID NO: 902975 - DNA, 15 bp, Homo sapiens
gaacacttccagatt

SEQ ID NO: 902976 - DNA, 15 bp, Homo sapiens
agaacacttccagat

SEQ ID NO: 902977 - DNA, 15 bp, Homo sapiens
aagaacacttccaga

SEQ ID NO: 902978 - DNA, 15 bp, Homo sapiens
taagaacacttccag

SEQ ID NO: 902979 - DNA, 15 bp, Homo sapiens
ataagaacacttcca

SEQ ID NO: 902980 - DNA, 15 bp, Homo sapiens
tataagaacacttcc

SEQ ID NO: 902981 - DNA, 15 bp, Homo sapiens
atataagaacacttc

SEQ ID NO: 902982 - DNA, 15 bp, Homo sapiens
aatataagaacactt

SEQ ID NO: 902983 - DNA, 15 bp, Homo sapiens
aaatataagaacact

SEQ ID NO: 902984 - DNA, 15 bp, Homo sapiens
aaaatataagaacac

SEQ ID NO: 902985 - DNA, 15 bp, Homo sapiens
caaaatataagaaca

SEQ ID NO: 902986 - DNA, 15 bp, Homo sapiens
gcaaaatataagaac

SEQ ID NO: 902987 - DNA, 15 bp, Homo sapiens
agcaaaatataagaa

SEQ ID NO: 902988 - DNA, 15 bp, Homo sapiens
aagcaaaatataaga

SEQ ID NO: 902989 - DNA, 15 bp, Homo sapiens
caagcaaaatataag

SEQ ID NO: 902990 - DNA, 15 bp, Homo sapiens
tcaagcaaaatataa

SEQ ID NO: 902991 - DNA, 15 bp, Homo sapiens
ttcaagcaaaatata

SEQ ID NO: 902992 - DNA, 15 bp, Homo sapiens
cttcaagcaaaatat

SEQ ID NO: 902993 - DNA, 15 bp, Homo sapiens
ccttcaagcaaaata

SEQ ID NO: 902994 - DNA, 15 bp, Homo sapiens
accttcaagcaaaat

SEQ ID NO: 902995 - DNA, 15 bp, Homo sapiens
aaccttcaagcaaaa

SEQ ID NO: 902996 - DNA, 15 bp, Homo sapiens
taaccttcaagcaaa

SEQ ID NO: 902997 - DNA, 15 bp, Homo sapiens
ataaccttcaagcaa

SEQ ID NO: 902998 - DNA, 15 bp, Homo sapiens
tataaccttcaagca

SEQ ID NO: 902999 - DNA, 15 bp, Homo sapiens
ttataaccttcaagc

SEQ ID NO: 903000 - DNA, 15 bp, Homo sapiens
tttataaccttcaag

SEQ ID NO: 903001 - DNA, 15 bp, Homo sapiens
ttttataaccttcaa

SEQ ID NO: 903002 - DNA, 15 bp, Homo sapiens
attttataaccttca

SEQ ID NO: 903003 - DNA, 15 bp, Homo sapiens
tattttataaccttc

SEQ ID NO: 903004 - DNA, 15 bp, Homo sapiens
atattttataacctt

SEQ ID NO: 903005 - DNA, 15 bp, Homo sapiens
tatattttataacct

SEQ ID NO: 903006 - DNA, 15 bp, Homo sapiens
ttatattttataacc

SEQ ID NO: 903007 - DNA, 15 bp, Homo sapiens
tttatattttataac

SEQ ID NO: 903008 - DNA, 15 bp, Homo sapiens
ttttatattttataa

SEQ ID NO: 903009 - DNA, 15 bp, Homo sapiens
gttttatattttata

SEQ ID NO: 903010 - DNA, 15 bp, Homo sapiens
tgttttatattttat

SEQ ID NO: 903011 - DNA, 15 bp, Homo sapiens
ctgttttatatttta

SEQ ID NO: 903012 - DNA, 15 bp, Homo sapiens
actgttttatatttt

SEQ ID NO: 903013 - DNA, 15 bp, Homo sapiens
aactgttttatattt

SEQ ID NO: 903014 - DNA, 15 bp, Homo sapiens
caactgttttatatt

SEQ ID NO: 903015 - DNA, 15 bp, Homo sapiens
gcaactgttttatat

SEQ ID NO: 903016 - DNA, 15 bp, Homo sapiens
agcaactgttttata

SEQ ID NO: 903017 - DNA, 15 bp, Homo sapiens
aagcaactgttttat

SEQ ID NO: 903018 - DNA, 15 bp, Homo sapiens
aaagcaactgtttta

SEQ ID NO: 903019 - DNA, 15 bp, Homo sapiens
aaaagcaactgtttt

SEQ ID NO: 903020 - DNA, 15 bp, Homo sapiens
gaaaagcaactgttt

SEQ ID NO: 903021 - DNA, 15 bp, Homo sapiens
agaaaagcaactgtt

SEQ ID NO: 903022 - DNA, 15 bp, Homo sapiens
cagaaaagcaactgt

SEQ ID NO: 903023 - DNA, 15 bp, Homo sapiens
acagaaaagcaactg

SEQ ID NO: 903024 - DNA, 15 bp, Homo sapiens
aacagaaaagcaact

SEQ ID NO: 903025 - DNA, 15 bp, Homo sapiens
aaacagaaaagcaac

SEQ ID NO: 903026 - DNA, 15 bp, Homo sapiens
taaacagaaaagcaa

SEQ ID NO: 903027 - DNA, 15 bp, Homo sapiens
gtaaacagaaaagca

SEQ ID NO: 903028 - DNA, 15 bp, Homo sapiens
agtaaacagaaaagc

SEQ ID NO: 903029 - DNA, 15 bp, Homo sapiens
aagtaaacagaaaag

SEQ ID NO: 903030 - DNA, 15 bp, Homo sapiens
taagtaaacagaaaa

SEQ ID NO: 903031 - DNA, 15 bp, Homo sapiens
ctaagtaaacagaaa

SEQ ID NO: 903032 - DNA, 15 bp, Homo sapiens
cctaagtaaacagaa

SEQ ID NO: 903033 - DNA, 15 bp, Homo sapiens
acctaagtaaacaga

SEQ ID NO: 903034 - DNA, 15 bp, Homo sapiens
cacctaagtaaacag

SEQ ID NO: 903035 - DNA, 15 bp, Homo sapiens
ccacctaagtaaaca

SEQ ID NO: 903036 - DNA, 15 bp, Homo sapiens
tccacctaagtaaac

SEQ ID NO: 903037 - DNA, 15 bp, Homo sapiens
ttccacctaagtaaa

SEQ ID NO: 903038 - DNA, 15 bp, Homo sapiens
cttccacctaagtaa

SEQ ID NO: 903039 - DNA, 15 bp, Homo sapiens
acttccacctaagta

SEQ ID NO: 903040 - DNA, 15 bp, Homo sapiens
tacttccacctaagt

SEQ ID NO: 903041 - DNA, 15 bp, Homo sapiens
ttacttccacctaag

SEQ ID NO: 903042 - DNA, 15 bp, Homo sapiens
tttacttccacctaa

SEQ ID NO: 903043 - DNA, 15 bp, Homo sapiens
atttacttccaccta

SEQ ID NO: 903044 - DNA, 15 bp, Homo sapiens
catttacttccacct

SEQ ID NO: 903045 - DNA, 15 bp, Homo sapiens
tcatttacttccacc

SEQ ID NO: 903046 - DNA, 15 bp, Homo sapiens
ctcatttacttccac

SEQ ID NO: 903047 - DNA, 15 bp, Homo sapiens
gctcatttacttcca

SEQ ID NO: 903048 - DNA, 15 bp, Homo sapiens
agctcatttacttcc

SEQ ID NO: 903049 - DNA, 15 bp, Homo sapiens
tagctcatttacttc

SEQ ID NO: 903050 - DNA, 15 bp, Homo sapiens
ttagctcatttactt

SEQ ID NO: 903051 - DNA, 15 bp, Homo sapiens
tttagctcatttact

SEQ ID NO: 903052 - DNA, 15 bp, Homo sapiens
ttttagctcatttac

SEQ ID NO: 903053 - DNA, 15 bp, Homo sapiens
tttttagctcattta

SEQ ID NO: 903054 - DNA, 15 bp, Homo sapiens
ctttttagctcattt

SEQ ID NO: 903055 - DNA, 15 bp, Homo sapiens
actttttagctcatt

SEQ ID NO: 903056 - DNA, 15 bp, Homo sapiens
cactttttagctcat

SEQ ID NO: 903057 - DNA, 15 bp, Homo sapiens
tcactttttagctca

SEQ ID NO: 903058 - DNA, 15 bp, Homo sapiens
ttcactttttagctc

SEQ ID NO: 903059 - DNA, 15 bp, Homo sapiens
tttcactttttagct

SEQ ID NO: 903060 - DNA, 15 bp, Homo sapiens
ttttcactttttagc

SEQ ID NO: 903061 - DNA, 15 bp, Homo sapiens
cttttcactttttag

SEQ ID NO: 903062 - DNA, 15 bp, Homo sapiens
gcttttcacttttta

SEQ ID NO: 903063 - DNA, 15 bp, Homo sapiens
tgcttttcacttttt

SEQ ID NO: 903064 - DNA, 15 bp, Homo sapiens
ttgcttttcactttt

SEQ ID NO: 903065 - DNA, 15 bp, Homo sapiens
cttgcttttcacttt

SEQ ID NO: 903066 - DNA, 15 bp, Homo sapiens
tcttgcttttcactt

SEQ ID NO: 903067 - DNA, 15 bp, Homo sapiens
ttcttgcttttcact

SEQ ID NO: 903068 - DNA, 15 bp, Homo sapiens
tttcttgcttttcac

SEQ ID NO: 903069 - DNA, 15 bp, Homo sapiens
ttttcttgcttttca

SEQ ID NO: 903070 - DNA, 15 bp, Homo sapiens
attttcttgcttttc

SEQ ID NO: 903071 - DNA, 15 bp, Homo sapiens
cattttcttgctttt

SEQ ID NO: 903072 - DNA, 15 bp, Homo sapiens
acattttcttgcttt

SEQ ID NO: 903073 - DNA, 15 bp, Homo sapiens
cacattttcttgctt

SEQ ID NO: 903074 - DNA, 15 bp, Homo sapiens
tcacattttcttgct

SEQ ID NO: 903075 - DNA, 15 bp, Homo sapiens
atcacattttcttgc

SEQ ID NO: 903076 - DNA, 15 bp, Homo sapiens
tatcacattttcttg

SEQ ID NO: 903077 - DNA, 15 bp, Homo sapiens
gtatcacattttctt

SEQ ID NO: 903078 - DNA, 15 bp, Homo sapiens
tgtatcacattttct

SEQ ID NO: 903079 - DNA, 15 bp, Homo sapiens
gtgtatcacattttc

SEQ ID NO: 903080 - DNA, 15 bp, Homo sapiens
ggtgtatcacatttt

SEQ ID NO: 903081 - DNA, 15 bp, Homo sapiens
aggtgtatcacattt

SEQ ID NO: 903082 - DNA, 15 bp, Homo sapiens
aaggtgtatcacatt

SEQ ID NO: 903083 - DNA, 15 bp, Homo sapiens
aaaggtgtatcacat

SEQ ID NO: 903084 - DNA, 15 bp, Homo sapiens
aaaaggtgtatcaca

SEQ ID NO: 903085 - DNA, 15 bp, Homo sapiens
gaaaaggtgtatcac

SEQ ID NO: 903086 - DNA, 15 bp, Homo sapiens
tgaaaaggtgtatca

SEQ ID NO: 903087 - DNA, 15 bp, Homo sapiens
ctgaaaaggtgtatc

SEQ ID NO: 903088 - DNA, 15 bp, Homo sapiens
tctgaaaaggtgtat

SEQ ID NO: 903089 - DNA, 15 bp, Homo sapiens
ttctgaaaaggtgta

SEQ ID NO: 903090 - DNA, 15 bp, Homo sapiens
attctgaaaaggtgt

SEQ ID NO: 903091 - DNA, 15 bp, Homo sapiens
aattctgaaaaggtg

SEQ ID NO: 903092 - DNA, 15 bp, Homo sapiens
taattctgaaaaggt

SEQ ID NO: 903093 - DNA, 15 bp, Homo sapiens
gtaattctgaaaagg

SEQ ID NO: 903094 - DNA, 15 bp, Homo sapiens
agtaattctgaaaag

SEQ ID NO: 903095 - DNA, 15 bp, Homo sapiens
gagtaattctgaaaa

SEQ ID NO: 903096 - DNA, 15 bp, Homo sapiens
tgagtaattctgaaa

SEQ ID NO: 903097 - DNA, 15 bp, Homo sapiens
ctgagtaattctgaa

SEQ ID NO: 903098 - DNA, 15 bp, Homo sapiens
actgagtaattctga

SEQ ID NO: 903099 - DNA, 15 bp, Homo sapiens
gactgagtaattctg

SEQ ID NO: 903100 - DNA, 15 bp, Homo sapiens
tgactgagtaattct

SEQ ID NO: 903101 - DNA, 15 bp, Homo sapiens
gtgactgagtaattc

SEQ ID NO: 903102 - DNA, 15 bp, Homo sapiens
agtgactgagtaatt

SEQ ID NO: 903103 - DNA, 15 bp, Homo sapiens
tagtgactgagtaat

SEQ ID NO: 903104 - DNA, 15 bp, Homo sapiens
ttagtgactgagtaa

SEQ ID NO: 903105 - DNA, 15 bp, Homo sapiens
attagtgactgagta

SEQ ID NO: 903106 - DNA, 15 bp, Homo sapiens
cattagtgactgagt

SEQ ID NO: 903107 - DNA, 15 bp, Homo sapiens
tcattagtgactgag

SEQ ID NO: 903108 - DNA, 15 bp, Homo sapiens
ttcattagtgactga

SEQ ID NO: 903109 - DNA, 15 bp, Homo sapiens
cttcattagtgactg

SEQ ID NO: 903110 - DNA, 15 bp, Homo sapiens
ccttcattagtgact

SEQ ID NO: 903111 - DNA, 15 bp, Homo sapiens
accttcattagtgac

SEQ ID NO: 903112 - DNA, 15 bp, Homo sapiens
aaccttcattagtga

SEQ ID NO: 903113 - DNA, 15 bp, Homo sapiens
aaaccttcattagtg

SEQ ID NO: 903114 - DNA, 15 bp, Homo sapiens
caaaccttcattagt

SEQ ID NO: 903115 - DNA, 15 bp, Homo sapiens
acaaaccttcattag

SEQ ID NO: 903116 - DNA, 15 bp, Homo sapiens
tacaaaccttcatta

SEQ ID NO: 903117 - DNA, 15 bp, Homo sapiens
atacaaaccttcatt

SEQ ID NO: 903118 - DNA, 15 bp, Homo sapiens
catacaaaccttcat

SEQ ID NO: 903119 - DNA, 15 bp, Homo sapiens
acatacaaaccttca

SEQ ID NO: 903120 - DNA, 15 bp, Homo sapiens
tacatacaaaccttc

SEQ ID NO: 903121 - DNA, 15 bp, Homo sapiens
ctacatacaaacctt

SEQ ID NO: 903122 - DNA, 15 bp, Homo sapiens
actacatacaaacct

SEQ ID NO: 903123 - DNA, 15 bp, Homo sapiens
tactacatacaaacc

SEQ ID NO: 903124 - DNA, 15 bp, Homo sapiens
ctactacatacaaac

SEQ ID NO: 903125 - DNA, 15 bp, Homo sapiens
cctactacatacaaa

SEQ ID NO: 903126 - DNA, 15 bp, Homo sapiens
acctactacatacaa

SEQ ID NO: 903127 - DNA, 15 bp, Homo sapiens
aacctactacataca

SEQ ID NO: 903128 - DNA, 15 bp, Homo sapiens
aaacctactacatac

SEQ ID NO: 903129 - DNA, 15 bp, Homo sapiens
aaaacctactacata

SEQ ID NO: 903130 - DNA, 15 bp, Homo sapiens
taaaacctactacat

SEQ ID NO: 903131 - DNA, 15 bp, Homo sapiens
ttaaaacctactaca

SEQ ID NO: 903132 - DNA, 15 bp, Homo sapiens
gttaaaacctactac

SEQ ID NO: 903133 - DNA, 15 bp, Homo sapiens
agttaaaacctacta

SEQ ID NO: 903134 - DNA, 15 bp, Homo sapiens
tagttaaaacctact

SEQ ID NO: 903135 - DNA, 15 bp, Homo sapiens
atagttaaaacctac

SEQ ID NO: 903136 - DNA, 15 bp, Homo sapiens
tatagttaaaaccta

SEQ ID NO: 903137 - DNA, 15 bp, Homo sapiens
ctatagttaaaacct

SEQ ID NO: 903138 - DNA, 15 bp, Homo sapiens
cctatagttaaaacc

SEQ ID NO: 903139 - DNA, 15 bp, Homo sapiens
acctatagttaaaac

SEQ ID NO: 903140 - DNA, 15 bp, Homo sapiens
aacctatagttaaaa

SEQ ID NO: 903141 - DNA, 15 bp, Homo sapiens
aaacctatagttaaa

SEQ ID NO: 903142 - DNA, 15 bp, Homo sapiens
caaacctatagttaa

SEQ ID NO: 903143 - DNA, 15 bp, Homo sapiens
ccaaacctatagtta

SEQ ID NO: 903144 - DNA, 15 bp, Homo sapiens
gccaaacctatagtt

SEQ ID NO: 903145 - DNA, 15 bp, Homo sapiens
agccaaacctatagt

SEQ ID NO: 903146 - DNA, 15 bp, Homo sapiens
tagccaaacctatag

SEQ ID NO: 903147 - DNA, 15 bp, Homo sapiens
atagccaaacctata

SEQ ID NO: 903148 - DNA, 15 bp, Homo sapiens
aatagccaaacctat

SEQ ID NO: 903149 - DNA, 15 bp, Homo sapiens
taatagccaaaccta

SEQ ID NO: 903150 - DNA, 15 bp, Homo sapiens
ctaatagccaaacct

SEQ ID NO: 903151 - DNA, 15 bp, Homo sapiens
actaatagccaaacc

SEQ ID NO: 903152 - DNA, 15 bp, Homo sapiens
cactaatagccaaac

SEQ ID NO: 903153 - DNA, 15 bp, Homo sapiens
ccactaatagccaaa

SEQ ID NO: 903154 - DNA, 15 bp, Homo sapiens
tccactaatagccaa

SEQ ID NO: 903155 - DNA, 15 bp, Homo sapiens
ttccactaatagcca

SEQ ID NO: 903156 - DNA, 15 bp, Homo sapiens
gttccactaatagcc

SEQ ID NO: 903157 - DNA, 15 bp, Homo sapiens
agttccactaatagc

SEQ ID NO: 903158 - DNA, 15 bp, Homo sapiens
tagttccactaatag

SEQ ID NO: 903159 - DNA, 15 bp, Homo sapiens
atagttccactaata

SEQ ID NO: 903160 - DNA, 15 bp, Homo sapiens
tatagttccactaat

SEQ ID NO: 903161 - DNA, 15 bp, Homo sapiens
ttatagttccactaa

SEQ ID NO: 903162 - DNA, 15 bp, Homo sapiens
tttatagttccacta

SEQ ID NO: 903163 - DNA, 15 bp, Homo sapiens
ttttatagttccact

SEQ ID NO: 903164 - DNA, 15 bp, Homo sapiens
tttttatagttccac

SEQ ID NO: 903165 - DNA, 15 bp, Homo sapiens
atttttatagttcca

SEQ ID NO: 903166 - DNA, 15 bp, Homo sapiens
gatttttatagttcc

SEQ ID NO: 903167 - DNA, 15 bp, Homo sapiens
agatttttatagttc

SEQ ID NO: 903168 - DNA, 15 bp, Homo sapiens
cagatttttatagtt

SEQ ID NO: 903169 - DNA, 15 bp, Homo sapiens
acagatttttatagt

SEQ ID NO: 903170 - DNA, 15 bp, Homo sapiens
aacagatttttatag

SEQ ID NO: 903171 - DNA, 15 bp, Homo sapiens
gaacagatttttata

SEQ ID NO: 903172 - DNA, 15 bp, Homo sapiens
agaacagatttttat

SEQ ID NO: 903173 - DNA, 15 bp, Homo sapiens
aagaacagattttta

SEQ ID NO: 903174 - DNA, 15 bp, Homo sapiens
taagaacagattttt

SEQ ID NO: 903175 - DNA, 15 bp, Homo sapiens
ataagaacagatttt

SEQ ID NO: 903176 - DNA, 15 bp, Homo sapiens
tataagaacagattt

SEQ ID NO: 903177 - DNA, 15 bp, Homo sapiens
atataagaacagatt

SEQ ID NO: 903178 - DNA, 15 bp, Homo sapiens
tatataagaacagat

SEQ ID NO: 903179 - DNA, 15 bp, Homo sapiens
ttatataagaacaga

SEQ ID NO: 903180 - DNA, 15 bp, Homo sapiens
cttatataagaacag

SEQ ID NO: 903181 - DNA, 15 bp, Homo sapiens
ccttatataagaaca

SEQ ID NO: 903182 - DNA, 15 bp, Homo sapiens
accttatataagaac

SEQ ID NO: 903183 - DNA, 15 bp, Homo sapiens
taccttatataagaa

SEQ ID NO: 903184 - DNA, 15 bp, Homo sapiens
ttaccttatataaga

SEQ ID NO: 903185 - DNA, 15 bp, Homo sapiens
attaccttatataag

SEQ ID NO: 903186 - DNA, 15 bp, Homo sapiens
gattaccttatataa

SEQ ID NO: 903187 - DNA, 15 bp, Homo sapiens
agattaccttatata

SEQ ID NO: 903188 - DNA, 15 bp, Homo sapiens
aagattaccttatat

SEQ ID NO: 903189 - DNA, 15 bp, Homo sapiens
aaagattaccttata

SEQ ID NO: 903190 - DNA, 15 bp, Homo sapiens
caaagattaccttat

SEQ ID NO: 903191 - DNA, 15 bp, Homo sapiens
acaaagattacctta

SEQ ID NO: 903192 - DNA, 15 bp, Homo sapiens
cacaaagattacctt

SEQ ID NO: 903193 - DNA, 15 bp, Homo sapiens
tcacaaagattacct

SEQ ID NO: 903194 - DNA, 15 bp, Homo sapiens
ttcacaaagattacc

SEQ ID NO: 903195 - DNA, 15 bp, Homo sapiens
tttcacaaagattac

SEQ ID NO: 903196 - DNA, 15 bp, Homo sapiens
ttttcacaaagatta

SEQ ID NO: 903197 - DNA, 15 bp, Homo sapiens
attttcacaaagatt

SEQ ID NO: 903198 - DNA, 15 bp, Homo sapiens
tattttcacaaagat

SEQ ID NO: 903199 - DNA, 15 bp, Homo sapiens
gtattttcacaaaga

SEQ ID NO: 903200 - DNA, 15 bp, Homo sapiens
ggtattttcacaaag

SEQ ID NO: 903201 - DNA, 15 bp, Homo sapiens
aggtattttcacaaa

SEQ ID NO: 903202 - DNA, 15 bp, Homo sapiens
caggtattttcacaa

SEQ ID NO: 903203 - DNA, 15 bp, Homo sapiens
ccaggtattttcaca

SEQ ID NO: 903204 - DNA, 15 bp, Homo sapiens
accaggtattttcac

SEQ ID NO: 903205 - DNA, 15 bp, Homo sapiens
taccaggtattttca

SEQ ID NO: 903206 - DNA, 15 bp, Homo sapiens
ttaccaggtattttc

SEQ ID NO: 903207 - DNA, 15 bp, Homo sapiens
attaccaggtatttt

SEQ ID NO: 903208 - DNA, 15 bp, Homo sapiens
tattaccaggtattt

SEQ ID NO: 903209 - DNA, 15 bp, Homo sapiens
atattaccaggtatt

SEQ ID NO: 903210 - DNA, 15 bp, Homo sapiens
gatattaccaggtat

SEQ ID NO: 903211 - DNA, 15 bp, Homo sapiens
agatattaccaggta

SEQ ID NO: 903212 - DNA, 15 bp, Homo sapiens
tagatattaccaggt

SEQ ID NO: 903213 - DNA, 15 bp, Homo sapiens
gtagatattaccagg

SEQ ID NO: 903214 - DNA, 15 bp, Homo sapiens
tgtagatattaccag

SEQ ID NO: 903215 - DNA, 15 bp, Homo sapiens
atgtagatattacca

SEQ ID NO: 903216 - DNA, 15 bp, Homo sapiens
gatgtagatattacc

SEQ ID NO: 903217 - DNA, 15 bp, Homo sapiens
tgatgtagatattac

SEQ ID NO: 903218 - DNA, 15 bp, Homo sapiens
gtgatgtagatatta

SEQ ID NO: 903219 - DNA, 15 bp, Homo sapiens
ggtgatgtagatatt

SEQ ID NO: 903220 - DNA, 15 bp, Homo sapiens
tggtgatgtagatat

SEQ ID NO: 903221 - DNA, 15 bp, Homo sapiens
gtggtgatgtagata

SEQ ID NO: 903222 - DNA, 15 bp, Homo sapiens
agtggtgatgtagat

SEQ ID NO: 903223 - DNA, 15 bp, Homo sapiens
tagtggtgatgtaga

SEQ ID NO: 903224 - DNA, 15 bp, Homo sapiens
ttagtggtgatgtag

SEQ ID NO: 903225 - DNA, 15 bp, Homo sapiens
tttagtggtgatgta

SEQ ID NO: 903226 - DNA, 15 bp, Homo sapiens
ttttagtggtgatgt

SEQ ID NO: 903227 - DNA, 15 bp, Homo sapiens
tttttagtggtgatg

SEQ ID NO: 903228 - DNA, 15 bp, Homo sapiens
ttttttagtggtgat

SEQ ID NO: 903229 - DNA, 15 bp, Homo sapiens
attttttagtggtga

SEQ ID NO: 903230 - DNA, 15 bp, Homo sapiens
cattttttagtggtg

SEQ ID NO: 903231 - DNA, 15 bp, Homo sapiens
gcattttttagtggt

SEQ ID NO: 903232 - DNA, 15 bp, Homo sapiens
tgcattttttagtgg

SEQ ID NO: 903233 - DNA, 15 bp, Homo sapiens
ttgcattttttagtg

SEQ ID NO: 903234 - DNA, 15 bp, Homo sapiens
attgcattttttagt

SEQ ID NO: 903235 - DNA, 15 bp, Homo sapiens
tattgcattttttag

SEQ ID NO: 903236 - DNA, 15 bp, Homo sapiens
atattgcatttttta

SEQ ID NO: 903237 - DNA, 15 bp, Homo sapiens
tatattgcatttttt

SEQ ID NO: 903238 - DNA, 15 bp, Homo sapiens
atatattgcattttt

SEQ ID NO: 903239 - DNA, 15 bp, Homo sapiens
aatatattgcatttt

SEQ ID NO: 903240 - DNA, 15 bp, Homo sapiens
aaatatattgcattt

SEQ ID NO: 903241 - DNA, 15 bp, Homo sapiens
taaatatattgcatt

SEQ ID NO: 903242 - DNA, 15 bp, Homo sapiens
ttaaatatattgcat

SEQ ID NO: 903243 - DNA, 15 bp, Homo sapiens
tttaaatatattgca

SEQ ID NO: 903244 - DNA, 15 bp, Homo sapiens
atttaaatatattgc

SEQ ID NO: 903245 - DNA, 15 bp, Homo sapiens
catttaaatatattg

SEQ ID NO: 903246 - DNA, 15 bp, Homo sapiens
acatttaaatatatt

SEQ ID NO: 903247 - DNA, 15 bp, Homo sapiens
cacatttaaatatat

SEQ ID NO: 903248 - DNA, 15 bp, Homo sapiens
tcacatttaaatata

SEQ ID NO: 903249 - DNA, 15 bp, Homo sapiens
ttcacatttaaatat

SEQ ID NO: 903250 - DNA, 15 bp, Homo sapiens
attcacatttaaata

SEQ ID NO: 903251 - DNA, 15 bp, Homo sapiens
aattcacatttaaat

SEQ ID NO: 903252 - DNA, 15 bp, Homo sapiens
taattcacatttaaa

SEQ ID NO: 903253 - DNA, 15 bp, Homo sapiens
ttaattcacatttaa

SEQ ID NO: 903254 - DNA, 15 bp, Homo sapiens
cttaattcacattta

SEQ ID NO: 903255 - DNA, 15 bp, Homo sapiens
acttaattcacattt

SEQ ID NO: 903256 - DNA, 15 bp, Homo sapiens
tacttaattcacatt

SEQ ID NO: 903257 - DNA, 15 bp, Homo sapiens
atacttaattcacat

SEQ ID NO: 903258 - DNA, 15 bp, Homo sapiens
aatacttaattcaca

SEQ ID NO: 903259 - DNA, 15 bp, Homo sapiens
aaatacttaattcac

SEQ ID NO: 903260 - DNA, 15 bp, Homo sapiens
aaaatacttaattca

SEQ ID NO: 903261 - DNA, 15 bp, Homo sapiens
taaaatacttaattc

SEQ ID NO: 903262 - DNA, 15 bp, Homo sapiens
ctaaaatacttaatt

SEQ ID NO: 903263 - DNA, 15 bp, Homo sapiens
actaaaatacttaat

SEQ ID NO: 903264 - DNA, 15 bp, Homo sapiens
cactaaaatacttaa

SEQ ID NO: 903265 - DNA, 15 bp, Homo sapiens
acactaaaatactta

SEQ ID NO: 903266 - DNA, 15 bp, Homo sapiens
tacactaaaatactt

SEQ ID NO: 903267 - DNA, 15 bp, Homo sapiens
atacactaaaatact

SEQ ID NO: 903268 - DNA, 15 bp, Homo sapiens
tatacactaaaatac

SEQ ID NO: 903269 - DNA, 15 bp, Homo sapiens
ttatacactaaaata

SEQ ID NO: 903270 - DNA, 15 bp, Homo sapiens
tttatacactaaaat

SEQ ID NO: 903271 - DNA, 15 bp, Homo sapiens
ttttatacactaaaa

SEQ ID NO: 903272 - DNA, 15 bp, Homo sapiens
gttttatacactaaa

SEQ ID NO: 903273 - DNA, 15 bp, Homo sapiens
tgttttatacactaa

SEQ ID NO: 903274 - DNA, 15 bp, Homo sapiens
atgttttatacacta

SEQ ID NO: 903275 - DNA, 15 bp, Homo sapiens
aatgttttatacact

SEQ ID NO: 903276 - DNA, 15 bp, Homo sapiens
caatgttttatacac

SEQ ID NO: 903277 - DNA, 15 bp, Homo sapiens
gcaatgttttataca

SEQ ID NO: 903278 - DNA, 15 bp, Homo sapiens
agcaatgttttatac

SEQ ID NO: 903279 - DNA, 15 bp, Homo sapiens
tagcaatgttttata

SEQ ID NO: 903280 - DNA, 15 bp, Homo sapiens
ctagcaatgttttat

SEQ ID NO: 903281 - DNA, 15 bp, Homo sapiens
actagcaatgtttta

SEQ ID NO: 903282 - DNA, 15 bp, Homo sapiens
aactagcaatgtttt

SEQ ID NO: 903283 - DNA, 15 bp, Homo sapiens
aaactagcaatgttt

SEQ ID NO: 903284 - DNA, 15 bp, Homo sapiens
gaaactagcaatgtt

SEQ ID NO: 903285 - DNA, 15 bp, Homo sapiens
agaaactagcaatgt

SEQ ID NO: 903286 - DNA, 15 bp, Homo sapiens
tagaaactagcaatg

SEQ ID NO: 903287 - DNA, 15 bp, Homo sapiens
gtagaaactagcaat

SEQ ID NO: 903288 - DNA, 15 bp, Homo sapiens
agtagaaactagcaa

SEQ ID NO: 903289 - DNA, 15 bp, Homo sapiens
aagtagaaactagca

SEQ ID NO: 903290 - DNA, 15 bp, Homo sapiens
taagtagaaactagc

SEQ ID NO: 903291 - DNA, 15 bp, Homo sapiens
ttaagtagaaactag

SEQ ID NO: 903292 - DNA, 15 bp, Homo sapiens
tttaagtagaaacta

SEQ ID NO: 903293 - DNA, 15 bp, Homo sapiens
ctttaagtagaaact

SEQ ID NO: 903294 - DNA, 15 bp, Homo sapiens
actttaagtagaaac

SEQ ID NO: 903295 - DNA, 15 bp, Homo sapiens
aactttaagtagaaa

SEQ ID NO: 903296 - DNA, 15 bp, Homo sapiens
aaactttaagtagaa

SEQ ID NO: 903297 - DNA, 15 bp, Homo sapiens
gaaactttaagtaga

SEQ ID NO: 903298 - DNA, 15 bp, Homo sapiens
agaaactttaagtag

SEQ ID NO: 903299 - DNA, 15 bp, Homo sapiens
tagaaactttaagta

SEQ ID NO: 903300 - DNA, 15 bp, Homo sapiens
ttagaaactttaagt

SEQ ID NO: 903301 - DNA, 15 bp, Homo sapiens
tttagaaactttaag

SEQ ID NO: 903302 - DNA, 15 bp, Homo sapiens
ttttagaaactttaa

SEQ ID NO: 903303 - DNA, 15 bp, Homo sapiens
cttttagaaacttta

SEQ ID NO: 903304 - DNA, 15 bp, Homo sapiens
ccttttagaaacttt

SEQ ID NO: 903305 - DNA, 15 bp, Homo sapiens
cccttttagaaactt

SEQ ID NO: 903306 - DNA, 15 bp, Homo sapiens
acccttttagaaact

SEQ ID NO: 903307 - DNA, 15 bp, Homo sapiens
cacccttttagaaac

SEQ ID NO: 903308 - DNA, 15 bp, Homo sapiens
acacccttttagaaa

SEQ ID NO: 903309 - DNA, 15 bp, Homo sapiens
cacacccttttagaa

SEQ ID NO: 903310 - DNA, 15 bp, Homo sapiens
acacacccttttaga

SEQ ID NO: 903311 - DNA, 15 bp, Homo sapiens
tacacacccttttag

SEQ ID NO: 903312 - DNA, 15 bp, Homo sapiens
ctacacaccctttta

SEQ ID NO: 903313 - DNA, 15 bp, Homo sapiens
cctacacaccctttt

SEQ ID NO: 903314 - DNA, 15 bp, Homo sapiens
ccctacacacccttt

SEQ ID NO: 903315 - DNA, 15 bp, Homo sapiens
cccctacacaccctt

SEQ ID NO: 903316 - DNA, 15 bp, Homo sapiens
tcccctacacaccct

SEQ ID NO: 903317 - DNA, 15 bp, Homo sapiens
ttcccctacacaccc

SEQ ID NO: 903318 - DNA, 15 bp, Homo sapiens
tttcccctacacacc

SEQ ID NO: 903319 - DNA, 15 bp, Homo sapiens
atttcccctacacac

SEQ ID NO: 903320 - DNA, 15 bp, Homo sapiens
tatttcccctacaca

SEQ ID NO: 903321 - DNA, 15 bp, Homo sapiens
ctatttcccctacac

SEQ ID NO: 903322 - DNA, 15 bp, Homo sapiens
tctatttcccctaca

SEQ ID NO: 903323 - DNA, 15 bp, Homo sapiens
ttctatttcccctac

SEQ ID NO: 903324 - DNA, 15 bp, Homo sapiens
attctatttccccta

SEQ ID NO: 903325 - DNA, 15 bp, Homo sapiens
cattctatttcccct

SEQ ID NO: 903326 - DNA, 15 bp, Homo sapiens
tcattctatttcccc

SEQ ID NO: 903327 - DNA, 15 bp, Homo sapiens
ctcattctatttccc

SEQ ID NO: 903328 - DNA, 15 bp, Homo sapiens
actcattctatttcc

SEQ ID NO: 903329 - DNA, 15 bp, Homo sapiens
tactcattctatttc

SEQ ID NO: 903330 - DNA, 15 bp, Homo sapiens
atactcattctattt

SEQ ID NO: 903331 - DNA, 15 bp, Homo sapiens
catactcattctatt

SEQ ID NO: 903332 - DNA, 15 bp, Homo sapiens
acatactcattctat

SEQ ID NO: 903333 - DNA, 15 bp, Homo sapiens
aacatactcattcta

SEQ ID NO: 903334 - DNA, 15 bp, Homo sapiens
caacatactcattct

SEQ ID NO: 903335 - DNA, 15 bp, Homo sapiens
tcaacatactcattc

SEQ ID NO: 903336 - DNA, 15 bp, Homo sapiens
ttcaacatactcatt

SEQ ID NO: 903337 - DNA, 15 bp, Homo sapiens
tttcaacatactcat

SEQ ID NO: 903338 - DNA, 15 bp, Homo sapiens
ttttcaacatactca

SEQ ID NO: 903339 - DNA, 15 bp, Homo sapiens
cttttcaacatactc

SEQ ID NO: 903340 - DNA, 15 bp, Homo sapiens
acttttcaacatact

SEQ ID NO: 903341 - DNA, 15 bp, Homo sapiens
tacttttcaacatac

SEQ ID NO: 903342 - DNA, 15 bp, Homo sapiens
ttacttttcaacata

SEQ ID NO: 903343 - DNA, 15 bp, Homo sapiens
gttacttttcaacat

SEQ ID NO: 903344 - DNA, 15 bp, Homo sapiens
tgttacttttcaaca

SEQ ID NO: 903345 - DNA, 15 bp, Homo sapiens
atgttacttttcaac

SEQ ID NO: 903346 - DNA, 15 bp, Homo sapiens
tatgttacttttcaa

SEQ ID NO: 903347 - DNA, 15 bp, Homo sapiens
ttatgttacttttca

SEQ ID NO: 903348 - DNA, 15 bp, Homo sapiens
cttatgttacttttc

SEQ ID NO: 903349 - DNA, 15 bp, Homo sapiens
ccttatgttactttt

SEQ ID NO: 903350 - DNA, 15 bp, Homo sapiens
tccttatgttacttt

SEQ ID NO: 903351 - DNA, 15 bp, Homo sapiens
ttccttatgttactt

SEQ ID NO: 903352 - DNA, 15 bp, Homo sapiens
tttccttatgttact

SEQ ID NO: 903353 - DNA, 15 bp, Homo sapiens
atttccttatgttac

SEQ ID NO: 903354 - DNA, 15 bp, Homo sapiens
tatttccttatgtta

SEQ ID NO: 903355 - DNA, 15 bp, Homo sapiens
atatttccttatgtt

SEQ ID NO: 903356 - DNA, 15 bp, Homo sapiens
tatatttccttatgt

SEQ ID NO: 903357 - DNA, 15 bp, Homo sapiens
atatatttccttatg

SEQ ID NO: 903358 - DNA, 15 bp, Homo sapiens
gatatatttccttat

SEQ ID NO: 903359 - DNA, 15 bp, Homo sapiens
agatatatttcctta

SEQ ID NO: 903360 - DNA, 15 bp, Homo sapiens
aagatatatttcctt

SEQ ID NO: 903361 - DNA, 15 bp, Homo sapiens
caagatatatttcct

SEQ ID NO: 903362 - DNA, 15 bp, Homo sapiens
tcaagatatatttcc

SEQ ID NO: 903363 - DNA, 15 bp, Homo sapiens
ctcaagatatatttc

SEQ ID NO: 903364 - DNA, 15 bp, Homo sapiens
cctcaagatatattt

SEQ ID NO: 903365 - DNA, 15 bp, Homo sapiens
acctcaagatatatt

SEQ ID NO: 903366 - DNA, 15 bp, Homo sapiens
gacctcaagatatat

SEQ ID NO: 903367 - DNA, 15 bp, Homo sapiens
ggacctcaagatata

SEQ ID NO: 903368 - DNA, 15 bp, Homo sapiens
tggacctcaagatat

SEQ ID NO: 903369 - DNA, 15 bp, Homo sapiens
ttggacctcaagata

SEQ ID NO: 903370 - DNA, 15 bp, Homo sapiens
tttggacctcaagat

SEQ ID NO: 903371 - DNA, 15 bp, Homo sapiens
atttggacctcaaga

SEQ ID NO: 903372 - DNA, 15 bp, Homo sapiens
catttggacctcaag

SEQ ID NO: 903373 - DNA, 15 bp, Homo sapiens
tcatttggacctcaa

SEQ ID NO: 903374 - DNA, 15 bp, Homo sapiens
gtcatttggacctca

SEQ ID NO: 903375 - DNA, 15 bp, Homo sapiens
tgtcatttggacctc

SEQ ID NO: 903376 - DNA, 15 bp, Homo sapiens
ttgtcatttggacct

SEQ ID NO: 903377 - DNA, 15 bp, Homo sapiens
tttgtcatttggacc

SEQ ID NO: 903378 - DNA, 15 bp, Homo sapiens
atttgtcatttggac

SEQ ID NO: 903379 - DNA, 15 bp, Homo sapiens
catttgtcatttgga

SEQ ID NO: 903380 - DNA, 15 bp, Homo sapiens
gcatttgtcatttgg

SEQ ID NO: 903381 - DNA, 15 bp, Homo sapiens
tgcatttgtcatttg

SEQ ID NO: 903382 - DNA, 15 bp, Homo sapiens
ctgcatttgtcattt

SEQ ID NO: 903383 - DNA, 15 bp, Homo sapiens
tctgcatttgtcatt

SEQ ID NO: 903384 - DNA, 15 bp, Homo sapiens
gtctgcatttgtcat

SEQ ID NO: 903385 - DNA, 15 bp, Homo sapiens
tgtctgcatttgtca

SEQ ID NO: 903386 - DNA, 15 bp, Homo sapiens
ttgtctgcatttgtc

SEQ ID NO: 903387 - DNA, 15 bp, Homo sapiens
attgtctgcatttgt

SEQ ID NO: 903388 - DNA, 15 bp, Homo sapiens
cattgtctgcatttg

SEQ ID NO: 903389 - DNA, 15 bp, Homo sapiens
tcattgtctgcattt

SEQ ID NO: 903390 - DNA, 15 bp, Homo sapiens
gtcattgtctgcatt

SEQ ID NO: 903391 - DNA, 15 bp, Homo sapiens
agtcattgtctgcat

SEQ ID NO: 903392 - DNA, 15 bp, Homo sapiens
cagtcattgtctgca

SEQ ID NO: 903393 - DNA, 15 bp, Homo sapiens
gcagtcattgtctgc

SEQ ID NO: 903394 - DNA, 15 bp, Homo sapiens
agcagtcattgtctg

SEQ ID NO: 903395 - DNA, 15 bp, Homo sapiens
tagcagtcattgtct

SEQ ID NO: 903396 - DNA, 15 bp, Homo sapiens
atagcagtcattgtc

SEQ ID NO: 903397 - DNA, 15 bp, Homo sapiens
tatagcagtcattgt

SEQ ID NO: 903398 - DNA, 15 bp, Homo sapiens
ctatagcagtcattg

SEQ ID NO: 903399 - DNA, 15 bp, Homo sapiens
cctatagcagtcatt

SEQ ID NO: 903400 - DNA, 15 bp, Homo sapiens
ccctatagcagtcat

SEQ ID NO: 903401 - DNA, 15 bp, Homo sapiens
tccctatagcagtca

SEQ ID NO: 903402 - DNA, 15 bp, Homo sapiens
atccctatagcagtc

SEQ ID NO: 903403 - DNA, 15 bp, Homo sapiens
aatccctatagcagt

SEQ ID NO: 903404 - DNA, 15 bp, Homo sapiens
aaatccctatagcag

SEQ ID NO: 903405 - DNA, 15 bp, Homo sapiens
caaatccctatagca

SEQ ID NO: 903406 - DNA, 15 bp, Homo sapiens
acaaatccctatagc

SEQ ID NO: 903407 - DNA, 15 bp, Homo sapiens
aacaaatccctatag

SEQ ID NO: 903408 - DNA, 15 bp, Homo sapiens
taacaaatccctata

SEQ ID NO: 903409 - DNA, 15 bp, Homo sapiens
ttaacaaatccctat

SEQ ID NO: 903410 - DNA, 15 bp, Homo sapiens
cttaacaaatcccta

SEQ ID NO: 903411 - DNA, 15 bp, Homo sapiens
tcttaacaaatccct

SEQ ID NO: 903412 - DNA, 15 bp, Homo sapiens
ctcttaacaaatccc

SEQ ID NO: 903413 - DNA, 15 bp, Homo sapiens
cctcttaacaaatcc

SEQ ID NO: 903414 - DNA, 15 bp, Homo sapiens
ccctcttaacaaatc

SEQ ID NO: 903415 - DNA, 15 bp, Homo sapiens
cccctcttaacaaat

SEQ ID NO: 903416 - DNA, 15 bp, Homo sapiens
tcccctcttaacaaa

SEQ ID NO: 903417 - DNA, 15 bp, Homo sapiens
ttcccctcttaacaa

SEQ ID NO: 903418 - DNA, 15 bp, Homo sapiens
tttcccctcttaaca

SEQ ID NO: 903419 - DNA, 15 bp, Homo sapiens
atttcccctcttaac

SEQ ID NO: 903420 - DNA, 15 bp, Homo sapiens
catttcccctcttaa

SEQ ID NO: 903421 - DNA, 15 bp, Homo sapiens
tcatttcccctctta

SEQ ID NO: 903422 - DNA, 15 bp, Homo sapiens
atcatttcccctctt

SEQ ID NO: 903423 - DNA, 15 bp, Homo sapiens
aatcatttcccctct

SEQ ID NO: 903424 - DNA, 15 bp, Homo sapiens
aaatcatttcccctc

SEQ ID NO: 903425 - DNA, 15 bp, Homo sapiens
taaatcatttcccct

SEQ ID NO: 903426 - DNA, 15 bp, Homo sapiens
ttaaatcatttcccc

SEQ ID NO: 903427 - DNA, 15 bp, Homo sapiens
cttaaatcatttccc

SEQ ID NO: 903428 - DNA, 15 bp, Homo sapiens
tcttaaatcatttcc

SEQ ID NO: 903429 - DNA, 15 bp, Homo sapiens
ctcttaaatcatttc

SEQ ID NO: 903430 - DNA, 15 bp, Homo sapiens
tctcttaaatcattt

SEQ ID NO: 903431 - DNA, 15 bp, Homo sapiens
atctcttaaatcatt

SEQ ID NO: 903432 - DNA, 15 bp, Homo sapiens
catctcttaaatcat

SEQ ID NO: 903433 - DNA, 15 bp, Homo sapiens
acatctcttaaatca

SEQ ID NO: 903434 - DNA, 15 bp, Homo sapiens
gacatctcttaaatc

SEQ ID NO: 903435 - DNA, 15 bp, Homo sapiens
tgacatctcttaaat

SEQ ID NO: 903436 - DNA, 15 bp, Homo sapiens
ctgacatctcttaaa

SEQ ID NO: 903437 - DNA, 15 bp, Homo sapiens
tctgacatctcttaa

SEQ ID NO: 903438 - DNA, 15 bp, Homo sapiens
ttctgacatctctta

SEQ ID NO: 903439 - DNA, 15 bp, Homo sapiens
cttctgacatctctt

SEQ ID NO: 903440 - DNA, 15 bp, Homo sapiens
tcttctgacatctct

SEQ ID NO: 903441 - DNA, 15 bp, Homo sapiens
gtcttctgacatctc

SEQ ID NO: 903442 - DNA, 15 bp, Homo sapiens
agtcttctgacatct

SEQ ID NO: 903443 - DNA, 15 bp, Homo sapiens
aagtcttctgacatc

SEQ ID NO: 903444 - DNA, 15 bp, Homo sapiens
gaagtcttctgacat

SEQ ID NO: 903445 - DNA, 15 bp, Homo sapiens
tgaagtcttctgaca

SEQ ID NO: 903446 - DNA, 15 bp, Homo sapiens
gtgaagtcttctgac

SEQ ID NO: 903447 - DNA, 15 bp, Homo sapiens
tgtgaagtcttctga

SEQ ID NO: 903448 - DNA, 15 bp, Homo sapiens
ttgtgaagtcttctg

SEQ ID NO: 903449 - DNA, 15 bp, Homo sapiens
tttgtgaagtcttct

SEQ ID NO: 903450 - DNA, 15 bp, Homo sapiens
ctttgtgaagtcttc

SEQ ID NO: 903451 - DNA, 15 bp, Homo sapiens
cctttgtgaagtctt

SEQ ID NO: 903452 - DNA, 15 bp, Homo sapiens
tcctttgtgaagtct

SEQ ID NO: 903453 - DNA, 15 bp, Homo sapiens
atcctttgtgaagtc

SEQ ID NO: 903454 - DNA, 15 bp, Homo sapiens
gatcctttgtgaagt

SEQ ID NO: 903455 - DNA, 15 bp, Homo sapiens
tgatcctttgtgaag

SEQ ID NO: 903456 - DNA, 15 bp, Homo sapiens
ttgatcctttgtgaa

SEQ ID NO: 903457 - DNA, 15 bp, Homo sapiens
attgatcctttgtga

SEQ ID NO: 903458 - DNA, 15 bp, Homo sapiens
tattgatcctttgtg

SEQ ID NO: 903459 - DNA, 15 bp, Homo sapiens
gtattgatcctttgt

SEQ ID NO: 903460 - DNA, 15 bp, Homo sapiens
agtattgatcctttg

SEQ ID NO: 903461 - DNA, 15 bp, Homo sapiens
cagtattgatccttt

SEQ ID NO: 903462 - DNA, 15 bp, Homo sapiens
tcagtattgatcctt

SEQ ID NO: 903463 - DNA, 15 bp, Homo sapiens
ctcagtattgatcct

SEQ ID NO: 903464 - DNA, 15 bp, Homo sapiens
cctcagtattgatcc

SEQ ID NO: 903465 - DNA, 15 bp, Homo sapiens
tcctcagtattgatc

SEQ ID NO: 903466 - DNA, 15 bp, Homo sapiens
ctcctcagtattgat

SEQ ID NO: 903467 - DNA, 15 bp, Homo sapiens
actcctcagtattga

SEQ ID NO: 903468 - DNA, 15 bp, Homo sapiens
tactcctcagtattg

SEQ ID NO: 903469 - DNA, 15 bp, Homo sapiens
ctactcctcagtatt

SEQ ID NO: 903470 - DNA, 15 bp, Homo sapiens
actactcctcagtat

SEQ ID NO: 903471 - DNA, 15 bp, Homo sapiens
cactactcctcagta

SEQ ID NO: 903472 - DNA, 15 bp, Homo sapiens
acactactcctcagt

SEQ ID NO: 903473 - DNA, 15 bp, Homo sapiens
aacactactcctcag

SEQ ID NO: 903474 - DNA, 15 bp, Homo sapiens
taacactactcctca

SEQ ID NO: 903475 - DNA, 15 bp, Homo sapiens
ctaacactactcctc

SEQ ID NO: 903476 - DNA, 15 bp, Homo sapiens
tctaacactactcct

SEQ ID NO: 903477 - DNA, 15 bp, Homo sapiens
atctaacactactcc

SEQ ID NO: 903478 - DNA, 15 bp, Homo sapiens
tatctaacactactc

SEQ ID NO: 903479 - DNA, 15 bp, Homo sapiens
ttatctaacactact

SEQ ID NO: 903480 - DNA, 15 bp, Homo sapiens
cttatctaacactac

SEQ ID NO: 903481 - DNA, 15 bp, Homo sapiens
acttatctaacacta

SEQ ID NO: 903482 - DNA, 15 bp, Homo sapiens
cacttatctaacact

SEQ ID NO: 903483 - DNA, 15 bp, Homo sapiens
ccacttatctaacac

SEQ ID NO: 903484 - DNA, 15 bp, Homo sapiens
tccacttatctaaca

SEQ ID NO: 903485 - DNA, 15 bp, Homo sapiens
ttccacttatctaac

SEQ ID NO: 903486 - DNA, 15 bp, Homo sapiens
cttccacttatctaa

SEQ ID NO: 903487 - DNA, 15 bp, Homo sapiens
ccttccacttatcta

SEQ ID NO: 903488 - DNA, 15 bp, Homo sapiens
gccttccacttatct

SEQ ID NO: 903489 - DNA, 15 bp, Homo sapiens
tgccttccacttatc

SEQ ID NO: 903490 - DNA, 15 bp, Homo sapiens
ttgccttccacttat

SEQ ID NO: 903491 - DNA, 15 bp, Homo sapiens
attgccttccactta

SEQ ID NO: 903492 - DNA, 15 bp, Homo sapiens
cattgccttccactt

SEQ ID NO: 903493 - DNA, 15 bp, Homo sapiens
gcattgccttccact

SEQ ID NO: 903494 - DNA, 15 bp, Homo sapiens
tgcattgccttccac

SEQ ID NO: 903495 - DNA, 15 bp, Homo sapiens
ctgcattgccttcca

SEQ ID NO: 903496 - DNA, 15 bp, Homo sapiens
actgcattgccttcc

SEQ ID NO: 903497 - DNA, 15 bp, Homo sapiens
cactgcattgccttc

SEQ ID NO: 903498 - DNA, 15 bp, Homo sapiens
ccactgcattgcctt

SEQ ID NO: 903499 - DNA, 15 bp, Homo sapiens
accactgcattgcct

SEQ ID NO: 903500 - DNA, 15 bp, Homo sapiens
taccactgcattgcc

SEQ ID NO: 903501 - DNA, 15 bp, Homo sapiens
ttaccactgcattgc

SEQ ID NO: 903502 - DNA, 15 bp, Homo sapiens
cttaccactgcattg

SEQ ID NO: 903503 - DNA, 15 bp, Homo sapiens
tcttaccactgcatt

SEQ ID NO: 903504 - DNA, 15 bp, Homo sapiens
atcttaccactgcat

SEQ ID NO: 903505 - DNA, 15 bp, Homo sapiens
tatcttaccactgca

SEQ ID NO: 903506 - DNA, 15 bp, Homo sapiens
ctatcttaccactgc

SEQ ID NO: 903507 - DNA, 15 bp, Homo sapiens
actatcttaccactg

SEQ ID NO: 903508 - DNA, 15 bp, Homo sapiens
tactatcttaccact

SEQ ID NO: 903509 - DNA, 15 bp, Homo sapiens
ttactatcttaccac

SEQ ID NO: 903510 - DNA, 15 bp, Homo sapiens
cttactatcttacca

SEQ ID NO: 903511 - DNA, 15 bp, Homo sapiens
ccttactatcttacc

SEQ ID NO: 903512 - DNA, 15 bp, Homo sapiens
cccttactatcttac

SEQ ID NO: 903513 - DNA, 15 bp, Homo sapiens
tcccttactatctta

SEQ ID NO: 903514 - DNA, 15 bp, Homo sapiens
ttcccttactatctt

SEQ ID NO: 903515 - DNA, 15 bp, Homo sapiens
attcccttactatct

SEQ ID NO: 903516 - DNA, 15 bp, Homo sapiens
aattcccttactatc

SEQ ID NO: 903517 - DNA, 15 bp, Homo sapiens
gaattcccttactat

SEQ ID NO: 903518 - DNA, 15 bp, Homo sapiens
agaattcccttacta

SEQ ID NO: 903519 - DNA, 15 bp, Homo sapiens
tagaattcccttact

SEQ ID NO: 903520 - DNA, 15 bp, Homo sapiens
ctagaattcccttac

SEQ ID NO: 903521 - DNA, 15 bp, Homo sapiens
tctagaattccctta

SEQ ID NO: 903522 - DNA, 15 bp, Homo sapiens
ctctagaattccctt

SEQ ID NO: 903523 - DNA, 15 bp, Homo sapiens
gctctagaattccct

SEQ ID NO: 903524 - DNA, 15 bp, Homo sapiens
agctctagaattccc

SEQ ID NO: 903525 - DNA, 15 bp, Homo sapiens
cagctctagaattcc

SEQ ID NO: 903526 - DNA, 15 bp, Homo sapiens
acagctctagaattc

SEQ ID NO: 903527 - DNA, 15 bp, Homo sapiens
aacagctctagaatt

SEQ ID NO: 903528 - DNA, 15 bp, Homo sapiens
caacagctctagaat

SEQ ID NO: 903529 - DNA, 15 bp, Homo sapiens
ccaacagctctagaa

SEQ ID NO: 903530 - DNA, 15 bp, Homo sapiens
accaacagctctaga

SEQ ID NO: 903531 - DNA, 15 bp, Homo sapiens
aaccaacagctctag

SEQ ID NO: 903532 - DNA, 15 bp, Homo sapiens
taaccaacagctcta

SEQ ID NO: 903533 - DNA, 15 bp, Homo sapiens
gtaaccaacagctct

SEQ ID NO: 903534 - DNA, 15 bp, Homo sapiens
ggtaaccaacagctc

SEQ ID NO: 903535 - DNA, 15 bp, Homo sapiens
tggtaaccaacagct

SEQ ID NO: 903536 - DNA, 15 bp, Homo sapiens
atggtaaccaacagc

SEQ ID NO: 903537 - DNA, 15 bp, Homo sapiens
tatggtaaccaacag

SEQ ID NO: 903538 - DNA, 15 bp, Homo sapiens
ttatggtaaccaaca

SEQ ID NO: 903539 - DNA, 15 bp, Homo sapiens
tttatggtaaccaac

SEQ ID NO: 903540 - DNA, 15 bp, Homo sapiens
atttatggtaaccaa

SEQ ID NO: 903541 - DNA, 15 bp, Homo sapiens
tatttatggtaacca

SEQ ID NO: 903542 - DNA, 15 bp, Homo sapiens
ttatttatggtaacc

SEQ ID NO: 903543 - DNA, 15 bp, Homo sapiens
tttatttatggtaac

SEQ ID NO: 903544 - DNA, 15 bp, Homo sapiens
atttatttatggtaa

SEQ ID NO: 903545 - DNA, 15 bp, Homo sapiens
tatttatttatggta

SEQ ID NO: 903546 - DNA, 15 bp, Homo sapiens
gtatttatttatggt

SEQ ID NO: 903547 - DNA, 15 bp, Homo sapiens
agtatttatttatgg

SEQ ID NO: 903548 - DNA, 15 bp, Homo sapiens
cagtatttatttatg

SEQ ID NO: 903549 - DNA, 15 bp, Homo sapiens
tcagtatttatttat

SEQ ID NO: 903550 - DNA, 15 bp, Homo sapiens
ctcagtatttattta

SEQ ID NO: 903551 - DNA, 15 bp, Homo sapiens
tctcagtatttattt

SEQ ID NO: 903552 - DNA, 15 bp, Homo sapiens
ttctcagtatttatt

SEQ ID NO: 903553 - DNA, 15 bp, Homo sapiens
gttctcagtatttat

SEQ ID NO: 903554 - DNA, 15 bp, Homo sapiens
tgttctcagtattta

SEQ ID NO: 903555 - DNA, 15 bp, Homo sapiens
ctgttctcagtattt

SEQ ID NO: 903556 - DNA, 15 bp, Homo sapiens
cctgttctcagtatt

SEQ ID NO: 903557 - DNA, 15 bp, Homo sapiens
tcctgttctcagtat

SEQ ID NO: 903558 - DNA, 15 bp, Homo sapiens
ttcctgttctcagta

SEQ ID NO: 903559 - DNA, 15 bp, Homo sapiens
tttcctgttctcagt

SEQ ID NO: 903560 - DNA, 15 bp, Homo sapiens
atttcctgttctcag

SEQ ID NO: 903561 - DNA, 15 bp, Homo sapiens
tatttcctgttctca

SEQ ID NO: 903562 - DNA, 15 bp, Homo sapiens
atatttcctgttctc

SEQ ID NO: 903563 - DNA, 15 bp, Homo sapiens
catatttcctgttct

SEQ ID NO: 903564 - DNA, 15 bp, Homo sapiens
acatatttcctgttc

SEQ ID NO: 903565 - DNA, 15 bp, Homo sapiens
aacatatttcctgtt

SEQ ID NO: 903566 - DNA, 15 bp, Homo sapiens
aaacatatttcctgt

SEQ ID NO: 903567 - DNA, 15 bp, Homo sapiens
taaacatatttcctg

SEQ ID NO: 903568 - DNA, 15 bp, Homo sapiens
ataaacatatttcct

SEQ ID NO: 903569 - DNA, 15 bp, Homo sapiens
aataaacatatttcc

SEQ ID NO: 903570 - DNA, 15 bp, Homo sapiens
gaataaacatatttc

SEQ ID NO: 903571 - DNA, 15 bp, Homo sapiens
agaataaacatattt

SEQ ID NO: 903572 - DNA, 15 bp, Homo sapiens
aagaataaacatatt

SEQ ID NO: 903573 - DNA, 15 bp, Homo sapiens
aaagaataaacatat

SEQ ID NO: 903574 - DNA, 15 bp, Homo sapiens
taaagaataaacata

SEQ ID NO: 903575 - DNA, 15 bp, Homo sapiens
ataaagaataaacat

SEQ ID NO: 903576 - DNA, 15 bp, Homo sapiens
tataaagaataaaca

SEQ ID NO: 903577 - DNA, 15 bp, Homo sapiens
atataaagaataaac

SEQ ID NO: 903578 - DNA, 15 bp, Homo sapiens
aatataaagaataaa

SEQ ID NO: 903579 - DNA, 15 bp, Homo sapiens
aaatataaagaataa

SEQ ID NO: 903580 - DNA, 15 bp, Homo sapiens
caaatataaagaata

SEQ ID NO: 903581 - DNA, 15 bp, Homo sapiens
tcaaatataaagaat

SEQ ID NO: 903582 - DNA, 15 bp, Homo sapiens
ctcaaatataaagaa

SEQ ID NO: 903583 - DNA, 15 bp, Homo sapiens
cctcaaatataaaga

SEQ ID NO: 903584 - DNA, 15 bp, Homo sapiens
tcctcaaatataaag

SEQ ID NO: 903585 - DNA, 15 bp, Homo sapiens
ttcctcaaatataaa

SEQ ID NO: 903586 - DNA, 15 bp, Homo sapiens
tttcctcaaatataa

SEQ ID NO: 903587 - DNA, 15 bp, Homo sapiens
gtttcctcaaatata

SEQ ID NO: 903588 - DNA, 15 bp, Homo sapiens
tgtttcctcaaatat

SEQ ID NO: 903589 - DNA, 15 bp, Homo sapiens
ttgtttcctcaaata

SEQ ID NO: 903590 - DNA, 15 bp, Homo sapiens
cttgtttcctcaaat

SEQ ID NO: 903591 - DNA, 15 bp, Homo sapiens
ccttgtttcctcaaa

SEQ ID NO: 903592 - DNA, 15 bp, Homo sapiens
accttgtttcctcaa

SEQ ID NO: 903593 - DNA, 15 bp, Homo sapiens
caccttgtttcctca

SEQ ID NO: 903594 - DNA, 15 bp, Homo sapiens
gcaccttgtttcctc

SEQ ID NO: 903595 - DNA, 15 bp, Homo sapiens
tgcaccttgtttcct

SEQ ID NO: 903596 - DNA, 15 bp, Homo sapiens
ctgcaccttgtttcc

SEQ ID NO: 903597 - DNA, 15 bp, Homo sapiens
gctgcaccttgtttc

SEQ ID NO: 903598 - DNA, 15 bp, Homo sapiens
tgctgcaccttgttt

SEQ ID NO: 903599 - DNA, 15 bp, Homo sapiens
ttgctgcaccttgtt

SEQ ID NO: 903600 - DNA, 15 bp, Homo sapiens
cttgctgcaccttgt

SEQ ID NO: 903601 - DNA, 15 bp, Homo sapiens
acttgctgcaccttg

SEQ ID NO: 903602 - DNA, 15 bp, Homo sapiens
aacttgctgcacctt

SEQ ID NO: 903603 - DNA, 15 bp, Homo sapiens
aaacttgctgcacct

SEQ ID NO: 903604 - DNA, 15 bp, Homo sapiens
caaacttgctgcacc

SEQ ID NO: 903605 - DNA, 15 bp, Homo sapiens
acaaacttgctgcac

SEQ ID NO: 903606 - DNA, 15 bp, Homo sapiens
tacaaacttgctgca

SEQ ID NO: 903607 - DNA, 15 bp, Homo sapiens
ctacaaacttgctgc

SEQ ID NO: 903608 - DNA, 15 bp, Homo sapiens
gctacaaacttgctg

SEQ ID NO: 903609 - DNA, 15 bp, Homo sapiens
tgctacaaacttgct

SEQ ID NO: 903610 - DNA, 15 bp, Homo sapiens
ctgctacaaacttgc

SEQ ID NO: 903611 - DNA, 15 bp, Homo sapiens
tctgctacaaacttg

SEQ ID NO: 903612 - DNA, 15 bp, Homo sapiens
gtctgctacaaactt

SEQ ID NO: 903613 - DNA, 15 bp, Homo sapiens
agtctgctacaaact

SEQ ID NO: 903614 - DNA, 15 bp, Homo sapiens
cagtctgctacaaac

SEQ ID NO: 903615 - DNA, 15 bp, Homo sapiens
acagtctgctacaaa

SEQ ID NO: 903616 - DNA, 15 bp, Homo sapiens
tacagtctgctacaa

SEQ ID NO: 903617 - DNA, 15 bp, Homo sapiens
ctacagtctgctaca

SEQ ID NO: 903618 - DNA, 15 bp, Homo sapiens
tctacagtctgctac

SEQ ID NO: 903619 - DNA, 15 bp, Homo sapiens
ctctacagtctgcta

SEQ ID NO: 903620 - DNA, 15 bp, Homo sapiens
tctctacagtctgct

SEQ ID NO: 903621 - DNA, 15 bp, Homo sapiens
ttctctacagtctgc

SEQ ID NO: 903622 - DNA, 15 bp, Homo sapiens
tttctctacagtctg

SEQ ID NO: 903623 - DNA, 15 bp, Homo sapiens
ttttctctacagtct

SEQ ID NO: 903624 - DNA, 15 bp, Homo sapiens
gttttctctacagtc

SEQ ID NO: 903625 - DNA, 15 bp, Homo sapiens
tgttttctctacagt

SEQ ID NO: 903626 - DNA, 15 bp, Homo sapiens
ttgttttctctacag

SEQ ID NO: 903627 - DNA, 15 bp, Homo sapiens
tttgttttctctaca

SEQ ID NO: 903628 - DNA, 15 bp, Homo sapiens
atttgttttctctac

SEQ ID NO: 903629 - DNA, 15 bp, Homo sapiens
gatttgttttctcta

SEQ ID NO: 903630 - DNA, 15 bp, Homo sapiens
agatttgttttctct

SEQ ID NO: 903631 - DNA, 15 bp, Homo sapiens
aagatttgttttctc

SEQ ID NO: 903632 - DNA, 15 bp, Homo sapiens
caagatttgttttct

SEQ ID NO: 903633 - DNA, 15 bp, Homo sapiens
ccaagatttgttttc

SEQ ID NO: 903634 - DNA, 15 bp, Homo sapiens
cccaagatttgtttt

SEQ ID NO: 903635 - DNA, 15 bp, Homo sapiens
acccaagatttgttt

SEQ ID NO: 903636 - DNA, 15 bp, Homo sapiens
tacccaagatttgtt

SEQ ID NO: 903637 - DNA, 15 bp, Homo sapiens
ttacccaagatttgt

SEQ ID NO: 903638 - DNA, 15 bp, Homo sapiens
cttacccaagatttg

SEQ ID NO: 903639 - DNA, 15 bp, Homo sapiens
acttacccaagattt

SEQ ID NO: 903640 - DNA, 15 bp, Homo sapiens
tacttacccaagatt

SEQ ID NO: 903641 - DNA, 15 bp, Homo sapiens
gtacttacccaagat

SEQ ID NO: 903642 - DNA, 15 bp, Homo sapiens
agtacttacccaaga

SEQ ID NO: 903643 - DNA, 15 bp, Homo sapiens
aagtacttacccaag

SEQ ID NO: 903644 - DNA, 15 bp, Homo sapiens
aaagtacttacccaa

SEQ ID NO: 903645 - DNA, 15 bp, Homo sapiens
caaagtacttaccca

SEQ ID NO: 903646 - DNA, 15 bp, Homo sapiens
tcaaagtacttaccc

SEQ ID NO: 903647 - DNA, 15 bp, Homo sapiens
ctcaaagtacttacc

SEQ ID NO: 903648 - DNA, 15 bp, Homo sapiens
tctcaaagtacttac

SEQ ID NO: 903649 - DNA, 15 bp, Homo sapiens
atctcaaagtactta

SEQ ID NO: 903650 - DNA, 15 bp, Homo sapiens
tatctcaaagtactt

SEQ ID NO: 903651 - DNA, 15 bp, Homo sapiens
ctatctcaaagtact

SEQ ID NO: 903652 - DNA, 15 bp, Homo sapiens
cctatctcaaagtac

SEQ ID NO: 903653 - DNA, 15 bp, Homo sapiens
acctatctcaaagta

SEQ ID NO: 903654 - DNA, 15 bp, Homo sapiens
aacctatctcaaagt

SEQ ID NO: 903655 - DNA, 15 bp, Homo sapiens
caacctatctcaaag

SEQ ID NO: 903656 - DNA, 15 bp, Homo sapiens
acaacctatctcaaa

SEQ ID NO: 903657 - DNA, 15 bp, Homo sapiens
aacaacctatctcaa

SEQ ID NO: 903658 - DNA, 15 bp, Homo sapiens
caacaacctatctca

SEQ ID NO: 903659 - DNA, 15 bp, Homo sapiens
tcaacaacctatctc

SEQ ID NO: 903660 - DNA, 15 bp, Homo sapiens
ctcaacaacctatct

SEQ ID NO: 903661 - DNA, 15 bp, Homo sapiens
cctcaacaacctatc

SEQ ID NO: 903662 - DNA, 15 bp, Homo sapiens
ccctcaacaacctat

SEQ ID NO: 903663 - DNA, 15 bp, Homo sapiens
gccctcaacaaccta

SEQ ID NO: 903664 - DNA, 15 bp, Homo sapiens
ggccctcaacaacct

SEQ ID NO: 903665 - DNA, 15 bp, Homo sapiens
aggccctcaacaacc

SEQ ID NO: 903666 - DNA, 15 bp, Homo sapiens
aaggccctcaacaac

SEQ ID NO: 903667 - DNA, 15 bp, Homo sapiens
taaggccctcaacaa

SEQ ID NO: 903668 - DNA, 15 bp, Homo sapiens
ttaaggccctcaaca

SEQ ID NO: 903669 - DNA, 15 bp, Homo sapiens
tttaaggccctcaac

SEQ ID NO: 903670 - DNA, 15 bp, Homo sapiens
ctttaaggccctcaa

SEQ ID NO: 903671 - DNA, 15 bp, Homo sapiens
cctttaaggccctca

SEQ ID NO: 903672 - DNA, 15 bp, Homo sapiens
acctttaaggccctc

SEQ ID NO: 903673 - DNA, 15 bp, Homo sapiens
cacctttaaggccct

SEQ ID NO: 903674 - DNA, 15 bp, Homo sapiens
acacctttaaggccc

SEQ ID NO: 903675 - DNA, 15 bp, Homo sapiens
tacacctttaaggcc

SEQ ID NO: 903676 - DNA, 15 bp, Homo sapiens
atacacctttaaggc

SEQ ID NO: 903677 - DNA, 15 bp, Homo sapiens
aatacacctttaagg

SEQ ID NO: 903678 - DNA, 15 bp, Homo sapiens
aaatacacctttaag

SEQ ID NO: 903679 - DNA, 15 bp, Homo sapiens
aaaatacacctttaa

SEQ ID NO: 903680 - DNA, 15 bp, Homo sapiens
taaaatacaccttta

SEQ ID NO: 903681 - DNA, 15 bp, Homo sapiens
ataaaatacaccttt

SEQ ID NO: 903682 - DNA, 15 bp, Homo sapiens
cataaaatacacctt

SEQ ID NO: 903683 - DNA, 15 bp, Homo sapiens
gcataaaatacacct

SEQ ID NO: 903684 - DNA, 15 bp, Homo sapiens
agcataaaatacacc

SEQ ID NO: 903685 - DNA, 15 bp, Homo sapiens
tagcataaaatacac

SEQ ID NO: 903686 - DNA, 15 bp, Homo sapiens
atagcataaaataca

SEQ ID NO: 903687 - DNA, 15 bp, Homo sapiens
gatagcataaaatac

SEQ ID NO: 903688 - DNA, 15 bp, Homo sapiens
tgatagcataaaata

SEQ ID NO: 903689 - DNA, 15 bp, Homo sapiens
ctgatagcataaaat

SEQ ID NO: 903690 - DNA, 15 bp, Homo sapiens
gctgatagcataaaa

SEQ ID NO: 903691 - DNA, 15 bp, Homo sapiens
tgctgatagcataaa

SEQ ID NO: 903692 - DNA, 15 bp, Homo sapiens
ttgctgatagcataa

SEQ ID NO: 903693 - DNA, 15 bp, Homo sapiens
attgctgatagcata

SEQ ID NO: 903694 - DNA, 15 bp, Homo sapiens
aattgctgatagcat

SEQ ID NO: 903695 - DNA, 15 bp, Homo sapiens
caattgctgatagca

SEQ ID NO: 903696 - DNA, 15 bp, Homo sapiens
tcaattgctgatagc

SEQ ID NO: 903697 - DNA, 15 bp, Homo sapiens
ctcaattgctgatag

SEQ ID NO: 903698 - DNA, 15 bp, Homo sapiens
tctcaattgctgata

SEQ ID NO: 903699 - DNA, 15 bp, Homo sapiens
ttctcaattgctgat

SEQ ID NO: 903700 - DNA, 15 bp, Homo sapiens
cttctcaattgctga

SEQ ID NO: 903701 - DNA, 15 bp, Homo sapiens
ccttctcaattgctg

SEQ ID NO: 903702 - DNA, 15 bp, Homo sapiens
gccttctcaattgct

SEQ ID NO: 903703 - DNA, 15 bp, Homo sapiens
tgccttctcaattgc

SEQ ID NO: 903704 - DNA, 15 bp, Homo sapiens
ctgccttctcaattg

SEQ ID NO: 903705 - DNA, 15 bp, Homo sapiens
actgccttctcaatt

SEQ ID NO: 903706 - DNA, 15 bp, Homo sapiens
tactgccttctcaat

SEQ ID NO: 903707 - DNA, 15 bp, Homo sapiens
ttactgccttctcaa

SEQ ID NO: 903708 - DNA, 15 bp, Homo sapiens
tttactgccttctca

SEQ ID NO: 903709 - DNA, 15 bp, Homo sapiens
ctttactgccttctc

SEQ ID NO: 903710 - DNA, 15 bp, Homo sapiens
cctttactgccttct

SEQ ID NO: 903711 - DNA, 15 bp, Homo sapiens
acctttactgccttc

SEQ ID NO: 903712 - DNA, 15 bp, Homo sapiens
aacctttactgcctt

SEQ ID NO: 903713 - DNA, 15 bp, Homo sapiens
aaacctttactgcct

SEQ ID NO: 903714 - DNA, 15 bp, Homo sapiens
aaaacctttactgcc

SEQ ID NO: 903715 - DNA, 15 bp, Homo sapiens
gaaaacctttactgc

SEQ ID NO: 903716 - DNA, 15 bp, Homo sapiens
cgaaaacctttactg

SEQ ID NO: 903717 - DNA, 15 bp, Homo sapiens
tcgaaaacctttact

SEQ ID NO: 903718 - DNA, 15 bp, Homo sapiens
ttcgaaaacctttac

SEQ ID NO: 903719 - DNA, 15 bp, Homo sapiens
tttcgaaaaccttta

SEQ ID NO: 903720 - DNA, 15 bp, Homo sapiens
gtttcgaaaaccttt

SEQ ID NO: 903721 - DNA, 15 bp, Homo sapiens
tgtttcgaaaacctt

SEQ ID NO: 903722 - DNA, 15 bp, Homo sapiens
gtgtttcgaaaacct

SEQ ID NO: 903723 - DNA, 15 bp, Homo sapiens
tgtgtttcgaaaacc

SEQ ID NO: 903724 - DNA, 15 bp, Homo sapiens
ttgtgtttcgaaaac

SEQ ID NO: 903725 - DNA, 15 bp, Homo sapiens
attgtgtttcgaaaa

SEQ ID NO: 903726 - DNA, 15 bp, Homo sapiens
aattgtgtttcgaaa

SEQ ID NO: 903727 - DNA, 15 bp, Homo sapiens
caattgtgtttcgaa

SEQ ID NO: 903728 - DNA, 15 bp, Homo sapiens
tcaattgtgtttcga

SEQ ID NO: 903729 - DNA, 15 bp, Homo sapiens
atcaattgtgtttcg

SEQ ID NO: 903730 - DNA, 15 bp, Homo sapiens
tatcaattgtgtttc

SEQ ID NO: 903731 - DNA, 15 bp, Homo sapiens
ctatcaattgtgttt

SEQ ID NO: 903732 - DNA, 15 bp, Homo sapiens
cctatcaattgtgtt

SEQ ID NO: 903733 - DNA, 15 bp, Homo sapiens
acctatcaattgtgt

SEQ ID NO: 903734 - DNA, 15 bp, Homo sapiens
tacctatcaattgtg

SEQ ID NO: 903735 - DNA, 15 bp, Homo sapiens
gtacctatcaattgt

SEQ ID NO: 903736 - DNA, 15 bp, Homo sapiens
tgtacctatcaattg

SEQ ID NO: 903737 - DNA, 15 bp, Homo sapiens
ttgtacctatcaatt

SEQ ID NO: 903738 - DNA, 15 bp, Homo sapiens
tttgtacctatcaat

SEQ ID NO: 903739 - DNA, 15 bp, Homo sapiens
ttttgtacctatcaa

SEQ ID NO: 903740 - DNA, 15 bp, Homo sapiens
tttttgtacctatca

SEQ ID NO: 903741 - DNA, 15 bp, Homo sapiens
atttttgtacctatc

SEQ ID NO: 903742 - DNA, 15 bp, Homo sapiens
tatttttgtacctat

SEQ ID NO: 903743 - DNA, 15 bp, Homo sapiens
gtatttttgtaccta

SEQ ID NO: 903744 - DNA, 15 bp, Homo sapiens
tgtatttttgtacct

SEQ ID NO: 903745 - DNA, 15 bp, Homo sapiens
gtgtatttttgtacc

SEQ ID NO: 903746 - DNA, 15 bp, Homo sapiens
ggtgtatttttgtac

SEQ ID NO: 903747 - DNA, 15 bp, Homo sapiens
aggtgtatttttgta

SEQ ID NO: 903748 - DNA, 15 bp, Homo sapiens
aaggtgtatttttgt

SEQ ID NO: 903749 - DNA, 15 bp, Homo sapiens
taaggtgtatttttg

SEQ ID NO: 903750 - DNA, 15 bp, Homo sapiens
ttaaggtgtattttt

SEQ ID NO: 903751 - DNA, 15 bp, Homo sapiens
cttaaggtgtatttt

SEQ ID NO: 903752 - DNA, 15 bp, Homo sapiens
tcttaaggtgtattt

SEQ ID NO: 903753 - DNA, 15 bp, Homo sapiens
ttcttaaggtgtatt

SEQ ID NO: 903754 - DNA, 15 bp, Homo sapiens
cttcttaaggtgtat

SEQ ID NO: 903755 - DNA, 15 bp, Homo sapiens
ccttcttaaggtgta

SEQ ID NO: 903756 - DNA, 15 bp, Homo sapiens
gccttcttaaggtgt

SEQ ID NO: 903757 - DNA, 15 bp, Homo sapiens
tgccttcttaaggtg

SEQ ID NO: 903758 - DNA, 15 bp, Homo sapiens
ttgccttcttaaggt

SEQ ID NO: 903759 - DNA, 15 bp, Homo sapiens
tttgccttcttaagg

SEQ ID NO: 903760 - DNA, 15 bp, Homo sapiens
ttttgccttcttaag

SEQ ID NO: 903761 - DNA, 15 bp, Homo sapiens
gttttgccttcttaa

SEQ ID NO: 903762 - DNA, 15 bp, Homo sapiens
agttttgccttctta

SEQ ID NO: 903763 - DNA, 15 bp, Homo sapiens
cagttttgccttctt

SEQ ID NO: 903764 - DNA, 15 bp, Homo sapiens
tcagttttgccttct

SEQ ID NO: 903765 - DNA, 15 bp, Homo sapiens
ctcagttttgccttc

SEQ ID NO: 903766 - DNA, 15 bp, Homo sapiens
actcagttttgcctt

SEQ ID NO: 903767 - DNA, 15 bp, Homo sapiens
tactcagttttgcct

SEQ ID NO: 903768 - DNA, 15 bp, Homo sapiens
atactcagttttgcc

SEQ ID NO: 903769 - DNA, 15 bp, Homo sapiens
tatactcagttttgc

SEQ ID NO: 903770 - DNA, 15 bp, Homo sapiens
atatactcagttttg

SEQ ID NO: 903771 - DNA, 15 bp, Homo sapiens
aatatactcagtttt

SEQ ID NO: 903772 - DNA, 15 bp, Homo sapiens
taatatactcagttt

SEQ ID NO: 903773 - DNA, 15 bp, Homo sapiens
ataatatactcagtt

SEQ ID NO: 903774 - DNA, 15 bp, Homo sapiens
cataatatactcagt

SEQ ID NO: 903775 - DNA, 15 bp, Homo sapiens
acataatatactcag

SEQ ID NO: 903776 - DNA, 15 bp, Homo sapiens
tacataatatactca

SEQ ID NO: 903777 - DNA, 15 bp, Homo sapiens
ctacataatatactc

SEQ ID NO: 903778 - DNA, 15 bp, Homo sapiens
cctacataatatact

SEQ ID NO: 903779 - DNA, 15 bp, Homo sapiens
tcctacataatatac

SEQ ID NO: 903780 - DNA, 15 bp, Homo sapiens
gtcctacataatata

SEQ ID NO: 903781 - DNA, 15 bp, Homo sapiens
tgtcctacataatat

SEQ ID NO: 903782 - DNA, 15 bp, Homo sapiens
ttgtcctacataata

SEQ ID NO: 903783 - DNA, 15 bp, Homo sapiens
tttgtcctacataat

SEQ ID NO: 903784 - DNA, 15 bp, Homo sapiens
gtttgtcctacataa

SEQ ID NO: 903785 - DNA, 15 bp, Homo sapiens
agtttgtcctacata

SEQ ID NO: 903786 - DNA, 15 bp, Homo sapiens
cagtttgtcctacat

SEQ ID NO: 903787 - DNA, 15 bp, Homo sapiens
tcagtttgtcctaca

SEQ ID NO: 903788 - DNA, 15 bp, Homo sapiens
ttcagtttgtcctac

SEQ ID NO: 903789 - DNA, 15 bp, Homo sapiens
cttcagtttgtccta

SEQ ID NO: 903790 - DNA, 15 bp, Homo sapiens
ccttcagtttgtcct

SEQ ID NO: 903791 - DNA, 15 bp, Homo sapiens
tccttcagtttgtcc

SEQ ID NO: 903792 - DNA, 15 bp, Homo sapiens
ttccttcagtttgtc

SEQ ID NO: 903793 - DNA, 15 bp, Homo sapiens
tttccttcagtttgt

SEQ ID NO: 903794 - DNA, 15 bp, Homo sapiens
atttccttcagtttg

SEQ ID NO: 903795 - DNA, 15 bp, Homo sapiens
aatttccttcagttt

SEQ ID NO: 903796 - DNA, 15 bp, Homo sapiens
caatttccttcagtt

SEQ ID NO: 903797 - DNA, 15 bp, Homo sapiens
ccaatttccttcagt

SEQ ID NO: 903798 - DNA, 15 bp, Homo sapiens
tccaatttccttcag

SEQ ID NO: 903799 - DNA, 15 bp, Homo sapiens
ctccaatttccttca

SEQ ID NO: 903800 - DNA, 15 bp, Homo sapiens
gctccaatttccttc

SEQ ID NO: 903801 - DNA, 15 bp, Homo sapiens
agctccaatttcctt

SEQ ID NO: 903802 - DNA, 15 bp, Homo sapiens
aagctccaatttcct

SEQ ID NO: 903803 - DNA, 15 bp, Homo sapiens
aaagctccaatttcc

SEQ ID NO: 903804 - DNA, 15 bp, Homo sapiens
caaagctccaatttc

SEQ ID NO: 903805 - DNA, 15 bp, Homo sapiens
acaaagctccaattt

SEQ ID NO: 903806 - DNA, 15 bp, Homo sapiens
tacaaagctccaatt

SEQ ID NO: 903807 - DNA, 15 bp, Homo sapiens
ctacaaagctccaat

SEQ ID NO: 903808 - DNA, 15 bp, Homo sapiens
tctacaaagctccaa

SEQ ID NO: 903809 - DNA, 15 bp, Homo sapiens
gtctacaaagctcca

SEQ ID NO: 903810 - DNA, 15 bp, Homo sapiens
tgtctacaaagctcc

SEQ ID NO: 903811 - DNA, 15 bp, Homo sapiens
atgtctacaaagctc

SEQ ID NO: 903812 - DNA, 15 bp, Homo sapiens
gatgtctacaaagct

SEQ ID NO: 903813 - DNA, 15 bp, Homo sapiens
tgatgtctacaaagc

SEQ ID NO: 903814 - DNA, 15 bp, Homo sapiens
gtgatgtctacaaag

SEQ ID NO: 903815 - DNA, 15 bp, Homo sapiens
tgtgatgtctacaaa

SEQ ID NO: 903816 - DNA, 15 bp, Homo sapiens
atgtgatgtctacaa

SEQ ID NO: 903817 - DNA, 15 bp, Homo sapiens
aatgtgatgtctaca

SEQ ID NO: 903818 - DNA, 15 bp, Homo sapiens
taatgtgatgtctac

SEQ ID NO: 903819 - DNA, 15 bp, Homo sapiens
ataatgtgatgtcta

SEQ ID NO: 903820 - DNA, 15 bp, Homo sapiens
tataatgtgatgtct

SEQ ID NO: 903821 - DNA, 15 bp, Homo sapiens
ctataatgtgatgtc

SEQ ID NO: 903822 - DNA, 15 bp, Homo sapiens
gctataatgtgatgt

SEQ ID NO: 903823 - DNA, 15 bp, Homo sapiens
cgctataatgtgatg

SEQ ID NO: 903824 - DNA, 15 bp, Homo sapiens
ccgctataatgtgat

SEQ ID NO: 903825 - DNA, 15 bp, Homo sapiens
tccgctataatgtga

SEQ ID NO: 903826 - DNA, 15 bp, Homo sapiens
ctccgctataatgtg

SEQ ID NO: 903827 - DNA, 15 bp, Homo sapiens
actccgctataatgt

SEQ ID NO: 903828 - DNA, 15 bp, Homo sapiens
aactccgctataatg

SEQ ID NO: 903829 - DNA, 15 bp, Homo sapiens
aaactccgctataat

SEQ ID NO: 903830 - DNA, 15 bp, Homo sapiens
taaactccgctataa

SEQ ID NO: 903831 - DNA, 15 bp, Homo sapiens
ttaaactccgctata

SEQ ID NO: 903832 - DNA, 15 bp, Homo sapiens
tttaaactccgctat

SEQ ID NO: 903833 - DNA, 15 bp, Homo sapiens
gtttaaactccgcta

SEQ ID NO: 903834 - DNA, 15 bp, Homo sapiens
ggtttaaactccgct

SEQ ID NO: 903835 - DNA, 15 bp, Homo sapiens
aggtttaaactccgc

SEQ ID NO: 903836 - DNA, 15 bp, Homo sapiens
caggtttaaactccg

SEQ ID NO: 903837 - DNA, 15 bp, Homo sapiens
tcaggtttaaactcc

SEQ ID NO: 903838 - DNA, 15 bp, Homo sapiens
ttcaggtttaaactc

SEQ ID NO: 903839 - DNA, 15 bp, Homo sapiens
tttcaggtttaaact

SEQ ID NO: 903840 - DNA, 15 bp, Homo sapiens
atttcaggtttaaac

SEQ ID NO: 903841 - DNA, 15 bp, Homo sapiens
aatttcaggtttaaa

SEQ ID NO: 903842 - DNA, 15 bp, Homo sapiens
taatttcaggtttaa

SEQ ID NO: 903843 - DNA, 15 bp, Homo sapiens
ataatttcaggttta

SEQ ID NO: 903844 - DNA, 15 bp, Homo sapiens
cataatttcaggttt

SEQ ID NO: 903845 - DNA, 15 bp, Homo sapiens
ccataatttcaggtt

SEQ ID NO: 903846 - DNA, 15 bp, Homo sapiens
tccataatttcaggt

SEQ ID NO: 903847 - DNA, 15 bp, Homo sapiens
atccataatttcagg

SEQ ID NO: 903848 - DNA, 15 bp, Homo sapiens
aatccataatttcag

SEQ ID NO: 903849 - DNA, 15 bp, Homo sapiens
taatccataatttca

SEQ ID NO: 903850 - DNA, 15 bp, Homo sapiens
ctaatccataatttc

SEQ ID NO: 903851 - DNA, 15 bp, Homo sapiens
tctaatccataattt

SEQ ID NO: 903852 - DNA, 15 bp, Homo sapiens
ttctaatccataatt

SEQ ID NO: 903853 - DNA, 15 bp, Homo sapiens
attctaatccataat

SEQ ID NO: 903854 - DNA, 15 bp, Homo sapiens
tattctaatccataa

SEQ ID NO: 903855 - DNA, 15 bp, Homo sapiens
ttattctaatccata

SEQ ID NO: 903856 - DNA, 15 bp, Homo sapiens
attattctaatccat

SEQ ID NO: 903857 - DNA, 15 bp, Homo sapiens
tattattctaatcca

SEQ ID NO: 903858 - DNA, 15 bp, Homo sapiens
ctattattctaatcc

SEQ ID NO: 903859 - DNA, 15 bp, Homo sapiens
gctattattctaatc

SEQ ID NO: 903860 - DNA, 15 bp, Homo sapiens
tgctattattctaat

SEQ ID NO: 903861 - DNA, 15 bp, Homo sapiens
ttgctattattctaa

SEQ ID NO: 903862 - DNA, 15 bp, Homo sapiens
attgctattattcta

SEQ ID NO: 903863 - DNA, 15 bp, Homo sapiens
aattgctattattct

SEQ ID NO: 903864 - DNA, 15 bp, Homo sapiens
caattgctattattc

SEQ ID NO: 903865 - DNA, 15 bp, Homo sapiens
ccaattgctattatt

SEQ ID NO: 903866 - DNA, 15 bp, Homo sapiens
tccaattgctattat

SEQ ID NO: 903867 - DNA, 15 bp, Homo sapiens
ttccaattgctatta

SEQ ID NO: 903868 - DNA, 15 bp, Homo sapiens
gttccaattgctatt

SEQ ID NO: 903869 - DNA, 15 bp, Homo sapiens
tgttccaattgctat

SEQ ID NO: 903870 - DNA, 15 bp, Homo sapiens
ctgttccaattgcta

SEQ ID NO: 903871 - DNA, 15 bp, Homo sapiens
tctgttccaattgct

SEQ ID NO: 903872 - DNA, 15 bp, Homo sapiens
ttctgttccaattgc

SEQ ID NO: 903873 - DNA, 15 bp, Homo sapiens
tttctgttccaattg

SEQ ID NO: 903874 - DNA, 15 bp, Homo sapiens
ttttctgttccaatt

SEQ ID NO: 903875 - DNA, 15 bp, Homo sapiens
tttttctgttccaat

SEQ ID NO: 903876 - DNA, 15 bp, Homo sapiens
ttttttctgttccaa

SEQ ID NO: 903877 - DNA, 15 bp, Homo sapiens
tttttttctgttcca

SEQ ID NO: 903878 - DNA, 15 bp, Homo sapiens
ctttttttctgttcc

SEQ ID NO: 903879 - DNA, 15 bp, Homo sapiens
actttttttctgttc

SEQ ID NO: 903880 - DNA, 15 bp, Homo sapiens
tactttttttctgtt

SEQ ID NO: 903881 - DNA, 15 bp, Homo sapiens
ctactttttttctgt

SEQ ID NO: 903882 - DNA, 15 bp, Homo sapiens
actactttttttctg

SEQ ID NO: 903883 - DNA, 15 bp, Homo sapiens
cactactttttttct

SEQ ID NO: 903884 - DNA, 15 bp, Homo sapiens
ccactactttttttc

SEQ ID NO: 903885 - DNA, 15 bp, Homo sapiens
tccactacttttttt

SEQ ID NO: 903886 - DNA, 15 bp, Homo sapiens
ttccactactttttt

SEQ ID NO: 903887 - DNA, 15 bp, Homo sapiens
tttccactacttttt

SEQ ID NO: 903888 - DNA, 15 bp, Homo sapiens
ctttccactactttt

SEQ ID NO: 903889 - DNA, 15 bp, Homo sapiens
tctttccactacttt

SEQ ID NO: 903890 - DNA, 15 bp, Homo sapiens
gtctttccactactt

SEQ ID NO: 903891 - DNA, 15 bp, Homo sapiens
tgtctttccactact

SEQ ID NO: 903892 - DNA, 15 bp, Homo sapiens
atgtctttccactac

SEQ ID NO: 903893 - DNA, 15 bp, Homo sapiens
aatgtctttccacta

SEQ ID NO: 903894 - DNA, 15 bp, Homo sapiens
taatgtctttccact

SEQ ID NO: 903895 - DNA, 15 bp, Homo sapiens
gtaatgtctttccac

SEQ ID NO: 903896 - DNA, 15 bp, Homo sapiens
tgtaatgtctttcca

SEQ ID NO: 903897 - DNA, 15 bp, Homo sapiens
ttgtaatgtctttcc

SEQ ID NO: 903898 - DNA, 15 bp, Homo sapiens
tttgtaatgtctttc

SEQ ID NO: 903899 - DNA, 15 bp, Homo sapiens
ctttgtaatgtcttt

SEQ ID NO: 903900 - DNA, 15 bp, Homo sapiens
cctttgtaatgtctt

SEQ ID NO: 903901 - DNA, 15 bp, Homo sapiens
ccctttgtaatgtct

SEQ ID NO: 903902 - DNA, 15 bp, Homo sapiens
tccctttgtaatgtc

SEQ ID NO: 903903 - DNA, 15 bp, Homo sapiens
ctccctttgtaatgt

SEQ ID NO: 903904 - DNA, 15 bp, Homo sapiens
tctccctttgtaatg

SEQ ID NO: 903905 - DNA, 15 bp, Homo sapiens
atctccctttgtaat

SEQ ID NO: 903906 - DNA, 15 bp, Homo sapiens
catctccctttgtaa

SEQ ID NO: 903907 - DNA, 15 bp, Homo sapiens
acatctccctttgta

SEQ ID NO: 903908 - DNA, 15 bp, Homo sapiens
aacatctccctttgt

SEQ ID NO: 903909 - DNA, 15 bp, Homo sapiens
caacatctccctttg

SEQ ID NO: 903910 - DNA, 15 bp, Homo sapiens
gcaacatctcccttt

SEQ ID NO: 903911 - DNA, 15 bp, Homo sapiens
tgcaacatctccctt

SEQ ID NO: 903912 - DNA, 15 bp, Homo sapiens
atgcaacatctccct

SEQ ID NO: 903913 - DNA, 15 bp, Homo sapiens
aatgcaacatctccc

SEQ ID NO: 903914 - DNA, 15 bp, Homo sapiens
taatgcaacatctcc

SEQ ID NO: 903915 - DNA, 15 bp, Homo sapiens
gtaatgcaacatctc

SEQ ID NO: 903916 - DNA, 15 bp, Homo sapiens
agtaatgcaacatct

SEQ ID NO: 903917 - DNA, 15 bp, Homo sapiens
cagtaatgcaacatc

SEQ ID NO: 903918 - DNA, 15 bp, Homo sapiens
ccagtaatgcaacat

SEQ ID NO: 903919 - DNA, 15 bp, Homo sapiens
tccagtaatgcaaca

SEQ ID NO: 903920 - DNA, 15 bp, Homo sapiens
atccagtaatgcaac

SEQ ID NO: 903921 - DNA, 15 bp, Homo sapiens
tatccagtaatgcaa

SEQ ID NO: 903922 - DNA, 15 bp, Homo sapiens
atatccagtaatgca

SEQ ID NO: 903923 - DNA, 15 bp, Homo sapiens
tatatccagtaatgc

SEQ ID NO: 903924 - DNA, 15 bp, Homo sapiens
ttatatccagtaatg

SEQ ID NO: 903925 - DNA, 15 bp, Homo sapiens
cttatatccagtaat

SEQ ID NO: 903926 - DNA, 15 bp, Homo sapiens
tcttatatccagtaa

SEQ ID NO: 903927 - DNA, 15 bp, Homo sapiens
gtcttatatccagta

SEQ ID NO: 903928 - DNA, 15 bp, Homo sapiens
agtcttatatccagt

SEQ ID NO: 903929 - DNA, 15 bp, Homo sapiens
aagtcttatatccag

SEQ ID NO: 903930 - DNA, 15 bp, Homo sapiens
caagtcttatatcca

SEQ ID NO: 903931 - DNA, 15 bp, Homo sapiens
tcaagtcttatatcc

SEQ ID NO: 903932 - DNA, 15 bp, Homo sapiens
ctcaagtcttatatc

SEQ ID NO: 903933 - DNA, 15 bp, Homo sapiens
cctcaagtcttatat

SEQ ID NO: 903934 - DNA, 15 bp, Homo sapiens
tcctcaagtcttata

SEQ ID NO: 903935 - DNA, 15 bp, Homo sapiens
gtcctcaagtcttat

SEQ ID NO: 903936 - DNA, 15 bp, Homo sapiens
agtcctcaagtctta

SEQ ID NO: 903937 - DNA, 15 bp, Homo sapiens
aagtcctcaagtctt

SEQ ID NO: 903938 - DNA, 15 bp, Homo sapiens
caagtcctcaagtct

SEQ ID NO: 903939 - DNA, 15 bp, Homo sapiens
tcaagtcctcaagtc

SEQ ID NO: 903940 - DNA, 15 bp, Homo sapiens
ctcaagtcctcaagt

SEQ ID NO: 903941 - DNA, 15 bp, Homo sapiens
cctcaagtcctcaag

SEQ ID NO: 903942 - DNA, 15 bp, Homo sapiens
acctcaagtcctcaa

SEQ ID NO: 903943 - DNA, 15 bp, Homo sapiens
tacctcaagtcctca

SEQ ID NO: 903944 - DNA, 15 bp, Homo sapiens
ttacctcaagtcctc

SEQ ID NO: 903945 - DNA, 15 bp, Homo sapiens
tttacctcaagtcct

SEQ ID NO: 903946 - DNA, 15 bp, Homo sapiens
ttttacctcaagtcc

SEQ ID NO: 903947 - DNA, 15 bp, Homo sapiens
tttttacctcaagtc

SEQ ID NO: 903948 - DNA, 15 bp, Homo sapiens
ctttttacctcaagt

SEQ ID NO: 903949 - DNA, 15 bp, Homo sapiens
cctttttacctcaag

SEQ ID NO: 903950 - DNA, 15 bp, Homo sapiens
tcctttttacctcaa

SEQ ID NO: 903951 - DNA, 15 bp, Homo sapiens
ctcctttttacctca

SEQ ID NO: 903952 - DNA, 15 bp, Homo sapiens
tctcctttttacctc

SEQ ID NO: 903953 - DNA, 15 bp, Homo sapiens
ttctcctttttacct

SEQ ID NO: 903954 - DNA, 15 bp, Homo sapiens
attctcctttttacc

SEQ ID NO: 903955 - DNA, 15 bp, Homo sapiens
gattctcctttttac

SEQ ID NO: 903956 - DNA, 15 bp, Homo sapiens
tgattctccttttta

SEQ ID NO: 903957 - DNA, 15 bp, Homo sapiens
ttgattctccttttt

SEQ ID NO: 903958 - DNA, 15 bp, Homo sapiens
tttgattctcctttt

SEQ ID NO: 903959 - DNA, 15 bp, Homo sapiens
ttttgattctccttt

SEQ ID NO: 903960 - DNA, 15 bp, Homo sapiens
tttttgattctcctt

SEQ ID NO: 903961 - DNA, 15 bp, Homo sapiens
atttttgattctcct

SEQ ID NO: 903962 - DNA, 15 bp, Homo sapiens
catttttgattctcc

SEQ ID NO: 903963 - DNA, 15 bp, Homo sapiens
acatttttgattctc

SEQ ID NO: 903964 - DNA, 15 bp, Homo sapiens
aacatttttgattct

SEQ ID NO: 903965 - DNA, 15 bp, Homo sapiens
aaacatttttgattc

SEQ ID NO: 903966 - DNA, 15 bp, Homo sapiens
gaaacatttttgatt

SEQ ID NO: 903967 - DNA, 15 bp, Homo sapiens
tgaaacatttttgat

SEQ ID NO: 903968 - DNA, 15 bp, Homo sapiens
atgaaacatttttga

SEQ ID NO: 903969 - DNA, 15 bp, Homo sapiens
catgaaacatttttg

SEQ ID NO: 903970 - DNA, 15 bp, Homo sapiens
gcatgaaacattttt

SEQ ID NO: 903971 - DNA, 15 bp, Homo sapiens
agcatgaaacatttt

SEQ ID NO: 903972 - DNA, 15 bp, Homo sapiens
tagcatgaaacattt

SEQ ID NO: 903973 - DNA, 15 bp, Homo sapiens
atagcatgaaacatt

SEQ ID NO: 903974 - DNA, 15 bp, Homo sapiens
aatagcatgaaacat

SEQ ID NO: 903975 - DNA, 15 bp, Homo sapiens
taatagcatgaaaca

SEQ ID NO: 903976 - DNA, 15 bp, Homo sapiens
ttaatagcatgaaac

SEQ ID NO: 903977 - DNA, 15 bp, Homo sapiens
tttaatagcatgaaa

SEQ ID NO: 903978 - DNA, 15 bp, Homo sapiens
ttttaatagcatgaa

SEQ ID NO: 903979 - DNA, 15 bp, Homo sapiens
tttttaatagcatga

SEQ ID NO: 903980 - DNA, 15 bp, Homo sapiens
atttttaatagcatg

SEQ ID NO: 903981 - DNA, 15 bp, Homo sapiens
gatttttaatagcat

SEQ ID NO: 903982 - DNA, 15 bp, Homo sapiens
agatttttaatagca

SEQ ID NO: 903983 - DNA, 15 bp, Homo sapiens
tagatttttaatagc

SEQ ID NO: 903984 - DNA, 15 bp, Homo sapiens
ctagatttttaatag

SEQ ID NO: 903985 - DNA, 15 bp, Homo sapiens
tctagatttttaata

SEQ ID NO: 903986 - DNA, 15 bp, Homo sapiens
ttctagatttttaat

SEQ ID NO: 903987 - DNA, 15 bp, Homo sapiens
tttctagatttttaa

SEQ ID NO: 903988 - DNA, 15 bp, Homo sapiens
atttctagattttta

SEQ ID NO: 903989 - DNA, 15 bp, Homo sapiens
aatttctagattttt

SEQ ID NO: 903990 - DNA, 15 bp, Homo sapiens
caatttctagatttt

SEQ ID NO: 903991 - DNA, 15 bp, Homo sapiens
acaatttctagattt

SEQ ID NO: 903992 - DNA, 15 bp, Homo sapiens
tacaatttctagatt

SEQ ID NO: 903993 - DNA, 15 bp, Homo sapiens
ctacaatttctagat

SEQ ID NO: 903994 - DNA, 15 bp, Homo sapiens
actacaatttctaga

SEQ ID NO: 903995 - DNA, 15 bp, Homo sapiens
gactacaatttctag

SEQ ID NO: 903996 - DNA, 15 bp, Homo sapiens
agactacaatttcta

SEQ ID NO: 903997 - DNA, 15 bp, Homo sapiens
aagactacaatttct

SEQ ID NO: 903998 - DNA, 15 bp, Homo sapiens
taagactacaatttc

SEQ ID NO: 903999 - DNA, 15 bp, Homo sapiens
ttaagactacaattt

SEQ ID NO: 904000 - DNA, 15 bp, Homo sapiens
cttaagactacaatt

SEQ ID NO: 904001 - DNA, 15 bp, Homo sapiens
acttaagactacaat

SEQ ID NO: 904002 - DNA, 15 bp, Homo sapiens
tacttaagactacaa

SEQ ID NO: 904003 - DNA, 15 bp, Homo sapiens
ttacttaagactaca

SEQ ID NO: 904004 - DNA, 15 bp, Homo sapiens
cttacttaagactac

SEQ ID NO: 904005 - DNA, 15 bp, Homo sapiens
tcttacttaagacta

SEQ ID NO: 904006 - DNA, 15 bp, Homo sapiens
ttcttacttaagact

SEQ ID NO: 904007 - DNA, 15 bp, Homo sapiens
tttcttacttaagac

SEQ ID NO: 904008 - DNA, 15 bp, Homo sapiens
ttttcttacttaaga

SEQ ID NO: 904009 - DNA, 15 bp, Homo sapiens
attttcttacttaag

SEQ ID NO: 904010 - DNA, 15 bp, Homo sapiens
aattttcttacttaa

SEQ ID NO: 904011 - DNA, 15 bp, Homo sapiens
caattttcttactta

SEQ ID NO: 904012 - DNA, 15 bp, Homo sapiens
gcaattttcttactt

SEQ ID NO: 904013 - DNA, 15 bp, Homo sapiens
ggcaattttcttact

SEQ ID NO: 904014 - DNA, 15 bp, Homo sapiens
aggcaattttcttac

SEQ ID NO: 904015 - DNA, 15 bp, Homo sapiens
caggcaattttctta

SEQ ID NO: 904016 - DNA, 15 bp, Homo sapiens
ccaggcaattttctt

SEQ ID NO: 904017 - DNA, 15 bp, Homo sapiens
gccaggcaattttct

SEQ ID NO: 904018 - DNA, 15 bp, Homo sapiens
tgccaggcaattttc

SEQ ID NO: 904019 - DNA, 15 bp, Homo sapiens
atgccaggcaatttt

SEQ ID NO: 904020 - DNA, 15 bp, Homo sapiens
catgccaggcaattt

SEQ ID NO: 904021 - DNA, 15 bp, Homo sapiens
ccatgccaggcaatt

SEQ ID NO: 904022 - DNA, 15 bp, Homo sapiens
accatgccaggcaat

SEQ ID NO: 904023 - DNA, 15 bp, Homo sapiens
caccatgccaggcaa

SEQ ID NO: 904024 - DNA, 15 bp, Homo sapiens
ccaccatgccaggca

SEQ ID NO: 904025 - DNA, 15 bp, Homo sapiens
gccaccatgccaggc

SEQ ID NO: 904026 - DNA, 15 bp, Homo sapiens
agccaccatgccagg

SEQ ID NO: 904027 - DNA, 15 bp, Homo sapiens
gagccaccatgccag

SEQ ID NO: 904028 - DNA, 15 bp, Homo sapiens
tgagccaccatgcca

SEQ ID NO: 904029 - DNA, 15 bp, Homo sapiens
gtgagccaccatgcc

SEQ ID NO: 904030 - DNA, 15 bp, Homo sapiens
cgtgagccaccatgc

SEQ ID NO: 904031 - DNA, 15 bp, Homo sapiens
acgtgagccaccatg

SEQ ID NO: 904032 - DNA, 15 bp, Homo sapiens
gacgtgagccaccat

SEQ ID NO: 904033 - DNA, 15 bp, Homo sapiens
agacgtgagccacca

SEQ ID NO: 904034 - DNA, 15 bp, Homo sapiens
cagacgtgagccacc

SEQ ID NO: 904035 - DNA, 15 bp, Homo sapiens
acagacgtgagccac

SEQ ID NO: 904036 - DNA, 15 bp, Homo sapiens
tacagacgtgagcca

SEQ ID NO: 904037 - DNA, 15 bp, Homo sapiens
ttacagacgtgagcc

SEQ ID NO: 904038 - DNA, 15 bp, Homo sapiens
attacagacgtgagc

SEQ ID NO: 904039 - DNA, 15 bp, Homo sapiens
gattacagacgtgag

SEQ ID NO: 904040 - DNA, 15 bp, Homo sapiens
ggattacagacgtga

SEQ ID NO: 904041 - DNA, 15 bp, Homo sapiens
gggattacagacgtg

SEQ ID NO: 904042 - DNA, 15 bp, Homo sapiens
tgggattacagacgt

SEQ ID NO: 904043 - DNA, 15 bp, Homo sapiens
ctgggattacagacg

SEQ ID NO: 904044 - DNA, 15 bp, Homo sapiens
gctgggattacagac

SEQ ID NO: 904045 - DNA, 15 bp, Homo sapiens
tgctgggattacaga

SEQ ID NO: 904046 - DNA, 15 bp, Homo sapiens
gtgctgggattacag

SEQ ID NO: 904047 - DNA, 15 bp, Homo sapiens
agtgctgggattaca

SEQ ID NO: 904048 - DNA, 15 bp, Homo sapiens
aagtgctgggattac

SEQ ID NO: 904049 - DNA, 15 bp, Homo sapiens
aaagtgctgggatta

SEQ ID NO: 904050 - DNA, 15 bp, Homo sapiens
caaagtgctgggatt

SEQ ID NO: 904051 - DNA, 15 bp, Homo sapiens
ccaaagtgctgggat

SEQ ID NO: 904052 - DNA, 15 bp, Homo sapiens
cccaaagtgctggga

SEQ ID NO: 904053 - DNA, 15 bp, Homo sapiens
tcccaaagtgctggg

SEQ ID NO: 904054 - DNA, 15 bp, Homo sapiens
ctcccaaagtgctgg

SEQ ID NO: 904055 - DNA, 15 bp, Homo sapiens
cctcccaaagtgctg

SEQ ID NO: 904056 - DNA, 15 bp, Homo sapiens
gcctcccaaagtgct

SEQ ID NO: 904057 - DNA, 15 bp, Homo sapiens
ggcctcccaaagtgc

SEQ ID NO: 904058 - DNA, 15 bp, Homo sapiens
tggcctcccaaagtg

SEQ ID NO: 904059 - DNA, 15 bp, Homo sapiens
ttggcctcccaaagt

SEQ ID NO: 904060 - DNA, 15 bp, Homo sapiens
cttggcctcccaaag

SEQ ID NO: 904061 - DNA, 15 bp, Homo sapiens
ccttggcctcccaaa

SEQ ID NO: 904062 - DNA, 15 bp, Homo sapiens
gccttggcctcccaa

SEQ ID NO: 904063 - DNA, 15 bp, Homo sapiens
tgccttggcctccca

SEQ ID NO: 904064 - DNA, 15 bp, Homo sapiens
ctgccttggcctccc

SEQ ID NO: 904065 - DNA, 15 bp, Homo sapiens
cctgccttggcctcc

SEQ ID NO: 904066 - DNA, 15 bp, Homo sapiens
tcctgccttggcctc

SEQ ID NO: 904067 - DNA, 15 bp, Homo sapiens
ctcctgccttggcct

SEQ ID NO: 904068 - DNA, 15 bp, Homo sapiens
cctcctgccttggcc

SEQ ID NO: 904069 - DNA, 15 bp, Homo sapiens
tcctcctgccttggc

SEQ ID NO: 904070 - DNA, 15 bp, Homo sapiens
atcctcctgccttgg

SEQ ID NO: 904071 - DNA, 15 bp, Homo sapiens
aatcctcctgccttg

SEQ ID NO: 904072 - DNA, 15 bp, Homo sapiens
caatcctcctgcctt

SEQ ID NO: 904073 - DNA, 15 bp, Homo sapiens
gcaatcctcctgcct

SEQ ID NO: 904074 - DNA, 15 bp, Homo sapiens
agcaatcctcctgcc

SEQ ID NO: 904075 - DNA, 15 bp, Homo sapiens
aagcaatcctcctgc

SEQ ID NO: 904076 - DNA, 15 bp, Homo sapiens
caagcaatcctcctg

SEQ ID NO: 904077 - DNA, 15 bp, Homo sapiens
tcaagcaatcctcct

SEQ ID NO: 904078 - DNA, 15 bp, Homo sapiens
ctcaagcaatcctcc

SEQ ID NO: 904079 - DNA, 15 bp, Homo sapiens
gctcaagcaatcctc

SEQ ID NO: 904080 - DNA, 15 bp, Homo sapiens
ggctcaagcaatcct

SEQ ID NO: 904081 - DNA, 15 bp, Homo sapiens
aggctcaagcaatcc

SEQ ID NO: 904082 - DNA, 15 bp, Homo sapiens
caggctcaagcaatc

SEQ ID NO: 904083 - DNA, 15 bp, Homo sapiens
ccaggctcaagcaat

SEQ ID NO: 904084 - DNA, 15 bp, Homo sapiens
cccaggctcaagcaa

SEQ ID NO: 904085 - DNA, 15 bp, Homo sapiens
tcccaggctcaagca

SEQ ID NO: 904086 - DNA, 15 bp, Homo sapiens
ctcccaggctcaagc

SEQ ID NO: 904087 - DNA, 15 bp, Homo sapiens
actcccaggctcaag

SEQ ID NO: 904088 - DNA, 15 bp, Homo sapiens
aactcccaggctcaa

SEQ ID NO: 904089 - DNA, 15 bp, Homo sapiens
gaactcccaggctca

SEQ ID NO: 904090 - DNA, 15 bp, Homo sapiens
tgaactcccaggctc

SEQ ID NO: 904091 - DNA, 15 bp, Homo sapiens
ttgaactcccaggct

SEQ ID NO: 904092 - DNA, 15 bp, Homo sapiens
cttgaactcccaggc

SEQ ID NO: 904093 - DNA, 15 bp, Homo sapiens
tcttgaactcccagg

SEQ ID NO: 904094 - DNA, 15 bp, Homo sapiens
gtcttgaactcccag

SEQ ID NO: 904095 - DNA, 15 bp, Homo sapiens
agtcttgaactccca

SEQ ID NO: 904096 - DNA, 15 bp, Homo sapiens
tagtcttgaactccc

SEQ ID NO: 904097 - DNA, 15 bp, Homo sapiens
ctagtcttgaactcc

SEQ ID NO: 904098 - DNA, 15 bp, Homo sapiens
gctagtcttgaactc

SEQ ID NO: 904099 - DNA, 15 bp, Homo sapiens
ggctagtcttgaact

SEQ ID NO: 904100 - DNA, 15 bp, Homo sapiens
aggctagtcttgaac

SEQ ID NO: 904101 - DNA, 15 bp, Homo sapiens
caggctagtcttgaa

SEQ ID NO: 904102 - DNA, 15 bp, Homo sapiens
ccaggctagtcttga

SEQ ID NO: 904103 - DNA, 15 bp, Homo sapiens
tccaggctagtcttg

SEQ ID NO: 904104 - DNA, 15 bp, Homo sapiens
atccaggctagtctt

SEQ ID NO: 904105 - DNA, 15 bp, Homo sapiens
tatccaggctagtct

SEQ ID NO: 904106 - DNA, 15 bp, Homo sapiens
ttatccaggctagtc

SEQ ID NO: 904107 - DNA, 15 bp, Homo sapiens
attatccaggctagt

SEQ ID NO: 904108 - DNA, 15 bp, Homo sapiens
tattatccaggctag

SEQ ID NO: 904109 - DNA, 15 bp, Homo sapiens
atattatccaggcta

SEQ ID NO: 904110 - DNA, 15 bp, Homo sapiens
tatattatccaggct

SEQ ID NO: 904111 - DNA, 15 bp, Homo sapiens
ctatattatccaggc

SEQ ID NO: 904112 - DNA, 15 bp, Homo sapiens
actatattatccagg

SEQ ID NO: 904113 - DNA, 15 bp, Homo sapiens
cactatattatccag

SEQ ID NO: 904114 - DNA, 15 bp, Homo sapiens
tcactatattatcca

SEQ ID NO: 904115 - DNA, 15 bp, Homo sapiens
ctcactatattatcc

SEQ ID NO: 904116 - DNA, 15 bp, Homo sapiens
actcactatattatc

SEQ ID NO: 904117 - DNA, 15 bp, Homo sapiens
gactcactatattat

SEQ ID NO: 904118 - DNA, 15 bp, Homo sapiens
ggactcactatatta

SEQ ID NO: 904119 - DNA, 15 bp, Homo sapiens
aggactcactatatt

SEQ ID NO: 904120 - DNA, 15 bp, Homo sapiens
aaggactcactatat

SEQ ID NO: 904121 - DNA, 15 bp, Homo sapiens
caaggactcactata

SEQ ID NO: 904122 - DNA, 15 bp, Homo sapiens
gcaaggactcactat

SEQ ID NO: 904123 - DNA, 15 bp, Homo sapiens
ggcaaggactcacta

SEQ ID NO: 904124 - DNA, 15 bp, Homo sapiens
aggcaaggactcact

SEQ ID NO: 904125 - DNA, 15 bp, Homo sapiens
caggcaaggactcac

SEQ ID NO: 904126 - DNA, 15 bp, Homo sapiens
acaggcaaggactca

SEQ ID NO: 904127 - DNA, 15 bp, Homo sapiens
tacaggcaaggactc

SEQ ID NO: 904128 - DNA, 15 bp, Homo sapiens
gtacaggcaaggact

SEQ ID NO: 904129 - DNA, 15 bp, Homo sapiens
cgtacaggcaaggac

SEQ ID NO: 904130 - DNA, 15 bp, Homo sapiens
tcgtacaggcaagga

SEQ ID NO: 904131 - DNA, 15 bp, Homo sapiens
ttcgtacaggcaagg

SEQ ID NO: 904132 - DNA, 15 bp, Homo sapiens
tttcgtacaggcaag

SEQ ID NO: 904133 - DNA, 15 bp, Homo sapiens
ttttcgtacaggcaa

SEQ ID NO: 904134 - DNA, 15 bp, Homo sapiens
tttttcgtacaggca

SEQ ID NO: 904135 - DNA, 15 bp, Homo sapiens
ttttttcgtacaggc

SEQ ID NO: 904136 - DNA, 15 bp, Homo sapiens
attttttcgtacagg

SEQ ID NO: 904137 - DNA, 15 bp, Homo sapiens
aattttttcgtacag

SEQ ID NO: 904138 - DNA, 15 bp, Homo sapiens
aaattttttcgtaca

SEQ ID NO: 904139 - DNA, 15 bp, Homo sapiens
caaattttttcgtac

SEQ ID NO: 904140 - DNA, 15 bp, Homo sapiens
gcaaattttttcgta

SEQ ID NO: 904141 - DNA, 15 bp, Homo sapiens
ggcaaattttttcgt

SEQ ID NO: 904142 - DNA, 15 bp, Homo sapiens
cggcaaattttttcg

SEQ ID NO: 904143 - DNA, 15 bp, Homo sapiens
tcggcaaattttttc

SEQ ID NO: 904144 - DNA, 15 bp, Homo sapiens
ctcggcaaatttttt

SEQ ID NO: 904145 - DNA, 15 bp, Homo sapiens
gctcggcaaattttt

SEQ ID NO: 904146 - DNA, 15 bp, Homo sapiens
tgctcggcaaatttt

SEQ ID NO: 904147 - DNA, 15 bp, Homo sapiens
atgctcggcaaattt

SEQ ID NO: 904148 - DNA, 15 bp, Homo sapiens
catgctcggcaaatt

SEQ ID NO: 904149 - DNA, 15 bp, Homo sapiens
tcatgctcggcaaat

SEQ ID NO: 904150 - DNA, 15 bp, Homo sapiens
atcatgctcggcaaa

SEQ ID NO: 904151 - DNA, 15 bp, Homo sapiens
catcatgctcggcaa

SEQ ID NO: 904152 - DNA, 15 bp, Homo sapiens
ccatcatgctcggca

SEQ ID NO: 904153 - DNA, 15 bp, Homo sapiens
gccatcatgctcggc

SEQ ID NO: 904154 - DNA, 15 bp, Homo sapiens
tgccatcatgctcgg

SEQ ID NO: 904155 - DNA, 15 bp, Homo sapiens
gtgccatcatgctcg

SEQ ID NO: 904156 - DNA, 15 bp, Homo sapiens
tgtgccatcatgctc

SEQ ID NO: 904157 - DNA, 15 bp, Homo sapiens
gtgtgccatcatgct

SEQ ID NO: 904158 - DNA, 15 bp, Homo sapiens
ggtgtgccatcatgc

SEQ ID NO: 904159 - DNA, 15 bp, Homo sapiens
tggtgtgccatcatg

SEQ ID NO: 904160 - DNA, 15 bp, Homo sapiens
ttggtgtgccatcat

SEQ ID NO: 904161 - DNA, 15 bp, Homo sapiens
cttggtgtgccatca

SEQ ID NO: 904162 - DNA, 15 bp, Homo sapiens
gcttggtgtgccatc

SEQ ID NO: 904163 - DNA, 15 bp, Homo sapiens
tgcttggtgtgccat

SEQ ID NO: 904164 - DNA, 15 bp, Homo sapiens
atgcttggtgtgcca

SEQ ID NO: 904165 - DNA, 15 bp, Homo sapiens
catgcttggtgtgcc

SEQ ID NO: 904166 - DNA, 15 bp, Homo sapiens
tcatgcttggtgtgc

SEQ ID NO: 904167 - DNA, 15 bp, Homo sapiens
atcatgcttggtgtg

SEQ ID NO: 904168 - DNA, 15 bp, Homo sapiens
catcatgcttggtgt

SEQ ID NO: 904169 - DNA, 15 bp, Homo sapiens
ccatcatgcttggtg

SEQ ID NO: 904170 - DNA, 15 bp, Homo sapiens
gccatcatgcttggt

SEQ ID NO: 904171 - DNA, 15 bp, Homo sapiens
tgccatcatgcttgg

SEQ ID NO: 904172 - DNA, 15 bp, Homo sapiens
gtgccatcatgcttg

SEQ ID NO: 904173 - DNA, 15 bp, Homo sapiens
cgtgccatcatgctt

SEQ ID NO: 904174 - DNA, 15 bp, Homo sapiens
gcgtgccatcatgct

SEQ ID NO: 904175 - DNA, 15 bp, Homo sapiens
ggcgtgccatcatgc

SEQ ID NO: 904176 - DNA, 15 bp, Homo sapiens
tggcgtgccatcatg

SEQ ID NO: 904177 - DNA, 15 bp, Homo sapiens
ttggcgtgccatcat

SEQ ID NO: 904178 - DNA, 15 bp, Homo sapiens
cttggcgtgccatca

SEQ ID NO: 904179 - DNA, 15 bp, Homo sapiens
gcttggcgtgccatc

SEQ ID NO: 904180 - DNA, 15 bp, Homo sapiens
tgcttggcgtgccat

SEQ ID NO: 904181 - DNA, 15 bp, Homo sapiens
atgcttggcgtgcca

SEQ ID NO: 904182 - DNA, 15 bp, Homo sapiens
catgcttggcgtgcc

SEQ ID NO: 904183 - DNA, 15 bp, Homo sapiens
tcatgcttggcgtgc

SEQ ID NO: 904184 - DNA, 15 bp, Homo sapiens
atcatgcttggcgtg

SEQ ID NO: 904185 - DNA, 15 bp, Homo sapiens
catcatgcttggcgt

SEQ ID NO: 904186 - DNA, 15 bp, Homo sapiens
ccatcatgcttggcg

SEQ ID NO: 904187 - DNA, 15 bp, Homo sapiens
gccatcatgcttggc

SEQ ID NO: 904188 - DNA, 15 bp, Homo sapiens
atgccatcatgcttg

SEQ ID NO: 904189 - DNA, 15 bp, Homo sapiens
catgccatcatgctt

SEQ ID NO: 904190 - DNA, 15 bp, Homo sapiens
gcatgccatcatgct

SEQ ID NO: 904191 - DNA, 15 bp, Homo sapiens
tgcatgccatcatgc

SEQ ID NO: 904192 - DNA, 15 bp, Homo sapiens
gtgcatgccatcatg

SEQ ID NO: 904193 - DNA, 15 bp, Homo sapiens
ggtgcatgccatcat

SEQ ID NO: 904194 - DNA, 15 bp, Homo sapiens
aggtgcatgccatca

SEQ ID NO: 904195 - DNA, 15 bp, Homo sapiens
caggtgcatgccatc

SEQ ID NO: 904196 - DNA, 15 bp, Homo sapiens
acaggtgcatgccat

SEQ ID NO: 904197 - DNA, 15 bp, Homo sapiens
tacaggtgcatgcca

SEQ ID NO: 904198 - DNA, 15 bp, Homo sapiens
ctacaggtgcatgcc

SEQ ID NO: 904199 - DNA, 15 bp, Homo sapiens
actacaggtgcatgc

SEQ ID NO: 904200 - DNA, 15 bp, Homo sapiens
gactacaggtgcatg

SEQ ID NO: 904201 - DNA, 15 bp, Homo sapiens
ggactacaggtgcat

SEQ ID NO: 904202 - DNA, 15 bp, Homo sapiens
gggactacaggtgca

SEQ ID NO: 904203 - DNA, 15 bp, Homo sapiens
tgggactacaggtgc

SEQ ID NO: 904204 - DNA, 15 bp, Homo sapiens
ctgggactacaggtg

SEQ ID NO: 904205 - DNA, 15 bp, Homo sapiens
gctgggactacaggt

SEQ ID NO: 904206 - DNA, 15 bp, Homo sapiens
agctgggactacagg

SEQ ID NO: 904207 - DNA, 15 bp, Homo sapiens
tagctgggactacag

SEQ ID NO: 904208 - DNA, 15 bp, Homo sapiens
gtagctgggactaca

SEQ ID NO: 904209 - DNA, 15 bp, Homo sapiens
agtagctgggactac

SEQ ID NO: 904210 - DNA, 15 bp, Homo sapiens
gagtagctgggacta

SEQ ID NO: 904211 - DNA, 15 bp, Homo sapiens
tgagtagctgggact

SEQ ID NO: 904212 - DNA, 15 bp, Homo sapiens
ctgagtagctgggac

SEQ ID NO: 904213 - DNA, 15 bp, Homo sapiens
cctgagtagctggga

SEQ ID NO: 904214 - DNA, 15 bp, Homo sapiens
tcctgagtagctggg

SEQ ID NO: 904215 - DNA, 15 bp, Homo sapiens
ctcctgagtagctgg

SEQ ID NO: 904216 - DNA, 15 bp, Homo sapiens
tctcctgagtagctg

SEQ ID NO: 904217 - DNA, 15 bp, Homo sapiens
gtctcctgagtagct

SEQ ID NO: 904218 - DNA, 15 bp, Homo sapiens
agtctcctgagtagc

SEQ ID NO: 904219 - DNA, 15 bp, Homo sapiens
cagtctcctgagtag

SEQ ID NO: 904220 - DNA, 15 bp, Homo sapiens
tcagtctcctgagta

SEQ ID NO: 904221 - DNA, 15 bp, Homo sapiens
ctcagtctcctgagt

SEQ ID NO: 904222 - DNA, 15 bp, Homo sapiens
tctcagtctcctgag

SEQ ID NO: 904223 - DNA, 15 bp, Homo sapiens
atctcagtctcctga

SEQ ID NO: 904224 - DNA, 15 bp, Homo sapiens
catctcagtctcctg

SEQ ID NO: 904225 - DNA, 15 bp, Homo sapiens
ccatctcagtctcct

SEQ ID NO: 904226 - DNA, 15 bp, Homo sapiens
cccatctcagtctcc

SEQ ID NO: 904227 - DNA, 15 bp, Homo sapiens
tcccatctcagtctc

SEQ ID NO: 904228 - DNA, 15 bp, Homo sapiens
ttcccatctcagtct

SEQ ID NO: 904229 - DNA, 15 bp, Homo sapiens
cttcccatctcagtc

SEQ ID NO: 904230 - DNA, 15 bp, Homo sapiens
tcttcccatctcagt

SEQ ID NO: 904231 - DNA, 15 bp, Homo sapiens
atcttcccatctcag

SEQ ID NO: 904232 - DNA, 15 bp, Homo sapiens
aatcttcccatctca

SEQ ID NO: 904233 - DNA, 15 bp, Homo sapiens
caatcttcccatctc

SEQ ID NO: 904234 - DNA, 15 bp, Homo sapiens
gcaatcttcccatct

SEQ ID NO: 904235 - DNA, 15 bp, Homo sapiens
agcaatcttcccatc

SEQ ID NO: 904236 - DNA, 15 bp, Homo sapiens
aagcaatcttcccat

SEQ ID NO: 904237 - DNA, 15 bp, Homo sapiens
caagcaatcttccca

SEQ ID NO: 904238 - DNA, 15 bp, Homo sapiens
tcaagcaatcttccc

SEQ ID NO: 904239 - DNA, 15 bp, Homo sapiens
ctcaagcaatcttcc

SEQ ID NO: 904240 - DNA, 15 bp, Homo sapiens
gctcaagcaatcttc

SEQ ID NO: 904241 - DNA, 15 bp, Homo sapiens
ggctcaagcaatctt

SEQ ID NO: 904242 - DNA, 15 bp, Homo sapiens
gggctcaagcaatct

SEQ ID NO: 904243 - DNA, 15 bp, Homo sapiens
tgggctcaagcaatc

SEQ ID NO: 904244 - DNA, 15 bp, Homo sapiens
ctgggctcaagcaat

SEQ ID NO: 904245 - DNA, 15 bp, Homo sapiens
cctgggctcaagcaa

SEQ ID NO: 904246 - DNA, 15 bp, Homo sapiens
tcctgggctcaagca

SEQ ID NO: 904247 - DNA, 15 bp, Homo sapiens
ctcctgggctcaagc

SEQ ID NO: 904248 - DNA, 15 bp, Homo sapiens
cctcctgggctcaag

SEQ ID NO: 904249 - DNA, 15 bp, Homo sapiens
gcctcctgggctcaa

SEQ ID NO: 904250 - DNA, 15 bp, Homo sapiens
tgcctcctgggctca

SEQ ID NO: 904251 - DNA, 15 bp, Homo sapiens
ctgcctcctgggctc

SEQ ID NO: 904252 - DNA, 15 bp, Homo sapiens
cctgcctcctgggct

SEQ ID NO: 904253 - DNA, 15 bp, Homo sapiens
tcctgcctcctgggc

SEQ ID NO: 904254 - DNA, 15 bp, Homo sapiens
ctcctgcctcctggg

SEQ ID NO: 904255 - DNA, 15 bp, Homo sapiens
cctcctgcctcctgg

SEQ ID NO: 904256 - DNA, 15 bp, Homo sapiens
acctcctgcctcctg

SEQ ID NO: 904257 - DNA, 15 bp, Homo sapiens
aacctcctgcctcct

SEQ ID NO: 904258 - DNA, 15 bp, Homo sapiens
caacctcctgcctcc

SEQ ID NO: 904259 - DNA, 15 bp, Homo sapiens
gcaacctcctgcctc

SEQ ID NO: 904260 - DNA, 15 bp, Homo sapiens
tgcaacctcctgcct

SEQ ID NO: 904261 - DNA, 15 bp, Homo sapiens
ctgcaacctcctgcc

SEQ ID NO: 904262 - DNA, 15 bp, Homo sapiens
actgcaacctcctgc

SEQ ID NO: 904263 - DNA, 15 bp, Homo sapiens
cactgcaacctcctg

SEQ ID NO: 904264 - DNA, 15 bp, Homo sapiens
tcactgcaacctcct

SEQ ID NO: 904265 - DNA, 15 bp, Homo sapiens
ctcactgcaacctcc

SEQ ID NO: 904266 - DNA, 15 bp, Homo sapiens
gctcactgcaacctc

SEQ ID NO: 904267 - DNA, 15 bp, Homo sapiens
agctcactgcaacct

SEQ ID NO: 904268 - DNA, 15 bp, Homo sapiens
cagctcactgcaacc

SEQ ID NO: 904269 - DNA, 15 bp, Homo sapiens
tcagctcactgcaac

SEQ ID NO: 904270 - DNA, 15 bp, Homo sapiens
ctcagctcactgcaa

SEQ ID NO: 904271 - DNA, 15 bp, Homo sapiens
tctcagctcactgca

SEQ ID NO: 904272 - DNA, 15 bp, Homo sapiens
atctcagctcactgc

SEQ ID NO: 904273 - DNA, 15 bp, Homo sapiens
aatctcagctcactg

SEQ ID NO: 904274 - DNA, 15 bp, Homo sapiens
caatctcagctcact

SEQ ID NO: 904275 - DNA, 15 bp, Homo sapiens
acaatctcagctcac

SEQ ID NO: 904276 - DNA, 15 bp, Homo sapiens
cacaatctcagctca

SEQ ID NO: 904277 - DNA, 15 bp, Homo sapiens
gcacaatctcagctc

SEQ ID NO: 904278 - DNA, 15 bp, Homo sapiens
ggcacaatctcagct

SEQ ID NO: 904279 - DNA, 15 bp, Homo sapiens
tggcacaatctcagc

SEQ ID NO: 904280 - DNA, 15 bp, Homo sapiens
gtggcacaatctcag

SEQ ID NO: 904281 - DNA, 15 bp, Homo sapiens
agtggcacaatctca

SEQ ID NO: 904282 - DNA, 15 bp, Homo sapiens
cagtggcacaatctc

SEQ ID NO: 904283 - DNA, 15 bp, Homo sapiens
gcagtggcacaatct

SEQ ID NO: 904284 - DNA, 15 bp, Homo sapiens
tgcagtggcacaatc

SEQ ID NO: 904285 - DNA, 15 bp, Homo sapiens
gtgcagtggcacaat

SEQ ID NO: 904286 - DNA, 15 bp, Homo sapiens
agtgcagtggcacaa

SEQ ID NO: 904287 - DNA, 15 bp, Homo sapiens
gagtgcagtggcaca

SEQ ID NO: 904288 - DNA, 15 bp, Homo sapiens
ggagtgcagtggcac

SEQ ID NO: 904289 - DNA, 15 bp, Homo sapiens
tggagtgcagtggca

SEQ ID NO: 904290 - DNA, 15 bp, Homo sapiens
ctggagtgcagtggc

SEQ ID NO: 904291 - DNA, 15 bp, Homo sapiens
gctggagtgcagtgg

SEQ ID NO: 904292 - DNA, 15 bp, Homo sapiens
ggctggagtgcagtg

SEQ ID NO: 904293 - DNA, 15 bp, Homo sapiens
aggctggagtgcagt

SEQ ID NO: 904294 - DNA, 15 bp, Homo sapiens
caggctggagtgcag

SEQ ID NO: 904295 - DNA, 15 bp, Homo sapiens
ccaggctggagtgca

SEQ ID NO: 904296 - DNA, 15 bp, Homo sapiens
cccaggctggagtgc

SEQ ID NO: 904297 - DNA, 15 bp, Homo sapiens
acccaggctggagtg

SEQ ID NO: 904298 - DNA, 15 bp, Homo sapiens
cacccaggctggagt

SEQ ID NO: 904299 - DNA, 15 bp, Homo sapiens
tcacccaggctggag

SEQ ID NO: 904300 - DNA, 15 bp, Homo sapiens
gtcacccaggctgga

SEQ ID NO: 904301 - DNA, 15 bp, Homo sapiens
tgtcacccaggctgg

SEQ ID NO: 904302 - DNA, 15 bp, Homo sapiens
ttgtcacccaggctg

SEQ ID NO: 904303 - DNA, 15 bp, Homo sapiens
tttgtcacccaggct

SEQ ID NO: 904304 - DNA, 15 bp, Homo sapiens
ctttgtcacccaggc

SEQ ID NO: 904305 - DNA, 15 bp, Homo sapiens
actttgtcacccagg

SEQ ID NO: 904306 - DNA, 15 bp, Homo sapiens
cactttgtcacccag

SEQ ID NO: 904307 - DNA, 15 bp, Homo sapiens
tcactttgtcaccca

SEQ ID NO: 904308 - DNA, 15 bp, Homo sapiens
ctcactttgtcaccc

SEQ ID NO: 904309 - DNA, 15 bp, Homo sapiens
cctcactttgtcacc

SEQ ID NO: 904310 - DNA, 15 bp, Homo sapiens
gcctcactttgtcac

SEQ ID NO: 904311 - DNA, 15 bp, Homo sapiens
ggcctcactttgtca

SEQ ID NO: 904312 - DNA, 15 bp, Homo sapiens
gggcctcactttgtc

SEQ ID NO: 904313 - DNA, 15 bp, Homo sapiens
agggcctcactttgt

SEQ ID NO: 904314 - DNA, 15 bp, Homo sapiens
tagggcctcactttg

SEQ ID NO: 904315 - DNA, 15 bp, Homo sapiens
atagggcctcacttt

SEQ ID NO: 904316 - DNA, 15 bp, Homo sapiens
gatagggcctcactt

SEQ ID NO: 904317 - DNA, 15 bp, Homo sapiens
agatagggcctcact

SEQ ID NO: 904318 - DNA, 15 bp, Homo sapiens
gagatagggcctcac

SEQ ID NO: 904319 - DNA, 15 bp, Homo sapiens
tgagatagggcctca

SEQ ID NO: 904320 - DNA, 15 bp, Homo sapiens
ttgagatagggcctc

SEQ ID NO: 904321 - DNA, 15 bp, Homo sapiens
tttgagatagggcct

SEQ ID NO: 904322 - DNA, 15 bp, Homo sapiens
ttttgagatagggcc

SEQ ID NO: 904323 - DNA, 15 bp, Homo sapiens
cttttgagatagggc

SEQ ID NO: 904324 - DNA, 15 bp, Homo sapiens
gcttttgagataggg

SEQ ID NO: 904325 - DNA, 15 bp, Homo sapiens
tgcttttgagatagg

SEQ ID NO: 904326 - DNA, 15 bp, Homo sapiens
ttgcttttgagatag

SEQ ID NO: 904327 - DNA, 15 bp, Homo sapiens
tttgcttttgagata

SEQ ID NO: 904328 - DNA, 15 bp, Homo sapiens
ttttgcttttgagat

SEQ ID NO: 904329 - DNA, 15 bp, Homo sapiens
tttttgcttttgaga

SEQ ID NO: 904330 - DNA, 15 bp, Homo sapiens
ttttttgcttttgag

SEQ ID NO: 904331 - DNA, 15 bp, Homo sapiens
tttttttgcttttga

SEQ ID NO: 904332 - DNA, 15 bp, Homo sapiens
ttttttttgcttttg

SEQ ID NO: 904333 - DNA, 15 bp, Homo sapiens
gttttttttgctttt

SEQ ID NO: 904334 - DNA, 15 bp, Homo sapiens
tgttttttttgcttt

SEQ ID NO: 904335 - DNA, 15 bp, Homo sapiens
ttgttttttttgctt

SEQ ID NO: 904336 - DNA, 15 bp, Homo sapiens
tttgttttttttgct

SEQ ID NO: 904337 - DNA, 15 bp, Homo sapiens
ttttgttttttttgc

SEQ ID NO: 904338 - DNA, 15 bp, Homo sapiens
tttttgttttttttg

SEQ ID NO: 904339 - DNA, 15 bp, Homo sapiens
gtttttgtttttttt

SEQ ID NO: 904340 - DNA, 15 bp, Homo sapiens
tgtttttgttttttt

SEQ ID NO: 904341 - DNA, 15 bp, Homo sapiens
ttgtttttgtttttt

SEQ ID NO: 904342 - DNA, 15 bp, Homo sapiens
tttgtttttgttttt

SEQ ID NO: 904343 - DNA, 15 bp, Homo sapiens
ttttgtttttgtttt

SEQ ID NO: 904344 - DNA, 15 bp, Homo sapiens
tttttgtttttgttt

SEQ ID NO: 904345 - DNA, 15 bp, Homo sapiens
gtttttgtttttgtt

SEQ ID NO: 904346 - DNA, 15 bp, Homo sapiens
ggtttttgtttttgt

SEQ ID NO: 904347 - DNA, 15 bp, Homo sapiens
tggtttttgtttttg

SEQ ID NO: 904348 - DNA, 15 bp, Homo sapiens
ttggtttttgttttt

SEQ ID NO: 904349 - DNA, 15 bp, Homo sapiens
tttggtttttgtttt

SEQ ID NO: 904350 - DNA, 15 bp, Homo sapiens
ttttggtttttgttt

SEQ ID NO: 904351 - DNA, 15 bp, Homo sapiens
tttttggtttttgtt

SEQ ID NO: 904352 - DNA, 15 bp, Homo sapiens
gtttttggtttttgt

SEQ ID NO: 904353 - DNA, 15 bp, Homo sapiens
agtttttggtttttg

SEQ ID NO: 904354 - DNA, 15 bp, Homo sapiens
tagtttttggttttt

SEQ ID NO: 904355 - DNA, 15 bp, Homo sapiens
atagtttttggtttt

SEQ ID NO: 904356 - DNA, 15 bp, Homo sapiens
aatagtttttggttt

SEQ ID NO: 904357 - DNA, 15 bp, Homo sapiens
aaatagtttttggtt

SEQ ID NO: 904358 - DNA, 15 bp, Homo sapiens
taaatagtttttggt

SEQ ID NO: 904359 - DNA, 15 bp, Homo sapiens
ataaatagtttttgg

SEQ ID NO: 904360 - DNA, 15 bp, Homo sapiens
aataaatagtttttg

SEQ ID NO: 904361 - DNA, 15 bp, Homo sapiens
gaataaatagttttt

SEQ ID NO: 904362 - DNA, 15 bp, Homo sapiens
tgaataaatagtttt

SEQ ID NO: 904363 - DNA, 15 bp, Homo sapiens
ctgaataaatagttt

SEQ ID NO: 904364 - DNA, 15 bp, Homo sapiens
gctgaataaatagtt

SEQ ID NO: 904365 - DNA, 15 bp, Homo sapiens
tgctgaataaatagt

SEQ ID NO: 904366 - DNA, 15 bp, Homo sapiens
ttgctgaataaatag

SEQ ID NO: 904367 - DNA, 15 bp, Homo sapiens
tttgctgaataaata

SEQ ID NO: 904368 - DNA, 15 bp, Homo sapiens
atttgctgaataaat

SEQ ID NO: 904369 - DNA, 15 bp, Homo sapiens
tatttgctgaataaa

SEQ ID NO: 904370 - DNA, 15 bp, Homo sapiens
atatttgctgaataa

SEQ ID NO: 904371 - DNA, 15 bp, Homo sapiens
aatatttgctgaata

SEQ ID NO: 904372 - DNA, 15 bp, Homo sapiens
aaatatttgctgaat

SEQ ID NO: 904373 - DNA, 15 bp, Homo sapiens
taaatatttgctgaa

SEQ ID NO: 904374 - DNA, 15 bp, Homo sapiens
gtaaatatttgctga

SEQ ID NO: 904375 - DNA, 15 bp, Homo sapiens
agtaaatatttgctg

SEQ ID NO: 904376 - DNA, 15 bp, Homo sapiens
cagtaaatatttgct

SEQ ID NO: 904377 - DNA, 15 bp, Homo sapiens
tcagtaaatatttgc

SEQ ID NO: 904378 - DNA, 15 bp, Homo sapiens
ttcagtaaatatttg

SEQ ID NO: 904379 - DNA, 15 bp, Homo sapiens
gttcagtaaatattt

SEQ ID NO: 904380 - DNA, 15 bp, Homo sapiens
cgttcagtaaatatt

SEQ ID NO: 904381 - DNA, 15 bp, Homo sapiens
acgttcagtaaatat

SEQ ID NO: 904382 - DNA, 15 bp, Homo sapiens
gacgttcagtaaata

SEQ ID NO: 904383 - DNA, 15 bp, Homo sapiens
agacgttcagtaaat

SEQ ID NO: 904384 - DNA, 15 bp, Homo sapiens
gagacgttcagtaaa

SEQ ID NO: 904385 - DNA, 15 bp, Homo sapiens
ggagacgttcagtaa

SEQ ID NO: 904386 - DNA, 15 bp, Homo sapiens
tggagacgttcagta

SEQ ID NO: 904387 - DNA, 15 bp, Homo sapiens
atggagacgttcagt

SEQ ID NO: 904388 - DNA, 15 bp, Homo sapiens
catggagacgttcag

SEQ ID NO: 904389 - DNA, 15 bp, Homo sapiens
acatggagacgttca

SEQ ID NO: 904390 - DNA, 15 bp, Homo sapiens
cacatggagacgttc

SEQ ID NO: 904391 - DNA, 15 bp, Homo sapiens
gcacatggagacgtt

SEQ ID NO: 904392 - DNA, 15 bp, Homo sapiens
ggcacatggagacgt

SEQ ID NO: 904393 - DNA, 15 bp, Homo sapiens
tggcacatggagacg

SEQ ID NO: 904394 - DNA, 15 bp, Homo sapiens
ctggcacatggagac

SEQ ID NO: 904395 - DNA, 15 bp, Homo sapiens
gctggcacatggaga

SEQ ID NO: 904396 - DNA, 15 bp, Homo sapiens
ggctggcacatggag

SEQ ID NO: 904397 - DNA, 15 bp, Homo sapiens
tggctggcacatgga

SEQ ID NO: 904398 - DNA, 15 bp, Homo sapiens
atggctggcacatgg

SEQ ID NO: 904399 - DNA, 15 bp, Homo sapiens
aatggctggcacatg

SEQ ID NO: 904400 - DNA, 15 bp, Homo sapiens
caatggctggcacat

SEQ ID NO: 904401 - DNA, 15 bp, Homo sapiens
gcaatggctggcaca

SEQ ID NO: 904402 - DNA, 15 bp, Homo sapiens
agcaatggctggcac

SEQ ID NO: 904403 - DNA, 15 bp, Homo sapiens
cagcaatggctggca

SEQ ID NO: 904404 - DNA, 15 bp, Homo sapiens
ccagcaatggctggc

SEQ ID NO: 904405 - DNA, 15 bp, Homo sapiens
gccagcaatggctgg

SEQ ID NO: 904406 - DNA, 15 bp, Homo sapiens
tgccagcaatggctg

SEQ ID NO: 904407 - DNA, 15 bp, Homo sapiens
gtgccagcaatggct

SEQ ID NO: 904408 - DNA, 15 bp, Homo sapiens
agtgccagcaatggc

SEQ ID NO: 904409 - DNA, 15 bp, Homo sapiens
tagtgccagcaatgg

SEQ ID NO: 904410 - DNA, 15 bp, Homo sapiens
ttagtgccagcaatg

SEQ ID NO: 904411 - DNA, 15 bp, Homo sapiens
cttagtgccagcaat

SEQ ID NO: 904412 - DNA, 15 bp, Homo sapiens
ccttagtgccagcaa

SEQ ID NO: 904413 - DNA, 15 bp, Homo sapiens
tccttagtgccagca

SEQ ID NO: 904414 - DNA, 15 bp, Homo sapiens
atccttagtgccagc

SEQ ID NO: 904415 - DNA, 15 bp, Homo sapiens
gatccttagtgccag

SEQ ID NO: 904416 - DNA, 15 bp, Homo sapiens
tgatccttagtgcca

SEQ ID NO: 904417 - DNA, 15 bp, Homo sapiens
atgatccttagtgcc

SEQ ID NO: 904418 - DNA, 15 bp, Homo sapiens
tatgatccttagtgc

SEQ ID NO: 904419 - DNA, 15 bp, Homo sapiens
ttatgatccttagtg

SEQ ID NO: 904420 - DNA, 15 bp, Homo sapiens
gttatgatccttagt

SEQ ID NO: 904421 - DNA, 15 bp, Homo sapiens
tgttatgatccttag

SEQ ID NO: 904422 - DNA, 15 bp, Homo sapiens
ttgttatgatcctta

SEQ ID NO: 904423 - DNA, 15 bp, Homo sapiens
tttgttatgatcctt

SEQ ID NO: 904424 - DNA, 15 bp, Homo sapiens
atttgttatgatcct

SEQ ID NO: 904425 - DNA, 15 bp, Homo sapiens
tatttgttatgatcc

SEQ ID NO: 904426 - DNA, 15 bp, Homo sapiens
ttatttgttatgatc

SEQ ID NO: 904427 - DNA, 15 bp, Homo sapiens
tttatttgttatgat

SEQ ID NO: 904428 - DNA, 15 bp, Homo sapiens
ttttatttgttatga

SEQ ID NO: 904429 - DNA, 15 bp, Homo sapiens
gttttatttgttatg

SEQ ID NO: 904430 - DNA, 15 bp, Homo sapiens
tgttttatttgttat

SEQ ID NO: 904431 - DNA, 15 bp, Homo sapiens
ctgttttatttgtta

SEQ ID NO: 904432 - DNA, 15 bp, Homo sapiens
tctgttttatttgtt

SEQ ID NO: 904433 - DNA, 15 bp, Homo sapiens
ttctgttttatttgt

SEQ ID NO: 904434 - DNA, 15 bp, Homo sapiens
attctgttttatttg

SEQ ID NO: 904435 - DNA, 15 bp, Homo sapiens
aattctgttttattt

SEQ ID NO: 904436 - DNA, 15 bp, Homo sapiens
aaattctgttttatt

SEQ ID NO: 904437 - DNA, 15 bp, Homo sapiens
aaaattctgttttat

SEQ ID NO: 904438 - DNA, 15 bp, Homo sapiens
aaaaattctgtttta

SEQ ID NO: 904439 - DNA, 15 bp, Homo sapiens
taaaaattctgtttt

SEQ ID NO: 904440 - DNA, 15 bp, Homo sapiens
ataaaaattctgttt

SEQ ID NO: 904441 - DNA, 15 bp, Homo sapiens
aataaaaattctgtt

SEQ ID NO: 904442 - DNA, 15 bp, Homo sapiens
aaataaaaattctgt

SEQ ID NO: 904443 - DNA, 15 bp, Homo sapiens
aaaataaaaattctg

SEQ ID NO: 904444 - DNA, 15 bp, Homo sapiens
gaaaataaaaattct

SEQ ID NO: 904445 - DNA, 15 bp, Homo sapiens
tgaaaataaaaattc

SEQ ID NO: 904446 - DNA, 15 bp, Homo sapiens
ctgaaaataaaaatt

SEQ ID NO: 904447 - DNA, 15 bp, Homo sapiens
actgaaaataaaaat

SEQ ID NO: 904448 - DNA, 15 bp, Homo sapiens
cactgaaaataaaaa

SEQ ID NO: 904449 - DNA, 15 bp, Homo sapiens
gcactgaaaataaaa

SEQ ID NO: 904450 - DNA, 15 bp, Homo sapiens
agcactgaaaataaa

SEQ ID NO: 904451 - DNA, 15 bp, Homo sapiens
aagcactgaaaataa

SEQ ID NO: 904452 - DNA, 15 bp, Homo sapiens
taagcactgaaaata

SEQ ID NO: 904453 - DNA, 15 bp, Homo sapiens
gtaagcactgaaaat

SEQ ID NO: 904454 - DNA, 15 bp, Homo sapiens
tgtaagcactgaaaa

SEQ ID NO: 904455 - DNA, 15 bp, Homo sapiens
atgtaagcactgaaa

SEQ ID NO: 904456 - DNA, 15 bp, Homo sapiens
aatgtaagcactgaa

SEQ ID NO: 904457 - DNA, 15 bp, Homo sapiens
gaatgtaagcactga

SEQ ID NO: 904458 - DNA, 15 bp, Homo sapiens
ggaatgtaagcactg

SEQ ID NO: 904459 - DNA, 15 bp, Homo sapiens
tggaatgtaagcact

SEQ ID NO: 904460 - DNA, 15 bp, Homo sapiens
ctggaatgtaagcac

SEQ ID NO: 904461 - DNA, 15 bp, Homo sapiens
actggaatgtaagca

SEQ ID NO: 904462 - DNA, 15 bp, Homo sapiens
tactggaatgtaagc

SEQ ID NO: 904463 - DNA, 15 bp, Homo sapiens
atactggaatgtaag

SEQ ID NO: 904464 - DNA, 15 bp, Homo sapiens
tatactggaatgtaa

SEQ ID NO: 904465 - DNA, 15 bp, Homo sapiens
ttatactggaatgta

SEQ ID NO: 904466 - DNA, 15 bp, Homo sapiens
tttatactggaatgt

SEQ ID NO: 904467 - DNA, 15 bp, Homo sapiens
ctttatactggaatg

SEQ ID NO: 904468 - DNA, 15 bp, Homo sapiens
cctttatactggaat

SEQ ID NO: 904469 - DNA, 15 bp, Homo sapiens
gcctttatactggaa

SEQ ID NO: 904470 - DNA, 15 bp, Homo sapiens
tgcctttatactgga

SEQ ID NO: 904471 - DNA, 15 bp, Homo sapiens
atgcctttatactgg

SEQ ID NO: 904472 - DNA, 15 bp, Homo sapiens
tatgcctttatactg

SEQ ID NO: 904473 - DNA, 15 bp, Homo sapiens
atatgcctttatact

SEQ ID NO: 904474 - DNA, 15 bp, Homo sapiens
aatatgcctttatac

SEQ ID NO: 904475 - DNA, 15 bp, Homo sapiens
caatatgcctttata

SEQ ID NO: 904476 - DNA, 15 bp, Homo sapiens
tcaatatgcctttat

SEQ ID NO: 904477 - DNA, 15 bp, Homo sapiens
ttcaatatgccttta

SEQ ID NO: 904478 - DNA, 15 bp, Homo sapiens
tttcaatatgccttt

SEQ ID NO: 904479 - DNA, 15 bp, Homo sapiens
atttcaatatgcctt

SEQ ID NO: 904480 - DNA, 15 bp, Homo sapiens
tatttcaatatgcct

SEQ ID NO: 904481 - DNA, 15 bp, Homo sapiens
ttatttcaatatgcc

SEQ ID NO: 904482 - DNA, 15 bp, Homo sapiens
gttatttcaatatgc

SEQ ID NO: 904483 - DNA, 15 bp, Homo sapiens
ggttatttcaatatg

SEQ ID NO: 904484 - DNA, 15 bp, Homo sapiens
aggttatttcaatat

SEQ ID NO: 904485 - DNA, 15 bp, Homo sapiens
aaggttatttcaata

SEQ ID NO: 904486 - DNA, 15 bp, Homo sapiens
aaaggttatttcaat

SEQ ID NO: 904487 - DNA, 15 bp, Homo sapiens
aaaaggttatttcaa

SEQ ID NO: 904488 - DNA, 15 bp, Homo sapiens
aaaaaggttatttca

SEQ ID NO: 904489 - DNA, 15 bp, Homo sapiens
aaaaaaggttatttc

SEQ ID NO: 904490 - DNA, 15 bp, Homo sapiens
aaaaaaaggttattt

SEQ ID NO: 904491 - DNA, 15 bp, Homo sapiens
taaaaaaaggttatt

SEQ ID NO: 904492 - DNA, 15 bp, Homo sapiens
ttaaaaaaaggttat

SEQ ID NO: 904493 - DNA, 15 bp, Homo sapiens
attaaaaaaaggtta

SEQ ID NO: 904494 - DNA, 15 bp, Homo sapiens
cattaaaaaaaggtt

SEQ ID NO: 904495 - DNA, 15 bp, Homo sapiens
acattaaaaaaaggt

SEQ ID NO: 904496 - DNA, 15 bp, Homo sapiens
aacattaaaaaaagg

SEQ ID NO: 904497 - DNA, 15 bp, Homo sapiens
aaacattaaaaaaag

SEQ ID NO: 904498 - DNA, 15 bp, Homo sapiens
taaacattaaaaaaa

SEQ ID NO: 904499 - DNA, 15 bp, Homo sapiens
ctaaacattaaaaaa

SEQ ID NO: 904500 - DNA, 15 bp, Homo sapiens
tctaaacattaaaaa

SEQ ID NO: 904501 - DNA, 15 bp, Homo sapiens
atctaaacattaaaa

SEQ ID NO: 904502 - DNA, 15 bp, Homo sapiens
catctaaacattaaa

SEQ ID NO: 904503 - DNA, 15 bp, Homo sapiens
tcatctaaacattaa

SEQ ID NO: 904504 - DNA, 15 bp, Homo sapiens
ttcatctaaacatta

SEQ ID NO: 904505 - DNA, 15 bp, Homo sapiens
tttcatctaaacatt

SEQ ID NO: 904506 - DNA, 15 bp, Homo sapiens
ctttcatctaaacat

SEQ ID NO: 904507 - DNA, 15 bp, Homo sapiens
gctttcatctaaaca

SEQ ID NO: 904508 - DNA, 15 bp, Homo sapiens
agctttcatctaaac

SEQ ID NO: 904509 - DNA, 15 bp, Homo sapiens
gagctttcatctaaa

SEQ ID NO: 904510 - DNA, 15 bp, Homo sapiens
tgagctttcatctaa

SEQ ID NO: 904511 - DNA, 15 bp, Homo sapiens
ttgagctttcatcta

SEQ ID NO: 904512 - DNA, 15 bp, Homo sapiens
cttgagctttcatct

SEQ ID NO: 904513 - DNA, 15 bp, Homo sapiens
tcttgagctttcatc

SEQ ID NO: 904514 - DNA, 15 bp, Homo sapiens
ttcttgagctttcat

SEQ ID NO: 904515 - DNA, 15 bp, Homo sapiens
cttcttgagctttca

SEQ ID NO: 904516 - DNA, 15 bp, Homo sapiens
acttcttgagctttc

SEQ ID NO: 904517 - DNA, 15 bp, Homo sapiens
cacttcttgagcttt

SEQ ID NO: 904518 - DNA, 15 bp, Homo sapiens
ccacttcttgagctt

SEQ ID NO: 904519 - DNA, 15 bp, Homo sapiens
tccacttcttgagct

SEQ ID NO: 904520 - DNA, 15 bp, Homo sapiens
ctccacttcttgagc

SEQ ID NO: 904521 - DNA, 15 bp, Homo sapiens
gctccacttcttgag

SEQ ID NO: 904522 - DNA, 15 bp, Homo sapiens
agctccacttcttga

SEQ ID NO: 904523 - DNA, 15 bp, Homo sapiens
cagctccacttcttg

SEQ ID NO: 904524 - DNA, 15 bp, Homo sapiens
ccagctccacttctt

SEQ ID NO: 904525 - DNA, 15 bp, Homo sapiens
gccagctccacttct

SEQ ID NO: 904526 - DNA, 15 bp, Homo sapiens
agccagctccacttc

SEQ ID NO: 904527 - DNA, 15 bp, Homo sapiens
aagccagctccactt

SEQ ID NO: 904528 - DNA, 15 bp, Homo sapiens
aaagccagctccact

SEQ ID NO: 904529 - DNA, 15 bp, Homo sapiens
caaagccagctccac

SEQ ID NO: 904530 - DNA, 15 bp, Homo sapiens
ccaaagccagctcca

SEQ ID NO: 904531 - DNA, 15 bp, Homo sapiens
tccaaagccagctcc

SEQ ID NO: 904532 - DNA, 15 bp, Homo sapiens
ttccaaagccagctc

SEQ ID NO: 904533 - DNA, 15 bp, Homo sapiens
cttccaaagccagct

SEQ ID NO: 904534 - DNA, 15 bp, Homo sapiens
tcttccaaagccagc

SEQ ID NO: 904535 - DNA, 15 bp, Homo sapiens
ttcttccaaagccag

SEQ ID NO: 904536 - DNA, 15 bp, Homo sapiens
cttcttccaaagcca

SEQ ID NO: 904537 - DNA, 15 bp, Homo sapiens
acttcttccaaagcc

SEQ ID NO: 904538 - DNA, 15 bp, Homo sapiens
tacttcttccaaagc

SEQ ID NO: 904539 - DNA, 15 bp, Homo sapiens
ctacttcttccaaag

SEQ ID NO: 904540 - DNA, 15 bp, Homo sapiens
tctacttcttccaaa

SEQ ID NO: 904541 - DNA, 15 bp, Homo sapiens
ttctacttcttccaa

SEQ ID NO: 904542 - DNA, 15 bp, Homo sapiens
tttctacttcttcca

SEQ ID NO: 904543 - DNA, 15 bp, Homo sapiens
ttttctacttcttcc

SEQ ID NO: 904544 - DNA, 15 bp, Homo sapiens
tttttctacttcttc

SEQ ID NO: 904545 - DNA, 15 bp, Homo sapiens
ctttttctacttctt

SEQ ID NO: 904546 - DNA, 15 bp, Homo sapiens
gctttttctacttct

SEQ ID NO: 904547 - DNA, 15 bp, Homo sapiens
agctttttctacttc

SEQ ID NO: 904548 - DNA, 15 bp, Homo sapiens
cagctttttctactt

SEQ ID NO: 904549 - DNA, 15 bp, Homo sapiens
ccagctttttctact

SEQ ID NO: 904550 - DNA, 15 bp, Homo sapiens
tccagctttttctac

SEQ ID NO: 904551 - DNA, 15 bp, Homo sapiens
ctccagctttttcta

SEQ ID NO: 904552 - DNA, 15 bp, Homo sapiens
tctccagctttttct

SEQ ID NO: 904553 - DNA, 15 bp, Homo sapiens
ttctccagctttttc

SEQ ID NO: 904554 - DNA, 15 bp, Homo sapiens
cttctccagcttttt

SEQ ID NO: 904555 - DNA, 15 bp, Homo sapiens
tcttctccagctttt

SEQ ID NO: 904556 - DNA, 15 bp, Homo sapiens
ttcttctccagcttt

SEQ ID NO: 904557 - DNA, 15 bp, Homo sapiens
gttcttctccagctt

SEQ ID NO: 904558 - DNA, 15 bp, Homo sapiens
tgttcttctccagct

SEQ ID NO: 904559 - DNA, 15 bp, Homo sapiens
ttgttcttctccagc

SEQ ID NO: 904560 - DNA, 15 bp, Homo sapiens
cttgttcttctccag

SEQ ID NO: 904561 - DNA, 15 bp, Homo sapiens
gcttgttcttctcca

SEQ ID NO: 904562 - DNA, 15 bp, Homo sapiens
tgcttgttcttctcc

SEQ ID NO: 904563 - DNA, 15 bp, Homo sapiens
ttgcttgttcttctc

SEQ ID NO: 904564 - DNA, 15 bp, Homo sapiens
tttgcttgttcttct

SEQ ID NO: 904565 - DNA, 15 bp, Homo sapiens
ttttgcttgttcttc

SEQ ID NO: 904566 - DNA, 15 bp, Homo sapiens
attttgcttgttctt

SEQ ID NO: 904567 - DNA, 15 bp, Homo sapiens
aattttgcttgttct

SEQ ID NO: 904568 - DNA, 15 bp, Homo sapiens
aaattttgcttgttc

SEQ ID NO: 904569 - DNA, 15 bp, Homo sapiens
caaattttgcttgtt

SEQ ID NO: 904570 - DNA, 15 bp, Homo sapiens
ccaaattttgcttgt

SEQ ID NO: 904571 - DNA, 15 bp, Homo sapiens
accaaattttgcttg

SEQ ID NO: 904572 - DNA, 15 bp, Homo sapiens
taccaaattttgctt

SEQ ID NO: 904573 - DNA, 15 bp, Homo sapiens
ttaccaaattttgct

SEQ ID NO: 904574 - DNA, 15 bp, Homo sapiens
cttaccaaattttgc

SEQ ID NO: 904575 - DNA, 15 bp, Homo sapiens
gcttaccaaattttg

SEQ ID NO: 904576 - DNA, 15 bp, Homo sapiens
tgcttaccaaatttt

SEQ ID NO: 904577 - DNA, 15 bp, Homo sapiens
gtgcttaccaaattt

SEQ ID NO: 904578 - DNA, 15 bp, Homo sapiens
ggtgcttaccaaatt

SEQ ID NO: 904579 - DNA, 15 bp, Homo sapiens
aggtgcttaccaaat

SEQ ID NO: 904580 - DNA, 15 bp, Homo sapiens
aaggtgcttaccaaa

SEQ ID NO: 904581 - DNA, 15 bp, Homo sapiens
caaggtgcttaccaa

SEQ ID NO: 904582 - DNA, 15 bp, Homo sapiens
ccaaggtgcttacca

SEQ ID NO: 904583 - DNA, 15 bp, Homo sapiens
tccaaggtgcttacc

SEQ ID NO: 904584 - DNA, 15 bp, Homo sapiens
ttccaaggtgcttac

SEQ ID NO: 904585 - DNA, 15 bp, Homo sapiens
tttccaaggtgctta

SEQ ID NO: 904586 - DNA, 15 bp, Homo sapiens
ttttccaaggtgctt

SEQ ID NO: 904587 - DNA, 15 bp, Homo sapiens
tttttccaaggtgct

SEQ ID NO: 904588 - DNA, 15 bp, Homo sapiens
ctttttccaaggtgc

SEQ ID NO: 904589 - DNA, 15 bp, Homo sapiens
actttttccaaggtg

SEQ ID NO: 904590 - DNA, 15 bp, Homo sapiens
aactttttccaaggt

SEQ ID NO: 904591 - DNA, 15 bp, Homo sapiens
aaactttttccaagg

SEQ ID NO: 904592 - DNA, 15 bp, Homo sapiens
taaactttttccaag

SEQ ID NO: 904593 - DNA, 15 bp, Homo sapiens
ataaactttttccaa

SEQ ID NO: 904594 - DNA, 15 bp, Homo sapiens
aataaactttttcca

SEQ ID NO: 904595 - DNA, 15 bp, Homo sapiens
taataaactttttcc

SEQ ID NO: 904596 - DNA, 15 bp, Homo sapiens
ataataaactttttc

SEQ ID NO: 904597 - DNA, 15 bp, Homo sapiens
cataataaacttttt

SEQ ID NO: 904598 - DNA, 15 bp, Homo sapiens
ccataataaactttt

SEQ ID NO: 904599 - DNA, 15 bp, Homo sapiens
accataataaacttt

SEQ ID NO: 904600 - DNA, 15 bp, Homo sapiens
taccataataaactt

SEQ ID NO: 904601 - DNA, 15 bp, Homo sapiens
ataccataataaact

SEQ ID NO: 904602 - DNA, 15 bp, Homo sapiens
aataccataataaac

SEQ ID NO: 904603 - DNA, 15 bp, Homo sapiens
taataccataataaa

SEQ ID NO: 904604 - DNA, 15 bp, Homo sapiens
ttaataccataataa

SEQ ID NO: 904605 - DNA, 15 bp, Homo sapiens
tttaataccataata

SEQ ID NO: 904606 - DNA, 15 bp, Homo sapiens
atttaataccataat

SEQ ID NO: 904607 - DNA, 15 bp, Homo sapiens
tatttaataccataa

SEQ ID NO: 904608 - DNA, 15 bp, Homo sapiens
ttatttaataccata

SEQ ID NO: 904609 - DNA, 15 bp, Homo sapiens
attatttaataccat

SEQ ID NO: 904610 - DNA, 15 bp, Homo sapiens
cattatttaatacca

SEQ ID NO: 904611 - DNA, 15 bp, Homo sapiens
tcattatttaatacc

SEQ ID NO: 904612 - DNA, 15 bp, Homo sapiens
ttcattatttaatac

SEQ ID NO: 904613 - DNA, 15 bp, Homo sapiens
attcattatttaata

SEQ ID NO: 904614 - DNA, 15 bp, Homo sapiens
aattcattatttaat

SEQ ID NO: 904615 - DNA, 15 bp, Homo sapiens
gaattcattatttaa

SEQ ID NO: 904616 - DNA, 15 bp, Homo sapiens
ggaattcattattta

SEQ ID NO: 904617 - DNA, 15 bp, Homo sapiens
tggaattcattattt

SEQ ID NO: 904618 - DNA, 15 bp, Homo sapiens
atggaattcattatt

SEQ ID NO: 904619 - DNA, 15 bp, Homo sapiens
aatggaattcattat

SEQ ID NO: 904620 - DNA, 15 bp, Homo sapiens
aaatggaattcatta

SEQ ID NO: 904621 - DNA, 15 bp, Homo sapiens
caaatggaattcatt

SEQ ID NO: 904622 - DNA, 15 bp, Homo sapiens
acaaatggaattcat

SEQ ID NO: 904623 - DNA, 15 bp, Homo sapiens
aacaaatggaattca

SEQ ID NO: 904624 - DNA, 15 bp, Homo sapiens
gaacaaatggaattc

SEQ ID NO: 904625 - DNA, 15 bp, Homo sapiens
tgaacaaatggaatt

SEQ ID NO: 904626 - DNA, 15 bp, Homo sapiens
atgaacaaatggaat

SEQ ID NO: 904627 - DNA, 15 bp, Homo sapiens
aatgaacaaatggaa

SEQ ID NO: 904628 - DNA, 15 bp, Homo sapiens
taatgaacaaatgga

SEQ ID NO: 904629 - DNA, 15 bp, Homo sapiens
ttaatgaacaaatgg

SEQ ID NO: 904630 - DNA, 15 bp, Homo sapiens
tttaatgaacaaatg

SEQ ID NO: 904631 - DNA, 15 bp, Homo sapiens
gtttaatgaacaaat

SEQ ID NO: 904632 - DNA, 15 bp, Homo sapiens
agtttaatgaacaaa

SEQ ID NO: 904633 - DNA, 15 bp, Homo sapiens
cagtttaatgaacaa

SEQ ID NO: 904634 - DNA, 15 bp, Homo sapiens
acagtttaatgaaca

SEQ ID NO: 904635 - DNA, 15 bp, Homo sapiens
tacagtttaatgaac

SEQ ID NO: 904636 - DNA, 15 bp, Homo sapiens
ctacagtttaatgaa

SEQ ID NO: 904637 - DNA, 15 bp, Homo sapiens
tctacagtttaatga

SEQ ID NO: 904638 - DNA, 15 bp, Homo sapiens
ttctacagtttaatg

SEQ ID NO: 904639 - DNA, 15 bp, Homo sapiens
tttctacagtttaat

SEQ ID NO: 904640 - DNA, 15 bp, Homo sapiens
ttttctacagtttaa

SEQ ID NO: 904641 - DNA, 15 bp, Homo sapiens
attttctacagttta

SEQ ID NO: 904642 - DNA, 15 bp, Homo sapiens
aattttctacagttt

SEQ ID NO: 904643 - DNA, 15 bp, Homo sapiens
taattttctacagtt

SEQ ID NO: 904644 - DNA, 15 bp, Homo sapiens
ttaattttctacagt

SEQ ID NO: 904645 - DNA, 15 bp, Homo sapiens
tttaattttctacag

SEQ ID NO: 904646 - DNA, 15 bp, Homo sapiens
atttaattttctaca

SEQ ID NO: 904647 - DNA, 15 bp, Homo sapiens
aatttaattttctac

SEQ ID NO: 904648 - DNA, 15 bp, Homo sapiens
taatttaattttcta

SEQ ID NO: 904649 - DNA, 15 bp, Homo sapiens
ataatttaattttct

SEQ ID NO: 904650 - DNA, 15 bp, Homo sapiens
tataatttaattttc

SEQ ID NO: 904651 - DNA, 15 bp, Homo sapiens
atataatttaatttt

SEQ ID NO: 904652 - DNA, 15 bp, Homo sapiens
aatataatttaattt

SEQ ID NO: 904653 - DNA, 15 bp, Homo sapiens
gaatataatttaatt

SEQ ID NO: 904654 - DNA, 15 bp, Homo sapiens
agaatataatttaat

SEQ ID NO: 904655 - DNA, 15 bp, Homo sapiens
tagaatataatttaa

SEQ ID NO: 904656 - DNA, 15 bp, Homo sapiens
atagaatataattta

SEQ ID NO: 904657 - DNA, 15 bp, Homo sapiens
tatagaatataattt

SEQ ID NO: 904658 - DNA, 15 bp, Homo sapiens
ttatagaatataatt

SEQ ID NO: 904659 - DNA, 15 bp, Homo sapiens
tttatagaatataat

SEQ ID NO: 904660 - DNA, 15 bp, Homo sapiens
ttttatagaatataa

SEQ ID NO: 904661 - DNA, 15 bp, Homo sapiens
attttatagaatata

SEQ ID NO: 904662 - DNA, 15 bp, Homo sapiens
tattttatagaatat

SEQ ID NO: 904663 - DNA, 15 bp, Homo sapiens
atattttatagaata

SEQ ID NO: 904664 - DNA, 15 bp, Homo sapiens
tatattttatagaat

SEQ ID NO: 904665 - DNA, 15 bp, Homo sapiens
atatattttatagaa

SEQ ID NO: 904666 - DNA, 15 bp, Homo sapiens
tatatattttataga

SEQ ID NO: 904667 - DNA, 15 bp, Homo sapiens
atatatattttatag

SEQ ID NO: 904668 - DNA, 15 bp, Homo sapiens
tatatatattttata

SEQ ID NO: 904669 - DNA, 15 bp, Homo sapiens
atatatatattttat

SEQ ID NO: 904670 - DNA, 15 bp, Homo sapiens
aatatatatatttta

SEQ ID NO: 904671 - DNA, 15 bp, Homo sapiens
gaatatatatatttt

SEQ ID NO: 904672 - DNA, 15 bp, Homo sapiens
tgaatatatatattt

SEQ ID NO: 904673 - DNA, 15 bp, Homo sapiens
ctgaatatatatatt

SEQ ID NO: 904674 - DNA, 15 bp, Homo sapiens
actgaatatatatat

SEQ ID NO: 904675 - DNA, 15 bp, Homo sapiens
aactgaatatatata

SEQ ID NO: 904676 - DNA, 15 bp, Homo sapiens
aaactgaatatatat

SEQ ID NO: 904677 - DNA, 15 bp, Homo sapiens
taaactgaatatata

SEQ ID NO: 904678 - DNA, 15 bp, Homo sapiens
ataaactgaatatat

SEQ ID NO: 904679 - DNA, 15 bp, Homo sapiens
aataaactgaatata

SEQ ID NO: 904680 - DNA, 15 bp, Homo sapiens
aaataaactgaatat

SEQ ID NO: 904681 - DNA, 15 bp, Homo sapiens
aaaataaactgaata

SEQ ID NO: 904682 - DNA, 15 bp, Homo sapiens
aaaaataaactgaat

SEQ ID NO: 904683 - DNA, 15 bp, Homo sapiens
taaaaataaactgaa

SEQ ID NO: 904684 - DNA, 15 bp, Homo sapiens
ttaaaaataaactga

SEQ ID NO: 904685 - DNA, 15 bp, Homo sapiens
attaaaaataaactg

SEQ ID NO: 904686 - DNA, 15 bp, Homo sapiens
tattaaaaataaact

SEQ ID NO: 904687 - DNA, 15 bp, Homo sapiens
atattaaaaataaac

SEQ ID NO: 904688 - DNA, 15 bp, Homo sapiens
tatattaaaaataaa

SEQ ID NO: 904689 - DNA, 15 bp, Homo sapiens
atatattaaaaataa

SEQ ID NO: 904690 - DNA, 15 bp, Homo sapiens
tatatattaaaaata

SEQ ID NO: 904691 - DNA, 15 bp, Homo sapiens
ttatatattaaaaat

SEQ ID NO: 904692 - DNA, 15 bp, Homo sapiens
gttatatattaaaaa

SEQ ID NO: 904693 - DNA, 15 bp, Homo sapiens
tgttatatattaaaa

SEQ ID NO: 904694 - DNA, 15 bp, Homo sapiens
atgttatatattaaa

SEQ ID NO: 904695 - DNA, 15 bp, Homo sapiens
aatgttatatattaa

SEQ ID NO: 904696 - DNA, 15 bp, Homo sapiens
aaatgttatatatta

SEQ ID NO: 904697 - DNA, 15 bp, Homo sapiens
taaatgttatatatt

SEQ ID NO: 904698 - DNA, 15 bp, Homo sapiens
ttaaatgttatatat

SEQ ID NO: 904699 - DNA, 15 bp, Homo sapiens
attaaatgttatata

SEQ ID NO: 904700 - DNA, 15 bp, Homo sapiens
attattaaatgttat

SEQ ID NO: 904701 - DNA, 15 bp, Homo sapiens
tattattaaatgtta

SEQ ID NO: 904702 - DNA, 15 bp, Homo sapiens
ttattattaaatgtt

SEQ ID NO: 904703 - DNA, 15 bp, Homo sapiens
tttattattaaatgt

SEQ ID NO: 904704 - DNA, 15 bp, Homo sapiens
atttattattaaatg

SEQ ID NO: 904705 - DNA, 15 bp, Homo sapiens
tatttattattaaat

SEQ ID NO: 904706 - DNA, 15 bp, Homo sapiens
atatttattattaaa

SEQ ID NO: 904707 - DNA, 15 bp, Homo sapiens
aatatttattattaa

SEQ ID NO: 904708 - DNA, 15 bp, Homo sapiens
aaatatttattatta

SEQ ID NO: 904709 - DNA, 15 bp, Homo sapiens
gaaatatttattatt

SEQ ID NO: 904710 - DNA, 15 bp, Homo sapiens
agaaatatttattat

SEQ ID NO: 904711 - DNA, 15 bp, Homo sapiens
tagaaatatttatta

SEQ ID NO: 904712 - DNA, 15 bp, Homo sapiens
ctagaaatatttatt

SEQ ID NO: 904713 - DNA, 15 bp, Homo sapiens
tctagaaatatttat

SEQ ID NO: 904714 - DNA, 15 bp, Homo sapiens
gtctagaaatattta

SEQ ID NO: 904715 - DNA, 15 bp, Homo sapiens
agtctagaaatattt

SEQ ID NO: 904716 - DNA, 15 bp, Homo sapiens
gagtctagaaatatt

SEQ ID NO: 904717 - DNA, 15 bp, Homo sapiens
ggagtctagaaatat

SEQ ID NO: 904718 - DNA, 15 bp, Homo sapiens
aggagtctagaaata

SEQ ID NO: 904719 - DNA, 15 bp, Homo sapiens
taggagtctagaaat

SEQ ID NO: 904720 - DNA, 15 bp, Homo sapiens
ataggagtctagaaa

SEQ ID NO: 904721 - DNA, 15 bp, Homo sapiens
aataggagtctagaa

SEQ ID NO: 904722 - DNA, 15 bp, Homo sapiens
aaataggagtctaga

SEQ ID NO: 904723 - DNA, 15 bp, Homo sapiens
aaaataggagtctag

SEQ ID NO: 904724 - DNA, 15 bp, Homo sapiens
taaaataggagtcta

SEQ ID NO: 904725 - DNA, 15 bp, Homo sapiens
ataaaataggagtct

SEQ ID NO: 904726 - DNA, 15 bp, Homo sapiens
cataaaataggagtc

SEQ ID NO: 904727 - DNA, 15 bp, Homo sapiens
ccataaaataggagt

SEQ ID NO: 904728 - DNA, 15 bp, Homo sapiens
tccataaaataggag

SEQ ID NO: 904729 - DNA, 15 bp, Homo sapiens
atccataaaatagga

SEQ ID NO: 904730 - DNA, 15 bp, Homo sapiens
gatccataaaatagg

SEQ ID NO: 904731 - DNA, 15 bp, Homo sapiens
agatccataaaatag

SEQ ID NO: 904732 - DNA, 15 bp, Homo sapiens
cagatccataaaata

SEQ ID NO: 904733 - DNA, 15 bp, Homo sapiens
gcagatccataaaat

SEQ ID NO: 904734 - DNA, 15 bp, Homo sapiens
ggcagatccataaaa

SEQ ID NO: 904735 - DNA, 15 bp, Homo sapiens
tggcagatccataaa

SEQ ID NO: 904736 - DNA, 15 bp, Homo sapiens
atggcagatccataa

SEQ ID NO: 904737 - DNA, 15 bp, Homo sapiens
tatggcagatccata

SEQ ID NO: 904738 - DNA, 15 bp, Homo sapiens
atatggcagatccat

SEQ ID NO: 904739 - DNA, 15 bp, Homo sapiens
tatatggcagatcca

SEQ ID NO: 904740 - DNA, 15 bp, Homo sapiens
ttatatggcagatcc

SEQ ID NO: 904741 - DNA, 15 bp, Homo sapiens
attatatggcagatc

SEQ ID NO: 904742 - DNA, 15 bp, Homo sapiens
tattatatggcagat

SEQ ID NO: 904743 - DNA, 15 bp, Homo sapiens
gtattatatggcaga

SEQ ID NO: 904744 - DNA, 15 bp, Homo sapiens
agtattatatggcag

SEQ ID NO: 904745 - DNA, 15 bp, Homo sapiens
aagtattatatggca

SEQ ID NO: 904746 - DNA, 15 bp, Homo sapiens
aaagtattatatggc

SEQ ID NO: 904747 - DNA, 15 bp, Homo sapiens
aaaagtattatatgg

SEQ ID NO: 904748 - DNA, 15 bp, Homo sapiens
aaaaagtattatatg

SEQ ID NO: 904749 - DNA, 15 bp, Homo sapiens
caaaaagtattatat

SEQ ID NO: 904750 - DNA, 15 bp, Homo sapiens
acaaaaagtattata

SEQ ID NO: 904751 - DNA, 15 bp, Homo sapiens
aacaaaaagtattat

SEQ ID NO: 904752 - DNA, 15 bp, Homo sapiens
taacaaaaagtatta

SEQ ID NO: 904753 - DNA, 15 bp, Homo sapiens
gtaacaaaaagtatt

SEQ ID NO: 904754 - DNA, 15 bp, Homo sapiens
ggtaacaaaaagtat

SEQ ID NO: 904755 - DNA, 15 bp, Homo sapiens
aggtaacaaaaagta

SEQ ID NO: 904756 - DNA, 15 bp, Homo sapiens
aaggtaacaaaaagt

SEQ ID NO: 904757 - DNA, 15 bp, Homo sapiens
taaggtaacaaaaag

SEQ ID NO: 904758 - DNA, 15 bp, Homo sapiens
ataaggtaacaaaaa

SEQ ID NO: 904759 - DNA, 15 bp, Homo sapiens
tataaggtaacaaaa

SEQ ID NO: 904760 - DNA, 15 bp, Homo sapiens
ttataaggtaacaaa

SEQ ID NO: 904761 - DNA, 15 bp, Homo sapiens
attataaggtaacaa

SEQ ID NO: 904762 - DNA, 15 bp, Homo sapiens
gattataaggtaaca

SEQ ID NO: 904763 - DNA, 15 bp, Homo sapiens
tgattataaggtaac

SEQ ID NO: 904764 - DNA, 15 bp, Homo sapiens
atgattataaggtaa

SEQ ID NO: 904765 - DNA, 15 bp, Homo sapiens
catgattataaggta

SEQ ID NO: 904766 - DNA, 15 bp, Homo sapiens
tcatgattataaggt

SEQ ID NO: 904767 - DNA, 15 bp, Homo sapiens
atcatgattataagg

SEQ ID NO: 904768 - DNA, 15 bp, Homo sapiens
catcatgattataag

SEQ ID NO: 904769 - DNA, 15 bp, Homo sapiens
ccatcatgattataa

SEQ ID NO: 904770 - DNA, 15 bp, Homo sapiens
tccatcatgattata

SEQ ID NO: 904771 - DNA, 15 bp, Homo sapiens
gtccatcatgattat

SEQ ID NO: 904772 - DNA, 15 bp, Homo sapiens
agtccatcatgatta

SEQ ID NO: 904773 - DNA, 15 bp, Homo sapiens
gagtccatcatgatt

SEQ ID NO: 904774 - DNA, 15 bp, Homo sapiens
agagtccatcatgat

SEQ ID NO: 904775 - DNA, 15 bp, Homo sapiens
aagagtccatcatga

SEQ ID NO: 904776 - DNA, 15 bp, Homo sapiens
aaagagtccatcatg

SEQ ID NO: 904777 - DNA, 15 bp, Homo sapiens
aaaagagtccatcat

SEQ ID NO: 904778 - DNA, 15 bp, Homo sapiens
taaaagagtccatca

SEQ ID NO: 904779 - DNA, 15 bp, Homo sapiens
ttaaaagagtccatc

SEQ ID NO: 904780 - DNA, 15 bp, Homo sapiens
tttaaaagagtccat

SEQ ID NO: 904781 - DNA, 15 bp, Homo sapiens
ttttaaaagagtcca

SEQ ID NO: 904782 - DNA, 15 bp, Homo sapiens
cttttaaaagagtcc

SEQ ID NO: 904783 - DNA, 15 bp, Homo sapiens
tcttttaaaagagtc

SEQ ID NO: 904784 - DNA, 15 bp, Homo sapiens
ttcttttaaaagagt

SEQ ID NO: 904785 - DNA, 15 bp, Homo sapiens
attcttttaaaagag

SEQ ID NO: 904786 - DNA, 15 bp, Homo sapiens
aattcttttaaaaga

SEQ ID NO: 904787 - DNA, 15 bp, Homo sapiens
taattcttttaaaag

SEQ ID NO: 904788 - DNA, 15 bp, Homo sapiens
ttaattcttttaaaa

SEQ ID NO: 904789 - DNA, 15 bp, Homo sapiens
attaattcttttaaa

SEQ ID NO: 904790 - DNA, 15 bp, Homo sapiens
aattaattcttttaa

SEQ ID NO: 904791 - DNA, 15 bp, Homo sapiens
aaattaattctttta

SEQ ID NO: 904792 - DNA, 15 bp, Homo sapiens
aaaattaattctttt

SEQ ID NO: 904793 - DNA, 15 bp, Homo sapiens
caaaattaattcttt

SEQ ID NO: 904794 - DNA, 15 bp, Homo sapiens
acaaaattaattctt

SEQ ID NO: 904795 - DNA, 15 bp, Homo sapiens
aacaaaattaattct

SEQ ID NO: 904796 - DNA, 15 bp, Homo sapiens
taacaaaattaattc

SEQ ID NO: 904797 - DNA, 15 bp, Homo sapiens
ataacaaaattaatt

SEQ ID NO: 904798 - DNA, 15 bp, Homo sapiens
aataacaaaattaat

SEQ ID NO: 904799 - DNA, 15 bp, Homo sapiens
caataacaaaattaa

SEQ ID NO: 904800 - DNA, 15 bp, Homo sapiens
tcaataacaaaatta

SEQ ID NO: 904801 - DNA, 15 bp, Homo sapiens
ttcaataacaaaatt

SEQ ID NO: 904802 - DNA, 15 bp, Homo sapiens
tttcaataacaaaat

SEQ ID NO: 904803 - DNA, 15 bp, Homo sapiens
atttcaataacaaaa

SEQ ID NO: 904804 - DNA, 15 bp, Homo sapiens
aatttcaataacaaa

SEQ ID NO: 904805 - DNA, 15 bp, Homo sapiens
aaatttcaataacaa

SEQ ID NO: 904806 - DNA, 15 bp, Homo sapiens
taaatttcaataaca

SEQ ID NO: 904807 - DNA, 15 bp, Homo sapiens
ataaatttcaataac

SEQ ID NO: 904808 - DNA, 15 bp, Homo sapiens
aataaatttcaataa

SEQ ID NO: 904809 - DNA, 15 bp, Homo sapiens
aaataaatttcaata

SEQ ID NO: 904810 - DNA, 15 bp, Homo sapiens
taaataaatttcaat

SEQ ID NO: 904811 - DNA, 15 bp, Homo sapiens
ttaaataaatttcaa

SEQ ID NO: 904812 - DNA, 15 bp, Homo sapiens
tttaaataaatttca

SEQ ID NO: 904813 - DNA, 15 bp, Homo sapiens
ttttaaataaatttc

SEQ ID NO: 904814 - DNA, 15 bp, Homo sapiens
cttttaaataaattt

SEQ ID NO: 904815 - DNA, 15 bp, Homo sapiens
acttttaaataaatt

SEQ ID NO: 904816 - DNA, 15 bp, Homo sapiens
aacttttaaataaat

SEQ ID NO: 904817 - DNA, 15 bp, Homo sapiens
aaacttttaaataaa

SEQ ID NO: 904818 - DNA, 15 bp, Homo sapiens
caaacttttaaataa

SEQ ID NO: 904819 - DNA, 15 bp, Homo sapiens
acaaacttttaaata

SEQ ID NO: 904820 - DNA, 15 bp, Homo sapiens
aacaaacttttaaat

SEQ ID NO: 904821 - DNA, 15 bp, Homo sapiens
aaacaaacttttaaa

SEQ ID NO: 904822 - DNA, 15 bp, Homo sapiens
aaaacaaacttttaa

SEQ ID NO: 904823 - DNA, 15 bp, Homo sapiens
caaaacaaactttta

SEQ ID NO: 904824 - DNA, 15 bp, Homo sapiens
acaaaacaaactttt

SEQ ID NO: 904825 - DNA, 15 bp, Homo sapiens
cacaaaacaaacttt

SEQ ID NO: 904826 - DNA, 15 bp, Homo sapiens
ccacaaaacaaactt

SEQ ID NO: 904827 - DNA, 15 bp, Homo sapiens
accacaaaacaaact

SEQ ID NO: 904828 - DNA, 15 bp, Homo sapiens
taccacaaaacaaac

SEQ ID NO: 904829 - DNA, 15 bp, Homo sapiens
ttaccacaaaacaaa

SEQ ID NO: 904830 - DNA, 15 bp, Homo sapiens
gttaccacaaaacaa

SEQ ID NO: 904831 - DNA, 15 bp, Homo sapiens
agttaccacaaaaca

SEQ ID NO: 904832 - DNA, 15 bp, Homo sapiens
tagttaccacaaaac

SEQ ID NO: 904833 - DNA, 15 bp, Homo sapiens
ttagttaccacaaaa

SEQ ID NO: 904834 - DNA, 15 bp, Homo sapiens
attagttaccacaaa

SEQ ID NO: 904835 - DNA, 15 bp, Homo sapiens
gattagttaccacaa

SEQ ID NO: 904836 - DNA, 15 bp, Homo sapiens
tgattagttaccaca

SEQ ID NO: 904837 - DNA, 15 bp, Homo sapiens
ttgattagttaccac

SEQ ID NO: 904838 - DNA, 15 bp, Homo sapiens
attgattagttacca

SEQ ID NO: 904839 - DNA, 15 bp, Homo sapiens
aattgattagttacc

SEQ ID NO: 904840 - DNA, 15 bp, Homo sapiens
taattgattagttac

SEQ ID NO: 904841 - DNA, 15 bp, Homo sapiens
ttaattgattagtta

SEQ ID NO: 904842 - DNA, 15 bp, Homo sapiens
tttaattgattagtt

SEQ ID NO: 904843 - DNA, 15 bp, Homo sapiens
ttttaattgattagt

SEQ ID NO: 904844 - DNA, 15 bp, Homo sapiens
gttttaattgattag

SEQ ID NO: 904845 - DNA, 15 bp, Homo sapiens
cgttttaattgatta

SEQ ID NO: 904846 - DNA, 15 bp, Homo sapiens
acgttttaattgatt

SEQ ID NO: 904847 - DNA, 15 bp, Homo sapiens
aacgttttaattgat

SEQ ID NO: 904848 - DNA, 15 bp, Homo sapiens
aaacgttttaattga

SEQ ID NO: 904849 - DNA, 15 bp, Homo sapiens
aaaacgttttaattg

SEQ ID NO: 904850 - DNA, 15 bp, Homo sapiens
aaaaacgttttaatt

SEQ ID NO: 904851 - DNA, 15 bp, Homo sapiens
gaaaaacgttttaat

SEQ ID NO: 904852 - DNA, 15 bp, Homo sapiens
agaaaaacgttttaa

SEQ ID NO: 904853 - DNA, 15 bp, Homo sapiens
aagaaaaacgtttta

SEQ ID NO: 904854 - DNA, 15 bp, Homo sapiens
aaagaaaaacgtttt

SEQ ID NO: 904855 - DNA, 15 bp, Homo sapiens
aaaagaaaaacgttt

SEQ ID NO: 904856 - DNA, 15 bp, Homo sapiens
aaaaagaaaaacgtt

SEQ ID NO: 904857 - DNA, 15 bp, Homo sapiens
aaaaaagaaaaacgt

SEQ ID NO: 904858 - DNA, 15 bp, Homo sapiens
aaaaaaagaaaaacg

SEQ ID NO: 904859 - DNA, 15 bp, Homo sapiens
aaaaaaaagaaaaac

SEQ ID NO: 904860 - DNA, 15 bp, Homo sapiens
aaaaaaaaagaaaaa

SEQ ID NO: 904861 - DNA, 15 bp, Homo sapiens
taaaaaaaaagaaaa

SEQ ID NO: 904862 - DNA, 15 bp, Homo sapiens
ttaaaaaaaaagaaa

SEQ ID NO: 904863 - DNA, 15 bp, Homo sapiens
tttaaaaaaaaagaa

SEQ ID NO: 904864 - DNA, 15 bp, Homo sapiens
ttttaaaaaaaaaga

SEQ ID NO: 904865 - DNA, 15 bp, Homo sapiens
tttttaaaaaaaaag

SEQ ID NO: 904866 - DNA, 15 bp, Homo sapiens
ttttttaaaaaaaaa

SEQ ID NO: 904867 - DNA, 15 bp, Homo sapiens
tttttttaaaaaaaa

SEQ ID NO: 904868 - DNA, 15 bp, Homo sapiens
atttttttaaaaaaa

SEQ ID NO: 904869 - DNA, 15 bp, Homo sapiens
tatttttttaaaaaa

SEQ ID NO: 904870 - DNA, 15 bp, Homo sapiens
ctatttttttaaaaa

SEQ ID NO: 904871 - DNA, 15 bp, Homo sapiens
tctatttttttaaaa

SEQ ID NO: 904872 - DNA, 15 bp, Homo sapiens
ttctatttttttaaa

SEQ ID NO: 904873 - DNA, 15 bp, Homo sapiens
tttctatttttttaa

SEQ ID NO: 904874 - DNA, 15 bp, Homo sapiens
ttttctattttttta

SEQ ID NO: 904875 - DNA, 15 bp, Homo sapiens
attttctattttttt

SEQ ID NO: 904876 - DNA, 15 bp, Homo sapiens
gattttctatttttt

SEQ ID NO: 904877 - DNA, 15 bp, Homo sapiens
tgattttctattttt

SEQ ID NO: 904878 - DNA, 15 bp, Homo sapiens
ttgattttctatttt

SEQ ID NO: 904879 - DNA, 15 bp, Homo sapiens
attgattttctattt

SEQ ID NO: 904880 - DNA, 15 bp, Homo sapiens
aattgattttctatt

SEQ ID NO: 904881 - DNA, 15 bp, Homo sapiens
taattgattttctat

SEQ ID NO: 904882 - DNA, 15 bp, Homo sapiens
ttaattgattttcta

SEQ ID NO: 904883 - DNA, 15 bp, Homo sapiens
tttaattgattttct

SEQ ID NO: 904884 - DNA, 15 bp, Homo sapiens
ttttaattgattttc

SEQ ID NO: 904885 - DNA, 15 bp, Homo sapiens
tttttaattgatttt

SEQ ID NO: 904886 - DNA, 15 bp, Homo sapiens
gtttttaattgattt

SEQ ID NO: 904887 - DNA, 15 bp, Homo sapiens
agtttttaattgatt

SEQ ID NO: 904888 - DNA, 15 bp, Homo sapiens
tagtttttaattgat

SEQ ID NO: 904889 - DNA, 15 bp, Homo sapiens
ttagtttttaattga

SEQ ID NO: 904890 - DNA, 15 bp, Homo sapiens
tttagtttttaattg

SEQ ID NO: 904891 - DNA, 15 bp, Homo sapiens
ctttagtttttaatt

SEQ ID NO: 904892 - DNA, 15 bp, Homo sapiens
actttagtttttaat

SEQ ID NO: 904893 - DNA, 15 bp, Homo sapiens
tactttagtttttaa

SEQ ID NO: 904894 - DNA, 15 bp, Homo sapiens
ttactttagttttta

SEQ ID NO: 904895 - DNA, 15 bp, Homo sapiens
attactttagttttt

SEQ ID NO: 904896 - DNA, 15 bp, Homo sapiens
cattactttagtttt

SEQ ID NO: 904897 - DNA, 15 bp, Homo sapiens
tcattactttagttt

SEQ ID NO: 904898 - DNA, 15 bp, Homo sapiens
ttcattactttagtt

SEQ ID NO: 904899 - DNA, 15 bp, Homo sapiens
tttcattactttagt

SEQ ID NO: 904900 - DNA, 15 bp, Homo sapiens
gtttcattactttag

SEQ ID NO: 904901 - DNA, 15 bp, Homo sapiens
agtttcattacttta

SEQ ID NO: 904902 - DNA, 15 bp, Homo sapiens
cagtttcattacttt

SEQ ID NO: 904903 - DNA, 15 bp, Homo sapiens
ccagtttcattactt

SEQ ID NO: 904904 - DNA, 15 bp, Homo sapiens
tccagtttcattact

SEQ ID NO: 904905 - DNA, 15 bp, Homo sapiens
ttccagtttcattac

SEQ ID NO: 904906 - DNA, 15 bp, Homo sapiens
tttccagtttcatta

SEQ ID NO: 904907 - DNA, 15 bp, Homo sapiens
ttttccagtttcatt

SEQ ID NO: 904908 - DNA, 15 bp, Homo sapiens
attttccagtttcat

SEQ ID NO: 904909 - DNA, 15 bp, Homo sapiens
cattttccagtttca

SEQ ID NO: 904910 - DNA, 15 bp, Homo sapiens
tcattttccagtttc

SEQ ID NO: 904911 - DNA, 15 bp, Homo sapiens
ttcattttccagttt

SEQ ID NO: 904912 - DNA, 15 bp, Homo sapiens
gttcattttccagtt

SEQ ID NO: 904913 - DNA, 15 bp, Homo sapiens
agttcattttccagt

SEQ ID NO: 904914 - DNA, 15 bp, Homo sapiens
cagttcattttccag

SEQ ID NO: 904915 - DNA, 15 bp, Homo sapiens
ccagttcattttcca

SEQ ID NO: 904916 - DNA, 15 bp, Homo sapiens
tccagttcattttcc

SEQ ID NO: 904917 - DNA, 15 bp, Homo sapiens
ctccagttcattttc

SEQ ID NO: 904918 - DNA, 15 bp, Homo sapiens
cctccagttcatttt

SEQ ID NO: 904919 - DNA, 15 bp, Homo sapiens
acctccagttcattt

SEQ ID NO: 904920 - DNA, 15 bp, Homo sapiens
tacctccagttcatt

SEQ ID NO: 904921 - DNA, 15 bp, Homo sapiens
atacctccagttcat

SEQ ID NO: 904922 - DNA, 15 bp, Homo sapiens
catacctccagttca

SEQ ID NO: 904923 - DNA, 15 bp, Homo sapiens
acatacctccagttc

SEQ ID NO: 904924 - DNA, 15 bp, Homo sapiens
gacatacctccagtt

SEQ ID NO: 904925 - DNA, 15 bp, Homo sapiens
agacatacctccagt

SEQ ID NO: 904926 - DNA, 15 bp, Homo sapiens
aagacatacctccag

SEQ ID NO: 904927 - DNA, 15 bp, Homo sapiens
aaagacatacctcca

SEQ ID NO: 904928 - DNA, 15 bp, Homo sapiens
aaaagacatacctcc

SEQ ID NO: 904929 - DNA, 15 bp, Homo sapiens
aaaaagacatacctc

SEQ ID NO: 904930 - DNA, 15 bp, Homo sapiens
caaaaagacatacct

SEQ ID NO: 904931 - DNA, 15 bp, Homo sapiens
acaaaaagacatacc

SEQ ID NO: 904932 - DNA, 15 bp, Homo sapiens
tacaaaaagacatac

SEQ ID NO: 904933 - DNA, 15 bp, Homo sapiens
atacaaaaagacata

SEQ ID NO: 904934 - DNA, 15 bp, Homo sapiens
aatacaaaaagacat

SEQ ID NO: 904935 - DNA, 15 bp, Homo sapiens
gaatacaaaaagaca

SEQ ID NO: 904936 - DNA, 15 bp, Homo sapiens
ggaatacaaaaagac

SEQ ID NO: 904937 - DNA, 15 bp, Homo sapiens
gggaatacaaaaaga

SEQ ID NO: 904938 - DNA, 15 bp, Homo sapiens
agggaatacaaaaag

SEQ ID NO: 904939 - DNA, 15 bp, Homo sapiens
tagggaatacaaaaa

SEQ ID NO: 904940 - DNA, 15 bp, Homo sapiens
ctagggaatacaaaa

SEQ ID NO: 904941 - DNA, 15 bp, Homo sapiens
cctagggaatacaaa

SEQ ID NO: 904942 - DNA, 15 bp, Homo sapiens
tcctagggaatacaa

SEQ ID NO: 904943 - DNA, 15 bp, Homo sapiens
atcctagggaataca

SEQ ID NO: 904944 - DNA, 15 bp, Homo sapiens
catcctagggaatac

SEQ ID NO: 904945 - DNA, 15 bp, Homo sapiens
acatcctagggaata

SEQ ID NO: 904946 - DNA, 15 bp, Homo sapiens
tacatcctagggaat

SEQ ID NO: 904947 - DNA, 15 bp, Homo sapiens
ttacatcctagggaa

SEQ ID NO: 904948 - DNA, 15 bp, Homo sapiens
attacatcctaggga

SEQ ID NO: 904949 - DNA, 15 bp, Homo sapiens
aattacatcctaggg

SEQ ID NO: 904950 - DNA, 15 bp, Homo sapiens
caattacatcctagg

SEQ ID NO: 904951 - DNA, 15 bp, Homo sapiens
acaattacatcctag

SEQ ID NO: 904952 - DNA, 15 bp, Homo sapiens
gacaattacatccta

SEQ ID NO: 904953 - DNA, 15 bp, Homo sapiens
tgacaattacatcct

SEQ ID NO: 904954 - DNA, 15 bp, Homo sapiens
atgacaattacatcc

SEQ ID NO: 904955 - DNA, 15 bp, Homo sapiens
aatgacaattacatc

SEQ ID NO: 904956 - DNA, 15 bp, Homo sapiens
taatgacaattacat

SEQ ID NO: 904957 - DNA, 15 bp, Homo sapiens
ttaatgacaattaca

SEQ ID NO: 904958 - DNA, 15 bp, Homo sapiens
attaatgacaattac

SEQ ID NO: 904959 - DNA, 15 bp, Homo sapiens
aattaatgacaatta

SEQ ID NO: 904960 - DNA, 15 bp, Homo sapiens
aaattaatgacaatt

SEQ ID NO: 904961 - DNA, 15 bp, Homo sapiens
aaaattaatgacaat

SEQ ID NO: 904962 - DNA, 15 bp, Homo sapiens
taaaattaatgacaa

SEQ ID NO: 904963 - DNA, 15 bp, Homo sapiens
ataaaattaatgaca

SEQ ID NO: 904964 - DNA, 15 bp, Homo sapiens
aataaaattaatgac

SEQ ID NO: 904965 - DNA, 15 bp, Homo sapiens
aaataaaattaatga

SEQ ID NO: 904966 - DNA, 15 bp, Homo sapiens
aaaataaaattaatg

SEQ ID NO: 904967 - DNA, 15 bp, Homo sapiens
caaaataaaattaat

SEQ ID NO: 904968 - DNA, 15 bp, Homo sapiens
tcaaaataaaattaa

SEQ ID NO: 904969 - DNA, 15 bp, Homo sapiens
ttcaaaataaaatta

SEQ ID NO: 904970 - DNA, 15 bp, Homo sapiens
attcaaaataaaatt

SEQ ID NO: 904971 - DNA, 15 bp, Homo sapiens
aattcaaaataaaat

SEQ ID NO: 904972 - DNA, 15 bp, Homo sapiens
caattcaaaataaaa

SEQ ID NO: 904973 - DNA, 15 bp, Homo sapiens
acaattcaaaataaa

SEQ ID NO: 904974 - DNA, 15 bp, Homo sapiens
aacaattcaaaataa

SEQ ID NO: 904975 - DNA, 15 bp, Homo sapiens
aaacaattcaaaata

SEQ ID NO: 904976 - DNA, 15 bp, Homo sapiens
aaaacaattcaaaat

SEQ ID NO: 904977 - DNA, 15 bp, Homo sapiens
gaaaacaattcaaaa

SEQ ID NO: 904978 - DNA, 15 bp, Homo sapiens
tgaaaacaattcaaa

SEQ ID NO: 904979 - DNA, 15 bp, Homo sapiens
ttgaaaacaattcaa

SEQ ID NO: 904980 - DNA, 15 bp, Homo sapiens
tttgaaaacaattca

SEQ ID NO: 904981 - DNA, 15 bp, Homo sapiens
atttgaaaacaattc

SEQ ID NO: 904982 - DNA, 15 bp, Homo sapiens
aatttgaaaacaatt

SEQ ID NO: 904983 - DNA, 15 bp, Homo sapiens
aaatttgaaaacaat

SEQ ID NO: 904984 - DNA, 15 bp, Homo sapiens
aaaatttgaaaacaa

SEQ ID NO: 904985 - DNA, 15 bp, Homo sapiens
taaaatttgaaaaca

SEQ ID NO: 904986 - DNA, 15 bp, Homo sapiens
ttaaaatttgaaaac

SEQ ID NO: 904987 - DNA, 15 bp, Homo sapiens
tttaaaatttgaaaa

SEQ ID NO: 904988 - DNA, 15 bp, Homo sapiens
ttttaaaatttgaaa

SEQ ID NO: 904989 - DNA, 15 bp, Homo sapiens
attttaaaatttgaa

SEQ ID NO: 904990 - DNA, 15 bp, Homo sapiens
aattttaaaatttga

SEQ ID NO: 904991 - DNA, 15 bp, Homo sapiens
taattttaaaatttg

SEQ ID NO: 904992 - DNA, 15 bp, Homo sapiens
ataattttaaaattt

SEQ ID NO: 904993 - DNA, 15 bp, Homo sapiens
aataattttaaaatt

SEQ ID NO: 904994 - DNA, 15 bp, Homo sapiens
caataattttaaaat

SEQ ID NO: 904995 - DNA, 15 bp, Homo sapiens
acaataattttaaaa

SEQ ID NO: 904996 - DNA, 15 bp, Homo sapiens
aacaataattttaaa

SEQ ID NO: 904997 - DNA, 15 bp, Homo sapiens
caacaataattttaa

SEQ ID NO: 904998 - DNA, 15 bp, Homo sapiens
ccaacaataatttta

SEQ ID NO: 904999 - DNA, 15 bp, Homo sapiens
gccaacaataatttt

SEQ ID NO: 905000 - DNA, 15 bp, Homo sapiens
agccaacaataattt

SEQ ID NO: 905001 - DNA, 15 bp, Homo sapiens
cagccaacaataatt

SEQ ID NO: 905002 - DNA, 15 bp, Homo sapiens
ccagccaacaataat

SEQ ID NO: 905003 - DNA, 15 bp, Homo sapiens
tccagccaacaataa

SEQ ID NO: 905004 - DNA, 15 bp, Homo sapiens
ttccagccaacaata

SEQ ID NO: 905005 - DNA, 15 bp, Homo sapiens
tttccagccaacaat

SEQ ID NO: 905006 - DNA, 15 bp, Homo sapiens
ttttccagccaacaa

SEQ ID NO: 905007 - DNA, 15 bp, Homo sapiens
tttttccagccaaca

SEQ ID NO: 905008 - DNA, 15 bp, Homo sapiens
atttttccagccaac

SEQ ID NO: 905009 - DNA, 15 bp, Homo sapiens
aatttttccagccaa

SEQ ID NO: 905010 - DNA, 15 bp, Homo sapiens
taatttttccagcca

SEQ ID NO: 905011 - DNA, 15 bp, Homo sapiens
ataatttttccagcc

SEQ ID NO: 905012 - DNA, 15 bp, Homo sapiens
tataatttttccagc

SEQ ID NO: 905013 - DNA, 15 bp, Homo sapiens
ttataatttttccag

SEQ ID NO: 905014 - DNA, 15 bp, Homo sapiens
cttataatttttcca

SEQ ID NO: 905015 - DNA, 15 bp, Homo sapiens
ccttataatttttcc

SEQ ID NO: 905016 - DNA, 15 bp, Homo sapiens
tccttataatttttc

SEQ ID NO: 905017 - DNA, 15 bp, Homo sapiens
atccttataattttt

SEQ ID NO: 905018 - DNA, 15 bp, Homo sapiens
catccttataatttt

SEQ ID NO: 905019 - DNA, 15 bp, Homo sapiens
tcatccttataattt

SEQ ID NO: 905020 - DNA, 15 bp, Homo sapiens
atcatccttataatt

SEQ ID NO: 905021 - DNA, 15 bp, Homo sapiens
aatcatccttataat

SEQ ID NO: 905022 - DNA, 15 bp, Homo sapiens
caatcatccttataa

SEQ ID NO: 905023 - DNA, 15 bp, Homo sapiens
acaatcatccttata

SEQ ID NO: 905024 - DNA, 15 bp, Homo sapiens
tacaatcatccttat

SEQ ID NO: 905025 - DNA, 15 bp, Homo sapiens
ttacaatcatcctta

SEQ ID NO: 905026 - DNA, 15 bp, Homo sapiens
attacaatcatcctt

SEQ ID NO: 905027 - DNA, 15 bp, Homo sapiens
gattacaatcatcct

SEQ ID NO: 905028 - DNA, 15 bp, Homo sapiens
tgattacaatcatcc

SEQ ID NO: 905029 - DNA, 15 bp, Homo sapiens
atgattacaatcatc

SEQ ID NO: 905030 - DNA, 15 bp, Homo sapiens
catgattacaatcat

SEQ ID NO: 905031 - DNA, 15 bp, Homo sapiens
ccatgattacaatca

SEQ ID NO: 905032 - DNA, 15 bp, Homo sapiens
accatgattacaatc

SEQ ID NO: 905033 - DNA, 15 bp, Homo sapiens
aaccatgattacaat

SEQ ID NO: 905034 - DNA, 15 bp, Homo sapiens
taaccatgattacaa

SEQ ID NO: 905035 - DNA, 15 bp, Homo sapiens
ataaccatgattaca

SEQ ID NO: 905036 - DNA, 15 bp, Homo sapiens
aataaccatgattac

SEQ ID NO: 905037 - DNA, 15 bp, Homo sapiens
aaataaccatgatta

SEQ ID NO: 905038 - DNA, 15 bp, Homo sapiens
caaataaccatgatt

SEQ ID NO: 905039 - DNA, 15 bp, Homo sapiens
acaaataaccatgat

SEQ ID NO: 905040 - DNA, 15 bp, Homo sapiens
aacaaataaccatga

SEQ ID NO: 905041 - DNA, 15 bp, Homo sapiens
aaacaaataaccatg

SEQ ID NO: 905042 - DNA, 15 bp, Homo sapiens
taaacaaataaccat

SEQ ID NO: 905043 - DNA, 15 bp, Homo sapiens
ataaacaaataacca

SEQ ID NO: 905044 - DNA, 15 bp, Homo sapiens
aataaacaaataacc

SEQ ID NO: 905045 - DNA, 15 bp, Homo sapiens
gaataaacaaataac

SEQ ID NO: 905046 - DNA, 15 bp, Homo sapiens
agaataaacaaataa

SEQ ID NO: 905047 - DNA, 15 bp, Homo sapiens
cagaataaacaaata

SEQ ID NO: 905048 - DNA, 15 bp, Homo sapiens
acagaataaacaaat

SEQ ID NO: 905049 - DNA, 15 bp, Homo sapiens
tacagaataaacaaa

SEQ ID NO: 905050 - DNA, 15 bp, Homo sapiens
atacagaataaacaa

SEQ ID NO: 905051 - DNA, 15 bp, Homo sapiens
tatacagaataaaca

SEQ ID NO: 905052 - DNA, 15 bp, Homo sapiens
atatacagaataaac

SEQ ID NO: 905053 - DNA, 15 bp, Homo sapiens
catatacagaataaa

SEQ ID NO: 905054 - DNA, 15 bp, Homo sapiens
acatatacagaataa

SEQ ID NO: 905055 - DNA, 15 bp, Homo sapiens
aacatatacagaata

SEQ ID NO: 905056 - DNA, 15 bp, Homo sapiens
gaacatatacagaat

SEQ ID NO: 905057 - DNA, 15 bp, Homo sapiens
agaacatatacagaa

SEQ ID NO: 905058 - DNA, 15 bp, Homo sapiens
tagaacatatacaga

SEQ ID NO: 905059 - DNA, 15 bp, Homo sapiens
gtagaacatatacag

SEQ ID NO: 905060 - DNA, 15 bp, Homo sapiens
tgtagaacatataca

SEQ ID NO: 905061 - DNA, 15 bp, Homo sapiens
atgtagaacatatac

SEQ ID NO: 905062 - DNA, 15 bp, Homo sapiens
catgtagaacatata

SEQ ID NO: 905063 - DNA, 15 bp, Homo sapiens
gcatgtagaacatat

SEQ ID NO: 905064 - DNA, 15 bp, Homo sapiens
ggcatgtagaacata

SEQ ID NO: 905065 - DNA, 15 bp, Homo sapiens
aggcatgtagaacat

SEQ ID NO: 905066 - DNA, 15 bp, Homo sapiens
taggcatgtagaaca

SEQ ID NO: 905067 - DNA, 15 bp, Homo sapiens
ataggcatgtagaac

SEQ ID NO: 905068 - DNA, 15 bp, Homo sapiens
aataggcatgtagaa

SEQ ID NO: 905069 - DNA, 15 bp, Homo sapiens
taataggcatgtaga

SEQ ID NO: 905070 - DNA, 15 bp, Homo sapiens
ataataggcatgtag

SEQ ID NO: 905071 - DNA, 15 bp, Homo sapiens
cataataggcatgta

SEQ ID NO: 905072 - DNA, 15 bp, Homo sapiens
acataataggcatgt

SEQ ID NO: 905073 - DNA, 15 bp, Homo sapiens
cacataataggcatg

SEQ ID NO: 905074 - DNA, 15 bp, Homo sapiens
gcacataataggcat

SEQ ID NO: 905075 - DNA, 15 bp, Homo sapiens
ggcacataataggca

SEQ ID NO: 905076 - DNA, 15 bp, Homo sapiens
aggcacataataggc

SEQ ID NO: 905077 - DNA, 15 bp, Homo sapiens
aaggcacataatagg

SEQ ID NO: 905078 - DNA, 15 bp, Homo sapiens
taaggcacataatag

SEQ ID NO: 905079 - DNA, 15 bp, Homo sapiens
ataaggcacataata

SEQ ID NO: 905080 - DNA, 15 bp, Homo sapiens
tataaggcacataat

SEQ ID NO: 905081 - DNA, 15 bp, Homo sapiens
atataaggcacataa

SEQ ID NO: 905082 - DNA, 15 bp, Homo sapiens
tatataaggcacata

SEQ ID NO: 905083 - DNA, 15 bp, Homo sapiens
ctatataaggcacat

SEQ ID NO: 905084 - DNA, 15 bp, Homo sapiens
actatataaggcaca

SEQ ID NO: 905085 - DNA, 15 bp, Homo sapiens
tactatataaggcac

SEQ ID NO: 905086 - DNA, 15 bp, Homo sapiens
gtactatataaggca

SEQ ID NO: 905087 - DNA, 15 bp, Homo sapiens
agtactatataaggc

SEQ ID NO: 905088 - DNA, 15 bp, Homo sapiens
tagtactatataagg

SEQ ID NO: 905089 - DNA, 15 bp, Homo sapiens
ttagtactatataag

SEQ ID NO: 905090 - DNA, 15 bp, Homo sapiens
cttagtactatataa

SEQ ID NO: 905091 - DNA, 15 bp, Homo sapiens
ccttagtactatata

SEQ ID NO: 905092 - DNA, 15 bp, Homo sapiens
tccttagtactatat

SEQ ID NO: 905093 - DNA, 15 bp, Homo sapiens
gtccttagtactata

SEQ ID NO: 905094 - DNA, 15 bp, Homo sapiens
agtccttagtactat

SEQ ID NO: 905095 - DNA, 15 bp, Homo sapiens
cagtccttagtacta

SEQ ID NO: 905096 - DNA, 15 bp, Homo sapiens
tcagtccttagtact

SEQ ID NO: 905097 - DNA, 15 bp, Homo sapiens
ctcagtccttagtac

SEQ ID NO: 905098 - DNA, 15 bp, Homo sapiens
gctcagtccttagta

SEQ ID NO: 905099 - DNA, 15 bp, Homo sapiens
tgctcagtccttagt

SEQ ID NO: 905100 - DNA, 15 bp, Homo sapiens
atgctcagtccttag

SEQ ID NO: 905101 - DNA, 15 bp, Homo sapiens
tatgctcagtcctta

SEQ ID NO: 905102 - DNA, 15 bp, Homo sapiens
atatgctcagtcctt

SEQ ID NO: 905103 - DNA, 15 bp, Homo sapiens
catatgctcagtcct

SEQ ID NO: 905104 - DNA, 15 bp, Homo sapiens
ccatatgctcagtcc

SEQ ID NO: 905105 - DNA, 15 bp, Homo sapiens
accatatgctcagtc

SEQ ID NO: 905106 - DNA, 15 bp, Homo sapiens
aaccatatgctcagt

SEQ ID NO: 905107 - DNA, 15 bp, Homo sapiens
caaccatatgctcag

SEQ ID NO: 905108 - DNA, 15 bp, Homo sapiens
acaaccatatgctca

SEQ ID NO: 905109 - DNA, 15 bp, Homo sapiens
cacaaccatatgctc

SEQ ID NO: 905110 - DNA, 15 bp, Homo sapiens
tcacaaccatatgct

SEQ ID NO: 905111 - DNA, 15 bp, Homo sapiens
ttcacaaccatatgc

SEQ ID NO: 905112 - DNA, 15 bp, Homo sapiens
gttcacaaccatatg

SEQ ID NO: 905113 - DNA, 15 bp, Homo sapiens
tgttcacaaccatat

SEQ ID NO: 905114 - DNA, 15 bp, Homo sapiens
ttgttcacaaccata

SEQ ID NO: 905115 - DNA, 15 bp, Homo sapiens
tttgttcacaaccat

SEQ ID NO: 905116 - DNA, 15 bp, Homo sapiens
ttttgttcacaacca

SEQ ID NO: 905117 - DNA, 15 bp, Homo sapiens
attttgttcacaacc

SEQ ID NO: 905118 - DNA, 15 bp, Homo sapiens
tattttgttcacaac

SEQ ID NO: 905119 - DNA, 15 bp, Homo sapiens
ttattttgttcacaa

SEQ ID NO: 905120 - DNA, 15 bp, Homo sapiens
cttattttgttcaca

SEQ ID NO: 905121 - DNA, 15 bp, Homo sapiens
tcttattttgttcac

SEQ ID NO: 905122 - DNA, 15 bp, Homo sapiens
ttcttattttgttca

SEQ ID NO: 905123 - DNA, 15 bp, Homo sapiens
cttcttattttgttc

SEQ ID NO: 905124 - DNA, 15 bp, Homo sapiens
acttcttattttgtt

SEQ ID NO: 905125 - DNA, 15 bp, Homo sapiens
aacttcttattttgt

SEQ ID NO: 905126 - DNA, 15 bp, Homo sapiens
taacttcttattttg

SEQ ID NO: 905127 - DNA, 15 bp, Homo sapiens
ttaacttcttatttt

SEQ ID NO: 905128 - DNA, 15 bp, Homo sapiens
gttaacttcttattt

SEQ ID NO: 905129 - DNA, 15 bp, Homo sapiens
agttaacttcttatt

SEQ ID NO: 905130 - DNA, 15 bp, Homo sapiens
cagttaacttcttat

SEQ ID NO: 905131 - DNA, 15 bp, Homo sapiens
gcagttaacttctta

SEQ ID NO: 905132 - DNA, 15 bp, Homo sapiens
agcagttaacttctt

SEQ ID NO: 905133 - DNA, 15 bp, Homo sapiens
cagcagttaacttct

SEQ ID NO: 905134 - DNA, 15 bp, Homo sapiens
ccagcagttaacttc

SEQ ID NO: 905135 - DNA, 15 bp, Homo sapiens
tccagcagttaactt

SEQ ID NO: 905136 - DNA, 15 bp, Homo sapiens
atccagcagttaact

SEQ ID NO: 905137 - DNA, 15 bp, Homo sapiens
catccagcagttaac

SEQ ID NO: 905138 - DNA, 15 bp, Homo sapiens
ccatccagcagttaa

SEQ ID NO: 905139 - DNA, 15 bp, Homo sapiens
tccatccagcagtta

SEQ ID NO: 905140 - DNA, 15 bp, Homo sapiens
ctccatccagcagtt

SEQ ID NO: 905141 - DNA, 15 bp, Homo sapiens
gctccatccagcagt

SEQ ID NO: 905142 - DNA, 15 bp, Homo sapiens
agctccatccagcag

SEQ ID NO: 905143 - DNA, 15 bp, Homo sapiens
aagctccatccagca

SEQ ID NO: 905144 - DNA, 15 bp, Homo sapiens
taagctccatccagc

SEQ ID NO: 905145 - DNA, 15 bp, Homo sapiens
ataagctccatccag

SEQ ID NO: 905146 - DNA, 15 bp, Homo sapiens
tataagctccatcca

SEQ ID NO: 905147 - DNA, 15 bp, Homo sapiens
ctataagctccatcc

SEQ ID NO: 905148 - DNA, 15 bp, Homo sapiens
actataagctccatc

SEQ ID NO: 905149 - DNA, 15 bp, Homo sapiens
gactataagctccat

SEQ ID NO: 905150 - DNA, 15 bp, Homo sapiens
agactataagctcca

SEQ ID NO: 905151 - DNA, 15 bp, Homo sapiens
aagactataagctcc

SEQ ID NO: 905152 - DNA, 15 bp, Homo sapiens
caagactataagctc

SEQ ID NO: 905153 - DNA, 15 bp, Homo sapiens
ccaagactataagct

SEQ ID NO: 905154 - DNA, 15 bp, Homo sapiens
cccaagactataagc

SEQ ID NO: 905155 - DNA, 15 bp, Homo sapiens
tcccaagactataag

SEQ ID NO: 905156 - DNA, 15 bp, Homo sapiens
ttcccaagactataa

SEQ ID NO: 905157 - DNA, 15 bp, Homo sapiens
tttcccaagactata

SEQ ID NO: 905158 - DNA, 15 bp, Homo sapiens
atttcccaagactat

SEQ ID NO: 905159 - DNA, 15 bp, Homo sapiens
tatttcccaagacta

SEQ ID NO: 905160 - DNA, 15 bp, Homo sapiens
atatttcccaagact

SEQ ID NO: 905161 - DNA, 15 bp, Homo sapiens
tatatttcccaagac

SEQ ID NO: 905162 - DNA, 15 bp, Homo sapiens
gtatatttcccaaga

SEQ ID NO: 905163 - DNA, 15 bp, Homo sapiens
tgtatatttcccaag

SEQ ID NO: 905164 - DNA, 15 bp, Homo sapiens
ctgtatatttcccaa

SEQ ID NO: 905165 - DNA, 15 bp, Homo sapiens
tctgtatatttccca

SEQ ID NO: 905166 - DNA, 15 bp, Homo sapiens
ttctgtatatttccc

SEQ ID NO: 905167 - DNA, 15 bp, Homo sapiens
tttctgtatatttcc

SEQ ID NO: 905168 - DNA, 15 bp, Homo sapiens
ctttctgtatatttc

SEQ ID NO: 905169 - DNA, 15 bp, Homo sapiens
tctttctgtatattt

SEQ ID NO: 905170 - DNA, 15 bp, Homo sapiens
atctttctgtatatt

SEQ ID NO: 905171 - DNA, 15 bp, Homo sapiens
aatctttctgtatat

SEQ ID NO: 905172 - DNA, 15 bp, Homo sapiens
taatctttctgtata

SEQ ID NO: 905173 - DNA, 15 bp, Homo sapiens
gtaatctttctgtat

SEQ ID NO: 905174 - DNA, 15 bp, Homo sapiens
agtaatctttctgta

SEQ ID NO: 905175 - DNA, 15 bp, Homo sapiens
tagtaatctttctgt

SEQ ID NO: 905176 - DNA, 15 bp, Homo sapiens
ctagtaatctttctg

SEQ ID NO: 905177 - DNA, 15 bp, Homo sapiens
actagtaatctttct

SEQ ID NO: 905178 - DNA, 15 bp, Homo sapiens
tactagtaatctttc

SEQ ID NO: 905179 - DNA, 15 bp, Homo sapiens
ttactagtaatcttt

SEQ ID NO: 905180 - DNA, 15 bp, Homo sapiens
gttactagtaatctt

SEQ ID NO: 905181 - DNA, 15 bp, Homo sapiens
agttactagtaatct

SEQ ID NO: 905182 - DNA, 15 bp, Homo sapiens
cagttactagtaatc

SEQ ID NO: 905183 - DNA, 15 bp, Homo sapiens
tcagttactagtaat

SEQ ID NO: 905184 - DNA, 15 bp, Homo sapiens
ctcagttactagtaa

SEQ ID NO: 905185 - DNA, 15 bp, Homo sapiens
cctcagttactagta

SEQ ID NO: 905186 - DNA, 15 bp, Homo sapiens
acctcagttactagt

SEQ ID NO: 905187 - DNA, 15 bp, Homo sapiens
cacctcagttactag

SEQ ID NO: 905188 - DNA, 15 bp, Homo sapiens
ccacctcagttacta

SEQ ID NO: 905189 - DNA, 15 bp, Homo sapiens
tccacctcagttact

SEQ ID NO: 905190 - DNA, 15 bp, Homo sapiens
ctccacctcagttac

SEQ ID NO: 905191 - DNA, 15 bp, Homo sapiens
cctccacctcagtta

SEQ ID NO: 905192 - DNA, 15 bp, Homo sapiens
ccctccacctcagtt

SEQ ID NO: 905193 - DNA, 15 bp, Homo sapiens
accctccacctcagt

SEQ ID NO: 905194 - DNA, 15 bp, Homo sapiens
caccctccacctcag

SEQ ID NO: 905195 - DNA, 15 bp, Homo sapiens
ccaccctccacctca

SEQ ID NO: 905196 - DNA, 15 bp, Homo sapiens
cccaccctccacctc

SEQ ID NO: 905197 - DNA, 15 bp, Homo sapiens
acccaccctccacct

SEQ ID NO: 905198 - DNA, 15 bp, Homo sapiens
cacccaccctccacc

SEQ ID NO: 905199 - DNA, 15 bp, Homo sapiens
ccacccaccctccac

SEQ ID NO: 905200 - DNA, 15 bp, Homo sapiens
cccacccaccctcca

SEQ ID NO: 905201 - DNA, 15 bp, Homo sapiens
ccccacccaccctcc

SEQ ID NO: 905202 - DNA, 15 bp, Homo sapiens
tccccacccaccctc

SEQ ID NO: 905203 - DNA, 15 bp, Homo sapiens
atccccacccaccct

SEQ ID NO: 905204 - DNA, 15 bp, Homo sapiens
aatccccacccaccc

SEQ ID NO: 905205 - DNA, 15 bp, Homo sapiens
aaatccccacccacc

SEQ ID NO: 905206 - DNA, 15 bp, Homo sapiens
caaatccccacccac

SEQ ID NO: 905207 - DNA, 15 bp, Homo sapiens
tcaaatccccaccca

SEQ ID NO: 905208 - DNA, 15 bp, Homo sapiens
ctcaaatccccaccc

SEQ ID NO: 905209 - DNA, 15 bp, Homo sapiens
cctcaaatccccacc

SEQ ID NO: 905210 - DNA, 15 bp, Homo sapiens
tcctcaaatccccac

SEQ ID NO: 905211 - DNA, 15 bp, Homo sapiens
ttcctcaaatcccca

SEQ ID NO: 905212 - DNA, 15 bp, Homo sapiens
attcctcaaatcccc

SEQ ID NO: 905213 - DNA, 15 bp, Homo sapiens
tattcctcaaatccc

SEQ ID NO: 905214 - DNA, 15 bp, Homo sapiens
ctattcctcaaatcc

SEQ ID NO: 905215 - DNA, 15 bp, Homo sapiens
actattcctcaaatc

SEQ ID NO: 905216 - DNA, 15 bp, Homo sapiens
cactattcctcaaat

SEQ ID NO: 905217 - DNA, 15 bp, Homo sapiens
tcactattcctcaaa

SEQ ID NO: 905218 - DNA, 15 bp, Homo sapiens
gtcactattcctcaa

SEQ ID NO: 905219 - DNA, 15 bp, Homo sapiens
cgtcactattcctca

SEQ ID NO: 905220 - DNA, 15 bp, Homo sapiens
tcgtcactattcctc

SEQ ID NO: 905221 - DNA, 15 bp, Homo sapiens
ttcgtcactattcct

SEQ ID NO: 905222 - DNA, 15 bp, Homo sapiens
tttcgtcactattcc

SEQ ID NO: 905223 - DNA, 15 bp, Homo sapiens
ctttcgtcactattc

SEQ ID NO: 905224 - DNA, 15 bp, Homo sapiens
cctttcgtcactatt

SEQ ID NO: 905225 - DNA, 15 bp, Homo sapiens
ccctttcgtcactat

SEQ ID NO: 905226 - DNA, 15 bp, Homo sapiens
accctttcgtcacta

SEQ ID NO: 905227 - DNA, 15 bp, Homo sapiens
caccctttcgtcact

SEQ ID NO: 905228 - DNA, 15 bp, Homo sapiens
acaccctttcgtcac

SEQ ID NO: 905229 - DNA, 15 bp, Homo sapiens
aacaccctttcgtca

SEQ ID NO: 905230 - DNA, 15 bp, Homo sapiens
taacaccctttcgtc

SEQ ID NO: 905231 - DNA, 15 bp, Homo sapiens
ataacaccctttcgt

SEQ ID NO: 905232 - DNA, 15 bp, Homo sapiens
tataacaccctttcg

SEQ ID NO: 905233 - DNA, 15 bp, Homo sapiens
ctataacaccctttc

SEQ ID NO: 905234 - DNA, 15 bp, Homo sapiens
tctataacacccttt

SEQ ID NO: 905235 - DNA, 15 bp, Homo sapiens
ttctataacaccctt

SEQ ID NO: 905236 - DNA, 15 bp, Homo sapiens
cttctataacaccct

SEQ ID NO: 905237 - DNA, 15 bp, Homo sapiens
acttctataacaccc

SEQ ID NO: 905238 - DNA, 15 bp, Homo sapiens
tacttctataacacc

SEQ ID NO: 905239 - DNA, 15 bp, Homo sapiens
ttacttctataacac

SEQ ID NO: 905240 - DNA, 15 bp, Homo sapiens
attacttctataaca

SEQ ID NO: 905241 - DNA, 15 bp, Homo sapiens
aattacttctataac

SEQ ID NO: 905242 - DNA, 15 bp, Homo sapiens
aaattacttctataa

SEQ ID NO: 905243 - DNA, 15 bp, Homo sapiens
aaaattacttctata

SEQ ID NO: 905244 - DNA, 15 bp, Homo sapiens
aaaaattacttctat

SEQ ID NO: 905245 - DNA, 15 bp, Homo sapiens
caaaaattacttcta

SEQ ID NO: 905246 - DNA, 15 bp, Homo sapiens
tcaaaaattacttct

SEQ ID NO: 905247 - DNA, 15 bp, Homo sapiens
gtcaaaaattacttc

SEQ ID NO: 905248 - DNA, 15 bp, Homo sapiens
tgtcaaaaattactt

SEQ ID NO: 905249 - DNA, 15 bp, Homo sapiens
ttgtcaaaaattact

SEQ ID NO: 905250 - DNA, 15 bp, Homo sapiens
tttgtcaaaaattac

SEQ ID NO: 905251 - DNA, 15 bp, Homo sapiens
ctttgtcaaaaatta

SEQ ID NO: 905252 - DNA, 15 bp, Homo sapiens
gctttgtcaaaaatt

SEQ ID NO: 905253 - DNA, 15 bp, Homo sapiens
agctttgtcaaaaat

SEQ ID NO: 905254 - DNA, 15 bp, Homo sapiens
cagctttgtcaaaaa

SEQ ID NO: 905255 - DNA, 15 bp, Homo sapiens
tcagctttgtcaaaa

SEQ ID NO: 905256 - DNA, 15 bp, Homo sapiens
ttcagctttgtcaaa

SEQ ID NO: 905257 - DNA, 15 bp, Homo sapiens
cttcagctttgtcaa

SEQ ID NO: 905258 - DNA, 15 bp, Homo sapiens
ccttcagctttgtca

SEQ ID NO: 905259 - DNA, 15 bp, Homo sapiens
gccttcagctttgtc

SEQ ID NO: 905260 - DNA, 15 bp, Homo sapiens
agccttcagctttgt

SEQ ID NO: 905261 - DNA, 15 bp, Homo sapiens
tagccttcagctttg

SEQ ID NO: 905262 - DNA, 15 bp, Homo sapiens
ttagccttcagcttt

SEQ ID NO: 905263 - DNA, 15 bp, Homo sapiens
tttagccttcagctt

SEQ ID NO: 905264 - DNA, 15 bp, Homo sapiens
ttttagccttcagct

SEQ ID NO: 905265 - DNA, 15 bp, Homo sapiens
attttagccttcagc

SEQ ID NO: 905266 - DNA, 15 bp, Homo sapiens
tattttagccttcag

SEQ ID NO: 905267 - DNA, 15 bp, Homo sapiens
atattttagccttca

SEQ ID NO: 905268 - DNA, 15 bp, Homo sapiens
catattttagccttc

SEQ ID NO: 905269 - DNA, 15 bp, Homo sapiens
tcatattttagcctt

SEQ ID NO: 905270 - DNA, 15 bp, Homo sapiens
ttcatattttagcct

SEQ ID NO: 905271 - DNA, 15 bp, Homo sapiens
attcatattttagcc

SEQ ID NO: 905272 - DNA, 15 bp, Homo sapiens
cattcatattttagc

SEQ ID NO: 905273 - DNA, 15 bp, Homo sapiens
acattcatattttag

SEQ ID NO: 905274 - DNA, 15 bp, Homo sapiens
tacattcatatttta

SEQ ID NO: 905275 - DNA, 15 bp, Homo sapiens
atacattcatatttt

SEQ ID NO: 905276 - DNA, 15 bp, Homo sapiens
aatacattcatattt

SEQ ID NO: 905277 - DNA, 15 bp, Homo sapiens
caatacattcatatt

SEQ ID NO: 905278 - DNA, 15 bp, Homo sapiens
acaatacattcatat

SEQ ID NO: 905279 - DNA, 15 bp, Homo sapiens
aacaatacattcata

SEQ ID NO: 905280 - DNA, 15 bp, Homo sapiens
caacaatacattcat

SEQ ID NO: 905281 - DNA, 15 bp, Homo sapiens
tcaacaatacattca

SEQ ID NO: 905282 - DNA, 15 bp, Homo sapiens
ttcaacaatacattc

SEQ ID NO: 905283 - DNA, 15 bp, Homo sapiens
cttcaacaatacatt

SEQ ID NO: 905284 - DNA, 15 bp, Homo sapiens
tcttcaacaatacat

SEQ ID NO: 905285 - DNA, 15 bp, Homo sapiens
ttcttcaacaataca

SEQ ID NO: 905286 - DNA, 15 bp, Homo sapiens
gttcttcaacaatac

SEQ ID NO: 905287 - DNA, 15 bp, Homo sapiens
tgttcttcaacaata

SEQ ID NO: 905288 - DNA, 15 bp, Homo sapiens
ttgttcttcaacaat

SEQ ID NO: 905289 - DNA, 15 bp, Homo sapiens
tttgttcttcaacaa

SEQ ID NO: 905290 - DNA, 15 bp, Homo sapiens
ttttgttcttcaaca

SEQ ID NO: 905291 - DNA, 15 bp, Homo sapiens
attttgttcttcaac

SEQ ID NO: 905292 - DNA, 15 bp, Homo sapiens
tattttgttcttcaa

SEQ ID NO: 905293 - DNA, 15 bp, Homo sapiens
gtattttgttcttca

SEQ ID NO: 905294 - DNA, 15 bp, Homo sapiens
tgtattttgttcttc

SEQ ID NO: 905295 - DNA, 15 bp, Homo sapiens
atgtattttgttctt

SEQ ID NO: 905296 - DNA, 15 bp, Homo sapiens
aatgtattttgttct

SEQ ID NO: 905297 - DNA, 15 bp, Homo sapiens
caatgtattttgttc

SEQ ID NO: 905298 - DNA, 15 bp, Homo sapiens
tcaatgtattttgtt

SEQ ID NO: 905299 - DNA, 15 bp, Homo sapiens
ctcaatgtattttgt

SEQ ID NO: 905300 - DNA, 15 bp, Homo sapiens
tctcaatgtattttg

SEQ ID NO: 905301 - DNA, 15 bp, Homo sapiens
atctcaatgtatttt

SEQ ID NO: 905302 - DNA, 15 bp, Homo sapiens
aatctcaatgtattt

SEQ ID NO: 905303 - DNA, 15 bp, Homo sapiens
gaatctcaatgtatt

SEQ ID NO: 905304 - DNA, 15 bp, Homo sapiens
ggaatctcaatgtat

SEQ ID NO: 905305 - DNA, 15 bp, Homo sapiens
aggaatctcaatgta

SEQ ID NO: 905306 - DNA, 15 bp, Homo sapiens
caggaatctcaatgt

SEQ ID NO: 905307 - DNA, 15 bp, Homo sapiens
tcaggaatctcaatg

SEQ ID NO: 905308 - DNA, 15 bp, Homo sapiens
ctcaggaatctcaat

SEQ ID NO: 905309 - DNA, 15 bp, Homo sapiens
tctcaggaatctcaa

SEQ ID NO: 905310 - DNA, 15 bp, Homo sapiens
ttctcaggaatctca

SEQ ID NO: 905311 - DNA, 15 bp, Homo sapiens
cttctcaggaatctc

SEQ ID NO: 905312 - DNA, 15 bp, Homo sapiens
ccttctcaggaatct

SEQ ID NO: 905313 - DNA, 15 bp, Homo sapiens
accttctcaggaatc

SEQ ID NO: 905314 - DNA, 15 bp, Homo sapiens
taccttctcaggaat

SEQ ID NO: 905315 - DNA, 15 bp, Homo sapiens
ctaccttctcaggaa

SEQ ID NO: 905316 - DNA, 15 bp, Homo sapiens
cctaccttctcagga

SEQ ID NO: 905317 - DNA, 15 bp, Homo sapiens
tcctaccttctcagg

SEQ ID NO: 905318 - DNA, 15 bp, Homo sapiens
ttcctaccttctcag

SEQ ID NO: 905319 - DNA, 15 bp, Homo sapiens
attcctaccttctca

SEQ ID NO: 905320 - DNA, 15 bp, Homo sapiens
cattcctaccttctc

SEQ ID NO: 905321 - DNA, 15 bp, Homo sapiens
acattcctaccttct

SEQ ID NO: 905322 - DNA, 15 bp, Homo sapiens
cacattcctaccttc

SEQ ID NO: 905323 - DNA, 15 bp, Homo sapiens
tcacattcctacctt

SEQ ID NO: 905324 - DNA, 15 bp, Homo sapiens
atcacattcctacct

SEQ ID NO: 905325 - DNA, 15 bp, Homo sapiens
tatcacattcctacc

SEQ ID NO: 905326 - DNA, 15 bp, Homo sapiens
gtatcacattcctac

SEQ ID NO: 905327 - DNA, 15 bp, Homo sapiens
tgtatcacattccta

SEQ ID NO: 905328 - DNA, 15 bp, Homo sapiens
ttgtatcacattcct

SEQ ID NO: 905329 - DNA, 15 bp, Homo sapiens
tttgtatcacattcc

SEQ ID NO: 905330 - DNA, 15 bp, Homo sapiens
atttgtatcacattc

SEQ ID NO: 905331 - DNA, 15 bp, Homo sapiens
catttgtatcacatt

SEQ ID NO: 905332 - DNA, 15 bp, Homo sapiens
ccatttgtatcacat

SEQ ID NO: 905333 - DNA, 15 bp, Homo sapiens
tccatttgtatcaca

SEQ ID NO: 905334 - DNA, 15 bp, Homo sapiens
atccatttgtatcac

SEQ ID NO: 905335 - DNA, 15 bp, Homo sapiens
gatccatttgtatca

SEQ ID NO: 905336 - DNA, 15 bp, Homo sapiens
tgatccatttgtatc

SEQ ID NO: 905337 - DNA, 15 bp, Homo sapiens
ctgatccatttgtat

SEQ ID NO: 905338 - DNA, 15 bp, Homo sapiens
gctgatccatttgta

SEQ ID NO: 905339 - DNA, 15 bp, Homo sapiens
ggctgatccatttgt

SEQ ID NO: 905340 - DNA, 15 bp, Homo sapiens
aggctgatccatttg

SEQ ID NO: 905341 - DNA, 15 bp, Homo sapiens
aaggctgatccattt

SEQ ID NO: 905342 - DNA, 15 bp, Homo sapiens
aaaggctgatccatt

SEQ ID NO: 905343 - DNA, 15 bp, Homo sapiens
caaaggctgatccat

SEQ ID NO: 905344 - DNA, 15 bp, Homo sapiens
tcaaaggctgatcca

SEQ ID NO: 905345 - DNA, 15 bp, Homo sapiens
ttcaaaggctgatcc

SEQ ID NO: 905346 - DNA, 15 bp, Homo sapiens
tttcaaaggctgatc

SEQ ID NO: 905347 - DNA, 15 bp, Homo sapiens
ctttcaaaggctgat

SEQ ID NO: 905348 - DNA, 15 bp, Homo sapiens
cctttcaaaggctga

SEQ ID NO: 905349 - DNA, 15 bp, Homo sapiens
tcctttcaaaggctg

SEQ ID NO: 905350 - DNA, 15 bp, Homo sapiens
ctcctttcaaaggct

SEQ ID NO: 905351 - DNA, 15 bp, Homo sapiens
cctcctttcaaaggc

SEQ ID NO: 905352 - DNA, 15 bp, Homo sapiens
tcctcctttcaaagg

SEQ ID NO: 905353 - DNA, 15 bp, Homo sapiens
ttcctcctttcaaag

SEQ ID NO: 905354 - DNA, 15 bp, Homo sapiens
attcctcctttcaaa

SEQ ID NO: 905355 - DNA, 15 bp, Homo sapiens
tattcctcctttcaa

SEQ ID NO: 905356 - DNA, 15 bp, Homo sapiens
gtattcctcctttca

SEQ ID NO: 905357 - DNA, 15 bp, Homo sapiens
ggtattcctcctttc

SEQ ID NO: 905358 - DNA, 15 bp, Homo sapiens
gggtattcctccttt

SEQ ID NO: 905359 - DNA, 15 bp, Homo sapiens
agggtattcctcctt

SEQ ID NO: 905360 - DNA, 15 bp, Homo sapiens
aagggtattcctcct

SEQ ID NO: 905361 - DNA, 15 bp, Homo sapiens
aaagggtattcctcc

SEQ ID NO: 905362 - DNA, 15 bp, Homo sapiens
aaaagggtattcctc

SEQ ID NO: 905363 - DNA, 15 bp, Homo sapiens
gaaaagggtattcct

SEQ ID NO: 905364 - DNA, 15 bp, Homo sapiens
ggaaaagggtattcc

SEQ ID NO: 905365 - DNA, 15 bp, Homo sapiens
aggaaaagggtattc

SEQ ID NO: 905366 - DNA, 15 bp, Homo sapiens
aaggaaaagggtatt

SEQ ID NO: 905367 - DNA, 15 bp, Homo sapiens
aaaggaaaagggtat

SEQ ID NO: 905368 - DNA, 15 bp, Homo sapiens
caaaggaaaagggta

SEQ ID NO: 905369 - DNA, 15 bp, Homo sapiens
acaaaggaaaagggt

SEQ ID NO: 905370 - DNA, 15 bp, Homo sapiens
cacaaaggaaaaggg

SEQ ID NO: 905371 - DNA, 15 bp, Homo sapiens
acacaaaggaaaagg

SEQ ID NO: 905372 - DNA, 15 bp, Homo sapiens
aacacaaaggaaaag

SEQ ID NO: 905373 - DNA, 15 bp, Homo sapiens
taacacaaaggaaaa

SEQ ID NO: 905374 - DNA, 15 bp, Homo sapiens
ctaacacaaaggaaa

SEQ ID NO: 905375 - DNA, 15 bp, Homo sapiens
cctaacacaaaggaa

SEQ ID NO: 905376 - DNA, 15 bp, Homo sapiens
tcctaacacaaagga

SEQ ID NO: 905377 - DNA, 15 bp, Homo sapiens
ctcctaacacaaagg

SEQ ID NO: 905378 - DNA, 15 bp, Homo sapiens
tctcctaacacaaag

SEQ ID NO: 905379 - DNA, 15 bp, Homo sapiens
ctctcctaacacaaa

SEQ ID NO: 905380 - DNA, 15 bp, Homo sapiens
cctctcctaacacaa

SEQ ID NO: 905381 - DNA, 15 bp, Homo sapiens
tcctctcctaacaca

SEQ ID NO: 905382 - DNA, 15 bp, Homo sapiens
ctcctctcctaacac

SEQ ID NO: 905383 - DNA, 15 bp, Homo sapiens
cctcctctcctaaca

SEQ ID NO: 905384 - DNA, 15 bp, Homo sapiens
tcctcctctcctaac

SEQ ID NO: 905385 - DNA, 15 bp, Homo sapiens
atcctcctctcctaa

SEQ ID NO: 905386 - DNA, 15 bp, Homo sapiens
catcctcctctccta

SEQ ID NO: 905387 - DNA, 15 bp, Homo sapiens
tcatcctcctctcct

SEQ ID NO: 905388 - DNA, 15 bp, Homo sapiens
ctcatcctcctctcc

SEQ ID NO: 905389 - DNA, 15 bp, Homo sapiens
actcatcctcctctc

SEQ ID NO: 905390 - DNA, 15 bp, Homo sapiens
cactcatcctcctct

SEQ ID NO: 905391 - DNA, 15 bp, Homo sapiens
ccactcatcctcctc

SEQ ID NO: 905392 - DNA, 15 bp, Homo sapiens
tccactcatcctcct

SEQ ID NO: 905393 - DNA, 15 bp, Homo sapiens
atccactcatcctcc

SEQ ID NO: 905394 - DNA, 15 bp, Homo sapiens
catccactcatcctc

SEQ ID NO: 905395 - DNA, 15 bp, Homo sapiens
tcatccactcatcct

SEQ ID NO: 905396 - DNA, 15 bp, Homo sapiens
ctcatccactcatcc

SEQ ID NO: 905397 - DNA, 15 bp, Homo sapiens
gctcatccactcatc

SEQ ID NO: 905398 - DNA, 15 bp, Homo sapiens
cgctcatccactcat

SEQ ID NO: 905399 - DNA, 15 bp, Homo sapiens
acgctcatccactca

SEQ ID NO: 905400 - DNA, 15 bp, Homo sapiens
cacgctcatccactc

SEQ ID NO: 905401 - DNA, 15 bp, Homo sapiens
ccacgctcatccact

SEQ ID NO: 905402 - DNA, 15 bp, Homo sapiens
cccacgctcatccac

SEQ ID NO: 905403 - DNA, 15 bp, Homo sapiens
tcccacgctcatcca

SEQ ID NO: 905404 - DNA, 15 bp, Homo sapiens
ttcccacgctcatcc

SEQ ID NO: 905405 - DNA, 15 bp, Homo sapiens
cttcccacgctcatc

SEQ ID NO: 905406 - DNA, 15 bp, Homo sapiens
tcttcccacgctcat

SEQ ID NO: 905407 - DNA, 15 bp, Homo sapiens
ctcttcccacgctca

SEQ ID NO: 905408 - DNA, 15 bp, Homo sapiens
actcttcccacgctc

SEQ ID NO: 905409 - DNA, 15 bp, Homo sapiens
cactcttcccacgct

SEQ ID NO: 905410 - DNA, 15 bp, Homo sapiens
ccactcttcccacgc

SEQ ID NO: 905411 - DNA, 15 bp, Homo sapiens
tccactcttcccacg

SEQ ID NO: 905412 - DNA, 15 bp, Homo sapiens
atccactcttcccac

SEQ ID NO: 905413 - DNA, 15 bp, Homo sapiens
catccactcttccca

SEQ ID NO: 905414 - DNA, 15 bp, Homo sapiens
acatccactcttccc

SEQ ID NO: 905415 - DNA, 15 bp, Homo sapiens
cacatccactcttcc

SEQ ID NO: 905416 - DNA, 15 bp, Homo sapiens
acacatccactcttc

SEQ ID NO: 905417 - DNA, 15 bp, Homo sapiens
tacacatccactctt

SEQ ID NO: 905418 - DNA, 15 bp, Homo sapiens
atacacatccactct

SEQ ID NO: 905419 - DNA, 15 bp, Homo sapiens
tatacacatccactc

SEQ ID NO: 905420 - DNA, 15 bp, Homo sapiens
ctatacacatccact

SEQ ID NO: 905421 - DNA, 15 bp, Homo sapiens
tctatacacatccac

SEQ ID NO: 905422 - DNA, 15 bp, Homo sapiens
ctctatacacatcca

SEQ ID NO: 905423 - DNA, 15 bp, Homo sapiens
cctctatacacatcc

SEQ ID NO: 905424 - DNA, 15 bp, Homo sapiens
gcctctatacacatc

SEQ ID NO: 905425 - DNA, 15 bp, Homo sapiens
agcctctatacacat

SEQ ID NO: 905426 - DNA, 15 bp, Homo sapiens
aagcctctatacaca

SEQ ID NO: 905427 - DNA, 15 bp, Homo sapiens
aaagcctctatacac

SEQ ID NO: 905428 - DNA, 15 bp, Homo sapiens
aaaagcctctataca

SEQ ID NO: 905429 - DNA, 15 bp, Homo sapiens
taaaagcctctatac

SEQ ID NO: 905430 - DNA, 15 bp, Homo sapiens
ataaaagcctctata

SEQ ID NO: 905431 - DNA, 15 bp, Homo sapiens
cataaaagcctctat

SEQ ID NO: 905432 - DNA, 15 bp, Homo sapiens
acataaaagcctcta

SEQ ID NO: 905433 - DNA, 15 bp, Homo sapiens
aacataaaagcctct

SEQ ID NO: 905434 - DNA, 15 bp, Homo sapiens
aaacataaaagcctc

SEQ ID NO: 905435 - DNA, 15 bp, Homo sapiens
caaacataaaagcct

SEQ ID NO: 905436 - DNA, 15 bp, Homo sapiens
acaaacataaaagcc

SEQ ID NO: 905437 - DNA, 15 bp, Homo sapiens
tacaaacataaaagc

SEQ ID NO: 905438 - DNA, 15 bp, Homo sapiens
ctacaaacataaaag

SEQ ID NO: 905439 - DNA, 15 bp, Homo sapiens
cctacaaacataaaa

SEQ ID NO: 905440 - DNA, 15 bp, Homo sapiens
gcctacaaacataaa

SEQ ID NO: 905441 - DNA, 15 bp, Homo sapiens
tgcctacaaacataa

SEQ ID NO: 905442 - DNA, 15 bp, Homo sapiens
atgcctacaaacata

SEQ ID NO: 905443 - DNA, 15 bp, Homo sapiens
tatgcctacaaacat

SEQ ID NO: 905444 - DNA, 15 bp, Homo sapiens
ttatgcctacaaaca

SEQ ID NO: 905445 - DNA, 15 bp, Homo sapiens
attatgcctacaaac

SEQ ID NO: 905446 - DNA, 15 bp, Homo sapiens
cattatgcctacaaa

SEQ ID NO: 905447 - DNA, 15 bp, Homo sapiens
gcattatgcctacaa

SEQ ID NO: 905448 - DNA, 15 bp, Homo sapiens
agcattatgcctaca

SEQ ID NO: 905449 - DNA, 15 bp, Homo sapiens
aagcattatgcctac

SEQ ID NO: 905450 - DNA, 15 bp, Homo sapiens
caagcattatgccta

SEQ ID NO: 905451 - DNA, 15 bp, Homo sapiens
ccaagcattatgcct

SEQ ID NO: 905452 - DNA, 15 bp, Homo sapiens
tccaagcattatgcc

SEQ ID NO: 905453 - DNA, 15 bp, Homo sapiens
ttccaagcattatgc

SEQ ID NO: 905454 - DNA, 15 bp, Homo sapiens
cttccaagcattatg

SEQ ID NO: 905455 - DNA, 15 bp, Homo sapiens
acttccaagcattat

SEQ ID NO: 905456 - DNA, 15 bp, Homo sapiens
aacttccaagcatta

SEQ ID NO: 905457 - DNA, 15 bp, Homo sapiens
caacttccaagcatt

SEQ ID NO: 905458 - DNA, 15 bp, Homo sapiens
tcaacttccaagcat

SEQ ID NO: 905459 - DNA, 15 bp, Homo sapiens
ctcaacttccaagca

SEQ ID NO: 905460 - DNA, 15 bp, Homo sapiens
cctcaacttccaagc

SEQ ID NO: 905461 - DNA, 15 bp, Homo sapiens
ccctcaacttccaag

SEQ ID NO: 905462 - DNA, 15 bp, Homo sapiens
cccctcaacttccaa

SEQ ID NO: 905463 - DNA, 15 bp, Homo sapiens
acccctcaacttcca

SEQ ID NO: 905464 - DNA, 15 bp, Homo sapiens
aacccctcaacttcc

SEQ ID NO: 905465 - DNA, 15 bp, Homo sapiens
caacccctcaacttc

SEQ ID NO: 905466 - DNA, 15 bp, Homo sapiens
ccaacccctcaactt

SEQ ID NO: 905467 - DNA, 15 bp, Homo sapiens
accaacccctcaact

SEQ ID NO: 905468 - DNA, 15 bp, Homo sapiens
caccaacccctcaac

SEQ ID NO: 905469 - DNA, 15 bp, Homo sapiens
tcaccaacccctcaa

SEQ ID NO: 905470 - DNA, 15 bp, Homo sapiens
atcaccaacccctca

SEQ ID NO: 905471 - DNA, 15 bp, Homo sapiens
catcaccaacccctc

SEQ ID NO: 905472 - DNA, 15 bp, Homo sapiens
tcatcaccaacccct

SEQ ID NO: 905473 - DNA, 15 bp, Homo sapiens
gtcatcaccaacccc

SEQ ID NO: 905474 - DNA, 15 bp, Homo sapiens
tgtcatcaccaaccc

SEQ ID NO: 905475 - DNA, 15 bp, Homo sapiens
atgtcatcaccaacc

SEQ ID NO: 905476 - DNA, 15 bp, Homo sapiens
gatgtcatcaccaac

SEQ ID NO: 905477 - DNA, 15 bp, Homo sapiens
agatgtcatcaccaa

SEQ ID NO: 905478 - DNA, 15 bp, Homo sapiens
aagatgtcatcacca

SEQ ID NO: 905479 - DNA, 15 bp, Homo sapiens
gaagatgtcatcacc

SEQ ID NO: 905480 - DNA, 15 bp, Homo sapiens
agaagatgtcatcac

SEQ ID NO: 905481 - DNA, 15 bp, Homo sapiens
cagaagatgtcatca

SEQ ID NO: 905482 - DNA, 15 bp, Homo sapiens
acagaagatgtcatc

SEQ ID NO: 905483 - DNA, 15 bp, Homo sapiens
aacagaagatgtcat

SEQ ID NO: 905484 - DNA, 15 bp, Homo sapiens
taacagaagatgtca

SEQ ID NO: 905485 - DNA, 15 bp, Homo sapiens
ttaacagaagatgtc

SEQ ID NO: 905486 - DNA, 15 bp, Homo sapiens
tttaacagaagatgt

SEQ ID NO: 905487 - DNA, 15 bp, Homo sapiens
ttttaacagaagatg

SEQ ID NO: 905488 - DNA, 15 bp, Homo sapiens
tttttaacagaagat

SEQ ID NO: 905489 - DNA, 15 bp, Homo sapiens
ctttttaacagaaga

SEQ ID NO: 905490 - DNA, 15 bp, Homo sapiens
tctttttaacagaag

SEQ ID NO: 905491 - DNA, 15 bp, Homo sapiens
ctctttttaacagaa

SEQ ID NO: 905492 - DNA, 15 bp, Homo sapiens
actctttttaacaga

SEQ ID NO: 905493 - DNA, 15 bp, Homo sapiens
cactctttttaacag

SEQ ID NO: 905494 - DNA, 15 bp, Homo sapiens
ccactctttttaaca

SEQ ID NO: 905495 - DNA, 15 bp, Homo sapiens
cccactctttttaac

SEQ ID NO: 905496 - DNA, 15 bp, Homo sapiens
tcccactctttttaa

SEQ ID NO: 905497 - DNA, 15 bp, Homo sapiens
ttcccactcttttta

SEQ ID NO: 905498 - DNA, 15 bp, Homo sapiens
tttcccactcttttt

SEQ ID NO: 905499 - DNA, 15 bp, Homo sapiens
atttcccactctttt

SEQ ID NO: 905500 - DNA, 15 bp, Homo sapiens
catttcccactcttt

SEQ ID NO: 905501 - DNA, 15 bp, Homo sapiens
ccatttcccactctt

SEQ ID NO: 905502 - DNA, 15 bp, Homo sapiens
accatttcccactct

SEQ ID NO: 905503 - DNA, 15 bp, Homo sapiens
caccatttcccactc

SEQ ID NO: 905504 - DNA, 15 bp, Homo sapiens
acaccatttcccact

SEQ ID NO: 905505 - DNA, 15 bp, Homo sapiens
cacaccatttcccac

SEQ ID NO: 905506 - DNA, 15 bp, Homo sapiens
ccacaccatttccca

SEQ ID NO: 905507 - DNA, 15 bp, Homo sapiens
accacaccatttccc

SEQ ID NO: 905508 - DNA, 15 bp, Homo sapiens
gaccacaccatttcc

SEQ ID NO: 905509 - DNA, 15 bp, Homo sapiens
tgaccacaccatttc

SEQ ID NO: 905510 - DNA, 15 bp, Homo sapiens
gtgaccacaccattt

SEQ ID NO: 905511 - DNA, 15 bp, Homo sapiens
tgtgaccacaccatt

SEQ ID NO: 905512 - DNA, 15 bp, Homo sapiens
atgtgaccacaccat

SEQ ID NO: 905513 - DNA, 15 bp, Homo sapiens
aatgtgaccacacca

SEQ ID NO: 905514 - DNA, 15 bp, Homo sapiens
aaatgtgaccacacc

SEQ ID NO: 905515 - DNA, 15 bp, Homo sapiens
aaaatgtgaccacac

SEQ ID NO: 905516 - DNA, 15 bp, Homo sapiens
taaaatgtgaccaca

SEQ ID NO: 905517 - DNA, 15 bp, Homo sapiens
ttaaaatgtgaccac

SEQ ID NO: 905518 - DNA, 15 bp, Homo sapiens
cttaaaatgtgacca

SEQ ID NO: 905519 - DNA, 15 bp, Homo sapiens
ccttaaaatgtgacc

SEQ ID NO: 905520 - DNA, 15 bp, Homo sapiens
tccttaaaatgtgac

SEQ ID NO: 905521 - DNA, 15 bp, Homo sapiens
ttccttaaaatgtga

SEQ ID NO: 905522 - DNA, 15 bp, Homo sapiens
tttccttaaaatgtg

SEQ ID NO: 905523 - DNA, 15 bp, Homo sapiens
atttccttaaaatgt

SEQ ID NO: 905524 - DNA, 15 bp, Homo sapiens
aatttccttaaaatg

SEQ ID NO: 905525 - DNA, 15 bp, Homo sapiens
taatttccttaaaat

SEQ ID NO: 905526 - DNA, 15 bp, Homo sapiens
ctaatttccttaaaa

SEQ ID NO: 905527 - DNA, 15 bp, Homo sapiens
cctaatttccttaaa

SEQ ID NO: 905528 - DNA, 15 bp, Homo sapiens
acctaatttccttaa

SEQ ID NO: 905529 - DNA, 15 bp, Homo sapiens
tacctaatttcctta

SEQ ID NO: 905530 - DNA, 15 bp, Homo sapiens
ttacctaatttcctt

SEQ ID NO: 905531 - DNA, 15 bp, Homo sapiens
tttacctaatttcct

SEQ ID NO: 905532 - DNA, 15 bp, Homo sapiens
ttttacctaatttcc

SEQ ID NO: 905533 - DNA, 15 bp, Homo sapiens
attttacctaatttc

SEQ ID NO: 905534 - DNA, 15 bp, Homo sapiens
aattttacctaattt

SEQ ID NO: 905535 - DNA, 15 bp, Homo sapiens
aaattttacctaatt

SEQ ID NO: 905536 - DNA, 15 bp, Homo sapiens
caaattttacctaat

SEQ ID NO: 905537 - DNA, 15 bp, Homo sapiens
tcaaattttacctaa

SEQ ID NO: 905538 - DNA, 15 bp, Homo sapiens
ttcaaattttaccta

SEQ ID NO: 905539 - DNA, 15 bp, Homo sapiens
tttcaaattttacct

SEQ ID NO: 905540 - DNA, 15 bp, Homo sapiens
atttcaaattttacc

SEQ ID NO: 905541 - DNA, 15 bp, Homo sapiens
tatttcaaattttac

SEQ ID NO: 905542 - DNA, 15 bp, Homo sapiens
atatttcaaatttta

SEQ ID NO: 905543 - DNA, 15 bp, Homo sapiens
tatatttcaaatttt

SEQ ID NO: 905544 - DNA, 15 bp, Homo sapiens
atatatttcaaattt

SEQ ID NO: 905545 - DNA, 15 bp, Homo sapiens
aatatatttcaaatt

SEQ ID NO: 905546 - DNA, 15 bp, Homo sapiens
caatatatttcaaat

SEQ ID NO: 905547 - DNA, 15 bp, Homo sapiens
ccaatatatttcaaa

SEQ ID NO: 905548 - DNA, 15 bp, Homo sapiens
tccaatatatttcaa

SEQ ID NO: 905549 - DNA, 15 bp, Homo sapiens
ctccaatatatttca

SEQ ID NO: 905550 - DNA, 15 bp, Homo sapiens
tctccaatatatttc

SEQ ID NO: 905551 - DNA, 15 bp, Homo sapiens
gtctccaatatattt

SEQ ID NO: 905552 - DNA, 15 bp, Homo sapiens
tgtctccaatatatt

SEQ ID NO: 905553 - DNA, 15 bp, Homo sapiens
ctgtctccaatatat

SEQ ID NO: 905554 - DNA, 15 bp, Homo sapiens
cctgtctccaatata

SEQ ID NO: 905555 - DNA, 15 bp, Homo sapiens
tcctgtctccaatat

SEQ ID NO: 905556 - DNA, 15 bp, Homo sapiens
gtcctgtctccaata

SEQ ID NO: 905557 - DNA, 15 bp, Homo sapiens
agtcctgtctccaat

SEQ ID NO: 905558 - DNA, 15 bp, Homo sapiens
cagtcctgtctccaa

SEQ ID NO: 905559 - DNA, 15 bp, Homo sapiens
ccagtcctgtctcca

SEQ ID NO: 905560 - DNA, 15 bp, Homo sapiens
tccagtcctgtctcc

SEQ ID NO: 905561 - DNA, 15 bp, Homo sapiens
ctccagtcctgtctc

SEQ ID NO: 905562 - DNA, 15 bp, Homo sapiens
tctccagtcctgtct

SEQ ID NO: 905563 - DNA, 15 bp, Homo sapiens
ctctccagtcctgtc

SEQ ID NO: 905564 - DNA, 15 bp, Homo sapiens
actctccagtcctgt

SEQ ID NO: 905565 - DNA, 15 bp, Homo sapiens
aactctccagtcctg

SEQ ID NO: 905566 - DNA, 15 bp, Homo sapiens
caactctccagtcct

SEQ ID NO: 905567 - DNA, 15 bp, Homo sapiens
ccaactctccagtcc

SEQ ID NO: 905568 - DNA, 15 bp, Homo sapiens
cccaactctccagtc

SEQ ID NO: 905569 - DNA, 15 bp, Homo sapiens
ccccaactctccagt

SEQ ID NO: 905570 - DNA, 15 bp, Homo sapiens
tccccaactctccag

SEQ ID NO: 905571 - DNA, 15 bp, Homo sapiens
atccccaactctcca

SEQ ID NO: 905572 - DNA, 15 bp, Homo sapiens
gatccccaactctcc

SEQ ID NO: 905573 - DNA, 15 bp, Homo sapiens
agatccccaactctc

SEQ ID NO: 905574 - DNA, 15 bp, Homo sapiens
cagatccccaactct

SEQ ID NO: 905575 - DNA, 15 bp, Homo sapiens
ccagatccccaactc

SEQ ID NO: 905576 - DNA, 15 bp, Homo sapiens
tccagatccccaact

SEQ ID NO: 905577 - DNA, 15 bp, Homo sapiens
ctccagatccccaac

SEQ ID NO: 905578 - DNA, 15 bp, Homo sapiens
actccagatccccaa

SEQ ID NO: 905579 - DNA, 15 bp, Homo sapiens
gactccagatcccca

SEQ ID NO: 905580 - DNA, 15 bp, Homo sapiens
tgactccagatcccc

SEQ ID NO: 905581 - DNA, 15 bp, Homo sapiens
ctgactccagatccc

SEQ ID NO: 905582 - DNA, 15 bp, Homo sapiens
tctgactccagatcc

SEQ ID NO: 905583 - DNA, 15 bp, Homo sapiens
gtctgactccagatc

SEQ ID NO: 905584 - DNA, 15 bp, Homo sapiens
tgtctgactccagat

SEQ ID NO: 905585 - DNA, 15 bp, Homo sapiens
ctgtctgactccaga

SEQ ID NO: 905586 - DNA, 15 bp, Homo sapiens
tctgtctgactccag

SEQ ID NO: 905587 - DNA, 15 bp, Homo sapiens
atctgtctgactcca

SEQ ID NO: 905588 - DNA, 15 bp, Homo sapiens
aatctgtctgactcc

SEQ ID NO: 905589 - DNA, 15 bp, Homo sapiens
aaatctgtctgactc

SEQ ID NO: 905590 - DNA, 15 bp, Homo sapiens
caaatctgtctgact

SEQ ID NO: 905591 - DNA, 15 bp, Homo sapiens
tcaaatctgtctgac

SEQ ID NO: 905592 - DNA, 15 bp, Homo sapiens
ctcaaatctgtctga

SEQ ID NO: 905593 - DNA, 15 bp, Homo sapiens
actcaaatctgtctg

SEQ ID NO: 905594 - DNA, 15 bp, Homo sapiens
aactcaaatctgtct

SEQ ID NO: 905595 - DNA, 15 bp, Homo sapiens
gaactcaaatctgtc

SEQ ID NO: 905596 - DNA, 15 bp, Homo sapiens
agaactcaaatctgt

SEQ ID NO: 905597 - DNA, 15 bp, Homo sapiens
tagaactcaaatctg

SEQ ID NO: 905598 - DNA, 15 bp, Homo sapiens
ctagaactcaaatct

SEQ ID NO: 905599 - DNA, 15 bp, Homo sapiens
actagaactcaaatc

SEQ ID NO: 905600 - DNA, 15 bp, Homo sapiens
gactagaactcaaat

SEQ ID NO: 905601 - DNA, 15 bp, Homo sapiens
ggactagaactcaaa

SEQ ID NO: 905602 - DNA, 15 bp, Homo sapiens
aggactagaactcaa

SEQ ID NO: 905603 - DNA, 15 bp, Homo sapiens
caggactagaactca

SEQ ID NO: 905604 - DNA, 15 bp, Homo sapiens
tcaggactagaactc

SEQ ID NO: 905605 - DNA, 15 bp, Homo sapiens
atcaggactagaact

SEQ ID NO: 905606 - DNA, 15 bp, Homo sapiens
aatcaggactagaac

SEQ ID NO: 905607 - DNA, 15 bp, Homo sapiens
gaatcaggactagaa

SEQ ID NO: 905608 - DNA, 15 bp, Homo sapiens
agaatcaggactaga

SEQ ID NO: 905609 - DNA, 15 bp, Homo sapiens
aagaatcaggactag

SEQ ID NO: 905610 - DNA, 15 bp, Homo sapiens
gaagaatcaggacta

SEQ ID NO: 905611 - DNA, 15 bp, Homo sapiens
agaagaatcaggact

SEQ ID NO: 905612 - DNA, 15 bp, Homo sapiens
tagaagaatcaggac

SEQ ID NO: 905613 - DNA, 15 bp, Homo sapiens
gtagaagaatcagga

SEQ ID NO: 905614 - DNA, 15 bp, Homo sapiens
agtagaagaatcagg

SEQ ID NO: 905615 - DNA, 15 bp, Homo sapiens
gagtagaagaatcag

SEQ ID NO: 905616 - DNA, 15 bp, Homo sapiens
cgagtagaagaatca

SEQ ID NO: 905617 - DNA, 15 bp, Homo sapiens
acgagtagaagaatc

SEQ ID NO: 905618 - DNA, 15 bp, Homo sapiens
aacgagtagaagaat

SEQ ID NO: 905619 - DNA, 15 bp, Homo sapiens
taacgagtagaagaa

SEQ ID NO: 905620 - DNA, 15 bp, Homo sapiens
ttaacgagtagaaga

SEQ ID NO: 905621 - DNA, 15 bp, Homo sapiens
gttaacgagtagaag

SEQ ID NO: 905622 - DNA, 15 bp, Homo sapiens
agttaacgagtagaa

SEQ ID NO: 905623 - DNA, 15 bp, Homo sapiens
gagttaacgagtaga

SEQ ID NO: 905624 - DNA, 15 bp, Homo sapiens
agagttaacgagtag

SEQ ID NO: 905625 - DNA, 15 bp, Homo sapiens
gagagttaacgagta

SEQ ID NO: 905626 - DNA, 15 bp, Homo sapiens
agagagttaacgagt

SEQ ID NO: 905627 - DNA, 15 bp, Homo sapiens
cagagagttaacgag

SEQ ID NO: 905628 - DNA, 15 bp, Homo sapiens
tcagagagttaacga

SEQ ID NO: 905629 - DNA, 15 bp, Homo sapiens
ttcagagagttaacg

SEQ ID NO: 905630 - DNA, 15 bp, Homo sapiens
gttcagagagttaac

SEQ ID NO: 905631 - DNA, 15 bp, Homo sapiens
agttcagagagttaa

SEQ ID NO: 905632 - DNA, 15 bp, Homo sapiens
aagttcagagagtta

SEQ ID NO: 905633 - DNA, 15 bp, Homo sapiens
caagttcagagagtt

SEQ ID NO: 905634 - DNA, 15 bp, Homo sapiens
ccaagttcagagagt

SEQ ID NO: 905635 - DNA, 15 bp, Homo sapiens
tccaagttcagagag

SEQ ID NO: 905636 - DNA, 15 bp, Homo sapiens
atccaagttcagaga

SEQ ID NO: 905637 - DNA, 15 bp, Homo sapiens
catccaagttcagag

SEQ ID NO: 905638 - DNA, 15 bp, Homo sapiens
tcatccaagttcaga

SEQ ID NO: 905639 - DNA, 15 bp, Homo sapiens
gtcatccaagttcag

SEQ ID NO: 905640 - DNA, 15 bp, Homo sapiens
ggtcatccaagttca

SEQ ID NO: 905641 - DNA, 15 bp, Homo sapiens
aggtcatccaagttc

SEQ ID NO: 905642 - DNA, 15 bp, Homo sapiens
taggtcatccaagtt

SEQ ID NO: 905643 - DNA, 15 bp, Homo sapiens
ataggtcatccaagt

SEQ ID NO: 905644 - DNA, 15 bp, Homo sapiens
aataggtcatccaag

SEQ ID NO: 905645 - DNA, 15 bp, Homo sapiens
caataggtcatccaa

SEQ ID NO: 905646 - DNA, 15 bp, Homo sapiens
acaataggtcatcca

SEQ ID NO: 905647 - DNA, 15 bp, Homo sapiens
aacaataggtcatcc

SEQ ID NO: 905648 - DNA, 15 bp, Homo sapiens
aaacaataggtcatc

SEQ ID NO: 905649 - DNA, 15 bp, Homo sapiens
aaaacaataggtcat

SEQ ID NO: 905650 - DNA, 15 bp, Homo sapiens
aaaaacaataggtca

SEQ ID NO: 905651 - DNA, 15 bp, Homo sapiens
caaaaacaataggtc

SEQ ID NO: 905652 - DNA, 15 bp, Homo sapiens
tcaaaaacaataggt

SEQ ID NO: 905653 - DNA, 15 bp, Homo sapiens
atcaaaaacaatagg

SEQ ID NO: 905654 - DNA, 15 bp, Homo sapiens
aatcaaaaacaatag

SEQ ID NO: 905655 - DNA, 15 bp, Homo sapiens
caatcaaaaacaata

SEQ ID NO: 905656 - DNA, 15 bp, Homo sapiens
acaatcaaaaacaat

SEQ ID NO: 905657 - DNA, 15 bp, Homo sapiens
tacaatcaaaaacaa

SEQ ID NO: 905658 - DNA, 15 bp, Homo sapiens
atacaatcaaaaaca

SEQ ID NO: 905659 - DNA, 15 bp, Homo sapiens
tatacaatcaaaaac

SEQ ID NO: 905660 - DNA, 15 bp, Homo sapiens
atatacaatcaaaaa

SEQ ID NO: 905661 - DNA, 15 bp, Homo sapiens
gatatacaatcaaaa

SEQ ID NO: 905662 - DNA, 15 bp, Homo sapiens
ggatatacaatcaaa

SEQ ID NO: 905663 - DNA, 15 bp, Homo sapiens
tggatatacaatcaa

SEQ ID NO: 905664 - DNA, 15 bp, Homo sapiens
ctggatatacaatca

SEQ ID NO: 905665 - DNA, 15 bp, Homo sapiens
gctggatatacaatc

SEQ ID NO: 905666 - DNA, 15 bp, Homo sapiens
agctggatatacaat

SEQ ID NO: 905667 - DNA, 15 bp, Homo sapiens
gagctggatatacaa

SEQ ID NO: 905668 - DNA, 15 bp, Homo sapiens
ggagctggatataca

SEQ ID NO: 905669 - DNA, 15 bp, Homo sapiens
aggagctggatatac

SEQ ID NO: 905670 - DNA, 15 bp, Homo sapiens
caggagctggatata

SEQ ID NO: 905671 - DNA, 15 bp, Homo sapiens
ccaggagctggatat

SEQ ID NO: 905672 - DNA, 15 bp, Homo sapiens
cccaggagctggata

SEQ ID NO: 905673 - DNA, 15 bp, Homo sapiens
tcccaggagctggat

SEQ ID NO: 905674 - DNA, 15 bp, Homo sapiens
ttcccaggagctgga

SEQ ID NO: 905675 - DNA, 15 bp, Homo sapiens
tttcccaggagctgg

SEQ ID NO: 905676 - DNA, 15 bp, Homo sapiens
ttttcccaggagctg

SEQ ID NO: 905677 - DNA, 15 bp, Homo sapiens
attttcccaggagct

SEQ ID NO: 905678 - DNA, 15 bp, Homo sapiens
cattttcccaggagc

SEQ ID NO: 905679 - DNA, 15 bp, Homo sapiens
gcattttcccaggag

SEQ ID NO: 905680 - DNA, 15 bp, Homo sapiens
ggcattttcccagga

SEQ ID NO: 905681 - DNA, 15 bp, Homo sapiens
tggcattttcccagg

SEQ ID NO: 905682 - DNA, 15 bp, Homo sapiens
ttggcattttcccag

SEQ ID NO: 905683 - DNA, 15 bp, Homo sapiens
cttggcattttccca

SEQ ID NO: 905684 - DNA, 15 bp, Homo sapiens
gcttggcattttccc

SEQ ID NO: 905685 - DNA, 15 bp, Homo sapiens
tgcttggcattttcc

SEQ ID NO: 905686 - DNA, 15 bp, Homo sapiens
gtgcttggcattttc

SEQ ID NO: 905687 - DNA, 15 bp, Homo sapiens
agtgcttggcatttt

SEQ ID NO: 905688 - DNA, 15 bp, Homo sapiens
aagtgcttggcattt

SEQ ID NO: 905689 - DNA, 15 bp, Homo sapiens
aaagtgcttggcatt

SEQ ID NO: 905690 - DNA, 15 bp, Homo sapiens
gaaagtgcttggcat

SEQ ID NO: 905691 - DNA, 15 bp, Homo sapiens
tgaaagtgcttggca

SEQ ID NO: 905692 - DNA, 15 bp, Homo sapiens
ttgaaagtgcttggc

SEQ ID NO: 905693 - DNA, 15 bp, Homo sapiens
attgaaagtgcttgg

SEQ ID NO: 905694 - DNA, 15 bp, Homo sapiens
tattgaaagtgcttg

SEQ ID NO: 905695 - DNA, 15 bp, Homo sapiens
ttattgaaagtgctt

SEQ ID NO: 905696 - DNA, 15 bp, Homo sapiens
tttattgaaagtgct

SEQ ID NO: 905697 - DNA, 15 bp, Homo sapiens
atttattgaaagtgc

SEQ ID NO: 905698 - DNA, 15 bp, Homo sapiens
tatttattgaaagtg

SEQ ID NO: 905699 - DNA, 15 bp, Homo sapiens
gtatttattgaaagt

SEQ ID NO: 905700 - DNA, 15 bp, Homo sapiens
agtatttattgaaag

SEQ ID NO: 905701 - DNA, 15 bp, Homo sapiens
tagtatttattgaaa

SEQ ID NO: 905702 - DNA, 15 bp, Homo sapiens
ttagtatttattgaa

SEQ ID NO: 905703 - DNA, 15 bp, Homo sapiens
tttagtatttattga

SEQ ID NO: 905704 - DNA, 15 bp, Homo sapiens
atttagtatttattg

SEQ ID NO: 905705 - DNA, 15 bp, Homo sapiens
catttagtatttatt

SEQ ID NO: 905706 - DNA, 15 bp, Homo sapiens
tcatttagtatttat

SEQ ID NO: 905707 - DNA, 15 bp, Homo sapiens
ttcatttagtattta

SEQ ID NO: 905708 - DNA, 15 bp, Homo sapiens
attcatttagtattt

SEQ ID NO: 905709 - DNA, 15 bp, Homo sapiens
aattcatttagtatt

SEQ ID NO: 905710 - DNA, 15 bp, Homo sapiens
taattcatttagtat

SEQ ID NO: 905711 - DNA, 15 bp, Homo sapiens
ataattcatttagta

SEQ ID NO: 905712 - DNA, 15 bp, Homo sapiens
cataattcatttagt

SEQ ID NO: 905713 - DNA, 15 bp, Homo sapiens
ccataattcatttag

SEQ ID NO: 905714 - DNA, 15 bp, Homo sapiens
tccataattcattta

SEQ ID NO: 905715 - DNA, 15 bp, Homo sapiens
ctccataattcattt

SEQ ID NO: 905716 - DNA, 15 bp, Homo sapiens
actccataattcatt

SEQ ID NO: 905717 - DNA, 15 bp, Homo sapiens
aactccataattcat

SEQ ID NO: 905718 - DNA, 15 bp, Homo sapiens
caactccataattca

SEQ ID NO: 905719 - DNA, 15 bp, Homo sapiens
ccaactccataattc

SEQ ID NO: 905720 - DNA, 15 bp, Homo sapiens
tccaactccataatt

SEQ ID NO: 905721 - DNA, 15 bp, Homo sapiens
atccaactccataat

SEQ ID NO: 905722 - DNA, 15 bp, Homo sapiens
gatccaactccataa

SEQ ID NO: 905723 - DNA, 15 bp, Homo sapiens
tgatccaactccata

SEQ ID NO: 905724 - DNA, 15 bp, Homo sapiens
ctgatccaactccat

SEQ ID NO: 905725 - DNA, 15 bp, Homo sapiens
actgatccaactcca

SEQ ID NO: 905726 - DNA, 15 bp, Homo sapiens
aactgatccaactcc

SEQ ID NO: 905727 - DNA, 15 bp, Homo sapiens
gaactgatccaactc

SEQ ID NO: 905728 - DNA, 15 bp, Homo sapiens
agaactgatccaact

SEQ ID NO: 905729 - DNA, 15 bp, Homo sapiens
cagaactgatccaac

SEQ ID NO: 905730 - DNA, 15 bp, Homo sapiens
acagaactgatccaa

SEQ ID NO: 905731 - DNA, 15 bp, Homo sapiens
cacagaactgatcca

SEQ ID NO: 905732 - DNA, 15 bp, Homo sapiens
acacagaactgatcc

SEQ ID NO: 905733 - DNA, 15 bp, Homo sapiens
aacacagaactgatc

SEQ ID NO: 905734 - DNA, 15 bp, Homo sapiens
taacacagaactgat

SEQ ID NO: 905735 - DNA, 15 bp, Homo sapiens
ctaacacagaactga

SEQ ID NO: 905736 - DNA, 15 bp, Homo sapiens
actaacacagaactg

SEQ ID NO: 905737 - DNA, 15 bp, Homo sapiens
cactaacacagaact

SEQ ID NO: 905738 - DNA, 15 bp, Homo sapiens
acactaacacagaac

SEQ ID NO: 905739 - DNA, 15 bp, Homo sapiens
aacactaacacagaa

SEQ ID NO: 905740 - DNA, 15 bp, Homo sapiens
aaacactaacacaga

SEQ ID NO: 905741 - DNA, 15 bp, Homo sapiens
taaacactaacacag

SEQ ID NO: 905742 - DNA, 15 bp, Homo sapiens
ctaaacactaacaca

SEQ ID NO: 905743 - DNA, 15 bp, Homo sapiens
gctaaacactaacac

SEQ ID NO: 905744 - DNA, 15 bp, Homo sapiens
agctaaacactaaca

SEQ ID NO: 905745 - DNA, 15 bp, Homo sapiens
tagctaaacactaac

SEQ ID NO: 905746 - DNA, 15 bp, Homo sapiens
ctagctaaacactaa

SEQ ID NO: 905747 - DNA, 15 bp, Homo sapiens
cctagctaaacacta

SEQ ID NO: 905748 - DNA, 15 bp, Homo sapiens
acctagctaaacact

SEQ ID NO: 905749 - DNA, 15 bp, Homo sapiens
tacctagctaaacac

SEQ ID NO: 905750 - DNA, 15 bp, Homo sapiens
ctacctagctaaaca

SEQ ID NO: 905751 - DNA, 15 bp, Homo sapiens
gctacctagctaaac

SEQ ID NO: 905752 - DNA, 15 bp, Homo sapiens
agctacctagctaaa

SEQ ID NO: 905753 - DNA, 15 bp, Homo sapiens
cagctacctagctaa

SEQ ID NO: 905754 - DNA, 15 bp, Homo sapiens
gcagctacctagcta

SEQ ID NO: 905755 - DNA, 15 bp, Homo sapiens
agcagctacctagct

SEQ ID NO: 905756 - DNA, 15 bp, Homo sapiens
cagcagctacctagc

SEQ ID NO: 905757 - DNA, 15 bp, Homo sapiens
acagcagctacctag

SEQ ID NO: 905758 - DNA, 15 bp, Homo sapiens
tacagcagctaccta

SEQ ID NO: 905759 - DNA, 15 bp, Homo sapiens
ctacagcagctacct

SEQ ID NO: 905760 - DNA, 15 bp, Homo sapiens
tctacagcagctacc

SEQ ID NO: 905761 - DNA, 15 bp, Homo sapiens
ttctacagcagctac

SEQ ID NO: 905762 - DNA, 15 bp, Homo sapiens
attctacagcagcta

SEQ ID NO: 905763 - DNA, 15 bp, Homo sapiens
tattctacagcagct

SEQ ID NO: 905764 - DNA, 15 bp, Homo sapiens
ctattctacagcagc

SEQ ID NO: 905765 - DNA, 15 bp, Homo sapiens
tctattctacagcag

SEQ ID NO: 905766 - DNA, 15 bp, Homo sapiens
ttctattctacagca

SEQ ID NO: 905767 - DNA, 15 bp, Homo sapiens
cttctattctacagc

SEQ ID NO: 905768 - DNA, 15 bp, Homo sapiens
ccttctattctacag

SEQ ID NO: 905769 - DNA, 15 bp, Homo sapiens
cccttctattctaca

SEQ ID NO: 905770 - DNA, 15 bp, Homo sapiens
acccttctattctac

SEQ ID NO: 905771 - DNA, 15 bp, Homo sapiens
tacccttctattcta

SEQ ID NO: 905772 - DNA, 15 bp, Homo sapiens
ctacccttctattct

SEQ ID NO: 905773 - DNA, 15 bp, Homo sapiens
gctacccttctattc

SEQ ID NO: 905774 - DNA, 15 bp, Homo sapiens
tgctacccttctatt

SEQ ID NO: 905775 - DNA, 15 bp, Homo sapiens
gtgctacccttctat

SEQ ID NO: 905776 - DNA, 15 bp, Homo sapiens
tgtgctacccttcta

SEQ ID NO: 905777 - DNA, 15 bp, Homo sapiens
ctgtgctacccttct

SEQ ID NO: 905778 - DNA, 15 bp, Homo sapiens
actgtgctacccttc

SEQ ID NO: 905779 - DNA, 15 bp, Homo sapiens
aactgtgctaccctt

SEQ ID NO: 905780 - DNA, 15 bp, Homo sapiens
caactgtgctaccct

SEQ ID NO: 905781 - DNA, 15 bp, Homo sapiens
tcaactgtgctaccc

SEQ ID NO: 905782 - DNA, 15 bp, Homo sapiens
ttcaactgtgctacc

SEQ ID NO: 905783 - DNA, 15 bp, Homo sapiens
cttcaactgtgctac

SEQ ID NO: 905784 - DNA, 15 bp, Homo sapiens
tcttcaactgtgcta

SEQ ID NO: 905785 - DNA, 15 bp, Homo sapiens
atcttcaactgtgct

SEQ ID NO: 905786 - DNA, 15 bp, Homo sapiens
tatcttcaactgtgc

SEQ ID NO: 905787 - DNA, 15 bp, Homo sapiens
atatcttcaactgtg

SEQ ID NO: 905788 - DNA, 15 bp, Homo sapiens
aatatcttcaactgt

SEQ ID NO: 905789 - DNA, 15 bp, Homo sapiens
caatatcttcaactg

SEQ ID NO: 905790 - DNA, 15 bp, Homo sapiens
ccaatatcttcaact

SEQ ID NO: 905791 - DNA, 15 bp, Homo sapiens
accaatatcttcaac

SEQ ID NO: 905792 - DNA, 15 bp, Homo sapiens
taccaatatcttcaa

SEQ ID NO: 905793 - DNA, 15 bp, Homo sapiens
ctaccaatatcttca

SEQ ID NO: 905794 - DNA, 15 bp, Homo sapiens
cctaccaatatcttc

SEQ ID NO: 905795 - DNA, 15 bp, Homo sapiens
tcctaccaatatctt

SEQ ID NO: 905796 - DNA, 15 bp, Homo sapiens
ttcctaccaatatct

SEQ ID NO: 905797 - DNA, 15 bp, Homo sapiens
tttcctaccaatatc

SEQ ID NO: 905798 - DNA, 15 bp, Homo sapiens
ctttcctaccaatat

SEQ ID NO: 905799 - DNA, 15 bp, Homo sapiens
actttcctaccaata

SEQ ID NO: 905800 - DNA, 15 bp, Homo sapiens
cactttcctaccaat

SEQ ID NO: 905801 - DNA, 15 bp, Homo sapiens
ccactttcctaccaa

SEQ ID NO: 905802 - DNA, 15 bp, Homo sapiens
accactttcctacca

SEQ ID NO: 905803 - DNA, 15 bp, Homo sapiens
aaccactttcctacc

SEQ ID NO: 905804 - DNA, 15 bp, Homo sapiens
caaccactttcctac

SEQ ID NO: 905805 - DNA, 15 bp, Homo sapiens
tcaaccactttccta

SEQ ID NO: 905806 - DNA, 15 bp, Homo sapiens
ttcaaccactttcct

SEQ ID NO: 905807 - DNA, 15 bp, Homo sapiens
cttcaaccactttcc

SEQ ID NO: 905808 - DNA, 15 bp, Homo sapiens
acttcaaccactttc

SEQ ID NO: 905809 - DNA, 15 bp, Homo sapiens
cacttcaaccacttt

SEQ ID NO: 905810 - DNA, 15 bp, Homo sapiens
tcacttcaaccactt

SEQ ID NO: 905811 - DNA, 15 bp, Homo sapiens
atcacttcaaccact

SEQ ID NO: 905812 - DNA, 15 bp, Homo sapiens
catcacttcaaccac

SEQ ID NO: 905813 - DNA, 15 bp, Homo sapiens
tcatcacttcaacca

SEQ ID NO: 905814 - DNA, 15 bp, Homo sapiens
atcatcacttcaacc

SEQ ID NO: 905815 - DNA, 15 bp, Homo sapiens
aatcatcacttcaac

SEQ ID NO: 905816 - DNA, 15 bp, Homo sapiens
taatcatcacttcaa

SEQ ID NO: 905817 - DNA, 15 bp, Homo sapiens
ataatcatcacttca

SEQ ID NO: 905818 - DNA, 15 bp, Homo sapiens
cataatcatcacttc

SEQ ID NO: 905819 - DNA, 15 bp, Homo sapiens
tcataatcatcactt

SEQ ID NO: 905820 - DNA, 15 bp, Homo sapiens
ttcataatcatcact

SEQ ID NO: 905821 - DNA, 15 bp, Homo sapiens
cttcataatcatcac

SEQ ID NO: 905822 - DNA, 15 bp, Homo sapiens
acttcataatcatca

SEQ ID NO: 905823 - DNA, 15 bp, Homo sapiens
gacttcataatcatc

SEQ ID NO: 905824 - DNA, 15 bp, Homo sapiens
agacttcataatcat

SEQ ID NO: 905825 - DNA, 15 bp, Homo sapiens
aagacttcataatca

SEQ ID NO: 905826 - DNA, 15 bp, Homo sapiens
taagacttcataatc

SEQ ID NO: 905827 - DNA, 15 bp, Homo sapiens
ttaagacttcataat

SEQ ID NO: 905828 - DNA, 15 bp, Homo sapiens
gttaagacttcataa

SEQ ID NO: 905829 - DNA, 15 bp, Homo sapiens
agttaagacttcata

SEQ ID NO: 905830 - DNA, 15 bp, Homo sapiens
cagttaagacttcat

SEQ ID NO: 905831 - DNA, 15 bp, Homo sapiens
tcagttaagacttca

SEQ ID NO: 905832 - DNA, 15 bp, Homo sapiens
ttcagttaagacttc

SEQ ID NO: 905833 - DNA, 15 bp, Homo sapiens
attcagttaagactt

SEQ ID NO: 905834 - DNA, 15 bp, Homo sapiens
tattcagttaagact

SEQ ID NO: 905835 - DNA, 15 bp, Homo sapiens
ctattcagttaagac

SEQ ID NO: 905836 - DNA, 15 bp, Homo sapiens
tctattcagttaaga

SEQ ID NO: 905837 - DNA, 15 bp, Homo sapiens
atctattcagttaag

SEQ ID NO: 905838 - DNA, 15 bp, Homo sapiens
tatctattcagttaa

SEQ ID NO: 905839 - DNA, 15 bp, Homo sapiens
ttatctattcagtta

SEQ ID NO: 905840 - DNA, 15 bp, Homo sapiens
tttatctattcagtt

SEQ ID NO: 905841 - DNA, 15 bp, Homo sapiens
ttttatctattcagt

SEQ ID NO: 905842 - DNA, 15 bp, Homo sapiens
attttatctattcag

SEQ ID NO: 905843 - DNA, 15 bp, Homo sapiens
gattttatctattca

SEQ ID NO: 905844 - DNA, 15 bp, Homo sapiens
tgattttatctattc

SEQ ID NO: 905845 - DNA, 15 bp, Homo sapiens
ttgattttatctatt

SEQ ID NO: 905846 - DNA, 15 bp, Homo sapiens
cttgattttatctat

SEQ ID NO: 905847 - DNA, 15 bp, Homo sapiens
tcttgattttatcta

SEQ ID NO: 905848 - DNA, 15 bp, Homo sapiens
atcttgattttatct

SEQ ID NO: 905849 - DNA, 15 bp, Homo sapiens
aatcttgattttatc

SEQ ID NO: 905850 - DNA, 15 bp, Homo sapiens
caatcttgattttat

SEQ ID NO: 905851 - DNA, 15 bp, Homo sapiens
ccaatcttgatttta

SEQ ID NO: 905852 - DNA, 15 bp, Homo sapiens
cccaatcttgatttt

SEQ ID NO: 905853 - DNA, 15 bp, Homo sapiens
ccccaatcttgattt

SEQ ID NO: 905854 - DNA, 15 bp, Homo sapiens
accccaatcttgatt

SEQ ID NO: 905855 - DNA, 15 bp, Homo sapiens
aaccccaatcttgat

SEQ ID NO: 905856 - DNA, 15 bp, Homo sapiens
caaccccaatcttga

SEQ ID NO: 905857 - DNA, 15 bp, Homo sapiens
ccaaccccaatcttg

SEQ ID NO: 905858 - DNA, 15 bp, Homo sapiens
cccaaccccaatctt

SEQ ID NO: 905859 - DNA, 15 bp, Homo sapiens
acccaaccccaatct

SEQ ID NO: 905860 - DNA, 15 bp, Homo sapiens
cacccaaccccaatc

SEQ ID NO: 905861 - DNA, 15 bp, Homo sapiens
ccacccaaccccaat

SEQ ID NO: 905862 - DNA, 15 bp, Homo sapiens
cccacccaaccccaa

SEQ ID NO: 905863 - DNA, 15 bp, Homo sapiens
gcccacccaacccca

SEQ ID NO: 905864 - DNA, 15 bp, Homo sapiens
tgcccacccaacccc

SEQ ID NO: 905865 - DNA, 15 bp, Homo sapiens
ctgcccacccaaccc

SEQ ID NO: 905866 - DNA, 15 bp, Homo sapiens
tctgcccacccaacc

SEQ ID NO: 905867 - DNA, 15 bp, Homo sapiens
ttctgcccacccaac

SEQ ID NO: 905868 - DNA, 15 bp, Homo sapiens
cttctgcccacccaa

SEQ ID NO: 905869 - DNA, 15 bp, Homo sapiens
ccttctgcccaccca

SEQ ID NO: 905870 - DNA, 15 bp, Homo sapiens
cccttctgcccaccc

SEQ ID NO: 905871 - DNA, 15 bp, Homo sapiens
acccttctgcccacc

SEQ ID NO: 905872 - DNA, 15 bp, Homo sapiens
tacccttctgcccac

SEQ ID NO: 905873 - DNA, 15 bp, Homo sapiens
ctacccttctgccca

SEQ ID NO: 905874 - DNA, 15 bp, Homo sapiens
cctacccttctgccc

SEQ ID NO: 905875 - DNA, 15 bp, Homo sapiens
ccctacccttctgcc

SEQ ID NO: 905876 - DNA, 15 bp, Homo sapiens
tccctacccttctgc

SEQ ID NO: 905877 - DNA, 15 bp, Homo sapiens
atccctacccttctg

SEQ ID NO: 905878 - DNA, 15 bp, Homo sapiens
tatccctacccttct

SEQ ID NO: 905879 - DNA, 15 bp, Homo sapiens
atatccctacccttc

SEQ ID NO: 905880 - DNA, 15 bp, Homo sapiens
catatccctaccctt

SEQ ID NO: 905881 - DNA, 15 bp, Homo sapiens
ccatatccctaccct

SEQ ID NO: 905882 - DNA, 15 bp, Homo sapiens
tccatatccctaccc

SEQ ID NO: 905883 - DNA, 15 bp, Homo sapiens
ctccatatccctacc

SEQ ID NO: 905884 - DNA, 15 bp, Homo sapiens
cctccatatccctac

SEQ ID NO: 905885 - DNA, 15 bp, Homo sapiens
ccctccatatcccta

SEQ ID NO: 905886 - DNA, 15 bp, Homo sapiens
tccctccatatccct

SEQ ID NO: 905887 - DNA, 15 bp, Homo sapiens
ctccctccatatccc

SEQ ID NO: 905888 - DNA, 15 bp, Homo sapiens
tctccctccatatcc

SEQ ID NO: 905889 - DNA, 15 bp, Homo sapiens
ttctccctccatatc

SEQ ID NO: 905890 - DNA, 15 bp, Homo sapiens
cttctccctccatat

SEQ ID NO: 905891 - DNA, 15 bp, Homo sapiens
tcttctccctccata

SEQ ID NO: 905892 - DNA, 15 bp, Homo sapiens
atcttctccctccat

SEQ ID NO: 905893 - DNA, 15 bp, Homo sapiens
catcttctccctcca

SEQ ID NO: 905894 - DNA, 15 bp, Homo sapiens
tcatcttctccctcc

SEQ ID NO: 905895 - DNA, 15 bp, Homo sapiens
ctcatcttctccctc

SEQ ID NO: 905896 - DNA, 15 bp, Homo sapiens
cctcatcttctccct

SEQ ID NO: 905897 - DNA, 15 bp, Homo sapiens
ccctcatcttctccc

SEQ ID NO: 905898 - DNA, 15 bp, Homo sapiens
cccctcatcttctcc

SEQ ID NO: 905899 - DNA, 15 bp, Homo sapiens
acccctcatcttctc

SEQ ID NO: 905900 - DNA, 15 bp, Homo sapiens
aacccctcatcttct

SEQ ID NO: 905901 - DNA, 15 bp, Homo sapiens
taacccctcatcttc

SEQ ID NO: 905902 - DNA, 15 bp, Homo sapiens
ctaacccctcatctt

SEQ ID NO: 905903 - DNA, 15 bp, Homo sapiens
tctaacccctcatct

SEQ ID NO: 905904 - DNA, 15 bp, Homo sapiens
ctctaacccctcatc

SEQ ID NO: 905905 - DNA, 15 bp, Homo sapiens
actctaacccctcat

SEQ ID NO: 905906 - DNA, 15 bp, Homo sapiens
cactctaacccctca

SEQ ID NO: 905907 - DNA, 15 bp, Homo sapiens
acactctaacccctc

SEQ ID NO: 905908 - DNA, 15 bp, Homo sapiens
gacactctaacccct

SEQ ID NO: 905909 - DNA, 15 bp, Homo sapiens
ggacactctaacccc

SEQ ID NO: 905910 - DNA, 15 bp, Homo sapiens
aggacactctaaccc

SEQ ID NO: 905911 - DNA, 15 bp, Homo sapiens
caggacactctaacc

SEQ ID NO: 905912 - DNA, 15 bp, Homo sapiens
acaggacactctaac

SEQ ID NO: 905913 - DNA, 15 bp, Homo sapiens
cacaggacactctaa

SEQ ID NO: 905914 - DNA, 15 bp, Homo sapiens
tcacaggacactcta

SEQ ID NO: 905915 - DNA, 15 bp, Homo sapiens
ctcacaggacactct

SEQ ID NO: 905916 - DNA, 15 bp, Homo sapiens
cctcacaggacactc

SEQ ID NO: 905917 - DNA, 15 bp, Homo sapiens
acctcacaggacact

SEQ ID NO: 905918 - DNA, 15 bp, Homo sapiens
gacctcacaggacac

SEQ ID NO: 905919 - DNA, 15 bp, Homo sapiens
cgacctcacaggaca

SEQ ID NO: 905920 - DNA, 15 bp, Homo sapiens
tcgacctcacaggac

SEQ ID NO: 905921 - DNA, 15 bp, Homo sapiens
ttcgacctcacagga

SEQ ID NO: 905922 - DNA, 15 bp, Homo sapiens
cttcgacctcacagg

SEQ ID NO: 905923 - DNA, 15 bp, Homo sapiens
ccttcgacctcacag

SEQ ID NO: 905924 - DNA, 15 bp, Homo sapiens
tccttcgacctcaca

SEQ ID NO: 905925 - DNA, 15 bp, Homo sapiens
gtccttcgacctcac

SEQ ID NO: 905926 - DNA, 15 bp, Homo sapiens
tgtccttcgacctca

SEQ ID NO: 905927 - DNA, 15 bp, Homo sapiens
ctgtccttcgacctc

SEQ ID NO: 905928 - DNA, 15 bp, Homo sapiens
cctgtccttcgacct

SEQ ID NO: 905929 - DNA, 15 bp, Homo sapiens
gcctgtccttcgacc

SEQ ID NO: 905930 - DNA, 15 bp, Homo sapiens
tgcctgtccttcgac

SEQ ID NO: 905931 - DNA, 15 bp, Homo sapiens
atgcctgtccttcga

SEQ ID NO: 905932 - DNA, 15 bp, Homo sapiens
tatgcctgtccttcg

SEQ ID NO: 905933 - DNA, 15 bp, Homo sapiens
ctatgcctgtccttc

SEQ ID NO: 905934 - DNA, 15 bp, Homo sapiens
actatgcctgtcctt

SEQ ID NO: 905935 - DNA, 15 bp, Homo sapiens
cactatgcctgtcct

SEQ ID NO: 905936 - DNA, 15 bp, Homo sapiens
ccactatgcctgtcc

SEQ ID NO: 905937 - DNA, 15 bp, Homo sapiens
cccactatgcctgtc

SEQ ID NO: 905938 - DNA, 15 bp, Homo sapiens
tcccactatgcctgt

SEQ ID NO: 905939 - DNA, 15 bp, Homo sapiens
ttcccactatgcctg

SEQ ID NO: 905940 - DNA, 15 bp, Homo sapiens
attcccactatgcct

SEQ ID NO: 905941 - DNA, 15 bp, Homo sapiens
tattcccactatgcc

SEQ ID NO: 905942 - DNA, 15 bp, Homo sapiens
ttattcccactatgc

SEQ ID NO: 905943 - DNA, 15 bp, Homo sapiens
attattcccactatg

SEQ ID NO: 905944 - DNA, 15 bp, Homo sapiens
aattattcccactat

SEQ ID NO: 905945 - DNA, 15 bp, Homo sapiens
caattattcccacta

SEQ ID NO: 905946 - DNA, 15 bp, Homo sapiens
tcaattattcccact

SEQ ID NO: 905947 - DNA, 15 bp, Homo sapiens
ttcaattattcccac

SEQ ID NO: 905948 - DNA, 15 bp, Homo sapiens
tttcaattattccca

SEQ ID NO: 905949 - DNA, 15 bp, Homo sapiens
ctttcaattattccc

SEQ ID NO: 905950 - DNA, 15 bp, Homo sapiens
tctttcaattattcc

SEQ ID NO: 905951 - DNA, 15 bp, Homo sapiens
ttctttcaattattc

SEQ ID NO: 905952 - DNA, 15 bp, Homo sapiens
attctttcaattatt

SEQ ID NO: 905953 - DNA, 15 bp, Homo sapiens
cattctttcaattat

SEQ ID NO: 905954 - DNA, 15 bp, Homo sapiens
acattctttcaatta

SEQ ID NO: 905955 - DNA, 15 bp, Homo sapiens
aacattctttcaatt

SEQ ID NO: 905956 - DNA, 15 bp, Homo sapiens
gaacattctttcaat

SEQ ID NO: 905957 - DNA, 15 bp, Homo sapiens
agaacattctttcaa

SEQ ID NO: 905958 - DNA, 15 bp, Homo sapiens
cagaacattctttca

SEQ ID NO: 905959 - DNA, 15 bp, Homo sapiens
ccagaacattctttc

SEQ ID NO: 905960 - DNA, 15 bp, Homo sapiens
accagaacattcttt

SEQ ID NO: 905961 - DNA, 15 bp, Homo sapiens
aaccagaacattctt

SEQ ID NO: 905962 - DNA, 15 bp, Homo sapiens
caaccagaacattct

SEQ ID NO: 905963 - DNA, 15 bp, Homo sapiens
ccaaccagaacattc

SEQ ID NO: 905964 - DNA, 15 bp, Homo sapiens
tccaaccagaacatt

SEQ ID NO: 905965 - DNA, 15 bp, Homo sapiens
gtccaaccagaacat

SEQ ID NO: 905966 - DNA, 15 bp, Homo sapiens
tgtccaaccagaaca

SEQ ID NO: 905967 - DNA, 15 bp, Homo sapiens
ttgtccaaccagaac

SEQ ID NO: 905968 - DNA, 15 bp, Homo sapiens
cttgtccaaccagaa

SEQ ID NO: 905969 - DNA, 15 bp, Homo sapiens
ccttgtccaaccaga

SEQ ID NO: 905970 - DNA, 15 bp, Homo sapiens
tccttgtccaaccag

SEQ ID NO: 905971 - DNA, 15 bp, Homo sapiens
atccttgtccaacca

SEQ ID NO: 905972 - DNA, 15 bp, Homo sapiens
gatccttgtccaacc

SEQ ID NO: 905973 - DNA, 15 bp, Homo sapiens
agatccttgtccaac

SEQ ID NO: 905974 - DNA, 15 bp, Homo sapiens
cagatccttgtccaa

SEQ ID NO: 905975 - DNA, 15 bp, Homo sapiens
tcagatccttgtcca

SEQ ID NO: 905976 - DNA, 15 bp, Homo sapiens
atcagatccttgtcc

SEQ ID NO: 905977 - DNA, 15 bp, Homo sapiens
catcagatccttgtc

SEQ ID NO: 905978 - DNA, 15 bp, Homo sapiens
acatcagatccttgt

SEQ ID NO: 905979 - DNA, 15 bp, Homo sapiens
cacatcagatccttg

SEQ ID NO: 905980 - DNA, 15 bp, Homo sapiens
ccacatcagatcctt

SEQ ID NO: 905981 - DNA, 15 bp, Homo sapiens
cccacatcagatcct

SEQ ID NO: 905982 - DNA, 15 bp, Homo sapiens
acccacatcagatcc

SEQ ID NO: 905983 - DNA, 15 bp, Homo sapiens
cacccacatcagatc

SEQ ID NO: 905984 - DNA, 15 bp, Homo sapiens
acacccacatcagat

SEQ ID NO: 905985 - DNA, 15 bp, Homo sapiens
cacacccacatcaga

SEQ ID NO: 905986 - DNA, 15 bp, Homo sapiens
ccacacccacatcag

SEQ ID NO: 905987 - DNA, 15 bp, Homo sapiens
cccacacccacatca

SEQ ID NO: 905988 - DNA, 15 bp, Homo sapiens
tcccacacccacatc

SEQ ID NO: 905989 - DNA, 15 bp, Homo sapiens
ctcccacacccacat

SEQ ID NO: 905990 - DNA, 15 bp, Homo sapiens
actcccacacccaca

SEQ ID NO: 905991 - DNA, 15 bp, Homo sapiens
cactcccacacccac

SEQ ID NO: 905992 - DNA, 15 bp, Homo sapiens
tcactcccacaccca

SEQ ID NO: 905993 - DNA, 15 bp, Homo sapiens
ctcactcccacaccc

SEQ ID NO: 905994 - DNA, 15 bp, Homo sapiens
tctcactcccacacc

SEQ ID NO: 905995 - DNA, 15 bp, Homo sapiens
ctctcactcccacac

SEQ ID NO: 905996 - DNA, 15 bp, Homo sapiens
tctctcactcccaca

SEQ ID NO: 905997 - DNA, 15 bp, Homo sapiens
gtctctcactcccac

SEQ ID NO: 905998 - DNA, 15 bp, Homo sapiens
agtctctcactccca

SEQ ID NO: 905999 - DNA, 15 bp, Homo sapiens
tagtctctcactccc

SEQ ID NO: 906000 - DNA, 15 bp, Homo sapiens
atagtctctcactcc

SEQ ID NO: 906001 - DNA, 15 bp, Homo sapiens
tatagtctctcactc

SEQ ID NO: 906002 - DNA, 15 bp, Homo sapiens
ctatagtctctcact

SEQ ID NO: 906003 - DNA, 15 bp, Homo sapiens
actatagtctctcac

SEQ ID NO: 906004 - DNA, 15 bp, Homo sapiens
cactatagtctctca

SEQ ID NO: 906005 - DNA, 15 bp, Homo sapiens
tcactatagtctctc

SEQ ID NO: 906006 - DNA, 15 bp, Homo sapiens
ttcactatagtctct

SEQ ID NO: 906007 - DNA, 15 bp, Homo sapiens
attcactatagtctc

SEQ ID NO: 906008 - DNA, 15 bp, Homo sapiens
aattcactatagtct

SEQ ID NO: 906009 - DNA, 15 bp, Homo sapiens
gaattcactatagtc

SEQ ID NO: 906010 - DNA, 15 bp, Homo sapiens
tgaattcactatagt

SEQ ID NO: 906011 - DNA, 15 bp, Homo sapiens
ttgaattcactatag

SEQ ID NO: 906012 - DNA, 15 bp, Homo sapiens
cttgaattcactata

SEQ ID NO: 906013 - DNA, 15 bp, Homo sapiens
tcttgaattcactat

SEQ ID NO: 906014 - DNA, 15 bp, Homo sapiens
ttcttgaattcacta

SEQ ID NO: 906015 - DNA, 15 bp, Homo sapiens
tttcttgaattcact

SEQ ID NO: 906016 - DNA, 15 bp, Homo sapiens
ttttcttgaattcac

SEQ ID NO: 906017 - DNA, 15 bp, Homo sapiens
tttttcttgaattca

SEQ ID NO: 906018 - DNA, 15 bp, Homo sapiens
ttttttcttgaattc

SEQ ID NO: 906019 - DNA, 15 bp, Homo sapiens
tttttttcttgaatt

SEQ ID NO: 906020 - DNA, 15 bp, Homo sapiens
atttttttcttgaat

SEQ ID NO: 906021 - DNA, 15 bp, Homo sapiens
tatttttttcttgaa

SEQ ID NO: 906022 - DNA, 15 bp, Homo sapiens
ctatttttttcttga

SEQ ID NO: 906023 - DNA, 15 bp, Homo sapiens
tctatttttttcttg

SEQ ID NO: 906024 - DNA, 15 bp, Homo sapiens
gtctatttttttctt

SEQ ID NO: 906025 - DNA, 15 bp, Homo sapiens
agtctatttttttct

SEQ ID NO: 906026 - DNA, 15 bp, Homo sapiens
tagtctatttttttc

SEQ ID NO: 906027 - DNA, 15 bp, Homo sapiens
ctagtctattttttt

SEQ ID NO: 906028 - DNA, 15 bp, Homo sapiens
tctagtctatttttt

SEQ ID NO: 906029 - DNA, 15 bp, Homo sapiens
ttctagtctattttt

SEQ ID NO: 906030 - DNA, 15 bp, Homo sapiens
gttctagtctatttt

SEQ ID NO: 906031 - DNA, 15 bp, Homo sapiens
tgttctagtctattt

SEQ ID NO: 906032 - DNA, 15 bp, Homo sapiens
ttgttctagtctatt

SEQ ID NO: 906033 - DNA, 15 bp, Homo sapiens
tttgttctagtctat

SEQ ID NO: 906034 - DNA, 15 bp, Homo sapiens
ttttgttctagtcta

SEQ ID NO: 906035 - DNA, 15 bp, Homo sapiens
cttttgttctagtct

SEQ ID NO: 906036 - DNA, 15 bp, Homo sapiens
acttttgttctagtc

SEQ ID NO: 906037 - DNA, 15 bp, Homo sapiens
aacttttgttctagt

SEQ ID NO: 906038 - DNA, 15 bp, Homo sapiens
taacttttgttctag

SEQ ID NO: 906039 - DNA, 15 bp, Homo sapiens
ataacttttgttcta

SEQ ID NO: 906040 - DNA, 15 bp, Homo sapiens
cataacttttgttct

SEQ ID NO: 906041 - DNA, 15 bp, Homo sapiens
acataacttttgttc

SEQ ID NO: 906042 - DNA, 15 bp, Homo sapiens
cacataacttttgtt

SEQ ID NO: 906043 - DNA, 15 bp, Homo sapiens
ccacataacttttgt

SEQ ID NO: 906044 - DNA, 15 bp, Homo sapiens
tccacataacttttg

SEQ ID NO: 906045 - DNA, 15 bp, Homo sapiens
ctccacataactttt

SEQ ID NO: 906046 - DNA, 15 bp, Homo sapiens
tctccacataacttt

SEQ ID NO: 906047 - DNA, 15 bp, Homo sapiens
atctccacataactt

SEQ ID NO: 906048 - DNA, 15 bp, Homo sapiens
aatctccacataact

SEQ ID NO: 906049 - DNA, 15 bp, Homo sapiens
caatctccacataac

SEQ ID NO: 906050 - DNA, 15 bp, Homo sapiens
gcaatctccacataa

SEQ ID NO: 906051 - DNA, 15 bp, Homo sapiens
agcaatctccacata

SEQ ID NO: 906052 - DNA, 15 bp, Homo sapiens
aagcaatctccacat

SEQ ID NO: 906053 - DNA, 15 bp, Homo sapiens
taagcaatctccaca

SEQ ID NO: 906054 - DNA, 15 bp, Homo sapiens
ctaagcaatctccac

SEQ ID NO: 906055 - DNA, 15 bp, Homo sapiens
actaagcaatctcca

SEQ ID NO: 906056 - DNA, 15 bp, Homo sapiens
cactaagcaatctcc

SEQ ID NO: 906057 - DNA, 15 bp, Homo sapiens
ccactaagcaatctc

SEQ ID NO: 906058 - DNA, 15 bp, Homo sapiens
cccactaagcaatct

SEQ ID NO: 906059 - DNA, 15 bp, Homo sapiens
gcccactaagcaatc

SEQ ID NO: 906060 - DNA, 15 bp, Homo sapiens
tgcccactaagcaat

SEQ ID NO: 906061 - DNA, 15 bp, Homo sapiens
atgcccactaagcaa

SEQ ID NO: 906062 - DNA, 15 bp, Homo sapiens
aatgcccactaagca

SEQ ID NO: 906063 - DNA, 15 bp, Homo sapiens
aaatgcccactaagc

SEQ ID NO: 906064 - DNA, 15 bp, Homo sapiens
caaatgcccactaag

SEQ ID NO: 906065 - DNA, 15 bp, Homo sapiens
tcaaatgcccactaa

SEQ ID NO: 906066 - DNA, 15 bp, Homo sapiens
atcaaatgcccacta

SEQ ID NO: 906067 - DNA, 15 bp, Homo sapiens
tatcaaatgcccact

SEQ ID NO: 906068 - DNA, 15 bp, Homo sapiens
ctatcaaatgcccac

SEQ ID NO: 906069 - DNA, 15 bp, Homo sapiens
tctatcaaatgccca

SEQ ID NO: 906070 - DNA, 15 bp, Homo sapiens
gtctatcaaatgccc

SEQ ID NO: 906071 - DNA, 15 bp, Homo sapiens
tgtctatcaaatgcc

SEQ ID NO: 906072 - DNA, 15 bp, Homo sapiens
atgtctatcaaatgc

SEQ ID NO: 906073 - DNA, 15 bp, Homo sapiens
gatgtctatcaaatg

SEQ ID NO: 906074 - DNA, 15 bp, Homo sapiens
agatgtctatcaaat

SEQ ID NO: 906075 - DNA, 15 bp, Homo sapiens
cagatgtctatcaaa

SEQ ID NO: 906076 - DNA, 15 bp, Homo sapiens
acagatgtctatcaa

SEQ ID NO: 906077 - DNA, 15 bp, Homo sapiens
cacagatgtctatca

SEQ ID NO: 906078 - DNA, 15 bp, Homo sapiens
ccacagatgtctatc

SEQ ID NO: 906079 - DNA, 15 bp, Homo sapiens
cccacagatgtctat

SEQ ID NO: 906080 - DNA, 15 bp, Homo sapiens
gcccacagatgtcta

SEQ ID NO: 906081 - DNA, 15 bp, Homo sapiens
ggcccacagatgtct

SEQ ID NO: 906082 - DNA, 15 bp, Homo sapiens
tggcccacagatgtc

SEQ ID NO: 906083 - DNA, 15 bp, Homo sapiens
gtggcccacagatgt

SEQ ID NO: 906084 - DNA, 15 bp, Homo sapiens
tgtggcccacagatg

SEQ ID NO: 906085 - DNA, 15 bp, Homo sapiens
atgtggcccacagat

SEQ ID NO: 906086 - DNA, 15 bp, Homo sapiens
catgtggcccacaga

SEQ ID NO: 906087 - DNA, 15 bp, Homo sapiens
gcatgtggcccacag

SEQ ID NO: 906088 - DNA, 15 bp, Homo sapiens
agcatgtggcccaca

SEQ ID NO: 906089 - DNA, 15 bp, Homo sapiens
aagcatgtggcccac

SEQ ID NO: 906090 - DNA, 15 bp, Homo sapiens
taagcatgtggccca

SEQ ID NO: 906091 - DNA, 15 bp, Homo sapiens
ttaagcatgtggccc

SEQ ID NO: 906092 - DNA, 15 bp, Homo sapiens
tttaagcatgtggcc

SEQ ID NO: 906093 - DNA, 15 bp, Homo sapiens
atttaagcatgtggc

SEQ ID NO: 906094 - DNA, 15 bp, Homo sapiens
aatttaagcatgtgg

SEQ ID NO: 906095 - DNA, 15 bp, Homo sapiens
gaatttaagcatgtg

SEQ ID NO: 906096 - DNA, 15 bp, Homo sapiens
ggaatttaagcatgt

SEQ ID NO: 906097 - DNA, 15 bp, Homo sapiens
gggaatttaagcatg

SEQ ID NO: 906098 - DNA, 15 bp, Homo sapiens
tgggaatttaagcat

SEQ ID NO: 906099 - DNA, 15 bp, Homo sapiens
ctgggaatttaagca

SEQ ID NO: 906100 - DNA, 15 bp, Homo sapiens
actgggaatttaagc

SEQ ID NO: 906101 - DNA, 15 bp, Homo sapiens
cactgggaatttaag

SEQ ID NO: 906102 - DNA, 15 bp, Homo sapiens
gcactgggaatttaa

SEQ ID NO: 906103 - DNA, 15 bp, Homo sapiens
tgcactgggaattta

SEQ ID NO: 906104 - DNA, 15 bp, Homo sapiens
atgcactgggaattt

SEQ ID NO: 906105 - DNA, 15 bp, Homo sapiens
aatgcactgggaatt

SEQ ID NO: 906106 - DNA, 15 bp, Homo sapiens
aaatgcactgggaat

SEQ ID NO: 906107 - DNA, 15 bp, Homo sapiens
aaaatgcactgggaa

SEQ ID NO: 906108 - DNA, 15 bp, Homo sapiens
caaaatgcactggga

SEQ ID NO: 906109 - DNA, 15 bp, Homo sapiens
gcaaaatgcactggg

SEQ ID NO: 906110 - DNA, 15 bp, Homo sapiens
cgcaaaatgcactgg

SEQ ID NO: 906111 - DNA, 15 bp, Homo sapiens
ccgcaaaatgcactg

SEQ ID NO: 906112 - DNA, 15 bp, Homo sapiens
tccgcaaaatgcact

SEQ ID NO: 906113 - DNA, 15 bp, Homo sapiens
ctccgcaaaatgcac

SEQ ID NO: 906114 - DNA, 15 bp, Homo sapiens
actccgcaaaatgca

SEQ ID NO: 906115 - DNA, 15 bp, Homo sapiens
aactccgcaaaatgc

SEQ ID NO: 906116 - DNA, 15 bp, Homo sapiens
taactccgcaaaatg

SEQ ID NO: 906117 - DNA, 15 bp, Homo sapiens
gtaactccgcaaaat

SEQ ID NO: 906118 - DNA, 15 bp, Homo sapiens
agtaactccgcaaaa

SEQ ID NO: 906119 - DNA, 15 bp, Homo sapiens
cagtaactccgcaaa

SEQ ID NO: 906120 - DNA, 15 bp, Homo sapiens
ccagtaactccgcaa

SEQ ID NO: 906121 - DNA, 15 bp, Homo sapiens
tccagtaactccgca

SEQ ID NO: 906122 - DNA, 15 bp, Homo sapiens
ttccagtaactccgc

SEQ ID NO: 906123 - DNA, 15 bp, Homo sapiens
cttccagtaactccg

SEQ ID NO: 906124 - DNA, 15 bp, Homo sapiens
ccttccagtaactcc

SEQ ID NO: 906125 - DNA, 15 bp, Homo sapiens
accttccagtaactc

SEQ ID NO: 906126 - DNA, 15 bp, Homo sapiens
aaccttccagtaact

SEQ ID NO: 906127 - DNA, 15 bp, Homo sapiens
caaccttccagtaac

SEQ ID NO: 906128 - DNA, 15 bp, Homo sapiens
ccaaccttccagtaa

SEQ ID NO: 906129 - DNA, 15 bp, Homo sapiens
accaaccttccagta

SEQ ID NO: 906130 - DNA, 15 bp, Homo sapiens
caccaaccttccagt

SEQ ID NO: 906131 - DNA, 15 bp, Homo sapiens
ccaccaaccttccag

SEQ ID NO: 906132 - DNA, 15 bp, Homo sapiens
gccaccaaccttcca

SEQ ID NO: 906133 - DNA, 15 bp, Homo sapiens
agccaccaaccttcc

SEQ ID NO: 906134 - DNA, 15 bp, Homo sapiens
aagccaccaaccttc

SEQ ID NO: 906135 - DNA, 15 bp, Homo sapiens
caagccaccaacctt

SEQ ID NO: 906136 - DNA, 15 bp, Homo sapiens
acaagccaccaacct

SEQ ID NO: 906137 - DNA, 15 bp, Homo sapiens
aacaagccaccaacc

SEQ ID NO: 906138 - DNA, 15 bp, Homo sapiens
aaacaagccaccaac

SEQ ID NO: 906139 - DNA, 15 bp, Homo sapiens
gaaacaagccaccaa

SEQ ID NO: 906140 - DNA, 15 bp, Homo sapiens
agaaacaagccacca

SEQ ID NO: 906141 - DNA, 15 bp, Homo sapiens
tagaaacaagccacc

SEQ ID NO: 906142 - DNA, 15 bp, Homo sapiens
gtagaaacaagccac

SEQ ID NO: 906143 - DNA, 15 bp, Homo sapiens
ggtagaaacaagcca

SEQ ID NO: 906144 - DNA, 15 bp, Homo sapiens
tggtagaaacaagcc

SEQ ID NO: 906145 - DNA, 15 bp, Homo sapiens
atggtagaaacaagc

SEQ ID NO: 906146 - DNA, 15 bp, Homo sapiens
catggtagaaacaag

SEQ ID NO: 906147 - DNA, 15 bp, Homo sapiens
tcatggtagaaacaa

SEQ ID NO: 906148 - DNA, 15 bp, Homo sapiens
ctcatggtagaaaca

SEQ ID NO: 906149 - DNA, 15 bp, Homo sapiens
actcatggtagaaac

SEQ ID NO: 906150 - DNA, 15 bp, Homo sapiens
tactcatggtagaaa

SEQ ID NO: 906151 - DNA, 15 bp, Homo sapiens
ctactcatggtagaa

SEQ ID NO: 906152 - DNA, 15 bp, Homo sapiens
cctactcatggtaga

SEQ ID NO: 906153 - DNA, 15 bp, Homo sapiens
acctactcatggtag

SEQ ID NO: 906154 - DNA, 15 bp, Homo sapiens
tacctactcatggta

SEQ ID NO: 906155 - DNA, 15 bp, Homo sapiens
ttacctactcatggt

SEQ ID NO: 906156 - DNA, 15 bp, Homo sapiens
tttacctactcatgg

SEQ ID NO: 906157 - DNA, 15 bp, Homo sapiens
ctttacctactcatg

SEQ ID NO: 906158 - DNA, 15 bp, Homo sapiens
tctttacctactcat

SEQ ID NO: 906159 - DNA, 15 bp, Homo sapiens
atctttacctactca

SEQ ID NO: 906160 - DNA, 15 bp, Homo sapiens
catctttacctactc

SEQ ID NO: 906161 - DNA, 15 bp, Homo sapiens
ccatctttacctact

SEQ ID NO: 906162 - DNA, 15 bp, Homo sapiens
tccatctttacctac

SEQ ID NO: 906163 - DNA, 15 bp, Homo sapiens
ctccatctttaccta

SEQ ID NO: 906164 - DNA, 15 bp, Homo sapiens
tctccatctttacct

SEQ ID NO: 906165 - DNA, 15 bp, Homo sapiens
ctctccatctttacc

SEQ ID NO: 906166 - DNA, 15 bp, Homo sapiens
gctctccatctttac

SEQ ID NO: 906167 - DNA, 15 bp, Homo sapiens
tgctctccatcttta

SEQ ID NO: 906168 - DNA, 15 bp, Homo sapiens
ctgctctccatcttt

SEQ ID NO: 906169 - DNA, 15 bp, Homo sapiens
cctgctctccatctt

SEQ ID NO: 906170 - DNA, 15 bp, Homo sapiens
tcctgctctccatct

SEQ ID NO: 906171 - DNA, 15 bp, Homo sapiens
atcctgctctccatc

SEQ ID NO: 906172 - DNA, 15 bp, Homo sapiens
tatcctgctctccat

SEQ ID NO: 906173 - DNA, 15 bp, Homo sapiens
atatcctgctctcca

SEQ ID NO: 906174 - DNA, 15 bp, Homo sapiens
aatatcctgctctcc

SEQ ID NO: 906175 - DNA, 15 bp, Homo sapiens
aaatatcctgctctc

SEQ ID NO: 906176 - DNA, 15 bp, Homo sapiens
aaaatatcctgctct

SEQ ID NO: 906177 - DNA, 15 bp, Homo sapiens
caaaatatcctgctc

SEQ ID NO: 906178 - DNA, 15 bp, Homo sapiens
acaaaatatcctgct

SEQ ID NO: 906179 - DNA, 15 bp, Homo sapiens
cacaaaatatcctgc

SEQ ID NO: 906180 - DNA, 15 bp, Homo sapiens
tcacaaaatatcctg

SEQ ID NO: 906181 - DNA, 15 bp, Homo sapiens
ctcacaaaatatcct

SEQ ID NO: 906182 - DNA, 15 bp, Homo sapiens
tctcacaaaatatcc

SEQ ID NO: 906183 - DNA, 15 bp, Homo sapiens
ttctcacaaaatatc

SEQ ID NO: 906184 - DNA, 15 bp, Homo sapiens
tttctcacaaaatat

SEQ ID NO: 906185 - DNA, 15 bp, Homo sapiens
ctttctcacaaaata

SEQ ID NO: 906186 - DNA, 15 bp, Homo sapiens
gctttctcacaaaat

SEQ ID NO: 906187 - DNA, 15 bp, Homo sapiens
tgctttctcacaaaa

SEQ ID NO: 906188 - DNA, 15 bp, Homo sapiens
ctgctttctcacaaa

SEQ ID NO: 906189 - DNA, 15 bp, Homo sapiens
gctgctttctcacaa

SEQ ID NO: 906190 - DNA, 15 bp, Homo sapiens
agctgctttctcaca

SEQ ID NO: 906191 - DNA, 15 bp, Homo sapiens
cagctgctttctcac

SEQ ID NO: 906192 - DNA, 15 bp, Homo sapiens
tcagctgctttctca

SEQ ID NO: 906193 - DNA, 15 bp, Homo sapiens
ttcagctgctttctc

SEQ ID NO: 906194 - DNA, 15 bp, Homo sapiens
cttcagctgctttct

SEQ ID NO: 906195 - DNA, 15 bp, Homo sapiens
acttcagctgctttc

SEQ ID NO: 906196 - DNA, 15 bp, Homo sapiens
aacttcagctgcttt

SEQ ID NO: 906197 - DNA, 15 bp, Homo sapiens
aaacttcagctgctt

SEQ ID NO: 906198 - DNA, 15 bp, Homo sapiens
gaaacttcagctgct

SEQ ID NO: 906199 - DNA, 15 bp, Homo sapiens
agaaacttcagctgc

SEQ ID NO: 906200 - DNA, 15 bp, Homo sapiens
tagaaacttcagctg

SEQ ID NO: 906201 - DNA, 15 bp, Homo sapiens
atagaaacttcagct

SEQ ID NO: 906202 - DNA, 15 bp, Homo sapiens
tatagaaacttcagc

SEQ ID NO: 906203 - DNA, 15 bp, Homo sapiens
ctatagaaacttcag

SEQ ID NO: 906204 - DNA, 15 bp, Homo sapiens
cctatagaaacttca

SEQ ID NO: 906205 - DNA, 15 bp, Homo sapiens
tcctatagaaacttc

SEQ ID NO: 906206 - DNA, 15 bp, Homo sapiens
atcctatagaaactt

SEQ ID NO: 906207 - DNA, 15 bp, Homo sapiens
catcctatagaaact

SEQ ID NO: 906208 - DNA, 15 bp, Homo sapiens
tcatcctatagaaac

SEQ ID NO: 906209 - DNA, 15 bp, Homo sapiens
atcatcctatagaaa

SEQ ID NO: 906210 - DNA, 15 bp, Homo sapiens
catcatcctatagaa

SEQ ID NO: 906211 - DNA, 15 bp, Homo sapiens
ccatcatcctataga

SEQ ID NO: 906212 - DNA, 15 bp, Homo sapiens
tccatcatcctatag

SEQ ID NO: 906213 - DNA, 15 bp, Homo sapiens
ctccatcatcctata

SEQ ID NO: 906214 - DNA, 15 bp, Homo sapiens
cctccatcatcctat

SEQ ID NO: 906215 - DNA, 15 bp, Homo sapiens
tcctccatcatccta

SEQ ID NO: 906216 - DNA, 15 bp, Homo sapiens
ttcctccatcatcct

SEQ ID NO: 906217 - DNA, 15 bp, Homo sapiens
attcctccatcatcc

SEQ ID NO: 906218 - DNA, 15 bp, Homo sapiens
cattcctccatcatc

SEQ ID NO: 906219 - DNA, 15 bp, Homo sapiens
tcattcctccatcat

SEQ ID NO: 906220 - DNA, 15 bp, Homo sapiens
atcattcctccatca

SEQ ID NO: 906221 - DNA, 15 bp, Homo sapiens
tatcattcctccatc

SEQ ID NO: 906222 - DNA, 15 bp, Homo sapiens
ctatcattcctccat

SEQ ID NO: 906223 - DNA, 15 bp, Homo sapiens
cctatcattcctcca

SEQ ID NO: 906224 - DNA, 15 bp, Homo sapiens
tcctatcattcctcc

SEQ ID NO: 906225 - DNA, 15 bp, Homo sapiens
ttcctatcattcctc

SEQ ID NO: 906226 - DNA, 15 bp, Homo sapiens
attcctatcattcct

SEQ ID NO: 906227 - DNA, 15 bp, Homo sapiens
cattcctatcattcc

SEQ ID NO: 906228 - DNA, 15 bp, Homo sapiens
tcattcctatcattc

SEQ ID NO: 906229 - DNA, 15 bp, Homo sapiens
atcattcctatcatt

SEQ ID NO: 906230 - DNA, 15 bp, Homo sapiens
gatcattcctatcat

SEQ ID NO: 906231 - DNA, 15 bp, Homo sapiens
tgatcattcctatca

SEQ ID NO: 906232 - DNA, 15 bp, Homo sapiens
gtgatcattcctatc

SEQ ID NO: 906233 - DNA, 15 bp, Homo sapiens
ggtgatcattcctat

SEQ ID NO: 906234 - DNA, 15 bp, Homo sapiens
aggtgatcattccta

SEQ ID NO: 906235 - DNA, 15 bp, Homo sapiens
caggtgatcattcct

SEQ ID NO: 906236 - DNA, 15 bp, Homo sapiens
tcaggtgatcattcc

SEQ ID NO: 906237 - DNA, 15 bp, Homo sapiens
ttcaggtgatcattc

SEQ ID NO: 906238 - DNA, 15 bp, Homo sapiens
cttcaggtgatcatt

SEQ ID NO: 906239 - DNA, 15 bp, Homo sapiens
acttcaggtgatcat

SEQ ID NO: 906240 - DNA, 15 bp, Homo sapiens
aacttcaggtgatca

SEQ ID NO: 906241 - DNA, 15 bp, Homo sapiens
caacttcaggtgatc

SEQ ID NO: 906242 - DNA, 15 bp, Homo sapiens
gcaacttcaggtgat

SEQ ID NO: 906243 - DNA, 15 bp, Homo sapiens
tgcaacttcaggtga

SEQ ID NO: 906244 - DNA, 15 bp, Homo sapiens
ctgcaacttcaggtg

SEQ ID NO: 906245 - DNA, 15 bp, Homo sapiens
cctgcaacttcaggt

SEQ ID NO: 906246 - DNA, 15 bp, Homo sapiens
ccctgcaacttcagg

SEQ ID NO: 906247 - DNA, 15 bp, Homo sapiens
accctgcaacttcag

SEQ ID NO: 906248 - DNA, 15 bp, Homo sapiens
caccctgcaacttca

SEQ ID NO: 906249 - DNA, 15 bp, Homo sapiens
ccaccctgcaacttc

SEQ ID NO: 906250 - DNA, 15 bp, Homo sapiens
cccaccctgcaactt

SEQ ID NO: 906251 - DNA, 15 bp, Homo sapiens
ccccaccctgcaact

SEQ ID NO: 906252 - DNA, 15 bp, Homo sapiens
accccaccctgcaac

SEQ ID NO: 906253 - DNA, 15 bp, Homo sapiens
taccccaccctgcaa

SEQ ID NO: 906254 - DNA, 15 bp, Homo sapiens
ttaccccaccctgca

SEQ ID NO: 906255 - DNA, 15 bp, Homo sapiens
tttaccccaccctgc

SEQ ID NO: 906256 - DNA, 15 bp, Homo sapiens
gtttaccccaccctg

SEQ ID NO: 906257 - DNA, 15 bp, Homo sapiens
ggtttaccccaccct

SEQ ID NO: 906258 - DNA, 15 bp, Homo sapiens
aggtttaccccaccc

SEQ ID NO: 906259 - DNA, 15 bp, Homo sapiens
taggtttaccccacc

SEQ ID NO: 906260 - DNA, 15 bp, Homo sapiens
ctaggtttaccccac

SEQ ID NO: 906261 - DNA, 15 bp, Homo sapiens
tctaggtttacccca

SEQ ID NO: 906262 - DNA, 15 bp, Homo sapiens
ttctaggtttacccc

SEQ ID NO: 906263 - DNA, 15 bp, Homo sapiens
cttctaggtttaccc

SEQ ID NO: 906264 - DNA, 15 bp, Homo sapiens
gcttctaggtttacc

SEQ ID NO: 906265 - DNA, 15 bp, Homo sapiens
tgcttctaggtttac

SEQ ID NO: 906266 - DNA, 15 bp, Homo sapiens
gtgcttctaggttta

SEQ ID NO: 906267 - DNA, 15 bp, Homo sapiens
ggtgcttctaggttt

SEQ ID NO: 906268 - DNA, 15 bp, Homo sapiens
tggtgcttctaggtt

SEQ ID NO: 906269 - DNA, 15 bp, Homo sapiens
ttggtgcttctaggt

SEQ ID NO: 906270 - DNA, 15 bp, Homo sapiens
gttggtgcttctagg

SEQ ID NO: 906271 - DNA, 15 bp, Homo sapiens
tgttggtgcttctag

SEQ ID NO: 906272 - DNA, 15 bp, Homo sapiens
gtgttggtgcttcta

SEQ ID NO: 906273 - DNA, 15 bp, Homo sapiens
ggtgttggtgcttct

SEQ ID NO: 906274 - DNA, 15 bp, Homo sapiens
aggtgttggtgcttc

SEQ ID NO: 906275 - DNA, 15 bp, Homo sapiens
aaggtgttggtgctt

SEQ ID NO: 906276 - DNA, 15 bp, Homo sapiens
gaaggtgttggtgct

SEQ ID NO: 906277 - DNA, 15 bp, Homo sapiens
agaaggtgttggtgc

SEQ ID NO: 906278 - DNA, 15 bp, Homo sapiens
aagaaggtgttggtg

SEQ ID NO: 906279 - DNA, 15 bp, Homo sapiens
gaagaaggtgttggt

SEQ ID NO: 906280 - DNA, 15 bp, Homo sapiens
agaagaaggtgttgg

SEQ ID NO: 906281 - DNA, 15 bp, Homo sapiens
cagaagaaggtgttg

SEQ ID NO: 906282 - DNA, 15 bp, Homo sapiens
tcagaagaaggtgtt

SEQ ID NO: 906283 - DNA, 15 bp, Homo sapiens
gtcagaagaaggtgt

SEQ ID NO: 906284 - DNA, 15 bp, Homo sapiens
ggtcagaagaaggtg

SEQ ID NO: 906285 - DNA, 15 bp, Homo sapiens
gggtcagaagaaggt

SEQ ID NO: 906286 - DNA, 15 bp, Homo sapiens
agggtcagaagaagg

SEQ ID NO: 906287 - DNA, 15 bp, Homo sapiens
gagggtcagaagaag

SEQ ID NO: 906288 - DNA, 15 bp, Homo sapiens
tgagggtcagaagaa

SEQ ID NO: 906289 - DNA, 15 bp, Homo sapiens
atgagggtcagaaga

SEQ ID NO: 906290 - DNA, 15 bp, Homo sapiens
catgagggtcagaag

SEQ ID NO: 906291 - DNA, 15 bp, Homo sapiens
acatgagggtcagaa

SEQ ID NO: 906292 - DNA, 15 bp, Homo sapiens
tacatgagggtcaga

SEQ ID NO: 906293 - DNA, 15 bp, Homo sapiens
atacatgagggtcag

SEQ ID NO: 906294 - DNA, 15 bp, Homo sapiens
aatacatgagggtca

SEQ ID NO: 906295 - DNA, 15 bp, Homo sapiens
aaatacatgagggtc

SEQ ID NO: 906296 - DNA, 15 bp, Homo sapiens
caaatacatgagggt

SEQ ID NO: 906297 - DNA, 15 bp, Homo sapiens
ccaaatacatgaggg

SEQ ID NO: 906298 - DNA, 15 bp, Homo sapiens
tccaaatacatgagg

SEQ ID NO: 906299 - DNA, 15 bp, Homo sapiens
ttccaaatacatgag

SEQ ID NO: 906300 - DNA, 15 bp, Homo sapiens
attccaaatacatga

SEQ ID NO: 906301 - DNA, 15 bp, Homo sapiens
gattccaaatacatg

SEQ ID NO: 906302 - DNA, 15 bp, Homo sapiens
agattccaaatacat

SEQ ID NO: 906303 - DNA, 15 bp, Homo sapiens
cagattccaaataca

SEQ ID NO: 906304 - DNA, 15 bp, Homo sapiens
tcagattccaaatac

SEQ ID NO: 906305 - DNA, 15 bp, Homo sapiens
ttcagattccaaata

SEQ ID NO: 906306 - DNA, 15 bp, Homo sapiens
tttcagattccaaat

SEQ ID NO: 906307 - DNA, 15 bp, Homo sapiens
ctttcagattccaaa

SEQ ID NO: 906308 - DNA, 15 bp, Homo sapiens
tctttcagattccaa

SEQ ID NO: 906309 - DNA, 15 bp, Homo sapiens
ttctttcagattcca

SEQ ID NO: 906310 - DNA, 15 bp, Homo sapiens
attctttcagattcc

SEQ ID NO: 906311 - DNA, 15 bp, Homo sapiens
cattctttcagattc

SEQ ID NO: 906312 - DNA, 15 bp, Homo sapiens
tcattctttcagatt

SEQ ID NO: 906313 - DNA, 15 bp, Homo sapiens
ctcattctttcagat

SEQ ID NO: 906314 - DNA, 15 bp, Homo sapiens
gctcattctttcaga

SEQ ID NO: 906315 - DNA, 15 bp, Homo sapiens
tgctcattctttcag

SEQ ID NO: 906316 - DNA, 15 bp, Homo sapiens
gtgctcattctttca

SEQ ID NO: 906317 - DNA, 15 bp, Homo sapiens
ggtgctcattctttc

SEQ ID NO: 906318 - DNA, 15 bp, Homo sapiens
aggtgctcattcttt

SEQ ID NO: 906319 - DNA, 15 bp, Homo sapiens
aaggtgctcattctt

SEQ ID NO: 906320 - DNA, 15 bp, Homo sapiens
gaaggtgctcattct

SEQ ID NO: 906321 - DNA, 15 bp, Homo sapiens
ggaaggtgctcattc

SEQ ID NO: 906322 - DNA, 15 bp, Homo sapiens
tggaaggtgctcatt

SEQ ID NO: 906323 - DNA, 15 bp, Homo sapiens
ttggaaggtgctcat

SEQ ID NO: 906324 - DNA, 15 bp, Homo sapiens
attggaaggtgctca

SEQ ID NO: 906325 - DNA, 15 bp, Homo sapiens
aattggaaggtgctc

SEQ ID NO: 906326 - DNA, 15 bp, Homo sapiens
caattggaaggtgct

SEQ ID NO: 906327 - DNA, 15 bp, Homo sapiens
tcaattggaaggtgc

SEQ ID NO: 906328 - DNA, 15 bp, Homo sapiens
ttcaattggaaggtg

SEQ ID NO: 906329 - DNA, 15 bp, Homo sapiens
tttcaattggaaggt

SEQ ID NO: 906330 - DNA, 15 bp, Homo sapiens
ctttcaattggaagg

SEQ ID NO: 906331 - DNA, 15 bp, Homo sapiens
tctttcaattggaag

SEQ ID NO: 906332 - DNA, 15 bp, Homo sapiens
ctctttcaattggaa

SEQ ID NO: 906333 - DNA, 15 bp, Homo sapiens
actctttcaattgga

SEQ ID NO: 906334 - DNA, 15 bp, Homo sapiens
aactctttcaattgg

SEQ ID NO: 906335 - DNA, 15 bp, Homo sapiens
gaactctttcaattg

SEQ ID NO: 906336 - DNA, 15 bp, Homo sapiens
ggaactctttcaatt

SEQ ID NO: 906337 - DNA, 15 bp, Homo sapiens
tggaactctttcaat

SEQ ID NO: 906338 - DNA, 15 bp, Homo sapiens
ttggaactctttcaa

SEQ ID NO: 906339 - DNA, 15 bp, Homo sapiens
cttggaactctttca

SEQ ID NO: 906340 - DNA, 15 bp, Homo sapiens
ccttggaactctttc

SEQ ID NO: 906341 - DNA, 15 bp, Homo sapiens
cccttggaactcttt

SEQ ID NO: 906342 - DNA, 15 bp, Homo sapiens
gcccttggaactctt

SEQ ID NO: 906343 - DNA, 15 bp, Homo sapiens
tgcccttggaactct

SEQ ID NO: 906344 - DNA, 15 bp, Homo sapiens
atgcccttggaactc

SEQ ID NO: 906345 - DNA, 15 bp, Homo sapiens
aatgcccttggaact

SEQ ID NO: 906346 - DNA, 15 bp, Homo sapiens
taatgcccttggaac

SEQ ID NO: 906347 - DNA, 15 bp, Homo sapiens
ctaatgcccttggaa

SEQ ID NO: 906348 - DNA, 15 bp, Homo sapiens
actaatgcccttgga

SEQ ID NO: 906349 - DNA, 15 bp, Homo sapiens
tactaatgcccttgg

SEQ ID NO: 906350 - DNA, 15 bp, Homo sapiens
atactaatgcccttg

SEQ ID NO: 906351 - DNA, 15 bp, Homo sapiens
tatactaatgccctt

SEQ ID NO: 906352 - DNA, 15 bp, Homo sapiens
gtatactaatgccct

SEQ ID NO: 906353 - DNA, 15 bp, Homo sapiens
agtatactaatgccc

SEQ ID NO: 906354 - DNA, 15 bp, Homo sapiens
tagtatactaatgcc

SEQ ID NO: 906355 - DNA, 15 bp, Homo sapiens
ttagtatactaatgc

SEQ ID NO: 906356 - DNA, 15 bp, Homo sapiens
tttagtatactaatg

SEQ ID NO: 906357 - DNA, 15 bp, Homo sapiens
ctttagtatactaat

SEQ ID NO: 906358 - DNA, 15 bp, Homo sapiens
cctttagtatactaa

SEQ ID NO: 906359 - DNA, 15 bp, Homo sapiens
tcctttagtatacta

SEQ ID NO: 906360 - DNA, 15 bp, Homo sapiens
atcctttagtatact

SEQ ID NO: 906361 - DNA, 15 bp, Homo sapiens
gatcctttagtatac

SEQ ID NO: 906362 - DNA, 15 bp, Homo sapiens
ggatcctttagtata

SEQ ID NO: 906363 - DNA, 15 bp, Homo sapiens
tggatcctttagtat

SEQ ID NO: 906364 - DNA, 15 bp, Homo sapiens
ttggatcctttagta

SEQ ID NO: 906365 - DNA, 15 bp, Homo sapiens
tttggatcctttagt

SEQ ID NO: 906366 - DNA, 15 bp, Homo sapiens
atttggatcctttag

SEQ ID NO: 906367 - DNA, 15 bp, Homo sapiens
aatttggatccttta

SEQ ID NO: 906368 - DNA, 15 bp, Homo sapiens
caatttggatccttt

SEQ ID NO: 906369 - DNA, 15 bp, Homo sapiens
gcaatttggatcctt

SEQ ID NO: 906370 - DNA, 15 bp, Homo sapiens
tgcaatttggatcct

SEQ ID NO: 906371 - DNA, 15 bp, Homo sapiens
ctgcaatttggatcc

SEQ ID NO: 906372 - DNA, 15 bp, Homo sapiens
gctgcaatttggatc

SEQ ID NO: 906373 - DNA, 15 bp, Homo sapiens
agctgcaatttggat

SEQ ID NO: 906374 - DNA, 15 bp, Homo sapiens
tagctgcaatttgga

SEQ ID NO: 906375 - DNA, 15 bp, Homo sapiens
ttagctgcaatttgg

SEQ ID NO: 906376 - DNA, 15 bp, Homo sapiens
cttagctgcaatttg

SEQ ID NO: 906377 - DNA, 15 bp, Homo sapiens
gcttagctgcaattt

SEQ ID NO: 906378 - DNA, 15 bp, Homo sapiens
ggcttagctgcaatt

SEQ ID NO: 906379 - DNA, 15 bp, Homo sapiens
tggcttagctgcaat

SEQ ID NO: 906380 - DNA, 15 bp, Homo sapiens
ttggcttagctgcaa

SEQ ID NO: 906381 - DNA, 15 bp, Homo sapiens
cttggcttagctgca

SEQ ID NO: 906382 - DNA, 15 bp, Homo sapiens
ccttggcttagctgc

SEQ ID NO: 906383 - DNA, 15 bp, Homo sapiens
tccttggcttagctg

SEQ ID NO: 906384 - DNA, 15 bp, Homo sapiens
ctccttggcttagct

SEQ ID NO: 906385 - DNA, 15 bp, Homo sapiens
tctccttggcttagc

SEQ ID NO: 906386 - DNA, 15 bp, Homo sapiens
atctccttggcttag

SEQ ID NO: 906387 - DNA, 15 bp, Homo sapiens
catctccttggctta

SEQ ID NO: 906388 - DNA, 15 bp, Homo sapiens
ccatctccttggctt

SEQ ID NO: 906389 - DNA, 15 bp, Homo sapiens
tccatctccttggct

SEQ ID NO: 906390 - DNA, 15 bp, Homo sapiens
ttccatctccttggc

SEQ ID NO: 906391 - DNA, 15 bp, Homo sapiens
tttccatctccttgg

SEQ ID NO: 906392 - DNA, 15 bp, Homo sapiens
ctttccatctccttg

SEQ ID NO: 906393 - DNA, 15 bp, Homo sapiens
cctttccatctcctt

SEQ ID NO: 906394 - DNA, 15 bp, Homo sapiens
tcctttccatctcct

SEQ ID NO: 906395 - DNA, 15 bp, Homo sapiens
ctcctttccatctcc

SEQ ID NO: 906396 - DNA, 15 bp, Homo sapiens
cctcctttccatctc

SEQ ID NO: 906397 - DNA, 15 bp, Homo sapiens
tcctcctttccatct

SEQ ID NO: 906398 - DNA, 15 bp, Homo sapiens
atcctcctttccatc

SEQ ID NO: 906399 - DNA, 15 bp, Homo sapiens
aatcctcctttccat

SEQ ID NO: 906400 - DNA, 15 bp, Homo sapiens
gaatcctcctttcca

SEQ ID NO: 906401 - DNA, 15 bp, Homo sapiens
tgaatcctcctttcc

SEQ ID NO: 906402 - DNA, 15 bp, Homo sapiens
ctgaatcctcctttc

SEQ ID NO: 906403 - DNA, 15 bp, Homo sapiens
actgaatcctccttt

SEQ ID NO: 906404 - DNA, 15 bp, Homo sapiens
tactgaatcctcctt

SEQ ID NO: 906405 - DNA, 15 bp, Homo sapiens
ttactgaatcctcct

SEQ ID NO: 906406 - DNA, 15 bp, Homo sapiens
tttactgaatcctcc

SEQ ID NO: 906407 - DNA, 15 bp, Homo sapiens
ctttactgaatcctc

SEQ ID NO: 906408 - DNA, 15 bp, Homo sapiens
tctttactgaatcct

SEQ ID NO: 906409 - DNA, 15 bp, Homo sapiens
ttctttactgaatcc

SEQ ID NO: 906410 - DNA, 15 bp, Homo sapiens
attctttactgaatc

SEQ ID NO: 906411 - DNA, 15 bp, Homo sapiens
gattctttactgaat

SEQ ID NO: 906412 - DNA, 15 bp, Homo sapiens
agattctttactgaa

SEQ ID NO: 906413 - DNA, 15 bp, Homo sapiens
cagattctttactga

SEQ ID NO: 906414 - DNA, 15 bp, Homo sapiens
tcagattctttactg

SEQ ID NO: 906415 - DNA, 15 bp, Homo sapiens
ctcagattctttact

SEQ ID NO: 906416 - DNA, 15 bp, Homo sapiens
cctcagattctttac

SEQ ID NO: 906417 - DNA, 15 bp, Homo sapiens
tcctcagattcttta

SEQ ID NO: 906418 - DNA, 15 bp, Homo sapiens
atcctcagattcttt

SEQ ID NO: 906419 - DNA, 15 bp, Homo sapiens
catcctcagattctt

SEQ ID NO: 906420 - DNA, 15 bp, Homo sapiens
acatcctcagattct

SEQ ID NO: 906421 - DNA, 15 bp, Homo sapiens
cacatcctcagattc

SEQ ID NO: 906422 - DNA, 15 bp, Homo sapiens
tcacatcctcagatt

SEQ ID NO: 906423 - DNA, 15 bp, Homo sapiens
ttcacatcctcagat

SEQ ID NO: 906424 - DNA, 15 bp, Homo sapiens
tttcacatcctcaga

SEQ ID NO: 906425 - DNA, 15 bp, Homo sapiens
atttcacatcctcag

SEQ ID NO: 906426 - DNA, 15 bp, Homo sapiens
tatttcacatcctca

SEQ ID NO: 906427 - DNA, 15 bp, Homo sapiens
atatttcacatcctc

SEQ ID NO: 906428 - DNA, 15 bp, Homo sapiens
aatatttcacatcct

SEQ ID NO: 906429 - DNA, 15 bp, Homo sapiens
taatatttcacatcc

SEQ ID NO: 906430 - DNA, 15 bp, Homo sapiens
ttaatatttcacatc

SEQ ID NO: 906431 - DNA, 15 bp, Homo sapiens
attaatatttcacat

SEQ ID NO: 906432 - DNA, 15 bp, Homo sapiens
aattaatatttcaca

SEQ ID NO: 906433 - DNA, 15 bp, Homo sapiens
aaattaatatttcac

SEQ ID NO: 906434 - DNA, 15 bp, Homo sapiens
taaattaatatttca

SEQ ID NO: 906435 - DNA, 15 bp, Homo sapiens
ataaattaatatttc

SEQ ID NO: 906436 - DNA, 15 bp, Homo sapiens
gataaattaatattt

SEQ ID NO: 906437 - DNA, 15 bp, Homo sapiens
agataaattaatatt

SEQ ID NO: 906438 - DNA, 15 bp, Homo sapiens
aagataaattaatat

SEQ ID NO: 906439 - DNA, 15 bp, Homo sapiens
caagataaattaata

SEQ ID NO: 906440 - DNA, 15 bp, Homo sapiens
ccaagataaattaat

SEQ ID NO: 906441 - DNA, 15 bp, Homo sapiens
tccaagataaattaa

SEQ ID NO: 906442 - DNA, 15 bp, Homo sapiens
ttccaagataaatta

SEQ ID NO: 906443 - DNA, 15 bp, Homo sapiens
cttccaagataaatt

SEQ ID NO: 906444 - DNA, 15 bp, Homo sapiens
tcttccaagataaat

SEQ ID NO: 906445 - DNA, 15 bp, Homo sapiens
ctcttccaagataaa

SEQ ID NO: 906446 - DNA, 15 bp, Homo sapiens
tctcttccaagataa

SEQ ID NO: 906447 - DNA, 15 bp, Homo sapiens
ttctcttccaagata

SEQ ID NO: 906448 - DNA, 15 bp, Homo sapiens
attctcttccaagat

SEQ ID NO: 906449 - DNA, 15 bp, Homo sapiens
aattctcttccaaga

SEQ ID NO: 906450 - DNA, 15 bp, Homo sapiens
aaattctcttccaag

SEQ ID NO: 906451 - DNA, 15 bp, Homo sapiens
aaaattctcttccaa

SEQ ID NO: 906452 - DNA, 15 bp, Homo sapiens
taaaattctcttcca

SEQ ID NO: 906453 - DNA, 15 bp, Homo sapiens
ctaaaattctcttcc

SEQ ID NO: 906454 - DNA, 15 bp, Homo sapiens
tctaaaattctcttc

SEQ ID NO: 906455 - DNA, 15 bp, Homo sapiens
ctctaaaattctctt

SEQ ID NO: 906456 - DNA, 15 bp, Homo sapiens
tctctaaaattctct

SEQ ID NO: 906457 - DNA, 15 bp, Homo sapiens
ctctctaaaattctc

SEQ ID NO: 906458 - DNA, 15 bp, Homo sapiens
gctctctaaaattct

SEQ ID NO: 906459 - DNA, 15 bp, Homo sapiens
tgctctctaaaattc

SEQ ID NO: 906460 - DNA, 15 bp, Homo sapiens
gtgctctctaaaatt

SEQ ID NO: 906461 - DNA, 15 bp, Homo sapiens
tgtgctctctaaaat

SEQ ID NO: 906462 - DNA, 15 bp, Homo sapiens
ttgtgctctctaaaa

SEQ ID NO: 906463 - DNA, 15 bp, Homo sapiens
attgtgctctctaaa

SEQ ID NO: 906464 - DNA, 15 bp, Homo sapiens
cattgtgctctctaa

SEQ ID NO: 906465 - DNA, 15 bp, Homo sapiens
ccattgtgctctcta

SEQ ID NO: 906466 - DNA, 15 bp, Homo sapiens
tccattgtgctctct

SEQ ID NO: 906467 - DNA, 15 bp, Homo sapiens
ttccattgtgctctc

SEQ ID NO: 906468 - DNA, 15 bp, Homo sapiens
attccattgtgctct

SEQ ID NO: 906469 - DNA, 15 bp, Homo sapiens
cattccattgtgctc

SEQ ID NO: 906470 - DNA, 15 bp, Homo sapiens
gcattccattgtgct

SEQ ID NO: 906471 - DNA, 15 bp, Homo sapiens
agcattccattgtgc

SEQ ID NO: 906472 - DNA, 15 bp, Homo sapiens
aagcattccattgtg

SEQ ID NO: 906473 - DNA, 15 bp, Homo sapiens
aaagcattccattgt

SEQ ID NO: 906474 - DNA, 15 bp, Homo sapiens
aaaagcattccattg

SEQ ID NO: 906475 - DNA, 15 bp, Homo sapiens
aaaaagcattccatt

SEQ ID NO: 906476 - DNA, 15 bp, Homo sapiens
caaaaagcattccat

SEQ ID NO: 906477 - DNA, 15 bp, Homo sapiens
ccaaaaagcattcca

SEQ ID NO: 906478 - DNA, 15 bp, Homo sapiens
tccaaaaagcattcc

SEQ ID NO: 906479 - DNA, 15 bp, Homo sapiens
ctccaaaaagcattc

SEQ ID NO: 906480 - DNA, 15 bp, Homo sapiens
cctccaaaaagcatt

SEQ ID NO: 906481 - DNA, 15 bp, Homo sapiens
tcctccaaaaagcat

SEQ ID NO: 906482 - DNA, 15 bp, Homo sapiens
ctcctccaaaaagca

SEQ ID NO: 906483 - DNA, 15 bp, Homo sapiens
tctcctccaaaaagc

SEQ ID NO: 906484 - DNA, 15 bp, Homo sapiens
ctctcctccaaaaag

SEQ ID NO: 906485 - DNA, 15 bp, Homo sapiens
tctctcctccaaaaa

SEQ ID NO: 906486 - DNA, 15 bp, Homo sapiens
ttctctcctccaaaa

SEQ ID NO: 906487 - DNA, 15 bp, Homo sapiens
tttctctcctccaaa

SEQ ID NO: 906488 - DNA, 15 bp, Homo sapiens
ctttctctcctccaa

SEQ ID NO: 906489 - DNA, 15 bp, Homo sapiens
tctttctctcctcca

SEQ ID NO: 906490 - DNA, 15 bp, Homo sapiens
ctctttctctcctcc

SEQ ID NO: 906491 - DNA, 15 bp, Homo sapiens
actctttctctcctc

SEQ ID NO: 906492 - DNA, 15 bp, Homo sapiens
tactctttctctcct

SEQ ID NO: 906493 - DNA, 15 bp, Homo sapiens
ttactctttctctcc

SEQ ID NO: 906494 - DNA, 15 bp, Homo sapiens
cttactctttctctc

SEQ ID NO: 906495 - DNA, 15 bp, Homo sapiens
tcttactctttctct

SEQ ID NO: 906496 - DNA, 15 bp, Homo sapiens
ttcttactctttctc

SEQ ID NO: 906497 - DNA, 15 bp, Homo sapiens
gttcttactctttct

SEQ ID NO: 906498 - DNA, 15 bp, Homo sapiens
tgttcttactctttc

SEQ ID NO: 906499 - DNA, 15 bp, Homo sapiens
ttgttcttactcttt

SEQ ID NO: 906500 - DNA, 15 bp, Homo sapiens
attgttcttactctt

SEQ ID NO: 906501 - DNA, 15 bp, Homo sapiens
aattgttcttactct

SEQ ID NO: 906502 - DNA, 15 bp, Homo sapiens
aaattgttcttactc

SEQ ID NO: 906503 - DNA, 15 bp, Homo sapiens
caaattgttcttact

SEQ ID NO: 906504 - DNA, 15 bp, Homo sapiens
ccaaattgttcttac

SEQ ID NO: 906505 - DNA, 15 bp, Homo sapiens
accaaattgttctta

SEQ ID NO: 906506 - DNA, 15 bp, Homo sapiens
aaccaaattgttctt

SEQ ID NO: 906507 - DNA, 15 bp, Homo sapiens
taaccaaattgttct

SEQ ID NO: 906508 - DNA, 15 bp, Homo sapiens
ttaaccaaattgttc

SEQ ID NO: 906509 - DNA, 15 bp, Homo sapiens
cttaaccaaattgtt

SEQ ID NO: 906510 - DNA, 15 bp, Homo sapiens
ccttaaccaaattgt

SEQ ID NO: 906511 - DNA, 15 bp, Homo sapiens
accttaaccaaattg

SEQ ID NO: 906512 - DNA, 15 bp, Homo sapiens
taccttaaccaaatt

SEQ ID NO: 906513 - DNA, 15 bp, Homo sapiens
ctaccttaaccaaat

SEQ ID NO: 906514 - DNA, 15 bp, Homo sapiens
tctaccttaaccaaa

SEQ ID NO: 906515 - DNA, 15 bp, Homo sapiens
ctctaccttaaccaa

SEQ ID NO: 906516 - DNA, 15 bp, Homo sapiens
cctctaccttaacca

SEQ ID NO: 906517 - DNA, 15 bp, Homo sapiens
tcctctaccttaacc

SEQ ID NO: 906518 - DNA, 15 bp, Homo sapiens
ttcctctaccttaac

SEQ ID NO: 906519 - DNA, 15 bp, Homo sapiens
attcctctaccttaa

SEQ ID NO: 906520 - DNA, 15 bp, Homo sapiens
tattcctctacctta

SEQ ID NO: 906521 - DNA, 15 bp, Homo sapiens
ttattcctctacctt

SEQ ID NO: 906522 - DNA, 15 bp, Homo sapiens
gttattcctctacct

SEQ ID NO: 906523 - DNA, 15 bp, Homo sapiens
tgttattcctctacc

SEQ ID NO: 906524 - DNA, 15 bp, Homo sapiens
ctgttattcctctac

SEQ ID NO: 906525 - DNA, 15 bp, Homo sapiens
tctgttattcctcta

SEQ ID NO: 906526 - DNA, 15 bp, Homo sapiens
ttctgttattcctct

SEQ ID NO: 906527 - DNA, 15 bp, Homo sapiens
gttctgttattcctc

SEQ ID NO: 906528 - DNA, 15 bp, Homo sapiens
agttctgttattcct

SEQ ID NO: 906529 - DNA, 15 bp, Homo sapiens
tagttctgttattcc

SEQ ID NO: 906530 - DNA, 15 bp, Homo sapiens
atagttctgttattc

SEQ ID NO: 906531 - DNA, 15 bp, Homo sapiens
tatagttctgttatt

SEQ ID NO: 906532 - DNA, 15 bp, Homo sapiens
ttatagttctgttat

SEQ ID NO: 906533 - DNA, 15 bp, Homo sapiens
cttatagttctgtta

SEQ ID NO: 906534 - DNA, 15 bp, Homo sapiens
ccttatagttctgtt

SEQ ID NO: 906535 - DNA, 15 bp, Homo sapiens
accttatagttctgt

SEQ ID NO: 906536 - DNA, 15 bp, Homo sapiens
caccttatagttctg

SEQ ID NO: 906537 - DNA, 15 bp, Homo sapiens
tcaccttatagttct

SEQ ID NO: 906538 - DNA, 15 bp, Homo sapiens
ttcaccttatagttc

SEQ ID NO: 906539 - DNA, 15 bp, Homo sapiens
cttcaccttatagtt

SEQ ID NO: 906540 - DNA, 15 bp, Homo sapiens
tcttcaccttatagt

SEQ ID NO: 906541 - DNA, 15 bp, Homo sapiens
ttcttcaccttatag

SEQ ID NO: 906542 - DNA, 15 bp, Homo sapiens
tttcttcaccttata

SEQ ID NO: 906543 - DNA, 15 bp, Homo sapiens
atttcttcaccttat

SEQ ID NO: 906544 - DNA, 15 bp, Homo sapiens
catttcttcacctta

SEQ ID NO: 906545 - DNA, 15 bp, Homo sapiens
tcatttcttcacctt

SEQ ID NO: 906546 - DNA, 15 bp, Homo sapiens
ttcatttcttcacct

SEQ ID NO: 906547 - DNA, 15 bp, Homo sapiens
attcatttcttcacc

SEQ ID NO: 906548 - DNA, 15 bp, Homo sapiens
cattcatttcttcac

SEQ ID NO: 906549 - DNA, 15 bp, Homo sapiens
acattcatttcttca

SEQ ID NO: 906550 - DNA, 15 bp, Homo sapiens
cacattcatttcttc

SEQ ID NO: 906551 - DNA, 15 bp, Homo sapiens
tcacattcatttctt

SEQ ID NO: 906552 - DNA, 15 bp, Homo sapiens
ctcacattcatttct

SEQ ID NO: 906553 - DNA, 15 bp, Homo sapiens
tctcacattcatttc

SEQ ID NO: 906554 - DNA, 15 bp, Homo sapiens
gtctcacattcattt

SEQ ID NO: 906555 - DNA, 15 bp, Homo sapiens
tgtctcacattcatt

SEQ ID NO: 906556 - DNA, 15 bp, Homo sapiens
gtgtctcacattcat

SEQ ID NO: 906557 - DNA, 15 bp, Homo sapiens
tgtgtctcacattca

SEQ ID NO: 906558 - DNA, 15 bp, Homo sapiens
atgtgtctcacattc

SEQ ID NO: 906559 - DNA, 15 bp, Homo sapiens
aatgtgtctcacatt

SEQ ID NO: 906560 - DNA, 15 bp, Homo sapiens
taatgtgtctcacat

SEQ ID NO: 906561 - DNA, 15 bp, Homo sapiens
ctaatgtgtctcaca

SEQ ID NO: 906562 - DNA, 15 bp, Homo sapiens
tctaatgtgtctcac

SEQ ID NO: 906563 - DNA, 15 bp, Homo sapiens
atctaatgtgtctca

SEQ ID NO: 906564 - DNA, 15 bp, Homo sapiens
catctaatgtgtctc

SEQ ID NO: 906565 - DNA, 15 bp, Homo sapiens
tcatctaatgtgtct

SEQ ID NO: 906566 - DNA, 15 bp, Homo sapiens
gtcatctaatgtgtc

SEQ ID NO: 906567 - DNA, 15 bp, Homo sapiens
ggtcatctaatgtgt

SEQ ID NO: 906568 - DNA, 15 bp, Homo sapiens
tggtcatctaatgtg

SEQ ID NO: 906569 - DNA, 15 bp, Homo sapiens
ttggtcatctaatgt

SEQ ID NO: 906570 - DNA, 15 bp, Homo sapiens
tttggtcatctaatg

SEQ ID NO: 906571 - DNA, 15 bp, Homo sapiens
atttggtcatctaat

SEQ ID NO: 906572 - DNA, 15 bp, Homo sapiens
catttggtcatctaa

SEQ ID NO: 906573 - DNA, 15 bp, Homo sapiens
tcatttggtcatcta

SEQ ID NO: 906574 - DNA, 15 bp, Homo sapiens
atcatttggtcatct

SEQ ID NO: 906575 - DNA, 15 bp, Homo sapiens
aatcatttggtcatc

SEQ ID NO: 906576 - DNA, 15 bp, Homo sapiens
aaatcatttggtcat

SEQ ID NO: 906577 - DNA, 15 bp, Homo sapiens
caaatcatttggtca

SEQ ID NO: 906578 - DNA, 15 bp, Homo sapiens
tcaaatcatttggtc

SEQ ID NO: 906579 - DNA, 15 bp, Homo sapiens
atcaaatcatttggt

SEQ ID NO: 906580 - DNA, 15 bp, Homo sapiens
catcaaatcatttgg

SEQ ID NO: 906581 - DNA, 15 bp, Homo sapiens
acatcaaatcatttg

SEQ ID NO: 906582 - DNA, 15 bp, Homo sapiens
aacatcaaatcattt

SEQ ID NO: 906583 - DNA, 15 bp, Homo sapiens
gaacatcaaatcatt

SEQ ID NO: 906584 - DNA, 15 bp, Homo sapiens
agaacatcaaatcat

SEQ ID NO: 906585 - DNA, 15 bp, Homo sapiens
aagaacatcaaatca

SEQ ID NO: 906586 - DNA, 15 bp, Homo sapiens
caagaacatcaaatc

SEQ ID NO: 906587 - DNA, 15 bp, Homo sapiens
ccaagaacatcaaat

SEQ ID NO: 906588 - DNA, 15 bp, Homo sapiens
gccaagaacatcaaa

SEQ ID NO: 906589 - DNA, 15 bp, Homo sapiens
ggccaagaacatcaa

SEQ ID NO: 906590 - DNA, 15 bp, Homo sapiens
tggccaagaacatca

SEQ ID NO: 906591 - DNA, 15 bp, Homo sapiens
atggccaagaacatc

SEQ ID NO: 906592 - DNA, 15 bp, Homo sapiens
catggccaagaacat

SEQ ID NO: 906593 - DNA, 15 bp, Homo sapiens
tcatggccaagaaca

SEQ ID NO: 906594 - DNA, 15 bp, Homo sapiens
gtcatggccaagaac

SEQ ID NO: 906595 - DNA, 15 bp, Homo sapiens
ggtcatggccaagaa

SEQ ID NO: 906596 - DNA, 15 bp, Homo sapiens
aggtcatggccaaga

SEQ ID NO: 906597 - DNA, 15 bp, Homo sapiens
caggtcatggccaag

SEQ ID NO: 906598 - DNA, 15 bp, Homo sapiens
tcaggtcatggccaa

SEQ ID NO: 906599 - DNA, 15 bp, Homo sapiens
ttcaggtcatggcca

SEQ ID NO: 906600 - DNA, 15 bp, Homo sapiens
attcaggtcatggcc

SEQ ID NO: 906601 - DNA, 15 bp, Homo sapiens
aattcaggtcatggc

SEQ ID NO: 906602 - DNA, 15 bp, Homo sapiens
taattcaggtcatgg

SEQ ID NO: 906603 - DNA, 15 bp, Homo sapiens
ttaattcaggtcatg

SEQ ID NO: 906604 - DNA, 15 bp, Homo sapiens
gttaattcaggtcat

SEQ ID NO: 906605 - DNA, 15 bp, Homo sapiens
tgttaattcaggtca

SEQ ID NO: 906606 - DNA, 15 bp, Homo sapiens
ttgttaattcaggtc

SEQ ID NO: 906607 - DNA, 15 bp, Homo sapiens
cttgttaattcaggt

SEQ ID NO: 906608 - DNA, 15 bp, Homo sapiens
tcttgttaattcagg

SEQ ID NO: 906609 - DNA, 15 bp, Homo sapiens
gtcttgttaattcag

SEQ ID NO: 906610 - DNA, 15 bp, Homo sapiens
agtcttgttaattca

SEQ ID NO: 906611 - DNA, 15 bp, Homo sapiens
cagtcttgttaattc

SEQ ID NO: 906612 - DNA, 15 bp, Homo sapiens
acagtcttgttaatt

SEQ ID NO: 906613 - DNA, 15 bp, Homo sapiens
cacagtcttgttaat

SEQ ID NO: 906614 - DNA, 15 bp, Homo sapiens
tcacagtcttgttaa

SEQ ID NO: 906615 - DNA, 15 bp, Homo sapiens
ctcacagtcttgtta

SEQ ID NO: 906616 - DNA, 15 bp, Homo sapiens
cctcacagtcttgtt

SEQ ID NO: 906617 - DNA, 15 bp, Homo sapiens
acctcacagtcttgt

SEQ ID NO: 906618 - DNA, 15 bp, Homo sapiens
tacctcacagtcttg

SEQ ID NO: 906619 - DNA, 15 bp, Homo sapiens
ttacctcacagtctt

SEQ ID NO: 906620 - DNA, 15 bp, Homo sapiens
tttacctcacagtct

SEQ ID NO: 906621 - DNA, 15 bp, Homo sapiens
ttttacctcacagtc

SEQ ID NO: 906622 - DNA, 15 bp, Homo sapiens
attttacctcacagt

SEQ ID NO: 906623 - DNA, 15 bp, Homo sapiens
cattttacctcacag

SEQ ID NO: 906624 - DNA, 15 bp, Homo sapiens
ccattttacctcaca

SEQ ID NO: 906625 - DNA, 15 bp, Homo sapiens
tccattttacctcac

SEQ ID NO: 906626 - DNA, 15 bp, Homo sapiens
atccattttacctca

SEQ ID NO: 906627 - DNA, 15 bp, Homo sapiens
aatccattttacctc

SEQ ID NO: 906628 - DNA, 15 bp, Homo sapiens
aaatccattttacct

SEQ ID NO: 906629 - DNA, 15 bp, Homo sapiens
taaatccattttacc

SEQ ID NO: 906630 - DNA, 15 bp, Homo sapiens
ttaaatccattttac

SEQ ID NO: 906631 - DNA, 15 bp, Homo sapiens
attaaatccatttta

SEQ ID NO: 906632 - DNA, 15 bp, Homo sapiens
gattaaatccatttt

SEQ ID NO: 906633 - DNA, 15 bp, Homo sapiens
cgattaaatccattt

SEQ ID NO: 906634 - DNA, 15 bp, Homo sapiens
ccgattaaatccatt

SEQ ID NO: 906635 - DNA, 15 bp, Homo sapiens
gccgattaaatccat

SEQ ID NO: 906636 - DNA, 15 bp, Homo sapiens
agccgattaaatcca

SEQ ID NO: 906637 - DNA, 15 bp, Homo sapiens
tagccgattaaatcc

SEQ ID NO: 906638 - DNA, 15 bp, Homo sapiens
gtagccgattaaatc

SEQ ID NO: 906639 - DNA, 15 bp, Homo sapiens
tgtagccgattaaat

SEQ ID NO: 906640 - DNA, 15 bp, Homo sapiens
ttgtagccgattaaa

SEQ ID NO: 906641 - DNA, 15 bp, Homo sapiens
tttgtagccgattaa

SEQ ID NO: 906642 - DNA, 15 bp, Homo sapiens
atttgtagccgatta

SEQ ID NO: 906643 - DNA, 15 bp, Homo sapiens
gatttgtagccgatt

SEQ ID NO: 906644 - DNA, 15 bp, Homo sapiens
agatttgtagccgat

SEQ ID NO: 906645 - DNA, 15 bp, Homo sapiens
aagatttgtagccga

SEQ ID NO: 906646 - DNA, 15 bp, Homo sapiens
taagatttgtagccg

SEQ ID NO: 906647 - DNA, 15 bp, Homo sapiens
ttaagatttgtagcc

SEQ ID NO: 906648 - DNA, 15 bp, Homo sapiens
cttaagatttgtagc

SEQ ID NO: 906649 - DNA, 15 bp, Homo sapiens
tcttaagatttgtag

SEQ ID NO: 906650 - DNA, 15 bp, Homo sapiens
atcttaagatttgta

SEQ ID NO: 906651 - DNA, 15 bp, Homo sapiens
tatcttaagatttgt

SEQ ID NO: 906652 - DNA, 15 bp, Homo sapiens
ttatcttaagatttg

SEQ ID NO: 906653 - DNA, 15 bp, Homo sapiens
gttatcttaagattt

SEQ ID NO: 906654 - DNA, 15 bp, Homo sapiens
ggttatcttaagatt

SEQ ID NO: 906655 - DNA, 15 bp, Homo sapiens
tggttatcttaagat

SEQ ID NO: 906656 - DNA, 15 bp, Homo sapiens
ttggttatcttaaga

SEQ ID NO: 906657 - DNA, 15 bp, Homo sapiens
tttggttatcttaag

SEQ ID NO: 906658 - DNA, 15 bp, Homo sapiens
ttttggttatcttaa

SEQ ID NO: 906659 - DNA, 15 bp, Homo sapiens
gttttggttatctta

SEQ ID NO: 906660 - DNA, 15 bp, Homo sapiens
ggttttggttatctt

SEQ ID NO: 906661 - DNA, 15 bp, Homo sapiens
aggttttggttatct

SEQ ID NO: 906662 - DNA, 15 bp, Homo sapiens
caggttttggttatc

SEQ ID NO: 906663 - DNA, 15 bp, Homo sapiens
tcaggttttggttat

SEQ ID NO: 906664 - DNA, 15 bp, Homo sapiens
ctcaggttttggtta

SEQ ID NO: 906665 - DNA, 15 bp, Homo sapiens
gctcaggttttggtt

SEQ ID NO: 906666 - DNA, 15 bp, Homo sapiens
agctcaggttttggt

SEQ ID NO: 906667 - DNA, 15 bp, Homo sapiens
cagctcaggttttgg

SEQ ID NO: 906668 - DNA, 15 bp, Homo sapiens
acagctcaggttttg

SEQ ID NO: 906669 - DNA, 15 bp, Homo sapiens
aacagctcaggtttt

SEQ ID NO: 906670 - DNA, 15 bp, Homo sapiens
aaacagctcaggttt

SEQ ID NO: 906671 - DNA, 15 bp, Homo sapiens
taaacagctcaggtt

SEQ ID NO: 906672 - DNA, 15 bp, Homo sapiens
ttaaacagctcaggt

SEQ ID NO: 906673 - DNA, 15 bp, Homo sapiens
attaaacagctcagg

SEQ ID NO: 906674 - DNA, 15 bp, Homo sapiens
tattaaacagctcag

SEQ ID NO: 906675 - DNA, 15 bp, Homo sapiens
atattaaacagctca

SEQ ID NO: 906676 - DNA, 15 bp, Homo sapiens
catattaaacagctc

SEQ ID NO: 906677 - DNA, 15 bp, Homo sapiens
ccatattaaacagct

SEQ ID NO: 906678 - DNA, 15 bp, Homo sapiens
accatattaaacagc

SEQ ID NO: 906679 - DNA, 15 bp, Homo sapiens
taccatattaaacag

SEQ ID NO: 906680 - DNA, 15 bp, Homo sapiens
ctaccatattaaaca

SEQ ID NO: 906681 - DNA, 15 bp, Homo sapiens
gctaccatattaaac

SEQ ID NO: 906682 - DNA, 15 bp, Homo sapiens
tgctaccatattaaa

SEQ ID NO: 906683 - DNA, 15 bp, Homo sapiens
gtgctaccatattaa

SEQ ID NO: 906684 - DNA, 15 bp, Homo sapiens
agtgctaccatatta

SEQ ID NO: 906685 - DNA, 15 bp, Homo sapiens
tagtgctaccatatt

SEQ ID NO: 906686 - DNA, 15 bp, Homo sapiens
ctagtgctaccatat

SEQ ID NO: 906687 - DNA, 15 bp, Homo sapiens
gctagtgctaccata

SEQ ID NO: 906688 - DNA, 15 bp, Homo sapiens
tgctagtgctaccat

SEQ ID NO: 906689 - DNA, 15 bp, Homo sapiens
gtgctagtgctacca

SEQ ID NO: 906690 - DNA, 15 bp, Homo sapiens
agtgctagtgctacc

SEQ ID NO: 906691 - DNA, 15 bp, Homo sapiens
tagtgctagtgctac

SEQ ID NO: 906692 - DNA, 15 bp, Homo sapiens
ttagtgctagtgcta

SEQ ID NO: 906693 - DNA, 15 bp, Homo sapiens
gttagtgctagtgct

SEQ ID NO: 906694 - DNA, 15 bp, Homo sapiens
ggttagtgctagtgc

SEQ ID NO: 906695 - DNA, 15 bp, Homo sapiens
tggttagtgctagtg

SEQ ID NO: 906696 - DNA, 15 bp, Homo sapiens
gtggttagtgctagt

SEQ ID NO: 906697 - DNA, 15 bp, Homo sapiens
agtggttagtgctag

SEQ ID NO: 906698 - DNA, 15 bp, Homo sapiens
aagtggttagtgcta

SEQ ID NO: 906699 - DNA, 15 bp, Homo sapiens
caagtggttagtgct

SEQ ID NO: 906700 - DNA, 15 bp, Homo sapiens
acaagtggttagtgc

SEQ ID NO: 906701 - DNA, 15 bp, Homo sapiens
tacaagtggttagtg

SEQ ID NO: 906702 - DNA, 15 bp, Homo sapiens
ctacaagtggttagt

SEQ ID NO: 906703 - DNA, 15 bp, Homo sapiens
gctacaagtggttag

SEQ ID NO: 906704 - DNA, 15 bp, Homo sapiens
agctacaagtggtta

SEQ ID NO: 906705 - DNA, 15 bp, Homo sapiens
tagctacaagtggtt

SEQ ID NO: 906706 - DNA, 15 bp, Homo sapiens
atagctacaagtggt

SEQ ID NO: 906707 - DNA, 15 bp, Homo sapiens
aatagctacaagtgg

SEQ ID NO: 906708 - DNA, 15 bp, Homo sapiens
aaatagctacaagtg

SEQ ID NO: 906709 - DNA, 15 bp, Homo sapiens
taaatagctacaagt

SEQ ID NO: 906710 - DNA, 15 bp, Homo sapiens
ataaatagctacaag

SEQ ID NO: 906711 - DNA, 15 bp, Homo sapiens
tataaatagctacaa

SEQ ID NO: 906712 - DNA, 15 bp, Homo sapiens
atataaatagctaca

SEQ ID NO: 906713 - DNA, 15 bp, Homo sapiens
aatataaatagctac

SEQ ID NO: 906714 - DNA, 15 bp, Homo sapiens
aaatataaatagcta

SEQ ID NO: 906715 - DNA, 15 bp, Homo sapiens
taaatataaatagct

SEQ ID NO: 906716 - DNA, 15 bp, Homo sapiens
gtaaatataaatagc

SEQ ID NO: 906717 - DNA, 15 bp, Homo sapiens
tgtaaatataaatag

SEQ ID NO: 906718 - DNA, 15 bp, Homo sapiens
atgtaaatataaata

SEQ ID NO: 906719 - DNA, 15 bp, Homo sapiens
aatgtaaatataaat

SEQ ID NO: 906720 - DNA, 15 bp, Homo sapiens
caatgtaaatataaa

SEQ ID NO: 906721 - DNA, 15 bp, Homo sapiens
ccaatgtaaatataa

SEQ ID NO: 906722 - DNA, 15 bp, Homo sapiens
accaatgtaaatata

SEQ ID NO: 906723 - DNA, 15 bp, Homo sapiens
aaccaatgtaaatat

SEQ ID NO: 906724 - DNA, 15 bp, Homo sapiens
taaccaatgtaaata

SEQ ID NO: 906725 - DNA, 15 bp, Homo sapiens
ttaaccaatgtaaat

SEQ ID NO: 906726 - DNA, 15 bp, Homo sapiens
tttaaccaatgtaaa

SEQ ID NO: 906727 - DNA, 15 bp, Homo sapiens
ttttaaccaatgtaa

SEQ ID NO: 906728 - DNA, 15 bp, Homo sapiens
attttaaccaatgta

SEQ ID NO: 906729 - DNA, 15 bp, Homo sapiens
aattttaaccaatgt

SEQ ID NO: 906730 - DNA, 15 bp, Homo sapiens
taattttaaccaatg

SEQ ID NO: 906731 - DNA, 15 bp, Homo sapiens
ttaattttaaccaat

SEQ ID NO: 906732 - DNA, 15 bp, Homo sapiens
tttaattttaaccaa

SEQ ID NO: 906733 - DNA, 15 bp, Homo sapiens
ttttaattttaacca

SEQ ID NO: 906734 - DNA, 15 bp, Homo sapiens
attttaattttaacc

SEQ ID NO: 906735 - DNA, 15 bp, Homo sapiens
cattttaattttaac

SEQ ID NO: 906736 - DNA, 15 bp, Homo sapiens
tcattttaattttaa

SEQ ID NO: 906737 - DNA, 15 bp, Homo sapiens
ttcattttaatttta

SEQ ID NO: 906738 - DNA, 15 bp, Homo sapiens
tttcattttaatttt

SEQ ID NO: 906739 - DNA, 15 bp, Homo sapiens
ttttcattttaattt

SEQ ID NO: 906740 - DNA, 15 bp, Homo sapiens
tttttcattttaatt

SEQ ID NO: 906741 - DNA, 15 bp, Homo sapiens
atttttcattttaat

SEQ ID NO: 906742 - DNA, 15 bp, Homo sapiens
aatttttcattttaa

SEQ ID NO: 906743 - DNA, 15 bp, Homo sapiens
aaatttttcatttta

SEQ ID NO: 906744 - DNA, 15 bp, Homo sapiens
taaatttttcatttt

SEQ ID NO: 906745 - DNA, 15 bp, Homo sapiens
ctaaatttttcattt

SEQ ID NO: 906746 - DNA, 15 bp, Homo sapiens
actaaatttttcatt

SEQ ID NO: 906747 - DNA, 15 bp, Homo sapiens
aactaaatttttcat

SEQ ID NO: 906748 - DNA, 15 bp, Homo sapiens
gaactaaatttttca

SEQ ID NO: 906749 - DNA, 15 bp, Homo sapiens
agaactaaatttttc

SEQ ID NO: 906750 - DNA, 15 bp, Homo sapiens
aagaactaaattttt

SEQ ID NO: 906751 - DNA, 15 bp, Homo sapiens
gaagaactaaatttt

SEQ ID NO: 906752 - DNA, 15 bp, Homo sapiens
tgaagaactaaattt

SEQ ID NO: 906753 - DNA, 15 bp, Homo sapiens
ctgaagaactaaatt

SEQ ID NO: 906754 - DNA, 15 bp, Homo sapiens
actgaagaactaaat

SEQ ID NO: 906755 - DNA, 15 bp, Homo sapiens
aactgaagaactaaa

SEQ ID NO: 906756 - DNA, 15 bp, Homo sapiens
caactgaagaactaa

SEQ ID NO: 906757 - DNA, 15 bp, Homo sapiens
gcaactgaagaacta

SEQ ID NO: 906758 - DNA, 15 bp, Homo sapiens
tgcaactgaagaact

SEQ ID NO: 906759 - DNA, 15 bp, Homo sapiens
gtgcaactgaagaac

SEQ ID NO: 906760 - DNA, 15 bp, Homo sapiens
agtgcaactgaagaa

SEQ ID NO: 906761 - DNA, 15 bp, Homo sapiens
tagtgcaactgaaga

SEQ ID NO: 906762 - DNA, 15 bp, Homo sapiens
ctagtgcaactgaag

SEQ ID NO: 906763 - DNA, 15 bp, Homo sapiens
gctagtgcaactgaa

SEQ ID NO: 906764 - DNA, 15 bp, Homo sapiens
ggctagtgcaactga

SEQ ID NO: 906765 - DNA, 15 bp, Homo sapiens
tggctagtgcaactg

SEQ ID NO: 906766 - DNA, 15 bp, Homo sapiens
gtggctagtgcaact

SEQ ID NO: 906767 - DNA, 15 bp, Homo sapiens
tgtggctagtgcaac

SEQ ID NO: 906768 - DNA, 15 bp, Homo sapiens
gtgtggctagtgcaa

SEQ ID NO: 906769 - DNA, 15 bp, Homo sapiens
agtgtggctagtgca

SEQ ID NO: 906770 - DNA, 15 bp, Homo sapiens
aagtgtggctagtgc

SEQ ID NO: 906771 - DNA, 15 bp, Homo sapiens
gaagtgtggctagtg

SEQ ID NO: 906772 - DNA, 15 bp, Homo sapiens
tgaagtgtggctagt

SEQ ID NO: 906773 - DNA, 15 bp, Homo sapiens
ttgaagtgtggctag

SEQ ID NO: 906774 - DNA, 15 bp, Homo sapiens
tttgaagtgtggcta

SEQ ID NO: 906775 - DNA, 15 bp, Homo sapiens
atttgaagtgtggct

SEQ ID NO: 906776 - DNA, 15 bp, Homo sapiens
catttgaagtgtggc

SEQ ID NO: 906777 - DNA, 15 bp, Homo sapiens
gcatttgaagtgtgg

SEQ ID NO: 906778 - DNA, 15 bp, Homo sapiens
ggcatttgaagtgtg

SEQ ID NO: 906779 - DNA, 15 bp, Homo sapiens
gggcatttgaagtgt

SEQ ID NO: 906780 - DNA, 15 bp, Homo sapiens
cgggcatttgaagtg

SEQ ID NO: 906781 - DNA, 15 bp, Homo sapiens
tcgggcatttgaagt

SEQ ID NO: 906782 - DNA, 15 bp, Homo sapiens
ttcgggcatttgaag

SEQ ID NO: 906783 - DNA, 15 bp, Homo sapiens
gttcgggcatttgaa

SEQ ID NO: 906784 - DNA, 15 bp, Homo sapiens
tgttcgggcatttga

SEQ ID NO: 906785 - DNA, 15 bp, Homo sapiens
atgttcgggcatttg

SEQ ID NO: 906786 - DNA, 15 bp, Homo sapiens
tatgttcgggcattt

SEQ ID NO: 906787 - DNA, 15 bp, Homo sapiens
ctatgttcgggcatt

SEQ ID NO: 906788 - DNA, 15 bp, Homo sapiens
gctatgttcgggcat

SEQ ID NO: 906789 - DNA, 15 bp, Homo sapiens
agctatgttcgggca

SEQ ID NO: 906790 - DNA, 15 bp, Homo sapiens
tagctatgttcgggc

SEQ ID NO: 906791 - DNA, 15 bp, Homo sapiens
gtagctatgttcggg

SEQ ID NO: 906792 - DNA, 15 bp, Homo sapiens
tgtagctatgttcgg

SEQ ID NO: 906793 - DNA, 15 bp, Homo sapiens
atgtagctatgttcg

SEQ ID NO: 906794 - DNA, 15 bp, Homo sapiens
catgtagctatgttc

SEQ ID NO: 906795 - DNA, 15 bp, Homo sapiens
acatgtagctatgtt

SEQ ID NO: 906796 - DNA, 15 bp, Homo sapiens
tacatgtagctatgt

SEQ ID NO: 906797 - DNA, 15 bp, Homo sapiens
ctacatgtagctatg

SEQ ID NO: 906798 - DNA, 15 bp, Homo sapiens
gctacatgtagctat

SEQ ID NO: 906799 - DNA, 15 bp, Homo sapiens
cgctacatgtagcta

SEQ ID NO: 906800 - DNA, 15 bp, Homo sapiens
tcgctacatgtagct

SEQ ID NO: 906801 - DNA, 15 bp, Homo sapiens
ctcgctacatgtagc

SEQ ID NO: 906802 - DNA, 15 bp, Homo sapiens
actcgctacatgtag

SEQ ID NO: 906803 - DNA, 15 bp, Homo sapiens
cactcgctacatgta

SEQ ID NO: 906804 - DNA, 15 bp, Homo sapiens
ccactcgctacatgt

SEQ ID NO: 906805 - DNA, 15 bp, Homo sapiens
gccactcgctacatg

SEQ ID NO: 906806 - DNA, 15 bp, Homo sapiens
agccactcgctacat

SEQ ID NO: 906807 - DNA, 15 bp, Homo sapiens
tagccactcgctaca

SEQ ID NO: 906808 - DNA, 15 bp, Homo sapiens
atagccactcgctac

SEQ ID NO: 906809 - DNA, 15 bp, Homo sapiens
aatagccactcgcta

SEQ ID NO: 906810 - DNA, 15 bp, Homo sapiens
caatagccactcgct

SEQ ID NO: 906811 - DNA, 15 bp, Homo sapiens
tcaatagccactcgc

SEQ ID NO: 906812 - DNA, 15 bp, Homo sapiens
ttcaatagccactcg

SEQ ID NO: 906813 - DNA, 15 bp, Homo sapiens
gttcaatagccactc

SEQ ID NO: 906814 - DNA, 15 bp, Homo sapiens
agttcaatagccact

SEQ ID NO: 906815 - DNA, 15 bp, Homo sapiens
cagttcaatagccac

SEQ ID NO: 906816 - DNA, 15 bp, Homo sapiens
ccagttcaatagcca

SEQ ID NO: 906817 - DNA, 15 bp, Homo sapiens
tccagttcaatagcc

SEQ ID NO: 906818 - DNA, 15 bp, Homo sapiens
gtccagttcaatagc

SEQ ID NO: 906819 - DNA, 15 bp, Homo sapiens
tgtccagttcaatag

SEQ ID NO: 906820 - DNA, 15 bp, Homo sapiens
ctgtccagttcaata

SEQ ID NO: 906821 - DNA, 15 bp, Homo sapiens
gctgtccagttcaat

SEQ ID NO: 906822 - DNA, 15 bp, Homo sapiens
tgctgtccagttcaa

SEQ ID NO: 906823 - DNA, 15 bp, Homo sapiens
gtgctgtccagttca

SEQ ID NO: 906824 - DNA, 15 bp, Homo sapiens
agtgctgtccagttc

SEQ ID NO: 906825 - DNA, 15 bp, Homo sapiens
cagtgctgtccagtt

SEQ ID NO: 906826 - DNA, 15 bp, Homo sapiens
tcagtgctgtccagt

SEQ ID NO: 906827 - DNA, 15 bp, Homo sapiens
gtcagtgctgtccag

SEQ ID NO: 906828 - DNA, 15 bp, Homo sapiens
tgtcagtgctgtcca

SEQ ID NO: 906829 - DNA, 15 bp, Homo sapiens
ctgtcagtgctgtcc

SEQ ID NO: 906830 - DNA, 15 bp, Homo sapiens
gctgtcagtgctgtc

SEQ ID NO: 906831 - DNA, 15 bp, Homo sapiens
tgctgtcagtgctgt

SEQ ID NO: 906832 - DNA, 15 bp, Homo sapiens
atgctgtcagtgctg

SEQ ID NO: 906833 - DNA, 15 bp, Homo sapiens
catgctgtcagtgct

SEQ ID NO: 906834 - DNA, 15 bp, Homo sapiens
acatgctgtcagtgc

SEQ ID NO: 906835 - DNA, 15 bp, Homo sapiens
gacatgctgtcagtg

SEQ ID NO: 906836 - DNA, 15 bp, Homo sapiens
ggacatgctgtcagt

SEQ ID NO: 906837 - DNA, 15 bp, Homo sapiens
tggacatgctgtcag

SEQ ID NO: 906838 - DNA, 15 bp, Homo sapiens
atggacatgctgtca

SEQ ID NO: 906839 - DNA, 15 bp, Homo sapiens
aatggacatgctgtc

SEQ ID NO: 906840 - DNA, 15 bp, Homo sapiens
taatggacatgctgt

SEQ ID NO: 906841 - DNA, 15 bp, Homo sapiens
ataatggacatgctg

SEQ ID NO: 906842 - DNA, 15 bp, Homo sapiens
cataatggacatgct

SEQ ID NO: 906843 - DNA, 15 bp, Homo sapiens
gcataatggacatgc

SEQ ID NO: 906844 - DNA, 15 bp, Homo sapiens
agcataatggacatg

SEQ ID NO: 906845 - DNA, 15 bp, Homo sapiens
tagcataatggacat

SEQ ID NO: 906846 - DNA, 15 bp, Homo sapiens
ctagcataatggaca

SEQ ID NO: 906847 - DNA, 15 bp, Homo sapiens
tctagcataatggac

SEQ ID NO: 906848 - DNA, 15 bp, Homo sapiens
ttctagcataatgga

SEQ ID NO: 906849 - DNA, 15 bp, Homo sapiens
tttctagcataatgg

SEQ ID NO: 906850 - DNA, 15 bp, Homo sapiens
ctttctagcataatg

SEQ ID NO: 906851 - DNA, 15 bp, Homo sapiens
actttctagcataat

SEQ ID NO: 906852 - DNA, 15 bp, Homo sapiens
gactttctagcataa

SEQ ID NO: 906853 - DNA, 15 bp, Homo sapiens
ggactttctagcata

SEQ ID NO: 906854 - DNA, 15 bp, Homo sapiens
aggactttctagcat

SEQ ID NO: 906855 - DNA, 15 bp, Homo sapiens
taggactttctagca

SEQ ID NO: 906856 - DNA, 15 bp, Homo sapiens
ataggactttctagc

SEQ ID NO: 906857 - DNA, 15 bp, Homo sapiens
cataggactttctag

SEQ ID NO: 906858 - DNA, 15 bp, Homo sapiens
ccataggactttcta

SEQ ID NO: 906859 - DNA, 15 bp, Homo sapiens
cccataggactttct

SEQ ID NO: 906860 - DNA, 15 bp, Homo sapiens
tcccataggactttc

SEQ ID NO: 906861 - DNA, 15 bp, Homo sapiens
gtcccataggacttt

SEQ ID NO: 906862 - DNA, 15 bp, Homo sapiens
tgtcccataggactt

SEQ ID NO: 906863 - DNA, 15 bp, Homo sapiens
ctgtcccataggact

SEQ ID NO: 906864 - DNA, 15 bp, Homo sapiens
gctgtcccataggac

SEQ ID NO: 906865 - DNA, 15 bp, Homo sapiens
tgctgtcccatagga

SEQ ID NO: 906866 - DNA, 15 bp, Homo sapiens
gtgctgtcccatagg

SEQ ID NO: 906867 - DNA, 15 bp, Homo sapiens
agtgctgtcccatag

SEQ ID NO: 906868 - DNA, 15 bp, Homo sapiens
cagtgctgtcccata

SEQ ID NO: 906869 - DNA, 15 bp, Homo sapiens
ccagtgctgtcccat

SEQ ID NO: 906870 - DNA, 15 bp, Homo sapiens
accagtgctgtccca

SEQ ID NO: 906871 - DNA, 15 bp, Homo sapiens
gaccagtgctgtccc

SEQ ID NO: 906872 - DNA, 15 bp, Homo sapiens
agaccagtgctgtcc

SEQ ID NO: 906873 - DNA, 15 bp, Homo sapiens
tagaccagtgctgtc

SEQ ID NO: 906874 - DNA, 15 bp, Homo sapiens
ttagaccagtgctgt

SEQ ID NO: 906875 - DNA, 15 bp, Homo sapiens
tttagaccagtgctg

SEQ ID NO: 906876 - DNA, 15 bp, Homo sapiens
gtttagaccagtgct

SEQ ID NO: 906877 - DNA, 15 bp, Homo sapiens
tgtttagaccagtgc

SEQ ID NO: 906878 - DNA, 15 bp, Homo sapiens
ctgtttagaccagtg

SEQ ID NO: 906879 - DNA, 15 bp, Homo sapiens
actgtttagaccagt

SEQ ID NO: 906880 - DNA, 15 bp, Homo sapiens
cactgtttagaccag

SEQ ID NO: 906881 - DNA, 15 bp, Homo sapiens
gcactgtttagacca

SEQ ID NO: 906882 - DNA, 15 bp, Homo sapiens
tgcactgtttagacc

SEQ ID NO: 906883 - DNA, 15 bp, Homo sapiens
atgcactgtttagac

SEQ ID NO: 906884 - DNA, 15 bp, Homo sapiens
catgcactgtttaga

SEQ ID NO: 906885 - DNA, 15 bp, Homo sapiens
ccatgcactgtttag

SEQ ID NO: 906886 - DNA, 15 bp, Homo sapiens
accatgcactgttta

SEQ ID NO: 906887 - DNA, 15 bp, Homo sapiens
taccatgcactgttt

SEQ ID NO: 906888 - DNA, 15 bp, Homo sapiens
ataccatgcactgtt

SEQ ID NO: 906889 - DNA, 15 bp, Homo sapiens
cataccatgcactgt

SEQ ID NO: 906890 - DNA, 15 bp, Homo sapiens
tcataccatgcactg

SEQ ID NO: 906891 - DNA, 15 bp, Homo sapiens
ctcataccatgcact

SEQ ID NO: 906892 - DNA, 15 bp, Homo sapiens
tctcataccatgcac

SEQ ID NO: 906893 - DNA, 15 bp, Homo sapiens
ctctcataccatgca

SEQ ID NO: 906894 - DNA, 15 bp, Homo sapiens
tctctcataccatgc

SEQ ID NO: 906895 - DNA, 15 bp, Homo sapiens
ttctctcataccatg

SEQ ID NO: 906896 - DNA, 15 bp, Homo sapiens
tttctctcataccat

SEQ ID NO: 906897 - DNA, 15 bp, Homo sapiens
ctttctctcatacca

SEQ ID NO: 906898 - DNA, 15 bp, Homo sapiens
cctttctctcatacc

SEQ ID NO: 906899 - DNA, 15 bp, Homo sapiens
gccctttctctcata

SEQ ID NO: 906900 - DNA, 15 bp, Homo sapiens
tgccctttctctcat

SEQ ID NO: 906901 - DNA, 15 bp, Homo sapiens
ctgccctttctctca

SEQ ID NO: 906902 - DNA, 15 bp, Homo sapiens
cctgccctttctctc

SEQ ID NO: 906903 - DNA, 15 bp, Homo sapiens
acctgccctttctct

SEQ ID NO: 906904 - DNA, 15 bp, Homo sapiens
aacctgccctttctc

SEQ ID NO: 906905 - DNA, 15 bp, Homo sapiens
taacctgccctttct

SEQ ID NO: 906906 - DNA, 15 bp, Homo sapiens
ttaacctgccctttc

SEQ ID NO: 906907 - DNA, 15 bp, Homo sapiens
cttaacctgcccttt

SEQ ID NO: 906908 - DNA, 15 bp, Homo sapiens
ccttaacctgccctt

SEQ ID NO: 906909 - DNA, 15 bp, Homo sapiens
gccttaacctgccct

SEQ ID NO: 906910 - DNA, 15 bp, Homo sapiens
tgccttaacctgccc

SEQ ID NO: 906911 - DNA, 15 bp, Homo sapiens
gtgccttaacctgcc

SEQ ID NO: 906912 - DNA, 15 bp, Homo sapiens
agtgccttaacctgc

SEQ ID NO: 906913 - DNA, 15 bp, Homo sapiens
gagtgccttaacctg

SEQ ID NO: 906914 - DNA, 15 bp, Homo sapiens
tgagtgccttaacct

SEQ ID NO: 906915 - DNA, 15 bp, Homo sapiens
ctgagtgccttaacc

SEQ ID NO: 906916 - DNA, 15 bp, Homo sapiens
gctgagtgccttaac

SEQ ID NO: 906917 - DNA, 15 bp, Homo sapiens
agctgagtgccttaa

SEQ ID NO: 906918 - DNA, 15 bp, Homo sapiens
aagctgagtgcctta

SEQ ID NO: 906919 - DNA, 15 bp, Homo sapiens
gaagctgagtgcctt

SEQ ID NO: 906920 - DNA, 15 bp, Homo sapiens
tgaagctgagtgcct

SEQ ID NO: 906921 - DNA, 15 bp, Homo sapiens
gtgaagctgagtgcc

SEQ ID NO: 906922 - DNA, 15 bp, Homo sapiens
agtgaagctgagtgc

SEQ ID NO: 906923 - DNA, 15 bp, Homo sapiens
cagtgaagctgagtg

SEQ ID NO: 906924 - DNA, 15 bp, Homo sapiens
tcagtgaagctgagt

SEQ ID NO: 906925 - DNA, 15 bp, Homo sapiens
gtcagtgaagctgag

SEQ ID NO: 906926 - DNA, 15 bp, Homo sapiens
agtcagtgaagctga

SEQ ID NO: 906927 - DNA, 15 bp, Homo sapiens
cagtcagtgaagctg

SEQ ID NO: 906928 - DNA, 15 bp, Homo sapiens
ccagtcagtgaagct

SEQ ID NO: 906929 - DNA, 15 bp, Homo sapiens
cccagtcagtgaagc

SEQ ID NO: 906930 - DNA, 15 bp, Homo sapiens
ccccagtcagtgaag

SEQ ID NO: 906931 - DNA, 15 bp, Homo sapiens
accccagtcagtgaa

SEQ ID NO: 906932 - DNA, 15 bp, Homo sapiens
caccccagtcagtga

SEQ ID NO: 906933 - DNA, 15 bp, Homo sapiens
ccaccccagtcagtg

SEQ ID NO: 906934 - DNA, 15 bp, Homo sapiens
tccaccccagtcagt

SEQ ID NO: 906935 - DNA, 15 bp, Homo sapiens
ctccaccccagtcag

SEQ ID NO: 906936 - DNA, 15 bp, Homo sapiens
tctccaccccagtca

SEQ ID NO: 906937 - DNA, 15 bp, Homo sapiens
atctccaccccagtc

SEQ ID NO: 906938 - DNA, 15 bp, Homo sapiens
aatctccaccccagt

SEQ ID NO: 906939 - DNA, 15 bp, Homo sapiens
gaatctccaccccag

SEQ ID NO: 906940 - DNA, 15 bp, Homo sapiens
agaatctccacccca

SEQ ID NO: 906941 - DNA, 15 bp, Homo sapiens
cagaatctccacccc

SEQ ID NO: 906942 - DNA, 15 bp, Homo sapiens
tcagaatctccaccc

SEQ ID NO: 906943 - DNA, 15 bp, Homo sapiens
atcagaatctccacc

SEQ ID NO: 906944 - DNA, 15 bp, Homo sapiens
catcagaatctccac

SEQ ID NO: 906945 - DNA, 15 bp, Homo sapiens
ccatcagaatctcca

SEQ ID NO: 906946 - DNA, 15 bp, Homo sapiens
accatcagaatctcc

SEQ ID NO: 906947 - DNA, 15 bp, Homo sapiens
aaccatcagaatctc

SEQ ID NO: 906948 - DNA, 15 bp, Homo sapiens
aaaccatcagaatct

SEQ ID NO: 906949 - DNA, 15 bp, Homo sapiens
caaaccatcagaatc

SEQ ID NO: 906950 - DNA, 15 bp, Homo sapiens
acaaaccatcagaat

SEQ ID NO: 906951 - DNA, 15 bp, Homo sapiens
tacaaaccatcagaa

SEQ ID NO: 906952 - DNA, 15 bp, Homo sapiens
gtacaaaccatcaga

SEQ ID NO: 906953 - DNA, 15 bp, Homo sapiens
agtacaaaccatcag

SEQ ID NO: 906954 - DNA, 15 bp, Homo sapiens
gagtacaaaccatca

SEQ ID NO: 906955 - DNA, 15 bp, Homo sapiens
tgagtacaaaccatc

SEQ ID NO: 906956 - DNA, 15 bp, Homo sapiens
ctgagtacaaaccat

SEQ ID NO: 906957 - DNA, 15 bp, Homo sapiens
cctgagtacaaacca

SEQ ID NO: 906958 - DNA, 15 bp, Homo sapiens
acctgagtacaaacc

SEQ ID NO: 906959 - DNA, 15 bp, Homo sapiens
aacctgagtacaaac

SEQ ID NO: 906960 - DNA, 15 bp, Homo sapiens
gaacctgagtacaaa

SEQ ID NO: 906961 - DNA, 15 bp, Homo sapiens
ggaacctgagtacaa

SEQ ID NO: 906962 - DNA, 15 bp, Homo sapiens
tggaacctgagtaca

SEQ ID NO: 906963 - DNA, 15 bp, Homo sapiens
ctggaacctgagtac

SEQ ID NO: 906964 - DNA, 15 bp, Homo sapiens
tctggaacctgagta

SEQ ID NO: 906965 - DNA, 15 bp, Homo sapiens
atctggaacctgagt

SEQ ID NO: 906966 - DNA, 15 bp, Homo sapiens
gatctggaacctgag

SEQ ID NO: 906967 - DNA, 15 bp, Homo sapiens
ggatctggaacctga

SEQ ID NO: 906968 - DNA, 15 bp, Homo sapiens
gggatctggaacctg

SEQ ID NO: 906969 - DNA, 15 bp, Homo sapiens
agggatctggaacct

SEQ ID NO: 906970 - DNA, 15 bp, Homo sapiens
cagggatctggaacc

SEQ ID NO: 906971 - DNA, 15 bp, Homo sapiens
tcagggatctggaac

SEQ ID NO: 906972 - DNA, 15 bp, Homo sapiens
ctcagggatctggaa

SEQ ID NO: 906973 - DNA, 15 bp, Homo sapiens
cctcagggatctgga

SEQ ID NO: 906974 - DNA, 15 bp, Homo sapiens
gcctcagggatctgg

SEQ ID NO: 906975 - DNA, 15 bp, Homo sapiens
agcctcagggatctg

SEQ ID NO: 906976 - DNA, 15 bp, Homo sapiens
gagcctcagggatct

SEQ ID NO: 906977 - DNA, 15 bp, Homo sapiens
tgagcctcagggatc

SEQ ID NO: 906978 - DNA, 15 bp, Homo sapiens
ctgagcctcagggat

SEQ ID NO: 906979 - DNA, 15 bp, Homo sapiens
cctgagcctcaggga

SEQ ID NO: 906980 - DNA, 15 bp, Homo sapiens
tcctgagcctcaggg

SEQ ID NO: 906981 - DNA, 15 bp, Homo sapiens
ttcctgagcctcagg

SEQ ID NO: 906982 - DNA, 15 bp, Homo sapiens
gttcctgagcctcag

SEQ ID NO: 906983 - DNA, 15 bp, Homo sapiens
ggttcctgagcctca

SEQ ID NO: 906984 - DNA, 15 bp, Homo sapiens
aggttcctgagcctc

SEQ ID NO: 906985 - DNA, 15 bp, Homo sapiens
aaggttcctgagcct

SEQ ID NO: 906986 - DNA, 15 bp, Homo sapiens
aaaggttcctgagcc

SEQ ID NO: 906987 - DNA, 15 bp, Homo sapiens
caaaggttcctgagc

SEQ ID NO: 906988 - DNA, 15 bp, Homo sapiens
gcaaaggttcctgag

SEQ ID NO: 906989 - DNA, 15 bp, Homo sapiens
tgcaaaggttcctga

SEQ ID NO: 906990 - DNA, 15 bp, Homo sapiens
ctgcaaaggttcctg

SEQ ID NO: 906991 - DNA, 15 bp, Homo sapiens
actgcaaaggttcct

SEQ ID NO: 906992 - DNA, 15 bp, Homo sapiens
aactgcaaaggttcc

SEQ ID NO: 906993 - DNA, 15 bp, Homo sapiens
aaactgcaaaggttc

SEQ ID NO: 906994 - DNA, 15 bp, Homo sapiens
taaactgcaaaggtt

SEQ ID NO: 906995 - DNA, 15 bp, Homo sapiens
ctaaactgcaaaggt

SEQ ID NO: 906996 - DNA, 15 bp, Homo sapiens
actaaactgcaaagg

SEQ ID NO: 906997 - DNA, 15 bp, Homo sapiens
gactaaactgcaaag

SEQ ID NO: 906998 - DNA, 15 bp, Homo sapiens
agactaaactgcaaa

SEQ ID NO: 906999 - DNA, 15 bp, Homo sapiens
cagactaaactgcaa

SEQ ID NO: 907000 - DNA, 15 bp, Homo sapiens
ccagactaaactgca

SEQ ID NO: 907001 - DNA, 15 bp, Homo sapiens
accagactaaactgc

SEQ ID NO: 907002 - DNA, 15 bp, Homo sapiens
aaccagactaaactg

SEQ ID NO: 907003 - DNA, 15 bp, Homo sapiens
taaccagactaaact

SEQ ID NO: 907004 - DNA, 15 bp, Homo sapiens
gtaaccagactaaac

SEQ ID NO: 907005 - DNA, 15 bp, Homo sapiens
ggtaaccagactaaa

SEQ ID NO: 907006 - DNA, 15 bp, Homo sapiens
aggtaaccagactaa

SEQ ID NO: 907007 - DNA, 15 bp, Homo sapiens
caggtaaccagacta

SEQ ID NO: 907008 - DNA, 15 bp, Homo sapiens
acaggtaaccagact

SEQ ID NO: 907009 - DNA, 15 bp, Homo sapiens
cacaggtaaccagac

SEQ ID NO: 907010 - DNA, 15 bp, Homo sapiens
ccacaggtaaccaga

SEQ ID NO: 907011 - DNA, 15 bp, Homo sapiens
gccacaggtaaccag

SEQ ID NO: 907012 - DNA, 15 bp, Homo sapiens
ggccacaggtaacca

SEQ ID NO: 907013 - DNA, 15 bp, Homo sapiens
gggccacaggtaacc

SEQ ID NO: 907014 - DNA, 15 bp, Homo sapiens
tgggccacaggtaac

SEQ ID NO: 907015 - DNA, 15 bp, Homo sapiens
ctgggccacaggtaa

SEQ ID NO: 907016 - DNA, 15 bp, Homo sapiens
actgggccacaggta

SEQ ID NO: 907017 - DNA, 15 bp, Homo sapiens
cactgggccacaggt

SEQ ID NO: 907018 - DNA, 15 bp, Homo sapiens
ccactgggccacagg

SEQ ID NO: 907019 - DNA, 15 bp, Homo sapiens
accactgggccacag

SEQ ID NO: 907020 - DNA, 15 bp, Homo sapiens
aaccactgggccaca

SEQ ID NO: 907021 - DNA, 15 bp, Homo sapiens
taaccactgggccac

SEQ ID NO: 907022 - DNA, 15 bp, Homo sapiens
gtaaccactgggcca

SEQ ID NO: 907023 - DNA, 15 bp, Homo sapiens
tgtaaccactgggcc

SEQ ID NO: 907024 - DNA, 15 bp, Homo sapiens
ttgtaaccactgggc

SEQ ID NO: 907025 - DNA, 15 bp, Homo sapiens
gttgtaaccactggg

SEQ ID NO: 907026 - DNA, 15 bp, Homo sapiens
tgttgtaaccactgg

SEQ ID NO: 907027 - DNA, 15 bp, Homo sapiens
ctgttgtaaccactg

SEQ ID NO: 907028 - DNA, 15 bp, Homo sapiens
tctgttgtaaccact

SEQ ID NO: 907029 - DNA, 15 bp, Homo sapiens
ttctgttgtaaccac

SEQ ID NO: 907030 - DNA, 15 bp, Homo sapiens
attctgttgtaacca

SEQ ID NO: 907031 - DNA, 15 bp, Homo sapiens
cattctgttgtaacc

SEQ ID NO: 907032 - DNA, 15 bp, Homo sapiens
tcattctgttgtaac

SEQ ID NO: 907033 - DNA, 15 bp, Homo sapiens
atcattctgttgtaa

SEQ ID NO: 907034 - DNA, 15 bp, Homo sapiens
aatcattctgttgta

SEQ ID NO: 907035 - DNA, 15 bp, Homo sapiens
taatcattctgttgt

SEQ ID NO: 907036 - DNA, 15 bp, Homo sapiens
ttaatcattctgttg

SEQ ID NO: 907037 - DNA, 15 bp, Homo sapiens
gttaatcattctgtt

SEQ ID NO: 907038 - DNA, 15 bp, Homo sapiens
tgttaatcattctgt

SEQ ID NO: 907039 - DNA, 15 bp, Homo sapiens
ctgttaatcattctg

SEQ ID NO: 907040 - DNA, 15 bp, Homo sapiens
actgttaatcattct

SEQ ID NO: 907041 - DNA, 15 bp, Homo sapiens
gactgttaatcattc

SEQ ID NO: 907042 - DNA, 15 bp, Homo sapiens
tgactgttaatcatt

SEQ ID NO: 907043 - DNA, 15 bp, Homo sapiens
ttgactgttaatcat

SEQ ID NO: 907044 - DNA, 15 bp, Homo sapiens
attgactgttaatca

SEQ ID NO: 907045 - DNA, 15 bp, Homo sapiens
aattgactgttaatc

SEQ ID NO: 907046 - DNA, 15 bp, Homo sapiens
gaattgactgttaat

SEQ ID NO: 907047 - DNA, 15 bp, Homo sapiens
agaattgactgttaa

SEQ ID NO: 907048 - DNA, 15 bp, Homo sapiens
aagaattgactgtta

SEQ ID NO: 907049 - DNA, 15 bp, Homo sapiens
aaagaattgactgtt

SEQ ID NO: 907050 - DNA, 15 bp, Homo sapiens
caaagaattgactgt

SEQ ID NO: 907051 - DNA, 15 bp, Homo sapiens
gcaaagaattgactg

SEQ ID NO: 907052 - DNA, 15 bp, Homo sapiens
tgcaaagaattgact

SEQ ID NO: 907053 - DNA, 15 bp, Homo sapiens
atgcaaagaattgac

SEQ ID NO: 907054 - DNA, 15 bp, Homo sapiens
gatgcaaagaattga

SEQ ID NO: 907055 - DNA, 15 bp, Homo sapiens
agatgcaaagaattg

SEQ ID NO: 907056 - DNA, 15 bp, Homo sapiens
gagatgcaaagaatt

SEQ ID NO: 907057 - DNA, 15 bp, Homo sapiens
agagatgcaaagaat

SEQ ID NO: 907058 - DNA, 15 bp, Homo sapiens
cagagatgcaaagaa

SEQ ID NO: 907059 - DNA, 15 bp, Homo sapiens
ccagagatgcaaaga

SEQ ID NO: 907060 - DNA, 15 bp, Homo sapiens
cccagagatgcaaag

SEQ ID NO: 907061 - DNA, 15 bp, Homo sapiens
acccagagatgcaaa

SEQ ID NO: 907062 - DNA, 15 bp, Homo sapiens
cacccagagatgcaa

SEQ ID NO: 907063 - DNA, 15 bp, Homo sapiens
ccacccagagatgca

SEQ ID NO: 907064 - DNA, 15 bp, Homo sapiens
gccacccagagatgc

SEQ ID NO: 907065 - DNA, 15 bp, Homo sapiens
agccacccagagatg

SEQ ID NO: 907066 - DNA, 15 bp, Homo sapiens
gagccacccagagat

SEQ ID NO: 907067 - DNA, 15 bp, Homo sapiens
tgagccacccagaga

SEQ ID NO: 907068 - DNA, 15 bp, Homo sapiens
ctgagccacccagag

SEQ ID NO: 907069 - DNA, 15 bp, Homo sapiens
cctgagccacccaga

SEQ ID NO: 907070 - DNA, 15 bp, Homo sapiens
tcctgagccacccag

SEQ ID NO: 907071 - DNA, 15 bp, Homo sapiens
ttcctgagccaccca

SEQ ID NO: 907072 - DNA, 15 bp, Homo sapiens
tttcctgagccaccc

SEQ ID NO: 907073 - DNA, 15 bp, Homo sapiens
ttttcctgagccacc

SEQ ID NO: 907074 - DNA, 15 bp, Homo sapiens
tttttcctgagccac

SEQ ID NO: 907075 - DNA, 15 bp, Homo sapiens
atttttcctgagcca

SEQ ID NO: 907076 - DNA, 15 bp, Homo sapiens
aatttttcctgagcc

SEQ ID NO: 907077 - DNA, 15 bp, Homo sapiens
aaatttttcctgagc

SEQ ID NO: 907078 - DNA, 15 bp, Homo sapiens
taaatttttcctgag

SEQ ID NO: 907079 - DNA, 15 bp, Homo sapiens
ttaaatttttcctga

SEQ ID NO: 907080 - DNA, 15 bp, Homo sapiens
cttaaatttttcctg

SEQ ID NO: 907081 - DNA, 15 bp, Homo sapiens
ccttaaatttttcct

SEQ ID NO: 907082 - DNA, 15 bp, Homo sapiens
tccttaaatttttcc

SEQ ID NO: 907083 - DNA, 15 bp, Homo sapiens
ctccttaaatttttc

SEQ ID NO: 907084 - DNA, 15 bp, Homo sapiens
actccttaaattttt

SEQ ID NO: 907085 - DNA, 15 bp, Homo sapiens
aactccttaaatttt

SEQ ID NO: 907086 - DNA, 15 bp, Homo sapiens
taactccttaaattt

SEQ ID NO: 907087 - DNA, 15 bp, Homo sapiens
ataactccttaaatt

SEQ ID NO: 907088 - DNA, 15 bp, Homo sapiens
aataactccttaaat

SEQ ID NO: 907089 - DNA, 15 bp, Homo sapiens
taataactccttaaa

SEQ ID NO: 907090 - DNA, 15 bp, Homo sapiens
ctaataactccttaa

SEQ ID NO: 907091 - DNA, 15 bp, Homo sapiens
gctaataactcctta

SEQ ID NO: 907092 - DNA, 15 bp, Homo sapiens
agctaataactcctt

SEQ ID NO: 907093 - DNA, 15 bp, Homo sapiens
cagctaataactcct

SEQ ID NO: 907094 - DNA, 15 bp, Homo sapiens
acagctaataactcc

SEQ ID NO: 907095 - DNA, 15 bp, Homo sapiens
cacagctaataactc

SEQ ID NO: 907096 - DNA, 15 bp, Homo sapiens
tcacagctaataact

SEQ ID NO: 907097 - DNA, 15 bp, Homo sapiens
ttcacagctaataac

SEQ ID NO: 907098 - DNA, 15 bp, Homo sapiens
gttcacagctaataa

SEQ ID NO: 907099 - DNA, 15 bp, Homo sapiens
agttcacagctaata

SEQ ID NO: 907100 - DNA, 15 bp, Homo sapiens
tagttcacagctaat

SEQ ID NO: 907101 - DNA, 15 bp, Homo sapiens
ttagttcacagctaa

SEQ ID NO: 907102 - DNA, 15 bp, Homo sapiens
gttagttcacagcta

SEQ ID NO: 907103 - DNA, 15 bp, Homo sapiens
ggttagttcacagct

SEQ ID NO: 907104 - DNA, 15 bp, Homo sapiens
aggttagttcacagc

SEQ ID NO: 907105 - DNA, 15 bp, Homo sapiens
aaggttagttcacag

SEQ ID NO: 907106 - DNA, 15 bp, Homo sapiens
taaggttagttcaca

SEQ ID NO: 907107 - DNA, 15 bp, Homo sapiens
ttaaggttagttcac

SEQ ID NO: 907108 - DNA, 15 bp, Homo sapiens
cttaaggttagttca

SEQ ID NO: 907109 - DNA, 15 bp, Homo sapiens
acttaaggttagttc

SEQ ID NO: 907110 - DNA, 15 bp, Homo sapiens
tacttaaggttagtt

SEQ ID NO: 907111 - DNA, 15 bp, Homo sapiens
ttacttaaggttagt

SEQ ID NO: 907112 - DNA, 15 bp, Homo sapiens
cttacttaaggttag

SEQ ID NO: 907113 - DNA, 15 bp, Homo sapiens
acttacttaaggtta

SEQ ID NO: 907114 - DNA, 15 bp, Homo sapiens
aacttacttaaggtt

SEQ ID NO: 907115 - DNA, 15 bp, Homo sapiens
taacttacttaaggt

SEQ ID NO: 907116 - DNA, 15 bp, Homo sapiens
ttaacttacttaagg

SEQ ID NO: 907117 - DNA, 15 bp, Homo sapiens
tttaacttacttaag

SEQ ID NO: 907118 - DNA, 15 bp, Homo sapiens
atttaacttacttaa

SEQ ID NO: 907119 - DNA, 15 bp, Homo sapiens
aatttaacttactta

SEQ ID NO: 907120 - DNA, 15 bp, Homo sapiens
taatttaacttactt

SEQ ID NO: 907121 - DNA, 15 bp, Homo sapiens
ttaatttaacttact

SEQ ID NO: 907122 - DNA, 15 bp, Homo sapiens
tttaatttaacttac

SEQ ID NO: 907123 - DNA, 15 bp, Homo sapiens
ttttaatttaactta

SEQ ID NO: 907124 - DNA, 15 bp, Homo sapiens
tttttaatttaactt

SEQ ID NO: 907125 - DNA, 15 bp, Homo sapiens
ttttttaatttaact

SEQ ID NO: 907126 - DNA, 15 bp, Homo sapiens
tttttttaatttaac

SEQ ID NO: 907127 - DNA, 15 bp, Homo sapiens
ttttttttaatttaa

SEQ ID NO: 907128 - DNA, 15 bp, Homo sapiens
tttttttttaattta

SEQ ID NO: 907129 - DNA, 15 bp, Homo sapiens
ttttttttttaattt

SEQ ID NO: 907130 - DNA, 15 bp, Homo sapiens
tttttttttttaatt

SEQ ID NO: 907131 - DNA, 15 bp, Homo sapiens
ttttttttttttaat

SEQ ID NO: 907132 - DNA, 15 bp, Homo sapiens
cttttttttttttaa

SEQ ID NO: 907133 - DNA, 15 bp, Homo sapiens
actttttttttttta

SEQ ID NO: 907134 - DNA, 15 bp, Homo sapiens
aactttttttttttt

SEQ ID NO: 907135 - DNA, 15 bp, Homo sapiens
gaacttttttttttt

SEQ ID NO: 907136 - DNA, 15 bp, Homo sapiens
agaactttttttttt

SEQ ID NO: 907137 - DNA, 15 bp, Homo sapiens
aagaacttttttttt

SEQ ID NO: 907138 - DNA, 15 bp, Homo sapiens
taagaactttttttt

SEQ ID NO: 907139 - DNA, 15 bp, Homo sapiens
ttaagaacttttttt

SEQ ID NO: 907140 - DNA, 15 bp, Homo sapiens
cttaagaactttttt

SEQ ID NO: 907141 - DNA, 15 bp, Homo sapiens
gcttaagaacttttt

SEQ ID NO: 907142 - DNA, 15 bp, Homo sapiens
agcttaagaactttt

SEQ ID NO: 907143 - DNA, 15 bp, Homo sapiens
tagcttaagaacttt

SEQ ID NO: 907144 - DNA, 15 bp, Homo sapiens
ttagcttaagaactt

SEQ ID NO: 907145 - DNA, 15 bp, Homo sapiens
attagcttaagaact

SEQ ID NO: 907146 - DNA, 15 bp, Homo sapiens
tattagcttaagaac

SEQ ID NO: 907147 - DNA, 15 bp, Homo sapiens
atattagcttaagaa

SEQ ID NO: 907148 - DNA, 15 bp, Homo sapiens
catattagcttaaga

SEQ ID NO: 907149 - DNA, 15 bp, Homo sapiens
tcatattagcttaag

SEQ ID NO: 907150 - DNA, 15 bp, Homo sapiens
atcatattagcttaa

SEQ ID NO: 907151 - DNA, 15 bp, Homo sapiens
aatcatattagctta

SEQ ID NO: 907152 - DNA, 15 bp, Homo sapiens
aaatcatattagctt

SEQ ID NO: 907153 - DNA, 15 bp, Homo sapiens
aaaatcatattagct

SEQ ID NO: 907154 - DNA, 15 bp, Homo sapiens
taaaatcatattagc

SEQ ID NO: 907155 - DNA, 15 bp, Homo sapiens
ttaaaatcatattag

SEQ ID NO: 907156 - DNA, 15 bp, Homo sapiens
tttaaaatcatatta

SEQ ID NO: 907157 - DNA, 15 bp, Homo sapiens
atttaaaatcatatt

SEQ ID NO: 907158 - DNA, 15 bp, Homo sapiens
tatttaaaatcatat

SEQ ID NO: 907159 - DNA, 15 bp, Homo sapiens
atatttaaaatcata

SEQ ID NO: 907160 - DNA, 15 bp, Homo sapiens
gatatttaaaatcat

SEQ ID NO: 907161 - DNA, 15 bp, Homo sapiens
agatatttaaaatca

SEQ ID NO: 907162 - DNA, 15 bp, Homo sapiens
cagatatttaaaatc

SEQ ID NO: 907163 - DNA, 15 bp, Homo sapiens
gcagatatttaaaat

SEQ ID NO: 907164 - DNA, 15 bp, Homo sapiens
tgcagatatttaaaa

SEQ ID NO: 907165 - DNA, 15 bp, Homo sapiens
gtgcagatatttaaa

SEQ ID NO: 907166 - DNA, 15 bp, Homo sapiens
agtgcagatatttaa

SEQ ID NO: 907167 - DNA, 15 bp, Homo sapiens
cagtgcagatattta

SEQ ID NO: 907168 - DNA, 15 bp, Homo sapiens
tcagtgcagatattt

SEQ ID NO: 907169 - DNA, 15 bp, Homo sapiens
ttcagtgcagatatt

SEQ ID NO: 907170 - DNA, 15 bp, Homo sapiens
cttcagtgcagatat

SEQ ID NO: 907171 - DNA, 15 bp, Homo sapiens
acttcagtgcagata

SEQ ID NO: 907172 - DNA, 15 bp, Homo sapiens
tacttcagtgcagat

SEQ ID NO: 907173 - DNA, 15 bp, Homo sapiens
atacttcagtgcaga

SEQ ID NO: 907174 - DNA, 15 bp, Homo sapiens
tatacttcagtgcag

SEQ ID NO: 907175 - DNA, 15 bp, Homo sapiens
ttatacttcagtgca

SEQ ID NO: 907176 - DNA, 15 bp, Homo sapiens
attatacttcagtgc

SEQ ID NO: 907177 - DNA, 15 bp, Homo sapiens
cattatacttcagtg

SEQ ID NO: 907178 - DNA, 15 bp, Homo sapiens
gcattatacttcagt

SEQ ID NO: 907179 - DNA, 15 bp, Homo sapiens
tgcattatacttcag

SEQ ID NO: 907180 - DNA, 15 bp, Homo sapiens
ttgcattatacttca

SEQ ID NO: 907181 - DNA, 15 bp, Homo sapiens
tttgcattatacttc

SEQ ID NO: 907182 - DNA, 15 bp, Homo sapiens
atttgcattatactt

SEQ ID NO: 907183 - DNA, 15 bp, Homo sapiens
aatttgcattatact

SEQ ID NO: 907184 - DNA, 15 bp, Homo sapiens
aaatttgcattatac

SEQ ID NO: 907185 - DNA, 15 bp, Homo sapiens
taaatttgcattata

SEQ ID NO: 907186 - DNA, 15 bp, Homo sapiens
ttaaatttgcattat

SEQ ID NO: 907187 - DNA, 15 bp, Homo sapiens
tttaaatttgcatta

SEQ ID NO: 907188 - DNA, 15 bp, Homo sapiens
atttaaatttgcatt

SEQ ID NO: 907189 - DNA, 15 bp, Homo sapiens
aatttaaatttgcat

SEQ ID NO: 907190 - DNA, 15 bp, Homo sapiens
gaatttaaatttgca

SEQ ID NO: 907191 - DNA, 15 bp, Homo sapiens
tgaatttaaatttgc

SEQ ID NO: 907192 - DNA, 15 bp, Homo sapiens
ctgaatttaaatttg

SEQ ID NO: 907193 - DNA, 15 bp, Homo sapiens
gctgaatttaaattt

SEQ ID NO: 907194 - DNA, 15 bp, Homo sapiens
tgctgaatttaaatt

SEQ ID NO: 907195 - DNA, 15 bp, Homo sapiens
atgctgaatttaaat

SEQ ID NO: 907196 - DNA, 15 bp, Homo sapiens
tatgctgaatttaaa

SEQ ID NO: 907197 - DNA, 15 bp, Homo sapiens
ttatgctgaatttaa

SEQ ID NO: 907198 - DNA, 15 bp, Homo sapiens
attatgctgaattta

SEQ ID NO: 907199 - DNA, 15 bp, Homo sapiens
aattatgctgaattt

SEQ ID NO: 907200 - DNA, 15 bp, Homo sapiens
taattatgctgaatt

SEQ ID NO: 907201 - DNA, 15 bp, Homo sapiens
ataattatgctgaat

SEQ ID NO: 907202 - DNA, 15 bp, Homo sapiens
aataattatgctgaa

SEQ ID NO: 907203 - DNA, 15 bp, Homo sapiens
aaataattatgctga

SEQ ID NO: 907204 - DNA, 15 bp, Homo sapiens
caaataattatgctg

SEQ ID NO: 907205 - DNA, 15 bp, Homo sapiens
gcaaataattatgct

SEQ ID NO: 907206 - DNA, 15 bp, Homo sapiens
agcaaataattatgc

SEQ ID NO: 907207 - DNA, 15 bp, Homo sapiens
aagcaaataattatg

SEQ ID NO: 907208 - DNA, 15 bp, Homo sapiens
caagcaaataattat

SEQ ID NO: 907209 - DNA, 15 bp, Homo sapiens
acaagcaaataatta

SEQ ID NO: 907210 - DNA, 15 bp, Homo sapiens
aacaagcaaataatt

SEQ ID NO: 907211 - DNA, 15 bp, Homo sapiens
caacaagcaaataat

SEQ ID NO: 907212 - DNA, 15 bp, Homo sapiens
acaacaagcaaataa

SEQ ID NO: 907213 - DNA, 15 bp, Homo sapiens
aacaacaagcaaata

SEQ ID NO: 907214 - DNA, 15 bp, Homo sapiens
caacaacaagcaaat

SEQ ID NO: 907215 - DNA, 15 bp, Homo sapiens
tcaacaacaagcaaa

SEQ ID NO: 907216 - DNA, 15 bp, Homo sapiens
gtcaacaacaagcaa

SEQ ID NO: 907217 - DNA, 15 bp, Homo sapiens
agtcaacaacaagca

SEQ ID NO: 907218 - DNA, 15 bp, Homo sapiens
gagtcaacaacaagc

SEQ ID NO: 907219 - DNA, 15 bp, Homo sapiens
tgagtcaacaacaag

SEQ ID NO: 907220 - DNA, 15 bp, Homo sapiens
atgagtcaacaacaa

SEQ ID NO: 907221 - DNA, 15 bp, Homo sapiens
aatgagtcaacaaca

SEQ ID NO: 907222 - DNA, 15 bp, Homo sapiens
aaatgagtcaacaac

SEQ ID NO: 907223 - DNA, 15 bp, Homo sapiens
caaatgagtcaacaa

SEQ ID NO: 907224 - DNA, 15 bp, Homo sapiens
tcaaatgagtcaaca

SEQ ID NO: 907225 - DNA, 15 bp, Homo sapiens
ttcaaatgagtcaac

SEQ ID NO: 907226 - DNA, 15 bp, Homo sapiens
gttcaaatgagtcaa

SEQ ID NO: 907227 - DNA, 15 bp, Homo sapiens
ggttcaaatgagtca

SEQ ID NO: 907228 - DNA, 15 bp, Homo sapiens
aggttcaaatgagtc

SEQ ID NO: 907229 - DNA, 15 bp, Homo sapiens
gaggttcaaatgagt

SEQ ID NO: 907230 - DNA, 15 bp, Homo sapiens
tgaggttcaaatgag

SEQ ID NO: 907231 - DNA, 15 bp, Homo sapiens
ttgaggttcaaatga

SEQ ID NO: 907232 - DNA, 15 bp, Homo sapiens
tttgaggttcaaatg

SEQ ID NO: 907233 - DNA, 15 bp, Homo sapiens
ttttgaggttcaaat

SEQ ID NO: 907234 - DNA, 15 bp, Homo sapiens
attttgaggttcaaa

SEQ ID NO: 907235 - DNA, 15 bp, Homo sapiens
tattttgaggttcaa

SEQ ID NO: 907236 - DNA, 15 bp, Homo sapiens
atattttgaggttca

SEQ ID NO: 907237 - DNA, 15 bp, Homo sapiens
tatattttgaggttc

SEQ ID NO: 907238 - DNA, 15 bp, Homo sapiens
ttatattttgaggtt

SEQ ID NO: 907239 - DNA, 15 bp, Homo sapiens
attatattttgaggt

SEQ ID NO: 907240 - DNA, 15 bp, Homo sapiens
cattatattttgagg

SEQ ID NO: 907241 - DNA, 15 bp, Homo sapiens
ccattatattttgag

SEQ ID NO: 907242 - DNA, 15 bp, Homo sapiens
cccattatattttga

SEQ ID NO: 907243 - DNA, 15 bp, Homo sapiens
tcccattatattttg

SEQ ID NO: 907244 - DNA, 15 bp, Homo sapiens
atcccattatatttt

SEQ ID NO: 907245 - DNA, 15 bp, Homo sapiens
aatcccattatattt

SEQ ID NO: 907246 - DNA, 15 bp, Homo sapiens
taatcccattatatt

SEQ ID NO: 907247 - DNA, 15 bp, Homo sapiens
ttaatcccattatat

SEQ ID NO: 907248 - DNA, 15 bp, Homo sapiens
attaatcccattata

SEQ ID NO: 907249 - DNA, 15 bp, Homo sapiens
aattaatcccattat

SEQ ID NO: 907250 - DNA, 15 bp, Homo sapiens
aaattaatcccatta

SEQ ID NO: 907251 - DNA, 15 bp, Homo sapiens
taaattaatcccatt

SEQ ID NO: 907252 - DNA, 15 bp, Homo sapiens
ataaattaatcccat

SEQ ID NO: 907253 - DNA, 15 bp, Homo sapiens
tataaattaatccca

SEQ ID NO: 907254 - DNA, 15 bp, Homo sapiens
gtataaattaatccc

SEQ ID NO: 907255 - DNA, 15 bp, Homo sapiens
agtataaattaatcc

SEQ ID NO: 907256 - DNA, 15 bp, Homo sapiens
aagtataaattaatc

SEQ ID NO: 907257 - DNA, 15 bp, Homo sapiens
aaagtataaattaat

SEQ ID NO: 907258 - DNA, 15 bp, Homo sapiens
caaagtataaattaa

SEQ ID NO: 907259 - DNA, 15 bp, Homo sapiens
ccaaagtataaatta

SEQ ID NO: 907260 - DNA, 15 bp, Homo sapiens
cccaaagtataaatt

SEQ ID NO: 907261 - DNA, 15 bp, Homo sapiens
acccaaagtataaat

SEQ ID NO: 907262 - DNA, 15 bp, Homo sapiens
aacccaaagtataaa

SEQ ID NO: 907263 - DNA, 15 bp, Homo sapiens
aaacccaaagtataa

SEQ ID NO: 907264 - DNA, 15 bp, Homo sapiens
taaacccaaagtata

SEQ ID NO: 907265 - DNA, 15 bp, Homo sapiens
ataaacccaaagtat

SEQ ID NO: 907266 - DNA, 15 bp, Homo sapiens
aataaacccaaagta

SEQ ID NO: 907267 - DNA, 15 bp, Homo sapiens
taataaacccaaagt

SEQ ID NO: 907268 - DNA, 15 bp, Homo sapiens
gtaataaacccaaag

SEQ ID NO: 907269 - DNA, 15 bp, Homo sapiens
agtaataaacccaaa

SEQ ID NO: 907270 - DNA, 15 bp, Homo sapiens
aagtaataaacccaa

SEQ ID NO: 907271 - DNA, 15 bp, Homo sapiens
aaagtaataaaccca

SEQ ID NO: 907272 - DNA, 15 bp, Homo sapiens
taaagtaataaaccc

SEQ ID NO: 907273 - DNA, 15 bp, Homo sapiens
ttaaagtaataaacc

SEQ ID NO: 907274 - DNA, 15 bp, Homo sapiens
cttaaagtaataaac

SEQ ID NO: 907275 - DNA, 15 bp, Homo sapiens
tcttaaagtaataaa

SEQ ID NO: 907276 - DNA, 15 bp, Homo sapiens
atcttaaagtaataa

SEQ ID NO: 907277 - DNA, 15 bp, Homo sapiens
catcttaaagtaata

SEQ ID NO: 907278 - DNA, 15 bp, Homo sapiens
ccatcttaaagtaat

SEQ ID NO: 907279 - DNA, 15 bp, Homo sapiens
gccatcttaaagtaa

SEQ ID NO: 907280 - DNA, 15 bp, Homo sapiens
agccatcttaaagta

SEQ ID NO: 907281 - DNA, 15 bp, Homo sapiens
gagccatcttaaagt

SEQ ID NO: 907282 - DNA, 15 bp, Homo sapiens
tgagccatcttaaag

SEQ ID NO: 907283 - DNA, 15 bp, Homo sapiens
ctgagccatcttaaa

SEQ ID NO: 907284 - DNA, 15 bp, Homo sapiens
gctgagccatcttaa

SEQ ID NO: 907285 - DNA, 15 bp, Homo sapiens
tgctgagccatctta

SEQ ID NO: 907286 - DNA, 15 bp, Homo sapiens
ctgctgagccatctt

SEQ ID NO: 907287 - DNA, 15 bp, Homo sapiens
actgctgagccatct

SEQ ID NO: 907288 - DNA, 15 bp, Homo sapiens
gactgctgagccatc

SEQ ID NO: 907289 - DNA, 15 bp, Homo sapiens
agactgctgagccat

SEQ ID NO: 907290 - DNA, 15 bp, Homo sapiens
cagactgctgagcca

SEQ ID NO: 907291 - DNA, 15 bp, Homo sapiens
gcagactgctgagcc

SEQ ID NO: 907292 - DNA, 15 bp, Homo sapiens
tgcagactgctgagc

SEQ ID NO: 907293 - DNA, 15 bp, Homo sapiens
ctgcagactgctgag

SEQ ID NO: 907294 - DNA, 15 bp, Homo sapiens
cctgcagactgctga

SEQ ID NO: 907295 - DNA, 15 bp, Homo sapiens
acctgcagactgctg

SEQ ID NO: 907296 - DNA, 15 bp, Homo sapiens
cacctgcagactgct

SEQ ID NO: 907297 - DNA, 15 bp, Homo sapiens
ccacctgcagactgc

SEQ ID NO: 907298 - DNA, 15 bp, Homo sapiens
tccacctgcagactg

SEQ ID NO: 907299 - DNA, 15 bp, Homo sapiens
gtccacctgcagact

SEQ ID NO: 907300 - DNA, 15 bp, Homo sapiens
cgtccacctgcagac

SEQ ID NO: 907301 - DNA, 15 bp, Homo sapiens
tcgtccacctgcaga

SEQ ID NO: 907302 - DNA, 15 bp, Homo sapiens
ctcgtccacctgcag

SEQ ID NO: 907303 - DNA, 15 bp, Homo sapiens
tctcgtccacctgca

SEQ ID NO: 907304 - DNA, 15 bp, Homo sapiens
atctcgtccacctgc

SEQ ID NO: 907305 - DNA, 15 bp, Homo sapiens
tatctcgtccacctg

SEQ ID NO: 907306 - DNA, 15 bp, Homo sapiens
gtatctcgtccacct

SEQ ID NO: 907307 - DNA, 15 bp, Homo sapiens
agtatctcgtccacc

SEQ ID NO: 907308 - DNA, 15 bp, Homo sapiens
gagtatctcgtccac

SEQ ID NO: 907309 - DNA, 15 bp, Homo sapiens
cgagtatctcgtcca

SEQ ID NO: 907310 - DNA, 15 bp, Homo sapiens
ccgagtatctcgtcc

SEQ ID NO: 907311 - DNA, 15 bp, Homo sapiens
accgagtatctcgtc

SEQ ID NO: 907312 - DNA, 15 bp, Homo sapiens
aaccgagtatctcgt

SEQ ID NO: 907313 - DNA, 15 bp, Homo sapiens
aaaccgagtatctcg

SEQ ID NO: 907314 - DNA, 15 bp, Homo sapiens
aaaaccgagtatctc

SEQ ID NO: 907315 - DNA, 15 bp, Homo sapiens
aaaaaccgagtatct

SEQ ID NO: 907316 - DNA, 15 bp, Homo sapiens
taaaaaccgagtatc

SEQ ID NO: 907317 - DNA, 15 bp, Homo sapiens
gtaaaaaccgagtat

SEQ ID NO: 907318 - DNA, 15 bp, Homo sapiens
cgtaaaaaccgagta

SEQ ID NO: 907319 - DNA, 15 bp, Homo sapiens
acgtaaaaaccgagt

SEQ ID NO: 907320 - DNA, 15 bp, Homo sapiens
tacgtaaaaaccgag

SEQ ID NO: 907321 - DNA, 15 bp, Homo sapiens
ttacgtaaaaaccga

SEQ ID NO: 907322 - DNA, 15 bp, Homo sapiens
attacgtaaaaaccg

SEQ ID NO: 907323 - DNA, 15 bp, Homo sapiens
cattacgtaaaaacc

SEQ ID NO: 907324 - DNA, 15 bp, Homo sapiens
tcattacgtaaaaac

SEQ ID NO: 907325 - DNA, 15 bp, Homo sapiens
ttcattacgtaaaaa

SEQ ID NO: 907326 - DNA, 15 bp, Homo sapiens
tttcattacgtaaaa

SEQ ID NO: 907327 - DNA, 15 bp, Homo sapiens
atttcattacgtaaa

SEQ ID NO: 907328 - DNA, 15 bp, Homo sapiens
aatttcattacgtaa

SEQ ID NO: 907329 - DNA, 15 bp, Homo sapiens
aaatttcattacgta

SEQ ID NO: 907330 - DNA, 15 bp, Homo sapiens
caaatttcattacgt

SEQ ID NO: 907331 - DNA, 15 bp, Homo sapiens
gcaaatttcattacg

SEQ ID NO: 907332 - DNA, 15 bp, Homo sapiens
ggcaaatttcattac

SEQ ID NO: 907333 - DNA, 15 bp, Homo sapiens
tggcaaatttcatta

SEQ ID NO: 907334 - DNA, 15 bp, Homo sapiens
ttggcaaatttcatt

SEQ ID NO: 907335 - DNA, 15 bp, Homo sapiens
gttggcaaatttcat

SEQ ID NO: 907336 - DNA, 15 bp, Homo sapiens
agttggcaaatttca

SEQ ID NO: 907337 - DNA, 15 bp, Homo sapiens
aagttggcaaatttc

SEQ ID NO: 907338 - DNA, 15 bp, Homo sapiens
caagttggcaaattt

SEQ ID NO: 907339 - DNA, 15 bp, Homo sapiens
tcaagttggcaaatt

SEQ ID NO: 907340 - DNA, 15 bp, Homo sapiens
ttcaagttggcaaat

SEQ ID NO: 907341 - DNA, 15 bp, Homo sapiens
tttcaagttggcaaa

SEQ ID NO: 907342 - DNA, 15 bp, Homo sapiens
ttttcaagttggcaa

SEQ ID NO: 907343 - DNA, 15 bp, Homo sapiens
tttttcaagttggca

SEQ ID NO: 907344 - DNA, 15 bp, Homo sapiens
gtttttcaagttggc

SEQ ID NO: 907345 - DNA, 15 bp, Homo sapiens
tgtttttcaagttgg

SEQ ID NO: 907346 - DNA, 15 bp, Homo sapiens
ttgtttttcaagttg

SEQ ID NO: 907347 - DNA, 15 bp, Homo sapiens
attgtttttcaagtt

SEQ ID NO: 907348 - DNA, 15 bp, Homo sapiens
aattgtttttcaagt

SEQ ID NO: 907349 - DNA, 15 bp, Homo sapiens
taattgtttttcaag

SEQ ID NO: 907350 - DNA, 15 bp, Homo sapiens
ctaattgtttttcaa

SEQ ID NO: 907351 - DNA, 15 bp, Homo sapiens
tctaattgtttttca

SEQ ID NO: 907352 - DNA, 15 bp, Homo sapiens
ttctaattgtttttc

SEQ ID NO: 907353 - DNA, 15 bp, Homo sapiens
gttctaattgttttt

SEQ ID NO: 907354 - DNA, 15 bp, Homo sapiens
tgttctaattgtttt

SEQ ID NO: 907355 - DNA, 15 bp, Homo sapiens
ttgttctaattgttt

SEQ ID NO: 907356 - DNA, 15 bp, Homo sapiens
tttgttctaattgtt

SEQ ID NO: 907357 - DNA, 15 bp, Homo sapiens
ttttgttctaattgt

SEQ ID NO: 907358 - DNA, 15 bp, Homo sapiens
tttttgttctaattg

SEQ ID NO: 907359 - DNA, 15 bp, Homo sapiens
ctttttgttctaatt

SEQ ID NO: 907360 - DNA, 15 bp, Homo sapiens
tctttttgttctaat

SEQ ID NO: 907361 - DNA, 15 bp, Homo sapiens
atctttttgttctaa

SEQ ID NO: 907362 - DNA, 15 bp, Homo sapiens
tatctttttgttcta

SEQ ID NO: 907363 - DNA, 15 bp, Homo sapiens
ctatctttttgttct

SEQ ID NO: 907364 - DNA, 15 bp, Homo sapiens
tctatctttttgttc

SEQ ID NO: 907365 - DNA, 15 bp, Homo sapiens
ctctatctttttgtt

SEQ ID NO: 907366 - DNA, 15 bp, Homo sapiens
tctctatctttttgt

SEQ ID NO: 907367 - DNA, 15 bp, Homo sapiens
ttctctatctttttg

SEQ ID NO: 907368 - DNA, 15 bp, Homo sapiens
attctctatcttttt

SEQ ID NO: 907369 - DNA, 15 bp, Homo sapiens
aattctctatctttt

SEQ ID NO: 907370 - DNA, 15 bp, Homo sapiens
caattctctatcttt

SEQ ID NO: 907371 - DNA, 15 bp, Homo sapiens
ccaattctctatctt

SEQ ID NO: 907372 - DNA, 15 bp, Homo sapiens
tccaattctctatct

SEQ ID NO: 907373 - DNA, 15 bp, Homo sapiens
ctccaattctctatc

SEQ ID NO: 907374 - DNA, 15 bp, Homo sapiens
cctccaattctctat

SEQ ID NO: 907375 - DNA, 15 bp, Homo sapiens
tcctccaattctcta

SEQ ID NO: 907376 - DNA, 15 bp, Homo sapiens
gtcctccaattctct

SEQ ID NO: 907377 - DNA, 15 bp, Homo sapiens
tgtcctccaattctc

SEQ ID NO: 907378 - DNA, 15 bp, Homo sapiens
atgtcctccaattct

SEQ ID NO: 907379 - DNA, 15 bp, Homo sapiens
catgtcctccaattc

SEQ ID NO: 907380 - DNA, 15 bp, Homo sapiens
ccatgtcctccaatt

SEQ ID NO: 907381 - DNA, 15 bp, Homo sapiens
tccatgtcctccaat

SEQ ID NO: 907382 - DNA, 15 bp, Homo sapiens
ttccatgtcctccaa

SEQ ID NO: 907383 - DNA, 15 bp, Homo sapiens
tttccatgtcctcca

SEQ ID NO: 907384 - DNA, 15 bp, Homo sapiens
ttttccatgtcctcc

SEQ ID NO: 907385 - DNA, 15 bp, Homo sapiens
cttttccatgtcctc

SEQ ID NO: 907386 - DNA, 15 bp, Homo sapiens
ccttttccatgtcct

SEQ ID NO: 907387 - DNA, 15 bp, Homo sapiens
tccttttccatgtcc

SEQ ID NO: 907388 - DNA, 15 bp, Homo sapiens
ctccttttccatgtc

SEQ ID NO: 907389 - DNA, 15 bp, Homo sapiens
actccttttccatgt

SEQ ID NO: 907390 - DNA, 15 bp, Homo sapiens
aactccttttccatg

SEQ ID NO: 907391 - DNA, 15 bp, Homo sapiens
caactccttttccat

SEQ ID NO: 907392 - DNA, 15 bp, Homo sapiens
ccaactccttttcca

SEQ ID NO: 907393 - DNA, 15 bp, Homo sapiens
tccaactccttttcc

SEQ ID NO: 907394 - DNA, 15 bp, Homo sapiens
ctccaactccttttc

SEQ ID NO: 907395 - DNA, 15 bp, Homo sapiens
tctccaactcctttt

SEQ ID NO: 907396 - DNA, 15 bp, Homo sapiens
ttctccaactccttt

SEQ ID NO: 907397 - DNA, 15 bp, Homo sapiens
tttctccaactcctt

SEQ ID NO: 907398 - DNA, 15 bp, Homo sapiens
ctttctccaactcct

SEQ ID NO: 907399 - DNA, 15 bp, Homo sapiens
tctttctccaactcc

SEQ ID NO: 907400 - DNA, 15 bp, Homo sapiens
ctctttctccaactc

SEQ ID NO: 907401 - DNA, 15 bp, Homo sapiens
tctctttctccaact

SEQ ID NO: 907402 - DNA, 15 bp, Homo sapiens
ttctctttctccaac

SEQ ID NO: 907403 - DNA, 15 bp, Homo sapiens
cttctctttctccaa

SEQ ID NO: 907404 - DNA, 15 bp, Homo sapiens
tcttctctttctcca

SEQ ID NO: 907405 - DNA, 15 bp, Homo sapiens
ttcttctctttctcc

SEQ ID NO: 907406 - DNA, 15 bp, Homo sapiens
tttcttctctttctc

SEQ ID NO: 907407 - DNA, 15 bp, Homo sapiens
ctttcttctctttct

SEQ ID NO: 907408 - DNA, 15 bp, Homo sapiens
actttcttctctttc

SEQ ID NO: 907409 - DNA, 15 bp, Homo sapiens
aactttcttctcttt

SEQ ID NO: 907410 - DNA, 15 bp, Homo sapiens
taactttcttctctt

SEQ ID NO: 907411 - DNA, 15 bp, Homo sapiens
ttaactttcttctct

SEQ ID NO: 907412 - DNA, 15 bp, Homo sapiens
attaactttcttctc

SEQ ID NO: 907413 - DNA, 15 bp, Homo sapiens
cattaactttcttct

SEQ ID NO: 907414 - DNA, 15 bp, Homo sapiens
tcattaactttcttc

SEQ ID NO: 907415 - DNA, 15 bp, Homo sapiens
ctcattaactttctt

SEQ ID NO: 907416 - DNA, 15 bp, Homo sapiens
gctcattaactttct

SEQ ID NO: 907417 - DNA, 15 bp, Homo sapiens
tgctcattaactttc

SEQ ID NO: 907418 - DNA, 15 bp, Homo sapiens
ttgctcattaacttt

SEQ ID NO: 907419 - DNA, 15 bp, Homo sapiens
cttgctcattaactt

SEQ ID NO: 907420 - DNA, 15 bp, Homo sapiens
acttgctcattaact

SEQ ID NO: 907421 - DNA, 15 bp, Homo sapiens
tacttgctcattaac

SEQ ID NO: 907422 - DNA, 15 bp, Homo sapiens
ttacttgctcattaa

SEQ ID NO: 907423 - DNA, 15 bp, Homo sapiens
tttacttgctcatta

SEQ ID NO: 907424 - DNA, 15 bp, Homo sapiens
ctttacttgctcatt

SEQ ID NO: 907425 - DNA, 15 bp, Homo sapiens
gctttacttgctcat

SEQ ID NO: 907426 - DNA, 15 bp, Homo sapiens
tgctttacttgctca

SEQ ID NO: 907427 - DNA, 15 bp, Homo sapiens
gtgctttacttgctc

SEQ ID NO: 907428 - DNA, 15 bp, Homo sapiens
agtgctttacttgct

SEQ ID NO: 907429 - DNA, 15 bp, Homo sapiens
aagtgctttacttgc

SEQ ID NO: 907430 - DNA, 15 bp, Homo sapiens
aaagtgctttacttg

SEQ ID NO: 907431 - DNA, 15 bp, Homo sapiens
aaaagtgctttactt

SEQ ID NO: 907432 - DNA, 15 bp, Homo sapiens
aaaaagtgctttact

SEQ ID NO: 907433 - DNA, 15 bp, Homo sapiens
aaaaaagtgctttac

SEQ ID NO: 907434 - DNA, 15 bp, Homo sapiens
aaaaaaagtgcttta

SEQ ID NO: 907435 - DNA, 15 bp, Homo sapiens
aaaaaaaagtgcttt

SEQ ID NO: 907436 - DNA, 15 bp, Homo sapiens
aaaaaaaaagtgctt

SEQ ID NO: 907437 - DNA, 15 bp, Homo sapiens
gaaaaaaaaagtgct

SEQ ID NO: 907438 - DNA, 15 bp, Homo sapiens
ggaaaaaaaaagtgc

SEQ ID NO: 907439 - DNA, 15 bp, Homo sapiens
tggaaaaaaaaagtg

SEQ ID NO: 907440 - DNA, 15 bp, Homo sapiens
atggaaaaaaaaagt

SEQ ID NO: 907441 - DNA, 15 bp, Homo sapiens
catggaaaaaaaaag

SEQ ID NO: 907442 - DNA, 15 bp, Homo sapiens
tcatggaaaaaaaaa

SEQ ID NO: 907443 - DNA, 15 bp, Homo sapiens
ttcatggaaaaaaaa

SEQ ID NO: 907444 - DNA, 15 bp, Homo sapiens
attcatggaaaaaaa

SEQ ID NO: 907445 - DNA, 15 bp, Homo sapiens
gattcatggaaaaaa

SEQ ID NO: 907446 - DNA, 15 bp, Homo sapiens
agattcatggaaaaa

SEQ ID NO: 907447 - DNA, 15 bp, Homo sapiens
aagattcatggaaaa

SEQ ID NO: 907448 - DNA, 15 bp, Homo sapiens
gaagattcatggaaa

SEQ ID NO: 907449 - DNA, 15 bp, Homo sapiens
tgaagattcatggaa

SEQ ID NO: 907450 - DNA, 15 bp, Homo sapiens
gtgaagattcatgga

SEQ ID NO: 907451 - DNA, 15 bp, Homo sapiens
agtgaagattcatgg

SEQ ID NO: 907452 - DNA, 15 bp, Homo sapiens
cagtgaagattcatg

SEQ ID NO: 907453 - DNA, 15 bp, Homo sapiens
acagtgaagattcat

SEQ ID NO: 907454 - DNA, 15 bp, Homo sapiens
aacagtgaagattca

SEQ ID NO: 907455 - DNA, 15 bp, Homo sapiens
gaacagtgaagattc

SEQ ID NO: 907456 - DNA, 15 bp, Homo sapiens
tgaacagtgaagatt

SEQ ID NO: 907457 - DNA, 15 bp, Homo sapiens
ttgaacagtgaagat

SEQ ID NO: 907458 - DNA, 15 bp, Homo sapiens
cttgaacagtgaaga

SEQ ID NO: 907459 - DNA, 15 bp, Homo sapiens
acttgaacagtgaag

SEQ ID NO: 907460 - DNA, 15 bp, Homo sapiens
aacttgaacagtgaa

SEQ ID NO: 907461 - DNA, 15 bp, Homo sapiens
taacttgaacagtga

SEQ ID NO: 907462 - DNA, 15 bp, Homo sapiens
gtaacttgaacagtg

SEQ ID NO: 907463 - DNA, 15 bp, Homo sapiens
ggtaacttgaacagt

SEQ ID NO: 907464 - DNA, 15 bp, Homo sapiens
aggtaacttgaacag

SEQ ID NO: 907465 - DNA, 15 bp, Homo sapiens
caggtaacttgaaca

SEQ ID NO: 907466 - DNA, 15 bp, Homo sapiens
ccaggtaacttgaac

SEQ ID NO: 907467 - DNA, 15 bp, Homo sapiens
gccaggtaacttgaa

SEQ ID NO: 907468 - DNA, 15 bp, Homo sapiens
agccaggtaacttga

SEQ ID NO: 907469 - DNA, 15 bp, Homo sapiens
aagccaggtaacttg

SEQ ID NO: 907470 - DNA, 15 bp, Homo sapiens
aaagccaggtaactt

SEQ ID NO: 907471 - DNA, 15 bp, Homo sapiens
aaaagccaggtaact

SEQ ID NO: 907472 - DNA, 15 bp, Homo sapiens
aaaaagccaggtaac

SEQ ID NO: 907473 - DNA, 15 bp, Homo sapiens
taaaaagccaggtaa

SEQ ID NO: 907474 - DNA, 15 bp, Homo sapiens
ataaaaagccaggta

SEQ ID NO: 907475 - DNA, 15 bp, Homo sapiens
aataaaaagccaggt

SEQ ID NO: 907476 - DNA, 15 bp, Homo sapiens
taataaaaagccagg

SEQ ID NO: 907477 - DNA, 15 bp, Homo sapiens
ataataaaaagccag

SEQ ID NO: 907478 - DNA, 15 bp, Homo sapiens
aataataaaaagcca

SEQ ID NO: 907479 - DNA, 15 bp, Homo sapiens
taataataaaaagcc

SEQ ID NO: 907480 - DNA, 15 bp, Homo sapiens
ataataataaaaagc

SEQ ID NO: 907481 - DNA, 15 bp, Homo sapiens
aataataataaaaag

SEQ ID NO: 907482 - DNA, 15 bp, Homo sapiens
caataataataaaaa

SEQ ID NO: 907483 - DNA, 15 bp, Homo sapiens
ccaataataataaaa

SEQ ID NO: 907484 - DNA, 15 bp, Homo sapiens
accaataataataaa

SEQ ID NO: 907485 - DNA, 15 bp, Homo sapiens
taccaataataataa

SEQ ID NO: 907486 - DNA, 15 bp, Homo sapiens
ttaccaataataata

SEQ ID NO: 907487 - DNA, 15 bp, Homo sapiens
gttaccaataataat

SEQ ID NO: 907488 - DNA, 15 bp, Homo sapiens
tgttaccaataataa

SEQ ID NO: 907489 - DNA, 15 bp, Homo sapiens
ttgttaccaataata

SEQ ID NO: 907490 - DNA, 15 bp, Homo sapiens
attgttaccaataat

SEQ ID NO: 907491 - DNA, 15 bp, Homo sapiens
tattgttaccaataa

SEQ ID NO: 907492 - DNA, 15 bp, Homo sapiens
atattgttaccaata

SEQ ID NO: 907493 - DNA, 15 bp, Homo sapiens
gatattgttaccaat

SEQ ID NO: 907494 - DNA, 15 bp, Homo sapiens
tgatattgttaccaa

SEQ ID NO: 907495 - DNA, 15 bp, Homo sapiens
ttgatattgttacca

SEQ ID NO: 907496 - DNA, 15 bp, Homo sapiens
attgatattgttacc

SEQ ID NO: 907497 - DNA, 15 bp, Homo sapiens
aattgatattgttac

SEQ ID NO: 907498 - DNA, 15 bp, Homo sapiens
aaattgatattgtta

SEQ ID NO: 907499 - DNA, 15 bp, Homo sapiens
aaaattgatattgtt

SEQ ID NO: 907500 - DNA, 15 bp, Homo sapiens
aaaaattgatattgt

SEQ ID NO: 907501 - DNA, 15 bp, Homo sapiens
taaaaattgatattg

SEQ ID NO: 907502 - DNA, 15 bp, Homo sapiens
ataaaaattgatatt

SEQ ID NO: 907503 - DNA, 15 bp, Homo sapiens
tataaaaattgatat

SEQ ID NO: 907504 - DNA, 15 bp, Homo sapiens
atataaaaattgata

SEQ ID NO: 907505 - DNA, 15 bp, Homo sapiens
aatataaaaattgat

SEQ ID NO: 907506 - DNA, 15 bp, Homo sapiens
caatataaaaattga

SEQ ID NO: 907507 - DNA, 15 bp, Homo sapiens
acaatataaaaattg

SEQ ID NO: 907508 - DNA, 15 bp, Homo sapiens
tacaatataaaaatt

SEQ ID NO: 907509 - DNA, 15 bp, Homo sapiens
atacaatataaaaat

SEQ ID NO: 907510 - DNA, 15 bp, Homo sapiens
catacaatataaaaa

SEQ ID NO: 907511 - DNA, 15 bp, Homo sapiens
acatacaatataaaa

SEQ ID NO: 907512 - DNA, 15 bp, Homo sapiens
aacatacaatataaa

SEQ ID NO: 907513 - DNA, 15 bp, Homo sapiens
taacatacaatataa

SEQ ID NO: 907514 - DNA, 15 bp, Homo sapiens
ataacatacaatata

SEQ ID NO: 907515 - DNA, 15 bp, Homo sapiens
tataacatacaatat

SEQ ID NO: 907516 - DNA, 15 bp, Homo sapiens
atataacatacaata

SEQ ID NO: 907517 - DNA, 15 bp, Homo sapiens
aatataacatacaat

SEQ ID NO: 907518 - DNA, 15 bp, Homo sapiens
aaatataacatacaa

SEQ ID NO: 907519 - DNA, 15 bp, Homo sapiens
caaatataacataca

SEQ ID NO: 907520 - DNA, 15 bp, Homo sapiens
tcaaatataacatac

SEQ ID NO: 907521 - DNA, 15 bp, Homo sapiens
ttcaaatataacata

SEQ ID NO: 907522 - DNA, 15 bp, Homo sapiens
tttcaaatataacat

SEQ ID NO: 907523 - DNA, 15 bp, Homo sapiens
ttttcaaatataaca

SEQ ID NO: 907524 - DNA, 15 bp, Homo sapiens
tttttcaaatataac

SEQ ID NO: 907525 - DNA, 15 bp, Homo sapiens
atttttcaaatataa

SEQ ID NO: 907526 - DNA, 15 bp, Homo sapiens
catttttcaaatata

SEQ ID NO: 907527 - DNA, 15 bp, Homo sapiens
tcatttttcaaatat

SEQ ID NO: 907528 - DNA, 15 bp, Homo sapiens
atcatttttcaaata

SEQ ID NO: 907529 - DNA, 15 bp, Homo sapiens
catcatttttcaaat

SEQ ID NO: 907530 - DNA, 15 bp, Homo sapiens
acatcatttttcaaa

SEQ ID NO: 907531 - DNA, 15 bp, Homo sapiens
tacatcatttttcaa

SEQ ID NO: 907532 - DNA, 15 bp, Homo sapiens
gtacatcatttttca

SEQ ID NO: 907533 - DNA, 15 bp, Homo sapiens
tgtacatcatttttc

SEQ ID NO: 907534 - DNA, 15 bp, Homo sapiens
gtgtacatcattttt

SEQ ID NO: 907535 - DNA, 15 bp, Homo sapiens
agtgtacatcatttt

SEQ ID NO: 907536 - DNA, 15 bp, Homo sapiens
aagtgtacatcattt

SEQ ID NO: 907537 - DNA, 15 bp, Homo sapiens
taagtgtacatcatt

SEQ ID NO: 907538 - DNA, 15 bp, Homo sapiens
ataagtgtacatcat

SEQ ID NO: 907539 - DNA, 15 bp, Homo sapiens
gataagtgtacatca

SEQ ID NO: 907540 - DNA, 15 bp, Homo sapiens
agataagtgtacatc

SEQ ID NO: 907541 - DNA, 15 bp, Homo sapiens
gagataagtgtacat

SEQ ID NO: 907542 - DNA, 15 bp, Homo sapiens
agagataagtgtaca

SEQ ID NO: 907543 - DNA, 15 bp, Homo sapiens
tagagataagtgtac

SEQ ID NO: 907544 - DNA, 15 bp, Homo sapiens
ttagagataagtgta

SEQ ID NO: 907545 - DNA, 15 bp, Homo sapiens
cttagagataagtgt

SEQ ID NO: 907546 - DNA, 15 bp, Homo sapiens
ccttagagataagtg

SEQ ID NO: 907547 - DNA, 15 bp, Homo sapiens
accttagagataagt

SEQ ID NO: 907548 - DNA, 15 bp, Homo sapiens
aaccttagagataag

SEQ ID NO: 907549 - DNA, 15 bp, Homo sapiens
aaaccttagagataa

SEQ ID NO: 907550 - DNA, 15 bp, Homo sapiens
aaaaccttagagata

SEQ ID NO: 907551 - DNA, 15 bp, Homo sapiens
taaaaccttagagat

SEQ ID NO: 907552 - DNA, 15 bp, Homo sapiens
ataaaaccttagaga

SEQ ID NO: 907553 - DNA, 15 bp, Homo sapiens
tataaaaccttagag

SEQ ID NO: 907554 - DNA, 15 bp, Homo sapiens
atataaaaccttaga

SEQ ID NO: 907555 - DNA, 15 bp, Homo sapiens
gatataaaaccttag

SEQ ID NO: 907556 - DNA, 15 bp, Homo sapiens
tgatataaaacctta

SEQ ID NO: 907557 - DNA, 15 bp, Homo sapiens
gtgatataaaacctt

SEQ ID NO: 907558 - DNA, 15 bp, Homo sapiens
agtgatataaaacct

SEQ ID NO: 907559 - DNA, 15 bp, Homo sapiens
cagtgatataaaacc

SEQ ID NO: 907560 - DNA, 15 bp, Homo sapiens
acagtgatataaaac

SEQ ID NO: 907561 - DNA, 15 bp, Homo sapiens
aacagtgatataaaa

SEQ ID NO: 907562 - DNA, 15 bp, Homo sapiens
gaacagtgatataaa

SEQ ID NO: 907563 - DNA, 15 bp, Homo sapiens
tgaacagtgatataa

SEQ ID NO: 907564 - DNA, 15 bp, Homo sapiens
atgaacagtgatata

SEQ ID NO: 907565 - DNA, 15 bp, Homo sapiens
aatgaacagtgatat

SEQ ID NO: 907566 - DNA, 15 bp, Homo sapiens
aaatgaacagtgata

SEQ ID NO: 907567 - DNA, 15 bp, Homo sapiens
aaaatgaacagtgat

SEQ ID NO: 907568 - DNA, 15 bp, Homo sapiens
caaaatgaacagtga

SEQ ID NO: 907569 - DNA, 15 bp, Homo sapiens
acaaaatgaacagtg

SEQ ID NO: 907570 - DNA, 15 bp, Homo sapiens
gacaaaatgaacagt

SEQ ID NO: 907571 - DNA, 15 bp, Homo sapiens
tgacaaaatgaacag

SEQ ID NO: 907572 - DNA, 15 bp, Homo sapiens
atgacaaaatgaaca

SEQ ID NO: 907573 - DNA, 15 bp, Homo sapiens
gatgacaaaatgaac

SEQ ID NO: 907574 - DNA, 15 bp, Homo sapiens
tgatgacaaaatgaa

SEQ ID NO: 907575 - DNA, 15 bp, Homo sapiens
gtgatgacaaaatga

SEQ ID NO: 907576 - DNA, 15 bp, Homo sapiens
ggtgatgacaaaatg

SEQ ID NO: 907577 - DNA, 15 bp, Homo sapiens
tggtgatgacaaaat

SEQ ID NO: 907578 - DNA, 15 bp, Homo sapiens
ttggtgatgacaaaa

SEQ ID NO: 907579 - DNA, 15 bp, Homo sapiens
attggtgatgacaaa

SEQ ID NO: 907580 - DNA, 15 bp, Homo sapiens
aattggtgatgacaa

SEQ ID NO: 907581 - DNA, 15 bp, Homo sapiens
aaattggtgatgaca

SEQ ID NO: 907582 - DNA, 15 bp, Homo sapiens
aaaattggtgatgac

SEQ ID NO: 907583 - DNA, 15 bp, Homo sapiens
taaaattggtgatga

SEQ ID NO: 907584 - DNA, 15 bp, Homo sapiens
ttaaaattggtgatg

SEQ ID NO: 907585 - DNA, 15 bp, Homo sapiens
tttaaaattggtgat

SEQ ID NO: 907586 - DNA, 15 bp, Homo sapiens
ttttaaaattggtga

SEQ ID NO: 907587 - DNA, 15 bp, Homo sapiens
attttaaaattggtg

SEQ ID NO: 907588 - DNA, 15 bp, Homo sapiens
tattttaaaattggt

SEQ ID NO: 907589 - DNA, 15 bp, Homo sapiens
atattttaaaattgg

SEQ ID NO: 907590 - DNA, 15 bp, Homo sapiens
tatattttaaaattg

SEQ ID NO: 907591 - DNA, 15 bp, Homo sapiens
ttatattttaaaatt

SEQ ID NO: 907592 - DNA, 15 bp, Homo sapiens
attatattttaaaat

SEQ ID NO: 907593 - DNA, 15 bp, Homo sapiens
cattatattttaaaa

SEQ ID NO: 907594 - DNA, 15 bp, Homo sapiens
ccattatattttaaa

SEQ ID NO: 907595 - DNA, 15 bp, Homo sapiens
accattatattttaa

SEQ ID NO: 907596 - DNA, 15 bp, Homo sapiens
taccattatatttta

SEQ ID NO: 907597 - DNA, 15 bp, Homo sapiens
gtaccattatatttt

SEQ ID NO: 907598 - DNA, 15 bp, Homo sapiens
agtaccattatattt

SEQ ID NO: 907599 - DNA, 15 bp, Homo sapiens
aagtaccattatatt

SEQ ID NO: 907600 - DNA, 15 bp, Homo sapiens
gaagtaccattatat

SEQ ID NO: 907601 - DNA, 15 bp, Homo sapiens
agaagtaccattata

SEQ ID NO: 907602 - DNA, 15 bp, Homo sapiens
tagaagtaccattat

SEQ ID NO: 907603 - DNA, 15 bp, Homo sapiens
ctagaagtaccatta

SEQ ID NO: 907604 - DNA, 15 bp, Homo sapiens
actagaagtaccatt

SEQ ID NO: 907605 - DNA, 15 bp, Homo sapiens
cactagaagtaccat

SEQ ID NO: 907606 - DNA, 15 bp, Homo sapiens
tcactagaagtacca

SEQ ID NO: 907607 - DNA, 15 bp, Homo sapiens
ttcactagaagtacc

SEQ ID NO: 907608 - DNA, 15 bp, Homo sapiens
attcactagaagtac

SEQ ID NO: 907609 - DNA, 15 bp, Homo sapiens
tattcactagaagta

SEQ ID NO: 907610 - DNA, 15 bp, Homo sapiens
atattcactagaagt

SEQ ID NO: 907611 - DNA, 15 bp, Homo sapiens
catattcactagaag

SEQ ID NO: 907612 - DNA, 15 bp, Homo sapiens
tcatattcactagaa

SEQ ID NO: 907613 - DNA, 15 bp, Homo sapiens
gtcatattcactaga

SEQ ID NO: 907614 - DNA, 15 bp, Homo sapiens
agtcatattcactag

SEQ ID NO: 907615 - DNA, 15 bp, Homo sapiens
aagtcatattcacta

SEQ ID NO: 907616 - DNA, 15 bp, Homo sapiens
caagtcatattcact

SEQ ID NO: 907617 - DNA, 15 bp, Homo sapiens
tcaagtcatattcac

SEQ ID NO: 907618 - DNA, 15 bp, Homo sapiens
ttcaagtcatattca

SEQ ID NO: 907619 - DNA, 15 bp, Homo sapiens
cttcaagtcatattc

SEQ ID NO: 907620 - DNA, 15 bp, Homo sapiens
tcttcaagtcatatt

SEQ ID NO: 907621 - DNA, 15 bp, Homo sapiens
atcttcaagtcatat

SEQ ID NO: 907622 - DNA, 15 bp, Homo sapiens
aatcttcaagtcata

SEQ ID NO: 907623 - DNA, 15 bp, Homo sapiens
taatcttcaagtcat

SEQ ID NO: 907624 - DNA, 15 bp, Homo sapiens
ttaatcttcaagtca

SEQ ID NO: 907625 - DNA, 15 bp, Homo sapiens
attaatcttcaagtc

SEQ ID NO: 907626 - DNA, 15 bp, Homo sapiens
aattaatcttcaagt

SEQ ID NO: 907627 - DNA, 15 bp, Homo sapiens
gaattaatcttcaag

SEQ ID NO: 907628 - DNA, 15 bp, Homo sapiens
agaattaatcttcaa

SEQ ID NO: 907629 - DNA, 15 bp, Homo sapiens
aagaattaatcttca

SEQ ID NO: 907630 - DNA, 15 bp, Homo sapiens
aaagaattaatcttc

SEQ ID NO: 907631 - DNA, 15 bp, Homo sapiens
taaagaattaatctt

SEQ ID NO: 907632 - DNA, 15 bp, Homo sapiens
ataaagaattaatct

SEQ ID NO: 907633 - DNA, 15 bp, Homo sapiens
tataaagaattaatc

SEQ ID NO: 907634 - DNA, 15 bp, Homo sapiens
atataaagaattaat

SEQ ID NO: 907635 - DNA, 15 bp, Homo sapiens
aatataaagaattaa

SEQ ID NO: 907636 - DNA, 15 bp, Homo sapiens
aaatataaagaatta

SEQ ID NO: 907637 - DNA, 15 bp, Homo sapiens
caaatataaagaatt

SEQ ID NO: 907638 - DNA, 15 bp, Homo sapiens
ccaaatataaagaat

SEQ ID NO: 907639 - DNA, 15 bp, Homo sapiens
tccaaatataaagaa

SEQ ID NO: 907640 - DNA, 15 bp, Homo sapiens
ttccaaatataaaga

SEQ ID NO: 907641 - DNA, 15 bp, Homo sapiens
cttccaaatataaag

SEQ ID NO: 907642 - DNA, 15 bp, Homo sapiens
acttccaaatataaa

SEQ ID NO: 907643 - DNA, 15 bp, Homo sapiens
tacttccaaatataa

SEQ ID NO: 907644 - DNA, 15 bp, Homo sapiens
gtacttccaaatata

SEQ ID NO: 907645 - DNA, 15 bp, Homo sapiens
tgtacttccaaatat

SEQ ID NO: 907646 - DNA, 15 bp, Homo sapiens
atgtacttccaaata

SEQ ID NO: 907647 - DNA, 15 bp, Homo sapiens
aatgtacttccaaat

SEQ ID NO: 907648 - DNA, 15 bp, Homo sapiens
aaatgtacttccaaa

SEQ ID NO: 907649 - DNA, 15 bp, Homo sapiens
aaaatgtacttccaa

SEQ ID NO: 907650 - DNA, 15 bp, Homo sapiens
aaaaatgtacttcca

SEQ ID NO: 907651 - DNA, 15 bp, Homo sapiens
gaaaaatgtacttcc

SEQ ID NO: 907652 - DNA, 15 bp, Homo sapiens
agaaaaatgtacttc

SEQ ID NO: 907653 - DNA, 15 bp, Homo sapiens
gagaaaaatgtactt

SEQ ID NO: 907654 - DNA, 15 bp, Homo sapiens
tgagaaaaatgtact

SEQ ID NO: 907655 - DNA, 15 bp, Homo sapiens
ctgagaaaaatgtac

SEQ ID NO: 907656 - DNA, 15 bp, Homo sapiens
cctgagaaaaatgta

SEQ ID NO: 907657 - DNA, 15 bp, Homo sapiens
tcctgagaaaaatgt

SEQ ID NO: 907658 - DNA, 15 bp, Homo sapiens
gtcctgagaaaaatg

SEQ ID NO: 907659 - DNA, 15 bp, Homo sapiens
tgtcctgagaaaaat

SEQ ID NO: 907660 - DNA, 15 bp, Homo sapiens
atgtcctgagaaaaa

SEQ ID NO: 907661 - DNA, 15 bp, Homo sapiens
gatgtcctgagaaaa

SEQ ID NO: 907662 - DNA, 15 bp, Homo sapiens
tgatgtcctgagaaa

SEQ ID NO: 907663 - DNA, 15 bp, Homo sapiens
ttgatgtcctgagaa

SEQ ID NO: 907664 - DNA, 15 bp, Homo sapiens
tttgatgtcctgaga

SEQ ID NO: 907665 - DNA, 15 bp, Homo sapiens
gtttgatgtcctgag

SEQ ID NO: 907666 - DNA, 15 bp, Homo sapiens
agtttgatgtcctga

SEQ ID NO: 907667 - DNA, 15 bp, Homo sapiens
aagtttgatgtcctg

SEQ ID NO: 907668 - DNA, 15 bp, Homo sapiens
caagtttgatgtcct

SEQ ID NO: 907669 - DNA, 15 bp, Homo sapiens
acaagtttgatgtcc

SEQ ID NO: 907670 - DNA, 15 bp, Homo sapiens
aacaagtttgatgtc

SEQ ID NO: 907671 - DNA, 15 bp, Homo sapiens
taacaagtttgatgt

SEQ ID NO: 907672 - DNA, 15 bp, Homo sapiens
gtaacaagtttgatg

SEQ ID NO: 907673 - DNA, 15 bp, Homo sapiens
ggtaacaagtttgat

SEQ ID NO: 907674 - DNA, 15 bp, Homo sapiens
aggtaacaagtttga

SEQ ID NO: 907675 - DNA, 15 bp, Homo sapiens
taggtaacaagtttg

SEQ ID NO: 907676 - DNA, 15 bp, Homo sapiens
ttaggtaacaagttt

SEQ ID NO: 907677 - DNA, 15 bp, Homo sapiens
tttaggtaacaagtt

SEQ ID NO: 907678 - DNA, 15 bp, Homo sapiens
ttttaggtaacaagt

SEQ ID NO: 907679 - DNA, 15 bp, Homo sapiens
attttaggtaacaag

SEQ ID NO: 907680 - DNA, 15 bp, Homo sapiens
aattttaggtaacaa

SEQ ID NO: 907681 - DNA, 15 bp, Homo sapiens
taattttaggtaaca

SEQ ID NO: 907682 - DNA, 15 bp, Homo sapiens
ttaattttaggtaac

SEQ ID NO: 907683 - DNA, 15 bp, Homo sapiens
attaattttaggtaa

SEQ ID NO: 907684 - DNA, 15 bp, Homo sapiens
cattaattttaggta

SEQ ID NO: 907685 - DNA, 15 bp, Homo sapiens
gcattaattttaggt

SEQ ID NO: 907686 - DNA, 15 bp, Homo sapiens
agcattaattttagg

SEQ ID NO: 907687 - DNA, 15 bp, Homo sapiens
aagcattaattttag

SEQ ID NO: 907688 - DNA, 15 bp, Homo sapiens
aaagcattaatttta

SEQ ID NO: 907689 - DNA, 15 bp, Homo sapiens
aaaagcattaatttt

SEQ ID NO: 907690 - DNA, 15 bp, Homo sapiens
caaaagcattaattt

SEQ ID NO: 907691 - DNA, 15 bp, Homo sapiens
acaaaagcattaatt

SEQ ID NO: 907692 - DNA, 15 bp, Homo sapiens
gacaaaagcattaat

SEQ ID NO: 907693 - DNA, 15 bp, Homo sapiens
agacaaaagcattaa

SEQ ID NO: 907694 - DNA, 15 bp, Homo sapiens
cagacaaaagcatta

SEQ ID NO: 907695 - DNA, 15 bp, Homo sapiens
ccagacaaaagcatt

SEQ ID NO: 907696 - DNA, 15 bp, Homo sapiens
tccagacaaaagcat

SEQ ID NO: 907697 - DNA, 15 bp, Homo sapiens
ttccagacaaaagca

SEQ ID NO: 907698 - DNA, 15 bp, Homo sapiens
cttccagacaaaagc

SEQ ID NO: 907699 - DNA, 15 bp, Homo sapiens
tcttccagacaaaag

SEQ ID NO: 907700 - DNA, 15 bp, Homo sapiens
atcttccagacaaaa

SEQ ID NO: 907701 - DNA, 15 bp, Homo sapiens
aatcttccagacaaa

SEQ ID NO: 907702 - DNA, 15 bp, Homo sapiens
caatcttccagacaa

SEQ ID NO: 907703 - DNA, 15 bp, Homo sapiens
ccaatcttccagaca

SEQ ID NO: 907704 - DNA, 15 bp, Homo sapiens
accaatcttccagac

SEQ ID NO: 907705 - DNA, 15 bp, Homo sapiens
taccaatcttccaga

SEQ ID NO: 907706 - DNA, 15 bp, Homo sapiens
ataccaatcttccag

SEQ ID NO: 907707 - DNA, 15 bp, Homo sapiens
gataccaatcttcca

SEQ ID NO: 907708 - DNA, 15 bp, Homo sapiens
tgataccaatcttcc

SEQ ID NO: 907709 - DNA, 15 bp, Homo sapiens
ttgataccaatcttc

SEQ ID NO: 907710 - DNA, 15 bp, Homo sapiens
cttgataccaatctt

SEQ ID NO: 907711 - DNA, 15 bp, Homo sapiens
acttgataccaatct

SEQ ID NO: 907712 - DNA, 15 bp, Homo sapiens
tacttgataccaatc

SEQ ID NO: 907713 - DNA, 15 bp, Homo sapiens
ttacttgataccaat

SEQ ID NO: 907714 - DNA, 15 bp, Homo sapiens
gttacttgataccaa

SEQ ID NO: 907715 - DNA, 15 bp, Homo sapiens
agttacttgatacca

SEQ ID NO: 907716 - DNA, 15 bp, Homo sapiens
tagttacttgatacc

SEQ ID NO: 907717 - DNA, 15 bp, Homo sapiens
ttagttacttgatac

SEQ ID NO: 907718 - DNA, 15 bp, Homo sapiens
attagttacttgata

SEQ ID NO: 907719 - DNA, 15 bp, Homo sapiens
tattagttacttgat

SEQ ID NO: 907720 - DNA, 15 bp, Homo sapiens
ctattagttacttga

SEQ ID NO: 907721 - DNA, 15 bp, Homo sapiens
tctattagttacttg

SEQ ID NO: 907722 - DNA, 15 bp, Homo sapiens
atctattagttactt

SEQ ID NO: 907723 - DNA, 15 bp, Homo sapiens
aatctattagttact

SEQ ID NO: 907724 - DNA, 15 bp, Homo sapiens
aaatctattagttac

SEQ ID NO: 907725 - DNA, 15 bp, Homo sapiens
aaaatctattagtta

SEQ ID NO: 907726 - DNA, 15 bp, Homo sapiens
gaaaatctattagtt

SEQ ID NO: 907727 - DNA, 15 bp, Homo sapiens
tgaaaatctattagt

SEQ ID NO: 907728 - DNA, 15 bp, Homo sapiens
atgaaaatctattag

SEQ ID NO: 907729 - DNA, 15 bp, Homo sapiens
tatgaaaatctatta

SEQ ID NO: 907730 - DNA, 15 bp, Homo sapiens
ttatgaaaatctatt

SEQ ID NO: 907731 - DNA, 15 bp, Homo sapiens
tttatgaaaatctat

SEQ ID NO: 907732 - DNA, 15 bp, Homo sapiens
ctttatgaaaatcta

SEQ ID NO: 907733 - DNA, 15 bp, Homo sapiens
tctttatgaaaatct

SEQ ID NO: 907734 - DNA, 15 bp, Homo sapiens
ttctttatgaaaatc

SEQ ID NO: 907735 - DNA, 15 bp, Homo sapiens
cttctttatgaaaat

SEQ ID NO: 907736 - DNA, 15 bp, Homo sapiens
acttctttatgaaaa

SEQ ID NO: 907737 - DNA, 15 bp, Homo sapiens
cacttctttatgaaa

SEQ ID NO: 907738 - DNA, 15 bp, Homo sapiens
tcacttctttatgaa

SEQ ID NO: 907739 - DNA, 15 bp, Homo sapiens
atcacttctttatga

SEQ ID NO: 907740 - DNA, 15 bp, Homo sapiens
gatcacttctttatg

SEQ ID NO: 907741 - DNA, 15 bp, Homo sapiens
agatcacttctttat

SEQ ID NO: 907742 - DNA, 15 bp, Homo sapiens
aagatcacttcttta

SEQ ID NO: 907743 - DNA, 15 bp, Homo sapiens
aaagatcacttcttt

SEQ ID NO: 907744 - DNA, 15 bp, Homo sapiens
gaaagatcacttctt

SEQ ID NO: 907745 - DNA, 15 bp, Homo sapiens
agaaagatcacttct

SEQ ID NO: 907746 - DNA, 15 bp, Homo sapiens
tagaaagatcacttc

SEQ ID NO: 907747 - DNA, 15 bp, Homo sapiens
ctagaaagatcactt

SEQ ID NO: 907748 - DNA, 15 bp, Homo sapiens
actagaaagatcact

SEQ ID NO: 907749 - DNA, 15 bp, Homo sapiens
cactagaaagatcac

SEQ ID NO: 907750 - DNA, 15 bp, Homo sapiens
gcactagaaagatca

SEQ ID NO: 907751 - DNA, 15 bp, Homo sapiens
ggcactagaaagatc

SEQ ID NO: 907752 - DNA, 15 bp, Homo sapiens
tggcactagaaagat

SEQ ID NO: 907753 - DNA, 15 bp, Homo sapiens
atggcactagaaaga

SEQ ID NO: 907754 - DNA, 15 bp, Homo sapiens
tatggcactagaaag

SEQ ID NO: 907755 - DNA, 15 bp, Homo sapiens
ctatggcactagaaa

SEQ ID NO: 907756 - DNA, 15 bp, Homo sapiens
actatggcactagaa

SEQ ID NO: 907757 - DNA, 15 bp, Homo sapiens
aactatggcactaga

SEQ ID NO: 907758 - DNA, 15 bp, Homo sapiens
aaactatggcactag

SEQ ID NO: 907759 - DNA, 15 bp, Homo sapiens
taaactatggcacta

SEQ ID NO: 907760 - DNA, 15 bp, Homo sapiens
ataaactatggcact

SEQ ID NO: 907761 - DNA, 15 bp, Homo sapiens
aataaactatggcac

SEQ ID NO: 907762 - DNA, 15 bp, Homo sapiens
aaataaactatggca

SEQ ID NO: 907763 - DNA, 15 bp, Homo sapiens
aaaataaactatggc

SEQ ID NO: 907764 - DNA, 15 bp, Homo sapiens
caaaataaactatgg

SEQ ID NO: 907765 - DNA, 15 bp, Homo sapiens
ccaaaataaactatg

SEQ ID NO: 907766 - DNA, 15 bp, Homo sapiens
cccaaaataaactat

SEQ ID NO: 907767 - DNA, 15 bp, Homo sapiens
acccaaaataaacta

SEQ ID NO: 907768 - DNA, 15 bp, Homo sapiens
tacccaaaataaact

SEQ ID NO: 907769 - DNA, 15 bp, Homo sapiens
ttacccaaaataaac

SEQ ID NO: 907770 - DNA, 15 bp, Homo sapiens
tttacccaaaataaa

SEQ ID NO: 907771 - DNA, 15 bp, Homo sapiens
ttttacccaaaataa

SEQ ID NO: 907772 - DNA, 15 bp, Homo sapiens
cttttacccaaaata

SEQ ID NO: 907773 - DNA, 15 bp, Homo sapiens
acttttacccaaaat

SEQ ID NO: 907774 - DNA, 15 bp, Homo sapiens
aacttttacccaaaa

SEQ ID NO: 907775 - DNA, 15 bp, Homo sapiens
taacttttacccaaa

SEQ ID NO: 907776 - DNA, 15 bp, Homo sapiens
ataacttttacccaa

SEQ ID NO: 907777 - DNA, 15 bp, Homo sapiens
tataacttttaccca

SEQ ID NO: 907778 - DNA, 15 bp, Homo sapiens
atataacttttaccc

SEQ ID NO: 907779 - DNA, 15 bp, Homo sapiens
aatataacttttacc

SEQ ID NO: 907780 - DNA, 15 bp, Homo sapiens
aaatataacttttac

SEQ ID NO: 907781 - DNA, 15 bp, Homo sapiens
caaatataactttta

SEQ ID NO: 907782 - DNA, 15 bp, Homo sapiens
acaaatataactttt

SEQ ID NO: 907783 - DNA, 15 bp, Homo sapiens
aacaaatataacttt

SEQ ID NO: 907784 - DNA, 15 bp, Homo sapiens
gaacaaatataactt

SEQ ID NO: 907785 - DNA, 15 bp, Homo sapiens
tgaacaaatataact

SEQ ID NO: 907786 - DNA, 15 bp, Homo sapiens
atgaacaaatataac

SEQ ID NO: 907787 - DNA, 15 bp, Homo sapiens
aatgaacaaatataa

SEQ ID NO: 907788 - DNA, 15 bp, Homo sapiens
aaatgaacaaatata

SEQ ID NO: 907789 - DNA, 15 bp, Homo sapiens
gaaatgaacaaatat

SEQ ID NO: 907790 - DNA, 15 bp, Homo sapiens
tgaaatgaacaaata

SEQ ID NO: 907791 - DNA, 15 bp, Homo sapiens
ttgaaatgaacaaat

SEQ ID NO: 907792 - DNA, 15 bp, Homo sapiens
attgaaatgaacaaa

SEQ ID NO: 907793 - DNA, 15 bp, Homo sapiens
cattgaaatgaacaa

SEQ ID NO: 907794 - DNA, 15 bp, Homo sapiens
acattgaaatgaaca

SEQ ID NO: 907795 - DNA, 15 bp, Homo sapiens
tacattgaaatgaac

SEQ ID NO: 907796 - DNA, 15 bp, Homo sapiens
atacattgaaatgaa

SEQ ID NO: 907797 - DNA, 15 bp, Homo sapiens
aatacattgaaatga

SEQ ID NO: 907798 - DNA, 15 bp, Homo sapiens
aaatacattgaaatg

SEQ ID NO: 907799 - DNA, 15 bp, Homo sapiens
taaatacattgaaat

SEQ ID NO: 907800 - DNA, 15 bp, Homo sapiens
ataaatacattgaaa

SEQ ID NO: 907801 - DNA, 15 bp, Homo sapiens
tataaatacattgaa

SEQ ID NO: 907802 - DNA, 15 bp, Homo sapiens
atataaatacattga

SEQ ID NO: 907803 - DNA, 15 bp, Homo sapiens
catataaatacattg

SEQ ID NO: 907804 - DNA, 15 bp, Homo sapiens
tcatataaatacatt

SEQ ID NO: 907805 - DNA, 15 bp, Homo sapiens
atcatataaatacat

SEQ ID NO: 907806 - DNA, 15 bp, Homo sapiens
aatcatataaataca

SEQ ID NO: 907807 - DNA, 15 bp, Homo sapiens
taatcatataaatac

SEQ ID NO: 907808 - DNA, 15 bp, Homo sapiens
ctaatcatataaata

SEQ ID NO: 907809 - DNA, 15 bp, Homo sapiens
actaatcatataaat

SEQ ID NO: 907810 - DNA, 15 bp, Homo sapiens
tactaatcatataaa

SEQ ID NO: 907811 - DNA, 15 bp, Homo sapiens
ctactaatcatataa

SEQ ID NO: 907812 - DNA, 15 bp, Homo sapiens
tctactaatcatata

SEQ ID NO: 907813 - DNA, 15 bp, Homo sapiens
atctactaatcatat

SEQ ID NO: 907814 - DNA, 15 bp, Homo sapiens
aatctactaatcata

SEQ ID NO: 907815 - DNA, 15 bp, Homo sapiens
gaatctactaatcat

SEQ ID NO: 907816 - DNA, 15 bp, Homo sapiens
cgaatctactaatca

SEQ ID NO: 907817 - DNA, 15 bp, Homo sapiens
gcgaatctactaatc

SEQ ID NO: 907818 - DNA, 15 bp, Homo sapiens
tgcgaatctactaat

SEQ ID NO: 907819 - DNA, 15 bp, Homo sapiens
ttgcgaatctactaa

SEQ ID NO: 907820 - DNA, 15 bp, Homo sapiens
tttgcgaatctacta

SEQ ID NO: 907821 - DNA, 15 bp, Homo sapiens
atttgcgaatctact

SEQ ID NO: 907822 - DNA, 15 bp, Homo sapiens
catttgcgaatctac

SEQ ID NO: 907823 - DNA, 15 bp, Homo sapiens
tcatttgcgaatcta

SEQ ID NO: 907824 - DNA, 15 bp, Homo sapiens
ttcatttgcgaatct

SEQ ID NO: 907825 - DNA, 15 bp, Homo sapiens
attcatttgcgaatc

SEQ ID NO: 907826 - DNA, 15 bp, Homo sapiens
gattcatttgcgaat

SEQ ID NO: 907827 - DNA, 15 bp, Homo sapiens
agattcatttgcgaa

SEQ ID NO: 907828 - DNA, 15 bp, Homo sapiens
aagattcatttgcga

SEQ ID NO: 907829 - DNA, 15 bp, Homo sapiens
aaagattcatttgcg

SEQ ID NO: 907830 - DNA, 15 bp, Homo sapiens
gaaagattcatttgc

SEQ ID NO: 907831 - DNA, 15 bp, Homo sapiens
cgaaagattcatttg

SEQ ID NO: 907832 - DNA, 15 bp, Homo sapiens
tcgaaagattcattt

SEQ ID NO: 907833 - DNA, 15 bp, Homo sapiens
atcgaaagattcatt

SEQ ID NO: 907834 - DNA, 15 bp, Homo sapiens
tatcgaaagattcat

SEQ ID NO: 907835 - DNA, 15 bp, Homo sapiens
atatcgaaagattca

SEQ ID NO: 907836 - DNA, 15 bp, Homo sapiens
tatatcgaaagattc

SEQ ID NO: 907837 - DNA, 15 bp, Homo sapiens
atatatcgaaagatt

SEQ ID NO: 907838 - DNA, 15 bp, Homo sapiens
aatatatcgaaagat

SEQ ID NO: 907839 - DNA, 15 bp, Homo sapiens
gaatatatcgaaaga

SEQ ID NO: 907840 - DNA, 15 bp, Homo sapiens
tgaatatatcgaaag

SEQ ID NO: 907841 - DNA, 15 bp, Homo sapiens
ttgaatatatcgaaa

SEQ ID NO: 907842 - DNA, 15 bp, Homo sapiens
attgaatatatcgaa

SEQ ID NO: 907843 - DNA, 15 bp, Homo sapiens
tattgaatatatcga

SEQ ID NO: 907844 - DNA, 15 bp, Homo sapiens
ttattgaatatatcg

SEQ ID NO: 907845 - DNA, 15 bp, Homo sapiens
attattgaatatatc

SEQ ID NO: 907846 - DNA, 15 bp, Homo sapiens
cattattgaatatat

SEQ ID NO: 907847 - DNA, 15 bp, Homo sapiens
ccattattgaatata

SEQ ID NO: 907848 - DNA, 15 bp, Homo sapiens
accattattgaatat

SEQ ID NO: 907849 - DNA, 15 bp, Homo sapiens
aaccattattgaata

SEQ ID NO: 907850 - DNA, 15 bp, Homo sapiens
taaccattattgaat

SEQ ID NO: 907851 - DNA, 15 bp, Homo sapiens
ttaaccattattgaa

SEQ ID NO: 907852 - DNA, 15 bp, Homo sapiens
attaaccattattga

SEQ ID NO: 907853 - DNA, 15 bp, Homo sapiens
aattaaccattattg

SEQ ID NO: 907854 - DNA, 15 bp, Homo sapiens
taattaaccattatt

SEQ ID NO: 907855 - DNA, 15 bp, Homo sapiens
ttaattaaccattat

SEQ ID NO: 907856 - DNA, 15 bp, Homo sapiens
tttaattaaccatta

SEQ ID NO: 907857 - DNA, 15 bp, Homo sapiens
atttaattaaccatt

SEQ ID NO: 907858 - DNA, 15 bp, Homo sapiens
tatttaattaaccat

SEQ ID NO: 907859 - DNA, 15 bp, Homo sapiens
atatttaattaacca

SEQ ID NO: 907860 - DNA, 15 bp, Homo sapiens
gatatttaattaacc

SEQ ID NO: 907861 - DNA, 15 bp, Homo sapiens
agatatttaattaac

SEQ ID NO: 907862 - DNA, 15 bp, Homo sapiens
aagatatttaattaa

SEQ ID NO: 907863 - DNA, 15 bp, Homo sapiens
caagatatttaatta

SEQ ID NO: 907864 - DNA, 15 bp, Homo sapiens
acaagatatttaatt

SEQ ID NO: 907865 - DNA, 15 bp, Homo sapiens
aacaagatatttaat

SEQ ID NO: 907866 - DNA, 15 bp, Homo sapiens
aaacaagatatttaa

SEQ ID NO: 907867 - DNA, 15 bp, Homo sapiens
aaaacaagatattta

SEQ ID NO: 907868 - DNA, 15 bp, Homo sapiens
aaaaacaagatattt

SEQ ID NO: 907869 - DNA, 15 bp, Homo sapiens
caaaaacaagatatt

SEQ ID NO: 907870 - DNA, 15 bp, Homo sapiens
ccaaaaacaagatat

SEQ ID NO: 907871 - DNA, 15 bp, Homo sapiens
accaaaaacaagata

SEQ ID NO: 907872 - DNA, 15 bp, Homo sapiens
aaccaaaaacaagat

SEQ ID NO: 907873 - DNA, 15 bp, Homo sapiens
caaccaaaaacaaga

SEQ ID NO: 907874 - DNA, 15 bp, Homo sapiens
acaaccaaaaacaag

SEQ ID NO: 907875 - DNA, 15 bp, Homo sapiens
tacaaccaaaaacaa

SEQ ID NO: 907876 - DNA, 15 bp, Homo sapiens
gtacaaccaaaaaca

SEQ ID NO: 907877 - DNA, 15 bp, Homo sapiens
ggtacaaccaaaaac

SEQ ID NO: 907878 - DNA, 15 bp, Homo sapiens
aggtacaaccaaaaa

SEQ ID NO: 907879 - DNA, 15 bp, Homo sapiens
aaggtacaaccaaaa

SEQ ID NO: 907880 - DNA, 15 bp, Homo sapiens
taaggtacaaccaaa

SEQ ID NO: 907881 - DNA, 15 bp, Homo sapiens
ataaggtacaaccaa

SEQ ID NO: 907882 - DNA, 15 bp, Homo sapiens
aataaggtacaacca

SEQ ID NO: 907883 - DNA, 15 bp, Homo sapiens
aaataaggtacaacc

SEQ ID NO: 907884 - DNA, 15 bp, Homo sapiens
aaaataaggtacaac

SEQ ID NO: 907885 - DNA, 15 bp, Homo sapiens
taaaataaggtacaa

SEQ ID NO: 907886 - DNA, 15 bp, Homo sapiens
ataaaataaggtaca

SEQ ID NO: 907887 - DNA, 15 bp, Homo sapiens
cataaaataaggtac

SEQ ID NO: 907888 - DNA, 15 bp, Homo sapiens
acataaaataaggta

SEQ ID NO: 907889 - DNA, 15 bp, Homo sapiens
cacataaaataaggt

SEQ ID NO: 907890 - DNA, 15 bp, Homo sapiens
tcacataaaataagg

SEQ ID NO: 907891 - DNA, 15 bp, Homo sapiens
ctcacataaaataag

SEQ ID NO: 907892 - DNA, 15 bp, Homo sapiens
tctcacataaaataa

SEQ ID NO: 907893 - DNA, 15 bp, Homo sapiens
atctcacataaaata

SEQ ID NO: 907894 - DNA, 15 bp, Homo sapiens
tatctcacataaaat

SEQ ID NO: 907895 - DNA, 15 bp, Homo sapiens
atatctcacataaaa

SEQ ID NO: 907896 - DNA, 15 bp, Homo sapiens
tatatctcacataaa

SEQ ID NO: 907897 - DNA, 15 bp, Homo sapiens
atatatctcacataa

SEQ ID NO: 907898 - DNA, 15 bp, Homo sapiens
tatatatctcacata

SEQ ID NO: 907899 - DNA, 15 bp, Homo sapiens
atatatatctcacat

SEQ ID NO: 907900 - DNA, 15 bp, Homo sapiens
tatatatatctcaca

SEQ ID NO: 907901 - DNA, 15 bp, Homo sapiens
atatatatatctcac

SEQ ID NO: 907902 - DNA, 15 bp, Homo sapiens
tatatatatatctca

SEQ ID NO: 907903 - DNA, 15 bp, Homo sapiens
atatatatatatctc

SEQ ID NO: 907904 - DNA, 15 bp, Homo sapiens
tatatatatatatct

SEQ ID NO: 907905 - DNA, 15 bp, Homo sapiens
atatatatatatatc

SEQ ID NO: 907906 - DNA, 15 bp, Homo sapiens
catatatatatatat

SEQ ID NO: 907907 - DNA, 15 bp, Homo sapiens
acatatatatatata

SEQ ID NO: 907908 - DNA, 15 bp, Homo sapiens
tacatatatatatat

SEQ ID NO: 907909 - DNA, 15 bp, Homo sapiens
atacatatatatata

SEQ ID NO: 907910 - DNA, 15 bp, Homo sapiens
tatacatatatatat

SEQ ID NO: 907911 - DNA, 15 bp, Homo sapiens
ctatacatatatata

SEQ ID NO: 907912 - DNA, 15 bp, Homo sapiens
actatacatatatat

SEQ ID NO: 907913 - DNA, 15 bp, Homo sapiens
aactatacatatata

SEQ ID NO: 907914 - DNA, 15 bp, Homo sapiens
aaactatacatatat

SEQ ID NO: 907915 - DNA, 15 bp, Homo sapiens
aaaactatacatata

SEQ ID NO: 907916 - DNA, 15 bp, Homo sapiens
aaaaactatacatat

SEQ ID NO: 907917 - DNA, 15 bp, Homo sapiens
caaaaactatacata

SEQ ID NO: 907918 - DNA, 15 bp, Homo sapiens
tcaaaaactatacat

SEQ ID NO: 907919 - DNA, 15 bp, Homo sapiens
ttcaaaaactataca

SEQ ID NO: 907920 - DNA, 15 bp, Homo sapiens
tttcaaaaactatac

SEQ ID NO: 907921 - DNA, 15 bp, Homo sapiens
ttttcaaaaactata

SEQ ID NO: 907922 - DNA, 15 bp, Homo sapiens
cttttcaaaaactat

SEQ ID NO: 907923 - DNA, 15 bp, Homo sapiens
acttttcaaaaacta

SEQ ID NO: 907924 - DNA, 15 bp, Homo sapiens
aacttttcaaaaact

SEQ ID NO: 907925 - DNA, 15 bp, Homo sapiens
caacttttcaaaaac

SEQ ID NO: 907926 - DNA, 15 bp, Homo sapiens
acaacttttcaaaaa

SEQ ID NO: 907927 - DNA, 15 bp, Homo sapiens
cacaacttttcaaaa

SEQ ID NO: 907928 - DNA, 15 bp, Homo sapiens
acacaacttttcaaa

SEQ ID NO: 907929 - DNA, 15 bp, Homo sapiens
aacacaacttttcaa

SEQ ID NO: 907930 - DNA, 15 bp, Homo sapiens
gaacacaacttttca

SEQ ID NO: 907931 - DNA, 15 bp, Homo sapiens
tgaacacaacttttc

SEQ ID NO: 907932 - DNA, 15 bp, Homo sapiens
atgaacacaactttt

SEQ ID NO: 907933 - DNA, 15 bp, Homo sapiens
catgaacacaacttt

SEQ ID NO: 907934 - DNA, 15 bp, Homo sapiens
acatgaacacaactt

SEQ ID NO: 907935 - DNA, 15 bp, Homo sapiens
gacatgaacacaact

SEQ ID NO: 907936 - DNA, 15 bp, Homo sapiens
tgacatgaacacaac

SEQ ID NO: 907937 - DNA, 15 bp, Homo sapiens
ctgacatgaacacaa

SEQ ID NO: 907938 - DNA, 15 bp, Homo sapiens
gctgacatgaacaca

SEQ ID NO: 907939 - DNA, 15 bp, Homo sapiens
tgctgacatgaacac

SEQ ID NO: 907940 - DNA, 15 bp, Homo sapiens
ctgctgacatgaaca

SEQ ID NO: 907941 - DNA, 15 bp, Homo sapiens
actgctgacatgaac

SEQ ID NO: 907942 - DNA, 15 bp, Homo sapiens
aactgctgacatgaa

SEQ ID NO: 907943 - DNA, 15 bp, Homo sapiens
aaactgctgacatga

SEQ ID NO: 907944 - DNA, 15 bp, Homo sapiens
taaactgctgacatg

SEQ ID NO: 907945 - DNA, 15 bp, Homo sapiens
ataaactgctgacat

SEQ ID NO: 907946 - DNA, 15 bp, Homo sapiens
tataaactgctgaca

SEQ ID NO: 907947 - DNA, 15 bp, Homo sapiens
ttataaactgctgac

SEQ ID NO: 907948 - DNA, 15 bp, Homo sapiens
tttataaactgctga

SEQ ID NO: 907949 - DNA, 15 bp, Homo sapiens
atttataaactgctg

SEQ ID NO: 907950 - DNA, 15 bp, Homo sapiens
gatttataaactgct

SEQ ID NO: 907951 - DNA, 15 bp, Homo sapiens
tgatttataaactgc

SEQ ID NO: 907952 - DNA, 15 bp, Homo sapiens
gtgatttataaactg

SEQ ID NO: 907953 - DNA, 15 bp, Homo sapiens
tgtgatttataaact

SEQ ID NO: 907954 - DNA, 15 bp, Homo sapiens
atgtgatttataaac

SEQ ID NO: 907955 - DNA, 15 bp, Homo sapiens
tatgtgatttataaa

SEQ ID NO: 907956 - DNA, 15 bp, Homo sapiens
atatgtgatttataa

SEQ ID NO: 907957 - DNA, 15 bp, Homo sapiens
aatatgtgatttata

SEQ ID NO: 907958 - DNA, 15 bp, Homo sapiens
aaatatgtgatttat

SEQ ID NO: 907959 - DNA, 15 bp, Homo sapiens
taaatatgtgattta

SEQ ID NO: 907960 - DNA, 15 bp, Homo sapiens
ttaaatatgtgattt

SEQ ID NO: 907961 - DNA, 15 bp, Homo sapiens
tttaaatatgtgatt

SEQ ID NO: 907962 - DNA, 15 bp, Homo sapiens
ttttaaatatgtgat

SEQ ID NO: 907963 - DNA, 15 bp, Homo sapiens
attttaaatatgtga

SEQ ID NO: 907964 - DNA, 15 bp, Homo sapiens
tattttaaatatgtg

SEQ ID NO: 907965 - DNA, 15 bp, Homo sapiens
ttattttaaatatgt

SEQ ID NO: 907966 - DNA, 15 bp, Homo sapiens
gttattttaaatatg

SEQ ID NO: 907967 - DNA, 15 bp, Homo sapiens
tgttattttaaatat

SEQ ID NO: 907968 - DNA, 15 bp, Homo sapiens
atgttattttaaata

SEQ ID NO: 907969 - DNA, 15 bp, Homo sapiens
aatgttattttaaat

SEQ ID NO: 907970 - DNA, 15 bp, Homo sapiens
aaatgttattttaaa

SEQ ID NO: 907971 - DNA, 15 bp, Homo sapiens
aaaatgttattttaa

SEQ ID NO: 907972 - DNA, 15 bp, Homo sapiens
aaaaatgttatttta

SEQ ID NO: 907973 - DNA, 15 bp, Homo sapiens
taaaaatgttatttt

SEQ ID NO: 907974 - DNA, 15 bp, Homo sapiens
ttaaaaatgttattt

SEQ ID NO: 907975 - DNA, 15 bp, Homo sapiens
attaaaaatgttatt

SEQ ID NO: 907976 - DNA, 15 bp, Homo sapiens
cattaaaaatgttat

SEQ ID NO: 907977 - DNA, 15 bp, Homo sapiens
gcattaaaaatgtta

SEQ ID NO: 907978 - DNA, 15 bp, Homo sapiens
tgcattaaaaatgtt

SEQ ID NO: 907979 - DNA, 15 bp, Homo sapiens
atgcattaaaaatgt

SEQ ID NO: 907980 - DNA, 15 bp, Homo sapiens
tatgcattaaaaatg

SEQ ID NO: 907981 - DNA, 15 bp, Homo sapiens
ctatgcattaaaaat

SEQ ID NO: 907982 - DNA, 15 bp, Homo sapiens
actatgcattaaaaa

SEQ ID NO: 907983 - DNA, 15 bp, Homo sapiens
aactatgcattaaaa

SEQ ID NO: 907984 - DNA, 15 bp, Homo sapiens
aaactatgcattaaa

SEQ ID NO: 907985 - DNA, 15 bp, Homo sapiens
aaaactatgcattaa

SEQ ID NO: 907986 - DNA, 15 bp, Homo sapiens
aaaaactatgcatta

SEQ ID NO: 907987 - DNA, 15 bp, Homo sapiens
taaaaactatgcatt

SEQ ID NO: 907988 - DNA, 15 bp, Homo sapiens
ataaaaactatgcat

SEQ ID NO: 907989 - DNA, 15 bp, Homo sapiens
aataaaaactatgca

SEQ ID NO: 907990 - DNA, 15 bp, Homo sapiens
taataaaaactatgc

SEQ ID NO: 907991 - DNA, 15 bp, Homo sapiens
gtaataaaaactatg

SEQ ID NO: 907992 - DNA, 15 bp, Homo sapiens
ggtaataaaaactat

SEQ ID NO: 907993 - DNA, 15 bp, Homo sapiens
aggtaataaaaacta

SEQ ID NO: 907994 - DNA, 15 bp, Homo sapiens
gaggtaataaaaact

SEQ ID NO: 907995 - DNA, 15 bp, Homo sapiens
cgaggtaataaaaac

SEQ ID NO: 907996 - DNA, 15 bp, Homo sapiens
acgaggtaataaaaa

SEQ ID NO: 907997 - DNA, 15 bp, Homo sapiens
aacgaggtaataaaa

SEQ ID NO: 907998 - DNA, 15 bp, Homo sapiens
taacgaggtaataaa

SEQ ID NO: 907999 - DNA, 15 bp, Homo sapiens
ataacgaggtaataa

SEQ ID NO: 908000 - DNA, 15 bp, Homo sapiens
aataacgaggtaata

SEQ ID NO: 908001 - DNA, 15 bp, Homo sapiens
gaataacgaggtaat

SEQ ID NO: 908002 - DNA, 15 bp, Homo sapiens
ggaataacgaggtaa

SEQ ID NO: 908003 - DNA, 15 bp, Homo sapiens
aggaataacgaggta

SEQ ID NO: 908004 - DNA, 15 bp, Homo sapiens
aaggaataacgaggt

SEQ ID NO: 908005 - DNA, 15 bp, Homo sapiens
caaggaataacgagg

SEQ ID NO: 908006 - DNA, 15 bp, Homo sapiens
acaaggaataacgag

SEQ ID NO: 908007 - DNA, 15 bp, Homo sapiens
aacaaggaataacga

SEQ ID NO: 908008 - DNA, 15 bp, Homo sapiens
taacaaggaataacg

SEQ ID NO: 908009 - DNA, 15 bp, Homo sapiens
ataacaaggaataac

SEQ ID NO: 908010 - DNA, 15 bp, Homo sapiens
tataacaaggaataa

SEQ ID NO: 908011 - DNA, 15 bp, Homo sapiens
ttataacaaggaata

SEQ ID NO: 908012 - DNA, 15 bp, Homo sapiens
tttataacaaggaat

SEQ ID NO: 908013 - DNA, 15 bp, Homo sapiens
gtttataacaaggaa

SEQ ID NO: 908014 - DNA, 15 bp, Homo sapiens
agtttataacaagga

SEQ ID NO: 908015 - DNA, 15 bp, Homo sapiens
tagtttataacaagg

SEQ ID NO: 908016 - DNA, 15 bp, Homo sapiens
ttagtttataacaag

SEQ ID NO: 908017 - DNA, 15 bp, Homo sapiens
attagtttataacaa

SEQ ID NO: 908018 - DNA, 15 bp, Homo sapiens
tattagtttataaca

SEQ ID NO: 908019 - DNA, 15 bp, Homo sapiens
ttattagtttataac

SEQ ID NO: 908020 - DNA, 15 bp, Homo sapiens
attattagtttataa

SEQ ID NO: 908021 - DNA, 15 bp, Homo sapiens
aattattagtttata

SEQ ID NO: 908022 - DNA, 15 bp, Homo sapiens
gaattattagtttat

SEQ ID NO: 908023 - DNA, 15 bp, Homo sapiens
agaattattagttta

SEQ ID NO: 908024 - DNA, 15 bp, Homo sapiens
aagaattattagttt

SEQ ID NO: 908025 - DNA, 15 bp, Homo sapiens
caagaattattagtt

SEQ ID NO: 908026 - DNA, 15 bp, Homo sapiens
gcaagaattattagt

SEQ ID NO: 908027 - DNA, 15 bp, Homo sapiens
tgcaagaattattag

SEQ ID NO: 908028 - DNA, 15 bp, Homo sapiens
ctgcaagaattatta

SEQ ID NO: 908029 - DNA, 15 bp, Homo sapiens
actgcaagaattatt

SEQ ID NO: 908030 - DNA, 15 bp, Homo sapiens
cactgcaagaattat

SEQ ID NO: 908031 - DNA, 15 bp, Homo sapiens
acactgcaagaatta

SEQ ID NO: 908032 - DNA, 15 bp, Homo sapiens
aacactgcaagaatt

SEQ ID NO: 908033 - DNA, 15 bp, Homo sapiens
gaacactgcaagaat

SEQ ID NO: 908034 - DNA, 15 bp, Homo sapiens
tgaacactgcaagaa

SEQ ID NO: 908035 - DNA, 15 bp, Homo sapiens
gtgaacactgcaaga

SEQ ID NO: 908036 - DNA, 15 bp, Homo sapiens
agtgaacactgcaag

SEQ ID NO: 908037 - DNA, 15 bp, Homo sapiens
aagtgaacactgcaa

SEQ ID NO: 908038 - DNA, 15 bp, Homo sapiens
caagtgaacactgca

SEQ ID NO: 908039 - DNA, 15 bp, Homo sapiens
tcaagtgaacactgc

SEQ ID NO: 908040 - DNA, 15 bp, Homo sapiens
ttcaagtgaacactg

SEQ ID NO: 908041 - DNA, 15 bp, Homo sapiens
attcaagtgaacact

SEQ ID NO: 908042 - DNA, 15 bp, Homo sapiens
aattcaagtgaacac

SEQ ID NO: 908043 - DNA, 15 bp, Homo sapiens
aaattcaagtgaaca

SEQ ID NO: 908044 - DNA, 15 bp, Homo sapiens
taaattcaagtgaac

SEQ ID NO: 908045 - DNA, 15 bp, Homo sapiens
ctaaattcaagtgaa

SEQ ID NO: 908046 - DNA, 15 bp, Homo sapiens
actaaattcaagtga

SEQ ID NO: 908047 - DNA, 15 bp, Homo sapiens
aactaaattcaagtg

SEQ ID NO: 908048 - DNA, 15 bp, Homo sapiens
aaactaaattcaagt

SEQ ID NO: 908049 - DNA, 15 bp, Homo sapiens
aaaactaaattcaag

SEQ ID NO: 908050 - DNA, 15 bp, Homo sapiens
taaaactaaattcaa

SEQ ID NO: 908051 - DNA, 15 bp, Homo sapiens
ctaaaactaaattca

SEQ ID NO: 908052 - DNA, 15 bp, Homo sapiens
cctaaaactaaattc

SEQ ID NO: 908053 - DNA, 15 bp, Homo sapiens
tcctaaaactaaatt

SEQ ID NO: 908054 - DNA, 15 bp, Homo sapiens
ttcctaaaactaaat

SEQ ID NO: 908055 - DNA, 15 bp, Homo sapiens
tttcctaaaactaaa

SEQ ID NO: 908056 - DNA, 15 bp, Homo sapiens
ttttcctaaaactaa

SEQ ID NO: 908057 - DNA, 15 bp, Homo sapiens
tttttcctaaaacta

SEQ ID NO: 908058 - DNA, 15 bp, Homo sapiens
ttttttcctaaaact

SEQ ID NO: 908059 - DNA, 15 bp, Homo sapiens
cttttttcctaaaac

SEQ ID NO: 908060 - DNA, 15 bp, Homo sapiens
acttttttcctaaaa

SEQ ID NO: 908061 - DNA, 15 bp, Homo sapiens
aacttttttcctaaa

SEQ ID NO: 908062 - DNA, 15 bp, Homo sapiens
aaacttttttcctaa

SEQ ID NO: 908063 - DNA, 15 bp, Homo sapiens
aaaacttttttccta

SEQ ID NO: 908064 - DNA, 15 bp, Homo sapiens
aaaaacttttttcct

SEQ ID NO: 908065 - DNA, 15 bp, Homo sapiens
aaaaaacttttttcc

SEQ ID NO: 908066 - DNA, 15 bp, Homo sapiens
caaaaaacttttttc

SEQ ID NO: 908067 - DNA, 15 bp, Homo sapiens
gcaaaaaactttttt

SEQ ID NO: 908068 - DNA, 15 bp, Homo sapiens
tgcaaaaaacttttt

SEQ ID NO: 908069 - DNA, 15 bp, Homo sapiens
ctgcaaaaaactttt

SEQ ID NO: 908070 - DNA, 15 bp, Homo sapiens
tctgcaaaaaacttt

SEQ ID NO: 908071 - DNA, 15 bp, Homo sapiens
atctgcaaaaaactt

SEQ ID NO: 908072 - DNA, 15 bp, Homo sapiens
gatctgcaaaaaact

SEQ ID NO: 908073 - DNA, 15 bp, Homo sapiens
tgatctgcaaaaaac

SEQ ID NO: 908074 - DNA, 15 bp, Homo sapiens
ttgatctgcaaaaaa

SEQ ID NO: 908075 - DNA, 15 bp, Homo sapiens
gttgatctgcaaaaa

SEQ ID NO: 908076 - DNA, 15 bp, Homo sapiens
agttgatctgcaaaa

SEQ ID NO: 908077 - DNA, 15 bp, Homo sapiens
aagttgatctgcaaa

SEQ ID NO: 908078 - DNA, 15 bp, Homo sapiens
caagttgatctgcaa

SEQ ID NO: 908079 - DNA, 15 bp, Homo sapiens
acaagttgatctgca

SEQ ID NO: 908080 - DNA, 15 bp, Homo sapiens
tacaagttgatctgc

SEQ ID NO: 908081 - DNA, 15 bp, Homo sapiens
atacaagttgatctg

SEQ ID NO: 908082 - DNA, 15 bp, Homo sapiens
aatacaagttgatct

SEQ ID NO: 908083 - DNA, 15 bp, Homo sapiens
aaatacaagttgatc

SEQ ID NO: 908084 - DNA, 15 bp, Homo sapiens
gaaatacaagttgat

SEQ ID NO: 908085 - DNA, 15 bp, Homo sapiens
ggaaatacaagttga

SEQ ID NO: 908086 - DNA, 15 bp, Homo sapiens
aggaaatacaagttg

SEQ ID NO: 908087 - DNA, 15 bp, Homo sapiens
caggaaatacaagtt

SEQ ID NO: 908088 - DNA, 15 bp, Homo sapiens
ccaggaaatacaagt

SEQ ID NO: 908089 - DNA, 15 bp, Homo sapiens
tccaggaaatacaag

SEQ ID NO: 908090 - DNA, 15 bp, Homo sapiens
ttccaggaaatacaa

SEQ ID NO: 908091 - DNA, 15 bp, Homo sapiens
cttccaggaaataca

SEQ ID NO: 908092 - DNA, 15 bp, Homo sapiens
tcttccaggaaatac

SEQ ID NO: 908093 - DNA, 15 bp, Homo sapiens
ttcttccaggaaata

SEQ ID NO: 908094 - DNA, 15 bp, Homo sapiens
tttcttccaggaaat

SEQ ID NO: 908095 - DNA, 15 bp, Homo sapiens
ttttcttccaggaaa

SEQ ID NO: 908096 - DNA, 15 bp, Homo sapiens
attttcttccaggaa

SEQ ID NO: 908097 - DNA, 15 bp, Homo sapiens
aattttcttccagga

SEQ ID NO: 908098 - DNA, 15 bp, Homo sapiens
aaattttcttccagg

SEQ ID NO: 908099 - DNA, 15 bp, Homo sapiens
gaaattttcttccag

SEQ ID NO: 908100 - DNA, 15 bp, Homo sapiens
ggaaattttcttcca

SEQ ID NO: 908101 - DNA, 15 bp, Homo sapiens
aggaaattttcttcc

SEQ ID NO: 908102 - DNA, 15 bp, Homo sapiens
taggaaattttcttc

SEQ ID NO: 908103 - DNA, 15 bp, Homo sapiens
ataggaaattttctt

SEQ ID NO: 908104 - DNA, 15 bp, Homo sapiens
aataggaaattttct

SEQ ID NO: 908105 - DNA, 15 bp, Homo sapiens
aaataggaaattttc

SEQ ID NO: 908106 - DNA, 15 bp, Homo sapiens
aaaataggaaatttt

SEQ ID NO: 908107 - DNA, 15 bp, Homo sapiens
taaaataggaaattt

SEQ ID NO: 908108 - DNA, 15 bp, Homo sapiens
gtaaaataggaaatt

SEQ ID NO: 908109 - DNA, 15 bp, Homo sapiens
ggtaaaataggaaat

SEQ ID NO: 908110 - DNA, 15 bp, Homo sapiens
aggtaaaataggaaa

SEQ ID NO: 908111 - DNA, 15 bp, Homo sapiens
gaggtaaaataggaa

SEQ ID NO: 908112 - DNA, 15 bp, Homo sapiens
tgaggtaaaatagga

SEQ ID NO: 908113 - DNA, 15 bp, Homo sapiens
ctgaggtaaaatagg

SEQ ID NO: 908114 - DNA, 15 bp, Homo sapiens
gctgaggtaaaatag

SEQ ID NO: 908115 - DNA, 15 bp, Homo sapiens
agctgaggtaaaata

SEQ ID NO: 908116 - DNA, 15 bp, Homo sapiens
aagctgaggtaaaat

SEQ ID NO: 908117 - DNA, 15 bp, Homo sapiens
gaagctgaggtaaaa

SEQ ID NO: 908118 - DNA, 15 bp, Homo sapiens
ggaagctgaggtaaa

SEQ ID NO: 908119 - DNA, 15 bp, Homo sapiens
aggaagctgaggtaa

SEQ ID NO: 908120 - DNA, 15 bp, Homo sapiens
taggaagctgaggta

SEQ ID NO: 908121 - DNA, 15 bp, Homo sapiens
ataggaagctgaggt

SEQ ID NO: 908122 - DNA, 15 bp, Homo sapiens
aataggaagctgagg

SEQ ID NO: 908123 - DNA, 15 bp, Homo sapiens
aaataggaagctgag

SEQ ID NO: 908124 - DNA, 15 bp, Homo sapiens
taaataggaagctga

SEQ ID NO: 908125 - DNA, 15 bp, Homo sapiens
ttaaataggaagctg

SEQ ID NO: 908126 - DNA, 15 bp, Homo sapiens
attaaataggaagct

SEQ ID NO: 908127 - DNA, 15 bp, Homo sapiens
cattaaataggaagc

SEQ ID NO: 908128 - DNA, 15 bp, Homo sapiens
acattaaataggaag

SEQ ID NO: 908129 - DNA, 15 bp, Homo sapiens
tacattaaataggaa

SEQ ID NO: 908130 - DNA, 15 bp, Homo sapiens
atacattaaatagga

SEQ ID NO: 908131 - DNA, 15 bp, Homo sapiens
aatacattaaatagg

SEQ ID NO: 908132 - DNA, 15 bp, Homo sapiens
taatacattaaatag

SEQ ID NO: 908133 - DNA, 15 bp, Homo sapiens
ataatacattaaata

SEQ ID NO: 908134 - DNA, 15 bp, Homo sapiens
aataatacattaaat

SEQ ID NO: 908135 - DNA, 15 bp, Homo sapiens
aaataatacattaaa

SEQ ID NO: 908136 - DNA, 15 bp, Homo sapiens
taaataatacattaa

SEQ ID NO: 908137 - DNA, 15 bp, Homo sapiens
ataaataatacatta

SEQ ID NO: 908138 - DNA, 15 bp, Homo sapiens
aataaataatacatt

SEQ ID NO: 908139 - DNA, 15 bp, Homo sapiens
aaataaataatacat

SEQ ID NO: 908140 - DNA, 15 bp, Homo sapiens
taaataaataataca

SEQ ID NO: 908141 - DNA, 15 bp, Homo sapiens
ataaataaataatac

SEQ ID NO: 908142 - DNA, 15 bp, Homo sapiens
aataaataaataata

SEQ ID NO: 908143 - DNA, 15 bp, Homo sapiens
aaataaataaataat

SEQ ID NO: 908144 - DNA, 15 bp, Homo sapiens
taaataaataaataa

SEQ ID NO: 908145 - DNA, 15 bp, Homo sapiens
gtaaataaataaata

SEQ ID NO: 908146 - DNA, 15 bp, Homo sapiens
agtaaataaataaat

SEQ ID NO: 908147 - DNA, 15 bp, Homo sapiens
aagtaaataaataaa

SEQ ID NO: 908148 - DNA, 15 bp, Homo sapiens
taagtaaataaataa

SEQ ID NO: 908149 - DNA, 15 bp, Homo sapiens
ttaagtaaataaata

SEQ ID NO: 908150 - DNA, 15 bp, Homo sapiens
gttaagtaaataaat

SEQ ID NO: 908151 - DNA, 15 bp, Homo sapiens
tgttaagtaaataaa

SEQ ID NO: 908152 - DNA, 15 bp, Homo sapiens
atgttaagtaaataa

SEQ ID NO: 908153 - DNA, 15 bp, Homo sapiens
aatgttaagtaaata

SEQ ID NO: 908154 - DNA, 15 bp, Homo sapiens
aaatgttaagtaaat

SEQ ID NO: 908155 - DNA, 15 bp, Homo sapiens
taaatgttaagtaaa

SEQ ID NO: 908156 - DNA, 15 bp, Homo sapiens
ataaatgttaagtaa

SEQ ID NO: 908157 - DNA, 15 bp, Homo sapiens
aataaatgttaagta

SEQ ID NO: 908158 - DNA, 15 bp, Homo sapiens
aaataaatgttaagt

SEQ ID NO: 908159 - DNA, 15 bp, Homo sapiens
caaataaatgttaag

SEQ ID NO: 908160 - DNA, 15 bp, Homo sapiens
acaaataaatgttaa

SEQ ID NO: 908161 - DNA, 15 bp, Homo sapiens
aacaaataaatgtta

SEQ ID NO: 908162 - DNA, 15 bp, Homo sapiens
aaacaaataaatgtt

SEQ ID NO: 908163 - DNA, 15 bp, Homo sapiens
aaaacaaataaatgt

SEQ ID NO: 908164 - DNA, 15 bp, Homo sapiens
aaaaacaaataaatg

SEQ ID NO: 908165 - DNA, 15 bp, Homo sapiens
aaaaaacaaataaat

SEQ ID NO: 908166 - DNA, 15 bp, Homo sapiens
taaaaaacaaataaa

SEQ ID NO: 908167 - DNA, 15 bp, Homo sapiens
ataaaaaacaaataa

SEQ ID NO: 908168 - DNA, 15 bp, Homo sapiens
aataaaaaacaaata

SEQ ID NO: 908169 - DNA, 15 bp, Homo sapiens
aaataaaaaacaaat

SEQ ID NO: 908170 - DNA, 15 bp, Homo sapiens
gaaataaaaaacaaa

SEQ ID NO: 908171 - DNA, 15 bp, Homo sapiens
tgaaataaaaaacaa

SEQ ID NO: 908172 - DNA, 15 bp, Homo sapiens
gtgaaataaaaaaca

SEQ ID NO: 908173 - DNA, 15 bp, Homo sapiens
ggtgaaataaaaaac

SEQ ID NO: 908174 - DNA, 15 bp, Homo sapiens
aggtgaaataaaaaa

SEQ ID NO: 908175 - DNA, 15 bp, Homo sapiens
caggtgaaataaaaa

SEQ ID NO: 908176 - DNA, 15 bp, Homo sapiens
tcaggtgaaataaaa

SEQ ID NO: 908177 - DNA, 15 bp, Homo sapiens
ttcaggtgaaataaa

SEQ ID NO: 908178 - DNA, 15 bp, Homo sapiens
gttcaggtgaaataa

SEQ ID NO: 908179 - DNA, 15 bp, Homo sapiens
agttcaggtgaaata

SEQ ID NO: 908180 - DNA, 15 bp, Homo sapiens
cagttcaggtgaaat

SEQ ID NO: 908181 - DNA, 15 bp, Homo sapiens
acagttcaggtgaaa

SEQ ID NO: 908182 - DNA, 15 bp, Homo sapiens
aacagttcaggtgaa

SEQ ID NO: 908183 - DNA, 15 bp, Homo sapiens
taacagttcaggtga

SEQ ID NO: 908184 - DNA, 15 bp, Homo sapiens
ctaacagttcaggtg

SEQ ID NO: 908185 - DNA, 15 bp, Homo sapiens
actaacagttcaggt

SEQ ID NO: 908186 - DNA, 15 bp, Homo sapiens
tactaacagttcagg

SEQ ID NO: 908187 - DNA, 15 bp, Homo sapiens
ttactaacagttcag

SEQ ID NO: 908188 - DNA, 15 bp, Homo sapiens
tttactaacagttca

SEQ ID NO: 908189 - DNA, 15 bp, Homo sapiens
gtttactaacagttc

SEQ ID NO: 908190 - DNA, 15 bp, Homo sapiens
agtttactaacagtt

SEQ ID NO: 908191 - DNA, 15 bp, Homo sapiens
aagtttactaacagt

SEQ ID NO: 908192 - DNA, 15 bp, Homo sapiens
taagtttactaacag

SEQ ID NO: 908193 - DNA, 15 bp, Homo sapiens
ctaagtttactaaca

SEQ ID NO: 908194 - DNA, 15 bp, Homo sapiens
actaagtttactaac

SEQ ID NO: 908195 - DNA, 15 bp, Homo sapiens
tactaagtttactaa

SEQ ID NO: 908196 - DNA, 15 bp, Homo sapiens
ttactaagtttacta

SEQ ID NO: 908197 - DNA, 15 bp, Homo sapiens
tttactaagtttact

SEQ ID NO: 908198 - DNA, 15 bp, Homo sapiens
ttttactaagtttac

SEQ ID NO: 908199 - DNA, 15 bp, Homo sapiens
attttactaagttta

SEQ ID NO: 908200 - DNA, 15 bp, Homo sapiens
aattttactaagttt

SEQ ID NO: 908201 - DNA, 15 bp, Homo sapiens
aaattttactaagtt

SEQ ID NO: 908202 - DNA, 15 bp, Homo sapiens
caaattttactaagt

SEQ ID NO: 908203 - DNA, 15 bp, Homo sapiens
ccaaattttactaag

SEQ ID NO: 908204 - DNA, 15 bp, Homo sapiens
accaaattttactaa

SEQ ID NO: 908205 - DNA, 15 bp, Homo sapiens
caccaaattttacta

SEQ ID NO: 908206 - DNA, 15 bp, Homo sapiens
gcaccaaattttact

SEQ ID NO: 908207 - DNA, 15 bp, Homo sapiens
ggcaccaaattttac

SEQ ID NO: 908208 - DNA, 15 bp, Homo sapiens
aggcaccaaatttta

SEQ ID NO: 908209 - DNA, 15 bp, Homo sapiens
taggcaccaaatttt

SEQ ID NO: 908210 - DNA, 15 bp, Homo sapiens
gtaggcaccaaattt

SEQ ID NO: 908211 - DNA, 15 bp, Homo sapiens
tgtaggcaccaaatt

SEQ ID NO: 908212 - DNA, 15 bp, Homo sapiens
atgtaggcaccaaat

SEQ ID NO: 908213 - DNA, 15 bp, Homo sapiens
catgtaggcaccaaa

SEQ ID NO: 908214 - DNA, 15 bp, Homo sapiens
acatgtaggcaccaa

SEQ ID NO: 908215 - DNA, 15 bp, Homo sapiens
cacatgtaggcacca

SEQ ID NO: 908216 - DNA, 15 bp, Homo sapiens
ccacatgtaggcacc

SEQ ID NO: 908217 - DNA, 15 bp, Homo sapiens
accacatgtaggcac

SEQ ID NO: 908218 - DNA, 15 bp, Homo sapiens
taccacatgtaggca

SEQ ID NO: 908219 - DNA, 15 bp, Homo sapiens
ttaccacatgtaggc

SEQ ID NO: 908220 - DNA, 15 bp, Homo sapiens
gttaccacatgtagg

SEQ ID NO: 908221 - DNA, 15 bp, Homo sapiens
agttaccacatgtag

SEQ ID NO: 908222 - DNA, 15 bp, Homo sapiens
cagttaccacatgta

SEQ ID NO: 908223 - DNA, 15 bp, Homo sapiens
acagttaccacatgt

SEQ ID NO: 908224 - DNA, 15 bp, Homo sapiens
gacagttaccacatg

SEQ ID NO: 908225 - DNA, 15 bp, Homo sapiens
ggacagttaccacat

SEQ ID NO: 908226 - DNA, 15 bp, Homo sapiens
aggacagttaccaca

SEQ ID NO: 908227 - DNA, 15 bp, Homo sapiens
caggacagttaccac

SEQ ID NO: 908228 - DNA, 15 bp, Homo sapiens
acaggacagttacca

SEQ ID NO: 908229 - DNA, 15 bp, Homo sapiens
gacaggacagttacc

SEQ ID NO: 908230 - DNA, 15 bp, Homo sapiens
ggacaggacagttac

SEQ ID NO: 908231 - DNA, 15 bp, Homo sapiens
gggacaggacagtta

SEQ ID NO: 908232 - DNA, 15 bp, Homo sapiens
agggacaggacagtt

SEQ ID NO: 908233 - DNA, 15 bp, Homo sapiens
aagggacaggacagt

SEQ ID NO: 908234 - DNA, 15 bp, Homo sapiens
taagggacaggacag

SEQ ID NO: 908235 - DNA, 15 bp, Homo sapiens
ataagggacaggaca

SEQ ID NO: 908236 - DNA, 15 bp, Homo sapiens
tataagggacaggac

SEQ ID NO: 908237 - DNA, 15 bp, Homo sapiens
gtataagggacagga

SEQ ID NO: 908238 - DNA, 15 bp, Homo sapiens
agtataagggacagg

SEQ ID NO: 908239 - DNA, 15 bp, Homo sapiens
gagtataagggacag

SEQ ID NO: 908240 - DNA, 15 bp, Homo sapiens
tgagtataagggaca

SEQ ID NO: 908241 - DNA, 15 bp, Homo sapiens
ctgagtataagggac

SEQ ID NO: 908242 - DNA, 15 bp, Homo sapiens
tctgagtataaggga

SEQ ID NO: 908243 - DNA, 15 bp, Homo sapiens
ttctgagtataaggg

SEQ ID NO: 908244 - DNA, 15 bp, Homo sapiens
tttctgagtataagg

SEQ ID NO: 908245 - DNA, 15 bp, Homo sapiens
gtttctgagtataag

SEQ ID NO: 908246 - DNA, 15 bp, Homo sapiens
cgtttctgagtataa

SEQ ID NO: 908247 - DNA, 15 bp, Homo sapiens
acgtttctgagtata

SEQ ID NO: 908248 - DNA, 15 bp, Homo sapiens
aacgtttctgagtat

SEQ ID NO: 908249 - DNA, 15 bp, Homo sapiens
aaacgtttctgagta

SEQ ID NO: 908250 - DNA, 15 bp, Homo sapiens
aaaacgtttctgagt

SEQ ID NO: 908251 - DNA, 15 bp, Homo sapiens
gaaaacgtttctgag

SEQ ID NO: 908252 - DNA, 15 bp, Homo sapiens
ggaaaacgtttctga

SEQ ID NO: 908253 - DNA, 15 bp, Homo sapiens
tggaaaacgtttctg

SEQ ID NO: 908254 - DNA, 15 bp, Homo sapiens
gtggaaaacgtttct

SEQ ID NO: 908255 - DNA, 15 bp, Homo sapiens
ggtggaaaacgtttc

SEQ ID NO: 908256 - DNA, 15 bp, Homo sapiens
aggtggaaaacgttt

SEQ ID NO: 908257 - DNA, 15 bp, Homo sapiens
aaggtggaaaacgtt

SEQ ID NO: 908258 - DNA, 15 bp, Homo sapiens
aaaggtggaaaacgt

SEQ ID NO: 908259 - DNA, 15 bp, Homo sapiens
caaaggtggaaaacg

SEQ ID NO: 908260 - DNA, 15 bp, Homo sapiens
acaaaggtggaaaac

SEQ ID NO: 908261 - DNA, 15 bp, Homo sapiens
cacaaaggtggaaaa

SEQ ID NO: 908262 - DNA, 15 bp, Homo sapiens
acacaaaggtggaaa

SEQ ID NO: 908263 - DNA, 15 bp, Homo sapiens
gacacaaaggtggaa

SEQ ID NO: 908264 - DNA, 15 bp, Homo sapiens
ggacacaaaggtgga

SEQ ID NO: 908265 - DNA, 15 bp, Homo sapiens
aggacacaaaggtgg

SEQ ID NO: 908266 - DNA, 15 bp, Homo sapiens
aaggacacaaaggtg

SEQ ID NO: 908267 - DNA, 15 bp, Homo sapiens
aaaggacacaaaggt

SEQ ID NO: 908268 - DNA, 15 bp, Homo sapiens
taaaggacacaaagg

SEQ ID NO: 908269 - DNA, 15 bp, Homo sapiens
ctaaaggacacaaag

SEQ ID NO: 908270 - DNA, 15 bp, Homo sapiens
cctaaaggacacaaa

SEQ ID NO: 908271 - DNA, 15 bp, Homo sapiens
acctaaaggacacaa

SEQ ID NO: 908272 - DNA, 15 bp, Homo sapiens
gacctaaaggacaca

SEQ ID NO: 908273 - DNA, 15 bp, Homo sapiens
tgacctaaaggacac

SEQ ID NO: 908274 - DNA, 15 bp, Homo sapiens
atgacctaaaggaca

SEQ ID NO: 908275 - DNA, 15 bp, Homo sapiens
aatgacctaaaggac

SEQ ID NO: 908276 - DNA, 15 bp, Homo sapiens
caatgacctaaagga

SEQ ID NO: 908277 - DNA, 15 bp, Homo sapiens
acaatgacctaaagg

SEQ ID NO: 908278 - DNA, 15 bp, Homo sapiens
aacaatgacctaaag

SEQ ID NO: 908279 - DNA, 15 bp, Homo sapiens
caacaatgacctaaa

SEQ ID NO: 908280 - DNA, 15 bp, Homo sapiens
acaacaatgacctaa

SEQ ID NO: 908281 - DNA, 15 bp, Homo sapiens
cacaacaatgaccta

SEQ ID NO: 908282 - DNA, 15 bp, Homo sapiens
acacaacaatgacct

SEQ ID NO: 908283 - DNA, 15 bp, Homo sapiens
aacacaacaatgacc

SEQ ID NO: 908284 - DNA, 15 bp, Homo sapiens
taacacaacaatgac

SEQ ID NO: 908285 - DNA, 15 bp, Homo sapiens
ataacacaacaatga

SEQ ID NO: 908286 - DNA, 15 bp, Homo sapiens
tataacacaacaatg

SEQ ID NO: 908287 - DNA, 15 bp, Homo sapiens
atataacacaacaat

SEQ ID NO: 908288 - DNA, 15 bp, Homo sapiens
aatataacacaacaa

SEQ ID NO: 908289 - DNA, 15 bp, Homo sapiens
gaatataacacaaca

SEQ ID NO: 908290 - DNA, 15 bp, Homo sapiens
ggaatataacacaac

SEQ ID NO: 908291 - DNA, 15 bp, Homo sapiens
tggaatataacacaa

SEQ ID NO: 908292 - DNA, 15 bp, Homo sapiens
atggaatataacaca

SEQ ID NO: 908293 - DNA, 15 bp, Homo sapiens
aatggaatataacac

SEQ ID NO: 908294 - DNA, 15 bp, Homo sapiens
aaatggaatataaca

SEQ ID NO: 908295 - DNA, 15 bp, Homo sapiens
taaatggaatataac

SEQ ID NO: 908296 - DNA, 15 bp, Homo sapiens
ataaatggaatataa

SEQ ID NO: 908297 - DNA, 15 bp, Homo sapiens
aataaatggaatata

SEQ ID NO: 908298 - DNA, 15 bp, Homo sapiens
aaataaatggaatat

SEQ ID NO: 908299 - DNA, 15 bp, Homo sapiens
aaaataaatggaata

SEQ ID NO: 908300 - DNA, 15 bp, Homo sapiens
taaaataaatggaat

SEQ ID NO: 908301 - DNA, 15 bp, Homo sapiens
ataaaataaatggaa

SEQ ID NO: 908302 - DNA, 15 bp, Homo sapiens
aataaaataaatgga

SEQ ID NO: 908303 - DNA, 15 bp, Homo sapiens
aaataaaataaatgg

SEQ ID NO: 908304 - DNA, 15 bp, Homo sapiens
aaaataaaataaatg

SEQ ID NO: 908305 - DNA, 15 bp, Homo sapiens
caaaataaaataaat

SEQ ID NO: 908306 - DNA, 15 bp, Homo sapiens
acaaaataaaataaa

SEQ ID NO: 908307 - DNA, 15 bp, Homo sapiens
gacaaaataaaataa

SEQ ID NO: 908308 - DNA, 15 bp, Homo sapiens
ggacaaaataaaata

SEQ ID NO: 908309 - DNA, 15 bp, Homo sapiens
tggacaaaataaaat

SEQ ID NO: 908310 - DNA, 15 bp, Homo sapiens
atggacaaaataaaa

SEQ ID NO: 908311 - DNA, 15 bp, Homo sapiens
aatggacaaaataaa

SEQ ID NO: 908312 - DNA, 15 bp, Homo sapiens
caatggacaaaataa

SEQ ID NO: 908313 - DNA, 15 bp, Homo sapiens
acaatggacaaaata

SEQ ID NO: 908314 - DNA, 15 bp, Homo sapiens
aacaatggacaaaat

SEQ ID NO: 908315 - DNA, 15 bp, Homo sapiens
gaacaatggacaaaa

SEQ ID NO: 908316 - DNA, 15 bp, Homo sapiens
agaacaatggacaaa

SEQ ID NO: 908317 - DNA, 15 bp, Homo sapiens
gagaacaatggacaa

SEQ ID NO: 908318 - DNA, 15 bp, Homo sapiens
agagaacaatggaca

SEQ ID NO: 908319 - DNA, 15 bp, Homo sapiens
gagagaacaatggac

SEQ ID NO: 908320 - DNA, 15 bp, Homo sapiens
tgagagaacaatgga

SEQ ID NO: 908321 - DNA, 15 bp, Homo sapiens
ctgagagaacaatgg

SEQ ID NO: 908322 - DNA, 15 bp, Homo sapiens
tctgagagaacaatg

SEQ ID NO: 908323 - DNA, 15 bp, Homo sapiens
ttctgagagaacaat

SEQ ID NO: 908324 - DNA, 15 bp, Homo sapiens
tttctgagagaacaa

SEQ ID NO: 908325 - DNA, 15 bp, Homo sapiens
atttctgagagaaca

SEQ ID NO: 908326 - DNA, 15 bp, Homo sapiens
aatttctgagagaac

SEQ ID NO: 908327 - DNA, 15 bp, Homo sapiens
caatttctgagagaa

SEQ ID NO: 908328 - DNA, 15 bp, Homo sapiens
tcaatttctgagaga

SEQ ID NO: 908329 - DNA, 15 bp, Homo sapiens
ctcaatttctgagag

SEQ ID NO: 908330 - DNA, 15 bp, Homo sapiens
cctcaatttctgaga

SEQ ID NO: 908331 - DNA, 15 bp, Homo sapiens
ccctcaatttctgag

SEQ ID NO: 908332 - DNA, 15 bp, Homo sapiens
accctcaatttctga

SEQ ID NO: 908333 - DNA, 15 bp, Homo sapiens
gaccctcaatttctg

SEQ ID NO: 908334 - DNA, 15 bp, Homo sapiens
tgaccctcaatttct

SEQ ID NO: 908335 - DNA, 15 bp, Homo sapiens
atgaccctcaatttc

SEQ ID NO: 908336 - DNA, 15 bp, Homo sapiens
tatgaccctcaattt

SEQ ID NO: 908337 - DNA, 15 bp, Homo sapiens
gtatgaccctcaatt

SEQ ID NO: 908338 - DNA, 15 bp, Homo sapiens
tgtatgaccctcaat

SEQ ID NO: 908339 - DNA, 15 bp, Homo sapiens
atgtatgaccctcaa

SEQ ID NO: 908340 - DNA, 15 bp, Homo sapiens
aatgtatgaccctca

SEQ ID NO: 908341 - DNA, 15 bp, Homo sapiens
aaatgtatgaccctc

SEQ ID NO: 908342 - DNA, 15 bp, Homo sapiens
aaaatgtatgaccct

SEQ ID NO: 908343 - DNA, 15 bp, Homo sapiens
taaaatgtatgaccc

SEQ ID NO: 908344 - DNA, 15 bp, Homo sapiens
ttaaaatgtatgacc

SEQ ID NO: 908345 - DNA, 15 bp, Homo sapiens
cttaaaatgtatgac

SEQ ID NO: 908346 - DNA, 15 bp, Homo sapiens
tcttaaaatgtatga

SEQ ID NO: 908347 - DNA, 15 bp, Homo sapiens
ttcttaaaatgtatg

SEQ ID NO: 908348 - DNA, 15 bp, Homo sapiens
tttcttaaaatgtat

SEQ ID NO: 908349 - DNA, 15 bp, Homo sapiens
ttttcttaaaatgta

SEQ ID NO: 908350 - DNA, 15 bp, Homo sapiens
gttttcttaaaatgt

SEQ ID NO: 908351 - DNA, 15 bp, Homo sapiens
tgttttcttaaaatg

SEQ ID NO: 908352 - DNA, 15 bp, Homo sapiens
ttgttttcttaaaat

SEQ ID NO: 908353 - DNA, 15 bp, Homo sapiens
attgttttcttaaaa

SEQ ID NO: 908354 - DNA, 15 bp, Homo sapiens
cattgttttcttaaa

SEQ ID NO: 908355 - DNA, 15 bp, Homo sapiens
tcattgttttcttaa

SEQ ID NO: 908356 - DNA, 15 bp, Homo sapiens
atcattgttttctta

SEQ ID NO: 908357 - DNA, 15 bp, Homo sapiens
tatcattgttttctt

SEQ ID NO: 908358 - DNA, 15 bp, Homo sapiens
atatcattgttttct

SEQ ID NO: 908359 - DNA, 15 bp, Homo sapiens
catatcattgttttc

SEQ ID NO: 908360 - DNA, 15 bp, Homo sapiens
gcatatcattgtttt

SEQ ID NO: 908361 - DNA, 15 bp, Homo sapiens
agcatatcattgttt

SEQ ID NO: 908362 - DNA, 15 bp, Homo sapiens
tagcatatcattgtt

SEQ ID NO: 908363 - DNA, 15 bp, Homo sapiens
atagcatatcattgt

SEQ ID NO: 908364 - DNA, 15 bp, Homo sapiens
aatagcatatcattg

SEQ ID NO: 908365 - DNA, 15 bp, Homo sapiens
aaatagcatatcatt

SEQ ID NO: 908366 - DNA, 15 bp, Homo sapiens
taaatagcatatcat

SEQ ID NO: 908367 - DNA, 15 bp, Homo sapiens
ttaaatagcatatca

SEQ ID NO: 908368 - DNA, 15 bp, Homo sapiens
cttaaatagcatatc

SEQ ID NO: 908369 - DNA, 15 bp, Homo sapiens
tcttaaatagcatat

SEQ ID NO: 908370 - DNA, 15 bp, Homo sapiens
ctcttaaatagcata

SEQ ID NO: 908371 - DNA, 15 bp, Homo sapiens
tctcttaaatagcat

SEQ ID NO: 908372 - DNA, 15 bp, Homo sapiens
ttctcttaaatagca

SEQ ID NO: 908373 - DNA, 15 bp, Homo sapiens
attctcttaaatagc

SEQ ID NO: 908374 - DNA, 15 bp, Homo sapiens
cattctcttaaatag

SEQ ID NO: 908375 - DNA, 15 bp, Homo sapiens
acattctcttaaata

SEQ ID NO: 908376 - DNA, 15 bp, Homo sapiens
tacattctcttaaat

SEQ ID NO: 908377 - DNA, 15 bp, Homo sapiens
atacattctcttaaa

SEQ ID NO: 908378 - DNA, 15 bp, Homo sapiens
gatacattctcttaa

SEQ ID NO: 908379 - DNA, 15 bp, Homo sapiens
tgatacattctctta

SEQ ID NO: 908380 - DNA, 15 bp, Homo sapiens
atgatacattctctt

SEQ ID NO: 908381 - DNA, 15 bp, Homo sapiens
tatgatacattctct

SEQ ID NO: 908382 - DNA, 15 bp, Homo sapiens
ttatgatacattctc

SEQ ID NO: 908383 - DNA, 15 bp, Homo sapiens
tttatgatacattct

SEQ ID NO: 908384 - DNA, 15 bp, Homo sapiens
atttatgatacattc

SEQ ID NO: 908385 - DNA, 15 bp, Homo sapiens
aatttatgatacatt

SEQ ID NO: 908386 - DNA, 15 bp, Homo sapiens
caatttatgatacat

SEQ ID NO: 908387 - DNA, 15 bp, Homo sapiens
tcaatttatgataca

SEQ ID NO: 908388 - DNA, 15 bp, Homo sapiens
atcaatttatgatac

SEQ ID NO: 908389 - DNA, 15 bp, Homo sapiens
aatcaatttatgata

SEQ ID NO: 908390 - DNA, 15 bp, Homo sapiens
aaatcaatttatgat

SEQ ID NO: 908391 - DNA, 15 bp, Homo sapiens
caaatcaatttatga

SEQ ID NO: 908392 - DNA, 15 bp, Homo sapiens
acaaatcaatttatg

SEQ ID NO: 908393 - DNA, 15 bp, Homo sapiens
tacaaatcaatttat

SEQ ID NO: 908394 - DNA, 15 bp, Homo sapiens
ttacaaatcaattta

SEQ ID NO: 908395 - DNA, 15 bp, Homo sapiens
cttacaaatcaattt

SEQ ID NO: 908396 - DNA, 15 bp, Homo sapiens
ccttacaaatcaatt

SEQ ID NO: 908397 - DNA, 15 bp, Homo sapiens
tccttacaaatcaat

SEQ ID NO: 908398 - DNA, 15 bp, Homo sapiens
ttccttacaaatcaa

SEQ ID NO: 908399 - DNA, 15 bp, Homo sapiens
tttccttacaaatca

SEQ ID NO: 908400 - DNA, 15 bp, Homo sapiens
ttttccttacaaatc

SEQ ID NO: 908401 - DNA, 15 bp, Homo sapiens
cttttccttacaaat

SEQ ID NO: 908402 - DNA, 15 bp, Homo sapiens
acttttccttacaaa

SEQ ID NO: 908403 - DNA, 15 bp, Homo sapiens
tacttttccttacaa

SEQ ID NO: 908404 - DNA, 15 bp, Homo sapiens
atacttttccttaca

SEQ ID NO: 908405 - DNA, 15 bp, Homo sapiens
gatacttttccttac

SEQ ID NO: 908406 - DNA, 15 bp, Homo sapiens
ggatacttttcctta

SEQ ID NO: 908407 - DNA, 15 bp, Homo sapiens
gggatacttttcctt

SEQ ID NO: 908408 - DNA, 15 bp, Homo sapiens
ggggatacttttcct

SEQ ID NO: 908409 - DNA, 15 bp, Homo sapiens
tggggatacttttcc

SEQ ID NO: 908410 - DNA, 15 bp, Homo sapiens
atggggatacttttc

SEQ ID NO: 908411 - DNA, 15 bp, Homo sapiens
aatggggatactttt

SEQ ID NO: 908412 - DNA, 15 bp, Homo sapiens
gaatggggatacttt

SEQ ID NO: 908413 - DNA, 15 bp, Homo sapiens
agaatggggatactt

SEQ ID NO: 908414 - DNA, 15 bp, Homo sapiens
aagaatggggatact

SEQ ID NO: 908415 - DNA, 15 bp, Homo sapiens
gaagaatggggatac

SEQ ID NO: 908416 - DNA, 15 bp, Homo sapiens
tgaagaatggggata

SEQ ID NO: 908417 - DNA, 15 bp, Homo sapiens
atgaagaatggggat

SEQ ID NO: 908418 - DNA, 15 bp, Homo sapiens
catgaagaatgggga

SEQ ID NO: 908419 - DNA, 15 bp, Homo sapiens
acatgaagaatgggg

SEQ ID NO: 908420 - DNA, 15 bp, Homo sapiens
tacatgaagaatggg

SEQ ID NO: 908421 - DNA, 15 bp, Homo sapiens
atacatgaagaatgg

SEQ ID NO: 908422 - DNA, 15 bp, Homo sapiens
catacatgaagaatg

SEQ ID NO: 908423 - DNA, 15 bp, Homo sapiens
acatacatgaagaat

SEQ ID NO: 908424 - DNA, 15 bp, Homo sapiens
tacatacatgaagaa

SEQ ID NO: 908425 - DNA, 15 bp, Homo sapiens
atacatacatgaaga

SEQ ID NO: 908426 - DNA, 15 bp, Homo sapiens
aatacatacatgaag

SEQ ID NO: 908427 - DNA, 15 bp, Homo sapiens
aaatacatacatgaa

SEQ ID NO: 908428 - DNA, 15 bp, Homo sapiens
aaaatacatacatga

SEQ ID NO: 908429 - DNA, 15 bp, Homo sapiens
taaaatacatacatg

SEQ ID NO: 908430 - DNA, 15 bp, Homo sapiens
gtaaaatacatacat

SEQ ID NO: 908431 - DNA, 15 bp, Homo sapiens
agtaaaatacataca

SEQ ID NO: 908432 - DNA, 15 bp, Homo sapiens
gagtaaaatacatac

SEQ ID NO: 908433 - DNA, 15 bp, Homo sapiens
agagtaaaatacata

SEQ ID NO: 908434 - DNA, 15 bp, Homo sapiens
tagagtaaaatacat

SEQ ID NO: 908435 - DNA, 15 bp, Homo sapiens
ttagagtaaaataca

SEQ ID NO: 908436 - DNA, 15 bp, Homo sapiens
tttagagtaaaatac

SEQ ID NO: 908437 - DNA, 15 bp, Homo sapiens
ttttagagtaaaata

SEQ ID NO: 908438 - DNA, 15 bp, Homo sapiens
attttagagtaaaat

SEQ ID NO: 908439 - DNA, 15 bp, Homo sapiens
cattttagagtaaaa

SEQ ID NO: 908440 - DNA, 15 bp, Homo sapiens
acattttagagtaaa

SEQ ID NO: 908441 - DNA, 15 bp, Homo sapiens
aacattttagagtaa

SEQ ID NO: 908442 - DNA, 15 bp, Homo sapiens
caacattttagagta

SEQ ID NO: 908443 - DNA, 15 bp, Homo sapiens
tcaacattttagagt

SEQ ID NO: 908444 - DNA, 15 bp, Homo sapiens
ttcaacattttagag

SEQ ID NO: 908445 - DNA, 15 bp, Homo sapiens
cttcaacattttaga

SEQ ID NO: 908446 - DNA, 15 bp, Homo sapiens
tcttcaacattttag

SEQ ID NO: 908447 - DNA, 15 bp, Homo sapiens
ttcttcaacatttta

SEQ ID NO: 908448 - DNA, 15 bp, Homo sapiens
attcttcaacatttt

SEQ ID NO: 908449 - DNA, 15 bp, Homo sapiens
gattcttcaacattt

SEQ ID NO: 908450 - DNA, 15 bp, Homo sapiens
tgattcttcaacatt

SEQ ID NO: 908451 - DNA, 15 bp, Homo sapiens
atgattcttcaacat

SEQ ID NO: 908452 - DNA, 15 bp, Homo sapiens
tatgattcttcaaca

SEQ ID NO: 908453 - DNA, 15 bp, Homo sapiens
atatgattcttcaac

SEQ ID NO: 908454 - DNA, 15 bp, Homo sapiens
tatatgattcttcaa

SEQ ID NO: 908455 - DNA, 15 bp, Homo sapiens
ctatatgattcttca

SEQ ID NO: 908456 - DNA, 15 bp, Homo sapiens
tctatatgattcttc

SEQ ID NO: 908457 - DNA, 15 bp, Homo sapiens
ttctatatgattctt

SEQ ID NO: 908458 - DNA, 15 bp, Homo sapiens
cttctatatgattct

SEQ ID NO: 908459 - DNA, 15 bp, Homo sapiens
acttctatatgattc

SEQ ID NO: 908460 - DNA, 15 bp, Homo sapiens
aacttctatatgatt

SEQ ID NO: 908461 - DNA, 15 bp, Homo sapiens
taacttctatatgat

SEQ ID NO: 908462 - DNA, 15 bp, Homo sapiens
ctaacttctatatga

SEQ ID NO: 908463 - DNA, 15 bp, Homo sapiens
gctaacttctatatg

SEQ ID NO: 908464 - DNA, 15 bp, Homo sapiens
agctaacttctatat

SEQ ID NO: 908465 - DNA, 15 bp, Homo sapiens
tagctaacttctata

SEQ ID NO: 908466 - DNA, 15 bp, Homo sapiens
atagctaacttctat

SEQ ID NO: 908467 - DNA, 15 bp, Homo sapiens
catagctaacttcta

SEQ ID NO: 908468 - DNA, 15 bp, Homo sapiens
tcatagctaacttct

SEQ ID NO: 908469 - DNA, 15 bp, Homo sapiens
ttcatagctaacttc

SEQ ID NO: 908470 - DNA, 15 bp, Homo sapiens
tttcatagctaactt

SEQ ID NO: 908471 - DNA, 15 bp, Homo sapiens
ttttcatagctaact

SEQ ID NO: 908472 - DNA, 15 bp, Homo sapiens
gttttcatagctaac

SEQ ID NO: 908473 - DNA, 15 bp, Homo sapiens
tgttttcatagctaa

SEQ ID NO: 908474 - DNA, 15 bp, Homo sapiens
ttgttttcatagcta

SEQ ID NO: 908475 - DNA, 15 bp, Homo sapiens
attgttttcatagct

SEQ ID NO: 908476 - DNA, 15 bp, Homo sapiens
cattgttttcatagc

SEQ ID NO: 908477 - DNA, 15 bp, Homo sapiens
acattgttttcatag

SEQ ID NO: 908478 - DNA, 15 bp, Homo sapiens
cacattgttttcata

SEQ ID NO: 908479 - DNA, 15 bp, Homo sapiens
ccacattgttttcat

SEQ ID NO: 908480 - DNA, 15 bp, Homo sapiens
accacattgttttca

SEQ ID NO: 908481 - DNA, 15 bp, Homo sapiens
taccacattgttttc

SEQ ID NO: 908482 - DNA, 15 bp, Homo sapiens
ctaccacattgtttt

SEQ ID NO: 908483 - DNA, 15 bp, Homo sapiens
tctaccacattgttt

SEQ ID NO: 908484 - DNA, 15 bp, Homo sapiens
ctctaccacattgtt

SEQ ID NO: 908485 - DNA, 15 bp, Homo sapiens
tctctaccacattgt

SEQ ID NO: 908486 - DNA, 15 bp, Homo sapiens
ttctctaccacattg

SEQ ID NO: 908487 - DNA, 15 bp, Homo sapiens
tttctctaccacatt

SEQ ID NO: 908488 - DNA, 15 bp, Homo sapiens
ctttctctaccacat

SEQ ID NO: 908489 - DNA, 15 bp, Homo sapiens
actttctctaccaca

SEQ ID NO: 908490 - DNA, 15 bp, Homo sapiens
tactttctctaccac

SEQ ID NO: 908491 - DNA, 15 bp, Homo sapiens
atactttctctacca

SEQ ID NO: 908492 - DNA, 15 bp, Homo sapiens
catactttctctacc

SEQ ID NO: 908493 - DNA, 15 bp, Homo sapiens
ccatactttctctac

SEQ ID NO: 908494 - DNA, 15 bp, Homo sapiens
tccatactttctcta

SEQ ID NO: 908495 - DNA, 15 bp, Homo sapiens
atccatactttctct

SEQ ID NO: 908496 - DNA, 15 bp, Homo sapiens
gatccatactttctc

SEQ ID NO: 908497 - DNA, 15 bp, Homo sapiens
cgatccatactttct

SEQ ID NO: 908498 - DNA, 15 bp, Homo sapiens
tcgatccatactttc

SEQ ID NO: 908499 - DNA, 15 bp, Homo sapiens
atcgatccatacttt

SEQ ID NO: 908500 - DNA, 15 bp, Homo sapiens
catcgatccatactt

SEQ ID NO: 908501 - DNA, 15 bp, Homo sapiens
gcatcgatccatact

SEQ ID NO: 908502 - DNA, 15 bp, Homo sapiens
ggcatcgatccatac

SEQ ID NO: 908503 - DNA, 15 bp, Homo sapiens
tggcatcgatccata

SEQ ID NO: 908504 - DNA, 15 bp, Homo sapiens
gtggcatcgatccat

SEQ ID NO: 908505 - DNA, 15 bp, Homo sapiens
agtggcatcgatcca

SEQ ID NO: 908506 - DNA, 15 bp, Homo sapiens
aagtggcatcgatcc

SEQ ID NO: 908507 - DNA, 15 bp, Homo sapiens
taagtggcatcgatc

SEQ ID NO: 908508 - DNA, 15 bp, Homo sapiens
ttaagtggcatcgat

SEQ ID NO: 908509 - DNA, 15 bp, Homo sapiens
tttaagtggcatcga

SEQ ID NO: 908510 - DNA, 15 bp, Homo sapiens
atttaagtggcatcg

SEQ ID NO: 908511 - DNA, 15 bp, Homo sapiens
catttaagtggcatc

SEQ ID NO: 908512 - DNA, 15 bp, Homo sapiens
acatttaagtggcat

SEQ ID NO: 908513 - DNA, 15 bp, Homo sapiens
aacatttaagtggca

SEQ ID NO: 908514 - DNA, 15 bp, Homo sapiens
taacatttaagtggc

SEQ ID NO: 908515 - DNA, 15 bp, Homo sapiens
ctaacatttaagtgg

SEQ ID NO: 908516 - DNA, 15 bp, Homo sapiens
cctaacatttaagtg

SEQ ID NO: 908517 - DNA, 15 bp, Homo sapiens
tcctaacatttaagt

SEQ ID NO: 908518 - DNA, 15 bp, Homo sapiens
ttcctaacatttaag

SEQ ID NO: 908519 - DNA, 15 bp, Homo sapiens
cttcctaacatttaa

SEQ ID NO: 908520 - DNA, 15 bp, Homo sapiens
tcttcctaacattta

SEQ ID NO: 908521 - DNA, 15 bp, Homo sapiens
ttcttcctaacattt

SEQ ID NO: 908522 - DNA, 15 bp, Homo sapiens
cttcttcctaacatt

SEQ ID NO: 908523 - DNA, 15 bp, Homo sapiens
gcttcttcctaacat

SEQ ID NO: 908524 - DNA, 15 bp, Homo sapiens
agcttcttcctaaca

SEQ ID NO: 908525 - DNA, 15 bp, Homo sapiens
gagcttcttcctaac

SEQ ID NO: 908526 - DNA, 15 bp, Homo sapiens
agagcttcttcctaa

SEQ ID NO: 908527 - DNA, 15 bp, Homo sapiens
aagagcttcttccta

SEQ ID NO: 908528 - DNA, 15 bp, Homo sapiens
taagagcttcttcct

SEQ ID NO: 908529 - DNA, 15 bp, Homo sapiens
ctaagagcttcttcc

SEQ ID NO: 908530 - DNA, 15 bp, Homo sapiens
tctaagagcttcttc

SEQ ID NO: 908531 - DNA, 15 bp, Homo sapiens
ctctaagagcttctt

SEQ ID NO: 908532 - DNA, 15 bp, Homo sapiens
gctctaagagcttct

SEQ ID NO: 908533 - DNA, 15 bp, Homo sapiens
tgctctaagagcttc

SEQ ID NO: 908534 - DNA, 15 bp, Homo sapiens
atgctctaagagctt

SEQ ID NO: 908535 - DNA, 15 bp, Homo sapiens
aatgctctaagagct

SEQ ID NO: 908536 - DNA, 15 bp, Homo sapiens
taatgctctaagagc

SEQ ID NO: 908537 - DNA, 15 bp, Homo sapiens
ataatgctctaagag

SEQ ID NO: 908538 - DNA, 15 bp, Homo sapiens
gataatgctctaaga

SEQ ID NO: 908539 - DNA, 15 bp, Homo sapiens
agataatgctctaag

SEQ ID NO: 908540 - DNA, 15 bp, Homo sapiens
cagataatgctctaa

SEQ ID NO: 908541 - DNA, 15 bp, Homo sapiens
acagataatgctcta

SEQ ID NO: 908542 - DNA, 15 bp, Homo sapiens
aacagataatgctct

SEQ ID NO: 908543 - DNA, 15 bp, Homo sapiens
aaacagataatgctc

SEQ ID NO: 908544 - DNA, 15 bp, Homo sapiens
taaacagataatgct

SEQ ID NO: 908545 - DNA, 15 bp, Homo sapiens
ctaaacagataatgc

SEQ ID NO: 908546 - DNA, 15 bp, Homo sapiens
gctaaacagataatg

SEQ ID NO: 908547 - DNA, 15 bp, Homo sapiens
agctaaacagataat

SEQ ID NO: 908548 - DNA, 15 bp, Homo sapiens
tagctaaacagataa

SEQ ID NO: 908549 - DNA, 15 bp, Homo sapiens
ttagctaaacagata

SEQ ID NO: 908550 - DNA, 15 bp, Homo sapiens
gttagctaaacagat

SEQ ID NO: 908551 - DNA, 15 bp, Homo sapiens
agttagctaaacaga

SEQ ID NO: 908552 - DNA, 15 bp, Homo sapiens
cagttagctaaacag

SEQ ID NO: 908553 - DNA, 15 bp, Homo sapiens
gcagttagctaaaca

SEQ ID NO: 908554 - DNA, 15 bp, Homo sapiens
tgcagttagctaaac

SEQ ID NO: 908555 - DNA, 15 bp, Homo sapiens
ttgcagttagctaaa

SEQ ID NO: 908556 - DNA, 15 bp, Homo sapiens
tttgcagttagctaa

SEQ ID NO: 908557 - DNA, 15 bp, Homo sapiens
ttttgcagttagcta

SEQ ID NO: 908558 - DNA, 15 bp, Homo sapiens
gttttgcagttagct

SEQ ID NO: 908559 - DNA, 15 bp, Homo sapiens
tgttttgcagttagc

SEQ ID NO: 908560 - DNA, 15 bp, Homo sapiens
atgttttgcagttag

SEQ ID NO: 908561 - DNA, 15 bp, Homo sapiens
tatgttttgcagtta

SEQ ID NO: 908562 - DNA, 15 bp, Homo sapiens
ctatgttttgcagtt

SEQ ID NO: 908563 - DNA, 15 bp, Homo sapiens
gctatgttttgcagt

SEQ ID NO: 908564 - DNA, 15 bp, Homo sapiens
tgctatgttttgcag

SEQ ID NO: 908565 - DNA, 15 bp, Homo sapiens
ctgctatgttttgca

SEQ ID NO: 908566 - DNA, 15 bp, Homo sapiens
tctgctatgttttgc

SEQ ID NO: 908567 - DNA, 15 bp, Homo sapiens
gtctgctatgttttg

SEQ ID NO: 908568 - DNA, 15 bp, Homo sapiens
tgtctgctatgtttt

SEQ ID NO: 908569 - DNA, 15 bp, Homo sapiens
atgtctgctatgttt

SEQ ID NO: 908570 - DNA, 15 bp, Homo sapiens
catgtctgctatgtt

SEQ ID NO: 908571 - DNA, 15 bp, Homo sapiens
acatgtctgctatgt

SEQ ID NO: 908572 - DNA, 15 bp, Homo sapiens
cacatgtctgctatg

SEQ ID NO: 908573 - DNA, 15 bp, Homo sapiens
ccacatgtctgctat

SEQ ID NO: 908574 - DNA, 15 bp, Homo sapiens
tccacatgtctgcta

SEQ ID NO: 908575 - DNA, 15 bp, Homo sapiens
atccacatgtctgct

SEQ ID NO: 908576 - DNA, 15 bp, Homo sapiens
aatccacatgtctgc

SEQ ID NO: 908577 - DNA, 15 bp, Homo sapiens
aaatccacatgtctg

SEQ ID NO: 908578 - DNA, 15 bp, Homo sapiens
aaaatccacatgtct

SEQ ID NO: 908579 - DNA, 15 bp, Homo sapiens
aaaaatccacatgtc

SEQ ID NO: 908580 - DNA, 15 bp, Homo sapiens
aaaaaatccacatgt

SEQ ID NO: 908581 - DNA, 15 bp, Homo sapiens
taaaaaatccacatg

SEQ ID NO: 908582 - DNA, 15 bp, Homo sapiens
ttaaaaaatccacat

SEQ ID NO: 908583 - DNA, 15 bp, Homo sapiens
attaaaaaatccaca

SEQ ID NO: 908584 - DNA, 15 bp, Homo sapiens
tattaaaaaatccac

SEQ ID NO: 908585 - DNA, 15 bp, Homo sapiens
ctattaaaaaatcca

SEQ ID NO: 908586 - DNA, 15 bp, Homo sapiens
actattaaaaaatcc

SEQ ID NO: 908587 - DNA, 15 bp, Homo sapiens
gactattaaaaaatc

SEQ ID NO: 908588 - DNA, 15 bp, Homo sapiens
tgactattaaaaaat

SEQ ID NO: 908589 - DNA, 15 bp, Homo sapiens
atgactattaaaaaa

SEQ ID NO: 908590 - DNA, 15 bp, Homo sapiens
gatgactattaaaaa

SEQ ID NO: 908591 - DNA, 15 bp, Homo sapiens
tgatgactattaaaa

SEQ ID NO: 908592 - DNA, 15 bp, Homo sapiens
ttgatgactattaaa

SEQ ID NO: 908593 - DNA, 15 bp, Homo sapiens
cttgatgactattaa

SEQ ID NO: 908594 - DNA, 15 bp, Homo sapiens
ccttgatgactatta

SEQ ID NO: 908595 - DNA, 15 bp, Homo sapiens
tccttgatgactatt

SEQ ID NO: 908596 - DNA, 15 bp, Homo sapiens
atccttgatgactat

SEQ ID NO: 908597 - DNA, 15 bp, Homo sapiens
gatccttgatgacta

SEQ ID NO: 908598 - DNA, 15 bp, Homo sapiens
agatccttgatgact

SEQ ID NO: 908599 - DNA, 15 bp, Homo sapiens
tagatccttgatgac

SEQ ID NO: 908600 - DNA, 15 bp, Homo sapiens
ttagatccttgatga

SEQ ID NO: 908601 - DNA, 15 bp, Homo sapiens
gttagatccttgatg

SEQ ID NO: 908602 - DNA, 15 bp, Homo sapiens
agttagatccttgat

SEQ ID NO: 908603 - DNA, 15 bp, Homo sapiens
aagttagatccttga

SEQ ID NO: 908604 - DNA, 15 bp, Homo sapiens
taagttagatccttg

SEQ ID NO: 908605 - DNA, 15 bp, Homo sapiens
ataagttagatcctt

SEQ ID NO: 908606 - DNA, 15 bp, Homo sapiens
tataagttagatcct

SEQ ID NO: 908607 - DNA, 15 bp, Homo sapiens
ttataagttagatcc

SEQ ID NO: 908608 - DNA, 15 bp, Homo sapiens
attataagttagatc

SEQ ID NO: 908609 - DNA, 15 bp, Homo sapiens
tattataagttagat

SEQ ID NO: 908610 - DNA, 15 bp, Homo sapiens
atattataagttaga

SEQ ID NO: 908611 - DNA, 15 bp, Homo sapiens
tatattataagttag

SEQ ID NO: 908612 - DNA, 15 bp, Homo sapiens
gtatattataagtta

SEQ ID NO: 908613 - DNA, 15 bp, Homo sapiens
tgtatattataagtt

SEQ ID NO: 908614 - DNA, 15 bp, Homo sapiens
gtgtatattataagt

SEQ ID NO: 908615 - DNA, 15 bp, Homo sapiens
agtgtatattataag

SEQ ID NO: 908616 - DNA, 15 bp, Homo sapiens
cagtgtatattataa

SEQ ID NO: 908617 - DNA, 15 bp, Homo sapiens
ccagtgtatattata

SEQ ID NO: 908618 - DNA, 15 bp, Homo sapiens
accagtgtatattat

SEQ ID NO: 908619 - DNA, 15 bp, Homo sapiens
taccagtgtatatta

SEQ ID NO: 908620 - DNA, 15 bp, Homo sapiens
ctaccagtgtatatt

SEQ ID NO: 908621 - DNA, 15 bp, Homo sapiens
tctaccagtgtatat

SEQ ID NO: 908622 - DNA, 15 bp, Homo sapiens
ttctaccagtgtata

SEQ ID NO: 908623 - DNA, 15 bp, Homo sapiens
attctaccagtgtat

SEQ ID NO: 908624 - DNA, 15 bp, Homo sapiens
aattctaccagtgta

SEQ ID NO: 908625 - DNA, 15 bp, Homo sapiens
caattctaccagtgt

SEQ ID NO: 908626 - DNA, 15 bp, Homo sapiens
gcaattctaccagtg

SEQ ID NO: 908627 - DNA, 15 bp, Homo sapiens
agcaattctaccagt

SEQ ID NO: 908628 - DNA, 15 bp, Homo sapiens
aagcaattctaccag

SEQ ID NO: 908629 - DNA, 15 bp, Homo sapiens
taagcaattctacca

SEQ ID NO: 908630 - DNA, 15 bp, Homo sapiens
ctaagcaattctacc

SEQ ID NO: 908631 - DNA, 15 bp, Homo sapiens
cctaagcaattctac

SEQ ID NO: 908632 - DNA, 15 bp, Homo sapiens
ccctaagcaattcta

SEQ ID NO: 908633 - DNA, 15 bp, Homo sapiens
cccctaagcaattct

SEQ ID NO: 908634 - DNA, 15 bp, Homo sapiens
ccccctaagcaattc

SEQ ID NO: 908635 - DNA, 15 bp, Homo sapiens
tccccctaagcaatt

SEQ ID NO: 908636 - DNA, 15 bp, Homo sapiens
atccccctaagcaat

SEQ ID NO: 908637 - DNA, 15 bp, Homo sapiens
catccccctaagcaa

SEQ ID NO: 908638 - DNA, 15 bp, Homo sapiens
acatccccctaagca

SEQ ID NO: 908639 - DNA, 15 bp, Homo sapiens
gacatccccctaagc

SEQ ID NO: 908640 - DNA, 15 bp, Homo sapiens
agacatccccctaag

SEQ ID NO: 908641 - DNA, 15 bp, Homo sapiens
cagacatccccctaa

SEQ ID NO: 908642 - DNA, 15 bp, Homo sapiens
acagacatcccccta

SEQ ID NO: 908643 - DNA, 15 bp, Homo sapiens
cacagacatccccct

SEQ ID NO: 908644 - DNA, 15 bp, Homo sapiens
ccacagacatccccc

SEQ ID NO: 908645 - DNA, 15 bp, Homo sapiens
accacagacatcccc

SEQ ID NO: 908646 - DNA, 15 bp, Homo sapiens
aaccacagacatccc

SEQ ID NO: 908647 - DNA, 15 bp, Homo sapiens
aaaccacagacatcc

SEQ ID NO: 908648 - DNA, 15 bp, Homo sapiens
aaaaccacagacatc

SEQ ID NO: 908649 - DNA, 15 bp, Homo sapiens
gaaaaccacagacat

SEQ ID NO: 908650 - DNA, 15 bp, Homo sapiens
agaaaaccacagaca

SEQ ID NO: 908651 - DNA, 15 bp, Homo sapiens
cagaaaaccacagac

SEQ ID NO: 908652 - DNA, 15 bp, Homo sapiens
ccagaaaaccacaga

SEQ ID NO: 908653 - DNA, 15 bp, Homo sapiens
tccagaaaaccacag

SEQ ID NO: 908654 - DNA, 15 bp, Homo sapiens
gtccagaaaaccaca

SEQ ID NO: 908655 - DNA, 15 bp, Homo sapiens
agtccagaaaaccac

SEQ ID NO: 908656 - DNA, 15 bp, Homo sapiens
aagtccagaaaacca

SEQ ID NO: 908657 - DNA, 15 bp, Homo sapiens
aaagtccagaaaacc

SEQ ID NO: 908658 - DNA, 15 bp, Homo sapiens
aaaagtccagaaaac

SEQ ID NO: 908659 - DNA, 15 bp, Homo sapiens
caaaagtccagaaaa

SEQ ID NO: 908660 - DNA, 15 bp, Homo sapiens
acaaaagtccagaaa

SEQ ID NO: 908661 - DNA, 15 bp, Homo sapiens
aacaaaagtccagaa

SEQ ID NO: 908662 - DNA, 15 bp, Homo sapiens
gaacaaaagtccaga

SEQ ID NO: 908663 - DNA, 15 bp, Homo sapiens
agaacaaaagtccag

SEQ ID NO: 908664 - DNA, 15 bp, Homo sapiens
aagaacaaaagtcca

SEQ ID NO: 908665 - DNA, 15 bp, Homo sapiens
gaagaacaaaagtcc

SEQ ID NO: 908666 - DNA, 15 bp, Homo sapiens
agaagaacaaaagtc

SEQ ID NO: 908667 - DNA, 15 bp, Homo sapiens
tagaagaacaaaagt

SEQ ID NO: 908668 - DNA, 15 bp, Homo sapiens
atagaagaacaaaag

SEQ ID NO: 908669 - DNA, 15 bp, Homo sapiens
tatagaagaacaaaa

SEQ ID NO: 908670 - DNA, 15 bp, Homo sapiens
atatagaagaacaaa

SEQ ID NO: 908671 - DNA, 15 bp, Homo sapiens
tatatagaagaacaa

SEQ ID NO: 908672 - DNA, 15 bp, Homo sapiens
ctatatagaagaaca

SEQ ID NO: 908673 - DNA, 15 bp, Homo sapiens
tctatatagaagaac

SEQ ID NO: 908674 - DNA, 15 bp, Homo sapiens
gtctatatagaagaa

SEQ ID NO: 908675 - DNA, 15 bp, Homo sapiens
ggtctatatagaaga

SEQ ID NO: 908676 - DNA, 15 bp, Homo sapiens
aggtctatatagaag

SEQ ID NO: 908677 - DNA, 15 bp, Homo sapiens
caggtctatatagaa

SEQ ID NO: 908678 - DNA, 15 bp, Homo sapiens
acaggtctatataga

SEQ ID NO: 908679 - DNA, 15 bp, Homo sapiens
tacaggtctatatag

SEQ ID NO: 908680 - DNA, 15 bp, Homo sapiens
atacaggtctatata

SEQ ID NO: 908681 - DNA, 15 bp, Homo sapiens
gatacaggtctatat

SEQ ID NO: 908682 - DNA, 15 bp, Homo sapiens
tgatacaggtctata

SEQ ID NO: 908683 - DNA, 15 bp, Homo sapiens
ctgatacaggtctat

SEQ ID NO: 908684 - DNA, 15 bp, Homo sapiens
actgatacaggtcta

SEQ ID NO: 908685 - DNA, 15 bp, Homo sapiens
aactgatacaggtct

SEQ ID NO: 908686 - DNA, 15 bp, Homo sapiens
caactgatacaggtc

SEQ ID NO: 908687 - DNA, 15 bp, Homo sapiens
tcaactgatacaggt

SEQ ID NO: 908688 - DNA, 15 bp, Homo sapiens
gtcaactgatacagg

SEQ ID NO: 908689 - DNA, 15 bp, Homo sapiens
agtcaactgatacag

SEQ ID NO: 908690 - DNA, 15 bp, Homo sapiens
aagtcaactgataca

SEQ ID NO: 908691 - DNA, 15 bp, Homo sapiens
taagtcaactgatac

SEQ ID NO: 908692 - DNA, 15 bp, Homo sapiens
ataagtcaactgata

SEQ ID NO: 908693 - DNA, 15 bp, Homo sapiens
gataagtcaactgat

SEQ ID NO: 908694 - DNA, 15 bp, Homo sapiens
tgataagtcaactga

SEQ ID NO: 908695 - DNA, 15 bp, Homo sapiens
atgataagtcaactg

SEQ ID NO: 908696 - DNA, 15 bp, Homo sapiens
aatgataagtcaact

SEQ ID NO: 908697 - DNA, 15 bp, Homo sapiens
gaatgataagtcaac

SEQ ID NO: 908698 - DNA, 15 bp, Homo sapiens
tgaatgataagtcaa

SEQ ID NO: 908699 - DNA, 15 bp, Homo sapiens
atgaatgataagtca

SEQ ID NO: 908700 - DNA, 15 bp, Homo sapiens
tatgaatgataagtc

SEQ ID NO: 908701 - DNA, 15 bp, Homo sapiens
gtatgaatgataagt

SEQ ID NO: 908702 - DNA, 15 bp, Homo sapiens
ggtatgaatgataag

SEQ ID NO: 908703 - DNA, 15 bp, Homo sapiens
tggtatgaatgataa

SEQ ID NO: 908704 - DNA, 15 bp, Homo sapiens
gtggtatgaatgata

SEQ ID NO: 908705 - DNA, 15 bp, Homo sapiens
tgtggtatgaatgat

SEQ ID NO: 908706 - DNA, 15 bp, Homo sapiens
gtgtggtatgaatga

SEQ ID NO: 908707 - DNA, 15 bp, Homo sapiens
tgtgtggtatgaatg

SEQ ID NO: 908708 - DNA, 15 bp, Homo sapiens
gtgtgtggtatgaat

SEQ ID NO: 908709 - DNA, 15 bp, Homo sapiens
ggtgtgtggtatgaa

SEQ ID NO: 908710 - DNA, 15 bp, Homo sapiens
gggtgtgtggtatga

SEQ ID NO: 908711 - DNA, 15 bp, Homo sapiens
agggtgtgtggtatg

SEQ ID NO: 908712 - DNA, 15 bp, Homo sapiens
aagggtgtgtggtat

SEQ ID NO: 908713 - DNA, 15 bp, Homo sapiens
taagggtgtgtggta

SEQ ID NO: 908714 - DNA, 15 bp, Homo sapiens
ctaagggtgtgtggt

SEQ ID NO: 908715 - DNA, 15 bp, Homo sapiens
gctaagggtgtgtgg

SEQ ID NO: 908716 - DNA, 15 bp, Homo sapiens
agctaagggtgtgtg

SEQ ID NO: 908717 - DNA, 15 bp, Homo sapiens
tagctaagggtgtgt

SEQ ID NO: 908718 - DNA, 15 bp, Homo sapiens
ttagctaagggtgtg

SEQ ID NO: 908719 - DNA, 15 bp, Homo sapiens
attagctaagggtgt

SEQ ID NO: 908720 - DNA, 15 bp, Homo sapiens
gattagctaagggtg

SEQ ID NO: 908721 - DNA, 15 bp, Homo sapiens
tgattagctaagggt

SEQ ID NO: 908722 - DNA, 15 bp, Homo sapiens
ctgattagctaaggg

SEQ ID NO: 908723 - DNA, 15 bp, Homo sapiens
tctgattagctaagg

SEQ ID NO: 908724 - DNA, 15 bp, Homo sapiens
ttctgattagctaag

SEQ ID NO: 908725 - DNA, 15 bp, Homo sapiens
gttctgattagctaa

SEQ ID NO: 908726 - DNA, 15 bp, Homo sapiens
agttctgattagcta

SEQ ID NO: 908727 - DNA, 15 bp, Homo sapiens
tagttctgattagct

SEQ ID NO: 908728 - DNA, 15 bp, Homo sapiens
gtagttctgattagc

SEQ ID NO: 908729 - DNA, 15 bp, Homo sapiens
ggtagttctgattag

SEQ ID NO: 908730 - DNA, 15 bp, Homo sapiens
aggtagttctgatta

SEQ ID NO: 908731 - DNA, 15 bp, Homo sapiens
aaggtagttctgatt

SEQ ID NO: 908732 - DNA, 15 bp, Homo sapiens
caaggtagttctgat

SEQ ID NO: 908733 - DNA, 15 bp, Homo sapiens
acaaggtagttctga

SEQ ID NO: 908734 - DNA, 15 bp, Homo sapiens
gacaaggtagttctg

SEQ ID NO: 908735 - DNA, 15 bp, Homo sapiens
ggacaaggtagttct

SEQ ID NO: 908736 - DNA, 15 bp, Homo sapiens
tggacaaggtagttc

SEQ ID NO: 908737 - DNA, 15 bp, Homo sapiens
atggacaaggtagtt

SEQ ID NO: 908738 - DNA, 15 bp, Homo sapiens
aatggacaaggtagt

SEQ ID NO: 908739 - DNA, 15 bp, Homo sapiens
aaatggacaaggtag

SEQ ID NO: 908740 - DNA, 15 bp, Homo sapiens
taaatggacaaggta

SEQ ID NO: 908741 - DNA, 15 bp, Homo sapiens
ataaatggacaaggt

SEQ ID NO: 908742 - DNA, 15 bp, Homo sapiens
tataaatggacaagg

SEQ ID NO: 908743 - DNA, 15 bp, Homo sapiens
atataaatggacaag

SEQ ID NO: 908744 - DNA, 15 bp, Homo sapiens
gatataaatggacaa

SEQ ID NO: 908745 - DNA, 15 bp, Homo sapiens
agatataaatggaca

SEQ ID NO: 908746 - DNA, 15 bp, Homo sapiens
aagatataaatggac

SEQ ID NO: 908747 - DNA, 15 bp, Homo sapiens
taagatataaatgga

SEQ ID NO: 908748 - DNA, 15 bp, Homo sapiens
ctaagatataaatgg

SEQ ID NO: 908749 - DNA, 15 bp, Homo sapiens
tctaagatataaatg

SEQ ID NO: 908750 - DNA, 15 bp, Homo sapiens
gtctaagatataaat

SEQ ID NO: 908751 - DNA, 15 bp, Homo sapiens
agtctaagatataaa

SEQ ID NO: 908752 - DNA, 15 bp, Homo sapiens
tagtctaagatataa

SEQ ID NO: 908753 - DNA, 15 bp, Homo sapiens
atagtctaagatata

SEQ ID NO: 908754 - DNA, 15 bp, Homo sapiens
aatagtctaagatat

SEQ ID NO: 908755 - DNA, 15 bp, Homo sapiens
caatagtctaagata

SEQ ID NO: 908756 - DNA, 15 bp, Homo sapiens
acaatagtctaagat

SEQ ID NO: 908757 - DNA, 15 bp, Homo sapiens
gacaatagtctaaga

SEQ ID NO: 908758 - DNA, 15 bp, Homo sapiens
agacaatagtctaag

SEQ ID NO: 908759 - DNA, 15 bp, Homo sapiens
aagacaatagtctaa

SEQ ID NO: 908760 - DNA, 15 bp, Homo sapiens
aaagacaatagtcta

SEQ ID NO: 908761 - DNA, 15 bp, Homo sapiens
aaaagacaatagtct

SEQ ID NO: 908762 - DNA, 15 bp, Homo sapiens
aaaaagacaatagtc

SEQ ID NO: 908763 - DNA, 15 bp, Homo sapiens
aaaaaagacaatagt

SEQ ID NO: 908764 - DNA, 15 bp, Homo sapiens
gaaaaaagacaatag

SEQ ID NO: 908765 - DNA, 15 bp, Homo sapiens
tgaaaaaagacaata

SEQ ID NO: 908766 - DNA, 15 bp, Homo sapiens
atgaaaaaagacaat

SEQ ID NO: 908767 - DNA, 15 bp, Homo sapiens
tatgaaaaaagacaa

SEQ ID NO: 908768 - DNA, 15 bp, Homo sapiens
ctatgaaaaaagaca

SEQ ID NO: 908769 - DNA, 15 bp, Homo sapiens
actatgaaaaaagac

SEQ ID NO: 908770 - DNA, 15 bp, Homo sapiens
gactatgaaaaaaga

SEQ ID NO: 908771 - DNA, 15 bp, Homo sapiens
tgactatgaaaaaag

SEQ ID NO: 908772 - DNA, 15 bp, Homo sapiens
gtgactatgaaaaaa

SEQ ID NO: 908773 - DNA, 15 bp, Homo sapiens
tgtgactatgaaaaa

SEQ ID NO: 908774 - DNA, 15 bp, Homo sapiens
gtgtgactatgaaaa

SEQ ID NO: 908775 - DNA, 15 bp, Homo sapiens
tgtgtgactatgaaa

SEQ ID NO: 908776 - DNA, 15 bp, Homo sapiens
gtgtgtgactatgaa

SEQ ID NO: 908777 - DNA, 15 bp, Homo sapiens
tgtgtgtgactatga

SEQ ID NO: 908778 - DNA, 15 bp, Homo sapiens
ctgtgtgtgactatg

SEQ ID NO: 908779 - DNA, 15 bp, Homo sapiens
tctgtgtgtgactat

SEQ ID NO: 908780 - DNA, 15 bp, Homo sapiens
ctctgtgtgtgacta

SEQ ID NO: 908781 - DNA, 15 bp, Homo sapiens
tctctgtgtgtgact

SEQ ID NO: 908782 - DNA, 15 bp, Homo sapiens
ttctctgtgtgtgac

SEQ ID NO: 908783 - DNA, 15 bp, Homo sapiens
tttctctgtgtgtga

SEQ ID NO: 908784 - DNA, 15 bp, Homo sapiens
ttttctctgtgtgtg

SEQ ID NO: 908785 - DNA, 15 bp, Homo sapiens
gttttctctgtgtgt

SEQ ID NO: 908786 - DNA, 15 bp, Homo sapiens
agttttctctgtgtg

SEQ ID NO: 908787 - DNA, 15 bp, Homo sapiens
aagttttctctgtgt

SEQ ID NO: 908788 - DNA, 15 bp, Homo sapiens
caagttttctctgtg

SEQ ID NO: 908789 - DNA, 15 bp, Homo sapiens
tcaagttttctctgt

SEQ ID NO: 908790 - DNA, 15 bp, Homo sapiens
ttcaagttttctctg

SEQ ID NO: 908791 - DNA, 15 bp, Homo sapiens
attcaagttttctct

SEQ ID NO: 908792 - DNA, 15 bp, Homo sapiens
tattcaagttttctc

SEQ ID NO: 908793 - DNA, 15 bp, Homo sapiens
atattcaagttttct

SEQ ID NO: 908794 - DNA, 15 bp, Homo sapiens
tatattcaagttttc

SEQ ID NO: 908795 - DNA, 15 bp, Homo sapiens
atatattcaagtttt

SEQ ID NO: 908796 - DNA, 15 bp, Homo sapiens
catatattcaagttt

SEQ ID NO: 908797 - DNA, 15 bp, Homo sapiens
ccatatattcaagtt

SEQ ID NO: 908798 - DNA, 15 bp, Homo sapiens
gccatatattcaagt

SEQ ID NO: 908799 - DNA, 15 bp, Homo sapiens
ggccatatattcaag

SEQ ID NO: 908800 - DNA, 15 bp, Homo sapiens
aggccatatattcaa

SEQ ID NO: 908801 - DNA, 15 bp, Homo sapiens
caggccatatattca

SEQ ID NO: 908802 - DNA, 15 bp, Homo sapiens
acaggccatatattc

SEQ ID NO: 908803 - DNA, 15 bp, Homo sapiens
cacaggccatatatt

SEQ ID NO: 908804 - DNA, 15 bp, Homo sapiens
acacaggccatatat

SEQ ID NO: 908805 - DNA, 15 bp, Homo sapiens
aacacaggccatata

SEQ ID NO: 908806 - DNA, 15 bp, Homo sapiens
gaacacaggccatat

SEQ ID NO: 908807 - DNA, 15 bp, Homo sapiens
ggaacacaggccata

SEQ ID NO: 908808 - DNA, 15 bp, Homo sapiens
aggaacacaggccat

SEQ ID NO: 908809 - DNA, 15 bp, Homo sapiens
aaggaacacaggcca

SEQ ID NO: 908810 - DNA, 15 bp, Homo sapiens
aaaggaacacaggcc

SEQ ID NO: 908811 - DNA, 15 bp, Homo sapiens
aaaaggaacacaggc

SEQ ID NO: 908812 - DNA, 15 bp, Homo sapiens
aaaaaggaacacagg

SEQ ID NO: 908813 - DNA, 15 bp, Homo sapiens
caaaaaggaacacag

SEQ ID NO: 908814 - DNA, 15 bp, Homo sapiens
ccaaaaaggaacaca

SEQ ID NO: 908815 - DNA, 15 bp, Homo sapiens
gccaaaaaggaacac

SEQ ID NO: 908816 - DNA, 15 bp, Homo sapiens
agccaaaaaggaaca

SEQ ID NO: 908817 - DNA, 15 bp, Homo sapiens
cagccaaaaaggaac

SEQ ID NO: 908818 - DNA, 15 bp, Homo sapiens
gcagccaaaaaggaa

SEQ ID NO: 908819 - DNA, 15 bp, Homo sapiens
agcagccaaaaagga

SEQ ID NO: 908820 - DNA, 15 bp, Homo sapiens
gagcagccaaaaagg

SEQ ID NO: 908821 - DNA, 15 bp, Homo sapiens
tgagcagccaaaaag

SEQ ID NO: 908822 - DNA, 15 bp, Homo sapiens
ttgagcagccaaaaa

SEQ ID NO: 908823 - DNA, 15 bp, Homo sapiens
attgagcagccaaaa

SEQ ID NO: 908824 - DNA, 15 bp, Homo sapiens
aattgagcagccaaa

SEQ ID NO: 908825 - DNA, 15 bp, Homo sapiens
gaattgagcagccaa

SEQ ID NO: 908826 - DNA, 15 bp, Homo sapiens
ggaattgagcagcca

SEQ ID NO: 908827 - DNA, 15 bp, Homo sapiens
aggaattgagcagcc

SEQ ID NO: 908828 - DNA, 15 bp, Homo sapiens
aaggaattgagcagc

SEQ ID NO: 908829 - DNA, 15 bp, Homo sapiens
caaggaattgagcag

SEQ ID NO: 908830 - DNA, 15 bp, Homo sapiens
tcaaggaattgagca

SEQ ID NO: 908831 - DNA, 15 bp, Homo sapiens
ctcaaggaattgagc

SEQ ID NO: 908832 - DNA, 15 bp, Homo sapiens
tctcaaggaattgag

SEQ ID NO: 908833 - DNA, 15 bp, Homo sapiens
atctcaaggaattga

SEQ ID NO: 908834 - DNA, 15 bp, Homo sapiens
catctcaaggaattg

SEQ ID NO: 908835 - DNA, 15 bp, Homo sapiens
tcatctcaaggaatt

SEQ ID NO: 908836 - DNA, 15 bp, Homo sapiens
ttcatctcaaggaat

SEQ ID NO: 908837 - DNA, 15 bp, Homo sapiens
tttcatctcaaggaa

SEQ ID NO: 908838 - DNA, 15 bp, Homo sapiens
atttcatctcaagga

SEQ ID NO: 908839 - DNA, 15 bp, Homo sapiens
tatttcatctcaagg

SEQ ID NO: 908840 - DNA, 15 bp, Homo sapiens
atatttcatctcaag

SEQ ID NO: 908841 - DNA, 15 bp, Homo sapiens
catatttcatctcaa

SEQ ID NO: 908842 - DNA, 15 bp, Homo sapiens
ccatatttcatctca

SEQ ID NO: 908843 - DNA, 15 bp, Homo sapiens
cccatatttcatctc

SEQ ID NO: 908844 - DNA, 15 bp, Homo sapiens
acccatatttcatct

SEQ ID NO: 908845 - DNA, 15 bp, Homo sapiens
tacccatatttcatc

SEQ ID NO: 908846 - DNA, 15 bp, Homo sapiens
atacccatatttcat

SEQ ID NO: 908847 - DNA, 15 bp, Homo sapiens
catacccatatttca

SEQ ID NO: 908848 - DNA, 15 bp, Homo sapiens
ccatacccatatttc

SEQ ID NO: 908849 - DNA, 15 bp, Homo sapiens
cccatacccatattt

SEQ ID NO: 908850 - DNA, 15 bp, Homo sapiens
acccatacccatatt

SEQ ID NO: 908851 - DNA, 15 bp, Homo sapiens
aacccatacccatat

SEQ ID NO: 908852 - DNA, 15 bp, Homo sapiens
caacccatacccata

SEQ ID NO: 908853 - DNA, 15 bp, Homo sapiens
gcaacccatacccat

SEQ ID NO: 908854 - DNA, 15 bp, Homo sapiens
agcaacccataccca

SEQ ID NO: 908855 - DNA, 15 bp, Homo sapiens
aagcaacccataccc

SEQ ID NO: 908856 - DNA, 15 bp, Homo sapiens
aaagcaacccatacc

SEQ ID NO: 908857 - DNA, 15 bp, Homo sapiens
caaagcaacccatac

SEQ ID NO: 908858 - DNA, 15 bp, Homo sapiens
ccaaagcaacccata

SEQ ID NO: 908859 - DNA, 15 bp, Homo sapiens
gccaaagcaacccat

SEQ ID NO: 908860 - DNA, 15 bp, Homo sapiens
tgccaaagcaaccca

SEQ ID NO: 908861 - DNA, 15 bp, Homo sapiens
ttgccaaagcaaccc

SEQ ID NO: 908862 - DNA, 15 bp, Homo sapiens
attgccaaagcaacc

SEQ ID NO: 908863 - DNA, 15 bp, Homo sapiens
aattgccaaagcaac

SEQ ID NO: 908864 - DNA, 15 bp, Homo sapiens
taattgccaaagcaa

SEQ ID NO: 908865 - DNA, 15 bp, Homo sapiens
gtaattgccaaagca

SEQ ID NO: 908866 - DNA, 15 bp, Homo sapiens
agtaattgccaaagc

SEQ ID NO: 908867 - DNA, 15 bp, Homo sapiens
aagtaattgccaaag

SEQ ID NO: 908868 - DNA, 15 bp, Homo sapiens
gaagtaattgccaaa

SEQ ID NO: 908869 - DNA, 15 bp, Homo sapiens
agaagtaattgccaa

SEQ ID NO: 908870 - DNA, 15 bp, Homo sapiens
aagaagtaattgcca

SEQ ID NO: 908871 - DNA, 15 bp, Homo sapiens
aaagaagtaattgcc

SEQ ID NO: 908872 - DNA, 15 bp, Homo sapiens
caaagaagtaattgc

SEQ ID NO: 908873 - DNA, 15 bp, Homo sapiens
gcaaagaagtaattg

SEQ ID NO: 908874 - DNA, 15 bp, Homo sapiens
ggcaaagaagtaatt

SEQ ID NO: 908875 - DNA, 15 bp, Homo sapiens
cggcaaagaagtaat

SEQ ID NO: 908876 - DNA, 15 bp, Homo sapiens
acggcaaagaagtaa

SEQ ID NO: 908877 - DNA, 15 bp, Homo sapiens
aacggcaaagaagta

SEQ ID NO: 908878 - DNA, 15 bp, Homo sapiens
taacggcaaagaagt

SEQ ID NO: 908879 - DNA, 15 bp, Homo sapiens
ttaacggcaaagaag

SEQ ID NO: 908880 - DNA, 15 bp, Homo sapiens
gttaacggcaaagaa

SEQ ID NO: 908881 - DNA, 15 bp, Homo sapiens
ggttaacggcaaaga

SEQ ID NO: 908882 - DNA, 15 bp, Homo sapiens
tggttaacggcaaag

SEQ ID NO: 908883 - DNA, 15 bp, Homo sapiens
ctggttaacggcaaa

SEQ ID NO: 908884 - DNA, 15 bp, Homo sapiens
actggttaacggcaa

SEQ ID NO: 908885 - DNA, 15 bp, Homo sapiens
gactggttaacggca

SEQ ID NO: 908886 - DNA, 15 bp, Homo sapiens
tgactggttaacggc

SEQ ID NO: 908887 - DNA, 15 bp, Homo sapiens
atgactggttaacgg

SEQ ID NO: 908888 - DNA, 15 bp, Homo sapiens
aatgactggttaacg

SEQ ID NO: 908889 - DNA, 15 bp, Homo sapiens
gaatgactggttaac

SEQ ID NO: 908890 - DNA, 15 bp, Homo sapiens
tgaatgactggttaa

SEQ ID NO: 908891 - DNA, 15 bp, Homo sapiens
ctgaatgactggtta

SEQ ID NO: 908892 - DNA, 15 bp, Homo sapiens
actgaatgactggtt

SEQ ID NO: 908893 - DNA, 15 bp, Homo sapiens
aactgaatgactggt

SEQ ID NO: 908894 - DNA, 15 bp, Homo sapiens
aaactgaatgactgg

SEQ ID NO: 908895 - DNA, 15 bp, Homo sapiens
aaaactgaatgactg

SEQ ID NO: 908896 - DNA, 15 bp, Homo sapiens
taaaactgaatgact

SEQ ID NO: 908897 - DNA, 15 bp, Homo sapiens
ataaaactgaatgac

SEQ ID NO: 908898 - DNA, 15 bp, Homo sapiens
aataaaactgaatga

SEQ ID NO: 908899 - DNA, 15 bp, Homo sapiens
caataaaactgaatg

SEQ ID NO: 908900 - DNA, 15 bp, Homo sapiens
tcaataaaactgaat

SEQ ID NO: 908901 - DNA, 15 bp, Homo sapiens
ctcaataaaactgaa

SEQ ID NO: 908902 - DNA, 15 bp, Homo sapiens
actcaataaaactga

SEQ ID NO: 908903 - DNA, 15 bp, Homo sapiens
gactcaataaaactg

SEQ ID NO: 908904 - DNA, 15 bp, Homo sapiens
agactcaataaaact

SEQ ID NO: 908905 - DNA, 15 bp, Homo sapiens
aagactcaataaaac

SEQ ID NO: 908906 - DNA, 15 bp, Homo sapiens
aaagactcaataaaa

SEQ ID NO: 908907 - DNA, 15 bp, Homo sapiens
taaagactcaataaa

SEQ ID NO: 908908 - DNA, 15 bp, Homo sapiens
gtaaagactcaataa

SEQ ID NO: 908909 - DNA, 15 bp, Homo sapiens
tgtaaagactcaata

SEQ ID NO: 908910 - DNA, 15 bp, Homo sapiens
ctgtaaagactcaat

SEQ ID NO: 908911 - DNA, 15 bp, Homo sapiens
gctgtaaagactcaa

SEQ ID NO: 908912 - DNA, 15 bp, Homo sapiens
tgctgtaaagactca

SEQ ID NO: 908913 - DNA, 15 bp, Homo sapiens
atgctgtaaagactc

SEQ ID NO: 908914 - DNA, 15 bp, Homo sapiens
tatgctgtaaagact

SEQ ID NO: 908915 - DNA, 15 bp, Homo sapiens
gtatgctgtaaagac

SEQ ID NO: 908916 - DNA, 15 bp, Homo sapiens
ggtatgctgtaaaga

SEQ ID NO: 908917 - DNA, 15 bp, Homo sapiens
tggtatgctgtaaag

SEQ ID NO: 908918 - DNA, 15 bp, Homo sapiens
ctggtatgctgtaaa

SEQ ID NO: 908919 - DNA, 15 bp, Homo sapiens
tctggtatgctgtaa

SEQ ID NO: 908920 - DNA, 15 bp, Homo sapiens
ctctggtatgctgta

SEQ ID NO: 908921 - DNA, 15 bp, Homo sapiens
cctctggtatgctgt

SEQ ID NO: 908922 - DNA, 15 bp, Homo sapiens
gcctctggtatgctg

SEQ ID NO: 908923 - DNA, 15 bp, Homo sapiens
agcctctggtatgct

SEQ ID NO: 908924 - DNA, 15 bp, Homo sapiens
cagcctctggtatgc

SEQ ID NO: 908925 - DNA, 15 bp, Homo sapiens
gcagcctctggtatg

SEQ ID NO: 908926 - DNA, 15 bp, Homo sapiens
agcagcctctggtat

SEQ ID NO: 908927 - DNA, 15 bp, Homo sapiens
tagcagcctctggta

SEQ ID NO: 908928 - DNA, 15 bp, Homo sapiens
ctagcagcctctggt

SEQ ID NO: 908929 - DNA, 15 bp, Homo sapiens
actagcagcctctgg

SEQ ID NO: 908930 - DNA, 15 bp, Homo sapiens
aactagcagcctctg

SEQ ID NO: 908931 - DNA, 15 bp, Homo sapiens
taactagcagcctct

SEQ ID NO: 908932 - DNA, 15 bp, Homo sapiens
gtaactagcagcctc

SEQ ID NO: 908933 - DNA, 15 bp, Homo sapiens
agtaactagcagcct

SEQ ID NO: 908934 - DNA, 15 bp, Homo sapiens
tagtaactagcagcc

SEQ ID NO: 908935 - DNA, 15 bp, Homo sapiens
ctagtaactagcagc

SEQ ID NO: 908936 - DNA, 15 bp, Homo sapiens
actagtaactagcag

SEQ ID NO: 908937 - DNA, 15 bp, Homo sapiens
cactagtaactagca

SEQ ID NO: 908938 - DNA, 15 bp, Homo sapiens
tcactagtaactagc

SEQ ID NO: 908939 - DNA, 15 bp, Homo sapiens
atcactagtaactag

SEQ ID NO: 908940 - DNA, 15 bp, Homo sapiens
tatcactagtaacta

SEQ ID NO: 908941 - DNA, 15 bp, Homo sapiens
atatcactagtaact

SEQ ID NO: 908942 - DNA, 15 bp, Homo sapiens
tatatcactagtaac

SEQ ID NO: 908943 - DNA, 15 bp, Homo sapiens
ctatatcactagtaa

SEQ ID NO: 908944 - DNA, 15 bp, Homo sapiens
actatatcactagta

SEQ ID NO: 908945 - DNA, 15 bp, Homo sapiens
cactatatcactagt

SEQ ID NO: 908946 - DNA, 15 bp, Homo sapiens
ccactatatcactag

SEQ ID NO: 908947 - DNA, 15 bp, Homo sapiens
cccactatatcacta

SEQ ID NO: 908948 - DNA, 15 bp, Homo sapiens
gcccactatatcact

SEQ ID NO: 908949 - DNA, 15 bp, Homo sapiens
tgcccactatatcac

SEQ ID NO: 908950 - DNA, 15 bp, Homo sapiens
ttgcccactatatca

SEQ ID NO: 908951 - DNA, 15 bp, Homo sapiens
gttgcccactatatc

SEQ ID NO: 908952 - DNA, 15 bp, Homo sapiens
agttgcccactatat

SEQ ID NO: 908953 - DNA, 15 bp, Homo sapiens
tagttgcccactata

SEQ ID NO: 908954 - DNA, 15 bp, Homo sapiens
atagttgcccactat

SEQ ID NO: 908955 - DNA, 15 bp, Homo sapiens
catagttgcccacta

SEQ ID NO: 908956 - DNA, 15 bp, Homo sapiens
acatagttgcccact

SEQ ID NO: 908957 - DNA, 15 bp, Homo sapiens
aacatagttgcccac

SEQ ID NO: 908958 - DNA, 15 bp, Homo sapiens
gaacatagttgccca

SEQ ID NO: 908959 - DNA, 15 bp, Homo sapiens
agaacatagttgccc

SEQ ID NO: 908960 - DNA, 15 bp, Homo sapiens
cagaacatagttgcc

SEQ ID NO: 908961 - DNA, 15 bp, Homo sapiens
ccagaacatagttgc

SEQ ID NO: 908962 - DNA, 15 bp, Homo sapiens
accagaacatagttg

SEQ ID NO: 908963 - DNA, 15 bp, Homo sapiens
aaccagaacatagtt

SEQ ID NO: 908964 - DNA, 15 bp, Homo sapiens
gaaccagaacatagt

SEQ ID NO: 908965 - DNA, 15 bp, Homo sapiens
agaaccagaacatag

SEQ ID NO: 908966 - DNA, 15 bp, Homo sapiens
gagaaccagaacata

SEQ ID NO: 908967 - DNA, 15 bp, Homo sapiens
tgagaaccagaacat

SEQ ID NO: 908968 - DNA, 15 bp, Homo sapiens
ttgagaaccagaaca

SEQ ID NO: 908969 - DNA, 15 bp, Homo sapiens
cttgagaaccagaac

SEQ ID NO: 908970 - DNA, 15 bp, Homo sapiens
tcttgagaaccagaa

SEQ ID NO: 908971 - DNA, 15 bp, Homo sapiens
ttcttgagaaccaga

SEQ ID NO: 908972 - DNA, 15 bp, Homo sapiens
attcttgagaaccag

SEQ ID NO: 908973 - DNA, 15 bp, Homo sapiens
tattcttgagaacca

SEQ ID NO: 908974 - DNA, 15 bp, Homo sapiens
atattcttgagaacc

SEQ ID NO: 908975 - DNA, 15 bp, Homo sapiens
aatattcttgagaac

SEQ ID NO: 908976 - DNA, 15 bp, Homo sapiens
gaatattcttgagaa

SEQ ID NO: 908977 - DNA, 15 bp, Homo sapiens
tgaatattcttgaga

SEQ ID NO: 908978 - DNA, 15 bp, Homo sapiens
atgaatattcttgag

SEQ ID NO: 908979 - DNA, 15 bp, Homo sapiens
tatgaatattcttga

SEQ ID NO: 908980 - DNA, 15 bp, Homo sapiens
ctatgaatattcttg

SEQ ID NO: 908981 - DNA, 15 bp, Homo sapiens
actatgaatattctt

SEQ ID NO: 908982 - DNA, 15 bp, Homo sapiens
gactatgaatattct

SEQ ID NO: 908983 - DNA, 15 bp, Homo sapiens
tgactatgaatattc

SEQ ID NO: 908984 - DNA, 15 bp, Homo sapiens
ttgactatgaatatt

SEQ ID NO: 908985 - DNA, 15 bp, Homo sapiens
attgactatgaatat

SEQ ID NO: 908986 - DNA, 15 bp, Homo sapiens
tattgactatgaata

SEQ ID NO: 908987 - DNA, 15 bp, Homo sapiens
ttattgactatgaat

SEQ ID NO: 908988 - DNA, 15 bp, Homo sapiens
attattgactatgaa

SEQ ID NO: 908989 - DNA, 15 bp, Homo sapiens
tattattgactatga

SEQ ID NO: 908990 - DNA, 15 bp, Homo sapiens
ttattattgactatg

SEQ ID NO: 908991 - DNA, 15 bp, Homo sapiens
cttattattgactat

SEQ ID NO: 908992 - DNA, 15 bp, Homo sapiens
gcttattattgacta

SEQ ID NO: 908993 - DNA, 15 bp, Homo sapiens
tgcttattattgact

SEQ ID NO: 908994 - DNA, 15 bp, Homo sapiens
atgcttattattgac

SEQ ID NO: 908995 - DNA, 15 bp, Homo sapiens
tatgcttattattga

SEQ ID NO: 908996 - DNA, 15 bp, Homo sapiens
ttatgcttattattg

SEQ ID NO: 908997 - DNA, 15 bp, Homo sapiens
gttatgcttattatt

SEQ ID NO: 908998 - DNA, 15 bp, Homo sapiens
tgttatgcttattat

SEQ ID NO: 908999 - DNA, 15 bp, Homo sapiens
atgttatgcttatta

SEQ ID NO: 909000 - DNA, 15 bp, Homo sapiens
tatgttatgcttatt

SEQ ID NO: 909001 - DNA, 15 bp, Homo sapiens
ctatgttatgcttat

SEQ ID NO: 909002 - DNA, 15 bp, Homo sapiens
actatgttatgctta

SEQ ID NO: 909003 - DNA, 15 bp, Homo sapiens
cactatgttatgctt

SEQ ID NO: 909004 - DNA, 15 bp, Homo sapiens
tcactatgttatgct

SEQ ID NO: 909005 - DNA, 15 bp, Homo sapiens
atcactatgttatgc

SEQ ID NO: 909006 - DNA, 15 bp, Homo sapiens
tatcactatgttatg

SEQ ID NO: 909007 - DNA, 15 bp, Homo sapiens
ttatcactatgttat

SEQ ID NO: 909008 - DNA, 15 bp, Homo sapiens
attatcactatgtta

SEQ ID NO: 909009 - DNA, 15 bp, Homo sapiens
tattatcactatgtt

SEQ ID NO: 909010 - DNA, 15 bp, Homo sapiens
atattatcactatgt

SEQ ID NO: 909011 - DNA, 15 bp, Homo sapiens
catattatcactatg

SEQ ID NO: 909012 - DNA, 15 bp, Homo sapiens
tcatattatcactat

SEQ ID NO: 909013 - DNA, 15 bp, Homo sapiens
atcatattatcacta

SEQ ID NO: 909014 - DNA, 15 bp, Homo sapiens
tatcatattatcact

SEQ ID NO: 909015 - DNA, 15 bp, Homo sapiens
gtatcatattatcac

SEQ ID NO: 909016 - DNA, 15 bp, Homo sapiens
agtatcatattatca

SEQ ID NO: 909017 - DNA, 15 bp, Homo sapiens
aagtatcatattatc

SEQ ID NO: 909018 - DNA, 15 bp, Homo sapiens
taagtatcatattat

SEQ ID NO: 909019 - DNA, 15 bp, Homo sapiens
ctaagtatcatatta

SEQ ID NO: 909020 - DNA, 15 bp, Homo sapiens
cctaagtatcatatt

SEQ ID NO: 909021 - DNA, 15 bp, Homo sapiens
ccctaagtatcatat

SEQ ID NO: 909022 - DNA, 15 bp, Homo sapiens
tccctaagtatcata

SEQ ID NO: 909023 - DNA, 15 bp, Homo sapiens
ctccctaagtatcat

SEQ ID NO: 909024 - DNA, 15 bp, Homo sapiens
tctccctaagtatca

SEQ ID NO: 909025 - DNA, 15 bp, Homo sapiens
atctccctaagtatc

SEQ ID NO: 909026 - DNA, 15 bp, Homo sapiens
tatctccctaagtat

SEQ ID NO: 909027 - DNA, 15 bp, Homo sapiens
gtatctccctaagta

SEQ ID NO: 909028 - DNA, 15 bp, Homo sapiens
tgtatctccctaagt

SEQ ID NO: 909029 - DNA, 15 bp, Homo sapiens
atgtatctccctaag

SEQ ID NO: 909030 - DNA, 15 bp, Homo sapiens
tatgtatctccctaa

SEQ ID NO: 909031 - DNA, 15 bp, Homo sapiens
ttatgtatctcccta

SEQ ID NO: 909032 - DNA, 15 bp, Homo sapiens
cttatgtatctccct

SEQ ID NO: 909033 - DNA, 15 bp, Homo sapiens
ccttatgtatctccc

SEQ ID NO: 909034 - DNA, 15 bp, Homo sapiens
accttatgtatctcc

SEQ ID NO: 909035 - DNA, 15 bp, Homo sapiens
gaccttatgtatctc

SEQ ID NO: 909036 - DNA, 15 bp, Homo sapiens
tgaccttatgtatct

SEQ ID NO: 909037 - DNA, 15 bp, Homo sapiens
atgaccttatgtatc

SEQ ID NO: 909038 - DNA, 15 bp, Homo sapiens
tatgaccttatgtat

SEQ ID NO: 909039 - DNA, 15 bp, Homo sapiens
atatgaccttatgta

SEQ ID NO: 909040 - DNA, 15 bp, Homo sapiens
aatatgaccttatgt

SEQ ID NO: 909041 - DNA, 15 bp, Homo sapiens
gaatatgaccttatg

SEQ ID NO: 909042 - DNA, 15 bp, Homo sapiens
agaatatgaccttat

SEQ ID NO: 909043 - DNA, 15 bp, Homo sapiens
cagaatatgacctta

SEQ ID NO: 909044 - DNA, 15 bp, Homo sapiens
ccagaatatgacctt

SEQ ID NO: 909045 - DNA, 15 bp, Homo sapiens
gccagaatatgacct

SEQ ID NO: 909046 - DNA, 15 bp, Homo sapiens
tgccagaatatgacc

SEQ ID NO: 909047 - DNA, 15 bp, Homo sapiens
atgccagaatatgac

SEQ ID NO: 909048 - DNA, 15 bp, Homo sapiens
tatgccagaatatga

SEQ ID NO: 909049 - DNA, 15 bp, Homo sapiens
gtatgccagaatatg

SEQ ID NO: 909050 - DNA, 15 bp, Homo sapiens
agtatgccagaatat

SEQ ID NO: 909051 - DNA, 15 bp, Homo sapiens
gagtatgccagaata

SEQ ID NO: 909052 - DNA, 15 bp, Homo sapiens
agagtatgccagaat

SEQ ID NO: 909053 - DNA, 15 bp, Homo sapiens
cagagtatgccagaa

SEQ ID NO: 909054 - DNA, 15 bp, Homo sapiens
ccagagtatgccaga

SEQ ID NO: 909055 - DNA, 15 bp, Homo sapiens
tccagagtatgccag

SEQ ID NO: 909056 - DNA, 15 bp, Homo sapiens
ctccagagtatgcca

SEQ ID NO: 909057 - DNA, 15 bp, Homo sapiens
tctccagagtatgcc

SEQ ID NO: 909058 - DNA, 15 bp, Homo sapiens
ctctccagagtatgc

SEQ ID NO: 909059 - DNA, 15 bp, Homo sapiens
tctctccagagtatg

SEQ ID NO: 909060 - DNA, 15 bp, Homo sapiens
ctctctccagagtat

SEQ ID NO: 909061 - DNA, 15 bp, Homo sapiens
tctctctccagagta

SEQ ID NO: 909062 - DNA, 15 bp, Homo sapiens
atctctctccagagt

SEQ ID NO: 909063 - DNA, 15 bp, Homo sapiens
tatctctctccagag

SEQ ID NO: 909064 - DNA, 15 bp, Homo sapiens
gtatctctctccaga

SEQ ID NO: 909065 - DNA, 15 bp, Homo sapiens
ggtatctctctccag

SEQ ID NO: 909066 - DNA, 15 bp, Homo sapiens
cggtatctctctcca

SEQ ID NO: 909067 - DNA, 15 bp, Homo sapiens
acggtatctctctcc

SEQ ID NO: 909068 - DNA, 15 bp, Homo sapiens
tacggtatctctctc

SEQ ID NO: 909069 - DNA, 15 bp, Homo sapiens
ttacggtatctctct

SEQ ID NO: 909070 - DNA, 15 bp, Homo sapiens
attacggtatctctc

SEQ ID NO: 909071 - DNA, 15 bp, Homo sapiens
gattacggtatctct

SEQ ID NO: 909072 - DNA, 15 bp, Homo sapiens
tgattacggtatctc

SEQ ID NO: 909073 - DNA, 15 bp, Homo sapiens
ctgattacggtatct

SEQ ID NO: 909074 - DNA, 15 bp, Homo sapiens
gctgattacggtatc

SEQ ID NO: 909075 - DNA, 15 bp, Homo sapiens
ggctgattacggtat

SEQ ID NO: 909076 - DNA, 15 bp, Homo sapiens
aggctgattacggta

SEQ ID NO: 909077 - DNA, 15 bp, Homo sapiens
aaggctgattacggt

SEQ ID NO: 909078 - DNA, 15 bp, Homo sapiens
caaggctgattacgg

SEQ ID NO: 909079 - DNA, 15 bp, Homo sapiens
tcaaggctgattacg

SEQ ID NO: 909080 - DNA, 15 bp, Homo sapiens
ctcaaggctgattac

SEQ ID NO: 909081 - DNA, 15 bp, Homo sapiens
cctcaaggctgatta

SEQ ID NO: 909082 - DNA, 15 bp, Homo sapiens
acctcaaggctgatt

SEQ ID NO: 909083 - DNA, 15 bp, Homo sapiens
cacctcaaggctgat

SEQ ID NO: 909084 - DNA, 15 bp, Homo sapiens
gcacctcaaggctga

SEQ ID NO: 909085 - DNA, 15 bp, Homo sapiens
tgcacctcaaggctg

SEQ ID NO: 909086 - DNA, 15 bp, Homo sapiens
ctgcacctcaaggct

SEQ ID NO: 909087 - DNA, 15 bp, Homo sapiens
cctgcacctcaaggc

SEQ ID NO: 909088 - DNA, 15 bp, Homo sapiens
tcctgcacctcaagg

SEQ ID NO: 909089 - DNA, 15 bp, Homo sapiens
atcctgcacctcaag

SEQ ID NO: 909090 - DNA, 15 bp, Homo sapiens
catcctgcacctcaa

SEQ ID NO: 909091 - DNA, 15 bp, Homo sapiens
acatcctgcacctca

SEQ ID NO: 909092 - DNA, 15 bp, Homo sapiens
cacatcctgcacctc

SEQ ID NO: 909093 - DNA, 15 bp, Homo sapiens
tcacatcctgcacct

SEQ ID NO: 909094 - DNA, 15 bp, Homo sapiens
atcacatcctgcacc

SEQ ID NO: 909095 - DNA, 15 bp, Homo sapiens
gatcacatcctgcac

SEQ ID NO: 909096 - DNA, 15 bp, Homo sapiens
agatcacatcctgca

SEQ ID NO: 909097 - DNA, 15 bp, Homo sapiens
cagatcacatcctgc

SEQ ID NO: 909098 - DNA, 15 bp, Homo sapiens
acagatcacatcctg

SEQ ID NO: 909099 - DNA, 15 bp, Homo sapiens
tacagatcacatcct

SEQ ID NO: 909100 - DNA, 15 bp, Homo sapiens
ttacagatcacatcc

SEQ ID NO: 909101 - DNA, 15 bp, Homo sapiens
tttacagatcacatc

SEQ ID NO: 909102 - DNA, 15 bp, Homo sapiens
gtttacagatcacat

SEQ ID NO: 909103 - DNA, 15 bp, Homo sapiens
agtttacagatcaca

SEQ ID NO: 909104 - DNA, 15 bp, Homo sapiens
cagtttacagatcac

SEQ ID NO: 909105 - DNA, 15 bp, Homo sapiens
tcagtttacagatca

SEQ ID NO: 909106 - DNA, 15 bp, Homo sapiens
ctcagtttacagatc

SEQ ID NO: 909107 - DNA, 15 bp, Homo sapiens
tctcagtttacagat

SEQ ID NO: 909108 - DNA, 15 bp, Homo sapiens
gtctcagtttacaga

SEQ ID NO: 909109 - DNA, 15 bp, Homo sapiens
ggtctcagtttacag

SEQ ID NO: 909110 - DNA, 15 bp, Homo sapiens
aggtctcagtttaca

SEQ ID NO: 909111 - DNA, 15 bp, Homo sapiens
caggtctcagtttac

SEQ ID NO: 909112 - DNA, 15 bp, Homo sapiens
tcaggtctcagttta

SEQ ID NO: 909113 - DNA, 15 bp, Homo sapiens
ttcaggtctcagttt

SEQ ID NO: 909114 - DNA, 15 bp, Homo sapiens
cttcaggtctcagtt

SEQ ID NO: 909115 - DNA, 15 bp, Homo sapiens
acttcaggtctcagt

SEQ ID NO: 909116 - DNA, 15 bp, Homo sapiens
tacttcaggtctcag

SEQ ID NO: 909117 - DNA, 15 bp, Homo sapiens
atacttcaggtctca

SEQ ID NO: 909118 - DNA, 15 bp, Homo sapiens
tatacttcaggtctc

SEQ ID NO: 909119 - DNA, 15 bp, Homo sapiens
ctatacttcaggtct

SEQ ID NO: 909120 - DNA, 15 bp, Homo sapiens
actatacttcaggtc

SEQ ID NO: 909121 - DNA, 15 bp, Homo sapiens
aactatacttcaggt

SEQ ID NO: 909122 - DNA, 15 bp, Homo sapiens
taactatacttcagg

SEQ ID NO: 909123 - DNA, 15 bp, Homo sapiens
ctaactatacttcag

SEQ ID NO: 909124 - DNA, 15 bp, Homo sapiens
tctaactatacttca

SEQ ID NO: 909125 - DNA, 15 bp, Homo sapiens
gtctaactatacttc

SEQ ID NO: 909126 - DNA, 15 bp, Homo sapiens
agtctaactatactt

SEQ ID NO: 909127 - DNA, 15 bp, Homo sapiens
cagtctaactatact

SEQ ID NO: 909128 - DNA, 15 bp, Homo sapiens
ccagtctaactatac

SEQ ID NO: 909129 - DNA, 15 bp, Homo sapiens
accagtctaactata

SEQ ID NO: 909130 - DNA, 15 bp, Homo sapiens
taccagtctaactat

SEQ ID NO: 909131 - DNA, 15 bp, Homo sapiens
ttaccagtctaacta

SEQ ID NO: 909132 - DNA, 15 bp, Homo sapiens
cttaccagtctaact

SEQ ID NO: 909133 - DNA, 15 bp, Homo sapiens
tcttaccagtctaac

SEQ ID NO: 909134 - DNA, 15 bp, Homo sapiens
ctcttaccagtctaa

SEQ ID NO: 909135 - DNA, 15 bp, Homo sapiens
cctcttaccagtcta

SEQ ID NO: 909136 - DNA, 15 bp, Homo sapiens
tcctcttaccagtct

SEQ ID NO: 909137 - DNA, 15 bp, Homo sapiens
ttcctcttaccagtc

SEQ ID NO: 909138 - DNA, 15 bp, Homo sapiens
attcctcttaccagt

SEQ ID NO: 909139 - DNA, 15 bp, Homo sapiens
cattcctcttaccag

SEQ ID NO: 909140 - DNA, 15 bp, Homo sapiens
tcattcctcttacca

SEQ ID NO: 909141 - DNA, 15 bp, Homo sapiens
ctcattcctcttacc

SEQ ID NO: 909142 - DNA, 15 bp, Homo sapiens
cctcattcctcttac

SEQ ID NO: 909143 - DNA, 15 bp, Homo sapiens
tcctcattcctctta

SEQ ID NO: 909144 - DNA, 15 bp, Homo sapiens
atcctcattcctctt

SEQ ID NO: 909145 - DNA, 15 bp, Homo sapiens
tatcctcattcctct

SEQ ID NO: 909146 - DNA, 15 bp, Homo sapiens
atatcctcattcctc

SEQ ID NO: 909147 - DNA, 15 bp, Homo sapiens
tatatcctcattcct

SEQ ID NO: 909148 - DNA, 15 bp, Homo sapiens
atatatcctcattcc

SEQ ID NO: 909149 - DNA, 15 bp, Homo sapiens
tatatatcctcattc

SEQ ID NO: 909150 - DNA, 15 bp, Homo sapiens
atatatatcctcatt

SEQ ID NO: 909151 - DNA, 15 bp, Homo sapiens
catatatatcctcat

SEQ ID NO: 909152 - DNA, 15 bp, Homo sapiens
ccatatatatcctca

SEQ ID NO: 909153 - DNA, 15 bp, Homo sapiens
accatatatatcctc

SEQ ID NO: 909154 - DNA, 15 bp, Homo sapiens
caccatatatatcct

SEQ ID NO: 909155 - DNA, 15 bp, Homo sapiens
ccaccatatatatcc

SEQ ID NO: 909156 - DNA, 15 bp, Homo sapiens
accaccatatatatc

SEQ ID NO: 909157 - DNA, 15 bp, Homo sapiens
aaccaccatatatat

SEQ ID NO: 909158 - DNA, 15 bp, Homo sapiens
taaccaccatatata

SEQ ID NO: 909159 - DNA, 15 bp, Homo sapiens
ttaaccaccatatat

SEQ ID NO: 909160 - DNA, 15 bp, Homo sapiens
attaaccaccatata

SEQ ID NO: 909161 - DNA, 15 bp, Homo sapiens
tattaaccaccatat

SEQ ID NO: 909162 - DNA, 15 bp, Homo sapiens
ttattaaccaccata

SEQ ID NO: 909163 - DNA, 15 bp, Homo sapiens
tttattaaccaccat

SEQ ID NO: 909164 - DNA, 15 bp, Homo sapiens
ttttattaaccacca

SEQ ID NO: 909165 - DNA, 15 bp, Homo sapiens
cttttattaaccacc

SEQ ID NO: 909166 - DNA, 15 bp, Homo sapiens
tcttttattaaccac

SEQ ID NO: 909167 - DNA, 15 bp, Homo sapiens
ttcttttattaacca

SEQ ID NO: 909168 - DNA, 15 bp, Homo sapiens
gttcttttattaacc

SEQ ID NO: 909169 - DNA, 15 bp, Homo sapiens
tgttcttttattaac

SEQ ID NO: 909170 - DNA, 15 bp, Homo sapiens
atgttcttttattaa

SEQ ID NO: 909171 - DNA, 15 bp, Homo sapiens
aatgttcttttatta

SEQ ID NO: 909172 - DNA, 15 bp, Homo sapiens
gaatgttcttttatt

SEQ ID NO: 909173 - DNA, 15 bp, Homo sapiens
agaatgttcttttat

SEQ ID NO: 909174 - DNA, 15 bp, Homo sapiens
cagaatgttctttta

SEQ ID NO: 909175 - DNA, 15 bp, Homo sapiens
ccagaatgttctttt

SEQ ID NO: 909176 - DNA, 15 bp, Homo sapiens
cccagaatgttcttt

SEQ ID NO: 909177 - DNA, 15 bp, Homo sapiens
acccagaatgttctt

SEQ ID NO: 909178 - DNA, 15 bp, Homo sapiens
tacccagaatgttct

SEQ ID NO: 909179 - DNA, 15 bp, Homo sapiens
ctacccagaatgttc

SEQ ID NO: 909180 - DNA, 15 bp, Homo sapiens
tctacccagaatgtt

SEQ ID NO: 909181 - DNA, 15 bp, Homo sapiens
ttctacccagaatgt

SEQ ID NO: 909182 - DNA, 15 bp, Homo sapiens
cttctacccagaatg

SEQ ID NO: 909183 - DNA, 15 bp, Homo sapiens
tcttctacccagaat

SEQ ID NO: 909184 - DNA, 15 bp, Homo sapiens
atcttctacccagaa

SEQ ID NO: 909185 - DNA, 15 bp, Homo sapiens
tatcttctacccaga

SEQ ID NO: 909186 - DNA, 15 bp, Homo sapiens
atatcttctacccag

SEQ ID NO: 909187 - DNA, 15 bp, Homo sapiens
tatatcttctaccca

SEQ ID NO: 909188 - DNA, 15 bp, Homo sapiens
ctatatcttctaccc

SEQ ID NO: 909189 - DNA, 15 bp, Homo sapiens
gctatatcttctacc

SEQ ID NO: 909190 - DNA, 15 bp, Homo sapiens
tgctatatcttctac

SEQ ID NO: 909191 - DNA, 15 bp, Homo sapiens
atgctatatcttcta

SEQ ID NO: 909192 - DNA, 15 bp, Homo sapiens
aatgctatatcttct

SEQ ID NO: 909193 - DNA, 15 bp, Homo sapiens
aaatgctatatcttc

SEQ ID NO: 909194 - DNA, 15 bp, Homo sapiens
caaatgctatatctt

SEQ ID NO: 909195 - DNA, 15 bp, Homo sapiens
gcaaatgctatatct

SEQ ID NO: 909196 - DNA, 15 bp, Homo sapiens
agcaaatgctatatc

SEQ ID NO: 909197 - DNA, 15 bp, Homo sapiens
tagcaaatgctatat

SEQ ID NO: 909198 - DNA, 15 bp, Homo sapiens
ttagcaaatgctata

SEQ ID NO: 909199 - DNA, 15 bp, Homo sapiens
cttagcaaatgctat

SEQ ID NO: 909200 - DNA, 15 bp, Homo sapiens
tcttagcaaatgcta

SEQ ID NO: 909201 - DNA, 15 bp, Homo sapiens
gtcttagcaaatgct

SEQ ID NO: 909202 - DNA, 15 bp, Homo sapiens
ggtcttagcaaatgc

SEQ ID NO: 909203 - DNA, 15 bp, Homo sapiens
aggtcttagcaaatg

SEQ ID NO: 909204 - DNA, 15 bp, Homo sapiens
taggtcttagcaaat

SEQ ID NO: 909205 - DNA, 15 bp, Homo sapiens
ctaggtcttagcaaa

SEQ ID NO: 909206 - DNA, 15 bp, Homo sapiens
tctaggtcttagcaa

SEQ ID NO: 909207 - DNA, 15 bp, Homo sapiens
ctctaggtcttagca

SEQ ID NO: 909208 - DNA, 15 bp, Homo sapiens
cctctaggtcttagc

SEQ ID NO: 909209 - DNA, 15 bp, Homo sapiens
acctctaggtcttag

SEQ ID NO: 909210 - DNA, 15 bp, Homo sapiens
tacctctaggtctta

SEQ ID NO: 909211 - DNA, 15 bp, Homo sapiens
ttacctctaggtctt

SEQ ID NO: 909212 - DNA, 15 bp, Homo sapiens
cttacctctaggtct

SEQ ID NO: 909213 - DNA, 15 bp, Homo sapiens
tcttacctctaggtc

SEQ ID NO: 909214 - DNA, 15 bp, Homo sapiens
ctcttacctctaggt

SEQ ID NO: 909215 - DNA, 15 bp, Homo sapiens
tctcttacctctagg

SEQ ID NO: 909216 - DNA, 15 bp, Homo sapiens
atctcttacctctag

SEQ ID NO: 909217 - DNA, 15 bp, Homo sapiens
catctcttacctcta

SEQ ID NO: 909218 - DNA, 15 bp, Homo sapiens
acatctcttacctct

SEQ ID NO: 909219 - DNA, 15 bp, Homo sapiens
aacatctcttacctc

SEQ ID NO: 909220 - DNA, 15 bp, Homo sapiens
taacatctcttacct

SEQ ID NO: 909221 - DNA, 15 bp, Homo sapiens
ataacatctcttacc

SEQ ID NO: 909222 - DNA, 15 bp, Homo sapiens
cataacatctcttac

SEQ ID NO: 909223 - DNA, 15 bp, Homo sapiens
ccataacatctctta

SEQ ID NO: 909224 - DNA, 15 bp, Homo sapiens
tccataacatctctt

SEQ ID NO: 909225 - DNA, 15 bp, Homo sapiens
ctccataacatctct

SEQ ID NO: 909226 - DNA, 15 bp, Homo sapiens
actccataacatctc

SEQ ID NO: 909227 - DNA, 15 bp, Homo sapiens
tactccataacatct

SEQ ID NO: 909228 - DNA, 15 bp, Homo sapiens
atactccataacatc

SEQ ID NO: 909229 - DNA, 15 bp, Homo sapiens
aatactccataacat

SEQ ID NO: 909230 - DNA, 15 bp, Homo sapiens
aaatactccataaca

SEQ ID NO: 909231 - DNA, 15 bp, Homo sapiens
taaatactccataac

SEQ ID NO: 909232 - DNA, 15 bp, Homo sapiens
ctaaatactccataa

SEQ ID NO: 909233 - DNA, 15 bp, Homo sapiens
cctaaatactccata

SEQ ID NO: 909234 - DNA, 15 bp, Homo sapiens
tcctaaatactccat

SEQ ID NO: 909235 - DNA, 15 bp, Homo sapiens
ttcctaaatactcca

SEQ ID NO: 909236 - DNA, 15 bp, Homo sapiens
tttcctaaatactcc

SEQ ID NO: 909237 - DNA, 15 bp, Homo sapiens
gtttcctaaatactc

SEQ ID NO: 909238 - DNA, 15 bp, Homo sapiens
agtttcctaaatact

SEQ ID NO: 909239 - DNA, 15 bp, Homo sapiens
tagtttcctaaatac

SEQ ID NO: 909240 - DNA, 15 bp, Homo sapiens
gtagtttcctaaata

SEQ ID NO: 909241 - DNA, 15 bp, Homo sapiens
tgtagtttcctaaat

SEQ ID NO: 909242 - DNA, 15 bp, Homo sapiens
ctgtagtttcctaaa

SEQ ID NO: 909243 - DNA, 15 bp, Homo sapiens
actgtagtttcctaa

SEQ ID NO: 909244 - DNA, 15 bp, Homo sapiens
aactgtagtttccta

SEQ ID NO: 909245 - DNA, 15 bp, Homo sapiens
taactgtagtttcct

SEQ ID NO: 909246 - DNA, 15 bp, Homo sapiens
ataactgtagtttcc

SEQ ID NO: 909247 - DNA, 15 bp, Homo sapiens
aataactgtagtttc

SEQ ID NO: 909248 - DNA, 15 bp, Homo sapiens
gaataactgtagttt

SEQ ID NO: 909249 - DNA, 15 bp, Homo sapiens
tgaataactgtagtt

SEQ ID NO: 909250 - DNA, 15 bp, Homo sapiens
atgaataactgtagt

SEQ ID NO: 909251 - DNA, 15 bp, Homo sapiens
aatgaataactgtag

SEQ ID NO: 909252 - DNA, 15 bp, Homo sapiens
aaatgaataactgta

SEQ ID NO: 909253 - DNA, 15 bp, Homo sapiens
aaaatgaataactgt

SEQ ID NO: 909254 - DNA, 15 bp, Homo sapiens
caaaatgaataactg

SEQ ID NO: 909255 - DNA, 15 bp, Homo sapiens
tcaaaatgaataact

SEQ ID NO: 909256 - DNA, 15 bp, Homo sapiens
gtcaaaatgaataac

SEQ ID NO: 909257 - DNA, 15 bp, Homo sapiens
agtcaaaatgaataa

SEQ ID NO: 909258 - DNA, 15 bp, Homo sapiens
cagtcaaaatgaata

SEQ ID NO: 909259 - DNA, 15 bp, Homo sapiens
tcagtcaaaatgaat

SEQ ID NO: 909260 - DNA, 15 bp, Homo sapiens
ttcagtcaaaatgaa

SEQ ID NO: 909261 - DNA, 15 bp, Homo sapiens
tttcagtcaaaatga

SEQ ID NO: 909262 - DNA, 15 bp, Homo sapiens
atttcagtcaaaatg

SEQ ID NO: 909263 - DNA, 15 bp, Homo sapiens
tatttcagtcaaaat

SEQ ID NO: 909264 - DNA, 15 bp, Homo sapiens
atatttcagtcaaaa

SEQ ID NO: 909265 - DNA, 15 bp, Homo sapiens
tatatttcagtcaaa

SEQ ID NO: 909266 - DNA, 15 bp, Homo sapiens
ttatatttcagtcaa

SEQ ID NO: 909267 - DNA, 15 bp, Homo sapiens
cttatatttcagtca

SEQ ID NO: 909268 - DNA, 15 bp, Homo sapiens
acttatatttcagtc

SEQ ID NO: 909269 - DNA, 15 bp, Homo sapiens
cacttatatttcagt

SEQ ID NO: 909270 - DNA, 15 bp, Homo sapiens
tcacttatatttcag

SEQ ID NO: 909271 - DNA, 15 bp, Homo sapiens
ttcacttatatttca

SEQ ID NO: 909272 - DNA, 15 bp, Homo sapiens
tttcacttatatttc

SEQ ID NO: 909273 - DNA, 15 bp, Homo sapiens
ttttcacttatattt

SEQ ID NO: 909274 - DNA, 15 bp, Homo sapiens
attttcacttatatt

SEQ ID NO: 909275 - DNA, 15 bp, Homo sapiens
tattttcacttatat

SEQ ID NO: 909276 - DNA, 15 bp, Homo sapiens
ctattttcacttata

SEQ ID NO: 909277 - DNA, 15 bp, Homo sapiens
gctattttcacttat

SEQ ID NO: 909278 - DNA, 15 bp, Homo sapiens
agctattttcactta

SEQ ID NO: 909279 - DNA, 15 bp, Homo sapiens
aagctattttcactt

SEQ ID NO: 909280 - DNA, 15 bp, Homo sapiens
aaagctattttcact

SEQ ID NO: 909281 - DNA, 15 bp, Homo sapiens
gaaagctattttcac

SEQ ID NO: 909282 - DNA, 15 bp, Homo sapiens
tgaaagctattttca

SEQ ID NO: 909283 - DNA, 15 bp, Homo sapiens
atgaaagctattttc

SEQ ID NO: 909284 - DNA, 15 bp, Homo sapiens
tatgaaagctatttt

SEQ ID NO: 909285 - DNA, 15 bp, Homo sapiens
ctatgaaagctattt

SEQ ID NO: 909286 - DNA, 15 bp, Homo sapiens
tctatgaaagctatt

SEQ ID NO: 909287 - DNA, 15 bp, Homo sapiens
ctctatgaaagctat

SEQ ID NO: 909288 - DNA, 15 bp, Homo sapiens
actctatgaaagcta

SEQ ID NO: 909289 - DNA, 15 bp, Homo sapiens
gactctatgaaagct

SEQ ID NO: 909290 - DNA, 15 bp, Homo sapiens
ggactctatgaaagc

SEQ ID NO: 909291 - DNA, 15 bp, Homo sapiens
aggactctatgaaag

SEQ ID NO: 909292 - DNA, 15 bp, Homo sapiens
aaggactctatgaaa

SEQ ID NO: 909293 - DNA, 15 bp, Homo sapiens
taaggactctatgaa

SEQ ID NO: 909294 - DNA, 15 bp, Homo sapiens
gtaaggactctatga

SEQ ID NO: 909295 - DNA, 15 bp, Homo sapiens
agtaaggactctatg

SEQ ID NO: 909296 - DNA, 15 bp, Homo sapiens
tagtaaggactctat

SEQ ID NO: 909297 - DNA, 15 bp, Homo sapiens
atagtaaggactcta

SEQ ID NO: 909298 - DNA, 15 bp, Homo sapiens
catagtaaggactct

SEQ ID NO: 909299 - DNA, 15 bp, Homo sapiens
acatagtaaggactc

SEQ ID NO: 909300 - DNA, 15 bp, Homo sapiens
cacatagtaaggact

SEQ ID NO: 909301 - DNA, 15 bp, Homo sapiens
gcacatagtaaggac

SEQ ID NO: 909302 - DNA, 15 bp, Homo sapiens
ggcacatagtaagga

SEQ ID NO: 909303 - DNA, 15 bp, Homo sapiens
tggcacatagtaagg

SEQ ID NO: 909304 - DNA, 15 bp, Homo sapiens
ctggcacatagtaag

SEQ ID NO: 909305 - DNA, 15 bp, Homo sapiens
cctggcacatagtaa

SEQ ID NO: 909306 - DNA, 15 bp, Homo sapiens
gcctggcacatagta

SEQ ID NO: 909307 - DNA, 15 bp, Homo sapiens
tgcctggcacatagt

SEQ ID NO: 909308 - DNA, 15 bp, Homo sapiens
gtgcctggcacatag

SEQ ID NO: 909309 - DNA, 15 bp, Homo sapiens
agtgcctggcacata

SEQ ID NO: 909310 - DNA, 15 bp, Homo sapiens
aagtgcctggcacat

SEQ ID NO: 909311 - DNA, 15 bp, Homo sapiens
gaagtgcctggcaca

SEQ ID NO: 909312 - DNA, 15 bp, Homo sapiens
tgaagtgcctggcac

SEQ ID NO: 909313 - DNA, 15 bp, Homo sapiens
atgaagtgcctggca

SEQ ID NO: 909314 - DNA, 15 bp, Homo sapiens
tatgaagtgcctggc

SEQ ID NO: 909315 - DNA, 15 bp, Homo sapiens
atatgaagtgcctgg

SEQ ID NO: 909316 - DNA, 15 bp, Homo sapiens
catatgaagtgcctg

SEQ ID NO: 909317 - DNA, 15 bp, Homo sapiens
gcatatgaagtgcct

SEQ ID NO: 909318 - DNA, 15 bp, Homo sapiens
tgcatatgaagtgcc

SEQ ID NO: 909319 - DNA, 15 bp, Homo sapiens
atgcatatgaagtgc

SEQ ID NO: 909320 - DNA, 15 bp, Homo sapiens
aatgcatatgaagtg

SEQ ID NO: 909321 - DNA, 15 bp, Homo sapiens
taatgcatatgaagt

SEQ ID NO: 909322 - DNA, 15 bp, Homo sapiens
ttaatgcatatgaag

SEQ ID NO: 909323 - DNA, 15 bp, Homo sapiens
attaatgcatatgaa

SEQ ID NO: 909324 - DNA, 15 bp, Homo sapiens
aattaatgcatatga

SEQ ID NO: 909325 - DNA, 15 bp, Homo sapiens
gaattaatgcatatg

SEQ ID NO: 909326 - DNA, 15 bp, Homo sapiens
tgaattaatgcatat

SEQ ID NO: 909327 - DNA, 15 bp, Homo sapiens
atgaattaatgcata

SEQ ID NO: 909328 - DNA, 15 bp, Homo sapiens
aatgaattaatgcat

SEQ ID NO: 909329 - DNA, 15 bp, Homo sapiens
taatgaattaatgca

SEQ ID NO: 909330 - DNA, 15 bp, Homo sapiens
ataatgaattaatgc

SEQ ID NO: 909331 - DNA, 15 bp, Homo sapiens
aataatgaattaatg

SEQ ID NO: 909332 - DNA, 15 bp, Homo sapiens
caataatgaattaat

SEQ ID NO: 909333 - DNA, 15 bp, Homo sapiens
gcaataatgaattaa

SEQ ID NO: 909334 - DNA, 15 bp, Homo sapiens
agcaataatgaatta

SEQ ID NO: 909335 - DNA, 15 bp, Homo sapiens
aagcaataatgaatt

SEQ ID NO: 909336 - DNA, 15 bp, Homo sapiens
taagcaataatgaat

SEQ ID NO: 909337 - DNA, 15 bp, Homo sapiens
ataagcaataatgaa

SEQ ID NO: 909338 - DNA, 15 bp, Homo sapiens
aataagcaataatga

SEQ ID NO: 909339 - DNA, 15 bp, Homo sapiens
aaataagcaataatg

SEQ ID NO: 909340 - DNA, 15 bp, Homo sapiens
caaataagcaataat

SEQ ID NO: 909341 - DNA, 15 bp, Homo sapiens
tcaaataagcaataa

SEQ ID NO: 909342 - DNA, 15 bp, Homo sapiens
atcaaataagcaata

SEQ ID NO: 909343 - DNA, 15 bp, Homo sapiens
tatcaaataagcaat

SEQ ID NO: 909344 - DNA, 15 bp, Homo sapiens
gtatcaaataagcaa

SEQ ID NO: 909345 - DNA, 15 bp, Homo sapiens
agtatcaaataagca

SEQ ID NO: 909346 - DNA, 15 bp, Homo sapiens
aagtatcaaataagc

SEQ ID NO: 909347 - DNA, 15 bp, Homo sapiens
caagtatcaaataag

SEQ ID NO: 909348 - DNA, 15 bp, Homo sapiens
acaagtatcaaataa

SEQ ID NO: 909349 - DNA, 15 bp, Homo sapiens
gacaagtatcaaata

SEQ ID NO: 909350 - DNA, 15 bp, Homo sapiens
tgacaagtatcaaat

SEQ ID NO: 909351 - DNA, 15 bp, Homo sapiens
atgacaagtatcaaa

SEQ ID NO: 909352 - DNA, 15 bp, Homo sapiens
tatgacaagtatcaa

SEQ ID NO: 909353 - DNA, 15 bp, Homo sapiens
atatgacaagtatca

SEQ ID NO: 909354 - DNA, 15 bp, Homo sapiens
catatgacaagtatc

SEQ ID NO: 909355 - DNA, 15 bp, Homo sapiens
tcatatgacaagtat

SEQ ID NO: 909356 - DNA, 15 bp, Homo sapiens
ctcatatgacaagta

SEQ ID NO: 909357 - DNA, 15 bp, Homo sapiens
tctcatatgacaagt

SEQ ID NO: 909358 - DNA, 15 bp, Homo sapiens
atctcatatgacaag

SEQ ID NO: 909359 - DNA, 15 bp, Homo sapiens
tatctcatatgacaa

SEQ ID NO: 909360 - DNA, 15 bp, Homo sapiens
ctatctcatatgaca

SEQ ID NO: 909361 - DNA, 15 bp, Homo sapiens
actatctcatatgac

SEQ ID NO: 909362 - DNA, 15 bp, Homo sapiens
aactatctcatatga

SEQ ID NO: 909363 - DNA, 15 bp, Homo sapiens
caactatctcatatg

SEQ ID NO: 909364 - DNA, 15 bp, Homo sapiens
acaactatctcatat

SEQ ID NO: 909365 - DNA, 15 bp, Homo sapiens
gacaactatctcata

SEQ ID NO: 909366 - DNA, 15 bp, Homo sapiens
tgacaactatctcat

SEQ ID NO: 909367 - DNA, 15 bp, Homo sapiens
atgacaactatctca

SEQ ID NO: 909368 - DNA, 15 bp, Homo sapiens
aatgacaactatctc

SEQ ID NO: 909369 - DNA, 15 bp, Homo sapiens
aaatgacaactatct

SEQ ID NO: 909370 - DNA, 15 bp, Homo sapiens
gaaatgacaactatc

SEQ ID NO: 909371 - DNA, 15 bp, Homo sapiens
agaaatgacaactat

SEQ ID NO: 909372 - DNA, 15 bp, Homo sapiens
cagaaatgacaacta

SEQ ID NO: 909373 - DNA, 15 bp, Homo sapiens
gcagaaatgacaact

SEQ ID NO: 909374 - DNA, 15 bp, Homo sapiens
ggcagaaatgacaac

SEQ ID NO: 909375 - DNA, 15 bp, Homo sapiens
tggcagaaatgacaa

SEQ ID NO: 909376 - DNA, 15 bp, Homo sapiens
atggcagaaatgaca

SEQ ID NO: 909377 - DNA, 15 bp, Homo sapiens
catggcagaaatgac

SEQ ID NO: 909378 - DNA, 15 bp, Homo sapiens
tcatggcagaaatga

SEQ ID NO: 909379 - DNA, 15 bp, Homo sapiens
atcatggcagaaatg

SEQ ID NO: 909380 - DNA, 15 bp, Homo sapiens
tatcatggcagaaat

SEQ ID NO: 909381 - DNA, 15 bp, Homo sapiens
gtatcatggcagaaa

SEQ ID NO: 909382 - DNA, 15 bp, Homo sapiens
tgtatcatggcagaa

SEQ ID NO: 909383 - DNA, 15 bp, Homo sapiens
ctgtatcatggcaga

SEQ ID NO: 909384 - DNA, 15 bp, Homo sapiens
tctgtatcatggcag

SEQ ID NO: 909385 - DNA, 15 bp, Homo sapiens
atctgtatcatggca

SEQ ID NO: 909386 - DNA, 15 bp, Homo sapiens
catctgtatcatggc

SEQ ID NO: 909387 - DNA, 15 bp, Homo sapiens
tcatctgtatcatgg

SEQ ID NO: 909388 - DNA, 15 bp, Homo sapiens
ttcatctgtatcatg

SEQ ID NO: 909389 - DNA, 15 bp, Homo sapiens
cttcatctgtatcat

SEQ ID NO: 909390 - DNA, 15 bp, Homo sapiens
tcttcatctgtatca

SEQ ID NO: 909391 - DNA, 15 bp, Homo sapiens
tagactattatttgc

SEQ ID NO: 909392 - DNA, 15 bp, Homo sapiens
ctagactattatttg

SEQ ID NO: 909393 - DNA, 15 bp, Homo sapiens
gctagactattattt

SEQ ID NO: 909394 - DNA, 15 bp, Homo sapiens
agctagactattatt

SEQ ID NO: 909395 - DNA, 15 bp, Homo sapiens
tagctagactattat

SEQ ID NO: 909396 - DNA, 15 bp, Homo sapiens
atagctagactatta

SEQ ID NO: 909397 - DNA, 15 bp, Homo sapiens
catagctagactatt

SEQ ID NO: 909398 - DNA, 15 bp, Homo sapiens
tcatagctagactat

SEQ ID NO: 909399 - DNA, 15 bp, Homo sapiens
gtcatagctagacta

SEQ ID NO: 909400 - DNA, 15 bp, Homo sapiens
agtcatagctagact

SEQ ID NO: 909401 - DNA, 15 bp, Homo sapiens
aagtcatagctagac

SEQ ID NO: 909402 - DNA, 15 bp, Homo sapiens
taagtcatagctaga

SEQ ID NO: 909403 - DNA, 15 bp, Homo sapiens
ctaagtcatagctag

SEQ ID NO: 909404 - DNA, 15 bp, Homo sapiens
tctaagtcatagcta

SEQ ID NO: 909405 - DNA, 15 bp, Homo sapiens
ttctaagtcatagct

SEQ ID NO: 909406 - DNA, 15 bp, Homo sapiens
tttctaagtcatagc

SEQ ID NO: 909407 - DNA, 15 bp, Homo sapiens
ttttctaagtcatag

SEQ ID NO: 909408 - DNA, 15 bp, Homo sapiens
cttttctaagtcata

SEQ ID NO: 909409 - DNA, 15 bp, Homo sapiens
acttttctaagtcat

SEQ ID NO: 909410 - DNA, 15 bp, Homo sapiens
tacttttctaagtca

SEQ ID NO: 909411 - DNA, 15 bp, Homo sapiens
ttacttttctaagtc

SEQ ID NO: 909412 - DNA, 15 bp, Homo sapiens
tttacttttctaagt

SEQ ID NO: 909413 - DNA, 15 bp, Homo sapiens
ttttacttttctaag

SEQ ID NO: 909414 - DNA, 15 bp, Homo sapiens
attttacttttctaa

SEQ ID NO: 909415 - DNA, 15 bp, Homo sapiens
tattttacttttcta

SEQ ID NO: 909416 - DNA, 15 bp, Homo sapiens
ttattttacttttct

SEQ ID NO: 909417 - DNA, 15 bp, Homo sapiens
tttattttacttttc

SEQ ID NO: 909418 - DNA, 15 bp, Homo sapiens
ctttattttactttt

SEQ ID NO: 909419 - DNA, 15 bp, Homo sapiens
tctttattttacttt

SEQ ID NO: 909420 - DNA, 15 bp, Homo sapiens
atctttattttactt

SEQ ID NO: 909421 - DNA, 15 bp, Homo sapiens
catctttattttact

SEQ ID NO: 909422 - DNA, 15 bp, Homo sapiens
acatctttattttac

SEQ ID NO: 909423 - DNA, 15 bp, Homo sapiens
aacatctttatttta

SEQ ID NO: 909424 - DNA, 15 bp, Homo sapiens
caacatctttatttt

SEQ ID NO: 909425 - DNA, 15 bp, Homo sapiens
ccaacatctttattt

SEQ ID NO: 909426 - DNA, 15 bp, Homo sapiens
cccaacatctttatt

SEQ ID NO: 909427 - DNA, 15 bp, Homo sapiens
gcccaacatctttat

SEQ ID NO: 909428 - DNA, 15 bp, Homo sapiens
tgcccaacatcttta

SEQ ID NO: 909429 - DNA, 15 bp, Homo sapiens
ctgcccaacatcttt

SEQ ID NO: 909430 - DNA, 15 bp, Homo sapiens
tctgcccaacatctt

SEQ ID NO: 909431 - DNA, 15 bp, Homo sapiens
ttctgcccaacatct

SEQ ID NO: 909432 - DNA, 15 bp, Homo sapiens
tttctgcccaacatc

SEQ ID NO: 909433 - DNA, 15 bp, Homo sapiens
ttttctgcccaacat

SEQ ID NO: 909434 - DNA, 15 bp, Homo sapiens
gttttctgcccaaca

SEQ ID NO: 909435 - DNA, 15 bp, Homo sapiens
ggttttctgcccaac

SEQ ID NO: 909436 - DNA, 15 bp, Homo sapiens
tggttttctgcccaa

SEQ ID NO: 909437 - DNA, 15 bp, Homo sapiens
atggttttctgccca

SEQ ID NO: 909438 - DNA, 15 bp, Homo sapiens
aatggttttctgccc

SEQ ID NO: 909439 - DNA, 15 bp, Homo sapiens
aaatggttttctgcc

SEQ ID NO: 909440 - DNA, 15 bp, Homo sapiens
aaaatggttttctgc

SEQ ID NO: 909441 - DNA, 15 bp, Homo sapiens
taaaatggttttctg

SEQ ID NO: 909442 - DNA, 15 bp, Homo sapiens
ataaaatggttttct

SEQ ID NO: 909443 - DNA, 15 bp, Homo sapiens
aataaaatggttttc

SEQ ID NO: 909444 - DNA, 15 bp, Homo sapiens
taataaaatggtttt

SEQ ID NO: 909445 - DNA, 15 bp, Homo sapiens
ctaataaaatggttt

SEQ ID NO: 909446 - DNA, 15 bp, Homo sapiens
cctaataaaatggtt

SEQ ID NO: 909447 - DNA, 15 bp, Homo sapiens
ccctaataaaatggt

SEQ ID NO: 909448 - DNA, 15 bp, Homo sapiens
cccctaataaaatgg

SEQ ID NO: 909449 - DNA, 15 bp, Homo sapiens
acccctaataaaatg

SEQ ID NO: 909450 - DNA, 15 bp, Homo sapiens
aacccctaataaaat

SEQ ID NO: 909451 - DNA, 15 bp, Homo sapiens
aaacccctaataaaa

SEQ ID NO: 909452 - DNA, 15 bp, Homo sapiens
aaaacccctaataaa

SEQ ID NO: 909453 - DNA, 15 bp, Homo sapiens
aaaaacccctaataa

SEQ ID NO: 909454 - DNA, 15 bp, Homo sapiens
aaaaaacccctaata

SEQ ID NO: 909455 - DNA, 15 bp, Homo sapiens
aaaaaaacccctaat

SEQ ID NO: 909456 - DNA, 15 bp, Homo sapiens
caaaaaaacccctaa

SEQ ID NO: 909457 - DNA, 15 bp, Homo sapiens
ccaaaaaaaccccta

SEQ ID NO: 909458 - DNA, 15 bp, Homo sapiens
tccaaaaaaacccct

SEQ ID NO: 909459 - DNA, 15 bp, Homo sapiens
ctccaaaaaaacccc

SEQ ID NO: 909460 - DNA, 15 bp, Homo sapiens
cctccaaaaaaaccc

SEQ ID NO: 909461 - DNA, 15 bp, Homo sapiens
tcctccaaaaaaacc

SEQ ID NO: 909462 - DNA, 15 bp, Homo sapiens
ctcctccaaaaaaac

SEQ ID NO: 909463 - DNA, 15 bp, Homo sapiens
gctcctccaaaaaaa

SEQ ID NO: 909464 - DNA, 15 bp, Homo sapiens
tgctcctccaaaaaa

SEQ ID NO: 909465 - DNA, 15 bp, Homo sapiens
ctgctcctccaaaaa

SEQ ID NO: 909466 - DNA, 15 bp, Homo sapiens
tctgctcctccaaaa

SEQ ID NO: 909467 - DNA, 15 bp, Homo sapiens
atctgctcctccaaa

SEQ ID NO: 909468 - DNA, 15 bp, Homo sapiens
aatctgctcctccaa

SEQ ID NO: 909469 - DNA, 15 bp, Homo sapiens
taatctgctcctcca

SEQ ID NO: 909470 - DNA, 15 bp, Homo sapiens
ttaatctgctcctcc

SEQ ID NO: 909471 - DNA, 15 bp, Homo sapiens
attaatctgctcctc

SEQ ID NO: 909472 - DNA, 15 bp, Homo sapiens
aattaatctgctcct

SEQ ID NO: 909473 - DNA, 15 bp, Homo sapiens
aaattaatctgctcc

SEQ ID NO: 909474 - DNA, 15 bp, Homo sapiens
caaattaatctgctc

SEQ ID NO: 909475 - DNA, 15 bp, Homo sapiens
acaaattaatctgct

SEQ ID NO: 909476 - DNA, 15 bp, Homo sapiens
aacaaattaatctgc

SEQ ID NO: 909477 - DNA, 15 bp, Homo sapiens
aaacaaattaatctg

SEQ ID NO: 909478 - DNA, 15 bp, Homo sapiens
gaaacaaattaatct

SEQ ID NO: 909479 - DNA, 15 bp, Homo sapiens
agaaacaaattaatc

SEQ ID NO: 909480 - DNA, 15 bp, Homo sapiens
cagaaacaaattaat

SEQ ID NO: 909481 - DNA, 15 bp, Homo sapiens
acagaaacaaattaa

SEQ ID NO: 909482 - DNA, 15 bp, Homo sapiens
tacagaaacaaatta

SEQ ID NO: 909483 - DNA, 15 bp, Homo sapiens
atacagaaacaaatt

SEQ ID NO: 909484 - DNA, 15 bp, Homo sapiens
aatacagaaacaaat

SEQ ID NO: 909485 - DNA, 15 bp, Homo sapiens
gaatacagaaacaaa

SEQ ID NO: 909486 - DNA, 15 bp, Homo sapiens
agaatacagaaacaa

SEQ ID NO: 909487 - DNA, 15 bp, Homo sapiens
aagaatacagaaaca

SEQ ID NO: 909488 - DNA, 15 bp, Homo sapiens
aaagaatacagaaac

SEQ ID NO: 909489 - DNA, 15 bp, Homo sapiens
caaagaatacagaaa

SEQ ID NO: 909490 - DNA, 15 bp, Homo sapiens
ccaaagaatacagaa

SEQ ID NO: 909491 - DNA, 15 bp, Homo sapiens
accaaagaatacaga

SEQ ID NO: 909492 - DNA, 15 bp, Homo sapiens
aaccaaagaatacag

SEQ ID NO: 909493 - DNA, 15 bp, Homo sapiens
taaccaaagaataca

SEQ ID NO: 909494 - DNA, 15 bp, Homo sapiens
ctaaccaaagaatac

SEQ ID NO: 909495 - DNA, 15 bp, Homo sapiens
actaaccaaagaata

SEQ ID NO: 909496 - DNA, 15 bp, Homo sapiens
aactaaccaaagaat

SEQ ID NO: 909497 - DNA, 15 bp, Homo sapiens
aaactaaccaaagaa

SEQ ID NO: 909498 - DNA, 15 bp, Homo sapiens
caaactaaccaaaga

SEQ ID NO: 909499 - DNA, 15 bp, Homo sapiens
acaaactaaccaaag

SEQ ID NO: 909500 - DNA, 15 bp, Homo sapiens
cacaaactaaccaaa

SEQ ID NO: 909501 - DNA, 15 bp, Homo sapiens
acacaaactaaccaa

SEQ ID NO: 909502 - DNA, 15 bp, Homo sapiens
cacacaaactaacca

SEQ ID NO: 909503 - DNA, 15 bp, Homo sapiens
acacacaaactaacc

SEQ ID NO: 909504 - DNA, 15 bp, Homo sapiens
cacacacaaactaac

SEQ ID NO: 909505 - DNA, 15 bp, Homo sapiens
acacacacaaactaa

SEQ ID NO: 909506 - DNA, 15 bp, Homo sapiens
cacacacacaaacta

SEQ ID NO: 909507 - DNA, 15 bp, Homo sapiens
acacacacacaaact

SEQ ID NO: 909508 - DNA, 15 bp, Homo sapiens
aacacacacacaaac

SEQ ID NO: 909509 - DNA, 15 bp, Homo sapiens
gaacacacacacaaa

SEQ ID NO: 909510 - DNA, 15 bp, Homo sapiens
agaacacacacacaa

SEQ ID NO: 909511 - DNA, 15 bp, Homo sapiens
aagaacacacacaca

SEQ ID NO: 909512 - DNA, 15 bp, Homo sapiens
aaagaacacacacac

SEQ ID NO: 909513 - DNA, 15 bp, Homo sapiens
aaaagaacacacaca

SEQ ID NO: 909514 - DNA, 15 bp, Homo sapiens
aaaaagaacacacac

SEQ ID NO: 909515 - DNA, 15 bp, Homo sapiens
taaaaagaacacaca

SEQ ID NO: 909516 - DNA, 15 bp, Homo sapiens
ttaaaaagaacacac

SEQ ID NO: 909517 - DNA, 15 bp, Homo sapiens
attaaaaagaacaca

SEQ ID NO: 909518 - DNA, 15 bp, Homo sapiens
aattaaaaagaacac

SEQ ID NO: 909519 - DNA, 15 bp, Homo sapiens
gaattaaaaagaaca

SEQ ID NO: 909520 - DNA, 15 bp, Homo sapiens
agaattaaaaagaac

SEQ ID NO: 909521 - DNA, 15 bp, Homo sapiens
aagaattaaaaagaa

SEQ ID NO: 909522 - DNA, 15 bp, Homo sapiens
aaagaattaaaaaga

SEQ ID NO: 909523 - DNA, 15 bp, Homo sapiens
taaagaattaaaaag

SEQ ID NO: 909524 - DNA, 15 bp, Homo sapiens
ttaaagaattaaaaa

SEQ ID NO: 909525 - DNA, 15 bp, Homo sapiens
tttaaagaattaaaa

SEQ ID NO: 909526 - DNA, 15 bp, Homo sapiens
ttttaaagaattaaa

SEQ ID NO: 909527 - DNA, 15 bp, Homo sapiens
attttaaagaattaa

SEQ ID NO: 909528 - DNA, 15 bp, Homo sapiens
cattttaaagaatta

SEQ ID NO: 909529 - DNA, 15 bp, Homo sapiens
tcattttaaagaatt

SEQ ID NO: 909530 - DNA, 15 bp, Homo sapiens
ttcattttaaagaat

SEQ ID NO: 909531 - DNA, 15 bp, Homo sapiens
tttcattttaaagaa

SEQ ID NO: 909532 - DNA, 15 bp, Homo sapiens
gtttcattttaaaga

SEQ ID NO: 909533 - DNA, 15 bp, Homo sapiens
agtttcattttaaag

SEQ ID NO: 909534 - DNA, 15 bp, Homo sapiens
cagtttcattttaaa

SEQ ID NO: 909535 - DNA, 15 bp, Homo sapiens
acagtttcattttaa

SEQ ID NO: 909536 - DNA, 15 bp, Homo sapiens
aacagtttcatttta

SEQ ID NO: 909537 - DNA, 15 bp, Homo sapiens
aaacagtttcatttt

SEQ ID NO: 909538 - DNA, 15 bp, Homo sapiens
taaacagtttcattt

SEQ ID NO: 909539 - DNA, 15 bp, Homo sapiens
ttaaacagtttcatt

SEQ ID NO: 909540 - DNA, 15 bp, Homo sapiens
attaaacagtttcat

SEQ ID NO: 909541 - DNA, 15 bp, Homo sapiens
gattaaacagtttca

SEQ ID NO: 909542 - DNA, 15 bp, Homo sapiens
ggattaaacagtttc

SEQ ID NO: 909543 - DNA, 15 bp, Homo sapiens
aggattaaacagttt

SEQ ID NO: 909544 - DNA, 15 bp, Homo sapiens
aaggattaaacagtt

SEQ ID NO: 909545 - DNA, 15 bp, Homo sapiens
taaggattaaacagt

SEQ ID NO: 909546 - DNA, 15 bp, Homo sapiens
ttaaggattaaacag

SEQ ID NO: 909547 - DNA, 15 bp, Homo sapiens
tttaaggattaaaca

SEQ ID NO: 909548 - DNA, 15 bp, Homo sapiens
atttaaggattaaac

SEQ ID NO: 909549 - DNA, 15 bp, Homo sapiens
gatttaaggattaaa

SEQ ID NO: 909550 - DNA, 15 bp, Homo sapiens
ggatttaaggattaa

SEQ ID NO: 909551 - DNA, 15 bp, Homo sapiens
aggatttaaggatta

SEQ ID NO: 909552 - DNA, 15 bp, Homo sapiens
aaggatttaaggatt

SEQ ID NO: 909553 - DNA, 15 bp, Homo sapiens
taaggatttaaggat

SEQ ID NO: 909554 - DNA, 15 bp, Homo sapiens
ttaaggatttaagga

SEQ ID NO: 909555 - DNA, 15 bp, Homo sapiens
cttaaggatttaagg

SEQ ID NO: 909556 - DNA, 15 bp, Homo sapiens
acttaaggatttaag

SEQ ID NO: 909557 - DNA, 15 bp, Homo sapiens
aacttaaggatttaa

SEQ ID NO: 909558 - DNA, 15 bp, Homo sapiens
aaacttaaggattta

SEQ ID NO: 909559 - DNA, 15 bp, Homo sapiens
aaaacttaaggattt

SEQ ID NO: 909560 - DNA, 15 bp, Homo sapiens
caaaacttaaggatt

SEQ ID NO: 909561 - DNA, 15 bp, Homo sapiens
tcaaaacttaaggat

SEQ ID NO: 909562 - DNA, 15 bp, Homo sapiens
ttcaaaacttaagga

SEQ ID NO: 909563 - DNA, 15 bp, Homo sapiens
tttcaaaacttaagg

SEQ ID NO: 909564 - DNA, 15 bp, Homo sapiens
ttttcaaaacttaag

SEQ ID NO: 909565 - DNA, 15 bp, Homo sapiens
attttcaaaacttaa

SEQ ID NO: 909566 - DNA, 15 bp, Homo sapiens
aattttcaaaactta

SEQ ID NO: 909567 - DNA, 15 bp, Homo sapiens
aaattttcaaaactt

SEQ ID NO: 909568 - DNA, 15 bp, Homo sapiens
aaaattttcaaaact

SEQ ID NO: 909569 - DNA, 15 bp, Homo sapiens
caaaattttcaaaac

SEQ ID NO: 909570 - DNA, 15 bp, Homo sapiens
ccaaaattttcaaaa

SEQ ID NO: 909571 - DNA, 15 bp, Homo sapiens
gccaaaattttcaaa

SEQ ID NO: 909572 - DNA, 15 bp, Homo sapiens
ggccaaaattttcaa

SEQ ID NO: 909573 - DNA, 15 bp, Homo sapiens
aggccaaaattttca

SEQ ID NO: 909574 - DNA, 15 bp, Homo sapiens
taggccaaaattttc

SEQ ID NO: 909575 - DNA, 15 bp, Homo sapiens
ataggccaaaatttt

SEQ ID NO: 909576 - DNA, 15 bp, Homo sapiens
aataggccaaaattt

SEQ ID NO: 909577 - DNA, 15 bp, Homo sapiens
taataggccaaaatt

SEQ ID NO: 909578 - DNA, 15 bp, Homo sapiens
ataataggccaaaat

SEQ ID NO: 909579 - DNA, 15 bp, Homo sapiens
aataataggccaaaa

SEQ ID NO: 909580 - DNA, 15 bp, Homo sapiens
aaataataggccaaa

SEQ ID NO: 909581 - DNA, 15 bp, Homo sapiens
taaataataggccaa

SEQ ID NO: 909582 - DNA, 15 bp, Homo sapiens
ataaataataggcca

SEQ ID NO: 909583 - DNA, 15 bp, Homo sapiens
cataaataataggcc

SEQ ID NO: 909584 - DNA, 15 bp, Homo sapiens
acataaataataggc

SEQ ID NO: 909585 - DNA, 15 bp, Homo sapiens
cacataaataatagg

SEQ ID NO: 909586 - DNA, 15 bp, Homo sapiens
acacataaataatag

SEQ ID NO: 909587 - DNA, 15 bp, Homo sapiens
aacacataaataata

SEQ ID NO: 909588 - DNA, 15 bp, Homo sapiens
taacacataaataat

SEQ ID NO: 909589 - DNA, 15 bp, Homo sapiens
ctaacacataaataa

SEQ ID NO: 909590 - DNA, 15 bp, Homo sapiens
cctaacacataaata

SEQ ID NO: 909591 - DNA, 15 bp, Homo sapiens
acctaacacataaat

SEQ ID NO: 909592 - DNA, 15 bp, Homo sapiens
aacctaacacataaa

SEQ ID NO: 909593 - DNA, 15 bp, Homo sapiens
caacctaacacataa

SEQ ID NO: 909594 - DNA, 15 bp, Homo sapiens
tcaacctaacacata

SEQ ID NO: 909595 - DNA, 15 bp, Homo sapiens
atcaacctaacacat

SEQ ID NO: 909596 - DNA, 15 bp, Homo sapiens
tatcaacctaacaca

SEQ ID NO: 909597 - DNA, 15 bp, Homo sapiens
atatcaacctaacac

SEQ ID NO: 909598 - DNA, 15 bp, Homo sapiens
aatatcaacctaaca

SEQ ID NO: 909599 - DNA, 15 bp, Homo sapiens
taatatcaacctaac

SEQ ID NO: 909600 - DNA, 15 bp, Homo sapiens
ttaatatcaacctaa

SEQ ID NO: 909601 - DNA, 15 bp, Homo sapiens
tttaatatcaaccta

SEQ ID NO: 909602 - DNA, 15 bp, Homo sapiens
atttaatatcaacct

SEQ ID NO: 909603 - DNA, 15 bp, Homo sapiens
gatttaatatcaacc

SEQ ID NO: 909604 - DNA, 15 bp, Homo sapiens
ggatttaatatcaac

SEQ ID NO: 909605 - DNA, 15 bp, Homo sapiens
aggatttaatatcaa

SEQ ID NO: 909606 - DNA, 15 bp, Homo sapiens
aaggatttaatatca

SEQ ID NO: 909607 - DNA, 15 bp, Homo sapiens
taaggatttaatatc

SEQ ID NO: 909608 - DNA, 15 bp, Homo sapiens
ttaaggatttaatat

SEQ ID NO: 909609 - DNA, 15 bp, Homo sapiens
attaaggatttaata

SEQ ID NO: 909610 - DNA, 15 bp, Homo sapiens
tattaaggatttaat

SEQ ID NO: 909611 - DNA, 15 bp, Homo sapiens
ctattaaggatttaa

SEQ ID NO: 909612 - DNA, 15 bp, Homo sapiens
gctattaaggattta

SEQ ID NO: 909613 - DNA, 15 bp, Homo sapiens
agctattaaggattt

SEQ ID NO: 909614 - DNA, 15 bp, Homo sapiens
aagctattaaggatt

SEQ ID NO: 909615 - DNA, 15 bp, Homo sapiens
aaagctattaaggat

SEQ ID NO: 909616 - DNA, 15 bp, Homo sapiens
taaagctattaagga

SEQ ID NO: 909617 - DNA, 15 bp, Homo sapiens
ttaaagctattaagg

SEQ ID NO: 909618 - DNA, 15 bp, Homo sapiens
gttaaagctattaag

SEQ ID NO: 909619 - DNA, 15 bp, Homo sapiens
tgttaaagctattaa

SEQ ID NO: 909620 - DNA, 15 bp, Homo sapiens
atgttaaagctatta

SEQ ID NO: 909621 - DNA, 15 bp, Homo sapiens
aatgttaaagctatt

SEQ ID NO: 909622 - DNA, 15 bp, Homo sapiens
aaatgttaaagctat

SEQ ID NO: 909623 - DNA, 15 bp, Homo sapiens
aaaatgttaaagcta

SEQ ID NO: 909624 - DNA, 15 bp, Homo sapiens
gaaaatgttaaagct

SEQ ID NO: 909625 - DNA, 15 bp, Homo sapiens
agaaaatgttaaagc

SEQ ID NO: 909626 - DNA, 15 bp, Homo sapiens
tagaaaatgttaaag

SEQ ID NO: 909627 - DNA, 15 bp, Homo sapiens
gtagaaaatgttaaa

SEQ ID NO: 909628 - DNA, 15 bp, Homo sapiens
agtagaaaatgttaa

SEQ ID NO: 909629 - DNA, 15 bp, Homo sapiens
aagtagaaaatgtta

SEQ ID NO: 909630 - DNA, 15 bp, Homo sapiens
aaagtagaaaatgtt

SEQ ID NO: 909631 - DNA, 15 bp, Homo sapiens
caaagtagaaaatgt

SEQ ID NO: 909632 - DNA, 15 bp, Homo sapiens
acaaagtagaaaatg

SEQ ID NO: 909633 - DNA, 15 bp, Homo sapiens
aacaaagtagaaaat

SEQ ID NO: 909634 - DNA, 15 bp, Homo sapiens
taacaaagtagaaaa

SEQ ID NO: 909635 - DNA, 15 bp, Homo sapiens
ctaacaaagtagaaa

SEQ ID NO: 909636 - DNA, 15 bp, Homo sapiens
tctaacaaagtagaa

SEQ ID NO: 909637 - DNA, 15 bp, Homo sapiens
ctctaacaaagtaga

SEQ ID NO: 909638 - DNA, 15 bp, Homo sapiens
tctctaacaaagtag

SEQ ID NO: 909639 - DNA, 15 bp, Homo sapiens
ctctctaacaaagta

SEQ ID NO: 909640 - DNA, 15 bp, Homo sapiens
cctctctaacaaagt

SEQ ID NO: 909641 - DNA, 15 bp, Homo sapiens
tcctctctaacaaag

SEQ ID NO: 909642 - DNA, 15 bp, Homo sapiens
atcctctctaacaaa

SEQ ID NO: 909643 - DNA, 15 bp, Homo sapiens
aatcctctctaacaa

SEQ ID NO: 909644 - DNA, 15 bp, Homo sapiens
aaatcctctctaaca

SEQ ID NO: 909645 - DNA, 15 bp, Homo sapiens
taaatcctctctaac

SEQ ID NO: 909646 - DNA, 15 bp, Homo sapiens
ttaaatcctctctaa

SEQ ID NO: 909647 - DNA, 15 bp, Homo sapiens
tttaaatcctctcta

SEQ ID NO: 909648 - DNA, 15 bp, Homo sapiens
ttttaaatcctctct

SEQ ID NO: 909649 - DNA, 15 bp, Homo sapiens
attttaaatcctctc

SEQ ID NO: 909650 - DNA, 15 bp, Homo sapiens
aattttaaatcctct

SEQ ID NO: 909651 - DNA, 15 bp, Homo sapiens
aaattttaaatcctc

SEQ ID NO: 909652 - DNA, 15 bp, Homo sapiens
taaattttaaatcct

SEQ ID NO: 909653 - DNA, 15 bp, Homo sapiens
ttaaattttaaatcc

SEQ ID NO: 909654 - DNA, 15 bp, Homo sapiens
cttaaattttaaatc

SEQ ID NO: 909655 - DNA, 15 bp, Homo sapiens
acttaaattttaaat

SEQ ID NO: 909656 - DNA, 15 bp, Homo sapiens
tacttaaattttaaa

SEQ ID NO: 909657 - DNA, 15 bp, Homo sapiens
ctacttaaattttaa

SEQ ID NO: 909658 - DNA, 15 bp, Homo sapiens
tctacttaaatttta

SEQ ID NO: 909659 - DNA, 15 bp, Homo sapiens
atctacttaaatttt

SEQ ID NO: 909660 - DNA, 15 bp, Homo sapiens
tatctacttaaattt

SEQ ID NO: 909661 - DNA, 15 bp, Homo sapiens
ttatctacttaaatt

SEQ ID NO: 909662 - DNA, 15 bp, Homo sapiens
cttatctacttaaat

SEQ ID NO: 909663 - DNA, 15 bp, Homo sapiens
gcttatctacttaaa

SEQ ID NO: 909664 - DNA, 15 bp, Homo sapiens
agcttatctacttaa

SEQ ID NO: 909665 - DNA, 15 bp, Homo sapiens
cagcttatctactta

SEQ ID NO: 909666 - DNA, 15 bp, Homo sapiens
tcagcttatctactt

SEQ ID NO: 909667 - DNA, 15 bp, Homo sapiens
ttcagcttatctact

SEQ ID NO: 909668 - DNA, 15 bp, Homo sapiens
attcagcttatctac

SEQ ID NO: 909669 - DNA, 15 bp, Homo sapiens
tattcagcttatcta

SEQ ID NO: 909670 - DNA, 15 bp, Homo sapiens
atattcagcttatct

SEQ ID NO: 909671 - DNA, 15 bp, Homo sapiens
gatattcagcttatc

SEQ ID NO: 909672 - DNA, 15 bp, Homo sapiens
agatattcagcttat

SEQ ID NO: 909673 - DNA, 15 bp, Homo sapiens
cagatattcagctta

SEQ ID NO: 909674 - DNA, 15 bp, Homo sapiens
ccagatattcagctt

SEQ ID NO: 909675 - DNA, 15 bp, Homo sapiens
gccagatattcagct

SEQ ID NO: 909676 - DNA, 15 bp, Homo sapiens
agccagatattcagc

SEQ ID NO: 909677 - DNA, 15 bp, Homo sapiens
aagccagatattcag

SEQ ID NO: 909678 - DNA, 15 bp, Homo sapiens
aaagccagatattca

SEQ ID NO: 909679 - DNA, 15 bp, Homo sapiens
taaagccagatattc

SEQ ID NO: 909680 - DNA, 15 bp, Homo sapiens
ataaagccagatatt

SEQ ID NO: 909681 - DNA, 15 bp, Homo sapiens
tataaagccagatat

SEQ ID NO: 909682 - DNA, 15 bp, Homo sapiens
atataaagccagata

SEQ ID NO: 909683 - DNA, 15 bp, Homo sapiens
aatataaagccagat

SEQ ID NO: 909684 - DNA, 15 bp, Homo sapiens
taatataaagccaga

SEQ ID NO: 909685 - DNA, 15 bp, Homo sapiens
ttaatataaagccag

SEQ ID NO: 909686 - DNA, 15 bp, Homo sapiens
tttaatataaagcca

SEQ ID NO: 909687 - DNA, 15 bp, Homo sapiens
atttaatataaagcc

SEQ ID NO: 909688 - DNA, 15 bp, Homo sapiens
aatttaatataaagc

SEQ ID NO: 909689 - DNA, 15 bp, Homo sapiens
taatttaatataaag

SEQ ID NO: 909690 - DNA, 15 bp, Homo sapiens
gtaatttaatataaa

SEQ ID NO: 909691 - DNA, 15 bp, Homo sapiens
agtaatttaatataa

SEQ ID NO: 909692 - DNA, 15 bp, Homo sapiens
cagtaatttaatata

SEQ ID NO: 909693 - DNA, 15 bp, Homo sapiens
gcagtaatttaatat

SEQ ID NO: 909694 - DNA, 15 bp, Homo sapiens
agcagtaatttaata

SEQ ID NO: 909695 - DNA, 15 bp, Homo sapiens
cagcagtaatttaat

SEQ ID NO: 909696 - DNA, 15 bp, Homo sapiens
tcagcagtaatttaa

SEQ ID NO: 909697 - DNA, 15 bp, Homo sapiens
atcagcagtaattta

SEQ ID NO: 909698 - DNA, 15 bp, Homo sapiens
catcagcagtaattt

SEQ ID NO: 909699 - DNA, 15 bp, Homo sapiens
ccatcagcagtaatt

SEQ ID NO: 909700 - DNA, 15 bp, Homo sapiens
gccatcagcagtaat

SEQ ID NO: 909701 - DNA, 15 bp, Homo sapiens
ggccatcagcagtaa

SEQ ID NO: 909702 - DNA, 15 bp, Homo sapiens
tggccatcagcagta

SEQ ID NO: 909703 - DNA, 15 bp, Homo sapiens
ctggccatcagcagt

SEQ ID NO: 909704 - DNA, 15 bp, Homo sapiens
cctggccatcagcag

SEQ ID NO: 909705 - DNA, 15 bp, Homo sapiens
gcctggccatcagca

SEQ ID NO: 909706 - DNA, 15 bp, Homo sapiens
tgcctggccatcagc

SEQ ID NO: 909707 - DNA, 15 bp, Homo sapiens
gtgcctggccatcag

SEQ ID NO: 909708 - DNA, 15 bp, Homo sapiens
tgtgcctggccatca

SEQ ID NO: 909709 - DNA, 15 bp, Homo sapiens
ctgtgcctggccatc

SEQ ID NO: 909710 - DNA, 15 bp, Homo sapiens
actgtgcctggccat

SEQ ID NO: 909711 - DNA, 15 bp, Homo sapiens
cactgtgcctggcca

SEQ ID NO: 909712 - DNA, 15 bp, Homo sapiens
ccactgtgcctggcc

SEQ ID NO: 909713 - DNA, 15 bp, Homo sapiens
gccactgtgcctggc

SEQ ID NO: 909714 - DNA, 15 bp, Homo sapiens
agccactgtgcctgg

SEQ ID NO: 909715 - DNA, 15 bp, Homo sapiens
gagccactgtgcctg

SEQ ID NO: 909716 - DNA, 15 bp, Homo sapiens
tgagccactgtgcct

SEQ ID NO: 909717 - DNA, 15 bp, Homo sapiens
atgagccactgtgcc

SEQ ID NO: 909718 - DNA, 15 bp, Homo sapiens
catgagccactgtgc

SEQ ID NO: 909719 - DNA, 15 bp, Homo sapiens
acatgagccactgtg

SEQ ID NO: 909720 - DNA, 15 bp, Homo sapiens
gacatgagccactgt

SEQ ID NO: 909721 - DNA, 15 bp, Homo sapiens
agacatgagccactg

SEQ ID NO: 909722 - DNA, 15 bp, Homo sapiens
cagacatgagccact

SEQ ID NO: 909723 - DNA, 15 bp, Homo sapiens
tcagacatgagccac

SEQ ID NO: 909724 - DNA, 15 bp, Homo sapiens
ttcagacatgagcca

SEQ ID NO: 909725 - DNA, 15 bp, Homo sapiens
tttcagacatgagcc

SEQ ID NO: 909726 - DNA, 15 bp, Homo sapiens
atttcagacatgagc

SEQ ID NO: 909727 - DNA, 15 bp, Homo sapiens
gatttcagacatgag

SEQ ID NO: 909728 - DNA, 15 bp, Homo sapiens
ggatttcagacatga

SEQ ID NO: 909729 - DNA, 15 bp, Homo sapiens
aggatttcagacatg

SEQ ID NO: 909730 - DNA, 15 bp, Homo sapiens
taggatttcagacat

SEQ ID NO: 909731 - DNA, 15 bp, Homo sapiens
ctaggatttcagaca

SEQ ID NO: 909732 - DNA, 15 bp, Homo sapiens
gctaggatttcagac

SEQ ID NO: 909733 - DNA, 15 bp, Homo sapiens
tgctaggatttcaga

SEQ ID NO: 909734 - DNA, 15 bp, Homo sapiens
gtgctaggatttcag

SEQ ID NO: 909735 - DNA, 15 bp, Homo sapiens
agtgctaggatttca

SEQ ID NO: 909736 - DNA, 15 bp, Homo sapiens
aagtgctaggatttc

SEQ ID NO: 909737 - DNA, 15 bp, Homo sapiens
aaagtgctaggattt

SEQ ID NO: 909738 - DNA, 15 bp, Homo sapiens
caaagtgctaggatt

SEQ ID NO: 909739 - DNA, 15 bp, Homo sapiens
ccaaagtgctaggat

SEQ ID NO: 909740 - DNA, 15 bp, Homo sapiens
cccaaagtgctagga

SEQ ID NO: 909741 - DNA, 15 bp, Homo sapiens
tcccaaagtgctagg

SEQ ID NO: 909742 - DNA, 15 bp, Homo sapiens
ctcccaaagtgctag

SEQ ID NO: 909743 - DNA, 15 bp, Homo sapiens
cctcccaaagtgcta

SEQ ID NO: 909744 - DNA, 15 bp, Homo sapiens
acctcccaaagtgct

SEQ ID NO: 909745 - DNA, 15 bp, Homo sapiens
aacctcccaaagtgc

SEQ ID NO: 909746 - DNA, 15 bp, Homo sapiens
caacctcccaaagtg

SEQ ID NO: 909747 - DNA, 15 bp, Homo sapiens
tcaacctcccaaagt

SEQ ID NO: 909748 - DNA, 15 bp, Homo sapiens
ctcaacctcccaaag

SEQ ID NO: 909749 - DNA, 15 bp, Homo sapiens
cctcaacctcccaaa

SEQ ID NO: 909750 - DNA, 15 bp, Homo sapiens
gcctcaacctcccaa

SEQ ID NO: 909751 - DNA, 15 bp, Homo sapiens
tgcctcaacctccca

SEQ ID NO: 909752 - DNA, 15 bp, Homo sapiens
ctgcctcaacctccc

SEQ ID NO: 909753 - DNA, 15 bp, Homo sapiens
tctgcctcaacctcc

SEQ ID NO: 909754 - DNA, 15 bp, Homo sapiens
atctgcctcaacctc

SEQ ID NO: 909755 - DNA, 15 bp, Homo sapiens
catctgcctcaacct

SEQ ID NO: 909756 - DNA, 15 bp, Homo sapiens
ccatctgcctcaacc

SEQ ID NO: 909757 - DNA, 15 bp, Homo sapiens
tccatctgcctcaac

SEQ ID NO: 909758 - DNA, 15 bp, Homo sapiens
atccatctgcctcaa

SEQ ID NO: 909759 - DNA, 15 bp, Homo sapiens
gatccatctgcctca

SEQ ID NO: 909760 - DNA, 15 bp, Homo sapiens
tgatccatctgcctc

SEQ ID NO: 909761 - DNA, 15 bp, Homo sapiens
gtgatccatctgcct

SEQ ID NO: 909762 - DNA, 15 bp, Homo sapiens
agtgatccatctgcc

SEQ ID NO: 909763 - DNA, 15 bp, Homo sapiens
aagtgatccatctgc

SEQ ID NO: 909764 - DNA, 15 bp, Homo sapiens
caagtgatccatctg

SEQ ID NO: 909765 - DNA, 15 bp, Homo sapiens
tcaagtgatccatct

SEQ ID NO: 909766 - DNA, 15 bp, Homo sapiens
ctcaagtgatccatc

SEQ ID NO: 909767 - DNA, 15 bp, Homo sapiens
cctcaagtgatccat

SEQ ID NO: 909768 - DNA, 15 bp, Homo sapiens
gcctcaagtgatcca

SEQ ID NO: 909769 - DNA, 15 bp, Homo sapiens
ggcctcaagtgatcc

SEQ ID NO: 909770 - DNA, 15 bp, Homo sapiens
tggcctcaagtgatc

SEQ ID NO: 909771 - DNA, 15 bp, Homo sapiens
ctggcctcaagtgat

SEQ ID NO: 909772 - DNA, 15 bp, Homo sapiens
cctggcctcaagtga

SEQ ID NO: 909773 - DNA, 15 bp, Homo sapiens
tcctggcctcaagtg

SEQ ID NO: 909774 - DNA, 15 bp, Homo sapiens
ctcctggcctcaagt

SEQ ID NO: 909775 - DNA, 15 bp, Homo sapiens
actcctggcctcaag

SEQ ID NO: 909776 - DNA, 15 bp, Homo sapiens
aactcctggcctcaa

SEQ ID NO: 909777 - DNA, 15 bp, Homo sapiens
gaactcctggcctca

SEQ ID NO: 909778 - DNA, 15 bp, Homo sapiens
tgaactcctggcctc

SEQ ID NO: 909779 - DNA, 15 bp, Homo sapiens
ttgaactcctggcct

SEQ ID NO: 909780 - DNA, 15 bp, Homo sapiens
cttgaactcctggcc

SEQ ID NO: 909781 - DNA, 15 bp, Homo sapiens
tcttgaactcctggc

SEQ ID NO: 909782 - DNA, 15 bp, Homo sapiens
gtcttgaactcctgg

SEQ ID NO: 909783 - DNA, 15 bp, Homo sapiens
agccaggctggtctt

SEQ ID NO: 909784 - DNA, 15 bp, Homo sapiens
tagccaggctggtct

SEQ ID NO: 909785 - DNA, 15 bp, Homo sapiens
ttagccaggctggtc

SEQ ID NO: 909786 - DNA, 15 bp, Homo sapiens
gttagccaggctggt

SEQ ID NO: 909787 - DNA, 15 bp, Homo sapiens
tgttagccaggctgg

SEQ ID NO: 909788 - DNA, 15 bp, Homo sapiens
gtgttagccaggctg

SEQ ID NO: 909789 - DNA, 15 bp, Homo sapiens
tgtgttagccaggct

SEQ ID NO: 909790 - DNA, 15 bp, Homo sapiens
ctgtgttagccaggc

SEQ ID NO: 909791 - DNA, 15 bp, Homo sapiens
actgtgttagccagg

SEQ ID NO: 909792 - DNA, 15 bp, Homo sapiens
cactgtgttagccag

SEQ ID NO: 909793 - DNA, 15 bp, Homo sapiens
tcactgtgttagcca

SEQ ID NO: 909794 - DNA, 15 bp, Homo sapiens
ttcactgtgttagcc

SEQ ID NO: 909795 - DNA, 15 bp, Homo sapiens
tttcactgtgttagc

SEQ ID NO: 909796 - DNA, 15 bp, Homo sapiens
gtttcactgtgttag

SEQ ID NO: 909797 - DNA, 15 bp, Homo sapiens
ggtttcactgtgtta

SEQ ID NO: 909798 - DNA, 15 bp, Homo sapiens
gggtttcactgtgtt

SEQ ID NO: 909799 - DNA, 15 bp, Homo sapiens
ggggtttcactgtgt

SEQ ID NO: 909800 - DNA, 15 bp, Homo sapiens
cggggtttcactgtg

SEQ ID NO: 909801 - DNA, 15 bp, Homo sapiens
acggggtttcactgt

SEQ ID NO: 909802 - DNA, 15 bp, Homo sapiens
gacggggtttcactg

SEQ ID NO: 909803 - DNA, 15 bp, Homo sapiens
agacggggtttcact

SEQ ID NO: 909804 - DNA, 15 bp, Homo sapiens
gagacggggtttcac

SEQ ID NO: 909805 - DNA, 15 bp, Homo sapiens
agagacggggtttca

SEQ ID NO: 909806 - DNA, 15 bp, Homo sapiens
tagagacggggtttc

SEQ ID NO: 909807 - DNA, 15 bp, Homo sapiens
gtagagacggggttt

SEQ ID NO: 909808 - DNA, 15 bp, Homo sapiens
agtagagacggggtt

SEQ ID NO: 909809 - DNA, 15 bp, Homo sapiens
tagtagagacggggt

SEQ ID NO: 909810 - DNA, 15 bp, Homo sapiens
ttagtagagacgggg

SEQ ID NO: 909811 - DNA, 15 bp, Homo sapiens
tttagtagagacggg

SEQ ID NO: 909812 - DNA, 15 bp, Homo sapiens
ttttagtagagacgg

SEQ ID NO: 909813 - DNA, 15 bp, Homo sapiens
tttttagtagagacg

SEQ ID NO: 909814 - DNA, 15 bp, Homo sapiens
atttttagtagagac

SEQ ID NO: 909815 - DNA, 15 bp, Homo sapiens
tatttttagtagaga

SEQ ID NO: 909816 - DNA, 15 bp, Homo sapiens
gtatttttagtagag

SEQ ID NO: 909817 - DNA, 15 bp, Homo sapiens
tgtatttttagtaga

SEQ ID NO: 909818 - DNA, 15 bp, Homo sapiens
ttgtatttttagtag

SEQ ID NO: 909819 - DNA, 15 bp, Homo sapiens
tttgtatttttagta

SEQ ID NO: 909820 - DNA, 15 bp, Homo sapiens
ttttgtatttttagt

SEQ ID NO: 909821 - DNA, 15 bp, Homo sapiens
tttttgtatttttag

SEQ ID NO: 909822 - DNA, 15 bp, Homo sapiens
atttttgtattttta

SEQ ID NO: 909823 - DNA, 15 bp, Homo sapiens
aatttttgtattttt

SEQ ID NO: 909824 - DNA, 15 bp, Homo sapiens
taatttttgtatttt

SEQ ID NO: 909825 - DNA, 15 bp, Homo sapiens
ctaatttttgtattt

SEQ ID NO: 909826 - DNA, 15 bp, Homo sapiens
gctaatttttgtatt

SEQ ID NO: 909827 - DNA, 15 bp, Homo sapiens
ggctaatttttgtat

SEQ ID NO: 909828 - DNA, 15 bp, Homo sapiens
tggctaatttttgta

SEQ ID NO: 909829 - DNA, 15 bp, Homo sapiens
ctggctaatttttgt

SEQ ID NO: 909830 - DNA, 15 bp, Homo sapiens
actggctaatttttg

SEQ ID NO: 909831 - DNA, 15 bp, Homo sapiens
aactggctaattttt

SEQ ID NO: 909832 - DNA, 15 bp, Homo sapiens
taactggctaatttt

SEQ ID NO: 909833 - DNA, 15 bp, Homo sapiens
ataactggctaattt

SEQ ID NO: 909834 - DNA, 15 bp, Homo sapiens
cataactggctaatt

SEQ ID NO: 909835 - DNA, 15 bp, Homo sapiens
ccataactggctaat

SEQ ID NO: 909836 - DNA, 15 bp, Homo sapiens
accataactggctaa

SEQ ID NO: 909837 - DNA, 15 bp, Homo sapiens
taccataactggcta

SEQ ID NO: 909838 - DNA, 15 bp, Homo sapiens
ttaccataactggct

SEQ ID NO: 909839 - DNA, 15 bp, Homo sapiens
attaccataactggc

SEQ ID NO: 909840 - DNA, 15 bp, Homo sapiens
cattaccataactgg

SEQ ID NO: 909841 - DNA, 15 bp, Homo sapiens
gcattaccataactg

SEQ ID NO: 909842 - DNA, 15 bp, Homo sapiens
tgcattaccataact

SEQ ID NO: 909843 - DNA, 15 bp, Homo sapiens
atgcattaccataac

SEQ ID NO: 909844 - DNA, 15 bp, Homo sapiens
catgcattaccataa

SEQ ID NO: 909845 - DNA, 15 bp, Homo sapiens
gcatgcattaccata

SEQ ID NO: 909846 - DNA, 15 bp, Homo sapiens
ggcatgcattaccat

SEQ ID NO: 909847 - DNA, 15 bp, Homo sapiens
tggcatgcattacca

SEQ ID NO: 909848 - DNA, 15 bp, Homo sapiens
ctggcatgcattacc

SEQ ID NO: 909849 - DNA, 15 bp, Homo sapiens
actggcatgcattac

SEQ ID NO: 909850 - DNA, 15 bp, Homo sapiens
tactggcatgcatta

SEQ ID NO: 909851 - DNA, 15 bp, Homo sapiens
ttactggcatgcatt

SEQ ID NO: 909852 - DNA, 15 bp, Homo sapiens
attactggcatgcat

SEQ ID NO: 909853 - DNA, 15 bp, Homo sapiens
aattactggcatgca

SEQ ID NO: 909854 - DNA, 15 bp, Homo sapiens
gaattactggcatgc

SEQ ID NO: 909855 - DNA, 15 bp, Homo sapiens
ggaattactggcatg

SEQ ID NO: 909856 - DNA, 15 bp, Homo sapiens
tggaattactggcat

SEQ ID NO: 909857 - DNA, 15 bp, Homo sapiens
ctggaattactggca

SEQ ID NO: 909858 - DNA, 15 bp, Homo sapiens
gctggaattactggc

SEQ ID NO: 909859 - DNA, 15 bp, Homo sapiens
agctggaattactgg

SEQ ID NO: 909860 - DNA, 15 bp, Homo sapiens
tagctggaattactg

SEQ ID NO: 909861 - DNA, 15 bp, Homo sapiens
gtagctggaattact

SEQ ID NO: 909862 - DNA, 15 bp, Homo sapiens
agtagctggaattac

SEQ ID NO: 909863 - DNA, 15 bp, Homo sapiens
gagtagctggaatta

SEQ ID NO: 909864 - DNA, 15 bp, Homo sapiens
cgagtagctggaatt

SEQ ID NO: 909865 - DNA, 15 bp, Homo sapiens
ccgagtagctggaat

SEQ ID NO: 909866 - DNA, 15 bp, Homo sapiens
accgagtagctggaa

SEQ ID NO: 909867 - DNA, 15 bp, Homo sapiens
taccgagtagctgga

SEQ ID NO: 909868 - DNA, 15 bp, Homo sapiens
ctaccgagtagctgg

SEQ ID NO: 909869 - DNA, 15 bp, Homo sapiens
cctaccgagtagctg

SEQ ID NO: 909870 - DNA, 15 bp, Homo sapiens
gcctaccgagtagct

SEQ ID NO: 909871 - DNA, 15 bp, Homo sapiens
agcctaccgagtagc

SEQ ID NO: 909872 - DNA, 15 bp, Homo sapiens
cagcctaccgagtag

SEQ ID NO: 909873 - DNA, 15 bp, Homo sapiens
tcagcctaccgagta

SEQ ID NO: 909874 - DNA, 15 bp, Homo sapiens
ctcagcctaccgagt

SEQ ID NO: 909875 - DNA, 15 bp, Homo sapiens
cctcagcctaccgag

SEQ ID NO: 909876 - DNA, 15 bp, Homo sapiens
acctcagcctaccga

SEQ ID NO: 909877 - DNA, 15 bp, Homo sapiens
cacctcagcctaccg

SEQ ID NO: 909878 - DNA, 15 bp, Homo sapiens
ccacctcagcctacc

SEQ ID NO: 909879 - DNA, 15 bp, Homo sapiens
cccacctcagcctac

SEQ ID NO: 909880 - DNA, 15 bp, Homo sapiens
tcccacctcagccta

SEQ ID NO: 909881 - DNA, 15 bp, Homo sapiens
ctcccacctcagcct

SEQ ID NO: 909882 - DNA, 15 bp, Homo sapiens
tctcccacctcagcc

SEQ ID NO: 909883 - DNA, 15 bp, Homo sapiens
ttctcccacctcagc

SEQ ID NO: 909884 - DNA, 15 bp, Homo sapiens
attctcccacctcag

SEQ ID NO: 909885 - DNA, 15 bp, Homo sapiens
aattctcccacctca

SEQ ID NO: 909886 - DNA, 15 bp, Homo sapiens
caattctcccacctc

SEQ ID NO: 909887 - DNA, 15 bp, Homo sapiens
gcaattctcccacct

SEQ ID NO: 909888 - DNA, 15 bp, Homo sapiens
agcaattctcccacc

SEQ ID NO: 909889 - DNA, 15 bp, Homo sapiens
aagcaattctcccac

SEQ ID NO: 909890 - DNA, 15 bp, Homo sapiens
caagcaattctccca

SEQ ID NO: 909891 - DNA, 15 bp, Homo sapiens
tcaagcaattctccc

SEQ ID NO: 909892 - DNA, 15 bp, Homo sapiens
ttcaagcaattctcc

SEQ ID NO: 909893 - DNA, 15 bp, Homo sapiens
gttcaagcaattctc

SEQ ID NO: 909894 - DNA, 15 bp, Homo sapiens
ggttcaagcaattct

SEQ ID NO: 909895 - DNA, 15 bp, Homo sapiens
cggttcaagcaattc

SEQ ID NO: 909896 - DNA, 15 bp, Homo sapiens
ccggttcaagcaatt

SEQ ID NO: 909897 - DNA, 15 bp, Homo sapiens
cccggttcaagcaat

SEQ ID NO: 909898 - DNA, 15 bp, Homo sapiens
tcccggttcaagcaa

SEQ ID NO: 909899 - DNA, 15 bp, Homo sapiens
ctcccggttcaagca

SEQ ID NO: 909900 - DNA, 15 bp, Homo sapiens
cctcccggttcaagc

SEQ ID NO: 909901 - DNA, 15 bp, Homo sapiens
gcctcccggttcaag

SEQ ID NO: 909902 - DNA, 15 bp, Homo sapiens
tgcctcccggttcaa

SEQ ID NO: 909903 - DNA, 15 bp, Homo sapiens
ctgcctcccggttca

SEQ ID NO: 909904 - DNA, 15 bp, Homo sapiens
tctgcctcccggttc

SEQ ID NO: 909905 - DNA, 15 bp, Homo sapiens
ctctgcctcccggtt

SEQ ID NO: 909906 - DNA, 15 bp, Homo sapiens
cctctgcctcccggt

SEQ ID NO: 909907 - DNA, 15 bp, Homo sapiens
acctctgcctcccgg

SEQ ID NO: 909908 - DNA, 15 bp, Homo sapiens
aacctctgcctcccg

SEQ ID NO: 909909 - DNA, 15 bp, Homo sapiens
caacctctgcctccc

SEQ ID NO: 909910 - DNA, 15 bp, Homo sapiens
gcaacctctgcctcc

SEQ ID NO: 909911 - DNA, 15 bp, Homo sapiens
tgcaacctctgcctc

SEQ ID NO: 909912 - DNA, 15 bp, Homo sapiens
ggctcactgcaacct

SEQ ID NO: 909913 - DNA, 15 bp, Homo sapiens
cggctcactgcaacc

SEQ ID NO: 909914 - DNA, 15 bp, Homo sapiens
tcggctcactgcaac

SEQ ID NO: 909915 - DNA, 15 bp, Homo sapiens
ctcggctcactgcaa

SEQ ID NO: 909916 - DNA, 15 bp, Homo sapiens
tctcggctcactgca

SEQ ID NO: 909917 - DNA, 15 bp, Homo sapiens
atctcggctcactgc

SEQ ID NO: 909918 - DNA, 15 bp, Homo sapiens
gatctcggctcactg

SEQ ID NO: 909919 - DNA, 15 bp, Homo sapiens
cgatctcggctcact

SEQ ID NO: 909920 - DNA, 15 bp, Homo sapiens
gcgatctcggctcac

SEQ ID NO: 909921 - DNA, 15 bp, Homo sapiens
tgcgatctcggctca

SEQ ID NO: 909922 - DNA, 15 bp, Homo sapiens
gtgcgatctcggctc

SEQ ID NO: 909923 - DNA, 15 bp, Homo sapiens
ggtgcgatctcggct

SEQ ID NO: 909924 - DNA, 15 bp, Homo sapiens
tggtgcgatctcggc

SEQ ID NO: 909925 - DNA, 15 bp, Homo sapiens
gtggtgcgatctcgg

SEQ ID NO: 909926 - DNA, 15 bp, Homo sapiens
agtggtgcgatctcg

SEQ ID NO: 909927 - DNA, 15 bp, Homo sapiens
acagtggtgcgatct

SEQ ID NO: 909928 - DNA, 15 bp, Homo sapiens
tacagtggtgcgatc

SEQ ID NO: 909929 - DNA, 15 bp, Homo sapiens
gtacagtggtgcgat

SEQ ID NO: 909930 - DNA, 15 bp, Homo sapiens
agtacagtggtgcga

SEQ ID NO: 909931 - DNA, 15 bp, Homo sapiens
gagtacagtggtgcg

SEQ ID NO: 909932 - DNA, 15 bp, Homo sapiens
ggagtacagtggtgc

SEQ ID NO: 909933 - DNA, 15 bp, Homo sapiens
tggagtacagtggtg

SEQ ID NO: 909934 - DNA, 15 bp, Homo sapiens
ctggagtacagtggt

SEQ ID NO: 909935 - DNA, 15 bp, Homo sapiens
gctggagtacagtgg

SEQ ID NO: 909936 - DNA, 15 bp, Homo sapiens
ggctggagtacagtg

SEQ ID NO: 909937 - DNA, 15 bp, Homo sapiens
aggctggagtacagt

SEQ ID NO: 909938 - DNA, 15 bp, Homo sapiens
taggctggagtacag

SEQ ID NO: 909939 - DNA, 15 bp, Homo sapiens
ctaggctggagtaca

SEQ ID NO: 909940 - DNA, 15 bp, Homo sapiens
cctaggctggagtac

SEQ ID NO: 909941 - DNA, 15 bp, Homo sapiens
gcctaggctggagta

SEQ ID NO: 909942 - DNA, 15 bp, Homo sapiens
cgcctaggctggagt

SEQ ID NO: 909943 - DNA, 15 bp, Homo sapiens
tcgcctaggctggag

SEQ ID NO: 909944 - DNA, 15 bp, Homo sapiens
gtcgcctaggctgga

SEQ ID NO: 909945 - DNA, 15 bp, Homo sapiens
tgtcgcctaggctgg

SEQ ID NO: 909946 - DNA, 15 bp, Homo sapiens
ttgtcgcctaggctg

SEQ ID NO: 909947 - DNA, 15 bp, Homo sapiens
tttgtcgcctaggct

SEQ ID NO: 909948 - DNA, 15 bp, Homo sapiens
ctttgtcgcctaggc

SEQ ID NO: 909949 - DNA, 15 bp, Homo sapiens
tctttgtcgcctagg

SEQ ID NO: 909950 - DNA, 15 bp, Homo sapiens
gtctttgtcgcctag

SEQ ID NO: 909951 - DNA, 15 bp, Homo sapiens
agtctttgtcgccta

SEQ ID NO: 909952 - DNA, 15 bp, Homo sapiens
aagtctttgtcgcct

SEQ ID NO: 909953 - DNA, 15 bp, Homo sapiens
aaagtctttgtcgcc

SEQ ID NO: 909954 - DNA, 15 bp, Homo sapiens
caaagtctttgtcgc

SEQ ID NO: 909955 - DNA, 15 bp, Homo sapiens
acaaagtctttgtcg

SEQ ID NO: 909956 - DNA, 15 bp, Homo sapiens
gacaaagtctttgtc

SEQ ID NO: 909957 - DNA, 15 bp, Homo sapiens
agacaaagtctttgt

SEQ ID NO: 909958 - DNA, 15 bp, Homo sapiens
gagacaaagtctttg

SEQ ID NO: 909959 - DNA, 15 bp, Homo sapiens
tgagacaaagtcttt

SEQ ID NO: 909960 - DNA, 15 bp, Homo sapiens
ttgagacaaagtctt

SEQ ID NO: 909961 - DNA, 15 bp, Homo sapiens
tttgagacaaagtct

SEQ ID NO: 909962 - DNA, 15 bp, Homo sapiens
ttttgagacaaagtc

SEQ ID NO: 909963 - DNA, 15 bp, Homo sapiens
tttttgagacaaagt

SEQ ID NO: 909964 - DNA, 15 bp, Homo sapiens
ttttttgagacaaag

SEQ ID NO: 909965 - DNA, 15 bp, Homo sapiens
atttttttttttttt

SEQ ID NO: 909966 - DNA, 15 bp, Homo sapiens
aattttttttttttt

SEQ ID NO: 909967 - DNA, 15 bp, Homo sapiens
taatttttttttttt

SEQ ID NO: 909968 - DNA, 15 bp, Homo sapiens
gtaattttttttttt

SEQ ID NO: 909969 - DNA, 15 bp, Homo sapiens
agtaatttttttttt

SEQ ID NO: 909970 - DNA, 15 bp, Homo sapiens
cagtaattttttttt

SEQ ID NO: 909971 - DNA, 15 bp, Homo sapiens
gcagtaatttttttt

SEQ ID NO: 909972 - DNA, 15 bp, Homo sapiens
agcagtaattttttt

SEQ ID NO: 909973 - DNA, 15 bp, Homo sapiens
cagcagtaatttttt

SEQ ID NO: 909974 - DNA, 15 bp, Homo sapiens
tcagcagtaattttt

SEQ ID NO: 909975 - DNA, 15 bp, Homo sapiens
ttcagcagtaatttt

SEQ ID NO: 909976 - DNA, 15 bp, Homo sapiens
attcagcagtaattt

SEQ ID NO: 909977 - DNA, 15 bp, Homo sapiens
aattcagcagtaatt

SEQ ID NO: 909978 - DNA, 15 bp, Homo sapiens
aaattcagcagtaat

SEQ ID NO: 909979 - DNA, 15 bp, Homo sapiens
aaaattcagcagtaa

SEQ ID NO: 909980 - DNA, 15 bp, Homo sapiens
taaaattcagcagta

SEQ ID NO: 909981 - DNA, 15 bp, Homo sapiens
ataaaattcagcagt

SEQ ID NO: 909982 - DNA, 15 bp, Homo sapiens
gataaaattcagcag

SEQ ID NO: 909983 - DNA, 15 bp, Homo sapiens
agataaaattcagca

SEQ ID NO: 909984 - DNA, 15 bp, Homo sapiens
aagataaaattcagc

SEQ ID NO: 909985 - DNA, 15 bp, Homo sapiens
gaagataaaattcag

SEQ ID NO: 909986 - DNA, 15 bp, Homo sapiens
agaagataaaattca

SEQ ID NO: 909987 - DNA, 15 bp, Homo sapiens
aagaagataaaattc

SEQ ID NO: 909988 - DNA, 15 bp, Homo sapiens
gaagaagataaaatt

SEQ ID NO: 909989 - DNA, 15 bp, Homo sapiens
agaagaagataaaat

SEQ ID NO: 909990 - DNA, 15 bp, Homo sapiens
aagaagaagataaaa

SEQ ID NO: 909991 - DNA, 15 bp, Homo sapiens
taagaagaagataaa

SEQ ID NO: 909992 - DNA, 15 bp, Homo sapiens
ataagaagaagataa

SEQ ID NO: 909993 - DNA, 15 bp, Homo sapiens
aataagaagaagata

SEQ ID NO: 909994 - DNA, 15 bp, Homo sapiens
aaataagaagaagat

SEQ ID NO: 909995 - DNA, 15 bp, Homo sapiens
taaataagaagaaga

SEQ ID NO: 909996 - DNA, 15 bp, Homo sapiens
ataaataagaagaag

SEQ ID NO: 909997 - DNA, 15 bp, Homo sapiens
aataaataagaagaa

SEQ ID NO: 909998 - DNA, 15 bp, Homo sapiens
aaataaataagaaga

SEQ ID NO: 909999 - DNA, 15 bp, Homo sapiens
aaaataaataagaag

SEQ ID NO: 910000 - DNA, 15 bp, Homo sapiens
aaaaataaataagaa

SEQ ID NO: 910001 - DNA, 15 bp, Homo sapiens
aaaaaataaataaga

SEQ ID NO: 910002 - DNA, 15 bp, Homo sapiens
aaaaaaataaataag

SEQ ID NO: 910003 - DNA, 15 bp, Homo sapiens
aaaaaaaataaataa

SEQ ID NO: 910004 - DNA, 15 bp, Homo sapiens
aaaaaaaaataaata

SEQ ID NO: 910005 - DNA, 15 bp, Homo sapiens
aaaaaaaaaataaat

SEQ ID NO: 910006 - DNA, 15 bp, Homo sapiens
aaaaaaaaaaataaa

SEQ ID NO: 910007 - DNA, 15 bp, Homo sapiens
aaaaaaaaaaaataa

SEQ ID NO: 910008 - DNA, 15 bp, Homo sapiens
taaaaaaaaaaaata

SEQ ID NO: 910009 - DNA, 15 bp, Homo sapiens
gtaaaaaaaaaaaat

SEQ ID NO: 910010 - DNA, 15 bp, Homo sapiens
agtaaaaaaaaaaaa

SEQ ID NO: 910011 - DNA, 15 bp, Homo sapiens
tagtaaaaaaaaaaa

SEQ ID NO: 910012 - DNA, 15 bp, Homo sapiens
atagtaaaaaaaaaa

SEQ ID NO: 910013 - DNA, 15 bp, Homo sapiens
aatagtaaaaaaaaa

SEQ ID NO: 910014 - DNA, 15 bp, Homo sapiens
aaatagtaaaaaaaa

SEQ ID NO: 910015 - DNA, 15 bp, Homo sapiens
aaaatagtaaaaaaa

SEQ ID NO: 910016 - DNA, 15 bp, Homo sapiens
taaaatagtaaaaaa

SEQ ID NO: 910017 - DNA, 15 bp, Homo sapiens
ctaaaatagtaaaaa

SEQ ID NO: 910018 - DNA, 15 bp, Homo sapiens
actaaaatagtaaaa

SEQ ID NO: 910019 - DNA, 15 bp, Homo sapiens
aactaaaatagtaaa

SEQ ID NO: 910020 - DNA, 15 bp, Homo sapiens
caactaaaatagtaa

SEQ ID NO: 910021 - DNA, 15 bp, Homo sapiens
ccaactaaaatagta

SEQ ID NO: 910022 - DNA, 15 bp, Homo sapiens
gccaactaaaatagt

SEQ ID NO: 910023 - DNA, 15 bp, Homo sapiens
agccaactaaaatag

SEQ ID NO: 910024 - DNA, 15 bp, Homo sapiens
gagccaactaaaata

SEQ ID NO: 910025 - DNA, 15 bp, Homo sapiens
agagccaactaaaat

SEQ ID NO: 910026 - DNA, 15 bp, Homo sapiens
aagagccaactaaaa

SEQ ID NO: 910027 - DNA, 15 bp, Homo sapiens
gaagagccaactaaa

SEQ ID NO: 910028 - DNA, 15 bp, Homo sapiens
cgaagagccaactaa

SEQ ID NO: 910029 - DNA, 15 bp, Homo sapiens
tcgaagagccaacta

SEQ ID NO: 910030 - DNA, 15 bp, Homo sapiens
ttcgaagagccaact

SEQ ID NO: 910031 - DNA, 15 bp, Homo sapiens
tttcgaagagccaac

SEQ ID NO: 910032 - DNA, 15 bp, Homo sapiens
atttcgaagagccaa

SEQ ID NO: 910033 - DNA, 15 bp, Homo sapiens
catttcgaagagcca

SEQ ID NO: 910034 - DNA, 15 bp, Homo sapiens
tcatttcgaagagcc

SEQ ID NO: 910035 - DNA, 15 bp, Homo sapiens
ctcatttcgaagagc

SEQ ID NO: 910036 - DNA, 15 bp, Homo sapiens
cctcatttcgaagag

SEQ ID NO: 910037 - DNA, 15 bp, Homo sapiens
tcctcatttcgaaga

SEQ ID NO: 910038 - DNA, 15 bp, Homo sapiens
ctcctcatttcgaag

SEQ ID NO: 910039 - DNA, 15 bp, Homo sapiens
cctcctcatttcgaa

SEQ ID NO: 910040 - DNA, 15 bp, Homo sapiens
gcctcctcatttcga

SEQ ID NO: 910041 - DNA, 15 bp, Homo sapiens
tgcctcctcatttcg

SEQ ID NO: 910042 - DNA, 15 bp, Homo sapiens
ctgcctcctcatttc

SEQ ID NO: 910043 - DNA, 15 bp, Homo sapiens
tctgcctcctcattt

SEQ ID NO: 910044 - DNA, 15 bp, Homo sapiens
ttctgcctcctcatt

SEQ ID NO: 910045 - DNA, 15 bp, Homo sapiens
tttctgcctcctcat

SEQ ID NO: 910046 - DNA, 15 bp, Homo sapiens
ttttctgcctcctca

SEQ ID NO: 910047 - DNA, 15 bp, Homo sapiens
attttctgcctcctc

SEQ ID NO: 910048 - DNA, 15 bp, Homo sapiens
cattttctgcctcct

SEQ ID NO: 910049 - DNA, 15 bp, Homo sapiens
tcattttctgcctcc

SEQ ID NO: 910050 - DNA, 15 bp, Homo sapiens
ttcattttctgcctc

SEQ ID NO: 910051 - DNA, 15 bp, Homo sapiens
tttcattttctgcct

SEQ ID NO: 910052 - DNA, 15 bp, Homo sapiens
ttttcattttctgcc

SEQ ID NO: 910053 - DNA, 15 bp, Homo sapiens
gttttcattttctgc

SEQ ID NO: 910054 - DNA, 15 bp, Homo sapiens
tgttttcattttctg

SEQ ID NO: 910055 - DNA, 15 bp, Homo sapiens
ctgttttcattttct

SEQ ID NO: 910056 - DNA, 15 bp, Homo sapiens
gctgttttcattttc

SEQ ID NO: 910057 - DNA, 15 bp, Homo sapiens
tgctgttttcatttt

SEQ ID NO: 910058 - DNA, 15 bp, Homo sapiens
ttgctgttttcattt

SEQ ID NO: 910059 - DNA, 15 bp, Homo sapiens
tttgctgttttcatt

SEQ ID NO: 910060 - DNA, 15 bp, Homo sapiens
atttgctgttttcat

SEQ ID NO: 910061 - DNA, 15 bp, Homo sapiens
aatttgctgttttca

SEQ ID NO: 910062 - DNA, 15 bp, Homo sapiens
taatttgctgttttc

SEQ ID NO: 910063 - DNA, 15 bp, Homo sapiens
ttaatttgctgtttt

SEQ ID NO: 910064 - DNA, 15 bp, Homo sapiens
cttaatttgctgttt

SEQ ID NO: 910065 - DNA, 15 bp, Homo sapiens
tcttaatttgctgtt

SEQ ID NO: 910066 - DNA, 15 bp, Homo sapiens
ttcttaatttgctgt

SEQ ID NO: 910067 - DNA, 15 bp, Homo sapiens
cttcttaatttgctg

SEQ ID NO: 910068 - DNA, 15 bp, Homo sapiens
tcttcttaatttgct

SEQ ID NO: 910069 - DNA, 15 bp, Homo sapiens
ctcttcttaatttgc

SEQ ID NO: 910070 - DNA, 15 bp, Homo sapiens
tctcttcttaatttg

SEQ ID NO: 910071 - DNA, 15 bp, Homo sapiens
ctctcttcttaattt

SEQ ID NO: 910072 - DNA, 15 bp, Homo sapiens
cctctcttcttaatt

SEQ ID NO: 910073 - DNA, 15 bp, Homo sapiens
acctctcttcttaat

SEQ ID NO: 910074 - DNA, 15 bp, Homo sapiens
tacctctcttcttaa

SEQ ID NO: 910075 - DNA, 15 bp, Homo sapiens
ttacctctcttctta

SEQ ID NO: 910076 - DNA, 15 bp, Homo sapiens
tttacctctcttctt

SEQ ID NO: 910077 - DNA, 15 bp, Homo sapiens
ttttacctctcttct

SEQ ID NO: 910078 - DNA, 15 bp, Homo sapiens
tttttacctctcttc

SEQ ID NO: 910079 - DNA, 15 bp, Homo sapiens
ttttttacctctctt

SEQ ID NO: 910080 - DNA, 15 bp, Homo sapiens
attttttacctctct

SEQ ID NO: 910081 - DNA, 15 bp, Homo sapiens
aattttttacctctc

SEQ ID NO: 910082 - DNA, 15 bp, Homo sapiens
aaattttttacctct

SEQ ID NO: 910083 - DNA, 15 bp, Homo sapiens
aaaattttttacctc

SEQ ID NO: 910084 - DNA, 15 bp, Homo sapiens
taaaattttttacct

SEQ ID NO: 910085 - DNA, 15 bp, Homo sapiens
ctaaaattttttacc

SEQ ID NO: 910086 - DNA, 15 bp, Homo sapiens
actaaaattttttac

SEQ ID NO: 910087 - DNA, 15 bp, Homo sapiens
tactaaaatttttta

SEQ ID NO: 910088 - DNA, 15 bp, Homo sapiens
ctactaaaatttttt

SEQ ID NO: 910089 - DNA, 15 bp, Homo sapiens
actactaaaattttt

SEQ ID NO: 910090 - DNA, 15 bp, Homo sapiens
aactactaaaatttt

SEQ ID NO: 910091 - DNA, 15 bp, Homo sapiens
caactactaaaattt

SEQ ID NO: 910092 - DNA, 15 bp, Homo sapiens
acaactactaaaatt

SEQ ID NO: 910093 - DNA, 15 bp, Homo sapiens
cacaactactaaaat

SEQ ID NO: 910094 - DNA, 15 bp, Homo sapiens
ccacaactactaaaa

SEQ ID NO: 910095 - DNA, 15 bp, Homo sapiens
accacaactactaaa

SEQ ID NO: 910096 - DNA, 15 bp, Homo sapiens
caccacaactactaa

SEQ ID NO: 910097 - DNA, 15 bp, Homo sapiens
ccaccacaactacta

SEQ ID NO: 910098 - DNA, 15 bp, Homo sapiens
accaccacaactact

SEQ ID NO: 910099 - DNA, 15 bp, Homo sapiens
aaccaccacaactac

SEQ ID NO: 910100 - DNA, 15 bp, Homo sapiens
gaaccaccacaacta

SEQ ID NO: 910101 - DNA, 15 bp, Homo sapiens
tgaaccaccacaact

SEQ ID NO: 910102 - DNA, 15 bp, Homo sapiens
ttgaaccaccacaac

SEQ ID NO: 910103 - DNA, 15 bp, Homo sapiens
gttgaaccaccacaa

SEQ ID NO: 910104 - DNA, 15 bp, Homo sapiens
tgttgaaccaccaca

SEQ ID NO: 910105 - DNA, 15 bp, Homo sapiens
ttgttgaaccaccac

SEQ ID NO: 910106 - DNA, 15 bp, Homo sapiens
tttgttgaaccacca

SEQ ID NO: 910107 - DNA, 15 bp, Homo sapiens
ctttgttgaaccacc

SEQ ID NO: 910108 - DNA, 15 bp, Homo sapiens
cctttgttgaaccac

SEQ ID NO: 910109 - DNA, 15 bp, Homo sapiens
acctttgttgaacca

SEQ ID NO: 910110 - DNA, 15 bp, Homo sapiens
tacctttgttgaacc

SEQ ID NO: 910111 - DNA, 15 bp, Homo sapiens
gtacctttgttgaac

SEQ ID NO: 910112 - DNA, 15 bp, Homo sapiens
agtacctttgttgaa

SEQ ID NO: 910113 - DNA, 15 bp, Homo sapiens
aagtacctttgttga

SEQ ID NO: 910114 - DNA, 15 bp, Homo sapiens
taagtacctttgttg

SEQ ID NO: 910115 - DNA, 15 bp, Homo sapiens
ataagtacctttgtt

SEQ ID NO: 910116 - DNA, 15 bp, Homo sapiens
aataagtacctttgt

SEQ ID NO: 910117 - DNA, 15 bp, Homo sapiens
taataagtacctttg

SEQ ID NO: 910118 - DNA, 15 bp, Homo sapiens
ttaataagtaccttt

SEQ ID NO: 910119 - DNA, 15 bp, Homo sapiens
tttaataagtacctt

SEQ ID NO: 910120 - DNA, 15 bp, Homo sapiens
ttttaataagtacct

SEQ ID NO: 910121 - DNA, 15 bp, Homo sapiens
attttaataagtacc

SEQ ID NO: 910122 - DNA, 15 bp, Homo sapiens
tattttaataagtac

SEQ ID NO: 910123 - DNA, 15 bp, Homo sapiens
ttattttaataagta

SEQ ID NO: 910124 - DNA, 15 bp, Homo sapiens
cttattttaataagt

SEQ ID NO: 910125 - DNA, 15 bp, Homo sapiens
acttattttaataag

SEQ ID NO: 910126 - DNA, 15 bp, Homo sapiens
tacttattttaataa

SEQ ID NO: 910127 - DNA, 15 bp, Homo sapiens
gtacttattttaata

SEQ ID NO: 910128 - DNA, 15 bp, Homo sapiens
ggtacttattttaat

SEQ ID NO: 910129 - DNA, 15 bp, Homo sapiens
aggtacttattttaa

SEQ ID NO: 910130 - DNA, 15 bp, Homo sapiens
taggtacttatttta

SEQ ID NO: 910131 - DNA, 15 bp, Homo sapiens
ttaggtacttatttt

SEQ ID NO: 910132 - DNA, 15 bp, Homo sapiens
cttaggtacttattt

SEQ ID NO: 910133 - DNA, 15 bp, Homo sapiens
acttaggtacttatt

SEQ ID NO: 910134 - DNA, 15 bp, Homo sapiens
aacttaggtacttat

SEQ ID NO: 910135 - DNA, 15 bp, Homo sapiens
aaacttaggtactta

SEQ ID NO: 910136 - DNA, 15 bp, Homo sapiens
taaacttaggtactt

SEQ ID NO: 910137 - DNA, 15 bp, Homo sapiens
gtaaacttaggtact

SEQ ID NO: 910138 - DNA, 15 bp, Homo sapiens
tgtaaacttaggtac

SEQ ID NO: 910139 - DNA, 15 bp, Homo sapiens
atgtaaacttaggta

SEQ ID NO: 910140 - DNA, 15 bp, Homo sapiens
tatgtaaacttaggt

SEQ ID NO: 910141 - DNA, 15 bp, Homo sapiens
ttatgtaaacttagg

SEQ ID NO: 910142 - DNA, 15 bp, Homo sapiens
tttatgtaaacttag

SEQ ID NO: 910143 - DNA, 15 bp, Homo sapiens
atttatgtaaactta

SEQ ID NO: 910144 - DNA, 15 bp, Homo sapiens
aatttatgtaaactt

SEQ ID NO: 910145 - DNA, 15 bp, Homo sapiens
aaatttatgtaaact

SEQ ID NO: 910146 - DNA, 15 bp, Homo sapiens
taaatttatgtaaac

SEQ ID NO: 910147 - DNA, 15 bp, Homo sapiens
ataaatttatgtaaa

SEQ ID NO: 910148 - DNA, 15 bp, Homo sapiens
tataaatttatgtaa

SEQ ID NO: 910149 - DNA, 15 bp, Homo sapiens
atataaatttatgta

SEQ ID NO: 910150 - DNA, 15 bp, Homo sapiens
aatataaatttatgt

SEQ ID NO: 910151 - DNA, 15 bp, Homo sapiens
aaatataaatttatg

SEQ ID NO: 910152 - DNA, 15 bp, Homo sapiens
aaaatataaatttat

SEQ ID NO: 910153 - DNA, 15 bp, Homo sapiens
taaaatataaattta

SEQ ID NO: 910154 - DNA, 15 bp, Homo sapiens
ttaaaatataaattt

SEQ ID NO: 910155 - DNA, 15 bp, Homo sapiens
gttaaaatataaatt

SEQ ID NO: 910156 - DNA, 15 bp, Homo sapiens
ggttaaaatataaat

SEQ ID NO: 910157 - DNA, 15 bp, Homo sapiens
tggttaaaatataaa

SEQ ID NO: 910158 - DNA, 15 bp, Homo sapiens
ctggttaaaatataa

SEQ ID NO: 910159 - DNA, 15 bp, Homo sapiens
cctggttaaaatata

SEQ ID NO: 910160 - DNA, 15 bp, Homo sapiens
tcctggttaaaatat

SEQ ID NO: 910161 - DNA, 15 bp, Homo sapiens
gtcctggttaaaata

SEQ ID NO: 910162 - DNA, 15 bp, Homo sapiens
agtcctggttaaaat

SEQ ID NO: 910163 - DNA, 15 bp, Homo sapiens
cagtcctggttaaaa

SEQ ID NO: 910164 - DNA, 15 bp, Homo sapiens
ccagtcctggttaaa

SEQ ID NO: 910165 - DNA, 15 bp, Homo sapiens
tccagtcctggttaa

SEQ ID NO: 910166 - DNA, 15 bp, Homo sapiens
ctccagtcctggtta

SEQ ID NO: 910167 - DNA, 15 bp, Homo sapiens
actccagtcctggtt

SEQ ID NO: 910168 - DNA, 15 bp, Homo sapiens
gactccagtcctggt

SEQ ID NO: 910169 - DNA, 15 bp, Homo sapiens
agactccagtcctgg

SEQ ID NO: 910170 - DNA, 15 bp, Homo sapiens
aagactccagtcctg

SEQ ID NO: 910171 - DNA, 15 bp, Homo sapiens
gaagactccagtcct

SEQ ID NO: 910172 - DNA, 15 bp, Homo sapiens
agaagactccagtcc

SEQ ID NO: 910173 - DNA, 15 bp, Homo sapiens
tagaagactccagtc

SEQ ID NO: 910174 - DNA, 15 bp, Homo sapiens
ttagaagactccagt

SEQ ID NO: 910175 - DNA, 15 bp, Homo sapiens
cttagaagactccag

SEQ ID NO: 910176 - DNA, 15 bp, Homo sapiens
acttagaagactcca

SEQ ID NO: 910177 - DNA, 15 bp, Homo sapiens
tacttagaagactcc

SEQ ID NO: 910178 - DNA, 15 bp, Homo sapiens
ttacttagaagactc

SEQ ID NO: 910179 - DNA, 15 bp, Homo sapiens
gttacttagaagact

SEQ ID NO: 910180 - DNA, 15 bp, Homo sapiens
agttacttagaagac

SEQ ID NO: 910181 - DNA, 15 bp, Homo sapiens
cagttacttagaaga

SEQ ID NO: 910182 - DNA, 15 bp, Homo sapiens
tcagttacttagaag

SEQ ID NO: 910183 - DNA, 15 bp, Homo sapiens
atcagttacttagaa

SEQ ID NO: 910184 - DNA, 15 bp, Homo sapiens
catcagttacttaga

SEQ ID NO: 910185 - DNA, 15 bp, Homo sapiens
acatcagttacttag

SEQ ID NO: 910186 - DNA, 15 bp, Homo sapiens
aacatcagttactta

SEQ ID NO: 910187 - DNA, 15 bp, Homo sapiens
aaacatcagttactt

SEQ ID NO: 910188 - DNA, 15 bp, Homo sapiens
aaaacatcagttact

SEQ ID NO: 910189 - DNA, 15 bp, Homo sapiens
gaaaacatcagttac

SEQ ID NO: 910190 - DNA, 15 bp, Homo sapiens
tgaaaacatcagtta

SEQ ID NO: 910191 - DNA, 15 bp, Homo sapiens
ctgaaaacatcagtt

SEQ ID NO: 910192 - DNA, 15 bp, Homo sapiens
tctgaaaacatcagt

SEQ ID NO: 910193 - DNA, 15 bp, Homo sapiens
gtctgaaaacatcag

SEQ ID NO: 910194 - DNA, 15 bp, Homo sapiens
agtctgaaaacatca

SEQ ID NO: 910195 - DNA, 15 bp, Homo sapiens
cagtctgaaaacatc

SEQ ID NO: 910196 - DNA, 15 bp, Homo sapiens
tcagtctgaaaacat

SEQ ID NO: 910197 - DNA, 15 bp, Homo sapiens
atcagtctgaaaaca

SEQ ID NO: 910198 - DNA, 15 bp, Homo sapiens
aatcagtctgaaaac

SEQ ID NO: 910199 - DNA, 15 bp, Homo sapiens
aaatcagtctgaaaa

SEQ ID NO: 910200 - DNA, 15 bp, Homo sapiens
aaaatcagtctgaaa

SEQ ID NO: 910201 - DNA, 15 bp, Homo sapiens
taaaatcagtctgaa

SEQ ID NO: 910202 - DNA, 15 bp, Homo sapiens
ataaaatcagtctga

SEQ ID NO: 910203 - DNA, 15 bp, Homo sapiens
cataaaatcagtctg

SEQ ID NO: 910204 - DNA, 15 bp, Homo sapiens
ccataaaatcagtct

SEQ ID NO: 910205 - DNA, 15 bp, Homo sapiens
accataaaatcagtc

SEQ ID NO: 910206 - DNA, 15 bp, Homo sapiens
taccataaaatcagt

SEQ ID NO: 910207 - DNA, 15 bp, Homo sapiens
ataccataaaatcag

SEQ ID NO: 910208 - DNA, 15 bp, Homo sapiens
cataccataaaatca

SEQ ID NO: 910209 - DNA, 15 bp, Homo sapiens
tcataccataaaatc

SEQ ID NO: 910210 - DNA, 15 bp, Homo sapiens
gtcataccataaaat

SEQ ID NO: 910211 - DNA, 15 bp, Homo sapiens
agtcataccataaaa

SEQ ID NO: 910212 - DNA, 15 bp, Homo sapiens
aagtcataccataaa

SEQ ID NO: 910213 - DNA, 15 bp, Homo sapiens
aaagtcataccataa

SEQ ID NO: 910214 - DNA, 15 bp, Homo sapiens
caaagtcataccata

SEQ ID NO: 910215 - DNA, 15 bp, Homo sapiens
acaaagtcataccat

SEQ ID NO: 910216 - DNA, 15 bp, Homo sapiens
gacaaagtcatacca

SEQ ID NO: 910217 - DNA, 15 bp, Homo sapiens
agacaaagtcatacc

SEQ ID NO: 910218 - DNA, 15 bp, Homo sapiens
gagacaaagtcatac

SEQ ID NO: 910219 - DNA, 15 bp, Homo sapiens
tgagacaaagtcata

SEQ ID NO: 910220 - DNA, 15 bp, Homo sapiens
ctgagacaaagtcat

SEQ ID NO: 910221 - DNA, 15 bp, Homo sapiens
cctgagacaaagtca

SEQ ID NO: 910222 - DNA, 15 bp, Homo sapiens
ccctgagacaaagtc

SEQ ID NO: 910223 - DNA, 15 bp, Homo sapiens
tccctgagacaaagt

SEQ ID NO: 910224 - DNA, 15 bp, Homo sapiens
ttccctgagacaaag

SEQ ID NO: 910225 - DNA, 15 bp, Homo sapiens
tttccctgagacaaa

SEQ ID NO: 910226 - DNA, 15 bp, Homo sapiens
atttccctgagacaa

SEQ ID NO: 910227 - DNA, 15 bp, Homo sapiens
tatttccctgagaca

SEQ ID NO: 910228 - DNA, 15 bp, Homo sapiens
ctatttccctgagac

SEQ ID NO: 910229 - DNA, 15 bp, Homo sapiens
tctatttccctgaga

SEQ ID NO: 910230 - DNA, 15 bp, Homo sapiens
ttctatttccctgag

SEQ ID NO: 910231 - DNA, 15 bp, Homo sapiens
tttctatttccctga

SEQ ID NO: 910232 - DNA, 15 bp, Homo sapiens
ttttctatttccctg

SEQ ID NO: 910233 - DNA, 15 bp, Homo sapiens
gttttctatttccct

SEQ ID NO: 910234 - DNA, 15 bp, Homo sapiens
tgttttctatttccc

SEQ ID NO: 910235 - DNA, 15 bp, Homo sapiens
ttgttttctatttcc

SEQ ID NO: 910236 - DNA, 15 bp, Homo sapiens
tttgttttctatttc

SEQ ID NO: 910237 - DNA, 15 bp, Homo sapiens
ctttgttttctattt

SEQ ID NO: 910238 - DNA, 15 bp, Homo sapiens
gctttgttttctatt

SEQ ID NO: 910239 - DNA, 15 bp, Homo sapiens
tgctttgttttctat

SEQ ID NO: 910240 - DNA, 15 bp, Homo sapiens
ttgctttgttttcta

SEQ ID NO: 910241 - DNA, 15 bp, Homo sapiens
tttgctttgttttct

SEQ ID NO: 910242 - DNA, 15 bp, Homo sapiens
ttttgctttgttttc

SEQ ID NO: 910243 - DNA, 15 bp, Homo sapiens
attttgctttgtttt

SEQ ID NO: 910244 - DNA, 15 bp, Homo sapiens
cattttgctttgttt

SEQ ID NO: 910245 - DNA, 15 bp, Homo sapiens
acattttgctttgtt

SEQ ID NO: 910246 - DNA, 15 bp, Homo sapiens
cacattttgctttgt

SEQ ID NO: 910247 - DNA, 15 bp, Homo sapiens
tcacattttgctttg

SEQ ID NO: 910248 - DNA, 15 bp, Homo sapiens
ctcacattttgcttt

SEQ ID NO: 910249 - DNA, 15 bp, Homo sapiens
cctcacattttgctt

SEQ ID NO: 910250 - DNA, 15 bp, Homo sapiens
gcctcacattttgct

SEQ ID NO: 910251 - DNA, 15 bp, Homo sapiens
ggcctcacattttgc

SEQ ID NO: 910252 - DNA, 15 bp, Homo sapiens
tggcctcacattttg

SEQ ID NO: 910253 - DNA, 15 bp, Homo sapiens
atggcctcacatttt

SEQ ID NO: 910254 - DNA, 15 bp, Homo sapiens
aatggcctcacattt

SEQ ID NO: 910255 - DNA, 15 bp, Homo sapiens
taatggcctcacatt

SEQ ID NO: 910256 - DNA, 15 bp, Homo sapiens
ttaatggcctcacat

SEQ ID NO: 910257 - DNA, 15 bp, Homo sapiens
cttaatggcctcaca

SEQ ID NO: 910258 - DNA, 15 bp, Homo sapiens
acttaatggcctcac

SEQ ID NO: 910259 - DNA, 15 bp, Homo sapiens
tacttaatggcctca

SEQ ID NO: 910260 - DNA, 15 bp, Homo sapiens
atacttaatggcctc

SEQ ID NO: 910261 - DNA, 15 bp, Homo sapiens
aatacttaatggcct

SEQ ID NO: 910262 - DNA, 15 bp, Homo sapiens
taatacttaatggcc

SEQ ID NO: 910263 - DNA, 15 bp, Homo sapiens
gtaatacttaatggc

SEQ ID NO: 910264 - DNA, 15 bp, Homo sapiens
tgtaatacttaatgg

SEQ ID NO: 910265 - DNA, 15 bp, Homo sapiens
atgtaatacttaatg

SEQ ID NO: 910266 - DNA, 15 bp, Homo sapiens
aatgtaatacttaat

SEQ ID NO: 910267 - DNA, 15 bp, Homo sapiens
gaatgtaatacttaa

SEQ ID NO: 910268 - DNA, 15 bp, Homo sapiens
tgaatgtaatactta

SEQ ID NO: 910269 - DNA, 15 bp, Homo sapiens
atgaatgtaatactt

SEQ ID NO: 910270 - DNA, 15 bp, Homo sapiens
gatgaatgtaatact

SEQ ID NO: 910271 - DNA, 15 bp, Homo sapiens
agatgaatgtaatac

SEQ ID NO: 910272 - DNA, 15 bp, Homo sapiens
gagatgaatgtaata

SEQ ID NO: 910273 - DNA, 15 bp, Homo sapiens
tgagatgaatgtaat

SEQ ID NO: 910274 - DNA, 15 bp, Homo sapiens
ctgagatgaatgtaa

SEQ ID NO: 910275 - DNA, 15 bp, Homo sapiens
cctgagatgaatgta

SEQ ID NO: 910276 - DNA, 15 bp, Homo sapiens
acctgagatgaatgt

SEQ ID NO: 910277 - DNA, 15 bp, Homo sapiens
gacctgagatgaatg

SEQ ID NO: 910278 - DNA, 15 bp, Homo sapiens
agacctgagatgaat

SEQ ID NO: 910279 - DNA, 15 bp, Homo sapiens
tagacctgagatgaa

SEQ ID NO: 910280 - DNA, 15 bp, Homo sapiens
atagacctgagatga

SEQ ID NO: 910281 - DNA, 15 bp, Homo sapiens
catagacctgagatg

SEQ ID NO: 910282 - DNA, 15 bp, Homo sapiens
gcatagacctgagat

SEQ ID NO: 910283 - DNA, 15 bp, Homo sapiens
cgcatagacctgaga

SEQ ID NO: 910284 - DNA, 15 bp, Homo sapiens
ccgcatagacctgag

SEQ ID NO: 910285 - DNA, 15 bp, Homo sapiens
cccgcatagacctga

SEQ ID NO: 910286 - DNA, 15 bp, Homo sapiens
acccgcatagacctg

SEQ ID NO: 910287 - DNA, 15 bp, Homo sapiens
tacccgcatagacct

SEQ ID NO: 910288 - DNA, 15 bp, Homo sapiens
ttacccgcatagacc

SEQ ID NO: 910289 - DNA, 15 bp, Homo sapiens
tttacccgcatagac

SEQ ID NO: 910290 - DNA, 15 bp, Homo sapiens
atttacccgcataga

SEQ ID NO: 910291 - DNA, 15 bp, Homo sapiens
gatttacccgcatag

SEQ ID NO: 910292 - DNA, 15 bp, Homo sapiens
agatttacccgcata

SEQ ID NO: 910293 - DNA, 15 bp, Homo sapiens
aagatttacccgcat

SEQ ID NO: 910294 - DNA, 15 bp, Homo sapiens
aaagatttacccgca

SEQ ID NO: 910295 - DNA, 15 bp, Homo sapiens
aaaagatttacccgc

SEQ ID NO: 910296 - DNA, 15 bp, Homo sapiens
aaaaagatttacccg

SEQ ID NO: 910297 - DNA, 15 bp, Homo sapiens
aaaaaagatttaccc

SEQ ID NO: 910298 - DNA, 15 bp, Homo sapiens
aaaaaaagatttacc

SEQ ID NO: 910299 - DNA, 15 bp, Homo sapiens
caaaaaaagatttac

SEQ ID NO: 910300 - DNA, 15 bp, Homo sapiens
acaaaaaaagattta

SEQ ID NO: 910301 - DNA, 15 bp, Homo sapiens
aacaaaaaaagattt

SEQ ID NO: 910302 - DNA, 15 bp, Homo sapiens
caacaaaaaaagatt

SEQ ID NO: 910303 - DNA, 15 bp, Homo sapiens
acaacaaaaaaagat

SEQ ID NO: 910304 - DNA, 15 bp, Homo sapiens
aacaacaaaaaaaga

SEQ ID NO: 910305 - DNA, 15 bp, Homo sapiens
aaacaacaaaaaaag

SEQ ID NO: 910306 - DNA, 15 bp, Homo sapiens
aaaacaacaaaaaaa

SEQ ID NO: 910307 - DNA, 15 bp, Homo sapiens
taaaacaacaaaaaa

SEQ ID NO: 910308 - DNA, 15 bp, Homo sapiens
ataaaacaacaaaaa

SEQ ID NO: 910309 - DNA, 15 bp, Homo sapiens
tataaaacaacaaaa

SEQ ID NO: 910310 - DNA, 15 bp, Homo sapiens
ttataaaacaacaaa

SEQ ID NO: 910311 - DNA, 15 bp, Homo sapiens
cttataaaacaacaa

SEQ ID NO: 910312 - DNA, 15 bp, Homo sapiens
gcttataaaacaaca

SEQ ID NO: 910313 - DNA, 15 bp, Homo sapiens
ggcttataaaacaac

SEQ ID NO: 910314 - DNA, 15 bp, Homo sapiens
tggcttataaaacaa

SEQ ID NO: 910315 - DNA, 15 bp, Homo sapiens
atggcttataaaaca

SEQ ID NO: 910316 - DNA, 15 bp, Homo sapiens
aatggcttataaaac

SEQ ID NO: 910317 - DNA, 15 bp, Homo sapiens
gaatggcttataaaa

SEQ ID NO: 910318 - DNA, 15 bp, Homo sapiens
agaatggcttataaa

SEQ ID NO: 910319 - DNA, 15 bp, Homo sapiens
aagaatggcttataa

SEQ ID NO: 910320 - DNA, 15 bp, Homo sapiens
aaagaatggcttata

SEQ ID NO: 910321 - DNA, 15 bp, Homo sapiens
caaagaatggcttat

SEQ ID NO: 910322 - DNA, 15 bp, Homo sapiens
gcaaagaatggctta

SEQ ID NO: 910323 - DNA, 15 bp, Homo sapiens
agcaaagaatggctt

SEQ ID NO: 910324 - DNA, 15 bp, Homo sapiens
tagcaaagaatggct

SEQ ID NO: 910325 - DNA, 15 bp, Homo sapiens
ctagcaaagaatggc

SEQ ID NO: 910326 - DNA, 15 bp, Homo sapiens
actagcaaagaatgg

SEQ ID NO: 910327 - DNA, 15 bp, Homo sapiens
aactagcaaagaatg

SEQ ID NO: 910328 - DNA, 15 bp, Homo sapiens
aaactagcaaagaat

SEQ ID NO: 910329 - DNA, 15 bp, Homo sapiens
aaaactagcaaagaa

SEQ ID NO: 910330 - DNA, 15 bp, Homo sapiens
gaaaactagcaaaga

SEQ ID NO: 910331 - DNA, 15 bp, Homo sapiens
agaaaactagcaaag

SEQ ID NO: 910332 - DNA, 15 bp, Homo sapiens
tagaaaactagcaaa

SEQ ID NO: 910333 - DNA, 15 bp, Homo sapiens
ttagaaaactagcaa

SEQ ID NO: 910334 - DNA, 15 bp, Homo sapiens
attagaaaactagca

SEQ ID NO: 910335 - DNA, 15 bp, Homo sapiens
aattagaaaactagc

SEQ ID NO: 910336 - DNA, 15 bp, Homo sapiens
caattagaaaactag

SEQ ID NO: 910337 - DNA, 15 bp, Homo sapiens
tcaattagaaaacta

SEQ ID NO: 910338 - DNA, 15 bp, Homo sapiens
ttcaattagaaaact

SEQ ID NO: 910339 - DNA, 15 bp, Homo sapiens
attcaattagaaaac

SEQ ID NO: 910340 - DNA, 15 bp, Homo sapiens
tattcaattagaaaa

SEQ ID NO: 910341 - DNA, 15 bp, Homo sapiens
ctattcaattagaaa

SEQ ID NO: 910342 - DNA, 15 bp, Homo sapiens
tctattcaattagaa

SEQ ID NO: 910343 - DNA, 15 bp, Homo sapiens
atctattcaattaga

SEQ ID NO: 910344 - DNA, 15 bp, Homo sapiens
catctattcaattag

SEQ ID NO: 910345 - DNA, 15 bp, Homo sapiens
tcatctattcaatta

SEQ ID NO: 910346 - DNA, 15 bp, Homo sapiens
gtcatctattcaatt

SEQ ID NO: 910347 - DNA, 15 bp, Homo sapiens
agtcatctattcaat

SEQ ID NO: 910348 - DNA, 15 bp, Homo sapiens
cagtcatctattcaa

SEQ ID NO: 910349 - DNA, 15 bp, Homo sapiens
ccagtcatctattca

SEQ ID NO: 910350 - DNA, 15 bp, Homo sapiens
tccagtcatctattc

SEQ ID NO: 910351 - DNA, 15 bp, Homo sapiens
atccagtcatctatt

SEQ ID NO: 910352 - DNA, 15 bp, Homo sapiens
aatccagtcatctat

SEQ ID NO: 910353 - DNA, 15 bp, Homo sapiens
aaatccagtcatcta

SEQ ID NO: 910354 - DNA, 15 bp, Homo sapiens
gaaatccagtcatct

SEQ ID NO: 910355 - DNA, 15 bp, Homo sapiens
agaaatccagtcatc

SEQ ID NO: 910356 - DNA, 15 bp, Homo sapiens
tagaaatccagtcat

SEQ ID NO: 910357 - DNA, 15 bp, Homo sapiens
atagaaatccagtca

SEQ ID NO: 910358 - DNA, 15 bp, Homo sapiens
aatagaaatccagtc

SEQ ID NO: 910359 - DNA, 15 bp, Homo sapiens
gaatagaaatccagt

SEQ ID NO: 910360 - DNA, 15 bp, Homo sapiens
agaatagaaatccag

SEQ ID NO: 910361 - DNA, 15 bp, Homo sapiens
aagaatagaaatcca

SEQ ID NO: 910362 - DNA, 15 bp, Homo sapiens
taagaatagaaatcc

SEQ ID NO: 910363 - DNA, 15 bp, Homo sapiens
ataagaatagaaatc

SEQ ID NO: 910364 - DNA, 15 bp, Homo sapiens
aataagaatagaaat

SEQ ID NO: 910365 - DNA, 15 bp, Homo sapiens
aaataagaatagaaa

SEQ ID NO: 910366 - DNA, 15 bp, Homo sapiens
gaaataagaatagaa

SEQ ID NO: 910367 - DNA, 15 bp, Homo sapiens
agaaataagaataga

SEQ ID NO: 910368 - DNA, 15 bp, Homo sapiens
gagaaataagaatag

SEQ ID NO: 910369 - DNA, 15 bp, Homo sapiens
agagaaataagaata

SEQ ID NO: 910370 - DNA, 15 bp, Homo sapiens
aagagaaataagaat

SEQ ID NO: 910371 - DNA, 15 bp, Homo sapiens
taagagaaataagaa

SEQ ID NO: 910372 - DNA, 15 bp, Homo sapiens
gtaagagaaataaga

SEQ ID NO: 910373 - DNA, 15 bp, Homo sapiens
ggtaagagaaataag

SEQ ID NO: 910374 - DNA, 15 bp, Homo sapiens
gggtaagagaaataa

SEQ ID NO: 910375 - DNA, 15 bp, Homo sapiens
tgggtaagagaaata

SEQ ID NO: 910376 - DNA, 15 bp, Homo sapiens
ctgggtaagagaaat

SEQ ID NO: 910377 - DNA, 15 bp, Homo sapiens
tctgggtaagagaaa

SEQ ID NO: 910378 - DNA, 15 bp, Homo sapiens
ttctgggtaagagaa

SEQ ID NO: 910379 - DNA, 15 bp, Homo sapiens
attctgggtaagaga

SEQ ID NO: 910380 - DNA, 15 bp, Homo sapiens
gattctgggtaagag

SEQ ID NO: 910381 - DNA, 15 bp, Homo sapiens
ggattctgggtaaga

SEQ ID NO: 910382 - DNA, 15 bp, Homo sapiens
aggattctgggtaag

SEQ ID NO: 910383 - DNA, 15 bp, Homo sapiens
aaggattctgggtaa

SEQ ID NO: 910384 - DNA, 15 bp, Homo sapiens
aaaggattctgggta

SEQ ID NO: 910385 - DNA, 15 bp, Homo sapiens
taaaggattctgggt

SEQ ID NO: 910386 - DNA, 15 bp, Homo sapiens
ttaaaggattctggg

SEQ ID NO: 910387 - DNA, 15 bp, Homo sapiens
tttaaaggattctgg

SEQ ID NO: 910388 - DNA, 15 bp, Homo sapiens
ttttaaaggattctg

SEQ ID NO: 910389 - DNA, 15 bp, Homo sapiens
attttaaaggattct

SEQ ID NO: 910390 - DNA, 15 bp, Homo sapiens
aattttaaaggattc

SEQ ID NO: 910391 - DNA, 15 bp, Homo sapiens
aaattttaaaggatt

SEQ ID NO: 910392 - DNA, 15 bp, Homo sapiens
aaaattttaaaggat

SEQ ID NO: 910393 - DNA, 15 bp, Homo sapiens
aaaaattttaaagga

SEQ ID NO: 910394 - DNA, 15 bp, Homo sapiens
aaaaaattttaaagg

SEQ ID NO: 910395 - DNA, 15 bp, Homo sapiens
caaaaaattttaaag

SEQ ID NO: 910396 - DNA, 15 bp, Homo sapiens
acaaaaaattttaaa

SEQ ID NO: 910397 - DNA, 15 bp, Homo sapiens
aacaaaaaattttaa

SEQ ID NO: 910398 - DNA, 15 bp, Homo sapiens
taacaaaaaatttta

SEQ ID NO: 910399 - DNA, 15 bp, Homo sapiens
gtaacaaaaaatttt

SEQ ID NO: 910400 - DNA, 15 bp, Homo sapiens
agtaacaaaaaattt

SEQ ID NO: 910401 - DNA, 15 bp, Homo sapiens
aagtaacaaaaaatt

SEQ ID NO: 910402 - DNA, 15 bp, Homo sapiens
caagtaacaaaaaat

SEQ ID NO: 910403 - DNA, 15 bp, Homo sapiens
acaagtaacaaaaaa

SEQ ID NO: 910404 - DNA, 15 bp, Homo sapiens
cacaagtaacaaaaa

SEQ ID NO: 910405 - DNA, 15 bp, Homo sapiens
ccacaagtaacaaaa

SEQ ID NO: 910406 - DNA, 15 bp, Homo sapiens
tccacaagtaacaaa

SEQ ID NO: 910407 - DNA, 15 bp, Homo sapiens
ttccacaagtaacaa

SEQ ID NO: 910408 - DNA, 15 bp, Homo sapiens
attccacaagtaaca

SEQ ID NO: 910409 - DNA, 15 bp, Homo sapiens
gattccacaagtaac

SEQ ID NO: 910410 - DNA, 15 bp, Homo sapiens
agattccacaagtaa

SEQ ID NO: 910411 - DNA, 15 bp, Homo sapiens
aagattccacaagta

SEQ ID NO: 910412 - DNA, 15 bp, Homo sapiens
taagattccacaagt

SEQ ID NO: 910413 - DNA, 15 bp, Homo sapiens
ataagattccacaag

SEQ ID NO: 910414 - DNA, 15 bp, Homo sapiens
tataagattccacaa

SEQ ID NO: 910415 - DNA, 15 bp, Homo sapiens
ttataagattccaca

SEQ ID NO: 910416 - DNA, 15 bp, Homo sapiens
tttataagattccac

SEQ ID NO: 910417 - DNA, 15 bp, Homo sapiens
atttataagattcca

SEQ ID NO: 910418 - DNA, 15 bp, Homo sapiens
aatttataagattcc

SEQ ID NO: 910419 - DNA, 15 bp, Homo sapiens
gaatttataagattc

SEQ ID NO: 910420 - DNA, 15 bp, Homo sapiens
agaatttataagatt

SEQ ID NO: 910421 - DNA, 15 bp, Homo sapiens
cagaatttataagat

SEQ ID NO: 910422 - DNA, 15 bp, Homo sapiens
tcagaatttataaga

SEQ ID NO: 910423 - DNA, 15 bp, Homo sapiens
atcagaatttataag

SEQ ID NO: 910424 - DNA, 15 bp, Homo sapiens
aatcagaatttataa

SEQ ID NO: 910425 - DNA, 15 bp, Homo sapiens
taatcagaatttata

SEQ ID NO: 910426 - DNA, 15 bp, Homo sapiens
ataatcagaatttat

SEQ ID NO: 910427 - DNA, 15 bp, Homo sapiens
gataatcagaattta

SEQ ID NO: 910428 - DNA, 15 bp, Homo sapiens
tgataatcagaattt

SEQ ID NO: 910429 - DNA, 15 bp, Homo sapiens
atgataatcagaatt

SEQ ID NO: 910430 - DNA, 15 bp, Homo sapiens
aatgataatcagaat

SEQ ID NO: 910431 - DNA, 15 bp, Homo sapiens
aaatgataatcagaa

SEQ ID NO: 910432 - DNA, 15 bp, Homo sapiens
caaatgataatcaga

SEQ ID NO: 910433 - DNA, 15 bp, Homo sapiens
ccaaatgataatcag

SEQ ID NO: 910434 - DNA, 15 bp, Homo sapiens
accaaatgataatca

SEQ ID NO: 910435 - DNA, 15 bp, Homo sapiens
aaccaaatgataatc

SEQ ID NO: 910436 - DNA, 15 bp, Homo sapiens
gaaccaaatgataat

SEQ ID NO: 910437 - DNA, 15 bp, Homo sapiens
agaaccaaatgataa

SEQ ID NO: 910438 - DNA, 15 bp, Homo sapiens
tagaaccaaatgata

SEQ ID NO: 910439 - DNA, 15 bp, Homo sapiens
gtagaaccaaatgat

SEQ ID NO: 910440 - DNA, 15 bp, Homo sapiens
agtagaaccaaatga

SEQ ID NO: 910441 - DNA, 15 bp, Homo sapiens
cagtagaaccaaatg

SEQ ID NO: 910442 - DNA, 15 bp, Homo sapiens
tcagtagaaccaaat

SEQ ID NO: 910443 - DNA, 15 bp, Homo sapiens
ctcagtagaaccaaa

SEQ ID NO: 910444 - DNA, 15 bp, Homo sapiens
gctcagtagaaccaa

SEQ ID NO: 910445 - DNA, 15 bp, Homo sapiens
ggctcagtagaacca

SEQ ID NO: 910446 - DNA, 15 bp, Homo sapiens
tggctcagtagaacc

SEQ ID NO: 910447 - DNA, 15 bp, Homo sapiens
ttggctcagtagaac

SEQ ID NO: 910448 - DNA, 15 bp, Homo sapiens
tttggctcagtagaa

SEQ ID NO: 910449 - DNA, 15 bp, Homo sapiens
atttggctcagtaga

SEQ ID NO: 910450 - DNA, 15 bp, Homo sapiens
tatttggctcagtag

SEQ ID NO: 910451 - DNA, 15 bp, Homo sapiens
ttatttggctcagta

SEQ ID NO: 910452 - DNA, 15 bp, Homo sapiens
attatttggctcagt

SEQ ID NO: 910453 - DNA, 15 bp, Homo sapiens
cattatttggctcag

SEQ ID NO: 910454 - DNA, 15 bp, Homo sapiens
acattatttggctca

SEQ ID NO: 910455 - DNA, 15 bp, Homo sapiens
aacattatttggctc

SEQ ID NO: 910456 - DNA, 15 bp, Homo sapiens
aaacattatttggct

SEQ ID NO: 910457 - DNA, 15 bp, Homo sapiens
caaacattatttggc

SEQ ID NO: 910458 - DNA, 15 bp, Homo sapiens
acaaacattatttgg

SEQ ID NO: 910459 - DNA, 15 bp, Homo sapiens
tacaaacattatttg

SEQ ID NO: 910460 - DNA, 15 bp, Homo sapiens
gtacaaacattattt

SEQ ID NO: 910461 - DNA, 15 bp, Homo sapiens
tgtacaaacattatt

SEQ ID NO: 910462 - DNA, 15 bp, Homo sapiens
atgtacaaacattat

SEQ ID NO: 910463 - DNA, 15 bp, Homo sapiens
aatgtacaaacatta

SEQ ID NO: 910464 - DNA, 15 bp, Homo sapiens
caatgtacaaacatt

SEQ ID NO: 910465 - DNA, 15 bp, Homo sapiens
acaatgtacaaacat

SEQ ID NO: 910466 - DNA, 15 bp, Homo sapiens
aacaatgtacaaaca

SEQ ID NO: 910467 - DNA, 15 bp, Homo sapiens
aaacaatgtacaaac

SEQ ID NO: 910468 - DNA, 15 bp, Homo sapiens
taaacaatgtacaaa

SEQ ID NO: 910469 - DNA, 15 bp, Homo sapiens
ataaacaatgtacaa

SEQ ID NO: 910470 - DNA, 15 bp, Homo sapiens
aataaacaatgtaca

SEQ ID NO: 910471 - DNA, 15 bp, Homo sapiens
gaataaacaatgtac

SEQ ID NO: 910472 - DNA, 15 bp, Homo sapiens
agaataaacaatgta

SEQ ID NO: 910473 - DNA, 15 bp, Homo sapiens
cagaataaacaatgt

SEQ ID NO: 910474 - DNA, 15 bp, Homo sapiens
tcagaataaacaatg

SEQ ID NO: 910475 - DNA, 15 bp, Homo sapiens
atcagaataaacaat

SEQ ID NO: 910476 - DNA, 15 bp, Homo sapiens
tatcagaataaacaa

SEQ ID NO: 910477 - DNA, 15 bp, Homo sapiens
ctatcagaataaaca

SEQ ID NO: 910478 - DNA, 15 bp, Homo sapiens
tctatcagaataaac

SEQ ID NO: 910479 - DNA, 15 bp, Homo sapiens
ttctatcagaataaa

SEQ ID NO: 910480 - DNA, 15 bp, Homo sapiens
cttctatcagaataa

SEQ ID NO: 910481 - DNA, 15 bp, Homo sapiens
acttctatcagaata

SEQ ID NO: 910482 - DNA, 15 bp, Homo sapiens
aacttctatcagaat

SEQ ID NO: 910483 - DNA, 15 bp, Homo sapiens
gaacttctatcagaa

SEQ ID NO: 910484 - DNA, 15 bp, Homo sapiens
agaacttctatcaga

SEQ ID NO: 910485 - DNA, 15 bp, Homo sapiens
aagaacttctatcag

SEQ ID NO: 910486 - DNA, 15 bp, Homo sapiens
taagaacttctatca

SEQ ID NO: 910487 - DNA, 15 bp, Homo sapiens
ttaagaacttctatc

SEQ ID NO: 910488 - DNA, 15 bp, Homo sapiens
cttaagaacttctat

SEQ ID NO: 910489 - DNA, 15 bp, Homo sapiens
acttaagaacttcta

SEQ ID NO: 910490 - DNA, 15 bp, Homo sapiens
aacttaagaacttct

SEQ ID NO: 910491 - DNA, 15 bp, Homo sapiens
aaacttaagaacttc

SEQ ID NO: 910492 - DNA, 15 bp, Homo sapiens
gaaacttaagaactt

SEQ ID NO: 910493 - DNA, 15 bp, Homo sapiens
agaaacttaagaact

SEQ ID NO: 910494 - DNA, 15 bp, Homo sapiens
tagaaacttaagaac

SEQ ID NO: 910495 - DNA, 15 bp, Homo sapiens
ttagaaacttaagaa

SEQ ID NO: 910496 - DNA, 15 bp, Homo sapiens
gttagaaacttaaga

SEQ ID NO: 910497 - DNA, 15 bp, Homo sapiens
tgttagaaacttaag

SEQ ID NO: 910498 - DNA, 15 bp, Homo sapiens
atgttagaaacttaa

SEQ ID NO: 910499 - DNA, 15 bp, Homo sapiens
tatgttagaaactta

SEQ ID NO: 910500 - DNA, 15 bp, Homo sapiens
ttatgttagaaactt

SEQ ID NO: 910501 - DNA, 15 bp, Homo sapiens
attatgttagaaact

SEQ ID NO: 910502 - DNA, 15 bp, Homo sapiens
aattatgttagaaac

SEQ ID NO: 910503 - DNA, 15 bp, Homo sapiens
caattatgttagaaa

SEQ ID NO: 910504 - DNA, 15 bp, Homo sapiens
tcaattatgttagaa

SEQ ID NO: 910505 - DNA, 15 bp, Homo sapiens
ttcaattatgttaga

SEQ ID NO: 910506 - DNA, 15 bp, Homo sapiens
tttcaattatgttag

SEQ ID NO: 910507 - DNA, 15 bp, Homo sapiens
atttcaattatgtta

SEQ ID NO: 910508 - DNA, 15 bp, Homo sapiens
tatttcaattatgtt

SEQ ID NO: 910509 - DNA, 15 bp, Homo sapiens
atatttcaattatgt

SEQ ID NO: 910510 - DNA, 15 bp, Homo sapiens
aatatttcaattatg

SEQ ID NO: 910511 - DNA, 15 bp, Homo sapiens
taatatttcaattat

SEQ ID NO: 910512 - DNA, 15 bp, Homo sapiens
ataatatttcaatta

SEQ ID NO: 910513 - DNA, 15 bp, Homo sapiens
aataatatttcaatt

SEQ ID NO: 910514 - DNA, 15 bp, Homo sapiens
aaataatatttcaat

SEQ ID NO: 910515 - DNA, 15 bp, Homo sapiens
caaataatatttcaa

SEQ ID NO: 910516 - DNA, 15 bp, Homo sapiens
acaaataatatttca

SEQ ID NO: 910517 - DNA, 15 bp, Homo sapiens
aacaaataatatttc

SEQ ID NO: 910518 - DNA, 15 bp, Homo sapiens
aaacaaataatattt

SEQ ID NO: 910519 - DNA, 15 bp, Homo sapiens
aaaacaaataatatt

SEQ ID NO: 910520 - DNA, 15 bp, Homo sapiens
caaaacaaataatat

SEQ ID NO: 910521 - DNA, 15 bp, Homo sapiens
ccaaaacaaataata

SEQ ID NO: 910522 - DNA, 15 bp, Homo sapiens
accaaaacaaataat

SEQ ID NO: 910523 - DNA, 15 bp, Homo sapiens
taccaaaacaaataa

SEQ ID NO: 910524 - DNA, 15 bp, Homo sapiens
ctaccaaaacaaata

SEQ ID NO: 910525 - DNA, 15 bp, Homo sapiens
tctaccaaaacaaat

SEQ ID NO: 910526 - DNA, 15 bp, Homo sapiens
atctaccaaaacaaa

SEQ ID NO: 910527 - DNA, 15 bp, Homo sapiens
tatctaccaaaacaa

SEQ ID NO: 910528 - DNA, 15 bp, Homo sapiens
ttatctaccaaaaca

SEQ ID NO: 910529 - DNA, 15 bp, Homo sapiens
attatctaccaaaac

SEQ ID NO: 910530 - DNA, 15 bp, Homo sapiens
aattatctaccaaaa

SEQ ID NO: 910531 - DNA, 15 bp, Homo sapiens
taattatctaccaaa

SEQ ID NO: 910532 - DNA, 15 bp, Homo sapiens
ctaattatctaccaa

SEQ ID NO: 910533 - DNA, 15 bp, Homo sapiens
actaattatctacca

SEQ ID NO: 910534 - DNA, 15 bp, Homo sapiens
tactaattatctacc

SEQ ID NO: 910535 - DNA, 15 bp, Homo sapiens
atactaattatctac

SEQ ID NO: 910536 - DNA, 15 bp, Homo sapiens
aatactaattatcta

SEQ ID NO: 910537 - DNA, 15 bp, Homo sapiens
gaatactaattatct

SEQ ID NO: 910538 - DNA, 15 bp, Homo sapiens
agaatactaattatc

SEQ ID NO: 910539 - DNA, 15 bp, Homo sapiens
aagaatactaattat

SEQ ID NO: 910540 - DNA, 15 bp, Homo sapiens
aaagaatactaatta

SEQ ID NO: 910541 - DNA, 15 bp, Homo sapiens
gaaagaatactaatt

SEQ ID NO: 910542 - DNA, 15 bp, Homo sapiens
agaaagaatactaat

SEQ ID NO: 910543 - DNA, 15 bp, Homo sapiens
aagaaagaatactaa

SEQ ID NO: 910544 - DNA, 15 bp, Homo sapiens
aaagaaagaatacta

SEQ ID NO: 910545 - DNA, 15 bp, Homo sapiens
caaagaaagaatact

SEQ ID NO: 910546 - DNA, 15 bp, Homo sapiens
ccaaagaaagaatac

SEQ ID NO: 910547 - DNA, 15 bp, Homo sapiens
accaaagaaagaata

SEQ ID NO: 910548 - DNA, 15 bp, Homo sapiens
aaccaaagaaagaat

SEQ ID NO: 910549 - DNA, 15 bp, Homo sapiens
taaccaaagaaagaa

SEQ ID NO: 910550 - DNA, 15 bp, Homo sapiens
ataaccaaagaaaga

SEQ ID NO: 910551 - DNA, 15 bp, Homo sapiens
aataaccaaagaaag

SEQ ID NO: 910552 - DNA, 15 bp, Homo sapiens
gaataaccaaagaaa

SEQ ID NO: 910553 - DNA, 15 bp, Homo sapiens
tgaataaccaaagaa

SEQ ID NO: 910554 - DNA, 15 bp, Homo sapiens
ttgaataaccaaaga

SEQ ID NO: 910555 - DNA, 15 bp, Homo sapiens
cttgaataaccaaag

SEQ ID NO: 910556 - DNA, 15 bp, Homo sapiens
tcttgaataaccaaa

SEQ ID NO: 910557 - DNA, 15 bp, Homo sapiens
atcttgaataaccaa

SEQ ID NO: 910558 - DNA, 15 bp, Homo sapiens
tatcttgaataacca

SEQ ID NO: 910559 - DNA, 15 bp, Homo sapiens
ttatcttgaataacc

SEQ ID NO: 910560 - DNA, 15 bp, Homo sapiens
attatcttgaataac

SEQ ID NO: 910561 - DNA, 15 bp, Homo sapiens
tattatcttgaataa

SEQ ID NO: 910562 - DNA, 15 bp, Homo sapiens
atattatcttgaata

SEQ ID NO: 910563 - DNA, 15 bp, Homo sapiens
catattatcttgaat

SEQ ID NO: 910564 - DNA, 15 bp, Homo sapiens
gcatattatcttgaa

SEQ ID NO: 910565 - DNA, 15 bp, Homo sapiens
tgcatattatcttga

SEQ ID NO: 910566 - DNA, 15 bp, Homo sapiens
atgcatattatcttg

SEQ ID NO: 910567 - DNA, 15 bp, Homo sapiens
gatgcatattatctt

SEQ ID NO: 910568 - DNA, 15 bp, Homo sapiens
tgatgcatattatct

SEQ ID NO: 910569 - DNA, 15 bp, Homo sapiens
atgatgcatattatc

SEQ ID NO: 910570 - DNA, 15 bp, Homo sapiens
aatgatgcatattat

SEQ ID NO: 910571 - DNA, 15 bp, Homo sapiens
aaatgatgcatatta

SEQ ID NO: 910572 - DNA, 15 bp, Homo sapiens
aaaatgatgcatatt

SEQ ID NO: 910573 - DNA, 15 bp, Homo sapiens
gaaaatgatgcatat

SEQ ID NO: 910574 - DNA, 15 bp, Homo sapiens
ggaaaatgatgcata

SEQ ID NO: 910575 - DNA, 15 bp, Homo sapiens
gggaaaatgatgcat

SEQ ID NO: 910576 - DNA, 15 bp, Homo sapiens
tgggaaaatgatgca

SEQ ID NO: 910577 - DNA, 15 bp, Homo sapiens
ttgggaaaatgatgc

SEQ ID NO: 910578 - DNA, 15 bp, Homo sapiens
tttgggaaaatgatg

SEQ ID NO: 910579 - DNA, 15 bp, Homo sapiens
ttttgggaaaatgat

SEQ ID NO: 910580 - DNA, 15 bp, Homo sapiens
attttgggaaaatga

SEQ ID NO: 910581 - DNA, 15 bp, Homo sapiens
aattttgggaaaatg

SEQ ID NO: 910582 - DNA, 15 bp, Homo sapiens
aaattttgggaaaat

SEQ ID NO: 910583 - DNA, 15 bp, Homo sapiens
aaaattttgggaaaa

SEQ ID NO: 910584 - DNA, 15 bp, Homo sapiens
aaaaattttgggaaa

SEQ ID NO: 910585 - DNA, 15 bp, Homo sapiens
aaaaaattttgggaa

SEQ ID NO: 910586 - DNA, 15 bp, Homo sapiens
aaaaaaattttggga

SEQ ID NO: 910587 - DNA, 15 bp, Homo sapiens
caaaaaaattttggg

SEQ ID NO: 910588 - DNA, 15 bp, Homo sapiens
acaaaaaaattttgg

SEQ ID NO: 910589 - DNA, 15 bp, Homo sapiens
aacaaaaaaattttg

SEQ ID NO: 910590 - DNA, 15 bp, Homo sapiens
aaacaaaaaaatttt

SEQ ID NO: 910591 - DNA, 15 bp, Homo sapiens
aaaacaaaaaaattt

SEQ ID NO: 910592 - DNA, 15 bp, Homo sapiens
gaaaacaaaaaaatt

SEQ ID NO: 910593 - DNA, 15 bp, Homo sapiens
agaaaacaaaaaaat

SEQ ID NO: 910594 - DNA, 15 bp, Homo sapiens
aagaaaacaaaaaaa

SEQ ID NO: 910595 - DNA, 15 bp, Homo sapiens
aaagaaaacaaaaaa

SEQ ID NO: 910596 - DNA, 15 bp, Homo sapiens
taaagaaaacaaaaa

SEQ ID NO: 910597 - DNA, 15 bp, Homo sapiens
ctaaagaaaacaaaa

SEQ ID NO: 910598 - DNA, 15 bp, Homo sapiens
actaaagaaaacaaa

SEQ ID NO: 910599 - DNA, 15 bp, Homo sapiens
aactaaagaaaacaa

SEQ ID NO: 910600 - DNA, 15 bp, Homo sapiens
aaactaaagaaaaca

SEQ ID NO: 910601 - DNA, 15 bp, Homo sapiens
gaaactaaagaaaac

SEQ ID NO: 910602 - DNA, 15 bp, Homo sapiens
agaaactaaagaaaa

SEQ ID NO: 910603 - DNA, 15 bp, Homo sapiens
cagaaactaaagaaa

SEQ ID NO: 910604 - DNA, 15 bp, Homo sapiens
tcagaaactaaagaa

SEQ ID NO: 910605 - DNA, 15 bp, Homo sapiens
atcagaaactaaaga

SEQ ID NO: 910606 - DNA, 15 bp, Homo sapiens
aatcagaaactaaag

SEQ ID NO: 910607 - DNA, 15 bp, Homo sapiens
taatcagaaactaaa

SEQ ID NO: 910608 - DNA, 15 bp, Homo sapiens
ataatcagaaactaa

SEQ ID NO: 910609 - DNA, 15 bp, Homo sapiens
aataatcagaaacta

SEQ ID NO: 910610 - DNA, 15 bp, Homo sapiens
taataatcagaaact

SEQ ID NO: 910611 - DNA, 15 bp, Homo sapiens
ataataatcagaaac

SEQ ID NO: 910612 - DNA, 15 bp, Homo sapiens
aataataatcagaaa

SEQ ID NO: 910613 - DNA, 15 bp, Homo sapiens
aaataataatcagaa

SEQ ID NO: 910614 - DNA, 15 bp, Homo sapiens
aaaataataatcaga

SEQ ID NO: 910615 - DNA, 15 bp, Homo sapiens
aaaaataataatcag

SEQ ID NO: 910616 - DNA, 15 bp, Homo sapiens
taaaaataataatca

SEQ ID NO: 910617 - DNA, 15 bp, Homo sapiens
ttaaaaataataatc

SEQ ID NO: 910618 - DNA, 15 bp, Homo sapiens
attaaaaataataat

SEQ ID NO: 910619 - DNA, 15 bp, Homo sapiens
aattaaaaataataa

SEQ ID NO: 910620 - DNA, 15 bp, Homo sapiens
taattaaaaataata

SEQ ID NO: 910621 - DNA, 15 bp, Homo sapiens
ataattaaaaataat

SEQ ID NO: 910622 - DNA, 15 bp, Homo sapiens
cataattaaaaataa

SEQ ID NO: 910623 - DNA, 15 bp, Homo sapiens
acataattaaaaata

SEQ ID NO: 910624 - DNA, 15 bp, Homo sapiens
tacataattaaaaat

SEQ ID NO: 910625 - DNA, 15 bp, Homo sapiens
atacataattaaaaa

SEQ ID NO: 910626 - DNA, 15 bp, Homo sapiens
aatacataattaaaa

SEQ ID NO: 910627 - DNA, 15 bp, Homo sapiens
taatacataattaaa

SEQ ID NO: 910628 - DNA, 15 bp, Homo sapiens
gtaatacataattaa

SEQ ID NO: 910629 - DNA, 15 bp, Homo sapiens
ggtaatacataatta

SEQ ID NO: 910630 - DNA, 15 bp, Homo sapiens
aggtaatacataatt

SEQ ID NO: 910631 - DNA, 15 bp, Homo sapiens
aaggtaatacataat

SEQ ID NO: 910632 - DNA, 15 bp, Homo sapiens
aaaggtaatacataa

SEQ ID NO: 910633 - DNA, 15 bp, Homo sapiens
gaaaggtaatacata

SEQ ID NO: 910634 - DNA, 15 bp, Homo sapiens
agaaaggtaatacat

SEQ ID NO: 910635 - DNA, 15 bp, Homo sapiens
gagaaaggtaataca

SEQ ID NO: 910636 - DNA, 15 bp, Homo sapiens
tgagaaaggtaatac

SEQ ID NO: 910637 - DNA, 15 bp, Homo sapiens
atgagaaaggtaata

SEQ ID NO: 910638 - DNA, 15 bp, Homo sapiens
aatgagaaaggtaat

SEQ ID NO: 910639 - DNA, 15 bp, Homo sapiens
aaatgagaaaggtaa

SEQ ID NO: 910640 - DNA, 15 bp, Homo sapiens
gaaatgagaaaggta

SEQ ID NO: 910641 - DNA, 15 bp, Homo sapiens
agaaatgagaaaggt

SEQ ID NO: 910642 - DNA, 15 bp, Homo sapiens
tagaaatgagaaagg

SEQ ID NO: 910643 - DNA, 15 bp, Homo sapiens
ttagaaatgagaaag

SEQ ID NO: 910644 - DNA, 15 bp, Homo sapiens
attagaaatgagaaa

SEQ ID NO: 910645 - DNA, 15 bp, Homo sapiens
aattagaaatgagaa

SEQ ID NO: 910646 - DNA, 15 bp, Homo sapiens
taattagaaatgaga

SEQ ID NO: 910647 - DNA, 15 bp, Homo sapiens
gtaattagaaatgag

SEQ ID NO: 910648 - DNA, 15 bp, Homo sapiens
ggtaattagaaatga

SEQ ID NO: 910649 - DNA, 15 bp, Homo sapiens
cggtaattagaaatg

SEQ ID NO: 910650 - DNA, 15 bp, Homo sapiens
acggtaattagaaat

SEQ ID NO: 910651 - DNA, 15 bp, Homo sapiens
aacggtaattagaaa

SEQ ID NO: 910652 - DNA, 15 bp, Homo sapiens
aaacggtaattagaa

SEQ ID NO: 910653 - DNA, 15 bp, Homo sapiens
aaaacggtaattaga

SEQ ID NO: 910654 - DNA, 15 bp, Homo sapiens
gaaaacggtaattag

SEQ ID NO: 910655 - DNA, 15 bp, Homo sapiens
ggaaaacggtaatta

SEQ ID NO: 910656 - DNA, 15 bp, Homo sapiens
aggaaaacggtaatt

SEQ ID NO: 910657 - DNA, 15 bp, Homo sapiens
caggaaaacggtaat

SEQ ID NO: 910658 - DNA, 15 bp, Homo sapiens
acaggaaaacggtaa

SEQ ID NO: 910659 - DNA, 15 bp, Homo sapiens
gacaggaaaacggta

SEQ ID NO: 910660 - DNA, 15 bp, Homo sapiens
ggacaggaaaacggt

SEQ ID NO: 910661 - DNA, 15 bp, Homo sapiens
aggacaggaaaacgg

SEQ ID NO: 910662 - DNA, 15 bp, Homo sapiens
aaggacaggaaaacg

SEQ ID NO: 910663 - DNA, 15 bp, Homo sapiens
aaaggacaggaaaac

SEQ ID NO: 910664 - DNA, 15 bp, Homo sapiens
aaaaggacaggaaaa

SEQ ID NO: 910665 - DNA, 15 bp, Homo sapiens
gaaaaggacaggaaa

SEQ ID NO: 910666 - DNA, 15 bp, Homo sapiens
agaaaaggacaggaa

SEQ ID NO: 910667 - DNA, 15 bp, Homo sapiens
cagaaaaggacagga

SEQ ID NO: 910668 - DNA, 15 bp, Homo sapiens
acagaaaaggacagg

SEQ ID NO: 910669 - DNA, 15 bp, Homo sapiens
tacagaaaaggacag

SEQ ID NO: 910670 - DNA, 15 bp, Homo sapiens
ctacagaaaaggaca

SEQ ID NO: 910671 - DNA, 15 bp, Homo sapiens
tctacagaaaaggac

SEQ ID NO: 910672 - DNA, 15 bp, Homo sapiens
ttctacagaaaagga

SEQ ID NO: 910673 - DNA, 15 bp, Homo sapiens
gttctacagaaaagg

SEQ ID NO: 910674 - DNA, 15 bp, Homo sapiens
tgttctacagaaaag

SEQ ID NO: 910675 - DNA, 15 bp, Homo sapiens
ttgttctacagaaaa

SEQ ID NO: 910676 - DNA, 15 bp, Homo sapiens
tttgttctacagaaa

SEQ ID NO: 910677 - DNA, 15 bp, Homo sapiens
gtttgttctacagaa

SEQ ID NO: 910678 - DNA, 15 bp, Homo sapiens
cgtttgttctacaga

SEQ ID NO: 910679 - DNA, 15 bp, Homo sapiens
acgtttgttctacag

SEQ ID NO: 910680 - DNA, 15 bp, Homo sapiens
gacgtttgttctaca

SEQ ID NO: 910681 - DNA, 15 bp, Homo sapiens
agacgtttgttctac

SEQ ID NO: 910682 - DNA, 15 bp, Homo sapiens
tagacgtttgttcta

SEQ ID NO: 910683 - DNA, 15 bp, Homo sapiens
ttagacgtttgttct

SEQ ID NO: 910684 - DNA, 15 bp, Homo sapiens
tttagacgtttgttc

SEQ ID NO: 910685 - DNA, 15 bp, Homo sapiens
ctttagacgtttgtt

SEQ ID NO: 910686 - DNA, 15 bp, Homo sapiens
tctttagacgtttgt

SEQ ID NO: 910687 - DNA, 15 bp, Homo sapiens
ttctttagacgtttg

SEQ ID NO: 910688 - DNA, 15 bp, Homo sapiens
tttctttagacgttt

SEQ ID NO: 910689 - DNA, 15 bp, Homo sapiens
ttttctttagacgtt

SEQ ID NO: 910690 - DNA, 15 bp, Homo sapiens
tttttctttagacgt

SEQ ID NO: 910691 - DNA, 15 bp, Homo sapiens
ctttttctttagacg

SEQ ID NO: 910692 - DNA, 15 bp, Homo sapiens
cctttttctttagac

SEQ ID NO: 910693 - DNA, 15 bp, Homo sapiens
acctttttctttaga

SEQ ID NO: 910694 - DNA, 15 bp, Homo sapiens
cacctttttctttag

SEQ ID NO: 910695 - DNA, 15 bp, Homo sapiens
tcacctttttcttta

SEQ ID NO: 910696 - DNA, 15 bp, Homo sapiens
ctcacctttttcttt

SEQ ID NO: 910697 - DNA, 15 bp, Homo sapiens
cctcacctttttctt

SEQ ID NO: 910698 - DNA, 15 bp, Homo sapiens
gcctcacctttttct

SEQ ID NO: 910699 - DNA, 15 bp, Homo sapiens
agcctcacctttttc

SEQ ID NO: 910700 - DNA, 15 bp, Homo sapiens
aagcctcaccttttt

SEQ ID NO: 910701 - DNA, 15 bp, Homo sapiens
aaagcctcacctttt

SEQ ID NO: 910702 - DNA, 15 bp, Homo sapiens
taaagcctcaccttt

SEQ ID NO: 910703 - DNA, 15 bp, Homo sapiens
ttaaagcctcacctt

SEQ ID NO: 910704 - DNA, 15 bp, Homo sapiens
cttaaagcctcacct

SEQ ID NO: 910705 - DNA, 15 bp, Homo sapiens
acttaaagcctcacc

SEQ ID NO: 910706 - DNA, 15 bp, Homo sapiens
cacttaaagcctcac

SEQ ID NO: 910707 - DNA, 15 bp, Homo sapiens
acacttaaagcctca

SEQ ID NO: 910708 - DNA, 15 bp, Homo sapiens
cacacttaaagcctc

SEQ ID NO: 910709 - DNA, 15 bp, Homo sapiens
ccacacttaaagcct

SEQ ID NO: 910710 - DNA, 15 bp, Homo sapiens
accacacttaaagcc

SEQ ID NO: 910711 - DNA, 15 bp, Homo sapiens
caccacacttaaagc

SEQ ID NO: 910712 - DNA, 15 bp, Homo sapiens
tcaccacacttaaag

SEQ ID NO: 910713 - DNA, 15 bp, Homo sapiens
ttcaccacacttaaa

SEQ ID NO: 910714 - DNA, 15 bp, Homo sapiens
tttcaccacacttaa

SEQ ID NO: 910715 - DNA, 15 bp, Homo sapiens
atttcaccacactta

SEQ ID NO: 910716 - DNA, 15 bp, Homo sapiens
gatttcaccacactt

SEQ ID NO: 910717 - DNA, 15 bp, Homo sapiens
agatttcaccacact

SEQ ID NO: 910718 - DNA, 15 bp, Homo sapiens
aagatttcaccacac

SEQ ID NO: 910719 - DNA, 15 bp, Homo sapiens
caagatttcaccaca

SEQ ID NO: 910720 - DNA, 15 bp, Homo sapiens
ccaagatttcaccac

SEQ ID NO: 910721 - DNA, 15 bp, Homo sapiens
cccaagatttcacca

SEQ ID NO: 910722 - DNA, 15 bp, Homo sapiens
tcccaagatttcacc

SEQ ID NO: 910723 - DNA, 15 bp, Homo sapiens
ttcccaagatttcac

SEQ ID NO: 910724 - DNA, 15 bp, Homo sapiens
attcccaagatttca

SEQ ID NO: 910725 - DNA, 15 bp, Homo sapiens
aattcccaagatttc

SEQ ID NO: 910726 - DNA, 15 bp, Homo sapiens
aaattcccaagattt

SEQ ID NO: 910727 - DNA, 15 bp, Homo sapiens
taaattcccaagatt

SEQ ID NO: 910728 - DNA, 15 bp, Homo sapiens
ttaaattcccaagat

SEQ ID NO: 910729 - DNA, 15 bp, Homo sapiens
tttaaattcccaaga

SEQ ID NO: 910730 - DNA, 15 bp, Homo sapiens
ttttaaattcccaag

SEQ ID NO: 910731 - DNA, 15 bp, Homo sapiens
attttaaattcccaa

SEQ ID NO: 910732 - DNA, 15 bp, Homo sapiens
tattttaaattccca

SEQ ID NO: 910733 - DNA, 15 bp, Homo sapiens
atattttaaattccc

SEQ ID NO: 910734 - DNA, 15 bp, Homo sapiens
catattttaaattcc

SEQ ID NO: 910735 - DNA, 15 bp, Homo sapiens
acatattttaaattc

SEQ ID NO: 910736 - DNA, 15 bp, Homo sapiens
aacatattttaaatt

SEQ ID NO: 910737 - DNA, 15 bp, Homo sapiens
caacatattttaaat

SEQ ID NO: 910738 - DNA, 15 bp, Homo sapiens
acaacatattttaaa

SEQ ID NO: 910739 - DNA, 15 bp, Homo sapiens
cacaacatattttaa

SEQ ID NO: 910740 - DNA, 15 bp, Homo sapiens
tcacaacatatttta

SEQ ID NO: 910741 - DNA, 15 bp, Homo sapiens
ctcacaacatatttt

SEQ ID NO: 910742 - DNA, 15 bp, Homo sapiens
tctcacaacatattt

SEQ ID NO: 910743 - DNA, 15 bp, Homo sapiens
ctctcacaacatatt

SEQ ID NO: 910744 - DNA, 15 bp, Homo sapiens
gctctcacaacatat

SEQ ID NO: 910745 - DNA, 15 bp, Homo sapiens
tgctctcacaacata

SEQ ID NO: 910746 - DNA, 15 bp, Homo sapiens
gtgctctcacaacat

SEQ ID NO: 910747 - DNA, 15 bp, Homo sapiens
agtgctctcacaaca

SEQ ID NO: 910748 - DNA, 15 bp, Homo sapiens
tagtgctctcacaac

SEQ ID NO: 910749 - DNA, 15 bp, Homo sapiens
atagtgctctcacaa

SEQ ID NO: 910750 - DNA, 15 bp, Homo sapiens
aatagtgctctcaca

SEQ ID NO: 910751 - DNA, 15 bp, Homo sapiens
aaatagtgctctcac

SEQ ID NO: 910752 - DNA, 15 bp, Homo sapiens
taaatagtgctctca

SEQ ID NO: 910753 - DNA, 15 bp, Homo sapiens
ctaaatagtgctctc

SEQ ID NO: 910754 - DNA, 15 bp, Homo sapiens
tctaaatagtgctct

SEQ ID NO: 910755 - DNA, 15 bp, Homo sapiens
ctctaaatagtgctc

SEQ ID NO: 910756 - DNA, 15 bp, Homo sapiens
cctctaaatagtgct

SEQ ID NO: 910757 - DNA, 15 bp, Homo sapiens
tcctctaaatagtgc

SEQ ID NO: 910758 - DNA, 15 bp, Homo sapiens
atcctctaaatagtg

SEQ ID NO: 910759 - DNA, 15 bp, Homo sapiens
tatcctctaaatagt

SEQ ID NO: 910760 - DNA, 15 bp, Homo sapiens
atatcctctaaatag

SEQ ID NO: 910761 - DNA, 15 bp, Homo sapiens
catatcctctaaata

SEQ ID NO: 910762 - DNA, 15 bp, Homo sapiens
tcatatcctctaaat

SEQ ID NO: 910763 - DNA, 15 bp, Homo sapiens
atcatatcctctaaa

SEQ ID NO: 910764 - DNA, 15 bp, Homo sapiens
aatcatatcctctaa

SEQ ID NO: 910765 - DNA, 15 bp, Homo sapiens
aaatcatatcctcta

SEQ ID NO: 910766 - DNA, 15 bp, Homo sapiens
aaaatcatatcctct

SEQ ID NO: 910767 - DNA, 15 bp, Homo sapiens
caaaatcatatcctc

SEQ ID NO: 910768 - DNA, 15 bp, Homo sapiens
acaaaatcatatcct

SEQ ID NO: 910769 - DNA, 15 bp, Homo sapiens
aacaaaatcatatcc

SEQ ID NO: 910770 - DNA, 15 bp, Homo sapiens
taacaaaatcatatc

SEQ ID NO: 910771 - DNA, 15 bp, Homo sapiens
ataacaaaatcatat

SEQ ID NO: 910772 - DNA, 15 bp, Homo sapiens
aataacaaaatcata

SEQ ID NO: 910773 - DNA, 15 bp, Homo sapiens
gaataacaaaatcat

SEQ ID NO: 910774 - DNA, 15 bp, Homo sapiens
agaataacaaaatca

SEQ ID NO: 910775 - DNA, 15 bp, Homo sapiens
cagaataacaaaatc

SEQ ID NO: 910776 - DNA, 15 bp, Homo sapiens
tcagaataacaaaat

SEQ ID NO: 910777 - DNA, 15 bp, Homo sapiens
ttcagaataacaaaa

SEQ ID NO: 910778 - DNA, 15 bp, Homo sapiens
attcagaataacaaa

SEQ ID NO: 910779 - DNA, 15 bp, Homo sapiens
tattcagaataacaa

SEQ ID NO: 910780 - DNA, 15 bp, Homo sapiens
ctattcagaataaca

SEQ ID NO: 910781 - DNA, 15 bp, Homo sapiens
actattcagaataac

SEQ ID NO: 910782 - DNA, 15 bp, Homo sapiens
aactattcagaataa

SEQ ID NO: 910783 - DNA, 15 bp, Homo sapiens
aaactattcagaata

SEQ ID NO: 910784 - DNA, 15 bp, Homo sapiens
aaaactattcagaat

SEQ ID NO: 910785 - DNA, 15 bp, Homo sapiens
caaaactattcagaa

SEQ ID NO: 910786 - DNA, 15 bp, Homo sapiens
acaaaactattcaga

SEQ ID NO: 910787 - DNA, 15 bp, Homo sapiens
tacaaaactattcag

SEQ ID NO: 910788 - DNA, 15 bp, Homo sapiens
ttacaaaactattca

SEQ ID NO: 910789 - DNA, 15 bp, Homo sapiens
attacaaaactattc

SEQ ID NO: 910790 - DNA, 15 bp, Homo sapiens
aattacaaaactatt

SEQ ID NO: 910791 - DNA, 15 bp, Homo sapiens
caattacaaaactat

SEQ ID NO: 910792 - DNA, 15 bp, Homo sapiens
tcaattacaaaacta

SEQ ID NO: 910793 - DNA, 15 bp, Homo sapiens
ttcaattacaaaact

SEQ ID NO: 910794 - DNA, 15 bp, Homo sapiens
attcaattacaaaac

SEQ ID NO: 910795 - DNA, 15 bp, Homo sapiens
cattcaattacaaaa

SEQ ID NO: 910796 - DNA, 15 bp, Homo sapiens
acattcaattacaaa

SEQ ID NO: 910797 - DNA, 15 bp, Homo sapiens
aacattcaattacaa

SEQ ID NO: 910798 - DNA, 15 bp, Homo sapiens
caacattcaattaca

SEQ ID NO: 910799 - DNA, 15 bp, Homo sapiens
acaacattcaattac

SEQ ID NO: 910800 - DNA, 15 bp, Homo sapiens
cacaacattcaatta

SEQ ID NO: 910801 - DNA, 15 bp, Homo sapiens
acacaacattcaatt

SEQ ID NO: 910802 - DNA, 15 bp, Homo sapiens
aacacaacattcaat

SEQ ID NO: 910803 - DNA, 15 bp, Homo sapiens
aaacacaacattcaa

SEQ ID NO: 910804 - DNA, 15 bp, Homo sapiens
caaacacaacattca

SEQ ID NO: 910805 - DNA, 15 bp, Homo sapiens
ccaaacacaacattc

SEQ ID NO: 910806 - DNA, 15 bp, Homo sapiens
accaaacacaacatt

SEQ ID NO: 910807 - DNA, 15 bp, Homo sapiens
aaccaaacacaacat

SEQ ID NO: 910808 - DNA, 15 bp, Homo sapiens
taaccaaacacaaca

SEQ ID NO: 910809 - DNA, 15 bp, Homo sapiens
gtaaccaaacacaac

SEQ ID NO: 910810 - DNA, 15 bp, Homo sapiens
ggtaaccaaacacaa

SEQ ID NO: 910811 - DNA, 15 bp, Homo sapiens
aggtaaccaaacaca

SEQ ID NO: 910812 - DNA, 15 bp, Homo sapiens
aaggtaaccaaacac

SEQ ID NO: 910813 - DNA, 15 bp, Homo sapiens
gaaggtaaccaaaca

SEQ ID NO: 910814 - DNA, 15 bp, Homo sapiens
tgaaggtaaccaaac

SEQ ID NO: 910815 - DNA, 15 bp, Homo sapiens
ctgaaggtaaccaaa

SEQ ID NO: 910816 - DNA, 15 bp, Homo sapiens
tctgaaggtaaccaa

SEQ ID NO: 910817 - DNA, 15 bp, Homo sapiens
ttctgaaggtaacca

SEQ ID NO: 910818 - DNA, 15 bp, Homo sapiens
attctgaaggtaacc

SEQ ID NO: 910819 - DNA, 15 bp, Homo sapiens
cattctgaaggtaac

SEQ ID NO: 910820 - DNA, 15 bp, Homo sapiens
tcattctgaaggtaa

SEQ ID NO: 910821 - DNA, 15 bp, Homo sapiens
ttcattctgaaggta

SEQ ID NO: 910822 - DNA, 15 bp, Homo sapiens
gttcattctgaaggt

SEQ ID NO: 910823 - DNA, 15 bp, Homo sapiens
tgttcattctgaagg

SEQ ID NO: 910824 - DNA, 15 bp, Homo sapiens
ttgttcattctgaag

SEQ ID NO: 910825 - DNA, 15 bp, Homo sapiens
gttgttcattctgaa

SEQ ID NO: 910826 - DNA, 15 bp, Homo sapiens
agttgttcattctga

SEQ ID NO: 910827 - DNA, 15 bp, Homo sapiens
aagttgttcattctg

SEQ ID NO: 910828 - DNA, 15 bp, Homo sapiens
aaagttgttcattct

SEQ ID NO: 910829 - DNA, 15 bp, Homo sapiens
caaagttgttcattc

SEQ ID NO: 910830 - DNA, 15 bp, Homo sapiens
acaaagttgttcatt

SEQ ID NO: 910831 - DNA, 15 bp, Homo sapiens
gacaaagttgttcat

SEQ ID NO: 910832 - DNA, 15 bp, Homo sapiens
tgacaaagttgttca

SEQ ID NO: 910833 - DNA, 15 bp, Homo sapiens
ctgacaaagttgttc

SEQ ID NO: 910834 - DNA, 15 bp, Homo sapiens
cctgacaaagttgtt

SEQ ID NO: 910835 - DNA, 15 bp, Homo sapiens
tcctgacaaagttgt

SEQ ID NO: 910836 - DNA, 15 bp, Homo sapiens
atcctgacaaagttg

SEQ ID NO: 910837 - DNA, 15 bp, Homo sapiens
tatcctgacaaagtt

SEQ ID NO: 910838 - DNA, 15 bp, Homo sapiens
atatcctgacaaagt

SEQ ID NO: 910839 - DNA, 15 bp, Homo sapiens
aatatcctgacaaag

SEQ ID NO: 910840 - DNA, 15 bp, Homo sapiens
taatatcctgacaaa

SEQ ID NO: 910841 - DNA, 15 bp, Homo sapiens
ataatatcctgacaa

SEQ ID NO: 910842 - DNA, 15 bp, Homo sapiens
aataatatcctgaca

SEQ ID NO: 910843 - DNA, 15 bp, Homo sapiens
caataatatcctgac

SEQ ID NO: 910844 - DNA, 15 bp, Homo sapiens
tcaataatatcctga

SEQ ID NO: 910845 - DNA, 15 bp, Homo sapiens
gtcaataatatcctg

SEQ ID NO: 910846 - DNA, 15 bp, Homo sapiens
agtcaataatatcct

SEQ ID NO: 910847 - DNA, 15 bp, Homo sapiens
tagtcaataatatcc

SEQ ID NO: 910848 - DNA, 15 bp, Homo sapiens
gtagtcaataatatc

SEQ ID NO: 910849 - DNA, 15 bp, Homo sapiens
ggtagtcaataatat

SEQ ID NO: 910850 - DNA, 15 bp, Homo sapiens
tggtagtcaataata

SEQ ID NO: 910851 - DNA, 15 bp, Homo sapiens
ctggtagtcaataat

SEQ ID NO: 910852 - DNA, 15 bp, Homo sapiens
tctggtagtcaataa

SEQ ID NO: 910853 - DNA, 15 bp, Homo sapiens
ttctggtagtcaata

SEQ ID NO: 910854 - DNA, 15 bp, Homo sapiens
tttctggtagtcaat

SEQ ID NO: 910855 - DNA, 15 bp, Homo sapiens
gtttctggtagtcaa

SEQ ID NO: 910856 - DNA, 15 bp, Homo sapiens
tgtttctggtagtca

SEQ ID NO: 910857 - DNA, 15 bp, Homo sapiens
ttgtttctggtagtc

SEQ ID NO: 910858 - DNA, 15 bp, Homo sapiens
tttgtttctggtagt

SEQ ID NO: 910859 - DNA, 15 bp, Homo sapiens
atttgtttctggtag

SEQ ID NO: 910860 - DNA, 15 bp, Homo sapiens
tatttgtttctggta

SEQ ID NO: 910861 - DNA, 15 bp, Homo sapiens
ctatttgtttctggt

SEQ ID NO: 910862 - DNA, 15 bp, Homo sapiens
tctatttgtttctgg

SEQ ID NO: 910863 - DNA, 15 bp, Homo sapiens
atctatttgtttctg

SEQ ID NO: 910864 - DNA, 15 bp, Homo sapiens
aatctatttgtttct

SEQ ID NO: 910865 - DNA, 15 bp, Homo sapiens
gaatctatttgtttc

SEQ ID NO: 910866 - DNA, 15 bp, Homo sapiens
tgaatctatttgttt

SEQ ID NO: 910867 - DNA, 15 bp, Homo sapiens
gtgaatctatttgtt

SEQ ID NO: 910868 - DNA, 15 bp, Homo sapiens
tgtgaatctatttgt

SEQ ID NO: 910869 - DNA, 15 bp, Homo sapiens
ctgtgaatctatttg

SEQ ID NO: 910870 - DNA, 15 bp, Homo sapiens
tctgtgaatctattt

SEQ ID NO: 910871 - DNA, 15 bp, Homo sapiens
ttctgtgaatctatt

SEQ ID NO: 910872 - DNA, 15 bp, Homo sapiens
tttctgtgaatctat

SEQ ID NO: 910873 - DNA, 15 bp, Homo sapiens
ctttctgtgaatcta

SEQ ID NO: 910874 - DNA, 15 bp, Homo sapiens
tctttctgtgaatct

SEQ ID NO: 910875 - DNA, 15 bp, Homo sapiens
ttctttctgtgaatc

SEQ ID NO: 910876 - DNA, 15 bp, Homo sapiens
tttctttctgtgaat

SEQ ID NO: 910877 - DNA, 15 bp, Homo sapiens
gtttctttctgtgaa

SEQ ID NO: 910878 - DNA, 15 bp, Homo sapiens
tgtttctttctgtga

SEQ ID NO: 910879 - DNA, 15 bp, Homo sapiens
gtgtttctttctgtg

SEQ ID NO: 910880 - DNA, 15 bp, Homo sapiens
agtgtttctttctgt

SEQ ID NO: 910881 - DNA, 15 bp, Homo sapiens
aagtgtttctttctg

SEQ ID NO: 910882 - DNA, 15 bp, Homo sapiens
aaagtgtttctttct

SEQ ID NO: 910883 - DNA, 15 bp, Homo sapiens
aaaagtgtttctttc

SEQ ID NO: 910884 - DNA, 15 bp, Homo sapiens
taaaagtgtttcttt

SEQ ID NO: 910885 - DNA, 15 bp, Homo sapiens
ataaaagtgtttctt

SEQ ID NO: 910886 - DNA, 15 bp, Homo sapiens
gataaaagtgtttct

SEQ ID NO: 910887 - DNA, 15 bp, Homo sapiens
tgataaaagtgtttc

SEQ ID NO: 910888 - DNA, 15 bp, Homo sapiens
ttgataaaagtgttt

SEQ ID NO: 910889 - DNA, 15 bp, Homo sapiens
cttgataaaagtgtt

SEQ ID NO: 910890 - DNA, 15 bp, Homo sapiens
tcttgataaaagtgt

SEQ ID NO: 910891 - DNA, 15 bp, Homo sapiens
ttcttgataaaagtg

SEQ ID NO: 910892 - DNA, 15 bp, Homo sapiens
cttcttgataaaagt

SEQ ID NO: 910893 - DNA, 15 bp, Homo sapiens
tcttcttgataaaag

SEQ ID NO: 910894 - DNA, 15 bp, Homo sapiens
ctcttcttgataaaa

SEQ ID NO: 910895 - DNA, 15 bp, Homo sapiens
cctcttcttgataaa

SEQ ID NO: 910896 - DNA, 15 bp, Homo sapiens
ccctcttcttgataa

SEQ ID NO: 910897 - DNA, 15 bp, Homo sapiens
cccctcttcttgata

SEQ ID NO: 910898 - DNA, 15 bp, Homo sapiens
tcccctcttcttgat

SEQ ID NO: 910899 - DNA, 15 bp, Homo sapiens
ttcccctcttcttga

SEQ ID NO: 910900 - DNA, 15 bp, Homo sapiens
cttcccctcttcttg

SEQ ID NO: 910901 - DNA, 15 bp, Homo sapiens
tcttcccctcttctt

SEQ ID NO: 910902 - DNA, 15 bp, Homo sapiens
gtcttcccctcttct

SEQ ID NO: 910903 - DNA, 15 bp, Homo sapiens
tgtcttcccctcttc

SEQ ID NO: 910904 - DNA, 15 bp, Homo sapiens
ctgtcttcccctctt

SEQ ID NO: 910905 - DNA, 15 bp, Homo sapiens
actgtcttcccctct

SEQ ID NO: 910906 - DNA, 15 bp, Homo sapiens
cactgtcttcccctc

SEQ ID NO: 910907 - DNA, 15 bp, Homo sapiens
tcactgtcttcccct

SEQ ID NO: 910908 - DNA, 15 bp, Homo sapiens
gtcactgtcttcccc

SEQ ID NO: 910909 - DNA, 15 bp, Homo sapiens
agtcactgtcttccc

SEQ ID NO: 910910 - DNA, 15 bp, Homo sapiens
tagtcactgtcttcc

SEQ ID NO: 910911 - DNA, 15 bp, Homo sapiens
gtagtcactgtcttc

SEQ ID NO: 910912 - DNA, 15 bp, Homo sapiens
ggtagtcactgtctt

SEQ ID NO: 910913 - DNA, 15 bp, Homo sapiens
cggtagtcactgtct

SEQ ID NO: 910914 - DNA, 15 bp, Homo sapiens
tcggtagtcactgtc

SEQ ID NO: 910915 - DNA, 15 bp, Homo sapiens
atcggtagtcactgt

SEQ ID NO: 910916 - DNA, 15 bp, Homo sapiens
gatcggtagtcactg

SEQ ID NO: 910917 - DNA, 15 bp, Homo sapiens
tgatcggtagtcact

SEQ ID NO: 910918 - DNA, 15 bp, Homo sapiens
gtgatcggtagtcac

SEQ ID NO: 910919 - DNA, 15 bp, Homo sapiens
tgtgatcggtagtca

SEQ ID NO: 910920 - DNA, 15 bp, Homo sapiens
ctgtgatcggtagtc

SEQ ID NO: 910921 - DNA, 15 bp, Homo sapiens
actgtgatcggtagt

SEQ ID NO: 910922 - DNA, 15 bp, Homo sapiens
aactgtgatcggtag

SEQ ID NO: 910923 - DNA, 15 bp, Homo sapiens
caactgtgatcggta

SEQ ID NO: 910924 - DNA, 15 bp, Homo sapiens
acaactgtgatcggt

SEQ ID NO: 910925 - DNA, 15 bp, Homo sapiens
gacaactgtgatcgg

SEQ ID NO: 910926 - DNA, 15 bp, Homo sapiens
agacaactgtgatcg

SEQ ID NO: 910927 - DNA, 15 bp, Homo sapiens
tagacaactgtgatc

SEQ ID NO: 910928 - DNA, 15 bp, Homo sapiens
ttagacaactgtgat

SEQ ID NO: 910929 - DNA, 15 bp, Homo sapiens
tttagacaactgtga

SEQ ID NO: 910930 - DNA, 15 bp, Homo sapiens
ttttagacaactgtg

SEQ ID NO: 910931 - DNA, 15 bp, Homo sapiens
tttttagacaactgt

SEQ ID NO: 910932 - DNA, 15 bp, Homo sapiens
ttttttagacaactg

SEQ ID NO: 910933 - DNA, 15 bp, Homo sapiens
tttttttagacaact

SEQ ID NO: 910934 - DNA, 15 bp, Homo sapiens
ttttttttagacaac

SEQ ID NO: 910935 - DNA, 15 bp, Homo sapiens
gttttttttagacaa

SEQ ID NO: 910936 - DNA, 15 bp, Homo sapiens
agttttttttagaca

SEQ ID NO: 910937 - DNA, 15 bp, Homo sapiens
tagttttttttagac

SEQ ID NO: 910938 - DNA, 15 bp, Homo sapiens
atagttttttttaga

SEQ ID NO: 910939 - DNA, 15 bp, Homo sapiens
catagttttttttag

SEQ ID NO: 910940 - DNA, 15 bp, Homo sapiens
tcatagtttttttta

SEQ ID NO: 910941 - DNA, 15 bp, Homo sapiens
ctcatagtttttttt

SEQ ID NO: 910942 - DNA, 15 bp, Homo sapiens
gctcatagttttttt

SEQ ID NO: 910943 - DNA, 15 bp, Homo sapiens
agctcatagtttttt

SEQ ID NO: 910944 - DNA, 15 bp, Homo sapiens
aagctcatagttttt

SEQ ID NO: 910945 - DNA, 15 bp, Homo sapiens
taagctcatagtttt

SEQ ID NO: 910946 - DNA, 15 bp, Homo sapiens
ataagctcatagttt

SEQ ID NO: 910947 - DNA, 15 bp, Homo sapiens
gataagctcatagtt

SEQ ID NO: 910948 - DNA, 15 bp, Homo sapiens
ggataagctcatagt

SEQ ID NO: 910949 - DNA, 15 bp, Homo sapiens
tggataagctcatag

SEQ ID NO: 910950 - DNA, 15 bp, Homo sapiens
ttggataagctcata

SEQ ID NO: 910951 - DNA, 15 bp, Homo sapiens
attggataagctcat

SEQ ID NO: 910952 - DNA, 15 bp, Homo sapiens
tattggataagctca

SEQ ID NO: 910953 - DNA, 15 bp, Homo sapiens
atattggataagctc

SEQ ID NO: 910954 - DNA, 15 bp, Homo sapiens
gatattggataagct

SEQ ID NO: 910955 - DNA, 15 bp, Homo sapiens
agatattggataagc

SEQ ID NO: 910956 - DNA, 15 bp, Homo sapiens
aagatattggataag

SEQ ID NO: 910957 - DNA, 15 bp, Homo sapiens
caagatattggataa

SEQ ID NO: 910958 - DNA, 15 bp, Homo sapiens
tcaagatattggata

SEQ ID NO: 910959 - DNA, 15 bp, Homo sapiens
atcaagatattggat

SEQ ID NO: 910960 - DNA, 15 bp, Homo sapiens
catcaagatattgga

SEQ ID NO: 910961 - DNA, 15 bp, Homo sapiens
tcatcaagatattgg

SEQ ID NO: 910962 - DNA, 15 bp, Homo sapiens
ttcatcaagatattg

SEQ ID NO: 910963 - DNA, 15 bp, Homo sapiens
tttcatcaagatatt

SEQ ID NO: 910964 - DNA, 15 bp, Homo sapiens
atttcatcaagatat

SEQ ID NO: 910965 - DNA, 15 bp, Homo sapiens
aatttcatcaagata

SEQ ID NO: 910966 - DNA, 15 bp, Homo sapiens
gaatttcatcaagat

SEQ ID NO: 910967 - DNA, 15 bp, Homo sapiens
tgaatttcatcaaga

SEQ ID NO: 910968 - DNA, 15 bp, Homo sapiens
ctgaatttcatcaag

SEQ ID NO: 910969 - DNA, 15 bp, Homo sapiens
cctgaatttcatcaa

SEQ ID NO: 910970 - DNA, 15 bp, Homo sapiens
acctgaatttcatca

SEQ ID NO: 910971 - DNA, 15 bp, Homo sapiens
tacctgaatttcatc

SEQ ID NO: 910972 - DNA, 15 bp, Homo sapiens
ttacctgaatttcat

SEQ ID NO: 910973 - DNA, 15 bp, Homo sapiens
tttacctgaatttca

SEQ ID NO: 910974 - DNA, 15 bp, Homo sapiens
ttttacctgaatttc

SEQ ID NO: 910975 - DNA, 15 bp, Homo sapiens
attttacctgaattt

SEQ ID NO: 910976 - DNA, 15 bp, Homo sapiens
cattttacctgaatt

SEQ ID NO: 910977 - DNA, 15 bp, Homo sapiens
ccattttacctgaat

SEQ ID NO: 910978 - DNA, 15 bp, Homo sapiens
gccattttacctgaa

SEQ ID NO: 910979 - DNA, 15 bp, Homo sapiens
agccattttacctga

SEQ ID NO: 910980 - DNA, 15 bp, Homo sapiens
tagccattttacctg

SEQ ID NO: 910981 - DNA, 15 bp, Homo sapiens
ctagccattttacct

SEQ ID NO: 910982 - DNA, 15 bp, Homo sapiens
tctagccattttacc

SEQ ID NO: 910983 - DNA, 15 bp, Homo sapiens
ttctagccattttac

SEQ ID NO: 910984 - DNA, 15 bp, Homo sapiens
cttctagccatttta

SEQ ID NO: 910985 - DNA, 15 bp, Homo sapiens
acttctagccatttt

SEQ ID NO: 910986 - DNA, 15 bp, Homo sapiens
gacttctagccattt

SEQ ID NO: 910987 - DNA, 15 bp, Homo sapiens
tgacttctagccatt

SEQ ID NO: 910988 - DNA, 15 bp, Homo sapiens
ttgacttctagccat

SEQ ID NO: 910989 - DNA, 15 bp, Homo sapiens
attgacttctagcca

SEQ ID NO: 910990 - DNA, 15 bp, Homo sapiens
aattgacttctagcc

SEQ ID NO: 910991 - DNA, 15 bp, Homo sapiens
gaattgacttctagc

SEQ ID NO: 910992 - DNA, 15 bp, Homo sapiens
tgaattgacttctag

SEQ ID NO: 910993 - DNA, 15 bp, Homo sapiens
ctgaattgacttcta

SEQ ID NO: 910994 - DNA, 15 bp, Homo sapiens
tctgaattgacttct

SEQ ID NO: 910995 - DNA, 15 bp, Homo sapiens
ctctgaattgacttc

SEQ ID NO: 910996 - DNA, 15 bp, Homo sapiens
gctctgaattgactt

SEQ ID NO: 910997 - DNA, 15 bp, Homo sapiens
tgctctgaattgact

SEQ ID NO: 910998 - DNA, 15 bp, Homo sapiens
ttgctctgaattgac

SEQ ID NO: 910999 - DNA, 15 bp, Homo sapiens
attgctctgaattga

SEQ ID NO: 911000 - DNA, 15 bp, Homo sapiens
cattgctctgaattg

SEQ ID NO: 911001 - DNA, 15 bp, Homo sapiens
ccattgctctgaatt

SEQ ID NO: 911002 - DNA, 15 bp, Homo sapiens
accattgctctgaat

SEQ ID NO: 911003 - DNA, 15 bp, Homo sapiens
aaccattgctctgaa

SEQ ID NO: 911004 - DNA, 15 bp, Homo sapiens
gaaccattgctctga

SEQ ID NO: 911005 - DNA, 15 bp, Homo sapiens
ggaaccattgctctg

SEQ ID NO: 911006 - DNA, 15 bp, Homo sapiens
aggaaccattgctct

SEQ ID NO: 911007 - DNA, 15 bp, Homo sapiens
taggaaccattgctc

SEQ ID NO: 911008 - DNA, 15 bp, Homo sapiens
ttaggaaccattgct

SEQ ID NO: 911009 - DNA, 15 bp, Homo sapiens
tttaggaaccattgc

SEQ ID NO: 911010 - DNA, 15 bp, Homo sapiens
ttttaggaaccattg

SEQ ID NO: 911011 - DNA, 15 bp, Homo sapiens
tttttaggaaccatt

SEQ ID NO: 911012 - DNA, 15 bp, Homo sapiens
gtttttaggaaccat

SEQ ID NO: 911013 - DNA, 15 bp, Homo sapiens
agtttttaggaacca

SEQ ID NO: 911014 - DNA, 15 bp, Homo sapiens
aagtttttaggaacc

SEQ ID NO: 911015 - DNA, 15 bp, Homo sapiens
aaagtttttaggaac

SEQ ID NO: 911016 - DNA, 15 bp, Homo sapiens
taaagtttttaggaa

SEQ ID NO: 911017 - DNA, 15 bp, Homo sapiens
ttaaagtttttagga

SEQ ID NO: 911018 - DNA, 15 bp, Homo sapiens
attaaagtttttagg

SEQ ID NO: 911019 - DNA, 15 bp, Homo sapiens
aattaaagtttttag

SEQ ID NO: 911020 - DNA, 15 bp, Homo sapiens
aaattaaagttttta

SEQ ID NO: 911021 - DNA, 15 bp, Homo sapiens
gaaattaaagttttt

SEQ ID NO: 911022 - DNA, 15 bp, Homo sapiens
tgaaattaaagtttt

SEQ ID NO: 911023 - DNA, 15 bp, Homo sapiens
atgaaattaaagttt

SEQ ID NO: 911024 - DNA, 15 bp, Homo sapiens
aatgaaattaaagtt

SEQ ID NO: 911025 - DNA, 15 bp, Homo sapiens
taatgaaattaaagt

SEQ ID NO: 911026 - DNA, 15 bp, Homo sapiens
gtaatgaaattaaag

SEQ ID NO: 911027 - DNA, 15 bp, Homo sapiens
tgtaatgaaattaaa

SEQ ID NO: 911028 - DNA, 15 bp, Homo sapiens
ttgtaatgaaattaa

SEQ ID NO: 911029 - DNA, 15 bp, Homo sapiens
attgtaatgaaatta

SEQ ID NO: 911030 - DNA, 15 bp, Homo sapiens
cattgtaatgaaatt

SEQ ID NO: 911031 - DNA, 15 bp, Homo sapiens
acattgtaatgaaat

SEQ ID NO: 911032 - DNA, 15 bp, Homo sapiens
tacattgtaatgaaa

SEQ ID NO: 911033 - DNA, 15 bp, Homo sapiens
ttacattgtaatgaa

SEQ ID NO: 911034 - DNA, 15 bp, Homo sapiens
tttacattgtaatga

SEQ ID NO: 911035 - DNA, 15 bp, Homo sapiens
atttacattgtaatg

SEQ ID NO: 911036 - DNA, 15 bp, Homo sapiens
tatttacattgtaat

SEQ ID NO: 911037 - DNA, 15 bp, Homo sapiens
atatttacattgtaa

SEQ ID NO: 911038 - DNA, 15 bp, Homo sapiens
tatatttacattgta

SEQ ID NO: 911039 - DNA, 15 bp, Homo sapiens
ttatatttacattgt

SEQ ID NO: 911040 - DNA, 15 bp, Homo sapiens
attatatttacattg

SEQ ID NO: 911041 - DNA, 15 bp, Homo sapiens
tattatatttacatt

SEQ ID NO: 911042 - DNA, 15 bp, Homo sapiens
atattatatttacat

SEQ ID NO: 911043 - DNA, 15 bp, Homo sapiens
aatattatatttaca

SEQ ID NO: 911044 - DNA, 15 bp, Homo sapiens
aaatattatatttac

SEQ ID NO: 911045 - DNA, 15 bp, Homo sapiens
taaatattatattta

SEQ ID NO: 911046 - DNA, 15 bp, Homo sapiens
ctaaatattatattt

SEQ ID NO: 911047 - DNA, 15 bp, Homo sapiens
gctaaatattatatt

SEQ ID NO: 911048 - DNA, 15 bp, Homo sapiens
ggctaaatattatat

SEQ ID NO: 911049 - DNA, 15 bp, Homo sapiens
gggctaaatattata

SEQ ID NO: 911050 - DNA, 15 bp, Homo sapiens
agggctaaatattat

SEQ ID NO: 911051 - DNA, 15 bp, Homo sapiens
tagggctaaatatta

SEQ ID NO: 911052 - DNA, 15 bp, Homo sapiens
gtagggctaaatatt

SEQ ID NO: 911053 - DNA, 15 bp, Homo sapiens
tgtagggctaaatat

SEQ ID NO: 911054 - DNA, 15 bp, Homo sapiens
atgtagggctaaata

SEQ ID NO: 911055 - DNA, 15 bp, Homo sapiens
catgtagggctaaat

SEQ ID NO: 911056 - DNA, 15 bp, Homo sapiens
acatgtagggctaaa

SEQ ID NO: 911057 - DNA, 15 bp, Homo sapiens
tacatgtagggctaa

SEQ ID NO: 911058 - DNA, 15 bp, Homo sapiens
ttacatgtagggcta

SEQ ID NO: 911059 - DNA, 15 bp, Homo sapiens
tttacatgtagggct

SEQ ID NO: 911060 - DNA, 15 bp, Homo sapiens
atttacatgtagggc

SEQ ID NO: 911061 - DNA, 15 bp, Homo sapiens
aatttacatgtaggg

SEQ ID NO: 911062 - DNA, 15 bp, Homo sapiens
gaatttacatgtagg

SEQ ID NO: 911063 - DNA, 15 bp, Homo sapiens
ggaatttacatgtag

SEQ ID NO: 911064 - DNA, 15 bp, Homo sapiens
gggaatttacatgta

SEQ ID NO: 911065 - DNA, 15 bp, Homo sapiens
agggaatttacatgt

SEQ ID NO: 911066 - DNA, 15 bp, Homo sapiens
cagggaatttacatg

SEQ ID NO: 911067 - DNA, 15 bp, Homo sapiens
ccagggaatttacat

SEQ ID NO: 911068 - DNA, 15 bp, Homo sapiens
accagggaatttaca

SEQ ID NO: 911069 - DNA, 15 bp, Homo sapiens
taccagggaatttac

SEQ ID NO: 911070 - DNA, 15 bp, Homo sapiens
ataccagggaattta

SEQ ID NO: 911071 - DNA, 15 bp, Homo sapiens
tataccagggaattt

SEQ ID NO: 911072 - DNA, 15 bp, Homo sapiens
ttataccagggaatt

SEQ ID NO: 911073 - DNA, 15 bp, Homo sapiens
tttataccagggaat

SEQ ID NO: 911074 - DNA, 15 bp, Homo sapiens
atttataccagggaa

SEQ ID NO: 911075 - DNA, 15 bp, Homo sapiens
gatttataccaggga

SEQ ID NO: 911076 - DNA, 15 bp, Homo sapiens
agatttataccaggg

SEQ ID NO: 911077 - DNA, 15 bp, Homo sapiens
cagatttataccagg

SEQ ID NO: 911078 - DNA, 15 bp, Homo sapiens
acagatttataccag

SEQ ID NO: 911079 - DNA, 15 bp, Homo sapiens
gacagatttatacca

SEQ ID NO: 911080 - DNA, 15 bp, Homo sapiens
tgacagatttatacc

SEQ ID NO: 911081 - DNA, 15 bp, Homo sapiens
gtgacagatttatac

SEQ ID NO: 911082 - DNA, 15 bp, Homo sapiens
agtgacagatttata

SEQ ID NO: 911083 - DNA, 15 bp, Homo sapiens
tagtgacagatttat

SEQ ID NO: 911084 - DNA, 15 bp, Homo sapiens
atagtgacagattta

SEQ ID NO: 911085 - DNA, 15 bp, Homo sapiens
catagtgacagattt

SEQ ID NO: 911086 - DNA, 15 bp, Homo sapiens
acatagtgacagatt

SEQ ID NO: 911087 - DNA, 15 bp, Homo sapiens
tacatagtgacagat

SEQ ID NO: 911088 - DNA, 15 bp, Homo sapiens
gtacatagtgacaga

SEQ ID NO: 911089 - DNA, 15 bp, Homo sapiens
agtacatagtgacag

SEQ ID NO: 911090 - DNA, 15 bp, Homo sapiens
aagtacatagtgaca

SEQ ID NO: 911091 - DNA, 15 bp, Homo sapiens
caagtacatagtgac

SEQ ID NO: 911092 - DNA, 15 bp, Homo sapiens
acaagtacatagtga

SEQ ID NO: 911093 - DNA, 15 bp, Homo sapiens
tacaagtacatagtg

SEQ ID NO: 911094 - DNA, 15 bp, Homo sapiens
ttacaagtacatagt

SEQ ID NO: 911095 - DNA, 15 bp, Homo sapiens
tttacaagtacatag

SEQ ID NO: 911096 - DNA, 15 bp, Homo sapiens
ttttacaagtacata

SEQ ID NO: 911097 - DNA, 15 bp, Homo sapiens
attttacaagtacat

SEQ ID NO: 911098 - DNA, 15 bp, Homo sapiens
cattttacaagtaca

SEQ ID NO: 911099 - DNA, 15 bp, Homo sapiens
acattttacaagtac

SEQ ID NO: 911100 - DNA, 15 bp, Homo sapiens
cacattttacaagta

SEQ ID NO: 911101 - DNA, 15 bp, Homo sapiens
tcacattttacaagt

SEQ ID NO: 911102 - DNA, 15 bp, Homo sapiens
ttcacattttacaag

SEQ ID NO: 911103 - DNA, 15 bp, Homo sapiens
tttcacattttacaa

SEQ ID NO: 911104 - DNA, 15 bp, Homo sapiens
atttcacattttaca

SEQ ID NO: 911105 - DNA, 15 bp, Homo sapiens
tatttcacattttac

SEQ ID NO: 911106 - DNA, 15 bp, Homo sapiens
ttatttcacatttta

SEQ ID NO: 911107 - DNA, 15 bp, Homo sapiens
tttatttcacatttt

SEQ ID NO: 911108 - DNA, 15 bp, Homo sapiens
atttatttcacattt

SEQ ID NO: 911109 - DNA, 15 bp, Homo sapiens
aatttatttcacatt

SEQ ID NO: 911110 - DNA, 15 bp, Homo sapiens
taatttatttcacat

SEQ ID NO: 911111 - DNA, 15 bp, Homo sapiens
gtaatttatttcaca

SEQ ID NO: 911112 - DNA, 15 bp, Homo sapiens
tgtaatttatttcac

SEQ ID NO: 911113 - DNA, 15 bp, Homo sapiens
atgtaatttatttca

SEQ ID NO: 911114 - DNA, 15 bp, Homo sapiens
gatgtaatttatttc

SEQ ID NO: 911115 - DNA, 15 bp, Homo sapiens
agatgtaatttattt

SEQ ID NO: 911116 - DNA, 15 bp, Homo sapiens
aagatgtaatttatt

SEQ ID NO: 911117 - DNA, 15 bp, Homo sapiens
aaagatgtaatttat

SEQ ID NO: 911118 - DNA, 15 bp, Homo sapiens
caaagatgtaattta

SEQ ID NO: 911119 - DNA, 15 bp, Homo sapiens
tcaaagatgtaattt

SEQ ID NO: 911120 - DNA, 15 bp, Homo sapiens
ttcaaagatgtaatt

SEQ ID NO: 911121 - DNA, 15 bp, Homo sapiens
cttcaaagatgtaat

SEQ ID NO: 911122 - DNA, 15 bp, Homo sapiens
acttcaaagatgtaa

SEQ ID NO: 911123 - DNA, 15 bp, Homo sapiens
aacttcaaagatgta

SEQ ID NO: 911124 - DNA, 15 bp, Homo sapiens
caacttcaaagatgt

SEQ ID NO: 911125 - DNA, 15 bp, Homo sapiens
gcaacttcaaagatg

SEQ ID NO: 911126 - DNA, 15 bp, Homo sapiens
tgcaacttcaaagat

SEQ ID NO: 911127 - DNA, 15 bp, Homo sapiens
ttgcaacttcaaaga

SEQ ID NO: 911128 - DNA, 15 bp, Homo sapiens
gttgcaacttcaaag

SEQ ID NO: 911129 - DNA, 15 bp, Homo sapiens
agttgcaacttcaaa

SEQ ID NO: 911130 - DNA, 15 bp, Homo sapiens
aagttgcaacttcaa

SEQ ID NO: 911131 - DNA, 15 bp, Homo sapiens
aaagttgcaacttca

SEQ ID NO: 911132 - DNA, 15 bp, Homo sapiens
aaaagttgcaacttc

SEQ ID NO: 911133 - DNA, 15 bp, Homo sapiens
aaaaagttgcaactt

SEQ ID NO: 911134 - DNA, 15 bp, Homo sapiens
taaaaagttgcaact

SEQ ID NO: 911135 - DNA, 15 bp, Homo sapiens
ctaaaaagttgcaac

SEQ ID NO: 911136 - DNA, 15 bp, Homo sapiens
gctaaaaagttgcaa

SEQ ID NO: 911137 - DNA, 15 bp, Homo sapiens
ggctaaaaagttgca

SEQ ID NO: 911138 - DNA, 15 bp, Homo sapiens
tggctaaaaagttgc

SEQ ID NO: 911139 - DNA, 15 bp, Homo sapiens
atggctaaaaagttg

SEQ ID NO: 911140 - DNA, 15 bp, Homo sapiens
aatggctaaaaagtt

SEQ ID NO: 911141 - DNA, 15 bp, Homo sapiens
aaatggctaaaaagt

SEQ ID NO: 911142 - DNA, 15 bp, Homo sapiens
aaaatggctaaaaag

SEQ ID NO: 911143 - DNA, 15 bp, Homo sapiens
aaaaatggctaaaaa

SEQ ID NO: 911144 - DNA, 15 bp, Homo sapiens
taaaaatggctaaaa

SEQ ID NO: 911145 - DNA, 15 bp, Homo sapiens
ataaaaatggctaaa

SEQ ID NO: 911146 - DNA, 15 bp, Homo sapiens
tataaaaatggctaa

SEQ ID NO: 911147 - DNA, 15 bp, Homo sapiens
atataaaaatggcta

SEQ ID NO: 911148 - DNA, 15 bp, Homo sapiens
aatataaaaatggct

SEQ ID NO: 911149 - DNA, 15 bp, Homo sapiens
aaatataaaaatggc

SEQ ID NO: 911150 - DNA, 15 bp, Homo sapiens
caaatataaaaatgg

SEQ ID NO: 911151 - DNA, 15 bp, Homo sapiens
gcaaatataaaaatg

SEQ ID NO: 911152 - DNA, 15 bp, Homo sapiens
ggcaaatataaaaat

SEQ ID NO: 911153 - DNA, 15 bp, Homo sapiens
aggcaaatataaaaa

SEQ ID NO: 911154 - DNA, 15 bp, Homo sapiens
caggcaaatataaaa

SEQ ID NO: 911155 - DNA, 15 bp, Homo sapiens
acaggcaaatataaa

SEQ ID NO: 911156 - DNA, 15 bp, Homo sapiens
gacaggcaaatataa

SEQ ID NO: 911157 - DNA, 15 bp, Homo sapiens
agacaggcaaatata

SEQ ID NO: 911158 - DNA, 15 bp, Homo sapiens
aagacaggcaaatat

SEQ ID NO: 911159 - DNA, 15 bp, Homo sapiens
caagacaggcaaata

SEQ ID NO: 911160 - DNA, 15 bp, Homo sapiens
ccaagacaggcaaat

SEQ ID NO: 911161 - DNA, 15 bp, Homo sapiens
accaagacaggcaaa

SEQ ID NO: 911162 - DNA, 15 bp, Homo sapiens
gaccaagacaggcaa

SEQ ID NO: 911163 - DNA, 15 bp, Homo sapiens
tgaccaagacaggca

SEQ ID NO: 911164 - DNA, 15 bp, Homo sapiens
atgaccaagacaggc

SEQ ID NO: 911165 - DNA, 15 bp, Homo sapiens
aatgaccaagacagg

SEQ ID NO: 911166 - DNA, 15 bp, Homo sapiens
taatgaccaagacag

SEQ ID NO: 911167 - DNA, 15 bp, Homo sapiens
ttaatgaccaagaca

SEQ ID NO: 911168 - DNA, 15 bp, Homo sapiens
cttaatgaccaagac

SEQ ID NO: 911169 - DNA, 15 bp, Homo sapiens
tcttaatgaccaaga

SEQ ID NO: 911170 - DNA, 15 bp, Homo sapiens
ttcttaatgaccaag

SEQ ID NO: 911171 - DNA, 15 bp, Homo sapiens
gttcttaatgaccaa

SEQ ID NO: 911172 - DNA, 15 bp, Homo sapiens
tgttcttaatgacca

SEQ ID NO: 911173 - DNA, 15 bp, Homo sapiens
ttgttcttaatgacc

SEQ ID NO: 911174 - DNA, 15 bp, Homo sapiens
attgttcttaatgac

SEQ ID NO: 911175 - DNA, 15 bp, Homo sapiens
aattgttcttaatga

SEQ ID NO: 911176 - DNA, 15 bp, Homo sapiens
caattgttcttaatg

SEQ ID NO: 911177 - DNA, 15 bp, Homo sapiens
tcaattgttcttaat

SEQ ID NO: 911178 - DNA, 15 bp, Homo sapiens
ctcaattgttcttaa

SEQ ID NO: 911179 - DNA, 15 bp, Homo sapiens
cctcaattgttctta

SEQ ID NO: 911180 - DNA, 15 bp, Homo sapiens
acctcaattgttctt

SEQ ID NO: 911181 - DNA, 15 bp, Homo sapiens
gacctcaattgttct

SEQ ID NO: 911182 - DNA, 15 bp, Homo sapiens
ggacctcaattgttc

SEQ ID NO: 911183 - DNA, 15 bp, Homo sapiens
aggacctcaattgtt

SEQ ID NO: 911184 - DNA, 15 bp, Homo sapiens
aaggacctcaattgt

SEQ ID NO: 911185 - DNA, 15 bp, Homo sapiens
taaggacctcaattg

SEQ ID NO: 911186 - DNA, 15 bp, Homo sapiens
ataaggacctcaatt

SEQ ID NO: 911187 - DNA, 15 bp, Homo sapiens
cataaggacctcaat

SEQ ID NO: 911188 - DNA, 15 bp, Homo sapiens
acataaggacctcaa

SEQ ID NO: 911189 - DNA, 15 bp, Homo sapiens
tacataaggacctca

SEQ ID NO: 911190 - DNA, 15 bp, Homo sapiens
gtacataaggacctc

SEQ ID NO: 911191 - DNA, 15 bp, Homo sapiens
agtacataaggacct

SEQ ID NO: 911192 - DNA, 15 bp, Homo sapiens
tagtacataaggacc

SEQ ID NO: 911193 - DNA, 15 bp, Homo sapiens
atagtacataaggac

SEQ ID NO: 911194 - DNA, 15 bp, Homo sapiens
aatagtacataagga

SEQ ID NO: 911195 - DNA, 15 bp, Homo sapiens
aaatagtacataagg

SEQ ID NO: 911196 - DNA, 15 bp, Homo sapiens
aaaatagtacataag

SEQ ID NO: 911197 - DNA, 15 bp, Homo sapiens
gaaaatagtacataa

SEQ ID NO: 911198 - DNA, 15 bp, Homo sapiens
agaaaatagtacata

SEQ ID NO: 911199 - DNA, 15 bp, Homo sapiens
aagaaaatagtacat

SEQ ID NO: 911200 - DNA, 15 bp, Homo sapiens
caagaaaatagtaca

SEQ ID NO: 911201 - DNA, 15 bp, Homo sapiens
tcaagaaaatagtac

SEQ ID NO: 911202 - DNA, 15 bp, Homo sapiens
atcaagaaaatagta

SEQ ID NO: 911203 - DNA, 15 bp, Homo sapiens
aatcaagaaaatagt

SEQ ID NO: 911204 - DNA, 15 bp, Homo sapiens
gaatcaagaaaatag

SEQ ID NO: 911205 - DNA, 15 bp, Homo sapiens
tgaatcaagaaaata

SEQ ID NO: 911206 - DNA, 15 bp, Homo sapiens
ttgaatcaagaaaat

SEQ ID NO: 911207 - DNA, 15 bp, Homo sapiens
attgaatcaagaaaa

SEQ ID NO: 911208 - DNA, 15 bp, Homo sapiens
aattgaatcaagaaa

SEQ ID NO: 911209 - DNA, 15 bp, Homo sapiens
aaattgaatcaagaa

SEQ ID NO: 911210 - DNA, 15 bp, Homo sapiens
caaattgaatcaaga

SEQ ID NO: 911211 - DNA, 15 bp, Homo sapiens
tcaaattgaatcaag

SEQ ID NO: 911212 - DNA, 15 bp, Homo sapiens
atcaaattgaatcaa

SEQ ID NO: 911213 - DNA, 15 bp, Homo sapiens
aatcaaattgaatca

SEQ ID NO: 911214 - DNA, 15 bp, Homo sapiens
aaatcaaattgaatc

SEQ ID NO: 911215 - DNA, 15 bp, Homo sapiens
taaatcaaattgaat

SEQ ID NO: 911216 - DNA, 15 bp, Homo sapiens
ttaaatcaaattgaa

SEQ ID NO: 911217 - DNA, 15 bp, Homo sapiens
attaaatcaaattga

SEQ ID NO: 911218 - DNA, 15 bp, Homo sapiens
aattaaatcaaattg

SEQ ID NO: 911219 - DNA, 15 bp, Homo sapiens
caattaaatcaaatt

SEQ ID NO: 911220 - DNA, 15 bp, Homo sapiens
ccaattaaatcaaat

SEQ ID NO: 911221 - DNA, 15 bp, Homo sapiens
accaattaaatcaaa

SEQ ID NO: 911222 - DNA, 15 bp, Homo sapiens
gaccaattaaatcaa

SEQ ID NO: 911223 - DNA, 15 bp, Homo sapiens
tgaccaattaaatca

SEQ ID NO: 911224 - DNA, 15 bp, Homo sapiens
ttgaccaattaaatc

SEQ ID NO: 911225 - DNA, 15 bp, Homo sapiens
attgaccaattaaat

SEQ ID NO: 911226 - DNA, 15 bp, Homo sapiens
cattgaccaattaaa

SEQ ID NO: 911227 - DNA, 15 bp, Homo sapiens
gcattgaccaattaa

SEQ ID NO: 911228 - DNA, 15 bp, Homo sapiens
ggcattgaccaatta

SEQ ID NO: 911229 - DNA, 15 bp, Homo sapiens
tggcattgaccaatt

SEQ ID NO: 911230 - DNA, 15 bp, Homo sapiens
ttggcattgaccaat

SEQ ID NO: 911231 - DNA, 15 bp, Homo sapiens
attggcattgaccaa

SEQ ID NO: 911232 - DNA, 15 bp, Homo sapiens
aattggcattgacca

SEQ ID NO: 911233 - DNA, 15 bp, Homo sapiens
taattggcattgacc

SEQ ID NO: 911234 - DNA, 15 bp, Homo sapiens
ctaattggcattgac

SEQ ID NO: 911235 - DNA, 15 bp, Homo sapiens
actaattggcattga

SEQ ID NO: 911236 - DNA, 15 bp, Homo sapiens
tactaattggcattg

SEQ ID NO: 911237 - DNA, 15 bp, Homo sapiens
ttactaattggcatt

SEQ ID NO: 911238 - DNA, 15 bp, Homo sapiens
tttactaattggcat

SEQ ID NO: 911239 - DNA, 15 bp, Homo sapiens
ctttactaattggca

SEQ ID NO: 911240 - DNA, 15 bp, Homo sapiens
cctttactaattggc

SEQ ID NO: 911241 - DNA, 15 bp, Homo sapiens
acctttactaattgg

SEQ ID NO: 911242 - DNA, 15 bp, Homo sapiens
gacctttactaattg

SEQ ID NO: 911243 - DNA, 15 bp, Homo sapiens
agacctttactaatt

SEQ ID NO: 911244 - DNA, 15 bp, Homo sapiens
tagacctttactaat

SEQ ID NO: 911245 - DNA, 15 bp, Homo sapiens
atagacctttactaa

SEQ ID NO: 911246 - DNA, 15 bp, Homo sapiens
tatagacctttacta

SEQ ID NO: 911247 - DNA, 15 bp, Homo sapiens
ttatagacctttact

SEQ ID NO: 911248 - DNA, 15 bp, Homo sapiens
tttatagacctttac

SEQ ID NO: 911249 - DNA, 15 bp, Homo sapiens
ctttatagaccttta

SEQ ID NO: 911250 - DNA, 15 bp, Homo sapiens
tctttatagaccttt

SEQ ID NO: 911251 - DNA, 15 bp, Homo sapiens
ttctttatagacctt

SEQ ID NO: 911252 - DNA, 15 bp, Homo sapiens
attctttatagacct

SEQ ID NO: 911253 - DNA, 15 bp, Homo sapiens
aattctttatagacc

SEQ ID NO: 911254 - DNA, 15 bp, Homo sapiens
gaattctttatagac

SEQ ID NO: 911255 - DNA, 15 bp, Homo sapiens
agaattctttataga

SEQ ID NO: 911256 - DNA, 15 bp, Homo sapiens
gagaattctttatag

SEQ ID NO: 911257 - DNA, 15 bp, Homo sapiens
agagaattctttata

SEQ ID NO: 911258 - DNA, 15 bp, Homo sapiens
aagagaattctttat

SEQ ID NO: 911259 - DNA, 15 bp, Homo sapiens
aaagagaattcttta

SEQ ID NO: 911260 - DNA, 15 bp, Homo sapiens
aaaagagaattcttt

SEQ ID NO: 911261 - DNA, 15 bp, Homo sapiens
aaaaagagaattctt

SEQ ID NO: 911262 - DNA, 15 bp, Homo sapiens
aaaaaagagaattct

SEQ ID NO: 911263 - DNA, 15 bp, Homo sapiens
aaaaaaagagaattc

SEQ ID NO: 911264 - DNA, 15 bp, Homo sapiens
gaaaaaaagagaatt

SEQ ID NO: 911265 - DNA, 15 bp, Homo sapiens
agaaaaaaagagaat

SEQ ID NO: 911266 - DNA, 15 bp, Homo sapiens
tagaaaaaaagagaa

SEQ ID NO: 911267 - DNA, 15 bp, Homo sapiens
ctagaaaaaaagaga

SEQ ID NO: 911268 - DNA, 15 bp, Homo sapiens
tctagaaaaaaagag

SEQ ID NO: 911269 - DNA, 15 bp, Homo sapiens
ctctagaaaaaaaga

SEQ ID NO: 911270 - DNA, 15 bp, Homo sapiens
cctctagaaaaaaag

SEQ ID NO: 911271 - DNA, 15 bp, Homo sapiens
tcctctagaaaaaaa

SEQ ID NO: 911272 - DNA, 15 bp, Homo sapiens
gtcctctagaaaaaa

SEQ ID NO: 911273 - DNA, 15 bp, Homo sapiens
tgtcctctagaaaaa

SEQ ID NO: 911274 - DNA, 15 bp, Homo sapiens
gtgtcctctagaaaa

SEQ ID NO: 911275 - DNA, 15 bp, Homo sapiens
agtgtcctctagaaa

SEQ ID NO: 911276 - DNA, 15 bp, Homo sapiens
aagtgtcctctagaa

SEQ ID NO: 911277 - DNA, 15 bp, Homo sapiens
taagtgtcctctaga

SEQ ID NO: 911278 - DNA, 15 bp, Homo sapiens
ataagtgtcctctag

SEQ ID NO: 911279 - DNA, 15 bp, Homo sapiens
cataagtgtcctcta

SEQ ID NO: 911280 - DNA, 15 bp, Homo sapiens
ccataagtgtcctct

SEQ ID NO: 911281 - DNA, 15 bp, Homo sapiens
gccataagtgtcctc

SEQ ID NO: 911282 - DNA, 15 bp, Homo sapiens
agccataagtgtcct

SEQ ID NO: 911283 - DNA, 15 bp, Homo sapiens
cagccataagtgtcc

SEQ ID NO: 911284 - DNA, 15 bp, Homo sapiens
gcagccataagtgtc

SEQ ID NO: 911285 - DNA, 15 bp, Homo sapiens
cgcagccataagtgt

SEQ ID NO: 911286 - DNA, 15 bp, Homo sapiens
acgcagccataagtg

SEQ ID NO: 911287 - DNA, 15 bp, Homo sapiens
aacgcagccataagt

SEQ ID NO: 911288 - DNA, 15 bp, Homo sapiens
aaacgcagccataag

SEQ ID NO: 911289 - DNA, 15 bp, Homo sapiens
taaacgcagccataa

SEQ ID NO: 911290 - DNA, 15 bp, Homo sapiens
ttaaacgcagccata

SEQ ID NO: 911291 - DNA, 15 bp, Homo sapiens
attaaacgcagccat

SEQ ID NO: 911292 - DNA, 15 bp, Homo sapiens
aattaaacgcagcca

SEQ ID NO: 911293 - DNA, 15 bp, Homo sapiens
aaattaaacgcagcc

SEQ ID NO: 911294 - DNA, 15 bp, Homo sapiens
aaaattaaacgcagc

SEQ ID NO: 911295 - DNA, 15 bp, Homo sapiens
taaaattaaacgcag

SEQ ID NO: 911296 - DNA, 15 bp, Homo sapiens
ttaaaattaaacgca

SEQ ID NO: 911297 - DNA, 15 bp, Homo sapiens
attaaaattaaacgc

SEQ ID NO: 911298 - DNA, 15 bp, Homo sapiens
aattaaaattaaacg

SEQ ID NO: 911299 - DNA, 15 bp, Homo sapiens
aaattaaaattaaac

SEQ ID NO: 911300 - DNA, 15 bp, Homo sapiens
caaattaaaattaaa

SEQ ID NO: 911301 - DNA, 15 bp, Homo sapiens
ccaaattaaaattaa

SEQ ID NO: 911302 - DNA, 15 bp, Homo sapiens
accaaattaaaatta

SEQ ID NO: 911303 - DNA, 15 bp, Homo sapiens
aaccaaattaaaatt

SEQ ID NO: 911304 - DNA, 15 bp, Homo sapiens
aaaccaaattaaaat

SEQ ID NO: 911305 - DNA, 15 bp, Homo sapiens
taaaccaaattaaaa

SEQ ID NO: 911306 - DNA, 15 bp, Homo sapiens
ttaaaccaaattaaa

SEQ ID NO: 911307 - DNA, 15 bp, Homo sapiens
tttaaaccaaattaa

SEQ ID NO: 911308 - DNA, 15 bp, Homo sapiens
atttaaaccaaatta

SEQ ID NO: 911309 - DNA, 15 bp, Homo sapiens
aatttaaaccaaatt

SEQ ID NO: 911310 - DNA, 15 bp, Homo sapiens
aaatttaaaccaaat

SEQ ID NO: 911311 - DNA, 15 bp, Homo sapiens
gaaatttaaaccaaa

SEQ ID NO: 911312 - DNA, 15 bp, Homo sapiens
tgaaatttaaaccaa

SEQ ID NO: 911313 - DNA, 15 bp, Homo sapiens
ctgaaatttaaacca

SEQ ID NO: 911314 - DNA, 15 bp, Homo sapiens
actgaaatttaaacc

SEQ ID NO: 911315 - DNA, 15 bp, Homo sapiens
aactgaaatttaaac

SEQ ID NO: 911316 - DNA, 15 bp, Homo sapiens
aaactgaaatttaaa

SEQ ID NO: 911317 - DNA, 15 bp, Homo sapiens
aaaactgaaatttaa

SEQ ID NO: 911318 - DNA, 15 bp, Homo sapiens
aaaaactgaaattta

SEQ ID NO: 911319 - DNA, 15 bp, Homo sapiens
aaaaaactgaaattt

SEQ ID NO: 911320 - DNA, 15 bp, Homo sapiens
aaaaaaactgaaatt

SEQ ID NO: 911321 - DNA, 15 bp, Homo sapiens
taaaaaaactgaaat

SEQ ID NO: 911322 - DNA, 15 bp, Homo sapiens
ttaaaaaaactgaaa

SEQ ID NO: 911323 - DNA, 15 bp, Homo sapiens
tttaaaaaaactgaa

SEQ ID NO: 911324 - DNA, 15 bp, Homo sapiens
ttttaaaaaaactga

SEQ ID NO: 911325 - DNA, 15 bp, Homo sapiens
attttaaaaaaactg

SEQ ID NO: 911326 - DNA, 15 bp, Homo sapiens
aattttaaaaaaact

SEQ ID NO: 911327 - DNA, 15 bp, Homo sapiens
taattttaaaaaaac

SEQ ID NO: 911328 - DNA, 15 bp, Homo sapiens
gtaattttaaaaaaa

SEQ ID NO: 911329 - DNA, 15 bp, Homo sapiens
agtaattttaaaaaa

SEQ ID NO: 911330 - DNA, 15 bp, Homo sapiens
aagtaattttaaaaa

SEQ ID NO: 911331 - DNA, 15 bp, Homo sapiens
aaagtaattttaaaa

SEQ ID NO: 911332 - DNA, 15 bp, Homo sapiens
aaaagtaattttaaa

SEQ ID NO: 911333 - DNA, 15 bp, Homo sapiens
aaaaagtaattttaa

SEQ ID NO: 911334 - DNA, 15 bp, Homo sapiens
taaaaagtaatttta

SEQ ID NO: 911335 - DNA, 15 bp, Homo sapiens
ttaaaaagtaatttt

SEQ ID NO: 911336 - DNA, 15 bp, Homo sapiens
attaaaaagtaattt

SEQ ID NO: 911337 - DNA, 15 bp, Homo sapiens
aattaaaaagtaatt

SEQ ID NO: 911338 - DNA, 15 bp, Homo sapiens
taattaaaaagtaat

SEQ ID NO: 911339 - DNA, 15 bp, Homo sapiens
ataattaaaaagtaa

SEQ ID NO: 911340 - DNA, 15 bp, Homo sapiens
tataattaaaaagta

SEQ ID NO: 911341 - DNA, 15 bp, Homo sapiens
ctataattaaaaagt

SEQ ID NO: 911342 - DNA, 15 bp, Homo sapiens
actataattaaaaag

SEQ ID NO: 911343 - DNA, 15 bp, Homo sapiens
cactataattaaaaa

SEQ ID NO: 911344 - DNA, 15 bp, Homo sapiens
acactataattaaaa

SEQ ID NO: 911345 - DNA, 15 bp, Homo sapiens
gacactataattaaa

SEQ ID NO: 911346 - DNA, 15 bp, Homo sapiens
agacactataattaa

SEQ ID NO: 911347 - DNA, 15 bp, Homo sapiens
aagacactataatta

SEQ ID NO: 911348 - DNA, 15 bp, Homo sapiens
aaagacactataatt

SEQ ID NO: 911349 - DNA, 15 bp, Homo sapiens
taaagacactataat

SEQ ID NO: 911350 - DNA, 15 bp, Homo sapiens
ttaaagacactataa

SEQ ID NO: 911351 - DNA, 15 bp, Homo sapiens
gttaaagacactata

SEQ ID NO: 911352 - DNA, 15 bp, Homo sapiens
agttaaagacactat

SEQ ID NO: 911353 - DNA, 15 bp, Homo sapiens
aagttaaagacacta

SEQ ID NO: 911354 - DNA, 15 bp, Homo sapiens
aaagttaaagacact

SEQ ID NO: 911355 - DNA, 15 bp, Homo sapiens
aaaagttaaagacac

SEQ ID NO: 911356 - DNA, 15 bp, Homo sapiens
aaaaagttaaagaca

SEQ ID NO: 911357 - DNA, 15 bp, Homo sapiens
aaaaaagttaaagac

SEQ ID NO: 911358 - DNA, 15 bp, Homo sapiens
taaaaaagttaaaga

SEQ ID NO: 911359 - DNA, 15 bp, Homo sapiens
ctaaaaaagttaaag

SEQ ID NO: 911360 - DNA, 15 bp, Homo sapiens
tctaaaaaagttaaa

SEQ ID NO: 911361 - DNA, 15 bp, Homo sapiens
gtctaaaaaagttaa

SEQ ID NO: 911362 - DNA, 15 bp, Homo sapiens
agtctaaaaaagtta

SEQ ID NO: 911363 - DNA, 15 bp, Homo sapiens
aagtctaaaaaagtt

SEQ ID NO: 911364 - DNA, 15 bp, Homo sapiens
aaagtctaaaaaagt

SEQ ID NO: 911365 - DNA, 15 bp, Homo sapiens
taaagtctaaaaaag

SEQ ID NO: 911366 - DNA, 15 bp, Homo sapiens
ttaaagtctaaaaaa

SEQ ID NO: 911367 - DNA, 15 bp, Homo sapiens
gttaaagtctaaaaa

SEQ ID NO: 911368 - DNA, 15 bp, Homo sapiens
tgttaaagtctaaaa

SEQ ID NO: 911369 - DNA, 15 bp, Homo sapiens
ctgttaaagtctaaa

SEQ ID NO: 911370 - DNA, 15 bp, Homo sapiens
tctgttaaagtctaa

SEQ ID NO: 911371 - DNA, 15 bp, Homo sapiens
ttctgttaaagtcta

SEQ ID NO: 911372 - DNA, 15 bp, Homo sapiens
cttctgttaaagtct

SEQ ID NO: 911373 - DNA, 15 bp, Homo sapiens
gcttctgttaaagtc

SEQ ID NO: 911374 - DNA, 15 bp, Homo sapiens
agcttctgttaaagt

SEQ ID NO: 911375 - DNA, 15 bp, Homo sapiens
tagcttctgttaaag

SEQ ID NO: 911376 - DNA, 15 bp, Homo sapiens
ttagcttctgttaaa

SEQ ID NO: 911377 - DNA, 15 bp, Homo sapiens
attagcttctgttaa

SEQ ID NO: 911378 - DNA, 15 bp, Homo sapiens
cattagcttctgtta

SEQ ID NO: 911379 - DNA, 15 bp, Homo sapiens
tcattagcttctgtt

SEQ ID NO: 911380 - DNA, 15 bp, Homo sapiens
ctcattagcttctgt

SEQ ID NO: 911381 - DNA, 15 bp, Homo sapiens
tctcattagcttctg

SEQ ID NO: 911382 - DNA, 15 bp, Homo sapiens
ttctcattagcttct

SEQ ID NO: 911383 - DNA, 15 bp, Homo sapiens
tttctcattagcttc

SEQ ID NO: 911384 - DNA, 15 bp, Homo sapiens
ttttctcattagctt

SEQ ID NO: 911385 - DNA, 15 bp, Homo sapiens
attttctcattagct

SEQ ID NO: 911386 - DNA, 15 bp, Homo sapiens
aattttctcattagc

SEQ ID NO: 911387 - DNA, 15 bp, Homo sapiens
caattttctcattag

SEQ ID NO: 911388 - DNA, 15 bp, Homo sapiens
tcaattttctcatta

SEQ ID NO: 911389 - DNA, 15 bp, Homo sapiens
ttcaattttctcatt

SEQ ID NO: 911390 - DNA, 15 bp, Homo sapiens
cttcaattttctcat

SEQ ID NO: 911391 - DNA, 15 bp, Homo sapiens
acttcaattttctca

SEQ ID NO: 911392 - DNA, 15 bp, Homo sapiens
aacttcaattttctc

SEQ ID NO: 911393 - DNA, 15 bp, Homo sapiens
gaacttcaattttct

SEQ ID NO: 911394 - DNA, 15 bp, Homo sapiens
tgaacttcaattttc

SEQ ID NO: 911395 - DNA, 15 bp, Homo sapiens
ctgaacttcaatttt

SEQ ID NO: 911396 - DNA, 15 bp, Homo sapiens
tctgaacttcaattt

SEQ ID NO: 911397 - DNA, 15 bp, Homo sapiens
ttctgaacttcaatt

SEQ ID NO: 911398 - DNA, 15 bp, Homo sapiens
attctgaacttcaat

SEQ ID NO: 911399 - DNA, 15 bp, Homo sapiens
gattctgaacttcaa

SEQ ID NO: 911400 - DNA, 15 bp, Homo sapiens
tgattctgaacttca

SEQ ID NO: 911401 - DNA, 15 bp, Homo sapiens
ttgattctgaacttc

SEQ ID NO: 911402 - DNA, 15 bp, Homo sapiens
cttgattctgaactt

SEQ ID NO: 911403 - DNA, 15 bp, Homo sapiens
tcttgattctgaact

SEQ ID NO: 911404 - DNA, 15 bp, Homo sapiens
ttcttgattctgaac

SEQ ID NO: 911405 - DNA, 15 bp, Homo sapiens
tttcttgattctgaa

SEQ ID NO: 911406 - DNA, 15 bp, Homo sapiens
atttcttgattctga

SEQ ID NO: 911407 - DNA, 15 bp, Homo sapiens
catttcttgattctg

SEQ ID NO: 911408 - DNA, 15 bp, Homo sapiens
tcatttcttgattct

SEQ ID NO: 911409 - DNA, 15 bp, Homo sapiens
ctcatttcttgattc

SEQ ID NO: 911410 - DNA, 15 bp, Homo sapiens
tctcatttcttgatt

SEQ ID NO: 911411 - DNA, 15 bp, Homo sapiens
ttctcatttcttgat

SEQ ID NO: 911412 - DNA, 15 bp, Homo sapiens
tttctcatttcttga

SEQ ID NO: 911413 - DNA, 15 bp, Homo sapiens
ttttctcatttcttg

SEQ ID NO: 911414 - DNA, 15 bp, Homo sapiens
tttttctcatttctt

SEQ ID NO: 911415 - DNA, 15 bp, Homo sapiens
ttttttctcatttct

SEQ ID NO: 911416 - DNA, 15 bp, Homo sapiens
attttttctcatttc

SEQ ID NO: 911417 - DNA, 15 bp, Homo sapiens
aattttttctcattt

SEQ ID NO: 911418 - DNA, 15 bp, Homo sapiens
aaattttttctcatt

SEQ ID NO: 911419 - DNA, 15 bp, Homo sapiens
taaattttttctcat

SEQ ID NO: 911420 - DNA, 15 bp, Homo sapiens
ctaaattttttctca

SEQ ID NO: 911421 - DNA, 15 bp, Homo sapiens
tctaaattttttctc

SEQ ID NO: 911422 - DNA, 15 bp, Homo sapiens
ttctaaattttttct

SEQ ID NO: 911423 - DNA, 15 bp, Homo sapiens
cttctaaattttttc

SEQ ID NO: 911424 - DNA, 15 bp, Homo sapiens
tcttctaaatttttt

SEQ ID NO: 911425 - DNA, 15 bp, Homo sapiens
ctcttctaaattttt

SEQ ID NO: 911426 - DNA, 15 bp, Homo sapiens
actcttctaaatttt

SEQ ID NO: 911427 - DNA, 15 bp, Homo sapiens
gactcttctaaattt

SEQ ID NO: 911428 - DNA, 15 bp, Homo sapiens
agactcttctaaatt

SEQ ID NO: 911429 - DNA, 15 bp, Homo sapiens
cagactcttctaaat

SEQ ID NO: 911430 - DNA, 15 bp, Homo sapiens
acagactcttctaaa

SEQ ID NO: 911431 - DNA, 15 bp, Homo sapiens
tacagactcttctaa

SEQ ID NO: 911432 - DNA, 15 bp, Homo sapiens
gtacagactcttcta

SEQ ID NO: 911433 - DNA, 15 bp, Homo sapiens
tgtacagactcttct

SEQ ID NO: 911434 - DNA, 15 bp, Homo sapiens
ctgtacagactcttc

SEQ ID NO: 911435 - DNA, 15 bp, Homo sapiens
cctgtacagactctt

SEQ ID NO: 911436 - DNA, 15 bp, Homo sapiens
tcctgtacagactct

SEQ ID NO: 911437 - DNA, 15 bp, Homo sapiens
ttcctgtacagactc

SEQ ID NO: 911438 - DNA, 15 bp, Homo sapiens
tttcctgtacagact

SEQ ID NO: 911439 - DNA, 15 bp, Homo sapiens
atttcctgtacagac

SEQ ID NO: 911440 - DNA, 15 bp, Homo sapiens
catttcctgtacaga

SEQ ID NO: 911441 - DNA, 15 bp, Homo sapiens
ccatttcctgtacag

SEQ ID NO: 911442 - DNA, 15 bp, Homo sapiens
tccatttcctgtaca

SEQ ID NO: 911443 - DNA, 15 bp, Homo sapiens
ctccatttcctgtac

SEQ ID NO: 911444 - DNA, 15 bp, Homo sapiens
tctccatttcctgta

SEQ ID NO: 911445 - DNA, 15 bp, Homo sapiens
ttctccatttcctgt

SEQ ID NO: 911446 - DNA, 15 bp, Homo sapiens
cttctccatttcctg

SEQ ID NO: 911447 - DNA, 15 bp, Homo sapiens
tcttctccatttcct

SEQ ID NO: 911448 - DNA, 15 bp, Homo sapiens
atcttctccatttcc

SEQ ID NO: 911449 - DNA, 15 bp, Homo sapiens
catcttctccatttc

SEQ ID NO: 911450 - DNA, 15 bp, Homo sapiens
tcatcttctccattt

SEQ ID NO: 911451 - DNA, 15 bp, Homo sapiens
gtcatcttctccatt

SEQ ID NO: 911452 - DNA, 15 bp, Homo sapiens
agtcatcttctccat

SEQ ID NO: 911453 - DNA, 15 bp, Homo sapiens
cagtcatcttctcca

SEQ ID NO: 911454 - DNA, 15 bp, Homo sapiens
tcagtcatcttctcc

SEQ ID NO: 911455 - DNA, 15 bp, Homo sapiens
atcagtcatcttctc

SEQ ID NO: 911456 - DNA, 15 bp, Homo sapiens
catcagtcatcttct

SEQ ID NO: 911457 - DNA, 15 bp, Homo sapiens
tcatcagtcatcttc

SEQ ID NO: 911458 - DNA, 15 bp, Homo sapiens
ttcatcagtcatctt

SEQ ID NO: 911459 - DNA, 15 bp, Homo sapiens
attcatcagtcatct

SEQ ID NO: 911460 - DNA, 15 bp, Homo sapiens
tattcatcagtcatc

SEQ ID NO: 911461 - DNA, 15 bp, Homo sapiens
atattcatcagtcat

SEQ ID NO: 911462 - DNA, 15 bp, Homo sapiens
tatattcatcagtca

SEQ ID NO: 911463 - DNA, 15 bp, Homo sapiens
ttatattcatcagtc

SEQ ID NO: 911464 - DNA, 15 bp, Homo sapiens
attatattcatcagt

SEQ ID NO: 911465 - DNA, 15 bp, Homo sapiens
tattatattcatcag

SEQ ID NO: 911466 - DNA, 15 bp, Homo sapiens
ctattatattcatca

SEQ ID NO: 911467 - DNA, 15 bp, Homo sapiens
tctattatattcatc

SEQ ID NO: 911468 - DNA, 15 bp, Homo sapiens
ttctattatattcat

SEQ ID NO: 911469 - DNA, 15 bp, Homo sapiens
attctattatattca

SEQ ID NO: 911470 - DNA, 15 bp, Homo sapiens
cattctattatattc

SEQ ID NO: 911471 - DNA, 15 bp, Homo sapiens
tcattctattatatt

SEQ ID NO: 911472 - DNA, 15 bp, Homo sapiens
ttcattctattatat

SEQ ID NO: 911473 - DNA, 15 bp, Homo sapiens
tttcattctattata

SEQ ID NO: 911474 - DNA, 15 bp, Homo sapiens
ctttcattctattat

SEQ ID NO: 911475 - DNA, 15 bp, Homo sapiens
gctttcattctatta

SEQ ID NO: 911476 - DNA, 15 bp, Homo sapiens
agctttcattctatt

SEQ ID NO: 911477 - DNA, 15 bp, Homo sapiens
tagctttcattctat

SEQ ID NO: 911478 - DNA, 15 bp, Homo sapiens
atagctttcattcta

SEQ ID NO: 911479 - DNA, 15 bp, Homo sapiens
aatagctttcattct

SEQ ID NO: 911480 - DNA, 15 bp, Homo sapiens
caatagctttcattc

SEQ ID NO: 911481 - DNA, 15 bp, Homo sapiens
acaatagctttcatt

SEQ ID NO: 911482 - DNA, 15 bp, Homo sapiens
cacaatagctttcat

SEQ ID NO: 911483 - DNA, 15 bp, Homo sapiens
gcacaatagctttca

SEQ ID NO: 911484 - DNA, 15 bp, Homo sapiens
tgcacaatagctttc

SEQ ID NO: 911485 - DNA, 15 bp, Homo sapiens
atgcacaatagcttt

SEQ ID NO: 911486 - DNA, 15 bp, Homo sapiens
gatgcacaatagctt

SEQ ID NO: 911487 - DNA, 15 bp, Homo sapiens
tgatgcacaatagct

SEQ ID NO: 911488 - DNA, 15 bp, Homo sapiens
ctgatgcacaatagc

SEQ ID NO: 911489 - DNA, 15 bp, Homo sapiens
tctgatgcacaatag

SEQ ID NO: 911490 - DNA, 15 bp, Homo sapiens
gtctgatgcacaata

SEQ ID NO: 911491 - DNA, 15 bp, Homo sapiens
tgtctgatgcacaat

SEQ ID NO: 911492 - DNA, 15 bp, Homo sapiens
ctgtctgatgcacaa

SEQ ID NO: 911493 - DNA, 15 bp, Homo sapiens
tctgtctgatgcaca

SEQ ID NO: 911494 - DNA, 15 bp, Homo sapiens
atctgtctgatgcac

SEQ ID NO: 911495 - DNA, 15 bp, Homo sapiens
tatctgtctgatgca

SEQ ID NO: 911496 - DNA, 15 bp, Homo sapiens
ttatctgtctgatgc

SEQ ID NO: 911497 - DNA, 15 bp, Homo sapiens
attatctgtctgatg

SEQ ID NO: 911498 - DNA, 15 bp, Homo sapiens
cattatctgtctgat

SEQ ID NO: 911499 - DNA, 15 bp, Homo sapiens
acattatctgtctga

SEQ ID NO: 911500 - DNA, 15 bp, Homo sapiens
tacattatctgtctg

SEQ ID NO: 911501 - DNA, 15 bp, Homo sapiens
ttacattatctgtct

SEQ ID NO: 911502 - DNA, 15 bp, Homo sapiens
attacattatctgtc

SEQ ID NO: 911503 - DNA, 15 bp, Homo sapiens
tattacattatctgt

SEQ ID NO: 911504 - DNA, 15 bp, Homo sapiens
ctattacattatctg

SEQ ID NO: 911505 - DNA, 15 bp, Homo sapiens
tctattacattatct

SEQ ID NO: 911506 - DNA, 15 bp, Homo sapiens
atctattacattatc

SEQ ID NO: 911507 - DNA, 15 bp, Homo sapiens
gatctattacattat

SEQ ID NO: 911508 - DNA, 15 bp, Homo sapiens
tgatctattacatta

SEQ ID NO: 911509 - DNA, 15 bp, Homo sapiens
ctgatctattacatt

SEQ ID NO: 911510 - DNA, 15 bp, Homo sapiens
actgatctattacat

SEQ ID NO: 911511 - DNA, 15 bp, Homo sapiens
aactgatctattaca

SEQ ID NO: 911512 - DNA, 15 bp, Homo sapiens
taactgatctattac

SEQ ID NO: 911513 - DNA, 15 bp, Homo sapiens
ttaactgatctatta

SEQ ID NO: 911514 - DNA, 15 bp, Homo sapiens
tttaactgatctatt

SEQ ID NO: 911515 - DNA, 15 bp, Homo sapiens
ttttaactgatctat

SEQ ID NO: 911516 - DNA, 15 bp, Homo sapiens
tttttaactgatcta

SEQ ID NO: 911517 - DNA, 15 bp, Homo sapiens
ttttttaactgatct

SEQ ID NO: 911518 - DNA, 15 bp, Homo sapiens
tttttttaactgatc

SEQ ID NO: 911519 - DNA, 15 bp, Homo sapiens
ctttttttaactgat

SEQ ID NO: 911520 - DNA, 15 bp, Homo sapiens
tctttttttaactga

SEQ ID NO: 911521 - DNA, 15 bp, Homo sapiens
ttctttttttaactg

SEQ ID NO: 911522 - DNA, 15 bp, Homo sapiens
tttctttttttaact

SEQ ID NO: 911523 - DNA, 15 bp, Homo sapiens
ttttctttttttaac

SEQ ID NO: 911524 - DNA, 15 bp, Homo sapiens
gttttctttttttaa

SEQ ID NO: 911525 - DNA, 15 bp, Homo sapiens
cgttttcttttttta

SEQ ID NO: 911526 - DNA, 15 bp, Homo sapiens
tcgttttcttttttt

SEQ ID NO: 911527 - DNA, 15 bp, Homo sapiens
atcgttttctttttt

SEQ ID NO: 911528 - DNA, 15 bp, Homo sapiens
gatcgttttcttttt

SEQ ID NO: 911529 - DNA, 15 bp, Homo sapiens
tgatcgttttctttt

SEQ ID NO: 911530 - DNA, 15 bp, Homo sapiens
atgatcgttttcttt

SEQ ID NO: 911531 - DNA, 15 bp, Homo sapiens
aatgatcgttttctt

SEQ ID NO: 911532 - DNA, 15 bp, Homo sapiens
taatgatcgttttct

SEQ ID NO: 911533 - DNA, 15 bp, Homo sapiens
ataatgatcgttttc

SEQ ID NO: 911534 - DNA, 15 bp, Homo sapiens
gataatgatcgtttt

SEQ ID NO: 911535 - DNA, 15 bp, Homo sapiens
tgataatgatcgttt

SEQ ID NO: 911536 - DNA, 15 bp, Homo sapiens
ttgataatgatcgtt

SEQ ID NO: 911537 - DNA, 15 bp, Homo sapiens
gttgataatgatcgt

SEQ ID NO: 911538 - DNA, 15 bp, Homo sapiens
agttgataatgatcg

SEQ ID NO: 911539 - DNA, 15 bp, Homo sapiens
aagttgataatgatc

SEQ ID NO: 911540 - DNA, 15 bp, Homo sapiens
gaagttgataatgat

SEQ ID NO: 911541 - DNA, 15 bp, Homo sapiens
tgaagttgataatga

SEQ ID NO: 911542 - DNA, 15 bp, Homo sapiens
ttgaagttgataatg

SEQ ID NO: 911543 - DNA, 15 bp, Homo sapiens
cttgaagttgataat

SEQ ID NO: 911544 - DNA, 15 bp, Homo sapiens
acttgaagttgataa

SEQ ID NO: 911545 - DNA, 15 bp, Homo sapiens
tacttgaagttgata

SEQ ID NO: 911546 - DNA, 15 bp, Homo sapiens
ttacttgaagttgat

SEQ ID NO: 911547 - DNA, 15 bp, Homo sapiens
cttacttgaagttga

SEQ ID NO: 911548 - DNA, 15 bp, Homo sapiens
tcttacttgaagttg

SEQ ID NO: 911549 - DNA, 15 bp, Homo sapiens
ttcttacttgaagtt

SEQ ID NO: 911550 - DNA, 15 bp, Homo sapiens
attcttacttgaagt

SEQ ID NO: 911551 - DNA, 15 bp, Homo sapiens
aattcttacttgaag

SEQ ID NO: 911552 - DNA, 15 bp, Homo sapiens
taattcttacttgaa

SEQ ID NO: 911553 - DNA, 15 bp, Homo sapiens
gtaattcttacttga

SEQ ID NO: 911554 - DNA, 15 bp, Homo sapiens
agtaattcttacttg

SEQ ID NO: 911555 - DNA, 15 bp, Homo sapiens
aagtaattcttactt

SEQ ID NO: 911556 - DNA, 15 bp, Homo sapiens
aaagtaattcttact

SEQ ID NO: 911557 - DNA, 15 bp, Homo sapiens
aaaagtaattcttac

SEQ ID NO: 911558 - DNA, 15 bp, Homo sapiens
taaaagtaattctta

SEQ ID NO: 911559 - DNA, 15 bp, Homo sapiens
ctaaaagtaattctt

SEQ ID NO: 911560 - DNA, 15 bp, Homo sapiens
tctaaaagtaattct

SEQ ID NO: 911561 - DNA, 15 bp, Homo sapiens
ttctaaaagtaattc

SEQ ID NO: 911562 - DNA, 15 bp, Homo sapiens
attctaaaagtaatt

SEQ ID NO: 911563 - DNA, 15 bp, Homo sapiens
tattctaaaagtaat

SEQ ID NO: 911564 - DNA, 15 bp, Homo sapiens
ttattctaaaagtaa

SEQ ID NO: 911565 - DNA, 15 bp, Homo sapiens
gttattctaaaagta

SEQ ID NO: 911566 - DNA, 15 bp, Homo sapiens
agttattctaaaagt

SEQ ID NO: 911567 - DNA, 15 bp, Homo sapiens
aagttattctaaaag

SEQ ID NO: 911568 - DNA, 15 bp, Homo sapiens
taagttattctaaaa

SEQ ID NO: 911569 - DNA, 15 bp, Homo sapiens
ataagttattctaaa

SEQ ID NO: 911570 - DNA, 15 bp, Homo sapiens
aataagttattctaa

SEQ ID NO: 911571 - DNA, 15 bp, Homo sapiens
aaataagttattcta

SEQ ID NO: 911572 - DNA, 15 bp, Homo sapiens
taaataagttattct

SEQ ID NO: 911573 - DNA, 15 bp, Homo sapiens
ataaataagttattc

SEQ ID NO: 911574 - DNA, 15 bp, Homo sapiens
aataaataagttatt

SEQ ID NO: 911575 - DNA, 15 bp, Homo sapiens
gaataaataagttat

SEQ ID NO: 911576 - DNA, 15 bp, Homo sapiens
tgaataaataagtta

SEQ ID NO: 911577 - DNA, 15 bp, Homo sapiens
ctgaataaataagtt

SEQ ID NO: 911578 - DNA, 15 bp, Homo sapiens
tctgaataaataagt

SEQ ID NO: 911579 - DNA, 15 bp, Homo sapiens
gtctgaataaataag

SEQ ID NO: 911580 - DNA, 15 bp, Homo sapiens
agtctgaataaataa

SEQ ID NO: 911581 - DNA, 15 bp, Homo sapiens
aagtctgaataaata

SEQ ID NO: 911582 - DNA, 15 bp, Homo sapiens
gaagtctgaataaat

SEQ ID NO: 911583 - DNA, 15 bp, Homo sapiens
tgaagtctgaataaa

SEQ ID NO: 911584 - DNA, 15 bp, Homo sapiens
atgaagtctgaataa

SEQ ID NO: 911585 - DNA, 15 bp, Homo sapiens
tatgaagtctgaata

SEQ ID NO: 911586 - DNA, 15 bp, Homo sapiens
atatgaagtctgaat

SEQ ID NO: 911587 - DNA, 15 bp, Homo sapiens
aatatgaagtctgaa

SEQ ID NO: 911588 - DNA, 15 bp, Homo sapiens
taatatgaagtctga

SEQ ID NO: 911589 - DNA, 15 bp, Homo sapiens
ataatatgaagtctg

SEQ ID NO: 911590 - DNA, 15 bp, Homo sapiens
gataatatgaagtct

SEQ ID NO: 911591 - DNA, 15 bp, Homo sapiens
agataatatgaagtc

SEQ ID NO: 911592 - DNA, 15 bp, Homo sapiens
gagataatatgaagt

SEQ ID NO: 911593 - DNA, 15 bp, Homo sapiens
tgagataatatgaag

SEQ ID NO: 911594 - DNA, 15 bp, Homo sapiens
atgagataatatgaa

SEQ ID NO: 911595 - DNA, 15 bp, Homo sapiens
aatgagataatatga

SEQ ID NO: 911596 - DNA, 15 bp, Homo sapiens
taatgagataatatg

SEQ ID NO: 911597 - DNA, 15 bp, Homo sapiens
gtaatgagataatat

SEQ ID NO: 911598 - DNA, 15 bp, Homo sapiens
agtaatgagataata

SEQ ID NO: 911599 - DNA, 15 bp, Homo sapiens
tagtaatgagataat

SEQ ID NO: 911600 - DNA, 15 bp, Homo sapiens
atagtaatgagataa

SEQ ID NO: 911601 - DNA, 15 bp, Homo sapiens
aatagtaatgagata

SEQ ID NO: 911602 - DNA, 15 bp, Homo sapiens
aaatagtaatgagat

SEQ ID NO: 911603 - DNA, 15 bp, Homo sapiens
taaatagtaatgaga

SEQ ID NO: 911604 - DNA, 15 bp, Homo sapiens
ataaatagtaatgag

SEQ ID NO: 911605 - DNA, 15 bp, Homo sapiens
aataaatagtaatga

SEQ ID NO: 911606 - DNA, 15 bp, Homo sapiens
aaataaatagtaatg

SEQ ID NO: 911607 - DNA, 15 bp, Homo sapiens
caaataaatagtaat

SEQ ID NO: 911608 - DNA, 15 bp, Homo sapiens
tcaaataaatagtaa

SEQ ID NO: 911609 - DNA, 15 bp, Homo sapiens
gtcaaataaatagta

SEQ ID NO: 911610 - DNA, 15 bp, Homo sapiens
tgtcaaataaatagt

SEQ ID NO: 911611 - DNA, 15 bp, Homo sapiens
gtgtcaaataaatag

SEQ ID NO: 911612 - DNA, 15 bp, Homo sapiens
agtgtcaaataaata

SEQ ID NO: 911613 - DNA, 15 bp, Homo sapiens
tagtgtcaaataaat

SEQ ID NO: 911614 - DNA, 15 bp, Homo sapiens
ctagtgtcaaataaa

SEQ ID NO: 911615 - DNA, 15 bp, Homo sapiens
tctagtgtcaaataa

SEQ ID NO: 911616 - DNA, 15 bp, Homo sapiens
ttctagtgtcaaata

SEQ ID NO: 911617 - DNA, 15 bp, Homo sapiens
tttctagtgtcaaat

SEQ ID NO: 911618 - DNA, 15 bp, Homo sapiens
ctttctagtgtcaaa

SEQ ID NO: 911619 - DNA, 15 bp, Homo sapiens
actttctagtgtcaa

SEQ ID NO: 911620 - DNA, 15 bp, Homo sapiens
tactttctagtgtca

SEQ ID NO: 911621 - DNA, 15 bp, Homo sapiens
gtactttctagtgtc

SEQ ID NO: 911622 - DNA, 15 bp, Homo sapiens
agtactttctagtgt

SEQ ID NO: 911623 - DNA, 15 bp, Homo sapiens
aagtactttctagtg

SEQ ID NO: 911624 - DNA, 15 bp, Homo sapiens
aaagtactttctagt

SEQ ID NO: 911625 - DNA, 15 bp, Homo sapiens
aaaagtactttctag

SEQ ID NO: 911626 - DNA, 15 bp, Homo sapiens
aaaaagtactttcta

SEQ ID NO: 911627 - DNA, 15 bp, Homo sapiens
gaaaaagtactttct

SEQ ID NO: 911628 - DNA, 15 bp, Homo sapiens
agaaaaagtactttc

SEQ ID NO: 911629 - DNA, 15 bp, Homo sapiens
tagaaaaagtacttt

SEQ ID NO: 911630 - DNA, 15 bp, Homo sapiens
ctagaaaaagtactt

SEQ ID NO: 911631 - DNA, 15 bp, Homo sapiens
cctagaaaaagtact

SEQ ID NO: 911632 - DNA, 15 bp, Homo sapiens
tcctagaaaaagtac

SEQ ID NO: 911633 - DNA, 15 bp, Homo sapiens
atcctagaaaaagta

SEQ ID NO: 911634 - DNA, 15 bp, Homo sapiens
catcctagaaaaagt

SEQ ID NO: 911635 - DNA, 15 bp, Homo sapiens
acatcctagaaaaag

SEQ ID NO: 911636 - DNA, 15 bp, Homo sapiens
cacatcctagaaaaa

SEQ ID NO: 911637 - DNA, 15 bp, Homo sapiens
tcacatcctagaaaa

SEQ ID NO: 911638 - DNA, 15 bp, Homo sapiens
ttcacatcctagaaa

SEQ ID NO: 911639 - DNA, 15 bp, Homo sapiens
attcacatcctagaa

SEQ ID NO: 911640 - DNA, 15 bp, Homo sapiens
aattcacatcctaga

SEQ ID NO: 911641 - DNA, 15 bp, Homo sapiens
aaattcacatcctag

SEQ ID NO: 911642 - DNA, 15 bp, Homo sapiens
aaaattcacatccta

SEQ ID NO: 911643 - DNA, 15 bp, Homo sapiens
aaaaattcacatcct

SEQ ID NO: 911644 - DNA, 15 bp, Homo sapiens
caaaaattcacatcc

SEQ ID NO: 911645 - DNA, 15 bp, Homo sapiens
acaaaaattcacatc

SEQ ID NO: 911646 - DNA, 15 bp, Homo sapiens
gacaaaaattcacat

SEQ ID NO: 911647 - DNA, 15 bp, Homo sapiens
agacaaaaattcaca

SEQ ID NO: 911648 - DNA, 15 bp, Homo sapiens
cagacaaaaattcac

SEQ ID NO: 911649 - DNA, 15 bp, Homo sapiens
acagacaaaaattca

SEQ ID NO: 911650 - DNA, 15 bp, Homo sapiens
gacagacaaaaattc

SEQ ID NO: 911651 - DNA, 15 bp, Homo sapiens
agacagacaaaaatt

SEQ ID NO: 911652 - DNA, 15 bp, Homo sapiens
aagacagacaaaaat

SEQ ID NO: 911653 - DNA, 15 bp, Homo sapiens
aaagacagacaaaaa

SEQ ID NO: 911654 - DNA, 15 bp, Homo sapiens
aaaagacagacaaaa

SEQ ID NO: 911655 - DNA, 15 bp, Homo sapiens
aaaaagacagacaaa

SEQ ID NO: 911656 - DNA, 15 bp, Homo sapiens
taaaaagacagacaa

SEQ ID NO: 911657 - DNA, 15 bp, Homo sapiens
ttaaaaagacagaca

SEQ ID NO: 911658 - DNA, 15 bp, Homo sapiens
attaaaaagacagac

SEQ ID NO: 911659 - DNA, 15 bp, Homo sapiens
tattaaaaagacaga

SEQ ID NO: 911660 - DNA, 15 bp, Homo sapiens
ctattaaaaagacag

SEQ ID NO: 911661 - DNA, 15 bp, Homo sapiens
actattaaaaagaca

SEQ ID NO: 911662 - DNA, 15 bp, Homo sapiens
cactattaaaaagac

SEQ ID NO: 911663 - DNA, 15 bp, Homo sapiens
acactattaaaaaga

SEQ ID NO: 911664 - DNA, 15 bp, Homo sapiens
tacactattaaaaag

SEQ ID NO: 911665 - DNA, 15 bp, Homo sapiens
ttacactattaaaaa

SEQ ID NO: 911666 - DNA, 15 bp, Homo sapiens
attacactattaaaa

SEQ ID NO: 911667 - DNA, 15 bp, Homo sapiens
tattacactattaaa

SEQ ID NO: 911668 - DNA, 15 bp, Homo sapiens
atattacactattaa

SEQ ID NO: 911669 - DNA, 15 bp, Homo sapiens
gatattacactatta

SEQ ID NO: 911670 - DNA, 15 bp, Homo sapiens
agatattacactatt

SEQ ID NO: 911671 - DNA, 15 bp, Homo sapiens
aagatattacactat

SEQ ID NO: 911672 - DNA, 15 bp, Homo sapiens
caagatattacacta

SEQ ID NO: 911673 - DNA, 15 bp, Homo sapiens
acaagatattacact

SEQ ID NO: 911674 - DNA, 15 bp, Homo sapiens
gacaagatattacac

SEQ ID NO: 911675 - DNA, 15 bp, Homo sapiens
tgacaagatattaca

SEQ ID NO: 911676 - DNA, 15 bp, Homo sapiens
atgacaagatattac

SEQ ID NO: 911677 - DNA, 15 bp, Homo sapiens
catgacaagatatta

SEQ ID NO: 911678 - DNA, 15 bp, Homo sapiens
acatgacaagatatt

SEQ ID NO: 911679 - DNA, 15 bp, Homo sapiens
aacatgacaagatat

SEQ ID NO: 911680 - DNA, 15 bp, Homo sapiens
caacatgacaagata

SEQ ID NO: 911681 - DNA, 15 bp, Homo sapiens
ccaacatgacaagat

SEQ ID NO: 911682 - DNA, 15 bp, Homo sapiens
accaacatgacaaga

SEQ ID NO: 911683 - DNA, 15 bp, Homo sapiens
taccaacatgacaag

SEQ ID NO: 911684 - DNA, 15 bp, Homo sapiens
ataccaacatgacaa

SEQ ID NO: 911685 - DNA, 15 bp, Homo sapiens
tataccaacatgaca

SEQ ID NO: 911686 - DNA, 15 bp, Homo sapiens
atataccaacatgac

SEQ ID NO: 911687 - DNA, 15 bp, Homo sapiens
aatataccaacatga

SEQ ID NO: 911688 - DNA, 15 bp, Homo sapiens
aaatataccaacatg

SEQ ID NO: 911689 - DNA, 15 bp, Homo sapiens
caaatataccaacat

SEQ ID NO: 911690 - DNA, 15 bp, Homo sapiens
acaaatataccaaca

SEQ ID NO: 911691 - DNA, 15 bp, Homo sapiens
gacaaatataccaac

SEQ ID NO: 911692 - DNA, 15 bp, Homo sapiens
ggacaaatataccaa

SEQ ID NO: 911693 - DNA, 15 bp, Homo sapiens
tggacaaatatacca

SEQ ID NO: 911694 - DNA, 15 bp, Homo sapiens
atggacaaatatacc

SEQ ID NO: 911695 - DNA, 15 bp, Homo sapiens
tatggacaaatatac

SEQ ID NO: 911696 - DNA, 15 bp, Homo sapiens
atatggacaaatata

SEQ ID NO: 911697 - DNA, 15 bp, Homo sapiens
catatggacaaatat

SEQ ID NO: 911698 - DNA, 15 bp, Homo sapiens
acatatggacaaata

SEQ ID NO: 911699 - DNA, 15 bp, Homo sapiens
cacatatggacaaat

SEQ ID NO: 911700 - DNA, 15 bp, Homo sapiens
acacatatggacaaa

SEQ ID NO: 911701 - DNA, 15 bp, Homo sapiens
aacacatatggacaa

SEQ ID NO: 911702 - DNA, 15 bp, Homo sapiens
aaacacatatggaca

SEQ ID NO: 911703 - DNA, 15 bp, Homo sapiens
gaaacacatatggac

SEQ ID NO: 911704 - DNA, 15 bp, Homo sapiens
agaaacacatatgga

SEQ ID NO: 911705 - DNA, 15 bp, Homo sapiens
gagaaacacatatgg

SEQ ID NO: 911706 - DNA, 15 bp, Homo sapiens
ggagaaacacatatg

SEQ ID NO: 911707 - DNA, 15 bp, Homo sapiens
tggagaaacacatat

SEQ ID NO: 911708 - DNA, 15 bp, Homo sapiens
ttggagaaacacata

SEQ ID NO: 911709 - DNA, 15 bp, Homo sapiens
attggagaaacacat

SEQ ID NO: 911710 - DNA, 15 bp, Homo sapiens
gattggagaaacaca

SEQ ID NO: 911711 - DNA, 15 bp, Homo sapiens
tgattggagaaacac

SEQ ID NO: 911712 - DNA, 15 bp, Homo sapiens
gtgattggagaaaca

SEQ ID NO: 911713 - DNA, 15 bp, Homo sapiens
ggtgattggagaaac

SEQ ID NO: 911714 - DNA, 15 bp, Homo sapiens
aggtgattggagaaa

SEQ ID NO: 911715 - DNA, 15 bp, Homo sapiens
gaggtgattggagaa

SEQ ID NO: 911716 - DNA, 15 bp, Homo sapiens
tgaggtgattggaga

SEQ ID NO: 911717 - DNA, 15 bp, Homo sapiens
gtgaggtgattggag

SEQ ID NO: 911718 - DNA, 15 bp, Homo sapiens
tgtgaggtgattgga

SEQ ID NO: 911719 - DNA, 15 bp, Homo sapiens
ttgtgaggtgattgg

SEQ ID NO: 911720 - DNA, 15 bp, Homo sapiens
tttgtgaggtgattg

SEQ ID NO: 911721 - DNA, 15 bp, Homo sapiens
gtttgtgaggtgatt

SEQ ID NO: 911722 - DNA, 15 bp, Homo sapiens
tgtttgtgaggtgat

SEQ ID NO: 911723 - DNA, 15 bp, Homo sapiens
gtgtttgtgaggtga

SEQ ID NO: 911724 - DNA, 15 bp, Homo sapiens
agtgtttgtgaggtg

SEQ ID NO: 911725 - DNA, 15 bp, Homo sapiens
tagtgtttgtgaggt

SEQ ID NO: 911726 - DNA, 15 bp, Homo sapiens
ttagtgtttgtgagg

SEQ ID NO: 911727 - DNA, 15 bp, Homo sapiens
attagtgtttgtgag

SEQ ID NO: 911728 - DNA, 15 bp, Homo sapiens
aattagtgtttgtga

SEQ ID NO: 911729 - DNA, 15 bp, Homo sapiens
aaattagtgtttgtg

SEQ ID NO: 911730 - DNA, 15 bp, Homo sapiens
aaaattagtgtttgt

SEQ ID NO: 911731 - DNA, 15 bp, Homo sapiens
aaaaattagtgtttg

SEQ ID NO: 911732 - DNA, 15 bp, Homo sapiens
caaaaattagtgttt

SEQ ID NO: 911733 - DNA, 15 bp, Homo sapiens
gcaaaaattagtgtt

SEQ ID NO: 911734 - DNA, 15 bp, Homo sapiens
tgcaaaaattagtgt

SEQ ID NO: 911735 - DNA, 15 bp, Homo sapiens
ttgcaaaaattagtg

SEQ ID NO: 911736 - DNA, 15 bp, Homo sapiens
attgcaaaaattagt

SEQ ID NO: 911737 - DNA, 15 bp, Homo sapiens
aattgcaaaaattag

SEQ ID NO: 911738 - DNA, 15 bp, Homo sapiens
aaattgcaaaaatta

SEQ ID NO: 911739 - DNA, 15 bp, Homo sapiens
taaattgcaaaaatt

SEQ ID NO: 911740 - DNA, 15 bp, Homo sapiens
ctaaattgcaaaaat

SEQ ID NO: 911741 - DNA, 15 bp, Homo sapiens
cctaaattgcaaaaa

SEQ ID NO: 911742 - DNA, 15 bp, Homo sapiens
tcctaaattgcaaaa

SEQ ID NO: 911743 - DNA, 15 bp, Homo sapiens
atcctaaattgcaaa

SEQ ID NO: 911744 - DNA, 15 bp, Homo sapiens
tatcctaaattgcaa

SEQ ID NO: 911745 - DNA, 15 bp, Homo sapiens
atatcctaaattgca

SEQ ID NO: 911746 - DNA, 15 bp, Homo sapiens
tatatcctaaattgc

SEQ ID NO: 911747 - DNA, 15 bp, Homo sapiens
atatatcctaaattg

SEQ ID NO: 911748 - DNA, 15 bp, Homo sapiens
tatatatcctaaatt

SEQ ID NO: 911749 - DNA, 15 bp, Homo sapiens
ttatatatcctaaat

SEQ ID NO: 911750 - DNA, 15 bp, Homo sapiens
tttatatatcctaaa

SEQ ID NO: 911751 - DNA, 15 bp, Homo sapiens
atttatatatcctaa

SEQ ID NO: 911752 - DNA, 15 bp, Homo sapiens
catttatatatccta

SEQ ID NO: 911753 - DNA, 15 bp, Homo sapiens
tcatttatatatcct

SEQ ID NO: 911754 - DNA, 15 bp, Homo sapiens
atcatttatatatcc

SEQ ID NO: 911755 - DNA, 15 bp, Homo sapiens
tatcatttatatatc

SEQ ID NO: 911756 - DNA, 15 bp, Homo sapiens
gtatcatttatatat

SEQ ID NO: 911757 - DNA, 15 bp, Homo sapiens
agtatcatttatata

SEQ ID NO: 911758 - DNA, 15 bp, Homo sapiens
aagtatcatttatat

SEQ ID NO: 911759 - DNA, 15 bp, Homo sapiens
caagtatcatttata

SEQ ID NO: 911760 - DNA, 15 bp, Homo sapiens
tcaagtatcatttat

SEQ ID NO: 911761 - DNA, 15 bp, Homo sapiens
ttcaagtatcattta

SEQ ID NO: 911762 - DNA, 15 bp, Homo sapiens
attcaagtatcattt

SEQ ID NO: 911763 - DNA, 15 bp, Homo sapiens
cattcaagtatcatt

SEQ ID NO: 911764 - DNA, 15 bp, Homo sapiens
tcattcaagtatcat

SEQ ID NO: 911765 - DNA, 15 bp, Homo sapiens
ttcattcaagtatca

SEQ ID NO: 911766 - DNA, 15 bp, Homo sapiens
attcattcaagtatc

SEQ ID NO: 911767 - DNA, 15 bp, Homo sapiens
cattcattcaagtat

SEQ ID NO: 911768 - DNA, 15 bp, Homo sapiens
acattcattcaagta

SEQ ID NO: 911769 - DNA, 15 bp, Homo sapiens
cacattcattcaagt

SEQ ID NO: 911770 - DNA, 15 bp, Homo sapiens
acacattcattcaag

SEQ ID NO: 911771 - DNA, 15 bp, Homo sapiens
tacacattcattcaa

SEQ ID NO: 911772 - DNA, 15 bp, Homo sapiens
ctacacattcattca

SEQ ID NO: 911773 - DNA, 15 bp, Homo sapiens
tctacacattcattc

SEQ ID NO: 911774 - DNA, 15 bp, Homo sapiens
atctacacattcatt

SEQ ID NO: 911775 - DNA, 15 bp, Homo sapiens
tatctacacattcat

SEQ ID NO: 911776 - DNA, 15 bp, Homo sapiens
ctatctacacattca

SEQ ID NO: 911777 - DNA, 15 bp, Homo sapiens
gctatctacacattc

SEQ ID NO: 911778 - DNA, 15 bp, Homo sapiens
tgctatctacacatt

SEQ ID NO: 911779 - DNA, 15 bp, Homo sapiens
ctgctatctacacat

SEQ ID NO: 911780 - DNA, 15 bp, Homo sapiens
actgctatctacaca

SEQ ID NO: 911781 - DNA, 15 bp, Homo sapiens
gactgctatctacac

SEQ ID NO: 911782 - DNA, 15 bp, Homo sapiens
tgactgctatctaca

SEQ ID NO: 911783 - DNA, 15 bp, Homo sapiens
atgactgctatctac

SEQ ID NO: 911784 - DNA, 15 bp, Homo sapiens
aatgactgctatcta

SEQ ID NO: 911785 - DNA, 15 bp, Homo sapiens
taatgactgctatct

SEQ ID NO: 911786 - DNA, 15 bp, Homo sapiens
ataatgactgctatc

SEQ ID NO: 911787 - DNA, 15 bp, Homo sapiens
cataatgactgctat

SEQ ID NO: 911788 - DNA, 15 bp, Homo sapiens
ccataatgactgcta

SEQ ID NO: 911789 - DNA, 15 bp, Homo sapiens
cccataatgactgct

SEQ ID NO: 911790 - DNA, 15 bp, Homo sapiens
ccccataatgactgc

SEQ ID NO: 911791 - DNA, 15 bp, Homo sapiens
accccataatgactg

SEQ ID NO: 911792 - DNA, 15 bp, Homo sapiens
aaccccataatgact

SEQ ID NO: 911793 - DNA, 15 bp, Homo sapiens
aaaccccataatgac

SEQ ID NO: 911794 - DNA, 15 bp, Homo sapiens
aaaaccccataatga

SEQ ID NO: 911795 - DNA, 15 bp, Homo sapiens
gaaaaccccataatg

SEQ ID NO: 911796 - DNA, 15 bp, Homo sapiens
agaaaaccccataat

SEQ ID NO: 911797 - DNA, 15 bp, Homo sapiens
tagaaaaccccataa

SEQ ID NO: 911798 - DNA, 15 bp, Homo sapiens
atagaaaaccccata

SEQ ID NO: 911799 - DNA, 15 bp, Homo sapiens
tatagaaaaccccat

SEQ ID NO: 911800 - DNA, 15 bp, Homo sapiens
ttatagaaaacccca

SEQ ID NO: 911801 - DNA, 15 bp, Homo sapiens
tttatagaaaacccc

SEQ ID NO: 911802 - DNA, 15 bp, Homo sapiens
ttttatagaaaaccc

SEQ ID NO: 911803 - DNA, 15 bp, Homo sapiens
cttttatagaaaacc

SEQ ID NO: 911804 - DNA, 15 bp, Homo sapiens
tcttttatagaaaac

SEQ ID NO: 911805 - DNA, 15 bp, Homo sapiens
gtcttttatagaaaa

SEQ ID NO: 911806 - DNA, 15 bp, Homo sapiens
agtcttttatagaaa

SEQ ID NO: 911807 - DNA, 15 bp, Homo sapiens
tagtcttttatagaa

SEQ ID NO: 911808 - DNA, 15 bp, Homo sapiens
gtagtcttttataga

SEQ ID NO: 911809 - DNA, 15 bp, Homo sapiens
agtagtcttttatag

SEQ ID NO: 911810 - DNA, 15 bp, Homo sapiens
cagtagtcttttata

SEQ ID NO: 911811 - DNA, 15 bp, Homo sapiens
tcagtagtcttttat

SEQ ID NO: 911812 - DNA, 15 bp, Homo sapiens
ttcagtagtctttta

SEQ ID NO: 911813 - DNA, 15 bp, Homo sapiens
tttcagtagtctttt

SEQ ID NO: 911814 - DNA, 15 bp, Homo sapiens
ttttcagtagtcttt

SEQ ID NO: 911815 - DNA, 15 bp, Homo sapiens
attttcagtagtctt

SEQ ID NO: 911816 - DNA, 15 bp, Homo sapiens
gattttcagtagtct

SEQ ID NO: 911817 - DNA, 15 bp, Homo sapiens
ggattttcagtagtc

SEQ ID NO: 911818 - DNA, 15 bp, Homo sapiens
aggattttcagtagt

SEQ ID NO: 911819 - DNA, 15 bp, Homo sapiens
caggattttcagtag

SEQ ID NO: 911820 - DNA, 15 bp, Homo sapiens
acaggattttcagta

SEQ ID NO: 911821 - DNA, 15 bp, Homo sapiens
cacaggattttcagt

SEQ ID NO: 911822 - DNA, 15 bp, Homo sapiens
ccacaggattttcag

SEQ ID NO: 911823 - DNA, 15 bp, Homo sapiens
tccacaggattttca

SEQ ID NO: 911824 - DNA, 15 bp, Homo sapiens
atccacaggattttc

SEQ ID NO: 911825 - DNA, 15 bp, Homo sapiens
gatccacaggatttt

SEQ ID NO: 911826 - DNA, 15 bp, Homo sapiens
tgatccacaggattt

SEQ ID NO: 911827 - DNA, 15 bp, Homo sapiens
atgatccacaggatt

SEQ ID NO: 911828 - DNA, 15 bp, Homo sapiens
tatgatccacaggat

SEQ ID NO: 911829 - DNA, 15 bp, Homo sapiens
ttatgatccacagga

SEQ ID NO: 911830 - DNA, 15 bp, Homo sapiens
gttatgatccacagg

SEQ ID NO: 911831 - DNA, 15 bp, Homo sapiens
tgttatgatccacag

SEQ ID NO: 911832 - DNA, 15 bp, Homo sapiens
atgttatgatccaca

SEQ ID NO: 911833 - DNA, 15 bp, Homo sapiens
aatgttatgatccac

SEQ ID NO: 911834 - DNA, 15 bp, Homo sapiens
aaatgttatgatcca

SEQ ID NO: 911835 - DNA, 15 bp, Homo sapiens
gaaatgttatgatcc

SEQ ID NO: 911836 - DNA, 15 bp, Homo sapiens
tgaaatgttatgatc

SEQ ID NO: 911837 - DNA, 15 bp, Homo sapiens
atgaaatgttatgat

SEQ ID NO: 911838 - DNA, 15 bp, Homo sapiens
aatgaaatgttatga

SEQ ID NO: 911839 - DNA, 15 bp, Homo sapiens
aaatgaaatgttatg

SEQ ID NO: 911840 - DNA, 15 bp, Homo sapiens
aaaatgaaatgttat

SEQ ID NO: 911841 - DNA, 15 bp, Homo sapiens
taaaatgaaatgtta

SEQ ID NO: 911842 - DNA, 15 bp, Homo sapiens
ataaaatgaaatgtt

SEQ ID NO: 911843 - DNA, 15 bp, Homo sapiens
gataaaatgaaatgt

SEQ ID NO: 911844 - DNA, 15 bp, Homo sapiens
agataaaatgaaatg

SEQ ID NO: 911845 - DNA, 15 bp, Homo sapiens
aagataaaatgaaat

SEQ ID NO: 911846 - DNA, 15 bp, Homo sapiens
taagataaaatgaaa

SEQ ID NO: 911847 - DNA, 15 bp, Homo sapiens
ttaagataaaatgaa

SEQ ID NO: 911848 - DNA, 15 bp, Homo sapiens
tttaagataaaatga

SEQ ID NO: 911849 - DNA, 15 bp, Homo sapiens
ttttaagataaaatg

SEQ ID NO: 911850 - DNA, 15 bp, Homo sapiens
attttaagataaaat

SEQ ID NO: 911851 - DNA, 15 bp, Homo sapiens
tattttaagataaaa

SEQ ID NO: 911852 - DNA, 15 bp, Homo sapiens
ttattttaagataaa

SEQ ID NO: 911853 - DNA, 15 bp, Homo sapiens
tttattttaagataa

SEQ ID NO: 911854 - DNA, 15 bp, Homo sapiens
atttattttaagata

SEQ ID NO: 911855 - DNA, 15 bp, Homo sapiens
tatttattttaagat

SEQ ID NO: 911856 - DNA, 15 bp, Homo sapiens
gtatttattttaaga

SEQ ID NO: 911857 - DNA, 15 bp, Homo sapiens
tgtatttattttaag

SEQ ID NO: 911858 - DNA, 15 bp, Homo sapiens
atgtatttattttaa

SEQ ID NO: 911859 - DNA, 15 bp, Homo sapiens
aatgtatttatttta

SEQ ID NO: 911860 - DNA, 15 bp, Homo sapiens
taatgtatttatttt

SEQ ID NO: 911861 - DNA, 15 bp, Homo sapiens
ataatgtatttattt

SEQ ID NO: 911862 - DNA, 15 bp, Homo sapiens
tataatgtatttatt

SEQ ID NO: 911863 - DNA, 15 bp, Homo sapiens
ttataatgtatttat

SEQ ID NO: 911864 - DNA, 15 bp, Homo sapiens
tttataatgtattta

SEQ ID NO: 911865 - DNA, 15 bp, Homo sapiens
atttataatgtattt

SEQ ID NO: 911866 - DNA, 15 bp, Homo sapiens
catttataatgtatt

SEQ ID NO: 911867 - DNA, 15 bp, Homo sapiens
acatttataatgtat

SEQ ID NO: 911868 - DNA, 15 bp, Homo sapiens
tacatttataatgta

SEQ ID NO: 911869 - DNA, 15 bp, Homo sapiens
atacatttataatgt

SEQ ID NO: 911870 - DNA, 15 bp, Homo sapiens
aatacatttataatg

SEQ ID NO: 911871 - DNA, 15 bp, Homo sapiens
taatacatttataat

SEQ ID NO: 911872 - DNA, 15 bp, Homo sapiens
ctaatacatttataa

SEQ ID NO: 911873 - DNA, 15 bp, Homo sapiens
tctaatacatttata

SEQ ID NO: 911874 - DNA, 15 bp, Homo sapiens
ttctaatacatttat

SEQ ID NO: 911875 - DNA, 15 bp, Homo sapiens
tttctaatacattta

SEQ ID NO: 911876 - DNA, 15 bp, Homo sapiens
gtttctaatacattt

SEQ ID NO: 911877 - DNA, 15 bp, Homo sapiens
ggtttctaatacatt

SEQ ID NO: 911878 - DNA, 15 bp, Homo sapiens
tggtttctaatacat

SEQ ID NO: 911879 - DNA, 15 bp, Homo sapiens
ttggtttctaataca

SEQ ID NO: 911880 - DNA, 15 bp, Homo sapiens
attggtttctaatac

SEQ ID NO: 911881 - DNA, 15 bp, Homo sapiens
tattggtttctaata

SEQ ID NO: 911882 - DNA, 15 bp, Homo sapiens
gtattggtttctaat

SEQ ID NO: 911883 - DNA, 15 bp, Homo sapiens
tgtattggtttctaa

SEQ ID NO: 911884 - DNA, 15 bp, Homo sapiens
atgtattggtttcta

SEQ ID NO: 911885 - DNA, 15 bp, Homo sapiens
aatgtattggtttct

SEQ ID NO: 911886 - DNA, 15 bp, Homo sapiens
caatgtattggtttc

SEQ ID NO: 911887 - DNA, 15 bp, Homo sapiens
acaatgtattggttt

SEQ ID NO: 911888 - DNA, 15 bp, Homo sapiens
aacaatgtattggtt

SEQ ID NO: 911889 - DNA, 15 bp, Homo sapiens
gaacaatgtattggt

SEQ ID NO: 911890 - DNA, 15 bp, Homo sapiens
tgaacaatgtattgg

SEQ ID NO: 911891 - DNA, 15 bp, Homo sapiens
ctgaacaatgtattg

SEQ ID NO: 911892 - DNA, 15 bp, Homo sapiens
actgaacaatgtatt

SEQ ID NO: 911893 - DNA, 15 bp, Homo sapiens
tactgaacaatgtat

SEQ ID NO: 911894 - DNA, 15 bp, Homo sapiens
atactgaacaatgta

SEQ ID NO: 911895 - DNA, 15 bp, Homo sapiens
aatactgaacaatgt

SEQ ID NO: 911896 - DNA, 15 bp, Homo sapiens
aaatactgaacaatg

SEQ ID NO: 911897 - DNA, 15 bp, Homo sapiens
taaatactgaacaat

SEQ ID NO: 911898 - DNA, 15 bp, Homo sapiens
ataaatactgaacaa

SEQ ID NO: 911899 - DNA, 15 bp, Homo sapiens
cataaatactgaaca

SEQ ID NO: 911900 - DNA, 15 bp, Homo sapiens
acataaatactgaac

SEQ ID NO: 911901 - DNA, 15 bp, Homo sapiens
cacataaatactgaa

SEQ ID NO: 911902 - DNA, 15 bp, Homo sapiens
ccacataaatactga

SEQ ID NO: 911903 - DNA, 15 bp, Homo sapiens
tccacataaatactg

SEQ ID NO: 911904 - DNA, 15 bp, Homo sapiens
atccacataaatact

SEQ ID NO: 911905 - DNA, 15 bp, Homo sapiens
aatccacataaatac

SEQ ID NO: 911906 - DNA, 15 bp, Homo sapiens
taatccacataaata

SEQ ID NO: 911907 - DNA, 15 bp, Homo sapiens
ttaatccacataaat

SEQ ID NO: 911908 - DNA, 15 bp, Homo sapiens
tttaatccacataaa

SEQ ID NO: 911909 - DNA, 15 bp, Homo sapiens
atttaatccacataa

SEQ ID NO: 911910 - DNA, 15 bp, Homo sapiens
aatttaatccacata

SEQ ID NO: 911911 - DNA, 15 bp, Homo sapiens
aaatttaatccacat

SEQ ID NO: 911912 - DNA, 15 bp, Homo sapiens
caaatttaatccaca

SEQ ID NO: 911913 - DNA, 15 bp, Homo sapiens
acaaatttaatccac

SEQ ID NO: 911914 - DNA, 15 bp, Homo sapiens
aacaaatttaatcca

SEQ ID NO: 911915 - DNA, 15 bp, Homo sapiens
aaacaaatttaatcc

SEQ ID NO: 911916 - DNA, 15 bp, Homo sapiens
taaacaaatttaatc

SEQ ID NO: 911917 - DNA, 15 bp, Homo sapiens
ttaaacaaatttaat

SEQ ID NO: 911918 - DNA, 15 bp, Homo sapiens
tttaaacaaatttaa

SEQ ID NO: 911919 - DNA, 15 bp, Homo sapiens
ttttaaacaaattta

SEQ ID NO: 911920 - DNA, 15 bp, Homo sapiens
cttttaaacaaattt

SEQ ID NO: 911921 - DNA, 15 bp, Homo sapiens
ccttttaaacaaatt

SEQ ID NO: 911922 - DNA, 15 bp, Homo sapiens
accttttaaacaaat

SEQ ID NO: 911923 - DNA, 15 bp, Homo sapiens
taccttttaaacaaa

SEQ ID NO: 911924 - DNA, 15 bp, Homo sapiens
ctaccttttaaacaa

SEQ ID NO: 911925 - DNA, 15 bp, Homo sapiens
tctaccttttaaaca

SEQ ID NO: 911926 - DNA, 15 bp, Homo sapiens
ttctaccttttaaac

SEQ ID NO: 911927 - DNA, 15 bp, Homo sapiens
attctaccttttaaa

SEQ ID NO: 911928 - DNA, 15 bp, Homo sapiens
tattctaccttttaa

SEQ ID NO: 911929 - DNA, 15 bp, Homo sapiens
ttattctacctttta

SEQ ID NO: 911930 - DNA, 15 bp, Homo sapiens
attattctacctttt

SEQ ID NO: 911931 - DNA, 15 bp, Homo sapiens
cattattctaccttt

SEQ ID NO: 911932 - DNA, 15 bp, Homo sapiens
acattattctacctt

SEQ ID NO: 911933 - DNA, 15 bp, Homo sapiens
aacattattctacct

SEQ ID NO: 911934 - DNA, 15 bp, Homo sapiens
aaacattattctacc

SEQ ID NO: 911935 - DNA, 15 bp, Homo sapiens
taaacattattctac

SEQ ID NO: 911936 - DNA, 15 bp, Homo sapiens
ttaaacattattcta

SEQ ID NO: 911937 - DNA, 15 bp, Homo sapiens
tttaaacattattct

SEQ ID NO: 911938 - DNA, 15 bp, Homo sapiens
ttttaaacattattc

SEQ ID NO: 911939 - DNA, 15 bp, Homo sapiens
tttttaaacattatt

SEQ ID NO: 911940 - DNA, 15 bp, Homo sapiens
atttttaaacattat

SEQ ID NO: 911941 - DNA, 15 bp, Homo sapiens
tatttttaaacatta

SEQ ID NO: 911942 - DNA, 15 bp, Homo sapiens
ttatttttaaacatt

SEQ ID NO: 911943 - DNA, 15 bp, Homo sapiens
tttatttttaaacat

SEQ ID NO: 911944 - DNA, 15 bp, Homo sapiens
ttttatttttaaaca

SEQ ID NO: 911945 - DNA, 15 bp, Homo sapiens
attttatttttaaac

SEQ ID NO: 911946 - DNA, 15 bp, Homo sapiens
aattttatttttaaa

SEQ ID NO: 911947 - DNA, 15 bp, Homo sapiens
aaattttatttttaa

SEQ ID NO: 911948 - DNA, 15 bp, Homo sapiens
aaaattttattttta

SEQ ID NO: 911949 - DNA, 15 bp, Homo sapiens
gaaaattttattttt

SEQ ID NO: 911950 - DNA, 15 bp, Homo sapiens
agaaaattttatttt

SEQ ID NO: 911951 - DNA, 15 bp, Homo sapiens
tagaaaattttattt

SEQ ID NO: 911952 - DNA, 15 bp, Homo sapiens
ctagaaaattttatt

SEQ ID NO: 911953 - DNA, 15 bp, Homo sapiens
actagaaaattttat

SEQ ID NO: 911954 - DNA, 15 bp, Homo sapiens
tactagaaaatttta

SEQ ID NO: 911955 - DNA, 15 bp, Homo sapiens
ttactagaaaatttt

SEQ ID NO: 911956 - DNA, 15 bp, Homo sapiens
attactagaaaattt

SEQ ID NO: 911957 - DNA, 15 bp, Homo sapiens
cattactagaaaatt

SEQ ID NO: 911958 - DNA, 15 bp, Homo sapiens
tcattactagaaaat

SEQ ID NO: 911959 - DNA, 15 bp, Homo sapiens
ttcattactagaaaa

SEQ ID NO: 911960 - DNA, 15 bp, Homo sapiens
tttcattactagaaa

SEQ ID NO: 911961 - DNA, 15 bp, Homo sapiens
ctttcattactagaa

SEQ ID NO: 911962 - DNA, 15 bp, Homo sapiens
tctttcattactaga

SEQ ID NO: 911963 - DNA, 15 bp, Homo sapiens
atctttcattactag

SEQ ID NO: 911964 - DNA, 15 bp, Homo sapiens
tatctttcattacta

SEQ ID NO: 911965 - DNA, 15 bp, Homo sapiens
ttatctttcattact

SEQ ID NO: 911966 - DNA, 15 bp, Homo sapiens
attatctttcattac

SEQ ID NO: 911967 - DNA, 15 bp, Homo sapiens
aattatctttcatta

SEQ ID NO: 911968 - DNA, 15 bp, Homo sapiens
taattatctttcatt

SEQ ID NO: 911969 - DNA, 15 bp, Homo sapiens
ataattatctttcat

SEQ ID NO: 911970 - DNA, 15 bp, Homo sapiens
cataattatctttca

SEQ ID NO: 911971 - DNA, 15 bp, Homo sapiens
gcataattatctttc

SEQ ID NO: 911972 - DNA, 15 bp, Homo sapiens
tgcataattatcttt

SEQ ID NO: 911973 - DNA, 15 bp, Homo sapiens
ttgcataattatctt

SEQ ID NO: 911974 - DNA, 15 bp, Homo sapiens
attgcataattatct

SEQ ID NO: 911975 - DNA, 15 bp, Homo sapiens
aattgcataattatc

SEQ ID NO: 911976 - DNA, 15 bp, Homo sapiens
taattgcataattat

SEQ ID NO: 911977 - DNA, 15 bp, Homo sapiens
ataattgcataatta

SEQ ID NO: 911978 - DNA, 15 bp, Homo sapiens
tataattgcataatt

SEQ ID NO: 911979 - DNA, 15 bp, Homo sapiens
ttataattgcataat

SEQ ID NO: 911980 - DNA, 15 bp, Homo sapiens
cttataattgcataa

SEQ ID NO: 911981 - DNA, 15 bp, Homo sapiens
tcttataattgcata

SEQ ID NO: 911982 - DNA, 15 bp, Homo sapiens
atcttataattgcat

SEQ ID NO: 911983 - DNA, 15 bp, Homo sapiens
catcttataattgca

SEQ ID NO: 911984 - DNA, 15 bp, Homo sapiens
gcatcttataattgc

SEQ ID NO: 911985 - DNA, 15 bp, Homo sapiens
tgcatcttataattg

SEQ ID NO: 911986 - DNA, 15 bp, Homo sapiens
ctgcatcttataatt

SEQ ID NO: 911987 - DNA, 15 bp, Homo sapiens
tctgcatcttataat

SEQ ID NO: 911988 - DNA, 15 bp, Homo sapiens
ttctgcatcttataa

SEQ ID NO: 911989 - DNA, 15 bp, Homo sapiens
tttctgcatcttata

SEQ ID NO: 911990 - DNA, 15 bp, Homo sapiens
gtttctgcatcttat

SEQ ID NO: 911991 - DNA, 15 bp, Homo sapiens
agtttctgcatctta

SEQ ID NO: 911992 - DNA, 15 bp, Homo sapiens
tagtttctgcatctt

SEQ ID NO: 911993 - DNA, 15 bp, Homo sapiens
atagtttctgcatct

SEQ ID NO: 911994 - DNA, 15 bp, Homo sapiens
aatagtttctgcatc

SEQ ID NO: 911995 - DNA, 15 bp, Homo sapiens
taatagtttctgcat

SEQ ID NO: 911996 - DNA, 15 bp, Homo sapiens
ttaatagtttctgca

SEQ ID NO: 911997 - DNA, 15 bp, Homo sapiens
tttaatagtttctgc

SEQ ID NO: 911998 - DNA, 15 bp, Homo sapiens
atttaatagtttctg

SEQ ID NO: 911999 - DNA, 15 bp, Homo sapiens
catttaatagtttct

SEQ ID NO: 912000 - DNA, 15 bp, Homo sapiens
acatttaatagtttc

SEQ ID NO: 912001 - DNA, 15 bp, Homo sapiens
gacatttaatagttt

SEQ ID NO: 912002 - DNA, 15 bp, Homo sapiens
tgacatttaatagtt

SEQ ID NO: 912003 - DNA, 15 bp, Homo sapiens
gtgacatttaatagt

SEQ ID NO: 912004 - DNA, 15 bp, Homo sapiens
ggtgacatttaatag

SEQ ID NO: 912005 - DNA, 15 bp, Homo sapiens
aggtgacatttaata

SEQ ID NO: 912006 - DNA, 15 bp, Homo sapiens
taggtgacatttaat

SEQ ID NO: 912007 - DNA, 15 bp, Homo sapiens
ataggtgacatttaa

SEQ ID NO: 912008 - DNA, 15 bp, Homo sapiens
tataggtgacattta

SEQ ID NO: 912009 - DNA, 15 bp, Homo sapiens
ttataggtgacattt

SEQ ID NO: 912010 - DNA, 15 bp, Homo sapiens
attataggtgacatt

SEQ ID NO: 912011 - DNA, 15 bp, Homo sapiens
aattataggtgacat

SEQ ID NO: 912012 - DNA, 15 bp, Homo sapiens
gaattataggtgaca

SEQ ID NO: 912013 - DNA, 15 bp, Homo sapiens
ggaattataggtgac

SEQ ID NO: 912014 - DNA, 15 bp, Homo sapiens
tggaattataggtga

SEQ ID NO: 912015 - DNA, 15 bp, Homo sapiens
ctggaattataggtg

SEQ ID NO: 912016 - DNA, 15 bp, Homo sapiens
cctggaattataggt

SEQ ID NO: 912017 - DNA, 15 bp, Homo sapiens
tcctggaattatagg

SEQ ID NO: 912018 - DNA, 15 bp, Homo sapiens
atcctggaattatag

SEQ ID NO: 912019 - DNA, 15 bp, Homo sapiens
catcctggaattata

SEQ ID NO: 912020 - DNA, 15 bp, Homo sapiens
tcatcctggaattat

SEQ ID NO: 912021 - DNA, 15 bp, Homo sapiens
gtcatcctggaatta

SEQ ID NO: 912022 - DNA, 15 bp, Homo sapiens
agtcatcctggaatt

SEQ ID NO: 912023 - DNA, 15 bp, Homo sapiens
aagtcatcctggaat

SEQ ID NO: 912024 - DNA, 15 bp, Homo sapiens
gaagtcatcctggaa

SEQ ID NO: 912025 - DNA, 15 bp, Homo sapiens
tgaagtcatcctgga

SEQ ID NO: 912026 - DNA, 15 bp, Homo sapiens
ttgaagtcatcctgg

SEQ ID NO: 912027 - DNA, 15 bp, Homo sapiens
attgaagtcatcctg

SEQ ID NO: 912028 - DNA, 15 bp, Homo sapiens
cattgaagtcatcct

SEQ ID NO: 912029 - DNA, 15 bp, Homo sapiens
tcattgaagtcatcc

SEQ ID NO: 912030 - DNA, 15 bp, Homo sapiens
atcattgaagtcatc

SEQ ID NO: 912031 - DNA, 15 bp, Homo sapiens
tatcattgaagtcat

SEQ ID NO: 912032 - DNA, 15 bp, Homo sapiens
ttatcattgaagtca

SEQ ID NO: 912033 - DNA, 15 bp, Homo sapiens
tttatcattgaagtc

SEQ ID NO: 912034 - DNA, 15 bp, Homo sapiens
atttatcattgaagt

SEQ ID NO: 912035 - DNA, 15 bp, Homo sapiens
tatttatcattgaag

SEQ ID NO: 912036 - DNA, 15 bp, Homo sapiens
gtatttatcattgaa

SEQ ID NO: 912037 - DNA, 15 bp, Homo sapiens
tgtatttatcattga

SEQ ID NO: 912038 - DNA, 15 bp, Homo sapiens
gtgtatttatcattg

SEQ ID NO: 912039 - DNA, 15 bp, Homo sapiens
tgtgtatttatcatt

SEQ ID NO: 912040 - DNA, 15 bp, Homo sapiens
atgtgtatttatcat

SEQ ID NO: 912041 - DNA, 15 bp, Homo sapiens
tatgtgtatttatca

SEQ ID NO: 912042 - DNA, 15 bp, Homo sapiens
atatgtgtatttatc

SEQ ID NO: 912043 - DNA, 15 bp, Homo sapiens
catatgtgtatttat

SEQ ID NO: 912044 - DNA, 15 bp, Homo sapiens
acatatgtgtattta

SEQ ID NO: 912045 - DNA, 15 bp, Homo sapiens
tacatatgtgtattt

SEQ ID NO: 912046 - DNA, 15 bp, Homo sapiens
ttacatatgtgtatt

SEQ ID NO: 912047 - DNA, 15 bp, Homo sapiens
attacatatgtgtat

SEQ ID NO: 912048 - DNA, 15 bp, Homo sapiens
cattacatatgtgta

SEQ ID NO: 912049 - DNA, 15 bp, Homo sapiens
acattacatatgtgt

SEQ ID NO: 912050 - DNA, 15 bp, Homo sapiens
tacattacatatgtg

SEQ ID NO: 912051 - DNA, 15 bp, Homo sapiens
ttacattacatatgt

SEQ ID NO: 912052 - DNA, 15 bp, Homo sapiens
attacattacatatg

SEQ ID NO: 912053 - DNA, 15 bp, Homo sapiens
cattacattacatat

SEQ ID NO: 912054 - DNA, 15 bp, Homo sapiens
acattacattacata

SEQ ID NO: 912055 - DNA, 15 bp, Homo sapiens
tacattacattacat

SEQ ID NO: 912056 - DNA, 15 bp, Homo sapiens
atacattacattaca

SEQ ID NO: 912057 - DNA, 15 bp, Homo sapiens
gatacattacattac

SEQ ID NO: 912058 - DNA, 15 bp, Homo sapiens
ggatacattacatta

SEQ ID NO: 912059 - DNA, 15 bp, Homo sapiens
cggatacattacatt

SEQ ID NO: 912060 - DNA, 15 bp, Homo sapiens
acggatacattacat

SEQ ID NO: 912061 - DNA, 15 bp, Homo sapiens
tacggatacattaca

SEQ ID NO: 912062 - DNA, 15 bp, Homo sapiens
atacggatacattac

SEQ ID NO: 912063 - DNA, 15 bp, Homo sapiens
catacggatacatta

SEQ ID NO: 912064 - DNA, 15 bp, Homo sapiens
acatacggatacatt

SEQ ID NO: 912065 - DNA, 15 bp, Homo sapiens
tacatacggatacat

SEQ ID NO: 912066 - DNA, 15 bp, Homo sapiens
atacatacggataca

SEQ ID NO: 912067 - DNA, 15 bp, Homo sapiens
catacatacggatac

SEQ ID NO: 912068 - DNA, 15 bp, Homo sapiens
acatacatacggata

SEQ ID NO: 912069 - DNA, 15 bp, Homo sapiens
cacatacatacggat

SEQ ID NO: 912070 - DNA, 15 bp, Homo sapiens
acacatacatacgga

SEQ ID NO: 912071 - DNA, 15 bp, Homo sapiens
tacacatacatacgg

SEQ ID NO: 912072 - DNA, 15 bp, Homo sapiens
atacacatacatacg

SEQ ID NO: 912073 - DNA, 15 bp, Homo sapiens
tatacacatacatac

SEQ ID NO: 912074 - DNA, 15 bp, Homo sapiens
atatacacatacata

SEQ ID NO: 912075 - DNA, 15 bp, Homo sapiens
tatatacacatacat

SEQ ID NO: 912076 - DNA, 15 bp, Homo sapiens
ttatatacacataca

SEQ ID NO: 912077 - DNA, 15 bp, Homo sapiens
cttatatacacatac

SEQ ID NO: 912078 - DNA, 15 bp, Homo sapiens
acttatatacacata

SEQ ID NO: 912079 - DNA, 15 bp, Homo sapiens
tacttatatacacat

SEQ ID NO: 912080 - DNA, 15 bp, Homo sapiens
atacttatatacaca

SEQ ID NO: 912081 - DNA, 15 bp, Homo sapiens
catacttatatacac

SEQ ID NO: 912082 - DNA, 15 bp, Homo sapiens
tcatacttatataca

SEQ ID NO: 912083 - DNA, 15 bp, Homo sapiens
ttcatacttatatac

SEQ ID NO: 912084 - DNA, 15 bp, Homo sapiens
attcatacttatata

SEQ ID NO: 912085 - DNA, 15 bp, Homo sapiens
tattcatacttatat

SEQ ID NO: 912086 - DNA, 15 bp, Homo sapiens
gtattcatacttata

SEQ ID NO: 912087 - DNA, 15 bp, Homo sapiens
cgtattcatacttat

SEQ ID NO: 912088 - DNA, 15 bp, Homo sapiens
acgtattcatactta

SEQ ID NO: 912089 - DNA, 15 bp, Homo sapiens
tacgtattcatactt

SEQ ID NO: 912090 - DNA, 15 bp, Homo sapiens
atacgtattcatact

SEQ ID NO: 912091 - DNA, 15 bp, Homo sapiens
catacgtattcatac

SEQ ID NO: 912092 - DNA, 15 bp, Homo sapiens
acatacgtattcata

SEQ ID NO: 912093 - DNA, 15 bp, Homo sapiens
cacatacgtattcat

SEQ ID NO: 912094 - DNA, 15 bp, Homo sapiens
acacatacgtattca

SEQ ID NO: 912095 - DNA, 15 bp, Homo sapiens
cacacatacgtattc

SEQ ID NO: 912096 - DNA, 15 bp, Homo sapiens
acacacatacgtatt

SEQ ID NO: 912097 - DNA, 15 bp, Homo sapiens
cacacacatacgtat

SEQ ID NO: 912098 - DNA, 15 bp, Homo sapiens
acacacacatacgta

SEQ ID NO: 912099 - DNA, 15 bp, Homo sapiens
tacacacacatacgt

SEQ ID NO: 912100 - DNA, 15 bp, Homo sapiens
atacacacacatacg

SEQ ID NO: 912101 - DNA, 15 bp, Homo sapiens
catacacacacatac

SEQ ID NO: 912102 - DNA, 15 bp, Homo sapiens
acatacacacacata

SEQ ID NO: 912103 - DNA, 15 bp, Homo sapiens
tacatacacacacat

SEQ ID NO: 912104 - DNA, 15 bp, Homo sapiens
ctacatacacacaca

SEQ ID NO: 912105 - DNA, 15 bp, Homo sapiens
tctacatacacacac

SEQ ID NO: 912106 - DNA, 15 bp, Homo sapiens
atctacatacacaca

SEQ ID NO: 912107 - DNA, 15 bp, Homo sapiens
tatctacatacacac

SEQ ID NO: 912108 - DNA, 15 bp, Homo sapiens
atatctacatacaca

SEQ ID NO: 912109 - DNA, 15 bp, Homo sapiens
tatatctacatacac

SEQ ID NO: 912110 - DNA, 15 bp, Homo sapiens
atatatctacataca

SEQ ID NO: 912111 - DNA, 15 bp, Homo sapiens
aatatatctacatac

SEQ ID NO: 912112 - DNA, 15 bp, Homo sapiens
aaatatatctacata

SEQ ID NO: 912113 - DNA, 15 bp, Homo sapiens
taaatatatctacat

SEQ ID NO: 912114 - DNA, 15 bp, Homo sapiens
ataaatatatctaca

SEQ ID NO: 912115 - DNA, 15 bp, Homo sapiens
tataaatatatctac

SEQ ID NO: 912116 - DNA, 15 bp, Homo sapiens
atataaatatatcta

SEQ ID NO: 912117 - DNA, 15 bp, Homo sapiens
tatataaatatatct

SEQ ID NO: 912118 - DNA, 15 bp, Homo sapiens
atatataaatatatc

SEQ ID NO: 912119 - DNA, 15 bp, Homo sapiens
tatatataaatatat

SEQ ID NO: 912120 - DNA, 15 bp, Homo sapiens
atatatataaatata

SEQ ID NO: 912121 - DNA, 15 bp, Homo sapiens
tatatatataaatat

SEQ ID NO: 912122 - DNA, 15 bp, Homo sapiens
ttatatatataaata

SEQ ID NO: 912123 - DNA, 15 bp, Homo sapiens
attatatatataaat

SEQ ID NO: 912124 - DNA, 15 bp, Homo sapiens
cattatatatataaa

SEQ ID NO: 912125 - DNA, 15 bp, Homo sapiens
acattatatatataa

SEQ ID NO: 912126 - DNA, 15 bp, Homo sapiens
tacattatatatata

SEQ ID NO: 912127 - DNA, 15 bp, Homo sapiens
atacattatatatat

SEQ ID NO: 912128 - DNA, 15 bp, Homo sapiens
tatacattatatata

SEQ ID NO: 912129 - DNA, 15 bp, Homo sapiens
atatacattatatat

SEQ ID NO: 912130 - DNA, 15 bp, Homo sapiens
catatacattatata

SEQ ID NO: 912131 - DNA, 15 bp, Homo sapiens
acatatacattatat

SEQ ID NO: 912132 - DNA, 15 bp, Homo sapiens
tacatatacattata

SEQ ID NO: 912133 - DNA, 15 bp, Homo sapiens
ttacatatacattat

SEQ ID NO: 912134 - DNA, 15 bp, Homo sapiens
tttacatatacatta

SEQ ID NO: 912135 - DNA, 15 bp, Homo sapiens
atttacatatacatt

SEQ ID NO: 912136 - DNA, 15 bp, Homo sapiens
tatttacatatacat

SEQ ID NO: 912137 - DNA, 15 bp, Homo sapiens
atatttacatataca

SEQ ID NO: 912138 - DNA, 15 bp, Homo sapiens
catatttacatatac

SEQ ID NO: 912139 - DNA, 15 bp, Homo sapiens
gcatatttacatata

SEQ ID NO: 912140 - DNA, 15 bp, Homo sapiens
tgcatatttacatat

SEQ ID NO: 912141 - DNA, 15 bp, Homo sapiens
gtgcatatttacata

SEQ ID NO: 912142 - DNA, 15 bp, Homo sapiens
tgtgcatatttacat

SEQ ID NO: 912143 - DNA, 15 bp, Homo sapiens
ctgtgcatatttaca

SEQ ID NO: 912144 - DNA, 15 bp, Homo sapiens
cctgtgcatatttac

SEQ ID NO: 912145 - DNA, 15 bp, Homo sapiens
acctgtgcatattta

SEQ ID NO: 912146 - DNA, 15 bp, Homo sapiens
cacctgtgcatattt

SEQ ID NO: 912147 - DNA, 15 bp, Homo sapiens
acacctgtgcatatt

SEQ ID NO: 912148 - DNA, 15 bp, Homo sapiens
tacacctgtgcatat

SEQ ID NO: 912149 - DNA, 15 bp, Homo sapiens
ttacacctgtgcata

SEQ ID NO: 912150 - DNA, 15 bp, Homo sapiens
tttacacctgtgcat

SEQ ID NO: 912151 - DNA, 15 bp, Homo sapiens
atttacacctgtgca

SEQ ID NO: 912152 - DNA, 15 bp, Homo sapiens
tatttacacctgtgc

SEQ ID NO: 912153 - DNA, 15 bp, Homo sapiens
atatttacacctgtg

SEQ ID NO: 912154 - DNA, 15 bp, Homo sapiens
tatatttacacctgt

SEQ ID NO: 912155 - DNA, 15 bp, Homo sapiens
atatatttacacctg

SEQ ID NO: 912156 - DNA, 15 bp, Homo sapiens
catatatttacacct

SEQ ID NO: 912157 - DNA, 15 bp, Homo sapiens
acatatatttacacc

SEQ ID NO: 912158 - DNA, 15 bp, Homo sapiens
aacatatatttacac

SEQ ID NO: 912159 - DNA, 15 bp, Homo sapiens
taacatatatttaca

SEQ ID NO: 912160 - DNA, 15 bp, Homo sapiens
gtaacatatatttac

SEQ ID NO: 912161 - DNA, 15 bp, Homo sapiens
tgtaacatatattta

SEQ ID NO: 912162 - DNA, 15 bp, Homo sapiens
atgtaacatatattt

SEQ ID NO: 912163 - DNA, 15 bp, Homo sapiens
gatgtaacatatatt

SEQ ID NO: 912164 - DNA, 15 bp, Homo sapiens
tgatgtaacatatat

SEQ ID NO: 912165 - DNA, 15 bp, Homo sapiens
ctgatgtaacatata

SEQ ID NO: 912166 - DNA, 15 bp, Homo sapiens
actgatgtaacatat

SEQ ID NO: 912167 - DNA, 15 bp, Homo sapiens
aactgatgtaacata

SEQ ID NO: 912168 - DNA, 15 bp, Homo sapiens
aaactgatgtaacat

SEQ ID NO: 912169 - DNA, 15 bp, Homo sapiens
caaactgatgtaaca

SEQ ID NO: 912170 - DNA, 15 bp, Homo sapiens
gcaaactgatgtaac

SEQ ID NO: 912171 - DNA, 15 bp, Homo sapiens
tgcaaactgatgtaa

SEQ ID NO: 912172 - DNA, 15 bp, Homo sapiens
ttgcaaactgatgta

SEQ ID NO: 912173 - DNA, 15 bp, Homo sapiens
gttgcaaactgatgt

SEQ ID NO: 912174 - DNA, 15 bp, Homo sapiens
tgttgcaaactgatg

SEQ ID NO: 912175 - DNA, 15 bp, Homo sapiens
ttgttgcaaactgat

SEQ ID NO: 912176 - DNA, 15 bp, Homo sapiens
gttgttgcaaactga

SEQ ID NO: 912177 - DNA, 15 bp, Homo sapiens
agttgttgcaaactg

SEQ ID NO: 912178 - DNA, 15 bp, Homo sapiens
gagttgttgcaaact

SEQ ID NO: 912179 - DNA, 15 bp, Homo sapiens
agagttgttgcaaac

SEQ ID NO: 912180 - DNA, 15 bp, Homo sapiens
aagagttgttgcaaa

SEQ ID NO: 912181 - DNA, 15 bp, Homo sapiens
caagagttgttgcaa

SEQ ID NO: 912182 - DNA, 15 bp, Homo sapiens
tcaagagttgttgca

SEQ ID NO: 912183 - DNA, 15 bp, Homo sapiens
ttcaagagttgttgc

SEQ ID NO: 912184 - DNA, 15 bp, Homo sapiens
tttcaagagttgttg

SEQ ID NO: 912185 - DNA, 15 bp, Homo sapiens
atttcaagagttgtt

SEQ ID NO: 912186 - DNA, 15 bp, Homo sapiens
tatttcaagagttgt

SEQ ID NO: 912187 - DNA, 15 bp, Homo sapiens
ttatttcaagagttg

SEQ ID NO: 912188 - DNA, 15 bp, Homo sapiens
gttatttcaagagtt

SEQ ID NO: 912189 - DNA, 15 bp, Homo sapiens
agttatttcaagagt

SEQ ID NO: 912190 - DNA, 15 bp, Homo sapiens
aagttatttcaagag

SEQ ID NO: 912191 - DNA, 15 bp, Homo sapiens
aaagttatttcaaga

SEQ ID NO: 912192 - DNA, 15 bp, Homo sapiens
caaagttatttcaag

SEQ ID NO: 912193 - DNA, 15 bp, Homo sapiens
acaaagttatttcaa

SEQ ID NO: 912194 - DNA, 15 bp, Homo sapiens
gacaaagttatttca

SEQ ID NO: 912195 - DNA, 15 bp, Homo sapiens
agacaaagttatttc

SEQ ID NO: 912196 - DNA, 15 bp, Homo sapiens
aagacaaagttattt

SEQ ID NO: 912197 - DNA, 15 bp, Homo sapiens
aaagacaaagttatt

SEQ ID NO: 912198 - DNA, 15 bp, Homo sapiens
aaaagacaaagttat

SEQ ID NO: 912199 - DNA, 15 bp, Homo sapiens
taaaagacaaagtta

SEQ ID NO: 912200 - DNA, 15 bp, Homo sapiens
ctaaaagacaaagtt

SEQ ID NO: 912201 - DNA, 15 bp, Homo sapiens
cctaaaagacaaagt

SEQ ID NO: 912202 - DNA, 15 bp, Homo sapiens
acctaaaagacaaag

SEQ ID NO: 912203 - DNA, 15 bp, Homo sapiens
cacctaaaagacaaa

SEQ ID NO: 912204 - DNA, 15 bp, Homo sapiens
gcacctaaaagacaa

SEQ ID NO: 912205 - DNA, 15 bp, Homo sapiens
tgcacctaaaagaca

SEQ ID NO: 912206 - DNA, 15 bp, Homo sapiens
ctgcacctaaaagac

SEQ ID NO: 912207 - DNA, 15 bp, Homo sapiens
cctgcacctaaaaga

SEQ ID NO: 912208 - DNA, 15 bp, Homo sapiens
tcctgcacctaaaag

SEQ ID NO: 912209 - DNA, 15 bp, Homo sapiens
ctcctgcacctaaaa

SEQ ID NO: 912210 - DNA, 15 bp, Homo sapiens
gctcctgcacctaaa

SEQ ID NO: 912211 - DNA, 15 bp, Homo sapiens
agctcctgcacctaa

SEQ ID NO: 912212 - DNA, 15 bp, Homo sapiens
aagctcctgcaccta

SEQ ID NO: 912213 - DNA, 15 bp, Homo sapiens
taagctcctgcacct

SEQ ID NO: 912214 - DNA, 15 bp, Homo sapiens
gtaagctcctgcacc

SEQ ID NO: 912215 - DNA, 15 bp, Homo sapiens
tgtaagctcctgcac

SEQ ID NO: 912216 - DNA, 15 bp, Homo sapiens
ctgtaagctcctgca

SEQ ID NO: 912217 - DNA, 15 bp, Homo sapiens
tctgtaagctcctgc

SEQ ID NO: 912218 - DNA, 15 bp, Homo sapiens
atctgtaagctcctg

SEQ ID NO: 912219 - DNA, 15 bp, Homo sapiens
gatctgtaagctcct

SEQ ID NO: 912220 - DNA, 15 bp, Homo sapiens
agatctgtaagctcc

SEQ ID NO: 912221 - DNA, 15 bp, Homo sapiens
aagatctgtaagctc

SEQ ID NO: 912222 - DNA, 15 bp, Homo sapiens
gaagatctgtaagct

SEQ ID NO: 912223 - DNA, 15 bp, Homo sapiens
agaagatctgtaagc

SEQ ID NO: 912224 - DNA, 15 bp, Homo sapiens
cagaagatctgtaag

SEQ ID NO: 912225 - DNA, 15 bp, Homo sapiens
tcagaagatctgtaa

SEQ ID NO: 912226 - DNA, 15 bp, Homo sapiens
ttcagaagatctgta

SEQ ID NO: 912227 - DNA, 15 bp, Homo sapiens
tttcagaagatctgt

SEQ ID NO: 912228 - DNA, 15 bp, Homo sapiens
atttcagaagatctg

SEQ ID NO: 912229 - DNA, 15 bp, Homo sapiens
gatttcagaagatct

SEQ ID NO: 912230 - DNA, 15 bp, Homo sapiens
tgatttcagaagatc

SEQ ID NO: 912231 - DNA, 15 bp, Homo sapiens
ttgatttcagaagat

SEQ ID NO: 912232 - DNA, 15 bp, Homo sapiens
tttgatttcagaaga

SEQ ID NO: 912233 - DNA, 15 bp, Homo sapiens
ttttgatttcagaag

SEQ ID NO: 912234 - DNA, 15 bp, Homo sapiens
tttttgatttcagaa

SEQ ID NO: 912235 - DNA, 15 bp, Homo sapiens
ttttttgatttcaga

SEQ ID NO: 912236 - DNA, 15 bp, Homo sapiens
attttttgatttcag

SEQ ID NO: 912237 - DNA, 15 bp, Homo sapiens
cattttttgatttca

SEQ ID NO: 912238 - DNA, 15 bp, Homo sapiens
tcattttttgatttc

SEQ ID NO: 912239 - DNA, 15 bp, Homo sapiens
ttcattttttgattt

SEQ ID NO: 912240 - DNA, 15 bp, Homo sapiens
cttcattttttgatt

SEQ ID NO: 912241 - DNA, 15 bp, Homo sapiens
tcttcattttttgat

SEQ ID NO: 912242 - DNA, 15 bp, Homo sapiens
ttcttcattttttga

SEQ ID NO: 912243 - DNA, 15 bp, Homo sapiens
cttcttcattttttg

SEQ ID NO: 912244 - DNA, 15 bp, Homo sapiens
tcttcttcatttttt

SEQ ID NO: 912245 - DNA, 15 bp, Homo sapiens
atcttcttcattttt

SEQ ID NO: 912246 - DNA, 15 bp, Homo sapiens
catcttcttcatttt

SEQ ID NO: 912247 - DNA, 15 bp, Homo sapiens
tcatcttcttcattt

SEQ ID NO: 912248 - DNA, 15 bp, Homo sapiens
atcatcttcttcatt

SEQ ID NO: 912249 - DNA, 15 bp, Homo sapiens
gatcatcttcttcat

SEQ ID NO: 912250 - DNA, 15 bp, Homo sapiens
ggatcatcttcttca

SEQ ID NO: 912251 - DNA, 15 bp, Homo sapiens
tggatcatcttcttc

SEQ ID NO: 912252 - DNA, 15 bp, Homo sapiens
ttggatcatcttctt

SEQ ID NO: 912253 - DNA, 15 bp, Homo sapiens
attggatcatcttct

SEQ ID NO: 912254 - DNA, 15 bp, Homo sapiens
aattggatcatcttc

SEQ ID NO: 912255 - DNA, 15 bp, Homo sapiens
taattggatcatctt

SEQ ID NO: 912256 - DNA, 15 bp, Homo sapiens
ataattggatcatct

SEQ ID NO: 912257 - DNA, 15 bp, Homo sapiens
cataattggatcatc

SEQ ID NO: 912258 - DNA, 15 bp, Homo sapiens
ccataattggatcat

SEQ ID NO: 912259 - DNA, 15 bp, Homo sapiens
accataattggatca

SEQ ID NO: 912260 - DNA, 15 bp, Homo sapiens
taccataattggatc

SEQ ID NO: 912261 - DNA, 15 bp, Homo sapiens
ctaccataattggat

SEQ ID NO: 912262 - DNA, 15 bp, Homo sapiens
gctaccataattgga

SEQ ID NO: 912263 - DNA, 15 bp, Homo sapiens
agctaccataattgg

SEQ ID NO: 912264 - DNA, 15 bp, Homo sapiens
cagctaccataattg

SEQ ID NO: 912265 - DNA, 15 bp, Homo sapiens
acagctaccataatt

SEQ ID NO: 912266 - DNA, 15 bp, Homo sapiens
gacagctaccataat

SEQ ID NO: 912267 - DNA, 15 bp, Homo sapiens
tgacagctaccataa

SEQ ID NO: 912268 - DNA, 15 bp, Homo sapiens
ttgacagctaccata

SEQ ID NO: 912269 - DNA, 15 bp, Homo sapiens
attgacagctaccat

SEQ ID NO: 912270 - DNA, 15 bp, Homo sapiens
cattgacagctacca

SEQ ID NO: 912271 - DNA, 15 bp, Homo sapiens
gcattgacagctacc

SEQ ID NO: 912272 - DNA, 15 bp, Homo sapiens
tgcattgacagctac

SEQ ID NO: 912273 - DNA, 15 bp, Homo sapiens
ttgcattgacagcta

SEQ ID NO: 912274 - DNA, 15 bp, Homo sapiens
tttgcattgacagct

SEQ ID NO: 912275 - DNA, 15 bp, Homo sapiens
ttttgcattgacagc

SEQ ID NO: 912276 - DNA, 15 bp, Homo sapiens
cttttgcattgacag

SEQ ID NO: 912277 - DNA, 15 bp, Homo sapiens
acttttgcattgaca

SEQ ID NO: 912278 - DNA, 15 bp, Homo sapiens
tacttttgcattgac

SEQ ID NO: 912279 - DNA, 15 bp, Homo sapiens
ctacttttgcattga

SEQ ID NO: 912280 - DNA, 15 bp, Homo sapiens
tctacttttgcattg

SEQ ID NO: 912281 - DNA, 15 bp, Homo sapiens
ttctacttttgcatt

SEQ ID NO: 912282 - DNA, 15 bp, Homo sapiens
cttctacttttgcat

SEQ ID NO: 912283 - DNA, 15 bp, Homo sapiens
tcttctacttttgca

SEQ ID NO: 912284 - DNA, 15 bp, Homo sapiens
ttcttctacttttgc

SEQ ID NO: 912285 - DNA, 15 bp, Homo sapiens
attcttctacttttg

SEQ ID NO: 912286 - DNA, 15 bp, Homo sapiens
cattcttctactttt

SEQ ID NO: 912287 - DNA, 15 bp, Homo sapiens
ccattcttctacttt

SEQ ID NO: 912288 - DNA, 15 bp, Homo sapiens
tccattcttctactt

SEQ ID NO: 912289 - DNA, 15 bp, Homo sapiens
ttccattcttctact

SEQ ID NO: 912290 - DNA, 15 bp, Homo sapiens
cttccattcttctac

SEQ ID NO: 912291 - DNA, 15 bp, Homo sapiens
ccttccattcttcta

SEQ ID NO: 912292 - DNA, 15 bp, Homo sapiens
accttccattcttct

SEQ ID NO: 912293 - DNA, 15 bp, Homo sapiens
taccttccattcttc

SEQ ID NO: 912294 - DNA, 15 bp, Homo sapiens
ataccttccattctt

SEQ ID NO: 912295 - DNA, 15 bp, Homo sapiens
aataccttccattct

SEQ ID NO: 912296 - DNA, 15 bp, Homo sapiens
aaataccttccattc

SEQ ID NO: 912297 - DNA, 15 bp, Homo sapiens
aaaataccttccatt

SEQ ID NO: 912298 - DNA, 15 bp, Homo sapiens
aaaaataccttccat

SEQ ID NO: 912299 - DNA, 15 bp, Homo sapiens
aaaaaataccttcca

SEQ ID NO: 912300 - DNA, 15 bp, Homo sapiens
aaaaaaataccttcc

SEQ ID NO: 912301 - DNA, 15 bp, Homo sapiens
aaaaaaaataccttc

SEQ ID NO: 912302 - DNA, 15 bp, Homo sapiens
gaaaaaaaatacctt

SEQ ID NO: 912303 - DNA, 15 bp, Homo sapiens
tgaaaaaaaatacct

SEQ ID NO: 912304 - DNA, 15 bp, Homo sapiens
ttgaaaaaaaatacc

SEQ ID NO: 912305 - DNA, 15 bp, Homo sapiens
attgaaaaaaaatac

SEQ ID NO: 912306 - DNA, 15 bp, Homo sapiens
aattgaaaaaaaata

SEQ ID NO: 912307 - DNA, 15 bp, Homo sapiens
caattgaaaaaaaat

SEQ ID NO: 912308 - DNA, 15 bp, Homo sapiens
tcaattgaaaaaaaa

SEQ ID NO: 912309 - DNA, 15 bp, Homo sapiens
gtcaattgaaaaaaa

SEQ ID NO: 912310 - DNA, 15 bp, Homo sapiens
tgtcaattgaaaaaa

SEQ ID NO: 912311 - DNA, 15 bp, Homo sapiens
atgtcaattgaaaaa

SEQ ID NO: 912312 - DNA, 15 bp, Homo sapiens
tatgtcaattgaaaa

SEQ ID NO: 912313 - DNA, 15 bp, Homo sapiens
ttatgtcaattgaaa

SEQ ID NO: 912314 - DNA, 15 bp, Homo sapiens
attatgtcaattgaa

SEQ ID NO: 912315 - DNA, 15 bp, Homo sapiens
tattatgtcaattga

SEQ ID NO: 912316 - DNA, 15 bp, Homo sapiens
ttattatgtcaattg

SEQ ID NO: 912317 - DNA, 15 bp, Homo sapiens
gttattatgtcaatt

SEQ ID NO: 912318 - DNA, 15 bp, Homo sapiens
agttattatgtcaat

SEQ ID NO: 912319 - DNA, 15 bp, Homo sapiens
aagttattatgtcaa

SEQ ID NO: 912320 - DNA, 15 bp, Homo sapiens
aaagttattatgtca

SEQ ID NO: 912321 - DNA, 15 bp, Homo sapiens
aaaagttattatgtc

SEQ ID NO: 912322 - DNA, 15 bp, Homo sapiens
aaaaagttattatgt

SEQ ID NO: 912323 - DNA, 15 bp, Homo sapiens
gaaaaagttattatg

SEQ ID NO: 912324 - DNA, 15 bp, Homo sapiens
agaaaaagttattat

SEQ ID NO: 912325 - DNA, 15 bp, Homo sapiens
aagaaaaagttatta

SEQ ID NO: 912326 - DNA, 15 bp, Homo sapiens
aaagaaaaagttatt

SEQ ID NO: 912327 - DNA, 15 bp, Homo sapiens
aaaagaaaaagttat

SEQ ID NO: 912328 - DNA, 15 bp, Homo sapiens
aaaaagaaaaagtta

SEQ ID NO: 912329 - DNA, 15 bp, Homo sapiens
caaaaagaaaaagtt

SEQ ID NO: 912330 - DNA, 15 bp, Homo sapiens
acaaaaagaaaaagt

SEQ ID NO: 912331 - DNA, 15 bp, Homo sapiens
tacaaaaagaaaaag

SEQ ID NO: 912332 - DNA, 15 bp, Homo sapiens
atacaaaaagaaaaa

SEQ ID NO: 912333 - DNA, 15 bp, Homo sapiens
aatacaaaaagaaaa

SEQ ID NO: 912334 - DNA, 15 bp, Homo sapiens
aaatacaaaaagaaa

SEQ ID NO: 912335 - DNA, 15 bp, Homo sapiens
aaaatacaaaaagaa

SEQ ID NO: 912336 - DNA, 15 bp, Homo sapiens
taaaatacaaaaaga

SEQ ID NO: 912337 - DNA, 15 bp, Homo sapiens
ctaaaatacaaaaag

SEQ ID NO: 912338 - DNA, 15 bp, Homo sapiens
tctaaaatacaaaaa

SEQ ID NO: 912339 - DNA, 15 bp, Homo sapiens
atctaaaatacaaaa

SEQ ID NO: 912340 - DNA, 15 bp, Homo sapiens
aatctaaaatacaaa

SEQ ID NO: 912341 - DNA, 15 bp, Homo sapiens
aaatctaaaatacaa

SEQ ID NO: 912342 - DNA, 15 bp, Homo sapiens
taaatctaaaataca

SEQ ID NO: 912343 - DNA, 15 bp, Homo sapiens
ttaaatctaaaatac

SEQ ID NO: 912344 - DNA, 15 bp, Homo sapiens
tttaaatctaaaata

SEQ ID NO: 912345 - DNA, 15 bp, Homo sapiens
atttaaatctaaaat

SEQ ID NO: 912346 - DNA, 15 bp, Homo sapiens
aatttaaatctaaaa

SEQ ID NO: 912347 - DNA, 15 bp, Homo sapiens
aaatttaaatctaaa

SEQ ID NO: 912348 - DNA, 15 bp, Homo sapiens
aaaatttaaatctaa

SEQ ID NO: 912349 - DNA, 15 bp, Homo sapiens
taaaatttaaatcta

SEQ ID NO: 912350 - DNA, 15 bp, Homo sapiens
ctaaaatttaaatct

SEQ ID NO: 912351 - DNA, 15 bp, Homo sapiens
actaaaatttaaatc

SEQ ID NO: 912352 - DNA, 15 bp, Homo sapiens
gactaaaatttaaat

SEQ ID NO: 912353 - DNA, 15 bp, Homo sapiens
agactaaaatttaaa

SEQ ID NO: 912354 - DNA, 15 bp, Homo sapiens
aagactaaaatttaa

SEQ ID NO: 912355 - DNA, 15 bp, Homo sapiens
taagactaaaattta

SEQ ID NO: 912356 - DNA, 15 bp, Homo sapiens
ataagactaaaattt

SEQ ID NO: 912357 - DNA, 15 bp, Homo sapiens
aataagactaaaatt

SEQ ID NO: 912358 - DNA, 15 bp, Homo sapiens
aaataagactaaaat

SEQ ID NO: 912359 - DNA, 15 bp, Homo sapiens
aaaataagactaaaa

SEQ ID NO: 912360 - DNA, 15 bp, Homo sapiens
aaaaataagactaaa

SEQ ID NO: 912361 - DNA, 15 bp, Homo sapiens
gaaaaataagactaa

SEQ ID NO: 912362 - DNA, 15 bp, Homo sapiens
agaaaaataagacta

SEQ ID NO: 912363 - DNA, 15 bp, Homo sapiens
aagaaaaataagact

SEQ ID NO: 912364 - DNA, 15 bp, Homo sapiens
aaagaaaaataagac

SEQ ID NO: 912365 - DNA, 15 bp, Homo sapiens
taaagaaaaataaga

SEQ ID NO: 912366 - DNA, 15 bp, Homo sapiens
ttaaagaaaaataag

SEQ ID NO: 912367 - DNA, 15 bp, Homo sapiens
tttaaagaaaaataa

SEQ ID NO: 912368 - DNA, 15 bp, Homo sapiens
atttaaagaaaaata

SEQ ID NO: 912369 - DNA, 15 bp, Homo sapiens
catttaaagaaaaat

SEQ ID NO: 912370 - DNA, 15 bp, Homo sapiens
acatttaaagaaaaa

SEQ ID NO: 912371 - DNA, 15 bp, Homo sapiens
gacatttaaagaaaa

SEQ ID NO: 912372 - DNA, 15 bp, Homo sapiens
agacatttaaagaaa

SEQ ID NO: 912373 - DNA, 15 bp, Homo sapiens
aagacatttaaagaa

SEQ ID NO: 912374 - DNA, 15 bp, Homo sapiens
taagacatttaaaga

SEQ ID NO: 912375 - DNA, 15 bp, Homo sapiens
ataagacatttaaag

SEQ ID NO: 912376 - DNA, 15 bp, Homo sapiens
tataagacatttaaa

SEQ ID NO: 912377 - DNA, 15 bp, Homo sapiens
gtataagacatttaa

SEQ ID NO: 912378 - DNA, 15 bp, Homo sapiens
agtataagacattta

SEQ ID NO: 912379 - DNA, 15 bp, Homo sapiens
cagtataagacattt

SEQ ID NO: 912380 - DNA, 15 bp, Homo sapiens
ccagtataagacatt

SEQ ID NO: 912381 - DNA, 15 bp, Homo sapiens
accagtataagacat

SEQ ID NO: 912382 - DNA, 15 bp, Homo sapiens
aaccagtataagaca

SEQ ID NO: 912383 - DNA, 15 bp, Homo sapiens
aaaccagtataagac

SEQ ID NO: 912384 - DNA, 15 bp, Homo sapiens
taaaccagtataaga

SEQ ID NO: 912385 - DNA, 15 bp, Homo sapiens
ataaaccagtataag

SEQ ID NO: 912386 - DNA, 15 bp, Homo sapiens
tataaaccagtataa

SEQ ID NO: 912387 - DNA, 15 bp, Homo sapiens
ttataaaccagtata

SEQ ID NO: 912388 - DNA, 15 bp, Homo sapiens
gttataaaccagtat

SEQ ID NO: 912389 - DNA, 15 bp, Homo sapiens
tgttataaaccagta

SEQ ID NO: 912390 - DNA, 15 bp, Homo sapiens
gtgttataaaccagt

SEQ ID NO: 912391 - DNA, 15 bp, Homo sapiens
cgtgttataaaccag

SEQ ID NO: 912392 - DNA, 15 bp, Homo sapiens
acgtgttataaacca

SEQ ID NO: 912393 - DNA, 15 bp, Homo sapiens
aacgtgttataaacc

SEQ ID NO: 912394 - DNA, 15 bp, Homo sapiens
aaacgtgttataaac

SEQ ID NO: 912395 - DNA, 15 bp, Homo sapiens
taaacgtgttataaa

SEQ ID NO: 912396 - DNA, 15 bp, Homo sapiens
ataaacgtgttataa

SEQ ID NO: 912397 - DNA, 15 bp, Homo sapiens
aataaacgtgttata

SEQ ID NO: 912398 - DNA, 15 bp, Homo sapiens
taataaacgtgttat

SEQ ID NO: 912399 - DNA, 15 bp, Homo sapiens
ctaataaacgtgtta

SEQ ID NO: 912400 - DNA, 15 bp, Homo sapiens
cctaataaacgtgtt

SEQ ID NO: 912401 - DNA, 15 bp, Homo sapiens
ccctaataaacgtgt

SEQ ID NO: 912402 - DNA, 15 bp, Homo sapiens
accctaataaacgtg

SEQ ID NO: 912403 - DNA, 15 bp, Homo sapiens
aaccctaataaacgt

SEQ ID NO: 912404 - DNA, 15 bp, Homo sapiens
aaaccctaataaacg

SEQ ID NO: 912405 - DNA, 15 bp, Homo sapiens
aaaaccctaataaac

SEQ ID NO: 912406 - DNA, 15 bp, Homo sapiens
aaaaaccctaataaa

SEQ ID NO: 912407 - DNA, 15 bp, Homo sapiens
taaaaaccctaataa

SEQ ID NO: 912408 - DNA, 15 bp, Homo sapiens
ttaaaaaccctaata

SEQ ID NO: 912409 - DNA, 15 bp, Homo sapiens
tttaaaaaccctaat

SEQ ID NO: 912410 - DNA, 15 bp, Homo sapiens
gtttaaaaaccctaa

SEQ ID NO: 912411 - DNA, 15 bp, Homo sapiens
tgtttaaaaacccta

SEQ ID NO: 912412 - DNA, 15 bp, Homo sapiens
atgtttaaaaaccct

SEQ ID NO: 912413 - DNA, 15 bp, Homo sapiens
tatgtttaaaaaccc

SEQ ID NO: 912414 - DNA, 15 bp, Homo sapiens
ttatgtttaaaaacc

SEQ ID NO: 912415 - DNA, 15 bp, Homo sapiens
cttatgtttaaaaac

SEQ ID NO: 912416 - DNA, 15 bp, Homo sapiens
acttatgtttaaaaa

SEQ ID NO: 912417 - DNA, 15 bp, Homo sapiens
aacttatgtttaaaa

SEQ ID NO: 912418 - DNA, 15 bp, Homo sapiens
aaacttatgtttaaa

SEQ ID NO: 912419 - DNA, 15 bp, Homo sapiens
taaacttatgtttaa

SEQ ID NO: 912420 - DNA, 15 bp, Homo sapiens
ataaacttatgttta

SEQ ID NO: 912421 - DNA, 15 bp, Homo sapiens
aataaacttatgttt

SEQ ID NO: 912422 - DNA, 15 bp, Homo sapiens
aaataaacttatgtt

SEQ ID NO: 912423 - DNA, 15 bp, Homo sapiens
aaaataaacttatgt

SEQ ID NO: 912424 - DNA, 15 bp, Homo sapiens
taaaataaacttatg

SEQ ID NO: 912425 - DNA, 15 bp, Homo sapiens
ataaaataaacttat

SEQ ID NO: 912426 - DNA, 15 bp, Homo sapiens
aataaaataaactta

SEQ ID NO: 912427 - DNA, 15 bp, Homo sapiens
aaataaaataaactt

SEQ ID NO: 912428 - DNA, 15 bp, Homo sapiens
taaataaaataaact

SEQ ID NO: 912429 - DNA, 15 bp, Homo sapiens
ataaataaaataaac

SEQ ID NO: 912430 - DNA, 15 bp, Homo sapiens
aataaataaaataaa

SEQ ID NO: 912431 - DNA, 15 bp, Homo sapiens
caataaataaaataa

SEQ ID NO: 912432 - DNA, 15 bp, Homo sapiens
ccaataaataaaata

SEQ ID NO: 912433 - DNA, 15 bp, Homo sapiens
accaataaataaaat

SEQ ID NO: 912434 - DNA, 15 bp, Homo sapiens
aaccaataaataaaa

SEQ ID NO: 912435 - DNA, 15 bp, Homo sapiens
taaccaataaataaa

SEQ ID NO: 912436 - DNA, 15 bp, Homo sapiens
ctaaccaataaataa

SEQ ID NO: 912437 - DNA, 15 bp, Homo sapiens
tctaaccaataaata

SEQ ID NO: 912438 - DNA, 15 bp, Homo sapiens
ttctaaccaataaat

SEQ ID NO: 912439 - DNA, 15 bp, Homo sapiens
tttctaaccaataaa

SEQ ID NO: 912440 - DNA, 15 bp, Homo sapiens
ttttctaaccaataa

SEQ ID NO: 912441 - DNA, 15 bp, Homo sapiens
cttttctaaccaata

SEQ ID NO: 912442 - DNA, 15 bp, Homo sapiens
gcttttctaaccaat

SEQ ID NO: 912443 - DNA, 15 bp, Homo sapiens
agcttttctaaccaa

SEQ ID NO: 912444 - DNA, 15 bp, Homo sapiens
gagcttttctaacca

SEQ ID NO: 912445 - DNA, 15 bp, Homo sapiens
agagcttttctaacc

SEQ ID NO: 912446 - DNA, 15 bp, Homo sapiens
tagagcttttctaac

SEQ ID NO: 912447 - DNA, 15 bp, Homo sapiens
ctagagcttttctaa

SEQ ID NO: 912448 - DNA, 15 bp, Homo sapiens
tctagagcttttcta

SEQ ID NO: 912449 - DNA, 15 bp, Homo sapiens
ttctagagcttttct

SEQ ID NO: 912450 - DNA, 15 bp, Homo sapiens
gttctagagcttttc

SEQ ID NO: 912451 - DNA, 15 bp, Homo sapiens
agttctagagctttt

SEQ ID NO: 912452 - DNA, 15 bp, Homo sapiens
cagttctagagcttt

SEQ ID NO: 912453 - DNA, 15 bp, Homo sapiens
acagttctagagctt

SEQ ID NO: 912454 - DNA, 15 bp, Homo sapiens
gacagttctagagct

SEQ ID NO: 912455 - DNA, 15 bp, Homo sapiens
ggacagttctagagc

SEQ ID NO: 912456 - DNA, 15 bp, Homo sapiens
aggacagttctagag

SEQ ID NO: 912457 - DNA, 15 bp, Homo sapiens
aaggacagttctaga

SEQ ID NO: 912458 - DNA, 15 bp, Homo sapiens
aaaggacagttctag

SEQ ID NO: 912459 - DNA, 15 bp, Homo sapiens
aaaaggacagttcta

SEQ ID NO: 912460 - DNA, 15 bp, Homo sapiens
aaaaaggacagttct

SEQ ID NO: 912461 - DNA, 15 bp, Homo sapiens
caaaaaggacagttc

SEQ ID NO: 912462 - DNA, 15 bp, Homo sapiens
tcaaaaaggacagtt

SEQ ID NO: 912463 - DNA, 15 bp, Homo sapiens
atcaaaaaggacagt

SEQ ID NO: 912464 - DNA, 15 bp, Homo sapiens
gatcaaaaaggacag

SEQ ID NO: 912465 - DNA, 15 bp, Homo sapiens
agatcaaaaaggaca

SEQ ID NO: 912466 - DNA, 15 bp, Homo sapiens
gagatcaaaaaggac

SEQ ID NO: 912467 - DNA, 15 bp, Homo sapiens
agagatcaaaaagga

SEQ ID NO: 912468 - DNA, 15 bp, Homo sapiens
tagagatcaaaaagg

SEQ ID NO: 912469 - DNA, 15 bp, Homo sapiens
ctagagatcaaaaag

SEQ ID NO: 912470 - DNA, 15 bp, Homo sapiens
gctagagatcaaaaa

SEQ ID NO: 912471 - DNA, 15 bp, Homo sapiens
agctagagatcaaaa

SEQ ID NO: 912472 - DNA, 15 bp, Homo sapiens
tagctagagatcaaa

SEQ ID NO: 912473 - DNA, 15 bp, Homo sapiens
ttagctagagatcaa

SEQ ID NO: 912474 - DNA, 15 bp, Homo sapiens
attagctagagatca

SEQ ID NO: 912475 - DNA, 15 bp, Homo sapiens
aattagctagagatc

SEQ ID NO: 912476 - DNA, 15 bp, Homo sapiens
aaattagctagagat

SEQ ID NO: 912477 - DNA, 15 bp, Homo sapiens
caaattagctagaga

SEQ ID NO: 912478 - DNA, 15 bp, Homo sapiens
acaaattagctagag

SEQ ID NO: 912479 - DNA, 15 bp, Homo sapiens
aacaaattagctaga

SEQ ID NO: 912480 - DNA, 15 bp, Homo sapiens
taacaaattagctag

SEQ ID NO: 912481 - DNA, 15 bp, Homo sapiens
ataacaaattagcta

SEQ ID NO: 912482 - DNA, 15 bp, Homo sapiens
aataacaaattagct

SEQ ID NO: 912483 - DNA, 15 bp, Homo sapiens
caataacaaattagc

SEQ ID NO: 912484 - DNA, 15 bp, Homo sapiens
tcaataacaaattag

SEQ ID NO: 912485 - DNA, 15 bp, Homo sapiens
ttcaataacaaatta

SEQ ID NO: 912486 - DNA, 15 bp, Homo sapiens
attcaataacaaatt

SEQ ID NO: 912487 - DNA, 15 bp, Homo sapiens
cattcaataacaaat

SEQ ID NO: 912488 - DNA, 15 bp, Homo sapiens
tcattcaataacaaa

SEQ ID NO: 912489 - DNA, 15 bp, Homo sapiens
gtcattcaataacaa

SEQ ID NO: 912490 - DNA, 15 bp, Homo sapiens
ggtcattcaataaca

SEQ ID NO: 912491 - DNA, 15 bp, Homo sapiens
aggtcattcaataac

SEQ ID NO: 912492 - DNA, 15 bp, Homo sapiens
gaggtcattcaataa

SEQ ID NO: 912493 - DNA, 15 bp, Homo sapiens
agaggtcattcaata

SEQ ID NO: 912494 - DNA, 15 bp, Homo sapiens
aagaggtcattcaat

SEQ ID NO: 912495 - DNA, 15 bp, Homo sapiens
aaagaggtcattcaa

SEQ ID NO: 912496 - DNA, 15 bp, Homo sapiens
gaaagaggtcattca

SEQ ID NO: 912497 - DNA, 15 bp, Homo sapiens
tgaaagaggtcattc

SEQ ID NO: 912498 - DNA, 15 bp, Homo sapiens
gtgaaagaggtcatt

SEQ ID NO: 912499 - DNA, 15 bp, Homo sapiens
tgtgaaagaggtcat

SEQ ID NO: 912500 - DNA, 15 bp, Homo sapiens
atgtgaaagaggtca

SEQ ID NO: 912501 - DNA, 15 bp, Homo sapiens
gatgtgaaagaggtc

SEQ ID NO: 912502 - DNA, 15 bp, Homo sapiens
tgatgtgaaagaggt

SEQ ID NO: 912503 - DNA, 15 bp, Homo sapiens
ttgatgtgaaagagg

SEQ ID NO: 912504 - DNA, 15 bp, Homo sapiens
attgatgtgaaagag

SEQ ID NO: 912505 - DNA, 15 bp, Homo sapiens
cattgatgtgaaaga

SEQ ID NO: 912506 - DNA, 15 bp, Homo sapiens
tcattgatgtgaaag

SEQ ID NO: 912507 - DNA, 15 bp, Homo sapiens
ctcattgatgtgaaa

SEQ ID NO: 912508 - DNA, 15 bp, Homo sapiens
actcattgatgtgaa

SEQ ID NO: 912509 - DNA, 15 bp, Homo sapiens
aactcattgatgtga

SEQ ID NO: 912510 - DNA, 15 bp, Homo sapiens
aaactcattgatgtg

SEQ ID NO: 912511 - DNA, 15 bp, Homo sapiens
taaactcattgatgt

SEQ ID NO: 912512 - DNA, 15 bp, Homo sapiens
ttaaactcattgatg

SEQ ID NO: 912513 - DNA, 15 bp, Homo sapiens
gttaaactcattgat

SEQ ID NO: 912514 - DNA, 15 bp, Homo sapiens
agttaaactcattga

SEQ ID NO: 912515 - DNA, 15 bp, Homo sapiens
aagttaaactcattg

SEQ ID NO: 912516 - DNA, 15 bp, Homo sapiens
aaagttaaactcatt

SEQ ID NO: 912517 - DNA, 15 bp, Homo sapiens
taaagttaaactcat

SEQ ID NO: 912518 - DNA, 15 bp, Homo sapiens
ttaaagttaaactca

SEQ ID NO: 912519 - DNA, 15 bp, Homo sapiens
tttaaagttaaactc

SEQ ID NO: 912520 - DNA, 15 bp, Homo sapiens
gtttaaagttaaact

SEQ ID NO: 912521 - DNA, 15 bp, Homo sapiens
agtttaaagttaaac

SEQ ID NO: 912522 - DNA, 15 bp, Homo sapiens
aagtttaaagttaaa

SEQ ID NO: 912523 - DNA, 15 bp, Homo sapiens
aaagtttaaagttaa

SEQ ID NO: 912524 - DNA, 15 bp, Homo sapiens
aaaagtttaaagtta

SEQ ID NO: 912525 - DNA, 15 bp, Homo sapiens
aaaaagtttaaagtt

SEQ ID NO: 912526 - DNA, 15 bp, Homo sapiens
caaaaagtttaaagt

SEQ ID NO: 912527 - DNA, 15 bp, Homo sapiens
tcaaaaagtttaaag

SEQ ID NO: 912528 - DNA, 15 bp, Homo sapiens
atcaaaaagtttaaa

SEQ ID NO: 912529 - DNA, 15 bp, Homo sapiens
tatcaaaaagtttaa

SEQ ID NO: 912530 - DNA, 15 bp, Homo sapiens
ctatcaaaaagttta

SEQ ID NO: 912531 - DNA, 15 bp, Homo sapiens
tctatcaaaaagttt

SEQ ID NO: 912532 - DNA, 15 bp, Homo sapiens
ttctatcaaaaagtt

SEQ ID NO: 912533 - DNA, 15 bp, Homo sapiens
cttctatcaaaaagt

SEQ ID NO: 912534 - DNA, 15 bp, Homo sapiens
acttctatcaaaaag

SEQ ID NO: 912535 - DNA, 15 bp, Homo sapiens
gacttctatcaaaaa

SEQ ID NO: 912536 - DNA, 15 bp, Homo sapiens
agacttctatcaaaa

SEQ ID NO: 912537 - DNA, 15 bp, Homo sapiens
tagacttctatcaaa

SEQ ID NO: 912538 - DNA, 15 bp, Homo sapiens
ttagacttctatcaa

SEQ ID NO: 912539 - DNA, 15 bp, Homo sapiens
gttagacttctatca

SEQ ID NO: 912540 - DNA, 15 bp, Homo sapiens
agttagacttctatc

SEQ ID NO: 912541 - DNA, 15 bp, Homo sapiens
gagttagacttctat

SEQ ID NO: 912542 - DNA, 15 bp, Homo sapiens
ggagttagacttcta

SEQ ID NO: 912543 - DNA, 15 bp, Homo sapiens
tggagttagacttct

SEQ ID NO: 912544 - DNA, 15 bp, Homo sapiens
ttggagttagacttc

SEQ ID NO: 912545 - DNA, 15 bp, Homo sapiens
tttggagttagactt

SEQ ID NO: 912546 - DNA, 15 bp, Homo sapiens
ttttggagttagact

SEQ ID NO: 912547 - DNA, 15 bp, Homo sapiens
attttggagttagac

SEQ ID NO: 912548 - DNA, 15 bp, Homo sapiens
tattttggagttaga

SEQ ID NO: 912549 - DNA, 15 bp, Homo sapiens
atattttggagttag

SEQ ID NO: 912550 - DNA, 15 bp, Homo sapiens
tatattttggagtta

SEQ ID NO: 912551 - DNA, 15 bp, Homo sapiens
atatattttggagtt

SEQ ID NO: 912552 - DNA, 15 bp, Homo sapiens
aatatattttggagt

SEQ ID NO: 912553 - DNA, 15 bp, Homo sapiens
aaatatattttggag

SEQ ID NO: 912554 - DNA, 15 bp, Homo sapiens
caaatatattttgga

SEQ ID NO: 912555 - DNA, 15 bp, Homo sapiens
ccaaatatattttgg

SEQ ID NO: 912556 - DNA, 15 bp, Homo sapiens
gccaaatatattttg

SEQ ID NO: 912557 - DNA, 15 bp, Homo sapiens
tgccaaatatatttt

SEQ ID NO: 912558 - DNA, 15 bp, Homo sapiens
atgccaaatatattt

SEQ ID NO: 912559 - DNA, 15 bp, Homo sapiens
gatgccaaatatatt

SEQ ID NO: 912560 - DNA, 15 bp, Homo sapiens
agatgccaaatatat

SEQ ID NO: 912561 - DNA, 15 bp, Homo sapiens
tagatgccaaatata

SEQ ID NO: 912562 - DNA, 15 bp, Homo sapiens
ttagatgccaaatat

SEQ ID NO: 912563 - DNA, 15 bp, Homo sapiens
tttagatgccaaata

SEQ ID NO: 912564 - DNA, 15 bp, Homo sapiens
ttttagatgccaaat

SEQ ID NO: 912565 - DNA, 15 bp, Homo sapiens
attttagatgccaaa

SEQ ID NO: 912566 - DNA, 15 bp, Homo sapiens
tattttagatgccaa

SEQ ID NO: 912567 - DNA, 15 bp, Homo sapiens
atattttagatgcca

SEQ ID NO: 912568 - DNA, 15 bp, Homo sapiens
tatattttagatgcc

SEQ ID NO: 912569 - DNA, 15 bp, Homo sapiens
atatattttagatgc

SEQ ID NO: 912570 - DNA, 15 bp, Homo sapiens
tatatattttagatg

SEQ ID NO: 912571 - DNA, 15 bp, Homo sapiens
ttatatattttagat

SEQ ID NO: 912572 - DNA, 15 bp, Homo sapiens
attatatattttaga

SEQ ID NO: 912573 - DNA, 15 bp, Homo sapiens
aattatatattttag

SEQ ID NO: 912574 - DNA, 15 bp, Homo sapiens
gaattatatatttta

SEQ ID NO: 912575 - DNA, 15 bp, Homo sapiens
cgaattatatatttt

SEQ ID NO: 912576 - DNA, 15 bp, Homo sapiens
tcgaattatatattt

SEQ ID NO: 912577 - DNA, 15 bp, Homo sapiens
ttcgaattatatatt

SEQ ID NO: 912578 - DNA, 15 bp, Homo sapiens
tttcgaattatatat

SEQ ID NO: 912579 - DNA, 15 bp, Homo sapiens
atttcgaattatata

SEQ ID NO: 912580 - DNA, 15 bp, Homo sapiens
tatttcgaattatat

SEQ ID NO: 912581 - DNA, 15 bp, Homo sapiens
atatttcgaattata

SEQ ID NO: 912582 - DNA, 15 bp, Homo sapiens
tatatttcgaattat

SEQ ID NO: 912583 - DNA, 15 bp, Homo sapiens
ttatatttcgaatta

SEQ ID NO: 912584 - DNA, 15 bp, Homo sapiens
attatatttcgaatt

SEQ ID NO: 912585 - DNA, 15 bp, Homo sapiens
aattatatttcgaat

SEQ ID NO: 912586 - DNA, 15 bp, Homo sapiens
aaattatatttcgaa

SEQ ID NO: 912587 - DNA, 15 bp, Homo sapiens
taaattatatttcga

SEQ ID NO: 912588 - DNA, 15 bp, Homo sapiens
ttaaattatatttcg

SEQ ID NO: 912589 - DNA, 15 bp, Homo sapiens
tttaaattatatttc

SEQ ID NO: 912590 - DNA, 15 bp, Homo sapiens
atttaaattatattt

SEQ ID NO: 912591 - DNA, 15 bp, Homo sapiens
aatttaaattatatt

SEQ ID NO: 912592 - DNA, 15 bp, Homo sapiens
aaatttaaattatat

SEQ ID NO: 912593 - DNA, 15 bp, Homo sapiens
aaaatttaaattata

SEQ ID NO: 912594 - DNA, 15 bp, Homo sapiens
aaaaatttaaattat

SEQ ID NO: 912595 - DNA, 15 bp, Homo sapiens
aaaaaatttaaatta

SEQ ID NO: 912596 - DNA, 15 bp, Homo sapiens
aaaaaaatttaaatt

SEQ ID NO: 912597 - DNA, 15 bp, Homo sapiens
taaaaaaatttaaat

SEQ ID NO: 912598 - DNA, 15 bp, Homo sapiens
gtaaaaaaatttaaa

SEQ ID NO: 912599 - DNA, 15 bp, Homo sapiens
agtaaaaaaatttaa

SEQ ID NO: 912600 - DNA, 15 bp, Homo sapiens
aagtaaaaaaattta

SEQ ID NO: 912601 - DNA, 15 bp, Homo sapiens
taagtaaaaaaattt

SEQ ID NO: 912602 - DNA, 15 bp, Homo sapiens
ttaagtaaaaaaatt

SEQ ID NO: 912603 - DNA, 15 bp, Homo sapiens
gttaagtaaaaaaat

SEQ ID NO: 912604 - DNA, 15 bp, Homo sapiens
agttaagtaaaaaaa

SEQ ID NO: 912605 - DNA, 15 bp, Homo sapiens
gagttaagtaaaaaa

SEQ ID NO: 912606 - DNA, 15 bp, Homo sapiens
tgagttaagtaaaaa

SEQ ID NO: 912607 - DNA, 15 bp, Homo sapiens
atgagttaagtaaaa

SEQ ID NO: 912608 - DNA, 15 bp, Homo sapiens
tatgagttaagtaaa

SEQ ID NO: 912609 - DNA, 15 bp, Homo sapiens
ctatgagttaagtaa

SEQ ID NO: 912610 - DNA, 15 bp, Homo sapiens
actatgagttaagta

SEQ ID NO: 912611 - DNA, 15 bp, Homo sapiens
aactatgagttaagt

SEQ ID NO: 912612 - DNA, 15 bp, Homo sapiens
taactatgagttaag

SEQ ID NO: 912613 - DNA, 15 bp, Homo sapiens
gtaactatgagttaa

SEQ ID NO: 912614 - DNA, 15 bp, Homo sapiens
ggtaactatgagtta

SEQ ID NO: 912615 - DNA, 15 bp, Homo sapiens
aggtaactatgagtt

SEQ ID NO: 912616 - DNA, 15 bp, Homo sapiens
aaggtaactatgagt

SEQ ID NO: 912617 - DNA, 15 bp, Homo sapiens
taaggtaactatgag

SEQ ID NO: 912618 - DNA, 15 bp, Homo sapiens
ataaggtaactatga

SEQ ID NO: 912619 - DNA, 15 bp, Homo sapiens
tataaggtaactatg

SEQ ID NO: 912620 - DNA, 15 bp, Homo sapiens
atataaggtaactat

SEQ ID NO: 912621 - DNA, 15 bp, Homo sapiens
tatataaggtaacta

SEQ ID NO: 912622 - DNA, 15 bp, Homo sapiens
gtatataaggtaact

SEQ ID NO: 912623 - DNA, 15 bp, Homo sapiens
tgtatataaggtaac

SEQ ID NO: 912624 - DNA, 15 bp, Homo sapiens
atgtatataaggtaa

SEQ ID NO: 912625 - DNA, 15 bp, Homo sapiens
aatgtatataaggta

SEQ ID NO: 912626 - DNA, 15 bp, Homo sapiens
taatgtatataaggt

SEQ ID NO: 912627 - DNA, 15 bp, Homo sapiens
ctaatgtatataagg

SEQ ID NO: 912628 - DNA, 15 bp, Homo sapiens
actaatgtatataag

SEQ ID NO: 912629 - DNA, 15 bp, Homo sapiens
aactaatgtatataa

SEQ ID NO: 912630 - DNA, 15 bp, Homo sapiens
taactaatgtatata

SEQ ID NO: 912631 - DNA, 15 bp, Homo sapiens
ttaactaatgtatat

SEQ ID NO: 912632 - DNA, 15 bp, Homo sapiens
tttaactaatgtata

SEQ ID NO: 912633 - DNA, 15 bp, Homo sapiens
atttaactaatgtat

SEQ ID NO: 912634 - DNA, 15 bp, Homo sapiens
tatttaactaatgta

SEQ ID NO: 912635 - DNA, 15 bp, Homo sapiens
ctatttaactaatgt

SEQ ID NO: 912636 - DNA, 15 bp, Homo sapiens
actatttaactaatg

SEQ ID NO: 912637 - DNA, 15 bp, Homo sapiens
aactatttaactaat

SEQ ID NO: 912638 - DNA, 15 bp, Homo sapiens
caactatttaactaa

SEQ ID NO: 912639 - DNA, 15 bp, Homo sapiens
gcaactatttaacta

SEQ ID NO: 912640 - DNA, 15 bp, Homo sapiens
tgcaactatttaact

SEQ ID NO: 912641 - DNA, 15 bp, Homo sapiens
ctgcaactatttaac

SEQ ID NO: 912642 - DNA, 15 bp, Homo sapiens
cctgcaactatttaa

SEQ ID NO: 912643 - DNA, 15 bp, Homo sapiens
acctgcaactattta

SEQ ID NO: 912644 - DNA, 15 bp, Homo sapiens
aacctgcaactattt

SEQ ID NO: 912645 - DNA, 15 bp, Homo sapiens
aaacctgcaactatt

SEQ ID NO: 912646 - DNA, 15 bp, Homo sapiens
taaacctgcaactat

SEQ ID NO: 912647 - DNA, 15 bp, Homo sapiens
ttaaacctgcaacta

SEQ ID NO: 912648 - DNA, 15 bp, Homo sapiens
attaaacctgcaact

SEQ ID NO: 912649 - DNA, 15 bp, Homo sapiens
aattaaacctgcaac

SEQ ID NO: 912650 - DNA, 15 bp, Homo sapiens
aaattaaacctgcaa

SEQ ID NO: 912651 - DNA, 15 bp, Homo sapiens
aaaattaaacctgca

SEQ ID NO: 912652 - DNA, 15 bp, Homo sapiens
taaaattaaacctgc

SEQ ID NO: 912653 - DNA, 15 bp, Homo sapiens
ctaaaattaaacctg

SEQ ID NO: 912654 - DNA, 15 bp, Homo sapiens
actaaaattaaacct

SEQ ID NO: 912655 - DNA, 15 bp, Homo sapiens
aactaaaattaaacc

SEQ ID NO: 912656 - DNA, 15 bp, Homo sapiens
aaactaaaattaaac

SEQ ID NO: 912657 - DNA, 15 bp, Homo sapiens
aaaactaaaattaaa

SEQ ID NO: 912658 - DNA, 15 bp, Homo sapiens
aaaaactaaaattaa

SEQ ID NO: 912659 - DNA, 15 bp, Homo sapiens
gaaaaactaaaatta

SEQ ID NO: 912660 - DNA, 15 bp, Homo sapiens
agaaaaactaaaatt

SEQ ID NO: 912661 - DNA, 15 bp, Homo sapiens
tagaaaaactaaaat

SEQ ID NO: 912662 - DNA, 15 bp, Homo sapiens
ttagaaaaactaaaa

SEQ ID NO: 912663 - DNA, 15 bp, Homo sapiens
gttagaaaaactaaa

SEQ ID NO: 912664 - DNA, 15 bp, Homo sapiens
agttagaaaaactaa

SEQ ID NO: 912665 - DNA, 15 bp, Homo sapiens
tagttagaaaaacta

SEQ ID NO: 912666 - DNA, 15 bp, Homo sapiens
ttagttagaaaaact

SEQ ID NO: 912667 - DNA, 15 bp, Homo sapiens
tttagttagaaaaac

SEQ ID NO: 912668 - DNA, 15 bp, Homo sapiens
atttagttagaaaaa

SEQ ID NO: 912669 - DNA, 15 bp, Homo sapiens
catttagttagaaaa

SEQ ID NO: 912670 - DNA, 15 bp, Homo sapiens
acatttagttagaaa

SEQ ID NO: 912671 - DNA, 15 bp, Homo sapiens
gacatttagttagaa

SEQ ID NO: 912672 - DNA, 15 bp, Homo sapiens
tgacatttagttaga

SEQ ID NO: 912673 - DNA, 15 bp, Homo sapiens
ctgacatttagttag

SEQ ID NO: 912674 - DNA, 15 bp, Homo sapiens
cctgacatttagtta

SEQ ID NO: 912675 - DNA, 15 bp, Homo sapiens
acctgacatttagtt

SEQ ID NO: 912676 - DNA, 15 bp, Homo sapiens
aacctgacatttagt

SEQ ID NO: 912677 - DNA, 15 bp, Homo sapiens
gaacctgacatttag

SEQ ID NO: 912678 - DNA, 15 bp, Homo sapiens
tgaacctgacattta

SEQ ID NO: 912679 - DNA, 15 bp, Homo sapiens
atgaacctgacattt

SEQ ID NO: 912680 - DNA, 15 bp, Homo sapiens
gatgaacctgacatt

SEQ ID NO: 912681 - DNA, 15 bp, Homo sapiens
tgatgaacctgacat

SEQ ID NO: 912682 - DNA, 15 bp, Homo sapiens
ctgatgaacctgaca

SEQ ID NO: 912683 - DNA, 15 bp, Homo sapiens
actgatgaacctgac

SEQ ID NO: 912684 - DNA, 15 bp, Homo sapiens
cactgatgaacctga

SEQ ID NO: 912685 - DNA, 15 bp, Homo sapiens
ccactgatgaacctg

SEQ ID NO: 912686 - DNA, 15 bp, Homo sapiens
cccactgatgaacct

SEQ ID NO: 912687 - DNA, 15 bp, Homo sapiens
tcccactgatgaacc

SEQ ID NO: 912688 - DNA, 15 bp, Homo sapiens
ttcccactgatgaac

SEQ ID NO: 912689 - DNA, 15 bp, Homo sapiens
attcccactgatgaa

SEQ ID NO: 912690 - DNA, 15 bp, Homo sapiens
cattcccactgatga

SEQ ID NO: 912691 - DNA, 15 bp, Homo sapiens
ccattcccactgatg

SEQ ID NO: 912692 - DNA, 15 bp, Homo sapiens
cccattcccactgat

SEQ ID NO: 912693 - DNA, 15 bp, Homo sapiens
tcccattcccactga

SEQ ID NO: 912694 - DNA, 15 bp, Homo sapiens
ttcccattcccactg

SEQ ID NO: 912695 - DNA, 15 bp, Homo sapiens
attcccattcccact

SEQ ID NO: 912696 - DNA, 15 bp, Homo sapiens
tattcccattcccac

SEQ ID NO: 912697 - DNA, 15 bp, Homo sapiens
ttattcccattccca

SEQ ID NO: 912698 - DNA, 15 bp, Homo sapiens
cttattcccattccc

SEQ ID NO: 912699 - DNA, 15 bp, Homo sapiens
gcttattcccattcc

SEQ ID NO: 912700 - DNA, 15 bp, Homo sapiens
tgcttattcccattc

SEQ ID NO: 912701 - DNA, 15 bp, Homo sapiens
ttgcttattcccatt

SEQ ID NO: 912702 - DNA, 15 bp, Homo sapiens
tttgcttattcccat

SEQ ID NO: 912703 - DNA, 15 bp, Homo sapiens
ctttgcttattccca

SEQ ID NO: 912704 - DNA, 15 bp, Homo sapiens
cctttgcttattccc

SEQ ID NO: 912705 - DNA, 15 bp, Homo sapiens
ccctttgcttattcc

SEQ ID NO: 912706 - DNA, 15 bp, Homo sapiens
tccctttgcttattc

SEQ ID NO: 912707 - DNA, 15 bp, Homo sapiens
atccctttgcttatt

SEQ ID NO: 912708 - DNA, 15 bp, Homo sapiens
gatccctttgcttat

SEQ ID NO: 912709 - DNA, 15 bp, Homo sapiens
tgatccctttgctta

SEQ ID NO: 912710 - DNA, 15 bp, Homo sapiens
ctgatccctttgctt

SEQ ID NO: 912711 - DNA, 15 bp, Homo sapiens
tctgatccctttgct

SEQ ID NO: 912712 - DNA, 15 bp, Homo sapiens
ttctgatccctttgc

SEQ ID NO: 912713 - DNA, 15 bp, Homo sapiens
attctgatccctttg

SEQ ID NO: 912714 - DNA, 15 bp, Homo sapiens
tattctgatcccttt

SEQ ID NO: 912715 - DNA, 15 bp, Homo sapiens
ttattctgatccctt

SEQ ID NO: 912716 - DNA, 15 bp, Homo sapiens
gttattctgatccct

SEQ ID NO: 912717 - DNA, 15 bp, Homo sapiens
agttattctgatccc

SEQ ID NO: 912718 - DNA, 15 bp, Homo sapiens
aagttattctgatcc

SEQ ID NO: 912719 - DNA, 15 bp, Homo sapiens
caagttattctgatc

SEQ ID NO: 912720 - DNA, 15 bp, Homo sapiens
ccaagttattctgat

SEQ ID NO: 912721 - DNA, 15 bp, Homo sapiens
cccaagttattctga

SEQ ID NO: 912722 - DNA, 15 bp, Homo sapiens
tcccaagttattctg

SEQ ID NO: 912723 - DNA, 15 bp, Homo sapiens
ttcccaagttattct

SEQ ID NO: 912724 - DNA, 15 bp, Homo sapiens
cttcccaagttattc

SEQ ID NO: 912725 - DNA, 15 bp, Homo sapiens
gcttcccaagttatt

SEQ ID NO: 912726 - DNA, 15 bp, Homo sapiens
ggcttcccaagttat

SEQ ID NO: 912727 - DNA, 15 bp, Homo sapiens
aggcttcccaagtta

SEQ ID NO: 912728 - DNA, 15 bp, Homo sapiens
aaggcttcccaagtt

SEQ ID NO: 912729 - DNA, 15 bp, Homo sapiens
aaaggcttcccaagt

SEQ ID NO: 912730 - DNA, 15 bp, Homo sapiens
aaaaggcttcccaag

SEQ ID NO: 912731 - DNA, 15 bp, Homo sapiens
gaaaaggcttcccaa

SEQ ID NO: 912732 - DNA, 15 bp, Homo sapiens
tgaaaaggcttccca

SEQ ID NO: 912733 - DNA, 15 bp, Homo sapiens
ttgaaaaggcttccc

SEQ ID NO: 912734 - DNA, 15 bp, Homo sapiens
tttgaaaaggcttcc

SEQ ID NO: 912735 - DNA, 15 bp, Homo sapiens
ttttgaaaaggcttc

SEQ ID NO: 912736 - DNA, 15 bp, Homo sapiens
attttgaaaaggctt

SEQ ID NO: 912737 - DNA, 15 bp, Homo sapiens
tattttgaaaaggct

SEQ ID NO: 912738 - DNA, 15 bp, Homo sapiens
gtattttgaaaaggc

SEQ ID NO: 912739 - DNA, 15 bp, Homo sapiens
tgtattttgaaaagg

SEQ ID NO: 912740 - DNA, 15 bp, Homo sapiens
gtgtattttgaaaag

SEQ ID NO: 912741 - DNA, 15 bp, Homo sapiens
agtgtattttgaaaa

SEQ ID NO: 912742 - DNA, 15 bp, Homo sapiens
aagtgtattttgaaa

SEQ ID NO: 912743 - DNA, 15 bp, Homo sapiens
aaagtgtattttgaa

SEQ ID NO: 912744 - DNA, 15 bp, Homo sapiens
aaaagtgtattttga

SEQ ID NO: 912745 - DNA, 15 bp, Homo sapiens
gaaaagtgtattttg

SEQ ID NO: 912746 - DNA, 15 bp, Homo sapiens
agaaaagtgtatttt

SEQ ID NO: 912747 - DNA, 15 bp, Homo sapiens
aagaaaagtgtattt

SEQ ID NO: 912748 - DNA, 15 bp, Homo sapiens
gaagaaaagtgtatt

SEQ ID NO: 912749 - DNA, 15 bp, Homo sapiens
ggaagaaaagtgtat

SEQ ID NO: 912750 - DNA, 15 bp, Homo sapiens
aggaagaaaagtgta

SEQ ID NO: 912751 - DNA, 15 bp, Homo sapiens
gaggaagaaaagtgt

SEQ ID NO: 912752 - DNA, 15 bp, Homo sapiens
tgaggaagaaaagtg

SEQ ID NO: 912753 - DNA, 15 bp, Homo sapiens
gtgaggaagaaaagt

SEQ ID NO: 912754 - DNA, 15 bp, Homo sapiens
ggtgaggaagaaaag

SEQ ID NO: 912755 - DNA, 15 bp, Homo sapiens
tggtgaggaagaaaa

SEQ ID NO: 912756 - DNA, 15 bp, Homo sapiens
gtggtgaggaagaaa

SEQ ID NO: 912757 - DNA, 15 bp, Homo sapiens
ggtggtgaggaagaa

SEQ ID NO: 912758 - DNA, 15 bp, Homo sapiens
tggtggtgaggaaga

SEQ ID NO: 912759 - DNA, 15 bp, Homo sapiens
gtggtggtgaggaag

SEQ ID NO: 912760 - DNA, 15 bp, Homo sapiens
agtggtggtgaggaa

SEQ ID NO: 912761 - DNA, 15 bp, Homo sapiens
gagtggtggtgagga

SEQ ID NO: 912762 - DNA, 15 bp, Homo sapiens
agagtggtggtgagg

SEQ ID NO: 912763 - DNA, 15 bp, Homo sapiens
gagagtggtggtgag

SEQ ID NO: 912764 - DNA, 15 bp, Homo sapiens
ggagagtggtggtga

SEQ ID NO: 912765 - DNA, 15 bp, Homo sapiens
tggagagtggtggtg

SEQ ID NO: 912766 - DNA, 15 bp, Homo sapiens
ttggagagtggtggt

SEQ ID NO: 912767 - DNA, 15 bp, Homo sapiens
gttggagagtggtgg

SEQ ID NO: 912768 - DNA, 15 bp, Homo sapiens
ggttggagagtggtg

SEQ ID NO: 912769 - DNA, 15 bp, Homo sapiens
aggttggagagtggt

SEQ ID NO: 912770 - DNA, 15 bp, Homo sapiens
aaggttggagagtgg

SEQ ID NO: 912771 - DNA, 15 bp, Homo sapiens
taaggttggagagtg

SEQ ID NO: 912772 - DNA, 15 bp, Homo sapiens
ttaaggttggagagt

SEQ ID NO: 912773 - DNA, 15 bp, Homo sapiens
gttaaggttggagag

SEQ ID NO: 912774 - DNA, 15 bp, Homo sapiens
ggttaaggttggaga

SEQ ID NO: 912775 - DNA, 15 bp, Homo sapiens
tggttaaggttggag

SEQ ID NO: 912776 - DNA, 15 bp, Homo sapiens
ttggttaaggttgga

SEQ ID NO: 912777 - DNA, 15 bp, Homo sapiens
tttggttaaggttgg

SEQ ID NO: 912778 - DNA, 15 bp, Homo sapiens
atttggttaaggttg

SEQ ID NO: 912779 - DNA, 15 bp, Homo sapiens
aatttggttaaggtt

SEQ ID NO: 912780 - DNA, 15 bp, Homo sapiens
caatttggttaaggt

SEQ ID NO: 912781 - DNA, 15 bp, Homo sapiens
acaatttggttaagg

SEQ ID NO: 912782 - DNA, 15 bp, Homo sapiens
gacaatttggttaag

SEQ ID NO: 912783 - DNA, 15 bp, Homo sapiens
tgacaatttggttaa

SEQ ID NO: 912784 - DNA, 15 bp, Homo sapiens
ctgacaatttggtta

SEQ ID NO: 912785 - DNA, 15 bp, Homo sapiens
cctgacaatttggtt

SEQ ID NO: 912786 - DNA, 15 bp, Homo sapiens
gcctgacaatttggt

SEQ ID NO: 912787 - DNA, 15 bp, Homo sapiens
ggcctgacaatttgg

SEQ ID NO: 912788 - DNA, 15 bp, Homo sapiens
aggcctgacaatttg

SEQ ID NO: 912789 - DNA, 15 bp, Homo sapiens
aaggcctgacaattt

SEQ ID NO: 912790 - DNA, 15 bp, Homo sapiens
taaggcctgacaatt

SEQ ID NO: 912791 - DNA, 15 bp, Homo sapiens
gtaaggcctgacaat

SEQ ID NO: 912792 - DNA, 15 bp, Homo sapiens
ggtaaggcctgacaa

SEQ ID NO: 912793 - DNA, 15 bp, Homo sapiens
tggtaaggcctgaca

SEQ ID NO: 912794 - DNA, 15 bp, Homo sapiens
atggtaaggcctgac

SEQ ID NO: 912795 - DNA, 15 bp, Homo sapiens
tatggtaaggcctga

SEQ ID NO: 912796 - DNA, 15 bp, Homo sapiens
atatggtaaggcctg

SEQ ID NO: 912797 - DNA, 15 bp, Homo sapiens
aatatggtaaggcct

SEQ ID NO: 912798 - DNA, 15 bp, Homo sapiens
taatatggtaaggcc

SEQ ID NO: 912799 - DNA, 15 bp, Homo sapiens
ctaatatggtaaggc

SEQ ID NO: 912800 - DNA, 15 bp, Homo sapiens
tctaatatggtaagg

SEQ ID NO: 912801 - DNA, 15 bp, Homo sapiens
ttctaatatggtaag

SEQ ID NO: 912802 - DNA, 15 bp, Homo sapiens
cttctaatatggtaa

SEQ ID NO: 912803 - DNA, 15 bp, Homo sapiens
gcttctaatatggta

SEQ ID NO: 912804 - DNA, 15 bp, Homo sapiens
agcttctaatatggt

SEQ ID NO: 912805 - DNA, 15 bp, Homo sapiens
cagcttctaatatgg

SEQ ID NO: 912806 - DNA, 15 bp, Homo sapiens
ccagcttctaatatg

SEQ ID NO: 912807 - DNA, 15 bp, Homo sapiens
cccagcttctaatat

SEQ ID NO: 912808 - DNA, 15 bp, Homo sapiens
tcccagcttctaata

SEQ ID NO: 912809 - DNA, 15 bp, Homo sapiens
atcccagcttctaat

SEQ ID NO: 912810 - DNA, 15 bp, Homo sapiens
aatcccagcttctaa

SEQ ID NO: 912811 - DNA, 15 bp, Homo sapiens
taatcccagcttcta

SEQ ID NO: 912812 - DNA, 15 bp, Homo sapiens
ataatcccagcttct

SEQ ID NO: 912813 - DNA, 15 bp, Homo sapiens
cataatcccagcttc

SEQ ID NO: 912814 - DNA, 15 bp, Homo sapiens
tcataatcccagctt

SEQ ID NO: 912815 - DNA, 15 bp, Homo sapiens
atcataatcccagct

SEQ ID NO: 912816 - DNA, 15 bp, Homo sapiens
catcataatcccagc

SEQ ID NO: 912817 - DNA, 15 bp, Homo sapiens
ccatcataatcccag

SEQ ID NO: 912818 - DNA, 15 bp, Homo sapiens
accatcataatccca

SEQ ID NO: 912819 - DNA, 15 bp, Homo sapiens
aaccatcataatccc

SEQ ID NO: 912820 - DNA, 15 bp, Homo sapiens
caaccatcataatcc

SEQ ID NO: 912821 - DNA, 15 bp, Homo sapiens
acaaccatcataatc

SEQ ID NO: 912822 - DNA, 15 bp, Homo sapiens
tacaaccatcataat

SEQ ID NO: 912823 - DNA, 15 bp, Homo sapiens
atacaaccatcataa

SEQ ID NO: 912824 - DNA, 15 bp, Homo sapiens
tatacaaccatcata

SEQ ID NO: 912825 - DNA, 15 bp, Homo sapiens
gtatacaaccatcat

SEQ ID NO: 912826 - DNA, 15 bp, Homo sapiens
agtatacaaccatca

SEQ ID NO: 912827 - DNA, 15 bp, Homo sapiens
aagtatacaaccatc

SEQ ID NO: 912828 - DNA, 15 bp, Homo sapiens
caagtatacaaccat

SEQ ID NO: 912829 - DNA, 15 bp, Homo sapiens
tcaagtatacaacca

SEQ ID NO: 912830 - DNA, 15 bp, Homo sapiens
ttcaagtatacaacc

SEQ ID NO: 912831 - DNA, 15 bp, Homo sapiens
tttcaagtatacaac

SEQ ID NO: 912832 - DNA, 15 bp, Homo sapiens
ttttcaagtatacaa

SEQ ID NO: 912833 - DNA, 15 bp, Homo sapiens
tttttcaagtataca

SEQ ID NO: 912834 - DNA, 15 bp, Homo sapiens
gtttttcaagtatac

SEQ ID NO: 912835 - DNA, 15 bp, Homo sapiens
tgtttttcaagtata

SEQ ID NO: 912836 - DNA, 15 bp, Homo sapiens
atgtttttcaagtat

SEQ ID NO: 912837 - DNA, 15 bp, Homo sapiens
gatgtttttcaagta

SEQ ID NO: 912838 - DNA, 15 bp, Homo sapiens
tgatgtttttcaagt

SEQ ID NO: 912839 - DNA, 15 bp, Homo sapiens
ctgatgtttttcaag

SEQ ID NO: 912840 - DNA, 15 bp, Homo sapiens
tctgatgtttttcaa

SEQ ID NO: 912841 - DNA, 15 bp, Homo sapiens
ctctgatgtttttca

SEQ ID NO: 912842 - DNA, 15 bp, Homo sapiens
tctctgatgtttttc

SEQ ID NO: 912843 - DNA, 15 bp, Homo sapiens
atctctgatgttttt

SEQ ID NO: 912844 - DNA, 15 bp, Homo sapiens
aatctctgatgtttt

SEQ ID NO: 912845 - DNA, 15 bp, Homo sapiens
taatctctgatgttt

SEQ ID NO: 912846 - DNA, 15 bp, Homo sapiens
ataatctctgatgtt

SEQ ID NO: 912847 - DNA, 15 bp, Homo sapiens
aataatctctgatgt

SEQ ID NO: 912848 - DNA, 15 bp, Homo sapiens
gaataatctctgatg

SEQ ID NO: 912849 - DNA, 15 bp, Homo sapiens
agaataatctctgat

SEQ ID NO: 912850 - DNA, 15 bp, Homo sapiens
cagaataatctctga

SEQ ID NO: 912851 - DNA, 15 bp, Homo sapiens
tcagaataatctctg

SEQ ID NO: 912852 - DNA, 15 bp, Homo sapiens
ttcagaataatctct

SEQ ID NO: 912853 - DNA, 15 bp, Homo sapiens
attcagaataatctc

SEQ ID NO: 912854 - DNA, 15 bp, Homo sapiens
cattcagaataatct

SEQ ID NO: 912855 - DNA, 15 bp, Homo sapiens
tcattcagaataatc

SEQ ID NO: 912856 - DNA, 15 bp, Homo sapiens
ttcattcagaataat

SEQ ID NO: 912857 - DNA, 15 bp, Homo sapiens
attcattcagaataa

SEQ ID NO: 912858 - DNA, 15 bp, Homo sapiens
tattcattcagaata

SEQ ID NO: 912859 - DNA, 15 bp, Homo sapiens
ttattcattcagaat

SEQ ID NO: 912860 - DNA, 15 bp, Homo sapiens
attattcattcagaa

SEQ ID NO: 912861 - DNA, 15 bp, Homo sapiens
aattattcattcaga

SEQ ID NO: 912862 - DNA, 15 bp, Homo sapiens
gaattattcattcag

SEQ ID NO: 912863 - DNA, 15 bp, Homo sapiens
agaattattcattca

SEQ ID NO: 912864 - DNA, 15 bp, Homo sapiens
tagaattattcattc

SEQ ID NO: 912865 - DNA, 15 bp, Homo sapiens
ttagaattattcatt

SEQ ID NO: 912866 - DNA, 15 bp, Homo sapiens
attagaattattcat

SEQ ID NO: 912867 - DNA, 15 bp, Homo sapiens
aattagaattattca

SEQ ID NO: 912868 - DNA, 15 bp, Homo sapiens
aaattagaattattc

SEQ ID NO: 912869 - DNA, 15 bp, Homo sapiens
aaaattagaattatt

SEQ ID NO: 912870 - DNA, 15 bp, Homo sapiens
taaaattagaattat

SEQ ID NO: 912871 - DNA, 15 bp, Homo sapiens
ttaaaattagaatta

SEQ ID NO: 912872 - DNA, 15 bp, Homo sapiens
tttaaaattagaatt

SEQ ID NO: 912873 - DNA, 15 bp, Homo sapiens
ttttaaaattagaat

SEQ ID NO: 912874 - DNA, 15 bp, Homo sapiens
tttttaaaattagaa

SEQ ID NO: 912875 - DNA, 15 bp, Homo sapiens
gtttttaaaattaga

SEQ ID NO: 912876 - DNA, 15 bp, Homo sapiens
agtttttaaaattag

SEQ ID NO: 912877 - DNA, 15 bp, Homo sapiens
tagtttttaaaatta

SEQ ID NO: 912878 - DNA, 15 bp, Homo sapiens
atagtttttaaaatt

SEQ ID NO: 912879 - DNA, 15 bp, Homo sapiens
gatagtttttaaaat

SEQ ID NO: 912880 - DNA, 15 bp, Homo sapiens
tgatagtttttaaaa

SEQ ID NO: 912881 - DNA, 15 bp, Homo sapiens
gtgatagtttttaaa

SEQ ID NO: 912882 - DNA, 15 bp, Homo sapiens
agtgatagtttttaa

SEQ ID NO: 912883 - DNA, 15 bp, Homo sapiens
aagtgatagttttta

SEQ ID NO: 912884 - DNA, 15 bp, Homo sapiens
gaagtgatagttttt

SEQ ID NO: 912885 - DNA, 15 bp, Homo sapiens
agaagtgatagtttt

SEQ ID NO: 912886 - DNA, 15 bp, Homo sapiens
tagaagtgatagttt

SEQ ID NO: 912887 - DNA, 15 bp, Homo sapiens
ctagaagtgatagtt

SEQ ID NO: 912888 - DNA, 15 bp, Homo sapiens
tctagaagtgatagt

SEQ ID NO: 912889 - DNA, 15 bp, Homo sapiens
ctctagaagtgatag

SEQ ID NO: 912890 - DNA, 15 bp, Homo sapiens
actctagaagtgata

SEQ ID NO: 912891 - DNA, 15 bp, Homo sapiens
gactctagaagtgat

SEQ ID NO: 912892 - DNA, 15 bp, Homo sapiens
tgactctagaagtga

SEQ ID NO: 912893 - DNA, 15 bp, Homo sapiens
atgactctagaagtg

SEQ ID NO: 912894 - DNA, 15 bp, Homo sapiens
aatgactctagaagt

SEQ ID NO: 912895 - DNA, 15 bp, Homo sapiens
caatgactctagaag

SEQ ID NO: 912896 - DNA, 15 bp, Homo sapiens
gcaatgactctagaa

SEQ ID NO: 912897 - DNA, 15 bp, Homo sapiens
agcaatgactctaga

SEQ ID NO: 912898 - DNA, 15 bp, Homo sapiens
aagcaatgactctag

SEQ ID NO: 912899 - DNA, 15 bp, Homo sapiens
aaagcaatgactcta

SEQ ID NO: 912900 - DNA, 15 bp, Homo sapiens
gaaagcaatgactct

SEQ ID NO: 912901 - DNA, 15 bp, Homo sapiens
agaaagcaatgactc

SEQ ID NO: 912902 - DNA, 15 bp, Homo sapiens
tagaaagcaatgact

SEQ ID NO: 912903 - DNA, 15 bp, Homo sapiens
ctagaaagcaatgac

SEQ ID NO: 912904 - DNA, 15 bp, Homo sapiens
actagaaagcaatga

SEQ ID NO: 912905 - DNA, 15 bp, Homo sapiens
tactagaaagcaatg

SEQ ID NO: 912906 - DNA, 15 bp, Homo sapiens
atactagaaagcaat

SEQ ID NO: 912907 - DNA, 15 bp, Homo sapiens
catactagaaagcaa

SEQ ID NO: 912908 - DNA, 15 bp, Homo sapiens
ccatactagaaagca

SEQ ID NO: 912909 - DNA, 15 bp, Homo sapiens
accatactagaaagc

SEQ ID NO: 912910 - DNA, 15 bp, Homo sapiens
aaccatactagaaag

SEQ ID NO: 912911 - DNA, 15 bp, Homo sapiens
gaaccatactagaaa

SEQ ID NO: 912912 - DNA, 15 bp, Homo sapiens
tgaaccatactagaa

SEQ ID NO: 912913 - DNA, 15 bp, Homo sapiens
gtgaaccatactaga

SEQ ID NO: 912914 - DNA, 15 bp, Homo sapiens
tgtgaaccatactag

SEQ ID NO: 912915 - DNA, 15 bp, Homo sapiens
atgtgaaccatacta

SEQ ID NO: 912916 - DNA, 15 bp, Homo sapiens
tatgtgaaccatact

SEQ ID NO: 912917 - DNA, 15 bp, Homo sapiens
ttatgtgaaccatac

SEQ ID NO: 912918 - DNA, 15 bp, Homo sapiens
tttatgtgaaccata

SEQ ID NO: 912919 - DNA, 15 bp, Homo sapiens
atttatgtgaaccat

SEQ ID NO: 912920 - DNA, 15 bp, Homo sapiens
gatttatgtgaacca

SEQ ID NO: 912921 - DNA, 15 bp, Homo sapiens
agatttatgtgaacc

SEQ ID NO: 912922 - DNA, 15 bp, Homo sapiens
aagatttatgtgaac

SEQ ID NO: 912923 - DNA, 15 bp, Homo sapiens
caagatttatgtgaa

SEQ ID NO: 912924 - DNA, 15 bp, Homo sapiens
acaagatttatgtga

SEQ ID NO: 912925 - DNA, 15 bp, Homo sapiens
cacaagatttatgtg

SEQ ID NO: 912926 - DNA, 15 bp, Homo sapiens
ccacaagatttatgt

SEQ ID NO: 912927 - DNA, 15 bp, Homo sapiens
cccacaagatttatg

SEQ ID NO: 912928 - DNA, 15 bp, Homo sapiens
gcccacaagatttat

SEQ ID NO: 912929 - DNA, 15 bp, Homo sapiens
tgcccacaagattta

SEQ ID NO: 912930 - DNA, 15 bp, Homo sapiens
ctgcccacaagattt

SEQ ID NO: 912931 - DNA, 15 bp, Homo sapiens
actgcccacaagatt

SEQ ID NO: 912932 - DNA, 15 bp, Homo sapiens
aactgcccacaagat

SEQ ID NO: 912933 - DNA, 15 bp, Homo sapiens
aaactgcccacaaga

SEQ ID NO: 912934 - DNA, 15 bp, Homo sapiens
caaactgcccacaag

SEQ ID NO: 912935 - DNA, 15 bp, Homo sapiens
ccaaactgcccacaa

SEQ ID NO: 912936 - DNA, 15 bp, Homo sapiens
tccaaactgcccaca

SEQ ID NO: 912937 - DNA, 15 bp, Homo sapiens
ttccaaactgcccac

SEQ ID NO: 912938 - DNA, 15 bp, Homo sapiens
gttccaaactgccca

SEQ ID NO: 912939 - DNA, 15 bp, Homo sapiens
agttccaaactgccc

SEQ ID NO: 912940 - DNA, 15 bp, Homo sapiens
cagttccaaactgcc

SEQ ID NO: 912941 - DNA, 15 bp, Homo sapiens
ccagttccaaactgc

SEQ ID NO: 912942 - DNA, 15 bp, Homo sapiens
accagttccaaactg

SEQ ID NO: 912943 - DNA, 15 bp, Homo sapiens
aaccagttccaaact

SEQ ID NO: 912944 - DNA, 15 bp, Homo sapiens
taaccagttccaaac

SEQ ID NO: 912945 - DNA, 15 bp, Homo sapiens
ctaaccagttccaaa

SEQ ID NO: 912946 - DNA, 15 bp, Homo sapiens
gctaaccagttccaa

SEQ ID NO: 912947 - DNA, 15 bp, Homo sapiens
tgctaaccagttcca

SEQ ID NO: 912948 - DNA, 15 bp, Homo sapiens
atgctaaccagttcc

SEQ ID NO: 912949 - DNA, 15 bp, Homo sapiens
gatgctaaccagttc

SEQ ID NO: 912950 - DNA, 15 bp, Homo sapiens
agatgctaaccagtt

SEQ ID NO: 912951 - DNA, 15 bp, Homo sapiens
tagatgctaaccagt

SEQ ID NO: 912952 - DNA, 15 bp, Homo sapiens
ctagatgctaaccag

SEQ ID NO: 912953 - DNA, 15 bp, Homo sapiens
cctagatgctaacca

SEQ ID NO: 912954 - DNA, 15 bp, Homo sapiens
ccctagatgctaacc

SEQ ID NO: 912955 - DNA, 15 bp, Homo sapiens
tccctagatgctaac

SEQ ID NO: 912956 - DNA, 15 bp, Homo sapiens
ctccctagatgctaa

SEQ ID NO: 912957 - DNA, 15 bp, Homo sapiens
gctccctagatgcta

SEQ ID NO: 912958 - DNA, 15 bp, Homo sapiens
agctccctagatgct

SEQ ID NO: 912959 - DNA, 15 bp, Homo sapiens
gagctccctagatgc

SEQ ID NO: 912960 - DNA, 15 bp, Homo sapiens
tgagctccctagatg

SEQ ID NO: 912961 - DNA, 15 bp, Homo sapiens
ctgagctccctagat

SEQ ID NO: 912962 - DNA, 15 bp, Homo sapiens
tctgagctccctaga

SEQ ID NO: 912963 - DNA, 15 bp, Homo sapiens
atctgagctccctag

SEQ ID NO: 912964 - DNA, 15 bp, Homo sapiens
tatctgagctcccta

SEQ ID NO: 912965 - DNA, 15 bp, Homo sapiens
ttatctgagctccct

SEQ ID NO: 912966 - DNA, 15 bp, Homo sapiens
gttatctgagctccc

SEQ ID NO: 912967 - DNA, 15 bp, Homo sapiens
ggttatctgagctcc

SEQ ID NO: 912968 - DNA, 15 bp, Homo sapiens
aggttatctgagctc

SEQ ID NO: 912969 - DNA, 15 bp, Homo sapiens
taggttatctgagct

SEQ ID NO: 912970 - DNA, 15 bp, Homo sapiens
ataggttatctgagc

SEQ ID NO: 912971 - DNA, 15 bp, Homo sapiens
tataggttatctgag

SEQ ID NO: 912972 - DNA, 15 bp, Homo sapiens
atataggttatctga

SEQ ID NO: 912973 - DNA, 15 bp, Homo sapiens
aatataggttatctg

SEQ ID NO: 912974 - DNA, 15 bp, Homo sapiens
aaatataggttatct

SEQ ID NO: 912975 - DNA, 15 bp, Homo sapiens
aaaatataggttatc

SEQ ID NO: 912976 - DNA, 15 bp, Homo sapiens
taaaatataggttat

SEQ ID NO: 912977 - DNA, 15 bp, Homo sapiens
ttaaaatataggtta

SEQ ID NO: 912978 - DNA, 15 bp, Homo sapiens
tttaaaatataggtt

SEQ ID NO: 912979 - DNA, 15 bp, Homo sapiens
gtttaaaatataggt

SEQ ID NO: 912980 - DNA, 15 bp, Homo sapiens
tgtttaaaatatagg

SEQ ID NO: 912981 - DNA, 15 bp, Homo sapiens
ttgtttaaaatatag

SEQ ID NO: 912982 - DNA, 15 bp, Homo sapiens
tttgtttaaaatata

SEQ ID NO: 912983 - DNA, 15 bp, Homo sapiens
ttttgtttaaaatat

SEQ ID NO: 912984 - DNA, 15 bp, Homo sapiens
cttttgtttaaaata

SEQ ID NO: 912985 - DNA, 15 bp, Homo sapiens
gcttttgtttaaaat

SEQ ID NO: 912986 - DNA, 15 bp, Homo sapiens
tgcttttgtttaaaa

SEQ ID NO: 912987 - DNA, 15 bp, Homo sapiens
atgcttttgtttaaa

SEQ ID NO: 912988 - DNA, 15 bp, Homo sapiens
aatgcttttgtttaa

SEQ ID NO: 912989 - DNA, 15 bp, Homo sapiens
taatgcttttgttta

SEQ ID NO: 912990 - DNA, 15 bp, Homo sapiens
ctaatgcttttgttt

SEQ ID NO: 912991 - DNA, 15 bp, Homo sapiens
gctaatgcttttgtt

SEQ ID NO: 912992 - DNA, 15 bp, Homo sapiens
tgctaatgcttttgt

SEQ ID NO: 912993 - DNA, 15 bp, Homo sapiens
ttgctaatgcttttg

SEQ ID NO: 912994 - DNA, 15 bp, Homo sapiens
attgctaatgctttt

SEQ ID NO: 912995 - DNA, 15 bp, Homo sapiens
cattgctaatgcttt

SEQ ID NO: 912996 - DNA, 15 bp, Homo sapiens
ccattgctaatgctt

SEQ ID NO: 912997 - DNA, 15 bp, Homo sapiens
tccattgctaatgct

SEQ ID NO: 912998 - DNA, 15 bp, Homo sapiens
ttccattgctaatgc

SEQ ID NO: 912999 - DNA, 15 bp, Homo sapiens
tttccattgctaatg

SEQ ID NO: 913000 - DNA, 15 bp, Homo sapiens
atttccattgctaat

SEQ ID NO: 913001 - DNA, 15 bp, Homo sapiens
tatttccattgctaa

SEQ ID NO: 913002 - DNA, 15 bp, Homo sapiens
ttatttccattgcta

SEQ ID NO: 913003 - DNA, 15 bp, Homo sapiens
cttatttccattgct

SEQ ID NO: 913004 - DNA, 15 bp, Homo sapiens
ccttatttccattgc

SEQ ID NO: 913005 - DNA, 15 bp, Homo sapiens
gccttatttccattg

SEQ ID NO: 913006 - DNA, 15 bp, Homo sapiens
ggccttatttccatt

SEQ ID NO: 913007 - DNA, 15 bp, Homo sapiens
aggccttatttccat

SEQ ID NO: 913008 - DNA, 15 bp, Homo sapiens
taggccttatttcca

SEQ ID NO: 913009 - DNA, 15 bp, Homo sapiens
ataggccttatttcc

SEQ ID NO: 913010 - DNA, 15 bp, Homo sapiens
tataggccttatttc

SEQ ID NO: 913011 - DNA, 15 bp, Homo sapiens
ctataggccttattt

SEQ ID NO: 913012 - DNA, 15 bp, Homo sapiens
tctataggccttatt

SEQ ID NO: 913013 - DNA, 15 bp, Homo sapiens
ttctataggccttat

SEQ ID NO: 913014 - DNA, 15 bp, Homo sapiens
attctataggcctta

SEQ ID NO: 913015 - DNA, 15 bp, Homo sapiens
gattctataggcctt

SEQ ID NO: 913016 - DNA, 15 bp, Homo sapiens
tgattctataggcct

SEQ ID NO: 913017 - DNA, 15 bp, Homo sapiens
ctgattctataggcc

SEQ ID NO: 913018 - DNA, 15 bp, Homo sapiens
actgattctataggc

SEQ ID NO: 913019 - DNA, 15 bp, Homo sapiens
gactgattctatagg

SEQ ID NO: 913020 - DNA, 15 bp, Homo sapiens
tgactgattctatag

SEQ ID NO: 913021 - DNA, 15 bp, Homo sapiens
atgactgattctata

SEQ ID NO: 913022 - DNA, 15 bp, Homo sapiens
catgactgattctat

SEQ ID NO: 913023 - DNA, 15 bp, Homo sapiens
acatgactgattcta

SEQ ID NO: 913024 - DNA, 15 bp, Homo sapiens
gacatgactgattct

SEQ ID NO: 913025 - DNA, 15 bp, Homo sapiens
agacatgactgattc

SEQ ID NO: 913026 - DNA, 15 bp, Homo sapiens
gagacatgactgatt

SEQ ID NO: 913027 - DNA, 15 bp, Homo sapiens
ggagacatgactgat

SEQ ID NO: 913028 - DNA, 15 bp, Homo sapiens
tggagacatgactga

SEQ ID NO: 913029 - DNA, 15 bp, Homo sapiens
atggagacatgactg

SEQ ID NO: 913030 - DNA, 15 bp, Homo sapiens
tatggagacatgact

SEQ ID NO: 913031 - DNA, 15 bp, Homo sapiens
ttatggagacatgac

SEQ ID NO: 913032 - DNA, 15 bp, Homo sapiens
tttatggagacatga

SEQ ID NO: 913033 - DNA, 15 bp, Homo sapiens
gtttatggagacatg

SEQ ID NO: 913034 - DNA, 15 bp, Homo sapiens
agtttatggagacat

SEQ ID NO: 913035 - DNA, 15 bp, Homo sapiens
aagtttatggagaca

SEQ ID NO: 913036 - DNA, 15 bp, Homo sapiens
aaagtttatggagac

SEQ ID NO: 913037 - DNA, 15 bp, Homo sapiens
taaagtttatggaga

SEQ ID NO: 913038 - DNA, 15 bp, Homo sapiens
ataaagtttatggag

SEQ ID NO: 913039 - DNA, 15 bp, Homo sapiens
tataaagtttatgga

SEQ ID NO: 913040 - DNA, 15 bp, Homo sapiens
atataaagtttatgg

SEQ ID NO: 913041 - DNA, 15 bp, Homo sapiens
tatataaagtttatg

SEQ ID NO: 913042 - DNA, 15 bp, Homo sapiens
ttatataaagtttat

SEQ ID NO: 913043 - DNA, 15 bp, Homo sapiens
tttatataaagttta

SEQ ID NO: 913044 - DNA, 15 bp, Homo sapiens
ctttatataaagttt

SEQ ID NO: 913045 - DNA, 15 bp, Homo sapiens
cctttatataaagtt

SEQ ID NO: 913046 - DNA, 15 bp, Homo sapiens
ccctttatataaagt

SEQ ID NO: 913047 - DNA, 15 bp, Homo sapiens
gccctttatataaag

SEQ ID NO: 913048 - DNA, 15 bp, Homo sapiens
ggccctttatataaa

SEQ ID NO: 913049 - DNA, 15 bp, Homo sapiens
tggccctttatataa

SEQ ID NO: 913050 - DNA, 15 bp, Homo sapiens
ctggccctttatata

SEQ ID NO: 913051 - DNA, 15 bp, Homo sapiens
tctggccctttatat

SEQ ID NO: 913052 - DNA, 15 bp, Homo sapiens
gtctggccctttata

SEQ ID NO: 913053 - DNA, 15 bp, Homo sapiens
tgtctggccctttat

SEQ ID NO: 913054 - DNA, 15 bp, Homo sapiens
ctgtctggcccttta

SEQ ID NO: 913055 - DNA, 15 bp, Homo sapiens
actgtctggcccttt

SEQ ID NO: 913056 - DNA, 15 bp, Homo sapiens
cactgtctggccctt

SEQ ID NO: 913057 - DNA, 15 bp, Homo sapiens
tcactgtctggccct

SEQ ID NO: 913058 - DNA, 15 bp, Homo sapiens
ttcactgtctggccc

SEQ ID NO: 913059 - DNA, 15 bp, Homo sapiens
attcactgtctggcc

SEQ ID NO: 913060 - DNA, 15 bp, Homo sapiens
tattcactgtctggc

SEQ ID NO: 913061 - DNA, 15 bp, Homo sapiens
atattcactgtctgg

SEQ ID NO: 913062 - DNA, 15 bp, Homo sapiens
aatattcactgtctg

SEQ ID NO: 913063 - DNA, 15 bp, Homo sapiens
aaatattcactgtct

SEQ ID NO: 913064 - DNA, 15 bp, Homo sapiens
aaaatattcactgtc

SEQ ID NO: 913065 - DNA, 15 bp, Homo sapiens
taaaatattcactgt

SEQ ID NO: 913066 - DNA, 15 bp, Homo sapiens
ctaaaatattcactg

SEQ ID NO: 913067 - DNA, 15 bp, Homo sapiens
tctaaaatattcact

SEQ ID NO: 913068 - DNA, 15 bp, Homo sapiens
gtctaaaatattcac

SEQ ID NO: 913069 - DNA, 15 bp, Homo sapiens
ggtctaaaatattca

SEQ ID NO: 913070 - DNA, 15 bp, Homo sapiens
tggtctaaaatattc

SEQ ID NO: 913071 - DNA, 15 bp, Homo sapiens
gtggtctaaaatatt

SEQ ID NO: 913072 - DNA, 15 bp, Homo sapiens
ggtggtctaaaatat

SEQ ID NO: 913073 - DNA, 15 bp, Homo sapiens
aggtggtctaaaata

SEQ ID NO: 913074 - DNA, 15 bp, Homo sapiens
caggtggtctaaaat

SEQ ID NO: 913075 - DNA, 15 bp, Homo sapiens
ccaggtggtctaaaa

SEQ ID NO: 913076 - DNA, 15 bp, Homo sapiens
accaggtggtctaaa

SEQ ID NO: 913077 - DNA, 15 bp, Homo sapiens
gaccaggtggtctaa

SEQ ID NO: 913078 - DNA, 15 bp, Homo sapiens
agaccaggtggtcta

SEQ ID NO: 913079 - DNA, 15 bp, Homo sapiens
gagaccaggtggtct

SEQ ID NO: 913080 - DNA, 15 bp, Homo sapiens
agagaccaggtggtc

SEQ ID NO: 913081 - DNA, 15 bp, Homo sapiens
cagagaccaggtggt

SEQ ID NO: 913082 - DNA, 15 bp, Homo sapiens
gcagagaccaggtgg

SEQ ID NO: 913083 - DNA, 15 bp, Homo sapiens
agcagagaccaggtg

SEQ ID NO: 913084 - DNA, 15 bp, Homo sapiens
tagcagagaccaggt

SEQ ID NO: 913085 - DNA, 15 bp, Homo sapiens
atagcagagaccagg

SEQ ID NO: 913086 - DNA, 15 bp, Homo sapiens
tatagcagagaccag

SEQ ID NO: 913087 - DNA, 15 bp, Homo sapiens
ttatagcagagacca

SEQ ID NO: 913088 - DNA, 15 bp, Homo sapiens
gttatagcagagacc

SEQ ID NO: 913089 - DNA, 15 bp, Homo sapiens
agttatagcagagac

SEQ ID NO: 913090 - DNA, 15 bp, Homo sapiens
tagttatagcagaga

SEQ ID NO: 913091 - DNA, 15 bp, Homo sapiens
ttagttatagcagag

SEQ ID NO: 913092 - DNA, 15 bp, Homo sapiens
tttagttatagcaga

SEQ ID NO: 913093 - DNA, 15 bp, Homo sapiens
gtttagttatagcag

SEQ ID NO: 913094 - DNA, 15 bp, Homo sapiens
agtttagttatagca

SEQ ID NO: 913095 - DNA, 15 bp, Homo sapiens
gagtttagttatagc

SEQ ID NO: 913096 - DNA, 15 bp, Homo sapiens
agagtttagttatag

SEQ ID NO: 913097 - DNA, 15 bp, Homo sapiens
cagagtttagttata

SEQ ID NO: 913098 - DNA, 15 bp, Homo sapiens
gcagagtttagttat

SEQ ID NO: 913099 - DNA, 15 bp, Homo sapiens
agcagagtttagtta

SEQ ID NO: 913100 - DNA, 15 bp, Homo sapiens
aagcagagtttagtt

SEQ ID NO: 913101 - DNA, 15 bp, Homo sapiens
taagcagagtttagt

SEQ ID NO: 913102 - DNA, 15 bp, Homo sapiens
ataagcagagtttag

SEQ ID NO: 913103 - DNA, 15 bp, Homo sapiens
tataagcagagttta

SEQ ID NO: 913104 - DNA, 15 bp, Homo sapiens
ctataagcagagttt

SEQ ID NO: 913105 - DNA, 15 bp, Homo sapiens
gctataagcagagtt

SEQ ID NO: 913106 - DNA, 15 bp, Homo sapiens
tgctataagcagagt

SEQ ID NO: 913107 - DNA, 15 bp, Homo sapiens
atgctataagcagag

SEQ ID NO: 913108 - DNA, 15 bp, Homo sapiens
catgctataagcaga

SEQ ID NO: 913109 - DNA, 15 bp, Homo sapiens
tcatgctataagcag

SEQ ID NO: 913110 - DNA, 15 bp, Homo sapiens
ttcatgctataagca

SEQ ID NO: 913111 - DNA, 15 bp, Homo sapiens
tttcatgctataagc

SEQ ID NO: 913112 - DNA, 15 bp, Homo sapiens
ctttcatgctataag

SEQ ID NO: 913113 - DNA, 15 bp, Homo sapiens
gctttcatgctataa

SEQ ID NO: 913114 - DNA, 15 bp, Homo sapiens
tgctttcatgctata

SEQ ID NO: 913115 - DNA, 15 bp, Homo sapiens
ctgctttcatgctat

SEQ ID NO: 913116 - DNA, 15 bp, Homo sapiens
gctgctttcatgcta

SEQ ID NO: 913117 - DNA, 15 bp, Homo sapiens
ggctgctttcatgct

SEQ ID NO: 913118 - DNA, 15 bp, Homo sapiens
tggctgctttcatgc

SEQ ID NO: 913119 - DNA, 15 bp, Homo sapiens
atggctgctttcatg

SEQ ID NO: 913120 - DNA, 15 bp, Homo sapiens
aatggctgctttcat

SEQ ID NO: 913121 - DNA, 15 bp, Homo sapiens
caatggctgctttca

SEQ ID NO: 913122 - DNA, 15 bp, Homo sapiens
tcaatggctgctttc

SEQ ID NO: 913123 - DNA, 15 bp, Homo sapiens
gtcaatggctgcttt

SEQ ID NO: 913124 - DNA, 15 bp, Homo sapiens
tgtcaatggctgctt

SEQ ID NO: 913125 - DNA, 15 bp, Homo sapiens
ttgtcaatggctgct

SEQ ID NO: 913126 - DNA, 15 bp, Homo sapiens
attgtcaatggctgc

SEQ ID NO: 913127 - DNA, 15 bp, Homo sapiens
tattgtcaatggctg

SEQ ID NO: 913128 - DNA, 15 bp, Homo sapiens
gtattgtcaatggct

SEQ ID NO: 913129 - DNA, 15 bp, Homo sapiens
cgtattgtcaatggc

SEQ ID NO: 913130 - DNA, 15 bp, Homo sapiens
acgtattgtcaatgg

SEQ ID NO: 913131 - DNA, 15 bp, Homo sapiens
tacgtattgtcaatg

SEQ ID NO: 913132 - DNA, 15 bp, Homo sapiens
ttacgtattgtcaat

SEQ ID NO: 913133 - DNA, 15 bp, Homo sapiens
tttacgtattgtcaa

SEQ ID NO: 913134 - DNA, 15 bp, Homo sapiens
atttacgtattgtca

SEQ ID NO: 913135 - DNA, 15 bp, Homo sapiens
catttacgtattgtc

SEQ ID NO: 913136 - DNA, 15 bp, Homo sapiens
tcatttacgtattgt

SEQ ID NO: 913137 - DNA, 15 bp, Homo sapiens
ctcatttacgtattg

SEQ ID NO: 913138 - DNA, 15 bp, Homo sapiens
actcatttacgtatt

SEQ ID NO: 913139 - DNA, 15 bp, Homo sapiens
cactcatttacgtat

SEQ ID NO: 913140 - DNA, 15 bp, Homo sapiens
tcactcatttacgta

SEQ ID NO: 913141 - DNA, 15 bp, Homo sapiens
ctcactcatttacgt

SEQ ID NO: 913142 - DNA, 15 bp, Homo sapiens
gctcactcatttacg

SEQ ID NO: 913143 - DNA, 15 bp, Homo sapiens
tgctcactcatttac

SEQ ID NO: 913144 - DNA, 15 bp, Homo sapiens
ttgctcactcattta

SEQ ID NO: 913145 - DNA, 15 bp, Homo sapiens
cttgctcactcattt

SEQ ID NO: 913146 - DNA, 15 bp, Homo sapiens
ccttgctcactcatt

SEQ ID NO: 913147 - DNA, 15 bp, Homo sapiens
accttgctcactcat

SEQ ID NO: 913148 - DNA, 15 bp, Homo sapiens
caccttgctcactca

SEQ ID NO: 913149 - DNA, 15 bp, Homo sapiens
ccaccttgctcactc

SEQ ID NO: 913150 - DNA, 15 bp, Homo sapiens
accaccttgctcact

SEQ ID NO: 913151 - DNA, 15 bp, Homo sapiens
aaccaccttgctcac

SEQ ID NO: 913152 - DNA, 15 bp, Homo sapiens
aaaccaccttgctca

SEQ ID NO: 913153 - DNA, 15 bp, Homo sapiens
aaaaccaccttgctc

SEQ ID NO: 913154 - DNA, 15 bp, Homo sapiens
gaaaaccaccttgct

SEQ ID NO: 913155 - DNA, 15 bp, Homo sapiens
ggaaaaccaccttgc

SEQ ID NO: 913156 - DNA, 15 bp, Homo sapiens
cggaaaaccaccttg

SEQ ID NO: 913157 - DNA, 15 bp, Homo sapiens
ccggaaaaccacctt

SEQ ID NO: 913158 - DNA, 15 bp, Homo sapiens
accggaaaaccacct

SEQ ID NO: 913159 - DNA, 15 bp, Homo sapiens
taccggaaaaccacc

SEQ ID NO: 913160 - DNA, 15 bp, Homo sapiens
ttaccggaaaaccac

SEQ ID NO: 913161 - DNA, 15 bp, Homo sapiens
tttaccggaaaacca

SEQ ID NO: 913162 - DNA, 15 bp, Homo sapiens
ttttaccggaaaacc

SEQ ID NO: 913163 - DNA, 15 bp, Homo sapiens
attttaccggaaaac

SEQ ID NO: 913164 - DNA, 15 bp, Homo sapiens
aattttaccggaaaa

SEQ ID NO: 913165 - DNA, 15 bp, Homo sapiens
aaattttaccggaaa

SEQ ID NO: 913166 - DNA, 15 bp, Homo sapiens
aaaattttaccggaa

SEQ ID NO: 913167 - DNA, 15 bp, Homo sapiens
taaaattttaccgga

SEQ ID NO: 913168 - DNA, 15 bp, Homo sapiens
ataaaattttaccgg

SEQ ID NO: 913169 - DNA, 15 bp, Homo sapiens
aataaaattttaccg

SEQ ID NO: 913170 - DNA, 15 bp, Homo sapiens
aaataaaattttacc

SEQ ID NO: 913171 - DNA, 15 bp, Homo sapiens
taaataaaattttac

SEQ ID NO: 913172 - DNA, 15 bp, Homo sapiens
gtaaataaaatttta

SEQ ID NO: 913173 - DNA, 15 bp, Homo sapiens
tgtaaataaaatttt

SEQ ID NO: 913174 - DNA, 15 bp, Homo sapiens
ttgtaaataaaattt

SEQ ID NO: 913175 - DNA, 15 bp, Homo sapiens
tttgtaaataaaatt

SEQ ID NO: 913176 - DNA, 15 bp, Homo sapiens
ttttgtaaataaaat

SEQ ID NO: 913177 - DNA, 15 bp, Homo sapiens
cttttgtaaataaaa

SEQ ID NO: 913178 - DNA, 15 bp, Homo sapiens
gcttttgtaaataaa

SEQ ID NO: 913179 - DNA, 15 bp, Homo sapiens
tgcttttgtaaataa

SEQ ID NO: 913180 - DNA, 15 bp, Homo sapiens
ctgcttttgtaaata

SEQ ID NO: 913181 - DNA, 15 bp, Homo sapiens
tctgcttttgtaaat

SEQ ID NO: 913182 - DNA, 15 bp, Homo sapiens
atctgcttttgtaaa

SEQ ID NO: 913183 - DNA, 15 bp, Homo sapiens
catctgcttttgtaa

SEQ ID NO: 913184 - DNA, 15 bp, Homo sapiens
ccatctgcttttgta

SEQ ID NO: 913185 - DNA, 15 bp, Homo sapiens
cccatctgcttttgt

SEQ ID NO: 913186 - DNA, 15 bp, Homo sapiens
tcccatctgcttttg

SEQ ID NO: 913187 - DNA, 15 bp, Homo sapiens
ctcccatctgctttt

SEQ ID NO: 913188 - DNA, 15 bp, Homo sapiens
cctcccatctgcttt

SEQ ID NO: 913189 - DNA, 15 bp, Homo sapiens
gcctcccatctgctt

SEQ ID NO: 913190 - DNA, 15 bp, Homo sapiens
ggcctcccatctgct

SEQ ID NO: 913191 - DNA, 15 bp, Homo sapiens
tggcctcccatctgc

SEQ ID NO: 913192 - DNA, 15 bp, Homo sapiens
ctggcctcccatctg

SEQ ID NO: 913193 - DNA, 15 bp, Homo sapiens
tctggcctcccatct

SEQ ID NO: 913194 - DNA, 15 bp, Homo sapiens
atctggcctcccatc

SEQ ID NO: 913195 - DNA, 15 bp, Homo sapiens
aatctggcctcccat

SEQ ID NO: 913196 - DNA, 15 bp, Homo sapiens
aaatctggcctccca

SEQ ID NO: 913197 - DNA, 15 bp, Homo sapiens
caaatctggcctccc

SEQ ID NO: 913198 - DNA, 15 bp, Homo sapiens
tcaaatctggcctcc

SEQ ID NO: 913199 - DNA, 15 bp, Homo sapiens
gtcaaatctggcctc

SEQ ID NO: 913200 - DNA, 15 bp, Homo sapiens
ggtcaaatctggcct

SEQ ID NO: 913201 - DNA, 15 bp, Homo sapiens
aggtcaaatctggcc

SEQ ID NO: 913202 - DNA, 15 bp, Homo sapiens
aaggtcaaatctggc

SEQ ID NO: 913203 - DNA, 15 bp, Homo sapiens
aaaggtcaaatctgg

SEQ ID NO: 913204 - DNA, 15 bp, Homo sapiens
caaaggtcaaatctg

SEQ ID NO: 913205 - DNA, 15 bp, Homo sapiens
ccaaaggtcaaatct

SEQ ID NO: 913206 - DNA, 15 bp, Homo sapiens
cccaaaggtcaaatc

SEQ ID NO: 913207 - DNA, 15 bp, Homo sapiens
gcccaaaggtcaaat

SEQ ID NO: 913208 - DNA, 15 bp, Homo sapiens
ggcccaaaggtcaaa

SEQ ID NO: 913209 - DNA, 15 bp, Homo sapiens
tggcccaaaggtcaa

SEQ ID NO: 913210 - DNA, 15 bp, Homo sapiens
atggcccaaaggtca

SEQ ID NO: 913211 - DNA, 15 bp, Homo sapiens
tatggcccaaaggtc

SEQ ID NO: 913212 - DNA, 15 bp, Homo sapiens
ctatggcccaaaggt

SEQ ID NO: 913213 - DNA, 15 bp, Homo sapiens
actatggcccaaagg

SEQ ID NO: 913214 - DNA, 15 bp, Homo sapiens
gactatggcccaaag

SEQ ID NO: 913215 - DNA, 15 bp, Homo sapiens
agactatggcccaaa

SEQ ID NO: 913216 - DNA, 15 bp, Homo sapiens
tagactatggcccaa

SEQ ID NO: 913217 - DNA, 15 bp, Homo sapiens
gtagactatggccca

SEQ ID NO: 913218 - DNA, 15 bp, Homo sapiens
ggtagactatggccc

SEQ ID NO: 913219 - DNA, 15 bp, Homo sapiens
tggtagactatggcc

SEQ ID NO: 913220 - DNA, 15 bp, Homo sapiens
ttggtagactatggc

SEQ ID NO: 913221 - DNA, 15 bp, Homo sapiens
gttggtagactatgg

SEQ ID NO: 913222 - DNA, 15 bp, Homo sapiens
ggttggtagactatg

SEQ ID NO: 913223 - DNA, 15 bp, Homo sapiens
gggttggtagactat

SEQ ID NO: 913224 - DNA, 15 bp, Homo sapiens
ggggttggtagacta

SEQ ID NO: 913225 - DNA, 15 bp, Homo sapiens
aggggttggtagact

SEQ ID NO: 913226 - DNA, 15 bp, Homo sapiens
caggggttggtagac

SEQ ID NO: 913227 - DNA, 15 bp, Homo sapiens
ccaggggttggtaga

SEQ ID NO: 913228 - DNA, 15 bp, Homo sapiens
tccaggggttggtag

SEQ ID NO: 913229 - DNA, 15 bp, Homo sapiens
ttccaggggttggta

SEQ ID NO: 913230 - DNA, 15 bp, Homo sapiens
tttccaggggttggt

SEQ ID NO: 913231 - DNA, 15 bp, Homo sapiens
ttttccaggggttgg

SEQ ID NO: 913232 - DNA, 15 bp, Homo sapiens
tttttccaggggttg

SEQ ID NO: 913233 - DNA, 15 bp, Homo sapiens
ttttttccaggggtt

SEQ ID NO: 913234 - DNA, 15 bp, Homo sapiens
gttttttccaggggt

SEQ ID NO: 913235 - DNA, 15 bp, Homo sapiens
tgttttttccagggg

SEQ ID NO: 913236 - DNA, 15 bp, Homo sapiens
ctgttttttccaggg

SEQ ID NO: 913237 - DNA, 15 bp, Homo sapiens
actgttttttccagg

SEQ ID NO: 913238 - DNA, 15 bp, Homo sapiens
aactgttttttccag

SEQ ID NO: 913239 - DNA, 15 bp, Homo sapiens
caactgttttttcca

SEQ ID NO: 913240 - DNA, 15 bp, Homo sapiens
acaactgttttttcc

SEQ ID NO: 913241 - DNA, 15 bp, Homo sapiens
gacaactgttttttc

SEQ ID NO: 913242 - DNA, 15 bp, Homo sapiens
agacaactgtttttt

SEQ ID NO: 913243 - DNA, 15 bp, Homo sapiens
aagacaactgttttt

SEQ ID NO: 913244 - DNA, 15 bp, Homo sapiens
aaagacaactgtttt

SEQ ID NO: 913245 - DNA, 15 bp, Homo sapiens
taaagacaactgttt

SEQ ID NO: 913246 - DNA, 15 bp, Homo sapiens
gtaaagacaactgtt

SEQ ID NO: 913247 - DNA, 15 bp, Homo sapiens
ggtaaagacaactgt

SEQ ID NO: 913248 - DNA, 15 bp, Homo sapiens
tggtaaagacaactg

SEQ ID NO: 913249 - DNA, 15 bp, Homo sapiens
ctggtaaagacaact

SEQ ID NO: 913250 - DNA, 15 bp, Homo sapiens
tctggtaaagacaac

SEQ ID NO: 913251 - DNA, 15 bp, Homo sapiens
atctggtaaagacaa

SEQ ID NO: 913252 - DNA, 15 bp, Homo sapiens
aatctggtaaagaca

SEQ ID NO: 913253 - DNA, 15 bp, Homo sapiens
caatctggtaaagac

SEQ ID NO: 913254 - DNA, 15 bp, Homo sapiens
tcaatctggtaaaga

SEQ ID NO: 913255 - DNA, 15 bp, Homo sapiens
ttcaatctggtaaag

SEQ ID NO: 913256 - DNA, 15 bp, Homo sapiens
attcaatctggtaaa

SEQ ID NO: 913257 - DNA, 15 bp, Homo sapiens
cattcaatctggtaa

SEQ ID NO: 913258 - DNA, 15 bp, Homo sapiens
acattcaatctggta

SEQ ID NO: 913259 - DNA, 15 bp, Homo sapiens
aacattcaatctggt

SEQ ID NO: 913260 - DNA, 15 bp, Homo sapiens
caacattcaatctgg

SEQ ID NO: 913261 - DNA, 15 bp, Homo sapiens
ccaacattcaatctg

SEQ ID NO: 913262 - DNA, 15 bp, Homo sapiens
gccaacattcaatct

SEQ ID NO: 913263 - DNA, 15 bp, Homo sapiens
tgccaacattcaatc

SEQ ID NO: 913264 - DNA, 15 bp, Homo sapiens
ctgccaacattcaat

SEQ ID NO: 913265 - DNA, 15 bp, Homo sapiens
cctgccaacattcaa

SEQ ID NO: 913266 - DNA, 15 bp, Homo sapiens
ccctgccaacattca

SEQ ID NO: 913267 - DNA, 15 bp, Homo sapiens
accctgccaacattc

SEQ ID NO: 913268 - DNA, 15 bp, Homo sapiens
taccctgccaacatt

SEQ ID NO: 913269 - DNA, 15 bp, Homo sapiens
ttaccctgccaacat

SEQ ID NO: 913270 - DNA, 15 bp, Homo sapiens
tttaccctgccaaca

SEQ ID NO: 913271 - DNA, 15 bp, Homo sapiens
atttaccctgccaac

SEQ ID NO: 913272 - DNA, 15 bp, Homo sapiens
catttaccctgccaa

SEQ ID NO: 913273 - DNA, 15 bp, Homo sapiens
ccatttaccctgcca

SEQ ID NO: 913274 - DNA, 15 bp, Homo sapiens
accatttaccctgcc

SEQ ID NO: 913275 - DNA, 15 bp, Homo sapiens
caccatttaccctgc

SEQ ID NO: 913276 - DNA, 15 bp, Homo sapiens
tcaccatttaccctg

SEQ ID NO: 913277 - DNA, 15 bp, Homo sapiens
gtcaccatttaccct

SEQ ID NO: 913278 - DNA, 15 bp, Homo sapiens
tgtcaccatttaccc

SEQ ID NO: 913279 - DNA, 15 bp, Homo sapiens
atgtcaccatttacc

SEQ ID NO: 913280 - DNA, 15 bp, Homo sapiens
catgtcaccatttac

SEQ ID NO: 913281 - DNA, 15 bp, Homo sapiens
acatgtcaccattta

SEQ ID NO: 913282 - DNA, 15 bp, Homo sapiens
aacatgtcaccattt

SEQ ID NO: 913283 - DNA, 15 bp, Homo sapiens
taacatgtcaccatt

SEQ ID NO: 913284 - DNA, 15 bp, Homo sapiens
ataacatgtcaccat

SEQ ID NO: 913285 - DNA, 15 bp, Homo sapiens
tataacatgtcacca

SEQ ID NO: 913286 - DNA, 15 bp, Homo sapiens
atataacatgtcacc

SEQ ID NO: 913287 - DNA, 15 bp, Homo sapiens
catataacatgtcac

SEQ ID NO: 913288 - DNA, 15 bp, Homo sapiens
acatataacatgtca

SEQ ID NO: 913289 - DNA, 15 bp, Homo sapiens
tacatataacatgtc

SEQ ID NO: 913290 - DNA, 15 bp, Homo sapiens
atacatataacatgt

SEQ ID NO: 913291 - DNA, 15 bp, Homo sapiens
aatacatataacatg

SEQ ID NO: 913292 - DNA, 15 bp, Homo sapiens
gaatacatataacat

SEQ ID NO: 913293 - DNA, 15 bp, Homo sapiens
agaatacatataaca

SEQ ID NO: 913294 - DNA, 15 bp, Homo sapiens
cagaatacatataac

SEQ ID NO: 913295 - DNA, 15 bp, Homo sapiens
acagaatacatataa

SEQ ID NO: 913296 - DNA, 15 bp, Homo sapiens
tacagaatacatata

SEQ ID NO: 913297 - DNA, 15 bp, Homo sapiens
gtacagaatacatat

SEQ ID NO: 913298 - DNA, 15 bp, Homo sapiens
agtacagaatacata

SEQ ID NO: 913299 - DNA, 15 bp, Homo sapiens
aagtacagaatacat

SEQ ID NO: 913300 - DNA, 15 bp, Homo sapiens
aaagtacagaataca

SEQ ID NO: 913301 - DNA, 15 bp, Homo sapiens
caaagtacagaatac

SEQ ID NO: 913302 - DNA, 15 bp, Homo sapiens
acaaagtacagaata

SEQ ID NO: 913303 - DNA, 15 bp, Homo sapiens
aacaaagtacagaat

SEQ ID NO: 913304 - DNA, 15 bp, Homo sapiens
aaacaaagtacagaa

SEQ ID NO: 913305 - DNA, 15 bp, Homo sapiens
aaaacaaagtacaga

SEQ ID NO: 913306 - DNA, 15 bp, Homo sapiens
caaaacaaagtacag

SEQ ID NO: 913307 - DNA, 15 bp, Homo sapiens
tcaaaacaaagtaca

SEQ ID NO: 913308 - DNA, 15 bp, Homo sapiens
gtcaaaacaaagtac

SEQ ID NO: 913309 - DNA, 15 bp, Homo sapiens
agtcaaaacaaagta

SEQ ID NO: 913310 - DNA, 15 bp, Homo sapiens
aagtcaaaacaaagt

SEQ ID NO: 913311 - DNA, 15 bp, Homo sapiens
taagtcaaaacaaag

SEQ ID NO: 913312 - DNA, 15 bp, Homo sapiens
ttaagtcaaaacaaa

SEQ ID NO: 913313 - DNA, 15 bp, Homo sapiens
attaagtcaaaacaa

SEQ ID NO: 913314 - DNA, 15 bp, Homo sapiens
tattaagtcaaaaca

SEQ ID NO: 913315 - DNA, 15 bp, Homo sapiens
gtattaagtcaaaac

SEQ ID NO: 913316 - DNA, 15 bp, Homo sapiens
ggtattaagtcaaaa

SEQ ID NO: 913317 - DNA, 15 bp, Homo sapiens
tggtattaagtcaaa

SEQ ID NO: 913318 - DNA, 15 bp, Homo sapiens
atggtattaagtcaa

SEQ ID NO: 913319 - DNA, 15 bp, Homo sapiens
aatggtattaagtca

SEQ ID NO: 913320 - DNA, 15 bp, Homo sapiens
aaatggtattaagtc

SEQ ID NO: 913321 - DNA, 15 bp, Homo sapiens
gaaatggtattaagt

SEQ ID NO: 913322 - DNA, 15 bp, Homo sapiens
tgaaatggtattaag

SEQ ID NO: 913323 - DNA, 15 bp, Homo sapiens
atgaaatggtattaa

SEQ ID NO: 913324 - DNA, 15 bp, Homo sapiens
tatgaaatggtatta

SEQ ID NO: 913325 - DNA, 15 bp, Homo sapiens
ttatgaaatggtatt

SEQ ID NO: 913326 - DNA, 15 bp, Homo sapiens
attatgaaatggtat

SEQ ID NO: 913327 - DNA, 15 bp, Homo sapiens
aattatgaaatggta

SEQ ID NO: 913328 - DNA, 15 bp, Homo sapiens
taattatgaaatggt

SEQ ID NO: 913329 - DNA, 15 bp, Homo sapiens
ataattatgaaatgg

SEQ ID NO: 913330 - DNA, 15 bp, Homo sapiens
aataattatgaaatg

SEQ ID NO: 913331 - DNA, 15 bp, Homo sapiens
aaataattatgaaat

SEQ ID NO: 913332 - DNA, 15 bp, Homo sapiens
aaaataattatgaaa

SEQ ID NO: 913333 - DNA, 15 bp, Homo sapiens
taaaataattatgaa

SEQ ID NO: 913334 - DNA, 15 bp, Homo sapiens
ataaaataattatga

SEQ ID NO: 913335 - DNA, 15 bp, Homo sapiens
tataaaataattatg

SEQ ID NO: 913336 - DNA, 15 bp, Homo sapiens
atataaaataattat

SEQ ID NO: 913337 - DNA, 15 bp, Homo sapiens
gatataaaataatta

SEQ ID NO: 913338 - DNA, 15 bp, Homo sapiens
tgatataaaataatt

SEQ ID NO: 913339 - DNA, 15 bp, Homo sapiens
ctgatataaaataat

SEQ ID NO: 913340 - DNA, 15 bp, Homo sapiens
actgatataaaataa

SEQ ID NO: 913341 - DNA, 15 bp, Homo sapiens
tactgatataaaata

SEQ ID NO: 913342 - DNA, 15 bp, Homo sapiens
gtactgatataaaat

SEQ ID NO: 913343 - DNA, 15 bp, Homo sapiens
cgtactgatataaaa

SEQ ID NO: 913344 - DNA, 15 bp, Homo sapiens
acgtactgatataaa

SEQ ID NO: 913345 - DNA, 15 bp, Homo sapiens
tacgtactgatataa

SEQ ID NO: 913346 - DNA, 15 bp, Homo sapiens
atacgtactgatata

SEQ ID NO: 913347 - DNA, 15 bp, Homo sapiens
tatacgtactgatat

SEQ ID NO: 913348 - DNA, 15 bp, Homo sapiens
ctatacgtactgata

SEQ ID NO: 913349 - DNA, 15 bp, Homo sapiens
actatacgtactgat

SEQ ID NO: 913350 - DNA, 15 bp, Homo sapiens
tactatacgtactga

SEQ ID NO: 913351 - DNA, 15 bp, Homo sapiens
atactatacgtactg

SEQ ID NO: 913352 - DNA, 15 bp, Homo sapiens
aatactatacgtact

SEQ ID NO: 913353 - DNA, 15 bp, Homo sapiens
caatactatacgtac

SEQ ID NO: 913354 - DNA, 15 bp, Homo sapiens
gcaatactatacgta

SEQ ID NO: 913355 - DNA, 15 bp, Homo sapiens
agcaatactatacgt

SEQ ID NO: 913356 - DNA, 15 bp, Homo sapiens
cagcaatactatacg

SEQ ID NO: 913357 - DNA, 15 bp, Homo sapiens
acagcaatactatac

SEQ ID NO: 913358 - DNA, 15 bp, Homo sapiens
aacagcaatactata

SEQ ID NO: 913359 - DNA, 15 bp, Homo sapiens
gaacagcaatactat

SEQ ID NO: 913360 - DNA, 15 bp, Homo sapiens
agaacagcaatacta

SEQ ID NO: 913361 - DNA, 15 bp, Homo sapiens
aagaacagcaatact

SEQ ID NO: 913362 - DNA, 15 bp, Homo sapiens
aaagaacagcaatac

SEQ ID NO: 913363 - DNA, 15 bp, Homo sapiens
aaaagaacagcaata

SEQ ID NO: 913364 - DNA, 15 bp, Homo sapiens
aaaaagaacagcaat

SEQ ID NO: 913365 - DNA, 15 bp, Homo sapiens
taaaaagaacagcaa

SEQ ID NO: 913366 - DNA, 15 bp, Homo sapiens
ttaaaaagaacagca

SEQ ID NO: 913367 - DNA, 15 bp, Homo sapiens
tttaaaaagaacagc

SEQ ID NO: 913368 - DNA, 15 bp, Homo sapiens
ctttaaaaagaacag

SEQ ID NO: 913369 - DNA, 15 bp, Homo sapiens
cctttaaaaagaaca

SEQ ID NO: 913370 - DNA, 15 bp, Homo sapiens
gcctttaaaaagaac

SEQ ID NO: 913371 - DNA, 15 bp, Homo sapiens
agcctttaaaaagaa

SEQ ID NO: 913372 - DNA, 15 bp, Homo sapiens
tagcctttaaaaaga

SEQ ID NO: 913373 - DNA, 15 bp, Homo sapiens
atagcctttaaaaag

SEQ ID NO: 913374 - DNA, 15 bp, Homo sapiens
catagcctttaaaaa

SEQ ID NO: 913375 - DNA, 15 bp, Homo sapiens
acatagcctttaaaa

SEQ ID NO: 913376 - DNA, 15 bp, Homo sapiens
tacatagcctttaaa

SEQ ID NO: 913377 - DNA, 15 bp, Homo sapiens
ttacatagcctttaa

SEQ ID NO: 913378 - DNA, 15 bp, Homo sapiens
attacatagccttta

SEQ ID NO: 913379 - DNA, 15 bp, Homo sapiens
aattacatagccttt

SEQ ID NO: 913380 - DNA, 15 bp, Homo sapiens
aaattacatagcctt

SEQ ID NO: 913381 - DNA, 15 bp, Homo sapiens
aaaattacatagcct

SEQ ID NO: 913382 - DNA, 15 bp, Homo sapiens
aaaaattacatagcc

SEQ ID NO: 913383 - DNA, 15 bp, Homo sapiens
gaaaaattacatagc

SEQ ID NO: 913384 - DNA, 15 bp, Homo sapiens
agaaaaattacatag

SEQ ID NO: 913385 - DNA, 15 bp, Homo sapiens
aagaaaaattacata

SEQ ID NO: 913386 - DNA, 15 bp, Homo sapiens
aaagaaaaattacat

SEQ ID NO: 913387 - DNA, 15 bp, Homo sapiens
aaaagaaaaattaca

SEQ ID NO: 913388 - DNA, 15 bp, Homo sapiens
aaaaagaaaaattac

SEQ ID NO: 913389 - DNA, 15 bp, Homo sapiens
taaaaagaaaaatta

SEQ ID NO: 913390 - DNA, 15 bp, Homo sapiens
ataaaaagaaaaatt

SEQ ID NO: 913391 - DNA, 15 bp, Homo sapiens
tataaaaagaaaaat

SEQ ID NO: 913392 - DNA, 15 bp, Homo sapiens
gtataaaaagaaaaa

SEQ ID NO: 913393 - DNA, 15 bp, Homo sapiens
tgtataaaaagaaaa

SEQ ID NO: 913394 - DNA, 15 bp, Homo sapiens
ctgtataaaaagaaa

SEQ ID NO: 913395 - DNA, 15 bp, Homo sapiens
cctgtataaaaagaa

SEQ ID NO: 913396 - DNA, 15 bp, Homo sapiens
acctgtataaaaaga

SEQ ID NO: 913397 - DNA, 15 bp, Homo sapiens
cacctgtataaaaag

SEQ ID NO: 913398 - DNA, 15 bp, Homo sapiens
acacctgtataaaaa

SEQ ID NO: 913399 - DNA, 15 bp, Homo sapiens
aacacctgtataaaa

SEQ ID NO: 913400 - DNA, 15 bp, Homo sapiens
taacacctgtataaa

SEQ ID NO: 913401 - DNA, 15 bp, Homo sapiens
ttaacacctgtataa

SEQ ID NO: 913402 - DNA, 15 bp, Homo sapiens
attaacacctgtata

SEQ ID NO: 913403 - DNA, 15 bp, Homo sapiens
aattaacacctgtat

SEQ ID NO: 913404 - DNA, 15 bp, Homo sapiens
aaattaacacctgta

SEQ ID NO: 913405 - DNA, 15 bp, Homo sapiens
caaattaacacctgt

SEQ ID NO: 913406 - DNA, 15 bp, Homo sapiens
tcaaattaacacctg

SEQ ID NO: 913407 - DNA, 15 bp, Homo sapiens
atcaaattaacacct

SEQ ID NO: 913408 - DNA, 15 bp, Homo sapiens
tatcaaattaacacc

SEQ ID NO: 913409 - DNA, 15 bp, Homo sapiens
ttatcaaattaacac

SEQ ID NO: 913410 - DNA, 15 bp, Homo sapiens
attatcaaattaaca

SEQ ID NO: 913411 - DNA, 15 bp, Homo sapiens
aattatcaaattaac

SEQ ID NO: 913412 - DNA, 15 bp, Homo sapiens
aaattatcaaattaa

SEQ ID NO: 913413 - DNA, 15 bp, Homo sapiens
caaattatcaaatta

SEQ ID NO: 913414 - DNA, 15 bp, Homo sapiens
acaaattatcaaatt

SEQ ID NO: 913415 - DNA, 15 bp, Homo sapiens
cacaaattatcaaat

SEQ ID NO: 913416 - DNA, 15 bp, Homo sapiens
tcacaaattatcaaa

SEQ ID NO: 913417 - DNA, 15 bp, Homo sapiens
ttcacaaattatcaa

SEQ ID NO: 913418 - DNA, 15 bp, Homo sapiens
cttcacaaattatca

SEQ ID NO: 913419 - DNA, 15 bp, Homo sapiens
acttcacaaattatc

SEQ ID NO: 913420 - DNA, 15 bp, Homo sapiens
aacttcacaaattat

SEQ ID NO: 913421 - DNA, 15 bp, Homo sapiens
aaacttcacaaatta

SEQ ID NO: 913422 - DNA, 15 bp, Homo sapiens
taaacttcacaaatt

SEQ ID NO: 913423 - DNA, 15 bp, Homo sapiens
ataaacttcacaaat

SEQ ID NO: 913424 - DNA, 15 bp, Homo sapiens
cataaacttcacaaa

SEQ ID NO: 913425 - DNA, 15 bp, Homo sapiens
tcataaacttcacaa

SEQ ID NO: 913426 - DNA, 15 bp, Homo sapiens
ttcataaacttcaca

SEQ ID NO: 913427 - DNA, 15 bp, Homo sapiens
cttcataaacttcac

SEQ ID NO: 913428 - DNA, 15 bp, Homo sapiens
acttcataaacttca

SEQ ID NO: 913429 - DNA, 15 bp, Homo sapiens
aacttcataaacttc

SEQ ID NO: 913430 - DNA, 15 bp, Homo sapiens
aaacttcataaactt

SEQ ID NO: 913431 - DNA, 15 bp, Homo sapiens
gaaacttcataaact

SEQ ID NO: 913432 - DNA, 15 bp, Homo sapiens
ggaaacttcataaac

SEQ ID NO: 913433 - DNA, 15 bp, Homo sapiens
tggaaacttcataaa

SEQ ID NO: 913434 - DNA, 15 bp, Homo sapiens
ttggaaacttcataa

SEQ ID NO: 913435 - DNA, 15 bp, Homo sapiens
attggaaacttcata

SEQ ID NO: 913436 - DNA, 15 bp, Homo sapiens
aattggaaacttcat

SEQ ID NO: 913437 - DNA, 15 bp, Homo sapiens
aaattggaaacttca

SEQ ID NO: 913438 - DNA, 15 bp, Homo sapiens
aaaattggaaacttc

SEQ ID NO: 913439 - DNA, 15 bp, Homo sapiens
caaaattggaaactt

SEQ ID NO: 913440 - DNA, 15 bp, Homo sapiens
ccaaaattggaaact

SEQ ID NO: 913441 - DNA, 15 bp, Homo sapiens
cccaaaattggaaac

SEQ ID NO: 913442 - DNA, 15 bp, Homo sapiens
ccccaaaattggaaa

SEQ ID NO: 913443 - DNA, 15 bp, Homo sapiens
accccaaaattggaa

SEQ ID NO: 913444 - DNA, 15 bp, Homo sapiens
aaccccaaaattgga

SEQ ID NO: 913445 - DNA, 15 bp, Homo sapiens
caaccccaaaattgg

SEQ ID NO: 913446 - DNA, 15 bp, Homo sapiens
acaaccccaaaattg

SEQ ID NO: 913447 - DNA, 15 bp, Homo sapiens
tacaaccccaaaatt

SEQ ID NO: 913448 - DNA, 15 bp, Homo sapiens
ttacaaccccaaaat

SEQ ID NO: 913449 - DNA, 15 bp, Homo sapiens
tttacaaccccaaaa

SEQ ID NO: 913450 - DNA, 15 bp, Homo sapiens
gtttacaaccccaaa

SEQ ID NO: 913451 - DNA, 15 bp, Homo sapiens
agtttacaaccccaa

SEQ ID NO: 913452 - DNA, 15 bp, Homo sapiens
cagtttacaacccca

SEQ ID NO: 913453 - DNA, 15 bp, Homo sapiens
acagtttacaacccc

SEQ ID NO: 913454 - DNA, 15 bp, Homo sapiens
aacagtttacaaccc

SEQ ID NO: 913455 - DNA, 15 bp, Homo sapiens
aaacagtttacaacc

SEQ ID NO: 913456 - DNA, 15 bp, Homo sapiens
aaaacagtttacaac

SEQ ID NO: 913457 - DNA, 15 bp, Homo sapiens
taaaacagtttacaa

SEQ ID NO: 913458 - DNA, 15 bp, Homo sapiens
ttaaaacagtttaca

SEQ ID NO: 913459 - DNA, 15 bp, Homo sapiens
attaaaacagtttac

SEQ ID NO: 913460 - DNA, 15 bp, Homo sapiens
cattaaaacagttta

SEQ ID NO: 913461 - DNA, 15 bp, Homo sapiens
tcattaaaacagttt

SEQ ID NO: 913462 - DNA, 15 bp, Homo sapiens
ttcattaaaacagtt

SEQ ID NO: 913463 - DNA, 15 bp, Homo sapiens
attcattaaaacagt

SEQ ID NO: 913464 - DNA, 15 bp, Homo sapiens
tattcattaaaacag

SEQ ID NO: 913465 - DNA, 15 bp, Homo sapiens
atattcattaaaaca

SEQ ID NO: 913466 - DNA, 15 bp, Homo sapiens
gatattcattaaaac

SEQ ID NO: 913467 - DNA, 15 bp, Homo sapiens
ggatattcattaaaa

SEQ ID NO: 913468 - DNA, 15 bp, Homo sapiens
aggatattcattaaa

SEQ ID NO: 913469 - DNA, 15 bp, Homo sapiens
aaggatattcattaa

SEQ ID NO: 913470 - DNA, 15 bp, Homo sapiens
taaggatattcatta

SEQ ID NO: 913471 - DNA, 15 bp, Homo sapiens
ataaggatattcatt

SEQ ID NO: 913472 - DNA, 15 bp, Homo sapiens
tataaggatattcat

SEQ ID NO: 913473 - DNA, 15 bp, Homo sapiens
atataaggatattca

SEQ ID NO: 913474 - DNA, 15 bp, Homo sapiens
tatataaggatattc

SEQ ID NO: 913475 - DNA, 15 bp, Homo sapiens
atatataaggatatt

SEQ ID NO: 913476 - DNA, 15 bp, Homo sapiens
catatataaggatat

SEQ ID NO: 913477 - DNA, 15 bp, Homo sapiens
acatatataaggata

SEQ ID NO: 913478 - DNA, 15 bp, Homo sapiens
aacatatataaggat

SEQ ID NO: 913479 - DNA, 15 bp, Homo sapiens
taacatatataagga

SEQ ID NO: 913480 - DNA, 15 bp, Homo sapiens
ataacatatataagg

SEQ ID NO: 913481 - DNA, 15 bp, Homo sapiens
aataacatatataag

SEQ ID NO: 913482 - DNA, 15 bp, Homo sapiens
aaataacatatataa

SEQ ID NO: 913483 - DNA, 15 bp, Homo sapiens
aaaataacatatata

SEQ ID NO: 913484 - DNA, 15 bp, Homo sapiens
caaaataacatatat

SEQ ID NO: 913485 - DNA, 15 bp, Homo sapiens
gcaaaataacatata

SEQ ID NO: 913486 - DNA, 15 bp, Homo sapiens
tgcaaaataacatat

SEQ ID NO: 913487 - DNA, 15 bp, Homo sapiens
ttgcaaaataacata

SEQ ID NO: 913488 - DNA, 15 bp, Homo sapiens
tttgcaaaataacat

SEQ ID NO: 913489 - DNA, 15 bp, Homo sapiens
atttgcaaaataaca

SEQ ID NO: 913490 - DNA, 15 bp, Homo sapiens
catttgcaaaataac

SEQ ID NO: 913491 - DNA, 15 bp, Homo sapiens
acatttgcaaaataa

SEQ ID NO: 913492 - DNA, 15 bp, Homo sapiens
tacatttgcaaaata

SEQ ID NO: 913493 - DNA, 15 bp, Homo sapiens
gtacatttgcaaaat

SEQ ID NO: 913494 - DNA, 15 bp, Homo sapiens
tgtacatttgcaaaa

SEQ ID NO: 913495 - DNA, 15 bp, Homo sapiens
ttgtacatttgcaaa

SEQ ID NO: 913496 - DNA, 15 bp, Homo sapiens
cttgtacatttgcaa

SEQ ID NO: 913497 - DNA, 15 bp, Homo sapiens
acttgtacatttgca

SEQ ID NO: 913498 - DNA, 15 bp, Homo sapiens
tacttgtacatttgc

SEQ ID NO: 913499 - DNA, 15 bp, Homo sapiens
atacttgtacatttg

SEQ ID NO: 913500 - DNA, 15 bp, Homo sapiens
tatacttgtacattt

SEQ ID NO: 913501 - DNA, 15 bp, Homo sapiens
atatacttgtacatt

SEQ ID NO: 913502 - DNA, 15 bp, Homo sapiens
gatatacttgtacat

SEQ ID NO: 913503 - DNA, 15 bp, Homo sapiens
agatatacttgtaca

SEQ ID NO: 913504 - DNA, 15 bp, Homo sapiens
cagatatacttgtac

SEQ ID NO: 913505 - DNA, 15 bp, Homo sapiens
acagatatacttgta

SEQ ID NO: 913506 - DNA, 15 bp, Homo sapiens
cacagatatacttgt

SEQ ID NO: 913507 - DNA, 15 bp, Homo sapiens
ccacagatatacttg

SEQ ID NO: 913508 - DNA, 15 bp, Homo sapiens
tccacagatatactt

SEQ ID NO: 913509 - DNA, 15 bp, Homo sapiens
ttccacagatatact

SEQ ID NO: 913510 - DNA, 15 bp, Homo sapiens
attccacagatatac

SEQ ID NO: 913511 - DNA, 15 bp, Homo sapiens
tattccacagatata

SEQ ID NO: 913512 - DNA, 15 bp, Homo sapiens
ttattccacagatat

SEQ ID NO: 913513 - DNA, 15 bp, Homo sapiens
tttattccacagata

SEQ ID NO: 913514 - DNA, 15 bp, Homo sapiens
atttattccacagat

SEQ ID NO: 913515 - DNA, 15 bp, Homo sapiens
aatttattccacaga

SEQ ID NO: 913516 - DNA, 15 bp, Homo sapiens
caatttattccacag

SEQ ID NO: 913517 - DNA, 15 bp, Homo sapiens
gcaatttattccaca

SEQ ID NO: 913518 - DNA, 15 bp, Homo sapiens
agcaatttattccac

SEQ ID NO: 913519 - DNA, 15 bp, Homo sapiens
cagcaatttattcca

SEQ ID NO: 913520 - DNA, 15 bp, Homo sapiens
gcagcaatttattcc

SEQ ID NO: 913521 - DNA, 15 bp, Homo sapiens
tgcagcaatttattc

SEQ ID NO: 913522 - DNA, 15 bp, Homo sapiens
ttgcagcaatttatt

SEQ ID NO: 913523 - DNA, 15 bp, Homo sapiens
cttgcagcaatttat

SEQ ID NO: 913524 - DNA, 15 bp, Homo sapiens
acttgcagcaattta

SEQ ID NO: 913525 - DNA, 15 bp, Homo sapiens
cacttgcagcaattt

SEQ ID NO: 913526 - DNA, 15 bp, Homo sapiens
acacttgcagcaatt

SEQ ID NO: 913527 - DNA, 15 bp, Homo sapiens
aacacttgcagcaat

SEQ ID NO: 913528 - DNA, 15 bp, Homo sapiens
caacacttgcagcaa

SEQ ID NO: 913529 - DNA, 15 bp, Homo sapiens
acaacacttgcagca

SEQ ID NO: 913530 - DNA, 15 bp, Homo sapiens
tacaacacttgcagc

SEQ ID NO: 913531 - DNA, 15 bp, Homo sapiens
ttacaacacttgcag

SEQ ID NO: 913532 - DNA, 15 bp, Homo sapiens
attacaacacttgca

SEQ ID NO: 913533 - DNA, 15 bp, Homo sapiens
aattacaacacttgc

SEQ ID NO: 913534 - DNA, 15 bp, Homo sapiens
caattacaacacttg

SEQ ID NO: 913535 - DNA, 15 bp, Homo sapiens
acaattacaacactt

SEQ ID NO: 913536 - DNA, 15 bp, Homo sapiens
gacaattacaacact

SEQ ID NO: 913537 - DNA, 15 bp, Homo sapiens
tgacaattacaacac

SEQ ID NO: 913538 - DNA, 15 bp, Homo sapiens
atgacaattacaaca

SEQ ID NO: 913539 - DNA, 15 bp, Homo sapiens
catgacaattacaac

SEQ ID NO: 913540 - DNA, 15 bp, Homo sapiens
acatgacaattacaa

SEQ ID NO: 913541 - DNA, 15 bp, Homo sapiens
tacatgacaattaca

SEQ ID NO: 913542 - DNA, 15 bp, Homo sapiens
atacatgacaattac

SEQ ID NO: 913543 - DNA, 15 bp, Homo sapiens
catacatgacaatta

SEQ ID NO: 913544 - DNA, 15 bp, Homo sapiens
acatacatgacaatt

SEQ ID NO: 913545 - DNA, 15 bp, Homo sapiens
aacatacatgacaat

SEQ ID NO: 913546 - DNA, 15 bp, Homo sapiens
caacatacatgacaa

SEQ ID NO: 913547 - DNA, 15 bp, Homo sapiens
gcaacatacatgaca

SEQ ID NO: 913548 - DNA, 15 bp, Homo sapiens
tgcaacatacatgac

SEQ ID NO: 913549 - DNA, 15 bp, Homo sapiens
ttgcaacatacatga

SEQ ID NO: 913550 - DNA, 15 bp, Homo sapiens
tttgcaacatacatg

SEQ ID NO: 913551 - DNA, 15 bp, Homo sapiens
atttgcaacatacat

SEQ ID NO: 913552 - DNA, 15 bp, Homo sapiens
tatttgcaacataca

SEQ ID NO: 913553 - DNA, 15 bp, Homo sapiens
gtatttgcaacatac

SEQ ID NO: 913554 - DNA, 15 bp, Homo sapiens
tgtatttgcaacata

SEQ ID NO: 913555 - DNA, 15 bp, Homo sapiens
atgtatttgcaacat

SEQ ID NO: 913556 - DNA, 15 bp, Homo sapiens
aatgtatttgcaaca

SEQ ID NO: 913557 - DNA, 15 bp, Homo sapiens
gaatgtatttgcaac

SEQ ID NO: 913558 - DNA, 15 bp, Homo sapiens
agaatgtatttgcaa

SEQ ID NO: 913559 - DNA, 15 bp, Homo sapiens
tagaatgtatttgca

SEQ ID NO: 913560 - DNA, 15 bp, Homo sapiens
ttagaatgtatttgc

SEQ ID NO: 913561 - DNA, 15 bp, Homo sapiens
gttagaatgtatttg

SEQ ID NO: 913562 - DNA, 15 bp, Homo sapiens
tgttagaatgtattt

SEQ ID NO: 913563 - DNA, 15 bp, Homo sapiens
ctgttagaatgtatt

SEQ ID NO: 913564 - DNA, 15 bp, Homo sapiens
actgttagaatgtat

SEQ ID NO: 913565 - DNA, 15 bp, Homo sapiens
aactgttagaatgta

SEQ ID NO: 913566 - DNA, 15 bp, Homo sapiens
aaactgttagaatgt

SEQ ID NO: 913567 - DNA, 15 bp, Homo sapiens
caaactgttagaatg

SEQ ID NO: 913568 - DNA, 15 bp, Homo sapiens
acaaactgttagaat

SEQ ID NO: 913569 - DNA, 15 bp, Homo sapiens
gacaaactgttagaa

SEQ ID NO: 913570 - DNA, 15 bp, Homo sapiens
tgacaaactgttaga

SEQ ID NO: 913571 - DNA, 15 bp, Homo sapiens
gtgacaaactgttag

SEQ ID NO: 913572 - DNA, 15 bp, Homo sapiens
agtgacaaactgtta

SEQ ID NO: 913573 - DNA, 15 bp, Homo sapiens
aagtgacaaactgtt

SEQ ID NO: 913574 - DNA, 15 bp, Homo sapiens
aaagtgacaaactgt

SEQ ID NO: 913575 - DNA, 15 bp, Homo sapiens
aaaagtgacaaactg

SEQ ID NO: 913576 - DNA, 15 bp, Homo sapiens
aaaaagtgacaaact

SEQ ID NO: 913577 - DNA, 15 bp, Homo sapiens
aaaaaagtgacaaac

SEQ ID NO: 913578 - DNA, 15 bp, Homo sapiens
aaaaaaagtgacaaa

SEQ ID NO: 913579 - DNA, 15 bp, Homo sapiens
caaaaaaagtgacaa

SEQ ID NO: 913580 - DNA, 15 bp, Homo sapiens
gcaaaaaaagtgaca

SEQ ID NO: 913581 - DNA, 15 bp, Homo sapiens
agcaaaaaaagtgac

SEQ ID NO: 913582 - DNA, 15 bp, Homo sapiens
aagcaaaaaaagtga

SEQ ID NO: 913583 - DNA, 15 bp, Homo sapiens
aaagcaaaaaaagtg

SEQ ID NO: 913584 - DNA, 15 bp, Homo sapiens
taaagcaaaaaaagt

SEQ ID NO: 913585 - DNA, 15 bp, Homo sapiens
ataaagcaaaaaaag

SEQ ID NO: 913586 - DNA, 15 bp, Homo sapiens
cataaagcaaaaaaa

SEQ ID NO: 913587 - DNA, 15 bp, Homo sapiens
ccataaagcaaaaaa

SEQ ID NO: 913588 - DNA, 15 bp, Homo sapiens
gccataaagcaaaaa

SEQ ID NO: 913589 - DNA, 15 bp, Homo sapiens
tgccataaagcaaaa

SEQ ID NO: 913590 - DNA, 15 bp, Homo sapiens
atgccataaagcaaa

SEQ ID NO: 913591 - DNA, 15 bp, Homo sapiens
aatgccataaagcaa

SEQ ID NO: 913592 - DNA, 15 bp, Homo sapiens
aaatgccataaagca

SEQ ID NO: 913593 - DNA, 15 bp, Homo sapiens
aaaatgccataaagc

SEQ ID NO: 913594 - DNA, 15 bp, Homo sapiens
aaaaatgccataaag

SEQ ID NO: 913595 - DNA, 15 bp, Homo sapiens
aaaaaatgccataaa

SEQ ID NO: 913596 - DNA, 15 bp, Homo sapiens
caaaaaatgccataa

SEQ ID NO: 913597 - DNA, 15 bp, Homo sapiens
gcaaaaaatgccata

SEQ ID NO: 913598 - DNA, 15 bp, Homo sapiens
agcaaaaaatgccat

SEQ ID NO: 913599 - DNA, 15 bp, Homo sapiens
cagcaaaaaatgcca

SEQ ID NO: 913600 - DNA, 15 bp, Homo sapiens
acagcaaaaaatgcc

SEQ ID NO: 913601 - DNA, 15 bp, Homo sapiens
cacagcaaaaaatgc

SEQ ID NO: 913602 - DNA, 15 bp, Homo sapiens
tcacagcaaaaaatg

SEQ ID NO: 913603 - DNA, 15 bp, Homo sapiens
ttcacagcaaaaaat

SEQ ID NO: 913604 - DNA, 15 bp, Homo sapiens
tttcacagcaaaaaa

SEQ ID NO: 913605 - DNA, 15 bp, Homo sapiens
atttcacagcaaaaa

SEQ ID NO: 913606 - DNA, 15 bp, Homo sapiens
tatttcacagcaaaa

SEQ ID NO: 913607 - DNA, 15 bp, Homo sapiens
atatttcacagcaaa

SEQ ID NO: 913608 - DNA, 15 bp, Homo sapiens
aatatttcacagcaa

SEQ ID NO: 913609 - DNA, 15 bp, Homo sapiens
aaatatttcacagca

SEQ ID NO: 913610 - DNA, 15 bp, Homo sapiens
gaaatatttcacagc

SEQ ID NO: 913611 - DNA, 15 bp, Homo sapiens
agaaatatttcacag

SEQ ID NO: 913612 - DNA, 15 bp, Homo sapiens
aagaaatatttcaca

SEQ ID NO: 913613 - DNA, 15 bp, Homo sapiens
aaagaaatatttcac

SEQ ID NO: 913614 - DNA, 15 bp, Homo sapiens
aaaagaaatatttca

SEQ ID NO: 913615 - DNA, 15 bp, Homo sapiens
aaaaagaaatatttc

SEQ ID NO: 913616 - DNA, 15 bp, Homo sapiens
taaaaagaaatattt

SEQ ID NO: 913617 - DNA, 15 bp, Homo sapiens
ataaaaagaaatatt

SEQ ID NO: 913618 - DNA, 15 bp, Homo sapiens
cataaaaagaaatat

SEQ ID NO: 913619 - DNA, 15 bp, Homo sapiens
gcataaaaagaaata

SEQ ID NO: 913620 - DNA, 15 bp, Homo sapiens
agcataaaaagaaat

SEQ ID NO: 913621 - DNA, 15 bp, Homo sapiens
aagcataaaaagaaa

SEQ ID NO: 913622 - DNA, 15 bp, Homo sapiens
taagcataaaaagaa

SEQ ID NO: 913623 - DNA, 15 bp, Homo sapiens
ctaagcataaaaaga

SEQ ID NO: 913624 - DNA, 15 bp, Homo sapiens
actaagcataaaaag

SEQ ID NO: 913625 - DNA, 15 bp, Homo sapiens
aactaagcataaaaa

SEQ ID NO: 913626 - DNA, 15 bp, Homo sapiens
taactaagcataaaa

SEQ ID NO: 913627 - DNA, 15 bp, Homo sapiens
ttaactaagcataaa

SEQ ID NO: 913628 - DNA, 15 bp, Homo sapiens
tttaactaagcataa

SEQ ID NO: 913629 - DNA, 15 bp, Homo sapiens
atttaactaagcata

SEQ ID NO: 913630 - DNA, 15 bp, Homo sapiens
aatttaactaagcat

SEQ ID NO: 913631 - DNA, 15 bp, Homo sapiens
aaatttaactaagca

SEQ ID NO: 913632 - DNA, 15 bp, Homo sapiens
taaatttaactaagc

SEQ ID NO: 913633 - DNA, 15 bp, Homo sapiens
ataaatttaactaag

SEQ ID NO: 913634 - DNA, 15 bp, Homo sapiens
aataaatttaactaa

SEQ ID NO: 913635 - DNA, 15 bp, Homo sapiens
taataaatttaacta

SEQ ID NO: 913636 - DNA, 15 bp, Homo sapiens
ataataaatttaact

SEQ ID NO: 913637 - DNA, 15 bp, Homo sapiens
aataataaatttaac

SEQ ID NO: 913638 - DNA, 15 bp, Homo sapiens
aaataataaatttaa

SEQ ID NO: 913639 - DNA, 15 bp, Homo sapiens
aaaataataaattta

SEQ ID NO: 913640 - DNA, 15 bp, Homo sapiens
aaaaataataaattt

SEQ ID NO: 913641 - DNA, 15 bp, Homo sapiens
aaaaaataataaatt

SEQ ID NO: 913642 - DNA, 15 bp, Homo sapiens
taaaaaataataaat

SEQ ID NO: 913643 - DNA, 15 bp, Homo sapiens
ttaaaaaataataaa

SEQ ID NO: 913644 - DNA, 15 bp, Homo sapiens
attaaaaaataataa

SEQ ID NO: 913645 - DNA, 15 bp, Homo sapiens
cattaaaaaataata

SEQ ID NO: 913646 - DNA, 15 bp, Homo sapiens
tcattaaaaaataat

SEQ ID NO: 913647 - DNA, 15 bp, Homo sapiens
gtcattaaaaaataa

SEQ ID NO: 913648 - DNA, 15 bp, Homo sapiens
agtcattaaaaaata

SEQ ID NO: 913649 - DNA, 15 bp, Homo sapiens
aagtcattaaaaaat

SEQ ID NO: 913650 - DNA, 15 bp, Homo sapiens
aaagtcattaaaaaa

SEQ ID NO: 913651 - DNA, 15 bp, Homo sapiens
aaaagtcattaaaaa

SEQ ID NO: 913652 - DNA, 15 bp, Homo sapiens
caaaagtcattaaaa

SEQ ID NO: 913653 - DNA, 15 bp, Homo sapiens
tcaaaagtcattaaa

SEQ ID NO: 913654 - DNA, 15 bp, Homo sapiens
gtcaaaagtcattaa

SEQ ID NO: 913655 - DNA, 15 bp, Homo sapiens
tgtcaaaagtcatta

SEQ ID NO: 913656 - DNA, 15 bp, Homo sapiens
atgtcaaaagtcatt

SEQ ID NO: 913657 - DNA, 15 bp, Homo sapiens
aatgtcaaaagtcat

SEQ ID NO: 913658 - DNA, 15 bp, Homo sapiens
aaatgtcaaaagtca

SEQ ID NO: 913659 - DNA, 15 bp, Homo sapiens
caaatgtcaaaagtc

SEQ ID NO: 913660 - DNA, 15 bp, Homo sapiens
acaaatgtcaaaagt

SEQ ID NO: 913661 - DNA, 15 bp, Homo sapiens
aacaaatgtcaaaag

SEQ ID NO: 913662 - DNA, 15 bp, Homo sapiens
taacaaatgtcaaaa

SEQ ID NO: 913663 - DNA, 15 bp, Homo sapiens
ataacaaatgtcaaa

SEQ ID NO: 913664 - DNA, 15 bp, Homo sapiens
tataacaaatgtcaa

SEQ ID NO: 913665 - DNA, 15 bp, Homo sapiens
ttataacaaatgtca

SEQ ID NO: 913666 - DNA, 15 bp, Homo sapiens
attataacaaatgtc

SEQ ID NO: 913667 - DNA, 15 bp, Homo sapiens
cattataacaaatgt

SEQ ID NO: 913668 - DNA, 15 bp, Homo sapiens
tcattataacaaatg

SEQ ID NO: 913669 - DNA, 15 bp, Homo sapiens
ctcattataacaaat

SEQ ID NO: 913670 - DNA, 15 bp, Homo sapiens
tctcattataacaaa

SEQ ID NO: 913671 - DNA, 15 bp, Homo sapiens
ttctcattataacaa

SEQ ID NO: 913672 - DNA, 15 bp, Homo sapiens
tttctcattataaca

SEQ ID NO: 913673 - DNA, 15 bp, Homo sapiens
ctttctcattataac

SEQ ID NO: 913674 - DNA, 15 bp, Homo sapiens
cctttctcattataa

SEQ ID NO: 913675 - DNA, 15 bp, Homo sapiens
gcctttctcattata

SEQ ID NO: 913676 - DNA, 15 bp, Homo sapiens
agcctttctcattat

SEQ ID NO: 913677 - DNA, 15 bp, Homo sapiens
aagcctttctcatta

SEQ ID NO: 913678 - DNA, 15 bp, Homo sapiens
gaagcctttctcatt

SEQ ID NO: 913679 - DNA, 15 bp, Homo sapiens
agaagcctttctcat

SEQ ID NO: 913680 - DNA, 15 bp, Homo sapiens
cagaagcctttctca

SEQ ID NO: 913681 - DNA, 15 bp, Homo sapiens
tcagaagcctttctc

SEQ ID NO: 913682 - DNA, 15 bp, Homo sapiens
ctcagaagcctttct

SEQ ID NO: 913683 - DNA, 15 bp, Homo sapiens
actcagaagcctttc

SEQ ID NO: 913684 - DNA, 15 bp, Homo sapiens
tactcagaagccttt

SEQ ID NO: 913685 - DNA, 15 bp, Homo sapiens
atactcagaagcctt

SEQ ID NO: 913686 - DNA, 15 bp, Homo sapiens
tatactcagaagcct

SEQ ID NO: 913687 - DNA, 15 bp, Homo sapiens
ttatactcagaagcc

SEQ ID NO: 913688 - DNA, 15 bp, Homo sapiens
tttatactcagaagc

SEQ ID NO: 913689 - DNA, 15 bp, Homo sapiens
gtttatactcagaag

SEQ ID NO: 913690 - DNA, 15 bp, Homo sapiens
agtttatactcagaa

SEQ ID NO: 913691 - DNA, 15 bp, Homo sapiens
aagtttatactcaga

SEQ ID NO: 913692 - DNA, 15 bp, Homo sapiens
caagtttatactcag

SEQ ID NO: 913693 - DNA, 15 bp, Homo sapiens
acaagtttatactca

SEQ ID NO: 913694 - DNA, 15 bp, Homo sapiens
aacaagtttatactc

SEQ ID NO: 913695 - DNA, 15 bp, Homo sapiens
aaacaagtttatact

SEQ ID NO: 913696 - DNA, 15 bp, Homo sapiens
aaaacaagtttatac

SEQ ID NO: 913697 - DNA, 15 bp, Homo sapiens
gaaaacaagtttata

SEQ ID NO: 913698 - DNA, 15 bp, Homo sapiens
agaaaacaagtttat

SEQ ID NO: 913699 - DNA, 15 bp, Homo sapiens
gagaaaacaagttta

SEQ ID NO: 913700 - DNA, 15 bp, Homo sapiens
tgagaaaacaagttt

SEQ ID NO: 913701 - DNA, 15 bp, Homo sapiens
atgagaaaacaagtt

SEQ ID NO: 913702 - DNA, 15 bp, Homo sapiens
gatgagaaaacaagt

SEQ ID NO: 913703 - DNA, 15 bp, Homo sapiens
agatgagaaaacaag

SEQ ID NO: 913704 - DNA, 15 bp, Homo sapiens
aagatgagaaaacaa

SEQ ID NO: 913705 - DNA, 15 bp, Homo sapiens
aaagatgagaaaaca

SEQ ID NO: 913706 - DNA, 15 bp, Homo sapiens
aaaagatgagaaaac

SEQ ID NO: 913707 - DNA, 15 bp, Homo sapiens
gaaaagatgagaaaa

SEQ ID NO: 913708 - DNA, 15 bp, Homo sapiens
agaaaagatgagaaa

SEQ ID NO: 913709 - DNA, 15 bp, Homo sapiens
gagaaaagatgagaa

SEQ ID NO: 913710 - DNA, 15 bp, Homo sapiens
ggagaaaagatgaga

SEQ ID NO: 913711 - DNA, 15 bp, Homo sapiens
aggagaaaagatgag

SEQ ID NO: 913712 - DNA, 15 bp, Homo sapiens
taggagaaaagatga

SEQ ID NO: 913713 - DNA, 15 bp, Homo sapiens
ttaggagaaaagatg

SEQ ID NO: 913714 - DNA, 15 bp, Homo sapiens
attaggagaaaagat

SEQ ID NO: 913715 - DNA, 15 bp, Homo sapiens
tattaggagaaaaga

SEQ ID NO: 913716 - DNA, 15 bp, Homo sapiens
atattaggagaaaag

SEQ ID NO: 913717 - DNA, 15 bp, Homo sapiens
gatattaggagaaaa

SEQ ID NO: 913718 - DNA, 15 bp, Homo sapiens
agatattaggagaaa

SEQ ID NO: 913719 - DNA, 15 bp, Homo sapiens
aagatattaggagaa

SEQ ID NO: 913720 - DNA, 15 bp, Homo sapiens
caagatattaggaga

SEQ ID NO: 913721 - DNA, 15 bp, Homo sapiens
acaagatattaggag

SEQ ID NO: 913722 - DNA, 15 bp, Homo sapiens
aacaagatattagga

SEQ ID NO: 913723 - DNA, 15 bp, Homo sapiens
aaacaagatattagg

SEQ ID NO: 913724 - DNA, 15 bp, Homo sapiens
aaaacaagatattag

SEQ ID NO: 913725 - DNA, 15 bp, Homo sapiens
caaaacaagatatta

SEQ ID NO: 913726 - DNA, 15 bp, Homo sapiens
acaaaacaagatatt

SEQ ID NO: 913727 - DNA, 15 bp, Homo sapiens
aacaaaacaagatat

SEQ ID NO: 913728 - DNA, 15 bp, Homo sapiens
aaacaaaacaagata

SEQ ID NO: 913729 - DNA, 15 bp, Homo sapiens
aaaacaaaacaagat

SEQ ID NO: 913730 - DNA, 15 bp, Homo sapiens
aaaaacaaaacaaga

SEQ ID NO: 913731 - DNA, 15 bp, Homo sapiens
caaaaacaaaacaag

SEQ ID NO: 913732 - DNA, 15 bp, Homo sapiens
acaaaaacaaaacaa

SEQ ID NO: 913733 - DNA, 15 bp, Homo sapiens
aacaaaaacaaaaca

SEQ ID NO: 913734 - DNA, 15 bp, Homo sapiens
aaacaaaaacaaaac

SEQ ID NO: 913735 - DNA, 15 bp, Homo sapiens
aaaacaaaaacaaaa

SEQ ID NO: 913736 - DNA, 15 bp, Homo sapiens
aaaaacaaaaacaaa

SEQ ID NO: 913737 - DNA, 15 bp, Homo sapiens
caaaaacaaaaacaa

SEQ ID NO: 913738 - DNA, 15 bp, Homo sapiens
acaaaaacaaaaaca

SEQ ID NO: 913739 - DNA, 15 bp, Homo sapiens
aacaaaaacaaaaac

SEQ ID NO: 913740 - DNA, 15 bp, Homo sapiens
aaacaaaaacaaaaa

SEQ ID NO: 913741 - DNA, 15 bp, Homo sapiens
tcaaaaacaaaaaca

SEQ ID NO: 913742 - DNA, 15 bp, Homo sapiens
ctcaaaaacaaaaac

SEQ ID NO: 913743 - DNA, 15 bp, Homo sapiens
tctcaaaaacaaaaa

SEQ ID NO: 913744 - DNA, 15 bp, Homo sapiens
gtctcaaaaacaaaa

SEQ ID NO: 913745 - DNA, 15 bp, Homo sapiens
tgtctcaaaaacaaa

SEQ ID NO: 913746 - DNA, 15 bp, Homo sapiens
ctgtctcaaaaacaa

SEQ ID NO: 913747 - DNA, 15 bp, Homo sapiens
tctgtctcaaaaaca

SEQ ID NO: 913748 - DNA, 15 bp, Homo sapiens
ctctgtctcaaaaac

SEQ ID NO: 913749 - DNA, 15 bp, Homo sapiens
actctgtctcaaaaa

SEQ ID NO: 913750 - DNA, 15 bp, Homo sapiens
gactctgtctcaaaa

SEQ ID NO: 913751 - DNA, 15 bp, Homo sapiens
agactctgtctcaaa

SEQ ID NO: 913752 - DNA, 15 bp, Homo sapiens
gagactctgtctcaa

SEQ ID NO: 913753 - DNA, 15 bp, Homo sapiens
tgagactctgtctca

SEQ ID NO: 913754 - DNA, 15 bp, Homo sapiens
gtgagactctgtctc

SEQ ID NO: 913755 - DNA, 15 bp, Homo sapiens
agtgagactctgtct

SEQ ID NO: 913756 - DNA, 15 bp, Homo sapiens
gagtgagactctgtc

SEQ ID NO: 913757 - DNA, 15 bp, Homo sapiens
tgagtgagactctgt

SEQ ID NO: 913758 - DNA, 15 bp, Homo sapiens
ctgagtgagactctg

SEQ ID NO: 913759 - DNA, 15 bp, Homo sapiens
actgagtgagactct

SEQ ID NO: 913760 - DNA, 15 bp, Homo sapiens
aactgagtgagactc

SEQ ID NO: 913761 - DNA, 15 bp, Homo sapiens
caactgagtgagact

SEQ ID NO: 913762 - DNA, 15 bp, Homo sapiens
gcaactgagtgagac

SEQ ID NO: 913763 - DNA, 15 bp, Homo sapiens
agcaactgagtgaga

SEQ ID NO: 913764 - DNA, 15 bp, Homo sapiens
aagcaactgagtgag

SEQ ID NO: 913765 - DNA, 15 bp, Homo sapiens
taagcaactgagtga

SEQ ID NO: 913766 - DNA, 15 bp, Homo sapiens
ctaagcaactgagtg

SEQ ID NO: 913767 - DNA, 15 bp, Homo sapiens
cctaagcaactgagt

SEQ ID NO: 913768 - DNA, 15 bp, Homo sapiens
gcctaagcaactgag

SEQ ID NO: 913769 - DNA, 15 bp, Homo sapiens
agcctaagcaactga

SEQ ID NO: 913770 - DNA, 15 bp, Homo sapiens
cagcctaagcaactg

SEQ ID NO: 913771 - DNA, 15 bp, Homo sapiens
ccagcctaagcaact

SEQ ID NO: 913772 - DNA, 15 bp, Homo sapiens
tccagcctaagcaac

SEQ ID NO: 913773 - DNA, 15 bp, Homo sapiens
ctccagcctaagcaa

SEQ ID NO: 913774 - DNA, 15 bp, Homo sapiens
actccagcctaagca

SEQ ID NO: 913775 - DNA, 15 bp, Homo sapiens
cactccagcctaagc

SEQ ID NO: 913776 - DNA, 15 bp, Homo sapiens
gcactccagcctaag

SEQ ID NO: 913777 - DNA, 15 bp, Homo sapiens
tgcactccagcctaa

SEQ ID NO: 913778 - DNA, 15 bp, Homo sapiens
ttgcactccagccta

SEQ ID NO: 913779 - DNA, 15 bp, Homo sapiens
attgcactccagcct

SEQ ID NO: 913780 - DNA, 15 bp, Homo sapiens
cattgcactccagcc

SEQ ID NO: 913781 - DNA, 15 bp, Homo sapiens
ccattgcactccagc

SEQ ID NO: 913782 - DNA, 15 bp, Homo sapiens
accattgcactccag

SEQ ID NO: 913783 - DNA, 15 bp, Homo sapiens
taccattgcactcca

SEQ ID NO: 913784 - DNA, 15 bp, Homo sapiens
gtaccattgcactcc

SEQ ID NO: 913785 - DNA, 15 bp, Homo sapiens
tgtaccattgcactc

SEQ ID NO: 913786 - DNA, 15 bp, Homo sapiens
ttgtaccattgcact

SEQ ID NO: 913787 - DNA, 15 bp, Homo sapiens
attgtaccattgcac

SEQ ID NO: 913788 - DNA, 15 bp, Homo sapiens
gattgtaccattgca

SEQ ID NO: 913789 - DNA, 15 bp, Homo sapiens
agattgtaccattgc

SEQ ID NO: 913790 - DNA, 15 bp, Homo sapiens
gagattgtaccattg

SEQ ID NO: 913791 - DNA, 15 bp, Homo sapiens
tgagattgtaccatt

SEQ ID NO: 913792 - DNA, 15 bp, Homo sapiens
ctgagattgtaccat

SEQ ID NO: 913793 - DNA, 15 bp, Homo sapiens
gctgagattgtacca

SEQ ID NO: 913794 - DNA, 15 bp, Homo sapiens
agctgagattgtacc

SEQ ID NO: 913795 - DNA, 15 bp, Homo sapiens
gagctgagattgtac

SEQ ID NO: 913796 - DNA, 15 bp, Homo sapiens
tgagctgagattgta

SEQ ID NO: 913797 - DNA, 15 bp, Homo sapiens
gtgagctgagattgt

SEQ ID NO: 913798 - DNA, 15 bp, Homo sapiens
agtgagctgagattg

SEQ ID NO: 913799 - DNA, 15 bp, Homo sapiens
cagtgagctgagatt

SEQ ID NO: 913800 - DNA, 15 bp, Homo sapiens
gcagtgagctgagat

SEQ ID NO: 913801 - DNA, 15 bp, Homo sapiens
tgcagtgagctgaga

SEQ ID NO: 913802 - DNA, 15 bp, Homo sapiens
ttgcagtgagctgag

SEQ ID NO: 913803 - DNA, 15 bp, Homo sapiens
tttgcagtgagctga

SEQ ID NO: 913804 - DNA, 15 bp, Homo sapiens
atttgcagtgagctg

SEQ ID NO: 913805 - DNA, 15 bp, Homo sapiens
catttgcagtgagct

SEQ ID NO: 913806 - DNA, 15 bp, Homo sapiens
gcatttgcagtgagc

SEQ ID NO: 913807 - DNA, 15 bp, Homo sapiens
ggcatttgcagtgag

SEQ ID NO: 913808 - DNA, 15 bp, Homo sapiens
tggcatttgcagtga

SEQ ID NO: 913809 - DNA, 15 bp, Homo sapiens
gtggcatttgcagtg

SEQ ID NO: 913810 - DNA, 15 bp, Homo sapiens
ggtggcatttgcagt

SEQ ID NO: 913811 - DNA, 15 bp, Homo sapiens
aggtggcatttgcag

SEQ ID NO: 913812 - DNA, 15 bp, Homo sapiens
gaggtggcatttgca

SEQ ID NO: 913813 - DNA, 15 bp, Homo sapiens
ggaggtggcatttgc

SEQ ID NO: 913814 - DNA, 15 bp, Homo sapiens
aggaggtggcatttg

SEQ ID NO: 913815 - DNA, 15 bp, Homo sapiens
caggaggtggcattt

SEQ ID NO: 913816 - DNA, 15 bp, Homo sapiens
ccaggaggtggcatt

SEQ ID NO: 913817 - DNA, 15 bp, Homo sapiens
cccaggaggtggcat

SEQ ID NO: 913818 - DNA, 15 bp, Homo sapiens
acccaggaggtggca

SEQ ID NO: 913819 - DNA, 15 bp, Homo sapiens
aacccaggaggtggc

SEQ ID NO: 913820 - DNA, 15 bp, Homo sapiens
gaacccaggaggtgg

SEQ ID NO: 913821 - DNA, 15 bp, Homo sapiens
tgaacccaggaggtg

SEQ ID NO: 913822 - DNA, 15 bp, Homo sapiens
ctgaacccaggaggt

SEQ ID NO: 913823 - DNA, 15 bp, Homo sapiens
cctgaacccaggagg

SEQ ID NO: 913824 - DNA, 15 bp, Homo sapiens
acctgaacccaggag

SEQ ID NO: 913825 - DNA, 15 bp, Homo sapiens
cacctgaacccagga

SEQ ID NO: 913826 - DNA, 15 bp, Homo sapiens
ccacctgaacccagg

SEQ ID NO: 913827 - DNA, 15 bp, Homo sapiens
accacctgaacccag

SEQ ID NO: 913828 - DNA, 15 bp, Homo sapiens
aaccacctgaaccca

SEQ ID NO: 913829 - DNA, 15 bp, Homo sapiens
gaaccacctgaaccc

SEQ ID NO: 913830 - DNA, 15 bp, Homo sapiens
agaaccacctgaacc

SEQ ID NO: 913831 - DNA, 15 bp, Homo sapiens
aagaaccacctgaac

SEQ ID NO: 913832 - DNA, 15 bp, Homo sapiens
caagaaccacctgaa

SEQ ID NO: 913833 - DNA, 15 bp, Homo sapiens
acaagaaccacctga

SEQ ID NO: 913834 - DNA, 15 bp, Homo sapiens
cacaagaaccacctg

SEQ ID NO: 913835 - DNA, 15 bp, Homo sapiens
gcacaagaaccacct

SEQ ID NO: 913836 - DNA, 15 bp, Homo sapiens
ggcacaagaaccacc

SEQ ID NO: 913837 - DNA, 15 bp, Homo sapiens
aggcacaagaaccac

SEQ ID NO: 913838 - DNA, 15 bp, Homo sapiens
gaggcacaagaacca

SEQ ID NO: 913839 - DNA, 15 bp, Homo sapiens
tgaggcacaagaacc

SEQ ID NO: 913840 - DNA, 15 bp, Homo sapiens
ctgaggcacaagaac

SEQ ID NO: 913841 - DNA, 15 bp, Homo sapiens
gctgaggcacaagaa

SEQ ID NO: 913842 - DNA, 15 bp, Homo sapiens
ggctgaggcacaaga

SEQ ID NO: 913843 - DNA, 15 bp, Homo sapiens
aggctgaggcacaag

SEQ ID NO: 913844 - DNA, 15 bp, Homo sapiens
gaggctgaggcacaa

SEQ ID NO: 913845 - DNA, 15 bp, Homo sapiens
ggaggctgaggcaca

SEQ ID NO: 913846 - DNA, 15 bp, Homo sapiens
aggaggctgaggcac

SEQ ID NO: 913847 - DNA, 15 bp, Homo sapiens
caggaggctgaggca

SEQ ID NO: 913848 - DNA, 15 bp, Homo sapiens
tcaggaggctgaggc

SEQ ID NO: 913849 - DNA, 15 bp, Homo sapiens
ctcaggaggctgagg

SEQ ID NO: 913850 - DNA, 15 bp, Homo sapiens
actcaggaggctgag

SEQ ID NO: 913851 - DNA, 15 bp, Homo sapiens
tactcaggaggctga

SEQ ID NO: 913852 - DNA, 15 bp, Homo sapiens
ctactcaggaggctg

SEQ ID NO: 913853 - DNA, 15 bp, Homo sapiens
gctactcaggaggct

SEQ ID NO: 913854 - DNA, 15 bp, Homo sapiens
agctactcaggaggc

SEQ ID NO: 913855 - DNA, 15 bp, Homo sapiens
cagctactcaggagg

SEQ ID NO: 913856 - DNA, 15 bp, Homo sapiens
ccagctactcaggag

SEQ ID NO: 913857 - DNA, 15 bp, Homo sapiens
cccagctactcagga

SEQ ID NO: 913858 - DNA, 15 bp, Homo sapiens
tcccagctactcagg

SEQ ID NO: 913859 - DNA, 15 bp, Homo sapiens
atcccagctactcag

SEQ ID NO: 913860 - DNA, 15 bp, Homo sapiens
aatcccagctactca

SEQ ID NO: 913861 - DNA, 15 bp, Homo sapiens
taatcccagctactc

SEQ ID NO: 913862 - DNA, 15 bp, Homo sapiens
gtaatcccagctact

SEQ ID NO: 913863 - DNA, 15 bp, Homo sapiens
tgtaatcccagctac

SEQ ID NO: 913864 - DNA, 15 bp, Homo sapiens
ctgtaatcccagcta

SEQ ID NO: 913865 - DNA, 15 bp, Homo sapiens
cctgtaatcccagct

SEQ ID NO: 913866 - DNA, 15 bp, Homo sapiens
gcctgtaatcccagc

SEQ ID NO: 913867 - DNA, 15 bp, Homo sapiens
tgcctgtaatcccag

SEQ ID NO: 913868 - DNA, 15 bp, Homo sapiens
atgcctgtaatccca

SEQ ID NO: 913869 - DNA, 15 bp, Homo sapiens
catgcctgtaatccc

SEQ ID NO: 913870 - DNA, 15 bp, Homo sapiens
acatgcctgtaatcc

SEQ ID NO: 913871 - DNA, 15 bp, Homo sapiens
cacatgcctgtaatc

SEQ ID NO: 913872 - DNA, 15 bp, Homo sapiens
gcacatgcctgtaat

SEQ ID NO: 913873 - DNA, 15 bp, Homo sapiens
ggcacatgcctgtaa

SEQ ID NO: 913874 - DNA, 15 bp, Homo sapiens
cggcacatgcctgta

SEQ ID NO: 913875 - DNA, 15 bp, Homo sapiens
gcggcacatgcctgt

SEQ ID NO: 913876 - DNA, 15 bp, Homo sapiens
ggcggcacatgcctg

SEQ ID NO: 913877 - DNA, 15 bp, Homo sapiens
tggcggcacatgcct

SEQ ID NO: 913878 - DNA, 15 bp, Homo sapiens
atggcggcacatgcc

SEQ ID NO: 913879 - DNA, 15 bp, Homo sapiens
catggcggcacatgc

SEQ ID NO: 913880 - DNA, 15 bp, Homo sapiens
gcatggcggcacatg

SEQ ID NO: 913881 - DNA, 15 bp, Homo sapiens
cgcatggcggcacat

SEQ ID NO: 913882 - DNA, 15 bp, Homo sapiens
gcgcatggcggcaca

SEQ ID NO: 913883 - DNA, 15 bp, Homo sapiens
tgcgcatggcggcac

SEQ ID NO: 913884 - DNA, 15 bp, Homo sapiens
ctgcgcatggcggca

SEQ ID NO: 913885 - DNA, 15 bp, Homo sapiens
gctgcgcatggcggc

SEQ ID NO: 913886 - DNA, 15 bp, Homo sapiens
agctgcgcatggcgg

SEQ ID NO: 913887 - DNA, 15 bp, Homo sapiens
tagctgcgcatggcg

SEQ ID NO: 913888 - DNA, 15 bp, Homo sapiens
ttagctgcgcatggc

SEQ ID NO: 913889 - DNA, 15 bp, Homo sapiens
attagctgcgcatgg

SEQ ID NO: 913890 - DNA, 15 bp, Homo sapiens
aattagctgcgcatg

SEQ ID NO: 913891 - DNA, 15 bp, Homo sapiens
aaattagctgcgcat

SEQ ID NO: 913892 - DNA, 15 bp, Homo sapiens
aaaattagctgcgca

SEQ ID NO: 913893 - DNA, 15 bp, Homo sapiens
aaaaattagctgcgc

SEQ ID NO: 913894 - DNA, 15 bp, Homo sapiens
caaaaattagctgcg

SEQ ID NO: 913895 - DNA, 15 bp, Homo sapiens
acaaaaattagctgc

SEQ ID NO: 913896 - DNA, 15 bp, Homo sapiens
tacaaaaattagctg

SEQ ID NO: 913897 - DNA, 15 bp, Homo sapiens
ctacaaaaattagct

SEQ ID NO: 913898 - DNA, 15 bp, Homo sapiens
actacaaaaattagc

SEQ ID NO: 913899 - DNA, 15 bp, Homo sapiens
aactacaaaaattag

SEQ ID NO: 913900 - DNA, 15 bp, Homo sapiens
aaactacaaaaatta

SEQ ID NO: 913901 - DNA, 15 bp, Homo sapiens
aaaactacaaaaatt

SEQ ID NO: 913902 - DNA, 15 bp, Homo sapiens
taaaactacaaaaat

SEQ ID NO: 913903 - DNA, 15 bp, Homo sapiens
ctaaaactacaaaaa

SEQ ID NO: 913904 - DNA, 15 bp, Homo sapiens
actaaaactacaaaa

SEQ ID NO: 913905 - DNA, 15 bp, Homo sapiens
tactaaaactacaaa

SEQ ID NO: 913906 - DNA, 15 bp, Homo sapiens
ctactaaaactacaa

SEQ ID NO: 913907 - DNA, 15 bp, Homo sapiens
tctactaaaactaca

SEQ ID NO: 913908 - DNA, 15 bp, Homo sapiens
gtctactaaaactac

SEQ ID NO: 913909 - DNA, 15 bp, Homo sapiens
tgtctactaaaacta

SEQ ID NO: 913910 - DNA, 15 bp, Homo sapiens
atgtctactaaaact

SEQ ID NO: 913911 - DNA, 15 bp, Homo sapiens
catgtctactaaaac

SEQ ID NO: 913912 - DNA, 15 bp, Homo sapiens
ccatgtctactaaaa

SEQ ID NO: 913913 - DNA, 15 bp, Homo sapiens
cccatgtctactaaa

SEQ ID NO: 913914 - DNA, 15 bp, Homo sapiens
ccccatgtctactaa

SEQ ID NO: 913915 - DNA, 15 bp, Homo sapiens
accccatgtctacta

SEQ ID NO: 913916 - DNA, 15 bp, Homo sapiens
gaccccatgtctact

SEQ ID NO: 913917 - DNA, 15 bp, Homo sapiens
tgaccccatgtctac

SEQ ID NO: 913918 - DNA, 15 bp, Homo sapiens
gtgaccccatgtcta

SEQ ID NO: 913919 - DNA, 15 bp, Homo sapiens
tgtgaccccatgtct

SEQ ID NO: 913920 - DNA, 15 bp, Homo sapiens
gtgtgaccccatgtc

SEQ ID NO: 913921 - DNA, 15 bp, Homo sapiens
agtgtgaccccatgt

SEQ ID NO: 913922 - DNA, 15 bp, Homo sapiens
cagtgtgaccccatg

SEQ ID NO: 913923 - DNA, 15 bp, Homo sapiens
acagtgtgaccccat

SEQ ID NO: 913924 - DNA, 15 bp, Homo sapiens
cacagtgtgacccca

SEQ ID NO: 913925 - DNA, 15 bp, Homo sapiens
acacagtgtgacccc

SEQ ID NO: 913926 - DNA, 15 bp, Homo sapiens
aacacagtgtgaccc

SEQ ID NO: 913927 - DNA, 15 bp, Homo sapiens
caacacagtgtgacc

SEQ ID NO: 913928 - DNA, 15 bp, Homo sapiens
ccaacacagtgtgac

SEQ ID NO: 913929 - DNA, 15 bp, Homo sapiens
gccaacacagtgtga

SEQ ID NO: 913930 - DNA, 15 bp, Homo sapiens
ggccaacacagtgtg

SEQ ID NO: 913931 - DNA, 15 bp, Homo sapiens
tggccaacacagtgt

SEQ ID NO: 913932 - DNA, 15 bp, Homo sapiens
ctggccaacacagtg

SEQ ID NO: 913933 - DNA, 15 bp, Homo sapiens
cctggccaacacagt

SEQ ID NO: 913934 - DNA, 15 bp, Homo sapiens
gcctggccaacacag

SEQ ID NO: 913935 - DNA, 15 bp, Homo sapiens
agcctggccaacaca

SEQ ID NO: 913936 - DNA, 15 bp, Homo sapiens
cagcctggccaacac

SEQ ID NO: 913937 - DNA, 15 bp, Homo sapiens
ccagcctggccaaca

SEQ ID NO: 913938 - DNA, 15 bp, Homo sapiens
accagcctggccaac

SEQ ID NO: 913939 - DNA, 15 bp, Homo sapiens
gaccagcctggccaa

SEQ ID NO: 913940 - DNA, 15 bp, Homo sapiens
agaccagcctggcca

SEQ ID NO: 913941 - DNA, 15 bp, Homo sapiens
aagaccagcctggcc

SEQ ID NO: 913942 - DNA, 15 bp, Homo sapiens
caagaccagcctggc

SEQ ID NO: 913943 - DNA, 15 bp, Homo sapiens
tcaagaccagcctgg

SEQ ID NO: 913944 - DNA, 15 bp, Homo sapiens
ttcaagaccagcctg

SEQ ID NO: 913945 - DNA, 15 bp, Homo sapiens
gttcaagaccagcct

SEQ ID NO: 913946 - DNA, 15 bp, Homo sapiens
ggttcaagaccagcc

SEQ ID NO: 913947 - DNA, 15 bp, Homo sapiens
gggttcaagaccagc

SEQ ID NO: 913948 - DNA, 15 bp, Homo sapiens
ggggttcaagaccag

SEQ ID NO: 913949 - DNA, 15 bp, Homo sapiens
aggggttcaagacca

SEQ ID NO: 913950 - DNA, 15 bp, Homo sapiens
caggggttcaagacc

SEQ ID NO: 913951 - DNA, 15 bp, Homo sapiens
ccaggggttcaagac

SEQ ID NO: 913952 - DNA, 15 bp, Homo sapiens
gccaggggttcaaga

SEQ ID NO: 913953 - DNA, 15 bp, Homo sapiens
ggccaggggttcaag

SEQ ID NO: 913954 - DNA, 15 bp, Homo sapiens
aggccaggggttcaa

SEQ ID NO: 913955 - DNA, 15 bp, Homo sapiens
gaggccaggggttca

SEQ ID NO: 913956 - DNA, 15 bp, Homo sapiens
tgaggccaggggttc

SEQ ID NO: 913957 - DNA, 15 bp, Homo sapiens
ttgaggccaggggtt

SEQ ID NO: 913958 - DNA, 15 bp, Homo sapiens
cttgaggccaggggt

SEQ ID NO: 913959 - DNA, 15 bp, Homo sapiens
acttgaggccagggg

SEQ ID NO: 913960 - DNA, 15 bp, Homo sapiens
cacttgaggccaggg

SEQ ID NO: 913961 - DNA, 15 bp, Homo sapiens
tcacttgaggccagg

SEQ ID NO: 913962 - DNA, 15 bp, Homo sapiens
atcacttgaggccag

SEQ ID NO: 913963 - DNA, 15 bp, Homo sapiens
gatcacttgaggcca

SEQ ID NO: 913964 - DNA, 15 bp, Homo sapiens
ggatcacttgaggcc

SEQ ID NO: 913965 - DNA, 15 bp, Homo sapiens
aggatcacttgaggc

SEQ ID NO: 913966 - DNA, 15 bp, Homo sapiens
gaggatcacttgagg

SEQ ID NO: 913967 - DNA, 15 bp, Homo sapiens
ggaggatcacttgag

SEQ ID NO: 913968 - DNA, 15 bp, Homo sapiens
aggaggatcacttga

SEQ ID NO: 913969 - DNA, 15 bp, Homo sapiens
caggaggatcacttg

SEQ ID NO: 913970 - DNA, 15 bp, Homo sapiens
gcaggaggatcactt

SEQ ID NO: 913971 - DNA, 15 bp, Homo sapiens
ggcaggaggatcact

SEQ ID NO: 913972 - DNA, 15 bp, Homo sapiens
aggcaggaggatcac

SEQ ID NO: 913973 - DNA, 15 bp, Homo sapiens
caggcaggaggatca

SEQ ID NO: 913974 - DNA, 15 bp, Homo sapiens
ccaggcaggaggatc

SEQ ID NO: 913975 - DNA, 15 bp, Homo sapiens
cccaggcaggaggat

SEQ ID NO: 913976 - DNA, 15 bp, Homo sapiens
gcccaggcaggagga

SEQ ID NO: 913977 - DNA, 15 bp, Homo sapiens
ggcccaggcaggagg

SEQ ID NO: 913978 - DNA, 15 bp, Homo sapiens
aggcccaggcaggag

SEQ ID NO: 913979 - DNA, 15 bp, Homo sapiens
gaggcccaggcagga

SEQ ID NO: 913980 - DNA, 15 bp, Homo sapiens
ggaggcccaggcagg

SEQ ID NO: 913981 - DNA, 15 bp, Homo sapiens
gggaggcccaggcag

SEQ ID NO: 913982 - DNA, 15 bp, Homo sapiens
tgggaggcccaggca

SEQ ID NO: 913983 - DNA, 15 bp, Homo sapiens
ttgggaggcccaggc

SEQ ID NO: 913984 - DNA, 15 bp, Homo sapiens
tttgggaggcccagg

SEQ ID NO: 913985 - DNA, 15 bp, Homo sapiens
ctttgggaggcccag

SEQ ID NO: 913986 - DNA, 15 bp, Homo sapiens
actttgggaggccca

SEQ ID NO: 913987 - DNA, 15 bp, Homo sapiens
cactttgggaggccc

SEQ ID NO: 913988 - DNA, 15 bp, Homo sapiens
gcactttgggaggcc

SEQ ID NO: 913989 - DNA, 15 bp, Homo sapiens
agcactttgggaggc

SEQ ID NO: 913990 - DNA, 15 bp, Homo sapiens
cagcactttgggagg

SEQ ID NO: 913991 - DNA, 15 bp, Homo sapiens
ccagcactttgggag

SEQ ID NO: 913992 - DNA, 15 bp, Homo sapiens
tccagcactttggga

SEQ ID NO: 913993 - DNA, 15 bp, Homo sapiens
ttccagcactttggg

SEQ ID NO: 913994 - DNA, 15 bp, Homo sapiens
attccagcactttgg

SEQ ID NO: 913995 - DNA, 15 bp, Homo sapiens
aattccagcactttg

SEQ ID NO: 913996 - DNA, 15 bp, Homo sapiens
taattccagcacttt

SEQ ID NO: 913997 - DNA, 15 bp, Homo sapiens
gtaattccagcactt

SEQ ID NO: 913998 - DNA, 15 bp, Homo sapiens
tgtaattccagcact

SEQ ID NO: 913999 - DNA, 15 bp, Homo sapiens
ctgtaattccagcac

SEQ ID NO: 914000 - DNA, 15 bp, Homo sapiens
cctgtaattccagca

SEQ ID NO: 914001 - DNA, 15 bp, Homo sapiens
acctgtaattccagc

SEQ ID NO: 914002 - DNA, 15 bp, Homo sapiens
cacctgtaattccag

SEQ ID NO: 914003 - DNA, 15 bp, Homo sapiens
acacctgtaattcca

SEQ ID NO: 914004 - DNA, 15 bp, Homo sapiens
cacacctgtaattcc

SEQ ID NO: 914005 - DNA, 15 bp, Homo sapiens
tcacacctgtaattc

SEQ ID NO: 914006 - DNA, 15 bp, Homo sapiens
gtcacacctgtaatt

SEQ ID NO: 914007 - DNA, 15 bp, Homo sapiens
agtcacacctgtaat

SEQ ID NO: 914008 - DNA, 15 bp, Homo sapiens
gagtcacacctgtaa

SEQ ID NO: 914009 - DNA, 15 bp, Homo sapiens
agagtcacacctgta

SEQ ID NO: 914010 - DNA, 15 bp, Homo sapiens
cagagtcacacctgt

SEQ ID NO: 914011 - DNA, 15 bp, Homo sapiens
gcagagtcacacctg

SEQ ID NO: 914012 - DNA, 15 bp, Homo sapiens
ggcagagtcacacct

SEQ ID NO: 914013 - DNA, 15 bp, Homo sapiens
aggcagagtcacacc

SEQ ID NO: 914014 - DNA, 15 bp, Homo sapiens
caggcagagtcacac

SEQ ID NO: 914015 - DNA, 15 bp, Homo sapiens
ccaggcagagtcaca

SEQ ID NO: 914016 - DNA, 15 bp, Homo sapiens
gccaggcagagtcac

SEQ ID NO: 914017 - DNA, 15 bp, Homo sapiens
ggccaggcagagtca

SEQ ID NO: 914018 - DNA, 15 bp, Homo sapiens
aggccaggcagagtc

SEQ ID NO: 914019 - DNA, 15 bp, Homo sapiens
aaggccaggcagagt

SEQ ID NO: 914020 - DNA, 15 bp, Homo sapiens
aaaggccaggcagag

SEQ ID NO: 914021 - DNA, 15 bp, Homo sapiens
aaaaggccaggcaga

SEQ ID NO: 914022 - DNA, 15 bp, Homo sapiens
aaaaaggccaggcag

SEQ ID NO: 914023 - DNA, 15 bp, Homo sapiens
aaaaaaggccaggca

SEQ ID NO: 914024 - DNA, 15 bp, Homo sapiens
aaaaaaaggccaggc

SEQ ID NO: 914025 - DNA, 15 bp, Homo sapiens
taaaaaaaggccagg

SEQ ID NO: 914026 - DNA, 15 bp, Homo sapiens
gtaaaaaaaggccag

SEQ ID NO: 914027 - DNA, 15 bp, Homo sapiens
tgtaaaaaaaggcca

SEQ ID NO: 914028 - DNA, 15 bp, Homo sapiens
atgtaaaaaaaggcc

SEQ ID NO: 914029 - DNA, 15 bp, Homo sapiens
aatgtaaaaaaaggc

SEQ ID NO: 914030 - DNA, 15 bp, Homo sapiens
aaatgtaaaaaaagg

SEQ ID NO: 914031 - DNA, 15 bp, Homo sapiens
taaatgtaaaaaaag

SEQ ID NO: 914032 - DNA, 15 bp, Homo sapiens
ttaaatgtaaaaaaa

SEQ ID NO: 914033 - DNA, 15 bp, Homo sapiens
tttaaatgtaaaaaa

SEQ ID NO: 914034 - DNA, 15 bp, Homo sapiens
atttaaatgtaaaaa

SEQ ID NO: 914035 - DNA, 15 bp, Homo sapiens
gatttaaatgtaaaa

SEQ ID NO: 914036 - DNA, 15 bp, Homo sapiens
agatttaaatgtaaa

SEQ ID NO: 914037 - DNA, 15 bp, Homo sapiens
aagatttaaatgtaa

SEQ ID NO: 914038 - DNA, 15 bp, Homo sapiens
gaagatttaaatgta

SEQ ID NO: 914039 - DNA, 15 bp, Homo sapiens
cgaagatttaaatgt

SEQ ID NO: 914040 - DNA, 15 bp, Homo sapiens
tcgaagatttaaatg

SEQ ID NO: 914041 - DNA, 15 bp, Homo sapiens
ttcgaagatttaaat

SEQ ID NO: 914042 - DNA, 15 bp, Homo sapiens
tttcgaagatttaaa

SEQ ID NO: 914043 - DNA, 15 bp, Homo sapiens
gtttcgaagatttaa

SEQ ID NO: 914044 - DNA, 15 bp, Homo sapiens
tgtttcgaagattta

SEQ ID NO: 914045 - DNA, 15 bp, Homo sapiens
atgtttcgaagattt

SEQ ID NO: 914046 - DNA, 15 bp, Homo sapiens
tatgtttcgaagatt

SEQ ID NO: 914047 - DNA, 15 bp, Homo sapiens
atatgtttcgaagat

SEQ ID NO: 914048 - DNA, 15 bp, Homo sapiens
tatatgtttcgaaga

SEQ ID NO: 914049 - DNA, 15 bp, Homo sapiens
ttatatgtttcgaag

SEQ ID NO: 914050 - DNA, 15 bp, Homo sapiens
attatatgtttcgaa

SEQ ID NO: 914051 - DNA, 15 bp, Homo sapiens
aattatatgtttcga

SEQ ID NO: 914052 - DNA, 15 bp, Homo sapiens
gaattatatgtttcg

SEQ ID NO: 914053 - DNA, 15 bp, Homo sapiens
tgaattatatgtttc

SEQ ID NO: 914054 - DNA, 15 bp, Homo sapiens
atgaattatatgttt

SEQ ID NO: 914055 - DNA, 15 bp, Homo sapiens
aatgaattatatgtt

SEQ ID NO: 914056 - DNA, 15 bp, Homo sapiens
aaatgaattatatgt

SEQ ID NO: 914057 - DNA, 15 bp, Homo sapiens
aaaatgaattatatg

SEQ ID NO: 914058 - DNA, 15 bp, Homo sapiens
caaaatgaattatat

SEQ ID NO: 914059 - DNA, 15 bp, Homo sapiens
tcaaaatgaattata

SEQ ID NO: 914060 - DNA, 15 bp, Homo sapiens
atcaaaatgaattat

SEQ ID NO: 914061 - DNA, 15 bp, Homo sapiens
catcaaaatgaatta

SEQ ID NO: 914062 - DNA, 15 bp, Homo sapiens
acatcaaaatgaatt

SEQ ID NO: 914063 - DNA, 15 bp, Homo sapiens
tacatcaaaatgaat

SEQ ID NO: 914064 - DNA, 15 bp, Homo sapiens
ttacatcaaaatgaa

SEQ ID NO: 914065 - DNA, 15 bp, Homo sapiens
cttacatcaaaatga

SEQ ID NO: 914066 - DNA, 15 bp, Homo sapiens
ccttacatcaaaatg

SEQ ID NO: 914067 - DNA, 15 bp, Homo sapiens
tccttacatcaaaat

SEQ ID NO: 914068 - DNA, 15 bp, Homo sapiens
ctccttacatcaaaa

SEQ ID NO: 914069 - DNA, 15 bp, Homo sapiens
actccttacatcaaa

SEQ ID NO: 914070 - DNA, 15 bp, Homo sapiens
tactccttacatcaa

SEQ ID NO: 914071 - DNA, 15 bp, Homo sapiens
atactccttacatca

SEQ ID NO: 914072 - DNA, 15 bp, Homo sapiens
gatactccttacatc

SEQ ID NO: 914073 - DNA, 15 bp, Homo sapiens
tgatactccttacat

SEQ ID NO: 914074 - DNA, 15 bp, Homo sapiens
atgatactccttaca

SEQ ID NO: 914075 - DNA, 15 bp, Homo sapiens
catgatactccttac

SEQ ID NO: 914076 - DNA, 15 bp, Homo sapiens
acatgatactcctta

SEQ ID NO: 914077 - DNA, 15 bp, Homo sapiens
cacatgatactcctt

SEQ ID NO: 914078 - DNA, 15 bp, Homo sapiens
ccacatgatactcct

SEQ ID NO: 914079 - DNA, 15 bp, Homo sapiens
tccacatgatactcc

SEQ ID NO: 914080 - DNA, 15 bp, Homo sapiens
atccacatgatactc

SEQ ID NO: 914081 - DNA, 15 bp, Homo sapiens
aatccacatgatact

SEQ ID NO: 914082 - DNA, 15 bp, Homo sapiens
gaatccacatgatac

SEQ ID NO: 914083 - DNA, 15 bp, Homo sapiens
tgaatccacatgata

SEQ ID NO: 914084 - DNA, 15 bp, Homo sapiens
ttgaatccacatgat

SEQ ID NO: 914085 - DNA, 15 bp, Homo sapiens
gttgaatccacatga

SEQ ID NO: 914086 - DNA, 15 bp, Homo sapiens
tgttgaatccacatg

SEQ ID NO: 914087 - DNA, 15 bp, Homo sapiens
ctgttgaatccacat

SEQ ID NO: 914088 - DNA, 15 bp, Homo sapiens
tctgttgaatccaca

SEQ ID NO: 914089 - DNA, 15 bp, Homo sapiens
ctctgttgaatccac

SEQ ID NO: 914090 - DNA, 15 bp, Homo sapiens
gctctgttgaatcca

SEQ ID NO: 914091 - DNA, 15 bp, Homo sapiens
agctctgttgaatcc

SEQ ID NO: 914092 - DNA, 15 bp, Homo sapiens
tagctctgttgaatc

SEQ ID NO: 914093 - DNA, 15 bp, Homo sapiens
gtagctctgttgaat

SEQ ID NO: 914094 - DNA, 15 bp, Homo sapiens
agtagctctgttgaa

SEQ ID NO: 914095 - DNA, 15 bp, Homo sapiens
gagtagctctgttga

SEQ ID NO: 914096 - DNA, 15 bp, Homo sapiens
agagtagctctgttg

SEQ ID NO: 914097 - DNA, 15 bp, Homo sapiens
cagagtagctctgtt

SEQ ID NO: 914098 - DNA, 15 bp, Homo sapiens
acagagtagctctgt

SEQ ID NO: 914099 - DNA, 15 bp, Homo sapiens
aacagagtagctctg

SEQ ID NO: 914100 - DNA, 15 bp, Homo sapiens
caacagagtagctct

SEQ ID NO: 914101 - DNA, 15 bp, Homo sapiens
acaacagagtagctc

SEQ ID NO: 914102 - DNA, 15 bp, Homo sapiens
gacaacagagtagct

SEQ ID NO: 914103 - DNA, 15 bp, Homo sapiens
ggacaacagagtagc

SEQ ID NO: 914104 - DNA, 15 bp, Homo sapiens
tggacaacagagtag

SEQ ID NO: 914105 - DNA, 15 bp, Homo sapiens
ttggacaacagagta

SEQ ID NO: 914106 - DNA, 15 bp, Homo sapiens
tttggacaacagagt

SEQ ID NO: 914107 - DNA, 15 bp, Homo sapiens
gtttggacaacagag

SEQ ID NO: 914108 - DNA, 15 bp, Homo sapiens
tgtttggacaacaga

SEQ ID NO: 914109 - DNA, 15 bp, Homo sapiens
atgtttggacaacag

SEQ ID NO: 914110 - DNA, 15 bp, Homo sapiens
gatgtttggacaaca

SEQ ID NO: 914111 - DNA, 15 bp, Homo sapiens
agatgtttggacaac

SEQ ID NO: 914112 - DNA, 15 bp, Homo sapiens
aagatgtttggacaa

SEQ ID NO: 914113 - DNA, 15 bp, Homo sapiens
aaagatgtttggaca

SEQ ID NO: 914114 - DNA, 15 bp, Homo sapiens
aaaagatgtttggac

SEQ ID NO: 914115 - DNA, 15 bp, Homo sapiens
taaaagatgtttgga

SEQ ID NO: 914116 - DNA, 15 bp, Homo sapiens
ataaaagatgtttgg

SEQ ID NO: 914117 - DNA, 15 bp, Homo sapiens
aataaaagatgtttg

SEQ ID NO: 914118 - DNA, 15 bp, Homo sapiens
caataaaagatgttt

SEQ ID NO: 914119 - DNA, 15 bp, Homo sapiens
tcaataaaagatgtt

SEQ ID NO: 914120 - DNA, 15 bp, Homo sapiens
atcaataaaagatgt

SEQ ID NO: 914121 - DNA, 15 bp, Homo sapiens
aatcaataaaagatg

SEQ ID NO: 914122 - DNA, 15 bp, Homo sapiens
taatcaataaaagat

SEQ ID NO: 914123 - DNA, 15 bp, Homo sapiens
ataatcaataaaaga

SEQ ID NO: 914124 - DNA, 15 bp, Homo sapiens
aataatcaataaaag

SEQ ID NO: 914125 - DNA, 15 bp, Homo sapiens
aaataatcaataaaa

SEQ ID NO: 914126 - DNA, 15 bp, Homo sapiens
gaaataatcaataaa

SEQ ID NO: 914127 - DNA, 15 bp, Homo sapiens
tgaaataatcaataa

SEQ ID NO: 914128 - DNA, 15 bp, Homo sapiens
atgaaataatcaata

SEQ ID NO: 914129 - DNA, 15 bp, Homo sapiens
gatgaaataatcaat

SEQ ID NO: 914130 - DNA, 15 bp, Homo sapiens
agatgaaataatcaa

SEQ ID NO: 914131 - DNA, 15 bp, Homo sapiens
aagatgaaataatca

SEQ ID NO: 914132 - DNA, 15 bp, Homo sapiens
aaagatgaaataatc

SEQ ID NO: 914133 - DNA, 15 bp, Homo sapiens
aaaagatgaaataat

SEQ ID NO: 914134 - DNA, 15 bp, Homo sapiens
taaaagatgaaataa

SEQ ID NO: 914135 - DNA, 15 bp, Homo sapiens
ataaaagatgaaata

SEQ ID NO: 914136 - DNA, 15 bp, Homo sapiens
aataaaagatgaaat

SEQ ID NO: 914137 - DNA, 15 bp, Homo sapiens
caataaaagatgaaa

SEQ ID NO: 914138 - DNA, 15 bp, Homo sapiens
tcaataaaagatgaa

SEQ ID NO: 914139 - DNA, 15 bp, Homo sapiens
ttcaataaaagatga

SEQ ID NO: 914140 - DNA, 15 bp, Homo sapiens
attcaataaaagatg

SEQ ID NO: 914141 - DNA, 15 bp, Homo sapiens
aattcaataaaagat

SEQ ID NO: 914142 - DNA, 15 bp, Homo sapiens
caattcaataaaaga

SEQ ID NO: 914143 - DNA, 15 bp, Homo sapiens
tcaattcaataaaag

SEQ ID NO: 914144 - DNA, 15 bp, Homo sapiens
atcaattcaataaaa

SEQ ID NO: 914145 - DNA, 15 bp, Homo sapiens
aatcaattcaataaa

SEQ ID NO: 914146 - DNA, 15 bp, Homo sapiens
caatcaattcaataa

SEQ ID NO: 914147 - DNA, 15 bp, Homo sapiens
tcaatcaattcaata

SEQ ID NO: 914148 - DNA, 15 bp, Homo sapiens
atcaatcaattcaat

SEQ ID NO: 914149 - DNA, 15 bp, Homo sapiens
gatcaatcaattcaa

SEQ ID NO: 914150 - DNA, 15 bp, Homo sapiens
agatcaatcaattca

SEQ ID NO: 914151 - DNA, 15 bp, Homo sapiens
tagatcaatcaattc

SEQ ID NO: 914152 - DNA, 15 bp, Homo sapiens
atagatcaatcaatt

SEQ ID NO: 914153 - DNA, 15 bp, Homo sapiens
aatagatcaatcaat

SEQ ID NO: 914154 - DNA, 15 bp, Homo sapiens
aaatagatcaatcaa

SEQ ID NO: 914155 - DNA, 15 bp, Homo sapiens
aaaatagatcaatca

SEQ ID NO: 914156 - DNA, 15 bp, Homo sapiens
gaaaatagatcaatc

SEQ ID NO: 914157 - DNA, 15 bp, Homo sapiens
agaaaatagatcaat

SEQ ID NO: 914158 - DNA, 15 bp, Homo sapiens
tagaaaatagatcaa

SEQ ID NO: 914159 - DNA, 15 bp, Homo sapiens
ctagaaaatagatca

SEQ ID NO: 914160 - DNA, 15 bp, Homo sapiens
gctagaaaatagatc

SEQ ID NO: 914161 - DNA, 15 bp, Homo sapiens
tgctagaaaatagat

SEQ ID NO: 914162 - DNA, 15 bp, Homo sapiens
ctgctagaaaataga

SEQ ID NO: 914163 - DNA, 15 bp, Homo sapiens
actgctagaaaatag

SEQ ID NO: 914164 - DNA, 15 bp, Homo sapiens
cactgctagaaaata

SEQ ID NO: 914165 - DNA, 15 bp, Homo sapiens
acactgctagaaaat

SEQ ID NO: 914166 - DNA, 15 bp, Homo sapiens
tacactgctagaaaa

SEQ ID NO: 914167 - DNA, 15 bp, Homo sapiens
atacactgctagaaa

SEQ ID NO: 914168 - DNA, 15 bp, Homo sapiens
tatacactgctagaa

SEQ ID NO: 914169 - DNA, 15 bp, Homo sapiens
gtatacactgctaga

SEQ ID NO: 914170 - DNA, 15 bp, Homo sapiens
agtatacactgctag

SEQ ID NO: 914171 - DNA, 15 bp, Homo sapiens
aagtatacactgcta

SEQ ID NO: 914172 - DNA, 15 bp, Homo sapiens
caagtatacactgct

SEQ ID NO: 914173 - DNA, 15 bp, Homo sapiens
acaagtatacactgc

SEQ ID NO: 914174 - DNA, 15 bp, Homo sapiens
aacaagtatacactg

SEQ ID NO: 914175 - DNA, 15 bp, Homo sapiens
aaacaagtatacact

SEQ ID NO: 914176 - DNA, 15 bp, Homo sapiens
aaaacaagtatacac

SEQ ID NO: 914177 - DNA, 15 bp, Homo sapiens
taaaacaagtataca

SEQ ID NO: 914178 - DNA, 15 bp, Homo sapiens
ttaaaacaagtatac

SEQ ID NO: 914179 - DNA, 15 bp, Homo sapiens
attaaaacaagtata

SEQ ID NO: 914180 - DNA, 15 bp, Homo sapiens
aattaaaacaagtat

SEQ ID NO: 914181 - DNA, 15 bp, Homo sapiens
aaattaaaacaagta

SEQ ID NO: 914182 - DNA, 15 bp, Homo sapiens
caaattaaaacaagt

SEQ ID NO: 914183 - DNA, 15 bp, Homo sapiens
acaaattaaaacaag

SEQ ID NO: 914184 - DNA, 15 bp, Homo sapiens
cacaaattaaaacaa

SEQ ID NO: 914185 - DNA, 15 bp, Homo sapiens
acacaaattaaaaca

SEQ ID NO: 914186 - DNA, 15 bp, Homo sapiens
tacacaaattaaaac

SEQ ID NO: 914187 - DNA, 15 bp, Homo sapiens
atacacaaattaaaa

SEQ ID NO: 914188 - DNA, 15 bp, Homo sapiens
catacacaaattaaa

SEQ ID NO: 914189 - DNA, 15 bp, Homo sapiens
acatacacaaattaa

SEQ ID NO: 914190 - DNA, 15 bp, Homo sapiens
aacatacacaaatta

SEQ ID NO: 914191 - DNA, 15 bp, Homo sapiens
aaacatacacaaatt

SEQ ID NO: 914192 - DNA, 15 bp, Homo sapiens
aaaacatacacaaat

SEQ ID NO: 914193 - DNA, 15 bp, Homo sapiens
taaaacatacacaaa

SEQ ID NO: 914194 - DNA, 15 bp, Homo sapiens
ttaaaacatacacaa

SEQ ID NO: 914195 - DNA, 15 bp, Homo sapiens
attaaaacatacaca

SEQ ID NO: 914196 - DNA, 15 bp, Homo sapiens
tattaaaacatacac

SEQ ID NO: 914197 - DNA, 15 bp, Homo sapiens
atattaaaacataca

SEQ ID NO: 914198 - DNA, 15 bp, Homo sapiens
gatattaaaacatac

SEQ ID NO: 914199 - DNA, 15 bp, Homo sapiens
agatattaaaacata

SEQ ID NO: 914200 - DNA, 15 bp, Homo sapiens
tagatattaaaacat

SEQ ID NO: 914201 - DNA, 15 bp, Homo sapiens
ttagatattaaaaca

SEQ ID NO: 914202 - DNA, 15 bp, Homo sapiens
tttagatattaaaac

SEQ ID NO: 914203 - DNA, 15 bp, Homo sapiens
ttttagatattaaaa

SEQ ID NO: 914204 - DNA, 15 bp, Homo sapiens
tttttagatattaaa

SEQ ID NO: 914205 - DNA, 15 bp, Homo sapiens
gtttttagatattaa

SEQ ID NO: 914206 - DNA, 15 bp, Homo sapiens
cgtttttagatatta

SEQ ID NO: 914207 - DNA, 15 bp, Homo sapiens
acgtttttagatatt

SEQ ID NO: 914208 - DNA, 15 bp, Homo sapiens
aacgtttttagatat

SEQ ID NO: 914209 - DNA, 15 bp, Homo sapiens
taacgtttttagata

SEQ ID NO: 914210 - DNA, 15 bp, Homo sapiens
ataacgtttttagat

SEQ ID NO: 914211 - DNA, 15 bp, Homo sapiens
aataacgtttttaga

SEQ ID NO: 914212 - DNA, 15 bp, Homo sapiens
taataacgtttttag

SEQ ID NO: 914213 - DNA, 15 bp, Homo sapiens
ataataacgttttta

SEQ ID NO: 914214 - DNA, 15 bp, Homo sapiens
aataataacgttttt

SEQ ID NO: 914215 - DNA, 15 bp, Homo sapiens
aaataataacgtttt

SEQ ID NO: 914216 - DNA, 15 bp, Homo sapiens
aaaataataacgttt

SEQ ID NO: 914217 - DNA, 15 bp, Homo sapiens
aaaaataataacgtt

SEQ ID NO: 914218 - DNA, 15 bp, Homo sapiens
gaaaaataataacgt

SEQ ID NO: 914219 - DNA, 15 bp, Homo sapiens
agaaaaataataacg

SEQ ID NO: 914220 - DNA, 15 bp, Homo sapiens
cagaaaaataataac

SEQ ID NO: 914221 - DNA, 15 bp, Homo sapiens
gcagaaaaataataa

SEQ ID NO: 914222 - DNA, 15 bp, Homo sapiens
agcagaaaaataata

SEQ ID NO: 914223 - DNA, 15 bp, Homo sapiens
aagcagaaaaataat

SEQ ID NO: 914224 - DNA, 15 bp, Homo sapiens
aaagcagaaaaataa

SEQ ID NO: 914225 - DNA, 15 bp, Homo sapiens
aaaagcagaaaaata

SEQ ID NO: 914226 - DNA, 15 bp, Homo sapiens
taaaagcagaaaaat

SEQ ID NO: 914227 - DNA, 15 bp, Homo sapiens
ctaaaagcagaaaaa

SEQ ID NO: 914228 - DNA, 15 bp, Homo sapiens
tctaaaagcagaaaa

SEQ ID NO: 914229 - DNA, 15 bp, Homo sapiens
gtctaaaagcagaaa

SEQ ID NO: 914230 - DNA, 15 bp, Homo sapiens
agtctaaaagcagaa

SEQ ID NO: 914231 - DNA, 15 bp, Homo sapiens
aagtctaaaagcaga

SEQ ID NO: 914232 - DNA, 15 bp, Homo sapiens
gaagtctaaaagcag

SEQ ID NO: 914233 - DNA, 15 bp, Homo sapiens
agaagtctaaaagca

SEQ ID NO: 914234 - DNA, 15 bp, Homo sapiens
aagaagtctaaaagc

SEQ ID NO: 914235 - DNA, 15 bp, Homo sapiens
aaagaagtctaaaag

SEQ ID NO: 914236 - DNA, 15 bp, Homo sapiens
taaagaagtctaaaa

SEQ ID NO: 914237 - DNA, 15 bp, Homo sapiens
ataaagaagtctaaa

SEQ ID NO: 914238 - DNA, 15 bp, Homo sapiens
cataaagaagtctaa

SEQ ID NO: 914239 - DNA, 15 bp, Homo sapiens
tcataaagaagtcta

SEQ ID NO: 914240 - DNA, 15 bp, Homo sapiens
ttcataaagaagtct

SEQ ID NO: 914241 - DNA, 15 bp, Homo sapiens
attcataaagaagtc

SEQ ID NO: 914242 - DNA, 15 bp, Homo sapiens
tattcataaagaagt

SEQ ID NO: 914243 - DNA, 15 bp, Homo sapiens
atattcataaagaag

SEQ ID NO: 914244 - DNA, 15 bp, Homo sapiens
aatattcataaagaa

SEQ ID NO: 914245 - DNA, 15 bp, Homo sapiens
aaatattcataaaga

SEQ ID NO: 914246 - DNA, 15 bp, Homo sapiens
aaaatattcataaag

SEQ ID NO: 914247 - DNA, 15 bp, Homo sapiens
aaaaatattcataaa

SEQ ID NO: 914248 - DNA, 15 bp, Homo sapiens
taaaaatattcataa

SEQ ID NO: 914249 - DNA, 15 bp, Homo sapiens
ttaaaaatattcata

SEQ ID NO: 914250 - DNA, 15 bp, Homo sapiens
attaaaaatattcat

SEQ ID NO: 914251 - DNA, 15 bp, Homo sapiens
cattaaaaatattca

SEQ ID NO: 914252 - DNA, 15 bp, Homo sapiens
acattaaaaatattc

SEQ ID NO: 914253 - DNA, 15 bp, Homo sapiens
cacattaaaaatatt

SEQ ID NO: 914254 - DNA, 15 bp, Homo sapiens
tcacattaaaaatat

SEQ ID NO: 914255 - DNA, 15 bp, Homo sapiens
ttcacattaaaaata

SEQ ID NO: 914256 - DNA, 15 bp, Homo sapiens
attcacattaaaaat

SEQ ID NO: 914257 - DNA, 15 bp, Homo sapiens
aattcacattaaaaa

SEQ ID NO: 914258 - DNA, 15 bp, Homo sapiens
taattcacattaaaa

SEQ ID NO: 914259 - DNA, 15 bp, Homo sapiens
ataattcacattaaa

SEQ ID NO: 914260 - DNA, 15 bp, Homo sapiens
tataattcacattaa

SEQ ID NO: 914261 - DNA, 15 bp, Homo sapiens
ctataattcacatta

SEQ ID NO: 914262 - DNA, 15 bp, Homo sapiens
tctataattcacatt

SEQ ID NO: 914263 - DNA, 15 bp, Homo sapiens
ttctataattcacat

SEQ ID NO: 914264 - DNA, 15 bp, Homo sapiens
gttctataattcaca

SEQ ID NO: 914265 - DNA, 15 bp, Homo sapiens
agttctataattcac

SEQ ID NO: 914266 - DNA, 15 bp, Homo sapiens
cagttctataattca

SEQ ID NO: 914267 - DNA, 15 bp, Homo sapiens
ccagttctataattc

SEQ ID NO: 914268 - DNA, 15 bp, Homo sapiens
gccagttctataatt

SEQ ID NO: 914269 - DNA, 15 bp, Homo sapiens
agccagttctataat

SEQ ID NO: 914270 - DNA, 15 bp, Homo sapiens
aagccagttctataa

SEQ ID NO: 914271 - DNA, 15 bp, Homo sapiens
caagccagttctata

SEQ ID NO: 914272 - DNA, 15 bp, Homo sapiens
acaagccagttctat

SEQ ID NO: 914273 - DNA, 15 bp, Homo sapiens
gacaagccagttcta

SEQ ID NO: 914274 - DNA, 15 bp, Homo sapiens
ggacaagccagttct

SEQ ID NO: 914275 - DNA, 15 bp, Homo sapiens
tggacaagccagttc

SEQ ID NO: 914276 - DNA, 15 bp, Homo sapiens
ctggacaagccagtt

SEQ ID NO: 914277 - DNA, 15 bp, Homo sapiens
actggacaagccagt

SEQ ID NO: 914278 - DNA, 15 bp, Homo sapiens
aactggacaagccag

SEQ ID NO: 914279 - DNA, 15 bp, Homo sapiens
gaactggacaagcca

SEQ ID NO: 914280 - DNA, 15 bp, Homo sapiens
agaactggacaagcc

SEQ ID NO: 914281 - DNA, 15 bp, Homo sapiens
aagaactggacaagc

SEQ ID NO: 914282 - DNA, 15 bp, Homo sapiens
taagaactggacaag

SEQ ID NO: 914283 - DNA, 15 bp, Homo sapiens
ttaagaactggacaa

SEQ ID NO: 914284 - DNA, 15 bp, Homo sapiens
tttaagaactggaca

SEQ ID NO: 914285 - DNA, 15 bp, Homo sapiens
acaataaacactata

SEQ ID NO: 914286 - DNA, 15 bp, Homo sapiens
cacaataaacactat

SEQ ID NO: 914287 - DNA, 15 bp, Homo sapiens
acacaataaacacta

SEQ ID NO: 914288 - DNA, 15 bp, Homo sapiens
tacacaataaacact

SEQ ID NO: 914289 - DNA, 15 bp, Homo sapiens
ctacacaataaacac

SEQ ID NO: 914290 - DNA, 15 bp, Homo sapiens
cctacacaataaaca

SEQ ID NO: 914291 - DNA, 15 bp, Homo sapiens
ccctacacaataaac

SEQ ID NO: 914292 - DNA, 15 bp, Homo sapiens
gccctacacaataaa

SEQ ID NO: 914293 - DNA, 15 bp, Homo sapiens
ggccctacacaataa

SEQ ID NO: 914294 - DNA, 15 bp, Homo sapiens
tggccctacacaata

SEQ ID NO: 914295 - DNA, 15 bp, Homo sapiens
atggccctacacaat

SEQ ID NO: 914296 - DNA, 15 bp, Homo sapiens
catggccctacacaa

SEQ ID NO: 914297 - DNA, 15 bp, Homo sapiens
acatggccctacaca

SEQ ID NO: 914298 - DNA, 15 bp, Homo sapiens
cacatggccctacac

SEQ ID NO: 914299 - DNA, 15 bp, Homo sapiens
ccacatggccctaca

SEQ ID NO: 914300 - DNA, 15 bp, Homo sapiens
tccacatggccctac

SEQ ID NO: 914301 - DNA, 15 bp, Homo sapiens
ttccacatggcccta

SEQ ID NO: 914302 - DNA, 15 bp, Homo sapiens
cttccacatggccct

SEQ ID NO: 914303 - DNA, 15 bp, Homo sapiens
tcttccacatggccc

SEQ ID NO: 914304 - DNA, 15 bp, Homo sapiens
ttcttccacatggcc

SEQ ID NO: 914305 - DNA, 15 bp, Homo sapiens
attcttccacatggc

SEQ ID NO: 914306 - DNA, 15 bp, Homo sapiens
cattcttccacatgg

SEQ ID NO: 914307 - DNA, 15 bp, Homo sapiens
tcattcttccacatg

SEQ ID NO: 914308 - DNA, 15 bp, Homo sapiens
atcattcttccacat

SEQ ID NO: 914309 - DNA, 15 bp, Homo sapiens
tatcattcttccaca

SEQ ID NO: 914310 - DNA, 15 bp, Homo sapiens
ctatcattcttccac

SEQ ID NO: 914311 - DNA, 15 bp, Homo sapiens
cctatcattcttcca

SEQ ID NO: 914312 - DNA, 15 bp, Homo sapiens
tcctatcattcttcc

SEQ ID NO: 914313 - DNA, 15 bp, Homo sapiens
ctcctatcattcttc

SEQ ID NO: 914314 - DNA, 15 bp, Homo sapiens
tctcctatcattctt

SEQ ID NO: 914315 - DNA, 15 bp, Homo sapiens
ttctcctatcattct

SEQ ID NO: 914316 - DNA, 15 bp, Homo sapiens
attctcctatcattc

SEQ ID NO: 914317 - DNA, 15 bp, Homo sapiens
tattctcctatcatt

SEQ ID NO: 914318 - DNA, 15 bp, Homo sapiens
ctattctcctatcat

SEQ ID NO: 914319 - DNA, 15 bp, Homo sapiens
tctattctcctatca

SEQ ID NO: 914320 - DNA, 15 bp, Homo sapiens
atctattctcctatc

SEQ ID NO: 914321 - DNA, 15 bp, Homo sapiens
tatctattctcctat

SEQ ID NO: 914322 - DNA, 15 bp, Homo sapiens
atatctattctccta

SEQ ID NO: 914323 - DNA, 15 bp, Homo sapiens
catatctattctcct

SEQ ID NO: 914324 - DNA, 15 bp, Homo sapiens
acatatctattctcc

SEQ ID NO: 914325 - DNA, 15 bp, Homo sapiens
cacatatctattctc

SEQ ID NO: 914326 - DNA, 15 bp, Homo sapiens
ccacatatctattct

SEQ ID NO: 914327 - DNA, 15 bp, Homo sapiens
tccacatatctattc

SEQ ID NO: 914328 - DNA, 15 bp, Homo sapiens
atccacatatctatt

SEQ ID NO: 914329 - DNA, 15 bp, Homo sapiens
catccacatatctat

SEQ ID NO: 914330 - DNA, 15 bp, Homo sapiens
ccatccacatatcta

SEQ ID NO: 914331 - DNA, 15 bp, Homo sapiens
tccatccacatatct

SEQ ID NO: 914332 - DNA, 15 bp, Homo sapiens
ttccatccacatatc

SEQ ID NO: 914333 - DNA, 15 bp, Homo sapiens
cttccatccacatat

SEQ ID NO: 914334 - DNA, 15 bp, Homo sapiens
ccttccatccacata

SEQ ID NO: 914335 - DNA, 15 bp, Homo sapiens
cccttccatccacat

SEQ ID NO: 914336 - DNA, 15 bp, Homo sapiens
tcccttccatccaca

SEQ ID NO: 914337 - DNA, 15 bp, Homo sapiens
ctcccttccatccac

SEQ ID NO: 914338 - DNA, 15 bp, Homo sapiens
tctcccttccatcca

SEQ ID NO: 914339 - DNA, 15 bp, Homo sapiens
ttctcccttccatcc

SEQ ID NO: 914340 - DNA, 15 bp, Homo sapiens
attctcccttccatc

SEQ ID NO: 914341 - DNA, 15 bp, Homo sapiens
tattctcccttccat

SEQ ID NO: 914342 - DNA, 15 bp, Homo sapiens
ctattctcccttcca

SEQ ID NO: 914343 - DNA, 15 bp, Homo sapiens
tctattctcccttcc

SEQ ID NO: 914344 - DNA, 15 bp, Homo sapiens
atctattctcccttc

SEQ ID NO: 914345 - DNA, 15 bp, Homo sapiens
tatctattctccctt

SEQ ID NO: 914346 - DNA, 15 bp, Homo sapiens
gtatctattctccct

SEQ ID NO: 914347 - DNA, 15 bp, Homo sapiens
agtatctattctccc

SEQ ID NO: 914348 - DNA, 15 bp, Homo sapiens
cagtatctattctcc

SEQ ID NO: 914349 - DNA, 15 bp, Homo sapiens
ccagtatctattctc

SEQ ID NO: 914350 - DNA, 15 bp, Homo sapiens
cccagtatctattct

SEQ ID NO: 914351 - DNA, 15 bp, Homo sapiens
ccccagtatctattc

SEQ ID NO: 914352 - DNA, 15 bp, Homo sapiens
cccccagtatctatt

SEQ ID NO: 914353 - DNA, 15 bp, Homo sapiens
tcccccagtatctat

SEQ ID NO: 914354 - DNA, 15 bp, Homo sapiens
gtcccccagtatcta

SEQ ID NO: 914355 - DNA, 15 bp, Homo sapiens
tgtcccccagtatct

SEQ ID NO: 914356 - DNA, 15 bp, Homo sapiens
ttgtcccccagtatc

SEQ ID NO: 914357 - DNA, 15 bp, Homo sapiens
gttgtcccccagtat

SEQ ID NO: 914358 - DNA, 15 bp, Homo sapiens
agttgtcccccagta

SEQ ID NO: 914359 - DNA, 15 bp, Homo sapiens
gagttgtcccccagt

SEQ ID NO: 914360 - DNA, 15 bp, Homo sapiens
tgagttgtcccccag

SEQ ID NO: 914361 - DNA, 15 bp, Homo sapiens
ctgagttgtccccca

SEQ ID NO: 914362 - DNA, 15 bp, Homo sapiens
gctgagttgtccccc

SEQ ID NO: 914363 - DNA, 15 bp, Homo sapiens
ggctgagttgtcccc

SEQ ID NO: 914364 - DNA, 15 bp, Homo sapiens
aggctgagttgtccc

SEQ ID NO: 914365 - DNA, 15 bp, Homo sapiens
caggctgagttgtcc

SEQ ID NO: 914366 - DNA, 15 bp, Homo sapiens
acaggctgagttgtc

SEQ ID NO: 914367 - DNA, 15 bp, Homo sapiens
cacaggctgagttgt

SEQ ID NO: 914368 - DNA, 15 bp, Homo sapiens
acacaggctgagttg

SEQ ID NO: 914369 - DNA, 15 bp, Homo sapiens
gacacaggctgagtt

SEQ ID NO: 914370 - DNA, 15 bp, Homo sapiens
tgacacaggctgagt

SEQ ID NO: 914371 - DNA, 15 bp, Homo sapiens
atgacacaggctgag

SEQ ID NO: 914372 - DNA, 15 bp, Homo sapiens
catgacacaggctga

SEQ ID NO: 914373 - DNA, 15 bp, Homo sapiens
acatgacacaggctg

SEQ ID NO: 914374 - DNA, 15 bp, Homo sapiens
aacatgacacaggct

SEQ ID NO: 914375 - DNA, 15 bp, Homo sapiens
gaacatgacacaggc

SEQ ID NO: 914376 - DNA, 15 bp, Homo sapiens
ggaacatgacacagg

SEQ ID NO: 914377 - DNA, 15 bp, Homo sapiens
tggaacatgacacag

SEQ ID NO: 914378 - DNA, 15 bp, Homo sapiens
gtggaacatgacaca

SEQ ID NO: 914379 - DNA, 15 bp, Homo sapiens
tgtggaacatgacac

SEQ ID NO: 914380 - DNA, 15 bp, Homo sapiens
ctgtggaacatgaca

SEQ ID NO: 914381 - DNA, 15 bp, Homo sapiens
gctgtggaacatgac

SEQ ID NO: 914382 - DNA, 15 bp, Homo sapiens
agctgtggaacatga

SEQ ID NO: 914383 - DNA, 15 bp, Homo sapiens
aagctgtggaacatg

SEQ ID NO: 914384 - DNA, 15 bp, Homo sapiens
taagctgtggaacat

SEQ ID NO: 914385 - DNA, 15 bp, Homo sapiens
ctaagctgtggaaca

SEQ ID NO: 914386 - DNA, 15 bp, Homo sapiens
tctaagctgtggaac

SEQ ID NO: 914387 - DNA, 15 bp, Homo sapiens
atctaagctgtggaa

SEQ ID NO: 914388 - DNA, 15 bp, Homo sapiens
catctaagctgtgga

SEQ ID NO: 914389 - DNA, 15 bp, Homo sapiens
acatctaagctgtgg

SEQ ID NO: 914390 - DNA, 15 bp, Homo sapiens
aacatctaagctgtg

SEQ ID NO: 914391 - DNA, 15 bp, Homo sapiens
taacatctaagctgt

SEQ ID NO: 914392 - DNA, 15 bp, Homo sapiens
ctaacatctaagctg

SEQ ID NO: 914393 - DNA, 15 bp, Homo sapiens
gctaacatctaagct

SEQ ID NO: 914394 - DNA, 15 bp, Homo sapiens
agctaacatctaagc

SEQ ID NO: 914395 - DNA, 15 bp, Homo sapiens
gagctaacatctaag

SEQ ID NO: 914396 - DNA, 15 bp, Homo sapiens
ggagctaacatctaa

SEQ ID NO: 914397 - DNA, 15 bp, Homo sapiens
tggagctaacatcta

SEQ ID NO: 914398 - DNA, 15 bp, Homo sapiens
ctggagctaacatct

SEQ ID NO: 914399 - DNA, 15 bp, Homo sapiens
tctggagctaacatc

SEQ ID NO: 914400 - DNA, 15 bp, Homo sapiens
gtctggagctaacat

SEQ ID NO: 914401 - DNA, 15 bp, Homo sapiens
tgtctggagctaaca

SEQ ID NO: 914402 - DNA, 15 bp, Homo sapiens
ctgtctggagctaac

SEQ ID NO: 914403 - DNA, 15 bp, Homo sapiens
gctgtctggagctaa

SEQ ID NO: 914404 - DNA, 15 bp, Homo sapiens
agctgtctggagcta

SEQ ID NO: 914405 - DNA, 15 bp, Homo sapiens
cagctgtctggagct

SEQ ID NO: 914406 - DNA, 15 bp, Homo sapiens
acagctgtctggagc

SEQ ID NO: 914407 - DNA, 15 bp, Homo sapiens
cacagctgtctggag

SEQ ID NO: 914408 - DNA, 15 bp, Homo sapiens
gcacagctgtctgga

SEQ ID NO: 914409 - DNA, 15 bp, Homo sapiens
agcacagctgtctgg

SEQ ID NO: 914410 - DNA, 15 bp, Homo sapiens
gagcacagctgtctg

SEQ ID NO: 914411 - DNA, 15 bp, Homo sapiens
tgagcacagctgtct

SEQ ID NO: 914412 - DNA, 15 bp, Homo sapiens
atgagcacagctgtc

SEQ ID NO: 914413 - DNA, 15 bp, Homo sapiens
aatgagcacagctgt

SEQ ID NO: 914414 - DNA, 15 bp, Homo sapiens
aaatgagcacagctg

SEQ ID NO: 914415 - DNA, 15 bp, Homo sapiens
gaaatgagcacagct

SEQ ID NO: 914416 - DNA, 15 bp, Homo sapiens
agaaatgagcacagc

SEQ ID NO: 914417 - DNA, 15 bp, Homo sapiens
aagaaatgagcacag

SEQ ID NO: 914418 - DNA, 15 bp, Homo sapiens
taagaaatgagcaca

SEQ ID NO: 914419 - DNA, 15 bp, Homo sapiens
ttaagaaatgagcac

SEQ ID NO: 914420 - DNA, 15 bp, Homo sapiens
tttaagaaatgagca

SEQ ID NO: 914421 - DNA, 15 bp, Homo sapiens
ttttaagaaatgagc

SEQ ID NO: 914422 - DNA, 15 bp, Homo sapiens
tttttaagaaatgag

SEQ ID NO: 914423 - DNA, 15 bp, Homo sapiens
gtttttaagaaatga

SEQ ID NO: 914424 - DNA, 15 bp, Homo sapiens
agtttttaagaaatg

SEQ ID NO: 914425 - DNA, 15 bp, Homo sapiens
aagtttttaagaaat

SEQ ID NO: 914426 - DNA, 15 bp, Homo sapiens
aaagtttttaagaaa

SEQ ID NO: 914427 - DNA, 15 bp, Homo sapiens
aaaagtttttaagaa

SEQ ID NO: 914428 - DNA, 15 bp, Homo sapiens
caaaagtttttaaga

SEQ ID NO: 914429 - DNA, 15 bp, Homo sapiens
acaaaagtttttaag

SEQ ID NO: 914430 - DNA, 15 bp, Homo sapiens
cacaaaagtttttaa

SEQ ID NO: 914431 - DNA, 15 bp, Homo sapiens
tcacaaaagttttta

SEQ ID NO: 914432 - DNA, 15 bp, Homo sapiens
atcacaaaagttttt

SEQ ID NO: 914433 - DNA, 15 bp, Homo sapiens
gatcacaaaagtttt

SEQ ID NO: 914434 - DNA, 15 bp, Homo sapiens
agatcacaaaagttt

SEQ ID NO: 914435 - DNA, 15 bp, Homo sapiens
gagatcacaaaagtt

SEQ ID NO: 914436 - DNA, 15 bp, Homo sapiens
tgagatcacaaaagt

SEQ ID NO: 914437 - DNA, 15 bp, Homo sapiens
ttgagatcacaaaag

SEQ ID NO: 914438 - DNA, 15 bp, Homo sapiens
tttgagatcacaaaa

SEQ ID NO: 914439 - DNA, 15 bp, Homo sapiens
gtttgagatcacaaa

SEQ ID NO: 914440 - DNA, 15 bp, Homo sapiens
cgtttgagatcacaa

SEQ ID NO: 914441 - DNA, 15 bp, Homo sapiens
acgtttgagatcaca

SEQ ID NO: 914442 - DNA, 15 bp, Homo sapiens
tacgtttgagatcac

SEQ ID NO: 914443 - DNA, 15 bp, Homo sapiens
gtacgtttgagatca

SEQ ID NO: 914444 - DNA, 15 bp, Homo sapiens
agtacgtttgagatc

SEQ ID NO: 914445 - DNA, 15 bp, Homo sapiens
tagtacgtttgagat

SEQ ID NO: 914446 - DNA, 15 bp, Homo sapiens
ctagtacgtttgaga

SEQ ID NO: 914447 - DNA, 15 bp, Homo sapiens
actagtacgtttgag

SEQ ID NO: 914448 - DNA, 15 bp, Homo sapiens
aactagtacgtttga

SEQ ID NO: 914449 - DNA, 15 bp, Homo sapiens
aaactagtacgtttg

SEQ ID NO: 914450 - DNA, 15 bp, Homo sapiens
aaaactagtacgttt

SEQ ID NO: 914451 - DNA, 15 bp, Homo sapiens
taaaactagtacgtt

SEQ ID NO: 914452 - DNA, 15 bp, Homo sapiens
ataaaactagtacgt

SEQ ID NO: 914453 - DNA, 15 bp, Homo sapiens
cataaaactagtacg

SEQ ID NO: 914454 - DNA, 15 bp, Homo sapiens
gcataaaactagtac

SEQ ID NO: 914455 - DNA, 15 bp, Homo sapiens
ggcataaaactagta

SEQ ID NO: 914456 - DNA, 15 bp, Homo sapiens
aggcataaaactagt

SEQ ID NO: 914457 - DNA, 15 bp, Homo sapiens
taggcataaaactag

SEQ ID NO: 914458 - DNA, 15 bp, Homo sapiens
ttaggcataaaacta

SEQ ID NO: 914459 - DNA, 15 bp, Homo sapiens
cttaggcataaaact

SEQ ID NO: 914460 - DNA, 15 bp, Homo sapiens
acttaggcataaaac

SEQ ID NO: 914461 - DNA, 15 bp, Homo sapiens
gacttaggcataaaa

SEQ ID NO: 914462 - DNA, 15 bp, Homo sapiens
ggacttaggcataaa

SEQ ID NO: 914463 - DNA, 15 bp, Homo sapiens
tggacttaggcataa

SEQ ID NO: 914464 - DNA, 15 bp, Homo sapiens
ttggacttaggcata

SEQ ID NO: 914465 - DNA, 15 bp, Homo sapiens
attggacttaggcat

SEQ ID NO: 914466 - DNA, 15 bp, Homo sapiens
tattggacttaggca

SEQ ID NO: 914467 - DNA, 15 bp, Homo sapiens
atattggacttaggc

SEQ ID NO: 914468 - DNA, 15 bp, Homo sapiens
aatattggacttagg

SEQ ID NO: 914469 - DNA, 15 bp, Homo sapiens
taatattggacttag

SEQ ID NO: 914470 - DNA, 15 bp, Homo sapiens
ttaatattggactta

SEQ ID NO: 914471 - DNA, 15 bp, Homo sapiens
tttaatattggactt

SEQ ID NO: 914472 - DNA, 15 bp, Homo sapiens
atttaatattggact

SEQ ID NO: 914473 - DNA, 15 bp, Homo sapiens
tatttaatattggac

SEQ ID NO: 914474 - DNA, 15 bp, Homo sapiens
atatttaatattgga

SEQ ID NO: 914475 - DNA, 15 bp, Homo sapiens
tatatttaatattgg

SEQ ID NO: 914476 - DNA, 15 bp, Homo sapiens
atatatttaatattg

SEQ ID NO: 914477 - DNA, 15 bp, Homo sapiens
tatatatttaatatt

SEQ ID NO: 914478 - DNA, 15 bp, Homo sapiens
ttatatatttaatat

SEQ ID NO: 914479 - DNA, 15 bp, Homo sapiens
gttatatatttaata

SEQ ID NO: 914480 - DNA, 15 bp, Homo sapiens
ggttatatatttaat

SEQ ID NO: 914481 - DNA, 15 bp, Homo sapiens
aggttatatatttaa

SEQ ID NO: 914482 - DNA, 15 bp, Homo sapiens
taggttatatattta

SEQ ID NO: 914483 - DNA, 15 bp, Homo sapiens
ataggttatatattt

SEQ ID NO: 914484 - DNA, 15 bp, Homo sapiens
tataggttatatatt

SEQ ID NO: 914485 - DNA, 15 bp, Homo sapiens
atataggttatatat

SEQ ID NO: 914486 - DNA, 15 bp, Homo sapiens
tatataggttatata

SEQ ID NO: 914487 - DNA, 15 bp, Homo sapiens
atatataggttatat

SEQ ID NO: 914488 - DNA, 15 bp, Homo sapiens
aatatataggttata

SEQ ID NO: 914489 - DNA, 15 bp, Homo sapiens
taatatataggttat

SEQ ID NO: 914490 - DNA, 15 bp, Homo sapiens
ctaatatataggtta

SEQ ID NO: 914491 - DNA, 15 bp, Homo sapiens
actaatatataggtt

SEQ ID NO: 914492 - DNA, 15 bp, Homo sapiens
tactaatatataggt

SEQ ID NO: 914493 - DNA, 15 bp, Homo sapiens
ttactaatatatagg

SEQ ID NO: 914494 - DNA, 15 bp, Homo sapiens
tttactaatatatag

SEQ ID NO: 914495 - DNA, 15 bp, Homo sapiens
atttactaatatata

SEQ ID NO: 914496 - DNA, 15 bp, Homo sapiens
catttactaatatat

SEQ ID NO: 914497 - DNA, 15 bp, Homo sapiens
gcatttactaatata

SEQ ID NO: 914498 - DNA, 15 bp, Homo sapiens
agcatttactaatat

SEQ ID NO: 914499 - DNA, 15 bp, Homo sapiens
aagcatttactaata

SEQ ID NO: 914500 - DNA, 15 bp, Homo sapiens
taagcatttactaat

SEQ ID NO: 914501 - DNA, 15 bp, Homo sapiens
ataagcatttactaa

SEQ ID NO: 914502 - DNA, 15 bp, Homo sapiens
tataagcatttacta

SEQ ID NO: 914503 - DNA, 15 bp, Homo sapiens
ttataagcatttact

SEQ ID NO: 914504 - DNA, 15 bp, Homo sapiens
attataagcatttac

SEQ ID NO: 914505 - DNA, 15 bp, Homo sapiens
cattataagcattta

SEQ ID NO: 914506 - DNA, 15 bp, Homo sapiens
tcattataagcattt

SEQ ID NO: 914507 - DNA, 15 bp, Homo sapiens
ttcattataagcatt

SEQ ID NO: 914508 - DNA, 15 bp, Homo sapiens
attcattataagcat

SEQ ID NO: 914509 - DNA, 15 bp, Homo sapiens
cattcattataagca

SEQ ID NO: 914510 - DNA, 15 bp, Homo sapiens
tcattcattataagc

SEQ ID NO: 914511 - DNA, 15 bp, Homo sapiens
ctcattcattataag

SEQ ID NO: 914512 - DNA, 15 bp, Homo sapiens
actcattcattataa

SEQ ID NO: 914513 - DNA, 15 bp, Homo sapiens
cactcattcattata

SEQ ID NO: 914514 - DNA, 15 bp, Homo sapiens
acactcattcattat

SEQ ID NO: 914515 - DNA, 15 bp, Homo sapiens
cacactcattcatta

SEQ ID NO: 914516 - DNA, 15 bp, Homo sapiens
tcacactcattcatt

SEQ ID NO: 914517 - DNA, 15 bp, Homo sapiens
ctcacactcattcat

SEQ ID NO: 914518 - DNA, 15 bp, Homo sapiens
tctcacactcattca

SEQ ID NO: 914519 - DNA, 15 bp, Homo sapiens
ttctcacactcattc

SEQ ID NO: 914520 - DNA, 15 bp, Homo sapiens
attctcacactcatt

SEQ ID NO: 914521 - DNA, 15 bp, Homo sapiens
cattctcacactcat

SEQ ID NO: 914522 - DNA, 15 bp, Homo sapiens
tcattctcacactca

SEQ ID NO: 914523 - DNA, 15 bp, Homo sapiens
atcattctcacactc

SEQ ID NO: 914524 - DNA, 15 bp, Homo sapiens
gatcattctcacact

SEQ ID NO: 914525 - DNA, 15 bp, Homo sapiens
agatcattctcacac

SEQ ID NO: 914526 - DNA, 15 bp, Homo sapiens
cagatcattctcaca

SEQ ID NO: 914527 - DNA, 15 bp, Homo sapiens
acagatcattctcac

SEQ ID NO: 914528 - DNA, 15 bp, Homo sapiens
gacagatcattctca

SEQ ID NO: 914529 - DNA, 15 bp, Homo sapiens
tgacagatcattctc

SEQ ID NO: 914530 - DNA, 15 bp, Homo sapiens
ttgacagatcattct

SEQ ID NO: 914531 - DNA, 15 bp, Homo sapiens
attgacagatcattc

SEQ ID NO: 914532 - DNA, 15 bp, Homo sapiens
gattgacagatcatt

SEQ ID NO: 914533 - DNA, 15 bp, Homo sapiens
tgattgacagatcat

SEQ ID NO: 914534 - DNA, 15 bp, Homo sapiens
ttgattgacagatca

SEQ ID NO: 914535 - DNA, 15 bp, Homo sapiens
attgattgacagatc

SEQ ID NO: 914536 - DNA, 15 bp, Homo sapiens
aattgattgacagat

SEQ ID NO: 914537 - DNA, 15 bp, Homo sapiens
aaattgattgacaga

SEQ ID NO: 914538 - DNA, 15 bp, Homo sapiens
aaaattgattgacag

SEQ ID NO: 914539 - DNA, 15 bp, Homo sapiens
caaaattgattgaca

SEQ ID NO: 914540 - DNA, 15 bp, Homo sapiens
ccaaaattgattgac

SEQ ID NO: 914541 - DNA, 15 bp, Homo sapiens
tccaaaattgattga

SEQ ID NO: 914542 - DNA, 15 bp, Homo sapiens
ttccaaaattgattg

SEQ ID NO: 914543 - DNA, 15 bp, Homo sapiens
attccaaaattgatt

SEQ ID NO: 914544 - DNA, 15 bp, Homo sapiens
cattccaaaattgat

SEQ ID NO: 914545 - DNA, 15 bp, Homo sapiens
tcattccaaaattga

SEQ ID NO: 914546 - DNA, 15 bp, Homo sapiens
atcattccaaaattg

SEQ ID NO: 914547 - DNA, 15 bp, Homo sapiens
tatcattccaaaatt

SEQ ID NO: 914548 - DNA, 15 bp, Homo sapiens
ctatcattccaaaat

SEQ ID NO: 914549 - DNA, 15 bp, Homo sapiens
gctatcattccaaaa

SEQ ID NO: 914550 - DNA, 15 bp, Homo sapiens
tgctatcattccaaa

SEQ ID NO: 914551 - DNA, 15 bp, Homo sapiens
ttgctatcattccaa

SEQ ID NO: 914552 - DNA, 15 bp, Homo sapiens
attgctatcattcca

SEQ ID NO: 914553 - DNA, 15 bp, Homo sapiens
tattgctatcattcc

SEQ ID NO: 914554 - DNA, 15 bp, Homo sapiens
atattgctatcattc

SEQ ID NO: 914555 - DNA, 15 bp, Homo sapiens
aatattgctatcatt

SEQ ID NO: 914556 - DNA, 15 bp, Homo sapiens
taatattgctatcat

SEQ ID NO: 914557 - DNA, 15 bp, Homo sapiens
ataatattgctatca

SEQ ID NO: 914558 - DNA, 15 bp, Homo sapiens
cataatattgctatc

SEQ ID NO: 914559 - DNA, 15 bp, Homo sapiens
acataatattgctat

SEQ ID NO: 914560 - DNA, 15 bp, Homo sapiens
aacataatattgcta

SEQ ID NO: 914561 - DNA, 15 bp, Homo sapiens
aaacataatattgct

SEQ ID NO: 914562 - DNA, 15 bp, Homo sapiens
aaaacataatattgc

SEQ ID NO: 914563 - DNA, 15 bp, Homo sapiens
caaaacataatattg

SEQ ID NO: 914564 - DNA, 15 bp, Homo sapiens
ccaaaacataatatt

SEQ ID NO: 914565 - DNA, 15 bp, Homo sapiens
accaaaacataatat

SEQ ID NO: 914566 - DNA, 15 bp, Homo sapiens
gaccaaaacataata

SEQ ID NO: 914567 - DNA, 15 bp, Homo sapiens
agaccaaaacataat

SEQ ID NO: 914568 - DNA, 15 bp, Homo sapiens
aagaccaaaacataa

SEQ ID NO: 914569 - DNA, 15 bp, Homo sapiens
aaagaccaaaacata

SEQ ID NO: 914570 - DNA, 15 bp, Homo sapiens
aaaagaccaaaacat

SEQ ID NO: 914571 - DNA, 15 bp, Homo sapiens
taaaagaccaaaaca

SEQ ID NO: 914572 - DNA, 15 bp, Homo sapiens
ttaaaagaccaaaac

SEQ ID NO: 914573 - DNA, 15 bp, Homo sapiens
gttaaaagaccaaaa

SEQ ID NO: 914574 - DNA, 15 bp, Homo sapiens
tgttaaaagaccaaa

SEQ ID NO: 914575 - DNA, 15 bp, Homo sapiens
ttgttaaaagaccaa

SEQ ID NO: 914576 - DNA, 15 bp, Homo sapiens
attgttaaaagacca

SEQ ID NO: 914577 - DNA, 15 bp, Homo sapiens
aattgttaaaagacc

SEQ ID NO: 914578 - DNA, 15 bp, Homo sapiens
aaattgttaaaagac

SEQ ID NO: 914579 - DNA, 15 bp, Homo sapiens
taaattgttaaaaga

SEQ ID NO: 914580 - DNA, 15 bp, Homo sapiens
ctaaattgttaaaag

SEQ ID NO: 914581 - DNA, 15 bp, Homo sapiens
actaaattgttaaaa

SEQ ID NO: 914582 - DNA, 15 bp, Homo sapiens
tactaaattgttaaa

SEQ ID NO: 914583 - DNA, 15 bp, Homo sapiens
ttactaaattgttaa

SEQ ID NO: 914584 - DNA, 15 bp, Homo sapiens
cttactaaattgtta

SEQ ID NO: 914585 - DNA, 15 bp, Homo sapiens
tcttactaaattgtt

SEQ ID NO: 914586 - DNA, 15 bp, Homo sapiens
atcttactaaattgt

SEQ ID NO: 914587 - DNA, 15 bp, Homo sapiens
tatcttactaaattg

SEQ ID NO: 914588 - DNA, 15 bp, Homo sapiens
atatcttactaaatt

SEQ ID NO: 914589 - DNA, 15 bp, Homo sapiens
aatatcttactaaat

SEQ ID NO: 914590 - DNA, 15 bp, Homo sapiens
taatatcttactaaa

SEQ ID NO: 914591 - DNA, 15 bp, Homo sapiens
gtaatatcttactaa

SEQ ID NO: 914592 - DNA, 15 bp, Homo sapiens
tgtaatatcttacta

SEQ ID NO: 914593 - DNA, 15 bp, Homo sapiens
ttgtaatatcttact

SEQ ID NO: 914594 - DNA, 15 bp, Homo sapiens
cttgtaatatcttac

SEQ ID NO: 914595 - DNA, 15 bp, Homo sapiens
acttgtaatatctta

SEQ ID NO: 914596 - DNA, 15 bp, Homo sapiens
tacttgtaatatctt

SEQ ID NO: 914597 - DNA, 15 bp, Homo sapiens
ctacttgtaatatct

SEQ ID NO: 914598 - DNA, 15 bp, Homo sapiens
cctacttgtaatatc

SEQ ID NO: 914599 - DNA, 15 bp, Homo sapiens
gcctacttgtaatat

SEQ ID NO: 914600 - DNA, 15 bp, Homo sapiens
tgcctacttgtaata

SEQ ID NO: 914601 - DNA, 15 bp, Homo sapiens
atgcctacttgtaat

SEQ ID NO: 914602 - DNA, 15 bp, Homo sapiens
aatgcctacttgtaa

SEQ ID NO: 914603 - DNA, 15 bp, Homo sapiens
aaatgcctacttgta

SEQ ID NO: 914604 - DNA, 15 bp, Homo sapiens
taaatgcctacttgt

SEQ ID NO: 914605 - DNA, 15 bp, Homo sapiens
ctaaatgcctacttg

SEQ ID NO: 914606 - DNA, 15 bp, Homo sapiens
cctaaatgcctactt

SEQ ID NO: 914607 - DNA, 15 bp, Homo sapiens
tcctaaatgcctact

SEQ ID NO: 914608 - DNA, 15 bp, Homo sapiens
ttcctaaatgcctac

SEQ ID NO: 914609 - DNA, 15 bp, Homo sapiens
cttcctaaatgccta

SEQ ID NO: 914610 - DNA, 15 bp, Homo sapiens
acttcctaaatgcct

SEQ ID NO: 914611 - DNA, 15 bp, Homo sapiens
aacttcctaaatgcc

SEQ ID NO: 914612 - DNA, 15 bp, Homo sapiens
aaacttcctaaatgc

SEQ ID NO: 914613 - DNA, 15 bp, Homo sapiens
aaaacttcctaaatg

SEQ ID NO: 914614 - DNA, 15 bp, Homo sapiens
aaaaacttcctaaat

SEQ ID NO: 914615 - DNA, 15 bp, Homo sapiens
taaaaacttcctaaa

SEQ ID NO: 914616 - DNA, 15 bp, Homo sapiens
ctaaaaacttcctaa

SEQ ID NO: 914617 - DNA, 15 bp, Homo sapiens
gctaaaaacttccta

SEQ ID NO: 914618 - DNA, 15 bp, Homo sapiens
agctaaaaacttcct

SEQ ID NO: 914619 - DNA, 15 bp, Homo sapiens
aagctaaaaacttcc

SEQ ID NO: 914620 - DNA, 15 bp, Homo sapiens
taagctaaaaacttc

SEQ ID NO: 914621 - DNA, 15 bp, Homo sapiens
ctaagctaaaaactt

SEQ ID NO: 914622 - DNA, 15 bp, Homo sapiens
actaagctaaaaact

SEQ ID NO: 914623 - DNA, 15 bp, Homo sapiens
aactaagctaaaaac

SEQ ID NO: 914624 - DNA, 15 bp, Homo sapiens
aaactaagctaaaaa

SEQ ID NO: 914625 - DNA, 15 bp, Homo sapiens
caaactaagctaaaa

SEQ ID NO: 914626 - DNA, 15 bp, Homo sapiens
ccaaactaagctaaa

SEQ ID NO: 914627 - DNA, 15 bp, Homo sapiens
tccaaactaagctaa

SEQ ID NO: 914628 - DNA, 15 bp, Homo sapiens
atccaaactaagcta

SEQ ID NO: 914629 - DNA, 15 bp, Homo sapiens
aatccaaactaagct

SEQ ID NO: 914630 - DNA, 15 bp, Homo sapiens
taatccaaactaagc

SEQ ID NO: 914631 - DNA, 15 bp, Homo sapiens
ttaatccaaactaag

SEQ ID NO: 914632 - DNA, 15 bp, Homo sapiens
tttaatccaaactaa

SEQ ID NO: 914633 - DNA, 15 bp, Homo sapiens
atttaatccaaacta

SEQ ID NO: 914634 - DNA, 15 bp, Homo sapiens
aatttaatccaaact

SEQ ID NO: 914635 - DNA, 15 bp, Homo sapiens
aaatttaatccaaac

SEQ ID NO: 914636 - DNA, 15 bp, Homo sapiens
taaatttaatccaaa

SEQ ID NO: 914637 - DNA, 15 bp, Homo sapiens
ctaaatttaatccaa

SEQ ID NO: 914638 - DNA, 15 bp, Homo sapiens
gctaaatttaatcca

SEQ ID NO: 914639 - DNA, 15 bp, Homo sapiens
agctaaatttaatcc

SEQ ID NO: 914640 - DNA, 15 bp, Homo sapiens
cagctaaatttaatc

SEQ ID NO: 914641 - DNA, 15 bp, Homo sapiens
gcagctaaatttaat

SEQ ID NO: 914642 - DNA, 15 bp, Homo sapiens
tgcagctaaatttaa

SEQ ID NO: 914643 - DNA, 15 bp, Homo sapiens
ttgcagctaaattta

SEQ ID NO: 914644 - DNA, 15 bp, Homo sapiens
cttgcagctaaattt

SEQ ID NO: 914645 - DNA, 15 bp, Homo sapiens
acttgcagctaaatt

SEQ ID NO: 914646 - DNA, 15 bp, Homo sapiens
cacttgcagctaaat

SEQ ID NO: 914647 - DNA, 15 bp, Homo sapiens
tcacttgcagctaaa

SEQ ID NO: 914648 - DNA, 15 bp, Homo sapiens
gtcacttgcagctaa

SEQ ID NO: 914649 - DNA, 15 bp, Homo sapiens
tgtcacttgcagcta

SEQ ID NO: 914650 - DNA, 15 bp, Homo sapiens
ctgtcacttgcagct

SEQ ID NO: 914651 - DNA, 15 bp, Homo sapiens
tctgtcacttgcagc

SEQ ID NO: 914652 - DNA, 15 bp, Homo sapiens
ttctgtcacttgcag

SEQ ID NO: 914653 - DNA, 15 bp, Homo sapiens
tttctgtcacttgca

SEQ ID NO: 914654 - DNA, 15 bp, Homo sapiens
ttttctgtcacttgc

SEQ ID NO: 914655 - DNA, 15 bp, Homo sapiens
tttttctgtcacttg

SEQ ID NO: 914656 - DNA, 15 bp, Homo sapiens
atttttctgtcactt

SEQ ID NO: 914657 - DNA, 15 bp, Homo sapiens
gatttttctgtcact

SEQ ID NO: 914658 - DNA, 15 bp, Homo sapiens
tgatttttctgtcac

SEQ ID NO: 914659 - DNA, 15 bp, Homo sapiens
ttgatttttctgtca

SEQ ID NO: 914660 - DNA, 15 bp, Homo sapiens
cttgatttttctgtc

SEQ ID NO: 914661 - DNA, 15 bp, Homo sapiens
gcttgatttttctgt

SEQ ID NO: 914662 - DNA, 15 bp, Homo sapiens
tgcttgatttttctg

SEQ ID NO: 914663 - DNA, 15 bp, Homo sapiens
atgcttgatttttct

SEQ ID NO: 914664 - DNA, 15 bp, Homo sapiens
tatgcttgatttttc

SEQ ID NO: 914665 - DNA, 15 bp, Homo sapiens
ttatgcttgattttt

SEQ ID NO: 914666 - DNA, 15 bp, Homo sapiens
attatgcttgatttt

SEQ ID NO: 914667 - DNA, 15 bp, Homo sapiens
tattatgcttgattt

SEQ ID NO: 914668 - DNA, 15 bp, Homo sapiens
gtattatgcttgatt

SEQ ID NO: 914669 - DNA, 15 bp, Homo sapiens
tgtattatgcttgat

SEQ ID NO: 914670 - DNA, 15 bp, Homo sapiens
ttgtattatgcttga

SEQ ID NO: 914671 - DNA, 15 bp, Homo sapiens
attgtattatgcttg

SEQ ID NO: 914672 - DNA, 15 bp, Homo sapiens
tattgtattatgctt

SEQ ID NO: 914673 - DNA, 15 bp, Homo sapiens
ttattgtattatgct

SEQ ID NO: 914674 - DNA, 15 bp, Homo sapiens
attattgtattatgc

SEQ ID NO: 914675 - DNA, 15 bp, Homo sapiens
aattattgtattatg

SEQ ID NO: 914676 - DNA, 15 bp, Homo sapiens
aaattattgtattat

SEQ ID NO: 914677 - DNA, 15 bp, Homo sapiens
taaattattgtatta

SEQ ID NO: 914678 - DNA, 15 bp, Homo sapiens
ttaaattattgtatt

SEQ ID NO: 914679 - DNA, 15 bp, Homo sapiens
tttaaattattgtat

SEQ ID NO: 914680 - DNA, 15 bp, Homo sapiens
gtttaaattattgta

SEQ ID NO: 914681 - DNA, 15 bp, Homo sapiens
tgtttaaattattgt

SEQ ID NO: 914682 - DNA, 15 bp, Homo sapiens
ttgtttaaattattg

SEQ ID NO: 914683 - DNA, 15 bp, Homo sapiens
cttgtttaaattatt

SEQ ID NO: 914684 - DNA, 15 bp, Homo sapiens
tcttgtttaaattat

SEQ ID NO: 914685 - DNA, 15 bp, Homo sapiens
atcttgtttaaatta

SEQ ID NO: 914686 - DNA, 15 bp, Homo sapiens
tatcttgtttaaatt

SEQ ID NO: 914687 - DNA, 15 bp, Homo sapiens
ctatcttgtttaaat

SEQ ID NO: 914688 - DNA, 15 bp, Homo sapiens
tctatcttgtttaaa

SEQ ID NO: 914689 - DNA, 15 bp, Homo sapiens
ttctatcttgtttaa

SEQ ID NO: 914690 - DNA, 15 bp, Homo sapiens
tttctatcttgttta

SEQ ID NO: 914691 - DNA, 15 bp, Homo sapiens
atttctatcttgttt

SEQ ID NO: 914692 - DNA, 15 bp, Homo sapiens
aatttctatcttgtt

SEQ ID NO: 914693 - DNA, 15 bp, Homo sapiens
aaatttctatcttgt

SEQ ID NO: 914694 - DNA, 15 bp, Homo sapiens
taaatttctatcttg

SEQ ID NO: 914695 - DNA, 15 bp, Homo sapiens
ataaatttctatctt

SEQ ID NO: 914696 - DNA, 15 bp, Homo sapiens
aataaatttctatct

SEQ ID NO: 914697 - DNA, 15 bp, Homo sapiens
aaataaatttctatc

SEQ ID NO: 914698 - DNA, 15 bp, Homo sapiens
gaaataaatttctat

SEQ ID NO: 914699 - DNA, 15 bp, Homo sapiens
agaaataaatttcta

SEQ ID NO: 914700 - DNA, 15 bp, Homo sapiens
gagaaataaatttct

SEQ ID NO: 914701 - DNA, 15 bp, Homo sapiens
agagaaataaatttc

SEQ ID NO: 914702 - DNA, 15 bp, Homo sapiens
tagagaaataaattt

SEQ ID NO: 914703 - DNA, 15 bp, Homo sapiens
atagagaaataaatt

SEQ ID NO: 914704 - DNA, 15 bp, Homo sapiens
tatagagaaataaat

SEQ ID NO: 914705 - DNA, 15 bp, Homo sapiens
ttatagagaaataaa

SEQ ID NO: 914706 - DNA, 15 bp, Homo sapiens
attatagagaaataa

SEQ ID NO: 914707 - DNA, 15 bp, Homo sapiens
tattatagagaaata

SEQ ID NO: 914708 - DNA, 15 bp, Homo sapiens
atattatagagaaat

SEQ ID NO: 914709 - DNA, 15 bp, Homo sapiens
tatattatagagaaa

SEQ ID NO: 914710 - DNA, 15 bp, Homo sapiens
ctatattatagagaa

SEQ ID NO: 914711 - DNA, 15 bp, Homo sapiens
tctatattatagaga

SEQ ID NO: 914712 - DNA, 15 bp, Homo sapiens
gtctatattatagag

SEQ ID NO: 914713 - DNA, 15 bp, Homo sapiens
tgtctatattataga

SEQ ID NO: 914714 - DNA, 15 bp, Homo sapiens
ttgtctatattatag

SEQ ID NO: 914715 - DNA, 15 bp, Homo sapiens
tttgtctatattata

SEQ ID NO: 914716 - DNA, 15 bp, Homo sapiens
ctttgtctatattat

SEQ ID NO: 914717 - DNA, 15 bp, Homo sapiens
actttgtctatatta

SEQ ID NO: 914718 - DNA, 15 bp, Homo sapiens
aactttgtctatatt

SEQ ID NO: 914719 - DNA, 15 bp, Homo sapiens
caactttgtctatat

SEQ ID NO: 914720 - DNA, 15 bp, Homo sapiens
tcaactttgtctata

SEQ ID NO: 914721 - DNA, 15 bp, Homo sapiens
ttcaactttgtctat

SEQ ID NO: 914722 - DNA, 15 bp, Homo sapiens
cttcaactttgtcta

SEQ ID NO: 914723 - DNA, 15 bp, Homo sapiens
gcttcaactttgtct

SEQ ID NO: 914724 - DNA, 15 bp, Homo sapiens
tgcttcaactttgtc

SEQ ID NO: 914725 - DNA, 15 bp, Homo sapiens
ttgcttcaactttgt

SEQ ID NO: 914726 - DNA, 15 bp, Homo sapiens
gttgcttcaactttg

SEQ ID NO: 914727 - DNA, 15 bp, Homo sapiens
agttgcttcaacttt

SEQ ID NO: 914728 - DNA, 15 bp, Homo sapiens
tagttgcttcaactt

SEQ ID NO: 914729 - DNA, 15 bp, Homo sapiens
ctagttgcttcaact

SEQ ID NO: 914730 - DNA, 15 bp, Homo sapiens
cctagttgcttcaac

SEQ ID NO: 914731 - DNA, 15 bp, Homo sapiens
ccctagttgcttcaa

SEQ ID NO: 914732 - DNA, 15 bp, Homo sapiens
gccctagttgcttca

SEQ ID NO: 914733 - DNA, 15 bp, Homo sapiens
tgccctagttgcttc

SEQ ID NO: 914734 - DNA, 15 bp, Homo sapiens
ctgccctagttgctt

SEQ ID NO: 914735 - DNA, 15 bp, Homo sapiens
cctgccctagttgct

SEQ ID NO: 914736 - DNA, 15 bp, Homo sapiens
tcctgccctagttgc

SEQ ID NO: 914737 - DNA, 15 bp, Homo sapiens
atcctgccctagttg

SEQ ID NO: 914738 - DNA, 15 bp, Homo sapiens
aatcctgccctagtt

SEQ ID NO: 914739 - DNA, 15 bp, Homo sapiens
aaatcctgccctagt

SEQ ID NO: 914740 - DNA, 15 bp, Homo sapiens
caaatcctgccctag

SEQ ID NO: 914741 - DNA, 15 bp, Homo sapiens
acaaatcctgcccta

SEQ ID NO: 914742 - DNA, 15 bp, Homo sapiens
cacaaatcctgccct

SEQ ID NO: 914743 - DNA, 15 bp, Homo sapiens
acacaaatcctgccc

SEQ ID NO: 914744 - DNA, 15 bp, Homo sapiens
cacacaaatcctgcc

SEQ ID NO: 914745 - DNA, 15 bp, Homo sapiens
tcacacaaatcctgc

SEQ ID NO: 914746 - DNA, 15 bp, Homo sapiens
gtcacacaaatcctg

SEQ ID NO: 914747 - DNA, 15 bp, Homo sapiens
tgtcacacaaatcct

SEQ ID NO: 914748 - DNA, 15 bp, Homo sapiens
ctgtcacacaaatcc

SEQ ID NO: 914749 - DNA, 15 bp, Homo sapiens
tctgtcacacaaatc

SEQ ID NO: 914750 - DNA, 15 bp, Homo sapiens
atctgtcacacaaat

SEQ ID NO: 914751 - DNA, 15 bp, Homo sapiens
catctgtcacacaaa

SEQ ID NO: 914752 - DNA, 15 bp, Homo sapiens
gcatctgtcacacaa

SEQ ID NO: 914753 - DNA, 15 bp, Homo sapiens
agcatctgtcacaca

SEQ ID NO: 914754 - DNA, 15 bp, Homo sapiens
gagcatctgtcacac

SEQ ID NO: 914755 - DNA, 15 bp, Homo sapiens
tgagcatctgtcaca

SEQ ID NO: 914756 - DNA, 15 bp, Homo sapiens
ttgagcatctgtcac

SEQ ID NO: 914757 - DNA, 15 bp, Homo sapiens
tttgagcatctgtca

SEQ ID NO: 914758 - DNA, 15 bp, Homo sapiens
atttgagcatctgtc

SEQ ID NO: 914759 - DNA, 15 bp, Homo sapiens
tatttgagcatctgt

SEQ ID NO: 914760 - DNA, 15 bp, Homo sapiens
atatttgagcatctg

SEQ ID NO: 914761 - DNA, 15 bp, Homo sapiens
gatatttgagcatct

SEQ ID NO: 914762 - DNA, 15 bp, Homo sapiens
ggatatttgagcatc

SEQ ID NO: 914763 - DNA, 15 bp, Homo sapiens
gggatatttgagcat

SEQ ID NO: 914764 - DNA, 15 bp, Homo sapiens
ggggatatttgagca

SEQ ID NO: 914765 - DNA, 15 bp, Homo sapiens
aggggatatttgagc

SEQ ID NO: 914766 - DNA, 15 bp, Homo sapiens
taggggatatttgag

SEQ ID NO: 914767 - DNA, 15 bp, Homo sapiens
ataggggatatttga

SEQ ID NO: 914768 - DNA, 15 bp, Homo sapiens
gataggggatatttg

SEQ ID NO: 914769 - DNA, 15 bp, Homo sapiens
tgataggggatattt

SEQ ID NO: 914770 - DNA, 15 bp, Homo sapiens
ctgataggggatatt

SEQ ID NO: 914771 - DNA, 15 bp, Homo sapiens
cctgataggggatat

SEQ ID NO: 914772 - DNA, 15 bp, Homo sapiens
tcctgataggggata

SEQ ID NO: 914773 - DNA, 15 bp, Homo sapiens
ttcctgataggggat

SEQ ID NO: 914774 - DNA, 15 bp, Homo sapiens
gttcctgatagggga

SEQ ID NO: 914775 - DNA, 15 bp, Homo sapiens
ggttcctgatagggg

SEQ ID NO: 914776 - DNA, 15 bp, Homo sapiens
gggttcctgataggg

SEQ ID NO: 914777 - DNA, 15 bp, Homo sapiens
agggttcctgatagg

SEQ ID NO: 914778 - DNA, 15 bp, Homo sapiens
cagggttcctgatag

SEQ ID NO: 914779 - DNA, 15 bp, Homo sapiens
acagggttcctgata

SEQ ID NO: 914780 - DNA, 15 bp, Homo sapiens
gacagggttcctgat

SEQ ID NO: 914781 - DNA, 15 bp, Homo sapiens
agacagggttcctga

SEQ ID NO: 914782 - DNA, 15 bp, Homo sapiens
gagacagggttcctg

SEQ ID NO: 914783 - DNA, 15 bp, Homo sapiens
agagacagggttcct

SEQ ID NO: 914784 - DNA, 15 bp, Homo sapiens
aagagacagggttcc

SEQ ID NO: 914785 - DNA, 15 bp, Homo sapiens
caagagacagggttc

SEQ ID NO: 914786 - DNA, 15 bp, Homo sapiens
acaagagacagggtt

SEQ ID NO: 914787 - DNA, 15 bp, Homo sapiens
aacaagagacagggt

SEQ ID NO: 914788 - DNA, 15 bp, Homo sapiens
caacaagagacaggg

SEQ ID NO: 914789 - DNA, 15 bp, Homo sapiens
gcaacaagagacagg

SEQ ID NO: 914790 - DNA, 15 bp, Homo sapiens
agcaacaagagacag

SEQ ID NO: 914791 - DNA, 15 bp, Homo sapiens
cagcaacaagagaca

SEQ ID NO: 914792 - DNA, 15 bp, Homo sapiens
acagcaacaagagac

SEQ ID NO: 914793 - DNA, 15 bp, Homo sapiens
cacagcaacaagaga

SEQ ID NO: 914794 - DNA, 15 bp, Homo sapiens
gcacagcaacaagag

SEQ ID NO: 914795 - DNA, 15 bp, Homo sapiens
ggcacagcaacaaga

SEQ ID NO: 914796 - DNA, 15 bp, Homo sapiens
aggcacagcaacaag

SEQ ID NO: 914797 - DNA, 15 bp, Homo sapiens
taggcacagcaacaa

SEQ ID NO: 914798 - DNA, 15 bp, Homo sapiens
ataggcacagcaaca

SEQ ID NO: 914799 - DNA, 15 bp, Homo sapiens
gataggcacagcaac

SEQ ID NO: 914800 - DNA, 15 bp, Homo sapiens
agataggcacagcaa

SEQ ID NO: 914801 - DNA, 15 bp, Homo sapiens
gagataggcacagca

SEQ ID NO: 914802 - DNA, 15 bp, Homo sapiens
tgagataggcacagc

SEQ ID NO: 914803 - DNA, 15 bp, Homo sapiens
ttgagataggcacag

SEQ ID NO: 914804 - DNA, 15 bp, Homo sapiens
gttgagataggcaca

SEQ ID NO: 914805 - DNA, 15 bp, Homo sapiens
tgttgagataggcac

SEQ ID NO: 914806 - DNA, 15 bp, Homo sapiens
atgttgagataggca

SEQ ID NO: 914807 - DNA, 15 bp, Homo sapiens
catgttgagataggc

SEQ ID NO: 914808 - DNA, 15 bp, Homo sapiens
acatgttgagatagg

SEQ ID NO: 914809 - DNA, 15 bp, Homo sapiens
cacatgttgagatag

SEQ ID NO: 914810 - DNA, 15 bp, Homo sapiens
ccacatgttgagata

SEQ ID NO: 914811 - DNA, 15 bp, Homo sapiens
accacatgttgagat

SEQ ID NO: 914812 - DNA, 15 bp, Homo sapiens
aaccacatgttgaga

SEQ ID NO: 914813 - DNA, 15 bp, Homo sapiens
aaaccacatgttgag

SEQ ID NO: 914814 - DNA, 15 bp, Homo sapiens
gaaaccacatgttga

SEQ ID NO: 914815 - DNA, 15 bp, Homo sapiens
agaaaccacatgttg

SEQ ID NO: 914816 - DNA, 15 bp, Homo sapiens
tagaaaccacatgtt

SEQ ID NO: 914817 - DNA, 15 bp, Homo sapiens
ttagaaaccacatgt

SEQ ID NO: 914818 - DNA, 15 bp, Homo sapiens
gttagaaaccacatg

SEQ ID NO: 914819 - DNA, 15 bp, Homo sapiens
agttagaaaccacat

SEQ ID NO: 914820 - DNA, 15 bp, Homo sapiens
gagttagaaaccaca

SEQ ID NO: 914821 - DNA, 15 bp, Homo sapiens
tgagttagaaaccac

SEQ ID NO: 914822 - DNA, 15 bp, Homo sapiens
atgagttagaaacca

SEQ ID NO: 914823 - DNA, 15 bp, Homo sapiens
catgagttagaaacc

SEQ ID NO: 914824 - DNA, 15 bp, Homo sapiens
acatgagttagaaac

SEQ ID NO: 914825 - DNA, 15 bp, Homo sapiens
cacatgagttagaaa

SEQ ID NO: 914826 - DNA, 15 bp, Homo sapiens
tcacatgagttagaa

SEQ ID NO: 914827 - DNA, 15 bp, Homo sapiens
ttcacatgagttaga

SEQ ID NO: 914828 - DNA, 15 bp, Homo sapiens
cttcacatgagttag

SEQ ID NO: 914829 - DNA, 15 bp, Homo sapiens
acttcacatgagtta

SEQ ID NO: 914830 - DNA, 15 bp, Homo sapiens
aacttcacatgagtt

SEQ ID NO: 914831 - DNA, 15 bp, Homo sapiens
caacttcacatgagt

SEQ ID NO: 914832 - DNA, 15 bp, Homo sapiens
gcaacttcacatgag

SEQ ID NO: 914833 - DNA, 15 bp, Homo sapiens
ggcaacttcacatga

SEQ ID NO: 914834 - DNA, 15 bp, Homo sapiens
tggcaacttcacatg

SEQ ID NO: 914835 - DNA, 15 bp, Homo sapiens
gtggcaacttcacat

SEQ ID NO: 914836 - DNA, 15 bp, Homo sapiens
ggtggcaacttcaca

SEQ ID NO: 914837 - DNA, 15 bp, Homo sapiens
gggtggcaacttcac

SEQ ID NO: 914838 - DNA, 15 bp, Homo sapiens
agggtggcaacttca

SEQ ID NO: 914839 - DNA, 15 bp, Homo sapiens
gagggtggcaacttc

SEQ ID NO: 914840 - DNA, 15 bp, Homo sapiens
tgagggtggcaactt

SEQ ID NO: 914841 - DNA, 15 bp, Homo sapiens
atgagggtggcaact

SEQ ID NO: 914842 - DNA, 15 bp, Homo sapiens
tatgagggtggcaac

SEQ ID NO: 914843 - DNA, 15 bp, Homo sapiens
atatgagggtggcaa

SEQ ID NO: 914844 - DNA, 15 bp, Homo sapiens
gatatgagggtggca

SEQ ID NO: 914845 - DNA, 15 bp, Homo sapiens
ggatatgagggtggc

SEQ ID NO: 914846 - DNA, 15 bp, Homo sapiens
tggatatgagggtgg

SEQ ID NO: 914847 - DNA, 15 bp, Homo sapiens
atggatatgagggtg

SEQ ID NO: 914848 - DNA, 15 bp, Homo sapiens
catggatatgagggt

SEQ ID NO: 914849 - DNA, 15 bp, Homo sapiens
acatggatatgaggg

SEQ ID NO: 914850 - DNA, 15 bp, Homo sapiens
cacatggatatgagg

SEQ ID NO: 914851 - DNA, 15 bp, Homo sapiens
ccacatggatatgag

SEQ ID NO: 914852 - DNA, 15 bp, Homo sapiens
tccacatggatatga

SEQ ID NO: 914853 - DNA, 15 bp, Homo sapiens
atccacatggatatg

SEQ ID NO: 914854 - DNA, 15 bp, Homo sapiens
aatccacatggatat

SEQ ID NO: 914855 - DNA, 15 bp, Homo sapiens
aaatccacatggata

SEQ ID NO: 914856 - DNA, 15 bp, Homo sapiens
gaaatccacatggat

SEQ ID NO: 914857 - DNA, 15 bp, Homo sapiens
tgaaatccacatgga

SEQ ID NO: 914858 - DNA, 15 bp, Homo sapiens
ctgaaatccacatgg

SEQ ID NO: 914859 - DNA, 15 bp, Homo sapiens
gctgaaatccacatg

SEQ ID NO: 914860 - DNA, 15 bp, Homo sapiens
agctgaaatccacat

SEQ ID NO: 914861 - DNA, 15 bp, Homo sapiens
tagctgaaatccaca

SEQ ID NO: 914862 - DNA, 15 bp, Homo sapiens
ctagctgaaatccac

SEQ ID NO: 914863 - DNA, 15 bp, Homo sapiens
gctagctgaaatcca

SEQ ID NO: 914864 - DNA, 15 bp, Homo sapiens
tgctagctgaaatcc

SEQ ID NO: 914865 - DNA, 15 bp, Homo sapiens
ctgctagctgaaatc

SEQ ID NO: 914866 - DNA, 15 bp, Homo sapiens
cctgctagctgaaat

SEQ ID NO: 914867 - DNA, 15 bp, Homo sapiens
tcctgctagctgaaa

SEQ ID NO: 914868 - DNA, 15 bp, Homo sapiens
ttcctgctagctgaa

SEQ ID NO: 914869 - DNA, 15 bp, Homo sapiens
cttcctgctagctga

SEQ ID NO: 914870 - DNA, 15 bp, Homo sapiens
ccttcctgctagctg

SEQ ID NO: 914871 - DNA, 15 bp, Homo sapiens
tccttcctgctagct

SEQ ID NO: 914872 - DNA, 15 bp, Homo sapiens
ctccttcctgctagc

SEQ ID NO: 914873 - DNA, 15 bp, Homo sapiens
cctccttcctgctag

SEQ ID NO: 914874 - DNA, 15 bp, Homo sapiens
tcctccttcctgcta

SEQ ID NO: 914875 - DNA, 15 bp, Homo sapiens
ttcctccttcctgct

SEQ ID NO: 914876 - DNA, 15 bp, Homo sapiens
tttcctccttcctgc

SEQ ID NO: 914877 - DNA, 15 bp, Homo sapiens
ctttcctccttcctg

SEQ ID NO: 914878 - DNA, 15 bp, Homo sapiens
tctttcctccttcct

SEQ ID NO: 914879 - DNA, 15 bp, Homo sapiens
ctctttcctccttcc

SEQ ID NO: 914880 - DNA, 15 bp, Homo sapiens
tctctttcctccttc

SEQ ID NO: 914881 - DNA, 15 bp, Homo sapiens
ttctctttcctcctt

SEQ ID NO: 914882 - DNA, 15 bp, Homo sapiens
cttctctttcctcct

SEQ ID NO: 914883 - DNA, 15 bp, Homo sapiens
tcttctctttcctcc

SEQ ID NO: 914884 - DNA, 15 bp, Homo sapiens
ctcttctctttcctc

SEQ ID NO: 914885 - DNA, 15 bp, Homo sapiens
tctcttctctttcct

SEQ ID NO: 914886 - DNA, 15 bp, Homo sapiens
ctctcttctctttcc

SEQ ID NO: 914887 - DNA, 15 bp, Homo sapiens
tctctcttctctttc

SEQ ID NO: 914888 - DNA, 15 bp, Homo sapiens
atctctcttctcttt

SEQ ID NO: 914889 - DNA, 15 bp, Homo sapiens
aatctctcttctctt

SEQ ID NO: 914890 - DNA, 15 bp, Homo sapiens
taatctctcttctct

SEQ ID NO: 914891 - DNA, 15 bp, Homo sapiens
gtaatctctcttctc

SEQ ID NO: 914892 - DNA, 15 bp, Homo sapiens
agtaatctctcttct

SEQ ID NO: 914893 - DNA, 15 bp, Homo sapiens
gagtaatctctcttc

SEQ ID NO: 914894 - DNA, 15 bp, Homo sapiens
ggagtaatctctctt

SEQ ID NO: 914895 - DNA, 15 bp, Homo sapiens
aggagtaatctctct

SEQ ID NO: 914896 - DNA, 15 bp, Homo sapiens
aaggagtaatctctc

SEQ ID NO: 914897 - DNA, 15 bp, Homo sapiens
aaaggagtaatctct

SEQ ID NO: 914898 - DNA, 15 bp, Homo sapiens
taaaggagtaatctc

SEQ ID NO: 914899 - DNA, 15 bp, Homo sapiens
ataaaggagtaatct

SEQ ID NO: 914900 - DNA, 15 bp, Homo sapiens
aataaaggagtaatc

SEQ ID NO: 914901 - DNA, 15 bp, Homo sapiens
aaataaaggagtaat

SEQ ID NO: 914902 - DNA, 15 bp, Homo sapiens
aaaataaaggagtaa

SEQ ID NO: 914903 - DNA, 15 bp, Homo sapiens
taaaataaaggagta

SEQ ID NO: 914904 - DNA, 15 bp, Homo sapiens
ttaaaataaaggagt

SEQ ID NO: 914905 - DNA, 15 bp, Homo sapiens
tttaaaataaaggag

SEQ ID NO: 914906 - DNA, 15 bp, Homo sapiens
ttttaaaataaagga

SEQ ID NO: 914907 - DNA, 15 bp, Homo sapiens
tttttaaaataaagg

SEQ ID NO: 914908 - DNA, 15 bp, Homo sapiens
gtttttaaaataaag

SEQ ID NO: 914909 - DNA, 15 bp, Homo sapiens
tgtttttaaaataaa

SEQ ID NO: 914910 - DNA, 15 bp, Homo sapiens
atgtttttaaaataa

SEQ ID NO: 914911 - DNA, 15 bp, Homo sapiens
aatgtttttaaaata

SEQ ID NO: 914912 - DNA, 15 bp, Homo sapiens
aaatgtttttaaaat

SEQ ID NO: 914913 - DNA, 15 bp, Homo sapiens
aaaatgtttttaaaa

SEQ ID NO: 914914 - DNA, 15 bp, Homo sapiens
aaaaatgtttttaaa

SEQ ID NO: 914915 - DNA, 15 bp, Homo sapiens
aaaaaatgtttttaa

SEQ ID NO: 914916 - DNA, 15 bp, Homo sapiens
aaaaaaatgttttta

SEQ ID NO: 914917 - DNA, 15 bp, Homo sapiens
aaaaaaaatgttttt

SEQ ID NO: 914918 - DNA, 15 bp, Homo sapiens
aaaaaaaaatgtttt

SEQ ID NO: 914919 - DNA, 15 bp, Homo sapiens
aaaaaaaaaatgttt

SEQ ID NO: 914920 - DNA, 15 bp, Homo sapiens
aaaaaaaaaaatgtt

SEQ ID NO: 914921 - DNA, 15 bp, Homo sapiens
aaaaaaaaaaaatgt

SEQ ID NO: 914922 - DNA, 15 bp, Homo sapiens
aaaaaaaaaaaaatg

SEQ ID NO: 914923 - DNA, 15 bp, Homo sapiens
aaaaaaaaaaaaaat

SEQ ID NO: 914924 - DNA, 15 bp, Homo sapiens
aaaaaaaaaaaaaaa

SEQ ID NO: 914925 - DNA, 15 bp, Homo sapiens
caaaaaaaaaaaaaa

SEQ ID NO: 914926 - DNA, 15 bp, Homo sapiens
tcaaaaaaaaaaaaa

SEQ ID NO: 914927 - DNA, 15 bp, Homo sapiens
ttcaaaaaaaaaaaa

SEQ ID NO: 914928 - DNA, 15 bp, Homo sapiens
tttcaaaaaaaaaaa

SEQ ID NO: 914929 - DNA, 15 bp, Homo sapiens
atttcaaaaaaaaaa

SEQ ID NO: 914930 - DNA, 15 bp, Homo sapiens
aatttcaaaaaaaaa

SEQ ID NO: 914931 - DNA, 15 bp, Homo sapiens
gaatttcaaaaaaaa

SEQ ID NO: 914932 - DNA, 15 bp, Homo sapiens
tgaatttcaaaaaaa

SEQ ID NO: 914933 - DNA, 15 bp, Homo sapiens
gtgaatttcaaaaaa

SEQ ID NO: 914934 - DNA, 15 bp, Homo sapiens
tgtgaatttcaaaaa

SEQ ID NO: 914935 - DNA, 15 bp, Homo sapiens
atgtgaatttcaaaa

SEQ ID NO: 914936 - DNA, 15 bp, Homo sapiens
tatgtgaatttcaaa

SEQ ID NO: 914937 - DNA, 15 bp, Homo sapiens
atatgtgaatttcaa

SEQ ID NO: 914938 - DNA, 15 bp, Homo sapiens
catatgtgaatttca

SEQ ID NO: 914939 - DNA, 15 bp, Homo sapiens
tcatatgtgaatttc

SEQ ID NO: 914940 - DNA, 15 bp, Homo sapiens
ttcatatgtgaattt

SEQ ID NO: 914941 - DNA, 15 bp, Homo sapiens
gttcatatgtgaatt

SEQ ID NO: 914942 - DNA, 15 bp, Homo sapiens
agttcatatgtgaat

SEQ ID NO: 914943 - DNA, 15 bp, Homo sapiens
aagttcatatgtgaa

SEQ ID NO: 914944 - DNA, 15 bp, Homo sapiens
aaagttcatatgtga

SEQ ID NO: 914945 - DNA, 15 bp, Homo sapiens
caaagttcatatgtg

SEQ ID NO: 914946 - DNA, 15 bp, Homo sapiens
gcaaagttcatatgt

SEQ ID NO: 914947 - DNA, 15 bp, Homo sapiens
cgcaaagttcatatg

SEQ ID NO: 914948 - DNA, 15 bp, Homo sapiens
acgcaaagttcatat

SEQ ID NO: 914949 - DNA, 15 bp, Homo sapiens
aacgcaaagttcata

SEQ ID NO: 914950 - DNA, 15 bp, Homo sapiens
aaacgcaaagttcat

SEQ ID NO: 914951 - DNA, 15 bp, Homo sapiens
taaacgcaaagttca

SEQ ID NO: 914952 - DNA, 15 bp, Homo sapiens
ataaacgcaaagttc

SEQ ID NO: 914953 - DNA, 15 bp, Homo sapiens
tataaacgcaaagtt

SEQ ID NO: 914954 - DNA, 15 bp, Homo sapiens
atataaacgcaaagt

SEQ ID NO: 914955 - DNA, 15 bp, Homo sapiens
aatataaacgcaaag

SEQ ID NO: 914956 - DNA, 15 bp, Homo sapiens
gaatataaacgcaaa

SEQ ID NO: 914957 - DNA, 15 bp, Homo sapiens
ggaatataaacgcaa

SEQ ID NO: 914958 - DNA, 15 bp, Homo sapiens
tggaatataaacgca

SEQ ID NO: 914959 - DNA, 15 bp, Homo sapiens
atggaatataaacgc

SEQ ID NO: 914960 - DNA, 15 bp, Homo sapiens
aatggaatataaacg

SEQ ID NO: 914961 - DNA, 15 bp, Homo sapiens
taatggaatataaac

SEQ ID NO: 914962 - DNA, 15 bp, Homo sapiens
gtaatggaatataaa

SEQ ID NO: 914963 - DNA, 15 bp, Homo sapiens
agtaatggaatataa

SEQ ID NO: 914964 - DNA, 15 bp, Homo sapiens
cagtaatggaatata

SEQ ID NO: 914965 - DNA, 15 bp, Homo sapiens
tcagtaatggaatat

SEQ ID NO: 914966 - DNA, 15 bp, Homo sapiens
gtcagtaatggaata

SEQ ID NO: 914967 - DNA, 15 bp, Homo sapiens
tgtcagtaatggaat

SEQ ID NO: 914968 - DNA, 15 bp, Homo sapiens
atgtcagtaatggaa

SEQ ID NO: 914969 - DNA, 15 bp, Homo sapiens
catgtcagtaatgga

SEQ ID NO: 914970 - DNA, 15 bp, Homo sapiens
tcatgtcagtaatgg

SEQ ID NO: 914971 - DNA, 15 bp, Homo sapiens
gtcatgtcagtaatg

SEQ ID NO: 914972 - DNA, 15 bp, Homo sapiens
ggtcatgtcagtaat

SEQ ID NO: 914973 - DNA, 15 bp, Homo sapiens
tggtcatgtcagtaa

SEQ ID NO: 914974 - DNA, 15 bp, Homo sapiens
gtggtcatgtcagta

SEQ ID NO: 914975 - DNA, 15 bp, Homo sapiens
tgtggtcatgtcagt

SEQ ID NO: 914976 - DNA, 15 bp, Homo sapiens
gtgtggtcatgtcag

SEQ ID NO: 914977 - DNA, 15 bp, Homo sapiens
tgtgtggtcatgtca

SEQ ID NO: 914978 - DNA, 15 bp, Homo sapiens
atgtgtggtcatgtc

SEQ ID NO: 914979 - DNA, 15 bp, Homo sapiens
tatgtgtggtcatgt

SEQ ID NO: 914980 - DNA, 15 bp, Homo sapiens
ctatgtgtggtcatg

SEQ ID NO: 914981 - DNA, 15 bp, Homo sapiens
gctatgtgtggtcat

SEQ ID NO: 914982 - DNA, 15 bp, Homo sapiens
agctatgtgtggtca

SEQ ID NO: 914983 - DNA, 15 bp, Homo sapiens
cagctatgtgtggtc

SEQ ID NO: 914984 - DNA, 15 bp, Homo sapiens
gcagctatgtgtggt

SEQ ID NO: 914985 - DNA, 15 bp, Homo sapiens
agcagctatgtgtgg

SEQ ID NO: 914986 - DNA, 15 bp, Homo sapiens
aagcagctatgtgtg

SEQ ID NO: 914987 - DNA, 15 bp, Homo sapiens
caagcagctatgtgt

SEQ ID NO: 914988 - DNA, 15 bp, Homo sapiens
acaagcagctatgtg

SEQ ID NO: 914989 - DNA, 15 bp, Homo sapiens
cacaagcagctatgt

SEQ ID NO: 914990 - DNA, 15 bp, Homo sapiens
acacaagcagctatg

SEQ ID NO: 914991 - DNA, 15 bp, Homo sapiens
cacacaagcagctat

SEQ ID NO: 914992 - DNA, 15 bp, Homo sapiens
acacacaagcagcta

SEQ ID NO: 914993 - DNA, 15 bp, Homo sapiens
tacacacaagcagct

SEQ ID NO: 914994 - DNA, 15 bp, Homo sapiens
ttacacacaagcagc

SEQ ID NO: 914995 - DNA, 15 bp, Homo sapiens
cttacacacaagcag

SEQ ID NO: 914996 - DNA, 15 bp, Homo sapiens
acttacacacaagca

SEQ ID NO: 914997 - DNA, 15 bp, Homo sapiens
cacttacacacaagc

SEQ ID NO: 914998 - DNA, 15 bp, Homo sapiens
ccacttacacacaag

SEQ ID NO: 914999 - DNA, 15 bp, Homo sapiens
tccacttacacacaa

SEQ ID NO: 915000 - DNA, 15 bp, Homo sapiens
ttccacttacacaca

SEQ ID NO: 915001 - DNA, 15 bp, Homo sapiens
tttccacttacacac

SEQ ID NO: 915002 - DNA, 15 bp, Homo sapiens
atttccacttacaca

SEQ ID NO: 915003 - DNA, 15 bp, Homo sapiens
aatttccacttacac

SEQ ID NO: 915004 - DNA, 15 bp, Homo sapiens
aaatttccacttaca

SEQ ID NO: 915005 - DNA, 15 bp, Homo sapiens
taaatttccacttac

SEQ ID NO: 915006 - DNA, 15 bp, Homo sapiens
ctaaatttccactta

SEQ ID NO: 915007 - DNA, 15 bp, Homo sapiens
actaaatttccactt

SEQ ID NO: 915008 - DNA, 15 bp, Homo sapiens
aactaaatttccact

SEQ ID NO: 915009 - DNA, 15 bp, Homo sapiens
gaactaaatttccac

SEQ ID NO: 915010 - DNA, 15 bp, Homo sapiens
agaactaaatttcca

SEQ ID NO: 915011 - DNA, 15 bp, Homo sapiens
aagaactaaatttcc

SEQ ID NO: 915012 - DNA, 15 bp, Homo sapiens
aaagaactaaatttc

SEQ ID NO: 915013 - DNA, 15 bp, Homo sapiens
taaagaactaaattt

SEQ ID NO: 915014 - DNA, 15 bp, Homo sapiens
ataaagaactaaatt

SEQ ID NO: 915015 - DNA, 15 bp, Homo sapiens
aataaagaactaaat

SEQ ID NO: 915016 - DNA, 15 bp, Homo sapiens
aaataaagaactaaa

SEQ ID NO: 915017 - DNA, 15 bp, Homo sapiens
gaaataaagaactaa

SEQ ID NO: 915018 - DNA, 15 bp, Homo sapiens
tgaaataaagaacta

SEQ ID NO: 915019 - DNA, 15 bp, Homo sapiens
ttgaaataaagaact

SEQ ID NO: 915020 - DNA, 15 bp, Homo sapiens
tttgaaataaagaac

SEQ ID NO: 915021 - DNA, 15 bp, Homo sapiens
atttgaaataaagaa

SEQ ID NO: 915022 - DNA, 15 bp, Homo sapiens
catttgaaataaaga

SEQ ID NO: 915023 - DNA, 15 bp, Homo sapiens
ccatttgaaataaag

SEQ ID NO: 915024 - DNA, 15 bp, Homo sapiens
gccatttgaaataaa

SEQ ID NO: 915025 - DNA, 15 bp, Homo sapiens
ggccatttgaaataa

SEQ ID NO: 915026 - DNA, 15 bp, Homo sapiens
tggccatttgaaata

SEQ ID NO: 915027 - DNA, 15 bp, Homo sapiens
gtggccatttgaaat

SEQ ID NO: 915028 - DNA, 15 bp, Homo sapiens
cgtggccatttgaaa

SEQ ID NO: 915029 - DNA, 15 bp, Homo sapiens
acgtggccatttgaa

SEQ ID NO: 915030 - DNA, 15 bp, Homo sapiens
cacgtggccatttga

SEQ ID NO: 915031 - DNA, 15 bp, Homo sapiens
acacgtggccatttg

SEQ ID NO: 915032 - DNA, 15 bp, Homo sapiens
gacacgtggccattt

SEQ ID NO: 915033 - DNA, 15 bp, Homo sapiens
tgacacgtggccatt

SEQ ID NO: 915034 - DNA, 15 bp, Homo sapiens
ttgacacgtggccat

SEQ ID NO: 915035 - DNA, 15 bp, Homo sapiens
cttgacacgtggcca

SEQ ID NO: 915036 - DNA, 15 bp, Homo sapiens
gcttgacacgtggcc

SEQ ID NO: 915037 - DNA, 15 bp, Homo sapiens
agcttgacacgtggc

SEQ ID NO: 915038 - DNA, 15 bp, Homo sapiens
tagcttgacacgtgg

SEQ ID NO: 915039 - DNA, 15 bp, Homo sapiens
ttagcttgacacgtg

SEQ ID NO: 915040 - DNA, 15 bp, Homo sapiens
tttagcttgacacgt

SEQ ID NO: 915041 - DNA, 15 bp, Homo sapiens
ttttagcttgacacg

SEQ ID NO: 915042 - DNA, 15 bp, Homo sapiens
tttttagcttgacac

SEQ ID NO: 915043 - DNA, 15 bp, Homo sapiens
atttttagcttgaca

SEQ ID NO: 915044 - DNA, 15 bp, Homo sapiens
gatttttagcttgac

SEQ ID NO: 915045 - DNA, 15 bp, Homo sapiens
ggatttttagcttga

SEQ ID NO: 915046 - DNA, 15 bp, Homo sapiens
tggatttttagcttg

SEQ ID NO: 915047 - DNA, 15 bp, Homo sapiens
atggatttttagctt

SEQ ID NO: 915048 - DNA, 15 bp, Homo sapiens
tatggatttttagct

SEQ ID NO: 915049 - DNA, 15 bp, Homo sapiens
ctatggatttttagc

SEQ ID NO: 915050 - DNA, 15 bp, Homo sapiens
actatggatttttag

SEQ ID NO: 915051 - DNA, 15 bp, Homo sapiens
aactatggattttta

SEQ ID NO: 915052 - DNA, 15 bp, Homo sapiens
aaactatggattttt

SEQ ID NO: 915053 - DNA, 15 bp, Homo sapiens
aaaactatggatttt

SEQ ID NO: 915054 - DNA, 15 bp, Homo sapiens
taaaactatggattt

SEQ ID NO: 915055 - DNA, 15 bp, Homo sapiens
ctaaaactatggatt

SEQ ID NO: 915056 - DNA, 15 bp, Homo sapiens
actaaaactatggat

SEQ ID NO: 915057 - DNA, 15 bp, Homo sapiens
tactaaaactatgga

SEQ ID NO: 915058 - DNA, 15 bp, Homo sapiens
gtactaaaactatgg

SEQ ID NO: 915059 - DNA, 15 bp, Homo sapiens
tgtactaaaactatg

SEQ ID NO: 915060 - DNA, 15 bp, Homo sapiens
ctgtactaaaactat

SEQ ID NO: 915061 - DNA, 15 bp, Homo sapiens
actgtactaaaacta

SEQ ID NO: 915062 - DNA, 15 bp, Homo sapiens
cactgtactaaaact

SEQ ID NO: 915063 - DNA, 15 bp, Homo sapiens
ccactgtactaaaac

SEQ ID NO: 915064 - DNA, 15 bp, Homo sapiens
tccactgtactaaaa

SEQ ID NO: 915065 - DNA, 15 bp, Homo sapiens
gtccactgtactaaa

SEQ ID NO: 915066 - DNA, 15 bp, Homo sapiens
tgtccactgtactaa

SEQ ID NO: 915067 - DNA, 15 bp, Homo sapiens
ttgtccactgtacta

SEQ ID NO: 915068 - DNA, 15 bp, Homo sapiens
tttgtccactgtact

SEQ ID NO: 915069 - DNA, 15 bp, Homo sapiens
ttttgtccactgtac

SEQ ID NO: 915070 - DNA, 15 bp, Homo sapiens
cttttgtccactgta

SEQ ID NO: 915071 - DNA, 15 bp, Homo sapiens
ccttttgtccactgt

SEQ ID NO: 915072 - DNA, 15 bp, Homo sapiens
cccttttgtccactg

SEQ ID NO: 915073 - DNA, 15 bp, Homo sapiens
tcccttttgtccact

SEQ ID NO: 915074 - DNA, 15 bp, Homo sapiens
ctcccttttgtccac

SEQ ID NO: 915075 - DNA, 15 bp, Homo sapiens
cctcccttttgtcca

SEQ ID NO: 915076 - DNA, 15 bp, Homo sapiens
acctcccttttgtcc

SEQ ID NO: 915077 - DNA, 15 bp, Homo sapiens
aacctcccttttgtc

SEQ ID NO: 915078 - DNA, 15 bp, Homo sapiens
taacctcccttttgt

SEQ ID NO: 915079 - DNA, 15 bp, Homo sapiens
ttaacctcccttttg

SEQ ID NO: 915080 - DNA, 15 bp, Homo sapiens
tttaacctccctttt

SEQ ID NO: 915081 - DNA, 15 bp, Homo sapiens
atttaacctcccttt

SEQ ID NO: 915082 - DNA, 15 bp, Homo sapiens
tatttaacctccctt

SEQ ID NO: 915083 - DNA, 15 bp, Homo sapiens
atatttaacctccct

SEQ ID NO: 915084 - DNA, 15 bp, Homo sapiens
aatatttaacctccc

SEQ ID NO: 915085 - DNA, 15 bp, Homo sapiens
taatatttaacctcc

SEQ ID NO: 915086 - DNA, 15 bp, Homo sapiens
ctaatatttaacctc

SEQ ID NO: 915087 - DNA, 15 bp, Homo sapiens
cctaatatttaacct

SEQ ID NO: 915088 - DNA, 15 bp, Homo sapiens
tcctaatatttaacc

SEQ ID NO: 915089 - DNA, 15 bp, Homo sapiens
ttcctaatatttaac

SEQ ID NO: 915090 - DNA, 15 bp, Homo sapiens
gttcctaatatttaa

SEQ ID NO: 915091 - DNA, 15 bp, Homo sapiens
tgttcctaatattta

SEQ ID NO: 915092 - DNA, 15 bp, Homo sapiens
ctgttcctaatattt

SEQ ID NO: 915093 - DNA, 15 bp, Homo sapiens
gctgttcctaatatt

SEQ ID NO: 915094 - DNA, 15 bp, Homo sapiens
agctgttcctaatat

SEQ ID NO: 915095 - DNA, 15 bp, Homo sapiens
tagctgttcctaata

SEQ ID NO: 915096 - DNA, 15 bp, Homo sapiens
ctagctgttcctaat

SEQ ID NO: 915097 - DNA, 15 bp, Homo sapiens
gctagctgttcctaa

SEQ ID NO: 915098 - DNA, 15 bp, Homo sapiens
tgctagctgttccta

SEQ ID NO: 915099 - DNA, 15 bp, Homo sapiens
ctgctagctgttcct

SEQ ID NO: 915100 - DNA, 15 bp, Homo sapiens
actgctagctgttcc

SEQ ID NO: 915101 - DNA, 15 bp, Homo sapiens
gactgctagctgttc

SEQ ID NO: 915102 - DNA, 15 bp, Homo sapiens
agactgctagctgtt

SEQ ID NO: 915103 - DNA, 15 bp, Homo sapiens
cagactgctagctgt

SEQ ID NO: 915104 - DNA, 15 bp, Homo sapiens
acagactgctagctg

SEQ ID NO: 915105 - DNA, 15 bp, Homo sapiens
tacagactgctagct

SEQ ID NO: 915106 - DNA, 15 bp, Homo sapiens
atacagactgctagc

SEQ ID NO: 915107 - DNA, 15 bp, Homo sapiens
gatacagactgctag

SEQ ID NO: 915108 - DNA, 15 bp, Homo sapiens
tgatacagactgcta

SEQ ID NO: 915109 - DNA, 15 bp, Homo sapiens
gtgatacagactgct

SEQ ID NO: 915110 - DNA, 15 bp, Homo sapiens
tgtgatacagactgc

SEQ ID NO: 915111 - DNA, 15 bp, Homo sapiens
ttgtgatacagactg

SEQ ID NO: 915112 - DNA, 15 bp, Homo sapiens
attgtgatacagact

SEQ ID NO: 915113 - DNA, 15 bp, Homo sapiens
cattgtgatacagac

SEQ ID NO: 915114 - DNA, 15 bp, Homo sapiens
tcattgtgatacaga

SEQ ID NO: 915115 - DNA, 15 bp, Homo sapiens
atcattgtgatacag

SEQ ID NO: 915116 - DNA, 15 bp, Homo sapiens
gatcattgtgataca

SEQ ID NO: 915117 - DNA, 15 bp, Homo sapiens
tgatcattgtgatac

SEQ ID NO: 915118 - DNA, 15 bp, Homo sapiens
atgatcattgtgata

SEQ ID NO: 915119 - DNA, 15 bp, Homo sapiens
aatgatcattgtgat

SEQ ID NO: 915120 - DNA, 15 bp, Homo sapiens
aaatgatcattgtga

SEQ ID NO: 915121 - DNA, 15 bp, Homo sapiens
aaaatgatcattgtg

SEQ ID NO: 915122 - DNA, 15 bp, Homo sapiens
aaaaatgatcattgt

SEQ ID NO: 915123 - DNA, 15 bp, Homo sapiens
aaaaaatgatcattg

SEQ ID NO: 915124 - DNA, 15 bp, Homo sapiens
caaaaaatgatcatt

SEQ ID NO: 915125 - DNA, 15 bp, Homo sapiens
acaaaaaatgatcat

SEQ ID NO: 915126 - DNA, 15 bp, Homo sapiens
tacaaaaaatgatca

SEQ ID NO: 915127 - DNA, 15 bp, Homo sapiens
ttacaaaaaatgatc

SEQ ID NO: 915128 - DNA, 15 bp, Homo sapiens
tttacaaaaaatgat

SEQ ID NO: 915129 - DNA, 15 bp, Homo sapiens
ctttacaaaaaatga

SEQ ID NO: 915130 - DNA, 15 bp, Homo sapiens
gctttacaaaaaatg

SEQ ID NO: 915131 - DNA, 15 bp, Homo sapiens
tgctttacaaaaaat

SEQ ID NO: 915132 - DNA, 15 bp, Homo sapiens
ctgctttacaaaaaa

SEQ ID NO: 915133 - DNA, 15 bp, Homo sapiens
actgctttacaaaaa

SEQ ID NO: 915134 - DNA, 15 bp, Homo sapiens
tactgctttacaaaa

SEQ ID NO: 915135 - DNA, 15 bp, Homo sapiens
atactgctttacaaa

SEQ ID NO: 915136 - DNA, 15 bp, Homo sapiens
aatactgctttacaa

SEQ ID NO: 915137 - DNA, 15 bp, Homo sapiens
aaatactgctttaca

SEQ ID NO: 915138 - DNA, 15 bp, Homo sapiens
aaaatactgctttac

SEQ ID NO: 915139 - DNA, 15 bp, Homo sapiens
caaaatactgcttta

SEQ ID NO: 915140 - DNA, 15 bp, Homo sapiens
gcaaaatactgcttt

SEQ ID NO: 915141 - DNA, 15 bp, Homo sapiens
tgcaaaatactgctt

SEQ ID NO: 915142 - DNA, 15 bp, Homo sapiens
ttgcaaaatactgct

SEQ ID NO: 915143 - DNA, 15 bp, Homo sapiens
gttgcaaaatactgc

SEQ ID NO: 915144 - DNA, 15 bp, Homo sapiens
ggttgcaaaatactg

SEQ ID NO: 915145 - DNA, 15 bp, Homo sapiens
aggttgcaaaatact

SEQ ID NO: 915146 - DNA, 15 bp, Homo sapiens
aaggttgcaaaatac

SEQ ID NO: 915147 - DNA, 15 bp, Homo sapiens
aaaggttgcaaaata

SEQ ID NO: 915148 - DNA, 15 bp, Homo sapiens
aaaaggttgcaaaat

SEQ ID NO: 915149 - DNA, 15 bp, Homo sapiens
taaaaggttgcaaaa

SEQ ID NO: 915150 - DNA, 15 bp, Homo sapiens
ttaaaaggttgcaaa

SEQ ID NO: 915151 - DNA, 15 bp, Homo sapiens
tttaaaaggttgcaa

SEQ ID NO: 915152 - DNA, 15 bp, Homo sapiens
ttttaaaaggttgca

SEQ ID NO: 915153 - DNA, 15 bp, Homo sapiens
attttaaaaggttgc

SEQ ID NO: 915154 - DNA, 15 bp, Homo sapiens
gattttaaaaggttg

SEQ ID NO: 915155 - DNA, 15 bp, Homo sapiens
ggattttaaaaggtt

SEQ ID NO: 915156 - DNA, 15 bp, Homo sapiens
tggattttaaaaggt

SEQ ID NO: 915157 - DNA, 15 bp, Homo sapiens
atggattttaaaagg

SEQ ID NO: 915158 - DNA, 15 bp, Homo sapiens
tatggattttaaaag

SEQ ID NO: 915159 - DNA, 15 bp, Homo sapiens
gtatggattttaaaa

SEQ ID NO: 915160 - DNA, 15 bp, Homo sapiens
ggtatggattttaaa

SEQ ID NO: 915161 - DNA, 15 bp, Homo sapiens
gggtatggattttaa

SEQ ID NO: 915162 - DNA, 15 bp, Homo sapiens
ggggtatggatttta

SEQ ID NO: 915163 - DNA, 15 bp, Homo sapiens
aggggtatggatttt

SEQ ID NO: 915164 - DNA, 15 bp, Homo sapiens
aaggggtatggattt

SEQ ID NO: 915165 - DNA, 15 bp, Homo sapiens
gaaggggtatggatt

SEQ ID NO: 915166 - DNA, 15 bp, Homo sapiens
tgaaggggtatggat

SEQ ID NO: 915167 - DNA, 15 bp, Homo sapiens
ctgaaggggtatgga

SEQ ID NO: 915168 - DNA, 15 bp, Homo sapiens
gctgaaggggtatgg

SEQ ID NO: 915169 - DNA, 15 bp, Homo sapiens
agctgaaggggtatg

SEQ ID NO: 915170 - DNA, 15 bp, Homo sapiens
tagctgaaggggtat

SEQ ID NO: 915171 - DNA, 15 bp, Homo sapiens
ttagctgaaggggta

SEQ ID NO: 915172 - DNA, 15 bp, Homo sapiens
cttagctgaaggggt

SEQ ID NO: 915173 - DNA, 15 bp, Homo sapiens
tcttagctgaagggg

SEQ ID NO: 915174 - DNA, 15 bp, Homo sapiens
ttcttagctgaaggg

SEQ ID NO: 915175 - DNA, 15 bp, Homo sapiens
cttcttagctgaagg

SEQ ID NO: 915176 - DNA, 15 bp, Homo sapiens
ccttcttagctgaag

SEQ ID NO: 915177 - DNA, 15 bp, Homo sapiens
accttcttagctgaa

SEQ ID NO: 915178 - DNA, 15 bp, Homo sapiens
aaccttcttagctga

SEQ ID NO: 915179 - DNA, 15 bp, Homo sapiens
aaaccttcttagctg

SEQ ID NO: 915180 - DNA, 15 bp, Homo sapiens
aaaaccttcttagct

SEQ ID NO: 915181 - DNA, 15 bp, Homo sapiens
taaaaccttcttagc

SEQ ID NO: 915182 - DNA, 15 bp, Homo sapiens
gtaaaaccttcttag

SEQ ID NO: 915183 - DNA, 15 bp, Homo sapiens
agtaaaaccttctta

SEQ ID NO: 915184 - DNA, 15 bp, Homo sapiens
cagtaaaaccttctt

SEQ ID NO: 915185 - DNA, 15 bp, Homo sapiens
tcagtaaaaccttct

SEQ ID NO: 915186 - DNA, 15 bp, Homo sapiens
ttcagtaaaaccttc

SEQ ID NO: 915187 - DNA, 15 bp, Homo sapiens
gttcagtaaaacctt

SEQ ID NO: 915188 - DNA, 15 bp, Homo sapiens
agttcagtaaaacct

SEQ ID NO: 915189 - DNA, 15 bp, Homo sapiens
aagttcagtaaaacc

SEQ ID NO: 915190 - DNA, 15 bp, Homo sapiens
gaagttcagtaaaac

SEQ ID NO: 915191 - DNA, 15 bp, Homo sapiens
tgaagttcagtaaaa

SEQ ID NO: 915192 - DNA, 15 bp, Homo sapiens
ctgaagttcagtaaa

SEQ ID NO: 915193 - DNA, 15 bp, Homo sapiens
actgaagttcagtaa

SEQ ID NO: 915194 - DNA, 15 bp, Homo sapiens
aactgaagttcagta

SEQ ID NO: 915195 - DNA, 15 bp, Homo sapiens
aaactgaagttcagt

SEQ ID NO: 915196 - DNA, 15 bp, Homo sapiens
aaaactgaagttcag

SEQ ID NO: 915197 - DNA, 15 bp, Homo sapiens
aaaaactgaagttca

SEQ ID NO: 915198 - DNA, 15 bp, Homo sapiens
aaaaaactgaagttc

SEQ ID NO: 915199 - DNA, 15 bp, Homo sapiens
taaaaaactgaagtt

SEQ ID NO: 915200 - DNA, 15 bp, Homo sapiens
ctaaaaaactgaagt

SEQ ID NO: 915201 - DNA, 15 bp, Homo sapiens
actaaaaaactgaag

SEQ ID NO: 915202 - DNA, 15 bp, Homo sapiens
tactaaaaaactgaa

SEQ ID NO: 915203 - DNA, 15 bp, Homo sapiens
ttactaaaaaactga

SEQ ID NO: 915204 - DNA, 15 bp, Homo sapiens
tttactaaaaaactg

SEQ ID NO: 915205 - DNA, 15 bp, Homo sapiens
atttactaaaaaact

SEQ ID NO: 915206 - DNA, 15 bp, Homo sapiens
aatttactaaaaaac

SEQ ID NO: 915207 - DNA, 15 bp, Homo sapiens
caatttactaaaaaa

SEQ ID NO: 915208 - DNA, 15 bp, Homo sapiens
acaatttactaaaaa

SEQ ID NO: 915209 - DNA, 15 bp, Homo sapiens
tacaatttactaaaa

SEQ ID NO: 915210 - DNA, 15 bp, Homo sapiens
atacaatttactaaa

SEQ ID NO: 915211 - DNA, 15 bp, Homo sapiens
aatacaatttactaa

SEQ ID NO: 915212 - DNA, 15 bp, Homo sapiens
taatacaatttacta

SEQ ID NO: 915213 - DNA, 15 bp, Homo sapiens
ctaatacaatttact

SEQ ID NO: 915214 - DNA, 15 bp, Homo sapiens
actaatacaatttac

SEQ ID NO: 915215 - DNA, 15 bp, Homo sapiens
tactaatacaattta

SEQ ID NO: 915216 - DNA, 15 bp, Homo sapiens
ttactaatacaattt

SEQ ID NO: 915217 - DNA, 15 bp, Homo sapiens
tttactaatacaatt

SEQ ID NO: 915218 - DNA, 15 bp, Homo sapiens
ttttactaatacaat

SEQ ID NO: 915219 - DNA, 15 bp, Homo sapiens
gttttactaatacaa

SEQ ID NO: 915220 - DNA, 15 bp, Homo sapiens
ggttttactaataca

SEQ ID NO: 915221 - DNA, 15 bp, Homo sapiens
tggttttactaatac

SEQ ID NO: 915222 - DNA, 15 bp, Homo sapiens
ttggttttactaata

SEQ ID NO: 915223 - DNA, 15 bp, Homo sapiens
tttggttttactaat

SEQ ID NO: 915224 - DNA, 15 bp, Homo sapiens
ttttggttttactaa

SEQ ID NO: 915225 - DNA, 15 bp, Homo sapiens
gttttggttttacta

SEQ ID NO: 915226 - DNA, 15 bp, Homo sapiens
tgttttggttttact

SEQ ID NO: 915227 - DNA, 15 bp, Homo sapiens
ttgttttggttttac

SEQ ID NO: 915228 - DNA, 15 bp, Homo sapiens
tttgttttggtttta

SEQ ID NO: 915229 - DNA, 15 bp, Homo sapiens
ttttgttttggtttt

SEQ ID NO: 915230 - DNA, 15 bp, Homo sapiens
gttttgttttggttt

SEQ ID NO: 915231 - DNA, 15 bp, Homo sapiens
agttttgttttggtt

SEQ ID NO: 915232 - DNA, 15 bp, Homo sapiens
aagttttgttttggt

SEQ ID NO: 915233 - DNA, 15 bp, Homo sapiens
aaagttttgttttgg

SEQ ID NO: 915234 - DNA, 15 bp, Homo sapiens
gaaagttttgttttg

SEQ ID NO: 915235 - DNA, 15 bp, Homo sapiens
tgaaagttttgtttt

SEQ ID NO: 915236 - DNA, 15 bp, Homo sapiens
atgaaagttttgttt

SEQ ID NO: 915237 - DNA, 15 bp, Homo sapiens
gatgaaagttttgtt

SEQ ID NO: 915238 - DNA, 15 bp, Homo sapiens
agatgaaagttttgt

SEQ ID NO: 915239 - DNA, 15 bp, Homo sapiens
aagatgaaagttttg

SEQ ID NO: 915240 - DNA, 15 bp, Homo sapiens
taagatgaaagtttt

SEQ ID NO: 915241 - DNA, 15 bp, Homo sapiens
gtaagatgaaagttt

SEQ ID NO: 915242 - DNA, 15 bp, Homo sapiens
tgtaagatgaaagtt

SEQ ID NO: 915243 - DNA, 15 bp, Homo sapiens
ttgtaagatgaaagt

SEQ ID NO: 915244 - DNA, 15 bp, Homo sapiens
tttgtaagatgaaag

SEQ ID NO: 915245 - DNA, 15 bp, Homo sapiens
atttgtaagatgaaa

SEQ ID NO: 915246 - DNA, 15 bp, Homo sapiens
tatttgtaagatgaa

SEQ ID NO: 915247 - DNA, 15 bp, Homo sapiens
atatttgtaagatga

SEQ ID NO: 915248 - DNA, 15 bp, Homo sapiens
tatatttgtaagatg

SEQ ID NO: 915249 - DNA, 15 bp, Homo sapiens
ttatatttgtaagat

SEQ ID NO: 915250 - DNA, 15 bp, Homo sapiens
tttatatttgtaaga

SEQ ID NO: 915251 - DNA, 15 bp, Homo sapiens
ttttatatttgtaag

SEQ ID NO: 915252 - DNA, 15 bp, Homo sapiens
attttatatttgtaa

SEQ ID NO: 915253 - DNA, 15 bp, Homo sapiens
cattttatatttgta

SEQ ID NO: 915254 - DNA, 15 bp, Homo sapiens
tcattttatatttgt

SEQ ID NO: 915255 - DNA, 15 bp, Homo sapiens
gtcattttatatttg

SEQ ID NO: 915256 - DNA, 15 bp, Homo sapiens
tgtcattttatattt

SEQ ID NO: 915257 - DNA, 15 bp, Homo sapiens
ttgtcattttatatt

SEQ ID NO: 915258 - DNA, 15 bp, Homo sapiens
gttgtcattttatat

SEQ ID NO: 915259 - DNA, 15 bp, Homo sapiens
agttgtcattttata

SEQ ID NO: 915260 - DNA, 15 bp, Homo sapiens
aagttgtcattttat

SEQ ID NO: 915261 - DNA, 15 bp, Homo sapiens
aaagttgtcatttta

SEQ ID NO: 915262 - DNA, 15 bp, Homo sapiens
taaagttgtcatttt

SEQ ID NO: 915263 - DNA, 15 bp, Homo sapiens
ttaaagttgtcattt

SEQ ID NO: 915264 - DNA, 15 bp, Homo sapiens
tttaaagttgtcatt

SEQ ID NO: 915265 - DNA, 15 bp, Homo sapiens
ctttaaagttgtcat

SEQ ID NO: 915266 - DNA, 15 bp, Homo sapiens
cctttaaagttgtca

SEQ ID NO: 915267 - DNA, 15 bp, Homo sapiens
tcctttaaagttgtc

SEQ ID NO: 915268 - DNA, 15 bp, Homo sapiens
atcctttaaagttgt

SEQ ID NO: 915269 - DNA, 15 bp, Homo sapiens
aatcctttaaagttg

SEQ ID NO: 915270 - DNA, 15 bp, Homo sapiens
aaatcctttaaagtt

SEQ ID NO: 915271 - DNA, 15 bp, Homo sapiens
aaaatcctttaaagt

SEQ ID NO: 915272 - DNA, 15 bp, Homo sapiens
aaaaatcctttaaag

SEQ ID NO: 915273 - DNA, 15 bp, Homo sapiens
aaaaaatcctttaaa

SEQ ID NO: 915274 - DNA, 15 bp, Homo sapiens
aaaaaaatcctttaa

SEQ ID NO: 915275 - DNA, 15 bp, Homo sapiens
aaaaaaaatccttta

SEQ ID NO: 915276 - DNA, 15 bp, Homo sapiens
aaaaaaaaatccttt

SEQ ID NO: 915277 - DNA, 15 bp, Homo sapiens
taaaaaaaaatcctt

SEQ ID NO: 915278 - DNA, 15 bp, Homo sapiens
ttaaaaaaaaatcct

SEQ ID NO: 915279 - DNA, 15 bp, Homo sapiens
attaaaaaaaaatcc

SEQ ID NO: 915280 - DNA, 15 bp, Homo sapiens
cattaaaaaaaaatc

SEQ ID NO: 915281 - DNA, 15 bp, Homo sapiens
ccattaaaaaaaaat

SEQ ID NO: 915282 - DNA, 15 bp, Homo sapiens
gccattaaaaaaaaa

SEQ ID NO: 915283 - DNA, 15 bp, Homo sapiens
tgccattaaaaaaaa

SEQ ID NO: 915284 - DNA, 15 bp, Homo sapiens
atgccattaaaaaaa

SEQ ID NO: 915285 - DNA, 15 bp, Homo sapiens
tatgccattaaaaaa

SEQ ID NO: 915286 - DNA, 15 bp, Homo sapiens
gtatgccattaaaaa

SEQ ID NO: 915287 - DNA, 15 bp, Homo sapiens
ggtatgccattaaaa

SEQ ID NO: 915288 - DNA, 15 bp, Homo sapiens
tggtatgccattaaa

SEQ ID NO: 915289 - DNA, 15 bp, Homo sapiens
gtggtatgccattaa

SEQ ID NO: 915290 - DNA, 15 bp, Homo sapiens
agtggtatgccatta

SEQ ID NO: 915291 - DNA, 15 bp, Homo sapiens
aagtggtatgccatt

SEQ ID NO: 915292 - DNA, 15 bp, Homo sapiens
aaagtggtatgccat

SEQ ID NO: 915293 - DNA, 15 bp, Homo sapiens
aaaagtggtatgcca

SEQ ID NO: 915294 - DNA, 15 bp, Homo sapiens
gaaaagtggtatgcc

SEQ ID NO: 915295 - DNA, 15 bp, Homo sapiens
agaaaagtggtatgc

SEQ ID NO: 915296 - DNA, 15 bp, Homo sapiens
aagaaaagtggtatg

SEQ ID NO: 915297 - DNA, 15 bp, Homo sapiens
caagaaaagtggtat

SEQ ID NO: 915298 - DNA, 15 bp, Homo sapiens
gcaagaaaagtggta

SEQ ID NO: 915299 - DNA, 15 bp, Homo sapiens
ggcaagaaaagtggt

SEQ ID NO: 915300 - DNA, 15 bp, Homo sapiens
tggcaagaaaagtgg

SEQ ID NO: 915301 - DNA, 15 bp, Homo sapiens
gtggcaagaaaagtg

SEQ ID NO: 915302 - DNA, 15 bp, Homo sapiens
ggtggcaagaaaagt

SEQ ID NO: 915303 - DNA, 15 bp, Homo sapiens
tggtggcaagaaaag

SEQ ID NO: 915304 - DNA, 15 bp, Homo sapiens
atggtggcaagaaaa

SEQ ID NO: 915305 - DNA, 15 bp, Homo sapiens
catggtggcaagaaa

SEQ ID NO: 915306 - DNA, 15 bp, Homo sapiens
acatggtggcaagaa

SEQ ID NO: 915307 - DNA, 15 bp, Homo sapiens
aacatggtggcaaga

SEQ ID NO: 915308 - DNA, 15 bp, Homo sapiens
caacatggtggcaag

SEQ ID NO: 915309 - DNA, 15 bp, Homo sapiens
ccaacatggtggcaa

SEQ ID NO: 915310 - DNA, 15 bp, Homo sapiens
cccaacatggtggca

SEQ ID NO: 915311 - DNA, 15 bp, Homo sapiens
tcccaacatggtggc

SEQ ID NO: 915312 - DNA, 15 bp, Homo sapiens
atcccaacatggtgg

SEQ ID NO: 915313 - DNA, 15 bp, Homo sapiens
gatcccaacatggtg

SEQ ID NO: 915314 - DNA, 15 bp, Homo sapiens
tgatcccaacatggt

SEQ ID NO: 915315 - DNA, 15 bp, Homo sapiens
gtgatcccaacatgg

SEQ ID NO: 915316 - DNA, 15 bp, Homo sapiens
agtgatcccaacatg

SEQ ID NO: 915317 - DNA, 15 bp, Homo sapiens
cagtgatcccaacat

SEQ ID NO: 915318 - DNA, 15 bp, Homo sapiens
tcagtgatcccaaca

SEQ ID NO: 915319 - DNA, 15 bp, Homo sapiens
atcagtgatcccaac

SEQ ID NO: 915320 - DNA, 15 bp, Homo sapiens
aatcagtgatcccaa

SEQ ID NO: 915321 - DNA, 15 bp, Homo sapiens
aaatcagtgatccca

SEQ ID NO: 915322 - DNA, 15 bp, Homo sapiens
caaatcagtgatccc

SEQ ID NO: 915323 - DNA, 15 bp, Homo sapiens
tcaaatcagtgatcc

SEQ ID NO: 915324 - DNA, 15 bp, Homo sapiens
ttcaaatcagtgatc

SEQ ID NO: 915325 - DNA, 15 bp, Homo sapiens
cttcaaatcagtgat

SEQ ID NO: 915326 - DNA, 15 bp, Homo sapiens
ccttcaaatcagtga

SEQ ID NO: 915327 - DNA, 15 bp, Homo sapiens
tccttcaaatcagtg

SEQ ID NO: 915328 - DNA, 15 bp, Homo sapiens
ttccttcaaatcagt

SEQ ID NO: 915329 - DNA, 15 bp, Homo sapiens
attccttcaaatcag

SEQ ID NO: 915330 - DNA, 15 bp, Homo sapiens
tattccttcaaatca

SEQ ID NO: 915331 - DNA, 15 bp, Homo sapiens
ttattccttcaaatc

SEQ ID NO: 915332 - DNA, 15 bp, Homo sapiens
cttattccttcaaat

SEQ ID NO: 915333 - DNA, 15 bp, Homo sapiens
acttattccttcaaa

SEQ ID NO: 915334 - DNA, 15 bp, Homo sapiens
tacttattccttcaa

SEQ ID NO: 915335 - DNA, 15 bp, Homo sapiens
ctacttattccttca

SEQ ID NO: 915336 - DNA, 15 bp, Homo sapiens
actacttattccttc

SEQ ID NO: 915337 - DNA, 15 bp, Homo sapiens
gactacttattcctt

SEQ ID NO: 915338 - DNA, 15 bp, Homo sapiens
tgactacttattcct

SEQ ID NO: 915339 - DNA, 15 bp, Homo sapiens
ttgactacttattcc

SEQ ID NO: 915340 - DNA, 15 bp, Homo sapiens
attgactacttattc

SEQ ID NO: 915341 - DNA, 15 bp, Homo sapiens
aattgactacttatt

SEQ ID NO: 915342 - DNA, 15 bp, Homo sapiens
gaattgactacttat

SEQ ID NO: 915343 - DNA, 15 bp, Homo sapiens
tgaattgactactta

SEQ ID NO: 915344 - DNA, 15 bp, Homo sapiens
ttgaattgactactt

SEQ ID NO: 915345 - DNA, 15 bp, Homo sapiens
attgaattgactact

SEQ ID NO: 915346 - DNA, 15 bp, Homo sapiens
aattgaattgactac

SEQ ID NO: 915347 - DNA, 15 bp, Homo sapiens
gaattgaattgacta

SEQ ID NO: 915348 - DNA, 15 bp, Homo sapiens
tgaattgaattgact

SEQ ID NO: 915349 - DNA, 15 bp, Homo sapiens
atgaattgaattgac

SEQ ID NO: 915350 - DNA, 15 bp, Homo sapiens
catgaattgaattga

SEQ ID NO: 915351 - DNA, 15 bp, Homo sapiens
tcatgaattgaattg

SEQ ID NO: 915352 - DNA, 15 bp, Homo sapiens
atcatgaattgaatt

SEQ ID NO: 915353 - DNA, 15 bp, Homo sapiens
aatcatgaattgaat

SEQ ID NO: 915354 - DNA, 15 bp, Homo sapiens
aaatcatgaattgaa

SEQ ID NO: 915355 - DNA, 15 bp, Homo sapiens
aaaatcatgaattga

SEQ ID NO: 915356 - DNA, 15 bp, Homo sapiens
aaaaatcatgaattg

SEQ ID NO: 915357 - DNA, 15 bp, Homo sapiens
caaaaatcatgaatt

SEQ ID NO: 915358 - DNA, 15 bp, Homo sapiens
acaaaaatcatgaat

SEQ ID NO: 915359 - DNA, 15 bp, Homo sapiens
aacaaaaatcatgaa

SEQ ID NO: 915360 - DNA, 15 bp, Homo sapiens
aaacaaaaatcatga

SEQ ID NO: 915361 - DNA, 15 bp, Homo sapiens
aaaacaaaaatcatg

SEQ ID NO: 915362 - DNA, 15 bp, Homo sapiens
aaaaacaaaaatcat

SEQ ID NO: 915363 - DNA, 15 bp, Homo sapiens
taaaaacaaaaatca

SEQ ID NO: 915364 - DNA, 15 bp, Homo sapiens
gtaaaaacaaaaatc

SEQ ID NO: 915365 - DNA, 15 bp, Homo sapiens
agtaaaaacaaaaat

SEQ ID NO: 915366 - DNA, 15 bp, Homo sapiens
gagtaaaaacaaaaa

SEQ ID NO: 915367 - DNA, 15 bp, Homo sapiens
agagtaaaaacaaaa

SEQ ID NO: 915368 - DNA, 15 bp, Homo sapiens
cagagtaaaaacaaa

SEQ ID NO: 915369 - DNA, 15 bp, Homo sapiens
acagagtaaaaacaa

SEQ ID NO: 915370 - DNA, 15 bp, Homo sapiens
tacagagtaaaaaca

SEQ ID NO: 915371 - DNA, 15 bp, Homo sapiens
ctacagagtaaaaac

SEQ ID NO: 915372 - DNA, 15 bp, Homo sapiens
cctacagagtaaaaa

SEQ ID NO: 915373 - DNA, 15 bp, Homo sapiens
acctacagagtaaaa

SEQ ID NO: 915374 - DNA, 15 bp, Homo sapiens
cacctacagagtaaa

SEQ ID NO: 915375 - DNA, 15 bp, Homo sapiens
gcacctacagagtaa

SEQ ID NO: 915376 - DNA, 15 bp, Homo sapiens
agcacctacagagta

SEQ ID NO: 915377 - DNA, 15 bp, Homo sapiens
aagcacctacagagt

SEQ ID NO: 915378 - DNA, 15 bp, Homo sapiens
gaagcacctacagag

SEQ ID NO: 915379 - DNA, 15 bp, Homo sapiens
tgaagcacctacaga

SEQ ID NO: 915380 - DNA, 15 bp, Homo sapiens
ttgaagcacctacag

SEQ ID NO: 915381 - DNA, 15 bp, Homo sapiens
gttgaagcacctaca

SEQ ID NO: 915382 - DNA, 15 bp, Homo sapiens
ggttgaagcacctac

SEQ ID NO: 915383 - DNA, 15 bp, Homo sapiens
gggttgaagcaccta

SEQ ID NO: 915384 - DNA, 15 bp, Homo sapiens
agggttgaagcacct

SEQ ID NO: 915385 - DNA, 15 bp, Homo sapiens
aagggttgaagcacc

SEQ ID NO: 915386 - DNA, 15 bp, Homo sapiens
aaagggttgaagcac

SEQ ID NO: 915387 - DNA, 15 bp, Homo sapiens
gaaagggttgaagca

SEQ ID NO: 915388 - DNA, 15 bp, Homo sapiens
agaaagggttgaagc

SEQ ID NO: 915389 - DNA, 15 bp, Homo sapiens
gagaaagggttgaag

SEQ ID NO: 915390 - DNA, 15 bp, Homo sapiens
tgagaaagggttgaa

SEQ ID NO: 915391 - DNA, 15 bp, Homo sapiens
ttgagaaagggttga

SEQ ID NO: 915392 - DNA, 15 bp, Homo sapiens
gttgagaaagggttg

SEQ ID NO: 915393 - DNA, 15 bp, Homo sapiens
tgttgagaaagggtt

SEQ ID NO: 915394 - DNA, 15 bp, Homo sapiens
ctgttgagaaagggt

SEQ ID NO: 915395 - DNA, 15 bp, Homo sapiens
tctgttgagaaaggg

SEQ ID NO: 915396 - DNA, 15 bp, Homo sapiens
gtctgttgagaaagg

SEQ ID NO: 915397 - DNA, 15 bp, Homo sapiens
agtctgttgagaaag

SEQ ID NO: 915398 - DNA, 15 bp, Homo sapiens
gagtctgttgagaaa

SEQ ID NO: 915399 - DNA, 15 bp, Homo sapiens
tgagtctgttgagaa

SEQ ID NO: 915400 - DNA, 15 bp, Homo sapiens
atgagtctgttgaga

SEQ ID NO: 915401 - DNA, 15 bp, Homo sapiens
tatgagtctgttgag

SEQ ID NO: 915402 - DNA, 15 bp, Homo sapiens
atatgagtctgttga

SEQ ID NO: 915403 - DNA, 15 bp, Homo sapiens
catatgagtctgttg

SEQ ID NO: 915404 - DNA, 15 bp, Homo sapiens
tcatatgagtctgtt

SEQ ID NO: 915405 - DNA, 15 bp, Homo sapiens
ttcatatgagtctgt

SEQ ID NO: 915406 - DNA, 15 bp, Homo sapiens
tttcatatgagtctg

SEQ ID NO: 915407 - DNA, 15 bp, Homo sapiens
ttttcatatgagtct

SEQ ID NO: 915408 - DNA, 15 bp, Homo sapiens
attttcatatgagtc

SEQ ID NO: 915409 - DNA, 15 bp, Homo sapiens
aattttcatatgagt

SEQ ID NO: 915410 - DNA, 15 bp, Homo sapiens
gaattttcatatgag

SEQ ID NO: 915411 - DNA, 15 bp, Homo sapiens
tgaattttcatatga

SEQ ID NO: 915412 - DNA, 15 bp, Homo sapiens
ctgaattttcatatg

SEQ ID NO: 915413 - DNA, 15 bp, Homo sapiens
actgaattttcatat

SEQ ID NO: 915414 - DNA, 15 bp, Homo sapiens
gactgaattttcata

SEQ ID NO: 915415 - DNA, 15 bp, Homo sapiens
tgactgaattttcat

SEQ ID NO: 915416 - DNA, 15 bp, Homo sapiens
ttgactgaattttca

SEQ ID NO: 915417 - DNA, 15 bp, Homo sapiens
gttgactgaattttc

SEQ ID NO: 915418 - DNA, 15 bp, Homo sapiens
cgttgactgaatttt

SEQ ID NO: 915419 - DNA, 15 bp, Homo sapiens
acgttgactgaattt

SEQ ID NO: 915420 - DNA, 15 bp, Homo sapiens
aacgttgactgaatt

SEQ ID NO: 915421 - DNA, 15 bp, Homo sapiens
taacgttgactgaat

SEQ ID NO: 915422 - DNA, 15 bp, Homo sapiens
ctaacgttgactgaa

SEQ ID NO: 915423 - DNA, 15 bp, Homo sapiens
tctaacgttgactga

SEQ ID NO: 915424 - DNA, 15 bp, Homo sapiens
gtctaacgttgactg

SEQ ID NO: 915425 - DNA, 15 bp, Homo sapiens
tgtctaacgttgact

SEQ ID NO: 915426 - DNA, 15 bp, Homo sapiens
atgtctaacgttgac

SEQ ID NO: 915427 - DNA, 15 bp, Homo sapiens
aatgtctaacgttga

SEQ ID NO: 915428 - DNA, 15 bp, Homo sapiens
aaatgtctaacgttg

SEQ ID NO: 915429 - DNA, 15 bp, Homo sapiens
aaaatgtctaacgtt

SEQ ID NO: 915430 - DNA, 15 bp, Homo sapiens
taaaatgtctaacgt

SEQ ID NO: 915431 - DNA, 15 bp, Homo sapiens
ttaaaatgtctaacg

SEQ ID NO: 915432 - DNA, 15 bp, Homo sapiens
tttaaaatgtctaac

SEQ ID NO: 915433 - DNA, 15 bp, Homo sapiens
ttttaaaatgtctaa

SEQ ID NO: 915434 - DNA, 15 bp, Homo sapiens
cttttaaaatgtcta

SEQ ID NO: 915435 - DNA, 15 bp, Homo sapiens
tcttttaaaatgtct

SEQ ID NO: 915436 - DNA, 15 bp, Homo sapiens
ctcttttaaaatgtc

SEQ ID NO: 915437 - DNA, 15 bp, Homo sapiens
tctcttttaaaatgt

SEQ ID NO: 915438 - DNA, 15 bp, Homo sapiens
ttctcttttaaaatg

SEQ ID NO: 915439 - DNA, 15 bp, Homo sapiens
tttctcttttaaaat

SEQ ID NO: 915440 - DNA, 15 bp, Homo sapiens
ttttctcttttaaaa

SEQ ID NO: 915441 - DNA, 15 bp, Homo sapiens
gttttctcttttaaa

SEQ ID NO: 915442 - DNA, 15 bp, Homo sapiens
agttttctcttttaa

SEQ ID NO: 915443 - DNA, 15 bp, Homo sapiens
tagttttctctttta

SEQ ID NO: 915444 - DNA, 15 bp, Homo sapiens
ttagttttctctttt

SEQ ID NO: 915445 - DNA, 15 bp, Homo sapiens
tttagttttctcttt

SEQ ID NO: 915446 - DNA, 15 bp, Homo sapiens
ctttagttttctctt

SEQ ID NO: 915447 - DNA, 15 bp, Homo sapiens
tctttagttttctct

SEQ ID NO: 915448 - DNA, 15 bp, Homo sapiens
ctctttagttttctc

SEQ ID NO: 915449 - DNA, 15 bp, Homo sapiens
cctctttagttttct

SEQ ID NO: 915450 - DNA, 15 bp, Homo sapiens
gcctctttagttttc

SEQ ID NO: 915451 - DNA, 15 bp, Homo sapiens
agcctctttagtttt

SEQ ID NO: 915452 - DNA, 15 bp, Homo sapiens
cagcctctttagttt

SEQ ID NO: 915453 - DNA, 15 bp, Homo sapiens
tcagcctctttagtt

SEQ ID NO: 915454 - DNA, 15 bp, Homo sapiens
ctcagcctctttagt

SEQ ID NO: 915455 - DNA, 15 bp, Homo sapiens
tctcagcctctttag

SEQ ID NO: 915456 - DNA, 15 bp, Homo sapiens
ctctcagcctcttta

SEQ ID NO: 915457 - DNA, 15 bp, Homo sapiens
tctctcagcctcttt

SEQ ID NO: 915458 - DNA, 15 bp, Homo sapiens
ttctctcagcctctt

SEQ ID NO: 915459 - DNA, 15 bp, Homo sapiens
gttctctcagcctct

SEQ ID NO: 915460 - DNA, 15 bp, Homo sapiens
tgttctctcagcctc

SEQ ID NO: 915461 - DNA, 15 bp, Homo sapiens
ctgttctctcagcct

SEQ ID NO: 915462 - DNA, 15 bp, Homo sapiens
gctgttctctcagcc

SEQ ID NO: 915463 - DNA, 15 bp, Homo sapiens
agctgttctctcagc

SEQ ID NO: 915464 - DNA, 15 bp, Homo sapiens
cagctgttctctcag

SEQ ID NO: 915465 - DNA, 15 bp, Homo sapiens
tcagctgttctctca

SEQ ID NO: 915466 - DNA, 15 bp, Homo sapiens
ttcagctgttctctc

SEQ ID NO: 915467 - DNA, 15 bp, Homo sapiens
gttcagctgttctct

SEQ ID NO: 915468 - DNA, 15 bp, Homo sapiens
agttcagctgttctc

SEQ ID NO: 915469 - DNA, 15 bp, Homo sapiens
cagttcagctgttct

SEQ ID NO: 915470 - DNA, 15 bp, Homo sapiens
ccagttcagctgttc

SEQ ID NO: 915471 - DNA, 15 bp, Homo sapiens
gccagttcagctgtt

SEQ ID NO: 915472 - DNA, 15 bp, Homo sapiens
agccagttcagctgt

SEQ ID NO: 915473 - DNA, 15 bp, Homo sapiens
cagccagttcagctg

SEQ ID NO: 915474 - DNA, 15 bp, Homo sapiens
tcagccagttcagct

SEQ ID NO: 915475 - DNA, 15 bp, Homo sapiens
ctcagccagttcagc

SEQ ID NO: 915476 - DNA, 15 bp, Homo sapiens
cctcagccagttcag

SEQ ID NO: 915477 - DNA, 15 bp, Homo sapiens
gcctcagccagttca

SEQ ID NO: 915478 - DNA, 15 bp, Homo sapiens
agcctcagccagttc

SEQ ID NO: 915479 - DNA, 15 bp, Homo sapiens
cagcctcagccagtt

SEQ ID NO: 915480 - DNA, 15 bp, Homo sapiens
tcagcctcagccagt

SEQ ID NO: 915481 - DNA, 15 bp, Homo sapiens
atcagcctcagccag

SEQ ID NO: 915482 - DNA, 15 bp, Homo sapiens
catcagcctcagcca

SEQ ID NO: 915483 - DNA, 15 bp, Homo sapiens
gcatcagcctcagcc

SEQ ID NO: 915484 - DNA, 15 bp, Homo sapiens
agcatcagcctcagc

SEQ ID NO: 915485 - DNA, 15 bp, Homo sapiens
tagcatcagcctcag

SEQ ID NO: 915486 - DNA, 15 bp, Homo sapiens
ctagcatcagcctca

SEQ ID NO: 915487 - DNA, 15 bp, Homo sapiens
cctagcatcagcctc

SEQ ID NO: 915488 - DNA, 15 bp, Homo sapiens
ccctagcatcagcct

SEQ ID NO: 915489 - DNA, 15 bp, Homo sapiens
tccctagcatcagcc

SEQ ID NO: 915490 - DNA, 15 bp, Homo sapiens
ttccctagcatcagc

SEQ ID NO: 915491 - DNA, 15 bp, Homo sapiens
tttccctagcatcag

SEQ ID NO: 915492 - DNA, 15 bp, Homo sapiens
ttttccctagcatca

SEQ ID NO: 915493 - DNA, 15 bp, Homo sapiens
cttttccctagcatc

SEQ ID NO: 915494 - DNA, 15 bp, Homo sapiens
ccttttccctagcat

SEQ ID NO: 915495 - DNA, 15 bp, Homo sapiens
tccttttccctagca

SEQ ID NO: 915496 - DNA, 15 bp, Homo sapiens
atccttttccctagc

SEQ ID NO: 915497 - DNA, 15 bp, Homo sapiens
tatccttttccctag

SEQ ID NO: 915498 - DNA, 15 bp, Homo sapiens
ttatccttttcccta

SEQ ID NO: 915499 - DNA, 15 bp, Homo sapiens
tttatccttttccct

SEQ ID NO: 915500 - DNA, 15 bp, Homo sapiens
ctttatccttttccc

SEQ ID NO: 915501 - DNA, 15 bp, Homo sapiens
tctttatccttttcc

SEQ ID NO: 915502 - DNA, 15 bp, Homo sapiens
ttctttatccttttc

SEQ ID NO: 915503 - DNA, 15 bp, Homo sapiens
attctttatcctttt

SEQ ID NO: 915504 - DNA, 15 bp, Homo sapiens
aattctttatccttt

SEQ ID NO: 915505 - DNA, 15 bp, Homo sapiens
taattctttatcctt

SEQ ID NO: 915506 - DNA, 15 bp, Homo sapiens
ctaattctttatcct

SEQ ID NO: 915507 - DNA, 15 bp, Homo sapiens
actaattctttatcc

SEQ ID NO: 915508 - DNA, 15 bp, Homo sapiens
aactaattctttatc

SEQ ID NO: 915509 - DNA, 15 bp, Homo sapiens
caactaattctttat

SEQ ID NO: 915510 - DNA, 15 bp, Homo sapiens
tcaactaattcttta

SEQ ID NO: 915511 - DNA, 15 bp, Homo sapiens
ctcaactaattcttt

SEQ ID NO: 915512 - DNA, 15 bp, Homo sapiens
cctcaactaattctt

SEQ ID NO: 915513 - DNA, 15 bp, Homo sapiens
gcctcaactaattct

SEQ ID NO: 915514 - DNA, 15 bp, Homo sapiens
agcctcaactaattc

SEQ ID NO: 915515 - DNA, 15 bp, Homo sapiens
gagcctcaactaatt

SEQ ID NO: 915516 - DNA, 15 bp, Homo sapiens
agagcctcaactaat

SEQ ID NO: 915517 - DNA, 15 bp, Homo sapiens
cagagcctcaactaa

SEQ ID NO: 915518 - DNA, 15 bp, Homo sapiens
tcagagcctcaacta

SEQ ID NO: 915519 - DNA, 15 bp, Homo sapiens
ttcagagcctcaact

SEQ ID NO: 915520 - DNA, 15 bp, Homo sapiens
cttcagagcctcaac

SEQ ID NO: 915521 - DNA, 15 bp, Homo sapiens
tcttcagagcctcaa

SEQ ID NO: 915522 - DNA, 15 bp, Homo sapiens
ctcttcagagcctca

SEQ ID NO: 915523 - DNA, 15 bp, Homo sapiens
cctcttcagagcctc

SEQ ID NO: 915524 - DNA, 15 bp, Homo sapiens
acctcttcagagcct

SEQ ID NO: 915525 - DNA, 15 bp, Homo sapiens
aacctcttcagagcc

SEQ ID NO: 915526 - DNA, 15 bp, Homo sapiens
taacctcttcagagc

SEQ ID NO: 915527 - DNA, 15 bp, Homo sapiens
ttaacctcttcagag

SEQ ID NO: 915528 - DNA, 15 bp, Homo sapiens
tttaacctcttcaga

SEQ ID NO: 915529 - DNA, 15 bp, Homo sapiens
ttttaacctcttcag

SEQ ID NO: 915530 - DNA, 15 bp, Homo sapiens
cttttaacctcttca

SEQ ID NO: 915531 - DNA, 15 bp, Homo sapiens
tcttttaacctcttc

SEQ ID NO: 915532 - DNA, 15 bp, Homo sapiens
atcttttaacctctt

SEQ ID NO: 915533 - DNA, 15 bp, Homo sapiens
aatcttttaacctct

SEQ ID NO: 915534 - DNA, 15 bp, Homo sapiens
taatcttttaacctc

SEQ ID NO: 915535 - DNA, 15 bp, Homo sapiens
ataatcttttaacct

SEQ ID NO: 915536 - DNA, 15 bp, Homo sapiens
cataatcttttaacc

SEQ ID NO: 915537 - DNA, 15 bp, Homo sapiens
tcataatcttttaac

SEQ ID NO: 915538 - DNA, 15 bp, Homo sapiens
ttcataatcttttaa

SEQ ID NO: 915539 - DNA, 15 bp, Homo sapiens
attcataatctttta

SEQ ID NO: 915540 - DNA, 15 bp, Homo sapiens
gattcataatctttt

SEQ ID NO: 915541 - DNA, 15 bp, Homo sapiens
cgattcataatcttt

SEQ ID NO: 915542 - DNA, 15 bp, Homo sapiens
ccgattcataatctt

SEQ ID NO: 915543 - DNA, 15 bp, Homo sapiens
accgattcataatct

SEQ ID NO: 915544 - DNA, 15 bp, Homo sapiens
taccgattcataatc

SEQ ID NO: 915545 - DNA, 15 bp, Homo sapiens
ataccgattcataat

SEQ ID NO: 915546 - DNA, 15 bp, Homo sapiens
cataccgattcataa

SEQ ID NO: 915547 - DNA, 15 bp, Homo sapiens
acataccgattcata

SEQ ID NO: 915548 - DNA, 15 bp, Homo sapiens
tacataccgattcat

SEQ ID NO: 915549 - DNA, 15 bp, Homo sapiens
atacataccgattca

SEQ ID NO: 915550 - DNA, 15 bp, Homo sapiens
aatacataccgattc

SEQ ID NO: 915551 - DNA, 15 bp, Homo sapiens
aaatacataccgatt

SEQ ID NO: 915552 - DNA, 15 bp, Homo sapiens
aaaatacataccgat

SEQ ID NO: 915553 - DNA, 15 bp, Homo sapiens
aaaaatacataccga

SEQ ID NO: 915554 - DNA, 15 bp, Homo sapiens
taaaaatacataccg

SEQ ID NO: 915555 - DNA, 15 bp, Homo sapiens
ataaaaatacatacc

SEQ ID NO: 915556 - DNA, 15 bp, Homo sapiens
gataaaaatacatac

SEQ ID NO: 915557 - DNA, 15 bp, Homo sapiens
agataaaaatacata

SEQ ID NO: 915558 - DNA, 15 bp, Homo sapiens
aagataaaaatacat

SEQ ID NO: 915559 - DNA, 15 bp, Homo sapiens
caagataaaaataca

SEQ ID NO: 915560 - DNA, 15 bp, Homo sapiens
acaagataaaaatac

SEQ ID NO: 915561 - DNA, 15 bp, Homo sapiens
gacaagataaaaata

SEQ ID NO: 915562 - DNA, 15 bp, Homo sapiens
tgacaagataaaaat

SEQ ID NO: 915563 - DNA, 15 bp, Homo sapiens
atgacaagataaaaa

SEQ ID NO: 915564 - DNA, 15 bp, Homo sapiens
aatgacaagataaaa

SEQ ID NO: 915565 - DNA, 15 bp, Homo sapiens
gaatgacaagataaa

SEQ ID NO: 915566 - DNA, 15 bp, Homo sapiens
tgaatgacaagataa

SEQ ID NO: 915567 - DNA, 15 bp, Homo sapiens
ttgaatgacaagata

SEQ ID NO: 915568 - DNA, 15 bp, Homo sapiens
cttgaatgacaagat

SEQ ID NO: 915569 - DNA, 15 bp, Homo sapiens
ccttgaatgacaaga

SEQ ID NO: 915570 - DNA, 15 bp, Homo sapiens
tccttgaatgacaag

SEQ ID NO: 915571 - DNA, 15 bp, Homo sapiens
ctccttgaatgacaa

SEQ ID NO: 915572 - DNA, 15 bp, Homo sapiens
gctccttgaatgaca

SEQ ID NO: 915573 - DNA, 15 bp, Homo sapiens
agctccttgaatgac

SEQ ID NO: 915574 - DNA, 15 bp, Homo sapiens
aagctccttgaatga

SEQ ID NO: 915575 - DNA, 15 bp, Homo sapiens
taagctccttgaatg

SEQ ID NO: 915576 - DNA, 15 bp, Homo sapiens
ctaagctccttgaat

SEQ ID NO: 915577 - DNA, 15 bp, Homo sapiens
tctaagctccttgaa

SEQ ID NO: 915578 - DNA, 15 bp, Homo sapiens
ttctaagctccttga

SEQ ID NO: 915579 - DNA, 15 bp, Homo sapiens
attctaagctccttg

SEQ ID NO: 915580 - DNA, 15 bp, Homo sapiens
aattctaagctcctt

SEQ ID NO: 915581 - DNA, 15 bp, Homo sapiens
taattctaagctcct

SEQ ID NO: 915582 - DNA, 15 bp, Homo sapiens
ataattctaagctcc

SEQ ID NO: 915583 - DNA, 15 bp, Homo sapiens
aataattctaagctc

SEQ ID NO: 915584 - DNA, 15 bp, Homo sapiens
gaataattctaagct

SEQ ID NO: 915585 - DNA, 15 bp, Homo sapiens
agaataattctaagc

SEQ ID NO: 915586 - DNA, 15 bp, Homo sapiens
aagaataattctaag

SEQ ID NO: 915587 - DNA, 15 bp, Homo sapiens
caagaataattctaa

SEQ ID NO: 915588 - DNA, 15 bp, Homo sapiens
gcaagaataattcta

SEQ ID NO: 915589 - DNA, 15 bp, Homo sapiens
ggcaagaataattct

SEQ ID NO: 915590 - DNA, 15 bp, Homo sapiens
tggcaagaataattc

SEQ ID NO: 915591 - DNA, 15 bp, Homo sapiens
atggcaagaataatt

SEQ ID NO: 915592 - DNA, 15 bp, Homo sapiens
aatggcaagaataat

SEQ ID NO: 915593 - DNA, 15 bp, Homo sapiens
gaatggcaagaataa

SEQ ID NO: 915594 - DNA, 15 bp, Homo sapiens
tgaatggcaagaata

SEQ ID NO: 915595 - DNA, 15 bp, Homo sapiens
gtgaatggcaagaat

SEQ ID NO: 915596 - DNA, 15 bp, Homo sapiens
tgtgaatggcaagaa

SEQ ID NO: 915597 - DNA, 15 bp, Homo sapiens
ctgtgaatggcaaga

SEQ ID NO: 915598 - DNA, 15 bp, Homo sapiens
tctgtgaatggcaag

SEQ ID NO: 915599 - DNA, 15 bp, Homo sapiens
gtctgtgaatggcaa

SEQ ID NO: 915600 - DNA, 15 bp, Homo sapiens
agtctgtgaatggca

SEQ ID NO: 915601 - DNA, 15 bp, Homo sapiens
tagtctgtgaatggc

SEQ ID NO: 915602 - DNA, 15 bp, Homo sapiens
atagtctgtgaatgg

SEQ ID NO: 915603 - DNA, 15 bp, Homo sapiens
aatagtctgtgaatg

SEQ ID NO: 915604 - DNA, 15 bp, Homo sapiens
gaatagtctgtgaat

SEQ ID NO: 915605 - DNA, 15 bp, Homo sapiens
agaatagtctgtgaa

SEQ ID NO: 915606 - DNA, 15 bp, Homo sapiens
cagaatagtctgtga

SEQ ID NO: 915607 - DNA, 15 bp, Homo sapiens
acagaatagtctgtg

SEQ ID NO: 915608 - DNA, 15 bp, Homo sapiens
cacagaatagtctgt

SEQ ID NO: 915609 - DNA, 15 bp, Homo sapiens
gcacagaatagtctg

SEQ ID NO: 915610 - DNA, 15 bp, Homo sapiens
agcacagaatagtct

SEQ ID NO: 915611 - DNA, 15 bp, Homo sapiens
tagcacagaatagtc

SEQ ID NO: 915612 - DNA, 15 bp, Homo sapiens
atagcacagaatagt

SEQ ID NO: 915613 - DNA, 15 bp, Homo sapiens
aatagcacagaatag

SEQ ID NO: 915614 - DNA, 15 bp, Homo sapiens
aaatagcacagaata

SEQ ID NO: 915615 - DNA, 15 bp, Homo sapiens
taaatagcacagaat

SEQ ID NO: 915616 - DNA, 15 bp, Homo sapiens
gtaaatagcacagaa

SEQ ID NO: 915617 - DNA, 15 bp, Homo sapiens
agtaaatagcacaga

SEQ ID NO: 915618 - DNA, 15 bp, Homo sapiens
cagtaaatagcacag

SEQ ID NO: 915619 - DNA, 15 bp, Homo sapiens
gcagtaaatagcaca

SEQ ID NO: 915620 - DNA, 15 bp, Homo sapiens
tgcagtaaatagcac

SEQ ID NO: 915621 - DNA, 15 bp, Homo sapiens
atgcagtaaatagca

SEQ ID NO: 915622 - DNA, 15 bp, Homo sapiens
tatgcagtaaatagc

SEQ ID NO: 915623 - DNA, 15 bp, Homo sapiens
gtatgcagtaaatag

SEQ ID NO: 915624 - DNA, 15 bp, Homo sapiens
ggtatgcagtaaata

SEQ ID NO: 915625 - DNA, 15 bp, Homo sapiens
tggtatgcagtaaat

SEQ ID NO: 915626 - DNA, 15 bp, Homo sapiens
atggtatgcagtaaa

SEQ ID NO: 915627 - DNA, 15 bp, Homo sapiens
aatggtatgcagtaa

SEQ ID NO: 915628 - DNA, 15 bp, Homo sapiens
aaatggtatgcagta

SEQ ID NO: 915629 - DNA, 15 bp, Homo sapiens
taaatggtatgcagt

SEQ ID NO: 915630 - DNA, 15 bp, Homo sapiens
ttaaatggtatgcag

SEQ ID NO: 915631 - DNA, 15 bp, Homo sapiens
tttaaatggtatgca

SEQ ID NO: 915632 - DNA, 15 bp, Homo sapiens
ttttaaatggtatgc

SEQ ID NO: 915633 - DNA, 15 bp, Homo sapiens
tttttaaatggtatg

SEQ ID NO: 915634 - DNA, 15 bp, Homo sapiens
ttttttaaatggtat

SEQ ID NO: 915635 - DNA, 15 bp, Homo sapiens
gttttttaaatggta

SEQ ID NO: 915636 - DNA, 15 bp, Homo sapiens
tgttttttaaatggt

SEQ ID NO: 915637 - DNA, 15 bp, Homo sapiens
atgttttttaaatgg

SEQ ID NO: 915638 - DNA, 15 bp, Homo sapiens
aatgttttttaaatg

SEQ ID NO: 915639 - DNA, 15 bp, Homo sapiens
gaatgttttttaaat

SEQ ID NO: 915640 - DNA, 15 bp, Homo sapiens
ggaatgttttttaaa

SEQ ID NO: 915641 - DNA, 15 bp, Homo sapiens
tggaatgttttttaa

SEQ ID NO: 915642 - DNA, 15 bp, Homo sapiens
atggaatgtttttta

SEQ ID NO: 915643 - DNA, 15 bp, Homo sapiens
tatggaatgtttttt

SEQ ID NO: 915644 - DNA, 15 bp, Homo sapiens
ttatggaatgttttt

SEQ ID NO: 915645 - DNA, 15 bp, Homo sapiens
cttatggaatgtttt

SEQ ID NO: 915646 - DNA, 15 bp, Homo sapiens
acttatggaatgttt

SEQ ID NO: 915647 - DNA, 15 bp, Homo sapiens
tacttatggaatgtt

SEQ ID NO: 915648 - DNA, 15 bp, Homo sapiens
atacttatggaatgt

SEQ ID NO: 915649 - DNA, 15 bp, Homo sapiens
gatacttatggaatg

SEQ ID NO: 915650 - DNA, 15 bp, Homo sapiens
agatacttatggaat

SEQ ID NO: 915651 - DNA, 15 bp, Homo sapiens
aagatacttatggaa

SEQ ID NO: 915652 - DNA, 15 bp, Homo sapiens
aaagatacttatgga

SEQ ID NO: 915653 - DNA, 15 bp, Homo sapiens
aaaagatacttatgg

SEQ ID NO: 915654 - DNA, 15 bp, Homo sapiens
caaaagatacttatg

SEQ ID NO: 915655 - DNA, 15 bp, Homo sapiens
tcaaaagatacttat

SEQ ID NO: 915656 - DNA, 15 bp, Homo sapiens
atcaaaagatactta

SEQ ID NO: 915657 - DNA, 15 bp, Homo sapiens
tatcaaaagatactt

SEQ ID NO: 915658 - DNA, 15 bp, Homo sapiens
ttatcaaaagatact

SEQ ID NO: 915659 - DNA, 15 bp, Homo sapiens
tttatcaaaagatac

SEQ ID NO: 915660 - DNA, 15 bp, Homo sapiens
ctttatcaaaagata

SEQ ID NO: 915661 - DNA, 15 bp, Homo sapiens
tctttatcaaaagat

SEQ ID NO: 915662 - DNA, 15 bp, Homo sapiens
atctttatcaaaaga

SEQ ID NO: 915663 - DNA, 15 bp, Homo sapiens
aatctttatcaaaag

SEQ ID NO: 915664 - DNA, 15 bp, Homo sapiens
taatctttatcaaaa

SEQ ID NO: 915665 - DNA, 15 bp, Homo sapiens
ataatctttatcaaa

SEQ ID NO: 915666 - DNA, 15 bp, Homo sapiens
gataatctttatcaa

SEQ ID NO: 915667 - DNA, 15 bp, Homo sapiens
ggataatctttatca

SEQ ID NO: 915668 - DNA, 15 bp, Homo sapiens
aggataatctttatc

SEQ ID NO: 915669 - DNA, 15 bp, Homo sapiens
gaggataatctttat

SEQ ID NO: 915670 - DNA, 15 bp, Homo sapiens
tgaggataatcttta

SEQ ID NO: 915671 - DNA, 15 bp, Homo sapiens
atgaggataatcttt

SEQ ID NO: 915672 - DNA, 15 bp, Homo sapiens
aatgaggataatctt

SEQ ID NO: 915673 - DNA, 15 bp, Homo sapiens
taatgaggataatct

SEQ ID NO: 915674 - DNA, 15 bp, Homo sapiens
ttaatgaggataatc

SEQ ID NO: 915675 - DNA, 15 bp, Homo sapiens
attaatgaggataat

SEQ ID NO: 915676 - DNA, 15 bp, Homo sapiens
aattaatgaggataa

SEQ ID NO: 915677 - DNA, 15 bp, Homo sapiens
aaattaatgaggata

SEQ ID NO: 915678 - DNA, 15 bp, Homo sapiens
taaattaatgaggat

SEQ ID NO: 915679 - DNA, 15 bp, Homo sapiens
ataaattaatgagga

SEQ ID NO: 915680 - DNA, 15 bp, Homo sapiens
tataaattaatgagg

SEQ ID NO: 915681 - DNA, 15 bp, Homo sapiens
gtataaattaatgag

SEQ ID NO: 915682 - DNA, 15 bp, Homo sapiens
agtataaattaatga

SEQ ID NO: 915683 - DNA, 15 bp, Homo sapiens
tagtataaattaatg

SEQ ID NO: 915684 - DNA, 15 bp, Homo sapiens
ttagtataaattaat

SEQ ID NO: 915685 - DNA, 15 bp, Homo sapiens
tttagtataaattaa

SEQ ID NO: 915686 - DNA, 15 bp, Homo sapiens
gtttagtataaatta

SEQ ID NO: 915687 - DNA, 15 bp, Homo sapiens
agtttagtataaatt

SEQ ID NO: 915688 - DNA, 15 bp, Homo sapiens
tagtttagtataaat

SEQ ID NO: 915689 - DNA, 15 bp, Homo sapiens
atagtttagtataaa

SEQ ID NO: 915690 - DNA, 15 bp, Homo sapiens
aatagtttagtataa

SEQ ID NO: 915691 - DNA, 15 bp, Homo sapiens
caatagtttagtata

SEQ ID NO: 915692 - DNA, 15 bp, Homo sapiens
tcaatagtttagtat

SEQ ID NO: 915693 - DNA, 15 bp, Homo sapiens
ttcaatagtttagta

SEQ ID NO: 915694 - DNA, 15 bp, Homo sapiens
tttcaatagtttagt

SEQ ID NO: 915695 - DNA, 15 bp, Homo sapiens
gtttcaatagtttag

SEQ ID NO: 915696 - DNA, 15 bp, Homo sapiens
ggtttcaatagttta

SEQ ID NO: 915697 - DNA, 15 bp, Homo sapiens
aggtttcaatagttt

SEQ ID NO: 915698 - DNA, 15 bp, Homo sapiens
aaggtttcaatagtt

SEQ ID NO: 915699 - DNA, 15 bp, Homo sapiens
aaaggtttcaatagt

SEQ ID NO: 915700 - DNA, 15 bp, Homo sapiens
caaaggtttcaatag

SEQ ID NO: 915701 - DNA, 15 bp, Homo sapiens
tcaaaggtttcaata

SEQ ID NO: 915702 - DNA, 15 bp, Homo sapiens
ctcaaaggtttcaat

SEQ ID NO: 915703 - DNA, 15 bp, Homo sapiens
gctcaaaggtttcaa

SEQ ID NO: 915704 - DNA, 15 bp, Homo sapiens
tgctcaaaggtttca

SEQ ID NO: 915705 - DNA, 15 bp, Homo sapiens
atgctcaaaggtttc

SEQ ID NO: 915706 - DNA, 15 bp, Homo sapiens
aatgctcaaaggttt

SEQ ID NO: 915707 - DNA, 15 bp, Homo sapiens
aaatgctcaaaggtt

SEQ ID NO: 915708 - DNA, 15 bp, Homo sapiens
taaatgctcaaaggt

SEQ ID NO: 915709 - DNA, 15 bp, Homo sapiens
gtaaatgctcaaagg

SEQ ID NO: 915710 - DNA, 15 bp, Homo sapiens
agtaaatgctcaaag

SEQ ID NO: 915711 - DNA, 15 bp, Homo sapiens
aagtaaatgctcaaa

SEQ ID NO: 915712 - DNA, 15 bp, Homo sapiens
aaagtaaatgctcaa

SEQ ID NO: 915713 - DNA, 15 bp, Homo sapiens
aaaagtaaatgctca

SEQ ID NO: 915714 - DNA, 15 bp, Homo sapiens
aaaaagtaaatgctc

SEQ ID NO: 915715 - DNA, 15 bp, Homo sapiens
caaaaagtaaatgct

SEQ ID NO: 915716 - DNA, 15 bp, Homo sapiens
gcaaaaagtaaatgc

SEQ ID NO: 915717 - DNA, 15 bp, Homo sapiens
ggcaaaaagtaaatg

SEQ ID NO: 915718 - DNA, 15 bp, Homo sapiens
tggcaaaaagtaaat

SEQ ID NO: 915719 - DNA, 15 bp, Homo sapiens
ctggcaaaaagtaaa

SEQ ID NO: 915720 - DNA, 15 bp, Homo sapiens
tctggcaaaaagtaa

SEQ ID NO: 915721 - DNA, 15 bp, Homo sapiens
ttctggcaaaaagta

SEQ ID NO: 915722 - DNA, 15 bp, Homo sapiens
attctggcaaaaagt

SEQ ID NO: 915723 - DNA, 15 bp, Homo sapiens
aattctggcaaaaag

SEQ ID NO: 915724 - DNA, 15 bp, Homo sapiens
caattctggcaaaaa

SEQ ID NO: 915725 - DNA, 15 bp, Homo sapiens
acaattctggcaaaa

SEQ ID NO: 915726 - DNA, 15 bp, Homo sapiens
aacaattctggcaaa

SEQ ID NO: 915727 - DNA, 15 bp, Homo sapiens
aaacaattctggcaa

SEQ ID NO: 915728 - DNA, 15 bp, Homo sapiens
aaaacaattctggca

SEQ ID NO: 915729 - DNA, 15 bp, Homo sapiens
gaaaacaattctggc

SEQ ID NO: 915730 - DNA, 15 bp, Homo sapiens
tgaaaacaattctgg

SEQ ID NO: 915731 - DNA, 15 bp, Homo sapiens
ttgaaaacaattctg

SEQ ID NO: 915732 - DNA, 15 bp, Homo sapiens
tttgaaaacaattct

SEQ ID NO: 915733 - DNA, 15 bp, Homo sapiens
gtttgaaaacaattc

SEQ ID NO: 915734 - DNA, 15 bp, Homo sapiens
agtttgaaaacaatt

SEQ ID NO: 915735 - DNA, 15 bp, Homo sapiens
aagtttgaaaacaat

SEQ ID NO: 915736 - DNA, 15 bp, Homo sapiens
aaagtttgaaaacaa

SEQ ID NO: 915737 - DNA, 15 bp, Homo sapiens
aaaagtttgaaaaca

SEQ ID NO: 915738 - DNA, 15 bp, Homo sapiens
caaaagtttgaaaac

SEQ ID NO: 915739 - DNA, 15 bp, Homo sapiens
tcaaaagtttgaaaa

SEQ ID NO: 915740 - DNA, 15 bp, Homo sapiens
atcaaaagtttgaaa

SEQ ID NO: 915741 - DNA, 15 bp, Homo sapiens
gatcaaaagtttgaa

SEQ ID NO: 915742 - DNA, 15 bp, Homo sapiens
tgatcaaaagtttga

SEQ ID NO: 915743 - DNA, 15 bp, Homo sapiens
gtgatcaaaagtttg

SEQ ID NO: 915744 - DNA, 15 bp, Homo sapiens
tgtgatcaaaagttt

SEQ ID NO: 915745 - DNA, 15 bp, Homo sapiens
ctgtgatcaaaagtt

SEQ ID NO: 915746 - DNA, 15 bp, Homo sapiens
actgtgatcaaaagt

SEQ ID NO: 915747 - DNA, 15 bp, Homo sapiens
cactgtgatcaaaag

SEQ ID NO: 915748 - DNA, 15 bp, Homo sapiens
tcactgtgatcaaaa

SEQ ID NO: 915749 - DNA, 15 bp, Homo sapiens
atcactgtgatcaaa

SEQ ID NO: 915750 - DNA, 15 bp, Homo sapiens
aatcactgtgatcaa

SEQ ID NO: 915751 - DNA, 15 bp, Homo sapiens
aaatcactgtgatca

SEQ ID NO: 915752 - DNA, 15 bp, Homo sapiens
caaatcactgtgatc

SEQ ID NO: 915753 - DNA, 15 bp, Homo sapiens
acaaatcactgtgat

SEQ ID NO: 915754 - DNA, 15 bp, Homo sapiens
gacaaatcactgtga

SEQ ID NO: 915755 - DNA, 15 bp, Homo sapiens
ggacaaatcactgtg

SEQ ID NO: 915756 - DNA, 15 bp, Homo sapiens
tggacaaatcactgt

SEQ ID NO: 915757 - DNA, 15 bp, Homo sapiens
ttggacaaatcactg

SEQ ID NO: 915758 - DNA, 15 bp, Homo sapiens
tttggacaaatcact

SEQ ID NO: 915759 - DNA, 15 bp, Homo sapiens
atttggacaaatcac

SEQ ID NO: 915760 - DNA, 15 bp, Homo sapiens
tatttggacaaatca

SEQ ID NO: 915761 - DNA, 15 bp, Homo sapiens
ttatttggacaaatc

SEQ ID NO: 915762 - DNA, 15 bp, Homo sapiens
attatttggacaaat

SEQ ID NO: 915763 - DNA, 15 bp, Homo sapiens
gattatttggacaaa

SEQ ID NO: 915764 - DNA, 15 bp, Homo sapiens
tgattatttggacaa

SEQ ID NO: 915765 - DNA, 15 bp, Homo sapiens
ctgattatttggaca

SEQ ID NO: 915766 - DNA, 15 bp, Homo sapiens
actgattatttggac

SEQ ID NO: 915767 - DNA, 15 bp, Homo sapiens
aactgattatttgga

SEQ ID NO: 915768 - DNA, 15 bp, Homo sapiens
aaactgattatttgg

SEQ ID NO: 915769 - DNA, 15 bp, Homo sapiens
aaaactgattatttg

SEQ ID NO: 915770 - DNA, 15 bp, Homo sapiens
caaaactgattattt

SEQ ID NO: 915771 - DNA, 15 bp, Homo sapiens
ccaaaactgattatt

SEQ ID NO: 915772 - DNA, 15 bp, Homo sapiens
accaaaactgattat

SEQ ID NO: 915773 - DNA, 15 bp, Homo sapiens
caccaaaactgatta

SEQ ID NO: 915774 - DNA, 15 bp, Homo sapiens
tcaccaaaactgatt

SEQ ID NO: 915775 - DNA, 15 bp, Homo sapiens
ttcaccaaaactgat

SEQ ID NO: 915776 - DNA, 15 bp, Homo sapiens
cttcaccaaaactga

SEQ ID NO: 915777 - DNA, 15 bp, Homo sapiens
gcttcaccaaaactg

SEQ ID NO: 915778 - DNA, 15 bp, Homo sapiens
tgcttcaccaaaact

SEQ ID NO: 915779 - DNA, 15 bp, Homo sapiens
ctgcttcaccaaaac

SEQ ID NO: 915780 - DNA, 15 bp, Homo sapiens
gctgcttcaccaaaa

SEQ ID NO: 915781 - DNA, 15 bp, Homo sapiens
tgctgcttcaccaaa

SEQ ID NO: 915782 - DNA, 15 bp, Homo sapiens
ctgctgcttcaccaa

SEQ ID NO: 915783 - DNA, 15 bp, Homo sapiens
cctgctgcttcacca

SEQ ID NO: 915784 - DNA, 15 bp, Homo sapiens
tcctgctgcttcacc

SEQ ID NO: 915785 - DNA, 15 bp, Homo sapiens
atcctgctgcttcac

SEQ ID NO: 915786 - DNA, 15 bp, Homo sapiens
aatcctgctgcttca

SEQ ID NO: 915787 - DNA, 15 bp, Homo sapiens
taatcctgctgcttc

SEQ ID NO: 915788 - DNA, 15 bp, Homo sapiens
gtaatcctgctgctt

SEQ ID NO: 915789 - DNA, 15 bp, Homo sapiens
agtaatcctgctgct

SEQ ID NO: 915790 - DNA, 15 bp, Homo sapiens
aagtaatcctgctgc

SEQ ID NO: 915791 - DNA, 15 bp, Homo sapiens
aaagtaatcctgctg

SEQ ID NO: 915792 - DNA, 15 bp, Homo sapiens
aaaagtaatcctgct

SEQ ID NO: 915793 - DNA, 15 bp, Homo sapiens
aaaaagtaatcctgc

SEQ ID NO: 915794 - DNA, 15 bp, Homo sapiens
aaaaaagtaatcctg

SEQ ID NO: 915795 - DNA, 15 bp, Homo sapiens
aaaaaaagtaatcct

SEQ ID NO: 915796 - DNA, 15 bp, Homo sapiens
aaaaaaaagtaatcc

SEQ ID NO: 915797 - DNA, 15 bp, Homo sapiens
taaaaaaaagtaatc

SEQ ID NO: 915798 - DNA, 15 bp, Homo sapiens
ataaaaaaaagtaat

SEQ ID NO: 915799 - DNA, 15 bp, Homo sapiens
aataaaaaaaagtaa

SEQ ID NO: 915800 - DNA, 15 bp, Homo sapiens
taataaaaaaaagta

SEQ ID NO: 915801 - DNA, 15 bp, Homo sapiens
ataataaaaaaaagt

SEQ ID NO: 915802 - DNA, 15 bp, Homo sapiens
gataataaaaaaaag

SEQ ID NO: 915803 - DNA, 15 bp, Homo sapiens
agataataaaaaaaa

SEQ ID NO: 915804 - DNA, 15 bp, Homo sapiens
cagataataaaaaaa

SEQ ID NO: 915805 - DNA, 15 bp, Homo sapiens
acagataataaaaaa

SEQ ID NO: 915806 - DNA, 15 bp, Homo sapiens
cacagataataaaaa

SEQ ID NO: 915807 - DNA, 15 bp, Homo sapiens
acacagataataaaa

SEQ ID NO: 915808 - DNA, 15 bp, Homo sapiens
aacacagataataaa

SEQ ID NO: 915809 - DNA, 15 bp, Homo sapiens
gaacacagataataa

SEQ ID NO: 915810 - DNA, 15 bp, Homo sapiens
tgaacacagataata

SEQ ID NO: 915811 - DNA, 15 bp, Homo sapiens
atgaacacagataat

SEQ ID NO: 915812 - DNA, 15 bp, Homo sapiens
aatgaacacagataa

SEQ ID NO: 915813 - DNA, 15 bp, Homo sapiens
caatgaacacagata

SEQ ID NO: 915814 - DNA, 15 bp, Homo sapiens
ccaatgaacacagat

SEQ ID NO: 915815 - DNA, 15 bp, Homo sapiens
cccaatgaacacaga

SEQ ID NO: 915816 - DNA, 15 bp, Homo sapiens
gcccaatgaacacag

SEQ ID NO: 915817 - DNA, 15 bp, Homo sapiens
ggcccaatgaacaca

SEQ ID NO: 915818 - DNA, 15 bp, Homo sapiens
tggcccaatgaacac

SEQ ID NO: 915819 - DNA, 15 bp, Homo sapiens
gtggcccaatgaaca

SEQ ID NO: 915820 - DNA, 15 bp, Homo sapiens
ggtggcccaatgaac

SEQ ID NO: 915821 - DNA, 15 bp, Homo sapiens
tggtggcccaatgaa

SEQ ID NO: 915822 - DNA, 15 bp, Homo sapiens
atggtggcccaatga

SEQ ID NO: 915823 - DNA, 15 bp, Homo sapiens
catggtggcccaatg

SEQ ID NO: 915824 - DNA, 15 bp, Homo sapiens
acatggtggcccaat

SEQ ID NO: 915825 - DNA, 15 bp, Homo sapiens
tacatggtggcccaa

SEQ ID NO: 915826 - DNA, 15 bp, Homo sapiens
ctacatggtggccca

SEQ ID NO: 915827 - DNA, 15 bp, Homo sapiens
tctacatggtggccc

SEQ ID NO: 915828 - DNA, 15 bp, Homo sapiens
atctacatggtggcc

SEQ ID NO: 915829 - DNA, 15 bp, Homo sapiens
catctacatggtggc

SEQ ID NO: 915830 - DNA, 15 bp, Homo sapiens
acatctacatggtgg

SEQ ID NO: 915831 - DNA, 15 bp, Homo sapiens
cacatctacatggtg

SEQ ID NO: 915832 - DNA, 15 bp, Homo sapiens
tcacatctacatggt

SEQ ID NO: 915833 - DNA, 15 bp, Homo sapiens
gtcacatctacatgg

SEQ ID NO: 915834 - DNA, 15 bp, Homo sapiens
tgtcacatctacatg

SEQ ID NO: 915835 - DNA, 15 bp, Homo sapiens
gtgtcacatctacat

SEQ ID NO: 915836 - DNA, 15 bp, Homo sapiens
ggtgtcacatctaca

SEQ ID NO: 915837 - DNA, 15 bp, Homo sapiens
tggtgtcacatctac

SEQ ID NO: 915838 - DNA, 15 bp, Homo sapiens
gtggtgtcacatcta

SEQ ID NO: 915839 - DNA, 15 bp, Homo sapiens
agtggtgtcacatct

SEQ ID NO: 915840 - DNA, 15 bp, Homo sapiens
cagtggtgtcacatc

SEQ ID NO: 915841 - DNA, 15 bp, Homo sapiens
ccagtggtgtcacat

SEQ ID NO: 915842 - DNA, 15 bp, Homo sapiens
gccagtggtgtcaca

SEQ ID NO: 915843 - DNA, 15 bp, Homo sapiens
ggccagtggtgtcac

SEQ ID NO: 915844 - DNA, 15 bp, Homo sapiens
tggccagtggtgtca

SEQ ID NO: 915845 - DNA, 15 bp, Homo sapiens
ttggccagtggtgtc

SEQ ID NO: 915846 - DNA, 15 bp, Homo sapiens
attggccagtggtgt

SEQ ID NO: 915847 - DNA, 15 bp, Homo sapiens
aattggccagtggtg

SEQ ID NO: 915848 - DNA, 15 bp, Homo sapiens
aaattggccagtggt

SEQ ID NO: 915849 - DNA, 15 bp, Homo sapiens
caaattggccagtgg

SEQ ID NO: 915850 - DNA, 15 bp, Homo sapiens
tcaaattggccagtg

SEQ ID NO: 915851 - DNA, 15 bp, Homo sapiens
gtcaaattggccagt

SEQ ID NO: 915852 - DNA, 15 bp, Homo sapiens
tgtcaaattggccag

SEQ ID NO: 915853 - DNA, 15 bp, Homo sapiens
ctgtcaaattggcca

SEQ ID NO: 915854 - DNA, 15 bp, Homo sapiens
tctgtcaaattggcc

SEQ ID NO: 915855 - DNA, 15 bp, Homo sapiens
ttctgtcaaattggc

SEQ ID NO: 915856 - DNA, 15 bp, Homo sapiens
attctgtcaaattgg

SEQ ID NO: 915857 - DNA, 15 bp, Homo sapiens
aattctgtcaaattg

SEQ ID NO: 915858 - DNA, 15 bp, Homo sapiens
aaattctgtcaaatt

SEQ ID NO: 915859 - DNA, 15 bp, Homo sapiens
taaattctgtcaaat

SEQ ID NO: 915860 - DNA, 15 bp, Homo sapiens
ataaattctgtcaaa

SEQ ID NO: 915861 - DNA, 15 bp, Homo sapiens
cataaattctgtcaa

SEQ ID NO: 915862 - DNA, 15 bp, Homo sapiens
tcataaattctgtca

SEQ ID NO: 915863 - DNA, 15 bp, Homo sapiens
gtcataaattctgtc

SEQ ID NO: 915864 - DNA, 15 bp, Homo sapiens
tgtcataaattctgt

SEQ ID NO: 915865 - DNA, 15 bp, Homo sapiens
ctgtcataaattctg

SEQ ID NO: 915866 - DNA, 15 bp, Homo sapiens
cctgtcataaattct

SEQ ID NO: 915867 - DNA, 15 bp, Homo sapiens
tcctgtcataaattc

SEQ ID NO: 915868 - DNA, 15 bp, Homo sapiens
ttcctgtcataaatt

SEQ ID NO: 915869 - DNA, 15 bp, Homo sapiens
gttcctgtcataaat

SEQ ID NO: 915870 - DNA, 15 bp, Homo sapiens
tgttcctgtcataaa

SEQ ID NO: 915871 - DNA, 15 bp, Homo sapiens
atgttcctgtcataa

SEQ ID NO: 915872 - DNA, 15 bp, Homo sapiens
tatgttcctgtcata

SEQ ID NO: 915873 - DNA, 15 bp, Homo sapiens
gtatgttcctgtcat

SEQ ID NO: 915874 - DNA, 15 bp, Homo sapiens
agtatgttcctgtca

SEQ ID NO: 915875 - DNA, 15 bp, Homo sapiens
cagtatgttcctgtc

SEQ ID NO: 915876 - DNA, 15 bp, Homo sapiens
acagtatgttcctgt

SEQ ID NO: 915877 - DNA, 15 bp, Homo sapiens
cacagtatgttcctg

SEQ ID NO: 915878 - DNA, 15 bp, Homo sapiens
acacagtatgttcct

SEQ ID NO: 915879 - DNA, 15 bp, Homo sapiens
gacacagtatgttcc

SEQ ID NO: 915880 - DNA, 15 bp, Homo sapiens
tgacacagtatgttc

SEQ ID NO: 915881 - DNA, 15 bp, Homo sapiens
ttgacacagtatgtt

SEQ ID NO: 915882 - DNA, 15 bp, Homo sapiens
attgacacagtatgt

SEQ ID NO: 915883 - DNA, 15 bp, Homo sapiens
tattgacacagtatg

SEQ ID NO: 915884 - DNA, 15 bp, Homo sapiens
gtattgacacagtat

SEQ ID NO: 915885 - DNA, 15 bp, Homo sapiens
tgtattgacacagta

SEQ ID NO: 915886 - DNA, 15 bp, Homo sapiens
ttgtattgacacagt

SEQ ID NO: 915887 - DNA, 15 bp, Homo sapiens
gttgtattgacacag

SEQ ID NO: 915888 - DNA, 15 bp, Homo sapiens
ggttgtattgacaca

SEQ ID NO: 915889 - DNA, 15 bp, Homo sapiens
aggttgtattgacac

SEQ ID NO: 915890 - DNA, 15 bp, Homo sapiens
caggttgtattgaca

SEQ ID NO: 915891 - DNA, 15 bp, Homo sapiens
gcaggttgtattgac

SEQ ID NO: 915892 - DNA, 15 bp, Homo sapiens
agcaggttgtattga

SEQ ID NO: 915893 - DNA, 15 bp, Homo sapiens
gagcaggttgtattg

SEQ ID NO: 915894 - DNA, 15 bp, Homo sapiens
agagcaggttgtatt

SEQ ID NO: 915895 - DNA, 15 bp, Homo sapiens
gagagcaggttgtat

SEQ ID NO: 915896 - DNA, 15 bp, Homo sapiens
ggagagcaggttgta

SEQ ID NO: 915897 - DNA, 15 bp, Homo sapiens
tggagagcaggttgt

SEQ ID NO: 915898 - DNA, 15 bp, Homo sapiens
gtggagagcaggttg

SEQ ID NO: 915899 - DNA, 15 bp, Homo sapiens
agtggagagcaggtt

SEQ ID NO: 915900 - DNA, 15 bp, Homo sapiens
aagtggagagcaggt

SEQ ID NO: 915901 - DNA, 15 bp, Homo sapiens
aaagtggagagcagg

SEQ ID NO: 915902 - DNA, 15 bp, Homo sapiens
aaaagtggagagcag

SEQ ID NO: 915903 - DNA, 15 bp, Homo sapiens
aaaaagtggagagca

SEQ ID NO: 915904 - DNA, 15 bp, Homo sapiens
taaaaagtggagagc

SEQ ID NO: 915905 - DNA, 15 bp, Homo sapiens
ataaaaagtggagag

SEQ ID NO: 915906 - DNA, 15 bp, Homo sapiens
tataaaaagtggaga

SEQ ID NO: 915907 - DNA, 15 bp, Homo sapiens
gtataaaaagtggag

SEQ ID NO: 915908 - DNA, 15 bp, Homo sapiens
agtataaaaagtgga

SEQ ID NO: 915909 - DNA, 15 bp, Homo sapiens
aagtataaaaagtgg

SEQ ID NO: 915910 - DNA, 15 bp, Homo sapiens
aaagtataaaaagtg

SEQ ID NO: 915911 - DNA, 15 bp, Homo sapiens
aaaagtataaaaagt

SEQ ID NO: 915912 - DNA, 15 bp, Homo sapiens
aaaaagtataaaaag

SEQ ID NO: 915913 - DNA, 15 bp, Homo sapiens
gaaaaagtataaaaa

SEQ ID NO: 915914 - DNA, 15 bp, Homo sapiens
tgaaaaagtataaaa

SEQ ID NO: 915915 - DNA, 15 bp, Homo sapiens
atgaaaaagtataaa

SEQ ID NO: 915916 - DNA, 15 bp, Homo sapiens
aatgaaaaagtataa

SEQ ID NO: 915917 - DNA, 15 bp, Homo sapiens
caatgaaaaagtata

SEQ ID NO: 915918 - DNA, 15 bp, Homo sapiens
ccaatgaaaaagtat

SEQ ID NO: 915919 - DNA, 15 bp, Homo sapiens
accaatgaaaaagta

SEQ ID NO: 915920 - DNA, 15 bp, Homo sapiens
aaccaatgaaaaagt

SEQ ID NO: 915921 - DNA, 15 bp, Homo sapiens
taaccaatgaaaaag

SEQ ID NO: 915922 - DNA, 15 bp, Homo sapiens
gtaaccaatgaaaaa

SEQ ID NO: 915923 - DNA, 15 bp, Homo sapiens
tgtaaccaatgaaaa

SEQ ID NO: 915924 - DNA, 15 bp, Homo sapiens
ttgtaaccaatgaaa

SEQ ID NO: 915925 - DNA, 15 bp, Homo sapiens
gttgtaaccaatgaa

SEQ ID NO: 915926 - DNA, 15 bp, Homo sapiens
agttgtaaccaatga

SEQ ID NO: 915927 - DNA, 15 bp, Homo sapiens
tagttgtaaccaatg

SEQ ID NO: 915928 - DNA, 15 bp, Homo sapiens
ttagttgtaaccaat

SEQ ID NO: 915929 - DNA, 15 bp, Homo sapiens
attagttgtaaccaa

SEQ ID NO: 915930 - DNA, 15 bp, Homo sapiens
aattagttgtaacca

SEQ ID NO: 915931 - DNA, 15 bp, Homo sapiens
gaattagttgtaacc

SEQ ID NO: 915932 - DNA, 15 bp, Homo sapiens
tgaattagttgtaac

SEQ ID NO: 915933 - DNA, 15 bp, Homo sapiens
ttgaattagttgtaa

SEQ ID NO: 915934 - DNA, 15 bp, Homo sapiens
cttgaattagttgta

SEQ ID NO: 915935 - DNA, 15 bp, Homo sapiens
gcttgaattagttgt

SEQ ID NO: 915936 - DNA, 15 bp, Homo sapiens
tgcttgaattagttg

SEQ ID NO: 915937 - DNA, 15 bp, Homo sapiens
ttgcttgaattagtt

SEQ ID NO: 915938 - DNA, 15 bp, Homo sapiens
gttgcttgaattagt

SEQ ID NO: 915939 - DNA, 15 bp, Homo sapiens
agttgcttgaattag

SEQ ID NO: 915940 - DNA, 15 bp, Homo sapiens
tagttgcttgaatta

SEQ ID NO: 915941 - DNA, 15 bp, Homo sapiens
ttagttgcttgaatt

SEQ ID NO: 915942 - DNA, 15 bp, Homo sapiens
attagttgcttgaat

SEQ ID NO: 915943 - DNA, 15 bp, Homo sapiens
cattagttgcttgaa

SEQ ID NO: 915944 - DNA, 15 bp, Homo sapiens
tcattagttgcttga

SEQ ID NO: 915945 - DNA, 15 bp, Homo sapiens
gtcattagttgcttg

SEQ ID NO: 915946 - DNA, 15 bp, Homo sapiens
agtcattagttgctt

SEQ ID NO: 915947 - DNA, 15 bp, Homo sapiens
aagtcattagttgct

SEQ ID NO: 915948 - DNA, 15 bp, Homo sapiens
taagtcattagttgc

SEQ ID NO: 915949 - DNA, 15 bp, Homo sapiens
gtaagtcattagttg

SEQ ID NO: 915950 - DNA, 15 bp, Homo sapiens
agtaagtcattagtt

SEQ ID NO: 915951 - DNA, 15 bp, Homo sapiens
aagtaagtcattagt

SEQ ID NO: 915952 - DNA, 15 bp, Homo sapiens
taagtaagtcattag

SEQ ID NO: 915953 - DNA, 15 bp, Homo sapiens
ataagtaagtcatta

SEQ ID NO: 915954 - DNA, 15 bp, Homo sapiens
aataagtaagtcatt

SEQ ID NO: 915955 - DNA, 15 bp, Homo sapiens
gaataagtaagtcat

SEQ ID NO: 915956 - DNA, 15 bp, Homo sapiens
agaataagtaagtca

SEQ ID NO: 915957 - DNA, 15 bp, Homo sapiens
tagaataagtaagtc

SEQ ID NO: 915958 - DNA, 15 bp, Homo sapiens
gtagaataagtaagt

SEQ ID NO: 915959 - DNA, 15 bp, Homo sapiens
agtagaataagtaag

SEQ ID NO: 915960 - DNA, 15 bp, Homo sapiens
cagtagaataagtaa

SEQ ID NO: 915961 - DNA, 15 bp, Homo sapiens
ccagtagaataagta

SEQ ID NO: 915962 - DNA, 15 bp, Homo sapiens
accagtagaataagt

SEQ ID NO: 915963 - DNA, 15 bp, Homo sapiens
taccagtagaataag

SEQ ID NO: 915964 - DNA, 15 bp, Homo sapiens
ataccagtagaataa

SEQ ID NO: 915965 - DNA, 15 bp, Homo sapiens
aataccagtagaata

SEQ ID NO: 915966 - DNA, 15 bp, Homo sapiens
caataccagtagaat

SEQ ID NO: 915967 - DNA, 15 bp, Homo sapiens
gcaataccagtagaa

SEQ ID NO: 915968 - DNA, 15 bp, Homo sapiens
agcaataccagtaga

SEQ ID NO: 915969 - DNA, 15 bp, Homo sapiens
cagcaataccagtag

SEQ ID NO: 915970 - DNA, 15 bp, Homo sapiens
tcagcaataccagta

SEQ ID NO: 915971 - DNA, 15 bp, Homo sapiens
atcagcaataccagt

SEQ ID NO: 915972 - DNA, 15 bp, Homo sapiens
aatcagcaataccag

SEQ ID NO: 915973 - DNA, 15 bp, Homo sapiens
aaatcagcaatacca

SEQ ID NO: 915974 - DNA, 15 bp, Homo sapiens
caaatcagcaatacc

SEQ ID NO: 915975 - DNA, 15 bp, Homo sapiens
gcaaatcagcaatac

SEQ ID NO: 915976 - DNA, 15 bp, Homo sapiens
agcaaatcagcaata

SEQ ID NO: 915977 - DNA, 15 bp, Homo sapiens
aagcaaatcagcaat

SEQ ID NO: 915978 - DNA, 15 bp, Homo sapiens
aaagcaaatcagcaa

SEQ ID NO: 915979 - DNA, 15 bp, Homo sapiens
aaaagcaaatcagca

SEQ ID NO: 915980 - DNA, 15 bp, Homo sapiens
taaaagcaaatcagc

SEQ ID NO: 915981 - DNA, 15 bp, Homo sapiens
gtaaaagcaaatcag

SEQ ID NO: 915982 - DNA, 15 bp, Homo sapiens
agtaaaagcaaatca

SEQ ID NO: 915983 - DNA, 15 bp, Homo sapiens
tagtaaaagcaaatc

SEQ ID NO: 915984 - DNA, 15 bp, Homo sapiens
ttagtaaaagcaaat

SEQ ID NO: 915985 - DNA, 15 bp, Homo sapiens
attagtaaaagcaaa

SEQ ID NO: 915986 - DNA, 15 bp, Homo sapiens
aattagtaaaagcaa

SEQ ID NO: 915987 - DNA, 15 bp, Homo sapiens
gaattagtaaaagca

SEQ ID NO: 915988 - DNA, 15 bp, Homo sapiens
agaattagtaaaagc

SEQ ID NO: 915989 - DNA, 15 bp, Homo sapiens
aagaattagtaaaag

SEQ ID NO: 915990 - DNA, 15 bp, Homo sapiens
aaagaattagtaaaa

SEQ ID NO: 915991 - DNA, 15 bp, Homo sapiens
aaaagaattagtaaa

SEQ ID NO: 915992 - DNA, 15 bp, Homo sapiens
taaaagaattagtaa

SEQ ID NO: 915993 - DNA, 15 bp, Homo sapiens
ctaaaagaattagta

SEQ ID NO: 915994 - DNA, 15 bp, Homo sapiens
actaaaagaattagt

SEQ ID NO: 915995 - DNA, 15 bp, Homo sapiens
tactaaaagaattag

SEQ ID NO: 915996 - DNA, 15 bp, Homo sapiens
atactaaaagaatta

SEQ ID NO: 915997 - DNA, 15 bp, Homo sapiens
aatactaaaagaatt

SEQ ID NO: 915998 - DNA, 15 bp, Homo sapiens
aaatactaaaagaat

SEQ ID NO: 915999 - DNA, 15 bp, Homo sapiens
aaaatactaaaagaa

SEQ ID NO: 916000 - DNA, 15 bp, Homo sapiens
caaaatactaaaaga

SEQ ID NO: 916001 - DNA, 15 bp, Homo sapiens
ccaaaatactaaaag

SEQ ID NO: 916002 - DNA, 15 bp, Homo sapiens
accaaaatactaaaa

SEQ ID NO: 916003 - DNA, 15 bp, Homo sapiens
taccaaaatactaaa

SEQ ID NO: 916004 - DNA, 15 bp, Homo sapiens
ttaccaaaatactaa

SEQ ID NO: 916005 - DNA, 15 bp, Homo sapiens
cttaccaaaatacta

SEQ ID NO: 916006 - DNA, 15 bp, Homo sapiens
acttaccaaaatact

SEQ ID NO: 916007 - DNA, 15 bp, Homo sapiens
cacttaccaaaatac

SEQ ID NO: 916008 - DNA, 15 bp, Homo sapiens
acacttaccaaaata

SEQ ID NO: 916009 - DNA, 15 bp, Homo sapiens
aacacttaccaaaat

SEQ ID NO: 916010 - DNA, 15 bp, Homo sapiens
aaacacttaccaaaa

SEQ ID NO: 916011 - DNA, 15 bp, Homo sapiens
aaaacacttaccaaa

SEQ ID NO: 916012 - DNA, 15 bp, Homo sapiens
aaaaacacttaccaa

SEQ ID NO: 916013 - DNA, 15 bp, Homo sapiens
aaaaaacacttacca

SEQ ID NO: 916014 - DNA, 15 bp, Homo sapiens
taaaaaacacttacc

SEQ ID NO: 916015 - DNA, 15 bp, Homo sapiens
ataaaaaacacttac

SEQ ID NO: 916016 - DNA, 15 bp, Homo sapiens
tataaaaaacactta

SEQ ID NO: 916017 - DNA, 15 bp, Homo sapiens
atataaaaaacactt

SEQ ID NO: 916018 - DNA, 15 bp, Homo sapiens
catataaaaaacact

SEQ ID NO: 916019 - DNA, 15 bp, Homo sapiens
acatataaaaaacac

SEQ ID NO: 916020 - DNA, 15 bp, Homo sapiens
tacatataaaaaaca

SEQ ID NO: 916021 - DNA, 15 bp, Homo sapiens
ttacatataaaaaac

SEQ ID NO: 916022 - DNA, 15 bp, Homo sapiens
attacatataaaaaa

SEQ ID NO: 916023 - DNA, 15 bp, Homo sapiens
cattacatataaaaa

SEQ ID NO: 916024 - DNA, 15 bp, Homo sapiens
gcattacatataaaa

SEQ ID NO: 916025 - DNA, 15 bp, Homo sapiens
tgcattacatataaa

SEQ ID NO: 916026 - DNA, 15 bp, Homo sapiens
atgcattacatataa

SEQ ID NO: 916027 - DNA, 15 bp, Homo sapiens
tatgcattacatata

SEQ ID NO: 916028 - DNA, 15 bp, Homo sapiens
atatgcattacatat

SEQ ID NO: 916029 - DNA, 15 bp, Homo sapiens
aatatgcattacata

SEQ ID NO: 916030 - DNA, 15 bp, Homo sapiens
gaatatgcattacat

SEQ ID NO: 916031 - DNA, 15 bp, Homo sapiens
tgaatatgcattaca

SEQ ID NO: 916032 - DNA, 15 bp, Homo sapiens
ctgaatatgcattac

SEQ ID NO: 916033 - DNA, 15 bp, Homo sapiens
tctgaatatgcatta

SEQ ID NO: 916034 - DNA, 15 bp, Homo sapiens
ctctgaatatgcatt

SEQ ID NO: 916035 - DNA, 15 bp, Homo sapiens
actctgaatatgcat

SEQ ID NO: 916036 - DNA, 15 bp, Homo sapiens
gactctgaatatgca

SEQ ID NO: 916037 - DNA, 15 bp, Homo sapiens
tgactctgaatatgc

SEQ ID NO: 916038 - DNA, 15 bp, Homo sapiens
gtgactctgaatatg

SEQ ID NO: 916039 - DNA, 15 bp, Homo sapiens
agtgactctgaatat

SEQ ID NO: 916040 - DNA, 15 bp, Homo sapiens
aagtgactctgaata

SEQ ID NO: 916041 - DNA, 15 bp, Homo sapiens
aaagtgactctgaat

SEQ ID NO: 916042 - DNA, 15 bp, Homo sapiens
caaagtgactctgaa

SEQ ID NO: 916043 - DNA, 15 bp, Homo sapiens
gcaaagtgactctga

SEQ ID NO: 916044 - DNA, 15 bp, Homo sapiens
ggcaaagtgactctg

SEQ ID NO: 916045 - DNA, 15 bp, Homo sapiens
aggcaaagtgactct

SEQ ID NO: 916046 - DNA, 15 bp, Homo sapiens
aaggcaaagtgactc

SEQ ID NO: 916047 - DNA, 15 bp, Homo sapiens
aaaggcaaagtgact

SEQ ID NO: 916048 - DNA, 15 bp, Homo sapiens
taaaggcaaagtgac

SEQ ID NO: 916049 - DNA, 15 bp, Homo sapiens
ctaaaggcaaagtga

SEQ ID NO: 916050 - DNA, 15 bp, Homo sapiens
cctaaaggcaaagtg

SEQ ID NO: 916051 - DNA, 15 bp, Homo sapiens
tcctaaaggcaaagt

SEQ ID NO: 916052 - DNA, 15 bp, Homo sapiens
atcctaaaggcaaag

SEQ ID NO: 916053 - DNA, 15 bp, Homo sapiens
tatcctaaaggcaaa

SEQ ID NO: 916054 - DNA, 15 bp, Homo sapiens
atatcctaaaggcaa

SEQ ID NO: 916055 - DNA, 15 bp, Homo sapiens
aatatcctaaaggca

SEQ ID NO: 916056 - DNA, 15 bp, Homo sapiens
taatatcctaaaggc

SEQ ID NO: 916057 - DNA, 15 bp, Homo sapiens
ataatatcctaaagg

SEQ ID NO: 916058 - DNA, 15 bp, Homo sapiens
tataatatcctaaag

SEQ ID NO: 916059 - DNA, 15 bp, Homo sapiens
gtataatatcctaaa

SEQ ID NO: 916060 - DNA, 15 bp, Homo sapiens
agtataatatcctaa

SEQ ID NO: 916061 - DNA, 15 bp, Homo sapiens
cagtataatatccta

SEQ ID NO: 916062 - DNA, 15 bp, Homo sapiens
ccagtataatatcct

SEQ ID NO: 916063 - DNA, 15 bp, Homo sapiens
tccagtataatatcc

SEQ ID NO: 916064 - DNA, 15 bp, Homo sapiens
ttccagtataatatc

SEQ ID NO: 916065 - DNA, 15 bp, Homo sapiens
tttccagtataatat

SEQ ID NO: 916066 - DNA, 15 bp, Homo sapiens
ctttccagtataata

SEQ ID NO: 916067 - DNA, 15 bp, Homo sapiens
actttccagtataat

SEQ ID NO: 916068 - DNA, 15 bp, Homo sapiens
aactttccagtataa

SEQ ID NO: 916069 - DNA, 15 bp, Homo sapiens
aaactttccagtata

SEQ ID NO: 916070 - DNA, 15 bp, Homo sapiens
aaaactttccagtat

SEQ ID NO: 916071 - DNA, 15 bp, Homo sapiens
taaaactttccagta

SEQ ID NO: 916072 - DNA, 15 bp, Homo sapiens
ttaaaactttccagt

SEQ ID NO: 916073 - DNA, 15 bp, Homo sapiens
gttaaaactttccag

SEQ ID NO: 916074 - DNA, 15 bp, Homo sapiens
agttaaaactttcca

SEQ ID NO: 916075 - DNA, 15 bp, Homo sapiens
cagttaaaactttcc

SEQ ID NO: 916076 - DNA, 15 bp, Homo sapiens
acagttaaaactttc

SEQ ID NO: 916077 - DNA, 15 bp, Homo sapiens
aacagttaaaacttt

SEQ ID NO: 916078 - DNA, 15 bp, Homo sapiens
caacagttaaaactt

SEQ ID NO: 916079 - DNA, 15 bp, Homo sapiens
gcaacagttaaaact

SEQ ID NO: 916080 - DNA, 15 bp, Homo sapiens
tgcaacagttaaaac

SEQ ID NO: 916081 - DNA, 15 bp, Homo sapiens
atgcaacagttaaaa

SEQ ID NO: 916082 - DNA, 15 bp, Homo sapiens
tatgcaacagttaaa

SEQ ID NO: 916083 - DNA, 15 bp, Homo sapiens
atatgcaacagttaa

SEQ ID NO: 916084 - DNA, 15 bp, Homo sapiens
aatatgcaacagtta

SEQ ID NO: 916085 - DNA, 15 bp, Homo sapiens
taatatgcaacagtt

SEQ ID NO: 916086 - DNA, 15 bp, Homo sapiens
gtaatatgcaacagt

SEQ ID NO: 916087 - DNA, 15 bp, Homo sapiens
tgtaatatgcaacag

SEQ ID NO: 916088 - DNA, 15 bp, Homo sapiens
atgtaatatgcaaca

SEQ ID NO: 916089 - DNA, 15 bp, Homo sapiens
gatgtaatatgcaac

SEQ ID NO: 916090 - DNA, 15 bp, Homo sapiens
tgatgtaatatgcaa

SEQ ID NO: 916091 - DNA, 15 bp, Homo sapiens
atgatgtaatatgca

SEQ ID NO: 916092 - DNA, 15 bp, Homo sapiens
aatgatgtaatatgc

SEQ ID NO: 916093 - DNA, 15 bp, Homo sapiens
taatgatgtaatatg

SEQ ID NO: 916094 - DNA, 15 bp, Homo sapiens
ataatgatgtaatat

SEQ ID NO: 916095 - DNA, 15 bp, Homo sapiens
aataatgatgtaata

SEQ ID NO: 916096 - DNA, 15 bp, Homo sapiens
taataatgatgtaat

SEQ ID NO: 916097 - DNA, 15 bp, Homo sapiens
ataataatgatgtaa

SEQ ID NO: 916098 - DNA, 15 bp, Homo sapiens
aataataatgatgta

SEQ ID NO: 916099 - DNA, 15 bp, Homo sapiens
taataataatgatgt

SEQ ID NO: 916100 - DNA, 15 bp, Homo sapiens
gtaataataatgatg

SEQ ID NO: 916101 - DNA, 15 bp, Homo sapiens
agtaataataatgat

SEQ ID NO: 916102 - DNA, 15 bp, Homo sapiens
cagtaataataatga

SEQ ID NO: 916103 - DNA, 15 bp, Homo sapiens
ccagtaataataatg

SEQ ID NO: 916104 - DNA, 15 bp, Homo sapiens
tccagtaataataat

SEQ ID NO: 916105 - DNA, 15 bp, Homo sapiens
atccagtaataataa

SEQ ID NO: 916106 - DNA, 15 bp, Homo sapiens
aatccagtaataata

SEQ ID NO: 916107 - DNA, 15 bp, Homo sapiens
aaatccagtaataat

SEQ ID NO: 916108 - DNA, 15 bp, Homo sapiens
caaatccagtaataa

SEQ ID NO: 916109 - DNA, 15 bp, Homo sapiens
ccaaatccagtaata

SEQ ID NO: 916110 - DNA, 15 bp, Homo sapiens
accaaatccagtaat

SEQ ID NO: 916111 - DNA, 15 bp, Homo sapiens
aaccaaatccagtaa

SEQ ID NO: 916112 - DNA, 15 bp, Homo sapiens
aaaccaaatccagta

SEQ ID NO: 916113 - DNA, 15 bp, Homo sapiens
taaaccaaatccagt

SEQ ID NO: 916114 - DNA, 15 bp, Homo sapiens
ataaaccaaatccag

SEQ ID NO: 916115 - DNA, 15 bp, Homo sapiens
tataaaccaaatcca

SEQ ID NO: 916116 - DNA, 15 bp, Homo sapiens
ttataaaccaaatcc

SEQ ID NO: 916117 - DNA, 15 bp, Homo sapiens
tttataaaccaaatc

SEQ ID NO: 916118 - DNA, 15 bp, Homo sapiens
ttttataaaccaaat

SEQ ID NO: 916119 - DNA, 15 bp, Homo sapiens
cttttataaaccaaa

SEQ ID NO: 916120 - DNA, 15 bp, Homo sapiens
gcttttataaaccaa

SEQ ID NO: 916121 - DNA, 15 bp, Homo sapiens
tgcttttataaacca

SEQ ID NO: 916122 - DNA, 15 bp, Homo sapiens
gtgcttttataaacc

SEQ ID NO: 916123 - DNA, 15 bp, Homo sapiens
tgtgcttttataaac

SEQ ID NO: 916124 - DNA, 15 bp, Homo sapiens
ttgtgcttttataaa

SEQ ID NO: 916125 - DNA, 15 bp, Homo sapiens
attgtgcttttataa

SEQ ID NO: 916126 - DNA, 15 bp, Homo sapiens
tattgtgcttttata

SEQ ID NO: 916127 - DNA, 15 bp, Homo sapiens
ttattgtgcttttat

SEQ ID NO: 916128 - DNA, 15 bp, Homo sapiens
tttattgtgctttta

SEQ ID NO: 916129 - DNA, 15 bp, Homo sapiens
ttttattgtgctttt

SEQ ID NO: 916130 - DNA, 15 bp, Homo sapiens
tttttattgtgcttt

SEQ ID NO: 916131 - DNA, 15 bp, Homo sapiens
ttttttattgtgctt

SEQ ID NO: 916132 - DNA, 15 bp, Homo sapiens
gttttttattgtgct

SEQ ID NO: 916133 - DNA, 15 bp, Homo sapiens
ggttttttattgtgc

SEQ ID NO: 916134 - DNA, 15 bp, Homo sapiens
tggttttttattgtg

SEQ ID NO: 916135 - DNA, 15 bp, Homo sapiens
ctggttttttattgt

SEQ ID NO: 916136 - DNA, 15 bp, Homo sapiens
actggttttttattg

SEQ ID NO: 916137 - DNA, 15 bp, Homo sapiens
cactggttttttatt

SEQ ID NO: 916138 - DNA, 15 bp, Homo sapiens
acactggttttttat

SEQ ID NO: 916139 - DNA, 15 bp, Homo sapiens
tacactggtttttta

SEQ ID NO: 916140 - DNA, 15 bp, Homo sapiens
ttacactggtttttt

SEQ ID NO: 916141 - DNA, 15 bp, Homo sapiens
attacactggttttt

SEQ ID NO: 916142 - DNA, 15 bp, Homo sapiens
cattacactggtttt

SEQ ID NO: 916143 - DNA, 15 bp, Homo sapiens
tcattacactggttt

SEQ ID NO: 916144 - DNA, 15 bp, Homo sapiens
atcattacactggtt

SEQ ID NO: 916145 - DNA, 15 bp, Homo sapiens
tatcattacactggt

SEQ ID NO: 916146 - DNA, 15 bp, Homo sapiens
atatcattacactgg

SEQ ID NO: 916147 - DNA, 15 bp, Homo sapiens
tatatcattacactg

SEQ ID NO: 916148 - DNA, 15 bp, Homo sapiens
ttatatcattacact

SEQ ID NO: 916149 - DNA, 15 bp, Homo sapiens
tttatatcattacac

SEQ ID NO: 916150 - DNA, 15 bp, Homo sapiens
atttatatcattaca

SEQ ID NO: 916151 - DNA, 15 bp, Homo sapiens
aatttatatcattac

SEQ ID NO: 916152 - DNA, 15 bp, Homo sapiens
taatttatatcatta

SEQ ID NO: 916153 - DNA, 15 bp, Homo sapiens
ataatttatatcatt

SEQ ID NO: 916154 - DNA, 15 bp, Homo sapiens
tataatttatatcat

SEQ ID NO: 916155 - DNA, 15 bp, Homo sapiens
ctataatttatatca

SEQ ID NO: 916156 - DNA, 15 bp, Homo sapiens
cctataatttatatc

SEQ ID NO: 916157 - DNA, 15 bp, Homo sapiens
gcctataatttatat

SEQ ID NO: 916158 - DNA, 15 bp, Homo sapiens
tgcctataatttata

SEQ ID NO: 916159 - DNA, 15 bp, Homo sapiens
atgcctataatttat

SEQ ID NO: 916160 - DNA, 15 bp, Homo sapiens
tatgcctataattta

SEQ ID NO: 916161 - DNA, 15 bp, Homo sapiens
atatgcctataattt

SEQ ID NO: 916162 - DNA, 15 bp, Homo sapiens
catatgcctataatt

SEQ ID NO: 916163 - DNA, 15 bp, Homo sapiens
acatatgcctataat

SEQ ID NO: 916164 - DNA, 15 bp, Homo sapiens
tacatatgcctataa

SEQ ID NO: 916165 - DNA, 15 bp, Homo sapiens
gtacatatgcctata

SEQ ID NO: 916166 - DNA, 15 bp, Homo sapiens
tgtacatatgcctat

SEQ ID NO: 916167 - DNA, 15 bp, Homo sapiens
atgtacatatgccta

SEQ ID NO: 916168 - DNA, 15 bp, Homo sapiens
aatgtacatatgcct

SEQ ID NO: 916169 - DNA, 15 bp, Homo sapiens
aaatgtacatatgcc

SEQ ID NO: 916170 - DNA, 15 bp, Homo sapiens
aaaatgtacatatgc

SEQ ID NO: 916171 - DNA, 15 bp, Homo sapiens
gaaaatgtacatatg

SEQ ID NO: 916172 - DNA, 15 bp, Homo sapiens
ggaaaatgtacatat

SEQ ID NO: 916173 - DNA, 15 bp, Homo sapiens
aggaaaatgtacata

SEQ ID NO: 916174 - DNA, 15 bp, Homo sapiens
aaggaaaatgtacat

SEQ ID NO: 916175 - DNA, 15 bp, Homo sapiens
aaaggaaaatgtaca

SEQ ID NO: 916176 - DNA, 15 bp, Homo sapiens
taaaggaaaatgtac

SEQ ID NO: 916177 - DNA, 15 bp, Homo sapiens
ctaaaggaaaatgta

SEQ ID NO: 916178 - DNA, 15 bp, Homo sapiens
tctaaaggaaaatgt

SEQ ID NO: 916179 - DNA, 15 bp, Homo sapiens
gtctaaaggaaaatg

SEQ ID NO: 916180 - DNA, 15 bp, Homo sapiens
agtctaaaggaaaat

SEQ ID NO: 916181 - DNA, 15 bp, Homo sapiens
aagtctaaaggaaaa

SEQ ID NO: 916182 - DNA, 15 bp, Homo sapiens
taagtctaaaggaaa

SEQ ID NO: 916183 - DNA, 15 bp, Homo sapiens
ctaagtctaaaggaa

SEQ ID NO: 916184 - DNA, 15 bp, Homo sapiens
actaagtctaaagga

SEQ ID NO: 916185 - DNA, 15 bp, Homo sapiens
tactaagtctaaagg

SEQ ID NO: 916186 - DNA, 15 bp, Homo sapiens
ttactaagtctaaag

SEQ ID NO: 916187 - DNA, 15 bp, Homo sapiens
tttactaagtctaaa

SEQ ID NO: 916188 - DNA, 15 bp, Homo sapiens
ttttactaagtctaa

SEQ ID NO: 916189 - DNA, 15 bp, Homo sapiens
tttttactaagtcta

SEQ ID NO: 916190 - DNA, 15 bp, Homo sapiens
ttttttactaagtct

SEQ ID NO: 916191 - DNA, 15 bp, Homo sapiens
tttttttactaagtc

SEQ ID NO: 916192 - DNA, 15 bp, Homo sapiens
ttttttttactaagt

SEQ ID NO: 916193 - DNA, 15 bp, Homo sapiens
tttttttttactaag

SEQ ID NO: 916194 - DNA, 15 bp, Homo sapiens
ttttttttttactaa

SEQ ID NO: 916195 - DNA, 15 bp, Homo sapiens
attttttttttacta

SEQ ID NO: 916196 - DNA, 15 bp, Homo sapiens
gattttttttttact

SEQ ID NO: 916197 - DNA, 15 bp, Homo sapiens
tgattttttttttac

SEQ ID NO: 916198 - DNA, 15 bp, Homo sapiens
atgatttttttttta

SEQ ID NO: 916199 - DNA, 15 bp, Homo sapiens
catgatttttttttt

SEQ ID NO: 916200 - DNA, 15 bp, Homo sapiens
tcatgattttttttt

SEQ ID NO: 916201 - DNA, 15 bp, Homo sapiens
ttcatgatttttttt

SEQ ID NO: 916202 - DNA, 15 bp, Homo sapiens
gttcatgattttttt

SEQ ID NO: 916203 - DNA, 15 bp, Homo sapiens
agttcatgatttttt

SEQ ID NO: 916204 - DNA, 15 bp, Homo sapiens
aagttcatgattttt

SEQ ID NO: 916205 - DNA, 15 bp, Homo sapiens
caagttcatgatttt

SEQ ID NO: 916206 - DNA, 15 bp, Homo sapiens
tcaagttcatgattt

SEQ ID NO: 916207 - DNA, 15 bp, Homo sapiens
atcaagttcatgatt

SEQ ID NO: 916208 - DNA, 15 bp, Homo sapiens
tatcaagttcatgat

SEQ ID NO: 916209 - DNA, 15 bp, Homo sapiens
ttatcaagttcatga

SEQ ID NO: 916210 - DNA, 15 bp, Homo sapiens
tttatcaagttcatg

SEQ ID NO: 916211 - DNA, 15 bp, Homo sapiens
atttatcaagttcat

SEQ ID NO: 916212 - DNA, 15 bp, Homo sapiens
aatttatcaagttca

SEQ ID NO: 916213 - DNA, 15 bp, Homo sapiens
aaatttatcaagttc

SEQ ID NO: 916214 - DNA, 15 bp, Homo sapiens
taaatttatcaagtt

SEQ ID NO: 916215 - DNA, 15 bp, Homo sapiens
ataaatttatcaagt

SEQ ID NO: 916216 - DNA, 15 bp, Homo sapiens
aataaatttatcaag

SEQ ID NO: 916217 - DNA, 15 bp, Homo sapiens
gaataaatttatcaa

SEQ ID NO: 916218 - DNA, 15 bp, Homo sapiens
tgaataaatttatca

SEQ ID NO: 916219 - DNA, 15 bp, Homo sapiens
ttgaataaatttatc

SEQ ID NO: 916220 - DNA, 15 bp, Homo sapiens
cttgaataaatttat

SEQ ID NO: 916221 - DNA, 15 bp, Homo sapiens
acttgaataaattta

SEQ ID NO: 916222 - DNA, 15 bp, Homo sapiens
tacttgaataaattt

SEQ ID NO: 916223 - DNA, 15 bp, Homo sapiens
ttacttgaataaatt

SEQ ID NO: 916224 - DNA, 15 bp, Homo sapiens
tttacttgaataaat

SEQ ID NO: 916225 - DNA, 15 bp, Homo sapiens
gtttacttgaataaa

SEQ ID NO: 916226 - DNA, 15 bp, Homo sapiens
ggtttacttgaataa

SEQ ID NO: 916227 - DNA, 15 bp, Homo sapiens
tggtttacttgaata

SEQ ID NO: 916228 - DNA, 15 bp, Homo sapiens
atggtttacttgaat

SEQ ID NO: 916229 - DNA, 15 bp, Homo sapiens
catggtttacttgaa

SEQ ID NO: 916230 - DNA, 15 bp, Homo sapiens
acatggtttacttga

SEQ ID NO: 916231 - DNA, 15 bp, Homo sapiens
aacatggtttacttg

SEQ ID NO: 916232 - DNA, 15 bp, Homo sapiens
taacatggtttactt

SEQ ID NO: 916233 - DNA, 15 bp, Homo sapiens
ataacatggtttact

SEQ ID NO: 916234 - DNA, 15 bp, Homo sapiens
tataacatggtttac

SEQ ID NO: 916235 - DNA, 15 bp, Homo sapiens
atataacatggttta

SEQ ID NO: 916236 - DNA, 15 bp, Homo sapiens
aatataacatggttt

SEQ ID NO: 916237 - DNA, 15 bp, Homo sapiens
aaatataacatggtt

SEQ ID NO: 916238 - DNA, 15 bp, Homo sapiens
aaaatataacatggt

SEQ ID NO: 916239 - DNA, 15 bp, Homo sapiens
taaaatataacatgg

SEQ ID NO: 916240 - DNA, 15 bp, Homo sapiens
ttaaaatataacatg

SEQ ID NO: 916241 - DNA, 15 bp, Homo sapiens
tttaaaatataacat

SEQ ID NO: 916242 - DNA, 15 bp, Homo sapiens
atttaaaatataaca

SEQ ID NO: 916243 - DNA, 15 bp, Homo sapiens
aatttaaaatataac

SEQ ID NO: 916244 - DNA, 15 bp, Homo sapiens
taatttaaaatataa

SEQ ID NO: 916245 - DNA, 15 bp, Homo sapiens
ttaatttaaaatata

SEQ ID NO: 916246 - DNA, 15 bp, Homo sapiens
tttaatttaaaatat

SEQ ID NO: 916247 - DNA, 15 bp, Homo sapiens
atttaatttaaaata

SEQ ID NO: 916248 - DNA, 15 bp, Homo sapiens
aatttaatttaaaat

SEQ ID NO: 916249 - DNA, 15 bp, Homo sapiens
caatttaatttaaaa

SEQ ID NO: 916250 - DNA, 15 bp, Homo sapiens
ccaatttaatttaaa

SEQ ID NO: 916251 - DNA, 15 bp, Homo sapiens
tccaatttaatttaa

SEQ ID NO: 916252 - DNA, 15 bp, Homo sapiens
atccaatttaattta

SEQ ID NO: 916253 - DNA, 15 bp, Homo sapiens
tatccaatttaattt

SEQ ID NO: 916254 - DNA, 15 bp, Homo sapiens
atatccaatttaatt

SEQ ID NO: 916255 - DNA, 15 bp, Homo sapiens
aatatccaatttaat

SEQ ID NO: 916256 - DNA, 15 bp, Homo sapiens
aaatatccaatttaa

SEQ ID NO: 916257 - DNA, 15 bp, Homo sapiens
aaaatatccaattta

SEQ ID NO: 916258 - DNA, 15 bp, Homo sapiens
aaaaatatccaattt

SEQ ID NO: 916259 - DNA, 15 bp, Homo sapiens
gaaaaatatccaatt

SEQ ID NO: 916260 - DNA, 15 bp, Homo sapiens
tgaaaaatatccaat

SEQ ID NO: 916261 - DNA, 15 bp, Homo sapiens
ctgaaaaatatccaa

SEQ ID NO: 916262 - DNA, 15 bp, Homo sapiens
cctgaaaaatatcca

SEQ ID NO: 916263 - DNA, 15 bp, Homo sapiens
ccctgaaaaatatcc

SEQ ID NO: 916264 - DNA, 15 bp, Homo sapiens
tccctgaaaaatatc

SEQ ID NO: 916265 - DNA, 15 bp, Homo sapiens
ctccctgaaaaatat

SEQ ID NO: 916266 - DNA, 15 bp, Homo sapiens
actccctgaaaaata

SEQ ID NO: 916267 - DNA, 15 bp, Homo sapiens
tactccctgaaaaat

SEQ ID NO: 916268 - DNA, 15 bp, Homo sapiens
atactccctgaaaaa

SEQ ID NO: 916269 - DNA, 15 bp, Homo sapiens
tatactccctgaaaa

SEQ ID NO: 916270 - DNA, 15 bp, Homo sapiens
atatactccctgaaa

SEQ ID NO: 916271 - DNA, 15 bp, Homo sapiens
catatactccctgaa

SEQ ID NO: 916272 - DNA, 15 bp, Homo sapiens
ccatatactccctga

SEQ ID NO: 916273 - DNA, 15 bp, Homo sapiens
accatatactccctg

SEQ ID NO: 916274 - DNA, 15 bp, Homo sapiens
aaccatatactccct

SEQ ID NO: 916275 - DNA, 15 bp, Homo sapiens
aaaccatatactccc

SEQ ID NO: 916276 - DNA, 15 bp, Homo sapiens
taaaccatatactcc

SEQ ID NO: 916277 - DNA, 15 bp, Homo sapiens
ctaaaccatatactc

SEQ ID NO: 916278 - DNA, 15 bp, Homo sapiens
tctaaaccatatact

SEQ ID NO: 916279 - DNA, 15 bp, Homo sapiens
ttctaaaccatatac

SEQ ID NO: 916280 - DNA, 15 bp, Homo sapiens
cttctaaaccatata

SEQ ID NO: 916281 - DNA, 15 bp, Homo sapiens
tcttctaaaccatat

SEQ ID NO: 916282 - DNA, 15 bp, Homo sapiens
atcttctaaaccata

SEQ ID NO: 916283 - DNA, 15 bp, Homo sapiens
catcttctaaaccat

SEQ ID NO: 916284 - DNA, 15 bp, Homo sapiens
gcatcttctaaacca

SEQ ID NO: 916285 - DNA, 15 bp, Homo sapiens
agcatcttctaaacc

SEQ ID NO: 916286 - DNA, 15 bp, Homo sapiens
cagcatcttctaaac

SEQ ID NO: 916287 - DNA, 15 bp, Homo sapiens
acagcatcttctaaa

SEQ ID NO: 916288 - DNA, 15 bp, Homo sapiens
gacagcatcttctaa

SEQ ID NO: 916289 - DNA, 15 bp, Homo sapiens
cgacagcatcttcta

SEQ ID NO: 916290 - DNA, 15 bp, Homo sapiens
acgacagcatcttct

SEQ ID NO: 916291 - DNA, 15 bp, Homo sapiens
aacgacagcatcttc

SEQ ID NO: 916292 - DNA, 15 bp, Homo sapiens
caacgacagcatctt

SEQ ID NO: 916293 - DNA, 15 bp, Homo sapiens
tcaacgacagcatct

SEQ ID NO: 916294 - DNA, 15 bp, Homo sapiens
ttcaacgacagcatc

SEQ ID NO: 916295 - DNA, 15 bp, Homo sapiens
tttcaacgacagcat

SEQ ID NO: 916296 - DNA, 15 bp, Homo sapiens
atttcaacgacagca

SEQ ID NO: 916297 - DNA, 15 bp, Homo sapiens
tatttcaacgacagc

SEQ ID NO: 916298 - DNA, 15 bp, Homo sapiens
ttatttcaacgacag

SEQ ID NO: 916299 - DNA, 15 bp, Homo sapiens
tttatttcaacgaca

SEQ ID NO: 916300 - DNA, 15 bp, Homo sapiens
ctttatttcaacgac

SEQ ID NO: 916301 - DNA, 15 bp, Homo sapiens
tctttatttcaacga

SEQ ID NO: 916302 - DNA, 15 bp, Homo sapiens
ttctttatttcaacg

SEQ ID NO: 916303 - DNA, 15 bp, Homo sapiens
attctttatttcaac

SEQ ID NO: 916304 - DNA, 15 bp, Homo sapiens
aattctttatttcaa

SEQ ID NO: 916305 - DNA, 15 bp, Homo sapiens
caattctttatttca

SEQ ID NO: 916306 - DNA, 15 bp, Homo sapiens
acaattctttatttc

SEQ ID NO: 916307 - DNA, 15 bp, Homo sapiens
tacaattctttattt

SEQ ID NO: 916308 - DNA, 15 bp, Homo sapiens
ttacaattctttatt

SEQ ID NO: 916309 - DNA, 15 bp, Homo sapiens
tttacaattctttat

SEQ ID NO: 916310 - DNA, 15 bp, Homo sapiens
ttttacaattcttta

SEQ ID NO: 916311 - DNA, 15 bp, Homo sapiens
tttttacaattcttt

SEQ ID NO: 916312 - DNA, 15 bp, Homo sapiens
gtttttacaattctt

SEQ ID NO: 916313 - DNA, 15 bp, Homo sapiens
ggtttttacaattct

SEQ ID NO: 916314 - DNA, 15 bp, Homo sapiens
tggtttttacaattc

SEQ ID NO: 916315 - DNA, 15 bp, Homo sapiens
ttggtttttacaatt

SEQ ID NO: 916316 - DNA, 15 bp, Homo sapiens
tttggtttttacaat

SEQ ID NO: 916317 - DNA, 15 bp, Homo sapiens
atttggtttttacaa

SEQ ID NO: 916318 - DNA, 15 bp, Homo sapiens
aatttggtttttaca

SEQ ID NO: 916319 - DNA, 15 bp, Homo sapiens
taatttggtttttac

SEQ ID NO: 916320 - DNA, 15 bp, Homo sapiens
ttaatttggttttta

SEQ ID NO: 916321 - DNA, 15 bp, Homo sapiens
tttaatttggttttt

SEQ ID NO: 916322 - DNA, 15 bp, Homo sapiens
ttttaatttggtttt

SEQ ID NO: 916323 - DNA, 15 bp, Homo sapiens
attttaatttggttt

SEQ ID NO: 916324 - DNA, 15 bp, Homo sapiens
tattttaatttggtt

SEQ ID NO: 916325 - DNA, 15 bp, Homo sapiens
ttattttaatttggt

SEQ ID NO: 916326 - DNA, 15 bp, Homo sapiens
cttattttaatttgg

SEQ ID NO: 916327 - DNA, 15 bp, Homo sapiens
tcttattttaatttg

SEQ ID NO: 916328 - DNA, 15 bp, Homo sapiens
ctcttattttaattt

SEQ ID NO: 916329 - DNA, 15 bp, Homo sapiens
tctcttattttaatt

SEQ ID NO: 916330 - DNA, 15 bp, Homo sapiens
atctcttattttaat

SEQ ID NO: 916331 - DNA, 15 bp, Homo sapiens
gatctcttattttaa

SEQ ID NO: 916332 - DNA, 15 bp, Homo sapiens
cgatctcttatttta

SEQ ID NO: 916333 - DNA, 15 bp, Homo sapiens
tcgatctcttatttt

SEQ ID NO: 916334 - DNA, 15 bp, Homo sapiens
ctcgatctcttattt

SEQ ID NO: 916335 - DNA, 15 bp, Homo sapiens
tctcgatctcttatt

SEQ ID NO: 916336 - DNA, 15 bp, Homo sapiens
ctctcgatctcttat

SEQ ID NO: 916337 - DNA, 15 bp, Homo sapiens
tctctcgatctctta

SEQ ID NO: 916338 - DNA, 15 bp, Homo sapiens
atctctcgatctctt

SEQ ID NO: 916339 - DNA, 15 bp, Homo sapiens
aatctctcgatctct

SEQ ID NO: 916340 - DNA, 15 bp, Homo sapiens
caatctctcgatctc

SEQ ID NO: 916341 - DNA, 15 bp, Homo sapiens
tcaatctctcgatct

SEQ ID NO: 916342 - DNA, 15 bp, Homo sapiens
ttcaatctctcgatc

SEQ ID NO: 916343 - DNA, 15 bp, Homo sapiens
tttcaatctctcgat

SEQ ID NO: 916344 - DNA, 15 bp, Homo sapiens
atttcaatctctcga

SEQ ID NO: 916345 - DNA, 15 bp, Homo sapiens
tatttcaatctctcg

SEQ ID NO: 916346 - DNA, 15 bp, Homo sapiens
atatttcaatctctc

SEQ ID NO: 916347 - DNA, 15 bp, Homo sapiens
aatatttcaatctct

SEQ ID NO: 916348 - DNA, 15 bp, Homo sapiens
taatatttcaatctc

SEQ ID NO: 916349 - DNA, 15 bp, Homo sapiens
ttaatatttcaatct

SEQ ID NO: 916350 - DNA, 15 bp, Homo sapiens
gttaatatttcaatc

SEQ ID NO: 916351 - DNA, 15 bp, Homo sapiens
tgttaatatttcaat

SEQ ID NO: 916352 - DNA, 15 bp, Homo sapiens
ttgttaatatttcaa

SEQ ID NO: 916353 - DNA, 15 bp, Homo sapiens
tttgttaatatttca

SEQ ID NO: 916354 - DNA, 15 bp, Homo sapiens
ctttgttaatatttc

SEQ ID NO: 916355 - DNA, 15 bp, Homo sapiens
cctttgttaatattt

SEQ ID NO: 916356 - DNA, 15 bp, Homo sapiens
tcctttgttaatatt

SEQ ID NO: 916357 - DNA, 15 bp, Homo sapiens
ttcctttgttaatat

SEQ ID NO: 916358 - DNA, 15 bp, Homo sapiens
tttcctttgttaata

SEQ ID NO: 916359 - DNA, 15 bp, Homo sapiens
atttcctttgttaat

SEQ ID NO: 916360 - DNA, 15 bp, Homo sapiens
gatttcctttgttaa

SEQ ID NO: 916361 - DNA, 15 bp, Homo sapiens
tgatttcctttgtta

SEQ ID NO: 916362 - DNA, 15 bp, Homo sapiens
ttgatttcctttgtt

SEQ ID NO: 916363 - DNA, 15 bp, Homo sapiens
attgatttcctttgt

SEQ ID NO: 916364 - DNA, 15 bp, Homo sapiens
tattgatttcctttg

SEQ ID NO: 916365 - DNA, 15 bp, Homo sapiens
ttattgatttccttt

SEQ ID NO: 916366 - DNA, 15 bp, Homo sapiens
tttattgatttcctt

SEQ ID NO: 916367 - DNA, 15 bp, Homo sapiens
gtttattgatttcct

SEQ ID NO: 916368 - DNA, 15 bp, Homo sapiens
agtttattgatttcc

SEQ ID NO: 916369 - DNA, 15 bp, Homo sapiens
aagtttattgatttc

SEQ ID NO: 916370 - DNA, 15 bp, Homo sapiens
caagtttattgattt

SEQ ID NO: 916371 - DNA, 15 bp, Homo sapiens
tcaagtttattgatt

SEQ ID NO: 916372 - DNA, 15 bp, Homo sapiens
ttcaagtttattgat

SEQ ID NO: 916373 - DNA, 15 bp, Homo sapiens
attcaagtttattga

SEQ ID NO: 916374 - DNA, 15 bp, Homo sapiens
aattcaagtttattg

SEQ ID NO: 916375 - DNA, 15 bp, Homo sapiens
caattcaagtttatt

SEQ ID NO: 916376 - DNA, 15 bp, Homo sapiens
tcaattcaagtttat

SEQ ID NO: 916377 - DNA, 15 bp, Homo sapiens
ttcaattcaagttta

SEQ ID NO: 916378 - DNA, 15 bp, Homo sapiens
cttcaattcaagttt

SEQ ID NO: 916379 - DNA, 15 bp, Homo sapiens
tcttcaattcaagtt

SEQ ID NO: 916380 - DNA, 15 bp, Homo sapiens
atcttcaattcaagt

SEQ ID NO: 916381 - DNA, 15 bp, Homo sapiens
gatcttcaattcaag

SEQ ID NO: 916382 - DNA, 15 bp, Homo sapiens
tgatcttcaattcaa

SEQ ID NO: 916383 - DNA, 15 bp, Homo sapiens
ctgatcttcaattca

SEQ ID NO: 916384 - DNA, 15 bp, Homo sapiens
actgatcttcaattc

SEQ ID NO: 916385 - DNA, 15 bp, Homo sapiens
cactgatcttcaatt

SEQ ID NO: 916386 - DNA, 15 bp, Homo sapiens
tcactgatcttcaat

SEQ ID NO: 916387 - DNA, 15 bp, Homo sapiens
atcactgatcttcaa

SEQ ID NO: 916388 - DNA, 15 bp, Homo sapiens
aatcactgatcttca

SEQ ID NO: 916389 - DNA, 15 bp, Homo sapiens
aaatcactgatcttc

SEQ ID NO: 916390 - DNA, 15 bp, Homo sapiens
gaaatcactgatctt

SEQ ID NO: 916391 - DNA, 15 bp, Homo sapiens
ggaaatcactgatct

SEQ ID NO: 916392 - DNA, 15 bp, Homo sapiens
aggaaatcactgatc

SEQ ID NO: 916393 - DNA, 15 bp, Homo sapiens
aaggaaatcactgat

SEQ ID NO: 916394 - DNA, 15 bp, Homo sapiens
caaggaaatcactga

SEQ ID NO: 916395 - DNA, 15 bp, Homo sapiens
tcaaggaaatcactg

SEQ ID NO: 916396 - DNA, 15 bp, Homo sapiens
atcaaggaaatcact

SEQ ID NO: 916397 - DNA, 15 bp, Homo sapiens
catcaaggaaatcac

SEQ ID NO: 916398 - DNA, 15 bp, Homo sapiens
tcatcaaggaaatca

SEQ ID NO: 916399 - DNA, 15 bp, Homo sapiens
ttcatcaaggaaatc

SEQ ID NO: 916400 - DNA, 15 bp, Homo sapiens
tttcatcaaggaaat

SEQ ID NO: 916401 - DNA, 15 bp, Homo sapiens
ttttcatcaaggaaa

SEQ ID NO: 916402 - DNA, 15 bp, Homo sapiens
attttcatcaaggaa

SEQ ID NO: 916403 - DNA, 15 bp, Homo sapiens
cattttcatcaagga

SEQ ID NO: 916404 - DNA, 15 bp, Homo sapiens
tcattttcatcaagg

SEQ ID NO: 916405 - DNA, 15 bp, Homo sapiens
ctcattttcatcaag

SEQ ID NO: 916406 - DNA, 15 bp, Homo sapiens
cctcattttcatcaa

SEQ ID NO: 916407 - DNA, 15 bp, Homo sapiens
gcctcattttcatca

SEQ ID NO: 916408 - DNA, 15 bp, Homo sapiens
tgcctcattttcatc

SEQ ID NO: 916409 - DNA, 15 bp, Homo sapiens
gtgcctcattttcat

SEQ ID NO: 916410 - DNA, 15 bp, Homo sapiens
agtgcctcattttca

SEQ ID NO: 916411 - DNA, 15 bp, Homo sapiens
aagtgcctcattttc

SEQ ID NO: 916412 - DNA, 15 bp, Homo sapiens
taagtgcctcatttt

SEQ ID NO: 916413 - DNA, 15 bp, Homo sapiens
ctaagtgcctcattt

SEQ ID NO: 916414 - DNA, 15 bp, Homo sapiens
tctaagtgcctcatt

SEQ ID NO: 916415 - DNA, 15 bp, Homo sapiens
ctctaagtgcctcat

SEQ ID NO: 916416 - DNA, 15 bp, Homo sapiens
tctctaagtgcctca

SEQ ID NO: 916417 - DNA, 15 bp, Homo sapiens
ctctctaagtgcctc

SEQ ID NO: 916418 - DNA, 15 bp, Homo sapiens
gctctctaagtgcct

SEQ ID NO: 916419 - DNA, 15 bp, Homo sapiens
cgctctctaagtgcc

SEQ ID NO: 916420 - DNA, 15 bp, Homo sapiens
acgctctctaagtgc

SEQ ID NO: 916421 - DNA, 15 bp, Homo sapiens
cacgctctctaagtg

SEQ ID NO: 916422 - DNA, 15 bp, Homo sapiens
acacgctctctaagt

SEQ ID NO: 916423 - DNA, 15 bp, Homo sapiens
cacacgctctctaag

SEQ ID NO: 916424 - DNA, 15 bp, Homo sapiens
ccacacgctctctaa

SEQ ID NO: 916425 - DNA, 15 bp, Homo sapiens
cccacacgctctcta

SEQ ID NO: 916426 - DNA, 15 bp, Homo sapiens
acccacacgctctct

SEQ ID NO: 916427 - DNA, 15 bp, Homo sapiens
tacccacacgctctc

SEQ ID NO: 916428 - DNA, 15 bp, Homo sapiens
ttacccacacgctct

SEQ ID NO: 916429 - DNA, 15 bp, Homo sapiens
cttacccacacgctc

SEQ ID NO: 916430 - DNA, 15 bp, Homo sapiens
gcttacccacacgct

SEQ ID NO: 916431 - DNA, 15 bp, Homo sapiens
ggcttacccacacgc

SEQ ID NO: 916432 - DNA, 15 bp, Homo sapiens
tggcttacccacacg

SEQ ID NO: 916433 - DNA, 15 bp, Homo sapiens
atggcttacccacac

SEQ ID NO: 916434 - DNA, 15 bp, Homo sapiens
catggcttacccaca

SEQ ID NO: 916435 - DNA, 15 bp, Homo sapiens
acatggcttacccac

SEQ ID NO: 916436 - DNA, 15 bp, Homo sapiens
aacatggcttaccca

SEQ ID NO: 916437 - DNA, 15 bp, Homo sapiens
aaacatggcttaccc

SEQ ID NO: 916438 - DNA, 15 bp, Homo sapiens
aaaacatggcttacc

SEQ ID NO: 916439 - DNA, 15 bp, Homo sapiens
taaaacatggcttac

SEQ ID NO: 916440 - DNA, 15 bp, Homo sapiens
ttaaaacatggctta

SEQ ID NO: 916441 - DNA, 15 bp, Homo sapiens
cttaaaacatggctt

SEQ ID NO: 916442 - DNA, 15 bp, Homo sapiens
acttaaaacatggct

SEQ ID NO: 916443 - DNA, 15 bp, Homo sapiens
aacttaaaacatggc

SEQ ID NO: 916444 - DNA, 15 bp, Homo sapiens
taacttaaaacatgg

SEQ ID NO: 916445 - DNA, 15 bp, Homo sapiens
gtaacttaaaacatg

SEQ ID NO: 916446 - DNA, 15 bp, Homo sapiens
tgtaacttaaaacat

SEQ ID NO: 916447 - DNA, 15 bp, Homo sapiens
atgtaacttaaaaca

SEQ ID NO: 916448 - DNA, 15 bp, Homo sapiens
tatgtaacttaaaac

SEQ ID NO: 916449 - DNA, 15 bp, Homo sapiens
ctatgtaacttaaaa

SEQ ID NO: 916450 - DNA, 15 bp, Homo sapiens
actatgtaacttaaa

SEQ ID NO: 916451 - DNA, 15 bp, Homo sapiens
aactatgtaacttaa

SEQ ID NO: 916452 - DNA, 15 bp, Homo sapiens
aaactatgtaactta

SEQ ID NO: 916453 - DNA, 15 bp, Homo sapiens
caaactatgtaactt

SEQ ID NO: 916454 - DNA, 15 bp, Homo sapiens
gcaaactatgtaact

SEQ ID NO: 916455 - DNA, 15 bp, Homo sapiens
cgcaaactatgtaac

SEQ ID NO: 916456 - DNA, 15 bp, Homo sapiens
gcgcaaactatgtaa

SEQ ID NO: 916457 - DNA, 15 bp, Homo sapiens
tgcgcaaactatgta

SEQ ID NO: 916458 - DNA, 15 bp, Homo sapiens
ttgcgcaaactatgt

SEQ ID NO: 916459 - DNA, 15 bp, Homo sapiens
gttgcgcaaactatg

SEQ ID NO: 916460 - DNA, 15 bp, Homo sapiens
ggttgcgcaaactat

SEQ ID NO: 916461 - DNA, 15 bp, Homo sapiens
aggttgcgcaaacta

SEQ ID NO: 916462 - DNA, 15 bp, Homo sapiens
caggttgcgcaaact

SEQ ID NO: 916463 - DNA, 15 bp, Homo sapiens
tcaggttgcgcaaac

SEQ ID NO: 916464 - DNA, 15 bp, Homo sapiens
atcaggttgcgcaaa

SEQ ID NO: 916465 - DNA, 15 bp, Homo sapiens
aatcaggttgcgcaa

SEQ ID NO: 916466 - DNA, 15 bp, Homo sapiens
aaatcaggttgcgca

SEQ ID NO: 916467 - DNA, 15 bp, Homo sapiens
taaatcaggttgcgc

SEQ ID NO: 916468 - DNA, 15 bp, Homo sapiens
gtaaatcaggttgcg

SEQ ID NO: 916469 - DNA, 15 bp, Homo sapiens
tgtaaatcaggttgc

SEQ ID NO: 916470 - DNA, 15 bp, Homo sapiens
ttgtaaatcaggttg

SEQ ID NO: 916471 - DNA, 15 bp, Homo sapiens
cttgtaaatcaggtt

SEQ ID NO: 916472 - DNA, 15 bp, Homo sapiens
acttgtaaatcaggt

SEQ ID NO: 916473 - DNA, 15 bp, Homo sapiens
gacttgtaaatcagg

SEQ ID NO: 916474 - DNA, 15 bp, Homo sapiens
agacttgtaaatcag

SEQ ID NO: 916475 - DNA, 15 bp, Homo sapiens
aagacttgtaaatca

SEQ ID NO: 916476 - DNA, 15 bp, Homo sapiens
aaagacttgtaaatc

SEQ ID NO: 916477 - DNA, 15 bp, Homo sapiens
aaaagacttgtaaat

SEQ ID NO: 916478 - DNA, 15 bp, Homo sapiens
aaaaagacttgtaaa

SEQ ID NO: 916479 - DNA, 15 bp, Homo sapiens
aaaaaagacttgtaa

SEQ ID NO: 916480 - DNA, 15 bp, Homo sapiens
aaaaaaagacttgta

SEQ ID NO: 916481 - DNA, 15 bp, Homo sapiens
aaaaaaaagacttgt

SEQ ID NO: 916482 - DNA, 15 bp, Homo sapiens
aaaaaaaaagacttg

SEQ ID NO: 916483 - DNA, 15 bp, Homo sapiens
taaaaaaaaagactt

SEQ ID NO: 916484 - DNA, 15 bp, Homo sapiens
ttaaaaaaaaagact

SEQ ID NO: 916485 - DNA, 15 bp, Homo sapiens
attaaaaaaaaagac

SEQ ID NO: 916486 - DNA, 15 bp, Homo sapiens
aattaaaaaaaaaga

SEQ ID NO: 916487 - DNA, 15 bp, Homo sapiens
aaattaaaaaaaaag

SEQ ID NO: 916488 - DNA, 15 bp, Homo sapiens
taaattaaaaaaaaa

SEQ ID NO: 916489 - DNA, 15 bp, Homo sapiens
ttaaattaaaaaaaa

SEQ ID NO: 916490 - DNA, 15 bp, Homo sapiens
tttaaattaaaaaaa

SEQ ID NO: 916491 - DNA, 15 bp, Homo sapiens
atttaaattaaaaaa

SEQ ID NO: 916492 - DNA, 15 bp, Homo sapiens
aatttaaattaaaaa

SEQ ID NO: 916493 - DNA, 15 bp, Homo sapiens
aaatttaaattaaaa

SEQ ID NO: 916494 - DNA, 15 bp, Homo sapiens
aaaatttaaattaaa

SEQ ID NO: 916495 - DNA, 15 bp, Homo sapiens
caaaatttaaattaa

SEQ ID NO: 916496 - DNA, 15 bp, Homo sapiens
acaaaatttaaatta

SEQ ID NO: 916497 - DNA, 15 bp, Homo sapiens
aacaaaatttaaatt

SEQ ID NO: 916498 - DNA, 15 bp, Homo sapiens
aaacaaaatttaaat

SEQ ID NO: 916499 - DNA, 15 bp, Homo sapiens
taaacaaaatttaaa

SEQ ID NO: 916500 - DNA, 15 bp, Homo sapiens
ataaacaaaatttaa

SEQ ID NO: 916501 - DNA, 15 bp, Homo sapiens
aataaacaaaattta

SEQ ID NO: 916502 - DNA, 15 bp, Homo sapiens
taataaacaaaattt

SEQ ID NO: 916503 - DNA, 15 bp, Homo sapiens
ataataaacaaaatt

SEQ ID NO: 916504 - DNA, 15 bp, Homo sapiens
aataataaacaaaat

SEQ ID NO: 916505 - DNA, 15 bp, Homo sapiens
taataataaacaaaa

SEQ ID NO: 916506 - DNA, 15 bp, Homo sapiens
ataataataaacaaa

SEQ ID NO: 916507 - DNA, 15 bp, Homo sapiens
aataataataaacaa

SEQ ID NO: 916508 - DNA, 15 bp, Homo sapiens
aaataataataaaca

SEQ ID NO: 916509 - DNA, 15 bp, Homo sapiens
taaataataataaac

SEQ ID NO: 916510 - DNA, 15 bp, Homo sapiens
ataaataataataaa

SEQ ID NO: 916511 - DNA, 15 bp, Homo sapiens
aataaataataataa

SEQ ID NO: 916512 - DNA, 15 bp, Homo sapiens
taataaataataata

SEQ ID NO: 916513 - DNA, 15 bp, Homo sapiens
ttaataaataataat

SEQ ID NO: 916514 - DNA, 15 bp, Homo sapiens
cttaataaataataa

SEQ ID NO: 916515 - DNA, 15 bp, Homo sapiens
acttaataaataata

SEQ ID NO: 916516 - DNA, 15 bp, Homo sapiens
tacttaataaataat

SEQ ID NO: 916517 - DNA, 15 bp, Homo sapiens
ctacttaataaataa

SEQ ID NO: 916518 - DNA, 15 bp, Homo sapiens
actacttaataaata

SEQ ID NO: 916519 - DNA, 15 bp, Homo sapiens
aactacttaataaat

SEQ ID NO: 916520 - DNA, 15 bp, Homo sapiens
aaactacttaataaa

SEQ ID NO: 916521 - DNA, 15 bp, Homo sapiens
taaactacttaataa

SEQ ID NO: 916522 - DNA, 15 bp, Homo sapiens
ttaaactacttaata

SEQ ID NO: 916523 - DNA, 15 bp, Homo sapiens
attaaactacttaat

SEQ ID NO: 916524 - DNA, 15 bp, Homo sapiens
cattaaactacttaa

SEQ ID NO: 916525 - DNA, 15 bp, Homo sapiens
gcattaaactactta

SEQ ID NO: 916526 - DNA, 15 bp, Homo sapiens
agcattaaactactt

SEQ ID NO: 916527 - DNA, 15 bp, Homo sapiens
aagcattaaactact

SEQ ID NO: 916528 - DNA, 15 bp, Homo sapiens
aaagcattaaactac

SEQ ID NO: 916529 - DNA, 15 bp, Homo sapiens
aaaagcattaaacta

SEQ ID NO: 916530 - DNA, 15 bp, Homo sapiens
aaaaagcattaaact

SEQ ID NO: 916531 - DNA, 15 bp, Homo sapiens
aaaaaagcattaaac

SEQ ID NO: 916532 - DNA, 15 bp, Homo sapiens
gaaaaaagcattaaa

SEQ ID NO: 916533 - DNA, 15 bp, Homo sapiens
tgaaaaaagcattaa

SEQ ID NO: 916534 - DNA, 15 bp, Homo sapiens
ttgaaaaaagcatta

SEQ ID NO: 916535 - DNA, 15 bp, Homo sapiens
tttgaaaaaagcatt

SEQ ID NO: 916536 - DNA, 15 bp, Homo sapiens
atttgaaaaaagcat

SEQ ID NO: 916537 - DNA, 15 bp, Homo sapiens
catttgaaaaaagca

SEQ ID NO: 916538 - DNA, 15 bp, Homo sapiens
gcatttgaaaaaagc

SEQ ID NO: 916539 - DNA, 15 bp, Homo sapiens
agcatttgaaaaaag

SEQ ID NO: 916540 - DNA, 15 bp, Homo sapiens
aagcatttgaaaaaa

SEQ ID NO: 916541 - DNA, 15 bp, Homo sapiens
aaagcatttgaaaaa

SEQ ID NO: 916542 - DNA, 15 bp, Homo sapiens
aaaagcatttgaaaa

SEQ ID NO: 916543 - DNA, 15 bp, Homo sapiens
taaaagcatttgaaa

SEQ ID NO: 916544 - DNA, 15 bp, Homo sapiens
ataaaagcatttgaa

SEQ ID NO: 916545 - DNA, 15 bp, Homo sapiens
tataaaagcatttga

SEQ ID NO: 916546 - DNA, 15 bp, Homo sapiens
ttataaaagcatttg

SEQ ID NO: 916547 - DNA, 15 bp, Homo sapiens
tttataaaagcattt

SEQ ID NO: 916548 - DNA, 15 bp, Homo sapiens
ttttataaaagcatt

SEQ ID NO: 916549 - DNA, 15 bp, Homo sapiens
gttttataaaagcat

SEQ ID NO: 916550 - DNA, 15 bp, Homo sapiens
tgttttataaaagca
